United States Patent Application Publication US 2005/0255487 A1 - sequence listing, part 86

SEQ ID NO: 2364387 - RNA, 19 nt, Homo sapiens
  misc_RNA (1)...(19): siRNA sense strand
gccuagugcaggaggauaa

SEQ ID NO: 2364388 - RNA, 19 nt, Homo sapiens
  misc_RNA (1)...(19): siRNA sense strand
ccgcaaggcugaaggggaa

SEQ ID NO: 2364389 - RNA, 19 nt, Homo sapiens
  misc_RNA (1)...(19): siRNA sense strand
gcaaaguggcagagcuaga

SEQ ID NO: 2364390 - RNA, 19 nt, Homo sapiens
  misc_RNA (1)...(19): siRNA sense strand
ggacacaggacuaggagau

SEQ ID NO: 2364391 - RNA, 19 nt, Homo sapiens
  misc_RNA (1)...(19): siRNA sense strand
gaggagagaucauagggaa

SEQ ID NO: 2364392 - RNA, 19 nt, Homo sapiens
  misc_RNA (1)...(19): siRNA sense strand
cauaaagugggaagauaaa

SEQ ID NO: 2364393 - RNA, 19 nt, Homo sapiens
  misc_RNA (1)...(19): siRNA sense strand
gagagagagcuguggaaga

SEQ ID NO: 2364394 - RNA, 19 nt, Homo sapiens
  misc_RNA (1)...(19): siRNA sense strand
acaaaagggcagagacuua

SEQ ID NO: 2364395 - RNA, 19 nt, Homo sapiens
  misc_RNA (1)...(19): siRNA sense strand
ccagagagcaggaagaaaa

SEQ ID NO: 2364396 - RNA, 19 nt, Homo sapiens
  misc_RNA (1)...(19): siRNA sense strand
gaacaaggcagcaaggaca

SEQ ID NO: 2364397 - RNA, 19 nt, Homo sapiens
  misc_RNA (1)...(19): siRNA sense strand
aggcugaguuagaagaaau

SEQ ID NO: 2364398 - RNA, 19 nt, Homo sapiens
  misc_RNA (1)...(19): siRNA sense strand
agauaaaguuccaggguug

SEQ ID NO: 2364399 - RNA, 19 nt, Homo sapiens
  misc_RNA (1)...(19): siRNA sense strand
cguagagaugucugagaaa

SEQ ID NO: 2364400 - RNA, 19 nt, Homo sapiens
  misc_RNA (1)...(19): siRNA sense strand
ccaagacggccgugagcaa

SEQ ID NO: 2364401 - RNA, 19 nt, Homo sapiens
  misc_RNA (1)...(19): siRNA sense strand
uggaagaagacaagggcuu

SEQ ID NO: 2364402 - RNA, 19 nt, Homo sapiens
  misc_RNA (1)...(19): siRNA sense strand
caaagacaagguagggaaa

SEQ ID NO: 2364403 - RNA, 19 nt, Homo sapiens
  misc_RNA (1)...(19): siRNA sense strand
acaaagggacacaggacua

SEQ ID NO: 2364404 - RNA, 19 nt, Homo sapiens
  misc_RNA (1)...(19): siRNA sense strand
agcaauagucuuugagauu

SEQ ID NO: 2364405 - RNA, 19 nt, Homo sapiens
  misc_RNA (1)...(19): siRNA sense strand
uagccaagacagagaagaa

SEQ ID NO: 2364406 - RNA, 19 nt, Homo sapiens
  misc_RNA (1)...(19): siRNA sense strand
aguaaaggaggaugugaua

SEQ ID NO: 2364407 - RNA, 19 nt, Homo sapiens
  misc_RNA (1)...(19): siRNA sense strand
aagaaauggaggagguaca

SEQ ID NO: 2364408 - RNA, 19 nt, Homo sapiens
  misc_RNA (1)...(19): siRNA sense strand
uggaagaggaagaggagga

SEQ ID NO: 2364409 - RNA, 19 nt, Homo sapiens
  misc_RNA (1)...(19): siRNA sense strand
agauaaagacuuggaacaa

SEQ ID NO: 2364410 - RNA, 19 nt, Homo sapiens
  misc_RNA (1)...(19): siRNA sense strand
ggaugaagcccuggaacaa

SEQ ID NO: 2364411 - RNA, 19 nt, Homo sapiens
  misc_RNA (1)...(19): siRNA sense strand
cagaaaaggucaaggccau

SEQ ID NO: 2364412 - RNA, 19 nt, Homo sapiens
  misc_RNA (1)...(19): siRNA sense strand
gggcccagaugaugagcaa

SEQ ID NO: 2364413 - RNA, 19 nt, Homo sapiens
  misc_RNA (1)...(19): siRNA sense strand
gaacaugugaugaaggaga

SEQ ID NO: 2364414 - RNA, 19 nt, Homo sapiens
  misc_RNA (1)...(19): siRNA sense strand
uaagauuccagaagagaaa

SEQ ID NO: 2364415 - RNA, 19 nt, Homo sapiens
  misc_RNA (1)...(19): siRNA sense strand
agaaagagcuugucccaga

SEQ ID NO: 2364416 - RNA, 19 nt, Homo sapiens
  misc_RNA (1)...(19): siRNA sense strand
aagauaaagacuuggaaca

SEQ ID NO: 2364417 - RNA, 19 nt, Homo sapiens
  misc_RNA (1)...(19): siRNA sense strand
gugguagagccgaaggaua

SEQ ID NO: 2364418 - RNA, 19 nt, Homo sapiens
  misc_RNA (1)...(19): siRNA sense strand
cccuagaacagaaggacaa

SEQ ID NO: 2364419 - RNA, 19 nt, Homo sapiens
  misc_RNA (1)...(19): siRNA sense strand
acuagagaaggaagagaaa

SEQ ID NO: 2364420 - RNA, 19 nt, Homo sapiens
  misc_RNA (1)...(19): siRNA sense strand
ccucagaacagaagaagga

SEQ ID NO: 2364421 - RNA, 19 nt, Homo sapiens
  misc_RNA (1)...(19): siRNA sense strand
aacagaagccagagaggaa

SEQ ID NO: 2364422 - RNA, 19 nt, Homo sapiens
  misc_RNA (1)...(19): siRNA sense strand
gcagagaggauguggccuu

SEQ ID NO: 2364423 - RNA, 19 nt, Homo sapiens
  misc_RNA (1)...(19): siRNA sense strand
aaggaaggaaggaggagaa

SEQ ID NO: 2364424 - RNA, 19 nt, Homo sapiens
  misc_RNA (1)...(19): siRNA sense strand
aggcuugucuggagagaga

SEQ ID NO: 2364425 - RNA, 19 nt, Homo sapiens
  misc_RNA (1)...(19): siRNA sense strand
ccuagaacagacagacaaa

SEQ ID NO: 2364426 - RNA, 19 nt, Homo sapiens
  misc_RNA (1)...(19): siRNA sense strand
ggccagaaacugaggcaca

SEQ ID NO: 2364427 - RNA, 19 nt, Homo sapiens
  misc_RNA (1)...(19): siRNA sense strand
gaaaagaagcagagggaag

SEQ ID NO: 2364428 - RNA, 19 nt, Homo sapiens
  misc_RNA (1)...(19): siRNA sense strand
gagcuguggaagaggaaga

SEQ ID NO: 2364429 - RNA, 19 nt, Homo sapiens
  misc_RNA (1)...(19): siRNA sense strand
ggcugaggcuccugacaaa

SEQ ID NO: 2364430 - RNA, 19 nt, Homo sapiens
  misc_RNA (1)...(19): siRNA sense strand
agacagaacagaagccaga

SEQ ID NO: 2364431 - RNA, 19 nt, Homo sapiens
  misc_RNA (1)...(19): siRNA sense strand
gcacacuagagaaggaaga

SEQ ID NO: 2364432 - RNA, 19 nt, Homo sapiens
  misc_RNA (1)...(19): siRNA sense strand
guuccaggguugaaagaca

SEQ ID NO: 2364433 - RNA, 19 nt, Homo sapiens
  misc_RNA (1)...(19): siRNA sense strand
cugaaaugaaggacagaga

SEQ ID NO: 2364434 - RNA, 19 nt, Homo sapiens
  misc_RNA (1)...(19): siRNA sense strand
aggauaaagucucagaaaa

SEQ ID NO: 2364435 - RNA, 19 nt, Homo sapiens
  misc_RNA (1)...(19): siRNA sense strand
augccaagaaggaggagaa

SEQ ID NO: 2364436 - RNA, 19 nt, Homo sapiens
  misc_RNA (1)...(19): siRNA sense strand
agacagaggagacaggcaa

SEQ ID NO: 2364437 - RNA, 19 nt, Homo sapiens
  misc_RNA (1)...(19): siRNA sense strand
gggccagagagcaggaaga

SEQ ID NO: 2364438 - RNA, 19 nt, Homo sapiens
  misc_RNA (1)...(19): siRNA sense strand
guccaggaguggcaagaaa

SEQ ID NO: 2364439 - RNA, 19 nt, Homo sapiens
  misc_RNA (1)...(19): siRNA sense strand
ccaaagaugcuagaggaaa

SEQ ID NO: 2364440 - RNA, 19 nt, Homo sapiens
  misc_RNA (1)...(19): siRNA sense strand
ucaaagacaagguagggaa

SEQ ID NO: 2364441 - RNA, 19 nt, Homo sapiens
  misc_RNA (1)...(19): siRNA sense strand
acagaggaagagaaagaua

SEQ ID NO: 2364442 - RNA, 19 nt, Homo sapiens
  misc_RNA (1)...(19): siRNA sense strand
gaagaggaggagacagcaa

SEQ ID NO: 2364443 - RNA, 19 nt, Homo sapiens
  misc_RNA (1)...(19): siRNA sense strand
aggauaaggcuuuagaaca

SEQ ID NO: 2364444 - RNA, 19 nt, Homo sapiens
  misc_RNA (1)...(19): siRNA sense strand
aggucaaggccauggaaga

SEQ ID NO: 2364445 - RNA, 19 nt, Homo sapiens
  misc_RNA (1)...(19): siRNA sense strand
ccuuggaacaggacacaua

SEQ ID NO: 2364446 - RNA, 19 nt, Homo sapiens
  misc_RNA (1)...(19): siRNA sense strand
acgaggaggacgcgggaaa

SEQ ID NO: 2364447 - RNA, 19 nt, Homo sapiens
  misc_RNA (1)...(19): siRNA sense strand
cagaauaacuacaagccau

SEQ ID NO: 2364448 - RNA, 19 nt, Homo sapiens
  misc_RNA (1)...(19): siRNA sense strand
ccaaagaagucuaucagca

SEQ ID NO: 2364449 - RNA, 19 nt, Homo sapiens
  misc_RNA (1)...(19): siRNA sense strand
guucaaagaugcagccagu

SEQ ID NO: 2364450 - RNA, 19 nt, Homo sapiens
  misc_RNA (1)...(19): siRNA sense strand
aggccauggcuaugaagaa

SEQ ID NO: 2364451 - RNA, 19 nt, Homo sapiens
  misc_RNA (1)...(19): siRNA sense strand
ccagcaagaacgaggagga

SEQ ID NO: 2364452 - RNA, 19 nt, Homo sapiens
  misc_RNA (1)...(19): siRNA sense strand
aguggaagcaagugugaga

SEQ ID NO: 2364453 - RNA, 19 nt, Homo sapiens
  misc_RNA (1)...(19): siRNA sense strand
gaggaaaagaucagggagu

SEQ ID NO: 2364454 - RNA, 19 nt, Homo sapiens
  misc_RNA (1)...(19): siRNA sense strand
ggucaagaggguuuggguu

SEQ ID NO: 2364455 - RNA, 19 nt, Homo sapiens
  misc_RNA (1)...(19): siRNA sense strand
caaacuacggcaagagcca

SEQ ID NO: 2364456 - RNA, 19 nt, Homo sapiens
  misc_RNA (1)...(19): siRNA sense strand
cgccgagggaccagaucaa

SEQ ID NO: 2364457 - RNA, 19 nt, Homo sapiens
  misc_RNA (1)...(19): siRNA sense strand
uggacggucaagaggguuu

SEQ ID NO: 2364458 - RNA, 19 nt, Homo sapiens
  misc_RNA (1)...(19): siRNA sense strand
acgaggaggacgcgggaaa

SEQ ID NO: 2364459 - RNA, 19 nt, Homo sapiens
  misc_RNA (1)...(19): siRNA sense strand
cagaauaacuacaagccau

SEQ ID NO: 2364460 - RNA, 19 nt, Homo sapiens
  misc_RNA (1)...(19): siRNA sense strand
ccaaagaagucuaucagca

SEQ ID NO: 2364461 - RNA, 19 nt, Homo sapiens
  misc_RNA (1)...(19): siRNA sense strand
guucaaagaugcagccagu

SEQ ID NO: 2364462 - RNA, 19 nt, Homo sapiens
  misc_RNA (1)...(19): siRNA sense strand
aggccauggcuaugaagaa

SEQ ID NO: 2364463 - RNA, 19 nt, Homo sapiens
  misc_RNA (1)...(19): siRNA sense strand
ccagcaagaacgaggagga

SEQ ID NO: 2364464 - RNA, 19 nt, Homo sapiens
  misc_RNA (1)...(19): siRNA sense strand
aguggaagcaagugugaga

SEQ ID NO: 2364465 - RNA, 19 nt, Homo sapiens
  misc_RNA (1)...(19): siRNA sense strand
gaggaaaagaucagggagu

SEQ ID NO: 2364466 - RNA, 19 nt, Homo sapiens
  misc_RNA (1)...(19): siRNA sense strand
ggucaagaggguuuggguu

SEQ ID NO: 2364467 - RNA, 19 nt, Homo sapiens
  misc_RNA (1)...(19): siRNA sense strand
caaacuacggcaagagcca

SEQ ID NO: 2364468 - RNA, 19 nt, Homo sapiens
  misc_RNA (1)...(19): siRNA sense strand
cgccgagggaccagaucaa

SEQ ID NO: 2364469 - RNA, 19 nt, Homo sapiens
  misc_RNA (1)...(19): siRNA sense strand
uggacggucaagaggguuu

SEQ ID NO: 2364470 - RNA, 19 nt, Homo sapiens
  misc_RNA (1)...(19): siRNA sense strand
aggcagaggcagaggguua

SEQ ID NO: 2364471 - RNA, 19 nt, Homo sapiens
  misc_RNA (1)...(19): siRNA sense strand
agauaaagccaccaagaaa

SEQ ID NO: 2364472 - RNA, 19 nt, Homo sapiens
  misc_RNA (1)...(19): siRNA sense strand
gcauaggagccaaggagaa

SEQ ID NO: 2364473 - RNA, 19 nt, Homo sapiens
  misc_RNA (1)...(19): siRNA sense strand
cuacuagaagagagggaaa

SEQ ID NO: 2364474 - RNA, 19 nt, Homo sapiens
  misc_RNA (1)...(19): siRNA sense strand
caucggaauuauuggagaa

SEQ ID NO: 2364475 - RNA, 19 nt, Homo sapiens
  misc_RNA (1)...(19): siRNA sense strand
caaaagagaaggugggauu

SEQ ID NO: 2364476 - RNA, 19 nt, Homo sapiens
  misc_RNA (1)...(19): siRNA sense strand
aggaaauagugacugauaa

SEQ ID NO: 2364477 - RNA, 19 nt, Homo sapiens
  misc_RNA (1)...(19): siRNA sense strand
ccguauacuaacaagguaa

SEQ ID NO: 2364478 - RNA, 19 nt, Homo sapiens
  misc_RNA (1)...(19): siRNA sense strand
ggaccauagauuugaauau

SEQ ID NO: 2364479 - RNA, 19 nt, Homo sapiens
  misc_RNA (1)...(19): siRNA sense strand
uggcagaggcagaggcaga

SEQ ID NO: 2364480 - RNA, 19 nt, Homo sapiens
  misc_RNA (1)...(19): siRNA sense strand
aggacaagaccgagccuaa

SEQ ID NO: 2364481 - RNA, 19 nt, Homo sapiens
  misc_RNA (1)...(19): siRNA sense strand
cgucgaaaguuaagagaag

SEQ ID NO: 2364482 - RNA, 19 nt, Homo sapiens
  misc_RNA (1)...(19): siRNA sense strand
cuagauuaucggacagaaa

SEQ ID NO: 2364483 - RNA, 19 nt, Homo sapiens
  misc_RNA (1)...(19): siRNA sense strand
uuacaaagccagggauaaa

SEQ ID NO: 2364484 - RNA, 19 nt, Homo sapiens
  misc_RNA (1)...(19): siRNA sense strand
guuuacaaagccagggaua

SEQ ID NO: 2364485 - RNA, 19 nt, Homo sapiens
  misc_RNA (1)...(19): siRNA sense strand
cgaagaagacagaagcaga

SEQ ID NO: 2364486 - RNA, 19 nt, Homo sapiens
  misc_RNA (1)...(19): siRNA sense strand
ccguauucaucuaggcauu

SEQ ID NO: 2364487 - RNA, 19 nt, Homo sapiens
  misc_RNA (1)...(19): siRNA sense strand
aagcagucauaguuggaaa

SEQ ID NO: 2364488 - RNA, 19 nt, Homo sapiens
  misc_RNA (1)...(19): siRNA sense strand
ccaaggagaaggagcaaca

SEQ ID NO: 2364489 - RNA, 19 nt, Homo sapiens
  misc_RNA (1)...(19): siRNA sense strand
cuucagacuacaaggacaa

SEQ ID NO: 2364490 - RNA, 19 nt, Homo sapiens
  misc_RNA (1)...(19): siRNA sense strand
caaagaguccagaggaaaa

SEQ ID NO: 2364491 - RNA, 19 nt, Homo sapiens
  misc_RNA (1)...(19): siRNA sense strand
cggaauuauuggagaaggu

SEQ ID NO: 2364492 - RNA, 19 nt, Homo sapiens
  misc_RNA (1)...(19): siRNA sense strand
ucgaaaguuaagagaagaa

SEQ ID NO: 2364493 - RNA, 19 nt, Homo sapiens
  misc_RNA (1)...(19): siRNA sense strand
augugaaggaugugaagaa

SEQ ID NO: 2364494 - RNA, 19 nt, Homo sapiens
  misc_RNA (1)...(19): siRNA sense strand
gcugaauugaacaagaaua

SEQ ID NO: 2364495 - RNA, 19 nt, Homo sapiens
  misc_RNA (1)...(19): siRNA sense strand
gguaauuacuuuaugguac

SEQ ID NO: 2364496 - RNA, 19 nt, Homo sapiens
  misc_RNA (1)...(19): siRNA sense strand
gggagaagaacgauacaca

SEQ ID NO: 2364497 - RNA, 19 nt, Homo sapiens
  misc_RNA (1)...(19): siRNA sense strand
ccaugaaaccaaagaagca

SEQ ID NO: 2364498 - RNA, 19 nt, Homo sapiens
  misc_RNA (1)...(19): siRNA sense strand
uucaaagaguccagaggaa

SEQ ID NO: 2364499 - RNA, 19 nt, Homo sapiens
  misc_RNA (1)...(19): siRNA sense strand
ggacaaguuuacaaagcca

SEQ ID NO: 2364500 - RNA, 19 nt, Homo sapiens
  misc_RNA (1)...(19): siRNA sense strand
cuggauauucacaaggaua

SEQ ID NO: 2364501 - RNA, 19 nt, Homo sapiens
  misc_RNA (1)...(19): siRNA sense strand
ggaaaaucccgaagcagaa

SEQ ID NO: 2364502 - RNA, 19 nt, Homo sapiens
  misc_RNA (1)...(19): siRNA sense strand
cgcuagacuuauuugauua

SEQ ID NO: 2364503 - RNA, 19 nt, Homo sapiens
  misc_RNA (1)...(19): siRNA sense strand
uaguuggaaaggagaguaa

SEQ ID NO: 2364504 - RNA, 19 nt, Homo sapiens
  misc_RNA (1)...(19): siRNA sense strand
agaagguacuuacggacaa

SEQ ID NO: 2364505 - RNA, 19 nt, Homo sapiens
  misc_RNA (1)...(19): siRNA sense strand
auaauagagggcagauaaa

SEQ ID NO: 2364506 - RNA, 19 nt, Homo sapiens
  misc_RNA (1)...(19): siRNA sense strand
uuguauagcucagaagaaa

SEQ ID NO: 2364507 - RNA, 19 nt, Homo sapiens
  misc_RNA (1)...(19): siRNA sense strand
aggccuaccgggaggacaa

SEQ ID NO: 2364508 - RNA, 19 nt, Homo sapiens
  misc_RNA (1)...(19): siRNA sense strand
ucauggagggucuggauua

SEQ ID NO: 2364509 - RNA, 19 nt, Homo sapiens
  misc_RNA (1)...(19): siRNA sense strand
agacagaagcagaugggca

SEQ ID NO: 2364510 - RNA, 19 nt, Homo sapiens
  misc_RNA (1)...(19): siRNA sense strand
cagcaguggccgcagcaaa

SEQ ID NO: 2364511 - RNA, 19 nt, Homo sapiens
  misc_RNA (1)...(19): siRNA sense strand
cugaggaagaucuagauua

SEQ ID NO: 2364512 - RNA, 19 nt, Homo sapiens
  misc_RNA (1)...(19): siRNA sense strand
cugaacugcuacugggaga

SEQ ID NO: 2364513 - RNA, 19 nt, Homo sapiens
  misc_RNA (1)...(19): siRNA sense strand
guuggaaaggagaguaaau

SEQ ID NO: 2364514 - RNA, 19 nt, Homo sapiens
  misc_RNA (1)...(19): siRNA sense strand
gggauaaagacacuggaga

SEQ ID NO: 2364515 - RNA, 19 nt, Homo sapiens
  misc_RNA (1)...(19): siRNA sense strand
uggagaaaugguagccuua

SEQ ID NO: 2364516 - RNA, 19 nt, Homo sapiens
  misc_RNA (1)...(19): siRNA sense strand
gagccaaggagaaggagca

SEQ ID NO: 2364517 - RNA, 19 nt, Homo sapiens
  misc_RNA (1)...(19): siRNA sense strand
caugcugccugaagauaaa

SEQ ID NO: 2364518 - RNA, 19 nt, Homo sapiens
  misc_RNA (1)...(19): siRNA sense strand
ucaaagaguccagaggaaa

SEQ ID NO: 2364519 - RNA, 19 nt, Homo sapiens
  misc_RNA (1)...(19): siRNA sense strand
gaggaaaagaaaacaacaa

SEQ ID NO: 2364520 - RNA, 19 nt, Homo sapiens
  misc_RNA (1)...(19): siRNA sense strand
ugaaggaugugaagaaaau

SEQ ID NO: 2364521 - RNA, 19 nt, Homo sapiens
  misc_RNA (1)...(19): siRNA sense strand
acaacaacacaguuacaua

SEQ ID NO: 2364522 - RNA, 19 nt, Homo sapiens
  misc_RNA (1)...(19): siRNA sense strand
agucaaagcagaaagaugu

SEQ ID NO: 2364523 - RNA, 19 nt, Homo sapiens
  misc_RNA (1)...(19): siRNA sense strand
agguaacgaagguggaaaa

SEQ ID NO: 2364524 - RNA, 19 nt, Homo sapiens
  misc_RNA (1)...(19): siRNA sense strand
ggagaagagguuggaggaa

SEQ ID NO: 2364525 - RNA, 19 nt, Homo sapiens
  misc_RNA (1)...(19): siRNA sense strand
gugaaggaugugaagaaaa

SEQ ID NO: 2364526 - RNA, 19 nt, Homo sapiens
  misc_RNA (1)...(19): siRNA sense strand
ccaugcugccugaagauaa

SEQ ID NO: 2364527 - RNA, 19 nt, Homo sapiens
  misc_RNA (1)...(19): siRNA sense strand
aguaaaaggaggccuaaaa

SEQ ID NO: 2364528 - RNA, 19 nt, Homo sapiens
  misc_RNA (1)...(19): siRNA sense strand
cggagaagagguuggagga

SEQ ID NO: 2364529 - RNA, 19 nt, Homo sapiens
  misc_RNA (1)...(19): siRNA sense strand
aaauaauagagggcagaua

SEQ ID NO: 2364530 - RNA, 19 nt, Homo sapiens
  misc_RNA (1)...(19): siRNA sense strand
agauaaaacuugcagacuu

SEQ ID NO: 2364531 - RNA, 19 nt, Homo sapiens
  misc_RNA (1)...(19): siRNA sense strand
aaggaaauagugacugaua

SEQ ID NO: 2364532 - RNA, 19 nt, Homo sapiens
  misc_RNA (1)...(19): siRNA sense strand
aggcagaggcagaggguua

SEQ ID NO: 2364533 - RNA, 19 nt, Homo sapiens
  misc_RNA (1)...(19): siRNA sense strand
agauaaagccaccaagaaa

SEQ ID NO: 2364534 - RNA, 19 nt, Homo sapiens
  misc_RNA (1)...(19): siRNA sense strand
gcauaggagccaaggagaa

SEQ ID NO: 2364535 - RNA, 19 nt, Homo sapiens
  misc_RNA (1)...(19): siRNA sense strand
cuacuagaagagagggaaa

SEQ ID NO: 2364536 - RNA, 19 nt, Homo sapiens
  misc_RNA (1)...(19): siRNA sense strand
caucggaauuauuggagaa

SEQ ID NO: 2364537 - RNA, 19 nt, Homo sapiens
  misc_RNA (1)...(19): siRNA sense strand
caaaagagaaggugggauu

SEQ ID NO: 2364538 - RNA, 19 nt, Homo sapiens
  misc_RNA (1)...(19): siRNA sense strand
aggaaauagugacugauaa

SEQ ID NO: 2364539 - RNA, 19 nt, Homo sapiens
  misc_RNA (1)...(19): siRNA sense strand
ccguauacuaacaagguaa

SEQ ID NO: 2364540 - RNA, 19 nt, Homo sapiens
  misc_RNA (1)...(19): siRNA sense strand
ggaccauagauuugaauau

SEQ ID NO: 2364541 - RNA, 19 nt, Homo sapiens
  misc_RNA (1)...(19): siRNA sense strand
uggcagaggcagaggcaga

SEQ ID NO: 2364542 - RNA, 19 nt, Homo sapiens
  misc_RNA (1)...(19): siRNA sense strand
aggacaagaccgagccuaa

SEQ ID NO: 2364543 - RNA, 19 nt, Homo sapiens
  misc_RNA (1)...(19): siRNA sense strand
cgucgaaaguuaagagaag

SEQ ID NO: 2364544 - RNA, 19 nt, Homo sapiens
  misc_RNA (1)...(19): siRNA sense strand
cuagauuaucggacagaaa

SEQ ID NO: 2364545 - RNA, 19 nt, Homo sapiens
  misc_RNA (1)...(19): siRNA sense strand
uuacaaagccagggauaaa

SEQ ID NO: 2364546 - RNA, 19 nt, Homo sapiens
  misc_RNA (1)...(19): siRNA sense strand
guuuacaaagccagggaua

SEQ ID NO: 2364547 - RNA, 19 nt, Homo sapiens
  misc_RNA (1)...(19): siRNA sense strand
cgaagaagacagaagcaga

SEQ ID NO: 2364548 - RNA, 19 nt, Homo sapiens
  misc_RNA (1)...(19): siRNA sense strand
ccguauucaucuaggcauu

SEQ ID NO: 2364549 - RNA, 19 nt, Homo sapiens
  misc_RNA (1)...(19): siRNA sense strand
aagcagucauaguuggaaa

SEQ ID NO: 2364550 - RNA, 19 nt, Homo sapiens
  misc_RNA (1)...(19): siRNA sense strand
ccaaggagaaggagcaaca

SEQ ID NO: 2364551 - RNA, 19 nt, Homo sapiens
  misc_RNA (1)...(19): siRNA sense strand
cuucagacuacaaggacaa

SEQ ID NO: 2364552 - RNA, 19 nt, Homo sapiens
  misc_RNA (1)...(19): siRNA sense strand
caaagaguccagaggaaaa

SEQ ID NO: 2364553 - RNA, 19 nt, Homo sapiens
  misc_RNA (1)...(19): siRNA sense strand
cggaauuauuggagaaggu

SEQ ID NO: 2364554 - RNA, 19 nt, Homo sapiens
  misc_RNA (1)...(19): siRNA sense strand
ucgaaaguuaagagaagaa

SEQ ID NO: 2364555 - RNA, 19 nt, Homo sapiens
  misc_RNA (1)...(19): siRNA sense strand
augugaaggaugugaagaa

SEQ ID NO: 2364556 - RNA, 19 nt, Homo sapiens
  misc_RNA (1)...(19): siRNA sense strand
gcugaauugaacaagaaua

SEQ ID NO: 2364557 - RNA, 19 nt, Homo sapiens
  misc_RNA (1)...(19): siRNA sense strand
gguaauuacuuuaugguac

SEQ ID NO: 2364558 - RNA, 19 nt, Homo sapiens
  misc_RNA (1)...(19): siRNA sense strand
gggagaagaacgauacaca

SEQ ID NO: 2364559 - RNA, 19 nt, Homo sapiens
  misc_RNA (1)...(19): siRNA sense strand
ccaugaaaccaaagaagca

SEQ ID NO: 2364560 - RNA, 19 nt, Homo sapiens
  misc_RNA (1)...(19): siRNA sense strand
uucaaagaguccagaggaa

SEQ ID NO: 2364561 - RNA, 19 nt, Homo sapiens
  misc_RNA (1)...(19): siRNA sense strand
ggacaaguuuacaaagcca

SEQ ID NO: 2364562 - RNA, 19 nt, Homo sapiens
  misc_RNA (1)...(19): siRNA sense strand
cuggauauucacaaggaua

SEQ ID NO: 2364563 - RNA, 19 nt, Homo sapiens
  misc_RNA (1)...(19): siRNA sense strand
ggaaaaucccgaagcagaa

SEQ ID NO: 2364564 - RNA, 19 nt, Homo sapiens
  misc_RNA (1)...(19): siRNA sense strand
cgcuagacuuauuugauua

SEQ ID NO: 2364565 - RNA, 19 nt, Homo sapiens
  misc_RNA (1)...(19): siRNA sense strand
uaguuggaaaggagaguaa

SEQ ID NO: 2364566 - RNA, 19 nt, Homo sapiens
  misc_RNA (1)...(19): siRNA sense strand
agaagguacuuacggacaa

SEQ ID NO: 2364567 - RNA, 19 nt, Homo sapiens
  misc_RNA (1)...(19): siRNA sense strand
auaauagagggcagauaaa

SEQ ID NO: 2364568 - RNA, 19 nt, Homo sapiens
  misc_RNA (1)...(19): siRNA sense strand
uuguauagcucagaagaaa

SEQ ID NO: 2364569 - RNA, 19 nt, Homo sapiens
  misc_RNA (1)...(19): siRNA sense strand
aggccuaccgggaggacaa

SEQ ID NO: 2364570 - RNA, 19 nt, Homo sapiens
  misc_RNA (1)...(19): siRNA sense strand
ucauggagggucuggauua

SEQ ID NO: 2364571 - RNA, 19 nt, Homo sapiens
  misc_RNA (1)...(19): siRNA sense strand
agacagaagcagaugggca

SEQ ID NO: 2364572 - RNA, 19 nt, Homo sapiens
  misc_RNA (1)...(19): siRNA sense strand
cagcaguggccgcagcaaa

SEQ ID NO: 2364573 - RNA, 19 nt, Homo sapiens
  misc_RNA (1)...(19): siRNA sense strand
cugaggaagaucuagauua

SEQ ID NO: 2364574 - RNA, 19 nt, Homo sapiens
  misc_RNA (1)...(19): siRNA sense strand
cugaacugcuacugggaga

SEQ ID NO: 2364575 - RNA, 19 nt, Homo sapiens
  misc_RNA (1)...(19): siRNA sense strand
guuggaaaggagaguaaau

SEQ ID NO: 2364576 - RNA, 19 nt, Homo sapiens
  misc_RNA (1)...(19): siRNA sense strand
gggauaaagacacuggaga

SEQ ID NO: 2364577 - RNA, 19 nt, Homo sapiens
  misc_RNA (1)...(19): siRNA sense strand
uggagaaaugguagccuua

SEQ ID NO: 2364578 - RNA, 19 nt, Homo sapiens
  misc_RNA (1)...(19): siRNA sense strand
gagccaaggagaaggagca

SEQ ID NO: 2364579 - RNA, 19 nt, Homo sapiens
  misc_RNA (1)...(19): siRNA sense strand
caugcugccugaagauaaa

SEQ ID NO: 2364580 - RNA, 19 nt, Homo sapiens
  misc_RNA (1)...(19): siRNA sense strand
ucaaagaguccagaggaaa

SEQ ID NO: 2364581 - RNA, 19 nt, Homo sapiens
  misc_RNA (1)...(19): siRNA sense strand
gaggaaaagaaaacaacaa

SEQ ID NO: 2364582 - RNA, 19 nt, Homo sapiens
  misc_RNA (1)...(19): siRNA sense strand
ugaaggaugugaagaaaau

SEQ ID NO: 2364583 - RNA, 19 nt, Homo sapiens
  misc_RNA (1)...(19): siRNA sense strand
acaacaacacaguuacaua

SEQ ID NO: 2364584 - RNA, 19 nt, Homo sapiens
  misc_RNA (1)...(19): siRNA sense strand
agucaaagcagaaagaugu

SEQ ID NO: 2364585 - RNA, 19 nt, Homo sapiens
  misc_RNA (1)...(19): siRNA sense strand
agguaacgaagguggaaaa

SEQ ID NO: 2364586 - RNA, 19 nt, Homo sapiens
  misc_RNA (1)...(19): siRNA sense strand
ggagaagagguuggaggaa

SEQ ID NO: 2364587 - RNA, 19 nt, Homo sapiens
  misc_RNA (1)...(19): siRNA sense strand
gugaaggaugugaagaaaa

SEQ ID NO: 2364588 - RNA, 19 nt, Homo sapiens
  misc_RNA (1)...(19): siRNA sense strand
ccaugcugccugaagauaa

SEQ ID NO: 2364589 - RNA, 19 nt, Homo sapiens
  misc_RNA (1)...(19): siRNA sense strand
aguaaaaggaggccuaaaa

SEQ ID NO: 2364590 - RNA, 19 nt, Homo sapiens
  misc_RNA (1)...(19): siRNA sense strand
cggagaagagguuggagga

SEQ ID NO: 2364591 - RNA, 19 nt, Homo sapiens
  misc_RNA (1)...(19): siRNA sense strand
aaauaauagagggcagaua

SEQ ID NO: 2364592 - RNA, 19 nt, Homo sapiens
  misc_RNA (1)...(19): siRNA sense strand
agauaaaacuugcagacuu

SEQ ID NO: 2364593 - RNA, 19 nt, Homo sapiens
  misc_RNA (1)...(19): siRNA sense strand
aaggaaauagugacugaua

SEQ ID NO: 2364594 - RNA, 19 nt, Homo sapiens
  misc_RNA (1)...(19): siRNA sense strand
ggaagaaucuggugcagga

SEQ ID NO: 2364595 - RNA, 19 nt, Homo sapiens
  misc_RNA (1)...(19): siRNA sense strand
caggaaagucagugggagu

SEQ ID NO: 2364596 - RNA, 19 nt, Homo sapiens
  misc_RNA (1)...(19): siRNA sense strand
gauccuagguggaggccga

SEQ ID NO: 2364597 - RNA, 19 nt, Homo sapiens
  misc_RNA (1)...(19): siRNA sense strand
ggugaaucgggccaagaaa

SEQ ID NO: 2364598 - RNA, 19 nt, Homo sapiens
  misc_RNA (1)...(19): siRNA sense strand
acaugaaauacgagaucca

SEQ ID NO: 2364599 - RNA, 19 nt, Homo sapiens
  misc_RNA (1)...(19): siRNA sense strand
gggcacugacugagacgau

SEQ ID NO: 2364600 - RNA, 19 nt, Homo sapiens
  misc_RNA (1)...(19): siRNA sense strand
cgcuuuaaccagugcaaca

SEQ ID NO: 2364601 - RNA, 19 nt, Homo sapiens
  misc_RNA (1)...(19): siRNA sense strand
uagacaagcaugugccaga

SEQ ID NO: 2364602 - RNA, 19 nt, Homo sapiens
  misc_RNA (1)...(19): siRNA sense strand
cgguccuccuauacggaaa

SEQ ID NO: 2364603 - RNA, 19 nt, Homo sapiens
  misc_RNA (1)...(19): siRNA sense strand
agccuggagacaugaaaua

SEQ ID NO: 2364604 - RNA, 19 nt, Homo sapiens
  misc_RNA (1)...(19): siRNA sense strand
cagcauaacuagagaacau

SEQ ID NO: 2364605 - RNA, 19 nt, Homo sapiens
  misc_RNA (1)...(19): siRNA sense strand
gggagaaagaggaggcuaa

SEQ ID NO: 2364606 - RNA, 19 nt, Homo sapiens
  misc_RNA (1)...(19): siRNA sense strand
cagcauuauucuaaggaaa

SEQ ID NO: 2364607 - RNA, 19 nt, Homo sapiens
  misc_RNA (1)...(19): siRNA sense strand
ccauaaaggauaaggauga

SEQ ID NO: 2364608 - RNA, 19 nt, Homo sapiens
  misc_RNA (1)...(19): siRNA sense strand
ugacaaacggagaaagaaa

SEQ ID NO: 2364609 - RNA, 19 nt, Homo sapiens
  misc_RNA (1)...(19): siRNA sense strand
caucaaagucggaaagcaa

SEQ ID NO: 2364610 - RNA, 19 nt, Homo sapiens
  misc_RNA (1)...(19): siRNA sense strand
uggaagaaguguagagcau

SEQ ID NO: 2364611 - RNA, 19 nt, Homo sapiens
  misc_RNA (1)...(19): siRNA sense strand
gggaaaauauaguggaauu

SEQ ID NO: 2364612 - RNA, 19 nt, Homo sapiens
  misc_RNA (1)...(19): siRNA sense strand
uaaaacaaguggagagaaa

SEQ ID NO: 2364613 - RNA, 19 nt, Homo sapiens
  misc_RNA (1)...(19): siRNA sense strand
ccacaaaaccggaaauaaa

SEQ ID NO: 2364614 - RNA, 19 nt, Homo sapiens
  misc_RNA (1)...(19): siRNA sense strand
cuucaaaugaugauggaaa

SEQ ID NO: 2364615 - RNA, 19 nt, Homo sapiens
  misc_RNA (1)...(19): siRNA sense strand
aaucagggccagugaguaa

SEQ ID NO: 2364616 - RNA, 19 nt, Homo sapiens
  misc_RNA (1)...(19): siRNA sense strand
cugcauuauuagagaguga

SEQ ID NO: 2364617 - RNA, 19 nt, Homo sapiens
  misc_RNA (1)...(19): siRNA sense strand
gacaaauacaugaaggaua

SEQ ID NO: 2364618 - RNA, 19 nt, Homo sapiens
  misc_RNA (1)...(19): siRNA sense strand
cggaaauaaauaaggaaga

SEQ ID NO: 2364619 - RNA, 19 nt, Homo sapiens
  misc_RNA (1)...(19): siRNA sense strand
gaccaaaaccuguggaaua

SEQ ID NO: 2364620 - RNA, 19 nt, Homo sapiens
  misc_RNA (1)...(19): siRNA sense strand
acaaagagagugagaguca

SEQ ID NO: 2364621 - RNA, 19 nt, Homo sapiens
  misc_RNA (1)...(19): siRNA sense strand
caaacuucauggaaagaaa

SEQ ID NO: 2364622 - RNA, 19 nt, Homo sapiens
  misc_RNA (1)...(19): siRNA sense strand
gagaagaaaguaugggaga

SEQ ID NO: 2364623 - RNA, 19 nt, Homo sapiens
  misc_RNA (1)...(19): siRNA sense strand
cuguggaguaugaggguaa

SEQ ID NO: 2364624 - RNA, 19 nt, Homo sapiens
  misc_RNA (1)...(19): siRNA sense strand
aguucaaauugcagcauaa

SEQ ID NO: 2364625 - RNA, 19 nt, Homo sapiens
  misc_RNA (1)...(19): siRNA sense strand
aaaugaggcuaaagagaau

SEQ ID NO: 2364626 - RNA, 19 nt, Homo sapiens
  misc_RNA (1)...(19): siRNA sense strand
guuuagaagaccuggaaau

SEQ ID NO: 2364627 - RNA, 19 nt, Homo sapiens
  misc_RNA (1)...(19): siRNA sense strand
ugagaagaguucagauaau

SEQ ID NO: 2364628 - RNA, 19 nt, Homo sapiens
  misc_RNA (1)...(19): siRNA sense strand
cugaagaaguccaaguauu

SEQ ID NO: 2364629 - RNA, 19 nt, Homo sapiens
  misc_RNA (1)...(19): siRNA sense strand
aagaauacaaagagaguga

SEQ ID NO: 2364630 - RNA, 19 nt, Homo sapiens
  misc_RNA (1)...(19): siRNA sense strand
aaguaggagaagaaagaaa

SEQ ID NO: 2364631 - RNA, 19 nt, Homo sapiens
  misc_RNA (1)...(19): siRNA sense strand
gcaacaauuagcauagaaa

SEQ ID NO: 2364632 - RNA, 19 nt, Homo sapiens
  misc_RNA (1)...(19): siRNA sense strand
aagcaugacugaaggauca

SEQ ID NO: 2364633 - RNA, 19 nt, Homo sapiens
  misc_RNA (1)...(19): siRNA sense strand
ugggaaaagcugugauaaa

SEQ ID NO: 2364634 - RNA, 19 nt, Homo sapiens
  misc_RNA (1)...(19): siRNA sense strand
cuaggaaagauuuaggaaa

SEQ ID NO: 2364635 - RNA, 19 nt, Homo sapiens
  misc_RNA (1)...(19): siRNA sense strand
ccagacauaccaagggaua

SEQ ID NO: 2364636 - RNA, 19 nt, Homo sapiens
  misc_RNA (1)...(19): siRNA sense strand
cgucauggucucagaaaca

SEQ ID NO: 2364637 - RNA, 19 nt, Homo sapiens
  misc_RNA (1)...(19): siRNA sense strand
agaagaaaguaugggagaa

SEQ ID NO: 2364638 - RNA, 19 nt, Homo sapiens
  misc_RNA (1)...(19): siRNA sense strand
gcuaaagagaauagugcuu

SEQ ID NO: 2364639 - RNA, 19 nt, Homo sapiens
  misc_RNA (1)...(19): siRNA sense strand
gugaaauugauacggauaa

SEQ ID NO: 2364640 - RNA, 19 nt, Homo sapiens
  misc_RNA (1)...(19): siRNA sense strand
cuaaguugcagaagauaua

SEQ ID NO: 2364641 - RNA, 19 nt, Homo sapiens
  misc_RNA (1)...(19): siRNA sense strand
aacuaaaguaggagaagaa

SEQ ID NO: 2364642 - RNA, 19 nt, Homo sapiens
  misc_RNA (1)...(19): siRNA sense strand
ugacagauagugagggaga

SEQ ID NO: 2364643 - RNA, 19 nt, Homo sapiens
  misc_RNA (1)...(19): siRNA sense strand
aguacaaacgacagguuaa

SEQ ID NO: 2364644 - RNA, 19 nt, Homo sapiens
  misc_RNA (1)...(19): siRNA sense strand
gugaagacucucaggaaca

SEQ ID NO: 2364645 - RNA, 19 nt, Homo sapiens
  misc_RNA (1)...(19): siRNA sense strand
guaccaaguucaugugaca

SEQ ID NO: 2364646 - RNA, 19 nt, Homo sapiens
  misc_RNA (1)...(19): siRNA sense strand
ggagaauagugaucagcau

SEQ ID NO: 2364647 - RNA, 19 nt, Homo sapiens
  misc_RNA (1)...(19): siRNA sense strand
acacaauccuucagcaaaa

SEQ ID NO: 2364648 - RNA, 19 nt, Homo sapiens
  misc_RNA (1)...(19): siRNA sense strand
uagagaacauucagagaga

SEQ ID NO: 2364649 - RNA, 19 nt, Homo sapiens
  misc_RNA (1)...(19): siRNA sense strand
agcaaagaaacuagacaaa

SEQ ID NO: 2364650 - RNA, 19 nt, Homo sapiens
  misc_RNA (1)...(19): siRNA sense strand
ugucaaauguagugucaga

SEQ ID NO: 2364651 - RNA, 19 nt, Homo sapiens
  misc_RNA (1)...(19): siRNA sense strand
gaacacaauccuucagcaa

SEQ ID NO: 2364652 - RNA, 19 nt, Homo sapiens
  misc_RNA (1)...(19): siRNA sense strand
agcuaaagguagacaugaa

SEQ ID NO: 2364653 - RNA, 19 nt, Homo sapiens
  misc_RNA (1)...(19): siRNA sense strand
cgguaaugcuuauacaaaa

SEQ ID NO: 2364654 - RNA, 19 nt, Homo sapiens
  misc_RNA (1)...(19): siRNA sense strand
aaauaaggaagauggagaa

SEQ ID NO: 2364655 - RNA, 19 nt, Homo sapiens
  misc_RNA (1)...(19): siRNA sense strand
gcacuuagaaggugaacca

SEQ ID NO: 2364656 - RNA, 19 nt, Homo sapiens
  misc_RNA (1)...(19): siRNA sense strand
agacaaaugugaagacucu

SEQ ID NO: 2364657 - RNA, 19 nt, Homo sapiens
  misc_RNA (1)...(19): siRNA sense strand
cuguauaccucccaauaaa

SEQ ID NO: 2364658 - RNA, 19 nt, Homo sapiens
  misc_RNA (1)...(19): siRNA sense strand
uaaauaaggaagauggaga

SEQ ID NO: 2364659 - RNA, 19 nt, Homo sapiens
  misc_RNA (1)...(19): siRNA sense strand
uggaauaauugcaaacaca

SEQ ID NO: 2364660 - RNA, 19 nt, Homo sapiens
  misc_RNA (1)...(19): siRNA sense strand
ggacagaauaacguggaaa

SEQ ID NO: 2364661 - RNA, 19 nt, Homo sapiens
  misc_RNA (1)...(19): siRNA sense strand
gaaucagaucucagaagaa

SEQ ID NO: 2364662 - RNA, 19 nt, Homo sapiens
  misc_RNA (1)...(19): siRNA sense strand
augcugagcuucuuggaaa

SEQ ID NO: 2364663 - RNA, 19 nt, Homo sapiens
  misc_RNA (1)...(19): siRNA sense strand
gaacugaaauuggggaaaa

SEQ ID NO: 2364664 - RNA, 19 nt, Homo sapiens
  misc_RNA (1)...(19): siRNA sense strand
guuccaaacaugaagaaaa

SEQ ID NO: 2364665 - RNA, 19 nt, Homo sapiens
  misc_RNA (1)...(19): siRNA sense strand
gaauacaaagagagugaga

SEQ ID NO: 2364666 - RNA, 19 nt, Homo sapiens
  misc_RNA (1)...(19): siRNA sense strand
auacaaagagagugagagu

SEQ ID NO: 2364667 - RNA, 19 nt, Homo sapiens
  misc_RNA (1)...(19): siRNA sense strand
aaagagagugagagucaua

SEQ ID NO: 2364668 - RNA, 19 nt, Homo sapiens
  misc_RNA (1)...(19): siRNA sense strand
caucuaccauaaaggauaa

SEQ ID NO: 2364669 - RNA, 19 nt, Homo sapiens
  misc_RNA (1)...(19): siRNA sense strand
ccagagaagccaagagcaa

SEQ ID NO: 2364670 - RNA, 19 nt, Homo sapiens
  misc_RNA (1)...(19): siRNA sense strand
uggaagaagagcuggauaa

SEQ ID NO: 2364671 - RNA, 19 nt, Homo sapiens
  misc_RNA (1)...(19): siRNA sense strand
ggaaaauggaggugaaaga

SEQ ID NO: 2364672 - RNA, 19 nt, Homo sapiens
  misc_RNA (1)...(19): siRNA sense strand
gcucugaaagggagacaaa

SEQ ID NO: 2364673 - RNA, 19 nt, Homo sapiens
  misc_RNA (1)...(19): siRNA sense strand
cugaagaagaugaacuaaa

SEQ ID NO: 2364674 - RNA, 19 nt, Homo sapiens
  misc_RNA (1)...(19): siRNA sense strand
acgaaguacugaagaugaa

SEQ ID NO: 2364675 - RNA, 19 nt, Homo sapiens
  misc_RNA (1)...(19): siRNA sense strand
ucugaaagggagacaaaua

SEQ ID NO: 2364676 - RNA, 19 nt, Homo sapiens
  misc_RNA (1)...(19): siRNA sense strand
agacaauaaugcacgagaa

SEQ ID NO: 2364677 - RNA, 19 nt, Homo sapiens
  misc_RNA (1)...(19): siRNA sense strand
ccgagagagagcaaagaaa

SEQ ID NO: 2364678 - RNA, 19 nt, Homo sapiens
  misc_RNA (1)...(19): siRNA sense strand
aggugaaagaaauggcaaa

SEQ ID NO: 2364679 - RNA, 19 nt, Homo sapiens
  misc_RNA (1)...(19): siRNA sense strand
aaaaguuggugaagagaaa

SEQ ID NO: 2364680 - RNA, 19 nt, Homo sapiens
  misc_RNA (1)...(19): siRNA sense strand
agaugaaacagaaggaaca

SEQ ID NO: 2364681 - RNA, 19 nt, Homo sapiens
  misc_RNA (1)...(19): siRNA sense strand
acugaaagagaaagacaua

SEQ ID NO: 2364682 - RNA, 19 nt, Homo sapiens
  misc_RNA (1)...(19): siRNA sense strand
gagaaaaggaagugauuca

SEQ ID NO: 2364683 - RNA, 19 nt, Homo sapiens
  misc_RNA (1)...(19): siRNA sense strand
cauggaaaucauagaacua

SEQ ID NO: 2364684 - RNA, 19 nt, Homo sapiens
  misc_RNA (1)...(19): siRNA sense strand
aaugcagaguccagaaaua

SEQ ID NO: 2364685 - RNA, 19 nt, Homo sapiens
  misc_RNA (1)...(19): siRNA sense strand
auugguggcuguagagaaa

SEQ ID NO: 2364686 - RNA, 19 nt, Homo sapiens
  misc_RNA (1)...(19): siRNA sense strand
guuauugggccuuaggaaa

SEQ ID NO: 2364687 - RNA, 19 nt, Homo sapiens
  misc_RNA (1)...(19): siRNA sense strand
ggaauuauuuagaagcuga

SEQ ID NO: 2364688 - RNA, 19 nt, Homo sapiens
  misc_RNA (1)...(19): siRNA sense strand
ggucaaaacccgaagacuu

SEQ ID NO: 2364689 - RNA, 19 nt, Homo sapiens
  misc_RNA (1)...(19): siRNA sense strand
aggaauacaaggugcauuu

SEQ ID NO: 2364690 - RNA, 19 nt, Homo sapiens
  misc_RNA (1)...(19): siRNA sense strand
caccaaaggaacugaaaga

SEQ ID NO: 2364691 - RNA, 19 nt, Homo sapiens
  misc_RNA (1)...(19): siRNA sense strand
uauaaguguccgagagaga

SEQ ID NO: 2364692 - RNA, 19 nt, Homo sapiens
  misc_RNA (1)...(19): siRNA sense strand
acggauuggcagcgaguua

SEQ ID NO: 2364693 - RNA, 19 nt, Homo sapiens
  misc_RNA (1)...(19): siRNA sense strand
gggaagaccuagagagucc

SEQ ID NO: 2364694 - RNA, 19 nt, Homo sapiens
  misc_RNA (1)...(19): siRNA sense strand
gggcuuugacagcaggaaa

SEQ ID NO: 2364695 - RNA, 19 nt, Homo sapiens
  misc_RNA (1)...(19): siRNA sense strand
cuucaaaagcugagacaga

SEQ ID NO: 2364696 - RNA, 19 nt, Homo sapiens
  misc_RNA (1)...(19): siRNA sense strand
auugaguaucauagggaaa

SEQ ID NO: 2364697 - RNA, 19 nt, Homo sapiens
  misc_RNA (1)...(19): siRNA sense strand
cgacuagguugguccgaau

SEQ ID NO: 2364698 - RNA, 19 nt, Homo sapiens
  misc_RNA (1)...(19): siRNA sense strand
auggaaagguacacuuaaa

SEQ ID NO: 2364699 - RNA, 19 nt, Homo sapiens
  misc_RNA (1)...(19): siRNA sense strand
aaaggaacugaaagagaaa

SEQ ID NO: 2364700 - RNA, 19 nt, Homo sapiens
  misc_RNA (1)...(19): siRNA sense strand
ccaagagcaauuugaacaa

SEQ ID NO: 2364701 - RNA, 19 nt, Homo sapiens
  misc_RNA (1)...(19): siRNA sense strand
aagaggacuuugaaggaau

SEQ ID NO: 2364702 - RNA, 19 nt, Homo sapiens
  misc_RNA (1)...(19): siRNA sense strand
gaaggaaaucagagggugu

SEQ ID NO: 2364703 - RNA, 19 nt, Homo sapiens
  misc_RNA (1)...(19): siRNA sense strand
uggaaugggagcaggguca

SEQ ID NO: 2364704 - RNA, 19 nt, Homo sapiens
  misc_RNA (1)...(19): siRNA sense strand
ugaccaaccuggaguacau

SEQ ID NO: 2364705 - RNA, 19 nt, Homo sapiens
  misc_RNA (1)...(19): siRNA sense strand
ucgaaaucaacgagaucua

SEQ ID NO: 2364706 - RNA, 19 nt, Homo sapiens
  misc_RNA (1)...(19): siRNA sense strand
agagaagccaagagcaauu

SEQ ID NO: 2364707 - RNA, 19 nt, Homo sapiens
  misc_RNA (1)...(19): siRNA sense strand
cuuacgaccuccugaagaa

SEQ ID NO: 2364708 - RNA, 19 nt, Homo sapiens
  misc_RNA (1)...(19): siRNA sense strand
ugaugagcccagaggaaau

SEQ ID NO: 2364709 - RNA, 19 nt, Homo sapiens
  misc_RNA (1)...(19): siRNA sense strand
guaucacauuucagguuaa

SEQ ID NO: 2364710 - RNA, 19 nt, Homo sapiens
  misc_RNA (1)...(19): siRNA sense strand
uagcauuacaccagaaaga

SEQ ID NO: 2364711 - RNA, 19 nt, Homo sapiens
  misc_RNA (1)...(19): siRNA sense strand
cuggaguacauguuggaaa

SEQ ID NO: 2364712 - RNA, 19 nt, Homo sapiens
  misc_RNA (1)...(19): siRNA sense strand
agaugaacaagaagagaca

SEQ ID NO: 2364713 - RNA, 19 nt, Homo sapiens
  misc_RNA (1)...(19): siRNA sense strand
aaugaugagcccagaggaa

SEQ ID NO: 2364714 - RNA, 19 nt, Homo sapiens
  misc_RNA (1)...(19): siRNA sense strand
gguccgaaucauccagaua

SEQ ID NO: 2364715 - RNA, 19 nt, Homo sapiens
  misc_RNA (1)...(19): siRNA sense strand
uugauguucugguggauua

SEQ ID NO: 2364716 - RNA, 19 nt, Homo sapiens
  misc_RNA (1)...(19): siRNA sense strand
ggacagagguguacagagg

SEQ ID NO: 2364717 - RNA, 19 nt, Homo sapiens
  misc_RNA (1)...(19): siRNA sense strand
gagaaugaugauaggcuga

SEQ ID NO: 2364718 - RNA, 19 nt, Homo sapiens
  misc_RNA (1)...(19): siRNA sense strand
aggaacaggaagagcgcau

SEQ ID NO: 2364719 - RNA, 19 nt, Homo sapiens
  misc_RNA (1)...(19): siRNA sense strand
cagugaaaucagacaucua

SEQ ID NO: 2364720 - RNA, 19 nt, Homo sapiens
  misc_RNA (1)...(19): siRNA sense strand
cuucaagauauccgguaua

SEQ ID NO: 2364721 - RNA, 19 nt, Homo sapiens
  misc_RNA (1)...(19): siRNA sense strand
gacaauaaugcacgagaau

SEQ ID NO: 2364722 - RNA, 19 nt, Homo sapiens
  misc_RNA (1)...(19): siRNA sense strand
ggacuuugaaggaauacaa

SEQ ID NO: 2364723 - RNA, 19 nt, Homo sapiens
  misc_RNA (1)...(19): siRNA sense strand
gaagagacaucaaaggagu

SEQ ID NO: 2364724 - RNA, 19 nt, Homo sapiens
  misc_RNA (1)...(19): siRNA sense strand
aggaacugaaagagaaaga

SEQ ID NO: 2364725 - RNA, 19 nt, Homo sapiens
  misc_RNA (1)...(19): siRNA sense strand
acaagggaacuaugugaaa

SEQ ID NO: 2364726 - RNA, 19 nt, Homo sapiens
  misc_RNA (1)...(19): siRNA sense strand
ccagagaagccaagagcaa

SEQ ID NO: 2364727 - RNA, 19 nt, Homo sapiens
  misc_RNA (1)...(19): siRNA sense strand
uggaagaagagcuggauaa

SEQ ID NO: 2364728 - RNA, 19 nt, Homo sapiens
  misc_RNA (1)...(19): siRNA sense strand
ggaaaauggaggugaaaga

SEQ ID NO: 2364729 - RNA, 19 nt, Homo sapiens
  misc_RNA (1)...(19): siRNA sense strand
gcucugaaagggagacaaa

SEQ ID NO: 2364730 - RNA, 19 nt, Homo sapiens
  misc_RNA (1)...(19): siRNA sense strand
cugaagaagaugaacuaaa

SEQ ID NO: 2364731 - RNA, 19 nt, Homo sapiens
  misc_RNA (1)...(19): siRNA sense strand
acgaaguacugaagaugaa

SEQ ID NO: 2364732 - RNA, 19 nt, Homo sapiens
  misc_RNA (1)...(19): siRNA sense strand
ucugaaagggagacaaaua

SEQ ID NO: 2364733 - RNA, 19 nt, Homo sapiens
  misc_RNA (1)...(19): siRNA sense strand
agacaauaaugcacgagaa

SEQ ID NO: 2364734 - RNA, 19 nt, Homo sapiens
  misc_RNA (1)...(19): siRNA sense strand
ccgagagagagcaaagaaa

SEQ ID NO: 2364735 - RNA, 19 nt, Homo sapiens
  misc_RNA (1)...(19): siRNA sense strand
aggugaaagaaauggcaaa

SEQ ID NO: 2364736 - RNA, 19 nt, Homo sapiens
  misc_RNA (1)...(19): siRNA sense strand
aaaaguuggugaagagaaa

SEQ ID NO: 2364737 - RNA, 19 nt, Homo sapiens
  misc_RNA (1)...(19): siRNA sense strand
agaugaaacagaaggaaca

SEQ ID NO: 2364738 - RNA, 19 nt, Homo sapiens
  misc_RNA (1)...(19): siRNA sense strand
acugaaagagaaagacaua

SEQ ID NO: 2364739 - RNA, 19 nt, Homo sapiens
  misc_RNA (1)...(19): siRNA sense strand
gagaaaaggaagugauuca

SEQ ID NO: 2364740 - RNA, 19 nt, Homo sapiens
  misc_RNA (1)...(19): siRNA sense strand
cauggaaaucauagaacua

SEQ ID NO: 2364741 - RNA, 19 nt, Homo sapiens
  misc_RNA (1)...(19): siRNA sense strand
aaugcagaguccagaaaua

SEQ ID NO: 2364742 - RNA, 19 nt, Homo sapiens
  misc_RNA (1)...(19): siRNA sense strand
auugguggcuguagagaaa

SEQ ID NO: 2364743 - RNA, 19 nt, Homo sapiens
  misc_RNA (1)...(19): siRNA sense strand
guuauugggccuuaggaaa

SEQ ID NO: 2364744 - RNA, 19 nt, Homo sapiens
  misc_RNA (1)...(19): siRNA sense strand
ggaauuauuuagaagcuga

SEQ ID NO: 2364745 - RNA, 19 nt, Homo sapiens
  misc_RNA (1)...(19): siRNA sense strand
ggucaaaacccgaagacuu

SEQ ID NO: 2364746 - RNA, 19 nt, Homo sapiens
  misc_RNA (1)...(19): siRNA sense strand
aggaauacaaggugcauuu

SEQ ID NO: 2364747 - RNA, 19 nt, Homo sapiens
  misc_RNA (1)...(19): siRNA sense strand
caccaaaggaacugaaaga

SEQ ID NO: 2364748 - RNA, 19 nt, Homo sapiens
  misc_RNA (1)...(19): siRNA sense strand
uauaaguguccgagagaga

SEQ ID NO: 2364749 - RNA, 19 nt, Homo sapiens
  misc_RNA (1)...(19): siRNA sense strand
acggauuggcagcgaguua

SEQ ID NO: 2364750 - RNA, 19 nt, Homo sapiens
  misc_RNA (1)...(19): siRNA sense strand
gggaagaccuagagagucc

SEQ ID NO: 2364751 - RNA, 19 nt, Homo sapiens
  misc_RNA (1)...(19): siRNA sense strand
gggcuuugacagcaggaaa

SEQ ID NO: 2364752 - RNA, 19 nt, Homo sapiens
  misc_RNA (1)...(19): siRNA sense strand
cuucaaaagcugagacaga

SEQ ID NO: 2364753 - RNA, 19 nt, Homo sapiens
  misc_RNA (1)...(19): siRNA sense strand
auugaguaucauagggaaa

SEQ ID NO: 2364754 - RNA, 19 nt, Homo sapiens
  misc_RNA (1)...(19): siRNA sense strand
cgacuagguugguccgaau

SEQ ID NO: 2364755 - RNA, 19 nt, Homo sapiens
  misc_RNA (1)...(19): siRNA sense strand
auggaaagguacacuuaaa

SEQ ID NO: 2364756 - RNA, 19 nt, Homo sapiens
  misc_RNA (1)...(19): siRNA sense strand
aaaggaacugaaagagaaa

SEQ ID NO: 2364757 - RNA, 19 nt, Homo sapiens
  misc_RNA (1)...(19): siRNA sense strand
ccaagagcaauuugaacaa

SEQ ID NO: 2364758 - RNA, 19 nt, Homo sapiens
  misc_RNA (1)...(19): siRNA sense strand
aagaggacuuugaaggaau

SEQ ID NO: 2364759 - RNA, 19 nt, Homo sapiens
  misc_RNA (1)...(19): siRNA sense strand
gaaggaaaucagagggugu

SEQ ID NO: 2364760 - RNA, 19 nt, Homo sapiens
  misc_RNA (1)...(19): siRNA sense strand
uggaaugggagcaggguca

SEQ ID NO: 2364761 - RNA, 19 nt, Homo sapiens
  misc_RNA (1)...(19): siRNA sense strand
ugaccaaccuggaguacau

SEQ ID NO: 2364762 - RNA, 19 nt, Homo sapiens
  misc_RNA (1)...(19): siRNA sense strand
ucgaaaucaacgagaucua

SEQ ID NO: 2364763 - RNA, 19 nt, Homo sapiens
  misc_RNA (1)...(19): siRNA sense strand
agagaagccaagagcaauu

SEQ ID NO: 2364764 - RNA, 19 nt, Homo sapiens
  misc_RNA (1)...(19): siRNA sense strand
cuuacgaccuccugaagaa

SEQ ID NO: 2364765 - RNA, 19 nt, Homo sapiens
  misc_RNA (1)...(19): siRNA sense strand
ugaugagcccagaggaaau

SEQ ID NO: 2364766 - RNA, 19 nt, Homo sapiens
  misc_RNA (1)...(19): siRNA sense strand
guaucacauuucagguuaa

SEQ ID NO: 2364767 - RNA, 19 nt, Homo sapiens
  misc_RNA (1)...(19): siRNA sense strand
uagcauuacaccagaaaga

SEQ ID NO: 2364768 - RNA, 19 nt, Homo sapiens
  misc_RNA (1)...(19): siRNA sense strand
cuggaguacauguuggaaa

SEQ ID NO: 2364769 - RNA, 19 nt, Homo sapiens
  misc_RNA (1)...(19): siRNA sense strand
agaugaacaagaagagaca

SEQ ID NO: 2364770 - RNA, 19 nt, Homo sapiens
  misc_RNA (1)...(19): siRNA sense strand
aaugaugagcccagaggaa

SEQ ID NO: 2364771 - RNA, 19 nt, Homo sapiens
  misc_RNA (1)...(19): siRNA sense strand
gguccgaaucauccagaua

SEQ ID NO: 2364772 - RNA, 19 nt, Homo sapiens
  misc_RNA (1)...(19): siRNA sense strand
uugauguucugguggauua

SEQ ID NO: 2364773 - RNA, 19 nt, Homo sapiens
  misc_RNA (1)...(19): siRNA sense strand
ggacagagguguacagagg

SEQ ID NO: 2364774 - RNA, 19 nt, Homo sapiens
  misc_RNA (1)...(19): siRNA sense strand
gagaaugaugauaggcuga

SEQ ID NO: 2364775 - RNA, 19 nt, Homo sapiens
  misc_RNA (1)...(19): siRNA sense strand
aggaacaggaagagcgcau

SEQ ID NO: 2364776 - RNA, 19 nt, Homo sapiens
  misc_RNA (1)...(19): siRNA sense strand
cagugaaaucagacaucua

SEQ ID NO: 2364777 - RNA, 19 nt, Homo sapiens
  misc_RNA (1)...(19): siRNA sense strand
cuucaagauauccgguaua

SEQ ID NO: 2364778 - RNA, 19 nt, Homo sapiens
  misc_RNA (1)...(19): siRNA sense strand
gacaauaaugcacgagaau

SEQ ID NO: 2364779 - RNA, 19 nt, Homo sapiens
  misc_RNA (1)...(19): siRNA sense strand
ggacuuugaaggaauacaa

SEQ ID NO: 2364780 - RNA, 19 nt, Homo sapiens
  misc_RNA (1)...(19): siRNA sense strand
gaagagacaucaaaggagu

SEQ ID NO: 2364781 - RNA, 19 nt, Homo sapiens
  misc_RNA (1)...(19): siRNA sense strand
aggaacugaaagagaaaga

SEQ ID NO: 2364782 - RNA, 19 nt, Homo sapiens
  misc_RNA (1)...(19): siRNA sense strand
acaagggaacuaugugaaa

SEQ ID NO: 2364783 - RNA, 19 nt, Homo sapiens
  misc_RNA (1)...(19): siRNA sense strand
ggacagaaggagcagguga

SEQ ID NO: 2364784 - RNA, 19 nt, Homo sapiens
  misc_RNA (1)...(19): siRNA sense strand
gugcagagagagcgggaca

SEQ ID NO: 2364785 - RNA, 19 nt, Homo sapiens
  misc_RNA (1)...(19): siRNA sense strand
acggaaacgugguggccuu

SEQ ID NO: 2364786 - RNA, 19 nt, Homo sapiens
  misc_RNA (1)...(19): siRNA sense strand
gagcaggugagcaggaaaa

SEQ ID NO: 2364787 - RNA, 19 nt, Homo sapiens
  misc_RNA (1)...(19): siRNA sense strand
ccugggaggagguggaaga

SEQ ID NO: 2364788 - RNA, 19 nt, Homo sapiens
  misc_RNA (1)...(19): siRNA sense strand
gaagacaagcucagggcca

SEQ ID NO: 2364789 - RNA, 19 nt, Homo sapiens
  misc_RNA (1)...(19): siRNA sense strand
ggagagguaugcagaggca

SEQ ID NO: 2364790 - RNA, 19 nt, Homo sapiens
  misc_RNA (1)...(19): siRNA sense strand
aggaacagcaggagaugga

SEQ ID NO: 2364791 - RNA, 19 nt, Homo sapiens
  misc_RNA (1)...(19): siRNA sense strand
ggagcaggugagcaggaaa

SEQ ID NO: 2364792 - RNA, 19 nt, Homo sapiens
  misc_RNA (1)...(19): siRNA sense strand
ccuucaucaucgagaaaau

SEQ ID NO: 2364793 - RNA, 19 nt, Homo sapiens
  misc_RNA (1)...(19): siRNA sense strand
gagaaaauggccaggcaca

SEQ ID NO: 2364794 - RNA, 19 nt, Homo sapiens
  misc_RNA (1)...(19): siRNA sense strand
uggugcugcuggaggaaaa

SEQ ID NO: 2364795 - RNA, 19 nt, Homo sapiens
  misc_RNA (1)...(19): siRNA sense strand
ggauuggacagaaggagca

SEQ ID NO: 2364796 - RNA, 19 nt, Homo sapiens
  misc_RNA (1)...(19): siRNA sense strand
aggcaggggcaguuacaaa

SEQ ID NO: 2364797 - RNA, 19 nt, Homo sapiens
  misc_RNA (1)...(19): siRNA sense strand
agaagaagauggagggaga

SEQ ID NO: 2364798 - RNA, 19 nt, Homo sapiens
  misc_RNA (1)...(19): siRNA sense strand
uagaaagagcaaagagaaa

SEQ ID NO: 2364799 - RNA, 19 nt, Homo sapiens
  misc_RNA (1)...(19): siRNA sense strand
cugaagaagcggaggaaca

SEQ ID NO: 2364800 - RNA, 19 nt, Homo sapiens
  misc_RNA (1)...(19): siRNA sense strand
agagaaaacuagagggaga

SEQ ID NO: 2364801 - RNA, 19 nt, Homo sapiens
  misc_RNA (1)...(19): siRNA sense strand
caagaagaguugauggcua

SEQ ID NO: 2364802 - RNA, 19 nt, Homo sapiens
  misc_RNA (1)...(19): siRNA sense strand
uggcuaagaccgaggcaaa

SEQ ID NO: 2364803 - RNA, 19 nt, Homo sapiens
  misc_RNA (1)...(19): siRNA sense strand
gggagaagaagaaggaaga

SEQ ID NO: 2364804 - RNA, 19 nt, Homo sapiens
  misc_RNA (1)...(19): siRNA sense strand
ccucaaaagugcagagaca

SEQ ID NO: 2364805 - RNA, 19 nt, Homo sapiens
  misc_RNA (1)...(19): siRNA sense strand
ucuccaaagccaagggaaa

SEQ ID NO: 2364806 - RNA, 19 nt, Homo sapiens
  misc_RNA (1)...(19): siRNA sense strand
gagcugaggaugaggaaga

SEQ ID NO: 2364807 - RNA, 19 nt, Homo sapiens
  misc_RNA (1)...(19): siRNA sense strand
ggaccaaauaugagacaga

SEQ ID NO: 2364808 - RNA, 19 nt, Homo sapiens
  misc_RNA (1)...(19): siRNA sense strand
ugucaagggucuacgcaaa

SEQ ID NO: 2364809 - RNA, 19 nt, Homo sapiens
  misc_RNA (1)...(19): siRNA sense strand
cugaggaacuauaggaaca

SEQ ID NO: 2364810 - RNA, 19 nt, Homo sapiens
  misc_RNA (1)...(19): siRNA sense strand
gagaaggagaagagugaga

SEQ ID NO: 2364811 - RNA, 19 nt, Homo sapiens
  misc_RNA (1)...(19): siRNA sense strand
gagcaauguccaaggccaa

SEQ ID NO: 2364812 - RNA, 19 nt, Homo sapiens
  misc_RNA (1)...(19): siRNA sense strand
uggacaagcugcaagcaaa

SEQ ID NO: 2364813 - RNA, 19 nt, Homo sapiens
  misc_RNA (1)...(19): siRNA sense strand
aagcaagauugaagaugaa

SEQ ID NO: 2364814 - RNA, 19 nt, Homo sapiens
  misc_RNA (1)...(19): siRNA sense strand
agauagugccauugaaauu

SEQ ID NO: 2364815 - RNA, 19 nt, Homo sapiens
  misc_RNA (1)...(19): siRNA sense strand
aggaugaggaagagaucaa

SEQ ID NO: 2364816 - RNA, 19 nt, Homo sapiens
  misc_RNA (1)...(19): siRNA sense strand
agucugagguugauaggaa

SEQ ID NO: 2364817 - RNA, 19 nt, Homo sapiens
  misc_RNA (1)...(19): siRNA sense strand
gggccaaagcagagaagca

SEQ ID NO: 2364818 - RNA, 19 nt, Homo sapiens
  misc_RNA (1)...(19): siRNA sense strand
gugcagagacagagaagga

SEQ ID NO: 2364819 - RNA, 19 nt, Homo sapiens
  misc_RNA (1)...(19): siRNA sense strand
aggaggaaaucgaggcaga

SEQ ID NO: 2364820 - RNA, 19 nt, Homo sapiens
  misc_RNA (1)...(19): siRNA sense strand
acgccaagaccgugaggaa

SEQ ID NO: 2364821 - RNA, 19 nt, Homo sapiens
  misc_RNA (1)...(19): siRNA sense strand
ugaacaacaucuuggaaaa

SEQ ID NO: 2364822 - RNA, 19 nt, Homo sapiens
  misc_RNA (1)...(19): siRNA sense strand
gagaagagugagaugaaga

SEQ ID NO: 2364823 - RNA, 19 nt, Homo sapiens
  misc_RNA (1)...(19): siRNA sense strand
uugaacaugaagagggaaa

SEQ ID NO: 2364824 - RNA, 19 nt, Homo sapiens
  misc_RNA (1)...(19): siRNA sense strand
uggccaagguugagaagga

SEQ ID NO: 2364825 - RNA, 19 nt, Homo sapiens
  misc_RNA (1)...(19): siRNA sense strand
gcacagaggagcuggagga

SEQ ID NO: 2364826 - RNA, 19 nt, Homo sapiens
  misc_RNA (1)...(19): siRNA sense strand
aggaagaccgcaagaauau

SEQ ID NO: 2364827 - RNA, 19 nt, Homo sapiens
  misc_RNA (1)...(19): siRNA sense strand
augacaagaucgaggacau

SEQ ID NO: 2364828 - RNA, 19 nt, Homo sapiens
  misc_RNA (1)...(19): siRNA sense strand
uggagaaggagaagaguga

SEQ ID NO: 2364829 - RNA, 19 nt, Homo sapiens
  misc_RNA (1)...(19): siRNA sense strand
cagaagagauggcgggucu

SEQ ID NO: 2364830 - RNA, 19 nt, Homo sapiens
  misc_RNA (1)...(19): siRNA sense strand
aaauuaagaccaaggaaga

SEQ ID NO: 2364831 - RNA, 19 nt, Homo sapiens
  misc_RNA (1)...(19): siRNA sense strand
uggaggaggccaagaagaa

SEQ ID NO: 2364832 - RNA, 19 nt, Homo sapiens
  misc_RNA (1)...(19): siRNA sense strand
ugaagaagaacuuggaaca

SEQ ID NO: 2364833 - RNA, 19 nt, Homo sapiens
  misc_RNA (1)...(19): siRNA sense strand
agagauacaagguguuaaa

SEQ ID NO: 2364834 - RNA, 19 nt, Homo sapiens
  misc_RNA (1)...(19): siRNA sense strand
cagagaaggagauggccaa

SEQ ID NO: 2364835 - RNA, 19 nt, Homo sapiens
  misc_RNA (1)...(19): siRNA sense strand
aggagaagagugagaugaa

SEQ ID NO: 2364836 - RNA, 19 nt, Homo sapiens
  misc_RNA (1)...(19): siRNA sense strand
agaagcaaguugagcaaga

SEQ ID NO: 2364837 - RNA, 19 nt, Homo sapiens
  misc_RNA (1)...(19): siRNA sense strand
gggaagaagcagauccaga

SEQ ID NO: 2364838 - RNA, 19 nt, Homo sapiens
  misc_RNA (1)...(19): siRNA sense strand
aggaaagagcuggaagaaa

SEQ ID NO: 2364839 - RNA, 19 nt, Homo sapiens
  misc_RNA (1)...(19): siRNA sense strand
gggaacaguaugaggagga

SEQ ID NO: 2364840 - RNA, 19 nt, Homo sapiens
  misc_RNA (1)...(19): siRNA sense strand
gagaaacaugccacagaaa

SEQ ID NO: 2364841 - RNA, 19 nt, Homo sapiens
  misc_RNA (1)...(19): siRNA sense strand
caagauugaagaugaacaa

SEQ ID NO: 2364842 - RNA, 19 nt, Homo sapiens
  misc_RNA (1)...(19): siRNA sense strand
gaacagacggagaggagca

SEQ ID NO: 2364843 - RNA, 19 nt, Homo sapiens
  misc_RNA (1)...(19): siRNA sense strand
ccaaauaugacaagaucga

SEQ ID NO: 2364844 - RNA, 19 nt, Homo sapiens
  misc_RNA (1)...(19): siRNA sense strand
ccauugaaauucugggcuu

SEQ ID NO: 2364845 - RNA, 19 nt, Homo sapiens
  misc_RNA (1)...(19): siRNA sense strand
cggcccagauugagaugaa

SEQ ID NO: 2364846 - RNA, 19 nt, Homo sapiens
  misc_RNA (1)...(19): siRNA sense strand
aagaggagauaaaggccaa

SEQ ID NO: 2364847 - RNA, 19 nt, Homo sapiens
  misc_RNA (1)...(19): siRNA sense strand
cuucgguaccacagggaaa

SEQ ID NO: 2364848 - RNA, 19 nt, Homo sapiens
  misc_RNA (1)...(19): siRNA sense strand
uggcaagaguggaguacca

SEQ ID NO: 2364849 - RNA, 19 nt, Homo sapiens
  misc_RNA (1)...(19): siRNA sense strand
agggaaagauccugcgcau

SEQ ID NO: 2364850 - RNA, 19 nt, Homo sapiens
  misc_RNA (1)...(19): siRNA sense strand
uugaccagaugaagagaaa

SEQ ID NO: 2364851 - RNA, 19 nt, Homo sapiens
  misc_RNA (1)...(19): siRNA sense strand
agggagagauggaagacau

SEQ ID NO: 2364852 - RNA, 19 nt, Homo sapiens
  misc_RNA (1)...(19): siRNA sense strand
guacaagaaggaaggcauu

SEQ ID NO: 2364853 - RNA, 19 nt, Homo sapiens
  misc_RNA (1)...(19): siRNA sense strand
cugagagagcugaggauga

SEQ ID NO: 2364854 - RNA, 19 nt, Homo sapiens
  misc_RNA (1)...(19): siRNA sense strand
aggcugagaucgaggaacu

SEQ ID NO: 2364855 - RNA, 19 nt, Homo sapiens
  misc_RNA (1)...(19): siRNA sense strand
uggccaacaugaaggaaga

SEQ ID NO: 2364856 - RNA, 19 nt, Homo sapiens
  misc_RNA (1)...(19): siRNA sense strand
augcagaagagaaggccaa

SEQ ID NO: 2364857 - RNA, 19 nt, Homo sapiens
  misc_RNA (1)...(19): siRNA sense strand
cuacaagagacaagcugaa

SEQ ID NO: 2364858 - RNA, 19 nt, Homo sapiens
  misc_RNA (1)...(19): siRNA sense strand
agguugagaaggagaaaca

SEQ ID NO: 2364859 - RNA, 19 nt, Homo sapiens
  misc_RNA (1)...(19): siRNA sense strand
cugcugaggcccugaggaa

SEQ ID NO: 2364860 - RNA, 19 nt, Homo sapiens
  misc_RNA (1)...(19): siRNA sense strand
aagaggaccugaaggaaca

SEQ ID NO: 2364861 - RNA, 19 nt, Homo sapiens
  misc_RNA (1)...(19): siRNA sense strand
gacaauucaucgauagcaa

SEQ ID NO: 2364862 - RNA, 19 nt, Homo sapiens
  misc_RNA (1)...(19): siRNA sense strand
cuagaaagagcaaagagaa

SEQ ID NO: 2364863 - RNA, 19 nt, Homo sapiens
  misc_RNA (1)...(19): siRNA sense strand
gugcagaaagagagagaca

SEQ ID NO: 2364864 - RNA, 19 nt, Homo sapiens
  misc_RNA (1)...(19): siRNA sense strand
aggaaaaggagcagaagaa

SEQ ID NO: 2364865 - RNA, 19 nt, Homo sapiens
  misc_RNA (1)...(19): siRNA sense strand
cagaagaagagcagaggga

SEQ ID NO: 2364866 - RNA, 19 nt, Homo sapiens
  misc_RNA (1)...(19): siRNA sense strand
gaagaagagcagagggaug

SEQ ID NO: 2364867 - RNA, 19 nt, Homo sapiens
  misc_RNA (1)...(19): siRNA sense strand
gaagacaagcugagggcca

SEQ ID NO: 2364868 - RNA, 19 nt, Homo sapiens
  misc_RNA (1)...(19): siRNA sense strand
gaauagaccaucaggagca

SEQ ID NO: 2364869 - RNA, 19 nt, Homo sapiens
  misc_RNA (1)...(19): siRNA sense strand
ccaagagacaggagauacu

SEQ ID NO: 2364870 - RNA, 19 nt, Homo sapiens
  misc_RNA (1)...(19): siRNA sense strand
ccugggagaagguggaaga

SEQ ID NO: 2364871 - RNA, 19 nt, Homo sapiens
  misc_RNA (1)...(19): siRNA sense strand
gcacagaaggagcagcuga

SEQ ID NO: 2364872 - RNA, 19 nt, Homo sapiens
  misc_RNA (1)...(19): siRNA sense strand
gggccauacuggaggacag

SEQ ID NO: 2364873 - RNA, 19 nt, Homo sapiens
  misc_RNA (1)...(19): siRNA sense strand
aggugcagaaagagagaga

SEQ ID NO: 2364874 - RNA, 19 nt, Homo sapiens
  misc_RNA (1)...(19): siRNA sense strand
gagaaaauggccaggcaca

SEQ ID NO: 2364875 - RNA, 19 nt, Homo sapiens
  misc_RNA (1)...(19): siRNA sense strand
gagcagaagaagagcagag

SEQ ID NO: 2364876 - RNA, 19 nt, Homo sapiens
  misc_RNA (1)...(19): siRNA sense strand
aggcacagcuacaaaggca

SEQ ID NO: 2364877 - RNA, 19 nt, Homo sapiens
  misc_RNA (1)...(19): siRNA sense strand
uggugcugcuggaggaaaa

SEQ ID NO: 2364878 - RNA, 19 nt, Homo sapiens
  misc_RNA (1)...(19): siRNA sense strand
guggaggugcagaaagaga

SEQ ID NO: 2364879 - RNA, 19 nt, Homo sapiens
  misc_RNA (1)...(19): siRNA sense strand
gggcagaaggagggagauc

SEQ ID NO: 2364880 - RNA, 19 nt, Homo sapiens
  misc_RNA (1)...(19): siRNA sense strand
acccaagagacaggagaua

SEQ ID NO: 2364881 - RNA, 19 nt, Homo sapiens
  misc_RNA (1)...(19): siRNA sense strand
gauaauaggaauugcaaga

SEQ ID NO: 2364882 - RNA, 19 nt, Homo sapiens
  misc_RNA (1)...(19): siRNA sense strand
aggaauugcaagaggccaa

SEQ ID NO: 2364883 - RNA, 19 nt, Homo sapiens
  misc_RNA (1)...(19): siRNA sense strand
aaagagaguuccugcgaca

SEQ ID NO: 2364884 - RNA, 19 nt, Homo sapiens
  misc_RNA (1)...(19): siRNA sense strand
ccuuggagaaagauuuaaa

SEQ ID NO: 2364885 - RNA, 19 nt, Homo sapiens
  misc_RNA (1)...(19): siRNA sense strand
aaugaugugagcaaggaaa

SEQ ID NO: 2364886 - RNA, 19 nt, Homo sapiens
  misc_RNA (1)...(19): siRNA sense strand
ccuuguaaagccugauaau

SEQ ID NO: 2364887 - RNA, 19 nt, Homo sapiens
  misc_RNA (1)...(19): siRNA sense strand
aagccugauaauaggaauu

SEQ ID NO: 2364888 - RNA, 19 nt, Homo sapiens
  misc_RNA (1)...(19): siRNA sense strand
cauugaugagauagaugaa

SEQ ID NO: 2364889 - RNA, 19 nt, Homo sapiens
  misc_RNA (1)...(19): siRNA sense strand
uugcaagaggccaagagaa

SEQ ID NO: 2364890 - RNA, 19 nt, Homo sapiens
  misc_RNA (1)...(19): siRNA sense strand
cucugaaauuuccggacua

SEQ ID NO: 2364891 - RNA, 19 nt, Homo sapiens
  misc_RNA (1)...(19): siRNA sense strand
cuuacauugaugagauaga

SEQ ID NO: 2364892 - RNA, 19 nt, Homo sapiens
  misc_RNA (1)...(19): siRNA sense strand
ccaaagaggcaguggcaga

SEQ ID NO: 2364893 - RNA, 19 nt, Homo sapiens
  misc_RNA (1)...(19): siRNA sense strand
ggcuaaaguucuacggcua

SEQ ID NO: 2364894 - RNA, 19 nt, Homo sapiens
  misc_RNA (1)...(19): siRNA sense strand
augaagagucagaagauaa

SEQ ID NO: 2364895 - RNA, 19 nt, Homo sapiens
  misc_RNA (1)...(19): siRNA sense strand
gcaaauaucaacagggagu

SEQ ID NO: 2364896 - RNA, 19 nt, Homo sapiens
  misc_RNA (1)...(19): siRNA sense strand
gggaagauggauaagaaau

SEQ ID NO: 2364897 - RNA, 19 nt, Homo sapiens
  misc_RNA (1)...(19): siRNA sense strand
cuguaaaccuagcaaacaa

SEQ ID NO: 2364898 - RNA, 19 nt, Homo sapiens
  misc_RNA (1)...(19): siRNA sense strand
ugaucuaguugcagagaga

SEQ ID NO: 2364899 - RNA, 19 nt, Homo sapiens
  misc_RNA (1)...(19): siRNA sense strand
gaacauggcuacuggagca

SEQ ID NO: 2364900 - RNA, 19 nt, Homo sapiens
  misc_RNA (1)...(19): siRNA sense strand
ucaccaaacaggaagacaa

SEQ ID NO: 2364901 - RNA, 19 nt, Homo sapiens
  misc_RNA (1)...(19): siRNA sense strand
cugaagauaagaagaaaga

SEQ ID NO: 2364902 - RNA, 19 nt, Homo sapiens
  misc_RNA (1)...(19): siRNA sense strand
aguuuggagucaagagcua

SEQ ID NO: 2364903 - RNA, 19 nt, Homo sapiens
  misc_RNA (1)...(19): siRNA sense strand
auucaagauugcagucaua

SEQ ID NO: 2364904 - RNA, 19 nt, Homo sapiens
  misc_RNA (1)...(19): siRNA sense strand
cguuuuaagucaucggaaa

SEQ ID NO: 2364905 - RNA, 19 nt, Homo sapiens
  misc_RNA (1)...(19): siRNA sense strand
aggaagaaccaauugauau

SEQ ID NO: 2364906 - RNA, 19 nt, Homo sapiens
  misc_RNA (1)...(19): siRNA sense strand
uuguggaagcauugaguaa

SEQ ID NO: 2364907 - RNA, 19 nt, Homo sapiens
  misc_RNA (1)...(19): siRNA sense strand
agaaagaaauggaucgacu

SEQ ID NO: 2364908 - RNA, 19 nt, Homo sapiens
  misc_RNA (1)...(19): siRNA sense strand
uggcagaagcugaacgaca

SEQ ID NO: 2364909 - RNA, 19 nt, Homo sapiens
  misc_RNA (1)...(19): siRNA sense strand
auucagaagaccaggaaca

SEQ ID NO: 2364910 - RNA, 19 nt, Homo sapiens
  misc_RNA (1)...(19): siRNA sense strand
cuaacauaccagaggcaau

SEQ ID NO: 2364911 - RNA, 19 nt, Homo sapiens
  misc_RNA (1)...(19): siRNA sense strand
uuguaaaugaagagcagaa

SEQ ID NO: 2364912 - RNA, 19 nt, Homo sapiens
  misc_RNA (1)...(19): siRNA sense strand
auuaacagaugaagaguca

SEQ ID NO: 2364913 - RNA, 19 nt, Homo sapiens
  misc_RNA (1)...(19): siRNA sense strand
guggaagcauugaguaaca

SEQ ID NO: 2364914 - RNA, 19 nt, Homo sapiens
  misc_RNA (1)...(19): siRNA sense strand
acaaagauccagugaugau

SEQ ID NO: 2364915 - RNA, 19 nt, Homo sapiens
  misc_RNA (1)...(19): siRNA sense strand
agaacaaaguauucaacga

SEQ ID NO: 2364916 - RNA, 19 nt, Homo sapiens
  misc_RNA (1)...(19): siRNA sense strand
ggaagauggauaagaaauc

SEQ ID NO: 2364917 - RNA, 19 nt, Homo sapiens
  misc_RNA (1)...(19): siRNA sense strand
ucuagagaauggacaacaa

SEQ ID NO: 2364918 - RNA, 19 nt, Homo sapiens
  misc_RNA (1)...(19): siRNA sense strand
ugauaaggccaaagaggca

SEQ ID NO: 2364919 - RNA, 19 nt, Homo sapiens
  misc_RNA (1)...(19): siRNA sense strand
agagaauggacaacaaauu

SEQ ID NO: 2364920 - RNA, 19 nt, Homo sapiens
  misc_RNA (1)...(19): siRNA sense strand
agauuacuguugagaguga

SEQ ID NO: 2364921 - RNA, 19 nt, Homo sapiens
  misc_RNA (1)...(19): siRNA sense strand
uaagaaaucuacugggcca

SEQ ID NO: 2364922 - RNA, 19 nt, Homo sapiens
  misc_RNA (1)...(19): siRNA sense strand
agugaugaugagagaguuu

SEQ ID NO: 2364923 - RNA, 19 nt, Homo sapiens
  misc_RNA (1)...(19): siRNA sense strand
aguuagagccaaauugaau

SEQ ID NO: 2364924 - RNA, 19 nt, Homo sapiens
  misc_RNA (1)...(19): siRNA sense strand
guacuuauguuuagcagga

SEQ ID NO: 2364925 - RNA, 19 nt, Homo sapiens
  misc_RNA (1)...(19): siRNA sense strand
gcgaaacaucuaaugaaga

SEQ ID NO: 2364926 - RNA, 19 nt, Homo sapiens
  misc_RNA (1)...(19): siRNA sense strand
ugcaguugaucuagagcaa

SEQ ID NO: 2364927 - RNA, 19 nt, Homo sapiens
  misc_RNA (1)...(19): siRNA sense strand
gcacuaaagacuacccaga

SEQ ID NO: 2364928 - RNA, 19 nt, Homo sapiens
  misc_RNA (1)...(19): siRNA sense strand
ugggaagauggauaagaaa

SEQ ID NO: 2364929 - RNA, 19 nt, Homo sapiens
  misc_RNA (1)...(19): siRNA sense strand
ggaucaugaaagagaaucu

SEQ ID NO: 2364930 - RNA, 19 nt, Homo sapiens
  misc_RNA (1)...(19): siRNA sense strand
ugaucuagagcaagggaga

SEQ ID NO: 2364931 - RNA, 19 nt, Homo sapiens
  misc_RNA (1)...(19): siRNA sense strand
auggucaaguccuggaaua

SEQ ID NO: 2364932 - RNA, 19 nt, Homo sapiens
  misc_RNA (1)...(19): siRNA sense strand
caaggaaagcuaugaaacu

SEQ ID NO: 2364933 - RNA, 19 nt, Homo sapiens
  misc_RNA (1)...(19): siRNA sense strand
gaguaugugugaagccuca

SEQ ID NO: 2364934 - RNA, 19 nt, Homo sapiens
  misc_RNA (1)...(19): siRNA sense strand
uugggaagauggauaagaa

SEQ ID NO: 2364935 - RNA, 19 nt, Homo sapiens
  misc_RNA (1)...(19): siRNA sense strand
uaacagaugaagagucaga

SEQ ID NO: 2364936 - RNA, 19 nt, Homo sapiens
  misc_RNA (1)...(19): siRNA sense strand
agaugaagagucagaagau

SEQ ID NO: 2364937 - RNA, 19 nt, Homo sapiens
  misc_RNA (1)...(19): siRNA sense strand
uggaagaaguuuggggcua

SEQ ID NO: 2364938 - RNA, 19 nt, Homo sapiens
  misc_RNA (1)...(19): siRNA sense strand
cagaugaauaugcuguaua

SEQ ID NO: 2364939 - RNA, 19 nt, Homo sapiens
  misc_RNA (1)...(19): siRNA sense strand
uuucauuuccugacgauua

SEQ ID NO: 2364940 - RNA, 19 nt, Homo sapiens
  misc_RNA (1)...(19): siRNA sense strand
acaaaggaaggaagaacuu

SEQ ID NO: 2364941 - RNA, 19 nt, Homo sapiens
  misc_RNA (1)...(19): siRNA sense strand
aauucugauugcacggaaa

SEQ ID NO: 2364942 - RNA, 19 nt, Homo sapiens
  misc_RNA (1)...(19): siRNA sense strand
gcgacauagcaaauaucaa

SEQ ID NO: 2364943 - RNA, 19 nt, Homo sapiens
  misc_RNA (1)...(19): siRNA sense strand
augaaauggaucuggacuu

SEQ ID NO: 2364944 - RNA, 19 nt, Homo sapiens
  misc_RNA (1)...(19): siRNA sense strand
aaggaagaaccaauugaua

SEQ ID NO: 2364945 - RNA, 19 nt, Homo sapiens
  misc_RNA (1)...(19): siRNA sense strand
cuggaauaccggaguacuu

SEQ ID NO: 2364946 - RNA, 19 nt, Homo sapiens
  misc_RNA (1)...(19): siRNA sense strand
cugcagaggaacauggcuu

SEQ ID NO: 2364947 - RNA, 19 nt, Homo sapiens
  misc_RNA (1)...(19): siRNA sense strand
ggaagaaguuuggggcuau

SEQ ID NO: 2364948 - RNA, 19 nt, Homo sapiens
  misc_RNA (1)...(19): siRNA sense strand
ggcugaaauaacagacauu

SEQ ID NO: 2364949 - RNA, 19 nt, Homo sapiens
  misc_RNA (1)...(19): siRNA sense strand
ugaagagucagaagauaau

SEQ ID NO: 2364950 - RNA, 19 nt, Homo sapiens
  misc_RNA (1)...(19): siRNA sense strand
uagcaaauaucaacaggga

SEQ ID NO: 2364951 - RNA, 19 nt, Homo sapiens
  misc_RNA (1)...(19): siRNA sense strand
cuaaugaagcucagugguu

SEQ ID NO: 2364952 - RNA, 19 nt, Homo sapiens
  misc_RNA (1)...(19): siRNA sense strand
cuguaauguuggacacuaa

SEQ ID NO: 2364953 - RNA, 19 nt, Homo sapiens
  misc_RNA (1)...(19): siRNA sense strand
acgauagaggaaagagaaa

SEQ ID NO: 2364954 - RNA, 19 nt, Homo sapiens
  misc_RNA (1)...(19): siRNA sense strand
acgccaaaguacuggagaa

SEQ ID NO: 2364955 - RNA, 19 nt, Homo sapiens
  misc_RNA (1)...(19): siRNA sense strand
agauagugaauuagcacaa

SEQ ID NO: 2364956 - RNA, 19 nt, Homo sapiens
  misc_RNA (1)...(19): siRNA sense strand
cagccuaagacgauaaaga

SEQ ID NO: 2364957 - RNA, 19 nt, Homo sapiens
  misc_RNA (1)...(19): siRNA sense strand
gugugaagaauuugcaaga

SEQ ID NO: 2364958 - RNA, 19 nt, Homo sapiens
  misc_RNA (1)...(19): siRNA sense strand
auucggaaguauucacaaa

SEQ ID NO: 2364959 - RNA, 19 nt, Homo sapiens
  misc_RNA (1)...(19): siRNA sense strand
agguguggaaggaggguau

SEQ ID NO: 2364960 - RNA, 19 nt, Homo sapiens
  misc_RNA (1)...(19): siRNA sense strand
aaacgauagaggaaagaga

SEQ ID NO: 2364961 - RNA, 19 nt, Homo sapiens
  misc_RNA (1)...(19): siRNA sense strand
gcugaaauccagugcacca

SEQ ID NO: 2364962 - RNA, 19 nt, Homo sapiens
  misc_RNA (1)...(19): siRNA sense strand
gccuaagacgauaaagaau

SEQ ID NO: 2364963 - RNA, 19 nt, Homo sapiens
  misc_RNA (1)...(19): siRNA sense strand
aagcaaacgauagaggaaa

SEQ ID NO: 2364964 - RNA, 19 nt, Homo sapiens
  misc_RNA (1)...(19): siRNA sense strand
cugcagaagaaauugauga

SEQ ID NO: 2364965 - RNA, 19 nt, Homo sapiens
  misc_RNA (1)...(19): siRNA sense strand
aagauugaauuuagggacu

SEQ ID NO: 2364966 - RNA, 19 nt, Homo sapiens
  misc_RNA (1)...(19): siRNA sense strand
guacuggagaagaagguga

SEQ ID NO: 2364967 - RNA, 19 nt, Homo sapiens
  misc_RNA (1)...(19): siRNA sense strand
uagcaagagcauuacaauu

SEQ ID NO: 2364968 - RNA, 19 nt, Homo sapiens
  misc_RNA (1)...(19): siRNA sense strand
agugugaauugcagugaga

SEQ ID NO: 2364969 - RNA, 19 nt, Homo sapiens
  misc_RNA (1)...(19): siRNA sense strand
uguaauagauccuugccau

SEQ ID NO: 2364970 - RNA, 19 nt, Homo sapiens
  misc_RNA (1)...(19): siRNA sense strand
cagaagaaauugaugaagc

SEQ ID NO: 2364971 - RNA, 19 nt, Homo sapiens
  misc_RNA (1)...(19): siRNA sense strand
acaaauaaaagacgccaaa

SEQ ID NO: 2364972 - RNA, 19 nt, Homo sapiens
  misc_RNA (1)...(19): siRNA sense strand
acugaagaaugcaccacaa

SEQ ID NO: 2364973 - RNA, 19 nt, Homo sapiens
  misc_RNA (1)...(19): siRNA sense strand
agacaacgcuacuacccaa

SEQ ID NO: 2364974 - RNA, 19 nt, Homo sapiens
  misc_RNA (1)...(19): siRNA sense strand
acaaguuaguucuccacaa

SEQ ID NO: 2364975 - RNA, 19 nt, Homo sapiens
  misc_RNA (1)...(19): siRNA sense strand
uguccuaaccagugaagca

SEQ ID NO: 2364976 - RNA, 19 nt, Homo sapiens
  misc_RNA (1)...(19): siRNA sense strand
cagcgaauggggaggaaga

SEQ ID NO: 2364977 - RNA, 19 nt, Homo sapiens
  misc_RNA (1)...(19): siRNA sense strand
ggcuggauauauuaaggaa

SEQ ID NO: 2364978 - RNA, 19 nt, Homo sapiens
  misc_RNA (1)...(19): siRNA sense strand
cguucagccuccacagaca

SEQ ID NO: 2364979 - RNA, 19 nt, Homo sapiens
  misc_RNA (1)...(19): siRNA sense strand
cuaauacugcagaagaaau

SEQ ID NO: 2364980 - RNA, 19 nt, Homo sapiens
  misc_RNA (1)...(19): siRNA sense strand
cggcagaggcuucgaagac

SEQ ID NO: 2364981 - RNA, 19 nt, Homo sapiens
  misc_RNA (1)...(19): siRNA sense strand
cugcagccuaagacgauaa

SEQ ID NO: 2364982 - RNA, 19 nt, Homo sapiens
  misc_RNA (1)...(19): siRNA sense strand
ugcagaagaaauugaugaa

SEQ ID NO: 2364983 - RNA, 19 nt, Homo sapiens
  misc_RNA (1)...(19): siRNA sense strand
cuguaauguuggacacuaa

SEQ ID NO: 2364984 - RNA, 19 nt, Homo sapiens
  misc_RNA (1)...(19): siRNA sense strand
acgauagaggaaagagaaa

SEQ ID NO: 2364985 - RNA, 19 nt, Homo sapiens
  misc_RNA (1)...(19): siRNA sense strand
agauagugaauuagcacaa

SEQ ID NO: 2364986 - RNA, 19 nt, Homo sapiens
  misc_RNA (1)...(19): siRNA sense strand
cagccuaagacgauaaaga

SEQ ID NO: 2364987 - RNA, 19 nt, Homo sapiens
  misc_RNA (1)...(19): siRNA sense strand
gugugaagaauuugcaaga

SEQ ID NO: 2364988 - RNA, 19 nt, Homo sapiens
  misc_RNA (1)...(19): siRNA sense strand
agguguggaaggaggguau

SEQ ID NO: 2364989 - RNA, 19 nt, Homo sapiens
  misc_RNA (1)...(19): siRNA sense strand
aaacgauagaggaaagaga

SEQ ID NO: 2364990 - RNA, 19 nt, Homo sapiens
  misc_RNA (1)...(19): siRNA sense strand
gcugaaauccagugcacca

SEQ ID NO: 2364991 - RNA, 19 nt, Homo sapiens
  misc_RNA (1)...(19): siRNA sense strand
gccuaagacgauaaagaau

SEQ ID NO: 2364992 - RNA, 19 nt, Homo sapiens
  misc_RNA (1)...(19): siRNA sense strand
aagcaaacgauagaggaaa

SEQ ID NO: 2364993 - RNA, 19 nt, Homo sapiens
  misc_RNA (1)...(19): siRNA sense strand
cugcagaagaaauugauga

SEQ ID NO: 2364994 - RNA, 19 nt, Homo sapiens
  misc_RNA (1)...(19): siRNA sense strand
aagauugaauuuagggacu

SEQ ID NO: 2364995 - RNA, 19 nt, Homo sapiens
  misc_RNA (1)...(19): siRNA sense strand
uagcaagagcauuacaauu

SEQ ID NO: 2364996 - RNA, 19 nt, Homo sapiens
  misc_RNA (1)...(19): siRNA sense strand
agugugaauugcagugaga

SEQ ID NO: 2364997 - RNA, 19 nt, Homo sapiens
  misc_RNA (1)...(19): siRNA sense strand
cagaagaaauugaugaagc

SEQ ID NO: 2364998 - RNA, 19 nt, Homo sapiens
  misc_RNA (1)...(19): siRNA sense strand
acugaagaaugcaccacaa

SEQ ID NO: 2364999 - RNA, 19 nt, Homo sapiens
  misc_RNA (1)...(19): siRNA sense strand
agacaacgcuacuacccaa

SEQ ID NO: 2365000 - RNA, 19 nt, Homo sapiens
  misc_RNA (1)...(19): siRNA sense strand
acaaguuaguucuccacaa

SEQ ID NO: 2365001 - RNA, 19 nt, Homo sapiens
  misc_RNA (1)...(19): siRNA sense strand
uguccuaaccagugaagca

SEQ ID NO: 2365002 - RNA, 19 nt, Homo sapiens
  misc_RNA (1)...(19): siRNA sense strand
cagcgaauggggaggaaga

SEQ ID NO: 2365003 - RNA, 19 nt, Homo sapiens
  misc_RNA (1)...(19): siRNA sense strand
ggcuggauauauuaaggaa

SEQ ID NO: 2365004 - RNA, 19 nt, Homo sapiens
  misc_RNA (1)...(19): siRNA sense strand
cguucagccuccacagaca

SEQ ID NO: 2365005 - RNA, 19 nt, Homo sapiens
  misc_RNA (1)...(19): siRNA sense strand
cuaauacugcagaagaaau

SEQ ID NO: 2365006 - RNA, 19 nt, Homo sapiens
  misc_RNA (1)...(19): siRNA sense strand
cggcagaggcuucgaagac

SEQ ID NO: 2365007 - RNA, 19 nt, Homo sapiens
  misc_RNA (1)...(19): siRNA sense strand
cugcagccuaagacgauaa

SEQ ID NO: 2365008 - RNA, 19 nt, Homo sapiens
  misc_RNA (1)...(19): siRNA sense strand
ugcagaagaaauugaugaa

SEQ ID NO: 2365009 - RNA, 19 nt, Homo sapiens
  misc_RNA (1)...(19): siRNA sense strand
cagugaaagugguggacaa

SEQ ID NO: 2365010 - RNA, 19 nt, Homo sapiens
  misc_RNA (1)...(19): siRNA sense strand
uagaauugccaguggauaa

SEQ ID NO: 2365011 - RNA, 19 nt, Homo sapiens
  misc_RNA (1)...(19): siRNA sense strand
ccucaaaggcagagugcuu

SEQ ID NO: 2365012 - RNA, 19 nt, Homo sapiens
  misc_RNA (1)...(19): siRNA sense strand
ccauuugggcugagagaau

SEQ ID NO: 2365013 - RNA, 19 nt, Homo sapiens
  misc_RNA (1)...(19): siRNA sense strand
gggaauuggagcagugauu

SEQ ID NO: 2365014 - RNA, 19 nt, Homo sapiens
  misc_RNA (1)...(19): siRNA sense strand
cuugaaacccaguggacaa

SEQ ID NO: 2365015 - RNA, 19 nt, Homo sapiens
  misc_RNA (1)...(19): siRNA sense strand
gugcuuuagucaaggaaau

SEQ ID NO: 2365016 - RNA, 19 nt, Homo sapiens
  misc_RNA (1)...(19): siRNA sense strand
gaguauggugacagauaaa

SEQ ID NO: 2365017 - RNA, 19 nt, Homo sapiens
  misc_RNA (1)...(19): siRNA sense strand
gcaaaguggccgaaagcuu

SEQ ID NO: 2365018 - RNA, 19 nt, Homo sapiens
  misc_RNA (1)...(19): siRNA sense strand
uuuaagaaguccuggaaca

SEQ ID NO: 2365019 - RNA, 19 nt, Homo sapiens
  misc_RNA (1)...(19): siRNA sense strand
agguaaacaauaagaguga

SEQ ID NO: 2365020 - RNA, 19 nt, Homo sapiens
  misc_RNA (1)...(19): siRNA sense strand
aggcagagugcuuuaaaua

SEQ ID NO: 2365021 - RNA, 19 nt, Homo sapiens
  misc_RNA (1)...(19): siRNA sense strand
gaauauuaagccuggaaau

SEQ ID NO: 2365022 - RNA, 19 nt, Homo sapiens
  misc_RNA (1)...(19): siRNA sense strand
ggauauggcuugaaaccca

SEQ ID NO: 2365023 - RNA, 19 nt, Homo sapiens
  misc_RNA (1)...(19): siRNA sense strand
caauggaagacgauagaau

SEQ ID NO: 2365024 - RNA, 19 nt, Homo sapiens
  misc_RNA (1)...(19): siRNA sense strand
agaugaacuccgaaugaua

SEQ ID NO: 2365025 - RNA, 19 nt, Homo sapiens
  misc_RNA (1)...(19): siRNA sense strand
ggauaaaacuauacaagca

SEQ ID NO: 2365026 - RNA, 19 nt, Homo sapiens
  misc_RNA (1)...(19): siRNA sense strand
ccgaaagcuugcugaacuu

SEQ ID NO: 2365027 - RNA, 19 nt, Homo sapiens
  misc_RNA (1)...(19): siRNA sense strand
ggaaauaaaggguacgguu

SEQ ID NO: 2365028 - RNA, 19 nt, Homo sapiens
  misc_RNA (1)...(19): siRNA sense strand
ccaaaagggaugccagaaa

SEQ ID NO: 2365029 - RNA, 19 nt, Homo sapiens
  misc_RNA (1)...(19): siRNA sense strand
caccaagugcugaaaguaa

SEQ ID NO: 2365030 - RNA, 19 nt, Homo sapiens
  misc_RNA (1)...(19): siRNA sense strand
gugaaaggaauuacaaaga

SEQ ID NO: 2365031 - RNA, 19 nt, Homo sapiens
  misc_RNA (1)...(19): siRNA sense strand
auguggagguaaacaauaa

SEQ ID NO: 2365032 - RNA, 19 nt, Homo sapiens
  misc_RNA (1)...(19): siRNA sense strand
aaucuguacuggucggaua

SEQ ID NO: 2365033 - RNA, 19 nt, Homo sapiens
  misc_RNA (1)...(19): siRNA sense strand
cagaaaagauguauaggau

SEQ ID NO: 2365034 - RNA, 19 nt, Homo sapiens
  misc_RNA (1)...(19): siRNA sense strand
aaacaaaggauguggaggu

SEQ ID NO: 2365035 - RNA, 19 nt, Homo sapiens
  misc_RNA (1)...(19): siRNA sense strand
caagaaaaccauggaaaua

SEQ ID NO: 2365036 - RNA, 19 nt, Homo sapiens
  misc_RNA (1)...(19): siRNA sense strand
cugcacagaguuacagaaa

SEQ ID NO: 2365037 - RNA, 19 nt, Homo sapiens
  misc_RNA (1)...(19): siRNA sense strand
uggcaucaacggagaagua

SEQ ID NO: 2365038 - RNA, 19 nt, Homo sapiens
  misc_RNA (1)...(19): siRNA sense strand
cuugaaggauuaauggaau

SEQ ID NO: 2365039 - RNA, 19 nt, Homo sapiens
  misc_RNA (1)...(19): siRNA sense strand
gcuuauagaaaugggauau

SEQ ID NO: 2365040 - RNA, 19 nt, Homo sapiens
  misc_RNA (1)...(19): siRNA sense strand
cagauauacagucuagaaa

SEQ ID NO: 2365041 - RNA, 19 nt, Homo sapiens
  misc_RNA (1)...(19): siRNA sense strand
cacccaaagaagugaauau

SEQ ID NO: 2365042 - RNA, 19 nt, Homo sapiens
  misc_RNA (1)...(19): siRNA sense strand
gcagaagggaauuggagca

SEQ ID NO: 2365043 - RNA, 19 nt, Homo sapiens
  misc_RNA (1)...(19): siRNA sense strand
ccauggaaauaaaggguac

SEQ ID NO: 2365044 - RNA, 19 nt, Homo sapiens
  misc_RNA (1)...(19): siRNA sense strand
cuacuaaaccacuguuaau

SEQ ID NO: 2365045 - RNA, 19 nt, Homo sapiens
  misc_RNA (1)...(19): siRNA sense strand
guaagaugacagagccauu

SEQ ID NO: 2365046 - RNA, 19 nt, Homo sapiens
  misc_RNA (1)...(19): siRNA sense strand
cgaccacccuauagaccaa

SEQ ID NO: 2365047 - RNA, 19 nt, Homo sapiens
  misc_RNA (1)...(19): siRNA sense strand
acuucuacgugcaguuaua

SEQ ID NO: 2365048 - RNA, 19 nt, Homo sapiens
  misc_RNA (1)...(19): siRNA sense strand
aggugaugguaguugguau

SEQ ID NO: 2365049 - RNA, 19 nt, Homo sapiens
  misc_RNA (1)...(19): siRNA sense strand
cucagagaauggaaauaaa

SEQ ID NO: 2365050 - RNA, 19 nt, Homo sapiens
  misc_RNA (1)...(19): siRNA sense strand
ccacauaaagacuuaccaa

SEQ ID NO: 2365051 - RNA, 19 nt, Homo sapiens
  misc_RNA (1)...(19): siRNA sense strand
uggaguuacuaaggaaaua

SEQ ID NO: 2365052 - RNA, 19 nt, Homo sapiens
  misc_RNA (1)...(19): siRNA sense strand
auauauaguccuggagaau

SEQ ID NO: 2365053 - RNA, 19 nt, Homo sapiens
  misc_RNA (1)...(19): siRNA sense strand
uggaagugcucuaugcaga

SEQ ID NO: 2365054 - RNA, 19 nt, Homo sapiens
  misc_RNA (1)...(19): siRNA sense strand
uguuguggucugugugaua

SEQ ID NO: 2365055 - RNA, 19 nt, Homo sapiens
  misc_RNA (1)...(19): siRNA sense strand
cuucaaacccgaauggcau

SEQ ID NO: 2365056 - RNA, 19 nt, Homo sapiens
  misc_RNA (1)...(19): siRNA sense strand
ggagaacagaguaugguga

SEQ ID NO: 2365057 - RNA, 19 nt, Homo sapiens
  misc_RNA (1)...(19): siRNA sense strand
caggaagacaauucaguuu

SEQ ID NO: 2365058 - RNA, 19 nt, Homo sapiens
  misc_RNA (1)...(19): siRNA sense strand
cccaaagaagugaauauua

SEQ ID NO: 2365059 - RNA, 19 nt, Homo sapiens
  misc_RNA (1)...(19): siRNA sense strand
guaaacaauaagagugacu

SEQ ID NO: 2365060 - RNA, 19 nt, Homo sapiens
  misc_RNA (1)...(19): siRNA sense strand
cccagugacgugaaagaaa

SEQ ID NO: 2365061 - RNA, 19 nt, Homo sapiens
  misc_RNA (1)...(19): siRNA sense strand
auauuuggcuagucaggaa

SEQ ID NO: 2365062 - RNA, 19 nt, Homo sapiens
  misc_RNA (1)...(19): siRNA sense strand
cgaauggcaucaacggaga

SEQ ID NO: 2365063 - RNA, 19 nt, Homo sapiens
  misc_RNA (1)...(19): siRNA sense strand
ucaagaaaaccauggaaau

SEQ ID NO: 2365064 - RNA, 19 nt, Homo sapiens
  misc_RNA (1)...(19): siRNA sense strand
ucuccuagaugcaggcuuu

SEQ ID NO: 2365065 - RNA, 19 nt, Homo sapiens
  misc_RNA (1)...(19): siRNA sense strand
caaggaaaucuuaccaaau

SEQ ID NO: 2365066 - RNA, 19 nt, Homo sapiens
  misc_RNA (1)...(19): siRNA sense strand
agaagaaagaggagagacu

SEQ ID NO: 2365067 - RNA, 19 nt, Homo sapiens
  misc_RNA (1)...(19): siRNA sense strand
uggcaaugucugaguguca

SEQ ID NO: 2365068 - RNA, 19 nt, Homo sapiens
  misc_RNA (1)...(19): siRNA sense strand
cuuuaaccgaugacaguaa

SEQ ID NO: 2365069 - RNA, 19 nt, Homo sapiens
  misc_RNA (1)...(19): siRNA sense strand
cugagagcaccguguuaaa

SEQ ID NO: 2365070 - RNA, 19 nt, Homo sapiens
  misc_RNA (1)...(19): siRNA sense strand
cguacaaaaccauggcaau

SEQ ID NO: 2365071 - RNA, 19 nt, Homo sapiens
  misc_RNA (1)...(19): siRNA sense strand
agaagaaagaggagagacu

SEQ ID NO: 2365072 - RNA, 19 nt, Homo sapiens
  misc_RNA (1)...(19): siRNA sense strand
uggcaaugucugaguguca

SEQ ID NO: 2365073 - RNA, 19 nt, Homo sapiens
  misc_RNA (1)...(19): siRNA sense strand
cuuuaaccgaugacaguaa

SEQ ID NO: 2365074 - RNA, 19 nt, Homo sapiens
  misc_RNA (1)...(19): siRNA sense strand
cugagagcaccguguuaaa

SEQ ID NO: 2365075 - RNA, 19 nt, Homo sapiens
  misc_RNA (1)...(19): siRNA sense strand
cguacaaaaccauggcaau

SEQ ID NO: 2365076 - RNA, 19 nt, Homo sapiens
  misc_RNA (1)...(19): siRNA sense strand
ugggaauccaggagaguaa

SEQ ID NO: 2365077 - RNA, 19 nt, Homo sapiens
  misc_RNA (1)...(19): siRNA sense strand
gaccagaaguggauggaga

SEQ ID NO: 2365078 - RNA, 19 nt, Homo sapiens
  misc_RNA (1)...(19): siRNA sense strand
aaguggauggagagaaaua

SEQ ID NO: 2365079 - RNA, 19 nt, Homo sapiens
  misc_RNA (1)...(19): siRNA sense strand
augcaguucucuugggaau

SEQ ID NO: 2365080 - RNA, 19 nt, Homo sapiens
  misc_RNA (1)...(19): siRNA sense strand
ggguguaggcacugagagu

SEQ ID NO: 2365081 - RNA, 19 nt, Homo sapiens
  misc_RNA (1)...(19): siRNA sense strand
guacauagauuuuggugga

SEQ ID NO: 2365082 - RNA, 19 nt, Homo sapiens
  misc_RNA (1)...(19): siRNA sense strand
acucaagaucgaaagaaga

SEQ ID NO: 2365083 - RNA, 19 nt, Homo sapiens
  misc_RNA (1)...(19): siRNA sense strand
agaaauaccagaaaggaac

SEQ ID NO: 2365084 - RNA, 19 nt, Homo sapiens
  misc_RNA (1)...(19): siRNA sense strand
gggagcaacaacagauaca

SEQ ID NO: 2365085 - RNA, 19 nt, Homo sapiens
  misc_RNA (1)...(19): siRNA sense strand
agauuuugguggaaaguuu

SEQ ID NO: 2365086 - RNA, 19 nt, Homo sapiens
  misc_RNA (1)...(19): siRNA sense strand
acugagaguggauccgaaa

SEQ ID NO: 2365087 - RNA, 19 nt, Homo sapiens
  misc_RNA (1)...(19): siRNA sense strand
guagaagaccagaagugga

SEQ ID NO: 2365088 - RNA, 19 nt, Homo sapiens
  misc_RNA (1)...(19): siRNA sense strand
uggagagaaauaccagaaa

SEQ ID NO: 2365089 - RNA, 19 nt, Homo sapiens
  misc_RNA (1)...(19): siRNA sense strand
aggaagagugaaagcuaaa

SEQ ID NO: 2365090 - RNA, 19 nt, Homo sapiens
  misc_RNA (1)...(19): siRNA sense strand
cgagaauacaggaggcaga

SEQ ID NO: 2365091 - RNA, 19 nt, Homo sapiens
  misc_RNA (1)...(19): siRNA sense strand
ccacgaaguccaagaaaau

SEQ ID NO: 2365092 - RNA, 19 nt, Homo sapiens
  misc_RNA (1)...(19): siRNA sense strand
gcaaagacaucaaaccuga

SEQ ID NO: 2365093 - RNA, 19 nt, Homo sapiens
  misc_RNA (1)...(19): siRNA sense strand
acaucaaaccugaguauca

SEQ ID NO: 2365094 - RNA, 19 nt, Homo sapiens
  misc_RNA (1)...(19): siRNA sense strand
aggaagaagauguccguga

SEQ ID NO: 2365095 - RNA, 19 nt, Homo sapiens
  misc_RNA (1)...(19): siRNA sense strand
gccuauagcuugaagguag

SEQ ID NO: 2365096 - RNA, 19 nt, Homo sapiens
  misc_RNA (1)...(19): siRNA sense strand
ccugagaaggcaaaagaaa

SEQ ID NO: 2365097 - RNA, 19 nt, Homo sapiens
  misc_RNA (1)...(19): siRNA sense strand
ccuauagcuugaagguaga

SEQ ID NO: 2365098 - RNA, 19 nt, Homo sapiens
  misc_RNA (1)...(19): siRNA sense strand
agacaucaaaccugaguau

SEQ ID NO: 2365099 - RNA, 19 nt, Homo sapiens
  misc_RNA (1)...(19): siRNA sense strand
ccaaagucccaguggccau

SEQ ID NO: 2365100 - RNA, 19 nt, Homo sapiens
  misc_RNA (1)...(19): siRNA sense strand
ccacaaucggcaucaggaa

SEQ ID NO: 2365101 - RNA, 19 nt, Homo sapiens
  misc_RNA (1)...(19): siRNA sense strand
caauuagugcagaugacaa

SEQ ID NO: 2365102 - RNA, 19 nt, Homo sapiens
  misc_RNA (1)...(19): siRNA sense strand
ucuucgugauagaggagua

SEQ ID NO: 2365103 - RNA, 19 nt, Homo sapiens
  misc_RNA (1)...(19): siRNA sense strand
ccaccaaaguuuccgcaga

SEQ ID NO: 2365104 - RNA, 19 nt, Homo sapiens
  misc_RNA (1)...(19): siRNA sense strand
cagauucagacuuggacua

SEQ ID NO: 2365105 - RNA, 19 nt, Homo sapiens
  misc_RNA (1)...(19): siRNA sense strand
gaguaucaguacaugccua

SEQ ID NO: 2365106 - RNA, 19 nt, Homo sapiens
  misc_RNA (1)...(19): siRNA sense strand
guggaagcacagacaggua

SEQ ID NO: 2365107 - RNA, 19 nt, Homo sapiens
  misc_RNA (1)...(19): siRNA sense strand
ugggagagugcaugccaaa

SEQ ID NO: 2365108 - RNA, 19 nt, Homo sapiens
  misc_RNA (1)...(19): siRNA sense strand
ccaaaagagccuauagcuu

SEQ ID NO: 2365109 - RNA, 19 nt, Homo sapiens
  misc_RNA (1)...(19): siRNA sense strand
agaagauguccgugagaac

SEQ ID NO: 2365110 - RNA, 19 nt, Homo sapiens
  misc_RNA (1)...(19): siRNA sense strand
aggccaaggaggaguacca

SEQ ID NO: 2365111 - RNA, 19 nt, Homo sapiens
  misc_RNA (1)...(19): siRNA sense strand
gcuuagucacauacaauau

SEQ ID NO: 2365112 - RNA, 19 nt, Homo sapiens
  misc_RNA (1)...(19): siRNA sense strand
uguuacaauuagugcagau

SEQ ID NO: 2365113 - RNA, 19 nt, Homo sapiens
  misc_RNA (1)...(19): siRNA sense strand
uuguaugguuccaaagaca

SEQ ID NO: 2365114 - RNA, 19 nt, Homo sapiens
  misc_RNA (1)...(19): siRNA sense strand
ggacaaccaaagugacgau

SEQ ID NO: 2365115 - RNA, 19 nt, Homo sapiens
  misc_RNA (1)...(19): siRNA sense strand
gcuugaagguagaggcagc

SEQ ID NO: 2365116 - RNA, 19 nt, Homo sapiens
  misc_RNA (1)...(19): siRNA sense strand
gggaggccaaggaggagua

SEQ ID NO: 2365117 - RNA, 19 nt, Homo sapiens
  misc_RNA (1)...(19): siRNA sense strand
ccgucaagaucucaguaga

SEQ ID NO: 2365118 - RNA, 19 nt, Homo sapiens
  misc_RNA (1)...(19): siRNA sense strand
gugagagugaucagaccaa

SEQ ID NO: 2365119 - RNA, 19 nt, Homo sapiens
  misc_RNA (1)...(19): siRNA sense strand
gucagagacaaccgagaua

SEQ ID NO: 2365120 - RNA, 19 nt, Homo sapiens
  misc_RNA (1)...(19): siRNA sense strand
ugagaaggcaaaagaaaga

SEQ ID NO: 2365121 - RNA, 19 nt, Homo sapiens
  misc_RNA (1)...(19): siRNA sense strand
gggaggaaguaggaagagu

SEQ ID NO: 2365122 - RNA, 19 nt, Homo sapiens
  misc_RNA (1)...(19): siRNA sense strand
acccgaaguuuaucagcaa

SEQ ID NO: 2365123 - RNA, 19 nt, Homo sapiens
  misc_RNA (1)...(19): siRNA sense strand
acguggugauccaggccaa

SEQ ID NO: 2365124 - RNA, 19 nt, Homo sapiens
  misc_RNA (1)...(19): siRNA sense strand
agaaaauggcuuagucaca

SEQ ID NO: 2365125 - RNA, 19 nt, Homo sapiens
  misc_RNA (1)...(19): siRNA sense strand
agauauugacucuggugau

SEQ ID NO: 2365126 - RNA, 19 nt, Homo sapiens
  misc_RNA (1)...(19): siRNA sense strand
acauggacagggaggccaa

SEQ ID NO: 2365127 - RNA, 19 nt, Homo sapiens
  misc_RNA (1)...(19): siRNA sense strand
cuguagauuuugaaaccaa

SEQ ID NO: 2365128 - RNA, 19 nt, Homo sapiens
  misc_RNA (1)...(19): siRNA sense strand
cauucaaaucuacgguuau

SEQ ID NO: 2365129 - RNA, 19 nt, Homo sapiens
  misc_RNA (1)...(19): siRNA sense strand
gcgccaaguuaguguacag

SEQ ID NO: 2365130 - RNA, 19 nt, Homo sapiens
  misc_RNA (1)...(19): siRNA sense strand
aggaagagugaaagcuaaa

SEQ ID NO: 2365131 - RNA, 19 nt, Homo sapiens
  misc_RNA (1)...(19): siRNA sense strand
ccacgaaguccaagaaaau

SEQ ID NO: 2365132 - RNA, 19 nt, Homo sapiens
  misc_RNA (1)...(19): siRNA sense strand
gccuauagcuugaagguag

SEQ ID NO: 2365133 - RNA, 19 nt, Homo sapiens
  misc_RNA (1)...(19): siRNA sense strand
ccuauagcuugaagguaga

SEQ ID NO: 2365134 - RNA, 19 nt, Homo sapiens
  misc_RNA (1)...(19): siRNA sense strand
ccaaagucccaguggccau

SEQ ID NO: 2365135 - RNA, 19 nt, Homo sapiens
  misc_RNA (1)...(19): siRNA sense strand
ccacaaucggcaucaggaa

SEQ ID NO: 2365136 - RNA, 19 nt, Homo sapiens
  misc_RNA (1)...(19): siRNA sense strand
caauuagugcagaugacaa

SEQ ID NO: 2365137 - RNA, 19 nt, Homo sapiens
  misc_RNA (1)...(19): siRNA sense strand
ucuucgugauagaggagua

SEQ ID NO: 2365138 - RNA, 19 nt, Homo sapiens
  misc_RNA (1)...(19): siRNA sense strand
ccaccaaaguuuccgcaga

SEQ ID NO: 2365139 - RNA, 19 nt, Homo sapiens
  misc_RNA (1)...(19): siRNA sense strand
guggaagcacagacaggua

SEQ ID NO: 2365140 - RNA, 19 nt, Homo sapiens
  misc_RNA (1)...(19): siRNA sense strand
ugggagagugcaugccaaa

SEQ ID NO: 2365141 - RNA, 19 nt, Homo sapiens
  misc_RNA (1)...(19): siRNA sense strand
ccaaaagagccuauagcuu

SEQ ID NO: 2365142 - RNA, 19 nt, Homo sapiens
  misc_RNA (1)...(19): siRNA sense strand
aggccaaggaggaguacca

SEQ ID NO: 2365143 - RNA, 19 nt, Homo sapiens
  misc_RNA (1)...(19): siRNA sense strand
gcuuagucacauacaauau

SEQ ID NO: 2365144 - RNA, 19 nt, Homo sapiens
  misc_RNA (1)...(19): siRNA sense strand
uguuacaauuagugcagau

SEQ ID NO: 2365145 - RNA, 19 nt, Homo sapiens
  misc_RNA (1)...(19): siRNA sense strand
ggacaaccaaagugacgau

SEQ ID NO: 2365146 - RNA, 19 nt, Homo sapiens
  misc_RNA (1)...(19): siRNA sense strand
gcuugaagguagaggcagc

SEQ ID NO: 2365147 - RNA, 19 nt, Homo sapiens
  misc_RNA (1)...(19): siRNA sense strand
gggaggccaaggaggagua

SEQ ID NO: 2365148 - RNA, 19 nt, Homo sapiens
  misc_RNA (1)...(19): siRNA sense strand
ccgucaagaucucaguaga

SEQ ID NO: 2365149 - RNA, 19 nt, Homo sapiens
  misc_RNA (1)...(19): siRNA sense strand
gugagagugaucagaccaa

SEQ ID NO: 2365150 - RNA, 19 nt, Homo sapiens
  misc_RNA (1)...(19): siRNA sense strand
gucagagacaaccgagaua

SEQ ID NO: 2365151 - RNA, 19 nt, Homo sapiens
  misc_RNA (1)...(19): siRNA sense strand
gggaggaaguaggaagagu

SEQ ID NO: 2365152 - RNA, 19 nt, Homo sapiens
  misc_RNA (1)...(19): siRNA sense strand
acccgaaguuuaucagcaa

SEQ ID NO: 2365153 - RNA, 19 nt, Homo sapiens
  misc_RNA (1)...(19): siRNA sense strand
acguggugauccaggccaa

SEQ ID NO: 2365154 - RNA, 19 nt, Homo sapiens
  misc_RNA (1)...(19): siRNA sense strand
agaaaauggcuuagucaca

SEQ ID NO: 2365155 - RNA, 19 nt, Homo sapiens
  misc_RNA (1)...(19): siRNA sense strand
agauauugacucuggugau

SEQ ID NO: 2365156 - RNA, 19 nt, Homo sapiens
  misc_RNA (1)...(19): siRNA sense strand
acauggacagggaggccaa

SEQ ID NO: 2365157 - RNA, 19 nt, Homo sapiens
  misc_RNA (1)...(19): siRNA sense strand
cuguagauuuugaaaccaa

SEQ ID NO: 2365158 - RNA, 19 nt, Homo sapiens
  misc_RNA (1)...(19): siRNA sense strand
gcgccaaguuaguguacag

SEQ ID NO: 2365159 - RNA, 19 nt, Homo sapiens
  misc_RNA (1)...(19): siRNA sense strand
uggcaaggcaggaaggcaa

SEQ ID NO: 2365160 - RNA, 19 nt, Homo sapiens
  misc_RNA (1)...(19): siRNA sense strand
aggaggaggaggaugaaau

SEQ ID NO: 2365161 - RNA, 19 nt, Homo sapiens
  misc_RNA (1)...(19): siRNA sense strand
augaggaggaggaggauga

SEQ ID NO: 2365162 - RNA, 19 nt, Homo sapiens
  misc_RNA (1)...(19): siRNA sense strand
uggaugaggaggaggagga

SEQ ID NO: 2365163 - RNA, 19 nt, Homo sapiens
  misc_RNA (1)...(19): siRNA sense strand
gcaucauggacaaggagga

SEQ ID NO: 2365164 - RNA, 19 nt, Homo sapiens
  misc_RNA (1)...(19): siRNA sense strand
uggacaaggaggaguggga

SEQ ID NO: 2365165 - RNA, 19 nt, Homo sapiens
  misc_RNA (1)...(19): siRNA sense strand
acaucaagaagguggugaa

SEQ ID NO: 2365166 - RNA, 19 nt, Homo sapiens
  misc_RNA (1)...(19): siRNA sense strand
gcaacagggugguggaccu

SEQ ID NO: 2365167 - RNA, 19 nt, Homo sapiens
  misc_RNA (1)...(19): siRNA sense strand
acgaauuuggcuacagcaa

SEQ ID NO: 2365168 - RNA, 19 nt, Homo sapiens
  misc_RNA (1)...(19): siRNA sense strand
ccaucuuccaggagcgaga

SEQ ID NO: 2365169 - RNA, 19 nt, Homo sapiens
  misc_RNA (1)...(19): siRNA sense strand
aggugaaggucggagucaa

SEQ ID NO: 2365170 - RNA, 19 nt, Homo sapiens
  misc_RNA (1)...(19): siRNA sense strand
aggucggagucaacggauu

SEQ ID NO: 2365171 - RNA, 19 nt, Homo sapiens
  misc_RNA (1)...(19): siRNA sense strand
ccucaagaucaucagcaau

SEQ ID NO: 2365172 - RNA, 19 nt, Homo sapiens
  misc_RNA (1)...(19): siRNA sense strand
cugccaaauaugaugacau

SEQ ID NO: 2365173 - RNA, 19 nt, Homo sapiens
  misc_RNA (1)...(19): siRNA sense strand
gaacauaaauugaauggga

SEQ ID NO: 2365174 - RNA, 19 nt, Homo sapiens
  misc_RNA (1)...(19): siRNA sense strand
ccaguaagaacgaggagga

SEQ ID NO: 2365175 - RNA, 19 nt, Homo sapiens
  misc_RNA (1)...(19): siRNA sense strand
gggaucuagaggaggauuu

SEQ ID NO: 2365176 - RNA, 19 nt, Homo sapiens
  misc_RNA (1)...(19): siRNA sense strand
gcagagugguuaugggaag

SEQ ID NO: 2365177 - RNA, 19 nt, Homo sapiens
  misc_RNA (1)...(19): siRNA sense strand
caauaagaggcguggguuc

SEQ ID NO: 2365178 - RNA, 19 nt, Homo sapiens
  misc_RNA (1)...(19): siRNA sense strand
ccauggacaacaagaccaa

SEQ ID NO: 2365179 - RNA, 19 nt, Homo sapiens
  misc_RNA (1)...(19): siRNA sense strand
aagaaagaucugaaggacu

SEQ ID NO: 2365180 - RNA, 19 nt, Homo sapiens
  misc_RNA (1)...(19): siRNA sense strand
aggaacaauaucagcaaca

SEQ ID NO: 2365181 - RNA, 19 nt, Homo sapiens
  misc_RNA (1)...(19): siRNA sense strand
cuuuaaggaagaagaacca

SEQ ID NO: 2365182 - RNA, 19 nt, Homo sapiens
  misc_RNA (1)...(19): siRNA sense strand
aggaagaagaaccagugaa

SEQ ID NO: 2365183 - RNA, 19 nt, Homo sapiens
  misc_RNA (1)...(19): siRNA sense strand
uggaaaagaaauaccacaa

SEQ ID NO: 2365184 - RNA, 19 nt, Homo sapiens
  misc_RNA (1)...(19): siRNA sense strand
agauaaggucauggaucaa

SEQ ID NO: 2365185 - RNA, 19 nt, Homo sapiens
  misc_RNA (1)...(19): siRNA sense strand
gaagagaaaauaagggagu

SEQ ID NO: 2365186 - RNA, 19 nt, Homo sapiens
  misc_RNA (1)...(19): siRNA sense strand
aaauugaaugggaagguga

SEQ ID NO: 2365187 - RNA, 19 nt, Homo sapiens
  misc_RNA (1)...(19): siRNA sense strand
auggacaacaagaccaaua

SEQ ID NO: 2365188 - RNA, 19 nt, Homo sapiens
  misc_RNA (1)...(19): siRNA sense strand
gaacauaaauugaauggga

SEQ ID NO: 2365189 - RNA, 19 nt, Homo sapiens
  misc_RNA (1)...(19): siRNA sense strand
ccaguaagaacgaggagga

SEQ ID NO: 2365190 - RNA, 19 nt, Homo sapiens
  misc_RNA (1)...(19): siRNA sense strand
gggaucuagaggaggauuu

SEQ ID NO: 2365191 - RNA, 19 nt, Homo sapiens
  misc_RNA (1)...(19): siRNA sense strand
gcagagugguuaugggaag

SEQ ID NO: 2365192 - RNA, 19 nt, Homo sapiens
  misc_RNA (1)...(19): siRNA sense strand
caauaagaggcguggguuc

SEQ ID NO: 2365193 - RNA, 19 nt, Homo sapiens
  misc_RNA (1)...(19): siRNA sense strand
ccauggacaacaagaccaa

SEQ ID NO: 2365194 - RNA, 19 nt, Homo sapiens
  misc_RNA (1)...(19): siRNA sense strand
aagaaagaucugaaggacu

SEQ ID NO: 2365195 - RNA, 19 nt, Homo sapiens
  misc_RNA (1)...(19): siRNA sense strand
aggaacaauaucagcaaca

SEQ ID NO: 2365196 - RNA, 19 nt, Homo sapiens
  misc_RNA (1)...(19): siRNA sense strand
cuuuaaggaagaagaacca

SEQ ID NO: 2365197 - RNA, 19 nt, Homo sapiens
  misc_RNA (1)...(19): siRNA sense strand
aggaagaagaaccagugaa

SEQ ID NO: 2365198 - RNA, 19 nt, Homo sapiens
  misc_RNA (1)...(19): siRNA sense strand
uggaaaagaaauaccacaa

SEQ ID NO: 2365199 - RNA, 19 nt, Homo sapiens
  misc_RNA (1)...(19): siRNA sense strand
agauaaggucauggaucaa

SEQ ID NO: 2365200 - RNA, 19 nt, Homo sapiens
  misc_RNA (1)...(19): siRNA sense strand
gaagagaaaauaagggagu

SEQ ID NO: 2365201 - RNA, 19 nt, Homo sapiens
  misc_RNA (1)...(19): siRNA sense strand
aaauugaaugggaagguga

SEQ ID NO: 2365202 - RNA, 19 nt, Homo sapiens
  misc_RNA (1)...(19): siRNA sense strand
auggacaacaagaccaaua

SEQ ID NO: 2365203 - RNA, 19 nt, Homo sapiens
  misc_RNA (1)...(19): siRNA sense strand
gaacauaaauugaauggga

SEQ ID NO: 2365204 - RNA, 19 nt, Homo sapiens
  misc_RNA (1)...(19): siRNA sense strand
ccaguaagaacgaggagga

SEQ ID NO: 2365205 - RNA, 19 nt, Homo sapiens
  misc_RNA (1)...(19): siRNA sense strand
gggaucuagaggaggauuu

SEQ ID NO: 2365206 - RNA, 19 nt, Homo sapiens
  misc_RNA (1)...(19): siRNA sense strand
gcagagugguuaugggaag

SEQ ID NO: 2365207 - RNA, 19 nt, Homo sapiens
  misc_RNA (1)...(19): siRNA sense strand
caauaagaggcguggguuc

SEQ ID NO: 2365208 - RNA, 19 nt, Homo sapiens
  misc_RNA (1)...(19): siRNA sense strand
ccauggacaacaagaccaa

SEQ ID NO: 2365209 - RNA, 19 nt, Homo sapiens
  misc_RNA (1)...(19): siRNA sense strand
aagaaagaucugaaggacu

SEQ ID NO: 2365210 - RNA, 19 nt, Homo sapiens
  misc_RNA (1)...(19): siRNA sense strand
aggaacaauaucagcaaca

SEQ ID NO: 2365211 - RNA, 19 nt, Homo sapiens
  misc_RNA (1)...(19): siRNA sense strand
cuuuaaggaagaagaacca

SEQ ID NO: 2365212 - RNA, 19 nt, Homo sapiens
  misc_RNA (1)...(19): siRNA sense strand
aggaagaagaaccagugaa

SEQ ID NO: 2365213 - RNA, 19 nt, Homo sapiens
  misc_RNA (1)...(19): siRNA sense strand
uggaaaagaaauaccacaa

SEQ ID NO: 2365214 - RNA, 19 nt, Homo sapiens
  misc_RNA (1)...(19): siRNA sense strand
agauaaggucauggaucaa

SEQ ID NO: 2365215 - RNA, 19 nt, Homo sapiens
  misc_RNA (1)...(19): siRNA sense strand
gaagagaaaauaagggagu

SEQ ID NO: 2365216 - RNA, 19 nt, Homo sapiens
  misc_RNA (1)...(19): siRNA sense strand
aaauugaaugggaagguga

SEQ ID NO: 2365217 - RNA, 19 nt, Homo sapiens
  misc_RNA (1)...(19): siRNA sense strand
auggacaacaagaccaaua

SEQ ID NO: 2365218 - RNA, 19 nt, Homo sapiens
  misc_RNA (1)...(19): siRNA sense strand
cgggacaacgugagaacaa

SEQ ID NO: 2365219 - RNA, 19 nt, Homo sapiens
  misc_RNA (1)...(19): siRNA sense strand
uggcggagugaguggcuua

SEQ ID NO: 2365220 - RNA, 19 nt, Homo sapiens
  misc_RNA (1)...(19): siRNA sense strand
aguacagaaugcaggcuau

SEQ ID NO: 2365221 - RNA, 19 nt, Homo sapiens
  misc_RNA (1)...(19): siRNA sense strand
gaguacagaaugcaggcua

SEQ ID NO: 2365222 - RNA, 19 nt, Homo sapiens
  misc_RNA (1)...(19): siRNA sense strand
ccaucaagcucggagguca

SEQ ID NO: 2365223 - RNA, 19 nt, Homo sapiens
  misc_RNA (1)...(19): siRNA sense strand
ggguugggguggagaagau

SEQ ID NO: 2365224 - RNA, 19 nt, Homo sapiens
  misc_RNA (1)...(19): siRNA sense strand
ugaaagacuuggauuggga

SEQ ID NO: 2365225 - RNA, 19 nt, Homo sapiens
  misc_RNA (1)...(19): siRNA sense strand
caggaaaguacaaguccau

SEQ ID NO: 2365226 - RNA, 19 nt, Homo sapiens
  misc_RNA (1)...(19): siRNA sense strand
ucaucaccaucgaggagaa

SEQ ID NO: 2365227 - RNA, 19 nt, Homo sapiens
  misc_RNA (1)...(19): siRNA sense strand
augaagggcccaauagaca

SEQ ID NO: 2365228 - RNA, 19 nt, Homo sapiens
  misc_RNA (1)...(19): siRNA sense strand
uggcuuaacaguggaacaa

SEQ ID NO: 2365229 - RNA, 19 nt, Homo sapiens
  misc_RNA (1)...(19): siRNA sense strand
cagcaguguaaaugacuca

SEQ ID NO: 2365230 - RNA, 19 nt, Homo sapiens
  misc_RNA (1)...(19): siRNA sense strand
ccucuugacuugaaccaca

SEQ ID NO: 2365231 - RNA, 19 nt, Homo sapiens
  misc_RNA (1)...(19): siRNA sense strand
agugaaauuggaauggauu

SEQ ID NO: 2365232 - RNA, 19 nt, Homo sapiens
  misc_RNA (1)...(19): siRNA sense strand
cuggaacagaguacagaau

SEQ ID NO: 2365233 - RNA, 19 nt, Homo sapiens
  misc_RNA (1)...(19): siRNA sense strand
agacauaaacaugagugaa

SEQ ID NO: 2365234 - RNA, 19 nt, Homo sapiens
  misc_RNA (1)...(19): siRNA sense strand
ccuaagagacccaggggaa

SEQ ID NO: 2365235 - RNA, 19 nt, Homo sapiens
  misc_RNA (1)...(19): siRNA sense strand
cggccaagaggcagaccua

SEQ ID NO: 2365236 - RNA, 19 nt, Homo sapiens
  misc_RNA (1)...(19): siRNA sense strand
agcagaagccacuggagaa

SEQ ID NO: 2365237 - RNA, 19 nt, Homo sapiens
  misc_RNA (1)...(19): siRNA sense strand
ccacuucagcccagggaca

SEQ ID NO: 2365238 - RNA, 19 nt, Homo sapiens
  misc_RNA (1)...(19): siRNA sense strand
aagcagaagccacuggaga

SEQ ID NO: 2365239 - RNA, 19 nt, Homo sapiens
  misc_RNA (1)...(19): siRNA sense strand
ccucuaaagcagcucaaaa

SEQ ID NO: 2365240 - RNA, 19 nt, Homo sapiens
  misc_RNA (1)...(19): siRNA sense strand
aaagaaagcagaagccacu

SEQ ID NO: 2365241 - RNA, 19 nt, Homo sapiens
  misc_RNA (1)...(19): siRNA sense strand
ggccagaaguccugaaauu

SEQ ID NO: 2365242 - RNA, 19 nt, Homo sapiens
  misc_RNA (1)...(19): siRNA sense strand
ugauagaagcuguuggaga

SEQ ID NO: 2365243 - RNA, 19 nt, Homo sapiens
  misc_RNA (1)...(19): siRNA sense strand
ggacagaaguugaugagag

SEQ ID NO: 2365244 - RNA, 19 nt, Homo sapiens
  misc_RNA (1)...(19): siRNA sense strand
ccacgagacaccauggcaa

SEQ ID NO: 2365245 - RNA, 19 nt, Homo sapiens
  misc_RNA (1)...(19): siRNA sense strand
agauauugcaguaccgauu

SEQ ID NO: 2365246 - RNA, 19 nt, Homo sapiens
  misc_RNA (1)...(19): siRNA sense strand
cuucaagcuggaauggaaa

SEQ ID NO: 2365247 - RNA, 19 nt, Homo sapiens
  misc_RNA (1)...(19): siRNA sense strand
gcuuaaagauuuugggcac

SEQ ID NO: 2365248 - RNA, 19 nt, Homo sapiens
  misc_RNA (1)...(19): siRNA sense strand
agaagguggccgaggcuca

SEQ ID NO: 2365249 - RNA, 19 nt, Homo sapiens
  misc_RNA (1)...(19): siRNA sense strand
uuaagaaguauguugguga

SEQ ID NO: 2365250 - RNA, 19 nt, Homo sapiens
  misc_RNA (1)...(19): siRNA sense strand
gcaauaugcagcagcccuu

SEQ ID NO: 2365251 - RNA, 19 nt, Homo sapiens
  misc_RNA (1)...(19): siRNA sense strand
uggauuagcagcaugccaa

SEQ ID NO: 2365252 - RNA, 19 nt, Homo sapiens
  misc_RNA (1)...(19): siRNA sense strand
uaguggggcuacuggaaaa

SEQ ID NO: 2365253 - RNA, 19 nt, Homo sapiens
  misc_RNA (1)...(19): siRNA sense strand
ucaagaaagaggugggcaa

SEQ ID NO: 2365254 - RNA, 19 nt, Homo sapiens
  misc_RNA (1)...(19): siRNA sense strand
gcuacuacaucgagggcau

SEQ ID NO: 2365255 - RNA, 19 nt, Homo sapiens
  misc_RNA (1)...(19): siRNA sense strand
ugaagaagaugaagagcca

SEQ ID NO: 2365256 - RNA, 19 nt, Homo sapiens
  misc_RNA (1)...(19): siRNA sense strand
ucgaaaggaaccagcgcua

SEQ ID NO: 2365257 - RNA, 19 nt, Homo sapiens
  misc_RNA (1)...(19): siRNA sense strand
ucaacaaggugaaggugga

SEQ ID NO: 2365258 - RNA, 19 nt, Homo sapiens
  misc_RNA (1)...(19): siRNA sense strand
ccgagaacauccuggggaa

SEQ ID NO: 2365259 - RNA, 19 nt, Homo sapiens
  misc_RNA (1)...(19): siRNA sense strand
ccucgauaccaacggcaaa

SEQ ID NO: 2365260 - RNA, 19 nt, Homo sapiens
  misc_RNA (1)...(19): siRNA sense strand
aagaagaugaagagccaga

SEQ ID NO: 2365261 - RNA, 19 nt, Homo sapiens
  misc_RNA (1)...(19): siRNA sense strand
agacgggacagguggguga

SEQ ID NO: 2365262 - RNA, 19 nt, Homo sapiens
  misc_RNA (1)...(19): siRNA sense strand
gagaagggucggugcagca

SEQ ID NO: 2365263 - RNA, 19 nt, Homo sapiens
  misc_RNA (1)...(19): siRNA sense strand
gccaaguccuauugcguca

SEQ ID NO: 2365264 - RNA, 19 nt, Homo sapiens
  misc_RNA (1)...(19): siRNA sense strand
aaguugaagaagaugaaga

SEQ ID NO: 2365265 - RNA, 19 nt, Homo sapiens
  misc_RNA (1)...(19): siRNA sense strand
ggugagaagcaaucgcuga

SEQ ID NO: 2365266 - RNA, 19 nt, Homo sapiens
  misc_RNA (1)...(19): siRNA sense strand
caaauauggcaacggcaga

SEQ ID NO: 2365267 - RNA, 19 nt, Homo sapiens
  misc_RNA (1)...(19): siRNA sense strand
gagaggagcagcagcagca

SEQ ID NO: 2365268 - RNA, 19 nt, Homo sapiens
  misc_RNA (1)...(19): siRNA sense strand
gcccggaagugcaacgaga

SEQ ID NO: 2365269 - RNA, 19 nt, Homo sapiens
  misc_RNA (1)...(19): siRNA sense strand
ccggaagugcaacgagaca

SEQ ID NO: 2365270 - RNA, 19 nt, Homo sapiens
  misc_RNA (1)...(19): siRNA sense strand
ucugcgaggccgagaacau

SEQ ID NO: 2365271 - RNA, 19 nt, Homo sapiens
  misc_RNA (1)...(19): siRNA sense strand
ucaagaaagaggugggcaa

SEQ ID NO: 2365272 - RNA, 19 nt, Homo sapiens
  misc_RNA (1)...(19): siRNA sense strand
gcuacuacaucgagggcau

SEQ ID NO: 2365273 - RNA, 19 nt, Homo sapiens
  misc_RNA (1)...(19): siRNA sense strand
ugaagaagaugaagagcca

SEQ ID NO: 2365274 - RNA, 19 nt, Homo sapiens
  misc_RNA (1)...(19): siRNA sense strand
ucgaaaggaaccagcgcua

SEQ ID NO: 2365275 - RNA, 19 nt, Homo sapiens
  misc_RNA (1)...(19): siRNA sense strand
ucaacaaggugaaggugga

SEQ ID NO: 2365276 - RNA, 19 nt, Homo sapiens
  misc_RNA (1)...(19): siRNA sense strand
ccgagaacauccuggggaa

SEQ ID NO: 2365277 - RNA, 19 nt, Homo sapiens
  misc_RNA (1)...(19): siRNA sense strand
ccucgauaccaacggcaaa

SEQ ID NO: 2365278 - RNA, 19 nt, Homo sapiens
  misc_RNA (1)...(19): siRNA sense strand
aagaagaugaagagccaga

SEQ ID NO: 2365279 - RNA, 19 nt, Homo sapiens
  misc_RNA (1)...(19): siRNA sense strand
agacgggacagguggguga

SEQ ID NO: 2365280 - RNA, 19 nt, Homo sapiens
  misc_RNA (1)...(19): siRNA sense strand
gagaagggucggugcagca

SEQ ID NO: 2365281 - RNA, 19 nt, Homo sapiens
  misc_RNA (1)...(19): siRNA sense strand
gccaaguccuauugcguca

SEQ ID NO: 2365282 - RNA, 19 nt, Homo sapiens
  misc_RNA (1)...(19): siRNA sense strand
aaguugaagaagaugaaga

SEQ ID NO: 2365283 - RNA, 19 nt, Homo sapiens
  misc_RNA (1)...(19): siRNA sense strand
ggugagaagcaaucgcuga

SEQ ID NO: 2365284 - RNA, 19 nt, Homo sapiens
  misc_RNA (1)...(19): siRNA sense strand
caaauauggcaacggcaga

SEQ ID NO: 2365285 - RNA, 19 nt, Homo sapiens
  misc_RNA (1)...(19): siRNA sense strand
gagaggagcagcagcagca

SEQ ID NO: 2365286 - RNA, 19 nt, Homo sapiens
  misc_RNA (1)...(19): siRNA sense strand
gcccggaagugcaacgaga

SEQ ID NO: 2365287 - RNA, 19 nt, Homo sapiens
  misc_RNA (1)...(19): siRNA sense strand
ccggaagugcaacgagaca

SEQ ID NO: 2365288 - RNA, 19 nt, Homo sapiens
  misc_RNA (1)...(19): siRNA sense strand
ucugcgaggccgagaacau

SEQ ID NO: 2365289 - RNA, 19 nt, Homo sapiens
  misc_RNA (1)...(19): siRNA sense strand
ucaagaaagaggugggcaa

SEQ ID NO: 2365290 - RNA, 19 nt, Homo sapiens
  misc_RNA (1)...(19): siRNA sense strand
gcuacuacaucgagggcau

SEQ ID NO: 2365291 - RNA, 19 nt, Homo sapiens
  misc_RNA (1)...(19): siRNA sense strand
ugaagaagaugaagagcca

SEQ ID NO: 2365292 - RNA, 19 nt, Homo sapiens
  misc_RNA (1)...(19): siRNA sense strand
ucgaaaggaaccagcgcua

SEQ ID NO: 2365293 - RNA, 19 nt, Homo sapiens
  misc_RNA (1)...(19): siRNA sense strand
ucaacaaggugaaggugga

SEQ ID NO: 2365294 - RNA, 19 nt, Homo sapiens
  misc_RNA (1)...(19): siRNA sense strand
ccgagaacauccuggggaa

SEQ ID NO: 2365295 - RNA, 19 nt, Homo sapiens
  misc_RNA (1)...(19): siRNA sense strand
ccucgauaccaacggcaaa

SEQ ID NO: 2365296 - RNA, 19 nt, Homo sapiens
  misc_RNA (1)...(19): siRNA sense strand
aagaagaugaagagccaga

SEQ ID NO: 2365297 - RNA, 19 nt, Homo sapiens
  misc_RNA (1)...(19): siRNA sense strand
agacgggacagguggguga

SEQ ID NO: 2365298 - RNA, 19 nt, Homo sapiens
  misc_RNA (1)...(19): siRNA sense strand
gagaagggucggugcagca

SEQ ID NO: 2365299 - RNA, 19 nt, Homo sapiens
  misc_RNA (1)...(19): siRNA sense strand
gccaaguccuauugcguca

SEQ ID NO: 2365300 - RNA, 19 nt, Homo sapiens
  misc_RNA (1)...(19): siRNA sense strand
aaguugaagaagaugaaga

SEQ ID NO: 2365301 - RNA, 19 nt, Homo sapiens
  misc_RNA (1)...(19): siRNA sense strand
ggugagaagcaaucgcuga

SEQ ID NO: 2365302 - RNA, 19 nt, Homo sapiens
  misc_RNA (1)...(19): siRNA sense strand
caaauauggcaacggcaga

SEQ ID NO: 2365303 - RNA, 19 nt, Homo sapiens
  misc_RNA (1)...(19): siRNA sense strand
gagaggagcagcagcagca

SEQ ID NO: 2365304 - RNA, 19 nt, Homo sapiens
  misc_RNA (1)...(19): siRNA sense strand
gcccggaagugcaacgaga

SEQ ID NO: 2365305 - RNA, 19 nt, Homo sapiens
  misc_RNA (1)...(19): siRNA sense strand
ccggaagugcaacgagaca

SEQ ID NO: 2365306 - RNA, 19 nt, Homo sapiens
  misc_RNA (1)...(19): siRNA sense strand
ucugcgaggccgagaacau

SEQ ID NO: 2365307 - RNA, 19 nt, Homo sapiens
  misc_RNA (1)...(19): siRNA sense strand
ucaagaaagaggugggcaa

SEQ ID NO: 2365308 - RNA, 19 nt, Homo sapiens
  misc_RNA (1)...(19): siRNA sense strand
gcuacuacaucgagggcau

SEQ ID NO: 2365309 - RNA, 19 nt, Homo sapiens
  misc_RNA (1)...(19): siRNA sense strand
ugaagaagaugaagagcca

SEQ ID NO: 2365310 - RNA, 19 nt, Homo sapiens
  misc_RNA (1)...(19): siRNA sense strand
ucgaaaggaaccagcgcua

SEQ ID NO: 2365311 - RNA, 19 nt, Homo sapiens
  misc_RNA (1)...(19): siRNA sense strand
ucaacaaggugaaggugga

SEQ ID NO: 2365312 - RNA, 19 nt, Homo sapiens
  misc_RNA (1)...(19): siRNA sense strand
ccgagaacauccuggggaa

SEQ ID NO: 2365313 - RNA, 19 nt, Homo sapiens
  misc_RNA (1)...(19): siRNA sense strand
ccucgauaccaacggcaaa

SEQ ID NO: 2365314 - RNA, 19 nt, Homo sapiens
  misc_RNA (1)...(19): siRNA sense strand
aagaagaugaagagccaga

SEQ ID NO: 2365315 - RNA, 19 nt, Homo sapiens
  misc_RNA (1)...(19): siRNA sense strand
agacgggacagguggguga

SEQ ID NO: 2365316 - RNA, 19 nt, Homo sapiens
  misc_RNA (1)...(19): siRNA sense strand
gagaagggucggugcagca

SEQ ID NO: 2365317 - RNA, 19 nt, Homo sapiens
  misc_RNA (1)...(19): siRNA sense strand
gccaaguccuauugcguca

SEQ ID NO: 2365318 - RNA, 19 nt, Homo sapiens
  misc_RNA (1)...(19): siRNA sense strand
aaguugaagaagaugaaga

SEQ ID NO: 2365319 - RNA, 19 nt, Homo sapiens
  misc_RNA (1)...(19): siRNA sense strand
ggugagaagcaaucgcuga

SEQ ID NO: 2365320 - RNA, 19 nt, Homo sapiens
  misc_RNA (1)...(19): siRNA sense strand
caaauauggcaacggcaga

SEQ ID NO: 2365321 - RNA, 19 nt, Homo sapiens
  misc_RNA (1)...(19): siRNA sense strand
gagaggagcagcagcagca

SEQ ID NO: 2365322 - RNA, 19 nt, Homo sapiens
  misc_RNA (1)...(19): siRNA sense strand
gcccggaagugcaacgaga

SEQ ID NO: 2365323 - RNA, 19 nt, Homo sapiens
  misc_RNA (1)...(19): siRNA sense strand
ccggaagugcaacgagaca

SEQ ID NO: 2365324 - RNA, 19 nt, Homo sapiens
  misc_RNA (1)...(19): siRNA sense strand
ucugcgaggccgagaacau

SEQ ID NO: 2365325 - RNA, 19 nt, Homo sapiens
  misc_RNA (1)...(19): siRNA sense strand
ucaagaaagaggugggcaa

SEQ ID NO: 2365326 - RNA, 19 nt, Homo sapiens
  misc_RNA (1)...(19): siRNA sense strand
gcuacuacaucgagggcau

SEQ ID NO: 2365327 - RNA, 19 nt, Homo sapiens
  misc_RNA (1)...(19): siRNA sense strand
ugaagaagaugaagagcca

SEQ ID NO: 2365328 - RNA, 19 nt, Homo sapiens
  misc_RNA (1)...(19): siRNA sense strand
ucgaaaggaaccagcgcua

SEQ ID NO: 2365329 - RNA, 19 nt, Homo sapiens
  misc_RNA (1)...(19): siRNA sense strand
ucaacaaggugaaggugga

SEQ ID NO: 2365330 - RNA, 19 nt, Homo sapiens
  misc_RNA (1)...(19): siRNA sense strand
ccgagaacauccuggggaa

SEQ ID NO: 2365331 - RNA, 19 nt, Homo sapiens
  misc_RNA (1)...(19): siRNA sense strand
ccucgauaccaacggcaaa

SEQ ID NO: 2365332 - RNA, 19 nt, Homo sapiens
  misc_RNA (1)...(19): siRNA sense strand
aagaagaugaagagccaga

SEQ ID NO: 2365333 - RNA, 19 nt, Homo sapiens
  misc_RNA (1)...(19): siRNA sense strand
agacgggacagguggguga

SEQ ID NO: 2365334 - RNA, 19 nt, Homo sapiens
  misc_RNA (1)...(19): siRNA sense strand
gagaagggucggugcagca

SEQ ID NO: 2365335 - RNA, 19 nt, Homo sapiens
  misc_RNA (1)...(19): siRNA sense strand
gccaaguccuauugcguca

SEQ ID NO: 2365336 - RNA, 19 nt, Homo sapiens
  misc_RNA (1)...(19): siRNA sense strand
aaguugaagaagaugaaga

SEQ ID NO: 2365337 - RNA, 19 nt, Homo sapiens
  misc_RNA (1)...(19): siRNA sense strand
ggugagaagcaaucgcuga

SEQ ID NO: 2365338 - RNA, 19 nt, Homo sapiens
  misc_RNA (1)...(19): siRNA sense strand
caaauauggcaacggcaga

SEQ ID NO: 2365339 - RNA, 19 nt, Homo sapiens
  misc_RNA (1)...(19): siRNA sense strand
gagaggagcagcagcagca

SEQ ID NO: 2365340 - RNA, 19 nt, Homo sapiens
  misc_RNA (1)...(19): siRNA sense strand
gcccggaagugcaacgaga

SEQ ID NO: 2365341 - RNA, 19 nt, Homo sapiens
  misc_RNA (1)...(19): siRNA sense strand
ccggaagugcaacgagaca

SEQ ID NO: 2365342 - RNA, 19 nt, Homo sapiens
  misc_RNA (1)...(19): siRNA sense strand
ucugcgaggccgagaacau

SEQ ID NO: 2365343 - RNA, 19 nt, Homo sapiens
  misc_RNA (1)...(19): siRNA sense strand
ucaagaaagaggugggcaa

SEQ ID NO: 2365344 - RNA, 19 nt, Homo sapiens
  misc_RNA (1)...(19): siRNA sense strand
gcuacuacaucgagggcau

SEQ ID NO: 2365345 - RNA, 19 nt, Homo sapiens
  misc_RNA (1)...(19): siRNA sense strand
ugaagaagaugaagagcca

SEQ ID NO: 2365346 - RNA, 19 nt, Homo sapiens
  misc_RNA (1)...(19): siRNA sense strand
ucgaaaggaaccagcgcua

SEQ ID NO: 2365347 - RNA, 19 nt, Homo sapiens
  misc_RNA (1)...(19): siRNA sense strand
ucaacaaggugaaggugga

SEQ ID NO: 2365348 - RNA, 19 nt, Homo sapiens
  misc_RNA (1)...(19): siRNA sense strand
ccgagaacauccuggggaa

SEQ ID NO: 2365349 - RNA, 19 nt, Homo sapiens
  misc_RNA (1)...(19): siRNA sense strand
ccucgauaccaacggcaaa

SEQ ID NO: 2365350 - RNA, 19 nt, Homo sapiens
  misc_RNA (1)...(19): siRNA sense strand
aagaagaugaagagccaga

SEQ ID NO: 2365351 - RNA, 19 nt, Homo sapiens
  misc_RNA (1)...(19): siRNA sense strand
agacgggacagguggguga

SEQ ID NO: 2365352 - RNA, 19 nt, Homo sapiens
  misc_RNA (1)...(19): siRNA sense strand
gagaagggucggugcagca

SEQ ID NO: 2365353 - RNA, 19 nt, Homo sapiens
  misc_RNA (1)...(19): siRNA sense strand
gccaaguccuauugcguca

SEQ ID NO: 2365354 - RNA, 19 nt, Homo sapiens
  misc_RNA (1)...(19): siRNA sense strand
aaguugaagaagaugaaga

SEQ ID NO: 2365355 - RNA, 19 nt, Homo sapiens
  misc_RNA (1)...(19): siRNA sense strand
ggugagaagcaaucgcuga

SEQ ID NO: 2365356 - RNA, 19 nt, Homo sapiens
  misc_RNA (1)...(19): siRNA sense strand
caaauauggcaacggcaga

SEQ ID NO: 2365357 - RNA, 19 nt, Homo sapiens
  misc_RNA (1)...(19): siRNA sense strand
gagaggagcagcagcagca

SEQ ID NO: 2365358 - RNA, 19 nt, Homo sapiens
  misc_RNA (1)...(19): siRNA sense strand
gcccggaagugcaacgaga

SEQ ID NO: 2365359 - RNA, 19 nt, Homo sapiens
  misc_RNA (1)...(19): siRNA sense strand
ccggaagugcaacgagaca

SEQ ID NO: 2365360 - RNA, 19 nt, Homo sapiens
  misc_RNA (1)...(19): siRNA sense strand
ucugcgaggccgagaacau

SEQ ID NO: 2365361 - RNA, 19 nt, Homo sapiens
  misc_RNA (1)...(19): siRNA sense strand
gaagaaagcaaauuggcaa

SEQ ID NO: 2365362 - RNA, 19 nt, Homo sapiens
  misc_RNA (1)...(19): siRNA sense strand
cgacguauccugaagggaa

SEQ ID NO: 2365363 - RNA, 19 nt, Homo sapiens
  misc_RNA (1)...(19): siRNA sense strand
agucauaaacagaaggcuu

SEQ ID NO: 2365364 - RNA, 19 nt, Homo sapiens
  misc_RNA (1)...(19): siRNA sense strand
aagaaagcaaauuggcaaa

SEQ ID NO: 2365365 - RNA, 19 nt, Homo sapiens
  misc_RNA (1)...(19): siRNA sense strand
ggguaaagaacucagugaa

SEQ ID NO: 2365366 - RNA, 19 nt, Homo sapiens
  misc_RNA (1)...(19): siRNA sense strand
ucauauugcuguugcccaa

SEQ ID NO: 2365367 - RNA, 19 nt, Homo sapiens
  misc_RNA (1)...(19): siRNA sense strand
gagcagcgguggaagcgaa

SEQ ID NO: 2365368 - RNA, 19 nt, Homo sapiens
  misc_RNA (1)...(19): siRNA sense strand
cuuucaagguguucgggua

SEQ ID NO: 2365369 - RNA, 19 nt, Homo sapiens
  misc_RNA (1)...(19): siRNA sense strand
uggacaagcugcuggacga

SEQ ID NO: 2365370 - RNA, 19 nt, Homo sapiens
  misc_RNA (1)...(19): siRNA sense strand
gagcaggaagaaagcaaau

SEQ ID NO: 2365371 - RNA, 19 nt, Homo sapiens
  misc_RNA (1)...(19): siRNA sense strand
uuaaagagcacaauggaca

SEQ ID NO: 2365372 - RNA, 19 nt, Homo sapiens
  misc_RNA (1)...(19): siRNA sense strand
caaaggaugcagaugguga

SEQ ID NO: 2365373 - RNA, 19 nt, Homo sapiens
  misc_RNA (1)...(19): siRNA sense strand
caccacacaguuagggaaa

SEQ ID NO: 2365374 - RNA, 19 nt, Homo sapiens
  misc_RNA (1)...(19): siRNA sense strand
uuucaagguguucggguaa

SEQ ID NO: 2365375 - RNA, 19 nt, Homo sapiens
  misc_RNA (1)...(19): siRNA sense strand
caagaaagaugaaugcacu

SEQ ID NO: 2365376 - RNA, 19 nt, Homo sapiens
  misc_RNA (1)...(19): siRNA sense strand
cuucagaacauuaucaaca

SEQ ID NO: 2365377 - RNA, 19 nt, Homo sapiens
  misc_RNA (1)...(19): siRNA sense strand
ggaacuuggagaacgaaca

SEQ ID NO: 2365378 - RNA, 19 nt, Homo sapiens
  misc_RNA (1)...(19): siRNA sense strand
uggagcaggaagaaagcaa

SEQ ID NO: 2365379 - RNA, 19 nt, Homo sapiens
  misc_RNA (1)...(19): siRNA sense strand
ggaagaaagcaaauuggca

SEQ ID NO: 2365380 - RNA, 19 nt, Homo sapiens
  misc_RNA (1)...(19): siRNA sense strand
uugugaaugcaaaggcuua

SEQ ID NO: 2365381 - RNA, 19 nt, Homo sapiens
  misc_RNA (1)...(19): siRNA sense strand
cauucucaaacaugggaaa

SEQ ID NO: 2365382 - RNA, 19 nt, Homo sapiens
  misc_RNA (1)...(19): siRNA sense strand
uggauauuaaagagcacaa

SEQ ID NO: 2365383 - RNA, 19 nt, Homo sapiens
  misc_RNA (1)...(19): siRNA sense strand
cggguaaagaacucaguga

SEQ ID NO: 2365384 - RNA, 19 nt, Homo sapiens
  misc_RNA (1)...(19): siRNA sense strand
ccagagaaaucaacagccu

SEQ ID NO: 2365385 - RNA, 19 nt, Homo sapiens
  misc_RNA (1)...(19): siRNA sense strand
gugugaacauagaacaguu

SEQ ID NO: 2365386 - RNA, 19 nt, Homo sapiens
  misc_RNA (1)...(19): siRNA sense strand
ucagagaauugaagaacac

SEQ ID NO: 2365387 - RNA, 19 nt, Homo sapiens
  misc_RNA (1)...(19): siRNA sense strand
gggagcagugggaaguaau

SEQ ID NO: 2365388 - RNA, 19 nt, Homo sapiens
  misc_RNA (1)...(19): siRNA sense strand
agagaaaucaacagccuca

SEQ ID NO: 2365389 - RNA, 19 nt, Homo sapiens
  misc_RNA (1)...(19): siRNA sense strand
gaggaagggagcagaccca

SEQ ID NO: 2365390 - RNA, 19 nt, Homo sapiens
  misc_RNA (1)...(19): siRNA sense strand
gcaagaaagaugaaugcac

SEQ ID NO: 2365391 - RNA, 19 nt, Homo sapiens
  misc_RNA (1)...(19): siRNA sense strand
guuuguggaucuugaggca

SEQ ID NO: 2365392 - RNA, 19 nt, Homo sapiens
  misc_RNA (1)...(19): siRNA sense strand
gaaucugagaauauugcua

SEQ ID NO: 2365393 - RNA, 19 nt, Homo sapiens
  misc_RNA (1)...(19): siRNA sense strand
ggcagguggagcaggaaga

SEQ ID NO: 2365394 - RNA, 19 nt, Homo sapiens
  misc_RNA (1)...(19): siRNA sense strand
gagcuuuuacugaagaaua

SEQ ID NO: 2365395 - RNA, 19 nt, Homo sapiens
  misc_RNA (1)...(19): siRNA sense strand
uguuugaagaggagaaauu

SEQ ID NO: 2365396 - RNA, 19 nt, Homo sapiens
  misc_RNA (1)...(19): siRNA sense strand
ucuauaagcugguggagga

SEQ ID NO: 2365397 - RNA, 19 nt, Homo sapiens
  misc_RNA (1)...(19): siRNA sense strand
gcugagacaagaaggaaaa

SEQ ID NO: 2365398 - RNA, 19 nt, Homo sapiens
  misc_RNA (1)...(19): siRNA sense strand
gguaaaugggcuugauacu

SEQ ID NO: 2365399 - RNA, 19 nt, Homo sapiens
  misc_RNA (1)...(19): siRNA sense strand
aggugaggcgacagugaaa

SEQ ID NO: 2365400 - RNA, 19 nt, Homo sapiens
  misc_RNA (1)...(19): siRNA sense strand
aagaaaaccuggagcucau

SEQ ID NO: 2365401 - RNA, 19 nt, Homo sapiens
  misc_RNA (1)...(19): siRNA sense strand
cccaagaccaaaagauaua

SEQ ID NO: 2365402 - RNA, 19 nt, Homo sapiens
  misc_RNA (1)...(19): siRNA sense strand
uggugugaggugacgguaa

SEQ ID NO: 2365403 - RNA, 19 nt, Homo sapiens
  misc_RNA (1)...(19): siRNA sense strand
ugcugagacaagaaggaaa

SEQ ID NO: 2365404 - RNA, 19 nt, Homo sapiens
  misc_RNA (1)...(19): siRNA sense strand
gaguauuggugugagguga

SEQ ID NO: 2365405 - RNA, 19 nt, Homo sapiens
  misc_RNA (1)...(19): siRNA sense strand
gaaaauuagagaagaucca

SEQ ID NO: 2365406 - RNA, 19 nt, Homo sapiens
  misc_RNA (1)...(19): siRNA sense strand
cgugaaacguauauggaau

SEQ ID NO: 2365407 - RNA, 19 nt, Homo sapiens
  misc_RNA (1)...(19): siRNA sense strand
augcuaagauagaugagaa

SEQ ID NO: 2365408 - RNA, 19 nt, Homo sapiens
  misc_RNA (1)...(19): siRNA sense strand
aggaccaaauugagaguga

SEQ ID NO: 2365409 - RNA, 19 nt, Homo sapiens
  misc_RNA (1)...(19): siRNA sense strand
acaagaagugguggagaaa

SEQ ID NO: 2365410 - RNA, 19 nt, Homo sapiens
  misc_RNA (1)...(19): siRNA sense strand
ccgcacaccaggaggcauu

SEQ ID NO: 2365411 - RNA, 19 nt, Homo sapiens
  misc_RNA (1)...(19): siRNA sense strand
ggugaaugacuuugagacu

SEQ ID NO: 2365412 - RNA, 19 nt, Homo sapiens
  misc_RNA (1)...(19): siRNA sense strand
acuaaaagaugcugcugaa

SEQ ID NO: 2365413 - RNA, 19 nt, Homo sapiens
  misc_RNA (1)...(19): siRNA sense strand
gcugaacugaagaggaaga

SEQ ID NO: 2365414 - RNA, 19 nt, Homo sapiens
  misc_RNA (1)...(19): siRNA sense strand
cuuugagacugcugauauu

SEQ ID NO: 2365415 - RNA, 19 nt, Homo sapiens
  misc_RNA (1)...(19): siRNA sense strand
aauugagagugaugaguca

SEQ ID NO: 2365416 - RNA, 19 nt, Homo sapiens
  misc_RNA (1)...(19): siRNA sense strand
uguuccaguugaagagcaa

SEQ ID NO: 2365417 - RNA, 19 nt, Homo sapiens
  misc_RNA (1)...(19): siRNA sense strand
acuuggaauucaacaacua

SEQ ID NO: 2365418 - RNA, 19 nt, Homo sapiens
  misc_RNA (1)...(19): siRNA sense strand
gccaguaucuuaaaggaga

SEQ ID NO: 2365419 - RNA, 19 nt, Homo sapiens
  misc_RNA (1)...(19): siRNA sense strand
caguaauugaggauugcaa

SEQ ID NO: 2365420 - RNA, 19 nt, Homo sapiens
  misc_RNA (1)...(19): siRNA sense strand
uugaagagcaagaagaguu

SEQ ID NO: 2365421 - RNA, 19 nt, Homo sapiens
  misc_RNA (1)...(19): siRNA sense strand
augauugugaagaaggaaa

SEQ ID NO: 2365422 - RNA, 19 nt, Homo sapiens
  misc_RNA (1)...(19): siRNA sense strand
uagugcugcaagagggaaa

SEQ ID NO: 2365423 - RNA, 19 nt, Homo sapiens
  misc_RNA (1)...(19): siRNA sense strand
caguugaagagcaagaaga

SEQ ID NO: 2365424 - RNA, 19 nt, Homo sapiens
  misc_RNA (1)...(19): siRNA sense strand
gccugaacuuggaggacca

SEQ ID NO: 2365425 - RNA, 19 nt, Homo sapiens
  misc_RNA (1)...(19): siRNA sense strand
cugaagaaauugaagacug

SEQ ID NO: 2365426 - RNA, 19 nt, Homo sapiens
  misc_RNA (1)...(19): siRNA sense strand
cugaaagggagaaacugaa

SEQ ID NO: 2365427 - RNA, 19 nt, Homo sapiens
  misc_RNA (1)...(19): siRNA sense strand
ucccaaaagaagucaaaua

SEQ ID NO: 2365428 - RNA, 19 nt, Homo sapiens
  misc_RNA (1)...(19): siRNA sense strand
gcuucuuaccauucagcaa

SEQ ID NO: 2365429 - RNA, 19 nt, Homo sapiens
  misc_RNA (1)...(19): siRNA sense strand
aagaagaguucaagcagcu

SEQ ID NO: 2365430 - RNA, 19 nt, Homo sapiens
  misc_RNA (1)...(19): siRNA sense strand
ccuuucagauaauagggaa

SEQ ID NO: 2365431 - RNA, 19 nt, Homo sapiens
  misc_RNA (1)...(19): siRNA sense strand
acgcacaguaauugaggau

SEQ ID NO: 2365432 - RNA, 19 nt, Homo sapiens
  misc_RNA (1)...(19): siRNA sense strand
aacugaagucccaggaaau

SEQ ID NO: 2365433 - RNA, 19 nt, Homo sapiens
  misc_RNA (1)...(19): siRNA sense strand
ccgugaaacguauauggaa

SEQ ID NO: 2365434 - RNA, 19 nt, Homo sapiens
  misc_RNA (1)...(19): siRNA sense strand
cuccagagaaguuaaagaa

SEQ ID NO: 2365435 - RNA, 19 nt, Homo sapiens
  misc_RNA (1)...(19): siRNA sense strand
ccagauauaauguagcuga

SEQ ID NO: 2365436 - RNA, 19 nt, Homo sapiens
  misc_RNA (1)...(19): siRNA sense strand
ugguggagaaauaugaaau

SEQ ID NO: 2365437 - RNA, 19 nt, Homo sapiens
  misc_RNA (1)...(19): siRNA sense strand
agaagcaugaagauguuaa

SEQ ID NO: 2365438 - RNA, 19 nt, Homo sapiens
  misc_RNA (1)...(19): siRNA sense strand
ccaaaagcaaaacggacaa

SEQ ID NO: 2365439 - RNA, 19 nt, Homo sapiens
  misc_RNA (1)...(19): siRNA sense strand
ugaugauugugaagaagga

SEQ ID NO: 2365440 - RNA, 19 nt, Homo sapiens
  misc_RNA (1)...(19): siRNA sense strand
ugauugugaagaaggaaaa

SEQ ID NO: 2365441 - RNA, 19 nt, Homo sapiens
  misc_RNA (1)...(19): siRNA sense strand
cugcugaaagggagaaacu

SEQ ID NO: 2365442 - RNA, 19 nt, Homo sapiens
  misc_RNA (1)...(19): siRNA sense strand
gcauuaaugaaacuggaga

SEQ ID NO: 2365443 - RNA, 19 nt, Homo sapiens
  misc_RNA (1)...(19): siRNA sense strand
cgugaaacguauauggaau

SEQ ID NO: 2365444 - RNA, 19 nt, Homo sapiens
  misc_RNA (1)...(19): siRNA sense strand
augcuaagauagaugagaa

SEQ ID NO: 2365445 - RNA, 19 nt, Homo sapiens
  misc_RNA (1)...(19): siRNA sense strand
aggaccaaauugagaguga

SEQ ID NO: 2365446 - RNA, 19 nt, Homo sapiens
  misc_RNA (1)...(19): siRNA sense strand
acaagaagugguggagaaa

SEQ ID NO: 2365447 - RNA, 19 nt, Homo sapiens
  misc_RNA (1)...(19): siRNA sense strand
ccgcacaccaggaggcauu

SEQ ID NO: 2365448 - RNA, 19 nt, Homo sapiens
  misc_RNA (1)...(19): siRNA sense strand
ggugaaugacuuugagacu

SEQ ID NO: 2365449 - RNA, 19 nt, Homo sapiens
  misc_RNA (1)...(19): siRNA sense strand
acuaaaagaugcugcugaa

SEQ ID NO: 2365450 - RNA, 19 nt, Homo sapiens
  misc_RNA (1)...(19): siRNA sense strand
gcugaacugaagaggaaga

SEQ ID NO: 2365451 - RNA, 19 nt, Homo sapiens
  misc_RNA (1)...(19): siRNA sense strand
cuuugagacugcugauauu

SEQ ID NO: 2365452 - RNA, 19 nt, Homo sapiens
  misc_RNA (1)...(19): siRNA sense strand
aauugagagugaugaguca

SEQ ID NO: 2365453 - RNA, 19 nt, Homo sapiens
  misc_RNA (1)...(19): siRNA sense strand
uguuccaguugaagagcaa

SEQ ID NO: 2365454 - RNA, 19 nt, Homo sapiens
  misc_RNA (1)...(19): siRNA sense strand
acuuggaauucaacaacua

SEQ ID NO: 2365455 - RNA, 19 nt, Homo sapiens
  misc_RNA (1)...(19): siRNA sense strand
gccaguaucuuaaaggaga

SEQ ID NO: 2365456 - RNA, 19 nt, Homo sapiens
  misc_RNA (1)...(19): siRNA sense strand
caguaauugaggauugcaa

SEQ ID NO: 2365457 - RNA, 19 nt, Homo sapiens
  misc_RNA (1)...(19): siRNA sense strand
uugaagagcaagaagaguu

SEQ ID NO: 2365458 - RNA, 19 nt, Homo sapiens
  misc_RNA (1)...(19): siRNA sense strand
augauugugaagaaggaaa

SEQ ID NO: 2365459 - RNA, 19 nt, Homo sapiens
  misc_RNA (1)...(19): siRNA sense strand
uagugcugcaagagggaaa

SEQ ID NO: 2365460 - RNA, 19 nt, Homo sapiens
  misc_RNA (1)...(19): siRNA sense strand
caguugaagagcaagaaga

SEQ ID NO: 2365461 - RNA, 19 nt, Homo sapiens
  misc_RNA (1)...(19): siRNA sense strand
gccugaacuuggaggacca

SEQ ID NO: 2365462 - RNA, 19 nt, Homo sapiens
  misc_RNA (1)...(19): siRNA sense strand
cugaagaaauugaagacug

SEQ ID NO: 2365463 - RNA, 19 nt, Homo sapiens
  misc_RNA (1)...(19): siRNA sense strand
cugaaagggagaaacugaa

SEQ ID NO: 2365464 - RNA, 19 nt, Homo sapiens
  misc_RNA (1)...(19): siRNA sense strand
ucccaaaagaagucaaaua

SEQ ID NO: 2365465 - RNA, 19 nt, Homo sapiens
  misc_RNA (1)...(19): siRNA sense strand
gcuucuuaccauucagcaa

SEQ ID NO: 2365466 - RNA, 19 nt, Homo sapiens
  misc_RNA (1)...(19): siRNA sense strand
aagaagaguucaagcagcu

SEQ ID NO: 2365467 - RNA, 19 nt, Homo sapiens
  misc_RNA (1)...(19): siRNA sense strand
ccuuucagauaauagggaa

SEQ ID NO: 2365468 - RNA, 19 nt, Homo sapiens
  misc_RNA (1)...(19): siRNA sense strand
acgcacaguaauugaggau

SEQ ID NO: 2365469 - RNA, 19 nt, Homo sapiens
  misc_RNA (1)...(19): siRNA sense strand
aacugaagucccaggaaau

SEQ ID NO: 2365470 - RNA, 19 nt, Homo sapiens
  misc_RNA (1)...(19): siRNA sense strand
ccgugaaacguauauggaa

SEQ ID NO: 2365471 - RNA, 19 nt, Homo sapiens
  misc_RNA (1)...(19): siRNA sense strand
cuccagagaaguuaaagaa

SEQ ID NO: 2365472 - RNA, 19 nt, Homo sapiens
  misc_RNA (1)...(19): siRNA sense strand
ccagauauaauguagcuga

SEQ ID NO: 2365473 - RNA, 19 nt, Homo sapiens
  misc_RNA (1)...(19): siRNA sense strand
ugguggagaaauaugaaau

SEQ ID NO: 2365474 - RNA, 19 nt, Homo sapiens
  misc_RNA (1)...(19): siRNA sense strand
agaagcaugaagauguuaa

SEQ ID NO: 2365475 - RNA, 19 nt, Homo sapiens
  misc_RNA (1)...(19): siRNA sense strand
ccaaaagcaaaacggacaa

SEQ ID NO: 2365476 - RNA, 19 nt, Homo sapiens
  misc_RNA (1)...(19): siRNA sense strand
ugaugauugugaagaagga

SEQ ID NO: 2365477 - RNA, 19 nt, Homo sapiens
  misc_RNA (1)...(19): siRNA sense strand
ugauugugaagaaggaaaa

SEQ ID NO: 2365478 - RNA, 19 nt, Homo sapiens
  misc_RNA (1)...(19): siRNA sense strand
cugcugaaagggagaaacu

SEQ ID NO: 2365479 - RNA, 19 nt, Homo sapiens
  misc_RNA (1)...(19): siRNA sense strand
gcauuaaugaaacuggaga

SEQ ID NO: 2365480 - RNA, 19 nt, Homo sapiens
  misc_RNA (1)...(19): siRNA sense strand
gaauggaagaagaaagaau

SEQ ID NO: 2365481 - RNA, 19 nt, Homo sapiens
  misc_RNA (1)...(19): siRNA sense strand
uguuuaaaccugugaggaa

SEQ ID NO: 2365482 - RNA, 19 nt, Homo sapiens
  misc_RNA (1)...(19): siRNA sense strand
cgucagagucuaucagcaa

SEQ ID NO: 2365483 - RNA, 19 nt, Homo sapiens
  misc_RNA (1)...(19): siRNA sense strand
ccuuaggaauggaagaaga

SEQ ID NO: 2365484 - RNA, 19 nt, Homo sapiens
  misc_RNA (1)...(19): siRNA sense strand
aggaauggaagaagaaaga

SEQ ID NO: 2365485 - RNA, 19 nt, Homo sapiens
  misc_RNA (1)...(19): siRNA sense strand
uuugauacuucgugaacaa

SEQ ID NO: 2365486 - RNA, 19 nt, Homo sapiens
  misc_RNA (1)...(19): siRNA sense strand
cugaagacauccagaucau

SEQ ID NO: 2365487 - RNA, 19 nt, Homo sapiens
  misc_RNA (1)...(19): siRNA sense strand
cagaacucuuauugaacaa

SEQ ID NO: 2365488 - RNA, 19 nt, Homo sapiens
  misc_RNA (1)...(19): siRNA sense strand
caagaaaacuagagaugca

SEQ ID NO: 2365489 - RNA, 19 nt, Homo sapiens
  misc_RNA (1)...(19): siRNA sense strand
augaagugcuugaagauca

SEQ ID NO: 2365490 - RNA, 19 nt, Homo sapiens
  misc_RNA (1)...(19): siRNA sense strand
caauaagacaggaacccua

SEQ ID NO: 2365491 - RNA, 19 nt, Homo sapiens
  misc_RNA (1)...(19): siRNA sense strand
guuugaaagaugaacagaa

SEQ ID NO: 2365492 - RNA, 19 nt, Homo sapiens
  misc_RNA (1)...(19): siRNA sense strand
agacggacaucacgggcua

SEQ ID NO: 2365493 - RNA, 19 nt, Homo sapiens
  misc_RNA (1)...(19): siRNA sense strand
guuuaaaccugugaggaau

SEQ ID NO: 2365494 - RNA, 19 nt, Homo sapiens
  misc_RNA (1)...(19): siRNA sense strand
ccgauaaguuagucaugau

SEQ ID NO: 2365495 - RNA, 19 nt, Homo sapiens
  misc_RNA (1)...(19): siRNA sense strand
cuuagaagaaggagagucu

SEQ ID NO: 2365496 - RNA, 19 nt, Homo sapiens
  misc_RNA (1)...(19): siRNA sense strand
ugacaaagguuucagcguu

SEQ ID NO: 2365497 - RNA, 19 nt, Homo sapiens
  misc_RNA (1)...(19): siRNA sense strand
cuuaggaauggaagaagaa

SEQ ID NO: 2365498 - RNA, 19 nt, Homo sapiens
  misc_RNA (1)...(19): siRNA sense strand
uugaagaucaugugcagaa

SEQ ID NO: 2365499 - RNA, 19 nt, Homo sapiens
  misc_RNA (1)...(19): siRNA sense strand
aagaucaugugcagaacaa

SEQ ID NO: 2365500 - RNA, 19 nt, Homo sapiens
  misc_RNA (1)...(19): siRNA sense strand
agucuaacagucugacaaa

SEQ ID NO: 2365501 - RNA, 19 nt, Homo sapiens
  misc_RNA (1)...(19): siRNA sense strand
uuuaaaccugugaggaaua

SEQ ID NO: 2365502 - RNA, 19 nt, Homo sapiens
  misc_RNA (1)...(19): siRNA sense strand
gugaauagugacggauuua

SEQ ID NO: 2365503 - RNA, 19 nt, Homo sapiens
  misc_RNA (1)...(19): siRNA sense strand
agacucagauugauggaca

SEQ ID NO: 2365504 - RNA, 19 nt, Homo sapiens
  misc_RNA (1)...(19): siRNA sense strand
cuggaggaguucaugacaa

SEQ ID NO: 2365505 - RNA, 19 nt, Homo sapiens
  misc_RNA (1)...(19): siRNA sense strand
gugugaugcuauauugaau

SEQ ID NO: 2365506 - RNA, 19 nt, Homo sapiens
  misc_RNA (1)...(19): siRNA sense strand
gcagaguuaaccagccaaa

SEQ ID NO: 2365507 - RNA, 19 nt, Homo sapiens
  misc_RNA (1)...(19): siRNA sense strand
ucaagaugaaggaacuaaa

SEQ ID NO: 2365508 - RNA, 19 nt, Homo sapiens
  misc_RNA (1)...(19): siRNA sense strand
cggugaauagugacggauu

SEQ ID NO: 2365509 - RNA, 19 nt, Homo sapiens
  misc_RNA (1)...(19): siRNA sense strand
gucggaacuuugugggauu

SEQ ID NO: 2365510 - RNA, 19 nt, Homo sapiens
  misc_RNA (1)...(19): siRNA sense strand
uauagacagaugagggauu

SEQ ID NO: 2365511 - RNA, 19 nt, Homo sapiens
  misc_RNA (1)...(19): siRNA sense strand
agauguucacuuagaagaa

SEQ ID NO: 2365512 - RNA, 19 nt, Homo sapiens
  misc_RNA (1)...(19): siRNA sense strand
ggcaguguuccaaggauua

SEQ ID NO: 2365513 - RNA, 19 nt, Homo sapiens
  misc_RNA (1)...(19): siRNA sense strand
ccaaguuagaugauuguau

SEQ ID NO: 2365514 - RNA, 19 nt, Homo sapiens
  misc_RNA (1)...(19): siRNA sense strand
gagucaagcagauguuaga

SEQ ID NO: 2365515 - RNA, 19 nt, Homo sapiens
  misc_RNA (1)...(19): siRNA sense strand
gacucagauugauggacaa

SEQ ID NO: 2365516 - RNA, 19 nt, Homo sapiens
  misc_RNA (1)...(19): siRNA sense strand
gauuaucacaggaagcauu

SEQ ID NO: 2365517 - RNA, 19 nt, Homo sapiens
  misc_RNA (1)...(19): siRNA sense strand
cugagauaagagaacauua

SEQ ID NO: 2365518 - RNA, 19 nt, Homo sapiens
  misc_RNA (1)...(19): siRNA sense strand
cuacauugucggugaauag

SEQ ID NO: 2365519 - RNA, 19 nt, Homo sapiens
  misc_RNA (1)...(19): siRNA sense strand
aaaugaagugcuugaagau

SEQ ID NO: 2365520 - RNA, 19 nt, Homo sapiens
  misc_RNA (1)...(19): siRNA sense strand
ccaaggauuaucacaggaa

SEQ ID NO: 2365521 - RNA, 19 nt, Homo sapiens
  misc_RNA (1)...(19): siRNA sense strand
auugaagacuugugcaguu

SEQ ID NO: 2365522 - RNA, 19 nt, Homo sapiens
  misc_RNA (1)...(19): siRNA sense strand
agacauauacugugaacac

SEQ ID NO: 2365523 - RNA, 19 nt, Homo sapiens
  misc_RNA (1)...(19): siRNA sense strand
cagcuggagucaagcagau

SEQ ID NO: 2365524 - RNA, 19 nt, Homo sapiens
  misc_RNA (1)...(19): siRNA sense strand
augaagacauauacuguga

SEQ ID NO: 2365525 - RNA, 19 nt, Homo sapiens
  misc_RNA (1)...(19): siRNA sense strand
agaaagaauugaaaccgca

SEQ ID NO: 2365526 - RNA, 19 nt, Homo sapiens
  misc_RNA (1)...(19): siRNA sense strand
gaucaagaugaaggaacua

SEQ ID NO: 2365527 - RNA, 19 nt, Homo sapiens
  misc_RNA (1)...(19): siRNA sense strand
augauauccaccaguguua

SEQ ID NO: 2365528 - RNA, 19 nt, Homo sapiens
  misc_RNA (1)...(19): siRNA sense strand
gagucuaacagucugacaa

SEQ ID NO: 2365529 - RNA, 19 nt, Homo sapiens
  misc_RNA (1)...(19): siRNA sense strand
auaaagauaccgaguucau

SEQ ID NO: 2365530 - RNA, 19 nt, Homo sapiens
  misc_RNA (1)...(19): siRNA sense strand
cugcaaacucagauggauc

SEQ ID NO: 2365531 - RNA, 19 nt, Homo sapiens
  misc_RNA (1)...(19): siRNA sense strand
acucgguauuggagcugaa

SEQ ID NO: 2365532 - RNA, 19 nt, Homo sapiens
  misc_RNA (1)...(19): siRNA sense strand
guccuuacuuggagcguca

SEQ ID NO: 2365533 - RNA, 19 nt, Homo sapiens
  misc_RNA (1)...(19): siRNA sense strand
ccaaaauaauagagaucac

SEQ ID NO: 2365534 - RNA, 19 nt, Homo sapiens
  misc_RNA (1)...(19): siRNA sense strand
gggauuacuugucuggguu

SEQ ID NO: 2365535 - RNA, 19 nt, Homo sapiens
  misc_RNA (1)...(19): siRNA sense strand
aggcagacggacucgguau

SEQ ID NO: 2365536 - RNA, 19 nt, Homo sapiens
  misc_RNA (1)...(19): siRNA sense strand
gguuucaggagcaguguga

SEQ ID NO: 2365537 - RNA, 19 nt, Homo sapiens
  misc_RNA (1)...(19): siRNA sense strand
ccuacauugucggugaaua

SEQ ID NO: 2365538 - RNA, 19 nt, Homo sapiens
  misc_RNA (1)...(19): siRNA sense strand
cagcaguuccgguggccaa

SEQ ID NO: 2365539 - RNA, 19 nt, Homo sapiens
  misc_RNA (1)...(19): siRNA sense strand
cagugagauccaagcaaau

SEQ ID NO: 2365540 - RNA, 19 nt, Homo sapiens
  misc_RNA (1)...(19): siRNA sense strand
cagcaaacccagugaucac

SEQ ID NO: 2365541 - RNA, 19 nt, Homo sapiens
  misc_RNA (1)...(19): siRNA sense strand
aaucaagcaaugugagugu

SEQ ID NO: 2365542 - RNA, 19 nt, Homo sapiens
  misc_RNA (1)...(19): siRNA sense strand
ggaguaaaccacugggcca

SEQ ID NO: 2365543 - RNA, 19 nt, Homo sapiens
  misc_RNA (1)...(19): siRNA sense strand
ggagcuacacagagggcuu

SEQ ID NO: 2365544 - RNA, 19 nt, Homo sapiens
  misc_RNA (1)...(19): siRNA sense strand
ccagagggacccaugggaa

SEQ ID NO: 2365545 - RNA, 19 nt, Homo sapiens
  misc_RNA (1)...(19): siRNA sense strand
gcgacaagugggagcuguu

SEQ ID NO: 2365546 - RNA, 19 nt, Homo sapiens
  misc_RNA (1)...(19): siRNA sense strand
auggagggcuggagcuaca

SEQ ID NO: 2365547 - RNA, 19 nt, Homo sapiens
  misc_RNA (1)...(19): siRNA sense strand
cggcaaaacagaacagaaa

SEQ ID NO: 2365548 - RNA, 19 nt, Homo sapiens
  misc_RNA (1)...(19): siRNA sense strand
aagcagaaguagaggggaa

SEQ ID NO: 2365549 - RNA, 19 nt, Homo sapiens
  misc_RNA (1)...(19): siRNA sense strand
ggaucgaguuagaggacca

SEQ ID NO: 2365550 - RNA, 19 nt, Homo sapiens
  misc_RNA (1)...(19): siRNA sense strand
uaacagaggugguggccau

SEQ ID NO: 2365551 - RNA, 19 nt, Homo sapiens
  misc_RNA (1)...(19): siRNA sense strand
ccauagaggacguggagga

SEQ ID NO: 2365552 - RNA, 19 nt, Homo sapiens
  misc_RNA (1)...(19): siRNA sense strand
ccugaagagaagaaagauu

SEQ ID NO: 2365553 - RNA, 19 nt, Homo sapiens
  misc_RNA (1)...(19): siRNA sense strand
agaagaaagcagaaguaga

SEQ ID NO: 2365554 - RNA, 19 nt, Homo sapiens
  misc_RNA (1)...(19): siRNA sense strand
caaguauagcagagccaaa

SEQ ID NO: 2365555 - RNA, 19 nt, Homo sapiens
  misc_RNA (1)...(19): siRNA sense strand
gagcaauauaaggaagaaa

SEQ ID NO: 2365556 - RNA, 19 nt, Homo sapiens
  misc_RNA (1)...(19): siRNA sense strand
cuucagaggacgaggaaac

SEQ ID NO: 2365557 - RNA, 19 nt, Homo sapiens
  misc_RNA (1)...(19): siRNA sense strand
agcagaaaauccagggaaa

SEQ ID NO: 2365558 - RNA, 19 nt, Homo sapiens
  misc_RNA (1)...(19): siRNA sense strand
agaugaagacuauaagcaa

SEQ ID NO: 2365559 - RNA, 19 nt, Homo sapiens
  misc_RNA (1)...(19): siRNA sense strand
ggauauaauaggaggggca

SEQ ID NO: 2365560 - RNA, 19 nt, Homo sapiens
  misc_RNA (1)...(19): siRNA sense strand
aagaggaggaggaaggaau

SEQ ID NO: 2365561 - RNA, 19 nt, Homo sapiens
  misc_RNA (1)...(19): siRNA sense strand
agaucauggccguggauau

SEQ ID NO: 2365562 - RNA, 19 nt, Homo sapiens
  misc_RNA (1)...(19): siRNA sense strand
acugaagauuauggagaaa

SEQ ID NO: 2365563 - RNA, 19 nt, Homo sapiens
  misc_RNA (1)...(19): siRNA sense strand
cagaaaauccagggaaaua

SEQ ID NO: 2365564 - RNA, 19 nt, Homo sapiens
  misc_RNA (1)...(19): siRNA sense strand
uugcaggcuuccagcgaaa

SEQ ID NO: 2365565 - RNA, 19 nt, Homo sapiens
  misc_RNA (1)...(19): siRNA sense strand
cugugagacugaagauuau

SEQ ID NO: 2365566 - RNA, 19 nt, Homo sapiens
  misc_RNA (1)...(19): siRNA sense strand
aguacauugaagagaacaa

SEQ ID NO: 2365567 - RNA, 19 nt, Homo sapiens
  misc_RNA (1)...(19): siRNA sense strand
ggccugaagagaagaaaga

SEQ ID NO: 2365568 - RNA, 19 nt, Homo sapiens
  misc_RNA (1)...(19): siRNA sense strand
gcccgaaagaagcgaaauu

SEQ ID NO: 2365569 - RNA, 19 nt, Homo sapiens
  misc_RNA (1)...(19): siRNA sense strand
gcccaaaagaugaagacua

SEQ ID NO: 2365570 - RNA, 19 nt, Homo sapiens
  misc_RNA (1)...(19): siRNA sense strand
agcaaagaacacagaagaa

SEQ ID NO: 2365571 - RNA, 19 nt, Homo sapiens
  misc_RNA (1)...(19): siRNA sense strand
uugaagaagaagaugaaca

SEQ ID NO: 2365572 - RNA, 19 nt, Homo sapiens
  misc_RNA (1)...(19): siRNA sense strand
agacugaagauuauggaga

SEQ ID NO: 2365573 - RNA, 19 nt, Homo sapiens
  misc_RNA (1)...(19): siRNA sense strand
cuucaaaaucaguaaggaa

SEQ ID NO: 2365574 - RNA, 19 nt, Homo sapiens
  misc_RNA (1)...(19): siRNA sense strand
ugggaaucguggcggauau

SEQ ID NO: 2365575 - RNA, 19 nt, Homo sapiens
  misc_RNA (1)...(19): siRNA sense strand
uggaggaagugguggaauc

SEQ ID NO: 2365576 - RNA, 19 nt, Homo sapiens
  misc_RNA (1)...(19): siRNA sense strand
uguugaagaagaagaugaa

SEQ ID NO: 2365577 - RNA, 19 nt, Homo sapiens
  misc_RNA (1)...(19): siRNA sense strand
aagaagaagaugaacacuu

SEQ ID NO: 2365578 - RNA, 19 nt, Homo sapiens
  misc_RNA (1)...(19): siRNA sense strand
agaugaugguggcagguuu

SEQ ID NO: 2365579 - RNA, 19 nt, Homo sapiens
  misc_RNA (1)...(19): siRNA sense strand
aagaggaagaggaggagga

SEQ ID NO: 2365580 - RNA, 19 nt, Homo sapiens
  misc_RNA (1)...(19): siRNA sense strand
cggaagacgagaacggcga

SEQ ID NO: 2365581 - RNA, 19 nt, Homo sapiens
  misc_RNA (1)...(19): siRNA sense strand
guggcaagaaccaguuuaa

SEQ ID NO: 2365582 - RNA, 19 nt, Homo sapiens
  misc_RNA (1)...(19): siRNA sense strand
ggucagaagccauggaguc

SEQ ID NO: 2365583 - RNA, 19 nt, Homo sapiens
  misc_RNA (1)...(19): siRNA sense strand
gaguauacuuucauccaga

SEQ ID NO: 2365584 - RNA, 19 nt, Homo sapiens
  misc_RNA (1)...(19): siRNA sense strand
gugaaguugugaugaugau

SEQ ID NO: 2365585 - RNA, 19 nt, Homo sapiens
  misc_RNA (1)...(19): siRNA sense strand
gaacacagaagaaagcaga

SEQ ID NO: 2365586 - RNA, 19 nt, Homo sapiens
  misc_RNA (1)...(19): siRNA sense strand
uggaaauuucagaggagga

SEQ ID NO: 2365587 - RNA, 19 nt, Homo sapiens
  misc_RNA (1)...(19): siRNA sense strand
cagaggacgaggaaacaau

SEQ ID NO: 2365588 - RNA, 19 nt, Homo sapiens
  misc_RNA (1)...(19): siRNA sense strand
cuguugaagaagaagauga

SEQ ID NO: 2365589 - RNA, 19 nt, Homo sapiens
  misc_RNA (1)...(19): siRNA sense strand
cauccuauggugugucaaa

SEQ ID NO: 2365590 - RNA, 19 nt, Homo sapiens
  misc_RNA (1)...(19): siRNA sense strand
uuaagaagcaaauggcaga

SEQ ID NO: 2365591 - RNA, 19 nt, Homo sapiens
  misc_RNA (1)...(19): siRNA sense strand
ggggaaagaccuaccagaa

SEQ ID NO: 2365592 - RNA, 19 nt, Homo sapiens
  misc_RNA (1)...(19): siRNA sense strand
acauugaagagaacaagua

SEQ ID NO: 2365593 - RNA, 19 nt, Homo sapiens
  misc_RNA (1)...(19): siRNA sense strand
guggaauguuacuugguga

SEQ ID NO: 2365594 - RNA, 19 nt, Homo sapiens
  misc_RNA (1)...(19): siRNA sense strand
gcugcugcccagaggagaa

SEQ ID NO: 2365595 - RNA, 19 nt, Homo sapiens
  misc_RNA (1)...(19): siRNA sense strand
cugagugcuuugaugaaau

SEQ ID NO: 2365596 - RNA, 19 nt, Homo sapiens
  misc_RNA (1)...(19): siRNA sense strand
uaaaagaccacgagaagau

SEQ ID NO: 2365597 - RNA, 19 nt, Homo sapiens
  misc_RNA (1)...(19): siRNA sense strand
aaauaagaguggcaagaac

SEQ ID NO: 2365598 - RNA, 19 nt, Homo sapiens
  misc_RNA (1)...(19): siRNA sense strand
cccuuacaauggagaguuu

SEQ ID NO: 2365599 - RNA, 19 nt, Homo sapiens
  misc_RNA (1)...(19): siRNA sense strand
auauaacauucuuggcaca

SEQ ID NO: 2365600 - RNA, 19 nt, Homo sapiens
  misc_RNA (1)...(19): siRNA sense strand
aggaagaggaggaggaagg

SEQ ID NO: 2365601 - RNA, 19 nt, Homo sapiens
  misc_RNA (1)...(19): siRNA sense strand
uggaauguuacuuggugaa

SEQ ID NO: 2365602 - RNA, 19 nt, Homo sapiens
  misc_RNA (1)...(19): siRNA sense strand
ggcucaaagaaaagcaaua

SEQ ID NO: 2365603 - RNA, 19 nt, Homo sapiens
  misc_RNA (1)...(19): siRNA sense strand
aggaggagccccugggaau

SEQ ID NO: 2365604 - RNA, 19 nt, Homo sapiens
  misc_RNA (1)...(19): siRNA sense strand
gaaucguggcggauauaau

SEQ ID NO: 2365605 - RNA, 19 nt, Homo sapiens
  misc_RNA (1)...(19): siRNA sense strand
cgugguaguuacucaaaca

SEQ ID NO: 2365606 - RNA, 19 nt, Homo sapiens
  misc_RNA (1)...(19): siRNA sense strand
cagagguagcugagugcuu

SEQ ID NO: 2365607 - RNA, 19 nt, Homo sapiens
  misc_RNA (1)...(19): siRNA sense strand
cggcaaaacagaacagaaa

SEQ ID NO: 2365608 - RNA, 19 nt, Homo sapiens
  misc_RNA (1)...(19): siRNA sense strand
aagcagaaguagaggggaa

SEQ ID NO: 2365609 - RNA, 19 nt, Homo sapiens
  misc_RNA (1)...(19): siRNA sense strand
ggaucgaguuagaggacca

SEQ ID NO: 2365610 - RNA, 19 nt, Homo sapiens
  misc_RNA (1)...(19): siRNA sense strand
uaacagaggugguggccau

SEQ ID NO: 2365611 - RNA, 19 nt, Homo sapiens
  misc_RNA (1)...(19): siRNA sense strand
ccauagaggacguggagga

SEQ ID NO: 2365612 - RNA, 19 nt, Homo sapiens
  misc_RNA (1)...(19): siRNA sense strand
ccugaagagaagaaagauu

SEQ ID NO: 2365613 - RNA, 19 nt, Homo sapiens
  misc_RNA (1)...(19): siRNA sense strand
agaagaaagcagaaguaga

SEQ ID NO: 2365614 - RNA, 19 nt, Homo sapiens
  misc_RNA (1)...(19): siRNA sense strand
caaguauagcagagccaaa

SEQ ID NO: 2365615 - RNA, 19 nt, Homo sapiens
  misc_RNA (1)...(19): siRNA sense strand
gagcaauauaaggaagaaa

SEQ ID NO: 2365616 - RNA, 19 nt, Homo sapiens
  misc_RNA (1)...(19): siRNA sense strand
cuucagaggacgaggaaac

SEQ ID NO: 2365617 - RNA, 19 nt, Homo sapiens
  misc_RNA (1)...(19): siRNA sense strand
agcagaaaauccagggaaa

SEQ ID NO: 2365618 - RNA, 19 nt, Homo sapiens
  misc_RNA (1)...(19): siRNA sense strand
agaugaagacuauaagcaa

SEQ ID NO: 2365619 - RNA, 19 nt, Homo sapiens
  misc_RNA (1)...(19): siRNA sense strand
ggauauaauaggaggggca

SEQ ID NO: 2365620 - RNA, 19 nt, Homo sapiens
  misc_RNA (1)...(19): siRNA sense strand
aagaggaggaggaaggaau

SEQ ID NO: 2365621 - RNA, 19 nt, Homo sapiens
  misc_RNA (1)...(19): siRNA sense strand
agaucauggccguggauau

SEQ ID NO: 2365622 - RNA, 19 nt, Homo sapiens
  misc_RNA (1)...(19): siRNA sense strand
acugaagauuauggagaaa

SEQ ID NO: 2365623 - RNA, 19 nt, Homo sapiens
  misc_RNA (1)...(19): siRNA sense strand
cagaaaauccagggaaaua

SEQ ID NO: 2365624 - RNA, 19 nt, Homo sapiens
  misc_RNA (1)...(19): siRNA sense strand
uugcaggcuuccagcgaaa

SEQ ID NO: 2365625 - RNA, 19 nt, Homo sapiens
  misc_RNA (1)...(19): siRNA sense strand
cugugagacugaagauuau

SEQ ID NO: 2365626 - RNA, 19 nt, Homo sapiens
  misc_RNA (1)...(19): siRNA sense strand
aguacauugaagagaacaa

SEQ ID NO: 2365627 - RNA, 19 nt, Homo sapiens
  misc_RNA (1)...(19): siRNA sense strand
ggccugaagagaagaaaga

SEQ ID NO: 2365628 - RNA, 19 nt, Homo sapiens
  misc_RNA (1)...(19): siRNA sense strand
gcccgaaagaagcgaaauu

SEQ ID NO: 2365629 - RNA, 19 nt, Homo sapiens
  misc_RNA (1)...(19): siRNA sense strand
gcccaaaagaugaagacua

SEQ ID NO: 2365630 - RNA, 19 nt, Homo sapiens
  misc_RNA (1)...(19): siRNA sense strand
agcaaagaacacagaagaa

SEQ ID NO: 2365631 - RNA, 19 nt, Homo sapiens
  misc_RNA (1)...(19): siRNA sense strand
uugaagaagaagaugaaca

SEQ ID NO: 2365632 - RNA, 19 nt, Homo sapiens
  misc_RNA (1)...(19): siRNA sense strand
agacugaagauuauggaga

SEQ ID NO: 2365633 - RNA, 19 nt, Homo sapiens
  misc_RNA (1)...(19): siRNA sense strand
cuucaaaaucaguaaggaa

SEQ ID NO: 2365634 - RNA, 19 nt, Homo sapiens
  misc_RNA (1)...(19): siRNA sense strand
ugggaaucguggcggauau

SEQ ID NO: 2365635 - RNA, 19 nt, Homo sapiens
  misc_RNA (1)...(19): siRNA sense strand
uggaggaagugguggaauc

SEQ ID NO: 2365636 - RNA, 19 nt, Homo sapiens
  misc_RNA (1)...(19): siRNA sense strand
uguugaagaagaagaugaa

SEQ ID NO: 2365637 - RNA, 19 nt, Homo sapiens
  misc_RNA (1)...(19): siRNA sense strand
aagaagaagaugaacacuu

SEQ ID NO: 2365638 - RNA, 19 nt, Homo sapiens
  misc_RNA (1)...(19): siRNA sense strand
agaugaugguggcagguuu

SEQ ID NO: 2365639 - RNA, 19 nt, Homo sapiens
  misc_RNA (1)...(19): siRNA sense strand
aagaggaagaggaggagga

SEQ ID NO: 2365640 - RNA, 19 nt, Homo sapiens
  misc_RNA (1)...(19): siRNA sense strand
cggaagacgagaacggcga

SEQ ID NO: 2365641 - RNA, 19 nt, Homo sapiens
  misc_RNA (1)...(19): siRNA sense strand
guggcaagaaccaguuuaa

SEQ ID NO: 2365642 - RNA, 19 nt, Homo sapiens
  misc_RNA (1)...(19): siRNA sense strand
ggucagaagccauggaguc

SEQ ID NO: 2365643 - RNA, 19 nt, Homo sapiens
  misc_RNA (1)...(19): siRNA sense strand
gaguauacuuucauccaga

SEQ ID NO: 2365644 - RNA, 19 nt, Homo sapiens
  misc_RNA (1)...(19): siRNA sense strand
gugaaguugugaugaugau

SEQ ID NO: 2365645 - RNA, 19 nt, Homo sapiens
  misc_RNA (1)...(19): siRNA sense strand
gaacacagaagaaagcaga

SEQ ID NO: 2365646 - RNA, 19 nt, Homo sapiens
  misc_RNA (1)...(19): siRNA sense strand
uggaaauuucagaggagga

SEQ ID NO: 2365647 - RNA, 19 nt, Homo sapiens
  misc_RNA (1)...(19): siRNA sense strand
cagaggacgaggaaacaau

SEQ ID NO: 2365648 - RNA, 19 nt, Homo sapiens
  misc_RNA (1)...(19): siRNA sense strand
cuguugaagaagaagauga

SEQ ID NO: 2365649 - RNA, 19 nt, Homo sapiens
  misc_RNA (1)...(19): siRNA sense strand
cauccuauggugugucaaa

SEQ ID NO: 2365650 - RNA, 19 nt, Homo sapiens
  misc_RNA (1)...(19): siRNA sense strand
uuaagaagcaaauggcaga

SEQ ID NO: 2365651 - RNA, 19 nt, Homo sapiens
  misc_RNA (1)...(19): siRNA sense strand
ggggaaagaccuaccagaa

SEQ ID NO: 2365652 - RNA, 19 nt, Homo sapiens
  misc_RNA (1)...(19): siRNA sense strand
acauugaagagaacaagua

SEQ ID NO: 2365653 - RNA, 19 nt, Homo sapiens
  misc_RNA (1)...(19): siRNA sense strand
guggaauguuacuugguga

SEQ ID NO: 2365654 - RNA, 19 nt, Homo sapiens
  misc_RNA (1)...(19): siRNA sense strand
gcugcugcccagaggagaa

SEQ ID NO: 2365655 - RNA, 19 nt, Homo sapiens
  misc_RNA (1)...(19): siRNA sense strand
cugagugcuuugaugaaau

SEQ ID NO: 2365656 - RNA, 19 nt, Homo sapiens
  misc_RNA (1)...(19): siRNA sense strand
uaaaagaccacgagaagau

SEQ ID NO: 2365657 - RNA, 19 nt, Homo sapiens
  misc_RNA (1)...(19): siRNA sense strand
aaauaagaguggcaagaac

SEQ ID NO: 2365658 - RNA, 19 nt, Homo sapiens
  misc_RNA (1)...(19): siRNA sense strand
cccuuacaauggagaguuu

SEQ ID NO: 2365659 - RNA, 19 nt, Homo sapiens
  misc_RNA (1)...(19): siRNA sense strand
auauaacauucuuggcaca

SEQ ID NO: 2365660 - RNA, 19 nt, Homo sapiens
  misc_RNA (1)...(19): siRNA sense strand
aggaagaggaggaggaagg

SEQ ID NO: 2365661 - RNA, 19 nt, Homo sapiens
  misc_RNA (1)...(19): siRNA sense strand
uggaauguuacuuggugaa

SEQ ID NO: 2365662 - RNA, 19 nt, Homo sapiens
  misc_RNA (1)...(19): siRNA sense strand
ggcucaaagaaaagcaaua

SEQ ID NO: 2365663 - RNA, 19 nt, Homo sapiens
  misc_RNA (1)...(19): siRNA sense strand
aggaggagccccugggaau

SEQ ID NO: 2365664 - RNA, 19 nt, Homo sapiens
  misc_RNA (1)...(19): siRNA sense strand
gaaucguggcggauauaau

SEQ ID NO: 2365665 - RNA, 19 nt, Homo sapiens
  misc_RNA (1)...(19): siRNA sense strand
cgugguaguuacucaaaca

SEQ ID NO: 2365666 - RNA, 19 nt, Homo sapiens
  misc_RNA (1)...(19): siRNA sense strand
agaagaagguggaggccgu

SEQ ID NO: 2365667 - RNA, 19 nt, Homo sapiens
  misc_RNA (1)...(19): siRNA sense strand
auuucuaacucuugugcua

SEQ ID NO: 2365668 - RNA, 19 nt, Homo sapiens
  misc_RNA (1)...(19): siRNA sense strand
cagcaguggaccaggcaga

SEQ ID NO: 2365669 - RNA, 19 nt, Homo sapiens
  misc_RNA (1)...(19): siRNA sense strand
aagcucaggcuccgggaaa

SEQ ID NO: 2365670 - RNA, 19 nt, Homo sapiens
  misc_RNA (1)...(19): siRNA sense strand
ggcagaugaugcuggccua

SEQ ID NO: 2365671 - RNA, 19 nt, Homo sapiens
  misc_RNA (1)...(19): siRNA sense strand
cucaaauguuucugugaca

SEQ ID NO: 2365672 - RNA, 19 nt, Homo sapiens
  misc_RNA (1)...(19): siRNA sense strand
ucuugucauccuaggaaua

SEQ ID NO: 2365673 - RNA, 19 nt, Homo sapiens
  misc_RNA (1)...(19): siRNA sense strand
ucaaugaguucuacggacu

SEQ ID NO: 2365674 - RNA, 19 nt, Homo sapiens
  misc_RNA (1)...(19): siRNA sense strand
ggaacuggcucgcaggaac

SEQ ID NO: 2365675 - RNA, 19 nt, Homo sapiens
  misc_RNA (1)...(19): siRNA sense strand
aaggaacgggaaauagaaa

SEQ ID NO: 2365676 - RNA, 19 nt, Homo sapiens
  misc_RNA (1)...(19): siRNA sense strand
caguggauacccaaagcaa

SEQ ID NO: 2365677 - RNA, 19 nt, Homo sapiens
  misc_RNA (1)...(19): siRNA sense strand
aaauaagcuggcagugauu

SEQ ID NO: 2365678 - RNA, 19 nt, Homo sapiens
  misc_RNA (1)...(19): siRNA sense strand
ccaaagcaaggaacgggaa

SEQ ID NO: 2365679 - RNA, 19 nt, Homo sapiens
  misc_RNA (1)...(19): siRNA sense strand
gggaaauagaaaccuccaa

SEQ ID NO: 2365680 - RNA, 19 nt, Homo sapiens
  misc_RNA (1)...(19): siRNA sense strand
gcuacuggacgcugggcuu

SEQ ID NO: 2365681 - RNA, 19 nt, Homo sapiens
  misc_RNA (1)...(19): siRNA sense strand
agauagaggaagagaauga

SEQ ID NO: 2365682 - RNA, 19 nt, Homo sapiens
  misc_RNA (1)...(19): siRNA sense strand
gcuuaaacuccauaggaaa

SEQ ID NO: 2365683 - RNA, 19 nt, Homo sapiens
  misc_RNA (1)...(19): siRNA sense strand
agaggaaggcugagaacau

SEQ ID NO: 2365684 - RNA, 19 nt, Homo sapiens
  misc_RNA (1)...(19): siRNA sense strand
augagaaggaggagauuau

SEQ ID NO: 2365685 - RNA, 19 nt, Homo sapiens
  misc_RNA (1)...(19): siRNA sense strand
cugaaggaccacuuggaaa

SEQ ID NO: 2365686 - RNA, 19 nt, Homo sapiens
  misc_RNA (1)...(19): siRNA sense strand
uggaggaggaggaggauga

SEQ ID NO: 2365687 - RNA, 19 nt, Homo sapiens
  misc_RNA (1)...(19): siRNA sense strand
uggcaguuaaacagggaaa

SEQ ID NO: 2365688 - RNA, 19 nt, Homo sapiens
  misc_RNA (1)...(19): siRNA sense strand
uggcuaaagaagaaagaca

SEQ ID NO: 2365689 - RNA, 19 nt, Homo sapiens
  misc_RNA (1)...(19): siRNA sense strand
caguaaagaggaaggcuga

SEQ ID NO: 2365690 - RNA, 19 nt, Homo sapiens
  misc_RNA (1)...(19): siRNA sense strand
agacagaaguccuugcaga

SEQ ID NO: 2365691 - RNA, 19 nt, Homo sapiens
  misc_RNA (1)...(19): siRNA sense strand
cugagaagaaacaacguaa

SEQ ID NO: 2365692 - RNA, 19 nt, Homo sapiens
  misc_RNA (1)...(19): siRNA sense strand
agaaagacagcuuggugaa

SEQ ID NO: 2365693 - RNA, 19 nt, Homo sapiens
  misc_RNA (1)...(19): siRNA sense strand
gaagaagaccugaguggga

SEQ ID NO: 2365694 - RNA, 19 nt, Homo sapiens
  misc_RNA (1)...(19): siRNA sense strand
aggaggaggaugagcucaa

SEQ ID NO: 2365695 - RNA, 19 nt, Homo sapiens
  misc_RNA (1)...(19): siRNA sense strand
cugugaagauugugaagca

SEQ ID NO: 2365696 - RNA, 19 nt, Homo sapiens
  misc_RNA (1)...(19): siRNA sense strand
auaucgaagcuaugguaaa

SEQ ID NO: 2365697 - RNA, 19 nt, Homo sapiens
  misc_RNA (1)...(19): siRNA sense strand
gcaccaugucguugaugaa

SEQ ID NO: 2365698 - RNA, 19 nt, Homo sapiens
  misc_RNA (1)...(19): siRNA sense strand
cauuuguggaugagaauuu

SEQ ID NO: 2365699 - RNA, 19 nt, Homo sapiens
  misc_RNA (1)...(19): siRNA sense strand
gugcagacacaaagcucaa

SEQ ID NO: 2365700 - RNA, 19 nt, Homo sapiens
  misc_RNA (1)...(19): siRNA sense strand
uggaggaagcagaagaaga

SEQ ID NO: 2365701 - RNA, 19 nt, Homo sapiens
  misc_RNA (1)...(19): siRNA sense strand
augaggaggaggaggauga

SEQ ID NO: 2365702 - RNA, 19 nt, Homo sapiens
  misc_RNA (1)...(19): siRNA sense strand
ggaagaagccacuugcaca

SEQ ID NO: 2365703 - RNA, 19 nt, Homo sapiens
  misc_RNA (1)...(19): siRNA sense strand
aggaggaugaggaggauga

SEQ ID NO: 2365704 - RNA, 19 nt, Homo sapiens
  misc_RNA (1)...(19): siRNA sense strand
aagucaggcuccagaaaca

SEQ ID NO: 2365705 - RNA, 19 nt, Homo sapiens
  misc_RNA (1)...(19): siRNA sense strand
aggaugaggaggaggagga

SEQ ID NO: 2365706 - RNA, 19 nt, Homo sapiens
  misc_RNA (1)...(19): siRNA sense strand
ugagaagaaacaacguaaa

SEQ ID NO: 2365707 - RNA, 19 nt, Homo sapiens
  misc_RNA (1)...(19): siRNA sense strand
ggaaaugagaaggaggaga

SEQ ID NO: 2365708 - RNA, 19 nt, Homo sapiens
  misc_RNA (1)...(19): siRNA sense strand
aggaggaggaugaggagga

SEQ ID NO: 2365709 - RNA, 19 nt, Homo sapiens
  misc_RNA (1)...(19): siRNA sense strand
ugaggaaaaugaagaggua

SEQ ID NO: 2365710 - RNA, 19 nt, Homo sapiens
  misc_RNA (1)...(19): siRNA sense strand
augaagagguauccaucaa

SEQ ID NO: 2365711 - RNA, 19 nt, Homo sapiens
  misc_RNA (1)...(19): siRNA sense strand
gguugcgagcugagaagaa

SEQ ID NO: 2365712 - RNA, 19 nt, Homo sapiens
  misc_RNA (1)...(19): siRNA sense strand
gauucuauggugucaguaa

SEQ ID NO: 2365713 - RNA, 19 nt, Homo sapiens
  misc_RNA (1)...(19): siRNA sense strand
ggaugagcucaaagaugaa

SEQ ID NO: 2365714 - RNA, 19 nt, Homo sapiens
  misc_RNA (1)...(19): siRNA sense strand
aguuaaacagggaaaccaa

SEQ ID NO: 2365715 - RNA, 19 nt, Homo sapiens
  misc_RNA (1)...(19): siRNA sense strand
cuuaaacuccauaggaaaa

SEQ ID NO: 2365716 - RNA, 19 nt, Homo sapiens
  misc_RNA (1)...(19): siRNA sense strand
uucaagaguuggagagagu

SEQ ID NO: 2365717 - RNA, 19 nt, Homo sapiens
  misc_RNA (1)...(19): siRNA sense strand
gaaugaaggggcaggauuu

SEQ ID NO: 2365718 - RNA, 19 nt, Homo sapiens
  misc_RNA (1)...(19): siRNA sense strand
ucuuaaagcagaaaagcaa

SEQ ID NO: 2365719 - RNA, 19 nt, Homo sapiens
  misc_RNA (1)...(19): siRNA sense strand
aauaugaagaagcgcuuaa

SEQ ID NO: 2365720 - RNA, 19 nt, Homo sapiens
  misc_RNA (1)...(19): siRNA sense strand
agcuuaaacuccauaggaa

SEQ ID NO: 2365721 - RNA, 19 nt, Homo sapiens
  misc_RNA (1)...(19): siRNA sense strand
ggaaaauucaccuguggaa

SEQ ID NO: 2365722 - RNA, 19 nt, Homo sapiens
  misc_RNA (1)...(19): siRNA sense strand
aucaaacacuggaggauga

SEQ ID NO: 2365723 - RNA, 19 nt, Homo sapiens
  misc_RNA (1)...(19): siRNA sense strand
ggcagauagaggaagagaa

SEQ ID NO: 2365724 - RNA, 19 nt, Homo sapiens
  misc_RNA (1)...(19): siRNA sense strand
uggugucaguaaagaggaa

SEQ ID NO: 2365725 - RNA, 19 nt, Homo sapiens
  misc_RNA (1)...(19): siRNA sense strand
acagcagacagaagagcua

SEQ ID NO: 2365726 - RNA, 19 nt, Homo sapiens
  misc_RNA (1)...(19): siRNA sense strand
acgaaacgguugagaagcu

SEQ ID NO: 2365727 - RNA, 19 nt, Homo sapiens
  misc_RNA (1)...(19): siRNA sense strand
uccagaaacagguugauaa

SEQ ID NO: 2365728 - RNA, 19 nt, Homo sapiens
  misc_RNA (1)...(19): siRNA sense strand
ggaagagaaugaaggggca

SEQ ID NO: 2365729 - RNA, 19 nt, Homo sapiens
  misc_RNA (1)...(19): siRNA sense strand
cagucaaggagaauaugaa

SEQ ID NO: 2365730 - RNA, 19 nt, Homo sapiens
  misc_RNA (1)...(19): siRNA sense strand
gaauuugccugaugggacu

SEQ ID NO: 2365731 - RNA, 19 nt, Homo sapiens
  misc_RNA (1)...(19): siRNA sense strand
ucauggaggaggaggagga

SEQ ID NO: 2365732 - RNA, 19 nt, Homo sapiens
  misc_RNA (1)...(19): siRNA sense strand
aggaagaagcugucaugga

SEQ ID NO: 2365733 - RNA, 19 nt, Homo sapiens
  misc_RNA (1)...(19): siRNA sense strand
aagaaagacagcuugguga

SEQ ID NO: 2365734 - RNA, 19 nt, Homo sapiens
  misc_RNA (1)...(19): siRNA sense strand
gggcaggauuuaaagcacu

SEQ ID NO: 2365735 - RNA, 19 nt, Homo sapiens
  misc_RNA (1)...(19): siRNA sense strand
ccacagaaaagaaggaugu

SEQ ID NO: 2365736 - RNA, 19 nt, Homo sapiens
  misc_RNA (1)...(19): siRNA sense strand
gugcaguaucauaguagau

SEQ ID NO: 2365737 - RNA, 19 nt, Homo sapiens
  misc_RNA (1)...(19): siRNA sense strand
auucuauggugucaguaaa

SEQ ID NO: 2365738 - RNA, 19 nt, Homo sapiens
  misc_RNA (1)...(19): siRNA sense strand
augaggaggaugaggagga

SEQ ID NO: 2365739 - RNA, 19 nt, Homo sapiens
  misc_RNA (1)...(19): siRNA sense strand
cuuguaaacagcagacaga

SEQ ID NO: 2365740 - RNA, 19 nt, Homo sapiens
  misc_RNA (1)...(19): siRNA sense strand
ggugagagucuugggauca

SEQ ID NO: 2365741 - RNA, 19 nt, Homo sapiens
  misc_RNA (1)...(19): siRNA sense strand
agauagaggaagagaauga

SEQ ID NO: 2365742 - RNA, 19 nt, Homo sapiens
  misc_RNA (1)...(19): siRNA sense strand
gcuuaaacuccauaggaaa

SEQ ID NO: 2365743 - RNA, 19 nt, Homo sapiens
  misc_RNA (1)...(19): siRNA sense strand
agaggaaggcugagaacau

SEQ ID NO: 2365744 - RNA, 19 nt, Homo sapiens
  misc_RNA (1)...(19): siRNA sense strand
augagaaggaggagauuau

SEQ ID NO: 2365745 - RNA, 19 nt, Homo sapiens
  misc_RNA (1)...(19): siRNA sense strand
cugaaggaccacuuggaaa

SEQ ID NO: 2365746 - RNA, 19 nt, Homo sapiens
  misc_RNA (1)...(19): siRNA sense strand
uggaggaggaggaggauga

SEQ ID NO: 2365747 - RNA, 19 nt, Homo sapiens
  misc_RNA (1)...(19): siRNA sense strand
uggcaguuaaacagggaaa

SEQ ID NO: 2365748 - RNA, 19 nt, Homo sapiens
  misc_RNA (1)...(19): siRNA sense strand
uggcuaaagaagaaagaca

SEQ ID NO: 2365749 - RNA, 19 nt, Homo sapiens
  misc_RNA (1)...(19): siRNA sense strand
caguaaagaggaaggcuga

SEQ ID NO: 2365750 - RNA, 19 nt, Homo sapiens
  misc_RNA (1)...(19): siRNA sense strand
agacagaaguccuugcaga

SEQ ID NO: 2365751 - RNA, 19 nt, Homo sapiens
  misc_RNA (1)...(19): siRNA sense strand
cugagaagaaacaacguaa

SEQ ID NO: 2365752 - RNA, 19 nt, Homo sapiens
  misc_RNA (1)...(19): siRNA sense strand
agaaagacagcuuggugaa

SEQ ID NO: 2365753 - RNA, 19 nt, Homo sapiens
  misc_RNA (1)...(19): siRNA sense strand
gaagaagaccugaguggga

SEQ ID NO: 2365754 - RNA, 19 nt, Homo sapiens
  misc_RNA (1)...(19): siRNA sense strand
aggaggaggaugagcucaa

SEQ ID NO: 2365755 - RNA, 19 nt, Homo sapiens
  misc_RNA (1)...(19): siRNA sense strand
cugugaagauugugaagca

SEQ ID NO: 2365756 - RNA, 19 nt, Homo sapiens
  misc_RNA (1)...(19): siRNA sense strand
auaucgaagcuaugguaaa

SEQ ID NO: 2365757 - RNA, 19 nt, Homo sapiens
  misc_RNA (1)...(19): siRNA sense strand
gcaccaugucguugaugaa

SEQ ID NO: 2365758 - RNA, 19 nt, Homo sapiens
  misc_RNA (1)...(19): siRNA sense strand
cauuuguggaugagaauuu

SEQ ID NO: 2365759 - RNA, 19 nt, Homo sapiens
  misc_RNA (1)...(19): siRNA sense strand
gugcagacacaaagcucaa

SEQ ID NO: 2365760 - RNA, 19 nt, Homo sapiens
  misc_RNA (1)...(19): siRNA sense strand
uggaggaagcagaagaaga

SEQ ID NO: 2365761 - RNA, 19 nt, Homo sapiens
  misc_RNA (1)...(19): siRNA sense strand
augaggaggaggaggauga

SEQ ID NO: 2365762 - RNA, 19 nt, Homo sapiens
  misc_RNA (1)...(19): siRNA sense strand
ggaagaagccacuugcaca

SEQ ID NO: 2365763 - RNA, 19 nt, Homo sapiens
  misc_RNA (1)...(19): siRNA sense strand
aggaggaugaggaggauga

SEQ ID NO: 2365764 - RNA, 19 nt, Homo sapiens
  misc_RNA (1)...(19): siRNA sense strand
aagucaggcuccagaaaca

SEQ ID NO: 2365765 - RNA, 19 nt, Homo sapiens
  misc_RNA (1)...(19): siRNA sense strand
aggaugaggaggaggagga

SEQ ID NO: 2365766 - RNA, 19 nt, Homo sapiens
  misc_RNA (1)...(19): siRNA sense strand
ugagaagaaacaacguaaa

SEQ ID NO: 2365767 - RNA, 19 nt, Homo sapiens
  misc_RNA (1)...(19): siRNA sense strand
ggaaaugagaaggaggaga

SEQ ID NO: 2365768 - RNA, 19 nt, Homo sapiens
  misc_RNA (1)...(19): siRNA sense strand
aggaggaggaugaggagga

SEQ ID NO: 2365769 - RNA, 19 nt, Homo sapiens
  misc_RNA (1)...(19): siRNA sense strand
ugaggaaaaugaagaggua

SEQ ID NO: 2365770 - RNA, 19 nt, Homo sapiens
  misc_RNA (1)...(19): siRNA sense strand
augaagagguauccaucaa

SEQ ID NO: 2365771 - RNA, 19 nt, Homo sapiens
  misc_RNA (1)...(19): siRNA sense strand
gguugcgagcugagaagaa

SEQ ID NO: 2365772 - RNA, 19 nt, Homo sapiens
  misc_RNA (1)...(19): siRNA sense strand
gauucuauggugucaguaa

SEQ ID NO: 2365773 - RNA, 19 nt, Homo sapiens
  misc_RNA (1)...(19): siRNA sense strand
ggaugagcucaaagaugaa

SEQ ID NO: 2365774 - RNA, 19 nt, Homo sapiens
  misc_RNA (1)...(19): siRNA sense strand
aguuaaacagggaaaccaa

SEQ ID NO: 2365775 - RNA, 19 nt, Homo sapiens
  misc_RNA (1)...(19): siRNA sense strand
cuuaaacuccauaggaaaa

SEQ ID NO: 2365776 - RNA, 19 nt, Homo sapiens
  misc_RNA (1)...(19): siRNA sense strand
uucaagaguuggagagagu

SEQ ID NO: 2365777 - RNA, 19 nt, Homo sapiens
  misc_RNA (1)...(19): siRNA sense strand
gaaugaaggggcaggauuu

SEQ ID NO: 2365778 - RNA, 19 nt, Homo sapiens
  misc_RNA (1)...(19): siRNA sense strand
ucuuaaagcagaaaagcaa

SEQ ID NO: 2365779 - RNA, 19 nt, Homo sapiens
  misc_RNA (1)...(19): siRNA sense strand
aauaugaagaagcgcuuaa

SEQ ID NO: 2365780 - RNA, 19 nt, Homo sapiens
  misc_RNA (1)...(19): siRNA sense strand
agcuuaaacuccauaggaa

SEQ ID NO: 2365781 - RNA, 19 nt, Homo sapiens
  misc_RNA (1)...(19): siRNA sense strand
ggaaaauucaccuguggaa

SEQ ID NO: 2365782 - RNA, 19 nt, Homo sapiens
  misc_RNA (1)...(19): siRNA sense strand
aucaaacacuggaggauga

SEQ ID NO: 2365783 - RNA, 19 nt, Homo sapiens
  misc_RNA (1)...(19): siRNA sense strand
ggcagauagaggaagagaa

SEQ ID NO: 2365784 - RNA, 19 nt, Homo sapiens
  misc_RNA (1)...(19): siRNA sense strand
uggugucaguaaagaggaa

SEQ ID NO: 2365785 - RNA, 19 nt, Homo sapiens
  misc_RNA (1)...(19): siRNA sense strand
acagcagacagaagagcua

SEQ ID NO: 2365786 - RNA, 19 nt, Homo sapiens
  misc_RNA (1)...(19): siRNA sense strand
acgaaacgguugagaagcu

SEQ ID NO: 2365787 - RNA, 19 nt, Homo sapiens
  misc_RNA (1)...(19): siRNA sense strand
uccagaaacagguugauaa

SEQ ID NO: 2365788 - RNA, 19 nt, Homo sapiens
  misc_RNA (1)...(19): siRNA sense strand
ggaagagaaugaaggggca

SEQ ID NO: 2365789 - RNA, 19 nt, Homo sapiens
  misc_RNA (1)...(19): siRNA sense strand
cagucaaggagaauaugaa

SEQ ID NO: 2365790 - RNA, 19 nt, Homo sapiens
  misc_RNA (1)...(19): siRNA sense strand
gaauuugccugaugggacu

SEQ ID NO: 2365791 - RNA, 19 nt, Homo sapiens
  misc_RNA (1)...(19): siRNA sense strand
ucauggaggaggaggagga

SEQ ID NO: 2365792 - RNA, 19 nt, Homo sapiens
  misc_RNA (1)...(19): siRNA sense strand
aggaagaagcugucaugga

SEQ ID NO: 2365793 - RNA, 19 nt, Homo sapiens
  misc_RNA (1)...(19): siRNA sense strand
aagaaagacagcuugguga

SEQ ID NO: 2365794 - RNA, 19 nt, Homo sapiens
  misc_RNA (1)...(19): siRNA sense strand
gggcaggauuuaaagcacu

SEQ ID NO: 2365795 - RNA, 19 nt, Homo sapiens
  misc_RNA (1)...(19): siRNA sense strand
ccacagaaaagaaggaugu

SEQ ID NO: 2365796 - RNA, 19 nt, Homo sapiens
  misc_RNA (1)...(19): siRNA sense strand
gugcaguaucauaguagau

SEQ ID NO: 2365797 - RNA, 19 nt, Homo sapiens
  misc_RNA (1)...(19): siRNA sense strand
auucuauggugucaguaaa

SEQ ID NO: 2365798 - RNA, 19 nt, Homo sapiens
  misc_RNA (1)...(19): siRNA sense strand
augaggaggaugaggagga

SEQ ID NO: 2365799 - RNA, 19 nt, Homo sapiens
  misc_RNA (1)...(19): siRNA sense strand
cuuguaaacagcagacaga

SEQ ID NO: 2365800 - RNA, 19 nt, Homo sapiens
  misc_RNA (1)...(19): siRNA sense strand
ggugagagucuugggauca

SEQ ID NO: 2365801 - RNA, 19 nt, Homo sapiens
  misc_RNA (1)...(19): siRNA sense strand
agauagaggaagagaauga

SEQ ID NO: 2365802 - RNA, 19 nt, Homo sapiens
  misc_RNA (1)...(19): siRNA sense strand
gcuuaaacuccauaggaaa

SEQ ID NO: 2365803 - RNA, 19 nt, Homo sapiens
  misc_RNA (1)...(19): siRNA sense strand
agaggaaggcugagaacau

SEQ ID NO: 2365804 - RNA, 19 nt, Homo sapiens
  misc_RNA (1)...(19): siRNA sense strand
augagaaggaggagauuau

SEQ ID NO: 2365805 - RNA, 19 nt, Homo sapiens
  misc_RNA (1)...(19): siRNA sense strand
cugaaggaccacuuggaaa

SEQ ID NO: 2365806 - RNA, 19 nt, Homo sapiens
  misc_RNA (1)...(19): siRNA sense strand
uggaggaggaggaggauga

SEQ ID NO: 2365807 - RNA, 19 nt, Homo sapiens
  misc_RNA (1)...(19): siRNA sense strand
uggcaguuaaacagggaaa

SEQ ID NO: 2365808 - RNA, 19 nt, Homo sapiens
  misc_RNA (1)...(19): siRNA sense strand
uggcuaaagaagaaagaca

SEQ ID NO: 2365809 - RNA, 19 nt, Homo sapiens
  misc_RNA (1)...(19): siRNA sense strand
caguaaagaggaaggcuga

SEQ ID NO: 2365810 - RNA, 19 nt, Homo sapiens
  misc_RNA (1)...(19): siRNA sense strand
agacagaaguccuugcaga

SEQ ID NO: 2365811 - RNA, 19 nt, Homo sapiens
  misc_RNA (1)...(19): siRNA sense strand
cugagaagaaacaacguaa

SEQ ID NO: 2365812 - RNA, 19 nt, Homo sapiens
  misc_RNA (1)...(19): siRNA sense strand
agaaagacagcuuggugaa

SEQ ID NO: 2365813 - RNA, 19 nt, Homo sapiens
  misc_RNA (1)...(19): siRNA sense strand
gaagaagaccugaguggga

SEQ ID NO: 2365814 - RNA, 19 nt, Homo sapiens
  misc_RNA (1)...(19): siRNA sense strand
aggaggaggaugagcucaa

SEQ ID NO: 2365815 - RNA, 19 nt, Homo sapiens
  misc_RNA (1)...(19): siRNA sense strand
cugugaagauugugaagca

SEQ ID NO: 2365816 - RNA, 19 nt, Homo sapiens
  misc_RNA (1)...(19): siRNA sense strand
auaucgaagcuaugguaaa

SEQ ID NO: 2365817 - RNA, 19 nt, Homo sapiens
  misc_RNA (1)...(19): siRNA sense strand
gcaccaugucguugaugaa

SEQ ID NO: 2365818 - RNA, 19 nt, Homo sapiens
  misc_RNA (1)...(19): siRNA sense strand
cauuuguggaugagaauuu

SEQ ID NO: 2365819 - RNA, 19 nt, Homo sapiens
  misc_RNA (1)...(19): siRNA sense strand
gugcagacacaaagcucaa

SEQ ID NO: 2365820 - RNA, 19 nt, Homo sapiens
  misc_RNA (1)...(19): siRNA sense strand
uggaggaagcagaagaaga

SEQ ID NO: 2365821 - RNA, 19 nt, Homo sapiens
  misc_RNA (1)...(19): siRNA sense strand
augaggaggaggaggauga

SEQ ID NO: 2365822 - RNA, 19 nt, Homo sapiens
  misc_RNA (1)...(19): siRNA sense strand
ggaagaagccacuugcaca

SEQ ID NO: 2365823 - RNA, 19 nt, Homo sapiens
  misc_RNA (1)...(19): siRNA sense strand
aggaggaugaggaggauga

SEQ ID NO: 2365824 - RNA, 19 nt, Homo sapiens
  misc_RNA (1)...(19): siRNA sense strand
aagucaggcuccagaaaca

SEQ ID NO: 2365825 - RNA, 19 nt, Homo sapiens
  misc_RNA (1)...(19): siRNA sense strand
aggaugaggaggaggagga

SEQ ID NO: 2365826 - RNA, 19 nt, Homo sapiens
  misc_RNA (1)...(19): siRNA sense strand
ugagaagaaacaacguaaa

SEQ ID NO: 2365827 - RNA, 19 nt, Homo sapiens
  misc_RNA (1)...(19): siRNA sense strand
ggaaaugagaaggaggaga

SEQ ID NO: 2365828 - RNA, 19 nt, Homo sapiens
  misc_RNA (1)...(19): siRNA sense strand
aggaggaggaugaggagga

SEQ ID NO: 2365829 - RNA, 19 nt, Homo sapiens
  misc_RNA (1)...(19): siRNA sense strand
ugaggaaaaugaagaggua

SEQ ID NO: 2365830 - RNA, 19 nt, Homo sapiens
  misc_RNA (1)...(19): siRNA sense strand
augaagagguauccaucaa

SEQ ID NO: 2365831 - RNA, 19 nt, Homo sapiens
  misc_RNA (1)...(19): siRNA sense strand
gguugcgagcugagaagaa

SEQ ID NO: 2365832 - RNA, 19 nt, Homo sapiens
  misc_RNA (1)...(19): siRNA sense strand
gauucuauggugucaguaa

SEQ ID NO: 2365833 - RNA, 19 nt, Homo sapiens
  misc_RNA (1)...(19): siRNA sense strand
ggaugagcucaaagaugaa

SEQ ID NO: 2365834 - RNA, 19 nt, Homo sapiens
  misc_RNA (1)...(19): siRNA sense strand
aguuaaacagggaaaccaa

SEQ ID NO: 2365835 - RNA, 19 nt, Homo sapiens
  misc_RNA (1)...(19): siRNA sense strand
cuuaaacuccauaggaaaa

SEQ ID NO: 2365836 - RNA, 19 nt, Homo sapiens
  misc_RNA (1)...(19): siRNA sense strand
uucaagaguuggagagagu

SEQ ID NO: 2365837 - RNA, 19 nt, Homo sapiens
  misc_RNA (1)...(19): siRNA sense strand
gaaugaaggggcaggauuu

SEQ ID NO: 2365838 - RNA, 19 nt, Homo sapiens
  misc_RNA (1)...(19): siRNA sense strand
ucuuaaagcagaaaagcaa

SEQ ID NO: 2365839 - RNA, 19 nt, Homo sapiens
  misc_RNA (1)...(19): siRNA sense strand
aauaugaagaagcgcuuaa

SEQ ID NO: 2365840 - RNA, 19 nt, Homo sapiens
  misc_RNA (1)...(19): siRNA sense strand
agcuuaaacuccauaggaa

SEQ ID NO: 2365841 - RNA, 19 nt, Homo sapiens
  misc_RNA (1)...(19): siRNA sense strand
ggaaaauucaccuguggaa

SEQ ID NO: 2365842 - RNA, 19 nt, Homo sapiens
  misc_RNA (1)...(19): siRNA sense strand
aucaaacacuggaggauga

SEQ ID NO: 2365843 - RNA, 19 nt, Homo sapiens
  misc_RNA (1)...(19): siRNA sense strand
ggcagauagaggaagagaa

SEQ ID NO: 2365844 - RNA, 19 nt, Homo sapiens
  misc_RNA (1)...(19): siRNA sense strand
uggugucaguaaagaggaa

SEQ ID NO: 2365845 - RNA, 19 nt, Homo sapiens
  misc_RNA (1)...(19): siRNA sense strand
acagcagacagaagagcua

SEQ ID NO: 2365846 - RNA, 19 nt, Homo sapiens
  misc_RNA (1)...(19): siRNA sense strand
acgaaacgguugagaagcu

SEQ ID NO: 2365847 - RNA, 19 nt, Homo sapiens
  misc_RNA (1)...(19): siRNA sense strand
uccagaaacagguugauaa

SEQ ID NO: 2365848 - RNA, 19 nt, Homo sapiens
  misc_RNA (1)...(19): siRNA sense strand
ggaagagaaugaaggggca

SEQ ID NO: 2365849 - RNA, 19 nt, Homo sapiens
  misc_RNA (1)...(19): siRNA sense strand
cagucaaggagaauaugaa

SEQ ID NO: 2365850 - RNA, 19 nt, Homo sapiens
  misc_RNA (1)...(19): siRNA sense strand
gaauuugccugaugggacu

SEQ ID NO: 2365851 - RNA, 19 nt, Homo sapiens
  misc_RNA (1)...(19): siRNA sense strand
ucauggaggaggaggagga

SEQ ID NO: 2365852 - RNA, 19 nt, Homo sapiens
  misc_RNA (1)...(19): siRNA sense strand
aggaagaagcugucaugga

SEQ ID NO: 2365853 - RNA, 19 nt, Homo sapiens
  misc_RNA (1)...(19): siRNA sense strand
aagaaagacagcuugguga

SEQ ID NO: 2365854 - RNA, 19 nt, Homo sapiens
  misc_RNA (1)...(19): siRNA sense strand
gggcaggauuuaaagcacu

SEQ ID NO: 2365855 - RNA, 19 nt, Homo sapiens
  misc_RNA (1)...(19): siRNA sense strand
ccacagaaaagaaggaugu

SEQ ID NO: 2365856 - RNA, 19 nt, Homo sapiens
  misc_RNA (1)...(19): siRNA sense strand
gugcaguaucauaguagau

SEQ ID NO: 2365857 - RNA, 19 nt, Homo sapiens
  misc_RNA (1)...(19): siRNA sense strand
auucuauggugucaguaaa

SEQ ID NO: 2365858 - RNA, 19 nt, Homo sapiens
  misc_RNA (1)...(19): siRNA sense strand
augaggaggaugaggagga

SEQ ID NO: 2365859 - RNA, 19 nt, Homo sapiens
  misc_RNA (1)...(19): siRNA sense strand
cuuguaaacagcagacaga

SEQ ID NO: 2365860 - RNA, 19 nt, Homo sapiens
  misc_RNA (1)...(19): siRNA sense strand
ggugagagucuugggauca

SEQ ID NO: 2365861 - RNA, 19 nt, Homo sapiens
  misc_RNA (1)...(19): siRNA sense strand
gaaaugaucgugugcggaa

SEQ ID NO: 2365862 - RNA, 19 nt, Homo sapiens
  misc_RNA (1)...(19): siRNA sense strand
aaagugagguggagggagu

SEQ ID NO: 2365863 - RNA, 19 nt, Homo sapiens
  misc_RNA (1)...(19): siRNA sense strand
cccagaauguggagcggau

SEQ ID NO: 2365864 - RNA, 19 nt, Homo sapiens
  misc_RNA (1)...(19): siRNA sense strand
agguggagggaguuaagaa

SEQ ID NO: 2365865 - RNA, 19 nt, Homo sapiens
  misc_RNA (1)...(19): siRNA sense strand
ccagugaagguggaggaaa

SEQ ID NO: 2365866 - RNA, 19 nt, Homo sapiens
  misc_RNA (1)...(19): siRNA sense strand
gaauauuaugacccagaau

SEQ ID NO: 2365867 - RNA, 19 nt, Homo sapiens
  misc_RNA (1)...(19): siRNA sense strand
ggaaagccauggaaggcau

SEQ ID NO: 2365868 - RNA, 19 nt, Homo sapiens
  misc_RNA (1)...(19): siRNA sense strand
gugaggaaggugaagguga

SEQ ID NO: 2365869 - RNA, 19 nt, Homo sapiens
  misc_RNA (1)...(19): siRNA sense strand
ggugagagauggugaggug

SEQ ID NO: 2365870 - RNA, 19 nt, Homo sapiens
  misc_RNA (1)...(19): siRNA sense strand
gugaguuguugaaggcaga

SEQ ID NO: 2365871 - RNA, 19 nt, Homo sapiens
  misc_RNA (1)...(19): siRNA sense strand
cgacgugcgcuauggguca

SEQ ID NO: 2365872 - RNA, 19 nt, Homo sapiens
  misc_RNA (1)...(19): siRNA sense strand
guguaaccucuguggauga

SEQ ID NO: 2365873 - RNA, 19 nt, Homo sapiens
  misc_RNA (1)...(19): siRNA sense strand
gcaucugcuacgugggcaa

SEQ ID NO: 2365874 - RNA, 19 nt, Homo sapiens
  misc_RNA (1)...(19): siRNA sense strand
uggagcagcacgugcgcua

SEQ ID NO: 2365875 - RNA, 19 nt, Homo sapiens
  misc_RNA (1)...(19): siRNA sense strand
aagacaggccagaucgcua

SEQ ID NO: 2365876 - RNA, 19 nt, Homo sapiens
  misc_RNA (1)...(19): siRNA sense strand
agagaagaaauuugggauu

SEQ ID NO: 2365877 - RNA, 19 nt, Homo sapiens
  misc_RNA (1)...(19): siRNA sense strand
acuugaugcuuaaggacua

SEQ ID NO: 2365878 - RNA, 19 nt, Homo sapiens
  misc_RNA (1)...(19): siRNA sense strand
gcaagaacccgcaugggaa

SEQ ID NO: 2365879 - RNA, 19 nt, Homo sapiens
  misc_RNA (1)...(19): siRNA sense strand
acuugaauguugaagagaa

SEQ ID NO: 2365880 - RNA, 19 nt, Homo sapiens
  misc_RNA (1)...(19): siRNA sense strand
ccgcaugggaauuggagau

SEQ ID NO: 2365881 - RNA, 19 nt, Homo sapiens
  misc_RNA (1)...(19): siRNA sense strand
ccauuuaccuucugggcca

SEQ ID NO: 2365882 - RNA, 19 nt, Homo sapiens
  misc_RNA (1)...(19): siRNA sense strand
ggacaauaauucggggcaa

SEQ ID NO: 2365883 - RNA, 19 nt, Homo sapiens
  misc_RNA (1)...(19): siRNA sense strand
gggaacgaccaaagacaca

SEQ ID NO: 2365884 - RNA, 19 nt, Homo sapiens
  misc_RNA (1)...(19): siRNA sense strand
cuugaauguugaagagaac

SEQ ID NO: 2365885 - RNA, 19 nt, Homo sapiens
  misc_RNA (1)...(19): siRNA sense strand
acccagacccagaauguaa

SEQ ID NO: 2365886 - RNA, 19 nt, Homo sapiens
  misc_RNA (1)...(19): siRNA sense strand
aggaaagagcaaauaaguu

SEQ ID NO: 2365887 - RNA, 19 nt, Homo sapiens
  misc_RNA (1)...(19): siRNA sense strand
ccaucaagcgcucagaaau

SEQ ID NO: 2365888 - RNA, 19 nt, Homo sapiens
  misc_RNA (1)...(19): siRNA sense strand
gggaauuggagaugaggcu

SEQ ID NO: 2365889 - RNA, 19 nt, Homo sapiens
  misc_RNA (1)...(19): siRNA sense strand
agcagaaauaccuggacua

SEQ ID NO: 2365890 - RNA, 19 nt, Homo sapiens
  misc_RNA (1)...(19): siRNA sense strand
ggaugaggaaggagauuuu

SEQ ID NO: 2365891 - RNA, 19 nt, Homo sapiens
  misc_RNA (1)...(19): siRNA sense strand
agaauguaaaucaggccaa

SEQ ID NO: 2365892 - RNA, 19 nt, Homo sapiens
  misc_RNA (1)...(19): siRNA sense strand
aggcugacauagagaccga

SEQ ID NO: 2365893 - RNA, 19 nt, Homo sapiens
  misc_RNA (1)...(19): siRNA sense strand
augccaaggaugugcccaa

SEQ ID NO: 2365894 - RNA, 19 nt, Homo sapiens
  misc_RNA (1)...(19): siRNA sense strand
acugauguuuauccagaaa

SEQ ID NO: 2365895 - RNA, 19 nt, Homo sapiens
  misc_RNA (1)...(19): siRNA sense strand
gcucauaaugccaaggaug

SEQ ID NO: 2365896 - RNA, 19 nt, Homo sapiens
  misc_RNA (1)...(19): siRNA sense strand
gcugauacccagacccaga

SEQ ID NO: 2365897 - RNA, 19 nt, Homo sapiens
  misc_RNA (1)...(19): siRNA sense strand
ugcuuaaggacuacacaaa

SEQ ID NO: 2365898 - RNA, 19 nt, Homo sapiens
  misc_RNA (1)...(19): siRNA sense strand
ccuuuaaaguccagaaugc

SEQ ID NO: 2365899 - RNA, 19 nt, Homo sapiens
  misc_RNA (1)...(19): siRNA sense strand
ucaccuaugaguuuguaaa

SEQ ID NO: 2365900 - RNA, 19 nt, Homo sapiens
  misc_RNA (1)...(19): siRNA sense strand
cugggaugacauugaguuu

SEQ ID NO: 2365901 - RNA, 19 nt, Homo sapiens
  misc_RNA (1)...(19): siRNA sense strand
gauucauugcagagguuca

SEQ ID NO: 2365902 - RNA, 19 nt, Homo sapiens
  misc_RNA (1)...(19): siRNA sense strand
gggcauaaucccagccaau

SEQ ID NO: 2365903 - RNA, 19 nt, Homo sapiens
  misc_RNA (1)...(19): siRNA sense strand
aguuggaguuuaugacaaa

SEQ ID NO: 2365904 - RNA, 19 nt, Homo sapiens
  misc_RNA (1)...(19): siRNA sense strand
gaacgaggcugaugggcau

SEQ ID NO: 2365905 - RNA, 19 nt, Homo sapiens
  misc_RNA (1)...(19): siRNA sense strand
cuggagaauuaaaucgaaa

SEQ ID NO: 2365906 - RNA, 19 nt, Homo sapiens
  misc_RNA (1)...(19): siRNA sense strand
ccggugugguagagggaga

SEQ ID NO: 2365907 - RNA, 19 nt, Homo sapiens
  misc_RNA (1)...(19): siRNA sense strand
ugacagaaacagagauagu

SEQ ID NO: 2365908 - RNA, 19 nt, Homo sapiens
  misc_RNA (1)...(19): siRNA sense strand
aagaugagauuguggcaga

SEQ ID NO: 2365909 - RNA, 19 nt, Homo sapiens
  misc_RNA (1)...(19): siRNA sense strand
cagaaaugacagaaacaga

SEQ ID NO: 2365910 - RNA, 19 nt, Homo sapiens
  misc_RNA (1)...(19): siRNA sense strand
cggauuuguucuacagaga

SEQ ID NO: 2365911 - RNA, 19 nt, Homo sapiens
  misc_RNA (1)...(19): siRNA sense strand
aaugacagaaacagagaua

SEQ ID NO: 2365912 - RNA, 19 nt, Homo sapiens
  misc_RNA (1)...(19): siRNA sense strand
gugaaagccacgugguaca

SEQ ID NO: 2365913 - RNA, 19 nt, Homo sapiens
  misc_RNA (1)...(19): siRNA sense strand
caguuggaguuuaugacaa

SEQ ID NO: 2365914 - RNA, 19 nt, Homo sapiens
  misc_RNA (1)...(19): siRNA sense strand
aguuaagguggaugaauau

SEQ ID NO: 2365915 - RNA, 19 nt, Homo sapiens
  misc_RNA (1)...(19): siRNA sense strand
aggucaucuuuaaggacaa

SEQ ID NO: 2365916 - RNA, 19 nt, Homo sapiens
  misc_RNA (1)...(19): siRNA sense strand
guggcagaaaugacagaaa

SEQ ID NO: 2365917 - RNA, 19 nt, Homo sapiens
  misc_RNA (1)...(19): siRNA sense strand
gcuuaugaugucuacaaua

SEQ ID NO: 2365918 - RNA, 19 nt, Homo sapiens
  misc_RNA (1)...(19): siRNA sense strand
ggcagaaaugacagaaaca

SEQ ID NO: 2365919 - RNA, 19 nt, Homo sapiens
  misc_RNA (1)...(19): siRNA sense strand
acuuugauggugauggaaa

SEQ ID NO: 2365920 - RNA, 19 nt, Homo sapiens
  misc_RNA (1)...(19): siRNA sense strand
gguccaaugggaagguuga

SEQ ID NO: 2365921 - RNA, 19 nt, Homo sapiens
  misc_RNA (1)...(19): siRNA sense strand
cguauugaacccugagcuu

SEQ ID NO: 2365922 - RNA, 19 nt, Homo sapiens
  misc_RNA (1)...(19): siRNA sense strand
acagaaacagagauaguca

SEQ ID NO: 2365923 - RNA, 19 nt, Homo sapiens
  misc_RNA (1)...(19): siRNA sense strand
ggagauuaccggauggaug

SEQ ID NO: 2365924 - RNA, 19 nt, Homo sapiens
  misc_RNA (1)...(19): siRNA sense strand
aggaaaaugccaaggcuga

SEQ ID NO: 2365925 - RNA, 19 nt, Homo sapiens
  misc_RNA (1)...(19): siRNA sense strand
aggugaaagccacguggua

SEQ ID NO: 2365926 - RNA, 19 nt, Homo sapiens
  misc_RNA (1)...(19): siRNA sense strand
gaucacugcuugucgggau

SEQ ID NO: 2365927 - RNA, 19 nt, Homo sapiens
  misc_RNA (1)...(19): siRNA sense strand
ugcaauugccgguguggua

SEQ ID NO: 2365928 - RNA, 19 nt, Homo sapiens
  misc_RNA (1)...(19): siRNA sense strand
cugucuauuuugaggaauu

SEQ ID NO: 2365929 - RNA, 19 nt, Homo sapiens
  misc_RNA (1)...(19): siRNA sense strand
ggauauaaaauucgcugua

SEQ ID NO: 2365930 - RNA, 19 nt, Homo sapiens
  misc_RNA (1)...(19): siRNA sense strand
uggcaauugugcucugcaa

SEQ ID NO: 2365931 - RNA, 19 nt, Homo sapiens
  misc_RNA (1)...(19): siRNA sense strand
ccugaaacugcgccacaaa

SEQ ID NO: 2365932 - RNA, 19 nt, Homo sapiens
  misc_RNA (1)...(19): siRNA sense strand
gugauaucauccagucaau

SEQ ID NO: 2365933 - RNA, 19 nt, Homo sapiens
  misc_RNA (1)...(19): siRNA sense strand
cauucuaauuugauccgaa

SEQ ID NO: 2365934 - RNA, 19 nt, Homo sapiens
  misc_RNA (1)...(19): siRNA sense strand
cugucugacugcaggcgua

SEQ ID NO: 2365935 - RNA, 19 nt, Homo sapiens
  misc_RNA (1)...(19): siRNA sense strand
gaucugcacuugaaggcau

SEQ ID NO: 2365936 - RNA, 19 nt, Homo sapiens
  misc_RNA (1)...(19): siRNA sense strand
caguaaaucaagcaauuca

SEQ ID NO: 2365937 - RNA, 19 nt, Homo sapiens
  misc_RNA (1)...(19): siRNA sense strand
uggcagucgauuugguuau

SEQ ID NO: 2365938 - RNA, 19 nt, Homo sapiens
  misc_RNA (1)...(19): siRNA sense strand
ugauggaaagaaagagcuu

SEQ ID NO: 2365939 - RNA, 19 nt, Homo sapiens
  misc_RNA (1)...(19): siRNA sense strand
caaacugcucauacagaau

SEQ ID NO: 2365940 - RNA, 19 nt, Homo sapiens
  misc_RNA (1)...(19): siRNA sense strand
gcucgucugaugagggaca

SEQ ID NO: 2365941 - RNA, 19 nt, Homo sapiens
  misc_RNA (1)...(19): siRNA sense strand
cagccaaaugccuggaaau

SEQ ID NO: 2365942 - RNA, 19 nt, Homo sapiens
  misc_RNA (1)...(19): siRNA sense strand
ggaaacaccuggucaccga

SEQ ID NO: 2365943 - RNA, 19 nt, Homo sapiens
  misc_RNA (1)...(19): siRNA sense strand
gcuucgacgccgugcucua

SEQ ID NO: 2365944 - RNA, 19 nt, Homo sapiens
  misc_RNA (1)...(19): siRNA sense strand
cugcaaaucuugggccaga

SEQ ID NO: 2365945 - RNA, 19 nt, Homo sapiens
  misc_RNA (1)...(19): siRNA sense strand
agggcagcuuggaggauua

SEQ ID NO: 2365946 - RNA, 19 nt, Homo sapiens
  misc_RNA (1)...(19): siRNA sense strand
guaucauaacugugaagaa

SEQ ID NO: 2365947 - RNA, 19 nt, Homo sapiens
  misc_RNA (1)...(19): siRNA sense strand
gggagaaggugcuggcauc

SEQ ID NO: 2365948 - RNA, 19 nt, Homo sapiens
  misc_RNA (1)...(19): siRNA sense strand
ccaaagaauacuacgaagu

SEQ ID NO: 2365949 - RNA, 19 nt, Homo sapiens
  misc_RNA (1)...(19): siRNA sense strand
gguagaaugagcaaugcaa

SEQ ID NO: 2365950 - RNA, 19 nt, Homo sapiens
  misc_RNA (1)...(19): siRNA sense strand
ggauguggcgauuggaaca

SEQ ID NO: 2365951 - RNA, 19 nt, Homo sapiens
  misc_RNA (1)...(19): siRNA sense strand
ccauaagggacaaccaaga

SEQ ID NO: 2365952 - RNA, 19 nt, Homo sapiens
  misc_RNA (1)...(19): siRNA sense strand
aggaaaacauccacgagaa

SEQ ID NO: 2365953 - RNA, 19 nt, Homo sapiens
  misc_RNA (1)...(19): siRNA sense strand
accaagaggagcuggguuu

SEQ ID NO: 2365954 - RNA, 19 nt, Homo sapiens
  misc_RNA (1)...(19): siRNA sense strand
cagaugaguguguuggaau

SEQ ID NO: 2365955 - RNA, 19 nt, Homo sapiens
  misc_RNA (1)...(19): siRNA sense strand
aagcagugacccuggaaga

SEQ ID NO: 2365956 - RNA, 19 nt, Homo sapiens
  misc_RNA (1)...(19): siRNA sense strand
ucaucgacgacgaggaaaa

SEQ ID NO: 2365957 - RNA, 19 nt, Homo sapiens
  misc_RNA (1)...(19): siRNA sense strand
cagacaagccacagucaca

SEQ ID NO: 2365958 - RNA, 19 nt, Homo sapiens
  misc_RNA (1)...(19): siRNA sense strand
guguggaagacguggacga

SEQ ID NO: 2365959 - RNA, 19 nt, Homo sapiens
  misc_RNA (1)...(19): siRNA sense strand
cauuacaacaggugcccua

SEQ ID NO: 2365960 - RNA, 19 nt, Homo sapiens
  misc_RNA (1)...(19): siRNA sense strand
ugucacaaucaaagucuua

SEQ ID NO: 2365961 - RNA, 19 nt, Homo sapiens
  misc_RNA (1)...(19): siRNA sense strand
agauaacacagcacggauu

SEQ ID NO: 2365962 - RNA, 19 nt, Homo sapiens
  misc_RNA (1)...(19): siRNA sense strand
caucaaaauucaagacauc

SEQ ID NO: 2365963 - RNA, 19 nt, Homo sapiens
  misc_RNA (1)...(19): siRNA sense strand
cagcaggagcagagugucu

SEQ ID NO: 2365964 - RNA, 19 nt, Homo sapiens
  misc_RNA (1)...(19): siRNA sense strand
auacuauuguggauggaga

SEQ ID NO: 2365965 - RNA, 19 nt, Homo sapiens
  misc_RNA (1)...(19): siRNA sense strand
gugcagaugccuuugacau

SEQ ID NO: 2365966 - RNA, 19 nt, Homo sapiens
  misc_RNA (1)...(19): siRNA sense strand
uugcuauggaaaugaacaa

SEQ ID NO: 2365967 - RNA, 19 nt, Homo sapiens
  misc_RNA (1)...(19): siRNA sense strand
ucaaugacaaugagcccaa

SEQ ID NO: 2365968 - RNA, 19 nt, Homo sapiens
  misc_RNA (1)...(19): siRNA sense strand
acacaacaacagugcacau

SEQ ID NO: 2365969 - RNA, 19 nt, Homo sapiens
  misc_RNA (1)...(19): siRNA sense strand
cccuagaccgggaagaauu

SEQ ID NO: 2365970 - RNA, 19 nt, Homo sapiens
  misc_RNA (1)...(19): siRNA sense strand
gcauaauaucacuguccuu

SEQ ID NO: 2365971 - RNA, 19 nt, Homo sapiens
  misc_RNA (1)...(19): siRNA sense strand
aggaaagagcccaguauac

SEQ ID NO: 2365972 - RNA, 19 nt, Homo sapiens
  misc_RNA (1)...(19): siRNA sense strand
aagaauacuacgaagugau

SEQ ID NO: 2365973 - RNA, 19 nt, Homo sapiens
  misc_RNA (1)...(19): siRNA sense strand
ccaagaugacccacgcaau

SEQ ID NO: 2365974 - RNA, 19 nt, Homo sapiens
  misc_RNA (1)...(19): siRNA sense strand
ugauagaagcagugacccu

SEQ ID NO: 2365975 - RNA, 19 nt, Homo sapiens
  misc_RNA (1)...(19): siRNA sense strand
gcacaggcacacugaccau

SEQ ID NO: 2365976 - RNA, 19 nt, Homo sapiens
  misc_RNA (1)...(19): siRNA sense strand
ccagggugguguacagcau

SEQ ID NO: 2365977 - RNA, 19 nt, Homo sapiens
  misc_RNA (1)...(19): siRNA sense strand
ucaaagagcuggguggcua

SEQ ID NO: 2365978 - RNA, 19 nt, Homo sapiens
  misc_RNA (1)...(19): siRNA sense strand
gagaagaacgucaaccaga

SEQ ID NO: 2365979 - RNA, 19 nt, Homo sapiens
  misc_RNA (1)...(19): siRNA sense strand
gagcaugcccagaagcuga

SEQ ID NO: 2365980 - RNA, 19 nt, Homo sapiens
  misc_RNA (1)...(19): siRNA sense strand
gccagaaguacgacaccaa

SEQ ID NO: 2365981 - RNA, 19 nt, Homo sapiens
  misc_RNA (1)...(19): siRNA sense strand
ucaggaagccagagugcca

SEQ ID NO: 2365982 - RNA, 19 nt, Homo sapiens
  misc_RNA (1)...(19): siRNA sense strand
acgacguggcccuggagaa

SEQ ID NO: 2365983 - RNA, 19 nt, Homo sapiens
  misc_RNA (1)...(19): siRNA sense strand
acgagcaagucaagaccau

SEQ ID NO: 2365984 - RNA, 19 nt, Homo sapiens
  misc_RNA (1)...(19): siRNA sense strand
ucuacaaguccaagaggaa

SEQ ID NO: 2365985 - RNA, 19 nt, Homo sapiens
  misc_RNA (1)...(19): siRNA sense strand
cgaagcgggacgaggagaa

SEQ ID NO: 2365986 - RNA, 19 nt, Homo sapiens
  misc_RNA (1)...(19): siRNA sense strand
gcgucugcgugaagaucaa

SEQ ID NO: 2365987 - RNA, 19 nt, Homo sapiens
  misc_RNA (1)...(19): siRNA sense strand
uggcagcaggccugagcaa

SEQ ID NO: 2365988 - RNA, 19 nt, Homo sapiens
  misc_RNA (1)...(19): siRNA sense strand
ggauaaggcuauugcccaa

SEQ ID NO: 2365989 - RNA, 19 nt, Homo sapiens
  misc_RNA (1)...(19): siRNA sense strand
gagaaaagagaaugggaau

SEQ ID NO: 2365990 - RNA, 19 nt, Homo sapiens
  misc_RNA (1)...(19): siRNA sense strand
gcaaagacccugcaggaga

SEQ ID NO: 2365991 - RNA, 19 nt, Homo sapiens
  misc_RNA (1)...(19): siRNA sense strand
ccaaauuuacagaugacaa

SEQ ID NO: 2365992 - RNA, 19 nt, Homo sapiens
  misc_RNA (1)...(19): siRNA sense strand
ugacauaggguuuuggaaa

SEQ ID NO: 2365993 - RNA, 19 nt, Homo sapiens
  misc_RNA (1)...(19): siRNA sense strand
ucgccugauucaagacaaa

SEQ ID NO: 2365994 - RNA, 19 nt, Homo sapiens
  misc_RNA (1)...(19): siRNA sense strand
uggaaaaggaccugaguga

SEQ ID NO: 2365995 - RNA, 19 nt, Homo sapiens
  misc_RNA (1)...(19): siRNA sense strand
acgaugaaguugaagcaca

SEQ ID NO: 2365996 - RNA, 19 nt, Homo sapiens
  misc_RNA (1)...(19): siRNA sense strand
cgagaaaagagaaugggaa

SEQ ID NO: 2365997 - RNA, 19 nt, Homo sapiens
  misc_RNA (1)...(19): siRNA sense strand
ccaacuaucaagaguccaa

SEQ ID NO: 2365998 - RNA, 19 nt, Homo sapiens
  misc_RNA (1)...(19): siRNA sense strand
aaaugauuggagagacaaa

SEQ ID NO: 2365999 - RNA, 19 nt, Homo sapiens
  misc_RNA (1)...(19): siRNA sense strand
uggaugaaaugauuggaga

SEQ ID NO: 2366000 - RNA, 19 nt, Homo sapiens
  misc_RNA (1)...(19): siRNA sense strand
cuacauuuggauaaggcua

SEQ ID NO: 2366001 - RNA, 19 nt, Homo sapiens
  misc_RNA (1)...(19): siRNA sense strand
acugaaaugaccauagaau

SEQ ID NO: 2366002 - RNA, 19 nt, Homo sapiens
  misc_RNA (1)...(19): siRNA sense strand
ucacagaggguguccgaga

SEQ ID NO: 2366003 - RNA, 19 nt, Homo sapiens
  misc_RNA (1)...(19): siRNA sense strand
gagcgggcuuugauggaga

SEQ ID NO: 2366004 - RNA, 19 nt, Homo sapiens
  misc_RNA (1)...(19): siRNA sense strand
uagcaaagacccugcagga

SEQ ID NO: 2366005 - RNA, 19 nt, Homo sapiens
  misc_RNA (1)...(19): siRNA sense strand
ugagcaugcgcaagagcua

SEQ ID NO: 2366006 - RNA, 19 nt, Homo sapiens
  misc_RNA (1)...(19): siRNA sense strand
caagaaagaaugaagcuac

SEQ ID NO: 2366007 - RNA, 19 nt, Homo sapiens
  misc_RNA (1)...(19): siRNA sense strand
gccaaugagauguggaauc

SEQ ID NO: 2366008 - RNA, 19 nt, Homo sapiens
  misc_RNA (1)...(19): siRNA sense strand
auucagacgcacuuagcaa

SEQ ID NO: 2366009 - RNA, 19 nt, Homo sapiens
  misc_RNA (1)...(19): siRNA sense strand
ccaucaagaaggccaucaa

SEQ ID NO: 2366010 - RNA, 19 nt, Homo sapiens
  misc_RNA (1)...(19): siRNA sense strand
gacauaauucggagaaacu

SEQ ID NO: 2366011 - RNA, 19 nt, Homo sapiens
  misc_RNA (1)...(19): siRNA sense strand
gccugauucaagacaaaua

SEQ ID NO: 2366012 - RNA, 19 nt, Homo sapiens
  misc_RNA (1)...(19): siRNA sense strand
cugccaaugagauguggaa

SEQ ID NO: 2366013 - RNA, 19 nt, Homo sapiens
  misc_RNA (1)...(19): siRNA sense strand
acgagguacacgagguuga

SEQ ID NO: 2366014 - RNA, 19 nt, Homo sapiens
  misc_RNA (1)...(19): siRNA sense strand
acgccuuguuaacgaggua

SEQ ID NO: 2366015 - RNA, 19 nt, Homo sapiens
  misc_RNA (1)...(19): siRNA sense strand
uggcauuggcuauggguau

SEQ ID NO: 2366016 - RNA, 19 nt, Homo sapiens
  misc_RNA (1)...(19): siRNA sense strand
ggucagaguuugaggucuc

SEQ ID NO: 2366017 - RNA, 19 nt, Homo sapiens
  misc_RNA (1)...(19): siRNA sense strand
gagacagguuccaggcaga

SEQ ID NO: 2366018 - RNA, 19 nt, Homo sapiens
  misc_RNA (1)...(19): siRNA sense strand
gggauguggcauuggcuau

SEQ ID NO: 2366019 - RNA, 19 nt, Homo sapiens
  misc_RNA (1)...(19): siRNA sense strand
ccuccagugcagcgaguua

SEQ ID NO: 2366020 - RNA, 19 nt, Homo sapiens
  misc_RNA (1)...(19): siRNA sense strand
gggaagcccuugaagcuga

SEQ ID NO: 2366021 - RNA, 19 nt, Homo sapiens
  misc_RNA (1)...(19): siRNA sense strand
ccacagugcuccagacccu

SEQ ID NO: 2366022 - RNA, 19 nt, Homo sapiens
  misc_RNA (1)...(19): siRNA sense strand
aggcacuacugaaagccaa

SEQ ID NO: 2366023 - RNA, 19 nt, Homo sapiens
  misc_RNA (1)...(19): siRNA sense strand
cagucugggauguggcauu

SEQ ID NO: 2366024 - RNA, 19 nt, Homo sapiens
  misc_RNA (1)...(19): siRNA sense strand
uggagaagcccgugaagcu

SEQ ID NO: 2366025 - RNA, 19 nt, Homo sapiens
  misc_RNA (1)...(19): siRNA sense strand
cagcaagcacagagggccu

SEQ ID NO: 2366026 - RNA, 19 nt, Homo sapiens
  misc_RNA (1)...(19): siRNA sense strand
cugaacaaggagaaugaca

SEQ ID NO: 2366027 - RNA, 19 nt, Homo sapiens
  misc_RNA (1)...(19): siRNA sense strand
ggcuaaagggauugggaau

SEQ ID NO: 2366028 - RNA, 19 nt, Homo sapiens
  misc_RNA (1)...(19): siRNA sense strand
gcauagaaauggugcagga

SEQ ID NO: 2366029 - RNA, 19 nt, Homo sapiens
  misc_RNA (1)...(19): siRNA sense strand
agaucaguauauugagcaa

SEQ ID NO: 2366030 - RNA, 19 nt, Homo sapiens
  misc_RNA (1)...(19): siRNA sense strand
gugcaaacaaucaggaagu

SEQ ID NO: 2366031 - RNA, 19 nt, Homo sapiens
  misc_RNA (1)...(19): siRNA sense strand
uggagacguccgaggcaaa

SEQ ID NO: 2366032 - RNA, 19 nt, Homo sapiens
  misc_RNA (1)...(19): siRNA sense strand
ccucaaugugcaucacuaa

SEQ ID NO: 2366033 - RNA, 19 nt, Homo sapiens
  misc_RNA (1)...(19): siRNA sense strand
cugcugugcuugaggugau

SEQ ID NO: 2366034 - RNA, 19 nt, Homo sapiens
  misc_RNA (1)...(19): siRNA sense strand
aggugaaugcaguggcaca

SEQ ID NO: 2366035 - RNA, 19 nt, Homo sapiens
  misc_RNA (1)...(19): siRNA sense strand
ggaccuacaagauggaacu

SEQ ID NO: 2366036 - RNA, 19 nt, Homo sapiens
  misc_RNA (1)...(19): siRNA sense strand
uggcuaaagggauugggaa

SEQ ID NO: 2366037 - RNA, 19 nt, Homo sapiens
  misc_RNA (1)...(19): siRNA sense strand
ggugaaugcaguggcacaa

SEQ ID NO: 2366038 - RNA, 19 nt, Homo sapiens
  misc_RNA (1)...(19): siRNA sense strand
acucaaacaacauagacau

SEQ ID NO: 2366039 - RNA, 19 nt, Homo sapiens
  misc_RNA (1)...(19): siRNA sense strand
gaugaagugcagacaggau

SEQ ID NO: 2366040 - RNA, 19 nt, Homo sapiens
  misc_RNA (1)...(19): siRNA sense strand
caguagaaguauuucguuc

SEQ ID NO: 2366041 - RNA, 19 nt, Homo sapiens
  misc_RNA (1)...(19): siRNA sense strand
acacacuuggcuugacaaa

SEQ ID NO: 2366042 - RNA, 19 nt, Homo sapiens
  misc_RNA (1)...(19): siRNA sense strand
ugaaauuguuggagacguc

SEQ ID NO: 2366043 - RNA, 19 nt, Homo sapiens
  misc_RNA (1)...(19): siRNA sense strand
augaauaugcagagaagcu

SEQ ID NO: 2366044 - RNA, 19 nt, Homo sapiens
  misc_RNA (1)...(19): siRNA sense strand
uugcagaagccgaggagaa

SEQ ID NO: 2366045 - RNA, 19 nt, Homo sapiens
  misc_RNA (1)...(19): siRNA sense strand
aggcagugauggagggcau

SEQ ID NO: 2366046 - RNA, 19 nt, Homo sapiens
  misc_RNA (1)...(19): siRNA sense strand
aggacaaagcucagaaaca

SEQ ID NO: 2366047 - RNA, 19 nt, Homo sapiens
  misc_RNA (1)...(19): siRNA sense strand
cgggcuggacaaagagaaa

SEQ ID NO: 2366048 - RNA, 19 nt, Homo sapiens
  misc_RNA (1)...(19): siRNA sense strand
cucagaaacaagaggacaa

SEQ ID NO: 2366049 - RNA, 19 nt, Homo sapiens
  misc_RNA (1)...(19): siRNA sense strand
aagcugaacaagagggaca

SEQ ID NO: 2366050 - RNA, 19 nt, Homo sapiens
  misc_RNA (1)...(19): siRNA sense strand
gcaaggaacaccagaggga

SEQ ID NO: 2366051 - RNA, 19 nt, Homo sapiens
  misc_RNA (1)...(19): siRNA sense strand
acgaucaggacgaaggaaa

SEQ ID NO: 2366052 - RNA, 19 nt, Homo sapiens
  misc_RNA (1)...(19): siRNA sense strand
gagaagaagauguuggacu

SEQ ID NO: 2366053 - RNA, 19 nt, Homo sapiens
  misc_RNA (1)...(19): siRNA sense strand
aggcagagcuggagaccgu

SEQ ID NO: 2366054 - RNA, 19 nt, Homo sapiens
  misc_RNA (1)...(19): siRNA sense strand
ccaaccagcuggaggagga

SEQ ID NO: 2366055 - RNA, 19 nt, Homo sapiens
  misc_RNA (1)...(19): siRNA sense strand
agaaggaggcccugcgaga

SEQ ID NO: 2366056 - RNA, 19 nt, Homo sapiens
  misc_RNA (1)...(19): siRNA sense strand
gggacuuuguggugggcga

SEQ ID NO: 2366057 - RNA, 19 nt, Homo sapiens
  misc_RNA (1)...(19): siRNA sense strand
aaggaacaccagagggaga

SEQ ID NO: 2366058 - RNA, 19 nt, Homo sapiens
  misc_RNA (1)...(19): siRNA sense strand
agacuggcguggugcggua

SEQ ID NO: 2366059 - RNA, 19 nt, Homo sapiens
  misc_RNA (1)...(19): siRNA sense strand
aggagaagcagcagcacau

SEQ ID NO: 2366060 - RNA, 19 nt, Homo sapiens
  misc_RNA (1)...(19): siRNA sense strand
gucgagaguuugcgggaga

SEQ ID NO: 2366061 - RNA, 19 nt, Homo sapiens
  misc_RNA (1)...(19): siRNA sense strand
aggcucagcagguggagaa

SEQ ID NO: 2366062 - RNA, 19 nt, Homo sapiens
  misc_RNA (1)...(19): siRNA sense strand
gaggagacgaucaggacga

SEQ ID NO: 2366063 - RNA, 19 nt, Homo sapiens
  misc_RNA (1)...(19): siRNA sense strand
cugacaaggcccagaccau

SEQ ID NO: 2366064 - RNA, 19 nt, Homo sapiens
  misc_RNA (1)...(19): siRNA sense strand
uggguaacuugcaggccaa

SEQ ID NO: 2366065 - RNA, 19 nt, Homo sapiens
  misc_RNA (1)...(19): siRNA sense strand
gccaagaagaccaagcgua

SEQ ID NO: 2366066 - RNA, 19 nt, Homo sapiens
  misc_RNA (1)...(19): siRNA sense strand
gagcagaaacucaaggaug

SEQ ID NO: 2366067 - RNA, 19 nt, Homo sapiens
  misc_RNA (1)...(19): siRNA sense strand
gcauccaccagcaggacaa

SEQ ID NO: 2366068 - RNA, 19 nt, Homo sapiens
  misc_RNA (1)...(19): siRNA sense strand
ccggacaucuacuggguca

SEQ ID NO: 2366069 - RNA, 19 nt, Homo sapiens
  misc_RNA (1)...(19): siRNA sense strand
gcgagguggagaaggagau

SEQ ID NO: 2366070 - RNA, 19 nt, Homo sapiens
  misc_RNA (1)...(19): siRNA sense strand
acaaagaggugacagccuu

SEQ ID NO: 2366071 - RNA, 19 nt, Homo sapiens
  misc_RNA (1)...(19): siRNA sense strand
gaggugaaaucgaggagcu

SEQ ID NO: 2366072 - RNA, 19 nt, Homo sapiens
  misc_RNA (1)...(19): siRNA sense strand
agaaacaagaggacaagca

SEQ ID NO: 2366073 - RNA, 19 nt, Homo sapiens
  misc_RNA (1)...(19): siRNA sense strand
ccgccaugcacgugaagga

SEQ ID NO: 2366074 - RNA, 19 nt, Homo sapiens
  misc_RNA (1)...(19): siRNA sense strand
cgcuggagagcaaguguaa

SEQ ID NO: 2366075 - RNA, 19 nt, Homo sapiens
  misc_RNA (1)...(19): siRNA sense strand
gugcaguaucugggagaga

SEQ ID NO: 2366076 - RNA, 19 nt, Homo sapiens
  misc_RNA (1)...(19): siRNA sense strand
aggaaacuguggagggccu

SEQ ID NO: 2366077 - RNA, 19 nt, Homo sapiens
  misc_RNA (1)...(19): siRNA sense strand
gugaaaucgaggagcucca

SEQ ID NO: 2366078 - RNA, 19 nt, Homo sapiens
  misc_RNA (1)...(19): siRNA sense strand
augauugagucgaaugaca

SEQ ID NO: 2366079 - RNA, 19 nt, Homo sapiens
  misc_RNA (1)...(19): siRNA sense strand
cuggagagcaaguguaagu

SEQ ID NO: 2366080 - RNA, 19 nt, Homo sapiens
  misc_RNA (1)...(19): siRNA sense strand
caggaggcacugaaggaga

SEQ ID NO: 2366081 - RNA, 19 nt, Homo sapiens
  misc_RNA (1)...(19): siRNA sense strand
acaucugcgagguggagaa

SEQ ID NO: 2366082 - RNA, 19 nt, Homo sapiens
  misc_RNA (1)...(19): siRNA sense strand
agaccaagcguauggccau

SEQ ID NO: 2366083 - RNA, 19 nt, Homo sapiens
  misc_RNA (1)...(19): siRNA sense strand
ggcuaauggacaacuggaa

SEQ ID NO: 2366084 - RNA, 19 nt, Homo sapiens
  misc_RNA (1)...(19): siRNA sense strand
agaagaagguggacgcccu

SEQ ID NO: 2366085 - RNA, 19 nt, Homo sapiens
  misc_RNA (1)...(19): siRNA sense strand
agggcaaacaggaggucga

SEQ ID NO: 2366086 - RNA, 19 nt, Homo sapiens
  misc_RNA (1)...(19): siRNA sense strand
cgaucaggacgaaggaaac

SEQ ID NO: 2366087 - RNA, 19 nt, Homo sapiens
  misc_RNA (1)...(19): siRNA sense strand
uugcagaagccgaggagaa

SEQ ID NO: 2366088 - RNA, 19 nt, Homo sapiens
  misc_RNA (1)...(19): siRNA sense strand
aggcagugauggagggcau

SEQ ID NO: 2366089 - RNA, 19 nt, Homo sapiens
  misc_RNA (1)...(19): siRNA sense strand
aggacaaagcucagaaaca

SEQ ID NO: 2366090 - RNA, 19 nt, Homo sapiens
  misc_RNA (1)...(19): siRNA sense strand
cgggcuggacaaagagaaa

SEQ ID NO: 2366091 - RNA, 19 nt, Homo sapiens
  misc_RNA (1)...(19): siRNA sense strand
cucagaaacaagaggacaa

SEQ ID NO: 2366092 - RNA, 19 nt, Homo sapiens
  misc_RNA (1)...(19): siRNA sense strand
aagcugaacaagagggaca

SEQ ID NO: 2366093 - RNA, 19 nt, Homo sapiens
  misc_RNA (1)...(19): siRNA sense strand
gcaaggaacaccagaggga

SEQ ID NO: 2366094 - RNA, 19 nt, Homo sapiens
  misc_RNA (1)...(19): siRNA sense strand
acgaucaggacgaaggaaa

SEQ ID NO: 2366095 - RNA, 19 nt, Homo sapiens
  misc_RNA (1)...(19): siRNA sense strand
gagaagaagauguuggacu

SEQ ID NO: 2366096 - RNA, 19 nt, Homo sapiens
  misc_RNA (1)...(19): siRNA sense strand
aggcagagcuggagaccgu

SEQ ID NO: 2366097 - RNA, 19 nt, Homo sapiens
  misc_RNA (1)...(19): siRNA sense strand
ccaaccagcuggaggagga

SEQ ID NO: 2366098 - RNA, 19 nt, Homo sapiens
  misc_RNA (1)...(19): siRNA sense strand
agaaggaggcccugcgaga

SEQ ID NO: 2366099 - RNA, 19 nt, Homo sapiens
  misc_RNA (1)...(19): siRNA sense strand
gggacuuuguggugggcga

SEQ ID NO: 2366100 - RNA, 19 nt, Homo sapiens
  misc_RNA (1)...(19): siRNA sense strand
aaggaacaccagagggaga

SEQ ID NO: 2366101 - RNA, 19 nt, Homo sapiens
  misc_RNA (1)...(19): siRNA sense strand
agacuggcguggugcggua

SEQ ID NO: 2366102 - RNA, 19 nt, Homo sapiens
  misc_RNA (1)...(19): siRNA sense strand
aggagaagcagcagcacau

SEQ ID NO: 2366103 - RNA, 19 nt, Homo sapiens
  misc_RNA (1)...(19): siRNA sense strand
gucgagaguuugcgggaga

SEQ ID NO: 2366104 - RNA, 19 nt, Homo sapiens
  misc_RNA (1)...(19): siRNA sense strand
aggcucagcagguggagaa

SEQ ID NO: 2366105 - RNA, 19 nt, Homo sapiens
  misc_RNA (1)...(19): siRNA sense strand
gaggagacgaucaggacga

SEQ ID NO: 2366106 - RNA, 19 nt, Homo sapiens
  misc_RNA (1)...(19): siRNA sense strand
cugacaaggcccagaccau

SEQ ID NO: 2366107 - RNA, 19 nt, Homo sapiens
  misc_RNA (1)...(19): siRNA sense strand
uggguaacuugcaggccaa

SEQ ID NO: 2366108 - RNA, 19 nt, Homo sapiens
  misc_RNA (1)...(19): siRNA sense strand
gccaagaagaccaagcgua

SEQ ID NO: 2366109 - RNA, 19 nt, Homo sapiens
  misc_RNA (1)...(19): siRNA sense strand
gagcagaaacucaaggaug

SEQ ID NO: 2366110 - RNA, 19 nt, Homo sapiens
  misc_RNA (1)...(19): siRNA sense strand
gcauccaccagcaggacaa

SEQ ID NO: 2366111 - RNA, 19 nt, Homo sapiens
  misc_RNA (1)...(19): siRNA sense strand
ccggacaucuacuggguca

SEQ ID NO: 2366112 - RNA, 19 nt, Homo sapiens
  misc_RNA (1)...(19): siRNA sense strand
gcgagguggagaaggagau

SEQ ID NO: 2366113 - RNA, 19 nt, Homo sapiens
  misc_RNA (1)...(19): siRNA sense strand
acaaagaggugacagccuu

SEQ ID NO: 2366114 - RNA, 19 nt, Homo sapiens
  misc_RNA (1)...(19): siRNA sense strand
gaggugaaaucgaggagcu

SEQ ID NO: 2366115 - RNA, 19 nt, Homo sapiens
  misc_RNA (1)...(19): siRNA sense strand
agaaacaagaggacaagca

SEQ ID NO: 2366116 - RNA, 19 nt, Homo sapiens
  misc_RNA (1)...(19): siRNA sense strand
ccgccaugcacgugaagga

SEQ ID NO: 2366117 - RNA, 19 nt, Homo sapiens
  misc_RNA (1)...(19): siRNA sense strand
cgcuggagagcaaguguaa

SEQ ID NO: 2366118 - RNA, 19 nt, Homo sapiens
  misc_RNA (1)...(19): siRNA sense strand
gugcaguaucugggagaga

SEQ ID NO: 2366119 - RNA, 19 nt, Homo sapiens
  misc_RNA (1)...(19): siRNA sense strand
aggaaacuguggagggccu

SEQ ID NO: 2366120 - RNA, 19 nt, Homo sapiens
  misc_RNA (1)...(19): siRNA sense strand
gugaaaucgaggagcucca

SEQ ID NO: 2366121 - RNA, 19 nt, Homo sapiens
  misc_RNA (1)...(19): siRNA sense strand
augauugagucgaaugaca

SEQ ID NO: 2366122 - RNA, 19 nt, Homo sapiens
  misc_RNA (1)...(19): siRNA sense strand
cuggagagcaaguguaagu

SEQ ID NO: 2366123 - RNA, 19 nt, Homo sapiens
  misc_RNA (1)...(19): siRNA sense strand
caggaggcacugaaggaga

SEQ ID NO: 2366124 - RNA, 19 nt, Homo sapiens
  misc_RNA (1)...(19): siRNA sense strand
acaucugcgagguggagaa

SEQ ID NO: 2366125 - RNA, 19 nt, Homo sapiens
  misc_RNA (1)...(19): siRNA sense strand
agaccaagcguauggccau

SEQ ID NO: 2366126 - RNA, 19 nt, Homo sapiens
  misc_RNA (1)...(19): siRNA sense strand
ggcuaauggacaacuggaa

SEQ ID NO: 2366127 - RNA, 19 nt, Homo sapiens
  misc_RNA (1)...(19): siRNA sense strand
agaagaagguggacgcccu

SEQ ID NO: 2366128 - RNA, 19 nt, Homo sapiens
  misc_RNA (1)...(19): siRNA sense strand
agggcaaacaggaggucga

SEQ ID NO: 2366129 - RNA, 19 nt, Homo sapiens
  misc_RNA (1)...(19): siRNA sense strand
cgaucaggacgaaggaaac

SEQ ID NO: 2366130 - RNA, 19 nt, Homo sapiens
  misc_RNA (1)...(19): siRNA sense strand
cgguguaggagaagaaauc

SEQ ID NO: 2366131 - RNA, 19 nt, Homo sapiens
  misc_RNA (1)...(19): siRNA sense strand
gaaaaggugugcaaggaga

SEQ ID NO: 2366132 - RNA, 19 nt, Homo sapiens
  misc_RNA (1)...(19): siRNA sense strand
gcuaugaaaaggugugcaa

SEQ ID NO: 2366133 - RNA, 19 nt, Homo sapiens
  misc_RNA (1)...(19): siRNA sense strand
guuuacagagccagcaaau

SEQ ID NO: 2366134 - RNA, 19 nt, Homo sapiens
  misc_RNA (1)...(19): siRNA sense strand
ccauagagacuguggugcu

SEQ ID NO: 2366135 - RNA, 19 nt, Homo sapiens
  misc_RNA (1)...(19): siRNA sense strand
ugaacgagacagaaagcga

SEQ ID NO: 2366136 - RNA, 19 nt, Homo sapiens
  misc_RNA (1)...(19): siRNA sense strand
gaaacuacugggagcgacu

SEQ ID NO: 2366137 - RNA, 19 nt, Homo sapiens
  misc_RNA (1)...(19): siRNA sense strand
aagcuauaaucgagagaaa

SEQ ID NO: 2366138 - RNA, 19 nt, Homo sapiens
  misc_RNA (1)...(19): siRNA sense strand
gguuacacaaagugggaua

SEQ ID NO: 2366139 - RNA, 19 nt, Homo sapiens
  misc_RNA (1)...(19): siRNA sense strand
gcacaacacagaaggaaau

SEQ ID NO: 2366140 - RNA, 19 nt, Homo sapiens
  misc_RNA (1)...(19): siRNA sense strand
cagcacaagaagaggaaaa

SEQ ID NO: 2366141 - RNA, 19 nt, Homo sapiens
  misc_RNA (1)...(19): siRNA sense strand
cugaaagauaacauggaaa

SEQ ID NO: 2366142 - RNA, 19 nt, Homo sapiens
  misc_RNA (1)...(19): siRNA sense strand
gagaaaucaaguagcaaau

SEQ ID NO: 2366143 - RNA, 19 nt, Homo sapiens
  misc_RNA (1)...(19): siRNA sense strand
cagagaugaaugaggaauu

SEQ ID NO: 2366144 - RNA, 19 nt, Homo sapiens
  misc_RNA (1)...(19): siRNA sense strand
gaaaugaugauaagggaga

SEQ ID NO: 2366145 - RNA, 19 nt, Homo sapiens
  misc_RNA (1)...(19): siRNA sense strand
uggaaagaaagaagaaaga

SEQ ID NO: 2366146 - RNA, 19 nt, Homo sapiens
  misc_RNA (1)...(19): siRNA sense strand
uaugagaaucugugaacaa

SEQ ID NO: 2366147 - RNA, 19 nt, Homo sapiens
  misc_RNA (1)...(19): siRNA sense strand
agauaaggagucugaacaa

SEQ ID NO: 2366148 - RNA, 19 nt, Homo sapiens
  misc_RNA (1)...(19): siRNA sense strand
gcagaagacagcagcaaaa

SEQ ID NO: 2366149 - RNA, 19 nt, Homo sapiens
  misc_RNA (1)...(19): siRNA sense strand
ccgaaaauccaaaacgaaa

SEQ ID NO: 2366150 - RNA, 19 nt, Homo sapiens
  misc_RNA (1)...(19): siRNA sense strand
guugaaaagagaagagaau

SEQ ID NO: 2366151 - RNA, 19 nt, Homo sapiens
  misc_RNA (1)...(19): siRNA sense strand
gcaaggagguagaggagac

SEQ ID NO: 2366152 - RNA, 19 nt, Homo sapiens
  misc_RNA (1)...(19): siRNA sense strand
caacacagaaggaaaucaa

SEQ ID NO: 2366153 - RNA, 19 nt, Homo sapiens
  misc_RNA (1)...(19): siRNA sense strand
acaagaaauccaaggcaga

SEQ ID NO: 2366154 - RNA, 19 nt, Homo sapiens
  misc_RNA (1)...(19): siRNA sense strand
cagagauauuccauggcaa

SEQ ID NO: 2366155 - RNA, 19 nt, Homo sapiens
  misc_RNA (1)...(19): siRNA sense strand
cuacagaagucuaacagga

SEQ ID NO: 2366156 - RNA, 19 nt, Homo sapiens
  misc_RNA (1)...(19): siRNA sense strand
gcggagaguuaucagaaaa

SEQ ID NO: 2366157 - RNA, 19 nt, Homo sapiens
  misc_RNA (1)...(19): siRNA sense strand
guuuagaucaacugaaaga

SEQ ID NO: 2366158 - RNA, 19 nt, Homo sapiens
  misc_RNA (1)...(19): siRNA sense strand
gaucauaccuaccggcuca

SEQ ID NO: 2366159 - RNA, 19 nt, Homo sapiens
  misc_RNA (1)...(19): siRNA sense strand
cagaagucuaacaggaauu

SEQ ID NO: 2366160 - RNA, 19 nt, Homo sapiens
  misc_RNA (1)...(19): siRNA sense strand
aagagaaugcccagcuuaa

SEQ ID NO: 2366161 - RNA, 19 nt, Homo sapiens
  misc_RNA (1)...(19): siRNA sense strand
acuuacuugcggagaguua

SEQ ID NO: 2366162 - RNA, 19 nt, Homo sapiens
  misc_RNA (1)...(19): siRNA sense strand
aaaucuaaagccaaggaaa

SEQ ID NO: 2366163 - RNA, 19 nt, Homo sapiens
  misc_RNA (1)...(19): siRNA sense strand
caguggaaagaaagaagaa

SEQ ID NO: 2366164 - RNA, 19 nt, Homo sapiens
  misc_RNA (1)...(19): siRNA sense strand
gcuuguuuauugaaggauu

SEQ ID NO: 2366165 - RNA, 19 nt, Homo sapiens
  misc_RNA (1)...(19): siRNA sense strand
gauuguucgagguguguaa

SEQ ID NO: 2366166 - RNA, 19 nt, Homo sapiens
  misc_RNA (1)...(19): siRNA sense strand
agcacaacacagaaggaaa

SEQ ID NO: 2366167 - RNA, 19 nt, Homo sapiens
  misc_RNA (1)...(19): siRNA sense strand
ucaagacagaacugaauaa

SEQ ID NO: 2366168 - RNA, 19 nt, Homo sapiens
  misc_RNA (1)...(19): siRNA sense strand
gcuuaauagcaaggaggua

SEQ ID NO: 2366169 - RNA, 19 nt, Homo sapiens
  misc_RNA (1)...(19): siRNA sense strand
caaauagggaacugcaaga

SEQ ID NO: 2366170 - RNA, 19 nt, Homo sapiens
  misc_RNA (1)...(19): siRNA sense strand
agagauauuccauggcaau

SEQ ID NO: 2366171 - RNA, 19 nt, Homo sapiens
  misc_RNA (1)...(19): siRNA sense strand
ucagaauuccagaaagauu

SEQ ID NO: 2366172 - RNA, 19 nt, Homo sapiens
  misc_RNA (1)...(19): siRNA sense strand
ugccuaugacuuugagaaa

SEQ ID NO: 2366173 - RNA, 19 nt, Homo sapiens
  misc_RNA (1)...(19): siRNA sense strand
uccacaaaguugaugagaa

SEQ ID NO: 2366174 - RNA, 19 nt, Homo sapiens
  misc_RNA (1)...(19): siRNA sense strand
agcaaaaggaagugggaca

SEQ ID NO: 2366175 - RNA, 19 nt, Homo sapiens
  misc_RNA (1)...(19): siRNA sense strand
caugaacgccacuggaaau

SEQ ID NO: 2366176 - RNA, 19 nt, Homo sapiens
  misc_RNA (1)...(19): siRNA sense strand
cuccacagaugcugaacaa

SEQ ID NO: 2366177 - RNA, 19 nt, Homo sapiens
  misc_RNA (1)...(19): siRNA sense strand
agaagaaugaccaggaagu

SEQ ID NO: 2366178 - RNA, 19 nt, Homo sapiens
  misc_RNA (1)...(19): siRNA sense strand
gagaaacagaucugguuca

SEQ ID NO: 2366179 - RNA, 19 nt, Homo sapiens
  misc_RNA (1)...(19): siRNA sense strand
aagaaaugaugauaaggga

SEQ ID NO: 2366180 - RNA, 19 nt, Homo sapiens
  misc_RNA (1)...(19): siRNA sense strand
agauauucuuggacagagu

SEQ ID NO: 2366181 - RNA, 19 nt, Homo sapiens
  misc_RNA (1)...(19): siRNA sense strand
cagaaaaucagcacaagaa

SEQ ID NO: 2366182 - RNA, 19 nt, Homo sapiens
  misc_RNA (1)...(19): siRNA sense strand
acacaauuuggaagccuaa

SEQ ID NO: 2366183 - RNA, 19 nt, Homo sapiens
  misc_RNA (1)...(19): siRNA sense strand
ccaaagaauaaaagcacau

SEQ ID NO: 2366184 - RNA, 19 nt, Homo sapiens
  misc_RNA (1)...(19): siRNA sense strand
aaucuaaagccaaggaaac

SEQ ID NO: 2366185 - RNA, 19 nt, Homo sapiens
  misc_RNA (1)...(19): siRNA sense strand
cuaaagccaaggaaacaaa

SEQ ID NO: 2366186 - RNA, 19 nt, Homo sapiens
  misc_RNA (1)...(19): siRNA sense strand
ccaaauauuuaaagguguc

SEQ ID NO: 2366187 - RNA, 19 nt, Homo sapiens
  misc_RNA (1)...(19): siRNA sense strand
guggaaagaaagaagaaag

SEQ ID NO: 2366188 - RNA, 19 nt, Homo sapiens
  misc_RNA (1)...(19): siRNA sense strand
ucaugaacgccacuggaaa

SEQ ID NO: 2366189 - RNA, 19 nt, Homo sapiens
  misc_RNA (1)...(19): siRNA sense strand
gugaauuuggggaagauaa

SEQ ID NO: 2366190 - RNA, 19 nt, Homo sapiens
  misc_RNA (1)...(19): siRNA sense strand
agguuauucucaagacaga

SEQ ID NO: 2366191 - RNA, 19 nt, Homo sapiens
  misc_RNA (1)...(19): siRNA sense strand
agcagaagagcuugaguau

SEQ ID NO: 2366192 - RNA, 19 nt, Homo sapiens
  misc_RNA (1)...(19): siRNA sense strand
uccaagaaacaaagacauu

SEQ ID NO: 2366193 - RNA, 19 nt, Homo sapiens
  misc_RNA (1)...(19): siRNA sense strand
acaaaguugaugagaaauc

SEQ ID NO: 2366194 - RNA, 19 nt, Homo sapiens
  misc_RNA (1)...(19): siRNA sense strand
caucagagcugcugccuca

SEQ ID NO: 2366195 - RNA, 19 nt, Homo sapiens
  misc_RNA (1)...(19): siRNA sense strand
aggcauugucaguguguuu

SEQ ID NO: 2366196 - RNA, 19 nt, Homo sapiens
  misc_RNA (1)...(19): siRNA sense strand
aauaugagcaggaggcuga

SEQ ID NO: 2366197 - RNA, 19 nt, Homo sapiens
  misc_RNA (1)...(19): siRNA sense strand
aauccaagaccaaacgcaa

SEQ ID NO: 2366198 - RNA, 19 nt, Homo sapiens
  misc_RNA (1)...(19): siRNA sense strand
ugugguucucgguggaaua

SEQ ID NO: 2366199 - RNA, 19 nt, Homo sapiens
  misc_RNA (1)...(19): siRNA sense strand
cgguggaauaugagcagga

SEQ ID NO: 2366200 - RNA, 19 nt, Homo sapiens
  misc_RNA (1)...(19): siRNA sense strand
caucagagcugcugccuca

SEQ ID NO: 2366201 - RNA, 19 nt, Homo sapiens
  misc_RNA (1)...(19): siRNA sense strand
aggcauugucaguguguuu

SEQ ID NO: 2366202 - RNA, 19 nt, Homo sapiens
  misc_RNA (1)...(19): siRNA sense strand
aauaugagcaggaggcuga

SEQ ID NO: 2366203 - RNA, 19 nt, Homo sapiens
  misc_RNA (1)...(19): siRNA sense strand
aauccaagaccaaacgcaa

SEQ ID NO: 2366204 - RNA, 19 nt, Homo sapiens
  misc_RNA (1)...(19): siRNA sense strand
ugugguucucgguggaaua

SEQ ID NO: 2366205 - RNA, 19 nt, Homo sapiens
  misc_RNA (1)...(19): siRNA sense strand
cgguggaauaugagcagga

SEQ ID NO: 2366206 - RNA, 19 nt, Homo sapiens
  misc_RNA (1)...(19): siRNA sense strand
gcaggcuacuacaguggaa

SEQ ID NO: 2366207 - RNA, 19 nt, Homo sapiens
  misc_RNA (1)...(19): siRNA sense strand
cagcgaaaguugugggaaa

SEQ ID NO: 2366208 - RNA, 19 nt, Homo sapiens
  misc_RNA (1)...(19): siRNA sense strand
cuucaaauauggagggaaa

SEQ ID NO: 2366209 - RNA, 19 nt, Homo sapiens
  misc_RNA (1)...(19): siRNA sense strand
cuaaagaagugaagaucaa

SEQ ID NO: 2366210 - RNA, 19 nt, Homo sapiens
  misc_RNA (1)...(19): siRNA sense strand
ggaaagacuacaagagaau

SEQ ID NO: 2366211 - RNA, 19 nt, Homo sapiens
  misc_RNA (1)...(19): siRNA sense strand
ggcaaagggaguagaaaua

SEQ ID NO: 2366212 - RNA, 19 nt, Homo sapiens
  misc_RNA (1)...(19): siRNA sense strand
uggaagaugugaagguaaa

SEQ ID NO: 2366213 - RNA, 19 nt, Homo sapiens
  misc_RNA (1)...(19): siRNA sense strand
gagaaaugauaaagcacua

SEQ ID NO: 2366214 - RNA, 19 nt, Homo sapiens
  misc_RNA (1)...(19): siRNA sense strand
gugcauagccaaugggauu

SEQ ID NO: 2366215 - RNA, 19 nt, Homo sapiens
  misc_RNA (1)...(19): siRNA sense strand
gcaaacaagccaaggauau

SEQ ID NO: 2366216 - RNA, 19 nt, Homo sapiens
  misc_RNA (1)...(19): siRNA sense strand
uauuaaugcugguggcaaa

SEQ ID NO: 2366217 - RNA, 19 nt, Homo sapiens
  misc_RNA (1)...(19): siRNA sense strand
cugagagaguugugguaaa

SEQ ID NO: 2366218 - RNA, 19 nt, Homo sapiens
  misc_RNA (1)...(19): siRNA sense strand
ggacaacagcaaaggaaau

SEQ ID NO: 2366219 - RNA, 19 nt, Homo sapiens
  misc_RNA (1)...(19): siRNA sense strand
augcaaagcaaguggaaau

SEQ ID NO: 2366220 - RNA, 19 nt, Homo sapiens
  misc_RNA (1)...(19): siRNA sense strand
cuguaaagcuacugguauu

SEQ ID NO: 2366221 - RNA, 19 nt, Homo sapiens
  misc_RNA (1)...(19): siRNA sense strand
gcccauagcuaguggugaa

SEQ ID NO: 2366222 - RNA, 19 nt, Homo sapiens
  misc_RNA (1)...(19): siRNA sense strand
gagaugaugauaaggaaua

SEQ ID NO: 2366223 - RNA, 19 nt, Homo sapiens
  misc_RNA (1)...(19): siRNA sense strand
guauguauguagagcuaua

SEQ ID NO: 2366224 - RNA, 19 nt, Homo sapiens
  misc_RNA (1)...(19): siRNA sense strand
gugaacgaguguagacaaa

SEQ ID NO: 2366225 - RNA, 19 nt, Homo sapiens
  misc_RNA (1)...(19): siRNA sense strand
ccaucaaacugaacacaaa

SEQ ID NO: 2366226 - RNA, 19 nt, Homo sapiens
  misc_RNA (1)...(19): siRNA sense strand
gcccauaugccuuggaaua

SEQ ID NO: 2366227 - RNA, 19 nt, Homo sapiens
  misc_RNA (1)...(19): siRNA sense strand
gggaguggauauugaaauu

SEQ ID NO: 2366228 - RNA, 19 nt, Homo sapiens
  misc_RNA (1)...(19): siRNA sense strand
uagaaggacuauuaggaaa

SEQ ID NO: 2366229 - RNA, 19 nt, Homo sapiens
  misc_RNA (1)...(19): siRNA sense strand
caggaauggugaagccaaa

SEQ ID NO: 2366230 - RNA, 19 nt, Homo sapiens
  misc_RNA (1)...(19): siRNA sense strand
cagaaauggagaacgguua

SEQ ID NO: 2366231 - RNA, 19 nt, Homo sapiens
  misc_RNA (1)...(19): siRNA sense strand
aggaaguguuauuggaaau

SEQ ID NO: 2366232 - RNA, 19 nt, Homo sapiens
  misc_RNA (1)...(19): siRNA sense strand
aggaauaucuagugagagu

SEQ ID NO: 2366233 - RNA, 19 nt, Homo sapiens
  misc_RNA (1)...(19): siRNA sense strand
caguauguauguagagcua

SEQ ID NO: 2366234 - RNA, 19 nt, Homo sapiens
  misc_RNA (1)...(19): siRNA sense strand
aggaaagacuacaagagaa

SEQ ID NO: 2366235 - RNA, 19 nt, Homo sapiens
  misc_RNA (1)...(19): siRNA sense strand
uggcaguggugguuaauaa

SEQ ID NO: 2366236 - RNA, 19 nt, Homo sapiens
  misc_RNA (1)...(19): siRNA sense strand
aagagaaacucaaguggaa

SEQ ID NO: 2366237 - RNA, 19 nt, Homo sapiens
  misc_RNA (1)...(19): siRNA sense strand
gcugaugugucuauggaaa

SEQ ID NO: 2366238 - RNA, 19 nt, Homo sapiens
  misc_RNA (1)...(19): siRNA sense strand
gugcaaagcugcuggaaac

SEQ ID NO: 2366239 - RNA, 19 nt, Homo sapiens
  misc_RNA (1)...(19): siRNA sense strand
agacugaagauucgggaaa

SEQ ID NO: 2366240 - RNA, 19 nt, Homo sapiens
  misc_RNA (1)...(19): siRNA sense strand
uaacaaugcugcaggugaa

SEQ ID NO: 2366241 - RNA, 19 nt, Homo sapiens
  misc_RNA (1)...(19): siRNA sense strand
acagaaagggaguggauau

SEQ ID NO: 2366242 - RNA, 19 nt, Homo sapiens
  misc_RNA (1)...(19): siRNA sense strand
ccacaaauauugcugggaa

SEQ ID NO: 2366243 - RNA, 19 nt, Homo sapiens
  misc_RNA (1)...(19): siRNA sense strand
ugugaaagcuaaugacaau

SEQ ID NO: 2366244 - RNA, 19 nt, Homo sapiens
  misc_RNA (1)...(19): siRNA sense strand
aggcaaagggaguagaaau

SEQ ID NO: 2366245 - RNA, 19 nt, Homo sapiens
  misc_RNA (1)...(19): siRNA sense strand
aagaaugggcggaugauaa

SEQ ID NO: 2366246 - RNA, 19 nt, Homo sapiens
  misc_RNA (1)...(19): siRNA sense strand
agggaaaagcccagaaaua

SEQ ID NO: 2366247 - RNA, 19 nt, Homo sapiens
  misc_RNA (1)...(19): siRNA sense strand
aaauaaaggagaacagcua

SEQ ID NO: 2366248 - RNA, 19 nt, Homo sapiens
  misc_RNA (1)...(19): siRNA sense strand
uagaauaauacgugccaaa

SEQ ID NO: 2366249 - RNA, 19 nt, Homo sapiens
  misc_RNA (1)...(19): siRNA sense strand
gaguauagaaacagcagaa

SEQ ID NO: 2366250 - RNA, 19 nt, Homo sapiens
  misc_RNA (1)...(19): siRNA sense strand
aguaacaggcuaugauaaa

SEQ ID NO: 2366251 - RNA, 19 nt, Homo sapiens
  misc_RNA (1)...(19): siRNA sense strand
ggagaaaagcaaagggaca

SEQ ID NO: 2366252 - RNA, 19 nt, Homo sapiens
  misc_RNA (1)...(19): siRNA sense strand
aguagaagaugcugggaga

SEQ ID NO: 2366253 - RNA, 19 nt, Homo sapiens
  misc_RNA (1)...(19): siRNA sense strand
ucacacagguauaggauga

SEQ ID NO: 2366254 - RNA, 19 nt, Homo sapiens
  misc_RNA (1)...(19): siRNA sense strand
cagcaaaggaaauaggaga

SEQ ID NO: 2366255 - RNA, 19 nt, Homo sapiens
  misc_RNA (1)...(19): siRNA sense strand
ccacagaucauuuggaaca

SEQ ID NO: 2366256 - RNA, 19 nt, Homo sapiens
  misc_RNA (1)...(19): siRNA sense strand
ccagaacgucgguggauua

SEQ ID NO: 2366257 - RNA, 19 nt, Homo sapiens
  misc_RNA (1)...(19): siRNA sense strand
ggagauacuugcaaaucaa

SEQ ID NO: 2366258 - RNA, 19 nt, Homo sapiens
  misc_RNA (1)...(19): siRNA sense strand
gaggaaguguuauuggaaa

SEQ ID NO: 2366259 - RNA, 19 nt, Homo sapiens
  misc_RNA (1)...(19): siRNA sense strand
agacuguguuggugagcaa

SEQ ID NO: 2366260 - RNA, 19 nt, Homo sapiens
  misc_RNA (1)...(19): siRNA sense strand
gaguauauguuccgccaaa

SEQ ID NO: 2366261 - RNA, 19 nt, Homo sapiens
  misc_RNA (1)...(19): siRNA sense strand
gugccaacuccaaggauaa

SEQ ID NO: 2366262 - RNA, 19 nt, Homo sapiens
  misc_RNA (1)...(19): siRNA sense strand
caaaguagugaaugugaaa

SEQ ID NO: 2366263 - RNA, 19 nt, Homo sapiens
  misc_RNA (1)...(19): siRNA sense strand
ggagcuaaagagugugaaa

SEQ ID NO: 2366264 - RNA, 19 nt, Homo sapiens
  misc_RNA (1)...(19): siRNA sense strand
ggauaagccuguugagauc

SEQ ID NO: 2366265 - RNA, 19 nt, Homo sapiens
  misc_RNA (1)...(19): siRNA sense strand
uaaagaugaagcagagaaa

SEQ ID NO: 2366266 - RNA, 19 nt, Homo sapiens
  misc_RNA (1)...(19): siRNA sense strand
ccaguauggaggaaggaaa

SEQ ID NO: 2366267 - RNA, 19 nt, Homo sapiens
  misc_RNA (1)...(19): siRNA sense strand
gugaagaugaguuggauuu

SEQ ID NO: 2366268 - RNA, 19 nt, Homo sapiens
  misc_RNA (1)...(19): siRNA sense strand
gaggauacaggaagauaua

SEQ ID NO: 2366269 - RNA, 19 nt, Homo sapiens
  misc_RNA (1)...(19): siRNA sense strand
acucaauacaguagcuaua

SEQ ID NO: 2366270 - RNA, 19 nt, Homo sapiens
  misc_RNA (1)...(19): siRNA sense strand
acacaaugguagagaguug

SEQ ID NO: 2366271 - RNA, 19 nt, Homo sapiens
  misc_RNA (1)...(19): siRNA sense strand
cauagaagcuggugggaag

SEQ ID NO: 2366272 - RNA, 19 nt, Homo sapiens
  misc_RNA (1)...(19): siRNA sense strand
cgccaaauauuaugggaga

SEQ ID NO: 2366273 - RNA, 19 nt, Homo sapiens
  misc_RNA (1)...(19): siRNA sense strand
cugcaaagaaagaauacaa

SEQ ID NO: 2366274 - RNA, 19 nt, Homo sapiens
  misc_RNA (1)...(19): siRNA sense strand
ggaaauaggaaacaugcua

SEQ ID NO: 2366275 - RNA, 19 nt, Homo sapiens
  misc_RNA (1)...(19): siRNA sense strand
guguaaggcagcuggaaau

SEQ ID NO: 2366276 - RNA, 19 nt, Homo sapiens
  misc_RNA (1)...(19): siRNA sense strand
agugaaugcugcuggagaa

SEQ ID NO: 2366277 - RNA, 19 nt, Homo sapiens
  misc_RNA (1)...(19): siRNA sense strand
cauuaauggaucugaagaa

SEQ ID NO: 2366278 - RNA, 19 nt, Homo sapiens
  misc_RNA (1)...(19): siRNA sense strand
ggaacagacaagugacauu

SEQ ID NO: 2366279 - RNA, 19 nt, Homo sapiens
  misc_RNA (1)...(19): siRNA sense strand
ggaauggagucuuugggaa

SEQ ID NO: 2366280 - RNA, 19 nt, Homo sapiens
  misc_RNA (1)...(19): siRNA sense strand
cuuguuauguucaggguua

SEQ ID NO: 2366281 - RNA, 19 nt, Homo sapiens
  misc_RNA (1)...(19): siRNA sense strand
cggaacuggcuguggcauu

SEQ ID NO: 2366282 - RNA, 19 nt, Homo sapiens
  misc_RNA (1)...(19): siRNA sense strand
cagaucagcuccugcggaa

SEQ ID NO: 2366283 - RNA, 19 nt, Homo sapiens
  misc_RNA (1)...(19): siRNA sense strand
uggcauuggugguggcauc

SEQ ID NO: 2366284 - RNA, 19 nt, Homo sapiens
  misc_RNA (1)...(19): siRNA sense strand
caagauaccaacagggcuu

SEQ ID NO: 2366285 - RNA, 19 nt, Homo sapiens
  misc_RNA (1)...(19): siRNA sense strand
agucugaggaagaugauau

SEQ ID NO: 2366286 - RNA, 19 nt, Homo sapiens
  misc_RNA (1)...(19): siRNA sense strand
gaaagaaguugaaagcauc

SEQ ID NO: 2366287 - RNA, 19 nt, Homo sapiens
  misc_RNA (1)...(19): siRNA sense strand
augaggaacacgagcguca

SEQ ID NO: 2366288 - RNA, 19 nt, Homo sapiens
  misc_RNA (1)...(19): siRNA sense strand
gcaugagucuggacggagu

SEQ ID NO: 2366289 - RNA, 19 nt, Homo sapiens
  misc_RNA (1)...(19): siRNA sense strand
uggauaugggauuggucaa

SEQ ID NO: 2366290 - RNA, 19 nt, Homo sapiens
  misc_RNA (1)...(19): siRNA sense strand
auaauggagacauggaaaa

SEQ ID NO: 2366291 - RNA, 19 nt, Homo sapiens
  misc_RNA (1)...(19): siRNA sense strand
ggaugcaggaggagagccu

SEQ ID NO: 2366292 - RNA, 19 nt, Homo sapiens
  misc_RNA (1)...(19): siRNA sense strand
gaucuauauuggaaggcgu

SEQ ID NO: 2366293 - RNA, 19 nt, Homo sapiens
  misc_RNA (1)...(19): siRNA sense strand
ccgaacaugaacagagaaa

SEQ ID NO: 2366294 - RNA, 19 nt, Homo sapiens
  misc_RNA (1)...(19): siRNA sense strand
agauaaaggagauggauca

SEQ ID NO: 2366295 - RNA, 19 nt, Homo sapiens
  misc_RNA (1)...(19): siRNA sense strand
cuauagaagauguggauga

SEQ ID NO: 2366296 - RNA, 19 nt, Homo sapiens
  misc_RNA (1)...(19): siRNA sense strand
cccuuuagguggacagaaa

SEQ ID NO: 2366297 - RNA, 19 nt, Homo sapiens
  misc_RNA (1)...(19): siRNA sense strand
gagaaaacagagagcaaua

SEQ ID NO: 2366298 - RNA, 19 nt, Homo sapiens
  misc_RNA (1)...(19): siRNA sense strand
caacaaucccaaagagaca

SEQ ID NO: 2366299 - RNA, 19 nt, Homo sapiens
  misc_RNA (1)...(19): siRNA sense strand
gcgaauugauagggaggaa

SEQ ID NO: 2366300 - RNA, 19 nt, Homo sapiens
  misc_RNA (1)...(19): siRNA sense strand
cagagaaaacagagagcaa

SEQ ID NO: 2366301 - RNA, 19 nt, Homo sapiens
  misc_RNA (1)...(19): siRNA sense strand
caguagagccagagucaga

SEQ ID NO: 2366302 - RNA, 19 nt, Homo sapiens
  misc_RNA (1)...(19): siRNA sense strand
accaaggagugauggcaaa

SEQ ID NO: 2366303 - RNA, 19 nt, Homo sapiens
  misc_RNA (1)...(19): siRNA sense strand
cggccagaugggaggcuua

SEQ ID NO: 2366304 - RNA, 19 nt, Homo sapiens
  misc_RNA (1)...(19): siRNA sense strand
cuauaagugcaguagacaa

SEQ ID NO: 2366305 - RNA, 19 nt, Homo sapiens
  misc_RNA (1)...(19): siRNA sense strand
gaauugauagggaggaaaa

SEQ ID NO: 2366306 - RNA, 19 nt, Homo sapiens
  misc_RNA (1)...(19): siRNA sense strand
acuucacaguacaggauaa

SEQ ID NO: 2366307 - RNA, 19 nt, Homo sapiens
  misc_RNA (1)...(19): siRNA sense strand
guuuaauaagcuagcagaa

SEQ ID NO: 2366308 - RNA, 19 nt, Homo sapiens
  misc_RNA (1)...(19): siRNA sense strand
acauucagaccaagauaaa

SEQ ID NO: 2366309 - RNA, 19 nt, Homo sapiens
  misc_RNA (1)...(19): siRNA sense strand
aaagaagauaucagagaca

SEQ ID NO: 2366310 - RNA, 19 nt, Homo sapiens
  misc_RNA (1)...(19): siRNA sense strand
cugcagccauugaggaaaa

SEQ ID NO: 2366311 - RNA, 19 nt, Homo sapiens
  misc_RNA (1)...(19): siRNA sense strand
gcgagauauuauuccagaa

SEQ ID NO: 2366312 - RNA, 19 nt, Homo sapiens
  misc_RNA (1)...(19): siRNA sense strand
caacguucccagaagaaau

SEQ ID NO: 2366313 - RNA, 19 nt, Homo sapiens
  misc_RNA (1)...(19): siRNA sense strand
caaaagaagauaucagaga

SEQ ID NO: 2366314 - RNA, 19 nt, Homo sapiens
  misc_RNA (1)...(19): siRNA sense strand
cagcauacuucaagggcag

SEQ ID NO: 2366315 - RNA, 19 nt, Homo sapiens
  misc_RNA (1)...(19): siRNA sense strand
gugcaguagacaaagauga

SEQ ID NO: 2366316 - RNA, 19 nt, Homo sapiens
  misc_RNA (1)...(19): siRNA sense strand
cgaauugauagggaggaaa

SEQ ID NO: 2366317 - RNA, 19 nt, Homo sapiens
  misc_RNA (1)...(19): siRNA sense strand
agccauuggaagugucaaa

SEQ ID NO: 2366318 - RNA, 19 nt, Homo sapiens
  misc_RNA (1)...(19): siRNA sense strand
cugaaguagaauaccgaau

SEQ ID NO: 2366319 - RNA, 19 nt, Homo sapiens
  misc_RNA (1)...(19): siRNA sense strand
ugagaaggacacacaggaa

SEQ ID NO: 2366320 - RNA, 19 nt, Homo sapiens
  misc_RNA (1)...(19): siRNA sense strand
ccaagauaaaggagaugga

SEQ ID NO: 2366321 - RNA, 19 nt, Homo sapiens
  misc_RNA (1)...(19): siRNA sense strand
gaacaugaacagagaaaac

SEQ ID NO: 2366322 - RNA, 19 nt, Homo sapiens
  misc_RNA (1)...(19): siRNA sense strand
aguacaggauaaugaagau

SEQ ID NO: 2366323 - RNA, 19 nt, Homo sapiens
  misc_RNA (1)...(19): siRNA sense strand
guacaggauaaugaagaua

SEQ ID NO: 2366324 - RNA, 19 nt, Homo sapiens
  misc_RNA (1)...(19): siRNA sense strand
caguacaggauaaugaaga

SEQ ID NO: 2366325 - RNA, 19 nt, Homo sapiens
  misc_RNA (1)...(19): siRNA sense strand
caagcuauuaacagaagaa

SEQ ID NO: 2366326 - RNA, 19 nt, Homo sapiens
  misc_RNA (1)...(19): siRNA sense strand
uguuauugcugcugaaauc

SEQ ID NO: 2366327 - RNA, 19 nt, Homo sapiens
  misc_RNA (1)...(19): siRNA sense strand
cuugaagaauauacaggau

SEQ ID NO: 2366328 - RNA, 19 nt, Homo sapiens
  misc_RNA (1)...(19): siRNA sense strand
ccagagucauuuacagcau

SEQ ID NO: 2366329 - RNA, 19 nt, Homo sapiens
  misc_RNA (1)...(19): siRNA sense strand
gugccacagcaaagaauuu

SEQ ID NO: 2366330 - RNA, 19 nt, Homo sapiens
  misc_RNA (1)...(19): siRNA sense strand
uguuugacaucgugacuga

SEQ ID NO: 2366331 - RNA, 19 nt, Homo sapiens
  misc_RNA (1)...(19): siRNA sense strand
gccaguagagccagaguca

SEQ ID NO: 2366332 - RNA, 19 nt, Homo sapiens
  misc_RNA (1)...(19): siRNA sense strand
cuaugagagccgaagacuu

SEQ ID NO: 2366333 - RNA, 19 nt, Homo sapiens
  misc_RNA (1)...(19): siRNA sense strand
cgaugagggugguggagag

SEQ ID NO: 2366334 - RNA, 19 nt, Homo sapiens
  misc_RNA (1)...(19): siRNA sense strand
ccuaugccuaugaaggaaa

SEQ ID NO: 2366335 - RNA, 19 nt, Homo sapiens
  misc_RNA (1)...(19): siRNA sense strand
uaucaaugacaaugagcca

SEQ ID NO: 2366336 - RNA, 19 nt, Homo sapiens
  misc_RNA (1)...(19): siRNA sense strand
ggugcaagucacagcuaca

SEQ ID NO: 2366337 - RNA, 19 nt, Homo sapiens
  misc_RNA (1)...(19): siRNA sense strand
ccauacugaccuugacaga

SEQ ID NO: 2366338 - RNA, 19 nt, Homo sapiens
  misc_RNA (1)...(19): siRNA sense strand
cuuuagguggacagaaauu

SEQ ID NO: 2366339 - RNA, 19 nt, Homo sapiens
  misc_RNA (1)...(19): siRNA sense strand
ugaagauaauacugccaga

SEQ ID NO: 2366340 - RNA, 19 nt, Homo sapiens
  misc_RNA (1)...(19): siRNA sense strand
ugaugcugacacugggaaa

SEQ ID NO: 2366341 - RNA, 19 nt, Homo sapiens
  misc_RNA (1)...(19): siRNA sense strand
gcaaaauucuccaucguca

SEQ ID NO: 2366342 - RNA, 19 nt, Homo sapiens
  misc_RNA (1)...(19): siRNA sense strand
cuacauucagaccaagaua

SEQ ID NO: 2366343 - RNA, 19 nt, Homo sapiens
  misc_RNA (1)...(19): siRNA sense strand
ucucaguggcauaaucuua

SEQ ID NO: 2366344 - RNA, 19 nt, Homo sapiens
  misc_RNA (1)...(19): siRNA sense strand
gcacaggcacacugaccau

SEQ ID NO: 2366345 - RNA, 19 nt, Homo sapiens
  misc_RNA (1)...(19): siRNA sense strand
aagauaauacugccagaau

SEQ ID NO: 2366346 - RNA, 19 nt, Homo sapiens
  misc_RNA (1)...(19): siRNA sense strand
cagccaaggcaacaugcaa

SEQ ID NO: 2366347 - RNA, 19 nt, Homo sapiens
  misc_RNA (1)...(19): siRNA sense strand
aauguauggugguggggaa

SEQ ID NO: 2366348 - RNA, 19 nt, Homo sapiens
  misc_RNA (1)...(19): siRNA sense strand
aggagaucuuggagaaauu

SEQ ID NO: 2366349 - RNA, 19 nt, Homo sapiens
  misc_RNA (1)...(19): siRNA sense strand
uuucagaagaugaggauga

SEQ ID NO: 2366350 - RNA, 19 nt, Homo sapiens
  misc_RNA (1)...(19): siRNA sense strand
acaguuaccucgugggaga

SEQ ID NO: 2366351 - RNA, 19 nt, Homo sapiens
  misc_RNA (1)...(19): siRNA sense strand
aagcagaagaagaagccua

SEQ ID NO: 2366352 - RNA, 19 nt, Homo sapiens
  misc_RNA (1)...(19): siRNA sense strand
caaagaugcuggaacccua

SEQ ID NO: 2366353 - RNA, 19 nt, Homo sapiens
  misc_RNA (1)...(19): siRNA sense strand
acugagaagcagaagaaga

SEQ ID NO: 2366354 - RNA, 19 nt, Homo sapiens
  misc_RNA (1)...(19): siRNA sense strand
uugcauggaugaaggccaa

SEQ ID NO: 2366355 - RNA, 19 nt, Homo sapiens
  misc_RNA (1)...(19): siRNA sense strand
ucgagauggauguggagaa

SEQ ID NO: 2366356 - RNA, 19 nt, Homo sapiens
  misc_RNA (1)...(19): siRNA sense strand
cggaauacugagaagcaga

SEQ ID NO: 2366357 - RNA, 19 nt, Homo sapiens
  misc_RNA (1)...(19): siRNA sense strand
gcauagugagugugggcga

SEQ ID NO: 2366358 - RNA, 19 nt, Homo sapiens
  misc_RNA (1)...(19): siRNA sense strand
acagauguggugacagaaa

SEQ ID NO: 2366359 - RNA, 19 nt, Homo sapiens
  misc_RNA (1)...(19): siRNA sense strand
gauuggagccggcagcaaa

SEQ ID NO: 2366360 - RNA, 19 nt, Homo sapiens
  misc_RNA (1)...(19): siRNA sense strand
ggagaugagcuguggguug

SEQ ID NO: 2366361 - RNA, 19 nt, Homo sapiens
  misc_RNA (1)...(19): siRNA sense strand
ccuccauaccucaaugaaa

SEQ ID NO: 2366362 - RNA, 19 nt, Homo sapiens
  misc_RNA (1)...(19): siRNA sense strand
gacaauauucuguugggaa

SEQ ID NO: 2366363 - RNA, 19 nt, Homo sapiens
  misc_RNA (1)...(19): siRNA sense strand
gggaaaacaagaacccaaa

SEQ ID NO: 2366364 - RNA, 19 nt, Homo sapiens
  misc_RNA (1)...(19): siRNA sense strand
augagaaauaccagcacua

SEQ ID NO: 2366365 - RNA, 19 nt, Homo sapiens
  misc_RNA (1)...(19): siRNA sense strand
gagcagagcaaacggagca

SEQ ID NO: 2366366 - RNA, 19 nt, Homo sapiens
  misc_RNA (1)...(19): siRNA sense strand
auacacgguuugagaagau

SEQ ID NO: 2366367 - RNA, 19 nt, Homo sapiens
  misc_RNA (1)...(19): siRNA sense strand
gcaucauggccaucgaaau

SEQ ID NO: 2366368 - RNA, 19 nt, Homo sapiens
  misc_RNA (1)...(19): siRNA sense strand
acaucaagagugacaauau

SEQ ID NO: 2366369 - RNA, 19 nt, Homo sapiens
  misc_RNA (1)...(19): siRNA sense strand
cagaagaagaagccuaaaa

SEQ ID NO: 2366370 - RNA, 19 nt, Homo sapiens
  misc_RNA (1)...(19): siRNA sense strand
agauaagucagcugaggau

SEQ ID NO: 2366371 - RNA, 19 nt, Homo sapiens
  misc_RNA (1)...(19): siRNA sense strand
ggaauacugagaagcagaa

SEQ ID NO: 2366372 - RNA, 19 nt, Homo sapiens
  misc_RNA (1)...(19): siRNA sense strand
guuugagaagauuggacaa

SEQ ID NO: 2366373 - RNA, 19 nt, Homo sapiens
  misc_RNA (1)...(19): siRNA sense strand
agacaucaagagugacaau

SEQ ID NO: 2366374 - RNA, 19 nt, Homo sapiens
  misc_RNA (1)...(19): siRNA sense strand
cuccauaccucaaugaaaa

SEQ ID NO: 2366375 - RNA, 19 nt, Homo sapiens
  misc_RNA (1)...(19): siRNA sense strand
gccagaaauacaugagcuu

SEQ ID NO: 2366376 - RNA, 19 nt, Homo sapiens
  misc_RNA (1)...(19): siRNA sense strand
cuaagucggagcagaagaa

SEQ ID NO: 2366377 - RNA, 19 nt, Homo sapiens
  misc_RNA (1)...(19): siRNA sense strand
ggacaaggugcuucaggca

SEQ ID NO: 2366378 - RNA, 19 nt, Homo sapiens
  misc_RNA (1)...(19): siRNA sense strand
agcagaagaagaagccuaa

SEQ ID NO: 2366379 - RNA, 19 nt, Homo sapiens
  misc_RNA (1)...(19): siRNA sense strand
agaugaggaugaugaugau

SEQ ID NO: 2366380 - RNA, 19 nt, Homo sapiens
  misc_RNA (1)...(19): siRNA sense strand
gguuugagaagauuggaca

SEQ ID NO: 2366381 - RNA, 19 nt, Homo sapiens
  misc_RNA (1)...(19): siRNA sense strand
ggucauucacagagacauc

SEQ ID NO: 2366382 - RNA, 19 nt, Homo sapiens
  misc_RNA (1)...(19): siRNA sense strand
agagacaucaagagugaca

SEQ ID NO: 2366383 - RNA, 19 nt, Homo sapiens
  misc_RNA (1)...(19): siRNA sense strand
ucgaagaagacauccaaca

SEQ ID NO: 2366384 - RNA, 19 nt, Homo sapiens
  misc_RNA (1)...(19): siRNA sense strand
gauguggagaagagagguu

SEQ ID NO: 2366385 - RNA, 19 nt, Homo sapiens
  misc_RNA (1)...(19): siRNA sense strand
aggaggcaacaaagaacaa

SEQ ID NO: 2366386 - RNA, 19 nt, Homo sapiens
  misc_RNA (1)...(19): siRNA sense strand
cuucuaaugccuugaaugu

SEQ ID NO: 2366387 - RNA, 19 nt, Homo sapiens
  misc_RNA (1)...(19): siRNA sense strand
caaauaacggccuagacau

SEQ ID NO: 2366388 - RNA, 19 nt, Homo sapiens
  misc_RNA (1)...(19): siRNA sense strand
gggcaaggauucuuuguau

SEQ ID NO: 2366389 - RNA, 19 nt, Homo sapiens
  misc_RNA (1)...(19): siRNA sense strand
cggaagaaggcuaagacca

SEQ ID NO: 2366390 - RNA, 19 nt, Homo sapiens
  misc_RNA (1)...(19): siRNA sense strand
gagccuaacugcagaucca

SEQ ID NO: 2366391 - RNA, 19 nt, Homo sapiens
  misc_RNA (1)...(19): siRNA sense strand
ggaagaaggcuaagaccac

SEQ ID NO: 2366392 - RNA, 19 nt, Homo sapiens
  misc_RNA (1)...(19): siRNA sense strand
cacaguauaagaagggcaa

SEQ ID NO: 2366393 - RNA, 19 nt, Homo sapiens
  misc_RNA (1)...(19): siRNA sense strand
auaagaagagaaagggcca

SEQ ID NO: 2366394 - RNA, 19 nt, Homo sapiens
  misc_RNA (1)...(19): siRNA sense strand
agagaaagggccaagugau

SEQ ID NO: 2366395 - RNA, 19 nt, Homo sapiens
  misc_RNA (1)...(19): siRNA sense strand
gcuggaauguguugagccu

SEQ ID NO: 2366396 - RNA, 19 nt, Homo sapiens
  misc_RNA (1)...(19): siRNA sense strand
cuaugaaggccgaggguca

SEQ ID NO: 2366397 - RNA, 19 nt, Homo sapiens
  misc_RNA (1)...(19): siRNA sense strand
uaggaagggugaaggccaa

SEQ ID NO: 2366398 - RNA, 19 nt, Homo sapiens
  misc_RNA (1)...(19): siRNA sense strand
gggaagauaacgcuggcaa

SEQ ID NO: 2366399 - RNA, 19 nt, Homo sapiens
  misc_RNA (1)...(19): siRNA sense strand
gcauuauaaggcuaagaaa

SEQ ID NO: 2366400 - RNA, 19 nt, Homo sapiens
  misc_RNA (1)...(19): siRNA sense strand
gguucuuggcacugcaaua

SEQ ID NO: 2366401 - RNA, 19 nt, Homo sapiens
  misc_RNA (1)...(19): siRNA sense strand
gggugaaggccaaugauca

SEQ ID NO: 2366402 - RNA, 19 nt, Homo sapiens
  misc_RNA (1)...(19): siRNA sense strand
acacugaccuggagaggca

SEQ ID NO: 2366403 - RNA, 19 nt, Homo sapiens
  misc_RNA (1)...(19): siRNA sense strand
gguuguuauccaagccaaa

SEQ ID NO: 2366404 - RNA, 19 nt, Homo sapiens
  misc_RNA (1)...(19): siRNA sense strand
cauccgaauaugaggcauu

SEQ ID NO: 2366405 - RNA, 19 nt, Homo sapiens
  misc_RNA (1)...(19): siRNA sense strand
acagagaagccaaggagga

SEQ ID NO: 2366406 - RNA, 19 nt, Homo sapiens
  misc_RNA (1)...(19): siRNA sense strand
aggccaaugaucaggauau

SEQ ID NO: 2366407 - RNA, 19 nt, Homo sapiens
  misc_RNA (1)...(19): siRNA sense strand
ccguaaggauauuaaacca

SEQ ID NO: 2366408 - RNA, 19 nt, Homo sapiens
  misc_RNA (1)...(19): siRNA sense strand
ggauggcauuauaaggcua

SEQ ID NO: 2366409 - RNA, 19 nt, Homo sapiens
  misc_RNA (1)...(19): siRNA sense strand
gccagaagcaagaagucua

SEQ ID NO: 2366410 - RNA, 19 nt, Homo sapiens
  misc_RNA (1)...(19): siRNA sense strand
gagaaaacaucauucgcua

SEQ ID NO: 2366411 - RNA, 19 nt, Homo sapiens
  misc_RNA (1)...(19): siRNA sense strand
ugaucaggauauuggugaa

SEQ ID NO: 2366412 - RNA, 19 nt, Homo sapiens
  misc_RNA (1)...(19): siRNA sense strand
gaauuaaguguauggcaca

SEQ ID NO: 2366413 - RNA, 19 nt, Homo sapiens
  misc_RNA (1)...(19): siRNA sense strand
caucagacucagaccagaa

SEQ ID NO: 2366414 - RNA, 19 nt, Homo sapiens
  misc_RNA (1)...(19): siRNA sense strand
uggugaaagugacaaagaa

SEQ ID NO: 2366415 - RNA, 19 nt, Homo sapiens
  misc_RNA (1)...(19): siRNA sense strand
ugaugaagacguucgagaa

SEQ ID NO: 2366416 - RNA, 19 nt, Homo sapiens
  misc_RNA (1)...(19): siRNA sense strand
aaacagucugggugaagaa

SEQ ID NO: 2366417 - RNA, 19 nt, Homo sapiens
  misc_RNA (1)...(19): siRNA sense strand
cuacgaugaugaaggagga

SEQ ID NO: 2366418 - RNA, 19 nt, Homo sapiens
  misc_RNA (1)...(19): siRNA sense strand
ugaaagugacaaagaaacu

SEQ ID NO: 2366419 - RNA, 19 nt, Homo sapiens
  misc_RNA (1)...(19): siRNA sense strand
gaucaggauauuggugaaa

SEQ ID NO: 2366420 - RNA, 19 nt, Homo sapiens
  misc_RNA (1)...(19): siRNA sense strand
ccaaagauauggguggaca

SEQ ID NO: 2366421 - RNA, 19 nt, Homo sapiens
  misc_RNA (1)...(19): siRNA sense strand
accacuugacagagaauua

SEQ ID NO: 2366422 - RNA, 19 nt, Homo sapiens
  misc_RNA (1)...(19): siRNA sense strand
aggaggacacagaggcuuu

SEQ ID NO: 2366423 - RNA, 19 nt, Homo sapiens
  misc_RNA (1)...(19): siRNA sense strand
guucaagacaucaaugaca

SEQ ID NO: 2366424 - RNA, 19 nt, Homo sapiens
  misc_RNA (1)...(19): siRNA sense strand
cgauggagauggaacagca

SEQ ID NO: 2366425 - RNA, 19 nt, Homo sapiens
  misc_RNA (1)...(19): siRNA sense strand
uuccagaaauggucaacaa

SEQ ID NO: 2366426 - RNA, 19 nt, Homo sapiens
  misc_RNA (1)...(19): siRNA sense strand
gccagaacggcuagcggaa

SEQ ID NO: 2366427 - RNA, 19 nt, Homo sapiens
  misc_RNA (1)...(19): siRNA sense strand
uguuggugaaagugacaaa

SEQ ID NO: 2366428 - RNA, 19 nt, Homo sapiens
  misc_RNA (1)...(19): siRNA sense strand
aggaaaaggcugaguauac

SEQ ID NO: 2366429 - RNA, 19 nt, Homo sapiens
  misc_RNA (1)...(19): siRNA sense strand
gcuuuaagagacugggcga

SEQ ID NO: 2366430 - RNA, 19 nt, Homo sapiens
  misc_RNA (1)...(19): siRNA sense strand
cuguuagcgccauggacaa

SEQ ID NO: 2366431 - RNA, 19 nt, Homo sapiens
  misc_RNA (1)...(19): siRNA sense strand
gcgccauggacaaagauga

SEQ ID NO: 2366432 - RNA, 19 nt, Homo sapiens
  misc_RNA (1)...(19): siRNA sense strand
aaauguuuguccuggaaga

SEQ ID NO: 2366433 - RNA, 19 nt, Homo sapiens
  misc_RNA (1)...(19): siRNA sense strand
agacuugaccgggaggaaa

SEQ ID NO: 2366434 - RNA, 19 nt, Homo sapiens
  misc_RNA (1)...(19): siRNA sense strand
agauauggguggacacucu

SEQ ID NO: 2366435 - RNA, 19 nt, Homo sapiens
  misc_RNA (1)...(19): siRNA sense strand
ggaggaaaaggcugaguau

SEQ ID NO: 2366436 - RNA, 19 nt, Homo sapiens
  misc_RNA (1)...(19): siRNA sense strand
ugggugaagaacagcgaau

SEQ ID NO: 2366437 - RNA, 19 nt, Homo sapiens
  misc_RNA (1)...(19): siRNA sense strand
cgcuaaagguagaggcagc

SEQ ID NO: 2366438 - RNA, 19 nt, Homo sapiens
  misc_RNA (1)...(19): siRNA sense strand
agacacggcgacagucaaa

SEQ ID NO: 2366439 - RNA, 19 nt, Homo sapiens
  misc_RNA (1)...(19): siRNA sense strand
agaauuaaguguauggcac

SEQ ID NO: 2366440 - RNA, 19 nt, Homo sapiens
  misc_RNA (1)...(19): siRNA sense strand
uggacaaagaugaucccaa

SEQ ID NO: 2366441 - RNA, 19 nt, Homo sapiens
  misc_RNA (1)...(19): siRNA sense strand
ggauauuaaaccagauuug

SEQ ID NO: 2366442 - RNA, 19 nt, Homo sapiens
  misc_RNA (1)...(19): siRNA sense strand
caucaaugacaaugcacca

SEQ ID NO: 2366443 - RNA, 19 nt, Homo sapiens
  misc_RNA (1)...(19): siRNA sense strand
cuggagaggcaguucaaca

SEQ ID NO: 2366444 - RNA, 19 nt, Homo sapiens
  misc_RNA (1)...(19): siRNA sense strand
ugaagaugcugaugagccu

SEQ ID NO: 2366445 - RNA, 19 nt, Homo sapiens
  misc_RNA (1)...(19): siRNA sense strand
ugacauugcaacuuuacaa

SEQ ID NO: 2366446 - RNA, 19 nt, Homo sapiens
  misc_RNA (1)...(19): siRNA sense strand
uguugaugucgaugaauuu

SEQ ID NO: 2366447 - RNA, 19 nt, Homo sapiens
  misc_RNA (1)...(19): siRNA sense strand
cagacucagaccagaauuu

SEQ ID NO: 2366448 - RNA, 19 nt, Homo sapiens
  misc_RNA (1)...(19): siRNA sense strand
ucaggauauuggugaaaau

SEQ ID NO: 2366449 - RNA, 19 nt, Homo sapiens
  misc_RNA (1)...(19): siRNA sense strand
agaagauggaccugcgcaa

SEQ ID NO: 2366450 - RNA, 19 nt, Homo sapiens
  misc_RNA (1)...(19): siRNA sense strand
uugagaugguggacggaga

SEQ ID NO: 2366451 - RNA, 19 nt, Homo sapiens
  misc_RNA (1)...(19): siRNA sense strand
ucuucaacgaggugguaau

SEQ ID NO: 2366452 - RNA, 19 nt, Homo sapiens
  misc_RNA (1)...(19): siRNA sense strand
gugguaaucaugagggacu

SEQ ID NO: 2366453 - RNA, 19 nt, Homo sapiens
  misc_RNA (1)...(19): siRNA sense strand
aggaagaagcggguggaga

SEQ ID NO: 2366454 - RNA, 19 nt, Homo sapiens
  misc_RNA (1)...(19): siRNA sense strand
gacugaagaaccugcacaa

SEQ ID NO: 2366455 - RNA, 19 nt, Homo sapiens
  misc_RNA (1)...(19): siRNA sense strand
uggagauguacaacagcua

SEQ ID NO: 2366456 - RNA, 19 nt, Homo sapiens
  misc_RNA (1)...(19): siRNA sense strand
ucgaccagcacgagcagaa

SEQ ID NO: 2366457 - RNA, 19 nt, Homo sapiens
  misc_RNA (1)...(19): siRNA sense strand
uggugaagaaauagggaaa

SEQ ID NO: 2366458 - RNA, 19 nt, Homo sapiens
  misc_RNA (1)...(19): siRNA sense strand
agauuuagaugcaggagca

SEQ ID NO: 2366459 - RNA, 19 nt, Homo sapiens
  misc_RNA (1)...(19): siRNA sense strand
cagagcuggugcuggacaa

SEQ ID NO: 2366460 - RNA, 19 nt, Homo sapiens
  misc_RNA (1)...(19): siRNA sense strand
cauuuguaauagacgagaa

SEQ ID NO: 2366461 - RNA, 19 nt, Homo sapiens
  misc_RNA (1)...(19): siRNA sense strand
ggacccuaucccagagcua

SEQ ID NO: 2366462 - RNA, 19 nt, Homo sapiens
  misc_RNA (1)...(19): siRNA sense strand
ugauauaaagaccggcaau

SEQ ID NO: 2366463 - RNA, 19 nt, Homo sapiens
  misc_RNA (1)...(19): siRNA sense strand
ugguggaugugaaugacaa

SEQ ID NO: 2366464 - RNA, 19 nt, Homo sapiens
  misc_RNA (1)...(19): siRNA sense strand
cugaaaagggcauuggauu

SEQ ID NO: 2366465 - RNA, 19 nt, Homo sapiens
  misc_RNA (1)...(19): siRNA sense strand
guguuugaccggagacuca

SEQ ID NO: 2366466 - RNA, 19 nt, Homo sapiens
  misc_RNA (1)...(19): siRNA sense strand
uggugcuggucaaggacaa

SEQ ID NO: 2366467 - RNA, 19 nt, Homo sapiens
  misc_RNA (1)...(19): siRNA sense strand
ggagacugcgcuagcaaaa

SEQ ID NO: 2366468 - RNA, 19 nt, Homo sapiens
  misc_RNA (1)...(19): siRNA sense strand
acacagagaacacuggaca

SEQ ID NO: 2366469 - RNA, 19 nt, Homo sapiens
  misc_RNA (1)...(19): siRNA sense strand
agagccaagccgaguacaa

SEQ ID NO: 2366470 - RNA, 19 nt, Homo sapiens
  misc_RNA (1)...(19): siRNA sense strand
ggcugaaaaccgagcacaa

SEQ ID NO: 2366471 - RNA, 19 nt, Homo sapiens
  misc_RNA (1)...(19): siRNA sense strand
auaccagaagaaacagaaa

SEQ ID NO: 2366472 - RNA, 19 nt, Homo sapiens
  misc_RNA (1)...(19): siRNA sense strand
ucacagauauaaaugacca

SEQ ID NO: 2366473 - RNA, 19 nt, Homo sapiens
  misc_RNA (1)...(19): siRNA sense strand
cagaguucccagagaagga

SEQ ID NO: 2366474 - RNA, 19 nt, Homo sapiens
  misc_RNA (1)...(19): siRNA sense strand
agguacaggugcccgagaa

SEQ ID NO: 2366475 - RNA, 19 nt, Homo sapiens
  misc_RNA (1)...(19): siRNA sense strand
ccauauuauaacguggaaa

SEQ ID NO: 2366476 - RNA, 19 nt, Homo sapiens
  misc_RNA (1)...(19): siRNA sense strand
cgccacagacagagacuca

SEQ ID NO: 2366477 - RNA, 19 nt, Homo sapiens
  misc_RNA (1)...(19): siRNA sense strand
ggcugguggugcuggucaa

SEQ ID NO: 2366478 - RNA, 19 nt, Homo sapiens
  misc_RNA (1)...(19): siRNA sense strand
cguacaaccaccagcacaa

SEQ ID NO: 2366479 - RNA, 19 nt, Homo sapiens
  misc_RNA (1)...(19): siRNA sense strand
cgaaagaaguggguggacu

SEQ ID NO: 2366480 - RNA, 19 nt, Homo sapiens
  misc_RNA (1)...(19): siRNA sense strand
cggaacauggacuggguuu

SEQ ID NO: 2366481 - RNA, 19 nt, Homo sapiens
  misc_RNA (1)...(19): siRNA sense strand
gugcaguccuugugugcca

SEQ ID NO: 2366482 - RNA, 19 nt, Homo sapiens
  misc_RNA (1)...(19): siRNA sense strand
ccguauuggaggagacaga

SEQ ID NO: 2366483 - RNA, 19 nt, Homo sapiens
  misc_RNA (1)...(19): siRNA sense strand
ugacaaaggaccugggacu

SEQ ID NO: 2366484 - RNA, 19 nt, Homo sapiens
  misc_RNA (1)...(19): siRNA sense strand
guauuggaggagacagaaa

SEQ ID NO: 2366485 - RNA, 19 nt, Homo sapiens
  misc_RNA (1)...(19): siRNA sense strand
cuugcgagucagagauaua

SEQ ID NO: 2366486 - RNA, 19 nt, Homo sapiens
  misc_RNA (1)...(19): siRNA sense strand
cacaagucccugagaacaa

SEQ ID NO: 2366487 - RNA, 19 nt, Homo sapiens
  misc_RNA (1)...(19): siRNA sense strand
cgggaggcucagaaacaaa

SEQ ID NO: 2366488 - RNA, 19 nt, Homo sapiens
  misc_RNA (1)...(19): siRNA sense strand
agagcagagccgaguacaa

SEQ ID NO: 2366489 - RNA, 19 nt, Homo sapiens
  misc_RNA (1)...(19): siRNA sense strand
cugagagagaaauggaaga

SEQ ID NO: 2366490 - RNA, 19 nt, Homo sapiens
  misc_RNA (1)...(19): siRNA sense strand
cggaauucccugccagaga

SEQ ID NO: 2366491 - RNA, 19 nt, Homo sapiens
  misc_RNA (1)...(19): siRNA sense strand
ggacccuaucccagagcua

SEQ ID NO: 2366492 - RNA, 19 nt, Homo sapiens
  misc_RNA (1)...(19): siRNA sense strand
cagggcacugagagagaaa

SEQ ID NO: 2366493 - RNA, 19 nt, Homo sapiens
  misc_RNA (1)...(19): siRNA sense strand
agacagagacucaggcauc

SEQ ID NO: 2366494 - RNA, 19 nt, Homo sapiens
  misc_RNA (1)...(19): siRNA sense strand
uacagaugguggaggccua

SEQ ID NO: 2366495 - RNA, 19 nt, Homo sapiens
  misc_RNA (1)...(19): siRNA sense strand
ccuccgagauucagaucca

SEQ ID NO: 2366496 - RNA, 19 nt, Homo sapiens
  misc_RNA (1)...(19): siRNA sense strand
ccuucgaaauaaacgcaau

SEQ ID NO: 2366497 - RNA, 19 nt, Homo sapiens
  misc_RNA (1)...(19): siRNA sense strand
aaacgcaaucacaggagaa

SEQ ID NO: 2366498 - RNA, 19 nt, Homo sapiens
  misc_RNA (1)...(19): siRNA sense strand
uacuaugccaggaaagaua

SEQ ID NO: 2366499 - RNA, 19 nt, Homo sapiens
  misc_RNA (1)...(19): siRNA sense strand
acuaaaguacagaacaaga

SEQ ID NO: 2366500 - RNA, 19 nt, Homo sapiens
  misc_RNA (1)...(19): siRNA sense strand
uuucaaagggaacagacaa

SEQ ID NO: 2366501 - RNA, 19 nt, Homo sapiens
  misc_RNA (1)...(19): siRNA sense strand
cggagcuggugcuagacaa

SEQ ID NO: 2366502 - RNA, 19 nt, Homo sapiens
  misc_RNA (1)...(19): siRNA sense strand
cgccacagacagagacuca

SEQ ID NO: 2366503 - RNA, 19 nt, Homo sapiens
  misc_RNA (1)...(19): siRNA sense strand
gguugauguaacagauaua

SEQ ID NO: 2366504 - RNA, 19 nt, Homo sapiens
  misc_RNA (1)...(19): siRNA sense strand
aggauuagagacagagauu

SEQ ID NO: 2366505 - RNA, 19 nt, Homo sapiens
  misc_RNA (1)...(19): siRNA sense strand
gaggaaaccgagagaggca

SEQ ID NO: 2366506 - RNA, 19 nt, Homo sapiens
  misc_RNA (1)...(19): siRNA sense strand
cggaaguaauggggaaaua

SEQ ID NO: 2366507 - RNA, 19 nt, Homo sapiens
  misc_RNA (1)...(19): siRNA sense strand
auuucuagacagagagauu

SEQ ID NO: 2366508 - RNA, 19 nt, Homo sapiens
  misc_RNA (1)...(19): siRNA sense strand
gcuggaucgggaagagaua

SEQ ID NO: 2366509 - RNA, 19 nt, Homo sapiens
  misc_RNA (1)...(19): siRNA sense strand
gcaccaacgcccaggucau

SEQ ID NO: 2366510 - RNA, 19 nt, Homo sapiens
  misc_RNA (1)...(19): siRNA sense strand
augagaaauuggaccgaga

SEQ ID NO: 2366511 - RNA, 19 nt, Homo sapiens
  misc_RNA (1)...(19): siRNA sense strand
cauuaacuauucaggccaa

SEQ ID NO: 2366512 - RNA, 19 nt, Homo sapiens
  misc_RNA (1)...(19): siRNA sense strand
cuuuggaucgagagaggaa

SEQ ID NO: 2366513 - RNA, 19 nt, Homo sapiens
  misc_RNA (1)...(19): siRNA sense strand
ggaaagacagugugcucca

SEQ ID NO: 2366514 - RNA, 19 nt, Homo sapiens
  misc_RNA (1)...(19): siRNA sense strand
ggacccuaucccagagcua

SEQ ID NO: 2366515 - RNA, 19 nt, Homo sapiens
  misc_RNA (1)...(19): siRNA sense strand
ccuagagagugcacaggau

SEQ ID NO: 2366516 - RNA, 19 nt, Homo sapiens
  misc_RNA (1)...(19): siRNA sense strand
gcaauuggacuaugaggca

SEQ ID NO: 2366517 - RNA, 19 nt, Homo sapiens
  misc_RNA (1)...(19): siRNA sense strand
caggcagggaaguggaaga

SEQ ID NO: 2366518 - RNA, 19 nt, Homo sapiens
  misc_RNA (1)...(19): siRNA sense strand
ggaacaauggaaagacagu

SEQ ID NO: 2366519 - RNA, 19 nt, Homo sapiens
  misc_RNA (1)...(19): siRNA sense strand
gcagaaaacucacccgaga

SEQ ID NO: 2366520 - RNA, 19 nt, Homo sapiens
  misc_RNA (1)...(19): siRNA sense strand
uggugcuggucaaggacaa

SEQ ID NO: 2366521 - RNA, 19 nt, Homo sapiens
  misc_RNA (1)...(19): siRNA sense strand
ggcugaaaaccgagcacaa

SEQ ID NO: 2366522 - RNA, 19 nt, Homo sapiens
  misc_RNA (1)...(19): siRNA sense strand
caguaugaggugugccuga

SEQ ID NO: 2366523 - RNA, 19 nt, Homo sapiens
  misc_RNA (1)...(19): siRNA sense strand
ggcugguggugcuggucaa

SEQ ID NO: 2366524 - RNA, 19 nt, Homo sapiens
  misc_RNA (1)...(19): siRNA sense strand
agauugaccaggaggccua

SEQ ID NO: 2366525 - RNA, 19 nt, Homo sapiens
  misc_RNA (1)...(19): siRNA sense strand
aggagauucagaagcauaa

SEQ ID NO: 2366526 - RNA, 19 nt, Homo sapiens
  misc_RNA (1)...(19): siRNA sense strand
accuggaauucgugggcaa

SEQ ID NO: 2366527 - RNA, 19 nt, Homo sapiens
  misc_RNA (1)...(19): siRNA sense strand
acagaaaacccaaguggaa

SEQ ID NO: 2366528 - RNA, 19 nt, Homo sapiens
  misc_RNA (1)...(19): siRNA sense strand
uggagaagaugcaacggau

SEQ ID NO: 2366529 - RNA, 19 nt, Homo sapiens
  misc_RNA (1)...(19): siRNA sense strand
acaaauucgucauuggcca

SEQ ID NO: 2366530 - RNA, 19 nt, Homo sapiens
  misc_RNA (1)...(19): siRNA sense strand
gcuacgaagugaagcccuu

SEQ ID NO: 2366531 - RNA, 19 nt, Homo sapiens
  misc_RNA (1)...(19): siRNA sense strand
gaguauggcaagaagaaac

SEQ ID NO: 2366532 - RNA, 19 nt, Homo sapiens
  misc_RNA (1)...(19): siRNA sense strand
gcgacaaguggcuggucau

SEQ ID NO: 2366533 - RNA, 19 nt, Homo sapiens
  misc_RNA (1)...(19): siRNA sense strand
acaucuggcuggacgccua

SEQ ID NO: 2366534 - RNA, 19 nt, Homo sapiens
  misc_RNA (1)...(19): siRNA sense strand
ccacaaagacccagacgug

SEQ ID NO: 2366535 - RNA, 19 nt, Homo sapiens
  misc_RNA (1)...(19): siRNA sense strand
cgaguauggcaagaagaaa

SEQ ID NO: 2366536 - RNA, 19 nt, Homo sapiens
  misc_RNA (1)...(19): siRNA sense strand
ggcacaagcugcacgggaa

SEQ ID NO: 2366537 - RNA, 19 nt, Homo sapiens
  misc_RNA (1)...(19): siRNA sense strand
ugaccaaggacuacggcaa

SEQ ID NO: 2366538 - RNA, 19 nt, Homo sapiens
  misc_RNA (1)...(19): siRNA sense strand
uguucaauaagaaggagaa

SEQ ID NO: 2366539 - RNA, 19 nt, Homo sapiens
  misc_RNA (1)...(19): siRNA sense strand
gcaagauggcacugaucca

SEQ ID NO: 2366540 - RNA, 19 nt, Homo sapiens
  misc_RNA (1)...(19): siRNA sense strand
ggcacaagcugcacgggaa

SEQ ID NO: 2366541 - RNA, 19 nt, Homo sapiens
  misc_RNA (1)...(19): siRNA sense strand
ugaccaaggacuacggcaa

SEQ ID NO: 2366542 - RNA, 19 nt, Homo sapiens
  misc_RNA (1)...(19): siRNA sense strand
uguucaauaagaaggagaa

SEQ ID NO: 2366543 - RNA, 19 nt, Homo sapiens
  misc_RNA (1)...(19): siRNA sense strand
gcaagauggcacugaucca

SEQ ID NO: 2366544 - RNA, 19 nt, Homo sapiens
  misc_RNA (1)...(19): siRNA sense strand
ggcacaagcugcacgggaa

SEQ ID NO: 2366545 - RNA, 19 nt, Homo sapiens
  misc_RNA (1)...(19): siRNA sense strand
ugaccaaggacuacggcaa

SEQ ID NO: 2366546 - RNA, 19 nt, Homo sapiens
  misc_RNA (1)...(19): siRNA sense strand
uguucaauaagaaggagaa

SEQ ID NO: 2366547 - RNA, 19 nt, Homo sapiens
  misc_RNA (1)...(19): siRNA sense strand
gcaagauggcacugaucca

SEQ ID NO: 2366548 - RNA, 19 nt, Homo sapiens
  misc_RNA (1)...(19): siRNA sense strand
ggcacaagcugcacgggaa

SEQ ID NO: 2366549 - RNA, 19 nt, Homo sapiens
  misc_RNA (1)...(19): siRNA sense strand
ugaccaaggacuacggcaa

SEQ ID NO: 2366550 - RNA, 19 nt, Homo sapiens
  misc_RNA (1)...(19): siRNA sense strand
uguucaauaagaaggagaa

SEQ ID NO: 2366551 - RNA, 19 nt, Homo sapiens
  misc_RNA (1)...(19): siRNA sense strand
gcaagauggcacugaucca

SEQ ID NO: 2366552 - RNA, 19 nt, Homo sapiens
  misc_RNA (1)...(19): siRNA sense strand
ccgaguuaguucuggacaa

SEQ ID NO: 2366553 - RNA, 19 nt, Homo sapiens
  misc_RNA (1)...(19): siRNA sense strand
aaucaaaagucuggagaaa

SEQ ID NO: 2366554 - RNA, 19 nt, Homo sapiens
  misc_RNA (1)...(19): siRNA sense strand
cuagaaagugcgaaggauu

SEQ ID NO: 2366555 - RNA, 19 nt, Homo sapiens
  misc_RNA (1)...(19): siRNA sense strand
cgggagguuccgagacaaa

SEQ ID NO: 2366556 - RNA, 19 nt, Homo sapiens
  misc_RNA (1)...(19): siRNA sense strand
gaagaaaugcagagcggga

SEQ ID NO: 2366557 - RNA, 19 nt, Homo sapiens
  misc_RNA (1)...(19): siRNA sense strand
ggguggugguuguggacau

SEQ ID NO: 2366558 - RNA, 19 nt, Homo sapiens
  misc_RNA (1)...(19): siRNA sense strand
cgccagagaccgugguuau

SEQ ID NO: 2366559 - RNA, 19 nt, Homo sapiens
  misc_RNA (1)...(19): siRNA sense strand
ggacauaaacacuggggau

SEQ ID NO: 2366560 - RNA, 19 nt, Homo sapiens
  misc_RNA (1)...(19): siRNA sense strand
gggcugaaggugagagaac

SEQ ID NO: 2366561 - RNA, 19 nt, Homo sapiens
  misc_RNA (1)...(19): siRNA sense strand
ccucagaagauauucgcaa

SEQ ID NO: 2366562 - RNA, 19 nt, Homo sapiens
  misc_RNA (1)...(19): siRNA sense strand
gugaaacacuagacaggga

SEQ ID NO: 2366563 - RNA, 19 nt, Homo sapiens
  misc_RNA (1)...(19): siRNA sense strand
ccuagaaaucccagagaac

SEQ ID NO: 2366564 - RNA, 19 nt, Homo sapiens
  misc_RNA (1)...(19): siRNA sense strand
ggcaaaaggucuugggaag

SEQ ID NO: 2366565 - RNA, 19 nt, Homo sapiens
  misc_RNA (1)...(19): siRNA sense strand
agaagauauucgcaagaca

SEQ ID NO: 2366566 - RNA, 19 nt, Homo sapiens
  misc_RNA (1)...(19): siRNA sense strand
gaaauuacuuuaagagcac

SEQ ID NO: 2366567 - RNA, 19 nt, Homo sapiens
  misc_RNA (1)...(19): siRNA sense strand
ucauaauucacgugauaga

SEQ ID NO: 2366568 - RNA, 19 nt, Homo sapiens
  misc_RNA (1)...(19): siRNA sense strand
aggauuuagauguaggaau

SEQ ID NO: 2366569 - RNA, 19 nt, Homo sapiens
  misc_RNA (1)...(19): siRNA sense strand
gaggugaagauucgggaga

SEQ ID NO: 2366570 - RNA, 19 nt, Homo sapiens
  misc_RNA (1)...(19): siRNA sense strand
aggaaucaaugcuguaaaa

SEQ ID NO: 2366571 - RNA, 19 nt, Homo sapiens
  misc_RNA (1)...(19): siRNA sense strand
aggugaagauucgggagaa

SEQ ID NO: 2366572 - RNA, 19 nt, Homo sapiens
  misc_RNA (1)...(19): siRNA sense strand
aauuacuacacguuggaaa

SEQ ID NO: 2366573 - RNA, 19 nt, Homo sapiens
  misc_RNA (1)...(19): siRNA sense strand
acaaaugcuccuagaaauc

SEQ ID NO: 2366574 - RNA, 19 nt, Homo sapiens
  misc_RNA (1)...(19): siRNA sense strand
cugaauuugagcaggcuuu

SEQ ID NO: 2366575 - RNA, 19 nt, Homo sapiens
  misc_RNA (1)...(19): siRNA sense strand
uggugcuggucaaggacaa

SEQ ID NO: 2366576 - RNA, 19 nt, Homo sapiens
  misc_RNA (1)...(19): siRNA sense strand
ggguggucucuaaugauaa

SEQ ID NO: 2366577 - RNA, 19 nt, Homo sapiens
  misc_RNA (1)...(19): siRNA sense strand
gcuucaggucagggauaua

SEQ ID NO: 2366578 - RNA, 19 nt, Homo sapiens
  misc_RNA (1)...(19): siRNA sense strand
uggugguuguggacauuaa

SEQ ID NO: 2366579 - RNA, 19 nt, Homo sapiens
  misc_RNA (1)...(19): siRNA sense strand
ggcugaaaaccgagcacaa

SEQ ID NO: 2366580 - RNA, 19 nt, Homo sapiens
  misc_RNA (1)...(19): siRNA sense strand
ucugaaaccuggagcuuuu

SEQ ID NO: 2366581 - RNA, 19 nt, Homo sapiens
  misc_RNA (1)...(19): siRNA sense strand
ggauuugcucuuaagugaa

SEQ ID NO: 2366582 - RNA, 19 nt, Homo sapiens
  misc_RNA (1)...(19): siRNA sense strand
ggcugguggugcuggucaa

SEQ ID NO: 2366583 - RNA, 19 nt, Homo sapiens
  misc_RNA (1)...(19): siRNA sense strand
aggcaaaaggucuugggaa

SEQ ID NO: 2366584 - RNA, 19 nt, Homo sapiens
  misc_RNA (1)...(19): siRNA sense strand
gugcgaaggauuuagaugu

SEQ ID NO: 2366585 - RNA, 19 nt, Homo sapiens
  misc_RNA (1)...(19): siRNA sense strand
cggcagugucagcgcuaca

SEQ ID NO: 2366586 - RNA, 19 nt, Homo sapiens
  misc_RNA (1)...(19): siRNA sense strand
gagaaaugcuagacaggga

SEQ ID NO: 2366587 - RNA, 19 nt, Homo sapiens
  misc_RNA (1)...(19): siRNA sense strand
uggaacaaacagugaacua

SEQ ID NO: 2366588 - RNA, 19 nt, Homo sapiens
  misc_RNA (1)...(19): siRNA sense strand
cugaguuaguucuggacaa

SEQ ID NO: 2366589 - RNA, 19 nt, Homo sapiens
  misc_RNA (1)...(19): siRNA sense strand
uggcaaagacccugggacu

SEQ ID NO: 2366590 - RNA, 19 nt, Homo sapiens
  misc_RNA (1)...(19): siRNA sense strand
ccucagaagauauucgcaa

SEQ ID NO: 2366591 - RNA, 19 nt, Homo sapiens
  misc_RNA (1)...(19): siRNA sense strand
cuugaaagugcaaaggauu

SEQ ID NO: 2366592 - RNA, 19 nt, Homo sapiens
  misc_RNA (1)...(19): siRNA sense strand
cgggagcuuuguaggaaau

SEQ ID NO: 2366593 - RNA, 19 nt, Homo sapiens
  misc_RNA (1)...(19): siRNA sense strand
aauccagacaauaggaaau

SEQ ID NO: 2366594 - RNA, 19 nt, Homo sapiens
  misc_RNA (1)...(19): siRNA sense strand
uugaaagugcaaaggauuu

SEQ ID NO: 2366595 - RNA, 19 nt, Homo sapiens
  misc_RNA (1)...(19): siRNA sense strand
agaagauauucgcaagaca

SEQ ID NO: 2366596 - RNA, 19 nt, Homo sapiens
  misc_RNA (1)...(19): siRNA sense strand
aggauuuagauguaggaau

SEQ ID NO: 2366597 - RNA, 19 nt, Homo sapiens
  misc_RNA (1)...(19): siRNA sense strand
agagcagagccgaguacaa

SEQ ID NO: 2366598 - RNA, 19 nt, Homo sapiens
  misc_RNA (1)...(19): siRNA sense strand
cuccagagacugugguuau

SEQ ID NO: 2366599 - RNA, 19 nt, Homo sapiens
  misc_RNA (1)...(19): siRNA sense strand
caauccagacaauaggaaa

SEQ ID NO: 2366600 - RNA, 19 nt, Homo sapiens
  misc_RNA (1)...(19): siRNA sense strand
aggaaucaaugcuguaaaa

SEQ ID NO: 2366601 - RNA, 19 nt, Homo sapiens
  misc_RNA (1)...(19): siRNA sense strand
guucuaucccggaggacau

SEQ ID NO: 2366602 - RNA, 19 nt, Homo sapiens
  misc_RNA (1)...(19): siRNA sense strand
cuuagaaaucccagagaac

SEQ ID NO: 2366603 - RNA, 19 nt, Homo sapiens
  misc_RNA (1)...(19): siRNA sense strand
aaauaagagucaauccaga

SEQ ID NO: 2366604 - RNA, 19 nt, Homo sapiens
  misc_RNA (1)...(19): siRNA sense strand
agguagugaagucgaagaa

SEQ ID NO: 2366605 - RNA, 19 nt, Homo sapiens
  misc_RNA (1)...(19): siRNA sense strand
ugacauuacuuuaacagca

SEQ ID NO: 2366606 - RNA, 19 nt, Homo sapiens
  misc_RNA (1)...(19): siRNA sense strand
gcuccaggucagggauaua

SEQ ID NO: 2366607 - RNA, 19 nt, Homo sapiens
  misc_RNA (1)...(19): siRNA sense strand
agaaaacacuccagagacu

SEQ ID NO: 2366608 - RNA, 19 nt, Homo sapiens
  misc_RNA (1)...(19): siRNA sense strand
gaggaauugcagagcggga

SEQ ID NO: 2366609 - RNA, 19 nt, Homo sapiens
  misc_RNA (1)...(19): siRNA sense strand
uggaaaaucuacagucaga

SEQ ID NO: 2366610 - RNA, 19 nt, Homo sapiens
  misc_RNA (1)...(19): siRNA sense strand
uggugcuggucaaggacaa

SEQ ID NO: 2366611 - RNA, 19 nt, Homo sapiens
  misc_RNA (1)...(19): siRNA sense strand
gggugguuucuaaugauaa

SEQ ID NO: 2366612 - RNA, 19 nt, Homo sapiens
  misc_RNA (1)...(19): siRNA sense strand
uggugguuguagauauuaa

SEQ ID NO: 2366613 - RNA, 19 nt, Homo sapiens
  misc_RNA (1)...(19): siRNA sense strand
acagagagaccgcuggaca

SEQ ID NO: 2366614 - RNA, 19 nt, Homo sapiens
  misc_RNA (1)...(19): siRNA sense strand
uagugaagucgaagaaaau

SEQ ID NO: 2366615 - RNA, 19 nt, Homo sapiens
  misc_RNA (1)...(19): siRNA sense strand
ggacacaaacacuggggau

SEQ ID NO: 2366616 - RNA, 19 nt, Homo sapiens
  misc_RNA (1)...(19): siRNA sense strand
cagucagaauucaggugau

SEQ ID NO: 2366617 - RNA, 19 nt, Homo sapiens
  misc_RNA (1)...(19): siRNA sense strand
uuucaggauacgagacaga

SEQ ID NO: 2366618 - RNA, 19 nt, Homo sapiens
  misc_RNA (1)...(19): siRNA sense strand
ggcugguggugcuggucaa

SEQ ID NO: 2366619 - RNA, 19 nt, Homo sapiens
  misc_RNA (1)...(19): siRNA sense strand
cagagaaagcagagcggaa

SEQ ID NO: 2366620 - RNA, 19 nt, Homo sapiens
  misc_RNA (1)...(19): siRNA sense strand
agacuuagauguaggccaa

SEQ ID NO: 2366621 - RNA, 19 nt, Homo sapiens
  misc_RNA (1)...(19): siRNA sense strand
cguucugauucaagugaua

SEQ ID NO: 2366622 - RNA, 19 nt, Homo sapiens
  misc_RNA (1)...(19): siRNA sense strand
acacaggagucaacggaga

SEQ ID NO: 2366623 - RNA, 19 nt, Homo sapiens
  misc_RNA (1)...(19): siRNA sense strand
agaucuugauucaggagaa

SEQ ID NO: 2366624 - RNA, 19 nt, Homo sapiens
  misc_RNA (1)...(19): siRNA sense strand
cgauaaugccccugaauuu

SEQ ID NO: 2366625 - RNA, 19 nt, Homo sapiens
  misc_RNA (1)...(19): siRNA sense strand
acaaagcgcuggaccgaga

SEQ ID NO: 2366626 - RNA, 19 nt, Homo sapiens
  misc_RNA (1)...(19): siRNA sense strand
ucgaaguccuggaugucaa

SEQ ID NO: 2366627 - RNA, 19 nt, Homo sapiens
  misc_RNA (1)...(19): siRNA sense strand
aggagucaacggagagauu

SEQ ID NO: 2366628 - RNA, 19 nt, Homo sapiens
  misc_RNA (1)...(19): siRNA sense strand
augagaaauuggaccguga

SEQ ID NO: 2366629 - RNA, 19 nt, Homo sapiens
  misc_RNA (1)...(19): siRNA sense strand
cagagcuggugcuggacaa

SEQ ID NO: 2366630 - RNA, 19 nt, Homo sapiens
  misc_RNA (1)...(19): siRNA sense strand
ggacaaagcgcuggaccga

SEQ ID NO: 2366631 - RNA, 19 nt, Homo sapiens
  misc_RNA (1)...(19): siRNA sense strand
ggacccuaucccagagcua

SEQ ID NO: 2366632 - RNA, 19 nt, Homo sapiens
  misc_RNA (1)...(19): siRNA sense strand
gcggaauacaacaucacua

SEQ ID NO: 2366633 - RNA, 19 nt, Homo sapiens
  misc_RNA (1)...(19): siRNA sense strand
ugauagaugugaacgacca

SEQ ID NO: 2366634 - RNA, 19 nt, Homo sapiens
  misc_RNA (1)...(19): siRNA sense strand
ggugaaaguaucagagagc

SEQ ID NO: 2366635 - RNA, 19 nt, Homo sapiens
  misc_RNA (1)...(19): siRNA sense strand
uggugcuggucaaggacaa

SEQ ID NO: 2366636 - RNA, 19 nt, Homo sapiens
  misc_RNA (1)...(19): siRNA sense strand
ccaaaacaauauugagaac

SEQ ID NO: 2366637 - RNA, 19 nt, Homo sapiens
  misc_RNA (1)...(19): siRNA sense strand
gugcccugggaaagaaaua

SEQ ID NO: 2366638 - RNA, 19 nt, Homo sapiens
  misc_RNA (1)...(19): siRNA sense strand
gguuaggguuguuuccaga

SEQ ID NO: 2366639 - RNA, 19 nt, Homo sapiens
  misc_RNA (1)...(19): siRNA sense strand
agaccacuagacagagaaa

SEQ ID NO: 2366640 - RNA, 19 nt, Homo sapiens
  misc_RNA (1)...(19): siRNA sense strand
agagaaagcagagcggaau

SEQ ID NO: 2366641 - RNA, 19 nt, Homo sapiens
  misc_RNA (1)...(19): siRNA sense strand
ggcugguggugcuggucaa

SEQ ID NO: 2366642 - RNA, 19 nt, Homo sapiens
  misc_RNA (1)...(19): siRNA sense strand
caguagugacagaaagaua

SEQ ID NO: 2366643 - RNA, 19 nt, Homo sapiens
  misc_RNA (1)...(19): siRNA sense strand
ucaucaagguguuggacau

SEQ ID NO: 2366644 - RNA, 19 nt, Homo sapiens
  misc_RNA (1)...(19): siRNA sense strand
ucgaaauagcuuuggacuu

SEQ ID NO: 2366645 - RNA, 19 nt, Homo sapiens
  misc_RNA (1)...(19): siRNA sense strand
augagaaacuagaccgaga

SEQ ID NO: 2366646 - RNA, 19 nt, Homo sapiens
  misc_RNA (1)...(19): siRNA sense strand
gggcacucgaucugcgaaa

SEQ ID NO: 2366647 - RNA, 19 nt, Homo sapiens
  misc_RNA (1)...(19): siRNA sense strand
augcaggaaacuauggaaa

SEQ ID NO: 2366648 - RNA, 19 nt, Homo sapiens
  misc_RNA (1)...(19): siRNA sense strand
cgucgauuacaaagagaau

SEQ ID NO: 2366649 - RNA, 19 nt, Homo sapiens
  misc_RNA (1)...(19): siRNA sense strand
acagaaagauauacccaga

SEQ ID NO: 2366650 - RNA, 19 nt, Homo sapiens
  misc_RNA (1)...(19): siRNA sense strand
cuauaaauauucaggcaac

SEQ ID NO: 2366651 - RNA, 19 nt, Homo sapiens
  misc_RNA (1)...(19): siRNA sense strand
gggacaaaugaguucaaau

SEQ ID NO: 2366652 - RNA, 19 nt, Homo sapiens
  misc_RNA (1)...(19): siRNA sense strand
ccgacaguagugacagaaa

SEQ ID NO: 2366653 - RNA, 19 nt, Homo sapiens
  misc_RNA (1)...(19): siRNA sense strand
uggcagaggaaacagaaau

SEQ ID NO: 2366654 - RNA, 19 nt, Homo sapiens
  misc_RNA (1)...(19): siRNA sense strand
ugauaaugccccugaguuu

SEQ ID NO: 2366655 - RNA, 19 nt, Homo sapiens
  misc_RNA (1)...(19): siRNA sense strand
gacaggagguuccgggaca

SEQ ID NO: 2366656 - RNA, 19 nt, Homo sapiens
  misc_RNA (1)...(19): siRNA sense strand
ggaaacagaaauuggcucu

SEQ ID NO: 2366657 - RNA, 19 nt, Homo sapiens
  misc_RNA (1)...(19): siRNA sense strand
cgguuugagcuguguguca

SEQ ID NO: 2366658 - RNA, 19 nt, Homo sapiens
  misc_RNA (1)...(19): siRNA sense strand
gagcuuuagauuaugaaca

SEQ ID NO: 2366659 - RNA, 19 nt, Homo sapiens
  misc_RNA (1)...(19): siRNA sense strand
gggaaguuaauuugagauc

SEQ ID NO: 2366660 - RNA, 19 nt, Homo sapiens
  misc_RNA (1)...(19): siRNA sense strand
uggugcuggucaaggacaa

SEQ ID NO: 2366661 - RNA, 19 nt, Homo sapiens
  misc_RNA (1)...(19): siRNA sense strand
guggcagaggaaacagaaa

SEQ ID NO: 2366662 - RNA, 19 nt, Homo sapiens
  misc_RNA (1)...(19): siRNA sense strand
ucuaauggagagugcucaa

SEQ ID NO: 2366663 - RNA, 19 nt, Homo sapiens
  misc_RNA (1)...(19): siRNA sense strand
uugaaguaauacaguccua

SEQ ID NO: 2366664 - RNA, 19 nt, Homo sapiens
  misc_RNA (1)...(19): siRNA sense strand
agagccaagccgaguacaa

SEQ ID NO: 2366665 - RNA, 19 nt, Homo sapiens
  misc_RNA (1)...(19): siRNA sense strand
aguagugacagaaagauau

SEQ ID NO: 2366666 - RNA, 19 nt, Homo sapiens
  misc_RNA (1)...(19): siRNA sense strand
ggauauaaacgacaaccca

SEQ ID NO: 2366667 - RNA, 19 nt, Homo sapiens
  misc_RNA (1)...(19): siRNA sense strand
ggcugaaaaccgaguacaa

SEQ ID NO: 2366668 - RNA, 19 nt, Homo sapiens
  misc_RNA (1)...(19): siRNA sense strand
cgccacagacagagacuca

SEQ ID NO: 2366669 - RNA, 19 nt, Homo sapiens
  misc_RNA (1)...(19): siRNA sense strand
ggcugguggugcuggucaa

SEQ ID NO: 2366670 - RNA, 19 nt, Homo sapiens
  misc_RNA (1)...(19): siRNA sense strand
ucaaauuucugaagccgau

SEQ ID NO: 2366671 - RNA, 19 nt, Homo sapiens
  misc_RNA (1)...(19): siRNA sense strand
ggguaguuucugaggauaa

SEQ ID NO: 2366672 - RNA, 19 nt, Homo sapiens
  misc_RNA (1)...(19): siRNA sense strand
ggauuuagacacugggaca

SEQ ID NO: 2366673 - RNA, 19 nt, Homo sapiens
  misc_RNA (1)...(19): siRNA sense strand
cgggaggcucugaaaguaa

SEQ ID NO: 2366674 - RNA, 19 nt, Homo sapiens
  misc_RNA (1)...(19): siRNA sense strand
acacagaacuggaucgcga

SEQ ID NO: 2366675 - RNA, 19 nt, Homo sapiens
  misc_RNA (1)...(19): siRNA sense strand
agaccagagccgaguacaa

SEQ ID NO: 2366676 - RNA, 19 nt, Homo sapiens
  misc_RNA (1)...(19): siRNA sense strand
ggcuaguggugcuggucaa

SEQ ID NO: 2366677 - RNA, 19 nt, Homo sapiens
  misc_RNA (1)...(19): siRNA sense strand
guuuaggauuagagaccga

SEQ ID NO: 2366678 - RNA, 19 nt, Homo sapiens
  misc_RNA (1)...(19): siRNA sense strand
uggugcuggucaaggacaa

SEQ ID NO: 2366679 - RNA, 19 nt, Homo sapiens
  misc_RNA (1)...(19): siRNA sense strand
agccaggacucuaggagga

SEQ ID NO: 2366680 - RNA, 19 nt, Homo sapiens
  misc_RNA (1)...(19): siRNA sense strand
ccgaggggauggcaggaaa

SEQ ID NO: 2366681 - RNA, 19 nt, Homo sapiens
  misc_RNA (1)...(19): siRNA sense strand
augagaagcuggaccggga

SEQ ID NO: 2366682 - RNA, 19 nt, Homo sapiens
  misc_RNA (1)...(19): siRNA sense strand
aguauuucgagcugaacua

SEQ ID NO: 2366683 - RNA, 19 nt, Homo sapiens
  misc_RNA (1)...(19): siRNA sense strand
ucuaggaggaaaucagaau

SEQ ID NO: 2366684 - RNA, 19 nt, Homo sapiens
  misc_RNA (1)...(19): siRNA sense strand
aggauaacgaacaaggcuu

SEQ ID NO: 2366685 - RNA, 19 nt, Homo sapiens
  misc_RNA (1)...(19): siRNA sense strand
gugcuggauguuaacgaua

SEQ ID NO: 2366686 - RNA, 19 nt, Homo sapiens
  misc_RNA (1)...(19): siRNA sense strand
gauuuagacacugggacaa

SEQ ID NO: 2366687 - RNA, 19 nt, Homo sapiens
  misc_RNA (1)...(19): siRNA sense strand
ggugcaaggagcuggguau

SEQ ID NO: 2366688 - RNA, 19 nt, Homo sapiens
  misc_RNA (1)...(19): siRNA sense strand
ccucgaaaggggaaggaaa

SEQ ID NO: 2366689 - RNA, 19 nt, Homo sapiens
  misc_RNA (1)...(19): siRNA sense strand
aggaaaagaaggaagaaca

SEQ ID NO: 2366690 - RNA, 19 nt, Homo sapiens
  misc_RNA (1)...(19): siRNA sense strand
ggaaggaaaagaaggaaga

SEQ ID NO: 2366691 - RNA, 19 nt, Homo sapiens
  misc_RNA (1)...(19): siRNA sense strand
agaaggaagaacaggucau

SEQ ID NO: 2366692 - RNA, 19 nt, Homo sapiens
  misc_RNA (1)...(19): siRNA sense strand
gagagaauguauuuggugu

SEQ ID NO: 2366693 - RNA, 19 nt, Homo sapiens
  misc_RNA (1)...(19): siRNA sense strand
cucgaaaggggaaggaaaa

SEQ ID NO: 2366694 - RNA, 19 nt, Homo sapiens
  misc_RNA (1)...(19): siRNA sense strand
ccgugugacuggugggaug

SEQ ID NO: 2366695 - RNA, 19 nt, Homo sapiens
  misc_RNA (1)...(19): siRNA sense strand
gguggcugaaggagagaau

SEQ ID NO: 2366696 - RNA, 19 nt, Homo sapiens
  misc_RNA (1)...(19): siRNA sense strand
cugaaggagagaauguauu

SEQ ID NO: 2366697 - RNA, 19 nt, Homo sapiens
  misc_RNA (1)...(19): siRNA sense strand
uggcugaaggagagaaugu

SEQ ID NO: 2366698 - RNA, 19 nt, Homo sapiens
  misc_RNA (1)...(19): siRNA sense strand
ucacugaucuuucuggcaa

SEQ ID NO: 2366699 - RNA, 19 nt, Homo sapiens
  misc_RNA (1)...(19): siRNA sense strand
ggagagaagcugaaggaga

SEQ ID NO: 2366700 - RNA, 19 nt, Homo sapiens
  misc_RNA (1)...(19): siRNA sense strand
gaagaaacuuuaaagguca

SEQ ID NO: 2366701 - RNA, 19 nt, Homo sapiens
  misc_RNA (1)...(19): siRNA sense strand
gcucauugccacaguacaa

SEQ ID NO: 2366702 - RNA, 19 nt, Homo sapiens
  misc_RNA (1)...(19): siRNA sense strand
cguuagaauugaaaguaga

SEQ ID NO: 2366703 - RNA, 19 nt, Homo sapiens
  misc_RNA (1)...(19): siRNA sense strand
ccagaaacugauugaagaa

SEQ ID NO: 2366704 - RNA, 19 nt, Homo sapiens
  misc_RNA (1)...(19): siRNA sense strand
cugcaaagagcuggagaua

SEQ ID NO: 2366705 - RNA, 19 nt, Homo sapiens
  misc_RNA (1)...(19): siRNA sense strand
ccauacuacccuagggcaa

SEQ ID NO: 2366706 - RNA, 19 nt, Homo sapiens
  misc_RNA (1)...(19): siRNA sense strand
gaagaaauaaagacggaga

SEQ ID NO: 2366707 - RNA, 19 nt, Homo sapiens
  misc_RNA (1)...(19): siRNA sense strand
agauggaaauacugaaaga

SEQ ID NO: 2366708 - RNA, 19 nt, Homo sapiens
  misc_RNA (1)...(19): siRNA sense strand
agccaaagaaggagcaaau

SEQ ID NO: 2366709 - RNA, 19 nt, Homo sapiens
  misc_RNA (1)...(19): siRNA sense strand
aguuauaaggcguuagaau

SEQ ID NO: 2366710 - RNA, 19 nt, Homo sapiens
  misc_RNA (1)...(19): siRNA sense strand
caauaaugucuuucaggaa

SEQ ID NO: 2366711 - RNA, 19 nt, Homo sapiens
  misc_RNA (1)...(19): siRNA sense strand
gguacauugacuauggaaa

SEQ ID NO: 2366712 - RNA, 19 nt, Homo sapiens
  misc_RNA (1)...(19): siRNA sense strand
aucaggaguuugagauaaa

SEQ ID NO: 2366713 - RNA, 19 nt, Homo sapiens
  misc_RNA (1)...(19): siRNA sense strand
auaugugagugaagggaau

SEQ ID NO: 2366714 - RNA, 19 nt, Homo sapiens
  misc_RNA (1)...(19): siRNA sense strand
acacagaagccaaggugau

SEQ ID NO: 2366715 - RNA, 19 nt, Homo sapiens
  misc_RNA (1)...(19): siRNA sense strand
aauugaaaguagagcagau

SEQ ID NO: 2366716 - RNA, 19 nt, Homo sapiens
  misc_RNA (1)...(19): siRNA sense strand
acgauaaaguggaagaugu

SEQ ID NO: 2366717 - RNA, 19 nt, Homo sapiens
  misc_RNA (1)...(19): siRNA sense strand
agauaauaugggcagaaua

SEQ ID NO: 2366718 - RNA, 19 nt, Homo sapiens
  misc_RNA (1)...(19): siRNA sense strand
gauggaaauugguugaaaa

SEQ ID NO: 2366719 - RNA, 19 nt, Homo sapiens
  misc_RNA (1)...(19): siRNA sense strand
aggaauuguuggagauuuu

SEQ ID NO: 2366720 - RNA, 19 nt, Homo sapiens
  misc_RNA (1)...(19): siRNA sense strand
aaaucaggaguuugagaua

SEQ ID NO: 2366721 - RNA, 19 nt, Homo sapiens
  misc_RNA (1)...(19): siRNA sense strand
aagaagaaauaaagacgga

SEQ ID NO: 2366722 - RNA, 19 nt, Homo sapiens
  misc_RNA (1)...(19): siRNA sense strand
augcagacaaggagauaau

SEQ ID NO: 2366723 - RNA, 19 nt, Homo sapiens
  misc_RNA (1)...(19): siRNA sense strand
aggacaguauugaguuuaa

SEQ ID NO: 2366724 - RNA, 19 nt, Homo sapiens
  misc_RNA (1)...(19): siRNA sense strand
gagagaagcugaaggagac

SEQ ID NO: 2366725 - RNA, 19 nt, Homo sapiens
  misc_RNA (1)...(19): siRNA sense strand
caagaaauggugaagccaa

SEQ ID NO: 2366726 - RNA, 19 nt, Homo sapiens
  misc_RNA (1)...(19): siRNA sense strand
ugaaaaugaugcaggcaau

SEQ ID NO: 2366727 - RNA, 19 nt, Homo sapiens
  misc_RNA (1)...(19): siRNA sense strand
caagcuaaguacaaggaca

SEQ ID NO: 2366728 - RNA, 19 nt, Homo sapiens
  misc_RNA (1)...(19): siRNA sense strand
uggauaaauguauggagaa

SEQ ID NO: 2366729 - RNA, 19 nt, Homo sapiens
  misc_RNA (1)...(19): siRNA sense strand
ggauaaauguauggagaag

SEQ ID NO: 2366730 - RNA, 19 nt, Homo sapiens
  misc_RNA (1)...(19): siRNA sense strand
gggcauagaucaaaccagu

SEQ ID NO: 2366731 - RNA, 19 nt, Homo sapiens
  misc_RNA (1)...(19): siRNA sense strand
ucagaagacgcaauggaua

SEQ ID NO: 2366732 - RNA, 19 nt, Homo sapiens
  misc_RNA (1)...(19): siRNA sense strand
gaagacaagaaauggugaa

SEQ ID NO: 2366733 - RNA, 19 nt, Homo sapiens
  misc_RNA (1)...(19): siRNA sense strand
gaugcaaaguacugaaaau

SEQ ID NO: 2366734 - RNA, 19 nt, Homo sapiens
  misc_RNA (1)...(19): siRNA sense strand
gaggaauaugagaugcuaa

SEQ ID NO: 2366735 - RNA, 19 nt, Homo sapiens
  misc_RNA (1)...(19): siRNA sense strand
guauggagaagacaagaaa

SEQ ID NO: 2366736 - RNA, 19 nt, Homo sapiens
  misc_RNA (1)...(19): siRNA sense strand
ugacuggaagugugauaaa

SEQ ID NO: 2366737 - RNA, 19 nt, Homo sapiens
  misc_RNA (1)...(19): siRNA sense strand
uuggauaaauguauggaga

SEQ ID NO: 2366738 - RNA, 19 nt, Homo sapiens
  misc_RNA (1)...(19): siRNA sense strand
gguuacugccauugauauu

SEQ ID NO: 2366739 - RNA, 19 nt, Homo sapiens
  misc_RNA (1)...(19): siRNA sense strand
aagaaauaaagacggagaa

SEQ ID NO: 2366740 - RNA, 19 nt, Homo sapiens
  misc_RNA (1)...(19): siRNA sense strand
aaacaagauuuauggugga

SEQ ID NO: 2366741 - RNA, 19 nt, Homo sapiens
  misc_RNA (1)...(19): siRNA sense strand
guauaaacuuuggggacua

SEQ ID NO: 2366742 - RNA, 19 nt, Homo sapiens
  misc_RNA (1)...(19): siRNA sense strand
cuaaguacaaggacaguau

SEQ ID NO: 2366743 - RNA, 19 nt, Homo sapiens
  misc_RNA (1)...(19): siRNA sense strand
gaguaauuuggaagaguca

SEQ ID NO: 2366744 - RNA, 19 nt, Homo sapiens
  misc_RNA (1)...(19): siRNA sense strand
uggacaagccaaagaagga

SEQ ID NO: 2366745 - RNA, 19 nt, Homo sapiens
  misc_RNA (1)...(19): siRNA sense strand
ucuggaaguugaugaguca

SEQ ID NO: 2366746 - RNA, 19 nt, Homo sapiens
  misc_RNA (1)...(19): siRNA sense strand
ccacaguacaagcuaagua

SEQ ID NO: 2366747 - RNA, 19 nt, Homo sapiens
  misc_RNA (1)...(19): siRNA sense strand
cugcuguggauuugacuaa

SEQ ID NO: 2366748 - RNA, 19 nt, Homo sapiens
  misc_RNA (1)...(19): siRNA sense strand
aucaugagagagaggaaua

SEQ ID NO: 2366749 - RNA, 19 nt, Homo sapiens
  misc_RNA (1)...(19): siRNA sense strand
ccaaaguggaucaguuuca

SEQ ID NO: 2366750 - RNA, 19 nt, Homo sapiens
  misc_RNA (1)...(19): siRNA sense strand
gaauguuucuugaugccaa

SEQ ID NO: 2366751 - RNA, 19 nt, Homo sapiens
  misc_RNA (1)...(19): siRNA sense strand
ugaugaaauccuagagaag

SEQ ID NO: 2366752 - RNA, 19 nt, Homo sapiens
  misc_RNA (1)...(19): siRNA sense strand
ggagagaagcugaaggaga

SEQ ID NO: 2366753 - RNA, 19 nt, Homo sapiens
  misc_RNA (1)...(19): siRNA sense strand
gaagaaacuuuaaagguca

SEQ ID NO: 2366754 - RNA, 19 nt, Homo sapiens
  misc_RNA (1)...(19): siRNA sense strand
gcucauugccacaguacaa

SEQ ID NO: 2366755 - RNA, 19 nt, Homo sapiens
  misc_RNA (1)...(19): siRNA sense strand
cguuagaauugaaaguaga

SEQ ID NO: 2366756 - RNA, 19 nt, Homo sapiens
  misc_RNA (1)...(19): siRNA sense strand
ccagaaacugauugaagaa

SEQ ID NO: 2366757 - RNA, 19 nt, Homo sapiens
  misc_RNA (1)...(19): siRNA sense strand
cugcaaagagcuggagaua

SEQ ID NO: 2366758 - RNA, 19 nt, Homo sapiens
  misc_RNA (1)...(19): siRNA sense strand
ccauacuacccuagggcaa

SEQ ID NO: 2366759 - RNA, 19 nt, Homo sapiens
  misc_RNA (1)...(19): siRNA sense strand
gaagaaauaaagacggaga

SEQ ID NO: 2366760 - RNA, 19 nt, Homo sapiens
  misc_RNA (1)...(19): siRNA sense strand
agauggaaauacugaaaga

SEQ ID NO: 2366761 - RNA, 19 nt, Homo sapiens
  misc_RNA (1)...(19): siRNA sense strand
agccaaagaaggagcaaau

SEQ ID NO: 2366762 - RNA, 19 nt, Homo sapiens
  misc_RNA (1)...(19): siRNA sense strand
aguuauaaggcguuagaau

SEQ ID NO: 2366763 - RNA, 19 nt, Homo sapiens
  misc_RNA (1)...(19): siRNA sense strand
caauaaugucuuucaggaa

SEQ ID NO: 2366764 - RNA, 19 nt, Homo sapiens
  misc_RNA (1)...(19): siRNA sense strand
gguacauugacuauggaaa

SEQ ID NO: 2366765 - RNA, 19 nt, Homo sapiens
  misc_RNA (1)...(19): siRNA sense strand
aucaggaguuugagauaaa

SEQ ID NO: 2366766 - RNA, 19 nt, Homo sapiens
  misc_RNA (1)...(19): siRNA sense strand
auaugugagugaagggaau

SEQ ID NO: 2366767 - RNA, 19 nt, Homo sapiens
  misc_RNA (1)...(19): siRNA sense strand
acacagaagccaaggugau

SEQ ID NO: 2366768 - RNA, 19 nt, Homo sapiens
  misc_RNA (1)...(19): siRNA sense strand
aauugaaaguagagcagau

SEQ ID NO: 2366769 - RNA, 19 nt, Homo sapiens
  misc_RNA (1)...(19): siRNA sense strand
acgauaaaguggaagaugu

SEQ ID NO: 2366770 - RNA, 19 nt, Homo sapiens
  misc_RNA (1)...(19): siRNA sense strand
agauaauaugggcagaaua

SEQ ID NO: 2366771 - RNA, 19 nt, Homo sapiens
  misc_RNA (1)...(19): siRNA sense strand
gauggaaauugguugaaaa

SEQ ID NO: 2366772 - RNA, 19 nt, Homo sapiens
  misc_RNA (1)...(19): siRNA sense strand
aggaauuguuggagauuuu

SEQ ID NO: 2366773 - RNA, 19 nt, Homo sapiens
  misc_RNA (1)...(19): siRNA sense strand
aaaucaggaguuugagaua

SEQ ID NO: 2366774 - RNA, 19 nt, Homo sapiens
  misc_RNA (1)...(19): siRNA sense strand
aagaagaaauaaagacgga

SEQ ID NO: 2366775 - RNA, 19 nt, Homo sapiens
  misc_RNA (1)...(19): siRNA sense strand
augcagacaaggagauaau

SEQ ID NO: 2366776 - RNA, 19 nt, Homo sapiens
  misc_RNA (1)...(19): siRNA sense strand
aggacaguauugaguuuaa

SEQ ID NO: 2366777 - RNA, 19 nt, Homo sapiens
  misc_RNA (1)...(19): siRNA sense strand
gagagaagcugaaggagac

SEQ ID NO: 2366778 - RNA, 19 nt, Homo sapiens
  misc_RNA (1)...(19): siRNA sense strand
caagaaauggugaagccaa

SEQ ID NO: 2366779 - RNA, 19 nt, Homo sapiens
  misc_RNA (1)...(19): siRNA sense strand
ugaaaaugaugcaggcaau

SEQ ID NO: 2366780 - RNA, 19 nt, Homo sapiens
  misc_RNA (1)...(19): siRNA sense strand
caagcuaaguacaaggaca

SEQ ID NO: 2366781 - RNA, 19 nt, Homo sapiens
  misc_RNA (1)...(19): siRNA sense strand
uggauaaauguauggagaa

SEQ ID NO: 2366782 - RNA, 19 nt, Homo sapiens
  misc_RNA (1)...(19): siRNA sense strand
ggauaaauguauggagaag

SEQ ID NO: 2366783 - RNA, 19 nt, Homo sapiens
  misc_RNA (1)...(19): siRNA sense strand
gggcauagaucaaaccagu

SEQ ID NO: 2366784 - RNA, 19 nt, Homo sapiens
  misc_RNA (1)...(19): siRNA sense strand
ucagaagacgcaauggaua

SEQ ID NO: 2366785 - RNA, 19 nt, Homo sapiens
  misc_RNA (1)...(19): siRNA sense strand
gaagacaagaaauggugaa

SEQ ID NO: 2366786 - RNA, 19 nt, Homo sapiens
  misc_RNA (1)...(19): siRNA sense strand
gaugcaaaguacugaaaau

SEQ ID NO: 2366787 - RNA, 19 nt, Homo sapiens
  misc_RNA (1)...(19): siRNA sense strand
gaggaauaugagaugcuaa

SEQ ID NO: 2366788 - RNA, 19 nt, Homo sapiens
  misc_RNA (1)...(19): siRNA sense strand
guauggagaagacaagaaa

SEQ ID NO: 2366789 - RNA, 19 nt, Homo sapiens
  misc_RNA (1)...(19): siRNA sense strand
ugacuggaagugugauaaa

SEQ ID NO: 2366790 - RNA, 19 nt, Homo sapiens
  misc_RNA (1)...(19): siRNA sense strand
uuggauaaauguauggaga

SEQ ID NO: 2366791 - RNA, 19 nt, Homo sapiens
  misc_RNA (1)...(19): siRNA sense strand
gguuacugccauugauauu

SEQ ID NO: 2366792 - RNA, 19 nt, Homo sapiens
  misc_RNA (1)...(19): siRNA sense strand
aagaaauaaagacggagaa

SEQ ID NO: 2366793 - RNA, 19 nt, Homo sapiens
  misc_RNA (1)...(19): siRNA sense strand
aaacaagauuuauggugga

SEQ ID NO: 2366794 - RNA, 19 nt, Homo sapiens
  misc_RNA (1)...(19): siRNA sense strand
guauaaacuuuggggacua

SEQ ID NO: 2366795 - RNA, 19 nt, Homo sapiens
  misc_RNA (1)...(19): siRNA sense strand
cuaaguacaaggacaguau

SEQ ID NO: 2366796 - RNA, 19 nt, Homo sapiens
  misc_RNA (1)...(19): siRNA sense strand
gaguaauuuggaagaguca

SEQ ID NO: 2366797 - RNA, 19 nt, Homo sapiens
  misc_RNA (1)...(19): siRNA sense strand
uggacaagccaaagaagga

SEQ ID NO: 2366798 - RNA, 19 nt, Homo sapiens
  misc_RNA (1)...(19): siRNA sense strand
ucuggaaguugaugaguca

SEQ ID NO: 2366799 - RNA, 19 nt, Homo sapiens
  misc_RNA (1)...(19): siRNA sense strand
ccacaguacaagcuaagua

SEQ ID NO: 2366800 - RNA, 19 nt, Homo sapiens
  misc_RNA (1)...(19): siRNA sense strand
cugcuguggauuugacuaa

SEQ ID NO: 2366801 - RNA, 19 nt, Homo sapiens
  misc_RNA (1)...(19): siRNA sense strand
aucaugagagagaggaaua

SEQ ID NO: 2366802 - RNA, 19 nt, Homo sapiens
  misc_RNA (1)...(19): siRNA sense strand
ccaaaguggaucaguuuca

SEQ ID NO: 2366803 - RNA, 19 nt, Homo sapiens
  misc_RNA (1)...(19): siRNA sense strand
gaauguuucuugaugccaa

SEQ ID NO: 2366804 - RNA, 19 nt, Homo sapiens
  misc_RNA (1)...(19): siRNA sense strand
ugaugaaauccuagagaag

SEQ ID NO: 2366805 - RNA, 19 nt, Homo sapiens
  misc_RNA (1)...(19): siRNA sense strand
aggaagaguuacaggccaa

SEQ ID NO: 2366806 - RNA, 19 nt, Homo sapiens
  misc_RNA (1)...(19): siRNA sense strand
cagaaugcauauugcccaa

SEQ ID NO: 2366807 - RNA, 19 nt, Homo sapiens
  misc_RNA (1)...(19): siRNA sense strand
caucauuggaauuggaguu

SEQ ID NO: 2366808 - RNA, 19 nt, Homo sapiens
  misc_RNA (1)...(19): siRNA sense strand
aggcuguggucgaaugcaa

SEQ ID NO: 2366809 - RNA, 19 nt, Homo sapiens
  misc_RNA (1)...(19): siRNA sense strand
agaucaaaccacuucuaaa

SEQ ID NO: 2366810 - RNA, 19 nt, Homo sapiens
  misc_RNA (1)...(19): siRNA sense strand
caguugaggcuguggucga

SEQ ID NO: 2366811 - RNA, 19 nt, Homo sapiens
  misc_RNA (1)...(19): siRNA sense strand
cugaaaagcaucauuggaa

SEQ ID NO: 2366812 - RNA, 19 nt, Homo sapiens
  misc_RNA (1)...(19): siRNA sense strand
gcucauuaauguugacccu

SEQ ID NO: 2366813 - RNA, 19 nt, Homo sapiens
  misc_RNA (1)...(19): siRNA sense strand
acuuugaggauaugcaaga

SEQ ID NO: 2366814 - RNA, 19 nt, Homo sapiens
  misc_RNA (1)...(19): siRNA sense strand
aggaagaguuacaggccaa

SEQ ID NO: 2366815 - RNA, 19 nt, Homo sapiens
  misc_RNA (1)...(19): siRNA sense strand
cagaaugcauauugcccaa

SEQ ID NO: 2366816 - RNA, 19 nt, Homo sapiens
  misc_RNA (1)...(19): siRNA sense strand
caucauuggaauuggaguu

SEQ ID NO: 2366817 - RNA, 19 nt, Homo sapiens
  misc_RNA (1)...(19): siRNA sense strand
aggcuguggucgaaugcaa

SEQ ID NO: 2366818 - RNA, 19 nt, Homo sapiens
  misc_RNA (1)...(19): siRNA sense strand
agaucaaaccacuucuaaa

SEQ ID NO: 2366819 - RNA, 19 nt, Homo sapiens
  misc_RNA (1)...(19): siRNA sense strand
caguugaggcuguggucga

SEQ ID NO: 2366820 - RNA, 19 nt, Homo sapiens
  misc_RNA (1)...(19): siRNA sense strand
cugaaaagcaucauuggaa

SEQ ID NO: 2366821 - RNA, 19 nt, Homo sapiens
  misc_RNA (1)...(19): siRNA sense strand
gcucauuaauguugacccu

SEQ ID NO: 2366822 - RNA, 19 nt, Homo sapiens
  misc_RNA (1)...(19): siRNA sense strand
acuuugaggauaugcaaga

SEQ ID NO: 2366823 - RNA, 19 nt, Homo sapiens
  misc_RNA (1)...(19): siRNA sense strand
acuacuuccucgugggcua

SEQ ID NO: 2366824 - RNA, 19 nt, Homo sapiens
  misc_RNA (1)...(19): siRNA sense strand
uuacaaauguccugugcga

SEQ ID NO: 2366825 - RNA, 19 nt, Homo sapiens
  misc_RNA (1)...(19): siRNA sense strand
ugaccuacgaggaggcaca

SEQ ID NO: 2366826 - RNA, 19 nt, Homo sapiens
  misc_RNA (1)...(19): siRNA sense strand
acaaauguccugugcgacu

SEQ ID NO: 2366827 - RNA, 19 nt, Homo sapiens
  misc_RNA (1)...(19): siRNA sense strand
ugguaauaacguugggaaa

SEQ ID NO: 2366828 - RNA, 19 nt, Homo sapiens
  misc_RNA (1)...(19): siRNA sense strand
cugcguaggacccggaaau

SEQ ID NO: 2366829 - RNA, 19 nt, Homo sapiens
  misc_RNA (1)...(19): siRNA sense strand
ccgaaauguaaauggcuau

SEQ ID NO: 2366830 - RNA, 19 nt, Homo sapiens
  misc_RNA (1)...(19): siRNA sense strand
gccgaaauguaaauggcua

SEQ ID NO: 2366831 - RNA, 19 nt, Homo sapiens
  misc_RNA (1)...(19): siRNA sense strand
acaaaguggcagucgcauu

SEQ ID NO: 2366832 - RNA, 19 nt, Homo sapiens
  misc_RNA (1)...(19): siRNA sense strand
aauaaaugacgcuacgcaa

SEQ ID NO: 2366833 - RNA, 19 nt, Homo sapiens
  misc_RNA (1)...(19): siRNA sense strand
caaagugggacaauauauu

SEQ ID NO: 2366834 - RNA, 19 nt, Homo sapiens
  misc_RNA (1)...(19): siRNA sense strand
gguugggagcagaucgauu

SEQ ID NO: 2366835 - RNA, 19 nt, Homo sapiens
  misc_RNA (1)...(19): siRNA sense strand
cugcuuuggguuuguuaaa

SEQ ID NO: 2366836 - RNA, 19 nt, Homo sapiens
  misc_RNA (1)...(19): siRNA sense strand
cggccagacucguuggugu

SEQ ID NO: 2366837 - RNA, 19 nt, Homo sapiens
  misc_RNA (1)...(19): siRNA sense strand
uguaaggauuccaguggca

SEQ ID NO: 2366838 - RNA, 19 nt, Homo sapiens
  misc_RNA (1)...(19): siRNA sense strand
uggaauugcuagaugggaa

SEQ ID NO: 2366839 - RNA, 19 nt, Homo sapiens
  misc_RNA (1)...(19): siRNA sense strand
ggaauugcuagaugggaaa

SEQ ID NO: 2366840 - RNA, 19 nt, Homo sapiens
  misc_RNA (1)...(19): siRNA sense strand
aggaaacagucaagaguca

SEQ ID NO: 2366841 - RNA, 19 nt, Homo sapiens
  misc_RNA (1)...(19): siRNA sense strand
cugcaaaguuaucugcuaa

SEQ ID NO: 2366842 - RNA, 19 nt, Homo sapiens
  misc_RNA (1)...(19): siRNA sense strand
cagacuuacuccuggacaa

SEQ ID NO: 2366843 - RNA, 19 nt, Homo sapiens
  misc_RNA (1)...(19): siRNA sense strand
gaggaaauagauuggcuaa

SEQ ID NO: 2366844 - RNA, 19 nt, Homo sapiens
  misc_RNA (1)...(19): siRNA sense strand
ggauaaaugaacuggaacu

SEQ ID NO: 2366845 - RNA, 19 nt, Homo sapiens
  misc_RNA (1)...(19): siRNA sense strand
aauacaaaggagagaaaga

SEQ ID NO: 2366846 - RNA, 19 nt, Homo sapiens
  misc_RNA (1)...(19): siRNA sense strand
augaauuacugcaggugua

SEQ ID NO: 2366847 - RNA, 19 nt, Homo sapiens
  misc_RNA (1)...(19): siRNA sense strand
uguaaaauauggaguggaa

SEQ ID NO: 2366848 - RNA, 19 nt, Homo sapiens
  misc_RNA (1)...(19): siRNA sense strand
ccagagaagugaaagcuga

SEQ ID NO: 2366849 - RNA, 19 nt, Homo sapiens
  misc_RNA (1)...(19): siRNA sense strand
aaugagaagugcauggaau

SEQ ID NO: 2366850 - RNA, 19 nt, Homo sapiens
  misc_RNA (1)...(19): siRNA sense strand
gaaacguucacgacagaaa

SEQ ID NO: 2366851 - RNA, 19 nt, Homo sapiens
  misc_RNA (1)...(19): siRNA sense strand
ucuaguaagugaagaagau

SEQ ID NO: 2366852 - RNA, 19 nt, Homo sapiens
  misc_RNA (1)...(19): siRNA sense strand
gagaagauggaaaguaaaa

SEQ ID NO: 2366853 - RNA, 19 nt, Homo sapiens
  misc_RNA (1)...(19): siRNA sense strand
agaaguagauucagccaga

SEQ ID NO: 2366854 - RNA, 19 nt, Homo sapiens
  misc_RNA (1)...(19): siRNA sense strand
gauuaaacagcaagcaaca

SEQ ID NO: 2366855 - RNA, 19 nt, Homo sapiens
  misc_RNA (1)...(19): siRNA sense strand
acaaucucuuagugggaaa

SEQ ID NO: 2366856 - RNA, 19 nt, Homo sapiens
  misc_RNA (1)...(19): siRNA sense strand
agaggaggcaagagaagua

SEQ ID NO: 2366857 - RNA, 19 nt, Homo sapiens
  misc_RNA (1)...(19): siRNA sense strand
gcuuuaauucuuugggaca

SEQ ID NO: 2366858 - RNA, 19 nt, Homo sapiens
  misc_RNA (1)...(19): siRNA sense strand
uugaugacauugaugguaa

SEQ ID NO: 2366859 - RNA, 19 nt, Homo sapiens
  misc_RNA (1)...(19): siRNA sense strand
ugaagauacagaugaagaa

SEQ ID NO: 2366860 - RNA, 19 nt, Homo sapiens
  misc_RNA (1)...(19): siRNA sense strand
ccauauacagagaugaaaa

SEQ ID NO: 2366861 - RNA, 19 nt, Homo sapiens
  misc_RNA (1)...(19): siRNA sense strand
ucgguaacuucaacagaaa

SEQ ID NO: 2366862 - RNA, 19 nt, Homo sapiens
  misc_RNA (1)...(19): siRNA sense strand
ggucggaaucucugugcua

SEQ ID NO: 2366863 - RNA, 19 nt, Homo sapiens
  misc_RNA (1)...(19): siRNA sense strand
ccaauauacaggacaauga

SEQ ID NO: 2366864 - RNA, 19 nt, Homo sapiens
  misc_RNA (1)...(19): siRNA sense strand
agaaauggcacuucaucaa

SEQ ID NO: 2366865 - RNA, 19 nt, Homo sapiens
  misc_RNA (1)...(19): siRNA sense strand
gguuagaagcaaacgcuga

SEQ ID NO: 2366866 - RNA, 19 nt, Homo sapiens
  misc_RNA (1)...(19): siRNA sense strand
caaucaaauacaaaggaga

SEQ ID NO: 2366867 - RNA, 19 nt, Homo sapiens
  misc_RNA (1)...(19): siRNA sense strand
ggaagaaacuaaaggccug

SEQ ID NO: 2366868 - RNA, 19 nt, Homo sapiens
  misc_RNA (1)...(19): siRNA sense strand
ggaugaucgcuuuaggaau

SEQ ID NO: 2366869 - RNA, 19 nt, Homo sapiens
  misc_RNA (1)...(19): siRNA sense strand
cauaaaggacagaaccaau

SEQ ID NO: 2366870 - RNA, 19 nt, Homo sapiens
  misc_RNA (1)...(19): siRNA sense strand
cugaagauacagaugaaga

SEQ ID NO: 2366871 - RNA, 19 nt, Homo sapiens
  misc_RNA (1)...(19): siRNA sense strand
cugcaguucaugugcuaaa

SEQ ID NO: 2366872 - RNA, 19 nt, Homo sapiens
  misc_RNA (1)...(19): siRNA sense strand
aggauugcauagauacaaa

SEQ ID NO: 2366873 - RNA, 19 nt, Homo sapiens
  misc_RNA (1)...(19): siRNA sense strand
aggauuaaacagcaagcaa

SEQ ID NO: 2366874 - RNA, 19 nt, Homo sapiens
  misc_RNA (1)...(19): siRNA sense strand
agagaagauggaaaguaaa

SEQ ID NO: 2366875 - RNA, 19 nt, Homo sapiens
  misc_RNA (1)...(19): siRNA sense strand
augaacuggaacugggaaa

SEQ ID NO: 2366876 - RNA, 19 nt, Homo sapiens
  misc_RNA (1)...(19): siRNA sense strand
ggaucauacuuguguccau

SEQ ID NO: 2366877 - RNA, 19 nt, Homo sapiens
  misc_RNA (1)...(19): siRNA sense strand
auaaaggacagaaccaaua

SEQ ID NO: 2366878 - RNA, 19 nt, Homo sapiens
  misc_RNA (1)...(19): siRNA sense strand
agauauguguccaggaacu

SEQ ID NO: 2366879 - RNA, 19 nt, Homo sapiens
  misc_RNA (1)...(19): siRNA sense strand
guaaagugagugagggucu

SEQ ID NO: 2366880 - RNA, 19 nt, Homo sapiens
  misc_RNA (1)...(19): siRNA sense strand
acaaacaaacaaagagagu

SEQ ID NO: 2366881 - RNA, 19 nt, Homo sapiens
  misc_RNA (1)...(19): siRNA sense strand
cagaugagggcguaaguga

SEQ ID NO: 2366882 - RNA, 19 nt, Homo sapiens
  misc_RNA (1)...(19): siRNA sense strand
gaugcacaaauaagggaaa

SEQ ID NO: 2366883 - RNA, 19 nt, Homo sapiens
  misc_RNA (1)...(19): siRNA sense strand
acuaaaggccuguccauau

SEQ ID NO: 2366884 - RNA, 19 nt, Homo sapiens
  misc_RNA (1)...(19): siRNA sense strand
ugaaagaacagguugucau

SEQ ID NO: 2366885 - RNA, 19 nt, Homo sapiens
  misc_RNA (1)...(19): siRNA sense strand
ggaacuacaguguccuaaa

SEQ ID NO: 2366886 - RNA, 19 nt, Homo sapiens
  misc_RNA (1)...(19): siRNA sense strand
ucagaggauuaaacagcaa

SEQ ID NO: 2366887 - RNA, 19 nt, Homo sapiens
  misc_RNA (1)...(19): siRNA sense strand
agcaguuugucgugguaaa

SEQ ID NO: 2366888 - RNA, 19 nt, Homo sapiens
  misc_RNA (1)...(19): siRNA sense strand
ugaaacagaagcagaagau

SEQ ID NO: 2366889 - RNA, 19 nt, Homo sapiens
  misc_RNA (1)...(19): siRNA sense strand
ugacaugaaccaaggaacu

SEQ ID NO: 2366890 - RNA, 19 nt, Homo sapiens
  misc_RNA (1)...(19): siRNA sense strand
augagaagugcauggaauu

SEQ ID NO: 2366891 - RNA, 19 nt, Homo sapiens
  misc_RNA (1)...(19): siRNA sense strand
gggaagaaacuaaaggccu

SEQ ID NO: 2366892 - RNA, 19 nt, Homo sapiens
  misc_RNA (1)...(19): siRNA sense strand
gguugguaccauuggguca

SEQ ID NO: 2366893 - RNA, 19 nt, Homo sapiens
  misc_RNA (1)...(19): siRNA sense strand
guuccaagaugaaguggga

SEQ ID NO: 2366894 - RNA, 19 nt, Homo sapiens
  misc_RNA (1)...(19): siRNA sense strand
acuaugacgcaaucaaaua

SEQ ID NO: 2366895 - RNA, 19 nt, Homo sapiens
  misc_RNA (1)...(19): siRNA sense strand
gcaccauagcagaguacau

SEQ ID NO: 2366896 - RNA, 19 nt, Homo sapiens
  misc_RNA (1)...(19): siRNA sense strand
aguccaauugcuaugguua

SEQ ID NO: 2366897 - RNA, 19 nt, Homo sapiens
  misc_RNA (1)...(19): siRNA sense strand
ggucugaugccgagcucga

SEQ ID NO: 2366898 - RNA, 19 nt, Homo sapiens
  misc_RNA (1)...(19): siRNA sense strand
ccacagaagaggcagcagu

SEQ ID NO: 2366899 - RNA, 19 nt, Homo sapiens
  misc_RNA (1)...(19): siRNA sense strand
agugucagucuuacggaaa

SEQ ID NO: 2366900 - RNA, 19 nt, Homo sapiens
  misc_RNA (1)...(19): siRNA sense strand
uugauuaaccacaaggaaa

SEQ ID NO: 2366901 - RNA, 19 nt, Homo sapiens
  misc_RNA (1)...(19): siRNA sense strand
ggauaguaccgcaggacca

SEQ ID NO: 2366902 - RNA, 19 nt, Homo sapiens
  misc_RNA (1)...(19): siRNA sense strand
ugauuaaccacaaggaaaa

SEQ ID NO: 2366903 - RNA, 19 nt, Homo sapiens
  misc_RNA (1)...(19): siRNA sense strand
ggguaaaacuccuuaucau

SEQ ID NO: 2366904 - RNA, 19 nt, Homo sapiens
  misc_RNA (1)...(19): siRNA sense strand
ggucucagcugaaugccaa

SEQ ID NO: 2366905 - RNA, 19 nt, Homo sapiens
  misc_RNA (1)...(19): siRNA sense strand
cggugauguagcugccaaa

SEQ ID NO: 2366906 - RNA, 19 nt, Homo sapiens
  misc_RNA (1)...(19): siRNA sense strand
augcaguucaguugggcaa

SEQ ID NO: 2366907 - RNA, 19 nt, Homo sapiens
  misc_RNA (1)...(19): siRNA sense strand
ugccaauaaaauagggaua

SEQ ID NO: 2366908 - RNA, 19 nt, Homo sapiens
  misc_RNA (1)...(19): siRNA sense strand
agagauaaaagcagcaaau

SEQ ID NO: 2366909 - RNA, 19 nt, Homo sapiens
  misc_RNA (1)...(19): siRNA sense strand
acuggagggagaagaacua

SEQ ID NO: 2366910 - RNA, 19 nt, Homo sapiens
  misc_RNA (1)...(19): siRNA sense strand
ugggaagaucaaagguaca

SEQ ID NO: 2366911 - RNA, 19 nt, Homo sapiens
  misc_RNA (1)...(19): siRNA sense strand
uagaagaucuccaggaccu

SEQ ID NO: 2366912 - RNA, 19 nt, Homo sapiens
  misc_RNA (1)...(19): siRNA sense strand
uagcuaugacuuugugaau

SEQ ID NO: 2366913 - RNA, 19 nt, Homo sapiens
  misc_RNA (1)...(19): siRNA sense strand
cugcagauuaaugaagaua

SEQ ID NO: 2366914 - RNA, 19 nt, Homo sapiens
  misc_RNA (1)...(19): siRNA sense strand
cugccagagcugugggaaa

SEQ ID NO: 2366915 - RNA, 19 nt, Homo sapiens
  misc_RNA (1)...(19): siRNA sense strand
ggguaggcgacgagagcuu

SEQ ID NO: 2366916 - RNA, 19 nt, Homo sapiens
  misc_RNA (1)...(19): siRNA sense strand
cgaaagaggagccggacca

SEQ ID NO: 2366917 - RNA, 19 nt, Homo sapiens
  misc_RNA (1)...(19): siRNA sense strand
gcaugcagccagaggagga

SEQ ID NO: 2366918 - RNA, 19 nt, Homo sapiens
  misc_RNA (1)...(19): siRNA sense strand
augauggguccgugggcaa

SEQ ID NO: 2366919 - RNA, 19 nt, Homo sapiens
  misc_RNA (1)...(19): siRNA sense strand
gcggcaagaucuuccguga

SEQ ID NO: 2366920 - RNA, 19 nt, Homo sapiens
  misc_RNA (1)...(19): siRNA sense strand
ccgccaaguuccugcugau

SEQ ID NO: 2366921 - RNA, 19 nt, Homo sapiens
  misc_RNA (1)...(19): siRNA sense strand
acacauaccaggugagcag

SEQ ID NO: 2366922 - RNA, 19 nt, Homo sapiens
  misc_RNA (1)...(19): siRNA sense strand
ggaccucggacuugggcuu

SEQ ID NO: 2366923 - RNA, 19 nt, Homo sapiens
  misc_RNA (1)...(19): siRNA sense strand
guguguggguugcgguuca

SEQ ID NO: 2366924 - RNA, 19 nt, Homo sapiens
  misc_RNA (1)...(19): siRNA sense strand
cugccagagcugugggaaa

SEQ ID NO: 2366925 - RNA, 19 nt, Homo sapiens
  misc_RNA (1)...(19): siRNA sense strand
ggguaggcgacgagagcuu

SEQ ID NO: 2366926 - RNA, 19 nt, Homo sapiens
  misc_RNA (1)...(19): siRNA sense strand
cgaaagaggagccggacca

SEQ ID NO: 2366927 - RNA, 19 nt, Homo sapiens
  misc_RNA (1)...(19): siRNA sense strand
gcaugcagccagaggagga

SEQ ID NO: 2366928 - RNA, 19 nt, Homo sapiens
  misc_RNA (1)...(19): siRNA sense strand
augauggguccgugggcaa

SEQ ID NO: 2366929 - RNA, 19 nt, Homo sapiens
  misc_RNA (1)...(19): siRNA sense strand
gcggcaagaucuuccguga

SEQ ID NO: 2366930 - RNA, 19 nt, Homo sapiens
  misc_RNA (1)...(19): siRNA sense strand
ccgccaaguuccugcugau

SEQ ID NO: 2366931 - RNA, 19 nt, Homo sapiens
  misc_RNA (1)...(19): siRNA sense strand
acacauaccaggugagcag

SEQ ID NO: 2366932 - RNA, 19 nt, Homo sapiens
  misc_RNA (1)...(19): siRNA sense strand
ggaccucggacuugggcuu

SEQ ID NO: 2366933 - RNA, 19 nt, Homo sapiens
  misc_RNA (1)...(19): siRNA sense strand
guguguggguugcgguuca

SEQ ID NO: 2366934 - RNA, 19 nt, Homo sapiens
  misc_RNA (1)...(19): siRNA sense strand
cugccagagcugugggaaa

SEQ ID NO: 2366935 - RNA, 19 nt, Homo sapiens
  misc_RNA (1)...(19): siRNA sense strand
ggguaggcgacgagagcuu

SEQ ID NO: 2366936 - RNA, 19 nt, Homo sapiens
  misc_RNA (1)...(19): siRNA sense strand
cgaaagaggagccggacca

SEQ ID NO: 2366937 - RNA, 19 nt, Homo sapiens
  misc_RNA (1)...(19): siRNA sense strand
gcaugcagccagaggagga

SEQ ID NO: 2366938 - RNA, 19 nt, Homo sapiens
  misc_RNA (1)...(19): siRNA sense strand
augauggguccgugggcaa

SEQ ID NO: 2366939 - RNA, 19 nt, Homo sapiens
  misc_RNA (1)...(19): siRNA sense strand
gcggcaagaucuuccguga

SEQ ID NO: 2366940 - RNA, 19 nt, Homo sapiens
  misc_RNA (1)...(19): siRNA sense strand
ccgccaaguuccugcugau

SEQ ID NO: 2366941 - RNA, 19 nt, Homo sapiens
  misc_RNA (1)...(19): siRNA sense strand
acacauaccaggugagcag

SEQ ID NO: 2366942 - RNA, 19 nt, Homo sapiens
  misc_RNA (1)...(19): siRNA sense strand
ggaccucggacuugggcuu

SEQ ID NO: 2366943 - RNA, 19 nt, Homo sapiens
  misc_RNA (1)...(19): siRNA sense strand
guguguggguugcgguuca

SEQ ID NO: 2366944 - RNA, 19 nt, Homo sapiens
  misc_RNA (1)...(19): siRNA sense strand
cugccagagcugugggaaa

SEQ ID NO: 2366945 - RNA, 19 nt, Homo sapiens
  misc_RNA (1)...(19): siRNA sense strand
ggguaggcgacgagagcuu

SEQ ID NO: 2366946 - RNA, 19 nt, Homo sapiens
  misc_RNA (1)...(19): siRNA sense strand
cgaaagaggagccggacca

SEQ ID NO: 2366947 - RNA, 19 nt, Homo sapiens
  misc_RNA (1)...(19): siRNA sense strand
gcaugcagccagaggagga

SEQ ID NO: 2366948 - RNA, 19 nt, Homo sapiens
  misc_RNA (1)...(19): siRNA sense strand
augauggguccgugggcaa

SEQ ID NO: 2366949 - RNA, 19 nt, Homo sapiens
  misc_RNA (1)...(19): siRNA sense strand
gcggcaagaucuuccguga

SEQ ID NO: 2366950 - RNA, 19 nt, Homo sapiens
  misc_RNA (1)...(19): siRNA sense strand
ccgccaaguuccugcugau

SEQ ID NO: 2366951 - RNA, 19 nt, Homo sapiens
  misc_RNA (1)...(19): siRNA sense strand
acacauaccaggugagcag

SEQ ID NO: 2366952 - RNA, 19 nt, Homo sapiens
  misc_RNA (1)...(19): siRNA sense strand
ggaccucggacuugggcuu

SEQ ID NO: 2366953 - RNA, 19 nt, Homo sapiens
  misc_RNA (1)...(19): siRNA sense strand
guguguggguugcgguuca

SEQ ID NO: 2366954 - RNA, 19 nt, Homo sapiens
  misc_RNA (1)...(19): siRNA sense strand
ggaaauauuuggaccgaga

SEQ ID NO: 2366955 - RNA, 19 nt, Homo sapiens
  misc_RNA (1)...(19): siRNA sense strand
gggaaauaucaauagcaaa

SEQ ID NO: 2366956 - RNA, 19 nt, Homo sapiens
  misc_RNA (1)...(19): siRNA sense strand
cugggaacgcugugggaaa

SEQ ID NO: 2366957 - RNA, 19 nt, Homo sapiens
  misc_RNA (1)...(19): siRNA sense strand
gguugaggauaaaggaaaa

SEQ ID NO: 2366958 - RNA, 19 nt, Homo sapiens
  misc_RNA (1)...(19): siRNA sense strand
ugguugaggauaaaggaaa

SEQ ID NO: 2366959 - RNA, 19 nt, Homo sapiens
  misc_RNA (1)...(19): siRNA sense strand
ggaagauguaaaugacaau

SEQ ID NO: 2366960 - RNA, 19 nt, Homo sapiens
  misc_RNA (1)...(19): siRNA sense strand
aggaaaacucuuuggggua

SEQ ID NO: 2366961 - RNA, 19 nt, Homo sapiens
  misc_RNA (1)...(19): siRNA sense strand
cggaaaaguggcauacaaa

SEQ ID NO: 2366962 - RNA, 19 nt, Homo sapiens
  misc_RNA (1)...(19): siRNA sense strand
uagauuagugacaaggaaa

SEQ ID NO: 2366963 - RNA, 19 nt, Homo sapiens
  misc_RNA (1)...(19): siRNA sense strand
ccguagauuuucaugaaua

SEQ ID NO: 2366964 - RNA, 19 nt, Homo sapiens
  misc_RNA (1)...(19): siRNA sense strand
agugaaaguccuugagaac

SEQ ID NO: 2366965 - RNA, 19 nt, Homo sapiens
  misc_RNA (1)...(19): siRNA sense strand
augagggaaucaacggaaa

SEQ ID NO: 2366966 - RNA, 19 nt, Homo sapiens
  misc_RNA (1)...(19): siRNA sense strand
agauuagugacaaggaaau

SEQ ID NO: 2366967 - RNA, 19 nt, Homo sapiens
  misc_RNA (1)...(19): siRNA sense strand
aaauauuuggaccgagaaa

SEQ ID NO: 2366968 - RNA, 19 nt, Homo sapiens
  misc_RNA (1)...(19): siRNA sense strand
uaaugaaaauacuggggaa

SEQ ID NO: 2366969 - RNA, 19 nt, Homo sapiens
  misc_RNA (1)...(19): siRNA sense strand
ggauagaucgggaggagcu

SEQ ID NO: 2366970 - RNA, 19 nt, Homo sapiens
  misc_RNA (1)...(19): siRNA sense strand
cgauuuaccgagugaaagu

SEQ ID NO: 2366971 - RNA, 19 nt, Homo sapiens
  misc_RNA (1)...(19): siRNA sense strand
ugggguagaaauagaaaua

SEQ ID NO: 2366972 - RNA, 19 nt, Homo sapiens
  misc_RNA (1)...(19): siRNA sense strand
gagaacaaccugagaggag

SEQ ID NO: 2366973 - RNA, 19 nt, Homo sapiens
  misc_RNA (1)...(19): siRNA sense strand
cccgauuuaccgagugaaa

SEQ ID NO: 2366974 - RNA, 19 nt, Homo sapiens
  misc_RNA (1)...(19): siRNA sense strand
uggaaauacaagccgaaga

SEQ ID NO: 2366975 - RNA, 19 nt, Homo sapiens
  misc_RNA (1)...(19): siRNA sense strand
cgaagaucuagaaguaaaa

SEQ ID NO: 2366976 - RNA, 19 nt, Homo sapiens
  misc_RNA (1)...(19): siRNA sense strand
gguaauaucuccaaggacc

SEQ ID NO: 2366977 - RNA, 19 nt, Homo sapiens
  misc_RNA (1)...(19): siRNA sense strand
ugccagaagagacggacaa

SEQ ID NO: 2366978 - RNA, 19 nt, Homo sapiens
  misc_RNA (1)...(19): siRNA sense strand
acucuuugggguagaaaua

SEQ ID NO: 2366979 - RNA, 19 nt, Homo sapiens
  misc_RNA (1)...(19): siRNA sense strand
gcgacccggaugagggaau

SEQ ID NO: 2366980 - RNA, 19 nt, Homo sapiens
  misc_RNA (1)...(19): siRNA sense strand
uggcauacaaauuccggaa

SEQ ID NO: 2366981 - RNA, 19 nt, Homo sapiens
  misc_RNA (1)...(19): siRNA sense strand
ggacagggaggaagaggcu

SEQ ID NO: 2366982 - RNA, 19 nt, Homo sapiens
  misc_RNA (1)...(19): siRNA sense strand
acggaaaaguggcauacaa

SEQ ID NO: 2366983 - RNA, 19 nt, Homo sapiens
  misc_RNA (1)...(19): siRNA sense strand
aaauacaagccgaagaugu

SEQ ID NO: 2366984 - RNA, 19 nt, Homo sapiens
  misc_RNA (1)...(19): siRNA sense strand
ggaaauauuuggaccgaga

SEQ ID NO: 2366985 - RNA, 19 nt, Homo sapiens
  misc_RNA (1)...(19): siRNA sense strand
gggaaauaucaauagcaaa

SEQ ID NO: 2366986 - RNA, 19 nt, Homo sapiens
  misc_RNA (1)...(19): siRNA sense strand
cugggaacgcugugggaaa

SEQ ID NO: 2366987 - RNA, 19 nt, Homo sapiens
  misc_RNA (1)...(19): siRNA sense strand
gguugaggauaaaggaaaa

SEQ ID NO: 2366988 - RNA, 19 nt, Homo sapiens
  misc_RNA (1)...(19): siRNA sense strand
ugguugaggauaaaggaaa

SEQ ID NO: 2366989 - RNA, 19 nt, Homo sapiens
  misc_RNA (1)...(19): siRNA sense strand
ggaagauguaaaugacaau

SEQ ID NO: 2366990 - RNA, 19 nt, Homo sapiens
  misc_RNA (1)...(19): siRNA sense strand
aggaaaacucuuuggggua

SEQ ID NO: 2366991 - RNA, 19 nt, Homo sapiens
  misc_RNA (1)...(19): siRNA sense strand
cggaaaaguggcauacaaa

SEQ ID NO: 2366992 - RNA, 19 nt, Homo sapiens
  misc_RNA (1)...(19): siRNA sense strand
uagauuagugacaaggaaa

SEQ ID NO: 2366993 - RNA, 19 nt, Homo sapiens
  misc_RNA (1)...(19): siRNA sense strand
ccguagauuuucaugaaua

SEQ ID NO: 2366994 - RNA, 19 nt, Homo sapiens
  misc_RNA (1)...(19): siRNA sense strand
agugaaaguccuugagaac

SEQ ID NO: 2366995 - RNA, 19 nt, Homo sapiens
  misc_RNA (1)...(19): siRNA sense strand
augagggaaucaacggaaa

SEQ ID NO: 2366996 - RNA, 19 nt, Homo sapiens
  misc_RNA (1)...(19): siRNA sense strand
agauuagugacaaggaaau

SEQ ID NO: 2366997 - RNA, 19 nt, Homo sapiens
  misc_RNA (1)...(19): siRNA sense strand
aaauauuuggaccgagaaa

SEQ ID NO: 2366998 - RNA, 19 nt, Homo sapiens
  misc_RNA (1)...(19): siRNA sense strand
uaaugaaaauacuggggaa

SEQ ID NO: 2366999 - RNA, 19 nt, Homo sapiens
  misc_RNA (1)...(19): siRNA sense strand
ggauagaucgggaggagcu

SEQ ID NO: 2367000 - RNA, 19 nt, Homo sapiens
  misc_RNA (1)...(19): siRNA sense strand
cgauuuaccgagugaaagu

SEQ ID NO: 2367001 - RNA, 19 nt, Homo sapiens
  misc_RNA (1)...(19): siRNA sense strand
ugggguagaaauagaaaua

SEQ ID NO: 2367002 - RNA, 19 nt, Homo sapiens
  misc_RNA (1)...(19): siRNA sense strand
gagaacaaccugagaggag

SEQ ID NO: 2367003 - RNA, 19 nt, Homo sapiens
  misc_RNA (1)...(19): siRNA sense strand
cccgauuuaccgagugaaa

SEQ ID NO: 2367004 - RNA, 19 nt, Homo sapiens
  misc_RNA (1)...(19): siRNA sense strand
uggaaauacaagccgaaga

SEQ ID NO: 2367005 - RNA, 19 nt, Homo sapiens
  misc_RNA (1)...(19): siRNA sense strand
cgaagaucuagaaguaaaa

SEQ ID NO: 2367006 - RNA, 19 nt, Homo sapiens
  misc_RNA (1)...(19): siRNA sense strand
gguaauaucuccaaggacc

SEQ ID NO: 2367007 - RNA, 19 nt, Homo sapiens
  misc_RNA (1)...(19): siRNA sense strand
ugccagaagagacggacaa

SEQ ID NO: 2367008 - RNA, 19 nt, Homo sapiens
  misc_RNA (1)...(19): siRNA sense strand
acucuuugggguagaaaua

SEQ ID NO: 2367009 - RNA, 19 nt, Homo sapiens
  misc_RNA (1)...(19): siRNA sense strand
gcgacccggaugagggaau

SEQ ID NO: 2367010 - RNA, 19 nt, Homo sapiens
  misc_RNA (1)...(19): siRNA sense strand
uggcauacaaauuccggaa

SEQ ID NO: 2367011 - RNA, 19 nt, Homo sapiens
  misc_RNA (1)...(19): siRNA sense strand
ggacagggaggaagaggcu

SEQ ID NO: 2367012 - RNA, 19 nt, Homo sapiens
  misc_RNA (1)...(19): siRNA sense strand
acggaaaaguggcauacaa

SEQ ID NO: 2367013 - RNA, 19 nt, Homo sapiens
  misc_RNA (1)...(19): siRNA sense strand
aaauacaagccgaagaugu

SEQ ID NO: 2367014 - RNA, 19 nt, Homo sapiens
  misc_RNA (1)...(19): siRNA sense strand
ggguaaaggagguaucaaa

SEQ ID NO: 2367015 - RNA, 19 nt, Homo sapiens
  misc_RNA (1)...(19): siRNA sense strand
ggaagaaagagaaguaaaa

SEQ ID NO: 2367016 - RNA, 19 nt, Homo sapiens
  misc_RNA (1)...(19): siRNA sense strand
uggaagaaagagaaguaaa

SEQ ID NO: 2367017 - RNA, 19 nt, Homo sapiens
  misc_RNA (1)...(19): siRNA sense strand
gaugaaaguccaagcaaaa

SEQ ID NO: 2367018 - RNA, 19 nt, Homo sapiens
  misc_RNA (1)...(19): siRNA sense strand
ggugcuugguggagaguga

SEQ ID NO: 2367019 - RNA, 19 nt, Homo sapiens
  misc_RNA (1)...(19): siRNA sense strand
auauagagcaguuggaaga

SEQ ID NO: 2367020 - RNA, 19 nt, Homo sapiens
  misc_RNA (1)...(19): siRNA sense strand
guuggaagaaagagaagua

SEQ ID NO: 2367021 - RNA, 19 nt, Homo sapiens
  misc_RNA (1)...(19): siRNA sense strand
acaaacaaaccauggaaau

SEQ ID NO: 2367022 - RNA, 19 nt, Homo sapiens
  misc_RNA (1)...(19): siRNA sense strand
aaauugugcuauugagcua

SEQ ID NO: 2367023 - RNA, 19 nt, Homo sapiens
  misc_RNA (1)...(19): siRNA sense strand
gggucagguucuaaagaga

SEQ ID NO: 2367024 - RNA, 19 nt, Homo sapiens
  misc_RNA (1)...(19): siRNA sense strand
gaagaaaccuccuuggcau

SEQ ID NO: 2367025 - RNA, 19 nt, Homo sapiens
  misc_RNA (1)...(19): siRNA sense strand
uggaaguaacuguggauuu

SEQ ID NO: 2367026 - RNA, 19 nt, Homo sapiens
  misc_RNA (1)...(19): siRNA sense strand
ccacaaaaccugagaauuc

SEQ ID NO: 2367027 - RNA, 19 nt, Homo sapiens
  misc_RNA (1)...(19): siRNA sense strand
agagauguugaaagagaua

SEQ ID NO: 2367028 - RNA, 19 nt, Homo sapiens
  misc_RNA (1)...(19): siRNA sense strand
cugugaagauuuugaacaa

SEQ ID NO: 2367029 - RNA, 19 nt, Homo sapiens
  misc_RNA (1)...(19): siRNA sense strand
gguggagagugaagguaca

SEQ ID NO: 2367030 - RNA, 19 nt, Homo sapiens
  misc_RNA (1)...(19): siRNA sense strand
gcuauugagcuaaagacaa

SEQ ID NO: 2367031 - RNA, 19 nt, Homo sapiens
  misc_RNA (1)...(19): siRNA sense strand
gaggcaaguuggauagcau

SEQ ID NO: 2367032 - RNA, 19 nt, Homo sapiens
  misc_RNA (1)...(19): siRNA sense strand
ggauauugguguggugaca

SEQ ID NO: 2367033 - RNA, 19 nt, Homo sapiens
  misc_RNA (1)...(19): siRNA sense strand
ggaugaagggaguuuggua

SEQ ID NO: 2367034 - RNA, 19 nt, Homo sapiens
  misc_RNA (1)...(19): siRNA sense strand
gaguagauacagaugauga

SEQ ID NO: 2367035 - RNA, 19 nt, Homo sapiens
  misc_RNA (1)...(19): siRNA sense strand
acugugcaauggagagaua

SEQ ID NO: 2367036 - RNA, 19 nt, Homo sapiens
  misc_RNA (1)...(19): siRNA sense strand
uggaggaggacgacgacua

SEQ ID NO: 2367037 - RNA, 19 nt, Homo sapiens
  misc_RNA (1)...(19): siRNA sense strand
agggaaacacuaagaacuu

SEQ ID NO: 2367038 - RNA, 19 nt, Homo sapiens
  misc_RNA (1)...(19): siRNA sense strand
cacagcaccuacagggaaa

SEQ ID NO: 2367039 - RNA, 19 nt, Homo sapiens
  misc_RNA (1)...(19): siRNA sense strand
caaacaaugaugaccacaa

SEQ ID NO: 2367040 - RNA, 19 nt, Homo sapiens
  misc_RNA (1)...(19): siRNA sense strand
aagcagauauguagagaag

SEQ ID NO: 2367041 - RNA, 19 nt, Homo sapiens
  misc_RNA (1)...(19): siRNA sense strand
agacugaagcagauaugua

SEQ ID NO: 2367042 - RNA, 19 nt, Homo sapiens
  misc_RNA (1)...(19): siRNA sense strand
gguuguggaugaagggagu

SEQ ID NO: 2367043 - RNA, 19 nt, Homo sapiens
  misc_RNA (1)...(19): siRNA sense strand
gaugaagggaguuugguau

SEQ ID NO: 2367044 - RNA, 19 nt, Homo sapiens
  misc_RNA (1)...(19): siRNA sense strand
ggaaacuuggauuuaguaa

SEQ ID NO: 2367045 - RNA, 19 nt, Homo sapiens
  misc_RNA (1)...(19): siRNA sense strand
auauugguguggugacaua

SEQ ID NO: 2367046 - RNA, 19 nt, Homo sapiens
  misc_RNA (1)...(19): siRNA sense strand
uggaguagauacagaugau

SEQ ID NO: 2367047 - RNA, 19 nt, Homo sapiens
  misc_RNA (1)...(19): siRNA sense strand
gaucauagggucagguucu

SEQ ID NO: 2367048 - RNA, 19 nt, Homo sapiens
  misc_RNA (1)...(19): siRNA sense strand
gggaucugguggaggagga

SEQ ID NO: 2367049 - RNA, 19 nt, Homo sapiens
  misc_RNA (1)...(19): siRNA sense strand
uggugacauuagacaguua

SEQ ID NO: 2367050 - RNA, 19 nt, Homo sapiens
  misc_RNA (1)...(19): siRNA sense strand
guucuaaagagauguugaa

SEQ ID NO: 2367051 - RNA, 19 nt, Homo sapiens
  misc_RNA (1)...(19): siRNA sense strand
gaguucugguuguggauga

SEQ ID NO: 2367052 - RNA, 19 nt, Homo sapiens
  misc_RNA (1)...(19): siRNA sense strand
cugguaacuugcugaaaga

SEQ ID NO: 2367053 - RNA, 19 nt, Homo sapiens
  misc_RNA (1)...(19): siRNA sense strand
acgacgacguggaggagga

SEQ ID NO: 2367054 - RNA, 19 nt, Homo sapiens
  misc_RNA (1)...(19): siRNA sense strand
guaaaauaaccuacagaga

SEQ ID NO: 2367055 - RNA, 19 nt, Homo sapiens
  misc_RNA (1)...(19): siRNA sense strand
aaggcaagacugugaucua

SEQ ID NO: 2367056 - RNA, 19 nt, Homo sapiens
  misc_RNA (1)...(19): siRNA sense strand
cacauauguugaagugaau

SEQ ID NO: 2367057 - RNA, 19 nt, Homo sapiens
  misc_RNA (1)...(19): siRNA sense strand
cagaauuugagacugaaua

SEQ ID NO: 2367058 - RNA, 19 nt, Homo sapiens
  misc_RNA (1)...(19): siRNA sense strand
agauguugaaagagauaga

SEQ ID NO: 2367059 - RNA, 19 nt, Homo sapiens
  misc_RNA (1)...(19): siRNA sense strand
ccugagaauucaagcgaug

SEQ ID NO: 2367060 - RNA, 19 nt, Homo sapiens
  misc_RNA (1)...(19): siRNA sense strand
gacagucauaagugggaaa

SEQ ID NO: 2367061 - RNA, 19 nt, Homo sapiens
  misc_RNA (1)...(19): siRNA sense strand
aaugaugaccacaaacaaa

SEQ ID NO: 2367062 - RNA, 19 nt, Homo sapiens
  misc_RNA (1)...(19): siRNA sense strand
aagucaagaaauugugcua

SEQ ID NO: 2367063 - RNA, 19 nt, Homo sapiens
  misc_RNA (1)...(19): siRNA sense strand
cggacaaggcuauagaagu

SEQ ID NO: 2367064 - RNA, 19 nt, Homo sapiens
  misc_RNA (1)...(19): siRNA sense strand
ugugaaugaugaugaaagu

SEQ ID NO: 2367065 - RNA, 19 nt, Homo sapiens
  misc_RNA (1)...(19): siRNA sense strand
uaacauggguaaaggaggu

SEQ ID NO: 2367066 - RNA, 19 nt, Homo sapiens
  misc_RNA (1)...(19): siRNA sense strand
uugcaguuuccgaagauaa

SEQ ID NO: 2367067 - RNA, 19 nt, Homo sapiens
  misc_RNA (1)...(19): siRNA sense strand
augugaggcaaguuggaua

SEQ ID NO: 2367068 - RNA, 19 nt, Homo sapiens
  misc_RNA (1)...(19): siRNA sense strand
gugaagauuuugaacaaga

SEQ ID NO: 2367069 - RNA, 19 nt, Homo sapiens
  misc_RNA (1)...(19): siRNA sense strand
cagaccacgccaugacaaa

SEQ ID NO: 2367070 - RNA, 19 nt, Homo sapiens
  misc_RNA (1)...(19): siRNA sense strand
gggaaagguggauguggga

SEQ ID NO: 2367071 - RNA, 19 nt, Homo sapiens
  misc_RNA (1)...(19): siRNA sense strand
ccacaaacaaaccauggaa

SEQ ID NO: 2367072 - RNA, 19 nt, Homo sapiens
  misc_RNA (1)...(19): siRNA sense strand
ggaucaaggagcuaucaau

SEQ ID NO: 2367073 - RNA, 19 nt, Homo sapiens
  misc_RNA (1)...(19): siRNA sense strand
acgacguggaggaggauga

SEQ ID NO: 2367074 - RNA, 19 nt, Homo sapiens
  misc_RNA (1)...(19): siRNA sense strand
acacacaggacaaugguga

SEQ ID NO: 2367075 - RNA, 19 nt, Homo sapiens
  misc_RNA (1)...(19): siRNA sense strand
gaaagguggaugugggaag

SEQ ID NO: 2367076 - RNA, 19 nt, Homo sapiens
  misc_RNA (1)...(19): siRNA sense strand
cacaaacaaaccauggaaa

SEQ ID NO: 2367077 - RNA, 19 nt, Homo sapiens
  misc_RNA (1)...(19): siRNA sense strand
gcaugaauguccuggcaga

SEQ ID NO: 2367078 - RNA, 19 nt, Homo sapiens
  misc_RNA (1)...(19): siRNA sense strand
ugaccacagagcugggaaa

SEQ ID NO: 2367079 - RNA, 19 nt, Homo sapiens
  misc_RNA (1)...(19): siRNA sense strand
ggaaaauuguugugaaccu

SEQ ID NO: 2367080 - RNA, 19 nt, Homo sapiens
  misc_RNA (1)...(19): siRNA sense strand
ccaaagucaucguccgguu

SEQ ID NO: 2367081 - RNA, 19 nt, Homo sapiens
  misc_RNA (1)...(19): siRNA sense strand
agucacuccuggcggcaaa

SEQ ID NO: 2367082 - RNA, 19 nt, Homo sapiens
  misc_RNA (1)...(19): siRNA sense strand
cugcuaaggccauuggaca

SEQ ID NO: 2367083 - RNA, 19 nt, Homo sapiens
  misc_RNA (1)...(19): siRNA sense strand
ccaaacaaaaccagaguca

SEQ ID NO: 2367084 - RNA, 19 nt, Homo sapiens
  misc_RNA (1)...(19): siRNA sense strand
uguuuacgcccgagaugaa

SEQ ID NO: 2367085 - RNA, 19 nt, Homo sapiens
  misc_RNA (1)...(19): siRNA sense strand
gugccaaauuccgaagcaa

SEQ ID NO: 2367086 - RNA, 19 nt, Homo sapiens
  misc_RNA (1)...(19): siRNA sense strand
aaggagaaguugugagaga

SEQ ID NO: 2367087 - RNA, 19 nt, Homo sapiens
  misc_RNA (1)...(19): siRNA sense strand
agagaaugaucaaggagaa

SEQ ID NO: 2367088 - RNA, 19 nt, Homo sapiens
  misc_RNA (1)...(19): siRNA sense strand
ggagaaguugugagagaau

SEQ ID NO: 2367089 - RNA, 19 nt, Homo sapiens
  misc_RNA (1)...(19): siRNA sense strand
aguauugguuguagagaau

SEQ ID NO: 2367090 - RNA, 19 nt, Homo sapiens
  misc_RNA (1)...(19): siRNA sense strand
ccuaaucaagugugggaua

SEQ ID NO: 2367091 - RNA, 19 nt, Homo sapiens
  misc_RNA (1)...(19): siRNA sense strand
acugaaagauccugaaaca

SEQ ID NO: 2367092 - RNA, 19 nt, Homo sapiens
  misc_RNA (1)...(19): siRNA sense strand
agagaauucaugaaggaua

SEQ ID NO: 2367093 - RNA, 19 nt, Homo sapiens
  misc_RNA (1)...(19): siRNA sense strand
cagaaaagaggcaaagaua

SEQ ID NO: 2367094 - RNA, 19 nt, Homo sapiens
  misc_RNA (1)...(19): siRNA sense strand
aaguauugguuguagagaa

SEQ ID NO: 2367095 - RNA, 19 nt, Homo sapiens
  misc_RNA (1)...(19): siRNA sense strand
aagccaauaugaagaacaa

SEQ ID NO: 2367096 - RNA, 19 nt, Homo sapiens
  misc_RNA (1)...(19): siRNA sense strand
gcuaauggugaaaugguua

SEQ ID NO: 2367097 - RNA, 19 nt, Homo sapiens
  misc_RNA (1)...(19): siRNA sense strand
caggauauggcuugugaua

SEQ ID NO: 2367098 - RNA, 19 nt, Homo sapiens
  misc_RNA (1)...(19): siRNA sense strand
acaugagauuccagaagaa

SEQ ID NO: 2367099 - RNA, 19 nt, Homo sapiens
  misc_RNA (1)...(19): siRNA sense strand
ccagaagaaaugugugauu

SEQ ID NO: 2367100 - RNA, 19 nt, Homo sapiens
  misc_RNA (1)...(19): siRNA sense strand
cccaacuuguguagagaaa

SEQ ID NO: 2367101 - RNA, 19 nt, Homo sapiens
  misc_RNA (1)...(19): siRNA sense strand
acagaguggucauggaaaa

SEQ ID NO: 2367102 - RNA, 19 nt, Homo sapiens
  misc_RNA (1)...(19): siRNA sense strand
cugcaaagcuguuggacac

SEQ ID NO: 2367103 - RNA, 19 nt, Homo sapiens
  misc_RNA (1)...(19): siRNA sense strand
ggcaaagauaauaaagcua

SEQ ID NO: 2367104 - RNA, 19 nt, Homo sapiens
  misc_RNA (1)...(19): siRNA sense strand
agagaaacauaaacgucaa

SEQ ID NO: 2367105 - RNA, 19 nt, Homo sapiens
  misc_RNA (1)...(19): siRNA sense strand
uggcuaaaccagaggaagu

SEQ ID NO: 2367106 - RNA, 19 nt, Homo sapiens
  misc_RNA (1)...(19): siRNA sense strand
agauacgggcuuacagaua

SEQ ID NO: 2367107 - RNA, 19 nt, Homo sapiens
  misc_RNA (1)...(19): siRNA sense strand
uauccaagcuaauggugaa

SEQ ID NO: 2367108 - RNA, 19 nt, Homo sapiens
  misc_RNA (1)...(19): siRNA sense strand
uuuggaagagagagaaaua

SEQ ID NO: 2367109 - RNA, 19 nt, Homo sapiens
  misc_RNA (1)...(19): siRNA sense strand
guacaugcaaccuuggaaa

SEQ ID NO: 2367110 - RNA, 19 nt, Homo sapiens
  misc_RNA (1)...(19): siRNA sense strand
gagcaaugcaugaagagga

SEQ ID NO: 2367111 - RNA, 19 nt, Homo sapiens
  misc_RNA (1)...(19): siRNA sense strand
ugauauuguuggagcaagu

SEQ ID NO: 2367112 - RNA, 19 nt, Homo sapiens
  misc_RNA (1)...(19): siRNA sense strand
cuacaagaugcucaaguaa

SEQ ID NO: 2367113 - RNA, 19 nt, Homo sapiens
  misc_RNA (1)...(19): siRNA sense strand
agaaaagaggcaaagauaa

SEQ ID NO: 2367114 - RNA, 19 nt, Homo sapiens
  misc_RNA (1)...(19): siRNA sense strand
gcugaugaagagaaacaua

SEQ ID NO: 2367115 - RNA, 19 nt, Homo sapiens
  misc_RNA (1)...(19): siRNA sense strand
aauacauuguguugggcaa

SEQ ID NO: 2367116 - RNA, 19 nt, Homo sapiens
  misc_RNA (1)...(19): siRNA sense strand
cugaugaagagaaacauaa

SEQ ID NO: 2367117 - RNA, 19 nt, Homo sapiens
  misc_RNA (1)...(19): siRNA sense strand
gguuguagagaaugaucaa

SEQ ID NO: 2367118 - RNA, 19 nt, Homo sapiens
  misc_RNA (1)...(19): siRNA sense strand
gaauaaugacagagaagcu

SEQ ID NO: 2367119 - RNA, 19 nt, Homo sapiens
  misc_RNA (1)...(19): siRNA sense strand
caaccauugauuagaagua

SEQ ID NO: 2367120 - RNA, 19 nt, Homo sapiens
  misc_RNA (1)...(19): siRNA sense strand
aggcugaugaagagaaaca

SEQ ID NO: 2367121 - RNA, 19 nt, Homo sapiens
  misc_RNA (1)...(19): siRNA sense strand
cugcuugauuucagccaaa

SEQ ID NO: 2367122 - RNA, 19 nt, Homo sapiens
  misc_RNA (1)...(19): siRNA sense strand
cagcgaaagucucugucaa

SEQ ID NO: 2367123 - RNA, 19 nt, Homo sapiens
  misc_RNA (1)...(19): siRNA sense strand
agagagagaaauagcccua

SEQ ID NO: 2367124 - RNA, 19 nt, Homo sapiens
  misc_RNA (1)...(19): siRNA sense strand
ggaaccagugcgaaggaau

SEQ ID NO: 2367125 - RNA, 19 nt, Homo sapiens
  misc_RNA (1)...(19): siRNA sense strand
cucaagaaguacugacaca

SEQ ID NO: 2367126 - RNA, 19 nt, Homo sapiens
  misc_RNA (1)...(19): siRNA sense strand
gccaauaugaagaacaauu

SEQ ID NO: 2367127 - RNA, 19 nt, Homo sapiens
  misc_RNA (1)...(19): siRNA sense strand
gaaaagaugaugaacagaa

SEQ ID NO: 2367128 - RNA, 19 nt, Homo sapiens
  misc_RNA (1)...(19): siRNA sense strand
cagaggaaguauugguugu

SEQ ID NO: 2367129 - RNA, 19 nt, Homo sapiens
  misc_RNA (1)...(19): siRNA sense strand
caugauuggugcacaaaca

SEQ ID NO: 2367130 - RNA, 19 nt, Homo sapiens
  misc_RNA (1)...(19): siRNA sense strand
aaauguugcacaagaagaa

SEQ ID NO: 2367131 - RNA, 19 nt, Homo sapiens
  misc_RNA (1)...(19): siRNA sense strand
gaguguaagccaauaugaa

SEQ ID NO: 2367132 - RNA, 19 nt, Homo sapiens
  misc_RNA (1)...(19): siRNA sense strand
aggaaguauugguuguaga

SEQ ID NO: 2367133 - RNA, 19 nt, Homo sapiens
  misc_RNA (1)...(19): siRNA sense strand
caucauuaaauccuggaaa

SEQ ID NO: 2367134 - RNA, 19 nt, Homo sapiens
  misc_RNA (1)...(19): siRNA sense strand
guauaagaauaugagggaa

SEQ ID NO: 2367135 - RNA, 19 nt, Homo sapiens
  misc_RNA (1)...(19): siRNA sense strand
ccugaauguuccaauguuu

SEQ ID NO: 2367136 - RNA, 19 nt, Homo sapiens
  misc_RNA (1)...(19): siRNA sense strand
ugagauugcuggugugagu

SEQ ID NO: 2367137 - RNA, 19 nt, Homo sapiens
  misc_RNA (1)...(19): siRNA sense strand
ucuuaaggaacaugaucaa

SEQ ID NO: 2367138 - RNA, 19 nt, Homo sapiens
  misc_RNA (1)...(19): siRNA sense strand
acaaaauguugcacaagaa

SEQ ID NO: 2367139 - RNA, 19 nt, Homo sapiens
  misc_RNA (1)...(19): siRNA sense strand
uggaaacauugcucagauu

SEQ ID NO: 2367140 - RNA, 19 nt, Homo sapiens
  misc_RNA (1)...(19): siRNA sense strand
gguaucugaaguagaagaa

SEQ ID NO: 2367141 - RNA, 19 nt, Homo sapiens
  misc_RNA (1)...(19): siRNA sense strand
uacaagugccucagugaaa

SEQ ID NO: 2367142 - RNA, 19 nt, Homo sapiens
  misc_RNA (1)...(19): siRNA sense strand
aaaggaauuugcaggugaa

SEQ ID NO: 2367143 - RNA, 19 nt, Homo sapiens
  misc_RNA (1)...(19): siRNA sense strand
aguauaauccagcaggcaa

SEQ ID NO: 2367144 - RNA, 19 nt, Homo sapiens
  misc_RNA (1)...(19): siRNA sense strand
cuuacaaaauguugcacaa

SEQ ID NO: 2367145 - RNA, 19 nt, Homo sapiens
  misc_RNA (1)...(19): siRNA sense strand
cuugaauacuggaaucauu

SEQ ID NO: 2367146 - RNA, 19 nt, Homo sapiens
  misc_RNA (1)...(19): siRNA sense strand
caagugugggauaguauaa

SEQ ID NO: 2367147 - RNA, 19 nt, Homo sapiens
  misc_RNA (1)...(19): siRNA sense strand
ccaaggaaccagugcgaag

SEQ ID NO: 2367148 - RNA, 19 nt, Homo sapiens
  misc_RNA (1)...(19): siRNA sense strand
acuacaagcuauugaaaca

SEQ ID NO: 2367149 - RNA, 19 nt, Homo sapiens
  misc_RNA (1)...(19): siRNA sense strand
cggccaaauucaagauaca

SEQ ID NO: 2367150 - RNA, 19 nt, Homo sapiens
  misc_RNA (1)...(19): siRNA sense strand
aagcuaauguagaggcaau

SEQ ID NO: 2367151 - RNA, 19 nt, Homo sapiens
  misc_RNA (1)...(19): siRNA sense strand
gcuacuaauucaugaggau

SEQ ID NO: 2367152 - RNA, 19 nt, Homo sapiens
  misc_RNA (1)...(19): siRNA sense strand
aagccauguuuguagaaua

SEQ ID NO: 2367153 - RNA, 19 nt, Homo sapiens
  misc_RNA (1)...(19): siRNA sense strand
ccaguaaagcuuucagcaa

SEQ ID NO: 2367154 - RNA, 19 nt, Homo sapiens
  misc_RNA (1)...(19): siRNA sense strand
guuuauggaaguugaagua

SEQ ID NO: 2367155 - RNA, 19 nt, Homo sapiens
  misc_RNA (1)...(19): siRNA sense strand
cagagaauguagaaagagu

SEQ ID NO: 2367156 - RNA, 19 nt, Homo sapiens
  misc_RNA (1)...(19): siRNA sense strand
ucucaguaguggaccuaaa

SEQ ID NO: 2367157 - RNA, 19 nt, Homo sapiens
  misc_RNA (1)...(19): siRNA sense strand
ucaaagauugugaagcaaa

SEQ ID NO: 2367158 - RNA, 19 nt, Homo sapiens
  misc_RNA (1)...(19): siRNA sense strand
agaggaggcucguaggaau

SEQ ID NO: 2367159 - RNA, 19 nt, Homo sapiens
  misc_RNA (1)...(19): siRNA sense strand
cuaaguugguaaauggaau

SEQ ID NO: 2367160 - RNA, 19 nt, Homo sapiens
  misc_RNA (1)...(19): siRNA sense strand
aguaaagcuuucagcaaca

SEQ ID NO: 2367161 - RNA, 19 nt, Homo sapiens
  misc_RNA (1)...(19): siRNA sense strand
caaagauugugaagcaaaa

SEQ ID NO: 2367162 - RNA, 19 nt, Homo sapiens
  misc_RNA (1)...(19): siRNA sense strand
cuucagaacauaugcucaa

SEQ ID NO: 2367163 - RNA, 19 nt, Homo sapiens
  misc_RNA (1)...(19): siRNA sense strand
aggaagaagauguugacuu

SEQ ID NO: 2367164 - RNA, 19 nt, Homo sapiens
  misc_RNA (1)...(19): siRNA sense strand
uaagaaugcucaagaggca

SEQ ID NO: 2367165 - RNA, 19 nt, Homo sapiens
  misc_RNA (1)...(19): siRNA sense strand
ugguaaauggaaugggaca

SEQ ID NO: 2367166 - RNA, 19 nt, Homo sapiens
  misc_RNA (1)...(19): siRNA sense strand
agauccaauugcacagaaa

SEQ ID NO: 2367167 - RNA, 19 nt, Homo sapiens
  misc_RNA (1)...(19): siRNA sense strand
gcuuucaaguacuggaaca

SEQ ID NO: 2367168 - RNA, 19 nt, Homo sapiens
  misc_RNA (1)...(19): siRNA sense strand
ggauauuaagaaugcucaa

SEQ ID NO: 2367169 - RNA, 19 nt, Homo sapiens
  misc_RNA (1)...(19): siRNA sense strand
aagauggaccagugggauu

SEQ ID NO: 2367170 - RNA, 19 nt, Homo sapiens
  misc_RNA (1)...(19): siRNA sense strand
acuggaacaucaaguuaaa

SEQ ID NO: 2367171 - RNA, 19 nt, Homo sapiens
  misc_RNA (1)...(19): siRNA sense strand
ugggaugagcgaaguuaua

SEQ ID NO: 2367172 - RNA, 19 nt, Homo sapiens
  misc_RNA (1)...(19): siRNA sense strand
guggaaucaugguaccaaa

SEQ ID NO: 2367173 - RNA, 19 nt, Homo sapiens
  misc_RNA (1)...(19): siRNA sense strand
aaagauaccaugagggaac

SEQ ID NO: 2367174 - RNA, 19 nt, Homo sapiens
  misc_RNA (1)...(19): siRNA sense strand
agccauguuuguagaauau

SEQ ID NO: 2367175 - RNA, 19 nt, Homo sapiens
  misc_RNA (1)...(19): siRNA sense strand
gcacaaacaguauuggcuu

SEQ ID NO: 2367176 - RNA, 19 nt, Homo sapiens
  misc_RNA (1)...(19): siRNA sense strand
gauaguuaguuggaguaaa

SEQ ID NO: 2367177 - RNA, 19 nt, Homo sapiens
  misc_RNA (1)...(19): siRNA sense strand
gcugauuguuaauagugaa

SEQ ID NO: 2367178 - RNA, 19 nt, Homo sapiens
  misc_RNA (1)...(19): siRNA sense strand
cacuaauggagaaguuuaa

SEQ ID NO: 2367179 - RNA, 19 nt, Homo sapiens
  misc_RNA (1)...(19): siRNA sense strand
aagcagauguugcggagga

SEQ ID NO: 2367180 - RNA, 19 nt, Homo sapiens
  misc_RNA (1)...(19): siRNA sense strand
cagaguugguggaucguga

SEQ ID NO: 2367181 - RNA, 19 nt, Homo sapiens
  misc_RNA (1)...(19): siRNA sense strand
uggcagacuacacgguuua

SEQ ID NO: 2367182 - RNA, 19 nt, Homo sapiens
  misc_RNA (1)...(19): siRNA sense strand
acaagaugaagaaaggcaa

SEQ ID NO: 2367183 - RNA, 19 nt, Homo sapiens
  misc_RNA (1)...(19): siRNA sense strand
gcaaacagucacaggcagu

SEQ ID NO: 2367184 - RNA, 19 nt, Homo sapiens
  misc_RNA (1)...(19): siRNA sense strand
caacagcuaauuagggaga

SEQ ID NO: 2367185 - RNA, 19 nt, Homo sapiens
  misc_RNA (1)...(19): siRNA sense strand
caaccagagaagaccuuua

SEQ ID NO: 2367186 - RNA, 19 nt, Homo sapiens
  misc_RNA (1)...(19): siRNA sense strand
acauuggaguucuucgaaa

SEQ ID NO: 2367187 - RNA, 19 nt, Homo sapiens
  misc_RNA (1)...(19): siRNA sense strand
ugcagagaauguagaaaga

SEQ ID NO: 2367188 - RNA, 19 nt, Homo sapiens
  misc_RNA (1)...(19): siRNA sense strand
uagaaagaguguugguuac

SEQ ID NO: 2367189 - RNA, 19 nt, Homo sapiens
  misc_RNA (1)...(19): siRNA sense strand
gccaaugauagguuuauaa

SEQ ID NO: 2367190 - RNA, 19 nt, Homo sapiens
  misc_RNA (1)...(19): siRNA sense strand
uaaauaugcugcuagguca

SEQ ID NO: 2367191 - RNA, 19 nt, Homo sapiens
  misc_RNA (1)...(19): siRNA sense strand
caguaaagcuuucagcaac

SEQ ID NO: 2367192 - RNA, 19 nt, Homo sapiens
  misc_RNA (1)...(19): siRNA sense strand
cgaaguuauagcaaaucaa

SEQ ID NO: 2367193 - RNA, 19 nt, Homo sapiens
  misc_RNA (1)...(19): siRNA sense strand
uccaaggagcaguugaaua

SEQ ID NO: 2367194 - RNA, 19 nt, Homo sapiens
  misc_RNA (1)...(19): siRNA sense strand
cugcgaauccucauggcua

SEQ ID NO: 2367195 - RNA, 19 nt, Homo sapiens
  misc_RNA (1)...(19): siRNA sense strand
caguugaaccucagcacau

SEQ ID NO: 2367196 - RNA, 19 nt, Homo sapiens
  misc_RNA (1)...(19): siRNA sense strand
gggugaagaugaagccaug

SEQ ID NO: 2367197 - RNA, 19 nt, Homo sapiens
  misc_RNA (1)...(19): siRNA sense strand
cuuuagagaagcagauguu

SEQ ID NO: 2367198 - RNA, 19 nt, Homo sapiens
  misc_RNA (1)...(19): siRNA sense strand
cguaggaauacucucauaa

SEQ ID NO: 2367199 - RNA, 19 nt, Homo sapiens
  misc_RNA (1)...(19): siRNA sense strand
gugucagugccuugaagua

SEQ ID NO: 2367200 - RNA, 19 nt, Homo sapiens
  misc_RNA (1)...(19): siRNA sense strand
aaacaagccuuaaugagga

SEQ ID NO: 2367201 - RNA, 19 nt, Homo sapiens
  misc_RNA (1)...(19): siRNA sense strand
gugcagagaauguagaaag

SEQ ID NO: 2367202 - RNA, 19 nt, Homo sapiens
  misc_RNA (1)...(19): siRNA sense strand
gcaugaaguuggaaggcau

SEQ ID NO: 2367203 - RNA, 19 nt, Homo sapiens
  misc_RNA (1)...(19): siRNA sense strand
gaaaggacccagagggaca

SEQ ID NO: 2367204 - RNA, 19 nt, Homo sapiens
  misc_RNA (1)...(19): siRNA sense strand
gcaugaagcuggaggcugu

SEQ ID NO: 2367205 - RNA, 19 nt, Homo sapiens
  misc_RNA (1)...(19): siRNA sense strand
agaagcaagaagaaggaaa

SEQ ID NO: 2367206 - RNA, 19 nt, Homo sapiens
  misc_RNA (1)...(19): siRNA sense strand
aagaggaagcgcagggaau

SEQ ID NO: 2367207 - RNA, 19 nt, Homo sapiens
  misc_RNA (1)...(19): siRNA sense strand
cugcaacaggugagaagaa

SEQ ID NO: 2367208 - RNA, 19 nt, Homo sapiens
  misc_RNA (1)...(19): siRNA sense strand
gauaacuucuguugggaga

SEQ ID NO: 2367209 - RNA, 19 nt, Homo sapiens
  misc_RNA (1)...(19): siRNA sense strand
agccagaggccauggagaa

SEQ ID NO: 2367210 - RNA, 19 nt, Homo sapiens
  misc_RNA (1)...(19): siRNA sense strand
aggaaaggacccagaggga

SEQ ID NO: 2367211 - RNA, 19 nt, Homo sapiens
  misc_RNA (1)...(19): siRNA sense strand
aggcaagaauagucagagu

SEQ ID NO: 2367212 - RNA, 19 nt, Homo sapiens
  misc_RNA (1)...(19): siRNA sense strand
uggaggauguggaggacca

SEQ ID NO: 2367213 - RNA, 19 nt, Homo sapiens
  misc_RNA (1)...(19): siRNA sense strand
gcccacuggcugagaggaa

SEQ ID NO: 2367214 - RNA, 19 nt, Homo sapiens
  misc_RNA (1)...(19): siRNA sense strand
auaugaagcuggaggcugu

SEQ ID NO: 2367215 - RNA, 19 nt, Homo sapiens
  misc_RNA (1)...(19): siRNA sense strand
gcguggaggauguggagga

SEQ ID NO: 2367216 - RNA, 19 nt, Homo sapiens
  misc_RNA (1)...(19): siRNA sense strand
caucagaggaggagucgga

SEQ ID NO: 2367217 - RNA, 19 nt, Homo sapiens
  misc_RNA (1)...(19): siRNA sense strand
agaagaaccucucaggcuu

SEQ ID NO: 2367218 - RNA, 19 nt, Homo sapiens
  misc_RNA (1)...(19): siRNA sense strand
agucggagccagaggccau

SEQ ID NO: 2367219 - RNA, 19 nt, Homo sapiens
  misc_RNA (1)...(19): siRNA sense strand
aggaggagucggagccaga

SEQ ID NO: 2367220 - RNA, 19 nt, Homo sapiens
  misc_RNA (1)...(19): siRNA sense strand
gaaugcuggucgugggagu

SEQ ID NO: 2367221 - RNA, 19 nt, Homo sapiens
  misc_RNA (1)...(19): siRNA sense strand
ucgaugaggucuucggcuu

SEQ ID NO: 2367222 - RNA, 19 nt, Homo sapiens
  misc_RNA (1)...(19): siRNA sense strand
gcaagaagaaggaaaggac

SEQ ID NO: 2367223 - RNA, 19 nt, Homo sapiens
  misc_RNA (1)...(19): siRNA sense strand
ggugccagaagcaaggaaa

SEQ ID NO: 2367224 - RNA, 19 nt, Homo sapiens
  misc_RNA (1)...(19): siRNA sense strand
agugaggaguggagcagca

SEQ ID NO: 2367225 - RNA, 19 nt, Homo sapiens
  misc_RNA (1)...(19): siRNA sense strand
ccaaagguuacaaggagga

SEQ ID NO: 2367226 - RNA, 19 nt, Homo sapiens
  misc_RNA (1)...(19): siRNA sense strand
acaggugagaagaaggaau

SEQ ID NO: 2367227 - RNA, 19 nt, Homo sapiens
  misc_RNA (1)...(19): siRNA sense strand
agggaauaccagagcccau

SEQ ID NO: 2367228 - RNA, 19 nt, Homo sapiens
  misc_RNA (1)...(19): siRNA sense strand
aggccauggagaagcaaga

SEQ ID NO: 2367229 - RNA, 19 nt, Homo sapiens
  misc_RNA (1)...(19): siRNA sense strand
gaagaggaagcgcagggaa

SEQ ID NO: 2367230 - RNA, 19 nt, Homo sapiens
  misc_RNA (1)...(19): siRNA sense strand
ccucacagcuuccugguca

SEQ ID NO: 2367231 - RNA, 19 nt, Homo sapiens
  misc_RNA (1)...(19): siRNA sense strand
uggccagcguggaggaugu

SEQ ID NO: 2367232 - RNA, 19 nt, Homo sapiens
  misc_RNA (1)...(19): siRNA sense strand
cagucauaguggagaacuc

SEQ ID NO: 2367233 - RNA, 19 nt, Homo sapiens
  misc_RNA (1)...(19): siRNA sense strand
aggcagucacucacaacaa

SEQ ID NO: 2367234 - RNA, 19 nt, Homo sapiens
  misc_RNA (1)...(19): siRNA sense strand
ggaaaaggcauccuggaga

SEQ ID NO: 2367235 - RNA, 19 nt, Homo sapiens
  misc_RNA (1)...(19): siRNA sense strand
gcaugaaguuggaaggcau

SEQ ID NO: 2367236 - RNA, 19 nt, Homo sapiens
  misc_RNA (1)...(19): siRNA sense strand
gaaaggacccagagggaca

SEQ ID NO: 2367237 - RNA, 19 nt, Homo sapiens
  misc_RNA (1)...(19): siRNA sense strand
gcaugaagcuggaggcugu

SEQ ID NO: 2367238 - RNA, 19 nt, Homo sapiens
  misc_RNA (1)...(19): siRNA sense strand
agaagcaagaagaaggaaa

SEQ ID NO: 2367239 - RNA, 19 nt, Homo sapiens
  misc_RNA (1)...(19): siRNA sense strand
aagaggaagcgcagggaau

SEQ ID NO: 2367240 - RNA, 19 nt, Homo sapiens
  misc_RNA (1)...(19): siRNA sense strand
cugcaacaggugagaagaa

SEQ ID NO: 2367241 - RNA, 19 nt, Homo sapiens
  misc_RNA (1)...(19): siRNA sense strand
gauaacuucuguugggaga

SEQ ID NO: 2367242 - RNA, 19 nt, Homo sapiens
  misc_RNA (1)...(19): siRNA sense strand
agccagaggccauggagaa

SEQ ID NO: 2367243 - RNA, 19 nt, Homo sapiens
  misc_RNA (1)...(19): siRNA sense strand
aggaaaggacccagaggga

SEQ ID NO: 2367244 - RNA, 19 nt, Homo sapiens
  misc_RNA (1)...(19): siRNA sense strand
uggaggauguggaggacca

SEQ ID NO: 2367245 - RNA, 19 nt, Homo sapiens
  misc_RNA (1)...(19): siRNA sense strand
gcccacuggcugagaggaa

SEQ ID NO: 2367246 - RNA, 19 nt, Homo sapiens
  misc_RNA (1)...(19): siRNA sense strand
auaugaagcuggaggcugu

SEQ ID NO: 2367247 - RNA, 19 nt, Homo sapiens
  misc_RNA (1)...(19): siRNA sense strand
gcguggaggauguggagga

SEQ ID NO: 2367248 - RNA, 19 nt, Homo sapiens
  misc_RNA (1)...(19): siRNA sense strand
caucagaggaggagucgga

SEQ ID NO: 2367249 - RNA, 19 nt, Homo sapiens
  misc_RNA (1)...(19): siRNA sense strand
agaagaaccucucaggcuu

SEQ ID NO: 2367250 - RNA, 19 nt, Homo sapiens
  misc_RNA (1)...(19): siRNA sense strand
agucggagccagaggccau

SEQ ID NO: 2367251 - RNA, 19 nt, Homo sapiens
  misc_RNA (1)...(19): siRNA sense strand
aggaggagucggagccaga

SEQ ID NO: 2367252 - RNA, 19 nt, Homo sapiens
  misc_RNA (1)...(19): siRNA sense strand
gaaugcuggucgugggagu

SEQ ID NO: 2367253 - RNA, 19 nt, Homo sapiens
  misc_RNA (1)...(19): siRNA sense strand
ucgaugaggucuucggcuu

SEQ ID NO: 2367254 - RNA, 19 nt, Homo sapiens
  misc_RNA (1)...(19): siRNA sense strand
gcaagaagaaggaaaggac

SEQ ID NO: 2367255 - RNA, 19 nt, Homo sapiens
  misc_RNA (1)...(19): siRNA sense strand
ggugccagaagcaaggaaa

SEQ ID NO: 2367256 - RNA, 19 nt, Homo sapiens
  misc_RNA (1)...(19): siRNA sense strand
agugaggaguggagcagca

SEQ ID NO: 2367257 - RNA, 19 nt, Homo sapiens
  misc_RNA (1)...(19): siRNA sense strand
ccaaagguuacaaggagga

SEQ ID NO: 2367258 - RNA, 19 nt, Homo sapiens
  misc_RNA (1)...(19): siRNA sense strand
acaggugagaagaaggaau

SEQ ID NO: 2367259 - RNA, 19 nt, Homo sapiens
  misc_RNA (1)...(19): siRNA sense strand
agggaauaccagagcccau

SEQ ID NO: 2367260 - RNA, 19 nt, Homo sapiens
  misc_RNA (1)...(19): siRNA sense strand
aggccauggagaagcaaga

SEQ ID NO: 2367261 - RNA, 19 nt, Homo sapiens
  misc_RNA (1)...(19): siRNA sense strand
gaagaggaagcgcagggaa

SEQ ID NO: 2367262 - RNA, 19 nt, Homo sapiens
  misc_RNA (1)...(19): siRNA sense strand
ccucacagcuuccugguca

SEQ ID NO: 2367263 - RNA, 19 nt, Homo sapiens
  misc_RNA (1)...(19): siRNA sense strand
uggccagcguggaggaugu

SEQ ID NO: 2367264 - RNA, 19 nt, Homo sapiens
  misc_RNA (1)...(19): siRNA sense strand
cagucauaguggagaacuc

SEQ ID NO: 2367265 - RNA, 19 nt, Homo sapiens
  misc_RNA (1)...(19): siRNA sense strand
aggcagucacucacaacaa

SEQ ID NO: 2367266 - RNA, 19 nt, Homo sapiens
  misc_RNA (1)...(19): siRNA sense strand
ccgagaagacggaggagga

SEQ ID NO: 2367267 - RNA, 19 nt, Homo sapiens
  misc_RNA (1)...(19): siRNA sense strand
acgaggaggaggagcgcaa

SEQ ID NO: 2367268 - RNA, 19 nt, Homo sapiens
  misc_RNA (1)...(19): siRNA sense strand
gagcaguuccagaaggaga

SEQ ID NO: 2367269 - RNA, 19 nt, Homo sapiens
  misc_RNA (1)...(19): siRNA sense strand
gccaguacauggagggcuu

SEQ ID NO: 2367270 - RNA, 19 nt, Homo sapiens
  misc_RNA (1)...(19): siRNA sense strand
agaaggagaaggaggaacu

SEQ ID NO: 2367271 - RNA, 19 nt, Homo sapiens
  misc_RNA (1)...(19): siRNA sense strand
gagcagaagcuggaggaga

SEQ ID NO: 2367272 - RNA, 19 nt, Homo sapiens
  misc_RNA (1)...(19): siRNA sense strand
ugaaggaguacgaggagga

SEQ ID NO: 2367273 - RNA, 19 nt, Homo sapiens
  misc_RNA (1)...(19): siRNA sense strand
guaaauaccaagcccgaga

SEQ ID NO: 2367274 - RNA, 19 nt, Homo sapiens
  misc_RNA (1)...(19): siRNA sense strand
aggugagggagcagaaaca

SEQ ID NO: 2367275 - RNA, 19 nt, Homo sapiens
  misc_RNA (1)...(19): siRNA sense strand
acaagaccuucguggaaaa

SEQ ID NO: 2367276 - RNA, 19 nt, Homo sapiens
  misc_RNA (1)...(19): siRNA sense strand
aggaguacgaggaggagga

SEQ ID NO: 2367277 - RNA, 19 nt, Homo sapiens
  misc_RNA (1)...(19): siRNA sense strand
gagaaggccaugaaggagu

SEQ ID NO: 2367278 - RNA, 19 nt, Homo sapiens
  misc_RNA (1)...(19): siRNA sense strand
aauacgagaaacagaucaa

SEQ ID NO: 2367279 - RNA, 19 nt, Homo sapiens
  misc_RNA (1)...(19): siRNA sense strand
ccaagagccuaaaggugga

SEQ ID NO: 2367280 - RNA, 19 nt, Homo sapiens
  misc_RNA (1)...(19): siRNA sense strand
ccaugaaggaguacgagga

SEQ ID NO: 2367281 - RNA, 19 nt, Homo sapiens
  misc_RNA (1)...(19): siRNA sense strand
cagcaagagcaugguaaau

SEQ ID NO: 2367282 - RNA, 19 nt, Homo sapiens
  misc_RNA (1)...(19): siRNA sense strand
agaggaaacugaaggagcu

SEQ ID NO: 2367283 - RNA, 19 nt, Homo sapiens
  misc_RNA (1)...(19): siRNA sense strand
acgacgagcuggaagccuu

SEQ ID NO: 2367284 - RNA, 19 nt, Homo sapiens
  misc_RNA (1)...(19): siRNA sense strand
agaucaagcacuuuggcau

SEQ ID NO: 2367285 - RNA, 19 nt, Homo sapiens
  misc_RNA (1)...(19): siRNA sense strand
gagaugcgcaagaaggaga

SEQ ID NO: 2367286 - RNA, 19 nt, Homo sapiens
  misc_RNA (1)...(19): siRNA sense strand
ccuagagguggaggagaaa

SEQ ID NO: 2367287 - RNA, 19 nt, Homo sapiens
  misc_RNA (1)...(19): siRNA sense strand
ggguggaacgcauggagca

SEQ ID NO: 2367288 - RNA, 19 nt, Homo sapiens
  misc_RNA (1)...(19): siRNA sense strand
aggaggugagggagcagaa

SEQ ID NO: 2367289 - RNA, 19 nt, Homo sapiens
  misc_RNA (1)...(19): siRNA sense strand
caauacagccucuaacaaa

SEQ ID NO: 2367290 - RNA, 19 nt, Homo sapiens
  misc_RNA (1)...(19): siRNA sense strand
agaaaaucguugugaaagu

SEQ ID NO: 2367291 - RNA, 19 nt, Homo sapiens
  misc_RNA (1)...(19): siRNA sense strand
aggcagacuucgagggguu

SEQ ID NO: 2367292 - RNA, 19 nt, Homo sapiens
  misc_RNA (1)...(19): siRNA sense strand
gcuaaauguguucgugaca

SEQ ID NO: 2367293 - RNA, 19 nt, Homo sapiens
  misc_RNA (1)...(19): siRNA sense strand
cuuaugagauuguccaaaa

SEQ ID NO: 2367294 - RNA, 19 nt, Homo sapiens
  misc_RNA (1)...(19): siRNA sense strand
accuaaaguucuuaugaga

SEQ ID NO: 2367295 - RNA, 19 nt, Homo sapiens
  misc_RNA (1)...(19): siRNA sense strand
ccuaaaguucuuaugagau

SEQ ID NO: 2367296 - RNA, 19 nt, Homo sapiens
  misc_RNA (1)...(19): siRNA sense strand
ggugguuccaugugugcua

SEQ ID NO: 2367297 - RNA, 19 nt, Homo sapiens
  misc_RNA (1)...(19): siRNA sense strand
caauacagccucuaacaaa

SEQ ID NO: 2367298 - RNA, 19 nt, Homo sapiens
  misc_RNA (1)...(19): siRNA sense strand
agaaaaucguugugaaagu

SEQ ID NO: 2367299 - RNA, 19 nt, Homo sapiens
  misc_RNA (1)...(19): siRNA sense strand
aggcagacuucgagggguu

SEQ ID NO: 2367300 - RNA, 19 nt, Homo sapiens
  misc_RNA (1)...(19): siRNA sense strand
gcuaaauguguucgugaca

SEQ ID NO: 2367301 - RNA, 19 nt, Homo sapiens
  misc_RNA (1)...(19): siRNA sense strand
cuuaugagauuguccaaaa

SEQ ID NO: 2367302 - RNA, 19 nt, Homo sapiens
  misc_RNA (1)...(19): siRNA sense strand
accuaaaguucuuaugaga

SEQ ID NO: 2367303 - RNA, 19 nt, Homo sapiens
  misc_RNA (1)...(19): siRNA sense strand
ccuaaaguucuuaugagau

SEQ ID NO: 2367304 - RNA, 19 nt, Homo sapiens
  misc_RNA (1)...(19): siRNA sense strand
ggugguuccaugugugcua

SEQ ID NO: 2367305 - RNA, 19 nt, Homo sapiens
  misc_RNA (1)...(19): siRNA sense strand
caguaaagucugucgcaaa

SEQ ID NO: 2367306 - RNA, 19 nt, Homo sapiens
  misc_RNA (1)...(19): siRNA sense strand
gagccaagaaggagcacaa

SEQ ID NO: 2367307 - RNA, 19 nt, Homo sapiens
  misc_RNA (1)...(19): siRNA sense strand
aagcaaggcaagaaagaga

SEQ ID NO: 2367308 - RNA, 19 nt, Homo sapiens
  misc_RNA (1)...(19): siRNA sense strand
aggaauuucuugagggaac

SEQ ID NO: 2367309 - RNA, 19 nt, Homo sapiens
  misc_RNA (1)...(19): siRNA sense strand
agaaggaacugaaaggcuu

SEQ ID NO: 2367310 - RNA, 19 nt, Homo sapiens
  misc_RNA (1)...(19): siRNA sense strand
agucaagagaucacaacaa

SEQ ID NO: 2367311 - RNA, 19 nt, Homo sapiens
  misc_RNA (1)...(19): siRNA sense strand
ccucaagaaggaacugaaa

SEQ ID NO: 2367312 - RNA, 19 nt, Homo sapiens
  misc_RNA (1)...(19): siRNA sense strand
ccaugauuguguugguauu

SEQ ID NO: 2367313 - RNA, 19 nt, Homo sapiens
  misc_RNA (1)...(19): siRNA sense strand
ggaaguuauaugaagccua

SEQ ID NO: 2367314 - RNA, 19 nt, Homo sapiens
  misc_RNA (1)...(19): siRNA sense strand
gggaaggacaugaugagga

SEQ ID NO: 2367315 - RNA, 19 nt, Homo sapiens
  misc_RNA (1)...(19): siRNA sense strand
augaugaggaaauuggaaa

SEQ ID NO: 2367316 - RNA, 19 nt, Homo sapiens
  misc_RNA (1)...(19): siRNA sense strand
aaggacaugaugaggaaau

SEQ ID NO: 2367317 - RNA, 19 nt, Homo sapiens
  misc_RNA (1)...(19): siRNA sense strand
uugaaauuguagagucaga

SEQ ID NO: 2367318 - RNA, 19 nt, Homo sapiens
  misc_RNA (1)...(19): siRNA sense strand
uuugaauggccauggcuaa

SEQ ID NO: 2367319 - RNA, 19 nt, Homo sapiens
  misc_RNA (1)...(19): siRNA sense strand
gcaaggcaagaaagagaau

SEQ ID NO: 2367320 - RNA, 19 nt, Homo sapiens
  misc_RNA (1)...(19): siRNA sense strand
ggcauugaacaaagcuaaa

SEQ ID NO: 2367321 - RNA, 19 nt, Homo sapiens
  misc_RNA (1)...(19): siRNA sense strand
ugaugaggaaauuggaaaa

SEQ ID NO: 2367322 - RNA, 19 nt, Homo sapiens
  misc_RNA (1)...(19): siRNA sense strand
caacaaauguccaaaccgu

SEQ ID NO: 2367323 - RNA, 19 nt, Homo sapiens
  misc_RNA (1)...(19): siRNA sense strand
uuguagagucagaugucaa

SEQ ID NO: 2367324 - RNA, 19 nt, Homo sapiens
  misc_RNA (1)...(19): siRNA sense strand
gcaaaagagaacuagccaa

SEQ ID NO: 2367325 - RNA, 19 nt, Homo sapiens
  misc_RNA (1)...(19): siRNA sense strand
ugguauuggacgagaugga

SEQ ID NO: 2367326 - RNA, 19 nt, Homo sapiens
  misc_RNA (1)...(19): siRNA sense strand
uggccauggcuaagcaauu

SEQ ID NO: 2367327 - RNA, 19 nt, Homo sapiens
  misc_RNA (1)...(19): siRNA sense strand
gguuggucuuauucacaua

SEQ ID NO: 2367328 - RNA, 19 nt, Homo sapiens
  misc_RNA (1)...(19): siRNA sense strand
uagccaaaguucaccaaaa

SEQ ID NO: 2367329 - RNA, 19 nt, Homo sapiens
  misc_RNA (1)...(19): siRNA sense strand
gcucugaaagauaaagcuu

SEQ ID NO: 2367330 - RNA, 19 nt, Homo sapiens
  misc_RNA (1)...(19): siRNA sense strand
agaucgacuuaaucaggua

SEQ ID NO: 2367331 - RNA, 19 nt, Homo sapiens
  misc_RNA (1)...(19): siRNA sense strand
ccaaacuagaaccaacaaa

SEQ ID NO: 2367332 - RNA, 19 nt, Homo sapiens
  misc_RNA (1)...(19): siRNA sense strand
ggaucaacuggacagcaaa

SEQ ID NO: 2367333 - RNA, 19 nt, Homo sapiens
  misc_RNA (1)...(19): siRNA sense strand
accaaagcaaggcaagaaa

SEQ ID NO: 2367334 - RNA, 19 nt, Homo sapiens
  misc_RNA (1)...(19): siRNA sense strand
ucaggaauuucuugaggga

SEQ ID NO: 2367335 - RNA, 19 nt, Homo sapiens
  misc_RNA (1)...(19): siRNA sense strand
augcaaagucucagaauau

SEQ ID NO: 2367336 - RNA, 19 nt, Homo sapiens
  misc_RNA (1)...(19): siRNA sense strand
acucuuaggguuugggaua

SEQ ID NO: 2367337 - RNA, 19 nt, Homo sapiens
  misc_RNA (1)...(19): siRNA sense strand
ccgaauaguuagugguucu

SEQ ID NO: 2367338 - RNA, 19 nt, Homo sapiens
  misc_RNA (1)...(19): siRNA sense strand
gguuguuaguggagcauau

SEQ ID NO: 2367339 - RNA, 19 nt, Homo sapiens
  misc_RNA (1)...(19): siRNA sense strand
gggacauacagguggagua

SEQ ID NO: 2367340 - RNA, 19 nt, Homo sapiens
  misc_RNA (1)...(19): siRNA sense strand
gggcauacuaauagagucu

SEQ ID NO: 2367341 - RNA, 19 nt, Homo sapiens
  misc_RNA (1)...(19): siRNA sense strand
acauaugaugcaagugaua

SEQ ID NO: 2367342 - RNA, 19 nt, Homo sapiens
  misc_RNA (1)...(19): siRNA sense strand
gguuugggauauugagaca

SEQ ID NO: 2367343 - RNA, 19 nt, Homo sapiens
  misc_RNA (1)...(19): siRNA sense strand
cggaaugggacugaagaaa

SEQ ID NO: 2367344 - RNA, 19 nt, Homo sapiens
  misc_RNA (1)...(19): siRNA sense strand
ugagaacauuagugggaca

SEQ ID NO: 2367345 - RNA, 19 nt, Homo sapiens
  misc_RNA (1)...(19): siRNA sense strand
ggauguggagacagggaau

SEQ ID NO: 2367346 - RNA, 19 nt, Homo sapiens
  misc_RNA (1)...(19): siRNA sense strand
cauugauaguugugaacca

SEQ ID NO: 2367347 - RNA, 19 nt, Homo sapiens
  misc_RNA (1)...(19): siRNA sense strand
ggucagcagucacaggcaa

SEQ ID NO: 2367348 - RNA, 19 nt, Homo sapiens
  misc_RNA (1)...(19): siRNA sense strand
caucauuaguggaucuaca

SEQ ID NO: 2367349 - RNA, 19 nt, Homo sapiens
  misc_RNA (1)...(19): siRNA sense strand
gcuacaagcagcucagaca

SEQ ID NO: 2367350 - RNA, 19 nt, Homo sapiens
  misc_RNA (1)...(19): siRNA sense strand
acucauugauaguugugaa

SEQ ID NO: 2367351 - RNA, 19 nt, Homo sapiens
  misc_RNA (1)...(19): siRNA sense strand
gcacaucaagagaagaaaa

SEQ ID NO: 2367352 - RNA, 19 nt, Homo sapiens
  misc_RNA (1)...(19): siRNA sense strand
cuaaggugcugaaaggaca

SEQ ID NO: 2367353 - RNA, 19 nt, Homo sapiens
  misc_RNA (1)...(19): siRNA sense strand
caucaagagaagaaaagua

SEQ ID NO: 2367354 - RNA, 19 nt, Homo sapiens
  misc_RNA (1)...(19): siRNA sense strand
uaacuggaggcgaggagaa

SEQ ID NO: 2367355 - RNA, 19 nt, Homo sapiens
  misc_RNA (1)...(19): siRNA sense strand
cuugaaaacgggugaauuu

SEQ ID NO: 2367356 - RNA, 19 nt, Homo sapiens
  misc_RNA (1)...(19): siRNA sense strand
uugcacaucaagagaagaa

SEQ ID NO: 2367357 - RNA, 19 nt, Homo sapiens
  misc_RNA (1)...(19): siRNA sense strand
auacacaguccauggaaaa

SEQ ID NO: 2367358 - RNA, 19 nt, Homo sapiens
  misc_RNA (1)...(19): siRNA sense strand
aggcaaaugucugagaaca

SEQ ID NO: 2367359 - RNA, 19 nt, Homo sapiens
  misc_RNA (1)...(19): siRNA sense strand
caucaucauuaguggaucu

SEQ ID NO: 2367360 - RNA, 19 nt, Homo sapiens
  misc_RNA (1)...(19): siRNA sense strand
cuggagagagaaaugcaaa

SEQ ID NO: 2367361 - RNA, 19 nt, Homo sapiens
  misc_RNA (1)...(19): siRNA sense strand
gaauuuuggcugaagacaa

SEQ ID NO: 2367362 - RNA, 19 nt, Homo sapiens
  misc_RNA (1)...(19): siRNA sense strand
acaguuaaaaucugggaua

SEQ ID NO: 2367363 - RNA, 19 nt, Homo sapiens
  misc_RNA (1)...(19): siRNA sense strand
ucggaaugggacugaagaa

SEQ ID NO: 2367364 - RNA, 19 nt, Homo sapiens
  misc_RNA (1)...(19): siRNA sense strand
agcacagaauugauacuaa

SEQ ID NO: 2367365 - RNA, 19 nt, Homo sapiens
  misc_RNA (1)...(19): siRNA sense strand
gauacuaacuggaggcgag

SEQ ID NO: 2367366 - RNA, 19 nt, Homo sapiens
  misc_RNA (1)...(19): siRNA sense strand
auaugaugcaagugauaga

SEQ ID NO: 2367367 - RNA, 19 nt, Homo sapiens
  misc_RNA (1)...(19): siRNA sense strand
gaaugcagagacuggagaa

SEQ ID NO: 2367368 - RNA, 19 nt, Homo sapiens
  misc_RNA (1)...(19): siRNA sense strand
ggugugggauccagagacu

SEQ ID NO: 2367369 - RNA, 19 nt, Homo sapiens
  misc_RNA (1)...(19): siRNA sense strand
gcaaagaagaggggauuga

SEQ ID NO: 2367370 - RNA, 19 nt, Homo sapiens
  misc_RNA (1)...(19): siRNA sense strand
gaguauggucaucacaaau

SEQ ID NO: 2367371 - RNA, 19 nt, Homo sapiens
  misc_RNA (1)...(19): siRNA sense strand
guggaauggaacucaaaga

SEQ ID NO: 2367372 - RNA, 19 nt, Homo sapiens
  misc_RNA (1)...(19): siRNA sense strand
gaggguuguuaguggagca

SEQ ID NO: 2367373 - RNA, 19 nt, Homo sapiens
  misc_RNA (1)...(19): siRNA sense strand
augcaaagucucagaauau

SEQ ID NO: 2367374 - RNA, 19 nt, Homo sapiens
  misc_RNA (1)...(19): siRNA sense strand
acucuuaggguuugggaua

SEQ ID NO: 2367375 - RNA, 19 nt, Homo sapiens
  misc_RNA (1)...(19): siRNA sense strand
ccgaauaguuagugguucu

SEQ ID NO: 2367376 - RNA, 19 nt, Homo sapiens
  misc_RNA (1)...(19): siRNA sense strand
gguuguuaguggagcauau

SEQ ID NO: 2367377 - RNA, 19 nt, Homo sapiens
  misc_RNA (1)...(19): siRNA sense strand
gggacauacagguggagua

SEQ ID NO: 2367378 - RNA, 19 nt, Homo sapiens
  misc_RNA (1)...(19): siRNA sense strand
gggcauacuaauagagucu

SEQ ID NO: 2367379 - RNA, 19 nt, Homo sapiens
  misc_RNA (1)...(19): siRNA sense strand
acauaugaugcaagugaua

SEQ ID NO: 2367380 - RNA, 19 nt, Homo sapiens
  misc_RNA (1)...(19): siRNA sense strand
gguuugggauauugagaca

SEQ ID NO: 2367381 - RNA, 19 nt, Homo sapiens
  misc_RNA (1)...(19): siRNA sense strand
cggaaugggacugaagaaa

SEQ ID NO: 2367382 - RNA, 19 nt, Homo sapiens
  misc_RNA (1)...(19): siRNA sense strand
ugagaacauuagugggaca

SEQ ID NO: 2367383 - RNA, 19 nt, Homo sapiens
  misc_RNA (1)...(19): siRNA sense strand
ggauguggagacagggaau

SEQ ID NO: 2367384 - RNA, 19 nt, Homo sapiens
  misc_RNA (1)...(19): siRNA sense strand
cauugauaguugugaacca

SEQ ID NO: 2367385 - RNA, 19 nt, Homo sapiens
  misc_RNA (1)...(19): siRNA sense strand
ggucagcagucacaggcaa

SEQ ID NO: 2367386 - RNA, 19 nt, Homo sapiens
  misc_RNA (1)...(19): siRNA sense strand
caucauuaguggaucuaca

SEQ ID NO: 2367387 - RNA, 19 nt, Homo sapiens
  misc_RNA (1)...(19): siRNA sense strand
gcuacaagcagcucagaca

SEQ ID NO: 2367388 - RNA, 19 nt, Homo sapiens
  misc_RNA (1)...(19): siRNA sense strand
acucauugauaguugugaa

SEQ ID NO: 2367389 - RNA, 19 nt, Homo sapiens
  misc_RNA (1)...(19): siRNA sense strand
gcacaucaagagaagaaaa

SEQ ID NO: 2367390 - RNA, 19 nt, Homo sapiens
  misc_RNA (1)...(19): siRNA sense strand
cuaaggugcugaaaggaca

SEQ ID NO: 2367391 - RNA, 19 nt, Homo sapiens
  misc_RNA (1)...(19): siRNA sense strand
caucaagagaagaaaagua

SEQ ID NO: 2367392 - RNA, 19 nt, Homo sapiens
  misc_RNA (1)...(19): siRNA sense strand
uaacuggaggcgaggagaa

SEQ ID NO: 2367393 - RNA, 19 nt, Homo sapiens
  misc_RNA (1)...(19): siRNA sense strand
cuugaaaacgggugaauuu

SEQ ID NO: 2367394 - RNA, 19 nt, Homo sapiens
  misc_RNA (1)...(19): siRNA sense strand
uugcacaucaagagaagaa

SEQ ID NO: 2367395 - RNA, 19 nt, Homo sapiens
  misc_RNA (1)...(19): siRNA sense strand
auacacaguccauggaaaa

SEQ ID NO: 2367396 - RNA, 19 nt, Homo sapiens
  misc_RNA (1)...(19): siRNA sense strand
aggcaaaugucugagaaca

SEQ ID NO: 2367397 - RNA, 19 nt, Homo sapiens
  misc_RNA (1)...(19): siRNA sense strand
caucaucauuaguggaucu

SEQ ID NO: 2367398 - RNA, 19 nt, Homo sapiens
  misc_RNA (1)...(19): siRNA sense strand
cuggagagagaaaugcaaa

SEQ ID NO: 2367399 - RNA, 19 nt, Homo sapiens
  misc_RNA (1)...(19): siRNA sense strand
gaauuuuggcugaagacaa

SEQ ID NO: 2367400 - RNA, 19 nt, Homo sapiens
  misc_RNA (1)...(19): siRNA sense strand
acaguuaaaaucugggaua

SEQ ID NO: 2367401 - RNA, 19 nt, Homo sapiens
  misc_RNA (1)...(19): siRNA sense strand
ucggaaugggacugaagaa

SEQ ID NO: 2367402 - RNA, 19 nt, Homo sapiens
  misc_RNA (1)...(19): siRNA sense strand
agcacagaauugauacuaa

SEQ ID NO: 2367403 - RNA, 19 nt, Homo sapiens
  misc_RNA (1)...(19): siRNA sense strand
gauacuaacuggaggcgag

SEQ ID NO: 2367404 - RNA, 19 nt, Homo sapiens
  misc_RNA (1)...(19): siRNA sense strand
auaugaugcaagugauaga

SEQ ID NO: 2367405 - RNA, 19 nt, Homo sapiens
  misc_RNA (1)...(19): siRNA sense strand
gaaugcagagacuggagaa

SEQ ID NO: 2367406 - RNA, 19 nt, Homo sapiens
  misc_RNA (1)...(19): siRNA sense strand
ggugugggauccagagacu

SEQ ID NO: 2367407 - RNA, 19 nt, Homo sapiens
  misc_RNA (1)...(19): siRNA sense strand
gcaaagaagaggggauuga

SEQ ID NO: 2367408 - RNA, 19 nt, Homo sapiens
  misc_RNA (1)...(19): siRNA sense strand
gaguauggucaucacaaau

SEQ ID NO: 2367409 - RNA, 19 nt, Homo sapiens
  misc_RNA (1)...(19): siRNA sense strand
guggaauggaacucaaaga

SEQ ID NO: 2367410 - RNA, 19 nt, Homo sapiens
  misc_RNA (1)...(19): siRNA sense strand
gaggguuguuaguggagca

SEQ ID NO: 2367411 - RNA, 19 nt, Homo sapiens
  misc_RNA (1)...(19): siRNA sense strand
aauccaagaucgagcgagu

SEQ ID NO: 2367412 - RNA, 19 nt, Homo sapiens
  misc_RNA (1)...(19): siRNA sense strand
ggauggaguucguguccga

SEQ ID NO: 2367413 - RNA, 19 nt, Homo sapiens
  misc_RNA (1)...(19): siRNA sense strand
agaucgagcgagugaacau

SEQ ID NO: 2367414 - RNA, 19 nt, Homo sapiens
  misc_RNA (1)...(19): siRNA sense strand
ucgugcugauggagcguua

SEQ ID NO: 2367415 - RNA, 19 nt, Homo sapiens
  misc_RNA (1)...(19): siRNA sense strand
cuucaucacccgagagaac

SEQ ID NO: 2367416 - RNA, 19 nt, Homo sapiens
  misc_RNA (1)...(19): siRNA sense strand
cugcaaaggaaauggacaa

SEQ ID NO: 2367417 - RNA, 19 nt, Homo sapiens
  misc_RNA (1)...(19): siRNA sense strand
guguagaagaagacagcaa

SEQ ID NO: 2367418 - RNA, 19 nt, Homo sapiens
  misc_RNA (1)...(19): siRNA sense strand
ggaugaaacugauggcucu

SEQ ID NO: 2367419 - RNA, 19 nt, Homo sapiens
  misc_RNA (1)...(19): siRNA sense strand
cgugagaagcccacagaca

SEQ ID NO: 2367420 - RNA, 19 nt, Homo sapiens
  misc_RNA (1)...(19): siRNA sense strand
ucugaagaggucaaagaaa

SEQ ID NO: 2367421 - RNA, 19 nt, Homo sapiens
  misc_RNA (1)...(19): siRNA sense strand
aagcagagucuuuacggaa

SEQ ID NO: 2367422 - RNA, 19 nt, Homo sapiens
  misc_RNA (1)...(19): siRNA sense strand
acuacaacugcaaaggaaa

SEQ ID NO: 2367423 - RNA, 19 nt, Homo sapiens
  misc_RNA (1)...(19): siRNA sense strand
agaagguggcccagcagaa

SEQ ID NO: 2367424 - RNA, 19 nt, Homo sapiens
  misc_RNA (1)...(19): siRNA sense strand
gggcagagaggcaagcuca

SEQ ID NO: 2367425 - RNA, 19 nt, Homo sapiens
  misc_RNA (1)...(19): siRNA sense strand
ucaucagagucaucagcaa

SEQ ID NO: 2367426 - RNA, 19 nt, Homo sapiens
  misc_RNA (1)...(19): siRNA sense strand
ggaugaggaagcagagucu

SEQ ID NO: 2367427 - RNA, 19 nt, Homo sapiens
  misc_RNA (1)...(19): siRNA sense strand
guagaagaagacagcaaca

SEQ ID NO: 2367428 - RNA, 19 nt, Homo sapiens
  misc_RNA (1)...(19): siRNA sense strand
gagauggagaaacgggaga

SEQ ID NO: 2367429 - RNA, 19 nt, Homo sapiens
  misc_RNA (1)...(19): siRNA sense strand
aagcagauuuggaugagca

SEQ ID NO: 2367430 - RNA, 19 nt, Homo sapiens
  misc_RNA (1)...(19): siRNA sense strand
gauauaaaguccaagcuug

SEQ ID NO: 2367431 - RNA, 19 nt, Homo sapiens
  misc_RNA (1)...(19): siRNA sense strand
augaggaagcagagucuuu

SEQ ID NO: 2367432 - RNA, 19 nt, Homo sapiens
  misc_RNA (1)...(19): siRNA sense strand
uaacagaacugaaauccga

SEQ ID NO: 2367433 - RNA, 19 nt, Homo sapiens
  misc_RNA (1)...(19): siRNA sense strand
gcgcaaaaugucagaaaug

SEQ ID NO: 2367434 - RNA, 19 nt, Homo sapiens
  misc_RNA (1)...(19): siRNA sense strand
guguagaagaagacagcaa

SEQ ID NO: 2367435 - RNA, 19 nt, Homo sapiens
  misc_RNA (1)...(19): siRNA sense strand
ggaugaaacugauggcucu

SEQ ID NO: 2367436 - RNA, 19 nt, Homo sapiens
  misc_RNA (1)...(19): siRNA sense strand
ucugaagaggucaaagaaa

SEQ ID NO: 2367437 - RNA, 19 nt, Homo sapiens
  misc_RNA (1)...(19): siRNA sense strand
agaagguggcccagcagaa

SEQ ID NO: 2367438 - RNA, 19 nt, Homo sapiens
  misc_RNA (1)...(19): siRNA sense strand
ucaucagagucaucagcaa

SEQ ID NO: 2367439 - RNA, 19 nt, Homo sapiens
  misc_RNA (1)...(19): siRNA sense strand
guagaagaagacagcaaca

SEQ ID NO: 2367440 - RNA, 19 nt, Homo sapiens
  misc_RNA (1)...(19): siRNA sense strand
gagauggagaaacgggaga

SEQ ID NO: 2367441 - RNA, 19 nt, Homo sapiens
  misc_RNA (1)...(19): siRNA sense strand
aagcagauuuggaugagca

SEQ ID NO: 2367442 - RNA, 19 nt, Homo sapiens
  misc_RNA (1)...(19): siRNA sense strand
gauauaaaguccaagcuug

SEQ ID NO: 2367443 - RNA, 19 nt, Homo sapiens
  misc_RNA (1)...(19): siRNA sense strand
uaacagaacugaaauccga

SEQ ID NO: 2367444 - RNA, 19 nt, Homo sapiens
  misc_RNA (1)...(19): siRNA sense strand
gcgcaaaaugucagaaaug

SEQ ID NO: 2367445 - RNA, 19 nt, Homo sapiens
  misc_RNA (1)...(19): siRNA sense strand
guguagaagaagacagcaa

SEQ ID NO: 2367446 - RNA, 19 nt, Homo sapiens
  misc_RNA (1)...(19): siRNA sense strand
ggaugaaacugauggcucu

SEQ ID NO: 2367447 - RNA, 19 nt, Homo sapiens
  misc_RNA (1)...(19): siRNA sense strand
ucugaagaggucaaagaaa

SEQ ID NO: 2367448 - RNA, 19 nt, Homo sapiens
  misc_RNA (1)...(19): siRNA sense strand
agaagguggcccagcagaa

SEQ ID NO: 2367449 - RNA, 19 nt, Homo sapiens
  misc_RNA (1)...(19): siRNA sense strand
guagaagaagacagcaaca

SEQ ID NO: 2367450 - RNA, 19 nt, Homo sapiens
  misc_RNA (1)...(19): siRNA sense strand
gagauggagaaacgggaga

SEQ ID NO: 2367451 - RNA, 19 nt, Homo sapiens
  misc_RNA (1)...(19): siRNA sense strand
aagcagauuuggaugagca

SEQ ID NO: 2367452 - RNA, 19 nt, Homo sapiens
  misc_RNA (1)...(19): siRNA sense strand
gauauaaaguccaagcuug

SEQ ID NO: 2367453 - RNA, 19 nt, Homo sapiens
  misc_RNA (1)...(19): siRNA sense strand
gcgcaaaaugucagaaaug

SEQ ID NO: 2367454 - RNA, 19 nt, Homo sapiens
  misc_RNA (1)...(19): siRNA sense strand
cugcaaaggaaauggacaa

SEQ ID NO: 2367455 - RNA, 19 nt, Homo sapiens
  misc_RNA (1)...(19): siRNA sense strand
guguagaagaagacagcaa

SEQ ID NO: 2367456 - RNA, 19 nt, Homo sapiens
  misc_RNA (1)...(19): siRNA sense strand
ggaugaaacugauggcucu

SEQ ID NO: 2367457 - RNA, 19 nt, Homo sapiens
  misc_RNA (1)...(19): siRNA sense strand
cgugagaagcccacagaca

SEQ ID NO: 2367458 - RNA, 19 nt, Homo sapiens
  misc_RNA (1)...(19): siRNA sense strand
ucugaagaggucaaagaaa

SEQ ID NO: 2367459 - RNA, 19 nt, Homo sapiens
  misc_RNA (1)...(19): siRNA sense strand
aagcagagucuuuacggaa

SEQ ID NO: 2367460 - RNA, 19 nt, Homo sapiens
  misc_RNA (1)...(19): siRNA sense strand
acuacaacugcaaaggaaa

SEQ ID NO: 2367461 - RNA, 19 nt, Homo sapiens
  misc_RNA (1)...(19): siRNA sense strand
agaagguggcccagcagaa

SEQ ID NO: 2367462 - RNA, 19 nt, Homo sapiens
  misc_RNA (1)...(19): siRNA sense strand
gggcagagaggcaagcuca

SEQ ID NO: 2367463 - RNA, 19 nt, Homo sapiens
  misc_RNA (1)...(19): siRNA sense strand
ggaugaggaagcagagucu

SEQ ID NO: 2367464 - RNA, 19 nt, Homo sapiens
  misc_RNA (1)...(19): siRNA sense strand
guagaagaagacagcaaca

SEQ ID NO: 2367465 - RNA, 19 nt, Homo sapiens
  misc_RNA (1)...(19): siRNA sense strand
gagauggagaaacgggaga

SEQ ID NO: 2367466 - RNA, 19 nt, Homo sapiens
  misc_RNA (1)...(19): siRNA sense strand
aagcagauuuggaugagca

SEQ ID NO: 2367467 - RNA, 19 nt, Homo sapiens
  misc_RNA (1)...(19): siRNA sense strand
gauauaaaguccaagcuug

SEQ ID NO: 2367468 - RNA, 19 nt, Homo sapiens
  misc_RNA (1)...(19): siRNA sense strand
augaggaagcagagucuuu

SEQ ID NO: 2367469 - RNA, 19 nt, Homo sapiens
  misc_RNA (1)...(19): siRNA sense strand
gcgcaaaaugucagaaaug

SEQ ID NO: 2367470 - RNA, 19 nt, Homo sapiens
  misc_RNA (1)...(19): siRNA sense strand
ucauaaagucucugcguuc

SEQ ID NO: 2367471 - RNA, 19 nt, Homo sapiens
  misc_RNA (1)...(19): siRNA sense strand
caggagaucuacagggaca

SEQ ID NO: 2367472 - RNA, 19 nt, Homo sapiens
  misc_RNA (1)...(19): siRNA sense strand
agagaaucuacgaggccua

SEQ ID NO: 2367473 - RNA, 19 nt, Homo sapiens
  misc_RNA (1)...(19): siRNA sense strand
cggaauucgccaaggccau

SEQ ID NO: 2367474 - RNA, 19 nt, Homo sapiens
  misc_RNA (1)...(19): siRNA sense strand
ccaagaucugagaaagcaa

SEQ ID NO: 2367475 - RNA, 19 nt, Homo sapiens
  misc_RNA (1)...(19): siRNA sense strand
aagcaaaacugaaagcaga

SEQ ID NO: 2367476 - RNA, 19 nt, Homo sapiens
  misc_RNA (1)...(19): siRNA sense strand
aggccuacuugaagaacuu

SEQ ID NO: 2367477 - RNA, 19 nt, Homo sapiens
  misc_RNA (1)...(19): siRNA sense strand
gcguauggaaauggguuua

SEQ ID NO: 2367478 - RNA, 19 nt, Homo sapiens
  misc_RNA (1)...(19): siRNA sense strand
ugaacaugacauagaagau

SEQ ID NO: 2367479 - RNA, 19 nt, Homo sapiens
  misc_RNA (1)...(19): siRNA sense strand
ucaacaugaacaaggucaa

SEQ ID NO: 2367480 - RNA, 19 nt, Homo sapiens
  misc_RNA (1)...(19): siRNA sense strand
ggguuuauaacucgugaau

SEQ ID NO: 2367481 - RNA, 19 nt, Homo sapiens
  misc_RNA (1)...(19): siRNA sense strand
gugauaucauggaacccaa

SEQ ID NO: 2367482 - RNA, 19 nt, Homo sapiens
  misc_RNA (1)...(19): siRNA sense strand
cugcaagaaaugggaaaca

SEQ ID NO: 2367483 - RNA, 19 nt, Homo sapiens
  misc_RNA (1)...(19): siRNA sense strand
aaugccaagaucugagaaa

SEQ ID NO: 2367484 - RNA, 19 nt, Homo sapiens
  misc_RNA (1)...(19): siRNA sense strand
cgggaugcugguagcguau

SEQ ID NO: 2367485 - RNA, 19 nt, Homo sapiens
  misc_RNA (1)...(19): siRNA sense strand
uaucauuugcuguggagau

SEQ ID NO: 2367486 - RNA, 19 nt, Homo sapiens
  misc_RNA (1)...(19): siRNA sense strand
ccaguggagcauugaacau

SEQ ID NO: 2367487 - RNA, 19 nt, Homo sapiens
  misc_RNA (1)...(19): siRNA sense strand
gugaaggcugcaagggcuu

SEQ ID NO: 2367488 - RNA, 19 nt, Homo sapiens
  misc_RNA (1)...(19): siRNA sense strand
gcgccaaagacccggacaa

SEQ ID NO: 2367489 - RNA, 19 nt, Homo sapiens
  misc_RNA (1)...(19): siRNA sense strand
ccaaguggaagaagcgcaa

SEQ ID NO: 2367490 - RNA, 19 nt, Homo sapiens
  misc_RNA (1)...(19): siRNA sense strand
ccgacaucuuuaugcguga

SEQ ID NO: 2367491 - RNA, 19 nt, Homo sapiens
  misc_RNA (1)...(19): siRNA sense strand
acacagucucuaugagcuu

SEQ ID NO: 2367492 - RNA, 19 nt, Homo sapiens
  misc_RNA (1)...(19): siRNA sense strand
agaagaauggagugggcaa

SEQ ID NO: 2367493 - RNA, 19 nt, Homo sapiens
  misc_RNA (1)...(19): siRNA sense strand
ccaucaagggacagaagaa

SEQ ID NO: 2367494 - RNA, 19 nt, Homo sapiens
  misc_RNA (1)...(19): siRNA sense strand
ucauugaggacaacgggaa

SEQ ID NO: 2367495 - RNA, 19 nt, Homo sapiens
  misc_RNA (1)...(19): siRNA sense strand
cagaagaugacgcggguac

SEQ ID NO: 2367496 - RNA, 19 nt, Homo sapiens
  misc_RNA (1)...(19): siRNA sense strand
auuccaaggugcuggccau

SEQ ID NO: 2367497 - RNA, 19 nt, Homo sapiens
  misc_RNA (1)...(19): siRNA sense strand
ggacuauguuguuggcaca

SEQ ID NO: 2367498 - RNA, 19 nt, Homo sapiens
  misc_RNA (1)...(19): siRNA sense strand
ugucacuaccauaggauau

SEQ ID NO: 2367499 - RNA, 19 nt, Homo sapiens
  misc_RNA (1)...(19): siRNA sense strand
ccaagaaaggacugggaag

SEQ ID NO: 2367500 - RNA, 19 nt, Homo sapiens
  misc_RNA (1)...(19): siRNA sense strand
aagagaaagaagagagcaa

SEQ ID NO: 2367501 - RNA, 19 nt, Homo sapiens
  misc_RNA (1)...(19): siRNA sense strand
gagaaagaagagagcaaaa

SEQ ID NO: 2367502 - RNA, 19 nt, Homo sapiens
  misc_RNA (1)...(19): siRNA sense strand
ggccaaagcaucagcacca

SEQ ID NO: 2367503 - RNA, 19 nt, Homo sapiens
  misc_RNA (1)...(19): siRNA sense strand
ccaaagagaaagaagagag

SEQ ID NO: 2367504 - RNA, 19 nt, Homo sapiens
  misc_RNA (1)...(19): siRNA sense strand
gggaaaggaagaugccugu

SEQ ID NO: 2367505 - RNA, 19 nt, Homo sapiens
  misc_RNA (1)...(19): siRNA sense strand
aagagaaagaagagagcaa

SEQ ID NO: 2367506 - RNA, 19 nt, Homo sapiens
  misc_RNA (1)...(19): siRNA sense strand
gagaaagaagagagcaaaa

SEQ ID NO: 2367507 - RNA, 19 nt, Homo sapiens
  misc_RNA (1)...(19): siRNA sense strand
ggccaaagcaucagcacca

SEQ ID NO: 2367508 - RNA, 19 nt, Homo sapiens
  misc_RNA (1)...(19): siRNA sense strand
ccaaagagaaagaagagag

SEQ ID NO: 2367509 - RNA, 19 nt, Homo sapiens
  misc_RNA (1)...(19): siRNA sense strand
gggaaaggaagaugccugu

SEQ ID NO: 2367510 - RNA, 19 nt, Homo sapiens
  misc_RNA (1)...(19): siRNA sense strand
gaacagaucuuguccggaa

SEQ ID NO: 2367511 - RNA, 19 nt, Homo sapiens
  misc_RNA (1)...(19): siRNA sense strand
ugacuaaagacgcggguga

SEQ ID NO: 2367512 - RNA, 19 nt, Homo sapiens
  misc_RNA (1)...(19): siRNA sense strand
gcuucugacgagauggaaa

SEQ ID NO: 2367513 - RNA, 19 nt, Homo sapiens
  misc_RNA (1)...(19): siRNA sense strand
cuucugacgagauggaaau

SEQ ID NO: 2367514 - RNA, 19 nt, Homo sapiens
  misc_RNA (1)...(19): siRNA sense strand
guaaauuucuggauggcaa

SEQ ID NO: 2367515 - RNA, 19 nt, Homo sapiens
  misc_RNA (1)...(19): siRNA sense strand
ggcugaaggaggaggacaa

SEQ ID NO: 2367516 - RNA, 19 nt, Homo sapiens
  misc_RNA (1)...(19): siRNA sense strand
uugucaaggugguggccaa

SEQ ID NO: 2367517 - RNA, 19 nt, Homo sapiens
  misc_RNA (1)...(19): siRNA sense strand
gaauggacaucuuugccaa

SEQ ID NO: 2367518 - RNA, 19 nt, Homo sapiens
  misc_RNA (1)...(19): siRNA sense strand
ugaaugggcugaaggagga

SEQ ID NO: 2367519 - RNA, 19 nt, Homo sapiens
  misc_RNA (1)...(19): siRNA sense strand
uggugaaagcauaggaaac

SEQ ID NO: 2367520 - RNA, 19 nt, Homo sapiens
  misc_RNA (1)...(19): siRNA sense strand
agucaaaacggauguaaau

SEQ ID NO: 2367521 - RNA, 19 nt, Homo sapiens
  misc_RNA (1)...(19): siRNA sense strand
cggauguaaauaagauuga

SEQ ID NO: 2367522 - RNA, 19 nt, Homo sapiens
  misc_RNA (1)...(19): siRNA sense strand
uaucaagaauucaaggcca

SEQ ID NO: 2367523 - RNA, 19 nt, Homo sapiens
  misc_RNA (1)...(19): siRNA sense strand
cuuaaagcuuucaccaaaa

SEQ ID NO: 2367524 - RNA, 19 nt, Homo sapiens
  misc_RNA (1)...(19): siRNA sense strand
ccugaaaacccugcagaaa

SEQ ID NO: 2367525 - RNA, 19 nt, Homo sapiens
  misc_RNA (1)...(19): siRNA sense strand
ggaagaacaaagaaggaaa

SEQ ID NO: 2367526 - RNA, 19 nt, Homo sapiens
  misc_RNA (1)...(19): siRNA sense strand
agaagaaauugaagccaaa

SEQ ID NO: 2367527 - RNA, 19 nt, Homo sapiens
  misc_RNA (1)...(19): siRNA sense strand
gcgagauaguacaggaauu

SEQ ID NO: 2367528 - RNA, 19 nt, Homo sapiens
  misc_RNA (1)...(19): siRNA sense strand
auguaaaugcugugcgaaa

SEQ ID NO: 2367529 - RNA, 19 nt, Homo sapiens
  misc_RNA (1)...(19): siRNA sense strand
uggaaauauugcuggacaa

SEQ ID NO: 2367530 - RNA, 19 nt, Homo sapiens
  misc_RNA (1)...(19): siRNA sense strand
gagaagagaaggaagaaaa

SEQ ID NO: 2367531 - RNA, 19 nt, Homo sapiens
  misc_RNA (1)...(19): siRNA sense strand
acuuagagauggugcgauu

SEQ ID NO: 2367532 - RNA, 19 nt, Homo sapiens
  misc_RNA (1)...(19): siRNA sense strand
agugauaacaugaggauuu

SEQ ID NO: 2367533 - RNA, 19 nt, Homo sapiens
  misc_RNA (1)...(19): siRNA sense strand
uguaagaaggucaaagaaa

SEQ ID NO: 2367534 - RNA, 19 nt, Homo sapiens
  misc_RNA (1)...(19): siRNA sense strand
gaauagaaccacagcuaau

SEQ ID NO: 2367535 - RNA, 19 nt, Homo sapiens
  misc_RNA (1)...(19): siRNA sense strand
augcacagacugagaguaa

SEQ ID NO: 2367536 - RNA, 19 nt, Homo sapiens
  misc_RNA (1)...(19): siRNA sense strand
agacaugggcucugacaua

SEQ ID NO: 2367537 - RNA, 19 nt, Homo sapiens
  misc_RNA (1)...(19): siRNA sense strand
gagaaggacaugaagaaau

SEQ ID NO: 2367538 - RNA, 19 nt, Homo sapiens
  misc_RNA (1)...(19): siRNA sense strand
cgauauagaacuagggugu

SEQ ID NO: 2367539 - RNA, 19 nt, Homo sapiens
  misc_RNA (1)...(19): siRNA sense strand
gagggaagaaggauggaaa

SEQ ID NO: 2367540 - RNA, 19 nt, Homo sapiens
  misc_RNA (1)...(19): siRNA sense strand
cuucaacacauuugggaaa

SEQ ID NO: 2367541 - RNA, 19 nt, Homo sapiens
  misc_RNA (1)...(19): siRNA sense strand
guucagaaggagauguaaa

SEQ ID NO: 2367542 - RNA, 19 nt, Homo sapiens
  misc_RNA (1)...(19): siRNA sense strand
cagagaaggugaauggaga

SEQ ID NO: 2367543 - RNA, 19 nt, Homo sapiens
  misc_RNA (1)...(19): siRNA sense strand
gcgcggaucaagagcauaa

SEQ ID NO: 2367544 - RNA, 19 nt, Homo sapiens
  misc_RNA (1)...(19): siRNA sense strand
uagaagaaauugaagccaa

SEQ ID NO: 2367545 - RNA, 19 nt, Homo sapiens
  misc_RNA (1)...(19): siRNA sense strand
gugaauagaaccacagcua

SEQ ID NO: 2367546 - RNA, 19 nt, Homo sapiens
  misc_RNA (1)...(19): siRNA sense strand
aggaagaacugaagugguu

SEQ ID NO: 2367547 - RNA, 19 nt, Homo sapiens
  misc_RNA (1)...(19): siRNA sense strand
augcaggagcugagauuaa

SEQ ID NO: 2367548 - RNA, 19 nt, Homo sapiens
  misc_RNA (1)...(19): siRNA sense strand
agauaaagggcauuacaaa

SEQ ID NO: 2367549 - RNA, 19 nt, Homo sapiens
  misc_RNA (1)...(19): siRNA sense strand
caaauaaagagcacaggaa

SEQ ID NO: 2367550 - RNA, 19 nt, Homo sapiens
  misc_RNA (1)...(19): siRNA sense strand
augugaagguggugcgcua

SEQ ID NO: 2367551 - RNA, 19 nt, Homo sapiens
  misc_RNA (1)...(19): siRNA sense strand
aaccauagcagcagauaaa

SEQ ID NO: 2367552 - RNA, 19 nt, Homo sapiens
  misc_RNA (1)...(19): siRNA sense strand
acauaaaugcucagauaga

SEQ ID NO: 2367553 - RNA, 19 nt, Homo sapiens
  misc_RNA (1)...(19): siRNA sense strand
aaagagaagagaaggaaga

SEQ ID NO: 2367554 - RNA, 19 nt, Homo sapiens
  misc_RNA (1)...(19): siRNA sense strand
gauaaagggcauuacaaau

SEQ ID NO: 2367555 - RNA, 19 nt, Homo sapiens
  misc_RNA (1)...(19): siRNA sense strand
gcgaggaagaagaggacga

SEQ ID NO: 2367556 - RNA, 19 nt, Homo sapiens
  misc_RNA (1)...(19): siRNA sense strand
aagaaggaaacuagaagaa

SEQ ID NO: 2367557 - RNA, 19 nt, Homo sapiens
  misc_RNA (1)...(19): siRNA sense strand
ucgagaaggacaugaagaa

SEQ ID NO: 2367558 - RNA, 19 nt, Homo sapiens
  misc_RNA (1)...(19): siRNA sense strand
cucuagaacugguagcaaa

SEQ ID NO: 2367559 - RNA, 19 nt, Homo sapiens
  misc_RNA (1)...(19): siRNA sense strand
guaacaacagcgaggaaga

SEQ ID NO: 2367560 - RNA, 19 nt, Homo sapiens
  misc_RNA (1)...(19): siRNA sense strand
ggaagaggucaaugaugaa

SEQ ID NO: 2367561 - RNA, 19 nt, Homo sapiens
  misc_RNA (1)...(19): siRNA sense strand
ggucauuuggaguuaguua

SEQ ID NO: 2367562 - RNA, 19 nt, Homo sapiens
  misc_RNA (1)...(19): siRNA sense strand
gagcaaauaucaaugcaca

SEQ ID NO: 2367563 - RNA, 19 nt, Homo sapiens
  misc_RNA (1)...(19): siRNA sense strand
cucaagagauacagcuuua

SEQ ID NO: 2367564 - RNA, 19 nt, Homo sapiens
  misc_RNA (1)...(19): siRNA sense strand
agucaauaguacaagccaa

SEQ ID NO: 2367565 - RNA, 19 nt, Homo sapiens
  misc_RNA (1)...(19): siRNA sense strand
cauuaagaacccagugaau

SEQ ID NO: 2367566 - RNA, 19 nt, Homo sapiens
  misc_RNA (1)...(19): siRNA sense strand
aggucaaugaugaagguua

SEQ ID NO: 2367567 - RNA, 19 nt, Homo sapiens
  misc_RNA (1)...(19): siRNA sense strand
gucaauaguacaagccaaa

SEQ ID NO: 2367568 - RNA, 19 nt, Homo sapiens
  misc_RNA (1)...(19): siRNA sense strand
gaaaguaguaacagcaaca

SEQ ID NO: 2367569 - RNA, 19 nt, Homo sapiens
  misc_RNA (1)...(19): siRNA sense strand
cgccauagcaaucagaaua

SEQ ID NO: 2367570 - RNA, 19 nt, Homo sapiens
  misc_RNA (1)...(19): siRNA sense strand
gggaaucaaaggugacauu

SEQ ID NO: 2367571 - RNA, 19 nt, Homo sapiens
  misc_RNA (1)...(19): siRNA sense strand
agagagaggagcuaguaua

SEQ ID NO: 2367572 - RNA, 19 nt, Homo sapiens
  misc_RNA (1)...(19): siRNA sense strand
aguacaagccaaagauaga

SEQ ID NO: 2367573 - RNA, 19 nt, Homo sapiens
  misc_RNA (1)...(19): siRNA sense strand
gggaagaaggauggaaaga

SEQ ID NO: 2367574 - RNA, 19 nt, Homo sapiens
  misc_RNA (1)...(19): siRNA sense strand
agaaacagcccuuuggauu

SEQ ID NO: 2367575 - RNA, 19 nt, Homo sapiens
  misc_RNA (1)...(19): siRNA sense strand
ccagauugcugcuagaaaa

SEQ ID NO: 2367576 - RNA, 19 nt, Homo sapiens
  misc_RNA (1)...(19): siRNA sense strand
uuacaaauucugugagcuu

SEQ ID NO: 2367577 - RNA, 19 nt, Homo sapiens
  misc_RNA (1)...(19): siRNA sense strand
ggauccagacaaagaaauu

SEQ ID NO: 2367578 - RNA, 19 nt, Homo sapiens
  misc_RNA (1)...(19): siRNA sense strand
aaucuaugcuaucaggaaa

SEQ ID NO: 2367579 - RNA, 19 nt, Homo sapiens
  misc_RNA (1)...(19): siRNA sense strand
caagcaauggagcgagaua

SEQ ID NO: 2367580 - RNA, 19 nt, Homo sapiens
  misc_RNA (1)...(19): siRNA sense strand
aaaugaacacacagaggaa

SEQ ID NO: 2367581 - RNA, 19 nt, Homo sapiens
  misc_RNA (1)...(19): siRNA sense strand
ccaaaggaagagagaaaau

SEQ ID NO: 2367582 - RNA, 19 nt, Homo sapiens
  misc_RNA (1)...(19): siRNA sense strand
ugugauauccagagugauu

SEQ ID NO: 2367583 - RNA, 19 nt, Homo sapiens
  misc_RNA (1)...(19): siRNA sense strand
auugaagggcgaaguguaa

SEQ ID NO: 2367584 - RNA, 19 nt, Homo sapiens
  misc_RNA (1)...(19): siRNA sense strand
ggcauuacuucuuggucaa

SEQ ID NO: 2367585 - RNA, 19 nt, Homo sapiens
  misc_RNA (1)...(19): siRNA sense strand
aggaagaagaggacgacga

SEQ ID NO: 2367586 - RNA, 19 nt, Homo sapiens
  misc_RNA (1)...(19): siRNA sense strand
accacaaggccaagcguaa

SEQ ID NO: 2367587 - RNA, 19 nt, Homo sapiens
  misc_RNA (1)...(19): siRNA sense strand
acagaagaaacucaagaaa

SEQ ID NO: 2367588 - RNA, 19 nt, Homo sapiens
  misc_RNA (1)...(19): siRNA sense strand
gcgaaugugaauagaacca

SEQ ID NO: 2367589 - RNA, 19 nt, Homo sapiens
  misc_RNA (1)...(19): siRNA sense strand
ugacaaaccaccugccaau

SEQ ID NO: 2367590 - RNA, 19 nt, Homo sapiens
  misc_RNA (1)...(19): siRNA sense strand
agauagaaaccaaucggaa

SEQ ID NO: 2367591 - RNA, 19 nt, Homo sapiens
  misc_RNA (1)...(19): siRNA sense strand
gcuauguagauguuguaaa

SEQ ID NO: 2367592 - RNA, 19 nt, Homo sapiens
  misc_RNA (1)...(19): siRNA sense strand
aggaggugguggagcuauu

SEQ ID NO: 2367593 - RNA, 19 nt, Homo sapiens
  misc_RNA (1)...(19): siRNA sense strand
uggcaaggcuucaauaaaa

SEQ ID NO: 2367594 - RNA, 19 nt, Homo sapiens
  misc_RNA (1)...(19): siRNA sense strand
cgagaaggacaugaagaaa

SEQ ID NO: 2367595 - RNA, 19 nt, Homo sapiens
  misc_RNA (1)...(19): siRNA sense strand
guugauagaagcagcaaaa

SEQ ID NO: 2367596 - RNA, 19 nt, Homo sapiens
  misc_RNA (1)...(19): siRNA sense strand
ggaagaacaaagaaggaaa

SEQ ID NO: 2367597 - RNA, 19 nt, Homo sapiens
  misc_RNA (1)...(19): siRNA sense strand
agaagaaauugaagccaaa

SEQ ID NO: 2367598 - RNA, 19 nt, Homo sapiens
  misc_RNA (1)...(19): siRNA sense strand
gcgagauaguacaggaauu

SEQ ID NO: 2367599 - RNA, 19 nt, Homo sapiens
  misc_RNA (1)...(19): siRNA sense strand
auguaaaugcugugcgaaa

SEQ ID NO: 2367600 - RNA, 19 nt, Homo sapiens
  misc_RNA (1)...(19): siRNA sense strand
uggaaauauugcuggacaa

SEQ ID NO: 2367601 - RNA, 19 nt, Homo sapiens
  misc_RNA (1)...(19): siRNA sense strand
gagaagagaaggaagaaaa

SEQ ID NO: 2367602 - RNA, 19 nt, Homo sapiens
  misc_RNA (1)...(19): siRNA sense strand
acuuagagauggugcgauu

SEQ ID NO: 2367603 - RNA, 19 nt, Homo sapiens
  misc_RNA (1)...(19): siRNA sense strand
agugauaacaugaggauuu

SEQ ID NO: 2367604 - RNA, 19 nt, Homo sapiens
  misc_RNA (1)...(19): siRNA sense strand
uguaagaaggucaaagaaa

SEQ ID NO: 2367605 - RNA, 19 nt, Homo sapiens
  misc_RNA (1)...(19): siRNA sense strand
gaauagaaccacagcuaau

SEQ ID NO: 2367606 - RNA, 19 nt, Homo sapiens
  misc_RNA (1)...(19): siRNA sense strand
augcacagacugagaguaa

SEQ ID NO: 2367607 - RNA, 19 nt, Homo sapiens
  misc_RNA (1)...(19): siRNA sense strand
agacaugggcucugacaua

SEQ ID NO: 2367608 - RNA, 19 nt, Homo sapiens
  misc_RNA (1)...(19): siRNA sense strand
gagaaggacaugaagaaau

SEQ ID NO: 2367609 - RNA, 19 nt, Homo sapiens
  misc_RNA (1)...(19): siRNA sense strand
cgauauagaacuagggugu

SEQ ID NO: 2367610 - RNA, 19 nt, Homo sapiens
  misc_RNA (1)...(19): siRNA sense strand
gagggaagaaggauggaaa

SEQ ID NO: 2367611 - RNA, 19 nt, Homo sapiens
  misc_RNA (1)...(19): siRNA sense strand
cuucaacacauuugggaaa

SEQ ID NO: 2367612 - RNA, 19 nt, Homo sapiens
  misc_RNA (1)...(19): siRNA sense strand
guucagaaggagauguaaa

SEQ ID NO: 2367613 - RNA, 19 nt, Homo sapiens
  misc_RNA (1)...(19): siRNA sense strand
cagagaaggugaauggaga

SEQ ID NO: 2367614 - RNA, 19 nt, Homo sapiens
  misc_RNA (1)...(19): siRNA sense strand
gcgcggaucaagagcauaa

SEQ ID NO: 2367615 - RNA, 19 nt, Homo sapiens
  misc_RNA (1)...(19): siRNA sense strand
uagaagaaauugaagccaa

SEQ ID NO: 2367616 - RNA, 19 nt, Homo sapiens
  misc_RNA (1)...(19): siRNA sense strand
gugaauagaaccacagcua

SEQ ID NO: 2367617 - RNA, 19 nt, Homo sapiens
  misc_RNA (1)...(19): siRNA sense strand
aggaagaacugaagugguu

SEQ ID NO: 2367618 - RNA, 19 nt, Homo sapiens
  misc_RNA (1)...(19): siRNA sense strand
augcaggagcugagauuaa

SEQ ID NO: 2367619 - RNA, 19 nt, Homo sapiens
  misc_RNA (1)...(19): siRNA sense strand
agauaaagggcauuacaaa

SEQ ID NO: 2367620 - RNA, 19 nt, Homo sapiens
  misc_RNA (1)...(19): siRNA sense strand
caaauaaagagcacaggaa

SEQ ID NO: 2367621 - RNA, 19 nt, Homo sapiens
  misc_RNA (1)...(19): siRNA sense strand
augugaagguggugcgcua

SEQ ID NO: 2367622 - RNA, 19 nt, Homo sapiens
  misc_RNA (1)...(19): siRNA sense strand
aaccauagcagcagauaaa

SEQ ID NO: 2367623 - RNA, 19 nt, Homo sapiens
  misc_RNA (1)...(19): siRNA sense strand
acauaaaugcucagauaga

SEQ ID NO: 2367624 - RNA, 19 nt, Homo sapiens
  misc_RNA (1)...(19): siRNA sense strand
aaagagaagagaaggaaga

SEQ ID NO: 2367625 - RNA, 19 nt, Homo sapiens
  misc_RNA (1)...(19): siRNA sense strand
gauaaagggcauuacaaau

SEQ ID NO: 2367626 - RNA, 19 nt, Homo sapiens
  misc_RNA (1)...(19): siRNA sense strand
gcgaggaagaagaggacga

SEQ ID NO: 2367627 - RNA, 19 nt, Homo sapiens
  misc_RNA (1)...(19): siRNA sense strand
aagaaggaaacuagaagaa

SEQ ID NO: 2367628 - RNA, 19 nt, Homo sapiens
  misc_RNA (1)...(19): siRNA sense strand
ucgagaaggacaugaagaa

SEQ ID NO: 2367629 - RNA, 19 nt, Homo sapiens
  misc_RNA (1)...(19): siRNA sense strand
cucuagaacugguagcaaa

SEQ ID NO: 2367630 - RNA, 19 nt, Homo sapiens
  misc_RNA (1)...(19): siRNA sense strand
guaacaacagcgaggaaga

SEQ ID NO: 2367631 - RNA, 19 nt, Homo sapiens
  misc_RNA (1)...(19): siRNA sense strand
ggaagaggucaaugaugaa

SEQ ID NO: 2367632 - RNA, 19 nt, Homo sapiens
  misc_RNA (1)...(19): siRNA sense strand
ggucauuuggaguuaguua

SEQ ID NO: 2367633 - RNA, 19 nt, Homo sapiens
  misc_RNA (1)...(19): siRNA sense strand
gagcaaauaucaaugcaca

SEQ ID NO: 2367634 - RNA, 19 nt, Homo sapiens
  misc_RNA (1)...(19): siRNA sense strand
cucaagagauacagcuuua

SEQ ID NO: 2367635 - RNA, 19 nt, Homo sapiens
  misc_RNA (1)...(19): siRNA sense strand
agucaauaguacaagccaa

SEQ ID NO: 2367636 - RNA, 19 nt, Homo sapiens
  misc_RNA (1)...(19): siRNA sense strand
cauuaagaacccagugaau

SEQ ID NO: 2367637 - RNA, 19 nt, Homo sapiens
  misc_RNA (1)...(19): siRNA sense strand
aggucaaugaugaagguua

SEQ ID NO: 2367638 - RNA, 19 nt, Homo sapiens
  misc_RNA (1)...(19): siRNA sense strand
gucaauaguacaagccaaa

SEQ ID NO: 2367639 - RNA, 19 nt, Homo sapiens
  misc_RNA (1)...(19): siRNA sense strand
gaaaguaguaacagcaaca

SEQ ID NO: 2367640 - RNA, 19 nt, Homo sapiens
  misc_RNA (1)...(19): siRNA sense strand
cgccauagcaaucagaaua

SEQ ID NO: 2367641 - RNA, 19 nt, Homo sapiens
  misc_RNA (1)...(19): siRNA sense strand
gggaaucaaaggugacauu

SEQ ID NO: 2367642 - RNA, 19 nt, Homo sapiens
  misc_RNA (1)...(19): siRNA sense strand
agagagaggagcuaguaua

SEQ ID NO: 2367643 - RNA, 19 nt, Homo sapiens
  misc_RNA (1)...(19): siRNA sense strand
aguacaagccaaagauaga

SEQ ID NO: 2367644 - RNA, 19 nt, Homo sapiens
  misc_RNA (1)...(19): siRNA sense strand
gggaagaaggauggaaaga

SEQ ID NO: 2367645 - RNA, 19 nt, Homo sapiens
  misc_RNA (1)...(19): siRNA sense strand
agaaacagcccuuuggauu

SEQ ID NO: 2367646 - RNA, 19 nt, Homo sapiens
  misc_RNA (1)...(19): siRNA sense strand
ccagauugcugcuagaaaa

SEQ ID NO: 2367647 - RNA, 19 nt, Homo sapiens
  misc_RNA (1)...(19): siRNA sense strand
uuacaaauucugugagcuu

SEQ ID NO: 2367648 - RNA, 19 nt, Homo sapiens
  misc_RNA (1)...(19): siRNA sense strand
ggauccagacaaagaaauu

SEQ ID NO: 2367649 - RNA, 19 nt, Homo sapiens
  misc_RNA (1)...(19): siRNA sense strand
aaucuaugcuaucaggaaa

SEQ ID NO: 2367650 - RNA, 19 nt, Homo sapiens
  misc_RNA (1)...(19): siRNA sense strand
caagcaauggagcgagaua

SEQ ID NO: 2367651 - RNA, 19 nt, Homo sapiens
  misc_RNA (1)...(19): siRNA sense strand
aaaugaacacacagaggaa

SEQ ID NO: 2367652 - RNA, 19 nt, Homo sapiens
  misc_RNA (1)...(19): siRNA sense strand
ccaaaggaagagagaaaau

SEQ ID NO: 2367653 - RNA, 19 nt, Homo sapiens
  misc_RNA (1)...(19): siRNA sense strand
ugugauauccagagugauu

SEQ ID NO: 2367654 - RNA, 19 nt, Homo sapiens
  misc_RNA (1)...(19): siRNA sense strand
auugaagggcgaaguguaa

SEQ ID NO: 2367655 - RNA, 19 nt, Homo sapiens
  misc_RNA (1)...(19): siRNA sense strand
ggcauuacuucuuggucaa

SEQ ID NO: 2367656 - RNA, 19 nt, Homo sapiens
  misc_RNA (1)...(19): siRNA sense strand
aggaagaagaggacgacga

SEQ ID NO: 2367657 - RNA, 19 nt, Homo sapiens
  misc_RNA (1)...(19): siRNA sense strand
accacaaggccaagcguaa

SEQ ID NO: 2367658 - RNA, 19 nt, Homo sapiens
  misc_RNA (1)...(19): siRNA sense strand
acagaagaaacucaagaaa

SEQ ID NO: 2367659 - RNA, 19 nt, Homo sapiens
  misc_RNA (1)...(19): siRNA sense strand
gcgaaugugaauagaacca

SEQ ID NO: 2367660 - RNA, 19 nt, Homo sapiens
  misc_RNA (1)...(19): siRNA sense strand
ugacaaaccaccugccaau

SEQ ID NO: 2367661 - RNA, 19 nt, Homo sapiens
  misc_RNA (1)...(19): siRNA sense strand
agauagaaaccaaucggaa

SEQ ID NO: 2367662 - RNA, 19 nt, Homo sapiens
  misc_RNA (1)...(19): siRNA sense strand
gcuauguagauguuguaaa

SEQ ID NO: 2367663 - RNA, 19 nt, Homo sapiens
  misc_RNA (1)...(19): siRNA sense strand
aggaggugguggagcuauu

SEQ ID NO: 2367664 - RNA, 19 nt, Homo sapiens
  misc_RNA (1)...(19): siRNA sense strand
uggcaaggcuucaauaaaa

SEQ ID NO: 2367665 - RNA, 19 nt, Homo sapiens
  misc_RNA (1)...(19): siRNA sense strand
cgagaaggacaugaagaaa

SEQ ID NO: 2367666 - RNA, 19 nt, Homo sapiens
  misc_RNA (1)...(19): siRNA sense strand
guugauagaagcagcaaaa

SEQ ID NO: 2367667 - RNA, 19 nt, Homo sapiens
  misc_RNA (1)...(19): siRNA sense strand
gcaaccaguuugaggggaa

SEQ ID NO: 2367668 - RNA, 19 nt, Homo sapiens
  misc_RNA (1)...(19): siRNA sense strand
ggccagagcuucaguggga

SEQ ID NO: 2367669 - RNA, 19 nt, Homo sapiens
  misc_RNA (1)...(19): siRNA sense strand
gcgaggagcucaaggaccu

SEQ ID NO: 2367670 - RNA, 19 nt, Homo sapiens
  misc_RNA (1)...(19): siRNA sense strand
acgaaagugaagacagaca

SEQ ID NO: 2367671 - RNA, 19 nt, Homo sapiens
  misc_RNA (1)...(19): siRNA sense strand
gggcagagcugguagaacg

SEQ ID NO: 2367672 - RNA, 19 nt, Homo sapiens
  misc_RNA (1)...(19): siRNA sense strand
gaagcuaucuggaggcgca

SEQ ID NO: 2367673 - RNA, 19 nt, Homo sapiens
  misc_RNA (1)...(19): siRNA sense strand
gcgugguggaggugacaga

SEQ ID NO: 2367674 - RNA, 19 nt, Homo sapiens
  misc_RNA (1)...(19): siRNA sense strand
ugaagaagcuggaccacgu

SEQ ID NO: 2367675 - RNA, 19 nt, Homo sapiens
  misc_RNA (1)...(19): siRNA sense strand
gcaaccaguuugaggggaa

SEQ ID NO: 2367676 - RNA, 19 nt, Homo sapiens
  misc_RNA (1)...(19): siRNA sense strand
ggccagagcuucaguggga

SEQ ID NO: 2367677 - RNA, 19 nt, Homo sapiens
  misc_RNA (1)...(19): siRNA sense strand
gcgaggagcucaaggaccu

SEQ ID NO: 2367678 - RNA, 19 nt, Homo sapiens
  misc_RNA (1)...(19): siRNA sense strand
acgaaagugaagacagaca

SEQ ID NO: 2367679 - RNA, 19 nt, Homo sapiens
  misc_RNA (1)...(19): siRNA sense strand
gggcagagcugguagaacg

SEQ ID NO: 2367680 - RNA, 19 nt, Homo sapiens
  misc_RNA (1)...(19): siRNA sense strand
gaagcuaucuggaggcgca

SEQ ID NO: 2367681 - RNA, 19 nt, Homo sapiens
  misc_RNA (1)...(19): siRNA sense strand
gcgugguggaggugacaga

SEQ ID NO: 2367682 - RNA, 19 nt, Homo sapiens
  misc_RNA (1)...(19): siRNA sense strand
ugaagaagcuggaccacgu

SEQ ID NO: 2367683 - RNA, 19 nt, Homo sapiens
  misc_RNA (1)...(19): siRNA sense strand
gcaaccaguuugaggggaa

SEQ ID NO: 2367684 - RNA, 19 nt, Homo sapiens
  misc_RNA (1)...(19): siRNA sense strand
ggccagagcuucaguggga

SEQ ID NO: 2367685 - RNA, 19 nt, Homo sapiens
  misc_RNA (1)...(19): siRNA sense strand
gcgaggagcucaaggaccu

SEQ ID NO: 2367686 - RNA, 19 nt, Homo sapiens
  misc_RNA (1)...(19): siRNA sense strand
acgaaagugaagacagaca

SEQ ID NO: 2367687 - RNA, 19 nt, Homo sapiens
  misc_RNA (1)...(19): siRNA sense strand
gggcagagcugguagaacg

SEQ ID NO: 2367688 - RNA, 19 nt, Homo sapiens
  misc_RNA (1)...(19): siRNA sense strand
gaagcuaucuggaggcgca

SEQ ID NO: 2367689 - RNA, 19 nt, Homo sapiens
  misc_RNA (1)...(19): siRNA sense strand
gcgugguggaggugacaga

SEQ ID NO: 2367690 - RNA, 19 nt, Homo sapiens
  misc_RNA (1)...(19): siRNA sense strand
ugaagaagcuggaccacgu

SEQ ID NO: 2367691 - RNA, 19 nt, Homo sapiens
  misc_RNA (1)...(19): siRNA sense strand
agacaagagcuguagggaa

SEQ ID NO: 2367692 - RNA, 19 nt, Homo sapiens
  misc_RNA (1)...(19): siRNA sense strand
gggauacauuuaagcgcaa

SEQ ID NO: 2367693 - RNA, 19 nt, Homo sapiens
  misc_RNA (1)...(19): siRNA sense strand
ggacuuagcagcagcggau

SEQ ID NO: 2367694 - RNA, 19 nt, Homo sapiens
  misc_RNA (1)...(19): siRNA sense strand
uggcuuuggaacagguaaa

SEQ ID NO: 2367695 - RNA, 19 nt, Homo sapiens
  misc_RNA (1)...(19): siRNA sense strand
agguaaaaguuaugggacu

SEQ ID NO: 2367696 - RNA, 19 nt, Homo sapiens
  misc_RNA (1)...(19): siRNA sense strand
ucguauuggcuuuggaaca

SEQ ID NO: 2367697 - RNA, 19 nt, Homo sapiens
  misc_RNA (1)...(19): siRNA sense strand
acccauauguaaaggccua

SEQ ID NO: 2367698 - RNA, 19 nt, Homo sapiens
  misc_RNA (1)...(19): siRNA sense strand
auaacgaaauacugcggua

SEQ ID NO: 2367699 - RNA, 19 nt, Homo sapiens
  misc_RNA (1)...(19): siRNA sense strand
aucuggaaguuaaaggaaa

SEQ ID NO: 2367700 - RNA, 19 nt, Homo sapiens
  misc_RNA (1)...(19): siRNA sense strand
uggcaaucuggaaguuaaa

SEQ ID NO: 2367701 - RNA, 19 nt, Homo sapiens
  misc_RNA (1)...(19): siRNA sense strand
cguucagacccauauguaa

SEQ ID NO: 2367702 - RNA, 19 nt, Homo sapiens
  misc_RNA (1)...(19): siRNA sense strand
gauacauuuaagcgcaaua

SEQ ID NO: 2367703 - RNA, 19 nt, Homo sapiens
  misc_RNA (1)...(19): siRNA sense strand
aaaaugggcaagaagaaaa

SEQ ID NO: 2367704 - RNA, 19 nt, Homo sapiens
  misc_RNA (1)...(19): siRNA sense strand
ucugggagaagaugguaaa

SEQ ID NO: 2367705 - RNA, 19 nt, Homo sapiens
  misc_RNA (1)...(19): siRNA sense strand
uccagauacaaguaggaaa

SEQ ID NO: 2367706 - RNA, 19 nt, Homo sapiens
  misc_RNA (1)...(19): siRNA sense strand
gggaaaaccaccaacccua

SEQ ID NO: 2367707 - RNA, 19 nt, Homo sapiens
  misc_RNA (1)...(19): siRNA sense strand
caacuggagaagugcacau

SEQ ID NO: 2367708 - RNA, 19 nt, Homo sapiens
  misc_RNA (1)...(19): siRNA sense strand
cgggauacauuuaagcgca

SEQ ID NO: 2367709 - RNA, 19 nt, Homo sapiens
  misc_RNA (1)...(19): siRNA sense strand
uaguggagacuuuggcaau

SEQ ID NO: 2367710 - RNA, 19 nt, Homo sapiens
  misc_RNA (1)...(19): siRNA sense strand
gaaguggacuggauggacu

SEQ ID NO: 2367711 - RNA, 19 nt, Homo sapiens
  misc_RNA (1)...(19): siRNA sense strand
agacaagagcuguagggaa

SEQ ID NO: 2367712 - RNA, 19 nt, Homo sapiens
  misc_RNA (1)...(19): siRNA sense strand
gggauacauuuaagcgcaa

SEQ ID NO: 2367713 - RNA, 19 nt, Homo sapiens
  misc_RNA (1)...(19): siRNA sense strand
ggacuuagcagcagcggau

SEQ ID NO: 2367714 - RNA, 19 nt, Homo sapiens
  misc_RNA (1)...(19): siRNA sense strand
uggcuuuggaacagguaaa

SEQ ID NO: 2367715 - RNA, 19 nt, Homo sapiens
  misc_RNA (1)...(19): siRNA sense strand
agguaaaaguuaugggacu

SEQ ID NO: 2367716 - RNA, 19 nt, Homo sapiens
  misc_RNA (1)...(19): siRNA sense strand
ucguauuggcuuuggaaca

SEQ ID NO: 2367717 - RNA, 19 nt, Homo sapiens
  misc_RNA (1)...(19): siRNA sense strand
acccauauguaaaggccua

SEQ ID NO: 2367718 - RNA, 19 nt, Homo sapiens
  misc_RNA (1)...(19): siRNA sense strand
auaacgaaauacugcggua

SEQ ID NO: 2367719 - RNA, 19 nt, Homo sapiens
  misc_RNA (1)...(19): siRNA sense strand
aucuggaaguuaaaggaaa

SEQ ID NO: 2367720 - RNA, 19 nt, Homo sapiens
  misc_RNA (1)...(19): siRNA sense strand
uggcaaucuggaaguuaaa

SEQ ID NO: 2367721 - RNA, 19 nt, Homo sapiens
  misc_RNA (1)...(19): siRNA sense strand
cguucagacccauauguaa

SEQ ID NO: 2367722 - RNA, 19 nt, Homo sapiens
  misc_RNA (1)...(19): siRNA sense strand
gauacauuuaagcgcaaua

SEQ ID NO: 2367723 - RNA, 19 nt, Homo sapiens
  misc_RNA (1)...(19): siRNA sense strand
aaaaugggcaagaagaaaa

SEQ ID NO: 2367724 - RNA, 19 nt, Homo sapiens
  misc_RNA (1)...(19): siRNA sense strand
ucugggagaagaugguaaa

SEQ ID NO: 2367725 - RNA, 19 nt, Homo sapiens
  misc_RNA (1)...(19): siRNA sense strand
uccagauacaaguaggaaa

SEQ ID NO: 2367726 - RNA, 19 nt, Homo sapiens
  misc_RNA (1)...(19): siRNA sense strand
gggaaaaccaccaacccua

SEQ ID NO: 2367727 - RNA, 19 nt, Homo sapiens
  misc_RNA (1)...(19): siRNA sense strand
caacuggagaagugcacau

SEQ ID NO: 2367728 - RNA, 19 nt, Homo sapiens
  misc_RNA (1)...(19): siRNA sense strand
uaguggagacuuuggcaau

SEQ ID NO: 2367729 - RNA, 19 nt, Homo sapiens
  misc_RNA (1)...(19): siRNA sense strand
cgggauacauuuaagcgca

SEQ ID NO: 2367730 - RNA, 19 nt, Homo sapiens
  misc_RNA (1)...(19): siRNA sense strand
gaaguggacuggauggacu

SEQ ID NO: 2367731 - RNA, 19 nt, Homo sapiens
  misc_RNA (1)...(19): siRNA sense strand
aagaagaaauagacgccuu

SEQ ID NO: 2367732 - RNA, 19 nt, Homo sapiens
  misc_RNA (1)...(19): siRNA sense strand
ccugaagauuaucggcuau

SEQ ID NO: 2367733 - RNA, 19 nt, Homo sapiens
  misc_RNA (1)...(19): siRNA sense strand
agaauuuaguagaggagcu

SEQ ID NO: 2367734 - RNA, 19 nt, Homo sapiens
  misc_RNA (1)...(19): siRNA sense strand
acuucagggauuacauaaa

SEQ ID NO: 2367735 - RNA, 19 nt, Homo sapiens
  misc_RNA (1)...(19): siRNA sense strand
aguacacacaagaagaaau

SEQ ID NO: 2367736 - RNA, 19 nt, Homo sapiens
  misc_RNA (1)...(19): siRNA sense strand
acaaagagucagagagaga

SEQ ID NO: 2367737 - RNA, 19 nt, Homo sapiens
  misc_RNA (1)...(19): siRNA sense strand
gagagagauggaagagaaa

SEQ ID NO: 2367738 - RNA, 19 nt, Homo sapiens
  misc_RNA (1)...(19): siRNA sense strand
agaaagaggaagaaaugaa

SEQ ID NO: 2367739 - RNA, 19 nt, Homo sapiens
  misc_RNA (1)...(19): siRNA sense strand
cuacagaagaagagagcca

SEQ ID NO: 2367740 - RNA, 19 nt, Homo sapiens
  misc_RNA (1)...(19): siRNA sense strand
cgaaagaaagaggaagaaa

SEQ ID NO: 2367741 - RNA, 19 nt, Homo sapiens
  misc_RNA (1)...(19): siRNA sense strand
gaggaagaaaugaagcaaa

SEQ ID NO: 2367742 - RNA, 19 nt, Homo sapiens
  misc_RNA (1)...(19): siRNA sense strand
cagcauugcaggaagagaa

SEQ ID NO: 2367743 - RNA, 19 nt, Homo sapiens
  misc_RNA (1)...(19): siRNA sense strand
cagucuagaggaagaguua

SEQ ID NO: 2367744 - RNA, 19 nt, Homo sapiens
  misc_RNA (1)...(19): siRNA sense strand
aggagcagcaccagaaaua

SEQ ID NO: 2367745 - RNA, 19 nt, Homo sapiens
  misc_RNA (1)...(19): siRNA sense strand
aggcuaaagauaagcaauu

SEQ ID NO: 2367746 - RNA, 19 nt, Homo sapiens
  misc_RNA (1)...(19): siRNA sense strand
ccaaagaugauuaucgaau

SEQ ID NO: 2367747 - RNA, 19 nt, Homo sapiens
  misc_RNA (1)...(19): siRNA sense strand
cguggaagauuuaacgaau

SEQ ID NO: 2367748 - RNA, 19 nt, Homo sapiens
  misc_RNA (1)...(19): siRNA sense strand
uagaggaagaguuaagaaa

SEQ ID NO: 2367749 - RNA, 19 nt, Homo sapiens
  misc_RNA (1)...(19): siRNA sense strand
uggcagagaaucagguauu

SEQ ID NO: 2367750 - RNA, 19 nt, Homo sapiens
  misc_RNA (1)...(19): siRNA sense strand
ccuucuagaugaugcaaau

SEQ ID NO: 2367751 - RNA, 19 nt, Homo sapiens
  misc_RNA (1)...(19): siRNA sense strand
aaaugaagcaaauggaaga

SEQ ID NO: 2367752 - RNA, 19 nt, Homo sapiens
  misc_RNA (1)...(19): siRNA sense strand
cagacuagaagcagccaaa

SEQ ID NO: 2367753 - RNA, 19 nt, Homo sapiens
  misc_RNA (1)...(19): siRNA sense strand
agcaaauggaagaacgaua

SEQ ID NO: 2367754 - RNA, 19 nt, Homo sapiens
  misc_RNA (1)...(19): siRNA sense strand
agggauucucugaaggaaa

SEQ ID NO: 2367755 - RNA, 19 nt, Homo sapiens
  misc_RNA (1)...(19): siRNA sense strand
aauacguugugaagaguua

SEQ ID NO: 2367756 - RNA, 19 nt, Homo sapiens
  misc_RNA (1)...(19): siRNA sense strand
gcugaugaguaaagaaucu

SEQ ID NO: 2367757 - RNA, 19 nt, Homo sapiens
  misc_RNA (1)...(19): siRNA sense strand
caaagaaagcagauaaacu

SEQ ID NO: 2367758 - RNA, 19 nt, Homo sapiens
  misc_RNA (1)...(19): siRNA sense strand
aauuggaggcuaaagauaa

SEQ ID NO: 2367759 - RNA, 19 nt, Homo sapiens
  misc_RNA (1)...(19): siRNA sense strand
gagcugaugaguaaagaau

SEQ ID NO: 2367760 - RNA, 19 nt, Homo sapiens
  misc_RNA (1)...(19): siRNA sense strand
gcuagaagaccuuggugau

SEQ ID NO: 2367761 - RNA, 19 nt, Homo sapiens
  misc_RNA (1)...(19): siRNA sense strand
agaucgacgugcugagaca

SEQ ID NO: 2367762 - RNA, 19 nt, Homo sapiens
  misc_RNA (1)...(19): siRNA sense strand
ugggaaugacccugcauaa

SEQ ID NO: 2367763 - RNA, 19 nt, Homo sapiens
  misc_RNA (1)...(19): siRNA sense strand
cugucagucuagaggaaga

SEQ ID NO: 2367764 - RNA, 19 nt, Homo sapiens
  misc_RNA (1)...(19): siRNA sense strand
auucaagagcugaugagua

SEQ ID NO: 2367765 - RNA, 19 nt, Homo sapiens
  misc_RNA (1)...(19): siRNA sense strand
cugagaacagaaagggauu

SEQ ID NO: 2367766 - RNA, 19 nt, Homo sapiens
  misc_RNA (1)...(19): siRNA sense strand
gggaaugacccugcauaaa

SEQ ID NO: 2367767 - RNA, 19 nt, Homo sapiens
  misc_RNA (1)...(19): siRNA sense strand
agguauuaauggaaagacu

SEQ ID NO: 2367768 - RNA, 19 nt, Homo sapiens
  misc_RNA (1)...(19): siRNA sense strand
aaagaagcuugaagaacau

SEQ ID NO: 2367769 - RNA, 19 nt, Homo sapiens
  misc_RNA (1)...(19): siRNA sense strand
uacaagaagcuuuacgaaa

SEQ ID NO: 2367770 - RNA, 19 nt, Homo sapiens
  misc_RNA (1)...(19): siRNA sense strand
guuccacucauuagagaaa

SEQ ID NO: 2367771 - RNA, 19 nt, Homo sapiens
  misc_RNA (1)...(19): siRNA sense strand
gaaucaaagacuucuggaa

SEQ ID NO: 2367772 - RNA, 19 nt, Homo sapiens
  misc_RNA (1)...(19): siRNA sense strand
guuuguuggcagagaauca

SEQ ID NO: 2367773 - RNA, 19 nt, Homo sapiens
  misc_RNA (1)...(19): siRNA sense strand
cagaaauacaagcucuuaa

SEQ ID NO: 2367774 - RNA, 19 nt, Homo sapiens
  misc_RNA (1)...(19): siRNA sense strand
agaacagcuccaagaagaa

SEQ ID NO: 2367775 - RNA, 19 nt, Homo sapiens
  misc_RNA (1)...(19): siRNA sense strand
gcugagaacagaaagggau

SEQ ID NO: 2367776 - RNA, 19 nt, Homo sapiens
  misc_RNA (1)...(19): siRNA sense strand
gucuucagcaugagaauaa

SEQ ID NO: 2367777 - RNA, 19 nt, Homo sapiens
  misc_RNA (1)...(19): siRNA sense strand
cguugugaagaguuagaaa

SEQ ID NO: 2367778 - RNA, 19 nt, Homo sapiens
  misc_RNA (1)...(19): siRNA sense strand
uacgaaagaaagaggaaga

SEQ ID NO: 2367779 - RNA, 19 nt, Homo sapiens
  misc_RNA (1)...(19): siRNA sense strand
gugaacagaagcaagagua

SEQ ID NO: 2367780 - RNA, 19 nt, Homo sapiens
  misc_RNA (1)...(19): siRNA sense strand
gugaagaguuagaaaagga

SEQ ID NO: 2367781 - RNA, 19 nt, Homo sapiens
  misc_RNA (1)...(19): siRNA sense strand
gaaucaaagaaagcagaua

SEQ ID NO: 2367782 - RNA, 19 nt, Homo sapiens
  misc_RNA (1)...(19): siRNA sense strand
uugaagaacaucuagagaa

SEQ ID NO: 2367783 - RNA, 19 nt, Homo sapiens
  misc_RNA (1)...(19): siRNA sense strand
aaugaagcuuugucagcaa

SEQ ID NO: 2367784 - RNA, 19 nt, Homo sapiens
  misc_RNA (1)...(19): siRNA sense strand
gggagaaacuuauucgucu

SEQ ID NO: 2367785 - RNA, 19 nt, Homo sapiens
  misc_RNA (1)...(19): siRNA sense strand
aauggaagaacgauacaaa

SEQ ID NO: 2367786 - RNA, 19 nt, Homo sapiens
  misc_RNA (1)...(19): siRNA sense strand
ggacaggcugagaacagaa

SEQ ID NO: 2367787 - RNA, 19 nt, Homo sapiens
  misc_RNA (1)...(19): siRNA sense strand
auacuuagagaaagccaaa

SEQ ID NO: 2367788 - RNA, 19 nt, Homo sapiens
  misc_RNA (1)...(19): siRNA sense strand
gaaucaaggagcagcacca

SEQ ID NO: 2367789 - RNA, 19 nt, Homo sapiens
  misc_RNA (1)...(19): siRNA sense strand
gagaaaacaaagagucaga

SEQ ID NO: 2367790 - RNA, 19 nt, Homo sapiens
  misc_RNA (1)...(19): siRNA sense strand
uaauuggaggcuaaagaua

SEQ ID NO: 2367791 - RNA, 19 nt, Homo sapiens
  misc_RNA (1)...(19): siRNA sense strand
gaaaauuggcuaaacagaa

SEQ ID NO: 2367792 - RNA, 19 nt, Homo sapiens
  misc_RNA (1)...(19): siRNA sense strand
uaacaguccagcaggaaga

SEQ ID NO: 2367793 - RNA, 19 nt, Homo sapiens
  misc_RNA (1)...(19): siRNA sense strand
gggaaaugguccaaaggga

SEQ ID NO: 2367794 - RNA, 19 nt, Homo sapiens
  misc_RNA (1)...(19): siRNA sense strand
ggaaaugguccaaagggau

SEQ ID NO: 2367795 - RNA, 19 nt, Homo sapiens
  misc_RNA (1)...(19): siRNA sense strand
ucgaaagugucaugcggaa

SEQ ID NO: 2367796 - RNA, 19 nt, Homo sapiens
  misc_RNA (1)...(19): siRNA sense strand
cgaaagugucaugcggaaa

SEQ ID NO: 2367797 - RNA, 19 nt, Homo sapiens
  misc_RNA (1)...(19): siRNA sense strand
uccaaagggaucaggaaau

SEQ ID NO: 2367798 - RNA, 19 nt, Homo sapiens
  misc_RNA (1)...(19): siRNA sense strand
ccgggagcaauaugggaaa

SEQ ID NO: 2367799 - RNA, 19 nt, Homo sapiens
  misc_RNA (1)...(19): siRNA sense strand
ccucguggcaauugaucaa

SEQ ID NO: 2367800 - RNA, 19 nt, Homo sapiens
  misc_RNA (1)...(19): siRNA sense strand
gcuggauggccuagaggau

SEQ ID NO: 2367801 - RNA, 19 nt, Homo sapiens
  misc_RNA (1)...(19): siRNA sense strand
gggcagagacuacaagcca

SEQ ID NO: 2367802 - RNA, 19 nt, Homo sapiens
  misc_RNA (1)...(19): siRNA sense strand
ucauguucccugugggcua

SEQ ID NO: 2367803 - RNA, 19 nt, Homo sapiens
  misc_RNA (1)...(19): siRNA sense strand
ccaucuucucugugaauuu

SEQ ID NO: 2367804 - RNA, 19 nt, Homo sapiens
  misc_RNA (1)...(19): siRNA sense strand
caguuauccugcaggcaca

SEQ ID NO: 2367805 - RNA, 19 nt, Homo sapiens
  misc_RNA (1)...(19): siRNA sense strand
caauaugggaaauggucca

SEQ ID NO: 2367806 - RNA, 19 nt, Homo sapiens
  misc_RNA (1)...(19): siRNA sense strand
cuggaaucaggcacagaaa

SEQ ID NO: 2367807 - RNA, 19 nt, Homo sapiens
  misc_RNA (1)...(19): siRNA sense strand
ucuuacaggcgcuggauga

SEQ ID NO: 2367808 - RNA, 19 nt, Homo sapiens
  misc_RNA (1)...(19): siRNA sense strand
guguaaagccauccagaac

SEQ ID NO: 2367809 - RNA, 19 nt, Homo sapiens
  misc_RNA (1)...(19): siRNA sense strand
ggauguggucacugggcca

SEQ ID NO: 2367810 - RNA, 19 nt, Homo sapiens
  misc_RNA (1)...(19): siRNA sense strand
accacaggcugcagcacaa

SEQ ID NO: 2367811 - RNA, 19 nt, Homo sapiens
  misc_RNA (1)...(19): siRNA sense strand
gcacguggugucugggcau

SEQ ID NO: 2367812 - RNA, 19 nt, Homo sapiens
  misc_RNA (1)...(19): siRNA sense strand
gggaucaggaaauugaaaa

SEQ ID NO: 2367813 - RNA, 19 nt, Homo sapiens
  misc_RNA (1)...(19): siRNA sense strand
gggaaaugguccaaaggga

SEQ ID NO: 2367814 - RNA, 19 nt, Homo sapiens
  misc_RNA (1)...(19): siRNA sense strand
ggaaaugguccaaagggau

SEQ ID NO: 2367815 - RNA, 19 nt, Homo sapiens
  misc_RNA (1)...(19): siRNA sense strand
ucgaaagugucaugcggaa

SEQ ID NO: 2367816 - RNA, 19 nt, Homo sapiens
  misc_RNA (1)...(19): siRNA sense strand
cgaaagugucaugcggaaa

SEQ ID NO: 2367817 - RNA, 19 nt, Homo sapiens
  misc_RNA (1)...(19): siRNA sense strand
uccaaagggaucaggaaau

SEQ ID NO: 2367818 - RNA, 19 nt, Homo sapiens
  misc_RNA (1)...(19): siRNA sense strand
ccgggagcaauaugggaaa

SEQ ID NO: 2367819 - RNA, 19 nt, Homo sapiens
  misc_RNA (1)...(19): siRNA sense strand
ccucguggcaauugaucaa

SEQ ID NO: 2367820 - RNA, 19 nt, Homo sapiens
  misc_RNA (1)...(19): siRNA sense strand
gcuggauggccuagaggau

SEQ ID NO: 2367821 - RNA, 19 nt, Homo sapiens
  misc_RNA (1)...(19): siRNA sense strand
gggcagagacuacaagcca

SEQ ID NO: 2367822 - RNA, 19 nt, Homo sapiens
  misc_RNA (1)...(19): siRNA sense strand
ucauguucccugugggcua

SEQ ID NO: 2367823 - RNA, 19 nt, Homo sapiens
  misc_RNA (1)...(19): siRNA sense strand
ccaucuucucugugaauuu

SEQ ID NO: 2367824 - RNA, 19 nt, Homo sapiens
  misc_RNA (1)...(19): siRNA sense strand
caguuauccugcaggcaca

SEQ ID NO: 2367825 - RNA, 19 nt, Homo sapiens
  misc_RNA (1)...(19): siRNA sense strand
caauaugggaaauggucca

SEQ ID NO: 2367826 - RNA, 19 nt, Homo sapiens
  misc_RNA (1)...(19): siRNA sense strand
cuggaaucaggcacagaaa

SEQ ID NO: 2367827 - RNA, 19 nt, Homo sapiens
  misc_RNA (1)...(19): siRNA sense strand
ucuuacaggcgcuggauga

SEQ ID NO: 2367828 - RNA, 19 nt, Homo sapiens
  misc_RNA (1)...(19): siRNA sense strand
guguaaagccauccagaac

SEQ ID NO: 2367829 - RNA, 19 nt, Homo sapiens
  misc_RNA (1)...(19): siRNA sense strand
ggauguggucacugggcca

SEQ ID NO: 2367830 - RNA, 19 nt, Homo sapiens
  misc_RNA (1)...(19): siRNA sense strand
accacaggcugcagcacaa

SEQ ID NO: 2367831 - RNA, 19 nt, Homo sapiens
  misc_RNA (1)...(19): siRNA sense strand
gcacguggugucugggcau

SEQ ID NO: 2367832 - RNA, 19 nt, Homo sapiens
  misc_RNA (1)...(19): siRNA sense strand
gggaucaggaaauugaaaa

SEQ ID NO: 2367833 - RNA, 19 nt, Homo sapiens
  misc_RNA (1)...(19): siRNA sense strand
gggaaaugguccaaaggga

SEQ ID NO: 2367834 - RNA, 19 nt, Homo sapiens
  misc_RNA (1)...(19): siRNA sense strand
ggaaaugguccaaagggau

SEQ ID NO: 2367835 - RNA, 19 nt, Homo sapiens
  misc_RNA (1)...(19): siRNA sense strand
ucgaaagugucaugcggaa

SEQ ID NO: 2367836 - RNA, 19 nt, Homo sapiens
  misc_RNA (1)...(19): siRNA sense strand
cgaaagugucaugcggaaa

SEQ ID NO: 2367837 - RNA, 19 nt, Homo sapiens
  misc_RNA (1)...(19): siRNA sense strand
uccaaagggaucaggaaau

SEQ ID NO: 2367838 - RNA, 19 nt, Homo sapiens
  misc_RNA (1)...(19): siRNA sense strand
ccgggagcaauaugggaaa

SEQ ID NO: 2367839 - RNA, 19 nt, Homo sapiens
  misc_RNA (1)...(19): siRNA sense strand
ccucguggcaauugaucaa

SEQ ID NO: 2367840 - RNA, 19 nt, Homo sapiens
  misc_RNA (1)...(19): siRNA sense strand
gcuggauggccuagaggau

SEQ ID NO: 2367841 - RNA, 19 nt, Homo sapiens
  misc_RNA (1)...(19): siRNA sense strand
gggcagagacuacaagcca

SEQ ID NO: 2367842 - RNA, 19 nt, Homo sapiens
  misc_RNA (1)...(19): siRNA sense strand
ucauguucccugugggcua

SEQ ID NO: 2367843 - RNA, 19 nt, Homo sapiens
  misc_RNA (1)...(19): siRNA sense strand
ccaucuucucugugaauuu

SEQ ID NO: 2367844 - RNA, 19 nt, Homo sapiens
  misc_RNA (1)...(19): siRNA sense strand
caguuauccugcaggcaca

SEQ ID NO: 2367845 - RNA, 19 nt, Homo sapiens
  misc_RNA (1)...(19): siRNA sense strand
caauaugggaaauggucca

SEQ ID NO: 2367846 - RNA, 19 nt, Homo sapiens
  misc_RNA (1)...(19): siRNA sense strand
cuggaaucaggcacagaaa

SEQ ID NO: 2367847 - RNA, 19 nt, Homo sapiens
  misc_RNA (1)...(19): siRNA sense strand
ucuuacaggcgcuggauga

SEQ ID NO: 2367848 - RNA, 19 nt, Homo sapiens
  misc_RNA (1)...(19): siRNA sense strand
guguaaagccauccagaac

SEQ ID NO: 2367849 - RNA, 19 nt, Homo sapiens
  misc_RNA (1)...(19): siRNA sense strand
ggauguggucacugggcca

SEQ ID NO: 2367850 - RNA, 19 nt, Homo sapiens
  misc_RNA (1)...(19): siRNA sense strand
accacaggcugcagcacaa

SEQ ID NO: 2367851 - RNA, 19 nt, Homo sapiens
  misc_RNA (1)...(19): siRNA sense strand
gcacguggugucugggcau

SEQ ID NO: 2367852 - RNA, 19 nt, Homo sapiens
  misc_RNA (1)...(19): siRNA sense strand
gggaucaggaaauugaaaa

SEQ ID NO: 2367853 - RNA, 19 nt, Homo sapiens
  misc_RNA (1)...(19): siRNA sense strand
gggaaaugguccaaaggga

SEQ ID NO: 2367854 - RNA, 19 nt, Homo sapiens
  misc_RNA (1)...(19): siRNA sense strand
ggaaaugguccaaagggau

SEQ ID NO: 2367855 - RNA, 19 nt, Homo sapiens
  misc_RNA (1)...(19): siRNA sense strand
ucgaaagugucaugcggaa

SEQ ID NO: 2367856 - RNA, 19 nt, Homo sapiens
  misc_RNA (1)...(19): siRNA sense strand
cgaaagugucaugcggaaa

SEQ ID NO: 2367857 - RNA, 19 nt, Homo sapiens
  misc_RNA (1)...(19): siRNA sense strand
uccaaagggaucaggaaau

SEQ ID NO: 2367858 - RNA, 19 nt, Homo sapiens
  misc_RNA (1)...(19): siRNA sense strand
ccgggagcaauaugggaaa

SEQ ID NO: 2367859 - RNA, 19 nt, Homo sapiens
  misc_RNA (1)...(19): siRNA sense strand
ccucguggcaauugaucaa

SEQ ID NO: 2367860 - RNA, 19 nt, Homo sapiens
  misc_RNA (1)...(19): siRNA sense strand
gcuggauggccuagaggau

SEQ ID NO: 2367861 - RNA, 19 nt, Homo sapiens
  misc_RNA (1)...(19): siRNA sense strand
gggcagagacuacaagcca

SEQ ID NO: 2367862 - RNA, 19 nt, Homo sapiens
  misc_RNA (1)...(19): siRNA sense strand
ucauguucccugugggcua

SEQ ID NO: 2367863 - RNA, 19 nt, Homo sapiens
  misc_RNA (1)...(19): siRNA sense strand
ccaucuucucugugaauuu

SEQ ID NO: 2367864 - RNA, 19 nt, Homo sapiens
  misc_RNA (1)...(19): siRNA sense strand
caguuauccugcaggcaca

SEQ ID NO: 2367865 - RNA, 19 nt, Homo sapiens
  misc_RNA (1)...(19): siRNA sense strand
caauaugggaaauggucca

SEQ ID NO: 2367866 - RNA, 19 nt, Homo sapiens
  misc_RNA (1)...(19): siRNA sense strand
cuggaaucaggcacagaaa

SEQ ID NO: 2367867 - RNA, 19 nt, Homo sapiens
  misc_RNA (1)...(19): siRNA sense strand
ucuuacaggcgcuggauga

SEQ ID NO: 2367868 - RNA, 19 nt, Homo sapiens
  misc_RNA (1)...(19): siRNA sense strand
guguaaagccauccagaac

SEQ ID NO: 2367869 - RNA, 19 nt, Homo sapiens
  misc_RNA (1)...(19): siRNA sense strand
ggauguggucacugggcca

SEQ ID NO: 2367870 - RNA, 19 nt, Homo sapiens
  misc_RNA (1)...(19): siRNA sense strand
accacaggcugcagcacaa

SEQ ID NO: 2367871 - RNA, 19 nt, Homo sapiens
  misc_RNA (1)...(19): siRNA sense strand
gcacguggugucugggcau

SEQ ID NO: 2367872 - RNA, 19 nt, Homo sapiens
  misc_RNA (1)...(19): siRNA sense strand
gggaucaggaaauugaaaa

SEQ ID NO: 2367873 - RNA, 19 nt, Homo sapiens
  misc_RNA (1)...(19): siRNA sense strand
gggaaaugguccaaaggga

SEQ ID NO: 2367874 - RNA, 19 nt, Homo sapiens
  misc_RNA (1)...(19): siRNA sense strand
ggaaaugguccaaagggau

SEQ ID NO: 2367875 - RNA, 19 nt, Homo sapiens
  misc_RNA (1)...(19): siRNA sense strand
ucgaaagugucaugcggaa

SEQ ID NO: 2367876 - RNA, 19 nt, Homo sapiens
  misc_RNA (1)...(19): siRNA sense strand
cgaaagugucaugcggaaa

SEQ ID NO: 2367877 - RNA, 19 nt, Homo sapiens
  misc_RNA (1)...(19): siRNA sense strand
uccaaagggaucaggaaau

SEQ ID NO: 2367878 - RNA, 19 nt, Homo sapiens
  misc_RNA (1)...(19): siRNA sense strand
ccgggagcaauaugggaaa

SEQ ID NO: 2367879 - RNA, 19 nt, Homo sapiens
  misc_RNA (1)...(19): siRNA sense strand
ccucguggcaauugaucaa

SEQ ID NO: 2367880 - RNA, 19 nt, Homo sapiens
  misc_RNA (1)...(19): siRNA sense strand
gcuggauggccuagaggau

SEQ ID NO: 2367881 - RNA, 19 nt, Homo sapiens
  misc_RNA (1)...(19): siRNA sense strand
gggcagagacuacaagcca

SEQ ID NO: 2367882 - RNA, 19 nt, Homo sapiens
  misc_RNA (1)...(19): siRNA sense strand
ucauguucccugugggcua

SEQ ID NO: 2367883 - RNA, 19 nt, Homo sapiens
  misc_RNA (1)...(19): siRNA sense strand
ccaucuucucugugaauuu

SEQ ID NO: 2367884 - RNA, 19 nt, Homo sapiens
  misc_RNA (1)...(19): siRNA sense strand
caguuauccugcaggcaca

SEQ ID NO: 2367885 - RNA, 19 nt, Homo sapiens
  misc_RNA (1)...(19): siRNA sense strand
caauaugggaaauggucca

SEQ ID NO: 2367886 - RNA, 19 nt, Homo sapiens
  misc_RNA (1)...(19): siRNA sense strand
cuggaaucaggcacagaaa

SEQ ID NO: 2367887 - RNA, 19 nt, Homo sapiens
  misc_RNA (1)...(19): siRNA sense strand
ucuuacaggcgcuggauga

SEQ ID NO: 2367888 - RNA, 19 nt, Homo sapiens
  misc_RNA (1)...(19): siRNA sense strand
guguaaagccauccagaac

SEQ ID NO: 2367889 - RNA, 19 nt, Homo sapiens
  misc_RNA (1)...(19): siRNA sense strand
ggauguggucacugggcca

SEQ ID NO: 2367890 - RNA, 19 nt, Homo sapiens
  misc_RNA (1)...(19): siRNA sense strand
accacaggcugcagcacaa

SEQ ID NO: 2367891 - RNA, 19 nt, Homo sapiens
  misc_RNA (1)...(19): siRNA sense strand
gcacguggugucugggcau

SEQ ID NO: 2367892 - RNA, 19 nt, Homo sapiens
  misc_RNA (1)...(19): siRNA sense strand
gggaucaggaaauugaaaa

SEQ ID NO: 2367893 - RNA, 19 nt, Homo sapiens
  misc_RNA (1)...(19): siRNA sense strand
gggaaaugguccaaaggga

SEQ ID NO: 2367894 - RNA, 19 nt, Homo sapiens
  misc_RNA (1)...(19): siRNA sense strand
ggaaaugguccaaagggau

SEQ ID NO: 2367895 - RNA, 19 nt, Homo sapiens
  misc_RNA (1)...(19): siRNA sense strand
ucgaaagugucaugcggaa

SEQ ID NO: 2367896 - RNA, 19 nt, Homo sapiens
  misc_RNA (1)...(19): siRNA sense strand
cgaaagugucaugcggaaa

SEQ ID NO: 2367897 - RNA, 19 nt, Homo sapiens
  misc_RNA (1)...(19): siRNA sense strand
uccaaagggaucaggaaau

SEQ ID NO: 2367898 - RNA, 19 nt, Homo sapiens
  misc_RNA (1)...(19): siRNA sense strand
ccgggagcaauaugggaaa

SEQ ID NO: 2367899 - RNA, 19 nt, Homo sapiens
  misc_RNA (1)...(19): siRNA sense strand
ccucguggcaauugaucaa

SEQ ID NO: 2367900 - RNA, 19 nt, Homo sapiens
  misc_RNA (1)...(19): siRNA sense strand
gcuggauggccuagaggau

SEQ ID NO: 2367901 - RNA, 19 nt, Homo sapiens
  misc_RNA (1)...(19): siRNA sense strand
gggcagagacuacaagcca

SEQ ID NO: 2367902 - RNA, 19 nt, Homo sapiens
  misc_RNA (1)...(19): siRNA sense strand
ucauguucccugugggcua

SEQ ID NO: 2367903 - RNA, 19 nt, Homo sapiens
  misc_RNA (1)...(19): siRNA sense strand
ccaucuucucugugaauuu

SEQ ID NO: 2367904 - RNA, 19 nt, Homo sapiens
  misc_RNA (1)...(19): siRNA sense strand
caguuauccugcaggcaca

SEQ ID NO: 2367905 - RNA, 19 nt, Homo sapiens
  misc_RNA (1)...(19): siRNA sense strand
caauaugggaaauggucca

SEQ ID NO: 2367906 - RNA, 19 nt, Homo sapiens
  misc_RNA (1)...(19): siRNA sense strand
cuggaaucaggcacagaaa

SEQ ID NO: 2367907 - RNA, 19 nt, Homo sapiens
  misc_RNA (1)...(19): siRNA sense strand
ucuuacaggcgcuggauga

SEQ ID NO: 2367908 - RNA, 19 nt, Homo sapiens
  misc_RNA (1)...(19): siRNA sense strand
guguaaagccauccagaac

SEQ ID NO: 2367909 - RNA, 19 nt, Homo sapiens
  misc_RNA (1)...(19): siRNA sense strand
ggauguggucacugggcca

SEQ ID NO: 2367910 - RNA, 19 nt, Homo sapiens
  misc_RNA (1)...(19): siRNA sense strand
accacaggcugcagcacaa

SEQ ID NO: 2367911 - RNA, 19 nt, Homo sapiens
  misc_RNA (1)...(19): siRNA sense strand
gcacguggugucugggcau

SEQ ID NO: 2367912 - RNA, 19 nt, Homo sapiens
  misc_RNA (1)...(19): siRNA sense strand
gggaucaggaaauugaaaa

SEQ ID NO: 2367913 - RNA, 19 nt, Homo sapiens
  misc_RNA (1)...(19): siRNA sense strand
gggaaaugguccaaaggga

SEQ ID NO: 2367914 - RNA, 19 nt, Homo sapiens
  misc_RNA (1)...(19): siRNA sense strand
ggaaaugguccaaagggau

SEQ ID NO: 2367915 - RNA, 19 nt, Homo sapiens
  misc_RNA (1)...(19): siRNA sense strand
ucgaaagugucaugcggaa

SEQ ID NO: 2367916 - RNA, 19 nt, Homo sapiens
  misc_RNA (1)...(19): siRNA sense strand
cgaaagugucaugcggaaa

SEQ ID NO: 2367917 - RNA, 19 nt, Homo sapiens
  misc_RNA (1)...(19): siRNA sense strand
uccaaagggaucaggaaau

SEQ ID NO: 2367918 - RNA, 19 nt, Homo sapiens
  misc_RNA (1)...(19): siRNA sense strand
ccgggagcaauaugggaaa

SEQ ID NO: 2367919 - RNA, 19 nt, Homo sapiens
  misc_RNA (1)...(19): siRNA sense strand
ccucguggcaauugaucaa

SEQ ID NO: 2367920 - RNA, 19 nt, Homo sapiens
  misc_RNA (1)...(19): siRNA sense strand
gcuggauggccuagaggau

SEQ ID NO: 2367921 - RNA, 19 nt, Homo sapiens
  misc_RNA (1)...(19): siRNA sense strand
gggcagagacuacaagcca

SEQ ID NO: 2367922 - RNA, 19 nt, Homo sapiens
  misc_RNA (1)...(19): siRNA sense strand
ucauguucccugugggcua

SEQ ID NO: 2367923 - RNA, 19 nt, Homo sapiens
  misc_RNA (1)...(19): siRNA sense strand
ccaucuucucugugaauuu

SEQ ID NO: 2367924 - RNA, 19 nt, Homo sapiens
  misc_RNA (1)...(19): siRNA sense strand
caguuauccugcaggcaca

SEQ ID NO: 2367925 - RNA, 19 nt, Homo sapiens
  misc_RNA (1)...(19): siRNA sense strand
caauaugggaaauggucca

SEQ ID NO: 2367926 - RNA, 19 nt, Homo sapiens
  misc_RNA (1)...(19): siRNA sense strand
cuggaaucaggcacagaaa

SEQ ID NO: 2367927 - RNA, 19 nt, Homo sapiens
  misc_RNA (1)...(19): siRNA sense strand
ucuuacaggcgcuggauga

SEQ ID NO: 2367928 - RNA, 19 nt, Homo sapiens
  misc_RNA (1)...(19): siRNA sense strand
guguaaagccauccagaac

SEQ ID NO: 2367929 - RNA, 19 nt, Homo sapiens
  misc_RNA (1)...(19): siRNA sense strand
ggauguggucacugggcca

SEQ ID NO: 2367930 - RNA, 19 nt, Homo sapiens
  misc_RNA (1)...(19): siRNA sense strand
accacaggcugcagcacaa

SEQ ID NO: 2367931 - RNA, 19 nt, Homo sapiens
  misc_RNA (1)...(19): siRNA sense strand
gcacguggugucugggcau

SEQ ID NO: 2367932 - RNA, 19 nt, Homo sapiens
  misc_RNA (1)...(19): siRNA sense strand
gggaucaggaaauugaaaa

SEQ ID NO: 2367933 - RNA, 19 nt, Homo sapiens
  misc_RNA (1)...(19): siRNA sense strand
acauaaacaaagaggagau

SEQ ID NO: 2367934 - RNA, 19 nt, Homo sapiens
  misc_RNA (1)...(19): siRNA sense strand
acaucaacaaggacggaua

SEQ ID NO: 2367935 - RNA, 19 nt, Homo sapiens
  misc_RNA (1)...(19): siRNA sense strand
aggaacuguccacgagaaa

SEQ ID NO: 2367936 - RNA, 19 nt, Homo sapiens
  misc_RNA (1)...(19): siRNA sense strand
aaagaggagaugauggaca

SEQ ID NO: 2367937 - RNA, 19 nt, Homo sapiens
  misc_RNA (1)...(19): siRNA sense strand
aaucaugucaggaggacga

SEQ ID NO: 2367938 - RNA, 19 nt, Homo sapiens
  misc_RNA (1)...(19): siRNA sense strand
gaagacacauucaagcaga

SEQ ID NO: 2367939 - RNA, 19 nt, Homo sapiens
  misc_RNA (1)...(19): siRNA sense strand
ggaaauacacauauccugu

SEQ ID NO: 2367940 - RNA, 19 nt, Homo sapiens
  misc_RNA (1)...(19): siRNA sense strand
ggaugaaccugaagggcau

SEQ ID NO: 2367941 - RNA, 19 nt, Homo sapiens
  misc_RNA (1)...(19): siRNA sense strand
ugaauaagauggaggagga

SEQ ID NO: 2367942 - RNA, 19 nt, Homo sapiens
  misc_RNA (1)...(19): siRNA sense strand
ucgucaaccuggagagcaa

SEQ ID NO: 2367943 - RNA, 19 nt, Homo sapiens
  misc_RNA (1)...(19): siRNA sense strand
gcacagucgaagaagacaa

SEQ ID NO: 2367944 - RNA, 19 nt, Homo sapiens
  misc_RNA (1)...(19): siRNA sense strand
aaguauaagcggaugaaca

SEQ ID NO: 2367945 - RNA, 19 nt, Homo sapiens
  misc_RNA (1)...(19): siRNA sense strand
aggugaaggacgacaacua

SEQ ID NO: 2367946 - RNA, 19 nt, Homo sapiens
  misc_RNA (1)...(19): siRNA sense strand
aggaggaccuggagcucaa

SEQ ID NO: 2367947 - RNA, 19 nt, Homo sapiens
  misc_RNA (1)...(19): siRNA sense strand
caaacuggugacugggaaa

SEQ ID NO: 2367948 - RNA, 19 nt, Homo sapiens
  misc_RNA (1)...(19): siRNA sense strand
aggaagagcuggacccuga

SEQ ID NO: 2367949 - RNA, 19 nt, Homo sapiens
  misc_RNA (1)...(19): siRNA sense strand
augaagaugaagugcuuaa

SEQ ID NO: 2367950 - RNA, 19 nt, Homo sapiens
  misc_RNA (1)...(19): siRNA sense strand
gcaaguacuuccugcccua

SEQ ID NO: 2367951 - RNA, 19 nt, Homo sapiens
  misc_RNA (1)...(19): siRNA sense strand
uggucaaggugaaggacga

SEQ ID NO: 2367952 - RNA, 19 nt, Homo sapiens
  misc_RNA (1)...(19): siRNA sense strand
acaucaagagguucagaaa

SEQ ID NO: 2367953 - RNA, 19 nt, Homo sapiens
  misc_RNA (1)...(19): siRNA sense strand
gggagaaugaaaugcugaa

SEQ ID NO: 2367954 - RNA, 19 nt, Homo sapiens
  misc_RNA (1)...(19): siRNA sense strand
gcgagcuggaggagaagaa

SEQ ID NO: 2367955 - RNA, 19 nt, Homo sapiens
  misc_RNA (1)...(19): siRNA sense strand
agaugaaggaagagcggga

SEQ ID NO: 2367956 - RNA, 19 nt, Homo sapiens
  misc_RNA (1)...(19): siRNA sense strand
gaggacgccuugugggaga

SEQ ID NO: 2367957 - RNA, 19 nt, Homo sapiens
  misc_RNA (1)...(19): siRNA sense strand
cugggaaaggacugugaaa

SEQ ID NO: 2367958 - RNA, 19 nt, Homo sapiens
  misc_RNA (1)...(19): siRNA sense strand
ggcagaagacggagaccau

SEQ ID NO: 2367959 - RNA, 19 nt, Homo sapiens
  misc_RNA (1)...(19): siRNA sense strand
cucuaaaacugaagaauga

SEQ ID NO: 2367960 - RNA, 19 nt, Homo sapiens
  misc_RNA (1)...(19): siRNA sense strand
gcuuaaucgaaaaggacaa

SEQ ID NO: 2367961 - RNA, 19 nt, Homo sapiens
  misc_RNA (1)...(19): siRNA sense strand
aggucaaccacgaagggua

SEQ ID NO: 2367962 - RNA, 19 nt, Homo sapiens
  misc_RNA (1)...(19): siRNA sense strand
ucagcagguccgagaacaa

SEQ ID NO: 2367963 - RNA, 19 nt, Homo sapiens
  misc_RNA (1)...(19): siRNA sense strand
gagaacaaguauaagcgga

SEQ ID NO: 2367964 - RNA, 19 nt, Homo sapiens
  misc_RNA (1)...(19): siRNA sense strand
agaacaaguauaagcggau

SEQ ID NO: 2367965 - RNA, 19 nt, Homo sapiens
  misc_RNA (1)...(19): siRNA sense strand
agcuggaggaugagaagaa

SEQ ID NO: 2367966 - RNA, 19 nt, Homo sapiens
  misc_RNA (1)...(19): siRNA sense strand
gagacaaguaccuggagga

SEQ ID NO: 2367967 - RNA, 19 nt, Homo sapiens
  misc_RNA (1)...(19): siRNA sense strand
gaggaugagaagaagcaga

SEQ ID NO: 2367968 - RNA, 19 nt, Homo sapiens
  misc_RNA (1)...(19): siRNA sense strand
ggcaagaaccucagccuca

SEQ ID NO: 2367969 - RNA, 19 nt, Homo sapiens
  misc_RNA (1)...(19): siRNA sense strand
cuuggagagccuagaauuu

SEQ ID NO: 2367970 - RNA, 19 nt, Homo sapiens
  misc_RNA (1)...(19): siRNA sense strand
aggagaagaacgacgagau

SEQ ID NO: 2367971 - RNA, 19 nt, Homo sapiens
  misc_RNA (1)...(19): siRNA sense strand
gcaccaaagaggaagccca

SEQ ID NO: 2367972 - RNA, 19 nt, Homo sapiens
  misc_RNA (1)...(19): siRNA sense strand
agaaggagcuggaggcccu

SEQ ID NO: 2367973 - RNA, 19 nt, Homo sapiens
  misc_RNA (1)...(19): siRNA sense strand
gaauaagauggaggaggaa

SEQ ID NO: 2367974 - RNA, 19 nt, Homo sapiens
  misc_RNA (1)...(19): siRNA sense strand
cugccaagcucacgcccua

SEQ ID NO: 2367975 - RNA, 19 nt, Homo sapiens
  misc_RNA (1)...(19): siRNA sense strand
gagaagaacauggcgguca

SEQ ID NO: 2367976 - RNA, 19 nt, Homo sapiens
  misc_RNA (1)...(19): siRNA sense strand
cagcuaaagcaccgguuga

SEQ ID NO: 2367977 - RNA, 19 nt, Homo sapiens
  misc_RNA (1)...(19): siRNA sense strand
ccaaggggcacgaggaaga

SEQ ID NO: 2367978 - RNA, 19 nt, Homo sapiens
  misc_RNA (1)...(19): siRNA sense strand
cagucgaagaagacaauga

SEQ ID NO: 2367979 - RNA, 19 nt, Homo sapiens
  misc_RNA (1)...(19): siRNA sense strand
cugagagcgagcugggcaa

SEQ ID NO: 2367980 - RNA, 19 nt, Homo sapiens
  misc_RNA (1)...(19): siRNA sense strand
gcugaaggaugaagaggac

SEQ ID NO: 2367981 - RNA, 19 nt, Homo sapiens
  misc_RNA (1)...(19): siRNA sense strand
ucuacaaccugcaggagga

SEQ ID NO: 2367982 - RNA, 19 nt, Homo sapiens
  misc_RNA (1)...(19): siRNA sense strand
aggaugaaccugaagggca

SEQ ID NO: 2367983 - RNA, 19 nt, Homo sapiens
  misc_RNA (1)...(19): siRNA sense strand
cagaagacggagaccauca

SEQ ID NO: 2367984 - RNA, 19 nt, Homo sapiens
  misc_RNA (1)...(19): siRNA sense strand
uccgcgagcuggaggagaa

SEQ ID NO: 2367985 - RNA, 19 nt, Homo sapiens
  misc_RNA (1)...(19): siRNA sense strand
gagaagaacaucaagaggu

SEQ ID NO: 2367986 - RNA, 19 nt, Homo sapiens
  misc_RNA (1)...(19): siRNA sense strand
agaugaaggccaaggaccu

SEQ ID NO: 2367987 - RNA, 19 nt, Homo sapiens
  misc_RNA (1)...(19): siRNA sense strand
ggaacuggagcgggagaau

SEQ ID NO: 2367988 - RNA, 19 nt, Homo sapiens
  misc_RNA (1)...(19): siRNA sense strand
ugaucaaguccaacaucua

SEQ ID NO: 2367989 - RNA, 19 nt, Homo sapiens
  misc_RNA (1)...(19): siRNA sense strand
caguacucgcagugcuuaa

SEQ ID NO: 2367990 - RNA, 19 nt, Homo sapiens
  misc_RNA (1)...(19): siRNA sense strand
ggacaagaucggcgaggag

SEQ ID NO: 2367991 - RNA, 19 nt, Homo sapiens
  misc_RNA (1)...(19): siRNA sense strand
gaaagagcccacucggaga

SEQ ID NO: 2367992 - RNA, 19 nt, Homo sapiens
  misc_RNA (1)...(19): siRNA sense strand
ucagugaggagaagaacau

SEQ ID NO: 2367993 - RNA, 19 nt, Homo sapiens
  misc_RNA (1)...(19): siRNA sense strand
agaacgacgagaugaggau

SEQ ID NO: 2367994 - RNA, 19 nt, Homo sapiens
  misc_RNA (1)...(19): siRNA sense strand
cgucacaagagaugaguuc

SEQ ID NO: 2367995 - RNA, 19 nt, Homo sapiens
  misc_RNA (1)...(19): siRNA sense strand
uugaugagcaggaugaaga

SEQ ID NO: 2367996 - RNA, 19 nt, Homo sapiens
  misc_RNA (1)...(19): siRNA sense strand
gaggaauguaagcuggaga

SEQ ID NO: 2367997 - RNA, 19 nt, Homo sapiens
  misc_RNA (1)...(19): siRNA sense strand
uggugaaggacauggagga

SEQ ID NO: 2367998 - RNA, 19 nt, Homo sapiens
  misc_RNA (1)...(19): siRNA sense strand
gggugugugagaagaacau

SEQ ID NO: 2367999 - RNA, 19 nt, Homo sapiens
  misc_RNA (1)...(19): siRNA sense strand
ccaucuggguggacgagga

SEQ ID NO: 2368000 - RNA, 19 nt, Homo sapiens
  misc_RNA (1)...(19): siRNA sense strand
gguugaauaagauggagga

SEQ ID NO: 2368001 - RNA, 19 nt, Homo sapiens
  misc_RNA (1)...(19): siRNA sense strand
aaugaaaugcugaagacca

SEQ ID NO: 2368002 - RNA, 19 nt, Homo sapiens
  misc_RNA (1)...(19): siRNA sense strand
cuacauaccaaggggcaaa

SEQ ID NO: 2368003 - RNA, 19 nt, Homo sapiens
  misc_RNA (1)...(19): siRNA sense strand
aggaugagaagaagcagau

SEQ ID NO: 2368004 - RNA, 19 nt, Homo sapiens
  misc_RNA (1)...(19): siRNA sense strand
ccauacuagugguucgcua

SEQ ID NO: 2368005 - RNA, 19 nt, Homo sapiens
  misc_RNA (1)...(19): siRNA sense strand
gaggaggaauucauggaaa

SEQ ID NO: 2368006 - RNA, 19 nt, Homo sapiens
  misc_RNA (1)...(19): siRNA sense strand
aggaggaauucauggaaau

SEQ ID NO: 2368007 - RNA, 19 nt, Homo sapiens
  misc_RNA (1)...(19): siRNA sense strand
ggaggaauucauggaaaua

SEQ ID NO: 2368008 - RNA, 19 nt, Homo sapiens
  misc_RNA (1)...(19): siRNA sense strand
ccauacuagugguucgcua

SEQ ID NO: 2368009 - RNA, 19 nt, Homo sapiens
  misc_RNA (1)...(19): siRNA sense strand
ucauggaaauaaugguuga

SEQ ID NO: 2368010 - RNA, 19 nt, Homo sapiens
  misc_RNA (1)...(19): siRNA sense strand
ccaauauauacaauggaca

SEQ ID NO: 2368011 - RNA, 19 nt, Homo sapiens
  misc_RNA (1)...(19): siRNA sense strand
ccaacgaggccaacgagau

SEQ ID NO: 2368012 - RNA, 19 nt, Homo sapiens
  misc_RNA (1)...(19): siRNA sense strand
gaggaauucauggaaauaa

SEQ ID NO: 2368013 - RNA, 19 nt, Homo sapiens
  misc_RNA (1)...(19): siRNA sense strand
cgcuacaggaggaacuuua

SEQ ID NO: 2368014 - RNA, 19 nt, Homo sapiens
  misc_RNA (1)...(19): siRNA sense strand
ccauacuagugguucgcua

SEQ ID NO: 2368015 - RNA, 19 nt, Homo sapiens
  misc_RNA (1)...(19): siRNA sense strand
ccgaccaaauggaggagga

SEQ ID NO: 2368016 - RNA, 19 nt, Homo sapiens
  misc_RNA (1)...(19): siRNA sense strand
gugaauccaacgaggccaa

SEQ ID NO: 2368017 - RNA, 19 nt, Homo sapiens
  misc_RNA (1)...(19): siRNA sense strand
accaaauggaggaggagga

SEQ ID NO: 2368018 - RNA, 19 nt, Homo sapiens
  misc_RNA (1)...(19): siRNA sense strand
gcacagauuuccaaggcuu

SEQ ID NO: 2368019 - RNA, 19 nt, Homo sapiens
  misc_RNA (1)...(19): siRNA sense strand
ggguacuggaguuggacaa

SEQ ID NO: 2368020 - RNA, 19 nt, Homo sapiens
  misc_RNA (1)...(19): siRNA sense strand
aaacaaugaugaaggccuu

SEQ ID NO: 2368021 - RNA, 19 nt, Homo sapiens
  misc_RNA (1)...(19): siRNA sense strand
gaaaauaucucgaagcgau

SEQ ID NO: 2368022 - RNA, 19 nt, Homo sapiens
  misc_RNA (1)...(19): siRNA sense strand
ggauggaagcaacuggcaa

SEQ ID NO: 2368023 - RNA, 19 nt, Homo sapiens
  misc_RNA (1)...(19): siRNA sense strand
ggcaggaaguggacagcga

SEQ ID NO: 2368024 - RNA, 19 nt, Homo sapiens
  misc_RNA (1)...(19): siRNA sense strand
gugcaggcaucaagcggau

SEQ ID NO: 2368025 - RNA, 19 nt, Homo sapiens
  misc_RNA (1)...(19): siRNA sense strand
cugcauugguguuggggau

SEQ ID NO: 2368026 - RNA, 19 nt, Homo sapiens
  misc_RNA (1)...(19): siRNA sense strand
ccucaauggaugcacaaaa

SEQ ID NO: 2368027 - RNA, 19 nt, Homo sapiens
  misc_RNA (1)...(19): siRNA sense strand
ggauccugcaccugagcaa

SEQ ID NO: 2368028 - RNA, 19 nt, Homo sapiens
  misc_RNA (1)...(19): siRNA sense strand
gccaugagcuugugagccu

SEQ ID NO: 2368029 - RNA, 19 nt, Homo sapiens
  misc_RNA (1)...(19): siRNA sense strand
cugccgaaacauugaacau

SEQ ID NO: 2368030 - RNA, 19 nt, Homo sapiens
  misc_RNA (1)...(19): siRNA sense strand
cggaugaagguguggugca

SEQ ID NO: 2368031 - RNA, 19 nt, Homo sapiens
  misc_RNA (1)...(19): siRNA sense strand
acgaauuggagaagaugga

SEQ ID NO: 2368032 - RNA, 19 nt, Homo sapiens
  misc_RNA (1)...(19): siRNA sense strand
caugagaggcugcggguac

SEQ ID NO: 2368033 - RNA, 19 nt, Homo sapiens
  misc_RNA (1)...(19): siRNA sense strand
cugauguggcccuggaaca

SEQ ID NO: 2368034 - RNA, 19 nt, Homo sapiens
  misc_RNA (1)...(19): siRNA sense strand
augucaaaguccacgccua

SEQ ID NO: 2368035 - RNA, 19 nt, Homo sapiens
  misc_RNA (1)...(19): siRNA sense strand
augaagguguggugcagau

SEQ ID NO: 2368036 - RNA, 19 nt, Homo sapiens
  misc_RNA (1)...(19): siRNA sense strand
gugccuagauugaucggua

SEQ ID NO: 2368037 - RNA, 19 nt, Homo sapiens
  misc_RNA (1)...(19): siRNA sense strand
gguuggaaagggaaugaau

SEQ ID NO: 2368038 - RNA, 19 nt, Homo sapiens
  misc_RNA (1)...(19): siRNA sense strand
ggaaugaauugcaacguug

SEQ ID NO: 2368039 - RNA, 19 nt, Homo sapiens
  misc_RNA (1)...(19): siRNA sense strand
uguucggaguguaugacaa

SEQ ID NO: 2368040 - RNA, 19 nt, Homo sapiens
  misc_RNA (1)...(19): siRNA sense strand
cuucgagguuggaaaggga

SEQ ID NO: 2368041 - RNA, 19 nt, Homo sapiens
  misc_RNA (1)...(19): siRNA sense strand
cuacaaacacuuuaaccga

SEQ ID NO: 2368042 - RNA, 19 nt, Homo sapiens
  misc_RNA (1)...(19): siRNA sense strand
acaaacacuuuaaccgaca

SEQ ID NO: 2368043 - RNA, 19 nt, Homo sapiens
  misc_RNA (1)...(19): siRNA sense strand
gccuagauugaucgguaua

SEQ ID NO: 2368044 - RNA, 19 nt, Homo sapiens
  misc_RNA (1)...(19): siRNA sense strand
ugauaggagccaaguguaa

SEQ ID NO: 2368045 - RNA, 19 nt, Homo sapiens
  misc_RNA (1)...(19): siRNA sense strand
guuucgaacuuaugggaca

SEQ ID NO: 2368046 - RNA, 19 nt, Homo sapiens
  misc_RNA (1)...(19): siRNA sense strand
gugucaugauugaagacua

SEQ ID NO: 2368047 - RNA, 19 nt, Homo sapiens
  misc_RNA (1)...(19): siRNA sense strand
ugagaauggaauagcagaa

SEQ ID NO: 2368048 - RNA, 19 nt, Homo sapiens
  misc_RNA (1)...(19): siRNA sense strand
augaacacccauagagcua

SEQ ID NO: 2368049 - RNA, 19 nt, Homo sapiens
  misc_RNA (1)...(19): siRNA sense strand
ccacaaaucuuauacgacu

SEQ ID NO: 2368050 - RNA, 19 nt, Homo sapiens
  misc_RNA (1)...(19): siRNA sense strand
uuauacgacuggaaguaaa

SEQ ID NO: 2368051 - RNA, 19 nt, Homo sapiens
  misc_RNA (1)...(19): siRNA sense strand
cugcaaccauacugggcaa

SEQ ID NO: 2368052 - RNA, 19 nt, Homo sapiens
  misc_RNA (1)...(19): siRNA sense strand
auauagaagaugaugccua

SEQ ID NO: 2368053 - RNA, 19 nt, Homo sapiens
  misc_RNA (1)...(19): siRNA sense strand
gguuuguggauccgaauua

SEQ ID NO: 2368054 - RNA, 19 nt, Homo sapiens
  misc_RNA (1)...(19): siRNA sense strand
ugaaguaagaugggagauu

SEQ ID NO: 2368055 - RNA, 19 nt, Homo sapiens
  misc_RNA (1)...(19): siRNA sense strand
cuacauggugugaaggaca

SEQ ID NO: 2368056 - RNA, 19 nt, Homo sapiens
  misc_RNA (1)...(19): siRNA sense strand
caagaggagaaaugaugaa

SEQ ID NO: 2368057 - RNA, 19 nt, Homo sapiens
  misc_RNA (1)...(19): siRNA sense strand
gaucaguguccuagugcuu

SEQ ID NO: 2368058 - RNA, 19 nt, Homo sapiens
  misc_RNA (1)...(19): siRNA sense strand
gagaaaugaugaacaccca

SEQ ID NO: 2368059 - RNA, 19 nt, Homo sapiens
  misc_RNA (1)...(19): siRNA sense strand
guucagagcuucagcaccu

SEQ ID NO: 2368060 - RNA, 19 nt, Homo sapiens
  misc_RNA (1)...(19): siRNA sense strand
gcugaaguaagaugggaga

SEQ ID NO: 2368061 - RNA, 19 nt, Homo sapiens
  misc_RNA (1)...(19): siRNA sense strand
cuaauagaucuguguguga

SEQ ID NO: 2368062 - RNA, 19 nt, Homo sapiens
  misc_RNA (1)...(19): siRNA sense strand
gggcaaaacuagaugacac

SEQ ID NO: 2368063 - RNA, 19 nt, Homo sapiens
  misc_RNA (1)...(19): siRNA sense strand
agaugaugccuaugcagaa

SEQ ID NO: 2368064 - RNA, 19 nt, Homo sapiens
  misc_RNA (1)...(19): siRNA sense strand
guccaaaucuacaggccuu

SEQ ID NO: 2368065 - RNA, 19 nt, Homo sapiens
  misc_RNA (1)...(19): siRNA sense strand
gugcuagaacugaaugcaa

SEQ ID NO: 2368066 - RNA, 19 nt, Homo sapiens
  misc_RNA (1)...(19): siRNA sense strand
auguaauuguaccagguua

SEQ ID NO: 2368067 - RNA, 19 nt, Homo sapiens
  misc_RNA (1)...(19): siRNA sense strand
cuggaauauuacacugaau

SEQ ID NO: 2368068 - RNA, 19 nt, Homo sapiens
  misc_RNA (1)...(19): siRNA sense strand
cuacaagaggagaaaugau

SEQ ID NO: 2368069 - RNA, 19 nt, Homo sapiens
  misc_RNA (1)...(19): siRNA sense strand
ucgaacaaaaguagagcaa

SEQ ID NO: 2368070 - RNA, 19 nt, Homo sapiens
  misc_RNA (1)...(19): siRNA sense strand
cuauagaaucaaacagcca

SEQ ID NO: 2368071 - RNA, 19 nt, Homo sapiens
  misc_RNA (1)...(19): siRNA sense strand
uccuauacuauguggaauu

SEQ ID NO: 2368072 - RNA, 19 nt, Homo sapiens
  misc_RNA (1)...(19): siRNA sense strand
ccggagcagucauuagaau

SEQ ID NO: 2368073 - RNA, 19 nt, Homo sapiens
  misc_RNA (1)...(19): siRNA sense strand
cuugcaaacuacugagcca

SEQ ID NO: 2368074 - RNA, 19 nt, Homo sapiens
  misc_RNA (1)...(19): siRNA sense strand
ccuuguauuaagcagauaa

SEQ ID NO: 2368075 - RNA, 19 nt, Homo sapiens
  misc_RNA (1)...(19): siRNA sense strand
cggagcagucauuagaauu

SEQ ID NO: 2368076 - RNA, 19 nt, Homo sapiens
  misc_RNA (1)...(19): siRNA sense strand
acucuuguccaguggcuua

SEQ ID NO: 2368077 - RNA, 19 nt, Homo sapiens
  misc_RNA (1)...(19): siRNA sense strand
gaacaagaaugguaagucc

SEQ ID NO: 2368078 - RNA, 19 nt, Homo sapiens
  misc_RNA (1)...(19): siRNA sense strand
ugccaaagaaguaguggau

SEQ ID NO: 2368079 - RNA, 19 nt, Homo sapiens
  misc_RNA (1)...(19): siRNA sense strand
agauaaauuuccccacaaa

SEQ ID NO: 2368080 - RNA, 19 nt, Homo sapiens
  misc_RNA (1)...(19): siRNA sense strand
cauuauggaagugagaaua

SEQ ID NO: 2368081 - RNA, 19 nt, Homo sapiens
  misc_RNA (1)...(19): siRNA sense strand
gaaaaggaugguuguggaa

SEQ ID NO: 2368082 - RNA, 19 nt, Homo sapiens
  misc_RNA (1)...(19): siRNA sense strand
auuagaugcaguugugcua

SEQ ID NO: 2368083 - RNA, 19 nt, Homo sapiens
  misc_RNA (1)...(19): siRNA sense strand
uguuaacaguucugaccau

SEQ ID NO: 2368084 - RNA, 19 nt, Homo sapiens
  misc_RNA (1)...(19): siRNA sense strand
gcaccucaguuuaggcagu

SEQ ID NO: 2368085 - RNA, 19 nt, Homo sapiens
  misc_RNA (1)...(19): siRNA sense strand
ugaaagaggccguggagca

SEQ ID NO: 2368086 - RNA, 19 nt, Homo sapiens
  misc_RNA (1)...(19): siRNA sense strand
agaugauugugcaggagaa

SEQ ID NO: 2368087 - RNA, 19 nt, Homo sapiens
  misc_RNA (1)...(19): siRNA sense strand
ccaagaugauugugcagga

SEQ ID NO: 2368088 - RNA, 19 nt, Homo sapiens
  misc_RNA (1)...(19): siRNA sense strand
ccagaaugcugaugaggcu

SEQ ID NO: 2368089 - RNA, 19 nt, Homo sapiens
  misc_RNA (1)...(19): siRNA sense strand
ggugaaagcuggcgugcug

SEQ ID NO: 2368090 - RNA, 19 nt, Homo sapiens
  misc_RNA (1)...(19): siRNA sense strand
cagcugugcgcgagaacau

SEQ ID NO: 2368091 - RNA, 19 nt, Homo sapiens
  misc_RNA (1)...(19): siRNA sense strand
acugugaggacguggccaa

SEQ ID NO: 2368092 - RNA, 19 nt, Homo sapiens
  misc_RNA (1)...(19): siRNA sense strand
cuugcaugcugauccgaaa

SEQ ID NO: 2368093 - RNA, 19 nt, Homo sapiens
  misc_RNA (1)...(19): siRNA sense strand
cagcauaccucacccgcuu

SEQ ID NO: 2368094 - RNA, 19 nt, Homo sapiens
  misc_RNA (1)...(19): siRNA sense strand
augucaaacccaagagcaa

SEQ ID NO: 2368095 - RNA, 19 nt, Homo sapiens
  misc_RNA (1)...(19): siRNA sense strand
ucuuaaaccgugaagcaaa

SEQ ID NO: 2368096 - RNA, 19 nt, Homo sapiens
  misc_RNA (1)...(19): siRNA sense strand
augcaagagaugaugagaa

SEQ ID NO: 2368097 - RNA, 19 nt, Homo sapiens
  misc_RNA (1)...(19): siRNA sense strand
gggaggacuugcaggccuu

SEQ ID NO: 2368098 - RNA, 19 nt, Homo sapiens
  misc_RNA (1)...(19): siRNA sense strand
ccaugaugcaagagaugau

SEQ ID NO: 2368099 - RNA, 19 nt, Homo sapiens
  misc_RNA (1)...(19): siRNA sense strand
cugcaacagauaacugaaa

SEQ ID NO: 2368100 - RNA, 19 nt, Homo sapiens
  misc_RNA (1)...(19): siRNA sense strand
auucagagaaacccagaaa

SEQ ID NO: 2368101 - RNA, 19 nt, Homo sapiens
  misc_RNA (1)...(19): siRNA sense strand
acucgaaauugccaggaau

SEQ ID NO: 2368102 - RNA, 19 nt, Homo sapiens
  misc_RNA (1)...(19): siRNA sense strand
cagccuucccgcacagaaa

SEQ ID NO: 2368103 - RNA, 19 nt, Homo sapiens
  misc_RNA (1)...(19): siRNA sense strand
uggcaauaguuccagcaau

SEQ ID NO: 2368104 - RNA, 19 nt, Homo sapiens
  misc_RNA (1)...(19): siRNA sense strand
ccuaaaaucaucaaaguca

SEQ ID NO: 2368105 - RNA, 19 nt, Homo sapiens
  misc_RNA (1)...(19): siRNA sense strand
cagcaauugauucagagaa

SEQ ID NO: 2368106 - RNA, 19 nt, Homo sapiens
  misc_RNA (1)...(19): siRNA sense strand
ccagacauaaugaggcaga

SEQ ID NO: 2368107 - RNA, 19 nt, Homo sapiens
  misc_RNA (1)...(19): siRNA sense strand
aagucagauuucagcaaca

SEQ ID NO: 2368108 - RNA, 19 nt, Homo sapiens
  misc_RNA (1)...(19): siRNA sense strand
cccuauugcuacugggaaa

SEQ ID NO: 2368109 - RNA, 19 nt, Homo sapiens
  misc_RNA (1)...(19): siRNA sense strand
aggggaagcagcaggaaaa

SEQ ID NO: 2368110 - RNA, 19 nt, Homo sapiens
  misc_RNA (1)...(19): siRNA sense strand
caucugaccuagaagacga

SEQ ID NO: 2368111 - RNA, 19 nt, Homo sapiens
  misc_RNA (1)...(19): siRNA sense strand
cugccuaacaucugaccua

SEQ ID NO: 2368112 - RNA, 19 nt, Homo sapiens
  misc_RNA (1)...(19): siRNA sense strand
cuagaagacgaucggaaaa

SEQ ID NO: 2368113 - RNA, 19 nt, Homo sapiens
  misc_RNA (1)...(19): siRNA sense strand
agauaauauucgcugagga

SEQ ID NO: 2368114 - RNA, 19 nt, Homo sapiens
  misc_RNA (1)...(19): siRNA sense strand
gaggggaagcagcaggaaa

SEQ ID NO: 2368115 - RNA, 19 nt, Homo sapiens
  misc_RNA (1)...(19): siRNA sense strand
agucgaaaguaauggcuaa

SEQ ID NO: 2368116 - RNA, 19 nt, Homo sapiens
  misc_RNA (1)...(19): siRNA sense strand
cagcaaagccagaggagca

SEQ ID NO: 2368117 - RNA, 19 nt, Homo sapiens
  misc_RNA (1)...(19): siRNA sense strand
aaagaagaaaugugggcaa

SEQ ID NO: 2368118 - RNA, 19 nt, Homo sapiens
  misc_RNA (1)...(19): siRNA sense strand
ggauaaacggagagcagca

SEQ ID NO: 2368119 - RNA, 19 nt, Homo sapiens
  misc_RNA (1)...(19): siRNA sense strand
ucaagaaggaacaagcaaa

SEQ ID NO: 2368120 - RNA, 19 nt, Homo sapiens
  misc_RNA (1)...(19): siRNA sense strand
ccaaacacuaaaugggcaa

SEQ ID NO: 2368121 - RNA, 19 nt, Homo sapiens
  misc_RNA (1)...(19): siRNA sense strand
gggcaaggaaagcuggcaa

SEQ ID NO: 2368122 - RNA, 19 nt, Homo sapiens
  misc_RNA (1)...(19): siRNA sense strand
ugguggcaguggugggaua

SEQ ID NO: 2368123 - RNA, 19 nt, Homo sapiens
  misc_RNA (1)...(19): siRNA sense strand
acagagaaacccaaagcaa

SEQ ID NO: 2368124 - RNA, 19 nt, Homo sapiens
  misc_RNA (1)...(19): siRNA sense strand
aaccaaaguuccagggcuu

SEQ ID NO: 2368125 - RNA, 19 nt, Homo sapiens
  misc_RNA (1)...(19): siRNA sense strand
cagagaaacccaaagcaau

SEQ ID NO: 2368126 - RNA, 19 nt, Homo sapiens
  misc_RNA (1)...(19): siRNA sense strand
gguaaugaugacuggauga

SEQ ID NO: 2368127 - RNA, 19 nt, Homo sapiens
  misc_RNA (1)...(19): siRNA sense strand
uggagaaaauagugaucaa

SEQ ID NO: 2368128 - RNA, 19 nt, Homo sapiens
  misc_RNA (1)...(19): siRNA sense strand
cagcaacagcagaguucaa

SEQ ID NO: 2368129 - RNA, 19 nt, Homo sapiens
  misc_RNA (1)...(19): siRNA sense strand
aggaacaagcaaacagcaa

SEQ ID NO: 2368130 - RNA, 19 nt, Homo sapiens
  misc_RNA (1)...(19): siRNA sense strand
ggcaguagguagccagcaa

SEQ ID NO: 2368131 - RNA, 19 nt, Homo sapiens
  misc_RNA (1)...(19): siRNA sense strand
ggcaaggaaagcuggcaaa

SEQ ID NO: 2368132 - RNA, 19 nt, Homo sapiens
  misc_RNA (1)...(19): siRNA sense strand
caacagcagcagagcucaa

SEQ ID NO: 2368133 - RNA, 19 nt, Homo sapiens
  misc_RNA (1)...(19): siRNA sense strand
gagcuggaucuguugguaa

SEQ ID NO: 2368134 - RNA, 19 nt, Homo sapiens
  misc_RNA (1)...(19): siRNA sense strand
agaagaaaugugggcaaua

SEQ ID NO: 2368135 - RNA, 19 nt, Homo sapiens
  misc_RNA (1)...(19): siRNA sense strand
ggcagaucauggagcagaa

SEQ ID NO: 2368136 - RNA, 19 nt, Homo sapiens
  misc_RNA (1)...(19): siRNA sense strand
aagaagaaaugugggcaau

SEQ ID NO: 2368137 - RNA, 19 nt, Homo sapiens
  misc_RNA (1)...(19): siRNA sense strand
gccaaaugacccaagagaa

SEQ ID NO: 2368138 - RNA, 19 nt, Homo sapiens
  misc_RNA (1)...(19): siRNA sense strand
cugugaaggacgauaugaa

SEQ ID NO: 2368139 - RNA, 19 nt, Homo sapiens
  misc_RNA (1)...(19): siRNA sense strand
cuccacaagaucagauaaa

SEQ ID NO: 2368140 - RNA, 19 nt, Homo sapiens
  misc_RNA (1)...(19): siRNA sense strand
gggccaaguaauaauaaca

SEQ ID NO: 2368141 - RNA, 19 nt, Homo sapiens
  misc_RNA (1)...(19): siRNA sense strand
guuaacaccagcagugcaa

SEQ ID NO: 2368142 - RNA, 19 nt, Homo sapiens
  misc_RNA (1)...(19): siRNA sense strand
ccaccauaaagcaggauga

SEQ ID NO: 2368143 - RNA, 19 nt, Homo sapiens
  misc_RNA (1)...(19): siRNA sense strand
uagcaauaaugguggcagu

SEQ ID NO: 2368144 - RNA, 19 nt, Homo sapiens
  misc_RNA (1)...(19): siRNA sense strand
ggacgauaugaacgaggua

SEQ ID NO: 2368145 - RNA, 19 nt, Homo sapiens
  misc_RNA (1)...(19): siRNA sense strand
agaucauggagcagaaaca

SEQ ID NO: 2368146 - RNA, 19 nt, Homo sapiens
  misc_RNA (1)...(19): siRNA sense strand
accuugaacuggagaacau

SEQ ID NO: 2368147 - RNA, 19 nt, Homo sapiens
  misc_RNA (1)...(19): siRNA sense strand
ccgcauucuccauggccaa

SEQ ID NO: 2368148 - RNA, 19 nt, Homo sapiens
  misc_RNA (1)...(19): siRNA sense strand
ugaccacagcagugacuua

SEQ ID NO: 2368149 - RNA, 19 nt, Homo sapiens
  misc_RNA (1)...(19): siRNA sense strand
ggaccuugccuaugagcca

SEQ ID NO: 2368150 - RNA, 19 nt, Homo sapiens
  misc_RNA (1)...(19): siRNA sense strand
gcagcaacaacaacagcaa

SEQ ID NO: 2368151 - RNA, 19 nt, Homo sapiens
  misc_RNA (1)...(19): siRNA sense strand
gaguucaauuucagcucaa

SEQ ID NO: 2368152 - RNA, 19 nt, Homo sapiens
  misc_RNA (1)...(19): siRNA sense strand
gagcucaauuucagcccaa

SEQ ID NO: 2368153 - RNA, 19 nt, Homo sapiens
  misc_RNA (1)...(19): siRNA sense strand
ccaugaaccaaaugagcca

SEQ ID NO: 2368154 - RNA, 19 nt, Homo sapiens
  misc_RNA (1)...(19): siRNA sense strand
cggagacgacccuggagaa

SEQ ID NO: 2368155 - RNA, 19 nt, Homo sapiens
  misc_RNA (1)...(19): siRNA sense strand
ugggcuuaaaggagguaaa

SEQ ID NO: 2368156 - RNA, 19 nt, Homo sapiens
  misc_RNA (1)...(19): siRNA sense strand
ucucagacccaaucagcua

SEQ ID NO: 2368157 - RNA, 19 nt, Homo sapiens
  misc_RNA (1)...(19): siRNA sense strand
ccaccugagcugugaagga

SEQ ID NO: 2368158 - RNA, 19 nt, Homo sapiens
  misc_RNA (1)...(19): siRNA sense strand
caauggacaaagucagauu

SEQ ID NO: 2368159 - RNA, 19 nt, Homo sapiens
  misc_RNA (1)...(19): siRNA sense strand
ccuaaacagugaugcugau

SEQ ID NO: 2368160 - RNA, 19 nt, Homo sapiens
  misc_RNA (1)...(19): siRNA sense strand
gagcugugaaggacgauau

SEQ ID NO: 2368161 - RNA, 19 nt, Homo sapiens
  misc_RNA (1)...(19): siRNA sense strand
uggcuaacuacauguacaa

SEQ ID NO: 2368162 - RNA, 19 nt, Homo sapiens
  misc_RNA (1)...(19): siRNA sense strand
ccucaggaucucagucgaa

SEQ ID NO: 2368163 - RNA, 19 nt, Homo sapiens
  misc_RNA (1)...(19): siRNA sense strand
cagcaauugaugggaaaga

SEQ ID NO: 2368164 - RNA, 19 nt, Homo sapiens
  misc_RNA (1)...(19): siRNA sense strand
uggcugacgcggagaaaau

SEQ ID NO: 2368165 - RNA, 19 nt, Homo sapiens
  misc_RNA (1)...(19): siRNA sense strand
aauugacccaacagagaaa

SEQ ID NO: 2368166 - RNA, 19 nt, Homo sapiens
  misc_RNA (1)...(19): siRNA sense strand
uugaugaaaucuuggggaa

SEQ ID NO: 2368167 - RNA, 19 nt, Homo sapiens
  misc_RNA (1)...(19): siRNA sense strand
ccagcagcucaaacagaua

SEQ ID NO: 2368168 - RNA, 19 nt, Homo sapiens
  misc_RNA (1)...(19): siRNA sense strand
gaaccaaaugagccaaaca

SEQ ID NO: 2368169 - RNA, 19 nt, Homo sapiens
  misc_RNA (1)...(19): siRNA sense strand
aggacaagguggccuccaa

SEQ ID NO: 2368170 - RNA, 19 nt, Homo sapiens
  misc_RNA (1)...(19): siRNA sense strand
gaaggagccaggagagacu

SEQ ID NO: 2368171 - RNA, 19 nt, Homo sapiens
  misc_RNA (1)...(19): siRNA sense strand
ugggcaaggugaugggcaa

SEQ ID NO: 2368172 - RNA, 19 nt, Homo sapiens
  misc_RNA (1)...(19): siRNA sense strand
gcacagaggagaugccuga

SEQ ID NO: 2368173 - RNA, 19 nt, Homo sapiens
  misc_RNA (1)...(19): siRNA sense strand
cagcagagauggagcaccu

SEQ ID NO: 2368174 - RNA, 19 nt, Homo sapiens
  misc_RNA (1)...(19): siRNA sense strand
guucaagaaagcugugaca

SEQ ID NO: 2368175 - RNA, 19 nt, Homo sapiens
  misc_RNA (1)...(19): siRNA sense strand
gagaagagauggugacugg

SEQ ID NO: 2368176 - RNA, 19 nt, Homo sapiens
  misc_RNA (1)...(19): siRNA sense strand
ccagaggagcuccaggcaa

SEQ ID NO: 2368177 - RNA, 19 nt, Homo sapiens
  misc_RNA (1)...(19): siRNA sense strand
caagguguucuuugggcaa

SEQ ID NO: 2368178 - RNA, 19 nt, Homo sapiens
  misc_RNA (1)...(19): siRNA sense strand
ccaucaugaucaaggugca

SEQ ID NO: 2368179 - RNA, 19 nt, Homo sapiens
  misc_RNA (1)...(19): siRNA sense strand
ugggcaaggugaugggcaa

SEQ ID NO: 2368180 - RNA, 19 nt, Homo sapiens
  misc_RNA (1)...(19): siRNA sense strand
gcacagaggagaugccuga

SEQ ID NO: 2368181 - RNA, 19 nt, Homo sapiens
  misc_RNA (1)...(19): siRNA sense strand
cagcagagauggagcaccu

SEQ ID NO: 2368182 - RNA, 19 nt, Homo sapiens
  misc_RNA (1)...(19): siRNA sense strand
guucaagaaagcugugaca

SEQ ID NO: 2368183 - RNA, 19 nt, Homo sapiens
  misc_RNA (1)...(19): siRNA sense strand
gagaagagauggugacugg

SEQ ID NO: 2368184 - RNA, 19 nt, Homo sapiens
  misc_RNA (1)...(19): siRNA sense strand
ccagaggagcuccaggcaa

SEQ ID NO: 2368185 - RNA, 19 nt, Homo sapiens
  misc_RNA (1)...(19): siRNA sense strand
caagguguucuuugggcaa

SEQ ID NO: 2368186 - RNA, 19 nt, Homo sapiens
  misc_RNA (1)...(19): siRNA sense strand
ccaucaugaucaaggugca

SEQ ID NO: 2368187 - RNA, 19 nt, Homo sapiens
  misc_RNA (1)...(19): siRNA sense strand
gaaaagugcuggaacccaa

SEQ ID NO: 2368188 - RNA, 19 nt, Homo sapiens
  misc_RNA (1)...(19): siRNA sense strand
uggcauaucacgggagcaa

SEQ ID NO: 2368189 - RNA, 19 nt, Homo sapiens
  misc_RNA (1)...(19): siRNA sense strand
gggaauaugcacugcccuu

SEQ ID NO: 2368190 - RNA, 19 nt, Homo sapiens
  misc_RNA (1)...(19): siRNA sense strand
ggacgguaucaaagagagu

SEQ ID NO: 2368191 - RNA, 19 nt, Homo sapiens
  misc_RNA (1)...(19): siRNA sense strand
agugugagcaggugacaau

SEQ ID NO: 2368192 - RNA, 19 nt, Homo sapiens
  misc_RNA (1)...(19): siRNA sense strand
gggacauggagaaagcaga

SEQ ID NO: 2368193 - RNA, 19 nt, Homo sapiens
  misc_RNA (1)...(19): siRNA sense strand
gggcagugugagcagguga

SEQ ID NO: 2368194 - RNA, 19 nt, Homo sapiens
  misc_RNA (1)...(19): siRNA sense strand
ucuaaagagcugcgaguac

SEQ ID NO: 2368195 - RNA, 19 nt, Homo sapiens
  misc_RNA (1)...(19): siRNA sense strand
ggagaaacuggcaaggaga

SEQ ID NO: 2368196 - RNA, 19 nt, Homo sapiens
  misc_RNA (1)...(19): siRNA sense strand
augaagaugcagaggacca

SEQ ID NO: 2368197 - RNA, 19 nt, Homo sapiens
  misc_RNA (1)...(19): siRNA sense strand
ccgcgguacuacaagaaca

SEQ ID NO: 2368198 - RNA, 19 nt, Homo sapiens
  misc_RNA (1)...(19): siRNA sense strand
agaugaagaugcagaggac

SEQ ID NO: 2368199 - RNA, 19 nt, Homo sapiens
  misc_RNA (1)...(19): siRNA sense strand
gggagaaacuggcaaggag

SEQ ID NO: 2368200 - RNA, 19 nt, Homo sapiens
  misc_RNA (1)...(19): siRNA sense strand
ugcaaagaggucagagaaa

SEQ ID NO: 2368201 - RNA, 19 nt, Homo sapiens
  misc_RNA (1)...(19): siRNA sense strand
caaagaggucagagaaaau

SEQ ID NO: 2368202 - RNA, 19 nt, Homo sapiens
  misc_RNA (1)...(19): siRNA sense strand
ggugcaaagaggucagaga

SEQ ID NO: 2368203 - RNA, 19 nt, Homo sapiens
  misc_RNA (1)...(19): siRNA sense strand
gugaggaccaacagagcuu

SEQ ID NO: 2368204 - RNA, 19 nt, Homo sapiens
  misc_RNA (1)...(19): siRNA sense strand
gguaccagaacuucagcaa

SEQ ID NO: 2368205 - RNA, 19 nt, Homo sapiens
  misc_RNA (1)...(19): siRNA sense strand
gcucauuugcaagcagaaa

SEQ ID NO: 2368206 - RNA, 19 nt, Homo sapiens
  misc_RNA (1)...(19): siRNA sense strand
ccaggaaggucauggggca

SEQ ID NO: 2368207 - RNA, 19 nt, Homo sapiens
  misc_RNA (1)...(19): siRNA sense strand
ugcaaagaggucagagaaa

SEQ ID NO: 2368208 - RNA, 19 nt, Homo sapiens
  misc_RNA (1)...(19): siRNA sense strand
caaagaggucagagaaaau

SEQ ID NO: 2368209 - RNA, 19 nt, Homo sapiens
  misc_RNA (1)...(19): siRNA sense strand
ggugcaaagaggucagaga

SEQ ID NO: 2368210 - RNA, 19 nt, Homo sapiens
  misc_RNA (1)...(19): siRNA sense strand
gugaggaccaacagagcuu

SEQ ID NO: 2368211 - RNA, 19 nt, Homo sapiens
  misc_RNA (1)...(19): siRNA sense strand
gguaccagaacuucagcaa

SEQ ID NO: 2368212 - RNA, 19 nt, Homo sapiens
  misc_RNA (1)...(19): siRNA sense strand
gcucauuugcaagcagaaa

SEQ ID NO: 2368213 - RNA, 19 nt, Homo sapiens
  misc_RNA (1)...(19): siRNA sense strand
ccaggaaggucauggggca

SEQ ID NO: 2368214 - RNA, 19 nt, Homo sapiens
  misc_RNA (1)...(19): siRNA sense strand
ugcaaagaggucagagaaa

SEQ ID NO: 2368215 - RNA, 19 nt, Homo sapiens
  misc_RNA (1)...(19): siRNA sense strand
caaagaggucagagaaaau

SEQ ID NO: 2368216 - RNA, 19 nt, Homo sapiens
  misc_RNA (1)...(19): siRNA sense strand
ggugcaaagaggucagaga

SEQ ID NO: 2368217 - RNA, 19 nt, Homo sapiens
  misc_RNA (1)...(19): siRNA sense strand
gugaggaccaacagagcuu

SEQ ID NO: 2368218 - RNA, 19 nt, Homo sapiens
  misc_RNA (1)...(19): siRNA sense strand
gguaccagaacuucagcaa

SEQ ID NO: 2368219 - RNA, 19 nt, Homo sapiens
  misc_RNA (1)...(19): siRNA sense strand
gcucauuugcaagcagaaa

SEQ ID NO: 2368220 - RNA, 19 nt, Homo sapiens
  misc_RNA (1)...(19): siRNA sense strand
ccaggaaggucauggggca

SEQ ID NO: 2368221 - RNA, 19 nt, Homo sapiens
  misc_RNA (1)...(19): siRNA sense strand
ugcaaagaggucagagaaa

SEQ ID NO: 2368222 - RNA, 19 nt, Homo sapiens
  misc_RNA (1)...(19): siRNA sense strand
caaagaggucagagaaaau

SEQ ID NO: 2368223 - RNA, 19 nt, Homo sapiens
  misc_RNA (1)...(19): siRNA sense strand
ggugcaaagaggucagaga

SEQ ID NO: 2368224 - RNA, 19 nt, Homo sapiens
  misc_RNA (1)...(19): siRNA sense strand
gugaggaccaacagagcuu

SEQ ID NO: 2368225 - RNA, 19 nt, Homo sapiens
  misc_RNA (1)...(19): siRNA sense strand
gguaccagaacuucagcaa

SEQ ID NO: 2368226 - RNA, 19 nt, Homo sapiens
  misc_RNA (1)...(19): siRNA sense strand
gggagaagcucaagcguga

SEQ ID NO: 2368227 - RNA, 19 nt, Homo sapiens
  misc_RNA (1)...(19): siRNA sense strand
gguuagaagcucaagggua

SEQ ID NO: 2368228 - RNA, 19 nt, Homo sapiens
  misc_RNA (1)...(19): siRNA sense strand
guuaaauaggauugcgaau

SEQ ID NO: 2368229 - RNA, 19 nt, Homo sapiens
  misc_RNA (1)...(19): siRNA sense strand
cggccgaggaacuggacaa

SEQ ID NO: 2368230 - RNA, 19 nt, Homo sapiens
  misc_RNA (1)...(19): siRNA sense strand
gagaaaaugaugaggagau

SEQ ID NO: 2368231 - RNA, 19 nt, Homo sapiens
  misc_RNA (1)...(19): siRNA sense strand
acauggacgaggaggacua

SEQ ID NO: 2368232 - RNA, 19 nt, Homo sapiens
  misc_RNA (1)...(19): siRNA sense strand
cgaaaagagagcucgguua

SEQ ID NO: 2368233 - RNA, 19 nt, Homo sapiens
  misc_RNA (1)...(19): siRNA sense strand
ugaucgagcugcugcgcaa

SEQ ID NO: 2368234 - RNA, 19 nt, Homo sapiens
  misc_RNA (1)...(19): siRNA sense strand
uggacaacgagguggagua

SEQ ID NO: 2368235 - RNA, 19 nt, Homo sapiens
  misc_RNA (1)...(19): siRNA sense strand
cuaagaaagcucuggcuga

SEQ ID NO: 2368236 - RNA, 19 nt, Homo sapiens
  misc_RNA (1)...(19): siRNA sense strand
ggaaacgguuagaagcuca

SEQ ID NO: 2368237 - RNA, 19 nt, Homo sapiens
  misc_RNA (1)...(19): siRNA sense strand
aggaaaaggucgcggagca

SEQ ID NO: 2368238 - RNA, 19 nt, Homo sapiens
  misc_RNA (1)...(19): siRNA sense strand
gcaacagcaacaaggaaaa

SEQ ID NO: 2368239 - RNA, 19 nt, Homo sapiens
  misc_RNA (1)...(19): siRNA sense strand
gagaugagugagugcaaca

SEQ ID NO: 2368240 - RNA, 19 nt, Homo sapiens
  misc_RNA (1)...(19): siRNA sense strand
uggagaucauauuggaaga

SEQ ID NO: 2368241 - RNA, 19 nt, Homo sapiens
  misc_RNA (1)...(19): siRNA sense strand
aggucaggaagaaggcaaa

SEQ ID NO: 2368242 - RNA, 19 nt, Homo sapiens
  misc_RNA (1)...(19): siRNA sense strand
ggaugguagagauagaaau

SEQ ID NO: 2368243 - RNA, 19 nt, Homo sapiens
  misc_RNA (1)...(19): siRNA sense strand
ugcaacagcaacaaggaaa

SEQ ID NO: 2368244 - RNA, 19 nt, Homo sapiens
  misc_RNA (1)...(19): siRNA sense strand
cugccaaagagaagcugaa

SEQ ID NO: 2368245 - RNA, 19 nt, Homo sapiens
  misc_RNA (1)...(19): siRNA sense strand
aagagaugagugagugcaa

SEQ ID NO: 2368246 - RNA, 19 nt, Homo sapiens
  misc_RNA (1)...(19): siRNA sense strand
ggaagaagcaguuugugga

SEQ ID NO: 2368247 - RNA, 19 nt, Homo sapiens
  misc_RNA (1)...(19): siRNA sense strand
cagcgaagcucacagcaga

SEQ ID NO: 2368248 - RNA, 19 nt, Homo sapiens
  misc_RNA (1)...(19): siRNA sense strand
agcucacagcagagagaaa

SEQ ID NO: 2368249 - RNA, 19 nt, Homo sapiens
  misc_RNA (1)...(19): siRNA sense strand
gggagugucagaacagcaa

SEQ ID NO: 2368250 - RNA, 19 nt, Homo sapiens
  misc_RNA (1)...(19): siRNA sense strand
aggugaagguggagcaggu

SEQ ID NO: 2368251 - RNA, 19 nt, Homo sapiens
  misc_RNA (1)...(19): siRNA sense strand
ugguauugacgaaacuaua

SEQ ID NO: 2368252 - RNA, 19 nt, Homo sapiens
  misc_RNA (1)...(19): siRNA sense strand
ugucagaacagcaacguga

SEQ ID NO: 2368253 - RNA, 19 nt, Homo sapiens
  misc_RNA (1)...(19): siRNA sense strand
uggagaucgucaaugagaa

SEQ ID NO: 2368254 - RNA, 19 nt, Homo sapiens
  misc_RNA (1)...(19): siRNA sense strand
gguuaaauaggauugcgaa

SEQ ID NO: 2368255 - RNA, 19 nt, Homo sapiens
  misc_RNA (1)...(19): siRNA sense strand
gcuaugaaguccagcggcu

SEQ ID NO: 2368256 - RNA, 19 nt, Homo sapiens
  misc_RNA (1)...(19): siRNA sense strand
aguuaaagaugauggaagg

SEQ ID NO: 2368257 - RNA, 19 nt, Homo sapiens
  misc_RNA (1)...(19): siRNA sense strand
augagaagcgcaagggcga

SEQ ID NO: 2368258 - RNA, 19 nt, Homo sapiens
  misc_RNA (1)...(19): siRNA sense strand
aauaagagaaguuggcagu

SEQ ID NO: 2368259 - RNA, 19 nt, Homo sapiens
  misc_RNA (1)...(19): siRNA sense strand
ucgucaaugagaagcgcaa

SEQ ID NO: 2368260 - RNA, 19 nt, Homo sapiens
  misc_RNA (1)...(19): siRNA sense strand
ggccaggcuuggaaggcuu

SEQ ID NO: 2368261 - RNA, 19 nt, Homo sapiens
  misc_RNA (1)...(19): siRNA sense strand
aaguacaaugccagggaca

SEQ ID NO: 2368262 - RNA, 19 nt, Homo sapiens
  misc_RNA (1)...(19): siRNA sense strand
cgcgagaaacgcugaccua

SEQ ID NO: 2368263 - RNA, 19 nt, Homo sapiens
  misc_RNA (1)...(19): siRNA sense strand
gugcaacagcaacaaggaa

SEQ ID NO: 2368264 - RNA, 19 nt, Homo sapiens
  misc_RNA (1)...(19): siRNA sense strand
aaagagaagcugaaguacu

SEQ ID NO: 2368265 - RNA, 19 nt, Homo sapiens
  misc_RNA (1)...(19): siRNA sense strand
gaggaaacgguuagaagcu

SEQ ID NO: 2368266 - RNA, 19 nt, Homo sapiens
  misc_RNA (1)...(19): siRNA sense strand
augauggaagggaggaauu

SEQ ID NO: 2368267 - RNA, 19 nt, Homo sapiens
  misc_RNA (1)...(19): siRNA sense strand
agaugauggaagggaggaa

SEQ ID NO: 2368268 - RNA, 19 nt, Homo sapiens
  misc_RNA (1)...(19): siRNA sense strand
ugaaacaauuccagggcau

SEQ ID NO: 2368269 - RNA, 19 nt, Homo sapiens
  misc_RNA (1)...(19): siRNA sense strand
agauacaauagaaggagua

SEQ ID NO: 2368270 - RNA, 19 nt, Homo sapiens
  misc_RNA (1)...(19): siRNA sense strand
uccuauaauuccagagcau

SEQ ID NO: 2368271 - RNA, 19 nt, Homo sapiens
  misc_RNA (1)...(19): siRNA sense strand
gguccagacaagaugugaa

SEQ ID NO: 2368272 - RNA, 19 nt, Homo sapiens
  misc_RNA (1)...(19): siRNA sense strand
ccgcagcuccagaggugaa

SEQ ID NO: 2368273 - RNA, 19 nt, Homo sapiens
  misc_RNA (1)...(19): siRNA sense strand
gugaaauggagaaguaucu

SEQ ID NO: 2368274 - RNA, 19 nt, Homo sapiens
  misc_RNA (1)...(19): siRNA sense strand
agauagacaagcagagaug

SEQ ID NO: 2368275 - RNA, 19 nt, Homo sapiens
  misc_RNA (1)...(19): siRNA sense strand
cagauacaauagaaggagu

SEQ ID NO: 2368276 - RNA, 19 nt, Homo sapiens
  misc_RNA (1)...(19): siRNA sense strand
uggcaauucacaauccaaa

SEQ ID NO: 2368277 - RNA, 19 nt, Homo sapiens
  misc_RNA (1)...(19): siRNA sense strand
cgaaugagcaaguggacga

SEQ ID NO: 2368278 - RNA, 19 nt, Homo sapiens
  misc_RNA (1)...(19): siRNA sense strand
gugcggaccgaaugagcaa

SEQ ID NO: 2368279 - RNA, 19 nt, Homo sapiens
  misc_RNA (1)...(19): siRNA sense strand
agcccacacaggagggaaa

SEQ ID NO: 2368280 - RNA, 19 nt, Homo sapiens
  misc_RNA (1)...(19): siRNA sense strand
aggagauggucccggaguu

SEQ ID NO: 2368281 - RNA, 19 nt, Homo sapiens
  misc_RNA (1)...(19): siRNA sense strand
aguuaagcauguugggaaa

SEQ ID NO: 2368282 - RNA, 19 nt, Homo sapiens
  misc_RNA (1)...(19): siRNA sense strand
aaguaaagcaacagaggaa

SEQ ID NO: 2368283 - RNA, 19 nt, Homo sapiens
  misc_RNA (1)...(19): siRNA sense strand
agaucaaaguaaagcaaca

SEQ ID NO: 2368284 - RNA, 19 nt, Homo sapiens
  misc_RNA (1)...(19): siRNA sense strand
cauuuaagcgagugguauu

SEQ ID NO: 2368285 - RNA, 19 nt, Homo sapiens
  misc_RNA (1)...(19): siRNA sense strand
agagaauagucaagcuaca

SEQ ID NO: 2368286 - RNA, 19 nt, Homo sapiens
  misc_RNA (1)...(19): siRNA sense strand
agauugugauccaggagaa

SEQ ID NO: 2368287 - RNA, 19 nt, Homo sapiens
  misc_RNA (1)...(19): siRNA sense strand
caaaaguggcauuggaaau

SEQ ID NO: 2368288 - RNA, 19 nt, Homo sapiens
  misc_RNA (1)...(19): siRNA sense strand
uuggaaagaucucggaaaa

SEQ ID NO: 2368289 - RNA, 19 nt, Homo sapiens
  misc_RNA (1)...(19): siRNA sense strand
cugucuucgugaugaauaa

SEQ ID NO: 2368290 - RNA, 19 nt, Homo sapiens
  misc_RNA (1)...(19): siRNA sense strand
aaguuaagcauguugggaa

SEQ ID NO: 2368291 - RNA, 19 nt, Homo sapiens
  misc_RNA (1)...(19): siRNA sense strand
cucuggaaguugaagcaaa

SEQ ID NO: 2368292 - RNA, 19 nt, Homo sapiens
  misc_RNA (1)...(19): siRNA sense strand
auccaggagaagugaauaa

SEQ ID NO: 2368293 - RNA, 19 nt, Homo sapiens
  misc_RNA (1)...(19): siRNA sense strand
ggagaagugaauaaggcau

SEQ ID NO: 2368294 - RNA, 19 nt, Homo sapiens
  misc_RNA (1)...(19): siRNA sense strand
cuugaugaguggaugccaa

SEQ ID NO: 2368295 - RNA, 19 nt, Homo sapiens
  misc_RNA (1)...(19): siRNA sense strand
ucuggaaguugaagcaaaa

SEQ ID NO: 2368296 - RNA, 19 nt, Homo sapiens
  misc_RNA (1)...(19): siRNA sense strand
ggauaagcuauuggaaaga

SEQ ID NO: 2368297 - RNA, 19 nt, Homo sapiens
  misc_RNA (1)...(19): siRNA sense strand
auggagauuuauagcaaca

SEQ ID NO: 2368298 - RNA, 19 nt, Homo sapiens
  misc_RNA (1)...(19): siRNA sense strand
agucaagcuacacagaaua

SEQ ID NO: 2368299 - RNA, 19 nt, Homo sapiens
  misc_RNA (1)...(19): siRNA sense strand
auuggaaagaucucggaaa

SEQ ID NO: 2368300 - RNA, 19 nt, Homo sapiens
  misc_RNA (1)...(19): siRNA sense strand
gagugguauugcaggaagu

SEQ ID NO: 2368301 - RNA, 19 nt, Homo sapiens
  misc_RNA (1)...(19): siRNA sense strand
gggacauguauaagccuuu

SEQ ID NO: 2368302 - RNA, 19 nt, Homo sapiens
  misc_RNA (1)...(19): siRNA sense strand
gcaaacuugaugaguggau

SEQ ID NO: 2368303 - RNA, 19 nt, Homo sapiens
  misc_RNA (1)...(19): siRNA sense strand
ucauagaagagaaggcauc

SEQ ID NO: 2368304 - RNA, 19 nt, Homo sapiens
  misc_RNA (1)...(19): siRNA sense strand
aguuaagcauguugggaaa

SEQ ID NO: 2368305 - RNA, 19 nt, Homo sapiens
  misc_RNA (1)...(19): siRNA sense strand
cauuuaagcgagugguauu

SEQ ID NO: 2368306 - RNA, 19 nt, Homo sapiens
  misc_RNA (1)...(19): siRNA sense strand
agagaauagucaagcuaca

SEQ ID NO: 2368307 - RNA, 19 nt, Homo sapiens
  misc_RNA (1)...(19): siRNA sense strand
agauugugauccaggagaa

SEQ ID NO: 2368308 - RNA, 19 nt, Homo sapiens
  misc_RNA (1)...(19): siRNA sense strand
caaaaguggcauuggaaau

SEQ ID NO: 2368309 - RNA, 19 nt, Homo sapiens
  misc_RNA (1)...(19): siRNA sense strand
uuggaaagaucucggaaaa

SEQ ID NO: 2368310 - RNA, 19 nt, Homo sapiens
  misc_RNA (1)...(19): siRNA sense strand
cugucuucgugaugaauaa

SEQ ID NO: 2368311 - RNA, 19 nt, Homo sapiens
  misc_RNA (1)...(19): siRNA sense strand
aaguuaagcauguugggaa

SEQ ID NO: 2368312 - RNA, 19 nt, Homo sapiens
  misc_RNA (1)...(19): siRNA sense strand
cucuggaaguugaagcaaa

SEQ ID NO: 2368313 - RNA, 19 nt, Homo sapiens
  misc_RNA (1)...(19): siRNA sense strand
auccaggagaagugaauaa

SEQ ID NO: 2368314 - RNA, 19 nt, Homo sapiens
  misc_RNA (1)...(19): siRNA sense strand
ggagaagugaauaaggcau

SEQ ID NO: 2368315 - RNA, 19 nt, Homo sapiens
  misc_RNA (1)...(19): siRNA sense strand
cuugaugaguggaugccaa

SEQ ID NO: 2368316 - RNA, 19 nt, Homo sapiens
  misc_RNA (1)...(19): siRNA sense strand
ucuggaaguugaagcaaaa

SEQ ID NO: 2368317 - RNA, 19 nt, Homo sapiens
  misc_RNA (1)...(19): siRNA sense strand
ggauaagcuauuggaaaga

SEQ ID NO: 2368318 - RNA, 19 nt, Homo sapiens
  misc_RNA (1)...(19): siRNA sense strand
agucaagcuacacagaaua

SEQ ID NO: 2368319 - RNA, 19 nt, Homo sapiens
  misc_RNA (1)...(19): siRNA sense strand
auggagauuuauagcaaca

SEQ ID NO: 2368320 - RNA, 19 nt, Homo sapiens
  misc_RNA (1)...(19): siRNA sense strand
auuggaaagaucucggaaa

SEQ ID NO: 2368321 - RNA, 19 nt, Homo sapiens
  misc_RNA (1)...(19): siRNA sense strand
gagugguauugcaggaagu

SEQ ID NO: 2368322 - RNA, 19 nt, Homo sapiens
  misc_RNA (1)...(19): siRNA sense strand
gggacauguauaagccuuu

SEQ ID NO: 2368323 - RNA, 19 nt, Homo sapiens
  misc_RNA (1)...(19): siRNA sense strand
gcaaacuugaugaguggau

SEQ ID NO: 2368324 - RNA, 19 nt, Homo sapiens
  misc_RNA (1)...(19): siRNA sense strand
ucauagaagagaaggcauc

SEQ ID NO: 2368325 - RNA, 19 nt, Homo sapiens
  misc_RNA (1)...(19): siRNA sense strand
uaaccaacaucccggguaa

SEQ ID NO: 2368326 - RNA, 19 nt, Homo sapiens
  misc_RNA (1)...(19): siRNA sense strand
gggccaauguggaagagga

SEQ ID NO: 2368327 - RNA, 19 nt, Homo sapiens
  misc_RNA (1)...(19): siRNA sense strand
gugacaucgacuugagcaa

SEQ ID NO: 2368328 - RNA, 19 nt, Homo sapiens
  misc_RNA (1)...(19): siRNA sense strand
uggccuacgcuguggguga

SEQ ID NO: 2368329 - RNA, 19 nt, Homo sapiens
  misc_RNA (1)...(19): siRNA sense strand
gaagauugauauugggcug

SEQ ID NO: 2368330 - RNA, 19 nt, Homo sapiens
  misc_RNA (1)...(19): siRNA sense strand
acgcugugggugaggauga

SEQ ID NO: 2368331 - RNA, 19 nt, Homo sapiens
  misc_RNA (1)...(19): siRNA sense strand
aggcacaagcagagacaga

SEQ ID NO: 2368332 - RNA, 19 nt, Homo sapiens
  misc_RNA (1)...(19): siRNA sense strand
ccacauuucuauuuggauc

SEQ ID NO: 2368333 - RNA, 19 nt, Homo sapiens
  misc_RNA (1)...(19): siRNA sense strand
ggaaguacauggaggagga

SEQ ID NO: 2368334 - RNA, 19 nt, Homo sapiens
  misc_RNA (1)...(19): siRNA sense strand
aacaggaagaggagggaaa

SEQ ID NO: 2368335 - RNA, 19 nt, Homo sapiens
  misc_RNA (1)...(19): siRNA sense strand
cuaugauaauggagaacau

SEQ ID NO: 2368336 - RNA, 19 nt, Homo sapiens
  misc_RNA (1)...(19): siRNA sense strand
agacagacucagagcccaa

SEQ ID NO: 2368337 - RNA, 19 nt, Homo sapiens
  misc_RNA (1)...(19): siRNA sense strand
aggaagagcaagaagagga

SEQ ID NO: 2368338 - RNA, 19 nt, Homo sapiens
  misc_RNA (1)...(19): siRNA sense strand
gaaagcaggaagaaggaca

SEQ ID NO: 2368339 - RNA, 19 nt, Homo sapiens
  misc_RNA (1)...(19): siRNA sense strand
aggaagaggggcagaaaca

SEQ ID NO: 2368340 - RNA, 19 nt, Homo sapiens
  misc_RNA (1)...(19): siRNA sense strand
gcaacaacguggaagagcu

SEQ ID NO: 2368341 - RNA, 19 nt, Homo sapiens
  misc_RNA (1)...(19): siRNA sense strand
aagagcaagaagaggaaca

SEQ ID NO: 2368342 - RNA, 19 nt, Homo sapiens
  misc_RNA (1)...(19): siRNA sense strand
aguacauggaggaggagau

SEQ ID NO: 2368343 - RNA, 19 nt, Homo sapiens
  misc_RNA (1)...(19): siRNA sense strand
gggaagucggucugugaca

SEQ ID NO: 2368344 - RNA, 19 nt, Homo sapiens
  misc_RNA (1)...(19): siRNA sense strand
aagaacacaagcaggaaga

SEQ ID NO: 2368345 - RNA, 19 nt, Homo sapiens
  misc_RNA (1)...(19): siRNA sense strand
guggagaauaccugcauca

SEQ ID NO: 2368346 - RNA, 19 nt, Homo sapiens
  misc_RNA (1)...(19): siRNA sense strand
gcaugagaugucugcagaa

SEQ ID NO: 2368347 - RNA, 19 nt, Homo sapiens
  misc_RNA (1)...(19): siRNA sense strand
ucagcaacaacguggaaga

SEQ ID NO: 2368348 - RNA, 19 nt, Homo sapiens
  misc_RNA (1)...(19): siRNA sense strand
ggcagaaacaggaagagca

SEQ ID NO: 2368349 - RNA, 19 nt, Homo sapiens
  misc_RNA (1)...(19): siRNA sense strand
aggagggaaagcaggaaga

SEQ ID NO: 2368350 - RNA, 19 nt, Homo sapiens
  misc_RNA (1)...(19): siRNA sense strand
ccuugaagcuggagcagug

SEQ ID NO: 2368351 - RNA, 19 nt, Homo sapiens
  misc_RNA (1)...(19): siRNA sense strand
ugagaaaccgcaaucggaa

SEQ ID NO: 2368352 - RNA, 19 nt, Homo sapiens
  misc_RNA (1)...(19): siRNA sense strand
cgccagagcacaagcagga

SEQ ID NO: 2368353 - RNA, 19 nt, Homo sapiens
  misc_RNA (1)...(19): siRNA sense strand
agcaagcgccagagcacaa

SEQ ID NO: 2368354 - RNA, 19 nt, Homo sapiens
  misc_RNA (1)...(19): siRNA sense strand
cacaagaacacaagcagga

SEQ ID NO: 2368355 - RNA, 19 nt, Homo sapiens
  misc_RNA (1)...(19): siRNA sense strand
gguaaguggaagagaagau

SEQ ID NO: 2368356 - RNA, 19 nt, Homo sapiens
  misc_RNA (1)...(19): siRNA sense strand
caguagagaaccugagaga

SEQ ID NO: 2368357 - RNA, 19 nt, Homo sapiens
  misc_RNA (1)...(19): siRNA sense strand
ggaaauacccuguggaggu

SEQ ID NO: 2368358 - RNA, 19 nt, Homo sapiens
  misc_RNA (1)...(19): siRNA sense strand
ugucaagaguggaagcaga

SEQ ID NO: 2368359 - RNA, 19 nt, Homo sapiens
  misc_RNA (1)...(19): siRNA sense strand
auugaaaguuacagagcuu

SEQ ID NO: 2368360 - RNA, 19 nt, Homo sapiens
  misc_RNA (1)...(19): siRNA sense strand
ggaugugacaaguguggaa

SEQ ID NO: 2368361 - RNA, 19 nt, Homo sapiens
  misc_RNA (1)...(19): siRNA sense strand
gcauauuucaggaguguca

SEQ ID NO: 2368362 - RNA, 19 nt, Homo sapiens
  misc_RNA (1)...(19): siRNA sense strand
ugaagagaucugugccaaa

SEQ ID NO: 2368363 - RNA, 19 nt, Homo sapiens
  misc_RNA (1)...(19): siRNA sense strand
agaucaaggacaagggcuu

SEQ ID NO: 2368364 - RNA, 19 nt, Homo sapiens
  misc_RNA (1)...(19): siRNA sense strand
augauggauuagaggagaa

SEQ ID NO: 2368365 - RNA, 19 nt, Homo sapiens
  misc_RNA (1)...(19): siRNA sense strand
ccgaaauggugucuguuau

SEQ ID NO: 2368366 - RNA, 19 nt, Homo sapiens
  misc_RNA (1)...(19): siRNA sense strand
gggcaaacccaggcgaaau

SEQ ID NO: 2368367 - RNA, 19 nt, Homo sapiens
  misc_RNA (1)...(19): siRNA sense strand
guuaauagacacuggugau

SEQ ID NO: 2368368 - RNA, 19 nt, Homo sapiens
  misc_RNA (1)...(19): siRNA sense strand
cccaaauggcucagaugaa

SEQ ID NO: 2368369 - RNA, 19 nt, Homo sapiens
  misc_RNA (1)...(19): siRNA sense strand
ugugauggguauuggcauu

SEQ ID NO: 2368370 - RNA, 19 nt, Homo sapiens
  misc_RNA (1)...(19): siRNA sense strand
cuuagaaguaacacugaaa

SEQ ID NO: 2368371 - RNA, 19 nt, Homo sapiens
  misc_RNA (1)...(19): siRNA sense strand
uggaaaguguauaccagaa

SEQ ID NO: 2368372 - RNA, 19 nt, Homo sapiens
  misc_RNA (1)...(19): siRNA sense strand
aggacaagggcuuagacaa

SEQ ID NO: 2368373 - RNA, 19 nt, Homo sapiens
  misc_RNA (1)...(19): siRNA sense strand
agucagaaccagaguccuu

SEQ ID NO: 2368374 - RNA, 19 nt, Homo sapiens
  misc_RNA (1)...(19): siRNA sense strand
gcuuagaaguaacacugaa

SEQ ID NO: 2368375 - RNA, 19 nt, Homo sapiens
  misc_RNA (1)...(19): siRNA sense strand
aggcgaaaucauuacuaua

SEQ ID NO: 2368376 - RNA, 19 nt, Homo sapiens
  misc_RNA (1)...(19): siRNA sense strand
augacaacaucucuagaaa

SEQ ID NO: 2368377 - RNA, 19 nt, Homo sapiens
  misc_RNA (1)...(19): siRNA sense strand
agcaauugcaccugguuaa

SEQ ID NO: 2368378 - RNA, 19 nt, Homo sapiens
  misc_RNA (1)...(19): siRNA sense strand
gcagauaauggaagggaug

SEQ ID NO: 2368379 - RNA, 19 nt, Homo sapiens
  misc_RNA (1)...(19): siRNA sense strand
ccaaauggaagggaugaaa

SEQ ID NO: 2368380 - RNA, 19 nt, Homo sapiens
  misc_RNA (1)...(19): siRNA sense strand
acaugugggcaauggcuaa

SEQ ID NO: 2368381 - RNA, 19 nt, Homo sapiens
  misc_RNA (1)...(19): siRNA sense strand
gggcaauggcuaaaauauu

SEQ ID NO: 2368382 - RNA, 19 nt, Homo sapiens
  misc_RNA (1)...(19): siRNA sense strand
guggaagagaagaugauga

SEQ ID NO: 2368383 - RNA, 19 nt, Homo sapiens
  misc_RNA (1)...(19): siRNA sense strand
cgagugaugaugaggcuuu

SEQ ID NO: 2368384 - RNA, 19 nt, Homo sapiens
  misc_RNA (1)...(19): siRNA sense strand
ggauccagaaggugcaauu

SEQ ID NO: 2368385 - RNA, 19 nt, Homo sapiens
  misc_RNA (1)...(19): siRNA sense strand
auggaugaauguggagaua

SEQ ID NO: 2368386 - RNA, 19 nt, Homo sapiens
  misc_RNA (1)...(19): siRNA sense strand
aaucauacucacagaaguu

SEQ ID NO: 2368387 - RNA, 19 nt, Homo sapiens
  misc_RNA (1)...(19): siRNA sense strand
uggaagagaagaugaugau

SEQ ID NO: 2368388 - RNA, 19 nt, Homo sapiens
  misc_RNA (1)...(19): siRNA sense strand
cuuuaaacuugaugguacu

SEQ ID NO: 2368389 - RNA, 19 nt, Homo sapiens
  misc_RNA (1)...(19): siRNA sense strand
gcuuagacaaccauauaau

SEQ ID NO: 2368390 - RNA, 19 nt, Homo sapiens
  misc_RNA (1)...(19): siRNA sense strand
gagagacuccagagcaaau

SEQ ID NO: 2368391 - RNA, 19 nt, Homo sapiens
  misc_RNA (1)...(19): siRNA sense strand
ugagaauguuugaaagaag

SEQ ID NO: 2368392 - RNA, 19 nt, Homo sapiens
  misc_RNA (1)...(19): siRNA sense strand
aagcagaauuguuaagaag

SEQ ID NO: 2368393 - RNA, 19 nt, Homo sapiens
  misc_RNA (1)...(19): siRNA sense strand
cagaguaccaguagagaac

SEQ ID NO: 2368394 - RNA, 19 nt, Homo sapiens
  misc_RNA (1)...(19): siRNA sense strand
aaacgaaacgagugaugau

SEQ ID NO: 2368395 - RNA, 19 nt, Homo sapiens
  misc_RNA (1)...(19): siRNA sense strand
gaucaguuucguuguggua

SEQ ID NO: 2368396 - RNA, 19 nt, Homo sapiens
  misc_RNA (1)...(19): siRNA sense strand
gcagcguugugauggguau

SEQ ID NO: 2368397 - RNA, 19 nt, Homo sapiens
  misc_RNA (1)...(19): siRNA sense strand
ucugagaauguuugaaaga

SEQ ID NO: 2368398 - RNA, 19 nt, Homo sapiens
  misc_RNA (1)...(19): siRNA sense strand
ugcaacaaauccuggagua

SEQ ID NO: 2368399 - RNA, 19 nt, Homo sapiens
  misc_RNA (1)...(19): siRNA sense strand
gguaauggaaaguguauac

SEQ ID NO: 2368400 - RNA, 19 nt, Homo sapiens
  misc_RNA (1)...(19): siRNA sense strand
uggagauaguuccgaugaa

SEQ ID NO: 2368401 - RNA, 19 nt, Homo sapiens
  misc_RNA (1)...(19): siRNA sense strand
acuugaugguacugguuau

SEQ ID NO: 2368402 - RNA, 19 nt, Homo sapiens
  misc_RNA (1)...(19): siRNA sense strand
ccaugugccagaaggaaga

SEQ ID NO: 2368403 - RNA, 19 nt, Homo sapiens
  misc_RNA (1)...(19): siRNA sense strand
gucaagaguggaagcagaa

SEQ ID NO: 2368404 - RNA, 19 nt, Homo sapiens
  misc_RNA (1)...(19): siRNA sense strand
gguuaauagacacugguga

SEQ ID NO: 2368405 - RNA, 19 nt, Homo sapiens
  misc_RNA (1)...(19): siRNA sense strand
acuuuaaacuugaugguac

SEQ ID NO: 2368406 - RNA, 19 nt, Homo sapiens
  misc_RNA (1)...(19): siRNA sense strand
ucagaguaccaguagagaa

SEQ ID NO: 2368407 - RNA, 19 nt, Homo sapiens
  misc_RNA (1)...(19): siRNA sense strand
gagaagagauauggcagga

SEQ ID NO: 2368408 - RNA, 19 nt, Homo sapiens
  misc_RNA (1)...(19): siRNA sense strand
agaugaugaugauguugaa

SEQ ID NO: 2368409 - RNA, 19 nt, Homo sapiens
  misc_RNA (1)...(19): siRNA sense strand
gagauaguuccgaugaaga

SEQ ID NO: 2368410 - RNA, 19 nt, Homo sapiens
  misc_RNA (1)...(19): siRNA sense strand
gaugaaaccaauuguacca

SEQ ID NO: 2368411 - RNA, 19 nt, Homo sapiens
  misc_RNA (1)...(19): siRNA sense strand
gauaaugggguaaguggaa

SEQ ID NO: 2368412 - RNA, 19 nt, Homo sapiens
  misc_RNA (1)...(19): siRNA sense strand
ugaugauguugaaaugcua

SEQ ID NO: 2368413 - RNA, 19 nt, Homo sapiens
  misc_RNA (1)...(19): siRNA sense strand
acgagcaccaaguggcaua

SEQ ID NO: 2368414 - RNA, 19 nt, Homo sapiens
  misc_RNA (1)...(19): siRNA sense strand
uggaagggaugaaaccaau

SEQ ID NO: 2368415 - RNA, 19 nt, Homo sapiens
  misc_RNA (1)...(19): siRNA sense strand
gugccagaaggaagaauuu

SEQ ID NO: 2368416 - RNA, 19 nt, Homo sapiens
  misc_RNA (1)...(19): siRNA sense strand
caaauaaaguggaagccaa

SEQ ID NO: 2368417 - RNA, 19 nt, Homo sapiens
  misc_RNA (1)...(19): siRNA sense strand
agacaaaagagaagacaaa

SEQ ID NO: 2368418 - RNA, 19 nt, Homo sapiens
  misc_RNA (1)...(19): siRNA sense strand
uagcaaaaccaguggacaa

SEQ ID NO: 2368419 - RNA, 19 nt, Homo sapiens
  misc_RNA (1)...(19): siRNA sense strand
gcaccaugcugcaaggaga

SEQ ID NO: 2368420 - RNA, 19 nt, Homo sapiens
  misc_RNA (1)...(19): siRNA sense strand
cauuaaaaccccaaggaau

SEQ ID NO: 2368421 - RNA, 19 nt, Homo sapiens
  misc_RNA (1)...(19): siRNA sense strand
aggaaaauggacaaagaaa

SEQ ID NO: 2368422 - RNA, 19 nt, Homo sapiens
  misc_RNA (1)...(19): siRNA sense strand
guggagagggugaagaaaa

SEQ ID NO: 2368423 - RNA, 19 nt, Homo sapiens
  misc_RNA (1)...(19): siRNA sense strand
ccugaaaggggcugugaaa

SEQ ID NO: 2368424 - RNA, 19 nt, Homo sapiens
  misc_RNA (1)...(19): siRNA sense strand
ucugaagagaugauugaaa

SEQ ID NO: 2368425 - RNA, 19 nt, Homo sapiens
  misc_RNA (1)...(19): siRNA sense strand
gauaccaggucaaaggaga

SEQ ID NO: 2368426 - RNA, 19 nt, Homo sapiens
  misc_RNA (1)...(19): siRNA sense strand
uggaugaagcaaagacgua

SEQ ID NO: 2368427 - RNA, 19 nt, Homo sapiens
  misc_RNA (1)...(19): siRNA sense strand
agccagaaguagaaguuga

SEQ ID NO: 2368428 - RNA, 19 nt, Homo sapiens
  misc_RNA (1)...(19): siRNA sense strand
gguccagcgcacaggauau

SEQ ID NO: 2368429 - RNA, 19 nt, Homo sapiens
  misc_RNA (1)...(19): siRNA sense strand
uggagagggugaagaaaau

SEQ ID NO: 2368430 - RNA, 19 nt, Homo sapiens
  misc_RNA (1)...(19): siRNA sense strand
auuaaaaccccaaggaauu

SEQ ID NO: 2368431 - RNA, 19 nt, Homo sapiens
  misc_RNA (1)...(19): siRNA sense strand
cagaaguagaaguugauga

SEQ ID NO: 2368432 - RNA, 19 nt, Homo sapiens
  misc_RNA (1)...(19): siRNA sense strand
cuguggagagggugaagaa

SEQ ID NO: 2368433 - RNA, 19 nt, Homo sapiens
  misc_RNA (1)...(19): siRNA sense strand
ucguggaguaugagaguca

SEQ ID NO: 2368434 - RNA, 19 nt, Homo sapiens
  misc_RNA (1)...(19): siRNA sense strand
ccaggucaaaggagacaaa

SEQ ID NO: 2368435 - RNA, 19 nt, Homo sapiens
  misc_RNA (1)...(19): siRNA sense strand
augagaaugaugauggauu

SEQ ID NO: 2368436 - RNA, 19 nt, Homo sapiens
  misc_RNA (1)...(19): siRNA sense strand
gagacaaaagagaagacaa

SEQ ID NO: 2368437 - RNA, 19 nt, Homo sapiens
  misc_RNA (1)...(19): siRNA sense strand
caacaauagaggauaugca

SEQ ID NO: 2368438 - RNA, 19 nt, Homo sapiens
  misc_RNA (1)...(19): siRNA sense strand
guggaagccaagaaugcaa

SEQ ID NO: 2368439 - RNA, 19 nt, Homo sapiens
  misc_RNA (1)...(19): siRNA sense strand
aggauaugcauuuguaaca

SEQ ID NO: 2368440 - RNA, 19 nt, Homo sapiens
  misc_RNA (1)...(19): siRNA sense strand
gcaaggugcuggaugguuc

SEQ ID NO: 2368441 - RNA, 19 nt, Homo sapiens
  misc_RNA (1)...(19): siRNA sense strand
gacaguuauguuagguaua

SEQ ID NO: 2368442 - RNA, 19 nt, Homo sapiens
  misc_RNA (1)...(19): siRNA sense strand
aggccugggucgaggauac

SEQ ID NO: 2368443 - RNA, 19 nt, Homo sapiens
  misc_RNA (1)...(19): siRNA sense strand
agagaugauugaaaaggaa

SEQ ID NO: 2368444 - RNA, 19 nt, Homo sapiens
  misc_RNA (1)...(19): siRNA sense strand
ugaaagcuuuaaauggcaa

SEQ ID NO: 2368445 - RNA, 19 nt, Homo sapiens
  misc_RNA (1)...(19): siRNA sense strand
ggacaagaccaaagacagc

SEQ ID NO: 2368446 - RNA, 19 nt, Homo sapiens
  misc_RNA (1)...(19): siRNA sense strand
guuuaugaucccaccacaa

SEQ ID NO: 2368447 - RNA, 19 nt, Homo sapiens
  misc_RNA (1)...(19): siRNA sense strand
agcgguaacccuuggacaa

SEQ ID NO: 2368448 - RNA, 19 nt, Homo sapiens
  misc_RNA (1)...(19): siRNA sense strand
auaaaguggaagccaagaa

SEQ ID NO: 2368449 - RNA, 19 nt, Homo sapiens
  misc_RNA (1)...(19): siRNA sense strand
ggucgaggauaccagguca

SEQ ID NO: 2368450 - RNA, 19 nt, Homo sapiens
  misc_RNA (1)...(19): siRNA sense strand
ggggauggauugagcggca

SEQ ID NO: 2368451 - RNA, 19 nt, Homo sapiens
  misc_RNA (1)...(19): siRNA sense strand
accaggaagaauucaguua

SEQ ID NO: 2368452 - RNA, 19 nt, Homo sapiens
  misc_RNA (1)...(19): siRNA sense strand
caaauaaaguggaagccaa

SEQ ID NO: 2368453 - RNA, 19 nt, Homo sapiens
  misc_RNA (1)...(19): siRNA sense strand
agacaaaagagaagacaaa

SEQ ID NO: 2368454 - RNA, 19 nt, Homo sapiens
  misc_RNA (1)...(19): siRNA sense strand
uagcaaaaccaguggacaa

SEQ ID NO: 2368455 - RNA, 19 nt, Homo sapiens
  misc_RNA (1)...(19): siRNA sense strand
gcaccaugcugcaaggaga

SEQ ID NO: 2368456 - RNA, 19 nt, Homo sapiens
  misc_RNA (1)...(19): siRNA sense strand
cauuaaaaccccaaggaau

SEQ ID NO: 2368457 - RNA, 19 nt, Homo sapiens
  misc_RNA (1)...(19): siRNA sense strand
aggaaaauggacaaagaaa

SEQ ID NO: 2368458 - RNA, 19 nt, Homo sapiens
  misc_RNA (1)...(19): siRNA sense strand
guggagagggugaagaaaa

SEQ ID NO: 2368459 - RNA, 19 nt, Homo sapiens
  misc_RNA (1)...(19): siRNA sense strand
ccugaaaggggcugugaaa

SEQ ID NO: 2368460 - RNA, 19 nt, Homo sapiens
  misc_RNA (1)...(19): siRNA sense strand
ucugaagagaugauugaaa

SEQ ID NO: 2368461 - RNA, 19 nt, Homo sapiens
  misc_RNA (1)...(19): siRNA sense strand
gauaccaggucaaaggaga

SEQ ID NO: 2368462 - RNA, 19 nt, Homo sapiens
  misc_RNA (1)...(19): siRNA sense strand
uggaugaagcaaagacgua

SEQ ID NO: 2368463 - RNA, 19 nt, Homo sapiens
  misc_RNA (1)...(19): siRNA sense strand
agccagaaguagaaguuga

SEQ ID NO: 2368464 - RNA, 19 nt, Homo sapiens
  misc_RNA (1)...(19): siRNA sense strand
gguccagcgcacaggauau

SEQ ID NO: 2368465 - RNA, 19 nt, Homo sapiens
  misc_RNA (1)...(19): siRNA sense strand
uggagagggugaagaaaau

SEQ ID NO: 2368466 - RNA, 19 nt, Homo sapiens
  misc_RNA (1)...(19): siRNA sense strand
auuaaaaccccaaggaauu

SEQ ID NO: 2368467 - RNA, 19 nt, Homo sapiens
  misc_RNA (1)...(19): siRNA sense strand
cagaaguagaaguugauga

SEQ ID NO: 2368468 - RNA, 19 nt, Homo sapiens
  misc_RNA (1)...(19): siRNA sense strand
cuguggagagggugaagaa

SEQ ID NO: 2368469 - RNA, 19 nt, Homo sapiens
  misc_RNA (1)...(19): siRNA sense strand
ucguggaguaugagaguca

SEQ ID NO: 2368470 - RNA, 19 nt, Homo sapiens
  misc_RNA (1)...(19): siRNA sense strand
ccaggucaaaggagacaaa

SEQ ID NO: 2368471 - RNA, 19 nt, Homo sapiens
  misc_RNA (1)...(19): siRNA sense strand
augagaaugaugauggauu

SEQ ID NO: 2368472 - RNA, 19 nt, Homo sapiens
  misc_RNA (1)...(19): siRNA sense strand
gagacaaaagagaagacaa

SEQ ID NO: 2368473 - RNA, 19 nt, Homo sapiens
  misc_RNA (1)...(19): siRNA sense strand
caacaauagaggauaugca

SEQ ID NO: 2368474 - RNA, 19 nt, Homo sapiens
  misc_RNA (1)...(19): siRNA sense strand
guggaagccaagaaugcaa

SEQ ID NO: 2368475 - RNA, 19 nt, Homo sapiens
  misc_RNA (1)...(19): siRNA sense strand
aggauaugcauuuguaaca

SEQ ID NO: 2368476 - RNA, 19 nt, Homo sapiens
  misc_RNA (1)...(19): siRNA sense strand
gcaaggugcuggaugguuc

SEQ ID NO: 2368477 - RNA, 19 nt, Homo sapiens
  misc_RNA (1)...(19): siRNA sense strand
gacaguuauguuagguaua

SEQ ID NO: 2368478 - RNA, 19 nt, Homo sapiens
  misc_RNA (1)...(19): siRNA sense strand
aggccugggucgaggauac

SEQ ID NO: 2368479 - RNA, 19 nt, Homo sapiens
  misc_RNA (1)...(19): siRNA sense strand
agagaugauugaaaaggaa

SEQ ID NO: 2368480 - RNA, 19 nt, Homo sapiens
  misc_RNA (1)...(19): siRNA sense strand
ugaaagcuuuaaauggcaa

SEQ ID NO: 2368481 - RNA, 19 nt, Homo sapiens
  misc_RNA (1)...(19): siRNA sense strand
ggacaagaccaaagacagc

SEQ ID NO: 2368482 - RNA, 19 nt, Homo sapiens
  misc_RNA (1)...(19): siRNA sense strand
guuuaugaucccaccacaa

SEQ ID NO: 2368483 - RNA, 19 nt, Homo sapiens
  misc_RNA (1)...(19): siRNA sense strand
agcgguaacccuuggacaa

SEQ ID NO: 2368484 - RNA, 19 nt, Homo sapiens
  misc_RNA (1)...(19): siRNA sense strand
auaaaguggaagccaagaa

SEQ ID NO: 2368485 - RNA, 19 nt, Homo sapiens
  misc_RNA (1)...(19): siRNA sense strand
ggucgaggauaccagguca

SEQ ID NO: 2368486 - RNA, 19 nt, Homo sapiens
  misc_RNA (1)...(19): siRNA sense strand
ggggauggauugagcggca

SEQ ID NO: 2368487 - RNA, 19 nt, Homo sapiens
  misc_RNA (1)...(19): siRNA sense strand
accaggaagaauucaguua

SEQ ID NO: 2368488 - RNA, 19 nt, Homo sapiens
  misc_RNA (1)...(19): siRNA sense strand
caaauaaaguggaagccaa

SEQ ID NO: 2368489 - RNA, 19 nt, Homo sapiens
  misc_RNA (1)...(19): siRNA sense strand
agacaaaagagaagacaaa

SEQ ID NO: 2368490 - RNA, 19 nt, Homo sapiens
  misc_RNA (1)...(19): siRNA sense strand
uagcaaaaccaguggacaa

SEQ ID NO: 2368491 - RNA, 19 nt, Homo sapiens
  misc_RNA (1)...(19): siRNA sense strand
gcaccaugcugcaaggaga

SEQ ID NO: 2368492 - RNA, 19 nt, Homo sapiens
  misc_RNA (1)...(19): siRNA sense strand
cauuaaaaccccaaggaau

SEQ ID NO: 2368493 - RNA, 19 nt, Homo sapiens
  misc_RNA (1)...(19): siRNA sense strand
aggaaaauggacaaagaaa

SEQ ID NO: 2368494 - RNA, 19 nt, Homo sapiens
  misc_RNA (1)...(19): siRNA sense strand
guggagagggugaagaaaa

SEQ ID NO: 2368495 - RNA, 19 nt, Homo sapiens
  misc_RNA (1)...(19): siRNA sense strand
ccugaaaggggcugugaaa

SEQ ID NO: 2368496 - RNA, 19 nt, Homo sapiens
  misc_RNA (1)...(19): siRNA sense strand
ucugaagagaugauugaaa

SEQ ID NO: 2368497 - RNA, 19 nt, Homo sapiens
  misc_RNA (1)...(19): siRNA sense strand
gauaccaggucaaaggaga

SEQ ID NO: 2368498 - RNA, 19 nt, Homo sapiens
  misc_RNA (1)...(19): siRNA sense strand
uggaugaagcaaagacgua

SEQ ID NO: 2368499 - RNA, 19 nt, Homo sapiens
  misc_RNA (1)...(19): siRNA sense strand
agccagaaguagaaguuga

SEQ ID NO: 2368500 - RNA, 19 nt, Homo sapiens
  misc_RNA (1)...(19): siRNA sense strand
uggagagggugaagaaaau

SEQ ID NO: 2368501 - RNA, 19 nt, Homo sapiens
  misc_RNA (1)...(19): siRNA sense strand
auuaaaaccccaaggaauu

SEQ ID NO: 2368502 - RNA, 19 nt, Homo sapiens
  misc_RNA (1)...(19): siRNA sense strand
cagaaguagaaguugauga

SEQ ID NO: 2368503 - RNA, 19 nt, Homo sapiens
  misc_RNA (1)...(19): siRNA sense strand
cuguggagagggugaagaa

SEQ ID NO: 2368504 - RNA, 19 nt, Homo sapiens
  misc_RNA (1)...(19): siRNA sense strand
ucguggaguaugagaguca

SEQ ID NO: 2368505 - RNA, 19 nt, Homo sapiens
  misc_RNA (1)...(19): siRNA sense strand
ccaggucaaaggagacaaa

SEQ ID NO: 2368506 - RNA, 19 nt, Homo sapiens
  misc_RNA (1)...(19): siRNA sense strand
augagaaugaugauggauu

SEQ ID NO: 2368507 - RNA, 19 nt, Homo sapiens
  misc_RNA (1)...(19): siRNA sense strand
gagacaaaagagaagacaa

SEQ ID NO: 2368508 - RNA, 19 nt, Homo sapiens
  misc_RNA (1)...(19): siRNA sense strand
caacaauagaggauaugca

SEQ ID NO: 2368509 - RNA, 19 nt, Homo sapiens
  misc_RNA (1)...(19): siRNA sense strand
guggaagccaagaaugcaa

SEQ ID NO: 2368510 - RNA, 19 nt, Homo sapiens
  misc_RNA (1)...(19): siRNA sense strand
aggauaugcauuuguaaca

SEQ ID NO: 2368511 - RNA, 19 nt, Homo sapiens
  misc_RNA (1)...(19): siRNA sense strand
gcaaggugcuggaugguuc

SEQ ID NO: 2368512 - RNA, 19 nt, Homo sapiens
  misc_RNA (1)...(19): siRNA sense strand
gacaguuauguuagguaua

SEQ ID NO: 2368513 - RNA, 19 nt, Homo sapiens
  misc_RNA (1)...(19): siRNA sense strand
aggccugggucgaggauac

SEQ ID NO: 2368514 - RNA, 19 nt, Homo sapiens
  misc_RNA (1)...(19): siRNA sense strand
agagaugauugaaaaggaa

SEQ ID NO: 2368515 - RNA, 19 nt, Homo sapiens
  misc_RNA (1)...(19): siRNA sense strand
ugaaagcuuuaaauggcaa

SEQ ID NO: 2368516 - RNA, 19 nt, Homo sapiens
  misc_RNA (1)...(19): siRNA sense strand
ggacaagaccaaagacagc

SEQ ID NO: 2368517 - RNA, 19 nt, Homo sapiens
  misc_RNA (1)...(19): siRNA sense strand
guuuaugaucccaccacaa

SEQ ID NO: 2368518 - RNA, 19 nt, Homo sapiens
  misc_RNA (1)...(19): siRNA sense strand
agcgguaacccuuggacaa

SEQ ID NO: 2368519 - RNA, 19 nt, Homo sapiens
  misc_RNA (1)...(19): siRNA sense strand
auaaaguggaagccaagaa

SEQ ID NO: 2368520 - RNA, 19 nt, Homo sapiens
  misc_RNA (1)...(19): siRNA sense strand
ggucgaggauaccagguca

SEQ ID NO: 2368521 - RNA, 19 nt, Homo sapiens
  misc_RNA (1)...(19): siRNA sense strand
accaggaagaauucaguua

SEQ ID NO: 2368522 - RNA, 19 nt, Homo sapiens
  misc_RNA (1)...(19): siRNA sense strand
ccaaauucugagacggcaa

SEQ ID NO: 2368523 - RNA, 19 nt, Homo sapiens
  misc_RNA (1)...(19): siRNA sense strand
gcacaagggugauccggga

SEQ ID NO: 2368524 - RNA, 19 nt, Homo sapiens
  misc_RNA (1)...(19): siRNA sense strand
aggcauuaccugacagcuu

SEQ ID NO: 2368525 - RNA, 19 nt, Homo sapiens
  misc_RNA (1)...(19): siRNA sense strand
gggugagugagacgggcaa

SEQ ID NO: 2368526 - RNA, 19 nt, Homo sapiens
  misc_RNA (1)...(19): siRNA sense strand
gagcaaacagacaguggca

SEQ ID NO: 2368527 - RNA, 19 nt, Homo sapiens
  misc_RNA (1)...(19): siRNA sense strand
agaagugagcaaacagaca

SEQ ID NO: 2368528 - RNA, 19 nt, Homo sapiens
  misc_RNA (1)...(19): siRNA sense strand
ccaugaagggagaaggaag

SEQ ID NO: 2368529 - RNA, 19 nt, Homo sapiens
  misc_RNA (1)...(19): siRNA sense strand
ccaacuuugaugagguuca

SEQ ID NO: 2368530 - RNA, 19 nt, Homo sapiens
  misc_RNA (1)...(19): siRNA sense strand
ccuugaagaaaguggccca

SEQ ID NO: 2368531 - RNA, 19 nt, Homo sapiens
  misc_RNA (1)...(19): siRNA sense strand
aagaaagaagugagcaaac

SEQ ID NO: 2368532 - RNA, 19 nt, Homo sapiens
  misc_RNA (1)...(19): siRNA sense strand
ucccaaugucaaagaucua

SEQ ID NO: 2368533 - RNA, 19 nt, Homo sapiens
  misc_RNA (1)...(19): siRNA sense strand
ccaaugucaaagaucuaaa

SEQ ID NO: 2368534 - RNA, 19 nt, Homo sapiens
  misc_RNA (1)...(19): siRNA sense strand
ccagccugccugaggagaa

SEQ ID NO: 2368535 - RNA, 19 nt, Homo sapiens
  misc_RNA (1)...(19): siRNA sense strand
ccaaauucugagacggcaa

SEQ ID NO: 2368536 - RNA, 19 nt, Homo sapiens
  misc_RNA (1)...(19): siRNA sense strand
gcacaagggugauccggga

SEQ ID NO: 2368537 - RNA, 19 nt, Homo sapiens
  misc_RNA (1)...(19): siRNA sense strand
aggcauuaccugacagcuu

SEQ ID NO: 2368538 - RNA, 19 nt, Homo sapiens
  misc_RNA (1)...(19): siRNA sense strand
gggugagugagacgggcaa

SEQ ID NO: 2368539 - RNA, 19 nt, Homo sapiens
  misc_RNA (1)...(19): siRNA sense strand
gagcaaacagacaguggca

SEQ ID NO: 2368540 - RNA, 19 nt, Homo sapiens
  misc_RNA (1)...(19): siRNA sense strand
agaagugagcaaacagaca

SEQ ID NO: 2368541 - RNA, 19 nt, Homo sapiens
  misc_RNA (1)...(19): siRNA sense strand
ccaugaagggagaaggaag

SEQ ID NO: 2368542 - RNA, 19 nt, Homo sapiens
  misc_RNA (1)...(19): siRNA sense strand
ccaacuuugaugagguuca

SEQ ID NO: 2368543 - RNA, 19 nt, Homo sapiens
  misc_RNA (1)...(19): siRNA sense strand
ccuugaagaaaguggccca

SEQ ID NO: 2368544 - RNA, 19 nt, Homo sapiens
  misc_RNA (1)...(19): siRNA sense strand
aagaaagaagugagcaaac

SEQ ID NO: 2368545 - RNA, 19 nt, Homo sapiens
  misc_RNA (1)...(19): siRNA sense strand
ucccaaugucaaagaucua

SEQ ID NO: 2368546 - RNA, 19 nt, Homo sapiens
  misc_RNA (1)...(19): siRNA sense strand
ccaaugucaaagaucuaaa

SEQ ID NO: 2368547 - RNA, 19 nt, Homo sapiens
  misc_RNA (1)...(19): siRNA sense strand
ccagccugccugaggagaa

SEQ ID NO: 2368548 - RNA, 19 nt, Homo sapiens
  misc_RNA (1)...(19): siRNA sense strand
ccaaauaugcugugccuga

SEQ ID NO: 2368549 - RNA, 19 nt, Homo sapiens
  misc_RNA (1)...(19): siRNA sense strand
aggaaauggccaaggagga

SEQ ID NO: 2368550 - RNA, 19 nt, Homo sapiens
  misc_RNA (1)...(19): siRNA sense strand
ggugaaagauagugcgggu

SEQ ID NO: 2368551 - RNA, 19 nt, Homo sapiens
  misc_RNA (1)...(19): siRNA sense strand
cgaugagccuggaacggaa

SEQ ID NO: 2368552 - RNA, 19 nt, Homo sapiens
  misc_RNA (1)...(19): siRNA sense strand
ugguggagcugaagaaaau

SEQ ID NO: 2368553 - RNA, 19 nt, Homo sapiens
  misc_RNA (1)...(19): siRNA sense strand
ccacgacaucaaaggagaa

SEQ ID NO: 2368554 - RNA, 19 nt, Homo sapiens
  misc_RNA (1)...(19): siRNA sense strand
ugaaagauagugcggguga

SEQ ID NO: 2368555 - RNA, 19 nt, Homo sapiens
  misc_RNA (1)...(19): siRNA sense strand
acucagaugugguggugca

SEQ ID NO: 2368556 - RNA, 19 nt, Homo sapiens
  misc_RNA (1)...(19): siRNA sense strand
gcgugguggagcugaagaa

SEQ ID NO: 2368557 - RNA, 19 nt, Homo sapiens
  misc_RNA (1)...(19): siRNA sense strand
ccaacacgcugaagaggca

SEQ ID NO: 2368558 - RNA, 19 nt, Homo sapiens
  misc_RNA (1)...(19): siRNA sense strand
augagauccugguggugaa

SEQ ID NO: 2368559 - RNA, 19 nt, Homo sapiens
  misc_RNA (1)...(19): siRNA sense strand
uaccagaagugcaaggaca

SEQ ID NO: 2368560 - RNA, 19 nt, Homo sapiens
  misc_RNA (1)...(19): siRNA sense strand
gugucuaccagaagugcaa

SEQ ID NO: 2368561 - RNA, 19 nt, Homo sapiens
  misc_RNA (1)...(19): siRNA sense strand
gagcaugggcagugaggac

SEQ ID NO: 2368562 - RNA, 19 nt, Homo sapiens
  misc_RNA (1)...(19): siRNA sense strand
ccgcagagauugaggacgc

SEQ ID NO: 2368563 - RNA, 19 nt, Homo sapiens
  misc_RNA (1)...(19): siRNA sense strand
agauagugcgggugacuca

SEQ ID NO: 2368564 - RNA, 19 nt, Homo sapiens
  misc_RNA (1)...(19): siRNA sense strand
gcuauuacuucacuggaga

SEQ ID NO: 2368565 - RNA, 19 nt, Homo sapiens
  misc_RNA (1)...(19): siRNA sense strand
cagaugugguggugcagga

SEQ ID NO: 2368566 - RNA, 19 nt, Homo sapiens
  misc_RNA (1)...(19): siRNA sense strand
accagaagugcaaggacaa

SEQ ID NO: 2368567 - RNA, 19 nt, Homo sapiens
  misc_RNA (1)...(19): siRNA sense strand
gggaacuacuggagaccac

SEQ ID NO: 2368568 - RNA, 19 nt, Homo sapiens
  misc_RNA (1)...(19): siRNA sense strand
gcuggucgguacugggaga

SEQ ID NO: 2368569 - RNA, 19 nt, Homo sapiens
  misc_RNA (1)...(19): siRNA sense strand
cuggaacggaagugaggau

SEQ ID NO: 2368570 - RNA, 19 nt, Homo sapiens
  misc_RNA (1)...(19): siRNA sense strand
aaauaguggaugaggcugu

SEQ ID NO: 2368571 - RNA, 19 nt, Homo sapiens
  misc_RNA (1)...(19): siRNA sense strand
cgugagaacaggaccgaaa

SEQ ID NO: 2368572 - RNA, 19 nt, Homo sapiens
  misc_RNA (1)...(19): siRNA sense strand
cgaaauacagggugaggau

SEQ ID NO: 2368573 - RNA, 19 nt, Homo sapiens
  misc_RNA (1)...(19): siRNA sense strand
ugaagauggccuugugaaa

SEQ ID NO: 2368574 - RNA, 19 nt, Homo sapiens
  misc_RNA (1)...(19): siRNA sense strand
ugaaagugaaggaggaaga

SEQ ID NO: 2368575 - RNA, 19 nt, Homo sapiens
  misc_RNA (1)...(19): siRNA sense strand
uggugaagacugaggaaga

SEQ ID NO: 2368576 - RNA, 19 nt, Homo sapiens
  misc_RNA (1)...(19): siRNA sense strand
guggagaagccucaggaaa

SEQ ID NO: 2368577 - RNA, 19 nt, Homo sapiens
  misc_RNA (1)...(19): siRNA sense strand
gcuggagaaucuagagaca

SEQ ID NO: 2368578 - RNA, 19 nt, Homo sapiens
  misc_RNA (1)...(19): siRNA sense strand
acaccaaggaacagauaau

SEQ ID NO: 2368579 - RNA, 19 nt, Homo sapiens
  misc_RNA (1)...(19): siRNA sense strand
ccgagaacuuugucaucaa

SEQ ID NO: 2368580 - RNA, 19 nt, Homo sapiens
  misc_RNA (1)...(19): siRNA sense strand
cuguagugccuguguuuaa

SEQ ID NO: 2368581 - RNA, 19 nt, Homo sapiens
  misc_RNA (1)...(19): siRNA sense strand
aggaacaauucgugagaac

SEQ ID NO: 2368582 - RNA, 19 nt, Homo sapiens
  misc_RNA (1)...(19): siRNA sense strand
acccaaugguggcagaaua

SEQ ID NO: 2368583 - RNA, 19 nt, Homo sapiens
  misc_RNA (1)...(19): siRNA sense strand
aggcauccuagaagggaaa

SEQ ID NO: 2368584 - RNA, 19 nt, Homo sapiens
  misc_RNA (1)...(19): siRNA sense strand
aggauaagaagcaagaaau

SEQ ID NO: 2368585 - RNA, 19 nt, Homo sapiens
  misc_RNA (1)...(19): siRNA sense strand
gauaagucaaugugugaau

SEQ ID NO: 2368586 - RNA, 19 nt, Homo sapiens
  misc_RNA (1)...(19): siRNA sense strand
ggugagggcaacaggaaca

SEQ ID NO: 2368587 - RNA, 19 nt, Homo sapiens
  misc_RNA (1)...(19): siRNA sense strand
cuaugaagguagaugagga

SEQ ID NO: 2368588 - RNA, 19 nt, Homo sapiens
  misc_RNA (1)...(19): siRNA sense strand
agggaaauguauugggaag

SEQ ID NO: 2368589 - RNA, 19 nt, Homo sapiens
  misc_RNA (1)...(19): siRNA sense strand
uguuuaaagcaaagcaaga

SEQ ID NO: 2368590 - RNA, 19 nt, Homo sapiens
  misc_RNA (1)...(19): siRNA sense strand
aaguggagacacaggacaa

SEQ ID NO: 2368591 - RNA, 19 nt, Homo sapiens
  misc_RNA (1)...(19): siRNA sense strand
aggaacagauaauggaacu

SEQ ID NO: 2368592 - RNA, 19 nt, Homo sapiens
  misc_RNA (1)...(19): siRNA sense strand
uggaauaugcugcaggaga

SEQ ID NO: 2368593 - RNA, 19 nt, Homo sapiens
  misc_RNA (1)...(19): siRNA sense strand
ggaauaugcugcaggagac

SEQ ID NO: 2368594 - RNA, 19 nt, Homo sapiens
  misc_RNA (1)...(19): siRNA sense strand
ggaccaaaagagacauuaa

SEQ ID NO: 2368595 - RNA, 19 nt, Homo sapiens
  misc_RNA (1)...(19): siRNA sense strand
gaggcauccuagaagggaa

SEQ ID NO: 2368596 - RNA, 19 nt, Homo sapiens
  misc_RNA (1)...(19): siRNA sense strand
cagugacagugcuggagaa

SEQ ID NO: 2368597 - RNA, 19 nt, Homo sapiens
  misc_RNA (1)...(19): siRNA sense strand
ggaacaaaguggagaagcc

SEQ ID NO: 2368598 - RNA, 19 nt, Homo sapiens
  misc_RNA (1)...(19): siRNA sense strand
cagcucaucuccaggaaaa

SEQ ID NO: 2368599 - RNA, 19 nt, Homo sapiens
  misc_RNA (1)...(19): siRNA sense strand
gaugcaaucagaagggaca

SEQ ID NO: 2368600 - RNA, 19 nt, Homo sapiens
  misc_RNA (1)...(19): siRNA sense strand
gugaagacugaggaagaaa

SEQ ID NO: 2368601 - RNA, 19 nt, Homo sapiens
  misc_RNA (1)...(19): siRNA sense strand
agcaagaaaugguacucaa

SEQ ID NO: 2368602 - RNA, 19 nt, Homo sapiens
  misc_RNA (1)...(19): siRNA sense strand
ugaaaggacaguugcacau

SEQ ID NO: 2368603 - RNA, 19 nt, Homo sapiens
  misc_RNA (1)...(19): siRNA sense strand
uugugaaagugaaggagga

SEQ ID NO: 2368604 - RNA, 19 nt, Homo sapiens
  misc_RNA (1)...(19): siRNA sense strand
augcuuugauagugaccaa

SEQ ID NO: 2368605 - RNA, 19 nt, Homo sapiens
  misc_RNA (1)...(19): siRNA sense strand
aagucacaguucaggaaau

SEQ ID NO: 2368606 - RNA, 19 nt, Homo sapiens
  misc_RNA (1)...(19): siRNA sense strand
ccuagaagggaaauguauu

SEQ ID NO: 2368607 - RNA, 19 nt, Homo sapiens
  misc_RNA (1)...(19): siRNA sense strand
cuucuuuacaagugucaaa

SEQ ID NO: 2368608 - RNA, 19 nt, Homo sapiens
  misc_RNA (1)...(19): siRNA sense strand
ggaaagcccaacagagagu

SEQ ID NO: 2368609 - RNA, 19 nt, Homo sapiens
  misc_RNA (1)...(19): siRNA sense strand
ccagaaaagaguuggacca

SEQ ID NO: 2368610 - RNA, 19 nt, Homo sapiens
  misc_RNA (1)...(19): siRNA sense strand
ccgaauagaagaaaacaau

SEQ ID NO: 2368611 - RNA, 19 nt, Homo sapiens
  misc_RNA (1)...(19): siRNA sense strand
ggacaggacaugcacccaa

SEQ ID NO: 2368612 - RNA, 19 nt, Homo sapiens
  misc_RNA (1)...(19): siRNA sense strand
uggagaagccucaggaaag

SEQ ID NO: 2368613 - RNA, 19 nt, Homo sapiens
  misc_RNA (1)...(19): siRNA sense strand
auaaugagccugagaucca

SEQ ID NO: 2368614 - RNA, 19 nt, Homo sapiens
  misc_RNA (1)...(19): siRNA sense strand
agaaccagucaaugaggua

SEQ ID NO: 2368615 - RNA, 19 nt, Homo sapiens
  misc_RNA (1)...(19): siRNA sense strand
ggcccaacuccgagaacuu

SEQ ID NO: 2368616 - RNA, 19 nt, Homo sapiens
  misc_RNA (1)...(19): siRNA sense strand
cccaaugguggcagaauau

SEQ ID NO: 2368617 - RNA, 19 nt, Homo sapiens
  misc_RNA (1)...(19): siRNA sense strand
gaaucuagagacaggaagu

SEQ ID NO: 2368618 - RNA, 19 nt, Homo sapiens
  misc_RNA (1)...(19): siRNA sense strand
ccaagaagugagugggccu

SEQ ID NO: 2368619 - RNA, 19 nt, Homo sapiens
  misc_RNA (1)...(19): siRNA sense strand
aauggaacaaaguggagaa

SEQ ID NO: 2368620 - RNA, 19 nt, Homo sapiens
  misc_RNA (1)...(19): siRNA sense strand
ggucccagacauuggugaa

SEQ ID NO: 2368621 - RNA, 19 nt, Homo sapiens
  misc_RNA (1)...(19): siRNA sense strand
caggaaaugaggugugugu

SEQ ID NO: 2368622 - RNA, 19 nt, Homo sapiens
  misc_RNA (1)...(19): siRNA sense strand
cugaaaggacaguugcaca

SEQ ID NO: 2368623 - RNA, 19 nt, Homo sapiens
  misc_RNA (1)...(19): siRNA sense strand
cagaagggacagauuugaa

SEQ ID NO: 2368624 - RNA, 19 nt, Homo sapiens
  misc_RNA (1)...(19): siRNA sense strand
aagcaaagcaagaaacuuc

SEQ ID NO: 2368625 - RNA, 19 nt, Homo sapiens
  misc_RNA (1)...(19): siRNA sense strand
gcacauuucuacuuggaac

SEQ ID NO: 2368626 - RNA, 19 nt, Homo sapiens
  misc_RNA (1)...(19): siRNA sense strand
cagucaggucccagacauu

SEQ ID NO: 2368627 - RNA, 19 nt, Homo sapiens
  misc_RNA (1)...(19): siRNA sense strand
guuuaaagcaaagcaagaa

SEQ ID NO: 2368628 - RNA, 19 nt, Homo sapiens
  misc_RNA (1)...(19): siRNA sense strand
acaaaguggagaagccuca

SEQ ID NO: 2368629 - RNA, 19 nt, Homo sapiens
  misc_RNA (1)...(19): siRNA sense strand
aaagagacauuaaacccaa

SEQ ID NO: 2368630 - RNA, 19 nt, Homo sapiens
  misc_RNA (1)...(19): siRNA sense strand
gggaaauguauugggaagu

SEQ ID NO: 2368631 - RNA, 19 nt, Homo sapiens
  misc_RNA (1)...(19): siRNA sense strand
gggacagauuugaauugau

SEQ ID NO: 2368632 - RNA, 19 nt, Homo sapiens
  misc_RNA (1)...(19): siRNA sense strand
cggugaucaucgagcgcua

SEQ ID NO: 2368633 - RNA, 19 nt, Homo sapiens
  misc_RNA (1)...(19): siRNA sense strand
agaaagacgaggacggcuu

SEQ ID NO: 2368634 - RNA, 19 nt, Homo sapiens
  misc_RNA (1)...(19): siRNA sense strand
acaucuacgagcaggagaa

SEQ ID NO: 2368635 - RNA, 19 nt, Homo sapiens
  misc_RNA (1)...(19): siRNA sense strand
gcaaaaucccggugaucau

SEQ ID NO: 2368636 - RNA, 19 nt, Homo sapiens
  misc_RNA (1)...(19): siRNA sense strand
acaugagcgaguuggucaa

SEQ ID NO: 2368637 - RNA, 19 nt, Homo sapiens
  misc_RNA (1)...(19): siRNA sense strand
cggugaucaucgagcgcua

SEQ ID NO: 2368638 - RNA, 19 nt, Homo sapiens
  misc_RNA (1)...(19): siRNA sense strand
agaaagacgaggacggcuu

SEQ ID NO: 2368639 - RNA, 19 nt, Homo sapiens
  misc_RNA (1)...(19): siRNA sense strand
acaucuacgagcaggagaa

SEQ ID NO: 2368640 - RNA, 19 nt, Homo sapiens
  misc_RNA (1)...(19): siRNA sense strand
gcaaaaucccggugaucau

SEQ ID NO: 2368641 - RNA, 19 nt, Homo sapiens
  misc_RNA (1)...(19): siRNA sense strand
acaugagcgaguuggucaa

SEQ ID NO: 2368642 - RNA, 19 nt, Homo sapiens
  misc_RNA (1)...(19): siRNA sense strand
gcaagauaucagauggaaa

SEQ ID NO: 2368643 - RNA, 19 nt, Homo sapiens
  misc_RNA (1)...(19): siRNA sense strand
ggauagaacauuauggaga

SEQ ID NO: 2368644 - RNA, 19 nt, Homo sapiens
  misc_RNA (1)...(19): siRNA sense strand
ugaugaggcuggugagcaa

SEQ ID NO: 2368645 - RNA, 19 nt, Homo sapiens
  misc_RNA (1)...(19): siRNA sense strand
agucaaaccuuguggaacu

SEQ ID NO: 2368646 - RNA, 19 nt, Homo sapiens
  misc_RNA (1)...(19): siRNA sense strand
cagacaaacaugagggcuu

SEQ ID NO: 2368647 - RNA, 19 nt, Homo sapiens
  misc_RNA (1)...(19): siRNA sense strand
agacaauauuucucggcaa

SEQ ID NO: 2368648 - RNA, 19 nt, Homo sapiens
  misc_RNA (1)...(19): siRNA sense strand
gagaagauggauagaacau

SEQ ID NO: 2368649 - RNA, 19 nt, Homo sapiens
  misc_RNA (1)...(19): siRNA sense strand
cgaaaugggcgucgagcau

SEQ ID NO: 2368650 - RNA, 19 nt, Homo sapiens
  misc_RNA (1)...(19): siRNA sense strand
uggaaauacuucagagaac

SEQ ID NO: 2368651 - RNA, 19 nt, Homo sapiens
  misc_RNA (1)...(19): siRNA sense strand
ggucacaagacgauggaga

SEQ ID NO: 2368652 - RNA, 19 nt, Homo sapiens
  misc_RNA (1)...(19): siRNA sense strand
gaggaacaacauugguaaa

SEQ ID NO: 2368653 - RNA, 19 nt, Homo sapiens
  misc_RNA (1)...(19): siRNA sense strand
uuagagaagacaagggauu

SEQ ID NO: 2368654 - RNA, 19 nt, Homo sapiens
  misc_RNA (1)...(19): siRNA sense strand
caagauaucagauggaaaa

SEQ ID NO: 2368655 - RNA, 19 nt, Homo sapiens
  misc_RNA (1)...(19): siRNA sense strand
gauuacuauguguggaaua

SEQ ID NO: 2368656 - RNA, 19 nt, Homo sapiens
  misc_RNA (1)...(19): siRNA sense strand
gaauagaccuugacaccga

SEQ ID NO: 2368657 - RNA, 19 nt, Homo sapiens
  misc_RNA (1)...(19): siRNA sense strand
gagauuacuauguguggaa

SEQ ID NO: 2368658 - RNA, 19 nt, Homo sapiens
  misc_RNA (1)...(19): siRNA sense strand
auggaaagaugcaaccaaa

SEQ ID NO: 2368659 - RNA, 19 nt, Homo sapiens
  misc_RNA (1)...(19): siRNA sense strand
agcaaagaguagaggaacu

SEQ ID NO: 2368660 - RNA, 19 nt, Homo sapiens
  misc_RNA (1)...(19): siRNA sense strand
gguuacaggacucggaaga

SEQ ID NO: 2368661 - RNA, 19 nt, Homo sapiens
  misc_RNA (1)...(19): siRNA sense strand
aagaaagacaagcggguca

SEQ ID NO: 2368662 - RNA, 19 nt, Homo sapiens
  misc_RNA (1)...(19): siRNA sense strand
uguggaauaucuugaggaa

SEQ ID NO: 2368663 - RNA, 19 nt, Homo sapiens
  misc_RNA (1)...(19): siRNA sense strand
cagugggagaagauggaua

SEQ ID NO: 2368664 - RNA, 19 nt, Homo sapiens
  misc_RNA (1)...(19): siRNA sense strand
ucugugaggaaauggaaua

SEQ ID NO: 2368665 - RNA, 19 nt, Homo sapiens
  misc_RNA (1)...(19): siRNA sense strand
agaaguaaccaucagaaau

SEQ ID NO: 2368666 - RNA, 19 nt, Homo sapiens
  misc_RNA (1)...(19): siRNA sense strand
caacauccucagugggaga

SEQ ID NO: 2368667 - RNA, 19 nt, Homo sapiens
  misc_RNA (1)...(19): siRNA sense strand
ccgagcaggaucacaguaa

SEQ ID NO: 2368668 - RNA, 19 nt, Homo sapiens
  misc_RNA (1)...(19): siRNA sense strand
ggaauaucuugaggaacaa

SEQ ID NO: 2368669 - RNA, 19 nt, Homo sapiens
  misc_RNA (1)...(19): siRNA sense strand
cgucagagaaugaggcuuc

SEQ ID NO: 2368670 - RNA, 19 nt, Homo sapiens
  misc_RNA (1)...(19): siRNA sense strand
cggaagagauggacaggug

SEQ ID NO: 2368671 - RNA, 19 nt, Homo sapiens
  misc_RNA (1)...(19): siRNA sense strand
aagcugaagcagaugguuu

SEQ ID NO: 2368672 - RNA, 19 nt, Homo sapiens
  misc_RNA (1)...(19): siRNA sense strand
ugucaugcuuccaaaguau

SEQ ID NO: 2368673 - RNA, 19 nt, Homo sapiens
  misc_RNA (1)...(19): siRNA sense strand
cauuugucaaggugaauua

SEQ ID NO: 2368674 - RNA, 19 nt, Homo sapiens
  misc_RNA (1)...(19): siRNA sense strand
uagcuauagagaaggagaa

SEQ ID NO: 2368675 - RNA, 19 nt, Homo sapiens
  misc_RNA (1)...(19): siRNA sense strand
ccuuuaccaugcagcaaua

SEQ ID NO: 2368676 - RNA, 19 nt, Homo sapiens
  misc_RNA (1)...(19): siRNA sense strand
uagagaaggagaagcugaa

SEQ ID NO: 2368677 - RNA, 19 nt, Homo sapiens
  misc_RNA (1)...(19): siRNA sense strand
aggaaauggaauacagcga

SEQ ID NO: 2368678 - RNA, 19 nt, Homo sapiens
  misc_RNA (1)...(19): siRNA sense strand
ucgauauucagaaaggaaa

SEQ ID NO: 2368679 - RNA, 19 nt, Homo sapiens
  misc_RNA (1)...(19): siRNA sense strand
gggaaauuauagaagggcu

SEQ ID NO: 2368680 - RNA, 19 nt, Homo sapiens
  misc_RNA (1)...(19): siRNA sense strand
caccaguguugcagacaau

SEQ ID NO: 2368681 - RNA, 19 nt, Homo sapiens
  misc_RNA (1)...(19): siRNA sense strand
cuggauaauggaauguuaa

SEQ ID NO: 2368682 - RNA, 19 nt, Homo sapiens
  misc_RNA (1)...(19): siRNA sense strand
cuauagagaaggagaagcu

SEQ ID NO: 2368683 - RNA, 19 nt, Homo sapiens
  misc_RNA (1)...(19): siRNA sense strand
aaggagaagcugaagcaga

SEQ ID NO: 2368684 - RNA, 19 nt, Homo sapiens
  misc_RNA (1)...(19): siRNA sense strand
cggaaacugaugauccaua

SEQ ID NO: 2368685 - RNA, 19 nt, Homo sapiens
  misc_RNA (1)...(19): siRNA sense strand
ggagaagauggauagaaca

SEQ ID NO: 2368686 - RNA, 19 nt, Homo sapiens
  misc_RNA (1)...(19): siRNA sense strand
caucagagaagcaaagagu

SEQ ID NO: 2368687 - RNA, 19 nt, Homo sapiens
  misc_RNA (1)...(19): siRNA sense strand
gucacaagacgauggagaa

SEQ ID NO: 2368688 - RNA, 19 nt, Homo sapiens
  misc_RNA (1)...(19): siRNA sense strand
gagacuuaugaaugcauua

SEQ ID NO: 2368689 - RNA, 19 nt, Homo sapiens
  misc_RNA (1)...(19): siRNA sense strand
cuaaggagucgguugaaca

SEQ ID NO: 2368690 - RNA, 19 nt, Homo sapiens
  misc_RNA (1)...(19): siRNA sense strand
gaaaguggcaugaaggacu

SEQ ID NO: 2368691 - RNA, 19 nt, Homo sapiens
  misc_RNA (1)...(19): siRNA sense strand
ggaaauuauagaagggcug

SEQ ID NO: 2368692 - RNA, 19 nt, Homo sapiens
  misc_RNA (1)...(19): siRNA sense strand
gcaagauaucagauggaaa

SEQ ID NO: 2368693 - RNA, 19 nt, Homo sapiens
  misc_RNA (1)...(19): siRNA sense strand
ggauagaacauuauggaga

SEQ ID NO: 2368694 - RNA, 19 nt, Homo sapiens
  misc_RNA (1)...(19): siRNA sense strand
ugaugaggcuggugagcaa

SEQ ID NO: 2368695 - RNA, 19 nt, Homo sapiens
  misc_RNA (1)...(19): siRNA sense strand
agucaaaccuuguggaacu

SEQ ID NO: 2368696 - RNA, 19 nt, Homo sapiens
  misc_RNA (1)...(19): siRNA sense strand
cagacaaacaugagggcuu

SEQ ID NO: 2368697 - RNA, 19 nt, Homo sapiens
  misc_RNA (1)...(19): siRNA sense strand
agacaauauuucucggcaa

SEQ ID NO: 2368698 - RNA, 19 nt, Homo sapiens
  misc_RNA (1)...(19): siRNA sense strand
gagaagauggauagaacau

SEQ ID NO: 2368699 - RNA, 19 nt, Homo sapiens
  misc_RNA (1)...(19): siRNA sense strand
cgaaaugggcgucgagcau

SEQ ID NO: 2368700 - RNA, 19 nt, Homo sapiens
  misc_RNA (1)...(19): siRNA sense strand
uggaaauacuucagagaac

SEQ ID NO: 2368701 - RNA, 19 nt, Homo sapiens
  misc_RNA (1)...(19): siRNA sense strand
ggucacaagacgauggaga

SEQ ID NO: 2368702 - RNA, 19 nt, Homo sapiens
  misc_RNA (1)...(19): siRNA sense strand
gaggaacaacauugguaaa

SEQ ID NO: 2368703 - RNA, 19 nt, Homo sapiens
  misc_RNA (1)...(19): siRNA sense strand
uuagagaagacaagggauu

SEQ ID NO: 2368704 - RNA, 19 nt, Homo sapiens
  misc_RNA (1)...(19): siRNA sense strand
caagauaucagauggaaaa

SEQ ID NO: 2368705 - RNA, 19 nt, Homo sapiens
  misc_RNA (1)...(19): siRNA sense strand
gauuacuauguguggaaua

SEQ ID NO: 2368706 - RNA, 19 nt, Homo sapiens
  misc_RNA (1)...(19): siRNA sense strand
gaauagaccuugacaccga

SEQ ID NO: 2368707 - RNA, 19 nt, Homo sapiens
  misc_RNA (1)...(19): siRNA sense strand
gagauuacuauguguggaa

SEQ ID NO: 2368708 - RNA, 19 nt, Homo sapiens
  misc_RNA (1)...(19): siRNA sense strand
auggaaagaugcaaccaaa

SEQ ID NO: 2368709 - RNA, 19 nt, Homo sapiens
  misc_RNA (1)...(19): siRNA sense strand
agcaaagaguagaggaacu

SEQ ID NO: 2368710 - RNA, 19 nt, Homo sapiens
  misc_RNA (1)...(19): siRNA sense strand
gguuacaggacucggaaga

SEQ ID NO: 2368711 - RNA, 19 nt, Homo sapiens
  misc_RNA (1)...(19): siRNA sense strand
aagaaagacaagcggguca

SEQ ID NO: 2368712 - RNA, 19 nt, Homo sapiens
  misc_RNA (1)...(19): siRNA sense strand
uguggaauaucuugaggaa

SEQ ID NO: 2368713 - RNA, 19 nt, Homo sapiens
  misc_RNA (1)...(19): siRNA sense strand
cagugggagaagauggaua

SEQ ID NO: 2368714 - RNA, 19 nt, Homo sapiens
  misc_RNA (1)...(19): siRNA sense strand
ucugugaggaaauggaaua

SEQ ID NO: 2368715 - RNA, 19 nt, Homo sapiens
  misc_RNA (1)...(19): siRNA sense strand
agaaguaaccaucagaaau

SEQ ID NO: 2368716 - RNA, 19 nt, Homo sapiens
  misc_RNA (1)...(19): siRNA sense strand
caacauccucagugggaga

SEQ ID NO: 2368717 - RNA, 19 nt, Homo sapiens
  misc_RNA (1)...(19): siRNA sense strand
ccgagcaggaucacaguaa

SEQ ID NO: 2368718 - RNA, 19 nt, Homo sapiens
  misc_RNA (1)...(19): siRNA sense strand
ggaauaucuugaggaacaa

SEQ ID NO: 2368719 - RNA, 19 nt, Homo sapiens
  misc_RNA (1)...(19): siRNA sense strand
cgucagagaaugaggcuuc

SEQ ID NO: 2368720 - RNA, 19 nt, Homo sapiens
  misc_RNA (1)...(19): siRNA sense strand
cggaagagauggacaggug

SEQ ID NO: 2368721 - RNA, 19 nt, Homo sapiens
  misc_RNA (1)...(19): siRNA sense strand
aagcugaagcagaugguuu

SEQ ID NO: 2368722 - RNA, 19 nt, Homo sapiens
  misc_RNA (1)...(19): siRNA sense strand
ugucaugcuuccaaaguau

SEQ ID NO: 2368723 - RNA, 19 nt, Homo sapiens
  misc_RNA (1)...(19): siRNA sense strand
cauuugucaaggugaauua

SEQ ID NO: 2368724 - RNA, 19 nt, Homo sapiens
  misc_RNA (1)...(19): siRNA sense strand
uagcuauagagaaggagaa

SEQ ID NO: 2368725 - RNA, 19 nt, Homo sapiens
  misc_RNA (1)...(19): siRNA sense strand
ccuuuaccaugcagcaaua

SEQ ID NO: 2368726 - RNA, 19 nt, Homo sapiens
  misc_RNA (1)...(19): siRNA sense strand
uagagaaggagaagcugaa

SEQ ID NO: 2368727 - RNA, 19 nt, Homo sapiens
  misc_RNA (1)...(19): siRNA sense strand
aggaaauggaauacagcga

SEQ ID NO: 2368728 - RNA, 19 nt, Homo sapiens
  misc_RNA (1)...(19): siRNA sense strand
ucgauauucagaaaggaaa

SEQ ID NO: 2368729 - RNA, 19 nt, Homo sapiens
  misc_RNA (1)...(19): siRNA sense strand
gggaaauuauagaagggcu

SEQ ID NO: 2368730 - RNA, 19 nt, Homo sapiens
  misc_RNA (1)...(19): siRNA sense strand
caccaguguugcagacaau

SEQ ID NO: 2368731 - RNA, 19 nt, Homo sapiens
  misc_RNA (1)...(19): siRNA sense strand
cuggauaauggaauguuaa

SEQ ID NO: 2368732 - RNA, 19 nt, Homo sapiens
  misc_RNA (1)...(19): siRNA sense strand
cuauagagaaggagaagcu

SEQ ID NO: 2368733 - RNA, 19 nt, Homo sapiens
  misc_RNA (1)...(19): siRNA sense strand
aaggagaagcugaagcaga

SEQ ID NO: 2368734 - RNA, 19 nt, Homo sapiens
  misc_RNA (1)...(19): siRNA sense strand
cggaaacugaugauccaua

SEQ ID NO: 2368735 - RNA, 19 nt, Homo sapiens
  misc_RNA (1)...(19): siRNA sense strand
ggagaagauggauagaaca

SEQ ID NO: 2368736 - RNA, 19 nt, Homo sapiens
  misc_RNA (1)...(19): siRNA sense strand
caucagagaagcaaagagu

SEQ ID NO: 2368737 - RNA, 19 nt, Homo sapiens
  misc_RNA (1)...(19): siRNA sense strand
gucacaagacgauggagaa

SEQ ID NO: 2368738 - RNA, 19 nt, Homo sapiens
  misc_RNA (1)...(19): siRNA sense strand
gagacuuaugaaugcauua

SEQ ID NO: 2368739 - RNA, 19 nt, Homo sapiens
  misc_RNA (1)...(19): siRNA sense strand
cuaaggagucgguugaaca

SEQ ID NO: 2368740 - RNA, 19 nt, Homo sapiens
  misc_RNA (1)...(19): siRNA sense strand
gaaaguggcaugaaggacu

SEQ ID NO: 2368741 - RNA, 19 nt, Homo sapiens
  misc_RNA (1)...(19): siRNA sense strand
ggaaauuauagaagggcug

SEQ ID NO: 2368742 - RNA, 19 nt, Homo sapiens
  misc_RNA (1)...(19): siRNA sense strand
aggcaaccaucgaacgcaa

SEQ ID NO: 2368743 - RNA, 19 nt, Homo sapiens
  misc_RNA (1)...(19): siRNA sense strand
ugaugaugauaggaggaaa

SEQ ID NO: 2368744 - RNA, 19 nt, Homo sapiens
  misc_RNA (1)...(19): siRNA sense strand
ccggagaagcugucacaca

SEQ ID NO: 2368745 - RNA, 19 nt, Homo sapiens
  misc_RNA (1)...(19): siRNA sense strand
gaugaugauaggaggaaac

SEQ ID NO: 2368746 - RNA, 19 nt, Homo sapiens
  misc_RNA (1)...(19): siRNA sense strand
acaaggaauauuaucgcaa

SEQ ID NO: 2368747 - RNA, 19 nt, Homo sapiens
  misc_RNA (1)...(19): siRNA sense strand
gugagauggagccgcuaua

SEQ ID NO: 2368748 - RNA, 19 nt, Homo sapiens
  misc_RNA (1)...(19): siRNA sense strand
ggaauauuaucgcaagcca

SEQ ID NO: 2368749 - RNA, 19 nt, Homo sapiens
  misc_RNA (1)...(19): siRNA sense strand
gaaacaaaguacuggccag

SEQ ID NO: 2368750 - RNA, 19 nt, Homo sapiens
  misc_RNA (1)...(19): siRNA sense strand
cugcagaggaacaggcaac

SEQ ID NO: 2368751 - RNA, 19 nt, Homo sapiens
  misc_RNA (1)...(19): siRNA sense strand
cuugcagcuuccagggcua

SEQ ID NO: 2368752 - RNA, 19 nt, Homo sapiens
  misc_RNA (1)...(19): siRNA sense strand
gcuaacugaggaggagaaa

SEQ ID NO: 2368753 - RNA, 19 nt, Homo sapiens
  misc_RNA (1)...(19): siRNA sense strand
aucuauacuuugaggaaca

SEQ ID NO: 2368754 - RNA, 19 nt, Homo sapiens
  misc_RNA (1)...(19): siRNA sense strand
gagcuuaaucaguggcuac

SEQ ID NO: 2368755 - RNA, 19 nt, Homo sapiens
  misc_RNA (1)...(19): siRNA sense strand
agaaaggggcugcgacaaa

SEQ ID NO: 2368756 - RNA, 19 nt, Homo sapiens
  misc_RNA (1)...(19): siRNA sense strand
uggaggaaccacugaguca

SEQ ID NO: 2368757 - RNA, 19 nt, Homo sapiens
  misc_RNA (1)...(19): siRNA sense strand
uggaggaaccacugaguca

SEQ ID NO: 2368758 - RNA, 19 nt, Homo sapiens
  misc_RNA (1)...(19): siRNA sense strand
uggaggaaccacugaguca

SEQ ID NO: 2368759 - RNA, 19 nt, Homo sapiens
  misc_RNA (1)...(19): siRNA sense strand
uggaggaaccacugaguca

SEQ ID NO: 2368760 - RNA, 19 nt, Homo sapiens
  misc_RNA (1)...(19): siRNA sense strand
uggaggaaccacugaguca

SEQ ID NO: 2368761 - RNA, 19 nt, Homo sapiens
  misc_RNA (1)...(19): siRNA sense strand
aggagagcgagguggaaga

SEQ ID NO: 2368762 - RNA, 19 nt, Homo sapiens
  misc_RNA (1)...(19): siRNA sense strand
aggagagcgagguggaaga

SEQ ID NO: 2368763 - RNA, 19 nt, Homo sapiens
  misc_RNA (1)...(19): siRNA sense strand
ccgaagaagaagacuacca

SEQ ID NO: 2368764 - RNA, 19 nt, Homo sapiens
  misc_RNA (1)...(19): siRNA sense strand
agcaguucguagagggaga

SEQ ID NO: 2368765 - RNA, 19 nt, Homo sapiens
  misc_RNA (1)...(19): siRNA sense strand
agggagacgcgggaagaaa

SEQ ID NO: 2368766 - RNA, 19 nt, Homo sapiens
  misc_RNA (1)...(19): siRNA sense strand
gaagaaaggggcugcgaca

SEQ ID NO: 2368767 - RNA, 19 nt, Homo sapiens
  misc_RNA (1)...(19): siRNA sense strand
aguccaaagccgagagccu

SEQ ID NO: 2368768 - RNA, 19 nt, Homo sapiens
  misc_RNA (1)...(19): siRNA sense strand
cggaggcaggaaagaggaa

SEQ ID NO: 2368769 - RNA, 19 nt, Homo sapiens
  misc_RNA (1)...(19): siRNA sense strand
aggagagcgagauggaaga

SEQ ID NO: 2368770 - RNA, 19 nt, Homo sapiens
  misc_RNA (1)...(19): siRNA sense strand
aggagagcgagauggaaga

SEQ ID NO: 2368771 - RNA, 19 nt, Homo sapiens
  misc_RNA (1)...(19): siRNA sense strand
uggaggaaccaccgaguca

SEQ ID NO: 2368772 - RNA, 19 nt, Homo sapiens
  misc_RNA (1)...(19): siRNA sense strand
ugaccagggcuguggccua

SEQ ID NO: 2368773 - RNA, 19 nt, Homo sapiens
  misc_RNA (1)...(19): siRNA sense strand
gggcuguggccuagagaac

SEQ ID NO: 2368774 - RNA, 19 nt, Homo sapiens
  misc_RNA (1)...(19): siRNA sense strand
guacaaagguggcagguca

SEQ ID NO: 2368775 - RNA, 19 nt, Homo sapiens
  misc_RNA (1)...(19): siRNA sense strand
guguaacgaaugugggaaa

SEQ ID NO: 2368776 - RNA, 19 nt, Homo sapiens
  misc_RNA (1)...(19): siRNA sense strand
gugugaggaaugugggaaa

SEQ ID NO: 2368777 - RNA, 19 nt, Homo sapiens
  misc_RNA (1)...(19): siRNA sense strand
ugaaagagauacuaggaca

SEQ ID NO: 2368778 - RNA, 19 nt, Homo sapiens
  misc_RNA (1)...(19): siRNA sense strand
gggacaauauggagcucau

SEQ ID NO: 2368779 - RNA, 19 nt, Homo sapiens
  misc_RNA (1)...(19): siRNA sense strand
gcugugaguuucaaggcaa

SEQ ID NO: 2368780 - RNA, 19 nt, Homo sapiens
  misc_RNA (1)...(19): siRNA sense strand
gggaugacaggaaggagaa

SEQ ID NO: 2368781 - RNA, 19 nt, Homo sapiens
  misc_RNA (1)...(19): siRNA sense strand
augcagcgauuguggcaaa

SEQ ID NO: 2368782 - RNA, 19 nt, Homo sapiens
  misc_RNA (1)...(19): siRNA sense strand
aaauauacagcgagaacuu

SEQ ID NO: 2368783 - RNA, 19 nt, Homo sapiens
  misc_RNA (1)...(19): siRNA sense strand
auguaacgagugugggaaa

SEQ ID NO: 2368784 - RNA, 19 nt, Homo sapiens
  misc_RNA (1)...(19): siRNA sense strand
cagaauauucagaagcaga

SEQ ID NO: 2368785 - RNA, 19 nt, Homo sapiens
  misc_RNA (1)...(19): siRNA sense strand
gagaaaucccagagaugca

SEQ ID NO: 2368786 - RNA, 19 nt, Homo sapiens
  misc_RNA (1)...(19): siRNA sense strand
ucauagugaagguggaaga

SEQ ID NO: 2368787 - RNA, 19 nt, Homo sapiens
  misc_RNA (1)...(19): siRNA sense strand
ccguuuaagugcggagaau

SEQ ID NO: 2368788 - RNA, 19 nt, Homo sapiens
  misc_RNA (1)...(19): siRNA sense strand
ggauagaaagcagggaauu

SEQ ID NO: 2368789 - RNA, 19 nt, Homo sapiens
  misc_RNA (1)...(19): siRNA sense strand
uggauagaaagcagggaau

SEQ ID NO: 2368790 - RNA, 19 nt, Homo sapiens
  misc_RNA (1)...(19): siRNA sense strand
cccagaaguuggugaaaau

SEQ ID NO: 2368791 - RNA, 19 nt, Homo sapiens
  misc_RNA (1)...(19): siRNA sense strand
ucaaagaggaugaacuaca

SEQ ID NO: 2368792 - RNA, 19 nt, Homo sapiens
  misc_RNA (1)...(19): siRNA sense strand
acuccacucccgagagaaa

SEQ ID NO: 2368793 - RNA, 19 nt, Homo sapiens
  misc_RNA (1)...(19): siRNA sense strand
gugugauaucuguggaaaa

SEQ ID NO: 2368794 - RNA, 19 nt, Homo sapiens
  misc_RNA (1)...(19): siRNA sense strand
agugaagguggaagaagaa

SEQ ID NO: 2368795 - RNA, 19 nt, Homo sapiens
  misc_RNA (1)...(19): siRNA sense strand
augacaggaaggagaacua

SEQ ID NO: 2368796 - RNA, 19 nt, Homo sapiens
  misc_RNA (1)...(19): siRNA sense strand
aggacagaucccauaaaua

SEQ ID NO: 2368797 - RNA, 19 nt, Homo sapiens
  misc_RNA (1)...(19): siRNA sense strand
agggaugacaggaaggaga

SEQ ID NO: 2368798 - RNA, 19 nt, Homo sapiens
  misc_RNA (1)...(19): siRNA sense strand
aguucaagauuuuggagaa

SEQ ID NO: 2368799 - RNA, 19 nt, Homo sapiens
  misc_RNA (1)...(19): siRNA sense strand
gcgccagaacacaccgaaa

SEQ ID NO: 2368800 - RNA, 19 nt, Homo sapiens
  misc_RNA (1)...(19): siRNA sense strand
aagcacacauggcgagaga

SEQ ID NO: 2368801 - RNA, 19 nt, Homo sapiens
  misc_RNA (1)...(19): siRNA sense strand
guuuaagugcggagaaugu

SEQ ID NO: 2368802 - RNA, 19 nt, Homo sapiens
  misc_RNA (1)...(19): siRNA sense strand
agacaucagcccuaagcaa

SEQ ID NO: 2368803 - RNA, 19 nt, Homo sapiens
  misc_RNA (1)...(19): siRNA sense strand
uuucaaggcaagcuggaua

SEQ ID NO: 2368804 - RNA, 19 nt, Homo sapiens
  misc_RNA (1)...(19): siRNA sense strand
ugauugaagacaagaagau

SEQ ID NO: 2368805 - RNA, 19 nt, Homo sapiens
  misc_RNA (1)...(19): siRNA sense strand
aguuacaagagcagccuua

SEQ ID NO: 2368806 - RNA, 19 nt, Homo sapiens
  misc_RNA (1)...(19): siRNA sense strand
uagaaaauauacagcgaga

SEQ ID NO: 2368807 - RNA, 19 nt, Homo sapiens
  misc_RNA (1)...(19): siRNA sense strand
gcaucugugaggaagcaua

SEQ ID NO: 2368808 - RNA, 19 nt, Homo sapiens
  misc_RNA (1)...(19): siRNA sense strand
caauguaaagaauguggaa

SEQ ID NO: 2368809 - RNA, 19 nt, Homo sapiens
  misc_RNA (1)...(19): siRNA sense strand
acagcgagaacuugaggaa

SEQ ID NO: 2368810 - RNA, 19 nt, Homo sapiens
  misc_RNA (1)...(19): siRNA sense strand
gaaugugggaagagcuaca

SEQ ID NO: 2368811 - RNA, 19 nt, Homo sapiens
  misc_RNA (1)...(19): siRNA sense strand
uggagagagaccacauaaa

SEQ ID NO: 2368812 - RNA, 19 nt, Homo sapiens
  misc_RNA (1)...(19): siRNA sense strand
ggauccagacuuugcagaa

SEQ ID NO: 2368813 - RNA, 19 nt, Homo sapiens
  misc_RNA (1)...(19): siRNA sense strand
cuggauagaaagcagggaa

SEQ ID NO: 2368814 - RNA, 19 nt, Homo sapiens
  misc_RNA (1)...(19): siRNA sense strand
auguaaagaauguggaaug

SEQ ID NO: 2368815 - RNA, 19 nt, Homo sapiens
  misc_RNA (1)...(19): siRNA sense strand
aaauugaagagguggcuga

SEQ ID NO: 2368816 - RNA, 19 nt, Homo sapiens
  misc_RNA (1)...(19): siRNA sense strand
ccaucagugucgugaaugu

SEQ ID NO: 2368817 - RNA, 19 nt, Homo sapiens
  misc_RNA (1)...(19): siRNA sense strand
ucccagagaugcagugaca

SEQ ID NO: 2368818 - RNA, 19 nt, Homo sapiens
  misc_RNA (1)...(19): siRNA sense strand
guauuacuuccauggguua

SEQ ID NO: 2368819 - RNA, 19 nt, Homo sapiens
  misc_RNA (1)...(19): siRNA sense strand
ugaagguggaagaagaaga

SEQ ID NO: 2368820 - RNA, 19 nt, Homo sapiens
  misc_RNA (1)...(19): siRNA sense strand
aggaugaacuacagugaag

SEQ ID NO: 2368821 - RNA, 19 nt, Homo sapiens
  misc_RNA (1)...(19): siRNA sense strand
gcgguggccgugauagaaa

SEQ ID NO: 2368822 - RNA, 19 nt, Homo sapiens
  misc_RNA (1)...(19): siRNA sense strand
gauagaaaauauacagcga

SEQ ID NO: 2368823 - RNA, 19 nt, Homo sapiens
  misc_RNA (1)...(19): siRNA sense strand
aggcgguggccgugauaga

SEQ ID NO: 2368824 - RNA, 19 nt, Homo sapiens
  misc_RNA (1)...(19): siRNA sense strand
ggagaaaccauucaggugu

SEQ ID NO: 2368825 - RNA, 19 nt, Homo sapiens
  misc_RNA (1)...(19): siRNA sense strand
gcuccacaugggucagaaa

SEQ ID NO: 2368826 - RNA, 19 nt, Homo sapiens
  misc_RNA (1)...(19): siRNA sense strand
cuuaaaggcaugguacaaa

SEQ ID NO: 2368827 - RNA, 19 nt, Homo sapiens
  misc_RNA (1)...(19): siRNA sense strand
gacaaaagaaguaagaaca

SEQ ID NO: 2368828 - RNA, 19 nt, Homo sapiens
  misc_RNA (1)...(19): siRNA sense strand
ggucccagaaguuggugaa

SEQ ID NO: 2368829 - RNA, 19 nt, Homo sapiens
  misc_RNA (1)...(19): siRNA sense strand
uugaagacaagaagauuga

SEQ ID NO: 2368830 - RNA, 19 nt, Homo sapiens
  misc_RNA (1)...(19): siRNA sense strand
ggaacaucacccugaaagu

SEQ ID NO: 2368831 - RNA, 19 nt, Homo sapiens
  misc_RNA (1)...(19): siRNA sense strand
uuuauagggaugacaggaa

SEQ ID NO: 2368832 - RNA, 19 nt, Homo sapiens
  misc_RNA (1)...(19): siRNA sense strand
cugcaaugagugugggaag

SEQ ID NO: 2368833 - RNA, 19 nt, Homo sapiens
  misc_RNA (1)...(19): siRNA sense strand
gggaaaagcuacaaccaac

SEQ ID NO: 2368834 - RNA, 19 nt, Homo sapiens
  misc_RNA (1)...(19): siRNA sense strand
gagagagggcacagaugca

SEQ ID NO: 2368835 - RNA, 19 nt, Homo sapiens
  misc_RNA (1)...(19): siRNA sense strand
gugcggagaaugugggaag

SEQ ID NO: 2368836 - RNA, 19 nt, Homo sapiens
  misc_RNA (1)...(19): siRNA sense strand
ugacaaaagaaguaagaac

SEQ ID NO: 2368837 - RNA, 19 nt, Homo sapiens
  misc_RNA (1)...(19): siRNA sense strand
guacaaagguggcagguca

SEQ ID NO: 2368838 - RNA, 19 nt, Homo sapiens
  misc_RNA (1)...(19): siRNA sense strand
guguaacgaaugugggaaa

SEQ ID NO: 2368839 - RNA, 19 nt, Homo sapiens
  misc_RNA (1)...(19): siRNA sense strand
gugugaggaaugugggaaa

SEQ ID NO: 2368840 - RNA, 19 nt, Homo sapiens
  misc_RNA (1)...(19): siRNA sense strand
ugaaagagauacuaggaca

SEQ ID NO: 2368841 - RNA, 19 nt, Homo sapiens
  misc_RNA (1)...(19): siRNA sense strand
gggacaauauggagcucau

SEQ ID NO: 2368842 - RNA, 19 nt, Homo sapiens
  misc_RNA (1)...(19): siRNA sense strand
gcugugaguuucaaggcaa

SEQ ID NO: 2368843 - RNA, 19 nt, Homo sapiens
  misc_RNA (1)...(19): siRNA sense strand
gggaugacaggaaggagaa

SEQ ID NO: 2368844 - RNA, 19 nt, Homo sapiens
  misc_RNA (1)...(19): siRNA sense strand
augcagcgauuguggcaaa

SEQ ID NO: 2368845 - RNA, 19 nt, Homo sapiens
  misc_RNA (1)...(19): siRNA sense strand
aaauauacagcgagaacuu

SEQ ID NO: 2368846 - RNA, 19 nt, Homo sapiens
  misc_RNA (1)...(19): siRNA sense strand
auguaacgagugugggaaa

SEQ ID NO: 2368847 - RNA, 19 nt, Homo sapiens
  misc_RNA (1)...(19): siRNA sense strand
cagaauauucagaagcaga

SEQ ID NO: 2368848 - RNA, 19 nt, Homo sapiens
  misc_RNA (1)...(19): siRNA sense strand
gagaaaucccagagaugca

SEQ ID NO: 2368849 - RNA, 19 nt, Homo sapiens
  misc_RNA (1)...(19): siRNA sense strand
ucauagugaagguggaaga

SEQ ID NO: 2368850 - RNA, 19 nt, Homo sapiens
  misc_RNA (1)...(19): siRNA sense strand
ccguuuaagugcggagaau

SEQ ID NO: 2368851 - RNA, 19 nt, Homo sapiens
  misc_RNA (1)...(19): siRNA sense strand
ggauagaaagcagggaauu

SEQ ID NO: 2368852 - RNA, 19 nt, Homo sapiens
  misc_RNA (1)...(19): siRNA sense strand
uggauagaaagcagggaau

SEQ ID NO: 2368853 - RNA, 19 nt, Homo sapiens
  misc_RNA (1)...(19): siRNA sense strand
cccagaaguuggugaaaau

SEQ ID NO: 2368854 - RNA, 19 nt, Homo sapiens
  misc_RNA (1)...(19): siRNA sense strand
ucaaagaggaugaacuaca

SEQ ID NO: 2368855 - RNA, 19 nt, Homo sapiens
  misc_RNA (1)...(19): siRNA sense strand
acuccacucccgagagaaa

SEQ ID NO: 2368856 - RNA, 19 nt, Homo sapiens
  misc_RNA (1)...(19): siRNA sense strand
gugugauaucuguggaaaa

SEQ ID NO: 2368857 - RNA, 19 nt, Homo sapiens
  misc_RNA (1)...(19): siRNA sense strand
agugaagguggaagaagaa

SEQ ID NO: 2368858 - RNA, 19 nt, Homo sapiens
  misc_RNA (1)...(19): siRNA sense strand
augacaggaaggagaacua

SEQ ID NO: 2368859 - RNA, 19 nt, Homo sapiens
  misc_RNA (1)...(19): siRNA sense strand
aggacagaucccauaaaua

SEQ ID NO: 2368860 - RNA, 19 nt, Homo sapiens
  misc_RNA (1)...(19): siRNA sense strand
agggaugacaggaaggaga

SEQ ID NO: 2368861 - RNA, 19 nt, Homo sapiens
  misc_RNA (1)...(19): siRNA sense strand
aguucaagauuuuggagaa

SEQ ID NO: 2368862 - RNA, 19 nt, Homo sapiens
  misc_RNA (1)...(19): siRNA sense strand
gcgccagaacacaccgaaa

SEQ ID NO: 2368863 - RNA, 19 nt, Homo sapiens
  misc_RNA (1)...(19): siRNA sense strand
aagcacacauggcgagaga

SEQ ID NO: 2368864 - RNA, 19 nt, Homo sapiens
  misc_RNA (1)...(19): siRNA sense strand
guuuaagugcggagaaugu

SEQ ID NO: 2368865 - RNA, 19 nt, Homo sapiens
  misc_RNA (1)...(19): siRNA sense strand
agacaucagcccuaagcaa

SEQ ID NO: 2368866 - RNA, 19 nt, Homo sapiens
  misc_RNA (1)...(19): siRNA sense strand
uuucaaggcaagcuggaua

SEQ ID NO: 2368867 - RNA, 19 nt, Homo sapiens
  misc_RNA (1)...(19): siRNA sense strand
ugauugaagacaagaagau

SEQ ID NO: 2368868 - RNA, 19 nt, Homo sapiens
  misc_RNA (1)...(19): siRNA sense strand
aguuacaagagcagccuua

SEQ ID NO: 2368869 - RNA, 19 nt, Homo sapiens
  misc_RNA (1)...(19): siRNA sense strand
uagaaaauauacagcgaga

SEQ ID NO: 2368870 - RNA, 19 nt, Homo sapiens
  misc_RNA (1)...(19): siRNA sense strand
gcaucugugaggaagcaua

SEQ ID NO: 2368871 - RNA, 19 nt, Homo sapiens
  misc_RNA (1)...(19): siRNA sense strand
caauguaaagaauguggaa

SEQ ID NO: 2368872 - RNA, 19 nt, Homo sapiens
  misc_RNA (1)...(19): siRNA sense strand
acagcgagaacuugaggaa

SEQ ID NO: 2368873 - RNA, 19 nt, Homo sapiens
  misc_RNA (1)...(19): siRNA sense strand
gaaugugggaagagcuaca

SEQ ID NO: 2368874 - RNA, 19 nt, Homo sapiens
  misc_RNA (1)...(19): siRNA sense strand
uggagagagaccacauaaa

SEQ ID NO: 2368875 - RNA, 19 nt, Homo sapiens
  misc_RNA (1)...(19): siRNA sense strand
ggauccagacuuugcagaa

SEQ ID NO: 2368876 - RNA, 19 nt, Homo sapiens
  misc_RNA (1)...(19): siRNA sense strand
cuggauagaaagcagggaa

SEQ ID NO: 2368877 - RNA, 19 nt, Homo sapiens
  misc_RNA (1)...(19): siRNA sense strand
auguaaagaauguggaaug

SEQ ID NO: 2368878 - RNA, 19 nt, Homo sapiens
  misc_RNA (1)...(19): siRNA sense strand
aaauugaagagguggcuga

SEQ ID NO: 2368879 - RNA, 19 nt, Homo sapiens
  misc_RNA (1)...(19): siRNA sense strand
ccaucagugucgugaaugu

SEQ ID NO: 2368880 - RNA, 19 nt, Homo sapiens
  misc_RNA (1)...(19): siRNA sense strand
ucccagagaugcagugaca

SEQ ID NO: 2368881 - RNA, 19 nt, Homo sapiens
  misc_RNA (1)...(19): siRNA sense strand
guauuacuuccauggguua

SEQ ID NO: 2368882 - RNA, 19 nt, Homo sapiens
  misc_RNA (1)...(19): siRNA sense strand
ugaagguggaagaagaaga

SEQ ID NO: 2368883 - RNA, 19 nt, Homo sapiens
  misc_RNA (1)...(19): siRNA sense strand
aggaugaacuacagugaag

SEQ ID NO: 2368884 - RNA, 19 nt, Homo sapiens
  misc_RNA (1)...(19): siRNA sense strand
gcgguggccgugauagaaa

SEQ ID NO: 2368885 - RNA, 19 nt, Homo sapiens
  misc_RNA (1)...(19): siRNA sense strand
gauagaaaauauacagcga

SEQ ID NO: 2368886 - RNA, 19 nt, Homo sapiens
  misc_RNA (1)...(19): siRNA sense strand
aggcgguggccgugauaga

SEQ ID NO: 2368887 - RNA, 19 nt, Homo sapiens
  misc_RNA (1)...(19): siRNA sense strand
ggagaaaccauucaggugu

SEQ ID NO: 2368888 - RNA, 19 nt, Homo sapiens
  misc_RNA (1)...(19): siRNA sense strand
gcuccacaugggucagaaa

SEQ ID NO: 2368889 - RNA, 19 nt, Homo sapiens
  misc_RNA (1)...(19): siRNA sense strand
cuuaaaggcaugguacaaa

SEQ ID NO: 2368890 - RNA, 19 nt, Homo sapiens
  misc_RNA (1)...(19): siRNA sense strand
gacaaaagaaguaagaaca

SEQ ID NO: 2368891 - RNA, 19 nt, Homo sapiens
  misc_RNA (1)...(19): siRNA sense strand
ggucccagaaguuggugaa

SEQ ID NO: 2368892 - RNA, 19 nt, Homo sapiens
  misc_RNA (1)...(19): siRNA sense strand
uugaagacaagaagauuga

SEQ ID NO: 2368893 - RNA, 19 nt, Homo sapiens
  misc_RNA (1)...(19): siRNA sense strand
ggaacaucacccugaaagu

SEQ ID NO: 2368894 - RNA, 19 nt, Homo sapiens
  misc_RNA (1)...(19): siRNA sense strand
uuuauagggaugacaggaa

SEQ ID NO: 2368895 - RNA, 19 nt, Homo sapiens
  misc_RNA (1)...(19): siRNA sense strand
cugcaaugagugugggaag

SEQ ID NO: 2368896 - RNA, 19 nt, Homo sapiens
  misc_RNA (1)...(19): siRNA sense strand
gggaaaagcuacaaccaac

SEQ ID NO: 2368897 - RNA, 19 nt, Homo sapiens
  misc_RNA (1)...(19): siRNA sense strand
gagagagggcacagaugca

SEQ ID NO: 2368898 - RNA, 19 nt, Homo sapiens
  misc_RNA (1)...(19): siRNA sense strand
gugcggagaaugugggaag

SEQ ID NO: 2368899 - RNA, 19 nt, Homo sapiens
  misc_RNA (1)...(19): siRNA sense strand
ugacaaaagaaguaagaac

SEQ ID NO: 2368900 - RNA, 19 nt, Homo sapiens
  misc_RNA (1)...(19): siRNA sense strand
aguaaugaauggagacaaa

SEQ ID NO: 2368901 - RNA, 19 nt, Homo sapiens
  misc_RNA (1)...(19): siRNA sense strand
gggaagaagaugaagguga

SEQ ID NO: 2368902 - RNA, 19 nt, Homo sapiens
  misc_RNA (1)...(19): siRNA sense strand
ggaaaauacugugggaaaa

SEQ ID NO: 2368903 - RNA, 19 nt, Homo sapiens
  misc_RNA (1)...(19): siRNA sense strand
acaagaaucaagagaggaa

SEQ ID NO: 2368904 - RNA, 19 nt, Homo sapiens
  misc_RNA (1)...(19): siRNA sense strand
aggcaaugcagauaagaaa

SEQ ID NO: 2368905 - RNA, 19 nt, Homo sapiens
  misc_RNA (1)...(19): siRNA sense strand
uggaaaauacugugggaaa

SEQ ID NO: 2368906 - RNA, 19 nt, Homo sapiens
  misc_RNA (1)...(19): siRNA sense strand
gcuuaagugcuguggagaa

SEQ ID NO: 2368907 - RNA, 19 nt, Homo sapiens
  misc_RNA (1)...(19): siRNA sense strand
acauaaggccuguggucaa

SEQ ID NO: 2368908 - RNA, 19 nt, Homo sapiens
  misc_RNA (1)...(19): siRNA sense strand
cagaaaaggaggaagaaau

SEQ ID NO: 2368909 - RNA, 19 nt, Homo sapiens
  misc_RNA (1)...(19): siRNA sense strand
uuauagaagacacgagaua

SEQ ID NO: 2368910 - RNA, 19 nt, Homo sapiens
  misc_RNA (1)...(19): siRNA sense strand
gggcuuaagaaauaugaaa

SEQ ID NO: 2368911 - RNA, 19 nt, Homo sapiens
  misc_RNA (1)...(19): siRNA sense strand
ccgcguaauggcugggaaa

SEQ ID NO: 2368912 - RNA, 19 nt, Homo sapiens
  misc_RNA (1)...(19): siRNA sense strand
augcaaacccagaguggaa

SEQ ID NO: 2368913 - RNA, 19 nt, Homo sapiens
  misc_RNA (1)...(19): siRNA sense strand
ccugcugguuguugagaaa

SEQ ID NO: 2368914 - RNA, 19 nt, Homo sapiens
  misc_RNA (1)...(19): siRNA sense strand
uggaaucgguggugaucaa

SEQ ID NO: 2368915 - RNA, 19 nt, Homo sapiens
  misc_RNA (1)...(19): siRNA sense strand
gagaaaugcagguuggaca

SEQ ID NO: 2368916 - RNA, 19 nt, Homo sapiens
  misc_RNA (1)...(19): siRNA sense strand
aguaaacacaggagaaaca

SEQ ID NO: 2368917 - RNA, 19 nt, Homo sapiens
  misc_RNA (1)...(19): siRNA sense strand
acaaugaccaagugggcaa

SEQ ID NO: 2368918 - RNA, 19 nt, Homo sapiens
  misc_RNA (1)...(19): siRNA sense strand
cuucauacugggaggauau

SEQ ID NO: 2368919 - RNA, 19 nt, Homo sapiens
  misc_RNA (1)...(19): siRNA sense strand
cccggaaagccaagaaaua

SEQ ID NO: 2368920 - RNA, 19 nt, Homo sapiens
  misc_RNA (1)...(19): siRNA sense strand
cggcggaugcugucaaaua

SEQ ID NO: 2368921 - RNA, 19 nt, Homo sapiens
  misc_RNA (1)...(19): siRNA sense strand
cggacaguauauucagaaa

SEQ ID NO: 2368922 - RNA, 19 nt, Homo sapiens
  misc_RNA (1)...(19): siRNA sense strand
ucacagacaguaaaggaaa

SEQ ID NO: 2368923 - RNA, 19 nt, Homo sapiens
  misc_RNA (1)...(19): siRNA sense strand
caggagaggaaaugaguga

SEQ ID NO: 2368924 - RNA, 19 nt, Homo sapiens
  misc_RNA (1)...(19): siRNA sense strand
ccuugggauuauugugaaa

SEQ ID NO: 2368925 - RNA, 19 nt, Homo sapiens
  misc_RNA (1)...(19): siRNA sense strand
aaauaaaacucaagaggga

SEQ ID NO: 2368926 - RNA, 19 nt, Homo sapiens
  misc_RNA (1)...(19): siRNA sense strand
gcuuggggcuuaagaaaua

SEQ ID NO: 2368927 - RNA, 19 nt, Homo sapiens
  misc_RNA (1)...(19): siRNA sense strand
gaugagaaaggcugggaau

SEQ ID NO: 2368928 - RNA, 19 nt, Homo sapiens
  misc_RNA (1)...(19): siRNA sense strand
aaucagauauggaggacga

SEQ ID NO: 2368929 - RNA, 19 nt, Homo sapiens
  misc_RNA (1)...(19): siRNA sense strand
ggagaggaaaugagugaca

SEQ ID NO: 2368930 - RNA, 19 nt, Homo sapiens
  misc_RNA (1)...(19): siRNA sense strand
aagcaucacaggagaggaa

SEQ ID NO: 2368931 - RNA, 19 nt, Homo sapiens
  misc_RNA (1)...(19): siRNA sense strand
uggaaauccucaacgagaa

SEQ ID NO: 2368932 - RNA, 19 nt, Homo sapiens
  misc_RNA (1)...(19): siRNA sense strand
uguaaagccaaauguguaa

SEQ ID NO: 2368933 - RNA, 19 nt, Homo sapiens
  misc_RNA (1)...(19): siRNA sense strand
gggauuauugugaaagauu

SEQ ID NO: 2368934 - RNA, 19 nt, Homo sapiens
  misc_RNA (1)...(19): siRNA sense strand
ugaaaguguucuugcccaa

SEQ ID NO: 2368935 - RNA, 19 nt, Homo sapiens
  misc_RNA (1)...(19): siRNA sense strand
ugaagauuguaaagccaaa

SEQ ID NO: 2368936 - RNA, 19 nt, Homo sapiens
  misc_RNA (1)...(19): siRNA sense strand
gaguuugacuugaggggua

SEQ ID NO: 2368937 - RNA, 19 nt, Homo sapiens
  misc_RNA (1)...(19): siRNA sense strand
ugaaguauccacaggagaa

SEQ ID NO: 2368938 - RNA, 19 nt, Homo sapiens
  misc_RNA (1)...(19): siRNA sense strand
ugagaagagccuggagaaa

SEQ ID NO: 2368939 - RNA, 19 nt, Homo sapiens
  misc_RNA (1)...(19): siRNA sense strand
ccaagugggcaaagaugaa

SEQ ID NO: 2368940 - RNA, 19 nt, Homo sapiens
  misc_RNA (1)...(19): siRNA sense strand
ugacagaaaaggaggaaga

SEQ ID NO: 2368941 - RNA, 19 nt, Homo sapiens
  misc_RNA (1)...(19): siRNA sense strand
gcggcauaccagaggagua

SEQ ID NO: 2368942 - RNA, 19 nt, Homo sapiens
  misc_RNA (1)...(19): siRNA sense strand
ugagaaaggcugggaauau

SEQ ID NO: 2368943 - RNA, 19 nt, Homo sapiens
  misc_RNA (1)...(19): siRNA sense strand
uggaugaauuugaagccaa

SEQ ID NO: 2368944 - RNA, 19 nt, Homo sapiens
  misc_RNA (1)...(19): siRNA sense strand
ugugaaagauuuugagaca

SEQ ID NO: 2368945 - RNA, 19 nt, Homo sapiens
  misc_RNA (1)...(19): siRNA sense strand
cagcgaaggcggaaguaca

SEQ ID NO: 2368946 - RNA, 19 nt, Homo sapiens
  misc_RNA (1)...(19): siRNA sense strand
cgagaucaacugagaccaa

SEQ ID NO: 2368947 - RNA, 19 nt, Homo sapiens
  misc_RNA (1)...(19): siRNA sense strand
agauaugggacaaugacaa

SEQ ID NO: 2368948 - RNA, 19 nt, Homo sapiens
  misc_RNA (1)...(19): siRNA sense strand
guggagaugacauuggaaa

SEQ ID NO: 2368949 - RNA, 19 nt, Homo sapiens
  misc_RNA (1)...(19): siRNA sense strand
agaagaugaaggugaugaa

SEQ ID NO: 2368950 - RNA, 19 nt, Homo sapiens
  misc_RNA (1)...(19): siRNA sense strand
cuucugaauugauggauga

SEQ ID NO: 2368951 - RNA, 19 nt, Homo sapiens
  misc_RNA (1)...(19): siRNA sense strand
gugagaaugcaucuggaaa

SEQ ID NO: 2368952 - RNA, 19 nt, Homo sapiens
  misc_RNA (1)...(19): siRNA sense strand
cgcagacgcuggaggagaa

SEQ ID NO: 2368953 - RNA, 19 nt, Homo sapiens
  misc_RNA (1)...(19): siRNA sense strand
cugaauugauggaugagau

SEQ ID NO: 2368954 - RNA, 19 nt, Homo sapiens
  misc_RNA (1)...(19): siRNA sense strand
gugcuguauuugauggcaa

SEQ ID NO: 2368955 - RNA, 19 nt, Homo sapiens
  misc_RNA (1)...(19): siRNA sense strand
gagagaagagacuggccua

SEQ ID NO: 2368956 - RNA, 19 nt, Homo sapiens
  misc_RNA (1)...(19): siRNA sense strand
cuggguugcagcagagaaa

SEQ ID NO: 2368957 - RNA, 19 nt, Homo sapiens
  misc_RNA (1)...(19): siRNA sense strand
uagcagaauuugagggccu

SEQ ID NO: 2368958 - RNA, 19 nt, Homo sapiens
  misc_RNA (1)...(19): siRNA sense strand
gaacaagaaucaagagagg

SEQ ID NO: 2368959 - RNA, 19 nt, Homo sapiens
  misc_RNA (1)...(19): siRNA sense strand
aggaaauauuuggaggcaa

SEQ ID NO: 2368960 - RNA, 19 nt, Homo sapiens
  misc_RNA (1)...(19): siRNA sense strand
cgaaaacgcaagaaagauu

SEQ ID NO: 2368961 - RNA, 19 nt, Homo sapiens
  misc_RNA (1)...(19): siRNA sense strand
ccauggaggaauugcaaga

SEQ ID NO: 2368962 - RNA, 19 nt, Homo sapiens
  misc_RNA (1)...(19): siRNA sense strand
gcaucacaggagaggaaau

SEQ ID NO: 2368963 - RNA, 19 nt, Homo sapiens
  misc_RNA (1)...(19): siRNA sense strand
ugagaaugcaucuggaaaa

SEQ ID NO: 2368964 - RNA, 19 nt, Homo sapiens
  misc_RNA (1)...(19): siRNA sense strand
gggacaucguuaucgaaau

SEQ ID NO: 2368965 - RNA, 19 nt, Homo sapiens
  misc_RNA (1)...(19): siRNA sense strand
aggaagaaaucguggacug

SEQ ID NO: 2368966 - RNA, 19 nt, Homo sapiens
  misc_RNA (1)...(19): siRNA sense strand
guggacugguggaguaaau

SEQ ID NO: 2368967 - RNA, 19 nt, Homo sapiens
  misc_RNA (1)...(19): siRNA sense strand
ugcaaaaucaccagagaaa

SEQ ID NO: 2368968 - RNA, 19 nt, Homo sapiens
  misc_RNA (1)...(19): siRNA sense strand
aguaaugaauggagacaaa

SEQ ID NO: 2368969 - RNA, 19 nt, Homo sapiens
  misc_RNA (1)...(19): siRNA sense strand
gggaagaagaugaagguga

SEQ ID NO: 2368970 - RNA, 19 nt, Homo sapiens
  misc_RNA (1)...(19): siRNA sense strand
ggaaaauacugugggaaaa

SEQ ID NO: 2368971 - RNA, 19 nt, Homo sapiens
  misc_RNA (1)...(19): siRNA sense strand
acaagaaucaagagaggaa

SEQ ID NO: 2368972 - RNA, 19 nt, Homo sapiens
  misc_RNA (1)...(19): siRNA sense strand
aggcaaugcagauaagaaa

SEQ ID NO: 2368973 - RNA, 19 nt, Homo sapiens
  misc_RNA (1)...(19): siRNA sense strand
uggaaaauacugugggaaa

SEQ ID NO: 2368974 - RNA, 19 nt, Homo sapiens
  misc_RNA (1)...(19): siRNA sense strand
gcuuaagugcuguggagaa

SEQ ID NO: 2368975 - RNA, 19 nt, Homo sapiens
  misc_RNA (1)...(19): siRNA sense strand
acauaaggccuguggucaa

SEQ ID NO: 2368976 - RNA, 19 nt, Homo sapiens
  misc_RNA (1)...(19): siRNA sense strand
cagaaaaggaggaagaaau

SEQ ID NO: 2368977 - RNA, 19 nt, Homo sapiens
  misc_RNA (1)...(19): siRNA sense strand
uuauagaagacacgagaua

SEQ ID NO: 2368978 - RNA, 19 nt, Homo sapiens
  misc_RNA (1)...(19): siRNA sense strand
gggcuuaagaaauaugaaa

SEQ ID NO: 2368979 - RNA, 19 nt, Homo sapiens
  misc_RNA (1)...(19): siRNA sense strand
ccgcguaauggcugggaaa

SEQ ID NO: 2368980 - RNA, 19 nt, Homo sapiens
  misc_RNA (1)...(19): siRNA sense strand
augcaaacccagaguggaa

SEQ ID NO: 2368981 - RNA, 19 nt, Homo sapiens
  misc_RNA (1)...(19): siRNA sense strand
ccugcugguuguugagaaa

SEQ ID NO: 2368982 - RNA, 19 nt, Homo sapiens
  misc_RNA (1)...(19): siRNA sense strand
uggaaucgguggugaucaa

SEQ ID NO: 2368983 - RNA, 19 nt, Homo sapiens
  misc_RNA (1)...(19): siRNA sense strand
gagaaaugcagguuggaca

SEQ ID NO: 2368984 - RNA, 19 nt, Homo sapiens
  misc_RNA (1)...(19): siRNA sense strand
aguaaacacaggagaaaca

SEQ ID NO: 2368985 - RNA, 19 nt, Homo sapiens
  misc_RNA (1)...(19): siRNA sense strand
acaaugaccaagugggcaa

SEQ ID NO: 2368986 - RNA, 19 nt, Homo sapiens
  misc_RNA (1)...(19): siRNA sense strand
cuucauacugggaggauau

SEQ ID NO: 2368987 - RNA, 19 nt, Homo sapiens
  misc_RNA (1)...(19): siRNA sense strand
cccggaaagccaagaaaua

SEQ ID NO: 2368988 - RNA, 19 nt, Homo sapiens
  misc_RNA (1)...(19): siRNA sense strand
cggcggaugcugucaaaua

SEQ ID NO: 2368989 - RNA, 19 nt, Homo sapiens
  misc_RNA (1)...(19): siRNA sense strand
cggacaguauauucagaaa

SEQ ID NO: 2368990 - RNA, 19 nt, Homo sapiens
  misc_RNA (1)...(19): siRNA sense strand
ucacagacaguaaaggaaa

SEQ ID NO: 2368991 - RNA, 19 nt, Homo sapiens
  misc_RNA (1)...(19): siRNA sense strand
caggagaggaaaugaguga

SEQ ID NO: 2368992 - RNA, 19 nt, Homo sapiens
  misc_RNA (1)...(19): siRNA sense strand
ccuugggauuauugugaaa

SEQ ID NO: 2368993 - RNA, 19 nt, Homo sapiens
  misc_RNA (1)...(19): siRNA sense strand
aaauaaaacucaagaggga

SEQ ID NO: 2368994 - RNA, 19 nt, Homo sapiens
  misc_RNA (1)...(19): siRNA sense strand
gcuuggggcuuaagaaaua

SEQ ID NO: 2368995 - RNA, 19 nt, Homo sapiens
  misc_RNA (1)...(19): siRNA sense strand
gaugagaaaggcugggaau

SEQ ID NO: 2368996 - RNA, 19 nt, Homo sapiens
  misc_RNA (1)...(19): siRNA sense strand
aaucagauauggaggacga

SEQ ID NO: 2368997 - RNA, 19 nt, Homo sapiens
  misc_RNA (1)...(19): siRNA sense strand
ggagaggaaaugagugaca

SEQ ID NO: 2368998 - RNA, 19 nt, Homo sapiens
  misc_RNA (1)...(19): siRNA sense strand
aagcaucacaggagaggaa

SEQ ID NO: 2368999 - RNA, 19 nt, Homo sapiens
  misc_RNA (1)...(19): siRNA sense strand
uggaaauccucaacgagaa

SEQ ID NO: 2369000 - RNA, 19 nt, Homo sapiens
  misc_RNA (1)...(19): siRNA sense strand
uguaaagccaaauguguaa

SEQ ID NO: 2369001 - RNA, 19 nt, Homo sapiens
  misc_RNA (1)...(19): siRNA sense strand
gggauuauugugaaagauu

SEQ ID NO: 2369002 - RNA, 19 nt, Homo sapiens
  misc_RNA (1)...(19): siRNA sense strand
ugaaaguguucuugcccaa

SEQ ID NO: 2369003 - RNA, 19 nt, Homo sapiens
  misc_RNA (1)...(19): siRNA sense strand
ugaagauuguaaagccaaa

SEQ ID NO: 2369004 - RNA, 19 nt, Homo sapiens
  misc_RNA (1)...(19): siRNA sense strand
gaguuugacuugaggggua

SEQ ID NO: 2369005 - RNA, 19 nt, Homo sapiens
  misc_RNA (1)...(19): siRNA sense strand
ugaaguauccacaggagaa

SEQ ID NO: 2369006 - RNA, 19 nt, Homo sapiens
  misc_RNA (1)...(19): siRNA sense strand
ugagaagagccuggagaaa

SEQ ID NO: 2369007 - RNA, 19 nt, Homo sapiens
  misc_RNA (1)...(19): siRNA sense strand
ccaagugggcaaagaugaa

SEQ ID NO: 2369008 - RNA, 19 nt, Homo sapiens
  misc_RNA (1)...(19): siRNA sense strand
ugacagaaaaggaggaaga

SEQ ID NO: 2369009 - RNA, 19 nt, Homo sapiens
  misc_RNA (1)...(19): siRNA sense strand
gcggcauaccagaggagua

SEQ ID NO: 2369010 - RNA, 19 nt, Homo sapiens
  misc_RNA (1)...(19): siRNA sense strand
ugagaaaggcugggaauau

SEQ ID NO: 2369011 - RNA, 19 nt, Homo sapiens
  misc_RNA (1)...(19): siRNA sense strand
uggaugaauuugaagccaa

SEQ ID NO: 2369012 - RNA, 19 nt, Homo sapiens
  misc_RNA (1)...(19): siRNA sense strand
ugugaaagauuuugagaca

SEQ ID NO: 2369013 - RNA, 19 nt, Homo sapiens
  misc_RNA (1)...(19): siRNA sense strand
cagcgaaggcggaaguaca

SEQ ID NO: 2369014 - RNA, 19 nt, Homo sapiens
  misc_RNA (1)...(19): siRNA sense strand
cgagaucaacugagaccaa

SEQ ID NO: 2369015 - RNA, 19 nt, Homo sapiens
  misc_RNA (1)...(19): siRNA sense strand
agauaugggacaaugacaa

SEQ ID NO: 2369016 - RNA, 19 nt, Homo sapiens
  misc_RNA (1)...(19): siRNA sense strand
guggagaugacauuggaaa

SEQ ID NO: 2369017 - RNA, 19 nt, Homo sapiens
  misc_RNA (1)...(19): siRNA sense strand
agaagaugaaggugaugaa

SEQ ID NO: 2369018 - RNA, 19 nt, Homo sapiens
  misc_RNA (1)...(19): siRNA sense strand
cuucugaauugauggauga

SEQ ID NO: 2369019 - RNA, 19 nt, Homo sapiens
  misc_RNA (1)...(19): siRNA sense strand
gugagaaugcaucuggaaa

SEQ ID NO: 2369020 - RNA, 19 nt, Homo sapiens
  misc_RNA (1)...(19): siRNA sense strand
cgcagacgcuggaggagaa

SEQ ID NO: 2369021 - RNA, 19 nt, Homo sapiens
  misc_RNA (1)...(19): siRNA sense strand
cugaauugauggaugagau

SEQ ID NO: 2369022 - RNA, 19 nt, Homo sapiens
  misc_RNA (1)...(19): siRNA sense strand
gugcuguauuugauggcaa

SEQ ID NO: 2369023 - RNA, 19 nt, Homo sapiens
  misc_RNA (1)...(19): siRNA sense strand
gagagaagagacuggccua

SEQ ID NO: 2369024 - RNA, 19 nt, Homo sapiens
  misc_RNA (1)...(19): siRNA sense strand
cuggguugcagcagagaaa

SEQ ID NO: 2369025 - RNA, 19 nt, Homo sapiens
  misc_RNA (1)...(19): siRNA sense strand
uagcagaauuugagggccu

SEQ ID NO: 2369026 - RNA, 19 nt, Homo sapiens
  misc_RNA (1)...(19): siRNA sense strand
gaacaagaaucaagagagg

SEQ ID NO: 2369027 - RNA, 19 nt, Homo sapiens
  misc_RNA (1)...(19): siRNA sense strand
aggaaauauuuggaggcaa

SEQ ID NO: 2369028 - RNA, 19 nt, Homo sapiens
  misc_RNA (1)...(19): siRNA sense strand
cgaaaacgcaagaaagauu

SEQ ID NO: 2369029 - RNA, 19 nt, Homo sapiens
  misc_RNA (1)...(19): siRNA sense strand
ccauggaggaauugcaaga

SEQ ID NO: 2369030 - RNA, 19 nt, Homo sapiens
  misc_RNA (1)...(19): siRNA sense strand
gcaucacaggagaggaaau

SEQ ID NO: 2369031 - RNA, 19 nt, Homo sapiens
  misc_RNA (1)...(19): siRNA sense strand
ugagaaugcaucuggaaaa

SEQ ID NO: 2369032 - RNA, 19 nt, Homo sapiens
  misc_RNA (1)...(19): siRNA sense strand
gggacaucguuaucgaaau

SEQ ID NO: 2369033 - RNA, 19 nt, Homo sapiens
  misc_RNA (1)...(19): siRNA sense strand
aggaagaaaucguggacug

SEQ ID NO: 2369034 - RNA, 19 nt, Homo sapiens
  misc_RNA (1)...(19): siRNA sense strand
guggacugguggaguaaau

SEQ ID NO: 2369035 - RNA, 19 nt, Homo sapiens
  misc_RNA (1)...(19): siRNA sense strand
ugcaaaaucaccagagaaa

SEQ ID NO: 2369036 - RNA, 19 nt, Homo sapiens
  misc_RNA (1)...(19): siRNA sense strand
cagcuaucaaagagagaaa

SEQ ID NO: 2369037 - RNA, 19 nt, Homo sapiens
  misc_RNA (1)...(19): siRNA sense strand
agaucaucaauuugggaaa

SEQ ID NO: 2369038 - RNA, 19 nt, Homo sapiens
  misc_RNA (1)...(19): siRNA sense strand
gagcaugaccagaggcgca

SEQ ID NO: 2369039 - RNA, 19 nt, Homo sapiens
  misc_RNA (1)...(19): siRNA sense strand
cgaaagacuuccuggccuc

SEQ ID NO: 2369040 - RNA, 19 nt, Homo sapiens
  misc_RNA (1)...(19): siRNA sense strand
uggcauuacagaucaucaa

SEQ ID NO: 2369041 - RNA, 19 nt, Homo sapiens
  misc_RNA (1)...(19): siRNA sense strand
gcacugaguacauggccaa

SEQ ID NO: 2369042 - RNA, 19 nt, Homo sapiens
  misc_RNA (1)...(19): siRNA sense strand
ucagcgaccuggaggccaa

SEQ ID NO: 2369043 - RNA, 19 nt, Homo sapiens
  misc_RNA (1)...(19): siRNA sense strand
ccauagaggaggcgcagca

SEQ ID NO: 2369044 - RNA, 19 nt, Homo sapiens
  misc_RNA (1)...(19): siRNA sense strand
ugguggagcgggaggacuu

SEQ ID NO: 2369045 - RNA, 19 nt, Homo sapiens
  misc_RNA (1)...(19): siRNA sense strand
ggccaaggucauugagaag

SEQ ID NO: 2369046 - RNA, 19 nt, Homo sapiens
  misc_RNA (1)...(19): siRNA sense strand
gcacugaguacauggccaa

SEQ ID NO: 2369047 - RNA, 19 nt, Homo sapiens
  misc_RNA (1)...(19): siRNA sense strand
ucagcgaccuggaggccaa

SEQ ID NO: 2369048 - RNA, 19 nt, Homo sapiens
  misc_RNA (1)...(19): siRNA sense strand
ccauagaggaggcgcagca

SEQ ID NO: 2369049 - RNA, 19 nt, Homo sapiens
  misc_RNA (1)...(19): siRNA sense strand
ugguggagcgggaggacuu

SEQ ID NO: 2369050 - RNA, 19 nt, Homo sapiens
  misc_RNA (1)...(19): siRNA sense strand
ggccaaggucauugagaag

SEQ ID NO: 2369051 - RNA, 19 nt, Homo sapiens
  misc_RNA (1)...(19): siRNA sense strand
gcacugaguacauggccaa

SEQ ID NO: 2369052 - RNA, 19 nt, Homo sapiens
  misc_RNA (1)...(19): siRNA sense strand
ucagcgaccuggaggccaa

SEQ ID NO: 2369053 - RNA, 19 nt, Homo sapiens
  misc_RNA (1)...(19): siRNA sense strand
ccauagaggaggcgcagca

SEQ ID NO: 2369054 - RNA, 19 nt, Homo sapiens
  misc_RNA (1)...(19): siRNA sense strand
ugguggagcgggaggacuu

SEQ ID NO: 2369055 - RNA, 19 nt, Homo sapiens
  misc_RNA (1)...(19): siRNA sense strand
ggccaaggucauugagaag

SEQ ID NO: 2369056 - RNA, 19 nt, Homo sapiens
  misc_RNA (1)...(19): siRNA sense strand
ugucugggccaaaggaaua

SEQ ID NO: 2369057 - RNA, 19 nt, Homo sapiens
  misc_RNA (1)...(19): siRNA sense strand
gggccaaaggaauaaggaa

SEQ ID NO: 2369058 - RNA, 19 nt, Homo sapiens
  misc_RNA (1)...(19): siRNA sense strand
gcaaagaaggguggcgaga

SEQ ID NO: 2369059 - RNA, 19 nt, Homo sapiens
  misc_RNA (1)...(19): siRNA sense strand
aggaauaaggaaugugcca

SEQ ID NO: 2369060 - RNA, 19 nt, Homo sapiens
  misc_RNA (1)...(19): siRNA sense strand
cucaaagagauucggaaau

SEQ ID NO: 2369061 - RNA, 19 nt, Homo sapiens
  misc_RNA (1)...(19): siRNA sense strand
agugguaacccgagaauac

SEQ ID NO: 2369062 - RNA, 19 nt, Homo sapiens
  misc_RNA (1)...(19): siRNA sense strand
gcucauaccuagcgcccau

SEQ ID NO: 2369063 - RNA, 19 nt, Homo sapiens
  misc_RNA (1)...(19): siRNA sense strand
cugccgacugcuuggauua

SEQ ID NO: 2369064 - RNA, 19 nt, Homo sapiens
  misc_RNA (1)...(19): siRNA sense strand
cuccgaaagcaguggccaa

SEQ ID NO: 2369065 - RNA, 19 nt, Homo sapiens
  misc_RNA (1)...(19): siRNA sense strand
cuauaaggaccaagccuca

SEQ ID NO: 2369066 - RNA, 19 nt, Homo sapiens
  misc_RNA (1)...(19): siRNA sense strand
agguggcgcucaagaucaa

SEQ ID NO: 2369067 - RNA, 19 nt, Homo sapiens
  misc_RNA (1)...(19): siRNA sense strand
gcagcuacggccaaggcua

SEQ ID NO: 2369068 - RNA, 19 nt, Homo sapiens
  misc_RNA (1)...(19): siRNA sense strand
ccgacugcuuggauuacaa

SEQ ID NO: 2369069 - RNA, 19 nt, Homo sapiens
  misc_RNA (1)...(19): siRNA sense strand
gccaaggagaagaggcuga

SEQ ID NO: 2369070 - RNA, 19 nt, Homo sapiens
  misc_RNA (1)...(19): siRNA sense strand
gggccaaggagaagaggcu

SEQ ID NO: 2369071 - RNA, 19 nt, Homo sapiens
  misc_RNA (1)...(19): siRNA sense strand
gcccagagcaguaccgaga

SEQ ID NO: 2369072 - RNA, 19 nt, Homo sapiens
  misc_RNA (1)...(19): siRNA sense strand
gagaagaggcugaagaagg

SEQ ID NO: 2369073 - RNA, 19 nt, Homo sapiens
  misc_RNA (1)...(19): siRNA sense strand
gccaaggagaagaggcuga

SEQ ID NO: 2369074 - RNA, 19 nt, Homo sapiens
  misc_RNA (1)...(19): siRNA sense strand
gggccaaggagaagaggcu

SEQ ID NO: 2369075 - RNA, 19 nt, Homo sapiens
  misc_RNA (1)...(19): siRNA sense strand
gcccagagcaguaccgaga

SEQ ID NO: 2369076 - RNA, 19 nt, Homo sapiens
  misc_RNA (1)...(19): siRNA sense strand
gagaagaggcugaagaagg

SEQ ID NO: 2369077 - RNA, 19 nt, Homo sapiens
  misc_RNA (1)...(19): siRNA sense strand
ggacaagugaagagaaaau

SEQ ID NO: 2369078 - RNA, 19 nt, Homo sapiens
  misc_RNA (1)...(19): siRNA sense strand
caaaugaacucaauggaca

SEQ ID NO: 2369079 - RNA, 19 nt, Homo sapiens
  misc_RNA (1)...(19): siRNA sense strand
cugaagaaagaaagacauu

SEQ ID NO: 2369080 - RNA, 19 nt, Homo sapiens
  misc_RNA (1)...(19): siRNA sense strand
caaucagacuuuauggaga

SEQ ID NO: 2369081 - RNA, 19 nt, Homo sapiens
  misc_RNA (1)...(19): siRNA sense strand
auggagaacagaagggaga

SEQ ID NO: 2369082 - RNA, 19 nt, Homo sapiens
  misc_RNA (1)...(19): siRNA sense strand
gugacaucauccagggaga

SEQ ID NO: 2369083 - RNA, 19 nt, Homo sapiens
  misc_RNA (1)...(19): siRNA sense strand
cugaaaauccaaaacgaua

SEQ ID NO: 2369084 - RNA, 19 nt, Homo sapiens
  misc_RNA (1)...(19): siRNA sense strand
gcacauggugucugggcuu

SEQ ID NO: 2369085 - RNA, 19 nt, Homo sapiens
  misc_RNA (1)...(19): siRNA sense strand
aagagauggauaagaaaga

SEQ ID NO: 2369086 - RNA, 19 nt, Homo sapiens
  misc_RNA (1)...(19): siRNA sense strand
ugaagagauggauaagaaa

SEQ ID NO: 2369087 - RNA, 19 nt, Homo sapiens
  misc_RNA (1)...(19): siRNA sense strand
cagaagggagacaagaaau

SEQ ID NO: 2369088 - RNA, 19 nt, Homo sapiens
  misc_RNA (1)...(19): siRNA sense strand
ggaugcugcuggagggugu

SEQ ID NO: 2369089 - RNA, 19 nt, Homo sapiens
  misc_RNA (1)...(19): siRNA sense strand
ugguuuagagagaucguaa

SEQ ID NO: 2369090 - RNA, 19 nt, Homo sapiens
  misc_RNA (1)...(19): siRNA sense strand
guuacaaugucgaaggaag

SEQ ID NO: 2369091 - RNA, 19 nt, Homo sapiens
  misc_RNA (1)...(19): siRNA sense strand
acuugaacguccaaaugaa

SEQ ID NO: 2369092 - RNA, 19 nt, Homo sapiens
  misc_RNA (1)...(19): siRNA sense strand
uuacaaugucgaaggaagu

SEQ ID NO: 2369093 - RNA, 19 nt, Homo sapiens
  misc_RNA (1)...(19): siRNA sense strand
acucaagcgauuacagaca

SEQ ID NO: 2369094 - RNA, 19 nt, Homo sapiens
  misc_RNA (1)...(19): siRNA sense strand
uggacaaauuugagucacu

SEQ ID NO: 2369095 - RNA, 19 nt, Homo sapiens
  misc_RNA (1)...(19): siRNA sense strand
ggagaacagaagggagaca

SEQ ID NO: 2369096 - RNA, 19 nt, Homo sapiens
  misc_RNA (1)...(19): siRNA sense strand
acacaaggucccagugcca

SEQ ID NO: 2369097 - RNA, 19 nt, Homo sapiens
  misc_RNA (1)...(19): siRNA sense strand
caguaauuccaaugagaac

SEQ ID NO: 2369098 - RNA, 19 nt, Homo sapiens
  misc_RNA (1)...(19): siRNA sense strand
guguaaagccauccagaac

SEQ ID NO: 2369099 - RNA, 19 nt, Homo sapiens
  misc_RNA (1)...(19): siRNA sense strand
cugcccaggucauggccua

SEQ ID NO: 2369100 - RNA, 19 nt, Homo sapiens
  misc_RNA (1)...(19): siRNA sense strand
aaaugaacucaauggacau

SEQ ID NO: 2369101 - RNA, 19 nt, Homo sapiens
  misc_RNA (1)...(19): siRNA sense strand
gguccagaaacaauaucaa

SEQ ID NO: 2369102 - RNA, 19 nt, Homo sapiens
  misc_RNA (1)...(19): siRNA sense strand
gauggauaagaaagaucaa

SEQ ID NO: 2369103 - RNA, 19 nt, Homo sapiens
  misc_RNA (1)...(19): siRNA sense strand
ggggauugaucgaacugaa

SEQ ID NO: 2369104 - RNA, 19 nt, Homo sapiens
  misc_RNA (1)...(19): siRNA sense strand
aaucaaaaucugagucuga

SEQ ID NO: 2369105 - RNA, 19 nt, Homo sapiens
  misc_RNA (1)...(19): siRNA sense strand
guuacaaugucgaaggaag

SEQ ID NO: 2369106 - RNA, 19 nt, Homo sapiens
  misc_RNA (1)...(19): siRNA sense strand
uuacaaugucgaaggaagu

SEQ ID NO: 2369107 - RNA, 19 nt, Homo sapiens
  misc_RNA (1)...(19): siRNA sense strand
caguaauuccaaugagaac

SEQ ID NO: 2369108 - RNA, 19 nt, Homo sapiens
  misc_RNA (1)...(19): siRNA sense strand
gaacauggauagaagcaga

SEQ ID NO: 2369109 - RNA, 19 nt, Homo sapiens
  misc_RNA (1)...(19): siRNA sense strand
cagcaagagcaguagggaa

SEQ ID NO: 2369110 - RNA, 19 nt, Homo sapiens
  misc_RNA (1)...(19): siRNA sense strand
aggaagaaugagaaggaau

SEQ ID NO: 2369111 - RNA, 19 nt, Homo sapiens
  misc_RNA (1)...(19): siRNA sense strand
cuguggaagaggagguuua

SEQ ID NO: 2369112 - RNA, 19 nt, Homo sapiens
  misc_RNA (1)...(19): siRNA sense strand
uuuggaaauucgagacaua

SEQ ID NO: 2369113 - RNA, 19 nt, Homo sapiens
  misc_RNA (1)...(19): siRNA sense strand
ggaagaacauggagggccu

SEQ ID NO: 2369114 - RNA, 19 nt, Homo sapiens
  misc_RNA (1)...(19): siRNA sense strand
gggucagagcagaggccua

SEQ ID NO: 2369115 - RNA, 19 nt, Homo sapiens
  misc_RNA (1)...(19): siRNA sense strand
ccuaaauccucucagacaa

SEQ ID NO: 2369116 - RNA, 19 nt, Homo sapiens
  misc_RNA (1)...(19): siRNA sense strand
cagcugaaggugaggguca

SEQ ID NO: 2369117 - RNA, 19 nt, Homo sapiens
  misc_RNA (1)...(19): siRNA sense strand
ccguggaaaucuagaaagu

SEQ ID NO: 2369118 - RNA, 19 nt, Homo sapiens
  misc_RNA (1)...(19): siRNA sense strand
cugauagcgaugauagaaa

SEQ ID NO: 2369119 - RNA, 19 nt, Homo sapiens
  misc_RNA (1)...(19): siRNA sense strand
caagcuugcaccaggguaa

SEQ ID NO: 2369120 - RNA, 19 nt, Homo sapiens
  misc_RNA (1)...(19): siRNA sense strand
acccagagcacguuggaua

SEQ ID NO: 2369121 - RNA, 19 nt, Homo sapiens
  misc_RNA (1)...(19): siRNA sense strand
uggaggaggaacaggagaa

SEQ ID NO: 2369122 - RNA, 19 nt, Homo sapiens
  misc_RNA (1)...(19): siRNA sense strand
ccuacagaggauacagaaa

SEQ ID NO: 2369123 - RNA, 19 nt, Homo sapiens
  misc_RNA (1)...(19): siRNA sense strand
cagagaucauagaaagaga

SEQ ID NO: 2369124 - RNA, 19 nt, Homo sapiens
  misc_RNA (1)...(19): siRNA sense strand
uaaaagauggacagagaua

SEQ ID NO: 2369125 - RNA, 19 nt, Homo sapiens
  misc_RNA (1)...(19): siRNA sense strand
gagaucauagaaagagaaa

SEQ ID NO: 2369126 - RNA, 19 nt, Homo sapiens
  misc_RNA (1)...(19): siRNA sense strand
ggcuaaucuccguggaaau

SEQ ID NO: 2369127 - RNA, 19 nt, Homo sapiens
  misc_RNA (1)...(19): siRNA sense strand
aguaugagacucuggagaa

SEQ ID NO: 2369128 - RNA, 19 nt, Homo sapiens
  misc_RNA (1)...(19): siRNA sense strand
ggaguggagaauuuggaaa

SEQ ID NO: 2369129 - RNA, 19 nt, Homo sapiens
  misc_RNA (1)...(19): siRNA sense strand
ccaggaagaaugagaagga

SEQ ID NO: 2369130 - RNA, 19 nt, Homo sapiens
  misc_RNA (1)...(19): siRNA sense strand
aguuaugagggaucagaaa

SEQ ID NO: 2369131 - RNA, 19 nt, Homo sapiens
  misc_RNA (1)...(19): siRNA sense strand
uagcgaugauagaaaggaa

SEQ ID NO: 2369132 - RNA, 19 nt, Homo sapiens
  misc_RNA (1)...(19): siRNA sense strand
aggaaugggacuugcuaau

SEQ ID NO: 2369133 - RNA, 19 nt, Homo sapiens
  misc_RNA (1)...(19): siRNA sense strand
aagcaguaauucagaagau

SEQ ID NO: 2369134 - RNA, 19 nt, Homo sapiens
  misc_RNA (1)...(19): siRNA sense strand
uuucauuggaggaggaaca

SEQ ID NO: 2369135 - RNA, 19 nt, Homo sapiens
  misc_RNA (1)...(19): siRNA sense strand
cuaaauccucucagacaaa

SEQ ID NO: 2369136 - RNA, 19 nt, Homo sapiens
  misc_RNA (1)...(19): siRNA sense strand
acuuaggaaaagaggaaua

SEQ ID NO: 2369137 - RNA, 19 nt, Homo sapiens
  misc_RNA (1)...(19): siRNA sense strand
gcacgagaugugacggcua

SEQ ID NO: 2369138 - RNA, 19 nt, Homo sapiens
  misc_RNA (1)...(19): siRNA sense strand
guaugagacucuggagaau

SEQ ID NO: 2369139 - RNA, 19 nt, Homo sapiens
  misc_RNA (1)...(19): siRNA sense strand
agagauaugaggagcuaga

SEQ ID NO: 2369140 - RNA, 19 nt, Homo sapiens
  misc_RNA (1)...(19): siRNA sense strand
cagccagaaucuucagaau

SEQ ID NO: 2369141 - RNA, 19 nt, Homo sapiens
  misc_RNA (1)...(19): siRNA sense strand
cagaauuggagguaacuuu

SEQ ID NO: 2369142 - RNA, 19 nt, Homo sapiens
  misc_RNA (1)...(19): siRNA sense strand
cuugaaaggucuagggcag

SEQ ID NO: 2369143 - RNA, 19 nt, Homo sapiens
  misc_RNA (1)...(19): siRNA sense strand
agcaaggaguccagaugaa

SEQ ID NO: 2369144 - RNA, 19 nt, Homo sapiens
  misc_RNA (1)...(19): siRNA sense strand
gagaaggaacacuuggauu

SEQ ID NO: 2369145 - RNA, 19 nt, Homo sapiens
  misc_RNA (1)...(19): siRNA sense strand
gggauagaaggaagaacau

SEQ ID NO: 2369146 - RNA, 19 nt, Homo sapiens
  misc_RNA (1)...(19): siRNA sense strand
gaggcugauuucugaggaa

SEQ ID NO: 2369147 - RNA, 19 nt, Homo sapiens
  misc_RNA (1)...(19): siRNA sense strand
cguuggauaugauggugaa

SEQ ID NO: 2369148 - RNA, 19 nt, Homo sapiens
  misc_RNA (1)...(19): siRNA sense strand
gaugugacggcuagggauu

SEQ ID NO: 2369149 - RNA, 19 nt, Homo sapiens
  misc_RNA (1)...(19): siRNA sense strand
cuacagaggauacagaaaa

SEQ ID NO: 2369150 - RNA, 19 nt, Homo sapiens
  misc_RNA (1)...(19): siRNA sense strand
gcgaugauagaaaggaaaa

SEQ ID NO: 2369151 - RNA, 19 nt, Homo sapiens
  misc_RNA (1)...(19): siRNA sense strand
ggugagaaggaaugggacu

SEQ ID NO: 2369152 - RNA, 19 nt, Homo sapiens
  misc_RNA (1)...(19): siRNA sense strand
ggggauagaaggaagaaca

SEQ ID NO: 2369153 - RNA, 19 nt, Homo sapiens
  misc_RNA (1)...(19): siRNA sense strand
ggaggaggaacaggagaaa

SEQ ID NO: 2369154 - RNA, 19 nt, Homo sapiens
  misc_RNA (1)...(19): siRNA sense strand
gggagagugaagaggcuca

SEQ ID NO: 2369155 - RNA, 19 nt, Homo sapiens
  misc_RNA (1)...(19): siRNA sense strand
ccagcaacuauuacauaua

SEQ ID NO: 2369156 - RNA, 19 nt, Homo sapiens
  misc_RNA (1)...(19): siRNA sense strand
uugaaaacacucagagaau

SEQ ID NO: 2369157 - RNA, 19 nt, Homo sapiens
  misc_RNA (1)...(19): siRNA sense strand
agucggaagcuguuaauuu

SEQ ID NO: 2369158 - RNA, 19 nt, Homo sapiens
  misc_RNA (1)...(19): siRNA sense strand
aagauagcaaggaggauuu

SEQ ID NO: 2369159 - RNA, 19 nt, Homo sapiens
  misc_RNA (1)...(19): siRNA sense strand
gugugucuguggaggauau

SEQ ID NO: 2369160 - RNA, 19 nt, Homo sapiens
  misc_RNA (1)...(19): siRNA sense strand
gaacacuuggauuuggaaa

SEQ ID NO: 2369161 - RNA, 19 nt, Homo sapiens
  misc_RNA (1)...(19): siRNA sense strand
cuucacaagcuaaggcaca

SEQ ID NO: 2369162 - RNA, 19 nt, Homo sapiens
  misc_RNA (1)...(19): siRNA sense strand
aguuauagggaaacagcuu

SEQ ID NO: 2369163 - RNA, 19 nt, Homo sapiens
  misc_RNA (1)...(19): siRNA sense strand
gaaaacuaguuauagggaa

SEQ ID NO: 2369164 - RNA, 19 nt, Homo sapiens
  misc_RNA (1)...(19): siRNA sense strand
agaggaauaucuaggaucu

SEQ ID NO: 2369165 - RNA, 19 nt, Homo sapiens
  misc_RNA (1)...(19): siRNA sense strand
gcaagagcucucaguucaa

SEQ ID NO: 2369166 - RNA, 19 nt, Homo sapiens
  misc_RNA (1)...(19): siRNA sense strand
ucaaacacucccagccuaa

SEQ ID NO: 2369167 - RNA, 19 nt, Homo sapiens
  misc_RNA (1)...(19): siRNA sense strand
auacuuaggaaaagaggaa

SEQ ID NO: 2369168 - RNA, 19 nt, Homo sapiens
  misc_RNA (1)...(19): siRNA sense strand
agaaccaaguuaugaggga

SEQ ID NO: 2369169 - RNA, 19 nt, Homo sapiens
  misc_RNA (1)...(19): siRNA sense strand
aggaagugcuggagcgaga

SEQ ID NO: 2369170 - RNA, 19 nt, Homo sapiens
  misc_RNA (1)...(19): siRNA sense strand
ucaugaagauuaugggaca

SEQ ID NO: 2369171 - RNA, 19 nt, Homo sapiens
  misc_RNA (1)...(19): siRNA sense strand
gggacagcucucagauaaa

SEQ ID NO: 2369172 - RNA, 19 nt, Homo sapiens
  misc_RNA (1)...(19): siRNA sense strand
ucaacagcguagagcagaa

SEQ ID NO: 2369173 - RNA, 19 nt, Homo sapiens
  misc_RNA (1)...(19): siRNA sense strand
gcacguuucucuuggcaga

SEQ ID NO: 2369174 - RNA, 19 nt, Homo sapiens
  misc_RNA (1)...(19): siRNA sense strand
accaagagccacugagaga

SEQ ID NO: 2369175 - RNA, 19 nt, Homo sapiens
  misc_RNA (1)...(19): siRNA sense strand
uaccaguggccgugacaaa

SEQ ID NO: 2369176 - RNA, 19 nt, Homo sapiens
  misc_RNA (1)...(19): siRNA sense strand
caacuugggcagaaggcau

SEQ ID NO: 2369177 - RNA, 19 nt, Homo sapiens
  misc_RNA (1)...(19): siRNA sense strand
acaggagagcgcauggaua

SEQ ID NO: 2369178 - RNA, 19 nt, Homo sapiens
  misc_RNA (1)...(19): siRNA sense strand
ccgaaggcgaccugacauu

SEQ ID NO: 2369179 - RNA, 19 nt, Homo sapiens
  misc_RNA (1)...(19): siRNA sense strand
agguauauuuaguggcucu

SEQ ID NO: 2369180 - RNA, 19 nt, Homo sapiens
  misc_RNA (1)...(19): siRNA sense strand
guacgauaaccaagagcca

SEQ ID NO: 2369181 - RNA, 19 nt, Homo sapiens
  misc_RNA (1)...(19): siRNA sense strand
acaauuaccugaagcccau

SEQ ID NO: 2369182 - RNA, 19 nt, Homo sapiens
  misc_RNA (1)...(19): siRNA sense strand
gaaucaagaagucgaacca

SEQ ID NO: 2369183 - RNA, 19 nt, Homo sapiens
  misc_RNA (1)...(19): siRNA sense strand
agaaugauaugcuacggaa

SEQ ID NO: 2369184 - RNA, 19 nt, Homo sapiens
  misc_RNA (1)...(19): siRNA sense strand
gcucauuacaccuacaaca

SEQ ID NO: 2369185 - RNA, 19 nt, Homo sapiens
  misc_RNA (1)...(19): siRNA sense strand
cugagaaggaggcggagga

SEQ ID NO: 2369186 - RNA, 19 nt, Homo sapiens
  misc_RNA (1)...(19): siRNA sense strand
ucauguaugguguggugaa

SEQ ID NO: 2369187 - RNA, 19 nt, Homo sapiens
  misc_RNA (1)...(19): siRNA sense strand
ggacaaaacaggagagcgc

SEQ ID NO: 2369188 - RNA, 19 nt, Homo sapiens
  misc_RNA (1)...(19): siRNA sense strand
cuggauacagcuuaaagaa

SEQ ID NO: 2369189 - RNA, 19 nt, Homo sapiens
  misc_RNA (1)...(19): siRNA sense strand
cuacugagaaggaggcgga

SEQ ID NO: 2369190 - RNA, 19 nt, Homo sapiens
  misc_RNA (1)...(19): siRNA sense strand
gcauggauauucaggcugu

SEQ ID NO: 2369191 - RNA, 19 nt, Homo sapiens
  misc_RNA (1)...(19): siRNA sense strand
gaaccaagauagaugccau

SEQ ID NO: 2369192 - RNA, 19 nt, Homo sapiens
  misc_RNA (1)...(19): siRNA sense strand
ccguacaauccgccaguuu

SEQ ID NO: 2369193 - RNA, 19 nt, Homo sapiens
  misc_RNA (1)...(19): siRNA sense strand
ccguacaauccgccaguuu

SEQ ID NO: 2369194 - RNA, 19 nt, Homo sapiens
  misc_RNA (1)...(19): siRNA sense strand
gaggaaagguggaggugga

SEQ ID NO: 2369195 - RNA, 19 nt, Homo sapiens
  misc_RNA (1)...(19): siRNA sense strand
gcacagaacucaacgcuga

SEQ ID NO: 2369196 - RNA, 19 nt, Homo sapiens
  misc_RNA (1)...(19): siRNA sense strand
aaggagaaggagaagggaa

SEQ ID NO: 2369197 - RNA, 19 nt, Homo sapiens
  misc_RNA (1)...(19): siRNA sense strand
agguggagguggaagacga

SEQ ID NO: 2369198 - RNA, 19 nt, Homo sapiens
  misc_RNA (1)...(19): siRNA sense strand
aggagaaggagaagggaag

SEQ ID NO: 2369199 - RNA, 19 nt, Homo sapiens
  misc_RNA (1)...(19): siRNA sense strand
augagaagaagcaguggaa

SEQ ID NO: 2369200 - RNA, 19 nt, Homo sapiens
  misc_RNA (1)...(19): siRNA sense strand
gggacuaugagaagaagca

SEQ ID NO: 2369201 - RNA, 19 nt, Homo sapiens
  misc_RNA (1)...(19): siRNA sense strand
agaccuuugcggagaugaa

SEQ ID NO: 2369202 - RNA, 19 nt, Homo sapiens
  misc_RNA (1)...(19): siRNA sense strand
ggaagacagugauggguug

SEQ ID NO: 2369203 - RNA, 19 nt, Homo sapiens
  misc_RNA (1)...(19): siRNA sense strand
ccuugacggacgagcggaa

SEQ ID NO: 2369204 - RNA, 19 nt, Homo sapiens
  misc_RNA (1)...(19): siRNA sense strand
agguggaagacgagggaug

SEQ ID NO: 2369205 - RNA, 19 nt, Homo sapiens
  misc_RNA (1)...(19): siRNA sense strand
gcuacaaacacaugcgcuu

SEQ ID NO: 2369206 - RNA, 19 nt, Homo sapiens
  misc_RNA (1)...(19): siRNA sense strand
cugaagaaguacggggcua

SEQ ID NO: 2369207 - RNA, 19 nt, Homo sapiens
  misc_RNA (1)...(19): siRNA sense strand
gcuacaaacacaugcgcuu

SEQ ID NO: 2369208 - RNA, 19 nt, Homo sapiens
  misc_RNA (1)...(19): siRNA sense strand
cugaagaaguacggggcua

SEQ ID NO: 2369209 - RNA, 19 nt, Homo sapiens
  misc_RNA (1)...(19): siRNA sense strand
ccaaaauacaggugaaaau

SEQ ID NO: 2369210 - RNA, 19 nt, Homo sapiens
  misc_RNA (1)...(19): siRNA sense strand
uggaauauaacgaggaacu

SEQ ID NO: 2369211 - RNA, 19 nt, Homo sapiens
  misc_RNA (1)...(19): siRNA sense strand
ucgcauaagcucuuggaga

SEQ ID NO: 2369212 - RNA, 19 nt, Homo sapiens
  misc_RNA (1)...(19): siRNA sense strand
agcccagccucgaaggaaa

SEQ ID NO: 2369213 - RNA, 19 nt, Homo sapiens
  misc_RNA (1)...(19): siRNA sense strand
agauagaacuagacagcag

SEQ ID NO: 2369214 - RNA, 19 nt, Homo sapiens
  misc_RNA (1)...(19): siRNA sense strand
auaacgaggaacuggagaa

SEQ ID NO: 2369215 - RNA, 19 nt, Homo sapiens
  misc_RNA (1)...(19): siRNA sense strand
ugaccaaaauacaggugaa

SEQ ID NO: 2369216 - RNA, 19 nt, Homo sapiens
  misc_RNA (1)...(19): siRNA sense strand
cuucaacuaccaagggaau

SEQ ID NO: 2369217 - RNA, 19 nt, Homo sapiens
  misc_RNA (1)...(19): siRNA sense strand
auuauggggaggagaguaa

SEQ ID NO: 2369218 - RNA, 19 nt, Homo sapiens
  misc_RNA (1)...(19): siRNA sense strand
agcccuauguggagagcga

SEQ ID NO: 2369219 - RNA, 19 nt, Homo sapiens
  misc_RNA (1)...(19): siRNA sense strand
ggcugcaucuggagagcau

SEQ ID NO: 2369220 - RNA, 19 nt, Homo sapiens
  misc_RNA (1)...(19): siRNA sense strand
ggaggaagauguaagguuu

SEQ ID NO: 2369221 - RNA, 19 nt, Homo sapiens
  misc_RNA (1)...(19): siRNA sense strand
gaggaagauguaagguuua

SEQ ID NO: 2369222 - RNA, 19 nt, Homo sapiens
  misc_RNA (1)...(19): siRNA sense strand
ccgugaggaggaagacaua

SEQ ID NO: 2369223 - RNA, 19 nt, Homo sapiens
  misc_RNA (1)...(19): siRNA sense strand
ggauuuggaggaagaugua

SEQ ID NO: 2369224 - RNA, 19 nt, Homo sapiens
  misc_RNA (1)...(19): siRNA sense strand
uggaggaagauguaagguu

SEQ ID NO: 2369225 - RNA, 19 nt, Homo sapiens
  misc_RNA (1)...(19): siRNA sense strand
ggaaaaguuuggaggagca

SEQ ID NO: 2369226 - RNA, 19 nt, Homo sapiens
  misc_RNA (1)...(19): siRNA sense strand
agccugaagaugaggaaaa

SEQ ID NO: 2369227 - RNA, 19 nt, Homo sapiens
  misc_RNA (1)...(19): siRNA sense strand
cugaggugccagaaggaga

SEQ ID NO: 2369228 - RNA, 19 nt, Homo sapiens
  misc_RNA (1)...(19): siRNA sense strand
agacagagcuggugcugag

SEQ ID NO: 2369229 - RNA, 19 nt, Homo sapiens
  misc_RNA (1)...(19): siRNA sense strand
ggguggaggagccuaggaa

SEQ ID NO: 2369230 - RNA, 19 nt, Homo sapiens
  misc_RNA (1)...(19): siRNA sense strand
cugugggcucugugguaua

SEQ ID NO: 2369231 - RNA, 19 nt, Homo sapiens
  misc_RNA (1)...(19): siRNA sense strand
ggaaaaguuuggaggagca

SEQ ID NO: 2369232 - RNA, 19 nt, Homo sapiens
  misc_RNA (1)...(19): siRNA sense strand
agccugaagaugaggaaaa

SEQ ID NO: 2369233 - RNA, 19 nt, Homo sapiens
  misc_RNA (1)...(19): siRNA sense strand
cugaggugccagaaggaga

SEQ ID NO: 2369234 - RNA, 19 nt, Homo sapiens
  misc_RNA (1)...(19): siRNA sense strand
ccaagagagagcggagcaa

SEQ ID NO: 2369235 - RNA, 19 nt, Homo sapiens
  misc_RNA (1)...(19): siRNA sense strand
agacagagcuggugcugag

SEQ ID NO: 2369236 - RNA, 19 nt, Homo sapiens
  misc_RNA (1)...(19): siRNA sense strand
ggguggaggagccuaggaa

SEQ ID NO: 2369237 - RNA, 19 nt, Homo sapiens
  misc_RNA (1)...(19): siRNA sense strand
cugugggcucugugguaua

SEQ ID NO: 2369238 - RNA, 19 nt, Homo sapiens
  misc_RNA (1)...(19): siRNA sense strand
ggaaaaguuuggaggagca

SEQ ID NO: 2369239 - RNA, 19 nt, Homo sapiens
  misc_RNA (1)...(19): siRNA sense strand
agccugaagaugaggaaaa

SEQ ID NO: 2369240 - RNA, 19 nt, Homo sapiens
  misc_RNA (1)...(19): siRNA sense strand
cugaggugccagaaggaga

SEQ ID NO: 2369241 - RNA, 19 nt, Homo sapiens
  misc_RNA (1)...(19): siRNA sense strand
ccaagagagagcggagcaa

SEQ ID NO: 2369242 - RNA, 19 nt, Homo sapiens
  misc_RNA (1)...(19): siRNA sense strand
agacagagcuggugcugag

SEQ ID NO: 2369243 - RNA, 19 nt, Homo sapiens
  misc_RNA (1)...(19): siRNA sense strand
ggguggaggagccuaggaa

SEQ ID NO: 2369244 - RNA, 19 nt, Homo sapiens
  misc_RNA (1)...(19): siRNA sense strand
cugugggcucugugguaua

SEQ ID NO: 2369245 - RNA, 19 nt, Homo sapiens
  misc_RNA (1)...(19): siRNA sense strand
ggaaaaguuuggaggagca

SEQ ID NO: 2369246 - RNA, 19 nt, Homo sapiens
  misc_RNA (1)...(19): siRNA sense strand
agccugaagaugaggaaaa

SEQ ID NO: 2369247 - RNA, 19 nt, Homo sapiens
  misc_RNA (1)...(19): siRNA sense strand
cugaggugccagaaggaga

SEQ ID NO: 2369248 - RNA, 19 nt, Homo sapiens
  misc_RNA (1)...(19): siRNA sense strand
agacagagcuggugcugag

SEQ ID NO: 2369249 - RNA, 19 nt, Homo sapiens
  misc_RNA (1)...(19): siRNA sense strand
ggguggaggagccuaggaa

SEQ ID NO: 2369250 - RNA, 19 nt, Homo sapiens
  misc_RNA (1)...(19): siRNA sense strand
cugugggcucugugguaua

SEQ ID NO: 2369251 - RNA, 19 nt, Homo sapiens
  misc_RNA (1)...(19): siRNA sense strand
aaaggaaacuuaagggcaa

SEQ ID NO: 2369252 - RNA, 19 nt, Homo sapiens
  misc_RNA (1)...(19): siRNA sense strand
ggaaagaagaacuugggaa

SEQ ID NO: 2369253 - RNA, 19 nt, Homo sapiens
  misc_RNA (1)...(19): siRNA sense strand
gaaagaagaacuugggaag

SEQ ID NO: 2369254 - RNA, 19 nt, Homo sapiens
  misc_RNA (1)...(19): siRNA sense strand
cugcaaagguuuacugcca

SEQ ID NO: 2369255 - RNA, 19 nt, Homo sapiens
  misc_RNA (1)...(19): siRNA sense strand
gaguacuggagcagaacaa

SEQ ID NO: 2369256 - RNA, 19 nt, Homo sapiens
  misc_RNA (1)...(19): siRNA sense strand
cugaauagaagaaugcaga

SEQ ID NO: 2369257 - RNA, 19 nt, Homo sapiens
  misc_RNA (1)...(19): siRNA sense strand
gaauaaacaaagaggaacc

SEQ ID NO: 2369258 - RNA, 19 nt, Homo sapiens
  misc_RNA (1)...(19): siRNA sense strand
caaaggaaacuuaagggca

SEQ ID NO: 2369259 - RNA, 19 nt, Homo sapiens
  misc_RNA (1)...(19): siRNA sense strand
cagagaagcucacugcuga

SEQ ID NO: 2369260 - RNA, 19 nt, Homo sapiens
  misc_RNA (1)...(19): siRNA sense strand
caggaaccaaacaggaaau

SEQ ID NO: 2369261 - RNA, 19 nt, Homo sapiens
  misc_RNA (1)...(19): siRNA sense strand
agaaagaguuugcuggccu

SEQ ID NO: 2369262 - RNA, 19 nt, Homo sapiens
  misc_RNA (1)...(19): siRNA sense strand
guauuggaguacuggagca

SEQ ID NO: 2369263 - RNA, 19 nt, Homo sapiens
  misc_RNA (1)...(19): siRNA sense strand
auugguaaggaaagaagaa

SEQ ID NO: 2369264 - RNA, 19 nt, Homo sapiens
  misc_RNA (1)...(19): siRNA sense strand
ccaucaaggaggaggaaga

SEQ ID NO: 2369265 - RNA, 19 nt, Homo sapiens
  misc_RNA (1)...(19): siRNA sense strand
uggaaaagaaggagagaga

SEQ ID NO: 2369266 - RNA, 19 nt, Homo sapiens
  misc_RNA (1)...(19): siRNA sense strand
aggaccacgaggagagaaa

SEQ ID NO: 2369267 - RNA, 19 nt, Homo sapiens
  misc_RNA (1)...(19): siRNA sense strand
ccgaagggcuauugugcga

SEQ ID NO: 2369268 - RNA, 19 nt, Homo sapiens
  misc_RNA (1)...(19): siRNA sense strand
cuggagaggcagaggcuga

SEQ ID NO: 2369269 - RNA, 19 nt, Homo sapiens
  misc_RNA (1)...(19): siRNA sense strand
ggaagagagaagugcagau

SEQ ID NO: 2369270 - RNA, 19 nt, Homo sapiens
  misc_RNA (1)...(19): siRNA sense strand
aagaaugauugcagccgaa

SEQ ID NO: 2369271 - RNA, 19 nt, Homo sapiens
  misc_RNA (1)...(19): siRNA sense strand
cagggugagaggauggaaa

SEQ ID NO: 2369272 - RNA, 19 nt, Homo sapiens
  misc_RNA (1)...(19): siRNA sense strand
augaugacucugacggaaa

SEQ ID NO: 2369273 - RNA, 19 nt, Homo sapiens
  misc_RNA (1)...(19): siRNA sense strand
ggcaaaagugauugaguuu

SEQ ID NO: 2369274 - RNA, 19 nt, Homo sapiens
  misc_RNA (1)...(19): siRNA sense strand
ggaccagaccucaggcuca

SEQ ID NO: 2369275 - RNA, 19 nt, Homo sapiens
  misc_RNA (1)...(19): siRNA sense strand
aggaggaggaagagagaag

SEQ ID NO: 2369276 - RNA, 19 nt, Homo sapiens
  misc_RNA (1)...(19): siRNA sense strand
uggaggaagaggagaaugu

SEQ ID NO: 2369277 - RNA, 19 nt, Homo sapiens
  misc_RNA (1)...(19): siRNA sense strand
gaggagaaugucagagcca

SEQ ID NO: 2369278 - RNA, 19 nt, Homo sapiens
  misc_RNA (1)...(19): siRNA sense strand
ggcuagaggaggaagcaca

SEQ ID NO: 2369279 - RNA, 19 nt, Homo sapiens
  misc_RNA (1)...(19): siRNA sense strand
gaaggaucauggaggacca

SEQ ID NO: 2369280 - RNA, 19 nt, Homo sapiens
  misc_RNA (1)...(19): siRNA sense strand
cggaagagugugacuacuu

SEQ ID NO: 2369281 - RNA, 19 nt, Homo sapiens
  misc_RNA (1)...(19): siRNA sense strand
ccgccuuccaacagcaaua

SEQ ID NO: 2369282 - RNA, 19 nt, Homo sapiens
  misc_RNA (1)...(19): siRNA sense strand
gcuaaagagaagaagcaac

SEQ ID NO: 2369283 - RNA, 19 nt, Homo sapiens
  misc_RNA (1)...(19): siRNA sense strand
cugcgagaguguagacguu

SEQ ID NO: 2369284 - RNA, 19 nt, Homo sapiens
  misc_RNA (1)...(19): siRNA sense strand
aaagaagaugcuaaagaga

SEQ ID NO: 2369285 - RNA, 19 nt, Homo sapiens
  misc_RNA (1)...(19): siRNA sense strand
aggaaaagcauaugauguu

SEQ ID NO: 2369286 - RNA, 19 nt, Homo sapiens
  misc_RNA (1)...(19): siRNA sense strand
agagaagcuuccuggcuga

SEQ ID NO: 2369287 - RNA, 19 nt, Homo sapiens
  misc_RNA (1)...(19): siRNA sense strand
aggcagaggcugaugcagu

SEQ ID NO: 2369288 - RNA, 19 nt, Homo sapiens
  misc_RNA (1)...(19): siRNA sense strand
accuggaggaagaggagaa

SEQ ID NO: 2369289 - RNA, 19 nt, Homo sapiens
  misc_RNA (1)...(19): siRNA sense strand
gagcaagaccagcaggugu

SEQ ID NO: 2369290 - RNA, 19 nt, Homo sapiens
  misc_RNA (1)...(19): siRNA sense strand
gggccaaggacagggauga

SEQ ID NO: 2369291 - RNA, 19 nt, Homo sapiens
  misc_RNA (1)...(19): siRNA sense strand
gaggaagaggagaauguca

SEQ ID NO: 2369292 - RNA, 19 nt, Homo sapiens
  misc_RNA (1)...(19): siRNA sense strand
gggaugacuucaagaggac

SEQ ID NO: 2369293 - RNA, 19 nt, Homo sapiens
  misc_RNA (1)...(19): siRNA sense strand
agguggagggaacggcaaa

SEQ ID NO: 2369294 - RNA, 19 nt, Homo sapiens
  misc_RNA (1)...(19): siRNA sense strand
uggcccaagaggaggaaca

SEQ ID NO: 2369295 - RNA, 19 nt, Homo sapiens
  misc_RNA (1)...(19): siRNA sense strand
aggcguauuaccagcaaau

SEQ ID NO: 2369296 - RNA, 19 nt, Homo sapiens
  misc_RNA (1)...(19): siRNA sense strand
ucggaaggaucauggagga

SEQ ID NO: 2369297 - RNA, 19 nt, Homo sapiens
  misc_RNA (1)...(19): siRNA sense strand
aauuacaaacugcggaaaa

SEQ ID NO: 2369298 - RNA, 19 nt, Homo sapiens
  misc_RNA (1)...(19): siRNA sense strand
cggcacugaggcaggaaaa

SEQ ID NO: 2369299 - RNA, 19 nt, Homo sapiens
  misc_RNA (1)...(19): siRNA sense strand
ccagaagauccuuucaaaa

SEQ ID NO: 2369300 - RNA, 19 nt, Homo sapiens
  misc_RNA (1)...(19): siRNA sense strand
uggcaaaagugauugaguu

SEQ ID NO: 2369301 - RNA, 19 nt, Homo sapiens
  misc_RNA (1)...(19): siRNA sense strand
aggcaggagucauggaccu

SEQ ID NO: 2369302 - RNA, 19 nt, Homo sapiens
  misc_RNA (1)...(19): siRNA sense strand
agucauggaccuucuggaa

SEQ ID NO: 2369303 - RNA, 19 nt, Homo sapiens
  misc_RNA (1)...(19): siRNA sense strand
ccaucaaggaggaggaaga

SEQ ID NO: 2369304 - RNA, 19 nt, Homo sapiens
  misc_RNA (1)...(19): siRNA sense strand
uggaaaagaaggagagaga

SEQ ID NO: 2369305 - RNA, 19 nt, Homo sapiens
  misc_RNA (1)...(19): siRNA sense strand
aggaccacgaggagagaaa

SEQ ID NO: 2369306 - RNA, 19 nt, Homo sapiens
  misc_RNA (1)...(19): siRNA sense strand
ccgaagggcuauugugcga

SEQ ID NO: 2369307 - RNA, 19 nt, Homo sapiens
  misc_RNA (1)...(19): siRNA sense strand
cuggagaggcagaggcuga

SEQ ID NO: 2369308 - RNA, 19 nt, Homo sapiens
  misc_RNA (1)...(19): siRNA sense strand
ggaagagagaagugcagau

SEQ ID NO: 2369309 - RNA, 19 nt, Homo sapiens
  misc_RNA (1)...(19): siRNA sense strand
aagaaugauugcagccgaa

SEQ ID NO: 2369310 - RNA, 19 nt, Homo sapiens
  misc_RNA (1)...(19): siRNA sense strand
cagggugagaggauggaaa

SEQ ID NO: 2369311 - RNA, 19 nt, Homo sapiens
  misc_RNA (1)...(19): siRNA sense strand
augaugacucugacggaaa

SEQ ID NO: 2369312 - RNA, 19 nt, Homo sapiens
  misc_RNA (1)...(19): siRNA sense strand
ggcaaaagugauugaguuu

SEQ ID NO: 2369313 - RNA, 19 nt, Homo sapiens
  misc_RNA (1)...(19): siRNA sense strand
ggaccagaccucaggcuca

SEQ ID NO: 2369314 - RNA, 19 nt, Homo sapiens
  misc_RNA (1)...(19): siRNA sense strand
aggaggaggaagagagaag

SEQ ID NO: 2369315 - RNA, 19 nt, Homo sapiens
  misc_RNA (1)...(19): siRNA sense strand
uggaggaagaggagaaugu

SEQ ID NO: 2369316 - RNA, 19 nt, Homo sapiens
  misc_RNA (1)...(19): siRNA sense strand
gaggagaaugucagagcca

SEQ ID NO: 2369317 - RNA, 19 nt, Homo sapiens
  misc_RNA (1)...(19): siRNA sense strand
ggcuagaggaggaagcaca

SEQ ID NO: 2369318 - RNA, 19 nt, Homo sapiens
  misc_RNA (1)...(19): siRNA sense strand
gaaggaucauggaggacca

SEQ ID NO: 2369319 - RNA, 19 nt, Homo sapiens
  misc_RNA (1)...(19): siRNA sense strand
cggaagagugugacuacuu

SEQ ID NO: 2369320 - RNA, 19 nt, Homo sapiens
  misc_RNA (1)...(19): siRNA sense strand
ccgccuuccaacagcaaua

SEQ ID NO: 2369321 - RNA, 19 nt, Homo sapiens
  misc_RNA (1)...(19): siRNA sense strand
gcuaaagagaagaagcaac

SEQ ID NO: 2369322 - RNA, 19 nt, Homo sapiens
  misc_RNA (1)...(19): siRNA sense strand
cugcgagaguguagacguu

SEQ ID NO: 2369323 - RNA, 19 nt, Homo sapiens
  misc_RNA (1)...(19): siRNA sense strand
aaagaagaugcuaaagaga

SEQ ID NO: 2369324 - RNA, 19 nt, Homo sapiens
  misc_RNA (1)...(19): siRNA sense strand
aggaaaagcauaugauguu

SEQ ID NO: 2369325 - RNA, 19 nt, Homo sapiens
  misc_RNA (1)...(19): siRNA sense strand
agagaagcuuccuggcuga

SEQ ID NO: 2369326 - RNA, 19 nt, Homo sapiens
  misc_RNA (1)...(19): siRNA sense strand
aggcagaggcugaugcagu

SEQ ID NO: 2369327 - RNA, 19 nt, Homo sapiens
  misc_RNA (1)...(19): siRNA sense strand
accuggaggaagaggagaa

SEQ ID NO: 2369328 - RNA, 19 nt, Homo sapiens
  misc_RNA (1)...(19): siRNA sense strand
gagcaagaccagcaggugu

SEQ ID NO: 2369329 - RNA, 19 nt, Homo sapiens
  misc_RNA (1)...(19): siRNA sense strand
gggccaaggacagggauga

SEQ ID NO: 2369330 - RNA, 19 nt, Homo sapiens
  misc_RNA (1)...(19): siRNA sense strand
gaggaagaggagaauguca

SEQ ID NO: 2369331 - RNA, 19 nt, Homo sapiens
  misc_RNA (1)...(19): siRNA sense strand
gggaugacuucaagaggac

SEQ ID NO: 2369332 - RNA, 19 nt, Homo sapiens
  misc_RNA (1)...(19): siRNA sense strand
agguggagggaacggcaaa

SEQ ID NO: 2369333 - RNA, 19 nt, Homo sapiens
  misc_RNA (1)...(19): siRNA sense strand
uggcccaagaggaggaaca

SEQ ID NO: 2369334 - RNA, 19 nt, Homo sapiens
  misc_RNA (1)...(19): siRNA sense strand
aggcguauuaccagcaaau

SEQ ID NO: 2369335 - RNA, 19 nt, Homo sapiens
  misc_RNA (1)...(19): siRNA sense strand
ucggaaggaucauggagga

SEQ ID NO: 2369336 - RNA, 19 nt, Homo sapiens
  misc_RNA (1)...(19): siRNA sense strand
aauuacaaacugcggaaaa

SEQ ID NO: 2369337 - RNA, 19 nt, Homo sapiens
  misc_RNA (1)...(19): siRNA sense strand
cggcacugaggcaggaaaa

SEQ ID NO: 2369338 - RNA, 19 nt, Homo sapiens
  misc_RNA (1)...(19): siRNA sense strand
ccagaagauccuuucaaaa

SEQ ID NO: 2369339 - RNA, 19 nt, Homo sapiens
  misc_RNA (1)...(19): siRNA sense strand
uggcaaaagugauugaguu

SEQ ID NO: 2369340 - RNA, 19 nt, Homo sapiens
  misc_RNA (1)...(19): siRNA sense strand
aggcaggagucauggaccu

SEQ ID NO: 2369341 - RNA, 19 nt, Homo sapiens
  misc_RNA (1)...(19): siRNA sense strand
agucauggaccuucuggaa

SEQ ID NO: 2369342 - RNA, 19 nt, Homo sapiens
  misc_RNA (1)...(19): siRNA sense strand
gugauuuacaauagagcaa

SEQ ID NO: 2369343 - RNA, 19 nt, Homo sapiens
  misc_RNA (1)...(19): siRNA sense strand
ggauguaaauauuuggacu

SEQ ID NO: 2369344 - RNA, 19 nt, Homo sapiens
  misc_RNA (1)...(19): siRNA sense strand
gugaaagaagagaaagcuu

SEQ ID NO: 2369345 - RNA, 19 nt, Homo sapiens
  misc_RNA (1)...(19): siRNA sense strand
cgacugugcaggaagaaaa

SEQ ID NO: 2369346 - RNA, 19 nt, Homo sapiens
  misc_RNA (1)...(19): siRNA sense strand
aggcaaaaguaaugaaaag

SEQ ID NO: 2369347 - RNA, 19 nt, Homo sapiens
  misc_RNA (1)...(19): siRNA sense strand
ucuugauauuccaguacaa

SEQ ID NO: 2369348 - RNA, 19 nt, Homo sapiens
  misc_RNA (1)...(19): siRNA sense strand
agguuuagguuaugcugau

SEQ ID NO: 2369349 - RNA, 19 nt, Homo sapiens
  misc_RNA (1)...(19): siRNA sense strand
agaugaugaaagagaaugu

SEQ ID NO: 2369350 - RNA, 19 nt, Homo sapiens
  misc_RNA (1)...(19): siRNA sense strand
uggacuauaugcagaaaau

SEQ ID NO: 2369351 - RNA, 19 nt, Homo sapiens
  misc_RNA (1)...(19): siRNA sense strand
gugauuuacaauagagcaa

SEQ ID NO: 2369352 - RNA, 19 nt, Homo sapiens
  misc_RNA (1)...(19): siRNA sense strand
ggauguaaauauuuggacu

SEQ ID NO: 2369353 - RNA, 19 nt, Homo sapiens
  misc_RNA (1)...(19): siRNA sense strand
gugaaagaagagaaagcuu

SEQ ID NO: 2369354 - RNA, 19 nt, Homo sapiens
  misc_RNA (1)...(19): siRNA sense strand
cgacugugcaggaagaaaa

SEQ ID NO: 2369355 - RNA, 19 nt, Homo sapiens
  misc_RNA (1)...(19): siRNA sense strand
aggcaaaaguaaugaaaag

SEQ ID NO: 2369356 - RNA, 19 nt, Homo sapiens
  misc_RNA (1)...(19): siRNA sense strand
ucuugauauuccaguacaa

SEQ ID NO: 2369357 - RNA, 19 nt, Homo sapiens
  misc_RNA (1)...(19): siRNA sense strand
agguuuagguuaugcugau

SEQ ID NO: 2369358 - RNA, 19 nt, Homo sapiens
  misc_RNA (1)...(19): siRNA sense strand
agaugaugaaagagaaugu

SEQ ID NO: 2369359 - RNA, 19 nt, Homo sapiens
  misc_RNA (1)...(19): siRNA sense strand
uggacuauaugcagaaaau

SEQ ID NO: 2369360 - RNA, 19 nt, Homo sapiens
  misc_RNA (1)...(19): siRNA sense strand
gcuucaugcucaaggacau

SEQ ID NO: 2369361 - RNA, 19 nt, Homo sapiens
  misc_RNA (1)...(19): siRNA sense strand
aggacaagcugcaggccau

SEQ ID NO: 2369362 - RNA, 19 nt, Homo sapiens
  misc_RNA (1)...(19): siRNA sense strand
gagcagauuuacagcgcca

SEQ ID NO: 2369363 - RNA, 19 nt, Homo sapiens
  misc_RNA (1)...(19): siRNA sense strand
ccaacgaggaggagaucga

SEQ ID NO: 2369364 - RNA, 19 nt, Homo sapiens
  misc_RNA (1)...(19): siRNA sense strand
ccuucaaacagcuguacaa

SEQ ID NO: 2369365 - RNA, 19 nt, Homo sapiens
  misc_RNA (1)...(19): siRNA sense strand
uggccaacgaggaggagau

SEQ ID NO: 2369366 - RNA, 19 nt, Homo sapiens
  misc_RNA (1)...(19): siRNA sense strand
agaagaugcggcuggccaa

SEQ ID NO: 2369367 - RNA, 19 nt, Homo sapiens
  misc_RNA (1)...(19): siRNA sense strand
ccuacaaacacuugaacua

SEQ ID NO: 2369368 - RNA, 19 nt, Homo sapiens
  misc_RNA (1)...(19): siRNA sense strand
gaguaaagccagccggaau

SEQ ID NO: 2369369 - RNA, 19 nt, Homo sapiens
  misc_RNA (1)...(19): siRNA sense strand
cagcaauaggccagagauu

SEQ ID NO: 2369370 - RNA, 19 nt, Homo sapiens
  misc_RNA (1)...(19): siRNA sense strand
agaaaauaguugagcgaga

SEQ ID NO: 2369371 - RNA, 19 nt, Homo sapiens
  misc_RNA (1)...(19): siRNA sense strand
gagaauaaacaaagggaac

SEQ ID NO: 2369372 - RNA, 19 nt, Homo sapiens
  misc_RNA (1)...(19): siRNA sense strand
gguuguaggucuugcccaa

SEQ ID NO: 2369373 - RNA, 19 nt, Homo sapiens
  misc_RNA (1)...(19): siRNA sense strand
ugacaagggacaaagcaaa

SEQ ID NO: 2369374 - RNA, 19 nt, Homo sapiens
  misc_RNA (1)...(19): siRNA sense strand
gggaaguugacauuagaua

SEQ ID NO: 2369375 - RNA, 19 nt, Homo sapiens
  misc_RNA (1)...(19): siRNA sense strand
accaagaggaacagcaaua

SEQ ID NO: 2369376 - RNA, 19 nt, Homo sapiens
  misc_RNA (1)...(19): siRNA sense strand
gguuggaauuggagcagau

SEQ ID NO: 2369377 - RNA, 19 nt, Homo sapiens
  misc_RNA (1)...(19): siRNA sense strand
gcuucggacuugugccaaa

SEQ ID NO: 2369378 - RNA, 19 nt, Homo sapiens
  misc_RNA (1)...(19): siRNA sense strand
cgagaauaaacaaagggaa

SEQ ID NO: 2369379 - RNA, 19 nt, Homo sapiens
  misc_RNA (1)...(19): siRNA sense strand
ggagagcaguggagggacu

SEQ ID NO: 2369380 - RNA, 19 nt, Homo sapiens
  misc_RNA (1)...(19): siRNA sense strand
ccucagaaacaguaagcau

SEQ ID NO: 2369381 - RNA, 19 nt, Homo sapiens
  misc_RNA (1)...(19): siRNA sense strand
gugacaagggacaaagcaa

SEQ ID NO: 2369382 - RNA, 19 nt, Homo sapiens
  misc_RNA (1)...(19): siRNA sense strand
ggggagacauuauggaauu

SEQ ID NO: 2369383 - RNA, 19 nt, Homo sapiens
  misc_RNA (1)...(19): siRNA sense strand
gggagagcaugaugaacau

SEQ ID NO: 2369384 - RNA, 19 nt, Homo sapiens
  misc_RNA (1)...(19): siRNA sense strand
aaagaagcaacaagaacaa

SEQ ID NO: 2369385 - RNA, 19 nt, Homo sapiens
  misc_RNA (1)...(19): siRNA sense strand
cggugguggucuugggcau

SEQ ID NO: 2369386 - RNA, 19 nt, Homo sapiens
  misc_RNA (1)...(19): siRNA sense strand
uguuagaguuccagaguac

SEQ ID NO: 2369387 - RNA, 19 nt, Homo sapiens
  misc_RNA (1)...(19): siRNA sense strand
uucaauugcuggaacgaua

SEQ ID NO: 2369388 - RNA, 19 nt, Homo sapiens
  misc_RNA (1)...(19): siRNA sense strand
ccgauauuccagaguggua

SEQ ID NO: 2369389 - RNA, 19 nt, Homo sapiens
  misc_RNA (1)...(19): siRNA sense strand
uucaaacaguggauggaaa

SEQ ID NO: 2369390 - RNA, 19 nt, Homo sapiens
  misc_RNA (1)...(19): siRNA sense strand
aagcaaagaauuuagggau

SEQ ID NO: 2369391 - RNA, 19 nt, Homo sapiens
  misc_RNA (1)...(19): siRNA sense strand
ugccauagccauugugauu

SEQ ID NO: 2369392 - RNA, 19 nt, Homo sapiens
  misc_RNA (1)...(19): siRNA sense strand
ugauaagccucaugccgaa

SEQ ID NO: 2369393 - RNA, 19 nt, Homo sapiens
  misc_RNA (1)...(19): siRNA sense strand
gguaccauuuggauagcaa

SEQ ID NO: 2369394 - RNA, 19 nt, Homo sapiens
  misc_RNA (1)...(19): siRNA sense strand
ugccaaacauggaagccaa

SEQ ID NO: 2369395 - RNA, 19 nt, Homo sapiens
  misc_RNA (1)...(19): siRNA sense strand
caacauaagaccauccaga

SEQ ID NO: 2369396 - RNA, 19 nt, Homo sapiens
  misc_RNA (1)...(19): siRNA sense strand
agauuggucacauggaaua

SEQ ID NO: 2369397 - RNA, 19 nt, Homo sapiens
  misc_RNA (1)...(19): siRNA sense strand
aauacaggauacaaagcaa

SEQ ID NO: 2369398 - RNA, 19 nt, Homo sapiens
  misc_RNA (1)...(19): siRNA sense strand
ccuacaagcaagagauuuu

SEQ ID NO: 2369399 - RNA, 19 nt, Homo sapiens
  misc_RNA (1)...(19): siRNA sense strand
gagaaaggggagagcauga

SEQ ID NO: 2369400 - RNA, 19 nt, Homo sapiens
  misc_RNA (1)...(19): siRNA sense strand
gagcaugaguuuuaugaau

SEQ ID NO: 2369401 - RNA, 19 nt, Homo sapiens
  misc_RNA (1)...(19): siRNA sense strand
aaaauagagacgugagcaa

SEQ ID NO: 2369402 - RNA, 19 nt, Homo sapiens
  misc_RNA (1)...(19): siRNA sense strand
cagagaaaggggagagcau

SEQ ID NO: 2369403 - RNA, 19 nt, Homo sapiens
  misc_RNA (1)...(19): siRNA sense strand
aguaaagggaaguugacau

SEQ ID NO: 2369404 - RNA, 19 nt, Homo sapiens
  misc_RNA (1)...(19): siRNA sense strand
cagcaaaagcacugaaagu

SEQ ID NO: 2369405 - RNA, 19 nt, Homo sapiens
  misc_RNA (1)...(19): siRNA sense strand
ggcagaauugugagaguga

SEQ ID NO: 2369406 - RNA, 19 nt, Homo sapiens
  misc_RNA (1)...(19): siRNA sense strand
gcaauuaaaucaaugugca

SEQ ID NO: 2369407 - RNA, 19 nt, Homo sapiens
  misc_RNA (1)...(19): siRNA sense strand
acucagaacauuucaauca

SEQ ID NO: 2369408 - RNA, 19 nt, Homo sapiens
  misc_RNA (1)...(19): siRNA sense strand
caaugugcaauguagauaa

SEQ ID NO: 2369409 - RNA, 19 nt, Homo sapiens
  misc_RNA (1)...(19): siRNA sense strand
ccgagaaggcaaagugauc

SEQ ID NO: 2369410 - RNA, 19 nt, Homo sapiens
  misc_RNA (1)...(19): siRNA sense strand
gagauuggucacauggaau

SEQ ID NO: 2369411 - RNA, 19 nt, Homo sapiens
  misc_RNA (1)...(19): siRNA sense strand
ggggagagcaugaugaaca

SEQ ID NO: 2369412 - RNA, 19 nt, Homo sapiens
  misc_RNA (1)...(19): siRNA sense strand
guuaugaugcugaauacaa

SEQ ID NO: 2369413 - RNA, 19 nt, Homo sapiens
  misc_RNA (1)...(19): siRNA sense strand
uugugagagugaagugcaa

SEQ ID NO: 2369414 - RNA, 19 nt, Homo sapiens
  misc_RNA (1)...(19): siRNA sense strand
ccaaagaagcaacaagaac

SEQ ID NO: 2369415 - RNA, 19 nt, Homo sapiens
  misc_RNA (1)...(19): siRNA sense strand
acaaagcaacauuagcaaa

SEQ ID NO: 2369416 - RNA, 19 nt, Homo sapiens
  misc_RNA (1)...(19): siRNA sense strand
ucaaacaguggauggaaaa

SEQ ID NO: 2369417 - RNA, 19 nt, Homo sapiens
  misc_RNA (1)...(19): siRNA sense strand
gagaaggcaaagugaucuu

SEQ ID NO: 2369418 - RNA, 19 nt, Homo sapiens
  misc_RNA (1)...(19): siRNA sense strand
agcaaagaauuuagggaug

SEQ ID NO: 2369419 - RNA, 19 nt, Homo sapiens
  misc_RNA (1)...(19): siRNA sense strand
acaaagggaacucuguaaa

SEQ ID NO: 2369420 - RNA, 19 nt, Homo sapiens
  misc_RNA (1)...(19): siRNA sense strand
gugagagugaagugcaauu

SEQ ID NO: 2369421 - RNA, 19 nt, Homo sapiens
  misc_RNA (1)...(19): siRNA sense strand
gcaacaagaacaaaaguga

SEQ ID NO: 2369422 - RNA, 19 nt, Homo sapiens
  misc_RNA (1)...(19): siRNA sense strand
acauuuacuuggacaacuu

SEQ ID NO: 2369423 - RNA, 19 nt, Homo sapiens
  misc_RNA (1)...(19): siRNA sense strand
uggaauuggagcagaugau

SEQ ID NO: 2369424 - RNA, 19 nt, Homo sapiens
  misc_RNA (1)...(19): siRNA sense strand
gcugcuucauugagacauu

SEQ ID NO: 2369425 - RNA, 19 nt, Homo sapiens
  misc_RNA (1)...(19): siRNA sense strand
cugacaacuuggaacauca

SEQ ID NO: 2369426 - RNA, 19 nt, Homo sapiens
  misc_RNA (1)...(19): siRNA sense strand
ccacuuaugaagagaccca

SEQ ID NO: 2369427 - RNA, 19 nt, Homo sapiens
  misc_RNA (1)...(19): siRNA sense strand
gugccaaacacuaccaaaa

SEQ ID NO: 2369428 - RNA, 19 nt, Homo sapiens
  misc_RNA (1)...(19): siRNA sense strand
ugaacauuuacuuggacaa

SEQ ID NO: 2369429 - RNA, 19 nt, Homo sapiens
  misc_RNA (1)...(19): siRNA sense strand
ugccgaaaccucagaaaca

SEQ ID NO: 2369430 - RNA, 19 nt, Homo sapiens
  misc_RNA (1)...(19): siRNA sense strand
guuagcaacauuacagcaa

SEQ ID NO: 2369431 - RNA, 19 nt, Homo sapiens
  misc_RNA (1)...(19): siRNA sense strand
gcuaugagcaauggaaaca

SEQ ID NO: 2369432 - RNA, 19 nt, Homo sapiens
  misc_RNA (1)...(19): siRNA sense strand
aagcuaaccuucugaacaa

SEQ ID NO: 2369433 - RNA, 19 nt, Homo sapiens
  misc_RNA (1)...(19): siRNA sense strand
augaguaaauccauggaaa

SEQ ID NO: 2369434 - RNA, 19 nt, Homo sapiens
  misc_RNA (1)...(19): siRNA sense strand
aggcagaggaacugaauga

SEQ ID NO: 2369435 - RNA, 19 nt, Homo sapiens
  misc_RNA (1)...(19): siRNA sense strand
auucaagaacuuacggaaa

SEQ ID NO: 2369436 - RNA, 19 nt, Homo sapiens
  misc_RNA (1)...(19): siRNA sense strand
cauuaaugggagauacaaa

SEQ ID NO: 2369437 - RNA, 19 nt, Homo sapiens
  misc_RNA (1)...(19): siRNA sense strand
cggcagaagcccucaaaca

SEQ ID NO: 2369438 - RNA, 19 nt, Homo sapiens
  misc_RNA (1)...(19): siRNA sense strand
caaugguggugauggaaaa

SEQ ID NO: 2369439 - RNA, 19 nt, Homo sapiens
  misc_RNA (1)...(19): siRNA sense strand
uuacuaugcaagugacaaa

SEQ ID NO: 2369440 - RNA, 19 nt, Homo sapiens
  misc_RNA (1)...(19): siRNA sense strand
auuuggagccagaagauaa

SEQ ID NO: 2369441 - RNA, 19 nt, Homo sapiens
  misc_RNA (1)...(19): siRNA sense strand
ugggagauacaaagggcaa

SEQ ID NO: 2369442 - RNA, 19 nt, Homo sapiens
  misc_RNA (1)...(19): siRNA sense strand
uucuauaaccagugagcua

SEQ ID NO: 2369443 - RNA, 19 nt, Homo sapiens
  misc_RNA (1)...(19): siRNA sense strand
gugacaaaguccacgcaga

SEQ ID NO: 2369444 - RNA, 19 nt, Homo sapiens
  misc_RNA (1)...(19): siRNA sense strand
ugggaaagggugcagcaaa

SEQ ID NO: 2369445 - RNA, 19 nt, Homo sapiens
  misc_RNA (1)...(19): siRNA sense strand
ugaguaaauccauggaaaa

SEQ ID NO: 2369446 - RNA, 19 nt, Homo sapiens
  misc_RNA (1)...(19): siRNA sense strand
acaugaaagcagacuguau

SEQ ID NO: 2369447 - RNA, 19 nt, Homo sapiens
  misc_RNA (1)...(19): siRNA sense strand
uaugucaagacuagagaaa

SEQ ID NO: 2369448 - RNA, 19 nt, Homo sapiens
  misc_RNA (1)...(19): siRNA sense strand
agaagaaggcugcaaacau

SEQ ID NO: 2369449 - RNA, 19 nt, Homo sapiens
  misc_RNA (1)...(19): siRNA sense strand
cucagaagcauguaacaaa

SEQ ID NO: 2369450 - RNA, 19 nt, Homo sapiens
  misc_RNA (1)...(19): siRNA sense strand
ugucaagacuagagaaagc

SEQ ID NO: 2369451 - RNA, 19 nt, Homo sapiens
  misc_RNA (1)...(19): siRNA sense strand
acaaagggcaaucaggaau

SEQ ID NO: 2369452 - RNA, 19 nt, Homo sapiens
  misc_RNA (1)...(19): siRNA sense strand
gagaugacaugaaagcaga

SEQ ID NO: 2369453 - RNA, 19 nt, Homo sapiens
  misc_RNA (1)...(19): siRNA sense strand
uguaacaaaaugugcgaua

SEQ ID NO: 2369454 - RNA, 19 nt, Homo sapiens
  misc_RNA (1)...(19): siRNA sense strand
cuaauugggcugacugcaa

SEQ ID NO: 2369455 - RNA, 19 nt, Homo sapiens
  misc_RNA (1)...(19): siRNA sense strand
agauaagaccacaguucau

SEQ ID NO: 2369456 - RNA, 19 nt, Homo sapiens
  misc_RNA (1)...(19): siRNA sense strand
ucaccugccgcuuggaaua

SEQ ID NO: 2369457 - RNA, 19 nt, Homo sapiens
  misc_RNA (1)...(19): siRNA sense strand
ccuaugaagcaaggagauu

SEQ ID NO: 2369458 - RNA, 19 nt, Homo sapiens
  misc_RNA (1)...(19): siRNA sense strand
ucgaauugcuguggaugaa

SEQ ID NO: 2369459 - RNA, 19 nt, Homo sapiens
  misc_RNA (1)...(19): siRNA sense strand
ggagguggaaagagcuuau

SEQ ID NO: 2369460 - RNA, 19 nt, Homo sapiens
  misc_RNA (1)...(19): siRNA sense strand
cauuauguucagaugguuu

SEQ ID NO: 2369461 - RNA, 19 nt, Homo sapiens
  misc_RNA (1)...(19): siRNA sense strand
ggacaugauuucagaccug

SEQ ID NO: 2369462 - RNA, 19 nt, Homo sapiens
  misc_RNA (1)...(19): siRNA sense strand
agaaagacucugaacaagu

SEQ ID NO: 2369463 - RNA, 19 nt, Homo sapiens
  misc_RNA (1)...(19): siRNA sense strand
ccaagagaguggacgugca

SEQ ID NO: 2369464 - RNA, 19 nt, Homo sapiens
  misc_RNA (1)...(19): siRNA sense strand
gaguggacgugcaggucga

SEQ ID NO: 2369465 - RNA, 19 nt, Homo sapiens
  misc_RNA (1)...(19): siRNA sense strand
aggucgagaugacaugaaa

SEQ ID NO: 2369466 - RNA, 19 nt, Homo sapiens
  misc_RNA (1)...(19): siRNA sense strand
ggagaagauuauugcacac

SEQ ID NO: 2369467 - RNA, 19 nt, Homo sapiens
  misc_RNA (1)...(19): siRNA sense strand
ucuaagaauacaggagcua

SEQ ID NO: 2369468 - RNA, 19 nt, Homo sapiens
  misc_RNA (1)...(19): siRNA sense strand
guucagaccacuucagcuu

SEQ ID NO: 2369469 - RNA, 19 nt, Homo sapiens
  misc_RNA (1)...(19): siRNA sense strand
ucaaugguggugauggaaa

SEQ ID NO: 2369470 - RNA, 19 nt, Homo sapiens
  misc_RNA (1)...(19): siRNA sense strand
uggagaagauuauugcaca

SEQ ID NO: 2369471 - RNA, 19 nt, Homo sapiens
  misc_RNA (1)...(19): siRNA sense strand
auuauaaggcacuugguau

SEQ ID NO: 2369472 - RNA, 19 nt, Homo sapiens
  misc_RNA (1)...(19): siRNA sense strand
agaacuuacggaaaggcaa

SEQ ID NO: 2369473 - RNA, 19 nt, Homo sapiens
  misc_RNA (1)...(19): siRNA sense strand
uuaaauggguucaugcuga

SEQ ID NO: 2369474 - RNA, 19 nt, Homo sapiens
  misc_RNA (1)...(19): siRNA sense strand
ugaagcaggcagaggaacu

SEQ ID NO: 2369475 - RNA, 19 nt, Homo sapiens
  misc_RNA (1)...(19): siRNA sense strand
uggcuggaaaggagguauu

SEQ ID NO: 2369476 - RNA, 19 nt, Homo sapiens
  misc_RNA (1)...(19): siRNA sense strand
gaguaaauccauggaaaau

SEQ ID NO: 2369477 - RNA, 19 nt, Homo sapiens
  misc_RNA (1)...(19): siRNA sense strand
gugcgauaacugcuguaaa

SEQ ID NO: 2369478 - RNA, 19 nt, Homo sapiens
  misc_RNA (1)...(19): siRNA sense strand
ccauggucugguaaaguua

SEQ ID NO: 2369479 - RNA, 19 nt, Homo sapiens
  misc_RNA (1)...(19): siRNA sense strand
aaggagauuuacucgaauu

SEQ ID NO: 2369480 - RNA, 19 nt, Homo sapiens
  misc_RNA (1)...(19): siRNA sense strand
gggcaaucaggaaucauau

SEQ ID NO: 2369481 - RNA, 19 nt, Homo sapiens
  misc_RNA (1)...(19): siRNA sense strand
guacuacggcuuuggagau

SEQ ID NO: 2369482 - RNA, 19 nt, Homo sapiens
  misc_RNA (1)...(19): siRNA sense strand
ucagaagcauguaacaaaa

SEQ ID NO: 2369483 - RNA, 19 nt, Homo sapiens
  misc_RNA (1)...(19): siRNA sense strand
acaaugaggcacaugcuau

SEQ ID NO: 2369484 - RNA, 19 nt, Homo sapiens
  misc_RNA (1)...(19): siRNA sense strand
ggagcauguuaaauggguu

SEQ ID NO: 2369485 - RNA, 19 nt, Homo sapiens
  misc_RNA (1)...(19): siRNA sense strand
aaagcaguguuuagaggau

SEQ ID NO: 2369486 - RNA, 19 nt, Homo sapiens
  misc_RNA (1)...(19): siRNA sense strand
aagcuaaccuucugaacaa

SEQ ID NO: 2369487 - RNA, 19 nt, Homo sapiens
  misc_RNA (1)...(19): siRNA sense strand
augaguaaauccauggaaa

SEQ ID NO: 2369488 - RNA, 19 nt, Homo sapiens
  misc_RNA (1)...(19): siRNA sense strand
aggcagaggaacugaauga

SEQ ID NO: 2369489 - RNA, 19 nt, Homo sapiens
  misc_RNA (1)...(19): siRNA sense strand
auucaagaacuuacggaaa

SEQ ID NO: 2369490 - RNA, 19 nt, Homo sapiens
  misc_RNA (1)...(19): siRNA sense strand
cauuaaugggagauacaaa

SEQ ID NO: 2369491 - RNA, 19 nt, Homo sapiens
  misc_RNA (1)...(19): siRNA sense strand
cggcagaagcccucaaaca

SEQ ID NO: 2369492 - RNA, 19 nt, Homo sapiens
  misc_RNA (1)...(19): siRNA sense strand
caaugguggugauggaaaa

SEQ ID NO: 2369493 - RNA, 19 nt, Homo sapiens
  misc_RNA (1)...(19): siRNA sense strand
uuacuaugcaagugacaaa

SEQ ID NO: 2369494 - RNA, 19 nt, Homo sapiens
  misc_RNA (1)...(19): siRNA sense strand
auuuggagccagaagauaa

SEQ ID NO: 2369495 - RNA, 19 nt, Homo sapiens
  misc_RNA (1)...(19): siRNA sense strand
ugggagauacaaagggcaa

SEQ ID NO: 2369496 - RNA, 19 nt, Homo sapiens
  misc_RNA (1)...(19): siRNA sense strand
uucuauaaccagugagcua

SEQ ID NO: 2369497 - RNA, 19 nt, Homo sapiens
  misc_RNA (1)...(19): siRNA sense strand
gugacaaaguccacgcaga

SEQ ID NO: 2369498 - RNA, 19 nt, Homo sapiens
  misc_RNA (1)...(19): siRNA sense strand
ugggaaagggugcagcaaa

SEQ ID NO: 2369499 - RNA, 19 nt, Homo sapiens
  misc_RNA (1)...(19): siRNA sense strand
ugaguaaauccauggaaaa

SEQ ID NO: 2369500 - RNA, 19 nt, Homo sapiens
  misc_RNA (1)...(19): siRNA sense strand
acaugaaagcagacuguau

SEQ ID NO: 2369501 - RNA, 19 nt, Homo sapiens
  misc_RNA (1)...(19): siRNA sense strand
uaugucaagacuagagaaa

SEQ ID NO: 2369502 - RNA, 19 nt, Homo sapiens
  misc_RNA (1)...(19): siRNA sense strand
agaagaaggcugcaaacau

SEQ ID NO: 2369503 - RNA, 19 nt, Homo sapiens
  misc_RNA (1)...(19): siRNA sense strand
cucagaagcauguaacaaa

SEQ ID NO: 2369504 - RNA, 19 nt, Homo sapiens
  misc_RNA (1)...(19): siRNA sense strand
ugucaagacuagagaaagc

SEQ ID NO: 2369505 - RNA, 19 nt, Homo sapiens
  misc_RNA (1)...(19): siRNA sense strand
acaaagggcaaucaggaau

SEQ ID NO: 2369506 - RNA, 19 nt, Homo sapiens
  misc_RNA (1)...(19): siRNA sense strand
gagaugacaugaaagcaga

SEQ ID NO: 2369507 - RNA, 19 nt, Homo sapiens
  misc_RNA (1)...(19): siRNA sense strand
uguaacaaaaugugcgaua

SEQ ID NO: 2369508 - RNA, 19 nt, Homo sapiens
  misc_RNA (1)...(19): siRNA sense strand
cuaauugggcugacugcaa

SEQ ID NO: 2369509 - RNA, 19 nt, Homo sapiens
  misc_RNA (1)...(19): siRNA sense strand
agauaagaccacaguucau

SEQ ID NO: 2369510 - RNA, 19 nt, Homo sapiens
  misc_RNA (1)...(19): siRNA sense strand
ucaccugccgcuuggaaua

SEQ ID NO: 2369511 - RNA, 19 nt, Homo sapiens
  misc_RNA (1)...(19): siRNA sense strand
ccuaugaagcaaggagauu

SEQ ID NO: 2369512 - RNA, 19 nt, Homo sapiens
  misc_RNA (1)...(19): siRNA sense strand
ucgaauugcuguggaugaa

SEQ ID NO: 2369513 - RNA, 19 nt, Homo sapiens
  misc_RNA (1)...(19): siRNA sense strand
ggagguggaaagagcuuau

SEQ ID NO: 2369514 - RNA, 19 nt, Homo sapiens
  misc_RNA (1)...(19): siRNA sense strand
cauuauguucagaugguuu

SEQ ID NO: 2369515 - RNA, 19 nt, Homo sapiens
  misc_RNA (1)...(19): siRNA sense strand
ggacaugauuucagaccug

SEQ ID NO: 2369516 - RNA, 19 nt, Homo sapiens
  misc_RNA (1)...(19): siRNA sense strand
agaaagacucugaacaagu

SEQ ID NO: 2369517 - RNA, 19 nt, Homo sapiens
  misc_RNA (1)...(19): siRNA sense strand
ccaagagaguggacgugca

SEQ ID NO: 2369518 - RNA, 19 nt, Homo sapiens
  misc_RNA (1)...(19): siRNA sense strand
gaguggacgugcaggucga

SEQ ID NO: 2369519 - RNA, 19 nt, Homo sapiens
  misc_RNA (1)...(19): siRNA sense strand
aggucgagaugacaugaaa

SEQ ID NO: 2369520 - RNA, 19 nt, Homo sapiens
  misc_RNA (1)...(19): siRNA sense strand
ggagaagauuauugcacac

SEQ ID NO: 2369521 - RNA, 19 nt, Homo sapiens
  misc_RNA (1)...(19): siRNA sense strand
ucuaagaauacaggagcua

SEQ ID NO: 2369522 - RNA, 19 nt, Homo sapiens
  misc_RNA (1)...(19): siRNA sense strand
guucagaccacuucagcuu

SEQ ID NO: 2369523 - RNA, 19 nt, Homo sapiens
  misc_RNA (1)...(19): siRNA sense strand
ucaaugguggugauggaaa

SEQ ID NO: 2369524 - RNA, 19 nt, Homo sapiens
  misc_RNA (1)...(19): siRNA sense strand
uggagaagauuauugcaca

SEQ ID NO: 2369525 - RNA, 19 nt, Homo sapiens
  misc_RNA (1)...(19): siRNA sense strand
auuauaaggcacuugguau

SEQ ID NO: 2369526 - RNA, 19 nt, Homo sapiens
  misc_RNA (1)...(19): siRNA sense strand
agaacuuacggaaaggcaa

SEQ ID NO: 2369527 - RNA, 19 nt, Homo sapiens
  misc_RNA (1)...(19): siRNA sense strand
uuaaauggguucaugcuga

SEQ ID NO: 2369528 - RNA, 19 nt, Homo sapiens
  misc_RNA (1)...(19): siRNA sense strand
ugaagcaggcagaggaacu

SEQ ID NO: 2369529 - RNA, 19 nt, Homo sapiens
  misc_RNA (1)...(19): siRNA sense strand
uggcuggaaaggagguauu

SEQ ID NO: 2369530 - RNA, 19 nt, Homo sapiens
  misc_RNA (1)...(19): siRNA sense strand
gaguaaauccauggaaaau

SEQ ID NO: 2369531 - RNA, 19 nt, Homo sapiens
  misc_RNA (1)...(19): siRNA sense strand
gugcgauaacugcuguaaa

SEQ ID NO: 2369532 - RNA, 19 nt, Homo sapiens
  misc_RNA (1)...(19): siRNA sense strand
ccauggucugguaaaguua

SEQ ID NO: 2369533 - RNA, 19 nt, Homo sapiens
  misc_RNA (1)...(19): siRNA sense strand
aaggagauuuacucgaauu

SEQ ID NO: 2369534 - RNA, 19 nt, Homo sapiens
  misc_RNA (1)...(19): siRNA sense strand
gggcaaucaggaaucauau

SEQ ID NO: 2369535 - RNA, 19 nt, Homo sapiens
  misc_RNA (1)...(19): siRNA sense strand
guacuacggcuuuggagau

SEQ ID NO: 2369536 - RNA, 19 nt, Homo sapiens
  misc_RNA (1)...(19): siRNA sense strand
ucagaagcauguaacaaaa

SEQ ID NO: 2369537 - RNA, 19 nt, Homo sapiens
  misc_RNA (1)...(19): siRNA sense strand
acaaugaggcacaugcuau

SEQ ID NO: 2369538 - RNA, 19 nt, Homo sapiens
  misc_RNA (1)...(19): siRNA sense strand
ggagcauguuaaauggguu

SEQ ID NO: 2369539 - RNA, 19 nt, Homo sapiens
  misc_RNA (1)...(19): siRNA sense strand
aaagcaguguuuagaggau

SEQ ID NO: 2369540 - RNA, 19 nt, Homo sapiens
  misc_RNA (1)...(19): siRNA sense strand
cggagaaagaagaaagagu

SEQ ID NO: 2369541 - RNA, 19 nt, Homo sapiens
  misc_RNA (1)...(19): siRNA sense strand
gcuacuacuaagagaccua

SEQ ID NO: 2369542 - RNA, 19 nt, Homo sapiens
  misc_RNA (1)...(19): siRNA sense strand
gggacuaugaggagaugau

SEQ ID NO: 2369543 - RNA, 19 nt, Homo sapiens
  misc_RNA (1)...(19): siRNA sense strand
cagcgaggcucuuggggua

SEQ ID NO: 2369544 - RNA, 19 nt, Homo sapiens
  misc_RNA (1)...(19): siRNA sense strand
ccacagagccauccagcga

SEQ ID NO: 2369545 - RNA, 19 nt, Homo sapiens
  misc_RNA (1)...(19): siRNA sense strand
aagaguaucugcagggacu

SEQ ID NO: 2369546 - RNA, 19 nt, Homo sapiens
  misc_RNA (1)...(19): siRNA sense strand
augaaguggccgaggagca

SEQ ID NO: 2369547 - RNA, 19 nt, Homo sapiens
  misc_RNA (1)...(19): siRNA sense strand
aggagaugaugcagaucga

SEQ ID NO: 2369548 - RNA, 19 nt, Homo sapiens
  misc_RNA (1)...(19): siRNA sense strand
cugaaaacagcgagcucaa

SEQ ID NO: 2369549 - RNA, 19 nt, Homo sapiens
  misc_RNA (1)...(19): siRNA sense strand
ucucagagcaagagccagu

SEQ ID NO: 2369550 - RNA, 19 nt, Homo sapiens
  misc_RNA (1)...(19): siRNA sense strand
ugcaauugaccgacgggaa

SEQ ID NO: 2369551 - RNA, 19 nt, Homo sapiens
  misc_RNA (1)...(19): siRNA sense strand
ugccagucccggagaaaga

SEQ ID NO: 2369552 - RNA, 19 nt, Homo sapiens
  misc_RNA (1)...(19): siRNA sense strand
gguggaaacugaaaggcaa

SEQ ID NO: 2369553 - RNA, 19 nt, Homo sapiens
  misc_RNA (1)...(19): siRNA sense strand
gggagaaggccaagagcca

SEQ ID NO: 2369554 - RNA, 19 nt, Homo sapiens
  misc_RNA (1)...(19): siRNA sense strand
aggaguacacagagaauau

SEQ ID NO: 2369555 - RNA, 19 nt, Homo sapiens
  misc_RNA (1)...(19): siRNA sense strand
guggaaacugaaaggcaaa

SEQ ID NO: 2369556 - RNA, 19 nt, Homo sapiens
  misc_RNA (1)...(19): siRNA sense strand
aggccaaacugaagaaaau

SEQ ID NO: 2369557 - RNA, 19 nt, Homo sapiens
  misc_RNA (1)...(19): siRNA sense strand
cauuugacguggaggacau

SEQ ID NO: 2369558 - RNA, 19 nt, Homo sapiens
  misc_RNA (1)...(19): siRNA sense strand
uagagaaucugcugggaga

SEQ ID NO: 2369559 - RNA, 19 nt, Homo sapiens
  misc_RNA (1)...(19): siRNA sense strand
ccucuguccuggagaucaa

SEQ ID NO: 2369560 - RNA, 19 nt, Homo sapiens
  misc_RNA (1)...(19): siRNA sense strand
agauggaagcuuagaggau

SEQ ID NO: 2369561 - RNA, 19 nt, Homo sapiens
  misc_RNA (1)...(19): siRNA sense strand
cggaaggaaacaucacaaa

SEQ ID NO: 2369562 - RNA, 19 nt, Homo sapiens
  misc_RNA (1)...(19): siRNA sense strand
cuaaaaggguggaagaagu

SEQ ID NO: 2369563 - RNA, 19 nt, Homo sapiens
  misc_RNA (1)...(19): siRNA sense strand
gcuucaaggaguacacaga

SEQ ID NO: 2369564 - RNA, 19 nt, Homo sapiens
  misc_RNA (1)...(19): siRNA sense strand
agucacaccugaaggagga

SEQ ID NO: 2369565 - RNA, 19 nt, Homo sapiens
  misc_RNA (1)...(19): siRNA sense strand
gaagaagucuacagggccu

SEQ ID NO: 2369566 - RNA, 19 nt, Homo sapiens
  misc_RNA (1)...(19): siRNA sense strand
caaggaguacacagagaau

SEQ ID NO: 2369567 - RNA, 19 nt, Homo sapiens
  misc_RNA (1)...(19): siRNA sense strand
aggagaauguccauguaca

SEQ ID NO: 2369568 - RNA, 19 nt, Homo sapiens
  misc_RNA (1)...(19): siRNA sense strand
cuggagaucaauaugaaau

SEQ ID NO: 2369569 - RNA, 19 nt, Homo sapiens
  misc_RNA (1)...(19): siRNA sense strand
ggguguacuguaugaccua

SEQ ID NO: 2369570 - RNA, 19 nt, Homo sapiens
  misc_RNA (1)...(19): siRNA sense strand
ucaaacugaaccuggaaau

SEQ ID NO: 2369571 - RNA, 19 nt, Homo sapiens
  misc_RNA (1)...(19): siRNA sense strand
ccucaggcgcugggaacaa

SEQ ID NO: 2369572 - RNA, 19 nt, Homo sapiens
  misc_RNA (1)...(19): siRNA sense strand
cgguggaaacugaaaggca

SEQ ID NO: 2369573 - RNA, 19 nt, Homo sapiens
  misc_RNA (1)...(19): siRNA sense strand
ggacaugaccgcauccuca

SEQ ID NO: 2369574 - RNA, 19 nt, Homo sapiens
  misc_RNA (1)...(19): siRNA sense strand
acagagaauaugugcacca

SEQ ID NO: 2369575 - RNA, 19 nt, Homo sapiens
  misc_RNA (1)...(19): siRNA sense strand
acccagaggagcccagaaa

SEQ ID NO: 2369576 - RNA, 19 nt, Homo sapiens
  misc_RNA (1)...(19): siRNA sense strand
aaucggagcuucaaggagu

SEQ ID NO: 2369577 - RNA, 19 nt, Homo sapiens
  misc_RNA (1)...(19): siRNA sense strand
cugggauggagaagaaaca

SEQ ID NO: 2369578 - RNA, 19 nt, Homo sapiens
  misc_RNA (1)...(19): siRNA sense strand
ccucugagcucaagccugu

SEQ ID NO: 2369579 - RNA, 19 nt, Homo sapiens
  misc_RNA (1)...(19): siRNA sense strand
gagaucaaucggagcuuca

SEQ ID NO: 2369580 - RNA, 19 nt, Homo sapiens
  misc_RNA (1)...(19): siRNA sense strand
agguaguggcugucgacau

SEQ ID NO: 2369581 - RNA, 19 nt, Homo sapiens
  misc_RNA (1)...(19): siRNA sense strand
aggaaaugguucaagguca

SEQ ID NO: 2369582 - RNA, 19 nt, Homo sapiens
  misc_RNA (1)...(19): siRNA sense strand
agcuauggcuagaagggaa

SEQ ID NO: 2369583 - RNA, 19 nt, Homo sapiens
  misc_RNA (1)...(19): siRNA sense strand
ggaaaugguucaaggucac

SEQ ID NO: 2369584 - RNA, 19 nt, Homo sapiens
  misc_RNA (1)...(19): siRNA sense strand
ccugaagaucacugaaaga

SEQ ID NO: 2369585 - RNA, 19 nt, Homo sapiens
  misc_RNA (1)...(19): siRNA sense strand
gggaguugggcaaggugaa

SEQ ID NO: 2369586 - RNA, 19 nt, Homo sapiens
  misc_RNA (1)...(19): siRNA sense strand
ugaaagggcugaagcucga

SEQ ID NO: 2369587 - RNA, 19 nt, Homo sapiens
  misc_RNA (1)...(19): siRNA sense strand
ggaacacacaagaugaaaa

SEQ ID NO: 2369588 - RNA, 19 nt, Homo sapiens
  misc_RNA (1)...(19): siRNA sense strand
cgcccuacucugugaagaa

SEQ ID NO: 2369589 - RNA, 19 nt, Homo sapiens
  misc_RNA (1)...(19): siRNA sense strand
cugugaagaauaaguugaa

SEQ ID NO: 2369590 - RNA, 19 nt, Homo sapiens
  misc_RNA (1)...(19): siRNA sense strand
cgaagaaacugcauggcug

SEQ ID NO: 2369591 - RNA, 19 nt, Homo sapiens
  misc_RNA (1)...(19): siRNA sense strand
uucaaggauagcaggaaua

SEQ ID NO: 2369592 - RNA, 19 nt, Homo sapiens
  misc_RNA (1)...(19): siRNA sense strand
aagaauaaguugaagccag

SEQ ID NO: 2369593 - RNA, 19 nt, Homo sapiens
  misc_RNA (1)...(19): siRNA sense strand
augcuaaagcugaccauga

SEQ ID NO: 2369594 - RNA, 19 nt, Homo sapiens
  misc_RNA (1)...(19): siRNA sense strand
aggaaaugguucaagguca

SEQ ID NO: 2369595 - RNA, 19 nt, Homo sapiens
  misc_RNA (1)...(19): siRNA sense strand
agcuauggcuagaagggaa

SEQ ID NO: 2369596 - RNA, 19 nt, Homo sapiens
  misc_RNA (1)...(19): siRNA sense strand
ggaaaugguucaaggucac

SEQ ID NO: 2369597 - RNA, 19 nt, Homo sapiens
  misc_RNA (1)...(19): siRNA sense strand
ccugaagaucacugaaaga

SEQ ID NO: 2369598 - RNA, 19 nt, Homo sapiens
  misc_RNA (1)...(19): siRNA sense strand
gggaguugggcaaggugaa

SEQ ID NO: 2369599 - RNA, 19 nt, Homo sapiens
  misc_RNA (1)...(19): siRNA sense strand
ugaaagggcugaagcucga

SEQ ID NO: 2369600 - RNA, 19 nt, Homo sapiens
  misc_RNA (1)...(19): siRNA sense strand
ggaacacacaagaugaaaa

SEQ ID NO: 2369601 - RNA, 19 nt, Homo sapiens
  misc_RNA (1)...(19): siRNA sense strand
cgcccuacucugugaagaa

SEQ ID NO: 2369602 - RNA, 19 nt, Homo sapiens
  misc_RNA (1)...(19): siRNA sense strand
cugugaagaauaaguugaa

SEQ ID NO: 2369603 - RNA, 19 nt, Homo sapiens
  misc_RNA (1)...(19): siRNA sense strand
cgaagaaacugcauggcug

SEQ ID NO: 2369604 - RNA, 19 nt, Homo sapiens
  misc_RNA (1)...(19): siRNA sense strand
uucaaggauagcaggaaua

SEQ ID NO: 2369605 - RNA, 19 nt, Homo sapiens
  misc_RNA (1)...(19): siRNA sense strand
aagaauaaguugaagccag

SEQ ID NO: 2369606 - RNA, 19 nt, Homo sapiens
  misc_RNA (1)...(19): siRNA sense strand
augcuaaagcugaccauga

SEQ ID NO: 2369607 - RNA, 19 nt, Homo sapiens
  misc_RNA (1)...(19): siRNA sense strand
aggaaaugguucaagguca

SEQ ID NO: 2369608 - RNA, 19 nt, Homo sapiens
  misc_RNA (1)...(19): siRNA sense strand
ggaaaugguucaaggucac

SEQ ID NO: 2369609 - RNA, 19 nt, Homo sapiens
  misc_RNA (1)...(19): siRNA sense strand
ccugaagaucacugaaaga

SEQ ID NO: 2369610 - RNA, 19 nt, Homo sapiens
  misc_RNA (1)...(19): siRNA sense strand
ggaacacacaagaugaaaa

SEQ ID NO: 2369611 - RNA, 19 nt, Homo sapiens
  misc_RNA (1)...(19): siRNA sense strand
cgcccuacucugugaagaa

SEQ ID NO: 2369612 - RNA, 19 nt, Homo sapiens
  misc_RNA (1)...(19): siRNA sense strand
cugugaagaauaaguugaa

SEQ ID NO: 2369613 - RNA, 19 nt, Homo sapiens
  misc_RNA (1)...(19): siRNA sense strand
cgaagaaacugcauggcug

SEQ ID NO: 2369614 - RNA, 19 nt, Homo sapiens
  misc_RNA (1)...(19): siRNA sense strand
aagaauaaguugaagccag

SEQ ID NO: 2369615 - RNA, 19 nt, Homo sapiens
  misc_RNA (1)...(19): siRNA sense strand
augcuaaagcugaccauga

SEQ ID NO: 2369616 - RNA, 19 nt, Homo sapiens
  misc_RNA (1)...(19): siRNA sense strand
aggaaaugguucaagguca

SEQ ID NO: 2369617 - RNA, 19 nt, Homo sapiens
  misc_RNA (1)...(19): siRNA sense strand
agcuauggcuagaagggaa

SEQ ID NO: 2369618 - RNA, 19 nt, Homo sapiens
  misc_RNA (1)...(19): siRNA sense strand
ggaaaugguucaaggucac

SEQ ID NO: 2369619 - RNA, 19 nt, Homo sapiens
  misc_RNA (1)...(19): siRNA sense strand
ccugaagaucacugaaaga

SEQ ID NO: 2369620 - RNA, 19 nt, Homo sapiens
  misc_RNA (1)...(19): siRNA sense strand
gggaguugggcaaggugaa

SEQ ID NO: 2369621 - RNA, 19 nt, Homo sapiens
  misc_RNA (1)...(19): siRNA sense strand
ugaaagggcugaagcucga

SEQ ID NO: 2369622 - RNA, 19 nt, Homo sapiens
  misc_RNA (1)...(19): siRNA sense strand
ggaacacacaagaugaaaa

SEQ ID NO: 2369623 - RNA, 19 nt, Homo sapiens
  misc_RNA (1)...(19): siRNA sense strand
cgcccuacucugugaagaa

SEQ ID NO: 2369624 - RNA, 19 nt, Homo sapiens
  misc_RNA (1)...(19): siRNA sense strand
cugugaagaauaaguugaa

SEQ ID NO: 2369625 - RNA, 19 nt, Homo sapiens
  misc_RNA (1)...(19): siRNA sense strand
cgaagaaacugcauggcug

SEQ ID NO: 2369626 - RNA, 19 nt, Homo sapiens
  misc_RNA (1)...(19): siRNA sense strand
uucaaggauagcaggaaua

SEQ ID NO: 2369627 - RNA, 19 nt, Homo sapiens
  misc_RNA (1)...(19): siRNA sense strand
aagaauaaguugaagccag

SEQ ID NO: 2369628 - RNA, 19 nt, Homo sapiens
  misc_RNA (1)...(19): siRNA sense strand
augcuaaagcugaccauga

SEQ ID NO: 2369629 - RNA, 19 nt, Homo sapiens
  misc_RNA (1)...(19): siRNA sense strand
aggaaaugguucaagguca

SEQ ID NO: 2369630 - RNA, 19 nt, Homo sapiens
  misc_RNA (1)...(19): siRNA sense strand
agcuauggcuagaagggaa

SEQ ID NO: 2369631 - RNA, 19 nt, Homo sapiens
  misc_RNA (1)...(19): siRNA sense strand
ggaaaugguucaaggucac

SEQ ID NO: 2369632 - RNA, 19 nt, Homo sapiens
  misc_RNA (1)...(19): siRNA sense strand
ccugaagaucacugaaaga

SEQ ID NO: 2369633 - RNA, 19 nt, Homo sapiens
  misc_RNA (1)...(19): siRNA sense strand
gggaguugggcaaggugaa

SEQ ID NO: 2369634 - RNA, 19 nt, Homo sapiens
  misc_RNA (1)...(19): siRNA sense strand
ugaaagggcugaagcucga

SEQ ID NO: 2369635 - RNA, 19 nt, Homo sapiens
  misc_RNA (1)...(19): siRNA sense strand
ggaacacacaagaugaaaa

SEQ ID NO: 2369636 - RNA, 19 nt, Homo sapiens
  misc_RNA (1)...(19): siRNA sense strand
cgcccuacucugugaagaa

SEQ ID NO: 2369637 - RNA, 19 nt, Homo sapiens
  misc_RNA (1)...(19): siRNA sense strand
cugugaagaauaaguugaa

SEQ ID NO: 2369638 - RNA, 19 nt, Homo sapiens
  misc_RNA (1)...(19): siRNA sense strand
cgaagaaacugcauggcug

SEQ ID NO: 2369639 - RNA, 19 nt, Homo sapiens
  misc_RNA (1)...(19): siRNA sense strand
uucaaggauagcaggaaua

SEQ ID NO: 2369640 - RNA, 19 nt, Homo sapiens
  misc_RNA (1)...(19): siRNA sense strand
aagaauaaguugaagccag

SEQ ID NO: 2369641 - RNA, 19 nt, Homo sapiens
  misc_RNA (1)...(19): siRNA sense strand
augcuaaagcugaccauga

SEQ ID NO: 2369642 - RNA, 19 nt, Homo sapiens
  misc_RNA (1)...(19): siRNA sense strand
guuccagaucccagaguuu

SEQ ID NO: 2369643 - RNA, 19 nt, Homo sapiens
  misc_RNA (1)...(19): siRNA sense strand
cggaggacgacgaagggau

SEQ ID NO: 2369644 - RNA, 19 nt, Homo sapiens
  misc_RNA (1)...(19): siRNA sense strand
guuccagaucccagaguuu

SEQ ID NO: 2369645 - RNA, 19 nt, Homo sapiens
  misc_RNA (1)...(19): siRNA sense strand
cggaggacgacgaagggau

SEQ ID NO: 2369646 - RNA, 19 nt, Homo sapiens
  misc_RNA (1)...(19): siRNA sense strand
cuauaacaacaguggcaaa

SEQ ID NO: 2369647 - RNA, 19 nt, Homo sapiens
  misc_RNA (1)...(19): siRNA sense strand
gcuacuacaacgagaccau

SEQ ID NO: 2369648 - RNA, 19 nt, Homo sapiens
  misc_RNA (1)...(19): siRNA sense strand
ucuacuaccugcucggcaa

SEQ ID NO: 2369649 - RNA, 19 nt, Homo sapiens
  misc_RNA (1)...(19): siRNA sense strand
aggccaacucacuggucaa

SEQ ID NO: 2369650 - RNA, 19 nt, Homo sapiens
  misc_RNA (1)...(19): siRNA sense strand
caacaguggcaaagagcuc

SEQ ID NO: 2369651 - RNA, 19 nt, Homo sapiens
  misc_RNA (1)...(19): siRNA sense strand
gggaugagauugaggagcu

SEQ ID NO: 2369652 - RNA, 19 nt, Homo sapiens
  misc_RNA (1)...(19): siRNA sense strand
gggaugguguccacggcaa

SEQ ID NO: 2369653 - RNA, 19 nt, Homo sapiens
  misc_RNA (1)...(19): siRNA sense strand
ccguaagcccagcagggaa

SEQ ID NO: 2369654 - RNA, 19 nt, Homo sapiens
  misc_RNA (1)...(19): siRNA sense strand
ggaagaauuucaaaggccu

SEQ ID NO: 2369655 - RNA, 19 nt, Homo sapiens
  misc_RNA (1)...(19): siRNA sense strand
acaagauccgccugaacaa

SEQ ID NO: 2369656 - RNA, 19 nt, Homo sapiens
  misc_RNA (1)...(19): siRNA sense strand
gggaugagauugaggagcu

SEQ ID NO: 2369657 - RNA, 19 nt, Homo sapiens
  misc_RNA (1)...(19): siRNA sense strand
gggaugguguccacggcaa

SEQ ID NO: 2369658 - RNA, 19 nt, Homo sapiens
  misc_RNA (1)...(19): siRNA sense strand
ccguaagcccagcagggaa

SEQ ID NO: 2369659 - RNA, 19 nt, Homo sapiens
  misc_RNA (1)...(19): siRNA sense strand
ggaagaauuucaaaggccu

SEQ ID NO: 2369660 - RNA, 19 nt, Homo sapiens
  misc_RNA (1)...(19): siRNA sense strand
acaagauccgccugaacaa

SEQ ID NO: 2369661 - RNA, 19 nt, Homo sapiens
  misc_RNA (1)...(19): siRNA sense strand
gggaugagauugaggagcu

SEQ ID NO: 2369662 - RNA, 19 nt, Homo sapiens
  misc_RNA (1)...(19): siRNA sense strand
gggaugguguccacggcaa

SEQ ID NO: 2369663 - RNA, 19 nt, Homo sapiens
  misc_RNA (1)...(19): siRNA sense strand
ccguaagcccagcagggaa

SEQ ID NO: 2369664 - RNA, 19 nt, Homo sapiens
  misc_RNA (1)...(19): siRNA sense strand
ggaagaauuucaaaggccu

SEQ ID NO: 2369665 - RNA, 19 nt, Homo sapiens
  misc_RNA (1)...(19): siRNA sense strand
acaagauccgccugaacaa

SEQ ID NO: 2369666 - RNA, 19 nt, Homo sapiens
  misc_RNA (1)...(19): siRNA sense strand
gggaugagauugaggagcu

SEQ ID NO: 2369667 - RNA, 19 nt, Homo sapiens
  misc_RNA (1)...(19): siRNA sense strand
gggaugguguccacggcaa

SEQ ID NO: 2369668 - RNA, 19 nt, Homo sapiens
  misc_RNA (1)...(19): siRNA sense strand
ccguaagcccagcagggaa

SEQ ID NO: 2369669 - RNA, 19 nt, Homo sapiens
  misc_RNA (1)...(19): siRNA sense strand
ggaagaauuucaaaggccu

SEQ ID NO: 2369670 - RNA, 19 nt, Homo sapiens
  misc_RNA (1)...(19): siRNA sense strand
acaagauccgccugaacaa

SEQ ID NO: 2369671 - RNA, 19 nt, Homo sapiens
  misc_RNA (1)...(19): siRNA sense strand
ccguaagcccagcagggaa

SEQ ID NO: 2369672 - RNA, 19 nt, Homo sapiens
  misc_RNA (1)...(19): siRNA sense strand
ggaagaauuucaaaggccu

SEQ ID NO: 2369673 - RNA, 19 nt, Homo sapiens
  misc_RNA (1)...(19): siRNA sense strand
acaagauccgccugaacaa

SEQ ID NO: 2369674 - RNA, 19 nt, Homo sapiens
  misc_RNA (1)...(19): siRNA sense strand
gagaagagaugucgggcua

SEQ ID NO: 2369675 - RNA, 19 nt, Homo sapiens
  misc_RNA (1)...(19): siRNA sense strand
ggaacaaggagcagcgaga

SEQ ID NO: 2369676 - RNA, 19 nt, Homo sapiens
  misc_RNA (1)...(19): siRNA sense strand
aggugaagcagcuggacaa

SEQ ID NO: 2369677 - RNA, 19 nt, Homo sapiens
  misc_RNA (1)...(19): siRNA sense strand
aggcgcuggaggagaauaa

SEQ ID NO: 2369678 - RNA, 19 nt, Homo sapiens
  misc_RNA (1)...(19): siRNA sense strand
gggacauggaggugaagca

SEQ ID NO: 2369679 - RNA, 19 nt, Homo sapiens
  misc_RNA (1)...(19): siRNA sense strand
ccgccuacaaggagaagau

SEQ ID NO: 2369680 - RNA, 19 nt, Homo sapiens
  misc_RNA (1)...(19): siRNA sense strand
aggagaagaugaaggagcu

SEQ ID NO: 2369681 - RNA, 19 nt, Homo sapiens
  misc_RNA (1)...(19): siRNA sense strand
aggcggaggagaagcucaa

SEQ ID NO: 2369682 - RNA, 19 nt, Homo sapiens
  misc_RNA (1)...(19): siRNA sense strand
ccacccaagaagaaggaca

SEQ ID NO: 2369683 - RNA, 19 nt, Homo sapiens
  misc_RNA (1)...(19): siRNA sense strand
acaagauggagcucagcaa

SEQ ID NO: 2369684 - RNA, 19 nt, Homo sapiens
  misc_RNA (1)...(19): siRNA sense strand
acuccaagaccaagaacaa

SEQ ID NO: 2369685 - RNA, 19 nt, Homo sapiens
  misc_RNA (1)...(19): siRNA sense strand
ccaccgaggagaaagggaa

SEQ ID NO: 2369686 - RNA, 19 nt, Homo sapiens
  misc_RNA (1)...(19): siRNA sense strand
gaccaggaguguacgggaa

SEQ ID NO: 2369687 - RNA, 19 nt, Homo sapiens
  misc_RNA (1)...(19): siRNA sense strand
acgacuggaacgagaacua

SEQ ID NO: 2369688 - RNA, 19 nt, Homo sapiens
  misc_RNA (1)...(19): siRNA sense strand
ccggauaccaaguagaaaa

SEQ ID NO: 2369689 - RNA, 19 nt, Homo sapiens
  misc_RNA (1)...(19): siRNA sense strand
aacaauaucugguggcuga

SEQ ID NO: 2369690 - RNA, 19 nt, Homo sapiens
  misc_RNA (1)...(19): siRNA sense strand
aaaugagggcagacggcua

SEQ ID NO: 2369691 - RNA, 19 nt, Homo sapiens
  misc_RNA (1)...(19): siRNA sense strand
acaugggcuauaagaauaa

SEQ ID NO: 2369692 - RNA, 19 nt, Homo sapiens
  misc_RNA (1)...(19): siRNA sense strand
caagacgacuggaacgaga

SEQ ID NO: 2369693 - RNA, 19 nt, Homo sapiens
  misc_RNA (1)...(19): siRNA sense strand
cuuaacaauccauggcauu

SEQ ID NO: 2369694 - RNA, 19 nt, Homo sapiens
  misc_RNA (1)...(19): siRNA sense strand
acacagagaugcaacagca

SEQ ID NO: 2369695 - RNA, 19 nt, Homo sapiens
  misc_RNA (1)...(19): siRNA sense strand
ccugcagggacaugggcua

SEQ ID NO: 2369696 - RNA, 19 nt, Homo sapiens
  misc_RNA (1)...(19): siRNA sense strand
cggacuggauuuaucgaca

SEQ ID NO: 2369697 - RNA, 19 nt, Homo sapiens
  misc_RNA (1)...(19): siRNA sense strand
aauuaugacuccaagacca

SEQ ID NO: 2369698 - RNA, 19 nt, Homo sapiens
  misc_RNA (1)...(19): siRNA sense strand
agaccaagaacaaugacau

SEQ ID NO: 2369699 - RNA, 19 nt, Homo sapiens
  misc_RNA (1)...(19): siRNA sense strand
uagccaaggaauaguggau

SEQ ID NO: 2369700 - RNA, 19 nt, Homo sapiens
  misc_RNA (1)...(19): siRNA sense strand
gcggggauuuugagacaau

SEQ ID NO: 2369701 - RNA, 19 nt, Homo sapiens
  misc_RNA (1)...(19): siRNA sense strand
agaagaacguggagaagaa

SEQ ID NO: 2369702 - RNA, 19 nt, Homo sapiens
  misc_RNA (1)...(19): siRNA sense strand
ccgagaagaacguggagaa

SEQ ID NO: 2369703 - RNA, 19 nt, Homo sapiens
  misc_RNA (1)...(19): siRNA sense strand
ggagaagaaaauugacaaa

SEQ ID NO: 2369704 - RNA, 19 nt, Homo sapiens
  misc_RNA (1)...(19): siRNA sense strand
caucaacauuucuggcaau

SEQ ID NO: 2369705 - RNA, 19 nt, Homo sapiens
  misc_RNA (1)...(19): siRNA sense strand
gcaucaacauuucuggcaa

SEQ ID NO: 2369706 - RNA, 19 nt, Homo sapiens
  misc_RNA (1)...(19): siRNA sense strand
cagccacccuggaggagaa

SEQ ID NO: 2369707 - RNA, 19 nt, Homo sapiens
  misc_RNA (1)...(19): siRNA sense strand
agaaacagcucaugaggcu

SEQ ID NO: 2369708 - RNA, 19 nt, Homo sapiens
  misc_RNA (1)...(19): siRNA sense strand
cccuggaggagaagaggaa

SEQ ID NO: 2369709 - RNA, 19 nt, Homo sapiens
  misc_RNA (1)...(19): siRNA sense strand
gagaagaacguggagaaga

SEQ ID NO: 2369710 - RNA, 19 nt, Homo sapiens
  misc_RNA (1)...(19): siRNA sense strand
aagagaaagccaagaucca

SEQ ID NO: 2369711 - RNA, 19 nt, Homo sapiens
  misc_RNA (1)...(19): siRNA sense strand
cuacaagaaaguuugccua

SEQ ID NO: 2369712 - RNA, 19 nt, Homo sapiens
  misc_RNA (1)...(19): siRNA sense strand
agaggaaagagaaagccaa

SEQ ID NO: 2369713 - RNA, 19 nt, Homo sapiens
  misc_RNA (1)...(19): siRNA sense strand
cggaagaagaaacagcuca

SEQ ID NO: 2369714 - RNA, 19 nt, Homo sapiens
  misc_RNA (1)...(19): siRNA sense strand
acaaauacacagagguccu

SEQ ID NO: 2369715 - RNA, 19 nt, Homo sapiens
  misc_RNA (1)...(19): siRNA sense strand
aguugaaguaccuggcuuu

SEQ ID NO: 2369716 - RNA, 19 nt, Homo sapiens
  misc_RNA (1)...(19): siRNA sense strand
ccaagauccacuaccggaa

SEQ ID NO: 2369717 - RNA, 19 nt, Homo sapiens
  misc_RNA (1)...(19): siRNA sense strand
ccauuaacaaggacaccaa

SEQ ID NO: 2369718 - RNA, 19 nt, Homo sapiens
  misc_RNA (1)...(19): siRNA sense strand
aagaccacacacugggaaa

SEQ ID NO: 2369719 - RNA, 19 nt, Homo sapiens
  misc_RNA (1)...(19): siRNA sense strand
guuuauucaccaucaacaa

SEQ ID NO: 2369720 - RNA, 19 nt, Homo sapiens
  misc_RNA (1)...(19): siRNA sense strand
ccauuaacaaggacaccaa

SEQ ID NO: 2369721 - RNA, 19 nt, Homo sapiens
  misc_RNA (1)...(19): siRNA sense strand
aagaccacacacugggaaa

SEQ ID NO: 2369722 - RNA, 19 nt, Homo sapiens
  misc_RNA (1)...(19): siRNA sense strand
guuuauucaccaucaacaa

SEQ ID NO: 2369723 - RNA, 19 nt, Homo sapiens
  misc_RNA (1)...(19): siRNA sense strand
ccauuaacaaggacaccaa

SEQ ID NO: 2369724 - RNA, 19 nt, Homo sapiens
  misc_RNA (1)...(19): siRNA sense strand
aagaccacacacugggaaa

SEQ ID NO: 2369725 - RNA, 19 nt, Homo sapiens
  misc_RNA (1)...(19): siRNA sense strand
guuuauucaccaucaacaa

SEQ ID NO: 2369726 - RNA, 19 nt, Homo sapiens
  misc_RNA (1)...(19): siRNA sense strand
gugcagagaagcaggcaaa

SEQ ID NO: 2369727 - RNA, 19 nt, Homo sapiens
  misc_RNA (1)...(19): siRNA sense strand
acagcaaaguggaggagaa

SEQ ID NO: 2369728 - RNA, 19 nt, Homo sapiens
  misc_RNA (1)...(19): siRNA sense strand
ccaugaaggaagugaccua

SEQ ID NO: 2369729 - RNA, 19 nt, Homo sapiens
  misc_RNA (1)...(19): siRNA sense strand
ucagaaaguaggagcagaa

SEQ ID NO: 2369730 - RNA, 19 nt, Homo sapiens
  misc_RNA (1)...(19): siRNA sense strand
aaaagaagguagaaagcaa

SEQ ID NO: 2369731 - RNA, 19 nt, Homo sapiens
  misc_RNA (1)...(19): siRNA sense strand
gguagaaagcaaauccaaa

SEQ ID NO: 2369732 - RNA, 19 nt, Homo sapiens
  misc_RNA (1)...(19): siRNA sense strand
ggcaagagcucgaagacca

SEQ ID NO: 2369733 - RNA, 19 nt, Homo sapiens
  misc_RNA (1)...(19): siRNA sense strand
cuucuaaaggaaaguguaa

SEQ ID NO: 2369734 - RNA, 19 nt, Homo sapiens
  misc_RNA (1)...(19): siRNA sense strand
gagaagaggcaucaggaga

SEQ ID NO: 2369735 - RNA, 19 nt, Homo sapiens
  misc_RNA (1)...(19): siRNA sense strand
ucuaacaugcagagugaaa

SEQ ID NO: 2369736 - RNA, 19 nt, Homo sapiens
  misc_RNA (1)...(19): siRNA sense strand
aggaagugccaaaggguga

SEQ ID NO: 2369737 - RNA, 19 nt, Homo sapiens
  misc_RNA (1)...(19): siRNA sense strand
ccuuauugaaguuggcuua

SEQ ID NO: 2369738 - RNA, 19 nt, Homo sapiens
  misc_RNA (1)...(19): siRNA sense strand
acaggaagcaauucagaaa

SEQ ID NO: 2369739 - RNA, 19 nt, Homo sapiens
  misc_RNA (1)...(19): siRNA sense strand
agauagugaagaaggagaa

SEQ ID NO: 2369740 - RNA, 19 nt, Homo sapiens
  misc_RNA (1)...(19): siRNA sense strand
ugaagaaggagaaggacuu

SEQ ID NO: 2369741 - RNA, 19 nt, Homo sapiens
  misc_RNA (1)...(19): siRNA sense strand
gagcggaggacaaaggcaa

SEQ ID NO: 2369742 - RNA, 19 nt, Homo sapiens
  misc_RNA (1)...(19): siRNA sense strand
caguaacagaggugaaaga

SEQ ID NO: 2369743 - RNA, 19 nt, Homo sapiens
  misc_RNA (1)...(19): siRNA sense strand
ucagaacacaagagagaau

SEQ ID NO: 2369744 - RNA, 19 nt, Homo sapiens
  misc_RNA (1)...(19): siRNA sense strand
gugauuaccuggucgguga

SEQ ID NO: 2369745 - RNA, 19 nt, Homo sapiens
  misc_RNA (1)...(19): siRNA sense strand
aggagaacgcccauauaaa

SEQ ID NO: 2369746 - RNA, 19 nt, Homo sapiens
  misc_RNA (1)...(19): siRNA sense strand
gugcauacaggaagcaauu

SEQ ID NO: 2369747 - RNA, 19 nt, Homo sapiens
  misc_RNA (1)...(19): siRNA sense strand
aaacaauggaugucucaaa

SEQ ID NO: 2369748 - RNA, 19 nt, Homo sapiens
  misc_RNA (1)...(19): siRNA sense strand
gcuuagugccuguuaaaga

SEQ ID NO: 2369749 - RNA, 19 nt, Homo sapiens
  misc_RNA (1)...(19): siRNA sense strand
aaucaguaacagaggugaa

SEQ ID NO: 2369750 - RNA, 19 nt, Homo sapiens
  misc_RNA (1)...(19): siRNA sense strand
ugccaaagggugacagcaa

SEQ ID NO: 2369751 - RNA, 19 nt, Homo sapiens
  misc_RNA (1)...(19): siRNA sense strand
gugaagaaggagaaggacu

SEQ ID NO: 2369752 - RNA, 19 nt, Homo sapiens
  misc_RNA (1)...(19): siRNA sense strand
gcaagagcucgaagaccaa

SEQ ID NO: 2369753 - RNA, 19 nt, Homo sapiens
  misc_RNA (1)...(19): siRNA sense strand
cagcaaaguggaggagaau

SEQ ID NO: 2369754 - RNA, 19 nt, Homo sapiens
  misc_RNA (1)...(19): siRNA sense strand
ugaaagagauggaugugca

SEQ ID NO: 2369755 - RNA, 19 nt, Homo sapiens
  misc_RNA (1)...(19): siRNA sense strand
aggaaauugaugaagauga

SEQ ID NO: 2369756 - RNA, 19 nt, Homo sapiens
  misc_RNA (1)...(19): siRNA sense strand
ugaauacgccagaggguga

SEQ ID NO: 2369757 - RNA, 19 nt, Homo sapiens
  misc_RNA (1)...(19): siRNA sense strand
acaagaaucuagcagaaaa

SEQ ID NO: 2369758 - RNA, 19 nt, Homo sapiens
  misc_RNA (1)...(19): siRNA sense strand
aagaaagacagauggcaga

SEQ ID NO: 2369759 - RNA, 19 nt, Homo sapiens
  misc_RNA (1)...(19): siRNA sense strand
guaacagaggugaaagaga

SEQ ID NO: 2369760 - RNA, 19 nt, Homo sapiens
  misc_RNA (1)...(19): siRNA sense strand
uguuaaagauagcuggcuu

SEQ ID NO: 2369761 - RNA, 19 nt, Homo sapiens
  misc_RNA (1)...(19): siRNA sense strand
aaagaagguagaaagcaaa

SEQ ID NO: 2369762 - RNA, 19 nt, Homo sapiens
  misc_RNA (1)...(19): siRNA sense strand
cuacaauggcagcaaauga

SEQ ID NO: 2369763 - RNA, 19 nt, Homo sapiens
  misc_RNA (1)...(19): siRNA sense strand
aggugaaggaaauaaagaa

SEQ ID NO: 2369764 - RNA, 19 nt, Homo sapiens
  misc_RNA (1)...(19): siRNA sense strand
ccacugcagaagagggaga

SEQ ID NO: 2369765 - RNA, 19 nt, Homo sapiens
  misc_RNA (1)...(19): siRNA sense strand
guagaaagcaaauccaaaa

SEQ ID NO: 2369766 - RNA, 19 nt, Homo sapiens
  misc_RNA (1)...(19): siRNA sense strand
aguagaagaacgugaagca

SEQ ID NO: 2369767 - RNA, 19 nt, Homo sapiens
  misc_RNA (1)...(19): siRNA sense strand
ucuaauaaugugucaguga

SEQ ID NO: 2369768 - RNA, 19 nt, Homo sapiens
  misc_RNA (1)...(19): siRNA sense strand
aaaggaaaguguaagcaca

SEQ ID NO: 2369769 - RNA, 19 nt, Homo sapiens
  misc_RNA (1)...(19): siRNA sense strand
agggaaaagauuacagcaa

SEQ ID NO: 2369770 - RNA, 19 nt, Homo sapiens
  misc_RNA (1)...(19): siRNA sense strand
ggaaaagauuacagcaaac

SEQ ID NO: 2369771 - RNA, 19 nt, Homo sapiens
  misc_RNA (1)...(19): siRNA sense strand
aguucacagugcuaagaaa

SEQ ID NO: 2369772 - RNA, 19 nt, Homo sapiens
  misc_RNA (1)...(19): siRNA sense strand
ucaacacaggugaaggaaa

SEQ ID NO: 2369773 - RNA, 19 nt, Homo sapiens
  misc_RNA (1)...(19): siRNA sense strand
cagcaguagaagaacguga

SEQ ID NO: 2369774 - RNA, 19 nt, Homo sapiens
  misc_RNA (1)...(19): siRNA sense strand
uggaagagagugcagagaa

SEQ ID NO: 2369775 - RNA, 19 nt, Homo sapiens
  misc_RNA (1)...(19): siRNA sense strand
ucagaaagggaaaagauua

SEQ ID NO: 2369776 - RNA, 19 nt, Homo sapiens
  misc_RNA (1)...(19): siRNA sense strand
guucacagugcuaagaaau

SEQ ID NO: 2369777 - RNA, 19 nt, Homo sapiens
  misc_RNA (1)...(19): siRNA sense strand
cagaagacucaucuaacua

SEQ ID NO: 2369778 - RNA, 19 nt, Homo sapiens
  misc_RNA (1)...(19): siRNA sense strand
cagauagugaagaaggaga

SEQ ID NO: 2369779 - RNA, 19 nt, Homo sapiens
  misc_RNA (1)...(19): siRNA sense strand
aaguguaagcacagaggau

SEQ ID NO: 2369780 - RNA, 19 nt, Homo sapiens
  misc_RNA (1)...(19): siRNA sense strand
ccaccacugccaaaggaaa

SEQ ID NO: 2369781 - RNA, 19 nt, Homo sapiens
  misc_RNA (1)...(19): siRNA sense strand
augccaauaugaagcagaa

SEQ ID NO: 2369782 - RNA, 19 nt, Homo sapiens
  misc_RNA (1)...(19): siRNA sense strand
uuacaaaacagcagauaga

SEQ ID NO: 2369783 - RNA, 19 nt, Homo sapiens
  misc_RNA (1)...(19): siRNA sense strand
aaauuuaagagaagaggca

SEQ ID NO: 2369784 - RNA, 19 nt, Homo sapiens
  misc_RNA (1)...(19): siRNA sense strand
caccuggagcggaggacaa

SEQ ID NO: 2369785 - RNA, 19 nt, Homo sapiens
  misc_RNA (1)...(19): siRNA sense strand
aguauacacauguggaaaa

SEQ ID NO: 2369786 - RNA, 19 nt, Homo sapiens
  misc_RNA (1)...(19): siRNA sense strand
guguaagcacagaggaucu

SEQ ID NO: 2369787 - RNA, 19 nt, Homo sapiens
  misc_RNA (1)...(19): siRNA sense strand
cggaagaagaugauggaaa

SEQ ID NO: 2369788 - RNA, 19 nt, Homo sapiens
  misc_RNA (1)...(19): siRNA sense strand
ggaagaagaugauggaaau

SEQ ID NO: 2369789 - RNA, 19 nt, Homo sapiens
  misc_RNA (1)...(19): siRNA sense strand
agacaaaugacuugaaaga

SEQ ID NO: 2369790 - RNA, 19 nt, Homo sapiens
  misc_RNA (1)...(19): siRNA sense strand
cccgagaggugcagacaaa

SEQ ID NO: 2369791 - RNA, 19 nt, Homo sapiens
  misc_RNA (1)...(19): siRNA sense strand
aggcaguaguucuggaaaa

SEQ ID NO: 2369792 - RNA, 19 nt, Homo sapiens
  misc_RNA (1)...(19): siRNA sense strand
acaaaugacuugaaagaag

SEQ ID NO: 2369793 - RNA, 19 nt, Homo sapiens
  misc_RNA (1)...(19): siRNA sense strand
cgccaaauccggaagaaga

SEQ ID NO: 2369794 - RNA, 19 nt, Homo sapiens
  misc_RNA (1)...(19): siRNA sense strand
gcugauuacugaagauguu

SEQ ID NO: 2369795 - RNA, 19 nt, Homo sapiens
  misc_RNA (1)...(19): siRNA sense strand
cagcauuggaaaagacaua

SEQ ID NO: 2369796 - RNA, 19 nt, Homo sapiens
  misc_RNA (1)...(19): siRNA sense strand
gcagacaaaugacuugaaa

SEQ ID NO: 2369797 - RNA, 19 nt, Homo sapiens
  misc_RNA (1)...(19): siRNA sense strand
gcaacaaucagauacggaa

SEQ ID NO: 2369798 - RNA, 19 nt, Homo sapiens
  misc_RNA (1)...(19): siRNA sense strand
uugaacgagcugauggaua

SEQ ID NO: 2369799 - RNA, 19 nt, Homo sapiens
  misc_RNA (1)...(19): siRNA sense strand
augaugucuucguuagaaa

SEQ ID NO: 2369800 - RNA, 19 nt, Homo sapiens
  misc_RNA (1)...(19): siRNA sense strand
ugacuaacuuccauggcau

SEQ ID NO: 2369801 - RNA, 19 nt, Homo sapiens
  misc_RNA (1)...(19): siRNA sense strand
uggaaaagacauagaaaag

SEQ ID NO: 2369802 - RNA, 19 nt, Homo sapiens
  misc_RNA (1)...(19): siRNA sense strand
aggcaguaguucuggaaaa

SEQ ID NO: 2369803 - RNA, 19 nt, Homo sapiens
  misc_RNA (1)...(19): siRNA sense strand
cagcauuggaaaagacaua

SEQ ID NO: 2369804 - RNA, 19 nt, Homo sapiens
  misc_RNA (1)...(19): siRNA sense strand
uugaacgagcugauggaua

SEQ ID NO: 2369805 - RNA, 19 nt, Homo sapiens
  misc_RNA (1)...(19): siRNA sense strand
augaugucuucguuagaaa

SEQ ID NO: 2369806 - RNA, 19 nt, Homo sapiens
  misc_RNA (1)...(19): siRNA sense strand
uggaaaagacauagaaaag

SEQ ID NO: 2369807 - RNA, 19 nt, Homo sapiens
  misc_RNA (1)...(19): siRNA sense strand
ggaaguacguccuggggua

SEQ ID NO: 2369808 - RNA, 19 nt, Homo sapiens
  misc_RNA (1)...(19): siRNA sense strand
gggcacagcaugcggaaaa

SEQ ID NO: 2369809 - RNA, 19 nt, Homo sapiens
  misc_RNA (1)...(19): siRNA sense strand
gcuuugaggaaaucugaaa

SEQ ID NO: 2369810 - RNA, 19 nt, Homo sapiens
  misc_RNA (1)...(19): siRNA sense strand
ggaaaucugaaauagagua

SEQ ID NO: 2369811 - RNA, 19 nt, Homo sapiens
  misc_RNA (1)...(19): siRNA sense strand
ugaggaaaucugaaauaga

SEQ ID NO: 2369812 - RNA, 19 nt, Homo sapiens
  misc_RNA (1)...(19): siRNA sense strand
ggcuaaaacugguguccau

SEQ ID NO: 2369813 - RNA, 19 nt, Homo sapiens
  misc_RNA (1)...(19): siRNA sense strand
ugcccagcuuugaggaaau

SEQ ID NO: 2369814 - RNA, 19 nt, Homo sapiens
  misc_RNA (1)...(19): siRNA sense strand
cagagaaaucccuggccaa

SEQ ID NO: 2369815 - RNA, 19 nt, Homo sapiens
  misc_RNA (1)...(19): siRNA sense strand
ugcucaacaaggagaacaa

SEQ ID NO: 2369816 - RNA, 19 nt, Homo sapiens
  misc_RNA (1)...(19): siRNA sense strand
ugagauuagaagugugaaa

SEQ ID NO: 2369817 - RNA, 19 nt, Homo sapiens
  misc_RNA (1)...(19): siRNA sense strand
ccugugugccuuugggaaa

SEQ ID NO: 2369818 - RNA, 19 nt, Homo sapiens
  misc_RNA (1)...(19): siRNA sense strand
acuccagaauaaugagcaa

SEQ ID NO: 2369819 - RNA, 19 nt, Homo sapiens
  misc_RNA (1)...(19): siRNA sense strand
ccuugauaguguugauaca

SEQ ID NO: 2369820 - RNA, 19 nt, Homo sapiens
  misc_RNA (1)...(19): siRNA sense strand
aagagaaacuaggggaaaa

SEQ ID NO: 2369821 - RNA, 19 nt, Homo sapiens
  misc_RNA (1)...(19): siRNA sense strand
gugaaucgguggaagggca

SEQ ID NO: 2369822 - RNA, 19 nt, Homo sapiens
  misc_RNA (1)...(19): siRNA sense strand
caaagagaaacuaggggaa

SEQ ID NO: 2369823 - RNA, 19 nt, Homo sapiens
  misc_RNA (1)...(19): siRNA sense strand
cuguacaggaagaggcaca

SEQ ID NO: 2369824 - RNA, 19 nt, Homo sapiens
  misc_RNA (1)...(19): siRNA sense strand
caauacugucagaguucaa

SEQ ID NO: 2369825 - RNA, 19 nt, Homo sapiens
  misc_RNA (1)...(19): siRNA sense strand
aauucaagauaaugcgcau

SEQ ID NO: 2369826 - RNA, 19 nt, Homo sapiens
  misc_RNA (1)...(19): siRNA sense strand
aguucuaauacccgauuua

SEQ ID NO: 2369827 - RNA, 19 nt, Homo sapiens
  misc_RNA (1)...(19): siRNA sense strand
gcgugauuuucgagacaau

SEQ ID NO: 2369828 - RNA, 19 nt, Homo sapiens
  misc_RNA (1)...(19): siRNA sense strand
cuggagaugaagagaccuu

SEQ ID NO: 2369829 - RNA, 19 nt, Homo sapiens
  misc_RNA (1)...(19): siRNA sense strand
uaauauaccuucauccaca

SEQ ID NO: 2369830 - RNA, 19 nt, Homo sapiens
  misc_RNA (1)...(19): siRNA sense strand
cgacaguauguuagggccu

SEQ ID NO: 2369831 - RNA, 19 nt, Homo sapiens
  misc_RNA (1)...(19): siRNA sense strand
acauugaacuacaaggauc

SEQ ID NO: 2369832 - RNA, 19 nt, Homo sapiens
  misc_RNA (1)...(19): siRNA sense strand
uggaauuagugaaggauau

SEQ ID NO: 2369833 - RNA, 19 nt, Homo sapiens
  misc_RNA (1)...(19): siRNA sense strand
gggaagagguuguuggugu

SEQ ID NO: 2369834 - RNA, 19 nt, Homo sapiens
  misc_RNA (1)...(19): siRNA sense strand
cauuaagaggcgaggagaa

SEQ ID NO: 2369835 - RNA, 19 nt, Homo sapiens
  misc_RNA (1)...(19): siRNA sense strand
cuucacugcuggagaacaa

SEQ ID NO: 2369836 - RNA, 19 nt, Homo sapiens
  misc_RNA (1)...(19): siRNA sense strand
aaggagacagagagagaaa

SEQ ID NO: 2369837 - RNA, 19 nt, Homo sapiens
  misc_RNA (1)...(19): siRNA sense strand
ucaaggagacagagagaga

SEQ ID NO: 2369838 - RNA, 19 nt, Homo sapiens
  misc_RNA (1)...(19): siRNA sense strand
augcagaaguugaccaaau

SEQ ID NO: 2369839 - RNA, 19 nt, Homo sapiens
  misc_RNA (1)...(19): siRNA sense strand
ucuuaauaguccaggcaau

SEQ ID NO: 2369840 - RNA, 19 nt, Homo sapiens
  misc_RNA (1)...(19): siRNA sense strand
gaucuaaugaacagggaga

SEQ ID NO: 2369841 - RNA, 19 nt, Homo sapiens
  misc_RNA (1)...(19): siRNA sense strand
ccgaaaugacgaacaguuu

SEQ ID NO: 2369842 - RNA, 19 nt, Homo sapiens
  misc_RNA (1)...(19): siRNA sense strand
uugcagaacagcaggagaa

SEQ ID NO: 2369843 - RNA, 19 nt, Homo sapiens
  misc_RNA (1)...(19): siRNA sense strand
acauggagugugaggaauu

SEQ ID NO: 2369844 - RNA, 19 nt, Homo sapiens
  misc_RNA (1)...(19): siRNA sense strand
cagaaagaacaggcagaaa

SEQ ID NO: 2369845 - RNA, 19 nt, Homo sapiens
  misc_RNA (1)...(19): siRNA sense strand
ucaacaagaaaucaggaaa

SEQ ID NO: 2369846 - RNA, 19 nt, Homo sapiens
  misc_RNA (1)...(19): siRNA sense strand
ugucaaggauucugaggga

SEQ ID NO: 2369847 - RNA, 19 nt, Homo sapiens
  misc_RNA (1)...(19): siRNA sense strand
cuacaagacacaaagcauu

SEQ ID NO: 2369848 - RNA, 19 nt, Homo sapiens
  misc_RNA (1)...(19): siRNA sense strand
caacaagaaaucaggaaac

SEQ ID NO: 2369849 - RNA, 19 nt, Homo sapiens
  misc_RNA (1)...(19): siRNA sense strand
uaaugaacagggagaagaa

SEQ ID NO: 2369850 - RNA, 19 nt, Homo sapiens
  misc_RNA (1)...(19): siRNA sense strand
caaagaugcauaugaggau

SEQ ID NO: 2369851 - RNA, 19 nt, Homo sapiens
  misc_RNA (1)...(19): siRNA sense strand
gcuacaagacacaaagcau

SEQ ID NO: 2369852 - RNA, 19 nt, Homo sapiens
  misc_RNA (1)...(19): siRNA sense strand
gggaacaugaugcaaacaa

SEQ ID NO: 2369853 - RNA, 19 nt, Homo sapiens
  misc_RNA (1)...(19): siRNA sense strand
caggcaaaauucagaacaa

SEQ ID NO: 2369854 - RNA, 19 nt, Homo sapiens
  misc_RNA (1)...(19): siRNA sense strand
ugcuggagaacaagagaaa

SEQ ID NO: 2369855 - RNA, 19 nt, Homo sapiens
  misc_RNA (1)...(19): siRNA sense strand
cuggagaacaagagaaauc

SEQ ID NO: 2369856 - RNA, 19 nt, Homo sapiens
  misc_RNA (1)...(19): siRNA sense strand
guuaauaagauggaggaga

SEQ ID NO: 2369857 - RNA, 19 nt, Homo sapiens
  misc_RNA (1)...(19): siRNA sense strand
cuggaagaaguuucaaaua

SEQ ID NO: 2369858 - RNA, 19 nt, Homo sapiens
  misc_RNA (1)...(19): siRNA sense strand
cagaugucaguaaggauaa

SEQ ID NO: 2369859 - RNA, 19 nt, Homo sapiens
  misc_RNA (1)...(19): siRNA sense strand
agaugaaacaugagguucu

SEQ ID NO: 2369860 - RNA, 19 nt, Homo sapiens
  misc_RNA (1)...(19): siRNA sense strand
acuuguagcaacugaauuu

SEQ ID NO: 2369861 - RNA, 19 nt, Homo sapiens
  misc_RNA (1)...(19): siRNA sense strand
agacagagagagaaaagaa

SEQ ID NO: 2369862 - RNA, 19 nt, Homo sapiens
  misc_RNA (1)...(19): siRNA sense strand
gagugugaggaauuagaaa

SEQ ID NO: 2369863 - RNA, 19 nt, Homo sapiens
  misc_RNA (1)...(19): siRNA sense strand
guaugaagcaguggagaga

SEQ ID NO: 2369864 - RNA, 19 nt, Homo sapiens
  misc_RNA (1)...(19): siRNA sense strand
uaacagugucccuggaaca

SEQ ID NO: 2369865 - RNA, 19 nt, Homo sapiens
  misc_RNA (1)...(19): siRNA sense strand
ucaacaacggauagcagaa

SEQ ID NO: 2369866 - RNA, 19 nt, Homo sapiens
  misc_RNA (1)...(19): siRNA sense strand
ccucuuugauguugcugaa

SEQ ID NO: 2369867 - RNA, 19 nt, Homo sapiens
  misc_RNA (1)...(19): siRNA sense strand
auuaagaaucauagggaag

SEQ ID NO: 2369868 - RNA, 19 nt, Homo sapiens
  misc_RNA (1)...(19): siRNA sense strand
gaacaugaugcaaacaaaa

SEQ ID NO: 2369869 - RNA, 19 nt, Homo sapiens
  misc_RNA (1)...(19): siRNA sense strand
ccagaugaaacaugagguu

SEQ ID NO: 2369870 - RNA, 19 nt, Homo sapiens
  misc_RNA (1)...(19): siRNA sense strand
auuaagaggcgaggagaau

SEQ ID NO: 2369871 - RNA, 19 nt, Homo sapiens
  misc_RNA (1)...(19): siRNA sense strand
uguacaauucggauguuua

SEQ ID NO: 2369872 - RNA, 19 nt, Homo sapiens
  misc_RNA (1)...(19): siRNA sense strand
guucuuugcagauggauuu

SEQ ID NO: 2369873 - RNA, 19 nt, Homo sapiens
  misc_RNA (1)...(19): siRNA sense strand
gugcauguuugcugcucua

SEQ ID NO: 2369874 - RNA, 19 nt, Homo sapiens
  misc_RNA (1)...(19): siRNA sense strand
uauaagaccacguugaaaa

SEQ ID NO: 2369875 - RNA, 19 nt, Homo sapiens
  misc_RNA (1)...(19): siRNA sense strand
gaaucauagggaagagguu

SEQ ID NO: 2369876 - RNA, 19 nt, Homo sapiens
  misc_RNA (1)...(19): siRNA sense strand
acucagaaaagaaggaaca

SEQ ID NO: 2369877 - RNA, 19 nt, Homo sapiens
  misc_RNA (1)...(19): siRNA sense strand
ucuuggaauuagugaagga

SEQ ID NO: 2369878 - RNA, 19 nt, Homo sapiens
  misc_RNA (1)...(19): siRNA sense strand
ucuaaaagcaggcaaaauu

SEQ ID NO: 2369879 - RNA, 19 nt, Homo sapiens
  misc_RNA (1)...(19): siRNA sense strand
cagcagaggaagaaacaag

SEQ ID NO: 2369880 - RNA, 19 nt, Homo sapiens
  misc_RNA (1)...(19): siRNA sense strand
ucggaagaauguugccuau

SEQ ID NO: 2369881 - RNA, 19 nt, Homo sapiens
  misc_RNA (1)...(19): siRNA sense strand
gccuauucaacaacggaua

SEQ ID NO: 2369882 - RNA, 19 nt, Homo sapiens
  misc_RNA (1)...(19): siRNA sense strand
ggaacaccaaccaggaaaa

SEQ ID NO: 2369883 - RNA, 19 nt, Homo sapiens
  misc_RNA (1)...(19): siRNA sense strand
cagaaaagaaggaacagau

SEQ ID NO: 2369884 - RNA, 19 nt, Homo sapiens
  misc_RNA (1)...(19): siRNA sense strand
auguaaaccagcagugcau

SEQ ID NO: 2369885 - RNA, 19 nt, Homo sapiens
  misc_RNA (1)...(19): siRNA sense strand
ugcagaacuuccagaugaa

SEQ ID NO: 2369886 - RNA, 19 nt, Homo sapiens
  misc_RNA (1)...(19): siRNA sense strand
uuacauacagcgaagugaa

SEQ ID NO: 2369887 - RNA, 19 nt, Homo sapiens
  misc_RNA (1)...(19): siRNA sense strand
uagcagaacuuguagcaac

SEQ ID NO: 2369888 - RNA, 19 nt, Homo sapiens
  misc_RNA (1)...(19): siRNA sense strand
uggaacaccaaccaggaaa

SEQ ID NO: 2369889 - RNA, 19 nt, Homo sapiens
  misc_RNA (1)...(19): siRNA sense strand
agaauacuggcaagguuaa

SEQ ID NO: 2369890 - RNA, 19 nt, Homo sapiens
  misc_RNA (1)...(19): siRNA sense strand
gagacaugccuuuaauaca

SEQ ID NO: 2369891 - RNA, 19 nt, Homo sapiens
  misc_RNA (1)...(19): siRNA sense strand
cauacagcgaagugaacau

SEQ ID NO: 2369892 - RNA, 19 nt, Homo sapiens
  misc_RNA (1)...(19): siRNA sense strand
uggaauuagugaaggauau

SEQ ID NO: 2369893 - RNA, 19 nt, Homo sapiens
  misc_RNA (1)...(19): siRNA sense strand
gggaagagguuguuggugu

SEQ ID NO: 2369894 - RNA, 19 nt, Homo sapiens
  misc_RNA (1)...(19): siRNA sense strand
cauuaagaggcgaggagaa

SEQ ID NO: 2369895 - RNA, 19 nt, Homo sapiens
  misc_RNA (1)...(19): siRNA sense strand
cuucacugcuggagaacaa

SEQ ID NO: 2369896 - RNA, 19 nt, Homo sapiens
  misc_RNA (1)...(19): siRNA sense strand
aaggagacagagagagaaa

SEQ ID NO: 2369897 - RNA, 19 nt, Homo sapiens
  misc_RNA (1)...(19): siRNA sense strand
ucaaggagacagagagaga

SEQ ID NO: 2369898 - RNA, 19 nt, Homo sapiens
  misc_RNA (1)...(19): siRNA sense strand
augcagaaguugaccaaau

SEQ ID NO: 2369899 - RNA, 19 nt, Homo sapiens
  misc_RNA (1)...(19): siRNA sense strand
ucuuaauaguccaggcaau

SEQ ID NO: 2369900 - RNA, 19 nt, Homo sapiens
  misc_RNA (1)...(19): siRNA sense strand
gaucuaaugaacagggaga

SEQ ID NO: 2369901 - RNA, 19 nt, Homo sapiens
  misc_RNA (1)...(19): siRNA sense strand
ccgaaaugacgaacaguuu

SEQ ID NO: 2369902 - RNA, 19 nt, Homo sapiens
  misc_RNA (1)...(19): siRNA sense strand
uugcagaacagcaggagaa

SEQ ID NO: 2369903 - RNA, 19 nt, Homo sapiens
  misc_RNA (1)...(19): siRNA sense strand
acauggagugugaggaauu

SEQ ID NO: 2369904 - RNA, 19 nt, Homo sapiens
  misc_RNA (1)...(19): siRNA sense strand
cagaaagaacaggcagaaa

SEQ ID NO: 2369905 - RNA, 19 nt, Homo sapiens
  misc_RNA (1)...(19): siRNA sense strand
ucaacaagaaaucaggaaa

SEQ ID NO: 2369906 - RNA, 19 nt, Homo sapiens
  misc_RNA (1)...(19): siRNA sense strand
ugucaaggauucugaggga

SEQ ID NO: 2369907 - RNA, 19 nt, Homo sapiens
  misc_RNA (1)...(19): siRNA sense strand
cuacaagacacaaagcauu

SEQ ID NO: 2369908 - RNA, 19 nt, Homo sapiens
  misc_RNA (1)...(19): siRNA sense strand
caacaagaaaucaggaaac

SEQ ID NO: 2369909 - RNA, 19 nt, Homo sapiens
  misc_RNA (1)...(19): siRNA sense strand
uaaugaacagggagaagaa

SEQ ID NO: 2369910 - RNA, 19 nt, Homo sapiens
  misc_RNA (1)...(19): siRNA sense strand
caaagaugcauaugaggau

SEQ ID NO: 2369911 - RNA, 19 nt, Homo sapiens
  misc_RNA (1)...(19): siRNA sense strand
gcuacaagacacaaagcau

SEQ ID NO: 2369912 - RNA, 19 nt, Homo sapiens
  misc_RNA (1)...(19): siRNA sense strand
gggaacaugaugcaaacaa

SEQ ID NO: 2369913 - RNA, 19 nt, Homo sapiens
  misc_RNA (1)...(19): siRNA sense strand
caggcaaaauucagaacaa

SEQ ID NO: 2369914 - RNA, 19 nt, Homo sapiens
  misc_RNA (1)...(19): siRNA sense strand
ugcuggagaacaagagaaa

SEQ ID NO: 2369915 - RNA, 19 nt, Homo sapiens
  misc_RNA (1)...(19): siRNA sense strand
cuggagaacaagagaaauc

SEQ ID NO: 2369916 - RNA, 19 nt, Homo sapiens
  misc_RNA (1)...(19): siRNA sense strand
guuaauaagauggaggaga

SEQ ID NO: 2369917 - RNA, 19 nt, Homo sapiens
  misc_RNA (1)...(19): siRNA sense strand
cuggaagaaguuucaaaua

SEQ ID NO: 2369918 - RNA, 19 nt, Homo sapiens
  misc_RNA (1)...(19): siRNA sense strand
cagaugucaguaaggauaa

SEQ ID NO: 2369919 - RNA, 19 nt, Homo sapiens
  misc_RNA (1)...(19): siRNA sense strand
agaugaaacaugagguucu

SEQ ID NO: 2369920 - RNA, 19 nt, Homo sapiens
  misc_RNA (1)...(19): siRNA sense strand
acuuguagcaacugaauuu

SEQ ID NO: 2369921 - RNA, 19 nt, Homo sapiens
  misc_RNA (1)...(19): siRNA sense strand
agacagagagagaaaagaa

SEQ ID NO: 2369922 - RNA, 19 nt, Homo sapiens
  misc_RNA (1)...(19): siRNA sense strand
gagugugaggaauuagaaa

SEQ ID NO: 2369923 - RNA, 19 nt, Homo sapiens
  misc_RNA (1)...(19): siRNA sense strand
guaugaagcaguggagaga

SEQ ID NO: 2369924 - RNA, 19 nt, Homo sapiens
  misc_RNA (1)...(19): siRNA sense strand
uaacagugucccuggaaca

SEQ ID NO: 2369925 - RNA, 19 nt, Homo sapiens
  misc_RNA (1)...(19): siRNA sense strand
ucaacaacggauagcagaa

SEQ ID NO: 2369926 - RNA, 19 nt, Homo sapiens
  misc_RNA (1)...(19): siRNA sense strand
ccucuuugauguugcugaa

SEQ ID NO: 2369927 - RNA, 19 nt, Homo sapiens
  misc_RNA (1)...(19): siRNA sense strand
auuaagaaucauagggaag

SEQ ID NO: 2369928 - RNA, 19 nt, Homo sapiens
  misc_RNA (1)...(19): siRNA sense strand
gaacaugaugcaaacaaaa

SEQ ID NO: 2369929 - RNA, 19 nt, Homo sapiens
  misc_RNA (1)...(19): siRNA sense strand
ccagaugaaacaugagguu

SEQ ID NO: 2369930 - RNA, 19 nt, Homo sapiens
  misc_RNA (1)...(19): siRNA sense strand
auuaagaggcgaggagaau

SEQ ID NO: 2369931 - RNA, 19 nt, Homo sapiens
  misc_RNA (1)...(19): siRNA sense strand
uguacaauucggauguuua

SEQ ID NO: 2369932 - RNA, 19 nt, Homo sapiens
  misc_RNA (1)...(19): siRNA sense strand
guucuuugcagauggauuu

SEQ ID NO: 2369933 - RNA, 19 nt, Homo sapiens
  misc_RNA (1)...(19): siRNA sense strand
gugcauguuugcugcucua

SEQ ID NO: 2369934 - RNA, 19 nt, Homo sapiens
  misc_RNA (1)...(19): siRNA sense strand
uauaagaccacguugaaaa

SEQ ID NO: 2369935 - RNA, 19 nt, Homo sapiens
  misc_RNA (1)...(19): siRNA sense strand
gaaucauagggaagagguu

SEQ ID NO: 2369936 - RNA, 19 nt, Homo sapiens
  misc_RNA (1)...(19): siRNA sense strand
acucagaaaagaaggaaca

SEQ ID NO: 2369937 - RNA, 19 nt, Homo sapiens
  misc_RNA (1)...(19): siRNA sense strand
ucuuggaauuagugaagga

SEQ ID NO: 2369938 - RNA, 19 nt, Homo sapiens
  misc_RNA (1)...(19): siRNA sense strand
ucuaaaagcaggcaaaauu

SEQ ID NO: 2369939 - RNA, 19 nt, Homo sapiens
  misc_RNA (1)...(19): siRNA sense strand
cagcagaggaagaaacaag

SEQ ID NO: 2369940 - RNA, 19 nt, Homo sapiens
  misc_RNA (1)...(19): siRNA sense strand
ucggaagaauguugccuau

SEQ ID NO: 2369941 - RNA, 19 nt, Homo sapiens
  misc_RNA (1)...(19): siRNA sense strand
gccuauucaacaacggaua

SEQ ID NO: 2369942 - RNA, 19 nt, Homo sapiens
  misc_RNA (1)...(19): siRNA sense strand
ggaacaccaaccaggaaaa

SEQ ID NO: 2369943 - RNA, 19 nt, Homo sapiens
  misc_RNA (1)...(19): siRNA sense strand
cagaaaagaaggaacagau

SEQ ID NO: 2369944 - RNA, 19 nt, Homo sapiens
  misc_RNA (1)...(19): siRNA sense strand
auguaaaccagcagugcau

SEQ ID NO: 2369945 - RNA, 19 nt, Homo sapiens
  misc_RNA (1)...(19): siRNA sense strand
ugcagaacuuccagaugaa

SEQ ID NO: 2369946 - RNA, 19 nt, Homo sapiens
  misc_RNA (1)...(19): siRNA sense strand
uuacauacagcgaagugaa

SEQ ID NO: 2369947 - RNA, 19 nt, Homo sapiens
  misc_RNA (1)...(19): siRNA sense strand
uagcagaacuuguagcaac

SEQ ID NO: 2369948 - RNA, 19 nt, Homo sapiens
  misc_RNA (1)...(19): siRNA sense strand
uggaacaccaaccaggaaa

SEQ ID NO: 2369949 - RNA, 19 nt, Homo sapiens
  misc_RNA (1)...(19): siRNA sense strand
agaauacuggcaagguuaa

SEQ ID NO: 2369950 - RNA, 19 nt, Homo sapiens
  misc_RNA (1)...(19): siRNA sense strand
gagacaugccuuuaauaca

SEQ ID NO: 2369951 - RNA, 19 nt, Homo sapiens
  misc_RNA (1)...(19): siRNA sense strand
cauacagcgaagugaacau

SEQ ID NO: 2369952 - RNA, 19 nt, Homo sapiens
  misc_RNA (1)...(19): siRNA sense strand
uggaauuagugaaggauau

SEQ ID NO: 2369953 - RNA, 19 nt, Homo sapiens
  misc_RNA (1)...(19): siRNA sense strand
gggaagagguuguuggugu

SEQ ID NO: 2369954 - RNA, 19 nt, Homo sapiens
  misc_RNA (1)...(19): siRNA sense strand
cauuaagaggcgaggagaa

SEQ ID NO: 2369955 - RNA, 19 nt, Homo sapiens
  misc_RNA (1)...(19): siRNA sense strand
cuucacugcuggagaacaa

SEQ ID NO: 2369956 - RNA, 19 nt, Homo sapiens
  misc_RNA (1)...(19): siRNA sense strand
aaggagacagagagagaaa

SEQ ID NO: 2369957 - RNA, 19 nt, Homo sapiens
  misc_RNA (1)...(19): siRNA sense strand
ucaaggagacagagagaga

SEQ ID NO: 2369958 - RNA, 19 nt, Homo sapiens
  misc_RNA (1)...(19): siRNA sense strand
augcagaaguugaccaaau

SEQ ID NO: 2369959 - RNA, 19 nt, Homo sapiens
  misc_RNA (1)...(19): siRNA sense strand
ucuuaauaguccaggcaau

SEQ ID NO: 2369960 - RNA, 19 nt, Homo sapiens
  misc_RNA (1)...(19): siRNA sense strand
gaucuaaugaacagggaga

SEQ ID NO: 2369961 - RNA, 19 nt, Homo sapiens
  misc_RNA (1)...(19): siRNA sense strand
ccgaaaugacgaacaguuu

SEQ ID NO: 2369962 - RNA, 19 nt, Homo sapiens
  misc_RNA (1)...(19): siRNA sense strand
uugcagaacagcaggagaa

SEQ ID NO: 2369963 - RNA, 19 nt, Homo sapiens
  misc_RNA (1)...(19): siRNA sense strand
acauggagugugaggaauu

SEQ ID NO: 2369964 - RNA, 19 nt, Homo sapiens
  misc_RNA (1)...(19): siRNA sense strand
cagaaagaacaggcagaaa

SEQ ID NO: 2369965 - RNA, 19 nt, Homo sapiens
  misc_RNA (1)...(19): siRNA sense strand
ucaacaagaaaucaggaaa

SEQ ID NO: 2369966 - RNA, 19 nt, Homo sapiens
  misc_RNA (1)...(19): siRNA sense strand
ugucaaggauucugaggga

SEQ ID NO: 2369967 - RNA, 19 nt, Homo sapiens
  misc_RNA (1)...(19): siRNA sense strand
cuacaagacacaaagcauu

SEQ ID NO: 2369968 - RNA, 19 nt, Homo sapiens
  misc_RNA (1)...(19): siRNA sense strand
caacaagaaaucaggaaac

SEQ ID NO: 2369969 - RNA, 19 nt, Homo sapiens
  misc_RNA (1)...(19): siRNA sense strand
uaaugaacagggagaagaa

SEQ ID NO: 2369970 - RNA, 19 nt, Homo sapiens
  misc_RNA (1)...(19): siRNA sense strand
caaagaugcauaugaggau

SEQ ID NO: 2369971 - RNA, 19 nt, Homo sapiens
  misc_RNA (1)...(19): siRNA sense strand
gcuacaagacacaaagcau

SEQ ID NO: 2369972 - RNA, 19 nt, Homo sapiens
  misc_RNA (1)...(19): siRNA sense strand
gggaacaugaugcaaacaa

SEQ ID NO: 2369973 - RNA, 19 nt, Homo sapiens
  misc_RNA (1)...(19): siRNA sense strand
caggcaaaauucagaacaa

SEQ ID NO: 2369974 - RNA, 19 nt, Homo sapiens
  misc_RNA (1)...(19): siRNA sense strand
ugcuggagaacaagagaaa

SEQ ID NO: 2369975 - RNA, 19 nt, Homo sapiens
  misc_RNA (1)...(19): siRNA sense strand
cuggagaacaagagaaauc

SEQ ID NO: 2369976 - RNA, 19 nt, Homo sapiens
  misc_RNA (1)...(19): siRNA sense strand
guuaauaagauggaggaga

SEQ ID NO: 2369977 - RNA, 19 nt, Homo sapiens
  misc_RNA (1)...(19): siRNA sense strand
cuggaagaaguuucaaaua

SEQ ID NO: 2369978 - RNA, 19 nt, Homo sapiens
  misc_RNA (1)...(19): siRNA sense strand
cagaugucaguaaggauaa

SEQ ID NO: 2369979 - RNA, 19 nt, Homo sapiens
  misc_RNA (1)...(19): siRNA sense strand
agaugaaacaugagguucu

SEQ ID NO: 2369980 - RNA, 19 nt, Homo sapiens
  misc_RNA (1)...(19): siRNA sense strand
acuuguagcaacugaauuu

SEQ ID NO: 2369981 - RNA, 19 nt, Homo sapiens
  misc_RNA (1)...(19): siRNA sense strand
agacagagagagaaaagaa

SEQ ID NO: 2369982 - RNA, 19 nt, Homo sapiens
  misc_RNA (1)...(19): siRNA sense strand
gagugugaggaauuagaaa

SEQ ID NO: 2369983 - RNA, 19 nt, Homo sapiens
  misc_RNA (1)...(19): siRNA sense strand
guaugaagcaguggagaga

SEQ ID NO: 2369984 - RNA, 19 nt, Homo sapiens
  misc_RNA (1)...(19): siRNA sense strand
uaacagugucccuggaaca

SEQ ID NO: 2369985 - RNA, 19 nt, Homo sapiens
  misc_RNA (1)...(19): siRNA sense strand
ucaacaacggauagcagaa

SEQ ID NO: 2369986 - RNA, 19 nt, Homo sapiens
  misc_RNA (1)...(19): siRNA sense strand
ccucuuugauguugcugaa

SEQ ID NO: 2369987 - RNA, 19 nt, Homo sapiens
  misc_RNA (1)...(19): siRNA sense strand
auuaagaaucauagggaag

SEQ ID NO: 2369988 - RNA, 19 nt, Homo sapiens
  misc_RNA (1)...(19): siRNA sense strand
gaacaugaugcaaacaaaa

SEQ ID NO: 2369989 - RNA, 19 nt, Homo sapiens
  misc_RNA (1)...(19): siRNA sense strand
ccagaugaaacaugagguu

SEQ ID NO: 2369990 - RNA, 19 nt, Homo sapiens
  misc_RNA (1)...(19): siRNA sense strand
auuaagaggcgaggagaau

SEQ ID NO: 2369991 - RNA, 19 nt, Homo sapiens
  misc_RNA (1)...(19): siRNA sense strand
uguacaauucggauguuua

SEQ ID NO: 2369992 - RNA, 19 nt, Homo sapiens
  misc_RNA (1)...(19): siRNA sense strand
guucuuugcagauggauuu

SEQ ID NO: 2369993 - RNA, 19 nt, Homo sapiens
  misc_RNA (1)...(19): siRNA sense strand
gugcauguuugcugcucua

SEQ ID NO: 2369994 - RNA, 19 nt, Homo sapiens
  misc_RNA (1)...(19): siRNA sense strand
uauaagaccacguugaaaa

SEQ ID NO: 2369995 - RNA, 19 nt, Homo sapiens
  misc_RNA (1)...(19): siRNA sense strand
gaaucauagggaagagguu

SEQ ID NO: 2369996 - RNA, 19 nt, Homo sapiens
  misc_RNA (1)...(19): siRNA sense strand
acucagaaaagaaggaaca

SEQ ID NO: 2369997 - RNA, 19 nt, Homo sapiens
  misc_RNA (1)...(19): siRNA sense strand
ucuuggaauuagugaagga

SEQ ID NO: 2369998 - RNA, 19 nt, Homo sapiens
  misc_RNA (1)...(19): siRNA sense strand
ucuaaaagcaggcaaaauu

SEQ ID NO: 2369999 - RNA, 19 nt, Homo sapiens
  misc_RNA (1)...(19): siRNA sense strand
cagcagaggaagaaacaag

SEQ ID NO: 2370000 - RNA, 19 nt, Homo sapiens
  misc_RNA (1)...(19): siRNA sense strand
ucggaagaauguugccuau

SEQ ID NO: 2370001 - RNA, 19 nt, Homo sapiens
  misc_RNA (1)...(19): siRNA sense strand
gccuauucaacaacggaua

SEQ ID NO: 2370002 - RNA, 19 nt, Homo sapiens
  misc_RNA (1)...(19): siRNA sense strand
ggaacaccaaccaggaaaa

SEQ ID NO: 2370003 - RNA, 19 nt, Homo sapiens
  misc_RNA (1)...(19): siRNA sense strand
cagaaaagaaggaacagau

SEQ ID NO: 2370004 - RNA, 19 nt, Homo sapiens
  misc_RNA (1)...(19): siRNA sense strand
auguaaaccagcagugcau

SEQ ID NO: 2370005 - RNA, 19 nt, Homo sapiens
  misc_RNA (1)...(19): siRNA sense strand
ugcagaacuuccagaugaa

SEQ ID NO: 2370006 - RNA, 19 nt, Homo sapiens
  misc_RNA (1)...(19): siRNA sense strand
uuacauacagcgaagugaa

SEQ ID NO: 2370007 - RNA, 19 nt, Homo sapiens
  misc_RNA (1)...(19): siRNA sense strand
uagcagaacuuguagcaac

SEQ ID NO: 2370008 - RNA, 19 nt, Homo sapiens
  misc_RNA (1)...(19): siRNA sense strand
uggaacaccaaccaggaaa

SEQ ID NO: 2370009 - RNA, 19 nt, Homo sapiens
  misc_RNA (1)...(19): siRNA sense strand
agaauacuggcaagguuaa

SEQ ID NO: 2370010 - RNA, 19 nt, Homo sapiens
  misc_RNA (1)...(19): siRNA sense strand
gagacaugccuuuaauaca

SEQ ID NO: 2370011 - RNA, 19 nt, Homo sapiens
  misc_RNA (1)...(19): siRNA sense strand
cauacagcgaagugaacau

SEQ ID NO: 2370012 - RNA, 19 nt, Homo sapiens
  misc_RNA (1)...(19): siRNA sense strand
uggaauuagugaaggauau

SEQ ID NO: 2370013 - RNA, 19 nt, Homo sapiens
  misc_RNA (1)...(19): siRNA sense strand
gggaagagguuguuggugu

SEQ ID NO: 2370014 - RNA, 19 nt, Homo sapiens
  misc_RNA (1)...(19): siRNA sense strand
cauuaagaggcgaggagaa

SEQ ID NO: 2370015 - RNA, 19 nt, Homo sapiens
  misc_RNA (1)...(19): siRNA sense strand
cuucacugcuggagaacaa

SEQ ID NO: 2370016 - RNA, 19 nt, Homo sapiens
  misc_RNA (1)...(19): siRNA sense strand
aaggagacagagagagaaa

SEQ ID NO: 2370017 - RNA, 19 nt, Homo sapiens
  misc_RNA (1)...(19): siRNA sense strand
ucaaggagacagagagaga

SEQ ID NO: 2370018 - RNA, 19 nt, Homo sapiens
  misc_RNA (1)...(19): siRNA sense strand
augcagaaguugaccaaau

SEQ ID NO: 2370019 - RNA, 19 nt, Homo sapiens
  misc_RNA (1)...(19): siRNA sense strand
ucuuaauaguccaggcaau

SEQ ID NO: 2370020 - RNA, 19 nt, Homo sapiens
  misc_RNA (1)...(19): siRNA sense strand
gaucuaaugaacagggaga

SEQ ID NO: 2370021 - RNA, 19 nt, Homo sapiens
  misc_RNA (1)...(19): siRNA sense strand
ccgaaaugacgaacaguuu

SEQ ID NO: 2370022 - RNA, 19 nt, Homo sapiens
  misc_RNA (1)...(19): siRNA sense strand
uugcagaacagcaggagaa

SEQ ID NO: 2370023 - RNA, 19 nt, Homo sapiens
  misc_RNA (1)...(19): siRNA sense strand
acauggagugugaggaauu

SEQ ID NO: 2370024 - RNA, 19 nt, Homo sapiens
  misc_RNA (1)...(19): siRNA sense strand
cagaaagaacaggcagaaa

SEQ ID NO: 2370025 - RNA, 19 nt, Homo sapiens
  misc_RNA (1)...(19): siRNA sense strand
ucaacaagaaaucaggaaa

SEQ ID NO: 2370026 - RNA, 19 nt, Homo sapiens
  misc_RNA (1)...(19): siRNA sense strand
ugucaaggauucugaggga

SEQ ID NO: 2370027 - RNA, 19 nt, Homo sapiens
  misc_RNA (1)...(19): siRNA sense strand
cuacaagacacaaagcauu

SEQ ID NO: 2370028 - RNA, 19 nt, Homo sapiens
  misc_RNA (1)...(19): siRNA sense strand
caacaagaaaucaggaaac

SEQ ID NO: 2370029 - RNA, 19 nt, Homo sapiens
  misc_RNA (1)...(19): siRNA sense strand
uaaugaacagggagaagaa

SEQ ID NO: 2370030 - RNA, 19 nt, Homo sapiens
  misc_RNA (1)...(19): siRNA sense strand
caaagaugcauaugaggau

SEQ ID NO: 2370031 - RNA, 19 nt, Homo sapiens
  misc_RNA (1)...(19): siRNA sense strand
gcuacaagacacaaagcau

SEQ ID NO: 2370032 - RNA, 19 nt, Homo sapiens
  misc_RNA (1)...(19): siRNA sense strand
gggaacaugaugcaaacaa

SEQ ID NO: 2370033 - RNA, 19 nt, Homo sapiens
  misc_RNA (1)...(19): siRNA sense strand
caggcaaaauucagaacaa

SEQ ID NO: 2370034 - RNA, 19 nt, Homo sapiens
  misc_RNA (1)...(19): siRNA sense strand
ugcuggagaacaagagaaa

SEQ ID NO: 2370035 - RNA, 19 nt, Homo sapiens
  misc_RNA (1)...(19): siRNA sense strand
cuggagaacaagagaaauc

SEQ ID NO: 2370036 - RNA, 19 nt, Homo sapiens
  misc_RNA (1)...(19): siRNA sense strand
guuaauaagauggaggaga

SEQ ID NO: 2370037 - RNA, 19 nt, Homo sapiens
  misc_RNA (1)...(19): siRNA sense strand
cuggaagaaguuucaaaua

SEQ ID NO: 2370038 - RNA, 19 nt, Homo sapiens
  misc_RNA (1)...(19): siRNA sense strand
cagaugucaguaaggauaa

SEQ ID NO: 2370039 - RNA, 19 nt, Homo sapiens
  misc_RNA (1)...(19): siRNA sense strand
agaugaaacaugagguucu

SEQ ID NO: 2370040 - RNA, 19 nt, Homo sapiens
  misc_RNA (1)...(19): siRNA sense strand
acuuguagcaacugaauuu

SEQ ID NO: 2370041 - RNA, 19 nt, Homo sapiens
  misc_RNA (1)...(19): siRNA sense strand
agacagagagagaaaagaa

SEQ ID NO: 2370042 - RNA, 19 nt, Homo sapiens
  misc_RNA (1)...(19): siRNA sense strand
gagugugaggaauuagaaa

SEQ ID NO: 2370043 - RNA, 19 nt, Homo sapiens
  misc_RNA (1)...(19): siRNA sense strand
guaugaagcaguggagaga

SEQ ID NO: 2370044 - RNA, 19 nt, Homo sapiens
  misc_RNA (1)...(19): siRNA sense strand
uaacagugucccuggaaca

SEQ ID NO: 2370045 - RNA, 19 nt, Homo sapiens
  misc_RNA (1)...(19): siRNA sense strand
ucaacaacggauagcagaa

SEQ ID NO: 2370046 - RNA, 19 nt, Homo sapiens
  misc_RNA (1)...(19): siRNA sense strand
ccucuuugauguugcugaa

SEQ ID NO: 2370047 - RNA, 19 nt, Homo sapiens
  misc_RNA (1)...(19): siRNA sense strand
auuaagaaucauagggaag

SEQ ID NO: 2370048 - RNA, 19 nt, Homo sapiens
  misc_RNA (1)...(19): siRNA sense strand
gaacaugaugcaaacaaaa

SEQ ID NO: 2370049 - RNA, 19 nt, Homo sapiens
  misc_RNA (1)...(19): siRNA sense strand
ccagaugaaacaugagguu

SEQ ID NO: 2370050 - RNA, 19 nt, Homo sapiens
  misc_RNA (1)...(19): siRNA sense strand
auuaagaggcgaggagaau

SEQ ID NO: 2370051 - RNA, 19 nt, Homo sapiens
  misc_RNA (1)...(19): siRNA sense strand
uguacaauucggauguuua

SEQ ID NO: 2370052 - RNA, 19 nt, Homo sapiens
  misc_RNA (1)...(19): siRNA sense strand
guucuuugcagauggauuu

SEQ ID NO: 2370053 - RNA, 19 nt, Homo sapiens
  misc_RNA (1)...(19): siRNA sense strand
gugcauguuugcugcucua

SEQ ID NO: 2370054 - RNA, 19 nt, Homo sapiens
  misc_RNA (1)...(19): siRNA sense strand
uauaagaccacguugaaaa

SEQ ID NO: 2370055 - RNA, 19 nt, Homo sapiens
  misc_RNA (1)...(19): siRNA sense strand
gaaucauagggaagagguu

SEQ ID NO: 2370056 - RNA, 19 nt, Homo sapiens
  misc_RNA (1)...(19): siRNA sense strand
acucagaaaagaaggaaca

SEQ ID NO: 2370057 - RNA, 19 nt, Homo sapiens
  misc_RNA (1)...(19): siRNA sense strand
ucuuggaauuagugaagga

SEQ ID NO: 2370058 - RNA, 19 nt, Homo sapiens
  misc_RNA (1)...(19): siRNA sense strand
ucuaaaagcaggcaaaauu

SEQ ID NO: 2370059 - RNA, 19 nt, Homo sapiens
  misc_RNA (1)...(19): siRNA sense strand
cagcagaggaagaaacaag

SEQ ID NO: 2370060 - RNA, 19 nt, Homo sapiens
  misc_RNA (1)...(19): siRNA sense strand
ucggaagaauguugccuau

SEQ ID NO: 2370061 - RNA, 19 nt, Homo sapiens
  misc_RNA (1)...(19): siRNA sense strand
gccuauucaacaacggaua

SEQ ID NO: 2370062 - RNA, 19 nt, Homo sapiens
  misc_RNA (1)...(19): siRNA sense strand
ggaacaccaaccaggaaaa

SEQ ID NO: 2370063 - RNA, 19 nt, Homo sapiens
  misc_RNA (1)...(19): siRNA sense strand
cagaaaagaaggaacagau

SEQ ID NO: 2370064 - RNA, 19 nt, Homo sapiens
  misc_RNA (1)...(19): siRNA sense strand
auguaaaccagcagugcau

SEQ ID NO: 2370065 - RNA, 19 nt, Homo sapiens
  misc_RNA (1)...(19): siRNA sense strand
ugcagaacuuccagaugaa

SEQ ID NO: 2370066 - RNA, 19 nt, Homo sapiens
  misc_RNA (1)...(19): siRNA sense strand
uuacauacagcgaagugaa

SEQ ID NO: 2370067 - RNA, 19 nt, Homo sapiens
  misc_RNA (1)...(19): siRNA sense strand
uagcagaacuuguagcaac

SEQ ID NO: 2370068 - RNA, 19 nt, Homo sapiens
  misc_RNA (1)...(19): siRNA sense strand
uggaacaccaaccaggaaa

SEQ ID NO: 2370069 - RNA, 19 nt, Homo sapiens
  misc_RNA (1)...(19): siRNA sense strand
agaauacuggcaagguuaa

SEQ ID NO: 2370070 - RNA, 19 nt, Homo sapiens
  misc_RNA (1)...(19): siRNA sense strand
gagacaugccuuuaauaca

SEQ ID NO: 2370071 - RNA, 19 nt, Homo sapiens
  misc_RNA (1)...(19): siRNA sense strand
cauacagcgaagugaacau

SEQ ID NO: 2370072 - RNA, 19 nt, Homo sapiens
  misc_RNA (1)...(19): siRNA sense strand
ggacagaaaucauuaucuu

SEQ ID NO: 2370073 - RNA, 19 nt, Homo sapiens
  misc_RNA (1)...(19): siRNA sense strand
guguagagcuuuaugcuga

SEQ ID NO: 2370074 - RNA, 19 nt, Homo sapiens
  misc_RNA (1)...(19): siRNA sense strand
agggcaguguagagcuuua

SEQ ID NO: 2370075 - RNA, 19 nt, Homo sapiens
  misc_RNA (1)...(19): siRNA sense strand
agaggaaguuugucgcuga

SEQ ID NO: 2370076 - RNA, 19 nt, Homo sapiens
  misc_RNA (1)...(19): siRNA sense strand
agaaagaauucaaggccaa

SEQ ID NO: 2370077 - RNA, 19 nt, Homo sapiens
  misc_RNA (1)...(19): siRNA sense strand
agaaagaaccggaggcuga

SEQ ID NO: 2370078 - RNA, 19 nt, Homo sapiens
  misc_RNA (1)...(19): siRNA sense strand
cugcagagggagaaagaau

SEQ ID NO: 2370079 - RNA, 19 nt, Homo sapiens
  misc_RNA (1)...(19): siRNA sense strand
gagaaagaauucaaggcca

SEQ ID NO: 2370080 - RNA, 19 nt, Homo sapiens
  misc_RNA (1)...(19): siRNA sense strand
cagaaauccaugaaaacua

SEQ ID NO: 2370081 - RNA, 19 nt, Homo sapiens
  misc_RNA (1)...(19): siRNA sense strand
gagaaggagacccaggaga

SEQ ID NO: 2370082 - RNA, 19 nt, Homo sapiens
  misc_RNA (1)...(19): siRNA sense strand
aggccaaagaagaagcuca

SEQ ID NO: 2370083 - RNA, 19 nt, Homo sapiens
  misc_RNA (1)...(19): siRNA sense strand
cagacauacuuccggcaga

SEQ ID NO: 2370084 - RNA, 19 nt, Homo sapiens
  misc_RNA (1)...(19): siRNA sense strand
ggagaaacaucgaaaggac

SEQ ID NO: 2370085 - RNA, 19 nt, Homo sapiens
  misc_RNA (1)...(19): siRNA sense strand
gagaaacaucgaaaggaca

SEQ ID NO: 2370086 - RNA, 19 nt, Homo sapiens
  misc_RNA (1)...(19): siRNA sense strand
aagcugaagaagcgaagaa

SEQ ID NO: 2370087 - RNA, 19 nt, Homo sapiens
  misc_RNA (1)...(19): siRNA sense strand
cugccaaagccauaccaaa

SEQ ID NO: 2370088 - RNA, 19 nt, Homo sapiens
  misc_RNA (1)...(19): siRNA sense strand
aacaagaaggagaugcuaa

SEQ ID NO: 2370089 - RNA, 19 nt, Homo sapiens
  misc_RNA (1)...(19): siRNA sense strand
agcauugaccagaggaaaa

SEQ ID NO: 2370090 - RNA, 19 nt, Homo sapiens
  misc_RNA (1)...(19): siRNA sense strand
cugaagaagcgaagaagag

SEQ ID NO: 2370091 - RNA, 19 nt, Homo sapiens
  misc_RNA (1)...(19): siRNA sense strand
ccaacaagaaggagaugcu

SEQ ID NO: 2370092 - RNA, 19 nt, Homo sapiens
  misc_RNA (1)...(19): siRNA sense strand
acuuggagaaacaucgaaa

SEQ ID NO: 2370093 - RNA, 19 nt, Homo sapiens
  misc_RNA (1)...(19): siRNA sense strand
agacaguagagaagaagaa

SEQ ID NO: 2370094 - RNA, 19 nt, Homo sapiens
  misc_RNA (1)...(19): siRNA sense strand
ccucaugcagcguggauaa

SEQ ID NO: 2370095 - RNA, 19 nt, Homo sapiens
  misc_RNA (1)...(19): siRNA sense strand
cuguaaaguucccagaaau

SEQ ID NO: 2370096 - RNA, 19 nt, Homo sapiens
  misc_RNA (1)...(19): siRNA sense strand
agguagagacaguagagaa

SEQ ID NO: 2370097 - RNA, 19 nt, Homo sapiens
  misc_RNA (1)...(19): siRNA sense strand
ccgcagagaaggaggccau

SEQ ID NO: 2370098 - RNA, 19 nt, Homo sapiens
  misc_RNA (1)...(19): siRNA sense strand
gagaaauaugcaaggacuu

SEQ ID NO: 2370099 - RNA, 19 nt, Homo sapiens
  misc_RNA (1)...(19): siRNA sense strand
cagugacagcgaugagaaa

SEQ ID NO: 2370100 - RNA, 19 nt, Homo sapiens
  misc_RNA (1)...(19): siRNA sense strand
gaagggaaggagugggaga

SEQ ID NO: 2370101 - RNA, 19 nt, Homo sapiens
  misc_RNA (1)...(19): siRNA sense strand
ccucacuguccaagcgaaa

SEQ ID NO: 2370102 - RNA, 19 nt, Homo sapiens
  misc_RNA (1)...(19): siRNA sense strand
uguaaaguucccagaaauu

SEQ ID NO: 2370103 - RNA, 19 nt, Homo sapiens
  misc_RNA (1)...(19): siRNA sense strand
cgagaaauaugcaaggacu

SEQ ID NO: 2370104 - RNA, 19 nt, Homo sapiens
  misc_RNA (1)...(19): siRNA sense strand
gggucaaccacaauggcaa

SEQ ID NO: 2370105 - RNA, 19 nt, Homo sapiens
  misc_RNA (1)...(19): siRNA sense strand
gggaagggaaggaguggga

SEQ ID NO: 2370106 - RNA, 19 nt, Homo sapiens
  misc_RNA (1)...(19): siRNA sense strand
ccauguacauugaggugga

SEQ ID NO: 2370107 - RNA, 19 nt, Homo sapiens
  misc_RNA (1)...(19): siRNA sense strand
agucaacaguagugggucu

SEQ ID NO: 2370108 - RNA, 19 nt, Homo sapiens
  misc_RNA (1)...(19): siRNA sense strand
agagcagaaccuugugaaa

SEQ ID NO: 2370109 - RNA, 19 nt, Homo sapiens
  misc_RNA (1)...(19): siRNA sense strand
uggccuaccuagagaacca

SEQ ID NO: 2370110 - RNA, 19 nt, Homo sapiens
  misc_RNA (1)...(19): siRNA sense strand
gguagagacaguagagaag

SEQ ID NO: 2370111 - RNA, 19 nt, Homo sapiens
  misc_RNA (1)...(19): siRNA sense strand
cggcauucuuuaacagcau

SEQ ID NO: 2370112 - RNA, 19 nt, Homo sapiens
  misc_RNA (1)...(19): siRNA sense strand
aggaugacgagaaggauga

SEQ ID NO: 2370113 - RNA, 19 nt, Homo sapiens
  misc_RNA (1)...(19): siRNA sense strand
cuugaagauaucaggaaga

SEQ ID NO: 2370114 - RNA, 19 nt, Homo sapiens
  misc_RNA (1)...(19): siRNA sense strand
cuggagagcagcagugaca

SEQ ID NO: 2370115 - RNA, 19 nt, Homo sapiens
  misc_RNA (1)...(19): siRNA sense strand
cgggagggauggaagacca

SEQ ID NO: 2370116 - RNA, 19 nt, Homo sapiens
  misc_RNA (1)...(19): siRNA sense strand
cguccaagaucgaacccau

SEQ ID NO: 2370117 - RNA, 19 nt, Homo sapiens
  misc_RNA (1)...(19): siRNA sense strand
aggugguuguggugaaaga

SEQ ID NO: 2370118 - RNA, 19 nt, Homo sapiens
  misc_RNA (1)...(19): siRNA sense strand
aacuugagcuugagguaga

SEQ ID NO: 2370119 - RNA, 19 nt, Homo sapiens
  misc_RNA (1)...(19): siRNA sense strand
cugugacugucgugaaauu

SEQ ID NO: 2370120 - RNA, 19 nt, Homo sapiens
  misc_RNA (1)...(19): siRNA sense strand
guagagaagaagaagaaag

SEQ ID NO: 2370121 - RNA, 19 nt, Homo sapiens
  misc_RNA (1)...(19): siRNA sense strand
acgagaaggaugaaaauau

SEQ ID NO: 2370122 - RNA, 19 nt, Homo sapiens
  misc_RNA (1)...(19): siRNA sense strand
gggagaugacaaacugauu

SEQ ID NO: 2370123 - RNA, 19 nt, Homo sapiens
  misc_RNA (1)...(19): siRNA sense strand
gagcaguggcggugugucu

SEQ ID NO: 2370124 - RNA, 19 nt, Homo sapiens
  misc_RNA (1)...(19): siRNA sense strand
gggagggauggaagaccaa

SEQ ID NO: 2370125 - RNA, 19 nt, Homo sapiens
  misc_RNA (1)...(19): siRNA sense strand
caguagugggucugcggaa

SEQ ID NO: 2370126 - RNA, 19 nt, Homo sapiens
  misc_RNA (1)...(19): siRNA sense strand
guacauugagguggagaau

SEQ ID NO: 2370127 - RNA, 19 nt, Homo sapiens
  misc_RNA (1)...(19): siRNA sense strand
aggaggaugacgagaagga

SEQ ID NO: 2370128 - RNA, 19 nt, Homo sapiens
  misc_RNA (1)...(19): siRNA sense strand
uguacauugagguggagaa

SEQ ID NO: 2370129 - RNA, 19 nt, Homo sapiens
  misc_RNA (1)...(19): siRNA sense strand
cggaagagggagcugcuga

SEQ ID NO: 2370130 - RNA, 19 nt, Homo sapiens
  misc_RNA (1)...(19): siRNA sense strand
gugacagcgaugagaaagu

SEQ ID NO: 2370131 - RNA, 19 nt, Homo sapiens
  misc_RNA (1)...(19): siRNA sense strand
acaguagagaagaagaaga

SEQ ID NO: 2370132 - RNA, 19 nt, Homo sapiens
  misc_RNA (1)...(19): siRNA sense strand
ugguuguggugaaagaaga

SEQ ID NO: 2370133 - RNA, 19 nt, Homo sapiens
  misc_RNA (1)...(19): siRNA sense strand
caggcgauucugucaauaa

SEQ ID NO: 2370134 - RNA, 19 nt, Homo sapiens
  misc_RNA (1)...(19): siRNA sense strand
gcguuugacucccgguuca

SEQ ID NO: 2370135 - RNA, 19 nt, Homo sapiens
  misc_RNA (1)...(19): siRNA sense strand
ucaccgagugucaggaaca

SEQ ID NO: 2370136 - RNA, 19 nt, Homo sapiens
  misc_RNA (1)...(19): siRNA sense strand
acucaaacuaccagagaaa

SEQ ID NO: 2370137 - RNA, 19 nt, Homo sapiens
  misc_RNA (1)...(19): siRNA sense strand
uggaaagguuauagaaaca

SEQ ID NO: 2370138 - RNA, 19 nt, Homo sapiens
  misc_RNA (1)...(19): siRNA sense strand
aguuaauucuggugaacaa

SEQ ID NO: 2370139 - RNA, 19 nt, Homo sapiens
  misc_RNA (1)...(19): siRNA sense strand
ggaagaugaagguggagaa

SEQ ID NO: 2370140 - RNA, 19 nt, Homo sapiens
  misc_RNA (1)...(19): siRNA sense strand
cgguaugacuucugugcaa

SEQ ID NO: 2370141 - RNA, 19 nt, Homo sapiens
  misc_RNA (1)...(19): siRNA sense strand
gugcaagagauaugagaga

SEQ ID NO: 2370142 - RNA, 19 nt, Homo sapiens
  misc_RNA (1)...(19): siRNA sense strand
aagagcaaauaaugggaaa

SEQ ID NO: 2370143 - RNA, 19 nt, Homo sapiens
  misc_RNA (1)...(19): siRNA sense strand
ccuacaaccgauaaagaaa

SEQ ID NO: 2370144 - RNA, 19 nt, Homo sapiens
  misc_RNA (1)...(19): siRNA sense strand
agaugaaacccuuguggaa

SEQ ID NO: 2370145 - RNA, 19 nt, Homo sapiens
  misc_RNA (1)...(19): siRNA sense strand
ggacaaaauggguuagaau

SEQ ID NO: 2370146 - RNA, 19 nt, Homo sapiens
  misc_RNA (1)...(19): siRNA sense strand
ugaaaggagauguggugaa

SEQ ID NO: 2370147 - RNA, 19 nt, Homo sapiens
  misc_RNA (1)...(19): siRNA sense strand
caaacugaaauuagaggaa

SEQ ID NO: 2370148 - RNA, 19 nt, Homo sapiens
  misc_RNA (1)...(19): siRNA sense strand
guacuuaccuugugaggca

SEQ ID NO: 2370149 - RNA, 19 nt, Homo sapiens
  misc_RNA (1)...(19): siRNA sense strand
gcaagagauaugagagagu

SEQ ID NO: 2370150 - RNA, 19 nt, Homo sapiens
  misc_RNA (1)...(19): siRNA sense strand
guggagaggagaaguaaau

SEQ ID NO: 2370151 - RNA, 19 nt, Homo sapiens
  misc_RNA (1)...(19): siRNA sense strand
gcccaaauguccagaaaau

SEQ ID NO: 2370152 - RNA, 19 nt, Homo sapiens
  misc_RNA (1)...(19): siRNA sense strand
gcaaauggcugguggagag

SEQ ID NO: 2370153 - RNA, 19 nt, Homo sapiens
  misc_RNA (1)...(19): siRNA sense strand
ccaugaaggacuuggcaca

SEQ ID NO: 2370154 - RNA, 19 nt, Homo sapiens
  misc_RNA (1)...(19): siRNA sense strand
cauccauacccaaggacaa

SEQ ID NO: 2370155 - RNA, 19 nt, Homo sapiens
  misc_RNA (1)...(19): siRNA sense strand
aagcauaccaaacaagaaa

SEQ ID NO: 2370156 - RNA, 19 nt, Homo sapiens
  misc_RNA (1)...(19): siRNA sense strand
ccaacagaagaaagcauua

SEQ ID NO: 2370157 - RNA, 19 nt, Homo sapiens
  misc_RNA (1)...(19): siRNA sense strand
cuuaaugaaggcagaggaa

SEQ ID NO: 2370158 - RNA, 19 nt, Homo sapiens
  misc_RNA (1)...(19): siRNA sense strand
ggaccaaagagucaggaga

SEQ ID NO: 2370159 - RNA, 19 nt, Homo sapiens
  misc_RNA (1)...(19): siRNA sense strand
acuuuggagucaauagaaa

SEQ ID NO: 2370160 - RNA, 19 nt, Homo sapiens
  misc_RNA (1)...(19): siRNA sense strand
uugaagaacauaaggacau

SEQ ID NO: 2370161 - RNA, 19 nt, Homo sapiens
  misc_RNA (1)...(19): siRNA sense strand
gcauuaaugaugaagacau

SEQ ID NO: 2370162 - RNA, 19 nt, Homo sapiens
  misc_RNA (1)...(19): siRNA sense strand
augaaacccuuguggaaga

SEQ ID NO: 2370163 - RNA, 19 nt, Homo sapiens
  misc_RNA (1)...(19): siRNA sense strand
cuauagagaauuugaacca

SEQ ID NO: 2370164 - RNA, 19 nt, Homo sapiens
  misc_RNA (1)...(19): siRNA sense strand
cgaacuuauuaauagggua

SEQ ID NO: 2370165 - RNA, 19 nt, Homo sapiens
  misc_RNA (1)...(19): siRNA sense strand
aaggagauguggugaagau

SEQ ID NO: 2370166 - RNA, 19 nt, Homo sapiens
  misc_RNA (1)...(19): siRNA sense strand
uugaaauggcuuugucuaa

SEQ ID NO: 2370167 - RNA, 19 nt, Homo sapiens
  misc_RNA (1)...(19): siRNA sense strand
agaugaagguggagaaguc

SEQ ID NO: 2370168 - RNA, 19 nt, Homo sapiens
  misc_RNA (1)...(19): siRNA sense strand
cauauguggaagaggauga

SEQ ID NO: 2370169 - RNA, 19 nt, Homo sapiens
  misc_RNA (1)...(19): siRNA sense strand
guuugauguucgugacuuu

SEQ ID NO: 2370170 - RNA, 19 nt, Homo sapiens
  misc_RNA (1)...(19): siRNA sense strand
gguggagaggagaaguaaa

SEQ ID NO: 2370171 - RNA, 19 nt, Homo sapiens
  misc_RNA (1)...(19): siRNA sense strand
auguggaagaggaugaaua

SEQ ID NO: 2370172 - RNA, 19 nt, Homo sapiens
  misc_RNA (1)...(19): siRNA sense strand
uguggaagaggaugaauaa

SEQ ID NO: 2370173 - RNA, 19 nt, Homo sapiens
  misc_RNA (1)...(19): siRNA sense strand
ggcuagaacaguuugaaau

SEQ ID NO: 2370174 - RNA, 19 nt, Homo sapiens
  misc_RNA (1)...(19): siRNA sense strand
agaagaugucaaacugaaa

SEQ ID NO: 2370175 - RNA, 19 nt, Homo sapiens
  misc_RNA (1)...(19): siRNA sense strand
uggaaagauugcaagcaga

SEQ ID NO: 2370176 - RNA, 19 nt, Homo sapiens
  misc_RNA (1)...(19): siRNA sense strand
guggagaagucuaugagga

SEQ ID NO: 2370177 - RNA, 19 nt, Homo sapiens
  misc_RNA (1)...(19): siRNA sense strand
uguggaagaugaagaagau

SEQ ID NO: 2370178 - RNA, 19 nt, Homo sapiens
  misc_RNA (1)...(19): siRNA sense strand
ugaucguauguaagagaaa

SEQ ID NO: 2370179 - RNA, 19 nt, Homo sapiens
  misc_RNA (1)...(19): siRNA sense strand
agucaaaagaagaugucaa

SEQ ID NO: 2370180 - RNA, 19 nt, Homo sapiens
  misc_RNA (1)...(19): siRNA sense strand
ugagaaggcaaaucugaaa

SEQ ID NO: 2370181 - RNA, 19 nt, Homo sapiens
  misc_RNA (1)...(19): siRNA sense strand
cagaaauuaagcagacaga

SEQ ID NO: 2370182 - RNA, 19 nt, Homo sapiens
  misc_RNA (1)...(19): siRNA sense strand
agagaaaaggugauaacua

SEQ ID NO: 2370183 - RNA, 19 nt, Homo sapiens
  misc_RNA (1)...(19): siRNA sense strand
uggaacuuguggaguacua

SEQ ID NO: 2370184 - RNA, 19 nt, Homo sapiens
  misc_RNA (1)...(19): siRNA sense strand
aagcagagaccgaacuuau

SEQ ID NO: 2370185 - RNA, 19 nt, Homo sapiens
  misc_RNA (1)...(19): siRNA sense strand
ccaaggacaaaauggguua

SEQ ID NO: 2370186 - RNA, 19 nt, Homo sapiens
  misc_RNA (1)...(19): siRNA sense strand
ugaaugaagugaaaagaga

SEQ ID NO: 2370187 - RNA, 19 nt, Homo sapiens
  misc_RNA (1)...(19): siRNA sense strand
cgaauaaccacucuagaca

SEQ ID NO: 2370188 - RNA, 19 nt, Homo sapiens
  misc_RNA (1)...(19): siRNA sense strand
caauuguggcagaguuaau

SEQ ID NO: 2370189 - RNA, 19 nt, Homo sapiens
  misc_RNA (1)...(19): siRNA sense strand
uaccaaagaugcaggucau

SEQ ID NO: 2370190 - RNA, 19 nt, Homo sapiens
  misc_RNA (1)...(19): siRNA sense strand
ugcccaaaccaguagauua

SEQ ID NO: 2370191 - RNA, 19 nt, Homo sapiens
  misc_RNA (1)...(19): siRNA sense strand
gcgagagcacacaaagaau

SEQ ID NO: 2370192 - RNA, 19 nt, Homo sapiens
  misc_RNA (1)...(19): siRNA sense strand
ggguaauagagcaggcaac

SEQ ID NO: 2370193 - RNA, 19 nt, Homo sapiens
  misc_RNA (1)...(19): siRNA sense strand
cagcccaaauguccagaaa

SEQ ID NO: 2370194 - RNA, 19 nt, Homo sapiens
  misc_RNA (1)...(19): siRNA sense strand
gaagacgacgagaggguaa

SEQ ID NO: 2370195 - RNA, 19 nt, Homo sapiens
  misc_RNA (1)...(19): siRNA sense strand
cagacaugauggaggagau

SEQ ID NO: 2370196 - RNA, 19 nt, Homo sapiens
  misc_RNA (1)...(19): siRNA sense strand
cgugugacaaacagagaua

SEQ ID NO: 2370197 - RNA, 19 nt, Homo sapiens
  misc_RNA (1)...(19): siRNA sense strand
gcaaggaauuuaaugcaga

SEQ ID NO: 2370198 - RNA, 19 nt, Homo sapiens
  misc_RNA (1)...(19): siRNA sense strand
uggaaagcauugaugguca

SEQ ID NO: 2370199 - RNA, 19 nt, Homo sapiens
  misc_RNA (1)...(19): siRNA sense strand
ugauaguucgugugacaaa

SEQ ID NO: 2370200 - RNA, 19 nt, Homo sapiens
  misc_RNA (1)...(19): siRNA sense strand
augcagaaguacaucggaa

SEQ ID NO: 2370201 - RNA, 19 nt, Homo sapiens
  misc_RNA (1)...(19): siRNA sense strand
aauacaauguggaaagcau

SEQ ID NO: 2370202 - RNA, 19 nt, Homo sapiens
  misc_RNA (1)...(19): siRNA sense strand
agugaaauuuagaagacga

SEQ ID NO: 2370203 - RNA, 19 nt, Homo sapiens
  misc_RNA (1)...(19): siRNA sense strand
uacauaaagaacagcguaa

SEQ ID NO: 2370204 - RNA, 19 nt, Homo sapiens
  misc_RNA (1)...(19): siRNA sense strand
ggaagcacaucaugggcca

SEQ ID NO: 2370205 - RNA, 19 nt, Homo sapiens
  misc_RNA (1)...(19): siRNA sense strand
caagaucuaugaaggccaa

SEQ ID NO: 2370206 - RNA, 19 nt, Homo sapiens
  misc_RNA (1)...(19): siRNA sense strand
gaugaauacaauguggaaa

SEQ ID NO: 2370207 - RNA, 19 nt, Homo sapiens
  misc_RNA (1)...(19): siRNA sense strand
ccaagugaaauuuagaaga

SEQ ID NO: 2370208 - RNA, 19 nt, Homo sapiens
  misc_RNA (1)...(19): siRNA sense strand
gaaauuuagaagacgacga

SEQ ID NO: 2370209 - RNA, 19 nt, Homo sapiens
  misc_RNA (1)...(19): siRNA sense strand
uaauggaagaagaugaaga

SEQ ID NO: 2370210 - RNA, 19 nt, Homo sapiens
  misc_RNA (1)...(19): siRNA sense strand
aagcauugauggucagcca

SEQ ID NO: 2370211 - RNA, 19 nt, Homo sapiens
  misc_RNA (1)...(19): siRNA sense strand
agcccaagaaagaaguuaa

SEQ ID NO: 2370212 - RNA, 19 nt, Homo sapiens
  misc_RNA (1)...(19): siRNA sense strand
ugaugaauacaauguggaa

SEQ ID NO: 2370213 - RNA, 19 nt, Homo sapiens
  misc_RNA (1)...(19): siRNA sense strand
cagaacuaccacuggcaau

SEQ ID NO: 2370214 - RNA, 19 nt, Homo sapiens
  misc_RNA (1)...(19): siRNA sense strand
ugacaaacagagauaucau

SEQ ID NO: 2370215 - RNA, 19 nt, Homo sapiens
  misc_RNA (1)...(19): siRNA sense strand
uuguuaagaauaaggccua

SEQ ID NO: 2370216 - RNA, 19 nt, Homo sapiens
  misc_RNA (1)...(19): siRNA sense strand
uagaagacgacgagagggu

SEQ ID NO: 2370217 - RNA, 19 nt, Homo sapiens
  misc_RNA (1)...(19): siRNA sense strand
augaauacaauguggaaag

SEQ ID NO: 2370218 - RNA, 19 nt, Homo sapiens
  misc_RNA (1)...(19): siRNA sense strand
cagaagaaggaucggguag

SEQ ID NO: 2370219 - RNA, 19 nt, Homo sapiens
  misc_RNA (1)...(19): siRNA sense strand
gcucggaaacgcuugguga

SEQ ID NO: 2370220 - RNA, 19 nt, Homo sapiens
  misc_RNA (1)...(19): siRNA sense strand
cauaaagaacagcguaacu

SEQ ID NO: 2370221 - RNA, 19 nt, Homo sapiens
  misc_RNA (1)...(19): siRNA sense strand
gcgccaaggccaagaccau

SEQ ID NO: 2370222 - RNA, 19 nt, Homo sapiens
  misc_RNA (1)...(19): siRNA sense strand
ggcuacagguaaugggcau

SEQ ID NO: 2370223 - RNA, 19 nt, Homo sapiens
  misc_RNA (1)...(19): siRNA sense strand
augaaagcgccaaggccaa

SEQ ID NO: 2370224 - RNA, 19 nt, Homo sapiens
  misc_RNA (1)...(19): siRNA sense strand
gaugaaagcgccaaggcca

SEQ ID NO: 2370225 - RNA, 19 nt, Homo sapiens
  misc_RNA (1)...(19): siRNA sense strand
ccauggggcuacagguaau

SEQ ID NO: 2370226 - RNA, 19 nt, Homo sapiens
  misc_RNA (1)...(19): siRNA sense strand
ggaugaacugcguggugca

SEQ ID NO: 2370227 - RNA, 19 nt, Homo sapiens
  misc_RNA (1)...(19): siRNA sense strand
aagagagagacaugucaaa

SEQ ID NO: 2370228 - RNA, 19 nt, Homo sapiens
  misc_RNA (1)...(19): siRNA sense strand
ggacaugggcauccaagga

SEQ ID NO: 2370229 - RNA, 19 nt, Homo sapiens
  misc_RNA (1)...(19): siRNA sense strand
aagagagagacaugucaaa

SEQ ID NO: 2370230 - RNA, 19 nt, Homo sapiens
  misc_RNA (1)...(19): siRNA sense strand
agccaaagccagaggagau

SEQ ID NO: 2370231 - RNA, 19 nt, Homo sapiens
  misc_RNA (1)...(19): siRNA sense strand
gggugaugcuggugaggca

SEQ ID NO: 2370232 - RNA, 19 nt, Homo sapiens
  misc_RNA (1)...(19): siRNA sense strand
ccgagaucauccugagcaa

SEQ ID NO: 2370233 - RNA, 19 nt, Homo sapiens
  misc_RNA (1)...(19): siRNA sense strand
gagcaggaggagagcguga

SEQ ID NO: 2370234 - RNA, 19 nt, Homo sapiens
  misc_RNA (1)...(19): siRNA sense strand
acgacuacgaggaggaaga

SEQ ID NO: 2370235 - RNA, 19 nt, Homo sapiens
  misc_RNA (1)...(19): siRNA sense strand
ucaucgaccagcagggcua

SEQ ID NO: 2370236 - RNA, 19 nt, Homo sapiens
  misc_RNA (1)...(19): siRNA sense strand
gagcacauacugaacgaga

SEQ ID NO: 2370237 - RNA, 19 nt, Homo sapiens
  misc_RNA (1)...(19): siRNA sense strand
ugagcaaaggcuacaacaa

SEQ ID NO: 2370238 - RNA, 19 nt, Homo sapiens
  misc_RNA (1)...(19): siRNA sense strand
augagauggccgugggcuu

SEQ ID NO: 2370239 - RNA, 19 nt, Homo sapiens
  misc_RNA (1)...(19): siRNA sense strand
guuccuagccaaagccaga

SEQ ID NO: 2370240 - RNA, 19 nt, Homo sapiens
  misc_RNA (1)...(19): siRNA sense strand
acaagcagaagguggugaa

SEQ ID NO: 2370241 - RNA, 19 nt, Homo sapiens
  misc_RNA (1)...(19): siRNA sense strand
aggaggagagcgugaacga

SEQ ID NO: 2370242 - RNA, 19 nt, Homo sapiens
  misc_RNA (1)...(19): siRNA sense strand
gaggagagcgugaacgagu

SEQ ID NO: 2370243 - RNA, 19 nt, Homo sapiens
  misc_RNA (1)...(19): siRNA sense strand
ucgccaucuaugagaagaa

SEQ ID NO: 2370244 - RNA, 19 nt, Homo sapiens
  misc_RNA (1)...(19): siRNA sense strand
cgaccugaagcccgagaau

SEQ ID NO: 2370245 - RNA, 19 nt, Homo sapiens
  misc_RNA (1)...(19): siRNA sense strand
gaaauuguuuggugggaga

SEQ ID NO: 2370246 - RNA, 19 nt, Homo sapiens
  misc_RNA (1)...(19): siRNA sense strand
caacaaaagagaagaacuu

SEQ ID NO: 2370247 - RNA, 19 nt, Homo sapiens
  misc_RNA (1)...(19): siRNA sense strand
aggcugaaguaaugaugaa

SEQ ID NO: 2370248 - RNA, 19 nt, Homo sapiens
  misc_RNA (1)...(19): siRNA sense strand
cugaagaaacuguggucau

SEQ ID NO: 2370249 - RNA, 19 nt, Homo sapiens
  misc_RNA (1)...(19): siRNA sense strand
uuaaagaagaaacgaggaa

SEQ ID NO: 2370250 - RNA, 19 nt, Homo sapiens
  misc_RNA (1)...(19): siRNA sense strand
cauuaucacaucaaggaaa

SEQ ID NO: 2370251 - RNA, 19 nt, Homo sapiens
  misc_RNA (1)...(19): siRNA sense strand
augacaauccuaagcgaua

SEQ ID NO: 2370252 - RNA, 19 nt, Homo sapiens
  misc_RNA (1)...(19): siRNA sense strand
aggacaagguggcuaucaa

SEQ ID NO: 2370253 - RNA, 19 nt, Homo sapiens
  misc_RNA (1)...(19): siRNA sense strand
accuaugagugguacaaua

SEQ ID NO: 2370254 - RNA, 19 nt, Homo sapiens
  misc_RNA (1)...(19): siRNA sense strand
gguuggugcaucugggcua

SEQ ID NO: 2370255 - RNA, 19 nt, Homo sapiens
  misc_RNA (1)...(19): siRNA sense strand
cugaaguaaugaugaaacu

SEQ ID NO: 2370256 - RNA, 19 nt, Homo sapiens
  misc_RNA (1)...(19): siRNA sense strand
gagaaaaccaagucaucaa

SEQ ID NO: 2370257 - RNA, 19 nt, Homo sapiens
  misc_RNA (1)...(19): siRNA sense strand
cagaggugguggaagacau

SEQ ID NO: 2370258 - RNA, 19 nt, Homo sapiens
  misc_RNA (1)...(19): siRNA sense strand
uggaagaacagcucaucaa

SEQ ID NO: 2370259 - RNA, 19 nt, Homo sapiens
  misc_RNA (1)...(19): siRNA sense strand
gggaaguggaggugcuguu

SEQ ID NO: 2370260 - RNA, 19 nt, Homo sapiens
  misc_RNA (1)...(19): siRNA sense strand
gcaugaaggauauguacca

SEQ ID NO: 2370261 - RNA, 19 nt, Homo sapiens
  misc_RNA (1)...(19): siRNA sense strand
uagaggaggcugaaguaau

SEQ ID NO: 2370262 - RNA, 19 nt, Homo sapiens
  misc_RNA (1)...(19): siRNA sense strand
gcgucaacuggcugaaauu

SEQ ID NO: 2370263 - RNA, 19 nt, Homo sapiens
  misc_RNA (1)...(19): siRNA sense strand
auaacaguuuggugccuaa

SEQ ID NO: 2370264 - RNA, 19 nt, Homo sapiens
  misc_RNA (1)...(19): siRNA sense strand
acuuuauccuccuggaaga

SEQ ID NO: 2370265 - RNA, 19 nt, Homo sapiens
  misc_RNA (1)...(19): siRNA sense strand
ccuaauuucuggauggaug

SEQ ID NO: 2370266 - RNA, 19 nt, Homo sapiens
  misc_RNA (1)...(19): siRNA sense strand
agaacagcucaucaagaaa

SEQ ID NO: 2370267 - RNA, 19 nt, Homo sapiens
  misc_RNA (1)...(19): siRNA sense strand
uggaaaccuaugaguggua

SEQ ID NO: 2370268 - RNA, 19 nt, Homo sapiens
  misc_RNA (1)...(19): siRNA sense strand
acaaggacaagguggcuau

SEQ ID NO: 2370269 - RNA, 19 nt, Homo sapiens
  misc_RNA (1)...(19): siRNA sense strand
uaucaaaaccauucgggaa

SEQ ID NO: 2370270 - RNA, 19 nt, Homo sapiens
  misc_RNA (1)...(19): siRNA sense strand
ucaagaaaucccaacaaaa

SEQ ID NO: 2370271 - RNA, 19 nt, Homo sapiens
  misc_RNA (1)...(19): siRNA sense strand
gagugguacaauaagagua

SEQ ID NO: 2370272 - RNA, 19 nt, Homo sapiens
  misc_RNA (1)...(19): siRNA sense strand
gggcuaugucagaagagga

SEQ ID NO: 2370273 - RNA, 19 nt, Homo sapiens
  misc_RNA (1)...(19): siRNA sense strand
agugguacaauaagaguau

SEQ ID NO: 2370274 - RNA, 19 nt, Homo sapiens
  misc_RNA (1)...(19): siRNA sense strand
caucaagaaaucccaacaa

SEQ ID NO: 2370275 - RNA, 19 nt, Homo sapiens
  misc_RNA (1)...(19): siRNA sense strand
agauacgggaaauggguga

SEQ ID NO: 2370276 - RNA, 19 nt, Homo sapiens
  misc_RNA (1)...(19): siRNA sense strand
ugguacaauaagaguauca

SEQ ID NO: 2370277 - RNA, 19 nt, Homo sapiens
  misc_RNA (1)...(19): siRNA sense strand
caauaagaguaucagccga

SEQ ID NO: 2370278 - RNA, 19 nt, Homo sapiens
  misc_RNA (1)...(19): siRNA sense strand
gguaagggauuccaggacu

SEQ ID NO: 2370279 - RNA, 19 nt, Homo sapiens
  misc_RNA (1)...(19): siRNA sense strand
ucaccaacauaauggagga

SEQ ID NO: 2370280 - RNA, 19 nt, Homo sapiens
  misc_RNA (1)...(19): siRNA sense strand
agggcugagauacgggaaa

SEQ ID NO: 2370281 - RNA, 19 nt, Homo sapiens
  misc_RNA (1)...(19): siRNA sense strand
gaggaagagcuaaggagca

SEQ ID NO: 2370282 - RNA, 19 nt, Homo sapiens
  misc_RNA (1)...(19): siRNA sense strand
cugaaaagaccaagagagu

SEQ ID NO: 2370283 - RNA, 19 nt, Homo sapiens
  misc_RNA (1)...(19): siRNA sense strand
auccagaccaggagaacaa

SEQ ID NO: 2370284 - RNA, 19 nt, Homo sapiens
  misc_RNA (1)...(19): siRNA sense strand
ugucugugccuguggaaau

SEQ ID NO: 2370285 - RNA, 19 nt, Homo sapiens
  misc_RNA (1)...(19): siRNA sense strand
gagcugagaccgaggugga

SEQ ID NO: 2370286 - RNA, 19 nt, Homo sapiens
  misc_RNA (1)...(19): siRNA sense strand
uccugaaguuuguggaaca

SEQ ID NO: 2370287 - RNA, 19 nt, Homo sapiens
  misc_RNA (1)...(19): siRNA sense strand
ccagauauguccaggagcu

SEQ ID NO: 2370288 - RNA, 19 nt, Homo sapiens
  misc_RNA (1)...(19): siRNA sense strand
gaagaaauccguaagucca

SEQ ID NO: 2370289 - RNA, 19 nt, Homo sapiens
  misc_RNA (1)...(19): siRNA sense strand
agacagaggaggagaugac

SEQ ID NO: 2370290 - RNA, 19 nt, Homo sapiens
  misc_RNA (1)...(19): siRNA sense strand
ggcuggaagcugagaucau

SEQ ID NO: 2370291 - RNA, 19 nt, Homo sapiens
  misc_RNA (1)...(19): siRNA sense strand
cuccaaaagcaucaggaaa

SEQ ID NO: 2370292 - RNA, 19 nt, Homo sapiens
  misc_RNA (1)...(19): siRNA sense strand
cagauggagcugagaccga

SEQ ID NO: 2370293 - RNA, 19 nt, Homo sapiens
  misc_RNA (1)...(19): siRNA sense strand
ccaugaccugugacggaaa

SEQ ID NO: 2370294 - RNA, 19 nt, Homo sapiens
  misc_RNA (1)...(19): siRNA sense strand
gauuaugggugcugggaca

SEQ ID NO: 2370295 - RNA, 19 nt, Homo sapiens
  misc_RNA (1)...(19): siRNA sense strand
augacaaggcagcgaguuu

SEQ ID NO: 2370296 - RNA, 19 nt, Homo sapiens
  misc_RNA (1)...(19): siRNA sense strand
caauauugugucauggcua

SEQ ID NO: 2370297 - RNA, 19 nt, Homo sapiens
  misc_RNA (1)...(19): siRNA sense strand
ccgaauccugcuucagaaa

SEQ ID NO: 2370298 - RNA, 19 nt, Homo sapiens
  misc_RNA (1)...(19): siRNA sense strand
cagauaucaggaagaguga

SEQ ID NO: 2370299 - RNA, 19 nt, Homo sapiens
  misc_RNA (1)...(19): siRNA sense strand
uggaugagcagcagaccau

SEQ ID NO: 2370300 - RNA, 19 nt, Homo sapiens
  misc_RNA (1)...(19): siRNA sense strand
cgaggauggcaguggcaaa

SEQ ID NO: 2370301 - RNA, 19 nt, Homo sapiens
  misc_RNA (1)...(19): siRNA sense strand
ccagaagacauuagagcau

SEQ ID NO: 2370302 - RNA, 19 nt, Homo sapiens
  misc_RNA (1)...(19): siRNA sense strand
uggauaagcuacaaaucaa

SEQ ID NO: 2370303 - RNA, 19 nt, Homo sapiens
  misc_RNA (1)...(19): siRNA sense strand
ccgcaaggagauggagaaa

SEQ ID NO: 2370304 - RNA, 19 nt, Homo sapiens
  misc_RNA (1)...(19): siRNA sense strand
ggauaagcuacaaaucaaa

SEQ ID NO: 2370305 - RNA, 19 nt, Homo sapiens
  misc_RNA (1)...(19): siRNA sense strand
gagaaaaugaucaguggaa

SEQ ID NO: 2370306 - RNA, 19 nt, Homo sapiens
  misc_RNA (1)...(19): siRNA sense strand
uggaacugguggaaggaga

SEQ ID NO: 2370307 - RNA, 19 nt, Homo sapiens
  misc_RNA (1)...(19): siRNA sense strand
ggagauggagaaagggcuu

SEQ ID NO: 2370308 - RNA, 19 nt, Homo sapiens
  misc_RNA (1)...(19): siRNA sense strand
ggaccuuggaggaacaaau

SEQ ID NO: 2370309 - RNA, 19 nt, Homo sapiens
  misc_RNA (1)...(19): siRNA sense strand
gcucacugaacccgggaaa

SEQ ID NO: 2370310 - RNA, 19 nt, Homo sapiens
  misc_RNA (1)...(19): siRNA sense strand
caagcagagguucgagaaa

SEQ ID NO: 2370311 - RNA, 19 nt, Homo sapiens
  misc_RNA (1)...(19): siRNA sense strand
gggacgagcucuuugacca

SEQ ID NO: 2370312 - RNA, 19 nt, Homo sapiens
  misc_RNA (1)...(19): siRNA sense strand
agaagguggagauggagaa

SEQ ID NO: 2370313 - RNA, 19 nt, Homo sapiens
  misc_RNA (1)...(19): siRNA sense strand
acauggaggagaugcgcaa

SEQ ID NO: 2370314 - RNA, 19 nt, Homo sapiens
  misc_RNA (1)...(19): siRNA sense strand
gcacugaguuugaccagga

SEQ ID NO: 2370315 - RNA, 19 nt, Homo sapiens
  misc_RNA (1)...(19): siRNA sense strand
gagaagaugaucaguggga

SEQ ID NO: 2370316 - RNA, 19 nt, Homo sapiens
  misc_RNA (1)...(19): siRNA sense strand
cggacuuccucgaguacau

SEQ ID NO: 2370317 - RNA, 19 nt, Homo sapiens
  misc_RNA (1)...(19): siRNA sense strand
guggaauguaccuggguga

SEQ ID NO: 2370318 - RNA, 19 nt, Homo sapiens
  misc_RNA (1)...(19): siRNA sense strand
ccugcuacauggaggagau

SEQ ID NO: 2370319 - RNA, 19 nt, Homo sapiens
  misc_RNA (1)...(19): siRNA sense strand
acaaaaggcuucaaggcau

SEQ ID NO: 2370320 - RNA, 19 nt, Homo sapiens
  misc_RNA (1)...(19): siRNA sense strand
gaagaugaucagugggaug

SEQ ID NO: 2370321 - RNA, 19 nt, Homo sapiens
  misc_RNA (1)...(19): siRNA sense strand
acaacaagaucuacgccau

SEQ ID NO: 2370322 - RNA, 19 nt, Homo sapiens
  misc_RNA (1)...(19): siRNA sense strand
ucaaagugacagugggugu

SEQ ID NO: 2370323 - RNA, 19 nt, Homo sapiens
  misc_RNA (1)...(19): siRNA sense strand
guggaguggagaugcacaa

SEQ ID NO: 2370324 - RNA, 19 nt, Homo sapiens
  misc_RNA (1)...(19): siRNA sense strand
acauuguggcuguggugaa

SEQ ID NO: 2370325 - RNA, 19 nt, Homo sapiens
  misc_RNA (1)...(19): siRNA sense strand
acuuagggcuugagagcac

SEQ ID NO: 2370326 - RNA, 19 nt, Homo sapiens
  misc_RNA (1)...(19): siRNA sense strand
ggugaaaguaacggacaau

SEQ ID NO: 2370327 - RNA, 19 nt, Homo sapiens
  misc_RNA (1)...(19): siRNA sense strand
ugaagauggccaaggagga

SEQ ID NO: 2370328 - RNA, 19 nt, Homo sapiens
  misc_RNA (1)...(19): siRNA sense strand
gaugagacccucuuggaga

SEQ ID NO: 2370329 - RNA, 19 nt, Homo sapiens
  misc_RNA (1)...(19): siRNA sense strand
cagaagguggagauggaga

SEQ ID NO: 2370330 - RNA, 19 nt, Homo sapiens
  misc_RNA (1)...(19): siRNA sense strand
aguggaaggcagagacguu

SEQ ID NO: 2370331 - RNA, 19 nt, Homo sapiens
  misc_RNA (1)...(19): siRNA sense strand
aguuugaccaggagauuga

SEQ ID NO: 2370332 - RNA, 19 nt, Homo sapiens
  misc_RNA (1)...(19): siRNA sense strand
ggacaucaugcgaggcagu

SEQ ID NO: 2370333 - RNA, 19 nt, Homo sapiens
  misc_RNA (1)...(19): siRNA sense strand
agcuacaaaucaaagacaa

SEQ ID NO: 2370334 - RNA, 19 nt, Homo sapiens
  misc_RNA (1)...(19): siRNA sense strand
ucgacaugguggaaggcga

SEQ ID NO: 2370335 - RNA, 19 nt, Homo sapiens
  misc_RNA (1)...(19): siRNA sense strand
ggcuuauccuggugaagau

SEQ ID NO: 2370336 - RNA, 19 nt, Homo sapiens
  misc_RNA (1)...(19): siRNA sense strand
uggugacagcaguggcuua

SEQ ID NO: 2370337 - RNA, 19 nt, Homo sapiens
  misc_RNA (1)...(19): siRNA sense strand
gcuacaaaucaaagacaag

SEQ ID NO: 2370338 - RNA, 19 nt, Homo sapiens
  misc_RNA (1)...(19): siRNA sense strand
ccugcaacacuuagggcuu

SEQ ID NO: 2370339 - RNA, 19 nt, Homo sapiens
  misc_RNA (1)...(19): siRNA sense strand
agacuaaacuagacgagag

SEQ ID NO: 2370340 - RNA, 19 nt, Homo sapiens
  misc_RNA (1)...(19): siRNA sense strand
aagcagagguucgagaaaa

SEQ ID NO: 2370341 - RNA, 19 nt, Homo sapiens
  misc_RNA (1)...(19): siRNA sense strand
agcagagguucgagaaaau

SEQ ID NO: 2370342 - RNA, 19 nt, Homo sapiens
  misc_RNA (1)...(19): siRNA sense strand
gcucugauccggaaggcca

SEQ ID NO: 2370343 - RNA, 19 nt, Homo sapiens
  misc_RNA (1)...(19): siRNA sense strand
gaaaaugaucaguggaaug

SEQ ID NO: 2370344 - RNA, 19 nt, Homo sapiens
  misc_RNA (1)...(19): siRNA sense strand
gcaacaaggucaagagcga

SEQ ID NO: 2370345 - RNA, 19 nt, Homo sapiens
  misc_RNA (1)...(19): siRNA sense strand
ccaaccaggucaagggcaa

SEQ ID NO: 2370346 - RNA, 19 nt, Homo sapiens
  misc_RNA (1)...(19): siRNA sense strand
aggaagacgaggaggagga

SEQ ID NO: 2370347 - RNA, 19 nt, Homo sapiens
  misc_RNA (1)...(19): siRNA sense strand
gagcggaagaggugggagu

SEQ ID NO: 2370348 - RNA, 19 nt, Homo sapiens
  misc_RNA (1)...(19): siRNA sense strand
aggacgacgacgaggaaga

SEQ ID NO: 2370349 - RNA, 19 nt, Homo sapiens
  misc_RNA (1)...(19): siRNA sense strand
aggaggaggaggaggagga

SEQ ID NO: 2370350 - RNA, 19 nt, Homo sapiens
  misc_RNA (1)...(19): siRNA sense strand
cugaugagcaagaugaaca

SEQ ID NO: 2370351 - RNA, 19 nt, Homo sapiens
  misc_RNA (1)...(19): siRNA sense strand
acgaggaagacgaggagga

SEQ ID NO: 2370352 - RNA, 19 nt, Homo sapiens
  misc_RNA (1)...(19): siRNA sense strand
acgaggaggaggaggagga

SEQ ID NO: 2370353 - RNA, 19 nt, Homo sapiens
  misc_RNA (1)...(19): siRNA sense strand
ccgacgaggacaucaggaa

SEQ ID NO: 2370354 - RNA, 19 nt, Homo sapiens
  misc_RNA (1)...(19): siRNA sense strand
aagacgaggaggaggagga

SEQ ID NO: 2370355 - RNA, 19 nt, Homo sapiens
  misc_RNA (1)...(19): siRNA sense strand
acaucaggaagcaggaaga

SEQ ID NO: 2370356 - RNA, 19 nt, Homo sapiens
  misc_RNA (1)...(19): siRNA sense strand
cggagauggagcacgucua

SEQ ID NO: 2370357 - RNA, 19 nt, Homo sapiens
  misc_RNA (1)...(19): siRNA sense strand
ugaugagcaagaugaacaa

SEQ ID NO: 2370358 - RNA, 19 nt, Homo sapiens
  misc_RNA (1)...(19): siRNA sense strand
gagaggaggaggaauuuaa

SEQ ID NO: 2370359 - RNA, 19 nt, Homo sapiens
  misc_RNA (1)...(19): siRNA sense strand
aguccaagccagucaacaa

SEQ ID NO: 2370360 - RNA, 19 nt, Homo sapiens
  misc_RNA (1)...(19): siRNA sense strand
agcgagaggaggaggaauu

SEQ ID NO: 2370361 - RNA, 19 nt, Homo sapiens
  misc_RNA (1)...(19): siRNA sense strand
ccaagaguggcaagggcaa

SEQ ID NO: 2370362 - RNA, 19 nt, Homo sapiens
  misc_RNA (1)...(19): siRNA sense strand
cuggagaacgugaaggaga

SEQ ID NO: 2370363 - RNA, 19 nt, Homo sapiens
  misc_RNA (1)...(19): siRNA sense strand
cagucagucaagaacaaua

SEQ ID NO: 2370364 - RNA, 19 nt, Homo sapiens
  misc_RNA (1)...(19): siRNA sense strand
gaacaauacccaagugcuc

SEQ ID NO: 2370365 - RNA, 19 nt, Homo sapiens
  misc_RNA (1)...(19): siRNA sense strand
agaagaaguccaagccagu

SEQ ID NO: 2370366 - RNA, 19 nt, Homo sapiens
  misc_RNA (1)...(19): siRNA sense strand
cagucaacaaagaccgcua

SEQ ID NO: 2370367 - RNA, 19 nt, Homo sapiens
  misc_RNA (1)...(19): siRNA sense strand
ucaucgugguccugcggaa

SEQ ID NO: 2370368 - RNA, 19 nt, Homo sapiens
  misc_RNA (1)...(19): siRNA sense strand
gcaacauggugcuggagaa

SEQ ID NO: 2370369 - RNA, 19 nt, Homo sapiens
  misc_RNA (1)...(19): siRNA sense strand
gagaggaggaggaauuuaa

SEQ ID NO: 2370370 - RNA, 19 nt, Homo sapiens
  misc_RNA (1)...(19): siRNA sense strand
aguccaagccagucaacaa

SEQ ID NO: 2370371 - RNA, 19 nt, Homo sapiens
  misc_RNA (1)...(19): siRNA sense strand
agcgagaggaggaggaauu

SEQ ID NO: 2370372 - RNA, 19 nt, Homo sapiens
  misc_RNA (1)...(19): siRNA sense strand
ccaagaguggcaagggcaa

SEQ ID NO: 2370373 - RNA, 19 nt, Homo sapiens
  misc_RNA (1)...(19): siRNA sense strand
cuggagaacgugaaggaga

SEQ ID NO: 2370374 - RNA, 19 nt, Homo sapiens
  misc_RNA (1)...(19): siRNA sense strand
cagucagucaagaacaaua

SEQ ID NO: 2370375 - RNA, 19 nt, Homo sapiens
  misc_RNA (1)...(19): siRNA sense strand
gaacaauacccaagugcuc

SEQ ID NO: 2370376 - RNA, 19 nt, Homo sapiens
  misc_RNA (1)...(19): siRNA sense strand
agaagaaguccaagccagu

SEQ ID NO: 2370377 - RNA, 19 nt, Homo sapiens
  misc_RNA (1)...(19): siRNA sense strand
cagucaacaaagaccgcua

SEQ ID NO: 2370378 - RNA, 19 nt, Homo sapiens
  misc_RNA (1)...(19): siRNA sense strand
ucaucgugguccugcggaa

SEQ ID NO: 2370379 - RNA, 19 nt, Homo sapiens
  misc_RNA (1)...(19): siRNA sense strand
aguuaaagagagagagaaa

SEQ ID NO: 2370380 - RNA, 19 nt, Homo sapiens
  misc_RNA (1)...(19): siRNA sense strand
cauugaacuuagagagaaa

SEQ ID NO: 2370381 - RNA, 19 nt, Homo sapiens
  misc_RNA (1)...(19): siRNA sense strand
gggaaaugguggaagaaaa

SEQ ID NO: 2370382 - RNA, 19 nt, Homo sapiens
  misc_RNA (1)...(19): siRNA sense strand
gcagaaaauuggaagaaaa

SEQ ID NO: 2370383 - RNA, 19 nt, Homo sapiens
  misc_RNA (1)...(19): siRNA sense strand
agaaagaacuccagagcau

SEQ ID NO: 2370384 - RNA, 19 nt, Homo sapiens
  misc_RNA (1)...(19): siRNA sense strand
cagaagagcugcaggccaa

SEQ ID NO: 2370385 - RNA, 19 nt, Homo sapiens
  misc_RNA (1)...(19): siRNA sense strand
gaaagaaacugaagggagu

SEQ ID NO: 2370386 - RNA, 19 nt, Homo sapiens
  misc_RNA (1)...(19): siRNA sense strand
aggagaagucagagacaaa

SEQ ID NO: 2370387 - RNA, 19 nt, Homo sapiens
  misc_RNA (1)...(19): siRNA sense strand
uggcugagguugaggacaa

SEQ ID NO: 2370388 - RNA, 19 nt, Homo sapiens
  misc_RNA (1)...(19): siRNA sense strand
gaguaaagcagcaaaggaa

SEQ ID NO: 2370389 - RNA, 19 nt, Homo sapiens
  misc_RNA (1)...(19): siRNA sense strand
gaaacuuaguaaaggacaa

SEQ ID NO: 2370390 - RNA, 19 nt, Homo sapiens
  misc_RNA (1)...(19): siRNA sense strand
guaagauggaagaaagaaa

SEQ ID NO: 2370391 - RNA, 19 nt, Homo sapiens
  misc_RNA (1)...(19): siRNA sense strand
cagcagagacagaaggaau

SEQ ID NO: 2370392 - RNA, 19 nt, Homo sapiens
  misc_RNA (1)...(19): siRNA sense strand
gaaucaagccccagagaaa

SEQ ID NO: 2370393 - RNA, 19 nt, Homo sapiens
  misc_RNA (1)...(19): siRNA sense strand
cuggauuacuggugacaua

SEQ ID NO: 2370394 - RNA, 19 nt, Homo sapiens
  misc_RNA (1)...(19): siRNA sense strand
aguuagaccacgagguuaa

SEQ ID NO: 2370395 - RNA, 19 nt, Homo sapiens
  misc_RNA (1)...(19): siRNA sense strand
ugacauuauucgacacaaa

SEQ ID NO: 2370396 - RNA, 19 nt, Homo sapiens
  misc_RNA (1)...(19): siRNA sense strand
aaacaaagccagcaagcaa

SEQ ID NO: 2370397 - RNA, 19 nt, Homo sapiens
  misc_RNA (1)...(19): siRNA sense strand
gcagagaacaagaagaaga

SEQ ID NO: 2370398 - RNA, 19 nt, Homo sapiens
  misc_RNA (1)...(19): siRNA sense strand
aggaugaguugcagaaauu

SEQ ID NO: 2370399 - RNA, 19 nt, Homo sapiens
  misc_RNA (1)...(19): siRNA sense strand
gcaacaagaaccuggagaa

SEQ ID NO: 2370400 - RNA, 19 nt, Homo sapiens
  misc_RNA (1)...(19): siRNA sense strand
gcagaaagcaauugcccaa

SEQ ID NO: 2370401 - RNA, 19 nt, Homo sapiens
  misc_RNA (1)...(19): siRNA sense strand
ggaagaaaucaauugcaaa

SEQ ID NO: 2370402 - RNA, 19 nt, Homo sapiens
  misc_RNA (1)...(19): siRNA sense strand
uggcagagaacaagaagaa

SEQ ID NO: 2370403 - RNA, 19 nt, Homo sapiens
  misc_RNA (1)...(19): siRNA sense strand
ugggagagcuaaaggaaca

SEQ ID NO: 2370404 - RNA, 19 nt, Homo sapiens
  misc_RNA (1)...(19): siRNA sense strand
ggggaaagcucgucaggaa

SEQ ID NO: 2370405 - RNA, 19 nt, Homo sapiens
  misc_RNA (1)...(19): siRNA sense strand
augaagagcuggaguuuau

SEQ ID NO: 2370406 - RNA, 19 nt, Homo sapiens
  misc_RNA (1)...(19): siRNA sense strand
acaaaggagacuugagauu

SEQ ID NO: 2370407 - RNA, 19 nt, Homo sapiens
  misc_RNA (1)...(19): siRNA sense strand
aagccaaggaagagacuua

SEQ ID NO: 2370408 - RNA, 19 nt, Homo sapiens
  misc_RNA (1)...(19): siRNA sense strand
ccgagaaagagcuggagaa

SEQ ID NO: 2370409 - RNA, 19 nt, Homo sapiens
  misc_RNA (1)...(19): siRNA sense strand
cagcaaaggaacuggcaga

SEQ ID NO: 2370410 - RNA, 19 nt, Homo sapiens
  misc_RNA (1)...(19): siRNA sense strand
ggguacagaaucuaagaaa

SEQ ID NO: 2370411 - RNA, 19 nt, Homo sapiens
  misc_RNA (1)...(19): siRNA sense strand
ggagcagaucggagagaau

SEQ ID NO: 2370412 - RNA, 19 nt, Homo sapiens
  misc_RNA (1)...(19): siRNA sense strand
gcaaaggcagcuagaggaa

SEQ ID NO: 2370413 - RNA, 19 nt, Homo sapiens
  misc_RNA (1)...(19): siRNA sense strand
ggagaaccugggugagaaa

SEQ ID NO: 2370414 - RNA, 19 nt, Homo sapiens
  misc_RNA (1)...(19): siRNA sense strand
uuaaagagagagagaaaga

SEQ ID NO: 2370415 - RNA, 19 nt, Homo sapiens
  misc_RNA (1)...(19): siRNA sense strand
gguugaagcugcugagacu

SEQ ID NO: 2370416 - RNA, 19 nt, Homo sapiens
  misc_RNA (1)...(19): siRNA sense strand
gcccacaacuaaaggaauu

SEQ ID NO: 2370417 - RNA, 19 nt, Homo sapiens
  misc_RNA (1)...(19): siRNA sense strand
aggaacaguuggaugaauu

SEQ ID NO: 2370418 - RNA, 19 nt, Homo sapiens
  misc_RNA (1)...(19): siRNA sense strand
uggaaagagaggcuagaaa

SEQ ID NO: 2370419 - RNA, 19 nt, Homo sapiens
  misc_RNA (1)...(19): siRNA sense strand
ggcaaagaaccaucagaaa

SEQ ID NO: 2370420 - RNA, 19 nt, Homo sapiens
  misc_RNA (1)...(19): siRNA sense strand
uggaagaccaacaggagaa

SEQ ID NO: 2370421 - RNA, 19 nt, Homo sapiens
  misc_RNA (1)...(19): siRNA sense strand
ggugagggcaguuggacaa

SEQ ID NO: 2370422 - RNA, 19 nt, Homo sapiens
  misc_RNA (1)...(19): siRNA sense strand
ggaccgaaguggaaaucau

SEQ ID NO: 2370423 - RNA, 19 nt, Homo sapiens
  misc_RNA (1)...(19): siRNA sense strand
cuauuaaggaagagacaga

SEQ ID NO: 2370424 - RNA, 19 nt, Homo sapiens
  misc_RNA (1)...(19): siRNA sense strand
ggaaagagaggcuagaaaa

SEQ ID NO: 2370425 - RNA, 19 nt, Homo sapiens
  misc_RNA (1)...(19): siRNA sense strand
uagaagaugcagagaguca

SEQ ID NO: 2370426 - RNA, 19 nt, Homo sapiens
  misc_RNA (1)...(19): siRNA sense strand
uggaagagaaucagaccaa

SEQ ID NO: 2370427 - RNA, 19 nt, Homo sapiens
  misc_RNA (1)...(19): siRNA sense strand
aggaacuggcagagaacaa

SEQ ID NO: 2370428 - RNA, 19 nt, Homo sapiens
  misc_RNA (1)...(19): siRNA sense strand
uggaagaaaucaauugcaa

SEQ ID NO: 2370429 - RNA, 19 nt, Homo sapiens
  misc_RNA (1)...(19): siRNA sense strand
gcuggcugauagagagaaa

SEQ ID NO: 2370430 - RNA, 19 nt, Homo sapiens
  misc_RNA (1)...(19): siRNA sense strand
ucaaagacacccaggauau

SEQ ID NO: 2370431 - RNA, 19 nt, Homo sapiens
  misc_RNA (1)...(19): siRNA sense strand
caugaagaaaguagaagaa

SEQ ID NO: 2370432 - RNA, 19 nt, Homo sapiens
  misc_RNA (1)...(19): siRNA sense strand
cuggaggaguugaaagaau

SEQ ID NO: 2370433 - RNA, 19 nt, Homo sapiens
  misc_RNA (1)...(19): siRNA sense strand
ugacaauuuccuaggagaa

SEQ ID NO: 2370434 - RNA, 19 nt, Homo sapiens
  misc_RNA (1)...(19): siRNA sense strand
agacauuuauggaggagau

SEQ ID NO: 2370435 - RNA, 19 nt, Homo sapiens
  misc_RNA (1)...(19): siRNA sense strand
gacagaaagucuuggacau

SEQ ID NO: 2370436 - RNA, 19 nt, Homo sapiens
  misc_RNA (1)...(19): siRNA sense strand
gguacagaaucuaagaaaa

SEQ ID NO: 2370437 - RNA, 19 nt, Homo sapiens
  misc_RNA (1)...(19): siRNA sense strand
aguacaaacuagucaguga

SEQ ID NO: 2370438 - RNA, 19 nt, Homo sapiens
  misc_RNA (1)...(19): siRNA sense strand
gggcccaggucuuaguaaa

SEQ ID NO: 2370439 - RNA, 19 nt, Homo sapiens
  misc_RNA (1)...(19): siRNA sense strand
caucaaagcucgggcugaa

SEQ ID NO: 2370440 - RNA, 19 nt, Homo sapiens
  misc_RNA (1)...(19): siRNA sense strand
cugaagaacgagaaaucaa

SEQ ID NO: 2370441 - RNA, 19 nt, Homo sapiens
  misc_RNA (1)...(19): siRNA sense strand
gaugacaccacuuggguaa

SEQ ID NO: 2370442 - RNA, 19 nt, Homo sapiens
  misc_RNA (1)...(19): siRNA sense strand
caggagagggcuaaacaaa

SEQ ID NO: 2370443 - RNA, 19 nt, Homo sapiens
  misc_RNA (1)...(19): siRNA sense strand
caagacagaaacagugaaa

SEQ ID NO: 2370444 - RNA, 19 nt, Homo sapiens
  misc_RNA (1)...(19): siRNA sense strand
ccaaauugaccaagcuauu

SEQ ID NO: 2370445 - RNA, 19 nt, Homo sapiens
  misc_RNA (1)...(19): siRNA sense strand
ccaggaaagcuuuaagaau

SEQ ID NO: 2370446 - RNA, 19 nt, Homo sapiens
  misc_RNA (1)...(19): siRNA sense strand
acucagaacuagagauauc

SEQ ID NO: 2370447 - RNA, 19 nt, Homo sapiens
  misc_RNA (1)...(19): siRNA sense strand
aguuaaagagagagagaaa

SEQ ID NO: 2370448 - RNA, 19 nt, Homo sapiens
  misc_RNA (1)...(19): siRNA sense strand
cauugaacuuagagagaaa

SEQ ID NO: 2370449 - RNA, 19 nt, Homo sapiens
  misc_RNA (1)...(19): siRNA sense strand
gggaaaugguggaagaaaa

SEQ ID NO: 2370450 - RNA, 19 nt, Homo sapiens
  misc_RNA (1)...(19): siRNA sense strand
gcagaaaauuggaagaaaa

SEQ ID NO: 2370451 - RNA, 19 nt, Homo sapiens
  misc_RNA (1)...(19): siRNA sense strand
agaaagaacuccagagcau

SEQ ID NO: 2370452 - RNA, 19 nt, Homo sapiens
  misc_RNA (1)...(19): siRNA sense strand
cagaagagcugcaggccaa

SEQ ID NO: 2370453 - RNA, 19 nt, Homo sapiens
  misc_RNA (1)...(19): siRNA sense strand
gaaagaaacugaagggagu

SEQ ID NO: 2370454 - RNA, 19 nt, Homo sapiens
  misc_RNA (1)...(19): siRNA sense strand
aggagaagucagagacaaa

SEQ ID NO: 2370455 - RNA, 19 nt, Homo sapiens
  misc_RNA (1)...(19): siRNA sense strand
uggcugagguugaggacaa

SEQ ID NO: 2370456 - RNA, 19 nt, Homo sapiens
  misc_RNA (1)...(19): siRNA sense strand
gaguaaagcagcaaaggaa

SEQ ID NO: 2370457 - RNA, 19 nt, Homo sapiens
  misc_RNA (1)...(19): siRNA sense strand
gaaacuuaguaaaggacaa

SEQ ID NO: 2370458 - RNA, 19 nt, Homo sapiens
  misc_RNA (1)...(19): siRNA sense strand
guaagauggaagaaagaaa

SEQ ID NO: 2370459 - RNA, 19 nt, Homo sapiens
  misc_RNA (1)...(19): siRNA sense strand
cagcagagacagaaggaau

SEQ ID NO: 2370460 - RNA, 19 nt, Homo sapiens
  misc_RNA (1)...(19): siRNA sense strand
gaaucaagccccagagaaa

SEQ ID NO: 2370461 - RNA, 19 nt, Homo sapiens
  misc_RNA (1)...(19): siRNA sense strand
cuggauuacuggugacaua

SEQ ID NO: 2370462 - RNA, 19 nt, Homo sapiens
  misc_RNA (1)...(19): siRNA sense strand
aguuagaccacgagguuaa

SEQ ID NO: 2370463 - RNA, 19 nt, Homo sapiens
  misc_RNA (1)...(19): siRNA sense strand
ugacauuauucgacacaaa

SEQ ID NO: 2370464 - RNA, 19 nt, Homo sapiens
  misc_RNA (1)...(19): siRNA sense strand
aaacaaagccagcaagcaa

SEQ ID NO: 2370465 - RNA, 19 nt, Homo sapiens
  misc_RNA (1)...(19): siRNA sense strand
gcagagaacaagaagaaga

SEQ ID NO: 2370466 - RNA, 19 nt, Homo sapiens
  misc_RNA (1)...(19): siRNA sense strand
aggaugaguugcagaaauu

SEQ ID NO: 2370467 - RNA, 19 nt, Homo sapiens
  misc_RNA (1)...(19): siRNA sense strand
gcaacaagaaccuggagaa

SEQ ID NO: 2370468 - RNA, 19 nt, Homo sapiens
  misc_RNA (1)...(19): siRNA sense strand
gcagaaagcaauugcccaa

SEQ ID NO: 2370469 - RNA, 19 nt, Homo sapiens
  misc_RNA (1)...(19): siRNA sense strand
ggaagaaaucaauugcaaa

SEQ ID NO: 2370470 - RNA, 19 nt, Homo sapiens
  misc_RNA (1)...(19): siRNA sense strand
uggcagagaacaagaagaa

SEQ ID NO: 2370471 - RNA, 19 nt, Homo sapiens
  misc_RNA (1)...(19): siRNA sense strand
ugggagagcuaaaggaaca

SEQ ID NO: 2370472 - RNA, 19 nt, Homo sapiens
  misc_RNA (1)...(19): siRNA sense strand
ggggaaagcucgucaggaa

SEQ ID NO: 2370473 - RNA, 19 nt, Homo sapiens
  misc_RNA (1)...(19): siRNA sense strand
augaagagcuggaguuuau

SEQ ID NO: 2370474 - RNA, 19 nt, Homo sapiens
  misc_RNA (1)...(19): siRNA sense strand
acaaaggagacuugagauu

SEQ ID NO: 2370475 - RNA, 19 nt, Homo sapiens
  misc_RNA (1)...(19): siRNA sense strand
aagccaaggaagagacuua

SEQ ID NO: 2370476 - RNA, 19 nt, Homo sapiens
  misc_RNA (1)...(19): siRNA sense strand
ccgagaaagagcuggagaa

SEQ ID NO: 2370477 - RNA, 19 nt, Homo sapiens
  misc_RNA (1)...(19): siRNA sense strand
cagcaaaggaacuggcaga

SEQ ID NO: 2370478 - RNA, 19 nt, Homo sapiens
  misc_RNA (1)...(19): siRNA sense strand
ggguacagaaucuaagaaa

SEQ ID NO: 2370479 - RNA, 19 nt, Homo sapiens
  misc_RNA (1)...(19): siRNA sense strand
ggagcagaucggagagaau

SEQ ID NO: 2370480 - RNA, 19 nt, Homo sapiens
  misc_RNA (1)...(19): siRNA sense strand
gcaaaggcagcuagaggaa

SEQ ID NO: 2370481 - RNA, 19 nt, Homo sapiens
  misc_RNA (1)...(19): siRNA sense strand
ggagaaccugggugagaaa

SEQ ID NO: 2370482 - RNA, 19 nt, Homo sapiens
  misc_RNA (1)...(19): siRNA sense strand
uuaaagagagagagaaaga

SEQ ID NO: 2370483 - RNA, 19 nt, Homo sapiens
  misc_RNA (1)...(19): siRNA sense strand
gguugaagcugcugagacu

SEQ ID NO: 2370484 - RNA, 19 nt, Homo sapiens
  misc_RNA (1)...(19): siRNA sense strand
gcccacaacuaaaggaauu

SEQ ID NO: 2370485 - RNA, 19 nt, Homo sapiens
  misc_RNA (1)...(19): siRNA sense strand
aggaacaguuggaugaauu

SEQ ID NO: 2370486 - RNA, 19 nt, Homo sapiens
  misc_RNA (1)...(19): siRNA sense strand
uggaaagagaggcuagaaa

SEQ ID NO: 2370487 - RNA, 19 nt, Homo sapiens
  misc_RNA (1)...(19): siRNA sense strand
ggcaaagaaccaucagaaa

SEQ ID NO: 2370488 - RNA, 19 nt, Homo sapiens
  misc_RNA (1)...(19): siRNA sense strand
uggaagaccaacaggagaa

SEQ ID NO: 2370489 - RNA, 19 nt, Homo sapiens
  misc_RNA (1)...(19): siRNA sense strand
ggugagggcaguuggacaa

SEQ ID NO: 2370490 - RNA, 19 nt, Homo sapiens
  misc_RNA (1)...(19): siRNA sense strand
ggaccgaaguggaaaucau

SEQ ID NO: 2370491 - RNA, 19 nt, Homo sapiens
  misc_RNA (1)...(19): siRNA sense strand
cuauuaaggaagagacaga

SEQ ID NO: 2370492 - RNA, 19 nt, Homo sapiens
  misc_RNA (1)...(19): siRNA sense strand
ggaaagagaggcuagaaaa

SEQ ID NO: 2370493 - RNA, 19 nt, Homo sapiens
  misc_RNA (1)...(19): siRNA sense strand
uagaagaugcagagaguca

SEQ ID NO: 2370494 - RNA, 19 nt, Homo sapiens
  misc_RNA (1)...(19): siRNA sense strand
uggaagagaaucagaccaa

SEQ ID NO: 2370495 - RNA, 19 nt, Homo sapiens
  misc_RNA (1)...(19): siRNA sense strand
aggaacuggcagagaacaa

SEQ ID NO: 2370496 - RNA, 19 nt, Homo sapiens
  misc_RNA (1)...(19): siRNA sense strand
uggaagaaaucaauugcaa

SEQ ID NO: 2370497 - RNA, 19 nt, Homo sapiens
  misc_RNA (1)...(19): siRNA sense strand
gcuggcugauagagagaaa

SEQ ID NO: 2370498 - RNA, 19 nt, Homo sapiens
  misc_RNA (1)...(19): siRNA sense strand
ucaaagacacccaggauau

SEQ ID NO: 2370499 - RNA, 19 nt, Homo sapiens
  misc_RNA (1)...(19): siRNA sense strand
caugaagaaaguagaagaa

SEQ ID NO: 2370500 - RNA, 19 nt, Homo sapiens
  misc_RNA (1)...(19): siRNA sense strand
cuggaggaguugaaagaau

SEQ ID NO: 2370501 - RNA, 19 nt, Homo sapiens
  misc_RNA (1)...(19): siRNA sense strand
ugacaauuuccuaggagaa

SEQ ID NO: 2370502 - RNA, 19 nt, Homo sapiens
  misc_RNA (1)...(19): siRNA sense strand
agacauuuauggaggagau

SEQ ID NO: 2370503 - RNA, 19 nt, Homo sapiens
  misc_RNA (1)...(19): siRNA sense strand
gacagaaagucuuggacau

SEQ ID NO: 2370504 - RNA, 19 nt, Homo sapiens
  misc_RNA (1)...(19): siRNA sense strand
gguacagaaucuaagaaaa

SEQ ID NO: 2370505 - RNA, 19 nt, Homo sapiens
  misc_RNA (1)...(19): siRNA sense strand
aguacaaacuagucaguga

SEQ ID NO: 2370506 - RNA, 19 nt, Homo sapiens
  misc_RNA (1)...(19): siRNA sense strand
gggcccaggucuuaguaaa

SEQ ID NO: 2370507 - RNA, 19 nt, Homo sapiens
  misc_RNA (1)...(19): siRNA sense strand
caucaaagcucgggcugaa

SEQ ID NO: 2370508 - RNA, 19 nt, Homo sapiens
  misc_RNA (1)...(19): siRNA sense strand
cugaagaacgagaaaucaa

SEQ ID NO: 2370509 - RNA, 19 nt, Homo sapiens
  misc_RNA (1)...(19): siRNA sense strand
gaugacaccacuuggguaa

SEQ ID NO: 2370510 - RNA, 19 nt, Homo sapiens
  misc_RNA (1)...(19): siRNA sense strand
caggagagggcuaaacaaa

SEQ ID NO: 2370511 - RNA, 19 nt, Homo sapiens
  misc_RNA (1)...(19): siRNA sense strand
caagacagaaacagugaaa

SEQ ID NO: 2370512 - RNA, 19 nt, Homo sapiens
  misc_RNA (1)...(19): siRNA sense strand
ccaaauugaccaagcuauu

SEQ ID NO: 2370513 - RNA, 19 nt, Homo sapiens
  misc_RNA (1)...(19): siRNA sense strand
ccaggaaagcuuuaagaau

SEQ ID NO: 2370514 - RNA, 19 nt, Homo sapiens
  misc_RNA (1)...(19): siRNA sense strand
acucagaacuagagauauc

SEQ ID NO: 2370515 - RNA, 19 nt, Homo sapiens
  misc_RNA (1)...(19): siRNA sense strand
aggaauaaacggaguucaa

SEQ ID NO: 2370516 - RNA, 19 nt, Homo sapiens
  misc_RNA (1)...(19): siRNA sense strand
aguucaagcuaguguacaa

SEQ ID NO: 2370517 - RNA, 19 nt, Homo sapiens
  misc_RNA (1)...(19): siRNA sense strand
uuaaugaacuggugcgcaa

SEQ ID NO: 2370518 - RNA, 19 nt, Homo sapiens
  misc_RNA (1)...(19): siRNA sense strand
ugaugaaaguaaagguuga

SEQ ID NO: 2370519 - RNA, 19 nt, Homo sapiens
  misc_RNA (1)...(19): siRNA sense strand
guucaaaaggaguuagaua

SEQ ID NO: 2370520 - RNA, 19 nt, Homo sapiens
  misc_RNA (1)...(19): siRNA sense strand
gcaugguacaguaggacua

SEQ ID NO: 2370521 - RNA, 19 nt, Homo sapiens
  misc_RNA (1)...(19): siRNA sense strand
acauaacauugauggagaa

SEQ ID NO: 2370522 - RNA, 19 nt, Homo sapiens
  misc_RNA (1)...(19): siRNA sense strand
ugaaugagucggugaccaa

SEQ ID NO: 2370523 - RNA, 19 nt, Homo sapiens
  misc_RNA (1)...(19): siRNA sense strand
gaggauggugguagaguau

SEQ ID NO: 2370524 - RNA, 19 nt, Homo sapiens
  misc_RNA (1)...(19): siRNA sense strand
aaacaaugggaaaguacaa

SEQ ID NO: 2370525 - RNA, 19 nt, Homo sapiens
  misc_RNA (1)...(19): siRNA sense strand
gauucgaauugaagaggau

SEQ ID NO: 2370526 - RNA, 19 nt, Homo sapiens
  misc_RNA (1)...(19): siRNA sense strand
gauagggaagagaaggaua

SEQ ID NO: 2370527 - RNA, 19 nt, Homo sapiens
  misc_RNA (1)...(19): siRNA sense strand
cuuuaaggagacagagauu

SEQ ID NO: 2370528 - RNA, 19 nt, Homo sapiens
  misc_RNA (1)...(19): siRNA sense strand
ggcaaaagauaacggggua

SEQ ID NO: 2370529 - RNA, 19 nt, Homo sapiens
  misc_RNA (1)...(19): siRNA sense strand
ccagagaacucggcuauaa

SEQ ID NO: 2370530 - RNA, 19 nt, Homo sapiens
  misc_RNA (1)...(19): siRNA sense strand
gaauaaacggaguucaaaa

SEQ ID NO: 2370531 - RNA, 19 nt, Homo sapiens
  misc_RNA (1)...(19): siRNA sense strand
cggauaaggaugcggacca

SEQ ID NO: 2370532 - RNA, 19 nt, Homo sapiens
  misc_RNA (1)...(19): siRNA sense strand
uguuacagaccuugguuua

SEQ ID NO: 2370533 - RNA, 19 nt, Homo sapiens
  misc_RNA (1)...(19): siRNA sense strand
aagagcaaacaaugggaaa

SEQ ID NO: 2370534 - RNA, 19 nt, Homo sapiens
  misc_RNA (1)...(19): siRNA sense strand
ccuacgugaugaaaguaaa

SEQ ID NO: 2370535 - RNA, 19 nt, Homo sapiens
  misc_RNA (1)...(19): siRNA sense strand
gggaaaguacaauugggua

SEQ ID NO: 2370536 - RNA, 19 nt, Homo sapiens
  misc_RNA (1)...(19): siRNA sense strand
acgaacuaauuaagaguca

SEQ ID NO: 2370537 - RNA, 19 nt, Homo sapiens
  misc_RNA (1)...(19): siRNA sense strand
ggagauuauuucaccucaa

SEQ ID NO: 2370538 - RNA, 19 nt, Homo sapiens
  misc_RNA (1)...(19): siRNA sense strand
ggccuaaugcuaagaucaa

SEQ ID NO: 2370539 - RNA, 19 nt, Homo sapiens
  misc_RNA (1)...(19): siRNA sense strand
ccuuugaaucagucagcaa

SEQ ID NO: 2370540 - RNA, 19 nt, Homo sapiens
  misc_RNA (1)...(19): siRNA sense strand
cagcauuguaggaggaaac

SEQ ID NO: 2370541 - RNA, 19 nt, Homo sapiens
  misc_RNA (1)...(19): siRNA sense strand
uugaagaaacuaaggcaga

SEQ ID NO: 2370542 - RNA, 19 nt, Homo sapiens
  misc_RNA (1)...(19): siRNA sense strand
ccucgaugucauugaaaca

SEQ ID NO: 2370543 - RNA, 19 nt, Homo sapiens
  misc_RNA (1)...(19): siRNA sense strand
agugaagaaacuagauaga

SEQ ID NO: 2370544 - RNA, 19 nt, Homo sapiens
  misc_RNA (1)...(19): siRNA sense strand
agguaauugcuguugacaa

SEQ ID NO: 2370545 - RNA, 19 nt, Homo sapiens
  misc_RNA (1)...(19): siRNA sense strand
gcgcaaaagcacugaagca

SEQ ID NO: 2370546 - RNA, 19 nt, Homo sapiens
  misc_RNA (1)...(19): siRNA sense strand
ggcagaugauaaugaugaa

SEQ ID NO: 2370547 - RNA, 19 nt, Homo sapiens
  misc_RNA (1)...(19): siRNA sense strand
cagagaacucggcuauaaa

SEQ ID NO: 2370548 - RNA, 19 nt, Homo sapiens
  misc_RNA (1)...(19): siRNA sense strand
cauugaaacaccagaagga

SEQ ID NO: 2370549 - RNA, 19 nt, Homo sapiens
  misc_RNA (1)...(19): siRNA sense strand
ccuggagacugcagcauau

SEQ ID NO: 2370550 - RNA, 19 nt, Homo sapiens
  misc_RNA (1)...(19): siRNA sense strand
agaccuuccuauugaucua

SEQ ID NO: 2370551 - RNA, 19 nt, Homo sapiens
  misc_RNA (1)...(19): siRNA sense strand
cggcuauaaacucuaaaua

SEQ ID NO: 2370552 - RNA, 19 nt, Homo sapiens
  misc_RNA (1)...(19): siRNA sense strand
cggaugaaauauuuagacu

SEQ ID NO: 2370553 - RNA, 19 nt, Homo sapiens
  misc_RNA (1)...(19): siRNA sense strand
aguuagauagggaagagaa

SEQ ID NO: 2370554 - RNA, 19 nt, Homo sapiens
  misc_RNA (1)...(19): siRNA sense strand
ugaaaguaaagguugaaga

SEQ ID NO: 2370555 - RNA, 19 nt, Homo sapiens
  misc_RNA (1)...(19): siRNA sense strand
uuaaggagacagagauuga

SEQ ID NO: 2370556 - RNA, 19 nt, Homo sapiens
  misc_RNA (1)...(19): siRNA sense strand
cagcaaugucacagucuuu

SEQ ID NO: 2370557 - RNA, 19 nt, Homo sapiens
  misc_RNA (1)...(19): siRNA sense strand
ggcugaggauggugguaga

SEQ ID NO: 2370558 - RNA, 19 nt, Homo sapiens
  misc_RNA (1)...(19): siRNA sense strand
gaguguuacugauacaaau

SEQ ID NO: 2370559 - RNA, 19 nt, Homo sapiens
  misc_RNA (1)...(19): siRNA sense strand
gggccuaaugcuaagauca

SEQ ID NO: 2370560 - RNA, 19 nt, Homo sapiens
  misc_RNA (1)...(19): siRNA sense strand
ucuucaagugccaaaguaa

SEQ ID NO: 2370561 - RNA, 19 nt, Homo sapiens
  misc_RNA (1)...(19): siRNA sense strand
agaggauacuggugagauc

SEQ ID NO: 2370562 - RNA, 19 nt, Homo sapiens
  misc_RNA (1)...(19): siRNA sense strand
auaaggaugcggaccauaa

SEQ ID NO: 2370563 - RNA, 19 nt, Homo sapiens
  misc_RNA (1)...(19): siRNA sense strand
cuacaccauccgagaagaa

SEQ ID NO: 2370564 - RNA, 19 nt, Homo sapiens
  misc_RNA (1)...(19): siRNA sense strand
cauccauugacauaagaua

SEQ ID NO: 2370565 - RNA, 19 nt, Homo sapiens
  misc_RNA (1)...(19): siRNA sense strand
ggcugcagaugcuggcaaa

SEQ ID NO: 2370566 - RNA, 19 nt, Homo sapiens
  misc_RNA (1)...(19): siRNA sense strand
ugacuguagugaagaaacu

SEQ ID NO: 2370567 - RNA, 19 nt, Homo sapiens
  misc_RNA (1)...(19): siRNA sense strand
cauuguaggaggaaacaca

SEQ ID NO: 2370568 - RNA, 19 nt, Homo sapiens
  misc_RNA (1)...(19): siRNA sense strand
agaacuugcugcuuaauuu

SEQ ID NO: 2370569 - RNA, 19 nt, Homo sapiens
  misc_RNA (1)...(19): siRNA sense strand
uugaaacaccagaaggaga

SEQ ID NO: 2370570 - RNA, 19 nt, Homo sapiens
  misc_RNA (1)...(19): siRNA sense strand
caagugaguguuacugaua

SEQ ID NO: 2370571 - RNA, 19 nt, Homo sapiens
  misc_RNA (1)...(19): siRNA sense strand
gggaagaaacaccaaacca

SEQ ID NO: 2370572 - RNA, 19 nt, Homo sapiens
  misc_RNA (1)...(19): siRNA sense strand
ggauaaggaugcggaccau

SEQ ID NO: 2370573 - RNA, 19 nt, Homo sapiens
  misc_RNA (1)...(19): siRNA sense strand
aggcagaugauaaugauga

SEQ ID NO: 2370574 - RNA, 19 nt, Homo sapiens
  misc_RNA (1)...(19): siRNA sense strand
ucacagucuuuguaagcau

SEQ ID NO: 2370575 - RNA, 19 nt, Homo sapiens
  misc_RNA (1)...(19): siRNA sense strand
agugauggaaacagaguca

SEQ ID NO: 2370576 - RNA, 19 nt, Homo sapiens
  misc_RNA (1)...(19): siRNA sense strand
gagcaaacaaugggaaagu

SEQ ID NO: 2370577 - RNA, 19 nt, Homo sapiens
  misc_RNA (1)...(19): siRNA sense strand
ccuaaugcuaagaucaauu

SEQ ID NO: 2370578 - RNA, 19 nt, Homo sapiens
  misc_RNA (1)...(19): siRNA sense strand
cagaugauaaugaugaaga

SEQ ID NO: 2370579 - RNA, 19 nt, Homo sapiens
  misc_RNA (1)...(19): siRNA sense strand
aggaauaaacggaguucaa

SEQ ID NO: 2370580 - RNA, 19 nt, Homo sapiens
  misc_RNA (1)...(19): siRNA sense strand
aguucaagcuaguguacaa

SEQ ID NO: 2370581 - RNA, 19 nt, Homo sapiens
  misc_RNA (1)...(19): siRNA sense strand
uuaaugaacuggugcgcaa

SEQ ID NO: 2370582 - RNA, 19 nt, Homo sapiens
  misc_RNA (1)...(19): siRNA sense strand
ugaugaaaguaaagguuga

SEQ ID NO: 2370583 - RNA, 19 nt, Homo sapiens
  misc_RNA (1)...(19): siRNA sense strand
guucaaaaggaguuagaua

SEQ ID NO: 2370584 - RNA, 19 nt, Homo sapiens
  misc_RNA (1)...(19): siRNA sense strand
gcaugguacaguaggacua

SEQ ID NO: 2370585 - RNA, 19 nt, Homo sapiens
  misc_RNA (1)...(19): siRNA sense strand
acauaacauugauggagaa

SEQ ID NO: 2370586 - RNA, 19 nt, Homo sapiens
  misc_RNA (1)...(19): siRNA sense strand
ugaaugagucggugaccaa

SEQ ID NO: 2370587 - RNA, 19 nt, Homo sapiens
  misc_RNA (1)...(19): siRNA sense strand
gaggauggugguagaguau

SEQ ID NO: 2370588 - RNA, 19 nt, Homo sapiens
  misc_RNA (1)...(19): siRNA sense strand
aaacaaugggaaaguacaa

SEQ ID NO: 2370589 - RNA, 19 nt, Homo sapiens
  misc_RNA (1)...(19): siRNA sense strand
gauucgaauugaagaggau

SEQ ID NO: 2370590 - RNA, 19 nt, Homo sapiens
  misc_RNA (1)...(19): siRNA sense strand
gauagggaagagaaggaua

SEQ ID NO: 2370591 - RNA, 19 nt, Homo sapiens
  misc_RNA (1)...(19): siRNA sense strand
cuuuaaggagacagagauu

SEQ ID NO: 2370592 - RNA, 19 nt, Homo sapiens
  misc_RNA (1)...(19): siRNA sense strand
ggcaaaagauaacggggua

SEQ ID NO: 2370593 - RNA, 19 nt, Homo sapiens
  misc_RNA (1)...(19): siRNA sense strand
ccagagaacucggcuauaa

SEQ ID NO: 2370594 - RNA, 19 nt, Homo sapiens
  misc_RNA (1)...(19): siRNA sense strand
gaauaaacggaguucaaaa

SEQ ID NO: 2370595 - RNA, 19 nt, Homo sapiens
  misc_RNA (1)...(19): siRNA sense strand
cggauaaggaugcggacca

SEQ ID NO: 2370596 - RNA, 19 nt, Homo sapiens
  misc_RNA (1)...(19): siRNA sense strand
uguuacagaccuugguuua

SEQ ID NO: 2370597 - RNA, 19 nt, Homo sapiens
  misc_RNA (1)...(19): siRNA sense strand
aagagcaaacaaugggaaa

SEQ ID NO: 2370598 - RNA, 19 nt, Homo sapiens
  misc_RNA (1)...(19): siRNA sense strand
ccuacgugaugaaaguaaa

SEQ ID NO: 2370599 - RNA, 19 nt, Homo sapiens
  misc_RNA (1)...(19): siRNA sense strand
gggaaaguacaauugggua

SEQ ID NO: 2370600 - RNA, 19 nt, Homo sapiens
  misc_RNA (1)...(19): siRNA sense strand
acgaacuaauuaagaguca

SEQ ID NO: 2370601 - RNA, 19 nt, Homo sapiens
  misc_RNA (1)...(19): siRNA sense strand
ggagauuauuucaccucaa

SEQ ID NO: 2370602 - RNA, 19 nt, Homo sapiens
  misc_RNA (1)...(19): siRNA sense strand
ggccuaaugcuaagaucaa

SEQ ID NO: 2370603 - RNA, 19 nt, Homo sapiens
  misc_RNA (1)...(19): siRNA sense strand
ccuuugaaucagucagcaa

SEQ ID NO: 2370604 - RNA, 19 nt, Homo sapiens
  misc_RNA (1)...(19): siRNA sense strand
cagcauuguaggaggaaac

SEQ ID NO: 2370605 - RNA, 19 nt, Homo sapiens
  misc_RNA (1)...(19): siRNA sense strand
uugaagaaacuaaggcaga

SEQ ID NO: 2370606 - RNA, 19 nt, Homo sapiens
  misc_RNA (1)...(19): siRNA sense strand
ccucgaugucauugaaaca

SEQ ID NO: 2370607 - RNA, 19 nt, Homo sapiens
  misc_RNA (1)...(19): siRNA sense strand
agugaagaaacuagauaga

SEQ ID NO: 2370608 - RNA, 19 nt, Homo sapiens
  misc_RNA (1)...(19): siRNA sense strand
agguaauugcuguugacaa

SEQ ID NO: 2370609 - RNA, 19 nt, Homo sapiens
  misc_RNA (1)...(19): siRNA sense strand
gcgcaaaagcacugaagca

SEQ ID NO: 2370610 - RNA, 19 nt, Homo sapiens
  misc_RNA (1)...(19): siRNA sense strand
ggcagaugauaaugaugaa

SEQ ID NO: 2370611 - RNA, 19 nt, Homo sapiens
  misc_RNA (1)...(19): siRNA sense strand
cagagaacucggcuauaaa

SEQ ID NO: 2370612 - RNA, 19 nt, Homo sapiens
  misc_RNA (1)...(19): siRNA sense strand
cauugaaacaccagaagga

SEQ ID NO: 2370613 - RNA, 19 nt, Homo sapiens
  misc_RNA (1)...(19): siRNA sense strand
ccuggagacugcagcauau

SEQ ID NO: 2370614 - RNA, 19 nt, Homo sapiens
  misc_RNA (1)...(19): siRNA sense strand
agaccuuccuauugaucua

SEQ ID NO: 2370615 - RNA, 19 nt, Homo sapiens
  misc_RNA (1)...(19): siRNA sense strand
cggcuauaaacucuaaaua

SEQ ID NO: 2370616 - RNA, 19 nt, Homo sapiens
  misc_RNA (1)...(19): siRNA sense strand
cggaugaaauauuuagacu

SEQ ID NO: 2370617 - RNA, 19 nt, Homo sapiens
  misc_RNA (1)...(19): siRNA sense strand
aguuagauagggaagagaa

SEQ ID NO: 2370618 - RNA, 19 nt, Homo sapiens
  misc_RNA (1)...(19): siRNA sense strand
ugaaaguaaagguugaaga

SEQ ID NO: 2370619 - RNA, 19 nt, Homo sapiens
  misc_RNA (1)...(19): siRNA sense strand
uuaaggagacagagauuga

SEQ ID NO: 2370620 - RNA, 19 nt, Homo sapiens
  misc_RNA (1)...(19): siRNA sense strand
cagcaaugucacagucuuu

SEQ ID NO: 2370621 - RNA, 19 nt, Homo sapiens
  misc_RNA (1)...(19): siRNA sense strand
ggcugaggauggugguaga

SEQ ID NO: 2370622 - RNA, 19 nt, Homo sapiens
  misc_RNA (1)...(19): siRNA sense strand
gaguguuacugauacaaau

SEQ ID NO: 2370623 - RNA, 19 nt, Homo sapiens
  misc_RNA (1)...(19): siRNA sense strand
gggccuaaugcuaagauca

SEQ ID NO: 2370624 - RNA, 19 nt, Homo sapiens
  misc_RNA (1)...(19): siRNA sense strand
ucuucaagugccaaaguaa

SEQ ID NO: 2370625 - RNA, 19 nt, Homo sapiens
  misc_RNA (1)...(19): siRNA sense strand
agaggauacuggugagauc

SEQ ID NO: 2370626 - RNA, 19 nt, Homo sapiens
  misc_RNA (1)...(19): siRNA sense strand
auaaggaugcggaccauaa

SEQ ID NO: 2370627 - RNA, 19 nt, Homo sapiens
  misc_RNA (1)...(19): siRNA sense strand
cuacaccauccgagaagaa

SEQ ID NO: 2370628 - RNA, 19 nt, Homo sapiens
  misc_RNA (1)...(19): siRNA sense strand
cauccauugacauaagaua

SEQ ID NO: 2370629 - RNA, 19 nt, Homo sapiens
  misc_RNA (1)...(19): siRNA sense strand
ggcugcagaugcuggcaaa

SEQ ID NO: 2370630 - RNA, 19 nt, Homo sapiens
  misc_RNA (1)...(19): siRNA sense strand
ugacuguagugaagaaacu

SEQ ID NO: 2370631 - RNA, 19 nt, Homo sapiens
  misc_RNA (1)...(19): siRNA sense strand
cauuguaggaggaaacaca

SEQ ID NO: 2370632 - RNA, 19 nt, Homo sapiens
  misc_RNA (1)...(19): siRNA sense strand
agaacuugcugcuuaauuu

SEQ ID NO: 2370633 - RNA, 19 nt, Homo sapiens
  misc_RNA (1)...(19): siRNA sense strand
uugaaacaccagaaggaga

SEQ ID NO: 2370634 - RNA, 19 nt, Homo sapiens
  misc_RNA (1)...(19): siRNA sense strand
caagugaguguuacugaua

SEQ ID NO: 2370635 - RNA, 19 nt, Homo sapiens
  misc_RNA (1)...(19): siRNA sense strand
gggaagaaacaccaaacca

SEQ ID NO: 2370636 - RNA, 19 nt, Homo sapiens
  misc_RNA (1)...(19): siRNA sense strand
ggauaaggaugcggaccau

SEQ ID NO: 2370637 - RNA, 19 nt, Homo sapiens
  misc_RNA (1)...(19): siRNA sense strand
aggcagaugauaaugauga

SEQ ID NO: 2370638 - RNA, 19 nt, Homo sapiens
  misc_RNA (1)...(19): siRNA sense strand
ucacagucuuuguaagcau

SEQ ID NO: 2370639 - RNA, 19 nt, Homo sapiens
  misc_RNA (1)...(19): siRNA sense strand
agugauggaaacagaguca

SEQ ID NO: 2370640 - RNA, 19 nt, Homo sapiens
  misc_RNA (1)...(19): siRNA sense strand
gagcaaacaaugggaaagu

SEQ ID NO: 2370641 - RNA, 19 nt, Homo sapiens
  misc_RNA (1)...(19): siRNA sense strand
ccuaaugcuaagaucaauu

SEQ ID NO: 2370642 - RNA, 19 nt, Homo sapiens
  misc_RNA (1)...(19): siRNA sense strand
cagaugauaaugaugaaga

SEQ ID NO: 2370643 - RNA, 19 nt, Homo sapiens
  misc_RNA (1)...(19): siRNA sense strand
aggaauaaacggaguucaa

SEQ ID NO: 2370644 - RNA, 19 nt, Homo sapiens
  misc_RNA (1)...(19): siRNA sense strand
aguucaagcuaguguacaa

SEQ ID NO: 2370645 - RNA, 19 nt, Homo sapiens
  misc_RNA (1)...(19): siRNA sense strand
uuaaugaacuggugcgcaa

SEQ ID NO: 2370646 - RNA, 19 nt, Homo sapiens
  misc_RNA (1)...(19): siRNA sense strand
ugaugaaaguaaagguuga

SEQ ID NO: 2370647 - RNA, 19 nt, Homo sapiens
  misc_RNA (1)...(19): siRNA sense strand
guucaaaaggaguuagaua

SEQ ID NO: 2370648 - RNA, 19 nt, Homo sapiens
  misc_RNA (1)...(19): siRNA sense strand
gcaugguacaguaggacua

SEQ ID NO: 2370649 - RNA, 19 nt, Homo sapiens
  misc_RNA (1)...(19): siRNA sense strand
acauaacauugauggagaa

SEQ ID NO: 2370650 - RNA, 19 nt, Homo sapiens
  misc_RNA (1)...(19): siRNA sense strand
ugaaugagucggugaccaa

SEQ ID NO: 2370651 - RNA, 19 nt, Homo sapiens
  misc_RNA (1)...(19): siRNA sense strand
gaggauggugguagaguau

SEQ ID NO: 2370652 - RNA, 19 nt, Homo sapiens
  misc_RNA (1)...(19): siRNA sense strand
aaacaaugggaaaguacaa

SEQ ID NO: 2370653 - RNA, 19 nt, Homo sapiens
  misc_RNA (1)...(19): siRNA sense strand
gauucgaauugaagaggau

SEQ ID NO: 2370654 - RNA, 19 nt, Homo sapiens
  misc_RNA (1)...(19): siRNA sense strand
gauagggaagagaaggaua

SEQ ID NO: 2370655 - RNA, 19 nt, Homo sapiens
  misc_RNA (1)...(19): siRNA sense strand
cuuuaaggagacagagauu

SEQ ID NO: 2370656 - RNA, 19 nt, Homo sapiens
  misc_RNA (1)...(19): siRNA sense strand
ggcaaaagauaacggggua

SEQ ID NO: 2370657 - RNA, 19 nt, Homo sapiens
  misc_RNA (1)...(19): siRNA sense strand
ccagagaacucggcuauaa

SEQ ID NO: 2370658 - RNA, 19 nt, Homo sapiens
  misc_RNA (1)...(19): siRNA sense strand
gaauaaacggaguucaaaa

SEQ ID NO: 2370659 - RNA, 19 nt, Homo sapiens
  misc_RNA (1)...(19): siRNA sense strand
cggauaaggaugcggacca

SEQ ID NO: 2370660 - RNA, 19 nt, Homo sapiens
  misc_RNA (1)...(19): siRNA sense strand
uguuacagaccuugguuua

SEQ ID NO: 2370661 - RNA, 19 nt, Homo sapiens
  misc_RNA (1)...(19): siRNA sense strand
aagagcaaacaaugggaaa

SEQ ID NO: 2370662 - RNA, 19 nt, Homo sapiens
  misc_RNA (1)...(19): siRNA sense strand
ccuacgugaugaaaguaaa

SEQ ID NO: 2370663 - RNA, 19 nt, Homo sapiens
  misc_RNA (1)...(19): siRNA sense strand
gggaaaguacaauugggua

SEQ ID NO: 2370664 - RNA, 19 nt, Homo sapiens
  misc_RNA (1)...(19): siRNA sense strand
acgaacuaauuaagaguca

SEQ ID NO: 2370665 - RNA, 19 nt, Homo sapiens
  misc_RNA (1)...(19): siRNA sense strand
ggagauuauuucaccucaa

SEQ ID NO: 2370666 - RNA, 19 nt, Homo sapiens
  misc_RNA (1)...(19): siRNA sense strand
ggccuaaugcuaagaucaa

SEQ ID NO: 2370667 - RNA, 19 nt, Homo sapiens
  misc_RNA (1)...(19): siRNA sense strand
ccuuugaaucagucagcaa

SEQ ID NO: 2370668 - RNA, 19 nt, Homo sapiens
  misc_RNA (1)...(19): siRNA sense strand
cagcauuguaggaggaaac

SEQ ID NO: 2370669 - RNA, 19 nt, Homo sapiens
  misc_RNA (1)...(19): siRNA sense strand
uugaagaaacuaaggcaga

SEQ ID NO: 2370670 - RNA, 19 nt, Homo sapiens
  misc_RNA (1)...(19): siRNA sense strand
ccucgaugucauugaaaca

SEQ ID NO: 2370671 - RNA, 19 nt, Homo sapiens
  misc_RNA (1)...(19): siRNA sense strand
agugaagaaacuagauaga

SEQ ID NO: 2370672 - RNA, 19 nt, Homo sapiens
  misc_RNA (1)...(19): siRNA sense strand
agguaauugcuguugacaa

SEQ ID NO: 2370673 - RNA, 19 nt, Homo sapiens
  misc_RNA (1)...(19): siRNA sense strand
gcgcaaaagcacugaagca

SEQ ID NO: 2370674 - RNA, 19 nt, Homo sapiens
  misc_RNA (1)...(19): siRNA sense strand
ggcagaugauaaugaugaa

SEQ ID NO: 2370675 - RNA, 19 nt, Homo sapiens
  misc_RNA (1)...(19): siRNA sense strand
cagagaacucggcuauaaa

SEQ ID NO: 2370676 - RNA, 19 nt, Homo sapiens
  misc_RNA (1)...(19): siRNA sense strand
cauugaaacaccagaagga

SEQ ID NO: 2370677 - RNA, 19 nt, Homo sapiens
  misc_RNA (1)...(19): siRNA sense strand
ccuggagacugcagcauau

SEQ ID NO: 2370678 - RNA, 19 nt, Homo sapiens
  misc_RNA (1)...(19): siRNA sense strand
agaccuuccuauugaucua

SEQ ID NO: 2370679 - RNA, 19 nt, Homo sapiens
  misc_RNA (1)...(19): siRNA sense strand
cggcuauaaacucuaaaua

SEQ ID NO: 2370680 - RNA, 19 nt, Homo sapiens
  misc_RNA (1)...(19): siRNA sense strand
cggaugaaauauuuagacu

SEQ ID NO: 2370681 - RNA, 19 nt, Homo sapiens
  misc_RNA (1)...(19): siRNA sense strand
aguuagauagggaagagaa

SEQ ID NO: 2370682 - RNA, 19 nt, Homo sapiens
  misc_RNA (1)...(19): siRNA sense strand
ugaaaguaaagguugaaga

SEQ ID NO: 2370683 - RNA, 19 nt, Homo sapiens
  misc_RNA (1)...(19): siRNA sense strand
uuaaggagacagagauuga

SEQ ID NO: 2370684 - RNA, 19 nt, Homo sapiens
  misc_RNA (1)...(19): siRNA sense strand
cagcaaugucacagucuuu

SEQ ID NO: 2370685 - RNA, 19 nt, Homo sapiens
  misc_RNA (1)...(19): siRNA sense strand
ggcugaggauggugguaga

SEQ ID NO: 2370686 - RNA, 19 nt, Homo sapiens
  misc_RNA (1)...(19): siRNA sense strand
gaguguuacugauacaaau

SEQ ID NO: 2370687 - RNA, 19 nt, Homo sapiens
  misc_RNA (1)...(19): siRNA sense strand
gggccuaaugcuaagauca

SEQ ID NO: 2370688 - RNA, 19 nt, Homo sapiens
  misc_RNA (1)...(19): siRNA sense strand
ucuucaagugccaaaguaa

SEQ ID NO: 2370689 - RNA, 19 nt, Homo sapiens
  misc_RNA (1)...(19): siRNA sense strand
agaggauacuggugagauc

SEQ ID NO: 2370690 - RNA, 19 nt, Homo sapiens
  misc_RNA (1)...(19): siRNA sense strand
auaaggaugcggaccauaa

SEQ ID NO: 2370691 - RNA, 19 nt, Homo sapiens
  misc_RNA (1)...(19): siRNA sense strand
cuacaccauccgagaagaa

SEQ ID NO: 2370692 - RNA, 19 nt, Homo sapiens
  misc_RNA (1)...(19): siRNA sense strand
cauccauugacauaagaua

SEQ ID NO: 2370693 - RNA, 19 nt, Homo sapiens
  misc_RNA (1)...(19): siRNA sense strand
ggcugcagaugcuggcaaa

SEQ ID NO: 2370694 - RNA, 19 nt, Homo sapiens
  misc_RNA (1)...(19): siRNA sense strand
ugacuguagugaagaaacu

SEQ ID NO: 2370695 - RNA, 19 nt, Homo sapiens
  misc_RNA (1)...(19): siRNA sense strand
cauuguaggaggaaacaca

SEQ ID NO: 2370696 - RNA, 19 nt, Homo sapiens
  misc_RNA (1)...(19): siRNA sense strand
agaacuugcugcuuaauuu

SEQ ID NO: 2370697 - RNA, 19 nt, Homo sapiens
  misc_RNA (1)...(19): siRNA sense strand
uugaaacaccagaaggaga

SEQ ID NO: 2370698 - RNA, 19 nt, Homo sapiens
  misc_RNA (1)...(19): siRNA sense strand
caagugaguguuacugaua

SEQ ID NO: 2370699 - RNA, 19 nt, Homo sapiens
  misc_RNA (1)...(19): siRNA sense strand
gggaagaaacaccaaacca

SEQ ID NO: 2370700 - RNA, 19 nt, Homo sapiens
  misc_RNA (1)...(19): siRNA sense strand
ggauaaggaugcggaccau

SEQ ID NO: 2370701 - RNA, 19 nt, Homo sapiens
  misc_RNA (1)...(19): siRNA sense strand
aggcagaugauaaugauga

SEQ ID NO: 2370702 - RNA, 19 nt, Homo sapiens
  misc_RNA (1)...(19): siRNA sense strand
ucacagucuuuguaagcau

SEQ ID NO: 2370703 - RNA, 19 nt, Homo sapiens
  misc_RNA (1)...(19): siRNA sense strand
agugauggaaacagaguca

SEQ ID NO: 2370704 - RNA, 19 nt, Homo sapiens
  misc_RNA (1)...(19): siRNA sense strand
gagcaaacaaugggaaagu

SEQ ID NO: 2370705 - RNA, 19 nt, Homo sapiens
  misc_RNA (1)...(19): siRNA sense strand
ccuaaugcuaagaucaauu

SEQ ID NO: 2370706 - RNA, 19 nt, Homo sapiens
  misc_RNA (1)...(19): siRNA sense strand
cagaugauaaugaugaaga

SEQ ID NO: 2370707 - RNA, 19 nt, Homo sapiens
  misc_RNA (1)...(19): siRNA sense strand
aggaauaaacggaguucaa

SEQ ID NO: 2370708 - RNA, 19 nt, Homo sapiens
  misc_RNA (1)...(19): siRNA sense strand
aguucaagcuaguguacaa

SEQ ID NO: 2370709 - RNA, 19 nt, Homo sapiens
  misc_RNA (1)...(19): siRNA sense strand
uuaaugaacuggugcgcaa

SEQ ID NO: 2370710 - RNA, 19 nt, Homo sapiens
  misc_RNA (1)...(19): siRNA sense strand
ugaugaaaguaaagguuga

SEQ ID NO: 2370711 - RNA, 19 nt, Homo sapiens
  misc_RNA (1)...(19): siRNA sense strand
guucaaaaggaguuagaua

SEQ ID NO: 2370712 - RNA, 19 nt, Homo sapiens
  misc_RNA (1)...(19): siRNA sense strand
gcaugguacaguaggacua

SEQ ID NO: 2370713 - RNA, 19 nt, Homo sapiens
  misc_RNA (1)...(19): siRNA sense strand
acauaacauugauggagaa

SEQ ID NO: 2370714 - RNA, 19 nt, Homo sapiens
  misc_RNA (1)...(19): siRNA sense strand
ugaaugagucggugaccaa

SEQ ID NO: 2370715 - RNA, 19 nt, Homo sapiens
  misc_RNA (1)...(19): siRNA sense strand
gaggauggugguagaguau

SEQ ID NO: 2370716 - RNA, 19 nt, Homo sapiens
  misc_RNA (1)...(19): siRNA sense strand
aaacaaugggaaaguacaa

SEQ ID NO: 2370717 - RNA, 19 nt, Homo sapiens
  misc_RNA (1)...(19): siRNA sense strand
gauucgaauugaagaggau

SEQ ID NO: 2370718 - RNA, 19 nt, Homo sapiens
  misc_RNA (1)...(19): siRNA sense strand
gauagggaagagaaggaua

SEQ ID NO: 2370719 - RNA, 19 nt, Homo sapiens
  misc_RNA (1)...(19): siRNA sense strand
cuuuaaggagacagagauu

SEQ ID NO: 2370720 - RNA, 19 nt, Homo sapiens
  misc_RNA (1)...(19): siRNA sense strand
ggcaaaagauaacggggua

SEQ ID NO: 2370721 - RNA, 19 nt, Homo sapiens
  misc_RNA (1)...(19): siRNA sense strand
ccagagaacucggcuauaa

SEQ ID NO: 2370722 - RNA, 19 nt, Homo sapiens
  misc_RNA (1)...(19): siRNA sense strand
gaauaaacggaguucaaaa

SEQ ID NO: 2370723 - RNA, 19 nt, Homo sapiens
  misc_RNA (1)...(19): siRNA sense strand
cggauaaggaugcggacca

SEQ ID NO: 2370724 - RNA, 19 nt, Homo sapiens
  misc_RNA (1)...(19): siRNA sense strand
uguuacagaccuugguuua

SEQ ID NO: 2370725 - RNA, 19 nt, Homo sapiens
  misc_RNA (1)...(19): siRNA sense strand
aagagcaaacaaugggaaa

SEQ ID NO: 2370726 - RNA, 19 nt, Homo sapiens
  misc_RNA (1)...(19): siRNA sense strand
ccuacgugaugaaaguaaa

SEQ ID NO: 2370727 - RNA, 19 nt, Homo sapiens
  misc_RNA (1)...(19): siRNA sense strand
gggaaaguacaauugggua

SEQ ID NO: 2370728 - RNA, 19 nt, Homo sapiens
  misc_RNA (1)...(19): siRNA sense strand
acgaacuaauuaagaguca

SEQ ID NO: 2370729 - RNA, 19 nt, Homo sapiens
  misc_RNA (1)...(19): siRNA sense strand
ggagauuauuucaccucaa

SEQ ID NO: 2370730 - RNA, 19 nt, Homo sapiens
  misc_RNA (1)...(19): siRNA sense strand
ggccuaaugcuaagaucaa

SEQ ID NO: 2370731 - RNA, 19 nt, Homo sapiens
  misc_RNA (1)...(19): siRNA sense strand
ccuuugaaucagucagcaa

SEQ ID NO: 2370732 - RNA, 19 nt, Homo sapiens
  misc_RNA (1)...(19): siRNA sense strand
cagcauuguaggaggaaac

SEQ ID NO: 2370733 - RNA, 19 nt, Homo sapiens
  misc_RNA (1)...(19): siRNA sense strand
uugaagaaacuaaggcaga

SEQ ID NO: 2370734 - RNA, 19 nt, Homo sapiens
  misc_RNA (1)...(19): siRNA sense strand
ccucgaugucauugaaaca

SEQ ID NO: 2370735 - RNA, 19 nt, Homo sapiens
  misc_RNA (1)...(19): siRNA sense strand
agugaagaaacuagauaga

SEQ ID NO: 2370736 - RNA, 19 nt, Homo sapiens
  misc_RNA (1)...(19): siRNA sense strand
agguaauugcuguugacaa

SEQ ID NO: 2370737 - RNA, 19 nt, Homo sapiens
  misc_RNA (1)...(19): siRNA sense strand
gcgcaaaagcacugaagca

SEQ ID NO: 2370738 - RNA, 19 nt, Homo sapiens
  misc_RNA (1)...(19): siRNA sense strand
ggcagaugauaaugaugaa

SEQ ID NO: 2370739 - RNA, 19 nt, Homo sapiens
  misc_RNA (1)...(19): siRNA sense strand
cagagaacucggcuauaaa

SEQ ID NO: 2370740 - RNA, 19 nt, Homo sapiens
  misc_RNA (1)...(19): siRNA sense strand
cauugaaacaccagaagga

SEQ ID NO: 2370741 - RNA, 19 nt, Homo sapiens
  misc_RNA (1)...(19): siRNA sense strand
ccuggagacugcagcauau

SEQ ID NO: 2370742 - RNA, 19 nt, Homo sapiens
  misc_RNA (1)...(19): siRNA sense strand
agaccuuccuauugaucua

SEQ ID NO: 2370743 - RNA, 19 nt, Homo sapiens
  misc_RNA (1)...(19): siRNA sense strand
cggcuauaaacucuaaaua

SEQ ID NO: 2370744 - RNA, 19 nt, Homo sapiens
  misc_RNA (1)...(19): siRNA sense strand
cggaugaaauauuuagacu

SEQ ID NO: 2370745 - RNA, 19 nt, Homo sapiens
  misc_RNA (1)...(19): siRNA sense strand
aguuagauagggaagagaa

SEQ ID NO: 2370746 - RNA, 19 nt, Homo sapiens
  misc_RNA (1)...(19): siRNA sense strand
ugaaaguaaagguugaaga

SEQ ID NO: 2370747 - RNA, 19 nt, Homo sapiens
  misc_RNA (1)...(19): siRNA sense strand
uuaaggagacagagauuga

SEQ ID NO: 2370748 - RNA, 19 nt, Homo sapiens
  misc_RNA (1)...(19): siRNA sense strand
cagcaaugucacagucuuu

SEQ ID NO: 2370749 - RNA, 19 nt, Homo sapiens
  misc_RNA (1)...(19): siRNA sense strand
ggcugaggauggugguaga

SEQ ID NO: 2370750 - RNA, 19 nt, Homo sapiens
  misc_RNA (1)...(19): siRNA sense strand
gaguguuacugauacaaau

SEQ ID NO: 2370751 - RNA, 19 nt, Homo sapiens
  misc_RNA (1)...(19): siRNA sense strand
gggccuaaugcuaagauca

SEQ ID NO: 2370752 - RNA, 19 nt, Homo sapiens
  misc_RNA (1)...(19): siRNA sense strand
ucuucaagugccaaaguaa

SEQ ID NO: 2370753 - RNA, 19 nt, Homo sapiens
  misc_RNA (1)...(19): siRNA sense strand
agaggauacuggugagauc

SEQ ID NO: 2370754 - RNA, 19 nt, Homo sapiens
  misc_RNA (1)...(19): siRNA sense strand
auaaggaugcggaccauaa

SEQ ID NO: 2370755 - RNA, 19 nt, Homo sapiens
  misc_RNA (1)...(19): siRNA sense strand
cuacaccauccgagaagaa

SEQ ID NO: 2370756 - RNA, 19 nt, Homo sapiens
  misc_RNA (1)...(19): siRNA sense strand
cauccauugacauaagaua

SEQ ID NO: 2370757 - RNA, 19 nt, Homo sapiens
  misc_RNA (1)...(19): siRNA sense strand
ggcugcagaugcuggcaaa

SEQ ID NO: 2370758 - RNA, 19 nt, Homo sapiens
  misc_RNA (1)...(19): siRNA sense strand
ugacuguagugaagaaacu

SEQ ID NO: 2370759 - RNA, 19 nt, Homo sapiens
  misc_RNA (1)...(19): siRNA sense strand
cauuguaggaggaaacaca

SEQ ID NO: 2370760 - RNA, 19 nt, Homo sapiens
  misc_RNA (1)...(19): siRNA sense strand
agaacuugcugcuuaauuu

SEQ ID NO: 2370761 - RNA, 19 nt, Homo sapiens
  misc_RNA (1)...(19): siRNA sense strand
uugaaacaccagaaggaga

SEQ ID NO: 2370762 - RNA, 19 nt, Homo sapiens
  misc_RNA (1)...(19): siRNA sense strand
caagugaguguuacugaua

SEQ ID NO: 2370763 - RNA, 19 nt, Homo sapiens
  misc_RNA (1)...(19): siRNA sense strand
gggaagaaacaccaaacca

SEQ ID NO: 2370764 - RNA, 19 nt, Homo sapiens
  misc_RNA (1)...(19): siRNA sense strand
ggauaaggaugcggaccau

SEQ ID NO: 2370765 - RNA, 19 nt, Homo sapiens
  misc_RNA (1)...(19): siRNA sense strand
aggcagaugauaaugauga

SEQ ID NO: 2370766 - RNA, 19 nt, Homo sapiens
  misc_RNA (1)...(19): siRNA sense strand
ucacagucuuuguaagcau

SEQ ID NO: 2370767 - RNA, 19 nt, Homo sapiens
  misc_RNA (1)...(19): siRNA sense strand
agugauggaaacagaguca

SEQ ID NO: 2370768 - RNA, 19 nt, Homo sapiens
  misc_RNA (1)...(19): siRNA sense strand
gagcaaacaaugggaaagu

SEQ ID NO: 2370769 - RNA, 19 nt, Homo sapiens
  misc_RNA (1)...(19): siRNA sense strand
ccuaaugcuaagaucaauu

SEQ ID NO: 2370770 - RNA, 19 nt, Homo sapiens
  misc_RNA (1)...(19): siRNA sense strand
cagaugauaaugaugaaga

SEQ ID NO: 2370771 - RNA, 19 nt, Homo sapiens
  misc_RNA (1)...(19): siRNA sense strand
cgagauucugagagagcaa

SEQ ID NO: 2370772 - RNA, 19 nt, Homo sapiens
  misc_RNA (1)...(19): siRNA sense strand
cugaggaagauaaggaaaa

SEQ ID NO: 2370773 - RNA, 19 nt, Homo sapiens
  misc_RNA (1)...(19): siRNA sense strand
uagccagagaggaggcaaa

SEQ ID NO: 2370774 - RNA, 19 nt, Homo sapiens
  misc_RNA (1)...(19): siRNA sense strand
acacauagccagagaggag

SEQ ID NO: 2370775 - RNA, 19 nt, Homo sapiens
  misc_RNA (1)...(19): siRNA sense strand
ucuagagaaaagagagaaa

SEQ ID NO: 2370776 - RNA, 19 nt, Homo sapiens
  misc_RNA (1)...(19): siRNA sense strand
uccacaaggauuugggaau

SEQ ID NO: 2370777 - RNA, 19 nt, Homo sapiens
  misc_RNA (1)...(19): siRNA sense strand
gagaaaagagagaaaacca

SEQ ID NO: 2370778 - RNA, 19 nt, Homo sapiens
  misc_RNA (1)...(19): siRNA sense strand
ugggaaggaggaagagaca

SEQ ID NO: 2370779 - RNA, 19 nt, Homo sapiens
  misc_RNA (1)...(19): siRNA sense strand
ggacaauauaccagcuuuu

SEQ ID NO: 2370780 - RNA, 19 nt, Homo sapiens
  misc_RNA (1)...(19): siRNA sense strand
gaggcaaagaaaaugaaaa

SEQ ID NO: 2370781 - RNA, 19 nt, Homo sapiens
  misc_RNA (1)...(19): siRNA sense strand
ucugaggaagauaaggaaa

SEQ ID NO: 2370782 - RNA, 19 nt, Homo sapiens
  misc_RNA (1)...(19): siRNA sense strand
augcauucgaggagcaaga

SEQ ID NO: 2370783 - RNA, 19 nt, Homo sapiens
  misc_RNA (1)...(19): siRNA sense strand
agaaaagagagaaaaccaa

SEQ ID NO: 2370784 - RNA, 19 nt, Homo sapiens
  misc_RNA (1)...(19): siRNA sense strand
gagacagcgcagugggcaa

SEQ ID NO: 2370785 - RNA, 19 nt, Homo sapiens
  misc_RNA (1)...(19): siRNA sense strand
aguaugaugcugaugacaa

SEQ ID NO: 2370786 - RNA, 19 nt, Homo sapiens
  misc_RNA (1)...(19): siRNA sense strand
aaacagaacucccaggacu

SEQ ID NO: 2370787 - RNA, 19 nt, Homo sapiens
  misc_RNA (1)...(19): siRNA sense strand
caugcaucgugguggccaa

SEQ ID NO: 2370788 - RNA, 19 nt, Homo sapiens
  misc_RNA (1)...(19): siRNA sense strand
gcuuggagcaggaagagga

SEQ ID NO: 2370789 - RNA, 19 nt, Homo sapiens
  misc_RNA (1)...(19): siRNA sense strand
cugaugacaacgugaagau

SEQ ID NO: 2370790 - RNA, 19 nt, Homo sapiens
  misc_RNA (1)...(19): siRNA sense strand
aagaggaggacgugccaga

SEQ ID NO: 2370791 - RNA, 19 nt, Homo sapiens
  misc_RNA (1)...(19): siRNA sense strand
gagacagcgcagugggcaa

SEQ ID NO: 2370792 - RNA, 19 nt, Homo sapiens
  misc_RNA (1)...(19): siRNA sense strand
aguaugaugcugaugacaa

SEQ ID NO: 2370793 - RNA, 19 nt, Homo sapiens
  misc_RNA (1)...(19): siRNA sense strand
aaacagaacucccaggacu

SEQ ID NO: 2370794 - RNA, 19 nt, Homo sapiens
  misc_RNA (1)...(19): siRNA sense strand
caugcaucgugguggccaa

SEQ ID NO: 2370795 - RNA, 19 nt, Homo sapiens
  misc_RNA (1)...(19): siRNA sense strand
gcuuggagcaggaagagga

SEQ ID NO: 2370796 - RNA, 19 nt, Homo sapiens
  misc_RNA (1)...(19): siRNA sense strand
cugaugacaacgugaagau

SEQ ID NO: 2370797 - RNA, 19 nt, Homo sapiens
  misc_RNA (1)...(19): siRNA sense strand
aagaggaggacgugccaga

SEQ ID NO: 2370798 - RNA, 19 nt, Homo sapiens
  misc_RNA (1)...(19): siRNA sense strand
ggacagagcucuugaccca

SEQ ID NO: 2370799 - RNA, 19 nt, Homo sapiens
  misc_RNA (1)...(19): siRNA sense strand
ggaaauaaguacuuggcca

SEQ ID NO: 2370800 - RNA, 19 nt, Homo sapiens
  misc_RNA (1)...(19): siRNA sense strand
gaaauaaguacuuggccaa

SEQ ID NO: 2370801 - RNA, 19 nt, Homo sapiens
  misc_RNA (1)...(19): siRNA sense strand
ggacagaaaagaaggacaa

SEQ ID NO: 2370802 - RNA, 19 nt, Homo sapiens
  misc_RNA (1)...(19): siRNA sense strand
agauaguaguagaggacca

SEQ ID NO: 2370803 - RNA, 19 nt, Homo sapiens
  misc_RNA (1)...(19): siRNA sense strand
agaccagggcagugaggaa

SEQ ID NO: 2370804 - RNA, 19 nt, Homo sapiens
  misc_RNA (1)...(19): siRNA sense strand
gcaccagagcugagcccaa

SEQ ID NO: 2370805 - RNA, 19 nt, Homo sapiens
  misc_RNA (1)...(19): siRNA sense strand
uggagaugcugcuggaaca

SEQ ID NO: 2370806 - RNA, 19 nt, Homo sapiens
  misc_RNA (1)...(19): siRNA sense strand
gcgagcaggagcuggaaau

SEQ ID NO: 2370807 - RNA, 19 nt, Homo sapiens
  misc_RNA (1)...(19): siRNA sense strand
ugaaggagcuggacaggga

SEQ ID NO: 2370808 - RNA, 19 nt, Homo sapiens
  misc_RNA (1)...(19): siRNA sense strand
ccuuaucagccaagaaaca

SEQ ID NO: 2370809 - RNA, 19 nt, Homo sapiens
  misc_RNA (1)...(19): siRNA sense strand
gcgacaucucaauggcaaa

SEQ ID NO: 2370810 - RNA, 19 nt, Homo sapiens
  misc_RNA (1)...(19): siRNA sense strand
gcuuugaguuccaggugau

SEQ ID NO: 2370811 - RNA, 19 nt, Homo sapiens
  misc_RNA (1)...(19): siRNA sense strand
ggagauaguaguagaggac

SEQ ID NO: 2370812 - RNA, 19 nt, Homo sapiens
  misc_RNA (1)...(19): siRNA sense strand
auaccaagugucagaggaa

SEQ ID NO: 2370813 - RNA, 19 nt, Homo sapiens
  misc_RNA (1)...(19): siRNA sense strand
cagaacucauaguggugaa

SEQ ID NO: 2370814 - RNA, 19 nt, Homo sapiens
  misc_RNA (1)...(19): siRNA sense strand
gaaaagaacuaauggcaac

SEQ ID NO: 2370815 - RNA, 19 nt, Homo sapiens
  misc_RNA (1)...(19): siRNA sense strand
guucacuggcacuggaaau

SEQ ID NO: 2370816 - RNA, 19 nt, Homo sapiens
  misc_RNA (1)...(19): siRNA sense strand
caguauugaugccaagaca

SEQ ID NO: 2370817 - RNA, 19 nt, Homo sapiens
  misc_RNA (1)...(19): siRNA sense strand
gugcaaucccagacacaga

SEQ ID NO: 2370818 - RNA, 19 nt, Homo sapiens
  misc_RNA (1)...(19): siRNA sense strand
ccaagaggccccagaaaca

SEQ ID NO: 2370819 - RNA, 19 nt, Homo sapiens
  misc_RNA (1)...(19): siRNA sense strand
ccaagaagaugcugcaccu

SEQ ID NO: 2370820 - RNA, 19 nt, Homo sapiens
  misc_RNA (1)...(19): siRNA sense strand
ugaaaagaacuaauggcaa

SEQ ID NO: 2370821 - RNA, 19 nt, Homo sapiens
  misc_RNA (1)...(19): siRNA sense strand
ucuguuagcccaagaccaa

SEQ ID NO: 2370822 - RNA, 19 nt, Homo sapiens
  misc_RNA (1)...(19): siRNA sense strand
uggaguucuuccucaguaa

SEQ ID NO: 2370823 - RNA, 19 nt, Homo sapiens
  misc_RNA (1)...(19): siRNA sense strand
uaguagaggaccagggaag

SEQ ID NO: 2370824 - RNA, 19 nt, Homo sapiens
  misc_RNA (1)...(19): siRNA sense strand
agacagacccagaacagga

SEQ ID NO: 2370825 - RNA, 19 nt, Homo sapiens
  misc_RNA (1)...(19): siRNA sense strand
gcaugaaagugcaagggga

SEQ ID NO: 2370826 - RNA, 19 nt, Homo sapiens
  misc_RNA (1)...(19): siRNA sense strand
agacggggacugagggcaa

SEQ ID NO: 2370827 - RNA, 19 nt, Homo sapiens
  misc_RNA (1)...(19): siRNA sense strand
cauacauguugcuaaccaa

SEQ ID NO: 2370828 - RNA, 19 nt, Homo sapiens
  misc_RNA (1)...(19): siRNA sense strand
acuugggcauuaauggaaa

SEQ ID NO: 2370829 - RNA, 19 nt, Homo sapiens
  misc_RNA (1)...(19): siRNA sense strand
ggucacugaacuaugaaga

SEQ ID NO: 2370830 - RNA, 19 nt, Homo sapiens
  misc_RNA (1)...(19): siRNA sense strand
uggagauaguaguagagga

SEQ ID NO: 2370831 - RNA, 19 nt, Homo sapiens
  misc_RNA (1)...(19): siRNA sense strand
accaaaccaccgaggaaau

SEQ ID NO: 2370832 - RNA, 19 nt, Homo sapiens
  misc_RNA (1)...(19): siRNA sense strand
ggacugagggcaagagcag

SEQ ID NO: 2370833 - RNA, 19 nt, Homo sapiens
  misc_RNA (1)...(19): siRNA sense strand
gagcugagcccaacaggca

SEQ ID NO: 2370834 - RNA, 19 nt, Homo sapiens
  misc_RNA (1)...(19): siRNA sense strand
aguuggagcugguggcgua

SEQ ID NO: 2370835 - RNA, 19 nt, Homo sapiens
  misc_RNA (1)...(19): siRNA sense strand
aaguaguaauugauggaga

SEQ ID NO: 2370836 - RNA, 19 nt, Homo sapiens
  misc_RNA (1)...(19): siRNA sense strand
aguuaaggacucugaagau

SEQ ID NO: 2370837 - RNA, 19 nt, Homo sapiens
  misc_RNA (1)...(19): siRNA sense strand
uagcaagaaguuauggaau

SEQ ID NO: 2370838 - RNA, 19 nt, Homo sapiens
  misc_RNA (1)...(19): siRNA sense strand
aguaauugauggagaaacc

SEQ ID NO: 2370839 - RNA, 19 nt, Homo sapiens
  misc_RNA (1)...(19): siRNA sense strand
guaguaauugauggagaaa

SEQ ID NO: 2370840 - RNA, 19 nt, Homo sapiens
  misc_RNA (1)...(19): siRNA sense strand
caaugagggaccaguacau

SEQ ID NO: 2370841 - RNA, 19 nt, Homo sapiens
  misc_RNA (1)...(19): siRNA sense strand
aguuggagcugguggcgua

SEQ ID NO: 2370842 - RNA, 19 nt, Homo sapiens
  misc_RNA (1)...(19): siRNA sense strand
aaguaguaauugauggaga

SEQ ID NO: 2370843 - RNA, 19 nt, Homo sapiens
  misc_RNA (1)...(19): siRNA sense strand
aguuaaggacucugaagau

SEQ ID NO: 2370844 - RNA, 19 nt, Homo sapiens
  misc_RNA (1)...(19): siRNA sense strand
uagcaagaaguuauggaau

SEQ ID NO: 2370845 - RNA, 19 nt, Homo sapiens
  misc_RNA (1)...(19): siRNA sense strand
aguaauugauggagaaacc

SEQ ID NO: 2370846 - RNA, 19 nt, Homo sapiens
  misc_RNA (1)...(19): siRNA sense strand
guaguaauugauggagaaa

SEQ ID NO: 2370847 - RNA, 19 nt, Homo sapiens
  misc_RNA (1)...(19): siRNA sense strand
caaugagggaccaguacau

SEQ ID NO: 2370848 - RNA, 19 nt, Homo sapiens
  misc_RNA (1)...(19): siRNA sense strand
cggaacuggcuguggcauu

SEQ ID NO: 2370849 - RNA, 19 nt, Homo sapiens
  misc_RNA (1)...(19): siRNA sense strand
cagaccagcuccugcggaa

SEQ ID NO: 2370850 - RNA, 19 nt, Homo sapiens
  misc_RNA (1)...(19): siRNA sense strand
gcacagagggauuucggaa

SEQ ID NO: 2370851 - RNA, 19 nt, Homo sapiens
  misc_RNA (1)...(19): siRNA sense strand
gcacaggcaucgcagcaca

SEQ ID NO: 2370852 - RNA, 19 nt, Homo sapiens
  misc_RNA (1)...(19): siRNA sense strand
cggcgagagcuaaacaaaa

SEQ ID NO: 2370853 - RNA, 19 nt, Homo sapiens
  misc_RNA (1)...(19): siRNA sense strand
agguagucucugcuaguaa

SEQ ID NO: 2370854 - RNA, 19 nt, Homo sapiens
  misc_RNA (1)...(19): siRNA sense strand
ccaagaagggcacaggcau

SEQ ID NO: 2370855 - RNA, 19 nt, Homo sapiens
  misc_RNA (1)...(19): siRNA sense strand
agcacagacagcaggcaua

SEQ ID NO: 2370856 - RNA, 19 nt, Homo sapiens
  misc_RNA (1)...(19): siRNA sense strand
gcacagagggauuucggaa

SEQ ID NO: 2370857 - RNA, 19 nt, Homo sapiens
  misc_RNA (1)...(19): siRNA sense strand
gcacaggcaucgcagcaca

SEQ ID NO: 2370858 - RNA, 19 nt, Homo sapiens
  misc_RNA (1)...(19): siRNA sense strand
cggcgagagcuaaacaaaa

SEQ ID NO: 2370859 - RNA, 19 nt, Homo sapiens
  misc_RNA (1)...(19): siRNA sense strand
agguagucucugcuaguaa

SEQ ID NO: 2370860 - RNA, 19 nt, Homo sapiens
  misc_RNA (1)...(19): siRNA sense strand
ccaagaagggcacaggcau

SEQ ID NO: 2370861 - RNA, 19 nt, Homo sapiens
  misc_RNA (1)...(19): siRNA sense strand
agcacagacagcaggcaua

SEQ ID NO: 2370862 - RNA, 19 nt, Homo sapiens
  misc_RNA (1)...(19): siRNA sense strand
aguacaaagacguggcaaa

SEQ ID NO: 2370863 - RNA, 19 nt, Homo sapiens
  misc_RNA (1)...(19): siRNA sense strand
aagccgaagcccuggacaa

SEQ ID NO: 2370864 - RNA, 19 nt, Homo sapiens
  misc_RNA (1)...(19): siRNA sense strand
ggaacggagacgaacaaaa

SEQ ID NO: 2370865 - RNA, 19 nt, Homo sapiens
  misc_RNA (1)...(19): siRNA sense strand
cgggagaacaucaaggcca

SEQ ID NO: 2370866 - RNA, 19 nt, Homo sapiens
  misc_RNA (1)...(19): siRNA sense strand
ccggaacggagacgaacaa

SEQ ID NO: 2370867 - RNA, 19 nt, Homo sapiens
  misc_RNA (1)...(19): siRNA sense strand
gaaguuggugagauggcaa

SEQ ID NO: 2370868 - RNA, 19 nt, Homo sapiens
  misc_RNA (1)...(19): siRNA sense strand
gacauuaggacaagccgaa

SEQ ID NO: 2370869 - RNA, 19 nt, Homo sapiens
  misc_RNA (1)...(19): siRNA sense strand
gaacaggcguggacagcac

SEQ ID NO: 2370870 - RNA, 19 nt, Homo sapiens
  misc_RNA (1)...(19): siRNA sense strand
aggcauaaacggaguucaa

SEQ ID NO: 2370871 - RNA, 19 nt, Homo sapiens
  misc_RNA (1)...(19): siRNA sense strand
aguucaagcuaguguacaa

SEQ ID NO: 2370872 - RNA, 19 nt, Homo sapiens
  misc_RNA (1)...(19): siRNA sense strand
uuaaugaacuggugcgcaa

SEQ ID NO: 2370873 - RNA, 19 nt, Homo sapiens
  misc_RNA (1)...(19): siRNA sense strand
ugaugaaaguaaagguuga

SEQ ID NO: 2370874 - RNA, 19 nt, Homo sapiens
  misc_RNA (1)...(19): siRNA sense strand
guucaaaaggaguuagaua

SEQ ID NO: 2370875 - RNA, 19 nt, Homo sapiens
  misc_RNA (1)...(19): siRNA sense strand
gcaugguacaguaggacua

SEQ ID NO: 2370876 - RNA, 19 nt, Homo sapiens
  misc_RNA (1)...(19): siRNA sense strand
cgagaagaaauuccagaaa

SEQ ID NO: 2370877 - RNA, 19 nt, Homo sapiens
  misc_RNA (1)...(19): siRNA sense strand
acauaacauugauggagaa

SEQ ID NO: 2370878 - RNA, 19 nt, Homo sapiens
  misc_RNA (1)...(19): siRNA sense strand
ccuaugugaugaaaguaaa

SEQ ID NO: 2370879 - RNA, 19 nt, Homo sapiens
  misc_RNA (1)...(19): siRNA sense strand
gaaaguaagugcaacggau

SEQ ID NO: 2370880 - RNA, 19 nt, Homo sapiens
  misc_RNA (1)...(19): siRNA sense strand
gaggauggugguagaguau

SEQ ID NO: 2370881 - RNA, 19 nt, Homo sapiens
  misc_RNA (1)...(19): siRNA sense strand
aaacaaugggaaaguacaa

SEQ ID NO: 2370882 - RNA, 19 nt, Homo sapiens
  misc_RNA (1)...(19): siRNA sense strand
gauucgaauugaagaggau

SEQ ID NO: 2370883 - RNA, 19 nt, Homo sapiens
  misc_RNA (1)...(19): siRNA sense strand
gauagggaagagaaggaua

SEQ ID NO: 2370884 - RNA, 19 nt, Homo sapiens
  misc_RNA (1)...(19): siRNA sense strand
cuuuaaggagacagagauu

SEQ ID NO: 2370885 - RNA, 19 nt, Homo sapiens
  misc_RNA (1)...(19): siRNA sense strand
gcauaaacggaguucaaaa

SEQ ID NO: 2370886 - RNA, 19 nt, Homo sapiens
  misc_RNA (1)...(19): siRNA sense strand
ccagagaacucggcuauaa

SEQ ID NO: 2370887 - RNA, 19 nt, Homo sapiens
  misc_RNA (1)...(19): siRNA sense strand
cggauaaggaugcggacca

SEQ ID NO: 2370888 - RNA, 19 nt, Homo sapiens
  misc_RNA (1)...(19): siRNA sense strand
uguuacagaccuugguuua

SEQ ID NO: 2370889 - RNA, 19 nt, Homo sapiens
  misc_RNA (1)...(19): siRNA sense strand
gcgcaaaagcauugaagca

SEQ ID NO: 2370890 - RNA, 19 nt, Homo sapiens
  misc_RNA (1)...(19): siRNA sense strand
aagagcaaacaaugggaaa

SEQ ID NO: 2370891 - RNA, 19 nt, Homo sapiens
  misc_RNA (1)...(19): siRNA sense strand
gggaaaguacaauugggua

SEQ ID NO: 2370892 - RNA, 19 nt, Homo sapiens
  misc_RNA (1)...(19): siRNA sense strand
acgaacuaauuaagaguca

SEQ ID NO: 2370893 - RNA, 19 nt, Homo sapiens
  misc_RNA (1)...(19): siRNA sense strand
ggagauuauuucaccucaa

SEQ ID NO: 2370894 - RNA, 19 nt, Homo sapiens
  misc_RNA (1)...(19): siRNA sense strand
ccuuugaaucagucagcaa

SEQ ID NO: 2370895 - RNA, 19 nt, Homo sapiens
  misc_RNA (1)...(19): siRNA sense strand
cagcauuguaggaggaaac

SEQ ID NO: 2370896 - RNA, 19 nt, Homo sapiens
  misc_RNA (1)...(19): siRNA sense strand
uugaagaaacuaaggcaga

SEQ ID NO: 2370897 - RNA, 19 nt, Homo sapiens
  misc_RNA (1)...(19): siRNA sense strand
ccucgaugucauugaaaca

SEQ ID NO: 2370898 - RNA, 19 nt, Homo sapiens
  misc_RNA (1)...(19): siRNA sense strand
agugaagaaacuagauaga

SEQ ID NO: 2370899 - RNA, 19 nt, Homo sapiens
  misc_RNA (1)...(19): siRNA sense strand
agguaauugcuguugacaa

SEQ ID NO: 2370900 - RNA, 19 nt, Homo sapiens
  misc_RNA (1)...(19): siRNA sense strand
ggcagaugauaaugaugaa

SEQ ID NO: 2370901 - RNA, 19 nt, Homo sapiens
  misc_RNA (1)...(19): siRNA sense strand
cagagaacucggcuauaaa

SEQ ID NO: 2370902 - RNA, 19 nt, Homo sapiens
  misc_RNA (1)...(19): siRNA sense strand
cauugaaacaccagaagga

SEQ ID NO: 2370903 - RNA, 19 nt, Homo sapiens
  misc_RNA (1)...(19): siRNA sense strand
agaccuuccuauugaucua

SEQ ID NO: 2370904 - RNA, 19 nt, Homo sapiens
  misc_RNA (1)...(19): siRNA sense strand
cggcuauaaacucuaaaua

SEQ ID NO: 2370905 - RNA, 19 nt, Homo sapiens
  misc_RNA (1)...(19): siRNA sense strand
cggaugaaauauuuagacu

SEQ ID NO: 2370906 - RNA, 19 nt, Homo sapiens
  misc_RNA (1)...(19): siRNA sense strand
aguuagauagggaagagaa

SEQ ID NO: 2370907 - RNA, 19 nt, Homo sapiens
  misc_RNA (1)...(19): siRNA sense strand
ugaaaguaaagguugaaga

SEQ ID NO: 2370908 - RNA, 19 nt, Homo sapiens
  misc_RNA (1)...(19): siRNA sense strand
uuaaggagacagagauuga

SEQ ID NO: 2370909 - RNA, 19 nt, Homo sapiens
  misc_RNA (1)...(19): siRNA sense strand
cagcaaugucacagucuuu

SEQ ID NO: 2370910 - RNA, 19 nt, Homo sapiens
  misc_RNA (1)...(19): siRNA sense strand
ccgagaagaaauuccagaa

SEQ ID NO: 2370911 - RNA, 19 nt, Homo sapiens
  misc_RNA (1)...(19): siRNA sense strand
ggcugaggauggugguaga

SEQ ID NO: 2370912 - RNA, 19 nt, Homo sapiens
  misc_RNA (1)...(19): siRNA sense strand
ucuucaagugccaaaguaa

SEQ ID NO: 2370913 - RNA, 19 nt, Homo sapiens
  misc_RNA (1)...(19): siRNA sense strand
agaggauacuggugagauc

SEQ ID NO: 2370914 - RNA, 19 nt, Homo sapiens
  misc_RNA (1)...(19): siRNA sense strand
auaaggaugcggaccauaa

SEQ ID NO: 2370915 - RNA, 19 nt, Homo sapiens
  misc_RNA (1)...(19): siRNA sense strand
cuacaccauccgagaagaa

SEQ ID NO: 2370916 - RNA, 19 nt, Homo sapiens
  misc_RNA (1)...(19): siRNA sense strand
gcuuaauguugucacuauu

SEQ ID NO: 2370917 - RNA, 19 nt, Homo sapiens
  misc_RNA (1)...(19): siRNA sense strand
cauccauugacauaagaua

SEQ ID NO: 2370918 - RNA, 19 nt, Homo sapiens
  misc_RNA (1)...(19): siRNA sense strand
ggcugcagaugcuggcaaa

SEQ ID NO: 2370919 - RNA, 19 nt, Homo sapiens
  misc_RNA (1)...(19): siRNA sense strand
ugacuguagugaagaaacu

SEQ ID NO: 2370920 - RNA, 19 nt, Homo sapiens
  misc_RNA (1)...(19): siRNA sense strand
cauuguaggaggaaacaca

SEQ ID NO: 2370921 - RNA, 19 nt, Homo sapiens
  misc_RNA (1)...(19): siRNA sense strand
uugaaacaccagaaggaga

SEQ ID NO: 2370922 - RNA, 19 nt, Homo sapiens
  misc_RNA (1)...(19): siRNA sense strand
gggaagaaacaccaaacca

SEQ ID NO: 2370923 - RNA, 19 nt, Homo sapiens
  misc_RNA (1)...(19): siRNA sense strand
ggauaaggaugcggaccau

SEQ ID NO: 2370924 - RNA, 19 nt, Homo sapiens
  misc_RNA (1)...(19): siRNA sense strand
agaagaaauuccagaaaac

SEQ ID NO: 2370925 - RNA, 19 nt, Homo sapiens
  misc_RNA (1)...(19): siRNA sense strand
aggcagaugauaaugauga

SEQ ID NO: 2370926 - RNA, 19 nt, Homo sapiens
  misc_RNA (1)...(19): siRNA sense strand
ucacagucuuuguaagcau

SEQ ID NO: 2370927 - RNA, 19 nt, Homo sapiens
  misc_RNA (1)...(19): siRNA sense strand
uguugucacuauugaagaa

SEQ ID NO: 2370928 - RNA, 19 nt, Homo sapiens
  misc_RNA (1)...(19): siRNA sense strand
agugauggaaacagaguca

SEQ ID NO: 2370929 - RNA, 19 nt, Homo sapiens
  misc_RNA (1)...(19): siRNA sense strand
gagcaaacaaugggaaagu

SEQ ID NO: 2370930 - RNA, 19 nt, Homo sapiens
  misc_RNA (1)...(19): siRNA sense strand
accuaugugaugaaaguaa

SEQ ID NO: 2370931 - RNA, 19 nt, Homo sapiens
  misc_RNA (1)...(19): siRNA sense strand
cagaugauaaugaugaaga

SEQ ID NO: 2370932 - RNA, 19 nt, Homo sapiens
  misc_RNA (1)...(19): siRNA sense strand
aguaaagguugaagauggu

SEQ ID NO: 2370933 - RNA, 19 nt, Homo sapiens
  misc_RNA (1)...(19): siRNA sense strand
aggcauaaacggaguucaa

SEQ ID NO: 2370934 - RNA, 19 nt, Homo sapiens
  misc_RNA (1)...(19): siRNA sense strand
aguucaagcuaguguacaa

SEQ ID NO: 2370935 - RNA, 19 nt, Homo sapiens
  misc_RNA (1)...(19): siRNA sense strand
uuaaugaacuggugcgcaa

SEQ ID NO: 2370936 - RNA, 19 nt, Homo sapiens
  misc_RNA (1)...(19): siRNA sense strand
ugaugaaaguaaagguuga

SEQ ID NO: 2370937 - RNA, 19 nt, Homo sapiens
  misc_RNA (1)...(19): siRNA sense strand
guucaaaaggaguuagaua

SEQ ID NO: 2370938 - RNA, 19 nt, Homo sapiens
  misc_RNA (1)...(19): siRNA sense strand
gcaugguacaguaggacua

SEQ ID NO: 2370939 - RNA, 19 nt, Homo sapiens
  misc_RNA (1)...(19): siRNA sense strand
cgagaagaaauuccagaaa

SEQ ID NO: 2370940 - RNA, 19 nt, Homo sapiens
  misc_RNA (1)...(19): siRNA sense strand
acauaacauugauggagaa

SEQ ID NO: 2370941 - RNA, 19 nt, Homo sapiens
  misc_RNA (1)...(19): siRNA sense strand
ccuaugugaugaaaguaaa

SEQ ID NO: 2370942 - RNA, 19 nt, Homo sapiens
  misc_RNA (1)...(19): siRNA sense strand
gaaaguaagugcaacggau

SEQ ID NO: 2370943 - RNA, 19 nt, Homo sapiens
  misc_RNA (1)...(19): siRNA sense strand
gaggauggugguagaguau

SEQ ID NO: 2370944 - RNA, 19 nt, Homo sapiens
  misc_RNA (1)...(19): siRNA sense strand
aaacaaugggaaaguacaa

SEQ ID NO: 2370945 - RNA, 19 nt, Homo sapiens
  misc_RNA (1)...(19): siRNA sense strand
gauucgaauugaagaggau

SEQ ID NO: 2370946 - RNA, 19 nt, Homo sapiens
  misc_RNA (1)...(19): siRNA sense strand
gauagggaagagaaggaua

SEQ ID NO: 2370947 - RNA, 19 nt, Homo sapiens
  misc_RNA (1)...(19): siRNA sense strand
cuuuaaggagacagagauu

SEQ ID NO: 2370948 - RNA, 19 nt, Homo sapiens
  misc_RNA (1)...(19): siRNA sense strand
gcauaaacggaguucaaaa

SEQ ID NO: 2370949 - RNA, 19 nt, Homo sapiens
  misc_RNA (1)...(19): siRNA sense strand
ccagagaacucggcuauaa

SEQ ID NO: 2370950 - RNA, 19 nt, Homo sapiens
  misc_RNA (1)...(19): siRNA sense strand
cggauaaggaugcggacca

SEQ ID NO: 2370951 - RNA, 19 nt, Homo sapiens
  misc_RNA (1)...(19): siRNA sense strand
uguuacagaccuugguuua

SEQ ID NO: 2370952 - RNA, 19 nt, Homo sapiens
  misc_RNA (1)...(19): siRNA sense strand
gcgcaaaagcauugaagca

SEQ ID NO: 2370953 - RNA, 19 nt, Homo sapiens
  misc_RNA (1)...(19): siRNA sense strand
aagagcaaacaaugggaaa

SEQ ID NO: 2370954 - RNA, 19 nt, Homo sapiens
  misc_RNA (1)...(19): siRNA sense strand
gggaaaguacaauugggua

SEQ ID NO: 2370955 - RNA, 19 nt, Homo sapiens
  misc_RNA (1)...(19): siRNA sense strand
acgaacuaauuaagaguca

SEQ ID NO: 2370956 - RNA, 19 nt, Homo sapiens
  misc_RNA (1)...(19): siRNA sense strand
ggagauuauuucaccucaa

SEQ ID NO: 2370957 - RNA, 19 nt, Homo sapiens
  misc_RNA (1)...(19): siRNA sense strand
ccuuugaaucagucagcaa

SEQ ID NO: 2370958 - RNA, 19 nt, Homo sapiens
  misc_RNA (1)...(19): siRNA sense strand
cagcauuguaggaggaaac

SEQ ID NO: 2370959 - RNA, 19 nt, Homo sapiens
  misc_RNA (1)...(19): siRNA sense strand
uugaagaaacuaaggcaga

SEQ ID NO: 2370960 - RNA, 19 nt, Homo sapiens
  misc_RNA (1)...(19): siRNA sense strand
ccucgaugucauugaaaca

SEQ ID NO: 2370961 - RNA, 19 nt, Homo sapiens
  misc_RNA (1)...(19): siRNA sense strand
agugaagaaacuagauaga

SEQ ID NO: 2370962 - RNA, 19 nt, Homo sapiens
  misc_RNA (1)...(19): siRNA sense strand
agguaauugcuguugacaa

SEQ ID NO: 2370963 - RNA, 19 nt, Homo sapiens
  misc_RNA (1)...(19): siRNA sense strand
ggcagaugauaaugaugaa

SEQ ID NO: 2370964 - RNA, 19 nt, Homo sapiens
  misc_RNA (1)...(19): siRNA sense strand
cagagaacucggcuauaaa

SEQ ID NO: 2370965 - RNA, 19 nt, Homo sapiens
  misc_RNA (1)...(19): siRNA sense strand
cauugaaacaccagaagga

SEQ ID NO: 2370966 - RNA, 19 nt, Homo sapiens
  misc_RNA (1)...(19): siRNA sense strand
agaccuuccuauugaucua

SEQ ID NO: 2370967 - RNA, 19 nt, Homo sapiens
  misc_RNA (1)...(19): siRNA sense strand
cggcuauaaacucuaaaua

SEQ ID NO: 2370968 - RNA, 19 nt, Homo sapiens
  misc_RNA (1)...(19): siRNA sense strand
cggaugaaauauuuagacu

SEQ ID NO: 2370969 - RNA, 19 nt, Homo sapiens
  misc_RNA (1)...(19): siRNA sense strand
aguuagauagggaagagaa

SEQ ID NO: 2370970 - RNA, 19 nt, Homo sapiens
  misc_RNA (1)...(19): siRNA sense strand
ugaaaguaaagguugaaga

SEQ ID NO: 2370971 - RNA, 19 nt, Homo sapiens
  misc_RNA (1)...(19): siRNA sense strand
uuaaggagacagagauuga

SEQ ID NO: 2370972 - RNA, 19 nt, Homo sapiens
  misc_RNA (1)...(19): siRNA sense strand
cagcaaugucacagucuuu

SEQ ID NO: 2370973 - RNA, 19 nt, Homo sapiens
  misc_RNA (1)...(19): siRNA sense strand
ccgagaagaaauuccagaa

SEQ ID NO: 2370974 - RNA, 19 nt, Homo sapiens
  misc_RNA (1)...(19): siRNA sense strand
ggcugaggauggugguaga

SEQ ID NO: 2370975 - RNA, 19 nt, Homo sapiens
  misc_RNA (1)...(19): siRNA sense strand
ucuucaagugccaaaguaa

SEQ ID NO: 2370976 - RNA, 19 nt, Homo sapiens
  misc_RNA (1)...(19): siRNA sense strand
agaggauacuggugagauc

SEQ ID NO: 2370977 - RNA, 19 nt, Homo sapiens
  misc_RNA (1)...(19): siRNA sense strand
auaaggaugcggaccauaa

SEQ ID NO: 2370978 - RNA, 19 nt, Homo sapiens
  misc_RNA (1)...(19): siRNA sense strand
cuacaccauccgagaagaa

SEQ ID NO: 2370979 - RNA, 19 nt, Homo sapiens
  misc_RNA (1)...(19): siRNA sense strand
gcuuaauguugucacuauu

SEQ ID NO: 2370980 - RNA, 19 nt, Homo sapiens
  misc_RNA (1)...(19): siRNA sense strand
cauccauugacauaagaua

SEQ ID NO: 2370981 - RNA, 19 nt, Homo sapiens
  misc_RNA (1)...(19): siRNA sense strand
ggcugcagaugcuggcaaa

SEQ ID NO: 2370982 - RNA, 19 nt, Homo sapiens
  misc_RNA (1)...(19): siRNA sense strand
ugacuguagugaagaaacu

SEQ ID NO: 2370983 - RNA, 19 nt, Homo sapiens
  misc_RNA (1)...(19): siRNA sense strand
cauuguaggaggaaacaca

SEQ ID NO: 2370984 - RNA, 19 nt, Homo sapiens
  misc_RNA (1)...(19): siRNA sense strand
uugaaacaccagaaggaga

SEQ ID NO: 2370985 - RNA, 19 nt, Homo sapiens
  misc_RNA (1)...(19): siRNA sense strand
gggaagaaacaccaaacca

SEQ ID NO: 2370986 - RNA, 19 nt, Homo sapiens
  misc_RNA (1)...(19): siRNA sense strand
ggauaaggaugcggaccau

SEQ ID NO: 2370987 - RNA, 19 nt, Homo sapiens
  misc_RNA (1)...(19): siRNA sense strand
agaagaaauuccagaaaac

SEQ ID NO: 2370988 - RNA, 19 nt, Homo sapiens
  misc_RNA (1)...(19): siRNA sense strand
aggcagaugauaaugauga

SEQ ID NO: 2370989 - RNA, 19 nt, Homo sapiens
  misc_RNA (1)...(19): siRNA sense strand
ucacagucuuuguaagcau

SEQ ID NO: 2370990 - RNA, 19 nt, Homo sapiens
  misc_RNA (1)...(19): siRNA sense strand
uguugucacuauugaagaa

SEQ ID NO: 2370991 - RNA, 19 nt, Homo sapiens
  misc_RNA (1)...(19): siRNA sense strand
agugauggaaacagaguca

SEQ ID NO: 2370992 - RNA, 19 nt, Homo sapiens
  misc_RNA (1)...(19): siRNA sense strand
gagcaaacaaugggaaagu

SEQ ID NO: 2370993 - RNA, 19 nt, Homo sapiens
  misc_RNA (1)...(19): siRNA sense strand
accuaugugaugaaaguaa

SEQ ID NO: 2370994 - RNA, 19 nt, Homo sapiens
  misc_RNA (1)...(19): siRNA sense strand
cagaugauaaugaugaaga

SEQ ID NO: 2370995 - RNA, 19 nt, Homo sapiens
  misc_RNA (1)...(19): siRNA sense strand
aguaaagguugaagauggu

SEQ ID NO: 2370996 - RNA, 19 nt, Homo sapiens
  misc_RNA (1)...(19): siRNA sense strand
aggcauaaacggaguucaa

SEQ ID NO: 2370997 - RNA, 19 nt, Homo sapiens
  misc_RNA (1)...(19): siRNA sense strand
aguucaagcuaguguacaa

SEQ ID NO: 2370998 - RNA, 19 nt, Homo sapiens
  misc_RNA (1)...(19): siRNA sense strand
uuaaugaacuggugcgcaa

SEQ ID NO: 2370999 - RNA, 19 nt, Homo sapiens
  misc_RNA (1)...(19): siRNA sense strand
ugaugaaaguaaagguuga

SEQ ID NO: 2371000 - RNA, 19 nt, Homo sapiens
  misc_RNA (1)...(19): siRNA sense strand
guucaaaaggaguuagaua

SEQ ID NO: 2371001 - RNA, 19 nt, Homo sapiens
  misc_RNA (1)...(19): siRNA sense strand
gcaugguacaguaggacua

SEQ ID NO: 2371002 - RNA, 19 nt, Homo sapiens
  misc_RNA (1)...(19): siRNA sense strand
cgagaagaaauuccagaaa

SEQ ID NO: 2371003 - RNA, 19 nt, Homo sapiens
  misc_RNA (1)...(19): siRNA sense strand
acauaacauugauggagaa

SEQ ID NO: 2371004 - RNA, 19 nt, Homo sapiens
  misc_RNA (1)...(19): siRNA sense strand
ccuaugugaugaaaguaaa

SEQ ID NO: 2371005 - RNA, 19 nt, Homo sapiens
  misc_RNA (1)...(19): siRNA sense strand
gaaaguaagugcaacggau

SEQ ID NO: 2371006 - RNA, 19 nt, Homo sapiens
  misc_RNA (1)...(19): siRNA sense strand
gaggauggugguagaguau

SEQ ID NO: 2371007 - RNA, 19 nt, Homo sapiens
  misc_RNA (1)...(19): siRNA sense strand
aaacaaugggaaaguacaa

SEQ ID NO: 2371008 - RNA, 19 nt, Homo sapiens
  misc_RNA (1)...(19): siRNA sense strand
gauucgaauugaagaggau

SEQ ID NO: 2371009 - RNA, 19 nt, Homo sapiens
  misc_RNA (1)...(19): siRNA sense strand
gauagggaagagaaggaua

SEQ ID NO: 2371010 - RNA, 19 nt, Homo sapiens
  misc_RNA (1)...(19): siRNA sense strand
cuuuaaggagacagagauu

SEQ ID NO: 2371011 - RNA, 19 nt, Homo sapiens
  misc_RNA (1)...(19): siRNA sense strand
gcauaaacggaguucaaaa

SEQ ID NO: 2371012 - RNA, 19 nt, Homo sapiens
  misc_RNA (1)...(19): siRNA sense strand
ccagagaacucggcuauaa

SEQ ID NO: 2371013 - RNA, 19 nt, Homo sapiens
  misc_RNA (1)...(19): siRNA sense strand
cggauaaggaugcggacca

SEQ ID NO: 2371014 - RNA, 19 nt, Homo sapiens
  misc_RNA (1)...(19): siRNA sense strand
uguuacagaccuugguuua

SEQ ID NO: 2371015 - RNA, 19 nt, Homo sapiens
  misc_RNA (1)...(19): siRNA sense strand
gcgcaaaagcauugaagca

SEQ ID NO: 2371016 - RNA, 19 nt, Homo sapiens
  misc_RNA (1)...(19): siRNA sense strand
aagagcaaacaaugggaaa

SEQ ID NO: 2371017 - RNA, 19 nt, Homo sapiens
  misc_RNA (1)...(19): siRNA sense strand
gggaaaguacaauugggua

SEQ ID NO: 2371018 - RNA, 19 nt, Homo sapiens
  misc_RNA (1)...(19): siRNA sense strand
acgaacuaauuaagaguca

SEQ ID NO: 2371019 - RNA, 19 nt, Homo sapiens
  misc_RNA (1)...(19): siRNA sense strand
ggagauuauuucaccucaa

SEQ ID NO: 2371020 - RNA, 19 nt, Homo sapiens
  misc_RNA (1)...(19): siRNA sense strand
ccuuugaaucagucagcaa

SEQ ID NO: 2371021 - RNA, 19 nt, Homo sapiens
  misc_RNA (1)...(19): siRNA sense strand
cagcauuguaggaggaaac

SEQ ID NO: 2371022 - RNA, 19 nt, Homo sapiens
  misc_RNA (1)...(19): siRNA sense strand
uugaagaaacuaaggcaga

SEQ ID NO: 2371023 - RNA, 19 nt, Homo sapiens
  misc_RNA (1)...(19): siRNA sense strand
ccucgaugucauugaaaca

SEQ ID NO: 2371024 - RNA, 19 nt, Homo sapiens
  misc_RNA (1)...(19): siRNA sense strand
agugaagaaacuagauaga

SEQ ID NO: 2371025 - RNA, 19 nt, Homo sapiens
  misc_RNA (1)...(19): siRNA sense strand
agguaauugcuguugacaa

SEQ ID NO: 2371026 - RNA, 19 nt, Homo sapiens
  misc_RNA (1)...(19): siRNA sense strand
ggcagaugauaaugaugaa

SEQ ID NO: 2371027 - RNA, 19 nt, Homo sapiens
  misc_RNA (1)...(19): siRNA sense strand
cagagaacucggcuauaaa

SEQ ID NO: 2371028 - RNA, 19 nt, Homo sapiens
  misc_RNA (1)...(19): siRNA sense strand
cauugaaacaccagaagga

SEQ ID NO: 2371029 - RNA, 19 nt, Homo sapiens
  misc_RNA (1)...(19): siRNA sense strand
agaccuuccuauugaucua

SEQ ID NO: 2371030 - RNA, 19 nt, Homo sapiens
  misc_RNA (1)...(19): siRNA sense strand
cggcuauaaacucuaaaua

SEQ ID NO: 2371031 - RNA, 19 nt, Homo sapiens
  misc_RNA (1)...(19): siRNA sense strand
cggaugaaauauuuagacu

SEQ ID NO: 2371032 - RNA, 19 nt, Homo sapiens
  misc_RNA (1)...(19): siRNA sense strand
aguuagauagggaagagaa

SEQ ID NO: 2371033 - RNA, 19 nt, Homo sapiens
  misc_RNA (1)...(19): siRNA sense strand
ugaaaguaaagguugaaga

SEQ ID NO: 2371034 - RNA, 19 nt, Homo sapiens
  misc_RNA (1)...(19): siRNA sense strand
uuaaggagacagagauuga

SEQ ID NO: 2371035 - RNA, 19 nt, Homo sapiens
  misc_RNA (1)...(19): siRNA sense strand
cagcaaugucacagucuuu

SEQ ID NO: 2371036 - RNA, 19 nt, Homo sapiens
  misc_RNA (1)...(19): siRNA sense strand
ccgagaagaaauuccagaa

SEQ ID NO: 2371037 - RNA, 19 nt, Homo sapiens
  misc_RNA (1)...(19): siRNA sense strand
ggcugaggauggugguaga

SEQ ID NO: 2371038 - RNA, 19 nt, Homo sapiens
  misc_RNA (1)...(19): siRNA sense strand
ucuucaagugccaaaguaa

SEQ ID NO: 2371039 - RNA, 19 nt, Homo sapiens
  misc_RNA (1)...(19): siRNA sense strand
agaggauacuggugagauc

SEQ ID NO: 2371040 - RNA, 19 nt, Homo sapiens
  misc_RNA (1)...(19): siRNA sense strand
auaaggaugcggaccauaa

SEQ ID NO: 2371041 - RNA, 19 nt, Homo sapiens
  misc_RNA (1)...(19): siRNA sense strand
cuacaccauccgagaagaa

SEQ ID NO: 2371042 - RNA, 19 nt, Homo sapiens
  misc_RNA (1)...(19): siRNA sense strand
gcuuaauguugucacuauu

SEQ ID NO: 2371043 - RNA, 19 nt, Homo sapiens
  misc_RNA (1)...(19): siRNA sense strand
cauccauugacauaagaua

SEQ ID NO: 2371044 - RNA, 19 nt, Homo sapiens
  misc_RNA (1)...(19): siRNA sense strand
ggcugcagaugcuggcaaa

SEQ ID NO: 2371045 - RNA, 19 nt, Homo sapiens
  misc_RNA (1)...(19): siRNA sense strand
ugacuguagugaagaaacu

SEQ ID NO: 2371046 - RNA, 19 nt, Homo sapiens
  misc_RNA (1)...(19): siRNA sense strand
cauuguaggaggaaacaca

SEQ ID NO: 2371047 - RNA, 19 nt, Homo sapiens
  misc_RNA (1)...(19): siRNA sense strand
uugaaacaccagaaggaga

SEQ ID NO: 2371048 - RNA, 19 nt, Homo sapiens
  misc_RNA (1)...(19): siRNA sense strand
gggaagaaacaccaaacca

SEQ ID NO: 2371049 - RNA, 19 nt, Homo sapiens
  misc_RNA (1)...(19): siRNA sense strand
ggauaaggaugcggaccau

SEQ ID NO: 2371050 - RNA, 19 nt, Homo sapiens
  misc_RNA (1)...(19): siRNA sense strand
agaagaaauuccagaaaac

SEQ ID NO: 2371051 - RNA, 19 nt, Homo sapiens
  misc_RNA (1)...(19): siRNA sense strand
aggcagaugauaaugauga

SEQ ID NO: 2371052 - RNA, 19 nt, Homo sapiens
  misc_RNA (1)...(19): siRNA sense strand
ucacagucuuuguaagcau

SEQ ID NO: 2371053 - RNA, 19 nt, Homo sapiens
  misc_RNA (1)...(19): siRNA sense strand
uguugucacuauugaagaa

SEQ ID NO: 2371054 - RNA, 19 nt, Homo sapiens
  misc_RNA (1)...(19): siRNA sense strand
agugauggaaacagaguca

SEQ ID NO: 2371055 - RNA, 19 nt, Homo sapiens
  misc_RNA (1)...(19): siRNA sense strand
gagcaaacaaugggaaagu

SEQ ID NO: 2371056 - RNA, 19 nt, Homo sapiens
  misc_RNA (1)...(19): siRNA sense strand
accuaugugaugaaaguaa

SEQ ID NO: 2371057 - RNA, 19 nt, Homo sapiens
  misc_RNA (1)...(19): siRNA sense strand
cagaugauaaugaugaaga

SEQ ID NO: 2371058 - RNA, 19 nt, Homo sapiens
  misc_RNA (1)...(19): siRNA sense strand
aguaaagguugaagauggu

SEQ ID NO: 2371059 - RNA, 19 nt, Homo sapiens
  misc_RNA (1)...(19): siRNA sense strand
ugaaagagaaagagggaaa

SEQ ID NO: 2371060 - RNA, 19 nt, Homo sapiens
  misc_RNA (1)...(19): siRNA sense strand
ccauaaagaagaagagcaa

SEQ ID NO: 2371061 - RNA, 19 nt, Homo sapiens
  misc_RNA (1)...(19): siRNA sense strand
uguugaaguuguagagaaa

SEQ ID NO: 2371062 - RNA, 19 nt, Homo sapiens
  misc_RNA (1)...(19): siRNA sense strand
agacaaggaaccagagaaa

SEQ ID NO: 2371063 - RNA, 19 nt, Homo sapiens
  misc_RNA (1)...(19): siRNA sense strand
gaacaagauauuagggaau

SEQ ID NO: 2371064 - RNA, 19 nt, Homo sapiens
  misc_RNA (1)...(19): siRNA sense strand
cggagagaguggagagaga

SEQ ID NO: 2371065 - RNA, 19 nt, Homo sapiens
  misc_RNA (1)...(19): siRNA sense strand
aggcaaagggaacgagaaa

SEQ ID NO: 2371066 - RNA, 19 nt, Homo sapiens
  misc_RNA (1)...(19): siRNA sense strand
agaaagagaacgugaaaga

SEQ ID NO: 2371067 - RNA, 19 nt, Homo sapiens
  misc_RNA (1)...(19): siRNA sense strand
caucaaaagugcacagaaa

SEQ ID NO: 2371068 - RNA, 19 nt, Homo sapiens
  misc_RNA (1)...(19): siRNA sense strand
caaagagggaauagcgaaa

SEQ ID NO: 2371069 - RNA, 19 nt, Homo sapiens
  misc_RNA (1)...(19): siRNA sense strand
aaggagaggcugaaagaaa

SEQ ID NO: 2371070 - RNA, 19 nt, Homo sapiens
  misc_RNA (1)...(19): siRNA sense strand
caaggaagccagaggaaau

SEQ ID NO: 2371071 - RNA, 19 nt, Homo sapiens
  misc_RNA (1)...(19): siRNA sense strand
gcagaaggccagagcggaa

SEQ ID NO: 2371072 - RNA, 19 nt, Homo sapiens
  misc_RNA (1)...(19): siRNA sense strand
gaaagagauuggagcgaga

SEQ ID NO: 2371073 - RNA, 19 nt, Homo sapiens
  misc_RNA (1)...(19): siRNA sense strand
ccgaugaagaggaggagaa

SEQ ID NO: 2371074 - RNA, 19 nt, Homo sapiens
  misc_RNA (1)...(19): siRNA sense strand
uaaacugagcagagagaaa

SEQ ID NO: 2371075 - RNA, 19 nt, Homo sapiens
  misc_RNA (1)...(19): siRNA sense strand
ggaugaaaggauagaugaa

SEQ ID NO: 2371076 - RNA, 19 nt, Homo sapiens
  misc_RNA (1)...(19): siRNA sense strand
ccagaaacagaaagugaaa

SEQ ID NO: 2371077 - RNA, 19 nt, Homo sapiens
  misc_RNA (1)...(19): siRNA sense strand
ccgaggaggaagugcauua

SEQ ID NO: 2371078 - RNA, 19 nt, Homo sapiens
  misc_RNA (1)...(19): siRNA sense strand
aggaaacagcagauggaaa

SEQ ID NO: 2371079 - RNA, 19 nt, Homo sapiens
  misc_RNA (1)...(19): siRNA sense strand
acaggaagauacagagaau

SEQ ID NO: 2371080 - RNA, 19 nt, Homo sapiens
  misc_RNA (1)...(19): siRNA sense strand
agucguaacucuagaauca

SEQ ID NO: 2371081 - RNA, 19 nt, Homo sapiens
  misc_RNA (1)...(19): siRNA sense strand
acaaggaaccagagaaaga

SEQ ID NO: 2371082 - RNA, 19 nt, Homo sapiens
  misc_RNA (1)...(19): siRNA sense strand
ugguaaaggugguguuuga

SEQ ID NO: 2371083 - RNA, 19 nt, Homo sapiens
  misc_RNA (1)...(19): siRNA sense strand
cgagaaagagaacgugaaa

SEQ ID NO: 2371084 - RNA, 19 nt, Homo sapiens
  misc_RNA (1)...(19): siRNA sense strand
auaaagaagaagagcaaga

SEQ ID NO: 2371085 - RNA, 19 nt, Homo sapiens
  misc_RNA (1)...(19): siRNA sense strand
acccaaagagguugagaaa

SEQ ID NO: 2371086 - RNA, 19 nt, Homo sapiens
  misc_RNA (1)...(19): siRNA sense strand
gagaaaucacauucaguaa

SEQ ID NO: 2371087 - RNA, 19 nt, Homo sapiens
  misc_RNA (1)...(19): siRNA sense strand
aggaaggaauggagacaga

SEQ ID NO: 2371088 - RNA, 19 nt, Homo sapiens
  misc_RNA (1)...(19): siRNA sense strand
gguuuugacucgagugaaa

SEQ ID NO: 2371089 - RNA, 19 nt, Homo sapiens
  misc_RNA (1)...(19): siRNA sense strand
cugaagauuuagagguuga

SEQ ID NO: 2371090 - RNA, 19 nt, Homo sapiens
  misc_RNA (1)...(19): siRNA sense strand
aaacagagagcgagugcua

SEQ ID NO: 2371091 - RNA, 19 nt, Homo sapiens
  misc_RNA (1)...(19): siRNA sense strand
cugcaaagcuagaugcuca

SEQ ID NO: 2371092 - RNA, 19 nt, Homo sapiens
  misc_RNA (1)...(19): siRNA sense strand
gcaucaagguccagaaucu

SEQ ID NO: 2371093 - RNA, 19 nt, Homo sapiens
  misc_RNA (1)...(19): siRNA sense strand
ugaacaagauauuagggaa

SEQ ID NO: 2371094 - RNA, 19 nt, Homo sapiens
  misc_RNA (1)...(19): siRNA sense strand
ggaauauaguuacaggcaa

SEQ ID NO: 2371095 - RNA, 19 nt, Homo sapiens
  misc_RNA (1)...(19): siRNA sense strand
gaggaaaaucggugggaau

SEQ ID NO: 2371096 - RNA, 19 nt, Homo sapiens
  misc_RNA (1)...(19): siRNA sense strand
aggaagauacagagaauca

SEQ ID NO: 2371097 - RNA, 19 nt, Homo sapiens
  misc_RNA (1)...(19): siRNA sense strand
gugaaagauuugagucuga

SEQ ID NO: 2371098 - RNA, 19 nt, Homo sapiens
  misc_RNA (1)...(19): siRNA sense strand
gcuuaauacggaaggaaaa

SEQ ID NO: 2371099 - RNA, 19 nt, Homo sapiens
  misc_RNA (1)...(19): siRNA sense strand
ggucuaaagaaguggaagu

SEQ ID NO: 2371100 - RNA, 19 nt, Homo sapiens
  misc_RNA (1)...(19): siRNA sense strand
gaagaaaagcagagugaga

SEQ ID NO: 2371101 - RNA, 19 nt, Homo sapiens
  misc_RNA (1)...(19): siRNA sense strand
ugaaaguaccaaaggaaaa

SEQ ID NO: 2371102 - RNA, 19 nt, Homo sapiens
  misc_RNA (1)...(19): siRNA sense strand
ggagagaacagauggcaga

SEQ ID NO: 2371103 - RNA, 19 nt, Homo sapiens
  misc_RNA (1)...(19): siRNA sense strand
agaaagaggaccauaaaga

SEQ ID NO: 2371104 - RNA, 19 nt, Homo sapiens
  misc_RNA (1)...(19): siRNA sense strand
acaccaagcaagugaaaca

SEQ ID NO: 2371105 - RNA, 19 nt, Homo sapiens
  misc_RNA (1)...(19): siRNA sense strand
agaagauaaccuuggcaaa

SEQ ID NO: 2371106 - RNA, 19 nt, Homo sapiens
  misc_RNA (1)...(19): siRNA sense strand
cagcagauggaaauggaaa

SEQ ID NO: 2371107 - RNA, 19 nt, Homo sapiens
  misc_RNA (1)...(19): siRNA sense strand
uuggagaaauuguggauau

SEQ ID NO: 2371108 - RNA, 19 nt, Homo sapiens
  misc_RNA (1)...(19): siRNA sense strand
ggucaagacaucagagacu

SEQ ID NO: 2371109 - RNA, 19 nt, Homo sapiens
  misc_RNA (1)...(19): siRNA sense strand
auguugaagugguggagaa

SEQ ID NO: 2371110 - RNA, 19 nt, Homo sapiens
  misc_RNA (1)...(19): siRNA sense strand
aagaagagcaagagaggca

SEQ ID NO: 2371111 - RNA, 19 nt, Homo sapiens
  misc_RNA (1)...(19): siRNA sense strand
agaggaaauagcagugaaa

SEQ ID NO: 2371112 - RNA, 19 nt, Homo sapiens
  misc_RNA (1)...(19): siRNA sense strand
gauaugagaaacuggacaa

SEQ ID NO: 2371113 - RNA, 19 nt, Homo sapiens
  misc_RNA (1)...(19): siRNA sense strand
gcagauuugaugugaguuu

SEQ ID NO: 2371114 - RNA, 19 nt, Homo sapiens
  misc_RNA (1)...(19): siRNA sense strand
caaagagcccguugagcaa

SEQ ID NO: 2371115 - RNA, 19 nt, Homo sapiens
  misc_RNA (1)...(19): siRNA sense strand
agaaaaugagcgagagcaa

SEQ ID NO: 2371116 - RNA, 19 nt, Homo sapiens
  misc_RNA (1)...(19): siRNA sense strand
gagaaggaaggcaggcuua

SEQ ID NO: 2371117 - RNA, 19 nt, Homo sapiens
  misc_RNA (1)...(19): siRNA sense strand
gagcaagagaggcaggaau

SEQ ID NO: 2371118 - RNA, 19 nt, Homo sapiens
  misc_RNA (1)...(19): siRNA sense strand
aauugaagauggaggcaga

SEQ ID NO: 2371119 - RNA, 19 nt, Homo sapiens
  misc_RNA (1)...(19): siRNA sense strand
ugaucaaggaccagagaga

SEQ ID NO: 2371120 - RNA, 19 nt, Homo sapiens
  misc_RNA (1)...(19): siRNA sense strand
auaagaaagaggaccauaa

SEQ ID NO: 2371121 - RNA, 19 nt, Homo sapiens
  misc_RNA (1)...(19): siRNA sense strand
gcgaaacacaaacaagaaa

SEQ ID NO: 2371122 - RNA, 19 nt, Homo sapiens
  misc_RNA (1)...(19): siRNA sense strand
cuauccagcucgagggaga

SEQ ID NO: 2371123 - RNA, 19 nt, Homo sapiens
  misc_RNA (1)...(19): siRNA sense strand
agagagaagacguuaggaa

SEQ ID NO: 2371124 - RNA, 19 nt, Homo sapiens
  misc_RNA (1)...(19): siRNA sense strand
gcaccaagcgagaacggaa

SEQ ID NO: 2371125 - RNA, 19 nt, Homo sapiens
  misc_RNA (1)...(19): siRNA sense strand
cuguaaggguagaugaauu

SEQ ID NO: 2371126 - RNA, 19 nt, Homo sapiens
  misc_RNA (1)...(19): siRNA sense strand
ggcuauaggcuuuggauau

SEQ ID NO: 2371127 - RNA, 19 nt, Homo sapiens
  misc_RNA (1)...(19): siRNA sense strand
auguugauccagagggaaa

SEQ ID NO: 2371128 - RNA, 19 nt, Homo sapiens
  misc_RNA (1)...(19): siRNA sense strand
auggaaagacagagcagaa

SEQ ID NO: 2371129 - RNA, 19 nt, Homo sapiens
  misc_RNA (1)...(19): siRNA sense strand
ugagaaacuggaagaagaa

SEQ ID NO: 2371130 - RNA, 19 nt, Homo sapiens
  misc_RNA (1)...(19): siRNA sense strand
ugaaacagauuaaagccaa

SEQ ID NO: 2371131 - RNA, 19 nt, Homo sapiens
  misc_RNA (1)...(19): siRNA sense strand
cuggaauaaacuugaagaa

SEQ ID NO: 2371132 - RNA, 19 nt, Homo sapiens
  misc_RNA (1)...(19): siRNA sense strand
gagaaagccuucagagccu

SEQ ID NO: 2371133 - RNA, 19 nt, Homo sapiens
  misc_RNA (1)...(19): siRNA sense strand
gggaaauaucucagugacu

SEQ ID NO: 2371134 - RNA, 19 nt, Homo sapiens
  misc_RNA (1)...(19): siRNA sense strand
ugguuauccuaaagaagaa

SEQ ID NO: 2371135 - RNA, 19 nt, Homo sapiens
  misc_RNA (1)...(19): siRNA sense strand
cuucaaaccaaguccuuaa

SEQ ID NO: 2371136 - RNA, 19 nt, Homo sapiens
  misc_RNA (1)...(19): siRNA sense strand
cagagcagaaacagugaua

SEQ ID NO: 2371137 - RNA, 19 nt, Homo sapiens
  misc_RNA (1)...(19): siRNA sense strand
cuggucagguggugggauu

SEQ ID NO: 2371138 - RNA, 19 nt, Homo sapiens
  misc_RNA (1)...(19): siRNA sense strand
cagaaaccggcuucagaaa

SEQ ID NO: 2371139 - RNA, 19 nt, Homo sapiens
  misc_RNA (1)...(19): siRNA sense strand
agguaaaaugauuggacua

SEQ ID NO: 2371140 - RNA, 19 nt, Homo sapiens
  misc_RNA (1)...(19): siRNA sense strand
guggauaugauguugaaau

SEQ ID NO: 2371141 - RNA, 19 nt, Homo sapiens
  misc_RNA (1)...(19): siRNA sense strand
ugcagaaacacaauggaaa

SEQ ID NO: 2371142 - RNA, 19 nt, Homo sapiens
  misc_RNA (1)...(19): siRNA sense strand
cgcuauggcaaauggacaa

SEQ ID NO: 2371143 - RNA, 19 nt, Homo sapiens
  misc_RNA (1)...(19): siRNA sense strand
ccauuagacuacuggacca

SEQ ID NO: 2371144 - RNA, 19 nt, Homo sapiens
  misc_RNA (1)...(19): siRNA sense strand
agagaugaacugugauaca

SEQ ID NO: 2371145 - RNA, 19 nt, Homo sapiens
  misc_RNA (1)...(19): siRNA sense strand
acaacuaagugaaguggga

SEQ ID NO: 2371146 - RNA, 19 nt, Homo sapiens
  misc_RNA (1)...(19): siRNA sense strand
uguaaggguagaugaauuu

SEQ ID NO: 2371147 - RNA, 19 nt, Homo sapiens
  misc_RNA (1)...(19): siRNA sense strand
aggaaagcaagcacugaaa

SEQ ID NO: 2371148 - RNA, 19 nt, Homo sapiens
  misc_RNA (1)...(19): siRNA sense strand
aaugaaagcaucugguaca

SEQ ID NO: 2371149 - RNA, 19 nt, Homo sapiens
  misc_RNA (1)...(19): siRNA sense strand
cugcagaaacacaauggaa

SEQ ID NO: 2371150 - RNA, 19 nt, Homo sapiens
  misc_RNA (1)...(19): siRNA sense strand
ggaccaucucuuugcaaau

SEQ ID NO: 2371151 - RNA, 19 nt, Homo sapiens
  misc_RNA (1)...(19): siRNA sense strand
agaugaacugugauacaaa

SEQ ID NO: 2371152 - RNA, 19 nt, Homo sapiens
  misc_RNA (1)...(19): siRNA sense strand
auggcaaggugguuggcaa

SEQ ID NO: 2371153 - RNA, 19 nt, Homo sapiens
  misc_RNA (1)...(19): siRNA sense strand
gaaacuacuggguggcuau

SEQ ID NO: 2371154 - RNA, 19 nt, Homo sapiens
  misc_RNA (1)...(19): siRNA sense strand
gauaauuggagguggcugu

SEQ ID NO: 2371155 - RNA, 19 nt, Homo sapiens
  misc_RNA (1)...(19): siRNA sense strand
guauaauccuggagauggu

SEQ ID NO: 2371156 - RNA, 19 nt, Homo sapiens
  misc_RNA (1)...(19): siRNA sense strand
gauccagagggaaaugaaa

SEQ ID NO: 2371157 - RNA, 19 nt, Homo sapiens
  misc_RNA (1)...(19): siRNA sense strand
aagugaagugggacagcaa

SEQ ID NO: 2371158 - RNA, 19 nt, Homo sapiens
  misc_RNA (1)...(19): siRNA sense strand
ugaccgaaccaaccagaaa

SEQ ID NO: 2371159 - RNA, 19 nt, Homo sapiens
  misc_RNA (1)...(19): siRNA sense strand
ccaagauuccauuagacua

SEQ ID NO: 2371160 - RNA, 19 nt, Homo sapiens
  misc_RNA (1)...(19): siRNA sense strand
uuagagaugaacugugaua

SEQ ID NO: 2371161 - RNA, 19 nt, Homo sapiens
  misc_RNA (1)...(19): siRNA sense strand
ggaugaaagaugugguccu

SEQ ID NO: 2371162 - RNA, 19 nt, Homo sapiens
  misc_RNA (1)...(19): siRNA sense strand
guuuaacaucaaaggccaa

SEQ ID NO: 2371163 - RNA, 19 nt, Homo sapiens
  misc_RNA (1)...(19): siRNA sense strand
caggccaggaggagggaau

SEQ ID NO: 2371164 - RNA, 19 nt, Homo sapiens
  misc_RNA (1)...(19): siRNA sense strand
uggcuauaggcuuuggaua

SEQ ID NO: 2371165 - RNA, 19 nt, Homo sapiens
  misc_RNA (1)...(19): siRNA sense strand
cggacuggcuggcaugcaa

SEQ ID NO: 2371166 - RNA, 19 nt, Homo sapiens
  misc_RNA (1)...(19): siRNA sense strand
aaugauuggacuagaacau

SEQ ID NO: 2371167 - RNA, 19 nt, Homo sapiens
  misc_RNA (1)...(19): siRNA sense strand
ccauaugaaagucaagaga

SEQ ID NO: 2371168 - RNA, 19 nt, Homo sapiens
  misc_RNA (1)...(19): siRNA sense strand
uggaaagacagagcagaaa

SEQ ID NO: 2371169 - RNA, 19 nt, Homo sapiens
  misc_RNA (1)...(19): siRNA sense strand
cauaugaaagucaagagaa

SEQ ID NO: 2371170 - RNA, 19 nt, Homo sapiens
  misc_RNA (1)...(19): siRNA sense strand
ggauugaagaagaagcagu

SEQ ID NO: 2371171 - RNA, 19 nt, Homo sapiens
  misc_RNA (1)...(19): siRNA sense strand
aagcacugaaacagauuaa

SEQ ID NO: 2371172 - RNA, 19 nt, Homo sapiens
  misc_RNA (1)...(19): siRNA sense strand
ggaggagggaaucgacaau

SEQ ID NO: 2371173 - RNA, 19 nt, Homo sapiens
  misc_RNA (1)...(19): siRNA sense strand
gcaucugguacaauggcaa

SEQ ID NO: 2371174 - RNA, 19 nt, Homo sapiens
  misc_RNA (1)...(19): siRNA sense strand
uaggaaauguggugcccuu

SEQ ID NO: 2371175 - RNA, 19 nt, Homo sapiens
  misc_RNA (1)...(19): siRNA sense strand
ggcucgugaaguagguaaa

SEQ ID NO: 2371176 - RNA, 19 nt, Homo sapiens
  misc_RNA (1)...(19): siRNA sense strand
ucaaagcugccauggaaau

SEQ ID NO: 2371177 - RNA, 19 nt, Homo sapiens
  misc_RNA (1)...(19): siRNA sense strand
cuggguggcuauaggcuuu

SEQ ID NO: 2371178 - RNA, 19 nt, Homo sapiens
  misc_RNA (1)...(19): siRNA sense strand
ugaagaucuuagugaugau

SEQ ID NO: 2371179 - RNA, 19 nt, Homo sapiens
  misc_RNA (1)...(19): siRNA sense strand
uggaagcuggacuggaaua

SEQ ID NO: 2371180 - RNA, 19 nt, Homo sapiens
  misc_RNA (1)...(19): siRNA sense strand
gaaucauggaacacaucaa

SEQ ID NO: 2371181 - RNA, 19 nt, Homo sapiens
  misc_RNA (1)...(19): siRNA sense strand
ugauguugauccagaggga

SEQ ID NO: 2371182 - RNA, 19 nt, Homo sapiens
  misc_RNA (1)...(19): siRNA sense strand
acccuuaucugcagaaaca

SEQ ID NO: 2371183 - RNA, 19 nt, Homo sapiens
  misc_RNA (1)...(19): siRNA sense strand
aagucaaagccgucgguua

SEQ ID NO: 2371184 - RNA, 19 nt, Homo sapiens
  misc_RNA (1)...(19): siRNA sense strand
cgagaaccucacagagaau

SEQ ID NO: 2371185 - RNA, 19 nt, Homo sapiens
  misc_RNA (1)...(19): siRNA sense strand
gggacauuccuuuguaaaa

SEQ ID NO: 2371186 - RNA, 19 nt, Homo sapiens
  misc_RNA (1)...(19): siRNA sense strand
gaugugauucugagcgaca

SEQ ID NO: 2371187 - RNA, 19 nt, Homo sapiens
  misc_RNA (1)...(19): siRNA sense strand
cgguuacagaggagacuga

SEQ ID NO: 2371188 - RNA, 19 nt, Homo sapiens
  misc_RNA (1)...(19): siRNA sense strand
ccaaagcccugguggccua

SEQ ID NO: 2371189 - RNA, 19 nt, Homo sapiens
  misc_RNA (1)...(19): siRNA sense strand
aagaaggagaucaaagaca

SEQ ID NO: 2371190 - RNA, 19 nt, Homo sapiens
  misc_RNA (1)...(19): siRNA sense strand
acgcaagaagacagcgaca

SEQ ID NO: 2371191 - RNA, 19 nt, Homo sapiens
  misc_RNA (1)...(19): siRNA sense strand
accagaaauccuaccgaua

SEQ ID NO: 2371192 - RNA, 19 nt, Homo sapiens
  misc_RNA (1)...(19): siRNA sense strand
accagaaauauguggauga

SEQ ID NO: 2371193 - RNA, 19 nt, Homo sapiens
  misc_RNA (1)...(19): siRNA sense strand
ggacgcaagaagacagcga

SEQ ID NO: 2371194 - RNA, 19 nt, Homo sapiens
  misc_RNA (1)...(19): siRNA sense strand
ggcugaaaaugguggaaaa

SEQ ID NO: 2371195 - RNA, 19 nt, Homo sapiens
  misc_RNA (1)...(19): siRNA sense strand
ggacaaagagaucuggaca

SEQ ID NO: 2371196 - RNA, 19 nt, Homo sapiens
  misc_RNA (1)...(19): siRNA sense strand
cugccaacaagaagcauua

SEQ ID NO: 2371197 - RNA, 19 nt, Homo sapiens
  misc_RNA (1)...(19): siRNA sense strand
cuguaaaagacgugaacca

SEQ ID NO: 2371198 - RNA, 19 nt, Homo sapiens
  misc_RNA (1)...(19): siRNA sense strand
ccucagggacaaagagauc

SEQ ID NO: 2371199 - RNA, 19 nt, Homo sapiens
  misc_RNA (1)...(19): siRNA sense strand
ccgaauggguggauaccgu

SEQ ID NO: 2371200 - RNA, 19 nt, Homo sapiens
  misc_RNA (1)...(19): siRNA sense strand
gaucauuaccauugggcaa

SEQ ID NO: 2371201 - RNA, 19 nt, Homo sapiens
  misc_RNA (1)...(19): siRNA sense strand
cuuuaauggaauuggguau

SEQ ID NO: 2371202 - RNA, 19 nt, Homo sapiens
  misc_RNA (1)...(19): siRNA sense strand
aguuggagauacaccgaaa

SEQ ID NO: 2371203 - RNA, 19 nt, Homo sapiens
  misc_RNA (1)...(19): siRNA sense strand
cgagauaccucuaugguuc

SEQ ID NO: 2371204 - RNA, 19 nt, Homo sapiens
  misc_RNA (1)...(19): siRNA sense strand
ggccgaaguuggugggaug

SEQ ID NO: 2371205 - RNA, 19 nt, Homo sapiens
  misc_RNA (1)...(19): siRNA sense strand
cagaaaccggaaaggaaaa

SEQ ID NO: 2371206 - RNA, 19 nt, Homo sapiens
  misc_RNA (1)...(19): siRNA sense strand
ggaaaauccaguuuagaga

SEQ ID NO: 2371207 - RNA, 19 nt, Homo sapiens
  misc_RNA (1)...(19): siRNA sense strand
auucaauggagcccagaaa

SEQ ID NO: 2371208 - RNA, 19 nt, Homo sapiens
  misc_RNA (1)...(19): siRNA sense strand
ugggcaagccauuguguau

SEQ ID NO: 2371209 - RNA, 19 nt, Homo sapiens
  misc_RNA (1)...(19): siRNA sense strand
guacugaguuugagggugc

SEQ ID NO: 2371210 - RNA, 19 nt, Homo sapiens
  misc_RNA (1)...(19): siRNA sense strand
aaucauugaaguuggagau

SEQ ID NO: 2371211 - RNA, 19 nt, Homo sapiens
  misc_RNA (1)...(19): siRNA sense strand
acaccgaaagauagagcuu

SEQ ID NO: 2371212 - RNA, 19 nt, Homo sapiens
  misc_RNA (1)...(19): siRNA sense strand
uucagaaaccggaaaggaa

SEQ ID NO: 2371213 - RNA, 19 nt, Homo sapiens
  misc_RNA (1)...(19): siRNA sense strand
cuaugguucaugagcuuaa

SEQ ID NO: 2371214 - RNA, 19 nt, Homo sapiens
  misc_RNA (1)...(19): siRNA sense strand
agauacaccgaaagauaga

SEQ ID NO: 2371215 - RNA, 19 nt, Homo sapiens
  misc_RNA (1)...(19): siRNA sense strand
cucuaugguucaugagcuu

SEQ ID NO: 2371216 - RNA, 19 nt, Homo sapiens
  misc_RNA (1)...(19): siRNA sense strand
cggccaagaaagacaaaga

SEQ ID NO: 2371217 - RNA, 19 nt, Homo sapiens
  misc_RNA (1)...(19): siRNA sense strand
caagaaagacaaagaccca

SEQ ID NO: 2371218 - RNA, 19 nt, Homo sapiens
  misc_RNA (1)...(19): siRNA sense strand
cgccuaaggacgacaagaa

SEQ ID NO: 2371219 - RNA, 19 nt, Homo sapiens
  misc_RNA (1)...(19): siRNA sense strand
agaagugguccaaaggcaa

SEQ ID NO: 2371220 - RNA, 19 nt, Homo sapiens
  misc_RNA (1)...(19): siRNA sense strand
aggacgacaagaagaagaa

SEQ ID NO: 2371221 - RNA, 19 nt, Homo sapiens
  misc_RNA (1)...(19): siRNA sense strand
gaagugguccaaaggcaaa

SEQ ID NO: 2371222 - RNA, 19 nt, Homo sapiens
  misc_RNA (1)...(19): siRNA sense strand
aagaagugguccaaaggca

SEQ ID NO: 2371223 - RNA, 19 nt, Homo sapiens
  misc_RNA (1)...(19): siRNA sense strand
acgacaagaagaagaagga

SEQ ID NO: 2371224 - RNA, 19 nt, Homo sapiens
  misc_RNA (1)...(19): siRNA sense strand
aagaagaagugguccaaag

SEQ ID NO: 2371225 - RNA, 19 nt, Homo sapiens
  misc_RNA (1)...(19): siRNA sense strand
gauaaacucuguaaggaag

SEQ ID NO: 2371226 - RNA, 19 nt, Homo sapiens
  misc_RNA (1)...(19): siRNA sense strand
aggcaaaguucgggacaag

SEQ ID NO: 2371227 - RNA, 19 nt, Homo sapiens
  misc_RNA (1)...(19): siRNA sense strand
uggcgaggacacagauaaa

SEQ ID NO: 2371228 - RNA, 19 nt, Homo sapiens
  misc_RNA (1)...(19): siRNA sense strand
aggccaucacggaggucaa

SEQ ID NO: 2371229 - RNA, 19 nt, Homo sapiens
  misc_RNA (1)...(19): siRNA sense strand
cugugcucguggcgggaua

SEQ ID NO: 2371230 - RNA, 19 nt, Homo sapiens
  misc_RNA (1)...(19): siRNA sense strand
gugugguguacgaggacau

SEQ ID NO: 2371231 - RNA, 19 nt, Homo sapiens
  misc_RNA (1)...(19): siRNA sense strand
acgugaacaaggauggaaa

SEQ ID NO: 2371232 - RNA, 19 nt, Homo sapiens
  misc_RNA (1)...(19): siRNA sense strand
acauagaagagaaggaacu

SEQ ID NO: 2371233 - RNA, 19 nt, Homo sapiens
  misc_RNA (1)...(19): siRNA sense strand
cuugauaaguuccgcgaga

SEQ ID NO: 2371234 - RNA, 19 nt, Homo sapiens
  misc_RNA (1)...(19): siRNA sense strand
aaauaaagauggucgguug

SEQ ID NO: 2371235 - RNA, 19 nt, Homo sapiens
  misc_RNA (1)...(19): siRNA sense strand
gaagaaaggaaaagggacu

SEQ ID NO: 2371236 - RNA, 19 nt, Homo sapiens
  misc_RNA (1)...(19): siRNA sense strand
aggccauuucugaggcuaa

SEQ ID NO: 2371237 - RNA, 19 nt, Homo sapiens
  misc_RNA (1)...(19): siRNA sense strand
gcuuugaugcggaugaaaa

SEQ ID NO: 2371238 - RNA, 19 nt, Homo sapiens
  misc_RNA (1)...(19): siRNA sense strand
guuacauagaagagaagga

SEQ ID NO: 2371239 - RNA, 19 nt, Homo sapiens
  misc_RNA (1)...(19): siRNA sense strand
ucaaagacaugauggagcu

SEQ ID NO: 2371240 - RNA, 19 nt, Homo sapiens
  misc_RNA (1)...(19): siRNA sense strand
uguucuuaucugaggauga

SEQ ID NO: 2371241 - RNA, 19 nt, Homo sapiens
  misc_RNA (1)...(19): siRNA sense strand
cgacuggguuggagaggga

SEQ ID NO: 2371242 - RNA, 19 nt, Homo sapiens
  misc_RNA (1)...(19): siRNA sense strand
gcaucugugaagaggacaa

SEQ ID NO: 2371243 - RNA, 19 nt, Homo sapiens
  misc_RNA (1)...(19): siRNA sense strand
gguuggagagggagaucau

SEQ ID NO: 2371244 - RNA, 19 nt, Homo sapiens
  misc_RNA (1)...(19): siRNA sense strand
acuuauggcacgggaguaa

SEQ ID NO: 2371245 - RNA, 19 nt, Homo sapiens
  misc_RNA (1)...(19): siRNA sense strand
cccagaagaaacugaagaa

SEQ ID NO: 2371246 - RNA, 19 nt, Homo sapiens
  misc_RNA (1)...(19): siRNA sense strand
gcucaggccaucaagggua

SEQ ID NO: 2371247 - RNA, 19 nt, Homo sapiens
  misc_RNA (1)...(19): siRNA sense strand
cggaaaaggaacagauugu

SEQ ID NO: 2371248 - RNA, 19 nt, Homo sapiens
  misc_RNA (1)...(19): siRNA sense strand
acacaaggucgguggccca

SEQ ID NO: 2371249 - RNA, 19 nt, Homo sapiens
  misc_RNA (1)...(19): siRNA sense strand
agaugauccuuacggaaaa

SEQ ID NO: 2371250 - RNA, 19 nt, Homo sapiens
  misc_RNA (1)...(19): siRNA sense strand
cagaagaggagguugccca

SEQ ID NO: 2371251 - RNA, 19 nt, Homo sapiens
  misc_RNA (1)...(19): siRNA sense strand
aggagguugcccagaagaa

SEQ ID NO: 2371252 - RNA, 19 nt, Homo sapiens
  misc_RNA (1)...(19): siRNA sense strand
cgcagagaguaaugcugaa

SEQ ID NO: 2371253 - RNA, 19 nt, Homo sapiens
  misc_RNA (1)...(19): siRNA sense strand
agcauauccaagugaacaa

SEQ ID NO: 2371254 - RNA, 19 nt, Homo sapiens
  misc_RNA (1)...(19): siRNA sense strand
ccggagaaccccacgaaau

SEQ ID NO: 2371255 - RNA, 19 nt, Homo sapiens
  misc_RNA (1)...(19): siRNA sense strand
ccaagaaccuccuggcguu

SEQ ID NO: 2371256 - RNA, 19 nt, Homo sapiens
  misc_RNA (1)...(19): siRNA sense strand
accccaaaaucuugagaaa

SEQ ID NO: 2371257 - RNA, 19 nt, Homo sapiens
  misc_RNA (1)...(19): siRNA sense strand
gcaccauauagaagagagu

SEQ ID NO: 2371258 - RNA, 19 nt, Homo sapiens
  misc_RNA (1)...(19): siRNA sense strand
accauauagaagagaguuu

SEQ ID NO: 2371259 - RNA, 19 nt, Homo sapiens
  misc_RNA (1)...(19): siRNA sense strand
aggaucaucaggagccaaa

SEQ ID NO: 2371260 - RNA, 19 nt, Homo sapiens
  misc_RNA (1)...(19): siRNA sense strand
caagaaaucaaaagagcca

SEQ ID NO: 2371261 - RNA, 19 nt, Homo sapiens
  misc_RNA (1)...(19): siRNA sense strand
ccaagaaccuccuggcguu

SEQ ID NO: 2371262 - RNA, 19 nt, Homo sapiens
  misc_RNA (1)...(19): siRNA sense strand
accccaaaaucuugagaaa

SEQ ID NO: 2371263 - RNA, 19 nt, Homo sapiens
  misc_RNA (1)...(19): siRNA sense strand
gcaccauauagaagagagu

SEQ ID NO: 2371264 - RNA, 19 nt, Homo sapiens
  misc_RNA (1)...(19): siRNA sense strand
accauauagaagagaguuu

SEQ ID NO: 2371265 - RNA, 19 nt, Homo sapiens
  misc_RNA (1)...(19): siRNA sense strand
aggaucaucaggagccaaa

SEQ ID NO: 2371266 - RNA, 19 nt, Homo sapiens
  misc_RNA (1)...(19): siRNA sense strand
caagaaaucaaaagagcca

SEQ ID NO: 2371267 - RNA, 19 nt, Homo sapiens
  misc_RNA (1)...(19): siRNA sense strand
acuucaacuucgagcgcuu

SEQ ID NO: 2371268 - RNA, 19 nt, Homo sapiens
  misc_RNA (1)...(19): siRNA sense strand
agugaggcccagaggauca

SEQ ID NO: 2371269 - RNA, 19 nt, Homo sapiens
  misc_RNA (1)...(19): siRNA sense strand
cggaggaaccugagugccu

SEQ ID NO: 2371270 - RNA, 19 nt, Homo sapiens
  misc_RNA (1)...(19): siRNA sense strand
aggccugcaccgagaucaa

SEQ ID NO: 2371271 - RNA, 19 nt, Homo sapiens
  misc_RNA (1)...(19): siRNA sense strand
acacugggaacgagggcga

SEQ ID NO: 2371272 - RNA, 19 nt, Homo sapiens
  misc_RNA (1)...(19): siRNA sense strand
ccaauguggacgaggguau

SEQ ID NO: 2371273 - RNA, 19 nt, Homo sapiens
  misc_RNA (1)...(19): siRNA sense strand
aggaaaaggaccagaagua

SEQ ID NO: 2371274 - RNA, 19 nt, Homo sapiens
  misc_RNA (1)...(19): siRNA sense strand
ggucaaucucuauggacuu

SEQ ID NO: 2371275 - RNA, 19 nt, Homo sapiens
  misc_RNA (1)...(19): siRNA sense strand
cggcccugcugaagaacaa

SEQ ID NO: 2371276 - RNA, 19 nt, Homo sapiens
  misc_RNA (1)...(19): siRNA sense strand
cguuacagcgauuggucaa

SEQ ID NO: 2371277 - RNA, 19 nt, Homo sapiens
  misc_RNA (1)...(19): siRNA sense strand
ugguggagcugcugcgaga

SEQ ID NO: 2371278 - RNA, 19 nt, Homo sapiens
  misc_RNA (1)...(19): siRNA sense strand
ucauugacgaagagguaau

SEQ ID NO: 2371279 - RNA, 19 nt, Homo sapiens
  misc_RNA (1)...(19): siRNA sense strand
aggucaagcagaagcaaca

SEQ ID NO: 2371280 - RNA, 19 nt, Homo sapiens
  misc_RNA (1)...(19): siRNA sense strand
ccaccaacauugcuggaca

SEQ ID NO: 2371281 - RNA, 19 nt, Homo sapiens
  misc_RNA (1)...(19): siRNA sense strand
guaaagacacccucgccaa

SEQ ID NO: 2371282 - RNA, 19 nt, Homo sapiens
  misc_RNA (1)...(19): siRNA sense strand
gagcagauguguaagaccu

SEQ ID NO: 2371283 - RNA, 19 nt, Homo sapiens
  misc_RNA (1)...(19): siRNA sense strand
uggcauuacugcagcggca

SEQ ID NO: 2371284 - RNA, 19 nt, Homo sapiens
  misc_RNA (1)...(19): siRNA sense strand
ucuaaucguacgagacauu

SEQ ID NO: 2371285 - RNA, 19 nt, Homo sapiens
  misc_RNA (1)...(19): siRNA sense strand
cgaagaggcucgaaggcag

SEQ ID NO: 2371286 - RNA, 19 nt, Homo sapiens
  misc_RNA (1)...(19): siRNA sense strand
agguggagggucugaaaga

SEQ ID NO: 2371287 - RNA, 19 nt, Homo sapiens
  misc_RNA (1)...(19): siRNA sense strand
ccaacuguaccaaggucaa

SEQ ID NO: 2371288 - RNA, 19 nt, Homo sapiens
  misc_RNA (1)...(19): siRNA sense strand
gccuguaacaagagcauca

SEQ ID NO: 2371289 - RNA, 19 nt, Homo sapiens
  misc_RNA (1)...(19): siRNA sense strand
ccagcaauucauccggaaa

SEQ ID NO: 2371290 - RNA, 19 nt, Homo sapiens
  misc_RNA (1)...(19): siRNA sense strand
gagggaucgaaauggaaau

SEQ ID NO: 2371291 - RNA, 19 nt, Homo sapiens
  misc_RNA (1)...(19): siRNA sense strand
gcuucaaagaugugcuagu

SEQ ID NO: 2371292 - RNA, 19 nt, Homo sapiens
  misc_RNA (1)...(19): siRNA sense strand
agagggaucgaaauggaaa

SEQ ID NO: 2371293 - RNA, 19 nt, Homo sapiens
  misc_RNA (1)...(19): siRNA sense strand
agauggaugagaaggacuu

SEQ ID NO: 2371294 - RNA, 19 nt, Homo sapiens
  misc_RNA (1)...(19): siRNA sense strand
uuaccagaaugcaggacau

SEQ ID NO: 2371295 - RNA, 19 nt, Homo sapiens
  misc_RNA (1)...(19): siRNA sense strand
cgaaauggaaaucagcuga

SEQ ID NO: 2371296 - RNA, 19 nt, Homo sapiens
  misc_RNA (1)...(19): siRNA sense strand
cgcaagaggaggcguuaca

SEQ ID NO: 2371297 - RNA, 19 nt, Homo sapiens
  misc_RNA (1)...(19): siRNA sense strand
ggacauugguucuggagga

SEQ ID NO: 2371298 - RNA, 19 nt, Homo sapiens
  misc_RNA (1)...(19): siRNA sense strand
uggaagagcugcaggugga

SEQ ID NO: 2371299 - RNA, 19 nt, Homo sapiens
  misc_RNA (1)...(19): siRNA sense strand
cccauaugaucgaggacau

SEQ ID NO: 2371300 - RNA, 19 nt, Homo sapiens
  misc_RNA (1)...(19): siRNA sense strand
cuaacaggcaagcagcaaa

SEQ ID NO: 2371301 - RNA, 19 nt, Homo sapiens
  misc_RNA (1)...(19): siRNA sense strand
gcuuagaggacacaggcca

SEQ ID NO: 2371302 - RNA, 19 nt, Homo sapiens
  misc_RNA (1)...(19): siRNA sense strand
ggacauugguucuggagga

SEQ ID NO: 2371303 - RNA, 19 nt, Homo sapiens
  misc_RNA (1)...(19): siRNA sense strand
uggaagagcugcaggugga

SEQ ID NO: 2371304 - RNA, 19 nt, Homo sapiens
  misc_RNA (1)...(19): siRNA sense strand
cccauaugaucgaggacau

SEQ ID NO: 2371305 - RNA, 19 nt, Homo sapiens
  misc_RNA (1)...(19): siRNA sense strand
cuaacaggcaagcagcaaa

SEQ ID NO: 2371306 - RNA, 19 nt, Homo sapiens
  misc_RNA (1)...(19): siRNA sense strand
gcuuagaggacacaggcca

SEQ ID NO: 2371307 - RNA, 19 nt, Homo sapiens
  misc_RNA (1)...(19): siRNA sense strand
cgguaggagcuguaaucaa

SEQ ID NO: 2371308 - RNA, 19 nt, Homo sapiens
  misc_RNA (1)...(19): siRNA sense strand
caacgaaagucauaccgua

SEQ ID NO: 2371309 - RNA, 19 nt, Homo sapiens
  misc_RNA (1)...(19): siRNA sense strand
ccacagucaagaaaggcaa

SEQ ID NO: 2371310 - RNA, 19 nt, Homo sapiens
  misc_RNA (1)...(19): siRNA sense strand
cagcaguggucauucgaca

SEQ ID NO: 2371311 - RNA, 19 nt, Homo sapiens
  misc_RNA (1)...(19): siRNA sense strand
augcaggagucauagugaa

SEQ ID NO: 2371312 - RNA, 19 nt, Homo sapiens
  misc_RNA (1)...(19): siRNA sense strand
agaagagcgaggagagcua

SEQ ID NO: 2371313 - RNA, 19 nt, Homo sapiens
  misc_RNA (1)...(19): siRNA sense strand
ugaccaagaagaagagcga

SEQ ID NO: 2371314 - RNA, 19 nt, Homo sapiens
  misc_RNA (1)...(19): siRNA sense strand
cugcagaagcugauaagca

SEQ ID NO: 2371315 - RNA, 19 nt, Homo sapiens
  misc_RNA (1)...(19): siRNA sense strand
ggauggagcgcauggagca

SEQ ID NO: 2371316 - RNA, 19 nt, Homo sapiens
  misc_RNA (1)...(19): siRNA sense strand
aggugcuggucgaggacau

SEQ ID NO: 2371317 - RNA, 19 nt, Homo sapiens
  misc_RNA (1)...(19): siRNA sense strand
cccacaggauggagcgcau

SEQ ID NO: 2371318 - RNA, 19 nt, Homo sapiens
  misc_RNA (1)...(19): siRNA sense strand
cccauaaaguggagcacga

SEQ ID NO: 2371319 - RNA, 19 nt, Homo sapiens
  misc_RNA (1)...(19): siRNA sense strand
uggcuacauauuugggaaa

SEQ ID NO: 2371320 - RNA, 19 nt, Homo sapiens
  misc_RNA (1)...(19): siRNA sense strand
aucaagaaacuguaggcaa

SEQ ID NO: 2371321 - RNA, 19 nt, Homo sapiens
  misc_RNA (1)...(19): siRNA sense strand
gggaggagcuuccagagga

SEQ ID NO: 2371322 - RNA, 19 nt, Homo sapiens
  misc_RNA (1)...(19): siRNA sense strand
cgguuaccuaggagagaga

SEQ ID NO: 2371323 - RNA, 19 nt, Homo sapiens
  misc_RNA (1)...(19): siRNA sense strand
ggagagagaacgcagagca

SEQ ID NO: 2371324 - RNA, 19 nt, Homo sapiens
  misc_RNA (1)...(19): siRNA sense strand
uguacuuguuugugaggca

SEQ ID NO: 2371325 - RNA, 19 nt, Homo sapiens
  misc_RNA (1)...(19): siRNA sense strand
agaccaaagaagagaggaa

SEQ ID NO: 2371326 - RNA, 19 nt, Homo sapiens
  misc_RNA (1)...(19): siRNA sense strand
cggaagaagaagaagaaga

SEQ ID NO: 2371327 - RNA, 19 nt, Homo sapiens
  misc_RNA (1)...(19): siRNA sense strand
ggaaagaagaaaaggaaga

SEQ ID NO: 2371328 - RNA, 19 nt, Homo sapiens
  misc_RNA (1)...(19): siRNA sense strand
gaagagaggaagaaggaga

SEQ ID NO: 2371329 - RNA, 19 nt, Homo sapiens
  misc_RNA (1)...(19): siRNA sense strand
cggaagaugcugaaggaga

SEQ ID NO: 2371330 - RNA, 19 nt, Homo sapiens
  misc_RNA (1)...(19): siRNA sense strand
agucagaagcccagaucaa

SEQ ID NO: 2371331 - RNA, 19 nt, Homo sapiens
  misc_RNA (1)...(19): siRNA sense strand
gagcaaugcccgaggagga

SEQ ID NO: 2371332 - RNA, 19 nt, Homo sapiens
  misc_RNA (1)...(19): siRNA sense strand
ccuuaagaggaaagaagaa

SEQ ID NO: 2371333 - RNA, 19 nt, Homo sapiens
  misc_RNA (1)...(19): siRNA sense strand
guucgaaagaaaaggaaaa

SEQ ID NO: 2371334 - RNA, 19 nt, Homo sapiens
  misc_RNA (1)...(19): siRNA sense strand
cuacauuagaugagaagau

SEQ ID NO: 2371335 - RNA, 19 nt, Homo sapiens
  misc_RNA (1)...(19): siRNA sense strand
cugaaacaguaucgagcua

SEQ ID NO: 2371336 - RNA, 19 nt, Homo sapiens
  misc_RNA (1)...(19): siRNA sense strand
agaugagaagauugagaaa

SEQ ID NO: 2371337 - RNA, 19 nt, Homo sapiens
  misc_RNA (1)...(19): siRNA sense strand
ugggagaagaugagcggaa

SEQ ID NO: 2371338 - RNA, 19 nt, Homo sapiens
  misc_RNA (1)...(19): siRNA sense strand
cggcuuaaucggaaccaua

SEQ ID NO: 2371339 - RNA, 19 nt, Homo sapiens
  misc_RNA (1)...(19): siRNA sense strand
agcuagaggcggaggaaaa

SEQ ID NO: 2371340 - RNA, 19 nt, Homo sapiens
  misc_RNA (1)...(19): siRNA sense strand
cgacgaggaggcugcgaaa

SEQ ID NO: 2371341 - RNA, 19 nt, Homo sapiens
  misc_RNA (1)...(19): siRNA sense strand
ggaaggaggcaguggucca

SEQ ID NO: 2371342 - RNA, 19 nt, Homo sapiens
  misc_RNA (1)...(19): siRNA sense strand
aaaggaaaacagaggauaa

SEQ ID NO: 2371343 - RNA, 19 nt, Homo sapiens
  misc_RNA (1)...(19): siRNA sense strand
aaccaaaggagcaggaaga

SEQ ID NO: 2371344 - RNA, 19 nt, Homo sapiens
  misc_RNA (1)...(19): siRNA sense strand
agaagaagaagaaaggaca

SEQ ID NO: 2371345 - RNA, 19 nt, Homo sapiens
  misc_RNA (1)...(19): siRNA sense strand
ggagaagaugagcggaaga

SEQ ID NO: 2371346 - RNA, 19 nt, Homo sapiens
  misc_RNA (1)...(19): siRNA sense strand
agauugagaaaguucgaaa

SEQ ID NO: 2371347 - RNA, 19 nt, Homo sapiens
  misc_RNA (1)...(19): siRNA sense strand
agauacaagaggaggaagu

SEQ ID NO: 2371348 - RNA, 19 nt, Homo sapiens
  misc_RNA (1)...(19): siRNA sense strand
gagaaaguucgaaagaaaa

SEQ ID NO: 2371349 - RNA, 19 nt, Homo sapiens
  misc_RNA (1)...(19): siRNA sense strand
cuuaagaggaaagaagaaa

SEQ ID NO: 2371350 - RNA, 19 nt, Homo sapiens
  misc_RNA (1)...(19): siRNA sense strand
uugagaaaauggagaaaga

SEQ ID NO: 2371351 - RNA, 19 nt, Homo sapiens
  misc_RNA (1)...(19): siRNA sense strand
cauuagaugagaagauuga

SEQ ID NO: 2371352 - RNA, 19 nt, Homo sapiens
  misc_RNA (1)...(19): siRNA sense strand
ccagagacgaggaggaaac

SEQ ID NO: 2371353 - RNA, 19 nt, Homo sapiens
  misc_RNA (1)...(19): siRNA sense strand
ggaaguuggaaaaggagaa

SEQ ID NO: 2371354 - RNA, 19 nt, Homo sapiens
  misc_RNA (1)...(19): siRNA sense strand
agaggaagaaggagaaaau

SEQ ID NO: 2371355 - RNA, 19 nt, Homo sapiens
  misc_RNA (1)...(19): siRNA sense strand
gaggaaagaagaaaaggaa

SEQ ID NO: 2371356 - RNA, 19 nt, Homo sapiens
  misc_RNA (1)...(19): siRNA sense strand
aagagaggaagaaggagaa

SEQ ID NO: 2371357 - RNA, 19 nt, Homo sapiens
  misc_RNA (1)...(19): siRNA sense strand
ccaccagagacgaggagga

SEQ ID NO: 2371358 - RNA, 19 nt, Homo sapiens
  misc_RNA (1)...(19): siRNA sense strand
ggaaaacagaggauaaaga

SEQ ID NO: 2371359 - RNA, 19 nt, Homo sapiens
  misc_RNA (1)...(19): siRNA sense strand
aaguaaaggaucggaagaa

SEQ ID NO: 2371360 - RNA, 19 nt, Homo sapiens
  misc_RNA (1)...(19): siRNA sense strand
ccaugacagacgaggugaa

SEQ ID NO: 2371361 - RNA, 19 nt, Homo sapiens
  misc_RNA (1)...(19): siRNA sense strand
gcccagaucaauacagcaa

SEQ ID NO: 2371362 - RNA, 19 nt, Homo sapiens
  misc_RNA (1)...(19): siRNA sense strand
gguccugccaagaagcaaa

SEQ ID NO: 2371363 - RNA, 19 nt, Homo sapiens
  misc_RNA (1)...(19): siRNA sense strand
cugacaggaugcuggauga

SEQ ID NO: 2371364 - RNA, 19 nt, Homo sapiens
  misc_RNA (1)...(19): siRNA sense strand
gauguuugcugaacggcua

SEQ ID NO: 2371365 - RNA, 19 nt, Homo sapiens
  misc_RNA (1)...(19): siRNA sense strand
ugggugagcuccauggcaa

SEQ ID NO: 2371366 - RNA, 19 nt, Homo sapiens
  misc_RNA (1)...(19): siRNA sense strand
agaaagauguguaugcagu

SEQ ID NO: 2371367 - RNA, 19 nt, Homo sapiens
  misc_RNA (1)...(19): siRNA sense strand
guuuaugaaggaugccaaa

SEQ ID NO: 2371368 - RNA, 19 nt, Homo sapiens
  misc_RNA (1)...(19): siRNA sense strand
aaaggaaacaguugggcuu

SEQ ID NO: 2371369 - RNA, 19 nt, Homo sapiens
  misc_RNA (1)...(19): siRNA sense strand
aggaaggcucugaaccaaa

SEQ ID NO: 2371370 - RNA, 19 nt, Homo sapiens
  misc_RNA (1)...(19): siRNA sense strand
aagaagaagaagaagaaag

SEQ ID NO: 2371371 - RNA, 19 nt, Homo sapiens
  misc_RNA (1)...(19): siRNA sense strand
accaaagaagagaggaaga

SEQ ID NO: 2371372 - RNA, 19 nt, Homo sapiens
  misc_RNA (1)...(19): siRNA sense strand
aggaaaggucucaguuuga

SEQ ID NO: 2371373 - RNA, 19 nt, Homo sapiens
  misc_RNA (1)...(19): siRNA sense strand
acuuugaggagcagaugaa

SEQ ID NO: 2371374 - RNA, 19 nt, Homo sapiens
  misc_RNA (1)...(19): siRNA sense strand
gggaagaaccgcagugcug

SEQ ID NO: 2371375 - RNA, 19 nt, Homo sapiens
  misc_RNA (1)...(19): siRNA sense strand
ucaaaguaaaggaucggaa

SEQ ID NO: 2371376 - RNA, 19 nt, Homo sapiens
  misc_RNA (1)...(19): siRNA sense strand
aagucugggaaguuggaaa

SEQ ID NO: 2371377 - RNA, 19 nt, Homo sapiens
  misc_RNA (1)...(19): siRNA sense strand
aggagcagaugaaggagau

SEQ ID NO: 2371378 - RNA, 19 nt, Homo sapiens
  misc_RNA (1)...(19): siRNA sense strand
gcugaaggagauuguaaaa

SEQ ID NO: 2371379 - RNA, 19 nt, Homo sapiens
  misc_RNA (1)...(19): siRNA sense strand
ccgggacaagauugagaaa

SEQ ID NO: 2371380 - RNA, 19 nt, Homo sapiens
  misc_RNA (1)...(19): siRNA sense strand
agaaagaagcaaaggaagg

SEQ ID NO: 2371381 - RNA, 19 nt, Homo sapiens
  misc_RNA (1)...(19): siRNA sense strand
augaguacuuugaggagca

SEQ ID NO: 2371382 - RNA, 19 nt, Homo sapiens
  misc_RNA (1)...(19): siRNA sense strand
gaaaaggaaaacagaggau

SEQ ID NO: 2371383 - RNA, 19 nt, Homo sapiens
  misc_RNA (1)...(19): siRNA sense strand
ggaaaaggagaaagaagca

SEQ ID NO: 2371384 - RNA, 19 nt, Homo sapiens
  misc_RNA (1)...(19): siRNA sense strand
aggaaggcucagaagauga

SEQ ID NO: 2371385 - RNA, 19 nt, Homo sapiens
  misc_RNA (1)...(19): siRNA sense strand
gaggagcagaugaaggaga

SEQ ID NO: 2371386 - RNA, 19 nt, Homo sapiens
  misc_RNA (1)...(19): siRNA sense strand
aaaaggagaaagaagcaaa

SEQ ID NO: 2371387 - RNA, 19 nt, Homo sapiens
  misc_RNA (1)...(19): siRNA sense strand
ggccuaaucgugaaggaga

SEQ ID NO: 2371388 - RNA, 19 nt, Homo sapiens
  misc_RNA (1)...(19): siRNA sense strand
gaggaggagaggugggagu

SEQ ID NO: 2371389 - RNA, 19 nt, Homo sapiens
  misc_RNA (1)...(19): siRNA sense strand
uggaagaggaggaggagag

SEQ ID NO: 2371390 - RNA, 19 nt, Homo sapiens
  misc_RNA (1)...(19): siRNA sense strand
cuggaucacaucauggaaa

SEQ ID NO: 2371391 - RNA, 19 nt, Homo sapiens
  misc_RNA (1)...(19): siRNA sense strand
cugauuuggaagaggagga

SEQ ID NO: 2371392 - RNA, 19 nt, Homo sapiens
  misc_RNA (1)...(19): siRNA sense strand
gaggaggagaggugggagu

SEQ ID NO: 2371393 - RNA, 19 nt, Homo sapiens
  misc_RNA (1)...(19): siRNA sense strand
uggaagaggaggaggagag

SEQ ID NO: 2371394 - RNA, 19 nt, Homo sapiens
  misc_RNA (1)...(19): siRNA sense strand
cuggaucacaucauggaaa

SEQ ID NO: 2371395 - RNA, 19 nt, Homo sapiens
  misc_RNA (1)...(19): siRNA sense strand
cugauuuggaagaggagga

SEQ ID NO: 2371396 - RNA, 19 nt, Homo sapiens
  misc_RNA (1)...(19): siRNA sense strand
gcauaugaagucaaggcua

SEQ ID NO: 2371397 - RNA, 19 nt, Homo sapiens
  misc_RNA (1)...(19): siRNA sense strand
ucuggauguucguggacaa

SEQ ID NO: 2371398 - RNA, 19 nt, Homo sapiens
  misc_RNA (1)...(19): siRNA sense strand
cgggacaggcagagaucuu

SEQ ID NO: 2371399 - RNA, 19 nt, Homo sapiens
  misc_RNA (1)...(19): siRNA sense strand
ggaaggauguggaggagug

SEQ ID NO: 2371400 - RNA, 19 nt, Homo sapiens
  misc_RNA (1)...(19): siRNA sense strand
gcgaaauauagaagacauc

SEQ ID NO: 2371401 - RNA, 19 nt, Homo sapiens
  misc_RNA (1)...(19): siRNA sense strand
cagaacaagcagagcucga

SEQ ID NO: 2371402 - RNA, 19 nt, Homo sapiens
  misc_RNA (1)...(19): siRNA sense strand
ugaggaaggauguggagga

SEQ ID NO: 2371403 - RNA, 19 nt, Homo sapiens
  misc_RNA (1)...(19): siRNA sense strand
agcgaaauauagaagacau

SEQ ID NO: 2371404 - RNA, 19 nt, Homo sapiens
  misc_RNA (1)...(19): siRNA sense strand
agucaaggcuaaccagcga

SEQ ID NO: 2371405 - RNA, 19 nt, Homo sapiens
  misc_RNA (1)...(19): siRNA sense strand
uguacgacgaugacgggua

SEQ ID NO: 2371406 - RNA, 19 nt, Homo sapiens
  misc_RNA (1)...(19): siRNA sense strand
gcauaugaagucaaggcua

SEQ ID NO: 2371407 - RNA, 19 nt, Homo sapiens
  misc_RNA (1)...(19): siRNA sense strand
ucuggauguucguggacaa

SEQ ID NO: 2371408 - RNA, 19 nt, Homo sapiens
  misc_RNA (1)...(19): siRNA sense strand
cgggacaggcagagaucuu

SEQ ID NO: 2371409 - RNA, 19 nt, Homo sapiens
  misc_RNA (1)...(19): siRNA sense strand
ggaaggauguggaggagug

SEQ ID NO: 2371410 - RNA, 19 nt, Homo sapiens
  misc_RNA (1)...(19): siRNA sense strand
gcgaaauauagaagacauc

SEQ ID NO: 2371411 - RNA, 19 nt, Homo sapiens
  misc_RNA (1)...(19): siRNA sense strand
cagaacaagcagagcucga

SEQ ID NO: 2371412 - RNA, 19 nt, Homo sapiens
  misc_RNA (1)...(19): siRNA sense strand
ugaggaaggauguggagga

SEQ ID NO: 2371413 - RNA, 19 nt, Homo sapiens
  misc_RNA (1)...(19): siRNA sense strand
agcgaaauauagaagacau

SEQ ID NO: 2371414 - RNA, 19 nt, Homo sapiens
  misc_RNA (1)...(19): siRNA sense strand
agucaaggcuaaccagcga

SEQ ID NO: 2371415 - RNA, 19 nt, Homo sapiens
  misc_RNA (1)...(19): siRNA sense strand
uguacgacgaugacgggua

SEQ ID NO: 2371416 - RNA, 19 nt, Homo sapiens
  misc_RNA (1)...(19): siRNA sense strand
gcuaagagaacaagugaau

SEQ ID NO: 2371417 - RNA, 19 nt, Homo sapiens
  misc_RNA (1)...(19): siRNA sense strand
gaguaaaggaagaauggua

SEQ ID NO: 2371418 - RNA, 19 nt, Homo sapiens
  misc_RNA (1)...(19): siRNA sense strand
uaagaaagaugguggauca

SEQ ID NO: 2371419 - RNA, 19 nt, Homo sapiens
  misc_RNA (1)...(19): siRNA sense strand
gaagauacucagaaacaaa

SEQ ID NO: 2371420 - RNA, 19 nt, Homo sapiens
  misc_RNA (1)...(19): siRNA sense strand
uggagaagauacucagaaa

SEQ ID NO: 2371421 - RNA, 19 nt, Homo sapiens
  misc_RNA (1)...(19): siRNA sense strand
gagaagauacucagaaaca

SEQ ID NO: 2371422 - RNA, 19 nt, Homo sapiens
  misc_RNA (1)...(19): siRNA sense strand
acucagaaacaaagccaaa

SEQ ID NO: 2371423 - RNA, 19 nt, Homo sapiens
  misc_RNA (1)...(19): siRNA sense strand
ggaaagugagggaguucaa

SEQ ID NO: 2371424 - RNA, 19 nt, Homo sapiens
  misc_RNA (1)...(19): siRNA sense strand
acguaaacaaguugaagaa

SEQ ID NO: 2371425 - RNA, 19 nt, Homo sapiens
  misc_RNA (1)...(19): siRNA sense strand
gaaauuuggugaagcuauu

SEQ ID NO: 2371426 - RNA, 19 nt, Homo sapiens
  misc_RNA (1)...(19): siRNA sense strand
gauuggaaugucagaauua

SEQ ID NO: 2371427 - RNA, 19 nt, Homo sapiens
  misc_RNA (1)...(19): siRNA sense strand
cuucaagccacgagggaga

SEQ ID NO: 2371428 - RNA, 19 nt, Homo sapiens
  misc_RNA (1)...(19): siRNA sense strand
gauauuacuugcaaaggaa

SEQ ID NO: 2371429 - RNA, 19 nt, Homo sapiens
  misc_RNA (1)...(19): siRNA sense strand
ggagaacaaagcagggauu

SEQ ID NO: 2371430 - RNA, 19 nt, Homo sapiens
  misc_RNA (1)...(19): siRNA sense strand
gaagcaaguggaagagauu

SEQ ID NO: 2371431 - RNA, 19 nt, Homo sapiens
  misc_RNA (1)...(19): siRNA sense strand
uaagagaacaagugaauga

SEQ ID NO: 2371432 - RNA, 19 nt, Homo sapiens
  misc_RNA (1)...(19): siRNA sense strand
ggaaguaccagcagaagau

SEQ ID NO: 2371433 - RNA, 19 nt, Homo sapiens
  misc_RNA (1)...(19): siRNA sense strand
ggaagcaaguggaagagau

SEQ ID NO: 2371434 - RNA, 19 nt, Homo sapiens
  misc_RNA (1)...(19): siRNA sense strand
gaaaucagcuccaugagaa

SEQ ID NO: 2371435 - RNA, 19 nt, Homo sapiens
  misc_RNA (1)...(19): siRNA sense strand
ggaaauaugcucaagccau

SEQ ID NO: 2371436 - RNA, 19 nt, Homo sapiens
  misc_RNA (1)...(19): siRNA sense strand
ggauauuacuugcaaagga

SEQ ID NO: 2371437 - RNA, 19 nt, Homo sapiens
  misc_RNA (1)...(19): siRNA sense strand
gauuaagaaacaugagcuu

SEQ ID NO: 2371438 - RNA, 19 nt, Homo sapiens
  misc_RNA (1)...(19): siRNA sense strand
guggaaggacugccagaaa

SEQ ID NO: 2371439 - RNA, 19 nt, Homo sapiens
  misc_RNA (1)...(19): siRNA sense strand
cuaagagaccaaaggccaa

SEQ ID NO: 2371440 - RNA, 19 nt, Homo sapiens
  misc_RNA (1)...(19): siRNA sense strand
gugaagauuuacagcuuga

SEQ ID NO: 2371441 - RNA, 19 nt, Homo sapiens
  misc_RNA (1)...(19): siRNA sense strand
ugucagaauuaccaagcua

SEQ ID NO: 2371442 - RNA, 19 nt, Homo sapiens
  misc_RNA (1)...(19): siRNA sense strand
ggaaauuuggugaagcuau

SEQ ID NO: 2371443 - RNA, 19 nt, Homo sapiens
  misc_RNA (1)...(19): siRNA sense strand
ccagaugaugauaaugaaa

SEQ ID NO: 2371444 - RNA, 19 nt, Homo sapiens
  misc_RNA (1)...(19): siRNA sense strand
accaaaggccaaugagcua

SEQ ID NO: 2371445 - RNA, 19 nt, Homo sapiens
  misc_RNA (1)...(19): siRNA sense strand
gauacaagaaucagcugaa

SEQ ID NO: 2371446 - RNA, 19 nt, Homo sapiens
  misc_RNA (1)...(19): siRNA sense strand
aguaaaggaagaaugguau

SEQ ID NO: 2371447 - RNA, 19 nt, Homo sapiens
  misc_RNA (1)...(19): siRNA sense strand
gaaauuugcucaagcucuu

SEQ ID NO: 2371448 - RNA, 19 nt, Homo sapiens
  misc_RNA (1)...(19): siRNA sense strand
ugggauggcuaguaaaaua

SEQ ID NO: 2371449 - RNA, 19 nt, Homo sapiens
  misc_RNA (1)...(19): siRNA sense strand
uguuaauacuacugcauca

SEQ ID NO: 2371450 - RNA, 19 nt, Homo sapiens
  misc_RNA (1)...(19): siRNA sense strand
uuccaggacuugugauuaa

SEQ ID NO: 2371451 - RNA, 19 nt, Homo sapiens
  misc_RNA (1)...(19): siRNA sense strand
ugucaauaccagaaaggau

SEQ ID NO: 2371452 - RNA, 19 nt, Homo sapiens
  misc_RNA (1)...(19): siRNA sense strand
guguugaagaagaagaaaa

SEQ ID NO: 2371453 - RNA, 19 nt, Homo sapiens
  misc_RNA (1)...(19): siRNA sense strand
gcucucagaucaagcaaga

SEQ ID NO: 2371454 - RNA, 19 nt, Homo sapiens
  misc_RNA (1)...(19): siRNA sense strand
gggaguaauucaaagguuc

SEQ ID NO: 2371455 - RNA, 19 nt, Homo sapiens
  misc_RNA (1)...(19): siRNA sense strand
gccacgagggagagaguuu

SEQ ID NO: 2371456 - RNA, 19 nt, Homo sapiens
  misc_RNA (1)...(19): siRNA sense strand
gcugggaagcggaaaguga

SEQ ID NO: 2371457 - RNA, 19 nt, Homo sapiens
  misc_RNA (1)...(19): siRNA sense strand
augaaagacucucgaaagu

SEQ ID NO: 2371458 - RNA, 19 nt, Homo sapiens
  misc_RNA (1)...(19): siRNA sense strand
acgugaagauuuacagcuu

SEQ ID NO: 2371459 - RNA, 19 nt, Homo sapiens
  misc_RNA (1)...(19): siRNA sense strand
gccagaaucacuaaauuaa

SEQ ID NO: 2371460 - RNA, 19 nt, Homo sapiens
  misc_RNA (1)...(19): siRNA sense strand
uguuugagacggcgauuaa

SEQ ID NO: 2371461 - RNA, 19 nt, Homo sapiens
  misc_RNA (1)...(19): siRNA sense strand
ggugacaauuccagaugau

SEQ ID NO: 2371462 - RNA, 19 nt, Homo sapiens
  misc_RNA (1)...(19): siRNA sense strand
aaucaaacccggaguucuu

SEQ ID NO: 2371463 - RNA, 19 nt, Homo sapiens
  misc_RNA (1)...(19): siRNA sense strand
ccacgaaguccugggagua

SEQ ID NO: 2371464 - RNA, 19 nt, Homo sapiens
  misc_RNA (1)...(19): siRNA sense strand
ugacaauuccagaugauga

SEQ ID NO: 2371465 - RNA, 19 nt, Homo sapiens
  misc_RNA (1)...(19): siRNA sense strand
cgucggaacugaaagagga

SEQ ID NO: 2371466 - RNA, 19 nt, Homo sapiens
  misc_RNA (1)...(19): siRNA sense strand
cuguagaaauugaaacacu

SEQ ID NO: 2371467 - RNA, 19 nt, Homo sapiens
  misc_RNA (1)...(19): siRNA sense strand
ccacagaagaaauaaaaga

SEQ ID NO: 2371468 - RNA, 19 nt, Homo sapiens
  misc_RNA (1)...(19): siRNA sense strand
caagugggcaaucgaauua

SEQ ID NO: 2371469 - RNA, 19 nt, Homo sapiens
  misc_RNA (1)...(19): siRNA sense strand
cagccacagaagaaauaaa

SEQ ID NO: 2371470 - RNA, 19 nt, Homo sapiens
  misc_RNA (1)...(19): siRNA sense strand
gauggaagcucucagauca

SEQ ID NO: 2371471 - RNA, 19 nt, Homo sapiens
  misc_RNA (1)...(19): siRNA sense strand
ccaaagguccggugacgau

SEQ ID NO: 2371472 - RNA, 19 nt, Homo sapiens
  misc_RNA (1)...(19): siRNA sense strand
ggaagaaugguaugccaga

SEQ ID NO: 2371473 - RNA, 19 nt, Homo sapiens
  misc_RNA (1)...(19): siRNA sense strand
ugaaaggaaauaugcucaa

SEQ ID NO: 2371474 - RNA, 19 nt, Homo sapiens
  misc_RNA (1)...(19): siRNA sense strand
ugccagaaucacuaaauua

SEQ ID NO: 2371475 - RNA, 19 nt, Homo sapiens
  misc_RNA (1)...(19): siRNA sense strand
ccgaagucccucaugguau

SEQ ID NO: 2371476 - RNA, 19 nt, Homo sapiens
  misc_RNA (1)...(19): siRNA sense strand
aaaucauucaagugggcaa

SEQ ID NO: 2371477 - RNA, 19 nt, Homo sapiens
  misc_RNA (1)...(19): siRNA sense strand
caacaauccucaaaccuca

SEQ ID NO: 2371478 - RNA, 19 nt, Homo sapiens
  misc_RNA (1)...(19): siRNA sense strand
uaaugaaagacucucgaaa

SEQ ID NO: 2371479 - RNA, 19 nt, Homo sapiens
  misc_RNA (1)...(19): siRNA sense strand
cugccgaguuuaucaaauu

SEQ ID NO: 2371480 - RNA, 19 nt, Homo sapiens
  misc_RNA (1)...(19): siRNA sense strand
gcacagaaauggaaguacc

SEQ ID NO: 2371481 - RNA, 19 nt, Homo sapiens
  misc_RNA (1)...(19): siRNA sense strand
uagacagcuaagagaacaa

SEQ ID NO: 2371482 - RNA, 19 nt, Homo sapiens
  misc_RNA (1)...(19): siRNA sense strand
uggaaggcccuaauaacaa

SEQ ID NO: 2371483 - RNA, 19 nt, Homo sapiens
  misc_RNA (1)...(19): siRNA sense strand
ccaaaaucacggaccuaaa

SEQ ID NO: 2371484 - RNA, 19 nt, Homo sapiens
  misc_RNA (1)...(19): siRNA sense strand
gagaaggaucuuagacucu

SEQ ID NO: 2371485 - RNA, 19 nt, Homo sapiens
  misc_RNA (1)...(19): siRNA sense strand
aagaaugguaugccagaau

SEQ ID NO: 2371486 - RNA, 19 nt, Homo sapiens
  misc_RNA (1)...(19): siRNA sense strand
uggaaggacugccagaaaa

SEQ ID NO: 2371487 - RNA, 19 nt, Homo sapiens
  misc_RNA (1)...(19): siRNA sense strand
guggaaggcccuaauaaca

SEQ ID NO: 2371488 - RNA, 19 nt, Homo sapiens
  misc_RNA (1)...(19): siRNA sense strand
augggaaagcuuuaggcaa

SEQ ID NO: 2371489 - RNA, 19 nt, Homo sapiens
  misc_RNA (1)...(19): siRNA sense strand
caaugagaaauguggggaa

SEQ ID NO: 2371490 - RNA, 19 nt, Homo sapiens
  misc_RNA (1)...(19): siRNA sense strand
uggaaguaccagcagaaga

SEQ ID NO: 2371491 - RNA, 19 nt, Homo sapiens
  misc_RNA (1)...(19): siRNA sense strand
ucuaagagaccaaaggcca

SEQ ID NO: 2371492 - RNA, 19 nt, Homo sapiens
  misc_RNA (1)...(19): siRNA sense strand
agaggauauuacuugcaaa

SEQ ID NO: 2371493 - RNA, 19 nt, Homo sapiens
  misc_RNA (1)...(19): siRNA sense strand
guguggugguugauggcau

SEQ ID NO: 2371494 - RNA, 19 nt, Homo sapiens
  misc_RNA (1)...(19): siRNA sense strand
uguguaaagaacuggccaa

SEQ ID NO: 2371495 - RNA, 19 nt, Homo sapiens
  misc_RNA (1)...(19): siRNA sense strand
cgaaugaucuguacgugga

SEQ ID NO: 2371496 - RNA, 19 nt, Homo sapiens
  misc_RNA (1)...(19): siRNA sense strand
gcuaagagaacaagugaau

SEQ ID NO: 2371497 - RNA, 19 nt, Homo sapiens
  misc_RNA (1)...(19): siRNA sense strand
gaguaaaggaagaauggua

SEQ ID NO: 2371498 - RNA, 19 nt, Homo sapiens
  misc_RNA (1)...(19): siRNA sense strand
uaagaaagaugguggauca

SEQ ID NO: 2371499 - RNA, 19 nt, Homo sapiens
  misc_RNA (1)...(19): siRNA sense strand
gaagauacucagaaacaaa

SEQ ID NO: 2371500 - RNA, 19 nt, Homo sapiens
  misc_RNA (1)...(19): siRNA sense strand
uggagaagauacucagaaa

SEQ ID NO: 2371501 - RNA, 19 nt, Homo sapiens
  misc_RNA (1)...(19): siRNA sense strand
gagaagauacucagaaaca

SEQ ID NO: 2371502 - RNA, 19 nt, Homo sapiens
  misc_RNA (1)...(19): siRNA sense strand
acucagaaacaaagccaaa

SEQ ID NO: 2371503 - RNA, 19 nt, Homo sapiens
  misc_RNA (1)...(19): siRNA sense strand
ggaaagugagggaguucaa

SEQ ID NO: 2371504 - RNA, 19 nt, Homo sapiens
  misc_RNA (1)...(19): siRNA sense strand
acguaaacaaguugaagaa

SEQ ID NO: 2371505 - RNA, 19 nt, Homo sapiens
  misc_RNA (1)...(19): siRNA sense strand
gaaauuuggugaagcuauu

SEQ ID NO: 2371506 - RNA, 19 nt, Homo sapiens
  misc_RNA (1)...(19): siRNA sense strand
gauuggaaugucagaauua

SEQ ID NO: 2371507 - RNA, 19 nt, Homo sapiens
  misc_RNA (1)...(19): siRNA sense strand
cuucaagccacgagggaga

SEQ ID NO: 2371508 - RNA, 19 nt, Homo sapiens
  misc_RNA (1)...(19): siRNA sense strand
gauauuacuugcaaaggaa

SEQ ID NO: 2371509 - RNA, 19 nt, Homo sapiens
  misc_RNA (1)...(19): siRNA sense strand
ggagaacaaagcagggauu

SEQ ID NO: 2371510 - RNA, 19 nt, Homo sapiens
  misc_RNA (1)...(19): siRNA sense strand
gaagcaaguggaagagauu

SEQ ID NO: 2371511 - RNA, 19 nt, Homo sapiens
  misc_RNA (1)...(19): siRNA sense strand
uaagagaacaagugaauga

SEQ ID NO: 2371512 - RNA, 19 nt, Homo sapiens
  misc_RNA (1)...(19): siRNA sense strand
ggaaguaccagcagaagau

SEQ ID NO: 2371513 - RNA, 19 nt, Homo sapiens
  misc_RNA (1)...(19): siRNA sense strand
ggaagcaaguggaagagau

SEQ ID NO: 2371514 - RNA, 19 nt, Homo sapiens
  misc_RNA (1)...(19): siRNA sense strand
gaaaucagcuccaugagaa

SEQ ID NO: 2371515 - RNA, 19 nt, Homo sapiens
  misc_RNA (1)...(19): siRNA sense strand
ggaaauaugcucaagccau

SEQ ID NO: 2371516 - RNA, 19 nt, Homo sapiens
  misc_RNA (1)...(19): siRNA sense strand
ggauauuacuugcaaagga

SEQ ID NO: 2371517 - RNA, 19 nt, Homo sapiens
  misc_RNA (1)...(19): siRNA sense strand
gauuaagaaacaugagcuu

SEQ ID NO: 2371518 - RNA, 19 nt, Homo sapiens
  misc_RNA (1)...(19): siRNA sense strand
guggaaggacugccagaaa

SEQ ID NO: 2371519 - RNA, 19 nt, Homo sapiens
  misc_RNA (1)...(19): siRNA sense strand
cuaagagaccaaaggccaa

SEQ ID NO: 2371520 - RNA, 19 nt, Homo sapiens
  misc_RNA (1)...(19): siRNA sense strand
gugaagauuuacagcuuga

SEQ ID NO: 2371521 - RNA, 19 nt, Homo sapiens
  misc_RNA (1)...(19): siRNA sense strand
ugucagaauuaccaagcua

SEQ ID NO: 2371522 - RNA, 19 nt, Homo sapiens
  misc_RNA (1)...(19): siRNA sense strand
ggaaauuuggugaagcuau

SEQ ID NO: 2371523 - RNA, 19 nt, Homo sapiens
  misc_RNA (1)...(19): siRNA sense strand
ccagaugaugauaaugaaa

SEQ ID NO: 2371524 - RNA, 19 nt, Homo sapiens
  misc_RNA (1)...(19): siRNA sense strand
accaaaggccaaugagcua

SEQ ID NO: 2371525 - RNA, 19 nt, Homo sapiens
  misc_RNA (1)...(19): siRNA sense strand
gauacaagaaucagcugaa

SEQ ID NO: 2371526 - RNA, 19 nt, Homo sapiens
  misc_RNA (1)...(19): siRNA sense strand
aguaaaggaagaaugguau

SEQ ID NO: 2371527 - RNA, 19 nt, Homo sapiens
  misc_RNA (1)...(19): siRNA sense strand
gaaauuugcucaagcucuu

SEQ ID NO: 2371528 - RNA, 19 nt, Homo sapiens
  misc_RNA (1)...(19): siRNA sense strand
ugggauggcuaguaaaaua

SEQ ID NO: 2371529 - RNA, 19 nt, Homo sapiens
  misc_RNA (1)...(19): siRNA sense strand
uguuaauacuacugcauca

SEQ ID NO: 2371530 - RNA, 19 nt, Homo sapiens
  misc_RNA (1)...(19): siRNA sense strand
uuccaggacuugugauuaa

SEQ ID NO: 2371531 - RNA, 19 nt, Homo sapiens
  misc_RNA (1)...(19): siRNA sense strand
ugucaauaccagaaaggau

SEQ ID NO: 2371532 - RNA, 19 nt, Homo sapiens
  misc_RNA (1)...(19): siRNA sense strand
guguugaagaagaagaaaa

SEQ ID NO: 2371533 - RNA, 19 nt, Homo sapiens
  misc_RNA (1)...(19): siRNA sense strand
gcucucagaucaagcaaga

SEQ ID NO: 2371534 - RNA, 19 nt, Homo sapiens
  misc_RNA (1)...(19): siRNA sense strand
gggaguaauucaaagguuc

SEQ ID NO: 2371535 - RNA, 19 nt, Homo sapiens
  misc_RNA (1)...(19): siRNA sense strand
gccacgagggagagaguuu

SEQ ID NO: 2371536 - RNA, 19 nt, Homo sapiens
  misc_RNA (1)...(19): siRNA sense strand
gcugggaagcggaaaguga

SEQ ID NO: 2371537 - RNA, 19 nt, Homo sapiens
  misc_RNA (1)...(19): siRNA sense strand
augaaagacucucgaaagu

SEQ ID NO: 2371538 - RNA, 19 nt, Homo sapiens
  misc_RNA (1)...(19): siRNA sense strand
acgugaagauuuacagcuu

SEQ ID NO: 2371539 - RNA, 19 nt, Homo sapiens
  misc_RNA (1)...(19): siRNA sense strand
gccagaaucacuaaauuaa

SEQ ID NO: 2371540 - RNA, 19 nt, Homo sapiens
  misc_RNA (1)...(19): siRNA sense strand
uguuugagacggcgauuaa

SEQ ID NO: 2371541 - RNA, 19 nt, Homo sapiens
  misc_RNA (1)...(19): siRNA sense strand
ggugacaauuccagaugau

SEQ ID NO: 2371542 - RNA, 19 nt, Homo sapiens
  misc_RNA (1)...(19): siRNA sense strand
aaucaaacccggaguucuu

SEQ ID NO: 2371543 - RNA, 19 nt, Homo sapiens
  misc_RNA (1)...(19): siRNA sense strand
ccacgaaguccugggagua

SEQ ID NO: 2371544 - RNA, 19 nt, Homo sapiens
  misc_RNA (1)...(19): siRNA sense strand
ugacaauuccagaugauga

SEQ ID NO: 2371545 - RNA, 19 nt, Homo sapiens
  misc_RNA (1)...(19): siRNA sense strand
cgucggaacugaaagagga

SEQ ID NO: 2371546 - RNA, 19 nt, Homo sapiens
  misc_RNA (1)...(19): siRNA sense strand
cuguagaaauugaaacacu

SEQ ID NO: 2371547 - RNA, 19 nt, Homo sapiens
  misc_RNA (1)...(19): siRNA sense strand
ccacagaagaaauaaaaga

SEQ ID NO: 2371548 - RNA, 19 nt, Homo sapiens
  misc_RNA (1)...(19): siRNA sense strand
caagugggcaaucgaauua

SEQ ID NO: 2371549 - RNA, 19 nt, Homo sapiens
  misc_RNA (1)...(19): siRNA sense strand
cagccacagaagaaauaaa

SEQ ID NO: 2371550 - RNA, 19 nt, Homo sapiens
  misc_RNA (1)...(19): siRNA sense strand
gauggaagcucucagauca

SEQ ID NO: 2371551 - RNA, 19 nt, Homo sapiens
  misc_RNA (1)...(19): siRNA sense strand
ccaaagguccggugacgau

SEQ ID NO: 2371552 - RNA, 19 nt, Homo sapiens
  misc_RNA (1)...(19): siRNA sense strand
ggaagaaugguaugccaga

SEQ ID NO: 2371553 - RNA, 19 nt, Homo sapiens
  misc_RNA (1)...(19): siRNA sense strand
ugaaaggaaauaugcucaa

SEQ ID NO: 2371554 - RNA, 19 nt, Homo sapiens
  misc_RNA (1)...(19): siRNA sense strand
ugccagaaucacuaaauua

SEQ ID NO: 2371555 - RNA, 19 nt, Homo sapiens
  misc_RNA (1)...(19): siRNA sense strand
ccgaagucccucaugguau

SEQ ID NO: 2371556 - RNA, 19 nt, Homo sapiens
  misc_RNA (1)...(19): siRNA sense strand
aaaucauucaagugggcaa

SEQ ID NO: 2371557 - RNA, 19 nt, Homo sapiens
  misc_RNA (1)...(19): siRNA sense strand
caacaauccucaaaccuca

SEQ ID NO: 2371558 - RNA, 19 nt, Homo sapiens
  misc_RNA (1)...(19): siRNA sense strand
uaaugaaagacucucgaaa

SEQ ID NO: 2371559 - RNA, 19 nt, Homo sapiens
  misc_RNA (1)...(19): siRNA sense strand
cugccgaguuuaucaaauu

SEQ ID NO: 2371560 - RNA, 19 nt, Homo sapiens
  misc_RNA (1)...(19): siRNA sense strand
gcacagaaauggaaguacc

SEQ ID NO: 2371561 - RNA, 19 nt, Homo sapiens
  misc_RNA (1)...(19): siRNA sense strand
uagacagcuaagagaacaa

SEQ ID NO: 2371562 - RNA, 19 nt, Homo sapiens
  misc_RNA (1)...(19): siRNA sense strand
uggaaggcccuaauaacaa

SEQ ID NO: 2371563 - RNA, 19 nt, Homo sapiens
  misc_RNA (1)...(19): siRNA sense strand
ccaaaaucacggaccuaaa

SEQ ID NO: 2371564 - RNA, 19 nt, Homo sapiens
  misc_RNA (1)...(19): siRNA sense strand
gagaaggaucuuagacucu

SEQ ID NO: 2371565 - RNA, 19 nt, Homo sapiens
  misc_RNA (1)...(19): siRNA sense strand
aagaaugguaugccagaau

SEQ ID NO: 2371566 - RNA, 19 nt, Homo sapiens
  misc_RNA (1)...(19): siRNA sense strand
uggaaggacugccagaaaa

SEQ ID NO: 2371567 - RNA, 19 nt, Homo sapiens
  misc_RNA (1)...(19): siRNA sense strand
guggaaggcccuaauaaca

SEQ ID NO: 2371568 - RNA, 19 nt, Homo sapiens
  misc_RNA (1)...(19): siRNA sense strand
augggaaagcuuuaggcaa

SEQ ID NO: 2371569 - RNA, 19 nt, Homo sapiens
  misc_RNA (1)...(19): siRNA sense strand
caaugagaaauguggggaa

SEQ ID NO: 2371570 - RNA, 19 nt, Homo sapiens
  misc_RNA (1)...(19): siRNA sense strand
uggaaguaccagcagaaga

SEQ ID NO: 2371571 - RNA, 19 nt, Homo sapiens
  misc_RNA (1)...(19): siRNA sense strand
ucuaagagaccaaaggcca

SEQ ID NO: 2371572 - RNA, 19 nt, Homo sapiens
  misc_RNA (1)...(19): siRNA sense strand
agaggauauuacuugcaaa

SEQ ID NO: 2371573 - RNA, 19 nt, Homo sapiens
  misc_RNA (1)...(19): siRNA sense strand
guguggugguugauggcau

SEQ ID NO: 2371574 - RNA, 19 nt, Homo sapiens
  misc_RNA (1)...(19): siRNA sense strand
uguguaaagaacuggccaa

SEQ ID NO: 2371575 - RNA, 19 nt, Homo sapiens
  misc_RNA (1)...(19): siRNA sense strand
cgaaugaucuguacgugga

SEQ ID NO: 2371576 - RNA, 19 nt, Homo sapiens
  misc_RNA (1)...(19): siRNA sense strand
gcuaagagaacaagugaau

SEQ ID NO: 2371577 - RNA, 19 nt, Homo sapiens
  misc_RNA (1)...(19): siRNA sense strand
gaguaaaggaagaauggua

SEQ ID NO: 2371578 - RNA, 19 nt, Homo sapiens
  misc_RNA (1)...(19): siRNA sense strand
uaagaaagaugguggauca

SEQ ID NO: 2371579 - RNA, 19 nt, Homo sapiens
  misc_RNA (1)...(19): siRNA sense strand
gaagauacucagaaacaaa

SEQ ID NO: 2371580 - RNA, 19 nt, Homo sapiens
  misc_RNA (1)...(19): siRNA sense strand
uggagaagauacucagaaa

SEQ ID NO: 2371581 - RNA, 19 nt, Homo sapiens
  misc_RNA (1)...(19): siRNA sense strand
gagaagauacucagaaaca

SEQ ID NO: 2371582 - RNA, 19 nt, Homo sapiens
  misc_RNA (1)...(19): siRNA sense strand
acucagaaacaaagccaaa

SEQ ID NO: 2371583 - RNA, 19 nt, Homo sapiens
  misc_RNA (1)...(19): siRNA sense strand
ggaaagugagggaguucaa

SEQ ID NO: 2371584 - RNA, 19 nt, Homo sapiens
  misc_RNA (1)...(19): siRNA sense strand
acguaaacaaguugaagaa

SEQ ID NO: 2371585 - RNA, 19 nt, Homo sapiens
  misc_RNA (1)...(19): siRNA sense strand
gaaauuuggugaagcuauu

SEQ ID NO: 2371586 - RNA, 19 nt, Homo sapiens
  misc_RNA (1)...(19): siRNA sense strand
gauuggaaugucagaauua

SEQ ID NO: 2371587 - RNA, 19 nt, Homo sapiens
  misc_RNA (1)...(19): siRNA sense strand
cuucaagccacgagggaga

SEQ ID NO: 2371588 - RNA, 19 nt, Homo sapiens
  misc_RNA (1)...(19): siRNA sense strand
gauauuacuugcaaaggaa

SEQ ID NO: 2371589 - RNA, 19 nt, Homo sapiens
  misc_RNA (1)...(19): siRNA sense strand
ggagaacaaagcagggauu

SEQ ID NO: 2371590 - RNA, 19 nt, Homo sapiens
  misc_RNA (1)...(19): siRNA sense strand
gaagcaaguggaagagauu

SEQ ID NO: 2371591 - RNA, 19 nt, Homo sapiens
  misc_RNA (1)...(19): siRNA sense strand
uaagagaacaagugaauga

SEQ ID NO: 2371592 - RNA, 19 nt, Homo sapiens
  misc_RNA (1)...(19): siRNA sense strand
ggaaguaccagcagaagau

SEQ ID NO: 2371593 - RNA, 19 nt, Homo sapiens
  misc_RNA (1)...(19): siRNA sense strand
ggaagcaaguggaagagau

SEQ ID NO: 2371594 - RNA, 19 nt, Homo sapiens
  misc_RNA (1)...(19): siRNA sense strand
gaaaucagcuccaugagaa

SEQ ID NO: 2371595 - RNA, 19 nt, Homo sapiens
  misc_RNA (1)...(19): siRNA sense strand
ggaaauaugcucaagccau

SEQ ID NO: 2371596 - RNA, 19 nt, Homo sapiens
  misc_RNA (1)...(19): siRNA sense strand
ggauauuacuugcaaagga

SEQ ID NO: 2371597 - RNA, 19 nt, Homo sapiens
  misc_RNA (1)...(19): siRNA sense strand
gauuaagaaacaugagcuu

SEQ ID NO: 2371598 - RNA, 19 nt, Homo sapiens
  misc_RNA (1)...(19): siRNA sense strand
guggaaggacugccagaaa

SEQ ID NO: 2371599 - RNA, 19 nt, Homo sapiens
  misc_RNA (1)...(19): siRNA sense strand
cuaagagaccaaaggccaa

SEQ ID NO: 2371600 - RNA, 19 nt, Homo sapiens
  misc_RNA (1)...(19): siRNA sense strand
gugaagauuuacagcuuga

SEQ ID NO: 2371601 - RNA, 19 nt, Homo sapiens
  misc_RNA (1)...(19): siRNA sense strand
ugucagaauuaccaagcua

SEQ ID NO: 2371602 - RNA, 19 nt, Homo sapiens
  misc_RNA (1)...(19): siRNA sense strand
ggaaauuuggugaagcuau

SEQ ID NO: 2371603 - RNA, 19 nt, Homo sapiens
  misc_RNA (1)...(19): siRNA sense strand
ccagaugaugauaaugaaa

SEQ ID NO: 2371604 - RNA, 19 nt, Homo sapiens
  misc_RNA (1)...(19): siRNA sense strand
accaaaggccaaugagcua

SEQ ID NO: 2371605 - RNA, 19 nt, Homo sapiens
  misc_RNA (1)...(19): siRNA sense strand
gauacaagaaucagcugaa

SEQ ID NO: 2371606 - RNA, 19 nt, Homo sapiens
  misc_RNA (1)...(19): siRNA sense strand
aguaaaggaagaaugguau

SEQ ID NO: 2371607 - RNA, 19 nt, Homo sapiens
  misc_RNA (1)...(19): siRNA sense strand
gaaauuugcucaagcucuu

SEQ ID NO: 2371608 - RNA, 19 nt, Homo sapiens
  misc_RNA (1)...(19): siRNA sense strand
ugggauggcuaguaaaaua

SEQ ID NO: 2371609 - RNA, 19 nt, Homo sapiens
  misc_RNA (1)...(19): siRNA sense strand
uguuaauacuacugcauca

SEQ ID NO: 2371610 - RNA, 19 nt, Homo sapiens
  misc_RNA (1)...(19): siRNA sense strand
uuccaggacuugugauuaa

SEQ ID NO: 2371611 - RNA, 19 nt, Homo sapiens
  misc_RNA (1)...(19): siRNA sense strand
ugucaauaccagaaaggau

SEQ ID NO: 2371612 - RNA, 19 nt, Homo sapiens
  misc_RNA (1)...(19): siRNA sense strand
guguugaagaagaagaaaa

SEQ ID NO: 2371613 - RNA, 19 nt, Homo sapiens
  misc_RNA (1)...(19): siRNA sense strand
gcucucagaucaagcaaga

SEQ ID NO: 2371614 - RNA, 19 nt, Homo sapiens
  misc_RNA (1)...(19): siRNA sense strand
gggaguaauucaaagguuc

SEQ ID NO: 2371615 - RNA, 19 nt, Homo sapiens
  misc_RNA (1)...(19): siRNA sense strand
gccacgagggagagaguuu

SEQ ID NO: 2371616 - RNA, 19 nt, Homo sapiens
  misc_RNA (1)...(19): siRNA sense strand
gcugggaagcggaaaguga

SEQ ID NO: 2371617 - RNA, 19 nt, Homo sapiens
  misc_RNA (1)...(19): siRNA sense strand
augaaagacucucgaaagu

SEQ ID NO: 2371618 - RNA, 19 nt, Homo sapiens
  misc_RNA (1)...(19): siRNA sense strand
acgugaagauuuacagcuu

SEQ ID NO: 2371619 - RNA, 19 nt, Homo sapiens
  misc_RNA (1)...(19): siRNA sense strand
gccagaaucacuaaauuaa

SEQ ID NO: 2371620 - RNA, 19 nt, Homo sapiens
  misc_RNA (1)...(19): siRNA sense strand
uguuugagacggcgauuaa

SEQ ID NO: 2371621 - RNA, 19 nt, Homo sapiens
  misc_RNA (1)...(19): siRNA sense strand
ggugacaauuccagaugau

SEQ ID NO: 2371622 - RNA, 19 nt, Homo sapiens
  misc_RNA (1)...(19): siRNA sense strand
aaucaaacccggaguucuu

SEQ ID NO: 2371623 - RNA, 19 nt, Homo sapiens
  misc_RNA (1)...(19): siRNA sense strand
ccacgaaguccugggagua

SEQ ID NO: 2371624 - RNA, 19 nt, Homo sapiens
  misc_RNA (1)...(19): siRNA sense strand
ugacaauuccagaugauga

SEQ ID NO: 2371625 - RNA, 19 nt, Homo sapiens
  misc_RNA (1)...(19): siRNA sense strand
cgucggaacugaaagagga

SEQ ID NO: 2371626 - RNA, 19 nt, Homo sapiens
  misc_RNA (1)...(19): siRNA sense strand
cuguagaaauugaaacacu

SEQ ID NO: 2371627 - RNA, 19 nt, Homo sapiens
  misc_RNA (1)...(19): siRNA sense strand
ccacagaagaaauaaaaga

SEQ ID NO: 2371628 - RNA, 19 nt, Homo sapiens
  misc_RNA (1)...(19): siRNA sense strand
caagugggcaaucgaauua

SEQ ID NO: 2371629 - RNA, 19 nt, Homo sapiens
  misc_RNA (1)...(19): siRNA sense strand
cagccacagaagaaauaaa

SEQ ID NO: 2371630 - RNA, 19 nt, Homo sapiens
  misc_RNA (1)...(19): siRNA sense strand
gauggaagcucucagauca

SEQ ID NO: 2371631 - RNA, 19 nt, Homo sapiens
  misc_RNA (1)...(19): siRNA sense strand
ccaaagguccggugacgau

SEQ ID NO: 2371632 - RNA, 19 nt, Homo sapiens
  misc_RNA (1)...(19): siRNA sense strand
ggaagaaugguaugccaga

SEQ ID NO: 2371633 - RNA, 19 nt, Homo sapiens
  misc_RNA (1)...(19): siRNA sense strand
ugaaaggaaauaugcucaa

SEQ ID NO: 2371634 - RNA, 19 nt, Homo sapiens
  misc_RNA (1)...(19): siRNA sense strand
ugccagaaucacuaaauua

SEQ ID NO: 2371635 - RNA, 19 nt, Homo sapiens
  misc_RNA (1)...(19): siRNA sense strand
ccgaagucccucaugguau

SEQ ID NO: 2371636 - RNA, 19 nt, Homo sapiens
  misc_RNA (1)...(19): siRNA sense strand
aaaucauucaagugggcaa

SEQ ID NO: 2371637 - RNA, 19 nt, Homo sapiens
  misc_RNA (1)...(19): siRNA sense strand
caacaauccucaaaccuca

SEQ ID NO: 2371638 - RNA, 19 nt, Homo sapiens
  misc_RNA (1)...(19): siRNA sense strand
uaaugaaagacucucgaaa

SEQ ID NO: 2371639 - RNA, 19 nt, Homo sapiens
  misc_RNA (1)...(19): siRNA sense strand
cugccgaguuuaucaaauu

SEQ ID NO: 2371640 - RNA, 19 nt, Homo sapiens
  misc_RNA (1)...(19): siRNA sense strand
gcacagaaauggaaguacc

SEQ ID NO: 2371641 - RNA, 19 nt, Homo sapiens
  misc_RNA (1)...(19): siRNA sense strand
uagacagcuaagagaacaa

SEQ ID NO: 2371642 - RNA, 19 nt, Homo sapiens
  misc_RNA (1)...(19): siRNA sense strand
uggaaggcccuaauaacaa

SEQ ID NO: 2371643 - RNA, 19 nt, Homo sapiens
  misc_RNA (1)...(19): siRNA sense strand
ccaaaaucacggaccuaaa

SEQ ID NO: 2371644 - RNA, 19 nt, Homo sapiens
  misc_RNA (1)...(19): siRNA sense strand
gagaaggaucuuagacucu

SEQ ID NO: 2371645 - RNA, 19 nt, Homo sapiens
  misc_RNA (1)...(19): siRNA sense strand
aagaaugguaugccagaau

SEQ ID NO: 2371646 - RNA, 19 nt, Homo sapiens
  misc_RNA (1)...(19): siRNA sense strand
uggaaggacugccagaaaa

SEQ ID NO: 2371647 - RNA, 19 nt, Homo sapiens
  misc_RNA (1)...(19): siRNA sense strand
guggaaggcccuaauaaca

SEQ ID NO: 2371648 - RNA, 19 nt, Homo sapiens
  misc_RNA (1)...(19): siRNA sense strand
augggaaagcuuuaggcaa

SEQ ID NO: 2371649 - RNA, 19 nt, Homo sapiens
  misc_RNA (1)...(19): siRNA sense strand
caaugagaaauguggggaa

SEQ ID NO: 2371650 - RNA, 19 nt, Homo sapiens
  misc_RNA (1)...(19): siRNA sense strand
uggaaguaccagcagaaga

SEQ ID NO: 2371651 - RNA, 19 nt, Homo sapiens
  misc_RNA (1)...(19): siRNA sense strand
ucuaagagaccaaaggcca

SEQ ID NO: 2371652 - RNA, 19 nt, Homo sapiens
  misc_RNA (1)...(19): siRNA sense strand
agaggauauuacuugcaaa

SEQ ID NO: 2371653 - RNA, 19 nt, Homo sapiens
  misc_RNA (1)...(19): siRNA sense strand
guguggugguugauggcau

SEQ ID NO: 2371654 - RNA, 19 nt, Homo sapiens
  misc_RNA (1)...(19): siRNA sense strand
uguguaaagaacuggccaa

SEQ ID NO: 2371655 - RNA, 19 nt, Homo sapiens
  misc_RNA (1)...(19): siRNA sense strand
cgaaugaucuguacgugga

SEQ ID NO: 2371656 - RNA, 19 nt, Homo sapiens
  misc_RNA (1)...(19): siRNA sense strand
gcuaagagaacaagugaau

SEQ ID NO: 2371657 - RNA, 19 nt, Homo sapiens
  misc_RNA (1)...(19): siRNA sense strand
gaguaaaggaagaauggua

SEQ ID NO: 2371658 - RNA, 19 nt, Homo sapiens
  misc_RNA (1)...(19): siRNA sense strand
uaagaaagaugguggauca

SEQ ID NO: 2371659 - RNA, 19 nt, Homo sapiens
  misc_RNA (1)...(19): siRNA sense strand
gaagauacucagaaacaaa

SEQ ID NO: 2371660 - RNA, 19 nt, Homo sapiens
  misc_RNA (1)...(19): siRNA sense strand
uggagaagauacucagaaa

SEQ ID NO: 2371661 - RNA, 19 nt, Homo sapiens
  misc_RNA (1)...(19): siRNA sense strand
gagaagauacucagaaaca

SEQ ID NO: 2371662 - RNA, 19 nt, Homo sapiens
  misc_RNA (1)...(19): siRNA sense strand
acucagaaacaaagccaaa

SEQ ID NO: 2371663 - RNA, 19 nt, Homo sapiens
  misc_RNA (1)...(19): siRNA sense strand
ggaaagugagggaguucaa

SEQ ID NO: 2371664 - RNA, 19 nt, Homo sapiens
  misc_RNA (1)...(19): siRNA sense strand
acguaaacaaguugaagaa

SEQ ID NO: 2371665 - RNA, 19 nt, Homo sapiens
  misc_RNA (1)...(19): siRNA sense strand
gaaauuuggugaagcuauu

SEQ ID NO: 2371666 - RNA, 19 nt, Homo sapiens
  misc_RNA (1)...(19): siRNA sense strand
gauuggaaugucagaauua

SEQ ID NO: 2371667 - RNA, 19 nt, Homo sapiens
  misc_RNA (1)...(19): siRNA sense strand
cuucaagccacgagggaga

SEQ ID NO: 2371668 - RNA, 19 nt, Homo sapiens
  misc_RNA (1)...(19): siRNA sense strand
gauauuacuugcaaaggaa

SEQ ID NO: 2371669 - RNA, 19 nt, Homo sapiens
  misc_RNA (1)...(19): siRNA sense strand
ggagaacaaagcagggauu

SEQ ID NO: 2371670 - RNA, 19 nt, Homo sapiens
  misc_RNA (1)...(19): siRNA sense strand
gaagcaaguggaagagauu

SEQ ID NO: 2371671 - RNA, 19 nt, Homo sapiens
  misc_RNA (1)...(19): siRNA sense strand
uaagagaacaagugaauga

SEQ ID NO: 2371672 - RNA, 19 nt, Homo sapiens
  misc_RNA (1)...(19): siRNA sense strand
ggaaguaccagcagaagau

SEQ ID NO: 2371673 - RNA, 19 nt, Homo sapiens
  misc_RNA (1)...(19): siRNA sense strand
ggaagcaaguggaagagau

SEQ ID NO: 2371674 - RNA, 19 nt, Homo sapiens
  misc_RNA (1)...(19): siRNA sense strand
gaaaucagcuccaugagaa

SEQ ID NO: 2371675 - RNA, 19 nt, Homo sapiens
  misc_RNA (1)...(19): siRNA sense strand
ggaaauaugcucaagccau

SEQ ID NO: 2371676 - RNA, 19 nt, Homo sapiens
  misc_RNA (1)...(19): siRNA sense strand
ggauauuacuugcaaagga

SEQ ID NO: 2371677 - RNA, 19 nt, Homo sapiens
  misc_RNA (1)...(19): siRNA sense strand
gauuaagaaacaugagcuu

SEQ ID NO: 2371678 - RNA, 19 nt, Homo sapiens
  misc_RNA (1)...(19): siRNA sense strand
guggaaggacugccagaaa

SEQ ID NO: 2371679 - RNA, 19 nt, Homo sapiens
  misc_RNA (1)...(19): siRNA sense strand
cuaagagaccaaaggccaa

SEQ ID NO: 2371680 - RNA, 19 nt, Homo sapiens
  misc_RNA (1)...(19): siRNA sense strand
gugaagauuuacagcuuga

SEQ ID NO: 2371681 - RNA, 19 nt, Homo sapiens
  misc_RNA (1)...(19): siRNA sense strand
ugucagaauuaccaagcua

SEQ ID NO: 2371682 - RNA, 19 nt, Homo sapiens
  misc_RNA (1)...(19): siRNA sense strand
ggaaauuuggugaagcuau

SEQ ID NO: 2371683 - RNA, 19 nt, Homo sapiens
  misc_RNA (1)...(19): siRNA sense strand
ccagaugaugauaaugaaa

SEQ ID NO: 2371684 - RNA, 19 nt, Homo sapiens
  misc_RNA (1)...(19): siRNA sense strand
accaaaggccaaugagcua

SEQ ID NO: 2371685 - RNA, 19 nt, Homo sapiens
  misc_RNA (1)...(19): siRNA sense strand
gauacaagaaucagcugaa

SEQ ID NO: 2371686 - RNA, 19 nt, Homo sapiens
  misc_RNA (1)...(19): siRNA sense strand
aguaaaggaagaaugguau

SEQ ID NO: 2371687 - RNA, 19 nt, Homo sapiens
  misc_RNA (1)...(19): siRNA sense strand
gaaauuugcucaagcucuu

SEQ ID NO: 2371688 - RNA, 19 nt, Homo sapiens
  misc_RNA (1)...(19): siRNA sense strand
ugggauggcuaguaaaaua

SEQ ID NO: 2371689 - RNA, 19 nt, Homo sapiens
  misc_RNA (1)...(19): siRNA sense strand
uguuaauacuacugcauca

SEQ ID NO: 2371690 - RNA, 19 nt, Homo sapiens
  misc_RNA (1)...(19): siRNA sense strand
uuccaggacuugugauuaa

SEQ ID NO: 2371691 - RNA, 19 nt, Homo sapiens
  misc_RNA (1)...(19): siRNA sense strand
ugucaauaccagaaaggau

SEQ ID NO: 2371692 - RNA, 19 nt, Homo sapiens
  misc_RNA (1)...(19): siRNA sense strand
guguugaagaagaagaaaa

SEQ ID NO: 2371693 - RNA, 19 nt, Homo sapiens
  misc_RNA (1)...(19): siRNA sense strand
gcucucagaucaagcaaga

SEQ ID NO: 2371694 - RNA, 19 nt, Homo sapiens
  misc_RNA (1)...(19): siRNA sense strand
gggaguaauucaaagguuc

SEQ ID NO: 2371695 - RNA, 19 nt, Homo sapiens
  misc_RNA (1)...(19): siRNA sense strand
gccacgagggagagaguuu

SEQ ID NO: 2371696 - RNA, 19 nt, Homo sapiens
  misc_RNA (1)...(19): siRNA sense strand
gcugggaagcggaaaguga

SEQ ID NO: 2371697 - RNA, 19 nt, Homo sapiens
  misc_RNA (1)...(19): siRNA sense strand
augaaagacucucgaaagu

SEQ ID NO: 2371698 - RNA, 19 nt, Homo sapiens
  misc_RNA (1)...(19): siRNA sense strand
acgugaagauuuacagcuu

SEQ ID NO: 2371699 - RNA, 19 nt, Homo sapiens
  misc_RNA (1)...(19): siRNA sense strand
gccagaaucacuaaauuaa

SEQ ID NO: 2371700 - RNA, 19 nt, Homo sapiens
  misc_RNA (1)...(19): siRNA sense strand
uguuugagacggcgauuaa

SEQ ID NO: 2371701 - RNA, 19 nt, Homo sapiens
  misc_RNA (1)...(19): siRNA sense strand
ggugacaauuccagaugau

SEQ ID NO: 2371702 - RNA, 19 nt, Homo sapiens
  misc_RNA (1)...(19): siRNA sense strand
aaucaaacccggaguucuu

SEQ ID NO: 2371703 - RNA, 19 nt, Homo sapiens
  misc_RNA (1)...(19): siRNA sense strand
ccacgaaguccugggagua

SEQ ID NO: 2371704 - RNA, 19 nt, Homo sapiens
  misc_RNA (1)...(19): siRNA sense strand
ugacaauuccagaugauga

SEQ ID NO: 2371705 - RNA, 19 nt, Homo sapiens
  misc_RNA (1)...(19): siRNA sense strand
cgucggaacugaaagagga

SEQ ID NO: 2371706 - RNA, 19 nt, Homo sapiens
  misc_RNA (1)...(19): siRNA sense strand
cuguagaaauugaaacacu

SEQ ID NO: 2371707 - RNA, 19 nt, Homo sapiens
  misc_RNA (1)...(19): siRNA sense strand
ccacagaagaaauaaaaga

SEQ ID NO: 2371708 - RNA, 19 nt, Homo sapiens
  misc_RNA (1)...(19): siRNA sense strand
caagugggcaaucgaauua

SEQ ID NO: 2371709 - RNA, 19 nt, Homo sapiens
  misc_RNA (1)...(19): siRNA sense strand
cagccacagaagaaauaaa

SEQ ID NO: 2371710 - RNA, 19 nt, Homo sapiens
  misc_RNA (1)...(19): siRNA sense strand
gauggaagcucucagauca

SEQ ID NO: 2371711 - RNA, 19 nt, Homo sapiens
  misc_RNA (1)...(19): siRNA sense strand
ccaaagguccggugacgau

SEQ ID NO: 2371712 - RNA, 19 nt, Homo sapiens
  misc_RNA (1)...(19): siRNA sense strand
ggaagaaugguaugccaga

SEQ ID NO: 2371713 - RNA, 19 nt, Homo sapiens
  misc_RNA (1)...(19): siRNA sense strand
ugaaaggaaauaugcucaa

SEQ ID NO: 2371714 - RNA, 19 nt, Homo sapiens
  misc_RNA (1)...(19): siRNA sense strand
ugccagaaucacuaaauua

SEQ ID NO: 2371715 - RNA, 19 nt, Homo sapiens
  misc_RNA (1)...(19): siRNA sense strand
ccgaagucccucaugguau

SEQ ID NO: 2371716 - RNA, 19 nt, Homo sapiens
  misc_RNA (1)...(19): siRNA sense strand
aaaucauucaagugggcaa

SEQ ID NO: 2371717 - RNA, 19 nt, Homo sapiens
  misc_RNA (1)...(19): siRNA sense strand
caacaauccucaaaccuca

SEQ ID NO: 2371718 - RNA, 19 nt, Homo sapiens
  misc_RNA (1)...(19): siRNA sense strand
uaaugaaagacucucgaaa

SEQ ID NO: 2371719 - RNA, 19 nt, Homo sapiens
  misc_RNA (1)...(19): siRNA sense strand
cugccgaguuuaucaaauu

SEQ ID NO: 2371720 - RNA, 19 nt, Homo sapiens
  misc_RNA (1)...(19): siRNA sense strand
gcacagaaauggaaguacc

SEQ ID NO: 2371721 - RNA, 19 nt, Homo sapiens
  misc_RNA (1)...(19): siRNA sense strand
uagacagcuaagagaacaa

SEQ ID NO: 2371722 - RNA, 19 nt, Homo sapiens
  misc_RNA (1)...(19): siRNA sense strand
uggaaggcccuaauaacaa

SEQ ID NO: 2371723 - RNA, 19 nt, Homo sapiens
  misc_RNA (1)...(19): siRNA sense strand
ccaaaaucacggaccuaaa

SEQ ID NO: 2371724 - RNA, 19 nt, Homo sapiens
  misc_RNA (1)...(19): siRNA sense strand
gagaaggaucuuagacucu

SEQ ID NO: 2371725 - RNA, 19 nt, Homo sapiens
  misc_RNA (1)...(19): siRNA sense strand
aagaaugguaugccagaau

SEQ ID NO: 2371726 - RNA, 19 nt, Homo sapiens
  misc_RNA (1)...(19): siRNA sense strand
uggaaggacugccagaaaa

SEQ ID NO: 2371727 - RNA, 19 nt, Homo sapiens
  misc_RNA (1)...(19): siRNA sense strand
guggaaggcccuaauaaca

SEQ ID NO: 2371728 - RNA, 19 nt, Homo sapiens
  misc_RNA (1)...(19): siRNA sense strand
augggaaagcuuuaggcaa

SEQ ID NO: 2371729 - RNA, 19 nt, Homo sapiens
  misc_RNA (1)...(19): siRNA sense strand
caaugagaaauguggggaa

SEQ ID NO: 2371730 - RNA, 19 nt, Homo sapiens
  misc_RNA (1)...(19): siRNA sense strand
uggaaguaccagcagaaga

SEQ ID NO: 2371731 - RNA, 19 nt, Homo sapiens
  misc_RNA (1)...(19): siRNA sense strand
ucuaagagaccaaaggcca

SEQ ID NO: 2371732 - RNA, 19 nt, Homo sapiens
  misc_RNA (1)...(19): siRNA sense strand
agaggauauuacuugcaaa

SEQ ID NO: 2371733 - RNA, 19 nt, Homo sapiens
  misc_RNA (1)...(19): siRNA sense strand
guguggugguugauggcau

SEQ ID NO: 2371734 - RNA, 19 nt, Homo sapiens
  misc_RNA (1)...(19): siRNA sense strand
uguguaaagaacuggccaa

SEQ ID NO: 2371735 - RNA, 19 nt, Homo sapiens
  misc_RNA (1)...(19): siRNA sense strand
cgaaugaucuguacgugga

SEQ ID NO: 2371736 - RNA, 19 nt, Homo sapiens
  misc_RNA (1)...(19): siRNA sense strand
aggaaaagaagaagaguaa

SEQ ID NO: 2371737 - RNA, 19 nt, Homo sapiens
  misc_RNA (1)...(19): siRNA sense strand
aagaagaagaagaaagcaa

SEQ ID NO: 2371738 - RNA, 19 nt, Homo sapiens
  misc_RNA (1)...(19): siRNA sense strand
agaagaagauguagccgaa

SEQ ID NO: 2371739 - RNA, 19 nt, Homo sapiens
  misc_RNA (1)...(19): siRNA sense strand
ggaccaucuacgagagcaa

SEQ ID NO: 2371740 - RNA, 19 nt, Homo sapiens
  misc_RNA (1)...(19): siRNA sense strand
accacaaggaugagaguua

SEQ ID NO: 2371741 - RNA, 19 nt, Homo sapiens
  misc_RNA (1)...(19): siRNA sense strand
guauaguagccaagaucaa

SEQ ID NO: 2371742 - RNA, 19 nt, Homo sapiens
  misc_RNA (1)...(19): siRNA sense strand
caguugaucaagaaggaaa

SEQ ID NO: 2371743 - RNA, 19 nt, Homo sapiens
  misc_RNA (1)...(19): siRNA sense strand
aagaagaguaagaaggaca

SEQ ID NO: 2371744 - RNA, 19 nt, Homo sapiens
  misc_RNA (1)...(19): siRNA sense strand
gcaaagaguauguggggau

SEQ ID NO: 2371745 - RNA, 19 nt, Homo sapiens
  misc_RNA (1)...(19): siRNA sense strand
agucauugccagaagaaga

SEQ ID NO: 2371746 - RNA, 19 nt, Homo sapiens
  misc_RNA (1)...(19): siRNA sense strand
gaagcaaucugcauggcua

SEQ ID NO: 2371747 - RNA, 19 nt, Homo sapiens
  misc_RNA (1)...(19): siRNA sense strand
ccaccaaaggagaagcaau

SEQ ID NO: 2371748 - RNA, 19 nt, Homo sapiens
  misc_RNA (1)...(19): siRNA sense strand
gagugcaggcaaagaguau

SEQ ID NO: 2371749 - RNA, 19 nt, Homo sapiens
  misc_RNA (1)...(19): siRNA sense strand
gcgaagcggaagcgagaga

SEQ ID NO: 2371750 - RNA, 19 nt, Homo sapiens
  misc_RNA (1)...(19): siRNA sense strand
cugaaagaagauuaggaau

SEQ ID NO: 2371751 - RNA, 19 nt, Homo sapiens
  misc_RNA (1)...(19): siRNA sense strand
ggagauggggacagugaua

SEQ ID NO: 2371752 - RNA, 19 nt, Homo sapiens
  misc_RNA (1)...(19): siRNA sense strand
gaagaagaagaaagcaaaa

SEQ ID NO: 2371753 - RNA, 19 nt, Homo sapiens
  misc_RNA (1)...(19): siRNA sense strand
aagcaaaagagguagaauu

SEQ ID NO: 2371754 - RNA, 19 nt, Homo sapiens
  misc_RNA (1)...(19): siRNA sense strand
ucaagaaggaaaagaagaa

SEQ ID NO: 2371755 - RNA, 19 nt, Homo sapiens
  misc_RNA (1)...(19): siRNA sense strand
agaagaguaagaaggacaa

SEQ ID NO: 2371756 - RNA, 19 nt, Homo sapiens
  misc_RNA (1)...(19): siRNA sense strand
aagcugaauguaaggacaa

SEQ ID NO: 2371757 - RNA, 19 nt, Homo sapiens
  misc_RNA (1)...(19): siRNA sense strand
cugcgaagcggaagcgaga

SEQ ID NO: 2371758 - RNA, 19 nt, Homo sapiens
  misc_RNA (1)...(19): siRNA sense strand
accaagaagaagaagaaga

SEQ ID NO: 2371759 - RNA, 19 nt, Homo sapiens
  misc_RNA (1)...(19): siRNA sense strand
ggauacuucggguggagaa

SEQ ID NO: 2371760 - RNA, 19 nt, Homo sapiens
  misc_RNA (1)...(19): siRNA sense strand
gugcauagaacgagccacu

SEQ ID NO: 2371761 - RNA, 19 nt, Homo sapiens
  misc_RNA (1)...(19): siRNA sense strand
augauaaccacaaggauga

SEQ ID NO: 2371762 - RNA, 19 nt, Homo sapiens
  misc_RNA (1)...(19): siRNA sense strand
cagaagaagauguagccga

SEQ ID NO: 2371763 - RNA, 19 nt, Homo sapiens
  misc_RNA (1)...(19): siRNA sense strand
aauacaacacgcugaagaa

SEQ ID NO: 2371764 - RNA, 19 nt, Homo sapiens
  misc_RNA (1)...(19): siRNA sense strand
cuacagugagucugccaaa

SEQ ID NO: 2371765 - RNA, 19 nt, Homo sapiens
  misc_RNA (1)...(19): siRNA sense strand
cggaagcgagagagugaga

SEQ ID NO: 2371766 - RNA, 19 nt, Homo sapiens
  misc_RNA (1)...(19): siRNA sense strand
aagaagaagaagaagaaag

SEQ ID NO: 2371767 - RNA, 19 nt, Homo sapiens
  misc_RNA (1)...(19): siRNA sense strand
agccuggauucgacggaua

SEQ ID NO: 2371768 - RNA, 19 nt, Homo sapiens
  misc_RNA (1)...(19): siRNA sense strand
guuguuuacccuuuggaaa

SEQ ID NO: 2371769 - RNA, 19 nt, Homo sapiens
  misc_RNA (1)...(19): siRNA sense strand
aaggaaaagaagaagagua

SEQ ID NO: 2371770 - RNA, 19 nt, Homo sapiens
  misc_RNA (1)...(19): siRNA sense strand
ccgaaauacaacacgcuga

SEQ ID NO: 2371771 - RNA, 19 nt, Homo sapiens
  misc_RNA (1)...(19): siRNA sense strand
agugauaccaccaagaaga

SEQ ID NO: 2371772 - RNA, 19 nt, Homo sapiens
  misc_RNA (1)...(19): siRNA sense strand
gaucauggagagagacacu

SEQ ID NO: 2371773 - RNA, 19 nt, Homo sapiens
  misc_RNA (1)...(19): siRNA sense strand
ugccaaagaaacauaagaa

SEQ ID NO: 2371774 - RNA, 19 nt, Homo sapiens
  misc_RNA (1)...(19): siRNA sense strand
agcgagagagugagaguga

SEQ ID NO: 2371775 - RNA, 19 nt, Homo sapiens
  misc_RNA (1)...(19): siRNA sense strand
agagagagauuggggacua

SEQ ID NO: 2371776 - RNA, 19 nt, Homo sapiens
  misc_RNA (1)...(19): siRNA sense strand
cgauccugaaagaagauua

SEQ ID NO: 2371777 - RNA, 19 nt, Homo sapiens
  misc_RNA (1)...(19): siRNA sense strand
ucuggagucaugagugaaa

SEQ ID NO: 2371778 - RNA, 19 nt, Homo sapiens
  misc_RNA (1)...(19): siRNA sense strand
aagacagggcacaguggua

SEQ ID NO: 2371779 - RNA, 19 nt, Homo sapiens
  misc_RNA (1)...(19): siRNA sense strand
gugaucauggagagagaca

SEQ ID NO: 2371780 - RNA, 19 nt, Homo sapiens
  misc_RNA (1)...(19): siRNA sense strand
caccaaaggagaagcaauc

SEQ ID NO: 2371781 - RNA, 19 nt, Homo sapiens
  misc_RNA (1)...(19): siRNA sense strand
gaagcgagagagugagagu

SEQ ID NO: 2371782 - RNA, 19 nt, Homo sapiens
  misc_RNA (1)...(19): siRNA sense strand
gagcaaaaugauugaauac

SEQ ID NO: 2371783 - RNA, 19 nt, Homo sapiens
  misc_RNA (1)...(19): siRNA sense strand
augaaagacagugcaguaa

SEQ ID NO: 2371784 - RNA, 19 nt, Homo sapiens
  misc_RNA (1)...(19): siRNA sense strand
aucaggagauugugguuau

SEQ ID NO: 2371785 - RNA, 19 nt, Homo sapiens
  misc_RNA (1)...(19): siRNA sense strand
augaagaagagaugaggaa

SEQ ID NO: 2371786 - RNA, 19 nt, Homo sapiens
  misc_RNA (1)...(19): siRNA sense strand
cagacuauaucgagaggga

SEQ ID NO: 2371787 - RNA, 19 nt, Homo sapiens
  misc_RNA (1)...(19): siRNA sense strand
gauugaagacuauggcgaa

SEQ ID NO: 2371788 - RNA, 19 nt, Homo sapiens
  misc_RNA (1)...(19): siRNA sense strand
gacuauaucgagagggaca

SEQ ID NO: 2371789 - RNA, 19 nt, Homo sapiens
  misc_RNA (1)...(19): siRNA sense strand
ccugaaaggccaccggcaa

SEQ ID NO: 2371790 - RNA, 19 nt, Homo sapiens
  misc_RNA (1)...(19): siRNA sense strand
acaacaucagaaagaguaa

SEQ ID NO: 2371791 - RNA, 19 nt, Homo sapiens
  misc_RNA (1)...(19): siRNA sense strand
accuagaccuaaaggaaaa

SEQ ID NO: 2371792 - RNA, 19 nt, Homo sapiens
  misc_RNA (1)...(19): siRNA sense strand
gccauaaagaaaagagaau

SEQ ID NO: 2371793 - RNA, 19 nt, Homo sapiens
  misc_RNA (1)...(19): siRNA sense strand
agaagaacgaagaggugga

SEQ ID NO: 2371794 - RNA, 19 nt, Homo sapiens
  misc_RNA (1)...(19): siRNA sense strand
agagaauggauggcagaaa

SEQ ID NO: 2371795 - RNA, 19 nt, Homo sapiens
  misc_RNA (1)...(19): siRNA sense strand
ccauucaaagcuuggacaa

SEQ ID NO: 2371796 - RNA, 19 nt, Homo sapiens
  misc_RNA (1)...(19): siRNA sense strand
cggcaggacaacaucagaa

SEQ ID NO: 2371797 - RNA, 19 nt, Homo sapiens
  misc_RNA (1)...(19): siRNA sense strand
uggccacagcaaagagcaa

SEQ ID NO: 2371798 - RNA, 19 nt, Homo sapiens
  misc_RNA (1)...(19): siRNA sense strand
gcagaaaggccagugguga

SEQ ID NO: 2371799 - RNA, 19 nt, Homo sapiens
  misc_RNA (1)...(19): siRNA sense strand
gguuuuaccuagacgugaa

SEQ ID NO: 2371800 - RNA, 19 nt, Homo sapiens
  misc_RNA (1)...(19): siRNA sense strand
cgaagucuggauagggaga

SEQ ID NO: 2371801 - RNA, 19 nt, Homo sapiens
  misc_RNA (1)...(19): siRNA sense strand
ucgagagggacaauaggaa

SEQ ID NO: 2371802 - RNA, 19 nt, Homo sapiens
  misc_RNA (1)...(19): siRNA sense strand
aaagagaauggauggcaga

SEQ ID NO: 2371803 - RNA, 19 nt, Homo sapiens
  misc_RNA (1)...(19): siRNA sense strand
uuauuaagcucuugggaga

SEQ ID NO: 2371804 - RNA, 19 nt, Homo sapiens
  misc_RNA (1)...(19): siRNA sense strand
gaauaagaugacucagaaa

SEQ ID NO: 2371805 - RNA, 19 nt, Homo sapiens
  misc_RNA (1)...(19): siRNA sense strand
agucagaggcagagaacca

SEQ ID NO: 2371806 - RNA, 19 nt, Homo sapiens
  misc_RNA (1)...(19): siRNA sense strand
gugaaaaggcggauggaga

SEQ ID NO: 2371807 - RNA, 19 nt, Homo sapiens
  misc_RNA (1)...(19): siRNA sense strand
aagaugacucagaaagaua

SEQ ID NO: 2371808 - RNA, 19 nt, Homo sapiens
  misc_RNA (1)...(19): siRNA sense strand
ccaaguuugugcaggaaaa

SEQ ID NO: 2371809 - RNA, 19 nt, Homo sapiens
  misc_RNA (1)...(19): siRNA sense strand
acauaugccacaacagaaa

SEQ ID NO: 2371810 - RNA, 19 nt, Homo sapiens
  misc_RNA (1)...(19): siRNA sense strand
acgugaaggaagagauaga

SEQ ID NO: 2371811 - RNA, 19 nt, Homo sapiens
  misc_RNA (1)...(19): siRNA sense strand
gagaaugacagaagaccau

SEQ ID NO: 2371812 - RNA, 19 nt, Homo sapiens
  misc_RNA (1)...(19): siRNA sense strand
aguuaacaguaaagggcuu

SEQ ID NO: 2371813 - RNA, 19 nt, Homo sapiens
  misc_RNA (1)...(19): siRNA sense strand
cuggauuuauugagcuuua

SEQ ID NO: 2371814 - RNA, 19 nt, Homo sapiens
  misc_RNA (1)...(19): siRNA sense strand
gagauagacucuuggucca

SEQ ID NO: 2371815 - RNA, 19 nt, Homo sapiens
  misc_RNA (1)...(19): siRNA sense strand
uggaggaagcucuggauuu

SEQ ID NO: 2371816 - RNA, 19 nt, Homo sapiens
  misc_RNA (1)...(19): siRNA sense strand
ugagugaauugaaaggaau

SEQ ID NO: 2371817 - RNA, 19 nt, Homo sapiens
  misc_RNA (1)...(19): siRNA sense strand
acaguauguugcugggaau

SEQ ID NO: 2371818 - RNA, 19 nt, Homo sapiens
  misc_RNA (1)...(19): siRNA sense strand
ugaaauggacauagaugau

SEQ ID NO: 2371819 - RNA, 19 nt, Homo sapiens
  misc_RNA (1)...(19): siRNA sense strand
uuuauaaugcugaggauga

SEQ ID NO: 2371820 - RNA, 19 nt, Homo sapiens
  misc_RNA (1)...(19): siRNA sense strand
aggaaucgaagaagcuaua

SEQ ID NO: 2371821 - RNA, 19 nt, Homo sapiens
  misc_RNA (1)...(19): siRNA sense strand
acucaaggcaaaugaacuu

SEQ ID NO: 2371822 - RNA, 19 nt, Homo sapiens
  misc_RNA (1)...(19): siRNA sense strand
acuugaaagaugaagauga

SEQ ID NO: 2371823 - RNA, 19 nt, Homo sapiens
  misc_RNA (1)...(19): siRNA sense strand
aagaggaggaggccaguaa

SEQ ID NO: 2371824 - RNA, 19 nt, Homo sapiens
  misc_RNA (1)...(19): siRNA sense strand
auacuaaugcagauggauu

SEQ ID NO: 2371825 - RNA, 19 nt, Homo sapiens
  misc_RNA (1)...(19): siRNA sense strand
cuuuuauacucaaggcaaa

SEQ ID NO: 2371826 - RNA, 19 nt, Homo sapiens
  misc_RNA (1)...(19): siRNA sense strand
gugugaagcaugggaagaa

SEQ ID NO: 2371827 - RNA, 19 nt, Homo sapiens
  misc_RNA (1)...(19): siRNA sense strand
auggagaccagauggcaaa

SEQ ID NO: 2371828 - RNA, 19 nt, Homo sapiens
  misc_RNA (1)...(19): siRNA sense strand
ucaccaaguuugugcagga

SEQ ID NO: 2371829 - RNA, 19 nt, Homo sapiens
  misc_RNA (1)...(19): siRNA sense strand
uggccagucuauagaguca

SEQ ID NO: 2371830 - RNA, 19 nt, Homo sapiens
  misc_RNA (1)...(19): siRNA sense strand
uugagugaauugaaaggaa

SEQ ID NO: 2371831 - RNA, 19 nt, Homo sapiens
  misc_RNA (1)...(19): siRNA sense strand
auaagaugacucagaaaga

SEQ ID NO: 2371832 - RNA, 19 nt, Homo sapiens
  misc_RNA (1)...(19): siRNA sense strand
cuauuaaauuugggagcuu

SEQ ID NO: 2371833 - RNA, 19 nt, Homo sapiens
  misc_RNA (1)...(19): siRNA sense strand
ucggauggccagaaaguuu

SEQ ID NO: 2371834 - RNA, 19 nt, Homo sapiens
  misc_RNA (1)...(19): siRNA sense strand
gaagaaauacuaaugcaga

SEQ ID NO: 2371835 - RNA, 19 nt, Homo sapiens
  misc_RNA (1)...(19): siRNA sense strand
ugguacuugucuugcauua

SEQ ID NO: 2371836 - RNA, 19 nt, Homo sapiens
  misc_RNA (1)...(19): siRNA sense strand
ccaaaugaaaauacaggaa

SEQ ID NO: 2371837 - RNA, 19 nt, Homo sapiens
  misc_RNA (1)...(19): siRNA sense strand
ugaaaaggcggauggagaa

SEQ ID NO: 2371838 - RNA, 19 nt, Homo sapiens
  misc_RNA (1)...(19): siRNA sense strand
ugaacaguguagugcuauu

SEQ ID NO: 2371839 - RNA, 19 nt, Homo sapiens
  misc_RNA (1)...(19): siRNA sense strand
cauggagaccagauggcaa

SEQ ID NO: 2371840 - RNA, 19 nt, Homo sapiens
  misc_RNA (1)...(19): siRNA sense strand
cuacaguuguuuagaugca

SEQ ID NO: 2371841 - RNA, 19 nt, Homo sapiens
  misc_RNA (1)...(19): siRNA sense strand
gauggaagugacaguagaa

SEQ ID NO: 2371842 - RNA, 19 nt, Homo sapiens
  misc_RNA (1)...(19): siRNA sense strand
uaaaauugcucgagucaca

SEQ ID NO: 2371843 - RNA, 19 nt, Homo sapiens
  misc_RNA (1)...(19): siRNA sense strand
guaugaaagcacaguaugu

SEQ ID NO: 2371844 - RNA, 19 nt, Homo sapiens
  misc_RNA (1)...(19): siRNA sense strand
augcugaggaugaaucaaa

SEQ ID NO: 2371845 - RNA, 19 nt, Homo sapiens
  misc_RNA (1)...(19): siRNA sense strand
gugaagcaugggaagaaau

SEQ ID NO: 2371846 - RNA, 19 nt, Homo sapiens
  misc_RNA (1)...(19): siRNA sense strand
caguaauaagccuguaaaa

SEQ ID NO: 2371847 - RNA, 19 nt, Homo sapiens
  misc_RNA (1)...(19): siRNA sense strand
cauaagucauuuacagagu

SEQ ID NO: 2371848 - RNA, 19 nt, Homo sapiens
  misc_RNA (1)...(19): siRNA sense strand
uggaaaguaugaaagcaca

SEQ ID NO: 2371849 - RNA, 19 nt, Homo sapiens
  misc_RNA (1)...(19): siRNA sense strand
cauuaucaguggucacaga

SEQ ID NO: 2371850 - RNA, 19 nt, Homo sapiens
  misc_RNA (1)...(19): siRNA sense strand
ugugaagcaugggaagaaa

SEQ ID NO: 2371851 - RNA, 19 nt, Homo sapiens
  misc_RNA (1)...(19): siRNA sense strand
acuagaugcugcaggaauc

SEQ ID NO: 2371852 - RNA, 19 nt, Homo sapiens
  misc_RNA (1)...(19): siRNA sense strand
ggaaaauacuuuaacguug

SEQ ID NO: 2371853 - RNA, 19 nt, Homo sapiens
  misc_RNA (1)...(19): siRNA sense strand
gcuuaauauucucguccuu

SEQ ID NO: 2371854 - RNA, 19 nt, Homo sapiens
  misc_RNA (1)...(19): siRNA sense strand
uuucauacuuucagcuuga

SEQ ID NO: 2371855 - RNA, 19 nt, Homo sapiens
  misc_RNA (1)...(19): siRNA sense strand
cggauggccagaaaguuua

SEQ ID NO: 2371856 - RNA, 19 nt, Homo sapiens
  misc_RNA (1)...(19): siRNA sense strand
gguaugacuuucuucaaaa

SEQ ID NO: 2371857 - RNA, 19 nt, Homo sapiens
  misc_RNA (1)...(19): siRNA sense strand
aggcggauggagaauauua

SEQ ID NO: 2371858 - RNA, 19 nt, Homo sapiens
  misc_RNA (1)...(19): siRNA sense strand
gacuagaugcugcaggaau

SEQ ID NO: 2371859 - RNA, 19 nt, Homo sapiens
  misc_RNA (1)...(19): siRNA sense strand
caggaaucgaagaagcuau

SEQ ID NO: 2371860 - RNA, 19 nt, Homo sapiens
  misc_RNA (1)...(19): siRNA sense strand
ccuuaaagacugugaaaua

SEQ ID NO: 2371861 - RNA, 19 nt, Homo sapiens
  misc_RNA (1)...(19): siRNA sense strand
gauuagaggcagagguuaa

SEQ ID NO: 2371862 - RNA, 19 nt, Homo sapiens
  misc_RNA (1)...(19): siRNA sense strand
gcugagugcuuuagaguua

SEQ ID NO: 2371863 - RNA, 19 nt, Homo sapiens
  misc_RNA (1)...(19): siRNA sense strand
gaauacaacgagagaguaa

SEQ ID NO: 2371864 - RNA, 19 nt, Homo sapiens
  misc_RNA (1)...(19): siRNA sense strand
gagaaugagcugaggagaa

SEQ ID NO: 2371865 - RNA, 19 nt, Homo sapiens
  misc_RNA (1)...(19): siRNA sense strand
gugaagaguuggugcaaau

SEQ ID NO: 2371866 - RNA, 19 nt, Homo sapiens
  misc_RNA (1)...(19): siRNA sense strand
gaggaaaugaagaaggaaa

SEQ ID NO: 2371867 - RNA, 19 nt, Homo sapiens
  misc_RNA (1)...(19): siRNA sense strand
aggcagaggugaaggaaaa

SEQ ID NO: 2371868 - RNA, 19 nt, Homo sapiens
  misc_RNA (1)...(19): siRNA sense strand
aaagagagagugagagaaa

SEQ ID NO: 2371869 - RNA, 19 nt, Homo sapiens
  misc_RNA (1)...(19): siRNA sense strand
ggaaagugagagaggaaau

SEQ ID NO: 2371870 - RNA, 19 nt, Homo sapiens
  misc_RNA (1)...(19): siRNA sense strand
aaguagaaauccagacaua

SEQ ID NO: 2371871 - RNA, 19 nt, Homo sapiens
  misc_RNA (1)...(19): siRNA sense strand
gcugaaugagcuagagaaa

SEQ ID NO: 2371872 - RNA, 19 nt, Homo sapiens
  misc_RNA (1)...(19): siRNA sense strand
agaacucaguggagagaaa

SEQ ID NO: 2371873 - RNA, 19 nt, Homo sapiens
  misc_RNA (1)...(19): siRNA sense strand
aggaaaacuugcagaguaa

SEQ ID NO: 2371874 - RNA, 19 nt, Homo sapiens
  misc_RNA (1)...(19): siRNA sense strand
aggcagaacucaagaacau

SEQ ID NO: 2371875 - RNA, 19 nt, Homo sapiens
  misc_RNA (1)...(19): siRNA sense strand
aggaaaagcugcagaguuu

SEQ ID NO: 2371876 - RNA, 19 nt, Homo sapiens
  misc_RNA (1)...(19): siRNA sense strand
agacauaccgagagaaauu

SEQ ID NO: 2371877 - RNA, 19 nt, Homo sapiens
  misc_RNA (1)...(19): siRNA sense strand
cgagaagcuagaagagaaa

SEQ ID NO: 2371878 - RNA, 19 nt, Homo sapiens
  misc_RNA (1)...(19): siRNA sense strand
agaaagagagagugagaga

SEQ ID NO: 2371879 - RNA, 19 nt, Homo sapiens
  misc_RNA (1)...(19): siRNA sense strand
ggcagaagagguagggaaa

SEQ ID NO: 2371880 - RNA, 19 nt, Homo sapiens
  misc_RNA (1)...(19): siRNA sense strand
cagaaacaucagaaggaaa

SEQ ID NO: 2371881 - RNA, 19 nt, Homo sapiens
  misc_RNA (1)...(19): siRNA sense strand
caucagaaggaaauagaaa

SEQ ID NO: 2371882 - RNA, 19 nt, Homo sapiens
  misc_RNA (1)...(19): siRNA sense strand
agacauaccaggaggugaa

SEQ ID NO: 2371883 - RNA, 19 nt, Homo sapiens
  misc_RNA (1)...(19): siRNA sense strand
aagcagagauacagaucaa

SEQ ID NO: 2371884 - RNA, 19 nt, Homo sapiens
  misc_RNA (1)...(19): siRNA sense strand
ccagacauaccgagagaaa

SEQ ID NO: 2371885 - RNA, 19 nt, Homo sapiens
  misc_RNA (1)...(19): siRNA sense strand
cagaugaauacuuggauaa

SEQ ID NO: 2371886 - RNA, 19 nt, Homo sapiens
  misc_RNA (1)...(19): siRNA sense strand
ugaaaggccaagugaauaa

SEQ ID NO: 2371887 - RNA, 19 nt, Homo sapiens
  misc_RNA (1)...(19): siRNA sense strand
ugaaagaaagagagaguga

SEQ ID NO: 2371888 - RNA, 19 nt, Homo sapiens
  misc_RNA (1)...(19): siRNA sense strand
agcagaaacuggagaagaa

SEQ ID NO: 2371889 - RNA, 19 nt, Homo sapiens
  misc_RNA (1)...(19): siRNA sense strand
agaagaaggaugaagaaau

SEQ ID NO: 2371890 - RNA, 19 nt, Homo sapiens
  misc_RNA (1)...(19): siRNA sense strand
uggcagaggcagaggugaa

SEQ ID NO: 2371891 - RNA, 19 nt, Homo sapiens
  misc_RNA (1)...(19): siRNA sense strand
agggaaagugagagaggaa

SEQ ID NO: 2371892 - RNA, 19 nt, Homo sapiens
  misc_RNA (1)...(19): siRNA sense strand
gggaugaacuagugagaac

SEQ ID NO: 2371893 - RNA, 19 nt, Homo sapiens
  misc_RNA (1)...(19): siRNA sense strand
ucgagaagcuagaagagaa

SEQ ID NO: 2371894 - RNA, 19 nt, Homo sapiens
  misc_RNA (1)...(19): siRNA sense strand
uggaagaguuuaagcaaaa

SEQ ID NO: 2371895 - RNA, 19 nt, Homo sapiens
  misc_RNA (1)...(19): siRNA sense strand
caaaggagaaauagaagaa

SEQ ID NO: 2371896 - RNA, 19 nt, Homo sapiens
  misc_RNA (1)...(19): siRNA sense strand
aagcaguauuugucagaaa

SEQ ID NO: 2371897 - RNA, 19 nt, Homo sapiens
  misc_RNA (1)...(19): siRNA sense strand
caauagaggaagagcauca

SEQ ID NO: 2371898 - RNA, 19 nt, Homo sapiens
  misc_RNA (1)...(19): siRNA sense strand
ccauauauccugcgaagaa

SEQ ID NO: 2371899 - RNA, 19 nt, Homo sapiens
  misc_RNA (1)...(19): siRNA sense strand
aagagaaaguacagaugaa

SEQ ID NO: 2371900 - RNA, 19 nt, Homo sapiens
  misc_RNA (1)...(19): siRNA sense strand
gugaaauacugcaggcuga

SEQ ID NO: 2371901 - RNA, 19 nt, Homo sapiens
  misc_RNA (1)...(19): siRNA sense strand
acaaagaccagguggaaaa

SEQ ID NO: 2371902 - RNA, 19 nt, Homo sapiens
  misc_RNA (1)...(19): siRNA sense strand
cagaagaaaugaaagcgaa

SEQ ID NO: 2371903 - RNA, 19 nt, Homo sapiens
  misc_RNA (1)...(19): siRNA sense strand
ugaaugagcuagagaaaau

SEQ ID NO: 2371904 - RNA, 19 nt, Homo sapiens
  misc_RNA (1)...(19): siRNA sense strand
aggugaauuuggugaacaa

SEQ ID NO: 2371905 - RNA, 19 nt, Homo sapiens
  misc_RNA (1)...(19): siRNA sense strand
ccagcuucguggagaauua

SEQ ID NO: 2371906 - RNA, 19 nt, Homo sapiens
  misc_RNA (1)...(19): siRNA sense strand
caauaaucuuccugagaga

SEQ ID NO: 2371907 - RNA, 19 nt, Homo sapiens
  misc_RNA (1)...(19): siRNA sense strand
ccuuaaaucaagagaagau

SEQ ID NO: 2371908 - RNA, 19 nt, Homo sapiens
  misc_RNA (1)...(19): siRNA sense strand
aauggaaagucaagggauu

SEQ ID NO: 2371909 - RNA, 19 nt, Homo sapiens
  misc_RNA (1)...(19): siRNA sense strand
gcuucaggcaagaggcaaa

SEQ ID NO: 2371910 - RNA, 19 nt, Homo sapiens
  misc_RNA (1)...(19): siRNA sense strand
gcauggaggaaaugaagaa

SEQ ID NO: 2371911 - RNA, 19 nt, Homo sapiens
  misc_RNA (1)...(19): siRNA sense strand
gaucaguacaagcaagaaa

SEQ ID NO: 2371912 - RNA, 19 nt, Homo sapiens
  misc_RNA (1)...(19): siRNA sense strand
acuacaaagaugugaagaa

SEQ ID NO: 2371913 - RNA, 19 nt, Homo sapiens
  misc_RNA (1)...(19): siRNA sense strand
caguggaauuggagcagaa

SEQ ID NO: 2371914 - RNA, 19 nt, Homo sapiens
  misc_RNA (1)...(19): siRNA sense strand
ccaugaaaaguuagagaaa

SEQ ID NO: 2371915 - RNA, 19 nt, Homo sapiens
  misc_RNA (1)...(19): siRNA sense strand
caagagaagaugaacuuaa

SEQ ID NO: 2371916 - RNA, 19 nt, Homo sapiens
  misc_RNA (1)...(19): siRNA sense strand
uggagaaccuugaaagaga

SEQ ID NO: 2371917 - RNA, 19 nt, Homo sapiens
  misc_RNA (1)...(19): siRNA sense strand
gaaccuugaaagagagcua

SEQ ID NO: 2371918 - RNA, 19 nt, Homo sapiens
  misc_RNA (1)...(19): siRNA sense strand
agacagagaaagaguccaa

SEQ ID NO: 2371919 - RNA, 19 nt, Homo sapiens
  misc_RNA (1)...(19): siRNA sense strand
cggaaaugcauaugaggau

SEQ ID NO: 2371920 - RNA, 19 nt, Homo sapiens
  misc_RNA (1)...(19): siRNA sense strand
aggagauacugcagaaaga

SEQ ID NO: 2371921 - RNA, 19 nt, Homo sapiens
  misc_RNA (1)...(19): siRNA sense strand
aggaaaugaagaaggaaaa

SEQ ID NO: 2371922 - RNA, 19 nt, Homo sapiens
  misc_RNA (1)...(19): siRNA sense strand
gugcaaaucaaaggagaaa

SEQ ID NO: 2371923 - RNA, 19 nt, Homo sapiens
  misc_RNA (1)...(19): siRNA sense strand
gugaaauagaugcggaaga

SEQ ID NO: 2371924 - RNA, 19 nt, Homo sapiens
  misc_RNA (1)...(19): siRNA sense strand
gcagaagauccaagugcua

SEQ ID NO: 2371925 - RNA, 19 nt, Homo sapiens
  misc_RNA (1)...(19): siRNA sense strand
auaccaaggucgaugaauu

SEQ ID NO: 2371926 - RNA, 19 nt, Homo sapiens
  misc_RNA (1)...(19): siRNA sense strand
aaugaaaggccaagugaau

SEQ ID NO: 2371927 - RNA, 19 nt, Homo sapiens
  misc_RNA (1)...(19): siRNA sense strand
agaaagaauugcuugucaa

SEQ ID NO: 2371928 - RNA, 19 nt, Homo sapiens
  misc_RNA (1)...(19): siRNA sense strand
ggagaagaaggaugaagaa

SEQ ID NO: 2371929 - RNA, 19 nt, Homo sapiens
  misc_RNA (1)...(19): siRNA sense strand
auacaaagcagcacaggaa

SEQ ID NO: 2371930 - RNA, 19 nt, Homo sapiens
  misc_RNA (1)...(19): siRNA sense strand
uggcagaagagguagggaa

SEQ ID NO: 2371931 - RNA, 19 nt, Homo sapiens
  misc_RNA (1)...(19): siRNA sense strand
gaaacaagcaagagcggga

SEQ ID NO: 2371932 - RNA, 19 nt, Homo sapiens
  misc_RNA (1)...(19): siRNA sense strand
uggcaagaucagcgaggaa

SEQ ID NO: 2371933 - RNA, 19 nt, Homo sapiens
  misc_RNA (1)...(19): siRNA sense strand
aggucaagguggucaucaa

SEQ ID NO: 2371934 - RNA, 19 nt, Homo sapiens
  misc_RNA (1)...(19): siRNA sense strand
gcaagaucagcgaggaaaa

SEQ ID NO: 2371935 - RNA, 19 nt, Homo sapiens
  misc_RNA (1)...(19): siRNA sense strand
ucaucaaaugggugcgcua

SEQ ID NO: 2371936 - RNA, 19 nt, Homo sapiens
  misc_RNA (1)...(19): siRNA sense strand
gcaugaaggggaaggccaa

SEQ ID NO: 2371937 - RNA, 19 nt, Homo sapiens
  misc_RNA (1)...(19): siRNA sense strand
uguggaagaucaagcgcau

SEQ ID NO: 2371938 - RNA, 19 nt, Homo sapiens
  misc_RNA (1)...(19): siRNA sense strand
guggaugccuuucggguca

SEQ ID NO: 2371939 - RNA, 19 nt, Homo sapiens
  misc_RNA (1)...(19): siRNA sense strand
agcaagagcgggaagcaau

SEQ ID NO: 2371940 - RNA, 19 nt, Homo sapiens
  misc_RNA (1)...(19): siRNA sense strand
agauggagaguuugagcuu

SEQ ID NO: 2371941 - RNA, 19 nt, Homo sapiens
  misc_RNA (1)...(19): siRNA sense strand
caaaagaagagcagucaca

SEQ ID NO: 2371942 - RNA, 19 nt, Homo sapiens
  misc_RNA (1)...(19): siRNA sense strand
aagcaagagcgggaagcaa

SEQ ID NO: 2371943 - RNA, 19 nt, Homo sapiens
  misc_RNA (1)...(19): siRNA sense strand
aguuugggaugaaugacaa

SEQ ID NO: 2371944 - RNA, 19 nt, Homo sapiens
  misc_RNA (1)...(19): siRNA sense strand
uguuugaaccgaagcugaa

SEQ ID NO: 2371945 - RNA, 19 nt, Homo sapiens
  misc_RNA (1)...(19): siRNA sense strand
ccuccaaguacgugcucua

SEQ ID NO: 2371946 - RNA, 19 nt, Homo sapiens
  misc_RNA (1)...(19): siRNA sense strand
acgacgaggacgaggacga

SEQ ID NO: 2371947 - RNA, 19 nt, Homo sapiens
  misc_RNA (1)...(19): siRNA sense strand
acgaggacgacgaggacga

SEQ ID NO: 2371948 - RNA, 19 nt, Homo sapiens
  misc_RNA (1)...(19): siRNA sense strand
ccuccaaguacgugcucua

SEQ ID NO: 2371949 - RNA, 19 nt, Homo sapiens
  misc_RNA (1)...(19): siRNA sense strand
acgacgaggacgaggacga

SEQ ID NO: 2371950 - RNA, 19 nt, Homo sapiens
  misc_RNA (1)...(19): siRNA sense strand
acgaggacgacgaggacga

SEQ ID NO: 2371951 - RNA, 19 nt, Homo sapiens
  misc_RNA (1)...(19): siRNA sense strand
ccaacgaggucaugggcua

SEQ ID NO: 2371952 - RNA, 19 nt, Homo sapiens
  misc_RNA (1)...(19): siRNA sense strand
ccaucagccuggaccgcua

SEQ ID NO: 2371953 - RNA, 19 nt, Homo sapiens
  misc_RNA (1)...(19): siRNA sense strand
aggcuuggugcgagaucua

SEQ ID NO: 2371954 - RNA, 19 nt, Homo sapiens
  misc_RNA (1)...(19): siRNA sense strand
gcuacugguacuucggcaa

SEQ ID NO: 2371955 - RNA, 19 nt, Homo sapiens
  misc_RNA (1)...(19): siRNA sense strand
gccaaaggauuccgggaga

SEQ ID NO: 2371956 - RNA, 19 nt, Homo sapiens
  misc_RNA (1)...(19): siRNA sense strand
auaaggaagcugaaggaca

SEQ ID NO: 2371957 - RNA, 19 nt, Homo sapiens
  misc_RNA (1)...(19): siRNA sense strand
ggugaacgacggagagcca

SEQ ID NO: 2371958 - RNA, 19 nt, Homo sapiens
  misc_RNA (1)...(19): siRNA sense strand
ugcauaucguugaggugaa

SEQ ID NO: 2371959 - RNA, 19 nt, Homo sapiens
  misc_RNA (1)...(19): siRNA sense strand
gguccaaguuuaaucagca

SEQ ID NO: 2371960 - RNA, 19 nt, Homo sapiens
  misc_RNA (1)...(19): siRNA sense strand
ggaucaaaggauggagaaa

SEQ ID NO: 2371961 - RNA, 19 nt, Homo sapiens
  misc_RNA (1)...(19): siRNA sense strand
uggcaaugcaacugacuua

SEQ ID NO: 2371962 - RNA, 19 nt, Homo sapiens
  misc_RNA (1)...(19): siRNA sense strand
ccauagaugaagaugaaga

SEQ ID NO: 2371963 - RNA, 19 nt, Homo sapiens
  misc_RNA (1)...(19): siRNA sense strand
cuaugaaggaguugcguau

SEQ ID NO: 2371964 - RNA, 19 nt, Homo sapiens
  misc_RNA (1)...(19): siRNA sense strand
gccaaagacuacauggaga

SEQ ID NO: 2371965 - RNA, 19 nt, Homo sapiens
  misc_RNA (1)...(19): siRNA sense strand
agaacuacccauagaugaa

SEQ ID NO: 2371966 - RNA, 19 nt, Homo sapiens
  misc_RNA (1)...(19): siRNA sense strand
gauacuggcuacagcgaga

SEQ ID NO: 2371967 - RNA, 19 nt, Homo sapiens
  misc_RNA (1)...(19): siRNA sense strand
aagacuacauggagaggau

SEQ ID NO: 2371968 - RNA, 19 nt, Homo sapiens
  misc_RNA (1)...(19): siRNA sense strand
gagacauggccaaagacua

SEQ ID NO: 2371969 - RNA, 19 nt, Homo sapiens
  misc_RNA (1)...(19): siRNA sense strand
aaaccgaagggcaggcaaa

SEQ ID NO: 2371970 - RNA, 19 nt, Homo sapiens
  misc_RNA (1)...(19): siRNA sense strand
ggacaggcacggaugguga

SEQ ID NO: 2371971 - RNA, 19 nt, Homo sapiens
  misc_RNA (1)...(19): siRNA sense strand
cagccuaguugguugguga

SEQ ID NO: 2371972 - RNA, 19 nt, Homo sapiens
  misc_RNA (1)...(19): siRNA sense strand
cauagaugaagaugaagaa

SEQ ID NO: 2371973 - RNA, 19 nt, Homo sapiens
  misc_RNA (1)...(19): siRNA sense strand
cuuaugacuucuuguacaa

SEQ ID NO: 2371974 - RNA, 19 nt, Homo sapiens
  misc_RNA (1)...(19): siRNA sense strand
gcguaauggcagugguaac

SEQ ID NO: 2371975 - RNA, 19 nt, Homo sapiens
  misc_RNA (1)...(19): siRNA sense strand
cggaacacagcuagcuuua

SEQ ID NO: 2371976 - RNA, 19 nt, Homo sapiens
  misc_RNA (1)...(19): siRNA sense strand
gcauugucccugaggugaa

SEQ ID NO: 2371977 - RNA, 19 nt, Homo sapiens
  misc_RNA (1)...(19): siRNA sense strand
gaaagaugcuccuugggau

SEQ ID NO: 2371978 - RNA, 19 nt, Homo sapiens
  misc_RNA (1)...(19): siRNA sense strand
ugccaaugccucaggguau

SEQ ID NO: 2371979 - RNA, 19 nt, Homo sapiens
  misc_RNA (1)...(19): siRNA sense strand
cagcaacagcagcagcaaa

SEQ ID NO: 2371980 - RNA, 19 nt, Homo sapiens
  misc_RNA (1)...(19): siRNA sense strand
uguacaacuaccugagcaa

SEQ ID NO: 2371981 - RNA, 19 nt, Homo sapiens
  misc_RNA (1)...(19): siRNA sense strand
gaggagagucccuuggaga

SEQ ID NO: 2371982 - RNA, 19 nt, Homo sapiens
  misc_RNA (1)...(19): siRNA sense strand
gcuauaaauuuguggaugc

SEQ ID NO: 2371983 - RNA, 19 nt, Homo sapiens
  misc_RNA (1)...(19): siRNA sense strand
cuacagugcccgcuggaau

SEQ ID NO: 2371984 - RNA, 19 nt, Homo sapiens
  misc_RNA (1)...(19): siRNA sense strand
ggcuacagcgagaaagcaa

SEQ ID NO: 2371985 - RNA, 19 nt, Homo sapiens
  misc_RNA (1)...(19): siRNA sense strand
cgggacaaacuaugugaau

SEQ ID NO: 2371986 - RNA, 19 nt, Homo sapiens
  misc_RNA (1)...(19): siRNA sense strand
acgagaacccagaaguuau

SEQ ID NO: 2371987 - RNA, 19 nt, Homo sapiens
  misc_RNA (1)...(19): siRNA sense strand
guaugauggcagcuugaaa

SEQ ID NO: 2371988 - RNA, 19 nt, Homo sapiens
  misc_RNA (1)...(19): siRNA sense strand
accaaauacaccugggaga

SEQ ID NO: 2371989 - RNA, 19 nt, Homo sapiens
  misc_RNA (1)...(19): siRNA sense strand
ggguauauguaugaaacuu

SEQ ID NO: 2371990 - RNA, 19 nt, Homo sapiens
  misc_RNA (1)...(19): siRNA sense strand
cauugaagcccgagacaug

SEQ ID NO: 2371991 - RNA, 19 nt, Homo sapiens
  misc_RNA (1)...(19): siRNA sense strand
gguugcagcagaggagaaa

SEQ ID NO: 2371992 - RNA, 19 nt, Homo sapiens
  misc_RNA (1)...(19): siRNA sense strand
cugcuauuguggaacagaa

SEQ ID NO: 2371993 - RNA, 19 nt, Homo sapiens
  misc_RNA (1)...(19): siRNA sense strand
cagaaguggcggagcugca

SEQ ID NO: 2371994 - RNA, 19 nt, Homo sapiens
  misc_RNA (1)...(19): siRNA sense strand
ugaagaaaugaaagaccuu

SEQ ID NO: 2371995 - RNA, 19 nt, Homo sapiens
  misc_RNA (1)...(19): siRNA sense strand
guucccaaucacaguguua

SEQ ID NO: 2371996 - RNA, 19 nt, Homo sapiens
  misc_RNA (1)...(19): siRNA sense strand
ccucaggguauauguauga

SEQ ID NO: 2371997 - RNA, 19 nt, Homo sapiens
  misc_RNA (1)...(19): siRNA sense strand
acuucauacaggagaggau

SEQ ID NO: 2371998 - RNA, 19 nt, Homo sapiens
  misc_RNA (1)...(19): siRNA sense strand
uugaggagacugugguaga

SEQ ID NO: 2371999 - RNA, 19 nt, Homo sapiens
  misc_RNA (1)...(19): siRNA sense strand
agacauggccaaagacuac

SEQ ID NO: 2372000 - RNA, 19 nt, Homo sapiens
  misc_RNA (1)...(19): siRNA sense strand
ugaccaaaucagaaggaac

SEQ ID NO: 2372001 - RNA, 19 nt, Homo sapiens
  misc_RNA (1)...(19): siRNA sense strand
ccgaggagaagguguggga

SEQ ID NO: 2372002 - RNA, 19 nt, Homo sapiens
  misc_RNA (1)...(19): siRNA sense strand
ccaccaacuguauggcuuu

SEQ ID NO: 2372003 - RNA, 19 nt, Homo sapiens
  misc_RNA (1)...(19): siRNA sense strand
ugguugcagcagaggagaa

SEQ ID NO: 2372004 - RNA, 19 nt, Homo sapiens
  misc_RNA (1)...(19): siRNA sense strand
agacugugguagauggugu

SEQ ID NO: 2372005 - RNA, 19 nt, Homo sapiens
  misc_RNA (1)...(19): siRNA sense strand
ggauggacgauacuggcua

SEQ ID NO: 2372006 - RNA, 19 nt, Homo sapiens
  misc_RNA (1)...(19): siRNA sense strand
ggaagagcguugugagcca

SEQ ID NO: 2372007 - RNA, 19 nt, Homo sapiens
  misc_RNA (1)...(19): siRNA sense strand
cuagagaagcacuggaaga

SEQ ID NO: 2372008 - RNA, 19 nt, Homo sapiens
  misc_RNA (1)...(19): siRNA sense strand
acacaaacaaugaagccua

SEQ ID NO: 2372009 - RNA, 19 nt, Homo sapiens
  misc_RNA (1)...(19): siRNA sense strand
ugauauaacaauuggacca

SEQ ID NO: 2372010 - RNA, 19 nt, Homo sapiens
  misc_RNA (1)...(19): siRNA sense strand
uugaagaaauagacgcaau

SEQ ID NO: 2372011 - RNA, 19 nt, Homo sapiens
  misc_RNA (1)...(19): siRNA sense strand
gaagagaauccgagccuca

SEQ ID NO: 2372012 - RNA, 19 nt, Homo sapiens
  misc_RNA (1)...(19): siRNA sense strand
cgguucaagcguugggaau

SEQ ID NO: 2372013 - RNA, 19 nt, Homo sapiens
  misc_RNA (1)...(19): siRNA sense strand
aguaucagcuuuaaggaga

SEQ ID NO: 2372014 - RNA, 19 nt, Homo sapiens
  misc_RNA (1)...(19): siRNA sense strand
cacaaaaucuaguggcaau

SEQ ID NO: 2372015 - RNA, 19 nt, Homo sapiens
  misc_RNA (1)...(19): siRNA sense strand
acauguauggggagaaaua

SEQ ID NO: 2372016 - RNA, 19 nt, Homo sapiens
  misc_RNA (1)...(19): siRNA sense strand
cagaauauggggaaaacua

SEQ ID NO: 2372017 - RNA, 19 nt, Homo sapiens
  misc_RNA (1)...(19): siRNA sense strand
gucuuaaaggacugguaaa

SEQ ID NO: 2372018 - RNA, 19 nt, Homo sapiens
  misc_RNA (1)...(19): siRNA sense strand
ccccaaaccagaagagaau

SEQ ID NO: 2372019 - RNA, 19 nt, Homo sapiens
  misc_RNA (1)...(19): siRNA sense strand
cugaaagaguuuugucauu

SEQ ID NO: 2372020 - RNA, 19 nt, Homo sapiens
  misc_RNA (1)...(19): siRNA sense strand
acauacaguuuaagaucca

SEQ ID NO: 2372021 - RNA, 19 nt, Homo sapiens
  misc_RNA (1)...(19): siRNA sense strand
gcuugcuauuucaggcuua

SEQ ID NO: 2372022 - RNA, 19 nt, Homo sapiens
  misc_RNA (1)...(19): siRNA sense strand
gagucaaauacgucacgaa

SEQ ID NO: 2372023 - RNA, 19 nt, Homo sapiens
  misc_RNA (1)...(19): siRNA sense strand
gggguaaaguacacaaaca

SEQ ID NO: 2372024 - RNA, 19 nt, Homo sapiens
  misc_RNA (1)...(19): siRNA sense strand
gccauuuaaaggagucaaa

SEQ ID NO: 2372025 - RNA, 19 nt, Homo sapiens
  misc_RNA (1)...(19): siRNA sense strand
ugccaaaaguugugcugaa

SEQ ID NO: 2372026 - RNA, 19 nt, Homo sapiens
  misc_RNA (1)...(19): siRNA sense strand
aagcagaauauggggaaaa

SEQ ID NO: 2372027 - RNA, 19 nt, Homo sapiens
  misc_RNA (1)...(19): siRNA sense strand
gcguugggaaucugaaaga

SEQ ID NO: 2372028 - RNA, 19 nt, Homo sapiens
  misc_RNA (1)...(19): siRNA sense strand
caaaaguugugcugaacau

SEQ ID NO: 2372029 - RNA, 19 nt, Homo sapiens
  misc_RNA (1)...(19): siRNA sense strand
ucuuaaaggacugguaaau

SEQ ID NO: 2372030 - RNA, 19 nt, Homo sapiens
  misc_RNA (1)...(19): siRNA sense strand
gaggcugcaauuaaggaua

SEQ ID NO: 2372031 - RNA, 19 nt, Homo sapiens
  misc_RNA (1)...(19): siRNA sense strand
ugggaaucugaaagaguuu

SEQ ID NO: 2372032 - RNA, 19 nt, Homo sapiens
  misc_RNA (1)...(19): siRNA sense strand
ggggagaaauauaagccau

SEQ ID NO: 2372033 - RNA, 19 nt, Homo sapiens
  misc_RNA (1)...(19): siRNA sense strand
uggagaaauggcuggcuaa

SEQ ID NO: 2372034 - RNA, 19 nt, Homo sapiens
  misc_RNA (1)...(19): siRNA sense strand
aggugaaagauguggcuga

SEQ ID NO: 2372035 - RNA, 19 nt, Homo sapiens
  misc_RNA (1)...(19): siRNA sense strand
gugcagcauuccagcgaga

SEQ ID NO: 2372036 - RNA, 19 nt, Homo sapiens
  misc_RNA (1)...(19): siRNA sense strand
caugagaguuugaggcuuc

SEQ ID NO: 2372037 - RNA, 19 nt, Homo sapiens
  misc_RNA (1)...(19): siRNA sense strand
uuggagaaauggcuggcua

SEQ ID NO: 2372038 - RNA, 19 nt, Homo sapiens
  misc_RNA (1)...(19): siRNA sense strand
ggucugaagaauacaccau

SEQ ID NO: 2372039 - RNA, 19 nt, Homo sapiens
  misc_RNA (1)...(19): siRNA sense strand
caguagugguggcgguucu

SEQ ID NO: 2372040 - RNA, 19 nt, Homo sapiens
  misc_RNA (1)...(19): siRNA sense strand
cgaaauggaaauuggccua

SEQ ID NO: 2372041 - RNA, 19 nt, Homo sapiens
  misc_RNA (1)...(19): siRNA sense strand
uggugaagggagugaacaa

SEQ ID NO: 2372042 - RNA, 19 nt, Homo sapiens
  misc_RNA (1)...(19): siRNA sense strand
gaguguauaugguagggaa

SEQ ID NO: 2372043 - RNA, 19 nt, Homo sapiens
  misc_RNA (1)...(19): siRNA sense strand
aggcaaaacaagcgaagaa

SEQ ID NO: 2372044 - RNA, 19 nt, Homo sapiens
  misc_RNA (1)...(19): siRNA sense strand
ccgucauggugauggugaa

SEQ ID NO: 2372045 - RNA, 19 nt, Homo sapiens
  misc_RNA (1)...(19): siRNA sense strand
auuaggaagacaaggacua

SEQ ID NO: 2372046 - RNA, 19 nt, Homo sapiens
  misc_RNA (1)...(19): siRNA sense strand
augaaauugggaagcguua

SEQ ID NO: 2372047 - RNA, 19 nt, Homo sapiens
  misc_RNA (1)...(19): siRNA sense strand
caggacucgcaguggguaa

SEQ ID NO: 2372048 - RNA, 19 nt, Homo sapiens
  misc_RNA (1)...(19): siRNA sense strand
cagugaggaaagaguguau

SEQ ID NO: 2372049 - RNA, 19 nt, Homo sapiens
  misc_RNA (1)...(19): siRNA sense strand
cugcauuguccaugggcuu

SEQ ID NO: 2372050 - RNA, 19 nt, Homo sapiens
  misc_RNA (1)...(19): siRNA sense strand
uggugauggugaagggagu

SEQ ID NO: 2372051 - RNA, 19 nt, Homo sapiens
  misc_RNA (1)...(19): siRNA sense strand
cgucauaagcaucuagcca

SEQ ID NO: 2372052 - RNA, 19 nt, Homo sapiens
  misc_RNA (1)...(19): siRNA sense strand
gugggaaugcagugguaga

SEQ ID NO: 2372053 - RNA, 19 nt, Homo sapiens
  misc_RNA (1)...(19): siRNA sense strand
uggccuuggcugugauuau

SEQ ID NO: 2372054 - RNA, 19 nt, Homo sapiens
  misc_RNA (1)...(19): siRNA sense strand
ugggaagcguuauggggaa

SEQ ID NO: 2372055 - RNA, 19 nt, Homo sapiens
  misc_RNA (1)...(19): siRNA sense strand
auaugguagggaaggcaaa

SEQ ID NO: 2372056 - RNA, 19 nt, Homo sapiens
  misc_RNA (1)...(19): siRNA sense strand
augcagugguagaguuagu

SEQ ID NO: 2372057 - RNA, 19 nt, Homo sapiens
  misc_RNA (1)...(19): siRNA sense strand
ccgaggagaugaagggauc

SEQ ID NO: 2372058 - RNA, 19 nt, Homo sapiens
  misc_RNA (1)...(19): siRNA sense strand
cuggagagagauagcaaga

SEQ ID NO: 2372059 - RNA, 19 nt, Homo sapiens
  misc_RNA (1)...(19): siRNA sense strand
aaugagcuggagagagaua

SEQ ID NO: 2372060 - RNA, 19 nt, Homo sapiens
  misc_RNA (1)...(19): siRNA sense strand
ggaaagccuugaagcggca

SEQ ID NO: 2372061 - RNA, 19 nt, Homo sapiens
  misc_RNA (1)...(19): siRNA sense strand
aggaggaagaugaggacga

SEQ ID NO: 2372062 - RNA, 19 nt, Homo sapiens
  misc_RNA (1)...(19): siRNA sense strand
acuuugagcugguggucau

SEQ ID NO: 2372063 - RNA, 19 nt, Homo sapiens
  misc_RNA (1)...(19): siRNA sense strand
cccaagaagcgcaacgaga

SEQ ID NO: 2372064 - RNA, 19 nt, Homo sapiens
  misc_RNA (1)...(19): siRNA sense strand
aggauguggaugugggcuu

SEQ ID NO: 2372065 - RNA, 19 nt, Homo sapiens
  misc_RNA (1)...(19): siRNA sense strand
ccaagauggccaaacccaa

SEQ ID NO: 2372066 - RNA, 19 nt, Homo sapiens
  misc_RNA (1)...(19): siRNA sense strand
gcugcugccaggaggaaga

SEQ ID NO: 2372067 - RNA, 19 nt, Homo sapiens
  misc_RNA (1)...(19): siRNA sense strand
aggaggaagaugaggacga

SEQ ID NO: 2372068 - RNA, 19 nt, Homo sapiens
  misc_RNA (1)...(19): siRNA sense strand
acuuugagcugguggucau

SEQ ID NO: 2372069 - RNA, 19 nt, Homo sapiens
  misc_RNA (1)...(19): siRNA sense strand
cccaagaagcgcaacgaga

SEQ ID NO: 2372070 - RNA, 19 nt, Homo sapiens
  misc_RNA (1)...(19): siRNA sense strand
aggauguggaugugggcuu

SEQ ID NO: 2372071 - RNA, 19 nt, Homo sapiens
  misc_RNA (1)...(19): siRNA sense strand
ccaagauggccaaacccaa

SEQ ID NO: 2372072 - RNA, 19 nt, Homo sapiens
  misc_RNA (1)...(19): siRNA sense strand
gcugcugccaggaggaaga

SEQ ID NO: 2372073 - RNA, 19 nt, Homo sapiens
  misc_RNA (1)...(19): siRNA sense strand
aagaagaagaagagacgaa

SEQ ID NO: 2372074 - RNA, 19 nt, Homo sapiens
  misc_RNA (1)...(19): siRNA sense strand
agauaaagagucagcgaau

SEQ ID NO: 2372075 - RNA, 19 nt, Homo sapiens
  misc_RNA (1)...(19): siRNA sense strand
ugaacaaagaagaagaaga

SEQ ID NO: 2372076 - RNA, 19 nt, Homo sapiens
  misc_RNA (1)...(19): siRNA sense strand
ugaugaaggaaaugcuaaa

SEQ ID NO: 2372077 - RNA, 19 nt, Homo sapiens
  misc_RNA (1)...(19): siRNA sense strand
caguggaaggauaagauaa

SEQ ID NO: 2372078 - RNA, 19 nt, Homo sapiens
  misc_RNA (1)...(19): siRNA sense strand
aggauguagaagugaagaa

SEQ ID NO: 2372079 - RNA, 19 nt, Homo sapiens
  misc_RNA (1)...(19): siRNA sense strand
cugaaugagaacacguuaa

SEQ ID NO: 2372080 - RNA, 19 nt, Homo sapiens
  misc_RNA (1)...(19): siRNA sense strand
gggaaacauuacugggaag

SEQ ID NO: 2372081 - RNA, 19 nt, Homo sapiens
  misc_RNA (1)...(19): siRNA sense strand
auaccauugaugaaggaaa

SEQ ID NO: 2372082 - RNA, 19 nt, Homo sapiens
  misc_RNA (1)...(19): siRNA sense strand
ggaucgugggacugggaau

SEQ ID NO: 2372083 - RNA, 19 nt, Homo sapiens
  misc_RNA (1)...(19): siRNA sense strand
uggaaggauaagauaaaga

SEQ ID NO: 2372084 - RNA, 19 nt, Homo sapiens
  misc_RNA (1)...(19): siRNA sense strand
guguugaccaggagugaga

SEQ ID NO: 2372085 - RNA, 19 nt, Homo sapiens
  misc_RNA (1)...(19): siRNA sense strand
aguugagaguagagauagu

SEQ ID NO: 2372086 - RNA, 19 nt, Homo sapiens
  misc_RNA (1)...(19): siRNA sense strand
gagacgaagaagaagcuga

SEQ ID NO: 2372087 - RNA, 19 nt, Homo sapiens
  misc_RNA (1)...(19): siRNA sense strand
agggaaacauuacugggaa

SEQ ID NO: 2372088 - RNA, 19 nt, Homo sapiens
  misc_RNA (1)...(19): siRNA sense strand
acgaggccuucgagagcua

SEQ ID NO: 2372089 - RNA, 19 nt, Homo sapiens
  misc_RNA (1)...(19): siRNA sense strand
gugaagacagugugccaga

SEQ ID NO: 2372090 - RNA, 19 nt, Homo sapiens
  misc_RNA (1)...(19): siRNA sense strand
gccagauaccauugaugaa

SEQ ID NO: 2372091 - RNA, 19 nt, Homo sapiens
  misc_RNA (1)...(19): siRNA sense strand
cugcuuuuguagagagauu

SEQ ID NO: 2372092 - RNA, 19 nt, Homo sapiens
  misc_RNA (1)...(19): siRNA sense strand
cugaggacauccaggagga

SEQ ID NO: 2372093 - RNA, 19 nt, Homo sapiens
  misc_RNA (1)...(19): siRNA sense strand
ggcuguaaaccuagcugaa

SEQ ID NO: 2372094 - RNA, 19 nt, Homo sapiens
  misc_RNA (1)...(19): siRNA sense strand
cuucuuaagucucagcgua

SEQ ID NO: 2372095 - RNA, 19 nt, Homo sapiens
  misc_RNA (1)...(19): siRNA sense strand
gaaggaaaugcuaaagcga

SEQ ID NO: 2372096 - RNA, 19 nt, Homo sapiens
  misc_RNA (1)...(19): siRNA sense strand
agcguaaucucguggccaa

SEQ ID NO: 2372097 - RNA, 19 nt, Homo sapiens
  misc_RNA (1)...(19): siRNA sense strand
acaaagaagaagaagagac

SEQ ID NO: 2372098 - RNA, 19 nt, Homo sapiens
  misc_RNA (1)...(19): siRNA sense strand
aggugaagacagugugcca

SEQ ID NO: 2372099 - RNA, 19 nt, Homo sapiens
  misc_RNA (1)...(19): siRNA sense strand
cgggaggacgucaugggaa

SEQ ID NO: 2372100 - RNA, 19 nt, Homo sapiens
  misc_RNA (1)...(19): siRNA sense strand
aagaagaagaagagacgaa

SEQ ID NO: 2372101 - RNA, 19 nt, Homo sapiens
  misc_RNA (1)...(19): siRNA sense strand
agauaaagagucagcgaau

SEQ ID NO: 2372102 - RNA, 19 nt, Homo sapiens
  misc_RNA (1)...(19): siRNA sense strand
ugaacaaagaagaagaaga

SEQ ID NO: 2372103 - RNA, 19 nt, Homo sapiens
  misc_RNA (1)...(19): siRNA sense strand
ugaugaaggaaaugcuaaa

SEQ ID NO: 2372104 - RNA, 19 nt, Homo sapiens
  misc_RNA (1)...(19): siRNA sense strand
caguggaaggauaagauaa

SEQ ID NO: 2372105 - RNA, 19 nt, Homo sapiens
  misc_RNA (1)...(19): siRNA sense strand
aggauguagaagugaagaa

SEQ ID NO: 2372106 - RNA, 19 nt, Homo sapiens
  misc_RNA (1)...(19): siRNA sense strand
cugaaugagaacacguuaa

SEQ ID NO: 2372107 - RNA, 19 nt, Homo sapiens
  misc_RNA (1)...(19): siRNA sense strand
gggaaacauuacugggaag

SEQ ID NO: 2372108 - RNA, 19 nt, Homo sapiens
  misc_RNA (1)...(19): siRNA sense strand
auaccauugaugaaggaaa

SEQ ID NO: 2372109 - RNA, 19 nt, Homo sapiens
  misc_RNA (1)...(19): siRNA sense strand
ggaucgugggacugggaau

SEQ ID NO: 2372110 - RNA, 19 nt, Homo sapiens
  misc_RNA (1)...(19): siRNA sense strand
uggaaggauaagauaaaga

SEQ ID NO: 2372111 - RNA, 19 nt, Homo sapiens
  misc_RNA (1)...(19): siRNA sense strand
guguugaccaggagugaga

SEQ ID NO: 2372112 - RNA, 19 nt, Homo sapiens
  misc_RNA (1)...(19): siRNA sense strand
aguugagaguagagauagu

SEQ ID NO: 2372113 - RNA, 19 nt, Homo sapiens
  misc_RNA (1)...(19): siRNA sense strand
gagacgaagaagaagcuga

SEQ ID NO: 2372114 - RNA, 19 nt, Homo sapiens
  misc_RNA (1)...(19): siRNA sense strand
agggaaacauuacugggaa

SEQ ID NO: 2372115 - RNA, 19 nt, Homo sapiens
  misc_RNA (1)...(19): siRNA sense strand
acgaggccuucgagagcua

SEQ ID NO: 2372116 - RNA, 19 nt, Homo sapiens
  misc_RNA (1)...(19): siRNA sense strand
gugaagacagugugccaga

SEQ ID NO: 2372117 - RNA, 19 nt, Homo sapiens
  misc_RNA (1)...(19): siRNA sense strand
gccagauaccauugaugaa

SEQ ID NO: 2372118 - RNA, 19 nt, Homo sapiens
  misc_RNA (1)...(19): siRNA sense strand
cugcuuuuguagagagauu

SEQ ID NO: 2372119 - RNA, 19 nt, Homo sapiens
  misc_RNA (1)...(19): siRNA sense strand
cugaggacauccaggagga

SEQ ID NO: 2372120 - RNA, 19 nt, Homo sapiens
  misc_RNA (1)...(19): siRNA sense strand
ggcuguaaaccuagcugaa

SEQ ID NO: 2372121 - RNA, 19 nt, Homo sapiens
  misc_RNA (1)...(19): siRNA sense strand
cuucuuaagucucagcgua

SEQ ID NO: 2372122 - RNA, 19 nt, Homo sapiens
  misc_RNA (1)...(19): siRNA sense strand
gaaggaaaugcuaaagcga

SEQ ID NO: 2372123 - RNA, 19 nt, Homo sapiens
  misc_RNA (1)...(19): siRNA sense strand
agcguaaucucguggccaa

SEQ ID NO: 2372124 - RNA, 19 nt, Homo sapiens
  misc_RNA (1)...(19): siRNA sense strand
acaaagaagaagaagagac

SEQ ID NO: 2372125 - RNA, 19 nt, Homo sapiens
  misc_RNA (1)...(19): siRNA sense strand
aggugaagacagugugcca

SEQ ID NO: 2372126 - RNA, 19 nt, Homo sapiens
  misc_RNA (1)...(19): siRNA sense strand
cgggaggacgucaugggaa

SEQ ID NO: 2372127 - RNA, 19 nt, Homo sapiens
  misc_RNA (1)...(19): siRNA sense strand
ccaucaacuuccagccaaa

SEQ ID NO: 2372128 - RNA, 19 nt, Homo sapiens
  misc_RNA (1)...(19): siRNA sense strand
acaagaaagcaguggaguu

SEQ ID NO: 2372129 - RNA, 19 nt, Homo sapiens
  misc_RNA (1)...(19): siRNA sense strand
gcacaagaccaguugcaca

SEQ ID NO: 2372130 - RNA, 19 nt, Homo sapiens
  misc_RNA (1)...(19): siRNA sense strand
guuaaagaucccaaaucaa

SEQ ID NO: 2372131 - RNA, 19 nt, Homo sapiens
  misc_RNA (1)...(19): siRNA sense strand
acucugagaugguggagau

SEQ ID NO: 2372132 - RNA, 19 nt, Homo sapiens
  misc_RNA (1)...(19): siRNA sense strand
aucaggagauggagaagaa

SEQ ID NO: 2372133 - RNA, 19 nt, Homo sapiens
  misc_RNA (1)...(19): siRNA sense strand
acaaccagggcgagaagaa

SEQ ID NO: 2372134 - RNA, 19 nt, Homo sapiens
  misc_RNA (1)...(19): siRNA sense strand
cacaagaccaguugcacaa

SEQ ID NO: 2372135 - RNA, 19 nt, Homo sapiens
  misc_RNA (1)...(19): siRNA sense strand
uggcaguggcucugaccaa

SEQ ID NO: 2372136 - RNA, 19 nt, Homo sapiens
  misc_RNA (1)...(19): siRNA sense strand
gagauggagaagaaaguca

SEQ ID NO: 2372137 - RNA, 19 nt, Homo sapiens
  misc_RNA (1)...(19): siRNA sense strand
uggagggagacuuggacaa

SEQ ID NO: 2372138 - RNA, 19 nt, Homo sapiens
  misc_RNA (1)...(19): siRNA sense strand
uucaagagacucagggauu

SEQ ID NO: 2372139 - RNA, 19 nt, Homo sapiens
  misc_RNA (1)...(19): siRNA sense strand
gaauguguuucuuuggcaa

SEQ ID NO: 2372140 - RNA, 19 nt, Homo sapiens
  misc_RNA (1)...(19): siRNA sense strand
auuugaacaucuuggcaau

SEQ ID NO: 2372141 - RNA, 19 nt, Homo sapiens
  misc_RNA (1)...(19): siRNA sense strand
cagaaagauugggagauca

SEQ ID NO: 2372142 - RNA, 19 nt, Homo sapiens
  misc_RNA (1)...(19): siRNA sense strand
gauugggagaucagccaua

SEQ ID NO: 2372143 - RNA, 19 nt, Homo sapiens
  misc_RNA (1)...(19): siRNA sense strand
ccugcaaggcuguuaucaa

SEQ ID NO: 2372144 - RNA, 19 nt, Homo sapiens
  misc_RNA (1)...(19): siRNA sense strand
ccaagagagccuacgcaga

SEQ ID NO: 2372145 - RNA, 19 nt, Homo sapiens
  misc_RNA (1)...(19): siRNA sense strand
caauaucaggagauggaga

SEQ ID NO: 2372146 - RNA, 19 nt, Homo sapiens
  misc_RNA (1)...(19): siRNA sense strand
acaauagcucucuggaauu

SEQ ID NO: 2372147 - RNA, 19 nt, Homo sapiens
  misc_RNA (1)...(19): siRNA sense strand
cucaggugcuggaggaaca

SEQ ID NO: 2372148 - RNA, 19 nt, Homo sapiens
  misc_RNA (1)...(19): siRNA sense strand
agaacagcuucaagagacu

SEQ ID NO: 2372149 - RNA, 19 nt, Homo sapiens
  misc_RNA (1)...(19): siRNA sense strand
cauuugaacaucuuggcaa

SEQ ID NO: 2372150 - RNA, 19 nt, Homo sapiens
  misc_RNA (1)...(19): siRNA sense strand
ucagaacaaauaagagaga

SEQ ID NO: 2372151 - RNA, 19 nt, Homo sapiens
  misc_RNA (1)...(19): siRNA sense strand
cagccauaaccuaggaguu

SEQ ID NO: 2372152 - RNA, 19 nt, Homo sapiens
  misc_RNA (1)...(19): siRNA sense strand
aggagauggagaagaaagu

SEQ ID NO: 2372153 - RNA, 19 nt, Homo sapiens
  misc_RNA (1)...(19): siRNA sense strand
ggagaagaaagucagccua

SEQ ID NO: 2372154 - RNA, 19 nt, Homo sapiens
  misc_RNA (1)...(19): siRNA sense strand
cuggauaaguguaacccuu

SEQ ID NO: 2372155 - RNA, 19 nt, Homo sapiens
  misc_RNA (1)...(19): siRNA sense strand
uggagauggcucagaaguu

SEQ ID NO: 2372156 - RNA, 19 nt, Homo sapiens
  misc_RNA (1)...(19): siRNA sense strand
cuaucuauguccaagcauu

SEQ ID NO: 2372157 - RNA, 19 nt, Homo sapiens
  misc_RNA (1)...(19): siRNA sense strand
gauauuucgccuagaagga

SEQ ID NO: 2372158 - RNA, 19 nt, Homo sapiens
  misc_RNA (1)...(19): siRNA sense strand
ccuagaaggaaauauccaa

SEQ ID NO: 2372159 - RNA, 19 nt, Homo sapiens
  misc_RNA (1)...(19): siRNA sense strand
aaccagaaagauugggaga

SEQ ID NO: 2372160 - RNA, 19 nt, Homo sapiens
  misc_RNA (1)...(19): siRNA sense strand
cccaauaucaggagaugga

SEQ ID NO: 2372161 - RNA, 19 nt, Homo sapiens
  misc_RNA (1)...(19): siRNA sense strand
gagaagcagaacugguuga

SEQ ID NO: 2372162 - RNA, 19 nt, Homo sapiens
  misc_RNA (1)...(19): siRNA sense strand
cuuauauaaugcuggggaa

SEQ ID NO: 2372163 - RNA, 19 nt, Homo sapiens
  misc_RNA (1)...(19): siRNA sense strand
aauaucaggagauggagaa

SEQ ID NO: 2372164 - RNA, 19 nt, Homo sapiens
  misc_RNA (1)...(19): siRNA sense strand
gggcucuaaucaagcucua

SEQ ID NO: 2372165 - RNA, 19 nt, Homo sapiens
  misc_RNA (1)...(19): siRNA sense strand
uaaucaagcucuaggacag

SEQ ID NO: 2372166 - RNA, 19 nt, Homo sapiens
  misc_RNA (1)...(19): siRNA sense strand
agcuaaacucaaccagaaa

SEQ ID NO: 2372167 - RNA, 19 nt, Homo sapiens
  misc_RNA (1)...(19): siRNA sense strand
cuaaacucaaccagaaaga

SEQ ID NO: 2372168 - RNA, 19 nt, Homo sapiens
  misc_RNA (1)...(19): siRNA sense strand
ccgacugugcagaggguaa

SEQ ID NO: 2372169 - RNA, 19 nt, Homo sapiens
  misc_RNA (1)...(19): siRNA sense strand
gcaucaucgcugagaucaa

SEQ ID NO: 2372170 - RNA, 19 nt, Homo sapiens
  misc_RNA (1)...(19): siRNA sense strand
aggcugcacuggagggcua

SEQ ID NO: 2372171 - RNA, 19 nt, Homo sapiens
  misc_RNA (1)...(19): siRNA sense strand
augagaaggagcagaucaa

SEQ ID NO: 2372172 - RNA, 19 nt, Homo sapiens
  misc_RNA (1)...(19): siRNA sense strand
gcagcaaagccgaagcaga

SEQ ID NO: 2372173 - RNA, 19 nt, Homo sapiens
  misc_RNA (1)...(19): siRNA sense strand
gagcagaucaagugccuca

SEQ ID NO: 2372174 - RNA, 19 nt, Homo sapiens
  misc_RNA (1)...(19): siRNA sense strand
agaccaacaucgagcccau

SEQ ID NO: 2372175 - RNA, 19 nt, Homo sapiens
  misc_RNA (1)...(19): siRNA sense strand
uaugaggagcugagaguca

SEQ ID NO: 2372176 - RNA, 19 nt, Homo sapiens
  misc_RNA (1)...(19): siRNA sense strand
ccgcgugaggcuagaguca

SEQ ID NO: 2372177 - RNA, 19 nt, Homo sapiens
  misc_RNA (1)...(19): siRNA sense strand
cuggagggcuacaagaaaa

SEQ ID NO: 2372178 - RNA, 19 nt, Homo sapiens
  misc_RNA (1)...(19): siRNA sense strand
agaacaagcugcuggagac

SEQ ID NO: 2372179 - RNA, 19 nt, Homo sapiens
  misc_RNA (1)...(19): siRNA sense strand
agaaugaguuuguugccuu

SEQ ID NO: 2372180 - RNA, 19 nt, Homo sapiens
  misc_RNA (1)...(19): siRNA sense strand
ugaagaaggacguggacac

SEQ ID NO: 2372181 - RNA, 19 nt, Homo sapiens
  misc_RNA (1)...(19): siRNA sense strand
cagcaaagccgaagcagag

SEQ ID NO: 2372182 - RNA, 19 nt, Homo sapiens
  misc_RNA (1)...(19): siRNA sense strand
gcugcaaacuugagggugc

SEQ ID NO: 2372183 - RNA, 19 nt, Homo sapiens
  misc_RNA (1)...(19): siRNA sense strand
agaccaacgcagaggcacu

SEQ ID NO: 2372184 - RNA, 19 nt, Homo sapiens
  misc_RNA (1)...(19): siRNA sense strand
agauccuggaaaugaauaa

SEQ ID NO: 2372185 - RNA, 19 nt, Homo sapiens
  misc_RNA (1)...(19): siRNA sense strand
caucgugggcacuggugaa

SEQ ID NO: 2372186 - RNA, 19 nt, Homo sapiens
  misc_RNA (1)...(19): siRNA sense strand
cgacugugcagaggguaaa

SEQ ID NO: 2372187 - RNA, 19 nt, Homo sapiens
  misc_RNA (1)...(19): siRNA sense strand
agaucaagugccucaacaa

SEQ ID NO: 2372188 - RNA, 19 nt, Homo sapiens
  misc_RNA (1)...(19): siRNA sense strand
cuggagaccaaguggaacu

SEQ ID NO: 2372189 - RNA, 19 nt, Homo sapiens
  misc_RNA (1)...(19): siRNA sense strand
ccgagaaugucaaagccca

SEQ ID NO: 2372190 - RNA, 19 nt, Homo sapiens
  misc_RNA (1)...(19): siRNA sense strand
aagaacaagcugcuggaga

SEQ ID NO: 2372191 - RNA, 19 nt, Homo sapiens
  misc_RNA (1)...(19): siRNA sense strand
cuggaaaugaauaaacuga

SEQ ID NO: 2372192 - RNA, 19 nt, Homo sapiens
  misc_RNA (1)...(19): siRNA sense strand
agucugaucucgaggccaa

SEQ ID NO: 2372193 - RNA, 19 nt, Homo sapiens
  misc_RNA (1)...(19): siRNA sense strand
aggaugagaaggagcaaau

SEQ ID NO: 2372194 - RNA, 19 nt, Homo sapiens
  misc_RNA (1)...(19): siRNA sense strand
cgcuuuacauggaggaaau

SEQ ID NO: 2372195 - RNA, 19 nt, Homo sapiens
  misc_RNA (1)...(19): siRNA sense strand
ggaucauugcugaggucaa

SEQ ID NO: 2372196 - RNA, 19 nt, Homo sapiens
  misc_RNA (1)...(19): siRNA sense strand
cugugaagguguuggacca

SEQ ID NO: 2372197 - RNA, 19 nt, Homo sapiens
  misc_RNA (1)...(19): siRNA sense strand
gagcagaaauguaucagga

SEQ ID NO: 2372198 - RNA, 19 nt, Homo sapiens
  misc_RNA (1)...(19): siRNA sense strand
agaaguaugaagaggaagu

SEQ ID NO: 2372199 - RNA, 19 nt, Homo sapiens
  misc_RNA (1)...(19): siRNA sense strand
cagaaauguaucaggagca

SEQ ID NO: 2372200 - RNA, 19 nt, Homo sapiens
  misc_RNA (1)...(19): siRNA sense strand
uuacagaguuggagggguu

SEQ ID NO: 2372201 - RNA, 19 nt, Homo sapiens
  misc_RNA (1)...(19): siRNA sense strand
cccaaugcccagaggguga

SEQ ID NO: 2372202 - RNA, 19 nt, Homo sapiens
  misc_RNA (1)...(19): siRNA sense strand
agaagaaguaugaagagga

SEQ ID NO: 2372203 - RNA, 19 nt, Homo sapiens
  misc_RNA (1)...(19): siRNA sense strand
agaaugaguuuguggcucu

SEQ ID NO: 2372204 - RNA, 19 nt, Homo sapiens
  misc_RNA (1)...(19): siRNA sense strand
ggguuuuggugaugggaga

SEQ ID NO: 2372205 - RNA, 19 nt, Homo sapiens
  misc_RNA (1)...(19): siRNA sense strand
uggcaguggcauuggcuau

SEQ ID NO: 2372206 - RNA, 19 nt, Homo sapiens
  misc_RNA (1)...(19): siRNA sense strand
agaccaaguaugaagagau

SEQ ID NO: 2372207 - RNA, 19 nt, Homo sapiens
  misc_RNA (1)...(19): siRNA sense strand
acauacggaacgagaucaa

SEQ ID NO: 2372208 - RNA, 19 nt, Homo sapiens
  misc_RNA (1)...(19): siRNA sense strand
gagcaaaucaagacccuca

SEQ ID NO: 2372209 - RNA, 19 nt, Homo sapiens
  misc_RNA (1)...(19): siRNA sense strand
aggucaaggcccaguauga

SEQ ID NO: 2372210 - RNA, 19 nt, Homo sapiens
  misc_RNA (1)...(19): siRNA sense strand
ggcuccaggcugagaggaa

SEQ ID NO: 2372211 - RNA, 19 nt, Homo sapiens
  misc_RNA (1)...(19): siRNA sense strand
ccaaguaugaagagaugca

SEQ ID NO: 2372212 - RNA, 19 nt, Homo sapiens
  misc_RNA (1)...(19): siRNA sense strand
ccaaaugcaagcuggcaga

SEQ ID NO: 2372213 - RNA, 19 nt, Homo sapiens
  misc_RNA (1)...(19): siRNA sense strand
augagaaggagcaaaucaa

SEQ ID NO: 2372214 - RNA, 19 nt, Homo sapiens
  misc_RNA (1)...(19): siRNA sense strand
aguuuguggcucugaagaa

SEQ ID NO: 2372215 - RNA, 19 nt, Homo sapiens
  misc_RNA (1)...(19): siRNA sense strand
cuccaagagcagaaaugua

SEQ ID NO: 2372216 - RNA, 19 nt, Homo sapiens
  misc_RNA (1)...(19): siRNA sense strand
gcaggugacagcuggccaa

SEQ ID NO: 2372217 - RNA, 19 nt, Homo sapiens
  misc_RNA (1)...(19): siRNA sense strand
cagcuuugguagucggagu

SEQ ID NO: 2372218 - RNA, 19 nt, Homo sapiens
  misc_RNA (1)...(19): siRNA sense strand
gauagcagcuguaggcucu

SEQ ID NO: 2372219 - RNA, 19 nt, Homo sapiens
  misc_RNA (1)...(19): siRNA sense strand
augaagaggaagugguaug

SEQ ID NO: 2372220 - RNA, 19 nt, Homo sapiens
  misc_RNA (1)...(19): siRNA sense strand
gcuccaugcucaucagcga

SEQ ID NO: 2372221 - RNA, 19 nt, Homo sapiens
  misc_RNA (1)...(19): siRNA sense strand
augcagcuuucaugaacaa

SEQ ID NO: 2372222 - RNA, 19 nt, Homo sapiens
  misc_RNA (1)...(19): siRNA sense strand
gaugagaagaagaaggagu

SEQ ID NO: 2372223 - RNA, 19 nt, Homo sapiens
  misc_RNA (1)...(19): siRNA sense strand
guucugaagggaagagcau

SEQ ID NO: 2372224 - RNA, 19 nt, Homo sapiens
  misc_RNA (1)...(19): siRNA sense strand
gguuggaagaagugagcuu

SEQ ID NO: 2372225 - RNA, 19 nt, Homo sapiens
  misc_RNA (1)...(19): siRNA sense strand
gggcuguugaagaggaaau

SEQ ID NO: 2372226 - RNA, 19 nt, Homo sapiens
  misc_RNA (1)...(19): siRNA sense strand
aggcaagaguucagaccca

SEQ ID NO: 2372227 - RNA, 19 nt, Homo sapiens
  misc_RNA (1)...(19): siRNA sense strand
gcugagagcuuuagggagc

SEQ ID NO: 2372228 - RNA, 19 nt, Homo sapiens
  misc_RNA (1)...(19): siRNA sense strand
gggaggaggaggaagagga

SEQ ID NO: 2372229 - RNA, 19 nt, Homo sapiens
  misc_RNA (1)...(19): siRNA sense strand
ugaacaaugagcugggaga

SEQ ID NO: 2372230 - RNA, 19 nt, Homo sapiens
  misc_RNA (1)...(19): siRNA sense strand
aggaggaggaagaggagga

SEQ ID NO: 2372231 - RNA, 19 nt, Homo sapiens
  misc_RNA (1)...(19): siRNA sense strand
aggagaaguuggagaugcu

SEQ ID NO: 2372232 - RNA, 19 nt, Homo sapiens
  misc_RNA (1)...(19): siRNA sense strand
aguuggaacaggaggcuga

SEQ ID NO: 2372233 - RNA, 19 nt, Homo sapiens
  misc_RNA (1)...(19): siRNA sense strand
cuuccuaaaugguggccuu

SEQ ID NO: 2372234 - RNA, 19 nt, Homo sapiens
  misc_RNA (1)...(19): siRNA sense strand
aacaggaggcugagagcuu

SEQ ID NO: 2372235 - RNA, 19 nt, Homo sapiens
  misc_RNA (1)...(19): siRNA sense strand
aagaggagaaguuggagau

SEQ ID NO: 2372236 - RNA, 19 nt, Homo sapiens
  misc_RNA (1)...(19): siRNA sense strand
ggaaauuugaccagcugga

SEQ ID NO: 2372237 - RNA, 19 nt, Homo sapiens
  misc_RNA (1)...(19): siRNA sense strand
aaagaggagaaguuggaga

SEQ ID NO: 2372238 - RNA, 19 nt, Homo sapiens
  misc_RNA (1)...(19): siRNA sense strand
caggaggcugagagcuuua

SEQ ID NO: 2372239 - RNA, 19 nt, Homo sapiens
  misc_RNA (1)...(19): siRNA sense strand
cugacagccuggacaacau

SEQ ID NO: 2372240 - RNA, 19 nt, Homo sapiens
  misc_RNA (1)...(19): siRNA sense strand
ugacagagaaagaggaaau

SEQ ID NO: 2372241 - RNA, 19 nt, Homo sapiens
  misc_RNA (1)...(19): siRNA sense strand
ugauaaagauacuggcaau

SEQ ID NO: 2372242 - RNA, 19 nt, Homo sapiens
  misc_RNA (1)...(19): siRNA sense strand
aaauacaagccaagaguaa

SEQ ID NO: 2372243 - RNA, 19 nt, Homo sapiens
  misc_RNA (1)...(19): siRNA sense strand
agugaaggcuacugauaaa

SEQ ID NO: 2372244 - RNA, 19 nt, Homo sapiens
  misc_RNA (1)...(19): siRNA sense strand
cuauugaaaccgaaagaaa

SEQ ID NO: 2372245 - RNA, 19 nt, Homo sapiens
  misc_RNA (1)...(19): siRNA sense strand
gaauaguagcucuggacaa

SEQ ID NO: 2372246 - RNA, 19 nt, Homo sapiens
  misc_RNA (1)...(19): siRNA sense strand
gauuaugagaccaggacaa

SEQ ID NO: 2372247 - RNA, 19 nt, Homo sapiens
  misc_RNA (1)...(19): siRNA sense strand
aguaauaacacgagucaau

SEQ ID NO: 2372248 - RNA, 19 nt, Homo sapiens
  misc_RNA (1)...(19): siRNA sense strand
agauauagaugauggacca

SEQ ID NO: 2372249 - RNA, 19 nt, Homo sapiens
  misc_RNA (1)...(19): siRNA sense strand
cggucuacacauugaaaua

SEQ ID NO: 2372250 - RNA, 19 nt, Homo sapiens
  misc_RNA (1)...(19): siRNA sense strand
ggaaacauauacagggcuu

SEQ ID NO: 2372251 - RNA, 19 nt, Homo sapiens
  misc_RNA (1)...(19): siRNA sense strand
caacaaagcaggggaaaua

SEQ ID NO: 2372252 - RNA, 19 nt, Homo sapiens
  misc_RNA (1)...(19): siRNA sense strand
caaauuugacagagaaaga

SEQ ID NO: 2372253 - RNA, 19 nt, Homo sapiens
  misc_RNA (1)...(19): siRNA sense strand
caccaauuaaagagggaaa

SEQ ID NO: 2372254 - RNA, 19 nt, Homo sapiens
  misc_RNA (1)...(19): siRNA sense strand
ggacagggaagaacagcaa

SEQ ID NO: 2372255 - RNA, 19 nt, Homo sapiens
  misc_RNA (1)...(19): siRNA sense strand
gaagauucuggaagaguaa

SEQ ID NO: 2372256 - RNA, 19 nt, Homo sapiens
  misc_RNA (1)...(19): siRNA sense strand
gcuucacacaggaggaaua

SEQ ID NO: 2372257 - RNA, 19 nt, Homo sapiens
  misc_RNA (1)...(19): siRNA sense strand
ccacaauauucacaggauu

SEQ ID NO: 2372258 - RNA, 19 nt, Homo sapiens
  misc_RNA (1)...(19): siRNA sense strand
ggacauagaagauacaaaa

SEQ ID NO: 2372259 - RNA, 19 nt, Homo sapiens
  misc_RNA (1)...(19): siRNA sense strand
guauagaguagaugaugua

SEQ ID NO: 2372260 - RNA, 19 nt, Homo sapiens
  misc_RNA (1)...(19): siRNA sense strand
aggagaaagucuaggauac

SEQ ID NO: 2372261 - RNA, 19 nt, Homo sapiens
  misc_RNA (1)...(19): siRNA sense strand
gaggcaaauuugacagaga

SEQ ID NO: 2372262 - RNA, 19 nt, Homo sapiens
  misc_RNA (1)...(19): siRNA sense strand
ggcaaauuugacagagaaa

SEQ ID NO: 2372263 - RNA, 19 nt, Homo sapiens
  misc_RNA (1)...(19): siRNA sense strand
gaaagaggaaauaaggcaa

SEQ ID NO: 2372264 - RNA, 19 nt, Homo sapiens
  misc_RNA (1)...(19): siRNA sense strand
gguuauuaaggcugaacaa

SEQ ID NO: 2372265 - RNA, 19 nt, Homo sapiens
  misc_RNA (1)...(19): siRNA sense strand
gggaaagcacugaucgcua

SEQ ID NO: 2372266 - RNA, 19 nt, Homo sapiens
  misc_RNA (1)...(19): siRNA sense strand
gcuuacaacugaagaggca

SEQ ID NO: 2372267 - RNA, 19 nt, Homo sapiens
  misc_RNA (1)...(19): siRNA sense strand
cggaagaguucuggauaga

SEQ ID NO: 2372268 - RNA, 19 nt, Homo sapiens
  misc_RNA (1)...(19): siRNA sense strand
cgaauaguggugagagaca

SEQ ID NO: 2372269 - RNA, 19 nt, Homo sapiens
  misc_RNA (1)...(19): siRNA sense strand
agaaggauuuguaguggaa

SEQ ID NO: 2372270 - RNA, 19 nt, Homo sapiens
  misc_RNA (1)...(19): siRNA sense strand
uggaccaaauggacagaua

SEQ ID NO: 2372271 - RNA, 19 nt, Homo sapiens
  misc_RNA (1)...(19): siRNA sense strand
acggaucacuuaagagcaa

SEQ ID NO: 2372272 - RNA, 19 nt, Homo sapiens
  misc_RNA (1)...(19): siRNA sense strand
caaauagaccagagaucau

SEQ ID NO: 2372273 - RNA, 19 nt, Homo sapiens
  misc_RNA (1)...(19): siRNA sense strand
ugucauaauccaagcuaau

SEQ ID NO: 2372274 - RNA, 19 nt, Homo sapiens
  misc_RNA (1)...(19): siRNA sense strand
caacugaucgagagggaga

SEQ ID NO: 2372275 - RNA, 19 nt, Homo sapiens
  misc_RNA (1)...(19): siRNA sense strand
ggaaagcacuggacaggga

SEQ ID NO: 2372276 - RNA, 19 nt, Homo sapiens
  misc_RNA (1)...(19): siRNA sense strand
gcaagucgugugagguaua

SEQ ID NO: 2372277 - RNA, 19 nt, Homo sapiens
  misc_RNA (1)...(19): siRNA sense strand
ggaacagaacaguugaaau

SEQ ID NO: 2372278 - RNA, 19 nt, Homo sapiens
  misc_RNA (1)...(19): siRNA sense strand
caauaaaacaacagggcuu

SEQ ID NO: 2372279 - RNA, 19 nt, Homo sapiens
  misc_RNA (1)...(19): siRNA sense strand
aggaaaugaagaagauaca

SEQ ID NO: 2372280 - RNA, 19 nt, Homo sapiens
  misc_RNA (1)...(19): siRNA sense strand
cuugaugccugccgagaaa

SEQ ID NO: 2372281 - RNA, 19 nt, Homo sapiens
  misc_RNA (1)...(19): siRNA sense strand
guguuaaggaagaggcuca

SEQ ID NO: 2372282 - RNA, 19 nt, Homo sapiens
  misc_RNA (1)...(19): siRNA sense strand
gaguuuagauuaugaggca

SEQ ID NO: 2372283 - RNA, 19 nt, Homo sapiens
  misc_RNA (1)...(19): siRNA sense strand
guuuagauuaugaggcauu

SEQ ID NO: 2372284 - RNA, 19 nt, Homo sapiens
  misc_RNA (1)...(19): siRNA sense strand
ggagauccucagagaguuu

SEQ ID NO: 2372285 - RNA, 19 nt, Homo sapiens
  misc_RNA (1)...(19): siRNA sense strand
cagugauuguaaaggauau

SEQ ID NO: 2372286 - RNA, 19 nt, Homo sapiens
  misc_RNA (1)...(19): siRNA sense strand
cugcaagucgugugaggua

SEQ ID NO: 2372287 - RNA, 19 nt, Homo sapiens
  misc_RNA (1)...(19): siRNA sense strand
acauugaaauacuggauga

SEQ ID NO: 2372288 - RNA, 19 nt, Homo sapiens
  misc_RNA (1)...(19): siRNA sense strand
gauguauagccuugaaauu

SEQ ID NO: 2372289 - RNA, 19 nt, Homo sapiens
  misc_RNA (1)...(19): siRNA sense strand
uaaacauaguggugacaga

SEQ ID NO: 2372290 - RNA, 19 nt, Homo sapiens
  misc_RNA (1)...(19): siRNA sense strand
aggcaaauuugacagagaa

SEQ ID NO: 2372291 - RNA, 19 nt, Homo sapiens
  misc_RNA (1)...(19): siRNA sense strand
cacaaauguuucagaacuu

SEQ ID NO: 2372292 - RNA, 19 nt, Homo sapiens
  misc_RNA (1)...(19): siRNA sense strand
uguccuuguugaagagaau

SEQ ID NO: 2372293 - RNA, 19 nt, Homo sapiens
  misc_RNA (1)...(19): siRNA sense strand
uggacaacaugcugaucaa

SEQ ID NO: 2372294 - RNA, 19 nt, Homo sapiens
  misc_RNA (1)...(19): siRNA sense strand
ugcgaauaguggugagaga

SEQ ID NO: 2372295 - RNA, 19 nt, Homo sapiens
  misc_RNA (1)...(19): siRNA sense strand
ccaaauggacagauagagu

SEQ ID NO: 2372296 - RNA, 19 nt, Homo sapiens
  misc_RNA (1)...(19): siRNA sense strand
ugguagaggccuuugauau

SEQ ID NO: 2372297 - RNA, 19 nt, Homo sapiens
  misc_RNA (1)...(19): siRNA sense strand
gguauagaguagaugaugu

SEQ ID NO: 2372298 - RNA, 19 nt, Homo sapiens
  misc_RNA (1)...(19): siRNA sense strand
gggaaauaacucagucuca

SEQ ID NO: 2372299 - RNA, 19 nt, Homo sapiens
  misc_RNA (1)...(19): siRNA sense strand
ugaugaagaaagucggaau

SEQ ID NO: 2372300 - RNA, 19 nt, Homo sapiens
  misc_RNA (1)...(19): siRNA sense strand
ucaccaaggcuguggccaa

SEQ ID NO: 2372301 - RNA, 19 nt, Homo sapiens
  misc_RNA (1)...(19): siRNA sense strand
ugaccagggcugugaucaa

SEQ ID NO: 2372302 - RNA, 19 nt, Homo sapiens
  misc_RNA (1)...(19): siRNA sense strand
cagacuaccugcugccaga

SEQ ID NO: 2372303 - RNA, 19 nt, Homo sapiens
  misc_RNA (1)...(19): siRNA sense strand
gguacaaggacaaggcaau

SEQ ID NO: 2372304 - RNA, 19 nt, Homo sapiens
  misc_RNA (1)...(19): siRNA sense strand
gggaggaggucucaggcua

SEQ ID NO: 2372305 - RNA, 19 nt, Homo sapiens
  misc_RNA (1)...(19): siRNA sense strand
ugguagaagugguggaugu

SEQ ID NO: 2372306 - RNA, 19 nt, Homo sapiens
  misc_RNA (1)...(19): siRNA sense strand
guucacaauucaagagcau

SEQ ID NO: 2372307 - RNA, 19 nt, Homo sapiens
  misc_RNA (1)...(19): siRNA sense strand
auucaguggcagaggaaau

SEQ ID NO: 2372308 - RNA, 19 nt, Homo sapiens
  misc_RNA (1)...(19): siRNA sense strand
ccacuaaauauuuggucau

SEQ ID NO: 2372309 - RNA, 19 nt, Homo sapiens
  misc_RNA (1)...(19): siRNA sense strand
caggcuaccuagugaccaa

SEQ ID NO: 2372310 - RNA, 19 nt, Homo sapiens
  misc_RNA (1)...(19): siRNA sense strand
caaccugguacaaggacaa

SEQ ID NO: 2372311 - RNA, 19 nt, Homo sapiens
  misc_RNA (1)...(19): siRNA sense strand
ccugagugccaauggguau

SEQ ID NO: 2372312 - RNA, 19 nt, Homo sapiens
  misc_RNA (1)...(19): siRNA sense strand
gggcaccaacaaagcgaua

SEQ ID NO: 2372313 - RNA, 19 nt, Homo sapiens
  misc_RNA (1)...(19): siRNA sense strand
acagcaaaguccugguaga

SEQ ID NO: 2372314 - RNA, 19 nt, Homo sapiens
  misc_RNA (1)...(19): siRNA sense strand
cagcaaaguccugguagaa

SEQ ID NO: 2372315 - RNA, 19 nt, Homo sapiens
  misc_RNA (1)...(19): siRNA sense strand
auccauaaauucaggcaau

SEQ ID NO: 2372316 - RNA, 19 nt, Homo sapiens
  misc_RNA (1)...(19): siRNA sense strand
augcugagcuggugcugaa

SEQ ID NO: 2372317 - RNA, 19 nt, Homo sapiens
  misc_RNA (1)...(19): siRNA sense strand
aagcauucuagaaagguaa

SEQ ID NO: 2372318 - RNA, 19 nt, Homo sapiens
  misc_RNA (1)...(19): siRNA sense strand
aggagaaacuggaucggga

SEQ ID NO: 2372319 - RNA, 19 nt, Homo sapiens
  misc_RNA (1)...(19): siRNA sense strand
cauucgagugggaggaaaa

SEQ ID NO: 2372320 - RNA, 19 nt, Homo sapiens
  misc_RNA (1)...(19): siRNA sense strand
agguaaauccauccacuaa

SEQ ID NO: 2372321 - RNA, 19 nt, Homo sapiens
  misc_RNA (1)...(19): siRNA sense strand
cgggagauuuguuugugaa

SEQ ID NO: 2372322 - RNA, 19 nt, Homo sapiens
  misc_RNA (1)...(19): siRNA sense strand
ccuagaugacaaugacaau

SEQ ID NO: 2372323 - RNA, 19 nt, Homo sapiens
  misc_RNA (1)...(19): siRNA sense strand
ucuuauacccacugcagaa

SEQ ID NO: 2372324 - RNA, 19 nt, Homo sapiens
  misc_RNA (1)...(19): siRNA sense strand
ggaggaggucucaggcuau

SEQ ID NO: 2372325 - RNA, 19 nt, Homo sapiens
  misc_RNA (1)...(19): siRNA sense strand
cgcugagaaccauggauua

SEQ ID NO: 2372326 - RNA, 19 nt, Homo sapiens
  misc_RNA (1)...(19): siRNA sense strand
cauugaaacauacgacauu

SEQ ID NO: 2372327 - RNA, 19 nt, Homo sapiens
  misc_RNA (1)...(19): siRNA sense strand
aaacaacaguccugcgguu

SEQ ID NO: 2372328 - RNA, 19 nt, Homo sapiens
  misc_RNA (1)...(19): siRNA sense strand
ucucaagacguuucagauu

SEQ ID NO: 2372329 - RNA, 19 nt, Homo sapiens
  misc_RNA (1)...(19): siRNA sense strand
aggucaggguauuugauau

SEQ ID NO: 2372330 - RNA, 19 nt, Homo sapiens
  misc_RNA (1)...(19): siRNA sense strand
cugagcuggugcugaacaa

SEQ ID NO: 2372331 - RNA, 19 nt, Homo sapiens
  misc_RNA (1)...(19): siRNA sense strand
ugguggaugugaaugacaa

SEQ ID NO: 2372332 - RNA, 19 nt, Homo sapiens
  misc_RNA (1)...(19): siRNA sense strand
cggccuuguccauaugaaa

SEQ ID NO: 2372333 - RNA, 19 nt, Homo sapiens
  misc_RNA (1)...(19): siRNA sense strand
ccauugaaacauacgacau

SEQ ID NO: 2372334 - RNA, 19 nt, Homo sapiens
  misc_RNA (1)...(19): siRNA sense strand
gcugagaaccauggauuau

SEQ ID NO: 2372335 - RNA, 19 nt, Homo sapiens
  misc_RNA (1)...(19): siRNA sense strand
ccgcaagacgggagauuug

SEQ ID NO: 2372336 - RNA, 19 nt, Homo sapiens
  misc_RNA (1)...(19): siRNA sense strand
aggagcagccugaagucaa

SEQ ID NO: 2372337 - RNA, 19 nt, Homo sapiens
  misc_RNA (1)...(19): siRNA sense strand
aaacauacgacauugacau

SEQ ID NO: 2372338 - RNA, 19 nt, Homo sapiens
  misc_RNA (1)...(19): siRNA sense strand
ugcuaauauccgacguuaa

SEQ ID NO: 2372339 - RNA, 19 nt, Homo sapiens
  misc_RNA (1)...(19): siRNA sense strand
cggagaucuuucagucuuu

SEQ ID NO: 2372340 - RNA, 19 nt, Homo sapiens
  misc_RNA (1)...(19): siRNA sense strand
ugucagagugguuguccua

SEQ ID NO: 2372341 - RNA, 19 nt, Homo sapiens
  misc_RNA (1)...(19): siRNA sense strand
ucaaagacaaaauggagaa

SEQ ID NO: 2372342 - RNA, 19 nt, Homo sapiens
  misc_RNA (1)...(19): siRNA sense strand
gcucaaaacccagaagcaa

SEQ ID NO: 2372343 - RNA, 19 nt, Homo sapiens
  misc_RNA (1)...(19): siRNA sense strand
ugguacaaggacaaggcaa

SEQ ID NO: 2372344 - RNA, 19 nt, Homo sapiens
  misc_RNA (1)...(19): siRNA sense strand
agacgagggcaccaacaaa

SEQ ID NO: 2372345 - RNA, 19 nt, Homo sapiens
  misc_RNA (1)...(19): siRNA sense strand
cgcagaaaaucuuugcaaa

SEQ ID NO: 2372346 - RNA, 19 nt, Homo sapiens
  misc_RNA (1)...(19): siRNA sense strand
aagacaaaauggagaaauc

SEQ ID NO: 2372347 - RNA, 19 nt, Homo sapiens
  misc_RNA (1)...(19): siRNA sense strand
gauuagagggccaugacca

SEQ ID NO: 2372348 - RNA, 19 nt, Homo sapiens
  misc_RNA (1)...(19): siRNA sense strand
auuuguuugugaaggagaa

SEQ ID NO: 2372349 - RNA, 19 nt, Homo sapiens
  misc_RNA (1)...(19): siRNA sense strand
ggucaggguauuugauauc

SEQ ID NO: 2372350 - RNA, 19 nt, Homo sapiens
  misc_RNA (1)...(19): siRNA sense strand
aaauggagaaguucgacua

SEQ ID NO: 2372351 - RNA, 19 nt, Homo sapiens
  misc_RNA (1)...(19): siRNA sense strand
auccauacauuaaggcaga

SEQ ID NO: 2372352 - RNA, 19 nt, Homo sapiens
  misc_RNA (1)...(19): siRNA sense strand
ccaaagugguggcugugga

SEQ ID NO: 2372353 - RNA, 19 nt, Homo sapiens
  misc_RNA (1)...(19): siRNA sense strand
cccagaaggccaaggugaa

SEQ ID NO: 2372354 - RNA, 19 nt, Homo sapiens
  misc_RNA (1)...(19): siRNA sense strand
gcuucguggccguggugua

SEQ ID NO: 2372355 - RNA, 19 nt, Homo sapiens
  misc_RNA (1)...(19): siRNA sense strand
gcccagaaggccaagguga

SEQ ID NO: 2372356 - RNA, 19 nt, Homo sapiens
  misc_RNA (1)...(19): siRNA sense strand
caaagaggcugauugagga

SEQ ID NO: 2372357 - RNA, 19 nt, Homo sapiens
  misc_RNA (1)...(19): siRNA sense strand
acuacagaggagacaggaa

SEQ ID NO: 2372358 - RNA, 19 nt, Homo sapiens
  misc_RNA (1)...(19): siRNA sense strand
ugaccagggcuguggccua

SEQ ID NO: 2372359 - RNA, 19 nt, Homo sapiens
  misc_RNA (1)...(19): siRNA sense strand
gggcuguggccuagagaac

SEQ ID NO: 2372360 - RNA, 19 nt, Homo sapiens
  misc_RNA (1)...(19): siRNA sense strand
auuaugaagcucagagaca

SEQ ID NO: 2372361 - RNA, 19 nt, Homo sapiens
  misc_RNA (1)...(19): siRNA sense strand
gauaugagagucaggcaca

SEQ ID NO: 2372362 - RNA, 19 nt, Homo sapiens
  misc_RNA (1)...(19): siRNA sense strand
acuaacaguacgauggaca

SEQ ID NO: 2372363 - RNA, 19 nt, Homo sapiens
  misc_RNA (1)...(19): siRNA sense strand
gugggguguucuuggaaua

SEQ ID NO: 2372364 - RNA, 19 nt, Homo sapiens
  misc_RNA (1)...(19): siRNA sense strand
gcucagagacacuggcaag

SEQ ID NO: 2372365 - RNA, 19 nt, Homo sapiens
  misc_RNA (1)...(19): siRNA sense strand
cuuccaaaggauucaaauu

SEQ ID NO: 2372366 - RNA, 19 nt, Homo sapiens
  misc_RNA (1)...(19): siRNA sense strand
ccucaaaggaaagggguuu

SEQ ID NO: 2372367 - RNA, 19 nt, Homo sapiens
  misc_RNA (1)...(19): siRNA sense strand
cugaagaguuggaagcuga

SEQ ID NO: 2372368 - RNA, 19 nt, Homo sapiens
  misc_RNA (1)...(19): siRNA sense strand
uggacugggaggagagcaa

SEQ ID NO: 2372369 - RNA, 19 nt, Homo sapiens
  misc_RNA (1)...(19): siRNA sense strand
aaaucaaaggagaguguuu

SEQ ID NO: 2372370 - RNA, 19 nt, Homo sapiens
  misc_RNA (1)...(19): siRNA sense strand
agaaggaggaggaagacau

SEQ ID NO: 2372371 - RNA, 19 nt, Homo sapiens
  misc_RNA (1)...(19): siRNA sense strand
cuggagaugcugaggcaga

SEQ ID NO: 2372372 - RNA, 19 nt, Homo sapiens
  misc_RNA (1)...(19): siRNA sense strand
ugguuaauguaaaggagga

SEQ ID NO: 2372373 - RNA, 19 nt, Homo sapiens
  misc_RNA (1)...(19): siRNA sense strand
ccugagaacauacggccua

SEQ ID NO: 2372374 - RNA, 19 nt, Homo sapiens
  misc_RNA (1)...(19): siRNA sense strand
aaacugagauggugcagca

SEQ ID NO: 2372375 - RNA, 19 nt, Homo sapiens
  misc_RNA (1)...(19): siRNA sense strand
aggaaugcuagaaguguuu

SEQ ID NO: 2372376 - RNA, 19 nt, Homo sapiens
  misc_RNA (1)...(19): siRNA sense strand
gcuagacaaaggagagagu

SEQ ID NO: 2372377 - RNA, 19 nt, Homo sapiens
  misc_RNA (1)...(19): siRNA sense strand
guguggauggcgucauaaa

SEQ ID NO: 2372378 - RNA, 19 nt, Homo sapiens
  misc_RNA (1)...(19): siRNA sense strand
caggaggacgggaagguca

SEQ ID NO: 2372379 - RNA, 19 nt, Homo sapiens
  misc_RNA (1)...(19): siRNA sense strand
ggucagugauggagcugcu

SEQ ID NO: 2372380 - RNA, 19 nt, Homo sapiens
  misc_RNA (1)...(19): siRNA sense strand
aggagguugcccaggagua

SEQ ID NO: 2372381 - RNA, 19 nt, Homo sapiens
  misc_RNA (1)...(19): siRNA sense strand
agacccagucccugagaga

SEQ ID NO: 2372382 - RNA, 19 nt, Homo sapiens
  misc_RNA (1)...(19): siRNA sense strand
cugaagaguuggaagcuga

SEQ ID NO: 2372383 - RNA, 19 nt, Homo sapiens
  misc_RNA (1)...(19): siRNA sense strand
uggacugggaggagagcaa

SEQ ID NO: 2372384 - RNA, 19 nt, Homo sapiens
  misc_RNA (1)...(19): siRNA sense strand
aaaucaaaggagaguguuu

SEQ ID NO: 2372385 - RNA, 19 nt, Homo sapiens
  misc_RNA (1)...(19): siRNA sense strand
agaaggaggaggaagacau

SEQ ID NO: 2372386 - RNA, 19 nt, Homo sapiens
  misc_RNA (1)...(19): siRNA sense strand
cuggagaugcugaggcaga

SEQ ID NO: 2372387 - RNA, 19 nt, Homo sapiens
  misc_RNA (1)...(19): siRNA sense strand
ugguuaauguaaaggagga

SEQ ID NO: 2372388 - RNA, 19 nt, Homo sapiens
  misc_RNA (1)...(19): siRNA sense strand
ccugagaacauacggccua

SEQ ID NO: 2372389 - RNA, 19 nt, Homo sapiens
  misc_RNA (1)...(19): siRNA sense strand
aaacugagauggugcagca

SEQ ID NO: 2372390 - RNA, 19 nt, Homo sapiens
  misc_RNA (1)...(19): siRNA sense strand
aggaaugcuagaaguguuu

SEQ ID NO: 2372391 - RNA, 19 nt, Homo sapiens
  misc_RNA (1)...(19): siRNA sense strand
gcuagacaaaggagagagu

SEQ ID NO: 2372392 - RNA, 19 nt, Homo sapiens
  misc_RNA (1)...(19): siRNA sense strand
guguggauggcgucauaaa

SEQ ID NO: 2372393 - RNA, 19 nt, Homo sapiens
  misc_RNA (1)...(19): siRNA sense strand
caggaggacgggaagguca

SEQ ID NO: 2372394 - RNA, 19 nt, Homo sapiens
  misc_RNA (1)...(19): siRNA sense strand
ggucagugauggagcugcu

SEQ ID NO: 2372395 - RNA, 19 nt, Homo sapiens
  misc_RNA (1)...(19): siRNA sense strand
aggagguugcccaggagua

SEQ ID NO: 2372396 - RNA, 19 nt, Homo sapiens
  misc_RNA (1)...(19): siRNA sense strand
agacccagucccugagaga

SEQ ID NO: 2372397 - RNA, 19 nt, Homo sapiens
  misc_RNA (1)...(19): siRNA sense strand
cugaagaguuggaagcuga

SEQ ID NO: 2372398 - RNA, 19 nt, Homo sapiens
  misc_RNA (1)...(19): siRNA sense strand
uggacugggaggagagcaa

SEQ ID NO: 2372399 - RNA, 19 nt, Homo sapiens
  misc_RNA (1)...(19): siRNA sense strand
aaaucaaaggagaguguuu

SEQ ID NO: 2372400 - RNA, 19 nt, Homo sapiens
  misc_RNA (1)...(19): siRNA sense strand
agaaggaggaggaagacau

SEQ ID NO: 2372401 - RNA, 19 nt, Homo sapiens
  misc_RNA (1)...(19): siRNA sense strand
cuggagaugcugaggcaga

SEQ ID NO: 2372402 - RNA, 19 nt, Homo sapiens
  misc_RNA (1)...(19): siRNA sense strand
ugguuaauguaaaggagga

SEQ ID NO: 2372403 - RNA, 19 nt, Homo sapiens
  misc_RNA (1)...(19): siRNA sense strand
ccugagaacauacggccua

SEQ ID NO: 2372404 - RNA, 19 nt, Homo sapiens
  misc_RNA (1)...(19): siRNA sense strand
aaacugagauggugcagca

SEQ ID NO: 2372405 - RNA, 19 nt, Homo sapiens
  misc_RNA (1)...(19): siRNA sense strand
aggaaugcuagaaguguuu

SEQ ID NO: 2372406 - RNA, 19 nt, Homo sapiens
  misc_RNA (1)...(19): siRNA sense strand
gcuagacaaaggagagagu

SEQ ID NO: 2372407 - RNA, 19 nt, Homo sapiens
  misc_RNA (1)...(19): siRNA sense strand
guguggauggcgucauaaa

SEQ ID NO: 2372408 - RNA, 19 nt, Homo sapiens
  misc_RNA (1)...(19): siRNA sense strand
caggaggacgggaagguca

SEQ ID NO: 2372409 - RNA, 19 nt, Homo sapiens
  misc_RNA (1)...(19): siRNA sense strand
ggucagugauggagcugcu

SEQ ID NO: 2372410 - RNA, 19 nt, Homo sapiens
  misc_RNA (1)...(19): siRNA sense strand
aggagguugcccaggagua

SEQ ID NO: 2372411 - RNA, 19 nt, Homo sapiens
  misc_RNA (1)...(19): siRNA sense strand
agacccagucccugagaga

SEQ ID NO: 2372412 - RNA, 19 nt, Homo sapiens
  misc_RNA (1)...(19): siRNA sense strand
ccucuaagauggugggcga

SEQ ID NO: 2372413 - RNA, 19 nt, Homo sapiens
  misc_RNA (1)...(19): siRNA sense strand
ccaucgagcgagugaggaa

SEQ ID NO: 2372414 - RNA, 19 nt, Homo sapiens
  misc_RNA (1)...(19): siRNA sense strand
auguggagcucgugcgcaa

SEQ ID NO: 2372415 - RNA, 19 nt, Homo sapiens
  misc_RNA (1)...(19): siRNA sense strand
gcaccagccuugaggagca

SEQ ID NO: 2372416 - RNA, 19 nt, Homo sapiens
  misc_RNA (1)...(19): siRNA sense strand
acaagaggcugaaggagga

SEQ ID NO: 2372417 - RNA, 19 nt, Homo sapiens
  misc_RNA (1)...(19): siRNA sense strand
ugaagaaacucaaggagcu

SEQ ID NO: 2372418 - RNA, 19 nt, Homo sapiens
  misc_RNA (1)...(19): siRNA sense strand
aucacuacgcagagggaua

SEQ ID NO: 2372419 - RNA, 19 nt, Homo sapiens
  misc_RNA (1)...(19): siRNA sense strand
cuggagagccugagggaug

SEQ ID NO: 2372420 - RNA, 19 nt, Homo sapiens
  misc_RNA (1)...(19): siRNA sense strand
ccggugaagcagugagcga

SEQ ID NO: 2372421 - RNA, 19 nt, Homo sapiens
  misc_RNA (1)...(19): siRNA sense strand
gggaaggcagacagggcuu

SEQ ID NO: 2372422 - RNA, 19 nt, Homo sapiens
  misc_RNA (1)...(19): siRNA sense strand
ccuucgagucggagcugaa

SEQ ID NO: 2372423 - RNA, 19 nt, Homo sapiens
  misc_RNA (1)...(19): siRNA sense strand
ggaagcuacaagaggcuga

SEQ ID NO: 2372424 - RNA, 19 nt, Homo sapiens
  misc_RNA (1)...(19): siRNA sense strand
uggaggacaugcaggcaca

SEQ ID NO: 2372425 - RNA, 19 nt, Homo sapiens
  misc_RNA (1)...(19): siRNA sense strand
gggauacggccaugagcca

SEQ ID NO: 2372426 - RNA, 19 nt, Homo sapiens
  misc_RNA (1)...(19): siRNA sense strand
gguuccaagugcugaggga

SEQ ID NO: 2372427 - RNA, 19 nt, Homo sapiens
  misc_RNA (1)...(19): siRNA sense strand
gugaagagcagcacccuga

SEQ ID NO: 2372428 - RNA, 19 nt, Homo sapiens
  misc_RNA (1)...(19): siRNA sense strand
auacggagcugcuucggaa

SEQ ID NO: 2372429 - RNA, 19 nt, Homo sapiens
  misc_RNA (1)...(19): siRNA sense strand
gggacaaguguguggcuga

SEQ ID NO: 2372430 - RNA, 19 nt, Homo sapiens
  misc_RNA (1)...(19): siRNA sense strand
acgaggagcuucagggcca

SEQ ID NO: 2372431 - RNA, 19 nt, Homo sapiens
  misc_RNA (1)...(19): siRNA sense strand
ggacaaggcuguuagagac

SEQ ID NO: 2372432 - RNA, 19 nt, Homo sapiens
  misc_RNA (1)...(19): siRNA sense strand
uggaagaggcugagggcag

SEQ ID NO: 2372433 - RNA, 19 nt, Homo sapiens
  misc_RNA (1)...(19): siRNA sense strand
aagaugaagaugaggagga

SEQ ID NO: 2372434 - RNA, 19 nt, Homo sapiens
  misc_RNA (1)...(19): siRNA sense strand
gcucagaaggcgaggacag

SEQ ID NO: 2372435 - RNA, 19 nt, Homo sapiens
  misc_RNA (1)...(19): siRNA sense strand
aggaagcgguucauggaga

SEQ ID NO: 2372436 - RNA, 19 nt, Homo sapiens
  misc_RNA (1)...(19): siRNA sense strand
augaagaugaggaggagga

SEQ ID NO: 2372437 - RNA, 19 nt, Homo sapiens
  misc_RNA (1)...(19): siRNA sense strand
ggaagaggcugagggcaga

SEQ ID NO: 2372438 - RNA, 19 nt, Homo sapiens
  misc_RNA (1)...(19): siRNA sense strand
ugggagacaugaaggacca

SEQ ID NO: 2372439 - RNA, 19 nt, Homo sapiens
  misc_RNA (1)...(19): siRNA sense strand
augacgagguguuggcuga

SEQ ID NO: 2372440 - RNA, 19 nt, Homo sapiens
  misc_RNA (1)...(19): siRNA sense strand
caacagggaagcagccaca

SEQ ID NO: 2372441 - RNA, 19 nt, Homo sapiens
  misc_RNA (1)...(19): siRNA sense strand
cugaagaugaagaugagga

SEQ ID NO: 2372442 - RNA, 19 nt, Homo sapiens
  misc_RNA (1)...(19): siRNA sense strand
guuuggaggagcuggacuu

SEQ ID NO: 2372443 - RNA, 19 nt, Homo sapiens
  misc_RNA (1)...(19): siRNA sense strand
gggaaguccugcacgggaa

SEQ ID NO: 2372444 - RNA, 19 nt, Homo sapiens
  misc_RNA (1)...(19): siRNA sense strand
acgaaaacaugguggccaa

SEQ ID NO: 2372445 - RNA, 19 nt, Homo sapiens
  misc_RNA (1)...(19): siRNA sense strand
gaggugaaguccacaauca

SEQ ID NO: 2372446 - RNA, 19 nt, Homo sapiens
  misc_RNA (1)...(19): siRNA sense strand
ccuuauauaucaagagcac

SEQ ID NO: 2372447 - RNA, 19 nt, Homo sapiens
  misc_RNA (1)...(19): siRNA sense strand
ucaagagcaccaugggcaa

SEQ ID NO: 2372448 - RNA, 19 nt, Homo sapiens
  misc_RNA (1)...(19): siRNA sense strand
ccacaaucaaguuccaaau

SEQ ID NO: 2372449 - RNA, 19 nt, Homo sapiens
  misc_RNA (1)...(19): siRNA sense strand
ccaagaaguaugaugcguu

SEQ ID NO: 2372450 - RNA, 19 nt, Homo sapiens
  misc_RNA (1)...(19): siRNA sense strand
ugaagaugacagacgauga

SEQ ID NO: 2372451 - RNA, 19 nt, Homo sapiens
  misc_RNA (1)...(19): siRNA sense strand
gaugacagacgaugagcuu

SEQ ID NO: 2372452 - RNA, 19 nt, Homo sapiens
  misc_RNA (1)...(19): siRNA sense strand
uggucaagaagcuggccaa

SEQ ID NO: 2372453 - RNA, 19 nt, Homo sapiens
  misc_RNA (1)...(19): siRNA sense strand
agacgaugagcuuguguau

SEQ ID NO: 2372454 - RNA, 19 nt, Homo sapiens
  misc_RNA (1)...(19): siRNA sense strand
uuauauaucaagagcacca

SEQ ID NO: 2372455 - RNA, 19 nt, Homo sapiens
  misc_RNA (1)...(19): siRNA sense strand
cccagaaggacaagcgcuu

SEQ ID NO: 2372456 - RNA, 19 nt, Homo sapiens
  misc_RNA (1)...(19): siRNA sense strand
gguuuaaauaaggcaggaa

SEQ ID NO: 2372457 - RNA, 19 nt, Homo sapiens
  misc_RNA (1)...(19): siRNA sense strand
aggcauucuucgugcucaa

SEQ ID NO: 2372458 - RNA, 19 nt, Homo sapiens
  misc_RNA (1)...(19): siRNA sense strand
cguugagaauccacagaca

SEQ ID NO: 2372459 - RNA, 19 nt, Homo sapiens
  misc_RNA (1)...(19): siRNA sense strand
guggagaaacccagcacau

SEQ ID NO: 2372460 - RNA, 19 nt, Homo sapiens
  misc_RNA (1)...(19): siRNA sense strand
cccauggauccgagggaau

SEQ ID NO: 2372461 - RNA, 19 nt, Homo sapiens
  misc_RNA (1)...(19): siRNA sense strand
cggcugcaucguugagaau

SEQ ID NO: 2372462 - RNA, 19 nt, Homo sapiens
  misc_RNA (1)...(19): siRNA sense strand
cacaaggagcugagccgaa

SEQ ID NO: 2372463 - RNA, 19 nt, Homo sapiens
  misc_RNA (1)...(19): siRNA sense strand
aggcauucuucgugcucaa

SEQ ID NO: 2372464 - RNA, 19 nt, Homo sapiens
  misc_RNA (1)...(19): siRNA sense strand
cguugagaauccacagaca

SEQ ID NO: 2372465 - RNA, 19 nt, Homo sapiens
  misc_RNA (1)...(19): siRNA sense strand
guggagaaacccagcacau

SEQ ID NO: 2372466 - RNA, 19 nt, Homo sapiens
  misc_RNA (1)...(19): siRNA sense strand
cccauggauccgagggaau

SEQ ID NO: 2372467 - RNA, 19 nt, Homo sapiens
  misc_RNA (1)...(19): siRNA sense strand
cggcugcaucguugagaau

SEQ ID NO: 2372468 - RNA, 19 nt, Homo sapiens
  misc_RNA (1)...(19): siRNA sense strand
cacaaggagcugagccgaa

SEQ ID NO: 2372469 - RNA, 19 nt, Homo sapiens
  misc_RNA (1)...(19): siRNA sense strand
cugagaagcugcuggccaa

SEQ ID NO: 2372470 - RNA, 19 nt, Homo sapiens
  misc_RNA (1)...(19): siRNA sense strand
cagaagaaggaaagaacau

SEQ ID NO: 2372471 - RNA, 19 nt, Homo sapiens
  misc_RNA (1)...(19): siRNA sense strand
gaaagaacauccuggcaga

SEQ ID NO: 2372472 - RNA, 19 nt, Homo sapiens
  misc_RNA (1)...(19): siRNA sense strand
gccagaaggaagugggaga

SEQ ID NO: 2372473 - RNA, 19 nt, Homo sapiens
  misc_RNA (1)...(19): siRNA sense strand
augaagaggcgcuggaaga

SEQ ID NO: 2372474 - RNA, 19 nt, Homo sapiens
  misc_RNA (1)...(19): siRNA sense strand
augcacaagaugaggguuu

SEQ ID NO: 2372475 - RNA, 19 nt, Homo sapiens
  misc_RNA (1)...(19): siRNA sense strand
gagcaguugagcugggaau

SEQ ID NO: 2372476 - RNA, 19 nt, Homo sapiens
  misc_RNA (1)...(19): siRNA sense strand
ccguaucagacgaggccaa

SEQ ID NO: 2372477 - RNA, 19 nt, Homo sapiens
  misc_RNA (1)...(19): siRNA sense strand
gcagagagccagaaggaag

SEQ ID NO: 2372478 - RNA, 19 nt, Homo sapiens
  misc_RNA (1)...(19): siRNA sense strand
ccugaagaaagaugccaaa

SEQ ID NO: 2372479 - RNA, 19 nt, Homo sapiens
  misc_RNA (1)...(19): siRNA sense strand
aagacagacauguggagua

SEQ ID NO: 2372480 - RNA, 19 nt, Homo sapiens
  misc_RNA (1)...(19): siRNA sense strand
ggcuguucccucagagaaa

SEQ ID NO: 2372481 - RNA, 19 nt, Homo sapiens
  misc_RNA (1)...(19): siRNA sense strand
aggaaaugguguugcugga

SEQ ID NO: 2372482 - RNA, 19 nt, Homo sapiens
  misc_RNA (1)...(19): siRNA sense strand
gggcauuuggugaagauca

SEQ ID NO: 2372483 - RNA, 19 nt, Homo sapiens
  misc_RNA (1)...(19): siRNA sense strand
ggagaaagccaaacgcugu

SEQ ID NO: 2372484 - RNA, 19 nt, Homo sapiens
  misc_RNA (1)...(19): siRNA sense strand
cucccaaagacaaggaaau

SEQ ID NO: 2372485 - RNA, 19 nt, Homo sapiens
  misc_RNA (1)...(19): siRNA sense strand
ggagaaagccacaggccuc

SEQ ID NO: 2372486 - RNA, 19 nt, Homo sapiens
  misc_RNA (1)...(19): siRNA sense strand
agccaaggucaucaagaaa

SEQ ID NO: 2372487 - RNA, 19 nt, Homo sapiens
  misc_RNA (1)...(19): siRNA sense strand
ggcauuuggugaagaucau

SEQ ID NO: 2372488 - RNA, 19 nt, Homo sapiens
  misc_RNA (1)...(19): siRNA sense strand
ggccuggcacggagguaua

SEQ ID NO: 2372489 - RNA, 19 nt, Homo sapiens
  misc_RNA (1)...(19): siRNA sense strand
gaaaugguguugcuggaga

SEQ ID NO: 2372490 - RNA, 19 nt, Homo sapiens
  misc_RNA (1)...(19): siRNA sense strand
accucaagccagagaacau

SEQ ID NO: 2372491 - RNA, 19 nt, Homo sapiens
  misc_RNA (1)...(19): siRNA sense strand
cgggaaugucagcagugaa

SEQ ID NO: 2372492 - RNA, 19 nt, Homo sapiens
  misc_RNA (1)...(19): siRNA sense strand
cagaaggaagugggagaga

SEQ ID NO: 2372493 - RNA, 19 nt, Homo sapiens
  misc_RNA (1)...(19): siRNA sense strand
cugcaagauucgaggcugu

SEQ ID NO: 2372494 - RNA, 19 nt, Homo sapiens
  misc_RNA (1)...(19): siRNA sense strand
augaggaaauuuacgggaa

SEQ ID NO: 2372495 - RNA, 19 nt, Homo sapiens
  misc_RNA (1)...(19): siRNA sense strand
caaucaagcaggagcucau

SEQ ID NO: 2372496 - RNA, 19 nt, Homo sapiens
  misc_RNA (1)...(19): siRNA sense strand
cugaggaagcacaugaaga

SEQ ID NO: 2372497 - RNA, 19 nt, Homo sapiens
  misc_RNA (1)...(19): siRNA sense strand
gugacaaauccuacacuca

SEQ ID NO: 2372498 - RNA, 19 nt, Homo sapiens
  misc_RNA (1)...(19): siRNA sense strand
agauggugguggagaagca

SEQ ID NO: 2372499 - RNA, 19 nt, Homo sapiens
  misc_RNA (1)...(19): siRNA sense strand
ggacaaagcuaccagggag

SEQ ID NO: 2372500 - RNA, 19 nt, Homo sapiens
  misc_RNA (1)...(19): siRNA sense strand
ccucggagaugguggugga

SEQ ID NO: 2372501 - RNA, 19 nt, Homo sapiens
  misc_RNA (1)...(19): siRNA sense strand
gagaagugccgcugcgugu

SEQ ID NO: 2372502 - RNA, 19 nt, Homo sapiens
  misc_RNA (1)...(19): siRNA sense strand
gggauggugucucgggagu

SEQ ID NO: 2372503 - RNA, 19 nt, Homo sapiens
  misc_RNA (1)...(19): siRNA sense strand
guggagaagcaccgggagu

SEQ ID NO: 2372504 - RNA, 19 nt, Homo sapiens
  misc_RNA (1)...(19): siRNA sense strand
acaaguuaacugaggacaa

SEQ ID NO: 2372505 - RNA, 19 nt, Homo sapiens
  misc_RNA (1)...(19): siRNA sense strand
agaauuauuucaugcguga

SEQ ID NO: 2372506 - RNA, 19 nt, Homo sapiens
  misc_RNA (1)...(19): siRNA sense strand
aggcuauggcuuuggguca

SEQ ID NO: 2372507 - RNA, 19 nt, Homo sapiens
  misc_RNA (1)...(19): siRNA sense strand
cguacagaagcgugugcaa

SEQ ID NO: 2372508 - RNA, 19 nt, Homo sapiens
  misc_RNA (1)...(19): siRNA sense strand
ggucaggagaugaucccua

SEQ ID NO: 2372509 - RNA, 19 nt, Homo sapiens
  misc_RNA (1)...(19): siRNA sense strand
aggcagacgugcaguccau

SEQ ID NO: 2372510 - RNA, 19 nt, Homo sapiens
  misc_RNA (1)...(19): siRNA sense strand
cagugaggaaccagcgcaa

SEQ ID NO: 2372511 - RNA, 19 nt, Homo sapiens
  misc_RNA (1)...(19): siRNA sense strand
uaacugaggacaaggcaga

SEQ ID NO: 2372512 - RNA, 19 nt, Homo sapiens
  misc_RNA (1)...(19): siRNA sense strand
ccuuauuguuauugaacgu

SEQ ID NO: 2372513 - RNA, 19 nt, Homo sapiens
  misc_RNA (1)...(19): siRNA sense strand
gugugcaaguggaugucaa

SEQ ID NO: 2372514 - RNA, 19 nt, Homo sapiens
  misc_RNA (1)...(19): siRNA sense strand
ccaagagugccgaggccuu

SEQ ID NO: 2372515 - RNA, 19 nt, Homo sapiens
  misc_RNA (1)...(19): siRNA sense strand
uggaggugcaggaaggcua

SEQ ID NO: 2372516 - RNA, 19 nt, Homo sapiens
  misc_RNA (1)...(19): siRNA sense strand
caacauugcagaagagcac

SEQ ID NO: 2372517 - RNA, 19 nt, Homo sapiens
  misc_RNA (1)...(19): siRNA sense strand
ggaccaugaccaagaucca

SEQ ID NO: 2372518 - RNA, 19 nt, Homo sapiens
  misc_RNA (1)...(19): siRNA sense strand
ugaacgaggccuucgguga

SEQ ID NO: 2372519 - RNA, 19 nt, Homo sapiens
  misc_RNA (1)...(19): siRNA sense strand
cugagggcccugagaccaa

SEQ ID NO: 2372520 - RNA, 19 nt, Homo sapiens
  misc_RNA (1)...(19): siRNA sense strand
agaucaugaaggagcugaa

SEQ ID NO: 2372521 - RNA, 19 nt, Homo sapiens
  misc_RNA (1)...(19): siRNA sense strand
uuggcaagauuguggcaga

SEQ ID NO: 2372522 - RNA, 19 nt, Homo sapiens
  misc_RNA (1)...(19): siRNA sense strand
ucaaggaggaggagacgga

SEQ ID NO: 2372523 - RNA, 19 nt, Homo sapiens
  misc_RNA (1)...(19): siRNA sense strand
cugcacuagcugugaggau

SEQ ID NO: 2372524 - RNA, 19 nt, Homo sapiens
  misc_RNA (1)...(19): siRNA sense strand
ugaaguacaccaaggacca

SEQ ID NO: 2372525 - RNA, 19 nt, Homo sapiens
  misc_RNA (1)...(19): siRNA sense strand
ccucaagaugauuguggau

SEQ ID NO: 2372526 - RNA, 19 nt, Homo sapiens
  misc_RNA (1)...(19): siRNA sense strand
guaccaguucuuagaggau

SEQ ID NO: 2372527 - RNA, 19 nt, Homo sapiens
  misc_RNA (1)...(19): siRNA sense strand
uggugaacguacugucuau

SEQ ID NO: 2372528 - RNA, 19 nt, Homo sapiens
  misc_RNA (1)...(19): siRNA sense strand
ccagccaaccagcggaaau

SEQ ID NO: 2372529 - RNA, 19 nt, Homo sapiens
  misc_RNA (1)...(19): siRNA sense strand
uccuaaagcaagcaagaaa

SEQ ID NO: 2372530 - RNA, 19 nt, Homo sapiens
  misc_RNA (1)...(19): siRNA sense strand
gaguaaaagcaaagaugau

SEQ ID NO: 2372531 - RNA, 19 nt, Homo sapiens
  misc_RNA (1)...(19): siRNA sense strand
ccucaaggacagacugaca

SEQ ID NO: 2372532 - RNA, 19 nt, Homo sapiens
  misc_RNA (1)...(19): siRNA sense strand
augaacagcaccaggaaaa

SEQ ID NO: 2372533 - RNA, 19 nt, Homo sapiens
  misc_RNA (1)...(19): siRNA sense strand
cuggaugagcucaaacaaa

SEQ ID NO: 2372534 - RNA, 19 nt, Homo sapiens
  misc_RNA (1)...(19): siRNA sense strand
cucuaaagaaugucaggaa

SEQ ID NO: 2372535 - RNA, 19 nt, Homo sapiens
  misc_RNA (1)...(19): siRNA sense strand
caugaugagcuucgggaga

SEQ ID NO: 2372536 - RNA, 19 nt, Homo sapiens
  misc_RNA (1)...(19): siRNA sense strand
cagcagcagcagugaggau

SEQ ID NO: 2372537 - RNA, 19 nt, Homo sapiens
  misc_RNA (1)...(19): siRNA sense strand
uugacaacaugaaaggcaa

SEQ ID NO: 2372538 - RNA, 19 nt, Homo sapiens
  misc_RNA (1)...(19): siRNA sense strand
ccuaaagcaagcaagaaaa

SEQ ID NO: 2372539 - RNA, 19 nt, Homo sapiens
  misc_RNA (1)...(19): siRNA sense strand
ggaaaaugaaggaaccaau

SEQ ID NO: 2372540 - RNA, 19 nt, Homo sapiens
  misc_RNA (1)...(19): siRNA sense strand
caaaaggaagaccgagaaa

SEQ ID NO: 2372541 - RNA, 19 nt, Homo sapiens
  misc_RNA (1)...(19): siRNA sense strand
aaggauaaggacaaagaga

SEQ ID NO: 2372542 - RNA, 19 nt, Homo sapiens
  misc_RNA (1)...(19): siRNA sense strand
gcuugaaaaccauugauaa

SEQ ID NO: 2372543 - RNA, 19 nt, Homo sapiens
  misc_RNA (1)...(19): siRNA sense strand
aggaugaagaugagaccca

SEQ ID NO: 2372544 - RNA, 19 nt, Homo sapiens
  misc_RNA (1)...(19): siRNA sense strand
auucagaagcagauugaca

SEQ ID NO: 2372545 - RNA, 19 nt, Homo sapiens
  misc_RNA (1)...(19): siRNA sense strand
cucacgaacuggagagcca

SEQ ID NO: 2372546 - RNA, 19 nt, Homo sapiens
  misc_RNA (1)...(19): siRNA sense strand
ggcaaaacgacaagaggau

SEQ ID NO: 2372547 - RNA, 19 nt, Homo sapiens
  misc_RNA (1)...(19): siRNA sense strand
augaaacaaaggaggcaga

SEQ ID NO: 2372548 - RNA, 19 nt, Homo sapiens
  misc_RNA (1)...(19): siRNA sense strand
gggcaguacagucugguca

SEQ ID NO: 2372549 - RNA, 19 nt, Homo sapiens
  misc_RNA (1)...(19): siRNA sense strand
gcugaguacagaugcugaa

SEQ ID NO: 2372550 - RNA, 19 nt, Homo sapiens
  misc_RNA (1)...(19): siRNA sense strand
cagcagugaggaugaagau

SEQ ID NO: 2372551 - RNA, 19 nt, Homo sapiens
  misc_RNA (1)...(19): siRNA sense strand
uguuauggaaagcuugaaa

SEQ ID NO: 2372552 - RNA, 19 nt, Homo sapiens
  misc_RNA (1)...(19): siRNA sense strand
caucauugacacggaggaa

SEQ ID NO: 2372553 - RNA, 19 nt, Homo sapiens
  misc_RNA (1)...(19): siRNA sense strand
gggcaaaacgacaagagga

SEQ ID NO: 2372554 - RNA, 19 nt, Homo sapiens
  misc_RNA (1)...(19): siRNA sense strand
gggcaaagaauguagucaa

SEQ ID NO: 2372555 - RNA, 19 nt, Homo sapiens
  misc_RNA (1)...(19): siRNA sense strand
gagaauguuacaaaggaaa

SEQ ID NO: 2372556 - RNA, 19 nt, Homo sapiens
  misc_RNA (1)...(19): siRNA sense strand
caauaaagaugaugaccca

SEQ ID NO: 2372557 - RNA, 19 nt, Homo sapiens
  misc_RNA (1)...(19): siRNA sense strand
aggugaaggucaagcaaga

SEQ ID NO: 2372558 - RNA, 19 nt, Homo sapiens
  misc_RNA (1)...(19): siRNA sense strand
gcaaguuccuccagggaca

SEQ ID NO: 2372559 - RNA, 19 nt, Homo sapiens
  misc_RNA (1)...(19): siRNA sense strand
aggaagaggaugaugguga

SEQ ID NO: 2372560 - RNA, 19 nt, Homo sapiens
  misc_RNA (1)...(19): siRNA sense strand
ugccagaauaccagggaua

SEQ ID NO: 2372561 - RNA, 19 nt, Homo sapiens
  misc_RNA (1)...(19): siRNA sense strand
aggaagaacugcugagaag

SEQ ID NO: 2372562 - RNA, 19 nt, Homo sapiens
  misc_RNA (1)...(19): siRNA sense strand
agagaauguuacaaaggaa

SEQ ID NO: 2372563 - RNA, 19 nt, Homo sapiens
  misc_RNA (1)...(19): siRNA sense strand
agaggaugauggugaggua

SEQ ID NO: 2372564 - RNA, 19 nt, Homo sapiens
  misc_RNA (1)...(19): siRNA sense strand
uguuacagcaauagagcua

SEQ ID NO: 2372565 - RNA, 19 nt, Homo sapiens
  misc_RNA (1)...(19): siRNA sense strand
ggcaaggauuggaggagau

SEQ ID NO: 2372566 - RNA, 19 nt, Homo sapiens
  misc_RNA (1)...(19): siRNA sense strand
ccuaaagucagaugagaga

SEQ ID NO: 2372567 - RNA, 19 nt, Homo sapiens
  misc_RNA (1)...(19): siRNA sense strand
aaguauaugcacagaaaca

SEQ ID NO: 2372568 - RNA, 19 nt, Homo sapiens
  misc_RNA (1)...(19): siRNA sense strand
ccucuauugccaugaauua

SEQ ID NO: 2372569 - RNA, 19 nt, Homo sapiens
  misc_RNA (1)...(19): siRNA sense strand
cagcacuacuauacagcaa

SEQ ID NO: 2372570 - RNA, 19 nt, Homo sapiens
  misc_RNA (1)...(19): siRNA sense strand
cugugaaacaugugauaga

SEQ ID NO: 2372571 - RNA, 19 nt, Homo sapiens
  misc_RNA (1)...(19): siRNA sense strand
caacuauggcaaaugcaaa

SEQ ID NO: 2372572 - RNA, 19 nt, Homo sapiens
  misc_RNA (1)...(19): siRNA sense strand
aggaaagacagaugaaguu

SEQ ID NO: 2372573 - RNA, 19 nt, Homo sapiens
  misc_RNA (1)...(19): siRNA sense strand
cugaucaggugaaggucaa

SEQ ID NO: 2372574 - RNA, 19 nt, Homo sapiens
  misc_RNA (1)...(19): siRNA sense strand
cgccaagaaugcagacaga

SEQ ID NO: 2372575 - RNA, 19 nt, Homo sapiens
  misc_RNA (1)...(19): siRNA sense strand
gaagcacaucaaagaguaa

SEQ ID NO: 2372576 - RNA, 19 nt, Homo sapiens
  misc_RNA (1)...(19): siRNA sense strand
cuuacaacagcuagagaau

SEQ ID NO: 2372577 - RNA, 19 nt, Homo sapiens
  misc_RNA (1)...(19): siRNA sense strand
gguauguacuaguugugaa

SEQ ID NO: 2372578 - RNA, 19 nt, Homo sapiens
  misc_RNA (1)...(19): siRNA sense strand
caaaggaaagacagaugaa

SEQ ID NO: 2372579 - RNA, 19 nt, Homo sapiens
  misc_RNA (1)...(19): siRNA sense strand
auguagagacugucagcua

SEQ ID NO: 2372580 - RNA, 19 nt, Homo sapiens
  misc_RNA (1)...(19): siRNA sense strand
gaagggugcaauugagaau

SEQ ID NO: 2372581 - RNA, 19 nt, Homo sapiens
  misc_RNA (1)...(19): siRNA sense strand
cggcaaggauuggaggaga

SEQ ID NO: 2372582 - RNA, 19 nt, Homo sapiens
  misc_RNA (1)...(19): siRNA sense strand
auaaagaugaugacccaaa

SEQ ID NO: 2372583 - RNA, 19 nt, Homo sapiens
  misc_RNA (1)...(19): siRNA sense strand
ggaccaaaggaaaugugaa

SEQ ID NO: 2372584 - RNA, 19 nt, Homo sapiens
  misc_RNA (1)...(19): siRNA sense strand
agauaaacucacagagauc

SEQ ID NO: 2372585 - RNA, 19 nt, Homo sapiens
  misc_RNA (1)...(19): siRNA sense strand
cuacagcaacuauggcaaa

SEQ ID NO: 2372586 - RNA, 19 nt, Homo sapiens
  misc_RNA (1)...(19): siRNA sense strand
cuaacaaacguguagaaca

SEQ ID NO: 2372587 - RNA, 19 nt, Homo sapiens
  misc_RNA (1)...(19): siRNA sense strand
ggcucaaguaguuuagaua

SEQ ID NO: 2372588 - RNA, 19 nt, Homo sapiens
  misc_RNA (1)...(19): siRNA sense strand
ggauuggaggagauggcaa

SEQ ID NO: 2372589 - RNA, 19 nt, Homo sapiens
  misc_RNA (1)...(19): siRNA sense strand
guuacaaaggaaagacaga

SEQ ID NO: 2372590 - RNA, 19 nt, Homo sapiens
  misc_RNA (1)...(19): siRNA sense strand
cagaaaacgccuaaaguca

SEQ ID NO: 2372591 - RNA, 19 nt, Homo sapiens
  misc_RNA (1)...(19): siRNA sense strand
agacauguaucgaagcaca

SEQ ID NO: 2372592 - RNA, 19 nt, Homo sapiens
  misc_RNA (1)...(19): siRNA sense strand
agauugacauguagagacu

SEQ ID NO: 2372593 - RNA, 19 nt, Homo sapiens
  misc_RNA (1)...(19): siRNA sense strand
caaacaaugcaaagaggca

SEQ ID NO: 2372594 - RNA, 19 nt, Homo sapiens
  misc_RNA (1)...(19): siRNA sense strand
gugaaacaugugauagauu

SEQ ID NO: 2372595 - RNA, 19 nt, Homo sapiens
  misc_RNA (1)...(19): siRNA sense strand
ccaacuacaacaacaacaa

SEQ ID NO: 2372596 - RNA, 19 nt, Homo sapiens
  misc_RNA (1)...(19): siRNA sense strand
agaaagaagaugucucaga

SEQ ID NO: 2372597 - RNA, 19 nt, Homo sapiens
  misc_RNA (1)...(19): siRNA sense strand
uggaggaggaggaggagga

SEQ ID NO: 2372598 - RNA, 19 nt, Homo sapiens
  misc_RNA (1)...(19): siRNA sense strand
gaaacaugugauagauuga

SEQ ID NO: 2372599 - RNA, 19 nt, Homo sapiens
  misc_RNA (1)...(19): siRNA sense strand
guaccaacuacaacaacaa

SEQ ID NO: 2372600 - RNA, 19 nt, Homo sapiens
  misc_RNA (1)...(19): siRNA sense strand
cggaugacuuuguggccga

SEQ ID NO: 2372601 - RNA, 19 nt, Homo sapiens
  misc_RNA (1)...(19): siRNA sense strand
acagauagaccuuguggau

SEQ ID NO: 2372602 - RNA, 19 nt, Homo sapiens
  misc_RNA (1)...(19): siRNA sense strand
gaucaggaagaaagaagau

SEQ ID NO: 2372603 - RNA, 19 nt, Homo sapiens
  misc_RNA (1)...(19): siRNA sense strand
acaaacaagaacaguugaa

SEQ ID NO: 2372604 - RNA, 19 nt, Homo sapiens
  misc_RNA (1)...(19): siRNA sense strand
aggugaagcauguuaugaa

SEQ ID NO: 2372605 - RNA, 19 nt, Homo sapiens
  misc_RNA (1)...(19): siRNA sense strand
ccguaguaucgguacacaa

SEQ ID NO: 2372606 - RNA, 19 nt, Homo sapiens
  misc_RNA (1)...(19): siRNA sense strand
aguaauagagaguaaacca

SEQ ID NO: 2372607 - RNA, 19 nt, Homo sapiens
  misc_RNA (1)...(19): siRNA sense strand
ccaaaggaaaugugaacgu

SEQ ID NO: 2372608 - RNA, 19 nt, Homo sapiens
  misc_RNA (1)...(19): siRNA sense strand
agcuagagaauguuacaaa

SEQ ID NO: 2372609 - RNA, 19 nt, Homo sapiens
  misc_RNA (1)...(19): siRNA sense strand
caggugcagaauaggauaa

SEQ ID NO: 2372610 - RNA, 19 nt, Homo sapiens
  misc_RNA (1)...(19): siRNA sense strand
gcaacuauggcaaaugcaa

SEQ ID NO: 2372611 - RNA, 19 nt, Homo sapiens
  misc_RNA (1)...(19): siRNA sense strand
gaucucuugugcugcgaaa

SEQ ID NO: 2372612 - RNA, 19 nt, Homo sapiens
  misc_RNA (1)...(19): siRNA sense strand
uuggaaagccagaaguuga

SEQ ID NO: 2372613 - RNA, 19 nt, Homo sapiens
  misc_RNA (1)...(19): siRNA sense strand
guggagaguggcuauguaa

SEQ ID NO: 2372614 - RNA, 19 nt, Homo sapiens
  misc_RNA (1)...(19): siRNA sense strand
uugagaaucuacuggcgaa

SEQ ID NO: 2372615 - RNA, 19 nt, Homo sapiens
  misc_RNA (1)...(19): siRNA sense strand
uuacagcaauagagcuaau

SEQ ID NO: 2372616 - RNA, 19 nt, Homo sapiens
  misc_RNA (1)...(19): siRNA sense strand
ggaggagauggcaacaaua

SEQ ID NO: 2372617 - RNA, 19 nt, Homo sapiens
  misc_RNA (1)...(19): siRNA sense strand
uggcaacaauaaagaugau

SEQ ID NO: 2372618 - RNA, 19 nt, Homo sapiens
  misc_RNA (1)...(19): siRNA sense strand
uuguagagauauuggaaag

SEQ ID NO: 2372619 - RNA, 19 nt, Homo sapiens
  misc_RNA (1)...(19): siRNA sense strand
gggcaaagaauguagucaa

SEQ ID NO: 2372620 - RNA, 19 nt, Homo sapiens
  misc_RNA (1)...(19): siRNA sense strand
gagaauguuacaaaggaaa

SEQ ID NO: 2372621 - RNA, 19 nt, Homo sapiens
  misc_RNA (1)...(19): siRNA sense strand
caauaaagaugaugaccca

SEQ ID NO: 2372622 - RNA, 19 nt, Homo sapiens
  misc_RNA (1)...(19): siRNA sense strand
aggugaaggucaagcaaga

SEQ ID NO: 2372623 - RNA, 19 nt, Homo sapiens
  misc_RNA (1)...(19): siRNA sense strand
gcaaguuccuccagggaca

SEQ ID NO: 2372624 - RNA, 19 nt, Homo sapiens
  misc_RNA (1)...(19): siRNA sense strand
aggaagaggaugaugguga

SEQ ID NO: 2372625 - RNA, 19 nt, Homo sapiens
  misc_RNA (1)...(19): siRNA sense strand
ugccagaauaccagggaua

SEQ ID NO: 2372626 - RNA, 19 nt, Homo sapiens
  misc_RNA (1)...(19): siRNA sense strand
aggaagaacugcugagaag

SEQ ID NO: 2372627 - RNA, 19 nt, Homo sapiens
  misc_RNA (1)...(19): siRNA sense strand
agagaauguuacaaaggaa

SEQ ID NO: 2372628 - RNA, 19 nt, Homo sapiens
  misc_RNA (1)...(19): siRNA sense strand
agaggaugauggugaggua

SEQ ID NO: 2372629 - RNA, 19 nt, Homo sapiens
  misc_RNA (1)...(19): siRNA sense strand
uguuacagcaauagagcua

SEQ ID NO: 2372630 - RNA, 19 nt, Homo sapiens
  misc_RNA (1)...(19): siRNA sense strand
ggcaaggauuggaggagau

SEQ ID NO: 2372631 - RNA, 19 nt, Homo sapiens
  misc_RNA (1)...(19): siRNA sense strand
ccuaaagucagaugagaga

SEQ ID NO: 2372632 - RNA, 19 nt, Homo sapiens
  misc_RNA (1)...(19): siRNA sense strand
aaguauaugcacagaaaca

SEQ ID NO: 2372633 - RNA, 19 nt, Homo sapiens
  misc_RNA (1)...(19): siRNA sense strand
ccucuauugccaugaauua

SEQ ID NO: 2372634 - RNA, 19 nt, Homo sapiens
  misc_RNA (1)...(19): siRNA sense strand
cagcacuacuauacagcaa

SEQ ID NO: 2372635 - RNA, 19 nt, Homo sapiens
  misc_RNA (1)...(19): siRNA sense strand
cugugaaacaugugauaga

SEQ ID NO: 2372636 - RNA, 19 nt, Homo sapiens
  misc_RNA (1)...(19): siRNA sense strand
caacuauggcaaaugcaaa

SEQ ID NO: 2372637 - RNA, 19 nt, Homo sapiens
  misc_RNA (1)...(19): siRNA sense strand
aggaaagacagaugaaguu

SEQ ID NO: 2372638 - RNA, 19 nt, Homo sapiens
  misc_RNA (1)...(19): siRNA sense strand
cugaucaggugaaggucaa

SEQ ID NO: 2372639 - RNA, 19 nt, Homo sapiens
  misc_RNA (1)...(19): siRNA sense strand
cgccaagaaugcagacaga

SEQ ID NO: 2372640 - RNA, 19 nt, Homo sapiens
  misc_RNA (1)...(19): siRNA sense strand
gaagcacaucaaagaguaa

SEQ ID NO: 2372641 - RNA, 19 nt, Homo sapiens
  misc_RNA (1)...(19): siRNA sense strand
cuuacaacagcuagagaau

SEQ ID NO: 2372642 - RNA, 19 nt, Homo sapiens
  misc_RNA (1)...(19): siRNA sense strand
gguauguacuaguugugaa

SEQ ID NO: 2372643 - RNA, 19 nt, Homo sapiens
  misc_RNA (1)...(19): siRNA sense strand
caaaggaaagacagaugaa

SEQ ID NO: 2372644 - RNA, 19 nt, Homo sapiens
  misc_RNA (1)...(19): siRNA sense strand
auguagagacugucagcua

SEQ ID NO: 2372645 - RNA, 19 nt, Homo sapiens
  misc_RNA (1)...(19): siRNA sense strand
gaagggugcaauugagaau

SEQ ID NO: 2372646 - RNA, 19 nt, Homo sapiens
  misc_RNA (1)...(19): siRNA sense strand
cggcaaggauuggaggaga

SEQ ID NO: 2372647 - RNA, 19 nt, Homo sapiens
  misc_RNA (1)...(19): siRNA sense strand
auaaagaugaugacccaaa

SEQ ID NO: 2372648 - RNA, 19 nt, Homo sapiens
  misc_RNA (1)...(19): siRNA sense strand
ggaccaaaggaaaugugaa

SEQ ID NO: 2372649 - RNA, 19 nt, Homo sapiens
  misc_RNA (1)...(19): siRNA sense strand
agauaaacucacagagauc

SEQ ID NO: 2372650 - RNA, 19 nt, Homo sapiens
  misc_RNA (1)...(19): siRNA sense strand
cuacagcaacuauggcaaa

SEQ ID NO: 2372651 - RNA, 19 nt, Homo sapiens
  misc_RNA (1)...(19): siRNA sense strand
cuaacaaacguguagaaca

SEQ ID NO: 2372652 - RNA, 19 nt, Homo sapiens
  misc_RNA (1)...(19): siRNA sense strand
ggcucaaguaguuuagaua

SEQ ID NO: 2372653 - RNA, 19 nt, Homo sapiens
  misc_RNA (1)...(19): siRNA sense strand
ggauuggaggagauggcaa

SEQ ID NO: 2372654 - RNA, 19 nt, Homo sapiens
  misc_RNA (1)...(19): siRNA sense strand
guuacaaaggaaagacaga

SEQ ID NO: 2372655 - RNA, 19 nt, Homo sapiens
  misc_RNA (1)...(19): siRNA sense strand
cagaaaacgccuaaaguca

SEQ ID NO: 2372656 - RNA, 19 nt, Homo sapiens
  misc_RNA (1)...(19): siRNA sense strand
agacauguaucgaagcaca

SEQ ID NO: 2372657 - RNA, 19 nt, Homo sapiens
  misc_RNA (1)...(19): siRNA sense strand
agauugacauguagagacu

SEQ ID NO: 2372658 - RNA, 19 nt, Homo sapiens
  misc_RNA (1)...(19): siRNA sense strand
caaacaaugcaaagaggca

SEQ ID NO: 2372659 - RNA, 19 nt, Homo sapiens
  misc_RNA (1)...(19): siRNA sense strand
gugaaacaugugauagauu

SEQ ID NO: 2372660 - RNA, 19 nt, Homo sapiens
  misc_RNA (1)...(19): siRNA sense strand
ccaacuacaacaacaacaa

SEQ ID NO: 2372661 - RNA, 19 nt, Homo sapiens
  misc_RNA (1)...(19): siRNA sense strand
agaaagaagaugucucaga

SEQ ID NO: 2372662 - RNA, 19 nt, Homo sapiens
  misc_RNA (1)...(19): siRNA sense strand
uggaggaggaggaggagga

SEQ ID NO: 2372663 - RNA, 19 nt, Homo sapiens
  misc_RNA (1)...(19): siRNA sense strand
gaaacaugugauagauuga

SEQ ID NO: 2372664 - RNA, 19 nt, Homo sapiens
  misc_RNA (1)...(19): siRNA sense strand
guaccaacuacaacaacaa

SEQ ID NO: 2372665 - RNA, 19 nt, Homo sapiens
  misc_RNA (1)...(19): siRNA sense strand
cggaugacuuuguggccga

SEQ ID NO: 2372666 - RNA, 19 nt, Homo sapiens
  misc_RNA (1)...(19): siRNA sense strand
acagauagaccuuguggau

SEQ ID NO: 2372667 - RNA, 19 nt, Homo sapiens
  misc_RNA (1)...(19): siRNA sense strand
gaucaggaagaaagaagau

SEQ ID NO: 2372668 - RNA, 19 nt, Homo sapiens
  misc_RNA (1)...(19): siRNA sense strand
acaaacaagaacaguugaa

SEQ ID NO: 2372669 - RNA, 19 nt, Homo sapiens
  misc_RNA (1)...(19): siRNA sense strand
aggugaagcauguuaugaa

SEQ ID NO: 2372670 - RNA, 19 nt, Homo sapiens
  misc_RNA (1)...(19): siRNA sense strand
ccguaguaucgguacacaa

SEQ ID NO: 2372671 - RNA, 19 nt, Homo sapiens
  misc_RNA (1)...(19): siRNA sense strand
aguaauagagaguaaacca

SEQ ID NO: 2372672 - RNA, 19 nt, Homo sapiens
  misc_RNA (1)...(19): siRNA sense strand
ccaaaggaaaugugaacgu

SEQ ID NO: 2372673 - RNA, 19 nt, Homo sapiens
  misc_RNA (1)...(19): siRNA sense strand
agcuagagaauguuacaaa

SEQ ID NO: 2372674 - RNA, 19 nt, Homo sapiens
  misc_RNA (1)...(19): siRNA sense strand
caggugcagaauaggauaa

SEQ ID NO: 2372675 - RNA, 19 nt, Homo sapiens
  misc_RNA (1)...(19): siRNA sense strand
gcaacuauggcaaaugcaa

SEQ ID NO: 2372676 - RNA, 19 nt, Homo sapiens
  misc_RNA (1)...(19): siRNA sense strand
gaucucuugugcugcgaaa

SEQ ID NO: 2372677 - RNA, 19 nt, Homo sapiens
  misc_RNA (1)...(19): siRNA sense strand
uuggaaagccagaaguuga

SEQ ID NO: 2372678 - RNA, 19 nt, Homo sapiens
  misc_RNA (1)...(19): siRNA sense strand
guggagaguggcuauguaa

SEQ ID NO: 2372679 - RNA, 19 nt, Homo sapiens
  misc_RNA (1)...(19): siRNA sense strand
uugagaaucuacuggcgaa

SEQ ID NO: 2372680 - RNA, 19 nt, Homo sapiens
  misc_RNA (1)...(19): siRNA sense strand
uuacagcaauagagcuaau

SEQ ID NO: 2372681 - RNA, 19 nt, Homo sapiens
  misc_RNA (1)...(19): siRNA sense strand
ggaggagauggcaacaaua

SEQ ID NO: 2372682 - RNA, 19 nt, Homo sapiens
  misc_RNA (1)...(19): siRNA sense strand
uggcaacaauaaagaugau

SEQ ID NO: 2372683 - RNA, 19 nt, Homo sapiens
  misc_RNA (1)...(19): siRNA sense strand
uuguagagauauuggaaag

SEQ ID NO: 2372684 - RNA, 19 nt, Homo sapiens
  misc_RNA (1)...(19): siRNA sense strand
gcgcacaguuugcuggaga

SEQ ID NO: 2372685 - RNA, 19 nt, Homo sapiens
  misc_RNA (1)...(19): siRNA sense strand
cagaggagccugaggaccu

SEQ ID NO: 2372686 - RNA, 19 nt, Homo sapiens
  misc_RNA (1)...(19): siRNA sense strand
gugcuuucgaggaggagau

SEQ ID NO: 2372687 - RNA, 19 nt, Homo sapiens
  misc_RNA (1)...(19): siRNA sense strand
ccaaagaaauguucgccau

SEQ ID NO: 2372688 - RNA, 19 nt, Homo sapiens
  misc_RNA (1)...(19): siRNA sense strand
gauaaaugcuacucaggca

SEQ ID NO: 2372689 - RNA, 19 nt, Homo sapiens
  misc_RNA (1)...(19): siRNA sense strand
ugcccaggcuauucggaaa

SEQ ID NO: 2372690 - RNA, 19 nt, Homo sapiens
  misc_RNA (1)...(19): siRNA sense strand
gauaaaugcuacucaggca

SEQ ID NO: 2372691 - RNA, 19 nt, Homo sapiens
  misc_RNA (1)...(19): siRNA sense strand
ugcccaggcuauucggaaa

SEQ ID NO: 2372692 - RNA, 19 nt, Homo sapiens
  misc_RNA (1)...(19): siRNA sense strand
acgaaauauuggaagugaa

SEQ ID NO: 2372693 - RNA, 19 nt, Homo sapiens
  misc_RNA (1)...(19): siRNA sense strand
gcaucaucacagagagguu

SEQ ID NO: 2372694 - RNA, 19 nt, Homo sapiens
  misc_RNA (1)...(19): siRNA sense strand
ucaaguacgugcuggacga

SEQ ID NO: 2372695 - RNA, 19 nt, Homo sapiens
  misc_RNA (1)...(19): siRNA sense strand
guuuaagaagugugcugua

SEQ ID NO: 2372696 - RNA, 19 nt, Homo sapiens
  misc_RNA (1)...(19): siRNA sense strand
uggucaacgugucgcgcua

SEQ ID NO: 2372697 - RNA, 19 nt, Homo sapiens
  misc_RNA (1)...(19): siRNA sense strand
ugaacaucucugaggccaa

SEQ ID NO: 2372698 - RNA, 19 nt, Homo sapiens
  misc_RNA (1)...(19): siRNA sense strand
acaucaaccaggagaucuu

SEQ ID NO: 2372699 - RNA, 19 nt, Homo sapiens
  misc_RNA (1)...(19): siRNA sense strand
uggaagacccaaagaggga

SEQ ID NO: 2372700 - RNA, 19 nt, Homo sapiens
  misc_RNA (1)...(19): siRNA sense strand
aagaacaggaggaggugau

SEQ ID NO: 2372701 - RNA, 19 nt, Homo sapiens
  misc_RNA (1)...(19): siRNA sense strand
ugguguaggaugucggaga

SEQ ID NO: 2372702 - RNA, 19 nt, Homo sapiens
  misc_RNA (1)...(19): siRNA sense strand
guaggaugucggagaacca

SEQ ID NO: 2372703 - RNA, 19 nt, Homo sapiens
  misc_RNA (1)...(19): siRNA sense strand
aguucguguggcugagaaa

SEQ ID NO: 2372704 - RNA, 19 nt, Homo sapiens
  misc_RNA (1)...(19): siRNA sense strand
cauugagaagcgacgacaa

SEQ ID NO: 2372705 - RNA, 19 nt, Homo sapiens
  misc_RNA (1)...(19): siRNA sense strand
cggagaaccaagaacagga

SEQ ID NO: 2372706 - RNA, 19 nt, Homo sapiens
  misc_RNA (1)...(19): siRNA sense strand
uggaagacccaaagaggga

SEQ ID NO: 2372707 - RNA, 19 nt, Homo sapiens
  misc_RNA (1)...(19): siRNA sense strand
aagaacaggaggaggugau

SEQ ID NO: 2372708 - RNA, 19 nt, Homo sapiens
  misc_RNA (1)...(19): siRNA sense strand
ugguguaggaugucggaga

SEQ ID NO: 2372709 - RNA, 19 nt, Homo sapiens
  misc_RNA (1)...(19): siRNA sense strand
guaggaugucggagaacca

SEQ ID NO: 2372710 - RNA, 19 nt, Homo sapiens
  misc_RNA (1)...(19): siRNA sense strand
aguucguguggcugagaaa

SEQ ID NO: 2372711 - RNA, 19 nt, Homo sapiens
  misc_RNA (1)...(19): siRNA sense strand
cauugagaagcgacgacaa

SEQ ID NO: 2372712 - RNA, 19 nt, Homo sapiens
  misc_RNA (1)...(19): siRNA sense strand
cggagaaccaagaacagga

SEQ ID NO: 2372713 - RNA, 19 nt, Homo sapiens
  misc_RNA (1)...(19): siRNA sense strand
ggacaugggcauccaagga

SEQ ID NO: 2372714 - RNA, 19 nt, Homo sapiens
  misc_RNA (1)...(19): siRNA sense strand
cugugugaguugugcaauu

SEQ ID NO: 2372715 - RNA, 19 nt, Homo sapiens
  misc_RNA (1)...(19): siRNA sense strand
acaaagaaaagaaggaaca

SEQ ID NO: 2372716 - RNA, 19 nt, Homo sapiens
  misc_RNA (1)...(19): siRNA sense strand
ggacauuucugaagcgagc

SEQ ID NO: 2372717 - RNA, 19 nt, Homo sapiens
  misc_RNA (1)...(19): siRNA sense strand
ccuacaugcugcaggacca

SEQ ID NO: 2372718 - RNA, 19 nt, Homo sapiens
  misc_RNA (1)...(19): siRNA sense strand
guucaugcucaaagagaaa

SEQ ID NO: 2372719 - RNA, 19 nt, Homo sapiens
  misc_RNA (1)...(19): siRNA sense strand
agaagaagagugugcacaa

SEQ ID NO: 2372720 - RNA, 19 nt, Homo sapiens
  misc_RNA (1)...(19): siRNA sense strand
cccuagaggugcaggccaa

SEQ ID NO: 2372721 - RNA, 19 nt, Homo sapiens
  misc_RNA (1)...(19): siRNA sense strand
ugauacagaccaaggacaa

SEQ ID NO: 2372722 - RNA, 19 nt, Homo sapiens
  misc_RNA (1)...(19): siRNA sense strand
ccaugaaggccgugggugu

SEQ ID NO: 2372723 - RNA, 19 nt, Homo sapiens
  misc_RNA (1)...(19): siRNA sense strand
cggucaauguggaggaugu

SEQ ID NO: 2372724 - RNA, 19 nt, Homo sapiens
  misc_RNA (1)...(19): siRNA sense strand
ggacauaccugcugggagc

SEQ ID NO: 2372725 - RNA, 19 nt, Homo sapiens
  misc_RNA (1)...(19): siRNA sense strand
ccaacguguucgacaucaa

SEQ ID NO: 2372726 - RNA, 19 nt, Homo sapiens
  misc_RNA (1)...(19): siRNA sense strand
ccauagacgaggaugcaga

SEQ ID NO: 2372727 - RNA, 19 nt, Homo sapiens
  misc_RNA (1)...(19): siRNA sense strand
agagggaagaugagauuga

SEQ ID NO: 2372728 - RNA, 19 nt, Homo sapiens
  misc_RNA (1)...(19): siRNA sense strand
gguucauccaggagccuua

SEQ ID NO: 2372729 - RNA, 19 nt, Homo sapiens
  misc_RNA (1)...(19): siRNA sense strand
aguucaugcucaaagagaa

SEQ ID NO: 2372730 - RNA, 19 nt, Homo sapiens
  misc_RNA (1)...(19): siRNA sense strand
gcuagggaccccagugaaa

SEQ ID NO: 2372731 - RNA, 19 nt, Homo sapiens
  misc_RNA (1)...(19): siRNA sense strand
cagugaaaauugaggccau

SEQ ID NO: 2372732 - RNA, 19 nt, Homo sapiens
  misc_RNA (1)...(19): siRNA sense strand
ccgccaacguguucgacau

SEQ ID NO: 2372733 - RNA, 19 nt, Homo sapiens
  misc_RNA (1)...(19): siRNA sense strand
gagagagggaagaugagau

SEQ ID NO: 2372734 - RNA, 19 nt, Homo sapiens
  misc_RNA (1)...(19): siRNA sense strand
aagaugagauugaagccau

SEQ ID NO: 2372735 - RNA, 19 nt, Homo sapiens
  misc_RNA (1)...(19): siRNA sense strand
ggacagggacacaggcucu

SEQ ID NO: 2372736 - RNA, 19 nt, Homo sapiens
  misc_RNA (1)...(19): siRNA sense strand
cgccaacauucuauggaga

SEQ ID NO: 2372737 - RNA, 19 nt, Homo sapiens
  misc_RNA (1)...(19): siRNA sense strand
aguccaaaguauuaaccuu

SEQ ID NO: 2372738 - RNA, 19 nt, Homo sapiens
  misc_RNA (1)...(19): siRNA sense strand
ccuucaagcuccuggcugu

SEQ ID NO: 2372739 - RNA, 19 nt, Homo sapiens
  misc_RNA (1)...(19): siRNA sense strand
ccaacauucuauggagaga

SEQ ID NO: 2372740 - RNA, 19 nt, Homo sapiens
  misc_RNA (1)...(19): siRNA sense strand
ccaucaggauuguggaccu

SEQ ID NO: 2372741 - RNA, 19 nt, Homo sapiens
  misc_RNA (1)...(19): siRNA sense strand
cuucagcaccacagccuua

SEQ ID NO: 2372742 - RNA, 19 nt, Homo sapiens
  misc_RNA (1)...(19): siRNA sense strand
aguccugaaugaagcccaa

SEQ ID NO: 2372743 - RNA, 19 nt, Homo sapiens
  misc_RNA (1)...(19): siRNA sense strand
ggacuaaucuauugggaga

SEQ ID NO: 2372744 - RNA, 19 nt, Homo sapiens
  misc_RNA (1)...(19): siRNA sense strand
cuuaugaugauuugggaaa

SEQ ID NO: 2372745 - RNA, 19 nt, Homo sapiens
  misc_RNA (1)...(19): siRNA sense strand
gcugugaacuugagggacu

SEQ ID NO: 2372746 - RNA, 19 nt, Homo sapiens
  misc_RNA (1)...(19): siRNA sense strand
gggauaggugagaguagaa

SEQ ID NO: 2372747 - RNA, 19 nt, Homo sapiens
  misc_RNA (1)...(19): siRNA sense strand
agaauuaccacgaggagau

SEQ ID NO: 2372748 - RNA, 19 nt, Homo sapiens
  misc_RNA (1)...(19): siRNA sense strand
guucucgugucuagggaaa

SEQ ID NO: 2372749 - RNA, 19 nt, Homo sapiens
  misc_RNA (1)...(19): siRNA sense strand
aaucaaaaggggacauaaa

SEQ ID NO: 2372750 - RNA, 19 nt, Homo sapiens
  misc_RNA (1)...(19): siRNA sense strand
ccacacaagugacugggua

SEQ ID NO: 2372751 - RNA, 19 nt, Homo sapiens
  misc_RNA (1)...(19): siRNA sense strand
uagaaggagcugugaacuu

SEQ ID NO: 2372752 - RNA, 19 nt, Homo sapiens
  misc_RNA (1)...(19): siRNA sense strand
agucaacacaagauggcaa

SEQ ID NO: 2372753 - RNA, 19 nt, Homo sapiens
  misc_RNA (1)...(19): siRNA sense strand
cacacaagugacuggguaa

SEQ ID NO: 2372754 - RNA, 19 nt, Homo sapiens
  misc_RNA (1)...(19): siRNA sense strand
ugucaacuuuacugagaau

SEQ ID NO: 2372755 - RNA, 19 nt, Homo sapiens
  misc_RNA (1)...(19): siRNA sense strand
gcugauuggccgaggucga

SEQ ID NO: 2372756 - RNA, 19 nt, Homo sapiens
  misc_RNA (1)...(19): siRNA sense strand
aggucgauauggagcagua

SEQ ID NO: 2372757 - RNA, 19 nt, Homo sapiens
  misc_RNA (1)...(19): siRNA sense strand
gggacauaaaucuuguaaa

SEQ ID NO: 2372758 - RNA, 19 nt, Homo sapiens
  misc_RNA (1)...(19): siRNA sense strand
gcagaaucaagaacggcua

SEQ ID NO: 2372759 - RNA, 19 nt, Homo sapiens
  misc_RNA (1)...(19): siRNA sense strand
ugaugauuugggaaagaaa

SEQ ID NO: 2372760 - RNA, 19 nt, Homo sapiens
  misc_RNA (1)...(19): siRNA sense strand
ggucacucaaggagacaau

SEQ ID NO: 2372761 - RNA, 19 nt, Homo sapiens
  misc_RNA (1)...(19): siRNA sense strand
cgagauuuaaacagcagaa

SEQ ID NO: 2372762 - RNA, 19 nt, Homo sapiens
  misc_RNA (1)...(19): siRNA sense strand
cuguguuauuagugacuuu

SEQ ID NO: 2372763 - RNA, 19 nt, Homo sapiens
  misc_RNA (1)...(19): siRNA sense strand
ccagaguaccagauggcuu

SEQ ID NO: 2372764 - RNA, 19 nt, Homo sapiens
  misc_RNA (1)...(19): siRNA sense strand
ggaccaggaugcagaggcu

SEQ ID NO: 2372765 - RNA, 19 nt, Homo sapiens
  misc_RNA (1)...(19): siRNA sense strand
cuuuauaguuggagaugag

SEQ ID NO: 2372766 - RNA, 19 nt, Homo sapiens
  misc_RNA (1)...(19): siRNA sense strand
cuugagggacugugaauca

SEQ ID NO: 2372767 - RNA, 19 nt, Homo sapiens
  misc_RNA (1)...(19): siRNA sense strand
gggacaauauuaugcucga

SEQ ID NO: 2372768 - RNA, 19 nt, Homo sapiens
  misc_RNA (1)...(19): siRNA sense strand
acagaauguugacaggaga

SEQ ID NO: 2372769 - RNA, 19 nt, Homo sapiens
  misc_RNA (1)...(19): siRNA sense strand
gcuagaaggagcugugaac

SEQ ID NO: 2372770 - RNA, 19 nt, Homo sapiens
  misc_RNA (1)...(19): siRNA sense strand
cuuugaaacaaguagacau

SEQ ID NO: 2372771 - RNA, 19 nt, Homo sapiens
  misc_RNA (1)...(19): siRNA sense strand
agaaggaggcacugcuaca

SEQ ID NO: 2372772 - RNA, 19 nt, Homo sapiens
  misc_RNA (1)...(19): siRNA sense strand
ugcuauggccuuugggaga

SEQ ID NO: 2372773 - RNA, 19 nt, Homo sapiens
  misc_RNA (1)...(19): siRNA sense strand
ugauggaacaugacaacau

SEQ ID NO: 2372774 - RNA, 19 nt, Homo sapiens
  misc_RNA (1)...(19): siRNA sense strand
gcccaggggaggaagauaa

SEQ ID NO: 2372775 - RNA, 19 nt, Homo sapiens
  misc_RNA (1)...(19): siRNA sense strand
aggaaaggauggcugaacu

SEQ ID NO: 2372776 - RNA, 19 nt, Homo sapiens
  misc_RNA (1)...(19): siRNA sense strand
gugucuaaagauauaggaa

SEQ ID NO: 2372777 - RNA, 19 nt, Homo sapiens
  misc_RNA (1)...(19): siRNA sense strand
aggaaugaacugucuguga

SEQ ID NO: 2372778 - RNA, 19 nt, Homo sapiens
  misc_RNA (1)...(19): siRNA sense strand
uauaguuggagaugagaga

SEQ ID NO: 2372779 - RNA, 19 nt, Homo sapiens
  misc_RNA (1)...(19): siRNA sense strand
ccaauggaucuuuaugcaa

SEQ ID NO: 2372780 - RNA, 19 nt, Homo sapiens
  misc_RNA (1)...(19): siRNA sense strand
ugaaacuguuggagcugau

SEQ ID NO: 2372781 - RNA, 19 nt, Homo sapiens
  misc_RNA (1)...(19): siRNA sense strand
caugaaaaugggacaauau

SEQ ID NO: 2372782 - RNA, 19 nt, Homo sapiens
  misc_RNA (1)...(19): siRNA sense strand
cagaagugcuagaaggagc

SEQ ID NO: 2372783 - RNA, 19 nt, Homo sapiens
  misc_RNA (1)...(19): siRNA sense strand
cguuuaaagauccguauca

SEQ ID NO: 2372784 - RNA, 19 nt, Homo sapiens
  misc_RNA (1)...(19): siRNA sense strand
cugugaaucagcuuugaaa

SEQ ID NO: 2372785 - RNA, 19 nt, Homo sapiens
  misc_RNA (1)...(19): siRNA sense strand
aaaucaggaucaggugaaa

SEQ ID NO: 2372786 - RNA, 19 nt, Homo sapiens
  misc_RNA (1)...(19): siRNA sense strand
ccauggugucuaaagauau

SEQ ID NO: 2372787 - RNA, 19 nt, Homo sapiens
  misc_RNA (1)...(19): siRNA sense strand
ggacuaaucuauugggaga

SEQ ID NO: 2372788 - RNA, 19 nt, Homo sapiens
  misc_RNA (1)...(19): siRNA sense strand
cuuaugaugauuugggaaa

SEQ ID NO: 2372789 - RNA, 19 nt, Homo sapiens
  misc_RNA (1)...(19): siRNA sense strand
gcugugaacuugagggacu

SEQ ID NO: 2372790 - RNA, 19 nt, Homo sapiens
  misc_RNA (1)...(19): siRNA sense strand
gggauaggugagaguagaa

SEQ ID NO: 2372791 - RNA, 19 nt, Homo sapiens
  misc_RNA (1)...(19): siRNA sense strand
agaauuaccacgaggagau

SEQ ID NO: 2372792 - RNA, 19 nt, Homo sapiens
  misc_RNA (1)...(19): siRNA sense strand
guucucgugucuagggaaa

SEQ ID NO: 2372793 - RNA, 19 nt, Homo sapiens
  misc_RNA (1)...(19): siRNA sense strand
aaucaaaaggggacauaaa

SEQ ID NO: 2372794 - RNA, 19 nt, Homo sapiens
  misc_RNA (1)...(19): siRNA sense strand
ccacacaagugacugggua

SEQ ID NO: 2372795 - RNA, 19 nt, Homo sapiens
  misc_RNA (1)...(19): siRNA sense strand
uagaaggagcugugaacuu

SEQ ID NO: 2372796 - RNA, 19 nt, Homo sapiens
  misc_RNA (1)...(19): siRNA sense strand
cacacaagugacuggguaa

SEQ ID NO: 2372797 - RNA, 19 nt, Homo sapiens
  misc_RNA (1)...(19): siRNA sense strand
ugucaacuuuacugagaau

SEQ ID NO: 2372798 - RNA, 19 nt, Homo sapiens
  misc_RNA (1)...(19): siRNA sense strand
gcugauuggccgaggucga

SEQ ID NO: 2372799 - RNA, 19 nt, Homo sapiens
  misc_RNA (1)...(19): siRNA sense strand
aggucgauauggagcagua

SEQ ID NO: 2372800 - RNA, 19 nt, Homo sapiens
  misc_RNA (1)...(19): siRNA sense strand
gcagaaucaagaacggcua

SEQ ID NO: 2372801 - RNA, 19 nt, Homo sapiens
  misc_RNA (1)...(19): siRNA sense strand
gggacauaaaucuuguaaa

SEQ ID NO: 2372802 - RNA, 19 nt, Homo sapiens
  misc_RNA (1)...(19): siRNA sense strand
ugaugauuugggaaagaaa

SEQ ID NO: 2372803 - RNA, 19 nt, Homo sapiens
  misc_RNA (1)...(19): siRNA sense strand
ggucacucaaggagacaau

SEQ ID NO: 2372804 - RNA, 19 nt, Homo sapiens
  misc_RNA (1)...(19): siRNA sense strand
cgagauuuaaacagcagaa

SEQ ID NO: 2372805 - RNA, 19 nt, Homo sapiens
  misc_RNA (1)...(19): siRNA sense strand
cuguguuauuagugacuuu

SEQ ID NO: 2372806 - RNA, 19 nt, Homo sapiens
  misc_RNA (1)...(19): siRNA sense strand
ccagaguaccagauggcuu

SEQ ID NO: 2372807 - RNA, 19 nt, Homo sapiens
  misc_RNA (1)...(19): siRNA sense strand
ggaccaggaugcagaggcu

SEQ ID NO: 2372808 - RNA, 19 nt, Homo sapiens
  misc_RNA (1)...(19): siRNA sense strand
cuuuauaguuggagaugag

SEQ ID NO: 2372809 - RNA, 19 nt, Homo sapiens
  misc_RNA (1)...(19): siRNA sense strand
cuugagggacugugaauca

SEQ ID NO: 2372810 - RNA, 19 nt, Homo sapiens
  misc_RNA (1)...(19): siRNA sense strand
gggacaauauuaugcucga

SEQ ID NO: 2372811 - RNA, 19 nt, Homo sapiens
  misc_RNA (1)...(19): siRNA sense strand
acagaauguugacaggaga

SEQ ID NO: 2372812 - RNA, 19 nt, Homo sapiens
  misc_RNA (1)...(19): siRNA sense strand
gcuagaaggagcugugaac

SEQ ID NO: 2372813 - RNA, 19 nt, Homo sapiens
  misc_RNA (1)...(19): siRNA sense strand
cuuugaaacaaguagacau

SEQ ID NO: 2372814 - RNA, 19 nt, Homo sapiens
  misc_RNA (1)...(19): siRNA sense strand
ugcuauggccuuugggaga

SEQ ID NO: 2372815 - RNA, 19 nt, Homo sapiens
  misc_RNA (1)...(19): siRNA sense strand
ugauggaacaugacaacau

SEQ ID NO: 2372816 - RNA, 19 nt, Homo sapiens
  misc_RNA (1)...(19): siRNA sense strand
gcccaggggaggaagauaa

SEQ ID NO: 2372817 - RNA, 19 nt, Homo sapiens
  misc_RNA (1)...(19): siRNA sense strand
aggaaaggauggcugaacu

SEQ ID NO: 2372818 - RNA, 19 nt, Homo sapiens
  misc_RNA (1)...(19): siRNA sense strand
uauaguuggagaugagaga

SEQ ID NO: 2372819 - RNA, 19 nt, Homo sapiens
  misc_RNA (1)...(19): siRNA sense strand
ccaauggaucuuuaugcaa

SEQ ID NO: 2372820 - RNA, 19 nt, Homo sapiens
  misc_RNA (1)...(19): siRNA sense strand
caugaaaaugggacaauau

SEQ ID NO: 2372821 - RNA, 19 nt, Homo sapiens
  misc_RNA (1)...(19): siRNA sense strand
cguuuaaagauccguauca

SEQ ID NO: 2372822 - RNA, 19 nt, Homo sapiens
  misc_RNA (1)...(19): siRNA sense strand
ugaaacuguuggagcugau

SEQ ID NO: 2372823 - RNA, 19 nt, Homo sapiens
  misc_RNA (1)...(19): siRNA sense strand
cagaagugcuagaaggagc

SEQ ID NO: 2372824 - RNA, 19 nt, Homo sapiens
  misc_RNA (1)...(19): siRNA sense strand
cugugaaucagcuuugaaa

SEQ ID NO: 2372825 - RNA, 19 nt, Homo sapiens
  misc_RNA (1)...(19): siRNA sense strand
ggacguacauccaggccau

SEQ ID NO: 2372826 - RNA, 19 nt, Homo sapiens
  misc_RNA (1)...(19): siRNA sense strand
agaacgaucugcaggccaa

SEQ ID NO: 2372827 - RNA, 19 nt, Homo sapiens
  misc_RNA (1)...(19): siRNA sense strand
ugagcaaggcggugaagau

SEQ ID NO: 2372828 - RNA, 19 nt, Homo sapiens
  misc_RNA (1)...(19): siRNA sense strand
caguacaggcggugaucuu

SEQ ID NO: 2372829 - RNA, 19 nt, Homo sapiens
  misc_RNA (1)...(19): siRNA sense strand
ugaccaaccuggagagccu

SEQ ID NO: 2372830 - RNA, 19 nt, Homo sapiens
  misc_RNA (1)...(19): siRNA sense strand
gucuauaugcagaguaaga

SEQ ID NO: 2372831 - RNA, 19 nt, Homo sapiens
  misc_RNA (1)...(19): siRNA sense strand
cgccaaaggaagaggagcu

SEQ ID NO: 2372832 - RNA, 19 nt, Homo sapiens
  misc_RNA (1)...(19): siRNA sense strand
aagucaugcugaaggacau

SEQ ID NO: 2372833 - RNA, 19 nt, Homo sapiens
  misc_RNA (1)...(19): siRNA sense strand
ccagggaagucgagcucca

SEQ ID NO: 2372834 - RNA, 19 nt, Homo sapiens
  misc_RNA (1)...(19): siRNA sense strand
gcaagaaguaugagcagcu

SEQ ID NO: 2372835 - RNA, 19 nt, Homo sapiens
  misc_RNA (1)...(19): siRNA sense strand
gcacagacccggaacugga

SEQ ID NO: 2372836 - RNA, 19 nt, Homo sapiens
  misc_RNA (1)...(19): siRNA sense strand
cugcacuggccgagauuga

SEQ ID NO: 2372837 - RNA, 19 nt, Homo sapiens
  misc_RNA (1)...(19): siRNA sense strand
cccuggaggaacugagcaa

SEQ ID NO: 2372838 - RNA, 19 nt, Homo sapiens
  misc_RNA (1)...(19): siRNA sense strand
aggccaggacagugaggau

SEQ ID NO: 2372839 - RNA, 19 nt, Homo sapiens
  misc_RNA (1)...(19): siRNA sense strand
agaagaaggugcgggacca

SEQ ID NO: 2372840 - RNA, 19 nt, Homo sapiens
  misc_RNA (1)...(19): siRNA sense strand
ggaccuggcuguugagcug

SEQ ID NO: 2372841 - RNA, 19 nt, Homo sapiens
  misc_RNA (1)...(19): siRNA sense strand
acagugacgacgagagcga

SEQ ID NO: 2372842 - RNA, 19 nt, Homo sapiens
  misc_RNA (1)...(19): siRNA sense strand
gcguggaauucauggacga

SEQ ID NO: 2372843 - RNA, 19 nt, Homo sapiens
  misc_RNA (1)...(19): siRNA sense strand
ggaccgguucucagggaca

SEQ ID NO: 2372844 - RNA, 19 nt, Homo sapiens
  misc_RNA (1)...(19): siRNA sense strand
ugaaugaacugaagccaga

SEQ ID NO: 2372845 - RNA, 19 nt, Homo sapiens
  misc_RNA (1)...(19): siRNA sense strand
agaacaaguagaacagcua

SEQ ID NO: 2372846 - RNA, 19 nt, Homo sapiens
  misc_RNA (1)...(19): siRNA sense strand
ugagcaugauucagagcaa

SEQ ID NO: 2372847 - RNA, 19 nt, Homo sapiens
  misc_RNA (1)...(19): siRNA sense strand
cuccagagcagcaggaaau

SEQ ID NO: 2372848 - RNA, 19 nt, Homo sapiens
  misc_RNA (1)...(19): siRNA sense strand
ccucaaagaaagaagaaag

SEQ ID NO: 2372849 - RNA, 19 nt, Homo sapiens
  misc_RNA (1)...(19): siRNA sense strand
ggaucauugaagagaacau

SEQ ID NO: 2372850 - RNA, 19 nt, Homo sapiens
  misc_RNA (1)...(19): siRNA sense strand
cagaaaacuugaagagucu

SEQ ID NO: 2372851 - RNA, 19 nt, Homo sapiens
  misc_RNA (1)...(19): siRNA sense strand
agacauaagcgcccagaca

SEQ ID NO: 2372852 - RNA, 19 nt, Homo sapiens
  misc_RNA (1)...(19): siRNA sense strand
gggaagucguacagcgaac

SEQ ID NO: 2372853 - RNA, 19 nt, Homo sapiens
  misc_RNA (1)...(19): siRNA sense strand
cgggaauuggacaagauaa

SEQ ID NO: 2372854 - RNA, 19 nt, Homo sapiens
  misc_RNA (1)...(19): siRNA sense strand
ccuggauggccaugagcua

SEQ ID NO: 2372855 - RNA, 19 nt, Homo sapiens
  misc_RNA (1)...(19): siRNA sense strand
agagaacaucccugagcua

SEQ ID NO: 2372856 - RNA, 19 nt, Homo sapiens
  misc_RNA (1)...(19): siRNA sense strand
agcucuggcucgauggaaa

SEQ ID NO: 2372857 - RNA, 19 nt, Homo sapiens
  misc_RNA (1)...(19): siRNA sense strand
cagaaguggcauucaugaa

SEQ ID NO: 2372858 - RNA, 19 nt, Homo sapiens
  misc_RNA (1)...(19): siRNA sense strand
guuacugugcggagagaca

SEQ ID NO: 2372859 - RNA, 19 nt, Homo sapiens
  misc_RNA (1)...(19): siRNA sense strand
ccucaaaggccuccguuca

SEQ ID NO: 2372860 - RNA, 19 nt, Homo sapiens
  misc_RNA (1)...(19): siRNA sense strand
ggaaaugaauugaagucug

SEQ ID NO: 2372861 - RNA, 19 nt, Homo sapiens
  misc_RNA (1)...(19): siRNA sense strand
ugaacugaagccagaacaa

SEQ ID NO: 2372862 - RNA, 19 nt, Homo sapiens
  misc_RNA (1)...(19): siRNA sense strand
agaacaucccugagcuauu

SEQ ID NO: 2372863 - RNA, 19 nt, Homo sapiens
  misc_RNA (1)...(19): siRNA sense strand
gcaugaaccucgagugguc

SEQ ID NO: 2372864 - RNA, 19 nt, Homo sapiens
  misc_RNA (1)...(19): siRNA sense strand
agggcuauguauuguaaau

SEQ ID NO: 2372865 - RNA, 19 nt, Homo sapiens
  misc_RNA (1)...(19): siRNA sense strand
agccagaacaaguagaaca

SEQ ID NO: 2372866 - RNA, 19 nt, Homo sapiens
  misc_RNA (1)...(19): siRNA sense strand
uguacaggcuggaugacau

SEQ ID NO: 2372867 - RNA, 19 nt, Homo sapiens
  misc_RNA (1)...(19): siRNA sense strand
uguccuugaacuugagcaa

SEQ ID NO: 2372868 - RNA, 19 nt, Homo sapiens
  misc_RNA (1)...(19): siRNA sense strand
gcggaaugccaguucugaa

SEQ ID NO: 2372869 - RNA, 19 nt, Homo sapiens
  misc_RNA (1)...(19): siRNA sense strand
ucuccagagcagcaggaaa

SEQ ID NO: 2372870 - RNA, 19 nt, Homo sapiens
  misc_RNA (1)...(19): siRNA sense strand
gaagagauccaaagagccu

SEQ ID NO: 2372871 - RNA, 19 nt, Homo sapiens
  misc_RNA (1)...(19): siRNA sense strand
cagagcuccuccagagaga

SEQ ID NO: 2372872 - RNA, 19 nt, Homo sapiens
  misc_RNA (1)...(19): siRNA sense strand
aacaaguagaacagcuaaa

SEQ ID NO: 2372873 - RNA, 19 nt, Homo sapiens
  misc_RNA (1)...(19): siRNA sense strand
uccuugaacuugagcaaca

SEQ ID NO: 2372874 - RNA, 19 nt, Homo sapiens
  misc_RNA (1)...(19): siRNA sense strand
ucacucaucucaaggccaa

SEQ ID NO: 2372875 - RNA, 19 nt, Homo sapiens
  misc_RNA (1)...(19): siRNA sense strand
uugaggaagaugauggaga

SEQ ID NO: 2372876 - RNA, 19 nt, Homo sapiens
  misc_RNA (1)...(19): siRNA sense strand
aauugaagucugagcggga

SEQ ID NO: 2372877 - RNA, 19 nt, Homo sapiens
  misc_RNA (1)...(19): siRNA sense strand
gggaagcuauuuuggaaca

SEQ ID NO: 2372878 - RNA, 19 nt, Homo sapiens
  misc_RNA (1)...(19): siRNA sense strand
cgaugaugaacgcguuaau

SEQ ID NO: 2372879 - RNA, 19 nt, Homo sapiens
  misc_RNA (1)...(19): siRNA sense strand
cguuaauuucccucaaaga

SEQ ID NO: 2372880 - RNA, 19 nt, Homo sapiens
  misc_RNA (1)...(19): siRNA sense strand
aguuaaagccugaaggucu

SEQ ID NO: 2372881 - RNA, 19 nt, Homo sapiens
  misc_RNA (1)...(19): siRNA sense strand
cguucagauucuaggagau

SEQ ID NO: 2372882 - RNA, 19 nt, Homo sapiens
  misc_RNA (1)...(19): siRNA sense strand
uggagaaguuaaagccuga

SEQ ID NO: 2372883 - RNA, 19 nt, Homo sapiens
  misc_RNA (1)...(19): siRNA sense strand
auaaagugguuucuggaga

SEQ ID NO: 2372884 - RNA, 19 nt, Homo sapiens
  misc_RNA (1)...(19): siRNA sense strand
agaaaugucaggaggcagu

SEQ ID NO: 2372885 - RNA, 19 nt, Homo sapiens
  misc_RNA (1)...(19): siRNA sense strand
aguuaaagccugaaggucu

SEQ ID NO: 2372886 - RNA, 19 nt, Homo sapiens
  misc_RNA (1)...(19): siRNA sense strand
cguucagauucuaggagau

SEQ ID NO: 2372887 - RNA, 19 nt, Homo sapiens
  misc_RNA (1)...(19): siRNA sense strand
uggagaaguuaaagccuga

SEQ ID NO: 2372888 - RNA, 19 nt, Homo sapiens
  misc_RNA (1)...(19): siRNA sense strand
auaaagugguuucuggaga

SEQ ID NO: 2372889 - RNA, 19 nt, Homo sapiens
  misc_RNA (1)...(19): siRNA sense strand
agaaaugucaggaggcagu

SEQ ID NO: 2372890 - RNA, 19 nt, Homo sapiens
  misc_RNA (1)...(19): siRNA sense strand
ggacaugggcauccaggga

SEQ ID NO: 2372891 - RNA, 19 nt, Homo sapiens
  misc_RNA (1)...(19): siRNA sense strand
acaugggcauccagggaga

SEQ ID NO: 2372892 - RNA, 19 nt, Homo sapiens
  misc_RNA (1)...(19): siRNA sense strand
aggcagaggaaucggagaa

SEQ ID NO: 2372893 - RNA, 19 nt, Homo sapiens
  misc_RNA (1)...(19): siRNA sense strand
aggaggagcaggaggaauc

SEQ ID NO: 2372894 - RNA, 19 nt, Homo sapiens
  misc_RNA (1)...(19): siRNA sense strand
ucgugagacgcaagaagaa

SEQ ID NO: 2372895 - RNA, 19 nt, Homo sapiens
  misc_RNA (1)...(19): siRNA sense strand
gugacaagcgcauagccaa

SEQ ID NO: 2372896 - RNA, 19 nt, Homo sapiens
  misc_RNA (1)...(19): siRNA sense strand
cacuagaugcggaggagga

SEQ ID NO: 2372897 - RNA, 19 nt, Homo sapiens
  misc_RNA (1)...(19): siRNA sense strand
cagccaaggaugaggccca

SEQ ID NO: 2372898 - RNA, 19 nt, Homo sapiens
  misc_RNA (1)...(19): siRNA sense strand
ggucaugcacagagggaaa

SEQ ID NO: 2372899 - RNA, 19 nt, Homo sapiens
  misc_RNA (1)...(19): siRNA sense strand
ccauggaacuagagagaca

SEQ ID NO: 2372900 - RNA, 19 nt, Homo sapiens
  misc_RNA (1)...(19): siRNA sense strand
gcacagagggaaagggaga

SEQ ID NO: 2372901 - RNA, 19 nt, Homo sapiens
  misc_RNA (1)...(19): siRNA sense strand
ccauggguuuggaggguaa

SEQ ID NO: 2372902 - RNA, 19 nt, Homo sapiens
  misc_RNA (1)...(19): siRNA sense strand
cuagagagacaaagaggaa

SEQ ID NO: 2372903 - RNA, 19 nt, Homo sapiens
  misc_RNA (1)...(19): siRNA sense strand
aagauggaguugaggacua

SEQ ID NO: 2372904 - RNA, 19 nt, Homo sapiens
  misc_RNA (1)...(19): siRNA sense strand
caaagaugcaugaggugaa

SEQ ID NO: 2372905 - RNA, 19 nt, Homo sapiens
  misc_RNA (1)...(19): siRNA sense strand
uggcagaggaagcagguua

SEQ ID NO: 2372906 - RNA, 19 nt, Homo sapiens
  misc_RNA (1)...(19): siRNA sense strand
cacaaggacaagaaagaaa

SEQ ID NO: 2372907 - RNA, 19 nt, Homo sapiens
  misc_RNA (1)...(19): siRNA sense strand
gcaugaggugaaagguaaa

SEQ ID NO: 2372908 - RNA, 19 nt, Homo sapiens
  misc_RNA (1)...(19): siRNA sense strand
gugcaggccaguauggaaa

SEQ ID NO: 2372909 - RNA, 19 nt, Homo sapiens
  misc_RNA (1)...(19): siRNA sense strand
gugagauguuucuggaaga

SEQ ID NO: 2372910 - RNA, 19 nt, Homo sapiens
  misc_RNA (1)...(19): siRNA sense strand
agacacauucacagacaaa

SEQ ID NO: 2372911 - RNA, 19 nt, Homo sapiens
  misc_RNA (1)...(19): siRNA sense strand
gggaaagggagaauacaca

SEQ ID NO: 2372912 - RNA, 19 nt, Homo sapiens
  misc_RNA (1)...(19): siRNA sense strand
aaggaaaagccaagaacua

SEQ ID NO: 2372913 - RNA, 19 nt, Homo sapiens
  misc_RNA (1)...(19): siRNA sense strand
aggucgauuuggacaauua

SEQ ID NO: 2372914 - RNA, 19 nt, Homo sapiens
  misc_RNA (1)...(19): siRNA sense strand
uuaacaaauuggaccgaau

SEQ ID NO: 2372915 - RNA, 19 nt, Homo sapiens
  misc_RNA (1)...(19): siRNA sense strand
acaagaacgaucuggaaaa

SEQ ID NO: 2372916 - RNA, 19 nt, Homo sapiens
  misc_RNA (1)...(19): siRNA sense strand
acuuugacacugagaacaa

SEQ ID NO: 2372917 - RNA, 19 nt, Homo sapiens
  misc_RNA (1)...(19): siRNA sense strand
uguagaucuuauugaggaa

SEQ ID NO: 2372918 - RNA, 19 nt, Homo sapiens
  misc_RNA (1)...(19): siRNA sense strand
uguucgauauggugagauu

SEQ ID NO: 2372919 - RNA, 19 nt, Homo sapiens
  misc_RNA (1)...(19): siRNA sense strand
aggucaacuuccuguuaaa

SEQ ID NO: 2372920 - RNA, 19 nt, Homo sapiens
  misc_RNA (1)...(19): siRNA sense strand
gguaggucgauuuggacaa

SEQ ID NO: 2372921 - RNA, 19 nt, Homo sapiens
  misc_RNA (1)...(19): siRNA sense strand
uggaggauguugaggaagu

SEQ ID NO: 2372922 - RNA, 19 nt, Homo sapiens
  misc_RNA (1)...(19): siRNA sense strand
uggaaagggcccugagagu

SEQ ID NO: 2372923 - RNA, 19 nt, Homo sapiens
  misc_RNA (1)...(19): siRNA sense strand
aucuauaacacaaggacaa

SEQ ID NO: 2372924 - RNA, 19 nt, Homo sapiens
  misc_RNA (1)...(19): siRNA sense strand
ggaaagagaguauggcugu

SEQ ID NO: 2372925 - RNA, 19 nt, Homo sapiens
  misc_RNA (1)...(19): siRNA sense strand
guuaucagggagagcuaaa

SEQ ID NO: 2372926 - RNA, 19 nt, Homo sapiens
  misc_RNA (1)...(19): siRNA sense strand
ugggaagcgccuugaagaa

SEQ ID NO: 2372927 - RNA, 19 nt, Homo sapiens
  misc_RNA (1)...(19): siRNA sense strand
agaugaaacauucggauca

SEQ ID NO: 2372928 - RNA, 19 nt, Homo sapiens
  misc_RNA (1)...(19): siRNA sense strand
ggcagaggaagcagguuaa

SEQ ID NO: 2372929 - RNA, 19 nt, Homo sapiens
  misc_RNA (1)...(19): siRNA sense strand
cggcaggagcuaauugaau

SEQ ID NO: 2372930 - RNA, 19 nt, Homo sapiens
  misc_RNA (1)...(19): siRNA sense strand
ggagaauuacaccuggaaa

SEQ ID NO: 2372931 - RNA, 19 nt, Homo sapiens
  misc_RNA (1)...(19): siRNA sense strand
gaggcuggaaagagaguau

SEQ ID NO: 2372932 - RNA, 19 nt, Homo sapiens
  misc_RNA (1)...(19): siRNA sense strand
uuuggaagcuacaggucaa

SEQ ID NO: 2372933 - RNA, 19 nt, Homo sapiens
  misc_RNA (1)...(19): siRNA sense strand
caguuaucagggagagcua

SEQ ID NO: 2372934 - RNA, 19 nt, Homo sapiens
  misc_RNA (1)...(19): siRNA sense strand
caagaaagaaaguacgguu

SEQ ID NO: 2372935 - RNA, 19 nt, Homo sapiens
  misc_RNA (1)...(19): siRNA sense strand
augcaugaggugaaaggua

SEQ ID NO: 2372936 - RNA, 19 nt, Homo sapiens
  misc_RNA (1)...(19): siRNA sense strand
agguaaagauggaguuggu

SEQ ID NO: 2372937 - RNA, 19 nt, Homo sapiens
  misc_RNA (1)...(19): siRNA sense strand
ucacaauagaaguggaaag

SEQ ID NO: 2372938 - RNA, 19 nt, Homo sapiens
  misc_RNA (1)...(19): siRNA sense strand
ggagaauacacaauggagu

SEQ ID NO: 2372939 - RNA, 19 nt, Homo sapiens
  misc_RNA (1)...(19): siRNA sense strand
aaaucauaaugcagcguuu

SEQ ID NO: 2372940 - RNA, 19 nt, Homo sapiens
  misc_RNA (1)...(19): siRNA sense strand
gggacaaguaauugcagga

SEQ ID NO: 2372941 - RNA, 19 nt, Homo sapiens
  misc_RNA (1)...(19): siRNA sense strand
uauagauacuccugggcau

SEQ ID NO: 2372942 - RNA, 19 nt, Homo sapiens
  misc_RNA (1)...(19): siRNA sense strand
aguuauaucuggaauggga

SEQ ID NO: 2372943 - RNA, 19 nt, Homo sapiens
  misc_RNA (1)...(19): siRNA sense strand
acgaaauauuggaaucuca

SEQ ID NO: 2372944 - RNA, 19 nt, Homo sapiens
  misc_RNA (1)...(19): siRNA sense strand
acccagaggacuacacuaa

SEQ ID NO: 2372945 - RNA, 19 nt, Homo sapiens
  misc_RNA (1)...(19): siRNA sense strand
cugcagcaaaugaggucua

SEQ ID NO: 2372946 - RNA, 19 nt, Homo sapiens
  misc_RNA (1)...(19): siRNA sense strand
ggaugacucaaaagagaaa

SEQ ID NO: 2372947 - RNA, 19 nt, Homo sapiens
  misc_RNA (1)...(19): siRNA sense strand
gagaaaaccaaaauccuaa

SEQ ID NO: 2372948 - RNA, 19 nt, Homo sapiens
  misc_RNA (1)...(19): siRNA sense strand
cucagaggcuggaaagaga

SEQ ID NO: 2372949 - RNA, 19 nt, Homo sapiens
  misc_RNA (1)...(19): siRNA sense strand
aacacaaggacaagaaaga

SEQ ID NO: 2372950 - RNA, 19 nt, Homo sapiens
  misc_RNA (1)...(19): siRNA sense strand
cuauuauggcuguggaagu

SEQ ID NO: 2372951 - RNA, 19 nt, Homo sapiens
  misc_RNA (1)...(19): siRNA sense strand
ggauguugaggaaguauau

SEQ ID NO: 2372952 - RNA, 19 nt, Homo sapiens
  misc_RNA (1)...(19): siRNA sense strand
ccacacaagaagacgucau

SEQ ID NO: 2372953 - RNA, 19 nt, Homo sapiens
  misc_RNA (1)...(19): siRNA sense strand
uggcagguuuacaagagaa

SEQ ID NO: 2372954 - RNA, 19 nt, Homo sapiens
  misc_RNA (1)...(19): siRNA sense strand
gcaaagaugcaugagguga

SEQ ID NO: 2372955 - RNA, 19 nt, Homo sapiens
  misc_RNA (1)...(19): siRNA sense strand
aggagaaggagcuguguau

SEQ ID NO: 2372956 - RNA, 19 nt, Homo sapiens
  misc_RNA (1)...(19): siRNA sense strand
aguauuucauugagcacaa

SEQ ID NO: 2372957 - RNA, 19 nt, Homo sapiens
  misc_RNA (1)...(19): siRNA sense strand
cggaagaagaagauugcca

SEQ ID NO: 2372958 - RNA, 19 nt, Homo sapiens
  misc_RNA (1)...(19): siRNA sense strand
cggauggcccagaaggaga

SEQ ID NO: 2372959 - RNA, 19 nt, Homo sapiens
  misc_RNA (1)...(19): siRNA sense strand
cggugcagaagguggauga

SEQ ID NO: 2372960 - RNA, 19 nt, Homo sapiens
  misc_RNA (1)...(19): siRNA sense strand
gggagacggaagaguuaca

SEQ ID NO: 2372961 - RNA, 19 nt, Homo sapiens
  misc_RNA (1)...(19): siRNA sense strand
cggggagacggaagaguua

SEQ ID NO: 2372962 - RNA, 19 nt, Homo sapiens
  misc_RNA (1)...(19): siRNA sense strand
ccgcauagucaaacaggca

SEQ ID NO: 2372963 - RNA, 19 nt, Homo sapiens
  misc_RNA (1)...(19): siRNA sense strand
gcauagucaaacaggcaca

SEQ ID NO: 2372964 - RNA, 19 nt, Homo sapiens
  misc_RNA (1)...(19): siRNA sense strand
gcucaagcccacagcacca

SEQ ID NO: 2372965 - RNA, 19 nt, Homo sapiens
  misc_RNA (1)...(19): siRNA sense strand
gagcaaugccagugggacc

SEQ ID NO: 2372966 - RNA, 19 nt, Homo sapiens
  misc_RNA (1)...(19): siRNA sense strand
aggcacaauaugaguuuga

SEQ ID NO: 2372967 - RNA, 19 nt, Homo sapiens
  misc_RNA (1)...(19): siRNA sense strand
aguucaugcuggagacacu

SEQ ID NO: 2372968 - RNA, 19 nt, Homo sapiens
  misc_RNA (1)...(19): siRNA sense strand
gccgcaacuuugugagcuu

SEQ ID NO: 2372969 - RNA, 19 nt, Homo sapiens
  misc_RNA (1)...(19): siRNA sense strand
cggaagaugcugcagaaac

SEQ ID NO: 2372970 - RNA, 19 nt, Homo sapiens
  misc_RNA (1)...(19): siRNA sense strand
ccgcauagucaaacaggca

SEQ ID NO: 2372971 - RNA, 19 nt, Homo sapiens
  misc_RNA (1)...(19): siRNA sense strand
gcauagucaaacaggcaca

SEQ ID NO: 2372972 - RNA, 19 nt, Homo sapiens
  misc_RNA (1)...(19): siRNA sense strand
gcucaagcccacagcacca

SEQ ID NO: 2372973 - RNA, 19 nt, Homo sapiens
  misc_RNA (1)...(19): siRNA sense strand
gagcaaugccagugggacc

SEQ ID NO: 2372974 - RNA, 19 nt, Homo sapiens
  misc_RNA (1)...(19): siRNA sense strand
aggcacaauaugaguuuga

SEQ ID NO: 2372975 - RNA, 19 nt, Homo sapiens
  misc_RNA (1)...(19): siRNA sense strand
aguucaugcuggagacacu

SEQ ID NO: 2372976 - RNA, 19 nt, Homo sapiens
  misc_RNA (1)...(19): siRNA sense strand
gccgcaacuuugugagcuu

SEQ ID NO: 2372977 - RNA, 19 nt, Homo sapiens
  misc_RNA (1)...(19): siRNA sense strand
cggaagaugcugcagaaac

SEQ ID NO: 2372978 - RNA, 19 nt, Homo sapiens
  misc_RNA (1)...(19): siRNA sense strand
gaggcaaggccgaggauaa

SEQ ID NO: 2372979 - RNA, 19 nt, Homo sapiens
  misc_RNA (1)...(19): siRNA sense strand
agauuaugccagugcagaa

SEQ ID NO: 2372980 - RNA, 19 nt, Homo sapiens
  misc_RNA (1)...(19): siRNA sense strand
ccuaagaagcugcucauga

SEQ ID NO: 2372981 - RNA, 19 nt, Homo sapiens
  misc_RNA (1)...(19): siRNA sense strand
cauuaaggaaucagagauc

SEQ ID NO: 2372982 - RNA, 19 nt, Homo sapiens
  misc_RNA (1)...(19): siRNA sense strand
cuaagaagcugcucaugau

SEQ ID NO: 2372983 - RNA, 19 nt, Homo sapiens
  misc_RNA (1)...(19): siRNA sense strand
aggaugagguuuugaagau

SEQ ID NO: 2372984 - RNA, 19 nt, Homo sapiens
  misc_RNA (1)...(19): siRNA sense strand
uggucaaggacaugaagau

SEQ ID NO: 2372985 - RNA, 19 nt, Homo sapiens
  misc_RNA (1)...(19): siRNA sense strand
uuaaggaaucagagaucau

SEQ ID NO: 2372986 - RNA, 19 nt, Homo sapiens
  misc_RNA (1)...(19): siRNA sense strand
agaucaagucccuggagga

SEQ ID NO: 2372987 - RNA, 19 nt, Homo sapiens
  misc_RNA (1)...(19): siRNA sense strand
ccauuaaggaaucagagau

SEQ ID NO: 2372988 - RNA, 19 nt, Homo sapiens
  misc_RNA (1)...(19): siRNA sense strand
ccgaggauaaggaguggau

SEQ ID NO: 2372989 - RNA, 19 nt, Homo sapiens
  misc_RNA (1)...(19): siRNA sense strand
ugguauaugcccagggauu

SEQ ID NO: 2372990 - RNA, 19 nt, Homo sapiens
  misc_RNA (1)...(19): siRNA sense strand
cauuaauggaggaccgauu

SEQ ID NO: 2372991 - RNA, 19 nt, Homo sapiens
  misc_RNA (1)...(19): siRNA sense strand
cgucaggcaaucagagaga

SEQ ID NO: 2372992 - RNA, 19 nt, Homo sapiens
  misc_RNA (1)...(19): siRNA sense strand
auuuguacccagacaguaa

SEQ ID NO: 2372993 - RNA, 19 nt, Homo sapiens
  misc_RNA (1)...(19): siRNA sense strand
ugguggagcaagagagcca

SEQ ID NO: 2372994 - RNA, 19 nt, Homo sapiens
  misc_RNA (1)...(19): siRNA sense strand
aguaaaugguauaugccca

SEQ ID NO: 2372995 - RNA, 19 nt, Homo sapiens
  misc_RNA (1)...(19): siRNA sense strand
auaucaucguggaggacuu

SEQ ID NO: 2372996 - RNA, 19 nt, Homo sapiens
  misc_RNA (1)...(19): siRNA sense strand
gcuccaaaccauucagcca

SEQ ID NO: 2372997 - RNA, 19 nt, Homo sapiens
  misc_RNA (1)...(19): siRNA sense strand
gagaacaacuuuaagggga

SEQ ID NO: 2372998 - RNA, 19 nt, Homo sapiens
  misc_RNA (1)...(19): siRNA sense strand
agaacaacuuuaaggggau

SEQ ID NO: 2372999 - RNA, 19 nt, Homo sapiens
  misc_RNA (1)...(19): siRNA sense strand
ucaaucagaugguggagca

SEQ ID NO: 2373000 - RNA, 19 nt, Homo sapiens
  misc_RNA (1)...(19): siRNA sense strand
guucaaaagccaaguaugu

SEQ ID NO: 2373001 - RNA, 19 nt, Homo sapiens
  misc_RNA (1)...(19): siRNA sense strand
uguagguaucgccgaguua

SEQ ID NO: 2373002 - RNA, 19 nt, Homo sapiens
  misc_RNA (1)...(19): siRNA sense strand
aucagaugguggagcaaga

SEQ ID NO: 2373003 - RNA, 19 nt, Homo sapiens
  misc_RNA (1)...(19): siRNA sense strand
guauuaagcuaaauggcua

SEQ ID NO: 2373004 - RNA, 19 nt, Homo sapiens
  misc_RNA (1)...(19): siRNA sense strand
uagaagagcuauucggcaa

SEQ ID NO: 2373005 - RNA, 19 nt, Homo sapiens
  misc_RNA (1)...(19): siRNA sense strand
acuaauagcugcagagccu

SEQ ID NO: 2373006 - RNA, 19 nt, Homo sapiens
  misc_RNA (1)...(19): siRNA sense strand
ggaaagaaacagucccuca

SEQ ID NO: 2373007 - RNA, 19 nt, Homo sapiens
  misc_RNA (1)...(19): siRNA sense strand
caaugaaagucuagcaccu

SEQ ID NO: 2373008 - RNA, 19 nt, Homo sapiens
  misc_RNA (1)...(19): siRNA sense strand
uuaccuaaugcgaggauau

SEQ ID NO: 2373009 - RNA, 19 nt, Homo sapiens
  misc_RNA (1)...(19): siRNA sense strand
agauguauauguagggauc

SEQ ID NO: 2373010 - RNA, 19 nt, Homo sapiens
  misc_RNA (1)...(19): siRNA sense strand
cuaccuucaacgugcaaua

SEQ ID NO: 2373011 - RNA, 19 nt, Homo sapiens
  misc_RNA (1)...(19): siRNA sense strand
cuggaagaaagcagacaau

SEQ ID NO: 2373012 - RNA, 19 nt, Homo sapiens
  misc_RNA (1)...(19): siRNA sense strand
cgaaacaaagauagcaagu

SEQ ID NO: 2373013 - RNA, 19 nt, Homo sapiens
  misc_RNA (1)...(19): siRNA sense strand
agaagagcuauucggcaaa

SEQ ID NO: 2373014 - RNA, 19 nt, Homo sapiens
  misc_RNA (1)...(19): siRNA sense strand
ccuucggaacauuuggaaa

SEQ ID NO: 2373015 - RNA, 19 nt, Homo sapiens
  misc_RNA (1)...(19): siRNA sense strand
uggacaaauagaagcuaga

SEQ ID NO: 2373016 - RNA, 19 nt, Homo sapiens
  misc_RNA (1)...(19): siRNA sense strand
aagucuagcaccugguauu

SEQ ID NO: 2373017 - RNA, 19 nt, Homo sapiens
  misc_RNA (1)...(19): siRNA sense strand
agaaaaggcaggcagguau

SEQ ID NO: 2373018 - RNA, 19 nt, Homo sapiens
  misc_RNA (1)...(19): siRNA sense strand
caaagaaaacccugugaca

SEQ ID NO: 2373019 - RNA, 19 nt, Homo sapiens
  misc_RNA (1)...(19): siRNA sense strand
aguuacaggccuggagaau

SEQ ID NO: 2373020 - RNA, 19 nt, Homo sapiens
  misc_RNA (1)...(19): siRNA sense strand
auaaguuacugaagccaga

SEQ ID NO: 2373021 - RNA, 19 nt, Homo sapiens
  misc_RNA (1)...(19): siRNA sense strand
cgccaagagcaacggcaaa

SEQ ID NO: 2373022 - RNA, 19 nt, Homo sapiens
  misc_RNA (1)...(19): siRNA sense strand
gcaucaacgccauggcaga

SEQ ID NO: 2373023 - RNA, 19 nt, Homo sapiens
  misc_RNA (1)...(19): siRNA sense strand
gcaugaacaagaaggggaa

SEQ ID NO: 2373024 - RNA, 19 nt, Homo sapiens
  misc_RNA (1)...(19): siRNA sense strand
ucgcaaagcucaucgugga

SEQ ID NO: 2373025 - RNA, 19 nt, Homo sapiens
  misc_RNA (1)...(19): siRNA sense strand
agagcaacggcaaaggcaa

SEQ ID NO: 2373026 - RNA, 19 nt, Homo sapiens
  misc_RNA (1)...(19): siRNA sense strand
cgccaagagcaacggcaaa

SEQ ID NO: 2373027 - RNA, 19 nt, Homo sapiens
  misc_RNA (1)...(19): siRNA sense strand
gcaucaacgccauggcaga

SEQ ID NO: 2373028 - RNA, 19 nt, Homo sapiens
  misc_RNA (1)...(19): siRNA sense strand
gcaugaacaagaaggggaa

SEQ ID NO: 2373029 - RNA, 19 nt, Homo sapiens
  misc_RNA (1)...(19): siRNA sense strand
ucgcaaagcucaucgugga

SEQ ID NO: 2373030 - RNA, 19 nt, Homo sapiens
  misc_RNA (1)...(19): siRNA sense strand
agagcaacggcaaaggcaa

SEQ ID NO: 2373031 - RNA, 19 nt, Homo sapiens
  misc_RNA (1)...(19): siRNA sense strand
cgccaagagcaacggcaaa

SEQ ID NO: 2373032 - RNA, 19 nt, Homo sapiens
  misc_RNA (1)...(19): siRNA sense strand
gcaucaacgccauggcaga

SEQ ID NO: 2373033 - RNA, 19 nt, Homo sapiens
  misc_RNA (1)...(19): siRNA sense strand
gcaugaacaagaaggggaa

SEQ ID NO: 2373034 - RNA, 19 nt, Homo sapiens
  misc_RNA (1)...(19): siRNA sense strand
ucgcaaagcucaucgugga

SEQ ID NO: 2373035 - RNA, 19 nt, Homo sapiens
  misc_RNA (1)...(19): siRNA sense strand
agagcaacggcaaaggcaa

SEQ ID NO: 2373036 - RNA, 19 nt, Homo sapiens
  misc_RNA (1)...(19): siRNA sense strand
cgccaagagcaacggcaaa

SEQ ID NO: 2373037 - RNA, 19 nt, Homo sapiens
  misc_RNA (1)...(19): siRNA sense strand
gcaucaacgccauggcaga

SEQ ID NO: 2373038 - RNA, 19 nt, Homo sapiens
  misc_RNA (1)...(19): siRNA sense strand
gcaugaacaagaaggggaa

SEQ ID NO: 2373039 - RNA, 19 nt, Homo sapiens
  misc_RNA (1)...(19): siRNA sense strand
ucgcaaagcucaucgugga

SEQ ID NO: 2373040 - RNA, 19 nt, Homo sapiens
  misc_RNA (1)...(19): siRNA sense strand
agagcaacggcaaaggcaa

SEQ ID NO: 2373041 - RNA, 19 nt, Homo sapiens
  misc_RNA (1)...(19): siRNA sense strand
cugaauuacugcaacgaaa

SEQ ID NO: 2373042 - RNA, 19 nt, Homo sapiens
  misc_RNA (1)...(19): siRNA sense strand
cugcaacgaaauagagaaa

SEQ ID NO: 2373043 - RNA, 19 nt, Homo sapiens
  misc_RNA (1)...(19): siRNA sense strand
aaguaaagaaggaaagaga

SEQ ID NO: 2373044 - RNA, 19 nt, Homo sapiens
  misc_RNA (1)...(19): siRNA sense strand
gaugaaguaaagaaggaaa

SEQ ID NO: 2373045 - RNA, 19 nt, Homo sapiens
  misc_RNA (1)...(19): siRNA sense strand
cgauaaugauuuaagagca

SEQ ID NO: 2373046 - RNA, 19 nt, Homo sapiens
  misc_RNA (1)...(19): siRNA sense strand
uggcaaaacagcagaagaa

SEQ ID NO: 2373047 - RNA, 19 nt, Homo sapiens
  misc_RNA (1)...(19): siRNA sense strand
ggcagauggacaagugaaa

SEQ ID NO: 2373048 - RNA, 19 nt, Homo sapiens
  misc_RNA (1)...(19): siRNA sense strand
ucuuaaaggacuugcaaca

SEQ ID NO: 2373049 - RNA, 19 nt, Homo sapiens
  misc_RNA (1)...(19): siRNA sense strand
aagaagaagcaaccgauaa

SEQ ID NO: 2373050 - RNA, 19 nt, Homo sapiens
  misc_RNA (1)...(19): siRNA sense strand
uaaagaaacaggagggacu

SEQ ID NO: 2373051 - RNA, 19 nt, Homo sapiens
  misc_RNA (1)...(19): siRNA sense strand
ucuagauccuauuggcaaa

SEQ ID NO: 2373052 - RNA, 19 nt, Homo sapiens
  misc_RNA (1)...(19): siRNA sense strand
uggauaaugaugaaggauu

SEQ ID NO: 2373053 - RNA, 19 nt, Homo sapiens
  misc_RNA (1)...(19): siRNA sense strand
cugcagcaaagaaggauaa

SEQ ID NO: 2373054 - RNA, 19 nt, Homo sapiens
  misc_RNA (1)...(19): siRNA sense strand
uagccaaauugcagcagaa

SEQ ID NO: 2373055 - RNA, 19 nt, Homo sapiens
  misc_RNA (1)...(19): siRNA sense strand
gcaaaacagcagaagaaau

SEQ ID NO: 2373056 - RNA, 19 nt, Homo sapiens
  misc_RNA (1)...(19): siRNA sense strand
aaagagagggucuggagaa

SEQ ID NO: 2373057 - RNA, 19 nt, Homo sapiens
  misc_RNA (1)...(19): siRNA sense strand
uuaaaagccacaagagaua

SEQ ID NO: 2373058 - RNA, 19 nt, Homo sapiens
  misc_RNA (1)...(19): siRNA sense strand
agaagaagcaaccgauaau

SEQ ID NO: 2373059 - RNA, 19 nt, Homo sapiens
  misc_RNA (1)...(19): siRNA sense strand
cagauggacaagugaaaga

SEQ ID NO: 2373060 - RNA, 19 nt, Homo sapiens
  misc_RNA (1)...(19): siRNA sense strand
cucaagauggugugauaaa

SEQ ID NO: 2373061 - RNA, 19 nt, Homo sapiens
  misc_RNA (1)...(19): siRNA sense strand
cuuuaagagcagagggaac

SEQ ID NO: 2373062 - RNA, 19 nt, Homo sapiens
  misc_RNA (1)...(19): siRNA sense strand
uuuaaggaacguuggcaaa

SEQ ID NO: 2373063 - RNA, 19 nt, Homo sapiens
  misc_RNA (1)...(19): siRNA sense strand
cauccaaugaacuguauaa

SEQ ID NO: 2373064 - RNA, 19 nt, Homo sapiens
  misc_RNA (1)...(19): siRNA sense strand
gcaaagaaggauaaugacu

SEQ ID NO: 2373065 - RNA, 19 nt, Homo sapiens
  misc_RNA (1)...(19): siRNA sense strand
uuguugaacuuguagcuaa

SEQ ID NO: 2373066 - RNA, 19 nt, Homo sapiens
  misc_RNA (1)...(19): siRNA sense strand
cauauuaaagagacgguuu

SEQ ID NO: 2373067 - RNA, 19 nt, Homo sapiens
  misc_RNA (1)...(19): siRNA sense strand
cagugucaauacaaagaua

SEQ ID NO: 2373068 - RNA, 19 nt, Homo sapiens
  misc_RNA (1)...(19): siRNA sense strand
gguuguuggaugaagaaga

SEQ ID NO: 2373069 - RNA, 19 nt, Homo sapiens
  misc_RNA (1)...(19): siRNA sense strand
guauaagccuuuaagagca

SEQ ID NO: 2373070 - RNA, 19 nt, Homo sapiens
  misc_RNA (1)...(19): siRNA sense strand
agccagagccugagcugaa

SEQ ID NO: 2373071 - RNA, 19 nt, Homo sapiens
  misc_RNA (1)...(19): siRNA sense strand
agaagaaauuuggagaaga

SEQ ID NO: 2373072 - RNA, 19 nt, Homo sapiens
  misc_RNA (1)...(19): siRNA sense strand
uguugaacuuguagcuaau

SEQ ID NO: 2373073 - RNA, 19 nt, Homo sapiens
  misc_RNA (1)...(19): siRNA sense strand
uggccaagccgcuggugaa

SEQ ID NO: 2373074 - RNA, 19 nt, Homo sapiens
  misc_RNA (1)...(19): siRNA sense strand
gccuauaaucagaggaaag

SEQ ID NO: 2373075 - RNA, 19 nt, Homo sapiens
  misc_RNA (1)...(19): siRNA sense strand
gcugcagcaaagaaggaua

SEQ ID NO: 2373076 - RNA, 19 nt, Homo sapiens
  misc_RNA (1)...(19): siRNA sense strand
ccaucgugcuuuuguguaa

SEQ ID NO: 2373077 - RNA, 19 nt, Homo sapiens
  misc_RNA (1)...(19): siRNA sense strand
uugaugaaguaaagaagga

SEQ ID NO: 2373078 - RNA, 19 nt, Homo sapiens
  misc_RNA (1)...(19): siRNA sense strand
aagagagggucuggagaau

SEQ ID NO: 2373079 - RNA, 19 nt, Homo sapiens
  misc_RNA (1)...(19): siRNA sense strand
ucuuacaacuaaaguccaa

SEQ ID NO: 2373080 - RNA, 19 nt, Homo sapiens
  misc_RNA (1)...(19): siRNA sense strand
uauccuggguauugccaaa

SEQ ID NO: 2373081 - RNA, 19 nt, Homo sapiens
  misc_RNA (1)...(19): siRNA sense strand
gcagaacagaaccuggaua

SEQ ID NO: 2373082 - RNA, 19 nt, Homo sapiens
  misc_RNA (1)...(19): siRNA sense strand
gcaaagaccaugcagggca

SEQ ID NO: 2373083 - RNA, 19 nt, Homo sapiens
  misc_RNA (1)...(19): siRNA sense strand
guuacagcaugcagcagaa

SEQ ID NO: 2373084 - RNA, 19 nt, Homo sapiens
  misc_RNA (1)...(19): siRNA sense strand
cugccuauaaucagaggaa

SEQ ID NO: 2373085 - RNA, 19 nt, Homo sapiens
  misc_RNA (1)...(19): siRNA sense strand
cggaagacagaaagagaug

SEQ ID NO: 2373086 - RNA, 19 nt, Homo sapiens
  misc_RNA (1)...(19): siRNA sense strand
auuuaaggaacguuggcaa

SEQ ID NO: 2373087 - RNA, 19 nt, Homo sapiens
  misc_RNA (1)...(19): siRNA sense strand
agaaggaaagagagggucu

SEQ ID NO: 2373088 - RNA, 19 nt, Homo sapiens
  misc_RNA (1)...(19): siRNA sense strand
agacagaaagagaugaacu

SEQ ID NO: 2373089 - RNA, 19 nt, Homo sapiens
  misc_RNA (1)...(19): siRNA sense strand
ccacaagagauaaaaugaa

SEQ ID NO: 2373090 - RNA, 19 nt, Homo sapiens
  misc_RNA (1)...(19): siRNA sense strand
uggaaggaugcuuucgaua

SEQ ID NO: 2373091 - RNA, 19 nt, Homo sapiens
  misc_RNA (1)...(19): siRNA sense strand
ucauuaagguuguuggaug

SEQ ID NO: 2373092 - RNA, 19 nt, Homo sapiens
  misc_RNA (1)...(19): siRNA sense strand
ccaucgaggaggugaacaa

SEQ ID NO: 2373093 - RNA, 19 nt, Homo sapiens
  misc_RNA (1)...(19): siRNA sense strand
cagcaagugcggugggaga

SEQ ID NO: 2373094 - RNA, 19 nt, Homo sapiens
  misc_RNA (1)...(19): siRNA sense strand
ucaaagagauggugcagga

SEQ ID NO: 2373095 - RNA, 19 nt, Homo sapiens
  misc_RNA (1)...(19): siRNA sense strand
cggagauccugcaggccaa

SEQ ID NO: 2373096 - RNA, 19 nt, Homo sapiens
  misc_RNA (1)...(19): siRNA sense strand
cggagauggugaugagcca

SEQ ID NO: 2373097 - RNA, 19 nt, Homo sapiens
  misc_RNA (1)...(19): siRNA sense strand
gugaggaggucaacgguga

SEQ ID NO: 2373098 - RNA, 19 nt, Homo sapiens
  misc_RNA (1)...(19): siRNA sense strand
gaccagaagcggauggaga

SEQ ID NO: 2373099 - RNA, 19 nt, Homo sapiens
  misc_RNA (1)...(19): siRNA sense strand
gcgcgaaucaauagagcca

SEQ ID NO: 2373100 - RNA, 19 nt, Homo sapiens
  misc_RNA (1)...(19): siRNA sense strand
ggucaacggugaugccaca

SEQ ID NO: 2373101 - RNA, 19 nt, Homo sapiens
  misc_RNA (1)...(19): siRNA sense strand
ugaaaaucgcagaggccua

SEQ ID NO: 2373102 - RNA, 19 nt, Homo sapiens
  misc_RNA (1)...(19): siRNA sense strand
cgaagagggugaaugccau

SEQ ID NO: 2373103 - RNA, 19 nt, Homo sapiens
  misc_RNA (1)...(19): siRNA sense strand
aggccuaccagaugcuaaa

SEQ ID NO: 2373104 - RNA, 19 nt, Homo sapiens
  misc_RNA (1)...(19): siRNA sense strand
aagagauggugcaggagga

SEQ ID NO: 2373105 - RNA, 19 nt, Homo sapiens
  misc_RNA (1)...(19): siRNA sense strand
gaccagaccuacaacgaga

SEQ ID NO: 2373106 - RNA, 19 nt, Homo sapiens
  misc_RNA (1)...(19): siRNA sense strand
ucggagaaggugaagaaca

SEQ ID NO: 2373107 - RNA, 19 nt, Homo sapiens
  misc_RNA (1)...(19): siRNA sense strand
ugaacaacaaugugaaacu

SEQ ID NO: 2373108 - RNA, 19 nt, Homo sapiens
  misc_RNA (1)...(19): siRNA sense strand
aggacaaugaugaggccuu

SEQ ID NO: 2373109 - RNA, 19 nt, Homo sapiens
  misc_RNA (1)...(19): siRNA sense strand
cagaauaagagcagcagcu

SEQ ID NO: 2373110 - RNA, 19 nt, Homo sapiens
  misc_RNA (1)...(19): siRNA sense strand
uugaagaugaggagaaauc

SEQ ID NO: 2373111 - RNA, 19 nt, Homo sapiens
  misc_RNA (1)...(19): siRNA sense strand
gggagaagcagcagccaac

SEQ ID NO: 2373112 - RNA, 19 nt, Homo sapiens
  misc_RNA (1)...(19): siRNA sense strand
accagaagcggauggagaa

SEQ ID NO: 2373113 - RNA, 19 nt, Homo sapiens
  misc_RNA (1)...(19): siRNA sense strand
uggaaugcgaaguggaaga

SEQ ID NO: 2373114 - RNA, 19 nt, Homo sapiens
  misc_RNA (1)...(19): siRNA sense strand
aaaucaaaguggaaugcga

SEQ ID NO: 2373115 - RNA, 19 nt, Homo sapiens
  misc_RNA (1)...(19): siRNA sense strand
aaucaaaguggaaugcgaa

SEQ ID NO: 2373116 - RNA, 19 nt, Homo sapiens
  misc_RNA (1)...(19): siRNA sense strand
uguaccaaacccagagauu

SEQ ID NO: 2373117 - RNA, 19 nt, Homo sapiens
  misc_RNA (1)...(19): siRNA sense strand
aguggaaugcgaaguggaa

SEQ ID NO: 2373118 - RNA, 19 nt, Homo sapiens
  misc_RNA (1)...(19): siRNA sense strand
ccguggaaagaaauguuua

SEQ ID NO: 2373119 - RNA, 19 nt, Homo sapiens
  misc_RNA (1)...(19): siRNA sense strand
cuucacacuucgagagcau

SEQ ID NO: 2373120 - RNA, 19 nt, Homo sapiens
  misc_RNA (1)...(19): siRNA sense strand
ucuaugaaaugauggguca

SEQ ID NO: 2373121 - RNA, 19 nt, Homo sapiens
  misc_RNA (1)...(19): siRNA sense strand
cccaaugccaaguacguaa

SEQ ID NO: 2373122 - RNA, 19 nt, Homo sapiens
  misc_RNA (1)...(19): siRNA sense strand
aguacguaaugaagacaga

SEQ ID NO: 2373123 - RNA, 19 nt, Homo sapiens
  misc_RNA (1)...(19): siRNA sense strand
ucauauuccagaagacaca

SEQ ID NO: 2373124 - RNA, 19 nt, Homo sapiens
  misc_RNA (1)...(19): siRNA sense strand
aaaugaugggucacguaaa

SEQ ID NO: 2373125 - RNA, 19 nt, Homo sapiens
  misc_RNA (1)...(19): siRNA sense strand
cuucacacuucgagagcau

SEQ ID NO: 2373126 - RNA, 19 nt, Homo sapiens
  misc_RNA (1)...(19): siRNA sense strand
ucuaugaaaugauggguca

SEQ ID NO: 2373127 - RNA, 19 nt, Homo sapiens
  misc_RNA (1)...(19): siRNA sense strand
cccaaugccaaguacguaa

SEQ ID NO: 2373128 - RNA, 19 nt, Homo sapiens
  misc_RNA (1)...(19): siRNA sense strand
aguacguaaugaagacaga

SEQ ID NO: 2373129 - RNA, 19 nt, Homo sapiens
  misc_RNA (1)...(19): siRNA sense strand
ucauauuccagaagacaca

SEQ ID NO: 2373130 - RNA, 19 nt, Homo sapiens
  misc_RNA (1)...(19): siRNA sense strand
aaaugaugggucacguaaa

SEQ ID NO: 2373131 - RNA, 19 nt, Homo sapiens
  misc_RNA (1)...(19): siRNA sense strand
cuucacacuucgagagcau

SEQ ID NO: 2373132 - RNA, 19 nt, Homo sapiens
  misc_RNA (1)...(19): siRNA sense strand
ucuaugaaaugauggguca

SEQ ID NO: 2373133 - RNA, 19 nt, Homo sapiens
  misc_RNA (1)...(19): siRNA sense strand
cccaaugccaaguacguaa

SEQ ID NO: 2373134 - RNA, 19 nt, Homo sapiens
  misc_RNA (1)...(19): siRNA sense strand
aguacguaaugaagacaga

SEQ ID NO: 2373135 - RNA, 19 nt, Homo sapiens
  misc_RNA (1)...(19): siRNA sense strand
ucauauuccagaagacaca

SEQ ID NO: 2373136 - RNA, 19 nt, Homo sapiens
  misc_RNA (1)...(19): siRNA sense strand
aaaugaugggucacguaaa

SEQ ID NO: 2373137 - RNA, 19 nt, Homo sapiens
  misc_RNA (1)...(19): siRNA sense strand
cuucacacuucgagagcau

SEQ ID NO: 2373138 - RNA, 19 nt, Homo sapiens
  misc_RNA (1)...(19): siRNA sense strand
ucuaugaaaugauggguca

SEQ ID NO: 2373139 - RNA, 19 nt, Homo sapiens
  misc_RNA (1)...(19): siRNA sense strand
cccaaugccaaguacguaa

SEQ ID NO: 2373140 - RNA, 19 nt, Homo sapiens
  misc_RNA (1)...(19): siRNA sense strand
aguacguaaugaagacaga

SEQ ID NO: 2373141 - RNA, 19 nt, Homo sapiens
  misc_RNA (1)...(19): siRNA sense strand
ucauauuccagaagacaca

SEQ ID NO: 2373142 - RNA, 19 nt, Homo sapiens
  misc_RNA (1)...(19): siRNA sense strand
aaaugaugggucacguaaa

SEQ ID NO: 2373143 - RNA, 19 nt, Homo sapiens
  misc_RNA (1)...(19): siRNA sense strand
gggcaaugggagagaagca

SEQ ID NO: 2373144 - RNA, 19 nt, Homo sapiens
  misc_RNA (1)...(19): siRNA sense strand
agagagaggcugagcagga

SEQ ID NO: 2373145 - RNA, 19 nt, Homo sapiens
  misc_RNA (1)...(19): siRNA sense strand
gguaagugcccgacgagga

SEQ ID NO: 2373146 - RNA, 19 nt, Homo sapiens
  misc_RNA (1)...(19): siRNA sense strand
agaaccugaaccagagaaa

SEQ ID NO: 2373147 - RNA, 19 nt, Homo sapiens
  misc_RNA (1)...(19): siRNA sense strand
ccggagaaccugaaccaga

SEQ ID NO: 2373148 - RNA, 19 nt, Homo sapiens
  misc_RNA (1)...(19): siRNA sense strand
cgcuauucuugcugggaga

SEQ ID NO: 2373149 - RNA, 19 nt, Homo sapiens
  misc_RNA (1)...(19): siRNA sense strand
ggacaugggcauccaagga

SEQ ID NO: 2373150 - RNA, 19 nt, Homo sapiens
  misc_RNA (1)...(19): siRNA sense strand
caagcgaaauugugggcaa

SEQ ID NO: 2373151 - RNA, 19 nt, Homo sapiens
  misc_RNA (1)...(19): siRNA sense strand
auaagaagcucacgggcaa

SEQ ID NO: 2373152 - RNA, 19 nt, Homo sapiens
  misc_RNA (1)...(19): siRNA sense strand
aguuggugguggucggaaa

SEQ ID NO: 2373153 - RNA, 19 nt, Homo sapiens
  misc_RNA (1)...(19): siRNA sense strand
ccaagaucgugaagcccaa

SEQ ID NO: 2373154 - RNA, 19 nt, Homo sapiens
  misc_RNA (1)...(19): siRNA sense strand
aaauugugggcaagagaau

SEQ ID NO: 2373155 - RNA, 19 nt, Homo sapiens
  misc_RNA (1)...(19): siRNA sense strand
ggaaauugaaguugguggu

SEQ ID NO: 2373156 - RNA, 19 nt, Homo sapiens
  misc_RNA (1)...(19): siRNA sense strand
acucggaccucaaggcuca

SEQ ID NO: 2373157 - RNA, 19 nt, Homo sapiens
  misc_RNA (1)...(19): siRNA sense strand
gcgucaaacuagauggcag

SEQ ID NO: 2373158 - RNA, 19 nt, Homo sapiens
  misc_RNA (1)...(19): siRNA sense strand
agcagaacaauguggaaca

SEQ ID NO: 2373159 - RNA, 19 nt, Homo sapiens
  misc_RNA (1)...(19): siRNA sense strand
gagucagccagguggauaa

SEQ ID NO: 2373160 - RNA, 19 nt, Homo sapiens
  misc_RNA (1)...(19): siRNA sense strand
agggagugauggagagcuu

SEQ ID NO: 2373161 - RNA, 19 nt, Homo sapiens
  misc_RNA (1)...(19): siRNA sense strand
acagacaagaagaggaaga

SEQ ID NO: 2373162 - RNA, 19 nt, Homo sapiens
  misc_RNA (1)...(19): siRNA sense strand
ggaccuucugggagagcaa

SEQ ID NO: 2373163 - RNA, 19 nt, Homo sapiens
  misc_RNA (1)...(19): siRNA sense strand
ugaagaaggcugccggcua

SEQ ID NO: 2373164 - RNA, 19 nt, Homo sapiens
  misc_RNA (1)...(19): siRNA sense strand
gucagggaacagagaguaa

SEQ ID NO: 2373165 - RNA, 19 nt, Homo sapiens
  misc_RNA (1)...(19): siRNA sense strand
ugucaugcccagagcagaa

SEQ ID NO: 2373166 - RNA, 19 nt, Homo sapiens
  misc_RNA (1)...(19): siRNA sense strand
aggagaacaaacugaagaa

SEQ ID NO: 2373167 - RNA, 19 nt, Homo sapiens
  misc_RNA (1)...(19): siRNA sense strand
ugaagaaaagguagaggaa

SEQ ID NO: 2373168 - RNA, 19 nt, Homo sapiens
  misc_RNA (1)...(19): siRNA sense strand
caucaucguucgaaggcuu

SEQ ID NO: 2373169 - RNA, 19 nt, Homo sapiens
  misc_RNA (1)...(19): siRNA sense strand
aaacugaccagaagggaca

SEQ ID NO: 2373170 - RNA, 19 nt, Homo sapiens
  misc_RNA (1)...(19): siRNA sense strand
cggaugcggcagagugcaa

SEQ ID NO: 2373171 - RNA, 19 nt, Homo sapiens
  misc_RNA (1)...(19): siRNA sense strand
auauggacuucaagccaaa

SEQ ID NO: 2373172 - RNA, 19 nt, Homo sapiens
  misc_RNA (1)...(19): siRNA sense strand
cuggauaucaagaggaagu

SEQ ID NO: 2373173 - RNA, 19 nt, Homo sapiens
  misc_RNA (1)...(19): siRNA sense strand
cagauggaguggaaggagu

SEQ ID NO: 2373174 - RNA, 19 nt, Homo sapiens
  misc_RNA (1)...(19): siRNA sense strand
cgacuucagcaaaggcaau

SEQ ID NO: 2373175 - RNA, 19 nt, Homo sapiens
  misc_RNA (1)...(19): siRNA sense strand
ggaggaacuuaucuggaca

SEQ ID NO: 2373176 - RNA, 19 nt, Homo sapiens
  misc_RNA (1)...(19): siRNA sense strand
cggaaggagaacaaacuga

SEQ ID NO: 2373177 - RNA, 19 nt, Homo sapiens
  misc_RNA (1)...(19): siRNA sense strand
gucuggauaucaagaggaa

SEQ ID NO: 2373178 - RNA, 19 nt, Homo sapiens
  misc_RNA (1)...(19): siRNA sense strand
ggguaggaaagcuggacca

SEQ ID NO: 2373179 - RNA, 19 nt, Homo sapiens
  misc_RNA (1)...(19): siRNA sense strand
ccacggaagaccugcggau

SEQ ID NO: 2373180 - RNA, 19 nt, Homo sapiens
  misc_RNA (1)...(19): siRNA sense strand
caaacacagaccagcggaa

SEQ ID NO: 2373181 - RNA, 19 nt, Homo sapiens
  misc_RNA (1)...(19): siRNA sense strand
aagaaaagguagaggaagg

SEQ ID NO: 2373182 - RNA, 19 nt, Homo sapiens
  misc_RNA (1)...(19): siRNA sense strand
acugggaccuucugggaga

SEQ ID NO: 2373183 - RNA, 19 nt, Homo sapiens
  misc_RNA (1)...(19): siRNA sense strand
caauggagguggugguggu

SEQ ID NO: 2373184 - RNA, 19 nt, Homo sapiens
  misc_RNA (1)...(19): siRNA sense strand
ccgacaauuaucagggagu

SEQ ID NO: 2373185 - RNA, 19 nt, Homo sapiens
  misc_RNA (1)...(19): siRNA sense strand
ggacauacuccaugacccu

SEQ ID NO: 2373186 - RNA, 19 nt, Homo sapiens
  misc_RNA (1)...(19): siRNA sense strand
gagucagggaacagagagu

SEQ ID NO: 2373187 - RNA, 19 nt, Homo sapiens
  misc_RNA (1)...(19): siRNA sense strand
ccuacaagugcgagugugu

SEQ ID NO: 2373188 - RNA, 19 nt, Homo sapiens
  misc_RNA (1)...(19): siRNA sense strand
gagacagacaagaagagga

SEQ ID NO: 2373189 - RNA, 19 nt, Homo sapiens
  misc_RNA (1)...(19): siRNA sense strand
gcaugaaaucggggaggaa

SEQ ID NO: 2373190 - RNA, 19 nt, Homo sapiens
  misc_RNA (1)...(19): siRNA sense strand
ucugcugacaagaggaaau

SEQ ID NO: 2373191 - RNA, 19 nt, Homo sapiens
  misc_RNA (1)...(19): siRNA sense strand
gagucagccagguggauaa

SEQ ID NO: 2373192 - RNA, 19 nt, Homo sapiens
  misc_RNA (1)...(19): siRNA sense strand
agggagugauggagagcuu

SEQ ID NO: 2373193 - RNA, 19 nt, Homo sapiens
  misc_RNA (1)...(19): siRNA sense strand
ggaccuucugggagagcaa

SEQ ID NO: 2373194 - RNA, 19 nt, Homo sapiens
  misc_RNA (1)...(19): siRNA sense strand
ugaagaaggcugccggcua

SEQ ID NO: 2373195 - RNA, 19 nt, Homo sapiens
  misc_RNA (1)...(19): siRNA sense strand
gucagggaacagagaguaa

SEQ ID NO: 2373196 - RNA, 19 nt, Homo sapiens
  misc_RNA (1)...(19): siRNA sense strand
ugucaugcccagagcagaa

SEQ ID NO: 2373197 - RNA, 19 nt, Homo sapiens
  misc_RNA (1)...(19): siRNA sense strand
aggagaacaaacugaagaa

SEQ ID NO: 2373198 - RNA, 19 nt, Homo sapiens
  misc_RNA (1)...(19): siRNA sense strand
ugaagaaaagguagaggaa

SEQ ID NO: 2373199 - RNA, 19 nt, Homo sapiens
  misc_RNA (1)...(19): siRNA sense strand
caucaucguucgaaggcuu

SEQ ID NO: 2373200 - RNA, 19 nt, Homo sapiens
  misc_RNA (1)...(19): siRNA sense strand
aaacugaccagaagggaca

SEQ ID NO: 2373201 - RNA, 19 nt, Homo sapiens
  misc_RNA (1)...(19): siRNA sense strand
cggaugcggcagagugcaa

SEQ ID NO: 2373202 - RNA, 19 nt, Homo sapiens
  misc_RNA (1)...(19): siRNA sense strand
auauggacuucaagccaaa

SEQ ID NO: 2373203 - RNA, 19 nt, Homo sapiens
  misc_RNA (1)...(19): siRNA sense strand
cuggauaucaagaggaagu

SEQ ID NO: 2373204 - RNA, 19 nt, Homo sapiens
  misc_RNA (1)...(19): siRNA sense strand
cagauggaguggaaggagu

SEQ ID NO: 2373205 - RNA, 19 nt, Homo sapiens
  misc_RNA (1)...(19): siRNA sense strand
cgacuucagcaaaggcaau

SEQ ID NO: 2373206 - RNA, 19 nt, Homo sapiens
  misc_RNA (1)...(19): siRNA sense strand
ggaggaacuuaucuggaca

SEQ ID NO: 2373207 - RNA, 19 nt, Homo sapiens
  misc_RNA (1)...(19): siRNA sense strand
cggaaggagaacaaacuga

SEQ ID NO: 2373208 - RNA, 19 nt, Homo sapiens
  misc_RNA (1)...(19): siRNA sense strand
gucuggauaucaagaggaa

SEQ ID NO: 2373209 - RNA, 19 nt, Homo sapiens
  misc_RNA (1)...(19): siRNA sense strand
ggguaggaaagcuggacca

SEQ ID NO: 2373210 - RNA, 19 nt, Homo sapiens
  misc_RNA (1)...(19): siRNA sense strand
ccacggaagaccugcggau

SEQ ID NO: 2373211 - RNA, 19 nt, Homo sapiens
  misc_RNA (1)...(19): siRNA sense strand
caaacacagaccagcggaa

SEQ ID NO: 2373212 - RNA, 19 nt, Homo sapiens
  misc_RNA (1)...(19): siRNA sense strand
aagaaaagguagaggaagg

SEQ ID NO: 2373213 - RNA, 19 nt, Homo sapiens
  misc_RNA (1)...(19): siRNA sense strand
acugggaccuucugggaga

SEQ ID NO: 2373214 - RNA, 19 nt, Homo sapiens
  misc_RNA (1)...(19): siRNA sense strand
caauggagguggugguggu

SEQ ID NO: 2373215 - RNA, 19 nt, Homo sapiens
  misc_RNA (1)...(19): siRNA sense strand
ccgacaauuaucagggagu

SEQ ID NO: 2373216 - RNA, 19 nt, Homo sapiens
  misc_RNA (1)...(19): siRNA sense strand
ggacauacuccaugacccu

SEQ ID NO: 2373217 - RNA, 19 nt, Homo sapiens
  misc_RNA (1)...(19): siRNA sense strand
gagucagggaacagagagu

SEQ ID NO: 2373218 - RNA, 19 nt, Homo sapiens
  misc_RNA (1)...(19): siRNA sense strand
ccuacaagugcgagugugu

SEQ ID NO: 2373219 - RNA, 19 nt, Homo sapiens
  misc_RNA (1)...(19): siRNA sense strand
gcaugaaaucggggaggaa

SEQ ID NO: 2373220 - RNA, 19 nt, Homo sapiens
  misc_RNA (1)...(19): siRNA sense strand
ucugcugacaagaggaaau

SEQ ID NO: 2373221 - RNA, 19 nt, Homo sapiens
  misc_RNA (1)...(19): siRNA sense strand
gagucagccagguggauaa

SEQ ID NO: 2373222 - RNA, 19 nt, Homo sapiens
  misc_RNA (1)...(19): siRNA sense strand
agggagugauggagagcuu

SEQ ID NO: 2373223 - RNA, 19 nt, Homo sapiens
  misc_RNA (1)...(19): siRNA sense strand
acagacaagaagaggaaga

SEQ ID NO: 2373224 - RNA, 19 nt, Homo sapiens
  misc_RNA (1)...(19): siRNA sense strand
ggaccuucugggagagcaa

SEQ ID NO: 2373225 - RNA, 19 nt, Homo sapiens
  misc_RNA (1)...(19): siRNA sense strand
ugaagaaggcugccggcua

SEQ ID NO: 2373226 - RNA, 19 nt, Homo sapiens
  misc_RNA (1)...(19): siRNA sense strand
gucagggaacagagaguaa

SEQ ID NO: 2373227 - RNA, 19 nt, Homo sapiens
  misc_RNA (1)...(19): siRNA sense strand
ugucaugcccagagcagaa

SEQ ID NO: 2373228 - RNA, 19 nt, Homo sapiens
  misc_RNA (1)...(19): siRNA sense strand
aggagaacaaacugaagaa

SEQ ID NO: 2373229 - RNA, 19 nt, Homo sapiens
  misc_RNA (1)...(19): siRNA sense strand
ugaagaaaagguagaggaa

SEQ ID NO: 2373230 - RNA, 19 nt, Homo sapiens
  misc_RNA (1)...(19): siRNA sense strand
caucaucguucgaaggcuu

SEQ ID NO: 2373231 - RNA, 19 nt, Homo sapiens
  misc_RNA (1)...(19): siRNA sense strand
aaacugaccagaagggaca

SEQ ID NO: 2373232 - RNA, 19 nt, Homo sapiens
  misc_RNA (1)...(19): siRNA sense strand
cggaugcggcagagugcaa

SEQ ID NO: 2373233 - RNA, 19 nt, Homo sapiens
  misc_RNA (1)...(19): siRNA sense strand
auauggacuucaagccaaa

SEQ ID NO: 2373234 - RNA, 19 nt, Homo sapiens
  misc_RNA (1)...(19): siRNA sense strand
cuggauaucaagaggaagu

SEQ ID NO: 2373235 - RNA, 19 nt, Homo sapiens
  misc_RNA (1)...(19): siRNA sense strand
cagauggaguggaaggagu

SEQ ID NO: 2373236 - RNA, 19 nt, Homo sapiens
  misc_RNA (1)...(19): siRNA sense strand
cgacuucagcaaaggcaau

SEQ ID NO: 2373237 - RNA, 19 nt, Homo sapiens
  misc_RNA (1)...(19): siRNA sense strand
ggaggaacuuaucuggaca

SEQ ID NO: 2373238 - RNA, 19 nt, Homo sapiens
  misc_RNA (1)...(19): siRNA sense strand
cggaaggagaacaaacuga

SEQ ID NO: 2373239 - RNA, 19 nt, Homo sapiens
  misc_RNA (1)...(19): siRNA sense strand
gucuggauaucaagaggaa

SEQ ID NO: 2373240 - RNA, 19 nt, Homo sapiens
  misc_RNA (1)...(19): siRNA sense strand
ggguaggaaagcuggacca

SEQ ID NO: 2373241 - RNA, 19 nt, Homo sapiens
  misc_RNA (1)...(19): siRNA sense strand
ccacggaagaccugcggau

SEQ ID NO: 2373242 - RNA, 19 nt, Homo sapiens
  misc_RNA (1)...(19): siRNA sense strand
caaacacagaccagcggaa

SEQ ID NO: 2373243 - RNA, 19 nt, Homo sapiens
  misc_RNA (1)...(19): siRNA sense strand
aagaaaagguagaggaagg

SEQ ID NO: 2373244 - RNA, 19 nt, Homo sapiens
  misc_RNA (1)...(19): siRNA sense strand
acugggaccuucugggaga

SEQ ID NO: 2373245 - RNA, 19 nt, Homo sapiens
  misc_RNA (1)...(19): siRNA sense strand
caauggagguggugguggu

SEQ ID NO: 2373246 - RNA, 19 nt, Homo sapiens
  misc_RNA (1)...(19): siRNA sense strand
ccgacaauuaucagggagu

SEQ ID NO: 2373247 - RNA, 19 nt, Homo sapiens
  misc_RNA (1)...(19): siRNA sense strand
ggacauacuccaugacccu

SEQ ID NO: 2373248 - RNA, 19 nt, Homo sapiens
  misc_RNA (1)...(19): siRNA sense strand
gagucagggaacagagagu

SEQ ID NO: 2373249 - RNA, 19 nt, Homo sapiens
  misc_RNA (1)...(19): siRNA sense strand
ccuacaagugcgagugugu

SEQ ID NO: 2373250 - RNA, 19 nt, Homo sapiens
  misc_RNA (1)...(19): siRNA sense strand
gagacagacaagaagagga

SEQ ID NO: 2373251 - RNA, 19 nt, Homo sapiens
  misc_RNA (1)...(19): siRNA sense strand
gcaugaaaucggggaggaa

SEQ ID NO: 2373252 - RNA, 19 nt, Homo sapiens
  misc_RNA (1)...(19): siRNA sense strand
ucugcugacaagaggaaau

SEQ ID NO: 2373253 - RNA, 19 nt, Homo sapiens
  misc_RNA (1)...(19): siRNA sense strand
gagucagccagguggauaa

SEQ ID NO: 2373254 - RNA, 19 nt, Homo sapiens
  misc_RNA (1)...(19): siRNA sense strand
agggagugauggagagcuu

SEQ ID NO: 2373255 - RNA, 19 nt, Homo sapiens
  misc_RNA (1)...(19): siRNA sense strand
acagacaagaagaggaaga

SEQ ID NO: 2373256 - RNA, 19 nt, Homo sapiens
  misc_RNA (1)...(19): siRNA sense strand
ggaccuucugggagagcaa

SEQ ID NO: 2373257 - RNA, 19 nt, Homo sapiens
  misc_RNA (1)...(19): siRNA sense strand
ugaagaaggcugccggcua

SEQ ID NO: 2373258 - RNA, 19 nt, Homo sapiens
  misc_RNA (1)...(19): siRNA sense strand
gucagggaacagagaguaa

SEQ ID NO: 2373259 - RNA, 19 nt, Homo sapiens
  misc_RNA (1)...(19): siRNA sense strand
ugucaugcccagagcagaa

SEQ ID NO: 2373260 - RNA, 19 nt, Homo sapiens
  misc_RNA (1)...(19): siRNA sense strand
aggagaacaaacugaagaa

SEQ ID NO: 2373261 - RNA, 19 nt, Homo sapiens
  misc_RNA (1)...(19): siRNA sense strand
ugaagaaaagguagaggaa

SEQ ID NO: 2373262 - RNA, 19 nt, Homo sapiens
  misc_RNA (1)...(19): siRNA sense strand
caucaucguucgaaggcuu

SEQ ID NO: 2373263 - RNA, 19 nt, Homo sapiens
  misc_RNA (1)...(19): siRNA sense strand
aaacugaccagaagggaca

SEQ ID NO: 2373264 - RNA, 19 nt, Homo sapiens
  misc_RNA (1)...(19): siRNA sense strand
cggaugcggcagagugcaa

SEQ ID NO: 2373265 - RNA, 19 nt, Homo sapiens
  misc_RNA (1)...(19): siRNA sense strand
auauggacuucaagccaaa

SEQ ID NO: 2373266 - RNA, 19 nt, Homo sapiens
  misc_RNA (1)...(19): siRNA sense strand
cuggauaucaagaggaagu

SEQ ID NO: 2373267 - RNA, 19 nt, Homo sapiens
  misc_RNA (1)...(19): siRNA sense strand
cagauggaguggaaggagu

SEQ ID NO: 2373268 - RNA, 19 nt, Homo sapiens
  misc_RNA (1)...(19): siRNA sense strand
cgacuucagcaaaggcaau

SEQ ID NO: 2373269 - RNA, 19 nt, Homo sapiens
  misc_RNA (1)...(19): siRNA sense strand
ggaggaacuuaucuggaca

SEQ ID NO: 2373270 - RNA, 19 nt, Homo sapiens
  misc_RNA (1)...(19): siRNA sense strand
cggaaggagaacaaacuga

SEQ ID NO: 2373271 - RNA, 19 nt, Homo sapiens
  misc_RNA (1)...(19): siRNA sense strand
gucuggauaucaagaggaa

SEQ ID NO: 2373272 - RNA, 19 nt, Homo sapiens
  misc_RNA (1)...(19): siRNA sense strand
ggguaggaaagcuggacca

SEQ ID NO: 2373273 - RNA, 19 nt, Homo sapiens
  misc_RNA (1)...(19): siRNA sense strand
ccacggaagaccugcggau

SEQ ID NO: 2373274 - RNA, 19 nt, Homo sapiens
  misc_RNA (1)...(19): siRNA sense strand
caaacacagaccagcggaa

SEQ ID NO: 2373275 - RNA, 19 nt, Homo sapiens
  misc_RNA (1)...(19): siRNA sense strand
aagaaaagguagaggaagg

SEQ ID NO: 2373276 - RNA, 19 nt, Homo sapiens
  misc_RNA (1)...(19): siRNA sense strand
acugggaccuucugggaga

SEQ ID NO: 2373277 - RNA, 19 nt, Homo sapiens
  misc_RNA (1)...(19): siRNA sense strand
caauggagguggugguggu

SEQ ID NO: 2373278 - RNA, 19 nt, Homo sapiens
  misc_RNA (1)...(19): siRNA sense strand
ccgacaauuaucagggagu

SEQ ID NO: 2373279 - RNA, 19 nt, Homo sapiens
  misc_RNA (1)...(19): siRNA sense strand
ggacauacuccaugacccu

SEQ ID NO: 2373280 - RNA, 19 nt, Homo sapiens
  misc_RNA (1)...(19): siRNA sense strand
gagucagggaacagagagu

SEQ ID NO: 2373281 - RNA, 19 nt, Homo sapiens
  misc_RNA (1)...(19): siRNA sense strand
ccuacaagugcgagugugu

SEQ ID NO: 2373282 - RNA, 19 nt, Homo sapiens
  misc_RNA (1)...(19): siRNA sense strand
gagacagacaagaagagga

SEQ ID NO: 2373283 - RNA, 19 nt, Homo sapiens
  misc_RNA (1)...(19): siRNA sense strand
gcaugaaaucggggaggaa

SEQ ID NO: 2373284 - RNA, 19 nt, Homo sapiens
  misc_RNA (1)...(19): siRNA sense strand
ucugcugacaagaggaaau

SEQ ID NO: 2373285 - RNA, 19 nt, Homo sapiens
  misc_RNA (1)...(19): siRNA sense strand
gaaacaaagaugaggggua

SEQ ID NO: 2373286 - RNA, 19 nt, Homo sapiens
  misc_RNA (1)...(19): siRNA sense strand
ggaagaugaagaaggaaga

SEQ ID NO: 2373287 - RNA, 19 nt, Homo sapiens
  misc_RNA (1)...(19): siRNA sense strand
aagaaaagcugaaagggaa

SEQ ID NO: 2373288 - RNA, 19 nt, Homo sapiens
  misc_RNA (1)...(19): siRNA sense strand
aggaggaagacuuuagaaa

SEQ ID NO: 2373289 - RNA, 19 nt, Homo sapiens
  misc_RNA (1)...(19): siRNA sense strand
cuucagaucaaguggaaaa

SEQ ID NO: 2373290 - RNA, 19 nt, Homo sapiens
  misc_RNA (1)...(19): siRNA sense strand
gaaaacagcuggaagauga

SEQ ID NO: 2373291 - RNA, 19 nt, Homo sapiens
  misc_RNA (1)...(19): siRNA sense strand
augcuaaauuauuggguca

SEQ ID NO: 2373292 - RNA, 19 nt, Homo sapiens
  misc_RNA (1)...(19): siRNA sense strand
ucgaagagucucaagggaa

SEQ ID NO: 2373293 - RNA, 19 nt, Homo sapiens
  misc_RNA (1)...(19): siRNA sense strand
gaacaacaggaacgugaaa

SEQ ID NO: 2373294 - RNA, 19 nt, Homo sapiens
  misc_RNA (1)...(19): siRNA sense strand
agaugaagaaggaagaaaa

SEQ ID NO: 2373295 - RNA, 19 nt, Homo sapiens
  misc_RNA (1)...(19): siRNA sense strand
aggaagaauuaaagcaaac

SEQ ID NO: 2373296 - RNA, 19 nt, Homo sapiens
  misc_RNA (1)...(19): siRNA sense strand
gcuggaagaugaagaagga

SEQ ID NO: 2373297 - RNA, 19 nt, Homo sapiens
  misc_RNA (1)...(19): siRNA sense strand
aggaaaaguaugacaguau

SEQ ID NO: 2373298 - RNA, 19 nt, Homo sapiens
  misc_RNA (1)...(19): siRNA sense strand
ggugcaaagccuugaagau

SEQ ID NO: 2373299 - RNA, 19 nt, Homo sapiens
  misc_RNA (1)...(19): siRNA sense strand
agaaucuguuugaggaaga

SEQ ID NO: 2373300 - RNA, 19 nt, Homo sapiens
  misc_RNA (1)...(19): siRNA sense strand
uggucaagcaauuggaaga

SEQ ID NO: 2373301 - RNA, 19 nt, Homo sapiens
  misc_RNA (1)...(19): siRNA sense strand
ugucaagaaucauggaagu

SEQ ID NO: 2373302 - RNA, 19 nt, Homo sapiens
  misc_RNA (1)...(19): siRNA sense strand
ugaggaagaauuaaagcaa

SEQ ID NO: 2373303 - RNA, 19 nt, Homo sapiens
  misc_RNA (1)...(19): siRNA sense strand
ugaaagggaaggaggcuga

SEQ ID NO: 2373304 - RNA, 19 nt, Homo sapiens
  misc_RNA (1)...(19): siRNA sense strand
ggguaugauggcuaagcaa

SEQ ID NO: 2373305 - RNA, 19 nt, Homo sapiens
  misc_RNA (1)...(19): siRNA sense strand
aauuggaagaggaagcaaa

SEQ ID NO: 2373306 - RNA, 19 nt, Homo sapiens
  misc_RNA (1)...(19): siRNA sense strand
uggcuaagcaagaaggcau

SEQ ID NO: 2373307 - RNA, 19 nt, Homo sapiens
  misc_RNA (1)...(19): siRNA sense strand
acucaucauuacaggaaaa

SEQ ID NO: 2373308 - RNA, 19 nt, Homo sapiens
  misc_RNA (1)...(19): siRNA sense strand
ucaagcaacaggaggaaga

SEQ ID NO: 2373309 - RNA, 19 nt, Homo sapiens
  misc_RNA (1)...(19): siRNA sense strand
agacaaaacuucaagagga

SEQ ID NO: 2373310 - RNA, 19 nt, Homo sapiens
  misc_RNA (1)...(19): siRNA sense strand
guaugauggcuaagcaaga

SEQ ID NO: 2373311 - RNA, 19 nt, Homo sapiens
  misc_RNA (1)...(19): siRNA sense strand
gaagaaaagcugaaaggga

SEQ ID NO: 2373312 - RNA, 19 nt, Homo sapiens
  misc_RNA (1)...(19): siRNA sense strand
accagaagaauuugagaau

SEQ ID NO: 2373313 - RNA, 19 nt, Homo sapiens
  misc_RNA (1)...(19): siRNA sense strand
ggaacaagcugaaaggcug

SEQ ID NO: 2373314 - RNA, 19 nt, Homo sapiens
  misc_RNA (1)...(19): siRNA sense strand
gcuugauaaauuacagcaa

SEQ ID NO: 2373315 - RNA, 19 nt, Homo sapiens
  misc_RNA (1)...(19): siRNA sense strand
aaucuagagcugaagaauu

SEQ ID NO: 2373316 - RNA, 19 nt, Homo sapiens
  misc_RNA (1)...(19): siRNA sense strand
agaaaauacaacagcagaa

SEQ ID NO: 2373317 - RNA, 19 nt, Homo sapiens
  misc_RNA (1)...(19): siRNA sense strand
gagaugaagcugcagguca

SEQ ID NO: 2373318 - RNA, 19 nt, Homo sapiens
  misc_RNA (1)...(19): siRNA sense strand
ugaagauguuacugcucaa

SEQ ID NO: 2373319 - RNA, 19 nt, Homo sapiens
  misc_RNA (1)...(19): siRNA sense strand
agaccaagucagcacuaaa

SEQ ID NO: 2373320 - RNA, 19 nt, Homo sapiens
  misc_RNA (1)...(19): siRNA sense strand
cugcaacaagagaaagaau

SEQ ID NO: 2373321 - RNA, 19 nt, Homo sapiens
  misc_RNA (1)...(19): siRNA sense strand
caagcaauuggaagaggaa

SEQ ID NO: 2373322 - RNA, 19 nt, Homo sapiens
  misc_RNA (1)...(19): siRNA sense strand
acuagaugcuuuugaagua

SEQ ID NO: 2373323 - RNA, 19 nt, Homo sapiens
  misc_RNA (1)...(19): siRNA sense strand
uaguugugcuucagaucaa

SEQ ID NO: 2373324 - RNA, 19 nt, Homo sapiens
  misc_RNA (1)...(19): siRNA sense strand
aauagagaacacaacgaaa

SEQ ID NO: 2373325 - RNA, 19 nt, Homo sapiens
  misc_RNA (1)...(19): siRNA sense strand
gcaaacacuggaugagcuu

SEQ ID NO: 2373326 - RNA, 19 nt, Homo sapiens
  misc_RNA (1)...(19): siRNA sense strand
aagaugaagaaggaagaaa

SEQ ID NO: 2373327 - RNA, 19 nt, Homo sapiens
  misc_RNA (1)...(19): siRNA sense strand
ggaauagagaacacaacga

SEQ ID NO: 2373328 - RNA, 19 nt, Homo sapiens
  misc_RNA (1)...(19): siRNA sense strand
gcguuaacagccagugaga

SEQ ID NO: 2373329 - RNA, 19 nt, Homo sapiens
  misc_RNA (1)...(19): siRNA sense strand
gcauggagaugaagcugca

SEQ ID NO: 2373330 - RNA, 19 nt, Homo sapiens
  misc_RNA (1)...(19): siRNA sense strand
agaagaaucuguuugagga

SEQ ID NO: 2373331 - RNA, 19 nt, Homo sapiens
  misc_RNA (1)...(19): siRNA sense strand
agcaaaaucuagagcugaa

SEQ ID NO: 2373332 - RNA, 19 nt, Homo sapiens
  misc_RNA (1)...(19): siRNA sense strand
ggaaggaggcugaacugga

SEQ ID NO: 2373333 - RNA, 19 nt, Homo sapiens
  misc_RNA (1)...(19): siRNA sense strand
aaaucaagcauguugugaa

SEQ ID NO: 2373334 - RNA, 19 nt, Homo sapiens
  misc_RNA (1)...(19): siRNA sense strand
aaagauggaagcaaggcua

SEQ ID NO: 2373335 - RNA, 19 nt, Homo sapiens
  misc_RNA (1)...(19): siRNA sense strand
auagagaacacaacgaaaa

SEQ ID NO: 2373336 - RNA, 19 nt, Homo sapiens
  misc_RNA (1)...(19): siRNA sense strand
cacuaaaggaaacagaaau

SEQ ID NO: 2373337 - RNA, 19 nt, Homo sapiens
  misc_RNA (1)...(19): siRNA sense strand
gcagaauuaacugaagaaa

SEQ ID NO: 2373338 - RNA, 19 nt, Homo sapiens
  misc_RNA (1)...(19): siRNA sense strand
uugugaaguugaaagauga

SEQ ID NO: 2373339 - RNA, 19 nt, Homo sapiens
  misc_RNA (1)...(19): siRNA sense strand
aaggcuaaaugcugcacua

SEQ ID NO: 2373340 - RNA, 19 nt, Homo sapiens
  misc_RNA (1)...(19): siRNA sense strand
gaaacaaagaugaggggua

SEQ ID NO: 2373341 - RNA, 19 nt, Homo sapiens
  misc_RNA (1)...(19): siRNA sense strand
ggaagaugaagaaggaaga

SEQ ID NO: 2373342 - RNA, 19 nt, Homo sapiens
  misc_RNA (1)...(19): siRNA sense strand
aagaaaagcugaaagggaa

SEQ ID NO: 2373343 - RNA, 19 nt, Homo sapiens
  misc_RNA (1)...(19): siRNA sense strand
aggaggaagacuuuagaaa

SEQ ID NO: 2373344 - RNA, 19 nt, Homo sapiens
  misc_RNA (1)...(19): siRNA sense strand
cuucagaucaaguggaaaa

SEQ ID NO: 2373345 - RNA, 19 nt, Homo sapiens
  misc_RNA (1)...(19): siRNA sense strand
gaaaacagcuggaagauga

SEQ ID NO: 2373346 - RNA, 19 nt, Homo sapiens
  misc_RNA (1)...(19): siRNA sense strand
augcuaaauuauuggguca

SEQ ID NO: 2373347 - RNA, 19 nt, Homo sapiens
  misc_RNA (1)...(19): siRNA sense strand
ucgaagagucucaagggaa

SEQ ID NO: 2373348 - RNA, 19 nt, Homo sapiens
  misc_RNA (1)...(19): siRNA sense strand
gaacaacaggaacgugaaa

SEQ ID NO: 2373349 - RNA, 19 nt, Homo sapiens
  misc_RNA (1)...(19): siRNA sense strand
agaugaagaaggaagaaaa

SEQ ID NO: 2373350 - RNA, 19 nt, Homo sapiens
  misc_RNA (1)...(19): siRNA sense strand
aggaagaauuaaagcaaac

SEQ ID NO: 2373351 - RNA, 19 nt, Homo sapiens
  misc_RNA (1)...(19): siRNA sense strand
gcuggaagaugaagaagga

SEQ ID NO: 2373352 - RNA, 19 nt, Homo sapiens
  misc_RNA (1)...(19): siRNA sense strand
aggaaaaguaugacaguau

SEQ ID NO: 2373353 - RNA, 19 nt, Homo sapiens
  misc_RNA (1)...(19): siRNA sense strand
ggugcaaagccuugaagau

SEQ ID NO: 2373354 - RNA, 19 nt, Homo sapiens
  misc_RNA (1)...(19): siRNA sense strand
agaaucuguuugaggaaga

SEQ ID NO: 2373355 - RNA, 19 nt, Homo sapiens
  misc_RNA (1)...(19): siRNA sense strand
uggucaagcaauuggaaga

SEQ ID NO: 2373356 - RNA, 19 nt, Homo sapiens
  misc_RNA (1)...(19): siRNA sense strand
ugucaagaaucauggaagu

SEQ ID NO: 2373357 - RNA, 19 nt, Homo sapiens
  misc_RNA (1)...(19): siRNA sense strand
ugaggaagaauuaaagcaa

SEQ ID NO: 2373358 - RNA, 19 nt, Homo sapiens
  misc_RNA (1)...(19): siRNA sense strand
ugaaagggaaggaggcuga

SEQ ID NO: 2373359 - RNA, 19 nt, Homo sapiens
  misc_RNA (1)...(19): siRNA sense strand
ggguaugauggcuaagcaa

SEQ ID NO: 2373360 - RNA, 19 nt, Homo sapiens
  misc_RNA (1)...(19): siRNA sense strand
aauuggaagaggaagcaaa

SEQ ID NO: 2373361 - RNA, 19 nt, Homo sapiens
  misc_RNA (1)...(19): siRNA sense strand
uggcuaagcaagaaggcau

SEQ ID NO: 2373362 - RNA, 19 nt, Homo sapiens
  misc_RNA (1)...(19): siRNA sense strand
acucaucauuacaggaaaa

SEQ ID NO: 2373363 - RNA, 19 nt, Homo sapiens
  misc_RNA (1)...(19): siRNA sense strand
ucaagcaacaggaggaaga

SEQ ID NO: 2373364 - RNA, 19 nt, Homo sapiens
  misc_RNA (1)...(19): siRNA sense strand
agacaaaacuucaagagga

SEQ ID NO: 2373365 - RNA, 19 nt, Homo sapiens
  misc_RNA (1)...(19): siRNA sense strand
guaugauggcuaagcaaga

SEQ ID NO: 2373366 - RNA, 19 nt, Homo sapiens
  misc_RNA (1)...(19): siRNA sense strand
gaagaaaagcugaaaggga

SEQ ID NO: 2373367 - RNA, 19 nt, Homo sapiens
  misc_RNA (1)...(19): siRNA sense strand
accagaagaauuugagaau

SEQ ID NO: 2373368 - RNA, 19 nt, Homo sapiens
  misc_RNA (1)...(19): siRNA sense strand
ggaacaagcugaaaggcug

SEQ ID NO: 2373369 - RNA, 19 nt, Homo sapiens
  misc_RNA (1)...(19): siRNA sense strand
gcuugauaaauuacagcaa

SEQ ID NO: 2373370 - RNA, 19 nt, Homo sapiens
  misc_RNA (1)...(19): siRNA sense strand
aaucuagagcugaagaauu

SEQ ID NO: 2373371 - RNA, 19 nt, Homo sapiens
  misc_RNA (1)...(19): siRNA sense strand
agaaaauacaacagcagaa

SEQ ID NO: 2373372 - RNA, 19 nt, Homo sapiens
  misc_RNA (1)...(19): siRNA sense strand
gagaugaagcugcagguca

SEQ ID NO: 2373373 - RNA, 19 nt, Homo sapiens
  misc_RNA (1)...(19): siRNA sense strand
ugaagauguuacugcucaa

SEQ ID NO: 2373374 - RNA, 19 nt, Homo sapiens
  misc_RNA (1)...(19): siRNA sense strand
agaccaagucagcacuaaa

SEQ ID NO: 2373375 - RNA, 19 nt, Homo sapiens
  misc_RNA (1)...(19): siRNA sense strand
cugcaacaagagaaagaau

SEQ ID NO: 2373376 - RNA, 19 nt, Homo sapiens
  misc_RNA (1)...(19): siRNA sense strand
caagcaauuggaagaggaa

SEQ ID NO: 2373377 - RNA, 19 nt, Homo sapiens
  misc_RNA (1)...(19): siRNA sense strand
acuagaugcuuuugaagua

SEQ ID NO: 2373378 - RNA, 19 nt, Homo sapiens
  misc_RNA (1)...(19): siRNA sense strand
uaguugugcuucagaucaa

SEQ ID NO: 2373379 - RNA, 19 nt, Homo sapiens
  misc_RNA (1)...(19): siRNA sense strand
aauagagaacacaacgaaa

SEQ ID NO: 2373380 - RNA, 19 nt, Homo sapiens
  misc_RNA (1)...(19): siRNA sense strand
gcaaacacuggaugagcuu

SEQ ID NO: 2373381 - RNA, 19 nt, Homo sapiens
  misc_RNA (1)...(19): siRNA sense strand
aagaugaagaaggaagaaa

SEQ ID NO: 2373382 - RNA, 19 nt, Homo sapiens
  misc_RNA (1)...(19): siRNA sense strand
ggaauagagaacacaacga

SEQ ID NO: 2373383 - RNA, 19 nt, Homo sapiens
  misc_RNA (1)...(19): siRNA sense strand
gcguuaacagccagugaga

SEQ ID NO: 2373384 - RNA, 19 nt, Homo sapiens
  misc_RNA (1)...(19): siRNA sense strand
gcauggagaugaagcugca

SEQ ID NO: 2373385 - RNA, 19 nt, Homo sapiens
  misc_RNA (1)...(19): siRNA sense strand
agaagaaucuguuugagga

SEQ ID NO: 2373386 - RNA, 19 nt, Homo sapiens
  misc_RNA (1)...(19): siRNA sense strand
agcaaaaucuagagcugaa

SEQ ID NO: 2373387 - RNA, 19 nt, Homo sapiens
  misc_RNA (1)...(19): siRNA sense strand
ggaaggaggcugaacugga

SEQ ID NO: 2373388 - RNA, 19 nt, Homo sapiens
  misc_RNA (1)...(19): siRNA sense strand
aaaucaagcauguugugaa

SEQ ID NO: 2373389 - RNA, 19 nt, Homo sapiens
  misc_RNA (1)...(19): siRNA sense strand
aaagauggaagcaaggcua

SEQ ID NO: 2373390 - RNA, 19 nt, Homo sapiens
  misc_RNA (1)...(19): siRNA sense strand
auagagaacacaacgaaaa

SEQ ID NO: 2373391 - RNA, 19 nt, Homo sapiens
  misc_RNA (1)...(19): siRNA sense strand
cacuaaaggaaacagaaau

SEQ ID NO: 2373392 - RNA, 19 nt, Homo sapiens
  misc_RNA (1)...(19): siRNA sense strand
gcagaauuaacugaagaaa

SEQ ID NO: 2373393 - RNA, 19 nt, Homo sapiens
  misc_RNA (1)...(19): siRNA sense strand
uugugaaguugaaagauga

SEQ ID NO: 2373394 - RNA, 19 nt, Homo sapiens
  misc_RNA (1)...(19): siRNA sense strand
aaggcuaaaugcugcacua

SEQ ID NO: 2373395 - RNA, 19 nt, Homo sapiens
  misc_RNA (1)...(19): siRNA sense strand
cagcagaagcaguggcaga

SEQ ID NO: 2373396 - RNA, 19 nt, Homo sapiens
  misc_RNA (1)...(19): siRNA sense strand
ggagaucccuugaggcuga

SEQ ID NO: 2373397 - RNA, 19 nt, Homo sapiens
  misc_RNA (1)...(19): siRNA sense strand
gaggagaaagacagggcuu

SEQ ID NO: 2373398 - RNA, 19 nt, Homo sapiens
  misc_RNA (1)...(19): siRNA sense strand
aagacauggacaagggaga

SEQ ID NO: 2373399 - RNA, 19 nt, Homo sapiens
  misc_RNA (1)...(19): siRNA sense strand
agacaaggagcccggaaaa

SEQ ID NO: 2373400 - RNA, 19 nt, Homo sapiens
  misc_RNA (1)...(19): siRNA sense strand
ugccagagaaagaaagaga

SEQ ID NO: 2373401 - RNA, 19 nt, Homo sapiens
  misc_RNA (1)...(19): siRNA sense strand
gagagaaggagggaggaga

SEQ ID NO: 2373402 - RNA, 19 nt, Homo sapiens
  misc_RNA (1)...(19): siRNA sense strand
agggagagccauggagaga

SEQ ID NO: 2373403 - RNA, 19 nt, Homo sapiens
  misc_RNA (1)...(19): siRNA sense strand
acugaaccugccagagaaa

SEQ ID NO: 2373404 - RNA, 19 nt, Homo sapiens
  misc_RNA (1)...(19): siRNA sense strand
acacugagcuggagggagg

SEQ ID NO: 2373405 - RNA, 19 nt, Homo sapiens
  misc_RNA (1)...(19): siRNA sense strand
ugaaccugccagagaaaga

SEQ ID NO: 2373406 - RNA, 19 nt, Homo sapiens
  misc_RNA (1)...(19): siRNA sense strand
gcaugaggcaggaggagcu

SEQ ID NO: 2373407 - RNA, 19 nt, Homo sapiens
  misc_RNA (1)...(19): siRNA sense strand
gcuggagggaggagagaag

SEQ ID NO: 2373408 - RNA, 19 nt, Homo sapiens
  misc_RNA (1)...(19): siRNA sense strand
ggacaaggauggcgcucca

SEQ ID NO: 2373409 - RNA, 19 nt, Homo sapiens
  misc_RNA (1)...(19): siRNA sense strand
uggcgcagcuucugggcaa

SEQ ID NO: 2373410 - RNA, 19 nt, Homo sapiens
  misc_RNA (1)...(19): siRNA sense strand
cgcuguacauucaggacaa

SEQ ID NO: 2373411 - RNA, 19 nt, Homo sapiens
  misc_RNA (1)...(19): siRNA sense strand
gccuacgagugaagggcua

SEQ ID NO: 2373412 - RNA, 19 nt, Homo sapiens
  misc_RNA (1)...(19): siRNA sense strand
cagugagagucgaggugga

SEQ ID NO: 2373413 - RNA, 19 nt, Homo sapiens
  misc_RNA (1)...(19): siRNA sense strand
gggcagugugcaagaggca

SEQ ID NO: 2373414 - RNA, 19 nt, Homo sapiens
  misc_RNA (1)...(19): siRNA sense strand
ccuuguacccugugcucaa

SEQ ID NO: 2373415 - RNA, 19 nt, Homo sapiens
  misc_RNA (1)...(19): siRNA sense strand
gcagugugcaagaggcaga

SEQ ID NO: 2373416 - RNA, 19 nt, Homo sapiens
  misc_RNA (1)...(19): siRNA sense strand
gggcucggucaguggagaa

SEQ ID NO: 2373417 - RNA, 19 nt, Homo sapiens
  misc_RNA (1)...(19): siRNA sense strand
ccguugugcaugaaagaga

SEQ ID NO: 2373418 - RNA, 19 nt, Homo sapiens
  misc_RNA (1)...(19): siRNA sense strand
ugugcaugaaagagagauu

SEQ ID NO: 2373419 - RNA, 19 nt, Homo sapiens
  misc_RNA (1)...(19): siRNA sense strand
gcgguugcucuuugggauu

SEQ ID NO: 2373420 - RNA, 19 nt, Homo sapiens
  misc_RNA (1)...(19): siRNA sense strand
aggaacaagcggagggcuc

SEQ ID NO: 2373421 - RNA, 19 nt, Homo sapiens
  misc_RNA (1)...(19): siRNA sense strand
gcauaguccagguggccca

SEQ ID NO: 2373422 - RNA, 19 nt, Homo sapiens
  misc_RNA (1)...(19): siRNA sense strand
ggucuaaaggugcgggagu

SEQ ID NO: 2373423 - RNA, 19 nt, Homo sapiens
  misc_RNA (1)...(19): siRNA sense strand
gcagaaguaugaugggauc

SEQ ID NO: 2373424 - RNA, 19 nt, Homo sapiens
  misc_RNA (1)...(19): siRNA sense strand
gcgcaggaucaaggugaaa

SEQ ID NO: 2373425 - RNA, 19 nt, Homo sapiens
  misc_RNA (1)...(19): siRNA sense strand
ggagaagggucuaaaggug

SEQ ID NO: 2373426 - RNA, 19 nt, Homo sapiens
  misc_RNA (1)...(19): siRNA sense strand
caaauaugacccaagcauu

SEQ ID NO: 2373427 - RNA, 19 nt, Homo sapiens
  misc_RNA (1)...(19): siRNA sense strand
ggaguaugaguuaagaaaa

SEQ ID NO: 2373428 - RNA, 19 nt, Homo sapiens
  misc_RNA (1)...(19): siRNA sense strand
ggaacuucgcauccgcaaa

SEQ ID NO: 2373429 - RNA, 19 nt, Homo sapiens
  misc_RNA (1)...(19): siRNA sense strand
cgggaguaugaguuaagaa

SEQ ID NO: 2373430 - RNA, 19 nt, Homo sapiens
  misc_RNA (1)...(19): siRNA sense strand
gcgaagagucagaggguga

SEQ ID NO: 2373431 - RNA, 19 nt, Homo sapiens
  misc_RNA (1)...(19): siRNA sense strand
gcgaauucuuggugcguga

SEQ ID NO: 2373432 - RNA, 19 nt, Homo sapiens
  misc_RNA (1)...(19): siRNA sense strand
gugaggagguggaugagga

SEQ ID NO: 2373433 - RNA, 19 nt, Homo sapiens
  misc_RNA (1)...(19): siRNA sense strand
ccucgaagcggcuggacau

SEQ ID NO: 2373434 - RNA, 19 nt, Homo sapiens
  misc_RNA (1)...(19): siRNA sense strand
agggugaggagguggauga

SEQ ID NO: 2373435 - RNA, 19 nt, Homo sapiens
  misc_RNA (1)...(19): siRNA sense strand
uggcgaagcucauagacga

SEQ ID NO: 2373436 - RNA, 19 nt, Homo sapiens
  misc_RNA (1)...(19): siRNA sense strand
ugaaagaaauccaggaacg

SEQ ID NO: 2373437 - RNA, 19 nt, Homo sapiens
  misc_RNA (1)...(19): siRNA sense strand
aagaaauccaggaacgaca

SEQ ID NO: 2373438 - RNA, 19 nt, Homo sapiens
  misc_RNA (1)...(19): siRNA sense strand
agucagagggugaggaggu

SEQ ID NO: 2373439 - RNA, 19 nt, Homo sapiens
  misc_RNA (1)...(19): siRNA sense strand
accuggaccucaaggagaa

SEQ ID NO: 2373440 - RNA, 19 nt, Homo sapiens
  misc_RNA (1)...(19): siRNA sense strand
gggcgauggaccagaagau

SEQ ID NO: 2373441 - RNA, 19 nt, Homo sapiens
  misc_RNA (1)...(19): siRNA sense strand
aacuagaggccguggaaca

SEQ ID NO: 2373442 - RNA, 19 nt, Homo sapiens
  misc_RNA (1)...(19): siRNA sense strand
ccgaaaagagccuguacaa

SEQ ID NO: 2373443 - RNA, 19 nt, Homo sapiens
  misc_RNA (1)...(19): siRNA sense strand
cagcagagcacacuggaga

SEQ ID NO: 2373444 - RNA, 19 nt, Homo sapiens
  misc_RNA (1)...(19): siRNA sense strand
cgauggaccagaagaucau

SEQ ID NO: 2373445 - RNA, 19 nt, Homo sapiens
  misc_RNA (1)...(19): siRNA sense strand
agcugaugcugcagaugaa

SEQ ID NO: 2373446 - RNA, 19 nt, Homo sapiens
  misc_RNA (1)...(19): siRNA sense strand
aguucauacuggugagaaa

SEQ ID NO: 2373447 - RNA, 19 nt, Homo sapiens
  misc_RNA (1)...(19): siRNA sense strand
guguaaugagugugggaaa

SEQ ID NO: 2373448 - RNA, 19 nt, Homo sapiens
  misc_RNA (1)...(19): siRNA sense strand
guguaaugagugugggaaa

SEQ ID NO: 2373449 - RNA, 19 nt, Homo sapiens
  misc_RNA (1)...(19): siRNA sense strand
guguaaugaaugugguaaa

SEQ ID NO: 2373450 - RNA, 19 nt, Homo sapiens
  misc_RNA (1)...(19): siRNA sense strand
guguaaugaauguggcaaa

SEQ ID NO: 2373451 - RNA, 19 nt, Homo sapiens
  misc_RNA (1)...(19): siRNA sense strand
ccuuauaagucauuggaga

SEQ ID NO: 2373452 - RNA, 19 nt, Homo sapiens
  misc_RNA (1)...(19): siRNA sense strand
guguacagagugugggaaa

SEQ ID NO: 2373453 - RNA, 19 nt, Homo sapiens
  misc_RNA (1)...(19): siRNA sense strand
augcaaugagugugggaaa

SEQ ID NO: 2373454 - RNA, 19 nt, Homo sapiens
  misc_RNA (1)...(19): siRNA sense strand
ugugaagagcugugugaaa

SEQ ID NO: 2373455 - RNA, 19 nt, Homo sapiens
  misc_RNA (1)...(19): siRNA sense strand
acgugauguuggagaacua

SEQ ID NO: 2373456 - RNA, 19 nt, Homo sapiens
  misc_RNA (1)...(19): siRNA sense strand
cuuacaagucauaggagaa

SEQ ID NO: 2373457 - RNA, 19 nt, Homo sapiens
  misc_RNA (1)...(19): siRNA sense strand
cuuauaagucauuggagaa

SEQ ID NO: 2373458 - RNA, 19 nt, Homo sapiens
  misc_RNA (1)...(19): siRNA sense strand
gagagaugacacaggaaau

SEQ ID NO: 2373459 - RNA, 19 nt, Homo sapiens
  misc_RNA (1)...(19): siRNA sense strand
guuaauucauacuggagaa

SEQ ID NO: 2373460 - RNA, 19 nt, Homo sapiens
  misc_RNA (1)...(19): siRNA sense strand
aaugcauaccggagagaaa

SEQ ID NO: 2373461 - RNA, 19 nt, Homo sapiens
  misc_RNA (1)...(19): siRNA sense strand
auguaaugaauguggcaaa

SEQ ID NO: 2373462 - RNA, 19 nt, Homo sapiens
  misc_RNA (1)...(19): siRNA sense strand
ccaaaagagaagagcagua

SEQ ID NO: 2373463 - RNA, 19 nt, Homo sapiens
  misc_RNA (1)...(19): siRNA sense strand
gugcaaugagugcggcaaa

SEQ ID NO: 2373464 - RNA, 19 nt, Homo sapiens
  misc_RNA (1)...(19): siRNA sense strand
ggcaauccauacugggaaa

SEQ ID NO: 2373465 - RNA, 19 nt, Homo sapiens
  misc_RNA (1)...(19): siRNA sense strand
guguaaugaguguggaaaa

SEQ ID NO: 2373466 - RNA, 19 nt, Homo sapiens
  misc_RNA (1)...(19): siRNA sense strand
acacaaagacgaaaagcaa

SEQ ID NO: 2373467 - RNA, 19 nt, Homo sapiens
  misc_RNA (1)...(19): siRNA sense strand
guguaaugacuguggcaga

SEQ ID NO: 2373468 - RNA, 19 nt, Homo sapiens
  misc_RNA (1)...(19): siRNA sense strand
acacgaaagcccugacauu

SEQ ID NO: 2373469 - RNA, 19 nt, Homo sapiens
  misc_RNA (1)...(19): siRNA sense strand
ccuuacaagucauaggaga

SEQ ID NO: 2373470 - RNA, 19 nt, Homo sapiens
  misc_RNA (1)...(19): siRNA sense strand
gugugaaaauagcaagaaa

SEQ ID NO: 2373471 - RNA, 19 nt, Homo sapiens
  misc_RNA (1)...(19): siRNA sense strand
gaaaauagcaagaaaacca

SEQ ID NO: 2373472 - RNA, 19 nt, Homo sapiens
  misc_RNA (1)...(19): siRNA sense strand
agcaaacaguuguggaaaa

SEQ ID NO: 2373473 - RNA, 19 nt, Homo sapiens
  misc_RNA (1)...(19): siRNA sense strand
ggagaaaagcguuacaaau

SEQ ID NO: 2373474 - RNA, 19 nt, Homo sapiens
  misc_RNA (1)...(19): siRNA sense strand
ccauguuggaggaagggaa

SEQ ID NO: 2373475 - RNA, 19 nt, Homo sapiens
  misc_RNA (1)...(19): siRNA sense strand
gacucacaccggagagaaa

SEQ ID NO: 2373476 - RNA, 19 nt, Homo sapiens
  misc_RNA (1)...(19): siRNA sense strand
ggcaaaucaccgaagaauu

SEQ ID NO: 2373477 - RNA, 19 nt, Homo sapiens
  misc_RNA (1)...(19): siRNA sense strand
guccaaacccacaggucua

SEQ ID NO: 2373478 - RNA, 19 nt, Homo sapiens
  misc_RNA (1)...(19): siRNA sense strand
ucucaggaggaguggaaau

SEQ ID NO: 2373479 - RNA, 19 nt, Homo sapiens
  misc_RNA (1)...(19): siRNA sense strand
cauguuggaggaagggaaa

SEQ ID NO: 2373480 - RNA, 19 nt, Homo sapiens
  misc_RNA (1)...(19): siRNA sense strand
acgcgacagaagagacaua

SEQ ID NO: 2373481 - RNA, 19 nt, Homo sapiens
  misc_RNA (1)...(19): siRNA sense strand
ugguaaagucuucgcucaa

SEQ ID NO: 2373482 - RNA, 19 nt, Homo sapiens
  misc_RNA (1)...(19): siRNA sense strand
cuaacuacccauauggcaa

SEQ ID NO: 2373483 - RNA, 19 nt, Homo sapiens
  misc_RNA (1)...(19): siRNA sense strand
agagaagagcaguacagaa

SEQ ID NO: 2373484 - RNA, 19 nt, Homo sapiens
  misc_RNA (1)...(19): siRNA sense strand
ccagaaagaagguaaaaga

SEQ ID NO: 2373485 - RNA, 19 nt, Homo sapiens
  misc_RNA (1)...(19): siRNA sense strand
ggcccagaaagaagguaaa

SEQ ID NO: 2373486 - RNA, 19 nt, Homo sapiens
  misc_RNA (1)...(19): siRNA sense strand
ugcaaaucaucgaagaauu

SEQ ID NO: 2373487 - RNA, 19 nt, Homo sapiens
  misc_RNA (1)...(19): siRNA sense strand
cagugguguuggaaagaca

SEQ ID NO: 2373488 - RNA, 19 nt, Homo sapiens
  misc_RNA (1)...(19): siRNA sense strand
caggaaauuacaagggagu

SEQ ID NO: 2373489 - RNA, 19 nt, Homo sapiens
  misc_RNA (1)...(19): siRNA sense strand
agaaagaagguaaaagaga

SEQ ID NO: 2373490 - RNA, 19 nt, Homo sapiens
  misc_RNA (1)...(19): siRNA sense strand
ggcaaggucuucaggcaga

SEQ ID NO: 2373491 - RNA, 19 nt, Homo sapiens
  misc_RNA (1)...(19): siRNA sense strand
aaagcaaacaguuguggaa

SEQ ID NO: 2373492 - RNA, 19 nt, Homo sapiens
  misc_RNA (1)...(19): siRNA sense strand
cggagagaaaccuuacaaa

SEQ ID NO: 2373493 - RNA, 19 nt, Homo sapiens
  misc_RNA (1)...(19): siRNA sense strand
uagcaauccaucagacaau

SEQ ID NO: 2373494 - RNA, 19 nt, Homo sapiens
  misc_RNA (1)...(19): siRNA sense strand
ggcaaggucuucaggcaca

SEQ ID NO: 2373495 - RNA, 19 nt, Homo sapiens
  misc_RNA (1)...(19): siRNA sense strand
agugaucguucaagccuaa

SEQ ID NO: 2373496 - RNA, 19 nt, Homo sapiens
  misc_RNA (1)...(19): siRNA sense strand
cagaagagacauagaaaac

SEQ ID NO: 2373497 - RNA, 19 nt, Homo sapiens
  misc_RNA (1)...(19): siRNA sense strand
guggcaaagccuucaguau

SEQ ID NO: 2373498 - RNA, 19 nt, Homo sapiens
  misc_RNA (1)...(19): siRNA sense strand
gggaaagagcccuggacug

SEQ ID NO: 2373499 - RNA, 19 nt, Homo sapiens
  misc_RNA (1)...(19): siRNA sense strand
uggcccagaaagaagguaa

SEQ ID NO: 2373500 - RNA, 19 nt, Homo sapiens
  misc_RNA (1)...(19): siRNA sense strand
gaaaacaagcuuaugaaca

SEQ ID NO: 2373501 - RNA, 19 nt, Homo sapiens
  misc_RNA (1)...(19): siRNA sense strand
ccuuacaaaugcagugagu

SEQ ID NO: 2373502 - RNA, 19 nt, Homo sapiens
  misc_RNA (1)...(19): siRNA sense strand
aguucauacuggugagaaa

SEQ ID NO: 2373503 - RNA, 19 nt, Homo sapiens
  misc_RNA (1)...(19): siRNA sense strand
guguaaugagugugggaaa

SEQ ID NO: 2373504 - RNA, 19 nt, Homo sapiens
  misc_RNA (1)...(19): siRNA sense strand
guguaaugagugugggaaa

SEQ ID NO: 2373505 - RNA, 19 nt, Homo sapiens
  misc_RNA (1)...(19): siRNA sense strand
guguaaugaaugugguaaa

SEQ ID NO: 2373506 - RNA, 19 nt, Homo sapiens
  misc_RNA (1)...(19): siRNA sense strand
guguaaugaauguggcaaa

SEQ ID NO: 2373507 - RNA, 19 nt, Homo sapiens
  misc_RNA (1)...(19): siRNA sense strand
ccuuauaagucauuggaga

SEQ ID NO: 2373508 - RNA, 19 nt, Homo sapiens
  misc_RNA (1)...(19): siRNA sense strand
guguacagagugugggaaa

SEQ ID NO: 2373509 - RNA, 19 nt, Homo sapiens
  misc_RNA (1)...(19): siRNA sense strand
augcaaugagugugggaaa

SEQ ID NO: 2373510 - RNA, 19 nt, Homo sapiens
  misc_RNA (1)...(19): siRNA sense strand
ugugaagagcugugugaaa

SEQ ID NO: 2373511 - RNA, 19 nt, Homo sapiens
  misc_RNA (1)...(19): siRNA sense strand
acgugauguuggagaacua

SEQ ID NO: 2373512 - RNA, 19 nt, Homo sapiens
  misc_RNA (1)...(19): siRNA sense strand
cuuacaagucauaggagaa

SEQ ID NO: 2373513 - RNA, 19 nt, Homo sapiens
  misc_RNA (1)...(19): siRNA sense strand
cuuauaagucauuggagaa

SEQ ID NO: 2373514 - RNA, 19 nt, Homo sapiens
  misc_RNA (1)...(19): siRNA sense strand
gagagaugacacaggaaau

SEQ ID NO: 2373515 - RNA, 19 nt, Homo sapiens
  misc_RNA (1)...(19): siRNA sense strand
guuaauucauacuggagaa

SEQ ID NO: 2373516 - RNA, 19 nt, Homo sapiens
  misc_RNA (1)...(19): siRNA sense strand
aaugcauaccggagagaaa

SEQ ID NO: 2373517 - RNA, 19 nt, Homo sapiens
  misc_RNA (1)...(19): siRNA sense strand
auguaaugaauguggcaaa

SEQ ID NO: 2373518 - RNA, 19 nt, Homo sapiens
  misc_RNA (1)...(19): siRNA sense strand
ccaaaagagaagagcagua

SEQ ID NO: 2373519 - RNA, 19 nt, Homo sapiens
  misc_RNA (1)...(19): siRNA sense strand
gugcaaugagugcggcaaa

SEQ ID NO: 2373520 - RNA, 19 nt, Homo sapiens
  misc_RNA (1)...(19): siRNA sense strand
ggcaauccauacugggaaa

SEQ ID NO: 2373521 - RNA, 19 nt, Homo sapiens
  misc_RNA (1)...(19): siRNA sense strand
guguaaugaguguggaaaa

SEQ ID NO: 2373522 - RNA, 19 nt, Homo sapiens
  misc_RNA (1)...(19): siRNA sense strand
acacaaagacgaaaagcaa

SEQ ID NO: 2373523 - RNA, 19 nt, Homo sapiens
  misc_RNA (1)...(19): siRNA sense strand
guguaaugacuguggcaga

SEQ ID NO: 2373524 - RNA, 19 nt, Homo sapiens
  misc_RNA (1)...(19): siRNA sense strand
acacgaaagcccugacauu

SEQ ID NO: 2373525 - RNA, 19 nt, Homo sapiens
  misc_RNA (1)...(19): siRNA sense strand
ccuuacaagucauaggaga

SEQ ID NO: 2373526 - RNA, 19 nt, Homo sapiens
  misc_RNA (1)...(19): siRNA sense strand
gugugaaaauagcaagaaa

SEQ ID NO: 2373527 - RNA, 19 nt, Homo sapiens
  misc_RNA (1)...(19): siRNA sense strand
gaaaauagcaagaaaacca

SEQ ID NO: 2373528 - RNA, 19 nt, Homo sapiens
  misc_RNA (1)...(19): siRNA sense strand
agcaaacaguuguggaaaa

SEQ ID NO: 2373529 - RNA, 19 nt, Homo sapiens
  misc_RNA (1)...(19): siRNA sense strand
ggagaaaagcguuacaaau

SEQ ID NO: 2373530 - RNA, 19 nt, Homo sapiens
  misc_RNA (1)...(19): siRNA sense strand
ccauguuggaggaagggaa

SEQ ID NO: 2373531 - RNA, 19 nt, Homo sapiens
  misc_RNA (1)...(19): siRNA sense strand
gacucacaccggagagaaa

SEQ ID NO: 2373532 - RNA, 19 nt, Homo sapiens
  misc_RNA (1)...(19): siRNA sense strand
ggcaaaucaccgaagaauu

SEQ ID NO: 2373533 - RNA, 19 nt, Homo sapiens
  misc_RNA (1)...(19): siRNA sense strand
guccaaacccacaggucua

SEQ ID NO: 2373534 - RNA, 19 nt, Homo sapiens
  misc_RNA (1)...(19): siRNA sense strand
ucucaggaggaguggaaau

SEQ ID NO: 2373535 - RNA, 19 nt, Homo sapiens
  misc_RNA (1)...(19): siRNA sense strand
cauguuggaggaagggaaa

SEQ ID NO: 2373536 - RNA, 19 nt, Homo sapiens
  misc_RNA (1)...(19): siRNA sense strand
acgcgacagaagagacaua

SEQ ID NO: 2373537 - RNA, 19 nt, Homo sapiens
  misc_RNA (1)...(19): siRNA sense strand
ugguaaagucuucgcucaa

SEQ ID NO: 2373538 - RNA, 19 nt, Homo sapiens
  misc_RNA (1)...(19): siRNA sense strand
cuaacuacccauauggcaa

SEQ ID NO: 2373539 - RNA, 19 nt, Homo sapiens
  misc_RNA (1)...(19): siRNA sense strand
agagaagagcaguacagaa

SEQ ID NO: 2373540 - RNA, 19 nt, Homo sapiens
  misc_RNA (1)...(19): siRNA sense strand
ccagaaagaagguaaaaga

SEQ ID NO: 2373541 - RNA, 19 nt, Homo sapiens
  misc_RNA (1)...(19): siRNA sense strand
ggcccagaaagaagguaaa

SEQ ID NO: 2373542 - RNA, 19 nt, Homo sapiens
  misc_RNA (1)...(19): siRNA sense strand
ugcaaaucaucgaagaauu

SEQ ID NO: 2373543 - RNA, 19 nt, Homo sapiens
  misc_RNA (1)...(19): siRNA sense strand
cagugguguuggaaagaca

SEQ ID NO: 2373544 - RNA, 19 nt, Homo sapiens
  misc_RNA (1)...(19): siRNA sense strand
caggaaauuacaagggagu

SEQ ID NO: 2373545 - RNA, 19 nt, Homo sapiens
  misc_RNA (1)...(19): siRNA sense strand
agaaagaagguaaaagaga

SEQ ID NO: 2373546 - RNA, 19 nt, Homo sapiens
  misc_RNA (1)...(19): siRNA sense strand
ggcaaggucuucaggcaga

SEQ ID NO: 2373547 - RNA, 19 nt, Homo sapiens
  misc_RNA (1)...(19): siRNA sense strand
aaagcaaacaguuguggaa

SEQ ID NO: 2373548 - RNA, 19 nt, Homo sapiens
  misc_RNA (1)...(19): siRNA sense strand
cggagagaaaccuuacaaa

SEQ ID NO: 2373549 - RNA, 19 nt, Homo sapiens
  misc_RNA (1)...(19): siRNA sense strand
uagcaauccaucagacaau

SEQ ID NO: 2373550 - RNA, 19 nt, Homo sapiens
  misc_RNA (1)...(19): siRNA sense strand
ggcaaggucuucaggcaca

SEQ ID NO: 2373551 - RNA, 19 nt, Homo sapiens
  misc_RNA (1)...(19): siRNA sense strand
agugaucguucaagccuaa

SEQ ID NO: 2373552 - RNA, 19 nt, Homo sapiens
  misc_RNA (1)...(19): siRNA sense strand
cagaagagacauagaaaac

SEQ ID NO: 2373553 - RNA, 19 nt, Homo sapiens
  misc_RNA (1)...(19): siRNA sense strand
guggcaaagccuucaguau

SEQ ID NO: 2373554 - RNA, 19 nt, Homo sapiens
  misc_RNA (1)...(19): siRNA sense strand
gggaaagagcccuggacug

SEQ ID NO: 2373555 - RNA, 19 nt, Homo sapiens
  misc_RNA (1)...(19): siRNA sense strand
uggcccagaaagaagguaa

SEQ ID NO: 2373556 - RNA, 19 nt, Homo sapiens
  misc_RNA (1)...(19): siRNA sense strand
gaaaacaagcuuaugaaca

SEQ ID NO: 2373557 - RNA, 19 nt, Homo sapiens
  misc_RNA (1)...(19): siRNA sense strand
ccuuacaaaugcagugagu

SEQ ID NO: 2373558 - RNA, 19 nt, Homo sapiens
  misc_RNA (1)...(19): siRNA sense strand
cauggaaaugugagagaaa

SEQ ID NO: 2373559 - RNA, 19 nt, Homo sapiens
  misc_RNA (1)...(19): siRNA sense strand
augagaaagaugaaggaaa

SEQ ID NO: 2373560 - RNA, 19 nt, Homo sapiens
  misc_RNA (1)...(19): siRNA sense strand
gaacagagacgcaagccaa

SEQ ID NO: 2373561 - RNA, 19 nt, Homo sapiens
  misc_RNA (1)...(19): siRNA sense strand
cggugauggugaaaggcua

SEQ ID NO: 2373562 - RNA, 19 nt, Homo sapiens
  misc_RNA (1)...(19): siRNA sense strand
ggugaaaggcuaccggcaa

SEQ ID NO: 2373563 - RNA, 19 nt, Homo sapiens
  misc_RNA (1)...(19): siRNA sense strand
cagcaaugguggaagccuu

SEQ ID NO: 2373564 - RNA, 19 nt, Homo sapiens
  misc_RNA (1)...(19): siRNA sense strand
agcaauggcugaagcgaau

SEQ ID NO: 2373565 - RNA, 19 nt, Homo sapiens
  misc_RNA (1)...(19): siRNA sense strand
aggcagaagucacagaaaa

SEQ ID NO: 2373566 - RNA, 19 nt, Homo sapiens
  misc_RNA (1)...(19): siRNA sense strand
aggaaaugagaaagaugaa

SEQ ID NO: 2373567 - RNA, 19 nt, Homo sapiens
  misc_RNA (1)...(19): siRNA sense strand
gggaaugugggaaguggaa

SEQ ID NO: 2373568 - RNA, 19 nt, Homo sapiens
  misc_RNA (1)...(19): siRNA sense strand
aagcaauggcugaagcgaa

SEQ ID NO: 2373569 - RNA, 19 nt, Homo sapiens
  misc_RNA (1)...(19): siRNA sense strand
cuaaggagaaugaagaaaa

SEQ ID NO: 2373570 - RNA, 19 nt, Homo sapiens
  misc_RNA (1)...(19): siRNA sense strand
aggaaaagaaucugaaaca

SEQ ID NO: 2373571 - RNA, 19 nt, Homo sapiens
  misc_RNA (1)...(19): siRNA sense strand
gagcaaagugacagccuca

SEQ ID NO: 2373572 - RNA, 19 nt, Homo sapiens
  misc_RNA (1)...(19): siRNA sense strand
cugcugagagagaggaaga

SEQ ID NO: 2373573 - RNA, 19 nt, Homo sapiens
  misc_RNA (1)...(19): siRNA sense strand
cggcaaaggcugaccguag

SEQ ID NO: 2373574 - RNA, 19 nt, Homo sapiens
  misc_RNA (1)...(19): siRNA sense strand
agauauaagaaggagggaa

SEQ ID NO: 2373575 - RNA, 19 nt, Homo sapiens
  misc_RNA (1)...(19): siRNA sense strand
ccagaggagcaaagugaca

SEQ ID NO: 2373576 - RNA, 19 nt, Homo sapiens
  misc_RNA (1)...(19): siRNA sense strand
aggggaagaucuugggaau

SEQ ID NO: 2373577 - RNA, 19 nt, Homo sapiens
  misc_RNA (1)...(19): siRNA sense strand
acaaggaguuaauggagga

SEQ ID NO: 2373578 - RNA, 19 nt, Homo sapiens
  misc_RNA (1)...(19): siRNA sense strand
gcucagaauuuguagacac

SEQ ID NO: 2373579 - RNA, 19 nt, Homo sapiens
  misc_RNA (1)...(19): siRNA sense strand
ggacaagggcucacggaug

SEQ ID NO: 2373580 - RNA, 19 nt, Homo sapiens
  misc_RNA (1)...(19): siRNA sense strand
caugaagccagcaggaaaa

SEQ ID NO: 2373581 - RNA, 19 nt, Homo sapiens
  misc_RNA (1)...(19): siRNA sense strand
cuugggaauaugugggaau

SEQ ID NO: 2373582 - RNA, 19 nt, Homo sapiens
  misc_RNA (1)...(19): siRNA sense strand
aagaagacgcucaggggaa

SEQ ID NO: 2373583 - RNA, 19 nt, Homo sapiens
  misc_RNA (1)...(19): siRNA sense strand
agucgggauuguuggaaga

SEQ ID NO: 2373584 - RNA, 19 nt, Homo sapiens
  misc_RNA (1)...(19): siRNA sense strand
cugaaguccuugcagagaa

SEQ ID NO: 2373585 - RNA, 19 nt, Homo sapiens
  misc_RNA (1)...(19): siRNA sense strand
gcucaagaagguggagaau

SEQ ID NO: 2373586 - RNA, 19 nt, Homo sapiens
  misc_RNA (1)...(19): siRNA sense strand
gccuauggcaagaaggaga

SEQ ID NO: 2373587 - RNA, 19 nt, Homo sapiens
  misc_RNA (1)...(19): siRNA sense strand
agacaagcgaguucagaca

SEQ ID NO: 2373588 - RNA, 19 nt, Homo sapiens
  misc_RNA (1)...(19): siRNA sense strand
cggagauccuuugcagaaa

SEQ ID NO: 2373589 - RNA, 19 nt, Homo sapiens
  misc_RNA (1)...(19): siRNA sense strand
ggcuccaggaaaugagaaa

SEQ ID NO: 2373590 - RNA, 19 nt, Homo sapiens
  misc_RNA (1)...(19): siRNA sense strand
gaacauacaaagugggcag

SEQ ID NO: 2373591 - RNA, 19 nt, Homo sapiens
  misc_RNA (1)...(19): siRNA sense strand
agaaggagggaaagaaaau

SEQ ID NO: 2373592 - RNA, 19 nt, Homo sapiens
  misc_RNA (1)...(19): siRNA sense strand
uccagaaggaccugagcaa

SEQ ID NO: 2373593 - RNA, 19 nt, Homo sapiens
  misc_RNA (1)...(19): siRNA sense strand
ugggaaggugauugaguuu

SEQ ID NO: 2373594 - RNA, 19 nt, Homo sapiens
  misc_RNA (1)...(19): siRNA sense strand
caucaaagcaauggcugaa

SEQ ID NO: 2373595 - RNA, 19 nt, Homo sapiens
  misc_RNA (1)...(19): siRNA sense strand
gaggaguccaggagcucaa

SEQ ID NO: 2373596 - RNA, 19 nt, Homo sapiens
  misc_RNA (1)...(19): siRNA sense strand
ggagaaugucagccgguca

SEQ ID NO: 2373597 - RNA, 19 nt, Homo sapiens
  misc_RNA (1)...(19): siRNA sense strand
ggcagaagucacagaaaau

SEQ ID NO: 2373598 - RNA, 19 nt, Homo sapiens
  misc_RNA (1)...(19): siRNA sense strand
aacagaggucagaggcaua

SEQ ID NO: 2373599 - RNA, 19 nt, Homo sapiens
  misc_RNA (1)...(19): siRNA sense strand
caccaaagguaucagcaca

SEQ ID NO: 2373600 - RNA, 19 nt, Homo sapiens
  misc_RNA (1)...(19): siRNA sense strand
cuccaggaaaugagaaaga

SEQ ID NO: 2373601 - RNA, 19 nt, Homo sapiens
  misc_RNA (1)...(19): siRNA sense strand
cauacaaagugggcagaca

SEQ ID NO: 2373602 - RNA, 19 nt, Homo sapiens
  misc_RNA (1)...(19): siRNA sense strand
cagcaauuuuggugacaga

SEQ ID NO: 2373603 - RNA, 19 nt, Homo sapiens
  misc_RNA (1)...(19): siRNA sense strand
gaaacagaggucagaggca

SEQ ID NO: 2373604 - RNA, 19 nt, Homo sapiens
  misc_RNA (1)...(19): siRNA sense strand
cugcaagcaugguguucau

SEQ ID NO: 2373605 - RNA, 19 nt, Homo sapiens
  misc_RNA (1)...(19): siRNA sense strand
agcucaagaagguggagaa

SEQ ID NO: 2373606 - RNA, 19 nt, Homo sapiens
  misc_RNA (1)...(19): siRNA sense strand
augcaaaacugauucacaa

SEQ ID NO: 2373607 - RNA, 19 nt, Homo sapiens
  misc_RNA (1)...(19): siRNA sense strand
gggagaucaccuucagaga

SEQ ID NO: 2373608 - RNA, 19 nt, Homo sapiens
  misc_RNA (1)...(19): siRNA sense strand
acaagcgaguucagacaau

SEQ ID NO: 2373609 - RNA, 19 nt, Homo sapiens
  misc_RNA (1)...(19): siRNA sense strand
uauaagaaggagggaaaga

SEQ ID NO: 2373610 - RNA, 19 nt, Homo sapiens
  misc_RNA (1)...(19): siRNA sense strand
uuauugaugagguggauau

SEQ ID NO: 2373611 - RNA, 19 nt, Homo sapiens
  misc_RNA (1)...(19): siRNA sense strand
cauggaaaugugagagaaa

SEQ ID NO: 2373612 - RNA, 19 nt, Homo sapiens
  misc_RNA (1)...(19): siRNA sense strand
augagaaagaugaaggaaa

SEQ ID NO: 2373613 - RNA, 19 nt, Homo sapiens
  misc_RNA (1)...(19): siRNA sense strand
cggugauggugaaaggcua

SEQ ID NO: 2373614 - RNA, 19 nt, Homo sapiens
  misc_RNA (1)...(19): siRNA sense strand
ggugaaaggcuaccggcaa

SEQ ID NO: 2373615 - RNA, 19 nt, Homo sapiens
  misc_RNA (1)...(19): siRNA sense strand
cagcaaugguggaagccuu

SEQ ID NO: 2373616 - RNA, 19 nt, Homo sapiens
  misc_RNA (1)...(19): siRNA sense strand
agcaauggcugaagcgaau

SEQ ID NO: 2373617 - RNA, 19 nt, Homo sapiens
  misc_RNA (1)...(19): siRNA sense strand
aggaaaugagaaagaugaa

SEQ ID NO: 2373618 - RNA, 19 nt, Homo sapiens
  misc_RNA (1)...(19): siRNA sense strand
gggaaugugggaaguggaa

SEQ ID NO: 2373619 - RNA, 19 nt, Homo sapiens
  misc_RNA (1)...(19): siRNA sense strand
aagcaauggcugaagcgaa

SEQ ID NO: 2373620 - RNA, 19 nt, Homo sapiens
  misc_RNA (1)...(19): siRNA sense strand
cuaaggagaaugaagaaaa

SEQ ID NO: 2373621 - RNA, 19 nt, Homo sapiens
  misc_RNA (1)...(19): siRNA sense strand
aggaaaagaaucugaaaca

SEQ ID NO: 2373622 - RNA, 19 nt, Homo sapiens
  misc_RNA (1)...(19): siRNA sense strand
gagcaaagugacagccuca

SEQ ID NO: 2373623 - RNA, 19 nt, Homo sapiens
  misc_RNA (1)...(19): siRNA sense strand
cugcugagagagaggaaga

SEQ ID NO: 2373624 - RNA, 19 nt, Homo sapiens
  misc_RNA (1)...(19): siRNA sense strand
cggcaaaggcugaccguag

SEQ ID NO: 2373625 - RNA, 19 nt, Homo sapiens
  misc_RNA (1)...(19): siRNA sense strand
agauauaagaaggagggaa

SEQ ID NO: 2373626 - RNA, 19 nt, Homo sapiens
  misc_RNA (1)...(19): siRNA sense strand
ccagaggagcaaagugaca

SEQ ID NO: 2373627 - RNA, 19 nt, Homo sapiens
  misc_RNA (1)...(19): siRNA sense strand
aggggaagaucuugggaau

SEQ ID NO: 2373628 - RNA, 19 nt, Homo sapiens
  misc_RNA (1)...(19): siRNA sense strand
acaaggaguuaauggagga

SEQ ID NO: 2373629 - RNA, 19 nt, Homo sapiens
  misc_RNA (1)...(19): siRNA sense strand
gcucagaauuuguagacac

SEQ ID NO: 2373630 - RNA, 19 nt, Homo sapiens
  misc_RNA (1)...(19): siRNA sense strand
ggacaagggcucacggaug

SEQ ID NO: 2373631 - RNA, 19 nt, Homo sapiens
  misc_RNA (1)...(19): siRNA sense strand
caugaagccagcaggaaaa

SEQ ID NO: 2373632 - RNA, 19 nt, Homo sapiens
  misc_RNA (1)...(19): siRNA sense strand
cuugggaauaugugggaau

SEQ ID NO: 2373633 - RNA, 19 nt, Homo sapiens
  misc_RNA (1)...(19): siRNA sense strand
aagaagacgcucaggggaa

SEQ ID NO: 2373634 - RNA, 19 nt, Homo sapiens
  misc_RNA (1)...(19): siRNA sense strand
gcucaagaagguggagaau

SEQ ID NO: 2373635 - RNA, 19 nt, Homo sapiens
  misc_RNA (1)...(19): siRNA sense strand
gccuauggcaagaaggaga

SEQ ID NO: 2373636 - RNA, 19 nt, Homo sapiens
  misc_RNA (1)...(19): siRNA sense strand
agacaagcgaguucagaca

SEQ ID NO: 2373637 - RNA, 19 nt, Homo sapiens
  misc_RNA (1)...(19): siRNA sense strand
cggagauccuuugcagaaa

SEQ ID NO: 2373638 - RNA, 19 nt, Homo sapiens
  misc_RNA (1)...(19): siRNA sense strand
ggcuccaggaaaugagaaa

SEQ ID NO: 2373639 - RNA, 19 nt, Homo sapiens
  misc_RNA (1)...(19): siRNA sense strand
agaaggagggaaagaaaau

SEQ ID NO: 2373640 - RNA, 19 nt, Homo sapiens
  misc_RNA (1)...(19): siRNA sense strand
uccagaaggaccugagcaa

SEQ ID NO: 2373641 - RNA, 19 nt, Homo sapiens
  misc_RNA (1)...(19): siRNA sense strand
caucaaagcaauggcugaa

SEQ ID NO: 2373642 - RNA, 19 nt, Homo sapiens
  misc_RNA (1)...(19): siRNA sense strand
gaggaguccaggagcucaa

SEQ ID NO: 2373643 - RNA, 19 nt, Homo sapiens
  misc_RNA (1)...(19): siRNA sense strand
ggagaaugucagccgguca

SEQ ID NO: 2373644 - RNA, 19 nt, Homo sapiens
  misc_RNA (1)...(19): siRNA sense strand
aacagaggucagaggcaua

SEQ ID NO: 2373645 - RNA, 19 nt, Homo sapiens
  misc_RNA (1)...(19): siRNA sense strand
caccaaagguaucagcaca

SEQ ID NO: 2373646 - RNA, 19 nt, Homo sapiens
  misc_RNA (1)...(19): siRNA sense strand
cuccaggaaaugagaaaga

SEQ ID NO: 2373647 - RNA, 19 nt, Homo sapiens
  misc_RNA (1)...(19): siRNA sense strand
cagcaauuuuggugacaga

SEQ ID NO: 2373648 - RNA, 19 nt, Homo sapiens
  misc_RNA (1)...(19): siRNA sense strand
gaaacagaggucagaggca

SEQ ID NO: 2373649 - RNA, 19 nt, Homo sapiens
  misc_RNA (1)...(19): siRNA sense strand
cugcaagcaugguguucau

SEQ ID NO: 2373650 - RNA, 19 nt, Homo sapiens
  misc_RNA (1)...(19): siRNA sense strand
agcucaagaagguggagaa

SEQ ID NO: 2373651 - RNA, 19 nt, Homo sapiens
  misc_RNA (1)...(19): siRNA sense strand
augcaaaacugauucacaa

SEQ ID NO: 2373652 - RNA, 19 nt, Homo sapiens
  misc_RNA (1)...(19): siRNA sense strand
acaagcgaguucagacaau

SEQ ID NO: 2373653 - RNA, 19 nt, Homo sapiens
  misc_RNA (1)...(19): siRNA sense strand
uauaagaaggagggaaaga

SEQ ID NO: 2373654 - RNA, 19 nt, Homo sapiens
  misc_RNA (1)...(19): siRNA sense strand
ggaaagucuggguuggcau

SEQ ID NO: 2373655 - RNA, 19 nt, Homo sapiens
  misc_RNA (1)...(19): siRNA sense strand
aaacagaggucagaggcau

SEQ ID NO: 2373656 - RNA, 19 nt, Homo sapiens
  misc_RNA (1)...(19): siRNA sense strand
ggggaagaucuugggaaua

SEQ ID NO: 2373657 - RNA, 19 nt, Homo sapiens
  misc_RNA (1)...(19): siRNA sense strand
agacaaugaaugaguuucu

SEQ ID NO: 2373658 - RNA, 19 nt, Homo sapiens
  misc_RNA (1)...(19): siRNA sense strand
aauguaugccugggagaaa

SEQ ID NO: 2373659 - RNA, 19 nt, Homo sapiens
  misc_RNA (1)...(19): siRNA sense strand
aagaaggagggaaagaaaa

SEQ ID NO: 2373660 - RNA, 19 nt, Homo sapiens
  misc_RNA (1)...(19): siRNA sense strand
gaaugugggaaguggaaag

SEQ ID NO: 2373661 - RNA, 19 nt, Homo sapiens
  misc_RNA (1)...(19): siRNA sense strand
agaaaggggugguggcagu

SEQ ID NO: 2373662 - RNA, 19 nt, Homo sapiens
  misc_RNA (1)...(19): siRNA sense strand
gggagaaaucuuuuaccaa

SEQ ID NO: 2373663 - RNA, 19 nt, Homo sapiens
  misc_RNA (1)...(19): siRNA sense strand
ucuaaggagaaugaagaaa

SEQ ID NO: 2373664 - RNA, 19 nt, Homo sapiens
  misc_RNA (1)...(19): siRNA sense strand
cauuuaugcaagaaacaga

SEQ ID NO: 2373665 - RNA, 19 nt, Homo sapiens
  misc_RNA (1)...(19): siRNA sense strand
cucagaauuuguagacaca

SEQ ID NO: 2373666 - RNA, 19 nt, Homo sapiens
  misc_RNA (1)...(19): siRNA sense strand
aagaaggagagcugcauca

SEQ ID NO: 2373667 - RNA, 19 nt, Homo sapiens
  misc_RNA (1)...(19): siRNA sense strand
cauggaaaugugagagaaa

SEQ ID NO: 2373668 - RNA, 19 nt, Homo sapiens
  misc_RNA (1)...(19): siRNA sense strand
augagaaagaugaaggaaa

SEQ ID NO: 2373669 - RNA, 19 nt, Homo sapiens
  misc_RNA (1)...(19): siRNA sense strand
cggugauggugaaaggcua

SEQ ID NO: 2373670 - RNA, 19 nt, Homo sapiens
  misc_RNA (1)...(19): siRNA sense strand
ggugaaaggcuaccggcaa

SEQ ID NO: 2373671 - RNA, 19 nt, Homo sapiens
  misc_RNA (1)...(19): siRNA sense strand
cagcaaugguggaagccuu

SEQ ID NO: 2373672 - RNA, 19 nt, Homo sapiens
  misc_RNA (1)...(19): siRNA sense strand
agcaauggcugaagcgaau

SEQ ID NO: 2373673 - RNA, 19 nt, Homo sapiens
  misc_RNA (1)...(19): siRNA sense strand
aggaaaugagaaagaugaa

SEQ ID NO: 2373674 - RNA, 19 nt, Homo sapiens
  misc_RNA (1)...(19): siRNA sense strand
gggaaugugggaaguggaa

SEQ ID NO: 2373675 - RNA, 19 nt, Homo sapiens
  misc_RNA (1)...(19): siRNA sense strand
aagcaauggcugaagcgaa

SEQ ID NO: 2373676 - RNA, 19 nt, Homo sapiens
  misc_RNA (1)...(19): siRNA sense strand
cuaaggagaaugaagaaaa

SEQ ID NO: 2373677 - RNA, 19 nt, Homo sapiens
  misc_RNA (1)...(19): siRNA sense strand
aggaaaagaaucugaaaca

SEQ ID NO: 2373678 - RNA, 19 nt, Homo sapiens
  misc_RNA (1)...(19): siRNA sense strand
gagcaaagugacagccuca

SEQ ID NO: 2373679 - RNA, 19 nt, Homo sapiens
  misc_RNA (1)...(19): siRNA sense strand
cugcugagagagaggaaga

SEQ ID NO: 2373680 - RNA, 19 nt, Homo sapiens
  misc_RNA (1)...(19): siRNA sense strand
cggcaaaggcugaccguag

SEQ ID NO: 2373681 - RNA, 19 nt, Homo sapiens
  misc_RNA (1)...(19): siRNA sense strand
agauauaagaaggagggaa

SEQ ID NO: 2373682 - RNA, 19 nt, Homo sapiens
  misc_RNA (1)...(19): siRNA sense strand
ccagaggagcaaagugaca

SEQ ID NO: 2373683 - RNA, 19 nt, Homo sapiens
  misc_RNA (1)...(19): siRNA sense strand
aggggaagaucuugggaau

SEQ ID NO: 2373684 - RNA, 19 nt, Homo sapiens
  misc_RNA (1)...(19): siRNA sense strand
acaaggaguuaauggagga

SEQ ID NO: 2373685 - RNA, 19 nt, Homo sapiens
  misc_RNA (1)...(19): siRNA sense strand
gcucagaauuuguagacac

SEQ ID NO: 2373686 - RNA, 19 nt, Homo sapiens
  misc_RNA (1)...(19): siRNA sense strand
ggacaagggcucacggaug

SEQ ID NO: 2373687 - RNA, 19 nt, Homo sapiens
  misc_RNA (1)...(19): siRNA sense strand
caugaagccagcaggaaaa

SEQ ID NO: 2373688 - RNA, 19 nt, Homo sapiens
  misc_RNA (1)...(19): siRNA sense strand
cuugggaauaugugggaau

SEQ ID NO: 2373689 - RNA, 19 nt, Homo sapiens
  misc_RNA (1)...(19): siRNA sense strand
aagaagacgcucaggggaa

SEQ ID NO: 2373690 - RNA, 19 nt, Homo sapiens
  misc_RNA (1)...(19): siRNA sense strand
gcucaagaagguggagaau

SEQ ID NO: 2373691 - RNA, 19 nt, Homo sapiens
  misc_RNA (1)...(19): siRNA sense strand
gccuauggcaagaaggaga

SEQ ID NO: 2373692 - RNA, 19 nt, Homo sapiens
  misc_RNA (1)...(19): siRNA sense strand
agacaagcgaguucagaca

SEQ ID NO: 2373693 - RNA, 19 nt, Homo sapiens
  misc_RNA (1)...(19): siRNA sense strand
cggagauccuuugcagaaa

SEQ ID NO: 2373694 - RNA, 19 nt, Homo sapiens
  misc_RNA (1)...(19): siRNA sense strand
ggcuccaggaaaugagaaa

SEQ ID NO: 2373695 - RNA, 19 nt, Homo sapiens
  misc_RNA (1)...(19): siRNA sense strand
agaaggagggaaagaaaau

SEQ ID NO: 2373696 - RNA, 19 nt, Homo sapiens
  misc_RNA (1)...(19): siRNA sense strand
uccagaaggaccugagcaa

SEQ ID NO: 2373697 - RNA, 19 nt, Homo sapiens
  misc_RNA (1)...(19): siRNA sense strand
caucaaagcaauggcugaa

SEQ ID NO: 2373698 - RNA, 19 nt, Homo sapiens
  misc_RNA (1)...(19): siRNA sense strand
gaggaguccaggagcucaa

SEQ ID NO: 2373699 - RNA, 19 nt, Homo sapiens
  misc_RNA (1)...(19): siRNA sense strand
ggagaaugucagccgguca

SEQ ID NO: 2373700 - RNA, 19 nt, Homo sapiens
  misc_RNA (1)...(19): siRNA sense strand
aacagaggucagaggcaua

SEQ ID NO: 2373701 - RNA, 19 nt, Homo sapiens
  misc_RNA (1)...(19): siRNA sense strand
caccaaagguaucagcaca

SEQ ID NO: 2373702 - RNA, 19 nt, Homo sapiens
  misc_RNA (1)...(19): siRNA sense strand
cuccaggaaaugagaaaga

SEQ ID NO: 2373703 - RNA, 19 nt, Homo sapiens
  misc_RNA (1)...(19): siRNA sense strand
cagcaauuuuggugacaga

SEQ ID NO: 2373704 - RNA, 19 nt, Homo sapiens
  misc_RNA (1)...(19): siRNA sense strand
gaaacagaggucagaggca

SEQ ID NO: 2373705 - RNA, 19 nt, Homo sapiens
  misc_RNA (1)...(19): siRNA sense strand
cugcaagcaugguguucau

SEQ ID NO: 2373706 - RNA, 19 nt, Homo sapiens
  misc_RNA (1)...(19): siRNA sense strand
agcucaagaagguggagaa

SEQ ID NO: 2373707 - RNA, 19 nt, Homo sapiens
  misc_RNA (1)...(19): siRNA sense strand
augcaaaacugauucacaa

SEQ ID NO: 2373708 - RNA, 19 nt, Homo sapiens
  misc_RNA (1)...(19): siRNA sense strand
acaagcgaguucagacaau

SEQ ID NO: 2373709 - RNA, 19 nt, Homo sapiens
  misc_RNA (1)...(19): siRNA sense strand
uauaagaaggagggaaaga

SEQ ID NO: 2373710 - RNA, 19 nt, Homo sapiens
  misc_RNA (1)...(19): siRNA sense strand
ggaaagucuggguuggcau

SEQ ID NO: 2373711 - RNA, 19 nt, Homo sapiens
  misc_RNA (1)...(19): siRNA sense strand
aaacagaggucagaggcau

SEQ ID NO: 2373712 - RNA, 19 nt, Homo sapiens
  misc_RNA (1)...(19): siRNA sense strand
ggggaagaucuugggaaua

SEQ ID NO: 2373713 - RNA, 19 nt, Homo sapiens
  misc_RNA (1)...(19): siRNA sense strand
agacaaugaaugaguuucu

SEQ ID NO: 2373714 - RNA, 19 nt, Homo sapiens
  misc_RNA (1)...(19): siRNA sense strand
aauguaugccugggagaaa

SEQ ID NO: 2373715 - RNA, 19 nt, Homo sapiens
  misc_RNA (1)...(19): siRNA sense strand
aagaaggagggaaagaaaa

SEQ ID NO: 2373716 - RNA, 19 nt, Homo sapiens
  misc_RNA (1)...(19): siRNA sense strand
gaaugugggaaguggaaag

SEQ ID NO: 2373717 - RNA, 19 nt, Homo sapiens
  misc_RNA (1)...(19): siRNA sense strand
agaaaggggugguggcagu

SEQ ID NO: 2373718 - RNA, 19 nt, Homo sapiens
  misc_RNA (1)...(19): siRNA sense strand
gggagaaaucuuuuaccaa

SEQ ID NO: 2373719 - RNA, 19 nt, Homo sapiens
  misc_RNA (1)...(19): siRNA sense strand
ucuaaggagaaugaagaaa

SEQ ID NO: 2373720 - RNA, 19 nt, Homo sapiens
  misc_RNA (1)...(19): siRNA sense strand
cauuuaugcaagaaacaga

SEQ ID NO: 2373721 - RNA, 19 nt, Homo sapiens
  misc_RNA (1)...(19): siRNA sense strand
cucagaauuuguagacaca

SEQ ID NO: 2373722 - RNA, 19 nt, Homo sapiens
  misc_RNA (1)...(19): siRNA sense strand
aagaaggagagcugcauca

SEQ ID NO: 2373723 - RNA, 19 nt, Homo sapiens
  misc_RNA (1)...(19): siRNA sense strand
cauggaaaugugagagaaa

SEQ ID NO: 2373724 - RNA, 19 nt, Homo sapiens
  misc_RNA (1)...(19): siRNA sense strand
augagaaagaugaaggaaa

SEQ ID NO: 2373725 - RNA, 19 nt, Homo sapiens
  misc_RNA (1)...(19): siRNA sense strand
cggugauggugaaaggcua

SEQ ID NO: 2373726 - RNA, 19 nt, Homo sapiens
  misc_RNA (1)...(19): siRNA sense strand
ggugaaaggcuaccggcaa

SEQ ID NO: 2373727 - RNA, 19 nt, Homo sapiens
  misc_RNA (1)...(19): siRNA sense strand
cagcaaugguggaagccuu

SEQ ID NO: 2373728 - RNA, 19 nt, Homo sapiens
  misc_RNA (1)...(19): siRNA sense strand
agcaauggcugaagcgaau

SEQ ID NO: 2373729 - RNA, 19 nt, Homo sapiens
  misc_RNA (1)...(19): siRNA sense strand
aggaaaugagaaagaugaa

SEQ ID NO: 2373730 - RNA, 19 nt, Homo sapiens
  misc_RNA (1)...(19): siRNA sense strand
gggaaugugggaaguggaa

SEQ ID NO: 2373731 - RNA, 19 nt, Homo sapiens
  misc_RNA (1)...(19): siRNA sense strand
aagcaauggcugaagcgaa

SEQ ID NO: 2373732 - RNA, 19 nt, Homo sapiens
  misc_RNA (1)...(19): siRNA sense strand
cuaaggagaaugaagaaaa

SEQ ID NO: 2373733 - RNA, 19 nt, Homo sapiens
  misc_RNA (1)...(19): siRNA sense strand
aggaaaagaaucugaaaca

SEQ ID NO: 2373734 - RNA, 19 nt, Homo sapiens
  misc_RNA (1)...(19): siRNA sense strand
gagcaaagugacagccuca

SEQ ID NO: 2373735 - RNA, 19 nt, Homo sapiens
  misc_RNA (1)...(19): siRNA sense strand
cugcugagagagaggaaga

SEQ ID NO: 2373736 - RNA, 19 nt, Homo sapiens
  misc_RNA (1)...(19): siRNA sense strand
cggcaaaggcugaccguag

SEQ ID NO: 2373737 - RNA, 19 nt, Homo sapiens
  misc_RNA (1)...(19): siRNA sense strand
agauauaagaaggagggaa

SEQ ID NO: 2373738 - RNA, 19 nt, Homo sapiens
  misc_RNA (1)...(19): siRNA sense strand
ccagaggagcaaagugaca

SEQ ID NO: 2373739 - RNA, 19 nt, Homo sapiens
  misc_RNA (1)...(19): siRNA sense strand
aggggaagaucuugggaau

SEQ ID NO: 2373740 - RNA, 19 nt, Homo sapiens
  misc_RNA (1)...(19): siRNA sense strand
acaaggaguuaauggagga

SEQ ID NO: 2373741 - RNA, 19 nt, Homo sapiens
  misc_RNA (1)...(19): siRNA sense strand
gcucagaauuuguagacac

SEQ ID NO: 2373742 - RNA, 19 nt, Homo sapiens
  misc_RNA (1)...(19): siRNA sense strand
ggacaagggcucacggaug

SEQ ID NO: 2373743 - RNA, 19 nt, Homo sapiens
  misc_RNA (1)...(19): siRNA sense strand
caugaagccagcaggaaaa

SEQ ID NO: 2373744 - RNA, 19 nt, Homo sapiens
  misc_RNA (1)...(19): siRNA sense strand
cuugggaauaugugggaau

SEQ ID NO: 2373745 - RNA, 19 nt, Homo sapiens
  misc_RNA (1)...(19): siRNA sense strand
aagaagacgcucaggggaa

SEQ ID NO: 2373746 - RNA, 19 nt, Homo sapiens
  misc_RNA (1)...(19): siRNA sense strand
gcucaagaagguggagaau

SEQ ID NO: 2373747 - RNA, 19 nt, Homo sapiens
  misc_RNA (1)...(19): siRNA sense strand
gccuauggcaagaaggaga

SEQ ID NO: 2373748 - RNA, 19 nt, Homo sapiens
  misc_RNA (1)...(19): siRNA sense strand
agacaagcgaguucagaca

SEQ ID NO: 2373749 - RNA, 19 nt, Homo sapiens
  misc_RNA (1)...(19): siRNA sense strand
cggagauccuuugcagaaa

SEQ ID NO: 2373750 - RNA, 19 nt, Homo sapiens
  misc_RNA (1)...(19): siRNA sense strand
ggcuccaggaaaugagaaa

SEQ ID NO: 2373751 - RNA, 19 nt, Homo sapiens
  misc_RNA (1)...(19): siRNA sense strand
agaaggagggaaagaaaau

SEQ ID NO: 2373752 - RNA, 19 nt, Homo sapiens
  misc_RNA (1)...(19): siRNA sense strand
uccagaaggaccugagcaa

SEQ ID NO: 2373753 - RNA, 19 nt, Homo sapiens
  misc_RNA (1)...(19): siRNA sense strand
caucaaagcaauggcugaa

SEQ ID NO: 2373754 - RNA, 19 nt, Homo sapiens
  misc_RNA (1)...(19): siRNA sense strand
gaggaguccaggagcucaa

SEQ ID NO: 2373755 - RNA, 19 nt, Homo sapiens
  misc_RNA (1)...(19): siRNA sense strand
ggagaaugucagccgguca

SEQ ID NO: 2373756 - RNA, 19 nt, Homo sapiens
  misc_RNA (1)...(19): siRNA sense strand
aacagaggucagaggcaua

SEQ ID NO: 2373757 - RNA, 19 nt, Homo sapiens
  misc_RNA (1)...(19): siRNA sense strand
caccaaagguaucagcaca

SEQ ID NO: 2373758 - RNA, 19 nt, Homo sapiens
  misc_RNA (1)...(19): siRNA sense strand
cuccaggaaaugagaaaga

SEQ ID NO: 2373759 - RNA, 19 nt, Homo sapiens
  misc_RNA (1)...(19): siRNA sense strand
cagcaauuuuggugacaga

SEQ ID NO: 2373760 - RNA, 19 nt, Homo sapiens
  misc_RNA (1)...(19): siRNA sense strand
gaaacagaggucagaggca

SEQ ID NO: 2373761 - RNA, 19 nt, Homo sapiens
  misc_RNA (1)...(19): siRNA sense strand
cugcaagcaugguguucau

SEQ ID NO: 2373762 - RNA, 19 nt, Homo sapiens
  misc_RNA (1)...(19): siRNA sense strand
agcucaagaagguggagaa

SEQ ID NO: 2373763 - RNA, 19 nt, Homo sapiens
  misc_RNA (1)...(19): siRNA sense strand
augcaaaacugauucacaa

SEQ ID NO: 2373764 - RNA, 19 nt, Homo sapiens
  misc_RNA (1)...(19): siRNA sense strand
acaagcgaguucagacaau

SEQ ID NO: 2373765 - RNA, 19 nt, Homo sapiens
  misc_RNA (1)...(19): siRNA sense strand
uauaagaaggagggaaaga

SEQ ID NO: 2373766 - RNA, 19 nt, Homo sapiens
  misc_RNA (1)...(19): siRNA sense strand
ggaaagucuggguuggcau

SEQ ID NO: 2373767 - RNA, 19 nt, Homo sapiens
  misc_RNA (1)...(19): siRNA sense strand
aaacagaggucagaggcau

SEQ ID NO: 2373768 - RNA, 19 nt, Homo sapiens
  misc_RNA (1)...(19): siRNA sense strand
ggggaagaucuugggaaua

SEQ ID NO: 2373769 - RNA, 19 nt, Homo sapiens
  misc_RNA (1)...(19): siRNA sense strand
agacaaugaaugaguuucu

SEQ ID NO: 2373770 - RNA, 19 nt, Homo sapiens
  misc_RNA (1)...(19): siRNA sense strand
aauguaugccugggagaaa

SEQ ID NO: 2373771 - RNA, 19 nt, Homo sapiens
  misc_RNA (1)...(19): siRNA sense strand
aagaaggagggaaagaaaa

SEQ ID NO: 2373772 - RNA, 19 nt, Homo sapiens
  misc_RNA (1)...(19): siRNA sense strand
gaaugugggaaguggaaag

SEQ ID NO: 2373773 - RNA, 19 nt, Homo sapiens
  misc_RNA (1)...(19): siRNA sense strand
agaaaggggugguggcagu

SEQ ID NO: 2373774 - RNA, 19 nt, Homo sapiens
  misc_RNA (1)...(19): siRNA sense strand
gggagaaaucuuuuaccaa

SEQ ID NO: 2373775 - RNA, 19 nt, Homo sapiens
  misc_RNA (1)...(19): siRNA sense strand
ucuaaggagaaugaagaaa

SEQ ID NO: 2373776 - RNA, 19 nt, Homo sapiens
  misc_RNA (1)...(19): siRNA sense strand
cauuuaugcaagaaacaga

SEQ ID NO: 2373777 - RNA, 19 nt, Homo sapiens
  misc_RNA (1)...(19): siRNA sense strand
cucagaauuuguagacaca

SEQ ID NO: 2373778 - RNA, 19 nt, Homo sapiens
  misc_RNA (1)...(19): siRNA sense strand
aagaaggagagcugcauca

SEQ ID NO: 2373779 - RNA, 19 nt, Homo sapiens
  misc_RNA (1)...(19): siRNA sense strand
cauggaaaugugagagaaa

SEQ ID NO: 2373780 - RNA, 19 nt, Homo sapiens
  misc_RNA (1)...(19): siRNA sense strand
augagaaagaugaaggaaa

SEQ ID NO: 2373781 - RNA, 19 nt, Homo sapiens
  misc_RNA (1)...(19): siRNA sense strand
cggugauggugaaaggcua

SEQ ID NO: 2373782 - RNA, 19 nt, Homo sapiens
  misc_RNA (1)...(19): siRNA sense strand
ggugaaaggcuaccggcaa

SEQ ID NO: 2373783 - RNA, 19 nt, Homo sapiens
  misc_RNA (1)...(19): siRNA sense strand
cagcaaugguggaagccuu

SEQ ID NO: 2373784 - RNA, 19 nt, Homo sapiens
  misc_RNA (1)...(19): siRNA sense strand
agcaauggcugaagcgaau

SEQ ID NO: 2373785 - RNA, 19 nt, Homo sapiens
  misc_RNA (1)...(19): siRNA sense strand
aggaaaugagaaagaugaa

SEQ ID NO: 2373786 - RNA, 19 nt, Homo sapiens
  misc_RNA (1)...(19): siRNA sense strand
gggaaugugggaaguggaa

SEQ ID NO: 2373787 - RNA, 19 nt, Homo sapiens
  misc_RNA (1)...(19): siRNA sense strand
aagcaauggcugaagcgaa

SEQ ID NO: 2373788 - RNA, 19 nt, Homo sapiens
  misc_RNA (1)...(19): siRNA sense strand
cuaaggagaaugaagaaaa

SEQ ID NO: 2373789 - RNA, 19 nt, Homo sapiens
  misc_RNA (1)...(19): siRNA sense strand
aggaaaagaaucugaaaca

SEQ ID NO: 2373790 - RNA, 19 nt, Homo sapiens
  misc_RNA (1)...(19): siRNA sense strand
gagcaaagugacagccuca

SEQ ID NO: 2373791 - RNA, 19 nt, Homo sapiens
  misc_RNA (1)...(19): siRNA sense strand
cugcugagagagaggaaga

SEQ ID NO: 2373792 - RNA, 19 nt, Homo sapiens
  misc_RNA (1)...(19): siRNA sense strand
cggcaaaggcugaccguag

SEQ ID NO: 2373793 - RNA, 19 nt, Homo sapiens
  misc_RNA (1)...(19): siRNA sense strand
agauauaagaaggagggaa

SEQ ID NO: 2373794 - RNA, 19 nt, Homo sapiens
  misc_RNA (1)...(19): siRNA sense strand
ccagaggagcaaagugaca

SEQ ID NO: 2373795 - RNA, 19 nt, Homo sapiens
  misc_RNA (1)...(19): siRNA sense strand
aggggaagaucuugggaau

SEQ ID NO: 2373796 - RNA, 19 nt, Homo sapiens
  misc_RNA (1)...(19): siRNA sense strand
acaaggaguuaauggagga

SEQ ID NO: 2373797 - RNA, 19 nt, Homo sapiens
  misc_RNA (1)...(19): siRNA sense strand
gcucagaauuuguagacac

SEQ ID NO: 2373798 - RNA, 19 nt, Homo sapiens
  misc_RNA (1)...(19): siRNA sense strand
ggacaagggcucacggaug

SEQ ID NO: 2373799 - RNA, 19 nt, Homo sapiens
  misc_RNA (1)...(19): siRNA sense strand
caugaagccagcaggaaaa

SEQ ID NO: 2373800 - RNA, 19 nt, Homo sapiens
  misc_RNA (1)...(19): siRNA sense strand
cuugggaauaugugggaau

SEQ ID NO: 2373801 - RNA, 19 nt, Homo sapiens
  misc_RNA (1)...(19): siRNA sense strand
aagaagacgcucaggggaa

SEQ ID NO: 2373802 - RNA, 19 nt, Homo sapiens
  misc_RNA (1)...(19): siRNA sense strand
gcucaagaagguggagaau

SEQ ID NO: 2373803 - RNA, 19 nt, Homo sapiens
  misc_RNA (1)...(19): siRNA sense strand
gccuauggcaagaaggaga

SEQ ID NO: 2373804 - RNA, 19 nt, Homo sapiens
  misc_RNA (1)...(19): siRNA sense strand
agacaagcgaguucagaca

SEQ ID NO: 2373805 - RNA, 19 nt, Homo sapiens
  misc_RNA (1)...(19): siRNA sense strand
cggagauccuuugcagaaa

SEQ ID NO: 2373806 - RNA, 19 nt, Homo sapiens
  misc_RNA (1)...(19): siRNA sense strand
ggcuccaggaaaugagaaa

SEQ ID NO: 2373807 - RNA, 19 nt, Homo sapiens
  misc_RNA (1)...(19): siRNA sense strand
agaaggagggaaagaaaau

SEQ ID NO: 2373808 - RNA, 19 nt, Homo sapiens
  misc_RNA (1)...(19): siRNA sense strand
uccagaaggaccugagcaa

SEQ ID NO: 2373809 - RNA, 19 nt, Homo sapiens
  misc_RNA (1)...(19): siRNA sense strand
caucaaagcaauggcugaa

SEQ ID NO: 2373810 - RNA, 19 nt, Homo sapiens
  misc_RNA (1)...(19): siRNA sense strand
gaggaguccaggagcucaa

SEQ ID NO: 2373811 - RNA, 19 nt, Homo sapiens
  misc_RNA (1)...(19): siRNA sense strand
ggagaaugucagccgguca

SEQ ID NO: 2373812 - RNA, 19 nt, Homo sapiens
  misc_RNA (1)...(19): siRNA sense strand
aacagaggucagaggcaua

SEQ ID NO: 2373813 - RNA, 19 nt, Homo sapiens
  misc_RNA (1)...(19): siRNA sense strand
caccaaagguaucagcaca

SEQ ID NO: 2373814 - RNA, 19 nt, Homo sapiens
  misc_RNA (1)...(19): siRNA sense strand
cuccaggaaaugagaaaga

SEQ ID NO: 2373815 - RNA, 19 nt, Homo sapiens
  misc_RNA (1)...(19): siRNA sense strand
cagcaauuuuggugacaga

SEQ ID NO: 2373816 - RNA, 19 nt, Homo sapiens
  misc_RNA (1)...(19): siRNA sense strand
gaaacagaggucagaggca

SEQ ID NO: 2373817 - RNA, 19 nt, Homo sapiens
  misc_RNA (1)...(19): siRNA sense strand
cugcaagcaugguguucau

SEQ ID NO: 2373818 - RNA, 19 nt, Homo sapiens
  misc_RNA (1)...(19): siRNA sense strand
agcucaagaagguggagaa

SEQ ID NO: 2373819 - RNA, 19 nt, Homo sapiens
  misc_RNA (1)...(19): siRNA sense strand
augcaaaacugauucacaa

SEQ ID NO: 2373820 - RNA, 19 nt, Homo sapiens
  misc_RNA (1)...(19): siRNA sense strand
acaagcgaguucagacaau

SEQ ID NO: 2373821 - RNA, 19 nt, Homo sapiens
  misc_RNA (1)...(19): siRNA sense strand
uauaagaaggagggaaaga

SEQ ID NO: 2373822 - RNA, 19 nt, Homo sapiens
  misc_RNA (1)...(19): siRNA sense strand
ggaaagucuggguuggcau

SEQ ID NO: 2373823 - RNA, 19 nt, Homo sapiens
  misc_RNA (1)...(19): siRNA sense strand
aaacagaggucagaggcau

SEQ ID NO: 2373824 - RNA, 19 nt, Homo sapiens
  misc_RNA (1)...(19): siRNA sense strand
ggggaagaucuugggaaua

SEQ ID NO: 2373825 - RNA, 19 nt, Homo sapiens
  misc_RNA (1)...(19): siRNA sense strand
agacaaugaaugaguuucu

SEQ ID NO: 2373826 - RNA, 19 nt, Homo sapiens
  misc_RNA (1)...(19): siRNA sense strand
aauguaugccugggagaaa

SEQ ID NO: 2373827 - RNA, 19 nt, Homo sapiens
  misc_RNA (1)...(19): siRNA sense strand
aagaaggagggaaagaaaa

SEQ ID NO: 2373828 - RNA, 19 nt, Homo sapiens
  misc_RNA (1)...(19): siRNA sense strand
gaaugugggaaguggaaag

SEQ ID NO: 2373829 - RNA, 19 nt, Homo sapiens
  misc_RNA (1)...(19): siRNA sense strand
agaaaggggugguggcagu

SEQ ID NO: 2373830 - RNA, 19 nt, Homo sapiens
  misc_RNA (1)...(19): siRNA sense strand
gggagaaaucuuuuaccaa

SEQ ID NO: 2373831 - RNA, 19 nt, Homo sapiens
  misc_RNA (1)...(19): siRNA sense strand
ucuaaggagaaugaagaaa

SEQ ID NO: 2373832 - RNA, 19 nt, Homo sapiens
  misc_RNA (1)...(19): siRNA sense strand
cauuuaugcaagaaacaga

SEQ ID NO: 2373833 - RNA, 19 nt, Homo sapiens
  misc_RNA (1)...(19): siRNA sense strand
cucagaauuuguagacaca

SEQ ID NO: 2373834 - RNA, 19 nt, Homo sapiens
  misc_RNA (1)...(19): siRNA sense strand
aagaaggagagcugcauca

SEQ ID NO: 2373835 - RNA, 19 nt, Homo sapiens
  misc_RNA (1)...(19): siRNA sense strand
aggugaaaguuuauggcua

SEQ ID NO: 2373836 - RNA, 19 nt, Homo sapiens
  misc_RNA (1)...(19): siRNA sense strand
ggguuggaccugaaggaau

SEQ ID NO: 2373837 - RNA, 19 nt, Homo sapiens
  misc_RNA (1)...(19): siRNA sense strand
caaaggagguguaugacca

SEQ ID NO: 2373838 - RNA, 19 nt, Homo sapiens
  misc_RNA (1)...(19): siRNA sense strand
ggacugcaguuuacgggua

SEQ ID NO: 2373839 - RNA, 19 nt, Homo sapiens
  misc_RNA (1)...(19): siRNA sense strand
uggcauucugugcgggaua

SEQ ID NO: 2373840 - RNA, 19 nt, Homo sapiens
  misc_RNA (1)...(19): siRNA sense strand
gaaucauagaaguugacua

SEQ ID NO: 2373841 - RNA, 19 nt, Homo sapiens
  misc_RNA (1)...(19): siRNA sense strand
ggguagcaaaggugaaagu

SEQ ID NO: 2373842 - RNA, 19 nt, Homo sapiens
  misc_RNA (1)...(19): siRNA sense strand
aggcgaaagccaacggcga

SEQ ID NO: 2373843 - RNA, 19 nt, Homo sapiens
  misc_RNA (1)...(19): siRNA sense strand
agguggaggcgaaagccaa

SEQ ID NO: 2373844 - RNA, 19 nt, Homo sapiens
  misc_RNA (1)...(19): siRNA sense strand
ugggaaucauagaaguuga

SEQ ID NO: 2373845 - RNA, 19 nt, Homo sapiens
  misc_RNA (1)...(19): siRNA sense strand
ccagcagauggaugggcua

SEQ ID NO: 2373846 - RNA, 19 nt, Homo sapiens
  misc_RNA (1)...(19): siRNA sense strand
cagagcaggcaguggaacu

SEQ ID NO: 2373847 - RNA, 19 nt, Homo sapiens
  misc_RNA (1)...(19): siRNA sense strand
gagcgauaacagagacgca

SEQ ID NO: 2373848 - RNA, 19 nt, Homo sapiens
  misc_RNA (1)...(19): siRNA sense strand
ugguugagcagaugggaaa

SEQ ID NO: 2373849 - RNA, 19 nt, Homo sapiens
  misc_RNA (1)...(19): siRNA sense strand
uguuugugcccgagggauu

SEQ ID NO: 2373850 - RNA, 19 nt, Homo sapiens
  misc_RNA (1)...(19): siRNA sense strand
gggaaaauucuguguggau

SEQ ID NO: 2373851 - RNA, 19 nt, Homo sapiens
  misc_RNA (1)...(19): siRNA sense strand
acgcugaagacauggauga

SEQ ID NO: 2373852 - RNA, 19 nt, Homo sapiens
  misc_RNA (1)...(19): siRNA sense strand
auucagagguuucgggaug

SEQ ID NO: 2373853 - RNA, 19 nt, Homo sapiens
  misc_RNA (1)...(19): siRNA sense strand
gguugaccguggagaugau

SEQ ID NO: 2373854 - RNA, 19 nt, Homo sapiens
  misc_RNA (1)...(19): siRNA sense strand
guguguuuguccuggauga

SEQ ID NO: 2373855 - RNA, 19 nt, Homo sapiens
  misc_RNA (1)...(19): siRNA sense strand
agcacaggaaagacaaaua

SEQ ID NO: 2373856 - RNA, 19 nt, Homo sapiens
  misc_RNA (1)...(19): siRNA sense strand
gugguugagcagaugggaa

SEQ ID NO: 2373857 - RNA, 19 nt, Homo sapiens
  misc_RNA (1)...(19): siRNA sense strand
cgaaacgcuaagugguuga

SEQ ID NO: 2373858 - RNA, 19 nt, Homo sapiens
  misc_RNA (1)...(19): siRNA sense strand
ggcacuuugcugagcgaau

SEQ ID NO: 2373859 - RNA, 19 nt, Homo sapiens
  misc_RNA (1)...(19): siRNA sense strand
cugaacaacauccggcaau

SEQ ID NO: 2373860 - RNA, 19 nt, Homo sapiens
  misc_RNA (1)...(19): siRNA sense strand
gggagaugcuggagggcuu

SEQ ID NO: 2373861 - RNA, 19 nt, Homo sapiens
  misc_RNA (1)...(19): siRNA sense strand
ccacauaccgugagcgcaa

SEQ ID NO: 2373862 - RNA, 19 nt, Homo sapiens
  misc_RNA (1)...(19): siRNA sense strand
acaaagaccuggugccuga

SEQ ID NO: 2373863 - RNA, 19 nt, Homo sapiens
  misc_RNA (1)...(19): siRNA sense strand
ugaaauuggaggauggaga

SEQ ID NO: 2373864 - RNA, 19 nt, Homo sapiens
  misc_RNA (1)...(19): siRNA sense strand
gcgggaaauugcugagcca

SEQ ID NO: 2373865 - RNA, 19 nt, Homo sapiens
  misc_RNA (1)...(19): siRNA sense strand
ugaaaguggguauggaaca

SEQ ID NO: 2373866 - RNA, 19 nt, Homo sapiens
  misc_RNA (1)...(19): siRNA sense strand
aggaugaagaccaggacau

SEQ ID NO: 2373867 - RNA, 19 nt, Homo sapiens
  misc_RNA (1)...(19): siRNA sense strand
cuggaagagcagcgggaga

SEQ ID NO: 2373868 - RNA, 19 nt, Homo sapiens
  misc_RNA (1)...(19): siRNA sense strand
caagaaagcuggagagggc

SEQ ID NO: 2373869 - RNA, 19 nt, Homo sapiens
  misc_RNA (1)...(19): siRNA sense strand
gcaugaucaccgagacaga

SEQ ID NO: 2373870 - RNA, 19 nt, Homo sapiens
  misc_RNA (1)...(19): siRNA sense strand
agaucuuccaggaggacaa

SEQ ID NO: 2373871 - RNA, 19 nt, Homo sapiens
  misc_RNA (1)...(19): siRNA sense strand
ccugaaaguggguauggaa

SEQ ID NO: 2373872 - RNA, 19 nt, Homo sapiens
  misc_RNA (1)...(19): siRNA sense strand
caguuuacccagugauaca

SEQ ID NO: 2373873 - RNA, 19 nt, Homo sapiens
  misc_RNA (1)...(19): siRNA sense strand
gggaaauugcugagccacu

SEQ ID NO: 2373874 - RNA, 19 nt, Homo sapiens
  misc_RNA (1)...(19): siRNA sense strand
guauggaacagcugguaca

SEQ ID NO: 2373875 - RNA, 19 nt, Homo sapiens
  misc_RNA (1)...(19): siRNA sense strand
uagaauacuccgaaaacaa

SEQ ID NO: 2373876 - RNA, 19 nt, Homo sapiens
  misc_RNA (1)...(19): siRNA sense strand
uugagaagcuacugaccau

SEQ ID NO: 2373877 - RNA, 19 nt, Homo sapiens
  misc_RNA (1)...(19): siRNA sense strand
ggaacagcugguacagaau

SEQ ID NO: 2373878 - RNA, 19 nt, Homo sapiens
  misc_RNA (1)...(19): siRNA sense strand
cgcaagucuuugagaagga

SEQ ID NO: 2373879 - RNA, 19 nt, Homo sapiens
  misc_RNA (1)...(19): siRNA sense strand
ggcagaagauugagggagc

SEQ ID NO: 2373880 - RNA, 19 nt, Homo sapiens
  misc_RNA (1)...(19): siRNA sense strand
gaggaaagccugcggagcu

SEQ ID NO: 2373881 - RNA, 19 nt, Homo sapiens
  misc_RNA (1)...(19): siRNA sense strand
uugagaaggacguugaaga

SEQ ID NO: 2373882 - RNA, 19 nt, Homo sapiens
  misc_RNA (1)...(19): siRNA sense strand
gcaauagguuccaugccuu

SEQ ID NO: 2373883 - RNA, 19 nt, Homo sapiens
  misc_RNA (1)...(19): siRNA sense strand
ucuaugaagagaucagcaa

SEQ ID NO: 2373884 - RNA, 19 nt, Homo sapiens
  misc_RNA (1)...(19): siRNA sense strand
gggugcaguaccuggaaga

SEQ ID NO: 2373885 - RNA, 19 nt, Homo sapiens
  misc_RNA (1)...(19): siRNA sense strand
gauacuaccuggacaccga

SEQ ID NO: 2373886 - RNA, 19 nt, Homo sapiens
  misc_RNA (1)...(19): siRNA sense strand
cuaugaagagaucagcaaa

SEQ ID NO: 2373887 - RNA, 19 nt, Homo sapiens
  misc_RNA (1)...(19): siRNA sense strand
ccacagugcuggaccccaa

SEQ ID NO: 2373888 - RNA, 19 nt, Homo sapiens
  misc_RNA (1)...(19): siRNA sense strand
gggccuucaagcuggacua

SEQ ID NO: 2373889 - RNA, 19 nt, Homo sapiens
  misc_RNA (1)...(19): siRNA sense strand
acgcaugaucaccgagaca

SEQ ID NO: 2373890 - RNA, 19 nt, Homo sapiens
  misc_RNA (1)...(19): siRNA sense strand
cuguauagcuccagugguc

SEQ ID NO: 2373891 - RNA, 19 nt, Homo sapiens
  misc_RNA (1)...(19): siRNA sense strand
guaucggacuugccgggaa

SEQ ID NO: 2373892 - RNA, 19 nt, Homo sapiens
  misc_RNA (1)...(19): siRNA sense strand
cgcucaaguuggaggauug

SEQ ID NO: 2373893 - RNA, 19 nt, Homo sapiens
  misc_RNA (1)...(19): siRNA sense strand
cagaagaaauauggagcaa

SEQ ID NO: 2373894 - RNA, 19 nt, Homo sapiens
  misc_RNA (1)...(19): siRNA sense strand
gguuaaagaacuugcugaa

SEQ ID NO: 2373895 - RNA, 19 nt, Homo sapiens
  misc_RNA (1)...(19): siRNA sense strand
ucugaauaccauaggauua

SEQ ID NO: 2373896 - RNA, 19 nt, Homo sapiens
  misc_RNA (1)...(19): siRNA sense strand
gagaauuagaagaugauga

SEQ ID NO: 2373897 - RNA, 19 nt, Homo sapiens
  misc_RNA (1)...(19): siRNA sense strand
gaaucaucuacgagagaau

SEQ ID NO: 2373898 - RNA, 19 nt, Homo sapiens
  misc_RNA (1)...(19): siRNA sense strand
aauuaaaggaagagaugga

SEQ ID NO: 2373899 - RNA, 19 nt, Homo sapiens
  misc_RNA (1)...(19): siRNA sense strand
cccuaaaacuacugaggaa

SEQ ID NO: 2373900 - RNA, 19 nt, Homo sapiens
  misc_RNA (1)...(19): siRNA sense strand
acaccaaauuguugagacu

SEQ ID NO: 2373901 - RNA, 19 nt, Homo sapiens
  misc_RNA (1)...(19): siRNA sense strand
caggaaaaguguugggguu

SEQ ID NO: 2373902 - RNA, 19 nt, Homo sapiens
  misc_RNA (1)...(19): siRNA sense strand
cggcagaguuaggugaaau

SEQ ID NO: 2373903 - RNA, 19 nt, Homo sapiens
  misc_RNA (1)...(19): siRNA sense strand
cuaaaacuacugaggaaaa

SEQ ID NO: 2373904 - RNA, 19 nt, Homo sapiens
  misc_RNA (1)...(19): siRNA sense strand
agacagaaguugugaucac

SEQ ID NO: 2373905 - RNA, 19 nt, Homo sapiens
  misc_RNA (1)...(19): siRNA sense strand
aguuauuaucgcugacuaa

SEQ ID NO: 2373906 - RNA, 19 nt, Homo sapiens
  misc_RNA (1)...(19): siRNA sense strand
ucucagggaacaauagaaa

SEQ ID NO: 2373907 - RNA, 19 nt, Homo sapiens
  misc_RNA (1)...(19): siRNA sense strand
ucguggaagacauaagaaa

SEQ ID NO: 2373908 - RNA, 19 nt, Homo sapiens
  misc_RNA (1)...(19): siRNA sense strand
uuaaauugcaugacagaga

SEQ ID NO: 2373909 - RNA, 19 nt, Homo sapiens
  misc_RNA (1)...(19): siRNA sense strand
cagaaaauguuuacagcuu

SEQ ID NO: 2373910 - RNA, 19 nt, Homo sapiens
  misc_RNA (1)...(19): siRNA sense strand
gagaauuugaaguguugaa

SEQ ID NO: 2373911 - RNA, 19 nt, Homo sapiens
  misc_RNA (1)...(19): siRNA sense strand
ggauaagaaagaugcuuca

SEQ ID NO: 2373912 - RNA, 19 nt, Homo sapiens
  misc_RNA (1)...(19): siRNA sense strand
ccuugaagcagaucaggaa

SEQ ID NO: 2373913 - RNA, 19 nt, Homo sapiens
  misc_RNA (1)...(19): siRNA sense strand
accaaauuguugagacuuu

SEQ ID NO: 2373914 - RNA, 19 nt, Homo sapiens
  misc_RNA (1)...(19): siRNA sense strand
cguggaagacauaagaaaa

SEQ ID NO: 2373915 - RNA, 19 nt, Homo sapiens
  misc_RNA (1)...(19): siRNA sense strand
gguauagugcaccgugaua

SEQ ID NO: 2373916 - RNA, 19 nt, Homo sapiens
  misc_RNA (1)...(19): siRNA sense strand
guacaaacucacagauuuu

SEQ ID NO: 2373917 - RNA, 19 nt, Homo sapiens
  misc_RNA (1)...(19): siRNA sense strand
caaacauccuugaagcaga

SEQ ID NO: 2373918 - RNA, 19 nt, Homo sapiens
  misc_RNA (1)...(19): siRNA sense strand
cugaauaccauaggauuaa

SEQ ID NO: 2373919 - RNA, 19 nt, Homo sapiens
  misc_RNA (1)...(19): siRNA sense strand
aucaggaauuaaugcgaaa

SEQ ID NO: 2373920 - RNA, 19 nt, Homo sapiens
  misc_RNA (1)...(19): siRNA sense strand
cgaaagacagaaauguaga

SEQ ID NO: 2373921 - RNA, 19 nt, Homo sapiens
  misc_RNA (1)...(19): siRNA sense strand
caggaaauaucaugcgugu

SEQ ID NO: 2373922 - RNA, 19 nt, Homo sapiens
  misc_RNA (1)...(19): siRNA sense strand
guguacaaacucacagauu

SEQ ID NO: 2373923 - RNA, 19 nt, Homo sapiens
  misc_RNA (1)...(19): siRNA sense strand
uagaagaugaugagcaguu

SEQ ID NO: 2373924 - RNA, 19 nt, Homo sapiens
  misc_RNA (1)...(19): siRNA sense strand
ccaauuuauccaaguucua

SEQ ID NO: 2373925 - RNA, 19 nt, Homo sapiens
  misc_RNA (1)...(19): siRNA sense strand
cgugauaucaagccaggaa

SEQ ID NO: 2373926 - RNA, 19 nt, Homo sapiens
  misc_RNA (1)...(19): siRNA sense strand
gauguucaaaugagagaau

SEQ ID NO: 2373927 - RNA, 19 nt, Homo sapiens
  misc_RNA (1)...(19): siRNA sense strand
ggagacaacaacaagacau

SEQ ID NO: 2373928 - RNA, 19 nt, Homo sapiens
  misc_RNA (1)...(19): siRNA sense strand
uguauggcacagaagaaua

SEQ ID NO: 2373929 - RNA, 19 nt, Homo sapiens
  misc_RNA (1)...(19): siRNA sense strand
ucuacgagagaaugguaua

SEQ ID NO: 2373930 - RNA, 19 nt, Homo sapiens
  misc_RNA (1)...(19): siRNA sense strand
ugauaucaagccaggaaau

SEQ ID NO: 2373931 - RNA, 19 nt, Homo sapiens
  misc_RNA (1)...(19): siRNA sense strand
agauggaaggggugguuaa

SEQ ID NO: 2373932 - RNA, 19 nt, Homo sapiens
  misc_RNA (1)...(19): siRNA sense strand
cagcuagagaauuagaaga

SEQ ID NO: 2373933 - RNA, 19 nt, Homo sapiens
  misc_RNA (1)...(19): siRNA sense strand
aggaaagccuucuggugca

SEQ ID NO: 2373934 - RNA, 19 nt, Homo sapiens
  misc_RNA (1)...(19): siRNA sense strand
augaagaacaaauccacaa

SEQ ID NO: 2373935 - RNA, 19 nt, Homo sapiens
  misc_RNA (1)...(19): siRNA sense strand
uagaaaugacucuugguau

SEQ ID NO: 2373936 - RNA, 19 nt, Homo sapiens
  misc_RNA (1)...(19): siRNA sense strand
agcuagagaauuagaagau

SEQ ID NO: 2373937 - RNA, 19 nt, Homo sapiens
  misc_RNA (1)...(19): siRNA sense strand
gcggcagaguuaggugaaa

SEQ ID NO: 2373938 - RNA, 19 nt, Homo sapiens
  misc_RNA (1)...(19): siRNA sense strand
ccacaaaagcuaugacgca

SEQ ID NO: 2373939 - RNA, 19 nt, Homo sapiens
  misc_RNA (1)...(19): siRNA sense strand
aagucagaagaauggauaa

SEQ ID NO: 2373940 - RNA, 19 nt, Homo sapiens
  misc_RNA (1)...(19): siRNA sense strand
caacaagacauaaaguacu

SEQ ID NO: 2373941 - RNA, 19 nt, Homo sapiens
  misc_RNA (1)...(19): siRNA sense strand
caacauuucccuaaaacua

SEQ ID NO: 2373942 - RNA, 19 nt, Homo sapiens
  misc_RNA (1)...(19): siRNA sense strand
aacuacaaguccuguuaaa

SEQ ID NO: 2373943 - RNA, 19 nt, Homo sapiens
  misc_RNA (1)...(19): siRNA sense strand
ugaauaagucagaagaaug

SEQ ID NO: 2373944 - RNA, 19 nt, Homo sapiens
  misc_RNA (1)...(19): siRNA sense strand
ggcagaguuaggugaaauu

SEQ ID NO: 2373945 - RNA, 19 nt, Homo sapiens
  misc_RNA (1)...(19): siRNA sense strand
cuaaugaguuacaagaaac

SEQ ID NO: 2373946 - RNA, 19 nt, Homo sapiens
  misc_RNA (1)...(19): siRNA sense strand
uggaaggggugguuaaaga

SEQ ID NO: 2373947 - RNA, 19 nt, Homo sapiens
  misc_RNA (1)...(19): siRNA sense strand
gaguacagaaagcagaaaa

SEQ ID NO: 2373948 - RNA, 19 nt, Homo sapiens
  misc_RNA (1)...(19): siRNA sense strand
uguuaaauugcaugacaga

SEQ ID NO: 2373949 - RNA, 19 nt, Homo sapiens
  misc_RNA (1)...(19): siRNA sense strand
auugcaugacagagauuua

SEQ ID NO: 2373950 - RNA, 19 nt, Homo sapiens
  misc_RNA (1)...(19): siRNA sense strand
uggaggaagccaagacaaa

SEQ ID NO: 2373951 - RNA, 19 nt, Homo sapiens
  misc_RNA (1)...(19): siRNA sense strand
aggaagaagccgaggccau

SEQ ID NO: 2373952 - RNA, 19 nt, Homo sapiens
  misc_RNA (1)...(19): siRNA sense strand
guugaagaaacaugacaaa

SEQ ID NO: 2373953 - RNA, 19 nt, Homo sapiens
  misc_RNA (1)...(19): siRNA sense strand
agaugaacccaaaggaaaa

SEQ ID NO: 2373954 - RNA, 19 nt, Homo sapiens
  misc_RNA (1)...(19): siRNA sense strand
gguugaagaaacaugacaa

SEQ ID NO: 2373955 - RNA, 19 nt, Homo sapiens
  misc_RNA (1)...(19): siRNA sense strand
ucucaaaggaagccaacaa

SEQ ID NO: 2373956 - RNA, 19 nt, Homo sapiens
  misc_RNA (1)...(19): siRNA sense strand
cuaagauggaaaaggaaua

SEQ ID NO: 2373957 - RNA, 19 nt, Homo sapiens
  misc_RNA (1)...(19): siRNA sense strand
gcaauaacagaaaaggaaa

SEQ ID NO: 2373958 - RNA, 19 nt, Homo sapiens
  misc_RNA (1)...(19): siRNA sense strand
gggagaaaacgaugaaaca

SEQ ID NO: 2373959 - RNA, 19 nt, Homo sapiens
  misc_RNA (1)...(19): siRNA sense strand
gaagcaaaagagaaagaaa

SEQ ID NO: 2373960 - RNA, 19 nt, Homo sapiens
  misc_RNA (1)...(19): siRNA sense strand
aagacaacuuugaggaacu

SEQ ID NO: 2373961 - RNA, 19 nt, Homo sapiens
  misc_RNA (1)...(19): siRNA sense strand
agaugaaguagcagagguu

SEQ ID NO: 2373962 - RNA, 19 nt, Homo sapiens
  misc_RNA (1)...(19): siRNA sense strand
ccaacaauuaugaggagga

SEQ ID NO: 2373963 - RNA, 19 nt, Homo sapiens
  misc_RNA (1)...(19): siRNA sense strand
aagcagaagaagacaagau

SEQ ID NO: 2373964 - RNA, 19 nt, Homo sapiens
  misc_RNA (1)...(19): siRNA sense strand
gaagcagcuaagauggaaa

SEQ ID NO: 2373965 - RNA, 19 nt, Homo sapiens
  misc_RNA (1)...(19): siRNA sense strand
cugaagcagaagaagacaa

SEQ ID NO: 2373966 - RNA, 19 nt, Homo sapiens
  misc_RNA (1)...(19): siRNA sense strand
uugugaagaugauggugaa

SEQ ID NO: 2373967 - RNA, 19 nt, Homo sapiens
  misc_RNA (1)...(19): siRNA sense strand
ggcaauaacagaaaaggaa

SEQ ID NO: 2373968 - RNA, 19 nt, Homo sapiens
  misc_RNA (1)...(19): siRNA sense strand
auuuggaagccaucagaaa

SEQ ID NO: 2373969 - RNA, 19 nt, Homo sapiens
  misc_RNA (1)...(19): siRNA sense strand
acagaugaacccaaaggaa

SEQ ID NO: 2373970 - RNA, 19 nt, Homo sapiens
  misc_RNA (1)...(19): siRNA sense strand
ggucuugcuaagggagaaa

SEQ ID NO: 2373971 - RNA, 19 nt, Homo sapiens
  misc_RNA (1)...(19): siRNA sense strand
aggaagaagcagcuaagau

SEQ ID NO: 2373972 - RNA, 19 nt, Homo sapiens
  misc_RNA (1)...(19): siRNA sense strand
gauaauaaguugaaugugg

SEQ ID NO: 2373973 - RNA, 19 nt, Homo sapiens
  misc_RNA (1)...(19): siRNA sense strand
auaaguugaauguggaaga

SEQ ID NO: 2373974 - RNA, 19 nt, Homo sapiens
  misc_RNA (1)...(19): siRNA sense strand
ggcuuggaaaggagaacua

SEQ ID NO: 2373975 - RNA, 19 nt, Homo sapiens
  misc_RNA (1)...(19): siRNA sense strand
agaaagaaacacugauuac

SEQ ID NO: 2373976 - RNA, 19 nt, Homo sapiens
  misc_RNA (1)...(19): siRNA sense strand
aggaggaaagacagaugaa

SEQ ID NO: 2373977 - RNA, 19 nt, Homo sapiens
  misc_RNA (1)...(19): siRNA sense strand
cuuggaaaggagaacuaaa

SEQ ID NO: 2373978 - RNA, 19 nt, Homo sapiens
  misc_RNA (1)...(19): siRNA sense strand
caacccaggaggaaagaca

SEQ ID NO: 2373979 - RNA, 19 nt, Homo sapiens
  misc_RNA (1)...(19): siRNA sense strand
uagagaauuaagugcagaa

SEQ ID NO: 2373980 - RNA, 19 nt, Homo sapiens
  misc_RNA (1)...(19): siRNA sense strand
cugccaggauuuaugaaga

SEQ ID NO: 2373981 - RNA, 19 nt, Homo sapiens
  misc_RNA (1)...(19): siRNA sense strand
cagacaguaccaaggaaga

SEQ ID NO: 2373982 - RNA, 19 nt, Homo sapiens
  misc_RNA (1)...(19): siRNA sense strand
uggaagaugaaguagcaga

SEQ ID NO: 2373983 - RNA, 19 nt, Homo sapiens
  misc_RNA (1)...(19): siRNA sense strand
ggaugaaaugauugcucuu

SEQ ID NO: 2373984 - RNA, 19 nt, Homo sapiens
  misc_RNA (1)...(19): siRNA sense strand
gcuaagauggaaaaggaau

SEQ ID NO: 2373985 - RNA, 19 nt, Homo sapiens
  misc_RNA (1)...(19): siRNA sense strand
aguugaauguggaagaugu

SEQ ID NO: 2373986 - RNA, 19 nt, Homo sapiens
  misc_RNA (1)...(19): siRNA sense strand
acgaugaaacaguaucuaa

SEQ ID NO: 2373987 - RNA, 19 nt, Homo sapiens
  misc_RNA (1)...(19): siRNA sense strand
agacaguaccaaggaagaa

SEQ ID NO: 2373988 - RNA, 19 nt, Homo sapiens
  misc_RNA (1)...(19): siRNA sense strand
aaaccuacagugaagacaa

SEQ ID NO: 2373989 - RNA, 19 nt, Homo sapiens
  misc_RNA (1)...(19): siRNA sense strand
cuacugacaauauaagcaa

SEQ ID NO: 2373990 - RNA, 19 nt, Homo sapiens
  misc_RNA (1)...(19): siRNA sense strand
cacagaaagccaagcacau

SEQ ID NO: 2373991 - RNA, 19 nt, Homo sapiens
  misc_RNA (1)...(19): siRNA sense strand
uugacaaauggcuuggaaa

SEQ ID NO: 2373992 - RNA, 19 nt, Homo sapiens
  misc_RNA (1)...(19): siRNA sense strand
cuugaaaacuuggaugaaa

SEQ ID NO: 2373993 - RNA, 19 nt, Homo sapiens
  misc_RNA (1)...(19): siRNA sense strand
gaaagacagaugaacccaa

SEQ ID NO: 2373994 - RNA, 19 nt, Homo sapiens
  misc_RNA (1)...(19): siRNA sense strand
ugaaccugcuaaaggcaau

SEQ ID NO: 2373995 - RNA, 19 nt, Homo sapiens
  misc_RNA (1)...(19): siRNA sense strand
cauuuauagcagccuguaa

SEQ ID NO: 2373996 - RNA, 19 nt, Homo sapiens
  misc_RNA (1)...(19): siRNA sense strand
gcgcuuaucgcgaggguca

SEQ ID NO: 2373997 - RNA, 19 nt, Homo sapiens
  misc_RNA (1)...(19): siRNA sense strand
ucacaaacguugaguggcu

SEQ ID NO: 2373998 - RNA, 19 nt, Homo sapiens
  misc_RNA (1)...(19): siRNA sense strand
ccgccgaggagcucaagaa

SEQ ID NO: 2373999 - RNA, 19 nt, Homo sapiens
  misc_RNA (1)...(19): siRNA sense strand
gcgcuuaucgcgaggguca

SEQ ID NO: 2374000 - RNA, 19 nt, Homo sapiens
  misc_RNA (1)...(19): siRNA sense strand
ucacaaacguugaguggcu

SEQ ID NO: 2374001 - RNA, 19 nt, Homo sapiens
  misc_RNA (1)...(19): siRNA sense strand
ccgccgaggagcucaagaa

SEQ ID NO: 2374002 - RNA, 19 nt, Homo sapiens
  misc_RNA (1)...(19): siRNA sense strand
gcgcuuaucgcgaggguca

SEQ ID NO: 2374003 - RNA, 19 nt, Homo sapiens
  misc_RNA (1)...(19): siRNA sense strand
ucacaaacguugaguggcu

SEQ ID NO: 2374004 - RNA, 19 nt, Homo sapiens
  misc_RNA (1)...(19): siRNA sense strand
ccgccgaggagcucaagaa

SEQ ID NO: 2374005 - RNA, 19 nt, Homo sapiens
  misc_RNA (1)...(19): siRNA sense strand
guacaaugauaaugagcca

SEQ ID NO: 2374006 - RNA, 19 nt, Homo sapiens
  misc_RNA (1)...(19): siRNA sense strand
ggcaauguauccaggcaca

SEQ ID NO: 2374007 - RNA, 19 nt, Homo sapiens
  misc_RNA (1)...(19): siRNA sense strand
gcagaaaggugcuuccucu

SEQ ID NO: 2374008 - RNA, 19 nt, Homo sapiens
  misc_RNA (1)...(19): siRNA sense strand
aaaagaaggcuacgggaga

SEQ ID NO: 2374009 - RNA, 19 nt, Homo sapiens
  misc_RNA (1)...(19): siRNA sense strand
uggcagaaauggucgggaa

SEQ ID NO: 2374010 - RNA, 19 nt, Homo sapiens
  misc_RNA (1)...(19): siRNA sense strand
ggaaguagggucagggucu

SEQ ID NO: 2374011 - RNA, 19 nt, Homo sapiens
  misc_RNA (1)...(19): siRNA sense strand
agaaaacaacccagaagaa

SEQ ID NO: 2374012 - RNA, 19 nt, Homo sapiens
  misc_RNA (1)...(19): siRNA sense strand
aaaacaacccagaagaaau

SEQ ID NO: 2374013 - RNA, 19 nt, Homo sapiens
  misc_RNA (1)...(19): siRNA sense strand
uggcagaaauggucgggaa

SEQ ID NO: 2374014 - RNA, 19 nt, Homo sapiens
  misc_RNA (1)...(19): siRNA sense strand
ggaaguagggucagggucu

SEQ ID NO: 2374015 - RNA, 19 nt, Homo sapiens
  misc_RNA (1)...(19): siRNA sense strand
agaaaacaacccagaagaa

SEQ ID NO: 2374016 - RNA, 19 nt, Homo sapiens
  misc_RNA (1)...(19): siRNA sense strand
aaaacaacccagaagaaau

SEQ ID NO: 2374017 - RNA, 19 nt, Homo sapiens
  misc_RNA (1)...(19): siRNA sense strand
uggagaacuacgaggagua

SEQ ID NO: 2374018 - RNA, 19 nt, Homo sapiens
  misc_RNA (1)...(19): siRNA sense strand
gcaucaaggucuuucccaa

SEQ ID NO: 2374019 - RNA, 19 nt, Homo sapiens
  misc_RNA (1)...(19): siRNA sense strand
ccaagaagcaugcuggcga

SEQ ID NO: 2374020 - RNA, 19 nt, Homo sapiens
  misc_RNA (1)...(19): siRNA sense strand
ucaacgugcucaagaggga

SEQ ID NO: 2374021 - RNA, 19 nt, Homo sapiens
  misc_RNA (1)...(19): siRNA sense strand
cgcaggaggcugaggauca

SEQ ID NO: 2374022 - RNA, 19 nt, Homo sapiens
  misc_RNA (1)...(19): siRNA sense strand
gggacggauucuugcggga

SEQ ID NO: 2374023 - RNA, 19 nt, Homo sapiens
  misc_RNA (1)...(19): siRNA sense strand
ucacugaggaagagaagaa

SEQ ID NO: 2374024 - RNA, 19 nt, Homo sapiens
  misc_RNA (1)...(19): siRNA sense strand
cugaggaagagaagaauuu

SEQ ID NO: 2374025 - RNA, 19 nt, Homo sapiens
  misc_RNA (1)...(19): siRNA sense strand
gagaagaauuucaaagccu

SEQ ID NO: 2374026 - RNA, 19 nt, Homo sapiens
  misc_RNA (1)...(19): siRNA sense strand
cggaacaaguccacggagu

SEQ ID NO: 2374027 - RNA, 19 nt, Homo sapiens
  misc_RNA (1)...(19): siRNA sense strand
gagucaucacugaggaaga

SEQ ID NO: 2374028 - RNA, 19 nt, Homo sapiens
  misc_RNA (1)...(19): siRNA sense strand
ccaaggaagccgcagaaca

SEQ ID NO: 2374029 - RNA, 19 nt, Homo sapiens
  misc_RNA (1)...(19): siRNA sense strand
gggagacaguucugcugaa

SEQ ID NO: 2374030 - RNA, 19 nt, Homo sapiens
  misc_RNA (1)...(19): siRNA sense strand
aggaagagaagaauuucaa

SEQ ID NO: 2374031 - RNA, 19 nt, Homo sapiens
  misc_RNA (1)...(19): siRNA sense strand
ccaagaagggagacaguuc

SEQ ID NO: 2374032 - RNA, 19 nt, Homo sapiens
  misc_RNA (1)...(19): siRNA sense strand
cgucuauaagaaggagaaa

SEQ ID NO: 2374033 - RNA, 19 nt, Homo sapiens
  misc_RNA (1)...(19): siRNA sense strand
acaggauguugaaaagaaa

SEQ ID NO: 2374034 - RNA, 19 nt, Homo sapiens
  misc_RNA (1)...(19): siRNA sense strand
ggaagagaagaauuucaaa

SEQ ID NO: 2374035 - RNA, 19 nt, Homo sapiens
  misc_RNA (1)...(19): siRNA sense strand
agaagaauuucaaagccuu

SEQ ID NO: 2374036 - RNA, 19 nt, Homo sapiens
  misc_RNA (1)...(19): siRNA sense strand
acgucuauaagaaggagaa

SEQ ID NO: 2374037 - RNA, 19 nt, Homo sapiens
  misc_RNA (1)...(19): siRNA sense strand
ccgaggaggcggaacaagu

SEQ ID NO: 2374038 - RNA, 19 nt, Homo sapiens
  misc_RNA (1)...(19): siRNA sense strand
gaggaagagaagaauuuca

SEQ ID NO: 2374039 - RNA, 19 nt, Homo sapiens
  misc_RNA (1)...(19): siRNA sense strand
ucacugaggaagagaagaa

SEQ ID NO: 2374040 - RNA, 19 nt, Homo sapiens
  misc_RNA (1)...(19): siRNA sense strand
cugaggaagagaagaauuu

SEQ ID NO: 2374041 - RNA, 19 nt, Homo sapiens
  misc_RNA (1)...(19): siRNA sense strand
gagaagaauuucaaagccu

SEQ ID NO: 2374042 - RNA, 19 nt, Homo sapiens
  misc_RNA (1)...(19): siRNA sense strand
cggaacaaguccacggagu

SEQ ID NO: 2374043 - RNA, 19 nt, Homo sapiens
  misc_RNA (1)...(19): siRNA sense strand
gagucaucacugaggaaga

SEQ ID NO: 2374044 - RNA, 19 nt, Homo sapiens
  misc_RNA (1)...(19): siRNA sense strand
ccaaggaagccgcagaaca

SEQ ID NO: 2374045 - RNA, 19 nt, Homo sapiens
  misc_RNA (1)...(19): siRNA sense strand
gggagacaguucugcugaa

SEQ ID NO: 2374046 - RNA, 19 nt, Homo sapiens
  misc_RNA (1)...(19): siRNA sense strand
aggaagagaagaauuucaa

SEQ ID NO: 2374047 - RNA, 19 nt, Homo sapiens
  misc_RNA (1)...(19): siRNA sense strand
ccaagaagggagacaguuc

SEQ ID NO: 2374048 - RNA, 19 nt, Homo sapiens
  misc_RNA (1)...(19): siRNA sense strand
cgucuauaagaaggagaaa

SEQ ID NO: 2374049 - RNA, 19 nt, Homo sapiens
  misc_RNA (1)...(19): siRNA sense strand
acaggauguugaaaagaaa

SEQ ID NO: 2374050 - RNA, 19 nt, Homo sapiens
  misc_RNA (1)...(19): siRNA sense strand
ggaagagaagaauuucaaa

SEQ ID NO: 2374051 - RNA, 19 nt, Homo sapiens
  misc_RNA (1)...(19): siRNA sense strand
agaagaauuucaaagccuu

SEQ ID NO: 2374052 - RNA, 19 nt, Homo sapiens
  misc_RNA (1)...(19): siRNA sense strand
acgucuauaagaaggagaa

SEQ ID NO: 2374053 - RNA, 19 nt, Homo sapiens
  misc_RNA (1)...(19): siRNA sense strand
ccgaggaggcggaacaagu

SEQ ID NO: 2374054 - RNA, 19 nt, Homo sapiens
  misc_RNA (1)...(19): siRNA sense strand
gaggaagagaagaauuuca

SEQ ID NO: 2374055 - RNA, 19 nt, Homo sapiens
  misc_RNA (1)...(19): siRNA sense strand
cugaagaagaugugagaaa

SEQ ID NO: 2374056 - RNA, 19 nt, Homo sapiens
  misc_RNA (1)...(19): siRNA sense strand
caguauugauggauggaaa

SEQ ID NO: 2374057 - RNA, 19 nt, Homo sapiens
  misc_RNA (1)...(19): siRNA sense strand
ggaugagguuauagaagaa

SEQ ID NO: 2374058 - RNA, 19 nt, Homo sapiens
  misc_RNA (1)...(19): siRNA sense strand
auucagaaccagagcgaaa

SEQ ID NO: 2374059 - RNA, 19 nt, Homo sapiens
  misc_RNA (1)...(19): siRNA sense strand
cgagaagaaaugagggcaa

SEQ ID NO: 2374060 - RNA, 19 nt, Homo sapiens
  misc_RNA (1)...(19): siRNA sense strand
gagugaaguugaugaggaa

SEQ ID NO: 2374061 - RNA, 19 nt, Homo sapiens
  misc_RNA (1)...(19): siRNA sense strand
ccauuaauuuugagggaua

SEQ ID NO: 2374062 - RNA, 19 nt, Homo sapiens
  misc_RNA (1)...(19): siRNA sense strand
gguuauagaagaagugaau

SEQ ID NO: 2374063 - RNA, 19 nt, Homo sapiens
  misc_RNA (1)...(19): siRNA sense strand
agaacaaagaggugaagaa

SEQ ID NO: 2374064 - RNA, 19 nt, Homo sapiens
  misc_RNA (1)...(19): siRNA sense strand
gagaguuagaauugggaaa

SEQ ID NO: 2374065 - RNA, 19 nt, Homo sapiens
  misc_RNA (1)...(19): siRNA sense strand
gcacaaaagccuaaaacua

SEQ ID NO: 2374066 - RNA, 19 nt, Homo sapiens
  misc_RNA (1)...(19): siRNA sense strand
caaauaaaggaguggguca

SEQ ID NO: 2374067 - RNA, 19 nt, Homo sapiens
  misc_RNA (1)...(19): siRNA sense strand
ggaugaaguaauugaugaa

SEQ ID NO: 2374068 - RNA, 19 nt, Homo sapiens
  misc_RNA (1)...(19): siRNA sense strand
ggagauacuguaagggauu

SEQ ID NO: 2374069 - RNA, 19 nt, Homo sapiens
  misc_RNA (1)...(19): siRNA sense strand
agggagagcacguggaauu

SEQ ID NO: 2374070 - RNA, 19 nt, Homo sapiens
  misc_RNA (1)...(19): siRNA sense strand
aggcaaacauagauacaau

SEQ ID NO: 2374071 - RNA, 19 nt, Homo sapiens
  misc_RNA (1)...(19): siRNA sense strand
cagaaaagguggaaaagau

SEQ ID NO: 2374072 - RNA, 19 nt, Homo sapiens
  misc_RNA (1)...(19): siRNA sense strand
uaaugaagaccuagaagaa

SEQ ID NO: 2374073 - RNA, 19 nt, Homo sapiens
  misc_RNA (1)...(19): siRNA sense strand
gggcaauagaaaagaaaau

SEQ ID NO: 2374074 - RNA, 19 nt, Homo sapiens
  misc_RNA (1)...(19): siRNA sense strand
uguuaaaccuaaugagcuu

SEQ ID NO: 2374075 - RNA, 19 nt, Homo sapiens
  misc_RNA (1)...(19): siRNA sense strand
cuaacaaaccugugacuau

SEQ ID NO: 2374076 - RNA, 19 nt, Homo sapiens
  misc_RNA (1)...(19): siRNA sense strand
acacuuuauucaaggcaua

SEQ ID NO: 2374077 - RNA, 19 nt, Homo sapiens
  misc_RNA (1)...(19): siRNA sense strand
cugagaaauucauggccaa

SEQ ID NO: 2374078 - RNA, 19 nt, Homo sapiens
  misc_RNA (1)...(19): siRNA sense strand
caucaguggcagugaaaca

SEQ ID NO: 2374079 - RNA, 19 nt, Homo sapiens
  misc_RNA (1)...(19): siRNA sense strand
gggauauaagaaugcgaaa

SEQ ID NO: 2374080 - RNA, 19 nt, Homo sapiens
  misc_RNA (1)...(19): siRNA sense strand
augagaagacaguggacaa

SEQ ID NO: 2374081 - RNA, 19 nt, Homo sapiens
  misc_RNA (1)...(19): siRNA sense strand
uaacaaggaaacagaagaa

SEQ ID NO: 2374082 - RNA, 19 nt, Homo sapiens
  misc_RNA (1)...(19): siRNA sense strand
agucgaaguccaagaauuu

SEQ ID NO: 2374083 - RNA, 19 nt, Homo sapiens
  misc_RNA (1)...(19): siRNA sense strand
gcuaauaagccugaugaaa

SEQ ID NO: 2374084 - RNA, 19 nt, Homo sapiens
  misc_RNA (1)...(19): siRNA sense strand
agaaagaagcucuagguga

SEQ ID NO: 2374085 - RNA, 19 nt, Homo sapiens
  misc_RNA (1)...(19): siRNA sense strand
gaagaaaggggcagaaauu

SEQ ID NO: 2374086 - RNA, 19 nt, Homo sapiens
  misc_RNA (1)...(19): siRNA sense strand
aagaaaagccugcagaaaa

SEQ ID NO: 2374087 - RNA, 19 nt, Homo sapiens
  misc_RNA (1)...(19): siRNA sense strand
ugaaauuggagaaguggaa

SEQ ID NO: 2374088 - RNA, 19 nt, Homo sapiens
  misc_RNA (1)...(19): siRNA sense strand
ccaagauugaccaaagaaa

SEQ ID NO: 2374089 - RNA, 19 nt, Homo sapiens
  misc_RNA (1)...(19): siRNA sense strand
uggagaaguggaagagcua

SEQ ID NO: 2374090 - RNA, 19 nt, Homo sapiens
  misc_RNA (1)...(19): siRNA sense strand
acagugacuuggagaagaa

SEQ ID NO: 2374091 - RNA, 19 nt, Homo sapiens
  misc_RNA (1)...(19): siRNA sense strand
ccucaaaggaauucuagaa

SEQ ID NO: 2374092 - RNA, 19 nt, Homo sapiens
  misc_RNA (1)...(19): siRNA sense strand
augcagaaaagguggaaaa

SEQ ID NO: 2374093 - RNA, 19 nt, Homo sapiens
  misc_RNA (1)...(19): siRNA sense strand
gagaggaggaagauggaga

SEQ ID NO: 2374094 - RNA, 19 nt, Homo sapiens
  misc_RNA (1)...(19): siRNA sense strand
gaguacacgucauaagcaa

SEQ ID NO: 2374095 - RNA, 19 nt, Homo sapiens
  misc_RNA (1)...(19): siRNA sense strand
aggaaaaggagcagaauga

SEQ ID NO: 2374096 - RNA, 19 nt, Homo sapiens
  misc_RNA (1)...(19): siRNA sense strand
cgguagcuguuaaagguaa

SEQ ID NO: 2374097 - RNA, 19 nt, Homo sapiens
  misc_RNA (1)...(19): siRNA sense strand
acaaggaaacagaagaaau

SEQ ID NO: 2374098 - RNA, 19 nt, Homo sapiens
  misc_RNA (1)...(19): siRNA sense strand
cugcugagucuaugguaaa

SEQ ID NO: 2374099 - RNA, 19 nt, Homo sapiens
  misc_RNA (1)...(19): siRNA sense strand
gcagaaugaggcugaagaa

SEQ ID NO: 2374100 - RNA, 19 nt, Homo sapiens
  misc_RNA (1)...(19): siRNA sense strand
ucuagaagaucaagcucaa

SEQ ID NO: 2374101 - RNA, 19 nt, Homo sapiens
  misc_RNA (1)...(19): siRNA sense strand
aagaacagucauugcauua

SEQ ID NO: 2374102 - RNA, 19 nt, Homo sapiens
  misc_RNA (1)...(19): siRNA sense strand
gcugcugagucuaugguaa

SEQ ID NO: 2374103 - RNA, 19 nt, Homo sapiens
  misc_RNA (1)...(19): siRNA sense strand
gugcaaacagcaacugaua

SEQ ID NO: 2374104 - RNA, 19 nt, Homo sapiens
  misc_RNA (1)...(19): siRNA sense strand
agaauccacuaaagggaaa

SEQ ID NO: 2374105 - RNA, 19 nt, Homo sapiens
  misc_RNA (1)...(19): siRNA sense strand
ggaugaaauuggagaagug

SEQ ID NO: 2374106 - RNA, 19 nt, Homo sapiens
  misc_RNA (1)...(19): siRNA sense strand
cuaaaggaaaugaaggaga

SEQ ID NO: 2374107 - RNA, 19 nt, Homo sapiens
  misc_RNA (1)...(19): siRNA sense strand
cagagcagaaauaaagaaa

SEQ ID NO: 2374108 - RNA, 19 nt, Homo sapiens
  misc_RNA (1)...(19): siRNA sense strand
ggaacaaaaccaucaguua

SEQ ID NO: 2374109 - RNA, 19 nt, Homo sapiens
  misc_RNA (1)...(19): siRNA sense strand
ggaugguuguacugaagaa

SEQ ID NO: 2374110 - RNA, 19 nt, Homo sapiens
  misc_RNA (1)...(19): siRNA sense strand
ucaaauaggaacagagaag

SEQ ID NO: 2374111 - RNA, 19 nt, Homo sapiens
  misc_RNA (1)...(19): siRNA sense strand
ccaguaaaugagaauguua

SEQ ID NO: 2374112 - RNA, 19 nt, Homo sapiens
  misc_RNA (1)...(19): siRNA sense strand
augagaauguuauggaaga

SEQ ID NO: 2374113 - RNA, 19 nt, Homo sapiens
  misc_RNA (1)...(19): siRNA sense strand
acaacuaacuccugaaaau

SEQ ID NO: 2374114 - RNA, 19 nt, Homo sapiens
  misc_RNA (1)...(19): siRNA sense strand
cauguuggaucaagaggaa

SEQ ID NO: 2374115 - RNA, 19 nt, Homo sapiens
  misc_RNA (1)...(19): siRNA sense strand
ggaucaagaggaaguaaaa

SEQ ID NO: 2374116 - RNA, 19 nt, Homo sapiens
  misc_RNA (1)...(19): siRNA sense strand
cgggaugacagcaacaaua

SEQ ID NO: 2374117 - RNA, 19 nt, Homo sapiens
  misc_RNA (1)...(19): siRNA sense strand
agaucaagcucaagucaca

SEQ ID NO: 2374118 - RNA, 19 nt, Homo sapiens
  misc_RNA (1)...(19): siRNA sense strand
ccgagaagucgaaguccaa

SEQ ID NO: 2374119 - RNA, 19 nt, Homo sapiens
  misc_RNA (1)...(19): siRNA sense strand
aggaagaagaggaggaaga

SEQ ID NO: 2374120 - RNA, 19 nt, Homo sapiens
  misc_RNA (1)...(19): siRNA sense strand
uggaagaggagcacagaaa

SEQ ID NO: 2374121 - RNA, 19 nt, Homo sapiens
  misc_RNA (1)...(19): siRNA sense strand
cagaucaagauuagagaaa

SEQ ID NO: 2374122 - RNA, 19 nt, Homo sapiens
  misc_RNA (1)...(19): siRNA sense strand
gcagagaaccugaggagca

SEQ ID NO: 2374123 - RNA, 19 nt, Homo sapiens
  misc_RNA (1)...(19): siRNA sense strand
aggcagaagaggagguuca

SEQ ID NO: 2374124 - RNA, 19 nt, Homo sapiens
  misc_RNA (1)...(19): siRNA sense strand
gggaauccaaggagaggaa

SEQ ID NO: 2374125 - RNA, 19 nt, Homo sapiens
  misc_RNA (1)...(19): siRNA sense strand
cgagcaagugagagaagaa

SEQ ID NO: 2374126 - RNA, 19 nt, Homo sapiens
  misc_RNA (1)...(19): siRNA sense strand
agaugaaaaugaagagcaa

SEQ ID NO: 2374127 - RNA, 19 nt, Homo sapiens
  misc_RNA (1)...(19): siRNA sense strand
acaugagccucgugaacaa

SEQ ID NO: 2374128 - RNA, 19 nt, Homo sapiens
  misc_RNA (1)...(19): siRNA sense strand
guauaugaacacagaucaa

SEQ ID NO: 2374129 - RNA, 19 nt, Homo sapiens
  misc_RNA (1)...(19): siRNA sense strand
ccccaaaggccgagaggaa

SEQ ID NO: 2374130 - RNA, 19 nt, Homo sapiens
  misc_RNA (1)...(19): siRNA sense strand
caauuugagagaagagaau

SEQ ID NO: 2374131 - RNA, 19 nt, Homo sapiens
  misc_RNA (1)...(19): siRNA sense strand
cagccaagccaaugaucaa

SEQ ID NO: 2374132 - RNA, 19 nt, Homo sapiens
  misc_RNA (1)...(19): siRNA sense strand
ccaaaggccgagaggaaca

SEQ ID NO: 2374133 - RNA, 19 nt, Homo sapiens
  misc_RNA (1)...(19): siRNA sense strand
uggaagagcagaagacaca

SEQ ID NO: 2374134 - RNA, 19 nt, Homo sapiens
  misc_RNA (1)...(19): siRNA sense strand
cuguauacaauuugagaga

SEQ ID NO: 2374135 - RNA, 19 nt, Homo sapiens
  misc_RNA (1)...(19): siRNA sense strand
cagaacaucuugaggagga

SEQ ID NO: 2374136 - RNA, 19 nt, Homo sapiens
  misc_RNA (1)...(19): siRNA sense strand
cauuaugaugcuauggaua

SEQ ID NO: 2374137 - RNA, 19 nt, Homo sapiens
  misc_RNA (1)...(19): siRNA sense strand
cagaccagcaggaggacaa

SEQ ID NO: 2374138 - RNA, 19 nt, Homo sapiens
  misc_RNA (1)...(19): siRNA sense strand
ggaaagagcagcaugagca

SEQ ID NO: 2374139 - RNA, 19 nt, Homo sapiens
  misc_RNA (1)...(19): siRNA sense strand
cugaagagaccuaugguga

SEQ ID NO: 2374140 - RNA, 19 nt, Homo sapiens
  misc_RNA (1)...(19): siRNA sense strand
aggaagaggcagaagagga

SEQ ID NO: 2374141 - RNA, 19 nt, Homo sapiens
  misc_RNA (1)...(19): siRNA sense strand
acacgaggagcuaaagaaa

SEQ ID NO: 2374142 - RNA, 19 nt, Homo sapiens
  misc_RNA (1)...(19): siRNA sense strand
agaugaagcagaaggagau

SEQ ID NO: 2374143 - RNA, 19 nt, Homo sapiens
  misc_RNA (1)...(19): siRNA sense strand
agauauaaacccagcagau

SEQ ID NO: 2374144 - RNA, 19 nt, Homo sapiens
  misc_RNA (1)...(19): siRNA sense strand
ggcugcaguugcugagaaa

SEQ ID NO: 2374145 - RNA, 19 nt, Homo sapiens
  misc_RNA (1)...(19): siRNA sense strand
aagaugaagcagaaggaga

SEQ ID NO: 2374146 - RNA, 19 nt, Homo sapiens
  misc_RNA (1)...(19): siRNA sense strand
cugaaagauacucugaaua

SEQ ID NO: 2374147 - RNA, 19 nt, Homo sapiens
  misc_RNA (1)...(19): siRNA sense strand
cagaaggagauccagguaa

SEQ ID NO: 2374148 - RNA, 19 nt, Homo sapiens
  misc_RNA (1)...(19): siRNA sense strand
uaaugauggagaagagcaa

SEQ ID NO: 2374149 - RNA, 19 nt, Homo sapiens
  misc_RNA (1)...(19): siRNA sense strand
gugacuuggaagaggaaca

SEQ ID NO: 2374150 - RNA, 19 nt, Homo sapiens
  misc_RNA (1)...(19): siRNA sense strand
augucaagcaacagcauaa

SEQ ID NO: 2374151 - RNA, 19 nt, Homo sapiens
  misc_RNA (1)...(19): siRNA sense strand
aggaagaaauggagcaggu

SEQ ID NO: 2374152 - RNA, 19 nt, Homo sapiens
  misc_RNA (1)...(19): siRNA sense strand
aagccgagcaagugagaga

SEQ ID NO: 2374153 - RNA, 19 nt, Homo sapiens
  misc_RNA (1)...(19): siRNA sense strand
uggaagaggaacaucgcaa

SEQ ID NO: 2374154 - RNA, 19 nt, Homo sapiens
  misc_RNA (1)...(19): siRNA sense strand
acagaaaggcccuggagga

SEQ ID NO: 2374155 - RNA, 19 nt, Homo sapiens
  misc_RNA (1)...(19): siRNA sense strand
gccaacacgaggagcuaaa

SEQ ID NO: 2374156 - RNA, 19 nt, Homo sapiens
  misc_RNA (1)...(19): siRNA sense strand
cagcuguagaagauauaaa

SEQ ID NO: 2374157 - RNA, 19 nt, Homo sapiens
  misc_RNA (1)...(19): siRNA sense strand
gcaagugagagaagaaaau

SEQ ID NO: 2374158 - RNA, 19 nt, Homo sapiens
  misc_RNA (1)...(19): siRNA sense strand
aggaggaagaagaggagga

SEQ ID NO: 2374159 - RNA, 19 nt, Homo sapiens
  misc_RNA (1)...(19): siRNA sense strand
uugaagaagccgagcaagu

SEQ ID NO: 2374160 - RNA, 19 nt, Homo sapiens
  misc_RNA (1)...(19): siRNA sense strand
ugagagaagagaauagaca

SEQ ID NO: 2374161 - RNA, 19 nt, Homo sapiens
  misc_RNA (1)...(19): siRNA sense strand
gaaauaaugauguguggca

SEQ ID NO: 2374162 - RNA, 19 nt, Homo sapiens
  misc_RNA (1)...(19): siRNA sense strand
cagcagguggcaagagaga

SEQ ID NO: 2374163 - RNA, 19 nt, Homo sapiens
  misc_RNA (1)...(19): siRNA sense strand
ugaagagaccuauggugaa

SEQ ID NO: 2374164 - RNA, 19 nt, Homo sapiens
  misc_RNA (1)...(19): siRNA sense strand
uagagaaauccuugcaaaa

SEQ ID NO: 2374165 - RNA, 19 nt, Homo sapiens
  misc_RNA (1)...(19): siRNA sense strand
aauaaaggaaggcaagauu

SEQ ID NO: 2374166 - RNA, 19 nt, Homo sapiens
  misc_RNA (1)...(19): siRNA sense strand
agaauagacaacuaaggaa

SEQ ID NO: 2374167 - RNA, 19 nt, Homo sapiens
  misc_RNA (1)...(19): siRNA sense strand
aagcaacagcauaagaauu

SEQ ID NO: 2374168 - RNA, 19 nt, Homo sapiens
  misc_RNA (1)...(19): siRNA sense strand
agauagggcagcuguagaa

SEQ ID NO: 2374169 - RNA, 19 nt, Homo sapiens
  misc_RNA (1)...(19): siRNA sense strand
aaauaaugauggagaagag

SEQ ID NO: 2374170 - RNA, 19 nt, Homo sapiens
  misc_RNA (1)...(19): siRNA sense strand
acuacgaggaggaagaaga

SEQ ID NO: 2374171 - RNA, 19 nt, Homo sapiens
  misc_RNA (1)...(19): siRNA sense strand
augaggaacaguuggaaca

SEQ ID NO: 2374172 - RNA, 19 nt, Homo sapiens
  misc_RNA (1)...(19): siRNA sense strand
gagcaagugagagaagaaa

SEQ ID NO: 2374173 - RNA, 19 nt, Homo sapiens
  misc_RNA (1)...(19): siRNA sense strand
augaacaguaccaggaaga

SEQ ID NO: 2374174 - RNA, 19 nt, Homo sapiens
  misc_RNA (1)...(19): siRNA sense strand
agaauaaaguuguugggua

SEQ ID NO: 2374175 - RNA, 19 nt, Homo sapiens
  misc_RNA (1)...(19): siRNA sense strand
acacaaaggcuucaggaca

SEQ ID NO: 2374176 - RNA, 19 nt, Homo sapiens
  misc_RNA (1)...(19): siRNA sense strand
ugcugaaauuugagaguga

SEQ ID NO: 2374177 - RNA, 19 nt, Homo sapiens
  misc_RNA (1)...(19): siRNA sense strand
auguggaacuacagagaca

SEQ ID NO: 2374178 - RNA, 19 nt, Homo sapiens
  misc_RNA (1)...(19): siRNA sense strand
gggaaguaauaauacccaa

SEQ ID NO: 2374179 - RNA, 19 nt, Homo sapiens
  misc_RNA (1)...(19): siRNA sense strand
auacuggaaccgagagcaa

SEQ ID NO: 2374180 - RNA, 19 nt, Homo sapiens
  misc_RNA (1)...(19): siRNA sense strand
cagagaaacacaaaggcuu

SEQ ID NO: 2374181 - RNA, 19 nt, Homo sapiens
  misc_RNA (1)...(19): siRNA sense strand
auauaagccaucugaacua

SEQ ID NO: 2374182 - RNA, 19 nt, Homo sapiens
  misc_RNA (1)...(19): siRNA sense strand
gugagaagcaccaagacau

SEQ ID NO: 2374183 - RNA, 19 nt, Homo sapiens
  misc_RNA (1)...(19): siRNA sense strand
cggacagauuuaaagacuu

SEQ ID NO: 2374184 - RNA, 19 nt, Homo sapiens
  misc_RNA (1)...(19): siRNA sense strand
cugaaauuugagagugaga

SEQ ID NO: 2374185 - RNA, 19 nt, Homo sapiens
  misc_RNA (1)...(19): siRNA sense strand
cuuauagaucagccggaua

SEQ ID NO: 2374186 - RNA, 19 nt, Homo sapiens
  misc_RNA (1)...(19): siRNA sense strand
aggcaagcaauccgggaau

SEQ ID NO: 2374187 - RNA, 19 nt, Homo sapiens
  misc_RNA (1)...(19): siRNA sense strand
guauccugaugauggcaaa

SEQ ID NO: 2374188 - RNA, 19 nt, Homo sapiens
  misc_RNA (1)...(19): siRNA sense strand
caucugaacuacugcgaac

SEQ ID NO: 2374189 - RNA, 19 nt, Homo sapiens
  misc_RNA (1)...(19): siRNA sense strand
auccaagaccaaagccaaa

SEQ ID NO: 2374190 - RNA, 19 nt, Homo sapiens
  misc_RNA (1)...(19): siRNA sense strand
gagagcaagagaagcugaa

SEQ ID NO: 2374191 - RNA, 19 nt, Homo sapiens
  misc_RNA (1)...(19): siRNA sense strand
gaguguuggacgucgaaga

SEQ ID NO: 2374192 - RNA, 19 nt, Homo sapiens
  misc_RNA (1)...(19): siRNA sense strand
cuguuucucagguggguaa

SEQ ID NO: 2374193 - RNA, 19 nt, Homo sapiens
  misc_RNA (1)...(19): siRNA sense strand
aagaaagcaacgcagggaa

SEQ ID NO: 2374194 - RNA, 19 nt, Homo sapiens
  misc_RNA (1)...(19): siRNA sense strand
cagccggauaagugugcaa

SEQ ID NO: 2374195 - RNA, 19 nt, Homo sapiens
  misc_RNA (1)...(19): siRNA sense strand
agaccaaagccaaagaucu

SEQ ID NO: 2374196 - RNA, 19 nt, Homo sapiens
  misc_RNA (1)...(19): siRNA sense strand
agaauaaaguuguugggua

SEQ ID NO: 2374197 - RNA, 19 nt, Homo sapiens
  misc_RNA (1)...(19): siRNA sense strand
acacaaaggcuucaggaca

SEQ ID NO: 2374198 - RNA, 19 nt, Homo sapiens
  misc_RNA (1)...(19): siRNA sense strand
ugcugaaauuugagaguga

SEQ ID NO: 2374199 - RNA, 19 nt, Homo sapiens
  misc_RNA (1)...(19): siRNA sense strand
auguggaacuacagagaca

SEQ ID NO: 2374200 - RNA, 19 nt, Homo sapiens
  misc_RNA (1)...(19): siRNA sense strand
gggaaguaauaauacccaa

SEQ ID NO: 2374201 - RNA, 19 nt, Homo sapiens
  misc_RNA (1)...(19): siRNA sense strand
auacuggaaccgagagcaa

SEQ ID NO: 2374202 - RNA, 19 nt, Homo sapiens
  misc_RNA (1)...(19): siRNA sense strand
cagagaaacacaaaggcuu

SEQ ID NO: 2374203 - RNA, 19 nt, Homo sapiens
  misc_RNA (1)...(19): siRNA sense strand
auauaagccaucugaacua

SEQ ID NO: 2374204 - RNA, 19 nt, Homo sapiens
  misc_RNA (1)...(19): siRNA sense strand
gugagaagcaccaagacau

SEQ ID NO: 2374205 - RNA, 19 nt, Homo sapiens
  misc_RNA (1)...(19): siRNA sense strand
cggacagauuuaaagacuu

SEQ ID NO: 2374206 - RNA, 19 nt, Homo sapiens
  misc_RNA (1)...(19): siRNA sense strand
cugaaauuugagagugaga

SEQ ID NO: 2374207 - RNA, 19 nt, Homo sapiens
  misc_RNA (1)...(19): siRNA sense strand
cuuauagaucagccggaua

SEQ ID NO: 2374208 - RNA, 19 nt, Homo sapiens
  misc_RNA (1)...(19): siRNA sense strand
aggcaagcaauccgggaau

SEQ ID NO: 2374209 - RNA, 19 nt, Homo sapiens
  misc_RNA (1)...(19): siRNA sense strand
guauccugaugauggcaaa

SEQ ID NO: 2374210 - RNA, 19 nt, Homo sapiens
  misc_RNA (1)...(19): siRNA sense strand
caucugaacuacugcgaac

SEQ ID NO: 2374211 - RNA, 19 nt, Homo sapiens
  misc_RNA (1)...(19): siRNA sense strand
auccaagaccaaagccaaa

SEQ ID NO: 2374212 - RNA, 19 nt, Homo sapiens
  misc_RNA (1)...(19): siRNA sense strand
gagagcaagagaagcugaa

SEQ ID NO: 2374213 - RNA, 19 nt, Homo sapiens
  misc_RNA (1)...(19): siRNA sense strand
gaguguuggacgucgaaga

SEQ ID NO: 2374214 - RNA, 19 nt, Homo sapiens
  misc_RNA (1)...(19): siRNA sense strand
cuguuucucagguggguaa

SEQ ID NO: 2374215 - RNA, 19 nt, Homo sapiens
  misc_RNA (1)...(19): siRNA sense strand
aagaaagcaacgcagggaa

SEQ ID NO: 2374216 - RNA, 19 nt, Homo sapiens
  misc_RNA (1)...(19): siRNA sense strand
cagccggauaagugugcaa

SEQ ID NO: 2374217 - RNA, 19 nt, Homo sapiens
  misc_RNA (1)...(19): siRNA sense strand
agaccaaagccaaagaucu

SEQ ID NO: 2374218 - RNA, 19 nt, Homo sapiens
  misc_RNA (1)...(19): siRNA sense strand
gggcagaaacagaggauca

SEQ ID NO: 2374219 - RNA, 19 nt, Homo sapiens
  misc_RNA (1)...(19): siRNA sense strand
ccaugaugccucagacaaa

SEQ ID NO: 2374220 - RNA, 19 nt, Homo sapiens
  misc_RNA (1)...(19): siRNA sense strand
agccaaagguagaaaguca

SEQ ID NO: 2374221 - RNA, 19 nt, Homo sapiens
  misc_RNA (1)...(19): siRNA sense strand
ggccagaggaagaagggaa

SEQ ID NO: 2374222 - RNA, 19 nt, Homo sapiens
  misc_RNA (1)...(19): siRNA sense strand
cagaagagcaguuggggaa

SEQ ID NO: 2374223 - RNA, 19 nt, Homo sapiens
  misc_RNA (1)...(19): siRNA sense strand
gugugaagucucugaguuu

SEQ ID NO: 2374224 - RNA, 19 nt, Homo sapiens
  misc_RNA (1)...(19): siRNA sense strand
aagaaggaaggaaaggaaa

SEQ ID NO: 2374225 - RNA, 19 nt, Homo sapiens
  misc_RNA (1)...(19): siRNA sense strand
cauugaggcuggagaucau

SEQ ID NO: 2374226 - RNA, 19 nt, Homo sapiens
  misc_RNA (1)...(19): siRNA sense strand
ugggaaaaucugugaaaau

SEQ ID NO: 2374227 - RNA, 19 nt, Homo sapiens
  misc_RNA (1)...(19): siRNA sense strand
aggaggaggagauggaaga

SEQ ID NO: 2374228 - RNA, 19 nt, Homo sapiens
  misc_RNA (1)...(19): siRNA sense strand
cgucaauggccuucagcau

SEQ ID NO: 2374229 - RNA, 19 nt, Homo sapiens
  misc_RNA (1)...(19): siRNA sense strand
gcuuggagacagaggcaca

SEQ ID NO: 2374230 - RNA, 19 nt, Homo sapiens
  misc_RNA (1)...(19): siRNA sense strand
cacaugaaauacagagaca

SEQ ID NO: 2374231 - RNA, 19 nt, Homo sapiens
  misc_RNA (1)...(19): siRNA sense strand
cagaguugcacaagaucaa

SEQ ID NO: 2374232 - RNA, 19 nt, Homo sapiens
  misc_RNA (1)...(19): siRNA sense strand
ucacacaggaggaggagau

SEQ ID NO: 2374233 - RNA, 19 nt, Homo sapiens
  misc_RNA (1)...(19): siRNA sense strand
gaaaggaaacuauuggaga

SEQ ID NO: 2374234 - RNA, 19 nt, Homo sapiens
  misc_RNA (1)...(19): siRNA sense strand
gcaucggccuggaggacuu

SEQ ID NO: 2374235 - RNA, 19 nt, Homo sapiens
  misc_RNA (1)...(19): siRNA sense strand
augggaaggugguagaauu

SEQ ID NO: 2374236 - RNA, 19 nt, Homo sapiens
  misc_RNA (1)...(19): siRNA sense strand
ggaacaucagggagaacau

SEQ ID NO: 2374237 - RNA, 19 nt, Homo sapiens
  misc_RNA (1)...(19): siRNA sense strand
ggcuggagaucaugaccaa

SEQ ID NO: 2374238 - RNA, 19 nt, Homo sapiens
  misc_RNA (1)...(19): siRNA sense strand
agucucaaggcgagggauu

SEQ ID NO: 2374239 - RNA, 19 nt, Homo sapiens
  misc_RNA (1)...(19): siRNA sense strand
ccuacuucauuauuggaua

SEQ ID NO: 2374240 - RNA, 19 nt, Homo sapiens
  misc_RNA (1)...(19): siRNA sense strand
agauagcagagaagccaaa

SEQ ID NO: 2374241 - RNA, 19 nt, Homo sapiens
  misc_RNA (1)...(19): siRNA sense strand
gguuaugggcaaugggaag

SEQ ID NO: 2374242 - RNA, 19 nt, Homo sapiens
  misc_RNA (1)...(19): siRNA sense strand
gaaucguggcaucgacaua

SEQ ID NO: 2374243 - RNA, 19 nt, Homo sapiens
  misc_RNA (1)...(19): siRNA sense strand
ugggaaggugguagaauuu

SEQ ID NO: 2374244 - RNA, 19 nt, Homo sapiens
  misc_RNA (1)...(19): siRNA sense strand
ccuuuaaagucauggcugu

SEQ ID NO: 2374245 - RNA, 19 nt, Homo sapiens
  misc_RNA (1)...(19): siRNA sense strand
cugugaaggcucagcauca

SEQ ID NO: 2374246 - RNA, 19 nt, Homo sapiens
  misc_RNA (1)...(19): siRNA sense strand
gcggaagaagccuggguca

SEQ ID NO: 2374247 - RNA, 19 nt, Homo sapiens
  misc_RNA (1)...(19): siRNA sense strand
gauccaaagcuuacggagu

SEQ ID NO: 2374248 - RNA, 19 nt, Homo sapiens
  misc_RNA (1)...(19): siRNA sense strand
aggaaggaaaggaaacuau

SEQ ID NO: 2374249 - RNA, 19 nt, Homo sapiens
  misc_RNA (1)...(19): siRNA sense strand
agaagaagucucaaggcga

SEQ ID NO: 2374250 - RNA, 19 nt, Homo sapiens
  misc_RNA (1)...(19): siRNA sense strand
cagcaggccuggaucguca

SEQ ID NO: 2374251 - RNA, 19 nt, Homo sapiens
  misc_RNA (1)...(19): siRNA sense strand
ccacuucuucacugagaua

SEQ ID NO: 2374252 - RNA, 19 nt, Homo sapiens
  misc_RNA (1)...(19): siRNA sense strand
gcagagaagccaaagguag

SEQ ID NO: 2374253 - RNA, 19 nt, Homo sapiens
  misc_RNA (1)...(19): siRNA sense strand
cggaagaagccugggucau

SEQ ID NO: 2374254 - RNA, 19 nt, Homo sapiens
  misc_RNA (1)...(19): siRNA sense strand
cuucagugcuucuggugau

SEQ ID NO: 2374255 - RNA, 19 nt, Homo sapiens
  misc_RNA (1)...(19): siRNA sense strand
agaucuaccugcuggacga

SEQ ID NO: 2374256 - RNA, 19 nt, Homo sapiens
  misc_RNA (1)...(19): siRNA sense strand
accaauagcagccgagaga

SEQ ID NO: 2374257 - RNA, 19 nt, Homo sapiens
  misc_RNA (1)...(19): siRNA sense strand
cugcaaggccugagcucca

SEQ ID NO: 2374258 - RNA, 19 nt, Homo sapiens
  misc_RNA (1)...(19): siRNA sense strand
gcacaauccgugaagccuu

SEQ ID NO: 2374259 - RNA, 19 nt, Homo sapiens
  misc_RNA (1)...(19): siRNA sense strand
agagagaaauccugaggcu

SEQ ID NO: 2374260 - RNA, 19 nt, Homo sapiens
  misc_RNA (1)...(19): siRNA sense strand
caggagaggccaucagcuu

SEQ ID NO: 2374261 - RNA, 19 nt, Homo sapiens
  misc_RNA (1)...(19): siRNA sense strand
ccgugugaccagugaaguu

SEQ ID NO: 2374262 - RNA, 19 nt, Homo sapiens
  misc_RNA (1)...(19): siRNA sense strand
caggauuaucacaugaaau

SEQ ID NO: 2374263 - RNA, 19 nt, Homo sapiens
  misc_RNA (1)...(19): siRNA sense strand
uggaauauucagaagagca

SEQ ID NO: 2374264 - RNA, 19 nt, Homo sapiens
  misc_RNA (1)...(19): siRNA sense strand
uguucaagagacuggagaa

SEQ ID NO: 2374265 - RNA, 19 nt, Homo sapiens
  misc_RNA (1)...(19): siRNA sense strand
caugaaauacagagacaac

SEQ ID NO: 2374266 - RNA, 19 nt, Homo sapiens
  misc_RNA (1)...(19): siRNA sense strand
agaaggaaggaaaggaaac

SEQ ID NO: 2374267 - RNA, 19 nt, Homo sapiens
  misc_RNA (1)...(19): siRNA sense strand
gggaaguccuccuugggca

SEQ ID NO: 2374268 - RNA, 19 nt, Homo sapiens
  misc_RNA (1)...(19): siRNA sense strand
acauccugguuaugggcaa

SEQ ID NO: 2374269 - RNA, 19 nt, Homo sapiens
  misc_RNA (1)...(19): siRNA sense strand
cggagguacugcggaagaa

SEQ ID NO: 2374270 - RNA, 19 nt, Homo sapiens
  misc_RNA (1)...(19): siRNA sense strand
gucaaaggucucacgaauu

SEQ ID NO: 2374271 - RNA, 19 nt, Homo sapiens
  misc_RNA (1)...(19): siRNA sense strand
gcgggaacaucagggagaa

SEQ ID NO: 2374272 - RNA, 19 nt, Homo sapiens
  misc_RNA (1)...(19): siRNA sense strand
ccuuaucgaugaagccaca

SEQ ID NO: 2374273 - RNA, 19 nt, Homo sapiens
  misc_RNA (1)...(19): siRNA sense strand
agacagacacccugaucca

SEQ ID NO: 2374274 - RNA, 19 nt, Homo sapiens
  misc_RNA (1)...(19): siRNA sense strand
gaugcugccuugagaacca

SEQ ID NO: 2374275 - RNA, 19 nt, Homo sapiens
  misc_RNA (1)...(19): siRNA sense strand
acacauccuuaaagcugaa

SEQ ID NO: 2374276 - RNA, 19 nt, Homo sapiens
  misc_RNA (1)...(19): siRNA sense strand
gggcagaaacagaggauca

SEQ ID NO: 2374277 - RNA, 19 nt, Homo sapiens
  misc_RNA (1)...(19): siRNA sense strand
ccaugaugccucagacaaa

SEQ ID NO: 2374278 - RNA, 19 nt, Homo sapiens
  misc_RNA (1)...(19): siRNA sense strand
agccaaagguagaaaguca

SEQ ID NO: 2374279 - RNA, 19 nt, Homo sapiens
  misc_RNA (1)...(19): siRNA sense strand
ggccagaggaagaagggaa

SEQ ID NO: 2374280 - RNA, 19 nt, Homo sapiens
  misc_RNA (1)...(19): siRNA sense strand
cagaagagcaguuggggaa

SEQ ID NO: 2374281 - RNA, 19 nt, Homo sapiens
  misc_RNA (1)...(19): siRNA sense strand
gugugaagucucugaguuu

SEQ ID NO: 2374282 - RNA, 19 nt, Homo sapiens
  misc_RNA (1)...(19): siRNA sense strand
aagaaggaaggaaaggaaa

SEQ ID NO: 2374283 - RNA, 19 nt, Homo sapiens
  misc_RNA (1)...(19): siRNA sense strand
cauugaggcuggagaucau

SEQ ID NO: 2374284 - RNA, 19 nt, Homo sapiens
  misc_RNA (1)...(19): siRNA sense strand
ugggaaaaucugugaaaau

SEQ ID NO: 2374285 - RNA, 19 nt, Homo sapiens
  misc_RNA (1)...(19): siRNA sense strand
aggaggaggagauggaaga

SEQ ID NO: 2374286 - RNA, 19 nt, Homo sapiens
  misc_RNA (1)...(19): siRNA sense strand
cgucaauggccuucagcau

SEQ ID NO: 2374287 - RNA, 19 nt, Homo sapiens
  misc_RNA (1)...(19): siRNA sense strand
gcuuggagacagaggcaca

SEQ ID NO: 2374288 - RNA, 19 nt, Homo sapiens
  misc_RNA (1)...(19): siRNA sense strand
cacaugaaauacagagaca

SEQ ID NO: 2374289 - RNA, 19 nt, Homo sapiens
  misc_RNA (1)...(19): siRNA sense strand
cagaguugcacaagaucaa

SEQ ID NO: 2374290 - RNA, 19 nt, Homo sapiens
  misc_RNA (1)...(19): siRNA sense strand
ucacacaggaggaggagau

SEQ ID NO: 2374291 - RNA, 19 nt, Homo sapiens
  misc_RNA (1)...(19): siRNA sense strand
gaaaggaaacuauuggaga

SEQ ID NO: 2374292 - RNA, 19 nt, Homo sapiens
  misc_RNA (1)...(19): siRNA sense strand
gcaucggccuggaggacuu

SEQ ID NO: 2374293 - RNA, 19 nt, Homo sapiens
  misc_RNA (1)...(19): siRNA sense strand
augggaaggugguagaauu

SEQ ID NO: 2374294 - RNA, 19 nt, Homo sapiens
  misc_RNA (1)...(19): siRNA sense strand
ggaacaucagggagaacau

SEQ ID NO: 2374295 - RNA, 19 nt, Homo sapiens
  misc_RNA (1)...(19): siRNA sense strand
ggcuggagaucaugaccaa

SEQ ID NO: 2374296 - RNA, 19 nt, Homo sapiens
  misc_RNA (1)...(19): siRNA sense strand
agucucaaggcgagggauu

SEQ ID NO: 2374297 - RNA, 19 nt, Homo sapiens
  misc_RNA (1)...(19): siRNA sense strand
ccuacuucauuauuggaua

SEQ ID NO: 2374298 - RNA, 19 nt, Homo sapiens
  misc_RNA (1)...(19): siRNA sense strand
agauagcagagaagccaaa

SEQ ID NO: 2374299 - RNA, 19 nt, Homo sapiens
  misc_RNA (1)...(19): siRNA sense strand
gguuaugggcaaugggaag

SEQ ID NO: 2374300 - RNA, 19 nt, Homo sapiens
  misc_RNA (1)...(19): siRNA sense strand
gaaucguggcaucgacaua

SEQ ID NO: 2374301 - RNA, 19 nt, Homo sapiens
  misc_RNA (1)...(19): siRNA sense strand
ugggaaggugguagaauuu

SEQ ID NO: 2374302 - RNA, 19 nt, Homo sapiens
  misc_RNA (1)...(19): siRNA sense strand
ccuuuaaagucauggcugu

SEQ ID NO: 2374303 - RNA, 19 nt, Homo sapiens
  misc_RNA (1)...(19): siRNA sense strand
cugugaaggcucagcauca

SEQ ID NO: 2374304 - RNA, 19 nt, Homo sapiens
  misc_RNA (1)...(19): siRNA sense strand
gcggaagaagccuggguca

SEQ ID NO: 2374305 - RNA, 19 nt, Homo sapiens
  misc_RNA (1)...(19): siRNA sense strand
gauccaaagcuuacggagu

SEQ ID NO: 2374306 - RNA, 19 nt, Homo sapiens
  misc_RNA (1)...(19): siRNA sense strand
aggaaggaaaggaaacuau

SEQ ID NO: 2374307 - RNA, 19 nt, Homo sapiens
  misc_RNA (1)...(19): siRNA sense strand
agaagaagucucaaggcga

SEQ ID NO: 2374308 - RNA, 19 nt, Homo sapiens
  misc_RNA (1)...(19): siRNA sense strand
cagcaggccuggaucguca

SEQ ID NO: 2374309 - RNA, 19 nt, Homo sapiens
  misc_RNA (1)...(19): siRNA sense strand
ccacuucuucacugagaua

SEQ ID NO: 2374310 - RNA, 19 nt, Homo sapiens
  misc_RNA (1)...(19): siRNA sense strand
gcagagaagccaaagguag

SEQ ID NO: 2374311 - RNA, 19 nt, Homo sapiens
  misc_RNA (1)...(19): siRNA sense strand
cggaagaagccugggucau

SEQ ID NO: 2374312 - RNA, 19 nt, Homo sapiens
  misc_RNA (1)...(19): siRNA sense strand
cuucagugcuucuggugau

SEQ ID NO: 2374313 - RNA, 19 nt, Homo sapiens
  misc_RNA (1)...(19): siRNA sense strand
agaucuaccugcuggacga

SEQ ID NO: 2374314 - RNA, 19 nt, Homo sapiens
  misc_RNA (1)...(19): siRNA sense strand
accaauagcagccgagaga

SEQ ID NO: 2374315 - RNA, 19 nt, Homo sapiens
  misc_RNA (1)...(19): siRNA sense strand
cugcaaggccugagcucca

SEQ ID NO: 2374316 - RNA, 19 nt, Homo sapiens
  misc_RNA (1)...(19): siRNA sense strand
gcacaauccgugaagccuu

SEQ ID NO: 2374317 - RNA, 19 nt, Homo sapiens
  misc_RNA (1)...(19): siRNA sense strand
agagagaaauccugaggcu

SEQ ID NO: 2374318 - RNA, 19 nt, Homo sapiens
  misc_RNA (1)...(19): siRNA sense strand
caggagaggccaucagcuu

SEQ ID NO: 2374319 - RNA, 19 nt, Homo sapiens
  misc_RNA (1)...(19): siRNA sense strand
ccgugugaccagugaaguu

SEQ ID NO: 2374320 - RNA, 19 nt, Homo sapiens
  misc_RNA (1)...(19): siRNA sense strand
caggauuaucacaugaaau

SEQ ID NO: 2374321 - RNA, 19 nt, Homo sapiens
  misc_RNA (1)...(19): siRNA sense strand
uggaauauucagaagagca

SEQ ID NO: 2374322 - RNA, 19 nt, Homo sapiens
  misc_RNA (1)...(19): siRNA sense strand
uguucaagagacuggagaa

SEQ ID NO: 2374323 - RNA, 19 nt, Homo sapiens
  misc_RNA (1)...(19): siRNA sense strand
caugaaauacagagacaac

SEQ ID NO: 2374324 - RNA, 19 nt, Homo sapiens
  misc_RNA (1)...(19): siRNA sense strand
agaaggaaggaaaggaaac

SEQ ID NO: 2374325 - RNA, 19 nt, Homo sapiens
  misc_RNA (1)...(19): siRNA sense strand
gggaaguccuccuugggca

SEQ ID NO: 2374326 - RNA, 19 nt, Homo sapiens
  misc_RNA (1)...(19): siRNA sense strand
acauccugguuaugggcaa

SEQ ID NO: 2374327 - RNA, 19 nt, Homo sapiens
  misc_RNA (1)...(19): siRNA sense strand
cggagguacugcggaagaa

SEQ ID NO: 2374328 - RNA, 19 nt, Homo sapiens
  misc_RNA (1)...(19): siRNA sense strand
gucaaaggucucacgaauu

SEQ ID NO: 2374329 - RNA, 19 nt, Homo sapiens
  misc_RNA (1)...(19): siRNA sense strand
gcgggaacaucagggagaa

SEQ ID NO: 2374330 - RNA, 19 nt, Homo sapiens
  misc_RNA (1)...(19): siRNA sense strand
ccuuaucgaugaagccaca

SEQ ID NO: 2374331 - RNA, 19 nt, Homo sapiens
  misc_RNA (1)...(19): siRNA sense strand
agacagacacccugaucca

SEQ ID NO: 2374332 - RNA, 19 nt, Homo sapiens
  misc_RNA (1)...(19): siRNA sense strand
gaugcugccuugagaacca

SEQ ID NO: 2374333 - RNA, 19 nt, Homo sapiens
  misc_RNA (1)...(19): siRNA sense strand
acacauccuuaaagcugaa

SEQ ID NO: 2374334 - RNA, 19 nt, Homo sapiens
  misc_RNA (1)...(19): siRNA sense strand
gggcagaaacagaggauca

SEQ ID NO: 2374335 - RNA, 19 nt, Homo sapiens
  misc_RNA (1)...(19): siRNA sense strand
ccaugaugccucagacaaa

SEQ ID NO: 2374336 - RNA, 19 nt, Homo sapiens
  misc_RNA (1)...(19): siRNA sense strand
agccaaagguagaaaguca

SEQ ID NO: 2374337 - RNA, 19 nt, Homo sapiens
  misc_RNA (1)...(19): siRNA sense strand
ggccagaggaagaagggaa

SEQ ID NO: 2374338 - RNA, 19 nt, Homo sapiens
  misc_RNA (1)...(19): siRNA sense strand
cagaagagcaguuggggaa

SEQ ID NO: 2374339 - RNA, 19 nt, Homo sapiens
  misc_RNA (1)...(19): siRNA sense strand
gugugaagucucugaguuu

SEQ ID NO: 2374340 - RNA, 19 nt, Homo sapiens
  misc_RNA (1)...(19): siRNA sense strand
aagaaggaaggaaaggaaa

SEQ ID NO: 2374341 - RNA, 19 nt, Homo sapiens
  misc_RNA (1)...(19): siRNA sense strand
cauugaggcuggagaucau

SEQ ID NO: 2374342 - RNA, 19 nt, Homo sapiens
  misc_RNA (1)...(19): siRNA sense strand
ugggaaaaucugugaaaau

SEQ ID NO: 2374343 - RNA, 19 nt, Homo sapiens
  misc_RNA (1)...(19): siRNA sense strand
aggaggaggagauggaaga

SEQ ID NO: 2374344 - RNA, 19 nt, Homo sapiens
  misc_RNA (1)...(19): siRNA sense strand
cgucaauggccuucagcau

SEQ ID NO: 2374345 - RNA, 19 nt, Homo sapiens
  misc_RNA (1)...(19): siRNA sense strand
gcuuggagacagaggcaca

SEQ ID NO: 2374346 - RNA, 19 nt, Homo sapiens
  misc_RNA (1)...(19): siRNA sense strand
cacaugaaauacagagaca

SEQ ID NO: 2374347 - RNA, 19 nt, Homo sapiens
  misc_RNA (1)...(19): siRNA sense strand
cagaguugcacaagaucaa

SEQ ID NO: 2374348 - RNA, 19 nt, Homo sapiens
  misc_RNA (1)...(19): siRNA sense strand
ucacacaggaggaggagau

SEQ ID NO: 2374349 - RNA, 19 nt, Homo sapiens
  misc_RNA (1)...(19): siRNA sense strand
gaaaggaaacuauuggaga

SEQ ID NO: 2374350 - RNA, 19 nt, Homo sapiens
  misc_RNA (1)...(19): siRNA sense strand
gcaucggccuggaggacuu

SEQ ID NO: 2374351 - RNA, 19 nt, Homo sapiens
  misc_RNA (1)...(19): siRNA sense strand
augggaaggugguagaauu

SEQ ID NO: 2374352 - RNA, 19 nt, Homo sapiens
  misc_RNA (1)...(19): siRNA sense strand
ggaacaucagggagaacau

SEQ ID NO: 2374353 - RNA, 19 nt, Homo sapiens
  misc_RNA (1)...(19): siRNA sense strand
ggcuggagaucaugaccaa

SEQ ID NO: 2374354 - RNA, 19 nt, Homo sapiens
  misc_RNA (1)...(19): siRNA sense strand
agucucaaggcgagggauu

SEQ ID NO: 2374355 - RNA, 19 nt, Homo sapiens
  misc_RNA (1)...(19): siRNA sense strand
ccuacuucauuauuggaua

SEQ ID NO: 2374356 - RNA, 19 nt, Homo sapiens
  misc_RNA (1)...(19): siRNA sense strand
agauagcagagaagccaaa

SEQ ID NO: 2374357 - RNA, 19 nt, Homo sapiens
  misc_RNA (1)...(19): siRNA sense strand
gguuaugggcaaugggaag

SEQ ID NO: 2374358 - RNA, 19 nt, Homo sapiens
  misc_RNA (1)...(19): siRNA sense strand
gaaucguggcaucgacaua

SEQ ID NO: 2374359 - RNA, 19 nt, Homo sapiens
  misc_RNA (1)...(19): siRNA sense strand
ugggaaggugguagaauuu

SEQ ID NO: 2374360 - RNA, 19 nt, Homo sapiens
  misc_RNA (1)...(19): siRNA sense strand
ccuuuaaagucauggcugu

SEQ ID NO: 2374361 - RNA, 19 nt, Homo sapiens
  misc_RNA (1)...(19): siRNA sense strand
cugugaaggcucagcauca

SEQ ID NO: 2374362 - RNA, 19 nt, Homo sapiens
  misc_RNA (1)...(19): siRNA sense strand
gcggaagaagccuggguca

SEQ ID NO: 2374363 - RNA, 19 nt, Homo sapiens
  misc_RNA (1)...(19): siRNA sense strand
gauccaaagcuuacggagu

SEQ ID NO: 2374364 - RNA, 19 nt, Homo sapiens
  misc_RNA (1)...(19): siRNA sense strand
aggaaggaaaggaaacuau

SEQ ID NO: 2374365 - RNA, 19 nt, Homo sapiens
  misc_RNA (1)...(19): siRNA sense strand
agaagaagucucaaggcga

SEQ ID NO: 2374366 - RNA, 19 nt, Homo sapiens
  misc_RNA (1)...(19): siRNA sense strand
cagcaggccuggaucguca

SEQ ID NO: 2374367 - RNA, 19 nt, Homo sapiens
  misc_RNA (1)...(19): siRNA sense strand
ccacuucuucacugagaua

SEQ ID NO: 2374368 - RNA, 19 nt, Homo sapiens
  misc_RNA (1)...(19): siRNA sense strand
gcagagaagccaaagguag

SEQ ID NO: 2374369 - RNA, 19 nt, Homo sapiens
  misc_RNA (1)...(19): siRNA sense strand
cggaagaagccugggucau

SEQ ID NO: 2374370 - RNA, 19 nt, Homo sapiens
  misc_RNA (1)...(19): siRNA sense strand
cuucagugcuucuggugau

SEQ ID NO: 2374371 - RNA, 19 nt, Homo sapiens
  misc_RNA (1)...(19): siRNA sense strand
agaucuaccugcuggacga

SEQ ID NO: 2374372 - RNA, 19 nt, Homo sapiens
  misc_RNA (1)...(19): siRNA sense strand
accaauagcagccgagaga

SEQ ID NO: 2374373 - RNA, 19 nt, Homo sapiens
  misc_RNA (1)...(19): siRNA sense strand
cugcaaggccugagcucca

SEQ ID NO: 2374374 - RNA, 19 nt, Homo sapiens
  misc_RNA (1)...(19): siRNA sense strand
gcacaauccgugaagccuu

SEQ ID NO: 2374375 - RNA, 19 nt, Homo sapiens
  misc_RNA (1)...(19): siRNA sense strand
agagagaaauccugaggcu

SEQ ID NO: 2374376 - RNA, 19 nt, Homo sapiens
  misc_RNA (1)...(19): siRNA sense strand
caggagaggccaucagcuu

SEQ ID NO: 2374377 - RNA, 19 nt, Homo sapiens
  misc_RNA (1)...(19): siRNA sense strand
ccgugugaccagugaaguu

SEQ ID NO: 2374378 - RNA, 19 nt, Homo sapiens
  misc_RNA (1)...(19): siRNA sense strand
caggauuaucacaugaaau

SEQ ID NO: 2374379 - RNA, 19 nt, Homo sapiens
  misc_RNA (1)...(19): siRNA sense strand
uggaauauucagaagagca

SEQ ID NO: 2374380 - RNA, 19 nt, Homo sapiens
  misc_RNA (1)...(19): siRNA sense strand
uguucaagagacuggagaa

SEQ ID NO: 2374381 - RNA, 19 nt, Homo sapiens
  misc_RNA (1)...(19): siRNA sense strand
caugaaauacagagacaac

SEQ ID NO: 2374382 - RNA, 19 nt, Homo sapiens
  misc_RNA (1)...(19): siRNA sense strand
agaaggaaggaaaggaaac

SEQ ID NO: 2374383 - RNA, 19 nt, Homo sapiens
  misc_RNA (1)...(19): siRNA sense strand
gggaaguccuccuugggca

SEQ ID NO: 2374384 - RNA, 19 nt, Homo sapiens
  misc_RNA (1)...(19): siRNA sense strand
acauccugguuaugggcaa

SEQ ID NO: 2374385 - RNA, 19 nt, Homo sapiens
  misc_RNA (1)...(19): siRNA sense strand
cggagguacugcggaagaa

SEQ ID NO: 2374386 - RNA, 19 nt, Homo sapiens
  misc_RNA (1)...(19): siRNA sense strand
gucaaaggucucacgaauu

SEQ ID NO: 2374387 - RNA, 19 nt, Homo sapiens
  misc_RNA (1)...(19): siRNA sense strand
gcgggaacaucagggagaa

SEQ ID NO: 2374388 - RNA, 19 nt, Homo sapiens
  misc_RNA (1)...(19): siRNA sense strand
ccuuaucgaugaagccaca

SEQ ID NO: 2374389 - RNA, 19 nt, Homo sapiens
  misc_RNA (1)...(19): siRNA sense strand
agacagacacccugaucca

SEQ ID NO: 2374390 - RNA, 19 nt, Homo sapiens
  misc_RNA (1)...(19): siRNA sense strand
gaugcugccuugagaacca

SEQ ID NO: 2374391 - RNA, 19 nt, Homo sapiens
  misc_RNA (1)...(19): siRNA sense strand
acacauccuuaaagcugaa

SEQ ID NO: 2374392 - RNA, 19 nt, Homo sapiens
  misc_RNA (1)...(19): siRNA sense strand
ccgaaagagccguggccuu

SEQ ID NO: 2374393 - RNA, 19 nt, Homo sapiens
  misc_RNA (1)...(19): siRNA sense strand
ggagaaagaagcagucuga

SEQ ID NO: 2374394 - RNA, 19 nt, Homo sapiens
  misc_RNA (1)...(19): siRNA sense strand
caggagcuauggagaaaga

SEQ ID NO: 2374395 - RNA, 19 nt, Homo sapiens
  misc_RNA (1)...(19): siRNA sense strand
gaagaaauccugacaccca

SEQ ID NO: 2374396 - RNA, 19 nt, Homo sapiens
  misc_RNA (1)...(19): siRNA sense strand
guccacaagcacagggaga

SEQ ID NO: 2374397 - RNA, 19 nt, Homo sapiens
  misc_RNA (1)...(19): siRNA sense strand
cgacugggcuacaaggcca

SEQ ID NO: 2374398 - RNA, 19 nt, Homo sapiens
  misc_RNA (1)...(19): siRNA sense strand
ccugacacccaguggauca

SEQ ID NO: 2374399 - RNA, 19 nt, Homo sapiens
  misc_RNA (1)...(19): siRNA sense strand
agaaagaagcagucugaug

SEQ ID NO: 2374400 - RNA, 19 nt, Homo sapiens
  misc_RNA (1)...(19): siRNA sense strand
agucugaugucaugcgcuu

SEQ ID NO: 2374401 - RNA, 19 nt, Homo sapiens
  misc_RNA (1)...(19): siRNA sense strand
uggaagugaauuugcacaa

SEQ ID NO: 2374402 - RNA, 19 nt, Homo sapiens
  misc_RNA (1)...(19): siRNA sense strand
gcugggaccucuaagccua

SEQ ID NO: 2374403 - RNA, 19 nt, Homo sapiens
  misc_RNA (1)...(19): siRNA sense strand
ccauaguggagaaaaguau

SEQ ID NO: 2374404 - RNA, 19 nt, Homo sapiens
  misc_RNA (1)...(19): siRNA sense strand
aggcgugccagguggaaaa

SEQ ID NO: 2374405 - RNA, 19 nt, Homo sapiens
  misc_RNA (1)...(19): siRNA sense strand
gauggaaaguacuuggcua

SEQ ID NO: 2374406 - RNA, 19 nt, Homo sapiens
  misc_RNA (1)...(19): siRNA sense strand
aggcaucagcaauggcaaa

SEQ ID NO: 2374407 - RNA, 19 nt, Homo sapiens
  misc_RNA (1)...(19): siRNA sense strand
acauugaagaucuggagua

SEQ ID NO: 2374408 - RNA, 19 nt, Homo sapiens
  misc_RNA (1)...(19): siRNA sense strand
cguuugggaucgagagcca

SEQ ID NO: 2374409 - RNA, 19 nt, Homo sapiens
  misc_RNA (1)...(19): siRNA sense strand
cacucaaagccaauggaaa

SEQ ID NO: 2374410 - RNA, 19 nt, Homo sapiens
  misc_RNA (1)...(19): siRNA sense strand
cuggaacagugauggaaca

SEQ ID NO: 2374411 - RNA, 19 nt, Homo sapiens
  misc_RNA (1)...(19): siRNA sense strand
aauaaucacucaaagccaa

SEQ ID NO: 2374412 - RNA, 19 nt, Homo sapiens
  misc_RNA (1)...(19): siRNA sense strand
gcaaggauauggaaccuga

SEQ ID NO: 2374413 - RNA, 19 nt, Homo sapiens
  misc_RNA (1)...(19): siRNA sense strand
caaacgaggucaaugccau

SEQ ID NO: 2374414 - RNA, 19 nt, Homo sapiens
  misc_RNA (1)...(19): siRNA sense strand
gcagcaagccagugcagca

SEQ ID NO: 2374415 - RNA, 19 nt, Homo sapiens
  misc_RNA (1)...(19): siRNA sense strand
gagcauaaccagugacgag

SEQ ID NO: 2374416 - RNA, 19 nt, Homo sapiens
  misc_RNA (1)...(19): siRNA sense strand
uggcaaaggcggcaaccau

SEQ ID NO: 2374417 - RNA, 19 nt, Homo sapiens
  misc_RNA (1)...(19): siRNA sense strand
auguagaggcugagauaag

SEQ ID NO: 2374418 - RNA, 19 nt, Homo sapiens
  misc_RNA (1)...(19): siRNA sense strand
cuggaacgcccgaggagau

SEQ ID NO: 2374419 - RNA, 19 nt, Homo sapiens
  misc_RNA (1)...(19): siRNA sense strand
agagaauggagcacaugaa

SEQ ID NO: 2374420 - RNA, 19 nt, Homo sapiens
  misc_RNA (1)...(19): siRNA sense strand
agaauggagcacaugaaau

SEQ ID NO: 2374421 - RNA, 19 nt, Homo sapiens
  misc_RNA (1)...(19): siRNA sense strand
agauggggauguugagauu

SEQ ID NO: 2374422 - RNA, 19 nt, Homo sapiens
  misc_RNA (1)...(19): siRNA sense strand
gggaagagaauggagcaca

SEQ ID NO: 2374423 - RNA, 19 nt, Homo sapiens
  misc_RNA (1)...(19): siRNA sense strand
uaaccagugacgaggugaa

SEQ ID NO: 2374424 - RNA, 19 nt, Homo sapiens
  misc_RNA (1)...(19): siRNA sense strand
auauggaaccugaaugaga

SEQ ID NO: 2374425 - RNA, 19 nt, Homo sapiens
  misc_RNA (1)...(19): siRNA sense strand
auggaacacuauuggcuau

SEQ ID NO: 2374426 - RNA, 19 nt, Homo sapiens
  misc_RNA (1)...(19): siRNA sense strand
ugcaguauguagaggcuga

SEQ ID NO: 2374427 - RNA, 19 nt, Homo sapiens
  misc_RNA (1)...(19): siRNA sense strand
uaauaaagaugucaccuca

SEQ ID NO: 2374428 - RNA, 19 nt, Homo sapiens
  misc_RNA (1)...(19): siRNA sense strand
gauggaaaguacuuggcua

SEQ ID NO: 2374429 - RNA, 19 nt, Homo sapiens
  misc_RNA (1)...(19): siRNA sense strand
aggcaucagcaauggcaaa

SEQ ID NO: 2374430 - RNA, 19 nt, Homo sapiens
  misc_RNA (1)...(19): siRNA sense strand
acauugaagaucuggagua

SEQ ID NO: 2374431 - RNA, 19 nt, Homo sapiens
  misc_RNA (1)...(19): siRNA sense strand
cguuugggaucgagagcca

SEQ ID NO: 2374432 - RNA, 19 nt, Homo sapiens
  misc_RNA (1)...(19): siRNA sense strand
cacucaaagccaauggaaa

SEQ ID NO: 2374433 - RNA, 19 nt, Homo sapiens
  misc_RNA (1)...(19): siRNA sense strand
cuggaacagugauggaaca

SEQ ID NO: 2374434 - RNA, 19 nt, Homo sapiens
  misc_RNA (1)...(19): siRNA sense strand
aauaaucacucaaagccaa

SEQ ID NO: 2374435 - RNA, 19 nt, Homo sapiens
  misc_RNA (1)...(19): siRNA sense strand
gcaaggauauggaaccuga

SEQ ID NO: 2374436 - RNA, 19 nt, Homo sapiens
  misc_RNA (1)...(19): siRNA sense strand
caaacgaggucaaugccau

SEQ ID NO: 2374437 - RNA, 19 nt, Homo sapiens
  misc_RNA (1)...(19): siRNA sense strand
gcagcaagccagugcagca

SEQ ID NO: 2374438 - RNA, 19 nt, Homo sapiens
  misc_RNA (1)...(19): siRNA sense strand
gagcauaaccagugacgag

SEQ ID NO: 2374439 - RNA, 19 nt, Homo sapiens
  misc_RNA (1)...(19): siRNA sense strand
uggcaaaggcggcaaccau

SEQ ID NO: 2374440 - RNA, 19 nt, Homo sapiens
  misc_RNA (1)...(19): siRNA sense strand
auguagaggcugagauaag

SEQ ID NO: 2374441 - RNA, 19 nt, Homo sapiens
  misc_RNA (1)...(19): siRNA sense strand
cuggaacgcccgaggagau

SEQ ID NO: 2374442 - RNA, 19 nt, Homo sapiens
  misc_RNA (1)...(19): siRNA sense strand
agagaauggagcacaugaa

SEQ ID NO: 2374443 - RNA, 19 nt, Homo sapiens
  misc_RNA (1)...(19): siRNA sense strand
agaauggagcacaugaaau

SEQ ID NO: 2374444 - RNA, 19 nt, Homo sapiens
  misc_RNA (1)...(19): siRNA sense strand
agauggggauguugagauu

SEQ ID NO: 2374445 - RNA, 19 nt, Homo sapiens
  misc_RNA (1)...(19): siRNA sense strand
gggaagagaauggagcaca

SEQ ID NO: 2374446 - RNA, 19 nt, Homo sapiens
  misc_RNA (1)...(19): siRNA sense strand
uaaccagugacgaggugaa

SEQ ID NO: 2374447 - RNA, 19 nt, Homo sapiens
  misc_RNA (1)...(19): siRNA sense strand
auauggaaccugaaugaga

SEQ ID NO: 2374448 - RNA, 19 nt, Homo sapiens
  misc_RNA (1)...(19): siRNA sense strand
auggaacacuauuggcuau

SEQ ID NO: 2374449 - RNA, 19 nt, Homo sapiens
  misc_RNA (1)...(19): siRNA sense strand
ugcaguauguagaggcuga

SEQ ID NO: 2374450 - RNA, 19 nt, Homo sapiens
  misc_RNA (1)...(19): siRNA sense strand
uaauaaagaugucaccuca

SEQ ID NO: 2374451 - RNA, 19 nt, Homo sapiens
  misc_RNA (1)...(19): siRNA sense strand
gauggaaaguacuuggcua

SEQ ID NO: 2374452 - RNA, 19 nt, Homo sapiens
  misc_RNA (1)...(19): siRNA sense strand
aggcaucagcaauggcaaa

SEQ ID NO: 2374453 - RNA, 19 nt, Homo sapiens
  misc_RNA (1)...(19): siRNA sense strand
acauugaagaucuggagua

SEQ ID NO: 2374454 - RNA, 19 nt, Homo sapiens
  misc_RNA (1)...(19): siRNA sense strand
cguuugggaucgagagcca

SEQ ID NO: 2374455 - RNA, 19 nt, Homo sapiens
  misc_RNA (1)...(19): siRNA sense strand
cacucaaagccaauggaaa

SEQ ID NO: 2374456 - RNA, 19 nt, Homo sapiens
  misc_RNA (1)...(19): siRNA sense strand
cuggaacagugauggaaca

SEQ ID NO: 2374457 - RNA, 19 nt, Homo sapiens
  misc_RNA (1)...(19): siRNA sense strand
aauaaucacucaaagccaa

SEQ ID NO: 2374458 - RNA, 19 nt, Homo sapiens
  misc_RNA (1)...(19): siRNA sense strand
gcaaggauauggaaccuga

SEQ ID NO: 2374459 - RNA, 19 nt, Homo sapiens
  misc_RNA (1)...(19): siRNA sense strand
caaacgaggucaaugccau

SEQ ID NO: 2374460 - RNA, 19 nt, Homo sapiens
  misc_RNA (1)...(19): siRNA sense strand
gcagcaagccagugcagca

SEQ ID NO: 2374461 - RNA, 19 nt, Homo sapiens
  misc_RNA (1)...(19): siRNA sense strand
gagcauaaccagugacgag

SEQ ID NO: 2374462 - RNA, 19 nt, Homo sapiens
  misc_RNA (1)...(19): siRNA sense strand
uggcaaaggcggcaaccau

SEQ ID NO: 2374463 - RNA, 19 nt, Homo sapiens
  misc_RNA (1)...(19): siRNA sense strand
auguagaggcugagauaag

SEQ ID NO: 2374464 - RNA, 19 nt, Homo sapiens
  misc_RNA (1)...(19): siRNA sense strand
cuggaacgcccgaggagau

SEQ ID NO: 2374465 - RNA, 19 nt, Homo sapiens
  misc_RNA (1)...(19): siRNA sense strand
agagaauggagcacaugaa

SEQ ID NO: 2374466 - RNA, 19 nt, Homo sapiens
  misc_RNA (1)...(19): siRNA sense strand
agaauggagcacaugaaau

SEQ ID NO: 2374467 - RNA, 19 nt, Homo sapiens
  misc_RNA (1)...(19): siRNA sense strand
agauggggauguugagauu

SEQ ID NO: 2374468 - RNA, 19 nt, Homo sapiens
  misc_RNA (1)...(19): siRNA sense strand
gggaagagaauggagcaca

SEQ ID NO: 2374469 - RNA, 19 nt, Homo sapiens
  misc_RNA (1)...(19): siRNA sense strand
uaaccagugacgaggugaa

SEQ ID NO: 2374470 - RNA, 19 nt, Homo sapiens
  misc_RNA (1)...(19): siRNA sense strand
auauggaaccugaaugaga

SEQ ID NO: 2374471 - RNA, 19 nt, Homo sapiens
  misc_RNA (1)...(19): siRNA sense strand
auggaacacuauuggcuau

SEQ ID NO: 2374472 - RNA, 19 nt, Homo sapiens
  misc_RNA (1)...(19): siRNA sense strand
ugcaguauguagaggcuga

SEQ ID NO: 2374473 - RNA, 19 nt, Homo sapiens
  misc_RNA (1)...(19): siRNA sense strand
uaauaaagaugucaccuca

SEQ ID NO: 2374474 - RNA, 19 nt, Homo sapiens
  misc_RNA (1)...(19): siRNA sense strand
cauuaaacauggagggcua

SEQ ID NO: 2374475 - RNA, 19 nt, Homo sapiens
  misc_RNA (1)...(19): siRNA sense strand
ggaaagaagugacuggagu

SEQ ID NO: 2374476 - RNA, 19 nt, Homo sapiens
  misc_RNA (1)...(19): siRNA sense strand
cuggaaagcaagcgaaaga

SEQ ID NO: 2374477 - RNA, 19 nt, Homo sapiens
  misc_RNA (1)...(19): siRNA sense strand
cgaaagagcagcagcagca

SEQ ID NO: 2374478 - RNA, 19 nt, Homo sapiens
  misc_RNA (1)...(19): siRNA sense strand
aauuagaagacgacagaga

SEQ ID NO: 2374479 - RNA, 19 nt, Homo sapiens
  misc_RNA (1)...(19): siRNA sense strand
agaagacgacagagagauu

SEQ ID NO: 2374480 - RNA, 19 nt, Homo sapiens
  misc_RNA (1)...(19): siRNA sense strand
acaauaagcaacaguucaa

SEQ ID NO: 2374481 - RNA, 19 nt, Homo sapiens
  misc_RNA (1)...(19): siRNA sense strand
uccuaagagcagugauaaa

SEQ ID NO: 2374482 - RNA, 19 nt, Homo sapiens
  misc_RNA (1)...(19): siRNA sense strand
ucuccuaagagcagugaua

SEQ ID NO: 2374483 - RNA, 19 nt, Homo sapiens
  misc_RNA (1)...(19): siRNA sense strand
ggaagaaugcaguacguca

SEQ ID NO: 2374484 - RNA, 19 nt, Homo sapiens
  misc_RNA (1)...(19): siRNA sense strand
guagaauaccagaagcgaa

SEQ ID NO: 2374485 - RNA, 19 nt, Homo sapiens
  misc_RNA (1)...(19): siRNA sense strand
ucgaagaauauguuggaga

SEQ ID NO: 2374486 - RNA, 19 nt, Homo sapiens
  misc_RNA (1)...(19): siRNA sense strand
ucacaaaagauaacaggaa

SEQ ID NO: 2374487 - RNA, 19 nt, Homo sapiens
  misc_RNA (1)...(19): siRNA sense strand
ggacuguggaugaaguaga

SEQ ID NO: 2374488 - RNA, 19 nt, Homo sapiens
  misc_RNA (1)...(19): siRNA sense strand
cuguggaugaaguagaaua

SEQ ID NO: 2374489 - RNA, 19 nt, Homo sapiens
  misc_RNA (1)...(19): siRNA sense strand
agauugaagaagagccuuu

SEQ ID NO: 2374490 - RNA, 19 nt, Homo sapiens
  misc_RNA (1)...(19): siRNA sense strand
acagcauccuggaaagcaa

SEQ ID NO: 2374491 - RNA, 19 nt, Homo sapiens
  misc_RNA (1)...(19): siRNA sense strand
cagugauugcagaggauga

SEQ ID NO: 2374492 - RNA, 19 nt, Homo sapiens
  misc_RNA (1)...(19): siRNA sense strand
guccagaauuagaagacga

SEQ ID NO: 2374493 - RNA, 19 nt, Homo sapiens
  misc_RNA (1)...(19): siRNA sense strand
ucaccaugucgaagaauau

SEQ ID NO: 2374494 - RNA, 19 nt, Homo sapiens
  misc_RNA (1)...(19): siRNA sense strand
agaaaauguuaaaggagca

SEQ ID NO: 2374495 - RNA, 19 nt, Homo sapiens
  misc_RNA (1)...(19): siRNA sense strand
cgaagaauauguuggagac

SEQ ID NO: 2374496 - RNA, 19 nt, Homo sapiens
  misc_RNA (1)...(19): siRNA sense strand
uuagaagacgacagagaga

SEQ ID NO: 2374497 - RNA, 19 nt, Homo sapiens
  misc_RNA (1)...(19): siRNA sense strand
uggaucacauugacagcaa

SEQ ID NO: 2374498 - RNA, 19 nt, Homo sapiens
  misc_RNA (1)...(19): siRNA sense strand
cuacaagaguuuuacaaga

SEQ ID NO: 2374499 - RNA, 19 nt, Homo sapiens
  misc_RNA (1)...(19): siRNA sense strand
ucacaguauggaagacaau

SEQ ID NO: 2374500 - RNA, 19 nt, Homo sapiens
  misc_RNA (1)...(19): siRNA sense strand
ggccauggaguuugcaaau

SEQ ID NO: 2374501 - RNA, 19 nt, Homo sapiens
  misc_RNA (1)...(19): siRNA sense strand
cuaaagaacgcgaacgucu

SEQ ID NO: 2374502 - RNA, 19 nt, Homo sapiens
  misc_RNA (1)...(19): siRNA sense strand
caguuuaggcuauggagca

SEQ ID NO: 2374503 - RNA, 19 nt, Homo sapiens
  misc_RNA (1)...(19): siRNA sense strand
ccucaaugguucucuggau

SEQ ID NO: 2374504 - RNA, 19 nt, Homo sapiens
  misc_RNA (1)...(19): siRNA sense strand
gcagcagauccuucagcaa

SEQ ID NO: 2374505 - RNA, 19 nt, Homo sapiens
  misc_RNA (1)...(19): siRNA sense strand
gauucagcaguuauggaaa

SEQ ID NO: 2374506 - RNA, 19 nt, Homo sapiens
  misc_RNA (1)...(19): siRNA sense strand
aaauguuaaaggagcagua

SEQ ID NO: 2374507 - RNA, 19 nt, Homo sapiens
  misc_RNA (1)...(19): siRNA sense strand
acagagacaauaagcaaca

SEQ ID NO: 2374508 - RNA, 19 nt, Homo sapiens
  misc_RNA (1)...(19): siRNA sense strand
uggaugaaguagaauacca

SEQ ID NO: 2374509 - RNA, 19 nt, Homo sapiens
  misc_RNA (1)...(19): siRNA sense strand
cugugaaagcauuugugaa

SEQ ID NO: 2374510 - RNA, 19 nt, Homo sapiens
  misc_RNA (1)...(19): siRNA sense strand
aaagauaacaggaagucca

SEQ ID NO: 2374511 - RNA, 19 nt, Homo sapiens
  misc_RNA (1)...(19): siRNA sense strand
guauggaagacaauggcau

SEQ ID NO: 2374512 - RNA, 19 nt, Homo sapiens
  misc_RNA (1)...(19): siRNA sense strand
augaacacgcauuggauga

SEQ ID NO: 2374513 - RNA, 19 nt, Homo sapiens
  misc_RNA (1)...(19): siRNA sense strand
ggcgacauucagacaaaua

SEQ ID NO: 2374514 - RNA, 19 nt, Homo sapiens
  misc_RNA (1)...(19): siRNA sense strand
acgaagaccucaaugguuc

SEQ ID NO: 2374515 - RNA, 19 nt, Homo sapiens
  misc_RNA (1)...(19): siRNA sense strand
aguucuaagugcaagacga

SEQ ID NO: 2374516 - RNA, 19 nt, Homo sapiens
  misc_RNA (1)...(19): siRNA sense strand
gccagugauugcagaggau

SEQ ID NO: 2374517 - RNA, 19 nt, Homo sapiens
  misc_RNA (1)...(19): siRNA sense strand
acaagaaacagcaagagca

SEQ ID NO: 2374518 - RNA, 19 nt, Homo sapiens
  misc_RNA (1)...(19): siRNA sense strand
uggcagcagagauggaaga

SEQ ID NO: 2374519 - RNA, 19 nt, Homo sapiens
  misc_RNA (1)...(19): siRNA sense strand
guguuuuguucgaguagaa

SEQ ID NO: 2374520 - RNA, 19 nt, Homo sapiens
  misc_RNA (1)...(19): siRNA sense strand
gcuaaguaauccuggacug

SEQ ID NO: 2374521 - RNA, 19 nt, Homo sapiens
  misc_RNA (1)...(19): siRNA sense strand
cauuaaacauggagggcua

SEQ ID NO: 2374522 - RNA, 19 nt, Homo sapiens
  misc_RNA (1)...(19): siRNA sense strand
ggaaagaagugacuggagu

SEQ ID NO: 2374523 - RNA, 19 nt, Homo sapiens
  misc_RNA (1)...(19): siRNA sense strand
cuggaaagcaagcgaaaga

SEQ ID NO: 2374524 - RNA, 19 nt, Homo sapiens
  misc_RNA (1)...(19): siRNA sense strand
cgaaagagcagcagcagca

SEQ ID NO: 2374525 - RNA, 19 nt, Homo sapiens
  misc_RNA (1)...(19): siRNA sense strand
aauuagaagacgacagaga

SEQ ID NO: 2374526 - RNA, 19 nt, Homo sapiens
  misc_RNA (1)...(19): siRNA sense strand
agaagacgacagagagauu

SEQ ID NO: 2374527 - RNA, 19 nt, Homo sapiens
  misc_RNA (1)...(19): siRNA sense strand
acaauaagcaacaguucaa

SEQ ID NO: 2374528 - RNA, 19 nt, Homo sapiens
  misc_RNA (1)...(19): siRNA sense strand
uccuaagagcagugauaaa

SEQ ID NO: 2374529 - RNA, 19 nt, Homo sapiens
  misc_RNA (1)...(19): siRNA sense strand
ucuccuaagagcagugaua

SEQ ID NO: 2374530 - RNA, 19 nt, Homo sapiens
  misc_RNA (1)...(19): siRNA sense strand
ggaagaaugcaguacguca

SEQ ID NO: 2374531 - RNA, 19 nt, Homo sapiens
  misc_RNA (1)...(19): siRNA sense strand
guagaauaccagaagcgaa

SEQ ID NO: 2374532 - RNA, 19 nt, Homo sapiens
  misc_RNA (1)...(19): siRNA sense strand
ucgaagaauauguuggaga

SEQ ID NO: 2374533 - RNA, 19 nt, Homo sapiens
  misc_RNA (1)...(19): siRNA sense strand
ucacaaaagauaacaggaa

SEQ ID NO: 2374534 - RNA, 19 nt, Homo sapiens
  misc_RNA (1)...(19): siRNA sense strand
ggacuguggaugaaguaga

SEQ ID NO: 2374535 - RNA, 19 nt, Homo sapiens
  misc_RNA (1)...(19): siRNA sense strand
cuguggaugaaguagaaua

SEQ ID NO: 2374536 - RNA, 19 nt, Homo sapiens
  misc_RNA (1)...(19): siRNA sense strand
agauugaagaagagccuuu

SEQ ID NO: 2374537 - RNA, 19 nt, Homo sapiens
  misc_RNA (1)...(19): siRNA sense strand
acagcauccuggaaagcaa

SEQ ID NO: 2374538 - RNA, 19 nt, Homo sapiens
  misc_RNA (1)...(19): siRNA sense strand
cagugauugcagaggauga

SEQ ID NO: 2374539 - RNA, 19 nt, Homo sapiens
  misc_RNA (1)...(19): siRNA sense strand
guccagaauuagaagacga

SEQ ID NO: 2374540 - RNA, 19 nt, Homo sapiens
  misc_RNA (1)...(19): siRNA sense strand
ucaccaugucgaagaauau

SEQ ID NO: 2374541 - RNA, 19 nt, Homo sapiens
  misc_RNA (1)...(19): siRNA sense strand
agaaaauguuaaaggagca

SEQ ID NO: 2374542 - RNA, 19 nt, Homo sapiens
  misc_RNA (1)...(19): siRNA sense strand
cgaagaauauguuggagac

SEQ ID NO: 2374543 - RNA, 19 nt, Homo sapiens
  misc_RNA (1)...(19): siRNA sense strand
uuagaagacgacagagaga

SEQ ID NO: 2374544 - RNA, 19 nt, Homo sapiens
  misc_RNA (1)...(19): siRNA sense strand
uggaucacauugacagcaa

SEQ ID NO: 2374545 - RNA, 19 nt, Homo sapiens
  misc_RNA (1)...(19): siRNA sense strand
cuacaagaguuuuacaaga

SEQ ID NO: 2374546 - RNA, 19 nt, Homo sapiens
  misc_RNA (1)...(19): siRNA sense strand
ucacaguauggaagacaau

SEQ ID NO: 2374547 - RNA, 19 nt, Homo sapiens
  misc_RNA (1)...(19): siRNA sense strand
ggccauggaguuugcaaau

SEQ ID NO: 2374548 - RNA, 19 nt, Homo sapiens
  misc_RNA (1)...(19): siRNA sense strand
cuaaagaacgcgaacgucu

SEQ ID NO: 2374549 - RNA, 19 nt, Homo sapiens
  misc_RNA (1)...(19): siRNA sense strand
caguuuaggcuauggagca

SEQ ID NO: 2374550 - RNA, 19 nt, Homo sapiens
  misc_RNA (1)...(19): siRNA sense strand
ccucaaugguucucuggau

SEQ ID NO: 2374551 - RNA, 19 nt, Homo sapiens
  misc_RNA (1)...(19): siRNA sense strand
gcagcagauccuucagcaa

SEQ ID NO: 2374552 - RNA, 19 nt, Homo sapiens
  misc_RNA (1)...(19): siRNA sense strand
gauucagcaguuauggaaa

SEQ ID NO: 2374553 - RNA, 19 nt, Homo sapiens
  misc_RNA (1)...(19): siRNA sense strand
aaauguuaaaggagcagua

SEQ ID NO: 2374554 - RNA, 19 nt, Homo sapiens
  misc_RNA (1)...(19): siRNA sense strand
acagagacaauaagcaaca

SEQ ID NO: 2374555 - RNA, 19 nt, Homo sapiens
  misc_RNA (1)...(19): siRNA sense strand
uggaugaaguagaauacca

SEQ ID NO: 2374556 - RNA, 19 nt, Homo sapiens
  misc_RNA (1)...(19): siRNA sense strand
cugugaaagcauuugugaa

SEQ ID NO: 2374557 - RNA, 19 nt, Homo sapiens
  misc_RNA (1)...(19): siRNA sense strand
aaagauaacaggaagucca

SEQ ID NO: 2374558 - RNA, 19 nt, Homo sapiens
  misc_RNA (1)...(19): siRNA sense strand
guauggaagacaauggcau

SEQ ID NO: 2374559 - RNA, 19 nt, Homo sapiens
  misc_RNA (1)...(19): siRNA sense strand
augaacacgcauuggauga

SEQ ID NO: 2374560 - RNA, 19 nt, Homo sapiens
  misc_RNA (1)...(19): siRNA sense strand
ggcgacauucagacaaaua

SEQ ID NO: 2374561 - RNA, 19 nt, Homo sapiens
  misc_RNA (1)...(19): siRNA sense strand
acgaagaccucaaugguuc

SEQ ID NO: 2374562 - RNA, 19 nt, Homo sapiens
  misc_RNA (1)...(19): siRNA sense strand
aguucuaagugcaagacga

SEQ ID NO: 2374563 - RNA, 19 nt, Homo sapiens
  misc_RNA (1)...(19): siRNA sense strand
gccagugauugcagaggau

SEQ ID NO: 2374564 - RNA, 19 nt, Homo sapiens
  misc_RNA (1)...(19): siRNA sense strand
acaagaaacagcaagagca

SEQ ID NO: 2374565 - RNA, 19 nt, Homo sapiens
  misc_RNA (1)...(19): siRNA sense strand
uggcagcagagauggaaga

SEQ ID NO: 2374566 - RNA, 19 nt, Homo sapiens
  misc_RNA (1)...(19): siRNA sense strand
guguuuuguucgaguagaa

SEQ ID NO: 2374567 - RNA, 19 nt, Homo sapiens
  misc_RNA (1)...(19): siRNA sense strand
gcuaaguaauccuggacug

SEQ ID NO: 2374568 - RNA, 19 nt, Homo sapiens
  misc_RNA (1)...(19): siRNA sense strand
cauuaaacauggagggcua

SEQ ID NO: 2374569 - RNA, 19 nt, Homo sapiens
  misc_RNA (1)...(19): siRNA sense strand
ggaaagaagugacuggagu

SEQ ID NO: 2374570 - RNA, 19 nt, Homo sapiens
  misc_RNA (1)...(19): siRNA sense strand
cuggaaagcaagcgaaaga

SEQ ID NO: 2374571 - RNA, 19 nt, Homo sapiens
  misc_RNA (1)...(19): siRNA sense strand
cgaaagagcagcagcagca

SEQ ID NO: 2374572 - RNA, 19 nt, Homo sapiens
  misc_RNA (1)...(19): siRNA sense strand
aauuagaagacgacagaga

SEQ ID NO: 2374573 - RNA, 19 nt, Homo sapiens
  misc_RNA (1)...(19): siRNA sense strand
agaagacgacagagagauu

SEQ ID NO: 2374574 - RNA, 19 nt, Homo sapiens
  misc_RNA (1)...(19): siRNA sense strand
ggaagaaugcaguacguca

SEQ ID NO: 2374575 - RNA, 19 nt, Homo sapiens
  misc_RNA (1)...(19): siRNA sense strand
guagaauaccagaagcgaa

SEQ ID NO: 2374576 - RNA, 19 nt, Homo sapiens
  misc_RNA (1)...(19): siRNA sense strand
ucgaagaauauguuggaga

SEQ ID NO: 2374577 - RNA, 19 nt, Homo sapiens
  misc_RNA (1)...(19): siRNA sense strand
ucacaaaagauaacaggaa

SEQ ID NO: 2374578 - RNA, 19 nt, Homo sapiens
  misc_RNA (1)...(19): siRNA sense strand
ggacuguggaugaaguaga

SEQ ID NO: 2374579 - RNA, 19 nt, Homo sapiens
  misc_RNA (1)...(19): siRNA sense strand
cuguggaugaaguagaaua

SEQ ID NO: 2374580 - RNA, 19 nt, Homo sapiens
  misc_RNA (1)...(19): siRNA sense strand
agauugaagaagagccuuu

SEQ ID NO: 2374581 - RNA, 19 nt, Homo sapiens
  misc_RNA (1)...(19): siRNA sense strand
acagcauccuggaaagcaa

SEQ ID NO: 2374582 - RNA, 19 nt, Homo sapiens
  misc_RNA (1)...(19): siRNA sense strand
cagugauugcagaggauga

SEQ ID NO: 2374583 - RNA, 19 nt, Homo sapiens
  misc_RNA (1)...(19): siRNA sense strand
guccagaauuagaagacga

SEQ ID NO: 2374584 - RNA, 19 nt, Homo sapiens
  misc_RNA (1)...(19): siRNA sense strand
ucaccaugucgaagaauau

SEQ ID NO: 2374585 - RNA, 19 nt, Homo sapiens
  misc_RNA (1)...(19): siRNA sense strand
agaaaauguuaaaggagca

SEQ ID NO: 2374586 - RNA, 19 nt, Homo sapiens
  misc_RNA (1)...(19): siRNA sense strand
cgaagaauauguuggagac

SEQ ID NO: 2374587 - RNA, 19 nt, Homo sapiens
  misc_RNA (1)...(19): siRNA sense strand
uuagaagacgacagagaga

SEQ ID NO: 2374588 - RNA, 19 nt, Homo sapiens
  misc_RNA (1)...(19): siRNA sense strand
uggaucacauugacagcaa

SEQ ID NO: 2374589 - RNA, 19 nt, Homo sapiens
  misc_RNA (1)...(19): siRNA sense strand
cuacaagaguuuuacaaga

SEQ ID NO: 2374590 - RNA, 19 nt, Homo sapiens
  misc_RNA (1)...(19): siRNA sense strand
ucacaguauggaagacaau

SEQ ID NO: 2374591 - RNA, 19 nt, Homo sapiens
  misc_RNA (1)...(19): siRNA sense strand
ggccauggaguuugcaaau

SEQ ID NO: 2374592 - RNA, 19 nt, Homo sapiens
  misc_RNA (1)...(19): siRNA sense strand
cuaaagaacgcgaacgucu

SEQ ID NO: 2374593 - RNA, 19 nt, Homo sapiens
  misc_RNA (1)...(19): siRNA sense strand
caguuuaggcuauggagca

SEQ ID NO: 2374594 - RNA, 19 nt, Homo sapiens
  misc_RNA (1)...(19): siRNA sense strand
ccucaaugguucucuggau

SEQ ID NO: 2374595 - RNA, 19 nt, Homo sapiens
  misc_RNA (1)...(19): siRNA sense strand
gauucagcaguuauggaaa

SEQ ID NO: 2374596 - RNA, 19 nt, Homo sapiens
  misc_RNA (1)...(19): siRNA sense strand
aaauguuaaaggagcagua

SEQ ID NO: 2374597 - RNA, 19 nt, Homo sapiens
  misc_RNA (1)...(19): siRNA sense strand
gcagcagauccuucagcaa

SEQ ID NO: 2374598 - RNA, 19 nt, Homo sapiens
  misc_RNA (1)...(19): siRNA sense strand
uggaugaaguagaauacca

SEQ ID NO: 2374599 - RNA, 19 nt, Homo sapiens
  misc_RNA (1)...(19): siRNA sense strand
cugugaaagcauuugugaa

SEQ ID NO: 2374600 - RNA, 19 nt, Homo sapiens
  misc_RNA (1)...(19): siRNA sense strand
aaagauaacaggaagucca

SEQ ID NO: 2374601 - RNA, 19 nt, Homo sapiens
  misc_RNA (1)...(19): siRNA sense strand
guauggaagacaauggcau

SEQ ID NO: 2374602 - RNA, 19 nt, Homo sapiens
  misc_RNA (1)...(19): siRNA sense strand
augaacacgcauuggauga

SEQ ID NO: 2374603 - RNA, 19 nt, Homo sapiens
  misc_RNA (1)...(19): siRNA sense strand
ggcgacauucagacaaaua

SEQ ID NO: 2374604 - RNA, 19 nt, Homo sapiens
  misc_RNA (1)...(19): siRNA sense strand
acgaagaccucaaugguuc

SEQ ID NO: 2374605 - RNA, 19 nt, Homo sapiens
  misc_RNA (1)...(19): siRNA sense strand
aguucuaagugcaagacga

SEQ ID NO: 2374606 - RNA, 19 nt, Homo sapiens
  misc_RNA (1)...(19): siRNA sense strand
gccagugauugcagaggau

SEQ ID NO: 2374607 - RNA, 19 nt, Homo sapiens
  misc_RNA (1)...(19): siRNA sense strand
acaagaaacagcaagagca

SEQ ID NO: 2374608 - RNA, 19 nt, Homo sapiens
  misc_RNA (1)...(19): siRNA sense strand
guguuuuguucgaguagaa

SEQ ID NO: 2374609 - RNA, 19 nt, Homo sapiens
  misc_RNA (1)...(19): siRNA sense strand
gcuaaguaauccuggacug

SEQ ID NO: 2374610 - RNA, 19 nt, Homo sapiens
  misc_RNA (1)...(19): siRNA sense strand
cauuaaacauggagggcua

SEQ ID NO: 2374611 - RNA, 19 nt, Homo sapiens
  misc_RNA (1)...(19): siRNA sense strand
ggaaagaagugacuggagu

SEQ ID NO: 2374612 - RNA, 19 nt, Homo sapiens
  misc_RNA (1)...(19): siRNA sense strand
cuggaaagcaagcgaaaga

SEQ ID NO: 2374613 - RNA, 19 nt, Homo sapiens
  misc_RNA (1)...(19): siRNA sense strand
cgaaagagcagcagcagca

SEQ ID NO: 2374614 - RNA, 19 nt, Homo sapiens
  misc_RNA (1)...(19): siRNA sense strand
aauuagaagacgacagaga

SEQ ID NO: 2374615 - RNA, 19 nt, Homo sapiens
  misc_RNA (1)...(19): siRNA sense strand
agaagacgacagagagauu

SEQ ID NO: 2374616 - RNA, 19 nt, Homo sapiens
  misc_RNA (1)...(19): siRNA sense strand
ggaagaaugcaguacguca

SEQ ID NO: 2374617 - RNA, 19 nt, Homo sapiens
  misc_RNA (1)...(19): siRNA sense strand
guagaauaccagaagcgaa

SEQ ID NO: 2374618 - RNA, 19 nt, Homo sapiens
  misc_RNA (1)...(19): siRNA sense strand
ucgaagaauauguuggaga

SEQ ID NO: 2374619 - RNA, 19 nt, Homo sapiens
  misc_RNA (1)...(19): siRNA sense strand
ucacaaaagauaacaggaa

SEQ ID NO: 2374620 - RNA, 19 nt, Homo sapiens
  misc_RNA (1)...(19): siRNA sense strand
ggacuguggaugaaguaga

SEQ ID NO: 2374621 - RNA, 19 nt, Homo sapiens
  misc_RNA (1)...(19): siRNA sense strand
cuguggaugaaguagaaua

SEQ ID NO: 2374622 - RNA, 19 nt, Homo sapiens
  misc_RNA (1)...(19): siRNA sense strand
agauugaagaagagccuuu

SEQ ID NO: 2374623 - RNA, 19 nt, Homo sapiens
  misc_RNA (1)...(19): siRNA sense strand
acagcauccuggaaagcaa

SEQ ID NO: 2374624 - RNA, 19 nt, Homo sapiens
  misc_RNA (1)...(19): siRNA sense strand
cagugauugcagaggauga

SEQ ID NO: 2374625 - RNA, 19 nt, Homo sapiens
  misc_RNA (1)...(19): siRNA sense strand
guccagaauuagaagacga

SEQ ID NO: 2374626 - RNA, 19 nt, Homo sapiens
  misc_RNA (1)...(19): siRNA sense strand
ucaccaugucgaagaauau

SEQ ID NO: 2374627 - RNA, 19 nt, Homo sapiens
  misc_RNA (1)...(19): siRNA sense strand
agaaaauguuaaaggagca

SEQ ID NO: 2374628 - RNA, 19 nt, Homo sapiens
  misc_RNA (1)...(19): siRNA sense strand
cgaagaauauguuggagac

SEQ ID NO: 2374629 - RNA, 19 nt, Homo sapiens
  misc_RNA (1)...(19): siRNA sense strand
uuagaagacgacagagaga

SEQ ID NO: 2374630 - RNA, 19 nt, Homo sapiens
  misc_RNA (1)...(19): siRNA sense strand
uggaucacauugacagcaa

SEQ ID NO: 2374631 - RNA, 19 nt, Homo sapiens
  misc_RNA (1)...(19): siRNA sense strand
cuacaagaguuuuacaaga

SEQ ID NO: 2374632 - RNA, 19 nt, Homo sapiens
  misc_RNA (1)...(19): siRNA sense strand
ucacaguauggaagacaau

SEQ ID NO: 2374633 - RNA, 19 nt, Homo sapiens
  misc_RNA (1)...(19): siRNA sense strand
ggccauggaguuugcaaau

SEQ ID NO: 2374634 - RNA, 19 nt, Homo sapiens
  misc_RNA (1)...(19): siRNA sense strand
cuaaagaacgcgaacgucu

SEQ ID NO: 2374635 - RNA, 19 nt, Homo sapiens
  misc_RNA (1)...(19): siRNA sense strand
caguuuaggcuauggagca

SEQ ID NO: 2374636 - RNA, 19 nt, Homo sapiens
  misc_RNA (1)...(19): siRNA sense strand
ccucaaugguucucuggau

SEQ ID NO: 2374637 - RNA, 19 nt, Homo sapiens
  misc_RNA (1)...(19): siRNA sense strand
gauucagcaguuauggaaa

SEQ ID NO: 2374638 - RNA, 19 nt, Homo sapiens
  misc_RNA (1)...(19): siRNA sense strand
aaauguuaaaggagcagua

SEQ ID NO: 2374639 - RNA, 19 nt, Homo sapiens
  misc_RNA (1)...(19): siRNA sense strand
gcagcagauccuucagcaa

SEQ ID NO: 2374640 - RNA, 19 nt, Homo sapiens
  misc_RNA (1)...(19): siRNA sense strand
uggaugaaguagaauacca

SEQ ID NO: 2374641 - RNA, 19 nt, Homo sapiens
  misc_RNA (1)...(19): siRNA sense strand
cugugaaagcauuugugaa

SEQ ID NO: 2374642 - RNA, 19 nt, Homo sapiens
  misc_RNA (1)...(19): siRNA sense strand
aaagauaacaggaagucca

SEQ ID NO: 2374643 - RNA, 19 nt, Homo sapiens
  misc_RNA (1)...(19): siRNA sense strand
guauggaagacaauggcau

SEQ ID NO: 2374644 - RNA, 19 nt, Homo sapiens
  misc_RNA (1)...(19): siRNA sense strand
augaacacgcauuggauga

SEQ ID NO: 2374645 - RNA, 19 nt, Homo sapiens
  misc_RNA (1)...(19): siRNA sense strand
ggcgacauucagacaaaua

SEQ ID NO: 2374646 - RNA, 19 nt, Homo sapiens
  misc_RNA (1)...(19): siRNA sense strand
acgaagaccucaaugguuc

SEQ ID NO: 2374647 - RNA, 19 nt, Homo sapiens
  misc_RNA (1)...(19): siRNA sense strand
aguucuaagugcaagacga

SEQ ID NO: 2374648 - RNA, 19 nt, Homo sapiens
  misc_RNA (1)...(19): siRNA sense strand
gccagugauugcagaggau

SEQ ID NO: 2374649 - RNA, 19 nt, Homo sapiens
  misc_RNA (1)...(19): siRNA sense strand
acaagaaacagcaagagca

SEQ ID NO: 2374650 - RNA, 19 nt, Homo sapiens
  misc_RNA (1)...(19): siRNA sense strand
guguuuuguucgaguagaa

SEQ ID NO: 2374651 - RNA, 19 nt, Homo sapiens
  misc_RNA (1)...(19): siRNA sense strand
gcuaaguaauccuggacug

SEQ ID NO: 2374652 - RNA, 19 nt, Homo sapiens
  misc_RNA (1)...(19): siRNA sense strand
cagugaaaucaaagaagaa

SEQ ID NO: 2374653 - RNA, 19 nt, Homo sapiens
  misc_RNA (1)...(19): siRNA sense strand
gcaugaugaguguggagaa

SEQ ID NO: 2374654 - RNA, 19 nt, Homo sapiens
  misc_RNA (1)...(19): siRNA sense strand
auucaagaacccacagaaa

SEQ ID NO: 2374655 - RNA, 19 nt, Homo sapiens
  misc_RNA (1)...(19): siRNA sense strand
gugaaaucaaagaagaaga

SEQ ID NO: 2374656 - RNA, 19 nt, Homo sapiens
  misc_RNA (1)...(19): siRNA sense strand
cauuuauaacagaggugaa

SEQ ID NO: 2374657 - RNA, 19 nt, Homo sapiens
  misc_RNA (1)...(19): siRNA sense strand
gguugggccuagagaagau

SEQ ID NO: 2374658 - RNA, 19 nt, Homo sapiens
  misc_RNA (1)...(19): siRNA sense strand
ccguggaagaccaauauaa

SEQ ID NO: 2374659 - RNA, 19 nt, Homo sapiens
  misc_RNA (1)...(19): siRNA sense strand
augaaacgugggagaacua

SEQ ID NO: 2374660 - RNA, 19 nt, Homo sapiens
  misc_RNA (1)...(19): siRNA sense strand
cuauguuagacgauguaaa

SEQ ID NO: 2374661 - RNA, 19 nt, Homo sapiens
  misc_RNA (1)...(19): siRNA sense strand
uggaagaccaauauaaaca

SEQ ID NO: 2374662 - RNA, 19 nt, Homo sapiens
  misc_RNA (1)...(19): siRNA sense strand
ccagaauugaucaagacaa

SEQ ID NO: 2374663 - RNA, 19 nt, Homo sapiens
  misc_RNA (1)...(19): siRNA sense strand
cauccaacagauucagaaa

SEQ ID NO: 2374664 - RNA, 19 nt, Homo sapiens
  misc_RNA (1)...(19): siRNA sense strand
uguaaaacaugauggcauu

SEQ ID NO: 2374665 - RNA, 19 nt, Homo sapiens
  misc_RNA (1)...(19): siRNA sense strand
gagcaaaaucuaagccaga

SEQ ID NO: 2374666 - RNA, 19 nt, Homo sapiens
  misc_RNA (1)...(19): siRNA sense strand
uggaaagacaacaaacauu

SEQ ID NO: 2374667 - RNA, 19 nt, Homo sapiens
  misc_RNA (1)...(19): siRNA sense strand
cauaagacgaagggccaaa

SEQ ID NO: 2374668 - RNA, 19 nt, Homo sapiens
  misc_RNA (1)...(19): siRNA sense strand
agauauacuccauagugaa

SEQ ID NO: 2374669 - RNA, 19 nt, Homo sapiens
  misc_RNA (1)...(19): siRNA sense strand
uggaagacuggaaagacaa

SEQ ID NO: 2374670 - RNA, 19 nt, Homo sapiens
  misc_RNA (1)...(19): siRNA sense strand
gcugcaaaccagugaaauc

SEQ ID NO: 2374671 - RNA, 19 nt, Homo sapiens
  misc_RNA (1)...(19): siRNA sense strand
agaccguggaagaccaaua

SEQ ID NO: 2374672 - RNA, 19 nt, Homo sapiens
  misc_RNA (1)...(19): siRNA sense strand
acaauuaaaccaacagcau

SEQ ID NO: 2374673 - RNA, 19 nt, Homo sapiens
  misc_RNA (1)...(19): siRNA sense strand
ugggaggcuugauggagaa

SEQ ID NO: 2374674 - RNA, 19 nt, Homo sapiens
  misc_RNA (1)...(19): siRNA sense strand
gucucaaaauggaagguua

SEQ ID NO: 2374675 - RNA, 19 nt, Homo sapiens
  misc_RNA (1)...(19): siRNA sense strand
ggaacugagaagaacuaca

SEQ ID NO: 2374676 - RNA, 19 nt, Homo sapiens
  misc_RNA (1)...(19): siRNA sense strand
uuauaacagaggugaacau

SEQ ID NO: 2374677 - RNA, 19 nt, Homo sapiens
  misc_RNA (1)...(19): siRNA sense strand
gcuacaucuaguugcgauu

SEQ ID NO: 2374678 - RNA, 19 nt, Homo sapiens
  misc_RNA (1)...(19): siRNA sense strand
gaaccaagacugugcagga

SEQ ID NO: 2374679 - RNA, 19 nt, Homo sapiens
  misc_RNA (1)...(19): siRNA sense strand
gcaccaugccugaggguac

SEQ ID NO: 2374680 - RNA, 19 nt, Homo sapiens
  misc_RNA (1)...(19): siRNA sense strand
ggagaagccuggagaccgu

SEQ ID NO: 2374681 - RNA, 19 nt, Homo sapiens
  misc_RNA (1)...(19): siRNA sense strand
ccaugaauccuguggagca

SEQ ID NO: 2374682 - RNA, 19 nt, Homo sapiens
  misc_RNA (1)...(19): siRNA sense strand
ugugcugccuggaggagaa

SEQ ID NO: 2374683 - RNA, 19 nt, Homo sapiens
  misc_RNA (1)...(19): siRNA sense strand
aaauauaaggcaaagagga

SEQ ID NO: 2374684 - RNA, 19 nt, Homo sapiens
  misc_RNA (1)...(19): siRNA sense strand
acggcuacaucaagggcau

SEQ ID NO: 2374685 - RNA, 19 nt, Homo sapiens
  misc_RNA (1)...(19): siRNA sense strand
gaaccaagacugugcagga

SEQ ID NO: 2374686 - RNA, 19 nt, Homo sapiens
  misc_RNA (1)...(19): siRNA sense strand
gcaccaugccugaggguac

SEQ ID NO: 2374687 - RNA, 19 nt, Homo sapiens
  misc_RNA (1)...(19): siRNA sense strand
ggagaagccuggagaccgu

SEQ ID NO: 2374688 - RNA, 19 nt, Homo sapiens
  misc_RNA (1)...(19): siRNA sense strand
ccaugaauccuguggagca

SEQ ID NO: 2374689 - RNA, 19 nt, Homo sapiens
  misc_RNA (1)...(19): siRNA sense strand
ugugcugccuggaggagaa

SEQ ID NO: 2374690 - RNA, 19 nt, Homo sapiens
  misc_RNA (1)...(19): siRNA sense strand
aaauauaaggcaaagagga

SEQ ID NO: 2374691 - RNA, 19 nt, Homo sapiens
  misc_RNA (1)...(19): siRNA sense strand
acggcuacaucaagggcau

SEQ ID NO: 2374692 - RNA, 19 nt, Homo sapiens
  misc_RNA (1)...(19): siRNA sense strand
uagaaaauguaaaggccaa

SEQ ID NO: 2374693 - RNA, 19 nt, Homo sapiens
  misc_RNA (1)...(19): siRNA sense strand
auguaaaggccaagaucca

SEQ ID NO: 2374694 - RNA, 19 nt, Homo sapiens
  misc_RNA (1)...(19): siRNA sense strand
ucgugguggugcuaagaaa

SEQ ID NO: 2374695 - RNA, 19 nt, Homo sapiens
  misc_RNA (1)...(19): siRNA sense strand
uuauaagguggaugagaau

SEQ ID NO: 2374696 - RNA, 19 nt, Homo sapiens
  misc_RNA (1)...(19): siRNA sense strand
cuaagaaaaggaagaagaa

SEQ ID NO: 2374697 - RNA, 19 nt, Homo sapiens
  misc_RNA (1)...(19): siRNA sense strand
gguggaugagaauggcaaa

SEQ ID NO: 2374698 - RNA, 19 nt, Homo sapiens
  misc_RNA (1)...(19): siRNA sense strand
ccaggauaaggaaggaauu

SEQ ID NO: 2374699 - RNA, 19 nt, Homo sapiens
  misc_RNA (1)...(19): siRNA sense strand
cuggcaagcagcuggaaga

SEQ ID NO: 2374700 - RNA, 19 nt, Homo sapiens
  misc_RNA (1)...(19): siRNA sense strand
aagaaaaggaagaagaagu

SEQ ID NO: 2374701 - RNA, 19 nt, Homo sapiens
  misc_RNA (1)...(19): siRNA sense strand
cccaagaagaauaagcaca

SEQ ID NO: 2374702 - RNA, 19 nt, Homo sapiens
  misc_RNA (1)...(19): siRNA sense strand
aagaagaauaagcacaaga

SEQ ID NO: 2374703 - RNA, 19 nt, Homo sapiens
  misc_RNA (1)...(19): siRNA sense strand
ggugcuaagaaaaggaaga

SEQ ID NO: 2374704 - RNA, 19 nt, Homo sapiens
  misc_RNA (1)...(19): siRNA sense strand
acgccaagcgggugacuau

SEQ ID NO: 2374705 - RNA, 19 nt, Homo sapiens
  misc_RNA (1)...(19): siRNA sense strand
cggugauggcgcugcaaga

SEQ ID NO: 2374706 - RNA, 19 nt, Homo sapiens
  misc_RNA (1)...(19): siRNA sense strand
cuaucaugcccaaggacau

SEQ ID NO: 2374707 - RNA, 19 nt, Homo sapiens
  misc_RNA (1)...(19): siRNA sense strand
gugagaucgcgcaggacuu

SEQ ID NO: 2374708 - RNA, 19 nt, Homo sapiens
  misc_RNA (1)...(19): siRNA sense strand
gguguaaugaggagggcua

SEQ ID NO: 2374709 - RNA, 19 nt, Homo sapiens
  misc_RNA (1)...(19): siRNA sense strand
cagacaaggaguugcggaa

SEQ ID NO: 2374710 - RNA, 19 nt, Homo sapiens
  misc_RNA (1)...(19): siRNA sense strand
cggcaauuuccuagacaau

SEQ ID NO: 2374711 - RNA, 19 nt, Homo sapiens
  misc_RNA (1)...(19): siRNA sense strand
aggaugaggaugaugacaa

SEQ ID NO: 2374712 - RNA, 19 nt, Homo sapiens
  misc_RNA (1)...(19): siRNA sense strand
gcacaaggcagaaaggagu

SEQ ID NO: 2374713 - RNA, 19 nt, Homo sapiens
  misc_RNA (1)...(19): siRNA sense strand
caccaaagcacaaggcaga

SEQ ID NO: 2374714 - RNA, 19 nt, Homo sapiens
  misc_RNA (1)...(19): siRNA sense strand
ggaugaugacaaagaggau

SEQ ID NO: 2374715 - RNA, 19 nt, Homo sapiens
  misc_RNA (1)...(19): siRNA sense strand
augaugaggaugaggauga

SEQ ID NO: 2374716 - RNA, 19 nt, Homo sapiens
  misc_RNA (1)...(19): siRNA sense strand
ugacagaggaugaugagga

SEQ ID NO: 2374717 - RNA, 19 nt, Homo sapiens
  misc_RNA (1)...(19): siRNA sense strand
gaggaugcgaacagaguca

SEQ ID NO: 2374718 - RNA, 19 nt, Homo sapiens
  misc_RNA (1)...(19): siRNA sense strand
ugugaagaggagcaggaaa

SEQ ID NO: 2374719 - RNA, 19 nt, Homo sapiens
  misc_RNA (1)...(19): siRNA sense strand
caaaggacaaagaggggaa

SEQ ID NO: 2374720 - RNA, 19 nt, Homo sapiens
  misc_RNA (1)...(19): siRNA sense strand
gacaaugaccaguggcuga

SEQ ID NO: 2374721 - RNA, 19 nt, Homo sapiens
  misc_RNA (1)...(19): siRNA sense strand
ccaacaagcccuuugacca

SEQ ID NO: 2374722 - RNA, 19 nt, Homo sapiens
  misc_RNA (1)...(19): siRNA sense strand
cuucagagaucaaugccau

SEQ ID NO: 2374723 - RNA, 19 nt, Homo sapiens
  misc_RNA (1)...(19): siRNA sense strand
ggaugaugaggaugaggau

SEQ ID NO: 2374724 - RNA, 19 nt, Homo sapiens
  misc_RNA (1)...(19): siRNA sense strand
augaugacaaagaggauga

SEQ ID NO: 2374725 - RNA, 19 nt, Homo sapiens
  misc_RNA (1)...(19): siRNA sense strand
gcaggaaaccucaggggau

SEQ ID NO: 2374726 - RNA, 19 nt, Homo sapiens
  misc_RNA (1)...(19): siRNA sense strand
gcugugaagaggagcagga

SEQ ID NO: 2374727 - RNA, 19 nt, Homo sapiens
  misc_RNA (1)...(19): siRNA sense strand
ccgugguccugcuggauga

SEQ ID NO: 2374728 - RNA, 19 nt, Homo sapiens
  misc_RNA (1)...(19): siRNA sense strand
gagcugggaccaaaggaca

SEQ ID NO: 2374729 - RNA, 19 nt, Homo sapiens
  misc_RNA (1)...(19): siRNA sense strand
ggacaaaagaagcgacaga

SEQ ID NO: 2374730 - RNA, 19 nt, Homo sapiens
  misc_RNA (1)...(19): siRNA sense strand
ggcuaagcaacaagagcaa

SEQ ID NO: 2374731 - RNA, 19 nt, Homo sapiens
  misc_RNA (1)...(19): siRNA sense strand
gcggggaacaguugaguaa

SEQ ID NO: 2374732 - RNA, 19 nt, Homo sapiens
  misc_RNA (1)...(19): siRNA sense strand
cuaagcaacaagagcaaga

SEQ ID NO: 2374733 - RNA, 19 nt, Homo sapiens
  misc_RNA (1)...(19): siRNA sense strand
gcaacaagagcaagaccca

SEQ ID NO: 2374734 - RNA, 19 nt, Homo sapiens
  misc_RNA (1)...(19): siRNA sense strand
gugccaaccguauggaaaa

SEQ ID NO: 2374735 - RNA, 19 nt, Homo sapiens
  misc_RNA (1)...(19): siRNA sense strand
gggaaggagaggcuggcau

SEQ ID NO: 2374736 - RNA, 19 nt, Homo sapiens
  misc_RNA (1)...(19): siRNA sense strand
caacaacagcagcggggaa

SEQ ID NO: 2374737 - RNA, 19 nt, Homo sapiens
  misc_RNA (1)...(19): siRNA sense strand
acaaaagaagcgacagaau

SEQ ID NO: 2374738 - RNA, 19 nt, Homo sapiens
  misc_RNA (1)...(19): siRNA sense strand
caaauucgcugauggagga

SEQ ID NO: 2374739 - RNA, 19 nt, Homo sapiens
  misc_RNA (1)...(19): siRNA sense strand
auucgcugauggaggacaa

SEQ ID NO: 2374740 - RNA, 19 nt, Homo sapiens
  misc_RNA (1)...(19): siRNA sense strand
cugcauauucuuaccaaca

SEQ ID NO: 2374741 - RNA, 19 nt, Homo sapiens
  misc_RNA (1)...(19): siRNA sense strand
gagaauaugcugaaacccu

SEQ ID NO: 2374742 - RNA, 19 nt, Homo sapiens
  misc_RNA (1)...(19): siRNA sense strand
ggaagaaaguccaagccau

SEQ ID NO: 2374743 - RNA, 19 nt, Homo sapiens
  misc_RNA (1)...(19): siRNA sense strand
uagcaagauauuugaccaa

SEQ ID NO: 2374744 - RNA, 19 nt, Homo sapiens
  misc_RNA (1)...(19): siRNA sense strand
agaccacagaauagaacaa

SEQ ID NO: 2374745 - RNA, 19 nt, Homo sapiens
  misc_RNA (1)...(19): siRNA sense strand
aguaugaagaccacagaau

SEQ ID NO: 2374746 - RNA, 19 nt, Homo sapiens
  misc_RNA (1)...(19): siRNA sense strand
gggcagacuucuacuggga

SEQ ID NO: 2374747 - RNA, 19 nt, Homo sapiens
  misc_RNA (1)...(19): siRNA sense strand
cagaaauggaacaauguca

SEQ ID NO: 2374748 - RNA, 19 nt, Homo sapiens
  misc_RNA (1)...(19): siRNA sense strand
gcagacuucuacugggaga

SEQ ID NO: 2374749 - RNA, 19 nt, Homo sapiens
  misc_RNA (1)...(19): siRNA sense strand
cugacuggccugaaaucaa

SEQ ID NO: 2374750 - RNA, 19 nt, Homo sapiens
  misc_RNA (1)...(19): siRNA sense strand
cuuuaaacgacaugugaua

SEQ ID NO: 2374751 - RNA, 19 nt, Homo sapiens
  misc_RNA (1)...(19): siRNA sense strand
cuaacaagaaagugaguuu

SEQ ID NO: 2374752 - RNA, 19 nt, Homo sapiens
  misc_RNA (1)...(19): siRNA sense strand
ccauaagcucauaaacaaa

SEQ ID NO: 2374753 - RNA, 19 nt, Homo sapiens
  misc_RNA (1)...(19): siRNA sense strand
ugggauaacucuugaucau

SEQ ID NO: 2374754 - RNA, 19 nt, Homo sapiens
  misc_RNA (1)...(19): siRNA sense strand
aagaggauuuagaggaaga

SEQ ID NO: 2374755 - RNA, 19 nt, Homo sapiens
  misc_RNA (1)...(19): siRNA sense strand
ccauaaggguaggaagauu

SEQ ID NO: 2374756 - RNA, 19 nt, Homo sapiens
  misc_RNA (1)...(19): siRNA sense strand
ccgaagaugaugaugauga

SEQ ID NO: 2374757 - RNA, 19 nt, Homo sapiens
  misc_RNA (1)...(19): siRNA sense strand
acaacuaacaagaaaguga

SEQ ID NO: 2374758 - RNA, 19 nt, Homo sapiens
  misc_RNA (1)...(19): siRNA sense strand
ucauaaacaaagucgacaa

SEQ ID NO: 2374759 - RNA, 19 nt, Homo sapiens
  misc_RNA (1)...(19): siRNA sense strand
guucacaagaagaugcuaa

SEQ ID NO: 2374760 - RNA, 19 nt, Homo sapiens
  misc_RNA (1)...(19): siRNA sense strand
cugaagaugauguugaaau

SEQ ID NO: 2374761 - RNA, 19 nt, Homo sapiens
  misc_RNA (1)...(19): siRNA sense strand
agaaauugucacagagagu

SEQ ID NO: 2374762 - RNA, 19 nt, Homo sapiens
  misc_RNA (1)...(19): siRNA sense strand
aguaacagaaggugugauu

SEQ ID NO: 2374763 - RNA, 19 nt, Homo sapiens
  misc_RNA (1)...(19): siRNA sense strand
gggcugcggcauauggaaa

SEQ ID NO: 2374764 - RNA, 19 nt, Homo sapiens
  misc_RNA (1)...(19): siRNA sense strand
ggauuuguuucaaggacau

SEQ ID NO: 2374765 - RNA, 19 nt, Homo sapiens
  misc_RNA (1)...(19): siRNA sense strand
gagaggauucagacaacaa

SEQ ID NO: 2374766 - RNA, 19 nt, Homo sapiens
  misc_RNA (1)...(19): siRNA sense strand
ggaagucauuguaggggaa

SEQ ID NO: 2374767 - RNA, 19 nt, Homo sapiens
  misc_RNA (1)...(19): siRNA sense strand
augugaggucugugauaaa

SEQ ID NO: 2374768 - RNA, 19 nt, Homo sapiens
  misc_RNA (1)...(19): siRNA sense strand
agugauauccauaagggua

SEQ ID NO: 2374769 - RNA, 19 nt, Homo sapiens
  misc_RNA (1)...(19): siRNA sense strand
ccacaaugguaucagagga

SEQ ID NO: 2374770 - RNA, 19 nt, Homo sapiens
  misc_RNA (1)...(19): siRNA sense strand
cagaaguaguacagcagca

SEQ ID NO: 2374771 - RNA, 19 nt, Homo sapiens
  misc_RNA (1)...(19): siRNA sense strand
ugcuaaagaagauggguuu

SEQ ID NO: 2374772 - RNA, 19 nt, Homo sapiens
  misc_RNA (1)...(19): siRNA sense strand
uauuuaaagcggaggcuga

SEQ ID NO: 2374773 - RNA, 19 nt, Homo sapiens
  misc_RNA (1)...(19): siRNA sense strand
gauuguuccugaagcggua

SEQ ID NO: 2374774 - RNA, 19 nt, Homo sapiens
  misc_RNA (1)...(19): siRNA sense strand
ggauuuagaggaagaugau

SEQ ID NO: 2374775 - RNA, 19 nt, Homo sapiens
  misc_RNA (1)...(19): siRNA sense strand
gucuaaacaugguaacaau

SEQ ID NO: 2374776 - RNA, 19 nt, Homo sapiens
  misc_RNA (1)...(19): siRNA sense strand
cucaagaagaagaugauau

SEQ ID NO: 2374777 - RNA, 19 nt, Homo sapiens
  misc_RNA (1)...(19): siRNA sense strand
cugcacauaucgauggaga

SEQ ID NO: 2374778 - RNA, 19 nt, Homo sapiens
  misc_RNA (1)...(19): siRNA sense strand
cugaaauagcagaugaagu

SEQ ID NO: 2374779 - RNA, 19 nt, Homo sapiens
  misc_RNA (1)...(19): siRNA sense strand
aagcauagugauauccaua

SEQ ID NO: 2374780 - RNA, 19 nt, Homo sapiens
  misc_RNA (1)...(19): siRNA sense strand
ccaugaauuuacagaauac

SEQ ID NO: 2374781 - RNA, 19 nt, Homo sapiens
  misc_RNA (1)...(19): siRNA sense strand
aagcggaggcugaagauga

SEQ ID NO: 2374782 - RNA, 19 nt, Homo sapiens
  misc_RNA (1)...(19): siRNA sense strand
gagacaaggagccgaagau

SEQ ID NO: 2374783 - RNA, 19 nt, Homo sapiens
  misc_RNA (1)...(19): siRNA sense strand
ucaagaaacauaugagaac

SEQ ID NO: 2374784 - RNA, 19 nt, Homo sapiens
  misc_RNA (1)...(19): siRNA sense strand
agaggaagaugauggugau

SEQ ID NO: 2374785 - RNA, 19 nt, Homo sapiens
  misc_RNA (1)...(19): siRNA sense strand
aagcagaaguaguacagca

SEQ ID NO: 2374786 - RNA, 19 nt, Homo sapiens
  misc_RNA (1)...(19): siRNA sense strand
uuccauaaccacuuagaaa

SEQ ID NO: 2374787 - RNA, 19 nt, Homo sapiens
  misc_RNA (1)...(19): siRNA sense strand
acccaugaauuuacagaau

SEQ ID NO: 2374788 - RNA, 19 nt, Homo sapiens
  misc_RNA (1)...(19): siRNA sense strand
gcaagagaggauucagaca

SEQ ID NO: 2374789 - RNA, 19 nt, Homo sapiens
  misc_RNA (1)...(19): siRNA sense strand
acuuagaacauguggucca

SEQ ID NO: 2374790 - RNA, 19 nt, Homo sapiens
  misc_RNA (1)...(19): siRNA sense strand
aauuagagcauauggggaa

SEQ ID NO: 2374791 - RNA, 19 nt, Homo sapiens
  misc_RNA (1)...(19): siRNA sense strand
auccauaaggguaggaaga

SEQ ID NO: 2374792 - RNA, 19 nt, Homo sapiens
  misc_RNA (1)...(19): siRNA sense strand
guuucaaggacauaagaca

SEQ ID NO: 2374793 - RNA, 19 nt, Homo sapiens
  misc_RNA (1)...(19): siRNA sense strand
auacuaaagaucagccauu

SEQ ID NO: 2374794 - RNA, 19 nt, Homo sapiens
  misc_RNA (1)...(19): siRNA sense strand
uuucaggugugcagaucaa

SEQ ID NO: 2374795 - RNA, 19 nt, Homo sapiens
  misc_RNA (1)...(19): siRNA sense strand
aauagguggaacagaaauu

SEQ ID NO: 2374796 - RNA, 19 nt, Homo sapiens
  misc_RNA (1)...(19): siRNA sense strand
gugcuugaccagagccgaa

SEQ ID NO: 2374797 - RNA, 19 nt, Homo sapiens
  misc_RNA (1)...(19): siRNA sense strand
ugguuuacauggcaguuaa

SEQ ID NO: 2374798 - RNA, 19 nt, Homo sapiens
  misc_RNA (1)...(19): siRNA sense strand
cggcauauggaaauacuuu

SEQ ID NO: 2374799 - RNA, 19 nt, Homo sapiens
  misc_RNA (1)...(19): siRNA sense strand
aggauuuagaggaagauga

SEQ ID NO: 2374800 - RNA, 19 nt, Homo sapiens
  misc_RNA (1)...(19): siRNA sense strand
aaaccgaagaugaugauga

SEQ ID NO: 2374801 - RNA, 19 nt, Homo sapiens
  misc_RNA (1)...(19): siRNA sense strand
agaaaaugcuagugguaaa

SEQ ID NO: 2374802 - RNA, 19 nt, Homo sapiens
  misc_RNA (1)...(19): siRNA sense strand
agauaugcaagaagagaaa

SEQ ID NO: 2374803 - RNA, 19 nt, Homo sapiens
  misc_RNA (1)...(19): siRNA sense strand
agguagaagaugacagauu

SEQ ID NO: 2374804 - RNA, 19 nt, Homo sapiens
  misc_RNA (1)...(19): siRNA sense strand
uggacaagccagagaugaa

SEQ ID NO: 2374805 - RNA, 19 nt, Homo sapiens
  misc_RNA (1)...(19): siRNA sense strand
uggcauuuguuguggguga

SEQ ID NO: 2374806 - RNA, 19 nt, Homo sapiens
  misc_RNA (1)...(19): siRNA sense strand
aggaccacguggaaggaaa

SEQ ID NO: 2374807 - RNA, 19 nt, Homo sapiens
  misc_RNA (1)...(19): siRNA sense strand
cagauaugcaagaagagaa

SEQ ID NO: 2374808 - RNA, 19 nt, Homo sapiens
  misc_RNA (1)...(19): siRNA sense strand
cugccaugcuggaaaguuu

SEQ ID NO: 2374809 - RNA, 19 nt, Homo sapiens
  misc_RNA (1)...(19): siRNA sense strand
cugggaaaguuuagaaaau

SEQ ID NO: 2374810 - RNA, 19 nt, Homo sapiens
  misc_RNA (1)...(19): siRNA sense strand
guucugugcugguggguca

SEQ ID NO: 2374811 - RNA, 19 nt, Homo sapiens
  misc_RNA (1)...(19): siRNA sense strand
cuuaggaacaguuggguuu

SEQ ID NO: 2374812 - RNA, 19 nt, Homo sapiens
  misc_RNA (1)...(19): siRNA sense strand
gguaauugguggaguagcu

SEQ ID NO: 2374813 - RNA, 19 nt, Homo sapiens
  misc_RNA (1)...(19): siRNA sense strand
gaccaaugggugaaguuaa

SEQ ID NO: 2374814 - RNA, 19 nt, Homo sapiens
  misc_RNA (1)...(19): siRNA sense strand
agcuaucaguugagggauu

SEQ ID NO: 2374815 - RNA, 19 nt, Homo sapiens
  misc_RNA (1)...(19): siRNA sense strand
ggggcuugguucugggaaa

SEQ ID NO: 2374816 - RNA, 19 nt, Homo sapiens
  misc_RNA (1)...(19): siRNA sense strand
cugcaaacagguacgggaa

SEQ ID NO: 2374817 - RNA, 19 nt, Homo sapiens
  misc_RNA (1)...(19): siRNA sense strand
cuuguuacuuauagggaga

SEQ ID NO: 2374818 - RNA, 19 nt, Homo sapiens
  misc_RNA (1)...(19): siRNA sense strand
aggcuuucuucgagaguca

SEQ ID NO: 2374819 - RNA, 19 nt, Homo sapiens
  misc_RNA (1)...(19): siRNA sense strand
gcugaaugcugccuggcua

SEQ ID NO: 2374820 - RNA, 19 nt, Homo sapiens
  misc_RNA (1)...(19): siRNA sense strand
cagacuucuaugaggaaau

SEQ ID NO: 2374821 - RNA, 19 nt, Homo sapiens
  misc_RNA (1)...(19): siRNA sense strand
cuauagcagcugugaugaa

SEQ ID NO: 2374822 - RNA, 19 nt, Homo sapiens
  misc_RNA (1)...(19): siRNA sense strand
guagaagaugacagauuau

SEQ ID NO: 2374823 - RNA, 19 nt, Homo sapiens
  misc_RNA (1)...(19): siRNA sense strand
uccaggaguuugugaaaga

SEQ ID NO: 2374824 - RNA, 19 nt, Homo sapiens
  misc_RNA (1)...(19): siRNA sense strand
aggugaggcaggcgacuaa

SEQ ID NO: 2374825 - RNA, 19 nt, Homo sapiens
  misc_RNA (1)...(19): siRNA sense strand
cuucauaaacaagcagaua

SEQ ID NO: 2374826 - RNA, 19 nt, Homo sapiens
  misc_RNA (1)...(19): siRNA sense strand
ggaagaacuuuauaaccga

SEQ ID NO: 2374827 - RNA, 19 nt, Homo sapiens
  misc_RNA (1)...(19): siRNA sense strand
agggauuugcaguugauaa

SEQ ID NO: 2374828 - RNA, 19 nt, Homo sapiens
  misc_RNA (1)...(19): siRNA sense strand
gugaaaauauucugcugaa

SEQ ID NO: 2374829 - RNA, 19 nt, Homo sapiens
  misc_RNA (1)...(19): siRNA sense strand
cugccuggcuaaagcgaga

SEQ ID NO: 2374830 - RNA, 19 nt, Homo sapiens
  misc_RNA (1)...(19): siRNA sense strand
accagaaggagaugaagaa

SEQ ID NO: 2374831 - RNA, 19 nt, Homo sapiens
  misc_RNA (1)...(19): siRNA sense strand
ugaauguaauugaccggaa

SEQ ID NO: 2374832 - RNA, 19 nt, Homo sapiens
  misc_RNA (1)...(19): siRNA sense strand
acacagacuucuaugagga

SEQ ID NO: 2374833 - RNA, 19 nt, Homo sapiens
  misc_RNA (1)...(19): siRNA sense strand
augaggaaauccaggaguu

SEQ ID NO: 2374834 - RNA, 19 nt, Homo sapiens
  misc_RNA (1)...(19): siRNA sense strand
ccaaccaggccaaacuaaa

SEQ ID NO: 2374835 - RNA, 19 nt, Homo sapiens
  misc_RNA (1)...(19): siRNA sense strand
uggaaauucauaaaggaca

SEQ ID NO: 2374836 - RNA, 19 nt, Homo sapiens
  misc_RNA (1)...(19): siRNA sense strand
cauaaaggacaacugggaa

SEQ ID NO: 2374837 - RNA, 19 nt, Homo sapiens
  misc_RNA (1)...(19): siRNA sense strand
aagcugaacagguagaaga

SEQ ID NO: 2374838 - RNA, 19 nt, Homo sapiens
  misc_RNA (1)...(19): siRNA sense strand
aaaccagaccaauggguga

SEQ ID NO: 2374839 - RNA, 19 nt, Homo sapiens
  misc_RNA (1)...(19): siRNA sense strand
guuuaaggaccacguggaa

SEQ ID NO: 2374840 - RNA, 19 nt, Homo sapiens
  misc_RNA (1)...(19): siRNA sense strand
ggcuaaagcgagaugcuga

SEQ ID NO: 2374841 - RNA, 19 nt, Homo sapiens
  misc_RNA (1)...(19): siRNA sense strand
caccagaaggagaugaaga

SEQ ID NO: 2374842 - RNA, 19 nt, Homo sapiens
  misc_RNA (1)...(19): siRNA sense strand
cgaaagaguccuuggcgcu

SEQ ID NO: 2374843 - RNA, 19 nt, Homo sapiens
  misc_RNA (1)...(19): siRNA sense strand
cugaaugcugccuggcuaa

SEQ ID NO: 2374844 - RNA, 19 nt, Homo sapiens
  misc_RNA (1)...(19): siRNA sense strand
ugaagaaauacaugcuaca

SEQ ID NO: 2374845 - RNA, 19 nt, Homo sapiens
  misc_RNA (1)...(19): siRNA sense strand
gggcuugguucugggaaaa

SEQ ID NO: 2374846 - RNA, 19 nt, Homo sapiens
  misc_RNA (1)...(19): siRNA sense strand
agaaauacaugcuacagga

SEQ ID NO: 2374847 - RNA, 19 nt, Homo sapiens
  misc_RNA (1)...(19): siRNA sense strand
agauagauuuuguuggaga

SEQ ID NO: 2374848 - RNA, 19 nt, Homo sapiens
  misc_RNA (1)...(19): siRNA sense strand
gcugaaugacaaaaugaaa

SEQ ID NO: 2374849 - RNA, 19 nt, Homo sapiens
  misc_RNA (1)...(19): siRNA sense strand
ugguaaaccuauagcagcu

SEQ ID NO: 2374850 - RNA, 19 nt, Homo sapiens
  misc_RNA (1)...(19): siRNA sense strand
aauccaggaguuugugaaa

SEQ ID NO: 2374851 - RNA, 19 nt, Homo sapiens
  misc_RNA (1)...(19): siRNA sense strand
gggaaaacuaggaaaagca

SEQ ID NO: 2374852 - RNA, 19 nt, Homo sapiens
  misc_RNA (1)...(19): siRNA sense strand
acuucaccuucgagggcaa

SEQ ID NO: 2374853 - RNA, 19 nt, Homo sapiens
  misc_RNA (1)...(19): siRNA sense strand
ucauuuauguggaagcuga

SEQ ID NO: 2374854 - RNA, 19 nt, Homo sapiens
  misc_RNA (1)...(19): siRNA sense strand
gucauauguuggugaagau

SEQ ID NO: 2374855 - RNA, 19 nt, Homo sapiens
  misc_RNA (1)...(19): siRNA sense strand
ggaccacguggaaggaaaa

SEQ ID NO: 2374856 - RNA, 19 nt, Homo sapiens
  misc_RNA (1)...(19): siRNA sense strand
acaacugggaagaacuuua

SEQ ID NO: 2374857 - RNA, 19 nt, Homo sapiens
  misc_RNA (1)...(19): siRNA sense strand
uguggaucgacuuggauua

SEQ ID NO: 2374858 - RNA, 19 nt, Homo sapiens
  misc_RNA (1)...(19): siRNA sense strand
gagaaagaaguuugcccaa

SEQ ID NO: 2374859 - RNA, 19 nt, Homo sapiens
  misc_RNA (1)...(19): siRNA sense strand
agaucuauacuguuggaaa

SEQ ID NO: 2374860 - RNA, 19 nt, Homo sapiens
  misc_RNA (1)...(19): siRNA sense strand
cgaauggcgaggauggcaa

SEQ ID NO: 2374861 - RNA, 19 nt, Homo sapiens
  misc_RNA (1)...(19): siRNA sense strand
acagggaggaccagaucaa

SEQ ID NO: 2374862 - RNA, 19 nt, Homo sapiens
  misc_RNA (1)...(19): siRNA sense strand
aggguguagaagagaagaa

SEQ ID NO: 2374863 - RNA, 19 nt, Homo sapiens
  misc_RNA (1)...(19): siRNA sense strand
aggcaaggaggaagcuuau

SEQ ID NO: 2374864 - RNA, 19 nt, Homo sapiens
  misc_RNA (1)...(19): siRNA sense strand
ugcucgaucucuugguaaa

SEQ ID NO: 2374865 - RNA, 19 nt, Homo sapiens
  misc_RNA (1)...(19): siRNA sense strand
cgagguggaaugaagaaaa

SEQ ID NO: 2374866 - RNA, 19 nt, Homo sapiens
  misc_RNA (1)...(19): siRNA sense strand
cuucgaaaggcaaggagga

SEQ ID NO: 2374867 - RNA, 19 nt, Homo sapiens
  misc_RNA (1)...(19): siRNA sense strand
gguguagaagagaagaaga

SEQ ID NO: 2374868 - RNA, 19 nt, Homo sapiens
  misc_RNA (1)...(19): siRNA sense strand
gccuauaagcacagaggaa

SEQ ID NO: 2374869 - RNA, 19 nt, Homo sapiens
  misc_RNA (1)...(19): siRNA sense strand
cuauaagcacagaggaaau

SEQ ID NO: 2374870 - RNA, 19 nt, Homo sapiens
  misc_RNA (1)...(19): siRNA sense strand
gggcagaauuggaaugcga

SEQ ID NO: 2374871 - RNA, 19 nt, Homo sapiens
  misc_RNA (1)...(19): siRNA sense strand
cuuguggauuagagggaaa

SEQ ID NO: 2374872 - RNA, 19 nt, Homo sapiens
  misc_RNA (1)...(19): siRNA sense strand
gggaagggccaaauggaga

SEQ ID NO: 2374873 - RNA, 19 nt, Homo sapiens
  misc_RNA (1)...(19): siRNA sense strand
ggaccaucauacagcacaa

SEQ ID NO: 2374874 - RNA, 19 nt, Homo sapiens
  misc_RNA (1)...(19): siRNA sense strand
cugcaauuaagaagagcaa

SEQ ID NO: 2374875 - RNA, 19 nt, Homo sapiens
  misc_RNA (1)...(19): siRNA sense strand
agaucauugcuaugggaaa

SEQ ID NO: 2374876 - RNA, 19 nt, Homo sapiens
  misc_RNA (1)...(19): siRNA sense strand
cuucagugaccuucagaua

SEQ ID NO: 2374877 - RNA, 19 nt, Homo sapiens
  misc_RNA (1)...(19): siRNA sense strand
cagucaugguccuggauuu

SEQ ID NO: 2374878 - RNA, 19 nt, Homo sapiens
  misc_RNA (1)...(19): siRNA sense strand
ugucauucccacauagaaa

SEQ ID NO: 2374879 - RNA, 19 nt, Homo sapiens
  misc_RNA (1)...(19): siRNA sense strand
caugcagagugaugggauu

SEQ ID NO: 2374880 - RNA, 19 nt, Homo sapiens
  misc_RNA (1)...(19): siRNA sense strand
gguugaucuugauggaaaa

SEQ ID NO: 2374881 - RNA, 19 nt, Homo sapiens
  misc_RNA (1)...(19): siRNA sense strand
ccuauaagcacagaggaaa

SEQ ID NO: 2374882 - RNA, 19 nt, Homo sapiens
  misc_RNA (1)...(19): siRNA sense strand
gcugaauagaagagaugga

SEQ ID NO: 2374883 - RNA, 19 nt, Homo sapiens
  misc_RNA (1)...(19): siRNA sense strand
cuauuauaauggaguggau

SEQ ID NO: 2374884 - RNA, 19 nt, Homo sapiens
  misc_RNA (1)...(19): siRNA sense strand
cgaauuaaaugaugggcag

SEQ ID NO: 2374885 - RNA, 19 nt, Homo sapiens
  misc_RNA (1)...(19): siRNA sense strand
gcagaauuggaaugcgaau

SEQ ID NO: 2374886 - RNA, 19 nt, Homo sapiens
  misc_RNA (1)...(19): siRNA sense strand
ccucugaguugguggguag

SEQ ID NO: 2374887 - RNA, 19 nt, Homo sapiens
  misc_RNA (1)...(19): siRNA sense strand
gaauagaagagauggagcu

SEQ ID NO: 2374888 - RNA, 19 nt, Homo sapiens
  misc_RNA (1)...(19): siRNA sense strand
ggucaauaagcaagaugga

SEQ ID NO: 2374889 - RNA, 19 nt, Homo sapiens
  misc_RNA (1)...(19): siRNA sense strand
acuuaacaagagucagaaa

SEQ ID NO: 2374890 - RNA, 19 nt, Homo sapiens
  misc_RNA (1)...(19): siRNA sense strand
agaaauacuaauccagaga

SEQ ID NO: 2374891 - RNA, 19 nt, Homo sapiens
  misc_RNA (1)...(19): siRNA sense strand
gcggcaaagugguagaucu

SEQ ID NO: 2374892 - RNA, 19 nt, Homo sapiens
  misc_RNA (1)...(19): siRNA sense strand
ggaaaauuacccagugaca

SEQ ID NO: 2374893 - RNA, 19 nt, Homo sapiens
  misc_RNA (1)...(19): siRNA sense strand
cagauagacucauguggca

SEQ ID NO: 2374894 - RNA, 19 nt, Homo sapiens
  misc_RNA (1)...(19): siRNA sense strand
ucaauaagcaagauggaac

SEQ ID NO: 2374895 - RNA, 19 nt, Homo sapiens
  misc_RNA (1)...(19): siRNA sense strand
agucagaaauacuaaucca

SEQ ID NO: 2374896 - RNA, 19 nt, Homo sapiens
  misc_RNA (1)...(19): siRNA sense strand
ggagagagaauggagguca

SEQ ID NO: 2374897 - RNA, 19 nt, Homo sapiens
  misc_RNA (1)...(19): siRNA sense strand
gagagagaauggaggucac

SEQ ID NO: 2374898 - RNA, 19 nt, Homo sapiens
  misc_RNA (1)...(19): siRNA sense strand
cggcaaagugguagaucug

SEQ ID NO: 2374899 - RNA, 19 nt, Homo sapiens
  misc_RNA (1)...(19): siRNA sense strand
cuuaacaagagucagaaau

SEQ ID NO: 2374900 - RNA, 19 nt, Homo sapiens
  misc_RNA (1)...(19): siRNA sense strand
uagaagagauggagcuggu

SEQ ID NO: 2374901 - RNA, 19 nt, Homo sapiens
  misc_RNA (1)...(19): siRNA sense strand
ggaagggccaaauggagau

SEQ ID NO: 2374902 - RNA, 19 nt, Homo sapiens
  misc_RNA (1)...(19): siRNA sense strand
gauuagagggaaacugcau

SEQ ID NO: 2374903 - RNA, 19 nt, Homo sapiens
  misc_RNA (1)...(19): siRNA sense strand
gguaggaagaaccaaugaa

SEQ ID NO: 2374904 - RNA, 19 nt, Homo sapiens
  misc_RNA (1)...(19): siRNA sense strand
gccuauaagcacagaggaa

SEQ ID NO: 2374905 - RNA, 19 nt, Homo sapiens
  misc_RNA (1)...(19): siRNA sense strand
cuauaagcacagaggaaau

SEQ ID NO: 2374906 - RNA, 19 nt, Homo sapiens
  misc_RNA (1)...(19): siRNA sense strand
gggcagaauuggaaugcga

SEQ ID NO: 2374907 - RNA, 19 nt, Homo sapiens
  misc_RNA (1)...(19): siRNA sense strand
cuuguggauuagagggaaa

SEQ ID NO: 2374908 - RNA, 19 nt, Homo sapiens
  misc_RNA (1)...(19): siRNA sense strand
gggaagggccaaauggaga

SEQ ID NO: 2374909 - RNA, 19 nt, Homo sapiens
  misc_RNA (1)...(19): siRNA sense strand
ggaccaucauacagcacaa

SEQ ID NO: 2374910 - RNA, 19 nt, Homo sapiens
  misc_RNA (1)...(19): siRNA sense strand
cugcaauuaagaagagcaa

SEQ ID NO: 2374911 - RNA, 19 nt, Homo sapiens
  misc_RNA (1)...(19): siRNA sense strand
agaucauugcuaugggaaa

SEQ ID NO: 2374912 - RNA, 19 nt, Homo sapiens
  misc_RNA (1)...(19): siRNA sense strand
cuucagugaccuucagaua

SEQ ID NO: 2374913 - RNA, 19 nt, Homo sapiens
  misc_RNA (1)...(19): siRNA sense strand
cagucaugguccuggauuu

SEQ ID NO: 2374914 - RNA, 19 nt, Homo sapiens
  misc_RNA (1)...(19): siRNA sense strand
ugucauucccacauagaaa

SEQ ID NO: 2374915 - RNA, 19 nt, Homo sapiens
  misc_RNA (1)...(19): siRNA sense strand
caugcagagugaugggauu

SEQ ID NO: 2374916 - RNA, 19 nt, Homo sapiens
  misc_RNA (1)...(19): siRNA sense strand
gguugaucuugauggaaaa

SEQ ID NO: 2374917 - RNA, 19 nt, Homo sapiens
  misc_RNA (1)...(19): siRNA sense strand
ccuauaagcacagaggaaa

SEQ ID NO: 2374918 - RNA, 19 nt, Homo sapiens
  misc_RNA (1)...(19): siRNA sense strand
gcugaauagaagagaugga

SEQ ID NO: 2374919 - RNA, 19 nt, Homo sapiens
  misc_RNA (1)...(19): siRNA sense strand
cuauuauaauggaguggau

SEQ ID NO: 2374920 - RNA, 19 nt, Homo sapiens
  misc_RNA (1)...(19): siRNA sense strand
cgaauuaaaugaugggcag

SEQ ID NO: 2374921 - RNA, 19 nt, Homo sapiens
  misc_RNA (1)...(19): siRNA sense strand
gcagaauuggaaugcgaau

SEQ ID NO: 2374922 - RNA, 19 nt, Homo sapiens
  misc_RNA (1)...(19): siRNA sense strand
ccucugaguugguggguag

SEQ ID NO: 2374923 - RNA, 19 nt, Homo sapiens
  misc_RNA (1)...(19): siRNA sense strand
gaauagaagagauggagcu

SEQ ID NO: 2374924 - RNA, 19 nt, Homo sapiens
  misc_RNA (1)...(19): siRNA sense strand
ggucaauaagcaagaugga

SEQ ID NO: 2374925 - RNA, 19 nt, Homo sapiens
  misc_RNA (1)...(19): siRNA sense strand
acuuaacaagagucagaaa

SEQ ID NO: 2374926 - RNA, 19 nt, Homo sapiens
  misc_RNA (1)...(19): siRNA sense strand
agaaauacuaauccagaga

SEQ ID NO: 2374927 - RNA, 19 nt, Homo sapiens
  misc_RNA (1)...(19): siRNA sense strand
gcggcaaagugguagaucu

SEQ ID NO: 2374928 - RNA, 19 nt, Homo sapiens
  misc_RNA (1)...(19): siRNA sense strand
ggaaaauuacccagugaca

SEQ ID NO: 2374929 - RNA, 19 nt, Homo sapiens
  misc_RNA (1)...(19): siRNA sense strand
cagauagacucauguggca

SEQ ID NO: 2374930 - RNA, 19 nt, Homo sapiens
  misc_RNA (1)...(19): siRNA sense strand
ucaauaagcaagauggaac

SEQ ID NO: 2374931 - RNA, 19 nt, Homo sapiens
  misc_RNA (1)...(19): siRNA sense strand
agucagaaauacuaaucca

SEQ ID NO: 2374932 - RNA, 19 nt, Homo sapiens
  misc_RNA (1)...(19): siRNA sense strand
ggagagagaauggagguca

SEQ ID NO: 2374933 - RNA, 19 nt, Homo sapiens
  misc_RNA (1)...(19): siRNA sense strand
gagagagaauggaggucac

SEQ ID NO: 2374934 - RNA, 19 nt, Homo sapiens
  misc_RNA (1)...(19): siRNA sense strand
cggcaaagugguagaucug

SEQ ID NO: 2374935 - RNA, 19 nt, Homo sapiens
  misc_RNA (1)...(19): siRNA sense strand
cuuaacaagagucagaaau

SEQ ID NO: 2374936 - RNA, 19 nt, Homo sapiens
  misc_RNA (1)...(19): siRNA sense strand
uagaagagauggagcuggu

SEQ ID NO: 2374937 - RNA, 19 nt, Homo sapiens
  misc_RNA (1)...(19): siRNA sense strand
ggaagggccaaauggagau

SEQ ID NO: 2374938 - RNA, 19 nt, Homo sapiens
  misc_RNA (1)...(19): siRNA sense strand
gauuagagggaaacugcau

SEQ ID NO: 2374939 - RNA, 19 nt, Homo sapiens
  misc_RNA (1)...(19): siRNA sense strand
gguaggaagaaccaaugaa

SEQ ID NO: 2374940 - RNA, 19 nt, Homo sapiens
  misc_RNA (1)...(19): siRNA sense strand
gagaagaacugugggcaga

SEQ ID NO: 2374941 - RNA, 19 nt, Homo sapiens
  misc_RNA (1)...(19): siRNA sense strand
aaucagagcuucuucgaca

SEQ ID NO: 2374942 - RNA, 19 nt, Homo sapiens
  misc_RNA (1)...(19): siRNA sense strand
aggcaagcccagagagaag

SEQ ID NO: 2374943 - RNA, 19 nt, Homo sapiens
  misc_RNA (1)...(19): siRNA sense strand
gcucacugcugguggccuu

SEQ ID NO: 2374944 - RNA, 19 nt, Homo sapiens
  misc_RNA (1)...(19): siRNA sense strand
ccuggaggacagaaggcaa

SEQ ID NO: 2374945 - RNA, 19 nt, Homo sapiens
  misc_RNA (1)...(19): siRNA sense strand
ccugagaagagcuaugcaa

SEQ ID NO: 2374946 - RNA, 19 nt, Homo sapiens
  misc_RNA (1)...(19): siRNA sense strand
cggacagcacccagaccaa

SEQ ID NO: 2374947 - RNA, 19 nt, Homo sapiens
  misc_RNA (1)...(19): siRNA sense strand
cuguauagccugcagcaca

SEQ ID NO: 2374948 - RNA, 19 nt, Homo sapiens
  misc_RNA (1)...(19): siRNA sense strand
gaggccagcucaaugggaa

SEQ ID NO: 2374949 - RNA, 19 nt, Homo sapiens
  misc_RNA (1)...(19): siRNA sense strand
uccagaugccaaagagcua

SEQ ID NO: 2374950 - RNA, 19 nt, Homo sapiens
  misc_RNA (1)...(19): siRNA sense strand
ccccagaccuugagcugaa

SEQ ID NO: 2374951 - RNA, 19 nt, Homo sapiens
  misc_RNA (1)...(19): siRNA sense strand
aguacagaacccagagaaa

SEQ ID NO: 2374952 - RNA, 19 nt, Homo sapiens
  misc_RNA (1)...(19): siRNA sense strand
aguauggguaugagguaua

SEQ ID NO: 2374953 - RNA, 19 nt, Homo sapiens
  misc_RNA (1)...(19): siRNA sense strand
ccuacagguuugaggagga

SEQ ID NO: 2374954 - RNA, 19 nt, Homo sapiens
  misc_RNA (1)...(19): siRNA sense strand
ggagagugguagagcugga

SEQ ID NO: 2374955 - RNA, 19 nt, Homo sapiens
  misc_RNA (1)...(19): siRNA sense strand
aggaagaaagcaagaagga

SEQ ID NO: 2374956 - RNA, 19 nt, Homo sapiens
  misc_RNA (1)...(19): siRNA sense strand
gaggaggagcagagcacau

SEQ ID NO: 2374957 - RNA, 19 nt, Homo sapiens
  misc_RNA (1)...(19): siRNA sense strand
cuggagagaaguugggcau

SEQ ID NO: 2374958 - RNA, 19 nt, Homo sapiens
  misc_RNA (1)...(19): siRNA sense strand
cccaggacccauagggcua

SEQ ID NO: 2374959 - RNA, 19 nt, Homo sapiens
  misc_RNA (1)...(19): siRNA sense strand
cagucaucucgaagugaaa

SEQ ID NO: 2374960 - RNA, 19 nt, Homo sapiens
  misc_RNA (1)...(19): siRNA sense strand
ggaagacauuugaugcaca

SEQ ID NO: 2374961 - RNA, 19 nt, Homo sapiens
  misc_RNA (1)...(19): siRNA sense strand
ugguagauuaggagcccaa

SEQ ID NO: 2374962 - RNA, 19 nt, Homo sapiens
  misc_RNA (1)...(19): siRNA sense strand
aggacgugguguuggcgua

SEQ ID NO: 2374963 - RNA, 19 nt, Homo sapiens
  misc_RNA (1)...(19): siRNA sense strand
acaacauccucuuugggaa

SEQ ID NO: 2374964 - RNA, 19 nt, Homo sapiens
  misc_RNA (1)...(19): siRNA sense strand
cuacauaaggacagggccu

SEQ ID NO: 2374965 - RNA, 19 nt, Homo sapiens
  misc_RNA (1)...(19): siRNA sense strand
cuacaguauuggagcugca

SEQ ID NO: 2374966 - RNA, 19 nt, Homo sapiens
  misc_RNA (1)...(19): siRNA sense strand
ugagaauggacaagagucu

SEQ ID NO: 2374967 - RNA, 19 nt, Homo sapiens
  misc_RNA (1)...(19): siRNA sense strand
ucacacagacagaggccau

SEQ ID NO: 2374968 - RNA, 19 nt, Homo sapiens
  misc_RNA (1)...(19): siRNA sense strand
caguauggguaugagguau

SEQ ID NO: 2374969 - RNA, 19 nt, Homo sapiens
  misc_RNA (1)...(19): siRNA sense strand
ucaacauccuccuggccaa

SEQ ID NO: 2374970 - RNA, 19 nt, Homo sapiens
  misc_RNA (1)...(19): siRNA sense strand
gaagaaagcaagaaggagg

SEQ ID NO: 2374971 - RNA, 19 nt, Homo sapiens
  misc_RNA (1)...(19): siRNA sense strand
ccugcgacuccuugagcua

SEQ ID NO: 2374972 - RNA, 19 nt, Homo sapiens
  misc_RNA (1)...(19): siRNA sense strand
ugacagagcugcugagugg

SEQ ID NO: 2374973 - RNA, 19 nt, Homo sapiens
  misc_RNA (1)...(19): siRNA sense strand
aggccaugcuggugagcgu

SEQ ID NO: 2374974 - RNA, 19 nt, Homo sapiens
  misc_RNA (1)...(19): siRNA sense strand
gagcuuaucucuugggcag

SEQ ID NO: 2374975 - RNA, 19 nt, Homo sapiens
  misc_RNA (1)...(19): siRNA sense strand
cgaugaggccacagcaagu

SEQ ID NO: 2374976 - RNA, 19 nt, Homo sapiens
  misc_RNA (1)...(19): siRNA sense strand
cugcaggaagaaagcaaga

SEQ ID NO: 2374977 - RNA, 19 nt, Homo sapiens
  misc_RNA (1)...(19): siRNA sense strand
acagguuugaggaggagaa

SEQ ID NO: 2374978 - RNA, 19 nt, Homo sapiens
  misc_RNA (1)...(19): siRNA sense strand
ccuuauggcaccagugacu

SEQ ID NO: 2374979 - RNA, 19 nt, Homo sapiens
  misc_RNA (1)...(19): siRNA sense strand
guguggaccagaagacaga

SEQ ID NO: 2374980 - RNA, 19 nt, Homo sapiens
  misc_RNA (1)...(19): siRNA sense strand
aagagaaggcaguggccaa

SEQ ID NO: 2374981 - RNA, 19 nt, Homo sapiens
  misc_RNA (1)...(19): siRNA sense strand
gggcgcaaguggauggaca

SEQ ID NO: 2374982 - RNA, 19 nt, Homo sapiens
  misc_RNA (1)...(19): siRNA sense strand
aagccaaagaugagaagga

SEQ ID NO: 2374983 - RNA, 19 nt, Homo sapiens
  misc_RNA (1)...(19): siRNA sense strand
ccaaaguggugaaggggca

SEQ ID NO: 2374984 - RNA, 19 nt, Homo sapiens
  misc_RNA (1)...(19): siRNA sense strand
cagcauaagauccgcacau

SEQ ID NO: 2374985 - RNA, 19 nt, Homo sapiens
  misc_RNA (1)...(19): siRNA sense strand
uggaaugcuuugaagagga

SEQ ID NO: 2374986 - RNA, 19 nt, Homo sapiens
  misc_RNA (1)...(19): siRNA sense strand
gagaaggaguuacggaccu

SEQ ID NO: 2374987 - RNA, 19 nt, Homo sapiens
  misc_RNA (1)...(19): siRNA sense strand
ccacaaagcuagagcccau

SEQ ID NO: 2374988 - RNA, 19 nt, Homo sapiens
  misc_RNA (1)...(19): siRNA sense strand
ggaaacuacuguaagagga

SEQ ID NO: 2374989 - RNA, 19 nt, Homo sapiens
  misc_RNA (1)...(19): siRNA sense strand
agguccacauugagagcaa

SEQ ID NO: 2374990 - RNA, 19 nt, Homo sapiens
  misc_RNA (1)...(19): siRNA sense strand
cgauggaguagaccggaaa

SEQ ID NO: 2374991 - RNA, 19 nt, Homo sapiens
  misc_RNA (1)...(19): siRNA sense strand
ggggauaaugagggagaaa

SEQ ID NO: 2374992 - RNA, 19 nt, Homo sapiens
  misc_RNA (1)...(19): siRNA sense strand
aguuuaaauacgaaggcau

SEQ ID NO: 2374993 - RNA, 19 nt, Homo sapiens
  misc_RNA (1)...(19): siRNA sense strand
acgauggaguagaccggaa

SEQ ID NO: 2374994 - RNA, 19 nt, Homo sapiens
  misc_RNA (1)...(19): siRNA sense strand
aaugauuucccaugagcaa

SEQ ID NO: 2374995 - RNA, 19 nt, Homo sapiens
  misc_RNA (1)...(19): siRNA sense strand
aagaauucccagaaagcuu

SEQ ID NO: 2374996 - RNA, 19 nt, Homo sapiens
  misc_RNA (1)...(19): siRNA sense strand
aguacauguuggaacucua

SEQ ID NO: 2374997 - RNA, 19 nt, Homo sapiens
  misc_RNA (1)...(19): siRNA sense strand
aggagaggaaggaggaacu

SEQ ID NO: 2374998 - RNA, 19 nt, Homo sapiens
  misc_RNA (1)...(19): siRNA sense strand
acaucgacuucaaggagau

SEQ ID NO: 2374999 - RNA, 19 nt, Homo sapiens
  misc_RNA (1)...(19): siRNA sense strand
gaaagaaacaugcuggucu

SEQ ID NO: 2375000 - RNA, 19 nt, Homo sapiens
  misc_RNA (1)...(19): siRNA sense strand
ggagauauauggaaccaac

SEQ ID NO: 2375001 - RNA, 19 nt, Homo sapiens
  misc_RNA (1)...(19): siRNA sense strand
cuaugaaugccgugguguu

SEQ ID NO: 2375002 - RNA, 19 nt, Homo sapiens
  misc_RNA (1)...(19): siRNA sense strand
gaaccaacagugaguggga

SEQ ID NO: 2375003 - RNA, 19 nt, Homo sapiens
  misc_RNA (1)...(19): siRNA sense strand
gaagaggcuuuguugcaga

SEQ ID NO: 2375004 - RNA, 19 nt, Homo sapiens
  misc_RNA (1)...(19): siRNA sense strand
cugaaagaaagcuuggaaa

SEQ ID NO: 2375005 - RNA, 19 nt, Homo sapiens
  misc_RNA (1)...(19): siRNA sense strand
ggaaagaguaauucgcaga

SEQ ID NO: 2375006 - RNA, 19 nt, Homo sapiens
  misc_RNA (1)...(19): siRNA sense strand
gaacaaauuucaagcugca

SEQ ID NO: 2375007 - RNA, 19 nt, Homo sapiens
  misc_RNA (1)...(19): siRNA sense strand
ccuuaaaacuguaugugaa

SEQ ID NO: 2375008 - RNA, 19 nt, Homo sapiens
  misc_RNA (1)...(19): siRNA sense strand
aaggacaaggaaagaguaa

SEQ ID NO: 2375009 - RNA, 19 nt, Homo sapiens
  misc_RNA (1)...(19): siRNA sense strand
auugcaacaugcugagaaa

SEQ ID NO: 2375010 - RNA, 19 nt, Homo sapiens
  misc_RNA (1)...(19): siRNA sense strand
aguaauucgcagacuguua

SEQ ID NO: 2375011 - RNA, 19 nt, Homo sapiens
  misc_RNA (1)...(19): siRNA sense strand
ggaaauugcaacaugcuga

SEQ ID NO: 2375012 - RNA, 19 nt, Homo sapiens
  misc_RNA (1)...(19): siRNA sense strand
aggcagaauaccugagagu

SEQ ID NO: 2375013 - RNA, 19 nt, Homo sapiens
  misc_RNA (1)...(19): siRNA sense strand
cuggaacggacuuuggaaa

SEQ ID NO: 2375014 - RNA, 19 nt, Homo sapiens
  misc_RNA (1)...(19): siRNA sense strand
uggaacggacuuuggaaau

SEQ ID NO: 2375015 - RNA, 19 nt, Homo sapiens
  misc_RNA (1)...(19): siRNA sense strand
gaauauuugugcaagcuca

SEQ ID NO: 2375016 - RNA, 19 nt, Homo sapiens
  misc_RNA (1)...(19): siRNA sense strand
ccaaaaggaaauugcaaca

SEQ ID NO: 2375017 - RNA, 19 nt, Homo sapiens
  misc_RNA (1)...(19): siRNA sense strand
caaaaucagcugaaagaca

SEQ ID NO: 2375018 - RNA, 19 nt, Homo sapiens
  misc_RNA (1)...(19): siRNA sense strand
ccugaaagaaagcuuggaa

SEQ ID NO: 2375019 - RNA, 19 nt, Homo sapiens
  misc_RNA (1)...(19): siRNA sense strand
agcaggaaggacaaggaaa

SEQ ID NO: 2375020 - RNA, 19 nt, Homo sapiens
  misc_RNA (1)...(19): siRNA sense strand
cacucugcaucgauggaaa

SEQ ID NO: 2375021 - RNA, 19 nt, Homo sapiens
  misc_RNA (1)...(19): siRNA sense strand
ccacuauccaaaaggaaau

SEQ ID NO: 2375022 - RNA, 19 nt, Homo sapiens
  misc_RNA (1)...(19): siRNA sense strand
ggaaaugcuuguuggcaca

SEQ ID NO: 2375023 - RNA, 19 nt, Homo sapiens
  misc_RNA (1)...(19): siRNA sense strand
acauuaaaccagagaacau

SEQ ID NO: 2375024 - RNA, 19 nt, Homo sapiens
  misc_RNA (1)...(19): siRNA sense strand
aggcagaauuacuagagaa

SEQ ID NO: 2375025 - RNA, 19 nt, Homo sapiens
  misc_RNA (1)...(19): siRNA sense strand
ccaugugauccgaaaguua

SEQ ID NO: 2375026 - RNA, 19 nt, Homo sapiens
  misc_RNA (1)...(19): siRNA sense strand
gggaagaaauuuguggcaa

SEQ ID NO: 2375027 - RNA, 19 nt, Homo sapiens
  misc_RNA (1)...(19): siRNA sense strand
gccuaaaccagcugacaaa

SEQ ID NO: 2375028 - RNA, 19 nt, Homo sapiens
  misc_RNA (1)...(19): siRNA sense strand
aagcauucgggcagagaua

SEQ ID NO: 2375029 - RNA, 19 nt, Homo sapiens
  misc_RNA (1)...(19): siRNA sense strand
ugaagaugaacaagagcaa

SEQ ID NO: 2375030 - RNA, 19 nt, Homo sapiens
  misc_RNA (1)...(19): siRNA sense strand
ugugaaaauuggagaucua

SEQ ID NO: 2375031 - RNA, 19 nt, Homo sapiens
  misc_RNA (1)...(19): siRNA sense strand
ggcaaugaaaguaguuaaa

SEQ ID NO: 2375032 - RNA, 19 nt, Homo sapiens
  misc_RNA (1)...(19): siRNA sense strand
ugcaggaaauugaggaaau

SEQ ID NO: 2375033 - RNA, 19 nt, Homo sapiens
  misc_RNA (1)...(19): siRNA sense strand
uugaaagacccuugaaaga

SEQ ID NO: 2375034 - RNA, 19 nt, Homo sapiens
  misc_RNA (1)...(19): siRNA sense strand
aggacaaagcccaaaggaa

SEQ ID NO: 2375035 - RNA, 19 nt, Homo sapiens
  misc_RNA (1)...(19): siRNA sense strand
agguuaucaucuugugaaa

SEQ ID NO: 2375036 - RNA, 19 nt, Homo sapiens
  misc_RNA (1)...(19): siRNA sense strand
gacaaagcccaaaggaaau

SEQ ID NO: 2375037 - RNA, 19 nt, Homo sapiens
  misc_RNA (1)...(19): siRNA sense strand
uggcaaugaaaguaguuaa

SEQ ID NO: 2375038 - RNA, 19 nt, Homo sapiens
  misc_RNA (1)...(19): siRNA sense strand
gcuuauggaacgugauaca

SEQ ID NO: 2375039 - RNA, 19 nt, Homo sapiens
  misc_RNA (1)...(19): siRNA sense strand
aguuaaaagugcugaacau

SEQ ID NO: 2375040 - RNA, 19 nt, Homo sapiens
  misc_RNA (1)...(19): siRNA sense strand
gcucauuguggcaggaaaa

SEQ ID NO: 2375041 - RNA, 19 nt, Homo sapiens
  misc_RNA (1)...(19): siRNA sense strand
ggguggugcagcagaaauu

SEQ ID NO: 2375042 - RNA, 19 nt, Homo sapiens
  misc_RNA (1)...(19): siRNA sense strand
aagaugaacaagagcaaga

SEQ ID NO: 2375043 - RNA, 19 nt, Homo sapiens
  misc_RNA (1)...(19): siRNA sense strand
aaauugaggaaauggagaa

SEQ ID NO: 2375044 - RNA, 19 nt, Homo sapiens
  misc_RNA (1)...(19): siRNA sense strand
ggaaagugcuugcgcucca

SEQ ID NO: 2375045 - RNA, 19 nt, Homo sapiens
  misc_RNA (1)...(19): siRNA sense strand
gcagaaaagcucaagguga

SEQ ID NO: 2375046 - RNA, 19 nt, Homo sapiens
  misc_RNA (1)...(19): siRNA sense strand
gaucaaacgcuuauggaac

SEQ ID NO: 2375047 - RNA, 19 nt, Homo sapiens
  misc_RNA (1)...(19): siRNA sense strand
gcaagaacauaacggacca

SEQ ID NO: 2375048 - RNA, 19 nt, Homo sapiens
  misc_RNA (1)...(19): siRNA sense strand
ggugaagauugcugaccuu

SEQ ID NO: 2375049 - RNA, 19 nt, Homo sapiens
  misc_RNA (1)...(19): siRNA sense strand
ugucagugaaugagcagua

SEQ ID NO: 2375050 - RNA, 19 nt, Homo sapiens
  misc_RNA (1)...(19): siRNA sense strand
caagaaggacaaagcccaa

SEQ ID NO: 2375051 - RNA, 19 nt, Homo sapiens
  misc_RNA (1)...(19): siRNA sense strand
agaaauugaagaagaagca

SEQ ID NO: 2375052 - RNA, 19 nt, Homo sapiens
  misc_RNA (1)...(19): siRNA sense strand
agaagaagcagaagcgcca

SEQ ID NO: 2375053 - RNA, 19 nt, Homo sapiens
  misc_RNA (1)...(19): siRNA sense strand
ugaacaagagcaagaacau

SEQ ID NO: 2375054 - RNA, 19 nt, Homo sapiens
  misc_RNA (1)...(19): siRNA sense strand
ucuuauugucagugaauga

SEQ ID NO: 2375055 - RNA, 19 nt, Homo sapiens
  misc_RNA (1)...(19): siRNA sense strand
agaaaaggaccaaggccaa

SEQ ID NO: 2375056 - RNA, 19 nt, Homo sapiens
  misc_RNA (1)...(19): siRNA sense strand
aaacauaucacgaagcuga

SEQ ID NO: 2375057 - RNA, 19 nt, Homo sapiens
  misc_RNA (1)...(19): siRNA sense strand
agaagcgaaugcaggaaau

SEQ ID NO: 2375058 - RNA, 19 nt, Homo sapiens
  misc_RNA (1)...(19): siRNA sense strand
acauaaugcuaaugacugu

SEQ ID NO: 2375059 - RNA, 19 nt, Homo sapiens
  misc_RNA (1)...(19): siRNA sense strand
cugaugaugaugagcaaga

SEQ ID NO: 2375060 - RNA, 19 nt, Homo sapiens
  misc_RNA (1)...(19): siRNA sense strand
ccaaaggaaaucugaaacu

SEQ ID NO: 2375061 - RNA, 19 nt, Homo sapiens
  misc_RNA (1)...(19): siRNA sense strand
aauugaagaagaagcagaa

SEQ ID NO: 2375062 - RNA, 19 nt, Homo sapiens
  misc_RNA (1)...(19): siRNA sense strand
gaggaaauggagaaagagu

SEQ ID NO: 2375063 - RNA, 19 nt, Homo sapiens
  misc_RNA (1)...(19): siRNA sense strand
aggaagaggcagcuggcuu

SEQ ID NO: 2375064 - RNA, 19 nt, Homo sapiens
  misc_RNA (1)...(19): siRNA sense strand
cagagcaggaagaggagau

SEQ ID NO: 2375065 - RNA, 19 nt, Homo sapiens
  misc_RNA (1)...(19): siRNA sense strand
ccacuggacaacaaaggaa

SEQ ID NO: 2375066 - RNA, 19 nt, Homo sapiens
  misc_RNA (1)...(19): siRNA sense strand
agauauucaaacaaggcaa

SEQ ID NO: 2375067 - RNA, 19 nt, Homo sapiens
  misc_RNA (1)...(19): siRNA sense strand
cugcaugguauuugaaguu

SEQ ID NO: 2375068 - RNA, 19 nt, Homo sapiens
  misc_RNA (1)...(19): siRNA sense strand
uuacauaccaagugccgua

SEQ ID NO: 2375069 - RNA, 19 nt, Homo sapiens
  misc_RNA (1)...(19): siRNA sense strand
gaaauugaggaaauggaga

SEQ ID NO: 2375070 - RNA, 19 nt, Homo sapiens
  misc_RNA (1)...(19): siRNA sense strand
ugacauuaaaccagagaac

SEQ ID NO: 2375071 - RNA, 19 nt, Homo sapiens
  misc_RNA (1)...(19): siRNA sense strand
agaggguggugcagcagaa

SEQ ID NO: 2375072 - RNA, 19 nt, Homo sapiens
  misc_RNA (1)...(19): siRNA sense strand
auugagacauaaagaggau

SEQ ID NO: 2375073 - RNA, 19 nt, Homo sapiens
  misc_RNA (1)...(19): siRNA sense strand
agaucuauucaaugggaga

SEQ ID NO: 2375074 - RNA, 19 nt, Homo sapiens
  misc_RNA (1)...(19): siRNA sense strand
gaugaaauccgguugcuga

SEQ ID NO: 2375075 - RNA, 19 nt, Homo sapiens
  misc_RNA (1)...(19): siRNA sense strand
caacagaauggcagcgauc

SEQ ID NO: 2375076 - RNA, 19 nt, Homo sapiens
  misc_RNA (1)...(19): siRNA sense strand
gagugauugaagucauuaa

SEQ ID NO: 2375077 - RNA, 19 nt, Homo sapiens
  misc_RNA (1)...(19): siRNA sense strand
aaauugaagaagaagcaga

SEQ ID NO: 2375078 - RNA, 19 nt, Homo sapiens
  misc_RNA (1)...(19): siRNA sense strand
ccaagaaggacaaagccca

SEQ ID NO: 2375079 - RNA, 19 nt, Homo sapiens
  misc_RNA (1)...(19): siRNA sense strand
cccuaaugauccaaauaga

SEQ ID NO: 2375080 - RNA, 19 nt, Homo sapiens
  misc_RNA (1)...(19): siRNA sense strand
ccaaacaagcaagaagaau

SEQ ID NO: 2375081 - RNA, 19 nt, Homo sapiens
  misc_RNA (1)...(19): siRNA sense strand
ggaacgugauacagagggu

SEQ ID NO: 2375082 - RNA, 19 nt, Homo sapiens
  misc_RNA (1)...(19): siRNA sense strand
gggaacaguacaugggaau

SEQ ID NO: 2375083 - RNA, 19 nt, Homo sapiens
  misc_RNA (1)...(19): siRNA sense strand
gaauaagagcauugggcca

SEQ ID NO: 2375084 - RNA, 19 nt, Homo sapiens
  misc_RNA (1)...(19): siRNA sense strand
aguuugaggaagaggccaa

SEQ ID NO: 2375085 - RNA, 19 nt, Homo sapiens
  misc_RNA (1)...(19): siRNA sense strand
ucucggaagcagaggaaca

SEQ ID NO: 2375086 - RNA, 19 nt, Homo sapiens
  misc_RNA (1)...(19): siRNA sense strand
agauaucggaagaagaaau

SEQ ID NO: 2375087 - RNA, 19 nt, Homo sapiens
  misc_RNA (1)...(19): siRNA sense strand
gggaacagggcuucggaga

SEQ ID NO: 2375088 - RNA, 19 nt, Homo sapiens
  misc_RNA (1)...(19): siRNA sense strand
agcuggaacaauugaauaa

SEQ ID NO: 2375089 - RNA, 19 nt, Homo sapiens
  misc_RNA (1)...(19): siRNA sense strand
ggaugaauuggcagagcuu

SEQ ID NO: 2375090 - RNA, 19 nt, Homo sapiens
  misc_RNA (1)...(19): siRNA sense strand
augaagggauggaggugau

SEQ ID NO: 2375091 - RNA, 19 nt, Homo sapiens
  misc_RNA (1)...(19): siRNA sense strand
gcaagaccagugugggcaa

SEQ ID NO: 2375092 - RNA, 19 nt, Homo sapiens
  misc_RNA (1)...(19): siRNA sense strand
cuacguggcaggagcuaau

SEQ ID NO: 2375093 - RNA, 19 nt, Homo sapiens
  misc_RNA (1)...(19): siRNA sense strand
augaauuggcagagcuuga

SEQ ID NO: 2375094 - RNA, 19 nt, Homo sapiens
  misc_RNA (1)...(19): siRNA sense strand
agggaacaguacaugggaa

SEQ ID NO: 2375095 - RNA, 19 nt, Homo sapiens
  misc_RNA (1)...(19): siRNA sense strand
uguugauugaagauggaua

SEQ ID NO: 2375096 - RNA, 19 nt, Homo sapiens
  misc_RNA (1)...(19): siRNA sense strand
acaaguuccaucagcuaaa

SEQ ID NO: 2375097 - RNA, 19 nt, Homo sapiens
  misc_RNA (1)...(19): siRNA sense strand
cggaagaagaaaucgaaag

SEQ ID NO: 2375098 - RNA, 19 nt, Homo sapiens
  misc_RNA (1)...(19): siRNA sense strand
aggucagcaacgaggagua

SEQ ID NO: 2375099 - RNA, 19 nt, Homo sapiens
  misc_RNA (1)...(19): siRNA sense strand
agaagaaaucgaaaggauc

SEQ ID NO: 2375100 - RNA, 19 nt, Homo sapiens
  misc_RNA (1)...(19): siRNA sense strand
gguacauuugccaggauuu

SEQ ID NO: 2375101 - RNA, 19 nt, Homo sapiens
  misc_RNA (1)...(19): siRNA sense strand
cgauauauugcaggaaaga

SEQ ID NO: 2375102 - RNA, 19 nt, Homo sapiens
  misc_RNA (1)...(19): siRNA sense strand
gcgcuacaggcuugcacua

SEQ ID NO: 2375103 - RNA, 19 nt, Homo sapiens
  misc_RNA (1)...(19): siRNA sense strand
agucauacagucugauuca

SEQ ID NO: 2375104 - RNA, 19 nt, Homo sapiens
  misc_RNA (1)...(19): siRNA sense strand
gggaacaguacaugggaau

SEQ ID NO: 2375105 - RNA, 19 nt, Homo sapiens
  misc_RNA (1)...(19): siRNA sense strand
gaauaagagcauugggcca

SEQ ID NO: 2375106 - RNA, 19 nt, Homo sapiens
  misc_RNA (1)...(19): siRNA sense strand
aguuugaggaagaggccaa

SEQ ID NO: 2375107 - RNA, 19 nt, Homo sapiens
  misc_RNA (1)...(19): siRNA sense strand
ucucggaagcagaggaaca

SEQ ID NO: 2375108 - RNA, 19 nt, Homo sapiens
  misc_RNA (1)...(19): siRNA sense strand
agauaucggaagaagaaau

SEQ ID NO: 2375109 - RNA, 19 nt, Homo sapiens
  misc_RNA (1)...(19): siRNA sense strand
gggaacagggcuucggaga

SEQ ID NO: 2375110 - RNA, 19 nt, Homo sapiens
  misc_RNA (1)...(19): siRNA sense strand
agcuggaacaauugaauaa

SEQ ID NO: 2375111 - RNA, 19 nt, Homo sapiens
  misc_RNA (1)...(19): siRNA sense strand
ggaugaauuggcagagcuu

SEQ ID NO: 2375112 - RNA, 19 nt, Homo sapiens
  misc_RNA (1)...(19): siRNA sense strand
augaagggauggaggugau

SEQ ID NO: 2375113 - RNA, 19 nt, Homo sapiens
  misc_RNA (1)...(19): siRNA sense strand
gcaagaccagugugggcaa

SEQ ID NO: 2375114 - RNA, 19 nt, Homo sapiens
  misc_RNA (1)...(19): siRNA sense strand
cuacguggcaggagcuaau

SEQ ID NO: 2375115 - RNA, 19 nt, Homo sapiens
  misc_RNA (1)...(19): siRNA sense strand
augaauuggcagagcuuga

SEQ ID NO: 2375116 - RNA, 19 nt, Homo sapiens
  misc_RNA (1)...(19): siRNA sense strand
agggaacaguacaugggaa

SEQ ID NO: 2375117 - RNA, 19 nt, Homo sapiens
  misc_RNA (1)...(19): siRNA sense strand
uguugauugaagauggaua

SEQ ID NO: 2375118 - RNA, 19 nt, Homo sapiens
  misc_RNA (1)...(19): siRNA sense strand
acaaguuccaucagcuaaa

SEQ ID NO: 2375119 - RNA, 19 nt, Homo sapiens
  misc_RNA (1)...(19): siRNA sense strand
cggaagaagaaaucgaaag

SEQ ID NO: 2375120 - RNA, 19 nt, Homo sapiens
  misc_RNA (1)...(19): siRNA sense strand
aggucagcaacgaggagua

SEQ ID NO: 2375121 - RNA, 19 nt, Homo sapiens
  misc_RNA (1)...(19): siRNA sense strand
agaagaaaucgaaaggauc

SEQ ID NO: 2375122 - RNA, 19 nt, Homo sapiens
  misc_RNA (1)...(19): siRNA sense strand
gguacauuugccaggauuu

SEQ ID NO: 2375123 - RNA, 19 nt, Homo sapiens
  misc_RNA (1)...(19): siRNA sense strand
cgauauauugcaggaaaga

SEQ ID NO: 2375124 - RNA, 19 nt, Homo sapiens
  misc_RNA (1)...(19): siRNA sense strand
gcgcuacaggcuugcacua

SEQ ID NO: 2375125 - RNA, 19 nt, Homo sapiens
  misc_RNA (1)...(19): siRNA sense strand
agucauacagucugauuca

SEQ ID NO: 2375126 - RNA, 19 nt, Homo sapiens
  misc_RNA (1)...(19): siRNA sense strand
gggaacaguacaugggaau

SEQ ID NO: 2375127 - RNA, 19 nt, Homo sapiens
  misc_RNA (1)...(19): siRNA sense strand
gaauaagagcauugggcca

SEQ ID NO: 2375128 - RNA, 19 nt, Homo sapiens
  misc_RNA (1)...(19): siRNA sense strand
aguuugaggaagaggccaa

SEQ ID NO: 2375129 - RNA, 19 nt, Homo sapiens
  misc_RNA (1)...(19): siRNA sense strand
ucucggaagcagaggaaca

SEQ ID NO: 2375130 - RNA, 19 nt, Homo sapiens
  misc_RNA (1)...(19): siRNA sense strand
agauaucggaagaagaaau

SEQ ID NO: 2375131 - RNA, 19 nt, Homo sapiens
  misc_RNA (1)...(19): siRNA sense strand
gggaacagggcuucggaga

SEQ ID NO: 2375132 - RNA, 19 nt, Homo sapiens
  misc_RNA (1)...(19): siRNA sense strand
agcuggaacaauugaauaa

SEQ ID NO: 2375133 - RNA, 19 nt, Homo sapiens
  misc_RNA (1)...(19): siRNA sense strand
ggaugaauuggcagagcuu

SEQ ID NO: 2375134 - RNA, 19 nt, Homo sapiens
  misc_RNA (1)...(19): siRNA sense strand
augaagggauggaggugau

SEQ ID NO: 2375135 - RNA, 19 nt, Homo sapiens
  misc_RNA (1)...(19): siRNA sense strand
gcaagaccagugugggcaa

SEQ ID NO: 2375136 - RNA, 19 nt, Homo sapiens
  misc_RNA (1)...(19): siRNA sense strand
cuacguggcaggagcuaau

SEQ ID NO: 2375137 - RNA, 19 nt, Homo sapiens
  misc_RNA (1)...(19): siRNA sense strand
augaauuggcagagcuuga

SEQ ID NO: 2375138 - RNA, 19 nt, Homo sapiens
  misc_RNA (1)...(19): siRNA sense strand
agggaacaguacaugggaa

SEQ ID NO: 2375139 - RNA, 19 nt, Homo sapiens
  misc_RNA (1)...(19): siRNA sense strand
uguugauugaagauggaua

SEQ ID NO: 2375140 - RNA, 19 nt, Homo sapiens
  misc_RNA (1)...(19): siRNA sense strand
acaaguuccaucagcuaaa

SEQ ID NO: 2375141 - RNA, 19 nt, Homo sapiens
  misc_RNA (1)...(19): siRNA sense strand
cggaagaagaaaucgaaag

SEQ ID NO: 2375142 - RNA, 19 nt, Homo sapiens
  misc_RNA (1)...(19): siRNA sense strand
aggucagcaacgaggagua

SEQ ID NO: 2375143 - RNA, 19 nt, Homo sapiens
  misc_RNA (1)...(19): siRNA sense strand
agaagaaaucgaaaggauc

SEQ ID NO: 2375144 - RNA, 19 nt, Homo sapiens
  misc_RNA (1)...(19): siRNA sense strand
gguacauuugccaggauuu

SEQ ID NO: 2375145 - RNA, 19 nt, Homo sapiens
  misc_RNA (1)...(19): siRNA sense strand
cgauauauugcaggaaaga

SEQ ID NO: 2375146 - RNA, 19 nt, Homo sapiens
  misc_RNA (1)...(19): siRNA sense strand
gcgcuacaggcuugcacua

SEQ ID NO: 2375147 - RNA, 19 nt, Homo sapiens
  misc_RNA (1)...(19): siRNA sense strand
agucauacagucugauuca

SEQ ID NO: 2375148 - RNA, 19 nt, Homo sapiens
  misc_RNA (1)...(19): siRNA sense strand
cagugaaagccaagcauaa

SEQ ID NO: 2375149 - RNA, 19 nt, Homo sapiens
  misc_RNA (1)...(19): siRNA sense strand
aggugaaguccuagauaaa

SEQ ID NO: 2375150 - RNA, 19 nt, Homo sapiens
  misc_RNA (1)...(19): siRNA sense strand
gaaugaaaguugagcagga

SEQ ID NO: 2375151 - RNA, 19 nt, Homo sapiens
  misc_RNA (1)...(19): siRNA sense strand
aagcauaaacacagaagua

SEQ ID NO: 2375152 - RNA, 19 nt, Homo sapiens
  misc_RNA (1)...(19): siRNA sense strand
agacuuugauguagaggaa

SEQ ID NO: 2375153 - RNA, 19 nt, Homo sapiens
  misc_RNA (1)...(19): siRNA sense strand
cuaauagaacagagaagaa

SEQ ID NO: 2375154 - RNA, 19 nt, Homo sapiens
  misc_RNA (1)...(19): siRNA sense strand
agaaaguacaccagcuaaa

SEQ ID NO: 2375155 - RNA, 19 nt, Homo sapiens
  misc_RNA (1)...(19): siRNA sense strand
agaaauggaaauaggucua

SEQ ID NO: 2375156 - RNA, 19 nt, Homo sapiens
  misc_RNA (1)...(19): siRNA sense strand
ccucaguagacgugaaaga

SEQ ID NO: 2375157 - RNA, 19 nt, Homo sapiens
  misc_RNA (1)...(19): siRNA sense strand
agaucuaagcagagcaaau

SEQ ID NO: 2375158 - RNA, 19 nt, Homo sapiens
  misc_RNA (1)...(19): siRNA sense strand
ugacaguugaacagaauaa

SEQ ID NO: 2375159 - RNA, 19 nt, Homo sapiens
  misc_RNA (1)...(19): siRNA sense strand
ggguaugucuccagcaaaa

SEQ ID NO: 2375160 - RNA, 19 nt, Homo sapiens
  misc_RNA (1)...(19): siRNA sense strand
augaguuaauggaaggaaa

SEQ ID NO: 2375161 - RNA, 19 nt, Homo sapiens
  misc_RNA (1)...(19): siRNA sense strand
acgaaggagcagaagcaaa

SEQ ID NO: 2375162 - RNA, 19 nt, Homo sapiens
  misc_RNA (1)...(19): siRNA sense strand
aaguaagucucaagaucaa

SEQ ID NO: 2375163 - RNA, 19 nt, Homo sapiens
  misc_RNA (1)...(19): siRNA sense strand
gcaagucaaaggagaggaa

SEQ ID NO: 2375164 - RNA, 19 nt, Homo sapiens
  misc_RNA (1)...(19): siRNA sense strand
agguaaauccaaagacaga

SEQ ID NO: 2375165 - RNA, 19 nt, Homo sapiens
  misc_RNA (1)...(19): siRNA sense strand
caguagacgugaaagauca

SEQ ID NO: 2375166 - RNA, 19 nt, Homo sapiens
  misc_RNA (1)...(19): siRNA sense strand
acuuugauguagaggaaga

SEQ ID NO: 2375167 - RNA, 19 nt, Homo sapiens
  misc_RNA (1)...(19): siRNA sense strand
uguacgagccagagauaau

SEQ ID NO: 2375168 - RNA, 19 nt, Homo sapiens
  misc_RNA (1)...(19): siRNA sense strand
cuacugaugauaagguuaa

SEQ ID NO: 2375169 - RNA, 19 nt, Homo sapiens
  misc_RNA (1)...(19): siRNA sense strand
ggguauugaaaucguuaaa

SEQ ID NO: 2375170 - RNA, 19 nt, Homo sapiens
  misc_RNA (1)...(19): siRNA sense strand
ccuugaagacuuugaugua

SEQ ID NO: 2375171 - RNA, 19 nt, Homo sapiens
  misc_RNA (1)...(19): siRNA sense strand
cuacaaagaaacgaaguaa

SEQ ID NO: 2375172 - RNA, 19 nt, Homo sapiens
  misc_RNA (1)...(19): siRNA sense strand
gaucaagcaaggaaaucaa

SEQ ID NO: 2375173 - RNA, 19 nt, Homo sapiens
  misc_RNA (1)...(19): siRNA sense strand
aagucaaaggagaggaaaa

SEQ ID NO: 2375174 - RNA, 19 nt, Homo sapiens
  misc_RNA (1)...(19): siRNA sense strand
agaagaagacaaggauaaa

SEQ ID NO: 2375175 - RNA, 19 nt, Homo sapiens
  misc_RNA (1)...(19): siRNA sense strand
ccaagaagaagaagcagau

SEQ ID NO: 2375176 - RNA, 19 nt, Homo sapiens
  misc_RNA (1)...(19): siRNA sense strand
cagagauggaagaugcuaa

SEQ ID NO: 2375177 - RNA, 19 nt, Homo sapiens
  misc_RNA (1)...(19): siRNA sense strand
accaagaaguggcuguaaa

SEQ ID NO: 2375178 - RNA, 19 nt, Homo sapiens
  misc_RNA (1)...(19): siRNA sense strand
aaucccaaccucagagaua

SEQ ID NO: 2375179 - RNA, 19 nt, Homo sapiens
  misc_RNA (1)...(19): siRNA sense strand
ccucagaagaagacaagga

SEQ ID NO: 2375180 - RNA, 19 nt, Homo sapiens
  misc_RNA (1)...(19): siRNA sense strand
agaaagaaaacgacgagaa

SEQ ID NO: 2375181 - RNA, 19 nt, Homo sapiens
  misc_RNA (1)...(19): siRNA sense strand
gcuauuaucgugugaacau

SEQ ID NO: 2375182 - RNA, 19 nt, Homo sapiens
  misc_RNA (1)...(19): siRNA sense strand
aaguagaagucgcgaucga

SEQ ID NO: 2375183 - RNA, 19 nt, Homo sapiens
  misc_RNA (1)...(19): siRNA sense strand
agagguaaauccaaagaca

SEQ ID NO: 2375184 - RNA, 19 nt, Homo sapiens
  misc_RNA (1)...(19): siRNA sense strand
ccgaagaagaaguagaucu

SEQ ID NO: 2375185 - RNA, 19 nt, Homo sapiens
  misc_RNA (1)...(19): siRNA sense strand
auguagaggaagaagauga

SEQ ID NO: 2375186 - RNA, 19 nt, Homo sapiens
  misc_RNA (1)...(19): siRNA sense strand
aagcuaugacuaugguaua

SEQ ID NO: 2375187 - RNA, 19 nt, Homo sapiens
  misc_RNA (1)...(19): siRNA sense strand
ucaaaggaaagaugccaaa

SEQ ID NO: 2375188 - RNA, 19 nt, Homo sapiens
  misc_RNA (1)...(19): siRNA sense strand
ucagaagaagacaaggaua

SEQ ID NO: 2375189 - RNA, 19 nt, Homo sapiens
  misc_RNA (1)...(19): siRNA sense strand
gauaaugaguuaauggaag

SEQ ID NO: 2375190 - RNA, 19 nt, Homo sapiens
  misc_RNA (1)...(19): siRNA sense strand
agacgaaggagcagaagca

SEQ ID NO: 2375191 - RNA, 19 nt, Homo sapiens
  misc_RNA (1)...(19): siRNA sense strand
gcaauggaucucaaaggaa

SEQ ID NO: 2375192 - RNA, 19 nt, Homo sapiens
  misc_RNA (1)...(19): siRNA sense strand
cuaaggaccuguuggcuga

SEQ ID NO: 2375193 - RNA, 19 nt, Homo sapiens
  misc_RNA (1)...(19): siRNA sense strand
ucuccaacccgaagaagaa

SEQ ID NO: 2375194 - RNA, 19 nt, Homo sapiens
  misc_RNA (1)...(19): siRNA sense strand
cuucugauaaagaggguau

SEQ ID NO: 2375195 - RNA, 19 nt, Homo sapiens
  misc_RNA (1)...(19): siRNA sense strand
gcuucaucugggaaagaaa

SEQ ID NO: 2375196 - RNA, 19 nt, Homo sapiens
  misc_RNA (1)...(19): siRNA sense strand
augauaaccuugaagacuu

SEQ ID NO: 2375197 - RNA, 19 nt, Homo sapiens
  misc_RNA (1)...(19): siRNA sense strand
cagaagaaguuguuggcac

SEQ ID NO: 2375198 - RNA, 19 nt, Homo sapiens
  misc_RNA (1)...(19): siRNA sense strand
agccagagauaaugcaaga

SEQ ID NO: 2375199 - RNA, 19 nt, Homo sapiens
  misc_RNA (1)...(19): siRNA sense strand
aguaacagagagggagaaa

SEQ ID NO: 2375200 - RNA, 19 nt, Homo sapiens
  misc_RNA (1)...(19): siRNA sense strand
ucuaaaagcccauccaaaa

SEQ ID NO: 2375201 - RNA, 19 nt, Homo sapiens
  misc_RNA (1)...(19): siRNA sense strand
agagauaaugcaagagcca

SEQ ID NO: 2375202 - RNA, 19 nt, Homo sapiens
  misc_RNA (1)...(19): siRNA sense strand
agguaaaagcuaugacuau

SEQ ID NO: 2375203 - RNA, 19 nt, Homo sapiens
  misc_RNA (1)...(19): siRNA sense strand
auaaaguaacagagaggga

SEQ ID NO: 2375204 - RNA, 19 nt, Homo sapiens
  misc_RNA (1)...(19): siRNA sense strand
cagugaaagccaagcauaa

SEQ ID NO: 2375205 - RNA, 19 nt, Homo sapiens
  misc_RNA (1)...(19): siRNA sense strand
aggugaaguccuagauaaa

SEQ ID NO: 2375206 - RNA, 19 nt, Homo sapiens
  misc_RNA (1)...(19): siRNA sense strand
gaaugaaaguugagcagga

SEQ ID NO: 2375207 - RNA, 19 nt, Homo sapiens
  misc_RNA (1)...(19): siRNA sense strand
aagcauaaacacagaagua

SEQ ID NO: 2375208 - RNA, 19 nt, Homo sapiens
  misc_RNA (1)...(19): siRNA sense strand
agacuuugauguagaggaa

SEQ ID NO: 2375209 - RNA, 19 nt, Homo sapiens
  misc_RNA (1)...(19): siRNA sense strand
cuaauagaacagagaagaa

SEQ ID NO: 2375210 - RNA, 19 nt, Homo sapiens
  misc_RNA (1)...(19): siRNA sense strand
agaaaguacaccagcuaaa

SEQ ID NO: 2375211 - RNA, 19 nt, Homo sapiens
  misc_RNA (1)...(19): siRNA sense strand
agaaauggaaauaggucua

SEQ ID NO: 2375212 - RNA, 19 nt, Homo sapiens
  misc_RNA (1)...(19): siRNA sense strand
ccucaguagacgugaaaga

SEQ ID NO: 2375213 - RNA, 19 nt, Homo sapiens
  misc_RNA (1)...(19): siRNA sense strand
agaucuaagcagagcaaau

SEQ ID NO: 2375214 - RNA, 19 nt, Homo sapiens
  misc_RNA (1)...(19): siRNA sense strand
ugacaguugaacagaauaa

SEQ ID NO: 2375215 - RNA, 19 nt, Homo sapiens
  misc_RNA (1)...(19): siRNA sense strand
ggguaugucuccagcaaaa

SEQ ID NO: 2375216 - RNA, 19 nt, Homo sapiens
  misc_RNA (1)...(19): siRNA sense strand
augaguuaauggaaggaaa

SEQ ID NO: 2375217 - RNA, 19 nt, Homo sapiens
  misc_RNA (1)...(19): siRNA sense strand
acgaaggagcagaagcaaa

SEQ ID NO: 2375218 - RNA, 19 nt, Homo sapiens
  misc_RNA (1)...(19): siRNA sense strand
aaguaagucucaagaucaa

SEQ ID NO: 2375219 - RNA, 19 nt, Homo sapiens
  misc_RNA (1)...(19): siRNA sense strand
gcaagucaaaggagaggaa

SEQ ID NO: 2375220 - RNA, 19 nt, Homo sapiens
  misc_RNA (1)...(19): siRNA sense strand
agguaaauccaaagacaga

SEQ ID NO: 2375221 - RNA, 19 nt, Homo sapiens
  misc_RNA (1)...(19): siRNA sense strand
caguagacgugaaagauca

SEQ ID NO: 2375222 - RNA, 19 nt, Homo sapiens
  misc_RNA (1)...(19): siRNA sense strand
acuuugauguagaggaaga

SEQ ID NO: 2375223 - RNA, 19 nt, Homo sapiens
  misc_RNA (1)...(19): siRNA sense strand
uguacgagccagagauaau

SEQ ID NO: 2375224 - RNA, 19 nt, Homo sapiens
  misc_RNA (1)...(19): siRNA sense strand
cuacugaugauaagguuaa

SEQ ID NO: 2375225 - RNA, 19 nt, Homo sapiens
  misc_RNA (1)...(19): siRNA sense strand
ggguauugaaaucguuaaa

SEQ ID NO: 2375226 - RNA, 19 nt, Homo sapiens
  misc_RNA (1)...(19): siRNA sense strand
ccuugaagacuuugaugua

SEQ ID NO: 2375227 - RNA, 19 nt, Homo sapiens
  misc_RNA (1)...(19): siRNA sense strand
cuacaaagaaacgaaguaa

SEQ ID NO: 2375228 - RNA, 19 nt, Homo sapiens
  misc_RNA (1)...(19): siRNA sense strand
gaucaagcaaggaaaucaa

SEQ ID NO: 2375229 - RNA, 19 nt, Homo sapiens
  misc_RNA (1)...(19): siRNA sense strand
aagucaaaggagaggaaaa

SEQ ID NO: 2375230 - RNA, 19 nt, Homo sapiens
  misc_RNA (1)...(19): siRNA sense strand
agaagaagacaaggauaaa

SEQ ID NO: 2375231 - RNA, 19 nt, Homo sapiens
  misc_RNA (1)...(19): siRNA sense strand
ccaagaagaagaagcagau

SEQ ID NO: 2375232 - RNA, 19 nt, Homo sapiens
  misc_RNA (1)...(19): siRNA sense strand
cagagauggaagaugcuaa

SEQ ID NO: 2375233 - RNA, 19 nt, Homo sapiens
  misc_RNA (1)...(19): siRNA sense strand
accaagaaguggcuguaaa

SEQ ID NO: 2375234 - RNA, 19 nt, Homo sapiens
  misc_RNA (1)...(19): siRNA sense strand
aaucccaaccucagagaua

SEQ ID NO: 2375235 - RNA, 19 nt, Homo sapiens
  misc_RNA (1)...(19): siRNA sense strand
ccucagaagaagacaagga

SEQ ID NO: 2375236 - RNA, 19 nt, Homo sapiens
  misc_RNA (1)...(19): siRNA sense strand
agaaagaaaacgacgagaa

SEQ ID NO: 2375237 - RNA, 19 nt, Homo sapiens
  misc_RNA (1)...(19): siRNA sense strand
gcuauuaucgugugaacau

SEQ ID NO: 2375238 - RNA, 19 nt, Homo sapiens
  misc_RNA (1)...(19): siRNA sense strand
aaguagaagucgcgaucga

SEQ ID NO: 2375239 - RNA, 19 nt, Homo sapiens
  misc_RNA (1)...(19): siRNA sense strand
agagguaaauccaaagaca

SEQ ID NO: 2375240 - RNA, 19 nt, Homo sapiens
  misc_RNA (1)...(19): siRNA sense strand
ccgaagaagaaguagaucu

SEQ ID NO: 2375241 - RNA, 19 nt, Homo sapiens
  misc_RNA (1)...(19): siRNA sense strand
auguagaggaagaagauga

SEQ ID NO: 2375242 - RNA, 19 nt, Homo sapiens
  misc_RNA (1)...(19): siRNA sense strand
aagcuaugacuaugguaua

SEQ ID NO: 2375243 - RNA, 19 nt, Homo sapiens
  misc_RNA (1)...(19): siRNA sense strand
ucaaaggaaagaugccaaa

SEQ ID NO: 2375244 - RNA, 19 nt, Homo sapiens
  misc_RNA (1)...(19): siRNA sense strand
ucagaagaagacaaggaua

SEQ ID NO: 2375245 - RNA, 19 nt, Homo sapiens
  misc_RNA (1)...(19): siRNA sense strand
gauaaugaguuaauggaag

SEQ ID NO: 2375246 - RNA, 19 nt, Homo sapiens
  misc_RNA (1)...(19): siRNA sense strand
agacgaaggagcagaagca

SEQ ID NO: 2375247 - RNA, 19 nt, Homo sapiens
  misc_RNA (1)...(19): siRNA sense strand
gcaauggaucucaaaggaa

SEQ ID NO: 2375248 - RNA, 19 nt, Homo sapiens
  misc_RNA (1)...(19): siRNA sense strand
cuaaggaccuguuggcuga

SEQ ID NO: 2375249 - RNA, 19 nt, Homo sapiens
  misc_RNA (1)...(19): siRNA sense strand
ucuccaacccgaagaagaa

SEQ ID NO: 2375250 - RNA, 19 nt, Homo sapiens
  misc_RNA (1)...(19): siRNA sense strand
cuucugauaaagaggguau

SEQ ID NO: 2375251 - RNA, 19 nt, Homo sapiens
  misc_RNA (1)...(19): siRNA sense strand
gcuucaucugggaaagaaa

SEQ ID NO: 2375252 - RNA, 19 nt, Homo sapiens
  misc_RNA (1)...(19): siRNA sense strand
augauaaccuugaagacuu

SEQ ID NO: 2375253 - RNA, 19 nt, Homo sapiens
  misc_RNA (1)...(19): siRNA sense strand
cagaagaaguuguuggcac

SEQ ID NO: 2375254 - RNA, 19 nt, Homo sapiens
  misc_RNA (1)...(19): siRNA sense strand
agccagagauaaugcaaga

SEQ ID NO: 2375255 - RNA, 19 nt, Homo sapiens
  misc_RNA (1)...(19): siRNA sense strand
aguaacagagagggagaaa

SEQ ID NO: 2375256 - RNA, 19 nt, Homo sapiens
  misc_RNA (1)...(19): siRNA sense strand
ucuaaaagcccauccaaaa

SEQ ID NO: 2375257 - RNA, 19 nt, Homo sapiens
  misc_RNA (1)...(19): siRNA sense strand
agagauaaugcaagagcca

SEQ ID NO: 2375258 - RNA, 19 nt, Homo sapiens
  misc_RNA (1)...(19): siRNA sense strand
agguaaaagcuaugacuau

SEQ ID NO: 2375259 - RNA, 19 nt, Homo sapiens
  misc_RNA (1)...(19): siRNA sense strand
auaaaguaacagagaggga

SEQ ID NO: 2375260 - RNA, 19 nt, Homo sapiens
  misc_RNA (1)...(19): siRNA sense strand
ccaauaggauuuauggcaa

SEQ ID NO: 2375261 - RNA, 19 nt, Homo sapiens
  misc_RNA (1)...(19): siRNA sense strand
ggaguaagccagacgcuga

SEQ ID NO: 2375262 - RNA, 19 nt, Homo sapiens
  misc_RNA (1)...(19): siRNA sense strand
uaucaggacuugagggaug

SEQ ID NO: 2375263 - RNA, 19 nt, Homo sapiens
  misc_RNA (1)...(19): siRNA sense strand
caacccaggugguccgcaa

SEQ ID NO: 2375264 - RNA, 19 nt, Homo sapiens
  misc_RNA (1)...(19): siRNA sense strand
uuucagaacagaagggcca

SEQ ID NO: 2375265 - RNA, 19 nt, Homo sapiens
  misc_RNA (1)...(19): siRNA sense strand
gggcagggaguaagccaga

SEQ ID NO: 2375266 - RNA, 19 nt, Homo sapiens
  misc_RNA (1)...(19): siRNA sense strand
agccagacgcugagagcca

SEQ ID NO: 2375267 - RNA, 19 nt, Homo sapiens
  misc_RNA (1)...(19): siRNA sense strand
caauaggauuuauggcaac

SEQ ID NO: 2375268 - RNA, 19 nt, Homo sapiens
  misc_RNA (1)...(19): siRNA sense strand
caggaagcaguguaggcua

SEQ ID NO: 2375269 - RNA, 19 nt, Homo sapiens
  misc_RNA (1)...(19): siRNA sense strand
caugcagggcagggaguaa

SEQ ID NO: 2375270 - RNA, 19 nt, Homo sapiens
  misc_RNA (1)...(19): siRNA sense strand
ggagaaacuucguggagca

SEQ ID NO: 2375271 - RNA, 19 nt, Homo sapiens
  misc_RNA (1)...(19): siRNA sense strand
guucaaaccuuauggcgua

SEQ ID NO: 2375272 - RNA, 19 nt, Homo sapiens
  misc_RNA (1)...(19): siRNA sense strand
cuguagagccagaggaguu

SEQ ID NO: 2375273 - RNA, 19 nt, Homo sapiens
  misc_RNA (1)...(19): siRNA sense strand
uggcaagaacugagcuaca

SEQ ID NO: 2375274 - RNA, 19 nt, Homo sapiens
  misc_RNA (1)...(19): siRNA sense strand
gcaaagacgggcuaggcau

SEQ ID NO: 2375275 - RNA, 19 nt, Homo sapiens
  misc_RNA (1)...(19): siRNA sense strand
gaauauauguguguggaca

SEQ ID NO: 2375276 - RNA, 19 nt, Homo sapiens
  misc_RNA (1)...(19): siRNA sense strand
gagccagaggaguugcaaa

SEQ ID NO: 2375277 - RNA, 19 nt, Homo sapiens
  misc_RNA (1)...(19): siRNA sense strand
gggccagagccuacgugaa

SEQ ID NO: 2375278 - RNA, 19 nt, Homo sapiens
  misc_RNA (1)...(19): siRNA sense strand
gaaaaguucucuaugguga

SEQ ID NO: 2375279 - RNA, 19 nt, Homo sapiens
  misc_RNA (1)...(19): siRNA sense strand
guagauaacaaguccgguu

SEQ ID NO: 2375280 - RNA, 19 nt, Homo sapiens
  misc_RNA (1)...(19): siRNA sense strand
ccggagugacccagguaga

SEQ ID NO: 2375281 - RNA, 19 nt, Homo sapiens
  misc_RNA (1)...(19): siRNA sense strand
acauuugccuguagagcca

SEQ ID NO: 2375282 - RNA, 19 nt, Homo sapiens
  misc_RNA (1)...(19): siRNA sense strand
gaucugguccuuaagggaa

SEQ ID NO: 2375283 - RNA, 19 nt, Homo sapiens
  misc_RNA (1)...(19): siRNA sense strand
ggaucagagagcagagaga

SEQ ID NO: 2375284 - RNA, 19 nt, Homo sapiens
  misc_RNA (1)...(19): siRNA sense strand
ggcuagaauuggaaguaca

SEQ ID NO: 2375285 - RNA, 19 nt, Homo sapiens
  misc_RNA (1)...(19): siRNA sense strand
acucaaguuaaacgagaua

SEQ ID NO: 2375286 - RNA, 19 nt, Homo sapiens
  misc_RNA (1)...(19): siRNA sense strand
aguuaaacgagauaugcaa

SEQ ID NO: 2375287 - RNA, 19 nt, Homo sapiens
  misc_RNA (1)...(19): siRNA sense strand
gauaaaacagggaagaaca

SEQ ID NO: 2375288 - RNA, 19 nt, Homo sapiens
  misc_RNA (1)...(19): siRNA sense strand
uuuuauuggacuugggaaa

SEQ ID NO: 2375289 - RNA, 19 nt, Homo sapiens
  misc_RNA (1)...(19): siRNA sense strand
agacucaaguuaaacgaga

SEQ ID NO: 2375290 - RNA, 19 nt, Homo sapiens
  misc_RNA (1)...(19): siRNA sense strand
gaagauuuguauuugggau

SEQ ID NO: 2375291 - RNA, 19 nt, Homo sapiens
  misc_RNA (1)...(19): siRNA sense strand
aucagagagcagagagaau

SEQ ID NO: 2375292 - RNA, 19 nt, Homo sapiens
  misc_RNA (1)...(19): siRNA sense strand
cuucauaaagaacaaggaa

SEQ ID NO: 2375293 - RNA, 19 nt, Homo sapiens
  misc_RNA (1)...(19): siRNA sense strand
ugagcugguuuaaaggcaa

SEQ ID NO: 2375294 - RNA, 19 nt, Homo sapiens
  misc_RNA (1)...(19): siRNA sense strand
ugguuuaaaggcaaagaau

SEQ ID NO: 2375295 - RNA, 19 nt, Homo sapiens
  misc_RNA (1)...(19): siRNA sense strand
acgagauaugcaagugaau

SEQ ID NO: 2375296 - RNA, 19 nt, Homo sapiens
  misc_RNA (1)...(19): siRNA sense strand
gggugggaaccuaaauuau

SEQ ID NO: 2375297 - RNA, 19 nt, Homo sapiens
  misc_RNA (1)...(19): siRNA sense strand
ucacgauccugcugggaga

SEQ ID NO: 2375298 - RNA, 19 nt, Homo sapiens
  misc_RNA (1)...(19): siRNA sense strand
guaccuacgccaagcccua

SEQ ID NO: 2375299 - RNA, 19 nt, Homo sapiens
  misc_RNA (1)...(19): siRNA sense strand
agucggugcugcugggcau

SEQ ID NO: 2375300 - RNA, 19 nt, Homo sapiens
  misc_RNA (1)...(19): siRNA sense strand
ccgcaucugaagaggaguu

SEQ ID NO: 2375301 - RNA, 19 nt, Homo sapiens
  misc_RNA (1)...(19): siRNA sense strand
cggacgaggaggaggaaca

SEQ ID NO: 2375302 - RNA, 19 nt, Homo sapiens
  misc_RNA (1)...(19): siRNA sense strand
aaguauugguggaguguga

SEQ ID NO: 2375303 - RNA, 19 nt, Homo sapiens
  misc_RNA (1)...(19): siRNA sense strand
agucaaaagaagcaagaaa

SEQ ID NO: 2375304 - RNA, 19 nt, Homo sapiens
  misc_RNA (1)...(19): siRNA sense strand
guguacagccagagcaaga

SEQ ID NO: 2375305 - RNA, 19 nt, Homo sapiens
  misc_RNA (1)...(19): siRNA sense strand
gcgacauguugguagaaaa

SEQ ID NO: 2375306 - RNA, 19 nt, Homo sapiens
  misc_RNA (1)...(19): siRNA sense strand
ucgagauguuggagcagaa

SEQ ID NO: 2375307 - RNA, 19 nt, Homo sapiens
  misc_RNA (1)...(19): siRNA sense strand
gggcuguguuauugcagaa

SEQ ID NO: 2375308 - RNA, 19 nt, Homo sapiens
  misc_RNA (1)...(19): siRNA sense strand
aggaggaggaacagaaaca

SEQ ID NO: 2375309 - RNA, 19 nt, Homo sapiens
  misc_RNA (1)...(19): siRNA sense strand
aagcagagacagggauuaa

SEQ ID NO: 2375310 - RNA, 19 nt, Homo sapiens
  misc_RNA (1)...(19): siRNA sense strand
ccaaugagaucguagccau

SEQ ID NO: 2375311 - RNA, 19 nt, Homo sapiens
  misc_RNA (1)...(19): siRNA sense strand
gugaacaugacgacagauu

SEQ ID NO: 2375312 - RNA, 19 nt, Homo sapiens
  misc_RNA (1)...(19): siRNA sense strand
ccucuaagcacgcuggcua

SEQ ID NO: 2375313 - RNA, 19 nt, Homo sapiens
  misc_RNA (1)...(19): siRNA sense strand
cauacagagucaaggucau

SEQ ID NO: 2375314 - RNA, 19 nt, Homo sapiens
  misc_RNA (1)...(19): siRNA sense strand
cggagagugccgaugacua

SEQ ID NO: 2375315 - RNA, 19 nt, Homo sapiens
  misc_RNA (1)...(19): siRNA sense strand
cgaggaggaggaacagaaa

SEQ ID NO: 2375316 - RNA, 19 nt, Homo sapiens
  misc_RNA (1)...(19): siRNA sense strand
ccgagggacguuuggacaa

SEQ ID NO: 2375317 - RNA, 19 nt, Homo sapiens
  misc_RNA (1)...(19): siRNA sense strand
gagacagggauuaagucaa

SEQ ID NO: 2375318 - RNA, 19 nt, Homo sapiens
  misc_RNA (1)...(19): siRNA sense strand
cguuuggacaaguggucaa

SEQ ID NO: 2375319 - RNA, 19 nt, Homo sapiens
  misc_RNA (1)...(19): siRNA sense strand
cagaauuguuccuggguug

SEQ ID NO: 2375320 - RNA, 19 nt, Homo sapiens
  misc_RNA (1)...(19): siRNA sense strand
acacggugaaccagagcaa

SEQ ID NO: 2375321 - RNA, 19 nt, Homo sapiens
  misc_RNA (1)...(19): siRNA sense strand
acgaggaggaggaacagaa

SEQ ID NO: 2375322 - RNA, 19 nt, Homo sapiens
  misc_RNA (1)...(19): siRNA sense strand
acucaaaagccuaggucuu

SEQ ID NO: 2375323 - RNA, 19 nt, Homo sapiens
  misc_RNA (1)...(19): siRNA sense strand
cugcaagcgucgggugaau

SEQ ID NO: 2375324 - RNA, 19 nt, Homo sapiens
  misc_RNA (1)...(19): siRNA sense strand
ugaccaugaagcagagaca

SEQ ID NO: 2375325 - RNA, 19 nt, Homo sapiens
  misc_RNA (1)...(19): siRNA sense strand
acggugaaccagagcaaaa

SEQ ID NO: 2375326 - RNA, 19 nt, Homo sapiens
  misc_RNA (1)...(19): siRNA sense strand
gcgaaguauugguggagug

SEQ ID NO: 2375327 - RNA, 19 nt, Homo sapiens
  misc_RNA (1)...(19): siRNA sense strand
guauugguggagugugaua

SEQ ID NO: 2375328 - RNA, 19 nt, Homo sapiens
  misc_RNA (1)...(19): siRNA sense strand
cgacagauuuggaagggag

SEQ ID NO: 2375329 - RNA, 19 nt, Homo sapiens
  misc_RNA (1)...(19): siRNA sense strand
gaugcugacaagagaauca

SEQ ID NO: 2375330 - RNA, 19 nt, Homo sapiens
  misc_RNA (1)...(19): siRNA sense strand
ccuaaugcgucgaagcacu

SEQ ID NO: 2375331 - RNA, 19 nt, Homo sapiens
  misc_RNA (1)...(19): siRNA sense strand
ggagaaauacgcaugcuca

SEQ ID NO: 2375332 - RNA, 19 nt, Homo sapiens
  misc_RNA (1)...(19): siRNA sense strand
ccuacuugcaguccagaua

SEQ ID NO: 2375333 - RNA, 19 nt, Homo sapiens
  misc_RNA (1)...(19): siRNA sense strand
acagcaaaguguacagcca

SEQ ID NO: 2375334 - RNA, 19 nt, Homo sapiens
  misc_RNA (1)...(19): siRNA sense strand
aaguguacagccagagcaa

SEQ ID NO: 2375335 - RNA, 19 nt, Homo sapiens
  misc_RNA (1)...(19): siRNA sense strand
acaaagacaacuagguuuu

SEQ ID NO: 2375336 - RNA, 19 nt, Homo sapiens
  misc_RNA (1)...(19): siRNA sense strand
augauauggcccaggugaa

SEQ ID NO: 2375337 - RNA, 19 nt, Homo sapiens
  misc_RNA (1)...(19): siRNA sense strand
ccgaagucuccauacuaaa

SEQ ID NO: 2375338 - RNA, 19 nt, Homo sapiens
  misc_RNA (1)...(19): siRNA sense strand
gaaacuaaaaguagagcca

SEQ ID NO: 2375339 - RNA, 19 nt, Homo sapiens
  misc_RNA (1)...(19): siRNA sense strand
cagaugaccaugaagcaga

SEQ ID NO: 2375340 - RNA, 19 nt, Homo sapiens
  misc_RNA (1)...(19): siRNA sense strand
gggauuaagucaaaagaag

SEQ ID NO: 2375341 - RNA, 19 nt, Homo sapiens
  misc_RNA (1)...(19): siRNA sense strand
ccagcgaaguauuggugga

SEQ ID NO: 2375342 - RNA, 19 nt, Homo sapiens
  misc_RNA (1)...(19): siRNA sense strand
guaagagcgaggagaucga

SEQ ID NO: 2375343 - RNA, 19 nt, Homo sapiens
  misc_RNA (1)...(19): siRNA sense strand
ugaagcagagacagggauu

SEQ ID NO: 2375344 - RNA, 19 nt, Homo sapiens
  misc_RNA (1)...(19): siRNA sense strand
acacggacgaggaggagga

SEQ ID NO: 2375345 - RNA, 19 nt, Homo sapiens
  misc_RNA (1)...(19): siRNA sense strand
cgacaaggucagauugaag

SEQ ID NO: 2375346 - RNA, 19 nt, Homo sapiens
  misc_RNA (1)...(19): siRNA sense strand
aguccaaguccuccagcaa

SEQ ID NO: 2375347 - RNA, 19 nt, Homo sapiens
  misc_RNA (1)...(19): siRNA sense strand
ccauacagagucaagguca

SEQ ID NO: 2375348 - RNA, 19 nt, Homo sapiens
  misc_RNA (1)...(19): siRNA sense strand
ugaccaugaccuuuaacaa

SEQ ID NO: 2375349 - RNA, 19 nt, Homo sapiens
  misc_RNA (1)...(19): siRNA sense strand
aggugaacaugacgacaga

SEQ ID NO: 2375350 - RNA, 19 nt, Homo sapiens
  misc_RNA (1)...(19): siRNA sense strand
caaucgaaacccugaacca

SEQ ID NO: 2375351 - RNA, 19 nt, Homo sapiens
  misc_RNA (1)...(19): siRNA sense strand
accagucaucugugagaaa

SEQ ID NO: 2375352 - RNA, 19 nt, Homo sapiens
  misc_RNA (1)...(19): siRNA sense strand
gagucaguauccagcccaa

SEQ ID NO: 2375353 - RNA, 19 nt, Homo sapiens
  misc_RNA (1)...(19): siRNA sense strand
ggaaguugguguuggccua

SEQ ID NO: 2375354 - RNA, 19 nt, Homo sapiens
  misc_RNA (1)...(19): siRNA sense strand
uugaagaacugaaggcaca

SEQ ID NO: 2375355 - RNA, 19 nt, Homo sapiens
  misc_RNA (1)...(19): siRNA sense strand
agugaugaaaguuggcaaa

SEQ ID NO: 2375356 - RNA, 19 nt, Homo sapiens
  misc_RNA (1)...(19): siRNA sense strand
gagacaucgaggugggaga

SEQ ID NO: 2375357 - RNA, 19 nt, Homo sapiens
  misc_RNA (1)...(19): siRNA sense strand
gagaagaaauacaggaugc

SEQ ID NO: 2375358 - RNA, 19 nt, Homo sapiens
  misc_RNA (1)...(19): siRNA sense strand
gagcaaguauggaaggaag

SEQ ID NO: 2375359 - RNA, 19 nt, Homo sapiens
  misc_RNA (1)...(19): siRNA sense strand
cagcaauucugaacggcuu

SEQ ID NO: 2375360 - RNA, 19 nt, Homo sapiens
  misc_RNA (1)...(19): siRNA sense strand
ugauauuaugagagugaca

SEQ ID NO: 2375361 - RNA, 19 nt, Homo sapiens
  misc_RNA (1)...(19): siRNA sense strand
gggagcagguucuggccau

SEQ ID NO: 2375362 - RNA, 19 nt, Homo sapiens
  misc_RNA (1)...(19): siRNA sense strand
uagaagaaugcgacgccaa

SEQ ID NO: 2375363 - RNA, 19 nt, Homo sapiens
  misc_RNA (1)...(19): siRNA sense strand
cguucgacuucuuggcaga

SEQ ID NO: 2375364 - RNA, 19 nt, Homo sapiens
  misc_RNA (1)...(19): siRNA sense strand
aggacaaggaugcugauau

SEQ ID NO: 2375365 - RNA, 19 nt, Homo sapiens
  misc_RNA (1)...(19): siRNA sense strand
gagagugacacauggcaga

SEQ ID NO: 2375366 - RNA, 19 nt, Homo sapiens
  misc_RNA (1)...(19): siRNA sense strand
aagauaagaaagagggccu

SEQ ID NO: 2375367 - RNA, 19 nt, Homo sapiens
  misc_RNA (1)...(19): siRNA sense strand
augcggagaugcaggaagu

SEQ ID NO: 2375368 - RNA, 19 nt, Homo sapiens
  misc_RNA (1)...(19): siRNA sense strand
ggucaaaccugaaggacga

SEQ ID NO: 2375369 - RNA, 19 nt, Homo sapiens
  misc_RNA (1)...(19): siRNA sense strand
aggcagucuugcugggcau

SEQ ID NO: 2375370 - RNA, 19 nt, Homo sapiens
  misc_RNA (1)...(19): siRNA sense strand
agguacagguaguucugaa

SEQ ID NO: 2375371 - RNA, 19 nt, Homo sapiens
  misc_RNA (1)...(19): siRNA sense strand
ggaggaacaacauggcuga

SEQ ID NO: 2375372 - RNA, 19 nt, Homo sapiens
  misc_RNA (1)...(19): siRNA sense strand
cgucaaggagacacacgaa

SEQ ID NO: 2375373 - RNA, 19 nt, Homo sapiens
  misc_RNA (1)...(19): siRNA sense strand
cgucuuugccugguggaaa

SEQ ID NO: 2375374 - RNA, 19 nt, Homo sapiens
  misc_RNA (1)...(19): siRNA sense strand
ccaaaguucuugaaaggac

SEQ ID NO: 2375375 - RNA, 19 nt, Homo sapiens
  misc_RNA (1)...(19): siRNA sense strand
caccaggcucggaggaaca

SEQ ID NO: 2375376 - RNA, 19 nt, Homo sapiens
  misc_RNA (1)...(19): siRNA sense strand
ggaaagagaccuacggguu

SEQ ID NO: 2375377 - RNA, 19 nt, Homo sapiens
  misc_RNA (1)...(19): siRNA sense strand
cuggagaaacgcagugaau

SEQ ID NO: 2375378 - RNA, 19 nt, Homo sapiens
  misc_RNA (1)...(19): siRNA sense strand
agacagaugccuuggggaa

SEQ ID NO: 2375379 - RNA, 19 nt, Homo sapiens
  misc_RNA (1)...(19): siRNA sense strand
gcuacugaucggaaagaga

SEQ ID NO: 2375380 - RNA, 19 nt, Homo sapiens
  misc_RNA (1)...(19): siRNA sense strand
guguggaacagaagacaga

SEQ ID NO: 2375381 - RNA, 19 nt, Homo sapiens
  misc_RNA (1)...(19): siRNA sense strand
gcaaagcggacuuggagca

SEQ ID NO: 2375382 - RNA, 19 nt, Homo sapiens
  misc_RNA (1)...(19): siRNA sense strand
acuuggagcagaacugaaa

SEQ ID NO: 2375383 - RNA, 19 nt, Homo sapiens
  misc_RNA (1)...(19): siRNA sense strand
uuaucaaauguguggaaca

SEQ ID NO: 2375384 - RNA, 19 nt, Homo sapiens
  misc_RNA (1)...(19): siRNA sense strand
agaccaaaugaguucaaau

SEQ ID NO: 2375385 - RNA, 19 nt, Homo sapiens
  misc_RNA (1)...(19): siRNA sense strand
ggccagaaguggaaagggu

SEQ ID NO: 2375386 - RNA, 19 nt, Homo sapiens
  misc_RNA (1)...(19): siRNA sense strand
ggacagaugcagaagcaga

SEQ ID NO: 2375387 - RNA, 19 nt, Homo sapiens
  misc_RNA (1)...(19): siRNA sense strand
cgggaagaacuguaggaau

SEQ ID NO: 2375388 - RNA, 19 nt, Homo sapiens
  misc_RNA (1)...(19): siRNA sense strand
auucuuggauagaggcaaa

SEQ ID NO: 2375389 - RNA, 19 nt, Homo sapiens
  misc_RNA (1)...(19): siRNA sense strand
cuuugugaucuuugagaaa

SEQ ID NO: 2375390 - RNA, 19 nt, Homo sapiens
  misc_RNA (1)...(19): siRNA sense strand
ggaacuuauugaagaggca

SEQ ID NO: 2375391 - RNA, 19 nt, Homo sapiens
  misc_RNA (1)...(19): siRNA sense strand
gcguugaccaccugagcua

SEQ ID NO: 2375392 - RNA, 19 nt, Homo sapiens
  misc_RNA (1)...(19): siRNA sense strand
aggaauagucacagcuuga

SEQ ID NO: 2375393 - RNA, 19 nt, Homo sapiens
  misc_RNA (1)...(19): siRNA sense strand
ggucuauggcacaacuaaa

SEQ ID NO: 2375394 - RNA, 19 nt, Homo sapiens
  misc_RNA (1)...(19): siRNA sense strand
uugagaaacaccaggucua

SEQ ID NO: 2375395 - RNA, 19 nt, Homo sapiens
  misc_RNA (1)...(19): siRNA sense strand
uuucaagauaagugccaua

SEQ ID NO: 2375396 - RNA, 19 nt, Homo sapiens
  misc_RNA (1)...(19): siRNA sense strand
uugaagaggcauauugcaa

SEQ ID NO: 2375397 - RNA, 19 nt, Homo sapiens
  misc_RNA (1)...(19): siRNA sense strand
cggaagaguaucagaaggu

SEQ ID NO: 2375398 - RNA, 19 nt, Homo sapiens
  misc_RNA (1)...(19): siRNA sense strand
ccaaggagggcuggagcaa

SEQ ID NO: 2375399 - RNA, 19 nt, Homo sapiens
  misc_RNA (1)...(19): siRNA sense strand
aauuggagaaguuggguau

SEQ ID NO: 2375400 - RNA, 19 nt, Homo sapiens
  misc_RNA (1)...(19): siRNA sense strand
aaugggaggauuuggacaa

SEQ ID NO: 2375401 - RNA, 19 nt, Homo sapiens
  misc_RNA (1)...(19): siRNA sense strand
gcgacguggagaaggccua

SEQ ID NO: 2375402 - RNA, 19 nt, Homo sapiens
  misc_RNA (1)...(19): siRNA sense strand
ccacaggggacuucugaaa

SEQ ID NO: 2375403 - RNA, 19 nt, Homo sapiens
  misc_RNA (1)...(19): siRNA sense strand
cuauaaugagcuaugccaa

SEQ ID NO: 2375404 - RNA, 19 nt, Homo sapiens
  misc_RNA (1)...(19): siRNA sense strand
ccucggaagaguaucagaa

SEQ ID NO: 2375405 - RNA, 19 nt, Homo sapiens
  misc_RNA (1)...(19): siRNA sense strand
uugugaucuuugagaaaca

SEQ ID NO: 2375406 - RNA, 19 nt, Homo sapiens
  misc_RNA (1)...(19): siRNA sense strand
cugcauauucccaccacua

SEQ ID NO: 2375407 - RNA, 19 nt, Homo sapiens
  misc_RNA (1)...(19): siRNA sense strand
acuacgaguuagauuucaa

SEQ ID NO: 2375408 - RNA, 19 nt, Homo sapiens
  misc_RNA (1)...(19): siRNA sense strand
agauugagcgaguacagaa

SEQ ID NO: 2375409 - RNA, 19 nt, Homo sapiens
  misc_RNA (1)...(19): siRNA sense strand
ggauagaggcaaaugggag

SEQ ID NO: 2375410 - RNA, 19 nt, Homo sapiens
  misc_RNA (1)...(19): siRNA sense strand
uuucaaaagcagugcauca

SEQ ID NO: 2375411 - RNA, 19 nt, Homo sapiens
  misc_RNA (1)...(19): siRNA sense strand
gcauauugcaaucccaaaa

SEQ ID NO: 2375412 - RNA, 19 nt, Homo sapiens
  misc_RNA (1)...(19): siRNA sense strand
gaagaguaucagaaggucu

SEQ ID NO: 2375413 - RNA, 19 nt, Homo sapiens
  misc_RNA (1)...(19): siRNA sense strand
ccuccaucuuugugaucuu

SEQ ID NO: 2375414 - RNA, 19 nt, Homo sapiens
  misc_RNA (1)...(19): siRNA sense strand
gcaacaaucuccauggcaa

SEQ ID NO: 2375415 - RNA, 19 nt, Homo sapiens
  misc_RNA (1)...(19): siRNA sense strand
cugaaaagauugaugggaa

SEQ ID NO: 2375416 - RNA, 19 nt, Homo sapiens
  misc_RNA (1)...(19): siRNA sense strand
gguacauuaugcagggcaa

SEQ ID NO: 2375417 - RNA, 19 nt, Homo sapiens
  misc_RNA (1)...(19): siRNA sense strand
guguggaggagguggcuaa

SEQ ID NO: 2375418 - RNA, 19 nt, Homo sapiens
  misc_RNA (1)...(19): siRNA sense strand
ccgcaacauuguggagaaa

SEQ ID NO: 2375419 - RNA, 19 nt, Homo sapiens
  misc_RNA (1)...(19): siRNA sense strand
cuacuauucuucagggcua

SEQ ID NO: 2375420 - RNA, 19 nt, Homo sapiens
  misc_RNA (1)...(19): siRNA sense strand
cuauagaggaaguguccaa

SEQ ID NO: 2375421 - RNA, 19 nt, Homo sapiens
  misc_RNA (1)...(19): siRNA sense strand
aauucaagcugcuggaaca

SEQ ID NO: 2375422 - RNA, 19 nt, Homo sapiens
  misc_RNA (1)...(19): siRNA sense strand
ggagauagugggagcgacu

SEQ ID NO: 2375423 - RNA, 19 nt, Homo sapiens
  misc_RNA (1)...(19): siRNA sense strand
gugaagaagauaaugcaau

SEQ ID NO: 2375424 - RNA, 19 nt, Homo sapiens
  misc_RNA (1)...(19): siRNA sense strand
aauugauggugcugaggaa

SEQ ID NO: 2375425 - RNA, 19 nt, Homo sapiens
  misc_RNA (1)...(19): siRNA sense strand
caggcacacccaagagaaa

SEQ ID NO: 2375426 - RNA, 19 nt, Homo sapiens
  misc_RNA (1)...(19): siRNA sense strand
gcguguacgucauggagga

SEQ ID NO: 2375427 - RNA, 19 nt, Homo sapiens
  misc_RNA (1)...(19): siRNA sense strand
cggaccaacgaaagcauua

SEQ ID NO: 2375428 - RNA, 19 nt, Homo sapiens
  misc_RNA (1)...(19): siRNA sense strand
gugaagaaucagcaggcau

SEQ ID NO: 2375429 - RNA, 19 nt, Homo sapiens
  misc_RNA (1)...(19): siRNA sense strand
auuaauggcuggaggccca

SEQ ID NO: 2375430 - RNA, 19 nt, Homo sapiens
  misc_RNA (1)...(19): siRNA sense strand
caaaacuaguggaagagaa

SEQ ID NO: 2375431 - RNA, 19 nt, Homo sapiens
  misc_RNA (1)...(19): siRNA sense strand
uauaaaggagccagugcaa

SEQ ID NO: 2375432 - RNA, 19 nt, Homo sapiens
  misc_RNA (1)...(19): siRNA sense strand
ggugaagaagauaaugcaa

SEQ ID NO: 2375433 - RNA, 19 nt, Homo sapiens
  misc_RNA (1)...(19): siRNA sense strand
uguacgucauggaggauau

SEQ ID NO: 2375434 - RNA, 19 nt, Homo sapiens
  misc_RNA (1)...(19): siRNA sense strand
uugcaggugaagaagauaa

SEQ ID NO: 2375435 - RNA, 19 nt, Homo sapiens
  misc_RNA (1)...(19): siRNA sense strand
cggucuguguguauggcaa

SEQ ID NO: 2375436 - RNA, 19 nt, Homo sapiens
  misc_RNA (1)...(19): siRNA sense strand
agaagcuagugaagaauca

SEQ ID NO: 2375437 - RNA, 19 nt, Homo sapiens
  misc_RNA (1)...(19): siRNA sense strand
guuuagagguucuguccga

SEQ ID NO: 2375438 - RNA, 19 nt, Homo sapiens
  misc_RNA (1)...(19): siRNA sense strand
ucacuaaaacugacacaaa

SEQ ID NO: 2375439 - RNA, 19 nt, Homo sapiens
  misc_RNA (1)...(19): siRNA sense strand
uugugaacauccagaccaa

SEQ ID NO: 2375440 - RNA, 19 nt, Homo sapiens
  misc_RNA (1)...(19): siRNA sense strand
caacgaaagcauuagccuu

SEQ ID NO: 2375441 - RNA, 19 nt, Homo sapiens
  misc_RNA (1)...(19): siRNA sense strand
cagugcaagggcagauuua

SEQ ID NO: 2375442 - RNA, 19 nt, Homo sapiens
  misc_RNA (1)...(19): siRNA sense strand
aacaagaccgagauauaaa

SEQ ID NO: 2375443 - RNA, 19 nt, Homo sapiens
  misc_RNA (1)...(19): siRNA sense strand
ccauuauucaggagcauca

SEQ ID NO: 2375444 - RNA, 19 nt, Homo sapiens
  misc_RNA (1)...(19): siRNA sense strand
aggagguggcuaaggcauu

SEQ ID NO: 2375445 - RNA, 19 nt, Homo sapiens
  misc_RNA (1)...(19): siRNA sense strand
cgagaagaacagaugugau

SEQ ID NO: 2375446 - RNA, 19 nt, Homo sapiens
  misc_RNA (1)...(19): siRNA sense strand
uggaaugaagaaugcaaga

SEQ ID NO: 2375447 - RNA, 19 nt, Homo sapiens
  misc_RNA (1)...(19): siRNA sense strand
gugacaaagcagaguacgu

SEQ ID NO: 2375448 - RNA, 19 nt, Homo sapiens
  misc_RNA (1)...(19): siRNA sense strand
ugaaaagauugaugggaac

SEQ ID NO: 2375449 - RNA, 19 nt, Homo sapiens
  misc_RNA (1)...(19): siRNA sense strand
ucagaaagccagaccagga

SEQ ID NO: 2375450 - RNA, 19 nt, Homo sapiens
  misc_RNA (1)...(19): siRNA sense strand
acagcuuggaggaggguca

SEQ ID NO: 2375451 - RNA, 19 nt, Homo sapiens
  misc_RNA (1)...(19): siRNA sense strand
gcgaacacaccauccgcaa

SEQ ID NO: 2375452 - RNA, 19 nt, Homo sapiens
  misc_RNA (1)...(19): siRNA sense strand
gcaacauuguggagaaaac

SEQ ID NO: 2375453 - RNA, 19 nt, Homo sapiens
  misc_RNA (1)...(19): siRNA sense strand
uccauguaaccgagugaaa

SEQ ID NO: 2375454 - RNA, 19 nt, Homo sapiens
  misc_RNA (1)...(19): siRNA sense strand
augcaaagacauucaagga

SEQ ID NO: 2375455 - RNA, 19 nt, Homo sapiens
  misc_RNA (1)...(19): siRNA sense strand
aauugcaggugaagaagau

SEQ ID NO: 2375456 - RNA, 19 nt, Homo sapiens
  misc_RNA (1)...(19): siRNA sense strand
agucaaaucuagaacagca

SEQ ID NO: 2375457 - RNA, 19 nt, Homo sapiens
  misc_RNA (1)...(19): siRNA sense strand
guacugaaucugaagggau

SEQ ID NO: 2375458 - RNA, 19 nt, Homo sapiens
  misc_RNA (1)...(19): siRNA sense strand
uaacaaggauucugggaag

SEQ ID NO: 2375459 - RNA, 19 nt, Homo sapiens
  misc_RNA (1)...(19): siRNA sense strand
aggccaugagagaagacua

SEQ ID NO: 2375460 - RNA, 19 nt, Homo sapiens
  misc_RNA (1)...(19): siRNA sense strand
cuacaaacuaagaccagga

SEQ ID NO: 2375461 - RNA, 19 nt, Homo sapiens
  misc_RNA (1)...(19): siRNA sense strand
agaugaagaagaagagaca

SEQ ID NO: 2375462 - RNA, 19 nt, Homo sapiens
  misc_RNA (1)...(19): siRNA sense strand
augaagaagaagagacagu

SEQ ID NO: 2375463 - RNA, 19 nt, Homo sapiens
  misc_RNA (1)...(19): siRNA sense strand
gcaucgacgucuuugugua

SEQ ID NO: 2375464 - RNA, 19 nt, Homo sapiens
  misc_RNA (1)...(19): siRNA sense strand
agauauuaugacaaggaca

SEQ ID NO: 2375465 - RNA, 19 nt, Homo sapiens
  misc_RNA (1)...(19): siRNA sense strand
cguaccaggcaguggcuga

SEQ ID NO: 2375466 - RNA, 19 nt, Homo sapiens
  misc_RNA (1)...(19): siRNA sense strand
ggagcugauccgaaagcau

SEQ ID NO: 2375467 - RNA, 19 nt, Homo sapiens
  misc_RNA (1)...(19): siRNA sense strand
gugcaaagugggcagcuca

SEQ ID NO: 2375468 - RNA, 19 nt, Homo sapiens
  misc_RNA (1)...(19): siRNA sense strand
caacuuacaugaauagcua

SEQ ID NO: 2375469 - RNA, 19 nt, Homo sapiens
  misc_RNA (1)...(19): siRNA sense strand
gauuuaagcgagagccuca

SEQ ID NO: 2375470 - RNA, 19 nt, Homo sapiens
  misc_RNA (1)...(19): siRNA sense strand
cacauagauuuaagcgaga

SEQ ID NO: 2375471 - RNA, 19 nt, Homo sapiens
  misc_RNA (1)...(19): siRNA sense strand
auacaagcuacaacaacaa

SEQ ID NO: 2375472 - RNA, 19 nt, Homo sapiens
  misc_RNA (1)...(19): siRNA sense strand
acauaugauacaagcuaca

SEQ ID NO: 2375473 - RNA, 19 nt, Homo sapiens
  misc_RNA (1)...(19): siRNA sense strand
augcaccacuaaugagaau

SEQ ID NO: 2375474 - RNA, 19 nt, Homo sapiens
  misc_RNA (1)...(19): siRNA sense strand
ggagaaucgggaagggaga

SEQ ID NO: 2375475 - RNA, 19 nt, Homo sapiens
  misc_RNA (1)...(19): siRNA sense strand
cugaagagcuuguugagga

SEQ ID NO: 2375476 - RNA, 19 nt, Homo sapiens
  misc_RNA (1)...(19): siRNA sense strand
uggagaugauggagaaaau

SEQ ID NO: 2375477 - RNA, 19 nt, Homo sapiens
  misc_RNA (1)...(19): siRNA sense strand
ccaaacaggacauacguga

SEQ ID NO: 2375478 - RNA, 19 nt, Homo sapiens
  misc_RNA (1)...(19): siRNA sense strand
acgacaucacuguggacua

SEQ ID NO: 2375479 - RNA, 19 nt, Homo sapiens
  misc_RNA (1)...(19): siRNA sense strand
ucgggaagggagaaggcua

SEQ ID NO: 2375480 - RNA, 19 nt, Homo sapiens
  misc_RNA (1)...(19): siRNA sense strand
gaagagagcccugcgggaa

SEQ ID NO: 2375481 - RNA, 19 nt, Homo sapiens
  misc_RNA (1)...(19): siRNA sense strand
aaguuaaaguggacccuga

SEQ ID NO: 2375482 - RNA, 19 nt, Homo sapiens
  misc_RNA (1)...(19): siRNA sense strand
ccaaaacaucaaagaccua

SEQ ID NO: 2375483 - RNA, 19 nt, Homo sapiens
  misc_RNA (1)...(19): siRNA sense strand
gggcaguaggugucuccaa

SEQ ID NO: 2375484 - RNA, 19 nt, Homo sapiens
  misc_RNA (1)...(19): siRNA sense strand
gggagaaggcuacgccgau

SEQ ID NO: 2375485 - RNA, 19 nt, Homo sapiens
  misc_RNA (1)...(19): siRNA sense strand
aggacauacgugaacaaau

SEQ ID NO: 2375486 - RNA, 19 nt, Homo sapiens
  misc_RNA (1)...(19): siRNA sense strand
gggaaguacuacauggcca

SEQ ID NO: 2375487 - RNA, 19 nt, Homo sapiens
  misc_RNA (1)...(19): siRNA sense strand
cgacauggaugaacggaac

SEQ ID NO: 2375488 - RNA, 19 nt, Homo sapiens
  misc_RNA (1)...(19): siRNA sense strand
cggacuucguggagaacgu

SEQ ID NO: 2375489 - RNA, 19 nt, Homo sapiens
  misc_RNA (1)...(19): siRNA sense strand
cgcgagaagacguggaaca

SEQ ID NO: 2375490 - RNA, 19 nt, Homo sapiens
  misc_RNA (1)...(19): siRNA sense strand
agaugugcaagcagggaua

SEQ ID NO: 2375491 - RNA, 19 nt, Homo sapiens
  misc_RNA (1)...(19): siRNA sense strand
gcccagaggacaaggacca

SEQ ID NO: 2375492 - RNA, 19 nt, Homo sapiens
  misc_RNA (1)...(19): siRNA sense strand
ccaagugggaggagugcca

SEQ ID NO: 2375493 - RNA, 19 nt, Homo sapiens
  misc_RNA (1)...(19): siRNA sense strand
acuccaaggacgagcucau

SEQ ID NO: 2375494 - RNA, 19 nt, Homo sapiens
  misc_RNA (1)...(19): siRNA sense strand
aggacaaggaccaggcagu

SEQ ID NO: 2375495 - RNA, 19 nt, Homo sapiens
  misc_RNA (1)...(19): siRNA sense strand
ccuccuucaaccugguaaa

SEQ ID NO: 2375496 - RNA, 19 nt, Homo sapiens
  misc_RNA (1)...(19): siRNA sense strand
gccaaugucugcagcgguu

SEQ ID NO: 2375497 - RNA, 19 nt, Homo sapiens
  misc_RNA (1)...(19): siRNA sense strand
ccgacguucccgaggacau

SEQ ID NO: 2375498 - RNA, 19 nt, Homo sapiens
  misc_RNA (1)...(19): siRNA sense strand
cgugucagacggcgagaau

SEQ ID NO: 2375499 - RNA, 19 nt, Homo sapiens
  misc_RNA (1)...(19): siRNA sense strand
gcuacacgcuggugaggga

SEQ ID NO: 2375500 - RNA, 19 nt, Homo sapiens
  misc_RNA (1)...(19): siRNA sense strand
agaugagggaagaugagaa

SEQ ID NO: 2375501 - RNA, 19 nt, Homo sapiens
  misc_RNA (1)...(19): siRNA sense strand
gucccaaagauguggccaa

SEQ ID NO: 2375502 - RNA, 19 nt, Homo sapiens
  misc_RNA (1)...(19): siRNA sense strand
gggcaaagugaagguguca

SEQ ID NO: 2375503 - RNA, 19 nt, Homo sapiens
  misc_RNA (1)...(19): siRNA sense strand
agguggaugcuguggacaa

SEQ ID NO: 2375504 - RNA, 19 nt, Homo sapiens
  misc_RNA (1)...(19): siRNA sense strand
acaagauguaugagaacuu

SEQ ID NO: 2375505 - RNA, 19 nt, Homo sapiens
  misc_RNA (1)...(19): siRNA sense strand
cgaccaagacacugaggca

SEQ ID NO: 2375506 - RNA, 19 nt, Homo sapiens
  misc_RNA (1)...(19): siRNA sense strand
gugcaauggaucugguuca

SEQ ID NO: 2375507 - RNA, 19 nt, Homo sapiens
  misc_RNA (1)...(19): siRNA sense strand
augagaacuuuguggagga

SEQ ID NO: 2375508 - RNA, 19 nt, Homo sapiens
  misc_RNA (1)...(19): siRNA sense strand
gagagggugccuugagcau

SEQ ID NO: 2375509 - RNA, 19 nt, Homo sapiens
  misc_RNA (1)...(19): siRNA sense strand
ugacaagauguaugagaac

SEQ ID NO: 2375510 - RNA, 19 nt, Homo sapiens
  misc_RNA (1)...(19): siRNA sense strand
cgcugaaguuggauggcaa

SEQ ID NO: 2375511 - RNA, 19 nt, Homo sapiens
  misc_RNA (1)...(19): siRNA sense strand
ccaccuaaagacugggaau

SEQ ID NO: 2375512 - RNA, 19 nt, Homo sapiens
  misc_RNA (1)...(19): siRNA sense strand
ggggaguggguaugagaaa

SEQ ID NO: 2375513 - RNA, 19 nt, Homo sapiens
  misc_RNA (1)...(19): siRNA sense strand
aacuaauccaagaggcaaa

SEQ ID NO: 2375514 - RNA, 19 nt, Homo sapiens
  misc_RNA (1)...(19): siRNA sense strand
agaacuaauccaagaggca

SEQ ID NO: 2375515 - RNA, 19 nt, Homo sapiens
  misc_RNA (1)...(19): siRNA sense strand
gcauauguggacagggcuu

SEQ ID NO: 2375516 - RNA, 19 nt, Homo sapiens
  misc_RNA (1)...(19): siRNA sense strand
augacaaagccguccaaau

SEQ ID NO: 2375517 - RNA, 19 nt, Homo sapiens
  misc_RNA (1)...(19): siRNA sense strand
cucaaggguggaagcaaua

SEQ ID NO: 2375518 - RNA, 19 nt, Homo sapiens
  misc_RNA (1)...(19): siRNA sense strand
cggauagcaccaugaggau

SEQ ID NO: 2375519 - RNA, 19 nt, Homo sapiens
  misc_RNA (1)...(19): siRNA sense strand
guaugaggcucuuuggcca

SEQ ID NO: 2375520 - RNA, 19 nt, Homo sapiens
  misc_RNA (1)...(19): siRNA sense strand
ggcuaaggggaguggguau

SEQ ID NO: 2375521 - RNA, 19 nt, Homo sapiens
  misc_RNA (1)...(19): siRNA sense strand
caauaccaacagagagcau

SEQ ID NO: 2375522 - RNA, 19 nt, Homo sapiens
  misc_RNA (1)...(19): siRNA sense strand
gaacuaauccaagaggcaa

SEQ ID NO: 2375523 - RNA, 19 nt, Homo sapiens
  misc_RNA (1)...(19): siRNA sense strand
gcaagaaguauauggccaa

SEQ ID NO: 2375524 - RNA, 19 nt, Homo sapiens
  misc_RNA (1)...(19): siRNA sense strand
cggugaaagcgaauggauu

SEQ ID NO: 2375525 - RNA, 19 nt, Homo sapiens
  misc_RNA (1)...(19): siRNA sense strand
gaugaggaggaaagagcaa

SEQ ID NO: 2375526 - RNA, 19 nt, Homo sapiens
  misc_RNA (1)...(19): siRNA sense strand
gggaggacuacgagggcuu

SEQ ID NO: 2375527 - RNA, 19 nt, Homo sapiens
  misc_RNA (1)...(19): siRNA sense strand
ucgcagaaggacugaagaa

SEQ ID NO: 2375528 - RNA, 19 nt, Homo sapiens
  misc_RNA (1)...(19): siRNA sense strand
aguucaaccucaagggcuu

SEQ ID NO: 2375529 - RNA, 19 nt, Homo sapiens
  misc_RNA (1)...(19): siRNA sense strand
uggcacugaugcuggcaaa

SEQ ID NO: 2375530 - RNA, 19 nt, Homo sapiens
  misc_RNA (1)...(19): siRNA sense strand
ccuugcaguuccugggauu

SEQ ID NO: 2375531 - RNA, 19 nt, Homo sapiens
  misc_RNA (1)...(19): siRNA sense strand
acuacaacucuguggguga

SEQ ID NO: 2375532 - RNA, 19 nt, Homo sapiens
  misc_RNA (1)...(19): siRNA sense strand
ccaguaugaaugugaugaa

SEQ ID NO: 2375533 - RNA, 19 nt, Homo sapiens
  misc_RNA (1)...(19): siRNA sense strand
gcauugaggcuggggaaua

SEQ ID NO: 2375534 - RNA, 19 nt, Homo sapiens
  misc_RNA (1)...(19): siRNA sense strand
gccacaugcaagaaguaua

SEQ ID NO: 2375535 - RNA, 19 nt, Homo sapiens
  misc_RNA (1)...(19): siRNA sense strand
gggaauaacuacaucacug

SEQ ID NO: 2375536 - RNA, 19 nt, Homo sapiens
  misc_RNA (1)...(19): siRNA sense strand
ggaaagagcaaguguccuc

SEQ ID NO: 2375537 - RNA, 19 nt, Homo sapiens
  misc_RNA (1)...(19): siRNA sense strand
uguacgagaugcaggagga

SEQ ID NO: 2375538 - RNA, 19 nt, Homo sapiens
  misc_RNA (1)...(19): siRNA sense strand
cgcagaaggacugaagaaa

SEQ ID NO: 2375539 - RNA, 19 nt, Homo sapiens
  misc_RNA (1)...(19): siRNA sense strand
cucuagaggagguugacaa

SEQ ID NO: 2375540 - RNA, 19 nt, Homo sapiens
  misc_RNA (1)...(19): siRNA sense strand
ugcaagaaguauauggcca

SEQ ID NO: 2375541 - RNA, 19 nt, Homo sapiens
  misc_RNA (1)...(19): siRNA sense strand
aggaauuaccagucccauu

SEQ ID NO: 2375542 - RNA, 19 nt, Homo sapiens
  misc_RNA (1)...(19): siRNA sense strand
uguauuugcgcgauaacaa

SEQ ID NO: 2375543 - RNA, 19 nt, Homo sapiens
  misc_RNA (1)...(19): siRNA sense strand
cauugaggcuggggaauaa

SEQ ID NO: 2375544 - RNA, 19 nt, Homo sapiens
  misc_RNA (1)...(19): siRNA sense strand
cagagaauguccuggaggu

SEQ ID NO: 2375545 - RNA, 19 nt, Homo sapiens
  misc_RNA (1)...(19): siRNA sense strand
gccugauguuggucaagaa

SEQ ID NO: 2375546 - RNA, 19 nt, Homo sapiens
  misc_RNA (1)...(19): siRNA sense strand
uaacaauaucucagaccga

SEQ ID NO: 2375547 - RNA, 19 nt, Homo sapiens
  misc_RNA (1)...(19): siRNA sense strand
caacauuggcagugugggu

SEQ ID NO: 2375548 - RNA, 19 nt, Homo sapiens
  misc_RNA (1)...(19): siRNA sense strand
ccucaguaccuaugaugga

SEQ ID NO: 2375549 - RNA, 19 nt, Homo sapiens
  misc_RNA (1)...(19): siRNA sense strand
uugggaggccagagagaua

SEQ ID NO: 2375550 - RNA, 19 nt, Homo sapiens
  misc_RNA (1)...(19): siRNA sense strand
gagaacaggcaguggcagu

SEQ ID NO: 2375551 - RNA, 19 nt, Homo sapiens
  misc_RNA (1)...(19): siRNA sense strand
gcgugggcauggaggacau

SEQ ID NO: 2375552 - RNA, 19 nt, Homo sapiens
  misc_RNA (1)...(19): siRNA sense strand
augaaggagcugauggaga

SEQ ID NO: 2375553 - RNA, 19 nt, Homo sapiens
  misc_RNA (1)...(19): siRNA sense strand
ccaacgacaaggagaucau

SEQ ID NO: 2375554 - RNA, 19 nt, Homo sapiens
  misc_RNA (1)...(19): siRNA sense strand
agugcgacaucgagagcuu

SEQ ID NO: 2375555 - RNA, 19 nt, Homo sapiens
  misc_RNA (1)...(19): siRNA sense strand
uggaggugcaugaggacuu

SEQ ID NO: 2375556 - RNA, 19 nt, Homo sapiens
  misc_RNA (1)...(19): siRNA sense strand
gagaggagacgcugccaga

SEQ ID NO: 2375557 - RNA, 19 nt, Homo sapiens
  misc_RNA (1)...(19): siRNA sense strand
uugggaacguacugggaca

SEQ ID NO: 2375558 - RNA, 19 nt, Homo sapiens
  misc_RNA (1)...(19): siRNA sense strand
ccuugggaggccagagaga

SEQ ID NO: 2375559 - RNA, 19 nt, Homo sapiens
  misc_RNA (1)...(19): siRNA sense strand
acgacaaggagaucaugaa

SEQ ID NO: 2375560 - RNA, 19 nt, Homo sapiens
  misc_RNA (1)...(19): siRNA sense strand
gugugagcguugaggguga

SEQ ID NO: 2375561 - RNA, 19 nt, Homo sapiens
  misc_RNA (1)...(19): siRNA sense strand
cauggguggcaaagagcaa

SEQ ID NO: 2375562 - RNA, 19 nt, Homo sapiens
  misc_RNA (1)...(19): siRNA sense strand
ccgcuauccgagaggugua

SEQ ID NO: 2375563 - RNA, 19 nt, Homo sapiens
  misc_RNA (1)...(19): siRNA sense strand
agguguaugagcagcuuua

SEQ ID NO: 2375564 - RNA, 19 nt, Homo sapiens
  misc_RNA (1)...(19): siRNA sense strand
gcguugagggugagcagca

SEQ ID NO: 2375565 - RNA, 19 nt, Homo sapiens
  misc_RNA (1)...(19): siRNA sense strand
ggaugagggccuaggcuuc

SEQ ID NO: 2375566 - RNA, 19 nt, Homo sapiens
  misc_RNA (1)...(19): siRNA sense strand
cgaaagagaaagugcgaac

SEQ ID NO: 2375567 - RNA, 19 nt, Homo sapiens
  misc_RNA (1)...(19): siRNA sense strand
ggagaaaggaaaaggacau

SEQ ID NO: 2375568 - RNA, 19 nt, Homo sapiens
  misc_RNA (1)...(19): siRNA sense strand
acuauuaccuguacgggaa

SEQ ID NO: 2375569 - RNA, 19 nt, Homo sapiens
  misc_RNA (1)...(19): siRNA sense strand
ccaaucuggcugugagcaa

SEQ ID NO: 2375570 - RNA, 19 nt, Homo sapiens
  misc_RNA (1)...(19): siRNA sense strand
acuuugagaauguggacaa

SEQ ID NO: 2375571 - RNA, 19 nt, Homo sapiens
  misc_RNA (1)...(19): siRNA sense strand
aguuugaagccguggugaa

SEQ ID NO: 2375572 - RNA, 19 nt, Homo sapiens
  misc_RNA (1)...(19): siRNA sense strand
aggagaggcuauuccgcaa

SEQ ID NO: 2375573 - RNA, 19 nt, Homo sapiens
  misc_RNA (1)...(19): siRNA sense strand
aggguaaagccaacaagaa

SEQ ID NO: 2375574 - RNA, 19 nt, Homo sapiens
  misc_RNA (1)...(19): siRNA sense strand
acaagaacgugcaguggga

SEQ ID NO: 2375575 - RNA, 19 nt, Homo sapiens
  misc_RNA (1)...(19): siRNA sense strand
agaauguggacaacagcaa

SEQ ID NO: 2375576 - RNA, 19 nt, Homo sapiens
  misc_RNA (1)...(19): siRNA sense strand
ggaccuaaugugaccguga

SEQ ID NO: 2375577 - RNA, 19 nt, Homo sapiens
  misc_RNA (1)...(19): siRNA sense strand
ccuacauggagcagagcuu

SEQ ID NO: 2375578 - RNA, 19 nt, Homo sapiens
  misc_RNA (1)...(19): siRNA sense strand
acuucaagccgcaggacuu

SEQ ID NO: 2375579 - RNA, 19 nt, Homo sapiens
  misc_RNA (1)...(19): siRNA sense strand
acgaugagccugacggcau

SEQ ID NO: 2375580 - RNA, 19 nt, Homo sapiens
  misc_RNA (1)...(19): siRNA sense strand
ccguggugaaucaggaaau

SEQ ID NO: 2375581 - RNA, 19 nt, Homo sapiens
  misc_RNA (1)...(19): siRNA sense strand
cggacugguuccugcugaa

SEQ ID NO: 2375582 - RNA, 19 nt, Homo sapiens
  misc_RNA (1)...(19): siRNA sense strand
gcugcaagugccaguacaa

SEQ ID NO: 2375583 - RNA, 19 nt, Homo sapiens
  misc_RNA (1)...(19): siRNA sense strand
caucaaaccugaggaggca

SEQ ID NO: 2375584 - RNA, 19 nt, Homo sapiens
  misc_RNA (1)...(19): siRNA sense strand
augcaagguucauucggaa

SEQ ID NO: 2375585 - RNA, 19 nt, Homo sapiens
  misc_RNA (1)...(19): siRNA sense strand
ucaucggccgaaagagaaa

SEQ ID NO: 2375586 - RNA, 19 nt, Homo sapiens
  misc_RNA (1)...(19): siRNA sense strand
agaccugggugaugccgaa

SEQ ID NO: 2375587 - RNA, 19 nt, Homo sapiens
  misc_RNA (1)...(19): siRNA sense strand
ugaaaaggaagcuggaaca

SEQ ID NO: 2375588 - RNA, 19 nt, Homo sapiens
  misc_RNA (1)...(19): siRNA sense strand
gggucuggacagugaaaau

SEQ ID NO: 2375589 - RNA, 19 nt, Homo sapiens
  misc_RNA (1)...(19): siRNA sense strand
gcacugacugggaugccaa

SEQ ID NO: 2375590 - RNA, 19 nt, Homo sapiens
  misc_RNA (1)...(19): siRNA sense strand
ccgaauucacacacuacaa

SEQ ID NO: 2375591 - RNA, 19 nt, Homo sapiens
  misc_RNA (1)...(19): siRNA sense strand
gggcuucagauguggaaaa

SEQ ID NO: 2375592 - RNA, 19 nt, Homo sapiens
  misc_RNA (1)...(19): siRNA sense strand
ugagugaauaccagaggaa

SEQ ID NO: 2375593 - RNA, 19 nt, Homo sapiens
  misc_RNA (1)...(19): siRNA sense strand
agugaauaccagaggaacu

SEQ ID NO: 2375594 - RNA, 19 nt, Homo sapiens
  misc_RNA (1)...(19): siRNA sense strand
cacaagaagcagaacaaaa

SEQ ID NO: 2375595 - RNA, 19 nt, Homo sapiens
  misc_RNA (1)...(19): siRNA sense strand
acgaaagagccaaguuuua

SEQ ID NO: 2375596 - RNA, 19 nt, Homo sapiens
  misc_RNA (1)...(19): siRNA sense strand
aaauaaugaggguguaaca

SEQ ID NO: 2375597 - RNA, 19 nt, Homo sapiens
  misc_RNA (1)...(19): siRNA sense strand
cgaaaguacccaugggcug

SEQ ID NO: 2375598 - RNA, 19 nt, Homo sapiens
  misc_RNA (1)...(19): siRNA sense strand
uggaaaauaaugagggugu

SEQ ID NO: 2375599 - RNA, 19 nt, Homo sapiens
  misc_RNA (1)...(19): siRNA sense strand
aucacaagaagcagaacaa

SEQ ID NO: 2375600 - RNA, 19 nt, Homo sapiens
  misc_RNA (1)...(19): siRNA sense strand
acuagaagcuuccaggguu

SEQ ID NO: 2375601 - RNA, 19 nt, Homo sapiens
  misc_RNA (1)...(19): siRNA sense strand
gggcuucagauguggaaaa

SEQ ID NO: 2375602 - RNA, 19 nt, Homo sapiens
  misc_RNA (1)...(19): siRNA sense strand
ugagugaauaccagaggaa

SEQ ID NO: 2375603 - RNA, 19 nt, Homo sapiens
  misc_RNA (1)...(19): siRNA sense strand
agugaauaccagaggaacu

SEQ ID NO: 2375604 - RNA, 19 nt, Homo sapiens
  misc_RNA (1)...(19): siRNA sense strand
cacaagaagcagaacaaaa

SEQ ID NO: 2375605 - RNA, 19 nt, Homo sapiens
  misc_RNA (1)...(19): siRNA sense strand
acgaaagagccaaguuuua

SEQ ID NO: 2375606 - RNA, 19 nt, Homo sapiens
  misc_RNA (1)...(19): siRNA sense strand
aaauaaugaggguguaaca

SEQ ID NO: 2375607 - RNA, 19 nt, Homo sapiens
  misc_RNA (1)...(19): siRNA sense strand
cgaaaguacccaugggcug

SEQ ID NO: 2375608 - RNA, 19 nt, Homo sapiens
  misc_RNA (1)...(19): siRNA sense strand
uggaaaauaaugagggugu

SEQ ID NO: 2375609 - RNA, 19 nt, Homo sapiens
  misc_RNA (1)...(19): siRNA sense strand
aucacaagaagcagaacaa

SEQ ID NO: 2375610 - RNA, 19 nt, Homo sapiens
  misc_RNA (1)...(19): siRNA sense strand
acuagaagcuuccaggguu

SEQ ID NO: 2375611 - RNA, 19 nt, Homo sapiens
  misc_RNA (1)...(19): siRNA sense strand
aggaaaugacacaggauau

SEQ ID NO: 2375612 - RNA, 19 nt, Homo sapiens
  misc_RNA (1)...(19): siRNA sense strand
aggugaacuugaacagaaa

SEQ ID NO: 2375613 - RNA, 19 nt, Homo sapiens
  misc_RNA (1)...(19): siRNA sense strand
gugaagaauucuacaggca

SEQ ID NO: 2375614 - RNA, 19 nt, Homo sapiens
  misc_RNA (1)...(19): siRNA sense strand
cggagaacaugcugggcca

SEQ ID NO: 2375615 - RNA, 19 nt, Homo sapiens
  misc_RNA (1)...(19): siRNA sense strand
ggacugagagcgaggagca

SEQ ID NO: 2375616 - RNA, 19 nt, Homo sapiens
  misc_RNA (1)...(19): siRNA sense strand
ccuuguagaaucugggaga

SEQ ID NO: 2375617 - RNA, 19 nt, Homo sapiens
  misc_RNA (1)...(19): siRNA sense strand
aguuagauauggugaccuu

SEQ ID NO: 2375618 - RNA, 19 nt, Homo sapiens
  misc_RNA (1)...(19): siRNA sense strand
caacagacaucaacaggca

SEQ ID NO: 2375619 - RNA, 19 nt, Homo sapiens
  misc_RNA (1)...(19): siRNA sense strand
cagaaagauuccaucccua

SEQ ID NO: 2375620 - RNA, 19 nt, Homo sapiens
  misc_RNA (1)...(19): siRNA sense strand
guuuaaugguugagaggug

SEQ ID NO: 2375621 - RNA, 19 nt, Homo sapiens
  misc_RNA (1)...(19): siRNA sense strand
gguugagagguguggcgaa

SEQ ID NO: 2375622 - RNA, 19 nt, Homo sapiens
  misc_RNA (1)...(19): siRNA sense strand
uugcaugcugggagauaua

SEQ ID NO: 2375623 - RNA, 19 nt, Homo sapiens
  misc_RNA (1)...(19): siRNA sense strand
gccaagggacugagagcga

SEQ ID NO: 2375624 - RNA, 19 nt, Homo sapiens
  misc_RNA (1)...(19): siRNA sense strand
ccugaaagagccaaagcuu

SEQ ID NO: 2375625 - RNA, 19 nt, Homo sapiens
  misc_RNA (1)...(19): siRNA sense strand
ugccaaaggaaaugacaca

SEQ ID NO: 2375626 - RNA, 19 nt, Homo sapiens
  misc_RNA (1)...(19): siRNA sense strand
cuacaggcaaggugaacuu

SEQ ID NO: 2375627 - RNA, 19 nt, Homo sapiens
  misc_RNA (1)...(19): siRNA sense strand
gugaacuugaacagaaauu

SEQ ID NO: 2375628 - RNA, 19 nt, Homo sapiens
  misc_RNA (1)...(19): siRNA sense strand
cagaaauuugaacuggaaa

SEQ ID NO: 2375629 - RNA, 19 nt, Homo sapiens
  misc_RNA (1)...(19): siRNA sense strand
guguuugcaugcugggaga

SEQ ID NO: 2375630 - RNA, 19 nt, Homo sapiens
  misc_RNA (1)...(19): siRNA sense strand
caauaaagacuuaagacug

SEQ ID NO: 2375631 - RNA, 19 nt, Homo sapiens
  misc_RNA (1)...(19): siRNA sense strand
gaagaauucuacaggcaag

SEQ ID NO: 2375632 - RNA, 19 nt, Homo sapiens
  misc_RNA (1)...(19): siRNA sense strand
acuuaagacuggaggaugc

SEQ ID NO: 2375633 - RNA, 19 nt, Homo sapiens
  misc_RNA (1)...(19): siRNA sense strand
gcuaccugaaagagccaaa

SEQ ID NO: 2375634 - RNA, 19 nt, Homo sapiens
  misc_RNA (1)...(19): siRNA sense strand
uagucaugguucaagaaga

SEQ ID NO: 2375635 - RNA, 19 nt, Homo sapiens
  misc_RNA (1)...(19): siRNA sense strand
ucaugguucaagaagauua

SEQ ID NO: 2375636 - RNA, 19 nt, Homo sapiens
  misc_RNA (1)...(19): siRNA sense strand
acaucaacaggcagaauga

SEQ ID NO: 2375637 - RNA, 19 nt, Homo sapiens
  misc_RNA (1)...(19): siRNA sense strand
ugaagaauucuacaggcaa

SEQ ID NO: 2375638 - RNA, 19 nt, Homo sapiens
  misc_RNA (1)...(19): siRNA sense strand
cgacguagccuguggcacu

SEQ ID NO: 2375639 - RNA, 19 nt, Homo sapiens
  misc_RNA (1)...(19): siRNA sense strand
cagugcugauagugaacaa

SEQ ID NO: 2375640 - RNA, 19 nt, Homo sapiens
  misc_RNA (1)...(19): siRNA sense strand
acaucuacuauaagaguga

SEQ ID NO: 2375641 - RNA, 19 nt, Homo sapiens
  misc_RNA (1)...(19): siRNA sense strand
gggucaucgaagaagccaa

SEQ ID NO: 2375642 - RNA, 19 nt, Homo sapiens
  misc_RNA (1)...(19): siRNA sense strand
acauggugacccuggacua

SEQ ID NO: 2375643 - RNA, 19 nt, Homo sapiens
  misc_RNA (1)...(19): siRNA sense strand
agauagaacucuuggcuca

SEQ ID NO: 2375644 - RNA, 19 nt, Homo sapiens
  misc_RNA (1)...(19): siRNA sense strand
gcuuauggugagaagaauu

SEQ ID NO: 2375645 - RNA, 19 nt, Homo sapiens
  misc_RNA (1)...(19): siRNA sense strand
gcacaacagacuuuggaga

SEQ ID NO: 2375646 - RNA, 19 nt, Homo sapiens
  misc_RNA (1)...(19): siRNA sense strand
uggcuuauggugagaagaa

SEQ ID NO: 2375647 - RNA, 19 nt, Homo sapiens
  misc_RNA (1)...(19): siRNA sense strand
cgguacaccuggagccaca

SEQ ID NO: 2375648 - RNA, 19 nt, Homo sapiens
  misc_RNA (1)...(19): siRNA sense strand
gggcagaguaacaugcaga

SEQ ID NO: 2375649 - RNA, 19 nt, Homo sapiens
  misc_RNA (1)...(19): siRNA sense strand
gugcaauaugacucugaaa

SEQ ID NO: 2375650 - RNA, 19 nt, Homo sapiens
  misc_RNA (1)...(19): siRNA sense strand
aucgaagacuggcgugaaa

SEQ ID NO: 2375651 - RNA, 19 nt, Homo sapiens
  misc_RNA (1)...(19): siRNA sense strand
aagcagagcaggagcugga

SEQ ID NO: 2375652 - RNA, 19 nt, Homo sapiens
  misc_RNA (1)...(19): siRNA sense strand
aagaaagugaccaguguga

SEQ ID NO: 2375653 - RNA, 19 nt, Homo sapiens
  misc_RNA (1)...(19): siRNA sense strand
cuuucgaagugauggcaca

SEQ ID NO: 2375654 - RNA, 19 nt, Homo sapiens
  misc_RNA (1)...(19): siRNA sense strand
uguagugggcagaguaaca

SEQ ID NO: 2375655 - RNA, 19 nt, Homo sapiens
  misc_RNA (1)...(19): siRNA sense strand
agcaaauccaggugcagaa

SEQ ID NO: 2375656 - RNA, 19 nt, Homo sapiens
  misc_RNA (1)...(19): siRNA sense strand
agauagaacucuuggcuca

SEQ ID NO: 2375657 - RNA, 19 nt, Homo sapiens
  misc_RNA (1)...(19): siRNA sense strand
gcuuauggugagaagaauu

SEQ ID NO: 2375658 - RNA, 19 nt, Homo sapiens
  misc_RNA (1)...(19): siRNA sense strand
gcacaacagacuuuggaga

SEQ ID NO: 2375659 - RNA, 19 nt, Homo sapiens
  misc_RNA (1)...(19): siRNA sense strand
uggcuuauggugagaagaa

SEQ ID NO: 2375660 - RNA, 19 nt, Homo sapiens
  misc_RNA (1)...(19): siRNA sense strand
cgguacaccuggagccaca

SEQ ID NO: 2375661 - RNA, 19 nt, Homo sapiens
  misc_RNA (1)...(19): siRNA sense strand
gggcagaguaacaugcaga

SEQ ID NO: 2375662 - RNA, 19 nt, Homo sapiens
  misc_RNA (1)...(19): siRNA sense strand
gugcaauaugacucugaaa

SEQ ID NO: 2375663 - RNA, 19 nt, Homo sapiens
  misc_RNA (1)...(19): siRNA sense strand
augauauggugcugcagaa

SEQ ID NO: 2375664 - RNA, 19 nt, Homo sapiens
  misc_RNA (1)...(19): siRNA sense strand
aucgaagacuggcgugaaa

SEQ ID NO: 2375665 - RNA, 19 nt, Homo sapiens
  misc_RNA (1)...(19): siRNA sense strand
aagcagagcaggagcugga

SEQ ID NO: 2375666 - RNA, 19 nt, Homo sapiens
  misc_RNA (1)...(19): siRNA sense strand
aagaaagugaccaguguga

SEQ ID NO: 2375667 - RNA, 19 nt, Homo sapiens
  misc_RNA (1)...(19): siRNA sense strand
cuuucgaagugauggcaca

SEQ ID NO: 2375668 - RNA, 19 nt, Homo sapiens
  misc_RNA (1)...(19): siRNA sense strand
uguagugggcagaguaaca

SEQ ID NO: 2375669 - RNA, 19 nt, Homo sapiens
  misc_RNA (1)...(19): siRNA sense strand
agcaaauccaggugcagaa

SEQ ID NO: 2375670 - RNA, 19 nt, Homo sapiens
  misc_RNA (1)...(19): siRNA sense strand
ggaucaagugcgagaaauu

SEQ ID NO: 2375671 - RNA, 19 nt, Homo sapiens
  misc_RNA (1)...(19): siRNA sense strand
agaccaaggccgugggaau

SEQ ID NO: 2375672 - RNA, 19 nt, Homo sapiens
  misc_RNA (1)...(19): siRNA sense strand
agauguaugaggagaaaua

SEQ ID NO: 2375673 - RNA, 19 nt, Homo sapiens
  misc_RNA (1)...(19): siRNA sense strand
gguuuaaagugaugaagau

SEQ ID NO: 2375674 - RNA, 19 nt, Homo sapiens
  misc_RNA (1)...(19): siRNA sense strand
cugaagaaccugaggcaga

SEQ ID NO: 2375675 - RNA, 19 nt, Homo sapiens
  misc_RNA (1)...(19): siRNA sense strand
gcgacgacuacgagauaaa

SEQ ID NO: 2375676 - RNA, 19 nt, Homo sapiens
  misc_RNA (1)...(19): siRNA sense strand
ggaaacaggaguacgggua

SEQ ID NO: 2375677 - RNA, 19 nt, Homo sapiens
  misc_RNA (1)...(19): siRNA sense strand
uaacaaagucugagaggca

SEQ ID NO: 2375678 - RNA, 19 nt, Homo sapiens
  misc_RNA (1)...(19): siRNA sense strand
gguagaauuagcagaggaa

SEQ ID NO: 2375679 - RNA, 19 nt, Homo sapiens
  misc_RNA (1)...(19): siRNA sense strand
uagaauuagcagaggaaga

SEQ ID NO: 2375680 - RNA, 19 nt, Homo sapiens
  misc_RNA (1)...(19): siRNA sense strand
cugaaaagguuuaaaguga

SEQ ID NO: 2375681 - RNA, 19 nt, Homo sapiens
  misc_RNA (1)...(19): siRNA sense strand
aggaguacggguagaauua

SEQ ID NO: 2375682 - RNA, 19 nt, Homo sapiens
  misc_RNA (1)...(19): siRNA sense strand
ggacaagaucacugacaca

SEQ ID NO: 2375683 - RNA, 19 nt, Homo sapiens
  misc_RNA (1)...(19): siRNA sense strand
agguaugagugauggcaau

SEQ ID NO: 2375684 - RNA, 19 nt, Homo sapiens
  misc_RNA (1)...(19): siRNA sense strand
guguggaaccagaggguga

SEQ ID NO: 2375685 - RNA, 19 nt, Homo sapiens
  misc_RNA (1)...(19): siRNA sense strand
uaucaaagacagaguauca

SEQ ID NO: 2375686 - RNA, 19 nt, Homo sapiens
  misc_RNA (1)...(19): siRNA sense strand
aggcaggagaggaagcaaa

SEQ ID NO: 2375687 - RNA, 19 nt, Homo sapiens
  misc_RNA (1)...(19): siRNA sense strand
gugcccagaaagaggguaa

SEQ ID NO: 2375688 - RNA, 19 nt, Homo sapiens
  misc_RNA (1)...(19): siRNA sense strand
acauaaagacucuagaaga

SEQ ID NO: 2375689 - RNA, 19 nt, Homo sapiens
  misc_RNA (1)...(19): siRNA sense strand
caauuuaccacuaggaaca

SEQ ID NO: 2375690 - RNA, 19 nt, Homo sapiens
  misc_RNA (1)...(19): siRNA sense strand
ccaagaggaaacaggagua

SEQ ID NO: 2375691 - RNA, 19 nt, Homo sapiens
  misc_RNA (1)...(19): siRNA sense strand
acaaguagaaccugaagaa

SEQ ID NO: 2375692 - RNA, 19 nt, Homo sapiens
  misc_RNA (1)...(19): siRNA sense strand
cgacagaaguacuggcuac

SEQ ID NO: 2375693 - RNA, 19 nt, Homo sapiens
  misc_RNA (1)...(19): siRNA sense strand
aggagggaguuuagcacaa

SEQ ID NO: 2375694 - RNA, 19 nt, Homo sapiens
  misc_RNA (1)...(19): siRNA sense strand
gcagagaagcagagcagca

SEQ ID NO: 2375695 - RNA, 19 nt, Homo sapiens
  misc_RNA (1)...(19): siRNA sense strand
uggagagucuacaaggaaa

SEQ ID NO: 2375696 - RNA, 19 nt, Homo sapiens
  misc_RNA (1)...(19): siRNA sense strand
gcacaaguugguagacaau

SEQ ID NO: 2375697 - RNA, 19 nt, Homo sapiens
  misc_RNA (1)...(19): siRNA sense strand
cccagaagauguugcacaa

SEQ ID NO: 2375698 - RNA, 19 nt, Homo sapiens
  misc_RNA (1)...(19): siRNA sense strand
cugagauguaugaggagaa

SEQ ID NO: 2375699 - RNA, 19 nt, Homo sapiens
  misc_RNA (1)...(19): siRNA sense strand
uggacaagcugcugagguu

SEQ ID NO: 2375700 - RNA, 19 nt, Homo sapiens
  misc_RNA (1)...(19): siRNA sense strand
uggaaggcaugaaggaaga

SEQ ID NO: 2375701 - RNA, 19 nt, Homo sapiens
  misc_RNA (1)...(19): siRNA sense strand
aggcaugaaggaagaacua

SEQ ID NO: 2375702 - RNA, 19 nt, Homo sapiens
  misc_RNA (1)...(19): siRNA sense strand
cugcacagccagugaguca

SEQ ID NO: 2375703 - RNA, 19 nt, Homo sapiens
  misc_RNA (1)...(19): siRNA sense strand
ggguguuucucaagucaaa

SEQ ID NO: 2375704 - RNA, 19 nt, Homo sapiens
  misc_RNA (1)...(19): siRNA sense strand
guuaaaaggucuucagcau

SEQ ID NO: 2375705 - RNA, 19 nt, Homo sapiens
  misc_RNA (1)...(19): siRNA sense strand
gaucacugacacaaagaaa

SEQ ID NO: 2375706 - RNA, 19 nt, Homo sapiens
  misc_RNA (1)...(19): siRNA sense strand
ucacagaugacuugcacaa

SEQ ID NO: 2375707 - RNA, 19 nt, Homo sapiens
  misc_RNA (1)...(19): siRNA sense strand
gggugaagccagccaguuu

SEQ ID NO: 2375708 - RNA, 19 nt, Homo sapiens
  misc_RNA (1)...(19): siRNA sense strand
gcuacguauugaagauauu

SEQ ID NO: 2375709 - RNA, 19 nt, Homo sapiens
  misc_RNA (1)...(19): siRNA sense strand
uuacaugaguagcgacaau

SEQ ID NO: 2375710 - RNA, 19 nt, Homo sapiens
  misc_RNA (1)...(19): siRNA sense strand
aggcagagauuuaaagaag

SEQ ID NO: 2375711 - RNA, 19 nt, Homo sapiens
  misc_RNA (1)...(19): siRNA sense strand
ggguagaauuagcagagga

SEQ ID NO: 2375712 - RNA, 19 nt, Homo sapiens
  misc_RNA (1)...(19): siRNA sense strand
agaagauguugcacaagaa

SEQ ID NO: 2375713 - RNA, 19 nt, Homo sapiens
  misc_RNA (1)...(19): siRNA sense strand
agaucaacaucaacaacua

SEQ ID NO: 2375714 - RNA, 19 nt, Homo sapiens
  misc_RNA (1)...(19): siRNA sense strand
caaagaaagagaagccuga

SEQ ID NO: 2375715 - RNA, 19 nt, Homo sapiens
  misc_RNA (1)...(19): siRNA sense strand
gaucacaagaccauggcua

SEQ ID NO: 2375716 - RNA, 19 nt, Homo sapiens
  misc_RNA (1)...(19): siRNA sense strand
gaaagaaggaccaguggca

SEQ ID NO: 2375717 - RNA, 19 nt, Homo sapiens
  misc_RNA (1)...(19): siRNA sense strand
ccaaggagccacaggagga

SEQ ID NO: 2375718 - RNA, 19 nt, Homo sapiens
  misc_RNA (1)...(19): siRNA sense strand
gugaacugcaggaucgaaa

SEQ ID NO: 2375719 - RNA, 19 nt, Homo sapiens
  misc_RNA (1)...(19): siRNA sense strand
gcaugaaggaagaacuaca

SEQ ID NO: 2375720 - RNA, 19 nt, Homo sapiens
  misc_RNA (1)...(19): siRNA sense strand
ccacaaaacuacugccuca

SEQ ID NO: 2375721 - RNA, 19 nt, Homo sapiens
  misc_RNA (1)...(19): siRNA sense strand
ucaaagagauucaggaccu

SEQ ID NO: 2375722 - RNA, 19 nt, Homo sapiens
  misc_RNA (1)...(19): siRNA sense strand
gccaagagugugauaggua

SEQ ID NO: 2375723 - RNA, 19 nt, Homo sapiens
  misc_RNA (1)...(19): siRNA sense strand
cucagaaauuggaaggaga

SEQ ID NO: 2375724 - RNA, 19 nt, Homo sapiens
  misc_RNA (1)...(19): siRNA sense strand
gcgcacacucacuagauaa

SEQ ID NO: 2375725 - RNA, 19 nt, Homo sapiens
  misc_RNA (1)...(19): siRNA sense strand
aaguaguaguccagagagu

SEQ ID NO: 2375726 - RNA, 19 nt, Homo sapiens
  misc_RNA (1)...(19): siRNA sense strand
gauuuaaagaagaagcuga

SEQ ID NO: 2375727 - RNA, 19 nt, Homo sapiens
  misc_RNA (1)...(19): siRNA sense strand
gcuaaagcuaucaaagaca

SEQ ID NO: 2375728 - RNA, 19 nt, Homo sapiens
  misc_RNA (1)...(19): siRNA sense strand
gggcaacagugaacagcca

SEQ ID NO: 2375729 - RNA, 19 nt, Homo sapiens
  misc_RNA (1)...(19): siRNA sense strand
aagaagaagcugaaauguu

SEQ ID NO: 2375730 - RNA, 19 nt, Homo sapiens
  misc_RNA (1)...(19): siRNA sense strand
ggaaauuauugaaggaugc

SEQ ID NO: 2375731 - RNA, 19 nt, Homo sapiens
  misc_RNA (1)...(19): siRNA sense strand
caaacagcagguagaacaa

SEQ ID NO: 2375732 - RNA, 19 nt, Homo sapiens
  misc_RNA (1)...(19): siRNA sense strand
ucgaagaugaagacuuaaa

SEQ ID NO: 2375733 - RNA, 19 nt, Homo sapiens
  misc_RNA (1)...(19): siRNA sense strand
ccgaaaaucuguaaggagu

SEQ ID NO: 2375734 - RNA, 19 nt, Homo sapiens
  misc_RNA (1)...(19): siRNA sense strand
aaauaaaggagaccgagua

SEQ ID NO: 2375735 - RNA, 19 nt, Homo sapiens
  misc_RNA (1)...(19): siRNA sense strand
cagugaaauaacagauaca

SEQ ID NO: 2375736 - RNA, 19 nt, Homo sapiens
  misc_RNA (1)...(19): siRNA sense strand
agccagaaucuaagucaaa

SEQ ID NO: 2375737 - RNA, 19 nt, Homo sapiens
  misc_RNA (1)...(19): siRNA sense strand
gaaucuaagucaaagccuu

SEQ ID NO: 2375738 - RNA, 19 nt, Homo sapiens
  misc_RNA (1)...(19): siRNA sense strand
caaggaaccagcagcacaa

SEQ ID NO: 2375739 - RNA, 19 nt, Homo sapiens
  misc_RNA (1)...(19): siRNA sense strand
ccgaggagauagcaacaau

SEQ ID NO: 2375740 - RNA, 19 nt, Homo sapiens
  misc_RNA (1)...(19): siRNA sense strand
cuggaauugaugacauaaa

SEQ ID NO: 2375741 - RNA, 19 nt, Homo sapiens
  misc_RNA (1)...(19): siRNA sense strand
cugugauaccaaagaaaga

SEQ ID NO: 2375742 - RNA, 19 nt, Homo sapiens
  misc_RNA (1)...(19): siRNA sense strand
gaugaagaucaaaguucua

SEQ ID NO: 2375743 - RNA, 19 nt, Homo sapiens
  misc_RNA (1)...(19): siRNA sense strand
acgaaagagcaaagagaaa

SEQ ID NO: 2375744 - RNA, 19 nt, Homo sapiens
  misc_RNA (1)...(19): siRNA sense strand
aggaaaacguucaaagaua

SEQ ID NO: 2375745 - RNA, 19 nt, Homo sapiens
  misc_RNA (1)...(19): siRNA sense strand
cuaaagaaguggauggguu

SEQ ID NO: 2375746 - RNA, 19 nt, Homo sapiens
  misc_RNA (1)...(19): siRNA sense strand
caguagagaaauaagacaa

SEQ ID NO: 2375747 - RNA, 19 nt, Homo sapiens
  misc_RNA (1)...(19): siRNA sense strand
uguuagaaguacagugaca

SEQ ID NO: 2375748 - RNA, 19 nt, Homo sapiens
  misc_RNA (1)...(19): siRNA sense strand
ggagacagaucaaaggaga

SEQ ID NO: 2375749 - RNA, 19 nt, Homo sapiens
  misc_RNA (1)...(19): siRNA sense strand
gauaaauaccagagaugca

SEQ ID NO: 2375750 - RNA, 19 nt, Homo sapiens
  misc_RNA (1)...(19): siRNA sense strand
agaaauuggcauugaaguu

SEQ ID NO: 2375751 - RNA, 19 nt, Homo sapiens
  misc_RNA (1)...(19): siRNA sense strand
aguuacaaugguuggaaua

SEQ ID NO: 2375752 - RNA, 19 nt, Homo sapiens
  misc_RNA (1)...(19): siRNA sense strand
aggagaguuuagugaguuu

SEQ ID NO: 2375753 - RNA, 19 nt, Homo sapiens
  misc_RNA (1)...(19): siRNA sense strand
cuuaaugccagaauggaaa

SEQ ID NO: 2375754 - RNA, 19 nt, Homo sapiens
  misc_RNA (1)...(19): siRNA sense strand
cuacgaaagagcaaagaga

SEQ ID NO: 2375755 - RNA, 19 nt, Homo sapiens
  misc_RNA (1)...(19): siRNA sense strand
cugaacaaaucuuggaguu

SEQ ID NO: 2375756 - RNA, 19 nt, Homo sapiens
  misc_RNA (1)...(19): siRNA sense strand
gagcauaugaaguacucaa

SEQ ID NO: 2375757 - RNA, 19 nt, Homo sapiens
  misc_RNA (1)...(19): siRNA sense strand
ugccaaagaaagugugaau

SEQ ID NO: 2375758 - RNA, 19 nt, Homo sapiens
  misc_RNA (1)...(19): siRNA sense strand
gcuaggaugauuaaaggaa

SEQ ID NO: 2375759 - RNA, 19 nt, Homo sapiens
  misc_RNA (1)...(19): siRNA sense strand
uucaagaagagcagauaaa

SEQ ID NO: 2375760 - RNA, 19 nt, Homo sapiens
  misc_RNA (1)...(19): siRNA sense strand
uggaauggccccagugaaa

SEQ ID NO: 2375761 - RNA, 19 nt, Homo sapiens
  misc_RNA (1)...(19): siRNA sense strand
ugacaaagaaccauggcuu

SEQ ID NO: 2375762 - RNA, 19 nt, Homo sapiens
  misc_RNA (1)...(19): siRNA sense strand
auggagagacuuugcuaaa

SEQ ID NO: 2375763 - RNA, 19 nt, Homo sapiens
  misc_RNA (1)...(19): siRNA sense strand
augaaguacucaaagauga

SEQ ID NO: 2375764 - RNA, 19 nt, Homo sapiens
  misc_RNA (1)...(19): siRNA sense strand
ugaaguacucaaagaugaa

SEQ ID NO: 2375765 - RNA, 19 nt, Homo sapiens
  misc_RNA (1)...(19): siRNA sense strand
gauagaaugcuuugccgaa

SEQ ID NO: 2375766 - RNA, 19 nt, Homo sapiens
  misc_RNA (1)...(19): siRNA sense strand
ugacaaauauggagaaaag

SEQ ID NO: 2375767 - RNA, 19 nt, Homo sapiens
  misc_RNA (1)...(19): siRNA sense strand
guacaguucaugagggacu

SEQ ID NO: 2375768 - RNA, 19 nt, Homo sapiens
  misc_RNA (1)...(19): siRNA sense strand
acagaucaaaggagaguuu

SEQ ID NO: 2375769 - RNA, 19 nt, Homo sapiens
  misc_RNA (1)...(19): siRNA sense strand
agcaguauuuaaaggacaa

SEQ ID NO: 2375770 - RNA, 19 nt, Homo sapiens
  misc_RNA (1)...(19): siRNA sense strand
ucuuaaugccagaauggaa

SEQ ID NO: 2375771 - RNA, 19 nt, Homo sapiens
  misc_RNA (1)...(19): siRNA sense strand
gaaaagugaaagcuggaaa

SEQ ID NO: 2375772 - RNA, 19 nt, Homo sapiens
  misc_RNA (1)...(19): siRNA sense strand
aaguagacugucaggcuua

SEQ ID NO: 2375773 - RNA, 19 nt, Homo sapiens
  misc_RNA (1)...(19): siRNA sense strand
ggaaacucuccgaaaucaa

SEQ ID NO: 2375774 - RNA, 19 nt, Homo sapiens
  misc_RNA (1)...(19): siRNA sense strand
ggcaaacacacuagaggau

SEQ ID NO: 2375775 - RNA, 19 nt, Homo sapiens
  misc_RNA (1)...(19): siRNA sense strand
uagcaguauuuaaaggaca

SEQ ID NO: 2375776 - RNA, 19 nt, Homo sapiens
  misc_RNA (1)...(19): siRNA sense strand
guccaacauucaugaguau

SEQ ID NO: 2375777 - RNA, 19 nt, Homo sapiens
  misc_RNA (1)...(19): siRNA sense strand
agaaaagggacuugaggau

SEQ ID NO: 2375778 - RNA, 19 nt, Homo sapiens
  misc_RNA (1)...(19): siRNA sense strand
cagauaaauaccagagaug

SEQ ID NO: 2375779 - RNA, 19 nt, Homo sapiens
  misc_RNA (1)...(19): siRNA sense strand
cgaauaacccaaaugcaca

SEQ ID NO: 2375780 - RNA, 19 nt, Homo sapiens
  misc_RNA (1)...(19): siRNA sense strand
gaugaagaucuacggaaaa

SEQ ID NO: 2375781 - RNA, 19 nt, Homo sapiens
  misc_RNA (1)...(19): siRNA sense strand
acauuggaaagaagagaau

SEQ ID NO: 2375782 - RNA, 19 nt, Homo sapiens
  misc_RNA (1)...(19): siRNA sense strand
gcagcauguuagaaguaca

SEQ ID NO: 2375783 - RNA, 19 nt, Homo sapiens
  misc_RNA (1)...(19): siRNA sense strand
gagaaauaagacaagcuuu

SEQ ID NO: 2375784 - RNA, 19 nt, Homo sapiens
  misc_RNA (1)...(19): siRNA sense strand
cagugaaauaucauggaga

SEQ ID NO: 2375785 - RNA, 19 nt, Homo sapiens
  misc_RNA (1)...(19): siRNA sense strand
gugaaauaucauggagaca

SEQ ID NO: 2375786 - RNA, 19 nt, Homo sapiens
  misc_RNA (1)...(19): siRNA sense strand
uugaacuacuuucggcaaa

SEQ ID NO: 2375787 - RNA, 19 nt, Homo sapiens
  misc_RNA (1)...(19): siRNA sense strand
aguccaacauucaugagua

SEQ ID NO: 2375788 - RNA, 19 nt, Homo sapiens
  misc_RNA (1)...(19): siRNA sense strand
guguggaccuugccagaau

SEQ ID NO: 2375789 - RNA, 19 nt, Homo sapiens
  misc_RNA (1)...(19): siRNA sense strand
gaauuugagcucuuggcua

SEQ ID NO: 2375790 - RNA, 19 nt, Homo sapiens
  misc_RNA (1)...(19): siRNA sense strand
gcuggaacuauuaucguua

SEQ ID NO: 2375791 - RNA, 19 nt, Homo sapiens
  misc_RNA (1)...(19): siRNA sense strand
caacgaacuaguuacacaa

SEQ ID NO: 2375792 - RNA, 19 nt, Homo sapiens
  misc_RNA (1)...(19): siRNA sense strand
cggcaaacacacuagagga

SEQ ID NO: 2375793 - RNA, 19 nt, Homo sapiens
  misc_RNA (1)...(19): siRNA sense strand
ggaaccaaagaauaugaaa

SEQ ID NO: 2375794 - RNA, 19 nt, Homo sapiens
  misc_RNA (1)...(19): siRNA sense strand
caguuacaaugguuggaau

SEQ ID NO: 2375795 - RNA, 19 nt, Homo sapiens
  misc_RNA (1)...(19): siRNA sense strand
gaggaauaaggaugaacuu

SEQ ID NO: 2375796 - RNA, 19 nt, Homo sapiens
  misc_RNA (1)...(19): siRNA sense strand
ucaaaggagaguuuaguga

SEQ ID NO: 2375797 - RNA, 19 nt, Homo sapiens
  misc_RNA (1)...(19): siRNA sense strand
cagacacgacucaggcuua

SEQ ID NO: 2375798 - RNA, 19 nt, Homo sapiens
  misc_RNA (1)...(19): siRNA sense strand
ucauuggaugcuaaagaaa

SEQ ID NO: 2375799 - RNA, 19 nt, Homo sapiens
  misc_RNA (1)...(19): siRNA sense strand
cuccagaauuugagcucuu

SEQ ID NO: 2375800 - RNA, 19 nt, Homo sapiens
  misc_RNA (1)...(19): siRNA sense strand
gagucugguuaaauaaaga

SEQ ID NO: 2375801 - RNA, 19 nt, Homo sapiens
  misc_RNA (1)...(19): siRNA sense strand
acagaacuuuggacaggaa

SEQ ID NO: 2375802 - RNA, 19 nt, Homo sapiens
  misc_RNA (1)...(19): siRNA sense strand
guuggauggucuuguuaau

SEQ ID NO: 2375803 - RNA, 19 nt, Homo sapiens
  misc_RNA (1)...(19): siRNA sense strand
agcuuuacuaccagaguua

SEQ ID NO: 2375804 - RNA, 19 nt, Homo sapiens
  misc_RNA (1)...(19): siRNA sense strand
uaucauggagacagaucaa

SEQ ID NO: 2375805 - RNA, 19 nt, Homo sapiens
  misc_RNA (1)...(19): siRNA sense strand
cuccaaaccaucagggaaa

SEQ ID NO: 2375806 - RNA, 19 nt, Homo sapiens
  misc_RNA (1)...(19): siRNA sense strand
ccaaagagcuagagcggcu

SEQ ID NO: 2375807 - RNA, 19 nt, Homo sapiens
  misc_RNA (1)...(19): siRNA sense strand
gcagcgaagaagaucgaaa

SEQ ID NO: 2375808 - RNA, 19 nt, Homo sapiens
  misc_RNA (1)...(19): siRNA sense strand
cggaguuccagcagcgaua

SEQ ID NO: 2375809 - RNA, 19 nt, Homo sapiens
  misc_RNA (1)...(19): siRNA sense strand
aagcagaagcgcagcauca

SEQ ID NO: 2375810 - RNA, 19 nt, Homo sapiens
  misc_RNA (1)...(19): siRNA sense strand
ccccaaaaguccugccaaa

SEQ ID NO: 2375811 - RNA, 19 nt, Homo sapiens
  misc_RNA (1)...(19): siRNA sense strand
gccaggacaccgaggagaa

SEQ ID NO: 2375812 - RNA, 19 nt, Homo sapiens
  misc_RNA (1)...(19): siRNA sense strand
agaagugguaauaaaggaa

SEQ ID NO: 2375813 - RNA, 19 nt, Homo sapiens
  misc_RNA (1)...(19): siRNA sense strand
ccuccaaaccaucagggaa

SEQ ID NO: 2375814 - RNA, 19 nt, Homo sapiens
  misc_RNA (1)...(19): siRNA sense strand
cuuccaaagagauucguaa

SEQ ID NO: 2375815 - RNA, 19 nt, Homo sapiens
  misc_RNA (1)...(19): siRNA sense strand
ugauggagaugguggguuc

SEQ ID NO: 2375816 - RNA, 19 nt, Homo sapiens
  misc_RNA (1)...(19): siRNA sense strand
gaugguggguucagcguga

SEQ ID NO: 2375817 - RNA, 19 nt, Homo sapiens
  misc_RNA (1)...(19): siRNA sense strand
aagugguaauaaaggaaga

SEQ ID NO: 2375818 - RNA, 19 nt, Homo sapiens
  misc_RNA (1)...(19): siRNA sense strand
aauuguaacuugaaggaac

SEQ ID NO: 2375819 - RNA, 19 nt, Homo sapiens
  misc_RNA (1)...(19): siRNA sense strand
cagguggaggagacggaaa

SEQ ID NO: 2375820 - RNA, 19 nt, Homo sapiens
  misc_RNA (1)...(19): siRNA sense strand
aggcaggcuugguccgcaa

SEQ ID NO: 2375821 - RNA, 19 nt, Homo sapiens
  misc_RNA (1)...(19): siRNA sense strand
cagcgaagaagaucgaaaa

SEQ ID NO: 2375822 - RNA, 19 nt, Homo sapiens
  misc_RNA (1)...(19): siRNA sense strand
acaacaagcuguggcguca

SEQ ID NO: 2375823 - RNA, 19 nt, Homo sapiens
  misc_RNA (1)...(19): siRNA sense strand
uggaggauccggagaggga

SEQ ID NO: 2375824 - RNA, 19 nt, Homo sapiens
  misc_RNA (1)...(19): siRNA sense strand
agaauaucuugcugggagu

SEQ ID NO: 2375825 - RNA, 19 nt, Homo sapiens
  misc_RNA (1)...(19): siRNA sense strand
gagcacagcaggaaggaug

SEQ ID NO: 2375826 - RNA, 19 nt, Homo sapiens
  misc_RNA (1)...(19): siRNA sense strand
gccuaugcaaugaaggaau

SEQ ID NO: 2375827 - RNA, 19 nt, Homo sapiens
  misc_RNA (1)...(19): siRNA sense strand
caguaaugaaucugagaag

SEQ ID NO: 2375828 - RNA, 19 nt, Homo sapiens
  misc_RNA (1)...(19): siRNA sense strand
cugaagaccaucugcuaca

SEQ ID NO: 2375829 - RNA, 19 nt, Homo sapiens
  misc_RNA (1)...(19): siRNA sense strand
aggacaccgaggagaauau

SEQ ID NO: 2375830 - RNA, 19 nt, Homo sapiens
  misc_RNA (1)...(19): siRNA sense strand
cucaaggaauuuauagaca

SEQ ID NO: 2375831 - RNA, 19 nt, Homo sapiens
  misc_RNA (1)...(19): siRNA sense strand
caagaaagauaugaagcca

SEQ ID NO: 2375832 - RNA, 19 nt, Homo sapiens
  misc_RNA (1)...(19): siRNA sense strand
gcuccuugcugcaggugga

SEQ ID NO: 2375833 - RNA, 19 nt, Homo sapiens
  misc_RNA (1)...(19): siRNA sense strand
ccuucguggaugagcaaaa

SEQ ID NO: 2375834 - RNA, 19 nt, Homo sapiens
  misc_RNA (1)...(19): siRNA sense strand
ugucugaguaugaaggcau

SEQ ID NO: 2375835 - RNA, 19 nt, Homo sapiens
  misc_RNA (1)...(19): siRNA sense strand
acgaauuccugguggguau

SEQ ID NO: 2375836 - RNA, 19 nt, Homo sapiens
  misc_RNA (1)...(19): siRNA sense strand
cagaaguacucaaugggaa

SEQ ID NO: 2375837 - RNA, 19 nt, Homo sapiens
  misc_RNA (1)...(19): siRNA sense strand
agaaguacucaaugggaau

SEQ ID NO: 2375838 - RNA, 19 nt, Homo sapiens
  misc_RNA (1)...(19): siRNA sense strand
cagaucacacccagggaaa

SEQ ID NO: 2375839 - RNA, 19 nt, Homo sapiens
  misc_RNA (1)...(19): siRNA sense strand
gcaugauggaagugguuca

SEQ ID NO: 2375840 - RNA, 19 nt, Homo sapiens
  misc_RNA (1)...(19): siRNA sense strand
uugaaaauguggaguguga

SEQ ID NO: 2375841 - RNA, 19 nt, Homo sapiens
  misc_RNA (1)...(19): siRNA sense strand
cuuggaacccauuggaaau

SEQ ID NO: 2375842 - RNA, 19 nt, Homo sapiens
  misc_RNA (1)...(19): siRNA sense strand
aggaaaugucucucaaaga

SEQ ID NO: 2375843 - RNA, 19 nt, Homo sapiens
  misc_RNA (1)...(19): siRNA sense strand
aggacagagcugcuaauaa

SEQ ID NO: 2375844 - RNA, 19 nt, Homo sapiens
  misc_RNA (1)...(19): siRNA sense strand
accaagaacugauugaaaa

SEQ ID NO: 2375845 - RNA, 19 nt, Homo sapiens
  misc_RNA (1)...(19): siRNA sense strand
aaaacauacuucugggaau

SEQ ID NO: 2375846 - RNA, 19 nt, Homo sapiens
  misc_RNA (1)...(19): siRNA sense strand
acucaaugggaaugaacau

SEQ ID NO: 2375847 - RNA, 19 nt, Homo sapiens
  misc_RNA (1)...(19): siRNA sense strand
gguggaaagaaguuggcuu

SEQ ID NO: 2375848 - RNA, 19 nt, Homo sapiens
  misc_RNA (1)...(19): siRNA sense strand
cuacugaaaucuagccgau

SEQ ID NO: 2375849 - RNA, 19 nt, Homo sapiens
  misc_RNA (1)...(19): siRNA sense strand
accaaauggcccaggugua

SEQ ID NO: 2375850 - RNA, 19 nt, Homo sapiens
  misc_RNA (1)...(19): siRNA sense strand
cuaauaaggaccaagaacu

SEQ ID NO: 2375851 - RNA, 19 nt, Homo sapiens
  misc_RNA (1)...(19): siRNA sense strand
ccaagaacugauugaaaau

SEQ ID NO: 2375852 - RNA, 19 nt, Homo sapiens
  misc_RNA (1)...(19): siRNA sense strand
agcuaugaguccucugaaa

SEQ ID NO: 2375853 - RNA, 19 nt, Homo sapiens
  misc_RNA (1)...(19): siRNA sense strand
agaauaacuccagaggaaa

SEQ ID NO: 2375854 - RNA, 19 nt, Homo sapiens
  misc_RNA (1)...(19): siRNA sense strand
accagaaaauacagugaua

SEQ ID NO: 2375855 - RNA, 19 nt, Homo sapiens
  misc_RNA (1)...(19): siRNA sense strand
gggaaaacuaauaaagcca

SEQ ID NO: 2375856 - RNA, 19 nt, Homo sapiens
  misc_RNA (1)...(19): siRNA sense strand
auacaugugggaugaagaa

SEQ ID NO: 2375857 - RNA, 19 nt, Homo sapiens
  misc_RNA (1)...(19): siRNA sense strand
ccuugaggaugaugaucuu

SEQ ID NO: 2375858 - RNA, 19 nt, Homo sapiens
  misc_RNA (1)...(19): siRNA sense strand
aaaugagauaccugaguga

SEQ ID NO: 2375859 - RNA, 19 nt, Homo sapiens
  misc_RNA (1)...(19): siRNA sense strand
gagaugacccuucggcaca

SEQ ID NO: 2375860 - RNA, 19 nt, Homo sapiens
  misc_RNA (1)...(19): siRNA sense strand
uggaagugguucauugcau

SEQ ID NO: 2375861 - RNA, 19 nt, Homo sapiens
  misc_RNA (1)...(19): siRNA sense strand
ccugagugaugauguggau

SEQ ID NO: 2375862 - RNA, 19 nt, Homo sapiens
  misc_RNA (1)...(19): siRNA sense strand
aaaugaagccaaagagaaa

SEQ ID NO: 2375863 - RNA, 19 nt, Homo sapiens
  misc_RNA (1)...(19): siRNA sense strand
ugaaguucgucuagagaaa

SEQ ID NO: 2375864 - RNA, 19 nt, Homo sapiens
  misc_RNA (1)...(19): siRNA sense strand
guuguaaaugugagagaaa

SEQ ID NO: 2375865 - RNA, 19 nt, Homo sapiens
  misc_RNA (1)...(19): siRNA sense strand
aauaagaaggugcgaguaa

SEQ ID NO: 2375866 - RNA, 19 nt, Homo sapiens
  misc_RNA (1)...(19): siRNA sense strand
caaaggaggcagaagacaa

SEQ ID NO: 2375867 - RNA, 19 nt, Homo sapiens
  misc_RNA (1)...(19): siRNA sense strand
ugauagagacacagaguuu

SEQ ID NO: 2375868 - RNA, 19 nt, Homo sapiens
  misc_RNA (1)...(19): siRNA sense strand
caaaagaaguacaaggaau

SEQ ID NO: 2375869 - RNA, 19 nt, Homo sapiens
  misc_RNA (1)...(19): siRNA sense strand
gcaauagagaagggagaaa

SEQ ID NO: 2375870 - RNA, 19 nt, Homo sapiens
  misc_RNA (1)...(19): siRNA sense strand
cuggagaaggagagcauaa

SEQ ID NO: 2375871 - RNA, 19 nt, Homo sapiens
  misc_RNA (1)...(19): siRNA sense strand
aguuaaagggccaggaaaa

SEQ ID NO: 2375872 - RNA, 19 nt, Homo sapiens
  misc_RNA (1)...(19): siRNA sense strand
aggcaauagagaagggaga

SEQ ID NO: 2375873 - RNA, 19 nt, Homo sapiens
  misc_RNA (1)...(19): siRNA sense strand
gaacaaucuaacugggcaa

SEQ ID NO: 2375874 - RNA, 19 nt, Homo sapiens
  misc_RNA (1)...(19): siRNA sense strand
guuucaagguuuacaggaa

SEQ ID NO: 2375875 - RNA, 19 nt, Homo sapiens
  misc_RNA (1)...(19): siRNA sense strand
gcguguagacauaaacaaa

SEQ ID NO: 2375876 - RNA, 19 nt, Homo sapiens
  misc_RNA (1)...(19): siRNA sense strand
ggagaaacccucauggaga

SEQ ID NO: 2375877 - RNA, 19 nt, Homo sapiens
  misc_RNA (1)...(19): siRNA sense strand
cagcaaaggaggcagaaga

SEQ ID NO: 2375878 - RNA, 19 nt, Homo sapiens
  misc_RNA (1)...(19): siRNA sense strand
cuagagaaacaguggucaa

SEQ ID NO: 2375879 - RNA, 19 nt, Homo sapiens
  misc_RNA (1)...(19): siRNA sense strand
ccugagaagaaaaggaaua

SEQ ID NO: 2375880 - RNA, 19 nt, Homo sapiens
  misc_RNA (1)...(19): siRNA sense strand
agguaggauucgugugauu

SEQ ID NO: 2375881 - RNA, 19 nt, Homo sapiens
  misc_RNA (1)...(19): siRNA sense strand
acacggaugcuuaaagaaa

SEQ ID NO: 2375882 - RNA, 19 nt, Homo sapiens
  misc_RNA (1)...(19): siRNA sense strand
uucuaaaccuucugaguaa

SEQ ID NO: 2375883 - RNA, 19 nt, Homo sapiens
  misc_RNA (1)...(19): siRNA sense strand
cgauguuguacaagguaua

SEQ ID NO: 2375884 - RNA, 19 nt, Homo sapiens
  misc_RNA (1)...(19): siRNA sense strand
gugcaagcaaagaaagaau

SEQ ID NO: 2375885 - RNA, 19 nt, Homo sapiens
  misc_RNA (1)...(19): siRNA sense strand
aaucagaaguugacagcca

SEQ ID NO: 2375886 - RNA, 19 nt, Homo sapiens
  misc_RNA (1)...(19): siRNA sense strand
ggugaaagagcaucagauu

SEQ ID NO: 2375887 - RNA, 19 nt, Homo sapiens
  misc_RNA (1)...(19): siRNA sense strand
cagaagaagccaggaacua

SEQ ID NO: 2375888 - RNA, 19 nt, Homo sapiens
  misc_RNA (1)...(19): siRNA sense strand
cuucacaaguauuugcaaa

SEQ ID NO: 2375889 - RNA, 19 nt, Homo sapiens
  misc_RNA (1)...(19): siRNA sense strand
aagcaaagccagaucauga

SEQ ID NO: 2375890 - RNA, 19 nt, Homo sapiens
  misc_RNA (1)...(19): siRNA sense strand
cagcagaagaagccaggaa

SEQ ID NO: 2375891 - RNA, 19 nt, Homo sapiens
  misc_RNA (1)...(19): siRNA sense strand
ucagcgaaguggugaaaga

SEQ ID NO: 2375892 - RNA, 19 nt, Homo sapiens
  misc_RNA (1)...(19): siRNA sense strand
cuucaucagugcuuggaaa

SEQ ID NO: 2375893 - RNA, 19 nt, Homo sapiens
  misc_RNA (1)...(19): siRNA sense strand
ggugcgaguaacagugaaa

SEQ ID NO: 2375894 - RNA, 19 nt, Homo sapiens
  misc_RNA (1)...(19): siRNA sense strand
cuacuaaagaugaugauga

SEQ ID NO: 2375895 - RNA, 19 nt, Homo sapiens
  misc_RNA (1)...(19): siRNA sense strand
gccaagaggauguguucua

SEQ ID NO: 2375896 - RNA, 19 nt, Homo sapiens
  misc_RNA (1)...(19): siRNA sense strand
ucucaaggccauaguauau

SEQ ID NO: 2375897 - RNA, 19 nt, Homo sapiens
  misc_RNA (1)...(19): siRNA sense strand
caccauaagucaacaccaa

SEQ ID NO: 2375898 - RNA, 19 nt, Homo sapiens
  misc_RNA (1)...(19): siRNA sense strand
aggaagagaggaaaagaaa

SEQ ID NO: 2375899 - RNA, 19 nt, Homo sapiens
  misc_RNA (1)...(19): siRNA sense strand
uggaagaggaucuaggaga

SEQ ID NO: 2375900 - RNA, 19 nt, Homo sapiens
  misc_RNA (1)...(19): siRNA sense strand
ccgagaaagcaaagccaga

SEQ ID NO: 2375901 - RNA, 19 nt, Homo sapiens
  misc_RNA (1)...(19): siRNA sense strand
ggauaauagaugauuggau

SEQ ID NO: 2375902 - RNA, 19 nt, Homo sapiens
  misc_RNA (1)...(19): siRNA sense strand
uaauacagaaccagcauaa

SEQ ID NO: 2375903 - RNA, 19 nt, Homo sapiens
  misc_RNA (1)...(19): siRNA sense strand
gauuacagaagguaggauu

SEQ ID NO: 2375904 - RNA, 19 nt, Homo sapiens
  misc_RNA (1)...(19): siRNA sense strand
ccacagacaaugaccguuu

SEQ ID NO: 2375905 - RNA, 19 nt, Homo sapiens
  misc_RNA (1)...(19): siRNA sense strand
gcgaaguggugaaagagca

SEQ ID NO: 2375906 - RNA, 19 nt, Homo sapiens
  misc_RNA (1)...(19): siRNA sense strand
auuuagaagaugagacuga

SEQ ID NO: 2375907 - RNA, 19 nt, Homo sapiens
  misc_RNA (1)...(19): siRNA sense strand
acauauuacaugacgaaga

SEQ ID NO: 2375908 - RNA, 19 nt, Homo sapiens
  misc_RNA (1)...(19): siRNA sense strand
acggaugcuuaaagaaauu

SEQ ID NO: 2375909 - RNA, 19 nt, Homo sapiens
  misc_RNA (1)...(19): siRNA sense strand
gaagaggaucuaggagaaa

SEQ ID NO: 2375910 - RNA, 19 nt, Homo sapiens
  misc_RNA (1)...(19): siRNA sense strand
cagcuauuguugagaaaau

SEQ ID NO: 2375911 - RNA, 19 nt, Homo sapiens
  misc_RNA (1)...(19): siRNA sense strand
cuaacagaagagaugaaua

SEQ ID NO: 2375912 - RNA, 19 nt, Homo sapiens
  misc_RNA (1)...(19): siRNA sense strand
cuugauuaugcuuggauua

SEQ ID NO: 2375913 - RNA, 19 nt, Homo sapiens
  misc_RNA (1)...(19): siRNA sense strand
gugcuaaugaguaccauaa

SEQ ID NO: 2375914 - RNA, 19 nt, Homo sapiens
  misc_RNA (1)...(19): siRNA sense strand
aaaggaggcagaagacaaa

SEQ ID NO: 2375915 - RNA, 19 nt, Homo sapiens
  misc_RNA (1)...(19): siRNA sense strand
uugagaaaauugaggaaga

SEQ ID NO: 2375916 - RNA, 19 nt, Homo sapiens
  misc_RNA (1)...(19): siRNA sense strand
aggaauaaaaggagcuaau

SEQ ID NO: 2375917 - RNA, 19 nt, Homo sapiens
  misc_RNA (1)...(19): siRNA sense strand
aaacugaccuaaaugggaa

SEQ ID NO: 2375918 - RNA, 19 nt, Homo sapiens
  misc_RNA (1)...(19): siRNA sense strand
cauuauuaaacccaggaaa

SEQ ID NO: 2375919 - RNA, 19 nt, Homo sapiens
  misc_RNA (1)...(19): siRNA sense strand
aggcagaagacaaaauuaa

SEQ ID NO: 2375920 - RNA, 19 nt, Homo sapiens
  misc_RNA (1)...(19): siRNA sense strand
gagcauaaaaucauggaau

SEQ ID NO: 2375921 - RNA, 19 nt, Homo sapiens
  misc_RNA (1)...(19): siRNA sense strand
ccaggaacuacaaggaaaa

SEQ ID NO: 2375922 - RNA, 19 nt, Homo sapiens
  misc_RNA (1)...(19): siRNA sense strand
gaaacacaucagacacaaa

SEQ ID NO: 2375923 - RNA, 19 nt, Homo sapiens
  misc_RNA (1)...(19): siRNA sense strand
uggcacaggaggaggagaa

SEQ ID NO: 2375924 - RNA, 19 nt, Homo sapiens
  misc_RNA (1)...(19): siRNA sense strand
cuggaaggccacauggaaa

SEQ ID NO: 2375925 - RNA, 19 nt, Homo sapiens
  misc_RNA (1)...(19): siRNA sense strand
cggaagaaacgcaagcaga

SEQ ID NO: 2375926 - RNA, 19 nt, Homo sapiens
  misc_RNA (1)...(19): siRNA sense strand
gccuaaugauagugggcga

SEQ ID NO: 2375927 - RNA, 19 nt, Homo sapiens
  misc_RNA (1)...(19): siRNA sense strand
uggaaggccacauggaaau

SEQ ID NO: 2375928 - RNA, 19 nt, Homo sapiens
  misc_RNA (1)...(19): siRNA sense strand
aggaggagaaugagaaacu

SEQ ID NO: 2375929 - RNA, 19 nt, Homo sapiens
  misc_RNA (1)...(19): siRNA sense strand
uggaaauccuggagaagcu

SEQ ID NO: 2375930 - RNA, 19 nt, Homo sapiens
  misc_RNA (1)...(19): siRNA sense strand
gacaccaaugugagggaua

SEQ ID NO: 2375931 - RNA, 19 nt, Homo sapiens
  misc_RNA (1)...(19): siRNA sense strand
agguggagauuguggagca

SEQ ID NO: 2375932 - RNA, 19 nt, Homo sapiens
  misc_RNA (1)...(19): siRNA sense strand
aggaggaggagaaugagaa

SEQ ID NO: 2375933 - RNA, 19 nt, Homo sapiens
  misc_RNA (1)...(19): siRNA sense strand
ugcagaaggugaagggcca

SEQ ID NO: 2375934 - RNA, 19 nt, Homo sapiens
  misc_RNA (1)...(19): siRNA sense strand
aaugauagugggcgagaga

SEQ ID NO: 2375935 - RNA, 19 nt, Homo sapiens
  misc_RNA (1)...(19): siRNA sense strand
uugagaaguuccuggcuga

SEQ ID NO: 2375936 - RNA, 19 nt, Homo sapiens
  misc_RNA (1)...(19): siRNA sense strand
uggagauuguggagcacuu

SEQ ID NO: 2375937 - RNA, 19 nt, Homo sapiens
  misc_RNA (1)...(19): siRNA sense strand
gugagaagcuggaggagga

SEQ ID NO: 2375938 - RNA, 19 nt, Homo sapiens
  misc_RNA (1)...(19): siRNA sense strand
ccggauaacuuaaaugcga

SEQ ID NO: 2375939 - RNA, 19 nt, Homo sapiens
  misc_RNA (1)...(19): siRNA sense strand
gggaagaggagugggacga

SEQ ID NO: 2375940 - RNA, 19 nt, Homo sapiens
  misc_RNA (1)...(19): siRNA sense strand
aaugaagugugucgggaga

SEQ ID NO: 2375941 - RNA, 19 nt, Homo sapiens
  misc_RNA (1)...(19): siRNA sense strand
uggaugaggaggagccuga

SEQ ID NO: 2375942 - RNA, 19 nt, Homo sapiens
  misc_RNA (1)...(19): siRNA sense strand
gggaaguggaugugcuaag

SEQ ID NO: 2375943 - RNA, 19 nt, Homo sapiens
  misc_RNA (1)...(19): siRNA sense strand
cuuaaaugcgaguauugaa

SEQ ID NO: 2375944 - RNA, 19 nt, Homo sapiens
  misc_RNA (1)...(19): siRNA sense strand
guauugaaagucagggcca

SEQ ID NO: 2375945 - RNA, 19 nt, Homo sapiens
  misc_RNA (1)...(19): siRNA sense strand
acaagagacugaaggcaga

SEQ ID NO: 2375946 - RNA, 19 nt, Homo sapiens
  misc_RNA (1)...(19): siRNA sense strand
augguagagugguggcaaa

SEQ ID NO: 2375947 - RNA, 19 nt, Homo sapiens
  misc_RNA (1)...(19): siRNA sense strand
uuggaaaagaagaaggaaa

SEQ ID NO: 2375948 - RNA, 19 nt, Homo sapiens
  misc_RNA (1)...(19): siRNA sense strand
cagacaaguacaagagacu

SEQ ID NO: 2375949 - RNA, 19 nt, Homo sapiens
  misc_RNA (1)...(19): siRNA sense strand
acugaaggcagaaguggaa

SEQ ID NO: 2375950 - RNA, 19 nt, Homo sapiens
  misc_RNA (1)...(19): siRNA sense strand
agagacaagaagagaaacu

SEQ ID NO: 2375951 - RNA, 19 nt, Homo sapiens
  misc_RNA (1)...(19): siRNA sense strand
uagagagacaagaagagaa

SEQ ID NO: 2375952 - RNA, 19 nt, Homo sapiens
  misc_RNA (1)...(19): siRNA sense strand
aucgaaaucugcugggaga

SEQ ID NO: 2375953 - RNA, 19 nt, Homo sapiens
  misc_RNA (1)...(19): siRNA sense strand
uggaaaagaagaaggaaac

SEQ ID NO: 2375954 - RNA, 19 nt, Homo sapiens
  misc_RNA (1)...(19): siRNA sense strand
cugaagaagacaagaggau

SEQ ID NO: 2375955 - RNA, 19 nt, Homo sapiens
  misc_RNA (1)...(19): siRNA sense strand
ggauuauaacagagaacau

SEQ ID NO: 2375956 - RNA, 19 nt, Homo sapiens
  misc_RNA (1)...(19): siRNA sense strand
uggaugaagcagaugaaau

SEQ ID NO: 2375957 - RNA, 19 nt, Homo sapiens
  misc_RNA (1)...(19): siRNA sense strand
guucgaaaugaaaugcaaa

SEQ ID NO: 2375958 - RNA, 19 nt, Homo sapiens
  misc_RNA (1)...(19): siRNA sense strand
gggucgauuugggaggaaa

SEQ ID NO: 2375959 - RNA, 19 nt, Homo sapiens
  misc_RNA (1)...(19): siRNA sense strand
uaauguugagagagaggaa

SEQ ID NO: 2375960 - RNA, 19 nt, Homo sapiens
  misc_RNA (1)...(19): siRNA sense strand
auacuacaguggaggagau

SEQ ID NO: 2375961 - RNA, 19 nt, Homo sapiens
  misc_RNA (1)...(19): siRNA sense strand
uggaccagaaggagagaga

SEQ ID NO: 2375962 - RNA, 19 nt, Homo sapiens
  misc_RNA (1)...(19): siRNA sense strand
uguucgaaaugaaaugcaa

SEQ ID NO: 2375963 - RNA, 19 nt, Homo sapiens
  misc_RNA (1)...(19): siRNA sense strand
auggugucaucgagagcaa

SEQ ID NO: 2375964 - RNA, 19 nt, Homo sapiens
  misc_RNA (1)...(19): siRNA sense strand
gcggauuauaacagagaac

SEQ ID NO: 2375965 - RNA, 19 nt, Homo sapiens
  misc_RNA (1)...(19): siRNA sense strand
aggaauggaaguuggauac

SEQ ID NO: 2375966 - RNA, 19 nt, Homo sapiens
  misc_RNA (1)...(19): siRNA sense strand
agaagaugcaugccagaga

SEQ ID NO: 2375967 - RNA, 19 nt, Homo sapiens
  misc_RNA (1)...(19): siRNA sense strand
gguaugaugugauugcuca

SEQ ID NO: 2375968 - RNA, 19 nt, Homo sapiens
  misc_RNA (1)...(19): siRNA sense strand
gagagagaggaauggaagu

SEQ ID NO: 2375969 - RNA, 19 nt, Homo sapiens
  misc_RNA (1)...(19): siRNA sense strand
cuuugugacuuguacgaga

SEQ ID NO: 2375970 - RNA, 19 nt, Homo sapiens
  misc_RNA (1)...(19): siRNA sense strand
gugacauggaccagaagga

SEQ ID NO: 2375971 - RNA, 19 nt, Homo sapiens
  misc_RNA (1)...(19): siRNA sense strand
cgaauguacacaagagaaa

SEQ ID NO: 2375972 - RNA, 19 nt, Homo sapiens
  misc_RNA (1)...(19): siRNA sense strand
cugaagaagagaaagguaa

SEQ ID NO: 2375973 - RNA, 19 nt, Homo sapiens
  misc_RNA (1)...(19): siRNA sense strand
guuuagaagaggaggaaaa

SEQ ID NO: 2375974 - RNA, 19 nt, Homo sapiens
  misc_RNA (1)...(19): siRNA sense strand
agaguguauuugagagaaa

SEQ ID NO: 2375975 - RNA, 19 nt, Homo sapiens
  misc_RNA (1)...(19): siRNA sense strand
gagaaagauuugaaggcuu

SEQ ID NO: 2375976 - RNA, 19 nt, Homo sapiens
  misc_RNA (1)...(19): siRNA sense strand
gguuaaggcagcaggauuu

SEQ ID NO: 2375977 - RNA, 19 nt, Homo sapiens
  misc_RNA (1)...(19): siRNA sense strand
aaauguaggguuaggguaa

SEQ ID NO: 2375978 - RNA, 19 nt, Homo sapiens
  misc_RNA (1)...(19): siRNA sense strand
ucucagaauuucaggaaga

SEQ ID NO: 2375979 - RNA, 19 nt, Homo sapiens
  misc_RNA (1)...(19): siRNA sense strand
ugaagaagagaaagguaaa

SEQ ID NO: 2375980 - RNA, 19 nt, Homo sapiens
  misc_RNA (1)...(19): siRNA sense strand
ugaaacagggagugguaaa

SEQ ID NO: 2375981 - RNA, 19 nt, Homo sapiens
  misc_RNA (1)...(19): siRNA sense strand
gugaauuaaaugagccuaa

SEQ ID NO: 2375982 - RNA, 19 nt, Homo sapiens
  misc_RNA (1)...(19): siRNA sense strand
aggaaugauuucuggaaga

SEQ ID NO: 2375983 - RNA, 19 nt, Homo sapiens
  misc_RNA (1)...(19): siRNA sense strand
agacaaaggacauugaaga

SEQ ID NO: 2375984 - RNA, 19 nt, Homo sapiens
  misc_RNA (1)...(19): siRNA sense strand
caauaaaccacgugaucuu

SEQ ID NO: 2375985 - RNA, 19 nt, Homo sapiens
  misc_RNA (1)...(19): siRNA sense strand
uggaagacuuacugccaaa

SEQ ID NO: 2375986 - RNA, 19 nt, Homo sapiens
  misc_RNA (1)...(19): siRNA sense strand
cagaaauauugaaggagca

SEQ ID NO: 2375987 - RNA, 19 nt, Homo sapiens
  misc_RNA (1)...(19): siRNA sense strand
cccgaggaaucuugggaaa

SEQ ID NO: 2375988 - RNA, 19 nt, Homo sapiens
  misc_RNA (1)...(19): siRNA sense strand
ggugaaacagggaguggua

SEQ ID NO: 2375989 - RNA, 19 nt, Homo sapiens
  misc_RNA (1)...(19): siRNA sense strand
uguaauugauacuggaaga

SEQ ID NO: 2375990 - RNA, 19 nt, Homo sapiens
  misc_RNA (1)...(19): siRNA sense strand
auguaaagcaggaguuaau

SEQ ID NO: 2375991 - RNA, 19 nt, Homo sapiens
  misc_RNA (1)...(19): siRNA sense strand
ccucaugauguaagaaauu

SEQ ID NO: 2375992 - RNA, 19 nt, Homo sapiens
  misc_RNA (1)...(19): siRNA sense strand
aggagaaagugcauugaau

SEQ ID NO: 2375993 - RNA, 19 nt, Homo sapiens
  misc_RNA (1)...(19): siRNA sense strand
gcaaagaauuauuggagug

SEQ ID NO: 2375994 - RNA, 19 nt, Homo sapiens
  misc_RNA (1)...(19): siRNA sense strand
auacaaagucaguggaugu

SEQ ID NO: 2375995 - RNA, 19 nt, Homo sapiens
  misc_RNA (1)...(19): siRNA sense strand
gagugaucaaugagcauaa

SEQ ID NO: 2375996 - RNA, 19 nt, Homo sapiens
  misc_RNA (1)...(19): siRNA sense strand
acgacaagaaggagguuau

SEQ ID NO: 2375997 - RNA, 19 nt, Homo sapiens
  misc_RNA (1)...(19): siRNA sense strand
aaauauugaaggagcagua

SEQ ID NO: 2375998 - RNA, 19 nt, Homo sapiens
  misc_RNA (1)...(19): siRNA sense strand
ggaaggaaacagagccuca

SEQ ID NO: 2375999 - RNA, 19 nt, Homo sapiens
  misc_RNA (1)...(19): siRNA sense strand
cuaaaugagugggaagcaa

SEQ ID NO: 2376000 - RNA, 19 nt, Homo sapiens
  misc_RNA (1)...(19): siRNA sense strand
acgauaugcugaacaacaa

SEQ ID NO: 2376001 - RNA, 19 nt, Homo sapiens
  misc_RNA (1)...(19): siRNA sense strand
gguuguggcaggugaaaca

SEQ ID NO: 2376002 - RNA, 19 nt, Homo sapiens
  misc_RNA (1)...(19): siRNA sense strand
gcggcaagaacaagaaaca

SEQ ID NO: 2376003 - RNA, 19 nt, Homo sapiens
  misc_RNA (1)...(19): siRNA sense strand
cauuuaagacaaaggacau

SEQ ID NO: 2376004 - RNA, 19 nt, Homo sapiens
  misc_RNA (1)...(19): siRNA sense strand
uacuggaaauguaggguua

SEQ ID NO: 2376005 - RNA, 19 nt, Homo sapiens
  misc_RNA (1)...(19): siRNA sense strand
ccgaagaaucucagcaguu

SEQ ID NO: 2376006 - RNA, 19 nt, Homo sapiens
  misc_RNA (1)...(19): siRNA sense strand
ccagaguguauuugagaga

SEQ ID NO: 2376007 - RNA, 19 nt, Homo sapiens
  misc_RNA (1)...(19): siRNA sense strand
cucagaauauugucagaaa

SEQ ID NO: 2376008 - RNA, 19 nt, Homo sapiens
  misc_RNA (1)...(19): siRNA sense strand
ggaccuggaggaaggaauu

SEQ ID NO: 2376009 - RNA, 19 nt, Homo sapiens
  misc_RNA (1)...(19): siRNA sense strand
ggcccaaggcaaagcacaa

SEQ ID NO: 2376010 - RNA, 19 nt, Homo sapiens
  misc_RNA (1)...(19): siRNA sense strand
cugcagaucauuacggaau

SEQ ID NO: 2376011 - RNA, 19 nt, Homo sapiens
  misc_RNA (1)...(19): siRNA sense strand
ggcaagaacaagaaacaca

SEQ ID NO: 2376012 - RNA, 19 nt, Homo sapiens
  misc_RNA (1)...(19): siRNA sense strand
gcuaaggaaacuucaagaa

SEQ ID NO: 2376013 - RNA, 19 nt, Homo sapiens
  misc_RNA (1)...(19): siRNA sense strand
uggaagaggaagaagaagu

SEQ ID NO: 2376014 - RNA, 19 nt, Homo sapiens
  misc_RNA (1)...(19): siRNA sense strand
ggauguaaagcaggaguua

SEQ ID NO: 2376015 - RNA, 19 nt, Homo sapiens
  misc_RNA (1)...(19): siRNA sense strand
cugaagaucccgaggaauc

SEQ ID NO: 2376016 - RNA, 19 nt, Homo sapiens
  misc_RNA (1)...(19): siRNA sense strand
auuuggaaccuguuagaaa

SEQ ID NO: 2376017 - RNA, 19 nt, Homo sapiens
  misc_RNA (1)...(19): siRNA sense strand
uaucagauccggauggaau

SEQ ID NO: 2376018 - RNA, 19 nt, Homo sapiens
  misc_RNA (1)...(19): siRNA sense strand
uggagacguuugucaguaa

SEQ ID NO: 2376019 - RNA, 19 nt, Homo sapiens
  misc_RNA (1)...(19): siRNA sense strand
gaugaauugggcugugaaa

SEQ ID NO: 2376020 - RNA, 19 nt, Homo sapiens
  misc_RNA (1)...(19): siRNA sense strand
cauaugaagaggacccuaa

SEQ ID NO: 2376021 - RNA, 19 nt, Homo sapiens
  misc_RNA (1)...(19): siRNA sense strand
gaagauaagguaugccaga

SEQ ID NO: 2376022 - RNA, 19 nt, Homo sapiens
  misc_RNA (1)...(19): siRNA sense strand
ugguaaaaguacucaggua

SEQ ID NO: 2376023 - RNA, 19 nt, Homo sapiens
  misc_RNA (1)...(19): siRNA sense strand
gaaauuucuggaagaggaa

SEQ ID NO: 2376024 - RNA, 19 nt, Homo sapiens
  misc_RNA (1)...(19): siRNA sense strand
auaacaaacuagagcaaag

SEQ ID NO: 2376025 - RNA, 19 nt, Homo sapiens
  misc_RNA (1)...(19): siRNA sense strand
caaaacugcuggaugcaaa

SEQ ID NO: 2376026 - RNA, 19 nt, Homo sapiens
  misc_RNA (1)...(19): siRNA sense strand
aagaauuauuggagugauc

SEQ ID NO: 2376027 - RNA, 19 nt, Homo sapiens
  misc_RNA (1)...(19): siRNA sense strand
aggaagaagaaguaaccau

SEQ ID NO: 2376028 - RNA, 19 nt, Homo sapiens
  misc_RNA (1)...(19): siRNA sense strand
aauugauacuggaagaaca

SEQ ID NO: 2376029 - RNA, 19 nt, Homo sapiens
  misc_RNA (1)...(19): siRNA sense strand
uuugaaggcuuuauggauu

SEQ ID NO: 2376030 - RNA, 19 nt, Homo sapiens
  misc_RNA (1)...(19): siRNA sense strand
gaauuauuggagugaucaa

SEQ ID NO: 2376031 - RNA, 19 nt, Homo sapiens
  misc_RNA (1)...(19): siRNA sense strand
gacaaaggacauugaagau

SEQ ID NO: 2376032 - RNA, 19 nt, Homo sapiens
  misc_RNA (1)...(19): siRNA sense strand
ccuacauugagcagggcaa

SEQ ID NO: 2376033 - RNA, 19 nt, Homo sapiens
  misc_RNA (1)...(19): siRNA sense strand
aggcacuggcuguggucua

SEQ ID NO: 2376034 - RNA, 19 nt, Homo sapiens
  misc_RNA (1)...(19): siRNA sense strand
ccgggauacccaugagaga

SEQ ID NO: 2376035 - RNA, 19 nt, Homo sapiens
  misc_RNA (1)...(19): siRNA sense strand
ccguaaguccugugagaug

SEQ ID NO: 2376036 - RNA, 19 nt, Homo sapiens
  misc_RNA (1)...(19): siRNA sense strand
gggauacccaugagagacu

SEQ ID NO: 2376037 - RNA, 19 nt, Homo sapiens
  misc_RNA (1)...(19): siRNA sense strand
cggacagggcccuagugaa

SEQ ID NO: 2376038 - RNA, 19 nt, Homo sapiens
  misc_RNA (1)...(19): siRNA sense strand
ccucuuagaucgagugguc

SEQ ID NO: 2376039 - RNA, 19 nt, Homo sapiens
  misc_RNA (1)...(19): siRNA sense strand
ccucgaacgcaguagauaa

SEQ ID NO: 2376040 - RNA, 19 nt, Homo sapiens
  misc_RNA (1)...(19): siRNA sense strand
ucuaaaagccagaaguaua

SEQ ID NO: 2376041 - RNA, 19 nt, Homo sapiens
  misc_RNA (1)...(19): siRNA sense strand
cugaagugguacaaagaga

SEQ ID NO: 2376042 - RNA, 19 nt, Homo sapiens
  misc_RNA (1)...(19): siRNA sense strand
guuauuaaaucuugggagu

SEQ ID NO: 2376043 - RNA, 19 nt, Homo sapiens
  misc_RNA (1)...(19): siRNA sense strand
aguuguacuucaagacuua

SEQ ID NO: 2376044 - RNA, 19 nt, Homo sapiens
  misc_RNA (1)...(19): siRNA sense strand
ccuucaaguagcuaagaaa

SEQ ID NO: 2376045 - RNA, 19 nt, Homo sapiens
  misc_RNA (1)...(19): siRNA sense strand
cuauaaagucccagaaucu

SEQ ID NO: 2376046 - RNA, 19 nt, Homo sapiens
  misc_RNA (1)...(19): siRNA sense strand
uguaaagcauggagccaau

SEQ ID NO: 2376047 - RNA, 19 nt, Homo sapiens
  misc_RNA (1)...(19): siRNA sense strand
agauauaugugguaagaac

SEQ ID NO: 2376048 - RNA, 19 nt, Homo sapiens
  misc_RNA (1)...(19): siRNA sense strand
ccuaaacaucagccagaua

SEQ ID NO: 2376049 - RNA, 19 nt, Homo sapiens
  misc_RNA (1)...(19): siRNA sense strand
gcauaugaaaguggacaaa

SEQ ID NO: 2376050 - RNA, 19 nt, Homo sapiens
  misc_RNA (1)...(19): siRNA sense strand
uagaaauggaucggagaaa

SEQ ID NO: 2376051 - RNA, 19 nt, Homo sapiens
  misc_RNA (1)...(19): siRNA sense strand
guagaaauggaucggagaa

SEQ ID NO: 2376052 - RNA, 19 nt, Homo sapiens
  misc_RNA (1)...(19): siRNA sense strand
aguguuucuuggagauaua

SEQ ID NO: 2376053 - RNA, 19 nt, Homo sapiens
  misc_RNA (1)...(19): siRNA sense strand
guuguguagcucaggaaua

SEQ ID NO: 2376054 - RNA, 19 nt, Homo sapiens
  misc_RNA (1)...(19): siRNA sense strand
cccucaacuucaaaggaaa

SEQ ID NO: 2376055 - RNA, 19 nt, Homo sapiens
  misc_RNA (1)...(19): siRNA sense strand
ccacuuacuaugaagaaaa

SEQ ID NO: 2376056 - RNA, 19 nt, Homo sapiens
  misc_RNA (1)...(19): siRNA sense strand
auauagaaucccagaagau

SEQ ID NO: 2376057 - RNA, 19 nt, Homo sapiens
  misc_RNA (1)...(19): siRNA sense strand
cucagaagauagcgcuaaa

SEQ ID NO: 2376058 - RNA, 19 nt, Homo sapiens
  misc_RNA (1)...(19): siRNA sense strand
uauuaaagauucagagccu

SEQ ID NO: 2376059 - RNA, 19 nt, Homo sapiens
  misc_RNA (1)...(19): siRNA sense strand
acuaaauaccuuccacaaa

SEQ ID NO: 2376060 - RNA, 19 nt, Homo sapiens
  misc_RNA (1)...(19): siRNA sense strand
cuaaaagccagaaguauaa

SEQ ID NO: 2376061 - RNA, 19 nt, Homo sapiens
  misc_RNA (1)...(19): siRNA sense strand
acauggagacugaaccaaa

SEQ ID NO: 2376062 - RNA, 19 nt, Homo sapiens
  misc_RNA (1)...(19): siRNA sense strand
cggagaaaugugucugaau

SEQ ID NO: 2376063 - RNA, 19 nt, Homo sapiens
  misc_RNA (1)...(19): siRNA sense strand
gagacugaaccaaaggcaa

SEQ ID NO: 2376064 - RNA, 19 nt, Homo sapiens
  misc_RNA (1)...(19): siRNA sense strand
uccuguaaauaaagggaau

SEQ ID NO: 2376065 - RNA, 19 nt, Homo sapiens
  misc_RNA (1)...(19): siRNA sense strand
ugagauacguauugaguug

SEQ ID NO: 2376066 - RNA, 19 nt, Homo sapiens
  misc_RNA (1)...(19): siRNA sense strand
cugaagauaaagugggcca

SEQ ID NO: 2376067 - RNA, 19 nt, Homo sapiens
  misc_RNA (1)...(19): siRNA sense strand
acaaagagagugugugcca

SEQ ID NO: 2376068 - RNA, 19 nt, Homo sapiens
  misc_RNA (1)...(19): siRNA sense strand
uggauuggaacuagaaaca

SEQ ID NO: 2376069 - RNA, 19 nt, Homo sapiens
  misc_RNA (1)...(19): siRNA sense strand
agauaagaauaccugaaga

SEQ ID NO: 2376070 - RNA, 19 nt, Homo sapiens
  misc_RNA (1)...(19): siRNA sense strand
gugucugaauuuaagagua

SEQ ID NO: 2376071 - RNA, 19 nt, Homo sapiens
  misc_RNA (1)...(19): siRNA sense strand
agacugagugauauaacua

SEQ ID NO: 2376072 - RNA, 19 nt, Homo sapiens
  misc_RNA (1)...(19): siRNA sense strand
ccgaagaagaaaaguauca

SEQ ID NO: 2376073 - RNA, 19 nt, Homo sapiens
  misc_RNA (1)...(19): siRNA sense strand
guagauaagucaaggucug

SEQ ID NO: 2376074 - RNA, 19 nt, Homo sapiens
  misc_RNA (1)...(19): siRNA sense strand
ccaccaaaugagauacgua

SEQ ID NO: 2376075 - RNA, 19 nt, Homo sapiens
  misc_RNA (1)...(19): siRNA sense strand
gcuaagaaaaugaaguuga

SEQ ID NO: 2376076 - RNA, 19 nt, Homo sapiens
  misc_RNA (1)...(19): siRNA sense strand
auauuauaggccagcguua

SEQ ID NO: 2376077 - RNA, 19 nt, Homo sapiens
  misc_RNA (1)...(19): siRNA sense strand
uccucuagacugagugaua

SEQ ID NO: 2376078 - RNA, 19 nt, Homo sapiens
  misc_RNA (1)...(19): siRNA sense strand
uucaagacuuacuggcaua

SEQ ID NO: 2376079 - RNA, 19 nt, Homo sapiens
  misc_RNA (1)...(19): siRNA sense strand
ccucaacuucaaaggaaaa

SEQ ID NO: 2376080 - RNA, 19 nt, Homo sapiens
  misc_RNA (1)...(19): siRNA sense strand
cucuagacugagugauaua

SEQ ID NO: 2376081 - RNA, 19 nt, Homo sapiens
  misc_RNA (1)...(19): siRNA sense strand
agaucaacauuaugcgcuu

SEQ ID NO: 2376082 - RNA, 19 nt, Homo sapiens
  misc_RNA (1)...(19): siRNA sense strand
agugauauaacuagcucua

SEQ ID NO: 2376083 - RNA, 19 nt, Homo sapiens
  misc_RNA (1)...(19): siRNA sense strand
acuagaaacagaugagaac

SEQ ID NO: 2376084 - RNA, 19 nt, Homo sapiens
  misc_RNA (1)...(19): siRNA sense strand
cugccucaacagagugaua

SEQ ID NO: 2376085 - RNA, 19 nt, Homo sapiens
  misc_RNA (1)...(19): siRNA sense strand
cugaagcagcaguuaggaa

SEQ ID NO: 2376086 - RNA, 19 nt, Homo sapiens
  misc_RNA (1)...(19): siRNA sense strand
cuguaccucugaagauaaa

SEQ ID NO: 2376087 - RNA, 19 nt, Homo sapiens
  misc_RNA (1)...(19): siRNA sense strand
caaucagaaacuaagaaga

SEQ ID NO: 2376088 - RNA, 19 nt, Homo sapiens
  misc_RNA (1)...(19): siRNA sense strand
cagcuauccauuacaacaa

SEQ ID NO: 2376089 - RNA, 19 nt, Homo sapiens
  misc_RNA (1)...(19): siRNA sense strand
agcauaugaaaguggacaa

SEQ ID NO: 2376090 - RNA, 19 nt, Homo sapiens
  misc_RNA (1)...(19): siRNA sense strand
gccaugugaaggaaauaaa

SEQ ID NO: 2376091 - RNA, 19 nt, Homo sapiens
  misc_RNA (1)...(19): siRNA sense strand
uggaacaggcccaagauca

SEQ ID NO: 2376092 - RNA, 19 nt, Homo sapiens
  misc_RNA (1)...(19): siRNA sense strand
cgagacaguacuacaauca

SEQ ID NO: 2376093 - RNA, 19 nt, Homo sapiens
  misc_RNA (1)...(19): siRNA sense strand
cuguaugaauagacauguu

SEQ ID NO: 2376094 - RNA, 19 nt, Homo sapiens
  misc_RNA (1)...(19): siRNA sense strand
acauacaggaucucaagaa

SEQ ID NO: 2376095 - RNA, 19 nt, Homo sapiens
  misc_RNA (1)...(19): siRNA sense strand
cuucaagacuuacuggcau

SEQ ID NO: 2376096 - RNA, 19 nt, Homo sapiens
  misc_RNA (1)...(19): siRNA sense strand
aacuagaaacagaugagaa

SEQ ID NO: 2376097 - RNA, 19 nt, Homo sapiens
  misc_RNA (1)...(19): siRNA sense strand
gcaaagaggccaagcagag

SEQ ID NO: 2376098 - RNA, 19 nt, Homo sapiens
  misc_RNA (1)...(19): siRNA sense strand
gaacaaagucagauggaca

SEQ ID NO: 2376099 - RNA, 19 nt, Homo sapiens
  misc_RNA (1)...(19): siRNA sense strand
cagcaaggccuaugggaga

SEQ ID NO: 2376100 - RNA, 19 nt, Homo sapiens
  misc_RNA (1)...(19): siRNA sense strand
gaacagaaguuaagagagg

SEQ ID NO: 2376101 - RNA, 19 nt, Homo sapiens
  misc_RNA (1)...(19): siRNA sense strand
ugccugaagaugugggaaa

SEQ ID NO: 2376102 - RNA, 19 nt, Homo sapiens
  misc_RNA (1)...(19): siRNA sense strand
acagaaguuaagagaggua

SEQ ID NO: 2376103 - RNA, 19 nt, Homo sapiens
  misc_RNA (1)...(19): siRNA sense strand
ccacaugaaagaagaaaau

SEQ ID NO: 2376104 - RNA, 19 nt, Homo sapiens
  misc_RNA (1)...(19): siRNA sense strand
cgauaaaggauugugaaaa

SEQ ID NO: 2376105 - RNA, 19 nt, Homo sapiens
  misc_RNA (1)...(19): siRNA sense strand
aggcaauaaccacaugaaa

SEQ ID NO: 2376106 - RNA, 19 nt, Homo sapiens
  misc_RNA (1)...(19): siRNA sense strand
caaaguacagcaaggccua

SEQ ID NO: 2376107 - RNA, 19 nt, Homo sapiens
  misc_RNA (1)...(19): siRNA sense strand
uccugaacuuauagagcaa

SEQ ID NO: 2376108 - RNA, 19 nt, Homo sapiens
  misc_RNA (1)...(19): siRNA sense strand
cccucaaguucaacagcua

SEQ ID NO: 2376109 - RNA, 19 nt, Homo sapiens
  misc_RNA (1)...(19): siRNA sense strand
gcaauucagugcuuggaga

SEQ ID NO: 2376110 - RNA, 19 nt, Homo sapiens
  misc_RNA (1)...(19): siRNA sense strand
cauuagaucuugacccuga

SEQ ID NO: 2376111 - RNA, 19 nt, Homo sapiens
  misc_RNA (1)...(19): siRNA sense strand
ugaaaauagcagaacagaa

SEQ ID NO: 2376112 - RNA, 19 nt, Homo sapiens
  misc_RNA (1)...(19): siRNA sense strand
gauaaauaauccagccuuc

SEQ ID NO: 2376113 - RNA, 19 nt, Homo sapiens
  misc_RNA (1)...(19): siRNA sense strand
gcggcaaguuuaaugcaga

SEQ ID NO: 2376114 - RNA, 19 nt, Homo sapiens
  misc_RNA (1)...(19): siRNA sense strand
ccuauaagucaaaucugaa

SEQ ID NO: 2376115 - RNA, 19 nt, Homo sapiens
  misc_RNA (1)...(19): siRNA sense strand
gaacaagaaaguuuggaag

SEQ ID NO: 2376116 - RNA, 19 nt, Homo sapiens
  misc_RNA (1)...(19): siRNA sense strand
acagaugcgauaaaggauu

SEQ ID NO: 2376117 - RNA, 19 nt, Homo sapiens
  misc_RNA (1)...(19): siRNA sense strand
acuacacagaugcgauaaa

SEQ ID NO: 2376118 - RNA, 19 nt, Homo sapiens
  misc_RNA (1)...(19): siRNA sense strand
ugggaaaagcugaccaauu

SEQ ID NO: 2376119 - RNA, 19 nt, Homo sapiens
  misc_RNA (1)...(19): siRNA sense strand
ucaaaaggcauuagaucuu

SEQ ID NO: 2376120 - RNA, 19 nt, Homo sapiens
  misc_RNA (1)...(19): siRNA sense strand
gagaagaaagcuauggcaa

SEQ ID NO: 2376121 - RNA, 19 nt, Homo sapiens
  misc_RNA (1)...(19): siRNA sense strand
cggaaaugcuuggggaaaa

SEQ ID NO: 2376122 - RNA, 19 nt, Homo sapiens
  misc_RNA (1)...(19): siRNA sense strand
gcuuauggcuaccggaaau

SEQ ID NO: 2376123 - RNA, 19 nt, Homo sapiens
  misc_RNA (1)...(19): siRNA sense strand
guagaauacuuaaaggaga

SEQ ID NO: 2376124 - RNA, 19 nt, Homo sapiens
  misc_RNA (1)...(19): siRNA sense strand
cuauggaauuugaagccua

SEQ ID NO: 2376125 - RNA, 19 nt, Homo sapiens
  misc_RNA (1)...(19): siRNA sense strand
cuggaaagaucacugaauu

SEQ ID NO: 2376126 - RNA, 19 nt, Homo sapiens
  misc_RNA (1)...(19): siRNA sense strand
cauaugaucucuacaguca

SEQ ID NO: 2376127 - RNA, 19 nt, Homo sapiens
  misc_RNA (1)...(19): siRNA sense strand
gacaaaaguuacaaggaga

SEQ ID NO: 2376128 - RNA, 19 nt, Homo sapiens
  misc_RNA (1)...(19): siRNA sense strand
ccaaugaucucuuaggguu

SEQ ID NO: 2376129 - RNA, 19 nt, Homo sapiens
  misc_RNA (1)...(19): siRNA sense strand
gggcaaaaucccucagaca

SEQ ID NO: 2376130 - RNA, 19 nt, Homo sapiens
  misc_RNA (1)...(19): siRNA sense strand
cccugaauguucuggaaau

SEQ ID NO: 2376131 - RNA, 19 nt, Homo sapiens
  misc_RNA (1)...(19): siRNA sense strand
agucggugguggagaaacu

SEQ ID NO: 2376132 - RNA, 19 nt, Homo sapiens
  misc_RNA (1)...(19): siRNA sense strand
uagaaauagccucugaaau

SEQ ID NO: 2376133 - RNA, 19 nt, Homo sapiens
  misc_RNA (1)...(19): siRNA sense strand
ucaauuugguuguugcgaa

SEQ ID NO: 2376134 - RNA, 19 nt, Homo sapiens
  misc_RNA (1)...(19): siRNA sense strand
ccggaaaugcuuggggaaa

SEQ ID NO: 2376135 - RNA, 19 nt, Homo sapiens
  misc_RNA (1)...(19): siRNA sense strand
acuuucaaggagagaguau

SEQ ID NO: 2376136 - RNA, 19 nt, Homo sapiens
  misc_RNA (1)...(19): siRNA sense strand
acaaaaguuacaaggagaa

SEQ ID NO: 2376137 - RNA, 19 nt, Homo sapiens
  misc_RNA (1)...(19): siRNA sense strand
cggacuuuguuuuggacua

SEQ ID NO: 2376138 - RNA, 19 nt, Homo sapiens
  misc_RNA (1)...(19): siRNA sense strand
gccaugacuuucaaggaga

SEQ ID NO: 2376139 - RNA, 19 nt, Homo sapiens
  misc_RNA (1)...(19): siRNA sense strand
aucaauggucucagaaauu

SEQ ID NO: 2376140 - RNA, 19 nt, Homo sapiens
  misc_RNA (1)...(19): siRNA sense strand
auuccagagaagaaagcua

SEQ ID NO: 2376141 - RNA, 19 nt, Homo sapiens
  misc_RNA (1)...(19): siRNA sense strand
uggcaauugcugaugcuuu

SEQ ID NO: 2376142 - RNA, 19 nt, Homo sapiens
  misc_RNA (1)...(19): siRNA sense strand
gagaagaaagcuauggcaa

SEQ ID NO: 2376143 - RNA, 19 nt, Homo sapiens
  misc_RNA (1)...(19): siRNA sense strand
cggaaaugcuuggggaaaa

SEQ ID NO: 2376144 - RNA, 19 nt, Homo sapiens
  misc_RNA (1)...(19): siRNA sense strand
guagaauacuuaaaggaga

SEQ ID NO: 2376145 - RNA, 19 nt, Homo sapiens
  misc_RNA (1)...(19): siRNA sense strand
agggaaagccagugccuau

SEQ ID NO: 2376146 - RNA, 19 nt, Homo sapiens
  misc_RNA (1)...(19): siRNA sense strand
cuauggaauuugaagccua

SEQ ID NO: 2376147 - RNA, 19 nt, Homo sapiens
  misc_RNA (1)...(19): siRNA sense strand
gacaaaaguuacaaggaga

SEQ ID NO: 2376148 - RNA, 19 nt, Homo sapiens
  misc_RNA (1)...(19): siRNA sense strand
gggcaaaaucccucagaca

SEQ ID NO: 2376149 - RNA, 19 nt, Homo sapiens
  misc_RNA (1)...(19): siRNA sense strand
cccugaauguucuggaaau

SEQ ID NO: 2376150 - RNA, 19 nt, Homo sapiens
  misc_RNA (1)...(19): siRNA sense strand
agucggugguggagaaacu

SEQ ID NO: 2376151 - RNA, 19 nt, Homo sapiens
  misc_RNA (1)...(19): siRNA sense strand
uagaaauagccucugaaau

SEQ ID NO: 2376152 - RNA, 19 nt, Homo sapiens
  misc_RNA (1)...(19): siRNA sense strand
ucaauuugguuguugcgaa

SEQ ID NO: 2376153 - RNA, 19 nt, Homo sapiens
  misc_RNA (1)...(19): siRNA sense strand
ccggaaaugcuuggggaaa

SEQ ID NO: 2376154 - RNA, 19 nt, Homo sapiens
  misc_RNA (1)...(19): siRNA sense strand
ucaugcacuuggaggaaca

SEQ ID NO: 2376155 - RNA, 19 nt, Homo sapiens
  misc_RNA (1)...(19): siRNA sense strand
agccagugccuauggaauu

SEQ ID NO: 2376156 - RNA, 19 nt, Homo sapiens
  misc_RNA (1)...(19): siRNA sense strand
cauaugaucucuacagcca

SEQ ID NO: 2376157 - RNA, 19 nt, Homo sapiens
  misc_RNA (1)...(19): siRNA sense strand
acaaaaguuacaaggagaa

SEQ ID NO: 2376158 - RNA, 19 nt, Homo sapiens
  misc_RNA (1)...(19): siRNA sense strand
gccaugacuuucaaggaga

SEQ ID NO: 2376159 - RNA, 19 nt, Homo sapiens
  misc_RNA (1)...(19): siRNA sense strand
aucaauggucucagaaauu

SEQ ID NO: 2376160 - RNA, 19 nt, Homo sapiens
  misc_RNA (1)...(19): siRNA sense strand
auuccagagaagaaagcua

SEQ ID NO: 2376161 - RNA, 19 nt, Homo sapiens
  misc_RNA (1)...(19): siRNA sense strand
uggcaauugcugaugcuuu

SEQ ID NO: 2376162 - RNA, 19 nt, Homo sapiens
  misc_RNA (1)...(19): siRNA sense strand
cagggaaggacaagggaaa

SEQ ID NO: 2376163 - RNA, 19 nt, Homo sapiens
  misc_RNA (1)...(19): siRNA sense strand
gagagaaggugauacgcua

SEQ ID NO: 2376164 - RNA, 19 nt, Homo sapiens
  misc_RNA (1)...(19): siRNA sense strand
cggaagaugggcagggaga

SEQ ID NO: 2376165 - RNA, 19 nt, Homo sapiens
  misc_RNA (1)...(19): siRNA sense strand
ccuuuagagaugagaagua

SEQ ID NO: 2376166 - RNA, 19 nt, Homo sapiens
  misc_RNA (1)...(19): siRNA sense strand
aaucugagcugcugggaga

SEQ ID NO: 2376167 - RNA, 19 nt, Homo sapiens
  misc_RNA (1)...(19): siRNA sense strand
aaucaaagauccaaggagu

SEQ ID NO: 2376168 - RNA, 19 nt, Homo sapiens
  misc_RNA (1)...(19): siRNA sense strand
aaccagacacugaaggaaa

SEQ ID NO: 2376169 - RNA, 19 nt, Homo sapiens
  misc_RNA (1)...(19): siRNA sense strand
uuuaaaggagucagugaaa

SEQ ID NO: 2376170 - RNA, 19 nt, Homo sapiens
  misc_RNA (1)...(19): siRNA sense strand
cggagggaggacagaacaa

SEQ ID NO: 2376171 - RNA, 19 nt, Homo sapiens
  misc_RNA (1)...(19): siRNA sense strand
aagaauaagccuggcgauu

SEQ ID NO: 2376172 - RNA, 19 nt, Homo sapiens
  misc_RNA (1)...(19): siRNA sense strand
gcuuugagccagagccuga

SEQ ID NO: 2376173 - RNA, 19 nt, Homo sapiens
  misc_RNA (1)...(19): siRNA sense strand
ucaccaacuacaugagcua

SEQ ID NO: 2376174 - RNA, 19 nt, Homo sapiens
  misc_RNA (1)...(19): siRNA sense strand
ggagucagugaaagagaau

SEQ ID NO: 2376175 - RNA, 19 nt, Homo sapiens
  misc_RNA (1)...(19): siRNA sense strand
ccuuaaacacagggucaaa

SEQ ID NO: 2376176 - RNA, 19 nt, Homo sapiens
  misc_RNA (1)...(19): siRNA sense strand
ccaaggagucucuagguga

SEQ ID NO: 2376177 - RNA, 19 nt, Homo sapiens
  misc_RNA (1)...(19): siRNA sense strand
cuuuaaaggagucagugaa

SEQ ID NO: 2376178 - RNA, 19 nt, Homo sapiens
  misc_RNA (1)...(19): siRNA sense strand
aauccuugguugagaggga

SEQ ID NO: 2376179 - RNA, 19 nt, Homo sapiens
  misc_RNA (1)...(19): siRNA sense strand
ggacagaacaacccagcca

SEQ ID NO: 2376180 - RNA, 19 nt, Homo sapiens
  misc_RNA (1)...(19): siRNA sense strand
ucauacaggacgcagcaaa

SEQ ID NO: 2376181 - RNA, 19 nt, Homo sapiens
  misc_RNA (1)...(19): siRNA sense strand
gugugaaggagcugaagga

SEQ ID NO: 2376182 - RNA, 19 nt, Homo sapiens
  misc_RNA (1)...(19): siRNA sense strand
gugaaagagaauccugcaa

SEQ ID NO: 2376183 - RNA, 19 nt, Homo sapiens
  misc_RNA (1)...(19): siRNA sense strand
caguggaagccuggguuaa

SEQ ID NO: 2376184 - RNA, 19 nt, Homo sapiens
  misc_RNA (1)...(19): siRNA sense strand
gggagacagcucugaggau

SEQ ID NO: 2376185 - RNA, 19 nt, Homo sapiens
  misc_RNA (1)...(19): siRNA sense strand
ggaacuaccuaaggcccua

SEQ ID NO: 2376186 - RNA, 19 nt, Homo sapiens
  misc_RNA (1)...(19): siRNA sense strand
accagacacugaaggaaau

SEQ ID NO: 2376187 - RNA, 19 nt, Homo sapiens
  misc_RNA (1)...(19): siRNA sense strand
agccagagccugagauucu

SEQ ID NO: 2376188 - RNA, 19 nt, Homo sapiens
  misc_RNA (1)...(19): siRNA sense strand
gcuuugagccugugaacac

SEQ ID NO: 2376189 - RNA, 19 nt, Homo sapiens
  misc_RNA (1)...(19): siRNA sense strand
cagggaaggacaagggaaa

SEQ ID NO: 2376190 - RNA, 19 nt, Homo sapiens
  misc_RNA (1)...(19): siRNA sense strand
gagagaaggugauacgcua

SEQ ID NO: 2376191 - RNA, 19 nt, Homo sapiens
  misc_RNA (1)...(19): siRNA sense strand
cggaagaugggcagggaga

SEQ ID NO: 2376192 - RNA, 19 nt, Homo sapiens
  misc_RNA (1)...(19): siRNA sense strand
ccuuuagagaugagaagua

SEQ ID NO: 2376193 - RNA, 19 nt, Homo sapiens
  misc_RNA (1)...(19): siRNA sense strand
aaucugagcugcugggaga

SEQ ID NO: 2376194 - RNA, 19 nt, Homo sapiens
  misc_RNA (1)...(19): siRNA sense strand
aaucaaagauccaaggagu

SEQ ID NO: 2376195 - RNA, 19 nt, Homo sapiens
  misc_RNA (1)...(19): siRNA sense strand
aaccagacacugaaggaaa

SEQ ID NO: 2376196 - RNA, 19 nt, Homo sapiens
  misc_RNA (1)...(19): siRNA sense strand
uuuaaaggagucagugaaa

SEQ ID NO: 2376197 - RNA, 19 nt, Homo sapiens
  misc_RNA (1)...(19): siRNA sense strand
cggagggaggacagaacaa

SEQ ID NO: 2376198 - RNA, 19 nt, Homo sapiens
  misc_RNA (1)...(19): siRNA sense strand
aagaauaagccuggcgauu

SEQ ID NO: 2376199 - RNA, 19 nt, Homo sapiens
  misc_RNA (1)...(19): siRNA sense strand
gcuuugagccagagccuga

SEQ ID NO: 2376200 - RNA, 19 nt, Homo sapiens
  misc_RNA (1)...(19): siRNA sense strand
ucaccaacuacaugagcua

SEQ ID NO: 2376201 - RNA, 19 nt, Homo sapiens
  misc_RNA (1)...(19): siRNA sense strand
ggagucagugaaagagaau

SEQ ID NO: 2376202 - RNA, 19 nt, Homo sapiens
  misc_RNA (1)...(19): siRNA sense strand
ccuuaaacacagggucaaa

SEQ ID NO: 2376203 - RNA, 19 nt, Homo sapiens
  misc_RNA (1)...(19): siRNA sense strand
ccaaggagucucuagguga

SEQ ID NO: 2376204 - RNA, 19 nt, Homo sapiens
  misc_RNA (1)...(19): siRNA sense strand
cuuuaaaggagucagugaa

SEQ ID NO: 2376205 - RNA, 19 nt, Homo sapiens
  misc_RNA (1)...(19): siRNA sense strand
aauccuugguugagaggga

SEQ ID NO: 2376206 - RNA, 19 nt, Homo sapiens
  misc_RNA (1)...(19): siRNA sense strand
ggacagaacaacccagcca

SEQ ID NO: 2376207 - RNA, 19 nt, Homo sapiens
  misc_RNA (1)...(19): siRNA sense strand
ucauacaggacgcagcaaa

SEQ ID NO: 2376208 - RNA, 19 nt, Homo sapiens
  misc_RNA (1)...(19): siRNA sense strand
gugugaaggagcugaagga

SEQ ID NO: 2376209 - RNA, 19 nt, Homo sapiens
  misc_RNA (1)...(19): siRNA sense strand
gugaaagagaauccugcaa

SEQ ID NO: 2376210 - RNA, 19 nt, Homo sapiens
  misc_RNA (1)...(19): siRNA sense strand
caguggaagccuggguuaa

SEQ ID NO: 2376211 - RNA, 19 nt, Homo sapiens
  misc_RNA (1)...(19): siRNA sense strand
gggagacagcucugaggau

SEQ ID NO: 2376212 - RNA, 19 nt, Homo sapiens
  misc_RNA (1)...(19): siRNA sense strand
ggaacuaccuaaggcccua

SEQ ID NO: 2376213 - RNA, 19 nt, Homo sapiens
  misc_RNA (1)...(19): siRNA sense strand
accagacacugaaggaaau

SEQ ID NO: 2376214 - RNA, 19 nt, Homo sapiens
  misc_RNA (1)...(19): siRNA sense strand
agccagagccugagauucu

SEQ ID NO: 2376215 - RNA, 19 nt, Homo sapiens
  misc_RNA (1)...(19): siRNA sense strand
gcuuugagccugugaacac

SEQ ID NO: 2376216 - RNA, 19 nt, Homo sapiens
  misc_RNA (1)...(19): siRNA sense strand
cuuaaaagauggagagaau

SEQ ID NO: 2376217 - RNA, 19 nt, Homo sapiens
  misc_RNA (1)...(19): siRNA sense strand
gcaaauuacuacugcgaca

SEQ ID NO: 2376218 - RNA, 19 nt, Homo sapiens
  misc_RNA (1)...(19): siRNA sense strand
uguaagaaucugaaggaca

SEQ ID NO: 2376219 - RNA, 19 nt, Homo sapiens
  misc_RNA (1)...(19): siRNA sense strand
agaaaagagacaagaggaa

SEQ ID NO: 2376220 - RNA, 19 nt, Homo sapiens
  misc_RNA (1)...(19): siRNA sense strand
aaaagagacaagaggaaaa

SEQ ID NO: 2376221 - RNA, 19 nt, Homo sapiens
  misc_RNA (1)...(19): siRNA sense strand
cugaaggacauuuacgaaa

SEQ ID NO: 2376222 - RNA, 19 nt, Homo sapiens
  misc_RNA (1)...(19): siRNA sense strand
cuguguuaaugaagagcaa

SEQ ID NO: 2376223 - RNA, 19 nt, Homo sapiens
  misc_RNA (1)...(19): siRNA sense strand
uguaugaagcaaagagaca

SEQ ID NO: 2376224 - RNA, 19 nt, Homo sapiens
  misc_RNA (1)...(19): siRNA sense strand
acuggaagucaucgggaaa

SEQ ID NO: 2376225 - RNA, 19 nt, Homo sapiens
  misc_RNA (1)...(19): siRNA sense strand
gggacuggauaaagagcca

SEQ ID NO: 2376226 - RNA, 19 nt, Homo sapiens
  misc_RNA (1)...(19): siRNA sense strand
agaaaagggagcaaguaaa

SEQ ID NO: 2376227 - RNA, 19 nt, Homo sapiens
  misc_RNA (1)...(19): siRNA sense strand
ggggaaggaaagaaagaau

SEQ ID NO: 2376228 - RNA, 19 nt, Homo sapiens
  misc_RNA (1)...(19): siRNA sense strand
uuucuuuccucgagagaga

SEQ ID NO: 2376229 - RNA, 19 nt, Homo sapiens
  misc_RNA (1)...(19): siRNA sense strand
gagacaugaaugaaguauu

SEQ ID NO: 2376230 - RNA, 19 nt, Homo sapiens
  misc_RNA (1)...(19): siRNA sense strand
gguaauaaagacaucacau

SEQ ID NO: 2376231 - RNA, 19 nt, Homo sapiens
  misc_RNA (1)...(19): siRNA sense strand
agcaaagagacaugaauga

SEQ ID NO: 2376232 - RNA, 19 nt, Homo sapiens
  misc_RNA (1)...(19): siRNA sense strand
uggcuaugaagaugcauua

SEQ ID NO: 2376233 - RNA, 19 nt, Homo sapiens
  misc_RNA (1)...(19): siRNA sense strand
cagaagaagcagcccugaa

SEQ ID NO: 2376234 - RNA, 19 nt, Homo sapiens
  misc_RNA (1)...(19): siRNA sense strand
aaguauuggcuaugaagau

SEQ ID NO: 2376235 - RNA, 19 nt, Homo sapiens
  misc_RNA (1)...(19): siRNA sense strand
ggacauuuacgaaaagcaa

SEQ ID NO: 2376236 - RNA, 19 nt, Homo sapiens
  misc_RNA (1)...(19): siRNA sense strand
caugauugugugaccauaa

SEQ ID NO: 2376237 - RNA, 19 nt, Homo sapiens
  misc_RNA (1)...(19): siRNA sense strand
ggagagaauaaacuggaca

SEQ ID NO: 2376238 - RNA, 19 nt, Homo sapiens
  misc_RNA (1)...(19): siRNA sense strand
uguaaauugucaucagcau

SEQ ID NO: 2376239 - RNA, 19 nt, Homo sapiens
  misc_RNA (1)...(19): siRNA sense strand
agaagcuggugcugagaca

SEQ ID NO: 2376240 - RNA, 19 nt, Homo sapiens
  misc_RNA (1)...(19): siRNA sense strand
ggucaacaugauuguguga

SEQ ID NO: 2376241 - RNA, 19 nt, Homo sapiens
  misc_RNA (1)...(19): siRNA sense strand
uggcagccuuuguggguca

SEQ ID NO: 2376242 - RNA, 19 nt, Homo sapiens
  misc_RNA (1)...(19): siRNA sense strand
acauuauuauccagcaaga

SEQ ID NO: 2376243 - RNA, 19 nt, Homo sapiens
  misc_RNA (1)...(19): siRNA sense strand
cucgagagagacuggauua

SEQ ID NO: 2376244 - RNA, 19 nt, Homo sapiens
  misc_RNA (1)...(19): siRNA sense strand
guuaaaaggccgagcuucu

SEQ ID NO: 2376245 - RNA, 19 nt, Homo sapiens
  misc_RNA (1)...(19): siRNA sense strand
cugccaaagaaaagagaca

SEQ ID NO: 2376246 - RNA, 19 nt, Homo sapiens
  misc_RNA (1)...(19): siRNA sense strand
ccucauguuugcugcacuu

SEQ ID NO: 2376247 - RNA, 19 nt, Homo sapiens
  misc_RNA (1)...(19): siRNA sense strand
gcacaaaauuaucaccaca

SEQ ID NO: 2376248 - RNA, 19 nt, Homo sapiens
  misc_RNA (1)...(19): siRNA sense strand
agaucgugaugcuuguaaa

SEQ ID NO: 2376249 - RNA, 19 nt, Homo sapiens
  misc_RNA (1)...(19): siRNA sense strand
gugagaaauguaugaagca

SEQ ID NO: 2376250 - RNA, 19 nt, Homo sapiens
  misc_RNA (1)...(19): siRNA sense strand
uugcacuaccuguggagaa

SEQ ID NO: 2376251 - RNA, 19 nt, Homo sapiens
  misc_RNA (1)...(19): siRNA sense strand
gaugcuuguaaaugagaau

SEQ ID NO: 2376252 - RNA, 19 nt, Homo sapiens
  misc_RNA (1)...(19): siRNA sense strand
cauuagagaaaguaucaga

SEQ ID NO: 2376253 - RNA, 19 nt, Homo sapiens
  misc_RNA (1)...(19): siRNA sense strand
gggaaggaaagaaagaauc

SEQ ID NO: 2376254 - RNA, 19 nt, Homo sapiens
  misc_RNA (1)...(19): siRNA sense strand
ugcacuaccuguggagaaa

SEQ ID NO: 2376255 - RNA, 19 nt, Homo sapiens
  misc_RNA (1)...(19): siRNA sense strand
guuggaaggcuuacaggau

SEQ ID NO: 2376256 - RNA, 19 nt, Homo sapiens
  misc_RNA (1)...(19): siRNA sense strand
cacaggugucugaggagua

SEQ ID NO: 2376257 - RNA, 19 nt, Homo sapiens
  misc_RNA (1)...(19): siRNA sense strand
ugaauaaaugcuacagagu

SEQ ID NO: 2376258 - RNA, 19 nt, Homo sapiens
  misc_RNA (1)...(19): siRNA sense strand
gauacaguggugagugaaa

SEQ ID NO: 2376259 - RNA, 19 nt, Homo sapiens
  misc_RNA (1)...(19): siRNA sense strand
ugugacagauaaaggacaa

SEQ ID NO: 2376260 - RNA, 19 nt, Homo sapiens
  misc_RNA (1)...(19): siRNA sense strand
cuauagaucgaauggacaa

SEQ ID NO: 2376261 - RNA, 19 nt, Homo sapiens
  misc_RNA (1)...(19): siRNA sense strand
guggauucuuuauuggaaa

SEQ ID NO: 2376262 - RNA, 19 nt, Homo sapiens
  misc_RNA (1)...(19): siRNA sense strand
aagaagcagcagaugauaa

SEQ ID NO: 2376263 - RNA, 19 nt, Homo sapiens
  misc_RNA (1)...(19): siRNA sense strand
uuggaguaguacagggaau

SEQ ID NO: 2376264 - RNA, 19 nt, Homo sapiens
  misc_RNA (1)...(19): siRNA sense strand
gguucgacgaggugcuuua

SEQ ID NO: 2376265 - RNA, 19 nt, Homo sapiens
  misc_RNA (1)...(19): siRNA sense strand
ccagaaaacuugaucacau

SEQ ID NO: 2376266 - RNA, 19 nt, Homo sapiens
  misc_RNA (1)...(19): siRNA sense strand
gcuuuaggacaucaaguaa

SEQ ID NO: 2376267 - RNA, 19 nt, Homo sapiens
  misc_RNA (1)...(19): siRNA sense strand
auaaagaagcagcagauga

SEQ ID NO: 2376268 - RNA, 19 nt, Homo sapiens
  misc_RNA (1)...(19): siRNA sense strand
gcuguuuggcuaugaggaa

SEQ ID NO: 2376269 - RNA, 19 nt, Homo sapiens
  misc_RNA (1)...(19): siRNA sense strand
gcuucaauuaagacaacua

SEQ ID NO: 2376270 - RNA, 19 nt, Homo sapiens
  misc_RNA (1)...(19): siRNA sense strand
caaugauauaugugacaga

SEQ ID NO: 2376271 - RNA, 19 nt, Homo sapiens
  misc_RNA (1)...(19): siRNA sense strand
ccauucaagaccagauauu

SEQ ID NO: 2376272 - RNA, 19 nt, Homo sapiens
  misc_RNA (1)...(19): siRNA sense strand
gggaaugaagacucgaaga

SEQ ID NO: 2376273 - RNA, 19 nt, Homo sapiens
  misc_RNA (1)...(19): siRNA sense strand
gcuuccagcuguuuggcua

SEQ ID NO: 2376274 - RNA, 19 nt, Homo sapiens
  misc_RNA (1)...(19): siRNA sense strand
aaugaagacucgaagagga

SEQ ID NO: 2376275 - RNA, 19 nt, Homo sapiens
  misc_RNA (1)...(19): siRNA sense strand
caaaauaaacagagagcuc

SEQ ID NO: 2376276 - RNA, 19 nt, Homo sapiens
  misc_RNA (1)...(19): siRNA sense strand
gcuauagaucgaauggaca

SEQ ID NO: 2376277 - RNA, 19 nt, Homo sapiens
  misc_RNA (1)...(19): siRNA sense strand
uccaaaugcugaagaucau

SEQ ID NO: 2376278 - RNA, 19 nt, Homo sapiens
  misc_RNA (1)...(19): siRNA sense strand
agaacauggcuucaauuaa

SEQ ID NO: 2376279 - RNA, 19 nt, Homo sapiens
  misc_RNA (1)...(19): siRNA sense strand
gaauaaauuaccuuggcga

SEQ ID NO: 2376280 - RNA, 19 nt, Homo sapiens
  misc_RNA (1)...(19): siRNA sense strand
uaguagaucucucugggaa

SEQ ID NO: 2376281 - RNA, 19 nt, Homo sapiens
  misc_RNA (1)...(19): siRNA sense strand
cuuaacaaagacagugcua

SEQ ID NO: 2376282 - RNA, 19 nt, Homo sapiens
  misc_RNA (1)...(19): siRNA sense strand
acuugagcauugaagagua

SEQ ID NO: 2376283 - RNA, 19 nt, Homo sapiens
  misc_RNA (1)...(19): siRNA sense strand
aguagaucucucugggaau

SEQ ID NO: 2376284 - RNA, 19 nt, Homo sapiens
  misc_RNA (1)...(19): siRNA sense strand
cuaaagaacucaagaaccc

SEQ ID NO: 2376285 - RNA, 19 nt, Homo sapiens
  misc_RNA (1)...(19): siRNA sense strand
aguaauugaagauggcuca

SEQ ID NO: 2376286 - RNA, 19 nt, Homo sapiens
  misc_RNA (1)...(19): siRNA sense strand
cguucuaccaucauaggaa

SEQ ID NO: 2376287 - RNA, 19 nt, Homo sapiens
  misc_RNA (1)...(19): siRNA sense strand
agaucuugcagcugcuaua

SEQ ID NO: 2376288 - RNA, 19 nt, Homo sapiens
  misc_RNA (1)...(19): siRNA sense strand
gggauaugacugggcagaa

SEQ ID NO: 2376289 - RNA, 19 nt, Homo sapiens
  misc_RNA (1)...(19): siRNA sense strand
cuguuuggcuaugaggaaa

SEQ ID NO: 2376290 - RNA, 19 nt, Homo sapiens
  misc_RNA (1)...(19): siRNA sense strand
gucuuaaaguugcuggaga

SEQ ID NO: 2376291 - RNA, 19 nt, Homo sapiens
  misc_RNA (1)...(19): siRNA sense strand
gcugaagaucaugggauau

SEQ ID NO: 2376292 - RNA, 19 nt, Homo sapiens
  misc_RNA (1)...(19): siRNA sense strand
ccacaagagacugcagaga

SEQ ID NO: 2376293 - RNA, 19 nt, Homo sapiens
  misc_RNA (1)...(19): siRNA sense strand
uggucaaaggacuguaaau

SEQ ID NO: 2376294 - RNA, 19 nt, Homo sapiens
  misc_RNA (1)...(19): siRNA sense strand
gggcaugcaguuuggucuu

SEQ ID NO: 2376295 - RNA, 19 nt, Homo sapiens
  misc_RNA (1)...(19): siRNA sense strand
guccaauccucuacagcau

SEQ ID NO: 2376296 - RNA, 19 nt, Homo sapiens
  misc_RNA (1)...(19): siRNA sense strand
acaguuuggaagagacuuu

SEQ ID NO: 2376297 - RNA, 19 nt, Homo sapiens
  misc_RNA (1)...(19): siRNA sense strand
auucaagaccagauauuca

SEQ ID NO: 2376298 - RNA, 19 nt, Homo sapiens
  misc_RNA (1)...(19): siRNA sense strand
caagagacuagcagagaag

SEQ ID NO: 2376299 - RNA, 19 nt, Homo sapiens
  misc_RNA (1)...(19): siRNA sense strand
cgaaugaguaguugggcaa

SEQ ID NO: 2376300 - RNA, 19 nt, Homo sapiens
  misc_RNA (1)...(19): siRNA sense strand
cugaagagcaguuggaaaa

SEQ ID NO: 2376301 - RNA, 19 nt, Homo sapiens
  misc_RNA (1)...(19): siRNA sense strand
uggaaaacacagaaagaaa

SEQ ID NO: 2376302 - RNA, 19 nt, Homo sapiens
  misc_RNA (1)...(19): siRNA sense strand
auguaacucaagagagaaa

SEQ ID NO: 2376303 - RNA, 19 nt, Homo sapiens
  misc_RNA (1)...(19): siRNA sense strand
gcuuaagagaugaaacaga

SEQ ID NO: 2376304 - RNA, 19 nt, Homo sapiens
  misc_RNA (1)...(19): siRNA sense strand
ucugaagagcaguuggaaa

SEQ ID NO: 2376305 - RNA, 19 nt, Homo sapiens
  misc_RNA (1)...(19): siRNA sense strand
gcgaaugaguaguugggca

SEQ ID NO: 2376306 - RNA, 19 nt, Homo sapiens
  misc_RNA (1)...(19): siRNA sense strand
ccuuaaaagaugcugaaaa

SEQ ID NO: 2376307 - RNA, 19 nt, Homo sapiens
  misc_RNA (1)...(19): siRNA sense strand
ugaugauagugaagagcau

SEQ ID NO: 2376308 - RNA, 19 nt, Homo sapiens
  misc_RNA (1)...(19): siRNA sense strand
aggcuuaagagaugaaaca

SEQ ID NO: 2376309 - RNA, 19 nt, Homo sapiens
  misc_RNA (1)...(19): siRNA sense strand
agccaaacgcauaaagaau

SEQ ID NO: 2376310 - RNA, 19 nt, Homo sapiens
  misc_RNA (1)...(19): siRNA sense strand
aggugugauuggagacauu

SEQ ID NO: 2376311 - RNA, 19 nt, Homo sapiens
  misc_RNA (1)...(19): siRNA sense strand
guaaauugcugauugacca

SEQ ID NO: 2376312 - RNA, 19 nt, Homo sapiens
  misc_RNA (1)...(19): siRNA sense strand
acucaagagagaaaccaaa

SEQ ID NO: 2376313 - RNA, 19 nt, Homo sapiens
  misc_RNA (1)...(19): siRNA sense strand
ugaggaaaggaaugaagaa

SEQ ID NO: 2376314 - RNA, 19 nt, Homo sapiens
  misc_RNA (1)...(19): siRNA sense strand
augaagaaccuuuagccaa

SEQ ID NO: 2376315 - RNA, 19 nt, Homo sapiens
  misc_RNA (1)...(19): siRNA sense strand
cacaaagaggcaagauaau

SEQ ID NO: 2376316 - RNA, 19 nt, Homo sapiens
  misc_RNA (1)...(19): siRNA sense strand
gcgguuacuauguggaaaa

SEQ ID NO: 2376317 - RNA, 19 nt, Homo sapiens
  misc_RNA (1)...(19): siRNA sense strand
aggaagaagaugcucggaa

SEQ ID NO: 2376318 - RNA, 19 nt, Homo sapiens
  misc_RNA (1)...(19): siRNA sense strand
gaagaagaugcucggaaaa

SEQ ID NO: 2376319 - RNA, 19 nt, Homo sapiens
  misc_RNA (1)...(19): siRNA sense strand
acacaguauaugaagauca

SEQ ID NO: 2376320 - RNA, 19 nt, Homo sapiens
  misc_RNA (1)...(19): siRNA sense strand
ccaaggaaggaaaugaaaa

SEQ ID NO: 2376321 - RNA, 19 nt, Homo sapiens
  misc_RNA (1)...(19): siRNA sense strand
acuucauccuaguggaaaa

SEQ ID NO: 2376322 - RNA, 19 nt, Homo sapiens
  misc_RNA (1)...(19): siRNA sense strand
augaagaucaacuagcaaa

SEQ ID NO: 2376323 - RNA, 19 nt, Homo sapiens
  misc_RNA (1)...(19): siRNA sense strand
guuacuauguggaaaagaa

SEQ ID NO: 2376324 - RNA, 19 nt, Homo sapiens
  misc_RNA (1)...(19): siRNA sense strand
aaauuuacacuuuggccaa

SEQ ID NO: 2376325 - RNA, 19 nt, Homo sapiens
  misc_RNA (1)...(19): siRNA sense strand
accacaaagaggcaagaua

SEQ ID NO: 2376326 - RNA, 19 nt, Homo sapiens
  misc_RNA (1)...(19): siRNA sense strand
acacacaguauaugaagau

SEQ ID NO: 2376327 - RNA, 19 nt, Homo sapiens
  misc_RNA (1)...(19): siRNA sense strand
aacagaaauaccugaacaa

SEQ ID NO: 2376328 - RNA, 19 nt, Homo sapiens
  misc_RNA (1)...(19): siRNA sense strand
guguugaagaaaagaagaa

SEQ ID NO: 2376329 - RNA, 19 nt, Homo sapiens
  misc_RNA (1)...(19): siRNA sense strand
uuucagggcucuaggccuu

SEQ ID NO: 2376330 - RNA, 19 nt, Homo sapiens
  misc_RNA (1)...(19): siRNA sense strand
uuaugugggcaaagaauau

SEQ ID NO: 2376331 - RNA, 19 nt, Homo sapiens
  misc_RNA (1)...(19): siRNA sense strand
auucaagguggauggaaaa

SEQ ID NO: 2376332 - RNA, 19 nt, Homo sapiens
  misc_RNA (1)...(19): siRNA sense strand
cauuaugugggcaaagaau

SEQ ID NO: 2376333 - RNA, 19 nt, Homo sapiens
  misc_RNA (1)...(19): siRNA sense strand
gccuuggagcaguggaauu

SEQ ID NO: 2376334 - RNA, 19 nt, Homo sapiens
  misc_RNA (1)...(19): siRNA sense strand
gauggaaaacacagaaaga

SEQ ID NO: 2376335 - RNA, 19 nt, Homo sapiens
  misc_RNA (1)...(19): siRNA sense strand
ugguauggcaacagaucuu

SEQ ID NO: 2376336 - RNA, 19 nt, Homo sapiens
  misc_RNA (1)...(19): siRNA sense strand
accagaaacaacugcuuaa

SEQ ID NO: 2376337 - RNA, 19 nt, Homo sapiens
  misc_RNA (1)...(19): siRNA sense strand
uuggagcgggaaagggaaa

SEQ ID NO: 2376338 - RNA, 19 nt, Homo sapiens
  misc_RNA (1)...(19): siRNA sense strand
ugacaagagaacagguaaa

SEQ ID NO: 2376339 - RNA, 19 nt, Homo sapiens
  misc_RNA (1)...(19): siRNA sense strand
aacaagaaguaguuggaaa

SEQ ID NO: 2376340 - RNA, 19 nt, Homo sapiens
  misc_RNA (1)...(19): siRNA sense strand
ggucaaaaccacagauaau

SEQ ID NO: 2376341 - RNA, 19 nt, Homo sapiens
  misc_RNA (1)...(19): siRNA sense strand
ggauaaaaguuuggaggaa

SEQ ID NO: 2376342 - RNA, 19 nt, Homo sapiens
  misc_RNA (1)...(19): siRNA sense strand
acaagaaguaguuggaaau

SEQ ID NO: 2376343 - RNA, 19 nt, Homo sapiens
  misc_RNA (1)...(19): siRNA sense strand
aggaggaagaggaggaaaa

SEQ ID NO: 2376344 - RNA, 19 nt, Homo sapiens
  misc_RNA (1)...(19): siRNA sense strand
ccauaaaagaguuccaaaa

SEQ ID NO: 2376345 - RNA, 19 nt, Homo sapiens
  misc_RNA (1)...(19): siRNA sense strand
cagcacaaguaaagaaacu

SEQ ID NO: 2376346 - RNA, 19 nt, Homo sapiens
  misc_RNA (1)...(19): siRNA sense strand
ccacaaacaucccagguga

SEQ ID NO: 2376347 - RNA, 19 nt, Homo sapiens
  misc_RNA (1)...(19): siRNA sense strand
aggaaauguggaaaugaaa

SEQ ID NO: 2376348 - RNA, 19 nt, Homo sapiens
  misc_RNA (1)...(19): siRNA sense strand
aagcaagucuagugacaca

SEQ ID NO: 2376349 - RNA, 19 nt, Homo sapiens
  misc_RNA (1)...(19): siRNA sense strand
ucugaagccaagaaggaua

SEQ ID NO: 2376350 - RNA, 19 nt, Homo sapiens
  misc_RNA (1)...(19): siRNA sense strand
cugauauguuggugguaca

SEQ ID NO: 2376351 - RNA, 19 nt, Homo sapiens
  misc_RNA (1)...(19): siRNA sense strand
cagaauuguagauaaggaa

SEQ ID NO: 2376352 - RNA, 19 nt, Homo sapiens
  misc_RNA (1)...(19): siRNA sense strand
aaauauucugggaggaaau

SEQ ID NO: 2376353 - RNA, 19 nt, Homo sapiens
  misc_RNA (1)...(19): siRNA sense strand
cugaaauaugcaacugaaa

SEQ ID NO: 2376354 - RNA, 19 nt, Homo sapiens
  misc_RNA (1)...(19): siRNA sense strand
acaaauauucugggaggaa

SEQ ID NO: 2376355 - RNA, 19 nt, Homo sapiens
  misc_RNA (1)...(19): siRNA sense strand
acaagcaagucuagugaca

SEQ ID NO: 2376356 - RNA, 19 nt, Homo sapiens
  misc_RNA (1)...(19): siRNA sense strand
aaugaaugcaccugaggaa

SEQ ID NO: 2376357 - RNA, 19 nt, Homo sapiens
  misc_RNA (1)...(19): siRNA sense strand
gcucaugauagcaguucaa

SEQ ID NO: 2376358 - RNA, 19 nt, Homo sapiens
  misc_RNA (1)...(19): siRNA sense strand
ugaaugcaccugaggaaau

SEQ ID NO: 2376359 - RNA, 19 nt, Homo sapiens
  misc_RNA (1)...(19): siRNA sense strand
uagaaaucccagaggcaca

SEQ ID NO: 2376360 - RNA, 19 nt, Homo sapiens
  misc_RNA (1)...(19): siRNA sense strand
gugaaaagucagugagucu

SEQ ID NO: 2376361 - RNA, 19 nt, Homo sapiens
  misc_RNA (1)...(19): siRNA sense strand
acuauuaagcucugcagaa

SEQ ID NO: 2376362 - RNA, 19 nt, Homo sapiens
  misc_RNA (1)...(19): siRNA sense strand
ggaaauguggaaaugaaaa

SEQ ID NO: 2376363 - RNA, 19 nt, Homo sapiens
  misc_RNA (1)...(19): siRNA sense strand
aggaggaggaagaggagga

SEQ ID NO: 2376364 - RNA, 19 nt, Homo sapiens
  misc_RNA (1)...(19): siRNA sense strand
guuagaaaucccagaggca

SEQ ID NO: 2376365 - RNA, 19 nt, Homo sapiens
  misc_RNA (1)...(19): siRNA sense strand
aguaaggccgaaugugaua

SEQ ID NO: 2376366 - RNA, 19 nt, Homo sapiens
  misc_RNA (1)...(19): siRNA sense strand
cugaagccaagaaggauaa

SEQ ID NO: 2376367 - RNA, 19 nt, Homo sapiens
  misc_RNA (1)...(19): siRNA sense strand
ugggaggaaauguggaaau

SEQ ID NO: 2376368 - RNA, 19 nt, Homo sapiens
  misc_RNA (1)...(19): siRNA sense strand
ugaagaaggcaaugaugau

SEQ ID NO: 2376369 - RNA, 19 nt, Homo sapiens
  misc_RNA (1)...(19): siRNA sense strand
gagaaauguuagcucccua

SEQ ID NO: 2376370 - RNA, 19 nt, Homo sapiens
  misc_RNA (1)...(19): siRNA sense strand
caguggagcaggaggagga

SEQ ID NO: 2376371 - RNA, 19 nt, Homo sapiens
  misc_RNA (1)...(19): siRNA sense strand
aagacaaaucaguggaguu

SEQ ID NO: 2376372 - RNA, 19 nt, Homo sapiens
  misc_RNA (1)...(19): siRNA sense strand
uggaagaaguugugagucc

SEQ ID NO: 2376373 - RNA, 19 nt, Homo sapiens
  misc_RNA (1)...(19): siRNA sense strand
uggagcaggaggaggaaga

SEQ ID NO: 2376374 - RNA, 19 nt, Homo sapiens
  misc_RNA (1)...(19): siRNA sense strand
ccagaggcacagaaggauu

SEQ ID NO: 2376375 - RNA, 19 nt, Homo sapiens
  misc_RNA (1)...(19): siRNA sense strand
uuauauaggacugaggaua

SEQ ID NO: 2376376 - RNA, 19 nt, Homo sapiens
  misc_RNA (1)...(19): siRNA sense strand
ccaagaaggauaagcguuc

SEQ ID NO: 2376377 - RNA, 19 nt, Homo sapiens
  misc_RNA (1)...(19): siRNA sense strand
gugacaagagaacagguaa

SEQ ID NO: 2376378 - RNA, 19 nt, Homo sapiens
  misc_RNA (1)...(19): siRNA sense strand
cacaacugccugaagauaa

SEQ ID NO: 2376379 - RNA, 19 nt, Homo sapiens
  misc_RNA (1)...(19): siRNA sense strand
auuaagcucugcagaacaa

SEQ ID NO: 2376380 - RNA, 19 nt, Homo sapiens
  misc_RNA (1)...(19): siRNA sense strand
aguugugaguccugcaaau

SEQ ID NO: 2376381 - RNA, 19 nt, Homo sapiens
  misc_RNA (1)...(19): siRNA sense strand
cguuuaaagcugacaaauc

SEQ ID NO: 2376382 - RNA, 19 nt, Homo sapiens
  misc_RNA (1)...(19): siRNA sense strand
gaacaaagucagaagccac

SEQ ID NO: 2376383 - RNA, 19 nt, Homo sapiens
  misc_RNA (1)...(19): siRNA sense strand
acaaagagagcucaagaca

SEQ ID NO: 2376384 - RNA, 19 nt, Homo sapiens
  misc_RNA (1)...(19): siRNA sense strand
ugauagcaguucaaggaca

SEQ ID NO: 2376385 - RNA, 19 nt, Homo sapiens
  misc_RNA (1)...(19): siRNA sense strand
gcccaaaagaggcugauaa

SEQ ID NO: 2376386 - RNA, 19 nt, Homo sapiens
  misc_RNA (1)...(19): siRNA sense strand
caaagagagcucaagacau

SEQ ID NO: 2376387 - RNA, 19 nt, Homo sapiens
  misc_RNA (1)...(19): siRNA sense strand
auuucaaagacucaggaua

SEQ ID NO: 2376388 - RNA, 19 nt, Homo sapiens
  misc_RNA (1)...(19): siRNA sense strand
gcagaaguuucaaagcuca

SEQ ID NO: 2376389 - RNA, 19 nt, Homo sapiens
  misc_RNA (1)...(19): siRNA sense strand
gggacauugcacuggccua

SEQ ID NO: 2376390 - RNA, 19 nt, Homo sapiens
  misc_RNA (1)...(19): siRNA sense strand
aguagugacaggaguucua

SEQ ID NO: 2376391 - RNA, 19 nt, Homo sapiens
  misc_RNA (1)...(19): siRNA sense strand
gaaauuacaaagagagcuc

SEQ ID NO: 2376392 - RNA, 19 nt, Homo sapiens
  misc_RNA (1)...(19): siRNA sense strand
ccuaaaugaggaagucaca

SEQ ID NO: 2376393 - RNA, 19 nt, Homo sapiens
  misc_RNA (1)...(19): siRNA sense strand
agaauauaggagcaacuaa

SEQ ID NO: 2376394 - RNA, 19 nt, Homo sapiens
  misc_RNA (1)...(19): siRNA sense strand
aggcuuaccccuacaaaua

SEQ ID NO: 2376395 - RNA, 19 nt, Homo sapiens
  misc_RNA (1)...(19): siRNA sense strand
gagaagaaagcuauggcaa

SEQ ID NO: 2376396 - RNA, 19 nt, Homo sapiens
  misc_RNA (1)...(19): siRNA sense strand
cggaaaugcuuggggaaaa

SEQ ID NO: 2376397 - RNA, 19 nt, Homo sapiens
  misc_RNA (1)...(19): siRNA sense strand
acaucaaagaagagaacuu

SEQ ID NO: 2376398 - RNA, 19 nt, Homo sapiens
  misc_RNA (1)...(19): siRNA sense strand
gggucaagaacaugcucua

SEQ ID NO: 2376399 - RNA, 19 nt, Homo sapiens
  misc_RNA (1)...(19): siRNA sense strand
acaauaugucuuuggucua

SEQ ID NO: 2376400 - RNA, 19 nt, Homo sapiens
  misc_RNA (1)...(19): siRNA sense strand
gacaaaaguuacaaggaga

SEQ ID NO: 2376401 - RNA, 19 nt, Homo sapiens
  misc_RNA (1)...(19): siRNA sense strand
augcaaagggucaagaaca

SEQ ID NO: 2376402 - RNA, 19 nt, Homo sapiens
  misc_RNA (1)...(19): siRNA sense strand
gggcaaaaucccucagaca

SEQ ID NO: 2376403 - RNA, 19 nt, Homo sapiens
  misc_RNA (1)...(19): siRNA sense strand
cccugaauguucuggaaau

SEQ ID NO: 2376404 - RNA, 19 nt, Homo sapiens
  misc_RNA (1)...(19): siRNA sense strand
aggugucagugguggauau

SEQ ID NO: 2376405 - RNA, 19 nt, Homo sapiens
  misc_RNA (1)...(19): siRNA sense strand
guggaaagguguugguggu

SEQ ID NO: 2376406 - RNA, 19 nt, Homo sapiens
  misc_RNA (1)...(19): siRNA sense strand
gauuuagacuuuaagggca

SEQ ID NO: 2376407 - RNA, 19 nt, Homo sapiens
  misc_RNA (1)...(19): siRNA sense strand
guacuuugaaacagaacau

SEQ ID NO: 2376408 - RNA, 19 nt, Homo sapiens
  misc_RNA (1)...(19): siRNA sense strand
ccggaaaugcuuggggaaa

SEQ ID NO: 2376409 - RNA, 19 nt, Homo sapiens
  misc_RNA (1)...(19): siRNA sense strand
aggugaauaugcacaucaa

SEQ ID NO: 2376410 - RNA, 19 nt, Homo sapiens
  misc_RNA (1)...(19): siRNA sense strand
acaaaaguuacaaggagaa

SEQ ID NO: 2376411 - RNA, 19 nt, Homo sapiens
  misc_RNA (1)...(19): siRNA sense strand
aggaugaauuugaucgcca

SEQ ID NO: 2376412 - RNA, 19 nt, Homo sapiens
  misc_RNA (1)...(19): siRNA sense strand
ggaugaauuugaucgccau

SEQ ID NO: 2376413 - RNA, 19 nt, Homo sapiens
  misc_RNA (1)...(19): siRNA sense strand
aucaauggucucagaaauu

SEQ ID NO: 2376414 - RNA, 19 nt, Homo sapiens
  misc_RNA (1)...(19): siRNA sense strand
auuccagagaagaaagcua

SEQ ID NO: 2376415 - RNA, 19 nt, Homo sapiens
  misc_RNA (1)...(19): siRNA sense strand
cucaggaauuugaagccua

SEQ ID NO: 2376416 - RNA, 19 nt, Homo sapiens
  misc_RNA (1)...(19): siRNA sense strand
uggcaauugcugaugcuuu

SEQ ID NO: 2376417 - RNA, 19 nt, Homo sapiens
  misc_RNA (1)...(19): siRNA sense strand
acggagaagaagugcuuua

SEQ ID NO: 2376418 - RNA, 19 nt, Homo sapiens
  misc_RNA (1)...(19): siRNA sense strand
uccagaaagagcagaacua

SEQ ID NO: 2376419 - RNA, 19 nt, Homo sapiens
  misc_RNA (1)...(19): siRNA sense strand
cauccagguaggugaacau

SEQ ID NO: 2376420 - RNA, 19 nt, Homo sapiens
  misc_RNA (1)...(19): siRNA sense strand
agauccagaaagagcagaa

SEQ ID NO: 2376421 - RNA, 19 nt, Homo sapiens
  misc_RNA (1)...(19): siRNA sense strand
gugucauguuugugagaga

SEQ ID NO: 2376422 - RNA, 19 nt, Homo sapiens
  misc_RNA (1)...(19): siRNA sense strand
cauguuugugagagagaaa

SEQ ID NO: 2376423 - RNA, 19 nt, Homo sapiens
  misc_RNA (1)...(19): siRNA sense strand
gugcaaauggacagagcca

SEQ ID NO: 2376424 - RNA, 19 nt, Homo sapiens
  misc_RNA (1)...(19): siRNA sense strand
ggacagagccauacugcgu

SEQ ID NO: 2376425 - RNA, 19 nt, Homo sapiens
  misc_RNA (1)...(19): siRNA sense strand
uggaagagcccaugcccuu

SEQ ID NO: 2376426 - RNA, 19 nt, Homo sapiens
  misc_RNA (1)...(19): siRNA sense strand
ggguguggacagacgccaa

SEQ ID NO: 2376427 - RNA, 19 nt, Homo sapiens
  misc_RNA (1)...(19): siRNA sense strand
aacccaaggaggugcaaau

SEQ ID NO: 2376428 - RNA, 19 nt, Homo sapiens
  misc_RNA (1)...(19): siRNA sense strand
gggcagagcuucuaccaga

SEQ ID NO: 2376429 - RNA, 19 nt, Homo sapiens
  misc_RNA (1)...(19): siRNA sense strand
gggaaagaugccuucaaaa

SEQ ID NO: 2376430 - RNA, 19 nt, Homo sapiens
  misc_RNA (1)...(19): siRNA sense strand
uggcggaggaagugaggca

SEQ ID NO: 2376431 - RNA, 19 nt, Homo sapiens
  misc_RNA (1)...(19): siRNA sense strand
agagaagggcagagagaau

SEQ ID NO: 2376432 - RNA, 19 nt, Homo sapiens
  misc_RNA (1)...(19): siRNA sense strand
gggcagagagaauggguca

SEQ ID NO: 2376433 - RNA, 19 nt, Homo sapiens
  misc_RNA (1)...(19): siRNA sense strand
acacaaaggagguggccga

SEQ ID NO: 2376434 - RNA, 19 nt, Homo sapiens
  misc_RNA (1)...(19): siRNA sense strand
acuacaagcucaagcacga

SEQ ID NO: 2376435 - RNA, 19 nt, Homo sapiens
  misc_RNA (1)...(19): siRNA sense strand
agccagucuuggagaaauu

SEQ ID NO: 2376436 - RNA, 19 nt, Homo sapiens
  misc_RNA (1)...(19): siRNA sense strand
ucgacggaccagacagaaa

SEQ ID NO: 2376437 - RNA, 19 nt, Homo sapiens
  misc_RNA (1)...(19): siRNA sense strand
agaagaacuacaaacacaa

SEQ ID NO: 2376438 - RNA, 19 nt, Homo sapiens
  misc_RNA (1)...(19): siRNA sense strand
ccuuaaagccagugcacuc

SEQ ID NO: 2376439 - RNA, 19 nt, Homo sapiens
  misc_RNA (1)...(19): siRNA sense strand
cuacaaacacaaaggaggu

SEQ ID NO: 2376440 - RNA, 19 nt, Homo sapiens
  misc_RNA (1)...(19): siRNA sense strand
gcgaaagaccuguaagcag

SEQ ID NO: 2376441 - RNA, 19 nt, Homo sapiens
  misc_RNA (1)...(19): siRNA sense strand
ccaucagagccguggccau

SEQ ID NO: 2376442 - RNA, 19 nt, Homo sapiens
  misc_RNA (1)...(19): siRNA sense strand
agaaauuugauucgggcuu

SEQ ID NO: 2376443 - RNA, 19 nt, Homo sapiens
  misc_RNA (1)...(19): siRNA sense strand
caagaagcaacaagaaaau

SEQ ID NO: 2376444 - RNA, 19 nt, Homo sapiens
  misc_RNA (1)...(19): siRNA sense strand
cuuuagaacccgagccugu

SEQ ID NO: 2376445 - RNA, 19 nt, Homo sapiens
  misc_RNA (1)...(19): siRNA sense strand
acagaaacgucuucccuga

SEQ ID NO: 2376446 - RNA, 19 nt, Homo sapiens
  misc_RNA (1)...(19): siRNA sense strand
uggacaagaagaacuacaa

SEQ ID NO: 2376447 - RNA, 19 nt, Homo sapiens
  misc_RNA (1)...(19): siRNA sense strand
gcauaguggcccauggaca

SEQ ID NO: 2376448 - RNA, 19 nt, Homo sapiens
  misc_RNA (1)...(19): siRNA sense strand
uguucaaacccaugagaca

SEQ ID NO: 2376449 - RNA, 19 nt, Homo sapiens
  misc_RNA (1)...(19): siRNA sense strand
acacagugaaacagaucua

SEQ ID NO: 2376450 - RNA, 19 nt, Homo sapiens
  misc_RNA (1)...(19): siRNA sense strand
aagaggagugggaggucaa

SEQ ID NO: 2376451 - RNA, 19 nt, Homo sapiens
  misc_RNA (1)...(19): siRNA sense strand
ccaugagacagcagcgaga

SEQ ID NO: 2376452 - RNA, 19 nt, Homo sapiens
  misc_RNA (1)...(19): siRNA sense strand
cugcaagacaugaggcacu

SEQ ID NO: 2376453 - RNA, 19 nt, Homo sapiens
  misc_RNA (1)...(19): siRNA sense strand
ugacaacgccagaggguuc

SEQ ID NO: 2376454 - RNA, 19 nt, Homo sapiens
  misc_RNA (1)...(19): siRNA sense strand
aguaaaugucaccaaggaa

SEQ ID NO: 2376455 - RNA, 19 nt, Homo sapiens
  misc_RNA (1)...(19): siRNA sense strand
ugaaacagaucuacccgua

SEQ ID NO: 2376456 - RNA, 19 nt, Homo sapiens
  misc_RNA (1)...(19): siRNA sense strand
guaugcugucuguggcaaa

SEQ ID NO: 2376457 - RNA, 19 nt, Homo sapiens
  misc_RNA (1)...(19): siRNA sense strand
uguacagagagcagaugaa

SEQ ID NO: 2376458 - RNA, 19 nt, Homo sapiens
  misc_RNA (1)...(19): siRNA sense strand
cuacacacuggcaggaaaa

SEQ ID NO: 2376459 - RNA, 19 nt, Homo sapiens
  misc_RNA (1)...(19): siRNA sense strand
caggaaaagaggaguggga

SEQ ID NO: 2376460 - RNA, 19 nt, Homo sapiens
  misc_RNA (1)...(19): siRNA sense strand
uguccauacaugugcaaga

SEQ ID NO: 2376461 - RNA, 19 nt, Homo sapiens
  misc_RNA (1)...(19): siRNA sense strand
gccuagagaacaagggcua

SEQ ID NO: 2376462 - RNA, 19 nt, Homo sapiens
  misc_RNA (1)...(19): siRNA sense strand
ccgccuacauccugggaca

SEQ ID NO: 2376463 - RNA, 19 nt, Homo sapiens
  misc_RNA (1)...(19): siRNA sense strand
cccugggccuagagaacaa

SEQ ID NO: 2376464 - RNA, 19 nt, Homo sapiens
  misc_RNA (1)...(19): siRNA sense strand
gcuuagagcugccgccugu

SEQ ID NO: 2376465 - RNA, 19 nt, Homo sapiens
  misc_RNA (1)...(19): siRNA sense strand
agucggaaucccagagaaa

SEQ ID NO: 2376466 - RNA, 19 nt, Homo sapiens
  misc_RNA (1)...(19): siRNA sense strand
cagagaaggcugcagggaa

SEQ ID NO: 2376467 - RNA, 19 nt, Homo sapiens
  misc_RNA (1)...(19): siRNA sense strand
ggaagaaggucccaccgaa

SEQ ID NO: 2376468 - RNA, 19 nt, Homo sapiens
  misc_RNA (1)...(19): siRNA sense strand
agagaaggcugcagggaag

SEQ ID NO: 2376469 - RNA, 19 nt, Homo sapiens
  misc_RNA (1)...(19): siRNA sense strand
cgggaugaggagucggaau

SEQ ID NO: 2376470 - RNA, 19 nt, Homo sapiens
  misc_RNA (1)...(19): siRNA sense strand
cgacggagguccuaccaga

SEQ ID NO: 2376471 - RNA, 19 nt, Homo sapiens
  misc_RNA (1)...(19): siRNA sense strand
cagaaucggaagagccaga

SEQ ID NO: 2376472 - RNA, 19 nt, Homo sapiens
  misc_RNA (1)...(19): siRNA sense strand
cgucugagcagucgcgaga

SEQ ID NO: 2376473 - RNA, 19 nt, Homo sapiens
  misc_RNA (1)...(19): siRNA sense strand
ggaugagaaugcagcguug

SEQ ID NO: 2376474 - RNA, 19 nt, Homo sapiens
  misc_RNA (1)...(19): siRNA sense strand
gacacgaggugcuggcuga

SEQ ID NO: 2376475 - RNA, 19 nt, Homo sapiens
  misc_RNA (1)...(19): siRNA sense strand
aggccugcauugaugagaa

SEQ ID NO: 2376476 - RNA, 19 nt, Homo sapiens
  misc_RNA (1)...(19): siRNA sense strand
ccacugugaaccaggcaga

SEQ ID NO: 2376477 - RNA, 19 nt, Homo sapiens
  misc_RNA (1)...(19): siRNA sense strand
acaagaaaguagaggguau

SEQ ID NO: 2376478 - RNA, 19 nt, Homo sapiens
  misc_RNA (1)...(19): siRNA sense strand
gaugagaaacaaagagcaa

SEQ ID NO: 2376479 - RNA, 19 nt, Homo sapiens
  misc_RNA (1)...(19): siRNA sense strand
cuucaguucuacagggaua

SEQ ID NO: 2376480 - RNA, 19 nt, Homo sapiens
  misc_RNA (1)...(19): siRNA sense strand
acaccuaguuucagagaau

SEQ ID NO: 2376481 - RNA, 19 nt, Homo sapiens
  misc_RNA (1)...(19): siRNA sense strand
ccaaaaggcuaauggagaa

SEQ ID NO: 2376482 - RNA, 19 nt, Homo sapiens
  misc_RNA (1)...(19): siRNA sense strand
aagugaaaauagaggguaa

SEQ ID NO: 2376483 - RNA, 19 nt, Homo sapiens
  misc_RNA (1)...(19): siRNA sense strand
uggaggaaguacagaauau

SEQ ID NO: 2376484 - RNA, 19 nt, Homo sapiens
  misc_RNA (1)...(19): siRNA sense strand
gcaaaauggaggaauaaaa

SEQ ID NO: 2376485 - RNA, 19 nt, Homo sapiens
  misc_RNA (1)...(19): siRNA sense strand
gggugagccaagaaagaaa

SEQ ID NO: 2376486 - RNA, 19 nt, Homo sapiens
  misc_RNA (1)...(19): siRNA sense strand
ugauaaugccaguaaacua

SEQ ID NO: 2376487 - RNA, 19 nt, Homo sapiens
  misc_RNA (1)...(19): siRNA sense strand
cauacagacugcagggaca

SEQ ID NO: 2376488 - RNA, 19 nt, Homo sapiens
  misc_RNA (1)...(19): siRNA sense strand
gugauaaugugcagcaaaa

SEQ ID NO: 2376489 - RNA, 19 nt, Homo sapiens
  misc_RNA (1)...(19): siRNA sense strand
cugcagaacuugauagcca

SEQ ID NO: 2376490 - RNA, 19 nt, Homo sapiens
  misc_RNA (1)...(19): siRNA sense strand
ccagaauagucgugugagu

SEQ ID NO: 2376491 - RNA, 19 nt, Homo sapiens
  misc_RNA (1)...(19): siRNA sense strand
agaaagaaucugugaguuc

SEQ ID NO: 2376492 - RNA, 19 nt, Homo sapiens
  misc_RNA (1)...(19): siRNA sense strand
ggagcaaacacgagaucuu

SEQ ID NO: 2376493 - RNA, 19 nt, Homo sapiens
  misc_RNA (1)...(19): siRNA sense strand
gcaggaaacaagacccaaa

SEQ ID NO: 2376494 - RNA, 19 nt, Homo sapiens
  misc_RNA (1)...(19): siRNA sense strand
caaacaauacacuggaaau

SEQ ID NO: 2376495 - RNA, 19 nt, Homo sapiens
  misc_RNA (1)...(19): siRNA sense strand
cagcaguugaugagaaaca

SEQ ID NO: 2376496 - RNA, 19 nt, Homo sapiens
  misc_RNA (1)...(19): siRNA sense strand
acaaagagcaagagauucu

SEQ ID NO: 2376497 - RNA, 19 nt, Homo sapiens
  misc_RNA (1)...(19): siRNA sense strand
ugagaaacaaagagcaaga

SEQ ID NO: 2376498 - RNA, 19 nt, Homo sapiens
  misc_RNA (1)...(19): siRNA sense strand
ccucagaauaauuguguga

SEQ ID NO: 2376499 - RNA, 19 nt, Homo sapiens
  misc_RNA (1)...(19): siRNA sense strand
ccaaauaaugugaucccaa

SEQ ID NO: 2376500 - RNA, 19 nt, Homo sapiens
  misc_RNA (1)...(19): siRNA sense strand
agucagaccaugaaaucaa

SEQ ID NO: 2376501 - RNA, 19 nt, Homo sapiens
  misc_RNA (1)...(19): siRNA sense strand
gguaacuaagcaagagaau

SEQ ID NO: 2376502 - RNA, 19 nt, Homo sapiens
  misc_RNA (1)...(19): siRNA sense strand
gcuaauggagaaagacgua

SEQ ID NO: 2376503 - RNA, 19 nt, Homo sapiens
  misc_RNA (1)...(19): siRNA sense strand
ccaaacaauacacuggaaa

SEQ ID NO: 2376504 - RNA, 19 nt, Homo sapiens
  misc_RNA (1)...(19): siRNA sense strand
ccaaaugggacuggaggaa

SEQ ID NO: 2376505 - RNA, 19 nt, Homo sapiens
  misc_RNA (1)...(19): siRNA sense strand
agucagaugcacaggccaa

SEQ ID NO: 2376506 - RNA, 19 nt, Homo sapiens
  misc_RNA (1)...(19): siRNA sense strand
ggugaaagcagucaaccaa

SEQ ID NO: 2376507 - RNA, 19 nt, Homo sapiens
  misc_RNA (1)...(19): siRNA sense strand
agaaauguacugagacaca

SEQ ID NO: 2376508 - RNA, 19 nt, Homo sapiens
  misc_RNA (1)...(19): siRNA sense strand
ugaaugagcaggaggggaa

SEQ ID NO: 2376509 - RNA, 19 nt, Homo sapiens
  misc_RNA (1)...(19): siRNA sense strand
gaaacaaagagcaagagau

SEQ ID NO: 2376510 - RNA, 19 nt, Homo sapiens
  misc_RNA (1)...(19): siRNA sense strand
ccuuauagucagaccauga

SEQ ID NO: 2376511 - RNA, 19 nt, Homo sapiens
  misc_RNA (1)...(19): siRNA sense strand
ucauaaacaggcagcacaa

SEQ ID NO: 2376512 - RNA, 19 nt, Homo sapiens
  misc_RNA (1)...(19): siRNA sense strand
cuaaaguggaagaauguuu

SEQ ID NO: 2376513 - RNA, 19 nt, Homo sapiens
  misc_RNA (1)...(19): siRNA sense strand
uggccagacuaaaguggaa

SEQ ID NO: 2376514 - RNA, 19 nt, Homo sapiens
  misc_RNA (1)...(19): siRNA sense strand
uuugcaaaauggaggaaua

SEQ ID NO: 2376515 - RNA, 19 nt, Homo sapiens
  misc_RNA (1)...(19): siRNA sense strand
ccagggaaccacaaagcua

SEQ ID NO: 2376516 - RNA, 19 nt, Homo sapiens
  misc_RNA (1)...(19): siRNA sense strand
ccacaugccuguaugcaca

SEQ ID NO: 2376517 - RNA, 19 nt, Homo sapiens
  misc_RNA (1)...(19): siRNA sense strand
ucugaaaccaggauggauu

SEQ ID NO: 2376518 - RNA, 19 nt, Homo sapiens
  misc_RNA (1)...(19): siRNA sense strand
ccuaauggugcuacaguuu

SEQ ID NO: 2376519 - RNA, 19 nt, Homo sapiens
  misc_RNA (1)...(19): siRNA sense strand
cagcugcaguggugaguga

SEQ ID NO: 2376520 - RNA, 19 nt, Homo sapiens
  misc_RNA (1)...(19): siRNA sense strand
gaaaauaacauccagggaa

SEQ ID NO: 2376521 - RNA, 19 nt, Homo sapiens
  misc_RNA (1)...(19): siRNA sense strand
aagcaagaacagcagcaaa

SEQ ID NO: 2376522 - RNA, 19 nt, Homo sapiens
  misc_RNA (1)...(19): siRNA sense strand
gagcucauccagaaguaaa

SEQ ID NO: 2376523 - RNA, 19 nt, Homo sapiens
  misc_RNA (1)...(19): siRNA sense strand
cagaauaauugugugaaca

SEQ ID NO: 2376524 - RNA, 19 nt, Homo sapiens
  misc_RNA (1)...(19): siRNA sense strand
gauacauaaccaugcaaau

SEQ ID NO: 2376525 - RNA, 19 nt, Homo sapiens
  misc_RNA (1)...(19): siRNA sense strand
agaacaacuacaacaacaa

SEQ ID NO: 2376526 - RNA, 19 nt, Homo sapiens
  misc_RNA (1)...(19): siRNA sense strand
ucaacaggcuucagagacu

SEQ ID NO: 2376527 - RNA, 19 nt, Homo sapiens
  misc_RNA (1)...(19): siRNA sense strand
aagcaacaaugaucagcaa

SEQ ID NO: 2376528 - RNA, 19 nt, Homo sapiens
  misc_RNA (1)...(19): siRNA sense strand
ggaacacacacauggugaa

SEQ ID NO: 2376529 - RNA, 19 nt, Homo sapiens
  misc_RNA (1)...(19): siRNA sense strand
ugguggaguuuuagaagaa

SEQ ID NO: 2376530 - RNA, 19 nt, Homo sapiens
  misc_RNA (1)...(19): siRNA sense strand
uagaagaacaccaccacua

SEQ ID NO: 2376531 - RNA, 19 nt, Homo sapiens
  misc_RNA (1)...(19): siRNA sense strand
aaaugggacuggaggaagu

SEQ ID NO: 2376532 - RNA, 19 nt, Homo sapiens
  misc_RNA (1)...(19): siRNA sense strand
ucugaaugguggaguuuua

SEQ ID NO: 2376533 - RNA, 19 nt, Homo sapiens
  misc_RNA (1)...(19): siRNA sense strand
gaagcaauguugugggaca

SEQ ID NO: 2376534 - RNA, 19 nt, Homo sapiens
  misc_RNA (1)...(19): siRNA sense strand
gagaagaagcccaggagga

SEQ ID NO: 2376535 - RNA, 19 nt, Homo sapiens
  misc_RNA (1)...(19): siRNA sense strand
cuguugugauagagauuaa

SEQ ID NO: 2376536 - RNA, 19 nt, Homo sapiens
  misc_RNA (1)...(19): siRNA sense strand
uguugaaggaguugaggaa

SEQ ID NO: 2376537 - RNA, 19 nt, Homo sapiens
  misc_RNA (1)...(19): siRNA sense strand
cauacauggagguggcuaa

SEQ ID NO: 2376538 - RNA, 19 nt, Homo sapiens
  misc_RNA (1)...(19): siRNA sense strand
cagugauuguaguaguaaa

SEQ ID NO: 2376539 - RNA, 19 nt, Homo sapiens
  misc_RNA (1)...(19): siRNA sense strand
ugaauuacauguuuggcaa

SEQ ID NO: 2376540 - RNA, 19 nt, Homo sapiens
  misc_RNA (1)...(19): siRNA sense strand
uugaaggaguugaggaagu

SEQ ID NO: 2376541 - RNA, 19 nt, Homo sapiens
  misc_RNA (1)...(19): siRNA sense strand
aguacaagugaauggaaau

SEQ ID NO: 2376542 - RNA, 19 nt, Homo sapiens
  misc_RNA (1)...(19): siRNA sense strand
agaagauagggcuggacaa

SEQ ID NO: 2376543 - RNA, 19 nt, Homo sapiens
  misc_RNA (1)...(19): siRNA sense strand
ccgaccaggaggagaccaa

SEQ ID NO: 2376544 - RNA, 19 nt, Homo sapiens
  misc_RNA (1)...(19): siRNA sense strand
cuggaaaggaugcagaaaa

SEQ ID NO: 2376545 - RNA, 19 nt, Homo sapiens
  misc_RNA (1)...(19): siRNA sense strand
cauaaaaugugaagaucca

SEQ ID NO: 2376546 - RNA, 19 nt, Homo sapiens
  misc_RNA (1)...(19): siRNA sense strand
ggauccgagccgagguaau

SEQ ID NO: 2376547 - RNA, 19 nt, Homo sapiens
  misc_RNA (1)...(19): siRNA sense strand
ccccagaaguggugauaca

SEQ ID NO: 2376548 - RNA, 19 nt, Homo sapiens
  misc_RNA (1)...(19): siRNA sense strand
aguggaaguacaagugaau

SEQ ID NO: 2376549 - RNA, 19 nt, Homo sapiens
  misc_RNA (1)...(19): siRNA sense strand
ccauauggaacuggaagaa

SEQ ID NO: 2376550 - RNA, 19 nt, Homo sapiens
  misc_RNA (1)...(19): siRNA sense strand
ugauacaguggaaguacaa

SEQ ID NO: 2376551 - RNA, 19 nt, Homo sapiens
  misc_RNA (1)...(19): siRNA sense strand
ggaagaagauagggcugga

SEQ ID NO: 2376552 - RNA, 19 nt, Homo sapiens
  misc_RNA (1)...(19): siRNA sense strand
acuccaacgggcugaaauu

SEQ ID NO: 2376553 - RNA, 19 nt, Homo sapiens
  misc_RNA (1)...(19): siRNA sense strand
aaguggugauacaguggaa

SEQ ID NO: 2376554 - RNA, 19 nt, Homo sapiens
  misc_RNA (1)...(19): siRNA sense strand
ggaacuacgugaaggaccu

SEQ ID NO: 2376555 - RNA, 19 nt, Homo sapiens
  misc_RNA (1)...(19): siRNA sense strand
acacagagcuccacgaccu

SEQ ID NO: 2376556 - RNA, 19 nt, Homo sapiens
  misc_RNA (1)...(19): siRNA sense strand
augaguuccugcagcgaau

SEQ ID NO: 2376557 - RNA, 19 nt, Homo sapiens
  misc_RNA (1)...(19): siRNA sense strand
gggugcucauccuggacaa

SEQ ID NO: 2376558 - RNA, 19 nt, Homo sapiens
  misc_RNA (1)...(19): siRNA sense strand
ugacaacaugagugacaca

SEQ ID NO: 2376559 - RNA, 19 nt, Homo sapiens
  misc_RNA (1)...(19): siRNA sense strand
ggaacuacgugaaggaccu

SEQ ID NO: 2376560 - RNA, 19 nt, Homo sapiens
  misc_RNA (1)...(19): siRNA sense strand
acacagagcuccacgaccu

SEQ ID NO: 2376561 - RNA, 19 nt, Homo sapiens
  misc_RNA (1)...(19): siRNA sense strand
augaguuccugcagcgaau

SEQ ID NO: 2376562 - RNA, 19 nt, Homo sapiens
  misc_RNA (1)...(19): siRNA sense strand
gggugcucauccuggacaa

SEQ ID NO: 2376563 - RNA, 19 nt, Homo sapiens
  misc_RNA (1)...(19): siRNA sense strand
ugacaacaugagugacaca

SEQ ID NO: 2376564 - RNA, 19 nt, Homo sapiens
  misc_RNA (1)...(19): siRNA sense strand
caaagaaguaugauggcua

SEQ ID NO: 2376565 - RNA, 19 nt, Homo sapiens
  misc_RNA (1)...(19): siRNA sense strand
ugagaagauuaaaggccua

SEQ ID NO: 2376566 - RNA, 19 nt, Homo sapiens
  misc_RNA (1)...(19): siRNA sense strand
aggaauacuugauaggaca

SEQ ID NO: 2376567 - RNA, 19 nt, Homo sapiens
  misc_RNA (1)...(19): siRNA sense strand
aguuaagacuguagagaag

SEQ ID NO: 2376568 - RNA, 19 nt, Homo sapiens
  misc_RNA (1)...(19): siRNA sense strand
ggacaaaccaggagagacc

SEQ ID NO: 2376569 - RNA, 19 nt, Homo sapiens
  misc_RNA (1)...(19): siRNA sense strand
gugcagagaauguggccau

SEQ ID NO: 2376570 - RNA, 19 nt, Homo sapiens
  misc_RNA (1)...(19): siRNA sense strand
uggacuaugagaagauuaa

SEQ ID NO: 2376571 - RNA, 19 nt, Homo sapiens
  misc_RNA (1)...(19): siRNA sense strand
cagaugacgacgagaagau

SEQ ID NO: 2376572 - RNA, 19 nt, Homo sapiens
  misc_RNA (1)...(19): siRNA sense strand
ccgauaaacaagaggcugu

SEQ ID NO: 2376573 - RNA, 19 nt, Homo sapiens
  misc_RNA (1)...(19): siRNA sense strand
guuggguggauguggauaa

SEQ ID NO: 2376574 - RNA, 19 nt, Homo sapiens
  misc_RNA (1)...(19): siRNA sense strand
aggagagacccaagugauu

SEQ ID NO: 2376575 - RNA, 19 nt, Homo sapiens
  misc_RNA (1)...(19): siRNA sense strand
guggauguggauaaagaaa

SEQ ID NO: 2376576 - RNA, 19 nt, Homo sapiens
  misc_RNA (1)...(19): siRNA sense strand
aguugaacccagacaagaa

SEQ ID NO: 2376577 - RNA, 19 nt, Homo sapiens
  misc_RNA (1)...(19): siRNA sense strand
gagaagacauggaaagcuc

SEQ ID NO: 2376578 - RNA, 19 nt, Homo sapiens
  misc_RNA (1)...(19): siRNA sense strand
ggguuaagaaguaugcaga

SEQ ID NO: 2376579 - RNA, 19 nt, Homo sapiens
  misc_RNA (1)...(19): siRNA sense strand
ggaauacuugauaggacaa

SEQ ID NO: 2376580 - RNA, 19 nt, Homo sapiens
  misc_RNA (1)...(19): siRNA sense strand
aggacuucaaagagggcaa

SEQ ID NO: 2376581 - RNA, 19 nt, Homo sapiens
  misc_RNA (1)...(19): siRNA sense strand
agaagaucuccuaccgaua

SEQ ID NO: 2376582 - RNA, 19 nt, Homo sapiens
  misc_RNA (1)...(19): siRNA sense strand
caacacaggagguacccaa

SEQ ID NO: 2376583 - RNA, 19 nt, Homo sapiens
  misc_RNA (1)...(19): siRNA sense strand
gggaagcgauccaaggcca

SEQ ID NO: 2376584 - RNA, 19 nt, Homo sapiens
  misc_RNA (1)...(19): siRNA sense strand
agaucauccaggagcggaa

SEQ ID NO: 2376585 - RNA, 19 nt, Homo sapiens
  misc_RNA (1)...(19): siRNA sense strand
aguccgagccgauaaacaa

SEQ ID NO: 2376586 - RNA, 19 nt, Homo sapiens
  misc_RNA (1)...(19): siRNA sense strand
augaagaaucaaacaccaa

SEQ ID NO: 2376587 - RNA, 19 nt, Homo sapiens
  misc_RNA (1)...(19): siRNA sense strand
cggcuacaaccgugugauu

SEQ ID NO: 2376588 - RNA, 19 nt, Homo sapiens
  misc_RNA (1)...(19): siRNA sense strand
cuagagugacugaguugaa

SEQ ID NO: 2376589 - RNA, 19 nt, Homo sapiens
  misc_RNA (1)...(19): siRNA sense strand
gguuaagaaguaugcagau

SEQ ID NO: 2376590 - RNA, 19 nt, Homo sapiens
  misc_RNA (1)...(19): siRNA sense strand
uguagagaagacauggaaa

SEQ ID NO: 2376591 - RNA, 19 nt, Homo sapiens
  misc_RNA (1)...(19): siRNA sense strand
ggaagcgauccaaggccaa

SEQ ID NO: 2376592 - RNA, 19 nt, Homo sapiens
  misc_RNA (1)...(19): siRNA sense strand
uauuugagaaccuggacaa

SEQ ID NO: 2376593 - RNA, 19 nt, Homo sapiens
  misc_RNA (1)...(19): siRNA sense strand
uguugagcccagugagaga

SEQ ID NO: 2376594 - RNA, 19 nt, Homo sapiens
  misc_RNA (1)...(19): siRNA sense strand
cccaaauacuccagugaag

SEQ ID NO: 2376595 - RNA, 19 nt, Homo sapiens
  misc_RNA (1)...(19): siRNA sense strand
gagcccagugagagacauu

SEQ ID NO: 2376596 - RNA, 19 nt, Homo sapiens
  misc_RNA (1)...(19): siRNA sense strand
gaccagcguuucugcgcaa

SEQ ID NO: 2376597 - RNA, 19 nt, Homo sapiens
  misc_RNA (1)...(19): siRNA sense strand
uggacgggacccugggaua

SEQ ID NO: 2376598 - RNA, 19 nt, Homo sapiens
  misc_RNA (1)...(19): siRNA sense strand
gaccaaggaugaugcccua

SEQ ID NO: 2376599 - RNA, 19 nt, Homo sapiens
  misc_RNA (1)...(19): siRNA sense strand
cggguuugcuccaagguca

SEQ ID NO: 2376600 - RNA, 19 nt, Homo sapiens
  misc_RNA (1)...(19): siRNA sense strand
gggaagaagaggagugcca

SEQ ID NO: 2376601 - RNA, 19 nt, Homo sapiens
  misc_RNA (1)...(19): siRNA sense strand
ggaaacaggcugaagagga

SEQ ID NO: 2376602 - RNA, 19 nt, Homo sapiens
  misc_RNA (1)...(19): siRNA sense strand
gauaaugugugcuggcaga

SEQ ID NO: 2376603 - RNA, 19 nt, Homo sapiens
  misc_RNA (1)...(19): siRNA sense strand
ucaaacagcugcagggcca

SEQ ID NO: 2376604 - RNA, 19 nt, Homo sapiens
  misc_RNA (1)...(19): siRNA sense strand
aagcagaguucuuugcaga

SEQ ID NO: 2376605 - RNA, 19 nt, Homo sapiens
  misc_RNA (1)...(19): siRNA sense strand
gaaacaggcugaagaggac

SEQ ID NO: 2376606 - RNA, 19 nt, Homo sapiens
  misc_RNA (1)...(19): siRNA sense strand
ccggaaugaagguguacau

SEQ ID NO: 2376607 - RNA, 19 nt, Homo sapiens
  misc_RNA (1)...(19): siRNA sense strand
caggauuaacagaugauga

SEQ ID NO: 2376608 - RNA, 19 nt, Homo sapiens
  misc_RNA (1)...(19): siRNA sense strand
aggccggaaugaaggugua

SEQ ID NO: 2376609 - RNA, 19 nt, Homo sapiens
  misc_RNA (1)...(19): siRNA sense strand
cauucuacggagggagaua

SEQ ID NO: 2376610 - RNA, 19 nt, Homo sapiens
  misc_RNA (1)...(19): siRNA sense strand
uguuagauaucgaagguac

SEQ ID NO: 2376611 - RNA, 19 nt, Homo sapiens
  misc_RNA (1)...(19): siRNA sense strand
ugacagauguuacucgaga

SEQ ID NO: 2376612 - RNA, 19 nt, Homo sapiens
  misc_RNA (1)...(19): siRNA sense strand
cugcagacacauugggaag

SEQ ID NO: 2376613 - RNA, 19 nt, Homo sapiens
  misc_RNA (1)...(19): siRNA sense strand
agacacauugggaagaaga

SEQ ID NO: 2376614 - RNA, 19 nt, Homo sapiens
  misc_RNA (1)...(19): siRNA sense strand
gaugauaagaugaaggaga

SEQ ID NO: 2376615 - RNA, 19 nt, Homo sapiens
  misc_RNA (1)...(19): siRNA sense strand
gaauacgucucuugggcaa

SEQ ID NO: 2376616 - RNA, 19 nt, Homo sapiens
  misc_RNA (1)...(19): siRNA sense strand
auguggagcugguggugaa

SEQ ID NO: 2376617 - RNA, 19 nt, Homo sapiens
  misc_RNA (1)...(19): siRNA sense strand
gcaagaagcaagcagggau

SEQ ID NO: 2376618 - RNA, 19 nt, Homo sapiens
  misc_RNA (1)...(19): siRNA sense strand
gaggaggaguauaagcuga

SEQ ID NO: 2376619 - RNA, 19 nt, Homo sapiens
  misc_RNA (1)...(19): siRNA sense strand
uucccaaggaggaggagua

SEQ ID NO: 2376620 - RNA, 19 nt, Homo sapiens
  misc_RNA (1)...(19): siRNA sense strand
caugaaauugaaugggaaa

SEQ ID NO: 2376621 - RNA, 19 nt, Homo sapiens
  misc_RNA (1)...(19): siRNA sense strand
cuucgaagacauuuggaaa

SEQ ID NO: 2376622 - RNA, 19 nt, Homo sapiens
  misc_RNA (1)...(19): siRNA sense strand
acaugaaauugaaugggaa

SEQ ID NO: 2376623 - RNA, 19 nt, Homo sapiens
  misc_RNA (1)...(19): siRNA sense strand
guggcuuucucgagguaaa

SEQ ID NO: 2376624 - RNA, 19 nt, Homo sapiens
  misc_RNA (1)...(19): siRNA sense strand
acagauaaugaaagugcua

SEQ ID NO: 2376625 - RNA, 19 nt, Homo sapiens
  misc_RNA (1)...(19): siRNA sense strand
ggcucauacuauuggagaa

SEQ ID NO: 2376626 - RNA, 19 nt, Homo sapiens
  misc_RNA (1)...(19): siRNA sense strand
ugacauugaagaagagcuu

SEQ ID NO: 2376627 - RNA, 19 nt, Homo sapiens
  misc_RNA (1)...(19): siRNA sense strand
ugaucagaagguuggaaua

SEQ ID NO: 2376628 - RNA, 19 nt, Homo sapiens
  misc_RNA (1)...(19): siRNA sense strand
gcucauacuauuggagaau

SEQ ID NO: 2376629 - RNA, 19 nt, Homo sapiens
  misc_RNA (1)...(19): siRNA sense strand
cugcauauaaagacaaaga

SEQ ID NO: 2376630 - RNA, 19 nt, Homo sapiens
  misc_RNA (1)...(19): siRNA sense strand
aaguaaugcuaccggugaa

SEQ ID NO: 2376631 - RNA, 19 nt, Homo sapiens
  misc_RNA (1)...(19): siRNA sense strand
ccacaaacucauugcccau

SEQ ID NO: 2376632 - RNA, 19 nt, Homo sapiens
  misc_RNA (1)...(19): siRNA sense strand
agauaaugaaagugcuaca

SEQ ID NO: 2376633 - RNA, 19 nt, Homo sapiens
  misc_RNA (1)...(19): siRNA sense strand
gggucaaauuuauauccaa

SEQ ID NO: 2376634 - RNA, 19 nt, Homo sapiens
  misc_RNA (1)...(19): siRNA sense strand
ggauuuacuuacuucggaa

SEQ ID NO: 2376635 - RNA, 19 nt, Homo sapiens
  misc_RNA (1)...(19): siRNA sense strand
ugaacuucgucgugaacuu

SEQ ID NO: 2376636 - RNA, 19 nt, Homo sapiens
  misc_RNA (1)...(19): siRNA sense strand
gcugcuaagacuugcauau

SEQ ID NO: 2376637 - RNA, 19 nt, Homo sapiens
  misc_RNA (1)...(19): siRNA sense strand
ugacaauaaugcuuggguu

SEQ ID NO: 2376638 - RNA, 19 nt, Homo sapiens
  misc_RNA (1)...(19): siRNA sense strand
cuucggaaauagagaugca

SEQ ID NO: 2376639 - RNA, 19 nt, Homo sapiens
  misc_RNA (1)...(19): siRNA sense strand
uaguaagcuucgaagacau

SEQ ID NO: 2376640 - RNA, 19 nt, Homo sapiens
  misc_RNA (1)...(19): siRNA sense strand
gcugaaacaaggaagucuu

SEQ ID NO: 2376641 - RNA, 19 nt, Homo sapiens
  misc_RNA (1)...(19): siRNA sense strand
agauauuugcagugccauu

SEQ ID NO: 2376642 - RNA, 19 nt, Homo sapiens
  misc_RNA (1)...(19): siRNA sense strand
aauagaugcaguacagcua

SEQ ID NO: 2376643 - RNA, 19 nt, Homo sapiens
  misc_RNA (1)...(19): siRNA sense strand
auuaagcggauaugugaua

SEQ ID NO: 2376644 - RNA, 19 nt, Homo sapiens
  misc_RNA (1)...(19): siRNA sense strand
cugugugaaucuuugcaaa

SEQ ID NO: 2376645 - RNA, 19 nt, Homo sapiens
  misc_RNA (1)...(19): siRNA sense strand
cgacuaucugauuguuuaa

SEQ ID NO: 2376646 - RNA, 19 nt, Homo sapiens
  misc_RNA (1)...(19): siRNA sense strand
caucuguagaagaagaaaa

SEQ ID NO: 2376647 - RNA, 19 nt, Homo sapiens
  misc_RNA (1)...(19): siRNA sense strand
ggugagcuuuccaggguca

SEQ ID NO: 2376648 - RNA, 19 nt, Homo sapiens
  misc_RNA (1)...(19): siRNA sense strand
aaagauauuugcagugcca

SEQ ID NO: 2376649 - RNA, 19 nt, Homo sapiens
  misc_RNA (1)...(19): siRNA sense strand
aagacaaagacauaagcuu

SEQ ID NO: 2376650 - RNA, 19 nt, Homo sapiens
  misc_RNA (1)...(19): siRNA sense strand
uaagcggauaugugauaaa

SEQ ID NO: 2376651 - RNA, 19 nt, Homo sapiens
  misc_RNA (1)...(19): siRNA sense strand
cuuaucaaaccuugugcaa

SEQ ID NO: 2376652 - RNA, 19 nt, Homo sapiens
  misc_RNA (1)...(19): siRNA sense strand
aggcaguacaaaucaucaa

SEQ ID NO: 2376653 - RNA, 19 nt, Homo sapiens
  misc_RNA (1)...(19): siRNA sense strand
cuucauuacgagagagaaa

SEQ ID NO: 2376654 - RNA, 19 nt, Homo sapiens
  misc_RNA (1)...(19): siRNA sense strand
ggauauaugccaauggaac

SEQ ID NO: 2376655 - RNA, 19 nt, Homo sapiens
  misc_RNA (1)...(19): siRNA sense strand
gaaacauaacagaggcagu

SEQ ID NO: 2376656 - RNA, 19 nt, Homo sapiens
  misc_RNA (1)...(19): siRNA sense strand
cuuuggauaaugaggauau

SEQ ID NO: 2376657 - RNA, 19 nt, Homo sapiens
  misc_RNA (1)...(19): siRNA sense strand
gagaaacauaacagaggca

SEQ ID NO: 2376658 - RNA, 19 nt, Homo sapiens
  misc_RNA (1)...(19): siRNA sense strand
ucuacaaguuccaguggga

SEQ ID NO: 2376659 - RNA, 19 nt, Homo sapiens
  misc_RNA (1)...(19): siRNA sense strand
auuacgagagagaaacaua

SEQ ID NO: 2376660 - RNA, 19 nt, Homo sapiens
  misc_RNA (1)...(19): siRNA sense strand
uaaugaggauauaugccaa

SEQ ID NO: 2376661 - RNA, 19 nt, Homo sapiens
  misc_RNA (1)...(19): siRNA sense strand
aaagugaaguuuggggaaa

SEQ ID NO: 2376662 - RNA, 19 nt, Homo sapiens
  misc_RNA (1)...(19): siRNA sense strand
gcaccuugcgugaggacaa

SEQ ID NO: 2376663 - RNA, 19 nt, Homo sapiens
  misc_RNA (1)...(19): siRNA sense strand
aauuuaagauugugggcuu

SEQ ID NO: 2376664 - RNA, 19 nt, Homo sapiens
  misc_RNA (1)...(19): siRNA sense strand
agagagaagaagaaaguga

SEQ ID NO: 2376665 - RNA, 19 nt, Homo sapiens
  misc_RNA (1)...(19): siRNA sense strand
aggacaaggacgucagcaa

SEQ ID NO: 2376666 - RNA, 19 nt, Homo sapiens
  misc_RNA (1)...(19): siRNA sense strand
ccgaacaacaugagagacu

SEQ ID NO: 2376667 - RNA, 19 nt, Homo sapiens
  misc_RNA (1)...(19): siRNA sense strand
cccaaaaucuccagagcua

SEQ ID NO: 2376668 - RNA, 19 nt, Homo sapiens
  misc_RNA (1)...(19): siRNA sense strand
ccaagagugagaaggagaa

SEQ ID NO: 2376669 - RNA, 19 nt, Homo sapiens
  misc_RNA (1)...(19): siRNA sense strand
ugaaagaggugguagccca

SEQ ID NO: 2376670 - RNA, 19 nt, Homo sapiens
  misc_RNA (1)...(19): siRNA sense strand
cagcagaacaugcagguga

SEQ ID NO: 2376671 - RNA, 19 nt, Homo sapiens
  misc_RNA (1)...(19): siRNA sense strand
gacgacagcuguagggaca

SEQ ID NO: 2376672 - RNA, 19 nt, Homo sapiens
  misc_RNA (1)...(19): siRNA sense strand
ugguagagacugcagacaa

SEQ ID NO: 2376673 - RNA, 19 nt, Homo sapiens
  misc_RNA (1)...(19): siRNA sense strand
aggccaucacugagggcaa

SEQ ID NO: 2376674 - RNA, 19 nt, Homo sapiens
  misc_RNA (1)...(19): siRNA sense strand
gugccauggucaaguucua

SEQ ID NO: 2376675 - RNA, 19 nt, Homo sapiens
  misc_RNA (1)...(19): siRNA sense strand
cacacuuggugguggagaa

SEQ ID NO: 2376676 - RNA, 19 nt, Homo sapiens
  misc_RNA (1)...(19): siRNA sense strand
agggcaaagugaagaagga

SEQ ID NO: 2376677 - RNA, 19 nt, Homo sapiens
  misc_RNA (1)...(19): siRNA sense strand
gcuaggacuuugagugacu

SEQ ID NO: 2376678 - RNA, 19 nt, Homo sapiens
  misc_RNA (1)...(19): siRNA sense strand
acaucagcuuaaugaacaa

SEQ ID NO: 2376679 - RNA, 19 nt, Homo sapiens
  misc_RNA (1)...(19): siRNA sense strand
aggcuaggacuuugaguga

SEQ ID NO: 2376680 - RNA, 19 nt, Homo sapiens
  misc_RNA (1)...(19): siRNA sense strand
cccaagagugagaaggaga

SEQ ID NO: 2376681 - RNA, 19 nt, Homo sapiens
  misc_RNA (1)...(19): siRNA sense strand
ccaaacaggcuaugggaug

SEQ ID NO: 2376682 - RNA, 19 nt, Homo sapiens
  misc_RNA (1)...(19): siRNA sense strand
aagugaagagucagaaaga

SEQ ID NO: 2376683 - RNA, 19 nt, Homo sapiens
  misc_RNA (1)...(19): siRNA sense strand
aagaaggaggcuaggacuu

SEQ ID NO: 2376684 - RNA, 19 nt, Homo sapiens
  misc_RNA (1)...(19): siRNA sense strand
ggucuguggagcuggucaa

SEQ ID NO: 2376685 - RNA, 19 nt, Homo sapiens
  misc_RNA (1)...(19): siRNA sense strand
auagcaaaccagaugaaau

SEQ ID NO: 2376686 - RNA, 19 nt, Homo sapiens
  misc_RNA (1)...(19): siRNA sense strand
ucguguacgugauggccaa

SEQ ID NO: 2376687 - RNA, 19 nt, Homo sapiens
  misc_RNA (1)...(19): siRNA sense strand
agcuagauguccugaccaa

SEQ ID NO: 2376688 - RNA, 19 nt, Homo sapiens
  misc_RNA (1)...(19): siRNA sense strand
aguacuccacagaggauaa

SEQ ID NO: 2376689 - RNA, 19 nt, Homo sapiens
  misc_RNA (1)...(19): siRNA sense strand
guccaggugacgaagauaa

SEQ ID NO: 2376690 - RNA, 19 nt, Homo sapiens
  misc_RNA (1)...(19): siRNA sense strand
ggaacaaccgugaggcuac

SEQ ID NO: 2376691 - RNA, 19 nt, Homo sapiens
  misc_RNA (1)...(19): siRNA sense strand
aagaaagugaagagucaga

SEQ ID NO: 2376692 - RNA, 19 nt, Homo sapiens
  misc_RNA (1)...(19): siRNA sense strand
guggaggacagcagcgaga

SEQ ID NO: 2376693 - RNA, 19 nt, Homo sapiens
  misc_RNA (1)...(19): siRNA sense strand
acacggacucagaugacua

SEQ ID NO: 2376694 - RNA, 19 nt, Homo sapiens
  misc_RNA (1)...(19): siRNA sense strand
cugaagagugccaugguca

SEQ ID NO: 2376695 - RNA, 19 nt, Homo sapiens
  misc_RNA (1)...(19): siRNA sense strand
gcauagggcuggugcaguc

SEQ ID NO: 2376696 - RNA, 19 nt, Homo sapiens
  misc_RNA (1)...(19): siRNA sense strand
agucaaauuacguguggca

SEQ ID NO: 2376697 - RNA, 19 nt, Homo sapiens
  misc_RNA (1)...(19): siRNA sense strand
ugaagagugccauggucaa

SEQ ID NO: 2376698 - RNA, 19 nt, Homo sapiens
  misc_RNA (1)...(19): siRNA sense strand
gcauauucguguggauuca

SEQ ID NO: 2376699 - RNA, 19 nt, Homo sapiens
  misc_RNA (1)...(19): siRNA sense strand
uugagaagcccuugaggca

SEQ ID NO: 2376700 - RNA, 19 nt, Homo sapiens
  misc_RNA (1)...(19): siRNA sense strand
gggagagagaagaagaaag

SEQ ID NO: 2376701 - RNA, 19 nt, Homo sapiens
  misc_RNA (1)...(19): siRNA sense strand
ccgaaaucaacuuggaaag

SEQ ID NO: 2376702 - RNA, 19 nt, Homo sapiens
  misc_RNA (1)...(19): siRNA sense strand
agauagcaaaccagaugaa

SEQ ID NO: 2376703 - RNA, 19 nt, Homo sapiens
  misc_RNA (1)...(19): siRNA sense strand
gaagagucagaaagaccaa

SEQ ID NO: 2376704 - RNA, 19 nt, Homo sapiens
  misc_RNA (1)...(19): siRNA sense strand
gggccacaauagcgagguu

SEQ ID NO: 2376705 - RNA, 19 nt, Homo sapiens
  misc_RNA (1)...(19): siRNA sense strand
cuguggagcuggucaacga

SEQ ID NO: 2376706 - RNA, 19 nt, Homo sapiens
  misc_RNA (1)...(19): siRNA sense strand
ggacagauagcaaaccaga

SEQ ID NO: 2376707 - RNA, 19 nt, Homo sapiens
  misc_RNA (1)...(19): siRNA sense strand
ccauauccaggaagcuaua

SEQ ID NO: 2376708 - RNA, 19 nt, Homo sapiens
  misc_RNA (1)...(19): siRNA sense strand
gagaagaagaaagugaaga

SEQ ID NO: 2376709 - RNA, 19 nt, Homo sapiens
  misc_RNA (1)...(19): siRNA sense strand
agaaagggcuggaaaagca

SEQ ID NO: 2376710 - RNA, 19 nt, Homo sapiens
  misc_RNA (1)...(19): siRNA sense strand
gaugcaguuuggacggauu

SEQ ID NO: 2376711 - RNA, 19 nt, Homo sapiens
  misc_RNA (1)...(19): siRNA sense strand
gaggcauauucguguggau

SEQ ID NO: 2376712 - RNA, 19 nt, Homo sapiens
  misc_RNA (1)...(19): siRNA sense strand
ggauggaacggcagaccca

SEQ ID NO: 2376713 - RNA, 19 nt, Homo sapiens
  misc_RNA (1)...(19): siRNA sense strand
ggaacaugggccugugcuu

SEQ ID NO: 2376714 - RNA, 19 nt, Homo sapiens
  misc_RNA (1)...(19): siRNA sense strand
ccuacuggccaaucagaau

SEQ ID NO: 2376715 - RNA, 19 nt, Homo sapiens
  misc_RNA (1)...(19): siRNA sense strand
cguuuggguuccucaagaa

SEQ ID NO: 2376716 - RNA, 19 nt, Homo sapiens
  misc_RNA (1)...(19): siRNA sense strand
ggaaagaagaaccggaagc

SEQ ID NO: 2376717 - RNA, 19 nt, Homo sapiens
  misc_RNA (1)...(19): siRNA sense strand
caaacgaguuccaggacag

SEQ ID NO: 2376718 - RNA, 19 nt, Homo sapiens
  misc_RNA (1)...(19): siRNA sense strand
cugagggcaaagugaagaa

SEQ ID NO: 2376719 - RNA, 19 nt, Homo sapiens
  misc_RNA (1)...(19): siRNA sense strand
cgauugagagugacggcaa

SEQ ID NO: 2376720 - RNA, 19 nt, Homo sapiens
  misc_RNA (1)...(19): siRNA sense strand
cgauaacccggguggccaa

SEQ ID NO: 2376721 - RNA, 19 nt, Homo sapiens
  misc_RNA (1)...(19): siRNA sense strand
ucuaugaacaagaaugcaa

SEQ ID NO: 2376722 - RNA, 19 nt, Homo sapiens
  misc_RNA (1)...(19): siRNA sense strand
gggugaagcaauacaagca

SEQ ID NO: 2376723 - RNA, 19 nt, Homo sapiens
  misc_RNA (1)...(19): siRNA sense strand
uggacucagauuacagaaa

SEQ ID NO: 2376724 - RNA, 19 nt, Homo sapiens
  misc_RNA (1)...(19): siRNA sense strand
cagaacuaccucaagaaaa

SEQ ID NO: 2376725 - RNA, 19 nt, Homo sapiens
  misc_RNA (1)...(19): siRNA sense strand
agacauggcaagagccugu

SEQ ID NO: 2376726 - RNA, 19 nt, Homo sapiens
  misc_RNA (1)...(19): siRNA sense strand
gcagacaucuauauggacu

SEQ ID NO: 2376727 - RNA, 19 nt, Homo sapiens
  misc_RNA (1)...(19): siRNA sense strand
aagcaacagaagagaagaa

SEQ ID NO: 2376728 - RNA, 19 nt, Homo sapiens
  misc_RNA (1)...(19): siRNA sense strand
aggaggaggaugacgacua

SEQ ID NO: 2376729 - RNA, 19 nt, Homo sapiens
  misc_RNA (1)...(19): siRNA sense strand
aagaaaucucugaaacgaa

SEQ ID NO: 2376730 - RNA, 19 nt, Homo sapiens
  misc_RNA (1)...(19): siRNA sense strand
cagcagaacuggaggaccg

SEQ ID NO: 2376731 - RNA, 19 nt, Homo sapiens
  misc_RNA (1)...(19): siRNA sense strand
gcaaggaacugaaauccca

SEQ ID NO: 2376732 - RNA, 19 nt, Homo sapiens
  misc_RNA (1)...(19): siRNA sense strand
aauaacagacaaagaggca

SEQ ID NO: 2376733 - RNA, 19 nt, Homo sapiens
  misc_RNA (1)...(19): siRNA sense strand
aggaggaggaggaugacga

SEQ ID NO: 2376734 - RNA, 19 nt, Homo sapiens
  misc_RNA (1)...(19): siRNA sense strand
auguaaagagugugggaaa

SEQ ID NO: 2376735 - RNA, 19 nt, Homo sapiens
  misc_RNA (1)...(19): siRNA sense strand
guguaaggagugugggaaa

SEQ ID NO: 2376736 - RNA, 19 nt, Homo sapiens
  misc_RNA (1)...(19): siRNA sense strand
guguaaggaaugugggcaa

SEQ ID NO: 2376737 - RNA, 19 nt, Homo sapiens
  misc_RNA (1)...(19): siRNA sense strand
ggagagaccuugagccaga

SEQ ID NO: 2376738 - RNA, 19 nt, Homo sapiens
  misc_RNA (1)...(19): siRNA sense strand
guguaaacauugcggaaaa

SEQ ID NO: 2376739 - RNA, 19 nt, Homo sapiens
  misc_RNA (1)...(19): siRNA sense strand
cuuuagaagacaugugaaa

SEQ ID NO: 2376740 - RNA, 19 nt, Homo sapiens
  misc_RNA (1)...(19): siRNA sense strand
auguaaucaaugugggaaa

SEQ ID NO: 2376741 - RNA, 19 nt, Homo sapiens
  misc_RNA (1)...(19): siRNA sense strand
uguuagaaccaguggauca

SEQ ID NO: 2376742 - RNA, 19 nt, Homo sapiens
  misc_RNA (1)...(19): siRNA sense strand
auguaaggaauguggcaaa

SEQ ID NO: 2376743 - RNA, 19 nt, Homo sapiens
  misc_RNA (1)...(19): siRNA sense strand
augcaagcagugugggaaa

SEQ ID NO: 2376744 - RNA, 19 nt, Homo sapiens
  misc_RNA (1)...(19): siRNA sense strand
auguaagcauuguggaaaa

SEQ ID NO: 2376745 - RNA, 19 nt, Homo sapiens
  misc_RNA (1)...(19): siRNA sense strand
gcggagagaccuugagcca

SEQ ID NO: 2376746 - RNA, 19 nt, Homo sapiens
  misc_RNA (1)...(19): siRNA sense strand
gugaaaagucucagcagua

SEQ ID NO: 2376747 - RNA, 19 nt, Homo sapiens
  misc_RNA (1)...(19): siRNA sense strand
caguguaaacauugcggaa

SEQ ID NO: 2376748 - RNA, 19 nt, Homo sapiens
  misc_RNA (1)...(19): siRNA sense strand
aacgcagacuguagagaaa

SEQ ID NO: 2376749 - RNA, 19 nt, Homo sapiens
  misc_RNA (1)...(19): siRNA sense strand
cccuaugaauguaaggaau

SEQ ID NO: 2376750 - RNA, 19 nt, Homo sapiens
  misc_RNA (1)...(19): siRNA sense strand
auguacugaaugugggaaa

SEQ ID NO: 2376751 - RNA, 19 nt, Homo sapiens
  misc_RNA (1)...(19): siRNA sense strand
gugaaaguaaugaagguca

SEQ ID NO: 2376752 - RNA, 19 nt, Homo sapiens
  misc_RNA (1)...(19): siRNA sense strand
gcgugaucuuugaggaagu

SEQ ID NO: 2376753 - RNA, 19 nt, Homo sapiens
  misc_RNA (1)...(19): siRNA sense strand
cuaucaauguaaagagugu

SEQ ID NO: 2376754 - RNA, 19 nt, Homo sapiens
  misc_RNA (1)...(19): siRNA sense strand
gaacaugggagaacgcaca

SEQ ID NO: 2376755 - RNA, 19 nt, Homo sapiens
  misc_RNA (1)...(19): siRNA sense strand
auguaaaguaugugggaag

SEQ ID NO: 2376756 - RNA, 19 nt, Homo sapiens
  misc_RNA (1)...(19): siRNA sense strand
gaucaaguucucagaggga

SEQ ID NO: 2376757 - RNA, 19 nt, Homo sapiens
  misc_RNA (1)...(19): siRNA sense strand
auuguaaaguucacaggaa

SEQ ID NO: 2376758 - RNA, 19 nt, Homo sapiens
  misc_RNA (1)...(19): siRNA sense strand
ggagacucugugaaaguaa

SEQ ID NO: 2376759 - RNA, 19 nt, Homo sapiens
  misc_RNA (1)...(19): siRNA sense strand
cugcgugaucuuugaggaa

SEQ ID NO: 2376760 - RNA, 19 nt, Homo sapiens
  misc_RNA (1)...(19): siRNA sense strand
cguaagaacucacacagga

SEQ ID NO: 2376761 - RNA, 19 nt, Homo sapiens
  misc_RNA (1)...(19): siRNA sense strand
aacgcacaguggagagaaa

SEQ ID NO: 2376762 - RNA, 19 nt, Homo sapiens
  misc_RNA (1)...(19): siRNA sense strand
guggcaaagccuucaggua

SEQ ID NO: 2376763 - RNA, 19 nt, Homo sapiens
  misc_RNA (1)...(19): siRNA sense strand
aacccacagcggagagaaa

SEQ ID NO: 2376764 - RNA, 19 nt, Homo sapiens
  misc_RNA (1)...(19): siRNA sense strand
guggcaaagccuucgagaa

SEQ ID NO: 2376765 - RNA, 19 nt, Homo sapiens
  misc_RNA (1)...(19): siRNA sense strand
gaguguaagcauuguggga

SEQ ID NO: 2376766 - RNA, 19 nt, Homo sapiens
  misc_RNA (1)...(19): siRNA sense strand
agaaacccuaugaguguaa

SEQ ID NO: 2376767 - RNA, 19 nt, Homo sapiens
  misc_RNA (1)...(19): siRNA sense strand
auguauuacuccuaccuua

SEQ ID NO: 2376768 - RNA, 19 nt, Homo sapiens
  misc_RNA (1)...(19): siRNA sense strand
cugugaaaguaaugaaggu

SEQ ID NO: 2376769 - RNA, 19 nt, Homo sapiens
  misc_RNA (1)...(19): siRNA sense strand
agagaagcccuuugagugu

SEQ ID NO: 2376770 - RNA, 19 nt, Homo sapiens
  misc_RNA (1)...(19): siRNA sense strand
gaauguaaucaauguggga

SEQ ID NO: 2376771 - RNA, 19 nt, Homo sapiens
  misc_RNA (1)...(19): siRNA sense strand
gucuuaugaaugucagaaa

SEQ ID NO: 2376772 - RNA, 19 nt, Homo sapiens
  misc_RNA (1)...(19): siRNA sense strand
uguaaaguaugugggaaga

SEQ ID NO: 2376773 - RNA, 19 nt, Homo sapiens
  misc_RNA (1)...(19): siRNA sense strand
aacucacacaggagagaaa

SEQ ID NO: 2376774 - RNA, 19 nt, Homo sapiens
  misc_RNA (1)...(19): siRNA sense strand
cuguagagaaacccuguaa

SEQ ID NO: 2376775 - RNA, 19 nt, Homo sapiens
  misc_RNA (1)...(19): siRNA sense strand
cccuaugaguguaaggagu

SEQ ID NO: 2376776 - RNA, 19 nt, Homo sapiens
  misc_RNA (1)...(19): siRNA sense strand
gaguguaaggaguguggga

SEQ ID NO: 2376777 - RNA, 19 nt, Homo sapiens
  misc_RNA (1)...(19): siRNA sense strand
aacacaugcuggagcguga

SEQ ID NO: 2376778 - RNA, 19 nt, Homo sapiens
  misc_RNA (1)...(19): siRNA sense strand
acaagaagggcgaggccaa

SEQ ID NO: 2376779 - RNA, 19 nt, Homo sapiens
  misc_RNA (1)...(19): siRNA sense strand
ucagcgagauggugggcua

SEQ ID NO: 2376780 - RNA, 19 nt, Homo sapiens
  misc_RNA (1)...(19): siRNA sense strand
ugaagaaggugguggcugu

SEQ ID NO: 2376781 - RNA, 19 nt, Homo sapiens
  misc_RNA (1)...(19): siRNA sense strand
ccguagacaagaagggcga

SEQ ID NO: 2376782 - RNA, 19 nt, Homo sapiens
  misc_RNA (1)...(19): siRNA sense strand
gcaagaaugucaugcugga

SEQ ID NO: 2376783 - RNA, 19 nt, Homo sapiens
  misc_RNA (1)...(19): siRNA sense strand
guggaaugcacaugggcuu

SEQ ID NO: 2376784 - RNA, 19 nt, Homo sapiens
  misc_RNA (1)...(19): siRNA sense strand
ugaucaugaaggacagcaa

SEQ ID NO: 2376785 - RNA, 19 nt, Homo sapiens
  misc_RNA (1)...(19): siRNA sense strand
aggucaagaugcaggugga

SEQ ID NO: 2376786 - RNA, 19 nt, Homo sapiens
  misc_RNA (1)...(19): siRNA sense strand
agcagaagaucgagcagga

SEQ ID NO: 2376787 - RNA, 19 nt, Homo sapiens
  misc_RNA (1)...(19): siRNA sense strand
ccucagagcaagcccucaa

SEQ ID NO: 2376788 - RNA, 19 nt, Homo sapiens
  misc_RNA (1)...(19): siRNA sense strand
aggccaagaagauggaguu

SEQ ID NO: 2376789 - RNA, 19 nt, Homo sapiens
  misc_RNA (1)...(19): siRNA sense strand
ggaccuaccaggacgagga

SEQ ID NO: 2376790 - RNA, 19 nt, Homo sapiens
  misc_RNA (1)...(19): siRNA sense strand
ccggaaacgaaaagaacau

SEQ ID NO: 2376791 - RNA, 19 nt, Homo sapiens
  misc_RNA (1)...(19): siRNA sense strand
ucaugcagcuggugggcca

SEQ ID NO: 2376792 - RNA, 19 nt, Homo sapiens
  misc_RNA (1)...(19): siRNA sense strand
acgaaaagaacauggucau

SEQ ID NO: 2376793 - RNA, 19 nt, Homo sapiens
  misc_RNA (1)...(19): siRNA sense strand
acaagaagggcgaggccaa

SEQ ID NO: 2376794 - RNA, 19 nt, Homo sapiens
  misc_RNA (1)...(19): siRNA sense strand
ucagcgagauggugggcua

SEQ ID NO: 2376795 - RNA, 19 nt, Homo sapiens
  misc_RNA (1)...(19): siRNA sense strand
ugaagaaggugguggcugu

SEQ ID NO: 2376796 - RNA, 19 nt, Homo sapiens
  misc_RNA (1)...(19): siRNA sense strand
ccguagacaagaagggcga

SEQ ID NO: 2376797 - RNA, 19 nt, Homo sapiens
  misc_RNA (1)...(19): siRNA sense strand
gcaagaaugucaugcugga

SEQ ID NO: 2376798 - RNA, 19 nt, Homo sapiens
  misc_RNA (1)...(19): siRNA sense strand
guggaaugcacaugggcuu

SEQ ID NO: 2376799 - RNA, 19 nt, Homo sapiens
  misc_RNA (1)...(19): siRNA sense strand
augccacguuaaagagcaa

SEQ ID NO: 2376800 - RNA, 19 nt, Homo sapiens
  misc_RNA (1)...(19): siRNA sense strand
uggacaaagagaaaagaaa

SEQ ID NO: 2376801 - RNA, 19 nt, Homo sapiens
  misc_RNA (1)...(19): siRNA sense strand
cagcaaacucuucaggaca

SEQ ID NO: 2376802 - RNA, 19 nt, Homo sapiens
  misc_RNA (1)...(19): siRNA sense strand
gcagcauauugcagcccaa

SEQ ID NO: 2376803 - RNA, 19 nt, Homo sapiens
  misc_RNA (1)...(19): siRNA sense strand
cagaacuggacaaagagaa

SEQ ID NO: 2376804 - RNA, 19 nt, Homo sapiens
  misc_RNA (1)...(19): siRNA sense strand
augcagaaccagucuucaa

SEQ ID NO: 2376805 - RNA, 19 nt, Homo sapiens
  misc_RNA (1)...(19): siRNA sense strand
ggcaagggcuucaacgaca

SEQ ID NO: 2376806 - RNA, 19 nt, Homo sapiens
  misc_RNA (1)...(19): siRNA sense strand
agaaaagggcagacaccua

SEQ ID NO: 2376807 - RNA, 19 nt, Homo sapiens
  misc_RNA (1)...(19): siRNA sense strand
gcaauaaagccuucaccca

SEQ ID NO: 2376808 - RNA, 19 nt, Homo sapiens
  misc_RNA (1)...(19): siRNA sense strand
gaggaggaggagaggaagu

SEQ ID NO: 2376809 - RNA, 19 nt, Homo sapiens
  misc_RNA (1)...(19): siRNA sense strand
ccgcacacacacaggcauu

SEQ ID NO: 2376810 - RNA, 19 nt, Homo sapiens
  misc_RNA (1)...(19): siRNA sense strand
ccgcacaccaggagaauac

SEQ ID NO: 2376811 - RNA, 19 nt, Homo sapiens
  misc_RNA (1)...(19): siRNA sense strand
ccuaagaagcagugcauau

SEQ ID NO: 2376812 - RNA, 19 nt, Homo sapiens
  misc_RNA (1)...(19): siRNA sense strand
gauuaaagucucaagggaa

SEQ ID NO: 2376813 - RNA, 19 nt, Homo sapiens
  misc_RNA (1)...(19): siRNA sense strand
cuaagaagagugugggauu

SEQ ID NO: 2376814 - RNA, 19 nt, Homo sapiens
  misc_RNA (1)...(19): siRNA sense strand
aggccaagguggaggaguu

SEQ ID NO: 2376815 - RNA, 19 nt, Homo sapiens
  misc_RNA (1)...(19): siRNA sense strand
gcaagcagguugaacgcua

SEQ ID NO: 2376816 - RNA, 19 nt, Homo sapiens
  misc_RNA (1)...(19): siRNA sense strand
cagugaaggacuuggaaga

SEQ ID NO: 2376817 - RNA, 19 nt, Homo sapiens
  misc_RNA (1)...(19): siRNA sense strand
guuugaugauauugggcaa

SEQ ID NO: 2376818 - RNA, 19 nt, Homo sapiens
  misc_RNA (1)...(19): siRNA sense strand
guauuugaccauagggauu

SEQ ID NO: 2376819 - RNA, 19 nt, Homo sapiens
  misc_RNA (1)...(19): siRNA sense strand
uagcaagauacaagaggaa

SEQ ID NO: 2376820 - RNA, 19 nt, Homo sapiens
  misc_RNA (1)...(19): siRNA sense strand
gugaggaucccgagagaca

SEQ ID NO: 2376821 - RNA, 19 nt, Homo sapiens
  misc_RNA (1)...(19): siRNA sense strand
cgaggaagacugugaggau

SEQ ID NO: 2376822 - RNA, 19 nt, Homo sapiens
  misc_RNA (1)...(19): siRNA sense strand
ccaagguggaggaguuuaa

SEQ ID NO: 2376823 - RNA, 19 nt, Homo sapiens
  misc_RNA (1)...(19): siRNA sense strand
gcgaaaggcuuaugagcac

SEQ ID NO: 2376824 - RNA, 19 nt, Homo sapiens
  misc_RNA (1)...(19): siRNA sense strand
aggaaggagagcaggaaaa

SEQ ID NO: 2376825 - RNA, 19 nt, Homo sapiens
  misc_RNA (1)...(19): siRNA sense strand
aggaugaccaggaaauaaa

SEQ ID NO: 2376826 - RNA, 19 nt, Homo sapiens
  misc_RNA (1)...(19): siRNA sense strand
caauugaagcugagaaacu

SEQ ID NO: 2376827 - RNA, 19 nt, Homo sapiens
  misc_RNA (1)...(19): siRNA sense strand
cgaugaaccagaagaggau

SEQ ID NO: 2376828 - RNA, 19 nt, Homo sapiens
  misc_RNA (1)...(19): siRNA sense strand
aggaagagacugguggaaa

SEQ ID NO: 2376829 - RNA, 19 nt, Homo sapiens
  misc_RNA (1)...(19): siRNA sense strand
gaggaaggagagcaggaaa

SEQ ID NO: 2376830 - RNA, 19 nt, Homo sapiens
  misc_RNA (1)...(19): siRNA sense strand
acacggaggaugccagaaa

SEQ ID NO: 2376831 - RNA, 19 nt, Homo sapiens
  misc_RNA (1)...(19): siRNA sense strand
agaagcaaaccgaggaaga

SEQ ID NO: 2376832 - RNA, 19 nt, Homo sapiens
  misc_RNA (1)...(19): siRNA sense strand
gcgaggaguucauccgcaa

SEQ ID NO: 2376833 - RNA, 19 nt, Homo sapiens
  misc_RNA (1)...(19): siRNA sense strand
ugcaauugaagcugagaaa

SEQ ID NO: 2376834 - RNA, 19 nt, Homo sapiens
  misc_RNA (1)...(19): siRNA sense strand
gcaagauacaagaggaaag

SEQ ID NO: 2376835 - RNA, 19 nt, Homo sapiens
  misc_RNA (1)...(19): siRNA sense strand
ucacagucuuuauggaaaa

SEQ ID NO: 2376836 - RNA, 19 nt, Homo sapiens
  misc_RNA (1)...(19): siRNA sense strand
gcauggauagguugggcua

SEQ ID NO: 2376837 - RNA, 19 nt, Homo sapiens
  misc_RNA (1)...(19): siRNA sense strand
gauacaagaggaaaggaga

SEQ ID NO: 2376838 - RNA, 19 nt, Homo sapiens
  misc_RNA (1)...(19): siRNA sense strand
aaauaaugcugcagcugau

SEQ ID NO: 2376839 - RNA, 19 nt, Homo sapiens
  misc_RNA (1)...(19): siRNA sense strand
aagaagagugugggauuaa

SEQ ID NO: 2376840 - RNA, 19 nt, Homo sapiens
  misc_RNA (1)...(19): siRNA sense strand
cugauaagaccaagaagca

SEQ ID NO: 2376841 - RNA, 19 nt, Homo sapiens
  misc_RNA (1)...(19): siRNA sense strand
agguuagacgguagagaga

SEQ ID NO: 2376842 - RNA, 19 nt, Homo sapiens
  misc_RNA (1)...(19): siRNA sense strand
agaagaagcauucacgcaa

SEQ ID NO: 2376843 - RNA, 19 nt, Homo sapiens
  misc_RNA (1)...(19): siRNA sense strand
aagaggaugaccaggaaau

SEQ ID NO: 2376844 - RNA, 19 nt, Homo sapiens
  misc_RNA (1)...(19): siRNA sense strand
aagcugagaaacugaggaa

SEQ ID NO: 2376845 - RNA, 19 nt, Homo sapiens
  misc_RNA (1)...(19): siRNA sense strand
ucaaagaguggcagaaacu

SEQ ID NO: 2376846 - RNA, 19 nt, Homo sapiens
  misc_RNA (1)...(19): siRNA sense strand
cagaagaggaugaccagga

SEQ ID NO: 2376847 - RNA, 19 nt, Homo sapiens
  misc_RNA (1)...(19): siRNA sense strand
gagcaguguggaucugaaa

SEQ ID NO: 2376848 - RNA, 19 nt, Homo sapiens
  misc_RNA (1)...(19): siRNA sense strand
cugcgaacugggaguacaa

SEQ ID NO: 2376849 - RNA, 19 nt, Homo sapiens
  misc_RNA (1)...(19): siRNA sense strand
cuccagagcaggaaucaaa

SEQ ID NO: 2376850 - RNA, 19 nt, Homo sapiens
  misc_RNA (1)...(19): siRNA sense strand
agguguuguuugaugauau

SEQ ID NO: 2376851 - RNA, 19 nt, Homo sapiens
  misc_RNA (1)...(19): siRNA sense strand
gaagcagagaacugaaaga

SEQ ID NO: 2376852 - RNA, 19 nt, Homo sapiens
  misc_RNA (1)...(19): siRNA sense strand
guuagacgguagagagauc

SEQ ID NO: 2376853 - RNA, 19 nt, Homo sapiens
  misc_RNA (1)...(19): siRNA sense strand
gagagcaggaaaagcgaaa

SEQ ID NO: 2376854 - RNA, 19 nt, Homo sapiens
  misc_RNA (1)...(19): siRNA sense strand
caucuuugauaauggacuu

SEQ ID NO: 2376855 - RNA, 19 nt, Homo sapiens
  misc_RNA (1)...(19): siRNA sense strand
agauuaaagucucaaggga

SEQ ID NO: 2376856 - RNA, 19 nt, Homo sapiens
  misc_RNA (1)...(19): siRNA sense strand
gcagagaacugaaagacuc

SEQ ID NO: 2376857 - RNA, 19 nt, Homo sapiens
  misc_RNA (1)...(19): siRNA sense strand
ggaggauguauuugaacuu

SEQ ID NO: 2376858 - RNA, 19 nt, Homo sapiens
  misc_RNA (1)...(19): siRNA sense strand
uuguuuggcuugaggacau

SEQ ID NO: 2376859 - RNA, 19 nt, Homo sapiens
  misc_RNA (1)...(19): siRNA sense strand
gcuaaaugcuucaugcucu

SEQ ID NO: 2376860 - RNA, 19 nt, Homo sapiens
  misc_RNA (1)...(19): siRNA sense strand
agaugaggaugacgaugaa

SEQ ID NO: 2376861 - RNA, 19 nt, Homo sapiens
  misc_RNA (1)...(19): siRNA sense strand
uggcauggcaggaagcaga

SEQ ID NO: 2376862 - RNA, 19 nt, Homo sapiens
  misc_RNA (1)...(19): siRNA sense strand
aggaagcagagaacugaaa

SEQ ID NO: 2376863 - RNA, 19 nt, Homo sapiens
  misc_RNA (1)...(19): siRNA sense strand
augcugagcuggaggugga

SEQ ID NO: 2376864 - RNA, 19 nt, Homo sapiens
  misc_RNA (1)...(19): siRNA sense strand
ucucauuguuccaggccau

SEQ ID NO: 2376865 - RNA, 19 nt, Homo sapiens
  misc_RNA (1)...(19): siRNA sense strand
gaagaggaugaccaggaaa

SEQ ID NO: 2376866 - RNA, 19 nt, Homo sapiens
  misc_RNA (1)...(19): siRNA sense strand
auuaaagucucaagggaag

SEQ ID NO: 2376867 - RNA, 19 nt, Homo sapiens
  misc_RNA (1)...(19): siRNA sense strand
gagaagaagcauucacgca

SEQ ID NO: 2376868 - RNA, 19 nt, Homo sapiens
  misc_RNA (1)...(19): siRNA sense strand
caaccagagcaguguggau

SEQ ID NO: 2376869 - RNA, 19 nt, Homo sapiens
  misc_RNA (1)...(19): siRNA sense strand
caagaagcaaaccgaggaa

SEQ ID NO: 2376870 - RNA, 19 nt, Homo sapiens
  misc_RNA (1)...(19): siRNA sense strand
caagaagagauuaaagucu

SEQ ID NO: 2376871 - RNA, 19 nt, Homo sapiens
  misc_RNA (1)...(19): siRNA sense strand
ccuucagaacagauaagaa

SEQ ID NO: 2376872 - RNA, 19 nt, Homo sapiens
  misc_RNA (1)...(19): siRNA sense strand
gaaauaaugcugcagcuga

SEQ ID NO: 2376873 - RNA, 19 nt, Homo sapiens
  misc_RNA (1)...(19): siRNA sense strand
ccuguaugccaucgaggaa

SEQ ID NO: 2376874 - RNA, 19 nt, Homo sapiens
  misc_RNA (1)...(19): siRNA sense strand
cugugaggaucccgagaga

SEQ ID NO: 2376875 - RNA, 19 nt, Homo sapiens
  misc_RNA (1)...(19): siRNA sense strand
agcugcugcuggaggauua

SEQ ID NO: 2376876 - RNA, 19 nt, Homo sapiens
  misc_RNA (1)...(19): siRNA sense strand
gaacagauaagaaaccaga

SEQ ID NO: 2376877 - RNA, 19 nt, Homo sapiens
  misc_RNA (1)...(19): siRNA sense strand
gugugggauuaaugaacau

SEQ ID NO: 2376878 - RNA, 19 nt, Homo sapiens
  misc_RNA (1)...(19): siRNA sense strand
gauuaaagucucaagggaa

SEQ ID NO: 2376879 - RNA, 19 nt, Homo sapiens
  misc_RNA (1)...(19): siRNA sense strand
aggccaagguggaggaguu

SEQ ID NO: 2376880 - RNA, 19 nt, Homo sapiens
  misc_RNA (1)...(19): siRNA sense strand
cagugaaggacuuggaaga

SEQ ID NO: 2376881 - RNA, 19 nt, Homo sapiens
  misc_RNA (1)...(19): siRNA sense strand
guuugaugauauugggcaa

SEQ ID NO: 2376882 - RNA, 19 nt, Homo sapiens
  misc_RNA (1)...(19): siRNA sense strand
guauuugaccauagggauu

SEQ ID NO: 2376883 - RNA, 19 nt, Homo sapiens
  misc_RNA (1)...(19): siRNA sense strand
gugaggaucccgagagaca

SEQ ID NO: 2376884 - RNA, 19 nt, Homo sapiens
  misc_RNA (1)...(19): siRNA sense strand
cgaggaagacugugaggau

SEQ ID NO: 2376885 - RNA, 19 nt, Homo sapiens
  misc_RNA (1)...(19): siRNA sense strand
ccaagguggaggaguuuaa

SEQ ID NO: 2376886 - RNA, 19 nt, Homo sapiens
  misc_RNA (1)...(19): siRNA sense strand
gcgaaaggcuuaugagcac

SEQ ID NO: 2376887 - RNA, 19 nt, Homo sapiens
  misc_RNA (1)...(19): siRNA sense strand
aggaaggagagcaggaaaa

SEQ ID NO: 2376888 - RNA, 19 nt, Homo sapiens
  misc_RNA (1)...(19): siRNA sense strand
aggaugaccaggaaauaaa

SEQ ID NO: 2376889 - RNA, 19 nt, Homo sapiens
  misc_RNA (1)...(19): siRNA sense strand
caauugaagcugagaaacu

SEQ ID NO: 2376890 - RNA, 19 nt, Homo sapiens
  misc_RNA (1)...(19): siRNA sense strand
cgaugaaccagaagaggau

SEQ ID NO: 2376891 - RNA, 19 nt, Homo sapiens
  misc_RNA (1)...(19): siRNA sense strand
aggaagagacugguggaaa

SEQ ID NO: 2376892 - RNA, 19 nt, Homo sapiens
  misc_RNA (1)...(19): siRNA sense strand
gaggaaggagagcaggaaa

SEQ ID NO: 2376893 - RNA, 19 nt, Homo sapiens
  misc_RNA (1)...(19): siRNA sense strand
acacggaggaugccagaaa

SEQ ID NO: 2376894 - RNA, 19 nt, Homo sapiens
  misc_RNA (1)...(19): siRNA sense strand
agaagcaaaccgaggaaga

SEQ ID NO: 2376895 - RNA, 19 nt, Homo sapiens
  misc_RNA (1)...(19): siRNA sense strand
gcgaggaguucauccgcaa

SEQ ID NO: 2376896 - RNA, 19 nt, Homo sapiens
  misc_RNA (1)...(19): siRNA sense strand
ugcaauugaagcugagaaa

SEQ ID NO: 2376897 - RNA, 19 nt, Homo sapiens
  misc_RNA (1)...(19): siRNA sense strand
ucacagucuuuauggaaaa

SEQ ID NO: 2376898 - RNA, 19 nt, Homo sapiens
  misc_RNA (1)...(19): siRNA sense strand
gcauggauagguugggcua

SEQ ID NO: 2376899 - RNA, 19 nt, Homo sapiens
  misc_RNA (1)...(19): siRNA sense strand
cugauaagaccaagaagca

SEQ ID NO: 2376900 - RNA, 19 nt, Homo sapiens
  misc_RNA (1)...(19): siRNA sense strand
agguuagacgguagagaga

SEQ ID NO: 2376901 - RNA, 19 nt, Homo sapiens
  misc_RNA (1)...(19): siRNA sense strand
aagaggaugaccaggaaau

SEQ ID NO: 2376902 - RNA, 19 nt, Homo sapiens
  misc_RNA (1)...(19): siRNA sense strand
aagcugagaaacugaggaa

SEQ ID NO: 2376903 - RNA, 19 nt, Homo sapiens
  misc_RNA (1)...(19): siRNA sense strand
ucaaagaguggcagaaacu

SEQ ID NO: 2376904 - RNA, 19 nt, Homo sapiens
  misc_RNA (1)...(19): siRNA sense strand
cagaagaggaugaccagga

SEQ ID NO: 2376905 - RNA, 19 nt, Homo sapiens
  misc_RNA (1)...(19): siRNA sense strand
gagcaguguggaucugaaa

SEQ ID NO: 2376906 - RNA, 19 nt, Homo sapiens
  misc_RNA (1)...(19): siRNA sense strand
cuccagagcaggaaucaaa

SEQ ID NO: 2376907 - RNA, 19 nt, Homo sapiens
  misc_RNA (1)...(19): siRNA sense strand
agguguuguuugaugauau

SEQ ID NO: 2376908 - RNA, 19 nt, Homo sapiens
  misc_RNA (1)...(19): siRNA sense strand
gaagcagagaacugaaaga

SEQ ID NO: 2376909 - RNA, 19 nt, Homo sapiens
  misc_RNA (1)...(19): siRNA sense strand
guuagacgguagagagauc

SEQ ID NO: 2376910 - RNA, 19 nt, Homo sapiens
  misc_RNA (1)...(19): siRNA sense strand
gagagcaggaaaagcgaaa

SEQ ID NO: 2376911 - RNA, 19 nt, Homo sapiens
  misc_RNA (1)...(19): siRNA sense strand
caucuuugauaauggacuu

SEQ ID NO: 2376912 - RNA, 19 nt, Homo sapiens
  misc_RNA (1)...(19): siRNA sense strand
agauuaaagucucaaggga

SEQ ID NO: 2376913 - RNA, 19 nt, Homo sapiens
  misc_RNA (1)...(19): siRNA sense strand
gcagagaacugaaagacuc

SEQ ID NO: 2376914 - RNA, 19 nt, Homo sapiens
  misc_RNA (1)...(19): siRNA sense strand
ggaggauguauuugaacuu

SEQ ID NO: 2376915 - RNA, 19 nt, Homo sapiens
  misc_RNA (1)...(19): siRNA sense strand
gcuaaaugcuucaugcucu

SEQ ID NO: 2376916 - RNA, 19 nt, Homo sapiens
  misc_RNA (1)...(19): siRNA sense strand
agaugaggaugacgaugaa

SEQ ID NO: 2376917 - RNA, 19 nt, Homo sapiens
  misc_RNA (1)...(19): siRNA sense strand
uggcauggcaggaagcaga

SEQ ID NO: 2376918 - RNA, 19 nt, Homo sapiens
  misc_RNA (1)...(19): siRNA sense strand
aggaagcagagaacugaaa

SEQ ID NO: 2376919 - RNA, 19 nt, Homo sapiens
  misc_RNA (1)...(19): siRNA sense strand
augcugagcuggaggugga

SEQ ID NO: 2376920 - RNA, 19 nt, Homo sapiens
  misc_RNA (1)...(19): siRNA sense strand
ucucauuguuccaggccau

SEQ ID NO: 2376921 - RNA, 19 nt, Homo sapiens
  misc_RNA (1)...(19): siRNA sense strand
gaagaggaugaccaggaaa

SEQ ID NO: 2376922 - RNA, 19 nt, Homo sapiens
  misc_RNA (1)...(19): siRNA sense strand
auuaaagucucaagggaag

SEQ ID NO: 2376923 - RNA, 19 nt, Homo sapiens
  misc_RNA (1)...(19): siRNA sense strand
caaccagagcaguguggau

SEQ ID NO: 2376924 - RNA, 19 nt, Homo sapiens
  misc_RNA (1)...(19): siRNA sense strand
caagaagcaaaccgaggaa

SEQ ID NO: 2376925 - RNA, 19 nt, Homo sapiens
  misc_RNA (1)...(19): siRNA sense strand
caagaagagauuaaagucu

SEQ ID NO: 2376926 - RNA, 19 nt, Homo sapiens
  misc_RNA (1)...(19): siRNA sense strand
ccuguaugccaucgaggaa

SEQ ID NO: 2376927 - RNA, 19 nt, Homo sapiens
  misc_RNA (1)...(19): siRNA sense strand
cugugaggaucccgagaga

SEQ ID NO: 2376928 - RNA, 19 nt, Homo sapiens
  misc_RNA (1)...(19): siRNA sense strand
agcugcugcuggaggauua

SEQ ID NO: 2376929 - RNA, 19 nt, Homo sapiens
  misc_RNA (1)...(19): siRNA sense strand
caagggaagaacugcaaaa

SEQ ID NO: 2376930 - RNA, 19 nt, Homo sapiens
  misc_RNA (1)...(19): siRNA sense strand
ugaaacuggccaagcugaa

SEQ ID NO: 2376931 - RNA, 19 nt, Homo sapiens
  misc_RNA (1)...(19): siRNA sense strand
acgaugaaccagaagagga

SEQ ID NO: 2376932 - RNA, 19 nt, Homo sapiens
  misc_RNA (1)...(19): siRNA sense strand
cuaaaugcuucaugcucuu

SEQ ID NO: 2376933 - RNA, 19 nt, Homo sapiens
  misc_RNA (1)...(19): siRNA sense strand
acgcacagccagacagcga

SEQ ID NO: 2376934 - RNA, 19 nt, Homo sapiens
  misc_RNA (1)...(19): siRNA sense strand
augcacaucuggagugguu

SEQ ID NO: 2376935 - RNA, 19 nt, Homo sapiens
  misc_RNA (1)...(19): siRNA sense strand
cuggaaagcgagagagaaa

SEQ ID NO: 2376936 - RNA, 19 nt, Homo sapiens
  misc_RNA (1)...(19): siRNA sense strand
uggcagagcacgaggcaaa

SEQ ID NO: 2376937 - RNA, 19 nt, Homo sapiens
  misc_RNA (1)...(19): siRNA sense strand
caacaaagggagagaacuu

SEQ ID NO: 2376938 - RNA, 19 nt, Homo sapiens
  misc_RNA (1)...(19): siRNA sense strand
agaaauacacggaaguaaa

SEQ ID NO: 2376939 - RNA, 19 nt, Homo sapiens
  misc_RNA (1)...(19): siRNA sense strand
agaaagaguuagaagcaau

SEQ ID NO: 2376940 - RNA, 19 nt, Homo sapiens
  misc_RNA (1)...(19): siRNA sense strand
guuuguaccuccugagaaa

SEQ ID NO: 2376941 - RNA, 19 nt, Homo sapiens
  misc_RNA (1)...(19): siRNA sense strand
agaaauugcuacuggaaaa

SEQ ID NO: 2376942 - RNA, 19 nt, Homo sapiens
  misc_RNA (1)...(19): siRNA sense strand
ggaaagagcauuaagcaga

SEQ ID NO: 2376943 - RNA, 19 nt, Homo sapiens
  misc_RNA (1)...(19): siRNA sense strand
aguuggaaauggagaaauu

SEQ ID NO: 2376944 - RNA, 19 nt, Homo sapiens
  misc_RNA (1)...(19): siRNA sense strand
ccgaggaacugaaggauca

SEQ ID NO: 2376945 - RNA, 19 nt, Homo sapiens
  misc_RNA (1)...(19): siRNA sense strand
gagcagauuagaacagaaa

SEQ ID NO: 2376946 - RNA, 19 nt, Homo sapiens
  misc_RNA (1)...(19): siRNA sense strand
guaaagaaugugaaagaga

SEQ ID NO: 2376947 - RNA, 19 nt, Homo sapiens
  misc_RNA (1)...(19): siRNA sense strand
gugaaagggucaaggagga

SEQ ID NO: 2376948 - RNA, 19 nt, Homo sapiens
  misc_RNA (1)...(19): siRNA sense strand
uaguagaaauggaaagaga

SEQ ID NO: 2376949 - RNA, 19 nt, Homo sapiens
  misc_RNA (1)...(19): siRNA sense strand
aaauuaaagcccagaagaa

SEQ ID NO: 2376950 - RNA, 19 nt, Homo sapiens
  misc_RNA (1)...(19): siRNA sense strand
gugaagaagaagucaagaa

SEQ ID NO: 2376951 - RNA, 19 nt, Homo sapiens
  misc_RNA (1)...(19): siRNA sense strand
uguuaauuccagagacaaa

SEQ ID NO: 2376952 - RNA, 19 nt, Homo sapiens
  misc_RNA (1)...(19): siRNA sense strand
cagaaaagaaguuggaaau

SEQ ID NO: 2376953 - RNA, 19 nt, Homo sapiens
  misc_RNA (1)...(19): siRNA sense strand
guauagugucagugaagaa

SEQ ID NO: 2376954 - RNA, 19 nt, Homo sapiens
  misc_RNA (1)...(19): siRNA sense strand
cagaaggaacgaugugaua

SEQ ID NO: 2376955 - RNA, 19 nt, Homo sapiens
  misc_RNA (1)...(19): siRNA sense strand
agaaauggaaagagaacau

SEQ ID NO: 2376956 - RNA, 19 nt, Homo sapiens
  misc_RNA (1)...(19): siRNA sense strand
auuagagacuagagaggua

SEQ ID NO: 2376957 - RNA, 19 nt, Homo sapiens
  misc_RNA (1)...(19): siRNA sense strand
aaacaaggucagauguaua

SEQ ID NO: 2376958 - RNA, 19 nt, Homo sapiens
  misc_RNA (1)...(19): siRNA sense strand
aaagagagaacuugagaau

SEQ ID NO: 2376959 - RNA, 19 nt, Homo sapiens
  misc_RNA (1)...(19): siRNA sense strand
gauguuaauuccagagaca

SEQ ID NO: 2376960 - RNA, 19 nt, Homo sapiens
  misc_RNA (1)...(19): siRNA sense strand
gucagaagguaaaguuaaa

SEQ ID NO: 2376961 - RNA, 19 nt, Homo sapiens
  misc_RNA (1)...(19): siRNA sense strand
uggccaaucugaauagaaa

SEQ ID NO: 2376962 - RNA, 19 nt, Homo sapiens
  misc_RNA (1)...(19): siRNA sense strand
uguaugagucagaagguaa

SEQ ID NO: 2376963 - RNA, 19 nt, Homo sapiens
  misc_RNA (1)...(19): siRNA sense strand
ggaagaaaggucacagaga

SEQ ID NO: 2376964 - RNA, 19 nt, Homo sapiens
  misc_RNA (1)...(19): siRNA sense strand
uugaggagugcgagagaaa

SEQ ID NO: 2376965 - RNA, 19 nt, Homo sapiens
  misc_RNA (1)...(19): siRNA sense strand
uagaagaguuuaagaggga

SEQ ID NO: 2376966 - RNA, 19 nt, Homo sapiens
  misc_RNA (1)...(19): siRNA sense strand
gggagagaacuuuggaaga

SEQ ID NO: 2376967 - RNA, 19 nt, Homo sapiens
  misc_RNA (1)...(19): siRNA sense strand
gaauaaauaugaugaccga

SEQ ID NO: 2376968 - RNA, 19 nt, Homo sapiens
  misc_RNA (1)...(19): siRNA sense strand
ugaagaagaagucaagaaa

SEQ ID NO: 2376969 - RNA, 19 nt, Homo sapiens
  misc_RNA (1)...(19): siRNA sense strand
augcaaagguguuacgaga

SEQ ID NO: 2376970 - RNA, 19 nt, Homo sapiens
  misc_RNA (1)...(19): siRNA sense strand
gugaagaccaggagaaaau

SEQ ID NO: 2376971 - RNA, 19 nt, Homo sapiens
  misc_RNA (1)...(19): siRNA sense strand
aagaagcauuugagaaaga

SEQ ID NO: 2376972 - RNA, 19 nt, Homo sapiens
  misc_RNA (1)...(19): siRNA sense strand
acgucaaaccagaggaaca

SEQ ID NO: 2376973 - RNA, 19 nt, Homo sapiens
  misc_RNA (1)...(19): siRNA sense strand
gguuaagagcagauuagaa

SEQ ID NO: 2376974 - RNA, 19 nt, Homo sapiens
  misc_RNA (1)...(19): siRNA sense strand
cagcauugagcaagaaauu

SEQ ID NO: 2376975 - RNA, 19 nt, Homo sapiens
  misc_RNA (1)...(19): siRNA sense strand
agucagaagguaaaguuaa

SEQ ID NO: 2376976 - RNA, 19 nt, Homo sapiens
  misc_RNA (1)...(19): siRNA sense strand
ucacagagauggaaggcca

SEQ ID NO: 2376977 - RNA, 19 nt, Homo sapiens
  misc_RNA (1)...(19): siRNA sense strand
acagaaaucaggagaacuu

SEQ ID NO: 2376978 - RNA, 19 nt, Homo sapiens
  misc_RNA (1)...(19): siRNA sense strand
agcaagaaauuaaggauca

SEQ ID NO: 2376979 - RNA, 19 nt, Homo sapiens
  misc_RNA (1)...(19): siRNA sense strand
caacaugaagaaagcuuaa

SEQ ID NO: 2376980 - RNA, 19 nt, Homo sapiens
  misc_RNA (1)...(19): siRNA sense strand
ugaggaaguaugugaggaa

SEQ ID NO: 2376981 - RNA, 19 nt, Homo sapiens
  misc_RNA (1)...(19): siRNA sense strand
aaauggagcgagagaagaa

SEQ ID NO: 2376982 - RNA, 19 nt, Homo sapiens
  misc_RNA (1)...(19): siRNA sense strand
gagcgagagaagaaaggaa

SEQ ID NO: 2376983 - RNA, 19 nt, Homo sapiens
  misc_RNA (1)...(19): siRNA sense strand
gagagaagaaaggaagaaa

SEQ ID NO: 2376984 - RNA, 19 nt, Homo sapiens
  misc_RNA (1)...(19): siRNA sense strand
acagaaaagaaguuggaaa

SEQ ID NO: 2376985 - RNA, 19 nt, Homo sapiens
  misc_RNA (1)...(19): siRNA sense strand
gagaaauugcuacuggaaa

SEQ ID NO: 2376986 - RNA, 19 nt, Homo sapiens
  misc_RNA (1)...(19): siRNA sense strand
caucuuugcaacagcgaaa

SEQ ID NO: 2376987 - RNA, 19 nt, Homo sapiens
  misc_RNA (1)...(19): siRNA sense strand
agauggaaggccaggcaaa

SEQ ID NO: 2376988 - RNA, 19 nt, Homo sapiens
  misc_RNA (1)...(19): siRNA sense strand
cagaaauacacggaaguaa

SEQ ID NO: 2376989 - RNA, 19 nt, Homo sapiens
  misc_RNA (1)...(19): siRNA sense strand
cauuaaaagaugugcagaa

SEQ ID NO: 2376990 - RNA, 19 nt, Homo sapiens
  misc_RNA (1)...(19): siRNA sense strand
aagaagagauugugacacu

SEQ ID NO: 2376991 - RNA, 19 nt, Homo sapiens
  misc_RNA (1)...(19): siRNA sense strand
cgagcuaaacaaacaguua

SEQ ID NO: 2376992 - RNA, 19 nt, Homo sapiens
  misc_RNA (1)...(19): siRNA sense strand
acaaaguggcagaaugcaa

SEQ ID NO: 2376993 - RNA, 19 nt, Homo sapiens
  misc_RNA (1)...(19): siRNA sense strand
ggucacuagaggagggcuu

SEQ ID NO: 2376994 - RNA, 19 nt, Homo sapiens
  misc_RNA (1)...(19): siRNA sense strand
acaaggaggugaaccguga

SEQ ID NO: 2376995 - RNA, 19 nt, Homo sapiens
  misc_RNA (1)...(19): siRNA sense strand
cagcagugguacaccguga

SEQ ID NO: 2376996 - RNA, 19 nt, Homo sapiens
  misc_RNA (1)...(19): siRNA sense strand
ccaccaagaccgagagcuc

SEQ ID NO: 2376997 - RNA, 19 nt, Homo sapiens
  misc_RNA (1)...(19): siRNA sense strand
cgggaaaggaagaucaacu

SEQ ID NO: 2376998 - RNA, 19 nt, Homo sapiens
  misc_RNA (1)...(19): siRNA sense strand
agugcagcuucaagggcaa

SEQ ID NO: 2376999 - RNA, 19 nt, Homo sapiens
  misc_RNA (1)...(19): siRNA sense strand
aggugaaccgugagacaca

SEQ ID NO: 2377000 - RNA, 19 nt, Homo sapiens
  misc_RNA (1)...(19): siRNA sense strand
gagacacagcagugguaca

SEQ ID NO: 2377001 - RNA, 19 nt, Homo sapiens
  misc_RNA (1)...(19): siRNA sense strand
gauucgaagcugaacacau

SEQ ID NO: 2377002 - RNA, 19 nt, Homo sapiens
  misc_RNA (1)...(19): siRNA sense strand
ggucacuagaggagggcuu

SEQ ID NO: 2377003 - RNA, 19 nt, Homo sapiens
  misc_RNA (1)...(19): siRNA sense strand
acaaggaggugaaccguga

SEQ ID NO: 2377004 - RNA, 19 nt, Homo sapiens
  misc_RNA (1)...(19): siRNA sense strand
cagcagugguacaccguga

SEQ ID NO: 2377005 - RNA, 19 nt, Homo sapiens
  misc_RNA (1)...(19): siRNA sense strand
ccaccaagaccgagagcuc

SEQ ID NO: 2377006 - RNA, 19 nt, Homo sapiens
  misc_RNA (1)...(19): siRNA sense strand
cgggaaaggaagaucaacu

SEQ ID NO: 2377007 - RNA, 19 nt, Homo sapiens
  misc_RNA (1)...(19): siRNA sense strand
agugcagcuucaagggcaa

SEQ ID NO: 2377008 - RNA, 19 nt, Homo sapiens
  misc_RNA (1)...(19): siRNA sense strand
aggugaaccgugagacaca

SEQ ID NO: 2377009 - RNA, 19 nt, Homo sapiens
  misc_RNA (1)...(19): siRNA sense strand
gagacacagcagugguaca

SEQ ID NO: 2377010 - RNA, 19 nt, Homo sapiens
  misc_RNA (1)...(19): siRNA sense strand
gauucgaagcugaacacau

SEQ ID NO: 2377011 - RNA, 19 nt, Homo sapiens
  misc_RNA (1)...(19): siRNA sense strand
ugccagaggaaguggucaa

SEQ ID NO: 2377012 - RNA, 19 nt, Homo sapiens
  misc_RNA (1)...(19): siRNA sense strand
uggccaagugcaaggagaa

SEQ ID NO: 2377013 - RNA, 19 nt, Homo sapiens
  misc_RNA (1)...(19): siRNA sense strand
cgagcuggauggaugggua

SEQ ID NO: 2377014 - RNA, 19 nt, Homo sapiens
  misc_RNA (1)...(19): siRNA sense strand
gguaacaggccgagcugga

SEQ ID NO: 2377015 - RNA, 19 nt, Homo sapiens
  misc_RNA (1)...(19): siRNA sense strand
cgguggaggaccuguacua

SEQ ID NO: 2377016 - RNA, 19 nt, Homo sapiens
  misc_RNA (1)...(19): siRNA sense strand
cagccguggccaagugcaa

SEQ ID NO: 2377017 - RNA, 19 nt, Homo sapiens
  misc_RNA (1)...(19): siRNA sense strand
guguggaccagaaggugua

SEQ ID NO: 2377018 - RNA, 19 nt, Homo sapiens
  misc_RNA (1)...(19): siRNA sense strand
gagcuggauggauggguau

SEQ ID NO: 2377019 - RNA, 19 nt, Homo sapiens
  misc_RNA (1)...(19): siRNA sense strand
aggagaagcugccggugga

SEQ ID NO: 2377020 - RNA, 19 nt, Homo sapiens
  misc_RNA (1)...(19): siRNA sense strand
gccauuacgagaagagcuu

SEQ ID NO: 2377021 - RNA, 19 nt, Homo sapiens
  misc_RNA (1)...(19): siRNA sense strand
gggccaacagccugaagau

SEQ ID NO: 2377022 - RNA, 19 nt, Homo sapiens
  misc_RNA (1)...(19): siRNA sense strand
acgagacagccguggccaa

SEQ ID NO: 2377023 - RNA, 19 nt, Homo sapiens
  misc_RNA (1)...(19): siRNA sense strand
ccuacuacgcguuggagga

SEQ ID NO: 2377024 - RNA, 19 nt, Homo sapiens
  misc_RNA (1)...(19): siRNA sense strand
cguuggaggaugucaagau

SEQ ID NO: 2377025 - RNA, 19 nt, Homo sapiens
  misc_RNA (1)...(19): siRNA sense strand
cagcaggagaagaggcaca

SEQ ID NO: 2377026 - RNA, 19 nt, Homo sapiens
  misc_RNA (1)...(19): siRNA sense strand
aauggaaacaucugagcaa

SEQ ID NO: 2377027 - RNA, 19 nt, Homo sapiens
  misc_RNA (1)...(19): siRNA sense strand
acuccaugcugaaaggcaa

SEQ ID NO: 2377028 - RNA, 19 nt, Homo sapiens
  misc_RNA (1)...(19): siRNA sense strand
aaguggaaguguuuggcua

SEQ ID NO: 2377029 - RNA, 19 nt, Homo sapiens
  misc_RNA (1)...(19): siRNA sense strand
aggcaaacuagguguacca

SEQ ID NO: 2377030 - RNA, 19 nt, Homo sapiens
  misc_RNA (1)...(19): siRNA sense strand
cgucaugucuggagcugca

SEQ ID NO: 2377031 - RNA, 19 nt, Homo sapiens
  misc_RNA (1)...(19): siRNA sense strand
cuggauagugugaugucua

SEQ ID NO: 2377032 - RNA, 19 nt, Homo sapiens
  misc_RNA (1)...(19): siRNA sense strand
cacaguugguucaaggcaa

SEQ ID NO: 2377033 - RNA, 19 nt, Homo sapiens
  misc_RNA (1)...(19): siRNA sense strand
caaaauggaucuaugcuga

SEQ ID NO: 2377034 - RNA, 19 nt, Homo sapiens
  misc_RNA (1)...(19): siRNA sense strand
agauaaugaaucagaggaa

SEQ ID NO: 2377035 - RNA, 19 nt, Homo sapiens
  misc_RNA (1)...(19): siRNA sense strand
cagcaggagaagaggcaca

SEQ ID NO: 2377036 - RNA, 19 nt, Homo sapiens
  misc_RNA (1)...(19): siRNA sense strand
cagagauacaacaggauga

SEQ ID NO: 2377037 - RNA, 19 nt, Homo sapiens
  misc_RNA (1)...(19): siRNA sense strand
aauggaaacaucugagcaa

SEQ ID NO: 2377038 - RNA, 19 nt, Homo sapiens
  misc_RNA (1)...(19): siRNA sense strand
acuccaugcugaaaggcaa

SEQ ID NO: 2377039 - RNA, 19 nt, Homo sapiens
  misc_RNA (1)...(19): siRNA sense strand
aaguggaaguguuuggcua

SEQ ID NO: 2377040 - RNA, 19 nt, Homo sapiens
  misc_RNA (1)...(19): siRNA sense strand
acauugaagccgugaagga

SEQ ID NO: 2377041 - RNA, 19 nt, Homo sapiens
  misc_RNA (1)...(19): siRNA sense strand
ccaagaagcucuauggcag

SEQ ID NO: 2377042 - RNA, 19 nt, Homo sapiens
  misc_RNA (1)...(19): siRNA sense strand
aggcaaacuagguguacca

SEQ ID NO: 2377043 - RNA, 19 nt, Homo sapiens
  misc_RNA (1)...(19): siRNA sense strand
cgucaugucuggagcugca

SEQ ID NO: 2377044 - RNA, 19 nt, Homo sapiens
  misc_RNA (1)...(19): siRNA sense strand
augacgacucggagggaga

SEQ ID NO: 2377045 - RNA, 19 nt, Homo sapiens
  misc_RNA (1)...(19): siRNA sense strand
cuggauagugugaugucua

SEQ ID NO: 2377046 - RNA, 19 nt, Homo sapiens
  misc_RNA (1)...(19): siRNA sense strand
ccuagauggaccagaacca

SEQ ID NO: 2377047 - RNA, 19 nt, Homo sapiens
  misc_RNA (1)...(19): siRNA sense strand
cacaguugguucaaggcaa

SEQ ID NO: 2377048 - RNA, 19 nt, Homo sapiens
  misc_RNA (1)...(19): siRNA sense strand
caaaauggaucuaugcuga

SEQ ID NO: 2377049 - RNA, 19 nt, Homo sapiens
  misc_RNA (1)...(19): siRNA sense strand
cgacucggagggagauaau

SEQ ID NO: 2377050 - RNA, 19 nt, Homo sapiens
  misc_RNA (1)...(19): siRNA sense strand
cuaucgaugacguggacau

SEQ ID NO: 2377051 - RNA, 19 nt, Homo sapiens
  misc_RNA (1)...(19): siRNA sense strand
aggcggagccagagaacca

SEQ ID NO: 2377052 - RNA, 19 nt, Homo sapiens
  misc_RNA (1)...(19): siRNA sense strand
aggccaagacugaggucca

SEQ ID NO: 2377053 - RNA, 19 nt, Homo sapiens
  misc_RNA (1)...(19): siRNA sense strand
ccagaagauuccagagcag

SEQ ID NO: 2377054 - RNA, 19 nt, Homo sapiens
  misc_RNA (1)...(19): siRNA sense strand
agcgagacaucgugggcuu

SEQ ID NO: 2377055 - RNA, 19 nt, Homo sapiens
  misc_RNA (1)...(19): siRNA sense strand
gcacauggauggcgaccac

SEQ ID NO: 2377056 - RNA, 19 nt, Homo sapiens
  misc_RNA (1)...(19): siRNA sense strand
cagaccuacccaagagaaa

SEQ ID NO: 2377057 - RNA, 19 nt, Homo sapiens
  misc_RNA (1)...(19): siRNA sense strand
acagcaaauauguggagaa

SEQ ID NO: 2377058 - RNA, 19 nt, Homo sapiens
  misc_RNA (1)...(19): siRNA sense strand
gguucauauuccagagagu

SEQ ID NO: 2377059 - RNA, 19 nt, Homo sapiens
  misc_RNA (1)...(19): siRNA sense strand
acccaagagaaaugauaua

SEQ ID NO: 2377060 - RNA, 19 nt, Homo sapiens
  misc_RNA (1)...(19): siRNA sense strand
ggucuaaccuccuugcaga

SEQ ID NO: 2377061 - RNA, 19 nt, Homo sapiens
  misc_RNA (1)...(19): siRNA sense strand
agcaaguggacaaggaauu

SEQ ID NO: 2377062 - RNA, 19 nt, Homo sapiens
  misc_RNA (1)...(19): siRNA sense strand
uggagaaacuagaggcccu

SEQ ID NO: 2377063 - RNA, 19 nt, Homo sapiens
  misc_RNA (1)...(19): siRNA sense strand
caaagacaacugaggcuga

SEQ ID NO: 2377064 - RNA, 19 nt, Homo sapiens
  misc_RNA (1)...(19): siRNA sense strand
gggaugagauugaccucca

SEQ ID NO: 2377065 - RNA, 19 nt, Homo sapiens
  misc_RNA (1)...(19): siRNA sense strand
acaaugagccagugcggca

SEQ ID NO: 2377066 - RNA, 19 nt, Homo sapiens
  misc_RNA (1)...(19): siRNA sense strand
aaggaauuggacagggcaa

SEQ ID NO: 2377067 - RNA, 19 nt, Homo sapiens
  misc_RNA (1)...(19): siRNA sense strand
ccaucauaucuuauccaaa

SEQ ID NO: 2377068 - RNA, 19 nt, Homo sapiens
  misc_RNA (1)...(19): siRNA sense strand
cccuggugaccgagagaau

SEQ ID NO: 2377069 - RNA, 19 nt, Homo sapiens
  misc_RNA (1)...(19): siRNA sense strand
gcaccagagaucuuggaca

SEQ ID NO: 2377070 - RNA, 19 nt, Homo sapiens
  misc_RNA (1)...(19): siRNA sense strand
caggcaaacugcagcccuu

SEQ ID NO: 2377071 - RNA, 19 nt, Homo sapiens
  misc_RNA (1)...(19): siRNA sense strand
cagcagauguguccaggga

SEQ ID NO: 2377072 - RNA, 19 nt, Homo sapiens
  misc_RNA (1)...(19): siRNA sense strand
aggacuaccugcaggguug

SEQ ID NO: 2377073 - RNA, 19 nt, Homo sapiens
  misc_RNA (1)...(19): siRNA sense strand
cccuaugacucaagacuua

SEQ ID NO: 2377074 - RNA, 19 nt, Homo sapiens
  misc_RNA (1)...(19): siRNA sense strand
ccagugagagucaaagauu

SEQ ID NO: 2377075 - RNA, 19 nt, Homo sapiens
  misc_RNA (1)...(19): siRNA sense strand
gcucuuauuucauguuuca

SEQ ID NO: 2377076 - RNA, 19 nt, Homo sapiens
  misc_RNA (1)...(19): siRNA sense strand
gauacaacaaucaccacaa

SEQ ID NO: 2377077 - RNA, 19 nt, Homo sapiens
  misc_RNA (1)...(19): siRNA sense strand
auacaacaaucaccacaaa

SEQ ID NO: 2377078 - RNA, 19 nt, Homo sapiens
  misc_RNA (1)...(19): siRNA sense strand
ccaccaggcacuuccacaa

SEQ ID NO: 2377079 - RNA, 19 nt, Homo sapiens
  misc_RNA (1)...(19): siRNA sense strand
cuacagaguaaauggacaa

SEQ ID NO: 2377080 - RNA, 19 nt, Homo sapiens
  misc_RNA (1)...(19): siRNA sense strand
cagaguaaauggacaauau

SEQ ID NO: 2377081 - RNA, 19 nt, Homo sapiens
  misc_RNA (1)...(19): siRNA sense strand
ccuacagaguaaauggaca

SEQ ID NO: 2377082 - RNA, 19 nt, Homo sapiens
  misc_RNA (1)...(19): siRNA sense strand
ggacaauauauuauggaag

SEQ ID NO: 2377083 - RNA, 19 nt, Homo sapiens
  misc_RNA (1)...(19): siRNA sense strand
auuuacaaugggagguuua

SEQ ID NO: 2377084 - RNA, 19 nt, Homo sapiens
  misc_RNA (1)...(19): siRNA sense strand
cgaucgaaugcaccaaaua

SEQ ID NO: 2377085 - RNA, 19 nt, Homo sapiens
  misc_RNA (1)...(19): siRNA sense strand
caguagcuuucuuggccua

SEQ ID NO: 2377086 - RNA, 19 nt, Homo sapiens
  misc_RNA (1)...(19): siRNA sense strand
gcauccagcuuccuauuua

SEQ ID NO: 2377087 - RNA, 19 nt, Homo sapiens
  misc_RNA (1)...(19): siRNA sense strand
gaucgaaugcaccaaauau

SEQ ID NO: 2377088 - RNA, 19 nt, Homo sapiens
  misc_RNA (1)...(19): siRNA sense strand
aggaagaagaagaggaaga

SEQ ID NO: 2377089 - RNA, 19 nt, Homo sapiens
  misc_RNA (1)...(19): siRNA sense strand
aggaagaggaagaagaaga

SEQ ID NO: 2377090 - RNA, 19 nt, Homo sapiens
  misc_RNA (1)...(19): siRNA sense strand
ggaccaagggaaagaccaa

SEQ ID NO: 2377091 - RNA, 19 nt, Homo sapiens
  misc_RNA (1)...(19): siRNA sense strand
cgggacagggacagagaua

SEQ ID NO: 2377092 - RNA, 19 nt, Homo sapiens
  misc_RNA (1)...(19): siRNA sense strand
aggaagaagaagaggagga

SEQ ID NO: 2377093 - RNA, 19 nt, Homo sapiens
  misc_RNA (1)...(19): siRNA sense strand
aggaagaggaagaggagga

SEQ ID NO: 2377094 - RNA, 19 nt, Homo sapiens
  misc_RNA (1)...(19): siRNA sense strand
aggaggaggaagaggaaga

SEQ ID NO: 2377095 - RNA, 19 nt, Homo sapiens
  misc_RNA (1)...(19): siRNA sense strand
aggaggaggaggaggaaga

SEQ ID NO: 2377096 - RNA, 19 nt, Homo sapiens
  misc_RNA (1)...(19): siRNA sense strand
aggaggaggaagaggaaga

SEQ ID NO: 2377097 - RNA, 19 nt, Homo sapiens
  misc_RNA (1)...(19): siRNA sense strand
aggaagaggaggaggagca

SEQ ID NO: 2377098 - RNA, 19 nt, Homo sapiens
  misc_RNA (1)...(19): siRNA sense strand
agagauagggacagggaca

SEQ ID NO: 2377099 - RNA, 19 nt, Homo sapiens
  misc_RNA (1)...(19): siRNA sense strand
aagaagaagaggaggagga

SEQ ID NO: 2377100 - RNA, 19 nt, Homo sapiens
  misc_RNA (1)...(19): siRNA sense strand
ucaccaaggaggaguacaa

SEQ ID NO: 2377101 - RNA, 19 nt, Homo sapiens
  misc_RNA (1)...(19): siRNA sense strand
ggaccugcccaaugauaaa

SEQ ID NO: 2377102 - RNA, 19 nt, Homo sapiens
  misc_RNA (1)...(19): siRNA sense strand
aggugaagcugcaguccaa

SEQ ID NO: 2377103 - RNA, 19 nt, Homo sapiens
  misc_RNA (1)...(19): siRNA sense strand
aggaagacgaggaggagga

SEQ ID NO: 2377104 - RNA, 19 nt, Homo sapiens
  misc_RNA (1)...(19): siRNA sense strand
gaagaugagucucgaggga

SEQ ID NO: 2377105 - RNA, 19 nt, Homo sapiens
  misc_RNA (1)...(19): siRNA sense strand
aggaggaagaggaagaaga

SEQ ID NO: 2377106 - RNA, 19 nt, Homo sapiens
  misc_RNA (1)...(19): siRNA sense strand
ccaaggggaccaagggaaa

SEQ ID NO: 2377107 - RNA, 19 nt, Homo sapiens
  misc_RNA (1)...(19): siRNA sense strand
aggaggaggaggaagaaga

SEQ ID NO: 2377108 - RNA, 19 nt, Homo sapiens
  misc_RNA (1)...(19): siRNA sense strand
aggaggaggaagaagaaga

SEQ ID NO: 2377109 - RNA, 19 nt, Homo sapiens
  misc_RNA (1)...(19): siRNA sense strand
ucgcagggcuggugagugu

SEQ ID NO: 2377110 - RNA, 19 nt, Homo sapiens
  misc_RNA (1)...(19): siRNA sense strand
ggcagaggcuugucgggaa

SEQ ID NO: 2377111 - RNA, 19 nt, Homo sapiens
  misc_RNA (1)...(19): siRNA sense strand
aagaagaagaggaagagga

SEQ ID NO: 2377112 - RNA, 19 nt, Homo sapiens
  misc_RNA (1)...(19): siRNA sense strand
aggaagaggaagacgagga

SEQ ID NO: 2377113 - RNA, 19 nt, Homo sapiens
  misc_RNA (1)...(19): siRNA sense strand
aggaggaagaggaggagga

SEQ ID NO: 2377114 - RNA, 19 nt, Homo sapiens
  misc_RNA (1)...(19): siRNA sense strand
aggugaagcuggccaucaa

SEQ ID NO: 2377115 - RNA, 19 nt, Homo sapiens
  misc_RNA (1)...(19): siRNA sense strand
agaagaaggacaucaccaa

SEQ ID NO: 2377116 - RNA, 19 nt, Homo sapiens
  misc_RNA (1)...(19): siRNA sense strand
cugaggaggaagaggagga

SEQ ID NO: 2377117 - RNA, 19 nt, Homo sapiens
  misc_RNA (1)...(19): siRNA sense strand
ggaggaagaagaugagucu

SEQ ID NO: 2377118 - RNA, 19 nt, Homo sapiens
  misc_RNA (1)...(19): siRNA sense strand
aagaggaagacgaggagga

SEQ ID NO: 2377119 - RNA, 19 nt, Homo sapiens
  misc_RNA (1)...(19): siRNA sense strand
agccauacuaucagaagaa

SEQ ID NO: 2377120 - RNA, 19 nt, Homo sapiens
  misc_RNA (1)...(19): siRNA sense strand
aggaggaguacaaggacau

SEQ ID NO: 2377121 - RNA, 19 nt, Homo sapiens
  misc_RNA (1)...(19): siRNA sense strand
aagaggaagaggaggagga

SEQ ID NO: 2377122 - RNA, 19 nt, Homo sapiens
  misc_RNA (1)...(19): siRNA sense strand
agaugagucucgagggaag

SEQ ID NO: 2377123 - RNA, 19 nt, Homo sapiens
  misc_RNA (1)...(19): siRNA sense strand
acccagugaaggugagcaa

SEQ ID NO: 2377124 - RNA, 19 nt, Homo sapiens
  misc_RNA (1)...(19): siRNA sense strand
aagacgaggaggaggagga

SEQ ID NO: 2377125 - RNA, 19 nt, Homo sapiens
  misc_RNA (1)...(19): siRNA sense strand
ccauccaagaccaggaaaa

SEQ ID NO: 2377126 - RNA, 19 nt, Homo sapiens
  misc_RNA (1)...(19): siRNA sense strand
ucaagauggaagaagccaa

SEQ ID NO: 2377127 - RNA, 19 nt, Homo sapiens
  misc_RNA (1)...(19): siRNA sense strand
aaggaggaguacaaggaca

SEQ ID NO: 2377128 - RNA, 19 nt, Homo sapiens
  misc_RNA (1)...(19): siRNA sense strand
ugaggaaggccguccacaa

SEQ ID NO: 2377129 - RNA, 19 nt, Homo sapiens
  misc_RNA (1)...(19): siRNA sense strand
gcaaaaguggggaaaucaa

SEQ ID NO: 2377130 - RNA, 19 nt, Homo sapiens
  misc_RNA (1)...(19): siRNA sense strand
gggaccugcccaaugauaa

SEQ ID NO: 2377131 - RNA, 19 nt, Homo sapiens
  misc_RNA (1)...(19): siRNA sense strand
ccaucaagccauacuauca

SEQ ID NO: 2377132 - RNA, 19 nt, Homo sapiens
  misc_RNA (1)...(19): siRNA sense strand
agaggaggaggaagaggaa

SEQ ID NO: 2377133 - RNA, 19 nt, Homo sapiens
  misc_RNA (1)...(19): siRNA sense strand
agaggaggaggaagaggaa

SEQ ID NO: 2377134 - RNA, 19 nt, Homo sapiens
  misc_RNA (1)...(19): siRNA sense strand
ugaagaaguccaaggcgga

SEQ ID NO: 2377135 - RNA, 19 nt, Homo sapiens
  misc_RNA (1)...(19): siRNA sense strand
cggcuacuguguuggacau

SEQ ID NO: 2377136 - RNA, 19 nt, Homo sapiens
  misc_RNA (1)...(19): siRNA sense strand
agggacagagauagggaca

SEQ ID NO: 2377137 - RNA, 19 nt, Homo sapiens
  misc_RNA (1)...(19): siRNA sense strand
agaagaagaggaggaggaa

SEQ ID NO: 2377138 - RNA, 19 nt, Homo sapiens
  misc_RNA (1)...(19): siRNA sense strand
ggaaagaccaagccaucca

SEQ ID NO: 2377139 - RNA, 19 nt, Homo sapiens
  misc_RNA (1)...(19): siRNA sense strand
aggaggaagaagaagagga

SEQ ID NO: 2377140 - RNA, 19 nt, Homo sapiens
  misc_RNA (1)...(19): siRNA sense strand
aggaggaagaggaagagga

SEQ ID NO: 2377141 - RNA, 19 nt, Homo sapiens
  misc_RNA (1)...(19): siRNA sense strand
gcggcagcaagaagaagaa

SEQ ID NO: 2377142 - RNA, 19 nt, Homo sapiens
  misc_RNA (1)...(19): siRNA sense strand
ugaagaagcugcacacgca

SEQ ID NO: 2377143 - RNA, 19 nt, Homo sapiens
  misc_RNA (1)...(19): siRNA sense strand
cagcaaaaguggggaaauc

SEQ ID NO: 2377144 - RNA, 19 nt, Homo sapiens
  misc_RNA (1)...(19): siRNA sense strand
ggaaaucaacccagugaag

SEQ ID NO: 2377145 - RNA, 19 nt, Homo sapiens
  misc_RNA (1)...(19): siRNA sense strand
aagaggaagaggaagacga

SEQ ID NO: 2377146 - RNA, 19 nt, Homo sapiens
  misc_RNA (1)...(19): siRNA sense strand
gggacaggucauccaagaa

SEQ ID NO: 2377147 - RNA, 19 nt, Homo sapiens
  misc_RNA (1)...(19): siRNA sense strand
cauacuaucagaagaagga

SEQ ID NO: 2377148 - RNA, 19 nt, Homo sapiens
  misc_RNA (1)...(19): siRNA sense strand
ggauauaagaacaggcaaa

SEQ ID NO: 2377149 - RNA, 19 nt, Homo sapiens
  misc_RNA (1)...(19): siRNA sense strand
ggaacagacauuaggaaau

SEQ ID NO: 2377150 - RNA, 19 nt, Homo sapiens
  misc_RNA (1)...(19): siRNA sense strand
gaagaaaagucauggauau

SEQ ID NO: 2377151 - RNA, 19 nt, Homo sapiens
  misc_RNA (1)...(19): siRNA sense strand
gaggaugugcacagagaaa

SEQ ID NO: 2377152 - RNA, 19 nt, Homo sapiens
  misc_RNA (1)...(19): siRNA sense strand
aggucaaugugaagauuaa

SEQ ID NO: 2377153 - RNA, 19 nt, Homo sapiens
  misc_RNA (1)...(19): siRNA sense strand
ggaggcagcugauggcaaa

SEQ ID NO: 2377154 - RNA, 19 nt, Homo sapiens
  misc_RNA (1)...(19): siRNA sense strand
aggaacagacauuaggaaa

SEQ ID NO: 2377155 - RNA, 19 nt, Homo sapiens
  misc_RNA (1)...(19): siRNA sense strand
ggacaugaggauauaagaa

SEQ ID NO: 2377156 - RNA, 19 nt, Homo sapiens
  misc_RNA (1)...(19): siRNA sense strand
ccaaaugugacaagugcaa

SEQ ID NO: 2377157 - RNA, 19 nt, Homo sapiens
  misc_RNA (1)...(19): siRNA sense strand
gagaaaagauccaguuaga

SEQ ID NO: 2377158 - RNA, 19 nt, Homo sapiens
  misc_RNA (1)...(19): siRNA sense strand
gaaaugaccugaacgaaga

SEQ ID NO: 2377159 - RNA, 19 nt, Homo sapiens
  misc_RNA (1)...(19): siRNA sense strand
aggcaaacuaauugugaau

SEQ ID NO: 2377160 - RNA, 19 nt, Homo sapiens
  misc_RNA (1)...(19): siRNA sense strand
uagcaggacaugaggauau

SEQ ID NO: 2377161 - RNA, 19 nt, Homo sapiens
  misc_RNA (1)...(19): siRNA sense strand
acaggugcauggugggaua

SEQ ID NO: 2377162 - RNA, 19 nt, Homo sapiens
  misc_RNA (1)...(19): siRNA sense strand
caacacagaaggacaguau

SEQ ID NO: 2377163 - RNA, 19 nt, Homo sapiens
  misc_RNA (1)...(19): siRNA sense strand
gugccaaaguucaggagca

SEQ ID NO: 2377164 - RNA, 19 nt, Homo sapiens
  misc_RNA (1)...(19): siRNA sense strand
uggaguagcuggagugagu

SEQ ID NO: 2377165 - RNA, 19 nt, Homo sapiens
  misc_RNA (1)...(19): siRNA sense strand
ccagaaucauggacggaca

SEQ ID NO: 2377166 - RNA, 19 nt, Homo sapiens
  misc_RNA (1)...(19): siRNA sense strand
ggaagaaaagucauggaua

SEQ ID NO: 2377167 - RNA, 19 nt, Homo sapiens
  misc_RNA (1)...(19): siRNA sense strand
auaaguacuuugcgacuaa

SEQ ID NO: 2377168 - RNA, 19 nt, Homo sapiens
  misc_RNA (1)...(19): siRNA sense strand
gcgacuaacugcuccgcua

SEQ ID NO: 2377169 - RNA, 19 nt, Homo sapiens
  misc_RNA (1)...(19): siRNA sense strand
cugcaaguguaaugggcau

SEQ ID NO: 2377170 - RNA, 19 nt, Homo sapiens
  misc_RNA (1)...(19): siRNA sense strand
ccgaggaaagcgaacauua

SEQ ID NO: 2377171 - RNA, 19 nt, Homo sapiens
  misc_RNA (1)...(19): siRNA sense strand
ccucaauccugguuuggaa

SEQ ID NO: 2377172 - RNA, 19 nt, Homo sapiens
  misc_RNA (1)...(19): siRNA sense strand
cggaggaugugcacagaga

SEQ ID NO: 2377173 - RNA, 19 nt, Homo sapiens
  misc_RNA (1)...(19): siRNA sense strand
aguuagaccuggaagcuga

SEQ ID NO: 2377174 - RNA, 19 nt, Homo sapiens
  misc_RNA (1)...(19): siRNA sense strand
gcacuggaggagagguuau

SEQ ID NO: 2377175 - RNA, 19 nt, Homo sapiens
  misc_RNA (1)...(19): siRNA sense strand
acgaagagccucaacauuu

SEQ ID NO: 2377176 - RNA, 19 nt, Homo sapiens
  misc_RNA (1)...(19): siRNA sense strand
uauaagaacaggcaaacua

SEQ ID NO: 2377177 - RNA, 19 nt, Homo sapiens
  misc_RNA (1)...(19): siRNA sense strand
gggaaaacauggaagccuu

SEQ ID NO: 2377178 - RNA, 19 nt, Homo sapiens
  misc_RNA (1)...(19): siRNA sense strand
cagguaaaugcgaauguaa

SEQ ID NO: 2377179 - RNA, 19 nt, Homo sapiens
  misc_RNA (1)...(19): siRNA sense strand
ugauaaagguacucauguu

SEQ ID NO: 2377180 - RNA, 19 nt, Homo sapiens
  misc_RNA (1)...(19): siRNA sense strand
cuaccaaacugaagauuuu

SEQ ID NO: 2377181 - RNA, 19 nt, Homo sapiens
  misc_RNA (1)...(19): siRNA sense strand
aagaugauguugucaagaa

SEQ ID NO: 2377182 - RNA, 19 nt, Homo sapiens
  misc_RNA (1)...(19): siRNA sense strand
cauggaagccuuauaagua

SEQ ID NO: 2377183 - RNA, 19 nt, Homo sapiens
  misc_RNA (1)...(19): siRNA sense strand
gcacaauaagagcgaacca

SEQ ID NO: 2377184 - RNA, 19 nt, Homo sapiens
  misc_RNA (1)...(19): siRNA sense strand
cgaggaaagcgaacauuau

SEQ ID NO: 2377185 - RNA, 19 nt, Homo sapiens
  misc_RNA (1)...(19): siRNA sense strand
gugaguucccgcugugaaa

SEQ ID NO: 2377186 - RNA, 19 nt, Homo sapiens
  misc_RNA (1)...(19): siRNA sense strand
gugggaggcaucagggaau

SEQ ID NO: 2377187 - RNA, 19 nt, Homo sapiens
  misc_RNA (1)...(19): siRNA sense strand
acaugaggauauaagaaca

SEQ ID NO: 2377188 - RNA, 19 nt, Homo sapiens
  misc_RNA (1)...(19): siRNA sense strand
agagaaaugaccugaacga

SEQ ID NO: 2377189 - RNA, 19 nt, Homo sapiens
  misc_RNA (1)...(19): siRNA sense strand
acuucuacacucagguaaa

SEQ ID NO: 2377190 - RNA, 19 nt, Homo sapiens
  misc_RNA (1)...(19): siRNA sense strand
uggaagaugauguugucaa

SEQ ID NO: 2377191 - RNA, 19 nt, Homo sapiens
  misc_RNA (1)...(19): siRNA sense strand
caguauugccagaggugca

SEQ ID NO: 2377192 - RNA, 19 nt, Homo sapiens
  misc_RNA (1)...(19): siRNA sense strand
gggaggcagcugauggcaa

SEQ ID NO: 2377193 - RNA, 19 nt, Homo sapiens
  misc_RNA (1)...(19): siRNA sense strand
gaggaaagcgaacauuaua

SEQ ID NO: 2377194 - RNA, 19 nt, Homo sapiens
  misc_RNA (1)...(19): siRNA sense strand
ccuuauaaguacuuugcga

SEQ ID NO: 2377195 - RNA, 19 nt, Homo sapiens
  misc_RNA (1)...(19): siRNA sense strand
cagcagccacacagacaua

SEQ ID NO: 2377196 - RNA, 19 nt, Homo sapiens
  misc_RNA (1)...(19): siRNA sense strand
ucuaaauacuccaguccuu

SEQ ID NO: 2377197 - RNA, 19 nt, Homo sapiens
  misc_RNA (1)...(19): siRNA sense strand
cuacauuuggccuggaaga

SEQ ID NO: 2377198 - RNA, 19 nt, Homo sapiens
  misc_RNA (1)...(19): siRNA sense strand
caugggaaguguaugugua

SEQ ID NO: 2377199 - RNA, 19 nt, Homo sapiens
  misc_RNA (1)...(19): siRNA sense strand
caggcaaacuaauugugaa

SEQ ID NO: 2377200 - RNA, 19 nt, Homo sapiens
  misc_RNA (1)...(19): siRNA sense strand
ggaugggaaauuuggcuuu

SEQ ID NO: 2377201 - RNA, 19 nt, Homo sapiens
  misc_RNA (1)...(19): siRNA sense strand
cgaacauuauauccagaau

SEQ ID NO: 2377202 - RNA, 19 nt, Homo sapiens
  misc_RNA (1)...(19): siRNA sense strand
ugucaaggccccaggaaca

SEQ ID NO: 2377203 - RNA, 19 nt, Homo sapiens
  misc_RNA (1)...(19): siRNA sense strand
gccaaggcauucuguggaa

SEQ ID NO: 2377204 - RNA, 19 nt, Homo sapiens
  misc_RNA (1)...(19): siRNA sense strand
gaggucaaugugaagauua

SEQ ID NO: 2377205 - RNA, 19 nt, Homo sapiens
  misc_RNA (1)...(19): siRNA sense strand
ggaaaacauggaagccuua

SEQ ID NO: 2377206 - RNA, 19 nt, Homo sapiens
  misc_RNA (1)...(19): siRNA sense strand
agaaaugaccugaacgaag

SEQ ID NO: 2377207 - RNA, 19 nt, Homo sapiens
  misc_RNA (1)...(19): siRNA sense strand
gaacgaagagccucaacau

SEQ ID NO: 2377208 - RNA, 19 nt, Homo sapiens
  misc_RNA (1)...(19): siRNA sense strand
gaacauuccacauggucca

SEQ ID NO: 2377209 - RNA, 19 nt, Homo sapiens
  misc_RNA (1)...(19): siRNA sense strand
cauuuggccuggaagauga

SEQ ID NO: 2377210 - RNA, 19 nt, Homo sapiens
  misc_RNA (1)...(19): siRNA sense strand
cuaccgaacuguacugcuu

SEQ ID NO: 2377211 - RNA, 19 nt, Homo sapiens
  misc_RNA (1)...(19): siRNA sense strand
ggaauaccuuguagcagga

SEQ ID NO: 2377212 - RNA, 19 nt, Homo sapiens
  misc_RNA (1)...(19): siRNA sense strand
ggaagaugauguugucaag

SEQ ID NO: 2377213 - RNA, 19 nt, Homo sapiens
  misc_RNA (1)...(19): siRNA sense strand
augggaaguguauguguaa

SEQ ID NO: 2377214 - RNA, 19 nt, Homo sapiens
  misc_RNA (1)...(19): siRNA sense strand
gugcacaauaagagcgaac

SEQ ID NO: 2377215 - RNA, 19 nt, Homo sapiens
  misc_RNA (1)...(19): siRNA sense strand
ggacagaggaugcacuugu

SEQ ID NO: 2377216 - RNA, 19 nt, Homo sapiens
  misc_RNA (1)...(19): siRNA sense strand
aagaacaggcaaacuaauu

SEQ ID NO: 2377217 - RNA, 19 nt, Homo sapiens
  misc_RNA (1)...(19): siRNA sense strand
ggguagaauuugaugacaa

SEQ ID NO: 2377218 - RNA, 19 nt, Homo sapiens
  misc_RNA (1)...(19): siRNA sense strand
cugaagaacuugcuggaaa

SEQ ID NO: 2377219 - RNA, 19 nt, Homo sapiens
  misc_RNA (1)...(19): siRNA sense strand
gagaacagcaagagagaca

SEQ ID NO: 2377220 - RNA, 19 nt, Homo sapiens
  misc_RNA (1)...(19): siRNA sense strand
ugauauaaucccagaggaa

SEQ ID NO: 2377221 - RNA, 19 nt, Homo sapiens
  misc_RNA (1)...(19): siRNA sense strand
uggaaaagccggaguguua

SEQ ID NO: 2377222 - RNA, 19 nt, Homo sapiens
  misc_RNA (1)...(19): siRNA sense strand
ccuaaaggugucugggaua

SEQ ID NO: 2377223 - RNA, 19 nt, Homo sapiens
  misc_RNA (1)...(19): siRNA sense strand
agaggaagaugcagaacaa

SEQ ID NO: 2377224 - RNA, 19 nt, Homo sapiens
  misc_RNA (1)...(19): siRNA sense strand
ggaugauagucgagaagga

SEQ ID NO: 2377225 - RNA, 19 nt, Homo sapiens
  misc_RNA (1)...(19): siRNA sense strand
gauaaguaguaguaggaca

SEQ ID NO: 2377226 - RNA, 19 nt, Homo sapiens
  misc_RNA (1)...(19): siRNA sense strand
aggaacagauggugucaaa

SEQ ID NO: 2377227 - RNA, 19 nt, Homo sapiens
  misc_RNA (1)...(19): siRNA sense strand
caaaggagacucagggaau

SEQ ID NO: 2377228 - RNA, 19 nt, Homo sapiens
  misc_RNA (1)...(19): siRNA sense strand
cgaaguagccaacaggaaa

SEQ ID NO: 2377229 - RNA, 19 nt, Homo sapiens
  misc_RNA (1)...(19): siRNA sense strand
caucagauuucuaggccua

SEQ ID NO: 2377230 - RNA, 19 nt, Homo sapiens
  misc_RNA (1)...(19): siRNA sense strand
guaacaaaucagaggcauu

SEQ ID NO: 2377231 - RNA, 19 nt, Homo sapiens
  misc_RNA (1)...(19): siRNA sense strand
gcccaaagacuaucggaaa

SEQ ID NO: 2377232 - RNA, 19 nt, Homo sapiens
  misc_RNA (1)...(19): siRNA sense strand
cuagauacaaguagacaaa

SEQ ID NO: 2377233 - RNA, 19 nt, Homo sapiens
  misc_RNA (1)...(19): siRNA sense strand
acaccaagaccuauagaua

SEQ ID NO: 2377234 - RNA, 19 nt, Homo sapiens
  misc_RNA (1)...(19): siRNA sense strand
ugacaugggagauaagaaa

SEQ ID NO: 2377235 - RNA, 19 nt, Homo sapiens
  misc_RNA (1)...(19): siRNA sense strand
agaccuaaaugauggagaa

SEQ ID NO: 2377236 - RNA, 19 nt, Homo sapiens
  misc_RNA (1)...(19): siRNA sense strand
gaauauacaacaaggauca

SEQ ID NO: 2377237 - RNA, 19 nt, Homo sapiens
  misc_RNA (1)...(19): siRNA sense strand
ccaagaggguagagaagga

SEQ ID NO: 2377238 - RNA, 19 nt, Homo sapiens
  misc_RNA (1)...(19): siRNA sense strand
ccaaggagcagaaggaaga

SEQ ID NO: 2377239 - RNA, 19 nt, Homo sapiens
  misc_RNA (1)...(19): siRNA sense strand
acuuaaauacugaggaaga

SEQ ID NO: 2377240 - RNA, 19 nt, Homo sapiens
  misc_RNA (1)...(19): siRNA sense strand
ccuaacaacucuuggacau

SEQ ID NO: 2377241 - RNA, 19 nt, Homo sapiens
  misc_RNA (1)...(19): siRNA sense strand
aagcagauacagagaaauu

SEQ ID NO: 2377242 - RNA, 19 nt, Homo sapiens
  misc_RNA (1)...(19): siRNA sense strand
guuucaaagacaaaggaua

SEQ ID NO: 2377243 - RNA, 19 nt, Homo sapiens
  misc_RNA (1)...(19): siRNA sense strand
acaguagucucuaggguaa

SEQ ID NO: 2377244 - RNA, 19 nt, Homo sapiens
  misc_RNA (1)...(19): siRNA sense strand
ccaaaacagaagagauaaa

SEQ ID NO: 2377245 - RNA, 19 nt, Homo sapiens
  misc_RNA (1)...(19): siRNA sense strand
acagaaugguaguaaggua

SEQ ID NO: 2377246 - RNA, 19 nt, Homo sapiens
  misc_RNA (1)...(19): siRNA sense strand
agacaaagcaagauaaguu

SEQ ID NO: 2377247 - RNA, 19 nt, Homo sapiens
  misc_RNA (1)...(19): siRNA sense strand
cuuaauaaauguggagcua

SEQ ID NO: 2377248 - RNA, 19 nt, Homo sapiens
  misc_RNA (1)...(19): siRNA sense strand
acaccaaggccaaggauuu

SEQ ID NO: 2377249 - RNA, 19 nt, Homo sapiens
  misc_RNA (1)...(19): siRNA sense strand
gcacagcagaauagagaga

SEQ ID NO: 2377250 - RNA, 19 nt, Homo sapiens
  misc_RNA (1)...(19): siRNA sense strand
guagauagacaaagagcuu

SEQ ID NO: 2377251 - RNA, 19 nt, Homo sapiens
  misc_RNA (1)...(19): siRNA sense strand
caagaaacagcgaagcaaa

SEQ ID NO: 2377252 - RNA, 19 nt, Homo sapiens
  misc_RNA (1)...(19): siRNA sense strand
ucagaggacgggugagaaa

SEQ ID NO: 2377253 - RNA, 19 nt, Homo sapiens
  misc_RNA (1)...(19): siRNA sense strand
cuacuagagugaagcaaau

SEQ ID NO: 2377254 - RNA, 19 nt, Homo sapiens
  misc_RNA (1)...(19): siRNA sense strand
caguuuaccuggauggcaa

SEQ ID NO: 2377255 - RNA, 19 nt, Homo sapiens
  misc_RNA (1)...(19): siRNA sense strand
caguauaacacaucagauu

SEQ ID NO: 2377256 - RNA, 19 nt, Homo sapiens
  misc_RNA (1)...(19): siRNA sense strand
auacagagaaauugagaca

SEQ ID NO: 2377257 - RNA, 19 nt, Homo sapiens
  misc_RNA (1)...(19): siRNA sense strand
guaauaaacucuuguggca

SEQ ID NO: 2377258 - RNA, 19 nt, Homo sapiens
  misc_RNA (1)...(19): siRNA sense strand
uaaauaaagugauggcaca

SEQ ID NO: 2377259 - RNA, 19 nt, Homo sapiens
  misc_RNA (1)...(19): siRNA sense strand
agaacagauucguaaacaa

SEQ ID NO: 2377260 - RNA, 19 nt, Homo sapiens
  misc_RNA (1)...(19): siRNA sense strand
cccaaagacuaucggaaau

SEQ ID NO: 2377261 - RNA, 19 nt, Homo sapiens
  misc_RNA (1)...(19): siRNA sense strand
aauugaagccacacagaaa

SEQ ID NO: 2377262 - RNA, 19 nt, Homo sapiens
  misc_RNA (1)...(19): siRNA sense strand
gcuaaugagaaaucugaua

SEQ ID NO: 2377263 - RNA, 19 nt, Homo sapiens
  misc_RNA (1)...(19): siRNA sense strand
aggacgaagaggagaaaca

SEQ ID NO: 2377264 - RNA, 19 nt, Homo sapiens
  misc_RNA (1)...(19): siRNA sense strand
agaaagaacaugcugaauu

SEQ ID NO: 2377265 - RNA, 19 nt, Homo sapiens
  misc_RNA (1)...(19): siRNA sense strand
uggaaaaggcugagacaga

SEQ ID NO: 2377266 - RNA, 19 nt, Homo sapiens
  misc_RNA (1)...(19): siRNA sense strand
gggcaguauuuguucagaa

SEQ ID NO: 2377267 - RNA, 19 nt, Homo sapiens
  misc_RNA (1)...(19): siRNA sense strand
ugaagaacuugcuggaaaa

SEQ ID NO: 2377268 - RNA, 19 nt, Homo sapiens
  misc_RNA (1)...(19): siRNA sense strand
ggauggaaauggagcagca

SEQ ID NO: 2377269 - RNA, 19 nt, Homo sapiens
  misc_RNA (1)...(19): siRNA sense strand
agccuaaauuggaggaaca

SEQ ID NO: 2377270 - RNA, 19 nt, Homo sapiens
  misc_RNA (1)...(19): siRNA sense strand
aauuaaggauacaggauca

SEQ ID NO: 2377271 - RNA, 19 nt, Homo sapiens
  misc_RNA (1)...(19): siRNA sense strand
uggaagaaguggagcauuc

SEQ ID NO: 2377272 - RNA, 19 nt, Homo sapiens
  misc_RNA (1)...(19): siRNA sense strand
gcacaaaccaaagggaauu

SEQ ID NO: 2377273 - RNA, 19 nt, Homo sapiens
  misc_RNA (1)...(19): siRNA sense strand
ccucaauccuccuagaauu

SEQ ID NO: 2377274 - RNA, 19 nt, Homo sapiens
  misc_RNA (1)...(19): siRNA sense strand
ucaggaagaauuaaggaua

SEQ ID NO: 2377275 - RNA, 19 nt, Homo sapiens
  misc_RNA (1)...(19): siRNA sense strand
aaagggaauucaugagcaa

SEQ ID NO: 2377276 - RNA, 19 nt, Homo sapiens
  misc_RNA (1)...(19): siRNA sense strand
accaagaccuauagauaau

SEQ ID NO: 2377277 - RNA, 19 nt, Homo sapiens
  misc_RNA (1)...(19): siRNA sense strand
gcuaaugauuccucaaaca

SEQ ID NO: 2377278 - RNA, 19 nt, Homo sapiens
  misc_RNA (1)...(19): siRNA sense strand
ugccaaaacagaagagaua

SEQ ID NO: 2377279 - RNA, 19 nt, Homo sapiens
  misc_RNA (1)...(19): siRNA sense strand
gcaccaagaggguagagaa

SEQ ID NO: 2377280 - RNA, 19 nt, Homo sapiens
  misc_RNA (1)...(19): siRNA sense strand
cugaggaagaaguggaaaa

SEQ ID NO: 2377281 - RNA, 19 nt, Homo sapiens
  misc_RNA (1)...(19): siRNA sense strand
auggaaauuuagacagcaa

SEQ ID NO: 2377282 - RNA, 19 nt, Homo sapiens
  misc_RNA (1)...(19): siRNA sense strand
auauaaucccagaggaaaa

SEQ ID NO: 2377283 - RNA, 19 nt, Homo sapiens
  misc_RNA (1)...(19): siRNA sense strand
cuaaauuggaggaacagaa

SEQ ID NO: 2377284 - RNA, 19 nt, Homo sapiens
  misc_RNA (1)...(19): siRNA sense strand
ggauaacgaccaugugauu

SEQ ID NO: 2377285 - RNA, 19 nt, Homo sapiens
  misc_RNA (1)...(19): siRNA sense strand
cuuaaggucaggagaguuu

SEQ ID NO: 2377286 - RNA, 19 nt, Homo sapiens
  misc_RNA (1)...(19): siRNA sense strand
aaacauuagcacagcagaa

SEQ ID NO: 2377287 - RNA, 19 nt, Homo sapiens
  misc_RNA (1)...(19): siRNA sense strand
cagcccaagucgaggccaa

SEQ ID NO: 2377288 - RNA, 19 nt, Homo sapiens
  misc_RNA (1)...(19): siRNA sense strand
ccagaugagcugaagguga

SEQ ID NO: 2377289 - RNA, 19 nt, Homo sapiens
  misc_RNA (1)...(19): siRNA sense strand
ggguagaauuugaugacaa

SEQ ID NO: 2377290 - RNA, 19 nt, Homo sapiens
  misc_RNA (1)...(19): siRNA sense strand
cugaagaacuugcuggaaa

SEQ ID NO: 2377291 - RNA, 19 nt, Homo sapiens
  misc_RNA (1)...(19): siRNA sense strand
gagaacagcaagagagaca

SEQ ID NO: 2377292 - RNA, 19 nt, Homo sapiens
  misc_RNA (1)...(19): siRNA sense strand
ugauauaaucccagaggaa

SEQ ID NO: 2377293 - RNA, 19 nt, Homo sapiens
  misc_RNA (1)...(19): siRNA sense strand
uggaaaagccggaguguua

SEQ ID NO: 2377294 - RNA, 19 nt, Homo sapiens
  misc_RNA (1)...(19): siRNA sense strand
ccuaaaggugucugggaua

SEQ ID NO: 2377295 - RNA, 19 nt, Homo sapiens
  misc_RNA (1)...(19): siRNA sense strand
agaggaagaugcagaacaa

SEQ ID NO: 2377296 - RNA, 19 nt, Homo sapiens
  misc_RNA (1)...(19): siRNA sense strand
ggaugauagucgagaagga

SEQ ID NO: 2377297 - RNA, 19 nt, Homo sapiens
  misc_RNA (1)...(19): siRNA sense strand
gauaaguaguaguaggaca

SEQ ID NO: 2377298 - RNA, 19 nt, Homo sapiens
  misc_RNA (1)...(19): siRNA sense strand
aggaacagauggugucaaa

SEQ ID NO: 2377299 - RNA, 19 nt, Homo sapiens
  misc_RNA (1)...(19): siRNA sense strand
caaaggagacucagggaau

SEQ ID NO: 2377300 - RNA, 19 nt, Homo sapiens
  misc_RNA (1)...(19): siRNA sense strand
cgaaguagccaacaggaaa

SEQ ID NO: 2377301 - RNA, 19 nt, Homo sapiens
  misc_RNA (1)...(19): siRNA sense strand
caucagauuucuaggccua

SEQ ID NO: 2377302 - RNA, 19 nt, Homo sapiens
  misc_RNA (1)...(19): siRNA sense strand
guaacaaaucagaggcauu

SEQ ID NO: 2377303 - RNA, 19 nt, Homo sapiens
  misc_RNA (1)...(19): siRNA sense strand
gcccaaagacuaucggaaa

SEQ ID NO: 2377304 - RNA, 19 nt, Homo sapiens
  misc_RNA (1)...(19): siRNA sense strand
cuagauacaaguagacaaa

SEQ ID NO: 2377305 - RNA, 19 nt, Homo sapiens
  misc_RNA (1)...(19): siRNA sense strand
acaccaagaccuauagaua

SEQ ID NO: 2377306 - RNA, 19 nt, Homo sapiens
  misc_RNA (1)...(19): siRNA sense strand
ugacaugggagauaagaaa

SEQ ID NO: 2377307 - RNA, 19 nt, Homo sapiens
  misc_RNA (1)...(19): siRNA sense strand
agaccuaaaugauggagaa

SEQ ID NO: 2377308 - RNA, 19 nt, Homo sapiens
  misc_RNA (1)...(19): siRNA sense strand
gaauauacaacaaggauca

SEQ ID NO: 2377309 - RNA, 19 nt, Homo sapiens
  misc_RNA (1)...(19): siRNA sense strand
ccaagaggguagagaagga

SEQ ID NO: 2377310 - RNA, 19 nt, Homo sapiens
  misc_RNA (1)...(19): siRNA sense strand
ccaaggagcagaaggaaga

SEQ ID NO: 2377311 - RNA, 19 nt, Homo sapiens
  misc_RNA (1)...(19): siRNA sense strand
acuuaaauacugaggaaga

SEQ ID NO: 2377312 - RNA, 19 nt, Homo sapiens
  misc_RNA (1)...(19): siRNA sense strand
ccuaacaacucuuggacau

SEQ ID NO: 2377313 - RNA, 19 nt, Homo sapiens
  misc_RNA (1)...(19): siRNA sense strand
aagcagauacagagaaauu

SEQ ID NO: 2377314 - RNA, 19 nt, Homo sapiens
  misc_RNA (1)...(19): siRNA sense strand
guuucaaagacaaaggaua

SEQ ID NO: 2377315 - RNA, 19 nt, Homo sapiens
  misc_RNA (1)...(19): siRNA sense strand
acaguagucucuaggguaa

SEQ ID NO: 2377316 - RNA, 19 nt, Homo sapiens
  misc_RNA (1)...(19): siRNA sense strand
ccaaaacagaagagauaaa

SEQ ID NO: 2377317 - RNA, 19 nt, Homo sapiens
  misc_RNA (1)...(19): siRNA sense strand
acagaaugguaguaaggua

SEQ ID NO: 2377318 - RNA, 19 nt, Homo sapiens
  misc_RNA (1)...(19): siRNA sense strand
agacaaagcaagauaaguu

SEQ ID NO: 2377319 - RNA, 19 nt, Homo sapiens
  misc_RNA (1)...(19): siRNA sense strand
cuuaauaaauguggagcua

SEQ ID NO: 2377320 - RNA, 19 nt, Homo sapiens
  misc_RNA (1)...(19): siRNA sense strand
acaccaaggccaaggauuu

SEQ ID NO: 2377321 - RNA, 19 nt, Homo sapiens
  misc_RNA (1)...(19): siRNA sense strand
gcacagcagaauagagaga

SEQ ID NO: 2377322 - RNA, 19 nt, Homo sapiens
  misc_RNA (1)...(19): siRNA sense strand
guagauagacaaagagcuu

SEQ ID NO: 2377323 - RNA, 19 nt, Homo sapiens
  misc_RNA (1)...(19): siRNA sense strand
caagaaacagcgaagcaaa

SEQ ID NO: 2377324 - RNA, 19 nt, Homo sapiens
  misc_RNA (1)...(19): siRNA sense strand
ucagaggacgggugagaaa

SEQ ID NO: 2377325 - RNA, 19 nt, Homo sapiens
  misc_RNA (1)...(19): siRNA sense strand
cuacuagagugaagcaaau

SEQ ID NO: 2377326 - RNA, 19 nt, Homo sapiens
  misc_RNA (1)...(19): siRNA sense strand
caguuuaccuggauggcaa

SEQ ID NO: 2377327 - RNA, 19 nt, Homo sapiens
  misc_RNA (1)...(19): siRNA sense strand
caguauaacacaucagauu

SEQ ID NO: 2377328 - RNA, 19 nt, Homo sapiens
  misc_RNA (1)...(19): siRNA sense strand
auacagagaaauugagaca

SEQ ID NO: 2377329 - RNA, 19 nt, Homo sapiens
  misc_RNA (1)...(19): siRNA sense strand
guaauaaacucuuguggca

SEQ ID NO: 2377330 - RNA, 19 nt, Homo sapiens
  misc_RNA (1)...(19): siRNA sense strand
uaaauaaagugauggcaca

SEQ ID NO: 2377331 - RNA, 19 nt, Homo sapiens
  misc_RNA (1)...(19): siRNA sense strand
agaacagauucguaaacaa

SEQ ID NO: 2377332 - RNA, 19 nt, Homo sapiens
  misc_RNA (1)...(19): siRNA sense strand
cccaaagacuaucggaaau

SEQ ID NO: 2377333 - RNA, 19 nt, Homo sapiens
  misc_RNA (1)...(19): siRNA sense strand
aauugaagccacacagaaa

SEQ ID NO: 2377334 - RNA, 19 nt, Homo sapiens
  misc_RNA (1)...(19): siRNA sense strand
gcuaaugagaaaucugaua

SEQ ID NO: 2377335 - RNA, 19 nt, Homo sapiens
  misc_RNA (1)...(19): siRNA sense strand
aggacgaagaggagaaaca

SEQ ID NO: 2377336 - RNA, 19 nt, Homo sapiens
  misc_RNA (1)...(19): siRNA sense strand
agaaagaacaugcugaauu

SEQ ID NO: 2377337 - RNA, 19 nt, Homo sapiens
  misc_RNA (1)...(19): siRNA sense strand
uggaaaaggcugagacaga

SEQ ID NO: 2377338 - RNA, 19 nt, Homo sapiens
  misc_RNA (1)...(19): siRNA sense strand
gggcaguauuuguucagaa

SEQ ID NO: 2377339 - RNA, 19 nt, Homo sapiens
  misc_RNA (1)...(19): siRNA sense strand
ugaagaacuugcuggaaaa

SEQ ID NO: 2377340 - RNA, 19 nt, Homo sapiens
  misc_RNA (1)...(19): siRNA sense strand
ggauggaaauggagcagca

SEQ ID NO: 2377341 - RNA, 19 nt, Homo sapiens
  misc_RNA (1)...(19): siRNA sense strand
agccuaaauuggaggaaca

SEQ ID NO: 2377342 - RNA, 19 nt, Homo sapiens
  misc_RNA (1)...(19): siRNA sense strand
aauuaaggauacaggauca

SEQ ID NO: 2377343 - RNA, 19 nt, Homo sapiens
  misc_RNA (1)...(19): siRNA sense strand
uggaagaaguggagcauuc

SEQ ID NO: 2377344 - RNA, 19 nt, Homo sapiens
  misc_RNA (1)...(19): siRNA sense strand
gcacaaaccaaagggaauu

SEQ ID NO: 2377345 - RNA, 19 nt, Homo sapiens
  misc_RNA (1)...(19): siRNA sense strand
ccucaauccuccuagaauu

SEQ ID NO: 2377346 - RNA, 19 nt, Homo sapiens
  misc_RNA (1)...(19): siRNA sense strand
ucaggaagaauuaaggaua

SEQ ID NO: 2377347 - RNA, 19 nt, Homo sapiens
  misc_RNA (1)...(19): siRNA sense strand
aaagggaauucaugagcaa

SEQ ID NO: 2377348 - RNA, 19 nt, Homo sapiens
  misc_RNA (1)...(19): siRNA sense strand
accaagaccuauagauaau

SEQ ID NO: 2377349 - RNA, 19 nt, Homo sapiens
  misc_RNA (1)...(19): siRNA sense strand
gcuaaugauuccucaaaca

SEQ ID NO: 2377350 - RNA, 19 nt, Homo sapiens
  misc_RNA (1)...(19): siRNA sense strand
ugccaaaacagaagagaua

SEQ ID NO: 2377351 - RNA, 19 nt, Homo sapiens
  misc_RNA (1)...(19): siRNA sense strand
gcaccaagaggguagagaa

SEQ ID NO: 2377352 - RNA, 19 nt, Homo sapiens
  misc_RNA (1)...(19): siRNA sense strand
cugaggaagaaguggaaaa

SEQ ID NO: 2377353 - RNA, 19 nt, Homo sapiens
  misc_RNA (1)...(19): siRNA sense strand
auggaaauuuagacagcaa

SEQ ID NO: 2377354 - RNA, 19 nt, Homo sapiens
  misc_RNA (1)...(19): siRNA sense strand
auauaaucccagaggaaaa

SEQ ID NO: 2377355 - RNA, 19 nt, Homo sapiens
  misc_RNA (1)...(19): siRNA sense strand
cuaaauuggaggaacagaa

SEQ ID NO: 2377356 - RNA, 19 nt, Homo sapiens
  misc_RNA (1)...(19): siRNA sense strand
ggauaacgaccaugugauu

SEQ ID NO: 2377357 - RNA, 19 nt, Homo sapiens
  misc_RNA (1)...(19): siRNA sense strand
cuuaaggucaggagaguuu

SEQ ID NO: 2377358 - RNA, 19 nt, Homo sapiens
  misc_RNA (1)...(19): siRNA sense strand
aaacauuagcacagcagaa

SEQ ID NO: 2377359 - RNA, 19 nt, Homo sapiens
  misc_RNA (1)...(19): siRNA sense strand
gaacaagacauucgagaaa

SEQ ID NO: 2377360 - RNA, 19 nt, Homo sapiens
  misc_RNA (1)...(19): siRNA sense strand
guaaaggguucuuggacaa

SEQ ID NO: 2377361 - RNA, 19 nt, Homo sapiens
  misc_RNA (1)...(19): siRNA sense strand
ccaguuacaaagagagaaa

SEQ ID NO: 2377362 - RNA, 19 nt, Homo sapiens
  misc_RNA (1)...(19): siRNA sense strand
gagaaaaggaagaggcaau

SEQ ID NO: 2377363 - RNA, 19 nt, Homo sapiens
  misc_RNA (1)...(19): siRNA sense strand
ggccaaauuugaugggauu

SEQ ID NO: 2377364 - RNA, 19 nt, Homo sapiens
  misc_RNA (1)...(19): siRNA sense strand
gguaaaggguucuuggaca

SEQ ID NO: 2377365 - RNA, 19 nt, Homo sapiens
  misc_RNA (1)...(19): siRNA sense strand
caauagugcugaaggcuuu

SEQ ID NO: 2377366 - RNA, 19 nt, Homo sapiens
  misc_RNA (1)...(19): siRNA sense strand
ccagcgaggugcaggaauu

SEQ ID NO: 2377367 - RNA, 19 nt, Homo sapiens
  misc_RNA (1)...(19): siRNA sense strand
ggaacaagacauucgagaa

SEQ ID NO: 2377368 - RNA, 19 nt, Homo sapiens
  misc_RNA (1)...(19): siRNA sense strand
gaugcgauuugaugagaua

SEQ ID NO: 2377369 - RNA, 19 nt, Homo sapiens
  misc_RNA (1)...(19): siRNA sense strand
gaaguuaagcaaagaccaa

SEQ ID NO: 2377370 - RNA, 19 nt, Homo sapiens
  misc_RNA (1)...(19): siRNA sense strand
agaaauauucacuggaaca

SEQ ID NO: 2377371 - RNA, 19 nt, Homo sapiens
  misc_RNA (1)...(19): siRNA sense strand
agaaacagacaaagaauga

SEQ ID NO: 2377372 - RNA, 19 nt, Homo sapiens
  misc_RNA (1)...(19): siRNA sense strand
gagccaagucggagcugaa

SEQ ID NO: 2377373 - RNA, 19 nt, Homo sapiens
  misc_RNA (1)...(19): siRNA sense strand
ugaaggagcuugaugacau

SEQ ID NO: 2377374 - RNA, 19 nt, Homo sapiens
  misc_RNA (1)...(19): siRNA sense strand
aggaagaggcaaucagaca

SEQ ID NO: 2377375 - RNA, 19 nt, Homo sapiens
  misc_RNA (1)...(19): siRNA sense strand
ggacauuauccuugggaag

SEQ ID NO: 2377376 - RNA, 19 nt, Homo sapiens
  misc_RNA (1)...(19): siRNA sense strand
caagaaacagacaaagaau

SEQ ID NO: 2377377 - RNA, 19 nt, Homo sapiens
  misc_RNA (1)...(19): siRNA sense strand
cugugaggguggaagaaaa

SEQ ID NO: 2377378 - RNA, 19 nt, Homo sapiens
  misc_RNA (1)...(19): siRNA sense strand
gagacaaagucaagccagu

SEQ ID NO: 2377379 - RNA, 19 nt, Homo sapiens
  misc_RNA (1)...(19): siRNA sense strand
uggccgauccagaagguaa

SEQ ID NO: 2377380 - RNA, 19 nt, Homo sapiens
  misc_RNA (1)...(19): siRNA sense strand
gggcaggauucucagauga

SEQ ID NO: 2377381 - RNA, 19 nt, Homo sapiens
  misc_RNA (1)...(19): siRNA sense strand
aggccaaauuugaugggau

SEQ ID NO: 2377382 - RNA, 19 nt, Homo sapiens
  misc_RNA (1)...(19): siRNA sense strand
gccaggaggugaaggagau

SEQ ID NO: 2377383 - RNA, 19 nt, Homo sapiens
  misc_RNA (1)...(19): siRNA sense strand
agagaaauauucacuggaa

SEQ ID NO: 2377384 - RNA, 19 nt, Homo sapiens
  misc_RNA (1)...(19): siRNA sense strand
aagcacagccucaagcaaa

SEQ ID NO: 2377385 - RNA, 19 nt, Homo sapiens
  misc_RNA (1)...(19): siRNA sense strand
agucaacgcaagacgaaau

SEQ ID NO: 2377386 - RNA, 19 nt, Homo sapiens
  misc_RNA (1)...(19): siRNA sense strand
aggcaaacggggaaguuaa

SEQ ID NO: 2377387 - RNA, 19 nt, Homo sapiens
  misc_RNA (1)...(19): siRNA sense strand
gaaguuaccuugagcaauc

SEQ ID NO: 2377388 - RNA, 19 nt, Homo sapiens
  misc_RNA (1)...(19): siRNA sense strand
gggcugugaggguggaaga

SEQ ID NO: 2377389 - RNA, 19 nt, Homo sapiens
  misc_RNA (1)...(19): siRNA sense strand
gagauugcccaguuacaaa

SEQ ID NO: 2377390 - RNA, 19 nt, Homo sapiens
  misc_RNA (1)...(19): siRNA sense strand
uggcagacaagaugcgauu

SEQ ID NO: 2377391 - RNA, 19 nt, Homo sapiens
  misc_RNA (1)...(19): siRNA sense strand
augaaguuaccuugagcaa

SEQ ID NO: 2377392 - RNA, 19 nt, Homo sapiens
  misc_RNA (1)...(19): siRNA sense strand
agaggcaaucagacagaaa

SEQ ID NO: 2377393 - RNA, 19 nt, Homo sapiens
  misc_RNA (1)...(19): siRNA sense strand
ggccgauccagaagguaaa

SEQ ID NO: 2377394 - RNA, 19 nt, Homo sapiens
  misc_RNA (1)...(19): siRNA sense strand
agauauuccugaagaccga

SEQ ID NO: 2377395 - RNA, 19 nt, Homo sapiens
  misc_RNA (1)...(19): siRNA sense strand
caacgcaagacgaaaucaa

SEQ ID NO: 2377396 - RNA, 19 nt, Homo sapiens
  misc_RNA (1)...(19): siRNA sense strand
gcgugaaggagcuugauga

SEQ ID NO: 2377397 - RNA, 19 nt, Homo sapiens
  misc_RNA (1)...(19): siRNA sense strand
ucaagagauugcccaguua

SEQ ID NO: 2377398 - RNA, 19 nt, Homo sapiens
  misc_RNA (1)...(19): siRNA sense strand
gcagaacagcagacaacuu

SEQ ID NO: 2377399 - RNA, 19 nt, Homo sapiens
  misc_RNA (1)...(19): siRNA sense strand
ggccaggaggugaaggaga

SEQ ID NO: 2377400 - RNA, 19 nt, Homo sapiens
  misc_RNA (1)...(19): siRNA sense strand
acgagauggaccagcagaa

SEQ ID NO: 2377401 - RNA, 19 nt, Homo sapiens
  misc_RNA (1)...(19): siRNA sense strand
ucaagaaacagacaaagaa

SEQ ID NO: 2377402 - RNA, 19 nt, Homo sapiens
  misc_RNA (1)...(19): siRNA sense strand
gcagacaacuucaacagau

SEQ ID NO: 2377403 - RNA, 19 nt, Homo sapiens
  misc_RNA (1)...(19): siRNA sense strand
gcaacaacacgcaagaguu

SEQ ID NO: 2377404 - RNA, 19 nt, Homo sapiens
  misc_RNA (1)...(19): siRNA sense strand
ggacccguuuaguggaaaa

SEQ ID NO: 2377405 - RNA, 19 nt, Homo sapiens
  misc_RNA (1)...(19): siRNA sense strand
ggacuuggccgauccagaa

SEQ ID NO: 2377406 - RNA, 19 nt, Homo sapiens
  misc_RNA (1)...(19): siRNA sense strand
ggguggaagaaaaggccaa

SEQ ID NO: 2377407 - RNA, 19 nt, Homo sapiens
  misc_RNA (1)...(19): siRNA sense strand
gcaaagaccaauucgcguu

SEQ ID NO: 2377408 - RNA, 19 nt, Homo sapiens
  misc_RNA (1)...(19): siRNA sense strand
ucaaagaaagugacccauu

SEQ ID NO: 2377409 - RNA, 19 nt, Homo sapiens
  misc_RNA (1)...(19): siRNA sense strand
cuggaaauucguuguauga

SEQ ID NO: 2377410 - RNA, 19 nt, Homo sapiens
  misc_RNA (1)...(19): siRNA sense strand
agauaugggacuuggccga

SEQ ID NO: 2377411 - RNA, 19 nt, Homo sapiens
  misc_RNA (1)...(19): siRNA sense strand
gaaauauucacuggaacaa

SEQ ID NO: 2377412 - RNA, 19 nt, Homo sapiens
  misc_RNA (1)...(19): siRNA sense strand
cggacauuauccuugggaa

SEQ ID NO: 2377413 - RNA, 19 nt, Homo sapiens
  misc_RNA (1)...(19): siRNA sense strand
gagaaauauucacuggaac

SEQ ID NO: 2377414 - RNA, 19 nt, Homo sapiens
  misc_RNA (1)...(19): siRNA sense strand
ggaauuacaaaaugaccua

SEQ ID NO: 2377415 - RNA, 19 nt, Homo sapiens
  misc_RNA (1)...(19): siRNA sense strand
uguauuucauucagcagaa

SEQ ID NO: 2377416 - RNA, 19 nt, Homo sapiens
  misc_RNA (1)...(19): siRNA sense strand
gcccaguuacaaagagaga

SEQ ID NO: 2377417 - RNA, 19 nt, Homo sapiens
  misc_RNA (1)...(19): siRNA sense strand
gaagaggcaaucagacaga

SEQ ID NO: 2377418 - RNA, 19 nt, Homo sapiens
  misc_RNA (1)...(19): siRNA sense strand
gcaaauccaaucucaggaa

SEQ ID NO: 2377419 - RNA, 19 nt, Homo sapiens
  misc_RNA (1)...(19): siRNA sense strand
aagccuuguuauuuagcaa

SEQ ID NO: 2377420 - RNA, 19 nt, Homo sapiens
  misc_RNA (1)...(19): siRNA sense strand
acagaguggccaugaaguu

SEQ ID NO: 2377421 - RNA, 19 nt, Homo sapiens
  misc_RNA (1)...(19): siRNA sense strand
ccgccuaaauuucacgaca

SEQ ID NO: 2377422 - RNA, 19 nt, Homo sapiens
  misc_RNA (1)...(19): siRNA sense strand
gcugugaggguggaagaaa

SEQ ID NO: 2377423 - RNA, 19 nt, Homo sapiens
  misc_RNA (1)...(19): siRNA sense strand
cagcagaaggucaguaaag

SEQ ID NO: 2377424 - RNA, 19 nt, Homo sapiens
  misc_RNA (1)...(19): siRNA sense strand
gcgacccguuccaaaguaa

SEQ ID NO: 2377425 - RNA, 19 nt, Homo sapiens
  misc_RNA (1)...(19): siRNA sense strand
uggccaugcacuuggugua

SEQ ID NO: 2377426 - RNA, 19 nt, Homo sapiens
  misc_RNA (1)...(19): siRNA sense strand
gaaagaacgugaagagaaa

SEQ ID NO: 2377427 - RNA, 19 nt, Homo sapiens
  misc_RNA (1)...(19): siRNA sense strand
agagaaaguucgagaagaa

SEQ ID NO: 2377428 - RNA, 19 nt, Homo sapiens
  misc_RNA (1)...(19): siRNA sense strand
gcagaagagaagacauuua

SEQ ID NO: 2377429 - RNA, 19 nt, Homo sapiens
  misc_RNA (1)...(19): siRNA sense strand
ugaaagaacgugaagagaa

SEQ ID NO: 2377430 - RNA, 19 nt, Homo sapiens
  misc_RNA (1)...(19): siRNA sense strand
agaaaguucgagaagaaua

SEQ ID NO: 2377431 - RNA, 19 nt, Homo sapiens
  misc_RNA (1)...(19): siRNA sense strand
cgagaagaauaugaagaaa

SEQ ID NO: 2377432 - RNA, 19 nt, Homo sapiens
  misc_RNA (1)...(19): siRNA sense strand
gaacaaauucuguacaaca

SEQ ID NO: 2377433 - RNA, 19 nt, Homo sapiens
  misc_RNA (1)...(19): siRNA sense strand
ucaaauaaugcgacgauau

SEQ ID NO: 2377434 - RNA, 19 nt, Homo sapiens
  misc_RNA (1)...(19): siRNA sense strand
ucgagaagaauaugaagaa

SEQ ID NO: 2377435 - RNA, 19 nt, Homo sapiens
  misc_RNA (1)...(19): siRNA sense strand
augcagaagagaagacauu

SEQ ID NO: 2377436 - RNA, 19 nt, Homo sapiens
  misc_RNA (1)...(19): siRNA sense strand
gaaaguucgagaagaauau

SEQ ID NO: 2377437 - RNA, 19 nt, Homo sapiens
  misc_RNA (1)...(19): siRNA sense strand
agaacaauaugaugcguuu

SEQ ID NO: 2377438 - RNA, 19 nt, Homo sapiens
  misc_RNA (1)...(19): siRNA sense strand
aaacgaaugcagaagagaa

SEQ ID NO: 2377439 - RNA, 19 nt, Homo sapiens
  misc_RNA (1)...(19): siRNA sense strand
gagaacagccugcuagcua

SEQ ID NO: 2377440 - RNA, 19 nt, Homo sapiens
  misc_RNA (1)...(19): siRNA sense strand
acacaaaacuugcagaaca

SEQ ID NO: 2377441 - RNA, 19 nt, Homo sapiens
  misc_RNA (1)...(19): siRNA sense strand
cacaaaacuugcagaacaa

SEQ ID NO: 2377442 - RNA, 19 nt, Homo sapiens
  misc_RNA (1)...(19): siRNA sense strand
gaguauaaacgaaugcaga

SEQ ID NO: 2377443 - RNA, 19 nt, Homo sapiens
  misc_RNA (1)...(19): siRNA sense strand
gugaagagaaaguucgaga

SEQ ID NO: 2377444 - RNA, 19 nt, Homo sapiens
  misc_RNA (1)...(19): siRNA sense strand
aguauaaacgaaugcagaa

SEQ ID NO: 2377445 - RNA, 19 nt, Homo sapiens
  misc_RNA (1)...(19): siRNA sense strand
gaagagaagacauuuagaa

SEQ ID NO: 2377446 - RNA, 19 nt, Homo sapiens
  misc_RNA (1)...(19): siRNA sense strand
gugcggagccacucugaaa

SEQ ID NO: 2377447 - RNA, 19 nt, Homo sapiens
  misc_RNA (1)...(19): siRNA sense strand
gugaacguuuguugaaaga

SEQ ID NO: 2377448 - RNA, 19 nt, Homo sapiens
  misc_RNA (1)...(19): siRNA sense strand
gagaagacauuuagaaacg

SEQ ID NO: 2377449 - RNA, 19 nt, Homo sapiens
  misc_RNA (1)...(19): siRNA sense strand
ccgcagaaguaucuccgaa

SEQ ID NO: 2377450 - RNA, 19 nt, Homo sapiens
  misc_RNA (1)...(19): siRNA sense strand
gaucaaauaaugcgacgau

SEQ ID NO: 2377451 - RNA, 19 nt, Homo sapiens
  misc_RNA (1)...(19): siRNA sense strand
ugaaaaggacucuggauuu

SEQ ID NO: 2377452 - RNA, 19 nt, Homo sapiens
  misc_RNA (1)...(19): siRNA sense strand
gaacguuuguugaaagaac

SEQ ID NO: 2377453 - RNA, 19 nt, Homo sapiens
  misc_RNA (1)...(19): siRNA sense strand
ccgccucaccacagaacaa

SEQ ID NO: 2377454 - RNA, 19 nt, Homo sapiens
  misc_RNA (1)...(19): siRNA sense strand
gaacacaaaacuugcagaa

SEQ ID NO: 2377455 - RNA, 19 nt, Homo sapiens
  misc_RNA (1)...(19): siRNA sense strand
guuuacgcaugaucaaaua

SEQ ID NO: 2377456 - RNA, 19 nt, Homo sapiens
  misc_RNA (1)...(19): siRNA sense strand
cugaaaaggacucuggauu

SEQ ID NO: 2377457 - RNA, 19 nt, Homo sapiens
  misc_RNA (1)...(19): siRNA sense strand
gaaguuuacgcaugaucaa

SEQ ID NO: 2377458 - RNA, 19 nt, Homo sapiens
  misc_RNA (1)...(19): siRNA sense strand
cagacagauccguguugua

SEQ ID NO: 2377459 - RNA, 19 nt, Homo sapiens
  misc_RNA (1)...(19): siRNA sense strand
ccucaguggaccagcuuca

SEQ ID NO: 2377460 - RNA, 19 nt, Homo sapiens
  misc_RNA (1)...(19): siRNA sense strand
ugaagagaaaguucgagaa

SEQ ID NO: 2377461 - RNA, 19 nt, Homo sapiens
  misc_RNA (1)...(19): siRNA sense strand
gcgacgauauggagaacag

SEQ ID NO: 2377462 - RNA, 19 nt, Homo sapiens
  misc_RNA (1)...(19): siRNA sense strand
aagagaaagagaagaguua

SEQ ID NO: 2377463 - RNA, 19 nt, Homo sapiens
  misc_RNA (1)...(19): siRNA sense strand
gcagaugauggaagagaaa

SEQ ID NO: 2377464 - RNA, 19 nt, Homo sapiens
  misc_RNA (1)...(19): siRNA sense strand
gagaagauggagagggaga

SEQ ID NO: 2377465 - RNA, 19 nt, Homo sapiens
  misc_RNA (1)...(19): siRNA sense strand
ggaacaggcccgaguacua

SEQ ID NO: 2377466 - RNA, 19 nt, Homo sapiens
  misc_RNA (1)...(19): siRNA sense strand
cgcauaagcuaaagaucua

SEQ ID NO: 2377467 - RNA, 19 nt, Homo sapiens
  misc_RNA (1)...(19): siRNA sense strand
cugagaagauggagaggga

SEQ ID NO: 2377468 - RNA, 19 nt, Homo sapiens
  misc_RNA (1)...(19): siRNA sense strand
cuaguaaacuucaggaaca

SEQ ID NO: 2377469 - RNA, 19 nt, Homo sapiens
  misc_RNA (1)...(19): siRNA sense strand
ggagagaugccaaggugaa

SEQ ID NO: 2377470 - RNA, 19 nt, Homo sapiens
  misc_RNA (1)...(19): siRNA sense strand
gcuacaagaccuggagaaa

SEQ ID NO: 2377471 - RNA, 19 nt, Homo sapiens
  misc_RNA (1)...(19): siRNA sense strand
ccacugaagucuauaugaa

SEQ ID NO: 2377472 - RNA, 19 nt, Homo sapiens
  misc_RNA (1)...(19): siRNA sense strand
uggaggaaaugcaaauaaa

SEQ ID NO: 2377473 - RNA, 19 nt, Homo sapiens
  misc_RNA (1)...(19): siRNA sense strand
gaguauucccugaagcuaa

SEQ ID NO: 2377474 - RNA, 19 nt, Homo sapiens
  misc_RNA (1)...(19): siRNA sense strand
agaugauggaagagaaaga

SEQ ID NO: 2377475 - RNA, 19 nt, Homo sapiens
  misc_RNA (1)...(19): siRNA sense strand
ugaacaagcuagcugggaa

SEQ ID NO: 2377476 - RNA, 19 nt, Homo sapiens
  misc_RNA (1)...(19): siRNA sense strand
agagaagaguuaucaagaa

SEQ ID NO: 2377477 - RNA, 19 nt, Homo sapiens
  misc_RNA (1)...(19): siRNA sense strand
cagaaaaggaaaaggagau

SEQ ID NO: 2377478 - RNA, 19 nt, Homo sapiens
  misc_RNA (1)...(19): siRNA sense strand
caaauaaaguaucagcaga

SEQ ID NO: 2377479 - RNA, 19 nt, Homo sapiens
  misc_RNA (1)...(19): siRNA sense strand
ugagaaacuacaagaugaa

SEQ ID NO: 2377480 - RNA, 19 nt, Homo sapiens
  misc_RNA (1)...(19): siRNA sense strand
cagaugaguaccuggagua

SEQ ID NO: 2377481 - RNA, 19 nt, Homo sapiens
  misc_RNA (1)...(19): siRNA sense strand
gaagaguuaucaagaacau

SEQ ID NO: 2377482 - RNA, 19 nt, Homo sapiens
  misc_RNA (1)...(19): siRNA sense strand
gaacucagccgcagugcaa

SEQ ID NO: 2377483 - RNA, 19 nt, Homo sapiens
  misc_RNA (1)...(19): siRNA sense strand
gagaagaguuaucaagaac

SEQ ID NO: 2377484 - RNA, 19 nt, Homo sapiens
  misc_RNA (1)...(19): siRNA sense strand
cuuggaagcagauggacaa

SEQ ID NO: 2377485 - RNA, 19 nt, Homo sapiens
  misc_RNA (1)...(19): siRNA sense strand
aagaagugaaggcgggaau

SEQ ID NO: 2377486 - RNA, 19 nt, Homo sapiens
  misc_RNA (1)...(19): siRNA sense strand
gagaagacccucacuagua

SEQ ID NO: 2377487 - RNA, 19 nt, Homo sapiens
  misc_RNA (1)...(19): siRNA sense strand
caggaggcaucaaggucaa

SEQ ID NO: 2377488 - RNA, 19 nt, Homo sapiens
  misc_RNA (1)...(19): siRNA sense strand
uugagaaacuacaagauga

SEQ ID NO: 2377489 - RNA, 19 nt, Homo sapiens
  misc_RNA (1)...(19): siRNA sense strand
gaagagaaagagaagaguu

SEQ ID NO: 2377490 - RNA, 19 nt, Homo sapiens
  misc_RNA (1)...(19): siRNA sense strand
aucaagaacaugugaaaca

SEQ ID NO: 2377491 - RNA, 19 nt, Homo sapiens
  misc_RNA (1)...(19): siRNA sense strand
gagauguaaagaaggguga

SEQ ID NO: 2377492 - RNA, 19 nt, Homo sapiens
  misc_RNA (1)...(19): siRNA sense strand
cgaugcaauucuacagaca

SEQ ID NO: 2377493 - RNA, 19 nt, Homo sapiens
  misc_RNA (1)...(19): siRNA sense strand
acacugagggccugggaga

SEQ ID NO: 2377494 - RNA, 19 nt, Homo sapiens
  misc_RNA (1)...(19): siRNA sense strand
ccaucaaccagcaggcuau

SEQ ID NO: 2377495 - RNA, 19 nt, Homo sapiens
  misc_RNA (1)...(19): siRNA sense strand
augcaauucuacagacaga

SEQ ID NO: 2377496 - RNA, 19 nt, Homo sapiens
  misc_RNA (1)...(19): siRNA sense strand
gagaaagagaagaguuauc

SEQ ID NO: 2377497 - RNA, 19 nt, Homo sapiens
  misc_RNA (1)...(19): siRNA sense strand
cugugguggugguggcaau

SEQ ID NO: 2377498 - RNA, 19 nt, Homo sapiens
  misc_RNA (1)...(19): siRNA sense strand
ggucaaugggccuugucua

SEQ ID NO: 2377499 - RNA, 19 nt, Homo sapiens
  misc_RNA (1)...(19): siRNA sense strand
cagcuuuacuucaggucau

SEQ ID NO: 2377500 - RNA, 19 nt, Homo sapiens
  misc_RNA (1)...(19): siRNA sense strand
ccaaggagucugugaccga

SEQ ID NO: 2377501 - RNA, 19 nt, Homo sapiens
  misc_RNA (1)...(19): siRNA sense strand
gcacaggguuagugagagg

SEQ ID NO: 2377502 - RNA, 19 nt, Homo sapiens
  misc_RNA (1)...(19): siRNA sense strand
cugaagucuauaugaagaa

SEQ ID NO: 2377503 - RNA, 19 nt, Homo sapiens
  misc_RNA (1)...(19): siRNA sense strand
ugauggaagagaaagagaa

SEQ ID NO: 2377504 - RNA, 19 nt, Homo sapiens
  misc_RNA (1)...(19): siRNA sense strand
uggaagagcaagagaagac

SEQ ID NO: 2377505 - RNA, 19 nt, Homo sapiens
  misc_RNA (1)...(19): siRNA sense strand
gagagaugccaaggugaaa

SEQ ID NO: 2377506 - RNA, 19 nt, Homo sapiens
  misc_RNA (1)...(19): siRNA sense strand
cugcacaggguuagugaga

SEQ ID NO: 2377507 - RNA, 19 nt, Homo sapiens
  misc_RNA (1)...(19): siRNA sense strand
guggaggaaaugcaaauaa

SEQ ID NO: 2377508 - RNA, 19 nt, Homo sapiens
  misc_RNA (1)...(19): siRNA sense strand
agaaacuacaagaugaaga

SEQ ID NO: 2377509 - RNA, 19 nt, Homo sapiens
  misc_RNA (1)...(19): siRNA sense strand
gaaagagaagaguuaucaa

SEQ ID NO: 2377510 - RNA, 19 nt, Homo sapiens
  misc_RNA (1)...(19): siRNA sense strand
caagcuagcugggaagaau

SEQ ID NO: 2377511 - RNA, 19 nt, Homo sapiens
  misc_RNA (1)...(19): siRNA sense strand
cuuucaaggauguggacca

SEQ ID NO: 2377512 - RNA, 19 nt, Homo sapiens
  misc_RNA (1)...(19): siRNA sense strand
cugcacaggcuucagcaaa

SEQ ID NO: 2377513 - RNA, 19 nt, Homo sapiens
  misc_RNA (1)...(19): siRNA sense strand
agcagaugauggaagagaa

SEQ ID NO: 2377514 - RNA, 19 nt, Homo sapiens
  misc_RNA (1)...(19): siRNA sense strand
acugaagucuauaugaaga

SEQ ID NO: 2377515 - RNA, 19 nt, Homo sapiens
  misc_RNA (1)...(19): siRNA sense strand
agauugaaguggaaugugu

SEQ ID NO: 2377516 - RNA, 19 nt, Homo sapiens
  misc_RNA (1)...(19): siRNA sense strand
gaggaaaugcaaauaaagu

SEQ ID NO: 2377517 - RNA, 19 nt, Homo sapiens
  misc_RNA (1)...(19): siRNA sense strand
gagcaagagaagacccuca

SEQ ID NO: 2377518 - RNA, 19 nt, Homo sapiens
  misc_RNA (1)...(19): siRNA sense strand
acuaaaggagagaugccaa

SEQ ID NO: 2377519 - RNA, 19 nt, Homo sapiens
  misc_RNA (1)...(19): siRNA sense strand
cuacagaagacccugaaaa

SEQ ID NO: 2377520 - RNA, 19 nt, Homo sapiens
  misc_RNA (1)...(19): siRNA sense strand
gagaaugagaaugaggauu

SEQ ID NO: 2377521 - RNA, 19 nt, Homo sapiens
  misc_RNA (1)...(19): siRNA sense strand
uaaacagaaucaagaagca

SEQ ID NO: 2377522 - RNA, 19 nt, Homo sapiens
  misc_RNA (1)...(19): siRNA sense strand
cagacauacuugaaaucca

SEQ ID NO: 2377523 - RNA, 19 nt, Homo sapiens
  misc_RNA (1)...(19): siRNA sense strand
ugguggaggaaaugcaaau

SEQ ID NO: 2377524 - RNA, 19 nt, Homo sapiens
  misc_RNA (1)...(19): siRNA sense strand
aagcuagcugggaagaaua

SEQ ID NO: 2377525 - RNA, 19 nt, Homo sapiens
  misc_RNA (1)...(19): siRNA sense strand
cugggaagaauaagggcuu

SEQ ID NO: 2377526 - RNA, 19 nt, Homo sapiens
  misc_RNA (1)...(19): siRNA sense strand
gcagcacucucguguacaa

SEQ ID NO: 2377527 - RNA, 19 nt, Homo sapiens
  misc_RNA (1)...(19): siRNA sense strand
acuuggaagcagauggaca

SEQ ID NO: 2377528 - RNA, 19 nt, Homo sapiens
  misc_RNA (1)...(19): siRNA sense strand
ucgcauaagcuaaagaucu

SEQ ID NO: 2377529 - RNA, 19 nt, Homo sapiens
  misc_RNA (1)...(19): siRNA sense strand
gaacaagcuagcugggaag

SEQ ID NO: 2377530 - RNA, 19 nt, Homo sapiens
  misc_RNA (1)...(19): siRNA sense strand
guguacaauagcaugggaa

SEQ ID NO: 2377531 - RNA, 19 nt, Homo sapiens
  misc_RNA (1)...(19): siRNA sense strand
cucuagaagaagaagugaa

SEQ ID NO: 2377532 - RNA, 19 nt, Homo sapiens
  misc_RNA (1)...(19): siRNA sense strand
ugaaguggaauguguaaaa

SEQ ID NO: 2377533 - RNA, 19 nt, Homo sapiens
  misc_RNA (1)...(19): siRNA sense strand
uggaagagaaagagaagag

SEQ ID NO: 2377534 - RNA, 19 nt, Homo sapiens
  misc_RNA (1)...(19): siRNA sense strand
ugagaacacuaauggggaa

SEQ ID NO: 2377535 - RNA, 19 nt, Homo sapiens
  misc_RNA (1)...(19): siRNA sense strand
aacaauugacugagaagau

SEQ ID NO: 2377536 - RNA, 19 nt, Homo sapiens
  misc_RNA (1)...(19): siRNA sense strand
cuacaagaccuggagaaaa

SEQ ID NO: 2377537 - RNA, 19 nt, Homo sapiens
  misc_RNA (1)...(19): siRNA sense strand
agaagacccucacuaguaa

SEQ ID NO: 2377538 - RNA, 19 nt, Homo sapiens
  misc_RNA (1)...(19): siRNA sense strand
ccaacuucaaaaugagaua

SEQ ID NO: 2377539 - RNA, 19 nt, Homo sapiens
  misc_RNA (1)...(19): siRNA sense strand
uaaagaagggugacaacca

SEQ ID NO: 2377540 - RNA, 19 nt, Homo sapiens
  misc_RNA (1)...(19): siRNA sense strand
augugaaacaauugacuga

SEQ ID NO: 2377541 - RNA, 19 nt, Homo sapiens
  misc_RNA (1)...(19): siRNA sense strand
gagaagacuugccgggaaa

SEQ ID NO: 2377542 - RNA, 19 nt, Homo sapiens
  misc_RNA (1)...(19): siRNA sense strand
ggagaagacuugccgggaa

SEQ ID NO: 2377543 - RNA, 19 nt, Homo sapiens
  misc_RNA (1)...(19): siRNA sense strand
ccaucgaccucguguacaa

SEQ ID NO: 2377544 - RNA, 19 nt, Homo sapiens
  misc_RNA (1)...(19): siRNA sense strand
gagaagaagcggcuggaca

SEQ ID NO: 2377545 - RNA, 19 nt, Homo sapiens
  misc_RNA (1)...(19): siRNA sense strand
ccaccaaguuccagcagau

SEQ ID NO: 2377546 - RNA, 19 nt, Homo sapiens
  misc_RNA (1)...(19): siRNA sense strand
ccacgaacuacgacaagaa

SEQ ID NO: 2377547 - RNA, 19 nt, Homo sapiens
  misc_RNA (1)...(19): siRNA sense strand
gggagcagcuacagacuca

SEQ ID NO: 2377548 - RNA, 19 nt, Homo sapiens
  misc_RNA (1)...(19): siRNA sense strand
gggaaaccgagguaggaga

SEQ ID NO: 2377549 - RNA, 19 nt, Homo sapiens
  misc_RNA (1)...(19): siRNA sense strand
aagccaaagggcaggagaa

SEQ ID NO: 2377550 - RNA, 19 nt, Homo sapiens
  misc_RNA (1)...(19): siRNA sense strand
agaagaagcggcuggacau

SEQ ID NO: 2377551 - RNA, 19 nt, Homo sapiens
  misc_RNA (1)...(19): siRNA sense strand
ggcgcuaccuggagaccaa

SEQ ID NO: 2377552 - RNA, 19 nt, Homo sapiens
  misc_RNA (1)...(19): siRNA sense strand
agguggacuuuguggacau

SEQ ID NO: 2377553 - RNA, 19 nt, Homo sapiens
  misc_RNA (1)...(19): siRNA sense strand
ucacggagaucaaggagca

SEQ ID NO: 2377554 - RNA, 19 nt, Homo sapiens
  misc_RNA (1)...(19): siRNA sense strand
ccaccaaggagcaguuuca

SEQ ID NO: 2377555 - RNA, 19 nt, Homo sapiens
  misc_RNA (1)...(19): siRNA sense strand
ccaaagggcaggagaagac

SEQ ID NO: 2377556 - RNA, 19 nt, Homo sapiens
  misc_RNA (1)...(19): siRNA sense strand
ccgcaacggccuggacaaa

SEQ ID NO: 2377557 - RNA, 19 nt, Homo sapiens
  misc_RNA (1)...(19): siRNA sense strand
gcuggacauccguggcaaa

SEQ ID NO: 2377558 - RNA, 19 nt, Homo sapiens
  misc_RNA (1)...(19): siRNA sense strand
aggccaacgcguacaagua

SEQ ID NO: 2377559 - RNA, 19 nt, Homo sapiens
  misc_RNA (1)...(19): siRNA sense strand
ggacauccguggcaaacuu

SEQ ID NO: 2377560 - RNA, 19 nt, Homo sapiens
  misc_RNA (1)...(19): siRNA sense strand
gcgacuaccuggagacgcu

SEQ ID NO: 2377561 - RNA, 19 nt, Homo sapiens
  misc_RNA (1)...(19): siRNA sense strand
cgagaugcuccuugggcca

SEQ ID NO: 2377562 - RNA, 19 nt, Homo sapiens
  misc_RNA (1)...(19): siRNA sense strand
gcacaaggccaacgcguac

SEQ ID NO: 2377563 - RNA, 19 nt, Homo sapiens
  misc_RNA (1)...(19): siRNA sense strand
ugccgaagcacaaggccaa

SEQ ID NO: 2377564 - RNA, 19 nt, Homo sapiens
  misc_RNA (1)...(19): siRNA sense strand
gaguggacaucgucaauua

SEQ ID NO: 2377565 - RNA, 19 nt, Homo sapiens
  misc_RNA (1)...(19): siRNA sense strand
ccaaaacgcacgagccaaa

SEQ ID NO: 2377566 - RNA, 19 nt, Homo sapiens
  misc_RNA (1)...(19): siRNA sense strand
gcaagaucucggacaggua

SEQ ID NO: 2377567 - RNA, 19 nt, Homo sapiens
  misc_RNA (1)...(19): siRNA sense strand
ucacaaacuaccuuaacaa

SEQ ID NO: 2377568 - RNA, 19 nt, Homo sapiens
  misc_RNA (1)...(19): siRNA sense strand
ccucuaacauggacagcca

SEQ ID NO: 2377569 - RNA, 19 nt, Homo sapiens
  misc_RNA (1)...(19): siRNA sense strand
gaggauuacuacagaaggu

SEQ ID NO: 2377570 - RNA, 19 nt, Homo sapiens
  misc_RNA (1)...(19): siRNA sense strand
gagccaaauucagaaggaa

SEQ ID NO: 2377571 - RNA, 19 nt, Homo sapiens
  misc_RNA (1)...(19): siRNA sense strand
gccaaggacgguagcauuu

SEQ ID NO: 2377572 - RNA, 19 nt, Homo sapiens
  misc_RNA (1)...(19): siRNA sense strand
agaaugaggcagaccacuu

SEQ ID NO: 2377573 - RNA, 19 nt, Homo sapiens
  misc_RNA (1)...(19): siRNA sense strand
cgcagaagaccaagcgcau

SEQ ID NO: 2377574 - RNA, 19 nt, Homo sapiens
  misc_RNA (1)...(19): siRNA sense strand
uuuacugcaaggaggauua

SEQ ID NO: 2377575 - RNA, 19 nt, Homo sapiens
  misc_RNA (1)...(19): siRNA sense strand
gguacuaucugcuggcugu

SEQ ID NO: 2377576 - RNA, 19 nt, Homo sapiens
  misc_RNA (1)...(19): siRNA sense strand
ccugaagugcugugaaugu

SEQ ID NO: 2377577 - RNA, 19 nt, Homo sapiens
  misc_RNA (1)...(19): siRNA sense strand
cuuuaacagaccugaccaa

SEQ ID NO: 2377578 - RNA, 19 nt, Homo sapiens
  misc_RNA (1)...(19): siRNA sense strand
ugccugaagugcugugaau

SEQ ID NO: 2377579 - RNA, 19 nt, Homo sapiens
  misc_RNA (1)...(19): siRNA sense strand
gcauuuacugcaaggagga

SEQ ID NO: 2377580 - RNA, 19 nt, Homo sapiens
  misc_RNA (1)...(19): siRNA sense strand
ccaaagauguaccgaagua

SEQ ID NO: 2377581 - RNA, 19 nt, Homo sapiens
  misc_RNA (1)...(19): siRNA sense strand
gaagauauguugugggauc

SEQ ID NO: 2377582 - RNA, 19 nt, Homo sapiens
  misc_RNA (1)...(19): siRNA sense strand
guaaacugcagaaggaauu

SEQ ID NO: 2377583 - RNA, 19 nt, Homo sapiens
  misc_RNA (1)...(19): siRNA sense strand
gugaaaagauggaagaagu

SEQ ID NO: 2377584 - RNA, 19 nt, Homo sapiens
  misc_RNA (1)...(19): siRNA sense strand
cugagaagccagaggagca

SEQ ID NO: 2377585 - RNA, 19 nt, Homo sapiens
  misc_RNA (1)...(19): siRNA sense strand
uggaaaagacagaagauau

SEQ ID NO: 2377586 - RNA, 19 nt, Homo sapiens
  misc_RNA (1)...(19): siRNA sense strand
gaaaccaaagaaagugaaa

SEQ ID NO: 2377587 - RNA, 19 nt, Homo sapiens
  misc_RNA (1)...(19): siRNA sense strand
cauugaaaccaaagaaagu

SEQ ID NO: 2377588 - RNA, 19 nt, Homo sapiens
  misc_RNA (1)...(19): siRNA sense strand
cagaagauauguuguggga

SEQ ID NO: 2377589 - RNA, 19 nt, Homo sapiens
  misc_RNA (1)...(19): siRNA sense strand
aguaaacugcagaaggaau

SEQ ID NO: 2377590 - RNA, 19 nt, Homo sapiens
  misc_RNA (1)...(19): siRNA sense strand
agaaggaauuuaaacguca

SEQ ID NO: 2377591 - RNA, 19 nt, Homo sapiens
  misc_RNA (1)...(19): siRNA sense strand
aagacuacauugaaaccaa

SEQ ID NO: 2377592 - RNA, 19 nt, Homo sapiens
  misc_RNA (1)...(19): siRNA sense strand
aaagauguaccgaaguaua

SEQ ID NO: 2377593 - RNA, 19 nt, Homo sapiens
  misc_RNA (1)...(19): siRNA sense strand
gacaguaaacgcuaugaaa

SEQ ID NO: 2377594 - RNA, 19 nt, Homo sapiens
  misc_RNA (1)...(19): siRNA sense strand
aaacuggaaucauguggua

SEQ ID NO: 2377595 - RNA, 19 nt, Homo sapiens
  misc_RNA (1)...(19): siRNA sense strand
ucagaugacggcucagaua

SEQ ID NO: 2377596 - RNA, 19 nt, Homo sapiens
  misc_RNA (1)...(19): siRNA sense strand
gcucaaucuccuuguuaca

SEQ ID NO: 2377597 - RNA, 19 nt, Homo sapiens
  misc_RNA (1)...(19): siRNA sense strand
gaucucacuuacuggaaaa

SEQ ID NO: 2377598 - RNA, 19 nt, Homo sapiens
  misc_RNA (1)...(19): siRNA sense strand
auagagggcugcuguauuu

SEQ ID NO: 2377599 - RNA, 19 nt, Homo sapiens
  misc_RNA (1)...(19): siRNA sense strand
agacuacauugaaaccaaa

SEQ ID NO: 2377600 - RNA, 19 nt, Homo sapiens
  misc_RNA (1)...(19): siRNA sense strand
aaagcaaccagaucaguaa

SEQ ID NO: 2377601 - RNA, 19 nt, Homo sapiens
  misc_RNA (1)...(19): siRNA sense strand
acaguaaacgcuaugaaaa

SEQ ID NO: 2377602 - RNA, 19 nt, Homo sapiens
  misc_RNA (1)...(19): siRNA sense strand
ggaaaagacagaagauaug

SEQ ID NO: 2377603 - RNA, 19 nt, Homo sapiens
  misc_RNA (1)...(19): siRNA sense strand
ugcuguauuugcagagcua

SEQ ID NO: 2377604 - RNA, 19 nt, Homo sapiens
  misc_RNA (1)...(19): siRNA sense strand
gcaugagacucguucagga

SEQ ID NO: 2377605 - RNA, 19 nt, Homo sapiens
  misc_RNA (1)...(19): siRNA sense strand
cggcucagauacagagaug

SEQ ID NO: 2377606 - RNA, 19 nt, Homo sapiens
  misc_RNA (1)...(19): siRNA sense strand
agagauggcuucugguucu

SEQ ID NO: 2377607 - RNA, 19 nt, Homo sapiens
  misc_RNA (1)...(19): siRNA sense strand
guucaggagacaucugcaa

SEQ ID NO: 2377608 - RNA, 19 nt, Homo sapiens
  misc_RNA (1)...(19): siRNA sense strand
cuacauugaaaccaaagaa

SEQ ID NO: 2377609 - RNA, 19 nt, Homo sapiens
  misc_RNA (1)...(19): siRNA sense strand
ccgcugaugcugaggaaua

SEQ ID NO: 2377610 - RNA, 19 nt, Homo sapiens
  misc_RNA (1)...(19): siRNA sense strand
cagauguggcaaagaguaa

SEQ ID NO: 2377611 - RNA, 19 nt, Homo sapiens
  misc_RNA (1)...(19): siRNA sense strand
ccgcagaaccugagagucu

SEQ ID NO: 2377612 - RNA, 19 nt, Homo sapiens
  misc_RNA (1)...(19): siRNA sense strand
auacagaggucuucaguga

SEQ ID NO: 2377613 - RNA, 19 nt, Homo sapiens
  misc_RNA (1)...(19): siRNA sense strand
gggauacgcuguccagaaa

SEQ ID NO: 2377614 - RNA, 19 nt, Homo sapiens
  misc_RNA (1)...(19): siRNA sense strand
ccaaauggucugugggauc

SEQ ID NO: 2377615 - RNA, 19 nt, Homo sapiens
  misc_RNA (1)...(19): siRNA sense strand
ugucaaagcaguccauuua

SEQ ID NO: 2377616 - RNA, 19 nt, Homo sapiens
  misc_RNA (1)...(19): siRNA sense strand
ccauuuacaccgaggacga

SEQ ID NO: 2377617 - RNA, 19 nt, Homo sapiens
  misc_RNA (1)...(19): siRNA sense strand
agauuugacugaagaacga

SEQ ID NO: 2377618 - RNA, 19 nt, Homo sapiens
  misc_RNA (1)...(19): siRNA sense strand
cccugagagcccugagaua

SEQ ID NO: 2377619 - RNA, 19 nt, Homo sapiens
  misc_RNA (1)...(19): siRNA sense strand
caacggugcuugagcucau

SEQ ID NO: 2377620 - RNA, 19 nt, Homo sapiens
  misc_RNA (1)...(19): siRNA sense strand
cugaagaacgacuuggaga

SEQ ID NO: 2377621 - RNA, 19 nt, Homo sapiens
  misc_RNA (1)...(19): siRNA sense strand
gaggaauacuuuggcgaga

SEQ ID NO: 2377622 - RNA, 19 nt, Homo sapiens
  misc_RNA (1)...(19): siRNA sense strand
agauaguguccguggagga

SEQ ID NO: 2377623 - RNA, 19 nt, Homo sapiens
  misc_RNA (1)...(19): siRNA sense strand
aggaauacuuuggcgagaa

SEQ ID NO: 2377624 - RNA, 19 nt, Homo sapiens
  misc_RNA (1)...(19): siRNA sense strand
acggaagacccucggauuu

SEQ ID NO: 2377625 - RNA, 19 nt, Homo sapiens
  misc_RNA (1)...(19): siRNA sense strand
ccagacacguugagguuuu

SEQ ID NO: 2377626 - RNA, 19 nt, Homo sapiens
  misc_RNA (1)...(19): siRNA sense strand
ucaagggccacaagcguua

SEQ ID NO: 2377627 - RNA, 19 nt, Homo sapiens
  misc_RNA (1)...(19): siRNA sense strand
gugucaaagcaguccauuu

SEQ ID NO: 2377628 - RNA, 19 nt, Homo sapiens
  misc_RNA (1)...(19): siRNA sense strand
acagaggucuucagugaca

SEQ ID NO: 2377629 - RNA, 19 nt, Homo sapiens
  misc_RNA (1)...(19): siRNA sense strand
agagcgaacuuccgcagaa

SEQ ID NO: 2377630 - RNA, 19 nt, Homo sapiens
  misc_RNA (1)...(19): siRNA sense strand
gaacacaccuugagcuccu

SEQ ID NO: 2377631 - RNA, 19 nt, Homo sapiens
  misc_RNA (1)...(19): siRNA sense strand
agacagagucggugggaga

SEQ ID NO: 2377632 - RNA, 19 nt, Homo sapiens
  misc_RNA (1)...(19): siRNA sense strand
gcucaaaggaucccaguua

SEQ ID NO: 2377633 - RNA, 19 nt, Homo sapiens
  misc_RNA (1)...(19): siRNA sense strand
gcaaucaaguggagacaga

SEQ ID NO: 2377634 - RNA, 19 nt, Homo sapiens
  misc_RNA (1)...(19): siRNA sense strand
agaucaagcuaccuggaaa

SEQ ID NO: 2377635 - RNA, 19 nt, Homo sapiens
  misc_RNA (1)...(19): siRNA sense strand
ccucaugacucacaacaaa

SEQ ID NO: 2377636 - RNA, 19 nt, Homo sapiens
  misc_RNA (1)...(19): siRNA sense strand
ggagggauccaaagaggaa

SEQ ID NO: 2377637 - RNA, 19 nt, Homo sapiens
  misc_RNA (1)...(19): siRNA sense strand
cggugggagacgugacuua

SEQ ID NO: 2377638 - RNA, 19 nt, Homo sapiens
  misc_RNA (1)...(19): siRNA sense strand
ggaagggaauccaggcuca

SEQ ID NO: 2377639 - RNA, 19 nt, Homo sapiens
  misc_RNA (1)...(19): siRNA sense strand
gcaaagaggccgugaccac

SEQ ID NO: 2377640 - RNA, 19 nt, Homo sapiens
  misc_RNA (1)...(19): siRNA sense strand
uggaaaaccaggaagggaa

SEQ ID NO: 2377641 - RNA, 19 nt, Homo sapiens
  misc_RNA (1)...(19): siRNA sense strand
cagacaacaugcaggccau

SEQ ID NO: 2377642 - RNA, 19 nt, Homo sapiens
  misc_RNA (1)...(19): siRNA sense strand
ucacaaugggccagggagu

SEQ ID NO: 2377643 - RNA, 19 nt, Homo sapiens
  misc_RNA (1)...(19): siRNA sense strand
cccaggagccgaagaccaa

SEQ ID NO: 2377644 - RNA, 19 nt, Homo sapiens
  misc_RNA (1)...(19): siRNA sense strand
ggaaaaccaggaagggaau

SEQ ID NO: 2377645 - RNA, 19 nt, Homo sapiens
  misc_RNA (1)...(19): siRNA sense strand
ggaacuauucuuugugguu

SEQ ID NO: 2377646 - RNA, 19 nt, Homo sapiens
  misc_RNA (1)...(19): siRNA sense strand
ccugguagcccaaguccaa

SEQ ID NO: 2377647 - RNA, 19 nt, Homo sapiens
  misc_RNA (1)...(19): siRNA sense strand
agccgaagaccaagaauca

SEQ ID NO: 2377648 - RNA, 19 nt, Homo sapiens
  misc_RNA (1)...(19): siRNA sense strand
gggacugcuaccugggaga

SEQ ID NO: 2377649 - RNA, 19 nt, Homo sapiens
  misc_RNA (1)...(19): siRNA sense strand
cuuugugguuggagggauc

SEQ ID NO: 2377650 - RNA, 19 nt, Homo sapiens
  misc_RNA (1)...(19): siRNA sense strand
aggaagaggaggaagagga

SEQ ID NO: 2377651 - RNA, 19 nt, Homo sapiens
  misc_RNA (1)...(19): siRNA sense strand
gaggagggccagaaggaca

SEQ ID NO: 2377652 - RNA, 19 nt, Homo sapiens
  misc_RNA (1)...(19): siRNA sense strand
aggaggaagaggaggagga

SEQ ID NO: 2377653 - RNA, 19 nt, Homo sapiens
  misc_RNA (1)...(19): siRNA sense strand
ccacgaauccuccaugaaa

SEQ ID NO: 2377654 - RNA, 19 nt, Homo sapiens
  misc_RNA (1)...(19): siRNA sense strand
aagaggaggaagaggagga

SEQ ID NO: 2377655 - RNA, 19 nt, Homo sapiens
  misc_RNA (1)...(19): siRNA sense strand
aagaagagcugccggugca

SEQ ID NO: 2377656 - RNA, 19 nt, Homo sapiens
  misc_RNA (1)...(19): siRNA sense strand
aggagggccagaaggacaa

SEQ ID NO: 2377657 - RNA, 19 nt, Homo sapiens
  misc_RNA (1)...(19): siRNA sense strand
aggaggagggccagaagga

SEQ ID NO: 2377658 - RNA, 19 nt, Homo sapiens
  misc_RNA (1)...(19): siRNA sense strand
gaggagagccagagaauua

SEQ ID NO: 2377659 - RNA, 19 nt, Homo sapiens
  misc_RNA (1)...(19): siRNA sense strand
acucaaacaagcagagaaa

SEQ ID NO: 2377660 - RNA, 19 nt, Homo sapiens
  misc_RNA (1)...(19): siRNA sense strand
aaacauggcaacagaaaua

SEQ ID NO: 2377661 - RNA, 19 nt, Homo sapiens
  misc_RNA (1)...(19): siRNA sense strand
gguaagaguucaacaauca

SEQ ID NO: 2377662 - RNA, 19 nt, Homo sapiens
  misc_RNA (1)...(19): siRNA sense strand
agaccaaacuggaaccaaa

SEQ ID NO: 2377663 - RNA, 19 nt, Homo sapiens
  misc_RNA (1)...(19): siRNA sense strand
ugaaagaaauggaugccaa

SEQ ID NO: 2377664 - RNA, 19 nt, Homo sapiens
  misc_RNA (1)...(19): siRNA sense strand
gaacagaguuuguagcuga

SEQ ID NO: 2377665 - RNA, 19 nt, Homo sapiens
  misc_RNA (1)...(19): siRNA sense strand
aaacagagaugauagacaa

SEQ ID NO: 2377666 - RNA, 19 nt, Homo sapiens
  misc_RNA (1)...(19): siRNA sense strand
gcagcuaggcagaaauaaa

SEQ ID NO: 2377667 - RNA, 19 nt, Homo sapiens
  misc_RNA (1)...(19): siRNA sense strand
ucaaacaagcagagaaaga

SEQ ID NO: 2377668 - RNA, 19 nt, Homo sapiens
  misc_RNA (1)...(19): siRNA sense strand
gaacagaagcugauauuga

SEQ ID NO: 2377669 - RNA, 19 nt, Homo sapiens
  misc_RNA (1)...(19): siRNA sense strand
aagaagaugugaagguuau

SEQ ID NO: 2377670 - RNA, 19 nt, Homo sapiens
  misc_RNA (1)...(19): siRNA sense strand
gaaaugacuugcagcggaa

SEQ ID NO: 2377671 - RNA, 19 nt, Homo sapiens
  misc_RNA (1)...(19): siRNA sense strand
aaacaagcagagaaagaua

SEQ ID NO: 2377672 - RNA, 19 nt, Homo sapiens
  misc_RNA (1)...(19): siRNA sense strand
aggaagaggcaaacagaga

SEQ ID NO: 2377673 - RNA, 19 nt, Homo sapiens
  misc_RNA (1)...(19): siRNA sense strand
guccagaggaggaggaaga

SEQ ID NO: 2377674 - RNA, 19 nt, Homo sapiens
  misc_RNA (1)...(19): siRNA sense strand
cagaagaggcagauacaca

SEQ ID NO: 2377675 - RNA, 19 nt, Homo sapiens
  misc_RNA (1)...(19): siRNA sense strand
caucaugggcaacaagaaa

SEQ ID NO: 2377676 - RNA, 19 nt, Homo sapiens
  misc_RNA (1)...(19): siRNA sense strand
gugaggauuuggaauguua

SEQ ID NO: 2377677 - RNA, 19 nt, Homo sapiens
  misc_RNA (1)...(19): siRNA sense strand
gaugauagacaaagcaaca

SEQ ID NO: 2377678 - RNA, 19 nt, Homo sapiens
  misc_RNA (1)...(19): siRNA sense strand
ugaagaugacagugaguau

SEQ ID NO: 2377679 - RNA, 19 nt, Homo sapiens
  misc_RNA (1)...(19): siRNA sense strand
caagagaaugugagggcuu

SEQ ID NO: 2377680 - RNA, 19 nt, Homo sapiens
  misc_RNA (1)...(19): siRNA sense strand
aagaaauggaugccaauaa

SEQ ID NO: 2377681 - RNA, 19 nt, Homo sapiens
  misc_RNA (1)...(19): siRNA sense strand
aaagaagaugugaagguua

SEQ ID NO: 2377682 - RNA, 19 nt, Homo sapiens
  misc_RNA (1)...(19): siRNA sense strand
cggaugaagaugacaguga

SEQ ID NO: 2377683 - RNA, 19 nt, Homo sapiens
  misc_RNA (1)...(19): siRNA sense strand
cuggagagucauugagaga

SEQ ID NO: 2377684 - RNA, 19 nt, Homo sapiens
  misc_RNA (1)...(19): siRNA sense strand
ccacaacggaugaagauga

SEQ ID NO: 2377685 - RNA, 19 nt, Homo sapiens
  misc_RNA (1)...(19): siRNA sense strand
aaagcaaagcagauugaaa

SEQ ID NO: 2377686 - RNA, 19 nt, Homo sapiens
  misc_RNA (1)...(19): siRNA sense strand
uuaagaagcuccaugaaga

SEQ ID NO: 2377687 - RNA, 19 nt, Homo sapiens
  misc_RNA (1)...(19): siRNA sense strand
ggagagucauugagagaag

SEQ ID NO: 2377688 - RNA, 19 nt, Homo sapiens
  misc_RNA (1)...(19): siRNA sense strand
aagcaaagcagauugaaaa

SEQ ID NO: 2377689 - RNA, 19 nt, Homo sapiens
  misc_RNA (1)...(19): siRNA sense strand
ccaaaggaguccaggcugu

SEQ ID NO: 2377690 - RNA, 19 nt, Homo sapiens
  misc_RNA (1)...(19): siRNA sense strand
gcacacaagugaacucaau

SEQ ID NO: 2377691 - RNA, 19 nt, Homo sapiens
  misc_RNA (1)...(19): siRNA sense strand
ccagaauauuccaagacau

SEQ ID NO: 2377692 - RNA, 19 nt, Homo sapiens
  misc_RNA (1)...(19): siRNA sense strand
ggcuagaagaggaacagaa

SEQ ID NO: 2377693 - RNA, 19 nt, Homo sapiens
  misc_RNA (1)...(19): siRNA sense strand
cauaacgccuagagaggau

SEQ ID NO: 2377694 - RNA, 19 nt, Homo sapiens
  misc_RNA (1)...(19): siRNA sense strand
gaaagaaauggaugccaau

SEQ ID NO: 2377695 - RNA, 19 nt, Homo sapiens
  misc_RNA (1)...(19): siRNA sense strand
caaacagagaugauagaca

SEQ ID NO: 2377696 - RNA, 19 nt, Homo sapiens
  misc_RNA (1)...(19): siRNA sense strand
caaaaugaacagugaugaa

SEQ ID NO: 2377697 - RNA, 19 nt, Homo sapiens
  misc_RNA (1)...(19): siRNA sense strand
ucuacaagcaccuggauau

SEQ ID NO: 2377698 - RNA, 19 nt, Homo sapiens
  misc_RNA (1)...(19): siRNA sense strand
uggaauguuaugugaaaga

SEQ ID NO: 2377699 - RNA, 19 nt, Homo sapiens
  misc_RNA (1)...(19): siRNA sense strand
gaaauuucccacagugaau

SEQ ID NO: 2377700 - RNA, 19 nt, Homo sapiens
  misc_RNA (1)...(19): siRNA sense strand
gaauggugacucugaggaa

SEQ ID NO: 2377701 - RNA, 19 nt, Homo sapiens
  misc_RNA (1)...(19): siRNA sense strand
caauugaucagaugagaga

SEQ ID NO: 2377702 - RNA, 19 nt, Homo sapiens
  misc_RNA (1)...(19): siRNA sense strand
cauugagagaagugauauu

SEQ ID NO: 2377703 - RNA, 19 nt, Homo sapiens
  misc_RNA (1)...(19): siRNA sense strand
gggagaaaggugaaagaug

SEQ ID NO: 2377704 - RNA, 19 nt, Homo sapiens
  misc_RNA (1)...(19): siRNA sense strand
gaagagauccuguaacuuu

SEQ ID NO: 2377705 - RNA, 19 nt, Homo sapiens
  misc_RNA (1)...(19): siRNA sense strand
gcggggaagcccuggaaaa

SEQ ID NO: 2377706 - RNA, 19 nt, Homo sapiens
  misc_RNA (1)...(19): siRNA sense strand
agauaguagaugcucgaaa

SEQ ID NO: 2377707 - RNA, 19 nt, Homo sapiens
  misc_RNA (1)...(19): siRNA sense strand
uggaagagauccuguaacu

SEQ ID NO: 2377708 - RNA, 19 nt, Homo sapiens
  misc_RNA (1)...(19): siRNA sense strand
ucgaggagagccagagaau

SEQ ID NO: 2377709 - RNA, 19 nt, Homo sapiens
  misc_RNA (1)...(19): siRNA sense strand
cgggagugguguagugacu

SEQ ID NO: 2377710 - RNA, 19 nt, Homo sapiens
  misc_RNA (1)...(19): siRNA sense strand
aagcagagaaagauaacuu

SEQ ID NO: 2377711 - RNA, 19 nt, Homo sapiens
  misc_RNA (1)...(19): siRNA sense strand
aggaacagaagcugauauu

SEQ ID NO: 2377712 - RNA, 19 nt, Homo sapiens
  misc_RNA (1)...(19): siRNA sense strand
ggagcuacacacugggaga

SEQ ID NO: 2377713 - RNA, 19 nt, Homo sapiens
  misc_RNA (1)...(19): siRNA sense strand
gugaaagaugggcaacuua

SEQ ID NO: 2377714 - RNA, 19 nt, Homo sapiens
  misc_RNA (1)...(19): siRNA sense strand
gccaauaaggagaacguca

SEQ ID NO: 2377715 - RNA, 19 nt, Homo sapiens
  misc_RNA (1)...(19): siRNA sense strand
ccaauaaggagaacgucau

SEQ ID NO: 2377716 - RNA, 19 nt, Homo sapiens
  misc_RNA (1)...(19): siRNA sense strand
ggagaaaggugaaagaugg

SEQ ID NO: 2377717 - RNA, 19 nt, Homo sapiens
  misc_RNA (1)...(19): siRNA sense strand
ggugaaagaugggcaacuu

SEQ ID NO: 2377718 - RNA, 19 nt, Homo sapiens
  misc_RNA (1)...(19): siRNA sense strand
cagaggaggaggaagacga

SEQ ID NO: 2377719 - RNA, 19 nt, Homo sapiens
  misc_RNA (1)...(19): siRNA sense strand
gaagcuaccuauggcauua

SEQ ID NO: 2377720 - RNA, 19 nt, Homo sapiens
  misc_RNA (1)...(19): siRNA sense strand
gaacuggacuacugucuuu

SEQ ID NO: 2377721 - RNA, 19 nt, Homo sapiens
  misc_RNA (1)...(19): siRNA sense strand
uaagaagcuccaugaagaa

SEQ ID NO: 2377722 - RNA, 19 nt, Homo sapiens
  misc_RNA (1)...(19): siRNA sense strand
gucauugagagaagugaua

SEQ ID NO: 2377723 - RNA, 19 nt, Homo sapiens
  misc_RNA (1)...(19): siRNA sense strand
ugauauugugguccagaua

SEQ ID NO: 2377724 - RNA, 19 nt, Homo sapiens
  misc_RNA (1)...(19): siRNA sense strand
ggaaagcucuacugcagau

SEQ ID NO: 2377725 - RNA, 19 nt, Homo sapiens
  misc_RNA (1)...(19): siRNA sense strand
aggaguuacuggagcucuu

SEQ ID NO: 2377726 - RNA, 19 nt, Homo sapiens
  misc_RNA (1)...(19): siRNA sense strand
gagaugauagacaaagcaa

SEQ ID NO: 2377727 - RNA, 19 nt, Homo sapiens
  misc_RNA (1)...(19): siRNA sense strand
gcagacgugcucagaagaa

SEQ ID NO: 2377728 - RNA, 19 nt, Homo sapiens
  misc_RNA (1)...(19): siRNA sense strand
uguuuagaugugaggauuu

SEQ ID NO: 2377729 - RNA, 19 nt, Homo sapiens
  misc_RNA (1)...(19): siRNA sense strand
gaggaagacgacuggcaga

SEQ ID NO: 2377730 - RNA, 19 nt, Homo sapiens
  misc_RNA (1)...(19): siRNA sense strand
agaacaaaaugaacaguga

SEQ ID NO: 2377731 - RNA, 19 nt, Homo sapiens
  misc_RNA (1)...(19): siRNA sense strand
gaagaggaacagaagcuga

SEQ ID NO: 2377732 - RNA, 19 nt, Homo sapiens
  misc_RNA (1)...(19): siRNA sense strand
caagaaaguaucugugucu

SEQ ID NO: 2377733 - RNA, 19 nt, Homo sapiens
  misc_RNA (1)...(19): siRNA sense strand
ccacagugaauccgaacau

SEQ ID NO: 2377734 - RNA, 19 nt, Homo sapiens
  misc_RNA (1)...(19): siRNA sense strand
cuuccuugcuacugcagaa

SEQ ID NO: 2377735 - RNA, 19 nt, Homo sapiens
  misc_RNA (1)...(19): siRNA sense strand
ggcaaacagagaugauaga

SEQ ID NO: 2377736 - RNA, 19 nt, Homo sapiens
  misc_RNA (1)...(19): siRNA sense strand
ccacagaagaggcagauac

SEQ ID NO: 2377737 - RNA, 19 nt, Homo sapiens
  misc_RNA (1)...(19): siRNA sense strand
ggacuaugucagugguaag

SEQ ID NO: 2377738 - RNA, 19 nt, Homo sapiens
  misc_RNA (1)...(19): siRNA sense strand
gaagugauauuguggucca

SEQ ID NO: 2377739 - RNA, 19 nt, Homo sapiens
  misc_RNA (1)...(19): siRNA sense strand
agaagaggcagauacacaa

SEQ ID NO: 2377740 - RNA, 19 nt, Homo sapiens
  misc_RNA (1)...(19): siRNA sense strand
uguugacagcuuauggaua

SEQ ID NO: 2377741 - RNA, 19 nt, Homo sapiens
  misc_RNA (1)...(19): siRNA sense strand
gauauugacuccauuugaa

SEQ ID NO: 2377742 - RNA, 19 nt, Homo sapiens
  misc_RNA (1)...(19): siRNA sense strand
cagaauauuccaagacaug

SEQ ID NO: 2377743 - RNA, 19 nt, Homo sapiens
  misc_RNA (1)...(19): siRNA sense strand
gaauuaagaagcuccauga

SEQ ID NO: 2377744 - RNA, 19 nt, Homo sapiens
  misc_RNA (1)...(19): siRNA sense strand
gauaguagaugcucgaaac

SEQ ID NO: 2377745 - RNA, 19 nt, Homo sapiens
  misc_RNA (1)...(19): siRNA sense strand
cugggagaaaggugaaaga

SEQ ID NO: 2377746 - RNA, 19 nt, Homo sapiens
  misc_RNA (1)...(19): siRNA sense strand
cccuaauguugguaagagu

SEQ ID NO: 2377747 - RNA, 19 nt, Homo sapiens
  misc_RNA (1)...(19): siRNA sense strand
agaaaugacuugcagcgga

SEQ ID NO: 2377748 - RNA, 19 nt, Homo sapiens
  misc_RNA (1)...(19): siRNA sense strand
gggccauguacuucgaaaa

SEQ ID NO: 2377749 - RNA, 19 nt, Homo sapiens
  misc_RNA (1)...(19): siRNA sense strand
ccagauaguagaugcucga

SEQ ID NO: 2377750 - RNA, 19 nt, Homo sapiens
  misc_RNA (1)...(19): siRNA sense strand
aguagaugcucgaaaccca

SEQ ID NO: 2377751 - RNA, 19 nt, Homo sapiens
  misc_RNA (1)...(19): siRNA sense strand
cugaaauuucccacaguga

SEQ ID NO: 2377752 - RNA, 19 nt, Homo sapiens
  misc_RNA (1)...(19): siRNA sense strand
agaagacggucccaaggaa

SEQ ID NO: 2377753 - RNA, 19 nt, Homo sapiens
  misc_RNA (1)...(19): siRNA sense strand
ucacuaguuugccagaaua

SEQ ID NO: 2377754 - RNA, 19 nt, Homo sapiens
  misc_RNA (1)...(19): siRNA sense strand
gaauauuccaagacauguu

SEQ ID NO: 2377755 - RNA, 19 nt, Homo sapiens
  misc_RNA (1)...(19): siRNA sense strand
aaaugcagcuaggcagaaa

SEQ ID NO: 2377756 - RNA, 19 nt, Homo sapiens
  misc_RNA (1)...(19): siRNA sense strand
gugaagagauugaggguga

SEQ ID NO: 2377757 - RNA, 19 nt, Homo sapiens
  misc_RNA (1)...(19): siRNA sense strand
ccgaauaaaucuaaaggua

SEQ ID NO: 2377758 - RNA, 19 nt, Homo sapiens
  misc_RNA (1)...(19): siRNA sense strand
gaaaagaaauagaggagua

SEQ ID NO: 2377759 - RNA, 19 nt, Homo sapiens
  misc_RNA (1)...(19): siRNA sense strand
gguaaauacauguggaaca

SEQ ID NO: 2377760 - RNA, 19 nt, Homo sapiens
  misc_RNA (1)...(19): siRNA sense strand
uaaagaagcaccagaguua

SEQ ID NO: 2377761 - RNA, 19 nt, Homo sapiens
  misc_RNA (1)...(19): siRNA sense strand
acaagaacagggagagaaa

SEQ ID NO: 2377762 - RNA, 19 nt, Homo sapiens
  misc_RNA (1)...(19): siRNA sense strand
cugagaacauugugacuua

SEQ ID NO: 2377763 - RNA, 19 nt, Homo sapiens
  misc_RNA (1)...(19): siRNA sense strand
ugacaaaccuacagugaca

SEQ ID NO: 2377764 - RNA, 19 nt, Homo sapiens
  misc_RNA (1)...(19): siRNA sense strand
cagaaaauaccaugagaaa

SEQ ID NO: 2377765 - RNA, 19 nt, Homo sapiens
  misc_RNA (1)...(19): siRNA sense strand
gaguuaaauucaaggacau

SEQ ID NO: 2377766 - RNA, 19 nt, Homo sapiens
  misc_RNA (1)...(19): siRNA sense strand
gagaugaagagcacagaaa

SEQ ID NO: 2377767 - RNA, 19 nt, Homo sapiens
  misc_RNA (1)...(19): siRNA sense strand
gaaugauacagaaaggaaa

SEQ ID NO: 2377768 - RNA, 19 nt, Homo sapiens
  misc_RNA (1)...(19): siRNA sense strand
gauucagagaguuggguaa

SEQ ID NO: 2377769 - RNA, 19 nt, Homo sapiens
  misc_RNA (1)...(19): siRNA sense strand
ggaaugauacagaaaggaa

SEQ ID NO: 2377770 - RNA, 19 nt, Homo sapiens
  misc_RNA (1)...(19): siRNA sense strand
uaaaguugcuggagccaua

SEQ ID NO: 2377771 - RNA, 19 nt, Homo sapiens
  misc_RNA (1)...(19): siRNA sense strand
uuaaaugccuugaggugaa

SEQ ID NO: 2377772 - RNA, 19 nt, Homo sapiens
  misc_RNA (1)...(19): siRNA sense strand
cuguauacggagauaauaa

SEQ ID NO: 2377773 - RNA, 19 nt, Homo sapiens
  misc_RNA (1)...(19): siRNA sense strand
ccaggaagaugauguaaau

SEQ ID NO: 2377774 - RNA, 19 nt, Homo sapiens
  misc_RNA (1)...(19): siRNA sense strand
ccagagaaggcaaacaaua

SEQ ID NO: 2377775 - RNA, 19 nt, Homo sapiens
  misc_RNA (1)...(19): siRNA sense strand
guaccuaauucaacaggaa

SEQ ID NO: 2377776 - RNA, 19 nt, Homo sapiens
  misc_RNA (1)...(19): siRNA sense strand
gggaaagauuagaagucca

SEQ ID NO: 2377777 - RNA, 19 nt, Homo sapiens
  misc_RNA (1)...(19): siRNA sense strand
uggcagacccugagaacau

SEQ ID NO: 2377778 - RNA, 19 nt, Homo sapiens
  misc_RNA (1)...(19): siRNA sense strand
gaguauagugacacauuaa

SEQ ID NO: 2377779 - RNA, 19 nt, Homo sapiens
  misc_RNA (1)...(19): siRNA sense strand
gaagcaaagcacagauauu

SEQ ID NO: 2377780 - RNA, 19 nt, Homo sapiens
  misc_RNA (1)...(19): siRNA sense strand
ucacaguugaagagguuaa

SEQ ID NO: 2377781 - RNA, 19 nt, Homo sapiens
  misc_RNA (1)...(19): siRNA sense strand
ggaaaaggaguaugaacaa

SEQ ID NO: 2377782 - RNA, 19 nt, Homo sapiens
  misc_RNA (1)...(19): siRNA sense strand
cggagauaauaaagaagau

SEQ ID NO: 2377783 - RNA, 19 nt, Homo sapiens
  misc_RNA (1)...(19): siRNA sense strand
cugcaucacaugaggcuaa

SEQ ID NO: 2377784 - RNA, 19 nt, Homo sapiens
  misc_RNA (1)...(19): siRNA sense strand
ggaacuaaauucugagaug

SEQ ID NO: 2377785 - RNA, 19 nt, Homo sapiens
  misc_RNA (1)...(19): siRNA sense strand
aaacaauacuggaauccua

SEQ ID NO: 2377786 - RNA, 19 nt, Homo sapiens
  misc_RNA (1)...(19): siRNA sense strand
gaggaggaaucacaggaaa

SEQ ID NO: 2377787 - RNA, 19 nt, Homo sapiens
  misc_RNA (1)...(19): siRNA sense strand
gguugaaacugccagagaa

SEQ ID NO: 2377788 - RNA, 19 nt, Homo sapiens
  misc_RNA (1)...(19): siRNA sense strand
gagcauguuuggagagucu

SEQ ID NO: 2377789 - RNA, 19 nt, Homo sapiens
  misc_RNA (1)...(19): siRNA sense strand
gacagagacaccagaguua

SEQ ID NO: 2377790 - RNA, 19 nt, Homo sapiens
  misc_RNA (1)...(19): siRNA sense strand
caaaagaggucugagaaua

SEQ ID NO: 2377791 - RNA, 19 nt, Homo sapiens
  misc_RNA (1)...(19): siRNA sense strand
acgucagguuccaaagaaa

SEQ ID NO: 2377792 - RNA, 19 nt, Homo sapiens
  misc_RNA (1)...(19): siRNA sense strand
uauggaaaguggugaauca

SEQ ID NO: 2377793 - RNA, 19 nt, Homo sapiens
  misc_RNA (1)...(19): siRNA sense strand
aaauagaggaguauaguga

SEQ ID NO: 2377794 - RNA, 19 nt, Homo sapiens
  misc_RNA (1)...(19): siRNA sense strand
caaggauucucaacagaua

SEQ ID NO: 2377795 - RNA, 19 nt, Homo sapiens
  misc_RNA (1)...(19): siRNA sense strand
gcagaaugucaauaaagaa

SEQ ID NO: 2377796 - RNA, 19 nt, Homo sapiens
  misc_RNA (1)...(19): siRNA sense strand
aggaaucacaggaaagcaa

SEQ ID NO: 2377797 - RNA, 19 nt, Homo sapiens
  misc_RNA (1)...(19): siRNA sense strand
ccaaagacacagaagcaca

SEQ ID NO: 2377798 - RNA, 19 nt, Homo sapiens
  misc_RNA (1)...(19): siRNA sense strand
gggaaguaaagaagagacu

SEQ ID NO: 2377799 - RNA, 19 nt, Homo sapiens
  misc_RNA (1)...(19): siRNA sense strand
cccuaagccuguugaguuu

SEQ ID NO: 2377800 - RNA, 19 nt, Homo sapiens
  misc_RNA (1)...(19): siRNA sense strand
aagaagcaccagaguuaaa

SEQ ID NO: 2377801 - RNA, 19 nt, Homo sapiens
  misc_RNA (1)...(19): siRNA sense strand
gcuuuagacagcuuggaaa

SEQ ID NO: 2377802 - RNA, 19 nt, Homo sapiens
  misc_RNA (1)...(19): siRNA sense strand
caacaguguccaacuauua

SEQ ID NO: 2377803 - RNA, 19 nt, Homo sapiens
  misc_RNA (1)...(19): siRNA sense strand
aaccugaagauuugggaaa

SEQ ID NO: 2377804 - RNA, 19 nt, Homo sapiens
  misc_RNA (1)...(19): siRNA sense strand
gagagaaaugccauggauu

SEQ ID NO: 2377805 - RNA, 19 nt, Homo sapiens
  misc_RNA (1)...(19): siRNA sense strand
gguuaaugauggcaauuca

SEQ ID NO: 2377806 - RNA, 19 nt, Homo sapiens
  misc_RNA (1)...(19): siRNA sense strand
ggugaaaccuggagaugac

SEQ ID NO: 2377807 - RNA, 19 nt, Homo sapiens
  misc_RNA (1)...(19): siRNA sense strand
guaugaacaaucagaguca

SEQ ID NO: 2377808 - RNA, 19 nt, Homo sapiens
  misc_RNA (1)...(19): siRNA sense strand
agacacagaagcacauaua

SEQ ID NO: 2377809 - RNA, 19 nt, Homo sapiens
  misc_RNA (1)...(19): siRNA sense strand
gaagauuugggaaagauua

SEQ ID NO: 2377810 - RNA, 19 nt, Homo sapiens
  misc_RNA (1)...(19): siRNA sense strand
aaucacaguugaagagguu

SEQ ID NO: 2377811 - RNA, 19 nt, Homo sapiens
  misc_RNA (1)...(19): siRNA sense strand
gcaccagaguuaaauucaa

SEQ ID NO: 2377812 - RNA, 19 nt, Homo sapiens
  misc_RNA (1)...(19): siRNA sense strand
agaguuaaauucaaggaca

SEQ ID NO: 2377813 - RNA, 19 nt, Homo sapiens
  misc_RNA (1)...(19): siRNA sense strand
gaccaaugagccugugaaa

SEQ ID NO: 2377814 - RNA, 19 nt, Homo sapiens
  misc_RNA (1)...(19): siRNA sense strand
cagaagcaaagcacagaua

SEQ ID NO: 2377815 - RNA, 19 nt, Homo sapiens
  misc_RNA (1)...(19): siRNA sense strand
gaugggaaugauacagaaa

SEQ ID NO: 2377816 - RNA, 19 nt, Homo sapiens
  misc_RNA (1)...(19): siRNA sense strand
ggaguauagugacacauua

SEQ ID NO: 2377817 - RNA, 19 nt, Homo sapiens
  misc_RNA (1)...(19): siRNA sense strand
cuuuagacagcuuggaaau

SEQ ID NO: 2377818 - RNA, 19 nt, Homo sapiens
  misc_RNA (1)...(19): siRNA sense strand
gaugaagagcacagaaaau

SEQ ID NO: 2377819 - RNA, 19 nt, Homo sapiens
  misc_RNA (1)...(19): siRNA sense strand
uggcaagaaagauguaaau

SEQ ID NO: 2377820 - RNA, 19 nt, Homo sapiens
  misc_RNA (1)...(19): siRNA sense strand
gagguaaauacauguggaa

SEQ ID NO: 2377821 - RNA, 19 nt, Homo sapiens
  misc_RNA (1)...(19): siRNA sense strand
acuuacaagaacagggaga

SEQ ID NO: 2377822 - RNA, 19 nt, Homo sapiens
  misc_RNA (1)...(19): siRNA sense strand
aauaaaagccggugggcca

SEQ ID NO: 2377823 - RNA, 19 nt, Homo sapiens
  misc_RNA (1)...(19): siRNA sense strand
gggaauauguaaaacugaa

SEQ ID NO: 2377824 - RNA, 19 nt, Homo sapiens
  misc_RNA (1)...(19): siRNA sense strand
auagaggaguauagugaca

SEQ ID NO: 2377825 - RNA, 19 nt, Homo sapiens
  misc_RNA (1)...(19): siRNA sense strand
cuuaggaaacaaagcaauu

SEQ ID NO: 2377826 - RNA, 19 nt, Homo sapiens
  misc_RNA (1)...(19): siRNA sense strand
cugagaugacagagcauuu

SEQ ID NO: 2377827 - RNA, 19 nt, Homo sapiens
  misc_RNA (1)...(19): siRNA sense strand
cugacauucaagaagauaa

SEQ ID NO: 2377828 - RNA, 19 nt, Homo sapiens
  misc_RNA (1)...(19): siRNA sense strand
guaaaggacauuuugguua

SEQ ID NO: 2377829 - RNA, 19 nt, Homo sapiens
  misc_RNA (1)...(19): siRNA sense strand
acauauaucugaaccugaa

SEQ ID NO: 2377830 - RNA, 19 nt, Homo sapiens
  misc_RNA (1)...(19): siRNA sense strand
ccugaagauuugggaaaga

SEQ ID NO: 2377831 - RNA, 19 nt, Homo sapiens
  misc_RNA (1)...(19): siRNA sense strand
acucaagagaugaagacuu

SEQ ID NO: 2377832 - RNA, 19 nt, Homo sapiens
  misc_RNA (1)...(19): siRNA sense strand
cccaggaagaugauguaaa

SEQ ID NO: 2377833 - RNA, 19 nt, Homo sapiens
  misc_RNA (1)...(19): siRNA sense strand
cuaugaauguauugcacuu

SEQ ID NO: 2377834 - RNA, 19 nt, Homo sapiens
  misc_RNA (1)...(19): siRNA sense strand
gcuaggaugcggucaguuu

SEQ ID NO: 2377835 - RNA, 19 nt, Homo sapiens
  misc_RNA (1)...(19): siRNA sense strand
ugacaucaccagaagaaaa

SEQ ID NO: 2377836 - RNA, 19 nt, Homo sapiens
  misc_RNA (1)...(19): siRNA sense strand
ccacauugcucuaauaucu

SEQ ID NO: 2377837 - RNA, 19 nt, Homo sapiens
  misc_RNA (1)...(19): siRNA sense strand
caaaagaugaagaagucaa

SEQ ID NO: 2377838 - RNA, 19 nt, Homo sapiens
  misc_RNA (1)...(19): siRNA sense strand
gaacuaaauucugagauga

SEQ ID NO: 2377839 - RNA, 19 nt, Homo sapiens
  misc_RNA (1)...(19): siRNA sense strand
ggaagagugugcugagaug

SEQ ID NO: 2377840 - RNA, 19 nt, Homo sapiens
  misc_RNA (1)...(19): siRNA sense strand
agaguuggguaaaggacau

SEQ ID NO: 2377841 - RNA, 19 nt, Homo sapiens
  misc_RNA (1)...(19): siRNA sense strand
ucaaggacaucaaguaaaa

SEQ ID NO: 2377842 - RNA, 19 nt, Homo sapiens
  misc_RNA (1)...(19): siRNA sense strand
gagacgucccugaaagcaa

SEQ ID NO: 2377843 - RNA, 19 nt, Homo sapiens
  misc_RNA (1)...(19): siRNA sense strand
agcaguagcuuacagguua

SEQ ID NO: 2377844 - RNA, 19 nt, Homo sapiens
  misc_RNA (1)...(19): siRNA sense strand
gaacauuugccauucuuaa

SEQ ID NO: 2377845 - RNA, 19 nt, Homo sapiens
  misc_RNA (1)...(19): siRNA sense strand
gcacguguaugcagauuga

SEQ ID NO: 2377846 - RNA, 19 nt, Homo sapiens
  misc_RNA (1)...(19): siRNA sense strand
ucacaugaggcuaagaaaa

SEQ ID NO: 2377847 - RNA, 19 nt, Homo sapiens
  misc_RNA (1)...(19): siRNA sense strand
ggaagaugauguaaauucu

SEQ ID NO: 2377848 - RNA, 19 nt, Homo sapiens
  misc_RNA (1)...(19): siRNA sense strand
gugcagaaaaugaugguau

SEQ ID NO: 2377849 - RNA, 19 nt, Homo sapiens
  misc_RNA (1)...(19): siRNA sense strand
uggaaaaggaguaugaaca

SEQ ID NO: 2377850 - RNA, 19 nt, Homo sapiens
  misc_RNA (1)...(19): siRNA sense strand
gaaaacacaggaaaagaaa

SEQ ID NO: 2377851 - RNA, 19 nt, Homo sapiens
  misc_RNA (1)...(19): siRNA sense strand
uccuaaacaaauagagaga

SEQ ID NO: 2377852 - RNA, 19 nt, Homo sapiens
  misc_RNA (1)...(19): siRNA sense strand
uauuauggaaaguggugaa

SEQ ID NO: 2377853 - RNA, 19 nt, Homo sapiens
  misc_RNA (1)...(19): siRNA sense strand
acccagaagugcuguguga

SEQ ID NO: 2377854 - RNA, 19 nt, Homo sapiens
  misc_RNA (1)...(19): siRNA sense strand
caaaguaccuaauucaaca

SEQ ID NO: 2377855 - RNA, 19 nt, Homo sapiens
  misc_RNA (1)...(19): siRNA sense strand
agaaaaugcucaggaggua

SEQ ID NO: 2377856 - RNA, 19 nt, Homo sapiens
  misc_RNA (1)...(19): siRNA sense strand
guacaguccuccaggguau

SEQ ID NO: 2377857 - RNA, 19 nt, Homo sapiens
  misc_RNA (1)...(19): siRNA sense strand
gggcagcggcuuugcgaaa

SEQ ID NO: 2377858 - RNA, 19 nt, Homo sapiens
  misc_RNA (1)...(19): siRNA sense strand
ccgagaagcaggaggacga

SEQ ID NO: 2377859 - RNA, 19 nt, Homo sapiens
  misc_RNA (1)...(19): siRNA sense strand
acaaagacaugcuggacau

SEQ ID NO: 2377860 - RNA, 19 nt, Homo sapiens
  misc_RNA (1)...(19): siRNA sense strand
guaauaagacgcaguauga

SEQ ID NO: 2377861 - RNA, 19 nt, Homo sapiens
  misc_RNA (1)...(19): siRNA sense strand
gguuugacauccagguaca

SEQ ID NO: 2377862 - RNA, 19 nt, Homo sapiens
  misc_RNA (1)...(19): siRNA sense strand
ggugaugaccugcguguuu

SEQ ID NO: 2377863 - RNA, 19 nt, Homo sapiens
  misc_RNA (1)...(19): siRNA sense strand
aaagguacaugaagcacaa

SEQ ID NO: 2377864 - RNA, 19 nt, Homo sapiens
  misc_RNA (1)...(19): siRNA sense strand
ggagucgggacgugaagaa

SEQ ID NO: 2377865 - RNA, 19 nt, Homo sapiens
  misc_RNA (1)...(19): siRNA sense strand
acaugaagcacaagcgcga

SEQ ID NO: 2377866 - RNA, 19 nt, Homo sapiens
  misc_RNA (1)...(19): siRNA sense strand
ggguauacuucguggccug

SEQ ID NO: 2377867 - RNA, 19 nt, Homo sapiens
  misc_RNA (1)...(19): siRNA sense strand
cagcgaagaaccagccaca

SEQ ID NO: 2377868 - RNA, 19 nt, Homo sapiens
  misc_RNA (1)...(19): siRNA sense strand
gguaauaagacgcaguaug

SEQ ID NO: 2377869 - RNA, 19 nt, Homo sapiens
  misc_RNA (1)...(19): siRNA sense strand
cugcucagcuacaaagaca

SEQ ID NO: 2377870 - RNA, 19 nt, Homo sapiens
  misc_RNA (1)...(19): siRNA sense strand
ucuacaugcugaagaccau

SEQ ID NO: 2377871 - RNA, 19 nt, Homo sapiens
  misc_RNA (1)...(19): siRNA sense strand
guaugaugagauuggcauu

SEQ ID NO: 2377872 - RNA, 19 nt, Homo sapiens
  misc_RNA (1)...(19): siRNA sense strand
guacaguccuccaggguau

SEQ ID NO: 2377873 - RNA, 19 nt, Homo sapiens
  misc_RNA (1)...(19): siRNA sense strand
gggcagcggcuuugcgaaa

SEQ ID NO: 2377874 - RNA, 19 nt, Homo sapiens
  misc_RNA (1)...(19): siRNA sense strand
ccgagaagcaggaggacga

SEQ ID NO: 2377875 - RNA, 19 nt, Homo sapiens
  misc_RNA (1)...(19): siRNA sense strand
acaaagacaugcuggacau

SEQ ID NO: 2377876 - RNA, 19 nt, Homo sapiens
  misc_RNA (1)...(19): siRNA sense strand
guaauaagacgcaguauga

SEQ ID NO: 2377877 - RNA, 19 nt, Homo sapiens
  misc_RNA (1)...(19): siRNA sense strand
gguuugacauccagguaca

SEQ ID NO: 2377878 - RNA, 19 nt, Homo sapiens
  misc_RNA (1)...(19): siRNA sense strand
ggugaugaccugcguguuu

SEQ ID NO: 2377879 - RNA, 19 nt, Homo sapiens
  misc_RNA (1)...(19): siRNA sense strand
aaagguacaugaagcacaa

SEQ ID NO: 2377880 - RNA, 19 nt, Homo sapiens
  misc_RNA (1)...(19): siRNA sense strand
ggagucgggacgugaagaa

SEQ ID NO: 2377881 - RNA, 19 nt, Homo sapiens
  misc_RNA (1)...(19): siRNA sense strand
acaugaagcacaagcgcga

SEQ ID NO: 2377882 - RNA, 19 nt, Homo sapiens
  misc_RNA (1)...(19): siRNA sense strand
ggguauacuucguggccug

SEQ ID NO: 2377883 - RNA, 19 nt, Homo sapiens
  misc_RNA (1)...(19): siRNA sense strand
cagcgaagaaccagccaca

SEQ ID NO: 2377884 - RNA, 19 nt, Homo sapiens
  misc_RNA (1)...(19): siRNA sense strand
gguaauaagacgcaguaug

SEQ ID NO: 2377885 - RNA, 19 nt, Homo sapiens
  misc_RNA (1)...(19): siRNA sense strand
cugcucagcuacaaagaca

SEQ ID NO: 2377886 - RNA, 19 nt, Homo sapiens
  misc_RNA (1)...(19): siRNA sense strand
ucuacaugcugaagaccau

SEQ ID NO: 2377887 - RNA, 19 nt, Homo sapiens
  misc_RNA (1)...(19): siRNA sense strand
guaugaugagauuggcauu

SEQ ID NO: 2377888 - RNA, 19 nt, Homo sapiens
  misc_RNA (1)...(19): siRNA sense strand
agucagauaaagagauaga

SEQ ID NO: 2377889 - RNA, 19 nt, Homo sapiens
  misc_RNA (1)...(19): siRNA sense strand
gcaccaaccucaaggccga

SEQ ID NO: 2377890 - RNA, 19 nt, Homo sapiens
  misc_RNA (1)...(19): siRNA sense strand
auaaagagauagaugccuu

SEQ ID NO: 2377891 - RNA, 19 nt, Homo sapiens
  misc_RNA (1)...(19): siRNA sense strand
gcguggaguaugucaagaa

SEQ ID NO: 2377892 - RNA, 19 nt, Homo sapiens
  misc_RNA (1)...(19): siRNA sense strand
cuggaguggcucuggaaau

SEQ ID NO: 2377893 - RNA, 19 nt, Homo sapiens
  misc_RNA (1)...(19): siRNA sense strand
ggaaagagcuccagccagg

SEQ ID NO: 2377894 - RNA, 19 nt, Homo sapiens
  misc_RNA (1)...(19): siRNA sense strand
ccacaaucaugaucgcaga

SEQ ID NO: 2377895 - RNA, 19 nt, Homo sapiens
  misc_RNA (1)...(19): siRNA sense strand
caaacugagaagugccaau

SEQ ID NO: 2377896 - RNA, 19 nt, Homo sapiens
  misc_RNA (1)...(19): siRNA sense strand
ugaccauccaugaaggcaa

SEQ ID NO: 2377897 - RNA, 19 nt, Homo sapiens
  misc_RNA (1)...(19): siRNA sense strand
gcuuccagcaggagggcuu

SEQ ID NO: 2377898 - RNA, 19 nt, Homo sapiens
  misc_RNA (1)...(19): siRNA sense strand
cagagaaggcagcugacau

SEQ ID NO: 2377899 - RNA, 19 nt, Homo sapiens
  misc_RNA (1)...(19): siRNA sense strand
ccgaggacaugaauggcuu

SEQ ID NO: 2377900 - RNA, 19 nt, Homo sapiens
  misc_RNA (1)...(19): siRNA sense strand
ccagcaaggaggugauucu

SEQ ID NO: 2377901 - RNA, 19 nt, Homo sapiens
  misc_RNA (1)...(19): siRNA sense strand
ucgacuagcccguggaaca

SEQ ID NO: 2377902 - RNA, 19 nt, Homo sapiens
  misc_RNA (1)...(19): siRNA sense strand
gagcuuaaaccuugggugu

SEQ ID NO: 2377903 - RNA, 19 nt, Homo sapiens
  misc_RNA (1)...(19): siRNA sense strand
agagagacugagaaggcua

SEQ ID NO: 2377904 - RNA, 19 nt, Homo sapiens
  misc_RNA (1)...(19): siRNA sense strand
ugaaagcagaucaagggaa

SEQ ID NO: 2377905 - RNA, 19 nt, Homo sapiens
  misc_RNA (1)...(19): siRNA sense strand
aggaggacucugauggaga

SEQ ID NO: 2377906 - RNA, 19 nt, Homo sapiens
  misc_RNA (1)...(19): siRNA sense strand
acgacauccaggagagcau

SEQ ID NO: 2377907 - RNA, 19 nt, Homo sapiens
  misc_RNA (1)...(19): siRNA sense strand
cuauaguaguggugaagaa

SEQ ID NO: 2377908 - RNA, 19 nt, Homo sapiens
  misc_RNA (1)...(19): siRNA sense strand
gggaaaagcaggaaaguau

SEQ ID NO: 2377909 - RNA, 19 nt, Homo sapiens
  misc_RNA (1)...(19): siRNA sense strand
ggagaaugcugaaggggaa

SEQ ID NO: 2377910 - RNA, 19 nt, Homo sapiens
  misc_RNA (1)...(19): siRNA sense strand
ugaaaugggccuaggaaaa

SEQ ID NO: 2377911 - RNA, 19 nt, Homo sapiens
  misc_RNA (1)...(19): siRNA sense strand
gauuauaguuucugagcca

SEQ ID NO: 2377912 - RNA, 19 nt, Homo sapiens
  misc_RNA (1)...(19): siRNA sense strand
gugaagaagugauggagga

SEQ ID NO: 2377913 - RNA, 19 nt, Homo sapiens
  misc_RNA (1)...(19): siRNA sense strand
aguaguagcaccagugaaa

SEQ ID NO: 2377914 - RNA, 19 nt, Homo sapiens
  misc_RNA (1)...(19): siRNA sense strand
gauccaagaaagagaugua

SEQ ID NO: 2377915 - RNA, 19 nt, Homo sapiens
  misc_RNA (1)...(19): siRNA sense strand
ggaauaagauugaggaagc

SEQ ID NO: 2377916 - RNA, 19 nt, Homo sapiens
  misc_RNA (1)...(19): siRNA sense strand
gggugauagaguuguguua

SEQ ID NO: 2377917 - RNA, 19 nt, Homo sapiens
  misc_RNA (1)...(19): siRNA sense strand
cggaauuggaagaccuuaa

SEQ ID NO: 2377918 - RNA, 19 nt, Homo sapiens
  misc_RNA (1)...(19): siRNA sense strand
aggccagacuaaagaagua

SEQ ID NO: 2377919 - RNA, 19 nt, Homo sapiens
  misc_RNA (1)...(19): siRNA sense strand
gcagaugagcaaagcauau

SEQ ID NO: 2377920 - RNA, 19 nt, Homo sapiens
  misc_RNA (1)...(19): siRNA sense strand
uaguagcaccagugaaaua

SEQ ID NO: 2377921 - RNA, 19 nt, Homo sapiens
  misc_RNA (1)...(19): siRNA sense strand
cauaugaggaagaugaauu

SEQ ID NO: 2377922 - RNA, 19 nt, Homo sapiens
  misc_RNA (1)...(19): siRNA sense strand
cggagaagcaggagcaacu

SEQ ID NO: 2377923 - RNA, 19 nt, Homo sapiens
  misc_RNA (1)...(19): siRNA sense strand
ugacaaacaagcagaagau

SEQ ID NO: 2377924 - RNA, 19 nt, Homo sapiens
  misc_RNA (1)...(19): siRNA sense strand
uugaagaauccaugcuaaa

SEQ ID NO: 2377925 - RNA, 19 nt, Homo sapiens
  misc_RNA (1)...(19): siRNA sense strand
guucacuagaugaggacua

SEQ ID NO: 2377926 - RNA, 19 nt, Homo sapiens
  misc_RNA (1)...(19): siRNA sense strand
guccaaaacuaauggcuua

SEQ ID NO: 2377927 - RNA, 19 nt, Homo sapiens
  misc_RNA (1)...(19): siRNA sense strand
gugcaaugucggagaagca

SEQ ID NO: 2377928 - RNA, 19 nt, Homo sapiens
  misc_RNA (1)...(19): siRNA sense strand
cacuauggauggagcaauu

SEQ ID NO: 2377929 - RNA, 19 nt, Homo sapiens
  misc_RNA (1)...(19): siRNA sense strand
augaaaugggccuaggaaa

SEQ ID NO: 2377930 - RNA, 19 nt, Homo sapiens
  misc_RNA (1)...(19): siRNA sense strand
cuccagauaaugaaagaaa

SEQ ID NO: 2377931 - RNA, 19 nt, Homo sapiens
  misc_RNA (1)...(19): siRNA sense strand
agagaauagcacaugcaaa

SEQ ID NO: 2377932 - RNA, 19 nt, Homo sapiens
  misc_RNA (1)...(19): siRNA sense strand
gcuuuaacaagaaacguaa

SEQ ID NO: 2377933 - RNA, 19 nt, Homo sapiens
  misc_RNA (1)...(19): siRNA sense strand
agauguaguuauaaggcuu

SEQ ID NO: 2377934 - RNA, 19 nt, Homo sapiens
  misc_RNA (1)...(19): siRNA sense strand
aauugaaacagaaggguga

SEQ ID NO: 2377935 - RNA, 19 nt, Homo sapiens
  misc_RNA (1)...(19): siRNA sense strand
uggcauugguacauaaaca

SEQ ID NO: 2377936 - RNA, 19 nt, Homo sapiens
  misc_RNA (1)...(19): siRNA sense strand
guuaauuuauggugcccua

SEQ ID NO: 2377937 - RNA, 19 nt, Homo sapiens
  misc_RNA (1)...(19): siRNA sense strand
uccagaaacuccagauaau

SEQ ID NO: 2377938 - RNA, 19 nt, Homo sapiens
  misc_RNA (1)...(19): siRNA sense strand
uguugaagacucugaauau

SEQ ID NO: 2377939 - RNA, 19 nt, Homo sapiens
  misc_RNA (1)...(19): siRNA sense strand
agauagaugccauagagua

SEQ ID NO: 2377940 - RNA, 19 nt, Homo sapiens
  misc_RNA (1)...(19): siRNA sense strand
ccaagggacgauugaagaa

SEQ ID NO: 2377941 - RNA, 19 nt, Homo sapiens
  misc_RNA (1)...(19): siRNA sense strand
uggauggaacauagaacaa

SEQ ID NO: 2377942 - RNA, 19 nt, Homo sapiens
  misc_RNA (1)...(19): siRNA sense strand
aggaaaugucucagcuuau

SEQ ID NO: 2377943 - RNA, 19 nt, Homo sapiens
  misc_RNA (1)...(19): siRNA sense strand
ucaugaugcaguugaggaa

SEQ ID NO: 2377944 - RNA, 19 nt, Homo sapiens
  misc_RNA (1)...(19): siRNA sense strand
ugacagacuucgaacuaca

SEQ ID NO: 2377945 - RNA, 19 nt, Homo sapiens
  misc_RNA (1)...(19): siRNA sense strand
gaaacagaagggugauaga

SEQ ID NO: 2377946 - RNA, 19 nt, Homo sapiens
  misc_RNA (1)...(19): siRNA sense strand
acuggaucauggagaggaa

SEQ ID NO: 2377947 - RNA, 19 nt, Homo sapiens
  misc_RNA (1)...(19): siRNA sense strand
ggauguacacagaagcuuu

SEQ ID NO: 2377948 - RNA, 19 nt, Homo sapiens
  misc_RNA (1)...(19): siRNA sense strand
gcucagaagauaacagaac

SEQ ID NO: 2377949 - RNA, 19 nt, Homo sapiens
  misc_RNA (1)...(19): siRNA sense strand
ugaaacuagaacaggauau

SEQ ID NO: 2377950 - RNA, 19 nt, Homo sapiens
  misc_RNA (1)...(19): siRNA sense strand
ggguaauaaugguccucau

SEQ ID NO: 2377951 - RNA, 19 nt, Homo sapiens
  misc_RNA (1)...(19): siRNA sense strand
auauggaaguuaugacaga

SEQ ID NO: 2377952 - RNA, 19 nt, Homo sapiens
  misc_RNA (1)...(19): siRNA sense strand
uugcagaagaccaagauau

SEQ ID NO: 2377953 - RNA, 19 nt, Homo sapiens
  misc_RNA (1)...(19): siRNA sense strand
aaggaauaagauugaggaa

SEQ ID NO: 2377954 - RNA, 19 nt, Homo sapiens
  misc_RNA (1)...(19): siRNA sense strand
aguagaugaaggugaugaa

SEQ ID NO: 2377955 - RNA, 19 nt, Homo sapiens
  misc_RNA (1)...(19): siRNA sense strand
cuggaagaccuuucggaau

SEQ ID NO: 2377956 - RNA, 19 nt, Homo sapiens
  misc_RNA (1)...(19): siRNA sense strand
gguggugggcccaggaaaa

SEQ ID NO: 2377957 - RNA, 19 nt, Homo sapiens
  misc_RNA (1)...(19): siRNA sense strand
cagcagaugagcaaagcau

SEQ ID NO: 2377958 - RNA, 19 nt, Homo sapiens
  misc_RNA (1)...(19): siRNA sense strand
ccaugaugcuggauaucuu

SEQ ID NO: 2377959 - RNA, 19 nt, Homo sapiens
  misc_RNA (1)...(19): siRNA sense strand
cuaaaggaaccuacacauu

SEQ ID NO: 2377960 - RNA, 19 nt, Homo sapiens
  misc_RNA (1)...(19): siRNA sense strand
gauuagauggaaagacuca

SEQ ID NO: 2377961 - RNA, 19 nt, Homo sapiens
  misc_RNA (1)...(19): siRNA sense strand
ggaucaaccuggcggagga

SEQ ID NO: 2377962 - RNA, 19 nt, Homo sapiens
  misc_RNA (1)...(19): siRNA sense strand
augaaugcguacagaguca

SEQ ID NO: 2377963 - RNA, 19 nt, Homo sapiens
  misc_RNA (1)...(19): siRNA sense strand
aguacgaccugcagggcca

SEQ ID NO: 2377964 - RNA, 19 nt, Homo sapiens
  misc_RNA (1)...(19): siRNA sense strand
agcugaagcaagugaugaa

SEQ ID NO: 2377965 - RNA, 19 nt, Homo sapiens
  misc_RNA (1)...(19): siRNA sense strand
acccguaacacgaggauca

SEQ ID NO: 2377966 - RNA, 19 nt, Homo sapiens
  misc_RNA (1)...(19): siRNA sense strand
cuggaggaggcaaguuuaa

SEQ ID NO: 2377967 - RNA, 19 nt, Homo sapiens
  misc_RNA (1)...(19): siRNA sense strand
ccagcgggguacagagcaa

SEQ ID NO: 2377968 - RNA, 19 nt, Homo sapiens
  misc_RNA (1)...(19): siRNA sense strand
gguucuccauggugcacaa

SEQ ID NO: 2377969 - RNA, 19 nt, Homo sapiens
  misc_RNA (1)...(19): siRNA sense strand
ugaaggacgugaagcagca

SEQ ID NO: 2377970 - RNA, 19 nt, Homo sapiens
  misc_RNA (1)...(19): siRNA sense strand
uggaagacaaccuggacca

SEQ ID NO: 2377971 - RNA, 19 nt, Homo sapiens
  misc_RNA (1)...(19): siRNA sense strand
uggaaagagugcaggggaa

SEQ ID NO: 2377972 - RNA, 19 nt, Homo sapiens
  misc_RNA (1)...(19): siRNA sense strand
aagagauggcugugaauau

SEQ ID NO: 2377973 - RNA, 19 nt, Homo sapiens
  misc_RNA (1)...(19): siRNA sense strand
ugaucagggacgugagcaa

SEQ ID NO: 2377974 - RNA, 19 nt, Homo sapiens
  misc_RNA (1)...(19): siRNA sense strand
augaaacagcuguggaauu

SEQ ID NO: 2377975 - RNA, 19 nt, Homo sapiens
  misc_RNA (1)...(19): siRNA sense strand
ggaaagagugcaggggaaa

SEQ ID NO: 2377976 - RNA, 19 nt, Homo sapiens
  misc_RNA (1)...(19): siRNA sense strand
cggacagaauaucaagcua

SEQ ID NO: 2377977 - RNA, 19 nt, Homo sapiens
  misc_RNA (1)...(19): siRNA sense strand
ucgugguggucgaggauga

SEQ ID NO: 2377978 - RNA, 19 nt, Homo sapiens
  misc_RNA (1)...(19): siRNA sense strand
aagcgaaguggcuggaaau

SEQ ID NO: 2377979 - RNA, 19 nt, Homo sapiens
  misc_RNA (1)...(19): siRNA sense strand
ccagcaccuuugagaggaa

SEQ ID NO: 2377980 - RNA, 19 nt, Homo sapiens
  misc_RNA (1)...(19): siRNA sense strand
aaacaaauccggaagucca

SEQ ID NO: 2377981 - RNA, 19 nt, Homo sapiens
  misc_RNA (1)...(19): siRNA sense strand
augccaaaggccaggauuu

SEQ ID NO: 2377982 - RNA, 19 nt, Homo sapiens
  misc_RNA (1)...(19): siRNA sense strand
uuaugaaacagcuguggaa

SEQ ID NO: 2377983 - RNA, 19 nt, Homo sapiens
  misc_RNA (1)...(19): siRNA sense strand
cgaaacaugccaaaggcca

SEQ ID NO: 2377984 - RNA, 19 nt, Homo sapiens
  misc_RNA (1)...(19): siRNA sense strand
ggacagaauaucaagcuac

SEQ ID NO: 2377985 - RNA, 19 nt, Homo sapiens
  misc_RNA (1)...(19): siRNA sense strand
guucaaagcaagcaaccca

SEQ ID NO: 2377986 - RNA, 19 nt, Homo sapiens
  misc_RNA (1)...(19): siRNA sense strand
acuuggaccuuguggaaac

SEQ ID NO: 2377987 - RNA, 19 nt, Homo sapiens
  misc_RNA (1)...(19): siRNA sense strand
uggaaagagugcaggggaa

SEQ ID NO: 2377988 - RNA, 19 nt, Homo sapiens
  misc_RNA (1)...(19): siRNA sense strand
aagagauggcugugaauau

SEQ ID NO: 2377989 - RNA, 19 nt, Homo sapiens
  misc_RNA (1)...(19): siRNA sense strand
ugaucagggacgugagcaa

SEQ ID NO: 2377990 - RNA, 19 nt, Homo sapiens
  misc_RNA (1)...(19): siRNA sense strand
augaaacagcuguggaauu

SEQ ID NO: 2377991 - RNA, 19 nt, Homo sapiens
  misc_RNA (1)...(19): siRNA sense strand
ggaaagagugcaggggaaa

SEQ ID NO: 2377992 - RNA, 19 nt, Homo sapiens
  misc_RNA (1)...(19): siRNA sense strand
cggacagaauaucaagcua

SEQ ID NO: 2377993 - RNA, 19 nt, Homo sapiens
  misc_RNA (1)...(19): siRNA sense strand
ucgugguggucgaggauga

SEQ ID NO: 2377994 - RNA, 19 nt, Homo sapiens
  misc_RNA (1)...(19): siRNA sense strand
aagcgaaguggcuggaaau

SEQ ID NO: 2377995 - RNA, 19 nt, Homo sapiens
  misc_RNA (1)...(19): siRNA sense strand
ccagcaccuuugagaggaa

SEQ ID NO: 2377996 - RNA, 19 nt, Homo sapiens
  misc_RNA (1)...(19): siRNA sense strand
aaacaaauccggaagucca

SEQ ID NO: 2377997 - RNA, 19 nt, Homo sapiens
  misc_RNA (1)...(19): siRNA sense strand
augccaaaggccaggauuu

SEQ ID NO: 2377998 - RNA, 19 nt, Homo sapiens
  misc_RNA (1)...(19): siRNA sense strand
uuaugaaacagcuguggaa

SEQ ID NO: 2377999 - RNA, 19 nt, Homo sapiens
  misc_RNA (1)...(19): siRNA sense strand
cgaaacaugccaaaggcca

SEQ ID NO: 2378000 - RNA, 19 nt, Homo sapiens
  misc_RNA (1)...(19): siRNA sense strand
ggacagaauaucaagcuac

SEQ ID NO: 2378001 - RNA, 19 nt, Homo sapiens
  misc_RNA (1)...(19): siRNA sense strand
guucaaagcaagcaaccca

SEQ ID NO: 2378002 - RNA, 19 nt, Homo sapiens
  misc_RNA (1)...(19): siRNA sense strand
acuuggaccuuguggaaac

SEQ ID NO: 2378003 - RNA, 19 nt, Homo sapiens
  misc_RNA (1)...(19): siRNA sense strand
agaugagauccaagggaaa

SEQ ID NO: 2378004 - RNA, 19 nt, Homo sapiens
  misc_RNA (1)...(19): siRNA sense strand
cagaugagauccaagggaa

SEQ ID NO: 2378005 - RNA, 19 nt, Homo sapiens
  misc_RNA (1)...(19): siRNA sense strand
cgagauaggccauggagca

SEQ ID NO: 2378006 - RNA, 19 nt, Homo sapiens
  misc_RNA (1)...(19): siRNA sense strand
cugcugugugguagagaaa

SEQ ID NO: 2378007 - RNA, 19 nt, Homo sapiens
  misc_RNA (1)...(19): siRNA sense strand
cagccgaagaagaagagaa

SEQ ID NO: 2378008 - RNA, 19 nt, Homo sapiens
  misc_RNA (1)...(19): siRNA sense strand
ccgaagaagaagagaagac

SEQ ID NO: 2378009 - RNA, 19 nt, Homo sapiens
  misc_RNA (1)...(19): siRNA sense strand
aagaagaagagaagacgga

SEQ ID NO: 2378010 - RNA, 19 nt, Homo sapiens
  misc_RNA (1)...(19): siRNA sense strand
guucaggagcagaugagau

SEQ ID NO: 2378011 - RNA, 19 nt, Homo sapiens
  misc_RNA (1)...(19): siRNA sense strand
gauccaagggaaaccgaga

SEQ ID NO: 2378012 - RNA, 19 nt, Homo sapiens
  misc_RNA (1)...(19): siRNA sense strand
gugcaguucaggagcagau

SEQ ID NO: 2378013 - RNA, 19 nt, Homo sapiens
  misc_RNA (1)...(19): siRNA sense strand
gagaagaaggucugggaau

SEQ ID NO: 2378014 - RNA, 19 nt, Homo sapiens
  misc_RNA (1)...(19): siRNA sense strand
ggaagaagcuauuggugga

SEQ ID NO: 2378015 - RNA, 19 nt, Homo sapiens
  misc_RNA (1)...(19): siRNA sense strand
cagcagagagacagggcaa

SEQ ID NO: 2378016 - RNA, 19 nt, Homo sapiens
  misc_RNA (1)...(19): siRNA sense strand
ccagaagaucagaaacuaa

SEQ ID NO: 2378017 - RNA, 19 nt, Homo sapiens
  misc_RNA (1)...(19): siRNA sense strand
cacauuaagccuagugaaa

SEQ ID NO: 2378018 - RNA, 19 nt, Homo sapiens
  misc_RNA (1)...(19): siRNA sense strand
ggguguauccagagaguca

SEQ ID NO: 2378019 - RNA, 19 nt, Homo sapiens
  misc_RNA (1)...(19): siRNA sense strand
ggaugaagucugucccaaa

SEQ ID NO: 2378020 - RNA, 19 nt, Homo sapiens
  misc_RNA (1)...(19): siRNA sense strand
aaccaaagaaggaggauau

SEQ ID NO: 2378021 - RNA, 19 nt, Homo sapiens
  misc_RNA (1)...(19): siRNA sense strand
ccauaugagguuuggauuu

SEQ ID NO: 2378022 - RNA, 19 nt, Homo sapiens
  misc_RNA (1)...(19): siRNA sense strand
agaaaguucaagagucaaa

SEQ ID NO: 2378023 - RNA, 19 nt, Homo sapiens
  misc_RNA (1)...(19): siRNA sense strand
acaauuaacuugaaggacu

SEQ ID NO: 2378024 - RNA, 19 nt, Homo sapiens
  misc_RNA (1)...(19): siRNA sense strand
gaauacagcaagaugaaaa

SEQ ID NO: 2378025 - RNA, 19 nt, Homo sapiens
  misc_RNA (1)...(19): siRNA sense strand
gggaaagcaauuugacaga

SEQ ID NO: 2378026 - RNA, 19 nt, Homo sapiens
  misc_RNA (1)...(19): siRNA sense strand
caauauaacaucuacggua

SEQ ID NO: 2378027 - RNA, 19 nt, Homo sapiens
  misc_RNA (1)...(19): siRNA sense strand
aagcaggaguggaugaaga

SEQ ID NO: 2378028 - RNA, 19 nt, Homo sapiens
  misc_RNA (1)...(19): siRNA sense strand
uggaagacucugcuagaaa

SEQ ID NO: 2378029 - RNA, 19 nt, Homo sapiens
  misc_RNA (1)...(19): siRNA sense strand
ggaaggucaagaugauaaa

SEQ ID NO: 2378030 - RNA, 19 nt, Homo sapiens
  misc_RNA (1)...(19): siRNA sense strand
caucaaugacuuuggagau

SEQ ID NO: 2378031 - RNA, 19 nt, Homo sapiens
  misc_RNA (1)...(19): siRNA sense strand
caaccaaagaaggaggaua

SEQ ID NO: 2378032 - RNA, 19 nt, Homo sapiens
  misc_RNA (1)...(19): siRNA sense strand
cugaauacagcaagaugaa

SEQ ID NO: 2378033 - RNA, 19 nt, Homo sapiens
  misc_RNA (1)...(19): siRNA sense strand
acccauagaaugugaauuu

SEQ ID NO: 2378034 - RNA, 19 nt, Homo sapiens
  misc_RNA (1)...(19): siRNA sense strand
uuaaaggagauaagugcaa

SEQ ID NO: 2378035 - RNA, 19 nt, Homo sapiens
  misc_RNA (1)...(19): siRNA sense strand
gcaauuugacagaguggau

SEQ ID NO: 2378036 - RNA, 19 nt, Homo sapiens
  misc_RNA (1)...(19): siRNA sense strand
uaccaucagaggagaaaua

SEQ ID NO: 2378037 - RNA, 19 nt, Homo sapiens
  misc_RNA (1)...(19): siRNA sense strand
cuaugaagauacuggagca

SEQ ID NO: 2378038 - RNA, 19 nt, Homo sapiens
  misc_RNA (1)...(19): siRNA sense strand
cugggaaggucaagaugau

SEQ ID NO: 2378039 - RNA, 19 nt, Homo sapiens
  misc_RNA (1)...(19): siRNA sense strand
ggaauugauauuacaccaa

SEQ ID NO: 2378040 - RNA, 19 nt, Homo sapiens
  misc_RNA (1)...(19): siRNA sense strand
caccaacacuacagguaau

SEQ ID NO: 2378041 - RNA, 19 nt, Homo sapiens
  misc_RNA (1)...(19): siRNA sense strand
cuguauggaccuuugcaaa

SEQ ID NO: 2378042 - RNA, 19 nt, Homo sapiens
  misc_RNA (1)...(19): siRNA sense strand
ggucaagaugauaaagagu

SEQ ID NO: 2378043 - RNA, 19 nt, Homo sapiens
  misc_RNA (1)...(19): siRNA sense strand
ccuuuuggaucuugugaaa

SEQ ID NO: 2378044 - RNA, 19 nt, Homo sapiens
  misc_RNA (1)...(19): siRNA sense strand
caguaauggacuuguagau

SEQ ID NO: 2378045 - RNA, 19 nt, Homo sapiens
  misc_RNA (1)...(19): siRNA sense strand
agcaaauggcagugagguu

SEQ ID NO: 2378046 - RNA, 19 nt, Homo sapiens
  misc_RNA (1)...(19): siRNA sense strand
gcacauaucugaucuggca

SEQ ID NO: 2378047 - RNA, 19 nt, Homo sapiens
  misc_RNA (1)...(19): siRNA sense strand
ugaagauacuggagcauac

SEQ ID NO: 2378048 - RNA, 19 nt, Homo sapiens
  misc_RNA (1)...(19): siRNA sense strand
ucaagaugauaaagagucu

SEQ ID NO: 2378049 - RNA, 19 nt, Homo sapiens
  misc_RNA (1)...(19): siRNA sense strand
gauaaaacaggaagaacuu

SEQ ID NO: 2378050 - RNA, 19 nt, Homo sapiens
  misc_RNA (1)...(19): siRNA sense strand
ggucaguugucuugguucu

SEQ ID NO: 2378051 - RNA, 19 nt, Homo sapiens
  misc_RNA (1)...(19): siRNA sense strand
cugcagcaacugugggaca

SEQ ID NO: 2378052 - RNA, 19 nt, Homo sapiens
  misc_RNA (1)...(19): siRNA sense strand
cgcaaagaaugaagcagga

SEQ ID NO: 2378053 - RNA, 19 nt, Homo sapiens
  misc_RNA (1)...(19): siRNA sense strand
gcacauuaagccuagugaa

SEQ ID NO: 2378054 - RNA, 19 nt, Homo sapiens
  misc_RNA (1)...(19): siRNA sense strand
ccaaccagugggaaagcaa

SEQ ID NO: 2378055 - RNA, 19 nt, Homo sapiens
  misc_RNA (1)...(19): siRNA sense strand
agagacagggcaagcagaa

SEQ ID NO: 2378056 - RNA, 19 nt, Homo sapiens
  misc_RNA (1)...(19): siRNA sense strand
agcuauugguggaucaaau

SEQ ID NO: 2378057 - RNA, 19 nt, Homo sapiens
  misc_RNA (1)...(19): siRNA sense strand
gagcauuccaagugaucca

SEQ ID NO: 2378058 - RNA, 19 nt, Homo sapiens
  misc_RNA (1)...(19): siRNA sense strand
uugacagaguggaugauuu

SEQ ID NO: 2378059 - RNA, 19 nt, Homo sapiens
  misc_RNA (1)...(19): siRNA sense strand
agacaauuaacuugaagga

SEQ ID NO: 2378060 - RNA, 19 nt, Homo sapiens
  misc_RNA (1)...(19): siRNA sense strand
uucaagagucaaaggauuu

SEQ ID NO: 2378061 - RNA, 19 nt, Homo sapiens
  misc_RNA (1)...(19): siRNA sense strand
agaagcuauugguggauca

SEQ ID NO: 2378062 - RNA, 19 nt, Homo sapiens
  misc_RNA (1)...(19): siRNA sense strand
aguaauggacuuguagaua

SEQ ID NO: 2378063 - RNA, 19 nt, Homo sapiens
  misc_RNA (1)...(19): siRNA sense strand
ugauauuacaccaaagcuu

SEQ ID NO: 2378064 - RNA, 19 nt, Homo sapiens
  misc_RNA (1)...(19): siRNA sense strand
ggucaugguggacggugua

SEQ ID NO: 2378065 - RNA, 19 nt, Homo sapiens
  misc_RNA (1)...(19): siRNA sense strand
caggaguggaugaagacau

SEQ ID NO: 2378066 - RNA, 19 nt, Homo sapiens
  misc_RNA (1)...(19): siRNA sense strand
ugaaaagcuccuuggauuu

SEQ ID NO: 2378067 - RNA, 19 nt, Homo sapiens
  misc_RNA (1)...(19): siRNA sense strand
acuacugaauacagcaaga

SEQ ID NO: 2378068 - RNA, 19 nt, Homo sapiens
  misc_RNA (1)...(19): siRNA sense strand
ugauaaaacaggaagaacu

SEQ ID NO: 2378069 - RNA, 19 nt, Homo sapiens
  misc_RNA (1)...(19): siRNA sense strand
uggacgacucaauaaauua

SEQ ID NO: 2378070 - RNA, 19 nt, Homo sapiens
  misc_RNA (1)...(19): siRNA sense strand
guacugugguuugggaaga

SEQ ID NO: 2378071 - RNA, 19 nt, Homo sapiens
  misc_RNA (1)...(19): siRNA sense strand
ucaccaacacuacagguaa

SEQ ID NO: 2378072 - RNA, 19 nt, Homo sapiens
  misc_RNA (1)...(19): siRNA sense strand
agucauuggcauauacaca

SEQ ID NO: 2378073 - RNA, 19 nt, Homo sapiens
  misc_RNA (1)...(19): siRNA sense strand
gaaaggucuuguaaggguu

SEQ ID NO: 2378074 - RNA, 19 nt, Homo sapiens
  misc_RNA (1)...(19): siRNA sense strand
cuuaaaggauacugagaaa

SEQ ID NO: 2378075 - RNA, 19 nt, Homo sapiens
  misc_RNA (1)...(19): siRNA sense strand
acugaaagacagaggauua

SEQ ID NO: 2378076 - RNA, 19 nt, Homo sapiens
  misc_RNA (1)...(19): siRNA sense strand
cuacaaacaaagagaacuu

SEQ ID NO: 2378077 - RNA, 19 nt, Homo sapiens
  misc_RNA (1)...(19): siRNA sense strand
cucaagaaguucaggagaa

SEQ ID NO: 2378078 - RNA, 19 nt, Homo sapiens
  misc_RNA (1)...(19): siRNA sense strand
ggaugauacccaaguuaaa

SEQ ID NO: 2378079 - RNA, 19 nt, Homo sapiens
  misc_RNA (1)...(19): siRNA sense strand
gagagaagaaauaaaggaa

SEQ ID NO: 2378080 - RNA, 19 nt, Homo sapiens
  misc_RNA (1)...(19): siRNA sense strand
aggacaaugcuuugauaaa

SEQ ID NO: 2378081 - RNA, 19 nt, Homo sapiens
  misc_RNA (1)...(19): siRNA sense strand
ugauaagccuucugggaga

SEQ ID NO: 2378082 - RNA, 19 nt, Homo sapiens
  misc_RNA (1)...(19): siRNA sense strand
cccaagacgaugagaguau

SEQ ID NO: 2378083 - RNA, 19 nt, Homo sapiens
  misc_RNA (1)...(19): siRNA sense strand
aggaugagacugaaacaaa

SEQ ID NO: 2378084 - RNA, 19 nt, Homo sapiens
  misc_RNA (1)...(19): siRNA sense strand
ugcugaaauuagaaggaaa

SEQ ID NO: 2378085 - RNA, 19 nt, Homo sapiens
  misc_RNA (1)...(19): siRNA sense strand
ugaaguugauggagcaaau

SEQ ID NO: 2378086 - RNA, 19 nt, Homo sapiens
  misc_RNA (1)...(19): siRNA sense strand
agggagaaucacaguguua

SEQ ID NO: 2378087 - RNA, 19 nt, Homo sapiens
  misc_RNA (1)...(19): siRNA sense strand
cuguagaggaugagacuga

SEQ ID NO: 2378088 - RNA, 19 nt, Homo sapiens
  misc_RNA (1)...(19): siRNA sense strand
gcugaaauuagaaggaaaa

SEQ ID NO: 2378089 - RNA, 19 nt, Homo sapiens
  misc_RNA (1)...(19): siRNA sense strand
caugcuaauauuugggaua

SEQ ID NO: 2378090 - RNA, 19 nt, Homo sapiens
  misc_RNA (1)...(19): siRNA sense strand
gcauuaaagcacaugaaaa

SEQ ID NO: 2378091 - RNA, 19 nt, Homo sapiens
  misc_RNA (1)...(19): siRNA sense strand
gaaaccaagcucacggaaa

SEQ ID NO: 2378092 - RNA, 19 nt, Homo sapiens
  misc_RNA (1)...(19): siRNA sense strand
aaaccaagcucacggaaaa

SEQ ID NO: 2378093 - RNA, 19 nt, Homo sapiens
  misc_RNA (1)...(19): siRNA sense strand
gacgaauccucaagagaau

SEQ ID NO: 2378094 - RNA, 19 nt, Homo sapiens
  misc_RNA (1)...(19): siRNA sense strand
gaaagaaaggcuggagcaa

SEQ ID NO: 2378095 - RNA, 19 nt, Homo sapiens
  misc_RNA (1)...(19): siRNA sense strand
acaaaaggacugugggauu

SEQ ID NO: 2378096 - RNA, 19 nt, Homo sapiens
  misc_RNA (1)...(19): siRNA sense strand
acgcaaauaacaugaguga

SEQ ID NO: 2378097 - RNA, 19 nt, Homo sapiens
  misc_RNA (1)...(19): siRNA sense strand
caagagaagcacagaaaau

SEQ ID NO: 2378098 - RNA, 19 nt, Homo sapiens
  misc_RNA (1)...(19): siRNA sense strand
auacaauagugauggcaca

SEQ ID NO: 2378099 - RNA, 19 nt, Homo sapiens
  misc_RNA (1)...(19): siRNA sense strand
cagacaaaauuaaggaaga

SEQ ID NO: 2378100 - RNA, 19 nt, Homo sapiens
  misc_RNA (1)...(19): siRNA sense strand
aauaccugauugagaguaa

SEQ ID NO: 2378101 - RNA, 19 nt, Homo sapiens
  misc_RNA (1)...(19): siRNA sense strand
gccuacaaguugccagaaa

SEQ ID NO: 2378102 - RNA, 19 nt, Homo sapiens
  misc_RNA (1)...(19): siRNA sense strand
ccaaaacaccagugaaauu

SEQ ID NO: 2378103 - RNA, 19 nt, Homo sapiens
  misc_RNA (1)...(19): siRNA sense strand
acaagaagcaagauacaau

SEQ ID NO: 2378104 - RNA, 19 nt, Homo sapiens
  misc_RNA (1)...(19): siRNA sense strand
agcuauuucuagagggauu

SEQ ID NO: 2378105 - RNA, 19 nt, Homo sapiens
  misc_RNA (1)...(19): siRNA sense strand
cuuuauauguaguggaucu

SEQ ID NO: 2378106 - RNA, 19 nt, Homo sapiens
  misc_RNA (1)...(19): siRNA sense strand
acaacuuaauccugaagaa

SEQ ID NO: 2378107 - RNA, 19 nt, Homo sapiens
  misc_RNA (1)...(19): siRNA sense strand
caccaaaacaccagugaaa

SEQ ID NO: 2378108 - RNA, 19 nt, Homo sapiens
  misc_RNA (1)...(19): siRNA sense strand
gaaaacaagaagcaagaua

SEQ ID NO: 2378109 - RNA, 19 nt, Homo sapiens
  misc_RNA (1)...(19): siRNA sense strand
cuuuaaacaugaagagaug

SEQ ID NO: 2378110 - RNA, 19 nt, Homo sapiens
  misc_RNA (1)...(19): siRNA sense strand
uggcuaaagaguauggauu

SEQ ID NO: 2378111 - RNA, 19 nt, Homo sapiens
  misc_RNA (1)...(19): siRNA sense strand
acuauuuacucuggagaua

SEQ ID NO: 2378112 - RNA, 19 nt, Homo sapiens
  misc_RNA (1)...(19): siRNA sense strand
cugucaagauguacuuaaa

SEQ ID NO: 2378113 - RNA, 19 nt, Homo sapiens
  misc_RNA (1)...(19): siRNA sense strand
ucaagaaguucaggagaau

SEQ ID NO: 2378114 - RNA, 19 nt, Homo sapiens
  misc_RNA (1)...(19): siRNA sense strand
ucacaguaagcuugcauaa

SEQ ID NO: 2378115 - RNA, 19 nt, Homo sapiens
  misc_RNA (1)...(19): siRNA sense strand
gaaauggguacuagaacau

SEQ ID NO: 2378116 - RNA, 19 nt, Homo sapiens
  misc_RNA (1)...(19): siRNA sense strand
gcuggaggcaagugaauuu

SEQ ID NO: 2378117 - RNA, 19 nt, Homo sapiens
  misc_RNA (1)...(19): siRNA sense strand
aacaagagaagcacagaaa

SEQ ID NO: 2378118 - RNA, 19 nt, Homo sapiens
  misc_RNA (1)...(19): siRNA sense strand
caacuuaauccugaagaaa

SEQ ID NO: 2378119 - RNA, 19 nt, Homo sapiens
  misc_RNA (1)...(19): siRNA sense strand
caacagacugaaagacaga

SEQ ID NO: 2378120 - RNA, 19 nt, Homo sapiens
  misc_RNA (1)...(19): siRNA sense strand
cugaccagauugugagaca

SEQ ID NO: 2378121 - RNA, 19 nt, Homo sapiens
  misc_RNA (1)...(19): siRNA sense strand
ccuuuaaacaugaagagau

SEQ ID NO: 2378122 - RNA, 19 nt, Homo sapiens
  misc_RNA (1)...(19): siRNA sense strand
uaauacuguuggagugaau

SEQ ID NO: 2378123 - RNA, 19 nt, Homo sapiens
  misc_RNA (1)...(19): siRNA sense strand
aauacaaagcacuggauga

SEQ ID NO: 2378124 - RNA, 19 nt, Homo sapiens
  misc_RNA (1)...(19): siRNA sense strand
agacgaauccucaagagaa

SEQ ID NO: 2378125 - RNA, 19 nt, Homo sapiens
  misc_RNA (1)...(19): siRNA sense strand
cagcagaauaugaacuaga

SEQ ID NO: 2378126 - RNA, 19 nt, Homo sapiens
  misc_RNA (1)...(19): siRNA sense strand
caguaagcuugcauaaaga

SEQ ID NO: 2378127 - RNA, 19 nt, Homo sapiens
  misc_RNA (1)...(19): siRNA sense strand
caagugaauuuauggcaga

SEQ ID NO: 2378128 - RNA, 19 nt, Homo sapiens
  misc_RNA (1)...(19): siRNA sense strand
ucaacauaugagagaagaa

SEQ ID NO: 2378129 - RNA, 19 nt, Homo sapiens
  misc_RNA (1)...(19): siRNA sense strand
cagcaaugggagauucuua

SEQ ID NO: 2378130 - RNA, 19 nt, Homo sapiens
  misc_RNA (1)...(19): siRNA sense strand
aaacaagaagcaagauaca

SEQ ID NO: 2378131 - RNA, 19 nt, Homo sapiens
  misc_RNA (1)...(19): siRNA sense strand
ggggaagauaugagcaaau

SEQ ID NO: 2378132 - RNA, 19 nt, Homo sapiens
  misc_RNA (1)...(19): siRNA sense strand
ugaugaaguugauggagca

SEQ ID NO: 2378133 - RNA, 19 nt, Homo sapiens
  misc_RNA (1)...(19): siRNA sense strand
uggacaaugugaagagugu

SEQ ID NO: 2378134 - RNA, 19 nt, Homo sapiens
  misc_RNA (1)...(19): siRNA sense strand
ugaaauucugguugcuaaa

SEQ ID NO: 2378135 - RNA, 19 nt, Homo sapiens
  misc_RNA (1)...(19): siRNA sense strand
aaacaauugaucugugcaa

SEQ ID NO: 2378136 - RNA, 19 nt, Homo sapiens
  misc_RNA (1)...(19): siRNA sense strand
gauugagaguaacaaacaa

SEQ ID NO: 2378137 - RNA, 19 nt, Homo sapiens
  misc_RNA (1)...(19): siRNA sense strand
cauaaaagccagaucucua

SEQ ID NO: 2378138 - RNA, 19 nt, Homo sapiens
  misc_RNA (1)...(19): siRNA sense strand
cggaagaucuggaggcguu

SEQ ID NO: 2378139 - RNA, 19 nt, Homo sapiens
  misc_RNA (1)...(19): siRNA sense strand
ccguggaagccuuggaauu

SEQ ID NO: 2378140 - RNA, 19 nt, Homo sapiens
  misc_RNA (1)...(19): siRNA sense strand
gcauggaacgugacggcua

SEQ ID NO: 2378141 - RNA, 19 nt, Homo sapiens
  misc_RNA (1)...(19): siRNA sense strand
uggacaugcaacagagcaa

SEQ ID NO: 2378142 - RNA, 19 nt, Homo sapiens
  misc_RNA (1)...(19): siRNA sense strand
acauagcagcccagaacaa

SEQ ID NO: 2378143 - RNA, 19 nt, Homo sapiens
  misc_RNA (1)...(19): siRNA sense strand
ccuacgagcugcuggacga

SEQ ID NO: 2378144 - RNA, 19 nt, Homo sapiens
  misc_RNA (1)...(19): siRNA sense strand
gauaagaacaagaucccuu

SEQ ID NO: 2378145 - RNA, 19 nt, Homo sapiens
  misc_RNA (1)...(19): siRNA sense strand
uggagaaaguggagugcac

SEQ ID NO: 2378146 - RNA, 19 nt, Homo sapiens
  misc_RNA (1)...(19): siRNA sense strand
gggaggaacuggacgagcu

SEQ ID NO: 2378147 - RNA, 19 nt, Homo sapiens
  misc_RNA (1)...(19): siRNA sense strand
gggcccuggauaagaacaa

SEQ ID NO: 2378148 - RNA, 19 nt, Homo sapiens
  misc_RNA (1)...(19): siRNA sense strand
uggacaaggacaccacaaa

SEQ ID NO: 2378149 - RNA, 19 nt, Homo sapiens
  misc_RNA (1)...(19): siRNA sense strand
accuggacgugguggagua

SEQ ID NO: 2378150 - RNA, 19 nt, Homo sapiens
  misc_RNA (1)...(19): siRNA sense strand
gcuacaagggccaccguga

SEQ ID NO: 2378151 - RNA, 19 nt, Homo sapiens
  misc_RNA (1)...(19): siRNA sense strand
gguucaacacucuggcaaa

SEQ ID NO: 2378152 - RNA, 19 nt, Homo sapiens
  misc_RNA (1)...(19): siRNA sense strand
uaaucaauuuggauggcaa

SEQ ID NO: 2378153 - RNA, 19 nt, Homo sapiens
  misc_RNA (1)...(19): siRNA sense strand
gauaauuaaccuuggccca

SEQ ID NO: 2378154 - RNA, 19 nt, Homo sapiens
  misc_RNA (1)...(19): siRNA sense strand
accuauguuucuugggcaa

SEQ ID NO: 2378155 - RNA, 19 nt, Homo sapiens
  misc_RNA (1)...(19): siRNA sense strand
aggcaagaaauauguuaga

SEQ ID NO: 2378156 - RNA, 19 nt, Homo sapiens
  misc_RNA (1)...(19): siRNA sense strand
guacaagggucgugugugg

SEQ ID NO: 2378157 - RNA, 19 nt, Homo sapiens
  misc_RNA (1)...(19): siRNA sense strand
gaagaaggcuguagaggca

SEQ ID NO: 2378158 - RNA, 19 nt, Homo sapiens
  misc_RNA (1)...(19): siRNA sense strand
gugcaaggucagaggacga

SEQ ID NO: 2378159 - RNA, 19 nt, Homo sapiens
  misc_RNA (1)...(19): siRNA sense strand
cuucauugcaagagcguuu

SEQ ID NO: 2378160 - RNA, 19 nt, Homo sapiens
  misc_RNA (1)...(19): siRNA sense strand
ggacaguguucgaggucgu

SEQ ID NO: 2378161 - RNA, 19 nt, Homo sapiens
  misc_RNA (1)...(19): siRNA sense strand
ugucagggaaccaggaaaa

SEQ ID NO: 2378162 - RNA, 19 nt, Homo sapiens
  misc_RNA (1)...(19): siRNA sense strand
aggcgagagugcaagguca

SEQ ID NO: 2378163 - RNA, 19 nt, Homo sapiens
  misc_RNA (1)...(19): siRNA sense strand
gaccaaaggccgaggacug

SEQ ID NO: 2378164 - RNA, 19 nt, Homo sapiens
  misc_RNA (1)...(19): siRNA sense strand
acucuggcucucaggaaua

SEQ ID NO: 2378165 - RNA, 19 nt, Homo sapiens
  misc_RNA (1)...(19): siRNA sense strand
cccaugaaagccagagcua

SEQ ID NO: 2378166 - RNA, 19 nt, Homo sapiens
  misc_RNA (1)...(19): siRNA sense strand
accuuaaagaggauagcaa

SEQ ID NO: 2378167 - RNA, 19 nt, Homo sapiens
  misc_RNA (1)...(19): siRNA sense strand
agaccaguacggcaggaaa

SEQ ID NO: 2378168 - RNA, 19 nt, Homo sapiens
  misc_RNA (1)...(19): siRNA sense strand
gaccaguacggcaggaaaa

SEQ ID NO: 2378169 - RNA, 19 nt, Homo sapiens
  misc_RNA (1)...(19): siRNA sense strand
cuuaaagaggauagcaacu

SEQ ID NO: 2378170 - RNA, 19 nt, Homo sapiens
  misc_RNA (1)...(19): siRNA sense strand
caggagagcaugaagucca

SEQ ID NO: 2378171 - RNA, 19 nt, Homo sapiens
  misc_RNA (1)...(19): siRNA sense strand
cggcauggcaagagugggu

SEQ ID NO: 2378172 - RNA, 19 nt, Homo sapiens
  misc_RNA (1)...(19): siRNA sense strand
accugagugaggaggauua

SEQ ID NO: 2378173 - RNA, 19 nt, Homo sapiens
  misc_RNA (1)...(19): siRNA sense strand
gagaagaaauacagcccuu

SEQ ID NO: 2378174 - RNA, 19 nt, Homo sapiens
  misc_RNA (1)...(19): siRNA sense strand
cugaaagagaagaaauaca

SEQ ID NO: 2378175 - RNA, 19 nt, Homo sapiens
  misc_RNA (1)...(19): siRNA sense strand
ccauucuggcugugaggaa

SEQ ID NO: 2378176 - RNA, 19 nt, Homo sapiens
  misc_RNA (1)...(19): siRNA sense strand
ccuugaugcuccuggcaca

SEQ ID NO: 2378177 - RNA, 19 nt, Homo sapiens
  misc_RNA (1)...(19): siRNA sense strand
ggcuagaggaggaccagaa

SEQ ID NO: 2378178 - RNA, 19 nt, Homo sapiens
  misc_RNA (1)...(19): siRNA sense strand
acaacaaccucauguggga

SEQ ID NO: 2378179 - RNA, 19 nt, Homo sapiens
  misc_RNA (1)...(19): siRNA sense strand
acaucaagugugcacguaa

SEQ ID NO: 2378180 - RNA, 19 nt, Homo sapiens
  misc_RNA (1)...(19): siRNA sense strand
ccaagaagggcaaggagca

SEQ ID NO: 2378181 - RNA, 19 nt, Homo sapiens
  misc_RNA (1)...(19): siRNA sense strand
agaaaggggaggagcgcua

SEQ ID NO: 2378182 - RNA, 19 nt, Homo sapiens
  misc_RNA (1)...(19): siRNA sense strand
ucacagacgaccagagcga

SEQ ID NO: 2378183 - RNA, 19 nt, Homo sapiens
  misc_RNA (1)...(19): siRNA sense strand
guaccuucaagcugggcaa

SEQ ID NO: 2378184 - RNA, 19 nt, Homo sapiens
  misc_RNA (1)...(19): siRNA sense strand
gggcaaggaaguaugggau

SEQ ID NO: 2378185 - RNA, 19 nt, Homo sapiens
  misc_RNA (1)...(19): siRNA sense strand
ugaacauggaggaggacuu

SEQ ID NO: 2378186 - RNA, 19 nt, Homo sapiens
  misc_RNA (1)...(19): siRNA sense strand
gggacauggcucugaagau

SEQ ID NO: 2378187 - RNA, 19 nt, Homo sapiens
  misc_RNA (1)...(19): siRNA sense strand
ccaacgucuuugugaacau

SEQ ID NO: 2378188 - RNA, 19 nt, Homo sapiens
  misc_RNA (1)...(19): siRNA sense strand
ggcaaggaaguaugggauu

SEQ ID NO: 2378189 - RNA, 19 nt, Homo sapiens
  misc_RNA (1)...(19): siRNA sense strand
auuuggaaacuuugaggaa

SEQ ID NO: 2378190 - RNA, 19 nt, Homo sapiens
  misc_RNA (1)...(19): siRNA sense strand
cagaggagggcaaggaagu

SEQ ID NO: 2378191 - RNA, 19 nt, Homo sapiens
  misc_RNA (1)...(19): siRNA sense strand
ucguagauaccauggguca

SEQ ID NO: 2378192 - RNA, 19 nt, Homo sapiens
  misc_RNA (1)...(19): siRNA sense strand
cuacaauggagucgagucu

SEQ ID NO: 2378193 - RNA, 19 nt, Homo sapiens
  misc_RNA (1)...(19): siRNA sense strand
ccaucagaaagaagcucaa

SEQ ID NO: 2378194 - RNA, 19 nt, Homo sapiens
  misc_RNA (1)...(19): siRNA sense strand
uugugaacauggaggagga

SEQ ID NO: 2378195 - RNA, 19 nt, Homo sapiens
  misc_RNA (1)...(19): siRNA sense strand
ucauuagcauuguggacga

SEQ ID NO: 2378196 - RNA, 19 nt, Homo sapiens
  misc_RNA (1)...(19): siRNA sense strand
ugucuaagguugcagagca

SEQ ID NO: 2378197 - RNA, 19 nt, Homo sapiens
  misc_RNA (1)...(19): siRNA sense strand
gauuauauuucuagggaca

SEQ ID NO: 2378198 - RNA, 19 nt, Homo sapiens
  misc_RNA (1)...(19): siRNA sense strand
aagaagauggugugggaaa

SEQ ID NO: 2378199 - RNA, 19 nt, Homo sapiens
  misc_RNA (1)...(19): siRNA sense strand
gguaaaucucuuugaacaa

SEQ ID NO: 2378200 - RNA, 19 nt, Homo sapiens
  misc_RNA (1)...(19): siRNA sense strand
ggaagaagaugguguggga

SEQ ID NO: 2378201 - RNA, 19 nt, Homo sapiens
  misc_RNA (1)...(19): siRNA sense strand
caaagaagucagauggaca

SEQ ID NO: 2378202 - RNA, 19 nt, Homo sapiens
  misc_RNA (1)...(19): siRNA sense strand
ggaaaucaguaaugcccua

SEQ ID NO: 2378203 - RNA, 19 nt, Homo sapiens
  misc_RNA (1)...(19): siRNA sense strand
gcaaaaucacggagucaaa

SEQ ID NO: 2378204 - RNA, 19 nt, Homo sapiens
  misc_RNA (1)...(19): siRNA sense strand
uuacagaggacauggaaaa

SEQ ID NO: 2378205 - RNA, 19 nt, Homo sapiens
  misc_RNA (1)...(19): siRNA sense strand
uggaaaaggaaaucaguaa

SEQ ID NO: 2378206 - RNA, 19 nt, Homo sapiens
  misc_RNA (1)...(19): siRNA sense strand
ugaugaaauaccagccaaa

SEQ ID NO: 2378207 - RNA, 19 nt, Homo sapiens
  misc_RNA (1)...(19): siRNA sense strand
ggggaaaauuacugauaca

SEQ ID NO: 2378208 - RNA, 19 nt, Homo sapiens
  misc_RNA (1)...(19): siRNA sense strand
aagaggaaagagagaagua

SEQ ID NO: 2378209 - RNA, 19 nt, Homo sapiens
  misc_RNA (1)...(19): siRNA sense strand
caguaaugcccuaggccau

SEQ ID NO: 2378210 - RNA, 19 nt, Homo sapiens
  misc_RNA (1)...(19): siRNA sense strand
gaugaaaguaagaccaaaa

SEQ ID NO: 2378211 - RNA, 19 nt, Homo sapiens
  misc_RNA (1)...(19): siRNA sense strand
aagaaaguggucauggaaa

SEQ ID NO: 2378212 - RNA, 19 nt, Homo sapiens
  misc_RNA (1)...(19): siRNA sense strand
ggugauugaccuaagaaaa

SEQ ID NO: 2378213 - RNA, 19 nt, Homo sapiens
  misc_RNA (1)...(19): siRNA sense strand
cagcugaaugggagugauu

SEQ ID NO: 2378214 - RNA, 19 nt, Homo sapiens
  misc_RNA (1)...(19): siRNA sense strand
agaagauggugugggaaau

SEQ ID NO: 2378215 - RNA, 19 nt, Homo sapiens
  misc_RNA (1)...(19): siRNA sense strand
uauccaaagaucagaguga

SEQ ID NO: 2378216 - RNA, 19 nt, Homo sapiens
  misc_RNA (1)...(19): siRNA sense strand
uguggaaaccucaggaaca

SEQ ID NO: 2378217 - RNA, 19 nt, Homo sapiens
  misc_RNA (1)...(19): siRNA sense strand
ggacgaucuccuugaacuu

SEQ ID NO: 2378218 - RNA, 19 nt, Homo sapiens
  misc_RNA (1)...(19): siRNA sense strand
aggaugaaaguaagaccaa

SEQ ID NO: 2378219 - RNA, 19 nt, Homo sapiens
  misc_RNA (1)...(19): siRNA sense strand
gcucaggcaaagagaggga

SEQ ID NO: 2378220 - RNA, 19 nt, Homo sapiens
  misc_RNA (1)...(19): siRNA sense strand
gauaccaacuggagccuga

SEQ ID NO: 2378221 - RNA, 19 nt, Homo sapiens
  misc_RNA (1)...(19): siRNA sense strand
agucagauggacacauuaa

SEQ ID NO: 2378222 - RNA, 19 nt, Homo sapiens
  misc_RNA (1)...(19): siRNA sense strand
ggguuaccaagcagugaaa

SEQ ID NO: 2378223 - RNA, 19 nt, Homo sapiens
  misc_RNA (1)...(19): siRNA sense strand
agccaaaagaccaagauua

SEQ ID NO: 2378224 - RNA, 19 nt, Homo sapiens
  misc_RNA (1)...(19): siRNA sense strand
gaaaguuauuggaacgacu

SEQ ID NO: 2378225 - RNA, 19 nt, Homo sapiens
  misc_RNA (1)...(19): siRNA sense strand
cuuacagaggacauggaaa

SEQ ID NO: 2378226 - RNA, 19 nt, Homo sapiens
  misc_RNA (1)...(19): siRNA sense strand
uuggaacgacuuaaagaaa

SEQ ID NO: 2378227 - RNA, 19 nt, Homo sapiens
  misc_RNA (1)...(19): siRNA sense strand
gggaaauccuucaucagca

SEQ ID NO: 2378228 - RNA, 19 nt, Homo sapiens
  misc_RNA (1)...(19): siRNA sense strand
guacuguggaggagggugu

SEQ ID NO: 2378229 - RNA, 19 nt, Homo sapiens
  misc_RNA (1)...(19): siRNA sense strand
gaaagagagaaguaccgaa

SEQ ID NO: 2378230 - RNA, 19 nt, Homo sapiens
  misc_RNA (1)...(19): siRNA sense strand
agacaaaggaaaagaauug

SEQ ID NO: 2378231 - RNA, 19 nt, Homo sapiens
  misc_RNA (1)...(19): siRNA sense strand
ccuaauggaauaagugacu

SEQ ID NO: 2378232 - RNA, 19 nt, Homo sapiens
  misc_RNA (1)...(19): siRNA sense strand
gaaaagaauugcucaggca

SEQ ID NO: 2378233 - RNA, 19 nt, Homo sapiens
  misc_RNA (1)...(19): siRNA sense strand
ggguaauaaaucuccuaau

SEQ ID NO: 2378234 - RNA, 19 nt, Homo sapiens
  misc_RNA (1)...(19): siRNA sense strand
ucgccauagcaaagguaau

SEQ ID NO: 2378235 - RNA, 19 nt, Homo sapiens
  misc_RNA (1)...(19): siRNA sense strand
uggacacauuaaagaccaa

SEQ ID NO: 2378236 - RNA, 19 nt, Homo sapiens
  misc_RNA (1)...(19): siRNA sense strand
ccaagauuagauugcuuua

SEQ ID NO: 2378237 - RNA, 19 nt, Homo sapiens
  misc_RNA (1)...(19): siRNA sense strand
aggcaaagagagggacaga

SEQ ID NO: 2378238 - RNA, 19 nt, Homo sapiens
  misc_RNA (1)...(19): siRNA sense strand
gcagugaaacgauggacca

SEQ ID NO: 2378239 - RNA, 19 nt, Homo sapiens
  misc_RNA (1)...(19): siRNA sense strand
uccaaagaucagagugaca

SEQ ID NO: 2378240 - RNA, 19 nt, Homo sapiens
  misc_RNA (1)...(19): siRNA sense strand
uguucaaaggggaaaauua

SEQ ID NO: 2378241 - RNA, 19 nt, Homo sapiens
  misc_RNA (1)...(19): siRNA sense strand
aaugaaaguaggaggggau

SEQ ID NO: 2378242 - RNA, 19 nt, Homo sapiens
  misc_RNA (1)...(19): siRNA sense strand
gagacaaaggaaaagaauu

SEQ ID NO: 2378243 - RNA, 19 nt, Homo sapiens
  misc_RNA (1)...(19): siRNA sense strand
ggacagaagaacggacgau

SEQ ID NO: 2378244 - RNA, 19 nt, Homo sapiens
  misc_RNA (1)...(19): siRNA sense strand
ggaaaauuacugauacaga

SEQ ID NO: 2378245 - RNA, 19 nt, Homo sapiens
  misc_RNA (1)...(19): siRNA sense strand
ggaaaaggaaaucaguaau

SEQ ID NO: 2378246 - RNA, 19 nt, Homo sapiens
  misc_RNA (1)...(19): siRNA sense strand
uggugauugaccuaagaaa

SEQ ID NO: 2378247 - RNA, 19 nt, Homo sapiens
  misc_RNA (1)...(19): siRNA sense strand
gcugaaugggagugauugu

SEQ ID NO: 2378248 - RNA, 19 nt, Homo sapiens
  misc_RNA (1)...(19): siRNA sense strand
ucucagaaaucgugggcua

SEQ ID NO: 2378249 - RNA, 19 nt, Homo sapiens
  misc_RNA (1)...(19): siRNA sense strand
gcccagaucucaagggaca

SEQ ID NO: 2378250 - RNA, 19 nt, Homo sapiens
  misc_RNA (1)...(19): siRNA sense strand
gggugacagcagugggaau

SEQ ID NO: 2378251 - RNA, 19 nt, Homo sapiens
  misc_RNA (1)...(19): siRNA sense strand
gggacauccaggagcggaa

SEQ ID NO: 2378252 - RNA, 19 nt, Homo sapiens
  misc_RNA (1)...(19): siRNA sense strand
gccaagaacccaaggacca

SEQ ID NO: 2378253 - RNA, 19 nt, Homo sapiens
  misc_RNA (1)...(19): siRNA sense strand
ugauguacauggagcccaa

SEQ ID NO: 2378254 - RNA, 19 nt, Homo sapiens
  misc_RNA (1)...(19): siRNA sense strand
agauggagucagacaagaa

SEQ ID NO: 2378255 - RNA, 19 nt, Homo sapiens
  misc_RNA (1)...(19): siRNA sense strand
guguacacaaggagcgcua

SEQ ID NO: 2378256 - RNA, 19 nt, Homo sapiens
  misc_RNA (1)...(19): siRNA sense strand
ccauaagaccuucacgaca

SEQ ID NO: 2378257 - RNA, 19 nt, Homo sapiens
  misc_RNA (1)...(19): siRNA sense strand
acaucuuccuagcggacua

SEQ ID NO: 2378258 - RNA, 19 nt, Homo sapiens
  misc_RNA (1)...(19): siRNA sense strand
ccaagacgugggugcgcaa

SEQ ID NO: 2378259 - RNA, 19 nt, Homo sapiens
  misc_RNA (1)...(19): siRNA sense strand
ggagcugaggccaggaaca

SEQ ID NO: 2378260 - RNA, 19 nt, Homo sapiens
  misc_RNA (1)...(19): siRNA sense strand
ccaacuaccacuaccgaga

SEQ ID NO: 2378261 - RNA, 19 nt, Homo sapiens
  misc_RNA (1)...(19): siRNA sense strand
cgauacacgcugcagguga

SEQ ID NO: 2378262 - RNA, 19 nt, Homo sapiens
  misc_RNA (1)...(19): siRNA sense strand
gaucgaaugggcagggacu

SEQ ID NO: 2378263 - RNA, 19 nt, Homo sapiens
  misc_RNA (1)...(19): siRNA sense strand
caggagauggagucagaca

SEQ ID NO: 2378264 - RNA, 19 nt, Homo sapiens
  misc_RNA (1)...(19): siRNA sense strand
gcaccuacccagaugagca

SEQ ID NO: 2378265 - RNA, 19 nt, Homo sapiens
  misc_RNA (1)...(19): siRNA sense strand
agaacagagaccagaaaga

SEQ ID NO: 2378266 - RNA, 19 nt, Homo sapiens
  misc_RNA (1)...(19): siRNA sense strand
caguaagacaacagggaac

SEQ ID NO: 2378267 - RNA, 19 nt, Homo sapiens
  misc_RNA (1)...(19): siRNA sense strand
uggaaguggagcagaagau

SEQ ID NO: 2378268 - RNA, 19 nt, Homo sapiens
  misc_RNA (1)...(19): siRNA sense strand
cucugaaaguacugaggau

SEQ ID NO: 2378269 - RNA, 19 nt, Homo sapiens
  misc_RNA (1)...(19): siRNA sense strand
cagggaaugaagaacaaau

SEQ ID NO: 2378270 - RNA, 19 nt, Homo sapiens
  misc_RNA (1)...(19): siRNA sense strand
auuuacaagaucugggaga

SEQ ID NO: 2378271 - RNA, 19 nt, Homo sapiens
  misc_RNA (1)...(19): siRNA sense strand
ccuagaagggauugaaauu

SEQ ID NO: 2378272 - RNA, 19 nt, Homo sapiens
  misc_RNA (1)...(19): siRNA sense strand
ggcugauaauugaagauaa

SEQ ID NO: 2378273 - RNA, 19 nt, Homo sapiens
  misc_RNA (1)...(19): siRNA sense strand
agagaugauccuugccaaa

SEQ ID NO: 2378274 - RNA, 19 nt, Homo sapiens
  misc_RNA (1)...(19): siRNA sense strand
caaagaaaaucuauggaca

SEQ ID NO: 2378275 - RNA, 19 nt, Homo sapiens
  misc_RNA (1)...(19): siRNA sense strand
cuauaauccaauccagaaa

SEQ ID NO: 2378276 - RNA, 19 nt, Homo sapiens
  misc_RNA (1)...(19): siRNA sense strand
ccuggaaaaugcagaacaa

SEQ ID NO: 2378277 - RNA, 19 nt, Homo sapiens
  misc_RNA (1)...(19): siRNA sense strand
agaacaagcuguaugccau

SEQ ID NO: 2378278 - RNA, 19 nt, Homo sapiens
  misc_RNA (1)...(19): siRNA sense strand
ccgacugcuuaaugggaau

SEQ ID NO: 2378279 - RNA, 19 nt, Homo sapiens
  misc_RNA (1)...(19): siRNA sense strand
gcgcagcuguggauggaga

SEQ ID NO: 2378280 - RNA, 19 nt, Homo sapiens
  misc_RNA (1)...(19): siRNA sense strand
cuucaguggaacuuaauaa

SEQ ID NO: 2378281 - RNA, 19 nt, Homo sapiens
  misc_RNA (1)...(19): siRNA sense strand
ggagcuugacugugaugaa

SEQ ID NO: 2378282 - RNA, 19 nt, Homo sapiens
  misc_RNA (1)...(19): siRNA sense strand
agauuuauucaguggcaau

SEQ ID NO: 2378283 - RNA, 19 nt, Homo sapiens
  misc_RNA (1)...(19): siRNA sense strand
gguccaugcaauuugacaa

SEQ ID NO: 2378284 - RNA, 19 nt, Homo sapiens
  misc_RNA (1)...(19): siRNA sense strand
cauucagaagauacagaaa

SEQ ID NO: 2378285 - RNA, 19 nt, Homo sapiens
  misc_RNA (1)...(19): siRNA sense strand
aaccaaacacugauggaau

SEQ ID NO: 2378286 - RNA, 19 nt, Homo sapiens
  misc_RNA (1)...(19): siRNA sense strand
cugaaggagcugucacaau

SEQ ID NO: 2378287 - RNA, 19 nt, Homo sapiens
  misc_RNA (1)...(19): siRNA sense strand
acugaauagccuuacuaaa

SEQ ID NO: 2378288 - RNA, 19 nt, Homo sapiens
  misc_RNA (1)...(19): siRNA sense strand
agcauuauucagagaguau

SEQ ID NO: 2378289 - RNA, 19 nt, Homo sapiens
  misc_RNA (1)...(19): siRNA sense strand
ucacaaagugcuugccuca

SEQ ID NO: 2378290 - RNA, 19 nt, Homo sapiens
  misc_RNA (1)...(19): siRNA sense strand
ccagaaaauucaagcaaac

SEQ ID NO: 2378291 - RNA, 19 nt, Homo sapiens
  misc_RNA (1)...(19): siRNA sense strand
uggaaaaugcagaacaauu

SEQ ID NO: 2378292 - RNA, 19 nt, Homo sapiens
  misc_RNA (1)...(19): siRNA sense strand
ccacauguucgcagcugua

SEQ ID NO: 2378293 - RNA, 19 nt, Homo sapiens
  misc_RNA (1)...(19): siRNA sense strand
ggaaucaggccgaugagga

SEQ ID NO: 2378294 - RNA, 19 nt, Homo sapiens
  misc_RNA (1)...(19): siRNA sense strand
gacuagaauggcugauaau

SEQ ID NO: 2378295 - RNA, 19 nt, Homo sapiens
  misc_RNA (1)...(19): siRNA sense strand
auucaucgguuuugguaua

SEQ ID NO: 2378296 - RNA, 19 nt, Homo sapiens
  misc_RNA (1)...(19): siRNA sense strand
ccucuuggguagugauuuu

SEQ ID NO: 2378297 - RNA, 19 nt, Homo sapiens
  misc_RNA (1)...(19): siRNA sense strand
ggcagaaacaccugaaugu

SEQ ID NO: 2378298 - RNA, 19 nt, Homo sapiens
  misc_RNA (1)...(19): siRNA sense strand
cuuucauuccauugagcaa

SEQ ID NO: 2378299 - RNA, 19 nt, Homo sapiens
  misc_RNA (1)...(19): siRNA sense strand
guauaacuacagacaaaga

SEQ ID NO: 2378300 - RNA, 19 nt, Homo sapiens
  misc_RNA (1)...(19): siRNA sense strand
ggaacaucacaaagugcuu

SEQ ID NO: 2378301 - RNA, 19 nt, Homo sapiens
  misc_RNA (1)...(19): siRNA sense strand
ggauuuaggaaguaauaag

SEQ ID NO: 2378302 - RNA, 19 nt, Homo sapiens
  misc_RNA (1)...(19): siRNA sense strand
gccuagaagggauugaaau

SEQ ID NO: 2378303 - RNA, 19 nt, Homo sapiens
  misc_RNA (1)...(19): siRNA sense strand
gagaacaagcuguaugcca

SEQ ID NO: 2378304 - RNA, 19 nt, Homo sapiens
  misc_RNA (1)...(19): siRNA sense strand
gcuucaagaauuaucauga

SEQ ID NO: 2378305 - RNA, 19 nt, Homo sapiens
  misc_RNA (1)...(19): siRNA sense strand
ccuauaauccaauccagaa

SEQ ID NO: 2378306 - RNA, 19 nt, Homo sapiens
  misc_RNA (1)...(19): siRNA sense strand
ccauaacagcaacugaaau

SEQ ID NO: 2378307 - RNA, 19 nt, Homo sapiens
  misc_RNA (1)...(19): siRNA sense strand
cuguuuuagugaugaggaa

SEQ ID NO: 2378308 - RNA, 19 nt, Homo sapiens
  misc_RNA (1)...(19): siRNA sense strand
ggcaagcauuauucagaga

SEQ ID NO: 2378309 - RNA, 19 nt, Homo sapiens
  misc_RNA (1)...(19): siRNA sense strand
cagcaaaggucagaaaaca

SEQ ID NO: 2378310 - RNA, 19 nt, Homo sapiens
  misc_RNA (1)...(19): siRNA sense strand
cuacaagguauuucgaaaa

SEQ ID NO: 2378311 - RNA, 19 nt, Homo sapiens
  misc_RNA (1)...(19): siRNA sense strand
aaaagaagucaaaaggcaa

SEQ ID NO: 2378312 - RNA, 19 nt, Homo sapiens
  misc_RNA (1)...(19): siRNA sense strand
ggaaauucuugaagcccaa

SEQ ID NO: 2378313 - RNA, 19 nt, Homo sapiens
  misc_RNA (1)...(19): siRNA sense strand
gcagaaugggagaagaaaa

SEQ ID NO: 2378314 - RNA, 19 nt, Homo sapiens
  misc_RNA (1)...(19): siRNA sense strand
ggauaaggcaauuggguac

SEQ ID NO: 2378315 - RNA, 19 nt, Homo sapiens
  misc_RNA (1)...(19): siRNA sense strand
agaagaaaaggauggauaa

SEQ ID NO: 2378316 - RNA, 19 nt, Homo sapiens
  misc_RNA (1)...(19): siRNA sense strand
ccuuauugcagauguggaa

SEQ ID NO: 2378317 - RNA, 19 nt, Homo sapiens
  misc_RNA (1)...(19): siRNA sense strand
gcauauaaucuacugguca

SEQ ID NO: 2378318 - RNA, 19 nt, Homo sapiens
  misc_RNA (1)...(19): siRNA sense strand
uggauaaggcaauugggua

SEQ ID NO: 2378319 - RNA, 19 nt, Homo sapiens
  misc_RNA (1)...(19): siRNA sense strand
agaaauuccgcaagaggau

SEQ ID NO: 2378320 - RNA, 19 nt, Homo sapiens
  misc_RNA (1)...(19): siRNA sense strand
gaaugggacuucugggacu

SEQ ID NO: 2378321 - RNA, 19 nt, Homo sapiens
  misc_RNA (1)...(19): siRNA sense strand
ucaucaaacagcugcagaa

SEQ ID NO: 2378322 - RNA, 19 nt, Homo sapiens
  misc_RNA (1)...(19): siRNA sense strand
gagaaauuccgcaagagga

SEQ ID NO: 2378323 - RNA, 19 nt, Homo sapiens
  misc_RNA (1)...(19): siRNA sense strand
ccgcaagaggaucaucaaa

SEQ ID NO: 2378324 - RNA, 19 nt, Homo sapiens
  misc_RNA (1)...(19): siRNA sense strand
uggaaauucuugaagccca

SEQ ID NO: 2378325 - RNA, 19 nt, Homo sapiens
  misc_RNA (1)...(19): siRNA sense strand
ccucggaagguuuaaucaa

SEQ ID NO: 2378326 - RNA, 19 nt, Homo sapiens
  misc_RNA (1)...(19): siRNA sense strand
gcaaauucagcaaagcaga

SEQ ID NO: 2378327 - RNA, 19 nt, Homo sapiens
  misc_RNA (1)...(19): siRNA sense strand
cuguacaauuugcaguauu

SEQ ID NO: 2378328 - RNA, 19 nt, Homo sapiens
  misc_RNA (1)...(19): siRNA sense strand
caauauaacugaccuggca

SEQ ID NO: 2378329 - RNA, 19 nt, Homo sapiens
  misc_RNA (1)...(19): siRNA sense strand
auauaacugaccuggcaua

SEQ ID NO: 2378330 - RNA, 19 nt, Homo sapiens
  misc_RNA (1)...(19): siRNA sense strand
aaaggauggauaaggcaau

SEQ ID NO: 2378331 - RNA, 19 nt, Homo sapiens
  misc_RNA (1)...(19): siRNA sense strand
uuuaaucgugugagggaga

SEQ ID NO: 2378332 - RNA, 19 nt, Homo sapiens
  misc_RNA (1)...(19): siRNA sense strand
gcuacaagagacugugaaa

SEQ ID NO: 2378333 - RNA, 19 nt, Homo sapiens
  misc_RNA (1)...(19): siRNA sense strand
cugcagagccuuaugggaa

SEQ ID NO: 2378334 - RNA, 19 nt, Homo sapiens
  misc_RNA (1)...(19): siRNA sense strand
ugggaggacuaguggagaa

SEQ ID NO: 2378335 - RNA, 19 nt, Homo sapiens
  misc_RNA (1)...(19): siRNA sense strand
ccuuaaacaaacagcacaa

SEQ ID NO: 2378336 - RNA, 19 nt, Homo sapiens
  misc_RNA (1)...(19): siRNA sense strand
gagaagaaggagccagaau

SEQ ID NO: 2378337 - RNA, 19 nt, Homo sapiens
  misc_RNA (1)...(19): siRNA sense strand
ggaaggagcucgaucacca

SEQ ID NO: 2378338 - RNA, 19 nt, Homo sapiens
  misc_RNA (1)...(19): siRNA sense strand
ggucagagcaugcugguga

SEQ ID NO: 2378339 - RNA, 19 nt, Homo sapiens
  misc_RNA (1)...(19): siRNA sense strand
agucagucguggaugcuaa

SEQ ID NO: 2378340 - RNA, 19 nt, Homo sapiens
  misc_RNA (1)...(19): siRNA sense strand
acgcaggcaugaugggaau

SEQ ID NO: 2378341 - RNA, 19 nt, Homo sapiens
  misc_RNA (1)...(19): siRNA sense strand
gggccaaacucaugcagca

SEQ ID NO: 2378342 - RNA, 19 nt, Homo sapiens
  misc_RNA (1)...(19): siRNA sense strand
agaaacagcaacagcaaca

SEQ ID NO: 2378343 - RNA, 19 nt, Homo sapiens
  misc_RNA (1)...(19): siRNA sense strand
ccuuauagcaccacgccua

SEQ ID NO: 2378344 - RNA, 19 nt, Homo sapiens
  misc_RNA (1)...(19): siRNA sense strand
caggagagugcgagcguga

SEQ ID NO: 2378345 - RNA, 19 nt, Homo sapiens
  misc_RNA (1)...(19): siRNA sense strand
uggcaaacaaccugcagaa

SEQ ID NO: 2378346 - RNA, 19 nt, Homo sapiens
  misc_RNA (1)...(19): siRNA sense strand
cugcagaagacaacaauga

SEQ ID NO: 2378347 - RNA, 19 nt, Homo sapiens
  misc_RNA (1)...(19): siRNA sense strand
ugauagagcagcagaagca

SEQ ID NO: 2378348 - RNA, 19 nt, Homo sapiens
  misc_RNA (1)...(19): siRNA sense strand
uaauagaugaauuggccaa

SEQ ID NO: 2378349 - RNA, 19 nt, Homo sapiens
  misc_RNA (1)...(19): siRNA sense strand
ccgggaucggugugaauaa

SEQ ID NO: 2378350 - RNA, 19 nt, Homo sapiens
  misc_RNA (1)...(19): siRNA sense strand
gugcagaccuuguggacuc

SEQ ID NO: 2378351 - RNA, 19 nt, Homo sapiens
  misc_RNA (1)...(19): siRNA sense strand
aagagaagaaggagccaga

SEQ ID NO: 2378352 - RNA, 19 nt, Homo sapiens
  misc_RNA (1)...(19): siRNA sense strand
gugcgagcgugaagagcga

SEQ ID NO: 2378353 - RNA, 19 nt, Homo sapiens
  misc_RNA (1)...(19): siRNA sense strand
cgucacggcugauggcaca

SEQ ID NO: 2378354 - RNA, 19 nt, Homo sapiens
  misc_RNA (1)...(19): siRNA sense strand
ccugcaagcucaccagcaa

SEQ ID NO: 2378355 - RNA, 19 nt, Homo sapiens
  misc_RNA (1)...(19): siRNA sense strand
uggaauggugaguggcuuu

SEQ ID NO: 2378356 - RNA, 19 nt, Homo sapiens
  misc_RNA (1)...(19): siRNA sense strand
gaucaugcuacaagagacu

SEQ ID NO: 2378357 - RNA, 19 nt, Homo sapiens
  misc_RNA (1)...(19): siRNA sense strand
aagacuuugaagagaagaa

SEQ ID NO: 2378358 - RNA, 19 nt, Homo sapiens
  misc_RNA (1)...(19): siRNA sense strand
agcagaaaggagugaugaa

SEQ ID NO: 2378359 - RNA, 19 nt, Homo sapiens
  misc_RNA (1)...(19): siRNA sense strand
aggacgugucauacaauua

SEQ ID NO: 2378360 - RNA, 19 nt, Homo sapiens
  misc_RNA (1)...(19): siRNA sense strand
ggagcagagggccaagaaa

SEQ ID NO: 2378361 - RNA, 19 nt, Homo sapiens
  misc_RNA (1)...(19): siRNA sense strand
cauagacacaucagaaaca

SEQ ID NO: 2378362 - RNA, 19 nt, Homo sapiens
  misc_RNA (1)...(19): siRNA sense strand
ggaaaugguuaucuccuga

SEQ ID NO: 2378363 - RNA, 19 nt, Homo sapiens
  misc_RNA (1)...(19): siRNA sense strand
ugguaggcucccugagauu

SEQ ID NO: 2378364 - RNA, 19 nt, Homo sapiens
  misc_RNA (1)...(19): siRNA sense strand
cccucaaacuccaaaccaa

SEQ ID NO: 2378365 - RNA, 19 nt, Homo sapiens
  misc_RNA (1)...(19): siRNA sense strand
cggaacagcaguugcagca

SEQ ID NO: 2378366 - RNA, 19 nt, Homo sapiens
  misc_RNA (1)...(19): siRNA sense strand
cagaggagcuugcagggca

SEQ ID NO: 2378367 - RNA, 19 nt, Homo sapiens
  misc_RNA (1)...(19): siRNA sense strand
cuagcaaacgaauucgaaa

SEQ ID NO: 2378368 - RNA, 19 nt, Homo sapiens
  misc_RNA (1)...(19): siRNA sense strand
aaacgaauucgaaaggaca

SEQ ID NO: 2378369 - RNA, 19 nt, Homo sapiens
  misc_RNA (1)...(19): siRNA sense strand
gggaggacuaguggagaau

SEQ ID NO: 2378370 - RNA, 19 nt, Homo sapiens
  misc_RNA (1)...(19): siRNA sense strand
aguugauagagcagcagaa

SEQ ID NO: 2378371 - RNA, 19 nt, Homo sapiens
  misc_RNA (1)...(19): siRNA sense strand
aagcagcccuccagagcau

SEQ ID NO: 2378372 - RNA, 19 nt, Homo sapiens
  misc_RNA (1)...(19): siRNA sense strand
cauccaaaccaaaguggca

SEQ ID NO: 2378373 - RNA, 19 nt, Homo sapiens
  misc_RNA (1)...(19): siRNA sense strand
gaucaccacuuaauggaga

SEQ ID NO: 2378374 - RNA, 19 nt, Homo sapiens
  misc_RNA (1)...(19): siRNA sense strand
caaacgaauucgaaaggac

SEQ ID NO: 2378375 - RNA, 19 nt, Homo sapiens
  misc_RNA (1)...(19): siRNA sense strand
uugcauagacacaucagaa

SEQ ID NO: 2378376 - RNA, 19 nt, Homo sapiens
  misc_RNA (1)...(19): siRNA sense strand
ggcaguaguauuugcauca

SEQ ID NO: 2378377 - RNA, 19 nt, Homo sapiens
  misc_RNA (1)...(19): siRNA sense strand
cugcaaaggcaauaagcaa

SEQ ID NO: 2378378 - RNA, 19 nt, Homo sapiens
  misc_RNA (1)...(19): siRNA sense strand
cgauagaggaaggaggaaa

SEQ ID NO: 2378379 - RNA, 19 nt, Homo sapiens
  misc_RNA (1)...(19): siRNA sense strand
gauagaggaaggaggaaaa

SEQ ID NO: 2378380 - RNA, 19 nt, Homo sapiens
  misc_RNA (1)...(19): siRNA sense strand
gaaacaaagaagaacguga

SEQ ID NO: 2378381 - RNA, 19 nt, Homo sapiens
  misc_RNA (1)...(19): siRNA sense strand
ggaaaucaaugcagcacga

SEQ ID NO: 2378382 - RNA, 19 nt, Homo sapiens
  misc_RNA (1)...(19): siRNA sense strand
cuuuaagacaggaaaucaa

SEQ ID NO: 2378383 - RNA, 19 nt, Homo sapiens
  misc_RNA (1)...(19): siRNA sense strand
uuaaaagaccuaaggcaaa

SEQ ID NO: 2378384 - RNA, 19 nt, Homo sapiens
  misc_RNA (1)...(19): siRNA sense strand
acucauugucuuaggcuau

SEQ ID NO: 2378385 - RNA, 19 nt, Homo sapiens
  misc_RNA (1)...(19): siRNA sense strand
cugcagaaucauaugugaa

SEQ ID NO: 2378386 - RNA, 19 nt, Homo sapiens
  misc_RNA (1)...(19): siRNA sense strand
uuuaaaagaccuaaggcaa

SEQ ID NO: 2378387 - RNA, 19 nt, Homo sapiens
  misc_RNA (1)...(19): siRNA sense strand
aggcaauaagcaacaaaga

SEQ ID NO: 2378388 - RNA, 19 nt, Homo sapiens
  misc_RNA (1)...(19): siRNA sense strand
cgugaauguccuaugugua

SEQ ID NO: 2378389 - RNA, 19 nt, Homo sapiens
  misc_RNA (1)...(19): siRNA sense strand
ccuaguaugaagaggaaag

SEQ ID NO: 2378390 - RNA, 19 nt, Homo sapiens
  misc_RNA (1)...(19): siRNA sense strand
gggaaacaaagaagaacgu

SEQ ID NO: 2378391 - RNA, 19 nt, Homo sapiens
  misc_RNA (1)...(19): siRNA sense strand
gaaucauaugugaacggaa

SEQ ID NO: 2378392 - RNA, 19 nt, Homo sapiens
  misc_RNA (1)...(19): siRNA sense strand
uggugaacucauugucuua

SEQ ID NO: 2378393 - RNA, 19 nt, Homo sapiens
  misc_RNA (1)...(19): siRNA sense strand
agaggaaagacguuguaga

SEQ ID NO: 2378394 - RNA, 19 nt, Homo sapiens
  misc_RNA (1)...(19): siRNA sense strand
agaggaaggaggaaaagua

SEQ ID NO: 2378395 - RNA, 19 nt, Homo sapiens
  misc_RNA (1)...(19): siRNA sense strand
ccucaggcugcaaaggcaa

SEQ ID NO: 2378396 - RNA, 19 nt, Homo sapiens
  misc_RNA (1)...(19): siRNA sense strand
aucuaaagcaccaguaaaa

SEQ ID NO: 2378397 - RNA, 19 nt, Homo sapiens
  misc_RNA (1)...(19): siRNA sense strand
cgugaagcauuuagaagcu

SEQ ID NO: 2378398 - RNA, 19 nt, Homo sapiens
  misc_RNA (1)...(19): siRNA sense strand
caucagugguguuggggaa

SEQ ID NO: 2378399 - RNA, 19 nt, Homo sapiens
  misc_RNA (1)...(19): siRNA sense strand
gaccaaugggaaaggaaau

SEQ ID NO: 2378400 - RNA, 19 nt, Homo sapiens
  misc_RNA (1)...(19): siRNA sense strand
ggaucuagacaaagggcca

SEQ ID NO: 2378401 - RNA, 19 nt, Homo sapiens
  misc_RNA (1)...(19): siRNA sense strand
ugccaggaccaaugggaaa

SEQ ID NO: 2378402 - RNA, 19 nt, Homo sapiens
  misc_RNA (1)...(19): siRNA sense strand
gcugagaauaaauggagau

SEQ ID NO: 2378403 - RNA, 19 nt, Homo sapiens
  misc_RNA (1)...(19): siRNA sense strand
gggaacuggaucuagacaa

SEQ ID NO: 2378404 - RNA, 19 nt, Homo sapiens
  misc_RNA (1)...(19): siRNA sense strand
gcuagaugugcgugauaga

SEQ ID NO: 2378405 - RNA, 19 nt, Homo sapiens
  misc_RNA (1)...(19): siRNA sense strand
ggaaaggaaauccagguga

SEQ ID NO: 2378406 - RNA, 19 nt, Homo sapiens
  misc_RNA (1)...(19): siRNA sense strand
agaagcucgaagagauuaa

SEQ ID NO: 2378407 - RNA, 19 nt, Homo sapiens
  misc_RNA (1)...(19): siRNA sense strand
caagcuaacuccuccggaa

SEQ ID NO: 2378408 - RNA, 19 nt, Homo sapiens
  misc_RNA (1)...(19): siRNA sense strand
aagucuuagcucagaaauu

SEQ ID NO: 2378409 - RNA, 19 nt, Homo sapiens
  misc_RNA (1)...(19): siRNA sense strand
cccuaccagcugagaauaa

SEQ ID NO: 2378410 - RNA, 19 nt, Homo sapiens
  misc_RNA (1)...(19): siRNA sense strand
cugcuagaugugcgugaua

SEQ ID NO: 2378411 - RNA, 19 nt, Homo sapiens
  misc_RNA (1)...(19): siRNA sense strand
aauauuaucuggaagagga

SEQ ID NO: 2378412 - RNA, 19 nt, Homo sapiens
  misc_RNA (1)...(19): siRNA sense strand
ccugaguaucugaugaaaa

SEQ ID NO: 2378413 - RNA, 19 nt, Homo sapiens
  misc_RNA (1)...(19): siRNA sense strand
gagcuuuucaagagacuaa

SEQ ID NO: 2378414 - RNA, 19 nt, Homo sapiens
  misc_RNA (1)...(19): siRNA sense strand
auucaaaggcuggaagaca

SEQ ID NO: 2378415 - RNA, 19 nt, Homo sapiens
  misc_RNA (1)...(19): siRNA sense strand
cauugggaacccugaguau

SEQ ID NO: 2378416 - RNA, 19 nt, Homo sapiens
  misc_RNA (1)...(19): siRNA sense strand
cauaaacaacgcaggagca

SEQ ID NO: 2378417 - RNA, 19 nt, Homo sapiens
  misc_RNA (1)...(19): siRNA sense strand
cuucagagcacuuuggcaa

SEQ ID NO: 2378418 - RNA, 19 nt, Homo sapiens
  misc_RNA (1)...(19): siRNA sense strand
gaagauuacuuuaaggauc

SEQ ID NO: 2378419 - RNA, 19 nt, Homo sapiens
  misc_RNA (1)...(19): siRNA sense strand
accagaaggaagcaagaaa

SEQ ID NO: 2378420 - RNA, 19 nt, Homo sapiens
  misc_RNA (1)...(19): siRNA sense strand
acugcaaagcccaggauga

SEQ ID NO: 2378421 - RNA, 19 nt, Homo sapiens
  misc_RNA (1)...(19): siRNA sense strand
cagaaguaccagaaggaag

SEQ ID NO: 2378422 - RNA, 19 nt, Homo sapiens
  misc_RNA (1)...(19): siRNA sense strand
gcaugaaaacagggagcua

SEQ ID NO: 2378423 - RNA, 19 nt, Homo sapiens
  misc_RNA (1)...(19): siRNA sense strand
gagcuacagucaaaggagu

SEQ ID NO: 2378424 - RNA, 19 nt, Homo sapiens
  misc_RNA (1)...(19): siRNA sense strand
cuucagagcacuuuggcaa

SEQ ID NO: 2378425 - RNA, 19 nt, Homo sapiens
  misc_RNA (1)...(19): siRNA sense strand
gaagauuacuuuaaggauc

SEQ ID NO: 2378426 - RNA, 19 nt, Homo sapiens
  misc_RNA (1)...(19): siRNA sense strand
accagaaggaagcaagaaa

SEQ ID NO: 2378427 - RNA, 19 nt, Homo sapiens
  misc_RNA (1)...(19): siRNA sense strand
acugcaaagcccaggauga

SEQ ID NO: 2378428 - RNA, 19 nt, Homo sapiens
  misc_RNA (1)...(19): siRNA sense strand
cagaaguaccagaaggaag

SEQ ID NO: 2378429 - RNA, 19 nt, Homo sapiens
  misc_RNA (1)...(19): siRNA sense strand
gcaugaaaacagggagcua

SEQ ID NO: 2378430 - RNA, 19 nt, Homo sapiens
  misc_RNA (1)...(19): siRNA sense strand
gagcuacagucaaaggagu

SEQ ID NO: 2378431 - RNA, 19 nt, Homo sapiens
  misc_RNA (1)...(19): siRNA sense strand
cagaaauacuagcgggaaa

SEQ ID NO: 2378432 - RNA, 19 nt, Homo sapiens
  misc_RNA (1)...(19): siRNA sense strand
ggaugaagccagagaggaa

SEQ ID NO: 2378433 - RNA, 19 nt, Homo sapiens
  misc_RNA (1)...(19): siRNA sense strand
cgagagaagcugauggaaa

SEQ ID NO: 2378434 - RNA, 19 nt, Homo sapiens
  misc_RNA (1)...(19): siRNA sense strand
aggaagagcuauuggaaaa

SEQ ID NO: 2378435 - RNA, 19 nt, Homo sapiens
  misc_RNA (1)...(19): siRNA sense strand
ccaugaagaaggagguaaa

SEQ ID NO: 2378436 - RNA, 19 nt, Homo sapiens
  misc_RNA (1)...(19): siRNA sense strand
caguagaagaggaggaaau

SEQ ID NO: 2378437 - RNA, 19 nt, Homo sapiens
  misc_RNA (1)...(19): siRNA sense strand
agauggaaauggaaaguaa

SEQ ID NO: 2378438 - RNA, 19 nt, Homo sapiens
  misc_RNA (1)...(19): siRNA sense strand
caaacaagcuaguggacau

SEQ ID NO: 2378439 - RNA, 19 nt, Homo sapiens
  misc_RNA (1)...(19): siRNA sense strand
ggaaauggaauuaggugaa

SEQ ID NO: 2378440 - RNA, 19 nt, Homo sapiens
  misc_RNA (1)...(19): siRNA sense strand
gcuaugaguaccugggaaa

SEQ ID NO: 2378441 - RNA, 19 nt, Homo sapiens
  misc_RNA (1)...(19): siRNA sense strand
agacaaagucagugagguu

SEQ ID NO: 2378442 - RNA, 19 nt, Homo sapiens
  misc_RNA (1)...(19): siRNA sense strand
gggaaauuauccagaugaa

SEQ ID NO: 2378443 - RNA, 19 nt, Homo sapiens
  misc_RNA (1)...(19): siRNA sense strand
ggauuaagaacauggagaa

SEQ ID NO: 2378444 - RNA, 19 nt, Homo sapiens
  misc_RNA (1)...(19): siRNA sense strand
ccauaaagaaacggagaaa

SEQ ID NO: 2378445 - RNA, 19 nt, Homo sapiens
  misc_RNA (1)...(19): siRNA sense strand
guugauaguuacuggaaau

SEQ ID NO: 2378446 - RNA, 19 nt, Homo sapiens
  misc_RNA (1)...(19): siRNA sense strand
ccacauuggauuugaguuu

SEQ ID NO: 2378447 - RNA, 19 nt, Homo sapiens
  misc_RNA (1)...(19): siRNA sense strand
gagauaaagcccaccgaaa

SEQ ID NO: 2378448 - RNA, 19 nt, Homo sapiens
  misc_RNA (1)...(19): siRNA sense strand
gcuaguggacauugggaaa

SEQ ID NO: 2378449 - RNA, 19 nt, Homo sapiens
  misc_RNA (1)...(19): siRNA sense strand
aguugagacuugagggcua

SEQ ID NO: 2378450 - RNA, 19 nt, Homo sapiens
  misc_RNA (1)...(19): siRNA sense strand
cagagaaugugaagaucaa

SEQ ID NO: 2378451 - RNA, 19 nt, Homo sapiens
  misc_RNA (1)...(19): siRNA sense strand
acagcaugcuuguggguaa

SEQ ID NO: 2378452 - RNA, 19 nt, Homo sapiens
  misc_RNA (1)...(19): siRNA sense strand
cccuagaguugguggcuaa

SEQ ID NO: 2378453 - RNA, 19 nt, Homo sapiens
  misc_RNA (1)...(19): siRNA sense strand
gggacuggcaagacagaaa

SEQ ID NO: 2378454 - RNA, 19 nt, Homo sapiens
  misc_RNA (1)...(19): siRNA sense strand
aggaaauugaggaggacua

SEQ ID NO: 2378455 - RNA, 19 nt, Homo sapiens
  misc_RNA (1)...(19): siRNA sense strand
caauaaggaggaagagcua

SEQ ID NO: 2378456 - RNA, 19 nt, Homo sapiens
  misc_RNA (1)...(19): siRNA sense strand
aggaagugguugaggaguu

SEQ ID NO: 2378457 - RNA, 19 nt, Homo sapiens
  misc_RNA (1)...(19): siRNA sense strand
ggauaacacggcagagcaa

SEQ ID NO: 2378458 - RNA, 19 nt, Homo sapiens
  misc_RNA (1)...(19): siRNA sense strand
ggaagaaagcagugguguu

SEQ ID NO: 2378459 - RNA, 19 nt, Homo sapiens
  misc_RNA (1)...(19): siRNA sense strand
ggguagaggucguguccau

SEQ ID NO: 2378460 - RNA, 19 nt, Homo sapiens
  misc_RNA (1)...(19): siRNA sense strand
gauuguuggcuaugagaua

SEQ ID NO: 2378461 - RNA, 19 nt, Homo sapiens
  misc_RNA (1)...(19): siRNA sense strand
acgaugagcugcuggaaau

SEQ ID NO: 2378462 - RNA, 19 nt, Homo sapiens
  misc_RNA (1)...(19): siRNA sense strand
gaggaagagcuauuggaaa

SEQ ID NO: 2378463 - RNA, 19 nt, Homo sapiens
  misc_RNA (1)...(19): siRNA sense strand
guaaggaaauugaggagga

SEQ ID NO: 2378464 - RNA, 19 nt, Homo sapiens
  misc_RNA (1)...(19): siRNA sense strand
aggccaugcugaagaacaa

SEQ ID NO: 2378465 - RNA, 19 nt, Homo sapiens
  misc_RNA (1)...(19): siRNA sense strand
cagaaagggcugaaugauu

SEQ ID NO: 2378466 - RNA, 19 nt, Homo sapiens
  misc_RNA (1)...(19): siRNA sense strand
gguccaagcuacuaagaca

SEQ ID NO: 2378467 - RNA, 19 nt, Homo sapiens
  misc_RNA (1)...(19): siRNA sense strand
agugaugacuacagaagaa

SEQ ID NO: 2378468 - RNA, 19 nt, Homo sapiens
  misc_RNA (1)...(19): siRNA sense strand
ccucaggaacuguggcuua

SEQ ID NO: 2378469 - RNA, 19 nt, Homo sapiens
  misc_RNA (1)...(19): siRNA sense strand
ucaccaaagaggaggaaaa

SEQ ID NO: 2378470 - RNA, 19 nt, Homo sapiens
  misc_RNA (1)...(19): siRNA sense strand
aaaaggacuuggaggaaaa

SEQ ID NO: 2378471 - RNA, 19 nt, Homo sapiens
  misc_RNA (1)...(19): siRNA sense strand
uggaaagugccaagaacaa

SEQ ID NO: 2378472 - RNA, 19 nt, Homo sapiens
  misc_RNA (1)...(19): siRNA sense strand
augauuacuuggagaagaa

SEQ ID NO: 2378473 - RNA, 19 nt, Homo sapiens
  misc_RNA (1)...(19): siRNA sense strand
aaaugaugcuggugagaca

SEQ ID NO: 2378474 - RNA, 19 nt, Homo sapiens
  misc_RNA (1)...(19): siRNA sense strand
agacauaugacaaagacaa

SEQ ID NO: 2378475 - RNA, 19 nt, Homo sapiens
  misc_RNA (1)...(19): siRNA sense strand
aagaaacagugauggagaa

SEQ ID NO: 2378476 - RNA, 19 nt, Homo sapiens
  misc_RNA (1)...(19): siRNA sense strand
ucgauaaguucaagcagua

SEQ ID NO: 2378477 - RNA, 19 nt, Homo sapiens
  misc_RNA (1)...(19): siRNA sense strand
cugaaagugcugaaugaua

SEQ ID NO: 2378478 - RNA, 19 nt, Homo sapiens
  misc_RNA (1)...(19): siRNA sense strand
gcuauaugauuguaggaga

SEQ ID NO: 2378479 - RNA, 19 nt, Homo sapiens
  misc_RNA (1)...(19): siRNA sense strand
cuacuuagaccaugagauu

SEQ ID NO: 2378480 - RNA, 19 nt, Homo sapiens
  misc_RNA (1)...(19): siRNA sense strand
gaggaggaagggagugaaa

SEQ ID NO: 2378481 - RNA, 19 nt, Homo sapiens
  misc_RNA (1)...(19): siRNA sense strand
gcgcaauguuucugcauca

SEQ ID NO: 2378482 - RNA, 19 nt, Homo sapiens
  misc_RNA (1)...(19): siRNA sense strand
ugaaacagaagaaggaaau

SEQ ID NO: 2378483 - RNA, 19 nt, Homo sapiens
  misc_RNA (1)...(19): siRNA sense strand
ucaaguauccagaggagaa

SEQ ID NO: 2378484 - RNA, 19 nt, Homo sapiens
  misc_RNA (1)...(19): siRNA sense strand
ggaaaauuauccagaucua

SEQ ID NO: 2378485 - RNA, 19 nt, Homo sapiens
  misc_RNA (1)...(19): siRNA sense strand
ccauagagaaggugcuuau

SEQ ID NO: 2378486 - RNA, 19 nt, Homo sapiens
  misc_RNA (1)...(19): siRNA sense strand
aggcugacaucguggagaa

SEQ ID NO: 2378487 - RNA, 19 nt, Homo sapiens
  misc_RNA (1)...(19): siRNA sense strand
augaaacagaagaaggaaa

SEQ ID NO: 2378488 - RNA, 19 nt, Homo sapiens
  misc_RNA (1)...(19): siRNA sense strand
gggcaguagaagaggagga

SEQ ID NO: 2378489 - RNA, 19 nt, Homo sapiens
  misc_RNA (1)...(19): siRNA sense strand
ccaagaugauggugaaaau

SEQ ID NO: 2378490 - RNA, 19 nt, Homo sapiens
  misc_RNA (1)...(19): siRNA sense strand
agaagcugauggaaagaaa

SEQ ID NO: 2378491 - RNA, 19 nt, Homo sapiens
  misc_RNA (1)...(19): siRNA sense strand
cuggaaagauagucgauga

SEQ ID NO: 2378492 - RNA, 19 nt, Homo sapiens
  misc_RNA (1)...(19): siRNA sense strand
caucaaaccaauagaagca

SEQ ID NO: 2378493 - RNA, 19 nt, Homo sapiens
  misc_RNA (1)...(19): siRNA sense strand
gcacgaagagcgaggaacu

SEQ ID NO: 2378494 - RNA, 19 nt, Homo sapiens
  misc_RNA (1)...(19): siRNA sense strand
gauuauauuugaugggcca

SEQ ID NO: 2378495 - RNA, 19 nt, Homo sapiens
  misc_RNA (1)...(19): siRNA sense strand
aaucauucguggaggacau

SEQ ID NO: 2378496 - RNA, 19 nt, Homo sapiens
  misc_RNA (1)...(19): siRNA sense strand
acaaauuucuagaggaugu

SEQ ID NO: 2378497 - RNA, 19 nt, Homo sapiens
  misc_RNA (1)...(19): siRNA sense strand
acauggagaaggcgaauaa

SEQ ID NO: 2378498 - RNA, 19 nt, Homo sapiens
  misc_RNA (1)...(19): siRNA sense strand
ugacagaaacgcagauuga

SEQ ID NO: 2378499 - RNA, 19 nt, Homo sapiens
  misc_RNA (1)...(19): siRNA sense strand
uugcugaacauaugggaaa

SEQ ID NO: 2378500 - RNA, 19 nt, Homo sapiens
  misc_RNA (1)...(19): siRNA sense strand
ugauaaagacccagaccau

SEQ ID NO: 2378501 - RNA, 19 nt, Homo sapiens
  misc_RNA (1)...(19): siRNA sense strand
gcacagaugcagaagcuga

SEQ ID NO: 2378502 - RNA, 19 nt, Homo sapiens
  misc_RNA (1)...(19): siRNA sense strand
uggaagaauucaacaacau

SEQ ID NO: 2378503 - RNA, 19 nt, Homo sapiens
  misc_RNA (1)...(19): siRNA sense strand
cugccaagaugauggugaa

SEQ ID NO: 2378504 - RNA, 19 nt, Homo sapiens
  misc_RNA (1)...(19): siRNA sense strand
caagaagaggacagagaaa

SEQ ID NO: 2378505 - RNA, 19 nt, Homo sapiens
  misc_RNA (1)...(19): siRNA sense strand
ggaugagacugaugaguuu

SEQ ID NO: 2378506 - RNA, 19 nt, Homo sapiens
  misc_RNA (1)...(19): siRNA sense strand
uggugaaaguuguggaaga

SEQ ID NO: 2378507 - RNA, 19 nt, Homo sapiens
  misc_RNA (1)...(19): siRNA sense strand
aagaagaguuccuggucaa

SEQ ID NO: 2378508 - RNA, 19 nt, Homo sapiens
  misc_RNA (1)...(19): siRNA sense strand
ucaaagaggagaaggauga

SEQ ID NO: 2378509 - RNA, 19 nt, Homo sapiens
  misc_RNA (1)...(19): siRNA sense strand
auauaaggcuggauaagaa

SEQ ID NO: 2378510 - RNA, 19 nt, Homo sapiens
  misc_RNA (1)...(19): siRNA sense strand
caucaaagcuagaggggca

SEQ ID NO: 2378511 - RNA, 19 nt, Homo sapiens
  misc_RNA (1)...(19): siRNA sense strand
aagaagaaguaaaccgaau

SEQ ID NO: 2378512 - RNA, 19 nt, Homo sapiens
  misc_RNA (1)...(19): siRNA sense strand
ggucaaugucaauggguca

SEQ ID NO: 2378513 - RNA, 19 nt, Homo sapiens
  misc_RNA (1)...(19): siRNA sense strand
cuuaaagagcgcuggagaa

SEQ ID NO: 2378514 - RNA, 19 nt, Homo sapiens
  misc_RNA (1)...(19): siRNA sense strand
aggagaaggaugagacuga

SEQ ID NO: 2378515 - RNA, 19 nt, Homo sapiens
  misc_RNA (1)...(19): siRNA sense strand
ugggaaacuuugaagaaga

SEQ ID NO: 2378516 - RNA, 19 nt, Homo sapiens
  misc_RNA (1)...(19): siRNA sense strand
aggcgauacuguacaacaa

SEQ ID NO: 2378517 - RNA, 19 nt, Homo sapiens
  misc_RNA (1)...(19): siRNA sense strand
caucagaaguuuucaggaa

SEQ ID NO: 2378518 - RNA, 19 nt, Homo sapiens
  misc_RNA (1)...(19): siRNA sense strand
ugaauauaaggcuggauaa

SEQ ID NO: 2378519 - RNA, 19 nt, Homo sapiens
  misc_RNA (1)...(19): siRNA sense strand
gcuccaacacugugcagaa

SEQ ID NO: 2378520 - RNA, 19 nt, Homo sapiens
  misc_RNA (1)...(19): siRNA sense strand
gugagcagcauguggacua

SEQ ID NO: 2378521 - RNA, 19 nt, Homo sapiens
  misc_RNA (1)...(19): siRNA sense strand
gggcgaucacaguggaaga

SEQ ID NO: 2378522 - RNA, 19 nt, Homo sapiens
  misc_RNA (1)...(19): siRNA sense strand
gauaagaauuccuugacca

SEQ ID NO: 2378523 - RNA, 19 nt, Homo sapiens
  misc_RNA (1)...(19): siRNA sense strand
ugguggacguggagggcau

SEQ ID NO: 2378524 - RNA, 19 nt, Homo sapiens
  misc_RNA (1)...(19): siRNA sense strand
acuuugaauugcuggauau

SEQ ID NO: 2378525 - RNA, 19 nt, Homo sapiens
  misc_RNA (1)...(19): siRNA sense strand
acgaaacauuggcaacaaa

SEQ ID NO: 2378526 - RNA, 19 nt, Homo sapiens
  misc_RNA (1)...(19): siRNA sense strand
ugaucaaagaggagaagga

SEQ ID NO: 2378527 - RNA, 19 nt, Homo sapiens
  misc_RNA (1)...(19): siRNA sense strand
augugauacucgaaggcua

SEQ ID NO: 2378528 - RNA, 19 nt, Homo sapiens
  misc_RNA (1)...(19): siRNA sense strand
ggugguuacagaagaagaa

SEQ ID NO: 2378529 - RNA, 19 nt, Homo sapiens
  misc_RNA (1)...(19): siRNA sense strand
ccacugauuuugaggaaca

SEQ ID NO: 2378530 - RNA, 19 nt, Homo sapiens
  misc_RNA (1)...(19): siRNA sense strand
agcaagaagaggacagaga

SEQ ID NO: 2378531 - RNA, 19 nt, Homo sapiens
  misc_RNA (1)...(19): siRNA sense strand
aggcaugggaccuaagauu

SEQ ID NO: 2378532 - RNA, 19 nt, Homo sapiens
  misc_RNA (1)...(19): siRNA sense strand
ccugggaaacuuugaagaa

SEQ ID NO: 2378533 - RNA, 19 nt, Homo sapiens
  misc_RNA (1)...(19): siRNA sense strand
augaauauaaggcuggaua

SEQ ID NO: 2378534 - RNA, 19 nt, Homo sapiens
  misc_RNA (1)...(19): siRNA sense strand
ccagaggagaacaaggauu

SEQ ID NO: 2378535 - RNA, 19 nt, Homo sapiens
  misc_RNA (1)...(19): siRNA sense strand
auucacaaucgcaguaaua

SEQ ID NO: 2378536 - RNA, 19 nt, Homo sapiens
  misc_RNA (1)...(19): siRNA sense strand
auugcuggauauugggaaa

SEQ ID NO: 2378537 - RNA, 19 nt, Homo sapiens
  misc_RNA (1)...(19): siRNA sense strand
ggaauaucuacguccuaaa

SEQ ID NO: 2378538 - RNA, 19 nt, Homo sapiens
  misc_RNA (1)...(19): siRNA sense strand
gaacaaggauuacgcccau

SEQ ID NO: 2378539 - RNA, 19 nt, Homo sapiens
  misc_RNA (1)...(19): siRNA sense strand
uguguuacugaaagagaaa

SEQ ID NO: 2378540 - RNA, 19 nt, Homo sapiens
  misc_RNA (1)...(19): siRNA sense strand
gagaagaggugcuggcgcu

SEQ ID NO: 2378541 - RNA, 19 nt, Homo sapiens
  misc_RNA (1)...(19): siRNA sense strand
gaagaagaguuccugguca

SEQ ID NO: 2378542 - RNA, 19 nt, Homo sapiens
  misc_RNA (1)...(19): siRNA sense strand
ggaccaaggaagaaauauc

SEQ ID NO: 2378543 - RNA, 19 nt, Homo sapiens
  misc_RNA (1)...(19): siRNA sense strand
agauucugcugguacgaaa

SEQ ID NO: 2378544 - RNA, 19 nt, Homo sapiens
  misc_RNA (1)...(19): siRNA sense strand
gggcuguucagaugggauu

SEQ ID NO: 2378545 - RNA, 19 nt, Homo sapiens
  misc_RNA (1)...(19): siRNA sense strand
cuguguuacugaaagagaa

SEQ ID NO: 2378546 - RNA, 19 nt, Homo sapiens
  misc_RNA (1)...(19): siRNA sense strand
gggaaacaacacaucagaa

SEQ ID NO: 2378547 - RNA, 19 nt, Homo sapiens
  misc_RNA (1)...(19): siRNA sense strand
caacaagggacgucggauc

SEQ ID NO: 2378548 - RNA, 19 nt, Homo sapiens
  misc_RNA (1)...(19): siRNA sense strand
cgaucacaguggaagacuu

SEQ ID NO: 2378549 - RNA, 19 nt, Homo sapiens
  misc_RNA (1)...(19): siRNA sense strand
cugccauagacaugaauau

SEQ ID NO: 2378550 - RNA, 19 nt, Homo sapiens
  misc_RNA (1)...(19): siRNA sense strand
gcaugggaccuaagauuca

SEQ ID NO: 2378551 - RNA, 19 nt, Homo sapiens
  misc_RNA (1)...(19): siRNA sense strand
agaaguaaaccgaaugcuu

SEQ ID NO: 2378552 - RNA, 19 nt, Homo sapiens
  misc_RNA (1)...(19): siRNA sense strand
cugaaguacccguaugaga

SEQ ID NO: 2378553 - RNA, 19 nt, Homo sapiens
  misc_RNA (1)...(19): siRNA sense strand
ggaaguggaguuugagcca

SEQ ID NO: 2378554 - RNA, 19 nt, Homo sapiens
  misc_RNA (1)...(19): siRNA sense strand
ugauauguucccucaauaa

SEQ ID NO: 2378555 - RNA, 19 nt, Homo sapiens
  misc_RNA (1)...(19): siRNA sense strand
aggcaugguuccuccagaa

SEQ ID NO: 2378556 - RNA, 19 nt, Homo sapiens
  misc_RNA (1)...(19): siRNA sense strand
auucaaggacuguguuauu

SEQ ID NO: 2378557 - RNA, 19 nt, Homo sapiens
  misc_RNA (1)...(19): siRNA sense strand
cugugaagucuaugaaguu

SEQ ID NO: 2378558 - RNA, 19 nt, Homo sapiens
  misc_RNA (1)...(19): siRNA sense strand
agaaccagcuauuggaacu

SEQ ID NO: 2378559 - RNA, 19 nt, Homo sapiens
  misc_RNA (1)...(19): siRNA sense strand
agaaauacgagcuggcacu

SEQ ID NO: 2378560 - RNA, 19 nt, Homo sapiens
  misc_RNA (1)...(19): siRNA sense strand
ucugcuacucccaggguaa

SEQ ID NO: 2378561 - RNA, 19 nt, Homo sapiens
  misc_RNA (1)...(19): siRNA sense strand
cuggauauugggaaaguuu

SEQ ID NO: 2378562 - RNA, 19 nt, Homo sapiens
  misc_RNA (1)...(19): siRNA sense strand
acuuaaagagcgcuggaga

SEQ ID NO: 2378563 - RNA, 19 nt, Homo sapiens
  misc_RNA (1)...(19): siRNA sense strand
ccgagcagagacuggcaaa

SEQ ID NO: 2378564 - RNA, 19 nt, Homo sapiens
  misc_RNA (1)...(19): siRNA sense strand
aggcauuauuccagcccuu

SEQ ID NO: 2378565 - RNA, 19 nt, Homo sapiens
  misc_RNA (1)...(19): siRNA sense strand
cugaaaucaccguguacuu

SEQ ID NO: 2378566 - RNA, 19 nt, Homo sapiens
  misc_RNA (1)...(19): siRNA sense strand
auguaaagcagaugaagaa

SEQ ID NO: 2378567 - RNA, 19 nt, Homo sapiens
  misc_RNA (1)...(19): siRNA sense strand
cugaaguagauguggagaa

SEQ ID NO: 2378568 - RNA, 19 nt, Homo sapiens
  misc_RNA (1)...(19): siRNA sense strand
gaucaaagaccgaugcuga

SEQ ID NO: 2378569 - RNA, 19 nt, Homo sapiens
  misc_RNA (1)...(19): siRNA sense strand
agggaaagaaacagaucaa

SEQ ID NO: 2378570 - RNA, 19 nt, Homo sapiens
  misc_RNA (1)...(19): siRNA sense strand
cuguaacacuggugccaua

SEQ ID NO: 2378571 - RNA, 19 nt, Homo sapiens
  misc_RNA (1)...(19): siRNA sense strand
acccaggaaaugagggaua

SEQ ID NO: 2378572 - RNA, 19 nt, Homo sapiens
  misc_RNA (1)...(19): siRNA sense strand
ccuaucaaguggaagaaaa

SEQ ID NO: 2378573 - RNA, 19 nt, Homo sapiens
  misc_RNA (1)...(19): siRNA sense strand
gaucagauuccgagaccau

SEQ ID NO: 2378574 - RNA, 19 nt, Homo sapiens
  misc_RNA (1)...(19): siRNA sense strand
ugucauguuuaguggucaa

SEQ ID NO: 2378575 - RNA, 19 nt, Homo sapiens
  misc_RNA (1)...(19): siRNA sense strand
aguccagaaugaagccaaa

SEQ ID NO: 2378576 - RNA, 19 nt, Homo sapiens
  misc_RNA (1)...(19): siRNA sense strand
caaucuauacccaggaaau

SEQ ID NO: 2378577 - RNA, 19 nt, Homo sapiens
  misc_RNA (1)...(19): siRNA sense strand
gaagaaagugacagccaga

SEQ ID NO: 2378578 - RNA, 19 nt, Homo sapiens
  misc_RNA (1)...(19): siRNA sense strand
aagcagaugaagaaaguga

SEQ ID NO: 2378579 - RNA, 19 nt, Homo sapiens
  misc_RNA (1)...(19): siRNA sense strand
auauuuggaugcagaagaa

SEQ ID NO: 2378580 - RNA, 19 nt, Homo sapiens
  misc_RNA (1)...(19): siRNA sense strand
guggaaaagucuaucaaau

SEQ ID NO: 2378581 - RNA, 19 nt, Homo sapiens
  misc_RNA (1)...(19): siRNA sense strand
cauguaaagcagaugaaga

SEQ ID NO: 2378582 - RNA, 19 nt, Homo sapiens
  misc_RNA (1)...(19): siRNA sense strand
cggaugugucauagcagaa

SEQ ID NO: 2378583 - RNA, 19 nt, Homo sapiens
  misc_RNA (1)...(19): siRNA sense strand
cugaaguuaagcagaaauu

SEQ ID NO: 2378584 - RNA, 19 nt, Homo sapiens
  misc_RNA (1)...(19): siRNA sense strand
cccucaagcucaggaaaua

SEQ ID NO: 2378585 - RNA, 19 nt, Homo sapiens
  misc_RNA (1)...(19): siRNA sense strand
cugagaggguagucaauca

SEQ ID NO: 2378586 - RNA, 19 nt, Homo sapiens
  misc_RNA (1)...(19): siRNA sense strand
ggggaaggguguaaaacau

SEQ ID NO: 2378587 - RNA, 19 nt, Homo sapiens
  misc_RNA (1)...(19): siRNA sense strand
ccacaaauggacccaggaa

SEQ ID NO: 2378588 - RNA, 19 nt, Homo sapiens
  misc_RNA (1)...(19): siRNA sense strand
caggaaauuguguagauau

SEQ ID NO: 2378589 - RNA, 19 nt, Homo sapiens
  misc_RNA (1)...(19): siRNA sense strand
aggaaauuguguagauaug

SEQ ID NO: 2378590 - RNA, 19 nt, Homo sapiens
  misc_RNA (1)...(19): siRNA sense strand
guagauauguggaaacgga

SEQ ID NO: 2378591 - RNA, 19 nt, Homo sapiens
  misc_RNA (1)...(19): siRNA sense strand
gcagaugaagaaagugaca

SEQ ID NO: 2378592 - RNA, 19 nt, Homo sapiens
  misc_RNA (1)...(19): siRNA sense strand
agagaagcuuguuaugcaa

SEQ ID NO: 2378593 - RNA, 19 nt, Homo sapiens
  misc_RNA (1)...(19): siRNA sense strand
gcagaguaugucauugaaa

SEQ ID NO: 2378594 - RNA, 19 nt, Homo sapiens
  misc_RNA (1)...(19): siRNA sense strand
cuacaucaucaucggcaua

SEQ ID NO: 2378595 - RNA, 19 nt, Homo sapiens
  misc_RNA (1)...(19): siRNA sense strand
cuaugaagaaggagaguug

SEQ ID NO: 2378596 - RNA, 19 nt, Homo sapiens
  misc_RNA (1)...(19): siRNA sense strand
uugaauauuuggaugcaga

SEQ ID NO: 2378597 - RNA, 19 nt, Homo sapiens
  misc_RNA (1)...(19): siRNA sense strand
cuucuaagccaucaaguau

SEQ ID NO: 2378598 - RNA, 19 nt, Homo sapiens
  misc_RNA (1)...(19): siRNA sense strand
gcauacaggcagccaguca

SEQ ID NO: 2378599 - RNA, 19 nt, Homo sapiens
  misc_RNA (1)...(19): siRNA sense strand
acaugaaaucuccugguua

SEQ ID NO: 2378600 - RNA, 19 nt, Homo sapiens
  misc_RNA (1)...(19): siRNA sense strand
ucacaaagaaccacggcca

SEQ ID NO: 2378601 - RNA, 19 nt, Homo sapiens
  misc_RNA (1)...(19): siRNA sense strand
cgguguuucaagagguauu

SEQ ID NO: 2378602 - RNA, 19 nt, Homo sapiens
  misc_RNA (1)...(19): siRNA sense strand
accaagaauuaguccagaa

SEQ ID NO: 2378603 - RNA, 19 nt, Homo sapiens
  misc_RNA (1)...(19): siRNA sense strand
auaccuaucaaguggaaga

SEQ ID NO: 2378604 - RNA, 19 nt, Homo sapiens
  misc_RNA (1)...(19): siRNA sense strand
aaccugaaguuaagcagaa

SEQ ID NO: 2378605 - RNA, 19 nt, Homo sapiens
  misc_RNA (1)...(19): siRNA sense strand
ccaagaauuaguccagaau

SEQ ID NO: 2378606 - RNA, 19 nt, Homo sapiens
  misc_RNA (1)...(19): siRNA sense strand
ggauauucucugaugcuca

SEQ ID NO: 2378607 - RNA, 19 nt, Homo sapiens
  misc_RNA (1)...(19): siRNA sense strand
uuuggaugcagaagaauua

SEQ ID NO: 2378608 - RNA, 19 nt, Homo sapiens
  misc_RNA (1)...(19): siRNA sense strand
aagaaaagcaggucagcau

SEQ ID NO: 2378609 - RNA, 19 nt, Homo sapiens
  misc_RNA (1)...(19): siRNA sense strand
gaucauucaaauugguuca

SEQ ID NO: 2378610 - RNA, 19 nt, Homo sapiens
  misc_RNA (1)...(19): siRNA sense strand
augugaacuuguuagagaa

SEQ ID NO: 2378611 - RNA, 19 nt, Homo sapiens
  misc_RNA (1)...(19): siRNA sense strand
cugcaaacagacugcucua

SEQ ID NO: 2378612 - RNA, 19 nt, Homo sapiens
  misc_RNA (1)...(19): siRNA sense strand
agaaauaugcuaaagugga

SEQ ID NO: 2378613 - RNA, 19 nt, Homo sapiens
  misc_RNA (1)...(19): siRNA sense strand
ccucaaaauuucuaaggca

SEQ ID NO: 2378614 - RNA, 19 nt, Homo sapiens
  misc_RNA (1)...(19): siRNA sense strand
agguguuccauuugguuua

SEQ ID NO: 2378615 - RNA, 19 nt, Homo sapiens
  misc_RNA (1)...(19): siRNA sense strand
caaucaaguuagcaugcuu

SEQ ID NO: 2378616 - RNA, 19 nt, Homo sapiens
  misc_RNA (1)...(19): siRNA sense strand
gcggaugugucauagcaga

SEQ ID NO: 2378617 - RNA, 19 nt, Homo sapiens
  misc_RNA (1)...(19): siRNA sense strand
cuaucaaguggaagaaaau

SEQ ID NO: 2378618 - RNA, 19 nt, Homo sapiens
  misc_RNA (1)...(19): siRNA sense strand
gggaaagaaacagaucaaa

SEQ ID NO: 2378619 - RNA, 19 nt, Homo sapiens
  misc_RNA (1)...(19): siRNA sense strand
ccaguuuacaccacaacaa

SEQ ID NO: 2378620 - RNA, 19 nt, Homo sapiens
  misc_RNA (1)...(19): siRNA sense strand
acaugaacaaagugagaga

SEQ ID NO: 2378621 - RNA, 19 nt, Homo sapiens
  misc_RNA (1)...(19): siRNA sense strand
cugcaaauuuaucaagcau

SEQ ID NO: 2378622 - RNA, 19 nt, Homo sapiens
  misc_RNA (1)...(19): siRNA sense strand
caauaaaugccuugcugga

SEQ ID NO: 2378623 - RNA, 19 nt, Homo sapiens
  misc_RNA (1)...(19): siRNA sense strand
ugaccuuguuacuggaaaa

SEQ ID NO: 2378624 - RNA, 19 nt, Homo sapiens
  misc_RNA (1)...(19): siRNA sense strand
acaaagugagagaugaaaa

SEQ ID NO: 2378625 - RNA, 19 nt, Homo sapiens
  misc_RNA (1)...(19): siRNA sense strand
caagcaucucugugaagaa

SEQ ID NO: 2378626 - RNA, 19 nt, Homo sapiens
  misc_RNA (1)...(19): siRNA sense strand
aggaugaaguuauuagcca

SEQ ID NO: 2378627 - RNA, 19 nt, Homo sapiens
  misc_RNA (1)...(19): siRNA sense strand
caaagugagagaugaaaau

SEQ ID NO: 2378628 - RNA, 19 nt, Homo sapiens
  misc_RNA (1)...(19): siRNA sense strand
cggaggaucuagagagcca

SEQ ID NO: 2378629 - RNA, 19 nt, Homo sapiens
  misc_RNA (1)...(19): siRNA sense strand
aggacaagggagaggugaa

SEQ ID NO: 2378630 - RNA, 19 nt, Homo sapiens
  misc_RNA (1)...(19): siRNA sense strand
auggagaagcugugggaga

SEQ ID NO: 2378631 - RNA, 19 nt, Homo sapiens
  misc_RNA (1)...(19): siRNA sense strand
cuagagagccagaaggcca

SEQ ID NO: 2378632 - RNA, 19 nt, Homo sapiens
  misc_RNA (1)...(19): siRNA sense strand
gcacuguaccagagccaga

SEQ ID NO: 2378633 - RNA, 19 nt, Homo sapiens
  misc_RNA (1)...(19): siRNA sense strand
uggcguggcuuguggacga

SEQ ID NO: 2378634 - RNA, 19 nt, Homo sapiens
  misc_RNA (1)...(19): siRNA sense strand
ccagaaggaaccugaggca

SEQ ID NO: 2378635 - RNA, 19 nt, Homo sapiens
  misc_RNA (1)...(19): siRNA sense strand
acagugaggaggaggagga

SEQ ID NO: 2378636 - RNA, 19 nt, Homo sapiens
  misc_RNA (1)...(19): siRNA sense strand
gugaggaggaggaggaggu

SEQ ID NO: 2378637 - RNA, 19 nt, Homo sapiens
  misc_RNA (1)...(19): siRNA sense strand
gacugcaacaaguggcaua

SEQ ID NO: 2378638 - RNA, 19 nt, Homo sapiens
  misc_RNA (1)...(19): siRNA sense strand
gcuacaacagugaggacga

SEQ ID NO: 2378639 - RNA, 19 nt, Homo sapiens
  misc_RNA (1)...(19): siRNA sense strand
cagcaagcggcgacgucaa

SEQ ID NO: 2378640 - RNA, 19 nt, Homo sapiens
  misc_RNA (1)...(19): siRNA sense strand
cugcagugguugcgggauc

SEQ ID NO: 2378641 - RNA, 19 nt, Homo sapiens
  misc_RNA (1)...(19): siRNA sense strand
acauuaacaggaagcggaa

SEQ ID NO: 2378642 - RNA, 19 nt, Homo sapiens
  misc_RNA (1)...(19): siRNA sense strand
cuagacaguaugaagaaaa

SEQ ID NO: 2378643 - RNA, 19 nt, Homo sapiens
  misc_RNA (1)...(19): siRNA sense strand
cugaccagguguauggaga

SEQ ID NO: 2378644 - RNA, 19 nt, Homo sapiens
  misc_RNA (1)...(19): siRNA sense strand
auuaacaggaagcggaaaa

SEQ ID NO: 2378645 - RNA, 19 nt, Homo sapiens
  misc_RNA (1)...(19): siRNA sense strand
cagugucccaacaggaaua

SEQ ID NO: 2378646 - RNA, 19 nt, Homo sapiens
  misc_RNA (1)...(19): siRNA sense strand
agucauggauugaacagca

SEQ ID NO: 2378647 - RNA, 19 nt, Homo sapiens
  misc_RNA (1)...(19): siRNA sense strand
cgaaagcauugcauggacu

SEQ ID NO: 2378648 - RNA, 19 nt, Homo sapiens
  misc_RNA (1)...(19): siRNA sense strand
ggccuggaggaguggacua

SEQ ID NO: 2378649 - RNA, 19 nt, Homo sapiens
  misc_RNA (1)...(19): siRNA sense strand
gguugcgggaucaggagaa

SEQ ID NO: 2378650 - RNA, 19 nt, Homo sapiens
  misc_RNA (1)...(19): siRNA sense strand
cguuaaacacccugaaaua

SEQ ID NO: 2378651 - RNA, 19 nt, Homo sapiens
  misc_RNA (1)...(19): siRNA sense strand
agauaaaguggcugggaaa

SEQ ID NO: 2378652 - RNA, 19 nt, Homo sapiens
  misc_RNA (1)...(19): siRNA sense strand
ucacauagcugaagggcau

SEQ ID NO: 2378653 - RNA, 19 nt, Homo sapiens
  misc_RNA (1)...(19): siRNA sense strand
agaauaaggugauggucaa

SEQ ID NO: 2378654 - RNA, 19 nt, Homo sapiens
  misc_RNA (1)...(19): siRNA sense strand
uagaagaaacagagagauu

SEQ ID NO: 2378655 - RNA, 19 nt, Homo sapiens
  misc_RNA (1)...(19): siRNA sense strand
gaacaaggcccgaaggaga

SEQ ID NO: 2378656 - RNA, 19 nt, Homo sapiens
  misc_RNA (1)...(19): siRNA sense strand
gggugaaaguucugaugaa

SEQ ID NO: 2378657 - RNA, 19 nt, Homo sapiens
  misc_RNA (1)...(19): siRNA sense strand
agaagauagucaaggagaa

SEQ ID NO: 2378658 - RNA, 19 nt, Homo sapiens
  misc_RNA (1)...(19): siRNA sense strand
aaucaaaggccaaggaaca

SEQ ID NO: 2378659 - RNA, 19 nt, Homo sapiens
  misc_RNA (1)...(19): siRNA sense strand
acaaagaacugcagagacu

SEQ ID NO: 2378660 - RNA, 19 nt, Homo sapiens
  misc_RNA (1)...(19): siRNA sense strand
uggaagaagcaaaggaaga

SEQ ID NO: 2378661 - RNA, 19 nt, Homo sapiens
  misc_RNA (1)...(19): siRNA sense strand
ggauaguacugaugaggau

SEQ ID NO: 2378662 - RNA, 19 nt, Homo sapiens
  misc_RNA (1)...(19): siRNA sense strand
aggaagaaggugagacauu

SEQ ID NO: 2378663 - RNA, 19 nt, Homo sapiens
  misc_RNA (1)...(19): siRNA sense strand
gcuuuguggugaagugaaa

SEQ ID NO: 2378664 - RNA, 19 nt, Homo sapiens
  misc_RNA (1)...(19): siRNA sense strand
uauauuaaggugugggaua

SEQ ID NO: 2378665 - RNA, 19 nt, Homo sapiens
  misc_RNA (1)...(19): siRNA sense strand
uuuagugggucuagagaua

SEQ ID NO: 2378666 - RNA, 19 nt, Homo sapiens
  misc_RNA (1)...(19): siRNA sense strand
ggacaggagcccagcagaa

SEQ ID NO: 2378667 - RNA, 19 nt, Homo sapiens
  misc_RNA (1)...(19): siRNA sense strand
aagcaaaggaagaagguga

SEQ ID NO: 2378668 - RNA, 19 nt, Homo sapiens
  misc_RNA (1)...(19): siRNA sense strand
uggaaugaauacagagaca

SEQ ID NO: 2378669 - RNA, 19 nt, Homo sapiens
  misc_RNA (1)...(19): siRNA sense strand
caacauaaaauucgggaua

SEQ ID NO: 2378670 - RNA, 19 nt, Homo sapiens
  misc_RNA (1)...(19): siRNA sense strand
aagugaaaccuaagaacaa

SEQ ID NO: 2378671 - RNA, 19 nt, Homo sapiens
  misc_RNA (1)...(19): siRNA sense strand
gcuacaggcgagagggcaa

SEQ ID NO: 2378672 - RNA, 19 nt, Homo sapiens
  misc_RNA (1)...(19): siRNA sense strand
cagagcaggugaaggaaau

SEQ ID NO: 2378673 - RNA, 19 nt, Homo sapiens
  misc_RNA (1)...(19): siRNA sense strand
ugaaagaagaacaagagaa

SEQ ID NO: 2378674 - RNA, 19 nt, Homo sapiens
  misc_RNA (1)...(19): siRNA sense strand
cagauaaaguggcugggaa

SEQ ID NO: 2378675 - RNA, 19 nt, Homo sapiens
  misc_RNA (1)...(19): siRNA sense strand
aggaggaggaggaggaaga

SEQ ID NO: 2378676 - RNA, 19 nt, Homo sapiens
  misc_RNA (1)...(19): siRNA sense strand
gcacauaaggauugggucu

SEQ ID NO: 2378677 - RNA, 19 nt, Homo sapiens
  misc_RNA (1)...(19): siRNA sense strand
cagcaggaugugauggaaa

SEQ ID NO: 2378678 - RNA, 19 nt, Homo sapiens
  misc_RNA (1)...(19): siRNA sense strand
caucaguucagcaggauaa

SEQ ID NO: 2378679 - RNA, 19 nt, Homo sapiens
  misc_RNA (1)...(19): siRNA sense strand
caacaaauggaaacaggaa

SEQ ID NO: 2378680 - RNA, 19 nt, Homo sapiens
  misc_RNA (1)...(19): siRNA sense strand
aagaagaggaggaggagga

SEQ ID NO: 2378681 - RNA, 19 nt, Homo sapiens
  misc_RNA (1)...(19): siRNA sense strand
gagaauggagagggagaua

SEQ ID NO: 2378682 - RNA, 19 nt, Homo sapiens
  misc_RNA (1)...(19): siRNA sense strand
cauacuauccucagacaaa

SEQ ID NO: 2378683 - RNA, 19 nt, Homo sapiens
  misc_RNA (1)...(19): siRNA sense strand
aagagaaggcagaauuaaa

SEQ ID NO: 2378684 - RNA, 19 nt, Homo sapiens
  misc_RNA (1)...(19): siRNA sense strand
uaacaaggagaaaggcaua

SEQ ID NO: 2378685 - RNA, 19 nt, Homo sapiens
  misc_RNA (1)...(19): siRNA sense strand
agaaggagcucuugggacu

SEQ ID NO: 2378686 - RNA, 19 nt, Homo sapiens
  misc_RNA (1)...(19): siRNA sense strand
acacugaccaagagaagaa

SEQ ID NO: 2378687 - RNA, 19 nt, Homo sapiens
  misc_RNA (1)...(19): siRNA sense strand
acauaaugcagauggaaga

SEQ ID NO: 2378688 - RNA, 19 nt, Homo sapiens
  misc_RNA (1)...(19): siRNA sense strand
gguacuucugcuagggaaa

SEQ ID NO: 2378689 - RNA, 19 nt, Homo sapiens
  misc_RNA (1)...(19): siRNA sense strand
ugacaaugcaacugauaau

SEQ ID NO: 2378690 - RNA, 19 nt, Homo sapiens
  misc_RNA (1)...(19): siRNA sense strand
guacaaaacagguaaaaga

SEQ ID NO: 2378691 - RNA, 19 nt, Homo sapiens
  misc_RNA (1)...(19): siRNA sense strand
acaaauggaaacaggaaaa

SEQ ID NO: 2378692 - RNA, 19 nt, Homo sapiens
  misc_RNA (1)...(19): siRNA sense strand
gaacaaaagcacucagauu

SEQ ID NO: 2378693 - RNA, 19 nt, Homo sapiens
  misc_RNA (1)...(19): siRNA sense strand
ccaaaugcacauaaggauu

SEQ ID NO: 2378694 - RNA, 19 nt, Homo sapiens
  misc_RNA (1)...(19): siRNA sense strand
aggagaauggagagggaga

SEQ ID NO: 2378695 - RNA, 19 nt, Homo sapiens
  misc_RNA (1)...(19): siRNA sense strand
cagaauaagaccacagcuu

SEQ ID NO: 2378696 - RNA, 19 nt, Homo sapiens
  misc_RNA (1)...(19): siRNA sense strand
cgacucaaacaaacagaaa

SEQ ID NO: 2378697 - RNA, 19 nt, Homo sapiens
  misc_RNA (1)...(19): siRNA sense strand
gacaagagcaagagggcca

SEQ ID NO: 2378698 - RNA, 19 nt, Homo sapiens
  misc_RNA (1)...(19): siRNA sense strand
agaaaagaaaagaggaaga

SEQ ID NO: 2378699 - RNA, 19 nt, Homo sapiens
  misc_RNA (1)...(19): siRNA sense strand
ccaagagaagaaagaagaa

SEQ ID NO: 2378700 - RNA, 19 nt, Homo sapiens
  misc_RNA (1)...(19): siRNA sense strand
augaauuagaaguggaaga

SEQ ID NO: 2378701 - RNA, 19 nt, Homo sapiens
  misc_RNA (1)...(19): siRNA sense strand
ucgcaaaacugaagagguu

SEQ ID NO: 2378702 - RNA, 19 nt, Homo sapiens
  misc_RNA (1)...(19): siRNA sense strand
cguaaugaacugaauguuu

SEQ ID NO: 2378703 - RNA, 19 nt, Homo sapiens
  misc_RNA (1)...(19): siRNA sense strand
aagaauaaggugaugguca

SEQ ID NO: 2378704 - RNA, 19 nt, Homo sapiens
  misc_RNA (1)...(19): siRNA sense strand
gugaaggaaaugaggagau

SEQ ID NO: 2378705 - RNA, 19 nt, Homo sapiens
  misc_RNA (1)...(19): siRNA sense strand
agaaagugaagcagugaau

SEQ ID NO: 2378706 - RNA, 19 nt, Homo sapiens
  misc_RNA (1)...(19): siRNA sense strand
caugaagcuuuguggugaa

SEQ ID NO: 2378707 - RNA, 19 nt, Homo sapiens
  misc_RNA (1)...(19): siRNA sense strand
augaagaagaggaggagga

SEQ ID NO: 2378708 - RNA, 19 nt, Homo sapiens
  misc_RNA (1)...(19): siRNA sense strand
gaauagacuccucaagcaa

SEQ ID NO: 2378709 - RNA, 19 nt, Homo sapiens
  misc_RNA (1)...(19): siRNA sense strand
caggauaagucugaugaaa

SEQ ID NO: 2378710 - RNA, 19 nt, Homo sapiens
  misc_RNA (1)...(19): siRNA sense strand
ccagagcaggugaaggaaa

SEQ ID NO: 2378711 - RNA, 19 nt, Homo sapiens
  misc_RNA (1)...(19): siRNA sense strand
ucuagaagaaacagagaga

SEQ ID NO: 2378712 - RNA, 19 nt, Homo sapiens
  misc_RNA (1)...(19): siRNA sense strand
gaagauagucaaggagaau

SEQ ID NO: 2378713 - RNA, 19 nt, Homo sapiens
  misc_RNA (1)...(19): siRNA sense strand
aggagaaagcugaacauaa

SEQ ID NO: 2378714 - RNA, 19 nt, Homo sapiens
  misc_RNA (1)...(19): siRNA sense strand
gugaagaagaagagcuaga

SEQ ID NO: 2378715 - RNA, 19 nt, Homo sapiens
  misc_RNA (1)...(19): siRNA sense strand
gaauaaagagugagccaca

SEQ ID NO: 2378716 - RNA, 19 nt, Homo sapiens
  misc_RNA (1)...(19): siRNA sense strand
agaagaaaguagaagaaac

SEQ ID NO: 2378717 - RNA, 19 nt, Homo sapiens
  misc_RNA (1)...(19): siRNA sense strand
cuuuauggaaugugaagaa

SEQ ID NO: 2378718 - RNA, 19 nt, Homo sapiens
  misc_RNA (1)...(19): siRNA sense strand
aggaauaaagagugagcca

SEQ ID NO: 2378719 - RNA, 19 nt, Homo sapiens
  misc_RNA (1)...(19): siRNA sense strand
ucacugagaaagagccaaa

SEQ ID NO: 2378720 - RNA, 19 nt, Homo sapiens
  misc_RNA (1)...(19): siRNA sense strand
gaacaaugaaagcugggaa

SEQ ID NO: 2378721 - RNA, 19 nt, Homo sapiens
  misc_RNA (1)...(19): siRNA sense strand
cauuugaaacagagcauau

SEQ ID NO: 2378722 - RNA, 19 nt, Homo sapiens
  misc_RNA (1)...(19): siRNA sense strand
augugaagaagaagagcua

SEQ ID NO: 2378723 - RNA, 19 nt, Homo sapiens
  misc_RNA (1)...(19): siRNA sense strand
agaagaagagcuagagcca

SEQ ID NO: 2378724 - RNA, 19 nt, Homo sapiens
  misc_RNA (1)...(19): siRNA sense strand
gagccaaagacuuacacaa

SEQ ID NO: 2378725 - RNA, 19 nt, Homo sapiens
  misc_RNA (1)...(19): siRNA sense strand
gccuaaagaacuagaagga

SEQ ID NO: 2378726 - RNA, 19 nt, Homo sapiens
  misc_RNA (1)...(19): siRNA sense strand
guuaauacaaguaagccaa

SEQ ID NO: 2378727 - RNA, 19 nt, Homo sapiens
  misc_RNA (1)...(19): siRNA sense strand
acuuggaacuugagaagca

SEQ ID NO: 2378728 - RNA, 19 nt, Homo sapiens
  misc_RNA (1)...(19): siRNA sense strand
aacaaugaaagcugggaaa

SEQ ID NO: 2378729 - RNA, 19 nt, Homo sapiens
  misc_RNA (1)...(19): siRNA sense strand
uagcuaaguccaaagcaaa

SEQ ID NO: 2378730 - RNA, 19 nt, Homo sapiens
  misc_RNA (1)...(19): siRNA sense strand
cagaagaaaguagaagaaa

SEQ ID NO: 2378731 - RNA, 19 nt, Homo sapiens
  misc_RNA (1)...(19): siRNA sense strand
gugaugaagacaagacuga

SEQ ID NO: 2378732 - RNA, 19 nt, Homo sapiens
  misc_RNA (1)...(19): siRNA sense strand
ggcuaaacacuuaagucaa

SEQ ID NO: 2378733 - RNA, 19 nt, Homo sapiens
  misc_RNA (1)...(19): siRNA sense strand
auagcuaaguccaaagcaa

SEQ ID NO: 2378734 - RNA, 19 nt, Homo sapiens
  misc_RNA (1)...(19): siRNA sense strand
aagaagagcuagagccaug

SEQ ID NO: 2378735 - RNA, 19 nt, Homo sapiens
  misc_RNA (1)...(19): siRNA sense strand
ggcagaagaaaguagaaga

SEQ ID NO: 2378736 - RNA, 19 nt, Homo sapiens
  misc_RNA (1)...(19): siRNA sense strand
agaaaguagaagaaacuca

SEQ ID NO: 2378737 - RNA, 19 nt, Homo sapiens
  misc_RNA (1)...(19): siRNA sense strand
gagcuagagccauggcaga

SEQ ID NO: 2378738 - RNA, 19 nt, Homo sapiens
  misc_RNA (1)...(19): siRNA sense strand
uggaaugugaagaagaaga

SEQ ID NO: 2378739 - RNA, 19 nt, Homo sapiens
  misc_RNA (1)...(19): siRNA sense strand
uggcuaaacacuuaaguca

SEQ ID NO: 2378740 - RNA, 19 nt, Homo sapiens
  misc_RNA (1)...(19): siRNA sense strand
uuacaugaagcaucagaaa

SEQ ID NO: 2378741 - RNA, 19 nt, Homo sapiens
  misc_RNA (1)...(19): siRNA sense strand
cuucuaaaguaaacagugu

SEQ ID NO: 2378742 - RNA, 19 nt, Homo sapiens
  misc_RNA (1)...(19): siRNA sense strand
aagauguuccucagauaaa

SEQ ID NO: 2378743 - RNA, 19 nt, Homo sapiens
  misc_RNA (1)...(19): siRNA sense strand
gagcuuguccaaagugcaa

SEQ ID NO: 2378744 - RNA, 19 nt, Homo sapiens
  misc_RNA (1)...(19): siRNA sense strand
accaaagaccagugaagau

SEQ ID NO: 2378745 - RNA, 19 nt, Homo sapiens
  misc_RNA (1)...(19): siRNA sense strand
agacaggaaaguugaucau

SEQ ID NO: 2378746 - RNA, 19 nt, Homo sapiens
  misc_RNA (1)...(19): siRNA sense strand
ucacaaguuggaucggaua

SEQ ID NO: 2378747 - RNA, 19 nt, Homo sapiens
  misc_RNA (1)...(19): siRNA sense strand
guuuaugaaccacaugaaa

SEQ ID NO: 2378748 - RNA, 19 nt, Homo sapiens
  misc_RNA (1)...(19): siRNA sense strand
cucuguuacuguugagaau

SEQ ID NO: 2378749 - RNA, 19 nt, Homo sapiens
  misc_RNA (1)...(19): siRNA sense strand
aaggagucacugagaaaga

SEQ ID NO: 2378750 - RNA, 19 nt, Homo sapiens
  misc_RNA (1)...(19): siRNA sense strand
ccucaaaguuaguaaaaug

SEQ ID NO: 2378751 - RNA, 19 nt, Homo sapiens
  misc_RNA (1)...(19): siRNA sense strand
gggcauuacucuagugugc

SEQ ID NO: 2378752 - RNA, 19 nt, Homo sapiens
  misc_RNA (1)...(19): siRNA sense strand
acaaguaagcuucaugcaa

SEQ ID NO: 2378753 - RNA, 19 nt, Homo sapiens
  misc_RNA (1)...(19): siRNA sense strand
aguuaauacaaguaagcca

SEQ ID NO: 2378754 - RNA, 19 nt, Homo sapiens
  misc_RNA (1)...(19): siRNA sense strand
ccaagacauaccagcaauu

SEQ ID NO: 2378755 - RNA, 19 nt, Homo sapiens
  misc_RNA (1)...(19): siRNA sense strand
uuaugaaccacaugaaaca

SEQ ID NO: 2378756 - RNA, 19 nt, Homo sapiens
  misc_RNA (1)...(19): siRNA sense strand
agugcaauguucaguucaa

SEQ ID NO: 2378757 - RNA, 19 nt, Homo sapiens
  misc_RNA (1)...(19): siRNA sense strand
ccaaagacuuacacaaccu

SEQ ID NO: 2378758 - RNA, 19 nt, Homo sapiens
  misc_RNA (1)...(19): siRNA sense strand
gaacuugagaagcagaaca

SEQ ID NO: 2378759 - RNA, 19 nt, Homo sapiens
  misc_RNA (1)...(19): siRNA sense strand
cccaaguuaugcugucaaa

SEQ ID NO: 2378760 - RNA, 19 nt, Homo sapiens
  misc_RNA (1)...(19): siRNA sense strand
acguauagcuaaguccaaa

SEQ ID NO: 2378761 - RNA, 19 nt, Homo sapiens
  misc_RNA (1)...(19): siRNA sense strand
agaacguccaugugaugaa

SEQ ID NO: 2378762 - RNA, 19 nt, Homo sapiens
  misc_RNA (1)...(19): siRNA sense strand
guccaugugaugaagacaa

SEQ ID NO: 2378763 - RNA, 19 nt, Homo sapiens
  misc_RNA (1)...(19): siRNA sense strand
augaaggagucacugagaa

SEQ ID NO: 2378764 - RNA, 19 nt, Homo sapiens
  misc_RNA (1)...(19): siRNA sense strand
acccauaaaccuggugaaa

SEQ ID NO: 2378765 - RNA, 19 nt, Homo sapiens
  misc_RNA (1)...(19): siRNA sense strand
gaagaaaagcagagagcau

SEQ ID NO: 2378766 - RNA, 19 nt, Homo sapiens
  misc_RNA (1)...(19): siRNA sense strand
gggaaauucuggagauucu

SEQ ID NO: 2378767 - RNA, 19 nt, Homo sapiens
  misc_RNA (1)...(19): siRNA sense strand
cuuuaaguauggaggaaaa

SEQ ID NO: 2378768 - RNA, 19 nt, Homo sapiens
  misc_RNA (1)...(19): siRNA sense strand
gagaacaagcuaaaggauu

SEQ ID NO: 2378769 - RNA, 19 nt, Homo sapiens
  misc_RNA (1)...(19): siRNA sense strand
gagaaauaccucagggacu

SEQ ID NO: 2378770 - RNA, 19 nt, Homo sapiens
  misc_RNA (1)...(19): siRNA sense strand
ggucaagauuacuguccua

SEQ ID NO: 2378771 - RNA, 19 nt, Homo sapiens
  misc_RNA (1)...(19): siRNA sense strand
gaggagaggcugagggaac

SEQ ID NO: 2378772 - RNA, 19 nt, Homo sapiens
  misc_RNA (1)...(19): siRNA sense strand
acgagaaggcugagaaguu

SEQ ID NO: 2378773 - RNA, 19 nt, Homo sapiens
  misc_RNA (1)...(19): siRNA sense strand
gagaaaagcaaaacgacaa

SEQ ID NO: 2378774 - RNA, 19 nt, Homo sapiens
  misc_RNA (1)...(19): siRNA sense strand
ccucaggaaagaagggauu

SEQ ID NO: 2378775 - RNA, 19 nt, Homo sapiens
  misc_RNA (1)...(19): siRNA sense strand
aaggaaacucauagaagaa

SEQ ID NO: 2378776 - RNA, 19 nt, Homo sapiens
  misc_RNA (1)...(19): siRNA sense strand
cgaugaaggauaaugagaa

SEQ ID NO: 2378777 - RNA, 19 nt, Homo sapiens
  misc_RNA (1)...(19): siRNA sense strand
cccaugaaucgcagggaaa

SEQ ID NO: 2378778 - RNA, 19 nt, Homo sapiens
  misc_RNA (1)...(19): siRNA sense strand
guuaaaguaugcagagcuu

SEQ ID NO: 2378779 - RNA, 19 nt, Homo sapiens
  misc_RNA (1)...(19): siRNA sense strand
ucugaaaugccaugugaaa

SEQ ID NO: 2378780 - RNA, 19 nt, Homo sapiens
  misc_RNA (1)...(19): siRNA sense strand
gacuagaggagcaggagaa

SEQ ID NO: 2378781 - RNA, 19 nt, Homo sapiens
  misc_RNA (1)...(19): siRNA sense strand
aggcugaacuggagcggau

SEQ ID NO: 2378782 - RNA, 19 nt, Homo sapiens
  misc_RNA (1)...(19): siRNA sense strand
aggauuuacuugcggagaa

SEQ ID NO: 2378783 - RNA, 19 nt, Homo sapiens
  misc_RNA (1)...(19): siRNA sense strand
uggaagaggagaagaggga

SEQ ID NO: 2378784 - RNA, 19 nt, Homo sapiens
  misc_RNA (1)...(19): siRNA sense strand
cggaagugccucaagauuu

SEQ ID NO: 2378785 - RNA, 19 nt, Homo sapiens
  misc_RNA (1)...(19): siRNA sense strand
gcuuccacaucgagaacaa

SEQ ID NO: 2378786 - RNA, 19 nt, Homo sapiens
  misc_RNA (1)...(19): siRNA sense strand
gcagaagaagagacaagaa

SEQ ID NO: 2378787 - RNA, 19 nt, Homo sapiens
  misc_RNA (1)...(19): siRNA sense strand
aaauaugagcggaugguuu

SEQ ID NO: 2378788 - RNA, 19 nt, Homo sapiens
  misc_RNA (1)...(19): siRNA sense strand
gcauggagauugaagagca

SEQ ID NO: 2378789 - RNA, 19 nt, Homo sapiens
  misc_RNA (1)...(19): siRNA sense strand
cagcugaaacagaagauuu

SEQ ID NO: 2378790 - RNA, 19 nt, Homo sapiens
  misc_RNA (1)...(19): siRNA sense strand
cgacaaucacaaacuuaaa

SEQ ID NO: 2378791 - RNA, 19 nt, Homo sapiens
  misc_RNA (1)...(19): siRNA sense strand
ggaaagaagggauuggagu

SEQ ID NO: 2378792 - RNA, 19 nt, Homo sapiens
  misc_RNA (1)...(19): siRNA sense strand
agaagagacaagaagaaga

SEQ ID NO: 2378793 - RNA, 19 nt, Homo sapiens
  misc_RNA (1)...(19): siRNA sense strand
gacaagaagaagagaccuu

SEQ ID NO: 2378794 - RNA, 19 nt, Homo sapiens
  misc_RNA (1)...(19): siRNA sense strand
gaaauaaggaugaacgugu

SEQ ID NO: 2378795 - RNA, 19 nt, Homo sapiens
  misc_RNA (1)...(19): siRNA sense strand
gcuuuaaguauggaggaaa

SEQ ID NO: 2378796 - RNA, 19 nt, Homo sapiens
  misc_RNA (1)...(19): siRNA sense strand
ccgccaagcucagggagaa

SEQ ID NO: 2378797 - RNA, 19 nt, Homo sapiens
  misc_RNA (1)...(19): siRNA sense strand
auauaaagaacgccagcua

SEQ ID NO: 2378798 - RNA, 19 nt, Homo sapiens
  misc_RNA (1)...(19): siRNA sense strand
ccaaagacgccuucaggau

SEQ ID NO: 2378799 - RNA, 19 nt, Homo sapiens
  misc_RNA (1)...(19): siRNA sense strand
uugucaagcuagugaacuu

SEQ ID NO: 2378800 - RNA, 19 nt, Homo sapiens
  misc_RNA (1)...(19): siRNA sense strand
agaaggaccaggagagguu

SEQ ID NO: 2378801 - RNA, 19 nt, Homo sapiens
  misc_RNA (1)...(19): siRNA sense strand
cagcgcaaggagacagaaa

SEQ ID NO: 2378802 - RNA, 19 nt, Homo sapiens
  misc_RNA (1)...(19): siRNA sense strand
uagaaaaggaaauggaaga

SEQ ID NO: 2378803 - RNA, 19 nt, Homo sapiens
  misc_RNA (1)...(19): siRNA sense strand
aaaagaaguccaagaagaa

SEQ ID NO: 2378804 - RNA, 19 nt, Homo sapiens
  misc_RNA (1)...(19): siRNA sense strand
ccaggagagguuagaauau

SEQ ID NO: 2378805 - RNA, 19 nt, Homo sapiens
  misc_RNA (1)...(19): siRNA sense strand
auaacgaacgugugagaga

SEQ ID NO: 2378806 - RNA, 19 nt, Homo sapiens
  misc_RNA (1)...(19): siRNA sense strand
guguugacuugguuguuaa

SEQ ID NO: 2378807 - RNA, 19 nt, Homo sapiens
  misc_RNA (1)...(19): siRNA sense strand
gccuugacuuggagaguga

SEQ ID NO: 2378808 - RNA, 19 nt, Homo sapiens
  misc_RNA (1)...(19): siRNA sense strand
acaucgagaacaagcuaaa

SEQ ID NO: 2378809 - RNA, 19 nt, Homo sapiens
  misc_RNA (1)...(19): siRNA sense strand
ugagggaacagcaggaaau

SEQ ID NO: 2378810 - RNA, 19 nt, Homo sapiens
  misc_RNA (1)...(19): siRNA sense strand
agcugaaacagaagauuua

SEQ ID NO: 2378811 - RNA, 19 nt, Homo sapiens
  misc_RNA (1)...(19): siRNA sense strand
gguuagaauaugaaaucca

SEQ ID NO: 2378812 - RNA, 19 nt, Homo sapiens
  misc_RNA (1)...(19): siRNA sense strand
cgaacgugugagagaucua

SEQ ID NO: 2378813 - RNA, 19 nt, Homo sapiens
  misc_RNA (1)...(19): siRNA sense strand
ggagaaaagcaaaacgaca

SEQ ID NO: 2378814 - RNA, 19 nt, Homo sapiens
  misc_RNA (1)...(19): siRNA sense strand
agacagaaaucgugcagcu

SEQ ID NO: 2378815 - RNA, 19 nt, Homo sapiens
  misc_RNA (1)...(19): siRNA sense strand
aggagaaggagcaggucau

SEQ ID NO: 2378816 - RNA, 19 nt, Homo sapiens
  misc_RNA (1)...(19): siRNA sense strand
ccauuaaugaggaugccaa

SEQ ID NO: 2378817 - RNA, 19 nt, Homo sapiens
  misc_RNA (1)...(19): siRNA sense strand
caagaauugaccaaggaau

SEQ ID NO: 2378818 - RNA, 19 nt, Homo sapiens
  misc_RNA (1)...(19): siRNA sense strand
gggaacagcaggaaaucga

SEQ ID NO: 2378819 - RNA, 19 nt, Homo sapiens
  misc_RNA (1)...(19): siRNA sense strand
aggaaaucgagcugcagaa

SEQ ID NO: 2378820 - RNA, 19 nt, Homo sapiens
  misc_RNA (1)...(19): siRNA sense strand
ugaagaggcucaaggugca

SEQ ID NO: 2378821 - RNA, 19 nt, Homo sapiens
  misc_RNA (1)...(19): siRNA sense strand
uagcaaacggacaggcuga

SEQ ID NO: 2378822 - RNA, 19 nt, Homo sapiens
  misc_RNA (1)...(19): siRNA sense strand
ggacaggcugacaacgcaa

SEQ ID NO: 2378823 - RNA, 19 nt, Homo sapiens
  misc_RNA (1)...(19): siRNA sense strand
ugggcaaccugcugcggaa

SEQ ID NO: 2378824 - RNA, 19 nt, Homo sapiens
  misc_RNA (1)...(19): siRNA sense strand
acgccggagugcagcagua

SEQ ID NO: 2378825 - RNA, 19 nt, Homo sapiens
  misc_RNA (1)...(19): siRNA sense strand
cggaagcuguguucgccaa

SEQ ID NO: 2378826 - RNA, 19 nt, Homo sapiens
  misc_RNA (1)...(19): siRNA sense strand
gaaaacucuucgugggcau

SEQ ID NO: 2378827 - RNA, 19 nt, Homo sapiens
  misc_RNA (1)...(19): siRNA sense strand
gggaaaucuuuuagccaaa

SEQ ID NO: 2378828 - RNA, 19 nt, Homo sapiens
  misc_RNA (1)...(19): siRNA sense strand
gggaaaucuuuuagccaaa

SEQ ID NO: 2378829 - RNA, 19 nt, Homo sapiens
  misc_RNA (1)...(19): siRNA sense strand
agucaaugcaggagagagu

SEQ ID NO: 2378830 - RNA, 19 nt, Homo sapiens
  misc_RNA (1)...(19): siRNA sense strand
guguggugaaugugggaaa

SEQ ID NO: 2378831 - RNA, 19 nt, Homo sapiens
  misc_RNA (1)...(19): siRNA sense strand
guguggugaaugugggaaa

SEQ ID NO: 2378832 - RNA, 19 nt, Homo sapiens
  misc_RNA (1)...(19): siRNA sense strand
ugaagagacaccugagcaa

SEQ ID NO: 2378833 - RNA, 19 nt, Homo sapiens
  misc_RNA (1)...(19): siRNA sense strand
uggaaagugacauggacaa

SEQ ID NO: 2378834 - RNA, 19 nt, Homo sapiens
  misc_RNA (1)...(19): siRNA sense strand
gcaaaugugaggaggccuu

SEQ ID NO: 2378835 - RNA, 19 nt, Homo sapiens
  misc_RNA (1)...(19): siRNA sense strand
ggagaaaggccuuacgagu

SEQ ID NO: 2378836 - RNA, 19 nt, Homo sapiens
  misc_RNA (1)...(19): siRNA sense strand
cagaauucacacuggagaa

SEQ ID NO: 2378837 - RNA, 19 nt, Homo sapiens
  misc_RNA (1)...(19): siRNA sense strand
ccauaugaguguggugaau

SEQ ID NO: 2378838 - RNA, 19 nt, Homo sapiens
  misc_RNA (1)...(19): siRNA sense strand
ccauaugaguguggcaaau

SEQ ID NO: 2378839 - RNA, 19 nt, Homo sapiens
  misc_RNA (1)...(19): siRNA sense strand
agacaaagcuucagccuug

SEQ ID NO: 2378840 - RNA, 19 nt, Homo sapiens
  misc_RNA (1)...(19): siRNA sense strand
cuaacuaugagaagccaaa

SEQ ID NO: 2378841 - RNA, 19 nt, Homo sapiens
  misc_RNA (1)...(19): siRNA sense strand
cugaaugaucaucggagaa

SEQ ID NO: 2378842 - RNA, 19 nt, Homo sapiens
  misc_RNA (1)...(19): siRNA sense strand
augugaugcuggagaacuu

SEQ ID NO: 2378843 - RNA, 19 nt, Homo sapiens
  misc_RNA (1)...(19): siRNA sense strand
gugugaugaauguggaaaa

SEQ ID NO: 2378844 - RNA, 19 nt, Homo sapiens
  misc_RNA (1)...(19): siRNA sense strand
gugggaaauuauucagaca

SEQ ID NO: 2378845 - RNA, 19 nt, Homo sapiens
  misc_RNA (1)...(19): siRNA sense strand
ggugaaugugggaaauuau

SEQ ID NO: 2378846 - RNA, 19 nt, Homo sapiens
  misc_RNA (1)...(19): siRNA sense strand
cagcagcaaauguggaaaa

SEQ ID NO: 2378847 - RNA, 19 nt, Homo sapiens
  misc_RNA (1)...(19): siRNA sense strand
cugcagaagcuaaacuuau

SEQ ID NO: 2378848 - RNA, 19 nt, Homo sapiens
  misc_RNA (1)...(19): siRNA sense strand
guguggucagugugggaaa

SEQ ID NO: 2378849 - RNA, 19 nt, Homo sapiens
  misc_RNA (1)...(19): siRNA sense strand
ucauuuagccaaagagcca

SEQ ID NO: 2378850 - RNA, 19 nt, Homo sapiens
  misc_RNA (1)...(19): siRNA sense strand
cggaaaauccuuuagccaa

SEQ ID NO: 2378851 - RNA, 19 nt, Homo sapiens
  misc_RNA (1)...(19): siRNA sense strand
gagaacucacacaggagaa

SEQ ID NO: 2378852 - RNA, 19 nt, Homo sapiens
  misc_RNA (1)...(19): siRNA sense strand
ccucaauaaacaccacaaa

SEQ ID NO: 2378853 - RNA, 19 nt, Homo sapiens
  misc_RNA (1)...(19): siRNA sense strand
guggagaggccucgugaca

SEQ ID NO: 2378854 - RNA, 19 nt, Homo sapiens
  misc_RNA (1)...(19): siRNA sense strand
aggagagaguccagccaca

SEQ ID NO: 2378855 - RNA, 19 nt, Homo sapiens
  misc_RNA (1)...(19): siRNA sense strand
ggaaaacccuacagcccaa

SEQ ID NO: 2378856 - RNA, 19 nt, Homo sapiens
  misc_RNA (1)...(19): siRNA sense strand
gcuuuaugaaucuagcaaa

SEQ ID NO: 2378857 - RNA, 19 nt, Homo sapiens
  misc_RNA (1)...(19): siRNA sense strand
ccucgugacagcagcaaau

SEQ ID NO: 2378858 - RNA, 19 nt, Homo sapiens
  misc_RNA (1)...(19): siRNA sense strand
cgugacugcagaagcuaaa

SEQ ID NO: 2378859 - RNA, 19 nt, Homo sapiens
  misc_RNA (1)...(19): siRNA sense strand
ccuuugaggacguggccau

SEQ ID NO: 2378860 - RNA, 19 nt, Homo sapiens
  misc_RNA (1)...(19): siRNA sense strand
ccaaacaaaaucagcaaau

SEQ ID NO: 2378861 - RNA, 19 nt, Homo sapiens
  misc_RNA (1)...(19): siRNA sense strand
cccuacagcccaagaucua

SEQ ID NO: 2378862 - RNA, 19 nt, Homo sapiens
  misc_RNA (1)...(19): siRNA sense strand
gagaacucacacuggagaa

SEQ ID NO: 2378863 - RNA, 19 nt, Homo sapiens
  misc_RNA (1)...(19): siRNA sense strand
ucugaaugaucaucggaga

SEQ ID NO: 2378864 - RNA, 19 nt, Homo sapiens
  misc_RNA (1)...(19): siRNA sense strand
ggucagugugggaaaucau

SEQ ID NO: 2378865 - RNA, 19 nt, Homo sapiens
  misc_RNA (1)...(19): siRNA sense strand
agaauucacacuacagcaa

SEQ ID NO: 2378866 - RNA, 19 nt, Homo sapiens
  misc_RNA (1)...(19): siRNA sense strand
gagugugaugagugcggaa

SEQ ID NO: 2378867 - RNA, 19 nt, Homo sapiens
  misc_RNA (1)...(19): siRNA sense strand
acacaggagaaaagccaua

SEQ ID NO: 2378868 - RNA, 19 nt, Homo sapiens
  misc_RNA (1)...(19): siRNA sense strand
agaaaggccauaugagugu

SEQ ID NO: 2378869 - RNA, 19 nt, Homo sapiens
  misc_RNA (1)...(19): siRNA sense strand
gaaucuagcaaauguggga

SEQ ID NO: 2378870 - RNA, 19 nt, Homo sapiens
  misc_RNA (1)...(19): siRNA sense strand
cagaguucacacuggagaa

SEQ ID NO: 2378871 - RNA, 19 nt, Homo sapiens
  misc_RNA (1)...(19): siRNA sense strand
cuuauugaacauugcagaa

SEQ ID NO: 2378872 - RNA, 19 nt, Homo sapiens
  misc_RNA (1)...(19): siRNA sense strand
ccacaaaguucacacugca

SEQ ID NO: 2378873 - RNA, 19 nt, Homo sapiens
  misc_RNA (1)...(19): siRNA sense strand
cuaugagaagccaaacaaa

SEQ ID NO: 2378874 - RNA, 19 nt, Homo sapiens
  misc_RNA (1)...(19): siRNA sense strand
ggugaaugugggaaaucuu

SEQ ID NO: 2378875 - RNA, 19 nt, Homo sapiens
  misc_RNA (1)...(19): siRNA sense strand
gggaaagcuuuuauguuca

SEQ ID NO: 2378876 - RNA, 19 nt, Homo sapiens
  misc_RNA (1)...(19): siRNA sense strand
gggaagaaaagaaggggaa

SEQ ID NO: 2378877 - RNA, 19 nt, Homo sapiens
  misc_RNA (1)...(19): siRNA sense strand
gggaagaaaagaaggggaa

SEQ ID NO: 2378878 - RNA, 19 nt, Homo sapiens
  misc_RNA (1)...(19): siRNA sense strand
ccacauaggaaaaccaaaa

SEQ ID NO: 2378879 - RNA, 19 nt, Homo sapiens
  misc_RNA (1)...(19): siRNA sense strand
ggaagaagaccaagaccca

SEQ ID NO: 2378880 - RNA, 19 nt, Homo sapiens
  misc_RNA (1)...(19): siRNA sense strand
ggaagaagaccaaggccca

SEQ ID NO: 2378881 - RNA, 19 nt, Homo sapiens
  misc_RNA (1)...(19): siRNA sense strand
augaugaggaagaggaaga

SEQ ID NO: 2378882 - RNA, 19 nt, Homo sapiens
  misc_RNA (1)...(19): siRNA sense strand
gggagaugccgaaggcuga

SEQ ID NO: 2378883 - RNA, 19 nt, Homo sapiens
  misc_RNA (1)...(19): siRNA sense strand
gggaaggggaagaaaagaa

SEQ ID NO: 2378884 - RNA, 19 nt, Homo sapiens
  misc_RNA (1)...(19): siRNA sense strand
aaaagaaggagaaggggaa

SEQ ID NO: 2378885 - RNA, 19 nt, Homo sapiens
  misc_RNA (1)...(19): siRNA sense strand
aguccugggaugaagguua

SEQ ID NO: 2378886 - RNA, 19 nt, Homo sapiens
  misc_RNA (1)...(19): siRNA sense strand
uuacaggacucacuggaua

SEQ ID NO: 2378887 - RNA, 19 nt, Homo sapiens
  misc_RNA (1)...(19): siRNA sense strand
ucacauuugaggaagacaa

SEQ ID NO: 2378888 - RNA, 19 nt, Homo sapiens
  misc_RNA (1)...(19): siRNA sense strand
aagaagaggaagaagacca

SEQ ID NO: 2378889 - RNA, 19 nt, Homo sapiens
  misc_RNA (1)...(19): siRNA sense strand
acgaagaaaagaaggagaa

SEQ ID NO: 2378890 - RNA, 19 nt, Homo sapiens
  misc_RNA (1)...(19): siRNA sense strand
gaaguuacgggaagggaga

SEQ ID NO: 2378891 - RNA, 19 nt, Homo sapiens
  misc_RNA (1)...(19): siRNA sense strand
aguugagguggcugagaaa

SEQ ID NO: 2378892 - RNA, 19 nt, Homo sapiens
  misc_RNA (1)...(19): siRNA sense strand
gagaaggggaagaaaagaa

SEQ ID NO: 2378893 - RNA, 19 nt, Homo sapiens
  misc_RNA (1)...(19): siRNA sense strand
ggaugaagguuauucgacu

SEQ ID NO: 2378894 - RNA, 19 nt, Homo sapiens
  misc_RNA (1)...(19): siRNA sense strand
agucugaagaggaggaagu

SEQ ID NO: 2378895 - RNA, 19 nt, Homo sapiens
  misc_RNA (1)...(19): siRNA sense strand
accaagaagaggaagaaga

SEQ ID NO: 2378896 - RNA, 19 nt, Homo sapiens
  misc_RNA (1)...(19): siRNA sense strand
ugggagaaauugaaaagaa

SEQ ID NO: 2378897 - RNA, 19 nt, Homo sapiens
  misc_RNA (1)...(19): siRNA sense strand
aggaccaagaagaggaaga

SEQ ID NO: 2378898 - RNA, 19 nt, Homo sapiens
  misc_RNA (1)...(19): siRNA sense strand
cauuagaggaacagcaagu

SEQ ID NO: 2378899 - RNA, 19 nt, Homo sapiens
  misc_RNA (1)...(19): siRNA sense strand
aaaagaaggggaaggggaa

SEQ ID NO: 2378900 - RNA, 19 nt, Homo sapiens
  misc_RNA (1)...(19): siRNA sense strand
uggcugagaaagugcagaa

SEQ ID NO: 2378901 - RNA, 19 nt, Homo sapiens
  misc_RNA (1)...(19): siRNA sense strand
acacauuaucccagaaaau

SEQ ID NO: 2378902 - RNA, 19 nt, Homo sapiens
  misc_RNA (1)...(19): siRNA sense strand
agaaguggaagaagaccaa

SEQ ID NO: 2378903 - RNA, 19 nt, Homo sapiens
  misc_RNA (1)...(19): siRNA sense strand
ggauagauguuauucgacu

SEQ ID NO: 2378904 - RNA, 19 nt, Homo sapiens
  misc_RNA (1)...(19): siRNA sense strand
aaggagaaggggaagaaaa

SEQ ID NO: 2378905 - RNA, 19 nt, Homo sapiens
  misc_RNA (1)...(19): siRNA sense strand
ggauagauguuauucgacu

SEQ ID NO: 2378906 - RNA, 19 nt, Homo sapiens
  misc_RNA (1)...(19): siRNA sense strand
acucauuggaggaacagua

SEQ ID NO: 2378907 - RNA, 19 nt, Homo sapiens
  misc_RNA (1)...(19): siRNA sense strand
gggaagaagaucaacgaag

SEQ ID NO: 2378908 - RNA, 19 nt, Homo sapiens
  misc_RNA (1)...(19): siRNA sense strand
ugaugaugaggaagaggaa

SEQ ID NO: 2378909 - RNA, 19 nt, Homo sapiens
  misc_RNA (1)...(19): siRNA sense strand
gcaacaggucccaggcuca

SEQ ID NO: 2378910 - RNA, 19 nt, Homo sapiens
  misc_RNA (1)...(19): siRNA sense strand
gaaaagaaggggaagggga

SEQ ID NO: 2378911 - RNA, 19 nt, Homo sapiens
  misc_RNA (1)...(19): siRNA sense strand
gaaaagaaggagaagggga

SEQ ID NO: 2378912 - RNA, 19 nt, Homo sapiens
  misc_RNA (1)...(19): siRNA sense strand
aggagaagcuugcagagca

SEQ ID NO: 2378913 - RNA, 19 nt, Homo sapiens
  misc_RNA (1)...(19): siRNA sense strand
augaggaagaggaagaaaa

SEQ ID NO: 2378914 - RNA, 19 nt, Homo sapiens
  misc_RNA (1)...(19): siRNA sense strand
gaagaaaagaaggggaaga

SEQ ID NO: 2378915 - RNA, 19 nt, Homo sapiens
  misc_RNA (1)...(19): siRNA sense strand
gaagaaaagaaggggaaga

SEQ ID NO: 2378916 - RNA, 19 nt, Homo sapiens
  misc_RNA (1)...(19): siRNA sense strand
uggaaguggaagagccuga

SEQ ID NO: 2378917 - RNA, 19 nt, Homo sapiens
  misc_RNA (1)...(19): siRNA sense strand
aguaccaagaaguggaaga

SEQ ID NO: 2378918 - RNA, 19 nt, Homo sapiens
  misc_RNA (1)...(19): siRNA sense strand
ugacguggacagaauuaaa

SEQ ID NO: 2378919 - RNA, 19 nt, Homo sapiens
  misc_RNA (1)...(19): siRNA sense strand
uuucuuacuuugaugggaa

SEQ ID NO: 2378920 - RNA, 19 nt, Homo sapiens
  misc_RNA (1)...(19): siRNA sense strand
agggagaaguuacgggaag

SEQ ID NO: 2378921 - RNA, 19 nt, Homo sapiens
  misc_RNA (1)...(19): siRNA sense strand
uuuacauauuggagcaaca

SEQ ID NO: 2378922 - RNA, 19 nt, Homo sapiens
  misc_RNA (1)...(19): siRNA sense strand
agaagaucaacgaagaaaa

SEQ ID NO: 2378923 - RNA, 19 nt, Homo sapiens
  misc_RNA (1)...(19): siRNA sense strand
ggagaagcuugcagagcag

SEQ ID NO: 2378924 - RNA, 19 nt, Homo sapiens
  misc_RNA (1)...(19): siRNA sense strand
ugccgaaggcugaagaaaa

SEQ ID NO: 2378925 - RNA, 19 nt, Homo sapiens
  misc_RNA (1)...(19): siRNA sense strand
guacacauuaucccagaaa

SEQ ID NO: 2378926 - RNA, 19 nt, Homo sapiens
  misc_RNA (1)...(19): siRNA sense strand
cagaagugccuuuuacaua

SEQ ID NO: 2378927 - RNA, 19 nt, Homo sapiens
  misc_RNA (1)...(19): siRNA sense strand
aagaagaucaacgaagaaa

SEQ ID NO: 2378928 - RNA, 19 nt, Homo sapiens
  misc_RNA (1)...(19): siRNA sense strand
cagaaaaugacaacgauga

SEQ ID NO: 2378929 - RNA, 19 nt, Homo sapiens
  misc_RNA (1)...(19): siRNA sense strand
acaacgaugacgaugaaga

SEQ ID NO: 2378930 - RNA, 19 nt, Homo sapiens
  misc_RNA (1)...(19): siRNA sense strand
aagaaaagaaggggaagaa

SEQ ID NO: 2378931 - RNA, 19 nt, Homo sapiens
  misc_RNA (1)...(19): siRNA sense strand
aagaaaagaaggggaagaa

SEQ ID NO: 2378932 - RNA, 19 nt, Homo sapiens
  misc_RNA (1)...(19): siRNA sense strand
ggaagaagaucaaaaccca

SEQ ID NO: 2378933 - RNA, 19 nt, Homo sapiens
  misc_RNA (1)...(19): siRNA sense strand
gggagaaauugaaaagaag

SEQ ID NO: 2378934 - RNA, 19 nt, Homo sapiens
  misc_RNA (1)...(19): siRNA sense strand
cauuugaggaacagcacau

SEQ ID NO: 2378935 - RNA, 19 nt, Homo sapiens
  misc_RNA (1)...(19): siRNA sense strand
agaaaguagcgaagagaaa

SEQ ID NO: 2378936 - RNA, 19 nt, Homo sapiens
  misc_RNA (1)...(19): siRNA sense strand
aggaaugacaagagaagaa

SEQ ID NO: 2378937 - RNA, 19 nt, Homo sapiens
  misc_RNA (1)...(19): siRNA sense strand
agaugauguugcagcgaaa

SEQ ID NO: 2378938 - RNA, 19 nt, Homo sapiens
  misc_RNA (1)...(19): siRNA sense strand
ccugaagcauagugggauu

SEQ ID NO: 2378939 - RNA, 19 nt, Homo sapiens
  misc_RNA (1)...(19): siRNA sense strand
aagaaagggagcagagaga

SEQ ID NO: 2378940 - RNA, 19 nt, Homo sapiens
  misc_RNA (1)...(19): siRNA sense strand
ugaggaagaagcugggaaa

SEQ ID NO: 2378941 - RNA, 19 nt, Homo sapiens
  misc_RNA (1)...(19): siRNA sense strand
ccucaaacuacaaaggaau

SEQ ID NO: 2378942 - RNA, 19 nt, Homo sapiens
  misc_RNA (1)...(19): siRNA sense strand
ggaugauguaaaugagcaa

SEQ ID NO: 2378943 - RNA, 19 nt, Homo sapiens
  misc_RNA (1)...(19): siRNA sense strand
augaagaggaagaagaauu

SEQ ID NO: 2378944 - RNA, 19 nt, Homo sapiens
  misc_RNA (1)...(19): siRNA sense strand
ggagaauaagggagaggau

SEQ ID NO: 2378945 - RNA, 19 nt, Homo sapiens
  misc_RNA (1)...(19): siRNA sense strand
aaaucagcauugagggcaa

SEQ ID NO: 2378946 - RNA, 19 nt, Homo sapiens
  misc_RNA (1)...(19): siRNA sense strand
gguaaaagaagcagaagau

SEQ ID NO: 2378947 - RNA, 19 nt, Homo sapiens
  misc_RNA (1)...(19): siRNA sense strand
agugaagagaccaggaaau

SEQ ID NO: 2378948 - RNA, 19 nt, Homo sapiens
  misc_RNA (1)...(19): siRNA sense strand
ccaugaucgucaagaugaa

SEQ ID NO: 2378949 - RNA, 19 nt, Homo sapiens
  misc_RNA (1)...(19): siRNA sense strand
gugaugaagaggaagaaga

SEQ ID NO: 2378950 - RNA, 19 nt, Homo sapiens
  misc_RNA (1)...(19): siRNA sense strand
ugaugaagaggaagaagaa

SEQ ID NO: 2378951 - RNA, 19 nt, Homo sapiens
  misc_RNA (1)...(19): siRNA sense strand
cccaaggagucaaggucua

SEQ ID NO: 2378952 - RNA, 19 nt, Homo sapiens
  misc_RNA (1)...(19): siRNA sense strand
cgccagugauucugagauu

SEQ ID NO: 2378953 - RNA, 19 nt, Homo sapiens
  misc_RNA (1)...(19): siRNA sense strand
aggaagaagcugggaaaga

SEQ ID NO: 2378954 - RNA, 19 nt, Homo sapiens
  misc_RNA (1)...(19): siRNA sense strand
cuggauaaacagaugagaa

SEQ ID NO: 2378955 - RNA, 19 nt, Homo sapiens
  misc_RNA (1)...(19): siRNA sense strand
cggugaggaugauguaaau

SEQ ID NO: 2378956 - RNA, 19 nt, Homo sapiens
  misc_RNA (1)...(19): siRNA sense strand
gugaggaggaagaacacaa

SEQ ID NO: 2378957 - RNA, 19 nt, Homo sapiens
  misc_RNA (1)...(19): siRNA sense strand
aaugaguggucuaggccua

SEQ ID NO: 2378958 - RNA, 19 nt, Homo sapiens
  misc_RNA (1)...(19): siRNA sense strand
aaacgaagauguugggaag

SEQ ID NO: 2378959 - RNA, 19 nt, Homo sapiens
  misc_RNA (1)...(19): siRNA sense strand
agaauaagggagaggauac

SEQ ID NO: 2378960 - RNA, 19 nt, Homo sapiens
  misc_RNA (1)...(19): siRNA sense strand
aagacagacaguugaacaa

SEQ ID NO: 2378961 - RNA, 19 nt, Homo sapiens
  misc_RNA (1)...(19): siRNA sense strand
gagugaagagaccaggaaa

SEQ ID NO: 2378962 - RNA, 19 nt, Homo sapiens
  misc_RNA (1)...(19): siRNA sense strand
ggaacuucuuaaugggcau

SEQ ID NO: 2378963 - RNA, 19 nt, Homo sapiens
  misc_RNA (1)...(19): siRNA sense strand
ugacaagagaagaaaggga

SEQ ID NO: 2378964 - RNA, 19 nt, Homo sapiens
  misc_RNA (1)...(19): siRNA sense strand
gaaagggagcagagagauc

SEQ ID NO: 2378965 - RNA, 19 nt, Homo sapiens
  misc_RNA (1)...(19): siRNA sense strand
aagagaaagcaucagcaaa

SEQ ID NO: 2378966 - RNA, 19 nt, Homo sapiens
  misc_RNA (1)...(19): siRNA sense strand
aaggugaaacacagguaaa

SEQ ID NO: 2378967 - RNA, 19 nt, Homo sapiens
  misc_RNA (1)...(19): siRNA sense strand
acagcgacagggagaauaa

SEQ ID NO: 2378968 - RNA, 19 nt, Homo sapiens
  misc_RNA (1)...(19): siRNA sense strand
cugauagugaggaggaaga

SEQ ID NO: 2378969 - RNA, 19 nt, Homo sapiens
  misc_RNA (1)...(19): siRNA sense strand
aggcaaugaagaagaaaau

SEQ ID NO: 2378970 - RNA, 19 nt, Homo sapiens
  misc_RNA (1)...(19): siRNA sense strand
gcauagugggauuggacga

SEQ ID NO: 2378971 - RNA, 19 nt, Homo sapiens
  misc_RNA (1)...(19): siRNA sense strand
gaugacagcgacagggaga

SEQ ID NO: 2378972 - RNA, 19 nt, Homo sapiens
  misc_RNA (1)...(19): siRNA sense strand
caucugacagugaggaaga

SEQ ID NO: 2378973 - RNA, 19 nt, Homo sapiens
  misc_RNA (1)...(19): siRNA sense strand
cagcacugguggucagaca

SEQ ID NO: 2378974 - RNA, 19 nt, Homo sapiens
  misc_RNA (1)...(19): siRNA sense strand
gcaaaagagagaagaccau

SEQ ID NO: 2378975 - RNA, 19 nt, Homo sapiens
  misc_RNA (1)...(19): siRNA sense strand
accaagaagaucuggaaga

SEQ ID NO: 2378976 - RNA, 19 nt, Homo sapiens
  misc_RNA (1)...(19): siRNA sense strand
acggugaggaugauguaaa

SEQ ID NO: 2378977 - RNA, 19 nt, Homo sapiens
  misc_RNA (1)...(19): siRNA sense strand
cugcugaggaagacagaca

SEQ ID NO: 2378978 - RNA, 19 nt, Homo sapiens
  misc_RNA (1)...(19): siRNA sense strand
caaaggaaugacaagagaa

SEQ ID NO: 2378979 - RNA, 19 nt, Homo sapiens
  misc_RNA (1)...(19): siRNA sense strand
ugauucagaaagugaggaa

SEQ ID NO: 2378980 - RNA, 19 nt, Homo sapiens
  misc_RNA (1)...(19): siRNA sense strand
gaagaugaagagaaagcau

SEQ ID NO: 2378981 - RNA, 19 nt, Homo sapiens
  misc_RNA (1)...(19): siRNA sense strand
gaggaaaacauauggacuu

SEQ ID NO: 2378982 - RNA, 19 nt, Homo sapiens
  misc_RNA (1)...(19): siRNA sense strand
ggagaaggcucuuagaccu

SEQ ID NO: 2378983 - RNA, 19 nt, Homo sapiens
  misc_RNA (1)...(19): siRNA sense strand
caagaaggguaucggucga

SEQ ID NO: 2378984 - RNA, 19 nt, Homo sapiens
  misc_RNA (1)...(19): siRNA sense strand
cagcauugagggcaacaaa

SEQ ID NO: 2378985 - RNA, 19 nt, Homo sapiens
  misc_RNA (1)...(19): siRNA sense strand
gagaaugaaacuagugauc

SEQ ID NO: 2378986 - RNA, 19 nt, Homo sapiens
  misc_RNA (1)...(19): siRNA sense strand
caaacagaagccagaguca

SEQ ID NO: 2378987 - RNA, 19 nt, Homo sapiens
  misc_RNA (1)...(19): siRNA sense strand
guacaggaugaacgggauu

SEQ ID NO: 2378988 - RNA, 19 nt, Homo sapiens
  misc_RNA (1)...(19): siRNA sense strand
acagggagaauaagggaga

SEQ ID NO: 2378989 - RNA, 19 nt, Homo sapiens
  misc_RNA (1)...(19): siRNA sense strand
acaaggacauggcagggaa

SEQ ID NO: 2378990 - RNA, 19 nt, Homo sapiens
  misc_RNA (1)...(19): siRNA sense strand
ggguaucggucgacuggau

SEQ ID NO: 2378991 - RNA, 19 nt, Homo sapiens
  misc_RNA (1)...(19): siRNA sense strand
agagaaagcaucagcaaag

SEQ ID NO: 2378992 - RNA, 19 nt, Homo sapiens
  misc_RNA (1)...(19): siRNA sense strand
cgugagagagagagagaaa

SEQ ID NO: 2378993 - RNA, 19 nt, Homo sapiens
  misc_RNA (1)...(19): siRNA sense strand
aaucaaaggauguggaaga

SEQ ID NO: 2378994 - RNA, 19 nt, Homo sapiens
  misc_RNA (1)...(19): siRNA sense strand
acuacagauuagaggauaa

SEQ ID NO: 2378995 - RNA, 19 nt, Homo sapiens
  misc_RNA (1)...(19): siRNA sense strand
aggcgaugauaaagauaaa

SEQ ID NO: 2378996 - RNA, 19 nt, Homo sapiens
  misc_RNA (1)...(19): siRNA sense strand
ugaucgaagucgugagaga

SEQ ID NO: 2378997 - RNA, 19 nt, Homo sapiens
  misc_RNA (1)...(19): siRNA sense strand
ucgagaagcuucaggguga

SEQ ID NO: 2378998 - RNA, 19 nt, Homo sapiens
  misc_RNA (1)...(19): siRNA sense strand
agaaagacguagaucgaga

SEQ ID NO: 2378999 - RNA, 19 nt, Homo sapiens
  misc_RNA (1)...(19): siRNA sense strand
gcaaggaggcugauggaga

SEQ ID NO: 2379000 - RNA, 19 nt, Homo sapiens
  misc_RNA (1)...(19): siRNA sense strand
ccucuaaagauaaggaaaa

SEQ ID NO: 2379001 - RNA, 19 nt, Homo sapiens
  misc_RNA (1)...(19): siRNA sense strand
cugcauuacaacagcaaua

SEQ ID NO: 2379002 - RNA, 19 nt, Homo sapiens
  misc_RNA (1)...(19): siRNA sense strand
gcaugaaaggcaaggauga

SEQ ID NO: 2379003 - RNA, 19 nt, Homo sapiens
  misc_RNA (1)...(19): siRNA sense strand
ggaaacgucaagaggaaau

SEQ ID NO: 2379004 - RNA, 19 nt, Homo sapiens
  misc_RNA (1)...(19): siRNA sense strand
cgagaugacaaaagagaua

SEQ ID NO: 2379005 - RNA, 19 nt, Homo sapiens
  misc_RNA (1)...(19): siRNA sense strand
gugcaaagguaaugcugau

SEQ ID NO: 2379006 - RNA, 19 nt, Homo sapiens
  misc_RNA (1)...(19): siRNA sense strand
agaagaaagagaugaugaa

SEQ ID NO: 2379007 - RNA, 19 nt, Homo sapiens
  misc_RNA (1)...(19): siRNA sense strand
agaggaagaagaaaggaaa

SEQ ID NO: 2379008 - RNA, 19 nt, Homo sapiens
  misc_RNA (1)...(19): siRNA sense strand
cgucgagaaagaagauaua

SEQ ID NO: 2379009 - RNA, 19 nt, Homo sapiens
  misc_RNA (1)...(19): siRNA sense strand
ccucaaaagaugaagagaa

SEQ ID NO: 2379010 - RNA, 19 nt, Homo sapiens
  misc_RNA (1)...(19): siRNA sense strand
ugagagagagagagaaaga

SEQ ID NO: 2379011 - RNA, 19 nt, Homo sapiens
  misc_RNA (1)...(19): siRNA sense strand
agcuuaaaguagaggaaca

SEQ ID NO: 2379012 - RNA, 19 nt, Homo sapiens
  misc_RNA (1)...(19): siRNA sense strand
augaagaagagaaggauga

SEQ ID NO: 2379013 - RNA, 19 nt, Homo sapiens
  misc_RNA (1)...(19): siRNA sense strand
aaguaagagcugagguaga

SEQ ID NO: 2379014 - RNA, 19 nt, Homo sapiens
  misc_RNA (1)...(19): siRNA sense strand
ccucagaagcagcguguuu

SEQ ID NO: 2379015 - RNA, 19 nt, Homo sapiens
  misc_RNA (1)...(19): siRNA sense strand
acuuuauacucuuggacua

SEQ ID NO: 2379016 - RNA, 19 nt, Homo sapiens
  misc_RNA (1)...(19): siRNA sense strand
acgauaaagaggaagaaga

SEQ ID NO: 2379017 - RNA, 19 nt, Homo sapiens
  misc_RNA (1)...(19): siRNA sense strand
uguaaugcacagagaagua

SEQ ID NO: 2379018 - RNA, 19 nt, Homo sapiens
  misc_RNA (1)...(19): siRNA sense strand
aaucagaaucagucgcaaa

SEQ ID NO: 2379019 - RNA, 19 nt, Homo sapiens
  misc_RNA (1)...(19): siRNA sense strand
acgaagagagcgagagcga

SEQ ID NO: 2379020 - RNA, 19 nt, Homo sapiens
  misc_RNA (1)...(19): siRNA sense strand
gcuuaaaguagaggaacaa

SEQ ID NO: 2379021 - RNA, 19 nt, Homo sapiens
  misc_RNA (1)...(19): siRNA sense strand
gaggaugaugauaggaaau

SEQ ID NO: 2379022 - RNA, 19 nt, Homo sapiens
  misc_RNA (1)...(19): siRNA sense strand
acguagaucgagagaaaga

SEQ ID NO: 2379023 - RNA, 19 nt, Homo sapiens
  misc_RNA (1)...(19): siRNA sense strand
ugaugaaacugaugaacca

SEQ ID NO: 2379024 - RNA, 19 nt, Homo sapiens
  misc_RNA (1)...(19): siRNA sense strand
agucauugcaggaagauau

SEQ ID NO: 2379025 - RNA, 19 nt, Homo sapiens
  misc_RNA (1)...(19): siRNA sense strand
agagaaagacguagaucga

SEQ ID NO: 2379026 - RNA, 19 nt, Homo sapiens
  misc_RNA (1)...(19): siRNA sense strand
agacaaugaagguaaauga

SEQ ID NO: 2379027 - RNA, 19 nt, Homo sapiens
  misc_RNA (1)...(19): siRNA sense strand
gcaacaacaguuacagcaa

SEQ ID NO: 2379028 - RNA, 19 nt, Homo sapiens
  misc_RNA (1)...(19): siRNA sense strand
aagaggaagaagaaaggaa

SEQ ID NO: 2379029 - RNA, 19 nt, Homo sapiens
  misc_RNA (1)...(19): siRNA sense strand
agaaacuuaucuacgguaa

SEQ ID NO: 2379030 - RNA, 19 nt, Homo sapiens
  misc_RNA (1)...(19): siRNA sense strand
ugaggaugaugauaggaaa

SEQ ID NO: 2379031 - RNA, 19 nt, Homo sapiens
  misc_RNA (1)...(19): siRNA sense strand
gagaauggugccaguguau

SEQ ID NO: 2379032 - RNA, 19 nt, Homo sapiens
  misc_RNA (1)...(19): siRNA sense strand
acagagaaguagaguccuu

SEQ ID NO: 2379033 - RNA, 19 nt, Homo sapiens
  misc_RNA (1)...(19): siRNA sense strand
gaugaaaggaagaaagaag

SEQ ID NO: 2379034 - RNA, 19 nt, Homo sapiens
  misc_RNA (1)...(19): siRNA sense strand
acaagaacuucgagaugga

SEQ ID NO: 2379035 - RNA, 19 nt, Homo sapiens
  misc_RNA (1)...(19): siRNA sense strand
cugaagaagauaacaauca

SEQ ID NO: 2379036 - RNA, 19 nt, Homo sapiens
  misc_RNA (1)...(19): siRNA sense strand
ugaccaaacgagaugacaa

SEQ ID NO: 2379037 - RNA, 19 nt, Homo sapiens
  misc_RNA (1)...(19): siRNA sense strand
gugacagaguauugguuga

SEQ ID NO: 2379038 - RNA, 19 nt, Homo sapiens
  misc_RNA (1)...(19): siRNA sense strand
aagagaaggaugaugguga

SEQ ID NO: 2379039 - RNA, 19 nt, Homo sapiens
  misc_RNA (1)...(19): siRNA sense strand
ucuuaguuccaaaggauua

SEQ ID NO: 2379040 - RNA, 19 nt, Homo sapiens
  misc_RNA (1)...(19): siRNA sense strand
aggaugaagaagagaagga

SEQ ID NO: 2379041 - RNA, 19 nt, Homo sapiens
  misc_RNA (1)...(19): siRNA sense strand
ggacuacagauuagaggau

SEQ ID NO: 2379042 - RNA, 19 nt, Homo sapiens
  misc_RNA (1)...(19): siRNA sense strand
aagauagagaugaaaggaa

SEQ ID NO: 2379043 - RNA, 19 nt, Homo sapiens
  misc_RNA (1)...(19): siRNA sense strand
ugaagaagaugauagggau

SEQ ID NO: 2379044 - RNA, 19 nt, Homo sapiens
  misc_RNA (1)...(19): siRNA sense strand
augauagggaugaggaaga

SEQ ID NO: 2379045 - RNA, 19 nt, Homo sapiens
  misc_RNA (1)...(19): siRNA sense strand
ccaugaagagucugaguca

SEQ ID NO: 2379046 - RNA, 19 nt, Homo sapiens
  misc_RNA (1)...(19): siRNA sense strand
gauaaagaggaagaagaaa

SEQ ID NO: 2379047 - RNA, 19 nt, Homo sapiens
  misc_RNA (1)...(19): siRNA sense strand
gcgucgagaaagaagauau

SEQ ID NO: 2379048 - RNA, 19 nt, Homo sapiens
  misc_RNA (1)...(19): siRNA sense strand
agauagagaugaaaggaag

SEQ ID NO: 2379049 - RNA, 19 nt, Homo sapiens
  misc_RNA (1)...(19): siRNA sense strand
gugaagacauuguggcuga

SEQ ID NO: 2379050 - RNA, 19 nt, Homo sapiens
  misc_RNA (1)...(19): siRNA sense strand
ccuccuauggugugaacuu

SEQ ID NO: 2379051 - RNA, 19 nt, Homo sapiens
  misc_RNA (1)...(19): siRNA sense strand
gagaaauauggcuguggga

SEQ ID NO: 2379052 - RNA, 19 nt, Homo sapiens
  misc_RNA (1)...(19): siRNA sense strand
cccagaaggcagagaagga

SEQ ID NO: 2379053 - RNA, 19 nt, Homo sapiens
  misc_RNA (1)...(19): siRNA sense strand
agaaggaagugacgcgcau

SEQ ID NO: 2379054 - RNA, 19 nt, Homo sapiens
  misc_RNA (1)...(19): siRNA sense strand
ggaagaagguugacgaugg

SEQ ID NO: 2379055 - RNA, 19 nt, Homo sapiens
  misc_RNA (1)...(19): siRNA sense strand
uguguguccuggagggcua

SEQ ID NO: 2379056 - RNA, 19 nt, Homo sapiens
  misc_RNA (1)...(19): siRNA sense strand
ccauccgagcgguggcaaa

SEQ ID NO: 2379057 - RNA, 19 nt, Homo sapiens
  misc_RNA (1)...(19): siRNA sense strand
gguggcugguggugugcaa

SEQ ID NO: 2379058 - RNA, 19 nt, Homo sapiens
  misc_RNA (1)...(19): siRNA sense strand
ccuuuggcaaugugagauu

SEQ ID NO: 2379059 - RNA, 19 nt, Homo sapiens
  misc_RNA (1)...(19): siRNA sense strand
ugugcaagcccuuuggcaa

SEQ ID NO: 2379060 - RNA, 19 nt, Homo sapiens
  misc_RNA (1)...(19): siRNA sense strand
gcuacuucgugcugggcca

SEQ ID NO: 2379061 - RNA, 19 nt, Homo sapiens
  misc_RNA (1)...(19): siRNA sense strand
ggccaauguagaagagaua

SEQ ID NO: 2379062 - RNA, 19 nt, Homo sapiens
  misc_RNA (1)...(19): siRNA sense strand
gcuaugaaguguuuggcaa

SEQ ID NO: 2379063 - RNA, 19 nt, Homo sapiens
  misc_RNA (1)...(19): siRNA sense strand
agucauaacagaugccaaa

SEQ ID NO: 2379064 - RNA, 19 nt, Homo sapiens
  misc_RNA (1)...(19): siRNA sense strand
gggaaaauggggugaggaa

SEQ ID NO: 2379065 - RNA, 19 nt, Homo sapiens
  misc_RNA (1)...(19): siRNA sense strand
aggaagauuuugaagacaa

SEQ ID NO: 2379066 - RNA, 19 nt, Homo sapiens
  misc_RNA (1)...(19): siRNA sense strand
uggacaauuaccaggaaau

SEQ ID NO: 2379067 - RNA, 19 nt, Homo sapiens
  misc_RNA (1)...(19): siRNA sense strand
caaccauuucaaagaacua

SEQ ID NO: 2379068 - RNA, 19 nt, Homo sapiens
  misc_RNA (1)...(19): siRNA sense strand
gcgucacaguauugcaauu

SEQ ID NO: 2379069 - RNA, 19 nt, Homo sapiens
  misc_RNA (1)...(19): siRNA sense strand
aggccaauguagaagagau

SEQ ID NO: 2379070 - RNA, 19 nt, Homo sapiens
  misc_RNA (1)...(19): siRNA sense strand
aguuacagcuauugaugau

SEQ ID NO: 2379071 - RNA, 19 nt, Homo sapiens
  misc_RNA (1)...(19): siRNA sense strand
cagccuuguuggaggaagu

SEQ ID NO: 2379072 - RNA, 19 nt, Homo sapiens
  misc_RNA (1)...(19): siRNA sense strand
guuuguuacagaaggagaa

SEQ ID NO: 2379073 - RNA, 19 nt, Homo sapiens
  misc_RNA (1)...(19): siRNA sense strand
ggaaugagaccguggagcu

SEQ ID NO: 2379074 - RNA, 19 nt, Homo sapiens
  misc_RNA (1)...(19): siRNA sense strand
guagaagagauauggaagu

SEQ ID NO: 2379075 - RNA, 19 nt, Homo sapiens
  misc_RNA (1)...(19): siRNA sense strand
ggaagauuuugaagacaau

SEQ ID NO: 2379076 - RNA, 19 nt, Homo sapiens
  misc_RNA (1)...(19): siRNA sense strand
uuucaagagcuaugagcau

SEQ ID NO: 2379077 - RNA, 19 nt, Homo sapiens
  misc_RNA (1)...(19): siRNA sense strand
ccugaaaauaggagaaagu

SEQ ID NO: 2379078 - RNA, 19 nt, Homo sapiens
  misc_RNA (1)...(19): siRNA sense strand
augccaaacucuccaacaa

SEQ ID NO: 2379079 - RNA, 19 nt, Homo sapiens
  misc_RNA (1)...(19): siRNA sense strand
ccuggauuccuuagaagaa

SEQ ID NO: 2379080 - RNA, 19 nt, Homo sapiens
  misc_RNA (1)...(19): siRNA sense strand
auauggaagucuaugacau

SEQ ID NO: 2379081 - RNA, 19 nt, Homo sapiens
  misc_RNA (1)...(19): siRNA sense strand
uguuacagaaggagaaagu

SEQ ID NO: 2379082 - RNA, 19 nt, Homo sapiens
  misc_RNA (1)...(19): siRNA sense strand
uaggagaaaguuacagcua

SEQ ID NO: 2379083 - RNA, 19 nt, Homo sapiens
  misc_RNA (1)...(19): siRNA sense strand
gaugaugauggcaaggauu

SEQ ID NO: 2379084 - RNA, 19 nt, Homo sapiens
  misc_RNA (1)...(19): siRNA sense strand
ucuacgaagaguccagaua

SEQ ID NO: 2379085 - RNA, 19 nt, Homo sapiens
  misc_RNA (1)...(19): siRNA sense strand
cggccgaagcuguggauug

SEQ ID NO: 2379086 - RNA, 19 nt, Homo sapiens
  misc_RNA (1)...(19): siRNA sense strand
agaaggagaaaguggcagu

SEQ ID NO: 2379087 - RNA, 19 nt, Homo sapiens
  misc_RNA (1)...(19): siRNA sense strand
auguagaagagauauggaa

SEQ ID NO: 2379088 - RNA, 19 nt, Homo sapiens
  misc_RNA (1)...(19): siRNA sense strand
auggacaauuaccaggaaa

SEQ ID NO: 2379089 - RNA, 19 nt, Homo sapiens
  misc_RNA (1)...(19): siRNA sense strand
cccugaaaccauauccaaa

SEQ ID NO: 2379090 - RNA, 19 nt, Homo sapiens
  misc_RNA (1)...(19): siRNA sense strand
aaaccauagcugauuacua

SEQ ID NO: 2379091 - RNA, 19 nt, Homo sapiens
  misc_RNA (1)...(19): siRNA sense strand
ccaggagcugauauggaua

SEQ ID NO: 2379092 - RNA, 19 nt, Homo sapiens
  misc_RNA (1)...(19): siRNA sense strand
ccaacaacgaagagagaaa

SEQ ID NO: 2379093 - RNA, 19 nt, Homo sapiens
  misc_RNA (1)...(19): siRNA sense strand
caccaaaggaugagaacga

SEQ ID NO: 2379094 - RNA, 19 nt, Homo sapiens
  misc_RNA (1)...(19): siRNA sense strand
aggaugagaacgagauauu

SEQ ID NO: 2379095 - RNA, 19 nt, Homo sapiens
  misc_RNA (1)...(19): siRNA sense strand
ggauagaagcugaaaccca

SEQ ID NO: 2379096 - RNA, 19 nt, Homo sapiens
  misc_RNA (1)...(19): siRNA sense strand
acauaugaugccaaagaaa

SEQ ID NO: 2379097 - RNA, 19 nt, Homo sapiens
  misc_RNA (1)...(19): siRNA sense strand
aggugaaugaugaaacaaa

SEQ ID NO: 2379098 - RNA, 19 nt, Homo sapiens
  misc_RNA (1)...(19): siRNA sense strand
cauaaauccaguaaaguca

SEQ ID NO: 2379099 - RNA, 19 nt, Homo sapiens
  misc_RNA (1)...(19): siRNA sense strand
caguaaagucaucacaaau

SEQ ID NO: 2379100 - RNA, 19 nt, Homo sapiens
  misc_RNA (1)...(19): siRNA sense strand
cuaacaaacaauugccauu

SEQ ID NO: 2379101 - RNA, 19 nt, Homo sapiens
  misc_RNA (1)...(19): siRNA sense strand
ccaaaggaugagaacgaga

SEQ ID NO: 2379102 - RNA, 19 nt, Homo sapiens
  misc_RNA (1)...(19): siRNA sense strand
cuauuauacaccugccaaa

SEQ ID NO: 2379103 - RNA, 19 nt, Homo sapiens
  misc_RNA (1)...(19): siRNA sense strand
ggcagaaggcccagaagca

SEQ ID NO: 2379104 - RNA, 19 nt, Homo sapiens
  misc_RNA (1)...(19): siRNA sense strand
ugaagauguaacagaugaa

SEQ ID NO: 2379105 - RNA, 19 nt, Homo sapiens
  misc_RNA (1)...(19): siRNA sense strand
auaaacauuuggaggagga

SEQ ID NO: 2379106 - RNA, 19 nt, Homo sapiens
  misc_RNA (1)...(19): siRNA sense strand
acgaagagagaaacucaaa

SEQ ID NO: 2379107 - RNA, 19 nt, Homo sapiens
  misc_RNA (1)...(19): siRNA sense strand
augaagaagaacuguugua

SEQ ID NO: 2379108 - RNA, 19 nt, Homo sapiens
  misc_RNA (1)...(19): siRNA sense strand
cggaggaaaacucgguaaa

SEQ ID NO: 2379109 - RNA, 19 nt, Homo sapiens
  misc_RNA (1)...(19): siRNA sense strand
cauccaaguauuucagaca

SEQ ID NO: 2379110 - RNA, 19 nt, Homo sapiens
  misc_RNA (1)...(19): siRNA sense strand
cauaugaugccaaagaaaa

SEQ ID NO: 2379111 - RNA, 19 nt, Homo sapiens
  misc_RNA (1)...(19): siRNA sense strand
gguuauaauucaacaggug

SEQ ID NO: 2379112 - RNA, 19 nt, Homo sapiens
  misc_RNA (1)...(19): siRNA sense strand
cagaaggcccagaagcaca

SEQ ID NO: 2379113 - RNA, 19 nt, Homo sapiens
  misc_RNA (1)...(19): siRNA sense strand
cgacuguucgagcgacaua

SEQ ID NO: 2379114 - RNA, 19 nt, Homo sapiens
  misc_RNA (1)...(19): siRNA sense strand
ggaaaacucgguaaagcaa

SEQ ID NO: 2379115 - RNA, 19 nt, Homo sapiens
  misc_RNA (1)...(19): siRNA sense strand
ccagaagcacauucccaaa

SEQ ID NO: 2379116 - RNA, 19 nt, Homo sapiens
  misc_RNA (1)...(19): siRNA sense strand
aaaacucgguaaagcaaaa

SEQ ID NO: 2379117 - RNA, 19 nt, Homo sapiens
  misc_RNA (1)...(19): siRNA sense strand
caacaauaccaaaaggcuu

SEQ ID NO: 2379118 - RNA, 19 nt, Homo sapiens
  misc_RNA (1)...(19): siRNA sense strand
ucauugaaggugauaguga

SEQ ID NO: 2379119 - RNA, 19 nt, Homo sapiens
  misc_RNA (1)...(19): siRNA sense strand
cagaaaugaacauaaagca

SEQ ID NO: 2379120 - RNA, 19 nt, Homo sapiens
  misc_RNA (1)...(19): siRNA sense strand
aagcugaaacccagacuga

SEQ ID NO: 2379121 - RNA, 19 nt, Homo sapiens
  misc_RNA (1)...(19): siRNA sense strand
aaaggaugagaacgagaua

SEQ ID NO: 2379122 - RNA, 19 nt, Homo sapiens
  misc_RNA (1)...(19): siRNA sense strand
cauaaauggacuaggacaa

SEQ ID NO: 2379123 - RNA, 19 nt, Homo sapiens
  misc_RNA (1)...(19): siRNA sense strand
caaugaagcuacuaggcaa

SEQ ID NO: 2379124 - RNA, 19 nt, Homo sapiens
  misc_RNA (1)...(19): siRNA sense strand
aggacaaaucuuagaaaca

SEQ ID NO: 2379125 - RNA, 19 nt, Homo sapiens
  misc_RNA (1)...(19): siRNA sense strand
acagaaaagcaguggacaa

SEQ ID NO: 2379126 - RNA, 19 nt, Homo sapiens
  misc_RNA (1)...(19): siRNA sense strand
ugauagucucucuggaaua

SEQ ID NO: 2379127 - RNA, 19 nt, Homo sapiens
  misc_RNA (1)...(19): siRNA sense strand
agagaaaccugauggccuu

SEQ ID NO: 2379128 - RNA, 19 nt, Homo sapiens
  misc_RNA (1)...(19): siRNA sense strand
cagccaagguggagagcuc

SEQ ID NO: 2379129 - RNA, 19 nt, Homo sapiens
  misc_RNA (1)...(19): siRNA sense strand
guauuuaggugcugggaag

SEQ ID NO: 2379130 - RNA, 19 nt, Homo sapiens
  misc_RNA (1)...(19): siRNA sense strand
aggaagugcgcuggagaaa

SEQ ID NO: 2379131 - RNA, 19 nt, Homo sapiens
  misc_RNA (1)...(19): siRNA sense strand
ccuccuuggcagaaauuua

SEQ ID NO: 2379132 - RNA, 19 nt, Homo sapiens
  misc_RNA (1)...(19): siRNA sense strand
aaagcgaggaggaggaaaa

SEQ ID NO: 2379133 - RNA, 19 nt, Homo sapiens
  misc_RNA (1)...(19): siRNA sense strand
gaugacacugagagaacaa

SEQ ID NO: 2379134 - RNA, 19 nt, Homo sapiens
  misc_RNA (1)...(19): siRNA sense strand
guaaaagaguagcggucau

SEQ ID NO: 2379135 - RNA, 19 nt, Homo sapiens
  misc_RNA (1)...(19): siRNA sense strand
aggaaaugcaaaggaagaa

SEQ ID NO: 2379136 - RNA, 19 nt, Homo sapiens
  misc_RNA (1)...(19): siRNA sense strand
uuccagaagaagauguaaa

SEQ ID NO: 2379137 - RNA, 19 nt, Homo sapiens
  misc_RNA (1)...(19): siRNA sense strand
ggacaauggccuuagagcu

SEQ ID NO: 2379138 - RNA, 19 nt, Homo sapiens
  misc_RNA (1)...(19): siRNA sense strand
cgcaaagcgaggaggagga

SEQ ID NO: 2379139 - RNA, 19 nt, Homo sapiens
  misc_RNA (1)...(19): siRNA sense strand
gucauaaggcugaagggau

SEQ ID NO: 2379140 - RNA, 19 nt, Homo sapiens
  misc_RNA (1)...(19): siRNA sense strand
aaggaagugcgcuggagaa

SEQ ID NO: 2379141 - RNA, 19 nt, Homo sapiens
  misc_RNA (1)...(19): siRNA sense strand
aggaugacacugagagaac

SEQ ID NO: 2379142 - RNA, 19 nt, Homo sapiens
  misc_RNA (1)...(19): siRNA sense strand
augugagaaacaaggacaa

SEQ ID NO: 2379143 - RNA, 19 nt, Homo sapiens
  misc_RNA (1)...(19): siRNA sense strand
gaacaaaucgauugguccu

SEQ ID NO: 2379144 - RNA, 19 nt, Homo sapiens
  misc_RNA (1)...(19): siRNA sense strand
ccaagaucccagucacaau

SEQ ID NO: 2379145 - RNA, 19 nt, Homo sapiens
  misc_RNA (1)...(19): siRNA sense strand
caacauaguaaaagaguag

SEQ ID NO: 2379146 - RNA, 19 nt, Homo sapiens
  misc_RNA (1)...(19): siRNA sense strand
cuggaauaaguuugcagaa

SEQ ID NO: 2379147 - RNA, 19 nt, Homo sapiens
  misc_RNA (1)...(19): siRNA sense strand
ugaucagaguauuguuaca

SEQ ID NO: 2379148 - RNA, 19 nt, Homo sapiens
  misc_RNA (1)...(19): siRNA sense strand
augcaaaggaagaacaucu

SEQ ID NO: 2379149 - RNA, 19 nt, Homo sapiens
  misc_RNA (1)...(19): siRNA sense strand
uguuagagaccacuggauu

SEQ ID NO: 2379150 - RNA, 19 nt, Homo sapiens
  misc_RNA (1)...(19): siRNA sense strand
gguuccagaagaagaugua

SEQ ID NO: 2379151 - RNA, 19 nt, Homo sapiens
  misc_RNA (1)...(19): siRNA sense strand
ucacaauuaucaccgggua

SEQ ID NO: 2379152 - RNA, 19 nt, Homo sapiens
  misc_RNA (1)...(19): siRNA sense strand
gguauuuaggugcugggaa

SEQ ID NO: 2379153 - RNA, 19 nt, Homo sapiens
  misc_RNA (1)...(19): siRNA sense strand
aggccaagccaauguguaa

SEQ ID NO: 2379154 - RNA, 19 nt, Homo sapiens
  misc_RNA (1)...(19): siRNA sense strand
augugguauuugugggaaa

SEQ ID NO: 2379155 - RNA, 19 nt, Homo sapiens
  misc_RNA (1)...(19): siRNA sense strand
aggugaaggcugauggauu

SEQ ID NO: 2379156 - RNA, 19 nt, Homo sapiens
  misc_RNA (1)...(19): siRNA sense strand
cgaaaacagggcagaauaa

SEQ ID NO: 2379157 - RNA, 19 nt, Homo sapiens
  misc_RNA (1)...(19): siRNA sense strand
ccguaggcauacuggagaa

SEQ ID NO: 2379158 - RNA, 19 nt, Homo sapiens
  misc_RNA (1)...(19): siRNA sense strand
gcaaaauaaagauggaaga

SEQ ID NO: 2379159 - RNA, 19 nt, Homo sapiens
  misc_RNA (1)...(19): siRNA sense strand
cugcgaauuauguggaaau

SEQ ID NO: 2379160 - RNA, 19 nt, Homo sapiens
  misc_RNA (1)...(19): siRNA sense strand
ggucaacugugaaugggua

SEQ ID NO: 2379161 - RNA, 19 nt, Homo sapiens
  misc_RNA (1)...(19): siRNA sense strand
gugcaauaucccagugaca

SEQ ID NO: 2379162 - RNA, 19 nt, Homo sapiens
  misc_RNA (1)...(19): siRNA sense strand
gaaacggaaacguggaaaa

SEQ ID NO: 2379163 - RNA, 19 nt, Homo sapiens
  misc_RNA (1)...(19): siRNA sense strand
aguuuaaagcucauaggaa

SEQ ID NO: 2379164 - RNA, 19 nt, Homo sapiens
  misc_RNA (1)...(19): siRNA sense strand
gagcuggaucagagguauu

SEQ ID NO: 2379165 - RNA, 19 nt, Homo sapiens
  misc_RNA (1)...(19): siRNA sense strand
gagaauacauaaaggaguc

SEQ ID NO: 2379166 - RNA, 19 nt, Homo sapiens
  misc_RNA (1)...(19): siRNA sense strand
ucgaaaacauacaggugaa

SEQ ID NO: 2379167 - RNA, 19 nt, Homo sapiens
  misc_RNA (1)...(19): siRNA sense strand
aguagaacaaguugcacaa

SEQ ID NO: 2379168 - RNA, 19 nt, Homo sapiens
  misc_RNA (1)...(19): siRNA sense strand
guggaaaaucacagccaaa

SEQ ID NO: 2379169 - RNA, 19 nt, Homo sapiens
  misc_RNA (1)...(19): siRNA sense strand
cagugacaucuuagagaau

SEQ ID NO: 2379170 - RNA, 19 nt, Homo sapiens
  misc_RNA (1)...(19): siRNA sense strand
ccgaaaacagggcagaaua

SEQ ID NO: 2379171 - RNA, 19 nt, Homo sapiens
  misc_RNA (1)...(19): siRNA sense strand
gggaagagcuggaucagag

SEQ ID NO: 2379172 - RNA, 19 nt, Homo sapiens
  misc_RNA (1)...(19): siRNA sense strand
gcacaaaacaaaaguccau

SEQ ID NO: 2379173 - RNA, 19 nt, Homo sapiens
  misc_RNA (1)...(19): siRNA sense strand
ccucaggagagcucaacaa

SEQ ID NO: 2379174 - RNA, 19 nt, Homo sapiens
  misc_RNA (1)...(19): siRNA sense strand
cuucuuacucugcgagauu

SEQ ID NO: 2379175 - RNA, 19 nt, Homo sapiens
  misc_RNA (1)...(19): siRNA sense strand
ucgagagaaaucagaagua

SEQ ID NO: 2379176 - RNA, 19 nt, Homo sapiens
  misc_RNA (1)...(19): siRNA sense strand
guuuauauacacaggaacu

SEQ ID NO: 2379177 - RNA, 19 nt, Homo sapiens
  misc_RNA (1)...(19): siRNA sense strand
acaaggcgcguuagcgaaa

SEQ ID NO: 2379178 - RNA, 19 nt, Homo sapiens
  misc_RNA (1)...(19): siRNA sense strand
uguuacagugaaacggaaa

SEQ ID NO: 2379179 - RNA, 19 nt, Homo sapiens
  misc_RNA (1)...(19): siRNA sense strand
caauguaaccagcugaaaa

SEQ ID NO: 2379180 - RNA, 19 nt, Homo sapiens
  misc_RNA (1)...(19): siRNA sense strand
gcagaauaaaacagugcaa

SEQ ID NO: 2379181 - RNA, 19 nt, Homo sapiens
  misc_RNA (1)...(19): siRNA sense strand
acggaaacguggaaaauca

SEQ ID NO: 2379182 - RNA, 19 nt, Homo sapiens
  misc_RNA (1)...(19): siRNA sense strand
agagaaugcaucuguugaa

SEQ ID NO: 2379183 - RNA, 19 nt, Homo sapiens
  misc_RNA (1)...(19): siRNA sense strand
uugagaaggcacaugagaa

SEQ ID NO: 2379184 - RNA, 19 nt, Homo sapiens
  misc_RNA (1)...(19): siRNA sense strand
auacaggugagaagccaua

SEQ ID NO: 2379185 - RNA, 19 nt, Homo sapiens
  misc_RNA (1)...(19): siRNA sense strand
gagagaaaucagaaguauc

SEQ ID NO: 2379186 - RNA, 19 nt, Homo sapiens
  misc_RNA (1)...(19): siRNA sense strand
uggaaaggcauuuacccaa

SEQ ID NO: 2379187 - RNA, 19 nt, Homo sapiens
  misc_RNA (1)...(19): siRNA sense strand
ugacaguuggaauguuaaa

SEQ ID NO: 2379188 - RNA, 19 nt, Homo sapiens
  misc_RNA (1)...(19): siRNA sense strand
gugaaacggaaacguggaa

SEQ ID NO: 2379189 - RNA, 19 nt, Homo sapiens
  misc_RNA (1)...(19): siRNA sense strand
aggcacaugagaauacaua

SEQ ID NO: 2379190 - RNA, 19 nt, Homo sapiens
  misc_RNA (1)...(19): siRNA sense strand
ugugauagguguggacaga

SEQ ID NO: 2379191 - RNA, 19 nt, Homo sapiens
  misc_RNA (1)...(19): siRNA sense strand
gucccauacaggagaaaga

SEQ ID NO: 2379192 - RNA, 19 nt, Homo sapiens
  misc_RNA (1)...(19): siRNA sense strand
uccuaaacaaggcgcguua

SEQ ID NO: 2379193 - RNA, 19 nt, Homo sapiens
  misc_RNA (1)...(19): siRNA sense strand
aaacaaggcgcguuagcga

SEQ ID NO: 2379194 - RNA, 19 nt, Homo sapiens
  misc_RNA (1)...(19): siRNA sense strand
gcugaaaacgcauguaaga

SEQ ID NO: 2379195 - RNA, 19 nt, Homo sapiens
  misc_RNA (1)...(19): siRNA sense strand
guggaaauucuuacacaga

SEQ ID NO: 2379196 - RNA, 19 nt, Homo sapiens
  misc_RNA (1)...(19): siRNA sense strand
aaaacagggcagaauaaaa

SEQ ID NO: 2379197 - RNA, 19 nt, Homo sapiens
  misc_RNA (1)...(19): siRNA sense strand
auuccaaggccaagccaau

SEQ ID NO: 2379198 - RNA, 19 nt, Homo sapiens
  misc_RNA (1)...(19): siRNA sense strand
ggugcgaucuacagaagca

SEQ ID NO: 2379199 - RNA, 19 nt, Homo sapiens
  misc_RNA (1)...(19): siRNA sense strand
ccauagugauuggggaauu

SEQ ID NO: 2379200 - RNA, 19 nt, Homo sapiens
  misc_RNA (1)...(19): siRNA sense strand
agagguauuccaaggccaa

SEQ ID NO: 2379201 - RNA, 19 nt, Homo sapiens
  misc_RNA (1)...(19): siRNA sense strand
ccauacaggagaaagacca

SEQ ID NO: 2379202 - RNA, 19 nt, Homo sapiens
  misc_RNA (1)...(19): siRNA sense strand
ucuaauauagccagcguca

SEQ ID NO: 2379203 - RNA, 19 nt, Homo sapiens
  misc_RNA (1)...(19): siRNA sense strand
ugaccaagaucgagacgcu

SEQ ID NO: 2379204 - RNA, 19 nt, Homo sapiens
  misc_RNA (1)...(19): siRNA sense strand
gcgcagaugcagacacgga

SEQ ID NO: 2379205 - RNA, 19 nt, Homo sapiens
  misc_RNA (1)...(19): siRNA sense strand
cgccagugagcgggagaaa

SEQ ID NO: 2379206 - RNA, 19 nt, Homo sapiens
  misc_RNA (1)...(19): siRNA sense strand
cugacaaaggccaggaaca

SEQ ID NO: 2379207 - RNA, 19 nt, Homo sapiens
  misc_RNA (1)...(19): siRNA sense strand
caauagaacuccuggggca

SEQ ID NO: 2379208 - RNA, 19 nt, Homo sapiens
  misc_RNA (1)...(19): siRNA sense strand
cgggcaagccuguuggaga

SEQ ID NO: 2379209 - RNA, 19 nt, Homo sapiens
  misc_RNA (1)...(19): siRNA sense strand
cugcugaaguugaggcugu

SEQ ID NO: 2379210 - RNA, 19 nt, Homo sapiens
  misc_RNA (1)...(19): siRNA sense strand
agacucagauggaggagga

SEQ ID NO: 2379211 - RNA, 19 nt, Homo sapiens
  misc_RNA (1)...(19): siRNA sense strand
gggcaagccuguuggagac

SEQ ID NO: 2379212 - RNA, 19 nt, Homo sapiens
  misc_RNA (1)...(19): siRNA sense strand
gcugacaagcagagccaca

SEQ ID NO: 2379213 - RNA, 19 nt, Homo sapiens
  misc_RNA (1)...(19): siRNA sense strand
cucagauggaggaggauau

SEQ ID NO: 2379214 - RNA, 19 nt, Homo sapiens
  misc_RNA (1)...(19): siRNA sense strand
cagaaggugcuacgggaca

SEQ ID NO: 2379215 - RNA, 19 nt, Homo sapiens
  misc_RNA (1)...(19): siRNA sense strand
ucuuaaaggcucacgcuga

SEQ ID NO: 2379216 - RNA, 19 nt, Homo sapiens
  misc_RNA (1)...(19): siRNA sense strand
accgagaauuugaggucuu

SEQ ID NO: 2379217 - RNA, 19 nt, Homo sapiens
  misc_RNA (1)...(19): siRNA sense strand
cagaacuggcacagcauga

SEQ ID NO: 2379218 - RNA, 19 nt, Homo sapiens
  misc_RNA (1)...(19): siRNA sense strand
aagagaaaccaguggagaa

SEQ ID NO: 2379219 - RNA, 19 nt, Homo sapiens
  misc_RNA (1)...(19): siRNA sense strand
uugaagaacgcuauggaaa

SEQ ID NO: 2379220 - RNA, 19 nt, Homo sapiens
  misc_RNA (1)...(19): siRNA sense strand
cugaaagaagaaauggaaa

SEQ ID NO: 2379221 - RNA, 19 nt, Homo sapiens
  misc_RNA (1)...(19): siRNA sense strand
cuagagaaggaaagagaga

SEQ ID NO: 2379222 - RNA, 19 nt, Homo sapiens
  misc_RNA (1)...(19): siRNA sense strand
ggaacaacugagagcaaaa

SEQ ID NO: 2379223 - RNA, 19 nt, Homo sapiens
  misc_RNA (1)...(19): siRNA sense strand
ccuacaugcuagagaagga

SEQ ID NO: 2379224 - RNA, 19 nt, Homo sapiens
  misc_RNA (1)...(19): siRNA sense strand
gagcaaaacugaaccgaga

SEQ ID NO: 2379225 - RNA, 19 nt, Homo sapiens
  misc_RNA (1)...(19): siRNA sense strand
gugaugaagcagugcaaga

SEQ ID NO: 2379226 - RNA, 19 nt, Homo sapiens
  misc_RNA (1)...(19): siRNA sense strand
agggaacaacugagagcaa

SEQ ID NO: 2379227 - RNA, 19 nt, Homo sapiens
  misc_RNA (1)...(19): siRNA sense strand
ugaagaacgcuauggaaaa

SEQ ID NO: 2379228 - RNA, 19 nt, Homo sapiens
  misc_RNA (1)...(19): siRNA sense strand
aguuggcagcugagagaaa

SEQ ID NO: 2379229 - RNA, 19 nt, Homo sapiens
  misc_RNA (1)...(19): siRNA sense strand
gccugaaauuggagaagga

SEQ ID NO: 2379230 - RNA, 19 nt, Homo sapiens
  misc_RNA (1)...(19): siRNA sense strand
ugcuagugcuugagugcaa

SEQ ID NO: 2379231 - RNA, 19 nt, Homo sapiens
  misc_RNA (1)...(19): siRNA sense strand
ggaccaaaacccugaaaga

SEQ ID NO: 2379232 - RNA, 19 nt, Homo sapiens
  misc_RNA (1)...(19): siRNA sense strand
ugaaagaagaaauggaaag

SEQ ID NO: 2379233 - RNA, 19 nt, Homo sapiens
  misc_RNA (1)...(19): siRNA sense strand
aaggaaagagagaggcuga

SEQ ID NO: 2379234 - RNA, 19 nt, Homo sapiens
  misc_RNA (1)...(19): siRNA sense strand
ccuaaugagcaauugaaga

SEQ ID NO: 2379235 - RNA, 19 nt, Homo sapiens
  misc_RNA (1)...(19): siRNA sense strand
ccaagugccuccacgggaa

SEQ ID NO: 2379236 - RNA, 19 nt, Homo sapiens
  misc_RNA (1)...(19): siRNA sense strand
agagaaaccaguggagaau

SEQ ID NO: 2379237 - RNA, 19 nt, Homo sapiens
  misc_RNA (1)...(19): siRNA sense strand
cugaaauuggagaaggaga

SEQ ID NO: 2379238 - RNA, 19 nt, Homo sapiens
  misc_RNA (1)...(19): siRNA sense strand
aagaagaguuggcagcuga

SEQ ID NO: 2379239 - RNA, 19 nt, Homo sapiens
  misc_RNA (1)...(19): siRNA sense strand
gaagaaaggcagcggcaug

SEQ ID NO: 2379240 - RNA, 19 nt, Homo sapiens
  misc_RNA (1)...(19): siRNA sense strand
uucuuaagguugugaugaa

SEQ ID NO: 2379241 - RNA, 19 nt, Homo sapiens
  misc_RNA (1)...(19): siRNA sense strand
gcugagagaaagagaggcu

SEQ ID NO: 2379242 - RNA, 19 nt, Homo sapiens
  misc_RNA (1)...(19): siRNA sense strand
agaagauagugaaggaccu

SEQ ID NO: 2379243 - RNA, 19 nt, Homo sapiens
  misc_RNA (1)...(19): siRNA sense strand
cugcuuacucauaugcaaa

SEQ ID NO: 2379244 - RNA, 19 nt, Homo sapiens
  misc_RNA (1)...(19): siRNA sense strand
gcaacaauguagaaaacca

SEQ ID NO: 2379245 - RNA, 19 nt, Homo sapiens
  misc_RNA (1)...(19): siRNA sense strand
uuugaaacacugaaggaga

SEQ ID NO: 2379246 - RNA, 19 nt, Homo sapiens
  misc_RNA (1)...(19): siRNA sense strand
agaaagaacccaugggagc

SEQ ID NO: 2379247 - RNA, 19 nt, Homo sapiens
  misc_RNA (1)...(19): siRNA sense strand
aggauacggcugaaggaga

SEQ ID NO: 2379248 - RNA, 19 nt, Homo sapiens
  misc_RNA (1)...(19): siRNA sense strand
ugcuagagaaggaaagaga

SEQ ID NO: 2379249 - RNA, 19 nt, Homo sapiens
  misc_RNA (1)...(19): siRNA sense strand
aggcccagguagagaagca

SEQ ID NO: 2379250 - RNA, 19 nt, Homo sapiens
  misc_RNA (1)...(19): siRNA sense strand
cuguuguagcaaaugguaa

SEQ ID NO: 2379251 - RNA, 19 nt, Homo sapiens
  misc_RNA (1)...(19): siRNA sense strand
guccaaaggcacagcaacu

SEQ ID NO: 2379252 - RNA, 19 nt, Homo sapiens
  misc_RNA (1)...(19): siRNA sense strand
aaggagaagagccggguga

SEQ ID NO: 2379253 - RNA, 19 nt, Homo sapiens
  misc_RNA (1)...(19): siRNA sense strand
gggugaguaaacuggaaga

SEQ ID NO: 2379254 - RNA, 19 nt, Homo sapiens
  misc_RNA (1)...(19): siRNA sense strand
cuacagagagauuuugaaa

SEQ ID NO: 2379255 - RNA, 19 nt, Homo sapiens
  misc_RNA (1)...(19): siRNA sense strand
aggaagaaaggcagcggca

SEQ ID NO: 2379256 - RNA, 19 nt, Homo sapiens
  misc_RNA (1)...(19): siRNA sense strand
agaguuggcagcugagaga

SEQ ID NO: 2379257 - RNA, 19 nt, Homo sapiens
  misc_RNA (1)...(19): siRNA sense strand
cguaccaaguagggaucaa

SEQ ID NO: 2379258 - RNA, 19 nt, Homo sapiens
  misc_RNA (1)...(19): siRNA sense strand
aagcagaucaggaccaaca

SEQ ID NO: 2379259 - RNA, 19 nt, Homo sapiens
  misc_RNA (1)...(19): siRNA sense strand
agaaagagaggcuugcaga

SEQ ID NO: 2379260 - RNA, 19 nt, Homo sapiens
  misc_RNA (1)...(19): siRNA sense strand
cgagaagagaaccggacca

SEQ ID NO: 2379261 - RNA, 19 nt, Homo sapiens
  misc_RNA (1)...(19): siRNA sense strand
uggcacagacuaucgaaau

SEQ ID NO: 2379262 - RNA, 19 nt, Homo sapiens
  misc_RNA (1)...(19): siRNA sense strand
ccuuguuauagaagccuua

SEQ ID NO: 2379263 - RNA, 19 nt, Homo sapiens
  misc_RNA (1)...(19): siRNA sense strand
acauagccaagaugacaaa

SEQ ID NO: 2379264 - RNA, 19 nt, Homo sapiens
  misc_RNA (1)...(19): siRNA sense strand
cugagaaagagaagaucaa

SEQ ID NO: 2379265 - RNA, 19 nt, Homo sapiens
  misc_RNA (1)...(19): siRNA sense strand
ccgcaaucucggucagaau

SEQ ID NO: 2379266 - RNA, 19 nt, Homo sapiens
  misc_RNA (1)...(19): siRNA sense strand
ggucaaagugcaaagggca

SEQ ID NO: 2379267 - RNA, 19 nt, Homo sapiens
  misc_RNA (1)...(19): siRNA sense strand
cugcagcccaggagguaaa

SEQ ID NO: 2379268 - RNA, 19 nt, Homo sapiens
  misc_RNA (1)...(19): siRNA sense strand
caaacgugguuguacgaga

SEQ ID NO: 2379269 - RNA, 19 nt, Homo sapiens
  misc_RNA (1)...(19): siRNA sense strand
cuugauuggucgaaaagaa

SEQ ID NO: 2379270 - RNA, 19 nt, Homo sapiens
  misc_RNA (1)...(19): siRNA sense strand
gggaaaacaagauggggca

SEQ ID NO: 2379271 - RNA, 19 nt, Homo sapiens
  misc_RNA (1)...(19): siRNA sense strand
agugagacugagaaagaga

SEQ ID NO: 2379272 - RNA, 19 nt, Homo sapiens
  misc_RNA (1)...(19): siRNA sense strand
gacacaacucagaugggaa

SEQ ID NO: 2379273 - RNA, 19 nt, Homo sapiens
  misc_RNA (1)...(19): siRNA sense strand
acugagaaagagaagauca

SEQ ID NO: 2379274 - RNA, 19 nt, Homo sapiens
  misc_RNA (1)...(19): siRNA sense strand
cagcagaacuaauggaaau

SEQ ID NO: 2379275 - RNA, 19 nt, Homo sapiens
  misc_RNA (1)...(19): siRNA sense strand
uggaggaauuggagaguua

SEQ ID NO: 2379276 - RNA, 19 nt, Homo sapiens
  misc_RNA (1)...(19): siRNA sense strand
ggauaaucuucgaaugaua

SEQ ID NO: 2379277 - RNA, 19 nt, Homo sapiens
  misc_RNA (1)...(19): siRNA sense strand
guuuaaugcugaagaggaa

SEQ ID NO: 2379278 - RNA, 19 nt, Homo sapiens
  misc_RNA (1)...(19): siRNA sense strand
gguacaagaaagacggaaa

SEQ ID NO: 2379279 - RNA, 19 nt, Homo sapiens
  misc_RNA (1)...(19): siRNA sense strand
ccacauaaagaacgagaaa

SEQ ID NO: 2379280 - RNA, 19 nt, Homo sapiens
  misc_RNA (1)...(19): siRNA sense strand
ugaugaacuucuugagaua

SEQ ID NO: 2379281 - RNA, 19 nt, Homo sapiens
  misc_RNA (1)...(19): siRNA sense strand
gagaaaugaucgagaaacu

SEQ ID NO: 2379282 - RNA, 19 nt, Homo sapiens
  misc_RNA (1)...(19): siRNA sense strand
gauaccaacuacagagaaa

SEQ ID NO: 2379283 - RNA, 19 nt, Homo sapiens
  misc_RNA (1)...(19): siRNA sense strand
ccagauaggaaaugguuaa

SEQ ID NO: 2379284 - RNA, 19 nt, Homo sapiens
  misc_RNA (1)...(19): siRNA sense strand
cccaacagguucagggaaa

SEQ ID NO: 2379285 - RNA, 19 nt, Homo sapiens
  misc_RNA (1)...(19): siRNA sense strand
gcgaugaauuugagaggau

SEQ ID NO: 2379286 - RNA, 19 nt, Homo sapiens
  misc_RNA (1)...(19): siRNA sense strand
cagaugaaguagugaauga

SEQ ID NO: 2379287 - RNA, 19 nt, Homo sapiens
  misc_RNA (1)...(19): siRNA sense strand
ccagaaauguggaugggua

SEQ ID NO: 2379288 - RNA, 19 nt, Homo sapiens
  misc_RNA (1)...(19): siRNA sense strand
gagagaaaggagaugauaa

SEQ ID NO: 2379289 - RNA, 19 nt, Homo sapiens
  misc_RNA (1)...(19): siRNA sense strand
agugaaagcugaugaaaca

SEQ ID NO: 2379290 - RNA, 19 nt, Homo sapiens
  misc_RNA (1)...(19): siRNA sense strand
gcuaugaagauguuagaaa

SEQ ID NO: 2379291 - RNA, 19 nt, Homo sapiens
  misc_RNA (1)...(19): siRNA sense strand
ggaugaaauaugucgauua

SEQ ID NO: 2379292 - RNA, 19 nt, Homo sapiens
  misc_RNA (1)...(19): siRNA sense strand
ccaagaaaccaguaagauu

SEQ ID NO: 2379293 - RNA, 19 nt, Homo sapiens
  misc_RNA (1)...(19): siRNA sense strand
ugccaagaguugagacaaa

SEQ ID NO: 2379294 - RNA, 19 nt, Homo sapiens
  misc_RNA (1)...(19): siRNA sense strand
ccagaaacuaauagaggaa

SEQ ID NO: 2379295 - RNA, 19 nt, Homo sapiens
  misc_RNA (1)...(19): siRNA sense strand
cagaaauguggauggguaa

SEQ ID NO: 2379296 - RNA, 19 nt, Homo sapiens
  misc_RNA (1)...(19): siRNA sense strand
gagagaaaugaucgagaaa

SEQ ID NO: 2379297 - RNA, 19 nt, Homo sapiens
  misc_RNA (1)...(19): siRNA sense strand
ggcaaaagcuguagccaaa

SEQ ID NO: 2379298 - RNA, 19 nt, Homo sapiens
  misc_RNA (1)...(19): siRNA sense strand
cugaagaaugggaagauaa

SEQ ID NO: 2379299 - RNA, 19 nt, Homo sapiens
  misc_RNA (1)...(19): siRNA sense strand
ugggaaacuucuagcuaaa

SEQ ID NO: 2379300 - RNA, 19 nt, Homo sapiens
  misc_RNA (1)...(19): siRNA sense strand
gaacgaauuaacuggguaa

SEQ ID NO: 2379301 - RNA, 19 nt, Homo sapiens
  misc_RNA (1)...(19): siRNA sense strand
ugucuuagcuggagcacua

SEQ ID NO: 2379302 - RNA, 19 nt, Homo sapiens
  misc_RNA (1)...(19): siRNA sense strand
ugauuaaacuaguggacau

SEQ ID NO: 2379303 - RNA, 19 nt, Homo sapiens
  misc_RNA (1)...(19): siRNA sense strand
augaaaugagagaggauua

SEQ ID NO: 2379304 - RNA, 19 nt, Homo sapiens
  misc_RNA (1)...(19): siRNA sense strand
cugaagaccauaagagauu

SEQ ID NO: 2379305 - RNA, 19 nt, Homo sapiens
  misc_RNA (1)...(19): siRNA sense strand
ucaaacuaaaggagagaaa

SEQ ID NO: 2379306 - RNA, 19 nt, Homo sapiens
  misc_RNA (1)...(19): siRNA sense strand
agccaaagccagaggucaa

SEQ ID NO: 2379307 - RNA, 19 nt, Homo sapiens
  misc_RNA (1)...(19): siRNA sense strand
auaagagauucgugcguaa

SEQ ID NO: 2379308 - RNA, 19 nt, Homo sapiens
  misc_RNA (1)...(19): siRNA sense strand
guguaaagcaggaugauga

SEQ ID NO: 2379309 - RNA, 19 nt, Homo sapiens
  misc_RNA (1)...(19): siRNA sense strand
aaaagauccucgagagaaa

SEQ ID NO: 2379310 - RNA, 19 nt, Homo sapiens
  misc_RNA (1)...(19): siRNA sense strand
uuaaggaaguucaggacaa

SEQ ID NO: 2379311 - RNA, 19 nt, Homo sapiens
  misc_RNA (1)...(19): siRNA sense strand
ugagagaaugggagggcaa

SEQ ID NO: 2379312 - RNA, 19 nt, Homo sapiens
  misc_RNA (1)...(19): siRNA sense strand
ggauaaacauguucugaca

SEQ ID NO: 2379313 - RNA, 19 nt, Homo sapiens
  misc_RNA (1)...(19): siRNA sense strand
gcaaauuguccaugcagaa

SEQ ID NO: 2379314 - RNA, 19 nt, Homo sapiens
  misc_RNA (1)...(19): siRNA sense strand
agaaauucaccuagaagaa

SEQ ID NO: 2379315 - RNA, 19 nt, Homo sapiens
  misc_RNA (1)...(19): siRNA sense strand
ggaaaugugcggaagguga

SEQ ID NO: 2379316 - RNA, 19 nt, Homo sapiens
  misc_RNA (1)...(19): siRNA sense strand
aagcaagagauaugugaua

SEQ ID NO: 2379317 - RNA, 19 nt, Homo sapiens
  misc_RNA (1)...(19): siRNA sense strand
cucaaauacugaauggaaa

SEQ ID NO: 2379318 - RNA, 19 nt, Homo sapiens
  misc_RNA (1)...(19): siRNA sense strand
caguguggauugagaauau

SEQ ID NO: 2379319 - RNA, 19 nt, Homo sapiens
  misc_RNA (1)...(19): siRNA sense strand
caaacuaaagaguggacaa

SEQ ID NO: 2379320 - RNA, 19 nt, Homo sapiens
  misc_RNA (1)...(19): siRNA sense strand
ggaucaagaacauggaaaa

SEQ ID NO: 2379321 - RNA, 19 nt, Homo sapiens
  misc_RNA (1)...(19): siRNA sense strand
gcucaaauacugaauggaa

SEQ ID NO: 2379322 - RNA, 19 nt, Homo sapiens
  misc_RNA (1)...(19): siRNA sense strand
ggacaagagaagaaaggga

SEQ ID NO: 2379323 - RNA, 19 nt, Homo sapiens
  misc_RNA (1)...(19): siRNA sense strand
uugaaaugucagaggaaau

SEQ ID NO: 2379324 - RNA, 19 nt, Homo sapiens
  misc_RNA (1)...(19): siRNA sense strand
aggccuuggaggugagaaa

SEQ ID NO: 2379325 - RNA, 19 nt, Homo sapiens
  misc_RNA (1)...(19): siRNA sense strand
ggaguuaagcccagaguca

SEQ ID NO: 2379326 - RNA, 19 nt, Homo sapiens
  misc_RNA (1)...(19): siRNA sense strand
cugaauacauggaacguuu

SEQ ID NO: 2379327 - RNA, 19 nt, Homo sapiens
  misc_RNA (1)...(19): siRNA sense strand
ugaaaugcacugugaggaa

SEQ ID NO: 2379328 - RNA, 19 nt, Homo sapiens
  misc_RNA (1)...(19): siRNA sense strand
acagagugguacugagcaa

SEQ ID NO: 2379329 - RNA, 19 nt, Homo sapiens
  misc_RNA (1)...(19): siRNA sense strand
agagauaugaaguggguuu

SEQ ID NO: 2379330 - RNA, 19 nt, Homo sapiens
  misc_RNA (1)...(19): siRNA sense strand
augaauaugacaaggacaa

SEQ ID NO: 2379331 - RNA, 19 nt, Homo sapiens
  misc_RNA (1)...(19): siRNA sense strand
ugaagaaugggaagauaaa

SEQ ID NO: 2379332 - RNA, 19 nt, Homo sapiens
  misc_RNA (1)...(19): siRNA sense strand
gcgcagcauucuaaacaaa

SEQ ID NO: 2379333 - RNA, 19 nt, Homo sapiens
  misc_RNA (1)...(19): siRNA sense strand
cuguaagagggcagauaua

SEQ ID NO: 2379334 - RNA, 19 nt, Homo sapiens
  misc_RNA (1)...(19): siRNA sense strand
gauuuacagcuguggauaa

SEQ ID NO: 2379335 - RNA, 19 nt, Homo sapiens
  misc_RNA (1)...(19): siRNA sense strand
agaugaugaucgauugaaa

SEQ ID NO: 2379336 - RNA, 19 nt, Homo sapiens
  misc_RNA (1)...(19): siRNA sense strand
ugaugaaacaauagcgaau

SEQ ID NO: 2379337 - RNA, 19 nt, Homo sapiens
  misc_RNA (1)...(19): siRNA sense strand
ccaaguagaagcagauauu

SEQ ID NO: 2379338 - RNA, 19 nt, Homo sapiens
  misc_RNA (1)...(19): siRNA sense strand
agaugagaagcaagagaua

SEQ ID NO: 2379339 - RNA, 19 nt, Homo sapiens
  misc_RNA (1)...(19): siRNA sense strand
gugcaaaggaagagauauc

SEQ ID NO: 2379340 - RNA, 19 nt, Homo sapiens
  misc_RNA (1)...(19): siRNA sense strand
acuaugaagugauggaaga

SEQ ID NO: 2379341 - RNA, 19 nt, Homo sapiens
  misc_RNA (1)...(19): siRNA sense strand
agaaaggagaugauaagaa

SEQ ID NO: 2379342 - RNA, 19 nt, Homo sapiens
  misc_RNA (1)...(19): siRNA sense strand
ccagaaaagcugagcgaga

SEQ ID NO: 2379343 - RNA, 19 nt, Homo sapiens
  misc_RNA (1)...(19): siRNA sense strand
agaagcagauauuggaaau

SEQ ID NO: 2379344 - RNA, 19 nt, Homo sapiens
  misc_RNA (1)...(19): siRNA sense strand
cugaugaagucaaacuaaa

SEQ ID NO: 2379345 - RNA, 19 nt, Homo sapiens
  misc_RNA (1)...(19): siRNA sense strand
acuaaggaucagucagaaa

SEQ ID NO: 2379346 - RNA, 19 nt, Homo sapiens
  misc_RNA (1)...(19): siRNA sense strand
cuuccaaaucaaagggcaa

SEQ ID NO: 2379347 - RNA, 19 nt, Homo sapiens
  misc_RNA (1)...(19): siRNA sense strand
aggaauugccagagcuuaa

SEQ ID NO: 2379348 - RNA, 19 nt, Homo sapiens
  misc_RNA (1)...(19): siRNA sense strand
ggcuaaaguucaagaaaau

SEQ ID NO: 2379349 - RNA, 19 nt, Homo sapiens
  misc_RNA (1)...(19): siRNA sense strand
ccggaaaacaauaggcaaa

SEQ ID NO: 2379350 - RNA, 19 nt, Homo sapiens
  misc_RNA (1)...(19): siRNA sense strand
ccuauauucaagaggcaaa

SEQ ID NO: 2379351 - RNA, 19 nt, Homo sapiens
  misc_RNA (1)...(19): siRNA sense strand
cggcaaaagcagaacaaau

SEQ ID NO: 2379352 - RNA, 19 nt, Homo sapiens
  misc_RNA (1)...(19): siRNA sense strand
uggcuaaaguucaagaaaa

SEQ ID NO: 2379353 - RNA, 19 nt, Homo sapiens
  misc_RNA (1)...(19): siRNA sense strand
ccugaaaacagaaggaaau

SEQ ID NO: 2379354 - RNA, 19 nt, Homo sapiens
  misc_RNA (1)...(19): siRNA sense strand
gcacugaaaucuaaggauc

SEQ ID NO: 2379355 - RNA, 19 nt, Homo sapiens
  misc_RNA (1)...(19): siRNA sense strand
ucuaaggaucggaaagaau

SEQ ID NO: 2379356 - RNA, 19 nt, Homo sapiens
  misc_RNA (1)...(19): siRNA sense strand
agagaaugacacaggugaa

SEQ ID NO: 2379357 - RNA, 19 nt, Homo sapiens
  misc_RNA (1)...(19): siRNA sense strand
ccaucgaggugcaggaaac

SEQ ID NO: 2379358 - RNA, 19 nt, Homo sapiens
  misc_RNA (1)...(19): siRNA sense strand
agaaggaaauugaaggaac

SEQ ID NO: 2379359 - RNA, 19 nt, Homo sapiens
  misc_RNA (1)...(19): siRNA sense strand
acuuugugcccgugguaua

SEQ ID NO: 2379360 - RNA, 19 nt, Homo sapiens
  misc_RNA (1)...(19): siRNA sense strand
uauuauugacgauggacaa

SEQ ID NO: 2379361 - RNA, 19 nt, Homo sapiens
  misc_RNA (1)...(19): siRNA sense strand
aacaauaggcaaagugaga

SEQ ID NO: 2379362 - RNA, 19 nt, Homo sapiens
  misc_RNA (1)...(19): siRNA sense strand
ugaaagcaugcuauggaaa

SEQ ID NO: 2379363 - RNA, 19 nt, Homo sapiens
  misc_RNA (1)...(19): siRNA sense strand
aggcaaaagcuaagggacu

SEQ ID NO: 2379364 - RNA, 19 nt, Homo sapiens
  misc_RNA (1)...(19): siRNA sense strand
acuuggaguuaauggucua

SEQ ID NO: 2379365 - RNA, 19 nt, Homo sapiens
  misc_RNA (1)...(19): siRNA sense strand
guggaaagagugcuggaau

SEQ ID NO: 2379366 - RNA, 19 nt, Homo sapiens
  misc_RNA (1)...(19): siRNA sense strand
ggcaaaagcuaagggacua

SEQ ID NO: 2379367 - RNA, 19 nt, Homo sapiens
  misc_RNA (1)...(19): siRNA sense strand
agcuaagggacuagucaua

SEQ ID NO: 2379368 - RNA, 19 nt, Homo sapiens
  misc_RNA (1)...(19): siRNA sense strand
ucgaagaagaucucaguga

SEQ ID NO: 2379369 - RNA, 19 nt, Homo sapiens
  misc_RNA (1)...(19): siRNA sense strand
acuagaaggccuggaggaa

SEQ ID NO: 2379370 - RNA, 19 nt, Homo sapiens
  misc_RNA (1)...(19): siRNA sense strand
gcgaaauuauuauugacga

SEQ ID NO: 2379371 - RNA, 19 nt, Homo sapiens
  misc_RNA (1)...(19): siRNA sense strand
cuuugaaauaagaggaacu

SEQ ID NO: 2379372 - RNA, 19 nt, Homo sapiens
  misc_RNA (1)...(19): siRNA sense strand
aagaaaugcugcuagucau

SEQ ID NO: 2379373 - RNA, 19 nt, Homo sapiens
  misc_RNA (1)...(19): siRNA sense strand
auggaaugugggaugguaa

SEQ ID NO: 2379374 - RNA, 19 nt, Homo sapiens
  misc_RNA (1)...(19): siRNA sense strand
ugguccaugucaagugaua

SEQ ID NO: 2379375 - RNA, 19 nt, Homo sapiens
  misc_RNA (1)...(19): siRNA sense strand
uggaggaagaugacgauga

SEQ ID NO: 2379376 - RNA, 19 nt, Homo sapiens
  misc_RNA (1)...(19): siRNA sense strand
caauaggcaaagugagagu

SEQ ID NO: 2379377 - RNA, 19 nt, Homo sapiens
  misc_RNA (1)...(19): siRNA sense strand
agacgauggaaccagauaa

SEQ ID NO: 2379378 - RNA, 19 nt, Homo sapiens
  misc_RNA (1)...(19): siRNA sense strand
cuuuguagaauuugacgua

SEQ ID NO: 2379379 - RNA, 19 nt, Homo sapiens
  misc_RNA (1)...(19): siRNA sense strand
aagugagaguugacuauau

SEQ ID NO: 2379380 - RNA, 19 nt, Homo sapiens
  misc_RNA (1)...(19): siRNA sense strand
caguagaggaguaucaguu

SEQ ID NO: 2379381 - RNA, 19 nt, Homo sapiens
  misc_RNA (1)...(19): siRNA sense strand
aggaguaucaguucaguau

SEQ ID NO: 2379382 - RNA, 19 nt, Homo sapiens
  misc_RNA (1)...(19): siRNA sense strand
agauuuagggugaagcuga

SEQ ID NO: 2379383 - RNA, 19 nt, Homo sapiens
  misc_RNA (1)...(19): siRNA sense strand
gcaggaauugccagagcuu

SEQ ID NO: 2379384 - RNA, 19 nt, Homo sapiens
  misc_RNA (1)...(19): siRNA sense strand
acagaaggaaauugaagga

SEQ ID NO: 2379385 - RNA, 19 nt, Homo sapiens
  misc_RNA (1)...(19): siRNA sense strand
ccaggauacaguugugaca

SEQ ID NO: 2379386 - RNA, 19 nt, Homo sapiens
  misc_RNA (1)...(19): siRNA sense strand
gccuuugaaauaagaggaa

SEQ ID NO: 2379387 - RNA, 19 nt, Homo sapiens
  misc_RNA (1)...(19): siRNA sense strand
uugaaaaucuacuggggau

SEQ ID NO: 2379388 - RNA, 19 nt, Homo sapiens
  misc_RNA (1)...(19): siRNA sense strand
gaugacgaugauaggguau

SEQ ID NO: 2379389 - RNA, 19 nt, Homo sapiens
  misc_RNA (1)...(19): siRNA sense strand
cagcaaagggauggaaugu

SEQ ID NO: 2379390 - RNA, 19 nt, Homo sapiens
  misc_RNA (1)...(19): siRNA sense strand
gccugaacaaccaaauaua

SEQ ID NO: 2379391 - RNA, 19 nt, Homo sapiens
  misc_RNA (1)...(19): siRNA sense strand
augcagaaauagaagacaa

SEQ ID NO: 2379392 - RNA, 19 nt, Homo sapiens
  misc_RNA (1)...(19): siRNA sense strand
aggaagaagaagaggagga

SEQ ID NO: 2379393 - RNA, 19 nt, Homo sapiens
  misc_RNA (1)...(19): siRNA sense strand
aagaagaagaggaggagga

SEQ ID NO: 2379394 - RNA, 19 nt, Homo sapiens
  misc_RNA (1)...(19): siRNA sense strand
aagaagaggaggaggagga

SEQ ID NO: 2379395 - RNA, 19 nt, Homo sapiens
  misc_RNA (1)...(19): siRNA sense strand
cggaggaggaagaagaaga

SEQ ID NO: 2379396 - RNA, 19 nt, Homo sapiens
  misc_RNA (1)...(19): siRNA sense strand
uggaggagcuggaggacca

SEQ ID NO: 2379397 - RNA, 19 nt, Homo sapiens
  misc_RNA (1)...(19): siRNA sense strand
uggcagauucacaggacaa

SEQ ID NO: 2379398 - RNA, 19 nt, Homo sapiens
  misc_RNA (1)...(19): siRNA sense strand
ccaggauauccaagacaaa

SEQ ID NO: 2379399 - RNA, 19 nt, Homo sapiens
  misc_RNA (1)...(19): siRNA sense strand
ggaaaagacccggaggaaa

SEQ ID NO: 2379400 - RNA, 19 nt, Homo sapiens
  misc_RNA (1)...(19): siRNA sense strand
auggagaacgagcggauaa

SEQ ID NO: 2379401 - RNA, 19 nt, Homo sapiens
  misc_RNA (1)...(19): siRNA sense strand
auucacaggacaauggaaa

SEQ ID NO: 2379402 - RNA, 19 nt, Homo sapiens
  misc_RNA (1)...(19): siRNA sense strand
cauaagacgcaaaagcaaa

SEQ ID NO: 2379403 - RNA, 19 nt, Homo sapiens
  misc_RNA (1)...(19): siRNA sense strand
aagaggaggaggaggagga

SEQ ID NO: 2379404 - RNA, 19 nt, Homo sapiens
  misc_RNA (1)...(19): siRNA sense strand
ccauaagacgcaaaagcaa

SEQ ID NO: 2379405 - RNA, 19 nt, Homo sapiens
  misc_RNA (1)...(19): siRNA sense strand
cagaaauagaagacaauac

SEQ ID NO: 2379406 - RNA, 19 nt, Homo sapiens
  misc_RNA (1)...(19): siRNA sense strand
acaucccaauuaagagaaa

SEQ ID NO: 2379407 - RNA, 19 nt, Homo sapiens
  misc_RNA (1)...(19): siRNA sense strand
acccaggagcccaggaaau

SEQ ID NO: 2379408 - RNA, 19 nt, Homo sapiens
  misc_RNA (1)...(19): siRNA sense strand
cucacaaggagcuggaaau

SEQ ID NO: 2379409 - RNA, 19 nt, Homo sapiens
  misc_RNA (1)...(19): siRNA sense strand
ucccagaaccucaaggaau

SEQ ID NO: 2379410 - RNA, 19 nt, Homo sapiens
  misc_RNA (1)...(19): siRNA sense strand
agcuggaaaugguggugaa

SEQ ID NO: 2379411 - RNA, 19 nt, Homo sapiens
  misc_RNA (1)...(19): siRNA sense strand
auucagaagaagauggagu

SEQ ID NO: 2379412 - RNA, 19 nt, Homo sapiens
  misc_RNA (1)...(19): siRNA sense strand
gaacaaggaccgcaggaag

SEQ ID NO: 2379413 - RNA, 19 nt, Homo sapiens
  misc_RNA (1)...(19): siRNA sense strand
cggcagauuccaggagaca

SEQ ID NO: 2379414 - RNA, 19 nt, Homo sapiens
  misc_RNA (1)...(19): siRNA sense strand
aggauauccaagacaaaga

SEQ ID NO: 2379415 - RNA, 19 nt, Homo sapiens
  misc_RNA (1)...(19): siRNA sense strand
acaaagagccucauugcca

SEQ ID NO: 2379416 - RNA, 19 nt, Homo sapiens
  misc_RNA (1)...(19): siRNA sense strand
aggaggaagaagaagagga

SEQ ID NO: 2379417 - RNA, 19 nt, Homo sapiens
  misc_RNA (1)...(19): siRNA sense strand
gaaaaugagccgcacggaa

SEQ ID NO: 2379418 - RNA, 19 nt, Homo sapiens
  misc_RNA (1)...(19): siRNA sense strand
gagacaaccccgaacggaa

SEQ ID NO: 2379419 - RNA, 19 nt, Homo sapiens
  misc_RNA (1)...(19): siRNA sense strand
ucauggagaacgagcggau

SEQ ID NO: 2379420 - RNA, 19 nt, Homo sapiens
  misc_RNA (1)...(19): siRNA sense strand
gccucaagcuguuggucca

SEQ ID NO: 2379421 - RNA, 19 nt, Homo sapiens
  misc_RNA (1)...(19): siRNA sense strand
aggaauaccgagauaaauc

SEQ ID NO: 2379422 - RNA, 19 nt, Homo sapiens
  misc_RNA (1)...(19): siRNA sense strand
ugcagaaauagaagacaau

SEQ ID NO: 2379423 - RNA, 19 nt, Homo sapiens
  misc_RNA (1)...(19): siRNA sense strand
ucacacaguucaaggcaga

SEQ ID NO: 2379424 - RNA, 19 nt, Homo sapiens
  misc_RNA (1)...(19): siRNA sense strand
aggaauuugaagugaccaa

SEQ ID NO: 2379425 - RNA, 19 nt, Homo sapiens
  misc_RNA (1)...(19): siRNA sense strand
aggagggaccaaugagcaa

SEQ ID NO: 2379426 - RNA, 19 nt, Homo sapiens
  misc_RNA (1)...(19): siRNA sense strand
uguccaagcuggugauugu

SEQ ID NO: 2379427 - RNA, 19 nt, Homo sapiens
  misc_RNA (1)...(19): siRNA sense strand
ugauauuggacgaaggaau

SEQ ID NO: 2379428 - RNA, 19 nt, Homo sapiens
  misc_RNA (1)...(19): siRNA sense strand
ugaaagaugccuuggacca

SEQ ID NO: 2379429 - RNA, 19 nt, Homo sapiens
  misc_RNA (1)...(19): siRNA sense strand
uggacgaaggaaugggcaa

SEQ ID NO: 2379430 - RNA, 19 nt, Homo sapiens
  misc_RNA (1)...(19): siRNA sense strand
cgaugaucagauugaagaa

SEQ ID NO: 2379431 - RNA, 19 nt, Homo sapiens
  misc_RNA (1)...(19): siRNA sense strand
ugauauuggacgaaggaau

SEQ ID NO: 2379432 - RNA, 19 nt, Homo sapiens
  misc_RNA (1)...(19): siRNA sense strand
aaggaagacuugucgggaa

SEQ ID NO: 2379433 - RNA, 19 nt, Homo sapiens
  misc_RNA (1)...(19): siRNA sense strand
ugaaagaugccuuggacca

SEQ ID NO: 2379434 - RNA, 19 nt, Homo sapiens
  misc_RNA (1)...(19): siRNA sense strand
guacuaucacagaagacaa

SEQ ID NO: 2379435 - RNA, 19 nt, Homo sapiens
  misc_RNA (1)...(19): siRNA sense strand
uggacgaaggaaugggcaa

SEQ ID NO: 2379436 - RNA, 19 nt, Homo sapiens
  misc_RNA (1)...(19): siRNA sense strand
uuaaagaggcagaggcgca

SEQ ID NO: 2379437 - RNA, 19 nt, Homo sapiens
  misc_RNA (1)...(19): siRNA sense strand
aggaagacuugucgggaac

SEQ ID NO: 2379438 - RNA, 19 nt, Homo sapiens
  misc_RNA (1)...(19): siRNA sense strand
cgaugaucagauugaagaa

SEQ ID NO: 2379439 - RNA, 19 nt, Homo sapiens
  misc_RNA (1)...(19): siRNA sense strand
acgaagaagcuuucagacu

SEQ ID NO: 2379440 - RNA, 19 nt, Homo sapiens
  misc_RNA (1)...(19): siRNA sense strand
ccgcauggaguuugaaaau

SEQ ID NO: 2379441 - RNA, 19 nt, Homo sapiens
  misc_RNA (1)...(19): siRNA sense strand
auggagugaaagacauaaa

SEQ ID NO: 2379442 - RNA, 19 nt, Homo sapiens
  misc_RNA (1)...(19): siRNA sense strand
gugaaagacauaaagugga

SEQ ID NO: 2379443 - RNA, 19 nt, Homo sapiens
  misc_RNA (1)...(19): siRNA sense strand
ucacagaagacaagaggag

SEQ ID NO: 2379444 - RNA, 19 nt, Homo sapiens
  misc_RNA (1)...(19): siRNA sense strand
caagagauuggaagaaaau

SEQ ID NO: 2379445 - RNA, 19 nt, Homo sapiens
  misc_RNA (1)...(19): siRNA sense strand
uggaagaaaaugaugauga

SEQ ID NO: 2379446 - RNA, 19 nt, Homo sapiens
  misc_RNA (1)...(19): siRNA sense strand
ggaaagaggugguggagga

SEQ ID NO: 2379447 - RNA, 19 nt, Homo sapiens
  misc_RNA (1)...(19): siRNA sense strand
agauagaggacggaggaaa

SEQ ID NO: 2379448 - RNA, 19 nt, Homo sapiens
  misc_RNA (1)...(19): siRNA sense strand
gagaacagcagaugggcuu

SEQ ID NO: 2379449 - RNA, 19 nt, Homo sapiens
  misc_RNA (1)...(19): siRNA sense strand
ggagugacacggaggccaa

SEQ ID NO: 2379450 - RNA, 19 nt, Homo sapiens
  misc_RNA (1)...(19): siRNA sense strand
augauaaggauacggauau

SEQ ID NO: 2379451 - RNA, 19 nt, Homo sapiens
  misc_RNA (1)...(19): siRNA sense strand
ggagauagaggacggagga

SEQ ID NO: 2379452 - RNA, 19 nt, Homo sapiens
  misc_RNA (1)...(19): siRNA sense strand
ggacacgugugcucggaga

SEQ ID NO: 2379453 - RNA, 19 nt, Homo sapiens
  misc_RNA (1)...(19): siRNA sense strand
ggaucgugugcgacaggaa

SEQ ID NO: 2379454 - RNA, 19 nt, Homo sapiens
  misc_RNA (1)...(19): siRNA sense strand
gugcuuuacccaauggaga

SEQ ID NO: 2379455 - RNA, 19 nt, Homo sapiens
  misc_RNA (1)...(19): siRNA sense strand
guauauuucaggaggaauu

SEQ ID NO: 2379456 - RNA, 19 nt, Homo sapiens
  misc_RNA (1)...(19): siRNA sense strand
agacaauaccugcgugaau

SEQ ID NO: 2379457 - RNA, 19 nt, Homo sapiens
  misc_RNA (1)...(19): siRNA sense strand
cuauguuguugguggauau

SEQ ID NO: 2379458 - RNA, 19 nt, Homo sapiens
  misc_RNA (1)...(19): siRNA sense strand
ugguagaaauuguccagaa

SEQ ID NO: 2379459 - RNA, 19 nt, Homo sapiens
  misc_RNA (1)...(19): siRNA sense strand
gcgcagugcagcuggugaa

SEQ ID NO: 2379460 - RNA, 19 nt, Homo sapiens
  misc_RNA (1)...(19): siRNA sense strand
gaacaagauuugaugugca

SEQ ID NO: 2379461 - RNA, 19 nt, Homo sapiens
  misc_RNA (1)...(19): siRNA sense strand
caggagucucuuuggauaa

SEQ ID NO: 2379462 - RNA, 19 nt, Homo sapiens
  misc_RNA (1)...(19): siRNA sense strand
cagaaauaugacccagaaa

SEQ ID NO: 2379463 - RNA, 19 nt, Homo sapiens
  misc_RNA (1)...(19): siRNA sense strand
caguagauuucaugagaac

SEQ ID NO: 2379464 - RNA, 19 nt, Homo sapiens
  misc_RNA (1)...(19): siRNA sense strand
uguuacaacccaagaauga

SEQ ID NO: 2379465 - RNA, 19 nt, Homo sapiens
  misc_RNA (1)...(19): siRNA sense strand
gguaccaggugauggagau

SEQ ID NO: 2379466 - RNA, 19 nt, Homo sapiens
  misc_RNA (1)...(19): siRNA sense strand
ccauauaugcagccaguga

SEQ ID NO: 2379467 - RNA, 19 nt, Homo sapiens
  misc_RNA (1)...(19): siRNA sense strand
agguggaaugaaagaacaa

SEQ ID NO: 2379468 - RNA, 19 nt, Homo sapiens
  misc_RNA (1)...(19): siRNA sense strand
guuaagaggccaaagugau

SEQ ID NO: 2379469 - RNA, 19 nt, Homo sapiens
  misc_RNA (1)...(19): siRNA sense strand
cagauaaauggaugcaaaa

SEQ ID NO: 2379470 - RNA, 19 nt, Homo sapiens
  misc_RNA (1)...(19): siRNA sense strand
gcuuagaauagaaggauug

SEQ ID NO: 2379471 - RNA, 19 nt, Homo sapiens
  misc_RNA (1)...(19): siRNA sense strand
uguugagguuggacgaauu

SEQ ID NO: 2379472 - RNA, 19 nt, Homo sapiens
  misc_RNA (1)...(19): siRNA sense strand
gguuacauuaggaggaguu

SEQ ID NO: 2379473 - RNA, 19 nt, Homo sapiens
  misc_RNA (1)...(19): siRNA sense strand
guagaauguuacaacccaa

SEQ ID NO: 2379474 - RNA, 19 nt, Homo sapiens
  misc_RNA (1)...(19): siRNA sense strand
gaaugaaugaguggagcua

SEQ ID NO: 2379475 - RNA, 19 nt, Homo sapiens
  misc_RNA (1)...(19): siRNA sense strand
agauuugauccucgguaua

SEQ ID NO: 2379476 - RNA, 19 nt, Homo sapiens
  misc_RNA (1)...(19): siRNA sense strand
uggccacaguagaauguua

SEQ ID NO: 2379477 - RNA, 19 nt, Homo sapiens
  misc_RNA (1)...(19): siRNA sense strand
guguacaguuggagauaag

SEQ ID NO: 2379478 - RNA, 19 nt, Homo sapiens
  misc_RNA (1)...(19): siRNA sense strand
agaaauaugacccagaaaa

SEQ ID NO: 2379479 - RNA, 19 nt, Homo sapiens
  misc_RNA (1)...(19): siRNA sense strand
ggacaaucuucaggacaca

SEQ ID NO: 2379480 - RNA, 19 nt, Homo sapiens
  misc_RNA (1)...(19): siRNA sense strand
ugaugaaagggcacaagaa

SEQ ID NO: 2379481 - RNA, 19 nt, Homo sapiens
  misc_RNA (1)...(19): siRNA sense strand
gauuaugcugcaaaguuaa

SEQ ID NO: 2379482 - RNA, 19 nt, Homo sapiens
  misc_RNA (1)...(19): siRNA sense strand
uggucaugcuggaacagua

SEQ ID NO: 2379483 - RNA, 19 nt, Homo sapiens
  misc_RNA (1)...(19): siRNA sense strand
guggaaugaaagaacaaga

SEQ ID NO: 2379484 - RNA, 19 nt, Homo sapiens
  misc_RNA (1)...(19): siRNA sense strand
ggucaugcuggaacaguau

SEQ ID NO: 2379485 - RNA, 19 nt, Homo sapiens
  misc_RNA (1)...(19): siRNA sense strand
uagaauagaaggauugcuu

SEQ ID NO: 2379486 - RNA, 19 nt, Homo sapiens
  misc_RNA (1)...(19): siRNA sense strand
uuucaugagaacagacaau

SEQ ID NO: 2379487 - RNA, 19 nt, Homo sapiens
  misc_RNA (1)...(19): siRNA sense strand
aguaauagucuuaagcacu

SEQ ID NO: 2379488 - RNA, 19 nt, Homo sapiens
  misc_RNA (1)...(19): siRNA sense strand
ggauggauuaugcugcaaa

SEQ ID NO: 2379489 - RNA, 19 nt, Homo sapiens
  misc_RNA (1)...(19): siRNA sense strand
agcuuagaauagaaggauu

SEQ ID NO: 2379490 - RNA, 19 nt, Homo sapiens
  misc_RNA (1)...(19): siRNA sense strand
caguaauagucuuaagcac

SEQ ID NO: 2379491 - RNA, 19 nt, Homo sapiens
  misc_RNA (1)...(19): siRNA sense strand
uguuaagaggccaaaguga

SEQ ID NO: 2379492 - RNA, 19 nt, Homo sapiens
  misc_RNA (1)...(19): siRNA sense strand
auguauauuucaggaggaa

SEQ ID NO: 2379493 - RNA, 19 nt, Homo sapiens
  misc_RNA (1)...(19): siRNA sense strand
cgccauguuaagaggccaa

SEQ ID NO: 2379494 - RNA, 19 nt, Homo sapiens
  misc_RNA (1)...(19): siRNA sense strand
acaguagauuucaugagaa

SEQ ID NO: 2379495 - RNA, 19 nt, Homo sapiens
  misc_RNA (1)...(19): siRNA sense strand
ccacuauggucaugcugga

SEQ ID NO: 2379496 - RNA, 19 nt, Homo sapiens
  misc_RNA (1)...(19): siRNA sense strand
aggaauuacccaugacacu

SEQ ID NO: 2379497 - RNA, 19 nt, Homo sapiens
  misc_RNA (1)...(19): siRNA sense strand
aagaauuacggauguauga

SEQ ID NO: 2379498 - RNA, 19 nt, Homo sapiens
  misc_RNA (1)...(19): siRNA sense strand
ucacagguggaaugaaaga

SEQ ID NO: 2379499 - RNA, 19 nt, Homo sapiens
  misc_RNA (1)...(19): siRNA sense strand
augaaugaguggagcuaug

SEQ ID NO: 2379500 - RNA, 19 nt, Homo sapiens
  misc_RNA (1)...(19): siRNA sense strand
gcuuugaucagcuuagaau

SEQ ID NO: 2379501 - RNA, 19 nt, Homo sapiens
  misc_RNA (1)...(19): siRNA sense strand
agauaagcucuaugucauu

SEQ ID NO: 2379502 - RNA, 19 nt, Homo sapiens
  misc_RNA (1)...(19): siRNA sense strand
ccaacaugcuccagcggaa

SEQ ID NO: 2379503 - RNA, 19 nt, Homo sapiens
  misc_RNA (1)...(19): siRNA sense strand
uggaggaagcuaugagcaa

SEQ ID NO: 2379504 - RNA, 19 nt, Homo sapiens
  misc_RNA (1)...(19): siRNA sense strand
aagaagaaguacaaggcca

SEQ ID NO: 2379505 - RNA, 19 nt, Homo sapiens
  misc_RNA (1)...(19): siRNA sense strand
auuaagaaccugagggaag

SEQ ID NO: 2379506 - RNA, 19 nt, Homo sapiens
  misc_RNA (1)...(19): siRNA sense strand
gcaagaagaaacuccgcaa

SEQ ID NO: 2379507 - RNA, 19 nt, Homo sapiens
  misc_RNA (1)...(19): siRNA sense strand
acuuaaagauggaggaagc

SEQ ID NO: 2379508 - RNA, 19 nt, Homo sapiens
  misc_RNA (1)...(19): siRNA sense strand
ggaaagaccacaagcugca

SEQ ID NO: 2379509 - RNA, 19 nt, Homo sapiens
  misc_RNA (1)...(19): siRNA sense strand
ggacagcuuucuucgggaa

SEQ ID NO: 2379510 - RNA, 19 nt, Homo sapiens
  misc_RNA (1)...(19): siRNA sense strand
uggccuggugaaagggaaa

SEQ ID NO: 2379511 - RNA, 19 nt, Homo sapiens
  misc_RNA (1)...(19): siRNA sense strand
cugcggauauggacgggaa

SEQ ID NO: 2379512 - RNA, 19 nt, Homo sapiens
  misc_RNA (1)...(19): siRNA sense strand
agcagaagcgcaagaagaa

SEQ ID NO: 2379513 - RNA, 19 nt, Homo sapiens
  misc_RNA (1)...(19): siRNA sense strand
guuccaugcaggugaugaa

SEQ ID NO: 2379514 - RNA, 19 nt, Homo sapiens
  misc_RNA (1)...(19): siRNA sense strand
cagagggaccgcaggaaca

SEQ ID NO: 2379515 - RNA, 19 nt, Homo sapiens
  misc_RNA (1)...(19): siRNA sense strand
ucuccaaccucgugcccaa

SEQ ID NO: 2379516 - RNA, 19 nt, Homo sapiens
  misc_RNA (1)...(19): siRNA sense strand
acaagagagacaaugacaa

SEQ ID NO: 2379517 - RNA, 19 nt, Homo sapiens
  misc_RNA (1)...(19): siRNA sense strand
cgugugagcagcugggaca

SEQ ID NO: 2379518 - RNA, 19 nt, Homo sapiens
  misc_RNA (1)...(19): siRNA sense strand
agauugaaacccugcagaa

SEQ ID NO: 2379519 - RNA, 19 nt, Homo sapiens
  misc_RNA (1)...(19): siRNA sense strand
cugaggagcugcaaggguu

SEQ ID NO: 2379520 - RNA, 19 nt, Homo sapiens
  misc_RNA (1)...(19): siRNA sense strand
cugcuacacaagagagaca

SEQ ID NO: 2379521 - RNA, 19 nt, Homo sapiens
  misc_RNA (1)...(19): siRNA sense strand
cugaggaccaagaugacaa

SEQ ID NO: 2379522 - RNA, 19 nt, Homo sapiens
  misc_RNA (1)...(19): siRNA sense strand
gugugaaggaccuguguca

SEQ ID NO: 2379523 - RNA, 19 nt, Homo sapiens
  misc_RNA (1)...(19): siRNA sense strand
uggacauaccugcggauau

SEQ ID NO: 2379524 - RNA, 19 nt, Homo sapiens
  misc_RNA (1)...(19): siRNA sense strand
gaaacauggaccugggacu

SEQ ID NO: 2379525 - RNA, 19 nt, Homo sapiens
  misc_RNA (1)...(19): siRNA sense strand
aagggaaauccaugccaua

SEQ ID NO: 2379526 - RNA, 19 nt, Homo sapiens
  misc_RNA (1)...(19): siRNA sense strand
aaauuaagaaccugaggga

SEQ ID NO: 2379527 - RNA, 19 nt, Homo sapiens
  misc_RNA (1)...(19): siRNA sense strand
acaucgaccacgagauuga

SEQ ID NO: 2379528 - RNA, 19 nt, Homo sapiens
  misc_RNA (1)...(19): siRNA sense strand
gcuacacaagagagacaau

SEQ ID NO: 2379529 - RNA, 19 nt, Homo sapiens
  misc_RNA (1)...(19): siRNA sense strand
gagacaaugacaaggugga

SEQ ID NO: 2379530 - RNA, 19 nt, Homo sapiens
  misc_RNA (1)...(19): siRNA sense strand
ugaggagcugcaaggguua

SEQ ID NO: 2379531 - RNA, 19 nt, Homo sapiens
  misc_RNA (1)...(19): siRNA sense strand
ggaaggagugggucggacu

SEQ ID NO: 2379532 - RNA, 19 nt, Homo sapiens
  misc_RNA (1)...(19): siRNA sense strand
ccggacaaacacuggauca

SEQ ID NO: 2379533 - RNA, 19 nt, Homo sapiens
  misc_RNA (1)...(19): siRNA sense strand
ccaagaagauguacccgca

SEQ ID NO: 2379534 - RNA, 19 nt, Homo sapiens
  misc_RNA (1)...(19): siRNA sense strand
agacgggcgagcuggacaa

SEQ ID NO: 2379535 - RNA, 19 nt, Homo sapiens
  misc_RNA (1)...(19): siRNA sense strand
ggacagaaguggcagugug

SEQ ID NO: 2379536 - RNA, 19 nt, Homo sapiens
  misc_RNA (1)...(19): siRNA sense strand
ccaacaugcuccagcggaa

SEQ ID NO: 2379537 - RNA, 19 nt, Homo sapiens
  misc_RNA (1)...(19): siRNA sense strand
uggaggaagcuaugagcaa

SEQ ID NO: 2379538 - RNA, 19 nt, Homo sapiens
  misc_RNA (1)...(19): siRNA sense strand
aagaagaaguacaaggcca

SEQ ID NO: 2379539 - RNA, 19 nt, Homo sapiens
  misc_RNA (1)...(19): siRNA sense strand
auuaagaaccugagggaag

SEQ ID NO: 2379540 - RNA, 19 nt, Homo sapiens
  misc_RNA (1)...(19): siRNA sense strand
gcaagaagaaacuccgcaa

SEQ ID NO: 2379541 - RNA, 19 nt, Homo sapiens
  misc_RNA (1)...(19): siRNA sense strand
acuuaaagauggaggaagc

SEQ ID NO: 2379542 - RNA, 19 nt, Homo sapiens
  misc_RNA (1)...(19): siRNA sense strand
ggaaagaccacaagcugca

SEQ ID NO: 2379543 - RNA, 19 nt, Homo sapiens
  misc_RNA (1)...(19): siRNA sense strand
ggacagcuuucuucgggaa

SEQ ID NO: 2379544 - RNA, 19 nt, Homo sapiens
  misc_RNA (1)...(19): siRNA sense strand
uggccuggugaaagggaaa

SEQ ID NO: 2379545 - RNA, 19 nt, Homo sapiens
  misc_RNA (1)...(19): siRNA sense strand
cugcggauauggacgggaa

SEQ ID NO: 2379546 - RNA, 19 nt, Homo sapiens
  misc_RNA (1)...(19): siRNA sense strand
agcagaagcgcaagaagaa

SEQ ID NO: 2379547 - RNA, 19 nt, Homo sapiens
  misc_RNA (1)...(19): siRNA sense strand
guuccaugcaggugaugaa

SEQ ID NO: 2379548 - RNA, 19 nt, Homo sapiens
  misc_RNA (1)...(19): siRNA sense strand
cagagggaccgcaggaaca

SEQ ID NO: 2379549 - RNA, 19 nt, Homo sapiens
  misc_RNA (1)...(19): siRNA sense strand
ucuccaaccucgugcccaa

SEQ ID NO: 2379550 - RNA, 19 nt, Homo sapiens
  misc_RNA (1)...(19): siRNA sense strand
acaagagagacaaugacaa

SEQ ID NO: 2379551 - RNA, 19 nt, Homo sapiens
  misc_RNA (1)...(19): siRNA sense strand
cgugugagcagcugggaca

SEQ ID NO: 2379552 - RNA, 19 nt, Homo sapiens
  misc_RNA (1)...(19): siRNA sense strand
agauugaaacccugcagaa

SEQ ID NO: 2379553 - RNA, 19 nt, Homo sapiens
  misc_RNA (1)...(19): siRNA sense strand
cugaggagcugcaaggguu

SEQ ID NO: 2379554 - RNA, 19 nt, Homo sapiens
  misc_RNA (1)...(19): siRNA sense strand
cugcuacacaagagagaca

SEQ ID NO: 2379555 - RNA, 19 nt, Homo sapiens
  misc_RNA (1)...(19): siRNA sense strand
cugaggaccaagaugacaa

SEQ ID NO: 2379556 - RNA, 19 nt, Homo sapiens
  misc_RNA (1)...(19): siRNA sense strand
gugugaaggaccuguguca

SEQ ID NO: 2379557 - RNA, 19 nt, Homo sapiens
  misc_RNA (1)...(19): siRNA sense strand
uggacauaccugcggauau

SEQ ID NO: 2379558 - RNA, 19 nt, Homo sapiens
  misc_RNA (1)...(19): siRNA sense strand
gaaacauggaccugggacu

SEQ ID NO: 2379559 - RNA, 19 nt, Homo sapiens
  misc_RNA (1)...(19): siRNA sense strand
aagggaaauccaugccaua

SEQ ID NO: 2379560 - RNA, 19 nt, Homo sapiens
  misc_RNA (1)...(19): siRNA sense strand
aaauuaagaaccugaggga

SEQ ID NO: 2379561 - RNA, 19 nt, Homo sapiens
  misc_RNA (1)...(19): siRNA sense strand
acaucgaccacgagauuga

SEQ ID NO: 2379562 - RNA, 19 nt, Homo sapiens
  misc_RNA (1)...(19): siRNA sense strand
gcuacacaagagagacaau

SEQ ID NO: 2379563 - RNA, 19 nt, Homo sapiens
  misc_RNA (1)...(19): siRNA sense strand
gagacaaugacaaggugga

SEQ ID NO: 2379564 - RNA, 19 nt, Homo sapiens
  misc_RNA (1)...(19): siRNA sense strand
ugaggagcugcaaggguua

SEQ ID NO: 2379565 - RNA, 19 nt, Homo sapiens
  misc_RNA (1)...(19): siRNA sense strand
ggaaggagugggucggacu

SEQ ID NO: 2379566 - RNA, 19 nt, Homo sapiens
  misc_RNA (1)...(19): siRNA sense strand
ccggacaaacacuggauca

SEQ ID NO: 2379567 - RNA, 19 nt, Homo sapiens
  misc_RNA (1)...(19): siRNA sense strand
ccaagaagauguacccgca

SEQ ID NO: 2379568 - RNA, 19 nt, Homo sapiens
  misc_RNA (1)...(19): siRNA sense strand
agacgggcgagcuggacaa

SEQ ID NO: 2379569 - RNA, 19 nt, Homo sapiens
  misc_RNA (1)...(19): siRNA sense strand
ggacagaaguggcagugug

SEQ ID NO: 2379570 - RNA, 19 nt, Homo sapiens
  misc_RNA (1)...(19): siRNA sense strand
agaucgaguugaagggcuu

SEQ ID NO: 2379571 - RNA, 19 nt, Homo sapiens
  misc_RNA (1)...(19): siRNA sense strand
acagagaugcggaacgaga

SEQ ID NO: 2379572 - RNA, 19 nt, Homo sapiens
  misc_RNA (1)...(19): siRNA sense strand
ccucacagcuugcaggcca

SEQ ID NO: 2379573 - RNA, 19 nt, Homo sapiens
  misc_RNA (1)...(19): siRNA sense strand
ggaaauggauucagagcca

SEQ ID NO: 2379574 - RNA, 19 nt, Homo sapiens
  misc_RNA (1)...(19): siRNA sense strand
aggaaauaaucaaggguac

SEQ ID NO: 2379575 - RNA, 19 nt, Homo sapiens
  misc_RNA (1)...(19): siRNA sense strand
gcaacaguaugaauggcua

SEQ ID NO: 2379576 - RNA, 19 nt, Homo sapiens
  misc_RNA (1)...(19): siRNA sense strand
agagauuagcuaaggagau

SEQ ID NO: 2379577 - RNA, 19 nt, Homo sapiens
  misc_RNA (1)...(19): siRNA sense strand
gcuuguauggagcgagcua

SEQ ID NO: 2379578 - RNA, 19 nt, Homo sapiens
  misc_RNA (1)...(19): siRNA sense strand
cggcaauggaaauggauuc

SEQ ID NO: 2379579 - RNA, 19 nt, Homo sapiens
  misc_RNA (1)...(19): siRNA sense strand
gcgugguagaggugacauu

SEQ ID NO: 2379580 - RNA, 19 nt, Homo sapiens
  misc_RNA (1)...(19): siRNA sense strand
aaggaaauaaucaagggua

SEQ ID NO: 2379581 - RNA, 19 nt, Homo sapiens
  misc_RNA (1)...(19): siRNA sense strand
cugcagaucuaguggaagc

SEQ ID NO: 2379582 - RNA, 19 nt, Homo sapiens
  misc_RNA (1)...(19): siRNA sense strand
guacaugguuggaggacau

SEQ ID NO: 2379583 - RNA, 19 nt, Homo sapiens
  misc_RNA (1)...(19): siRNA sense strand
agauaaaguugguguuaga

SEQ ID NO: 2379584 - RNA, 19 nt, Homo sapiens
  misc_RNA (1)...(19): siRNA sense strand
agaugaaggaugaggauuu

SEQ ID NO: 2379585 - RNA, 19 nt, Homo sapiens
  misc_RNA (1)...(19): siRNA sense strand
agacuugggagaagagaaa

SEQ ID NO: 2379586 - RNA, 19 nt, Homo sapiens
  misc_RNA (1)...(19): siRNA sense strand
gaucauuacuauagagacu

SEQ ID NO: 2379587 - RNA, 19 nt, Homo sapiens
  misc_RNA (1)...(19): siRNA sense strand
ugaacaaaccaaagaagaa

SEQ ID NO: 2379588 - RNA, 19 nt, Homo sapiens
  misc_RNA (1)...(19): siRNA sense strand
aaguagaacaagaggaaaa

SEQ ID NO: 2379589 - RNA, 19 nt, Homo sapiens
  misc_RNA (1)...(19): siRNA sense strand
aggaaaggaguaagugaaa

SEQ ID NO: 2379590 - RNA, 19 nt, Homo sapiens
  misc_RNA (1)...(19): siRNA sense strand
gagucaaaucagaggaaga

SEQ ID NO: 2379591 - RNA, 19 nt, Homo sapiens
  misc_RNA (1)...(19): siRNA sense strand
gguuacaauccacgagaaa

SEQ ID NO: 2379592 - RNA, 19 nt, Homo sapiens
  misc_RNA (1)...(19): siRNA sense strand
uauaagaagacuugggaga

SEQ ID NO: 2379593 - RNA, 19 nt, Homo sapiens
  misc_RNA (1)...(19): siRNA sense strand
gcaauauguuguagaucau

SEQ ID NO: 2379594 - RNA, 19 nt, Homo sapiens
  misc_RNA (1)...(19): siRNA sense strand
aggaaugcauagggagaaa

SEQ ID NO: 2379595 - RNA, 19 nt, Homo sapiens
  misc_RNA (1)...(19): siRNA sense strand
aagugaaauuggagaagau

SEQ ID NO: 2379596 - RNA, 19 nt, Homo sapiens
  misc_RNA (1)...(19): siRNA sense strand
augcauagggagaaacaua

SEQ ID NO: 2379597 - RNA, 19 nt, Homo sapiens
  misc_RNA (1)...(19): siRNA sense strand
ccacauggcccuuggacuu

SEQ ID NO: 2379598 - RNA, 19 nt, Homo sapiens
  misc_RNA (1)...(19): siRNA sense strand
ggacuagaagggagcacaa

SEQ ID NO: 2379599 - RNA, 19 nt, Homo sapiens
  misc_RNA (1)...(19): siRNA sense strand
agauuuaagcaaaggaaca

SEQ ID NO: 2379600 - RNA, 19 nt, Homo sapiens
  misc_RNA (1)...(19): siRNA sense strand
ggaacugcucauagauuua

SEQ ID NO: 2379601 - RNA, 19 nt, Homo sapiens
  misc_RNA (1)...(19): siRNA sense strand
cacgagaaacagaaggaaa

SEQ ID NO: 2379602 - RNA, 19 nt, Homo sapiens
  misc_RNA (1)...(19): siRNA sense strand
gcaguuaaggaaaggagua

SEQ ID NO: 2379603 - RNA, 19 nt, Homo sapiens
  misc_RNA (1)...(19): siRNA sense strand
ucuaaugggagaaggaauu

SEQ ID NO: 2379604 - RNA, 19 nt, Homo sapiens
  misc_RNA (1)...(19): siRNA sense strand
gugucaacguagugcagua

SEQ ID NO: 2379605 - RNA, 19 nt, Homo sapiens
  misc_RNA (1)...(19): siRNA sense strand
acacaacaguagaccuuaa

SEQ ID NO: 2379606 - RNA, 19 nt, Homo sapiens
  misc_RNA (1)...(19): siRNA sense strand
cuccaaagccucuuaguaa

SEQ ID NO: 2379607 - RNA, 19 nt, Homo sapiens
  misc_RNA (1)...(19): siRNA sense strand
agguuuaguuucaggcauu

SEQ ID NO: 2379608 - RNA, 19 nt, Homo sapiens
  misc_RNA (1)...(19): siRNA sense strand
gugaaaugaacuaugguuu

SEQ ID NO: 2379609 - RNA, 19 nt, Homo sapiens
  misc_RNA (1)...(19): siRNA sense strand
aguaagugaaauuggagaa

SEQ ID NO: 2379610 - RNA, 19 nt, Homo sapiens
  misc_RNA (1)...(19): siRNA sense strand
ccucuauuguaaugacuua

SEQ ID NO: 2379611 - RNA, 19 nt, Homo sapiens
  misc_RNA (1)...(19): siRNA sense strand
cgaaggaaacuuacccaaa

SEQ ID NO: 2379612 - RNA, 19 nt, Homo sapiens
  misc_RNA (1)...(19): siRNA sense strand
gggacagcucacagacaua

SEQ ID NO: 2379613 - RNA, 19 nt, Homo sapiens
  misc_RNA (1)...(19): siRNA sense strand
gaauauuucugcaagccaa

SEQ ID NO: 2379614 - RNA, 19 nt, Homo sapiens
  misc_RNA (1)...(19): siRNA sense strand
uuacaauccacgagaaaca

SEQ ID NO: 2379615 - RNA, 19 nt, Homo sapiens
  misc_RNA (1)...(19): siRNA sense strand
uuggagaagauguggacua

SEQ ID NO: 2379616 - RNA, 19 nt, Homo sapiens
  misc_RNA (1)...(19): siRNA sense strand
aggcauuggcaguuuauaa

SEQ ID NO: 2379617 - RNA, 19 nt, Homo sapiens
  misc_RNA (1)...(19): siRNA sense strand
guucaucacgggugcaaua

SEQ ID NO: 2379618 - RNA, 19 nt, Homo sapiens
  misc_RNA (1)...(19): siRNA sense strand
gcauagggagaaacauaaa

SEQ ID NO: 2379619 - RNA, 19 nt, Homo sapiens
  misc_RNA (1)...(19): siRNA sense strand
caguuaaggaaaggaguaa

SEQ ID NO: 2379620 - RNA, 19 nt, Homo sapiens
  misc_RNA (1)...(19): siRNA sense strand
gugaagugcaccauugaua

SEQ ID NO: 2379621 - RNA, 19 nt, Homo sapiens
  misc_RNA (1)...(19): siRNA sense strand
ugaaagaagcagacuugua

SEQ ID NO: 2379622 - RNA, 19 nt, Homo sapiens
  misc_RNA (1)...(19): siRNA sense strand
gaaacuuacccaaagggaa

SEQ ID NO: 2379623 - RNA, 19 nt, Homo sapiens
  misc_RNA (1)...(19): siRNA sense strand
aggaaaaggaaaacagauu

SEQ ID NO: 2379624 - RNA, 19 nt, Homo sapiens
  misc_RNA (1)...(19): siRNA sense strand
acucuauguugcuggaaau

SEQ ID NO: 2379625 - RNA, 19 nt, Homo sapiens
  misc_RNA (1)...(19): siRNA sense strand
gagugguucgggugggaaa

SEQ ID NO: 2379626 - RNA, 19 nt, Homo sapiens
  misc_RNA (1)...(19): siRNA sense strand
cagaaguccuguuggcuga

SEQ ID NO: 2379627 - RNA, 19 nt, Homo sapiens
  misc_RNA (1)...(19): siRNA sense strand
ccauguauuuguuggacuu

SEQ ID NO: 2379628 - RNA, 19 nt, Homo sapiens
  misc_RNA (1)...(19): siRNA sense strand
aaggaaaggaguaagugaa

SEQ ID NO: 2379629 - RNA, 19 nt, Homo sapiens
  misc_RNA (1)...(19): siRNA sense strand
gaggauuugaauuuggaaa

SEQ ID NO: 2379630 - RNA, 19 nt, Homo sapiens
  misc_RNA (1)...(19): siRNA sense strand
gcacccacuagaugaaaua

SEQ ID NO: 2379631 - RNA, 19 nt, Homo sapiens
  misc_RNA (1)...(19): siRNA sense strand
uaguaaacuccuuggauca

SEQ ID NO: 2379632 - RNA, 19 nt, Homo sapiens
  misc_RNA (1)...(19): siRNA sense strand
acgaguucaucgaggaaaa

SEQ ID NO: 2379633 - RNA, 19 nt, Homo sapiens
  misc_RNA (1)...(19): siRNA sense strand
uagcauagaaggaaaggau

SEQ ID NO: 2379634 - RNA, 19 nt, Homo sapiens
  misc_RNA (1)...(19): siRNA sense strand
gaucauuggacgagguugu

SEQ ID NO: 2379635 - RNA, 19 nt, Homo sapiens
  misc_RNA (1)...(19): siRNA sense strand
uggcauuggccuuguauau

SEQ ID NO: 2379636 - RNA, 19 nt, Homo sapiens
  misc_RNA (1)...(19): siRNA sense strand
acaggaaugcauagggaga

SEQ ID NO: 2379637 - RNA, 19 nt, Homo sapiens
  misc_RNA (1)...(19): siRNA sense strand
guuuauuacaucugaccua

SEQ ID NO: 2379638 - RNA, 19 nt, Homo sapiens
  misc_RNA (1)...(19): siRNA sense strand
gggaacaacuuuauccaga

SEQ ID NO: 2379639 - RNA, 19 nt, Homo sapiens
  misc_RNA (1)...(19): siRNA sense strand
agcagaaaggauagcuaaa

SEQ ID NO: 2379640 - RNA, 19 nt, Homo sapiens
  misc_RNA (1)...(19): siRNA sense strand
ggauguuacagguggacca

SEQ ID NO: 2379641 - RNA, 19 nt, Homo sapiens
  misc_RNA (1)...(19): siRNA sense strand
guguggaaggcaagaugua

SEQ ID NO: 2379642 - RNA, 19 nt, Homo sapiens
  misc_RNA (1)...(19): siRNA sense strand
acaguuguguggaaggcaa

SEQ ID NO: 2379643 - RNA, 19 nt, Homo sapiens
  misc_RNA (1)...(19): siRNA sense strand
guggaaggcaagauguaca

SEQ ID NO: 2379644 - RNA, 19 nt, Homo sapiens
  misc_RNA (1)...(19): siRNA sense strand
ggaauucacugcugggaug

SEQ ID NO: 2379645 - RNA, 19 nt, Homo sapiens
  misc_RNA (1)...(19): siRNA sense strand
uugaugucacgaagaguaa

SEQ ID NO: 2379646 - RNA, 19 nt, Homo sapiens
  misc_RNA (1)...(19): siRNA sense strand
gaaaugaauguuaugcuga

SEQ ID NO: 2379647 - RNA, 19 nt, Homo sapiens
  misc_RNA (1)...(19): siRNA sense strand
uagcaagacaagcuggaga

SEQ ID NO: 2379648 - RNA, 19 nt, Homo sapiens
  misc_RNA (1)...(19): siRNA sense strand
ggguguuaccagaaggcaa

SEQ ID NO: 2379649 - RNA, 19 nt, Homo sapiens
  misc_RNA (1)...(19): siRNA sense strand
ccagaagauaguaggauca

SEQ ID NO: 2379650 - RNA, 19 nt, Homo sapiens
  misc_RNA (1)...(19): siRNA sense strand
cagugaaagaagugaagau

SEQ ID NO: 2379651 - RNA, 19 nt, Homo sapiens
  misc_RNA (1)...(19): siRNA sense strand
gauacauuuccaugguaaa

SEQ ID NO: 2379652 - RNA, 19 nt, Homo sapiens
  misc_RNA (1)...(19): siRNA sense strand
ggagaaaucuguggaccga

SEQ ID NO: 2379653 - RNA, 19 nt, Homo sapiens
  misc_RNA (1)...(19): siRNA sense strand
guauacaauuaucaggcau

SEQ ID NO: 2379654 - RNA, 19 nt, Homo sapiens
  misc_RNA (1)...(19): siRNA sense strand
guauacaauuaucaggcau

SEQ ID NO: 2379655 - RNA, 19 nt, Homo sapiens
  misc_RNA (1)...(19): siRNA sense strand
cggaauccaaacacugaaa

SEQ ID NO: 2379656 - RNA, 19 nt, Homo sapiens
  misc_RNA (1)...(19): siRNA sense strand
ugaaauacaccuugagcaa

SEQ ID NO: 2379657 - RNA, 19 nt, Homo sapiens
  misc_RNA (1)...(19): siRNA sense strand
gguacuuugucuuggauaa

SEQ ID NO: 2379658 - RNA, 19 nt, Homo sapiens
  misc_RNA (1)...(19): siRNA sense strand
aagaauuagaagagagaca

SEQ ID NO: 2379659 - RNA, 19 nt, Homo sapiens
  misc_RNA (1)...(19): siRNA sense strand
cugaagagguggacaagau

SEQ ID NO: 2379660 - RNA, 19 nt, Homo sapiens
  misc_RNA (1)...(19): siRNA sense strand
acaaugagcaagaggucaa

SEQ ID NO: 2379661 - RNA, 19 nt, Homo sapiens
  misc_RNA (1)...(19): siRNA sense strand
agcaagaggucaaguacaa

SEQ ID NO: 2379662 - RNA, 19 nt, Homo sapiens
  misc_RNA (1)...(19): siRNA sense strand
aguugagacuugugaauau

SEQ ID NO: 2379663 - RNA, 19 nt, Homo sapiens
  misc_RNA (1)...(19): siRNA sense strand
ggaccugagacaagaguuu

SEQ ID NO: 2379664 - RNA, 19 nt, Homo sapiens
  misc_RNA (1)...(19): siRNA sense strand
gggcuguuacugugaauaa

SEQ ID NO: 2379665 - RNA, 19 nt, Homo sapiens
  misc_RNA (1)...(19): siRNA sense strand
agucauagucgcaccaaua

SEQ ID NO: 2379666 - RNA, 19 nt, Homo sapiens
  misc_RNA (1)...(19): siRNA sense strand
ccaagaacaaugagcaaga

SEQ ID NO: 2379667 - RNA, 19 nt, Homo sapiens
  misc_RNA (1)...(19): siRNA sense strand
agaagaaagagacuggaaa

SEQ ID NO: 2379668 - RNA, 19 nt, Homo sapiens
  misc_RNA (1)...(19): siRNA sense strand
auucaagguuugcagauaa

SEQ ID NO: 2379669 - RNA, 19 nt, Homo sapiens
  misc_RNA (1)...(19): siRNA sense strand
aggaaguacuggagauugu

SEQ ID NO: 2379670 - RNA, 19 nt, Homo sapiens
  misc_RNA (1)...(19): siRNA sense strand
uggaacaaccucuuggaaa

SEQ ID NO: 2379671 - RNA, 19 nt, Homo sapiens
  misc_RNA (1)...(19): siRNA sense strand
cugauucauuggaaaguaa

SEQ ID NO: 2379672 - RNA, 19 nt, Homo sapiens
  misc_RNA (1)...(19): siRNA sense strand
gugaauuuccugauaacua

SEQ ID NO: 2379673 - RNA, 19 nt, Homo sapiens
  misc_RNA (1)...(19): siRNA sense strand
cgccaagacaugagcauau

SEQ ID NO: 2379674 - RNA, 19 nt, Homo sapiens
  misc_RNA (1)...(19): siRNA sense strand
cugauaugcuugaugaaaa

SEQ ID NO: 2379675 - RNA, 19 nt, Homo sapiens
  misc_RNA (1)...(19): siRNA sense strand
aaauacaccuugagcaaca

SEQ ID NO: 2379676 - RNA, 19 nt, Homo sapiens
  misc_RNA (1)...(19): siRNA sense strand
ccucuaaaguucagcacca

SEQ ID NO: 2379677 - RNA, 19 nt, Homo sapiens
  misc_RNA (1)...(19): siRNA sense strand
ugaagaauuagaagagaga

SEQ ID NO: 2379678 - RNA, 19 nt, Homo sapiens
  misc_RNA (1)...(19): siRNA sense strand
auuuaaaguucccgaugaa

SEQ ID NO: 2379679 - RNA, 19 nt, Homo sapiens
  misc_RNA (1)...(19): siRNA sense strand
uggaaggaaaguuuaguaa

SEQ ID NO: 2379680 - RNA, 19 nt, Homo sapiens
  misc_RNA (1)...(19): siRNA sense strand
agguaaaagugaugguuga

SEQ ID NO: 2379681 - RNA, 19 nt, Homo sapiens
  misc_RNA (1)...(19): siRNA sense strand
caagauuccuuuugugaaa

SEQ ID NO: 2379682 - RNA, 19 nt, Homo sapiens
  misc_RNA (1)...(19): siRNA sense strand
gaggaauugcagaagagaa

SEQ ID NO: 2379683 - RNA, 19 nt, Homo sapiens
  misc_RNA (1)...(19): siRNA sense strand
ggucaaguacaaaggagau

SEQ ID NO: 2379684 - RNA, 19 nt, Homo sapiens
  misc_RNA (1)...(19): siRNA sense strand
gcaacagagugaggaggaa

SEQ ID NO: 2379685 - RNA, 19 nt, Homo sapiens
  misc_RNA (1)...(19): siRNA sense strand
gugaggaggaauugcagaa

SEQ ID NO: 2379686 - RNA, 19 nt, Homo sapiens
  misc_RNA (1)...(19): siRNA sense strand
gaagacuggagaagagauu

SEQ ID NO: 2379687 - RNA, 19 nt, Homo sapiens
  misc_RNA (1)...(19): siRNA sense strand
guuugaugcaagugaauuu

SEQ ID NO: 2379688 - RNA, 19 nt, Homo sapiens
  misc_RNA (1)...(19): siRNA sense strand
ggguaaaggaugcugcuga

SEQ ID NO: 2379689 - RNA, 19 nt, Homo sapiens
  misc_RNA (1)...(19): siRNA sense strand
cuucauaaugggauaaaca

SEQ ID NO: 2379690 - RNA, 19 nt, Homo sapiens
  misc_RNA (1)...(19): siRNA sense strand
ccaacagaauugcgaagau

SEQ ID NO: 2379691 - RNA, 19 nt, Homo sapiens
  misc_RNA (1)...(19): siRNA sense strand
guccaagaacaaugagcaa

SEQ ID NO: 2379692 - RNA, 19 nt, Homo sapiens
  misc_RNA (1)...(19): siRNA sense strand
ccaagauagugauucaaau

SEQ ID NO: 2379693 - RNA, 19 nt, Homo sapiens
  misc_RNA (1)...(19): siRNA sense strand
uguggaaacuacugcaaau

SEQ ID NO: 2379694 - RNA, 19 nt, Homo sapiens
  misc_RNA (1)...(19): siRNA sense strand
ucaaggagccacuggaaaa

SEQ ID NO: 2379695 - RNA, 19 nt, Homo sapiens
  misc_RNA (1)...(19): siRNA sense strand
ccauggaaguaauuugcua

SEQ ID NO: 2379696 - RNA, 19 nt, Homo sapiens
  misc_RNA (1)...(19): siRNA sense strand
cugagaaucuagcagagaa

SEQ ID NO: 2379697 - RNA, 19 nt, Homo sapiens
  misc_RNA (1)...(19): siRNA sense strand
augaagacaagcacaguua

SEQ ID NO: 2379698 - RNA, 19 nt, Homo sapiens
  misc_RNA (1)...(19): siRNA sense strand
ccugcaucuaugaggguaa

SEQ ID NO: 2379699 - RNA, 19 nt, Homo sapiens
  misc_RNA (1)...(19): siRNA sense strand
gguagugagaauuuguuaa

SEQ ID NO: 2379700 - RNA, 19 nt, Homo sapiens
  misc_RNA (1)...(19): siRNA sense strand
cuauguaaauccaacagaa

SEQ ID NO: 2379701 - RNA, 19 nt, Homo sapiens
  misc_RNA (1)...(19): siRNA sense strand
aaggagauaaggagccaaa

SEQ ID NO: 2379702 - RNA, 19 nt, Homo sapiens
  misc_RNA (1)...(19): siRNA sense strand
cccuuuaaacacuggauua

SEQ ID NO: 2379703 - RNA, 19 nt, Homo sapiens
  misc_RNA (1)...(19): siRNA sense strand
ggaucuuaugccaggaauu

SEQ ID NO: 2379704 - RNA, 19 nt, Homo sapiens
  misc_RNA (1)...(19): siRNA sense strand
gagcaguggagcaagguca

SEQ ID NO: 2379705 - RNA, 19 nt, Homo sapiens
  misc_RNA (1)...(19): siRNA sense strand
ggaaaacagccaaggagau

SEQ ID NO: 2379706 - RNA, 19 nt, Homo sapiens
  misc_RNA (1)...(19): siRNA sense strand
uaugaagccaggucagaaa

SEQ ID NO: 2379707 - RNA, 19 nt, Homo sapiens
  misc_RNA (1)...(19): siRNA sense strand
gugaauaaggccaccauga

SEQ ID NO: 2379708 - RNA, 19 nt, Homo sapiens
  misc_RNA (1)...(19): siRNA sense strand
uuaaggaaguacuggagau

SEQ ID NO: 2379709 - RNA, 19 nt, Homo sapiens
  misc_RNA (1)...(19): siRNA sense strand
ucagaaugaucaaggccau

SEQ ID NO: 2379710 - RNA, 19 nt, Homo sapiens
  misc_RNA (1)...(19): siRNA sense strand
aggaauugcagaagagaag

SEQ ID NO: 2379711 - RNA, 19 nt, Homo sapiens
  misc_RNA (1)...(19): siRNA sense strand
uagcaagaagacuggagaa

SEQ ID NO: 2379712 - RNA, 19 nt, Homo sapiens
  misc_RNA (1)...(19): siRNA sense strand
gaugggugguggagaaaau

SEQ ID NO: 2379713 - RNA, 19 nt, Homo sapiens
  misc_RNA (1)...(19): siRNA sense strand
gagcaagaggucaaguaca

SEQ ID NO: 2379714 - RNA, 19 nt, Homo sapiens
  misc_RNA (1)...(19): siRNA sense strand
gaaaacgaaccaagagauu

SEQ ID NO: 2379715 - RNA, 19 nt, Homo sapiens
  misc_RNA (1)...(19): siRNA sense strand
cagaagaaggugcuguauu

SEQ ID NO: 2379716 - RNA, 19 nt, Homo sapiens
  misc_RNA (1)...(19): siRNA sense strand
aauucaagguuugcagaua

SEQ ID NO: 2379717 - RNA, 19 nt, Homo sapiens
  misc_RNA (1)...(19): siRNA sense strand
auuaauaggugccuugcaa

SEQ ID NO: 2379718 - RNA, 19 nt, Homo sapiens
  misc_RNA (1)...(19): siRNA sense strand
ugguauuaguucagcaagu

SEQ ID NO: 2379719 - RNA, 19 nt, Homo sapiens
  misc_RNA (1)...(19): siRNA sense strand
cuggugaggcagacuguaa

SEQ ID NO: 2379720 - RNA, 19 nt, Homo sapiens
  misc_RNA (1)...(19): siRNA sense strand
ggguaaaagaagaaggaaa

SEQ ID NO: 2379721 - RNA, 19 nt, Homo sapiens
  misc_RNA (1)...(19): siRNA sense strand
gguaaaagaagaaggaaau

SEQ ID NO: 2379722 - RNA, 19 nt, Homo sapiens
  misc_RNA (1)...(19): siRNA sense strand
gauuaauccaugugugaaa

SEQ ID NO: 2379723 - RNA, 19 nt, Homo sapiens
  misc_RNA (1)...(19): siRNA sense strand
gggcuaaggaauaaaccaa

SEQ ID NO: 2379724 - RNA, 19 nt, Homo sapiens
  misc_RNA (1)...(19): siRNA sense strand
gguucuaguaccacagaua

SEQ ID NO: 2379725 - RNA, 19 nt, Homo sapiens
  misc_RNA (1)...(19): siRNA sense strand
cagccauauaccaggaaua

SEQ ID NO: 2379726 - RNA, 19 nt, Homo sapiens
  misc_RNA (1)...(19): siRNA sense strand
cuauaguaugggaagguaa

SEQ ID NO: 2379727 - RNA, 19 nt, Homo sapiens
  misc_RNA (1)...(19): siRNA sense strand
acacaggaacacugaggaa

SEQ ID NO: 2379728 - RNA, 19 nt, Homo sapiens
  misc_RNA (1)...(19): siRNA sense strand
guguuugauuggagcauau

SEQ ID NO: 2379729 - RNA, 19 nt, Homo sapiens
  misc_RNA (1)...(19): siRNA sense strand
aggaauaggauaccagauu

SEQ ID NO: 2379730 - RNA, 19 nt, Homo sapiens
  misc_RNA (1)...(19): siRNA sense strand
gguugaagaaaguacagaa

SEQ ID NO: 2379731 - RNA, 19 nt, Homo sapiens
  misc_RNA (1)...(19): siRNA sense strand
caaagauacccaaaggaca

SEQ ID NO: 2379732 - RNA, 19 nt, Homo sapiens
  misc_RNA (1)...(19): siRNA sense strand
ggaauaaaccaaagaaaac

SEQ ID NO: 2379733 - RNA, 19 nt, Homo sapiens
  misc_RNA (1)...(19): siRNA sense strand
ggugaagauggaauacaaa

SEQ ID NO: 2379734 - RNA, 19 nt, Homo sapiens
  misc_RNA (1)...(19): siRNA sense strand
ggaacaacucacagcacau

SEQ ID NO: 2379735 - RNA, 19 nt, Homo sapiens
  misc_RNA (1)...(19): siRNA sense strand
acccaaaggacaauaacaa

SEQ ID NO: 2379736 - RNA, 19 nt, Homo sapiens
  misc_RNA (1)...(19): siRNA sense strand
gauaaugaacagagugaac

SEQ ID NO: 2379737 - RNA, 19 nt, Homo sapiens
  misc_RNA (1)...(19): siRNA sense strand
caaguaacaucaaagguca

SEQ ID NO: 2379738 - RNA, 19 nt, Homo sapiens
  misc_RNA (1)...(19): siRNA sense strand
guugaagaaaguacagaau

SEQ ID NO: 2379739 - RNA, 19 nt, Homo sapiens
  misc_RNA (1)...(19): siRNA sense strand
uguuaaaagcggugaagau

SEQ ID NO: 2379740 - RNA, 19 nt, Homo sapiens
  misc_RNA (1)...(19): siRNA sense strand
caugaaccucagugugaaa

SEQ ID NO: 2379741 - RNA, 19 nt, Homo sapiens
  misc_RNA (1)...(19): siRNA sense strand
ggaucagaaacaaguaaaa

SEQ ID NO: 2379742 - RNA, 19 nt, Homo sapiens
  misc_RNA (1)...(19): siRNA sense strand
cccaaaggacaauaacaaa

SEQ ID NO: 2379743 - RNA, 19 nt, Homo sapiens
  misc_RNA (1)...(19): siRNA sense strand
aagcggugaagauggaaua

SEQ ID NO: 2379744 - RNA, 19 nt, Homo sapiens
  misc_RNA (1)...(19): siRNA sense strand
gugagacagauguggaaaa

SEQ ID NO: 2379745 - RNA, 19 nt, Homo sapiens
  misc_RNA (1)...(19): siRNA sense strand
cuuguuacauugugcagaa

SEQ ID NO: 2379746 - RNA, 19 nt, Homo sapiens
  misc_RNA (1)...(19): siRNA sense strand
augauaaugaacagaguga

SEQ ID NO: 2379747 - RNA, 19 nt, Homo sapiens
  misc_RNA (1)...(19): siRNA sense strand
cuacagacuuggaacaacu

SEQ ID NO: 2379748 - RNA, 19 nt, Homo sapiens
  misc_RNA (1)...(19): siRNA sense strand
aacugacacuagugaauaa

SEQ ID NO: 2379749 - RNA, 19 nt, Homo sapiens
  misc_RNA (1)...(19): siRNA sense strand
aaacuggggcuaaggaaua

SEQ ID NO: 2379750 - RNA, 19 nt, Homo sapiens
  misc_RNA (1)...(19): siRNA sense strand
gugugaaacuauucgacca

SEQ ID NO: 2379751 - RNA, 19 nt, Homo sapiens
  misc_RNA (1)...(19): siRNA sense strand
gaagauguguuaugggaag

SEQ ID NO: 2379752 - RNA, 19 nt, Homo sapiens
  misc_RNA (1)...(19): siRNA sense strand
agauaacacacaagaggga

SEQ ID NO: 2379753 - RNA, 19 nt, Homo sapiens
  misc_RNA (1)...(19): siRNA sense strand
ugaaacuauucgaccagaa

SEQ ID NO: 2379754 - RNA, 19 nt, Homo sapiens
  misc_RNA (1)...(19): siRNA sense strand
cagaagauguguuauggga

SEQ ID NO: 2379755 - RNA, 19 nt, Homo sapiens
  misc_RNA (1)...(19): siRNA sense strand
guacuugaaaucaguggaa

SEQ ID NO: 2379756 - RNA, 19 nt, Homo sapiens
  misc_RNA (1)...(19): siRNA sense strand
ugucacuacaauugggaau

SEQ ID NO: 2379757 - RNA, 19 nt, Homo sapiens
  misc_RNA (1)...(19): siRNA sense strand
ccucauuuccgguugaaga

SEQ ID NO: 2379758 - RNA, 19 nt, Homo sapiens
  misc_RNA (1)...(19): siRNA sense strand
ccucaauauuacuuacuga

SEQ ID NO: 2379759 - RNA, 19 nt, Homo sapiens
  misc_RNA (1)...(19): siRNA sense strand
cugcuaaaggaguuggaca

SEQ ID NO: 2379760 - RNA, 19 nt, Homo sapiens
  misc_RNA (1)...(19): siRNA sense strand
ccaaagucacagaugcuau

SEQ ID NO: 2379761 - RNA, 19 nt, Homo sapiens
  misc_RNA (1)...(19): siRNA sense strand
ggcuaaggaauaaaccaaa

SEQ ID NO: 2379762 - RNA, 19 nt, Homo sapiens
  misc_RNA (1)...(19): siRNA sense strand
ggacauuuaacaucugcaa

SEQ ID NO: 2379763 - RNA, 19 nt, Homo sapiens
  misc_RNA (1)...(19): siRNA sense strand
cugcaaggagggcucgaaa

SEQ ID NO: 2379764 - RNA, 19 nt, Homo sapiens
  misc_RNA (1)...(19): siRNA sense strand
gcaaggagggcucgaaaau

SEQ ID NO: 2379765 - RNA, 19 nt, Homo sapiens
  misc_RNA (1)...(19): siRNA sense strand
cagaaagggaauuguucga

SEQ ID NO: 2379766 - RNA, 19 nt, Homo sapiens
  misc_RNA (1)...(19): siRNA sense strand
cagugagacagauguggaa

SEQ ID NO: 2379767 - RNA, 19 nt, Homo sapiens
  misc_RNA (1)...(19): siRNA sense strand
cgucauguggacaggacuu

SEQ ID NO: 2379768 - RNA, 19 nt, Homo sapiens
  misc_RNA (1)...(19): siRNA sense strand
caggauucugagagugcaa

SEQ ID NO: 2379769 - RNA, 19 nt, Homo sapiens
  misc_RNA (1)...(19): siRNA sense strand
agaagauguguuaugggaa

SEQ ID NO: 2379770 - RNA, 19 nt, Homo sapiens
  misc_RNA (1)...(19): siRNA sense strand
cugaacagauaaaccucua

SEQ ID NO: 2379771 - RNA, 19 nt, Homo sapiens
  misc_RNA (1)...(19): siRNA sense strand
agucacaccauuauaagaa

SEQ ID NO: 2379772 - RNA, 19 nt, Homo sapiens
  misc_RNA (1)...(19): siRNA sense strand
uuauaugggcuuacaauga

SEQ ID NO: 2379773 - RNA, 19 nt, Homo sapiens
  misc_RNA (1)...(19): siRNA sense strand
ugaucaacaaauaugggaa

SEQ ID NO: 2379774 - RNA, 19 nt, Homo sapiens
  misc_RNA (1)...(19): siRNA sense strand
gaauagaaagucacaccau

SEQ ID NO: 2379775 - RNA, 19 nt, Homo sapiens
  misc_RNA (1)...(19): siRNA sense strand
ugggaagaagacuguuaaa

SEQ ID NO: 2379776 - RNA, 19 nt, Homo sapiens
  misc_RNA (1)...(19): siRNA sense strand
ugaagucuccagugaggaa

SEQ ID NO: 2379777 - RNA, 19 nt, Homo sapiens
  misc_RNA (1)...(19): siRNA sense strand
acaaacugcaugagcgcaa

SEQ ID NO: 2379778 - RNA, 19 nt, Homo sapiens
  misc_RNA (1)...(19): siRNA sense strand
acaccaagcgagugggcau

SEQ ID NO: 2379779 - RNA, 19 nt, Homo sapiens
  misc_RNA (1)...(19): siRNA sense strand
gcucagcaugcaaggacaa

SEQ ID NO: 2379780 - RNA, 19 nt, Homo sapiens
  misc_RNA (1)...(19): siRNA sense strand
aggaacuggacucgagcaa

SEQ ID NO: 2379781 - RNA, 19 nt, Homo sapiens
  misc_RNA (1)...(19): siRNA sense strand
cugggaagcuggaggaggu

SEQ ID NO: 2379782 - RNA, 19 nt, Homo sapiens
  misc_RNA (1)...(19): siRNA sense strand
aggacaagagcgugcgcau

SEQ ID NO: 2379783 - RNA, 19 nt, Homo sapiens
  misc_RNA (1)...(19): siRNA sense strand
ugacagagccggugguggu

SEQ ID NO: 2379784 - RNA, 19 nt, Homo sapiens
  misc_RNA (1)...(19): siRNA sense strand
uggucaaggagcagggcga

SEQ ID NO: 2379785 - RNA, 19 nt, Homo sapiens
  misc_RNA (1)...(19): siRNA sense strand
cagaaaaccucgaggaacc

SEQ ID NO: 2379786 - RNA, 19 nt, Homo sapiens
  misc_RNA (1)...(19): siRNA sense strand
uggaggaggugaugcagga

SEQ ID NO: 2379787 - RNA, 19 nt, Homo sapiens
  misc_RNA (1)...(19): siRNA sense strand
ggaagcuggaggaggugau

SEQ ID NO: 2379788 - RNA, 19 nt, Homo sapiens
  misc_RNA (1)...(19): siRNA sense strand
ggacagaugcccugagauu

SEQ ID NO: 2379789 - RNA, 19 nt, Homo sapiens
  misc_RNA (1)...(19): siRNA sense strand
uagaauaccugcugaagaa

SEQ ID NO: 2379790 - RNA, 19 nt, Homo sapiens
  misc_RNA (1)...(19): siRNA sense strand
ggcgaaagguggagagauc

SEQ ID NO: 2379791 - RNA, 19 nt, Homo sapiens
  misc_RNA (1)...(19): siRNA sense strand
gguacaaguugcagaagca

SEQ ID NO: 2379792 - RNA, 19 nt, Homo sapiens
  misc_RNA (1)...(19): siRNA sense strand
ggacugggaucgagagugu

SEQ ID NO: 2379793 - RNA, 19 nt, Homo sapiens
  misc_RNA (1)...(19): siRNA sense strand
guaugaaaucccuacgaaa

SEQ ID NO: 2379794 - RNA, 19 nt, Homo sapiens
  misc_RNA (1)...(19): siRNA sense strand
aagcugugguggagaaaca

SEQ ID NO: 2379795 - RNA, 19 nt, Homo sapiens
  misc_RNA (1)...(19): siRNA sense strand
gaggaaccgugaagccaaa

SEQ ID NO: 2379796 - RNA, 19 nt, Homo sapiens
  misc_RNA (1)...(19): siRNA sense strand
ggcugaggccagagaggua

SEQ ID NO: 2379797 - RNA, 19 nt, Homo sapiens
  misc_RNA (1)...(19): siRNA sense strand
cgacauuucugcaacaaga

SEQ ID NO: 2379798 - RNA, 19 nt, Homo sapiens
  misc_RNA (1)...(19): siRNA sense strand
gagcaagucaccugcagaa

SEQ ID NO: 2379799 - RNA, 19 nt, Homo sapiens
  misc_RNA (1)...(19): siRNA sense strand
cggacauugagguggagaa

SEQ ID NO: 2379800 - RNA, 19 nt, Homo sapiens
  misc_RNA (1)...(19): siRNA sense strand
uggagaaacaacuguggaa

SEQ ID NO: 2379801 - RNA, 19 nt, Homo sapiens
  misc_RNA (1)...(19): siRNA sense strand
cagaagcgccugcgagaga

SEQ ID NO: 2379802 - RNA, 19 nt, Homo sapiens
  misc_RNA (1)...(19): siRNA sense strand
guucagaucaugcaggaau

SEQ ID NO: 2379803 - RNA, 19 nt, Homo sapiens
  misc_RNA (1)...(19): siRNA sense strand
gugcuggacccaagagaca

SEQ ID NO: 2379804 - RNA, 19 nt, Homo sapiens
  misc_RNA (1)...(19): siRNA sense strand
ggaggaaccgugaagccaa

SEQ ID NO: 2379805 - RNA, 19 nt, Homo sapiens
  misc_RNA (1)...(19): siRNA sense strand
aggaguuaguauuguauga

SEQ ID NO: 2379806 - RNA, 19 nt, Homo sapiens
  misc_RNA (1)...(19): siRNA sense strand
ugauagaauaccugcugaa

SEQ ID NO: 2379807 - RNA, 19 nt, Homo sapiens
  misc_RNA (1)...(19): siRNA sense strand
cagagagguagcagcggaa

SEQ ID NO: 2379808 - RNA, 19 nt, Homo sapiens
  misc_RNA (1)...(19): siRNA sense strand
guccagagcugccgacauu

SEQ ID NO: 2379809 - RNA, 19 nt, Homo sapiens
  misc_RNA (1)...(19): siRNA sense strand
cagaagaacuggcagcacu

SEQ ID NO: 2379810 - RNA, 19 nt, Homo sapiens
  misc_RNA (1)...(19): siRNA sense strand
ccacaaggccagagacgcu

SEQ ID NO: 2379811 - RNA, 19 nt, Homo sapiens
  misc_RNA (1)...(19): siRNA sense strand
gguaggaaccacaaggcca

SEQ ID NO: 2379812 - RNA, 19 nt, Homo sapiens
  misc_RNA (1)...(19): siRNA sense strand
gggaaaagauaaugucugu

SEQ ID NO: 2379813 - RNA, 19 nt, Homo sapiens
  misc_RNA (1)...(19): siRNA sense strand
gaagguacaaguugcagaa

SEQ ID NO: 2379814 - RNA, 19 nt, Homo sapiens
  misc_RNA (1)...(19): siRNA sense strand
caacuggucaugugcuuua

SEQ ID NO: 2379815 - RNA, 19 nt, Homo sapiens
  misc_RNA (1)...(19): siRNA sense strand
acagaugcccugagauuca

SEQ ID NO: 2379816 - RNA, 19 nt, Homo sapiens
  misc_RNA (1)...(19): siRNA sense strand
cuggaaugcucuucgcuuu

SEQ ID NO: 2379817 - RNA, 19 nt, Homo sapiens
  misc_RNA (1)...(19): siRNA sense strand
ccagacgacucgcgauaca

SEQ ID NO: 2379818 - RNA, 19 nt, Homo sapiens
  misc_RNA (1)...(19): siRNA sense strand
ggaaacgggcagcgaccuu

SEQ ID NO: 2379819 - RNA, 19 nt, Homo sapiens
  misc_RNA (1)...(19): siRNA sense strand
gggagguguggcaguggaa

SEQ ID NO: 2379820 - RNA, 19 nt, Homo sapiens
  misc_RNA (1)...(19): siRNA sense strand
aggcagggacucagaggca

SEQ ID NO: 2379821 - RNA, 19 nt, Homo sapiens
  misc_RNA (1)...(19): siRNA sense strand
agaaacaacuguggaagga

SEQ ID NO: 2379822 - RNA, 19 nt, Homo sapiens
  misc_RNA (1)...(19): siRNA sense strand
ggcaguggaaggaggcgaa

SEQ ID NO: 2379823 - RNA, 19 nt, Homo sapiens
  misc_RNA (1)...(19): siRNA sense strand
ccagagagguagcagcgga

SEQ ID NO: 2379824 - RNA, 19 nt, Homo sapiens
  misc_RNA (1)...(19): siRNA sense strand
cuggaggccuaaggaguua

SEQ ID NO: 2379825 - RNA, 19 nt, Homo sapiens
  misc_RNA (1)...(19): siRNA sense strand
acauggagcugcagggccu

SEQ ID NO: 2379826 - RNA, 19 nt, Homo sapiens
  misc_RNA (1)...(19): siRNA sense strand
ccuacgaaacccggugaaa

SEQ ID NO: 2379827 - RNA, 19 nt, Homo sapiens
  misc_RNA (1)...(19): siRNA sense strand
uggaaugcucuucgcuuua

SEQ ID NO: 2379828 - RNA, 19 nt, Homo sapiens
  misc_RNA (1)...(19): siRNA sense strand
cagaacaguuuaauggaca

SEQ ID NO: 2379829 - RNA, 19 nt, Homo sapiens
  misc_RNA (1)...(19): siRNA sense strand
agaacaguuuaauggacaa

SEQ ID NO: 2379830 - RNA, 19 nt, Homo sapiens
  misc_RNA (1)...(19): siRNA sense strand
gaucaguacauguggggaa

SEQ ID NO: 2379831 - RNA, 19 nt, Homo sapiens
  misc_RNA (1)...(19): siRNA sense strand
cugaauugcgagagaggga

SEQ ID NO: 2379832 - RNA, 19 nt, Homo sapiens
  misc_RNA (1)...(19): siRNA sense strand
ucacgaaaaucaagcggaa

SEQ ID NO: 2379833 - RNA, 19 nt, Homo sapiens
  misc_RNA (1)...(19): siRNA sense strand
acgaaaaucaagcggaauu

SEQ ID NO: 2379834 - RNA, 19 nt, Homo sapiens
  misc_RNA (1)...(19): siRNA sense strand
cuuccuauucagaacauaa

SEQ ID NO: 2379835 - RNA, 19 nt, Homo sapiens
  misc_RNA (1)...(19): siRNA sense strand
aauaacacguucucgggaa

SEQ ID NO: 2379836 - RNA, 19 nt, Homo sapiens
  misc_RNA (1)...(19): siRNA sense strand
ugcaggagacacagaacaa

SEQ ID NO: 2379837 - RNA, 19 nt, Homo sapiens
  misc_RNA (1)...(19): siRNA sense strand
agaacaaggauauaaacca

SEQ ID NO: 2379838 - RNA, 19 nt, Homo sapiens
  misc_RNA (1)...(19): siRNA sense strand
guaacuacagccaagggaa

SEQ ID NO: 2379839 - RNA, 19 nt, Homo sapiens
  misc_RNA (1)...(19): siRNA sense strand
cagaacauaaagaggccau

SEQ ID NO: 2379840 - RNA, 19 nt, Homo sapiens
  misc_RNA (1)...(19): siRNA sense strand
ggccgguuccuguggcaaa

SEQ ID NO: 2379841 - RNA, 19 nt, Homo sapiens
  misc_RNA (1)...(19): siRNA sense strand
caucagaagagccgccaga

SEQ ID NO: 2379842 - RNA, 19 nt, Homo sapiens
  misc_RNA (1)...(19): siRNA sense strand
caacuauggaaaccagcaa

SEQ ID NO: 2379843 - RNA, 19 nt, Homo sapiens
  misc_RNA (1)...(19): siRNA sense strand
aggaugacccugauggcau

SEQ ID NO: 2379844 - RNA, 19 nt, Homo sapiens
  misc_RNA (1)...(19): siRNA sense strand
cggacaugcccaacaacau

SEQ ID NO: 2379845 - RNA, 19 nt, Homo sapiens
  misc_RNA (1)...(19): siRNA sense strand
ccuccauacaacaagguuu

SEQ ID NO: 2379846 - RNA, 19 nt, Homo sapiens
  misc_RNA (1)...(19): siRNA sense strand
gaacaaggauauaaaccag

SEQ ID NO: 2379847 - RNA, 19 nt, Homo sapiens
  misc_RNA (1)...(19): siRNA sense strand
gcaacaacuaccaaggcca

SEQ ID NO: 2379848 - RNA, 19 nt, Homo sapiens
  misc_RNA (1)...(19): siRNA sense strand
ccuacauccagcagagcau

SEQ ID NO: 2379849 - RNA, 19 nt, Homo sapiens
  misc_RNA (1)...(19): siRNA sense strand
ugaaguuuaacaagggcua

SEQ ID NO: 2379850 - RNA, 19 nt, Homo sapiens
  misc_RNA (1)...(19): siRNA sense strand
ccagauacuccuccgggua

SEQ ID NO: 2379851 - RNA, 19 nt, Homo sapiens
  misc_RNA (1)...(19): siRNA sense strand
ccuccgggcagaucgguaa

SEQ ID NO: 2379852 - RNA, 19 nt, Homo sapiens
  misc_RNA (1)...(19): siRNA sense strand
agaccaugaccaagagcaa

SEQ ID NO: 2379853 - RNA, 19 nt, Homo sapiens
  misc_RNA (1)...(19): siRNA sense strand
gcaacauggagguggacau

SEQ ID NO: 2379854 - RNA, 19 nt, Homo sapiens
  misc_RNA (1)...(19): siRNA sense strand
gcagcaacauggaggugga

SEQ ID NO: 2379855 - RNA, 19 nt, Homo sapiens
  misc_RNA (1)...(19): siRNA sense strand
aguuuguguuugaggagau

SEQ ID NO: 2379856 - RNA, 19 nt, Homo sapiens
  misc_RNA (1)...(19): siRNA sense strand
agaacaaacaggagaacuc

SEQ ID NO: 2379857 - RNA, 19 nt, Homo sapiens
  misc_RNA (1)...(19): siRNA sense strand
cugcagaacaaacaggaga

SEQ ID NO: 2379858 - RNA, 19 nt, Homo sapiens
  misc_RNA (1)...(19): siRNA sense strand
agaacaagcuggugcacuc

SEQ ID NO: 2379859 - RNA, 19 nt, Homo sapiens
  misc_RNA (1)...(19): siRNA sense strand
gcagcaugaucgacagcca

SEQ ID NO: 2379860 - RNA, 19 nt, Homo sapiens
  misc_RNA (1)...(19): siRNA sense strand
ggugaaggagcuggaggaa

SEQ ID NO: 2379861 - RNA, 19 nt, Homo sapiens
  misc_RNA (1)...(19): siRNA sense strand
ccagcuacgaggaggagga

SEQ ID NO: 2379862 - RNA, 19 nt, Homo sapiens
  misc_RNA (1)...(19): siRNA sense strand
cgggagacuguccuggaaa

SEQ ID NO: 2379863 - RNA, 19 nt, Homo sapiens
  misc_RNA (1)...(19): siRNA sense strand
gguuaugaugacagagaaa

SEQ ID NO: 2379864 - RNA, 19 nt, Homo sapiens
  misc_RNA (1)...(19): siRNA sense strand
ccacauaccuuguccggaa

SEQ ID NO: 2379865 - RNA, 19 nt, Homo sapiens
  misc_RNA (1)...(19): siRNA sense strand
cuguaaauuugauggggaa

SEQ ID NO: 2379866 - RNA, 19 nt, Homo sapiens
  misc_RNA (1)...(19): siRNA sense strand
acgaagaugccgaggaugu

SEQ ID NO: 2379867 - RNA, 19 nt, Homo sapiens
  misc_RNA (1)...(19): siRNA sense strand
uuuaagaauuggagacacu

SEQ ID NO: 2379868 - RNA, 19 nt, Homo sapiens
  misc_RNA (1)...(19): siRNA sense strand
auucacagacagaagcaaa

SEQ ID NO: 2379869 - RNA, 19 nt, Homo sapiens
  misc_RNA (1)...(19): siRNA sense strand
gucagaaacaggagaaaau

SEQ ID NO: 2379870 - RNA, 19 nt, Homo sapiens
  misc_RNA (1)...(19): siRNA sense strand
ugucaagauaacacaacua

SEQ ID NO: 2379871 - RNA, 19 nt, Homo sapiens
  misc_RNA (1)...(19): siRNA sense strand
agaaagugccagagaacac

SEQ ID NO: 2379872 - RNA, 19 nt, Homo sapiens
  misc_RNA (1)...(19): siRNA sense strand
cugcgcuucugaugggaaa

SEQ ID NO: 2379873 - RNA, 19 nt, Homo sapiens
  misc_RNA (1)...(19): siRNA sense strand
uaugauaaugcaugccaaa

SEQ ID NO: 2379874 - RNA, 19 nt, Homo sapiens
  misc_RNA (1)...(19): siRNA sense strand
augcagagaaugcuaacaa

SEQ ID NO: 2379875 - RNA, 19 nt, Homo sapiens
  misc_RNA (1)...(19): siRNA sense strand
gcaugggaagugugagcau

SEQ ID NO: 2379876 - RNA, 19 nt, Homo sapiens
  misc_RNA (1)...(19): siRNA sense strand
gaaacuagucaaaaggaga

SEQ ID NO: 2379877 - RNA, 19 nt, Homo sapiens
  misc_RNA (1)...(19): siRNA sense strand
gggucgaugucaagauaac

SEQ ID NO: 2379878 - RNA, 19 nt, Homo sapiens
  misc_RNA (1)...(19): siRNA sense strand
agucugaagaugggcauua

SEQ ID NO: 2379879 - RNA, 19 nt, Homo sapiens
  misc_RNA (1)...(19): siRNA sense strand
ggacacuuugcgagggcuu

SEQ ID NO: 2379880 - RNA, 19 nt, Homo sapiens
  misc_RNA (1)...(19): siRNA sense strand
agagcguccacgagguuaa

SEQ ID NO: 2379881 - RNA, 19 nt, Homo sapiens
  misc_RNA (1)...(19): siRNA sense strand
cauuaugcaagaacagauu

SEQ ID NO: 2379882 - RNA, 19 nt, Homo sapiens
  misc_RNA (1)...(19): siRNA sense strand
gggcacuacaguucagaca

SEQ ID NO: 2379883 - RNA, 19 nt, Homo sapiens
  misc_RNA (1)...(19): siRNA sense strand
ccucugcaucacaaggaaa

SEQ ID NO: 2379884 - RNA, 19 nt, Homo sapiens
  misc_RNA (1)...(19): siRNA sense strand
aguucagacaauacaacaa

SEQ ID NO: 2379885 - RNA, 19 nt, Homo sapiens
  misc_RNA (1)...(19): siRNA sense strand
ucagaaggaucaugugcca

SEQ ID NO: 2379886 - RNA, 19 nt, Homo sapiens
  misc_RNA (1)...(19): siRNA sense strand
aggagaaaauugaagucau

SEQ ID NO: 2379887 - RNA, 19 nt, Homo sapiens
  misc_RNA (1)...(19): siRNA sense strand
ccgacagagagaaguacaa

SEQ ID NO: 2379888 - RNA, 19 nt, Homo sapiens
  misc_RNA (1)...(19): siRNA sense strand
aagcggauccagaaggaau

SEQ ID NO: 2379889 - RNA, 19 nt, Homo sapiens
  misc_RNA (1)...(19): siRNA sense strand
aggccgacagagagaagua

SEQ ID NO: 2379890 - RNA, 19 nt, Homo sapiens
  misc_RNA (1)...(19): siRNA sense strand
cagagauagcacacaccua

SEQ ID NO: 2379891 - RNA, 19 nt, Homo sapiens
  misc_RNA (1)...(19): siRNA sense strand
gagaauaacgcuagcagga

SEQ ID NO: 2379892 - RNA, 19 nt, Homo sapiens
  misc_RNA (1)...(19): siRNA sense strand
ucacaaaauuagagcgcau

SEQ ID NO: 2379893 - RNA, 19 nt, Homo sapiens
  misc_RNA (1)...(19): siRNA sense strand
gauggaaggcagaaggaca

SEQ ID NO: 2379894 - RNA, 19 nt, Homo sapiens
  misc_RNA (1)...(19): siRNA sense strand
auuagagcgcauugggaaa

SEQ ID NO: 2379895 - RNA, 19 nt, Homo sapiens
  misc_RNA (1)...(19): siRNA sense strand
ccgaagaugaaauagaaga

SEQ ID NO: 2379896 - RNA, 19 nt, Homo sapiens
  misc_RNA (1)...(19): siRNA sense strand
agaaauaccuuugugggaa

SEQ ID NO: 2379897 - RNA, 19 nt, Homo sapiens
  misc_RNA (1)...(19): siRNA sense strand
aauagaagacauucagcaa

SEQ ID NO: 2379898 - RNA, 19 nt, Homo sapiens
  misc_RNA (1)...(19): siRNA sense strand
gcgcauugggaaaggcuca

SEQ ID NO: 2379899 - RNA, 19 nt, Homo sapiens
  misc_RNA (1)...(19): siRNA sense strand
acauuuggucauugggaau

SEQ ID NO: 2379900 - RNA, 19 nt, Homo sapiens
  misc_RNA (1)...(19): siRNA sense strand
cgauugaagaacucgagaa

SEQ ID NO: 2379901 - RNA, 19 nt, Homo sapiens
  misc_RNA (1)...(19): siRNA sense strand
gggaaguuuucaaaggaau

SEQ ID NO: 2379902 - RNA, 19 nt, Homo sapiens
  misc_RNA (1)...(19): siRNA sense strand
aggcagaaggacacaguga

SEQ ID NO: 2379903 - RNA, 19 nt, Homo sapiens
  misc_RNA (1)...(19): siRNA sense strand
cugcauuugcugaacuuaa

SEQ ID NO: 2379904 - RNA, 19 nt, Homo sapiens
  misc_RNA (1)...(19): siRNA sense strand
gcagaauaacauagcugau

SEQ ID NO: 2379905 - RNA, 19 nt, Homo sapiens
  misc_RNA (1)...(19): siRNA sense strand
uugaagaacucgagaaaag

SEQ ID NO: 2379906 - RNA, 19 nt, Homo sapiens
  misc_RNA (1)...(19): siRNA sense strand
aagaaauaccuuuguggga

SEQ ID NO: 2379907 - RNA, 19 nt, Homo sapiens
  misc_RNA (1)...(19): siRNA sense strand
aggacacagugaugaugaa

SEQ ID NO: 2379908 - RNA, 19 nt, Homo sapiens
  misc_RNA (1)...(19): siRNA sense strand
aauuagagcgcauugggaa

SEQ ID NO: 2379909 - RNA, 19 nt, Homo sapiens
  misc_RNA (1)...(19): siRNA sense strand
ucauagaccuugaggaagc

SEQ ID NO: 2379910 - RNA, 19 nt, Homo sapiens
  misc_RNA (1)...(19): siRNA sense strand
gaaauaccuuugugggaac

SEQ ID NO: 2379911 - RNA, 19 nt, Homo sapiens
  misc_RNA (1)...(19): siRNA sense strand
ggggaaguuuucaaaggaa

SEQ ID NO: 2379912 - RNA, 19 nt, Homo sapiens
  misc_RNA (1)...(19): siRNA sense strand
uugaggaagccgaagauga

SEQ ID NO: 2379913 - RNA, 19 nt, Homo sapiens
  misc_RNA (1)...(19): siRNA sense strand
acagaauggggcagagcaa

SEQ ID NO: 2379914 - RNA, 19 nt, Homo sapiens
  misc_RNA (1)...(19): siRNA sense strand
cugaacugauagaucguuu

SEQ ID NO: 2379915 - RNA, 19 nt, Homo sapiens
  misc_RNA (1)...(19): siRNA sense strand
gacauuuggucauugggaa

SEQ ID NO: 2379916 - RNA, 19 nt, Homo sapiens
  misc_RNA (1)...(19): siRNA sense strand
agaaggacacagugaugau

SEQ ID NO: 2379917 - RNA, 19 nt, Homo sapiens
  misc_RNA (1)...(19): siRNA sense strand
ggaaguuuucaaaggaauu

SEQ ID NO: 2379918 - RNA, 19 nt, Homo sapiens
  misc_RNA (1)...(19): siRNA sense strand
aagccgaagaugaaauaga

SEQ ID NO: 2379919 - RNA, 19 nt, Homo sapiens
  misc_RNA (1)...(19): siRNA sense strand
uugaacuagccaagggaga

SEQ ID NO: 2379920 - RNA, 19 nt, Homo sapiens
  misc_RNA (1)...(19): siRNA sense strand
agacauaaaagcugccaau

SEQ ID NO: 2379921 - RNA, 19 nt, Homo sapiens
  misc_RNA (1)...(19): siRNA sense strand
aagaagaauauguggaaca

SEQ ID NO: 2379922 - RNA, 19 nt, Homo sapiens
  misc_RNA (1)...(19): siRNA sense strand
gagaaaugauggagcccuu

SEQ ID NO: 2379923 - RNA, 19 nt, Homo sapiens
  misc_RNA (1)...(19): siRNA sense strand
guugcaacucagaagguua

SEQ ID NO: 2379924 - RNA, 19 nt, Homo sapiens
  misc_RNA (1)...(19): siRNA sense strand
aagaauauguggaacagga

SEQ ID NO: 2379925 - RNA, 19 nt, Homo sapiens
  misc_RNA (1)...(19): siRNA sense strand
uguugaugacagugcaauu

SEQ ID NO: 2379926 - RNA, 19 nt, Homo sapiens
  misc_RNA (1)...(19): siRNA sense strand
ucugagagauucaaggcaa

SEQ ID NO: 2379927 - RNA, 19 nt, Homo sapiens
  misc_RNA (1)...(19): siRNA sense strand
cuacuuggccguaaggcua

SEQ ID NO: 2379928 - RNA, 19 nt, Homo sapiens
  misc_RNA (1)...(19): siRNA sense strand
aggaaaggugaaagaaguu

SEQ ID NO: 2379929 - RNA, 19 nt, Homo sapiens
  misc_RNA (1)...(19): siRNA sense strand
cgccaggaaaggugaaaga

SEQ ID NO: 2379930 - RNA, 19 nt, Homo sapiens
  misc_RNA (1)...(19): siRNA sense strand
cgguggauggucagaaaga

SEQ ID NO: 2379931 - RNA, 19 nt, Homo sapiens
  misc_RNA (1)...(19): siRNA sense strand
cgaacagaagaaaagaaaa

SEQ ID NO: 2379932 - RNA, 19 nt, Homo sapiens
  misc_RNA (1)...(19): siRNA sense strand
ucgaacagaagaaaagaaa

SEQ ID NO: 2379933 - RNA, 19 nt, Homo sapiens
  misc_RNA (1)...(19): siRNA sense strand
uugaauaaugcuuggggaa

SEQ ID NO: 2379934 - RNA, 19 nt, Homo sapiens
  misc_RNA (1)...(19): siRNA sense strand
gugacagguucgagagaga

SEQ ID NO: 2379935 - RNA, 19 nt, Homo sapiens
  misc_RNA (1)...(19): siRNA sense strand
ccaaagagguggaggacug

SEQ ID NO: 2379936 - RNA, 19 nt, Homo sapiens
  misc_RNA (1)...(19): siRNA sense strand
aggaauuacguauggaaau

SEQ ID NO: 2379937 - RNA, 19 nt, Homo sapiens
  misc_RNA (1)...(19): siRNA sense strand
uggaggagcuuguggagga

SEQ ID NO: 2379938 - RNA, 19 nt, Homo sapiens
  misc_RNA (1)...(19): siRNA sense strand
cuugaggaguugaaggaga

SEQ ID NO: 2379939 - RNA, 19 nt, Homo sapiens
  misc_RNA (1)...(19): siRNA sense strand
caccagaagcugagcccaa

SEQ ID NO: 2379940 - RNA, 19 nt, Homo sapiens
  misc_RNA (1)...(19): siRNA sense strand
caaaacuaccagcgagaaa

SEQ ID NO: 2379941 - RNA, 19 nt, Homo sapiens
  misc_RNA (1)...(19): siRNA sense strand
gugaaccggaagagggcaa

SEQ ID NO: 2379942 - RNA, 19 nt, Homo sapiens
  misc_RNA (1)...(19): siRNA sense strand
cgagauaagucguacugga

SEQ ID NO: 2379943 - RNA, 19 nt, Homo sapiens
  misc_RNA (1)...(19): siRNA sense strand
ugaaggucauccagggcua

SEQ ID NO: 2379944 - RNA, 19 nt, Homo sapiens
  misc_RNA (1)...(19): siRNA sense strand
aggagaaggaauuacguau

SEQ ID NO: 2379945 - RNA, 19 nt, Homo sapiens
  misc_RNA (1)...(19): siRNA sense strand
uggugaaagacgugcugaa

SEQ ID NO: 2379946 - RNA, 19 nt, Homo sapiens
  misc_RNA (1)...(19): siRNA sense strand
aaggaauuacguauggaaa

SEQ ID NO: 2379947 - RNA, 19 nt, Homo sapiens
  misc_RNA (1)...(19): siRNA sense strand
agugggaagacgaaggauu

SEQ ID NO: 2379948 - RNA, 19 nt, Homo sapiens
  misc_RNA (1)...(19): siRNA sense strand
gagaaacacauucaggaga

SEQ ID NO: 2379949 - RNA, 19 nt, Homo sapiens
  misc_RNA (1)...(19): siRNA sense strand
gcgagaaacaagauccuca

SEQ ID NO: 2379950 - RNA, 19 nt, Homo sapiens
  misc_RNA (1)...(19): siRNA sense strand
gccacagagaggagccuua

SEQ ID NO: 2379951 - RNA, 19 nt, Homo sapiens
  misc_RNA (1)...(19): siRNA sense strand
gaguaugggaccugcuaca

SEQ ID NO: 2379952 - RNA, 19 nt, Homo sapiens
  misc_RNA (1)...(19): siRNA sense strand
uugaggaguugaaggagau

SEQ ID NO: 2379953 - RNA, 19 nt, Homo sapiens
  misc_RNA (1)...(19): siRNA sense strand
aguugaaggagauugagaa

SEQ ID NO: 2379954 - RNA, 19 nt, Homo sapiens
  misc_RNA (1)...(19): siRNA sense strand
gggacuacgcuucugaaau

SEQ ID NO: 2379955 - RNA, 19 nt, Homo sapiens
  misc_RNA (1)...(19): siRNA sense strand
aggaguugaaggagauuga

SEQ ID NO: 2379956 - RNA, 19 nt, Homo sapiens
  misc_RNA (1)...(19): siRNA sense strand
ucagcaaggaggagaagga

SEQ ID NO: 2379957 - RNA, 19 nt, Homo sapiens
  misc_RNA (1)...(19): siRNA sense strand
ggaggacaguugugggaag

SEQ ID NO: 2379958 - RNA, 19 nt, Homo sapiens
  misc_RNA (1)...(19): siRNA sense strand
gccucaagaagguggccua

SEQ ID NO: 2379959 - RNA, 19 nt, Homo sapiens
  misc_RNA (1)...(19): siRNA sense strand
acguauggaaauugcaaaa

SEQ ID NO: 2379960 - RNA, 19 nt, Homo sapiens
  misc_RNA (1)...(19): siRNA sense strand
cagcauuucgugaagguca

SEQ ID NO: 2379961 - RNA, 19 nt, Homo sapiens
  misc_RNA (1)...(19): siRNA sense strand
aggccaaggcugugauucu

SEQ ID NO: 2379962 - RNA, 19 nt, Homo sapiens
  misc_RNA (1)...(19): siRNA sense strand
ggaucagugggaagacgaa

SEQ ID NO: 2379963 - RNA, 19 nt, Homo sapiens
  misc_RNA (1)...(19): siRNA sense strand
gaguugaaggagauugaga

SEQ ID NO: 2379964 - RNA, 19 nt, Homo sapiens
  misc_RNA (1)...(19): siRNA sense strand
cugucagcaaggaggagaa

SEQ ID NO: 2379965 - RNA, 19 nt, Homo sapiens
  misc_RNA (1)...(19): siRNA sense strand
cggaagagggcaaagcgga

SEQ ID NO: 2379966 - RNA, 19 nt, Homo sapiens
  misc_RNA (1)...(19): siRNA sense strand
ugggcgaccuggaggagau

SEQ ID NO: 2379967 - RNA, 19 nt, Homo sapiens
  misc_RNA (1)...(19): siRNA sense strand
agcaaggaggagaaggaau

SEQ ID NO: 2379968 - RNA, 19 nt, Homo sapiens
  misc_RNA (1)...(19): siRNA sense strand
cguacuggacacauggcua

SEQ ID NO: 2379969 - RNA, 19 nt, Homo sapiens
  misc_RNA (1)...(19): siRNA sense strand
acaucuccuuggugaacaa

SEQ ID NO: 2379970 - RNA, 19 nt, Homo sapiens
  misc_RNA (1)...(19): siRNA sense strand
acuacuuccuuaacaacaa

SEQ ID NO: 2379971 - RNA, 19 nt, Homo sapiens
  misc_RNA (1)...(19): siRNA sense strand
gggagaaacguuccguaca

SEQ ID NO: 2379972 - RNA, 19 nt, Homo sapiens
  misc_RNA (1)...(19): siRNA sense strand
uguuugagauggacguuca

SEQ ID NO: 2379973 - RNA, 19 nt, Homo sapiens
  misc_RNA (1)...(19): siRNA sense strand
ugucagaacggauggccuu

SEQ ID NO: 2379974 - RNA, 19 nt, Homo sapiens
  misc_RNA (1)...(19): siRNA sense strand
uggaugaugacuucagcua

SEQ ID NO: 2379975 - RNA, 19 nt, Homo sapiens
  misc_RNA (1)...(19): siRNA sense strand
uguucaagcacgagaugca

SEQ ID NO: 2379976 - RNA, 19 nt, Homo sapiens
  misc_RNA (1)...(19): siRNA sense strand
aggucaaaguggagaagaa

SEQ ID NO: 2379977 - RNA, 19 nt, Homo sapiens
  misc_RNA (1)...(19): siRNA sense strand
aagaaggaguggugggaga

SEQ ID NO: 2379978 - RNA, 19 nt, Homo sapiens
  misc_RNA (1)...(19): siRNA sense strand
cagccaucccagaggguaa

SEQ ID NO: 2379979 - RNA, 19 nt, Homo sapiens
  misc_RNA (1)...(19): siRNA sense strand
cggccgagcaagugaagaa

SEQ ID NO: 2379980 - RNA, 19 nt, Homo sapiens
  misc_RNA (1)...(19): siRNA sense strand
gggaagggcuugagcgaag

SEQ ID NO: 2379981 - RNA, 19 nt, Homo sapiens
  misc_RNA (1)...(19): siRNA sense strand
gugacuacuccaugggaaa

SEQ ID NO: 2379982 - RNA, 19 nt, Homo sapiens
  misc_RNA (1)...(19): siRNA sense strand
agguauagugagagcaauu

SEQ ID NO: 2379983 - RNA, 19 nt, Homo sapiens
  misc_RNA (1)...(19): siRNA sense strand
ggagaagaaaggagagcca

SEQ ID NO: 2379984 - RNA, 19 nt, Homo sapiens
  misc_RNA (1)...(19): siRNA sense strand
ccaaagaggucaaagugga

SEQ ID NO: 2379985 - RNA, 19 nt, Homo sapiens
  misc_RNA (1)...(19): siRNA sense strand
ggucaaaguggagaagaaa

SEQ ID NO: 2379986 - RNA, 19 nt, Homo sapiens
  misc_RNA (1)...(19): siRNA sense strand
aggcaggagaauacgauaa

SEQ ID NO: 2379987 - RNA, 19 nt, Homo sapiens
  misc_RNA (1)...(19): siRNA sense strand
gggaaauuguggugagccu

SEQ ID NO: 2379988 - RNA, 19 nt, Homo sapiens
  misc_RNA (1)...(19): siRNA sense strand
gaggcaaggagaagagaca

SEQ ID NO: 2379989 - RNA, 19 nt, Homo sapiens
  misc_RNA (1)...(19): siRNA sense strand
ugauagaagucuggauaau

SEQ ID NO: 2379990 - RNA, 19 nt, Homo sapiens
  misc_RNA (1)...(19): siRNA sense strand
gcaucaaagagcagaacca

SEQ ID NO: 2379991 - RNA, 19 nt, Homo sapiens
  misc_RNA (1)...(19): siRNA sense strand
gccccaaaguggagaagaa

SEQ ID NO: 2379992 - RNA, 19 nt, Homo sapiens
  misc_RNA (1)...(19): siRNA sense strand
ccaaaguggagaagaagga

SEQ ID NO: 2379993 - RNA, 19 nt, Homo sapiens
  misc_RNA (1)...(19): siRNA sense strand
uugaagaugcuacggauaa

SEQ ID NO: 2379994 - RNA, 19 nt, Homo sapiens
  misc_RNA (1)...(19): siRNA sense strand
agaggaaacagcagcacaa

SEQ ID NO: 2379995 - RNA, 19 nt, Homo sapiens
  misc_RNA (1)...(19): siRNA sense strand
gcugcuugccauaaggaaa

SEQ ID NO: 2379996 - RNA, 19 nt, Homo sapiens
  misc_RNA (1)...(19): siRNA sense strand
gaacaugcuuggagaggcu

SEQ ID NO: 2379997 - RNA, 19 nt, Homo sapiens
  misc_RNA (1)...(19): siRNA sense strand
gcucucaguuauuggccaa

SEQ ID NO: 2379998 - RNA, 19 nt, Homo sapiens
  misc_RNA (1)...(19): siRNA sense strand
cugauagaagucuggauaa

SEQ ID NO: 2379999 - RNA, 19 nt, Homo sapiens
  misc_RNA (1)...(19): siRNA sense strand
ggugagagacgcagaagca

SEQ ID NO: 2380000 - RNA, 19 nt, Homo sapiens
  misc_RNA (1)...(19): siRNA sense strand
gguacgagagcaugaucaa

SEQ ID NO: 2380001 - RNA, 19 nt, Homo sapiens
  misc_RNA (1)...(19): siRNA sense strand
aggaguaccugguugguga

SEQ ID NO: 2380002 - RNA, 19 nt, Homo sapiens
  misc_RNA (1)...(19): siRNA sense strand
cagcagugaggauggaauu

SEQ ID NO: 2380003 - RNA, 19 nt, Homo sapiens
  misc_RNA (1)...(19): siRNA sense strand
aaacagaggcgguagacca

SEQ ID NO: 2380004 - RNA, 19 nt, Homo sapiens
  misc_RNA (1)...(19): siRNA sense strand
aacuaaaaguggagcagaa

SEQ ID NO: 2380005 - RNA, 19 nt, Homo sapiens
  misc_RNA (1)...(19): siRNA sense strand
agcagaaacuggagcagau

SEQ ID NO: 2380006 - RNA, 19 nt, Homo sapiens
  misc_RNA (1)...(19): siRNA sense strand
cuagguauagugagagcaa

SEQ ID NO: 2380007 - RNA, 19 nt, Homo sapiens
  misc_RNA (1)...(19): siRNA sense strand
cucuaaaacugcugaagaa

SEQ ID NO: 2380008 - RNA, 19 nt, Homo sapiens
  misc_RNA (1)...(19): siRNA sense strand
gguggacuguaaagagauu

SEQ ID NO: 2380009 - RNA, 19 nt, Homo sapiens
  misc_RNA (1)...(19): siRNA sense strand
ugaagaaagugucuggcau

SEQ ID NO: 2380010 - RNA, 19 nt, Homo sapiens
  misc_RNA (1)...(19): siRNA sense strand
acggauaaguugaaccuca

SEQ ID NO: 2380011 - RNA, 19 nt, Homo sapiens
  misc_RNA (1)...(19): siRNA sense strand
gggaaaaggccaagcucca

SEQ ID NO: 2380012 - RNA, 19 nt, Homo sapiens
  misc_RNA (1)...(19): siRNA sense strand
guggaagugaugaagguuu

SEQ ID NO: 2380013 - RNA, 19 nt, Homo sapiens
  misc_RNA (1)...(19): siRNA sense strand
guugauuacucucuggcaa

SEQ ID NO: 2380014 - RNA, 19 nt, Homo sapiens
  misc_RNA (1)...(19): siRNA sense strand
agguguuacuccagaacuu

SEQ ID NO: 2380015 - RNA, 19 nt, Homo sapiens
  misc_RNA (1)...(19): siRNA sense strand
acgcagaagcacagaucca

SEQ ID NO: 2380016 - RNA, 19 nt, Homo sapiens
  misc_RNA (1)...(19): siRNA sense strand
agguuuguauccauggaaa

SEQ ID NO: 2380017 - RNA, 19 nt, Homo sapiens
  misc_RNA (1)...(19): siRNA sense strand
ggagaauacgauaauugaa

SEQ ID NO: 2380018 - RNA, 19 nt, Homo sapiens
  misc_RNA (1)...(19): siRNA sense strand
gcugaguggagccgagauu

SEQ ID NO: 2380019 - RNA, 19 nt, Homo sapiens
  misc_RNA (1)...(19): siRNA sense strand
ggugacuacuccaugggaa

SEQ ID NO: 2380020 - RNA, 19 nt, Homo sapiens
  misc_RNA (1)...(19): siRNA sense strand
cggcuugccucgaagacuu

SEQ ID NO: 2380021 - RNA, 19 nt, Homo sapiens
  misc_RNA (1)...(19): siRNA sense strand
ucugauagaagucuggaua

SEQ ID NO: 2380022 - RNA, 19 nt, Homo sapiens
  misc_RNA (1)...(19): siRNA sense strand
uguuagaagaguuugucaa

SEQ ID NO: 2380023 - RNA, 19 nt, Homo sapiens
  misc_RNA (1)...(19): siRNA sense strand
ccgacaagaccauuucaaa

SEQ ID NO: 2380024 - RNA, 19 nt, Homo sapiens
  misc_RNA (1)...(19): siRNA sense strand
ccaugaagcccgugcucca

SEQ ID NO: 2380025 - RNA, 19 nt, Homo sapiens
  misc_RNA (1)...(19): siRNA sense strand
cggauaaguugaaccucau

SEQ ID NO: 2380026 - RNA, 19 nt, Homo sapiens
  misc_RNA (1)...(19): siRNA sense strand
gagaaugcggggaacaaaa

SEQ ID NO: 2380027 - RNA, 19 nt, Homo sapiens
  misc_RNA (1)...(19): siRNA sense strand
cgggcaacucucagucaaa

SEQ ID NO: 2380028 - RNA, 19 nt, Homo sapiens
  misc_RNA (1)...(19): siRNA sense strand
gaggagauguggaggcuug

SEQ ID NO: 2380029 - RNA, 19 nt, Homo sapiens
  misc_RNA (1)...(19): siRNA sense strand
aggugugcauugagacgua

SEQ ID NO: 2380030 - RNA, 19 nt, Homo sapiens
  misc_RNA (1)...(19): siRNA sense strand
cugacaacauccaggucuu

SEQ ID NO: 2380031 - RNA, 19 nt, Homo sapiens
  misc_RNA (1)...(19): siRNA sense strand
cugaaugccgugaaaguga

SEQ ID NO: 2380032 - RNA, 19 nt, Homo sapiens
  misc_RNA (1)...(19): siRNA sense strand
gguggaagccaucaaaaua

SEQ ID NO: 2380033 - RNA, 19 nt, Homo sapiens
  misc_RNA (1)...(19): siRNA sense strand
aagaagagagggaggccca

SEQ ID NO: 2380034 - RNA, 19 nt, Homo sapiens
  misc_RNA (1)...(19): siRNA sense strand
gcuuccagaugcugaugaa

SEQ ID NO: 2380035 - RNA, 19 nt, Homo sapiens
  misc_RNA (1)...(19): siRNA sense strand
guaucuaugcagugguuca

SEQ ID NO: 2380036 - RNA, 19 nt, Homo sapiens
  misc_RNA (1)...(19): siRNA sense strand
ccugugagcugguggugga

SEQ ID NO: 2380037 - RNA, 19 nt, Homo sapiens
  misc_RNA (1)...(19): siRNA sense strand
caccaaagacaccaaacaa

SEQ ID NO: 2380038 - RNA, 19 nt, Homo sapiens
  misc_RNA (1)...(19): siRNA sense strand
gcguccagccugucagcaa

SEQ ID NO: 2380039 - RNA, 19 nt, Homo sapiens
  misc_RNA (1)...(19): siRNA sense strand
ggaacaaaaucuacaccau

SEQ ID NO: 2380040 - RNA, 19 nt, Homo sapiens
  misc_RNA (1)...(19): siRNA sense strand
cagaugucccacaggauuu

SEQ ID NO: 2380041 - RNA, 19 nt, Homo sapiens
  misc_RNA (1)...(19): siRNA sense strand
gagcagaaccagaaggagc

SEQ ID NO: 2380042 - RNA, 19 nt, Homo sapiens
  misc_RNA (1)...(19): siRNA sense strand
gugaugaggacguccaaga

SEQ ID NO: 2380043 - RNA, 19 nt, Homo sapiens
  misc_RNA (1)...(19): siRNA sense strand
uggccaaaaucuacaaaau

SEQ ID NO: 2380044 - RNA, 19 nt, Homo sapiens
  misc_RNA (1)...(19): siRNA sense strand
gggccaugcgugugaacga

SEQ ID NO: 2380045 - RNA, 19 nt, Homo sapiens
  misc_RNA (1)...(19): siRNA sense strand
ugaacgagcucuaugucga

SEQ ID NO: 2380046 - RNA, 19 nt, Homo sapiens
  misc_RNA (1)...(19): siRNA sense strand
acggaaagacaaaggaaau

SEQ ID NO: 2380047 - RNA, 19 nt, Homo sapiens
  misc_RNA (1)...(19): siRNA sense strand
acaaaugaugaaacggaaa

SEQ ID NO: 2380048 - RNA, 19 nt, Homo sapiens
  misc_RNA (1)...(19): siRNA sense strand
guacaaaugaugaaacgga

SEQ ID NO: 2380049 - RNA, 19 nt, Homo sapiens
  misc_RNA (1)...(19): siRNA sense strand
ugguguuguuuguguggaa

SEQ ID NO: 2380050 - RNA, 19 nt, Homo sapiens
  misc_RNA (1)...(19): siRNA sense strand
augaugaaacggaaagaca

SEQ ID NO: 2380051 - RNA, 19 nt, Homo sapiens
  misc_RNA (1)...(19): siRNA sense strand
gagaacacgccucuggcua

SEQ ID NO: 2380052 - RNA, 19 nt, Homo sapiens
  misc_RNA (1)...(19): siRNA sense strand
aacggaaagacaaaggaaa

SEQ ID NO: 2380053 - RNA, 19 nt, Homo sapiens
  misc_RNA (1)...(19): siRNA sense strand
ggggaaaccacauggacuu

SEQ ID NO: 2380054 - RNA, 19 nt, Homo sapiens
  misc_RNA (1)...(19): siRNA sense strand
guuaauggagccaggggaa

SEQ ID NO: 2380055 - RNA, 19 nt, Homo sapiens
  misc_RNA (1)...(19): siRNA sense strand
caccaaaggauguggggau

SEQ ID NO: 2380056 - RNA, 19 nt, Homo sapiens
  misc_RNA (1)...(19): siRNA sense strand
uggucaagacucagaaaau

SEQ ID NO: 2380057 - RNA, 19 nt, Homo sapiens
  misc_RNA (1)...(19): siRNA sense strand
uacaaaugaugaaacggaa

SEQ ID NO: 2380058 - RNA, 19 nt, Homo sapiens
  misc_RNA (1)...(19): siRNA sense strand
cuuugguguagaaggacaa

SEQ ID NO: 2380059 - RNA, 19 nt, Homo sapiens
  misc_RNA (1)...(19): siRNA sense strand
cggaagauguugagugaaa

SEQ ID NO: 2380060 - RNA, 19 nt, Homo sapiens
  misc_RNA (1)...(19): siRNA sense strand
ccaaaagacugcugagaua

SEQ ID NO: 2380061 - RNA, 19 nt, Homo sapiens
  misc_RNA (1)...(19): siRNA sense strand
agaaauugaccuugaguua

SEQ ID NO: 2380062 - RNA, 19 nt, Homo sapiens
  misc_RNA (1)...(19): siRNA sense strand
cagcaaacacggagaagaa

SEQ ID NO: 2380063 - RNA, 19 nt, Homo sapiens
  misc_RNA (1)...(19): siRNA sense strand
cgaaaugacaagagaucaa

SEQ ID NO: 2380064 - RNA, 19 nt, Homo sapiens
  misc_RNA (1)...(19): siRNA sense strand
gggcaaugcuagaacaaau

SEQ ID NO: 2380065 - RNA, 19 nt, Homo sapiens
  misc_RNA (1)...(19): siRNA sense strand
gugaaaagacaaaggaaaa

SEQ ID NO: 2380066 - RNA, 19 nt, Homo sapiens
  misc_RNA (1)...(19): siRNA sense strand
aaguagaggccuugaauaa

SEQ ID NO: 2380067 - RNA, 19 nt, Homo sapiens
  misc_RNA (1)...(19): siRNA sense strand
cuucaauagaggagauaua

SEQ ID NO: 2380068 - RNA, 19 nt, Homo sapiens
  misc_RNA (1)...(19): siRNA sense strand
aagcaaagcuggaagccaa

SEQ ID NO: 2380069 - RNA, 19 nt, Homo sapiens
  misc_RNA (1)...(19): siRNA sense strand
cggaagugcuacugaaaga

SEQ ID NO: 2380070 - RNA, 19 nt, Homo sapiens
  misc_RNA (1)...(19): siRNA sense strand
cagaagaacaacaguuaua

SEQ ID NO: 2380071 - RNA, 19 nt, Homo sapiens
  misc_RNA (1)...(19): siRNA sense strand
aaaagaaaguccugagaua

SEQ ID NO: 2380072 - RNA, 19 nt, Homo sapiens
  misc_RNA (1)...(19): siRNA sense strand
gcuggaaacuauagaugaa

SEQ ID NO: 2380073 - RNA, 19 nt, Homo sapiens
  misc_RNA (1)...(19): siRNA sense strand
gaauguuagugguggauau

SEQ ID NO: 2380074 - RNA, 19 nt, Homo sapiens
  misc_RNA (1)...(19): siRNA sense strand
agauaaggcaguugaggaa

SEQ ID NO: 2380075 - RNA, 19 nt, Homo sapiens
  misc_RNA (1)...(19): siRNA sense strand
gcaaaugccacgaggccaa

SEQ ID NO: 2380076 - RNA, 19 nt, Homo sapiens
  misc_RNA (1)...(19): siRNA sense strand
ggguagaaguucaacaaga

SEQ ID NO: 2380077 - RNA, 19 nt, Homo sapiens
  misc_RNA (1)...(19): siRNA sense strand
gcgcacagcaauugagaau

SEQ ID NO: 2380078 - RNA, 19 nt, Homo sapiens
  misc_RNA (1)...(19): siRNA sense strand
caggaaaagccgaaggaua

SEQ ID NO: 2380079 - RNA, 19 nt, Homo sapiens
  misc_RNA (1)...(19): siRNA sense strand
gugaagaggaagaagaaca

SEQ ID NO: 2380080 - RNA, 19 nt, Homo sapiens
  misc_RNA (1)...(19): siRNA sense strand
gaggaagacaguaggguuu

SEQ ID NO: 2380081 - RNA, 19 nt, Homo sapiens
  misc_RNA (1)...(19): siRNA sense strand
aggagauagugaugauuua

SEQ ID NO: 2380082 - RNA, 19 nt, Homo sapiens
  misc_RNA (1)...(19): siRNA sense strand
aagcaaagcagaaggcauu

SEQ ID NO: 2380083 - RNA, 19 nt, Homo sapiens
  misc_RNA (1)...(19): siRNA sense strand
gggugaaaguauaucagaa

SEQ ID NO: 2380084 - RNA, 19 nt, Homo sapiens
  misc_RNA (1)...(19): siRNA sense strand
cagcaguacagcagugaua

SEQ ID NO: 2380085 - RNA, 19 nt, Homo sapiens
  misc_RNA (1)...(19): siRNA sense strand
ccucagugauggacagauu

SEQ ID NO: 2380086 - RNA, 19 nt, Homo sapiens
  misc_RNA (1)...(19): siRNA sense strand
ggugcaaauauuaguguaa

SEQ ID NO: 2380087 - RNA, 19 nt, Homo sapiens
  misc_RNA (1)...(19): siRNA sense strand
gagaagagguggauggaag

SEQ ID NO: 2380088 - RNA, 19 nt, Homo sapiens
  misc_RNA (1)...(19): siRNA sense strand
guuccaaacucuagcguga

SEQ ID NO: 2380089 - RNA, 19 nt, Homo sapiens
  misc_RNA (1)...(19): siRNA sense strand
agagaacggugaagaggaa

SEQ ID NO: 2380090 - RNA, 19 nt, Homo sapiens
  misc_RNA (1)...(19): siRNA sense strand
guugaauccuugagugcaa

SEQ ID NO: 2380091 - RNA, 19 nt, Homo sapiens
  misc_RNA (1)...(19): siRNA sense strand
guggauauuuagugcuuua

SEQ ID NO: 2380092 - RNA, 19 nt, Homo sapiens
  misc_RNA (1)...(19): siRNA sense strand
ugaagaugaagaugggaaa

SEQ ID NO: 2380093 - RNA, 19 nt, Homo sapiens
  misc_RNA (1)...(19): siRNA sense strand
gcaauaugguuuugaagaa

SEQ ID NO: 2380094 - RNA, 19 nt, Homo sapiens
  misc_RNA (1)...(19): siRNA sense strand
cuugaaaagaguugagaua

SEQ ID NO: 2380095 - RNA, 19 nt, Homo sapiens
  misc_RNA (1)...(19): siRNA sense strand
agguauggcaggaggaaaa

SEQ ID NO: 2380096 - RNA, 19 nt, Homo sapiens
  misc_RNA (1)...(19): siRNA sense strand
gaaugaaagaggaacagaa

SEQ ID NO: 2380097 - RNA, 19 nt, Homo sapiens
  misc_RNA (1)...(19): siRNA sense strand
gguugugcuuguaaagaua

SEQ ID NO: 2380098 - RNA, 19 nt, Homo sapiens
  misc_RNA (1)...(19): siRNA sense strand
gagaaauugugcagcauca

SEQ ID NO: 2380099 - RNA, 19 nt, Homo sapiens
  misc_RNA (1)...(19): siRNA sense strand
ggacaauaccugauaaaau

SEQ ID NO: 2380100 - RNA, 19 nt, Homo sapiens
  misc_RNA (1)...(19): siRNA sense strand
gcacuaauucagaacuaaa

SEQ ID NO: 2380101 - RNA, 19 nt, Homo sapiens
  misc_RNA (1)...(19): siRNA sense strand
gcuggaauguugacguuaa

SEQ ID NO: 2380102 - RNA, 19 nt, Homo sapiens
  misc_RNA (1)...(19): siRNA sense strand
gguaguggcaacugauaua

SEQ ID NO: 2380103 - RNA, 19 nt, Homo sapiens
  misc_RNA (1)...(19): siRNA sense strand
acuuaguaauaguggagua

SEQ ID NO: 2380104 - RNA, 19 nt, Homo sapiens
  misc_RNA (1)...(19): siRNA sense strand
aauuggagcaaguggauua

SEQ ID NO: 2380105 - RNA, 19 nt, Homo sapiens
  misc_RNA (1)...(19): siRNA sense strand
auacauggccuguggauau

SEQ ID NO: 2380106 - RNA, 19 nt, Homo sapiens
  misc_RNA (1)...(19): siRNA sense strand
caccaauauuccacagaua

SEQ ID NO: 2380107 - RNA, 19 nt, Homo sapiens
  misc_RNA (1)...(19): siRNA sense strand
cggugaagaggaagaagaa

SEQ ID NO: 2380108 - RNA, 19 nt, Homo sapiens
  misc_RNA (1)...(19): siRNA sense strand
cuuuauagcaucaaggaau

SEQ ID NO: 2380109 - RNA, 19 nt, Homo sapiens
  misc_RNA (1)...(19): siRNA sense strand
uguuagugguggauauuua

SEQ ID NO: 2380110 - RNA, 19 nt, Homo sapiens
  misc_RNA (1)...(19): siRNA sense strand
caacaaauuaugagccaga

SEQ ID NO: 2380111 - RNA, 19 nt, Homo sapiens
  misc_RNA (1)...(19): siRNA sense strand
gaagaagaacagucagaau

SEQ ID NO: 2380112 - RNA, 19 nt, Homo sapiens
  misc_RNA (1)...(19): siRNA sense strand
caacaagaacagcagcaaa

SEQ ID NO: 2380113 - RNA, 19 nt, Homo sapiens
  misc_RNA (1)...(19): siRNA sense strand
ccauuauuauagagcgaau

SEQ ID NO: 2380114 - RNA, 19 nt, Homo sapiens
  misc_RNA (1)...(19): siRNA sense strand
guuacuaguacaagggcua

SEQ ID NO: 2380115 - RNA, 19 nt, Homo sapiens
  misc_RNA (1)...(19): siRNA sense strand
cauaagugaucuagaagga

SEQ ID NO: 2380116 - RNA, 19 nt, Homo sapiens
  misc_RNA (1)...(19): siRNA sense strand
cagaaggaguacuagauau

SEQ ID NO: 2380117 - RNA, 19 nt, Homo sapiens
  misc_RNA (1)...(19): siRNA sense strand
agaaaauggagcagacaua

SEQ ID NO: 2380118 - RNA, 19 nt, Homo sapiens
  misc_RNA (1)...(19): siRNA sense strand
aagugaagcucuuagaauu

SEQ ID NO: 2380119 - RNA, 19 nt, Homo sapiens
  misc_RNA (1)...(19): siRNA sense strand
gcuuguagaauaugacuua

SEQ ID NO: 2380120 - RNA, 19 nt, Homo sapiens
  misc_RNA (1)...(19): siRNA sense strand
cuguacaaagguagaauua

SEQ ID NO: 2380121 - RNA, 19 nt, Homo sapiens
  misc_RNA (1)...(19): siRNA sense strand
gcaaaggcuggaagaggaa

SEQ ID NO: 2380122 - RNA, 19 nt, Homo sapiens
  misc_RNA (1)...(19): siRNA sense strand
ggucauagcgugcgauuca

SEQ ID NO: 2380123 - RNA, 19 nt, Homo sapiens
  misc_RNA (1)...(19): siRNA sense strand
gaauuaugccacucggaua

SEQ ID NO: 2380124 - RNA, 19 nt, Homo sapiens
  misc_RNA (1)...(19): siRNA sense strand
aagaggaacagaagagauu

SEQ ID NO: 2380125 - RNA, 19 nt, Homo sapiens
  misc_RNA (1)...(19): siRNA sense strand
cccuaaaacaccagaguaa

SEQ ID NO: 2380126 - RNA, 19 nt, Homo sapiens
  misc_RNA (1)...(19): siRNA sense strand
gguaaucaguggaguuuua

SEQ ID NO: 2380127 - RNA, 19 nt, Homo sapiens
  misc_RNA (1)...(19): siRNA sense strand
gccuaacacucaugacaaa

SEQ ID NO: 2380128 - RNA, 19 nt, Homo sapiens
  misc_RNA (1)...(19): siRNA sense strand
gguuagugauucugcaaga

SEQ ID NO: 2380129 - RNA, 19 nt, Homo sapiens
  misc_RNA (1)...(19): siRNA sense strand
ggacguuacgggaguacaa

SEQ ID NO: 2380130 - RNA, 19 nt, Homo sapiens
  misc_RNA (1)...(19): siRNA sense strand
agaaggaguacuagauauu

SEQ ID NO: 2380131 - RNA, 19 nt, Homo sapiens
  misc_RNA (1)...(19): siRNA sense strand
ugguagaacagauggaaaa

SEQ ID NO: 2380132 - RNA, 19 nt, Homo sapiens
  misc_RNA (1)...(19): siRNA sense strand
aggaaggaacaguggguga

SEQ ID NO: 2380133 - RNA, 19 nt, Homo sapiens
  misc_RNA (1)...(19): siRNA sense strand
cggagaugauccuuggaca

SEQ ID NO: 2380134 - RNA, 19 nt, Homo sapiens
  misc_RNA (1)...(19): siRNA sense strand
uguuucaguucgaggacau

SEQ ID NO: 2380135 - RNA, 19 nt, Homo sapiens
  misc_RNA (1)...(19): siRNA sense strand
auugaauuguacuggaaca

SEQ ID NO: 2380136 - RNA, 19 nt, Homo sapiens
  misc_RNA (1)...(19): siRNA sense strand
aauaauuggaguugguguu

SEQ ID NO: 2380137 - RNA, 19 nt, Homo sapiens
  misc_RNA (1)...(19): siRNA sense strand
gcucuuaaccacccggaca

SEQ ID NO: 2380138 - RNA, 19 nt, Homo sapiens
  misc_RNA (1)...(19): siRNA sense strand
cuuugagcguggaggugau

SEQ ID NO: 2380139 - RNA, 19 nt, Homo sapiens
  misc_RNA (1)...(19): siRNA sense strand
cggagaugauccuuggaca

SEQ ID NO: 2380140 - RNA, 19 nt, Homo sapiens
  misc_RNA (1)...(19): siRNA sense strand
uguuucaguucgaggacau

SEQ ID NO: 2380141 - RNA, 19 nt, Homo sapiens
  misc_RNA (1)...(19): siRNA sense strand
auugaauuguacuggaaca

SEQ ID NO: 2380142 - RNA, 19 nt, Homo sapiens
  misc_RNA (1)...(19): siRNA sense strand
aauaauuggaguugguguu

SEQ ID NO: 2380143 - RNA, 19 nt, Homo sapiens
  misc_RNA (1)...(19): siRNA sense strand
gcucuuaaccacccggaca

SEQ ID NO: 2380144 - RNA, 19 nt, Homo sapiens
  misc_RNA (1)...(19): siRNA sense strand
cuuugagcguggaggugau

SEQ ID NO: 2380145 - RNA, 19 nt, Homo sapiens
  misc_RNA (1)...(19): siRNA sense strand
cggagaugauccuuggaca

SEQ ID NO: 2380146 - RNA, 19 nt, Homo sapiens
  misc_RNA (1)...(19): siRNA sense strand
uguuucaguucgaggacau

SEQ ID NO: 2380147 - RNA, 19 nt, Homo sapiens
  misc_RNA (1)...(19): siRNA sense strand
auugaauuguacuggaaca

SEQ ID NO: 2380148 - RNA, 19 nt, Homo sapiens
  misc_RNA (1)...(19): siRNA sense strand
aauaauuggaguugguguu

SEQ ID NO: 2380149 - RNA, 19 nt, Homo sapiens
  misc_RNA (1)...(19): siRNA sense strand
gcucuuaaccacccggaca

SEQ ID NO: 2380150 - RNA, 19 nt, Homo sapiens
  misc_RNA (1)...(19): siRNA sense strand
cuuugagcguggaggugau

SEQ ID NO: 2380151 - RNA, 19 nt, Homo sapiens
  misc_RNA (1)...(19): siRNA sense strand
cggagaugauccuuggaca

SEQ ID NO: 2380152 - RNA, 19 nt, Homo sapiens
  misc_RNA (1)...(19): siRNA sense strand
uguuucaguucgaggacau

SEQ ID NO: 2380153 - RNA, 19 nt, Homo sapiens
  misc_RNA (1)...(19): siRNA sense strand
auugaauuguacuggaaca

SEQ ID NO: 2380154 - RNA, 19 nt, Homo sapiens
  misc_RNA (1)...(19): siRNA sense strand
aauaauuggaguugguguu

SEQ ID NO: 2380155 - RNA, 19 nt, Homo sapiens
  misc_RNA (1)...(19): siRNA sense strand
gcucuuaaccacccggaca

SEQ ID NO: 2380156 - RNA, 19 nt, Homo sapiens
  misc_RNA (1)...(19): siRNA sense strand
cuuugagcguggaggugau

SEQ ID NO: 2380157 - RNA, 19 nt, Homo sapiens
  misc_RNA (1)...(19): siRNA sense strand
cggagaugauccuuggaca

SEQ ID NO: 2380158 - RNA, 19 nt, Homo sapiens
  misc_RNA (1)...(19): siRNA sense strand
uguuucaguucgaggacau

SEQ ID NO: 2380159 - RNA, 19 nt, Homo sapiens
  misc_RNA (1)...(19): siRNA sense strand
auugaauuguacuggaaca

SEQ ID NO: 2380160 - RNA, 19 nt, Homo sapiens
  misc_RNA (1)...(19): siRNA sense strand
aauaauuggaguugguguu

SEQ ID NO: 2380161 - RNA, 19 nt, Homo sapiens
  misc_RNA (1)...(19): siRNA sense strand
gcucuuaaccacccggaca

SEQ ID NO: 2380162 - RNA, 19 nt, Homo sapiens
  misc_RNA (1)...(19): siRNA sense strand
cuuugagcguggaggugau

SEQ ID NO: 2380163 - RNA, 19 nt, Homo sapiens
  misc_RNA (1)...(19): siRNA sense strand
cggagaugauccuuggaca

SEQ ID NO: 2380164 - RNA, 19 nt, Homo sapiens
  misc_RNA (1)...(19): siRNA sense strand
uguuucaguucgaggacau

SEQ ID NO: 2380165 - RNA, 19 nt, Homo sapiens
  misc_RNA (1)...(19): siRNA sense strand
auugaauuguacuggaaca

SEQ ID NO: 2380166 - RNA, 19 nt, Homo sapiens
  misc_RNA (1)...(19): siRNA sense strand
aauaauuggaguugguguu

SEQ ID NO: 2380167 - RNA, 19 nt, Homo sapiens
  misc_RNA (1)...(19): siRNA sense strand
gcucuuaaccacccggaca

SEQ ID NO: 2380168 - RNA, 19 nt, Homo sapiens
  misc_RNA (1)...(19): siRNA sense strand
cuuugagcguggaggugau

SEQ ID NO: 2380169 - RNA, 19 nt, Homo sapiens
  misc_RNA (1)...(19): siRNA sense strand
cggagaugauccuuggaca

SEQ ID NO: 2380170 - RNA, 19 nt, Homo sapiens
  misc_RNA (1)...(19): siRNA sense strand
uguuucaguucgaggacau

SEQ ID NO: 2380171 - RNA, 19 nt, Homo sapiens
  misc_RNA (1)...(19): siRNA sense strand
auugaauuguacuggaaca

SEQ ID NO: 2380172 - RNA, 19 nt, Homo sapiens
  misc_RNA (1)...(19): siRNA sense strand
aauaauuggaguugguguu

SEQ ID NO: 2380173 - RNA, 19 nt, Homo sapiens
  misc_RNA (1)...(19): siRNA sense strand
gcucuuaaccacccggaca

SEQ ID NO: 2380174 - RNA, 19 nt, Homo sapiens
  misc_RNA (1)...(19): siRNA sense strand
cuuugagcguggaggugau

SEQ ID NO: 2380175 - RNA, 19 nt, Homo sapiens
  misc_RNA (1)...(19): siRNA sense strand
cggagaugauccuuggaca

SEQ ID NO: 2380176 - RNA, 19 nt, Homo sapiens
  misc_RNA (1)...(19): siRNA sense strand
uguuucaguucgaggacau

SEQ ID NO: 2380177 - RNA, 19 nt, Homo sapiens
  misc_RNA (1)...(19): siRNA sense strand
auugaauuguacuggaaca

SEQ ID NO: 2380178 - RNA, 19 nt, Homo sapiens
  misc_RNA (1)...(19): siRNA sense strand
aauaauuggaguugguguu

SEQ ID NO: 2380179 - RNA, 19 nt, Homo sapiens
  misc_RNA (1)...(19): siRNA sense strand
gcucuuaaccacccggaca

SEQ ID NO: 2380180 - RNA, 19 nt, Homo sapiens
  misc_RNA (1)...(19): siRNA sense strand
cuuugagcguggaggugau

SEQ ID NO: 2380181 - RNA, 19 nt, Homo sapiens
  misc_RNA (1)...(19): siRNA sense strand
ucgucgaggugaagagcaa

SEQ ID NO: 2380182 - RNA, 19 nt, Homo sapiens
  misc_RNA (1)...(19): siRNA sense strand
gcauugaaguagccgggaa

SEQ ID NO: 2380183 - RNA, 19 nt, Homo sapiens
  misc_RNA (1)...(19): siRNA sense strand
augagauccucgaggucaa

SEQ ID NO: 2380184 - RNA, 19 nt, Homo sapiens
  misc_RNA (1)...(19): siRNA sense strand
cggacaugaugguugccaa

SEQ ID NO: 2380185 - RNA, 19 nt, Homo sapiens
  misc_RNA (1)...(19): siRNA sense strand
gcaauaacguggugcgagg

SEQ ID NO: 2380186 - RNA, 19 nt, Homo sapiens
  misc_RNA (1)...(19): siRNA sense strand
ccgggaagaccuuggacca

SEQ ID NO: 2380187 - RNA, 19 nt, Homo sapiens
  misc_RNA (1)...(19): siRNA sense strand
auagcaucgucgaggugaa

SEQ ID NO: 2380188 - RNA, 19 nt, Homo sapiens
  misc_RNA (1)...(19): siRNA sense strand
gagucgcauucgaggagau

SEQ ID NO: 2380189 - RNA, 19 nt, Homo sapiens
  misc_RNA (1)...(19): siRNA sense strand
aggaagaggaggaggacaa

SEQ ID NO: 2380190 - RNA, 19 nt, Homo sapiens
  misc_RNA (1)...(19): siRNA sense strand
gggcaugacuuuugggcua

SEQ ID NO: 2380191 - RNA, 19 nt, Homo sapiens
  misc_RNA (1)...(19): siRNA sense strand
acaggaaaggagagaagaa

SEQ ID NO: 2380192 - RNA, 19 nt, Homo sapiens
  misc_RNA (1)...(19): siRNA sense strand
cagcagucgaggaggaaga

SEQ ID NO: 2380193 - RNA, 19 nt, Homo sapiens
  misc_RNA (1)...(19): siRNA sense strand
cagaaauggcucagggaac

SEQ ID NO: 2380194 - RNA, 19 nt, Homo sapiens
  misc_RNA (1)...(19): siRNA sense strand
uggaaagacagaagagacu

SEQ ID NO: 2380195 - RNA, 19 nt, Homo sapiens
  misc_RNA (1)...(19): siRNA sense strand
acaacuuauucuacagcaa

SEQ ID NO: 2380196 - RNA, 19 nt, Homo sapiens
  misc_RNA (1)...(19): siRNA sense strand
aggaggaagaggaggagga

SEQ ID NO: 2380197 - RNA, 19 nt, Homo sapiens
  misc_RNA (1)...(19): siRNA sense strand
cuuaaaauggccagaaauu

SEQ ID NO: 2380198 - RNA, 19 nt, Homo sapiens
  misc_RNA (1)...(19): siRNA sense strand
acuuacggguggaaagaca

SEQ ID NO: 2380199 - RNA, 19 nt, Homo sapiens
  misc_RNA (1)...(19): siRNA sense strand
ucgaggaggaagaggagga

SEQ ID NO: 2380200 - RNA, 19 nt, Homo sapiens
  misc_RNA (1)...(19): siRNA sense strand
caacauugcgauugggaug

SEQ ID NO: 2380201 - RNA, 19 nt, Homo sapiens
  misc_RNA (1)...(19): siRNA sense strand
cuugaaagaauaaagcaga

SEQ ID NO: 2380202 - RNA, 19 nt, Homo sapiens
  misc_RNA (1)...(19): siRNA sense strand
gaaaccaguauguggagga

SEQ ID NO: 2380203 - RNA, 19 nt, Homo sapiens
  misc_RNA (1)...(19): siRNA sense strand
gcagcaucuccgacgacaa

SEQ ID NO: 2380204 - RNA, 19 nt, Homo sapiens
  misc_RNA (1)...(19): siRNA sense strand
acagaaauggcucagggaa

SEQ ID NO: 2380205 - RNA, 19 nt, Homo sapiens
  misc_RNA (1)...(19): siRNA sense strand
acggcagguuccaggucua

SEQ ID NO: 2380206 - RNA, 19 nt, Homo sapiens
  misc_RNA (1)...(19): siRNA sense strand
cagugagaaugacgaggau

SEQ ID NO: 2380207 - RNA, 19 nt, Homo sapiens
  misc_RNA (1)...(19): siRNA sense strand
gugcugauguggaugggca

SEQ ID NO: 2380208 - RNA, 19 nt, Homo sapiens
  misc_RNA (1)...(19): siRNA sense strand
aguaaagacaguugggaca

SEQ ID NO: 2380209 - RNA, 19 nt, Homo sapiens
  misc_RNA (1)...(19): siRNA sense strand
ccucaagggaugaagucaa

SEQ ID NO: 2380210 - RNA, 19 nt, Homo sapiens
  misc_RNA (1)...(19): siRNA sense strand
ccaacaugccgaagcggaa

SEQ ID NO: 2380211 - RNA, 19 nt, Homo sapiens
  misc_RNA (1)...(19): siRNA sense strand
augugaaaauggcgggaaa

SEQ ID NO: 2380212 - RNA, 19 nt, Homo sapiens
  misc_RNA (1)...(19): siRNA sense strand
ucgaaauaguaaagacagu

SEQ ID NO: 2380213 - RNA, 19 nt, Homo sapiens
  misc_RNA (1)...(19): siRNA sense strand
agaugaaagugaaggacgu

SEQ ID NO: 2380214 - RNA, 19 nt, Homo sapiens
  misc_RNA (1)...(19): siRNA sense strand
ucaauaaagcguaucggaa

SEQ ID NO: 2380215 - RNA, 19 nt, Homo sapiens
  misc_RNA (1)...(19): siRNA sense strand
ugacaaauguguagcaccu

SEQ ID NO: 2380216 - RNA, 19 nt, Homo sapiens
  misc_RNA (1)...(19): siRNA sense strand
gguacacgucagagacaga

SEQ ID NO: 2380217 - RNA, 19 nt, Homo sapiens
  misc_RNA (1)...(19): siRNA sense strand
cuaugauguugggcagaaa

SEQ ID NO: 2380218 - RNA, 19 nt, Homo sapiens
  misc_RNA (1)...(19): siRNA sense strand
acaaacuggagaaggcauu

SEQ ID NO: 2380219 - RNA, 19 nt, Homo sapiens
  misc_RNA (1)...(19): siRNA sense strand
gggacaugcugggagucaa

SEQ ID NO: 2380220 - RNA, 19 nt, Homo sapiens
  misc_RNA (1)...(19): siRNA sense strand
gcuucuucacccugacaaa

SEQ ID NO: 2380221 - RNA, 19 nt, Homo sapiens
  misc_RNA (1)...(19): siRNA sense strand
gugucuaaauaccuggcaa

SEQ ID NO: 2380222 - RNA, 19 nt, Homo sapiens
  misc_RNA (1)...(19): siRNA sense strand
ggucuaugauguugggcag

SEQ ID NO: 2380223 - RNA, 19 nt, Homo sapiens
  misc_RNA (1)...(19): siRNA sense strand
gggcugaaagcaaaggguu

SEQ ID NO: 2380224 - RNA, 19 nt, Homo sapiens
  misc_RNA (1)...(19): siRNA sense strand
gagccuaugugcuggccaa

SEQ ID NO: 2380225 - RNA, 19 nt, Homo sapiens
  misc_RNA (1)...(19): siRNA sense strand
acacagacuggaaggaaca

SEQ ID NO: 2380226 - RNA, 19 nt, Homo sapiens
  misc_RNA (1)...(19): siRNA sense strand
ucuucaacuucgaggacau

SEQ ID NO: 2380227 - RNA, 19 nt, Homo sapiens
  misc_RNA (1)...(19): siRNA sense strand
cugcagacacagacuggaa

SEQ ID NO: 2380228 - RNA, 19 nt, Homo sapiens
  misc_RNA (1)...(19): siRNA sense strand
ggcuggugcuggugaacau

SEQ ID NO: 2380229 - RNA, 19 nt, Homo sapiens
  misc_RNA (1)...(19): siRNA sense strand
agauugggaacguggugaa

SEQ ID NO: 2380230 - RNA, 19 nt, Homo sapiens
  misc_RNA (1)...(19): siRNA sense strand
acacagaguuggugcagag

SEQ ID NO: 2380231 - RNA, 19 nt, Homo sapiens
  misc_RNA (1)...(19): siRNA sense strand
gaacggugcccaaugccaa

SEQ ID NO: 2380232 - RNA, 19 nt, Homo sapiens
  misc_RNA (1)...(19): siRNA sense strand
ucaaguaugugauuggcau

SEQ ID NO: 2380233 - RNA, 19 nt, Homo sapiens
  misc_RNA (1)...(19): siRNA sense strand
aggccaaccugcagcucuu

SEQ ID NO: 2380234 - RNA, 19 nt, Homo sapiens
  misc_RNA (1)...(19): siRNA sense strand
gagccuaugugcuggccaa

SEQ ID NO: 2380235 - RNA, 19 nt, Homo sapiens
  misc_RNA (1)...(19): siRNA sense strand
acacagacuggaaggaaca

SEQ ID NO: 2380236 - RNA, 19 nt, Homo sapiens
  misc_RNA (1)...(19): siRNA sense strand
ucuucaacuucgaggacau

SEQ ID NO: 2380237 - RNA, 19 nt, Homo sapiens
  misc_RNA (1)...(19): siRNA sense strand
cugcagacacagacuggaa

SEQ ID NO: 2380238 - RNA, 19 nt, Homo sapiens
  misc_RNA (1)...(19): siRNA sense strand
ggcuggugcuggugaacau

SEQ ID NO: 2380239 - RNA, 19 nt, Homo sapiens
  misc_RNA (1)...(19): siRNA sense strand
agauugggaacguggugaa

SEQ ID NO: 2380240 - RNA, 19 nt, Homo sapiens
  misc_RNA (1)...(19): siRNA sense strand
acacagaguuggugcagag

SEQ ID NO: 2380241 - RNA, 19 nt, Homo sapiens
  misc_RNA (1)...(19): siRNA sense strand
gaacggugcccaaugccaa

SEQ ID NO: 2380242 - RNA, 19 nt, Homo sapiens
  misc_RNA (1)...(19): siRNA sense strand
ucaaguaugugauuggcau

SEQ ID NO: 2380243 - RNA, 19 nt, Homo sapiens
  misc_RNA (1)...(19): siRNA sense strand
aggccaaccugcagcucuu

SEQ ID NO: 2380244 - RNA, 19 nt, Homo sapiens
  misc_RNA (1)...(19): siRNA sense strand
agaaauuaacagugcagaa

SEQ ID NO: 2380245 - RNA, 19 nt, Homo sapiens
  misc_RNA (1)...(19): siRNA sense strand
ccauguaguuguagggagu

SEQ ID NO: 2380246 - RNA, 19 nt, Homo sapiens
  misc_RNA (1)...(19): siRNA sense strand
cagaaguagcuaauggcaa

SEQ ID NO: 2380247 - RNA, 19 nt, Homo sapiens
  misc_RNA (1)...(19): siRNA sense strand
cgucauagucucuggggua

SEQ ID NO: 2380248 - RNA, 19 nt, Homo sapiens
  misc_RNA (1)...(19): siRNA sense strand
aagugaaagacaugaguuu

SEQ ID NO: 2380249 - RNA, 19 nt, Homo sapiens
  misc_RNA (1)...(19): siRNA sense strand
agauauaugcucucgaaca

SEQ ID NO: 2380250 - RNA, 19 nt, Homo sapiens
  misc_RNA (1)...(19): siRNA sense strand
ugauaugacuguuuggagu

SEQ ID NO: 2380251 - RNA, 19 nt, Homo sapiens
  misc_RNA (1)...(19): siRNA sense strand
gcuguaaagugauucguca

SEQ ID NO: 2380252 - RNA, 19 nt, Homo sapiens
  misc_RNA (1)...(19): siRNA sense strand
aauuaacagugcagaaacu

SEQ ID NO: 2380253 - RNA, 19 nt, Homo sapiens
  misc_RNA (1)...(19): siRNA sense strand
guagaaauugaaagagaag

SEQ ID NO: 2380254 - RNA, 19 nt, Homo sapiens
  misc_RNA (1)...(19): siRNA sense strand
aucaauggugcuaaggaaa

SEQ ID NO: 2380255 - RNA, 19 nt, Homo sapiens
  misc_RNA (1)...(19): siRNA sense strand
ggaccauauacaaacaaca

SEQ ID NO: 2380256 - RNA, 19 nt, Homo sapiens
  misc_RNA (1)...(19): siRNA sense strand
agaaauugaaagagaagug

SEQ ID NO: 2380257 - RNA, 19 nt, Homo sapiens
  misc_RNA (1)...(19): siRNA sense strand
ucgagaaggacgaggacau

SEQ ID NO: 2380258 - RNA, 19 nt, Homo sapiens
  misc_RNA (1)...(19): siRNA sense strand
uggagcagcacaaggacaa

SEQ ID NO: 2380259 - RNA, 19 nt, Homo sapiens
  misc_RNA (1)...(19): siRNA sense strand
ccgacuggaaggaggcgaa

SEQ ID NO: 2380260 - RNA, 19 nt, Homo sapiens
  misc_RNA (1)...(19): siRNA sense strand
cauggaaggagauggcgaa

SEQ ID NO: 2380261 - RNA, 19 nt, Homo sapiens
  misc_RNA (1)...(19): siRNA sense strand
ccaccggcguguuuggcua

SEQ ID NO: 2380262 - RNA, 19 nt, Homo sapiens
  misc_RNA (1)...(19): siRNA sense strand
cugcagagcuguaagacug

SEQ ID NO: 2380263 - RNA, 19 nt, Homo sapiens
  misc_RNA (1)...(19): siRNA sense strand
ggaaaauguucuugggaga

SEQ ID NO: 2380264 - RNA, 19 nt, Homo sapiens
  misc_RNA (1)...(19): siRNA sense strand
gggaacaagaccagaggau

SEQ ID NO: 2380265 - RNA, 19 nt, Homo sapiens
  misc_RNA (1)...(19): siRNA sense strand
acaaauaaacccucaggaa

SEQ ID NO: 2380266 - RNA, 19 nt, Homo sapiens
  misc_RNA (1)...(19): siRNA sense strand
gcuuaagguacaagaagau

SEQ ID NO: 2380267 - RNA, 19 nt, Homo sapiens
  misc_RNA (1)...(19): siRNA sense strand
gaguacaaacacaggaaca

SEQ ID NO: 2380268 - RNA, 19 nt, Homo sapiens
  misc_RNA (1)...(19): siRNA sense strand
aaauaaacccucaggaagu

SEQ ID NO: 2380269 - RNA, 19 nt, Homo sapiens
  misc_RNA (1)...(19): siRNA sense strand
uggaaacaaaagaggaaaa

SEQ ID NO: 2380270 - RNA, 19 nt, Homo sapiens
  misc_RNA (1)...(19): siRNA sense strand
agaaauuugugaaggagca

SEQ ID NO: 2380271 - RNA, 19 nt, Homo sapiens
  misc_RNA (1)...(19): siRNA sense strand
caagauuugucaauggcua

SEQ ID NO: 2380272 - RNA, 19 nt, Homo sapiens
  misc_RNA (1)...(19): siRNA sense strand
ugucaauggcuaugcagaa

SEQ ID NO: 2380273 - RNA, 19 nt, Homo sapiens
  misc_RNA (1)...(19): siRNA sense strand
ggguuuaacuucagcaauc

SEQ ID NO: 2380274 - RNA, 19 nt, Homo sapiens
  misc_RNA (1)...(19): siRNA sense strand
cuucaaaccuuggaggauu

SEQ ID NO: 2380275 - RNA, 19 nt, Homo sapiens
  misc_RNA (1)...(19): siRNA sense strand
acagaaugcuuuaggguug

SEQ ID NO: 2380276 - RNA, 19 nt, Homo sapiens
  misc_RNA (1)...(19): siRNA sense strand
aaauacaggaauagcaaca

SEQ ID NO: 2380277 - RNA, 19 nt, Homo sapiens
  misc_RNA (1)...(19): siRNA sense strand
gcuggaaacaaaagaggaa

SEQ ID NO: 2380278 - RNA, 19 nt, Homo sapiens
  misc_RNA (1)...(19): siRNA sense strand
ugaaauagcuuuaagaacc

SEQ ID NO: 2380279 - RNA, 19 nt, Homo sapiens
  misc_RNA (1)...(19): siRNA sense strand
gguucagcaauuugaggua

SEQ ID NO: 2380280 - RNA, 19 nt, Homo sapiens
  misc_RNA (1)...(19): siRNA sense strand
guaccuuggcuacaggaaa

SEQ ID NO: 2380281 - RNA, 19 nt, Homo sapiens
  misc_RNA (1)...(19): siRNA sense strand
uugugaaggagcagaaaca

SEQ ID NO: 2380282 - RNA, 19 nt, Homo sapiens
  misc_RNA (1)...(19): siRNA sense strand
cugcucaggaguugaagaa

SEQ ID NO: 2380283 - RNA, 19 nt, Homo sapiens
  misc_RNA (1)...(19): siRNA sense strand
aauggaauacagagaaaca

SEQ ID NO: 2380284 - RNA, 19 nt, Homo sapiens
  misc_RNA (1)...(19): siRNA sense strand
ucaaguacaucuggguuua

SEQ ID NO: 2380285 - RNA, 19 nt, Homo sapiens
  misc_RNA (1)...(19): siRNA sense strand
cagaguacaaacacaggaa

SEQ ID NO: 2380286 - RNA, 19 nt, Homo sapiens
  misc_RNA (1)...(19): siRNA sense strand
cugaaauagcuuuaagaac

SEQ ID NO: 2380287 - RNA, 19 nt, Homo sapiens
  misc_RNA (1)...(19): siRNA sense strand
ugauaaaacgggaacaaga

SEQ ID NO: 2380288 - RNA, 19 nt, Homo sapiens
  misc_RNA (1)...(19): siRNA sense strand
uguugaaaaucuccagaaa

SEQ ID NO: 2380289 - RNA, 19 nt, Homo sapiens
  misc_RNA (1)...(19): siRNA sense strand
ugcuuaagguacaagaaga

SEQ ID NO: 2380290 - RNA, 19 nt, Homo sapiens
  misc_RNA (1)...(19): siRNA sense strand
cugccaggauguugaaaau

SEQ ID NO: 2380291 - RNA, 19 nt, Homo sapiens
  misc_RNA (1)...(19): siRNA sense strand
uccagaaauuugugaagga

SEQ ID NO: 2380292 - RNA, 19 nt, Homo sapiens
  misc_RNA (1)...(19): siRNA sense strand
ggagcagaaacaaguucaa

SEQ ID NO: 2380293 - RNA, 19 nt, Homo sapiens
  misc_RNA (1)...(19): siRNA sense strand
ccuuggaggauuuggaacu

SEQ ID NO: 2380294 - RNA, 19 nt, Homo sapiens
  misc_RNA (1)...(19): siRNA sense strand
aguugaagaaugcugaaau

SEQ ID NO: 2380295 - RNA, 19 nt, Homo sapiens
  misc_RNA (1)...(19): siRNA sense strand
aauuugagguacagcuuca

SEQ ID NO: 2380296 - RNA, 19 nt, Homo sapiens
  misc_RNA (1)...(19): siRNA sense strand
uggaaaucuuggaaguacu

SEQ ID NO: 2380297 - RNA, 19 nt, Homo sapiens
  misc_RNA (1)...(19): siRNA sense strand
auauuaaagcucugaagca

SEQ ID NO: 2380298 - RNA, 19 nt, Homo sapiens
  misc_RNA (1)...(19): siRNA sense strand
acauuuggauuuggaacaa

SEQ ID NO: 2380299 - RNA, 19 nt, Homo sapiens
  misc_RNA (1)...(19): siRNA sense strand
aguacaggcagcagauuga

SEQ ID NO: 2380300 - RNA, 19 nt, Homo sapiens
  misc_RNA (1)...(19): siRNA sense strand
uugaagaacuagaaaacca

SEQ ID NO: 2380301 - RNA, 19 nt, Homo sapiens
  misc_RNA (1)...(19): siRNA sense strand
caaauaaacccucaggaag

SEQ ID NO: 2380302 - RNA, 19 nt, Homo sapiens
  misc_RNA (1)...(19): siRNA sense strand
aagucuuagugcaggcuuu

SEQ ID NO: 2380303 - RNA, 19 nt, Homo sapiens
  misc_RNA (1)...(19): siRNA sense strand
cucaaguacaucuggguuu

SEQ ID NO: 2380304 - RNA, 19 nt, Homo sapiens
  misc_RNA (1)...(19): siRNA sense strand
gggaaagagugguggccuu

SEQ ID NO: 2380305 - RNA, 19 nt, Homo sapiens
  misc_RNA (1)...(19): siRNA sense strand
gaagaaagggucagggaga

SEQ ID NO: 2380306 - RNA, 19 nt, Homo sapiens
  misc_RNA (1)...(19): siRNA sense strand
ccaacgaaagugaaauaaa

SEQ ID NO: 2380307 - RNA, 19 nt, Homo sapiens
  misc_RNA (1)...(19): siRNA sense strand
cgaaagugaaauaaaguca

SEQ ID NO: 2380308 - RNA, 19 nt, Homo sapiens
  misc_RNA (1)...(19): siRNA sense strand
caccaacgaaagugaaaua

SEQ ID NO: 2380309 - RNA, 19 nt, Homo sapiens
  misc_RNA (1)...(19): siRNA sense strand
ggacagcagaagaggucga

SEQ ID NO: 2380310 - RNA, 19 nt, Homo sapiens
  misc_RNA (1)...(19): siRNA sense strand
cagugauggaauuguaaau

SEQ ID NO: 2380311 - RNA, 19 nt, Homo sapiens
  misc_RNA (1)...(19): siRNA sense strand
guacccugauauuuggaaa

SEQ ID NO: 2380312 - RNA, 19 nt, Homo sapiens
  misc_RNA (1)...(19): siRNA sense strand
caacgaaagugaaauaaag

SEQ ID NO: 2380313 - RNA, 19 nt, Homo sapiens
  misc_RNA (1)...(19): siRNA sense strand
caauugaaaccaugcccua

SEQ ID NO: 2380314 - RNA, 19 nt, Homo sapiens
  misc_RNA (1)...(19): siRNA sense strand
cagaagaaagggucaggga

SEQ ID NO: 2380315 - RNA, 19 nt, Homo sapiens
  misc_RNA (1)...(19): siRNA sense strand
gcgauggauagcagauaga

SEQ ID NO: 2380316 - RNA, 19 nt, Homo sapiens
  misc_RNA (1)...(19): siRNA sense strand
acauugaguuuguagcuga

SEQ ID NO: 2380317 - RNA, 19 nt, Homo sapiens
  misc_RNA (1)...(19): siRNA sense strand
agucaaaugaagagccacu

SEQ ID NO: 2380318 - RNA, 19 nt, Homo sapiens
  misc_RNA (1)...(19): siRNA sense strand
aguuuguagcugacagauu

SEQ ID NO: 2380319 - RNA, 19 nt, Homo sapiens
  misc_RNA (1)...(19): siRNA sense strand
auggauagcagauagaaaa

SEQ ID NO: 2380320 - RNA, 19 nt, Homo sapiens
  misc_RNA (1)...(19): siRNA sense strand
uaacagaagccuugccagu

SEQ ID NO: 2380321 - RNA, 19 nt, Homo sapiens
  misc_RNA (1)...(19): siRNA sense strand
ccucacuggaacaagcuua

SEQ ID NO: 2380322 - RNA, 19 nt, Homo sapiens
  misc_RNA (1)...(19): siRNA sense strand
guacaaaugcagugaggca

SEQ ID NO: 2380323 - RNA, 19 nt, Homo sapiens
  misc_RNA (1)...(19): siRNA sense strand
ggaccguggaggaggcaau

SEQ ID NO: 2380324 - RNA, 19 nt, Homo sapiens
  misc_RNA (1)...(19): siRNA sense strand
ucggauuguucgaggccaa

SEQ ID NO: 2380325 - RNA, 19 nt, Homo sapiens
  misc_RNA (1)...(19): siRNA sense strand
acugaauugcuaaggacaa

SEQ ID NO: 2380326 - RNA, 19 nt, Homo sapiens
  misc_RNA (1)...(19): siRNA sense strand
ucuucaaccuggaacgcua

SEQ ID NO: 2380327 - RNA, 19 nt, Homo sapiens
  misc_RNA (1)...(19): siRNA sense strand
auaauuagguucuggcgau

SEQ ID NO: 2380328 - RNA, 19 nt, Homo sapiens
  misc_RNA (1)...(19): siRNA sense strand
agacuggacagcagcgcua

SEQ ID NO: 2380329 - RNA, 19 nt, Homo sapiens
  misc_RNA (1)...(19): siRNA sense strand
acaaaugcagugaggcaca

SEQ ID NO: 2380330 - RNA, 19 nt, Homo sapiens
  misc_RNA (1)...(19): siRNA sense strand
gguaugaagaggaggaguc

SEQ ID NO: 2380331 - RNA, 19 nt, Homo sapiens
  misc_RNA (1)...(19): siRNA sense strand
cuuguaugcaugugaaaga

SEQ ID NO: 2380332 - RNA, 19 nt, Homo sapiens
  misc_RNA (1)...(19): siRNA sense strand
ggaacaaguauuugcugca

SEQ ID NO: 2380333 - RNA, 19 nt, Homo sapiens
  misc_RNA (1)...(19): siRNA sense strand
uggcuuuagucuugaucau

SEQ ID NO: 2380334 - RNA, 19 nt, Homo sapiens
  misc_RNA (1)...(19): siRNA sense strand
aggccaaacccaagacagu

SEQ ID NO: 2380335 - RNA, 19 nt, Homo sapiens
  misc_RNA (1)...(19): siRNA sense strand
cugaaaucuauaugguaca

SEQ ID NO: 2380336 - RNA, 19 nt, Homo sapiens
  misc_RNA (1)...(19): siRNA sense strand
auuacaacaaggagagcuu

SEQ ID NO: 2380337 - RNA, 19 nt, Homo sapiens
  misc_RNA (1)...(19): siRNA sense strand
auucauaagaggaacaagu

SEQ ID NO: 2380338 - RNA, 19 nt, Homo sapiens
  misc_RNA (1)...(19): siRNA sense strand
uggaggaggcaauuagaca

SEQ ID NO: 2380339 - RNA, 19 nt, Homo sapiens
  misc_RNA (1)...(19): siRNA sense strand
ccucuggaguccuggaacu

SEQ ID NO: 2380340 - RNA, 19 nt, Homo sapiens
  misc_RNA (1)...(19): siRNA sense strand
ggaugagugagcaggggaa

SEQ ID NO: 2380341 - RNA, 19 nt, Homo sapiens
  misc_RNA (1)...(19): siRNA sense strand
cugcaugcuaauucuaaua

SEQ ID NO: 2380342 - RNA, 19 nt, Homo sapiens
  misc_RNA (1)...(19): siRNA sense strand
gggauagcuguuaaugcaa

SEQ ID NO: 2380343 - RNA, 19 nt, Homo sapiens
  misc_RNA (1)...(19): siRNA sense strand
ggugcagugcccagccaua

SEQ ID NO: 2380344 - RNA, 19 nt, Homo sapiens
  misc_RNA (1)...(19): siRNA sense strand
ggucguaaaacuugaaaau

SEQ ID NO: 2380345 - RNA, 19 nt, Homo sapiens
  misc_RNA (1)...(19): siRNA sense strand
acucaggaugggaggaaga

SEQ ID NO: 2380346 - RNA, 19 nt, Homo sapiens
  misc_RNA (1)...(19): siRNA sense strand
agggacuauuugaaguaaa

SEQ ID NO: 2380347 - RNA, 19 nt, Homo sapiens
  misc_RNA (1)...(19): siRNA sense strand
cugaucuguuuguggagaa

SEQ ID NO: 2380348 - RNA, 19 nt, Homo sapiens
  misc_RNA (1)...(19): siRNA sense strand
cagcaaauggcaaagacga

SEQ ID NO: 2380349 - RNA, 19 nt, Homo sapiens
  misc_RNA (1)...(19): siRNA sense strand
ccuggaaacgugaagugaa

SEQ ID NO: 2380350 - RNA, 19 nt, Homo sapiens
  misc_RNA (1)...(19): siRNA sense strand
gcagaaacaaccauggcca

SEQ ID NO: 2380351 - RNA, 19 nt, Homo sapiens
  misc_RNA (1)...(19): siRNA sense strand
uugcaaaacccgagaugau

SEQ ID NO: 2380352 - RNA, 19 nt, Homo sapiens
  misc_RNA (1)...(19): siRNA sense strand
ucuagcagcaaauggcaaa

SEQ ID NO: 2380353 - RNA, 19 nt, Homo sapiens
  misc_RNA (1)...(19): siRNA sense strand
ucacagacgaugauggcca

SEQ ID NO: 2380354 - RNA, 19 nt, Homo sapiens
  misc_RNA (1)...(19): siRNA sense strand
ugugauguuuacugggaca

SEQ ID NO: 2380355 - RNA, 19 nt, Homo sapiens
  misc_RNA (1)...(19): siRNA sense strand
cugagagacccuggauuaa

SEQ ID NO: 2380356 - RNA, 19 nt, Homo sapiens
  misc_RNA (1)...(19): siRNA sense strand
agagcgagcugcaggccua

SEQ ID NO: 2380357 - RNA, 19 nt, Homo sapiens
  misc_RNA (1)...(19): siRNA sense strand
gaccaauggcucagggcuu

SEQ ID NO: 2380358 - RNA, 19 nt, Homo sapiens
  misc_RNA (1)...(19): siRNA sense strand
ccauuaaccuccagagccu

SEQ ID NO: 2380359 - RNA, 19 nt, Homo sapiens
  misc_RNA (1)...(19): siRNA sense strand
cgacaaguuucgagccaag

SEQ ID NO: 2380360 - RNA, 19 nt, Homo sapiens
  misc_RNA (1)...(19): siRNA sense strand
agaucggcaucgaggccaa

SEQ ID NO: 2380361 - RNA, 19 nt, Homo sapiens
  misc_RNA (1)...(19): siRNA sense strand
cccacauccaggaguguaa

SEQ ID NO: 2380362 - RNA, 19 nt, Homo sapiens
  misc_RNA (1)...(19): siRNA sense strand
ccaucagccuggagaccca

SEQ ID NO: 2380363 - RNA, 19 nt, Homo sapiens
  misc_RNA (1)...(19): siRNA sense strand
acgacauguuugugacguu

SEQ ID NO: 2380364 - RNA, 19 nt, Homo sapiens
  misc_RNA (1)...(19): siRNA sense strand
aggaagaagaggaggagga

SEQ ID NO: 2380365 - RNA, 19 nt, Homo sapiens
  misc_RNA (1)...(19): siRNA sense strand
ugaucaagacagaggaaca

SEQ ID NO: 2380366 - RNA, 19 nt, Homo sapiens
  misc_RNA (1)...(19): siRNA sense strand
agaucgagguacagaccaa

SEQ ID NO: 2380367 - RNA, 19 nt, Homo sapiens
  misc_RNA (1)...(19): siRNA sense strand
aagaagaggaggaggagga

SEQ ID NO: 2380368 - RNA, 19 nt, Homo sapiens
  misc_RNA (1)...(19): siRNA sense strand
aggaacaagacgaggagga

SEQ ID NO: 2380369 - RNA, 19 nt, Homo sapiens
  misc_RNA (1)...(19): siRNA sense strand
aacaagacgaggaggaaga

SEQ ID NO: 2380370 - RNA, 19 nt, Homo sapiens
  misc_RNA (1)...(19): siRNA sense strand
agacagaggaacaagacga

SEQ ID NO: 2380371 - RNA, 19 nt, Homo sapiens
  misc_RNA (1)...(19): siRNA sense strand
aggaggaagaagaggagga

SEQ ID NO: 2380372 - RNA, 19 nt, Homo sapiens
  misc_RNA (1)...(19): siRNA sense strand
aagacgaggaggaagaaga

SEQ ID NO: 2380373 - RNA, 19 nt, Homo sapiens
  misc_RNA (1)...(19): siRNA sense strand
ccaugcaggagcaggaaga

SEQ ID NO: 2380374 - RNA, 19 nt, Homo sapiens
  misc_RNA (1)...(19): siRNA sense strand
acggaaggcuccagcgagu

SEQ ID NO: 2380375 - RNA, 19 nt, Homo sapiens
  misc_RNA (1)...(19): siRNA sense strand
ugaugggacagguggaaga

SEQ ID NO: 2380376 - RNA, 19 nt, Homo sapiens
  misc_RNA (1)...(19): siRNA sense strand
ggcaagagcuuccgccuga

SEQ ID NO: 2380377 - RNA, 19 nt, Homo sapiens
  misc_RNA (1)...(19): siRNA sense strand
cuguuaauuuccuugacaa

SEQ ID NO: 2380378 - RNA, 19 nt, Homo sapiens
  misc_RNA (1)...(19): siRNA sense strand
cgugauuaagaucgaggua

SEQ ID NO: 2380379 - RNA, 19 nt, Homo sapiens
  misc_RNA (1)...(19): siRNA sense strand
cgugaucaagacagaggaa

SEQ ID NO: 2380380 - RNA, 19 nt, Homo sapiens
  misc_RNA (1)...(19): siRNA sense strand
ccaccaugcaggagcagga

SEQ ID NO: 2380381 - RNA, 19 nt, Homo sapiens
  misc_RNA (1)...(19): siRNA sense strand
aggaaaccccgcagugaaa

SEQ ID NO: 2380382 - RNA, 19 nt, Homo sapiens
  misc_RNA (1)...(19): siRNA sense strand
cagaggaacaagacgagga

SEQ ID NO: 2380383 - RNA, 19 nt, Homo sapiens
  misc_RNA (1)...(19): siRNA sense strand
gagaucagcuuccggcaca

SEQ ID NO: 2380384 - RNA, 19 nt, Homo sapiens
  misc_RNA (1)...(19): siRNA sense strand
cagagaacacgcuggagga

SEQ ID NO: 2380385 - RNA, 19 nt, Homo sapiens
  misc_RNA (1)...(19): siRNA sense strand
cagacuaugcugagggaga

SEQ ID NO: 2380386 - RNA, 19 nt, Homo sapiens
  misc_RNA (1)...(19): siRNA sense strand
gcaugaagcuggagggcag

SEQ ID NO: 2380387 - RNA, 19 nt, Homo sapiens
  misc_RNA (1)...(19): siRNA sense strand
uugaagagcagcugggcua

SEQ ID NO: 2380388 - RNA, 19 nt, Homo sapiens
  misc_RNA (1)...(19): siRNA sense strand
cuuauaggcuccugggaca

SEQ ID NO: 2380389 - RNA, 19 nt, Homo sapiens
  misc_RNA (1)...(19): siRNA sense strand
gggacagcuuggucagcaa

SEQ ID NO: 2380390 - RNA, 19 nt, Homo sapiens
  misc_RNA (1)...(19): siRNA sense strand
uccuagaagaugacggaaa

SEQ ID NO: 2380391 - RNA, 19 nt, Homo sapiens
  misc_RNA (1)...(19): siRNA sense strand
cagcuuugaaacugauaaa

SEQ ID NO: 2380392 - RNA, 19 nt, Homo sapiens
  misc_RNA (1)...(19): siRNA sense strand
ccucagaauugaagagcag

SEQ ID NO: 2380393 - RNA, 19 nt, Homo sapiens
  misc_RNA (1)...(19): siRNA sense strand
cagaagaaacaucagaaca

SEQ ID NO: 2380394 - RNA, 19 nt, Homo sapiens
  misc_RNA (1)...(19): siRNA sense strand
auaugaagccucagaacau

SEQ ID NO: 2380395 - RNA, 19 nt, Homo sapiens
  misc_RNA (1)...(19): siRNA sense strand
uuauguugauucagggcaa

SEQ ID NO: 2380396 - RNA, 19 nt, Homo sapiens
  misc_RNA (1)...(19): siRNA sense strand
cugaggaggccaugcagaa

SEQ ID NO: 2380397 - RNA, 19 nt, Homo sapiens
  misc_RNA (1)...(19): siRNA sense strand
ggcacagucaggagagcaa

SEQ ID NO: 2380398 - RNA, 19 nt, Homo sapiens
  misc_RNA (1)...(19): siRNA sense strand
auaaagagguggugguggu

SEQ ID NO: 2380399 - RNA, 19 nt, Homo sapiens
  misc_RNA (1)...(19): siRNA sense strand
ugccaaacacugcaggaaa

SEQ ID NO: 2380400 - RNA, 19 nt, Homo sapiens
  misc_RNA (1)...(19): siRNA sense strand
ccuauaaacgcauggcuga

SEQ ID NO: 2380401 - RNA, 19 nt, Homo sapiens
  misc_RNA (1)...(19): siRNA sense strand
ugauucagggcaagguaaa

SEQ ID NO: 2380402 - RNA, 19 nt, Homo sapiens
  misc_RNA (1)...(19): siRNA sense strand
gggcaagguaaaaguagua

SEQ ID NO: 2380403 - RNA, 19 nt, Homo sapiens
  misc_RNA (1)...(19): siRNA sense strand
aggccaugcagaagaaaca

SEQ ID NO: 2380404 - RNA, 19 nt, Homo sapiens
  misc_RNA (1)...(19): siRNA sense strand
agguggugguggugacaga

SEQ ID NO: 2380405 - RNA, 19 nt, Homo sapiens
  misc_RNA (1)...(19): siRNA sense strand
gggcagauccugaauggca

SEQ ID NO: 2380406 - RNA, 19 nt, Homo sapiens
  misc_RNA (1)...(19): siRNA sense strand
gcaucuugacucaggccua

SEQ ID NO: 2380407 - RNA, 19 nt, Homo sapiens
  misc_RNA (1)...(19): siRNA sense strand
guguacaagggucgaagaa

SEQ ID NO: 2380408 - RNA, 19 nt, Homo sapiens
  misc_RNA (1)...(19): siRNA sense strand
aggaauuugcaacgagaga

SEQ ID NO: 2380409 - RNA, 19 nt, Homo sapiens
  misc_RNA (1)...(19): siRNA sense strand
ggagccagacagugacaau

SEQ ID NO: 2380410 - RNA, 19 nt, Homo sapiens
  misc_RNA (1)...(19): siRNA sense strand
augaggagccagacaguga

SEQ ID NO: 2380411 - RNA, 19 nt, Homo sapiens
  misc_RNA (1)...(19): siRNA sense strand
uggcugugauucaggccua

SEQ ID NO: 2380412 - RNA, 19 nt, Homo sapiens
  misc_RNA (1)...(19): siRNA sense strand
agaagaaacaucagaacac

SEQ ID NO: 2380413 - RNA, 19 nt, Homo sapiens
  misc_RNA (1)...(19): siRNA sense strand
gcaacagccuccagcagca

SEQ ID NO: 2380414 - RNA, 19 nt, Homo sapiens
  misc_RNA (1)...(19): siRNA sense strand
gagcaagaggacaagacca

SEQ ID NO: 2380415 - RNA, 19 nt, Homo sapiens
  misc_RNA (1)...(19): siRNA sense strand
ggaucuuagccucagaauu

SEQ ID NO: 2380416 - RNA, 19 nt, Homo sapiens
  misc_RNA (1)...(19): siRNA sense strand
ggacauggaugcugaccuc

SEQ ID NO: 2380417 - RNA, 19 nt, Homo sapiens
  misc_RNA (1)...(19): siRNA sense strand
auacaauggugcugacauc

SEQ ID NO: 2380418 - RNA, 19 nt, Homo sapiens
  misc_RNA (1)...(19): siRNA sense strand
caagguggcuccuggcaca

SEQ ID NO: 2380419 - RNA, 19 nt, Homo sapiens
  misc_RNA (1)...(19): siRNA sense strand
agaaauggcauguggagac

SEQ ID NO: 2380420 - RNA, 19 nt, Homo sapiens
  misc_RNA (1)...(19): siRNA sense strand
auguaguggaccuggaaaa

SEQ ID NO: 2380421 - RNA, 19 nt, Homo sapiens
  misc_RNA (1)...(19): siRNA sense strand
uguuggagaugauuggaga

SEQ ID NO: 2380422 - RNA, 19 nt, Homo sapiens
  misc_RNA (1)...(19): siRNA sense strand
uggaaaaugaggagccaga

SEQ ID NO: 2380423 - RNA, 19 nt, Homo sapiens
  misc_RNA (1)...(19): siRNA sense strand
ggaccugauggcugugauu

SEQ ID NO: 2380424 - RNA, 19 nt, Homo sapiens
  misc_RNA (1)...(19): siRNA sense strand
gcgagagcagagugaggau

SEQ ID NO: 2380425 - RNA, 19 nt, Homo sapiens
  misc_RNA (1)...(19): siRNA sense strand
caccauaauaacugagcca

SEQ ID NO: 2380426 - RNA, 19 nt, Homo sapiens
  misc_RNA (1)...(19): siRNA sense strand
agagcagagugaggauaua

SEQ ID NO: 2380427 - RNA, 19 nt, Homo sapiens
  misc_RNA (1)...(19): siRNA sense strand
aggaccugcccuugagcaa

SEQ ID NO: 2380428 - RNA, 19 nt, Homo sapiens
  misc_RNA (1)...(19): siRNA sense strand
ccuucaaucuggagaggag

SEQ ID NO: 2380429 - RNA, 19 nt, Homo sapiens
  misc_RNA (1)...(19): siRNA sense strand
gugcagaccuuuagggaga

SEQ ID NO: 2380430 - RNA, 19 nt, Homo sapiens
  misc_RNA (1)...(19): siRNA sense strand
aggaagaacugcugggcau

SEQ ID NO: 2380431 - RNA, 19 nt, Homo sapiens
  misc_RNA (1)...(19): siRNA sense strand
gacaaugaguccuggccaa

SEQ ID NO: 2380432 - RNA, 19 nt, Homo sapiens
  misc_RNA (1)...(19): siRNA sense strand
cggugaaggaagacugcaa

SEQ ID NO: 2380433 - RNA, 19 nt, Homo sapiens
  misc_RNA (1)...(19): siRNA sense strand
cucaaugccaagaaagaaa

SEQ ID NO: 2380434 - RNA, 19 nt, Homo sapiens
  misc_RNA (1)...(19): siRNA sense strand
aauaugaagaagccagaaa

SEQ ID NO: 2380435 - RNA, 19 nt, Homo sapiens
  misc_RNA (1)...(19): siRNA sense strand
ccagaaagagagucgccaa

SEQ ID NO: 2380436 - RNA, 19 nt, Homo sapiens
  misc_RNA (1)...(19): siRNA sense strand
auagcaagucgucgggaua

SEQ ID NO: 2380437 - RNA, 19 nt, Homo sapiens
  misc_RNA (1)...(19): siRNA sense strand
ugcaagagauugaucggaa

SEQ ID NO: 2380438 - RNA, 19 nt, Homo sapiens
  misc_RNA (1)...(19): siRNA sense strand
cgacaguggcagcgagugu

SEQ ID NO: 2380439 - RNA, 19 nt, Homo sapiens
  misc_RNA (1)...(19): siRNA sense strand
ggcgagagcaagagcgcau

SEQ ID NO: 2380440 - RNA, 19 nt, Homo sapiens
  misc_RNA (1)...(19): siRNA sense strand
uggaugaggcgcaggcuau

SEQ ID NO: 2380441 - RNA, 19 nt, Homo sapiens
  misc_RNA (1)...(19): siRNA sense strand
guccgaaauacuuuggaaa

SEQ ID NO: 2380442 - RNA, 19 nt, Homo sapiens
  misc_RNA (1)...(19): siRNA sense strand
agauuaagcagcagcgguu

SEQ ID NO: 2380443 - RNA, 19 nt, Homo sapiens
  misc_RNA (1)...(19): siRNA sense strand
acaaaaugugugaggauga

SEQ ID NO: 2380444 - RNA, 19 nt, Homo sapiens
  misc_RNA (1)...(19): siRNA sense strand
gcaauaugaagaagccaga

SEQ ID NO: 2380445 - RNA, 19 nt, Homo sapiens
  misc_RNA (1)...(19): siRNA sense strand
acaguggaggcgagagcaa

SEQ ID NO: 2380446 - RNA, 19 nt, Homo sapiens
  misc_RNA (1)...(19): siRNA sense strand
agcgcauguugaaggaaua

SEQ ID NO: 2380447 - RNA, 19 nt, Homo sapiens
  misc_RNA (1)...(19): siRNA sense strand
acgagaagcccgacgcuga

SEQ ID NO: 2380448 - RNA, 19 nt, Homo sapiens
  misc_RNA (1)...(19): siRNA sense strand
aggcgggaccugaugcaua

SEQ ID NO: 2380449 - RNA, 19 nt, Homo sapiens
  misc_RNA (1)...(19): siRNA sense strand
uccuggagauggagcgcaa

SEQ ID NO: 2380450 - RNA, 19 nt, Homo sapiens
  misc_RNA (1)...(19): siRNA sense strand
cggcugagaagaugcugaa

SEQ ID NO: 2380451 - RNA, 19 nt, Homo sapiens
  misc_RNA (1)...(19): siRNA sense strand
acggagacacggccaguaa

SEQ ID NO: 2380452 - RNA, 19 nt, Homo sapiens
  misc_RNA (1)...(19): siRNA sense strand
agacuuuaucguagugaca

SEQ ID NO: 2380453 - RNA, 19 nt, Homo sapiens
  misc_RNA (1)...(19): siRNA sense strand
gaacagugacucuucgaga

SEQ ID NO: 2380454 - RNA, 19 nt, Homo sapiens
  misc_RNA (1)...(19): siRNA sense strand
augccaagaaagaaaucua

SEQ ID NO: 2380455 - RNA, 19 nt, Homo sapiens
  misc_RNA (1)...(19): siRNA sense strand
cgggauaggcuuuccagau

SEQ ID NO: 2380456 - RNA, 19 nt, Homo sapiens
  misc_RNA (1)...(19): siRNA sense strand
uggaguacacggaggagga

SEQ ID NO: 2380457 - RNA, 19 nt, Homo sapiens
  misc_RNA (1)...(19): siRNA sense strand
caagaaggccauuugcaca

SEQ ID NO: 2380458 - RNA, 19 nt, Homo sapiens
  misc_RNA (1)...(19): siRNA sense strand
uaugaagaagccagaaaga

SEQ ID NO: 2380459 - RNA, 19 nt, Homo sapiens
  misc_RNA (1)...(19): siRNA sense strand
acuuguagaccgagucaga

SEQ ID NO: 2380460 - RNA, 19 nt, Homo sapiens
  misc_RNA (1)...(19): siRNA sense strand
gggcagagccacaaagagc

SEQ ID NO: 2380461 - RNA, 19 nt, Homo sapiens
  misc_RNA (1)...(19): siRNA sense strand
ccauccaagugcagaccuu

SEQ ID NO: 2380462 - RNA, 19 nt, Homo sapiens
  misc_RNA (1)...(19): siRNA sense strand
ucacaaggccaaggaucaa

SEQ ID NO: 2380463 - RNA, 19 nt, Homo sapiens
  misc_RNA (1)...(19): siRNA sense strand
agauggagcgcaaggagga

SEQ ID NO: 2380464 - RNA, 19 nt, Homo sapiens
  misc_RNA (1)...(19): siRNA sense strand
acgagaagcuggaagccua

SEQ ID NO: 2380465 - RNA, 19 nt, Homo sapiens
  misc_RNA (1)...(19): siRNA sense strand
gggcagacaucgagagccu

SEQ ID NO: 2380466 - RNA, 19 nt, Homo sapiens
  misc_RNA (1)...(19): siRNA sense strand
ggaggaagauggaggugga

SEQ ID NO: 2380467 - RNA, 19 nt, Homo sapiens
  misc_RNA (1)...(19): siRNA sense strand
ggaagauggagguggacga

SEQ ID NO: 2380468 - RNA, 19 nt, Homo sapiens
  misc_RNA (1)...(19): siRNA sense strand
caucagaacaccaggucau

SEQ ID NO: 2380469 - RNA, 19 nt, Homo sapiens
  misc_RNA (1)...(19): siRNA sense strand
acguguggcuggagaccaa

SEQ ID NO: 2380470 - RNA, 19 nt, Homo sapiens
  misc_RNA (1)...(19): siRNA sense strand
uggagguggacgagagcua

SEQ ID NO: 2380471 - RNA, 19 nt, Homo sapiens
  misc_RNA (1)...(19): siRNA sense strand
agaaguauguguugcccaa

SEQ ID NO: 2380472 - RNA, 19 nt, Homo sapiens
  misc_RNA (1)...(19): siRNA sense strand
uguuaaugguguaggguac

SEQ ID NO: 2380473 - RNA, 19 nt, Homo sapiens
  misc_RNA (1)...(19): siRNA sense strand
cgucagggagaauggagaa

SEQ ID NO: 2380474 - RNA, 19 nt, Homo sapiens
  misc_RNA (1)...(19): siRNA sense strand
gcguacaccuacagcgcau

SEQ ID NO: 2380475 - RNA, 19 nt, Homo sapiens
  misc_RNA (1)...(19): siRNA sense strand
ugggaugaauucagaacau

SEQ ID NO: 2380476 - RNA, 19 nt, Homo sapiens
  misc_RNA (1)...(19): siRNA sense strand
agaccaaggugauggcacu

SEQ ID NO: 2380477 - RNA, 19 nt, Homo sapiens
  misc_RNA (1)...(19): siRNA sense strand
acuccaaggacacgaggaa

SEQ ID NO: 2380478 - RNA, 19 nt, Homo sapiens
  misc_RNA (1)...(19): siRNA sense strand
gugugaugguugaggcgga

SEQ ID NO: 2380479 - RNA, 19 nt, Homo sapiens
  misc_RNA (1)...(19): siRNA sense strand
ccugagguggagagagaga

SEQ ID NO: 2380480 - RNA, 19 nt, Homo sapiens
  misc_RNA (1)...(19): siRNA sense strand
ccaacaaguaugaguucca

SEQ ID NO: 2380481 - RNA, 19 nt, Homo sapiens
  misc_RNA (1)...(19): siRNA sense strand
ucaacaacaucacggccaa

SEQ ID NO: 2380482 - RNA, 19 nt, Homo sapiens
  misc_RNA (1)...(19): siRNA sense strand
gaggaagucaucagcguga

SEQ ID NO: 2380483 - RNA, 19 nt, Homo sapiens
  misc_RNA (1)...(19): siRNA sense strand
cgguccagauuaaggcaga

SEQ ID NO: 2380484 - RNA, 19 nt, Homo sapiens
  misc_RNA (1)...(19): siRNA sense strand
acaaauugcugccgggaug

SEQ ID NO: 2380485 - RNA, 19 nt, Homo sapiens
  misc_RNA (1)...(19): siRNA sense strand
cuuuaacucuccaagggaa

SEQ ID NO: 2380486 - RNA, 19 nt, Homo sapiens
  misc_RNA (1)...(19): siRNA sense strand
cuggauaaagggacaauca

SEQ ID NO: 2380487 - RNA, 19 nt, Homo sapiens
  misc_RNA (1)...(19): siRNA sense strand
ggaugauagaguggagaca

SEQ ID NO: 2380488 - RNA, 19 nt, Homo sapiens
  misc_RNA (1)...(19): siRNA sense strand
ccaccagcaagaugggaga

SEQ ID NO: 2380489 - RNA, 19 nt, Homo sapiens
  misc_RNA (1)...(19): siRNA sense strand
auuccugggacguggacaa

SEQ ID NO: 2380490 - RNA, 19 nt, Homo sapiens
  misc_RNA (1)...(19): siRNA sense strand
cauccaguuuguugggcau

SEQ ID NO: 2380491 - RNA, 19 nt, Homo sapiens
  misc_RNA (1)...(19): siRNA sense strand
cuguuaaugguguagggua

SEQ ID NO: 2380492 - RNA, 19 nt, Homo sapiens
  misc_RNA (1)...(19): siRNA sense strand
ccgcaguugauaagagugu

SEQ ID NO: 2380493 - RNA, 19 nt, Homo sapiens
  misc_RNA (1)...(19): siRNA sense strand
cuuuacagcaggacgugaa

SEQ ID NO: 2380494 - RNA, 19 nt, Homo sapiens
  misc_RNA (1)...(19): siRNA sense strand
ggaggaggguuuauggaug

SEQ ID NO: 2380495 - RNA, 19 nt, Homo sapiens
  misc_RNA (1)...(19): siRNA sense strand
ccagugaaguuguguccca

SEQ ID NO: 2380496 - RNA, 19 nt, Homo sapiens
  misc_RNA (1)...(19): siRNA sense strand
cuucugucccagugagaga

SEQ ID NO: 2380497 - RNA, 19 nt, Homo sapiens
  misc_RNA (1)...(19): siRNA sense strand
gagcagaacaugauccacu

SEQ ID NO: 2380498 - RNA, 19 nt, Homo sapiens
  misc_RNA (1)...(19): siRNA sense strand
ccuggacgccugugagaca

SEQ ID NO: 2380499 - RNA, 19 nt, Homo sapiens
  misc_RNA (1)...(19): siRNA sense strand
uguugggcauccuggcaaa

SEQ ID NO: 2380500 - RNA, 19 nt, Homo sapiens
  misc_RNA (1)...(19): siRNA sense strand
gguugaugacaaugagaaa

SEQ ID NO: 2380501 - RNA, 19 nt, Homo sapiens
  misc_RNA (1)...(19): siRNA sense strand
uaaagaagucugaggagga

SEQ ID NO: 2380502 - RNA, 19 nt, Homo sapiens
  misc_RNA (1)...(19): siRNA sense strand
cccacaagcaugaaggaga

SEQ ID NO: 2380503 - RNA, 19 nt, Homo sapiens
  misc_RNA (1)...(19): siRNA sense strand
ggaugaagcaggcggugca

SEQ ID NO: 2380504 - RNA, 19 nt, Homo sapiens
  misc_RNA (1)...(19): siRNA sense strand
gauugggacucaaggagca

SEQ ID NO: 2380505 - RNA, 19 nt, Homo sapiens
  misc_RNA (1)...(19): siRNA sense strand
augugaaagccuugguuga

SEQ ID NO: 2380506 - RNA, 19 nt, Homo sapiens
  misc_RNA (1)...(19): siRNA sense strand
acaaacucaaucaggcuaa

SEQ ID NO: 2380507 - RNA, 19 nt, Homo sapiens
  misc_RNA (1)...(19): siRNA sense strand
agucugaggaggaugacau

SEQ ID NO: 2380508 - RNA, 19 nt, Homo sapiens
  misc_RNA (1)...(19): siRNA sense strand
ggaaaggaugugaaagccu

SEQ ID NO: 2380509 - RNA, 19 nt, Homo sapiens
  misc_RNA (1)...(19): siRNA sense strand
ccucauaauauucugcaga

SEQ ID NO: 2380510 - RNA, 19 nt, Homo sapiens
  misc_RNA (1)...(19): siRNA sense strand
ggaaagaccuaucaggcaa

SEQ ID NO: 2380511 - RNA, 19 nt, Homo sapiens
  misc_RNA (1)...(19): siRNA sense strand
ucaaaggaauagaagggua

SEQ ID NO: 2380512 - RNA, 19 nt, Homo sapiens
  misc_RNA (1)...(19): siRNA sense strand
ggaauagaaggguaggcaa

SEQ ID NO: 2380513 - RNA, 19 nt, Homo sapiens
  misc_RNA (1)...(19): siRNA sense strand
gaauagaaggguaggcaac

SEQ ID NO: 2380514 - RNA, 19 nt, Homo sapiens
  misc_RNA (1)...(19): siRNA sense strand
acaaaggaacccuggccaa

SEQ ID NO: 2380515 - RNA, 19 nt, Homo sapiens
  misc_RNA (1)...(19): siRNA sense strand
augaaaaggucaagagaag

SEQ ID NO: 2380516 - RNA, 19 nt, Homo sapiens
  misc_RNA (1)...(19): siRNA sense strand
gggaaagaccuaucaggca

SEQ ID NO: 2380517 - RNA, 19 nt, Homo sapiens
  misc_RNA (1)...(19): siRNA sense strand
ccuacaucaccauggaaau

SEQ ID NO: 2380518 - RNA, 19 nt, Homo sapiens
  misc_RNA (1)...(19): siRNA sense strand
caaaggaauagaaggguag

SEQ ID NO: 2380519 - RNA, 19 nt, Homo sapiens
  misc_RNA (1)...(19): siRNA sense strand
cucccaaaguuguccgcaa

SEQ ID NO: 2380520 - RNA, 19 nt, Homo sapiens
  misc_RNA (1)...(19): siRNA sense strand
caaaaggaggagaagucaa

SEQ ID NO: 2380521 - RNA, 19 nt, Homo sapiens
  misc_RNA (1)...(19): siRNA sense strand
uggagcagcuggagggcaa

SEQ ID NO: 2380522 - RNA, 19 nt, Homo sapiens
  misc_RNA (1)...(19): siRNA sense strand
aggaagaggaggaggagga

SEQ ID NO: 2380523 - RNA, 19 nt, Homo sapiens
  misc_RNA (1)...(19): siRNA sense strand
aagacgaggaugaggacaa

SEQ ID NO: 2380524 - RNA, 19 nt, Homo sapiens
  misc_RNA (1)...(19): siRNA sense strand
ccacagugccagaggcuga

SEQ ID NO: 2380525 - RNA, 19 nt, Homo sapiens
  misc_RNA (1)...(19): siRNA sense strand
acgaugaagacgaggauga

SEQ ID NO: 2380526 - RNA, 19 nt, Homo sapiens
  misc_RNA (1)...(19): siRNA sense strand
aggcugaagcugagcgaca

SEQ ID NO: 2380527 - RNA, 19 nt, Homo sapiens
  misc_RNA (1)...(19): siRNA sense strand
gcagcgacgaaguggacaa

SEQ ID NO: 2380528 - RNA, 19 nt, Homo sapiens
  misc_RNA (1)...(19): siRNA sense strand
gaagaaagcaaggaggaga

SEQ ID NO: 2380529 - RNA, 19 nt, Homo sapiens
  misc_RNA (1)...(19): siRNA sense strand
uggccaugguugugguaga

SEQ ID NO: 2380530 - RNA, 19 nt, Homo sapiens
  misc_RNA (1)...(19): siRNA sense strand
aggaugagcaggaggagga

SEQ ID NO: 2380531 - RNA, 19 nt, Homo sapiens
  misc_RNA (1)...(19): siRNA sense strand
gcaagguggagcagggcau

SEQ ID NO: 2380532 - RNA, 19 nt, Homo sapiens
  misc_RNA (1)...(19): siRNA sense strand
aggaggaggaagaggagga

SEQ ID NO: 2380533 - RNA, 19 nt, Homo sapiens
  misc_RNA (1)...(19): siRNA sense strand
aggaggaagaggaggagga

SEQ ID NO: 2380534 - RNA, 19 nt, Homo sapiens
  misc_RNA (1)...(19): siRNA sense strand
aggaggaggaggaggagga

SEQ ID NO: 2380535 - RNA, 19 nt, Homo sapiens
  misc_RNA (1)...(19): siRNA sense strand
aggaggaggaggaggagga

SEQ ID NO: 2380536 - RNA, 19 nt, Homo sapiens
  misc_RNA (1)...(19): siRNA sense strand
aggaggaggaggaggagga

SEQ ID NO: 2380537 - RNA, 19 nt, Homo sapiens
  misc_RNA (1)...(19): siRNA sense strand
aaagcaaggaggagacaca

SEQ ID NO: 2380538 - RNA, 19 nt, Homo sapiens
  misc_RNA (1)...(19): siRNA sense strand
gagcagggcaugaaggacu

SEQ ID NO: 2380539 - RNA, 19 nt, Homo sapiens
  misc_RNA (1)...(19): siRNA sense strand
caguggacuuggaggagga

SEQ ID NO: 2380540 - RNA, 19 nt, Homo sapiens
  misc_RNA (1)...(19): siRNA sense strand
uggaggaggaggaggagga

SEQ ID NO: 2380541 - RNA, 19 nt, Homo sapiens
  misc_RNA (1)...(19): siRNA sense strand
ugaagaaggcagagaggac

SEQ ID NO: 2380542 - RNA, 19 nt, Homo sapiens
  misc_RNA (1)...(19): siRNA sense strand
aagaagaaagcaaggagga

SEQ ID NO: 2380543 - RNA, 19 nt, Homo sapiens
  misc_RNA (1)...(19): siRNA sense strand
ccgcaguggacuuggagga

SEQ ID NO: 2380544 - RNA, 19 nt, Homo sapiens
  misc_RNA (1)...(19): siRNA sense strand
aggaggaguacgaugaaga

SEQ ID NO: 2380545 - RNA, 19 nt, Homo sapiens
  misc_RNA (1)...(19): siRNA sense strand
aagaggaggaggaggagga

SEQ ID NO: 2380546 - RNA, 19 nt, Homo sapiens
  misc_RNA (1)...(19): siRNA sense strand
gcuacugcauggaggagga

SEQ ID NO: 2380547 - RNA, 19 nt, Homo sapiens
  misc_RNA (1)...(19): siRNA sense strand
gggacuuccucaaaggcuu

SEQ ID NO: 2380548 - RNA, 19 nt, Homo sapiens
  misc_RNA (1)...(19): siRNA sense strand
aggaggaggaugagcagga

SEQ ID NO: 2380549 - RNA, 19 nt, Homo sapiens
  misc_RNA (1)...(19): siRNA sense strand
aggaggaggaggaaggcga

SEQ ID NO: 2380550 - RNA, 19 nt, Homo sapiens
  misc_RNA (1)...(19): siRNA sense strand
augagcaggaggaggaaga

SEQ ID NO: 2380551 - RNA, 19 nt, Homo sapiens
  misc_RNA (1)...(19): siRNA sense strand
agccuggagaugagggcaa

SEQ ID NO: 2380552 - RNA, 19 nt, Homo sapiens
  misc_RNA (1)...(19): siRNA sense strand
gagaugagggcaaggugga

SEQ ID NO: 2380553 - RNA, 19 nt, Homo sapiens
  misc_RNA (1)...(19): siRNA sense strand
cgcaagaacaugucggagu

SEQ ID NO: 2380554 - RNA, 19 nt, Homo sapiens
  misc_RNA (1)...(19): siRNA sense strand
gaggagggcugcauggagu

SEQ ID NO: 2380555 - RNA, 19 nt, Homo sapiens
  misc_RNA (1)...(19): siRNA sense strand
acuuggaggaggaggagga

SEQ ID NO: 2380556 - RNA, 19 nt, Homo sapiens
  misc_RNA (1)...(19): siRNA sense strand
aagcagugaagaaggcaga

SEQ ID NO: 2380557 - RNA, 19 nt, Homo sapiens
  misc_RNA (1)...(19): siRNA sense strand
cugcuuaacuccacgcuca

SEQ ID NO: 2380558 - RNA, 19 nt, Homo sapiens
  misc_RNA (1)...(19): siRNA sense strand
uggagcagcuggagggcaa

SEQ ID NO: 2380559 - RNA, 19 nt, Homo sapiens
  misc_RNA (1)...(19): siRNA sense strand
aagacgaggaugaggacaa

SEQ ID NO: 2380560 - RNA, 19 nt, Homo sapiens
  misc_RNA (1)...(19): siRNA sense strand
ccacagugccagaggcuga

SEQ ID NO: 2380561 - RNA, 19 nt, Homo sapiens
  misc_RNA (1)...(19): siRNA sense strand
acgaugaagacgaggauga

SEQ ID NO: 2380562 - RNA, 19 nt, Homo sapiens
  misc_RNA (1)...(19): siRNA sense strand
aggcugaagcugagcgaca

SEQ ID NO: 2380563 - RNA, 19 nt, Homo sapiens
  misc_RNA (1)...(19): siRNA sense strand
gcagcgacgaaguggacaa

SEQ ID NO: 2380564 - RNA, 19 nt, Homo sapiens
  misc_RNA (1)...(19): siRNA sense strand
gaagaaagcaaggaggaga

SEQ ID NO: 2380565 - RNA, 19 nt, Homo sapiens
  misc_RNA (1)...(19): siRNA sense strand
gcaagguggagcagggcau

SEQ ID NO: 2380566 - RNA, 19 nt, Homo sapiens
  misc_RNA (1)...(19): siRNA sense strand
aaagcaaggaggagacaca

SEQ ID NO: 2380567 - RNA, 19 nt, Homo sapiens
  misc_RNA (1)...(19): siRNA sense strand
gagcagggcaugaaggacu

SEQ ID NO: 2380568 - RNA, 19 nt, Homo sapiens
  misc_RNA (1)...(19): siRNA sense strand
caguggacuuggaggagga

SEQ ID NO: 2380569 - RNA, 19 nt, Homo sapiens
  misc_RNA (1)...(19): siRNA sense strand
uggaggaggaggaggagga

SEQ ID NO: 2380570 - RNA, 19 nt, Homo sapiens
  misc_RNA (1)...(19): siRNA sense strand
ugaagaaggcagagaggac

SEQ ID NO: 2380571 - RNA, 19 nt, Homo sapiens
  misc_RNA (1)...(19): siRNA sense strand
ccgcaguggacuuggagga

SEQ ID NO: 2380572 - RNA, 19 nt, Homo sapiens
  misc_RNA (1)...(19): siRNA sense strand
aagaagaaagcaaggagga

SEQ ID NO: 2380573 - RNA, 19 nt, Homo sapiens
  misc_RNA (1)...(19): siRNA sense strand
aggaggaguacgaugaaga

SEQ ID NO: 2380574 - RNA, 19 nt, Homo sapiens
  misc_RNA (1)...(19): siRNA sense strand
gcuacugcauggaggagga

SEQ ID NO: 2380575 - RNA, 19 nt, Homo sapiens
  misc_RNA (1)...(19): siRNA sense strand
gggacuuccucaaaggcuu

SEQ ID NO: 2380576 - RNA, 19 nt, Homo sapiens
  misc_RNA (1)...(19): siRNA sense strand
acuuggaggaggaggagga

SEQ ID NO: 2380577 - RNA, 19 nt, Homo sapiens
  misc_RNA (1)...(19): siRNA sense strand
agccuggagaugagggcaa

SEQ ID NO: 2380578 - RNA, 19 nt, Homo sapiens
  misc_RNA (1)...(19): siRNA sense strand
gagaugagggcaaggugga

SEQ ID NO: 2380579 - RNA, 19 nt, Homo sapiens
  misc_RNA (1)...(19): siRNA sense strand
cgcaagaacaugucggagu

SEQ ID NO: 2380580 - RNA, 19 nt, Homo sapiens
  misc_RNA (1)...(19): siRNA sense strand
gaggagggcugcauggagu

SEQ ID NO: 2380581 - RNA, 19 nt, Homo sapiens
  misc_RNA (1)...(19): siRNA sense strand
aagcagugaagaaggcaga

SEQ ID NO: 2380582 - RNA, 19 nt, Homo sapiens
  misc_RNA (1)...(19): siRNA sense strand
cggccaagaucgaccgcaa

SEQ ID NO: 2380583 - RNA, 19 nt, Homo sapiens
  misc_RNA (1)...(19): siRNA sense strand
ugacauccuucgagggcaa

SEQ ID NO: 2380584 - RNA, 19 nt, Homo sapiens
  misc_RNA (1)...(19): siRNA sense strand
guacuguaaccguggccua

SEQ ID NO: 2380585 - RNA, 19 nt, Homo sapiens
  misc_RNA (1)...(19): siRNA sense strand
agaucgaccgcaagggcua

SEQ ID NO: 2380586 - RNA, 19 nt, Homo sapiens
  misc_RNA (1)...(19): siRNA sense strand
ucaucgagccuguggacau

SEQ ID NO: 2380587 - RNA, 19 nt, Homo sapiens
  misc_RNA (1)...(19): siRNA sense strand
gcuuacacgcagagcuaca

SEQ ID NO: 2380588 - RNA, 19 nt, Homo sapiens
  misc_RNA (1)...(19): siRNA sense strand
acucaaggucuguguggau

SEQ ID NO: 2380589 - RNA, 19 nt, Homo sapiens
  misc_RNA (1)...(19): siRNA sense strand
acucugaggaggauccaaa

SEQ ID NO: 2380590 - RNA, 19 nt, Homo sapiens
  misc_RNA (1)...(19): siRNA sense strand
gcguucuacacguggacua

SEQ ID NO: 2380591 - RNA, 19 nt, Homo sapiens
  misc_RNA (1)...(19): siRNA sense strand
cagccguggugcagacaca

SEQ ID NO: 2380592 - RNA, 19 nt, Homo sapiens
  misc_RNA (1)...(19): siRNA sense strand
gggaaaagguugcccgauc

SEQ ID NO: 2380593 - RNA, 19 nt, Homo sapiens
  misc_RNA (1)...(19): siRNA sense strand
uggaugagaaagagggaaa

SEQ ID NO: 2380594 - RNA, 19 nt, Homo sapiens
  misc_RNA (1)...(19): siRNA sense strand
aggaagaacaccauaguaa

SEQ ID NO: 2380595 - RNA, 19 nt, Homo sapiens
  misc_RNA (1)...(19): siRNA sense strand
agaagaugucuaugagaaa

SEQ ID NO: 2380596 - RNA, 19 nt, Homo sapiens
  misc_RNA (1)...(19): siRNA sense strand
cggugaagcagcagaggaa

SEQ ID NO: 2380597 - RNA, 19 nt, Homo sapiens
  misc_RNA (1)...(19): siRNA sense strand
gaggaaguggaaagagaaa

SEQ ID NO: 2380598 - RNA, 19 nt, Homo sapiens
  misc_RNA (1)...(19): siRNA sense strand
gcuugaaauggaagguaaa

SEQ ID NO: 2380599 - RNA, 19 nt, Homo sapiens
  misc_RNA (1)...(19): siRNA sense strand
ggaagaagcugcaagagga

SEQ ID NO: 2380600 - RNA, 19 nt, Homo sapiens
  misc_RNA (1)...(19): siRNA sense strand
gagaugaguugauaggcaa

SEQ ID NO: 2380601 - RNA, 19 nt, Homo sapiens
  misc_RNA (1)...(19): siRNA sense strand
agagaaauaacaagaggaa

SEQ ID NO: 2380602 - RNA, 19 nt, Homo sapiens
  misc_RNA (1)...(19): siRNA sense strand
uggacagacuugaggaaaa

SEQ ID NO: 2380603 - RNA, 19 nt, Homo sapiens
  misc_RNA (1)...(19): siRNA sense strand
aaucugaaauggaggaaaa

SEQ ID NO: 2380604 - RNA, 19 nt, Homo sapiens
  misc_RNA (1)...(19): siRNA sense strand
caacaaagauuuauggaag

SEQ ID NO: 2380605 - RNA, 19 nt, Homo sapiens
  misc_RNA (1)...(19): siRNA sense strand
uggaagaagcauuuagcaa

SEQ ID NO: 2380606 - RNA, 19 nt, Homo sapiens
  misc_RNA (1)...(19): siRNA sense strand
acuugaugguauagaggaa

SEQ ID NO: 2380607 - RNA, 19 nt, Homo sapiens
  misc_RNA (1)...(19): siRNA sense strand
gggaagaagaagagaagcu

SEQ ID NO: 2380608 - RNA, 19 nt, Homo sapiens
  misc_RNA (1)...(19): siRNA sense strand
guugauaggcaaauugaaa

SEQ ID NO: 2380609 - RNA, 19 nt, Homo sapiens
  misc_RNA (1)...(19): siRNA sense strand
ugccaagaauaaagcaaua

SEQ ID NO: 2380610 - RNA, 19 nt, Homo sapiens
  misc_RNA (1)...(19): siRNA sense strand
agagagaagacuccagaaa

SEQ ID NO: 2380611 - RNA, 19 nt, Homo sapiens
  misc_RNA (1)...(19): siRNA sense strand
gcugguugaugaaaggaaa

SEQ ID NO: 2380612 - RNA, 19 nt, Homo sapiens
  misc_RNA (1)...(19): siRNA sense strand
aagaagaagagaagcucaa

SEQ ID NO: 2380613 - RNA, 19 nt, Homo sapiens
  misc_RNA (1)...(19): siRNA sense strand
ccaaagaaucgaggagcua

SEQ ID NO: 2380614 - RNA, 19 nt, Homo sapiens
  misc_RNA (1)...(19): siRNA sense strand
aagcaauagagaaggguga

SEQ ID NO: 2380615 - RNA, 19 nt, Homo sapiens
  misc_RNA (1)...(19): siRNA sense strand
gugaagcagcagaggaaga

SEQ ID NO: 2380616 - RNA, 19 nt, Homo sapiens
  misc_RNA (1)...(19): siRNA sense strand
ccucauggcagaaguggaa

SEQ ID NO: 2380617 - RNA, 19 nt, Homo sapiens
  misc_RNA (1)...(19): siRNA sense strand
agaaauuggaagaagcauu

SEQ ID NO: 2380618 - RNA, 19 nt, Homo sapiens
  misc_RNA (1)...(19): siRNA sense strand
ccguauacgaguuagagaa

SEQ ID NO: 2380619 - RNA, 19 nt, Homo sapiens
  misc_RNA (1)...(19): siRNA sense strand
uaucaagcccgcaaagaaa

SEQ ID NO: 2380620 - RNA, 19 nt, Homo sapiens
  misc_RNA (1)...(19): siRNA sense strand
guauagaggaaguggaaag

SEQ ID NO: 2380621 - RNA, 19 nt, Homo sapiens
  misc_RNA (1)...(19): siRNA sense strand
cuuaaaagccgaaguacaa

SEQ ID NO: 2380622 - RNA, 19 nt, Homo sapiens
  misc_RNA (1)...(19): siRNA sense strand
gaaucagaaaccaagaaua

SEQ ID NO: 2380623 - RNA, 19 nt, Homo sapiens
  misc_RNA (1)...(19): siRNA sense strand
uagagaacgagaagcauaa

SEQ ID NO: 2380624 - RNA, 19 nt, Homo sapiens
  misc_RNA (1)...(19): siRNA sense strand
ucugaaaguagauuggaaa

SEQ ID NO: 2380625 - RNA, 19 nt, Homo sapiens
  misc_RNA (1)...(19): siRNA sense strand
gagaaagagaugaguugau

SEQ ID NO: 2380626 - RNA, 19 nt, Homo sapiens
  misc_RNA (1)...(19): siRNA sense strand
cuggagaaugugaacgaaa

SEQ ID NO: 2380627 - RNA, 19 nt, Homo sapiens
  misc_RNA (1)...(19): siRNA sense strand
uguagggaauugaggaaga

SEQ ID NO: 2380628 - RNA, 19 nt, Homo sapiens
  misc_RNA (1)...(19): siRNA sense strand
gaagaagcugcaagaggaa

SEQ ID NO: 2380629 - RNA, 19 nt, Homo sapiens
  misc_RNA (1)...(19): siRNA sense strand
accaaauugccaagaauaa

SEQ ID NO: 2380630 - RNA, 19 nt, Homo sapiens
  misc_RNA (1)...(19): siRNA sense strand
cugcaaagccagaaaguac

SEQ ID NO: 2380631 - RNA, 19 nt, Homo sapiens
  misc_RNA (1)...(19): siRNA sense strand
aagcauuuagcaagaguaa

SEQ ID NO: 2380632 - RNA, 19 nt, Homo sapiens
  misc_RNA (1)...(19): siRNA sense strand
augaauuggagguggucaa

SEQ ID NO: 2380633 - RNA, 19 nt, Homo sapiens
  misc_RNA (1)...(19): siRNA sense strand
aguuagagaacgagaagca

SEQ ID NO: 2380634 - RNA, 19 nt, Homo sapiens
  misc_RNA (1)...(19): siRNA sense strand
aagaagacagacagaaauu

SEQ ID NO: 2380635 - RNA, 19 nt, Homo sapiens
  misc_RNA (1)...(19): siRNA sense strand
uaaccaaagaccugcuaaa

SEQ ID NO: 2380636 - RNA, 19 nt, Homo sapiens
  misc_RNA (1)...(19): siRNA sense strand
ugcagaaggcagaggaaga

SEQ ID NO: 2380637 - RNA, 19 nt, Homo sapiens
  misc_RNA (1)...(19): siRNA sense strand
ugguauagaggaaguggaa

SEQ ID NO: 2380638 - RNA, 19 nt, Homo sapiens
  misc_RNA (1)...(19): siRNA sense strand
guggaaagagaaauaacaa

SEQ ID NO: 2380639 - RNA, 19 nt, Homo sapiens
  misc_RNA (1)...(19): siRNA sense strand
gcaggaaaucugaccaaau

SEQ ID NO: 2380640 - RNA, 19 nt, Homo sapiens
  misc_RNA (1)...(19): siRNA sense strand
ugcuugaaauggaagguaa

SEQ ID NO: 2380641 - RNA, 19 nt, Homo sapiens
  misc_RNA (1)...(19): siRNA sense strand
ccagagaagaugugaucca

SEQ ID NO: 2380642 - RNA, 19 nt, Homo sapiens
  misc_RNA (1)...(19): siRNA sense strand
ccauaggagaagaugucua

SEQ ID NO: 2380643 - RNA, 19 nt, Homo sapiens
  misc_RNA (1)...(19): siRNA sense strand
ugaugaagacagaagauga

SEQ ID NO: 2380644 - RNA, 19 nt, Homo sapiens
  misc_RNA (1)...(19): siRNA sense strand
ugaagaaacccguggaaag

SEQ ID NO: 2380645 - RNA, 19 nt, Homo sapiens
  misc_RNA (1)...(19): siRNA sense strand
ccacagaggacaauaaaau

SEQ ID NO: 2380646 - RNA, 19 nt, Homo sapiens
  misc_RNA (1)...(19): siRNA sense strand
gagcaggaaaucugaccaa

SEQ ID NO: 2380647 - RNA, 19 nt, Homo sapiens
  misc_RNA (1)...(19): siRNA sense strand
caugaagagaugaacgcua

SEQ ID NO: 2380648 - RNA, 19 nt, Homo sapiens
  misc_RNA (1)...(19): siRNA sense strand
gaagagaagcucaaagcca

SEQ ID NO: 2380649 - RNA, 19 nt, Homo sapiens
  misc_RNA (1)...(19): siRNA sense strand
ucauaaccacagaggacaa

SEQ ID NO: 2380650 - RNA, 19 nt, Homo sapiens
  misc_RNA (1)...(19): siRNA sense strand
agaaauaacaagaggaagg

SEQ ID NO: 2380651 - RNA, 19 nt, Homo sapiens
  misc_RNA (1)...(19): siRNA sense strand
cagugugaauggaagaaga

SEQ ID NO: 2380652 - RNA, 19 nt, Homo sapiens
  misc_RNA (1)...(19): siRNA sense strand
cgaagaugaaaaugaguaa

SEQ ID NO: 2380653 - RNA, 19 nt, Homo sapiens
  misc_RNA (1)...(19): siRNA sense strand
gugacaaagaagaugaaca

SEQ ID NO: 2380654 - RNA, 19 nt, Homo sapiens
  misc_RNA (1)...(19): siRNA sense strand
gguuuaacagcaagcucaa

SEQ ID NO: 2380655 - RNA, 19 nt, Homo sapiens
  misc_RNA (1)...(19): siRNA sense strand
ucaaggaacgggucggcua

SEQ ID NO: 2380656 - RNA, 19 nt, Homo sapiens
  misc_RNA (1)...(19): siRNA sense strand
caaagaagaugaacagccu

SEQ ID NO: 2380657 - RNA, 19 nt, Homo sapiens
  misc_RNA (1)...(19): siRNA sense strand
aguugaagaagucaugaaa

SEQ ID NO: 2380658 - RNA, 19 nt, Homo sapiens
  misc_RNA (1)...(19): siRNA sense strand
caguugaagaagucaugaa

SEQ ID NO: 2380659 - RNA, 19 nt, Homo sapiens
  misc_RNA (1)...(19): siRNA sense strand
cagaaauaaaggcugccaa

SEQ ID NO: 2380660 - RNA, 19 nt, Homo sapiens
  misc_RNA (1)...(19): siRNA sense strand
cuaagagaauucagccuca

SEQ ID NO: 2380661 - RNA, 19 nt, Homo sapiens
  misc_RNA (1)...(19): siRNA sense strand
uauucagguuuaacagcaa

SEQ ID NO: 2380662 - RNA, 19 nt, Homo sapiens
  misc_RNA (1)...(19): siRNA sense strand
uggaagaaucauauaucga

SEQ ID NO: 2380663 - RNA, 19 nt, Homo sapiens
  misc_RNA (1)...(19): siRNA sense strand
gugcaguuuaagagagaau

SEQ ID NO: 2380664 - RNA, 19 nt, Homo sapiens
  misc_RNA (1)...(19): siRNA sense strand
aucugaaacuagugaacaa

SEQ ID NO: 2380665 - RNA, 19 nt, Homo sapiens
  misc_RNA (1)...(19): siRNA sense strand
uggccagcauugaggagaa

SEQ ID NO: 2380666 - RNA, 19 nt, Homo sapiens
  misc_RNA (1)...(19): siRNA sense strand
gaugaauguucgaguggca

SEQ ID NO: 2380667 - RNA, 19 nt, Homo sapiens
  misc_RNA (1)...(19): siRNA sense strand
cuggaggaacugagggaga

SEQ ID NO: 2380668 - RNA, 19 nt, Homo sapiens
  misc_RNA (1)...(19): siRNA sense strand
ucuaggagcucaaaggaca

SEQ ID NO: 2380669 - RNA, 19 nt, Homo sapiens
  misc_RNA (1)...(19): siRNA sense strand
ggguagaacgucaugacau

SEQ ID NO: 2380670 - RNA, 19 nt, Homo sapiens
  misc_RNA (1)...(19): siRNA sense strand
aggugcaguuuaagagaga

SEQ ID NO: 2380671 - RNA, 19 nt, Homo sapiens
  misc_RNA (1)...(19): siRNA sense strand
cugcaagaggaaagauaca

SEQ ID NO: 2380672 - RNA, 19 nt, Homo sapiens
  misc_RNA (1)...(19): siRNA sense strand
cugagggagaucaaggaua

SEQ ID NO: 2380673 - RNA, 19 nt, Homo sapiens
  misc_RNA (1)...(19): siRNA sense strand
cggccgacaguaacggaaa

SEQ ID NO: 2380674 - RNA, 19 nt, Homo sapiens
  misc_RNA (1)...(19): siRNA sense strand
aggaacugagggagaucaa

SEQ ID NO: 2380675 - RNA, 19 nt, Homo sapiens
  misc_RNA (1)...(19): siRNA sense strand
gguaugagcgacuggagga

SEQ ID NO: 2380676 - RNA, 19 nt, Homo sapiens
  misc_RNA (1)...(19): siRNA sense strand
ucgaaagcucagagagauc

SEQ ID NO: 2380677 - RNA, 19 nt, Homo sapiens
  misc_RNA (1)...(19): siRNA sense strand
ccuuagaggaguuuaggca

SEQ ID NO: 2380678 - RNA, 19 nt, Homo sapiens
  misc_RNA (1)...(19): siRNA sense strand
cccugcaagaggaaagaua

SEQ ID NO: 2380679 - RNA, 19 nt, Homo sapiens
  misc_RNA (1)...(19): siRNA sense strand
cgugacucuucuugcuaua

SEQ ID NO: 2380680 - RNA, 19 nt, Homo sapiens
  misc_RNA (1)...(19): siRNA sense strand
cugcaagagccggguagaa

SEQ ID NO: 2380681 - RNA, 19 nt, Homo sapiens
  misc_RNA (1)...(19): siRNA sense strand
ccauauccugugugccaua

SEQ ID NO: 2380682 - RNA, 19 nt, Homo sapiens
  misc_RNA (1)...(19): siRNA sense strand
caaguauggcagugaugau

SEQ ID NO: 2380683 - RNA, 19 nt, Homo sapiens
  misc_RNA (1)...(19): siRNA sense strand
cugaggacaucgaggcacu

SEQ ID NO: 2380684 - RNA, 19 nt, Homo sapiens
  misc_RNA (1)...(19): siRNA sense strand
uugaggagaagguggccua

SEQ ID NO: 2380685 - RNA, 19 nt, Homo sapiens
  misc_RNA (1)...(19): siRNA sense strand
agaaguuagagcaguauca

SEQ ID NO: 2380686 - RNA, 19 nt, Homo sapiens
  misc_RNA (1)...(19): siRNA sense strand
gaccauauccugugugcca

SEQ ID NO: 2380687 - RNA, 19 nt, Homo sapiens
  misc_RNA (1)...(19): siRNA sense strand
gagagaagcuggaccgcau

SEQ ID NO: 2380688 - RNA, 19 nt, Homo sapiens
  misc_RNA (1)...(19): siRNA sense strand
cggaaguugguucaugaaa

SEQ ID NO: 2380689 - RNA, 19 nt, Homo sapiens
  misc_RNA (1)...(19): siRNA sense strand
gagaaggagcugacccuca

SEQ ID NO: 2380690 - RNA, 19 nt, Homo sapiens
  misc_RNA (1)...(19): siRNA sense strand
uggaaggcagcgaagagaa

SEQ ID NO: 2380691 - RNA, 19 nt, Homo sapiens
  misc_RNA (1)...(19): siRNA sense strand
cuacagaugacuuccguga

SEQ ID NO: 2380692 - RNA, 19 nt, Homo sapiens
  misc_RNA (1)...(19): siRNA sense strand
gcgaagagaaggagcugac

SEQ ID NO: 2380693 - RNA, 19 nt, Homo sapiens
  misc_RNA (1)...(19): siRNA sense strand
gggaaagcagagagagaaa

SEQ ID NO: 2380694 - RNA, 19 nt, Homo sapiens
  misc_RNA (1)...(19): siRNA sense strand
aggaaggugaagagggaaa

SEQ ID NO: 2380695 - RNA, 19 nt, Homo sapiens
  misc_RNA (1)...(19): siRNA sense strand
gagggaaagcagagagaga

SEQ ID NO: 2380696 - RNA, 19 nt, Homo sapiens
  misc_RNA (1)...(19): siRNA sense strand
ccgagaggauggagagcau

SEQ ID NO: 2380697 - RNA, 19 nt, Homo sapiens
  misc_RNA (1)...(19): siRNA sense strand
agagaaaugccgagaggau

SEQ ID NO: 2380698 - RNA, 19 nt, Homo sapiens
  misc_RNA (1)...(19): siRNA sense strand
aggaugagcgggagaguau

SEQ ID NO: 2380699 - RNA, 19 nt, Homo sapiens
  misc_RNA (1)...(19): siRNA sense strand
aagagaaagaagcaagaaa

SEQ ID NO: 2380700 - RNA, 19 nt, Homo sapiens
  misc_RNA (1)...(19): siRNA sense strand
agaagagggcauugaggaa

SEQ ID NO: 2380701 - RNA, 19 nt, Homo sapiens
  misc_RNA (1)...(19): siRNA sense strand
ucaaggaguuccagcgcaa

SEQ ID NO: 2380702 - RNA, 19 nt, Homo sapiens
  misc_RNA (1)...(19): siRNA sense strand
cgcuacuaccugagagaaa

SEQ ID NO: 2380703 - RNA, 19 nt, Homo sapiens
  misc_RNA (1)...(19): siRNA sense strand
acaucuaugaggaaggaaa

SEQ ID NO: 2380704 - RNA, 19 nt, Homo sapiens
  misc_RNA (1)...(19): siRNA sense strand
agaggaaggugaagaggga

SEQ ID NO: 2380705 - RNA, 19 nt, Homo sapiens
  misc_RNA (1)...(19): siRNA sense strand
cagugaugaugaagauaau

SEQ ID NO: 2380706 - RNA, 19 nt, Homo sapiens
  misc_RNA (1)...(19): siRNA sense strand
cagacgaaucaguggaaga

SEQ ID NO: 2380707 - RNA, 19 nt, Homo sapiens
  misc_RNA (1)...(19): siRNA sense strand
uggcaaugaaggugacaau

SEQ ID NO: 2380708 - RNA, 19 nt, Homo sapiens
  misc_RNA (1)...(19): siRNA sense strand
acgagaauccugaagacaa

SEQ ID NO: 2380709 - RNA, 19 nt, Homo sapiens
  misc_RNA (1)...(19): siRNA sense strand
caguggaagaagagggcau

SEQ ID NO: 2380710 - RNA, 19 nt, Homo sapiens
  misc_RNA (1)...(19): siRNA sense strand
acaagaacacugaugacaa

SEQ ID NO: 2380711 - RNA, 19 nt, Homo sapiens
  misc_RNA (1)...(19): siRNA sense strand
cgggagaguaugaggagca

SEQ ID NO: 2380712 - RNA, 19 nt, Homo sapiens
  misc_RNA (1)...(19): siRNA sense strand
cauugaguacuaugagaaa

SEQ ID NO: 2380713 - RNA, 19 nt, Homo sapiens
  misc_RNA (1)...(19): siRNA sense strand
acuauuaugcaguggaaga

SEQ ID NO: 2380714 - RNA, 19 nt, Homo sapiens
  misc_RNA (1)...(19): siRNA sense strand
gcgaugaugacgacagaga

SEQ ID NO: 2380715 - RNA, 19 nt, Homo sapiens
  misc_RNA (1)...(19): siRNA sense strand
agacaauucaugacaucaa

SEQ ID NO: 2380716 - RNA, 19 nt, Homo sapiens
  misc_RNA (1)...(19): siRNA sense strand
gaugaugacgacagagaca

SEQ ID NO: 2380717 - RNA, 19 nt, Homo sapiens
  misc_RNA (1)...(19): siRNA sense strand
gaguacuaugagaaaguua

SEQ ID NO: 2380718 - RNA, 19 nt, Homo sapiens
  misc_RNA (1)...(19): siRNA sense strand
aggaaggcauccagcaaga

SEQ ID NO: 2380719 - RNA, 19 nt, Homo sapiens
  misc_RNA (1)...(19): siRNA sense strand
gcaaggaagaggcgaucau

SEQ ID NO: 2380720 - RNA, 19 nt, Homo sapiens
  misc_RNA (1)...(19): siRNA sense strand
cagugaugaugauggcaau

SEQ ID NO: 2380721 - RNA, 19 nt, Homo sapiens
  misc_RNA (1)...(19): siRNA sense strand
uaguggaggaugaggauga

SEQ ID NO: 2380722 - RNA, 19 nt, Homo sapiens
  misc_RNA (1)...(19): siRNA sense strand
ccgacgugaugaagacauu

SEQ ID NO: 2380723 - RNA, 19 nt, Homo sapiens
  misc_RNA (1)...(19): siRNA sense strand
augaagauaaugauggcaa

SEQ ID NO: 2380724 - RNA, 19 nt, Homo sapiens
  misc_RNA (1)...(19): siRNA sense strand
gcagugaugaugauggcaa

SEQ ID NO: 2380725 - RNA, 19 nt, Homo sapiens
  misc_RNA (1)...(19): siRNA sense strand
agaagcaagaaaugaagaa

SEQ ID NO: 2380726 - RNA, 19 nt, Homo sapiens
  misc_RNA (1)...(19): siRNA sense strand
caacaaugagagugcagau

SEQ ID NO: 2380727 - RNA, 19 nt, Homo sapiens
  misc_RNA (1)...(19): siRNA sense strand
cugaagacaauaacaagaa

SEQ ID NO: 2380728 - RNA, 19 nt, Homo sapiens
  misc_RNA (1)...(19): siRNA sense strand
uaguugacccgaagagcaa

SEQ ID NO: 2380729 - RNA, 19 nt, Homo sapiens
  misc_RNA (1)...(19): siRNA sense strand
acgagaacacuuacggcaa

SEQ ID NO: 2380730 - RNA, 19 nt, Homo sapiens
  misc_RNA (1)...(19): siRNA sense strand
cgacagugacaaugaagca

SEQ ID NO: 2380731 - RNA, 19 nt, Homo sapiens
  misc_RNA (1)...(19): siRNA sense strand
caaugaaggcagcgaugau

SEQ ID NO: 2380732 - RNA, 19 nt, Homo sapiens
  misc_RNA (1)...(19): siRNA sense strand
acuacgaggacgugauaga

SEQ ID NO: 2380733 - RNA, 19 nt, Homo sapiens
  misc_RNA (1)...(19): siRNA sense strand
cagcagcgacagugacaau

SEQ ID NO: 2380734 - RNA, 19 nt, Homo sapiens
  misc_RNA (1)...(19): siRNA sense strand
gcagaugacaacaacgaga

SEQ ID NO: 2380735 - RNA, 19 nt, Homo sapiens
  misc_RNA (1)...(19): siRNA sense strand
uggcaacgaaggugacaau

SEQ ID NO: 2380736 - RNA, 19 nt, Homo sapiens
  misc_RNA (1)...(19): siRNA sense strand
aggaugaggaugagcggga

SEQ ID NO: 2380737 - RNA, 19 nt, Homo sapiens
  misc_RNA (1)...(19): siRNA sense strand
gggucaaagcauuccucaa

SEQ ID NO: 2380738 - RNA, 19 nt, Homo sapiens
  misc_RNA (1)...(19): siRNA sense strand
gauaaagagaaagaagcaa

SEQ ID NO: 2380739 - RNA, 19 nt, Homo sapiens
  misc_RNA (1)...(19): siRNA sense strand
cagcgagaucucagacauu

SEQ ID NO: 2380740 - RNA, 19 nt, Homo sapiens
  misc_RNA (1)...(19): siRNA sense strand
aaggaaacuaugaggagga

SEQ ID NO: 2380741 - RNA, 19 nt, Homo sapiens
  misc_RNA (1)...(19): siRNA sense strand
cgaucaucauaguggagga

SEQ ID NO: 2380742 - RNA, 19 nt, Homo sapiens
  misc_RNA (1)...(19): siRNA sense strand
agguggugaucauggaaga

SEQ ID NO: 2380743 - RNA, 19 nt, Homo sapiens
  misc_RNA (1)...(19): siRNA sense strand
cugaugacaacgaagagaa

SEQ ID NO: 2380744 - RNA, 19 nt, Homo sapiens
  misc_RNA (1)...(19): siRNA sense strand
caaugagggcagugaugau

SEQ ID NO: 2380745 - RNA, 19 nt, Homo sapiens
  misc_RNA (1)...(19): siRNA sense strand
aagugaagaugucugggaa

SEQ ID NO: 2380746 - RNA, 19 nt, Homo sapiens
  misc_RNA (1)...(19): siRNA sense strand
agcuguacuuccagacuaa

SEQ ID NO: 2380747 - RNA, 19 nt, Homo sapiens
  misc_RNA (1)...(19): siRNA sense strand
ccugaagacaauaacaaga

SEQ ID NO: 2380748 - RNA, 19 nt, Homo sapiens
  misc_RNA (1)...(19): siRNA sense strand
acgaagagaacccuaacaa

SEQ ID NO: 2380749 - RNA, 19 nt, Homo sapiens
  misc_RNA (1)...(19): siRNA sense strand
acauugaguacuaugagaa

SEQ ID NO: 2380750 - RNA, 19 nt, Homo sapiens
  misc_RNA (1)...(19): siRNA sense strand
agagcaaggaagaggcgau

SEQ ID NO: 2380751 - RNA, 19 nt, Homo sapiens
  misc_RNA (1)...(19): siRNA sense strand
aggaagaggcgaucaucau

SEQ ID NO: 2380752 - RNA, 19 nt, Homo sapiens
  misc_RNA (1)...(19): siRNA sense strand
gcaagaaggugaaaggcau

SEQ ID NO: 2380753 - RNA, 19 nt, Homo sapiens
  misc_RNA (1)...(19): siRNA sense strand
ugaaagaggaagauggaga

SEQ ID NO: 2380754 - RNA, 19 nt, Homo sapiens
  misc_RNA (1)...(19): siRNA sense strand
auguagaucgcgugauaaa

SEQ ID NO: 2380755 - RNA, 19 nt, Homo sapiens
  misc_RNA (1)...(19): siRNA sense strand
gagaacacccugugcgaga

SEQ ID NO: 2380756 - RNA, 19 nt, Homo sapiens
  misc_RNA (1)...(19): siRNA sense strand
uggagauggugaaggacau

SEQ ID NO: 2380757 - RNA, 19 nt, Homo sapiens
  misc_RNA (1)...(19): siRNA sense strand
uggaagagaucguggaggu

SEQ ID NO: 2380758 - RNA, 19 nt, Homo sapiens
  misc_RNA (1)...(19): siRNA sense strand
gggcaggaaacguggucuu

SEQ ID NO: 2380759 - RNA, 19 nt, Homo sapiens
  misc_RNA (1)...(19): siRNA sense strand
agaaacgaauugagcgcuu

SEQ ID NO: 2380760 - RNA, 19 nt, Homo sapiens
  misc_RNA (1)...(19): siRNA sense strand
guggagauggugaaggaca

SEQ ID NO: 2380761 - RNA, 19 nt, Homo sapiens
  misc_RNA (1)...(19): siRNA sense strand
aagauggagacgcuggaaa

SEQ ID NO: 2380762 - RNA, 19 nt, Homo sapiens
  misc_RNA (1)...(19): siRNA sense strand
acgugggcguggaggacuu

SEQ ID NO: 2380763 - RNA, 19 nt, Homo sapiens
  misc_RNA (1)...(19): siRNA sense strand
gcgagaacacccugugcga

SEQ ID NO: 2380764 - RNA, 19 nt, Homo sapiens
  misc_RNA (1)...(19): siRNA sense strand
aagaugagguggaugccga

SEQ ID NO: 2380765 - RNA, 19 nt, Homo sapiens
  misc_RNA (1)...(19): siRNA sense strand
agaucaagguggagcgcua

SEQ ID NO: 2380766 - RNA, 19 nt, Homo sapiens
  misc_RNA (1)...(19): siRNA sense strand
guuuacaagcauugagaaa

SEQ ID NO: 2380767 - RNA, 19 nt, Homo sapiens
  misc_RNA (1)...(19): siRNA sense strand
cugaagacguggagggcau

SEQ ID NO: 2380768 - RNA, 19 nt, Homo sapiens
  misc_RNA (1)...(19): siRNA sense strand
cacuaaaucaggaaggaaa

SEQ ID NO: 2380769 - RNA, 19 nt, Homo sapiens
  misc_RNA (1)...(19): siRNA sense strand
cuguagauaucguagggaa

SEQ ID NO: 2380770 - RNA, 19 nt, Homo sapiens
  misc_RNA (1)...(19): siRNA sense strand
aagaauaucaucuggguga

SEQ ID NO: 2380771 - RNA, 19 nt, Homo sapiens
  misc_RNA (1)...(19): siRNA sense strand
cgaucaaugaagucagaau

SEQ ID NO: 2380772 - RNA, 19 nt, Homo sapiens
  misc_RNA (1)...(19): siRNA sense strand
acaucaaaucaucaggaua

SEQ ID NO: 2380773 - RNA, 19 nt, Homo sapiens
  misc_RNA (1)...(19): siRNA sense strand
ccaagaaugcaaaugaaaa

SEQ ID NO: 2380774 - RNA, 19 nt, Homo sapiens
  misc_RNA (1)...(19): siRNA sense strand
aagcauugagaaaggagaa

SEQ ID NO: 2380775 - RNA, 19 nt, Homo sapiens
  misc_RNA (1)...(19): siRNA sense strand
cagcagugucuuugacuau

SEQ ID NO: 2380776 - RNA, 19 nt, Homo sapiens
  misc_RNA (1)...(19): siRNA sense strand
ccggagaucacguggagau

SEQ ID NO: 2380777 - RNA, 19 nt, Homo sapiens
  misc_RNA (1)...(19): siRNA sense strand
acuccaaguccgacgagaa

SEQ ID NO: 2380778 - RNA, 19 nt, Homo sapiens
  misc_RNA (1)...(19): siRNA sense strand
gcaagcaccagaagcgcaa

SEQ ID NO: 2380779 - RNA, 19 nt, Homo sapiens
  misc_RNA (1)...(19): siRNA sense strand
cagguauuacagaggacaa

SEQ ID NO: 2380780 - RNA, 19 nt, Homo sapiens
  misc_RNA (1)...(19): siRNA sense strand
acuaaaucaggaaggaaaa

SEQ ID NO: 2380781 - RNA, 19 nt, Homo sapiens
  misc_RNA (1)...(19): siRNA sense strand
caccagaagcgcaagaaaa

SEQ ID NO: 2380782 - RNA, 19 nt, Homo sapiens
  misc_RNA (1)...(19): siRNA sense strand
ugacaacacucuugagcgu

SEQ ID NO: 2380783 - RNA, 19 nt, Homo sapiens
  misc_RNA (1)...(19): siRNA sense strand
aauaagggucaguguguga

SEQ ID NO: 2380784 - RNA, 19 nt, Homo sapiens
  misc_RNA (1)...(19): siRNA sense strand
gcagcuagccugacgcaga

SEQ ID NO: 2380785 - RNA, 19 nt, Homo sapiens
  misc_RNA (1)...(19): siRNA sense strand
gggaagagaugcuaccacu

SEQ ID NO: 2380786 - RNA, 19 nt, Homo sapiens
  misc_RNA (1)...(19): siRNA sense strand
cauugaaguauuugaagca

SEQ ID NO: 2380787 - RNA, 19 nt, Homo sapiens
  misc_RNA (1)...(19): siRNA sense strand
cggcuacgccugagagugu

SEQ ID NO: 2380788 - RNA, 19 nt, Homo sapiens
  misc_RNA (1)...(19): siRNA sense strand
ucaucaggauauaagguga

SEQ ID NO: 2380789 - RNA, 19 nt, Homo sapiens
  misc_RNA (1)...(19): siRNA sense strand
ggugcacagcgaaggagaa

SEQ ID NO: 2380790 - RNA, 19 nt, Homo sapiens
  misc_RNA (1)...(19): siRNA sense strand
uugaaguauuugaagcaca

SEQ ID NO: 2380791 - RNA, 19 nt, Homo sapiens
  misc_RNA (1)...(19): siRNA sense strand
gcuuuguauuugcacuaaa

SEQ ID NO: 2380792 - RNA, 19 nt, Homo sapiens
  misc_RNA (1)...(19): siRNA sense strand
cguccaacuccuugcugua

SEQ ID NO: 2380793 - RNA, 19 nt, Homo sapiens
  misc_RNA (1)...(19): siRNA sense strand
gcacauuugggaagccaca

SEQ ID NO: 2380794 - RNA, 19 nt, Homo sapiens
  misc_RNA (1)...(19): siRNA sense strand
auaucaucugggugaauua

SEQ ID NO: 2380795 - RNA, 19 nt, Homo sapiens
  misc_RNA (1)...(19): siRNA sense strand
uuagcaauccugaguacaa

SEQ ID NO: 2380796 - RNA, 19 nt, Homo sapiens
  misc_RNA (1)...(19): siRNA sense strand
cccaagacgcccauggaga

SEQ ID NO: 2380797 - RNA, 19 nt, Homo sapiens
  misc_RNA (1)...(19): siRNA sense strand
aaaugagggacuuugcuaa

SEQ ID NO: 2380798 - RNA, 19 nt, Homo sapiens
  misc_RNA (1)...(19): siRNA sense strand
auuaaugccaagaaugcaa

SEQ ID NO: 2380799 - RNA, 19 nt, Homo sapiens
  misc_RNA (1)...(19): siRNA sense strand
cgaugcagaucaaggugga

SEQ ID NO: 2380800 - RNA, 19 nt, Homo sapiens
  misc_RNA (1)...(19): siRNA sense strand
guggagggcaucaggcaca

SEQ ID NO: 2380801 - RNA, 19 nt, Homo sapiens
  misc_RNA (1)...(19): siRNA sense strand
cucaagaucaagacggaga

SEQ ID NO: 2380802 - RNA, 19 nt, Homo sapiens
  misc_RNA (1)...(19): siRNA sense strand
agaucaagguggagcgcua

SEQ ID NO: 2380803 - RNA, 19 nt, Homo sapiens
  misc_RNA (1)...(19): siRNA sense strand
guuuacaagcauugagaaa

SEQ ID NO: 2380804 - RNA, 19 nt, Homo sapiens
  misc_RNA (1)...(19): siRNA sense strand
cugaagacguggagggcau

SEQ ID NO: 2380805 - RNA, 19 nt, Homo sapiens
  misc_RNA (1)...(19): siRNA sense strand
cacuaaaucaggaaggaaa

SEQ ID NO: 2380806 - RNA, 19 nt, Homo sapiens
  misc_RNA (1)...(19): siRNA sense strand
cuguagauaucguagggaa

SEQ ID NO: 2380807 - RNA, 19 nt, Homo sapiens
  misc_RNA (1)...(19): siRNA sense strand
aagaauaucaucuggguga

SEQ ID NO: 2380808 - RNA, 19 nt, Homo sapiens
  misc_RNA (1)...(19): siRNA sense strand
cgaucaaugaagucagaau

SEQ ID NO: 2380809 - RNA, 19 nt, Homo sapiens
  misc_RNA (1)...(19): siRNA sense strand
acaucaaaucaucaggaua

SEQ ID NO: 2380810 - RNA, 19 nt, Homo sapiens
  misc_RNA (1)...(19): siRNA sense strand
ccaagaaugcaaaugaaaa

SEQ ID NO: 2380811 - RNA, 19 nt, Homo sapiens
  misc_RNA (1)...(19): siRNA sense strand
aagcauugagaaaggagaa

SEQ ID NO: 2380812 - RNA, 19 nt, Homo sapiens
  misc_RNA (1)...(19): siRNA sense strand
cagcagugucuuugacuau

SEQ ID NO: 2380813 - RNA, 19 nt, Homo sapiens
  misc_RNA (1)...(19): siRNA sense strand
ccggagaucacguggagau

SEQ ID NO: 2380814 - RNA, 19 nt, Homo sapiens
  misc_RNA (1)...(19): siRNA sense strand
acuccaaguccgacgagaa

SEQ ID NO: 2380815 - RNA, 19 nt, Homo sapiens
  misc_RNA (1)...(19): siRNA sense strand
gcaagcaccagaagcgcaa

SEQ ID NO: 2380816 - RNA, 19 nt, Homo sapiens
  misc_RNA (1)...(19): siRNA sense strand
cagguauuacagaggacaa

SEQ ID NO: 2380817 - RNA, 19 nt, Homo sapiens
  misc_RNA (1)...(19): siRNA sense strand
acuaaaucaggaaggaaaa

SEQ ID NO: 2380818 - RNA, 19 nt, Homo sapiens
  misc_RNA (1)...(19): siRNA sense strand
caccagaagcgcaagaaaa

SEQ ID NO: 2380819 - RNA, 19 nt, Homo sapiens
  misc_RNA (1)...(19): siRNA sense strand
ugacaacacucuugagcgu

SEQ ID NO: 2380820 - RNA, 19 nt, Homo sapiens
  misc_RNA (1)...(19): siRNA sense strand
aauaagggucaguguguga

SEQ ID NO: 2380821 - RNA, 19 nt, Homo sapiens
  misc_RNA (1)...(19): siRNA sense strand
gcagcuagccugacgcaga

SEQ ID NO: 2380822 - RNA, 19 nt, Homo sapiens
  misc_RNA (1)...(19): siRNA sense strand
gggaagagaugcuaccacu

SEQ ID NO: 2380823 - RNA, 19 nt, Homo sapiens
  misc_RNA (1)...(19): siRNA sense strand
cauugaaguauuugaagca

SEQ ID NO: 2380824 - RNA, 19 nt, Homo sapiens
  misc_RNA (1)...(19): siRNA sense strand
cggcuacgccugagagugu

SEQ ID NO: 2380825 - RNA, 19 nt, Homo sapiens
  misc_RNA (1)...(19): siRNA sense strand
ucaucaggauauaagguga

SEQ ID NO: 2380826 - RNA, 19 nt, Homo sapiens
  misc_RNA (1)...(19): siRNA sense strand
ggugcacagcgaaggagaa

SEQ ID NO: 2380827 - RNA, 19 nt, Homo sapiens
  misc_RNA (1)...(19): siRNA sense strand
uugaaguauuugaagcaca

SEQ ID NO: 2380828 - RNA, 19 nt, Homo sapiens
  misc_RNA (1)...(19): siRNA sense strand
gcuuuguauuugcacuaaa

SEQ ID NO: 2380829 - RNA, 19 nt, Homo sapiens
  misc_RNA (1)...(19): siRNA sense strand
cguccaacuccuugcugua

SEQ ID NO: 2380830 - RNA, 19 nt, Homo sapiens
  misc_RNA (1)...(19): siRNA sense strand
gcacauuugggaagccaca

SEQ ID NO: 2380831 - RNA, 19 nt, Homo sapiens
  misc_RNA (1)...(19): siRNA sense strand
auaucaucugggugaauua

SEQ ID NO: 2380832 - RNA, 19 nt, Homo sapiens
  misc_RNA (1)...(19): siRNA sense strand
uuagcaauccugaguacaa

SEQ ID NO: 2380833 - RNA, 19 nt, Homo sapiens
  misc_RNA (1)...(19): siRNA sense strand
cccaagacgcccauggaga

SEQ ID NO: 2380834 - RNA, 19 nt, Homo sapiens
  misc_RNA (1)...(19): siRNA sense strand
aaaugagggacuuugcuaa

SEQ ID NO: 2380835 - RNA, 19 nt, Homo sapiens
  misc_RNA (1)...(19): siRNA sense strand
auuaaugccaagaaugcaa

SEQ ID NO: 2380836 - RNA, 19 nt, Homo sapiens
  misc_RNA (1)...(19): siRNA sense strand
cgaugcagaucaaggugga

SEQ ID NO: 2380837 - RNA, 19 nt, Homo sapiens
  misc_RNA (1)...(19): siRNA sense strand
guggagggcaucaggcaca

SEQ ID NO: 2380838 - RNA, 19 nt, Homo sapiens
  misc_RNA (1)...(19): siRNA sense strand
cucaagaucaagacggaga

SEQ ID NO: 2380839 - RNA, 19 nt, Homo sapiens
  misc_RNA (1)...(19): siRNA sense strand
ggugauagcuuguugccaa

SEQ ID NO: 2380840 - RNA, 19 nt, Homo sapiens
  misc_RNA (1)...(19): siRNA sense strand
gcaauauauuuguuggaca

SEQ ID NO: 2380841 - RNA, 19 nt, Homo sapiens
  misc_RNA (1)...(19): siRNA sense strand
ccaaauacgaacaucgaau

SEQ ID NO: 2380842 - RNA, 19 nt, Homo sapiens
  misc_RNA (1)...(19): siRNA sense strand
aucaauucguucugagaua

SEQ ID NO: 2380843 - RNA, 19 nt, Homo sapiens
  misc_RNA (1)...(19): siRNA sense strand
acaccaaacaggaugaaga

SEQ ID NO: 2380844 - RNA, 19 nt, Homo sapiens
  misc_RNA (1)...(19): siRNA sense strand
cgucauuggcugcugcuaa

SEQ ID NO: 2380845 - RNA, 19 nt, Homo sapiens
  misc_RNA (1)...(19): siRNA sense strand
cuucaugaugggaguggaa

SEQ ID NO: 2380846 - RNA, 19 nt, Homo sapiens
  misc_RNA (1)...(19): siRNA sense strand
ggaaacacaaccaagguga

SEQ ID NO: 2380847 - RNA, 19 nt, Homo sapiens
  misc_RNA (1)...(19): siRNA sense strand
guggauuauuagaaagguu

SEQ ID NO: 2380848 - RNA, 19 nt, Homo sapiens
  misc_RNA (1)...(19): siRNA sense strand
ugccaaggguccuggugaa

SEQ ID NO: 2380849 - RNA, 19 nt, Homo sapiens
  misc_RNA (1)...(19): siRNA sense strand
aggaugaugaugaggagau

SEQ ID NO: 2380850 - RNA, 19 nt, Homo sapiens
  misc_RNA (1)...(19): siRNA sense strand
uggaauggcaggacagcuu

SEQ ID NO: 2380851 - RNA, 19 nt, Homo sapiens
  misc_RNA (1)...(19): siRNA sense strand
ccaaauuuguaaacggugu

SEQ ID NO: 2380852 - RNA, 19 nt, Homo sapiens
  misc_RNA (1)...(19): siRNA sense strand
agaaauacaaagaccacuu

SEQ ID NO: 2380853 - RNA, 19 nt, Homo sapiens
  misc_RNA (1)...(19): siRNA sense strand
uagaaagguuggauggauc

SEQ ID NO: 2380854 - RNA, 19 nt, Homo sapiens
  misc_RNA (1)...(19): siRNA sense strand
acauggaggaugaugauga

SEQ ID NO: 2380855 - RNA, 19 nt, Homo sapiens
  misc_RNA (1)...(19): siRNA sense strand
gcauuuuauuagcagguua

SEQ ID NO: 2380856 - RNA, 19 nt, Homo sapiens
  misc_RNA (1)...(19): siRNA sense strand
cuucauuugucuuugguga

SEQ ID NO: 2380857 - RNA, 19 nt, Homo sapiens
  misc_RNA (1)...(19): siRNA sense strand
ccaucacguuuuagagaau

SEQ ID NO: 2380858 - RNA, 19 nt, Homo sapiens
  misc_RNA (1)...(19): siRNA sense strand
auuugucuuuggugagaaa

SEQ ID NO: 2380859 - RNA, 19 nt, Homo sapiens
  misc_RNA (1)...(19): siRNA sense strand
gcucuugauucuaaggacu

SEQ ID NO: 2380860 - RNA, 19 nt, Homo sapiens
  misc_RNA (1)...(19): siRNA sense strand
gggcagacaaguucagacu

SEQ ID NO: 2380861 - RNA, 19 nt, Homo sapiens
  misc_RNA (1)...(19): siRNA sense strand
ggaaagaagguggacccaa

SEQ ID NO: 2380862 - RNA, 19 nt, Homo sapiens
  misc_RNA (1)...(19): siRNA sense strand
gcuacagcaacgugggcuu

SEQ ID NO: 2380863 - RNA, 19 nt, Homo sapiens
  misc_RNA (1)...(19): siRNA sense strand
ucaagaaugccaugaaaau

SEQ ID NO: 2380864 - RNA, 19 nt, Homo sapiens
  misc_RNA (1)...(19): siRNA sense strand
gaaaauggaaaguggugau

SEQ ID NO: 2380865 - RNA, 19 nt, Homo sapiens
  misc_RNA (1)...(19): siRNA sense strand
ggaguggaauggcaggaca

SEQ ID NO: 2380866 - RNA, 19 nt, Homo sapiens
  misc_RNA (1)...(19): siRNA sense strand
gugagaaauacaaagacca

SEQ ID NO: 2380867 - RNA, 19 nt, Homo sapiens
  misc_RNA (1)...(19): siRNA sense strand
ccaucucccugguggccaa

SEQ ID NO: 2380868 - RNA, 19 nt, Homo sapiens
  misc_RNA (1)...(19): siRNA sense strand
cggccugugugcugaacuu

SEQ ID NO: 2380869 - RNA, 19 nt, Homo sapiens
  misc_RNA (1)...(19): siRNA sense strand
ccaacaucgcugugaaucu

SEQ ID NO: 2380870 - RNA, 19 nt, Homo sapiens
  misc_RNA (1)...(19): siRNA sense strand
uugaagggcugcugcacau

SEQ ID NO: 2380871 - RNA, 19 nt, Homo sapiens
  misc_RNA (1)...(19): siRNA sense strand
uuggaaaggagguaugaca

SEQ ID NO: 2380872 - RNA, 19 nt, Homo sapiens
  misc_RNA (1)...(19): siRNA sense strand
cuaaacagccauugguucu

SEQ ID NO: 2380873 - RNA, 19 nt, Homo sapiens
  misc_RNA (1)...(19): siRNA sense strand
uugucuuuggugagaaaua

SEQ ID NO: 2380874 - RNA, 19 nt, Homo sapiens
  misc_RNA (1)...(19): siRNA sense strand
gaggaggagagcugggaau

SEQ ID NO: 2380875 - RNA, 19 nt, Homo sapiens
  misc_RNA (1)...(19): siRNA sense strand
cagaaaauugcaagggaga

SEQ ID NO: 2380876 - RNA, 19 nt, Homo sapiens
  misc_RNA (1)...(19): siRNA sense strand
ugacauuagaggaggugca

SEQ ID NO: 2380877 - RNA, 19 nt, Homo sapiens
  misc_RNA (1)...(19): siRNA sense strand
cuugauaaagacugccaua

SEQ ID NO: 2380878 - RNA, 19 nt, Homo sapiens
  misc_RNA (1)...(19): siRNA sense strand
cgacagacaacuuugcaca

SEQ ID NO: 2380879 - RNA, 19 nt, Homo sapiens
  misc_RNA (1)...(19): siRNA sense strand
caucuggggaagaaagaaa

SEQ ID NO: 2380880 - RNA, 19 nt, Homo sapiens
  misc_RNA (1)...(19): siRNA sense strand
ggcugaagacccagugaca

SEQ ID NO: 2380881 - RNA, 19 nt, Homo sapiens
  misc_RNA (1)...(19): siRNA sense strand
cugaaagugaacacggaga

SEQ ID NO: 2380882 - RNA, 19 nt, Homo sapiens
  misc_RNA (1)...(19): siRNA sense strand
agggaaggugaaagggcuu

SEQ ID NO: 2380883 - RNA, 19 nt, Homo sapiens
  misc_RNA (1)...(19): siRNA sense strand
aggaagaagccgaggaaga

SEQ ID NO: 2380884 - RNA, 19 nt, Homo sapiens
  misc_RNA (1)...(19): siRNA sense strand
cagaagucuuagaggaaau

SEQ ID NO: 2380885 - RNA, 19 nt, Homo sapiens
  misc_RNA (1)...(19): siRNA sense strand
gcgaagaggaggaggagga

SEQ ID NO: 2380886 - RNA, 19 nt, Homo sapiens
  misc_RNA (1)...(19): siRNA sense strand
ggagaaacaugaaggacca

SEQ ID NO: 2380887 - RNA, 19 nt, Homo sapiens
  misc_RNA (1)...(19): siRNA sense strand
agggagaagaggaggaaga

SEQ ID NO: 2380888 - RNA, 19 nt, Homo sapiens
  misc_RNA (1)...(19): siRNA sense strand
ggauaaagaugcaccgguu

SEQ ID NO: 2380889 - RNA, 19 nt, Homo sapiens
  misc_RNA (1)...(19): siRNA sense strand
gagucauaacugagaacaa

SEQ ID NO: 2380890 - RNA, 19 nt, Homo sapiens
  misc_RNA (1)...(19): siRNA sense strand
aagaugagacugagggaga

SEQ ID NO: 2380891 - RNA, 19 nt, Homo sapiens
  misc_RNA (1)...(19): siRNA sense strand
ccuccaaaguccagugcuu

SEQ ID NO: 2380892 - RNA, 19 nt, Homo sapiens
  misc_RNA (1)...(19): siRNA sense strand
gugagagccgagaaggaaa

SEQ ID NO: 2380893 - RNA, 19 nt, Homo sapiens
  misc_RNA (1)...(19): siRNA sense strand
auggaaagccagaagguga

SEQ ID NO: 2380894 - RNA, 19 nt, Homo sapiens
  misc_RNA (1)...(19): siRNA sense strand
acaugaaggaccagggcau

SEQ ID NO: 2380895 - RNA, 19 nt, Homo sapiens
  misc_RNA (1)...(19): siRNA sense strand
gugaguugcagaaggagua

SEQ ID NO: 2380896 - RNA, 19 nt, Homo sapiens
  misc_RNA (1)...(19): siRNA sense strand
uggccaaggaauaaaguau

SEQ ID NO: 2380897 - RNA, 19 nt, Homo sapiens
  misc_RNA (1)...(19): siRNA sense strand
gcaaggaagggcuggacau

SEQ ID NO: 2380898 - RNA, 19 nt, Homo sapiens
  misc_RNA (1)...(19): siRNA sense strand
cagauaaggagcaugucaa

SEQ ID NO: 2380899 - RNA, 19 nt, Homo sapiens
  misc_RNA (1)...(19): siRNA sense strand
aaucagaagucuuagagga

SEQ ID NO: 2380900 - RNA, 19 nt, Homo sapiens
  misc_RNA (1)...(19): siRNA sense strand
cuguugugacggagggcaa

SEQ ID NO: 2380901 - RNA, 19 nt, Homo sapiens
  misc_RNA (1)...(19): siRNA sense strand
agggaugggcagaggcaga

SEQ ID NO: 2380902 - RNA, 19 nt, Homo sapiens
  misc_RNA (1)...(19): siRNA sense strand
cuaaagucaauaagcacaa

SEQ ID NO: 2380903 - RNA, 19 nt, Homo sapiens
  misc_RNA (1)...(19): siRNA sense strand
gcagaauggagccaggcaa

SEQ ID NO: 2380904 - RNA, 19 nt, Homo sapiens
  misc_RNA (1)...(19): siRNA sense strand
ccacgagacagccuggaaa

SEQ ID NO: 2380905 - RNA, 19 nt, Homo sapiens
  misc_RNA (1)...(19): siRNA sense strand
ccucaaaguauccuccaaa

SEQ ID NO: 2380906 - RNA, 19 nt, Homo sapiens
  misc_RNA (1)...(19): siRNA sense strand
cggauuaagugcucagaac

SEQ ID NO: 2380907 - RNA, 19 nt, Homo sapiens
  misc_RNA (1)...(19): siRNA sense strand
auauacaggugaaggaugu

SEQ ID NO: 2380908 - RNA, 19 nt, Homo sapiens
  misc_RNA (1)...(19): siRNA sense strand
aucagaagucuuagaggaa

SEQ ID NO: 2380909 - RNA, 19 nt, Homo sapiens
  misc_RNA (1)...(19): siRNA sense strand
gcuaaagucaauaagcaca

SEQ ID NO: 2380910 - RNA, 19 nt, Homo sapiens
  misc_RNA (1)...(19): siRNA sense strand
aagaggaggaggaggagga

SEQ ID NO: 2380911 - RNA, 19 nt, Homo sapiens
  misc_RNA (1)...(19): siRNA sense strand
gugugagagccgagaagga

SEQ ID NO: 2380912 - RNA, 19 nt, Homo sapiens
  misc_RNA (1)...(19): siRNA sense strand
aggagugcuuggagcucaa

SEQ ID NO: 2380913 - RNA, 19 nt, Homo sapiens
  misc_RNA (1)...(19): siRNA sense strand
aggaggaggaggaagggau

SEQ ID NO: 2380914 - RNA, 19 nt, Homo sapiens
  misc_RNA (1)...(19): siRNA sense strand
gggaaaucugugcguucaa

SEQ ID NO: 2380915 - RNA, 19 nt, Homo sapiens
  misc_RNA (1)...(19): siRNA sense strand
cguucaagauccauggcca

SEQ ID NO: 2380916 - RNA, 19 nt, Homo sapiens
  misc_RNA (1)...(19): siRNA sense strand
agaaagucuccuacaucaa

SEQ ID NO: 2380917 - RNA, 19 nt, Homo sapiens
  misc_RNA (1)...(19): siRNA sense strand
aggcagacaugggcagaau

SEQ ID NO: 2380918 - RNA, 19 nt, Homo sapiens
  misc_RNA (1)...(19): siRNA sense strand
ggaagaugagacugaggga

SEQ ID NO: 2380919 - RNA, 19 nt, Homo sapiens
  misc_RNA (1)...(19): siRNA sense strand
gagaagaggaggaagaagc

SEQ ID NO: 2380920 - RNA, 19 nt, Homo sapiens
  misc_RNA (1)...(19): siRNA sense strand
aggcuguggugcucaacaa

SEQ ID NO: 2380921 - RNA, 19 nt, Homo sapiens
  misc_RNA (1)...(19): siRNA sense strand
gcaagaucuaugacagcau

SEQ ID NO: 2380922 - RNA, 19 nt, Homo sapiens
  misc_RNA (1)...(19): siRNA sense strand
agacuaauuacauugggaa

SEQ ID NO: 2380923 - RNA, 19 nt, Homo sapiens
  misc_RNA (1)...(19): siRNA sense strand
agauaaggagcaugucaau

SEQ ID NO: 2380924 - RNA, 19 nt, Homo sapiens
  misc_RNA (1)...(19): siRNA sense strand
agaugagacugagggagaa

SEQ ID NO: 2380925 - RNA, 19 nt, Homo sapiens
  misc_RNA (1)...(19): siRNA sense strand
cauucaucauccaggccua

SEQ ID NO: 2380926 - RNA, 19 nt, Homo sapiens
  misc_RNA (1)...(19): siRNA sense strand
agaccuacucugagaaauc

SEQ ID NO: 2380927 - RNA, 19 nt, Homo sapiens
  misc_RNA (1)...(19): siRNA sense strand
cagacaaaaccgaaaugaa

SEQ ID NO: 2380928 - RNA, 19 nt, Homo sapiens
  misc_RNA (1)...(19): siRNA sense strand
uggaaagccagaaggugau

SEQ ID NO: 2380929 - RNA, 19 nt, Homo sapiens
  misc_RNA (1)...(19): siRNA sense strand
guucaguggucccaagcau

SEQ ID NO: 2380930 - RNA, 19 nt, Homo sapiens
  misc_RNA (1)...(19): siRNA sense strand
gaaaugagcuccagcagug

SEQ ID NO: 2380931 - RNA, 19 nt, Homo sapiens
  misc_RNA (1)...(19): siRNA sense strand
ucaacaagacaucaggaga

SEQ ID NO: 2380932 - RNA, 19 nt, Homo sapiens
  misc_RNA (1)...(19): siRNA sense strand
caacaagacaucaggagag

SEQ ID NO: 2380933 - RNA, 19 nt, Homo sapiens
  misc_RNA (1)...(19): siRNA sense strand
augugaagccaguuugcaa

SEQ ID NO: 2380934 - RNA, 19 nt, Homo sapiens
  misc_RNA (1)...(19): siRNA sense strand
gaggaagaaaugagcucca

SEQ ID NO: 2380935 - RNA, 19 nt, Homo sapiens
  misc_RNA (1)...(19): siRNA sense strand
aggugaaggaugucaacga

SEQ ID NO: 2380936 - RNA, 19 nt, Homo sapiens
  misc_RNA (1)...(19): siRNA sense strand
auaucaagauugugagcac

SEQ ID NO: 2380937 - RNA, 19 nt, Homo sapiens
  misc_RNA (1)...(19): siRNA sense strand
acgucuacgccaagaacaa

SEQ ID NO: 2380938 - RNA, 19 nt, Homo sapiens
  misc_RNA (1)...(19): siRNA sense strand
cagagauacuuccggguca

SEQ ID NO: 2380939 - RNA, 19 nt, Homo sapiens
  misc_RNA (1)...(19): siRNA sense strand
ccucaggugcagaaaguca

SEQ ID NO: 2380940 - RNA, 19 nt, Homo sapiens
  misc_RNA (1)...(19): siRNA sense strand
ugcagaaagucaugcccaa

SEQ ID NO: 2380941 - RNA, 19 nt, Homo sapiens
  misc_RNA (1)...(19): siRNA sense strand
ucaggaacgucuacgccaa

SEQ ID NO: 2380942 - RNA, 19 nt, Homo sapiens
  misc_RNA (1)...(19): siRNA sense strand
uggacgacgugguggccuu

SEQ ID NO: 2380943 - RNA, 19 nt, Homo sapiens
  misc_RNA (1)...(19): siRNA sense strand
agaagaaagccaagcccaa

SEQ ID NO: 2380944 - RNA, 19 nt, Homo sapiens
  misc_RNA (1)...(19): siRNA sense strand
ugaacaaagacaaggucau

SEQ ID NO: 2380945 - RNA, 19 nt, Homo sapiens
  misc_RNA (1)...(19): siRNA sense strand
gacauuaacaagcgggaga

SEQ ID NO: 2380946 - RNA, 19 nt, Homo sapiens
  misc_RNA (1)...(19): siRNA sense strand
cuucaaggacagggagcua

SEQ ID NO: 2380947 - RNA, 19 nt, Homo sapiens
  misc_RNA (1)...(19): siRNA sense strand
aaggaaagaugacgggucu

SEQ ID NO: 2380948 - RNA, 19 nt, Homo sapiens
  misc_RNA (1)...(19): siRNA sense strand
ggguguuagcaaagaagga

SEQ ID NO: 2380949 - RNA, 19 nt, Homo sapiens
  misc_RNA (1)...(19): siRNA sense strand
ccaagaagccucaggaagc

SEQ ID NO: 2380950 - RNA, 19 nt, Homo sapiens
  misc_RNA (1)...(19): siRNA sense strand
agcaauagcagcaacgaca

SEQ ID NO: 2380951 - RNA, 19 nt, Homo sapiens
  misc_RNA (1)...(19): siRNA sense strand
acgugaagaagaaagccaa

SEQ ID NO: 2380952 - RNA, 19 nt, Homo sapiens
  misc_RNA (1)...(19): siRNA sense strand
guccagaagggaagaaaau

SEQ ID NO: 2380953 - RNA, 19 nt, Homo sapiens
  misc_RNA (1)...(19): siRNA sense strand
ggauacugcuggugcguca

SEQ ID NO: 2380954 - RNA, 19 nt, Homo sapiens
  misc_RNA (1)...(19): siRNA sense strand
acgcgaaggcacaggaaaa

SEQ ID NO: 2380955 - RNA, 19 nt, Homo sapiens
  misc_RNA (1)...(19): siRNA sense strand
uggcgaaagaggacggcaa

SEQ ID NO: 2380956 - RNA, 19 nt, Homo sapiens
  misc_RNA (1)...(19): siRNA sense strand
cggcagaacaaaaccaaua

SEQ ID NO: 2380957 - RNA, 19 nt, Homo sapiens
  misc_RNA (1)...(19): siRNA sense strand
gagcaagcccggaaggagu

SEQ ID NO: 2380958 - RNA, 19 nt, Homo sapiens
  misc_RNA (1)...(19): siRNA sense strand
cuucaaacuacuggauaaa

SEQ ID NO: 2380959 - RNA, 19 nt, Homo sapiens
  misc_RNA (1)...(19): siRNA sense strand
agccaaggaaacaaggaua

SEQ ID NO: 2380960 - RNA, 19 nt, Homo sapiens
  misc_RNA (1)...(19): siRNA sense strand
ggaaguauacccaggagca

SEQ ID NO: 2380961 - RNA, 19 nt, Homo sapiens
  misc_RNA (1)...(19): siRNA sense strand
gccucaaggagaugaagaa

SEQ ID NO: 2380962 - RNA, 19 nt, Homo sapiens
  misc_RNA (1)...(19): siRNA sense strand
gguguguggccgaaaggaa

SEQ ID NO: 2380963 - RNA, 19 nt, Homo sapiens
  misc_RNA (1)...(19): siRNA sense strand
aggagaugaagaagauauu

SEQ ID NO: 2380964 - RNA, 19 nt, Homo sapiens
  misc_RNA (1)...(19): siRNA sense strand
aaggagaugaagaagauau

SEQ ID NO: 2380965 - RNA, 19 nt, Homo sapiens
  misc_RNA (1)...(19): siRNA sense strand
ccggaaggaguuucagcaa

SEQ ID NO: 2380966 - RNA, 19 nt, Homo sapiens
  misc_RNA (1)...(19): siRNA sense strand
guuaaaagucggcagaaca

SEQ ID NO: 2380967 - RNA, 19 nt, Homo sapiens
  misc_RNA (1)...(19): siRNA sense strand
ugucacagcuacacgggau

SEQ ID NO: 2380968 - RNA, 19 nt, Homo sapiens
  misc_RNA (1)...(19): siRNA sense strand
agacucagccucaaggaga

SEQ ID NO: 2380969 - RNA, 19 nt, Homo sapiens
  misc_RNA (1)...(19): siRNA sense strand
ucaagagguuccuucgcaa

SEQ ID NO: 2380970 - RNA, 19 nt, Homo sapiens
  misc_RNA (1)...(19): siRNA sense strand
acggcaaagcggacaccaa

SEQ ID NO: 2380971 - RNA, 19 nt, Homo sapiens
  misc_RNA (1)...(19): siRNA sense strand
cucaaggagaugaagaaga

SEQ ID NO: 2380972 - RNA, 19 nt, Homo sapiens
  misc_RNA (1)...(19): siRNA sense strand
uggaucaagauaaagacaa

SEQ ID NO: 2380973 - RNA, 19 nt, Homo sapiens
  misc_RNA (1)...(19): siRNA sense strand
aggacaagguacaggaaac

SEQ ID NO: 2380974 - RNA, 19 nt, Homo sapiens
  misc_RNA (1)...(19): siRNA sense strand
acauuaaagacaugcccaa

SEQ ID NO: 2380975 - RNA, 19 nt, Homo sapiens
  misc_RNA (1)...(19): siRNA sense strand
cagaaaacagccuggggaa

SEQ ID NO: 2380976 - RNA, 19 nt, Homo sapiens
  misc_RNA (1)...(19): siRNA sense strand
cucaagaagcucuggguca

SEQ ID NO: 2380977 - RNA, 19 nt, Homo sapiens
  misc_RNA (1)...(19): siRNA sense strand
cugguggcuucgagaguau

SEQ ID NO: 2380978 - RNA, 19 nt, Homo sapiens
  misc_RNA (1)...(19): siRNA sense strand
gaacuuaagugucggacuc

SEQ ID NO: 2380979 - RNA, 19 nt, Homo sapiens
  misc_RNA (1)...(19): siRNA sense strand
cugaggacacaacgcgaaa

SEQ ID NO: 2380980 - RNA, 19 nt, Homo sapiens
  misc_RNA (1)...(19): siRNA sense strand
ccacggagaucucgccuga

SEQ ID NO: 2380981 - RNA, 19 nt, Homo sapiens
  misc_RNA (1)...(19): siRNA sense strand
ucaaccucauggagaacaa

SEQ ID NO: 2380982 - RNA, 19 nt, Homo sapiens
  misc_RNA (1)...(19): siRNA sense strand
uggcaguacccgcgacaga

SEQ ID NO: 2380983 - RNA, 19 nt, Homo sapiens
  misc_RNA (1)...(19): siRNA sense strand
accucaaccucauggagaa

SEQ ID NO: 2380984 - RNA, 19 nt, Homo sapiens
  misc_RNA (1)...(19): siRNA sense strand
ugaagugguugcugcccaa

SEQ ID NO: 2380985 - RNA, 19 nt, Homo sapiens
  misc_RNA (1)...(19): siRNA sense strand
ggaguauaucucugaggga

SEQ ID NO: 2380986 - RNA, 19 nt, Homo sapiens
  misc_RNA (1)...(19): siRNA sense strand
guguacacaugcaugguga

SEQ ID NO: 2380987 - RNA, 19 nt, Homo sapiens
  misc_RNA (1)...(19): siRNA sense strand
augaagaccaccaagauca

SEQ ID NO: 2380988 - RNA, 19 nt, Homo sapiens
  misc_RNA (1)...(19): siRNA sense strand
agacccauaccaaggacaa

SEQ ID NO: 2380989 - RNA, 19 nt, Homo sapiens
  misc_RNA (1)...(19): siRNA sense strand
aggaaauagaugagaauga

SEQ ID NO: 2380990 - RNA, 19 nt, Homo sapiens
  misc_RNA (1)...(19): siRNA sense strand
cggaaauggcacugaugaa

SEQ ID NO: 2380991 - RNA, 19 nt, Homo sapiens
  misc_RNA (1)...(19): siRNA sense strand
agaggaaauagaugagaau

SEQ ID NO: 2380992 - RNA, 19 nt, Homo sapiens
  misc_RNA (1)...(19): siRNA sense strand
acuuugaggaggagggaga

SEQ ID NO: 2380993 - RNA, 19 nt, Homo sapiens
  misc_RNA (1)...(19): siRNA sense strand
gaauagaauuugaucccau

SEQ ID NO: 2380994 - RNA, 19 nt, Homo sapiens
  misc_RNA (1)...(19): siRNA sense strand
gaaauauucagaagcggaa

SEQ ID NO: 2380995 - RNA, 19 nt, Homo sapiens
  misc_RNA (1)...(19): siRNA sense strand
gcaucuacuucgugggucu

SEQ ID NO: 2380996 - RNA, 19 nt, Homo sapiens
  misc_RNA (1)...(19): siRNA sense strand
cugaaccagaagaggaaau

SEQ ID NO: 2380997 - RNA, 19 nt, Homo sapiens
  misc_RNA (1)...(19): siRNA sense strand
aagugaaaguagagaagac

SEQ ID NO: 2380998 - RNA, 19 nt, Homo sapiens
  misc_RNA (1)...(19): siRNA sense strand
cugaugaaacauuggaagu

SEQ ID NO: 2380999 - RNA, 19 nt, Homo sapiens
  misc_RNA (1)...(19): siRNA sense strand
uacaagacuuugaggagga

SEQ ID NO: 2381000 - RNA, 19 nt, Homo sapiens
  misc_RNA (1)...(19): siRNA sense strand
auucuggagauuugugaua

SEQ ID NO: 2381001 - RNA, 19 nt, Homo sapiens
  misc_RNA (1)...(19): siRNA sense strand
gcuggaugagagagguuau

SEQ ID NO: 2381002 - RNA, 19 nt, Homo sapiens
  misc_RNA (1)...(19): siRNA sense strand
ggaaauugauccugugacc

SEQ ID NO: 2381003 - RNA, 19 nt, Homo sapiens
  misc_RNA (1)...(19): siRNA sense strand
agauuaaagugauuccuga

SEQ ID NO: 2381004 - RNA, 19 nt, Homo sapiens
  misc_RNA (1)...(19): siRNA sense strand
aaccagaagaggaaauaga

SEQ ID NO: 2381005 - RNA, 19 nt, Homo sapiens
  misc_RNA (1)...(19): siRNA sense strand
gaaugaagaaauuaccaca

SEQ ID NO: 2381006 - RNA, 19 nt, Homo sapiens
  misc_RNA (1)...(19): siRNA sense strand
ccauguucauuguggccua

SEQ ID NO: 2381007 - RNA, 19 nt, Homo sapiens
  misc_RNA (1)...(19): siRNA sense strand
gcuacuucaacgagaacuu

SEQ ID NO: 2381008 - RNA, 19 nt, Homo sapiens
  misc_RNA (1)...(19): siRNA sense strand
gugaccugcuggugggcau

SEQ ID NO: 2381009 - RNA, 19 nt, Homo sapiens
  misc_RNA (1)...(19): siRNA sense strand
ggacuaacacugaggccac

SEQ ID NO: 2381010 - RNA, 19 nt, Homo sapiens
  misc_RNA (1)...(19): siRNA sense strand
agucaaggccagagggaaa

SEQ ID NO: 2381011 - RNA, 19 nt, Homo sapiens
  misc_RNA (1)...(19): siRNA sense strand
agcugaaggucaagagaaa

SEQ ID NO: 2381012 - RNA, 19 nt, Homo sapiens
  misc_RNA (1)...(19): siRNA sense strand
gugcaagcagugugagaaa

SEQ ID NO: 2381013 - RNA, 19 nt, Homo sapiens
  misc_RNA (1)...(19): siRNA sense strand
gugcaaggauugugagcga

SEQ ID NO: 2381014 - RNA, 19 nt, Homo sapiens
  misc_RNA (1)...(19): siRNA sense strand
gcaguaagcucaaggagga

SEQ ID NO: 2381015 - RNA, 19 nt, Homo sapiens
  misc_RNA (1)...(19): siRNA sense strand
guguaaugugugugggcaa

SEQ ID NO: 2381016 - RNA, 19 nt, Homo sapiens
  misc_RNA (1)...(19): siRNA sense strand
ggauacacucaaaggagaa

SEQ ID NO: 2381017 - RNA, 19 nt, Homo sapiens
  misc_RNA (1)...(19): siRNA sense strand
uuguagagaaugugggcaa

SEQ ID NO: 2381018 - RNA, 19 nt, Homo sapiens
  misc_RNA (1)...(19): siRNA sense strand
aggugacacuggagaacua

SEQ ID NO: 2381019 - RNA, 19 nt, Homo sapiens
  misc_RNA (1)...(19): siRNA sense strand
cuguagugaaugugggcaa

SEQ ID NO: 2381020 - RNA, 19 nt, Homo sapiens
  misc_RNA (1)...(19): siRNA sense strand
aagcaaaguuuuagcguga

SEQ ID NO: 2381021 - RNA, 19 nt, Homo sapiens
  misc_RNA (1)...(19): siRNA sense strand
gggcaaggcuucagcugga

SEQ ID NO: 2381022 - RNA, 19 nt, Homo sapiens
  misc_RNA (1)...(19): siRNA sense strand
caucaggcggcuagagcaa

SEQ ID NO: 2381023 - RNA, 19 nt, Homo sapiens
  misc_RNA (1)...(19): siRNA sense strand
agggaaaauccuacagaaa

SEQ ID NO: 2381024 - RNA, 19 nt, Homo sapiens
  misc_RNA (1)...(19): siRNA sense strand
cugaaggucaagagaaaga

SEQ ID NO: 2381025 - RNA, 19 nt, Homo sapiens
  misc_RNA (1)...(19): siRNA sense strand
gugcaaggacuguggacga

SEQ ID NO: 2381026 - RNA, 19 nt, Homo sapiens
  misc_RNA (1)...(19): siRNA sense strand
guacagggaguguggguga

SEQ ID NO: 2381027 - RNA, 19 nt, Homo sapiens
  misc_RNA (1)...(19): siRNA sense strand
gcaaaguuuuagcgugaaa

SEQ ID NO: 2381028 - RNA, 19 nt, Homo sapiens
  misc_RNA (1)...(19): siRNA sense strand
cugcagggauugugggcga

SEQ ID NO: 2381029 - RNA, 19 nt, Homo sapiens
  misc_RNA (1)...(19): siRNA sense strand
gggcaagacuucagccgga

SEQ ID NO: 2381030 - RNA, 19 nt, Homo sapiens
  misc_RNA (1)...(19): siRNA sense strand
ggauuuauucagaagucaa

SEQ ID NO: 2381031 - RNA, 19 nt, Homo sapiens
  misc_RNA (1)...(19): siRNA sense strand
ucacacacucagaggagaa

SEQ ID NO: 2381032 - RNA, 19 nt, Homo sapiens
  misc_RNA (1)...(19): siRNA sense strand
cggauacacucaaaggaga

SEQ ID NO: 2381033 - RNA, 19 nt, Homo sapiens
  misc_RNA (1)...(19): siRNA sense strand
gggaggugacacuggagaa

SEQ ID NO: 2381034 - RNA, 19 nt, Homo sapiens
  misc_RNA (1)...(19): siRNA sense strand
gggcuuuagagaugaguca

SEQ ID NO: 2381035 - RNA, 19 nt, Homo sapiens
  misc_RNA (1)...(19): siRNA sense strand
gcaugaaagaauacacaca

SEQ ID NO: 2381036 - RNA, 19 nt, Homo sapiens
  misc_RNA (1)...(19): siRNA sense strand
gugcaaggagugugggcga

SEQ ID NO: 2381037 - RNA, 19 nt, Homo sapiens
  misc_RNA (1)...(19): siRNA sense strand
ggauugugggcgaggcuuu

SEQ ID NO: 2381038 - RNA, 19 nt, Homo sapiens
  misc_RNA (1)...(19): siRNA sense strand
gugcaagguguguggacga

SEQ ID NO: 2381039 - RNA, 19 nt, Homo sapiens
  misc_RNA (1)...(19): siRNA sense strand
ccucauacaacaagcacuu

SEQ ID NO: 2381040 - RNA, 19 nt, Homo sapiens
  misc_RNA (1)...(19): siRNA sense strand
acucaggagagaagccuua

SEQ ID NO: 2381041 - RNA, 19 nt, Homo sapiens
  misc_RNA (1)...(19): siRNA sense strand
acucagaggagaagccuuu

SEQ ID NO: 2381042 - RNA, 19 nt, Homo sapiens
  misc_RNA (1)...(19): siRNA sense strand
aguuuuaguuugaaggcaa

SEQ ID NO: 2381043 - RNA, 19 nt, Homo sapiens
  misc_RNA (1)...(19): siRNA sense strand
ccuuauggaugucgggagu

SEQ ID NO: 2381044 - RNA, 19 nt, Homo sapiens
  misc_RNA (1)...(19): siRNA sense strand
gggaaaauccuacagaaau

SEQ ID NO: 2381045 - RNA, 19 nt, Homo sapiens
  misc_RNA (1)...(19): siRNA sense strand
agaaugugggcaaggauuu

SEQ ID NO: 2381046 - RNA, 19 nt, Homo sapiens
  misc_RNA (1)...(19): siRNA sense strand
agccggaagaugaugguaa

SEQ ID NO: 2381047 - RNA, 19 nt, Homo sapiens
  misc_RNA (1)...(19): siRNA sense strand
aggcuauacuaauaaguca

SEQ ID NO: 2381048 - RNA, 19 nt, Homo sapiens
  misc_RNA (1)...(19): siRNA sense strand
ucacugugcaugaaagaau

SEQ ID NO: 2381049 - RNA, 19 nt, Homo sapiens
  misc_RNA (1)...(19): siRNA sense strand
cagcugaaggucaagagaa

SEQ ID NO: 2381050 - RNA, 19 nt, Homo sapiens
  misc_RNA (1)...(19): siRNA sense strand
agcucaaggaggaggaaca

SEQ ID NO: 2381051 - RNA, 19 nt, Homo sapiens
  misc_RNA (1)...(19): siRNA sense strand
ggagugugggcgaggcuau

SEQ ID NO: 2381052 - RNA, 19 nt, Homo sapiens
  misc_RNA (1)...(19): siRNA sense strand
gggcaaggauuuaucugga

SEQ ID NO: 2381053 - RNA, 19 nt, Homo sapiens
  misc_RNA (1)...(19): siRNA sense strand
aggccaaccuccucagaca

SEQ ID NO: 2381054 - RNA, 19 nt, Homo sapiens
  misc_RNA (1)...(19): siRNA sense strand
gguguguggacgaggcuau

SEQ ID NO: 2381055 - RNA, 19 nt, Homo sapiens
  misc_RNA (1)...(19): siRNA sense strand
ugaaugugggcaaggauuu

SEQ ID NO: 2381056 - RNA, 19 nt, Homo sapiens
  misc_RNA (1)...(19): siRNA sense strand
ggagugugggcgaagguuu

SEQ ID NO: 2381057 - RNA, 19 nt, Homo sapiens
  misc_RNA (1)...(19): siRNA sense strand
ggagugugggcgaagguuu

SEQ ID NO: 2381058 - RNA, 19 nt, Homo sapiens
  misc_RNA (1)...(19): siRNA sense strand
ccacaaagucagagaccca

SEQ ID NO: 2381059 - RNA, 19 nt, Homo sapiens
  misc_RNA (1)...(19): siRNA sense strand
gagaaaacaucaagcaaau

SEQ ID NO: 2381060 - RNA, 19 nt, Homo sapiens
  misc_RNA (1)...(19): siRNA sense strand
uggaaaggaacuugaggaa

SEQ ID NO: 2381061 - RNA, 19 nt, Homo sapiens
  misc_RNA (1)...(19): siRNA sense strand
gacaaaugcuggacgagaa

SEQ ID NO: 2381062 - RNA, 19 nt, Homo sapiens
  misc_RNA (1)...(19): siRNA sense strand
ggaugaaucaccagggaca

SEQ ID NO: 2381063 - RNA, 19 nt, Homo sapiens
  misc_RNA (1)...(19): siRNA sense strand
ggagaaaacaucaagcaaa

SEQ ID NO: 2381064 - RNA, 19 nt, Homo sapiens
  misc_RNA (1)...(19): siRNA sense strand
ggagcaaacuggugcacga

SEQ ID NO: 2381065 - RNA, 19 nt, Homo sapiens
  misc_RNA (1)...(19): siRNA sense strand
cagaaacagccaaggucaa

SEQ ID NO: 2381066 - RNA, 19 nt, Homo sapiens
  misc_RNA (1)...(19): siRNA sense strand
cagacaaaucagaaaucaa

SEQ ID NO: 2381067 - RNA, 19 nt, Homo sapiens
  misc_RNA (1)...(19): siRNA sense strand
uucaaaggcuggagagaca

SEQ ID NO: 2381068 - RNA, 19 nt, Homo sapiens
  misc_RNA (1)...(19): siRNA sense strand
agugagaagucuaggaaac

SEQ ID NO: 2381069 - RNA, 19 nt, Homo sapiens
  misc_RNA (1)...(19): siRNA sense strand
gaaaggaacuugaggaagc

SEQ ID NO: 2381070 - RNA, 19 nt, Homo sapiens
  misc_RNA (1)...(19): siRNA sense strand
gggaaggauccaagagucu

SEQ ID NO: 2381071 - RNA, 19 nt, Homo sapiens
  misc_RNA (1)...(19): siRNA sense strand
uggacauguuccuuagaaa

SEQ ID NO: 2381072 - RNA, 19 nt, Homo sapiens
  misc_RNA (1)...(19): siRNA sense strand
guggcuaacgccuggguaa

SEQ ID NO: 2381073 - RNA, 19 nt, Homo sapiens
  misc_RNA (1)...(19): siRNA sense strand
acaaaugcuggacgagaaa

SEQ ID NO: 2381074 - RNA, 19 nt, Homo sapiens
  misc_RNA (1)...(19): siRNA sense strand
aggugaaguuccagcuaga

SEQ ID NO: 2381075 - RNA, 19 nt, Homo sapiens
  misc_RNA (1)...(19): siRNA sense strand
caagucaggccaagggcaa

SEQ ID NO: 2381076 - RNA, 19 nt, Homo sapiens
  misc_RNA (1)...(19): siRNA sense strand
auucaaagggagacuacaa

SEQ ID NO: 2381077 - RNA, 19 nt, Homo sapiens
  misc_RNA (1)...(19): siRNA sense strand
ggagacaacuagaagguag

SEQ ID NO: 2381078 - RNA, 19 nt, Homo sapiens
  misc_RNA (1)...(19): siRNA sense strand
ugcaagagccaaaggccaa

SEQ ID NO: 2381079 - RNA, 19 nt, Homo sapiens
  misc_RNA (1)...(19): siRNA sense strand
gggcaaauucugggugaga

SEQ ID NO: 2381080 - RNA, 19 nt, Homo sapiens
  misc_RNA (1)...(19): siRNA sense strand
cgaagguaaaucagcacaa

SEQ ID NO: 2381081 - RNA, 19 nt, Homo sapiens
  misc_RNA (1)...(19): siRNA sense strand
cagaaguugagguggacau

SEQ ID NO: 2381082 - RNA, 19 nt, Homo sapiens
  misc_RNA (1)...(19): siRNA sense strand
ggacaaaugcuggacgaga

SEQ ID NO: 2381083 - RNA, 19 nt, Homo sapiens
  misc_RNA (1)...(19): siRNA sense strand
gagugagaagucuaggaaa

SEQ ID NO: 2381084 - RNA, 19 nt, Homo sapiens
  misc_RNA (1)...(19): siRNA sense strand
agguaaaucagcacaaaca

SEQ ID NO: 2381085 - RNA, 19 nt, Homo sapiens
  misc_RNA (1)...(19): siRNA sense strand
gugaggaugugcaugguuu

SEQ ID NO: 2381086 - RNA, 19 nt, Homo sapiens
  misc_RNA (1)...(19): siRNA sense strand
uggaauggccacaaaguca

SEQ ID NO: 2381087 - RNA, 19 nt, Homo sapiens
  misc_RNA (1)...(19): siRNA sense strand
aggaaacccaacuuagaaa

SEQ ID NO: 2381088 - RNA, 19 nt, Homo sapiens
  misc_RNA (1)...(19): siRNA sense strand
ccagaaaagcacuuaaauu

SEQ ID NO: 2381089 - RNA, 19 nt, Homo sapiens
  misc_RNA (1)...(19): siRNA sense strand
aggcacagaaggugaaguu

SEQ ID NO: 2381090 - RNA, 19 nt, Homo sapiens
  misc_RNA (1)...(19): siRNA sense strand
ugggaaagccugugugaac

SEQ ID NO: 2381091 - RNA, 19 nt, Homo sapiens
  misc_RNA (1)...(19): siRNA sense strand
agacagacaaaucagaaau

SEQ ID NO: 2381092 - RNA, 19 nt, Homo sapiens
  misc_RNA (1)...(19): siRNA sense strand
gauucagaacacuggagua

SEQ ID NO: 2381093 - RNA, 19 nt, Homo sapiens
  misc_RNA (1)...(19): siRNA sense strand
cccaacagagacagacaaa

SEQ ID NO: 2381094 - RNA, 19 nt, Homo sapiens
  misc_RNA (1)...(19): siRNA sense strand
gcacugucuucuuugggaa

SEQ ID NO: 2381095 - RNA, 19 nt, Homo sapiens
  misc_RNA (1)...(19): siRNA sense strand
gcuccagggaccagcaaaa

SEQ ID NO: 2381096 - RNA, 19 nt, Homo sapiens
  misc_RNA (1)...(19): siRNA sense strand
agaauaaagugcaagcucu

SEQ ID NO: 2381097 - RNA, 19 nt, Homo sapiens
  misc_RNA (1)...(19): siRNA sense strand
gcuccuuccagaugggcaa

SEQ ID NO: 2381098 - RNA, 19 nt, Homo sapiens
  misc_RNA (1)...(19): siRNA sense strand
ugggagagaacucgaaaca

SEQ ID NO: 2381099 - RNA, 19 nt, Homo sapiens
  misc_RNA (1)...(19): siRNA sense strand
agucagagacccagccuca

SEQ ID NO: 2381100 - RNA, 19 nt, Homo sapiens
  misc_RNA (1)...(19): siRNA sense strand
cuaaaucauuggaugcuga

SEQ ID NO: 2381101 - RNA, 19 nt, Homo sapiens
  misc_RNA (1)...(19): siRNA sense strand
ggagagaacucgaaacagc

SEQ ID NO: 2381102 - RNA, 19 nt, Homo sapiens
  misc_RNA (1)...(19): siRNA sense strand
cacaagagugagaagucua

SEQ ID NO: 2381103 - RNA, 19 nt, Homo sapiens
  misc_RNA (1)...(19): siRNA sense strand
caauggcaagucugagaaa

SEQ ID NO: 2381104 - RNA, 19 nt, Homo sapiens
  misc_RNA (1)...(19): siRNA sense strand
aguuccagcuagagaggga

SEQ ID NO: 2381105 - RNA, 19 nt, Homo sapiens
  misc_RNA (1)...(19): siRNA sense strand
gcaaacuggugcacgagga

SEQ ID NO: 2381106 - RNA, 19 nt, Homo sapiens
  misc_RNA (1)...(19): siRNA sense strand
caugacggcaguuggacaa

SEQ ID NO: 2381107 - RNA, 19 nt, Homo sapiens
  misc_RNA (1)...(19): siRNA sense strand
uuauggaggagguuguuaa

SEQ ID NO: 2381108 - RNA, 19 nt, Homo sapiens
  misc_RNA (1)...(19): siRNA sense strand
ccuaggcucuggcaggaaa

SEQ ID NO: 2381109 - RNA, 19 nt, Homo sapiens
  misc_RNA (1)...(19): siRNA sense strand
ccucagaagcucucagauc

SEQ ID NO: 2381110 - RNA, 19 nt, Homo sapiens
  misc_RNA (1)...(19): siRNA sense strand
ccucgaagguaaaucagca

SEQ ID NO: 2381111 - RNA, 19 nt, Homo sapiens
  misc_RNA (1)...(19): siRNA sense strand
guacauugggagagagaua

SEQ ID NO: 2381112 - RNA, 19 nt, Homo sapiens
  misc_RNA (1)...(19): siRNA sense strand
agauaaagguacagaugaa

SEQ ID NO: 2381113 - RNA, 19 nt, Homo sapiens
  misc_RNA (1)...(19): siRNA sense strand
ccuuagaacaggagagaau

SEQ ID NO: 2381114 - RNA, 19 nt, Homo sapiens
  misc_RNA (1)...(19): siRNA sense strand
aaggaaagaaugagguuaa

SEQ ID NO: 2381115 - RNA, 19 nt, Homo sapiens
  misc_RNA (1)...(19): siRNA sense strand
ggaugaugugauugagaaa

SEQ ID NO: 2381116 - RNA, 19 nt, Homo sapiens
  misc_RNA (1)...(19): siRNA sense strand
gcaaauuguuggaaagcca

SEQ ID NO: 2381117 - RNA, 19 nt, Homo sapiens
  misc_RNA (1)...(19): siRNA sense strand
agagagaagacaagaauau

SEQ ID NO: 2381118 - RNA, 19 nt, Homo sapiens
  misc_RNA (1)...(19): siRNA sense strand
gguauuaaguggaucaaaa

SEQ ID NO: 2381119 - RNA, 19 nt, Homo sapiens
  misc_RNA (1)...(19): siRNA sense strand
ucaaaguacaugucagaaa

SEQ ID NO: 2381120 - RNA, 19 nt, Homo sapiens
  misc_RNA (1)...(19): siRNA sense strand
gcaaaauaggcuagaaaau

SEQ ID NO: 2381121 - RNA, 19 nt, Homo sapiens
  misc_RNA (1)...(19): siRNA sense strand
ugaagaagaagaaggagaa

SEQ ID NO: 2381122 - RNA, 19 nt, Homo sapiens
  misc_RNA (1)...(19): siRNA sense strand
agguggagcugguggaaga

SEQ ID NO: 2381123 - RNA, 19 nt, Homo sapiens
  misc_RNA (1)...(19): siRNA sense strand
gagaaauaacuuacagaga

SEQ ID NO: 2381124 - RNA, 19 nt, Homo sapiens
  misc_RNA (1)...(19): siRNA sense strand
ugacauuccaguagagcaa

SEQ ID NO: 2381125 - RNA, 19 nt, Homo sapiens
  misc_RNA (1)...(19): siRNA sense strand
aggauggaaucaagcaaua

SEQ ID NO: 2381126 - RNA, 19 nt, Homo sapiens
  misc_RNA (1)...(19): siRNA sense strand
ggucagaagagauagaaca

SEQ ID NO: 2381127 - RNA, 19 nt, Homo sapiens
  misc_RNA (1)...(19): siRNA sense strand
gagagauauugguggcuau

SEQ ID NO: 2381128 - RNA, 19 nt, Homo sapiens
  misc_RNA (1)...(19): siRNA sense strand
cgaaaucaaaggaaggcaa

SEQ ID NO: 2381129 - RNA, 19 nt, Homo sapiens
  misc_RNA (1)...(19): siRNA sense strand
ggucaaaguacaugucaga

SEQ ID NO: 2381130 - RNA, 19 nt, Homo sapiens
  misc_RNA (1)...(19): siRNA sense strand
cagaagaagaauuugaaga

SEQ ID NO: 2381131 - RNA, 19 nt, Homo sapiens
  misc_RNA (1)...(19): siRNA sense strand
acagaaggcugaaaagaaa

SEQ ID NO: 2381132 - RNA, 19 nt, Homo sapiens
  misc_RNA (1)...(19): siRNA sense strand
uggaaagccaguuggagaa

SEQ ID NO: 2381133 - RNA, 19 nt, Homo sapiens
  misc_RNA (1)...(19): siRNA sense strand
gguacagaugaaagacaua

SEQ ID NO: 2381134 - RNA, 19 nt, Homo sapiens
  misc_RNA (1)...(19): siRNA sense strand
uugaagaagaagaaggaga

SEQ ID NO: 2381135 - RNA, 19 nt, Homo sapiens
  misc_RNA (1)...(19): siRNA sense strand
gagaggagcaauucagcaa

SEQ ID NO: 2381136 - RNA, 19 nt, Homo sapiens
  misc_RNA (1)...(19): siRNA sense strand
ucgcaaagcauuauugaau

SEQ ID NO: 2381137 - RNA, 19 nt, Homo sapiens
  misc_RNA (1)...(19): siRNA sense strand
guucaaacuacaaaggaga

SEQ ID NO: 2381138 - RNA, 19 nt, Homo sapiens
  misc_RNA (1)...(19): siRNA sense strand
ggauagaagauacgcuuau

SEQ ID NO: 2381139 - RNA, 19 nt, Homo sapiens
  misc_RNA (1)...(19): siRNA sense strand
cugcagaauacaagcauuu

SEQ ID NO: 2381140 - RNA, 19 nt, Homo sapiens
  misc_RNA (1)...(19): siRNA sense strand
cagaagagauagaacaaac

SEQ ID NO: 2381141 - RNA, 19 nt, Homo sapiens
  misc_RNA (1)...(19): siRNA sense strand
agaaagaagaauucagcuu

SEQ ID NO: 2381142 - RNA, 19 nt, Homo sapiens
  misc_RNA (1)...(19): siRNA sense strand
gaggacaccacuugugaaa

SEQ ID NO: 2381143 - RNA, 19 nt, Homo sapiens
  misc_RNA (1)...(19): siRNA sense strand
gugcaaaauaggcuagaaa

SEQ ID NO: 2381144 - RNA, 19 nt, Homo sapiens
  misc_RNA (1)...(19): siRNA sense strand
ccaguuacuucaagacaau

SEQ ID NO: 2381145 - RNA, 19 nt, Homo sapiens
  misc_RNA (1)...(19): siRNA sense strand
uguaaggaaaggaaagaau

SEQ ID NO: 2381146 - RNA, 19 nt, Homo sapiens
  misc_RNA (1)...(19): siRNA sense strand
ccgaugaagaugagaccau

SEQ ID NO: 2381147 - RNA, 19 nt, Homo sapiens
  misc_RNA (1)...(19): siRNA sense strand
ggacuuaugacauuggcaa

SEQ ID NO: 2381148 - RNA, 19 nt, Homo sapiens
  misc_RNA (1)...(19): siRNA sense strand
ccaagaaagcugaggacac

SEQ ID NO: 2381149 - RNA, 19 nt, Homo sapiens
  misc_RNA (1)...(19): siRNA sense strand
ggaguucacccuaggacaa

SEQ ID NO: 2381150 - RNA, 19 nt, Homo sapiens
  misc_RNA (1)...(19): siRNA sense strand
ugaaauuggaacuggcauu

SEQ ID NO: 2381151 - RNA, 19 nt, Homo sapiens
  misc_RNA (1)...(19): siRNA sense strand
uagaaaggaguuugaaaga

SEQ ID NO: 2381152 - RNA, 19 nt, Homo sapiens
  misc_RNA (1)...(19): siRNA sense strand
gcaaaaccaaggaaggaua

SEQ ID NO: 2381153 - RNA, 19 nt, Homo sapiens
  misc_RNA (1)...(19): siRNA sense strand
aagaaggagaagaagaaga

SEQ ID NO: 2381154 - RNA, 19 nt, Homo sapiens
  misc_RNA (1)...(19): siRNA sense strand
uggaagacaucaaagacau

SEQ ID NO: 2381155 - RNA, 19 nt, Homo sapiens
  misc_RNA (1)...(19): siRNA sense strand
gucagaagagauagaacaa

SEQ ID NO: 2381156 - RNA, 19 nt, Homo sapiens
  misc_RNA (1)...(19): siRNA sense strand
auauagaagccuuagaaca

SEQ ID NO: 2381157 - RNA, 19 nt, Homo sapiens
  misc_RNA (1)...(19): siRNA sense strand
aggaaagaaugagguuaaa

SEQ ID NO: 2381158 - RNA, 19 nt, Homo sapiens
  misc_RNA (1)...(19): siRNA sense strand
uugacacagcagaggaaua

SEQ ID NO: 2381159 - RNA, 19 nt, Homo sapiens
  misc_RNA (1)...(19): siRNA sense strand
agacugucauccagaagaa

SEQ ID NO: 2381160 - RNA, 19 nt, Homo sapiens
  misc_RNA (1)...(19): siRNA sense strand
gaugaagaugagaccauua

SEQ ID NO: 2381161 - RNA, 19 nt, Homo sapiens
  misc_RNA (1)...(19): siRNA sense strand
gugucucagucgugaagaa

SEQ ID NO: 2381162 - RNA, 19 nt, Homo sapiens
  misc_RNA (1)...(19): siRNA sense strand
gucagaagauaaagguaca

SEQ ID NO: 2381163 - RNA, 19 nt, Homo sapiens
  misc_RNA (1)...(19): siRNA sense strand
agacauagcagaagagcuc

SEQ ID NO: 2381164 - RNA, 19 nt, Homo sapiens
  misc_RNA (1)...(19): siRNA sense strand
caguauuccaccagcuuua

SEQ ID NO: 2381165 - RNA, 19 nt, Homo sapiens
  misc_RNA (1)...(19): siRNA sense strand
auggauauugagagguuaa

SEQ ID NO: 2381166 - RNA, 19 nt, Homo sapiens
  misc_RNA (1)...(19): siRNA sense strand
caacaaacuuaaaucacca

SEQ ID NO: 2381167 - RNA, 19 nt, Homo sapiens
  misc_RNA (1)...(19): siRNA sense strand
cucuaaacgaacagaauau

SEQ ID NO: 2381168 - RNA, 19 nt, Homo sapiens
  misc_RNA (1)...(19): siRNA sense strand
cagcacgucagaagauaaa

SEQ ID NO: 2381169 - RNA, 19 nt, Homo sapiens
  misc_RNA (1)...(19): siRNA sense strand
gagaaagagaagcagcaga

SEQ ID NO: 2381170 - RNA, 19 nt, Homo sapiens
  misc_RNA (1)...(19): siRNA sense strand
ccggcauggaucaggagaa

SEQ ID NO: 2381171 - RNA, 19 nt, Homo sapiens
  misc_RNA (1)...(19): siRNA sense strand
ccaccauccuugcuggaga

SEQ ID NO: 2381172 - RNA, 19 nt, Homo sapiens
  misc_RNA (1)...(19): siRNA sense strand
gggaacagcuacuggcgcu

SEQ ID NO: 2381173 - RNA, 19 nt, Homo sapiens
  misc_RNA (1)...(19): siRNA sense strand
gagacaucaaaguuaagaa

SEQ ID NO: 2381174 - RNA, 19 nt, Homo sapiens
  misc_RNA (1)...(19): siRNA sense strand
agcaagaacaagaggacaa

SEQ ID NO: 2381175 - RNA, 19 nt, Homo sapiens
  misc_RNA (1)...(19): siRNA sense strand
ugcagaaauucaugggaga

SEQ ID NO: 2381176 - RNA, 19 nt, Homo sapiens
  misc_RNA (1)...(19): siRNA sense strand
cagauaaugauguucggaa

SEQ ID NO: 2381177 - RNA, 19 nt, Homo sapiens
  misc_RNA (1)...(19): siRNA sense strand
aagaaaagcgccagcgaga

SEQ ID NO: 2381178 - RNA, 19 nt, Homo sapiens
  misc_RNA (1)...(19): siRNA sense strand
gagaauggucuuugcagca

SEQ ID NO: 2381179 - RNA, 19 nt, Homo sapiens
  misc_RNA (1)...(19): siRNA sense strand
aguuugugcaucugugaaa

SEQ ID NO: 2381180 - RNA, 19 nt, Homo sapiens
  misc_RNA (1)...(19): siRNA sense strand
caaaucaacccacgggaga

SEQ ID NO: 2381181 - RNA, 19 nt, Homo sapiens
  misc_RNA (1)...(19): siRNA sense strand
aauucaugggagaggauuu

SEQ ID NO: 2381182 - RNA, 19 nt, Homo sapiens
  misc_RNA (1)...(19): siRNA sense strand
agcugaggcuccaggaaga

SEQ ID NO: 2381183 - RNA, 19 nt, Homo sapiens
  misc_RNA (1)...(19): siRNA sense strand
aagaacaagaggacaacuu

SEQ ID NO: 2381184 - RNA, 19 nt, Homo sapiens
  misc_RNA (1)...(19): siRNA sense strand
ucaugugcauauuggaaaa

SEQ ID NO: 2381185 - RNA, 19 nt, Homo sapiens
  misc_RNA (1)...(19): siRNA sense strand
ccaucgagucaguggaaag

SEQ ID NO: 2381186 - RNA, 19 nt, Homo sapiens
  misc_RNA (1)...(19): siRNA sense strand
aggagcagcauuugcagaa

SEQ ID NO: 2381187 - RNA, 19 nt, Homo sapiens
  misc_RNA (1)...(19): siRNA sense strand
agcagcaaauccaggagaa

SEQ ID NO: 2381188 - RNA, 19 nt, Homo sapiens
  misc_RNA (1)...(19): siRNA sense strand
ggauagaaugacagaagau

SEQ ID NO: 2381189 - RNA, 19 nt, Homo sapiens
  misc_RNA (1)...(19): siRNA sense strand
uguuaaagaaacugagaca

SEQ ID NO: 2381190 - RNA, 19 nt, Homo sapiens
  misc_RNA (1)...(19): siRNA sense strand
gcaguggugucaagggcua

SEQ ID NO: 2381191 - RNA, 19 nt, Homo sapiens
  misc_RNA (1)...(19): siRNA sense strand
agaaagagaauguggucca

SEQ ID NO: 2381192 - RNA, 19 nt, Homo sapiens
  misc_RNA (1)...(19): siRNA sense strand
ccaucaguggacagaaaua

SEQ ID NO: 2381193 - RNA, 19 nt, Homo sapiens
  misc_RNA (1)...(19): siRNA sense strand
aggaaauugaacagcgauu

SEQ ID NO: 2381194 - RNA, 19 nt, Homo sapiens
  misc_RNA (1)...(19): siRNA sense strand
cagccaacuuagagauguu

SEQ ID NO: 2381195 - RNA, 19 nt, Homo sapiens
  misc_RNA (1)...(19): siRNA sense strand
ccagaauggaagaaagacu

SEQ ID NO: 2381196 - RNA, 19 nt, Homo sapiens
  misc_RNA (1)...(19): siRNA sense strand
ccaacuuagagauguuuaa

SEQ ID NO: 2381197 - RNA, 19 nt, Homo sapiens
  misc_RNA (1)...(19): siRNA sense strand
ugagaacauuacaggguca

SEQ ID NO: 2381198 - RNA, 19 nt, Homo sapiens
  misc_RNA (1)...(19): siRNA sense strand
cagcccagcuacaggguca

SEQ ID NO: 2381199 - RNA, 19 nt, Homo sapiens
  misc_RNA (1)...(19): siRNA sense strand
cauugacagccaaggcaaa

SEQ ID NO: 2381200 - RNA, 19 nt, Homo sapiens
  misc_RNA (1)...(19): siRNA sense strand
ccucacuggaagcaagaaa

SEQ ID NO: 2381201 - RNA, 19 nt, Homo sapiens
  misc_RNA (1)...(19): siRNA sense strand
uggcaucggaggacacaaa

SEQ ID NO: 2381202 - RNA, 19 nt, Homo sapiens
  misc_RNA (1)...(19): siRNA sense strand
uggcauugcucaaaaggaa

SEQ ID NO: 2381203 - RNA, 19 nt, Homo sapiens
  misc_RNA (1)...(19): siRNA sense strand
aagaagucguacagagugu

SEQ ID NO: 2381204 - RNA, 19 nt, Homo sapiens
  misc_RNA (1)...(19): siRNA sense strand
ucaguaaacaagagaccau

SEQ ID NO: 2381205 - RNA, 19 nt, Homo sapiens
  misc_RNA (1)...(19): siRNA sense strand
gugucaagggcuaugaaga

SEQ ID NO: 2381206 - RNA, 19 nt, Homo sapiens
  misc_RNA (1)...(19): siRNA sense strand
acagagucagcuacagaaa

SEQ ID NO: 2381207 - RNA, 19 nt, Homo sapiens
  misc_RNA (1)...(19): siRNA sense strand
uggcagaccgacagcguga

SEQ ID NO: 2381208 - RNA, 19 nt, Homo sapiens
  misc_RNA (1)...(19): siRNA sense strand
ggacccagcagaugagcga

SEQ ID NO: 2381209 - RNA, 19 nt, Homo sapiens
  misc_RNA (1)...(19): siRNA sense strand
uagagauguuuaaggggaa

SEQ ID NO: 2381210 - RNA, 19 nt, Homo sapiens
  misc_RNA (1)...(19): siRNA sense strand
ggaugagcuacgauuggaa

SEQ ID NO: 2381211 - RNA, 19 nt, Homo sapiens
  misc_RNA (1)...(19): siRNA sense strand
aggaacaggaaauugaaca

SEQ ID NO: 2381212 - RNA, 19 nt, Homo sapiens
  misc_RNA (1)...(19): siRNA sense strand
acaggaaauugaacagcga

SEQ ID NO: 2381213 - RNA, 19 nt, Homo sapiens
  misc_RNA (1)...(19): siRNA sense strand
ccauggaacgucugaaaau

SEQ ID NO: 2381214 - RNA, 19 nt, Homo sapiens
  misc_RNA (1)...(19): siRNA sense strand
gaagaaagacucaaagcag

SEQ ID NO: 2381215 - RNA, 19 nt, Homo sapiens
  misc_RNA (1)...(19): siRNA sense strand
agaaacugagacagaguca

SEQ ID NO: 2381216 - RNA, 19 nt, Homo sapiens
  misc_RNA (1)...(19): siRNA sense strand
gcuuggaagaagucguaca

SEQ ID NO: 2381217 - RNA, 19 nt, Homo sapiens
  misc_RNA (1)...(19): siRNA sense strand
cuaugugagcaguguauga

SEQ ID NO: 2381218 - RNA, 19 nt, Homo sapiens
  misc_RNA (1)...(19): siRNA sense strand
guccagugucaguaaacaa

SEQ ID NO: 2381219 - RNA, 19 nt, Homo sapiens
  misc_RNA (1)...(19): siRNA sense strand
uggugaacgagcagggaca

SEQ ID NO: 2381220 - RNA, 19 nt, Homo sapiens
  misc_RNA (1)...(19): siRNA sense strand
aggaggaagaggaggaaga

SEQ ID NO: 2381221 - RNA, 19 nt, Homo sapiens
  misc_RNA (1)...(19): siRNA sense strand
aguggaaagcagagagaga

SEQ ID NO: 2381222 - RNA, 19 nt, Homo sapiens
  misc_RNA (1)...(19): siRNA sense strand
gagaaaaggaagaggagga

SEQ ID NO: 2381223 - RNA, 19 nt, Homo sapiens
  misc_RNA (1)...(19): siRNA sense strand
aagaggaggaagagaucaa

SEQ ID NO: 2381224 - RNA, 19 nt, Homo sapiens
  misc_RNA (1)...(19): siRNA sense strand
aggaagaggaggaagagau

SEQ ID NO: 2381225 - RNA, 19 nt, Homo sapiens
  misc_RNA (1)...(19): siRNA sense strand
ggauaaaggagcugggagg

SEQ ID NO: 2381226 - RNA, 19 nt, Homo sapiens
  misc_RNA (1)...(19): siRNA sense strand
aggaggaggaagaggagga

SEQ ID NO: 2381227 - RNA, 19 nt, Homo sapiens
  misc_RNA (1)...(19): siRNA sense strand
cagaaguaugcaagcgaga

SEQ ID NO: 2381228 - RNA, 19 nt, Homo sapiens
  misc_RNA (1)...(19): siRNA sense strand
ccaaagugaagaagccaga

SEQ ID NO: 2381229 - RNA, 19 nt, Homo sapiens
  misc_RNA (1)...(19): siRNA sense strand
gcuggaucaugaaggaaaa

SEQ ID NO: 2381230 - RNA, 19 nt, Homo sapiens
  misc_RNA (1)...(19): siRNA sense strand
gcugagaaguggagacgac

SEQ ID NO: 2381231 - RNA, 19 nt, Homo sapiens
  misc_RNA (1)...(19): siRNA sense strand
uggaacaggaauaugaaaa

SEQ ID NO: 2381232 - RNA, 19 nt, Homo sapiens
  misc_RNA (1)...(19): siRNA sense strand
aggaaggcagccaggagaa

SEQ ID NO: 2381233 - RNA, 19 nt, Homo sapiens
  misc_RNA (1)...(19): siRNA sense strand
ggcaagaggagaaaaggaa

SEQ ID NO: 2381234 - RNA, 19 nt, Homo sapiens
  misc_RNA (1)...(19): siRNA sense strand
gggacgacagccagcagaa

SEQ ID NO: 2381235 - RNA, 19 nt, Homo sapiens
  misc_RNA (1)...(19): siRNA sense strand
ugccuuuggaacaggaaua

SEQ ID NO: 2381236 - RNA, 19 nt, Homo sapiens
  misc_RNA (1)...(19): siRNA sense strand
ggaucaugaaggaaaagaa

SEQ ID NO: 2381237 - RNA, 19 nt, Homo sapiens
  misc_RNA (1)...(19): siRNA sense strand
uuaacaagcugcuaaggga

SEQ ID NO: 2381238 - RNA, 19 nt, Homo sapiens
  misc_RNA (1)...(19): siRNA sense strand
cucagcuggaagagggaaa

SEQ ID NO: 2381239 - RNA, 19 nt, Homo sapiens
  misc_RNA (1)...(19): siRNA sense strand
caagaggagaaaaggaaga

SEQ ID NO: 2381240 - RNA, 19 nt, Homo sapiens
  misc_RNA (1)...(19): siRNA sense strand
gaggaaggcagccaggaga

SEQ ID NO: 2381241 - RNA, 19 nt, Homo sapiens
  misc_RNA (1)...(19): siRNA sense strand
ugcuggaucaugaaggaaa

SEQ ID NO: 2381242 - RNA, 19 nt, Homo sapiens
  misc_RNA (1)...(19): siRNA sense strand
cagagaaggugaagggcuu

SEQ ID NO: 2381243 - RNA, 19 nt, Homo sapiens
  misc_RNA (1)...(19): siRNA sense strand
ucacagagauccagggcau

SEQ ID NO: 2381244 - RNA, 19 nt, Homo sapiens
  misc_RNA (1)...(19): siRNA sense strand
gaaaggaguaugauggcaa

SEQ ID NO: 2381245 - RNA, 19 nt, Homo sapiens
  misc_RNA (1)...(19): siRNA sense strand
ccgacacagagaagggaaa

SEQ ID NO: 2381246 - RNA, 19 nt, Homo sapiens
  misc_RNA (1)...(19): siRNA sense strand
gcaugaagccggaguggga

SEQ ID NO: 2381247 - RNA, 19 nt, Homo sapiens
  misc_RNA (1)...(19): siRNA sense strand
aaacaaugaggguggaaaa

SEQ ID NO: 2381248 - RNA, 19 nt, Homo sapiens
  misc_RNA (1)...(19): siRNA sense strand
aagagaagccagaggagga

SEQ ID NO: 2381249 - RNA, 19 nt, Homo sapiens
  misc_RNA (1)...(19): siRNA sense strand
aggucgaggugguggagau

SEQ ID NO: 2381250 - RNA, 19 nt, Homo sapiens
  misc_RNA (1)...(19): siRNA sense strand
agucgguggcagagaagaa

SEQ ID NO: 2381251 - RNA, 19 nt, Homo sapiens
  misc_RNA (1)...(19): siRNA sense strand
aggacaagucgguggcaga

SEQ ID NO: 2381252 - RNA, 19 nt, Homo sapiens
  misc_RNA (1)...(19): siRNA sense strand
gcgaagcugugaauggcaa

SEQ ID NO: 2381253 - RNA, 19 nt, Homo sapiens
  misc_RNA (1)...(19): siRNA sense strand
cggaagugcaagaugcgua

SEQ ID NO: 2381254 - RNA, 19 nt, Homo sapiens
  misc_RNA (1)...(19): siRNA sense strand
ggcucaauccggagaaaga

SEQ ID NO: 2381255 - RNA, 19 nt, Homo sapiens
  misc_RNA (1)...(19): siRNA sense strand
ggagaaagaauccagccaa

SEQ ID NO: 2381256 - RNA, 19 nt, Homo sapiens
  misc_RNA (1)...(19): siRNA sense strand
cagaagagacggcugguga

SEQ ID NO: 2381257 - RNA, 19 nt, Homo sapiens
  misc_RNA (1)...(19): siRNA sense strand
cgguggcagagaagaauaa

SEQ ID NO: 2381258 - RNA, 19 nt, Homo sapiens
  misc_RNA (1)...(19): siRNA sense strand
gugucaaguaugucaacaa

SEQ ID NO: 2381259 - RNA, 19 nt, Homo sapiens
  misc_RNA (1)...(19): siRNA sense strand
augaagaggcagaaaacaa

SEQ ID NO: 2381260 - RNA, 19 nt, Homo sapiens
  misc_RNA (1)...(19): siRNA sense strand
gagaaagaauccagccaac

SEQ ID NO: 2381261 - RNA, 19 nt, Homo sapiens
  misc_RNA (1)...(19): siRNA sense strand
ggaguggggcgaugggaua

SEQ ID NO: 2381262 - RNA, 19 nt, Homo sapiens
  misc_RNA (1)...(19): siRNA sense strand
uggagaugcaugagagcga

SEQ ID NO: 2381263 - RNA, 19 nt, Homo sapiens
  misc_RNA (1)...(19): siRNA sense strand
gaaggaaaugagacgguga

SEQ ID NO: 2381264 - RNA, 19 nt, Homo sapiens
  misc_RNA (1)...(19): siRNA sense strand
aaacaaugucacagagauc

SEQ ID NO: 2381265 - RNA, 19 nt, Homo sapiens
  misc_RNA (1)...(19): siRNA sense strand
ucaccuggaccaaggacaa

SEQ ID NO: 2381266 - RNA, 19 nt, Homo sapiens
  misc_RNA (1)...(19): siRNA sense strand
gagcaugaagaggcagaaa

SEQ ID NO: 2381267 - RNA, 19 nt, Homo sapiens
  misc_RNA (1)...(19): siRNA sense strand
gaucaucagacguggagga

SEQ ID NO: 2381268 - RNA, 19 nt, Homo sapiens
  misc_RNA (1)...(19): siRNA sense strand
cuaaacaaccugacggacu

SEQ ID NO: 2381269 - RNA, 19 nt, Homo sapiens
  misc_RNA (1)...(19): siRNA sense strand
agaaugagcgggagcggga

SEQ ID NO: 2381270 - RNA, 19 nt, Homo sapiens
  misc_RNA (1)...(19): siRNA sense strand
gggagcaugaagaggcaga

SEQ ID NO: 2381271 - RNA, 19 nt, Homo sapiens
  misc_RNA (1)...(19): siRNA sense strand
aggaggaggugcagcugau

SEQ ID NO: 2381272 - RNA, 19 nt, Homo sapiens
  misc_RNA (1)...(19): siRNA sense strand
ccgcaauggugaugaaaac

SEQ ID NO: 2381273 - RNA, 19 nt, Homo sapiens
  misc_RNA (1)...(19): siRNA sense strand
gaguaugauggcaagaaca

SEQ ID NO: 2381274 - RNA, 19 nt, Homo sapiens
  misc_RNA (1)...(19): siRNA sense strand
ccagggaaguagggagcau

SEQ ID NO: 2381275 - RNA, 19 nt, Homo sapiens
  misc_RNA (1)...(19): siRNA sense strand
agacguuggugauggagca

SEQ ID NO: 2381276 - RNA, 19 nt, Homo sapiens
  misc_RNA (1)...(19): siRNA sense strand
ggguaauugucaucggauc

SEQ ID NO: 2381277 - RNA, 19 nt, Homo sapiens
  misc_RNA (1)...(19): siRNA sense strand
uggcccagauggaugacaa

SEQ ID NO: 2381278 - RNA, 19 nt, Homo sapiens
  misc_RNA (1)...(19): siRNA sense strand
gaugaaaacuacauggagu

SEQ ID NO: 2381279 - RNA, 19 nt, Homo sapiens
  misc_RNA (1)...(19): siRNA sense strand
gggagacagauccggagaa

SEQ ID NO: 2381280 - RNA, 19 nt, Homo sapiens
  misc_RNA (1)...(19): siRNA sense strand
uggccuuguuugaggagga

SEQ ID NO: 2381281 - RNA, 19 nt, Homo sapiens
  misc_RNA (1)...(19): siRNA sense strand
uaaccaagaaugagcggga

SEQ ID NO: 2381282 - RNA, 19 nt, Homo sapiens
  misc_RNA (1)...(19): siRNA sense strand
agcgggagauccagaguau

SEQ ID NO: 2381283 - RNA, 19 nt, Homo sapiens
  misc_RNA (1)...(19): siRNA sense strand
gagauggacaccagcccua

SEQ ID NO: 2381284 - RNA, 19 nt, Homo sapiens
  misc_RNA (1)...(19): siRNA sense strand
gggaaggaaaugagacggu

SEQ ID NO: 2381285 - RNA, 19 nt, Homo sapiens
  misc_RNA (1)...(19): siRNA sense strand
uaugagaagacguugguga

SEQ ID NO: 2381286 - RNA, 19 nt, Homo sapiens
  misc_RNA (1)...(19): siRNA sense strand
guacgaugcucacggccau

SEQ ID NO: 2381287 - RNA, 19 nt, Homo sapiens
  misc_RNA (1)...(19): siRNA sense strand
agggaugcccagaagucaa

SEQ ID NO: 2381288 - RNA, 19 nt, Homo sapiens
  misc_RNA (1)...(19): siRNA sense strand
agagaagggaaaggaguau

SEQ ID NO: 2381289 - RNA, 19 nt, Homo sapiens
  misc_RNA (1)...(19): siRNA sense strand
cuucaaauaacucgagaau

SEQ ID NO: 2381290 - RNA, 19 nt, Homo sapiens
  misc_RNA (1)...(19): siRNA sense strand
cagcaagaaaacagacaaa

SEQ ID NO: 2381291 - RNA, 19 nt, Homo sapiens
  misc_RNA (1)...(19): siRNA sense strand
agaaugaacugcaagcaca

SEQ ID NO: 2381292 - RNA, 19 nt, Homo sapiens
  misc_RNA (1)...(19): siRNA sense strand
ccagauaacugaaauggca

SEQ ID NO: 2381293 - RNA, 19 nt, Homo sapiens
  misc_RNA (1)...(19): siRNA sense strand
aaagaugaugcgucggaaa

SEQ ID NO: 2381294 - RNA, 19 nt, Homo sapiens
  misc_RNA (1)...(19): siRNA sense strand
cagacaaaucagagaguug

SEQ ID NO: 2381295 - RNA, 19 nt, Homo sapiens
  misc_RNA (1)...(19): siRNA sense strand
cugaaauggcagcaguaau

SEQ ID NO: 2381296 - RNA, 19 nt, Homo sapiens
  misc_RNA (1)...(19): siRNA sense strand
ccauugaaauugacgagca

SEQ ID NO: 2381297 - RNA, 19 nt, Homo sapiens
  misc_RNA (1)...(19): siRNA sense strand
uggaacuuauaaugagcaa

SEQ ID NO: 2381298 - RNA, 19 nt, Homo sapiens
  misc_RNA (1)...(19): siRNA sense strand
aaacaguaucaggaagaaa

SEQ ID NO: 2381299 - RNA, 19 nt, Homo sapiens
  misc_RNA (1)...(19): siRNA sense strand
gcacaauugagaaggcacu

SEQ ID NO: 2381300 - RNA, 19 nt, Homo sapiens
  misc_RNA (1)...(19): siRNA sense strand
cggguauaauaaugaaguu

SEQ ID NO: 2381301 - RNA, 19 nt, Homo sapiens
  misc_RNA (1)...(19): siRNA sense strand
uugaaauugacgagcaaca

SEQ ID NO: 2381302 - RNA, 19 nt, Homo sapiens
  misc_RNA (1)...(19): siRNA sense strand
gagaguugcaacaagaaaa

SEQ ID NO: 2381303 - RNA, 19 nt, Homo sapiens
  misc_RNA (1)...(19): siRNA sense strand
gugauuugagucugaggaa

SEQ ID NO: 2381304 - RNA, 19 nt, Homo sapiens
  misc_RNA (1)...(19): siRNA sense strand
gcaguaaugaggaaagcca

SEQ ID NO: 2381305 - RNA, 19 nt, Homo sapiens
  misc_RNA (1)...(19): siRNA sense strand
aaaacaaaggcuugagaga

SEQ ID NO: 2381306 - RNA, 19 nt, Homo sapiens
  misc_RNA (1)...(19): siRNA sense strand
uugacaugguacaucguaa

SEQ ID NO: 2381307 - RNA, 19 nt, Homo sapiens
  misc_RNA (1)...(19): siRNA sense strand
gauuaagagaucaugacga

SEQ ID NO: 2381308 - RNA, 19 nt, Homo sapiens
  misc_RNA (1)...(19): siRNA sense strand
agagaguugcaacaagaaa

SEQ ID NO: 2381309 - RNA, 19 nt, Homo sapiens
  misc_RNA (1)...(19): siRNA sense strand
gaaugaacugcaagcacau

SEQ ID NO: 2381310 - RNA, 19 nt, Homo sapiens
  misc_RNA (1)...(19): siRNA sense strand
aguuaugggaauccagcaa

SEQ ID NO: 2381311 - RNA, 19 nt, Homo sapiens
  misc_RNA (1)...(19): siRNA sense strand
ccaagauugacaugguaca

SEQ ID NO: 2381312 - RNA, 19 nt, Homo sapiens
  misc_RNA (1)...(19): siRNA sense strand
ggaaagaugaugcgucgga

SEQ ID NO: 2381313 - RNA, 19 nt, Homo sapiens
  misc_RNA (1)...(19): siRNA sense strand
cuuggaagcaaaucagaau

SEQ ID NO: 2381314 - RNA, 19 nt, Homo sapiens
  misc_RNA (1)...(19): siRNA sense strand
uugcaaggaacaagaacga

SEQ ID NO: 2381315 - RNA, 19 nt, Homo sapiens
  misc_RNA (1)...(19): siRNA sense strand
augggaauccagcaagaaa

SEQ ID NO: 2381316 - RNA, 19 nt, Homo sapiens
  misc_RNA (1)...(19): siRNA sense strand
ucucaacaagcgaguagaa

SEQ ID NO: 2381317 - RNA, 19 nt, Homo sapiens
  misc_RNA (1)...(19): siRNA sense strand
ccuucaaauaacucgagaa

SEQ ID NO: 2381318 - RNA, 19 nt, Homo sapiens
  misc_RNA (1)...(19): siRNA sense strand
ccaagaaagagcuggaaaa

SEQ ID NO: 2381319 - RNA, 19 nt, Homo sapiens
  misc_RNA (1)...(19): siRNA sense strand
ggacaacauaggagagcuu

SEQ ID NO: 2381320 - RNA, 19 nt, Homo sapiens
  misc_RNA (1)...(19): siRNA sense strand
ggucugaaagagaagaaau

SEQ ID NO: 2381321 - RNA, 19 nt, Homo sapiens
  misc_RNA (1)...(19): siRNA sense strand
cuuaguaaagagaugguua

SEQ ID NO: 2381322 - RNA, 19 nt, Homo sapiens
  misc_RNA (1)...(19): siRNA sense strand
cugaaagagaagaaauuga

SEQ ID NO: 2381323 - RNA, 19 nt, Homo sapiens
  misc_RNA (1)...(19): siRNA sense strand
cgccugaggacgaggauga

SEQ ID NO: 2381324 - RNA, 19 nt, Homo sapiens
  misc_RNA (1)...(19): siRNA sense strand
gucugaaagagaagaaauu

SEQ ID NO: 2381325 - RNA, 19 nt, Homo sapiens
  misc_RNA (1)...(19): siRNA sense strand
ccugaagaagagaaacuua

SEQ ID NO: 2381326 - RNA, 19 nt, Homo sapiens
  misc_RNA (1)...(19): siRNA sense strand
cugcaguagaagagaaagu

SEQ ID NO: 2381327 - RNA, 19 nt, Homo sapiens
  misc_RNA (1)...(19): siRNA sense strand
gucugaacuuagagcuuua

SEQ ID NO: 2381328 - RNA, 19 nt, Homo sapiens
  misc_RNA (1)...(19): siRNA sense strand
ccauauugaaguuguccaa

SEQ ID NO: 2381329 - RNA, 19 nt, Homo sapiens
  misc_RNA (1)...(19): siRNA sense strand
aaguauucccugagcauau

SEQ ID NO: 2381330 - RNA, 19 nt, Homo sapiens
  misc_RNA (1)...(19): siRNA sense strand
aggagaagugccagagcuu

SEQ ID NO: 2381331 - RNA, 19 nt, Homo sapiens
  misc_RNA (1)...(19): siRNA sense strand
cccaagaaagagcuggaaa

SEQ ID NO: 2381332 - RNA, 19 nt, Homo sapiens
  misc_RNA (1)...(19): siRNA sense strand
gcacuaugucuuugaggca

SEQ ID NO: 2381333 - RNA, 19 nt, Homo sapiens
  misc_RNA (1)...(19): siRNA sense strand
gcgcagaauaaccugggua

SEQ ID NO: 2381334 - RNA, 19 nt, Homo sapiens
  misc_RNA (1)...(19): siRNA sense strand
cauccuauagagugggcua

SEQ ID NO: 2381335 - RNA, 19 nt, Homo sapiens
  misc_RNA (1)...(19): siRNA sense strand
ugauaaacagucugaacuu

SEQ ID NO: 2381336 - RNA, 19 nt, Homo sapiens
  misc_RNA (1)...(19): siRNA sense strand
uggucaaacuggaaagauc

SEQ ID NO: 2381337 - RNA, 19 nt, Homo sapiens
  misc_RNA (1)...(19): siRNA sense strand
ucuuagacucccugagaga

SEQ ID NO: 2381338 - RNA, 19 nt, Homo sapiens
  misc_RNA (1)...(19): siRNA sense strand
auggagagauucagaacca

SEQ ID NO: 2381339 - RNA, 19 nt, Homo sapiens
  misc_RNA (1)...(19): siRNA sense strand
uggcaacaucauuggaaca

SEQ ID NO: 2381340 - RNA, 19 nt, Homo sapiens
  misc_RNA (1)...(19): siRNA sense strand
auggagagacggugcaaga

SEQ ID NO: 2381341 - RNA, 19 nt, Homo sapiens
  misc_RNA (1)...(19): siRNA sense strand
caguauuaucuguugguca

SEQ ID NO: 2381342 - RNA, 19 nt, Homo sapiens
  misc_RNA (1)...(19): siRNA sense strand
gaaccauacaaguccaaau

SEQ ID NO: 2381343 - RNA, 19 nt, Homo sapiens
  misc_RNA (1)...(19): siRNA sense strand
agaacuuaguaaagagaug

SEQ ID NO: 2381344 - RNA, 19 nt, Homo sapiens
  misc_RNA (1)...(19): siRNA sense strand
uggaagaggucaaggcgcu

SEQ ID NO: 2381345 - RNA, 19 nt, Homo sapiens
  misc_RNA (1)...(19): siRNA sense strand
gcauauaggggaagauguu

SEQ ID NO: 2381346 - RNA, 19 nt, Homo sapiens
  misc_RNA (1)...(19): siRNA sense strand
cugaaggagaagugccaga

SEQ ID NO: 2381347 - RNA, 19 nt, Homo sapiens
  misc_RNA (1)...(19): siRNA sense strand
uagaugaggaggaaagcau

SEQ ID NO: 2381348 - RNA, 19 nt, Homo sapiens
  misc_RNA (1)...(19): siRNA sense strand
caucauuggaacauuacaa

SEQ ID NO: 2381349 - RNA, 19 nt, Homo sapiens
  misc_RNA (1)...(19): siRNA sense strand
ugagcuagaacuuaguaaa

SEQ ID NO: 2381350 - RNA, 19 nt, Homo sapiens
  misc_RNA (1)...(19): siRNA sense strand
cggagaaggaaccauacaa

SEQ ID NO: 2381351 - RNA, 19 nt, Homo sapiens
  misc_RNA (1)...(19): siRNA sense strand
uggaaagaucucagccaca

SEQ ID NO: 2381352 - RNA, 19 nt, Homo sapiens
  misc_RNA (1)...(19): siRNA sense strand
gaacuagaugaggaggaaa

SEQ ID NO: 2381353 - RNA, 19 nt, Homo sapiens
  misc_RNA (1)...(19): siRNA sense strand
auauugaaguuguccaaga

SEQ ID NO: 2381354 - RNA, 19 nt, Homo sapiens
  misc_RNA (1)...(19): siRNA sense strand
ggucaaacuggaaagaucu

SEQ ID NO: 2381355 - RNA, 19 nt, Homo sapiens
  misc_RNA (1)...(19): siRNA sense strand
ucuuauugggucagcacua

SEQ ID NO: 2381356 - RNA, 19 nt, Homo sapiens
  misc_RNA (1)...(19): siRNA sense strand
cgcagaauaaccuggguau

SEQ ID NO: 2381357 - RNA, 19 nt, Homo sapiens
  misc_RNA (1)...(19): siRNA sense strand
agacacuccugaagcugaa

SEQ ID NO: 2381358 - RNA, 19 nt, Homo sapiens
  misc_RNA (1)...(19): siRNA sense strand
gcugacaggcuaagggauc

SEQ ID NO: 2381359 - RNA, 19 nt, Homo sapiens
  misc_RNA (1)...(19): siRNA sense strand
gagaagaaauugaaacugc

SEQ ID NO: 2381360 - RNA, 19 nt, Homo sapiens
  misc_RNA (1)...(19): siRNA sense strand
uuacugaacaagagagauc

SEQ ID NO: 2381361 - RNA, 19 nt, Homo sapiens
  misc_RNA (1)...(19): siRNA sense strand
ccuauauuaccuagcucaa

SEQ ID NO: 2381362 - RNA, 19 nt, Homo sapiens
  misc_RNA (1)...(19): siRNA sense strand
cagucugaacuuagagcuu

SEQ ID NO: 2381363 - RNA, 19 nt, Homo sapiens
  misc_RNA (1)...(19): siRNA sense strand
cuuucagauugaugguuau

SEQ ID NO: 2381364 - RNA, 19 nt, Homo sapiens
  misc_RNA (1)...(19): siRNA sense strand
gaugcauaaacgcagaaua

SEQ ID NO: 2381365 - RNA, 19 nt, Homo sapiens
  misc_RNA (1)...(19): siRNA sense strand
augcauaaacgcagaauag

SEQ ID NO: 2381366 - RNA, 19 nt, Homo sapiens
  misc_RNA (1)...(19): siRNA sense strand
uaugaaagagguugggagu

SEQ ID NO: 2381367 - RNA, 19 nt, Homo sapiens
  misc_RNA (1)...(19): siRNA sense strand
ugaacaagagagaucaaaa

SEQ ID NO: 2381368 - RNA, 19 nt, Homo sapiens
  misc_RNA (1)...(19): siRNA sense strand
cccaggaaauagaaguuga

SEQ ID NO: 2381369 - RNA, 19 nt, Homo sapiens
  misc_RNA (1)...(19): siRNA sense strand
uugaaacugcacaggcuua

SEQ ID NO: 2381370 - RNA, 19 nt, Homo sapiens
  misc_RNA (1)...(19): siRNA sense strand
gauaaaugguucagcccua

SEQ ID NO: 2381371 - RNA, 19 nt, Homo sapiens
  misc_RNA (1)...(19): siRNA sense strand
gaaagaagcugguaaggga

SEQ ID NO: 2381372 - RNA, 19 nt, Homo sapiens
  misc_RNA (1)...(19): siRNA sense strand
ugauggaguuuguggaaaa

SEQ ID NO: 2381373 - RNA, 19 nt, Homo sapiens
  misc_RNA (1)...(19): siRNA sense strand
agaaguuugcagagauaaa

SEQ ID NO: 2381374 - RNA, 19 nt, Homo sapiens
  misc_RNA (1)...(19): siRNA sense strand
caaugaaagaagcugguaa

SEQ ID NO: 2381375 - RNA, 19 nt, Homo sapiens
  misc_RNA (1)...(19): siRNA sense strand
ggaaaaugcuugugcacga

SEQ ID NO: 2381376 - RNA, 19 nt, Homo sapiens
  misc_RNA (1)...(19): siRNA sense strand
augaaaugguaguggaugu

SEQ ID NO: 2381377 - RNA, 19 nt, Homo sapiens
  misc_RNA (1)...(19): siRNA sense strand
ccagagagcuaaagccgau

SEQ ID NO: 2381378 - RNA, 19 nt, Homo sapiens
  misc_RNA (1)...(19): siRNA sense strand
gaaaacaguaggaaagcaa

SEQ ID NO: 2381379 - RNA, 19 nt, Homo sapiens
  misc_RNA (1)...(19): siRNA sense strand
gcaaccuggacuugauaaa

SEQ ID NO: 2381380 - RNA, 19 nt, Homo sapiens
  misc_RNA (1)...(19): siRNA sense strand
agguauauaucaagaguac

SEQ ID NO: 2381381 - RNA, 19 nt, Homo sapiens
  misc_RNA (1)...(19): siRNA sense strand
caguaggaaagcaaugaaa

SEQ ID NO: 2381382 - RNA, 19 nt, Homo sapiens
  misc_RNA (1)...(19): siRNA sense strand
aguaaugaccagcaaagaa

SEQ ID NO: 2381383 - RNA, 19 nt, Homo sapiens
  misc_RNA (1)...(19): siRNA sense strand
caggcugauuaguggagua

SEQ ID NO: 2381384 - RNA, 19 nt, Homo sapiens
  misc_RNA (1)...(19): siRNA sense strand
gauuuggaucagugaauuu

SEQ ID NO: 2381385 - RNA, 19 nt, Homo sapiens
  misc_RNA (1)...(19): siRNA sense strand
caucaacacaguaggagau

SEQ ID NO: 2381386 - RNA, 19 nt, Homo sapiens
  misc_RNA (1)...(19): siRNA sense strand
uaauguugguuaugcgcaa

SEQ ID NO: 2381387 - RNA, 19 nt, Homo sapiens
  misc_RNA (1)...(19): siRNA sense strand
ccaucaacacaguaggaga

SEQ ID NO: 2381388 - RNA, 19 nt, Homo sapiens
  misc_RNA (1)...(19): siRNA sense strand
gauaaagugcugauggagu

SEQ ID NO: 2381389 - RNA, 19 nt, Homo sapiens
  misc_RNA (1)...(19): siRNA sense strand
aauacaaaguuggaagcaa

SEQ ID NO: 2381390 - RNA, 19 nt, Homo sapiens
  misc_RNA (1)...(19): siRNA sense strand
agaaggucucccaaagaaa

SEQ ID NO: 2381391 - RNA, 19 nt, Homo sapiens
  misc_RNA (1)...(19): siRNA sense strand
gcucaaaggaaaggaaaau

SEQ ID NO: 2381392 - RNA, 19 nt, Homo sapiens
  misc_RNA (1)...(19): siRNA sense strand
ccguagcugcacagacaua

SEQ ID NO: 2381393 - RNA, 19 nt, Homo sapiens
  misc_RNA (1)...(19): siRNA sense strand
cagcucaaaggaaaggaaa

SEQ ID NO: 2381394 - RNA, 19 nt, Homo sapiens
  misc_RNA (1)...(19): siRNA sense strand
caacacaguaggagauuuu

SEQ ID NO: 2381395 - RNA, 19 nt, Homo sapiens
  misc_RNA (1)...(19): siRNA sense strand
acuuggaggcacaggugua

SEQ ID NO: 2381396 - RNA, 19 nt, Homo sapiens
  misc_RNA (1)...(19): siRNA sense strand
cgguucacuuggaggcaca

SEQ ID NO: 2381397 - RNA, 19 nt, Homo sapiens
  misc_RNA (1)...(19): siRNA sense strand
aaaugguaguggauguauu

SEQ ID NO: 2381398 - RNA, 19 nt, Homo sapiens
  misc_RNA (1)...(19): siRNA sense strand
cagaaugcauacacagcca

SEQ ID NO: 2381399 - RNA, 19 nt, Homo sapiens
  misc_RNA (1)...(19): siRNA sense strand
uguggaaaacaguaggaaa

SEQ ID NO: 2381400 - RNA, 19 nt, Homo sapiens
  misc_RNA (1)...(19): siRNA sense strand
guggaguaaugaccagcaa

SEQ ID NO: 2381401 - RNA, 19 nt, Homo sapiens
  misc_RNA (1)...(19): siRNA sense strand
gcacagguuuagcugggau

SEQ ID NO: 2381402 - RNA, 19 nt, Homo sapiens
  misc_RNA (1)...(19): siRNA sense strand
guucaaaauuucugggccu

SEQ ID NO: 2381403 - RNA, 19 nt, Homo sapiens
  misc_RNA (1)...(19): siRNA sense strand
cugauggaguuuguggaaa

SEQ ID NO: 2381404 - RNA, 19 nt, Homo sapiens
  misc_RNA (1)...(19): siRNA sense strand
gauaaaugguucagcccua

SEQ ID NO: 2381405 - RNA, 19 nt, Homo sapiens
  misc_RNA (1)...(19): siRNA sense strand
gaaagaagcugguaaggga

SEQ ID NO: 2381406 - RNA, 19 nt, Homo sapiens
  misc_RNA (1)...(19): siRNA sense strand
ugauggaguuuguggaaaa

SEQ ID NO: 2381407 - RNA, 19 nt, Homo sapiens
  misc_RNA (1)...(19): siRNA sense strand
agaaguuugcagagauaaa

SEQ ID NO: 2381408 - RNA, 19 nt, Homo sapiens
  misc_RNA (1)...(19): siRNA sense strand
caaugaaagaagcugguaa

SEQ ID NO: 2381409 - RNA, 19 nt, Homo sapiens
  misc_RNA (1)...(19): siRNA sense strand
ggaaaaugcuugugcacga

SEQ ID NO: 2381410 - RNA, 19 nt, Homo sapiens
  misc_RNA (1)...(19): siRNA sense strand
augaaaugguaguggaugu

SEQ ID NO: 2381411 - RNA, 19 nt, Homo sapiens
  misc_RNA (1)...(19): siRNA sense strand
ccagagagcuaaagccgau

SEQ ID NO: 2381412 - RNA, 19 nt, Homo sapiens
  misc_RNA (1)...(19): siRNA sense strand
gaaaacaguaggaaagcaa

SEQ ID NO: 2381413 - RNA, 19 nt, Homo sapiens
  misc_RNA (1)...(19): siRNA sense strand
gcaaccuggacuugauaaa

SEQ ID NO: 2381414 - RNA, 19 nt, Homo sapiens
  misc_RNA (1)...(19): siRNA sense strand
agguauauaucaagaguac

SEQ ID NO: 2381415 - RNA, 19 nt, Homo sapiens
  misc_RNA (1)...(19): siRNA sense strand
caguaggaaagcaaugaaa

SEQ ID NO: 2381416 - RNA, 19 nt, Homo sapiens
  misc_RNA (1)...(19): siRNA sense strand
aguaaugaccagcaaagaa

SEQ ID NO: 2381417 - RNA, 19 nt, Homo sapiens
  misc_RNA (1)...(19): siRNA sense strand
caggcugauuaguggagua

SEQ ID NO: 2381418 - RNA, 19 nt, Homo sapiens
  misc_RNA (1)...(19): siRNA sense strand
gauuuggaucagugaauuu

SEQ ID NO: 2381419 - RNA, 19 nt, Homo sapiens
  misc_RNA (1)...(19): siRNA sense strand
caucaacacaguaggagau

SEQ ID NO: 2381420 - RNA, 19 nt, Homo sapiens
  misc_RNA (1)...(19): siRNA sense strand
uaauguugguuaugcgcaa

SEQ ID NO: 2381421 - RNA, 19 nt, Homo sapiens
  misc_RNA (1)...(19): siRNA sense strand
ccaucaacacaguaggaga

SEQ ID NO: 2381422 - RNA, 19 nt, Homo sapiens
  misc_RNA (1)...(19): siRNA sense strand
gauaaagugcugauggagu

SEQ ID NO: 2381423 - RNA, 19 nt, Homo sapiens
  misc_RNA (1)...(19): siRNA sense strand
aauacaaaguuggaagcaa

SEQ ID NO: 2381424 - RNA, 19 nt, Homo sapiens
  misc_RNA (1)...(19): siRNA sense strand
agaaggucucccaaagaaa

SEQ ID NO: 2381425 - RNA, 19 nt, Homo sapiens
  misc_RNA (1)...(19): siRNA sense strand
gcucaaaggaaaggaaaau

SEQ ID NO: 2381426 - RNA, 19 nt, Homo sapiens
  misc_RNA (1)...(19): siRNA sense strand
ccguagcugcacagacaua

SEQ ID NO: 2381427 - RNA, 19 nt, Homo sapiens
  misc_RNA (1)...(19): siRNA sense strand
cagcucaaaggaaaggaaa

SEQ ID NO: 2381428 - RNA, 19 nt, Homo sapiens
  misc_RNA (1)...(19): siRNA sense strand
caacacaguaggagauuuu

SEQ ID NO: 2381429 - RNA, 19 nt, Homo sapiens
  misc_RNA (1)...(19): siRNA sense strand
acuuggaggcacaggugua

SEQ ID NO: 2381430 - RNA, 19 nt, Homo sapiens
  misc_RNA (1)...(19): siRNA sense strand
cgguucacuuggaggcaca

SEQ ID NO: 2381431 - RNA, 19 nt, Homo sapiens
  misc_RNA (1)...(19): siRNA sense strand
aaaugguaguggauguauu

SEQ ID NO: 2381432 - RNA, 19 nt, Homo sapiens
  misc_RNA (1)...(19): siRNA sense strand
cagaaugcauacacagcca

SEQ ID NO: 2381433 - RNA, 19 nt, Homo sapiens
  misc_RNA (1)...(19): siRNA sense strand
uguggaaaacaguaggaaa

SEQ ID NO: 2381434 - RNA, 19 nt, Homo sapiens
  misc_RNA (1)...(19): siRNA sense strand
guggaguaaugaccagcaa

SEQ ID NO: 2381435 - RNA, 19 nt, Homo sapiens
  misc_RNA (1)...(19): siRNA sense strand
gcacagguuuagcugggau

SEQ ID NO: 2381436 - RNA, 19 nt, Homo sapiens
  misc_RNA (1)...(19): siRNA sense strand
guucaaaauuucugggccu

SEQ ID NO: 2381437 - RNA, 19 nt, Homo sapiens
  misc_RNA (1)...(19): siRNA sense strand
cugauggaguuuguggaaa

SEQ ID NO: 2381438 - RNA, 19 nt, Homo sapiens
  misc_RNA (1)...(19): siRNA sense strand
ccucagagcugcaugcgga

SEQ ID NO: 2381439 - RNA, 19 nt, Homo sapiens
  misc_RNA (1)...(19): siRNA sense strand
acacacaccuggcugggua

SEQ ID NO: 2381440 - RNA, 19 nt, Homo sapiens
  misc_RNA (1)...(19): siRNA sense strand
gaccagaaccucucgguga

SEQ ID NO: 2381441 - RNA, 19 nt, Homo sapiens
  misc_RNA (1)...(19): siRNA sense strand
cugacaaggacaagggcaa

SEQ ID NO: 2381442 - RNA, 19 nt, Homo sapiens
  misc_RNA (1)...(19): siRNA sense strand
aggacaagggcaagggcaa

SEQ ID NO: 2381443 - RNA, 19 nt, Homo sapiens
  misc_RNA (1)...(19): siRNA sense strand
uggucaaggccgagccaaa

SEQ ID NO: 2381444 - RNA, 19 nt, Homo sapiens
  misc_RNA (1)...(19): siRNA sense strand
ccaaagacgugaagcccau

SEQ ID NO: 2381445 - RNA, 19 nt, Homo sapiens
  misc_RNA (1)...(19): siRNA sense strand
gggucugggccaagaggaa

SEQ ID NO: 2381446 - RNA, 19 nt, Homo sapiens
  misc_RNA (1)...(19): siRNA sense strand
ccuuagauucugaggcuuu

SEQ ID NO: 2381447 - RNA, 19 nt, Homo sapiens
  misc_RNA (1)...(19): siRNA sense strand
aggaggacguggaggagga

SEQ ID NO: 2381448 - RNA, 19 nt, Homo sapiens
  misc_RNA (1)...(19): siRNA sense strand
cauccauugccgagaagua

SEQ ID NO: 2381449 - RNA, 19 nt, Homo sapiens
  misc_RNA (1)...(19): siRNA sense strand
guagaaaagcggaagguca

SEQ ID NO: 2381450 - RNA, 19 nt, Homo sapiens
  misc_RNA (1)...(19): siRNA sense strand
ucaagaagcacgagcacga

SEQ ID NO: 2381451 - RNA, 19 nt, Homo sapiens
  misc_RNA (1)...(19): siRNA sense strand
acgaugaccuggaggagga

SEQ ID NO: 2381452 - RNA, 19 nt, Homo sapiens
  misc_RNA (1)...(19): siRNA sense strand
cauuaaggacauugagcca

SEQ ID NO: 2381453 - RNA, 19 nt, Homo sapiens
  misc_RNA (1)...(19): siRNA sense strand
ccgggaagucgcaggauga

SEQ ID NO: 2381454 - RNA, 19 nt, Homo sapiens
  misc_RNA (1)...(19): siRNA sense strand
ccuacgaggaugaggagga

SEQ ID NO: 2381455 - RNA, 19 nt, Homo sapiens
  misc_RNA (1)...(19): siRNA sense strand
gugagcagauuuacuauaa

SEQ ID NO: 2381456 - RNA, 19 nt, Homo sapiens
  misc_RNA (1)...(19): siRNA sense strand
ccucagagucggacaacca

SEQ ID NO: 2381457 - RNA, 19 nt, Homo sapiens
  misc_RNA (1)...(19): siRNA sense strand
gugagaagcaggaggacgu

SEQ ID NO: 2381458 - RNA, 19 nt, Homo sapiens
  misc_RNA (1)...(19): siRNA sense strand
acgaggaugaggaggauga

SEQ ID NO: 2381459 - RNA, 19 nt, Homo sapiens
  misc_RNA (1)...(19): siRNA sense strand
guggagaagcugaagacca

SEQ ID NO: 2381460 - RNA, 19 nt, Homo sapiens
  misc_RNA (1)...(19): siRNA sense strand
aggaggaggacgacgauga

SEQ ID NO: 2381461 - RNA, 19 nt, Homo sapiens
  misc_RNA (1)...(19): siRNA sense strand
cgauacacgugcagguacu

SEQ ID NO: 2381462 - RNA, 19 nt, Homo sapiens
  misc_RNA (1)...(19): siRNA sense strand
agaucagugagcagauuua

SEQ ID NO: 2381463 - RNA, 19 nt, Homo sapiens
  misc_RNA (1)...(19): siRNA sense strand
ucagaaacuuuauugccaa

SEQ ID NO: 2381464 - RNA, 19 nt, Homo sapiens
  misc_RNA (1)...(19): siRNA sense strand
acguggaggaggaggacga

SEQ ID NO: 2381465 - RNA, 19 nt, Homo sapiens
  misc_RNA (1)...(19): siRNA sense strand
aguucugcguggaugcaaa

SEQ ID NO: 2381466 - RNA, 19 nt, Homo sapiens
  misc_RNA (1)...(19): siRNA sense strand
gugaggagcugcuggugca

SEQ ID NO: 2381467 - RNA, 19 nt, Homo sapiens
  misc_RNA (1)...(19): siRNA sense strand
aggccuagccagugagaag

SEQ ID NO: 2381468 - RNA, 19 nt, Homo sapiens
  misc_RNA (1)...(19): siRNA sense strand
gcagugacuuugaggacgu

SEQ ID NO: 2381469 - RNA, 19 nt, Homo sapiens
  misc_RNA (1)...(19): siRNA sense strand
cggugacguuguaaauaau

SEQ ID NO: 2381470 - RNA, 19 nt, Homo sapiens
  misc_RNA (1)...(19): siRNA sense strand
gggccaagaggaagaugga

SEQ ID NO: 2381471 - RNA, 19 nt, Homo sapiens
  misc_RNA (1)...(19): siRNA sense strand
cccacaacuugcuggucaa

SEQ ID NO: 2381472 - RNA, 19 nt, Homo sapiens
  misc_RNA (1)...(19): siRNA sense strand
gaaccaagcaucaacgcga

SEQ ID NO: 2381473 - RNA, 19 nt, Homo sapiens
  misc_RNA (1)...(19): siRNA sense strand
auaauauguaugagcccaa

SEQ ID NO: 2381474 - RNA, 19 nt, Homo sapiens
  misc_RNA (1)...(19): siRNA sense strand
gagcccugaaggagaagua

SEQ ID NO: 2381475 - RNA, 19 nt, Homo sapiens
  misc_RNA (1)...(19): siRNA sense strand
ccagcaaccuucagcggca

SEQ ID NO: 2381476 - RNA, 19 nt, Homo sapiens
  misc_RNA (1)...(19): siRNA sense strand
cuucgaaccuccagcggca

SEQ ID NO: 2381477 - RNA, 19 nt, Homo sapiens
  misc_RNA (1)...(19): siRNA sense strand
gcuucgggcagcagaccaa

SEQ ID NO: 2381478 - RNA, 19 nt, Homo sapiens
  misc_RNA (1)...(19): siRNA sense strand
gccaagaggaagauggaag

SEQ ID NO: 2381479 - RNA, 19 nt, Homo sapiens
  misc_RNA (1)...(19): siRNA sense strand
cuuaauuccaccuuagauu

SEQ ID NO: 2381480 - RNA, 19 nt, Homo sapiens
  misc_RNA (1)...(19): siRNA sense strand
cugacaaggacaagggcaa

SEQ ID NO: 2381481 - RNA, 19 nt, Homo sapiens
  misc_RNA (1)...(19): siRNA sense strand
aggacaagggcaagggcaa

SEQ ID NO: 2381482 - RNA, 19 nt, Homo sapiens
  misc_RNA (1)...(19): siRNA sense strand
uggucaaggccgagccaaa

SEQ ID NO: 2381483 - RNA, 19 nt, Homo sapiens
  misc_RNA (1)...(19): siRNA sense strand
ccaaagacgugaagcccau

SEQ ID NO: 2381484 - RNA, 19 nt, Homo sapiens
  misc_RNA (1)...(19): siRNA sense strand
gggucugggccaagaggaa

SEQ ID NO: 2381485 - RNA, 19 nt, Homo sapiens
  misc_RNA (1)...(19): siRNA sense strand
ccuuagauucugaggcuuu

SEQ ID NO: 2381486 - RNA, 19 nt, Homo sapiens
  misc_RNA (1)...(19): siRNA sense strand
aggaggacguggaggagga

SEQ ID NO: 2381487 - RNA, 19 nt, Homo sapiens
  misc_RNA (1)...(19): siRNA sense strand
cauccauugccgagaagua

SEQ ID NO: 2381488 - RNA, 19 nt, Homo sapiens
  misc_RNA (1)...(19): siRNA sense strand
guagaaaagcggaagguca

SEQ ID NO: 2381489 - RNA, 19 nt, Homo sapiens
  misc_RNA (1)...(19): siRNA sense strand
ucaagaagcacgagcacga

SEQ ID NO: 2381490 - RNA, 19 nt, Homo sapiens
  misc_RNA (1)...(19): siRNA sense strand
acgaugaccuggaggagga

SEQ ID NO: 2381491 - RNA, 19 nt, Homo sapiens
  misc_RNA (1)...(19): siRNA sense strand
cauuaaggacauugagcca

SEQ ID NO: 2381492 - RNA, 19 nt, Homo sapiens
  misc_RNA (1)...(19): siRNA sense strand
ccgggaagucgcaggauga

SEQ ID NO: 2381493 - RNA, 19 nt, Homo sapiens
  misc_RNA (1)...(19): siRNA sense strand
ccuacgaggaugaggagga

SEQ ID NO: 2381494 - RNA, 19 nt, Homo sapiens
  misc_RNA (1)...(19): siRNA sense strand
gugagcagauuuacuauaa

SEQ ID NO: 2381495 - RNA, 19 nt, Homo sapiens
  misc_RNA (1)...(19): siRNA sense strand
ccucagagucggacaacca

SEQ ID NO: 2381496 - RNA, 19 nt, Homo sapiens
  misc_RNA (1)...(19): siRNA sense strand
gugagaagcaggaggacgu

SEQ ID NO: 2381497 - RNA, 19 nt, Homo sapiens
  misc_RNA (1)...(19): siRNA sense strand
acgaggaugaggaggauga

SEQ ID NO: 2381498 - RNA, 19 nt, Homo sapiens
  misc_RNA (1)...(19): siRNA sense strand
guggagaagcugaagacca

SEQ ID NO: 2381499 - RNA, 19 nt, Homo sapiens
  misc_RNA (1)...(19): siRNA sense strand
aggaggaggacgacgauga

SEQ ID NO: 2381500 - RNA, 19 nt, Homo sapiens
  misc_RNA (1)...(19): siRNA sense strand
cgauacacgugcagguacu

SEQ ID NO: 2381501 - RNA, 19 nt, Homo sapiens
  misc_RNA (1)...(19): siRNA sense strand
agaucagugagcagauuua

SEQ ID NO: 2381502 - RNA, 19 nt, Homo sapiens
  misc_RNA (1)...(19): siRNA sense strand
ucagaaacuuuauugccaa

SEQ ID NO: 2381503 - RNA, 19 nt, Homo sapiens
  misc_RNA (1)...(19): siRNA sense strand
acguggaggaggaggacga

SEQ ID NO: 2381504 - RNA, 19 nt, Homo sapiens
  misc_RNA (1)...(19): siRNA sense strand
aguucugcguggaugcaaa

SEQ ID NO: 2381505 - RNA, 19 nt, Homo sapiens
  misc_RNA (1)...(19): siRNA sense strand
gugaggagcugcuggugca

SEQ ID NO: 2381506 - RNA, 19 nt, Homo sapiens
  misc_RNA (1)...(19): siRNA sense strand
aggccuagccagugagaag

SEQ ID NO: 2381507 - RNA, 19 nt, Homo sapiens
  misc_RNA (1)...(19): siRNA sense strand
gcagugacuuugaggacgu

SEQ ID NO: 2381508 - RNA, 19 nt, Homo sapiens
  misc_RNA (1)...(19): siRNA sense strand
cggugacguuguaaauaau

SEQ ID NO: 2381509 - RNA, 19 nt, Homo sapiens
  misc_RNA (1)...(19): siRNA sense strand
gggccaagaggaagaugga

SEQ ID NO: 2381510 - RNA, 19 nt, Homo sapiens
  misc_RNA (1)...(19): siRNA sense strand
cccacaacuugcuggucaa

SEQ ID NO: 2381511 - RNA, 19 nt, Homo sapiens
  misc_RNA (1)...(19): siRNA sense strand
gaaccaagcaucaacgcga

SEQ ID NO: 2381512 - RNA, 19 nt, Homo sapiens
  misc_RNA (1)...(19): siRNA sense strand
auaauauguaugagcccaa

SEQ ID NO: 2381513 - RNA, 19 nt, Homo sapiens
  misc_RNA (1)...(19): siRNA sense strand
gagcccugaaggagaagua

SEQ ID NO: 2381514 - RNA, 19 nt, Homo sapiens
  misc_RNA (1)...(19): siRNA sense strand
ccagcaaccuucagcggca

SEQ ID NO: 2381515 - RNA, 19 nt, Homo sapiens
  misc_RNA (1)...(19): siRNA sense strand
cuucgaaccuccagcggca

SEQ ID NO: 2381516 - RNA, 19 nt, Homo sapiens
  misc_RNA (1)...(19): siRNA sense strand
gcuucgggcagcagaccaa

SEQ ID NO: 2381517 - RNA, 19 nt, Homo sapiens
  misc_RNA (1)...(19): siRNA sense strand
gccaagaggaagauggaag

SEQ ID NO: 2381518 - RNA, 19 nt, Homo sapiens
  misc_RNA (1)...(19): siRNA sense strand
cuuaauuccaccuuagauu

SEQ ID NO: 2381519 - RNA, 19 nt, Homo sapiens
  misc_RNA (1)...(19): siRNA sense strand
ggaaacagugaaagagaaa

SEQ ID NO: 2381520 - RNA, 19 nt, Homo sapiens
  misc_RNA (1)...(19): siRNA sense strand
gggcacaacagguggagaa

SEQ ID NO: 2381521 - RNA, 19 nt, Homo sapiens
  misc_RNA (1)...(19): siRNA sense strand
cauaugaacaggagaaaga

SEQ ID NO: 2381522 - RNA, 19 nt, Homo sapiens
  misc_RNA (1)...(19): siRNA sense strand
ccucauaugaacaggagaa

SEQ ID NO: 2381523 - RNA, 19 nt, Homo sapiens
  misc_RNA (1)...(19): siRNA sense strand
ccucauggaaacagugaaa

SEQ ID NO: 2381524 - RNA, 19 nt, Homo sapiens
  misc_RNA (1)...(19): siRNA sense strand
caacagguggagaaggaaa

SEQ ID NO: 2381525 - RNA, 19 nt, Homo sapiens
  misc_RNA (1)...(19): siRNA sense strand
agaugaagaaugagcguau

SEQ ID NO: 2381526 - RNA, 19 nt, Homo sapiens
  misc_RNA (1)...(19): siRNA sense strand
gagccgaaacuauaagaaa

SEQ ID NO: 2381527 - RNA, 19 nt, Homo sapiens
  misc_RNA (1)...(19): siRNA sense strand
gcuagagcuucgagacaga

SEQ ID NO: 2381528 - RNA, 19 nt, Homo sapiens
  misc_RNA (1)...(19): siRNA sense strand
cggcugauccucauggaaa

SEQ ID NO: 2381529 - RNA, 19 nt, Homo sapiens
  misc_RNA (1)...(19): siRNA sense strand
uggaaacagugaaagagaa

SEQ ID NO: 2381530 - RNA, 19 nt, Homo sapiens
  misc_RNA (1)...(19): siRNA sense strand
ccagaauucuccagcaaca

SEQ ID NO: 2381531 - RNA, 19 nt, Homo sapiens
  misc_RNA (1)...(19): siRNA sense strand
ggagaaggaaagggagcua

SEQ ID NO: 2381532 - RNA, 19 nt, Homo sapiens
  misc_RNA (1)...(19): siRNA sense strand
gagcggcaccagaaggaua

SEQ ID NO: 2381533 - RNA, 19 nt, Homo sapiens
  misc_RNA (1)...(19): siRNA sense strand
ucauggaaacagugaaaga

SEQ ID NO: 2381534 - RNA, 19 nt, Homo sapiens
  misc_RNA (1)...(19): siRNA sense strand
cacaacagguggagaagga

SEQ ID NO: 2381535 - RNA, 19 nt, Homo sapiens
  misc_RNA (1)...(19): siRNA sense strand
gcgccaagaaccagaacca

SEQ ID NO: 2381536 - RNA, 19 nt, Homo sapiens
  misc_RNA (1)...(19): siRNA sense strand
gcaggagaccauagacaga

SEQ ID NO: 2381537 - RNA, 19 nt, Homo sapiens
  misc_RNA (1)...(19): siRNA sense strand
ccagaaggauauaaccaga

SEQ ID NO: 2381538 - RNA, 19 nt, Homo sapiens
  misc_RNA (1)...(19): siRNA sense strand
gccgaaacuauaagaaaca

SEQ ID NO: 2381539 - RNA, 19 nt, Homo sapiens
  misc_RNA (1)...(19): siRNA sense strand
ccaagaaccagaaccagaa

SEQ ID NO: 2381540 - RNA, 19 nt, Homo sapiens
  misc_RNA (1)...(19): siRNA sense strand
aggagaaggaggagcuguu

SEQ ID NO: 2381541 - RNA, 19 nt, Homo sapiens
  misc_RNA (1)...(19): siRNA sense strand
gagacagacuggaugagca

SEQ ID NO: 2381542 - RNA, 19 nt, Homo sapiens
  misc_RNA (1)...(19): siRNA sense strand
cagcaggagaccauagaca

SEQ ID NO: 2381543 - RNA, 19 nt, Homo sapiens
  misc_RNA (1)...(19): siRNA sense strand
agaaggaaagggagcuaga

SEQ ID NO: 2381544 - RNA, 19 nt, Homo sapiens
  misc_RNA (1)...(19): siRNA sense strand
gccaagaaccagaaccaga

SEQ ID NO: 2381545 - RNA, 19 nt, Homo sapiens
  misc_RNA (1)...(19): siRNA sense strand
cagaaggauauaaccagaa

SEQ ID NO: 2381546 - RNA, 19 nt, Homo sapiens
  misc_RNA (1)...(19): siRNA sense strand
ugaagaggguggaggaguc

SEQ ID NO: 2381547 - RNA, 19 nt, Homo sapiens
  misc_RNA (1)...(19): siRNA sense strand
auggaaacagugaaagaga

SEQ ID NO: 2381548 - RNA, 19 nt, Homo sapiens
  misc_RNA (1)...(19): siRNA sense strand
agaaggauauaaccagaau

SEQ ID NO: 2381549 - RNA, 19 nt, Homo sapiens
  misc_RNA (1)...(19): siRNA sense strand
aaccagaauucuccagcaa

SEQ ID NO: 2381550 - RNA, 19 nt, Homo sapiens
  misc_RNA (1)...(19): siRNA sense strand
aaaugaagaggguggagga

SEQ ID NO: 2381551 - RNA, 19 nt, Homo sapiens
  misc_RNA (1)...(19): siRNA sense strand
augaagaggcccugcaagu

SEQ ID NO: 2381552 - RNA, 19 nt, Homo sapiens
  misc_RNA (1)...(19): siRNA sense strand
agcaacaugaggaggaaaa

SEQ ID NO: 2381553 - RNA, 19 nt, Homo sapiens
  misc_RNA (1)...(19): siRNA sense strand
uggaaggaaagaaugaaga

SEQ ID NO: 2381554 - RNA, 19 nt, Homo sapiens
  misc_RNA (1)...(19): siRNA sense strand
gaaagaaugaagaggcccu

SEQ ID NO: 2381555 - RNA, 19 nt, Homo sapiens
  misc_RNA (1)...(19): siRNA sense strand
ggauauaaccagaauucuc

SEQ ID NO: 2381556 - RNA, 19 nt, Homo sapiens
  misc_RNA (1)...(19): siRNA sense strand
ccagcaacaugaggaggaa

SEQ ID NO: 2381557 - RNA, 19 nt, Homo sapiens
  misc_RNA (1)...(19): siRNA sense strand
aaagaagcgccaagaacca

SEQ ID NO: 2381558 - RNA, 19 nt, Homo sapiens
  misc_RNA (1)...(19): siRNA sense strand
aaucugauauuggaggaaa

SEQ ID NO: 2381559 - RNA, 19 nt, Homo sapiens
  misc_RNA (1)...(19): siRNA sense strand
auucugagccgaaacuaua

SEQ ID NO: 2381560 - RNA, 19 nt, Homo sapiens
  misc_RNA (1)...(19): siRNA sense strand
cagaaaggaggguggacca

SEQ ID NO: 2381561 - RNA, 19 nt, Homo sapiens
  misc_RNA (1)...(19): siRNA sense strand
guuuggagugaaugcaaua

SEQ ID NO: 2381562 - RNA, 19 nt, Homo sapiens
  misc_RNA (1)...(19): siRNA sense strand
uggaaguugcucuguuaaa

SEQ ID NO: 2381563 - RNA, 19 nt, Homo sapiens
  misc_RNA (1)...(19): siRNA sense strand
gauagagaccaaugggacu

SEQ ID NO: 2381564 - RNA, 19 nt, Homo sapiens
  misc_RNA (1)...(19): siRNA sense strand
uugugaacuuuguggacau

SEQ ID NO: 2381565 - RNA, 19 nt, Homo sapiens
  misc_RNA (1)...(19): siRNA sense strand
ggcauucagcagaggagua

SEQ ID NO: 2381566 - RNA, 19 nt, Homo sapiens
  misc_RNA (1)...(19): siRNA sense strand
caggauucucagcaaguua

SEQ ID NO: 2381567 - RNA, 19 nt, Homo sapiens
  misc_RNA (1)...(19): siRNA sense strand
ccacagaauauggagguca

SEQ ID NO: 2381568 - RNA, 19 nt, Homo sapiens
  misc_RNA (1)...(19): siRNA sense strand
cuauauaguugggaagcca

SEQ ID NO: 2381569 - RNA, 19 nt, Homo sapiens
  misc_RNA (1)...(19): siRNA sense strand
agugcaguuuggagugaau

SEQ ID NO: 2381570 - RNA, 19 nt, Homo sapiens
  misc_RNA (1)...(19): siRNA sense strand
ccucuuacuacuuggaguu

SEQ ID NO: 2381571 - RNA, 19 nt, Homo sapiens
  misc_RNA (1)...(19): siRNA sense strand
cuagagaguaaaaguacaa

SEQ ID NO: 2381572 - RNA, 19 nt, Homo sapiens
  misc_RNA (1)...(19): siRNA sense strand
ggaccaaagacaugggcaa

SEQ ID NO: 2381573 - RNA, 19 nt, Homo sapiens
  misc_RNA (1)...(19): siRNA sense strand
augaagaggaagaggagau

SEQ ID NO: 2381574 - RNA, 19 nt, Homo sapiens
  misc_RNA (1)...(19): siRNA sense strand
ccauugaugaagaggaaga

SEQ ID NO: 2381575 - RNA, 19 nt, Homo sapiens
  misc_RNA (1)...(19): siRNA sense strand
uggccaggguuuugggaaa

SEQ ID NO: 2381576 - RNA, 19 nt, Homo sapiens
  misc_RNA (1)...(19): siRNA sense strand
aggaauaugacgacggcga

SEQ ID NO: 2381577 - RNA, 19 nt, Homo sapiens
  misc_RNA (1)...(19): siRNA sense strand
acacagaagaugaggagac

SEQ ID NO: 2381578 - RNA, 19 nt, Homo sapiens
  misc_RNA (1)...(19): siRNA sense strand
cugaaggcauugaacgaca

SEQ ID NO: 2381579 - RNA, 19 nt, Homo sapiens
  misc_RNA (1)...(19): siRNA sense strand
ggagauugaggcuagggaa

SEQ ID NO: 2381580 - RNA, 19 nt, Homo sapiens
  misc_RNA (1)...(19): siRNA sense strand
augccaaagugauugaaaa

SEQ ID NO: 2381581 - RNA, 19 nt, Homo sapiens
  misc_RNA (1)...(19): siRNA sense strand
gaaaguagugucucgguca

SEQ ID NO: 2381582 - RNA, 19 nt, Homo sapiens
  misc_RNA (1)...(19): siRNA sense strand
aagaggagauugaggcuag

SEQ ID NO: 2381583 - RNA, 19 nt, Homo sapiens
  misc_RNA (1)...(19): siRNA sense strand
gagauugaggcuagggaag

SEQ ID NO: 2381584 - RNA, 19 nt, Homo sapiens
  misc_RNA (1)...(19): siRNA sense strand
ugugcuuacuggaagacaa

SEQ ID NO: 2381585 - RNA, 19 nt, Homo sapiens
  misc_RNA (1)...(19): siRNA sense strand
gcgcaaaaggagagauuuc

SEQ ID NO: 2381586 - RNA, 19 nt, Homo sapiens
  misc_RNA (1)...(19): siRNA sense strand
gagcgcaaaaggagagauu

SEQ ID NO: 2381587 - RNA, 19 nt, Homo sapiens
  misc_RNA (1)...(19): siRNA sense strand
gugcuuacuggaagacaau

SEQ ID NO: 2381588 - RNA, 19 nt, Homo sapiens
  misc_RNA (1)...(19): siRNA sense strand
gcuuacuggaagacaauga

SEQ ID NO: 2381589 - RNA, 19 nt, Homo sapiens
  misc_RNA (1)...(19): siRNA sense strand
aagucauacuggagagaaa

SEQ ID NO: 2381590 - RNA, 19 nt, Homo sapiens
  misc_RNA (1)...(19): siRNA sense strand
auguaaugacugugguaaa

SEQ ID NO: 2381591 - RNA, 19 nt, Homo sapiens
  misc_RNA (1)...(19): siRNA sense strand
augucauguuggagaauua

SEQ ID NO: 2381592 - RNA, 19 nt, Homo sapiens
  misc_RNA (1)...(19): siRNA sense strand
augcagaaaaugugggaaa

SEQ ID NO: 2381593 - RNA, 19 nt, Homo sapiens
  misc_RNA (1)...(19): siRNA sense strand
cgaaagaguggcugcaaca

SEQ ID NO: 2381594 - RNA, 19 nt, Homo sapiens
  misc_RNA (1)...(19): siRNA sense strand
ugagaauucaugauggaaa

SEQ ID NO: 2381595 - RNA, 19 nt, Homo sapiens
  misc_RNA (1)...(19): siRNA sense strand
aauucacacuucagagaaa

SEQ ID NO: 2381596 - RNA, 19 nt, Homo sapiens
  misc_RNA (1)...(19): siRNA sense strand
cuauuugaguguaaggaau

SEQ ID NO: 2381597 - RNA, 19 nt, Homo sapiens
  misc_RNA (1)...(19): siRNA sense strand
cuuauuggagaaagggaaa

SEQ ID NO: 2381598 - RNA, 19 nt, Homo sapiens
  misc_RNA (1)...(19): siRNA sense strand
aauucacaguggaaagaaa

SEQ ID NO: 2381599 - RNA, 19 nt, Homo sapiens
  misc_RNA (1)...(19): siRNA sense strand
gggaagaaaccuuuaaaau

SEQ ID NO: 2381600 - RNA, 19 nt, Homo sapiens
  misc_RNA (1)...(19): siRNA sense strand
gugggaaggccuugaguca

SEQ ID NO: 2381601 - RNA, 19 nt, Homo sapiens
  misc_RNA (1)...(19): siRNA sense strand
gcucagaccuuauucgaca

SEQ ID NO: 2381602 - RNA, 19 nt, Homo sapiens
  misc_RNA (1)...(19): siRNA sense strand
agagaaaaucccugaaaau

SEQ ID NO: 2381603 - RNA, 19 nt, Homo sapiens
  misc_RNA (1)...(19): siRNA sense strand
cccuaugaauguaguaaau

SEQ ID NO: 2381604 - RNA, 19 nt, Homo sapiens
  misc_RNA (1)...(19): siRNA sense strand
gcauauggucggaguucau

SEQ ID NO: 2381605 - RNA, 19 nt, Homo sapiens
  misc_RNA (1)...(19): siRNA sense strand
ccuuauucaacaucagaaa

SEQ ID NO: 2381606 - RNA, 19 nt, Homo sapiens
  misc_RNA (1)...(19): siRNA sense strand
cagagaauucacaguggaa

SEQ ID NO: 2381607 - RNA, 19 nt, Homo sapiens
  misc_RNA (1)...(19): siRNA sense strand
ucacacgacauaagagaau

SEQ ID NO: 2381608 - RNA, 19 nt, Homo sapiens
  misc_RNA (1)...(19): siRNA sense strand
aagucagagucuacagcaa

SEQ ID NO: 2381609 - RNA, 19 nt, Homo sapiens
  misc_RNA (1)...(19): siRNA sense strand
agucagagucuacagcaaa

SEQ ID NO: 2381610 - RNA, 19 nt, Homo sapiens
  misc_RNA (1)...(19): siRNA sense strand
aauucaugauggaaaggaa

SEQ ID NO: 2381611 - RNA, 19 nt, Homo sapiens
  misc_RNA (1)...(19): siRNA sense strand
cagaaaguucauacaaaga

SEQ ID NO: 2381612 - RNA, 19 nt, Homo sapiens
  misc_RNA (1)...(19): siRNA sense strand
auucaugauggaaaggaaa

SEQ ID NO: 2381613 - RNA, 19 nt, Homo sapiens
  misc_RNA (1)...(19): siRNA sense strand
gugugaggaauguggaaaa

SEQ ID NO: 2381614 - RNA, 19 nt, Homo sapiens
  misc_RNA (1)...(19): siRNA sense strand
gguagagccaguaagaaga

SEQ ID NO: 2381615 - RNA, 19 nt, Homo sapiens
  misc_RNA (1)...(19): siRNA sense strand
aguaaaugugggaaggcau

SEQ ID NO: 2381616 - RNA, 19 nt, Homo sapiens
  misc_RNA (1)...(19): siRNA sense strand
ccuccaaaucaaugcaaca

SEQ ID NO: 2381617 - RNA, 19 nt, Homo sapiens
  misc_RNA (1)...(19): siRNA sense strand
guguaaggaaugugggaag

SEQ ID NO: 2381618 - RNA, 19 nt, Homo sapiens
  misc_RNA (1)...(19): siRNA sense strand
cagucuuuguuguacauaa

SEQ ID NO: 2381619 - RNA, 19 nt, Homo sapiens
  misc_RNA (1)...(19): siRNA sense strand
gaagaugucauguuggaga

SEQ ID NO: 2381620 - RNA, 19 nt, Homo sapiens
  misc_RNA (1)...(19): siRNA sense strand
aagaugucauguuggagaa

SEQ ID NO: 2381621 - RNA, 19 nt, Homo sapiens
  misc_RNA (1)...(19): siRNA sense strand
gagaauucacaguggaaag

SEQ ID NO: 2381622 - RNA, 19 nt, Homo sapiens
  misc_RNA (1)...(19): siRNA sense strand
aaaccguacaaaugugaua

SEQ ID NO: 2381623 - RNA, 19 nt, Homo sapiens
  misc_RNA (1)...(19): siRNA sense strand
cuucagagaaaccguacaa

SEQ ID NO: 2381624 - RNA, 19 nt, Homo sapiens
  misc_RNA (1)...(19): siRNA sense strand
agaaagggcauccagggaa

SEQ ID NO: 2381625 - RNA, 19 nt, Homo sapiens
  misc_RNA (1)...(19): siRNA sense strand
cugcaaaccuuaaaauaca

SEQ ID NO: 2381626 - RNA, 19 nt, Homo sapiens
  misc_RNA (1)...(19): siRNA sense strand
ccauauacaugcaaaacau

SEQ ID NO: 2381627 - RNA, 19 nt, Homo sapiens
  misc_RNA (1)...(19): siRNA sense strand
ggagagaagccuuuugaau

SEQ ID NO: 2381628 - RNA, 19 nt, Homo sapiens
  misc_RNA (1)...(19): siRNA sense strand
cgcccaacaugaaagaauu

SEQ ID NO: 2381629 - RNA, 19 nt, Homo sapiens
  misc_RNA (1)...(19): siRNA sense strand
ugaaagaagucauacugga

SEQ ID NO: 2381630 - RNA, 19 nt, Homo sapiens
  misc_RNA (1)...(19): siRNA sense strand
augcaacaaaucugggcaa

SEQ ID NO: 2381631 - RNA, 19 nt, Homo sapiens
  misc_RNA (1)...(19): siRNA sense strand
ugcaauaaauguggggaaa

SEQ ID NO: 2381632 - RNA, 19 nt, Homo sapiens
  misc_RNA (1)...(19): siRNA sense strand
ccgaauaucucucacacga

SEQ ID NO: 2381633 - RNA, 19 nt, Homo sapiens
  misc_RNA (1)...(19): siRNA sense strand
augcaauaaauguggggaa

SEQ ID NO: 2381634 - RNA, 19 nt, Homo sapiens
  misc_RNA (1)...(19): siRNA sense strand
augcgaaggccuuaaguca

SEQ ID NO: 2381635 - RNA, 19 nt, Homo sapiens
  misc_RNA (1)...(19): siRNA sense strand
gugguaaggccuuuaguca

SEQ ID NO: 2381636 - RNA, 19 nt, Homo sapiens
  misc_RNA (1)...(19): siRNA sense strand
ugguagagccaguaagaag

SEQ ID NO: 2381637 - RNA, 19 nt, Homo sapiens
  misc_RNA (1)...(19): siRNA sense strand
uguaaggaaugugggaaga

SEQ ID NO: 2381638 - RNA, 19 nt, Homo sapiens
  misc_RNA (1)...(19): siRNA sense strand
agaaaagccaugaaugcaa

SEQ ID NO: 2381639 - RNA, 19 nt, Homo sapiens
  misc_RNA (1)...(19): siRNA sense strand
aagucaccauuuagagaau

SEQ ID NO: 2381640 - RNA, 19 nt, Homo sapiens
  misc_RNA (1)...(19): siRNA sense strand
gcagaaaaugugggaaauu

SEQ ID NO: 2381641 - RNA, 19 nt, Homo sapiens
  misc_RNA (1)...(19): siRNA sense strand
gaaagggcauccagggaag

SEQ ID NO: 2381642 - RNA, 19 nt, Homo sapiens
  misc_RNA (1)...(19): siRNA sense strand
uguaaugacugugguaaaa

SEQ ID NO: 2381643 - RNA, 19 nt, Homo sapiens
  misc_RNA (1)...(19): siRNA sense strand
augcaauaaaugugagaag

SEQ ID NO: 2381644 - RNA, 19 nt, Homo sapiens
  misc_RNA (1)...(19): siRNA sense strand
ggaaagaaaagccaugaau

SEQ ID NO: 2381645 - RNA, 19 nt, Homo sapiens
  misc_RNA (1)...(19): siRNA sense strand
cagugcagaaagugcggaa

SEQ ID NO: 2381646 - RNA, 19 nt, Homo sapiens
  misc_RNA (1)...(19): siRNA sense strand
gaauguaguaaauguggga

SEQ ID NO: 2381647 - RNA, 19 nt, Homo sapiens
  misc_RNA (1)...(19): siRNA sense strand
gcuggaugcuggagcgcaa

SEQ ID NO: 2381648 - RNA, 19 nt, Homo sapiens
  misc_RNA (1)...(19): siRNA sense strand
gagaagugcuggagccgga

SEQ ID NO: 2381649 - RNA, 19 nt, Homo sapiens
  misc_RNA (1)...(19): siRNA sense strand
cgugaaaucaugaacgaca

SEQ ID NO: 2381650 - RNA, 19 nt, Homo sapiens
  misc_RNA (1)...(19): siRNA sense strand
ucugcaagaaggaggaaau

SEQ ID NO: 2381651 - RNA, 19 nt, Homo sapiens
  misc_RNA (1)...(19): siRNA sense strand
uggagaugcacauggagaa

SEQ ID NO: 2381652 - RNA, 19 nt, Homo sapiens
  misc_RNA (1)...(19): siRNA sense strand
ggagagauggucaagguca

SEQ ID NO: 2381653 - RNA, 19 nt, Homo sapiens
  misc_RNA (1)...(19): siRNA sense strand
acucaagcuugguggaaac

SEQ ID NO: 2381654 - RNA, 19 nt, Homo sapiens
  misc_RNA (1)...(19): siRNA sense strand
gguauaagggagagauggu

SEQ ID NO: 2381655 - RNA, 19 nt, Homo sapiens
  misc_RNA (1)...(19): siRNA sense strand
ccacugaggucuacuggga

SEQ ID NO: 2381656 - RNA, 19 nt, Homo sapiens
  misc_RNA (1)...(19): siRNA sense strand
gcgucagcuucgagugcuu

SEQ ID NO: 2381657 - RNA, 19 nt, Homo sapiens
  misc_RNA (1)...(19): siRNA sense strand
agcgcaaggugguagacaa

SEQ ID NO: 2381658 - RNA, 19 nt, Homo sapiens
  misc_RNA (1)...(19): siRNA sense strand
cugagaacaagcccagaaa

SEQ ID NO: 2381659 - RNA, 19 nt, Homo sapiens
  misc_RNA (1)...(19): siRNA sense strand
gugcaugcaggcugggaga

SEQ ID NO: 2381660 - RNA, 19 nt, Homo sapiens
  misc_RNA (1)...(19): siRNA sense strand
acgcugaagauguggggua

SEQ ID NO: 2381661 - RNA, 19 nt, Homo sapiens
  misc_RNA (1)...(19): siRNA sense strand
acaguaggaagguggucaa

SEQ ID NO: 2381662 - RNA, 19 nt, Homo sapiens
  misc_RNA (1)...(19): siRNA sense strand
guggagaugcacauggaga

SEQ ID NO: 2381663 - RNA, 19 nt, Homo sapiens
  misc_RNA (1)...(19): siRNA sense strand
gugguucauuugaggccaa

SEQ ID NO: 2381664 - RNA, 19 nt, Homo sapiens
  misc_RNA (1)...(19): siRNA sense strand
caaacggauccgagagaag

SEQ ID NO: 2381665 - RNA, 19 nt, Homo sapiens
  misc_RNA (1)...(19): siRNA sense strand
gcgagagggcauugagccu

SEQ ID NO: 2381666 - RNA, 19 nt, Homo sapiens
  misc_RNA (1)...(19): siRNA sense strand
ucucaaucuucgagcugaa

SEQ ID NO: 2381667 - RNA, 19 nt, Homo sapiens
  misc_RNA (1)...(19): siRNA sense strand
gcugaugaggacagugcaa

SEQ ID NO: 2381668 - RNA, 19 nt, Homo sapiens
  misc_RNA (1)...(19): siRNA sense strand
agggaaaggcagagagcug

SEQ ID NO: 2381669 - RNA, 19 nt, Homo sapiens
  misc_RNA (1)...(19): siRNA sense strand
acugaaaagcccugggaga

SEQ ID NO: 2381670 - RNA, 19 nt, Homo sapiens
  misc_RNA (1)...(19): siRNA sense strand
cugaaaagcccugggagaa

SEQ ID NO: 2381671 - RNA, 19 nt, Homo sapiens
  misc_RNA (1)...(19): siRNA sense strand
cugaagaaauugauccagu

SEQ ID NO: 2381672 - RNA, 19 nt, Homo sapiens
  misc_RNA (1)...(19): siRNA sense strand
aaaugaggacagaagaaaa

SEQ ID NO: 2381673 - RNA, 19 nt, Homo sapiens
  misc_RNA (1)...(19): siRNA sense strand
ugggaggacuucuugggaa

SEQ ID NO: 2381674 - RNA, 19 nt, Homo sapiens
  misc_RNA (1)...(19): siRNA sense strand
cccggaagcaagacgcaaa

SEQ ID NO: 2381675 - RNA, 19 nt, Homo sapiens
  misc_RNA (1)...(19): siRNA sense strand
guacgaagcugcagcgcug

SEQ ID NO: 2381676 - RNA, 19 nt, Homo sapiens
  misc_RNA (1)...(19): siRNA sense strand
agagaaugcugaugaggac

SEQ ID NO: 2381677 - RNA, 19 nt, Homo sapiens
  misc_RNA (1)...(19): siRNA sense strand
aaaucaaguaagaguacga

SEQ ID NO: 2381678 - RNA, 19 nt, Homo sapiens
  misc_RNA (1)...(19): siRNA sense strand
gcucuaagguggaaaccag

SEQ ID NO: 2381679 - RNA, 19 nt, Homo sapiens
  misc_RNA (1)...(19): siRNA sense strand
gcuaauugcuagugcucug

SEQ ID NO: 2381680 - RNA, 19 nt, Homo sapiens
  misc_RNA (1)...(19): siRNA sense strand
acauuaugcauuugagacu

SEQ ID NO: 2381681 - RNA, 19 nt, Homo sapiens
  misc_RNA (1)...(19): siRNA sense strand
ggcagagagcuguggucau

SEQ ID NO: 2381682 - RNA, 19 nt, Homo sapiens
  misc_RNA (1)...(19): siRNA sense strand
aggaagaagaggaugguga

SEQ ID NO: 2381683 - RNA, 19 nt, Homo sapiens
  misc_RNA (1)...(19): siRNA sense strand
aggacagagaacagcuuua

SEQ ID NO: 2381684 - RNA, 19 nt, Homo sapiens
  misc_RNA (1)...(19): siRNA sense strand
gagaacagcuuuacagcac

SEQ ID NO: 2381685 - RNA, 19 nt, Homo sapiens
  misc_RNA (1)...(19): siRNA sense strand
agaagaggauggugagcag

SEQ ID NO: 2381686 - RNA, 19 nt, Homo sapiens
  misc_RNA (1)...(19): siRNA sense strand
acgucaaccuagagagacu

SEQ ID NO: 2381687 - RNA, 19 nt, Homo sapiens
  misc_RNA (1)...(19): siRNA sense strand
gcacaaaggaggagcugac

SEQ ID NO: 2381688 - RNA, 19 nt, Homo sapiens
  misc_RNA (1)...(19): siRNA sense strand
agauggaugcccugggaga

SEQ ID NO: 2381689 - RNA, 19 nt, Homo sapiens
  misc_RNA (1)...(19): siRNA sense strand
ccaaugaagugguggaugc

SEQ ID NO: 2381690 - RNA, 19 nt, Homo sapiens
  misc_RNA (1)...(19): siRNA sense strand
cagcuugaacugaggaagu

SEQ ID NO: 2381691 - RNA, 19 nt, Homo sapiens
  misc_RNA (1)...(19): siRNA sense strand
augaagugguggaugcuga

SEQ ID NO: 2381692 - RNA, 19 nt, Homo sapiens
  misc_RNA (1)...(19): siRNA sense strand
caggagaaucaaugaguac

SEQ ID NO: 2381693 - RNA, 19 nt, Homo sapiens
  misc_RNA (1)...(19): siRNA sense strand
accuagagagacugggcua

SEQ ID NO: 2381694 - RNA, 19 nt, Homo sapiens
  misc_RNA (1)...(19): siRNA sense strand
aggaggaccagguguacaa

SEQ ID NO: 2381695 - RNA, 19 nt, Homo sapiens
  misc_RNA (1)...(19): siRNA sense strand
agacuuuacucaaggagca

SEQ ID NO: 2381696 - RNA, 19 nt, Homo sapiens
  misc_RNA (1)...(19): siRNA sense strand
augcaguaaaucaggagaa

SEQ ID NO: 2381697 - RNA, 19 nt, Homo sapiens
  misc_RNA (1)...(19): siRNA sense strand
caguaaaucaggagaacag

SEQ ID NO: 2381698 - RNA, 19 nt, Homo sapiens
  misc_RNA (1)...(19): siRNA sense strand
uggaugacacagugaauca

SEQ ID NO: 2381699 - RNA, 19 nt, Homo sapiens
  misc_RNA (1)...(19): siRNA sense strand
ccuguauggcugacaaaga

SEQ ID NO: 2381700 - RNA, 19 nt, Homo sapiens
  misc_RNA (1)...(19): siRNA sense strand
cgguaauccaucuuauaau

SEQ ID NO: 2381701 - RNA, 19 nt, Homo sapiens
  misc_RNA (1)...(19): siRNA sense strand
uguacuggaaugacugaaa

SEQ ID NO: 2381702 - RNA, 19 nt, Homo sapiens
  misc_RNA (1)...(19): siRNA sense strand
ggcuauaguacauucagaa

SEQ ID NO: 2381703 - RNA, 19 nt, Homo sapiens
  misc_RNA (1)...(19): siRNA sense strand
uaguggacuggauggguua

SEQ ID NO: 2381704 - RNA, 19 nt, Homo sapiens
  misc_RNA (1)...(19): siRNA sense strand
gauaauucaaguuucggua

SEQ ID NO: 2381705 - RNA, 19 nt, Homo sapiens
  misc_RNA (1)...(19): siRNA sense strand
caaccaagcaacagagaaa

SEQ ID NO: 2381706 - RNA, 19 nt, Homo sapiens
  misc_RNA (1)...(19): siRNA sense strand
aaacagauaccgagauauu

SEQ ID NO: 2381707 - RNA, 19 nt, Homo sapiens
  misc_RNA (1)...(19): siRNA sense strand
guuaauucagagaagguaa

SEQ ID NO: 2381708 - RNA, 19 nt, Homo sapiens
  misc_RNA (1)...(19): siRNA sense strand
ggcccaaaugagagaacaa

SEQ ID NO: 2381709 - RNA, 19 nt, Homo sapiens
  misc_RNA (1)...(19): siRNA sense strand
gggaaucaaccaagcaaca

SEQ ID NO: 2381710 - RNA, 19 nt, Homo sapiens
  misc_RNA (1)...(19): siRNA sense strand
aaacgaaggagcaguauca

SEQ ID NO: 2381711 - RNA, 19 nt, Homo sapiens
  misc_RNA (1)...(19): siRNA sense strand
uguaaacgauuaugaggga

SEQ ID NO: 2381712 - RNA, 19 nt, Homo sapiens
  misc_RNA (1)...(19): siRNA sense strand
cauuucaacaucauggaua

SEQ ID NO: 2381713 - RNA, 19 nt, Homo sapiens
  misc_RNA (1)...(19): siRNA sense strand
agaagagacagguggagca

SEQ ID NO: 2381714 - RNA, 19 nt, Homo sapiens
  misc_RNA (1)...(19): siRNA sense strand
ggcuuuagaacuuaagaau

SEQ ID NO: 2381715 - RNA, 19 nt, Homo sapiens
  misc_RNA (1)...(19): siRNA sense strand
ccgagauauucuuccauuu

SEQ ID NO: 2381716 - RNA, 19 nt, Homo sapiens
  misc_RNA (1)...(19): siRNA sense strand
cgaaggagcaguaucacuu

SEQ ID NO: 2381717 - RNA, 19 nt, Homo sapiens
  misc_RNA (1)...(19): siRNA sense strand
gaaucugccuggugaguuc

SEQ ID NO: 2381718 - RNA, 19 nt, Homo sapiens
  misc_RNA (1)...(19): siRNA sense strand
gcaggaauuuauggcuuua

SEQ ID NO: 2381719 - RNA, 19 nt, Homo sapiens
  misc_RNA (1)...(19): siRNA sense strand
guuacgauauugugcuuga

SEQ ID NO: 2381720 - RNA, 19 nt, Homo sapiens
  misc_RNA (1)...(19): siRNA sense strand
aaacagcagcguaugauau

SEQ ID NO: 2381721 - RNA, 19 nt, Homo sapiens
  misc_RNA (1)...(19): siRNA sense strand
augcaggaauuuauggcuu

SEQ ID NO: 2381722 - RNA, 19 nt, Homo sapiens
  misc_RNA (1)...(19): siRNA sense strand
uggauauaguggcccaaau

SEQ ID NO: 2381723 - RNA, 19 nt, Homo sapiens
  misc_RNA (1)...(19): siRNA sense strand
cagacagccaucaaggauu

SEQ ID NO: 2381724 - RNA, 19 nt, Homo sapiens
  misc_RNA (1)...(19): siRNA sense strand
ccauugugauucaggacga

SEQ ID NO: 2381725 - RNA, 19 nt, Homo sapiens
  misc_RNA (1)...(19): siRNA sense strand
cagacagcgggcaggaaau

SEQ ID NO: 2381726 - RNA, 19 nt, Homo sapiens
  misc_RNA (1)...(19): siRNA sense strand
cgaggaggagcaggagaaa

SEQ ID NO: 2381727 - RNA, 19 nt, Homo sapiens
  misc_RNA (1)...(19): siRNA sense strand
aaaucgaggcuuugggcaa

SEQ ID NO: 2381728 - RNA, 19 nt, Homo sapiens
  misc_RNA (1)...(19): siRNA sense strand
gugucuaauucaugaggca

SEQ ID NO: 2381729 - RNA, 19 nt, Homo sapiens
  misc_RNA (1)...(19): siRNA sense strand
aggcauuuacagagacaca

SEQ ID NO: 2381730 - RNA, 19 nt, Homo sapiens
  misc_RNA (1)...(19): siRNA sense strand
gcacacagcucuuggucuc

SEQ ID NO: 2381731 - RNA, 19 nt, Homo sapiens
  misc_RNA (1)...(19): siRNA sense strand
cagcaaagaaaucgaggcu

SEQ ID NO: 2381732 - RNA, 19 nt, Homo sapiens
  misc_RNA (1)...(19): siRNA sense strand
agagguugguugagccuga

SEQ ID NO: 2381733 - RNA, 19 nt, Homo sapiens
  misc_RNA (1)...(19): siRNA sense strand
gucuaauucaugaggcauu

SEQ ID NO: 2381734 - RNA, 19 nt, Homo sapiens
  misc_RNA (1)...(19): siRNA sense strand
cggaaaacccuucuagaca

SEQ ID NO: 2381735 - RNA, 19 nt, Homo sapiens
  misc_RNA (1)...(19): siRNA sense strand
auuuacagagacacagaaa

SEQ ID NO: 2381736 - RNA, 19 nt, Homo sapiens
  misc_RNA (1)...(19): siRNA sense strand
guugcagacaggagaguua

SEQ ID NO: 2381737 - RNA, 19 nt, Homo sapiens
  misc_RNA (1)...(19): siRNA sense strand
ugugaaaagucaucagaaa

SEQ ID NO: 2381738 - RNA, 19 nt, Homo sapiens
  misc_RNA (1)...(19): siRNA sense strand
caggauuacaggaggcaau

SEQ ID NO: 2381739 - RNA, 19 nt, Homo sapiens
  misc_RNA (1)...(19): siRNA sense strand
gaguauaugcagaagcaga

SEQ ID NO: 2381740 - RNA, 19 nt, Homo sapiens
  misc_RNA (1)...(19): siRNA sense strand
gguggagauuggagaaagu

SEQ ID NO: 2381741 - RNA, 19 nt, Homo sapiens
  misc_RNA (1)...(19): siRNA sense strand
cacuaagacugguguaaaa

SEQ ID NO: 2381742 - RNA, 19 nt, Homo sapiens
  misc_RNA (1)...(19): siRNA sense strand
cugacaugcuggugauuga

SEQ ID NO: 2381743 - RNA, 19 nt, Homo sapiens
  misc_RNA (1)...(19): siRNA sense strand
cuuuguaguuauugguaga

SEQ ID NO: 2381744 - RNA, 19 nt, Homo sapiens
  misc_RNA (1)...(19): siRNA sense strand
gauaaaacaaucagcagaa

SEQ ID NO: 2381745 - RNA, 19 nt, Homo sapiens
  misc_RNA (1)...(19): siRNA sense strand
uuaaagagcuccuggugga

SEQ ID NO: 2381746 - RNA, 19 nt, Homo sapiens
  misc_RNA (1)...(19): siRNA sense strand
cugcuaagaugcuugaaaa

SEQ ID NO: 2381747 - RNA, 19 nt, Homo sapiens
  misc_RNA (1)...(19): siRNA sense strand
acaacuggaagauaagaaa

SEQ ID NO: 2381748 - RNA, 19 nt, Homo sapiens
  misc_RNA (1)...(19): siRNA sense strand
ggcuggaggaauuggagaa

SEQ ID NO: 2381749 - RNA, 19 nt, Homo sapiens
  misc_RNA (1)...(19): siRNA sense strand
gcgagaaagaagcugugaa

SEQ ID NO: 2381750 - RNA, 19 nt, Homo sapiens
  misc_RNA (1)...(19): siRNA sense strand
cagaaacucucuaaggcuu

SEQ ID NO: 2381751 - RNA, 19 nt, Homo sapiens
  misc_RNA (1)...(19): siRNA sense strand
cagaagaugucguccgagu

SEQ ID NO: 2381752 - RNA, 19 nt, Homo sapiens
  misc_RNA (1)...(19): siRNA sense strand
ugacugugcaaauggcaua

SEQ ID NO: 2381753 - RNA, 19 nt, Homo sapiens
  misc_RNA (1)...(19): siRNA sense strand
gauggagacaagauagcaa

SEQ ID NO: 2381754 - RNA, 19 nt, Homo sapiens
  misc_RNA (1)...(19): siRNA sense strand
gaggaagacaaugguguaa

SEQ ID NO: 2381755 - RNA, 19 nt, Homo sapiens
  misc_RNA (1)...(19): siRNA sense strand
caaucaaugaccuggugaa

SEQ ID NO: 2381756 - RNA, 19 nt, Homo sapiens
  misc_RNA (1)...(19): siRNA sense strand
gggaaauggaacacuacuu

SEQ ID NO: 2381757 - RNA, 19 nt, Homo sapiens
  misc_RNA (1)...(19): siRNA sense strand
aggcagaacaucuugauca

SEQ ID NO: 2381758 - RNA, 19 nt, Homo sapiens
  misc_RNA (1)...(19): siRNA sense strand
cguccgaguauaugcagaa

SEQ ID NO: 2381759 - RNA, 19 nt, Homo sapiens
  misc_RNA (1)...(19): siRNA sense strand
gguccaagggcaaacucaa

SEQ ID NO: 2381760 - RNA, 19 nt, Homo sapiens
  misc_RNA (1)...(19): siRNA sense strand
cuaccgaugcugaaagaca

SEQ ID NO: 2381761 - RNA, 19 nt, Homo sapiens
  misc_RNA (1)...(19): siRNA sense strand
ucagaaaccuccacaggga

SEQ ID NO: 2381762 - RNA, 19 nt, Homo sapiens
  misc_RNA (1)...(19): siRNA sense strand
auggagaugcagacagaau

SEQ ID NO: 2381763 - RNA, 19 nt, Homo sapiens
  misc_RNA (1)...(19): siRNA sense strand
uugaagaaguuaugaaggu

SEQ ID NO: 2381764 - RNA, 19 nt, Homo sapiens
  misc_RNA (1)...(19): siRNA sense strand
ugaaagacaagcaguuaca

SEQ ID NO: 2381765 - RNA, 19 nt, Homo sapiens
  misc_RNA (1)...(19): siRNA sense strand
acaagaaagugcagaucac

SEQ ID NO: 2381766 - RNA, 19 nt, Homo sapiens
  misc_RNA (1)...(19): siRNA sense strand
cuauaggagucaugguaac

SEQ ID NO: 2381767 - RNA, 19 nt, Homo sapiens
  misc_RNA (1)...(19): siRNA sense strand
uggaaaggcaacuauagaa

SEQ ID NO: 2381768 - RNA, 19 nt, Homo sapiens
  misc_RNA (1)...(19): siRNA sense strand
augauggguccaagggcaa

SEQ ID NO: 2381769 - RNA, 19 nt, Homo sapiens
  misc_RNA (1)...(19): siRNA sense strand
gcugcuaagaugcuugaaa

SEQ ID NO: 2381770 - RNA, 19 nt, Homo sapiens
  misc_RNA (1)...(19): siRNA sense strand
gcuggaggaauuggagaaa

SEQ ID NO: 2381771 - RNA, 19 nt, Homo sapiens
  misc_RNA (1)...(19): siRNA sense strand
acuauaggagucaugguaa

SEQ ID NO: 2381772 - RNA, 19 nt, Homo sapiens
  misc_RNA (1)...(19): siRNA sense strand
aaaacaaucagcagaacaa

SEQ ID NO: 2381773 - RNA, 19 nt, Homo sapiens
  misc_RNA (1)...(19): siRNA sense strand
ugguugauccuuuggguga

SEQ ID NO: 2381774 - RNA, 19 nt, Homo sapiens
  misc_RNA (1)...(19): siRNA sense strand
cugugaaucugcaacaaga

SEQ ID NO: 2381775 - RNA, 19 nt, Homo sapiens
  misc_RNA (1)...(19): siRNA sense strand
gauuggagaaaguuugaau

SEQ ID NO: 2381776 - RNA, 19 nt, Homo sapiens
  misc_RNA (1)...(19): siRNA sense strand
cuaagaugcuugaaaacau

SEQ ID NO: 2381777 - RNA, 19 nt, Homo sapiens
  misc_RNA (1)...(19): siRNA sense strand
ggagaugaauacagaucac

SEQ ID NO: 2381778 - RNA, 19 nt, Homo sapiens
  misc_RNA (1)...(19): siRNA sense strand
agcuaagggaaauggaaca

SEQ ID NO: 2381779 - RNA, 19 nt, Homo sapiens
  misc_RNA (1)...(19): siRNA sense strand
aacaagauaugcagagagu

SEQ ID NO: 2381780 - RNA, 19 nt, Homo sapiens
  misc_RNA (1)...(19): siRNA sense strand
cuuauugacaucagcgaga

SEQ ID NO: 2381781 - RNA, 19 nt, Homo sapiens
  misc_RNA (1)...(19): siRNA sense strand
aggagaguuauuagcacua

SEQ ID NO: 2381782 - RNA, 19 nt, Homo sapiens
  misc_RNA (1)...(19): siRNA sense strand
uauugacaucagcgagaaa

SEQ ID NO: 2381783 - RNA, 19 nt, Homo sapiens
  misc_RNA (1)...(19): siRNA sense strand
cgauauggaaaggcaacua

SEQ ID NO: 2381784 - RNA, 19 nt, Homo sapiens
  misc_RNA (1)...(19): siRNA sense strand
gaugagaagcuguggaaaa

SEQ ID NO: 2381785 - RNA, 19 nt, Homo sapiens
  misc_RNA (1)...(19): siRNA sense strand
cugucaaacuagagguaga

SEQ ID NO: 2381786 - RNA, 19 nt, Homo sapiens
  misc_RNA (1)...(19): siRNA sense strand
uggaacaagucuaggccua

SEQ ID NO: 2381787 - RNA, 19 nt, Homo sapiens
  misc_RNA (1)...(19): siRNA sense strand
cuuuaguacuccugaggua

SEQ ID NO: 2381788 - RNA, 19 nt, Homo sapiens
  misc_RNA (1)...(19): siRNA sense strand
augaagacgcgaaggacua

SEQ ID NO: 2381789 - RNA, 19 nt, Homo sapiens
  misc_RNA (1)...(19): siRNA sense strand
cggauugaugggacagaua

SEQ ID NO: 2381790 - RNA, 19 nt, Homo sapiens
  misc_RNA (1)...(19): siRNA sense strand
gauugaugggacagauaaa

SEQ ID NO: 2381791 - RNA, 19 nt, Homo sapiens
  misc_RNA (1)...(19): siRNA sense strand
cugaagaagaugaucaaga

SEQ ID NO: 2381792 - RNA, 19 nt, Homo sapiens
  misc_RNA (1)...(19): siRNA sense strand
gccuaaaggaaguugaaga

SEQ ID NO: 2381793 - RNA, 19 nt, Homo sapiens
  misc_RNA (1)...(19): siRNA sense strand
ccaaacugauuuaagccaa

SEQ ID NO: 2381794 - RNA, 19 nt, Homo sapiens
  misc_RNA (1)...(19): siRNA sense strand
gaggaaaugaagacgcgaa

SEQ ID NO: 2381795 - RNA, 19 nt, Homo sapiens
  misc_RNA (1)...(19): siRNA sense strand
aaggagaaacugaagaaga

SEQ ID NO: 2381796 - RNA, 19 nt, Homo sapiens
  misc_RNA (1)...(19): siRNA sense strand
agaauaaguaccaagguca

SEQ ID NO: 2381797 - RNA, 19 nt, Homo sapiens
  misc_RNA (1)...(19): siRNA sense strand
cugaagaaggagaaacuga

SEQ ID NO: 2381798 - RNA, 19 nt, Homo sapiens
  misc_RNA (1)...(19): siRNA sense strand
aagucuaggccuaaaggaa

SEQ ID NO: 2381799 - RNA, 19 nt, Homo sapiens
  misc_RNA (1)...(19): siRNA sense strand
agaacugagcaauggauuu

SEQ ID NO: 2381800 - RNA, 19 nt, Homo sapiens
  misc_RNA (1)...(19): siRNA sense strand
agugcuaagcucaggauau

SEQ ID NO: 2381801 - RNA, 19 nt, Homo sapiens
  misc_RNA (1)...(19): siRNA sense strand
gauaaaaccaccagaucau

SEQ ID NO: 2381802 - RNA, 19 nt, Homo sapiens
  misc_RNA (1)...(19): siRNA sense strand
auuuaagaauggccagaau

SEQ ID NO: 2381803 - RNA, 19 nt, Homo sapiens
  misc_RNA (1)...(19): siRNA sense strand
auaaggaccaggaugcaaa

SEQ ID NO: 2381804 - RNA, 19 nt, Homo sapiens
  misc_RNA (1)...(19): siRNA sense strand
gugucugagugaacaaauu

SEQ ID NO: 2381805 - RNA, 19 nt, Homo sapiens
  misc_RNA (1)...(19): siRNA sense strand
gguccgauucugcgaaaga

SEQ ID NO: 2381806 - RNA, 19 nt, Homo sapiens
  misc_RNA (1)...(19): siRNA sense strand
aaacugaagaagaugauca

SEQ ID NO: 2381807 - RNA, 19 nt, Homo sapiens
  misc_RNA (1)...(19): siRNA sense strand
aacuagagguagaccaaga

SEQ ID NO: 2381808 - RNA, 19 nt, Homo sapiens
  misc_RNA (1)...(19): siRNA sense strand
ugaagaagcacuuaggugu

SEQ ID NO: 2381809 - RNA, 19 nt, Homo sapiens
  misc_RNA (1)...(19): siRNA sense strand
gauaaagcuacucaagaca

SEQ ID NO: 2381810 - RNA, 19 nt, Homo sapiens
  misc_RNA (1)...(19): siRNA sense strand
gggaaaacgaacccggcua

SEQ ID NO: 2381811 - RNA, 19 nt, Homo sapiens
  misc_RNA (1)...(19): siRNA sense strand
aagaugagaagcuguggaa

SEQ ID NO: 2381812 - RNA, 19 nt, Homo sapiens
  misc_RNA (1)...(19): siRNA sense strand
cuaaaggaaguugaagaaa

SEQ ID NO: 2381813 - RNA, 19 nt, Homo sapiens
  misc_RNA (1)...(19): siRNA sense strand
cgauucugcgaaagaggaa

SEQ ID NO: 2381814 - RNA, 19 nt, Homo sapiens
  misc_RNA (1)...(19): siRNA sense strand
gcuacucaagacagugaua

SEQ ID NO: 2381815 - RNA, 19 nt, Homo sapiens
  misc_RNA (1)...(19): siRNA sense strand
gguacaccgcuuugaguca

SEQ ID NO: 2381816 - RNA, 19 nt, Homo sapiens
  misc_RNA (1)...(19): siRNA sense strand
gcguacuaccuucggucua

SEQ ID NO: 2381817 - RNA, 19 nt, Homo sapiens
  misc_RNA (1)...(19): siRNA sense strand
ugcccgagaugcugaagaa

SEQ ID NO: 2381818 - RNA, 19 nt, Homo sapiens
  misc_RNA (1)...(19): siRNA sense strand
cuuauuggaggaagagaca

SEQ ID NO: 2381819 - RNA, 19 nt, Homo sapiens
  misc_RNA (1)...(19): siRNA sense strand
cagacaaacugaauggccu

SEQ ID NO: 2381820 - RNA, 19 nt, Homo sapiens
  misc_RNA (1)...(19): siRNA sense strand
gaagaagaugaucaagaca

SEQ ID NO: 2381821 - RNA, 19 nt, Homo sapiens
  misc_RNA (1)...(19): siRNA sense strand
augaauacaaggagcagua

SEQ ID NO: 2381822 - RNA, 19 nt, Homo sapiens
  misc_RNA (1)...(19): siRNA sense strand
ugauuugaaaggagaacua

SEQ ID NO: 2381823 - RNA, 19 nt, Homo sapiens
  misc_RNA (1)...(19): siRNA sense strand
aggagaacuagaugaauau

SEQ ID NO: 2381824 - RNA, 19 nt, Homo sapiens
  misc_RNA (1)...(19): siRNA sense strand
aguugagagacuugggcua

SEQ ID NO: 2381825 - RNA, 19 nt, Homo sapiens
  misc_RNA (1)...(19): siRNA sense strand
cauaagaaauacaaagcgu

SEQ ID NO: 2381826 - RNA, 19 nt, Homo sapiens
  misc_RNA (1)...(19): siRNA sense strand
ccuuaagaccugaccugaa

SEQ ID NO: 2381827 - RNA, 19 nt, Homo sapiens
  misc_RNA (1)...(19): siRNA sense strand
acaaaugccugguggccca

SEQ ID NO: 2381828 - RNA, 19 nt, Homo sapiens
  misc_RNA (1)...(19): siRNA sense strand
auacaaagcgugagggguu

SEQ ID NO: 2381829 - RNA, 19 nt, Homo sapiens
  misc_RNA (1)...(19): siRNA sense strand
gggguugauucgagggaga

SEQ ID NO: 2381830 - RNA, 19 nt, Homo sapiens
  misc_RNA (1)...(19): siRNA sense strand
augucugguuggaugaaua

SEQ ID NO: 2381831 - RNA, 19 nt, Homo sapiens
  misc_RNA (1)...(19): siRNA sense strand
cguguggaacugagaaaga

SEQ ID NO: 2381832 - RNA, 19 nt, Homo sapiens
  misc_RNA (1)...(19): siRNA sense strand
uaagaaauacaaagcguga

SEQ ID NO: 2381833 - RNA, 19 nt, Homo sapiens
  misc_RNA (1)...(19): siRNA sense strand
ucuauaaugaagagcauga

SEQ ID NO: 2381834 - RNA, 19 nt, Homo sapiens
  misc_RNA (1)...(19): siRNA sense strand
gcacaugucugguuggaug

SEQ ID NO: 2381835 - RNA, 19 nt, Homo sapiens
  misc_RNA (1)...(19): siRNA sense strand
aaauugacgaugugauaga

SEQ ID NO: 2381836 - RNA, 19 nt, Homo sapiens
  misc_RNA (1)...(19): siRNA sense strand
ggacaguaugauaguggca

SEQ ID NO: 2381837 - RNA, 19 nt, Homo sapiens
  misc_RNA (1)...(19): siRNA sense strand
ggauaucuggggaggagaa

SEQ ID NO: 2381838 - RNA, 19 nt, Homo sapiens
  misc_RNA (1)...(19): siRNA sense strand
uggcaauaucagugagcgu

SEQ ID NO: 2381839 - RNA, 19 nt, Homo sapiens
  misc_RNA (1)...(19): siRNA sense strand
auguauacccagagaugca

SEQ ID NO: 2381840 - RNA, 19 nt, Homo sapiens
  misc_RNA (1)...(19): siRNA sense strand
ggacugugccugagagcag

SEQ ID NO: 2381841 - RNA, 19 nt, Homo sapiens
  misc_RNA (1)...(19): siRNA sense strand
ugauagugacuuugaugau

SEQ ID NO: 2381842 - RNA, 19 nt, Homo sapiens
  misc_RNA (1)...(19): siRNA sense strand
ggaggagaaaauuuggaaa

SEQ ID NO: 2381843 - RNA, 19 nt, Homo sapiens
  misc_RNA (1)...(19): siRNA sense strand
uaucagugagcguguggaa

SEQ ID NO: 2381844 - RNA, 19 nt, Homo sapiens
  misc_RNA (1)...(19): siRNA sense strand
agacagagcuggugugcga

SEQ ID NO: 2381845 - RNA, 19 nt, Homo sapiens
  misc_RNA (1)...(19): siRNA sense strand
cagcaacugacgagggaca

SEQ ID NO: 2381846 - RNA, 19 nt, Homo sapiens
  misc_RNA (1)...(19): siRNA sense strand
cgcuauaucuggaucgaga

SEQ ID NO: 2381847 - RNA, 19 nt, Homo sapiens
  misc_RNA (1)...(19): siRNA sense strand
gggacacuguggaaggaga

SEQ ID NO: 2381848 - RNA, 19 nt, Homo sapiens
  misc_RNA (1)...(19): siRNA sense strand
ucgaaauaagagacaaaga

SEQ ID NO: 2381849 - RNA, 19 nt, Homo sapiens
  misc_RNA (1)...(19): siRNA sense strand
cgugaauggcguuaaggau

SEQ ID NO: 2381850 - RNA, 19 nt, Homo sapiens
  misc_RNA (1)...(19): siRNA sense strand
ucaagcagcuggaacgaga

SEQ ID NO: 2381851 - RNA, 19 nt, Homo sapiens
  misc_RNA (1)...(19): siRNA sense strand
ccuucaugcuggagagcgu

SEQ ID NO: 2381852 - RNA, 19 nt, Homo sapiens
  misc_RNA (1)...(19): siRNA sense strand
aggaagagccggcugcaga

SEQ ID NO: 2381853 - RNA, 19 nt, Homo sapiens
  misc_RNA (1)...(19): siRNA sense strand
cauggagggucaucggcua

SEQ ID NO: 2381854 - RNA, 19 nt, Homo sapiens
  misc_RNA (1)...(19): siRNA sense strand
agccagacucuaagggaca

SEQ ID NO: 2381855 - RNA, 19 nt, Homo sapiens
  misc_RNA (1)...(19): siRNA sense strand
ucuucauccucuaccgaaa

SEQ ID NO: 2381856 - RNA, 19 nt, Homo sapiens
  misc_RNA (1)...(19): siRNA sense strand
acgagaacaccguggucuu

SEQ ID NO: 2381857 - RNA, 19 nt, Homo sapiens
  misc_RNA (1)...(19): siRNA sense strand
aaauaagagacaaagagga

SEQ ID NO: 2381858 - RNA, 19 nt, Homo sapiens
  misc_RNA (1)...(19): siRNA sense strand
cucuaagggacauggucaa

SEQ ID NO: 2381859 - RNA, 19 nt, Homo sapiens
  misc_RNA (1)...(19): siRNA sense strand
gcuacaccguggagccaga

SEQ ID NO: 2381860 - RNA, 19 nt, Homo sapiens
  misc_RNA (1)...(19): siRNA sense strand
agaagcgggugcugcggua

SEQ ID NO: 2381861 - RNA, 19 nt, Homo sapiens
  misc_RNA (1)...(19): siRNA sense strand
guaucauugugaagcacuu

SEQ ID NO: 2381862 - RNA, 19 nt, Homo sapiens
  misc_RNA (1)...(19): siRNA sense strand
cugacauggaagaagauaa

SEQ ID NO: 2381863 - RNA, 19 nt, Homo sapiens
  misc_RNA (1)...(19): siRNA sense strand
acuuaaagauaaagcgauc

SEQ ID NO: 2381864 - RNA, 19 nt, Homo sapiens
  misc_RNA (1)...(19): siRNA sense strand
auggaaaagaggaggauga

SEQ ID NO: 2381865 - RNA, 19 nt, Homo sapiens
  misc_RNA (1)...(19): siRNA sense strand
auaaugaagaaguggcuga

SEQ ID NO: 2381866 - RNA, 19 nt, Homo sapiens
  misc_RNA (1)...(19): siRNA sense strand
aaacuggagaagaguaaaa

SEQ ID NO: 2381867 - RNA, 19 nt, Homo sapiens
  misc_RNA (1)...(19): siRNA sense strand
gcgagaucgagguggagaa

SEQ ID NO: 2381868 - RNA, 19 nt, Homo sapiens
  misc_RNA (1)...(19): siRNA sense strand
agaaggugguccagggcuu

SEQ ID NO: 2381869 - RNA, 19 nt, Homo sapiens
  misc_RNA (1)...(19): siRNA sense strand
acgaacaggugcuggagga

SEQ ID NO: 2381870 - RNA, 19 nt, Homo sapiens
  misc_RNA (1)...(19): siRNA sense strand
cuguacagcacccgugaaa

SEQ ID NO: 2381871 - RNA, 19 nt, Homo sapiens
  misc_RNA (1)...(19): siRNA sense strand
ggucggaggagauggagga

SEQ ID NO: 2381872 - RNA, 19 nt, Homo sapiens
  misc_RNA (1)...(19): siRNA sense strand
cggaugagccagaugagga

SEQ ID NO: 2381873 - RNA, 19 nt, Homo sapiens
  misc_RNA (1)...(19): siRNA sense strand
acaucagggacuugcuuua

SEQ ID NO: 2381874 - RNA, 19 nt, Homo sapiens
  misc_RNA (1)...(19): siRNA sense strand
agaagcaggucgacggcga

SEQ ID NO: 2381875 - RNA, 19 nt, Homo sapiens
  misc_RNA (1)...(19): siRNA sense strand
cgguguggcaggaggucuu

SEQ ID NO: 2381876 - RNA, 19 nt, Homo sapiens
  misc_RNA (1)...(19): siRNA sense strand
acacacuccugcuggguga

SEQ ID NO: 2381877 - RNA, 19 nt, Homo sapiens
  misc_RNA (1)...(19): siRNA sense strand
agccgaacguggaggaacu

SEQ ID NO: 2381878 - RNA, 19 nt, Homo sapiens
  misc_RNA (1)...(19): siRNA sense strand
agauggacguugagcaaaa

SEQ ID NO: 2381879 - RNA, 19 nt, Homo sapiens
  misc_RNA (1)...(19): siRNA sense strand
gggaagaucuccaggcaug

SEQ ID NO: 2381880 - RNA, 19 nt, Homo sapiens
  misc_RNA (1)...(19): siRNA sense strand
acaggaauaagaagggcua

SEQ ID NO: 2381881 - RNA, 19 nt, Homo sapiens
  misc_RNA (1)...(19): siRNA sense strand
cuguagaagaugaggacac

SEQ ID NO: 2381882 - RNA, 19 nt, Homo sapiens
  misc_RNA (1)...(19): siRNA sense strand
ugacagaagagcagcugga

SEQ ID NO: 2381883 - RNA, 19 nt, Homo sapiens
  misc_RNA (1)...(19): siRNA sense strand
cucaacagcagaaggaaca

SEQ ID NO: 2381884 - RNA, 19 nt, Homo sapiens
  misc_RNA (1)...(19): siRNA sense strand
acagaagagcagcuggaga

SEQ ID NO: 2381885 - RNA, 19 nt, Homo sapiens
  misc_RNA (1)...(19): siRNA sense strand
ccaagaaaccugaaccucu

SEQ ID NO: 2381886 - RNA, 19 nt, Homo sapiens
  misc_RNA (1)...(19): siRNA sense strand
ccuuagagaagauggacgu

SEQ ID NO: 2381887 - RNA, 19 nt, Homo sapiens
  misc_RNA (1)...(19): siRNA sense strand
aggccaaagccaagagcaa

SEQ ID NO: 2381888 - RNA, 19 nt, Homo sapiens
  misc_RNA (1)...(19): siRNA sense strand
cuacauacuacaugagcaa

SEQ ID NO: 2381889 - RNA, 19 nt, Homo sapiens
  misc_RNA (1)...(19): siRNA sense strand
gcucaagggcagaguggga

SEQ ID NO: 2381890 - RNA, 19 nt, Homo sapiens
  misc_RNA (1)...(19): siRNA sense strand
gggucuugguguacgaauu

SEQ ID NO: 2381891 - RNA, 19 nt, Homo sapiens
  misc_RNA (1)...(19): siRNA sense strand
aagccaagagcaagaacaa

SEQ ID NO: 2381892 - RNA, 19 nt, Homo sapiens
  misc_RNA (1)...(19): siRNA sense strand
agacgaagccuauacgcua

SEQ ID NO: 2381893 - RNA, 19 nt, Homo sapiens
  misc_RNA (1)...(19): siRNA sense strand
caguaaagccccuguggaa

SEQ ID NO: 2381894 - RNA, 19 nt, Homo sapiens
  misc_RNA (1)...(19): siRNA sense strand
cauuuauauuccagaggau

SEQ ID NO: 2381895 - RNA, 19 nt, Homo sapiens
  misc_RNA (1)...(19): siRNA sense strand
gccaaagccaagagcaaga

SEQ ID NO: 2381896 - RNA, 19 nt, Homo sapiens
  misc_RNA (1)...(19): siRNA sense strand
cugauaggacagaagcuua

SEQ ID NO: 2381897 - RNA, 19 nt, Homo sapiens
  misc_RNA (1)...(19): siRNA sense strand
caugaagaacauuaaggaa

SEQ ID NO: 2381898 - RNA, 19 nt, Homo sapiens
  misc_RNA (1)...(19): siRNA sense strand
gaaggaagcucaagggcag

SEQ ID NO: 2381899 - RNA, 19 nt, Homo sapiens
  misc_RNA (1)...(19): siRNA sense strand
uggagaacaucuacagcau

SEQ ID NO: 2381900 - RNA, 19 nt, Homo sapiens
  misc_RNA (1)...(19): siRNA sense strand
ggaauaugcacuucgcaga

SEQ ID NO: 2381901 - RNA, 19 nt, Homo sapiens
  misc_RNA (1)...(19): siRNA sense strand
gcgagaucccagucgagaa

SEQ ID NO: 2381902 - RNA, 19 nt, Homo sapiens
  misc_RNA (1)...(19): siRNA sense strand
ugacugaggccaaagccaa

SEQ ID NO: 2381903 - RNA, 19 nt, Homo sapiens
  misc_RNA (1)...(19): siRNA sense strand
ggugguaaucggucaaaca

SEQ ID NO: 2381904 - RNA, 19 nt, Homo sapiens
  misc_RNA (1)...(19): siRNA sense strand
gaaugcagauugcugggaa

SEQ ID NO: 2381905 - RNA, 19 nt, Homo sapiens
  misc_RNA (1)...(19): siRNA sense strand
gcgcagacauuuuagccua

SEQ ID NO: 2381906 - RNA, 19 nt, Homo sapiens
  misc_RNA (1)...(19): siRNA sense strand
acgaauugaggaugaugua

SEQ ID NO: 2381907 - RNA, 19 nt, Homo sapiens
  misc_RNA (1)...(19): siRNA sense strand
cccaaagagaugaaugaca

SEQ ID NO: 2381908 - RNA, 19 nt, Homo sapiens
  misc_RNA (1)...(19): siRNA sense strand
gggaaauggugcuucugga

SEQ ID NO: 2381909 - RNA, 19 nt, Homo sapiens
  misc_RNA (1)...(19): siRNA sense strand
uggaguagacgaagccuau

SEQ ID NO: 2381910 - RNA, 19 nt, Homo sapiens
  misc_RNA (1)...(19): siRNA sense strand
uccaagagccugauagcau

SEQ ID NO: 2381911 - RNA, 19 nt, Homo sapiens
  misc_RNA (1)...(19): siRNA sense strand
gcuucuggauggagguugu

SEQ ID NO: 2381912 - RNA, 19 nt, Homo sapiens
  misc_RNA (1)...(19): siRNA sense strand
uggcaaacaauuaccauca

SEQ ID NO: 2381913 - RNA, 19 nt, Homo sapiens
  misc_RNA (1)...(19): siRNA sense strand
gucccaaagagaugaauga

SEQ ID NO: 2381914 - RNA, 19 nt, Homo sapiens
  misc_RNA (1)...(19): siRNA sense strand
augauguaguggugacuca

SEQ ID NO: 2381915 - RNA, 19 nt, Homo sapiens
  misc_RNA (1)...(19): siRNA sense strand
gcagagagcuggaaggagg

SEQ ID NO: 2381916 - RNA, 19 nt, Homo sapiens
  misc_RNA (1)...(19): siRNA sense strand
caaaggaaguugugggcaa

SEQ ID NO: 2381917 - RNA, 19 nt, Homo sapiens
  misc_RNA (1)...(19): siRNA sense strand
agaacuaacagaagagaaa

SEQ ID NO: 2381918 - RNA, 19 nt, Homo sapiens
  misc_RNA (1)...(19): siRNA sense strand
ccaccaagaaugagaacaa

SEQ ID NO: 2381919 - RNA, 19 nt, Homo sapiens
  misc_RNA (1)...(19): siRNA sense strand
ucucagaagaucaggauaa

SEQ ID NO: 2381920 - RNA, 19 nt, Homo sapiens
  misc_RNA (1)...(19): siRNA sense strand
agaagaaagugaaggagau

SEQ ID NO: 2381921 - RNA, 19 nt, Homo sapiens
  misc_RNA (1)...(19): siRNA sense strand
agaucagagcaaagagaaa

SEQ ID NO: 2381922 - RNA, 19 nt, Homo sapiens
  misc_RNA (1)...(19): siRNA sense strand
ccaugauccuguagagauu

SEQ ID NO: 2381923 - RNA, 19 nt, Homo sapiens
  misc_RNA (1)...(19): siRNA sense strand
aaucauacugcgagugaaa

SEQ ID NO: 2381924 - RNA, 19 nt, Homo sapiens
  misc_RNA (1)...(19): siRNA sense strand
aggcgaaggaacagaacaa

SEQ ID NO: 2381925 - RNA, 19 nt, Homo sapiens
  misc_RNA (1)...(19): siRNA sense strand
ugaagaagcuaauggcaga

SEQ ID NO: 2381926 - RNA, 19 nt, Homo sapiens
  misc_RNA (1)...(19): siRNA sense strand
aaucagagagagaggagaa

SEQ ID NO: 2381927 - RNA, 19 nt, Homo sapiens
  misc_RNA (1)...(19): siRNA sense strand
gggcaaaaggaaaacaaaa

SEQ ID NO: 2381928 - RNA, 19 nt, Homo sapiens
  misc_RNA (1)...(19): siRNA sense strand
cugucuaaaugaaggagaa

SEQ ID NO: 2381929 - RNA, 19 nt, Homo sapiens
  misc_RNA (1)...(19): siRNA sense strand
cgaaaagaaaggaaagaau

SEQ ID NO: 2381930 - RNA, 19 nt, Homo sapiens
  misc_RNA (1)...(19): siRNA sense strand
agaaagugaaggagauaca

SEQ ID NO: 2381931 - RNA, 19 nt, Homo sapiens
  misc_RNA (1)...(19): siRNA sense strand
cagauaaagaugggacaaa

SEQ ID NO: 2381932 - RNA, 19 nt, Homo sapiens
  misc_RNA (1)...(19): siRNA sense strand
ccaagaaguuuuauggcaa

SEQ ID NO: 2381933 - RNA, 19 nt, Homo sapiens
  misc_RNA (1)...(19): siRNA sense strand
aaguauacgaguaggaaca

SEQ ID NO: 2381934 - RNA, 19 nt, Homo sapiens
  misc_RNA (1)...(19): siRNA sense strand
gaaccuaugaagagagcau

SEQ ID NO: 2381935 - RNA, 19 nt, Homo sapiens
  misc_RNA (1)...(19): siRNA sense strand
cugccaagccuguaauuaa

SEQ ID NO: 2381936 - RNA, 19 nt, Homo sapiens
  misc_RNA (1)...(19): siRNA sense strand
caaaaguaccacagcaaaa

SEQ ID NO: 2381937 - RNA, 19 nt, Homo sapiens
  misc_RNA (1)...(19): siRNA sense strand
gacuuaacauguugagcaa

SEQ ID NO: 2381938 - RNA, 19 nt, Homo sapiens
  misc_RNA (1)...(19): siRNA sense strand
aagaagaaagugaaggaga

SEQ ID NO: 2381939 - RNA, 19 nt, Homo sapiens
  misc_RNA (1)...(19): siRNA sense strand
acagauggcuuaagcaaaa

SEQ ID NO: 2381940 - RNA, 19 nt, Homo sapiens
  misc_RNA (1)...(19): siRNA sense strand
ugaaagaccaguuuggcaa

SEQ ID NO: 2381941 - RNA, 19 nt, Homo sapiens
  misc_RNA (1)...(19): siRNA sense strand
aggaagacgcugaccgaau

SEQ ID NO: 2381942 - RNA, 19 nt, Homo sapiens
  misc_RNA (1)...(19): siRNA sense strand
agacuaaacuauagcgaug

SEQ ID NO: 2381943 - RNA, 19 nt, Homo sapiens
  misc_RNA (1)...(19): siRNA sense strand
ugagaauggccuacagaau

SEQ ID NO: 2381944 - RNA, 19 nt, Homo sapiens
  misc_RNA (1)...(19): siRNA sense strand
aaguggagccugaaauuaa

SEQ ID NO: 2381945 - RNA, 19 nt, Homo sapiens
  misc_RNA (1)...(19): siRNA sense strand
agaagaaacuggagaaaac

SEQ ID NO: 2381946 - RNA, 19 nt, Homo sapiens
  misc_RNA (1)...(19): siRNA sense strand
agauaaagaugggacaaau

SEQ ID NO: 2381947 - RNA, 19 nt, Homo sapiens
  misc_RNA (1)...(19): siRNA sense strand
acuuagaagcaaacaagaa

SEQ ID NO: 2381948 - RNA, 19 nt, Homo sapiens
  misc_RNA (1)...(19): siRNA sense strand
agacauauguaagacgaaa

SEQ ID NO: 2381949 - RNA, 19 nt, Homo sapiens
  misc_RNA (1)...(19): siRNA sense strand
ggaccgaaaagaaaggaaa

SEQ ID NO: 2381950 - RNA, 19 nt, Homo sapiens
  misc_RNA (1)...(19): siRNA sense strand
gcuccaagguguugaacgu

SEQ ID NO: 2381951 - RNA, 19 nt, Homo sapiens
  misc_RNA (1)...(19): siRNA sense strand
aggauaaaguuuggaauga

SEQ ID NO: 2381952 - RNA, 19 nt, Homo sapiens
  misc_RNA (1)...(19): siRNA sense strand
aaagagaagaaauccgaaa

SEQ ID NO: 2381953 - RNA, 19 nt, Homo sapiens
  misc_RNA (1)...(19): siRNA sense strand
agccugaaauuaagaggaa

SEQ ID NO: 2381954 - RNA, 19 nt, Homo sapiens
  misc_RNA (1)...(19): siRNA sense strand
ugaagaagaaagugaagga

SEQ ID NO: 2381955 - RNA, 19 nt, Homo sapiens
  misc_RNA (1)...(19): siRNA sense strand
agugaaggagauacagaua

SEQ ID NO: 2381956 - RNA, 19 nt, Homo sapiens
  misc_RNA (1)...(19): siRNA sense strand
gugaaggagauacagauaa

SEQ ID NO: 2381957 - RNA, 19 nt, Homo sapiens
  misc_RNA (1)...(19): siRNA sense strand
agaggaaaguacaacagaa

SEQ ID NO: 2381958 - RNA, 19 nt, Homo sapiens
  misc_RNA (1)...(19): siRNA sense strand
gaugacaacgacagaacua

SEQ ID NO: 2381959 - RNA, 19 nt, Homo sapiens
  misc_RNA (1)...(19): siRNA sense strand
cuucauuggcccaguagaa

SEQ ID NO: 2381960 - RNA, 19 nt, Homo sapiens
  misc_RNA (1)...(19): siRNA sense strand
caauaaaggagaaucuaca

SEQ ID NO: 2381961 - RNA, 19 nt, Homo sapiens
  misc_RNA (1)...(19): siRNA sense strand
ugaauugugaugacaguaa

SEQ ID NO: 2381962 - RNA, 19 nt, Homo sapiens
  misc_RNA (1)...(19): siRNA sense strand
caaacuugaaagaaaggaa

SEQ ID NO: 2381963 - RNA, 19 nt, Homo sapiens
  misc_RNA (1)...(19): siRNA sense strand
acagauaccaguaguaaaa

SEQ ID NO: 2381964 - RNA, 19 nt, Homo sapiens
  misc_RNA (1)...(19): siRNA sense strand
agaaauugcagacaagcua

SEQ ID NO: 2381965 - RNA, 19 nt, Homo sapiens
  misc_RNA (1)...(19): siRNA sense strand
ccucguuauaagagaaaca

SEQ ID NO: 2381966 - RNA, 19 nt, Homo sapiens
  misc_RNA (1)...(19): siRNA sense strand
cagaagaguccgaaucaca

SEQ ID NO: 2381967 - RNA, 19 nt, Homo sapiens
  misc_RNA (1)...(19): siRNA sense strand
aaucacaaguggagccuga

SEQ ID NO: 2381968 - RNA, 19 nt, Homo sapiens
  misc_RNA (1)...(19): siRNA sense strand
gugaugaugaugaugacaa

SEQ ID NO: 2381969 - RNA, 19 nt, Homo sapiens
  misc_RNA (1)...(19): siRNA sense strand
aaguagaagcagcacuaaa

SEQ ID NO: 2381970 - RNA, 19 nt, Homo sapiens
  misc_RNA (1)...(19): siRNA sense strand
cugucgaaguauacgagua

SEQ ID NO: 2381971 - RNA, 19 nt, Homo sapiens
  misc_RNA (1)...(19): siRNA sense strand
caaaugaauaaggaggaua

SEQ ID NO: 2381972 - RNA, 19 nt, Homo sapiens
  misc_RNA (1)...(19): siRNA sense strand
ggaugauagcagugacgau

SEQ ID NO: 2381973 - RNA, 19 nt, Homo sapiens
  misc_RNA (1)...(19): siRNA sense strand
acauaauucugaagcuaca

SEQ ID NO: 2381974 - RNA, 19 nt, Homo sapiens
  misc_RNA (1)...(19): siRNA sense strand
agaagcaccuuuaggcgaa

SEQ ID NO: 2381975 - RNA, 19 nt, Homo sapiens
  misc_RNA (1)...(19): siRNA sense strand
ugaauaaggaggauaaagu

SEQ ID NO: 2381976 - RNA, 19 nt, Homo sapiens
  misc_RNA (1)...(19): siRNA sense strand
cuuugaucaugaagaagaa

SEQ ID NO: 2381977 - RNA, 19 nt, Homo sapiens
  misc_RNA (1)...(19): siRNA sense strand
gggaagaggaagagcgaaa

SEQ ID NO: 2381978 - RNA, 19 nt, Homo sapiens
  misc_RNA (1)...(19): siRNA sense strand
cagaagaagaacagagaaa

SEQ ID NO: 2381979 - RNA, 19 nt, Homo sapiens
  misc_RNA (1)...(19): siRNA sense strand
aguugaagcuagugaggaa

SEQ ID NO: 2381980 - RNA, 19 nt, Homo sapiens
  misc_RNA (1)...(19): siRNA sense strand
ggagaagagaagaggaaga

SEQ ID NO: 2381981 - RNA, 19 nt, Homo sapiens
  misc_RNA (1)...(19): siRNA sense strand
gagaagaggaagaaagaca

SEQ ID NO: 2381982 - RNA, 19 nt, Homo sapiens
  misc_RNA (1)...(19): siRNA sense strand
aggcagaggcagaggugaa

SEQ ID NO: 2381983 - RNA, 19 nt, Homo sapiens
  misc_RNA (1)...(19): siRNA sense strand
gaggagaagagaagaggaa

SEQ ID NO: 2381984 - RNA, 19 nt, Homo sapiens
  misc_RNA (1)...(19): siRNA sense strand
acgaaaagauguagggaga

SEQ ID NO: 2381985 - RNA, 19 nt, Homo sapiens
  misc_RNA (1)...(19): siRNA sense strand
ccuuaaagacaacaagaua

SEQ ID NO: 2381986 - RNA, 19 nt, Homo sapiens
  misc_RNA (1)...(19): siRNA sense strand
cugcaagagcacagagcua

SEQ ID NO: 2381987 - RNA, 19 nt, Homo sapiens
  misc_RNA (1)...(19): siRNA sense strand
gggaguaaauaaagcccaa

SEQ ID NO: 2381988 - RNA, 19 nt, Homo sapiens
  misc_RNA (1)...(19): siRNA sense strand
caaauaagaaagaaggaga

SEQ ID NO: 2381989 - RNA, 19 nt, Homo sapiens
  misc_RNA (1)...(19): siRNA sense strand
gaggagacucggauggaaa

SEQ ID NO: 2381990 - RNA, 19 nt, Homo sapiens
  misc_RNA (1)...(19): siRNA sense strand
gcgcaucuuuagagaggaa

SEQ ID NO: 2381991 - RNA, 19 nt, Homo sapiens
  misc_RNA (1)...(19): siRNA sense strand
ggaacaaaauggagaagau

SEQ ID NO: 2381992 - RNA, 19 nt, Homo sapiens
  misc_RNA (1)...(19): siRNA sense strand
ggaaaaggcgagaggaaga

SEQ ID NO: 2381993 - RNA, 19 nt, Homo sapiens
  misc_RNA (1)...(19): siRNA sense strand
agaacuugcccgaaggaaa

SEQ ID NO: 2381994 - RNA, 19 nt, Homo sapiens
  misc_RNA (1)...(19): siRNA sense strand
aggaagaauuguuacgcaa

SEQ ID NO: 2381995 - RNA, 19 nt, Homo sapiens
  misc_RNA (1)...(19): siRNA sense strand
acaaagauccucagggaga

SEQ ID NO: 2381996 - RNA, 19 nt, Homo sapiens
  misc_RNA (1)...(19): siRNA sense strand
gggaugaugcagugaaaga

SEQ ID NO: 2381997 - RNA, 19 nt, Homo sapiens
  misc_RNA (1)...(19): siRNA sense strand
gcaagagcacagagcuaaa

SEQ ID NO: 2381998 - RNA, 19 nt, Homo sapiens
  misc_RNA (1)...(19): siRNA sense strand
cagaagagcaggagaugga

SEQ ID NO: 2381999 - RNA, 19 nt, Homo sapiens
  misc_RNA (1)...(19): siRNA sense strand
ggaagagaggagaagagaa

SEQ ID NO: 2382000 - RNA, 19 nt, Homo sapiens
  misc_RNA (1)...(19): siRNA sense strand
ggaccuaggaauucaacaa

SEQ ID NO: 2382001 - RNA, 19 nt, Homo sapiens
  misc_RNA (1)...(19): siRNA sense strand
cgaggagguggcagagaaa

SEQ ID NO: 2382002 - RNA, 19 nt, Homo sapiens
  misc_RNA (1)...(19): siRNA sense strand
agauagaguaggaguugaa

SEQ ID NO: 2382003 - RNA, 19 nt, Homo sapiens
  misc_RNA (1)...(19): siRNA sense strand
caggaagaggccaggcaaa

SEQ ID NO: 2382004 - RNA, 19 nt, Homo sapiens
  misc_RNA (1)...(19): siRNA sense strand
agaaaguagaagaagaaga

SEQ ID NO: 2382005 - RNA, 19 nt, Homo sapiens
  misc_RNA (1)...(19): siRNA sense strand
gaagaagaacagagaaacu

SEQ ID NO: 2382006 - RNA, 19 nt, Homo sapiens
  misc_RNA (1)...(19): siRNA sense strand
cugagaaaaugguggcuua

SEQ ID NO: 2382007 - RNA, 19 nt, Homo sapiens
  misc_RNA (1)...(19): siRNA sense strand
gcacagagcuaaaggagug

SEQ ID NO: 2382008 - RNA, 19 nt, Homo sapiens
  misc_RNA (1)...(19): siRNA sense strand
acgaggaggaggaggaaca

SEQ ID NO: 2382009 - RNA, 19 nt, Homo sapiens
  misc_RNA (1)...(19): siRNA sense strand
aggcagaaaugagggcaaa

SEQ ID NO: 2382010 - RNA, 19 nt, Homo sapiens
  misc_RNA (1)...(19): siRNA sense strand
ccgauaagacaaauaagaa

SEQ ID NO: 2382011 - RNA, 19 nt, Homo sapiens
  misc_RNA (1)...(19): siRNA sense strand
gcaagagagaagagaggca

SEQ ID NO: 2382012 - RNA, 19 nt, Homo sapiens
  misc_RNA (1)...(19): siRNA sense strand
aggaagaggaggcugcaaa

SEQ ID NO: 2382013 - RNA, 19 nt, Homo sapiens
  misc_RNA (1)...(19): siRNA sense strand
cuuagaggaugcugaagaa

SEQ ID NO: 2382014 - RNA, 19 nt, Homo sapiens
  misc_RNA (1)...(19): siRNA sense strand
gggaagaagaagaagccca

SEQ ID NO: 2382015 - RNA, 19 nt, Homo sapiens
  misc_RNA (1)...(19): siRNA sense strand
ccuccuaaccagugggcau

SEQ ID NO: 2382016 - RNA, 19 nt, Homo sapiens
  misc_RNA (1)...(19): siRNA sense strand
gaucaaggagggauggaga

SEQ ID NO: 2382017 - RNA, 19 nt, Homo sapiens
  misc_RNA (1)...(19): siRNA sense strand
gaggcagaaaugagggcaa

SEQ ID NO: 2382018 - RNA, 19 nt, Homo sapiens
  misc_RNA (1)...(19): siRNA sense strand
ucgcagauuccuucagaua

SEQ ID NO: 2382019 - RNA, 19 nt, Homo sapiens
  misc_RNA (1)...(19): siRNA sense strand
aagcaaugcagaaguggua

SEQ ID NO: 2382020 - RNA, 19 nt, Homo sapiens
  misc_RNA (1)...(19): siRNA sense strand
gcgacagcgagaagaggaa

SEQ ID NO: 2382021 - RNA, 19 nt, Homo sapiens
  misc_RNA (1)...(19): siRNA sense strand
cugggaugaugcagugaaa

SEQ ID NO: 2382022 - RNA, 19 nt, Homo sapiens
  misc_RNA (1)...(19): siRNA sense strand
gugucuaaccggcagaaua

SEQ ID NO: 2382023 - RNA, 19 nt, Homo sapiens
  misc_RNA (1)...(19): siRNA sense strand
cggcaaauaacuuggaugu

SEQ ID NO: 2382024 - RNA, 19 nt, Homo sapiens
  misc_RNA (1)...(19): siRNA sense strand
agaggaaagaugaaccaaa

SEQ ID NO: 2382025 - RNA, 19 nt, Homo sapiens
  misc_RNA (1)...(19): siRNA sense strand
aagaaagacagcagcaaga

SEQ ID NO: 2382026 - RNA, 19 nt, Homo sapiens
  misc_RNA (1)...(19): siRNA sense strand
ccugaaagaaguagaaucu

SEQ ID NO: 2382027 - RNA, 19 nt, Homo sapiens
  misc_RNA (1)...(19): siRNA sense strand
gcgccgugccaaacagaaa

SEQ ID NO: 2382028 - RNA, 19 nt, Homo sapiens
  misc_RNA (1)...(19): siRNA sense strand
gggaugaaaugguugcuga

SEQ ID NO: 2382029 - RNA, 19 nt, Homo sapiens
  misc_RNA (1)...(19): siRNA sense strand
aaggaaaaggcgagaggaa

SEQ ID NO: 2382030 - RNA, 19 nt, Homo sapiens
  misc_RNA (1)...(19): siRNA sense strand
gcagaauaagaaaguagaa

SEQ ID NO: 2382031 - RNA, 19 nt, Homo sapiens
  misc_RNA (1)...(19): siRNA sense strand
auagaugaugacagggaua

SEQ ID NO: 2382032 - RNA, 19 nt, Homo sapiens
  misc_RNA (1)...(19): siRNA sense strand
agggauagcuugcccgaau

SEQ ID NO: 2382033 - RNA, 19 nt, Homo sapiens
  misc_RNA (1)...(19): siRNA sense strand
gcuuagaggaugcugaaga

SEQ ID NO: 2382034 - RNA, 19 nt, Homo sapiens
  misc_RNA (1)...(19): siRNA sense strand
aggaagagcgaaagaggca

SEQ ID NO: 2382035 - RNA, 19 nt, Homo sapiens
  misc_RNA (1)...(19): siRNA sense strand
gagaagaaauguuagcacu

SEQ ID NO: 2382036 - RNA, 19 nt, Homo sapiens
  misc_RNA (1)...(19): siRNA sense strand
cagcagagggaguugauga

SEQ ID NO: 2382037 - RNA, 19 nt, Homo sapiens
  misc_RNA (1)...(19): siRNA sense strand
gcacaccagcauugggaau

SEQ ID NO: 2382038 - RNA, 19 nt, Homo sapiens
  misc_RNA (1)...(19): siRNA sense strand
gcauagaugaugacaggga

SEQ ID NO: 2382039 - RNA, 19 nt, Homo sapiens
  misc_RNA (1)...(19): siRNA sense strand
ggaggaaauucuucggcga

SEQ ID NO: 2382040 - RNA, 19 nt, Homo sapiens
  misc_RNA (1)...(19): siRNA sense strand
agagaaagugagagaguua

SEQ ID NO: 2382041 - RNA, 19 nt, Homo sapiens
  misc_RNA (1)...(19): siRNA sense strand
uggaagaguacgaggaaau

SEQ ID NO: 2382042 - RNA, 19 nt, Homo sapiens
  misc_RNA (1)...(19): siRNA sense strand
ugagagaguuagaggaaaa

SEQ ID NO: 2382043 - RNA, 19 nt, Homo sapiens
  misc_RNA (1)...(19): siRNA sense strand
gauuacaggaagaggaaau

SEQ ID NO: 2382044 - RNA, 19 nt, Homo sapiens
  misc_RNA (1)...(19): siRNA sense strand
uuaaagaaacucagagcaa

SEQ ID NO: 2382045 - RNA, 19 nt, Homo sapiens
  misc_RNA (1)...(19): siRNA sense strand
auaaagagaaagugagaga

SEQ ID NO: 2382046 - RNA, 19 nt, Homo sapiens
  misc_RNA (1)...(19): siRNA sense strand
gagaauaugaauaaggaga

SEQ ID NO: 2382047 - RNA, 19 nt, Homo sapiens
  misc_RNA (1)...(19): siRNA sense strand
cuugaaauccaaagagcaa

SEQ ID NO: 2382048 - RNA, 19 nt, Homo sapiens
  misc_RNA (1)...(19): siRNA sense strand
aagauaaauuacaggccaa

SEQ ID NO: 2382049 - RNA, 19 nt, Homo sapiens
  misc_RNA (1)...(19): siRNA sense strand
agaaagguacagugauuaa

SEQ ID NO: 2382050 - RNA, 19 nt, Homo sapiens
  misc_RNA (1)...(19): siRNA sense strand
cagaaaguacugaagcaaa

SEQ ID NO: 2382051 - RNA, 19 nt, Homo sapiens
  misc_RNA (1)...(19): siRNA sense strand
agccagaaacuuaaagaaa

SEQ ID NO: 2382052 - RNA, 19 nt, Homo sapiens
  misc_RNA (1)...(19): siRNA sense strand
ccagaaacuuaaagaaacu

SEQ ID NO: 2382053 - RNA, 19 nt, Homo sapiens
  misc_RNA (1)...(19): siRNA sense strand
gugaaaagagaaaaggaaa

SEQ ID NO: 2382054 - RNA, 19 nt, Homo sapiens
  misc_RNA (1)...(19): siRNA sense strand
gugaugaagcugaggacau

SEQ ID NO: 2382055 - RNA, 19 nt, Homo sapiens
  misc_RNA (1)...(19): siRNA sense strand
aaagaaacucagagcaaau

SEQ ID NO: 2382056 - RNA, 19 nt, Homo sapiens
  misc_RNA (1)...(19): siRNA sense strand
gcauuagaagaaagugaaa

SEQ ID NO: 2382057 - RNA, 19 nt, Homo sapiens
  misc_RNA (1)...(19): siRNA sense strand
cgggaaaggaaucgguauu

SEQ ID NO: 2382058 - RNA, 19 nt, Homo sapiens
  misc_RNA (1)...(19): siRNA sense strand
ccaccaaacacgacaguga

SEQ ID NO: 2382059 - RNA, 19 nt, Homo sapiens
  misc_RNA (1)...(19): siRNA sense strand
ucacggaagaggaaauaaa

SEQ ID NO: 2382060 - RNA, 19 nt, Homo sapiens
  misc_RNA (1)...(19): siRNA sense strand
aagcagagcaugagaaacu

SEQ ID NO: 2382061 - RNA, 19 nt, Homo sapiens
  misc_RNA (1)...(19): siRNA sense strand
agugagagaguuagaggaa

SEQ ID NO: 2382062 - RNA, 19 nt, Homo sapiens
  misc_RNA (1)...(19): siRNA sense strand
aggaaguggaaguagcaaa

SEQ ID NO: 2382063 - RNA, 19 nt, Homo sapiens
  misc_RNA (1)...(19): siRNA sense strand
ggaaucugugaaagagaaa

SEQ ID NO: 2382064 - RNA, 19 nt, Homo sapiens
  misc_RNA (1)...(19): siRNA sense strand
cagcaaaagagauggaaga

SEQ ID NO: 2382065 - RNA, 19 nt, Homo sapiens
  misc_RNA (1)...(19): siRNA sense strand
uggaggaagauaaagauaa

SEQ ID NO: 2382066 - RNA, 19 nt, Homo sapiens
  misc_RNA (1)...(19): siRNA sense strand
ucaauaaacaggugagcga

SEQ ID NO: 2382067 - RNA, 19 nt, Homo sapiens
  misc_RNA (1)...(19): siRNA sense strand
gaauaggaugauagaugaa

SEQ ID NO: 2382068 - RNA, 19 nt, Homo sapiens
  misc_RNA (1)...(19): siRNA sense strand
cuacagaagagauuagaga

SEQ ID NO: 2382069 - RNA, 19 nt, Homo sapiens
  misc_RNA (1)...(19): siRNA sense strand
acaggaagccagugaugaa

SEQ ID NO: 2382070 - RNA, 19 nt, Homo sapiens
  misc_RNA (1)...(19): siRNA sense strand
gggucacggaagaggaaau

SEQ ID NO: 2382071 - RNA, 19 nt, Homo sapiens
  misc_RNA (1)...(19): siRNA sense strand
guggaaugccucaggguca

SEQ ID NO: 2382072 - RNA, 19 nt, Homo sapiens
  misc_RNA (1)...(19): siRNA sense strand
acaaacguguccagggcua

SEQ ID NO: 2382073 - RNA, 19 nt, Homo sapiens
  misc_RNA (1)...(19): siRNA sense strand
ggugaaaagagaaaaggaa

SEQ ID NO: 2382074 - RNA, 19 nt, Homo sapiens
  misc_RNA (1)...(19): siRNA sense strand
ccaaggaggcggaagcaga

SEQ ID NO: 2382075 - RNA, 19 nt, Homo sapiens
  misc_RNA (1)...(19): siRNA sense strand
caucgaaauuaaaggaauc

SEQ ID NO: 2382076 - RNA, 19 nt, Homo sapiens
  misc_RNA (1)...(19): siRNA sense strand
aaagcgaaguucaggaaga

SEQ ID NO: 2382077 - RNA, 19 nt, Homo sapiens
  misc_RNA (1)...(19): siRNA sense strand
acgaggaggcuaugaaaga

SEQ ID NO: 2382078 - RNA, 19 nt, Homo sapiens
  misc_RNA (1)...(19): siRNA sense strand
agucauccuuagagaguga

SEQ ID NO: 2382079 - RNA, 19 nt, Homo sapiens
  misc_RNA (1)...(19): siRNA sense strand
augaagauguccagaaagu

SEQ ID NO: 2382080 - RNA, 19 nt, Homo sapiens
  misc_RNA (1)...(19): siRNA sense strand
augaauaaggagaaagcau

SEQ ID NO: 2382081 - RNA, 19 nt, Homo sapiens
  misc_RNA (1)...(19): siRNA sense strand
gcaaaagagauggaagaaa

SEQ ID NO: 2382082 - RNA, 19 nt, Homo sapiens
  misc_RNA (1)...(19): siRNA sense strand
agacuaagugacaguacua

SEQ ID NO: 2382083 - RNA, 19 nt, Homo sapiens
  misc_RNA (1)...(19): siRNA sense strand
cugauagcuuauuggauau

SEQ ID NO: 2382084 - RNA, 19 nt, Homo sapiens
  misc_RNA (1)...(19): siRNA sense strand
cuggaggauuacaggaaga

SEQ ID NO: 2382085 - RNA, 19 nt, Homo sapiens
  misc_RNA (1)...(19): siRNA sense strand
cuuaaacaacacugagauu

SEQ ID NO: 2382086 - RNA, 19 nt, Homo sapiens
  misc_RNA (1)...(19): siRNA sense strand
ugaaagagaaagagaaggu

SEQ ID NO: 2382087 - RNA, 19 nt, Homo sapiens
  misc_RNA (1)...(19): siRNA sense strand
cgacuccacuaucgggaaa

SEQ ID NO: 2382088 - RNA, 19 nt, Homo sapiens
  misc_RNA (1)...(19): siRNA sense strand
cggaagaggaaauaaaugu

SEQ ID NO: 2382089 - RNA, 19 nt, Homo sapiens
  misc_RNA (1)...(19): siRNA sense strand
augaaagaagccaugaaua

SEQ ID NO: 2382090 - RNA, 19 nt, Homo sapiens
  misc_RNA (1)...(19): siRNA sense strand
ggaugauagaugaacucaa

SEQ ID NO: 2382091 - RNA, 19 nt, Homo sapiens
  misc_RNA (1)...(19): siRNA sense strand
aggauuacaggaagaggaa

SEQ ID NO: 2382092 - RNA, 19 nt, Homo sapiens
  misc_RNA (1)...(19): siRNA sense strand
cugugaaagagaaagagaa

SEQ ID NO: 2382093 - RNA, 19 nt, Homo sapiens
  misc_RNA (1)...(19): siRNA sense strand
agauaaaugagaugucgaa

SEQ ID NO: 2382094 - RNA, 19 nt, Homo sapiens
  misc_RNA (1)...(19): siRNA sense strand
cccauaaaccucaaagauu

SEQ ID NO: 2382095 - RNA, 19 nt, Homo sapiens
  misc_RNA (1)...(19): siRNA sense strand
caagaaugaugaccggcua

SEQ ID NO: 2382096 - RNA, 19 nt, Homo sapiens
  misc_RNA (1)...(19): siRNA sense strand
aaagagaaagugagagagu

SEQ ID NO: 2382097 - RNA, 19 nt, Homo sapiens
  misc_RNA (1)...(19): siRNA sense strand
guggaagaguacgaggaaa

SEQ ID NO: 2382098 - RNA, 19 nt, Homo sapiens
  misc_RNA (1)...(19): siRNA sense strand
aagcugaggacaugaaaga

SEQ ID NO: 2382099 - RNA, 19 nt, Homo sapiens
  misc_RNA (1)...(19): siRNA sense strand
guccagggcuaaagcagaa

SEQ ID NO: 2382100 - RNA, 19 nt, Homo sapiens
  misc_RNA (1)...(19): siRNA sense strand
ccaaaaggcaggagagaau

SEQ ID NO: 2382101 - RNA, 19 nt, Homo sapiens
  misc_RNA (1)...(19): siRNA sense strand
cuguaaauggugaagauaa

SEQ ID NO: 2382102 - RNA, 19 nt, Homo sapiens
  misc_RNA (1)...(19): siRNA sense strand
acacaaaguuucaaggcca

SEQ ID NO: 2382103 - RNA, 19 nt, Homo sapiens
  misc_RNA (1)...(19): siRNA sense strand
ugacaauagagaacggaga

SEQ ID NO: 2382104 - RNA, 19 nt, Homo sapiens
  misc_RNA (1)...(19): siRNA sense strand
cauuauauuccgugggagu

SEQ ID NO: 2382105 - RNA, 19 nt, Homo sapiens
  misc_RNA (1)...(19): siRNA sense strand
aauagagaacggagaccaa

SEQ ID NO: 2382106 - RNA, 19 nt, Homo sapiens
  misc_RNA (1)...(19): siRNA sense strand
cccaaaacagugaaggaaa

SEQ ID NO: 2382107 - RNA, 19 nt, Homo sapiens
  misc_RNA (1)...(19): siRNA sense strand
auacagaggcagaggaggu

SEQ ID NO: 2382108 - RNA, 19 nt, Homo sapiens
  misc_RNA (1)...(19): siRNA sense strand
ugaagauaaaggagacuca

SEQ ID NO: 2382109 - RNA, 19 nt, Homo sapiens
  misc_RNA (1)...(19): siRNA sense strand
ccuuacuguuugugagcca

SEQ ID NO: 2382110 - RNA, 19 nt, Homo sapiens
  misc_RNA (1)...(19): siRNA sense strand
agaugaagucuuugaauac

SEQ ID NO: 2382111 - RNA, 19 nt, Homo sapiens
  misc_RNA (1)...(19): siRNA sense strand
caggagagaaucaggagca

SEQ ID NO: 2382112 - RNA, 19 nt, Homo sapiens
  misc_RNA (1)...(19): siRNA sense strand
ggccaaugaaauuugagaa

SEQ ID NO: 2382113 - RNA, 19 nt, Homo sapiens
  misc_RNA (1)...(19): siRNA sense strand
caguuagacccuuugagaa

SEQ ID NO: 2382114 - RNA, 19 nt, Homo sapiens
  misc_RNA (1)...(19): siRNA sense strand
ggauacaagaucucuaaaa

SEQ ID NO: 2382115 - RNA, 19 nt, Homo sapiens
  misc_RNA (1)...(19): siRNA sense strand
auucaacaaggaagagauu

SEQ ID NO: 2382116 - RNA, 19 nt, Homo sapiens
  misc_RNA (1)...(19): siRNA sense strand
cacaauucaacaaggaaga

SEQ ID NO: 2382117 - RNA, 19 nt, Homo sapiens
  misc_RNA (1)...(19): siRNA sense strand
aaugauaacaagagacaag

SEQ ID NO: 2382118 - RNA, 19 nt, Homo sapiens
  misc_RNA (1)...(19): siRNA sense strand
acaaguagcuccaggugcu

SEQ ID NO: 2382119 - RNA, 19 nt, Homo sapiens
  misc_RNA (1)...(19): siRNA sense strand
gcacaauucaacaaggaag

SEQ ID NO: 2382120 - RNA, 19 nt, Homo sapiens
  misc_RNA (1)...(19): siRNA sense strand
aggaaagaguuacgccaaa

SEQ ID NO: 2382121 - RNA, 19 nt, Homo sapiens
  misc_RNA (1)...(19): siRNA sense strand
ggacacugaacaaaggaaa

SEQ ID NO: 2382122 - RNA, 19 nt, Homo sapiens
  misc_RNA (1)...(19): siRNA sense strand
cugauuuggauaaggaaua

SEQ ID NO: 2382123 - RNA, 19 nt, Homo sapiens
  misc_RNA (1)...(19): siRNA sense strand
gggaaauauugccagagaa

SEQ ID NO: 2382124 - RNA, 19 nt, Homo sapiens
  misc_RNA (1)...(19): siRNA sense strand
ggguagaaugaccggcaua

SEQ ID NO: 2382125 - RNA, 19 nt, Homo sapiens
  misc_RNA (1)...(19): siRNA sense strand
gcuuuaaaccauacaaaca

SEQ ID NO: 2382126 - RNA, 19 nt, Homo sapiens
  misc_RNA (1)...(19): siRNA sense strand
gcaaugacaaggaggagau

SEQ ID NO: 2382127 - RNA, 19 nt, Homo sapiens
  misc_RNA (1)...(19): siRNA sense strand
gacacaauucugaaggaaa

SEQ ID NO: 2382128 - RNA, 19 nt, Homo sapiens
  misc_RNA (1)...(19): siRNA sense strand
agcugaaguugcagaacaa

SEQ ID NO: 2382129 - RNA, 19 nt, Homo sapiens
  misc_RNA (1)...(19): siRNA sense strand
ccgaagaagucaagaugcu

SEQ ID NO: 2382130 - RNA, 19 nt, Homo sapiens
  misc_RNA (1)...(19): siRNA sense strand
ccugcaagcuguuugggaa

SEQ ID NO: 2382131 - RNA, 19 nt, Homo sapiens
  misc_RNA (1)...(19): siRNA sense strand
gcucaggaguagcagccaa

SEQ ID NO: 2382132 - RNA, 19 nt, Homo sapiens
  misc_RNA (1)...(19): siRNA sense strand
cccaagaugaagagaauca

SEQ ID NO: 2382133 - RNA, 19 nt, Homo sapiens
  misc_RNA (1)...(19): siRNA sense strand
aagcaaggucgcuggauuu

SEQ ID NO: 2382134 - RNA, 19 nt, Homo sapiens
  misc_RNA (1)...(19): siRNA sense strand
uggaggacuuagaccguua

SEQ ID NO: 2382135 - RNA, 19 nt, Homo sapiens
  misc_RNA (1)...(19): siRNA sense strand
uaucauugucuaugggaau

SEQ ID NO: 2382136 - RNA, 19 nt, Homo sapiens
  misc_RNA (1)...(19): siRNA sense strand
acacaauucugaaggaaac

SEQ ID NO: 2382137 - RNA, 19 nt, Homo sapiens
  misc_RNA (1)...(19): siRNA sense strand
acugagaagcccaggcaau

SEQ ID NO: 2382138 - RNA, 19 nt, Homo sapiens
  misc_RNA (1)...(19): siRNA sense strand
uagaagaugaggaaaucaa

SEQ ID NO: 2382139 - RNA, 19 nt, Homo sapiens
  misc_RNA (1)...(19): siRNA sense strand
gugaauacuuccuggccga

SEQ ID NO: 2382140 - RNA, 19 nt, Homo sapiens
  misc_RNA (1)...(19): siRNA sense strand
aggaauaacuccaucacca

SEQ ID NO: 2382141 - RNA, 19 nt, Homo sapiens
  misc_RNA (1)...(19): siRNA sense strand
cuucaguuccaaagaaauu

SEQ ID NO: 2382142 - RNA, 19 nt, Homo sapiens
  misc_RNA (1)...(19): siRNA sense strand
gaaccggaggacauagaaa

SEQ ID NO: 2382143 - RNA, 19 nt, Homo sapiens
  misc_RNA (1)...(19): siRNA sense strand
gggcauucuuccugggucu

SEQ ID NO: 2382144 - RNA, 19 nt, Homo sapiens
  misc_RNA (1)...(19): siRNA sense strand
uggaaaagcuuggcauaaa

SEQ ID NO: 2382145 - RNA, 19 nt, Homo sapiens
  misc_RNA (1)...(19): siRNA sense strand
aguaaccggcagugcgaaa

SEQ ID NO: 2382146 - RNA, 19 nt, Homo sapiens
  misc_RNA (1)...(19): siRNA sense strand
ucgcaaagccaggguggaa

SEQ ID NO: 2382147 - RNA, 19 nt, Homo sapiens
  misc_RNA (1)...(19): siRNA sense strand
agggaaauauugccagaga

SEQ ID NO: 2382148 - RNA, 19 nt, Homo sapiens
  misc_RNA (1)...(19): siRNA sense strand
caggaaagaguuacgccaa

SEQ ID NO: 2382149 - RNA, 19 nt, Homo sapiens
  misc_RNA (1)...(19): siRNA sense strand
cugagaagcccaggcaaua

SEQ ID NO: 2382150 - RNA, 19 nt, Homo sapiens
  misc_RNA (1)...(19): siRNA sense strand
aauagaggcccaagaugaa

SEQ ID NO: 2382151 - RNA, 19 nt, Homo sapiens
  misc_RNA (1)...(19): siRNA sense strand
aggcacagcuguuggguuc

SEQ ID NO: 2382152 - RNA, 19 nt, Homo sapiens
  misc_RNA (1)...(19): siRNA sense strand
gcauauuggaggacuuaga

SEQ ID NO: 2382153 - RNA, 19 nt, Homo sapiens
  misc_RNA (1)...(19): siRNA sense strand
cguuuaaagcccucaauga

SEQ ID NO: 2382154 - RNA, 19 nt, Homo sapiens
  misc_RNA (1)...(19): siRNA sense strand
ugccaauauuuaugcgcua

SEQ ID NO: 2382155 - RNA, 19 nt, Homo sapiens
  misc_RNA (1)...(19): siRNA sense strand
gcgaagaacacgggcacau

SEQ ID NO: 2382156 - RNA, 19 nt, Homo sapiens
  misc_RNA (1)...(19): siRNA sense strand
ccaauagauacuacucaaa

SEQ ID NO: 2382157 - RNA, 19 nt, Homo sapiens
  misc_RNA (1)...(19): siRNA sense strand
cgaggaagcuuuaacagca

SEQ ID NO: 2382158 - RNA, 19 nt, Homo sapiens
  misc_RNA (1)...(19): siRNA sense strand
ucagaaaugaaauggacau

SEQ ID NO: 2382159 - RNA, 19 nt, Homo sapiens
  misc_RNA (1)...(19): siRNA sense strand
gaguuaugcuuuaaaccau

SEQ ID NO: 2382160 - RNA, 19 nt, Homo sapiens
  misc_RNA (1)...(19): siRNA sense strand
ccacagaagggaauaucau

SEQ ID NO: 2382161 - RNA, 19 nt, Homo sapiens
  misc_RNA (1)...(19): siRNA sense strand
ugacagucgacuugugauu

SEQ ID NO: 2382162 - RNA, 19 nt, Homo sapiens
  misc_RNA (1)...(19): siRNA sense strand
ugaaggaaacuuacgguga

SEQ ID NO: 2382163 - RNA, 19 nt, Homo sapiens
  misc_RNA (1)...(19): siRNA sense strand
agugugugcucaagaguga

SEQ ID NO: 2382164 - RNA, 19 nt, Homo sapiens
  misc_RNA (1)...(19): siRNA sense strand
aaagcauauuggaggacuu

SEQ ID NO: 2382165 - RNA, 19 nt, Homo sapiens
  misc_RNA (1)...(19): siRNA sense strand
acuuagaccguuacaacaa

SEQ ID NO: 2382166 - RNA, 19 nt, Homo sapiens
  misc_RNA (1)...(19): siRNA sense strand
gcucuauguucuucagcuu

SEQ ID NO: 2382167 - RNA, 19 nt, Homo sapiens
  misc_RNA (1)...(19): siRNA sense strand
ccaaggaggaggaagaucu

SEQ ID NO: 2382168 - RNA, 19 nt, Homo sapiens
  misc_RNA (1)...(19): siRNA sense strand
ccagggaaauauugccaga

SEQ ID NO: 2382169 - RNA, 19 nt, Homo sapiens
  misc_RNA (1)...(19): siRNA sense strand
ccauacaaacagaaaacua

SEQ ID NO: 2382170 - RNA, 19 nt, Homo sapiens
  misc_RNA (1)...(19): siRNA sense strand
gcauagaccgagcagccaa

SEQ ID NO: 2382171 - RNA, 19 nt, Homo sapiens
  misc_RNA (1)...(19): siRNA sense strand
ccucaaugaugcaugucuu

SEQ ID NO: 2382172 - RNA, 19 nt, Homo sapiens
  misc_RNA (1)...(19): siRNA sense strand
cugaaguugcagaacaaau

SEQ ID NO: 2382173 - RNA, 19 nt, Homo sapiens
  misc_RNA (1)...(19): siRNA sense strand
ccaccaagccuuucagacu

SEQ ID NO: 2382174 - RNA, 19 nt, Homo sapiens
  misc_RNA (1)...(19): siRNA sense strand
ccgaacuaauagaggccca

SEQ ID NO: 2382175 - RNA, 19 nt, Homo sapiens
  misc_RNA (1)...(19): siRNA sense strand
uagcugaaguugcagaaca

SEQ ID NO: 2382176 - RNA, 19 nt, Homo sapiens
  misc_RNA (1)...(19): siRNA sense strand
acaccaaguucuuucugaa

SEQ ID NO: 2382177 - RNA, 19 nt, Homo sapiens
  misc_RNA (1)...(19): siRNA sense strand
guuuaaagcccucaaugau

SEQ ID NO: 2382178 - RNA, 19 nt, Homo sapiens
  misc_RNA (1)...(19): siRNA sense strand
uacaaauggcacagccuaa

SEQ ID NO: 2382179 - RNA, 19 nt, Homo sapiens
  misc_RNA (1)...(19): siRNA sense strand
aguauaaaaugguggaaac

SEQ ID NO: 2382180 - RNA, 19 nt, Homo sapiens
  misc_RNA (1)...(19): siRNA sense strand
cauauaugucacaggcaca

SEQ ID NO: 2382181 - RNA, 19 nt, Homo sapiens
  misc_RNA (1)...(19): siRNA sense strand
aauacuugguccugagcau

SEQ ID NO: 2382182 - RNA, 19 nt, Homo sapiens
  misc_RNA (1)...(19): siRNA sense strand
gcauggaggaggcugguga

SEQ ID NO: 2382183 - RNA, 19 nt, Homo sapiens
  misc_RNA (1)...(19): siRNA sense strand
gcaccaaggucauggccag

SEQ ID NO: 2382184 - RNA, 19 nt, Homo sapiens
  misc_RNA (1)...(19): siRNA sense strand
ggagcuuguuccaggagca

SEQ ID NO: 2382185 - RNA, 19 nt, Homo sapiens
  misc_RNA (1)...(19): siRNA sense strand
cggaagucggccaggaagu

SEQ ID NO: 2382186 - RNA, 19 nt, Homo sapiens
  misc_RNA (1)...(19): siRNA sense strand
gugagauggagcagaagca

SEQ ID NO: 2382187 - RNA, 19 nt, Homo sapiens
  misc_RNA (1)...(19): siRNA sense strand
uugaaggaauggagggaau

SEQ ID NO: 2382188 - RNA, 19 nt, Homo sapiens
  misc_RNA (1)...(19): siRNA sense strand
gcaaaggguuacugggcuu

SEQ ID NO: 2382189 - RNA, 19 nt, Homo sapiens
  misc_RNA (1)...(19): siRNA sense strand
uguggaagauggaggagaa

SEQ ID NO: 2382190 - RNA, 19 nt, Homo sapiens
  misc_RNA (1)...(19): siRNA sense strand
agacagagaaagagauuca

SEQ ID NO: 2382191 - RNA, 19 nt, Homo sapiens
  misc_RNA (1)...(19): siRNA sense strand
ccuaaugacagaugaggua

SEQ ID NO: 2382192 - RNA, 19 nt, Homo sapiens
  misc_RNA (1)...(19): siRNA sense strand
aggaaagagcauaagcuaa

SEQ ID NO: 2382193 - RNA, 19 nt, Homo sapiens
  misc_RNA (1)...(19): siRNA sense strand
aaagaaagguuguggguac

SEQ ID NO: 2382194 - RNA, 19 nt, Homo sapiens
  misc_RNA (1)...(19): siRNA sense strand
guaagaaaguugauggacu

SEQ ID NO: 2382195 - RNA, 19 nt, Homo sapiens
  misc_RNA (1)...(19): siRNA sense strand
uugaagaagauguggaaga

SEQ ID NO: 2382196 - RNA, 19 nt, Homo sapiens
  misc_RNA (1)...(19): siRNA sense strand
gaaccaaauuccauggaca

SEQ ID NO: 2382197 - RNA, 19 nt, Homo sapiens
  misc_RNA (1)...(19): siRNA sense strand
auuugaugccugagaguaa

SEQ ID NO: 2382198 - RNA, 19 nt, Homo sapiens
  misc_RNA (1)...(19): siRNA sense strand
ucauaaacacagaaagaga

SEQ ID NO: 2382199 - RNA, 19 nt, Homo sapiens
  misc_RNA (1)...(19): siRNA sense strand
aaacacagaaagagagaca

SEQ ID NO: 2382200 - RNA, 19 nt, Homo sapiens
  misc_RNA (1)...(19): siRNA sense strand
ggagaaagguggagcaagc

SEQ ID NO: 2382201 - RNA, 19 nt, Homo sapiens
  misc_RNA (1)...(19): siRNA sense strand
acacagaaagagagacaga

SEQ ID NO: 2382202 - RNA, 19 nt, Homo sapiens
  misc_RNA (1)...(19): siRNA sense strand
aagaagauuuagaagguca

SEQ ID NO: 2382203 - RNA, 19 nt, Homo sapiens
  misc_RNA (1)...(19): siRNA sense strand
cuauaaagcuaaagaucgu

SEQ ID NO: 2382204 - RNA, 19 nt, Homo sapiens
  misc_RNA (1)...(19): siRNA sense strand
ucaacaggaaagagcauaa

SEQ ID NO: 2382205 - RNA, 19 nt, Homo sapiens
  misc_RNA (1)...(19): siRNA sense strand
agaaacagucagaaccaaa

SEQ ID NO: 2382206 - RNA, 19 nt, Homo sapiens
  misc_RNA (1)...(19): siRNA sense strand
agaagaacaaugugugcua

SEQ ID NO: 2382207 - RNA, 19 nt, Homo sapiens
  misc_RNA (1)...(19): siRNA sense strand
cgaacaucuuacugggaga

SEQ ID NO: 2382208 - RNA, 19 nt, Homo sapiens
  misc_RNA (1)...(19): siRNA sense strand
acagaaagagagacagaga

SEQ ID NO: 2382209 - RNA, 19 nt, Homo sapiens
  misc_RNA (1)...(19): siRNA sense strand
aggaugaugacgaggaaca

SEQ ID NO: 2382210 - RNA, 19 nt, Homo sapiens
  misc_RNA (1)...(19): siRNA sense strand
ggauccaagcauucgaaua

SEQ ID NO: 2382211 - RNA, 19 nt, Homo sapiens
  misc_RNA (1)...(19): siRNA sense strand
cuucaucucuaaagggaau

SEQ ID NO: 2382212 - RNA, 19 nt, Homo sapiens
  misc_RNA (1)...(19): siRNA sense strand
cgaggaugaugacgaggaa

SEQ ID NO: 2382213 - RNA, 19 nt, Homo sapiens
  misc_RNA (1)...(19): siRNA sense strand
gaaugaagauguacgccau

SEQ ID NO: 2382214 - RNA, 19 nt, Homo sapiens
  misc_RNA (1)...(19): siRNA sense strand
ggauagagguggaacucgu

SEQ ID NO: 2382215 - RNA, 19 nt, Homo sapiens
  misc_RNA (1)...(19): siRNA sense strand
aaugauguuagcagagaaa

SEQ ID NO: 2382216 - RNA, 19 nt, Homo sapiens
  misc_RNA (1)...(19): siRNA sense strand
cagaaagagagacagagaa

SEQ ID NO: 2382217 - RNA, 19 nt, Homo sapiens
  misc_RNA (1)...(19): siRNA sense strand
agagacagagaaagagauu

SEQ ID NO: 2382218 - RNA, 19 nt, Homo sapiens
  misc_RNA (1)...(19): siRNA sense strand
gacgcugaguggcgagaaa

SEQ ID NO: 2382219 - RNA, 19 nt, Homo sapiens
  misc_RNA (1)...(19): siRNA sense strand
ugacauaauuugggagaac

SEQ ID NO: 2382220 - RNA, 19 nt, Homo sapiens
  misc_RNA (1)...(19): siRNA sense strand
guuugaagaagauguggaa

SEQ ID NO: 2382221 - RNA, 19 nt, Homo sapiens
  misc_RNA (1)...(19): siRNA sense strand
ugaagaagcaguuguggau

SEQ ID NO: 2382222 - RNA, 19 nt, Homo sapiens
  misc_RNA (1)...(19): siRNA sense strand
cagcgaacuggaaggauuu

SEQ ID NO: 2382223 - RNA, 19 nt, Homo sapiens
  misc_RNA (1)...(19): siRNA sense strand
agaugagggcacaguacaa

SEQ ID NO: 2382224 - RNA, 19 nt, Homo sapiens
  misc_RNA (1)...(19): siRNA sense strand
uggaagggcacuauagaga

SEQ ID NO: 2382225 - RNA, 19 nt, Homo sapiens
  misc_RNA (1)...(19): siRNA sense strand
auucgggagcaaaggguua

SEQ ID NO: 2382226 - RNA, 19 nt, Homo sapiens
  misc_RNA (1)...(19): siRNA sense strand
aacccaugguggacaguaa

SEQ ID NO: 2382227 - RNA, 19 nt, Homo sapiens
  misc_RNA (1)...(19): siRNA sense strand
guugaaguuugaagaagau

SEQ ID NO: 2382228 - RNA, 19 nt, Homo sapiens
  misc_RNA (1)...(19): siRNA sense strand
aaccaaauuccauggacaa

SEQ ID NO: 2382229 - RNA, 19 nt, Homo sapiens
  misc_RNA (1)...(19): siRNA sense strand
ugacuugguaucaggaauu

SEQ ID NO: 2382230 - RNA, 19 nt, Homo sapiens
  misc_RNA (1)...(19): siRNA sense strand
acucaugucaauagccuaa

SEQ ID NO: 2382231 - RNA, 19 nt, Homo sapiens
  misc_RNA (1)...(19): siRNA sense strand
agagagacagagaaagaga

SEQ ID NO: 2382232 - RNA, 19 nt, Homo sapiens
  misc_RNA (1)...(19): siRNA sense strand
ccaacacuuuagaagaaau

SEQ ID NO: 2382233 - RNA, 19 nt, Homo sapiens
  misc_RNA (1)...(19): siRNA sense strand
cguauaagugcaauugaau

SEQ ID NO: 2382234 - RNA, 19 nt, Homo sapiens
  misc_RNA (1)...(19): siRNA sense strand
agagcauaagcuaaagaaa

SEQ ID NO: 2382235 - RNA, 19 nt, Homo sapiens
  misc_RNA (1)...(19): siRNA sense strand
caagaaacagucagaacca

SEQ ID NO: 2382236 - RNA, 19 nt, Homo sapiens
  misc_RNA (1)...(19): siRNA sense strand
ccgcauaaucccagcaaug

SEQ ID NO: 2382237 - RNA, 19 nt, Homo sapiens
  misc_RNA (1)...(19): siRNA sense strand
caucaacaggaaagagcau

SEQ ID NO: 2382238 - RNA, 19 nt, Homo sapiens
  misc_RNA (1)...(19): siRNA sense strand
ccgauaacucaaaagauaa

SEQ ID NO: 2382239 - RNA, 19 nt, Homo sapiens
  misc_RNA (1)...(19): siRNA sense strand
gaaccgaggaugaugacga

SEQ ID NO: 2382240 - RNA, 19 nt, Homo sapiens
  misc_RNA (1)...(19): siRNA sense strand
uuuaugaggcccuggagaa

SEQ ID NO: 2382241 - RNA, 19 nt, Homo sapiens
  misc_RNA (1)...(19): siRNA sense strand
ucacaggcaucguggucau

SEQ ID NO: 2382242 - RNA, 19 nt, Homo sapiens
  misc_RNA (1)...(19): siRNA sense strand
caggcaucguggucauaaa

SEQ ID NO: 2382243 - RNA, 19 nt, Homo sapiens
  misc_RNA (1)...(19): siRNA sense strand
uuuagaaggucaucgaaca

SEQ ID NO: 2382244 - RNA, 19 nt, Homo sapiens
  misc_RNA (1)...(19): siRNA sense strand
gaggagaaagguggagcaa

SEQ ID NO: 2382245 - RNA, 19 nt, Homo sapiens
  misc_RNA (1)...(19): siRNA sense strand
ccauaggguccaugaggca

SEQ ID NO: 2382246 - RNA, 19 nt, Homo sapiens
  misc_RNA (1)...(19): siRNA sense strand
cuguauugcuucaaggacu

SEQ ID NO: 2382247 - RNA, 19 nt, Homo sapiens
  misc_RNA (1)...(19): siRNA sense strand
uuggaggacugcugggaga

SEQ ID NO: 2382248 - RNA, 19 nt, Homo sapiens
  misc_RNA (1)...(19): siRNA sense strand
agugcuauauggaguguuu

SEQ ID NO: 2382249 - RNA, 19 nt, Homo sapiens
  misc_RNA (1)...(19): siRNA sense strand
agaaggucaucgaacacua

SEQ ID NO: 2382250 - RNA, 19 nt, Homo sapiens
  misc_RNA (1)...(19): siRNA sense strand
ggaacuguguugcuggaca

SEQ ID NO: 2382251 - RNA, 19 nt, Homo sapiens
  misc_RNA (1)...(19): siRNA sense strand
cagccuguguugaaaauaa

SEQ ID NO: 2382252 - RNA, 19 nt, Homo sapiens
  misc_RNA (1)...(19): siRNA sense strand
aaccagaagcagccggaaa

SEQ ID NO: 2382253 - RNA, 19 nt, Homo sapiens
  misc_RNA (1)...(19): siRNA sense strand
gugcugugcaagaggagga

SEQ ID NO: 2382254 - RNA, 19 nt, Homo sapiens
  misc_RNA (1)...(19): siRNA sense strand
aauaagaucuggacgguga

SEQ ID NO: 2382255 - RNA, 19 nt, Homo sapiens
  misc_RNA (1)...(19): siRNA sense strand
auagagacauggcgggaga

SEQ ID NO: 2382256 - RNA, 19 nt, Homo sapiens
  misc_RNA (1)...(19): siRNA sense strand
cagaauaaguuccuggcca

SEQ ID NO: 2382257 - RNA, 19 nt, Homo sapiens
  misc_RNA (1)...(19): siRNA sense strand
ccgaugaucuggagcagca

SEQ ID NO: 2382258 - RNA, 19 nt, Homo sapiens
  misc_RNA (1)...(19): siRNA sense strand
gggucaaagccguggcauc

SEQ ID NO: 2382259 - RNA, 19 nt, Homo sapiens
  misc_RNA (1)...(19): siRNA sense strand
auagauaccaguacgggaa

SEQ ID NO: 2382260 - RNA, 19 nt, Homo sapiens
  misc_RNA (1)...(19): siRNA sense strand
augcugugguggaggagau

SEQ ID NO: 2382261 - RNA, 19 nt, Homo sapiens
  misc_RNA (1)...(19): siRNA sense strand
uggugauggugcaugguuu

SEQ ID NO: 2382262 - RNA, 19 nt, Homo sapiens
  misc_RNA (1)...(19): siRNA sense strand
cugugagccccgagcaaaa

SEQ ID NO: 2382263 - RNA, 19 nt, Homo sapiens
  misc_RNA (1)...(19): siRNA sense strand
uggacaaugaggauaagaa

SEQ ID NO: 2382264 - RNA, 19 nt, Homo sapiens
  misc_RNA (1)...(19): siRNA sense strand
agcaggaacaggagcacaa

SEQ ID NO: 2382265 - RNA, 19 nt, Homo sapiens
  misc_RNA (1)...(19): siRNA sense strand
aaaccaagaugcacagcga

SEQ ID NO: 2382266 - RNA, 19 nt, Homo sapiens
  misc_RNA (1)...(19): siRNA sense strand
agguggagccuuauaccaa

SEQ ID NO: 2382267 - RNA, 19 nt, Homo sapiens
  misc_RNA (1)...(19): siRNA sense strand
aaucugauggugaaggcaa

SEQ ID NO: 2382268 - RNA, 19 nt, Homo sapiens
  misc_RNA (1)...(19): siRNA sense strand
uccagaacacacagguuaa

SEQ ID NO: 2382269 - RNA, 19 nt, Homo sapiens
  misc_RNA (1)...(19): siRNA sense strand
cucaagauucagagggaaa

SEQ ID NO: 2382270 - RNA, 19 nt, Homo sapiens
  misc_RNA (1)...(19): siRNA sense strand
aggaagauaaagaggauga

SEQ ID NO: 2382271 - RNA, 19 nt, Homo sapiens
  misc_RNA (1)...(19): siRNA sense strand
agucaaauguaaaugccua

SEQ ID NO: 2382272 - RNA, 19 nt, Homo sapiens
  misc_RNA (1)...(19): siRNA sense strand
ggaauauugagaaggcuga

SEQ ID NO: 2382273 - RNA, 19 nt, Homo sapiens
  misc_RNA (1)...(19): siRNA sense strand
uugagaaggcugaggaacu

SEQ ID NO: 2382274 - RNA, 19 nt, Homo sapiens
  misc_RNA (1)...(19): siRNA sense strand
auguaaaugccuaugaaga

SEQ ID NO: 2382275 - RNA, 19 nt, Homo sapiens
  misc_RNA (1)...(19): siRNA sense strand
gcugcuaccuccuggccua

SEQ ID NO: 2382276 - RNA, 19 nt, Homo sapiens
  misc_RNA (1)...(19): siRNA sense strand
ggacuuaacuuacaggaag

SEQ ID NO: 2382277 - RNA, 19 nt, Homo sapiens
  misc_RNA (1)...(19): siRNA sense strand
aggcuguggaggaguggaa

SEQ ID NO: 2382278 - RNA, 19 nt, Homo sapiens
  misc_RNA (1)...(19): siRNA sense strand
aagaaaacgcuccagaaaa

SEQ ID NO: 2382279 - RNA, 19 nt, Homo sapiens
  misc_RNA (1)...(19): siRNA sense strand
acuuacaggaagauaaaga

SEQ ID NO: 2382280 - RNA, 19 nt, Homo sapiens
  misc_RNA (1)...(19): siRNA sense strand
ucucaacagaugaaccaaa

SEQ ID NO: 2382281 - RNA, 19 nt, Homo sapiens
  misc_RNA (1)...(19): siRNA sense strand
cagaaaagcacaaccucaa

SEQ ID NO: 2382282 - RNA, 19 nt, Homo sapiens
  misc_RNA (1)...(19): siRNA sense strand
agaagagaugggaaaccaa

SEQ ID NO: 2382283 - RNA, 19 nt, Homo sapiens
  misc_RNA (1)...(19): siRNA sense strand
cagagggaaaagaagaaaa

SEQ ID NO: 2382284 - RNA, 19 nt, Homo sapiens
  misc_RNA (1)...(19): siRNA sense strand
aaugaaacccaguggaaag

SEQ ID NO: 2382285 - RNA, 19 nt, Homo sapiens
  misc_RNA (1)...(19): siRNA sense strand
gaugaagcuacguuggaga

SEQ ID NO: 2382286 - RNA, 19 nt, Homo sapiens
  misc_RNA (1)...(19): siRNA sense strand
ucgagagcuugguguaaaa

SEQ ID NO: 2382287 - RNA, 19 nt, Homo sapiens
  misc_RNA (1)...(19): siRNA sense strand
agcaaagaagagaugggaa

SEQ ID NO: 2382288 - RNA, 19 nt, Homo sapiens
  misc_RNA (1)...(19): siRNA sense strand
auucacaggcugcccgaaa

SEQ ID NO: 2382289 - RNA, 19 nt, Homo sapiens
  misc_RNA (1)...(19): siRNA sense strand
cggaaauagcaacagauaa

SEQ ID NO: 2382290 - RNA, 19 nt, Homo sapiens
  misc_RNA (1)...(19): siRNA sense strand
aucaaauggacuagagaaa

SEQ ID NO: 2382291 - RNA, 19 nt, Homo sapiens
  misc_RNA (1)...(19): siRNA sense strand
ggaucuguguggaggacau

SEQ ID NO: 2382292 - RNA, 19 nt, Homo sapiens
  misc_RNA (1)...(19): siRNA sense strand
aagaagaucucuaugccaa

SEQ ID NO: 2382293 - RNA, 19 nt, Homo sapiens
  misc_RNA (1)...(19): siRNA sense strand
gagaggaaauucagccaga

SEQ ID NO: 2382294 - RNA, 19 nt, Homo sapiens
  misc_RNA (1)...(19): siRNA sense strand
ggugugacugagaggaaau

SEQ ID NO: 2382295 - RNA, 19 nt, Homo sapiens
  misc_RNA (1)...(19): siRNA sense strand
cuaaaaugauagcaggcaa

SEQ ID NO: 2382296 - RNA, 19 nt, Homo sapiens
  misc_RNA (1)...(19): siRNA sense strand
agaacuggagcuagaagaa

SEQ ID NO: 2382297 - RNA, 19 nt, Homo sapiens
  misc_RNA (1)...(19): siRNA sense strand
auaaagaagacgcuggaga

SEQ ID NO: 2382298 - RNA, 19 nt, Homo sapiens
  misc_RNA (1)...(19): siRNA sense strand
cugaaguguuggcgggagu

SEQ ID NO: 2382299 - RNA, 19 nt, Homo sapiens
  misc_RNA (1)...(19): siRNA sense strand
cucaaaaccuauaaagcaa

SEQ ID NO: 2382300 - RNA, 19 nt, Homo sapiens
  misc_RNA (1)...(19): siRNA sense strand
cuucuuauuccaaggguuu

SEQ ID NO: 2382301 - RNA, 19 nt, Homo sapiens
  misc_RNA (1)...(19): siRNA sense strand
uguccuugugauugggaaa

SEQ ID NO: 2382302 - RNA, 19 nt, Homo sapiens
  misc_RNA (1)...(19): siRNA sense strand
gcuuugguacuuugugaaa

SEQ ID NO: 2382303 - RNA, 19 nt, Homo sapiens
  misc_RNA (1)...(19): siRNA sense strand
acucgaaagaauaucgcua

SEQ ID NO: 2382304 - RNA, 19 nt, Homo sapiens
  misc_RNA (1)...(19): siRNA sense strand
cuggugugacugagaggaa

SEQ ID NO: 2382305 - RNA, 19 nt, Homo sapiens
  misc_RNA (1)...(19): siRNA sense strand
acaccagugaccauagaaa

SEQ ID NO: 2382306 - RNA, 19 nt, Homo sapiens
  misc_RNA (1)...(19): siRNA sense strand
agaagaucucuaugccaaa

SEQ ID NO: 2382307 - RNA, 19 nt, Homo sapiens
  misc_RNA (1)...(19): siRNA sense strand
gcaaaaucggaaauagcaa

SEQ ID NO: 2382308 - RNA, 19 nt, Homo sapiens
  misc_RNA (1)...(19): siRNA sense strand
ccuagugauucuaacucaa

SEQ ID NO: 2382309 - RNA, 19 nt, Homo sapiens
  misc_RNA (1)...(19): siRNA sense strand
aggcaacagcacagaaagu

SEQ ID NO: 2382310 - RNA, 19 nt, Homo sapiens
  misc_RNA (1)...(19): siRNA sense strand
gggaaauuuguccgugaau

SEQ ID NO: 2382311 - RNA, 19 nt, Homo sapiens
  misc_RNA (1)...(19): siRNA sense strand
cugacuggaaacagaauau

SEQ ID NO: 2382312 - RNA, 19 nt, Homo sapiens
  misc_RNA (1)...(19): siRNA sense strand
cuaugguauuaugggauua

SEQ ID NO: 2382313 - RNA, 19 nt, Homo sapiens
  misc_RNA (1)...(19): siRNA sense strand
aguucgagagacaggagaa

SEQ ID NO: 2382314 - RNA, 19 nt, Homo sapiens
  misc_RNA (1)...(19): siRNA sense strand
cuuuugggccuuugggaaa

SEQ ID NO: 2382315 - RNA, 19 nt, Homo sapiens
  misc_RNA (1)...(19): siRNA sense strand
uggaguauucagagaaacu

SEQ ID NO: 2382316 - RNA, 19 nt, Homo sapiens
  misc_RNA (1)...(19): siRNA sense strand
cccuggaacugguggucuu

SEQ ID NO: 2382317 - RNA, 19 nt, Homo sapiens
  misc_RNA (1)...(19): siRNA sense strand
aguauagcgccgugacuga

SEQ ID NO: 2382318 - RNA, 19 nt, Homo sapiens
  misc_RNA (1)...(19): siRNA sense strand
caggaagacuguacuggga

SEQ ID NO: 2382319 - RNA, 19 nt, Homo sapiens
  misc_RNA (1)...(19): siRNA sense strand
cgauuaaaguagugaaacu

SEQ ID NO: 2382320 - RNA, 19 nt, Homo sapiens
  misc_RNA (1)...(19): siRNA sense strand
gagccaaguaagugggcaa

SEQ ID NO: 2382321 - RNA, 19 nt, Homo sapiens
  misc_RNA (1)...(19): siRNA sense strand
gagaacaaaucguggcuca

SEQ ID NO: 2382322 - RNA, 19 nt, Homo sapiens
  misc_RNA (1)...(19): siRNA sense strand
ggucaauguguaaggguga

SEQ ID NO: 2382323 - RNA, 19 nt, Homo sapiens
  misc_RNA (1)...(19): siRNA sense strand
agcagaaaguccagaguau

SEQ ID NO: 2382324 - RNA, 19 nt, Homo sapiens
  misc_RNA (1)...(19): siRNA sense strand
auguagaaaugaugaguga

SEQ ID NO: 2382325 - RNA, 19 nt, Homo sapiens
  misc_RNA (1)...(19): siRNA sense strand
agguaaaccacaggagaaa

SEQ ID NO: 2382326 - RNA, 19 nt, Homo sapiens
  misc_RNA (1)...(19): siRNA sense strand
ggaauugggaaguguaaaa

SEQ ID NO: 2382327 - RNA, 19 nt, Homo sapiens
  misc_RNA (1)...(19): siRNA sense strand
ccucagggucagcgagcaa

SEQ ID NO: 2382328 - RNA, 19 nt, Homo sapiens
  misc_RNA (1)...(19): siRNA sense strand
gcaaagaaaugucaggaac

SEQ ID NO: 2382329 - RNA, 19 nt, Homo sapiens
  misc_RNA (1)...(19): siRNA sense strand
gggucagcgagcaaagaaa

SEQ ID NO: 2382330 - RNA, 19 nt, Homo sapiens
  misc_RNA (1)...(19): siRNA sense strand
ucuaaagagcaacagaaua

SEQ ID NO: 2382331 - RNA, 19 nt, Homo sapiens
  misc_RNA (1)...(19): siRNA sense strand
aagguaaaccacaggagaa

SEQ ID NO: 2382332 - RNA, 19 nt, Homo sapiens
  misc_RNA (1)...(19): siRNA sense strand
augaagagcuaaaagacaa

SEQ ID NO: 2382333 - RNA, 19 nt, Homo sapiens
  misc_RNA (1)...(19): siRNA sense strand
uagauagcauugugggaga

SEQ ID NO: 2382334 - RNA, 19 nt, Homo sapiens
  misc_RNA (1)...(19): siRNA sense strand
gagcuaaaagacaaggaaa

SEQ ID NO: 2382335 - RNA, 19 nt, Homo sapiens
  misc_RNA (1)...(19): siRNA sense strand
auaugaaaaucgagcacua

SEQ ID NO: 2382336 - RNA, 19 nt, Homo sapiens
  misc_RNA (1)...(19): siRNA sense strand
ccuccuugauauuaagcaa

SEQ ID NO: 2382337 - RNA, 19 nt, Homo sapiens
  misc_RNA (1)...(19): siRNA sense strand
ggacaauauauguuaccuu

SEQ ID NO: 2382338 - RNA, 19 nt, Homo sapiens
  misc_RNA (1)...(19): siRNA sense strand
aagcaaagacauaaaccau

SEQ ID NO: 2382339 - RNA, 19 nt, Homo sapiens
  misc_RNA (1)...(19): siRNA sense strand
ggaaacucauugaaaacaa

SEQ ID NO: 2382340 - RNA, 19 nt, Homo sapiens
  misc_RNA (1)...(19): siRNA sense strand
cauugugggagacggaaua

SEQ ID NO: 2382341 - RNA, 19 nt, Homo sapiens
  misc_RNA (1)...(19): siRNA sense strand
ucguaguaucauugaguuu

SEQ ID NO: 2382342 - RNA, 19 nt, Homo sapiens
  misc_RNA (1)...(19): siRNA sense strand
cagaaaagagauagaaacu

SEQ ID NO: 2382343 - RNA, 19 nt, Homo sapiens
  misc_RNA (1)...(19): siRNA sense strand
gcauugugggagacggaau

SEQ ID NO: 2382344 - RNA, 19 nt, Homo sapiens
  misc_RNA (1)...(19): siRNA sense strand
aguaagugggcaaccauaa

SEQ ID NO: 2382345 - RNA, 19 nt, Homo sapiens
  misc_RNA (1)...(19): siRNA sense strand
gauacauauuauuggccau

SEQ ID NO: 2382346 - RNA, 19 nt, Homo sapiens
  misc_RNA (1)...(19): siRNA sense strand
ggguacuuauucugggaca

SEQ ID NO: 2382347 - RNA, 19 nt, Homo sapiens
  misc_RNA (1)...(19): siRNA sense strand
uggaauuacuccugugcca

SEQ ID NO: 2382348 - RNA, 19 nt, Homo sapiens
  misc_RNA (1)...(19): siRNA sense strand
caacuaauacccaggcuca

SEQ ID NO: 2382349 - RNA, 19 nt, Homo sapiens
  misc_RNA (1)...(19): siRNA sense strand
agugagaauaguagcuuau

SEQ ID NO: 2382350 - RNA, 19 nt, Homo sapiens
  misc_RNA (1)...(19): siRNA sense strand
acuuucagguugagguuga

SEQ ID NO: 2382351 - RNA, 19 nt, Homo sapiens
  misc_RNA (1)...(19): siRNA sense strand
ucagguugagguugagaaa

SEQ ID NO: 2382352 - RNA, 19 nt, Homo sapiens
  misc_RNA (1)...(19): siRNA sense strand
uagugagaauaguagcuua

SEQ ID NO: 2382353 - RNA, 19 nt, Homo sapiens
  misc_RNA (1)...(19): siRNA sense strand
uggcacagaaggaaucaaa

SEQ ID NO: 2382354 - RNA, 19 nt, Homo sapiens
  misc_RNA (1)...(19): siRNA sense strand
gggagacggaauagagcca

SEQ ID NO: 2382355 - RNA, 19 nt, Homo sapiens
  misc_RNA (1)...(19): siRNA sense strand
gagaaugaugauuggaaac

SEQ ID NO: 2382356 - RNA, 19 nt, Homo sapiens
  misc_RNA (1)...(19): siRNA sense strand
gcauguaauagauagcauu

SEQ ID NO: 2382357 - RNA, 19 nt, Homo sapiens
  misc_RNA (1)...(19): siRNA sense strand
acggaauagagccaaguaa

SEQ ID NO: 2382358 - RNA, 19 nt, Homo sapiens
  misc_RNA (1)...(19): siRNA sense strand
agaaggaaucaaagaguac

SEQ ID NO: 2382359 - RNA, 19 nt, Homo sapiens
  misc_RNA (1)...(19): siRNA sense strand
gauaugaaacuuaagcuca

SEQ ID NO: 2382360 - RNA, 19 nt, Homo sapiens
  misc_RNA (1)...(19): siRNA sense strand
agagauagaaacucaccaa

SEQ ID NO: 2382361 - RNA, 19 nt, Homo sapiens
  misc_RNA (1)...(19): siRNA sense strand
aggacaaagcaucgacuga

SEQ ID NO: 2382362 - RNA, 19 nt, Homo sapiens
  misc_RNA (1)...(19): siRNA sense strand
aggaagauaaccacauauu

SEQ ID NO: 2382363 - RNA, 19 nt, Homo sapiens
  misc_RNA (1)...(19): siRNA sense strand
auuagaaggcagauacuuu

SEQ ID NO: 2382364 - RNA, 19 nt, Homo sapiens
  misc_RNA (1)...(19): siRNA sense strand
agcaaagaaaugucaggaa

SEQ ID NO: 2382365 - RNA, 19 nt, Homo sapiens
  misc_RNA (1)...(19): siRNA sense strand
uggagaaugaugauuggaa

SEQ ID NO: 2382366 - RNA, 19 nt, Homo sapiens
  misc_RNA (1)...(19): siRNA sense strand
uguaagaagcagaggucac

SEQ ID NO: 2382367 - RNA, 19 nt, Homo sapiens
  misc_RNA (1)...(19): siRNA sense strand
gcuaaaagacaaggaaaca

SEQ ID NO: 2382368 - RNA, 19 nt, Homo sapiens
  misc_RNA (1)...(19): siRNA sense strand
aagacaaggaaacaaacua

SEQ ID NO: 2382369 - RNA, 19 nt, Homo sapiens
  misc_RNA (1)...(19): siRNA sense strand
augaauuagaaggcagaua

SEQ ID NO: 2382370 - RNA, 19 nt, Homo sapiens
  misc_RNA (1)...(19): siRNA sense strand
cccaagagccacaacuaau

SEQ ID NO: 2382371 - RNA, 19 nt, Homo sapiens
  misc_RNA (1)...(19): siRNA sense strand
acaacaaguaccuauggaa

SEQ ID NO: 2382372 - RNA, 19 nt, Homo sapiens
  misc_RNA (1)...(19): siRNA sense strand
aggagaaaccaucaaggau

SEQ ID NO: 2382373 - RNA, 19 nt, Homo sapiens
  misc_RNA (1)...(19): siRNA sense strand
ugaugaauuagaaggcaga

SEQ ID NO: 2382374 - RNA, 19 nt, Homo sapiens
  misc_RNA (1)...(19): siRNA sense strand
cgauuaaaguagugaaacu

SEQ ID NO: 2382375 - RNA, 19 nt, Homo sapiens
  misc_RNA (1)...(19): siRNA sense strand
gagccaaguaagugggcaa

SEQ ID NO: 2382376 - RNA, 19 nt, Homo sapiens
  misc_RNA (1)...(19): siRNA sense strand
gagaacaaaucguggcuca

SEQ ID NO: 2382377 - RNA, 19 nt, Homo sapiens
  misc_RNA (1)...(19): siRNA sense strand
ggucaauguguaaggguga

SEQ ID NO: 2382378 - RNA, 19 nt, Homo sapiens
  misc_RNA (1)...(19): siRNA sense strand
agcagaaaguccagaguau

SEQ ID NO: 2382379 - RNA, 19 nt, Homo sapiens
  misc_RNA (1)...(19): siRNA sense strand
auguagaaaugaugaguga

SEQ ID NO: 2382380 - RNA, 19 nt, Homo sapiens
  misc_RNA (1)...(19): siRNA sense strand
agguaaaccacaggagaaa

SEQ ID NO: 2382381 - RNA, 19 nt, Homo sapiens
  misc_RNA (1)...(19): siRNA sense strand
ggaauugggaaguguaaaa

SEQ ID NO: 2382382 - RNA, 19 nt, Homo sapiens
  misc_RNA (1)...(19): siRNA sense strand
ccucagggucagcgagcaa

SEQ ID NO: 2382383 - RNA, 19 nt, Homo sapiens
  misc_RNA (1)...(19): siRNA sense strand
gcaaagaaaugucaggaac

SEQ ID NO: 2382384 - RNA, 19 nt, Homo sapiens
  misc_RNA (1)...(19): siRNA sense strand
gggucagcgagcaaagaaa

SEQ ID NO: 2382385 - RNA, 19 nt, Homo sapiens
  misc_RNA (1)...(19): siRNA sense strand
ucuaaagagcaacagaaua

SEQ ID NO: 2382386 - RNA, 19 nt, Homo sapiens
  misc_RNA (1)...(19): siRNA sense strand
aagguaaaccacaggagaa

SEQ ID NO: 2382387 - RNA, 19 nt, Homo sapiens
  misc_RNA (1)...(19): siRNA sense strand
augaagagcuaaaagacaa

SEQ ID NO: 2382388 - RNA, 19 nt, Homo sapiens
  misc_RNA (1)...(19): siRNA sense strand
uagauagcauugugggaga

SEQ ID NO: 2382389 - RNA, 19 nt, Homo sapiens
  misc_RNA (1)...(19): siRNA sense strand
gagcuaaaagacaaggaaa

SEQ ID NO: 2382390 - RNA, 19 nt, Homo sapiens
  misc_RNA (1)...(19): siRNA sense strand
auaugaaaaucgagcacua

SEQ ID NO: 2382391 - RNA, 19 nt, Homo sapiens
  misc_RNA (1)...(19): siRNA sense strand
ccuccuugauauuaagcaa

SEQ ID NO: 2382392 - RNA, 19 nt, Homo sapiens
  misc_RNA (1)...(19): siRNA sense strand
ggacaauauauguuaccuu

SEQ ID NO: 2382393 - RNA, 19 nt, Homo sapiens
  misc_RNA (1)...(19): siRNA sense strand
aagcaaagacauaaaccau

SEQ ID NO: 2382394 - RNA, 19 nt, Homo sapiens
  misc_RNA (1)...(19): siRNA sense strand
ggaaacucauugaaaacaa

SEQ ID NO: 2382395 - RNA, 19 nt, Homo sapiens
  misc_RNA (1)...(19): siRNA sense strand
cauugugggagacggaaua

SEQ ID NO: 2382396 - RNA, 19 nt, Homo sapiens
  misc_RNA (1)...(19): siRNA sense strand
ucguaguaucauugaguuu

SEQ ID NO: 2382397 - RNA, 19 nt, Homo sapiens
  misc_RNA (1)...(19): siRNA sense strand
cagaaaagagauagaaacu

SEQ ID NO: 2382398 - RNA, 19 nt, Homo sapiens
  misc_RNA (1)...(19): siRNA sense strand
gcauugugggagacggaau

SEQ ID NO: 2382399 - RNA, 19 nt, Homo sapiens
  misc_RNA (1)...(19): siRNA sense strand
aguaagugggcaaccauaa

SEQ ID NO: 2382400 - RNA, 19 nt, Homo sapiens
  misc_RNA (1)...(19): siRNA sense strand
gauacauauuauuggccau

SEQ ID NO: 2382401 - RNA, 19 nt, Homo sapiens
  misc_RNA (1)...(19): siRNA sense strand
ggguacuuauucugggaca

SEQ ID NO: 2382402 - RNA, 19 nt, Homo sapiens
  misc_RNA (1)...(19): siRNA sense strand
uggaauuacuccugugcca

SEQ ID NO: 2382403 - RNA, 19 nt, Homo sapiens
  misc_RNA (1)...(19): siRNA sense strand
caacuaauacccaggcuca

SEQ ID NO: 2382404 - RNA, 19 nt, Homo sapiens
  misc_RNA (1)...(19): siRNA sense strand
agugagaauaguagcuuau

SEQ ID NO: 2382405 - RNA, 19 nt, Homo sapiens
  misc_RNA (1)...(19): siRNA sense strand
acuuucagguugagguuga

SEQ ID NO: 2382406 - RNA, 19 nt, Homo sapiens
  misc_RNA (1)...(19): siRNA sense strand
ucagguugagguugagaaa

SEQ ID NO: 2382407 - RNA, 19 nt, Homo sapiens
  misc_RNA (1)...(19): siRNA sense strand
uagugagaauaguagcuua

SEQ ID NO: 2382408 - RNA, 19 nt, Homo sapiens
  misc_RNA (1)...(19): siRNA sense strand
uggcacagaaggaaucaaa

SEQ ID NO: 2382409 - RNA, 19 nt, Homo sapiens
  misc_RNA (1)...(19): siRNA sense strand
gggagacggaauagagcca

SEQ ID NO: 2382410 - RNA, 19 nt, Homo sapiens
  misc_RNA (1)...(19): siRNA sense strand
gagaaugaugauuggaaac

SEQ ID NO: 2382411 - RNA, 19 nt, Homo sapiens
  misc_RNA (1)...(19): siRNA sense strand
gcauguaauagauagcauu

SEQ ID NO: 2382412 - RNA, 19 nt, Homo sapiens
  misc_RNA (1)...(19): siRNA sense strand
acggaauagagccaaguaa

SEQ ID NO: 2382413 - RNA, 19 nt, Homo sapiens
  misc_RNA (1)...(19): siRNA sense strand
agaaggaaucaaagaguac

SEQ ID NO: 2382414 - RNA, 19 nt, Homo sapiens
  misc_RNA (1)...(19): siRNA sense strand
gauaugaaacuuaagcuca

SEQ ID NO: 2382415 - RNA, 19 nt, Homo sapiens
  misc_RNA (1)...(19): siRNA sense strand
agagauagaaacucaccaa

SEQ ID NO: 2382416 - RNA, 19 nt, Homo sapiens
  misc_RNA (1)...(19): siRNA sense strand
aggacaaagcaucgacuga

SEQ ID NO: 2382417 - RNA, 19 nt, Homo sapiens
  misc_RNA (1)...(19): siRNA sense strand
aggaagauaaccacauauu

SEQ ID NO: 2382418 - RNA, 19 nt, Homo sapiens
  misc_RNA (1)...(19): siRNA sense strand
auuagaaggcagauacuuu

SEQ ID NO: 2382419 - RNA, 19 nt, Homo sapiens
  misc_RNA (1)...(19): siRNA sense strand
agcaaagaaaugucaggaa

SEQ ID NO: 2382420 - RNA, 19 nt, Homo sapiens
  misc_RNA (1)...(19): siRNA sense strand
uggagaaugaugauuggaa

SEQ ID NO: 2382421 - RNA, 19 nt, Homo sapiens
  misc_RNA (1)...(19): siRNA sense strand
uguaagaagcagaggucac

SEQ ID NO: 2382422 - RNA, 19 nt, Homo sapiens
  misc_RNA (1)...(19): siRNA sense strand
gcuaaaagacaaggaaaca

SEQ ID NO: 2382423 - RNA, 19 nt, Homo sapiens
  misc_RNA (1)...(19): siRNA sense strand
aagacaaggaaacaaacua

SEQ ID NO: 2382424 - RNA, 19 nt, Homo sapiens
  misc_RNA (1)...(19): siRNA sense strand
augaauuagaaggcagaua

SEQ ID NO: 2382425 - RNA, 19 nt, Homo sapiens
  misc_RNA (1)...(19): siRNA sense strand
cccaagagccacaacuaau

SEQ ID NO: 2382426 - RNA, 19 nt, Homo sapiens
  misc_RNA (1)...(19): siRNA sense strand
acaacaaguaccuauggaa

SEQ ID NO: 2382427 - RNA, 19 nt, Homo sapiens
  misc_RNA (1)...(19): siRNA sense strand
aggagaaaccaucaaggau

SEQ ID NO: 2382428 - RNA, 19 nt, Homo sapiens
  misc_RNA (1)...(19): siRNA sense strand
ugaugaauuagaaggcaga

SEQ ID NO: 2382429 - RNA, 19 nt, Homo sapiens
  misc_RNA (1)...(19): siRNA sense strand
gcugaugcccagagggaau

SEQ ID NO: 2382430 - RNA, 19 nt, Homo sapiens
  misc_RNA (1)...(19): siRNA sense strand
gcuacagccauuugggcaa

SEQ ID NO: 2382431 - RNA, 19 nt, Homo sapiens
  misc_RNA (1)...(19): siRNA sense strand
ggaaggugauggagcggca

SEQ ID NO: 2382432 - RNA, 19 nt, Homo sapiens
  misc_RNA (1)...(19): siRNA sense strand
ugacagagaugguggagac

SEQ ID NO: 2382433 - RNA, 19 nt, Homo sapiens
  misc_RNA (1)...(19): siRNA sense strand
acucagagacuguggagca

SEQ ID NO: 2382434 - RNA, 19 nt, Homo sapiens
  misc_RNA (1)...(19): siRNA sense strand
ggcaggaggaagaaggaga

SEQ ID NO: 2382435 - RNA, 19 nt, Homo sapiens
  misc_RNA (1)...(19): siRNA sense strand
ccuggauagugauggccaa

SEQ ID NO: 2382436 - RNA, 19 nt, Homo sapiens
  misc_RNA (1)...(19): siRNA sense strand
agacuguggagcaggaaga

SEQ ID NO: 2382437 - RNA, 19 nt, Homo sapiens
  misc_RNA (1)...(19): siRNA sense strand
aguucuggcaggaggaaga

SEQ ID NO: 2382438 - RNA, 19 nt, Homo sapiens
  misc_RNA (1)...(19): siRNA sense strand
gaguuggaaggcagagaau

SEQ ID NO: 2382439 - RNA, 19 nt, Homo sapiens
  misc_RNA (1)...(19): siRNA sense strand
cugaggaagaaguggggaa

SEQ ID NO: 2382440 - RNA, 19 nt, Homo sapiens
  misc_RNA (1)...(19): siRNA sense strand
ucuuugaggaggagauuga

SEQ ID NO: 2382441 - RNA, 19 nt, Homo sapiens
  misc_RNA (1)...(19): siRNA sense strand
gagacaaggaugcccgaga

SEQ ID NO: 2382442 - RNA, 19 nt, Homo sapiens
  misc_RNA (1)...(19): siRNA sense strand
cuguggagagccugaggaa

SEQ ID NO: 2382443 - RNA, 19 nt, Homo sapiens
  misc_RNA (1)...(19): siRNA sense strand
guguguacuaugacagaga

SEQ ID NO: 2382444 - RNA, 19 nt, Homo sapiens
  misc_RNA (1)...(19): siRNA sense strand
ggcauugggcggaagguga

SEQ ID NO: 2382445 - RNA, 19 nt, Homo sapiens
  misc_RNA (1)...(19): siRNA sense strand
cagcaugaaguuucggaca

SEQ ID NO: 2382446 - RNA, 19 nt, Homo sapiens
  misc_RNA (1)...(19): siRNA sense strand
uggggaaggaagaggaaga

SEQ ID NO: 2382447 - RNA, 19 nt, Homo sapiens
  misc_RNA (1)...(19): siRNA sense strand
acagagacuccgagaugga

SEQ ID NO: 2382448 - RNA, 19 nt, Homo sapiens
  misc_RNA (1)...(19): siRNA sense strand
ggagagaagcuacagccau

SEQ ID NO: 2382449 - RNA, 19 nt, Homo sapiens
  misc_RNA (1)...(19): siRNA sense strand
augaagaagaagaggaaaa

SEQ ID NO: 2382450 - RNA, 19 nt, Homo sapiens
  misc_RNA (1)...(19): siRNA sense strand
gaagauauuucaagaggca

SEQ ID NO: 2382451 - RNA, 19 nt, Homo sapiens
  misc_RNA (1)...(19): siRNA sense strand
acguguacucuuugagaaa

SEQ ID NO: 2382452 - RNA, 19 nt, Homo sapiens
  misc_RNA (1)...(19): siRNA sense strand
agaagagaugggagggcaa

SEQ ID NO: 2382453 - RNA, 19 nt, Homo sapiens
  misc_RNA (1)...(19): siRNA sense strand
agucagaggaagagaagca

SEQ ID NO: 2382454 - RNA, 19 nt, Homo sapiens
  misc_RNA (1)...(19): siRNA sense strand
aagaagaaugacagaaaga

SEQ ID NO: 2382455 - RNA, 19 nt, Homo sapiens
  misc_RNA (1)...(19): siRNA sense strand
cuuugaaggcgcucagaaa

SEQ ID NO: 2382456 - RNA, 19 nt, Homo sapiens
  misc_RNA (1)...(19): siRNA sense strand
uugagaaagaggugaauga

SEQ ID NO: 2382457 - RNA, 19 nt, Homo sapiens
  misc_RNA (1)...(19): siRNA sense strand
gugugaaugcagaggagau

SEQ ID NO: 2382458 - RNA, 19 nt, Homo sapiens
  misc_RNA (1)...(19): siRNA sense strand
ucugaaagugauaaaggaa

SEQ ID NO: 2382459 - RNA, 19 nt, Homo sapiens
  misc_RNA (1)...(19): siRNA sense strand
agaaagaggacguggcuug

SEQ ID NO: 2382460 - RNA, 19 nt, Homo sapiens
  misc_RNA (1)...(19): siRNA sense strand
agaaauacgagcaguucau

SEQ ID NO: 2382461 - RNA, 19 nt, Homo sapiens
  misc_RNA (1)...(19): siRNA sense strand
ugauaaaggaagcugcuau

SEQ ID NO: 2382462 - RNA, 19 nt, Homo sapiens
  misc_RNA (1)...(19): siRNA sense strand
agaucaagguagcccguau

SEQ ID NO: 2382463 - RNA, 19 nt, Homo sapiens
  misc_RNA (1)...(19): siRNA sense strand
aggaagagaagcagccuga

SEQ ID NO: 2382464 - RNA, 19 nt, Homo sapiens
  misc_RNA (1)...(19): siRNA sense strand
agaugaaggggaagaagaa

SEQ ID NO: 2382465 - RNA, 19 nt, Homo sapiens
  misc_RNA (1)...(19): siRNA sense strand
gcucguuggccaaaggaga

SEQ ID NO: 2382466 - RNA, 19 nt, Homo sapiens
  misc_RNA (1)...(19): siRNA sense strand
aggaagagccagaacccau

SEQ ID NO: 2382467 - RNA, 19 nt, Homo sapiens
  misc_RNA (1)...(19): siRNA sense strand
gggagaagguggucaggag

SEQ ID NO: 2382468 - RNA, 19 nt, Homo sapiens
  misc_RNA (1)...(19): siRNA sense strand
gggaagaagaaugacagaa

SEQ ID NO: 2382469 - RNA, 19 nt, Homo sapiens
  misc_RNA (1)...(19): siRNA sense strand
ggaaaugaucacuggggau

SEQ ID NO: 2382470 - RNA, 19 nt, Homo sapiens
  misc_RNA (1)...(19): siRNA sense strand
gauuauuucaagaguggau

SEQ ID NO: 2382471 - RNA, 19 nt, Homo sapiens
  misc_RNA (1)...(19): siRNA sense strand
gaaagugaagucagcgaga

SEQ ID NO: 2382472 - RNA, 19 nt, Homo sapiens
  misc_RNA (1)...(19): siRNA sense strand
uugugaacucaaagaacua

SEQ ID NO: 2382473 - RNA, 19 nt, Homo sapiens
  misc_RNA (1)...(19): siRNA sense strand
ugaaugcagaggagaucaa

SEQ ID NO: 2382474 - RNA, 19 nt, Homo sapiens
  misc_RNA (1)...(19): siRNA sense strand
acuacaugcaggagcuaau

SEQ ID NO: 2382475 - RNA, 19 nt, Homo sapiens
  misc_RNA (1)...(19): siRNA sense strand
cugaggaacaagaagagau

SEQ ID NO: 2382476 - RNA, 19 nt, Homo sapiens
  misc_RNA (1)...(19): siRNA sense strand
ggagaagguggucaggaga

SEQ ID NO: 2382477 - RNA, 19 nt, Homo sapiens
  misc_RNA (1)...(19): siRNA sense strand
gauuaugacagcagcacca

SEQ ID NO: 2382478 - RNA, 19 nt, Homo sapiens
  misc_RNA (1)...(19): siRNA sense strand
caugcaaaccagagcuuca

SEQ ID NO: 2382479 - RNA, 19 nt, Homo sapiens
  misc_RNA (1)...(19): siRNA sense strand
ugauggaagaagauacgaa

SEQ ID NO: 2382480 - RNA, 19 nt, Homo sapiens
  misc_RNA (1)...(19): siRNA sense strand
gcuugaugaaacucugaaa

SEQ ID NO: 2382481 - RNA, 19 nt, Homo sapiens
  misc_RNA (1)...(19): siRNA sense strand
gugaagucagcgagaggga

SEQ ID NO: 2382482 - RNA, 19 nt, Homo sapiens
  misc_RNA (1)...(19): siRNA sense strand
ugaaacucugaaagugaua

SEQ ID NO: 2382483 - RNA, 19 nt, Homo sapiens
  misc_RNA (1)...(19): siRNA sense strand
uccaggagucagaggaaga

SEQ ID NO: 2382484 - RNA, 19 nt, Homo sapiens
  misc_RNA (1)...(19): siRNA sense strand
gaugaaauccagauccuga

SEQ ID NO: 2382485 - RNA, 19 nt, Homo sapiens
  misc_RNA (1)...(19): siRNA sense strand
ugccuaagaugaaggggaa

SEQ ID NO: 2382486 - RNA, 19 nt, Homo sapiens
  misc_RNA (1)...(19): siRNA sense strand
gugaaugaagucagccaga

SEQ ID NO: 2382487 - RNA, 19 nt, Homo sapiens
  misc_RNA (1)...(19): siRNA sense strand
gcaccauccgaaagaagau

SEQ ID NO: 2382488 - RNA, 19 nt, Homo sapiens
  misc_RNA (1)...(19): siRNA sense strand
gggacugagcaggugauua

SEQ ID NO: 2382489 - RNA, 19 nt, Homo sapiens
  misc_RNA (1)...(19): siRNA sense strand
cacacaaagaugacgugaa

SEQ ID NO: 2382490 - RNA, 19 nt, Homo sapiens
  misc_RNA (1)...(19): siRNA sense strand
auaaagaaguggaaggaga

SEQ ID NO: 2382491 - RNA, 19 nt, Homo sapiens
  misc_RNA (1)...(19): siRNA sense strand
gcaaagagauuuaacguca

SEQ ID NO: 2382492 - RNA, 19 nt, Homo sapiens
  misc_RNA (1)...(19): siRNA sense strand
augaagaagaagaggaaaa

SEQ ID NO: 2382493 - RNA, 19 nt, Homo sapiens
  misc_RNA (1)...(19): siRNA sense strand
gaagauauuucaagaggca

SEQ ID NO: 2382494 - RNA, 19 nt, Homo sapiens
  misc_RNA (1)...(19): siRNA sense strand
acguguacucuuugagaaa

SEQ ID NO: 2382495 - RNA, 19 nt, Homo sapiens
  misc_RNA (1)...(19): siRNA sense strand
agaagagaugggagggcaa

SEQ ID NO: 2382496 - RNA, 19 nt, Homo sapiens
  misc_RNA (1)...(19): siRNA sense strand
uggagagcuaugagaauaa

SEQ ID NO: 2382497 - RNA, 19 nt, Homo sapiens
  misc_RNA (1)...(19): siRNA sense strand
agucagaggaagagaagca

SEQ ID NO: 2382498 - RNA, 19 nt, Homo sapiens
  misc_RNA (1)...(19): siRNA sense strand
aagaagaaugacagaaaga

SEQ ID NO: 2382499 - RNA, 19 nt, Homo sapiens
  misc_RNA (1)...(19): siRNA sense strand
cuuugaaggcgcucagaaa

SEQ ID NO: 2382500 - RNA, 19 nt, Homo sapiens
  misc_RNA (1)...(19): siRNA sense strand
agaacagcaaagagauuua

SEQ ID NO: 2382501 - RNA, 19 nt, Homo sapiens
  misc_RNA (1)...(19): siRNA sense strand
uugagaaagaggugaauga

SEQ ID NO: 2382502 - RNA, 19 nt, Homo sapiens
  misc_RNA (1)...(19): siRNA sense strand
aaguagaacagcaaagaga

SEQ ID NO: 2382503 - RNA, 19 nt, Homo sapiens
  misc_RNA (1)...(19): siRNA sense strand
gcacugaaguagaacagca

SEQ ID NO: 2382504 - RNA, 19 nt, Homo sapiens
  misc_RNA (1)...(19): siRNA sense strand
acaugaagcagaugacauu

SEQ ID NO: 2382505 - RNA, 19 nt, Homo sapiens
  misc_RNA (1)...(19): siRNA sense strand
gugugaaugcagaggagau

SEQ ID NO: 2382506 - RNA, 19 nt, Homo sapiens
  misc_RNA (1)...(19): siRNA sense strand
cgcuuacauccgagggaaa

SEQ ID NO: 2382507 - RNA, 19 nt, Homo sapiens
  misc_RNA (1)...(19): siRNA sense strand
ucugaaagugauaaaggaa

SEQ ID NO: 2382508 - RNA, 19 nt, Homo sapiens
  misc_RNA (1)...(19): siRNA sense strand
agaaagaggacguggcuug

SEQ ID NO: 2382509 - RNA, 19 nt, Homo sapiens
  misc_RNA (1)...(19): siRNA sense strand
agaaauacgagcaguucau

SEQ ID NO: 2382510 - RNA, 19 nt, Homo sapiens
  misc_RNA (1)...(19): siRNA sense strand
ugauaaaggaagcugcuau

SEQ ID NO: 2382511 - RNA, 19 nt, Homo sapiens
  misc_RNA (1)...(19): siRNA sense strand
agaucaagguagcccguau

SEQ ID NO: 2382512 - RNA, 19 nt, Homo sapiens
  misc_RNA (1)...(19): siRNA sense strand
aggaagagaagcagccuga

SEQ ID NO: 2382513 - RNA, 19 nt, Homo sapiens
  misc_RNA (1)...(19): siRNA sense strand
agaugaaggggaagaagaa

SEQ ID NO: 2382514 - RNA, 19 nt, Homo sapiens
  misc_RNA (1)...(19): siRNA sense strand
gcucguuggccaaaggaga

SEQ ID NO: 2382515 - RNA, 19 nt, Homo sapiens
  misc_RNA (1)...(19): siRNA sense strand
aggaagagccagaacccau

SEQ ID NO: 2382516 - RNA, 19 nt, Homo sapiens
  misc_RNA (1)...(19): siRNA sense strand
gggagaagguggucaggag

SEQ ID NO: 2382517 - RNA, 19 nt, Homo sapiens
  misc_RNA (1)...(19): siRNA sense strand
ggaaaugaucacuggggau

SEQ ID NO: 2382518 - RNA, 19 nt, Homo sapiens
  misc_RNA (1)...(19): siRNA sense strand
gggaagaagaaugacagaa

SEQ ID NO: 2382519 - RNA, 19 nt, Homo sapiens
  misc_RNA (1)...(19): siRNA sense strand
augagaauaaagaggccua

SEQ ID NO: 2382520 - RNA, 19 nt, Homo sapiens
  misc_RNA (1)...(19): siRNA sense strand
gauuauuucaagaguggau

SEQ ID NO: 2382521 - RNA, 19 nt, Homo sapiens
  misc_RNA (1)...(19): siRNA sense strand
gaaagugaagucagcgaga

SEQ ID NO: 2382522 - RNA, 19 nt, Homo sapiens
  misc_RNA (1)...(19): siRNA sense strand
gcugaccagaagagguuua

SEQ ID NO: 2382523 - RNA, 19 nt, Homo sapiens
  misc_RNA (1)...(19): siRNA sense strand
uugugaacucaaagaacua

SEQ ID NO: 2382524 - RNA, 19 nt, Homo sapiens
  misc_RNA (1)...(19): siRNA sense strand
ugaaugcagaggagaucaa

SEQ ID NO: 2382525 - RNA, 19 nt, Homo sapiens
  misc_RNA (1)...(19): siRNA sense strand
uguggagagcuaugagaau

SEQ ID NO: 2382526 - RNA, 19 nt, Homo sapiens
  misc_RNA (1)...(19): siRNA sense strand
acuacaugcaggagcuaau

SEQ ID NO: 2382527 - RNA, 19 nt, Homo sapiens
  misc_RNA (1)...(19): siRNA sense strand
cugaggaacaagaagagau

SEQ ID NO: 2382528 - RNA, 19 nt, Homo sapiens
  misc_RNA (1)...(19): siRNA sense strand
ggagaagguggucaggaga

SEQ ID NO: 2382529 - RNA, 19 nt, Homo sapiens
  misc_RNA (1)...(19): siRNA sense strand
gauuaugacagcagcacca

SEQ ID NO: 2382530 - RNA, 19 nt, Homo sapiens
  misc_RNA (1)...(19): siRNA sense strand
caugcaaaccagagcuuca

SEQ ID NO: 2382531 - RNA, 19 nt, Homo sapiens
  misc_RNA (1)...(19): siRNA sense strand
ugauggaagaagauacgaa

SEQ ID NO: 2382532 - RNA, 19 nt, Homo sapiens
  misc_RNA (1)...(19): siRNA sense strand
auuaugcuguggagagcua

SEQ ID NO: 2382533 - RNA, 19 nt, Homo sapiens
  misc_RNA (1)...(19): siRNA sense strand
gcuugaugaaacucugaaa

SEQ ID NO: 2382534 - RNA, 19 nt, Homo sapiens
  misc_RNA (1)...(19): siRNA sense strand
gugaagucagcgagaggga

SEQ ID NO: 2382535 - RNA, 19 nt, Homo sapiens
  misc_RNA (1)...(19): siRNA sense strand
gaugaaauccagauccuga

SEQ ID NO: 2382536 - RNA, 19 nt, Homo sapiens
  misc_RNA (1)...(19): siRNA sense strand
ugaaacucugaaagugaua

SEQ ID NO: 2382537 - RNA, 19 nt, Homo sapiens
  misc_RNA (1)...(19): siRNA sense strand
uccaggagucagaggaaga

SEQ ID NO: 2382538 - RNA, 19 nt, Homo sapiens
  misc_RNA (1)...(19): siRNA sense strand
ccuuugugguccugcccaa

SEQ ID NO: 2382539 - RNA, 19 nt, Homo sapiens
  misc_RNA (1)...(19): siRNA sense strand
ugccuaagaugaaggggaa

SEQ ID NO: 2382540 - RNA, 19 nt, Homo sapiens
  misc_RNA (1)...(19): siRNA sense strand
gugaaugaagucagccaga

SEQ ID NO: 2382541 - RNA, 19 nt, Homo sapiens
  misc_RNA (1)...(19): siRNA sense strand
aagacauaaagaaguggaa

SEQ ID NO: 2382542 - RNA, 19 nt, Homo sapiens
  misc_RNA (1)...(19): siRNA sense strand
uaaccucagaagaugaaua

SEQ ID NO: 2382543 - RNA, 19 nt, Homo sapiens
  misc_RNA (1)...(19): siRNA sense strand
ccuacacggagcagagcua

SEQ ID NO: 2382544 - RNA, 19 nt, Homo sapiens
  misc_RNA (1)...(19): siRNA sense strand
aguaccagagcaagggcaa

SEQ ID NO: 2382545 - RNA, 19 nt, Homo sapiens
  misc_RNA (1)...(19): siRNA sense strand
auggaaauuaccagcagua

SEQ ID NO: 2382546 - RNA, 19 nt, Homo sapiens
  misc_RNA (1)...(19): siRNA sense strand
ccuacacggagcagagcua

SEQ ID NO: 2382547 - RNA, 19 nt, Homo sapiens
  misc_RNA (1)...(19): siRNA sense strand
aguaccagagcaagggcaa

SEQ ID NO: 2382548 - RNA, 19 nt, Homo sapiens
  misc_RNA (1)...(19): siRNA sense strand
auggaaauuaccagcagua

SEQ ID NO: 2382549 - RNA, 19 nt, Homo sapiens
  misc_RNA (1)...(19): siRNA sense strand
ugacaauacagaagggaaa

SEQ ID NO: 2382550 - RNA, 19 nt, Homo sapiens
  misc_RNA (1)...(19): siRNA sense strand
uugcaaaggcccaggguaa

SEQ ID NO: 2382551 - RNA, 19 nt, Homo sapiens
  misc_RNA (1)...(19): siRNA sense strand
ugguggaaaugcugagaaa

SEQ ID NO: 2382552 - RNA, 19 nt, Homo sapiens
  misc_RNA (1)...(19): siRNA sense strand
agccaaagcacaagaggaa

SEQ ID NO: 2382553 - RNA, 19 nt, Homo sapiens
  misc_RNA (1)...(19): siRNA sense strand
gcugaguagcgcagacaaa

SEQ ID NO: 2382554 - RNA, 19 nt, Homo sapiens
  misc_RNA (1)...(19): siRNA sense strand
cggaaagaggaaacacaaa

SEQ ID NO: 2382555 - RNA, 19 nt, Homo sapiens
  misc_RNA (1)...(19): siRNA sense strand
agaaauggguggcaggaga

SEQ ID NO: 2382556 - RNA, 19 nt, Homo sapiens
  misc_RNA (1)...(19): siRNA sense strand
ggaucaagauggaggaggu

SEQ ID NO: 2382557 - RNA, 19 nt, Homo sapiens
  misc_RNA (1)...(19): siRNA sense strand
ccauaagaggaaacacaaa

SEQ ID NO: 2382558 - RNA, 19 nt, Homo sapiens
  misc_RNA (1)...(19): siRNA sense strand
uuuggaacguacagggaaa

SEQ ID NO: 2382559 - RNA, 19 nt, Homo sapiens
  misc_RNA (1)...(19): siRNA sense strand
ucgaaugacaagugggaca

SEQ ID NO: 2382560 - RNA, 19 nt, Homo sapiens
  misc_RNA (1)...(19): siRNA sense strand
guggaaaugcugagaaagu

SEQ ID NO: 2382561 - RNA, 19 nt, Homo sapiens
  misc_RNA (1)...(19): siRNA sense strand
cgacagcggcauugggaca

SEQ ID NO: 2382562 - RNA, 19 nt, Homo sapiens
  misc_RNA (1)...(19): siRNA sense strand
caacgcggacagugagaaa

SEQ ID NO: 2382563 - RNA, 19 nt, Homo sapiens
  misc_RNA (1)...(19): siRNA sense strand
agccagaggaggaggauga

SEQ ID NO: 2382564 - RNA, 19 nt, Homo sapiens
  misc_RNA (1)...(19): siRNA sense strand
gcggagaagagcucagaau

SEQ ID NO: 2382565 - RNA, 19 nt, Homo sapiens
  misc_RNA (1)...(19): siRNA sense strand
guuuggaagaacaggaauu

SEQ ID NO: 2382566 - RNA, 19 nt, Homo sapiens
  misc_RNA (1)...(19): siRNA sense strand
uuaaagcggugguggaaaa

SEQ ID NO: 2382567 - RNA, 19 nt, Homo sapiens
  misc_RNA (1)...(19): siRNA sense strand
gauaagaagaccaucaaaa

SEQ ID NO: 2382568 - RNA, 19 nt, Homo sapiens
  misc_RNA (1)...(19): siRNA sense strand
caccaugagcagugaagua

SEQ ID NO: 2382569 - RNA, 19 nt, Homo sapiens
  misc_RNA (1)...(19): siRNA sense strand
ccucaaaggauuucagcca

SEQ ID NO: 2382570 - RNA, 19 nt, Homo sapiens
  misc_RNA (1)...(19): siRNA sense strand
acaagauccugaaggccaa

SEQ ID NO: 2382571 - RNA, 19 nt, Homo sapiens
  misc_RNA (1)...(19): siRNA sense strand
cuaaagauucagaccacaa

SEQ ID NO: 2382572 - RNA, 19 nt, Homo sapiens
  misc_RNA (1)...(19): siRNA sense strand
gugaaguaguuaacaggau

SEQ ID NO: 2382573 - RNA, 19 nt, Homo sapiens
  misc_RNA (1)...(19): siRNA sense strand
agugagaagaacaagcaua

SEQ ID NO: 2382574 - RNA, 19 nt, Homo sapiens
  misc_RNA (1)...(19): siRNA sense strand
ccauuaaagcgguggugga

SEQ ID NO: 2382575 - RNA, 19 nt, Homo sapiens
  misc_RNA (1)...(19): siRNA sense strand
caagaaaguuggaaagcuc

SEQ ID NO: 2382576 - RNA, 19 nt, Homo sapiens
  misc_RNA (1)...(19): siRNA sense strand
acuauuacccggugccaua

SEQ ID NO: 2382577 - RNA, 19 nt, Homo sapiens
  misc_RNA (1)...(19): siRNA sense strand
cagcuaagcauaaagccaa

SEQ ID NO: 2382578 - RNA, 19 nt, Homo sapiens
  misc_RNA (1)...(19): siRNA sense strand
agaacaacuuugaggugga

SEQ ID NO: 2382579 - RNA, 19 nt, Homo sapiens
  misc_RNA (1)...(19): siRNA sense strand
aagcauaaggagaaacaga

SEQ ID NO: 2382580 - RNA, 19 nt, Homo sapiens
  misc_RNA (1)...(19): siRNA sense strand
ccaagaagaaccuggacca

SEQ ID NO: 2382581 - RNA, 19 nt, Homo sapiens
  misc_RNA (1)...(19): siRNA sense strand
gcauugggacagacaacaa

SEQ ID NO: 2382582 - RNA, 19 nt, Homo sapiens
  misc_RNA (1)...(19): siRNA sense strand
aagaacaagcauaaggaga

SEQ ID NO: 2382583 - RNA, 19 nt, Homo sapiens
  misc_RNA (1)...(19): siRNA sense strand
aagaggaggugaaagccaa

SEQ ID NO: 2382584 - RNA, 19 nt, Homo sapiens
  misc_RNA (1)...(19): siRNA sense strand
aaagaucaugccagagaaa

SEQ ID NO: 2382585 - RNA, 19 nt, Homo sapiens
  misc_RNA (1)...(19): siRNA sense strand
gucccuaaguugaguaaaa

SEQ ID NO: 2382586 - RNA, 19 nt, Homo sapiens
  misc_RNA (1)...(19): siRNA sense strand
agcauaagcacaaggaaga

SEQ ID NO: 2382587 - RNA, 19 nt, Homo sapiens
  misc_RNA (1)...(19): siRNA sense strand
gccaaaaggcagaggaagu

SEQ ID NO: 2382588 - RNA, 19 nt, Homo sapiens
  misc_RNA (1)...(19): siRNA sense strand
ucaagauggaggagguaca

SEQ ID NO: 2382589 - RNA, 19 nt, Homo sapiens
  misc_RNA (1)...(19): siRNA sense strand
aacacaaacacaagcauaa

SEQ ID NO: 2382590 - RNA, 19 nt, Homo sapiens
  misc_RNA (1)...(19): siRNA sense strand
cgaaggaggaagaaagaag

SEQ ID NO: 2382591 - RNA, 19 nt, Homo sapiens
  misc_RNA (1)...(19): siRNA sense strand
caggagaugguuuggaaga

SEQ ID NO: 2382592 - RNA, 19 nt, Homo sapiens
  misc_RNA (1)...(19): siRNA sense strand
ccacgaaggaggaagaaag

SEQ ID NO: 2382593 - RNA, 19 nt, Homo sapiens
  misc_RNA (1)...(19): siRNA sense strand
uggcagaccuggaggagcu

SEQ ID NO: 2382594 - RNA, 19 nt, Homo sapiens
  misc_RNA (1)...(19): siRNA sense strand
aaccaaagcaccagcaaaa

SEQ ID NO: 2382595 - RNA, 19 nt, Homo sapiens
  misc_RNA (1)...(19): siRNA sense strand
cagauuaaugucagcaaga

SEQ ID NO: 2382596 - RNA, 19 nt, Homo sapiens
  misc_RNA (1)...(19): siRNA sense strand
ccaaagcacaagaggaaac

SEQ ID NO: 2382597 - RNA, 19 nt, Homo sapiens
  misc_RNA (1)...(19): siRNA sense strand
cccaggaagaggaggugaa

SEQ ID NO: 2382598 - RNA, 19 nt, Homo sapiens
  misc_RNA (1)...(19): siRNA sense strand
acgaaaggccccagaaaca

SEQ ID NO: 2382599 - RNA, 19 nt, Homo sapiens
  misc_RNA (1)...(19): siRNA sense strand
uggaaaagaucaugccaga

SEQ ID NO: 2382600 - RNA, 19 nt, Homo sapiens
  misc_RNA (1)...(19): siRNA sense strand
cagaaauccagcauccaaa

SEQ ID NO: 2382601 - RNA, 19 nt, Homo sapiens
  misc_RNA (1)...(19): siRNA sense strand
ucaaaggauuucagccaca

SEQ ID NO: 2382602 - RNA, 19 nt, Homo sapiens
  misc_RNA (1)...(19): siRNA sense strand
ggaccagacagcagugcau

SEQ ID NO: 2382603 - RNA, 19 nt, Homo sapiens
  misc_RNA (1)...(19): siRNA sense strand
aggagaugguuuggaagaa

SEQ ID NO: 2382604 - RNA, 19 nt, Homo sapiens
  misc_RNA (1)...(19): siRNA sense strand
agaggaaacacaaacacaa

SEQ ID NO: 2382605 - RNA, 19 nt, Homo sapiens
  misc_RNA (1)...(19): siRNA sense strand
aagaugaaccgcaaggaga

SEQ ID NO: 2382606 - RNA, 19 nt, Homo sapiens
  misc_RNA (1)...(19): siRNA sense strand
ccaaaacccaaaagggaau

SEQ ID NO: 2382607 - RNA, 19 nt, Homo sapiens
  misc_RNA (1)...(19): siRNA sense strand
cacaagaggaaacggaaaa

SEQ ID NO: 2382608 - RNA, 19 nt, Homo sapiens
  misc_RNA (1)...(19): siRNA sense strand
cccagaaagcauuugacaa

SEQ ID NO: 2382609 - RNA, 19 nt, Homo sapiens
  misc_RNA (1)...(19): siRNA sense strand
uugaaagcaaacugggcaa

SEQ ID NO: 2382610 - RNA, 19 nt, Homo sapiens
  misc_RNA (1)...(19): siRNA sense strand
cacaaagcgggcuaagaaa

SEQ ID NO: 2382611 - RNA, 19 nt, Homo sapiens
  misc_RNA (1)...(19): siRNA sense strand
aaaccaaagcaccagcaaa

SEQ ID NO: 2382612 - RNA, 19 nt, Homo sapiens
  misc_RNA (1)...(19): siRNA sense strand
cauuaaagcggugguggaa

SEQ ID NO: 2382613 - RNA, 19 nt, Homo sapiens
  misc_RNA (1)...(19): siRNA sense strand
ggaacaaacuacagggaca

SEQ ID NO: 2382614 - RNA, 19 nt, Homo sapiens
  misc_RNA (1)...(19): siRNA sense strand
gaagagaauugaaggguca

SEQ ID NO: 2382615 - RNA, 19 nt, Homo sapiens
  misc_RNA (1)...(19): siRNA sense strand
gaguaucagaucagagaaa

SEQ ID NO: 2382616 - RNA, 19 nt, Homo sapiens
  misc_RNA (1)...(19): siRNA sense strand
agaauugcgaagagaaaua

SEQ ID NO: 2382617 - RNA, 19 nt, Homo sapiens
  misc_RNA (1)...(19): siRNA sense strand
cuaaagugccugugggaga

SEQ ID NO: 2382618 - RNA, 19 nt, Homo sapiens
  misc_RNA (1)...(19): siRNA sense strand
aaagaauugcgaagagaaa

SEQ ID NO: 2382619 - RNA, 19 nt, Homo sapiens
  misc_RNA (1)...(19): siRNA sense strand
ugacaaaucuguagggaac

SEQ ID NO: 2382620 - RNA, 19 nt, Homo sapiens
  misc_RNA (1)...(19): siRNA sense strand
ccauagaacaugaaguaga

SEQ ID NO: 2382621 - RNA, 19 nt, Homo sapiens
  misc_RNA (1)...(19): siRNA sense strand
agguauugcuauugauuga

SEQ ID NO: 2382622 - RNA, 19 nt, Homo sapiens
  misc_RNA (1)...(19): siRNA sense strand
agaaggacauagaugggaa

SEQ ID NO: 2382623 - RNA, 19 nt, Homo sapiens
  misc_RNA (1)...(19): siRNA sense strand
cuaaagaaguugauccuca

SEQ ID NO: 2382624 - RNA, 19 nt, Homo sapiens
  misc_RNA (1)...(19): siRNA sense strand
aagcgauagucaagaaaca

SEQ ID NO: 2382625 - RNA, 19 nt, Homo sapiens
  misc_RNA (1)...(19): siRNA sense strand
caaauguauccgagaucua

SEQ ID NO: 2382626 - RNA, 19 nt, Homo sapiens
  misc_RNA (1)...(19): siRNA sense strand
acucucagguggugcuaaa

SEQ ID NO: 2382627 - RNA, 19 nt, Homo sapiens
  misc_RNA (1)...(19): siRNA sense strand
gguauaaagaugaugagga

SEQ ID NO: 2382628 - RNA, 19 nt, Homo sapiens
  misc_RNA (1)...(19): siRNA sense strand
cugacaaaucuguagggaa

SEQ ID NO: 2382629 - RNA, 19 nt, Homo sapiens
  misc_RNA (1)...(19): siRNA sense strand
ccuugagauugaagcagaa

SEQ ID NO: 2382630 - RNA, 19 nt, Homo sapiens
  misc_RNA (1)...(19): siRNA sense strand
ugagaauggacaagcagaa

SEQ ID NO: 2382631 - RNA, 19 nt, Homo sapiens
  misc_RNA (1)...(19): siRNA sense strand
gcgaggaaacggaaaggau

SEQ ID NO: 2382632 - RNA, 19 nt, Homo sapiens
  misc_RNA (1)...(19): siRNA sense strand
uaaucaacacugugaagaa

SEQ ID NO: 2382633 - RNA, 19 nt, Homo sapiens
  misc_RNA (1)...(19): siRNA sense strand
ggaauguauacaaagacua

SEQ ID NO: 2382634 - RNA, 19 nt, Homo sapiens
  misc_RNA (1)...(19): siRNA sense strand
cagucagguucacaagaaa

SEQ ID NO: 2382635 - RNA, 19 nt, Homo sapiens
  misc_RNA (1)...(19): siRNA sense strand
uggaauaacuaaagugccu

SEQ ID NO: 2382636 - RNA, 19 nt, Homo sapiens
  misc_RNA (1)...(19): siRNA sense strand
gauggaguucaaugagaaa

SEQ ID NO: 2382637 - RNA, 19 nt, Homo sapiens
  misc_RNA (1)...(19): siRNA sense strand
gagaaauaagcuaugcaau

SEQ ID NO: 2382638 - RNA, 19 nt, Homo sapiens
  misc_RNA (1)...(19): siRNA sense strand
cuccauagaacaugaagua

SEQ ID NO: 2382639 - RNA, 19 nt, Homo sapiens
  misc_RNA (1)...(19): siRNA sense strand
cagaagacccaacaaggaa

SEQ ID NO: 2382640 - RNA, 19 nt, Homo sapiens
  misc_RNA (1)...(19): siRNA sense strand
gagcgagaagggaagacaa

SEQ ID NO: 2382641 - RNA, 19 nt, Homo sapiens
  misc_RNA (1)...(19): siRNA sense strand
ugaaguucgccuugagauu

SEQ ID NO: 2382642 - RNA, 19 nt, Homo sapiens
  misc_RNA (1)...(19): siRNA sense strand
ccaugcuggcagagaggaa

SEQ ID NO: 2382643 - RNA, 19 nt, Homo sapiens
  misc_RNA (1)...(19): siRNA sense strand
cugagaaccauuggaguua

SEQ ID NO: 2382644 - RNA, 19 nt, Homo sapiens
  misc_RNA (1)...(19): siRNA sense strand
ugaaagaagcccuugggau

SEQ ID NO: 2382645 - RNA, 19 nt, Homo sapiens
  misc_RNA (1)...(19): siRNA sense strand
ccaaaggaggccaacacua

SEQ ID NO: 2382646 - RNA, 19 nt, Homo sapiens
  misc_RNA (1)...(19): siRNA sense strand
ugagauugaagcagaaaca

SEQ ID NO: 2382647 - RNA, 19 nt, Homo sapiens
  misc_RNA (1)...(19): siRNA sense strand
agauugaagcagaaacaga

SEQ ID NO: 2382648 - RNA, 19 nt, Homo sapiens
  misc_RNA (1)...(19): siRNA sense strand
acgcuuuccuuuugagaua

SEQ ID NO: 2382649 - RNA, 19 nt, Homo sapiens
  misc_RNA (1)...(19): siRNA sense strand
agcgagaagggaagacaaa

SEQ ID NO: 2382650 - RNA, 19 nt, Homo sapiens
  misc_RNA (1)...(19): siRNA sense strand
gggagauggaggagcugau

SEQ ID NO: 2382651 - RNA, 19 nt, Homo sapiens
  misc_RNA (1)...(19): siRNA sense strand
cuucauuggcuucgcaaau

SEQ ID NO: 2382652 - RNA, 19 nt, Homo sapiens
  misc_RNA (1)...(19): siRNA sense strand
gaagaaggacauaaaggca

SEQ ID NO: 2382653 - RNA, 19 nt, Homo sapiens
  misc_RNA (1)...(19): siRNA sense strand
ggaucugguaauacaagaa

SEQ ID NO: 2382654 - RNA, 19 nt, Homo sapiens
  misc_RNA (1)...(19): siRNA sense strand
ucgcgugacuggaaugaau

SEQ ID NO: 2382655 - RNA, 19 nt, Homo sapiens
  misc_RNA (1)...(19): siRNA sense strand
augggaagaaggacauaaa

SEQ ID NO: 2382656 - RNA, 19 nt, Homo sapiens
  misc_RNA (1)...(19): siRNA sense strand
ggaacaacaaagcugaaaa

SEQ ID NO: 2382657 - RNA, 19 nt, Homo sapiens
  misc_RNA (1)...(19): siRNA sense strand
gaacaacaaagcugaaaau

SEQ ID NO: 2382658 - RNA, 19 nt, Homo sapiens
  misc_RNA (1)...(19): siRNA sense strand
gcagaaacagaucgcguga

SEQ ID NO: 2382659 - RNA, 19 nt, Homo sapiens
  misc_RNA (1)...(19): siRNA sense strand
agaaacagaucgcgugacu

SEQ ID NO: 2382660 - RNA, 19 nt, Homo sapiens
  misc_RNA (1)...(19): siRNA sense strand
acauugcaaaggaaagaaa

SEQ ID NO: 2382661 - RNA, 19 nt, Homo sapiens
  misc_RNA (1)...(19): siRNA sense strand
ucugagaaccauuggaguu

SEQ ID NO: 2382662 - RNA, 19 nt, Homo sapiens
  misc_RNA (1)...(19): siRNA sense strand
acaaaucuguagggaacaa

SEQ ID NO: 2382663 - RNA, 19 nt, Homo sapiens
  misc_RNA (1)...(19): siRNA sense strand
caguucaucacgagggaga

SEQ ID NO: 2382664 - RNA, 19 nt, Homo sapiens
  misc_RNA (1)...(19): siRNA sense strand
auagaugggaagaaggaca

SEQ ID NO: 2382665 - RNA, 19 nt, Homo sapiens
  misc_RNA (1)...(19): siRNA sense strand
acaaggaagaccaaagcau

SEQ ID NO: 2382666 - RNA, 19 nt, Homo sapiens
  misc_RNA (1)...(19): siRNA sense strand
cauggcauuugaagcgaua

SEQ ID NO: 2382667 - RNA, 19 nt, Homo sapiens
  misc_RNA (1)...(19): siRNA sense strand
gcagaggagcagucagguu

SEQ ID NO: 2382668 - RNA, 19 nt, Homo sapiens
  misc_RNA (1)...(19): siRNA sense strand
acaacaaagcugaaaauga

SEQ ID NO: 2382669 - RNA, 19 nt, Homo sapiens
  misc_RNA (1)...(19): siRNA sense strand
cgcugaagcuagcuaaaga

SEQ ID NO: 2382670 - RNA, 19 nt, Homo sapiens
  misc_RNA (1)...(19): siRNA sense strand
aacagaagccagaaggaca

SEQ ID NO: 2382671 - RNA, 19 nt, Homo sapiens
  misc_RNA (1)...(19): siRNA sense strand
acagaagccagaaggacau

SEQ ID NO: 2382672 - RNA, 19 nt, Homo sapiens
  misc_RNA (1)...(19): siRNA sense strand
uggaguucaaugagaaaga

SEQ ID NO: 2382673 - RNA, 19 nt, Homo sapiens
  misc_RNA (1)...(19): siRNA sense strand
gaguucaaugagaaagaau

SEQ ID NO: 2382674 - RNA, 19 nt, Homo sapiens
  misc_RNA (1)...(19): siRNA sense strand
cagaacagcugcagggaca

SEQ ID NO: 2382675 - RNA, 19 nt, Homo sapiens
  misc_RNA (1)...(19): siRNA sense strand
gaugacaaagaaagggaaa

SEQ ID NO: 2382676 - RNA, 19 nt, Homo sapiens
  misc_RNA (1)...(19): siRNA sense strand
cggaggaagcggagagagu

SEQ ID NO: 2382677 - RNA, 19 nt, Homo sapiens
  misc_RNA (1)...(19): siRNA sense strand
aggugaaggaggagcggaa

SEQ ID NO: 2382678 - RNA, 19 nt, Homo sapiens
  misc_RNA (1)...(19): siRNA sense strand
cggcagaagaggacaucau

SEQ ID NO: 2382679 - RNA, 19 nt, Homo sapiens
  misc_RNA (1)...(19): siRNA sense strand
gggagaaggacaaacccaa

SEQ ID NO: 2382680 - RNA, 19 nt, Homo sapiens
  misc_RNA (1)...(19): siRNA sense strand
aggucaaggugaaggagga

SEQ ID NO: 2382681 - RNA, 19 nt, Homo sapiens
  misc_RNA (1)...(19): siRNA sense strand
aguuuaagcagcagcagaa

SEQ ID NO: 2382682 - RNA, 19 nt, Homo sapiens
  misc_RNA (1)...(19): siRNA sense strand
ccaacagaaagucaagaaa

SEQ ID NO: 2382683 - RNA, 19 nt, Homo sapiens
  misc_RNA (1)...(19): siRNA sense strand
caagaagaaacgagaagca

SEQ ID NO: 2382684 - RNA, 19 nt, Homo sapiens
  misc_RNA (1)...(19): siRNA sense strand
ggacaaacccaaagagagg

SEQ ID NO: 2382685 - RNA, 19 nt, Homo sapiens
  misc_RNA (1)...(19): siRNA sense strand
ccgacgagcacaaggcgaa

SEQ ID NO: 2382686 - RNA, 19 nt, Homo sapiens
  misc_RNA (1)...(19): siRNA sense strand
ggacauacccgcagcucca

SEQ ID NO: 2382687 - RNA, 19 nt, Homo sapiens
  misc_RNA (1)...(19): siRNA sense strand
agaagagcuccgaggucaa

SEQ ID NO: 2382688 - RNA, 19 nt, Homo sapiens
  misc_RNA (1)...(19): siRNA sense strand
aggaggagcggaaggaaga

SEQ ID NO: 2382689 - RNA, 19 nt, Homo sapiens
  misc_RNA (1)...(19): siRNA sense strand
ccgaagacauccaacccua

SEQ ID NO: 2382690 - RNA, 19 nt, Homo sapiens
  misc_RNA (1)...(19): siRNA sense strand
cagcucagaucgagaaaau

SEQ ID NO: 2382691 - RNA, 19 nt, Homo sapiens
  misc_RNA (1)...(19): siRNA sense strand
acaaggaagacaaugggaa

SEQ ID NO: 2382692 - RNA, 19 nt, Homo sapiens
  misc_RNA (1)...(19): siRNA sense strand
ccuugggaagagaaagaaa

SEQ ID NO: 2382693 - RNA, 19 nt, Homo sapiens
  misc_RNA (1)...(19): siRNA sense strand
ggaaaggcucagugauagu

SEQ ID NO: 2382694 - RNA, 19 nt, Homo sapiens
  misc_RNA (1)...(19): siRNA sense strand
caaaaggacccgagguuga

SEQ ID NO: 2382695 - RNA, 19 nt, Homo sapiens
  misc_RNA (1)...(19): siRNA sense strand
cagaaagucaagaaacaga

SEQ ID NO: 2382696 - RNA, 19 nt, Homo sapiens
  misc_RNA (1)...(19): siRNA sense strand
gcuccgacaaggaagacaa

SEQ ID NO: 2382697 - RNA, 19 nt, Homo sapiens
  misc_RNA (1)...(19): siRNA sense strand
gagagagaccacucggaau

SEQ ID NO: 2382698 - RNA, 19 nt, Homo sapiens
  misc_RNA (1)...(19): siRNA sense strand
gagcacuuacucagagcaa

SEQ ID NO: 2382699 - RNA, 19 nt, Homo sapiens
  misc_RNA (1)...(19): siRNA sense strand
gcgaagaggccaagcagcu

SEQ ID NO: 2382700 - RNA, 19 nt, Homo sapiens
  misc_RNA (1)...(19): siRNA sense strand
agaccuauguuaaggaaac

SEQ ID NO: 2382701 - RNA, 19 nt, Homo sapiens
  misc_RNA (1)...(19): siRNA sense strand
agggacagugacagugaaa

SEQ ID NO: 2382702 - RNA, 19 nt, Homo sapiens
  misc_RNA (1)...(19): siRNA sense strand
gugcagaacuuuagcaacc

SEQ ID NO: 2382703 - RNA, 19 nt, Homo sapiens
  misc_RNA (1)...(19): siRNA sense strand
ggagagagaccacucggaa

SEQ ID NO: 2382704 - RNA, 19 nt, Homo sapiens
  misc_RNA (1)...(19): siRNA sense strand
ugacaaauacccuacaaaa

SEQ ID NO: 2382705 - RNA, 19 nt, Homo sapiens
  misc_RNA (1)...(19): siRNA sense strand
gcagcucaugacagagaua

SEQ ID NO: 2382706 - RNA, 19 nt, Homo sapiens
  misc_RNA (1)...(19): siRNA sense strand
caccuugggaagagaaaga

SEQ ID NO: 2382707 - RNA, 19 nt, Homo sapiens
  misc_RNA (1)...(19): siRNA sense strand
gcucaagccaggacagaac

SEQ ID NO: 2382708 - RNA, 19 nt, Homo sapiens
  misc_RNA (1)...(19): siRNA sense strand
gggccauggacuccgcaaa

SEQ ID NO: 2382709 - RNA, 19 nt, Homo sapiens
  misc_RNA (1)...(19): siRNA sense strand
gugacagugaccaggaaga

SEQ ID NO: 2382710 - RNA, 19 nt, Homo sapiens
  misc_RNA (1)...(19): siRNA sense strand
ucccacacgcugaaggaua

SEQ ID NO: 2382711 - RNA, 19 nt, Homo sapiens
  misc_RNA (1)...(19): siRNA sense strand
ugaccaagaagaaacgaga

SEQ ID NO: 2382712 - RNA, 19 nt, Homo sapiens
  misc_RNA (1)...(19): siRNA sense strand
ggacuguugcaaagagcca

SEQ ID NO: 2382713 - RNA, 19 nt, Homo sapiens
  misc_RNA (1)...(19): siRNA sense strand
cucaggaacguguggagaa

SEQ ID NO: 2382714 - RNA, 19 nt, Homo sapiens
  misc_RNA (1)...(19): siRNA sense strand
gcacaugcucagagaagac

SEQ ID NO: 2382715 - RNA, 19 nt, Homo sapiens
  misc_RNA (1)...(19): siRNA sense strand
acagugaccaggaagagaa

SEQ ID NO: 2382716 - RNA, 19 nt, Homo sapiens
  misc_RNA (1)...(19): siRNA sense strand
uagagagaagccaggagaa

SEQ ID NO: 2382717 - RNA, 19 nt, Homo sapiens
  misc_RNA (1)...(19): siRNA sense strand
uguagauaaacgagacuca

SEQ ID NO: 2382718 - RNA, 19 nt, Homo sapiens
  misc_RNA (1)...(19): siRNA sense strand
acaaagaaagggaaagcgu

SEQ ID NO: 2382719 - RNA, 19 nt, Homo sapiens
  misc_RNA (1)...(19): siRNA sense strand
aagaagagcuccgagguca

SEQ ID NO: 2382720 - RNA, 19 nt, Homo sapiens
  misc_RNA (1)...(19): siRNA sense strand
acgagaagcacuuaccaau

SEQ ID NO: 2382721 - RNA, 19 nt, Homo sapiens
  misc_RNA (1)...(19): siRNA sense strand
guuaaggaaaccagggaag

SEQ ID NO: 2382722 - RNA, 19 nt, Homo sapiens
  misc_RNA (1)...(19): siRNA sense strand
aaacccaaagagagggaga

SEQ ID NO: 2382723 - RNA, 19 nt, Homo sapiens
  misc_RNA (1)...(19): siRNA sense strand
gagaagacuacgagcacac

SEQ ID NO: 2382724 - RNA, 19 nt, Homo sapiens
  misc_RNA (1)...(19): siRNA sense strand
gcucagaucgagaaaauga

SEQ ID NO: 2382725 - RNA, 19 nt, Homo sapiens
  misc_RNA (1)...(19): siRNA sense strand
caaggaagacaaugggaag

SEQ ID NO: 2382726 - RNA, 19 nt, Homo sapiens
  misc_RNA (1)...(19): siRNA sense strand
ccuuucagaccuauguuaa

SEQ ID NO: 2382727 - RNA, 19 nt, Homo sapiens
  misc_RNA (1)...(19): siRNA sense strand
gcacuuaagccucaggaac

SEQ ID NO: 2382728 - RNA, 19 nt, Homo sapiens
  misc_RNA (1)...(19): siRNA sense strand
ggaaagaagccaaggccaa

SEQ ID NO: 2382729 - RNA, 19 nt, Homo sapiens
  misc_RNA (1)...(19): siRNA sense strand
gggaacaagcugagggaca

SEQ ID NO: 2382730 - RNA, 19 nt, Homo sapiens
  misc_RNA (1)...(19): siRNA sense strand
cggaggaagaggagggaga

SEQ ID NO: 2382731 - RNA, 19 nt, Homo sapiens
  misc_RNA (1)...(19): siRNA sense strand
aggccgaggagcagaggaa

SEQ ID NO: 2382732 - RNA, 19 nt, Homo sapiens
  misc_RNA (1)...(19): siRNA sense strand
cgaacaaccagcugagcga

SEQ ID NO: 2382733 - RNA, 19 nt, Homo sapiens
  misc_RNA (1)...(19): siRNA sense strand
aagcagaagaagcggcaga

SEQ ID NO: 2382734 - RNA, 19 nt, Homo sapiens
  misc_RNA (1)...(19): siRNA sense strand
aggagcaggacgugggaga

SEQ ID NO: 2382735 - RNA, 19 nt, Homo sapiens
  misc_RNA (1)...(19): siRNA sense strand
ggaaugcacucaagcgcuu

SEQ ID NO: 2382736 - RNA, 19 nt, Homo sapiens
  misc_RNA (1)...(19): siRNA sense strand
cgaugcagucucuggacaa

SEQ ID NO: 2382737 - RNA, 19 nt, Homo sapiens
  misc_RNA (1)...(19): siRNA sense strand
ugaaaauggcagaaaugaa

SEQ ID NO: 2382738 - RNA, 19 nt, Homo sapiens
  misc_RNA (1)...(19): siRNA sense strand
aggaagagagccggaggaa

SEQ ID NO: 2382739 - RNA, 19 nt, Homo sapiens
  misc_RNA (1)...(19): siRNA sense strand
cggaaagaagccaaggcca

SEQ ID NO: 2382740 - RNA, 19 nt, Homo sapiens
  misc_RNA (1)...(19): siRNA sense strand
cugcagagcuugcggacug

SEQ ID NO: 2382741 - RNA, 19 nt, Homo sapiens
  misc_RNA (1)...(19): siRNA sense strand
uucacuugcuggauggaaa

SEQ ID NO: 2382742 - RNA, 19 nt, Homo sapiens
  misc_RNA (1)...(19): siRNA sense strand
uggucaaagcugaggacaa

SEQ ID NO: 2382743 - RNA, 19 nt, Homo sapiens
  misc_RNA (1)...(19): siRNA sense strand
gugacaagacagaagggaa

SEQ ID NO: 2382744 - RNA, 19 nt, Homo sapiens
  misc_RNA (1)...(19): siRNA sense strand
cagaggagccuguggccaa

SEQ ID NO: 2382745 - RNA, 19 nt, Homo sapiens
  misc_RNA (1)...(19): siRNA sense strand
cacaaagcacagaaggaaa

SEQ ID NO: 2382746 - RNA, 19 nt, Homo sapiens
  misc_RNA (1)...(19): siRNA sense strand
aggaugaguucaaggcaca

SEQ ID NO: 2382747 - RNA, 19 nt, Homo sapiens
  misc_RNA (1)...(19): siRNA sense strand
ccugaagagcaguggcaga

SEQ ID NO: 2382748 - RNA, 19 nt, Homo sapiens
  misc_RNA (1)...(19): siRNA sense strand
ggaaggugggagucagcaa

SEQ ID NO: 2382749 - RNA, 19 nt, Homo sapiens
  misc_RNA (1)...(19): siRNA sense strand
ggccaaaagccgagaacca

SEQ ID NO: 2382750 - RNA, 19 nt, Homo sapiens
  misc_RNA (1)...(19): siRNA sense strand
aggagauagcggaggacga

SEQ ID NO: 2382751 - RNA, 19 nt, Homo sapiens
  misc_RNA (1)...(19): siRNA sense strand
ugacaagacagaagggaag

SEQ ID NO: 2382752 - RNA, 19 nt, Homo sapiens
  misc_RNA (1)...(19): siRNA sense strand
aagaaugaagugaaggaga

SEQ ID NO: 2382753 - RNA, 19 nt, Homo sapiens
  misc_RNA (1)...(19): siRNA sense strand
acuggaaggaugaguucaa

SEQ ID NO: 2382754 - RNA, 19 nt, Homo sapiens
  misc_RNA (1)...(19): siRNA sense strand
cagcaaacccauuggcauc

SEQ ID NO: 2382755 - RNA, 19 nt, Homo sapiens
  misc_RNA (1)...(19): siRNA sense strand
gggaaggauggcagccgaa

SEQ ID NO: 2382756 - RNA, 19 nt, Homo sapiens
  misc_RNA (1)...(19): siRNA sense strand
aggagaaaggccacgucaa

SEQ ID NO: 2382757 - RNA, 19 nt, Homo sapiens
  misc_RNA (1)...(19): siRNA sense strand
aggaacagugguaagaaaa

SEQ ID NO: 2382758 - RNA, 19 nt, Homo sapiens
  misc_RNA (1)...(19): siRNA sense strand
caccaaacccauuacggua

SEQ ID NO: 2382759 - RNA, 19 nt, Homo sapiens
  misc_RNA (1)...(19): siRNA sense strand
aaggcacacucgaggguga

SEQ ID NO: 2382760 - RNA, 19 nt, Homo sapiens
  misc_RNA (1)...(19): siRNA sense strand
cugcuagaggcauggaaga

SEQ ID NO: 2382761 - RNA, 19 nt, Homo sapiens
  misc_RNA (1)...(19): siRNA sense strand
ggcccauuguggucagcaa

SEQ ID NO: 2382762 - RNA, 19 nt, Homo sapiens
  misc_RNA (1)...(19): siRNA sense strand
cgcacaaagcacagaagga

SEQ ID NO: 2382763 - RNA, 19 nt, Homo sapiens
  misc_RNA (1)...(19): siRNA sense strand
ggcucaaaggccuggucaa

SEQ ID NO: 2382764 - RNA, 19 nt, Homo sapiens
  misc_RNA (1)...(19): siRNA sense strand
ucuaagacccagcuggaga

SEQ ID NO: 2382765 - RNA, 19 nt, Homo sapiens
  misc_RNA (1)...(19): siRNA sense strand
ccugaggagcccacagaca

SEQ ID NO: 2382766 - RNA, 19 nt, Homo sapiens
  misc_RNA (1)...(19): siRNA sense strand
cagaaagaagagaagaaua

SEQ ID NO: 2382767 - RNA, 19 nt, Homo sapiens
  misc_RNA (1)...(19): siRNA sense strand
ccucacauacagagagaaa

SEQ ID NO: 2382768 - RNA, 19 nt, Homo sapiens
  misc_RNA (1)...(19): siRNA sense strand
gaagagaagaauagagcau

SEQ ID NO: 2382769 - RNA, 19 nt, Homo sapiens
  misc_RNA (1)...(19): siRNA sense strand
gcacagaauuuaaccgaca

SEQ ID NO: 2382770 - RNA, 19 nt, Homo sapiens
  misc_RNA (1)...(19): siRNA sense strand
aauagagcauucagagaaa

SEQ ID NO: 2382771 - RNA, 19 nt, Homo sapiens
  misc_RNA (1)...(19): siRNA sense strand
caucaagugcacaaagaaa

SEQ ID NO: 2382772 - RNA, 19 nt, Homo sapiens
  misc_RNA (1)...(19): siRNA sense strand
ccaaagaaugugacaguga

SEQ ID NO: 2382773 - RNA, 19 nt, Homo sapiens
  misc_RNA (1)...(19): siRNA sense strand
cggcaacagcacagaauuu

SEQ ID NO: 2382774 - RNA, 19 nt, Homo sapiens
  misc_RNA (1)...(19): siRNA sense strand
uggagaaacagcagaaaga

SEQ ID NO: 2382775 - RNA, 19 nt, Homo sapiens
  misc_RNA (1)...(19): siRNA sense strand
uggaugagguagaagguga

SEQ ID NO: 2382776 - RNA, 19 nt, Homo sapiens
  misc_RNA (1)...(19): siRNA sense strand
gggugauaacaaaggaauu

SEQ ID NO: 2382777 - RNA, 19 nt, Homo sapiens
  misc_RNA (1)...(19): siRNA sense strand
cguaaagaccauauugauu

SEQ ID NO: 2382778 - RNA, 19 nt, Homo sapiens
  misc_RNA (1)...(19): siRNA sense strand
cauaauggacacagauauu

SEQ ID NO: 2382779 - RNA, 19 nt, Homo sapiens
  misc_RNA (1)...(19): siRNA sense strand
agcagaaagaagagaagaa

SEQ ID NO: 2382780 - RNA, 19 nt, Homo sapiens
  misc_RNA (1)...(19): siRNA sense strand
guaacaaggaguuugacaa

SEQ ID NO: 2382781 - RNA, 19 nt, Homo sapiens
  misc_RNA (1)...(19): siRNA sense strand
uaacaaaggaauugcacau

SEQ ID NO: 2382782 - RNA, 19 nt, Homo sapiens
  misc_RNA (1)...(19): siRNA sense strand
gcuuguguccagaaagaaa

SEQ ID NO: 2382783 - RNA, 19 nt, Homo sapiens
  misc_RNA (1)...(19): siRNA sense strand
gugaagaugcaguagaaaa

SEQ ID NO: 2382784 - RNA, 19 nt, Homo sapiens
  misc_RNA (1)...(19): siRNA sense strand
aagugaagaugcaguagaa

SEQ ID NO: 2382785 - RNA, 19 nt, Homo sapiens
  misc_RNA (1)...(19): siRNA sense strand
agaaagaagagaagaauag

SEQ ID NO: 2382786 - RNA, 19 nt, Homo sapiens
  misc_RNA (1)...(19): siRNA sense strand
ccgucuagaugaacaacua

SEQ ID NO: 2382787 - RNA, 19 nt, Homo sapiens
  misc_RNA (1)...(19): siRNA sense strand
ggaugagguagaaggugaa

SEQ ID NO: 2382788 - RNA, 19 nt, Homo sapiens
  misc_RNA (1)...(19): siRNA sense strand
caguaauagagaccaguaa

SEQ ID NO: 2382789 - RNA, 19 nt, Homo sapiens
  misc_RNA (1)...(19): siRNA sense strand
ccucuacaacauuggauaa

SEQ ID NO: 2382790 - RNA, 19 nt, Homo sapiens
  misc_RNA (1)...(19): siRNA sense strand
guagcugagaagagcauua

SEQ ID NO: 2382791 - RNA, 19 nt, Homo sapiens
  misc_RNA (1)...(19): siRNA sense strand
ugagcaugacaaugagaua

SEQ ID NO: 2382792 - RNA, 19 nt, Homo sapiens
  misc_RNA (1)...(19): siRNA sense strand
agauguggaauuagaagaa

SEQ ID NO: 2382793 - RNA, 19 nt, Homo sapiens
  misc_RNA (1)...(19): siRNA sense strand
agucauuaacucaguggaa

SEQ ID NO: 2382794 - RNA, 19 nt, Homo sapiens
  misc_RNA (1)...(19): siRNA sense strand
ucauuaacucaguggaaga

SEQ ID NO: 2382795 - RNA, 19 nt, Homo sapiens
  misc_RNA (1)...(19): siRNA sense strand
agaaaggaggaguguucaa

SEQ ID NO: 2382796 - RNA, 19 nt, Homo sapiens
  misc_RNA (1)...(19): siRNA sense strand
ccaugugauccaacaauua

SEQ ID NO: 2382797 - RNA, 19 nt, Homo sapiens
  misc_RNA (1)...(19): siRNA sense strand
agguagaaggugaaacuuu

SEQ ID NO: 2382798 - RNA, 19 nt, Homo sapiens
  misc_RNA (1)...(19): siRNA sense strand
cuguacaaguuuacugcua

SEQ ID NO: 2382799 - RNA, 19 nt, Homo sapiens
  misc_RNA (1)...(19): siRNA sense strand
uacccagguugcagagaaa

SEQ ID NO: 2382800 - RNA, 19 nt, Homo sapiens
  misc_RNA (1)...(19): siRNA sense strand
ccaugaagguguugcuugu

SEQ ID NO: 2382801 - RNA, 19 nt, Homo sapiens
  misc_RNA (1)...(19): siRNA sense strand
uuggauaauuugacugcua

SEQ ID NO: 2382802 - RNA, 19 nt, Homo sapiens
  misc_RNA (1)...(19): siRNA sense strand
gcaccacagcauagauuau

SEQ ID NO: 2382803 - RNA, 19 nt, Homo sapiens
  misc_RNA (1)...(19): siRNA sense strand
gugguugccgugagaguua

SEQ ID NO: 2382804 - RNA, 19 nt, Homo sapiens
  misc_RNA (1)...(19): siRNA sense strand
gagcaugacaaugagauaa

SEQ ID NO: 2382805 - RNA, 19 nt, Homo sapiens
  misc_RNA (1)...(19): siRNA sense strand
agcaugacaaugagauaaa

SEQ ID NO: 2382806 - RNA, 19 nt, Homo sapiens
  misc_RNA (1)...(19): siRNA sense strand
uggaauuagaagaagcuau

SEQ ID NO: 2382807 - RNA, 19 nt, Homo sapiens
  misc_RNA (1)...(19): siRNA sense strand
gcagaaagaagagaagaau

SEQ ID NO: 2382808 - RNA, 19 nt, Homo sapiens
  misc_RNA (1)...(19): siRNA sense strand
ggaugaaaccagcacccaa

SEQ ID NO: 2382809 - RNA, 19 nt, Homo sapiens
  misc_RNA (1)...(19): siRNA sense strand
uggaaagguaugugaugau

SEQ ID NO: 2382810 - RNA, 19 nt, Homo sapiens
  misc_RNA (1)...(19): siRNA sense strand
aaguuuagacauggagaaa

SEQ ID NO: 2382811 - RNA, 19 nt, Homo sapiens
  misc_RNA (1)...(19): siRNA sense strand
uggagaaaggaguugagaa

SEQ ID NO: 2382812 - RNA, 19 nt, Homo sapiens
  misc_RNA (1)...(19): siRNA sense strand
ugaccuaagcuaucagaau

SEQ ID NO: 2382813 - RNA, 19 nt, Homo sapiens
  misc_RNA (1)...(19): siRNA sense strand
ccucuuauacugaugagaa

SEQ ID NO: 2382814 - RNA, 19 nt, Homo sapiens
  misc_RNA (1)...(19): siRNA sense strand
ugucagugaaggaccauua

SEQ ID NO: 2382815 - RNA, 19 nt, Homo sapiens
  misc_RNA (1)...(19): siRNA sense strand
ccacagaugauggacauaa

SEQ ID NO: 2382816 - RNA, 19 nt, Homo sapiens
  misc_RNA (1)...(19): siRNA sense strand
cagaguucauugucgaaau

SEQ ID NO: 2382817 - RNA, 19 nt, Homo sapiens
  misc_RNA (1)...(19): siRNA sense strand
ccaagaugagcaugacaau

SEQ ID NO: 2382818 - RNA, 19 nt, Homo sapiens
  misc_RNA (1)...(19): siRNA sense strand
agacauggagaaaggaguu

SEQ ID NO: 2382819 - RNA, 19 nt, Homo sapiens
  misc_RNA (1)...(19): siRNA sense strand
ugauaacaugggugccaaa

SEQ ID NO: 2382820 - RNA, 19 nt, Homo sapiens
  misc_RNA (1)...(19): siRNA sense strand
cucuuauacugaugagaau

SEQ ID NO: 2382821 - RNA, 19 nt, Homo sapiens
  misc_RNA (1)...(19): siRNA sense strand
ccauguugaaguggagaaa

SEQ ID NO: 2382822 - RNA, 19 nt, Homo sapiens
  misc_RNA (1)...(19): siRNA sense strand
gagaaacagcagaaagaag

SEQ ID NO: 2382823 - RNA, 19 nt, Homo sapiens
  misc_RNA (1)...(19): siRNA sense strand
ccuauaaugcacuguaaca

SEQ ID NO: 2382824 - RNA, 19 nt, Homo sapiens
  misc_RNA (1)...(19): siRNA sense strand
caaucaagucuuuguggau

SEQ ID NO: 2382825 - RNA, 19 nt, Homo sapiens
  misc_RNA (1)...(19): siRNA sense strand
acaaaguccgagucauuaa

SEQ ID NO: 2382826 - RNA, 19 nt, Homo sapiens
  misc_RNA (1)...(19): siRNA sense strand
gaggagcagcaguauguaa

SEQ ID NO: 2382827 - RNA, 19 nt, Homo sapiens
  misc_RNA (1)...(19): siRNA sense strand
ccauaaacuccgugggauu

SEQ ID NO: 2382828 - RNA, 19 nt, Homo sapiens
  misc_RNA (1)...(19): siRNA sense strand
ccagaugaaaugaaagaaa

SEQ ID NO: 2382829 - RNA, 19 nt, Homo sapiens
  misc_RNA (1)...(19): siRNA sense strand
ggagaaggggagaggaaaa

SEQ ID NO: 2382830 - RNA, 19 nt, Homo sapiens
  misc_RNA (1)...(19): siRNA sense strand
gcgcaaugccaaaggugaa

SEQ ID NO: 2382831 - RNA, 19 nt, Homo sapiens
  misc_RNA (1)...(19): siRNA sense strand
guuauuaagaggagaaaca

SEQ ID NO: 2382832 - RNA, 19 nt, Homo sapiens
  misc_RNA (1)...(19): siRNA sense strand
gaagauuugaagaaggaaa

SEQ ID NO: 2382833 - RNA, 19 nt, Homo sapiens
  misc_RNA (1)...(19): siRNA sense strand
guaccugauuggauggaaa

SEQ ID NO: 2382834 - RNA, 19 nt, Homo sapiens
  misc_RNA (1)...(19): siRNA sense strand
gcuuagacauacacagcaa

SEQ ID NO: 2382835 - RNA, 19 nt, Homo sapiens
  misc_RNA (1)...(19): siRNA sense strand
aauaauaacaaguggcaga

SEQ ID NO: 2382836 - RNA, 19 nt, Homo sapiens
  misc_RNA (1)...(19): siRNA sense strand
agacaagaccgucggagaa

SEQ ID NO: 2382837 - RNA, 19 nt, Homo sapiens
  misc_RNA (1)...(19): siRNA sense strand
cugaagaagagauguacaa

SEQ ID NO: 2382838 - RNA, 19 nt, Homo sapiens
  misc_RNA (1)...(19): siRNA sense strand
gggcugaagacuacaacaa

SEQ ID NO: 2382839 - RNA, 19 nt, Homo sapiens
  misc_RNA (1)...(19): siRNA sense strand
gauuuauggacacgagaaa

SEQ ID NO: 2382840 - RNA, 19 nt, Homo sapiens
  misc_RNA (1)...(19): siRNA sense strand
gaaugagauagguggagaa

SEQ ID NO: 2382841 - RNA, 19 nt, Homo sapiens
  misc_RNA (1)...(19): siRNA sense strand
acuaugauguccagaguau

SEQ ID NO: 2382842 - RNA, 19 nt, Homo sapiens
  misc_RNA (1)...(19): siRNA sense strand
aggaaaagucuaagccaua

SEQ ID NO: 2382843 - RNA, 19 nt, Homo sapiens
  misc_RNA (1)...(19): siRNA sense strand
gcaugaauauacagagcca

SEQ ID NO: 2382844 - RNA, 19 nt, Homo sapiens
  misc_RNA (1)...(19): siRNA sense strand
agaaaaugcugcucauaaa

SEQ ID NO: 2382845 - RNA, 19 nt, Homo sapiens
  misc_RNA (1)...(19): siRNA sense strand
cgaaagugauuaaugcaga

SEQ ID NO: 2382846 - RNA, 19 nt, Homo sapiens
  misc_RNA (1)...(19): siRNA sense strand
ucauugaacaggaaacaaa

SEQ ID NO: 2382847 - RNA, 19 nt, Homo sapiens
  misc_RNA (1)...(19): siRNA sense strand
ccauugaagaagaucuaaa

SEQ ID NO: 2382848 - RNA, 19 nt, Homo sapiens
  misc_RNA (1)...(19): siRNA sense strand
uguuaaagggcuacaaaga

SEQ ID NO: 2382849 - RNA, 19 nt, Homo sapiens
  misc_RNA (1)...(19): siRNA sense strand
caugaaacuggaugaacaa

SEQ ID NO: 2382850 - RNA, 19 nt, Homo sapiens
  misc_RNA (1)...(19): siRNA sense strand
cggugaagguugucaucau

SEQ ID NO: 2382851 - RNA, 19 nt, Homo sapiens
  misc_RNA (1)...(19): siRNA sense strand
ccugguagaugcugccaaa

SEQ ID NO: 2382852 - RNA, 19 nt, Homo sapiens
  misc_RNA (1)...(19): siRNA sense strand
cagggaacaucuggagaaa

SEQ ID NO: 2382853 - RNA, 19 nt, Homo sapiens
  misc_RNA (1)...(19): siRNA sense strand
uggcaaagaagugaggaua

SEQ ID NO: 2382854 - RNA, 19 nt, Homo sapiens
  misc_RNA (1)...(19): siRNA sense strand
cagaaaagcucuucgcaga

SEQ ID NO: 2382855 - RNA, 19 nt, Homo sapiens
  misc_RNA (1)...(19): siRNA sense strand
uugaagugcccaaggagaa

SEQ ID NO: 2382856 - RNA, 19 nt, Homo sapiens
  misc_RNA (1)...(19): siRNA sense strand
gugagcauucgaagggaaa

SEQ ID NO: 2382857 - RNA, 19 nt, Homo sapiens
  misc_RNA (1)...(19): siRNA sense strand
cugaaucacagaagaguuu

SEQ ID NO: 2382858 - RNA, 19 nt, Homo sapiens
  misc_RNA (1)...(19): siRNA sense strand
gcaauuaugaacaggcaca

SEQ ID NO: 2382859 - RNA, 19 nt, Homo sapiens
  misc_RNA (1)...(19): siRNA sense strand
gugaucagcuggaggacca

SEQ ID NO: 2382860 - RNA, 19 nt, Homo sapiens
  misc_RNA (1)...(19): siRNA sense strand
gggcuacaaagaugacaaa

SEQ ID NO: 2382861 - RNA, 19 nt, Homo sapiens
  misc_RNA (1)...(19): siRNA sense strand
auaacaaguggcagaggaa

SEQ ID NO: 2382862 - RNA, 19 nt, Homo sapiens
  misc_RNA (1)...(19): siRNA sense strand
guggagaaggggagaggaa

SEQ ID NO: 2382863 - RNA, 19 nt, Homo sapiens
  misc_RNA (1)...(19): siRNA sense strand
uggaaaugauaucguaaca

SEQ ID NO: 2382864 - RNA, 19 nt, Homo sapiens
  misc_RNA (1)...(19): siRNA sense strand
acaccauagacaugagcua

SEQ ID NO: 2382865 - RNA, 19 nt, Homo sapiens
  misc_RNA (1)...(19): siRNA sense strand
uugauuuguuaaagggcua

SEQ ID NO: 2382866 - RNA, 19 nt, Homo sapiens
  misc_RNA (1)...(19): siRNA sense strand
agucaaauguguucaggga

SEQ ID NO: 2382867 - RNA, 19 nt, Homo sapiens
  misc_RNA (1)...(19): siRNA sense strand
ugaaaucgcugcauggaga

SEQ ID NO: 2382868 - RNA, 19 nt, Homo sapiens
  misc_RNA (1)...(19): siRNA sense strand
ggaaugagauagguggaga

SEQ ID NO: 2382869 - RNA, 19 nt, Homo sapiens
  misc_RNA (1)...(19): siRNA sense strand
ucaaauguguucagggacu

SEQ ID NO: 2382870 - RNA, 19 nt, Homo sapiens
  misc_RNA (1)...(19): siRNA sense strand
gugauaggguggacuucaa

SEQ ID NO: 2382871 - RNA, 19 nt, Homo sapiens
  misc_RNA (1)...(19): siRNA sense strand
uggaccagcuggaagguau

SEQ ID NO: 2382872 - RNA, 19 nt, Homo sapiens
  misc_RNA (1)...(19): siRNA sense strand
gaagaaaugggcuaggaca

SEQ ID NO: 2382873 - RNA, 19 nt, Homo sapiens
  misc_RNA (1)...(19): siRNA sense strand
auguggagcccuacgguua

SEQ ID NO: 2382874 - RNA, 19 nt, Homo sapiens
  misc_RNA (1)...(19): siRNA sense strand
ugccagugauggaguacaa

SEQ ID NO: 2382875 - RNA, 19 nt, Homo sapiens
  misc_RNA (1)...(19): siRNA sense strand
ggacgagagcauuuacaau

SEQ ID NO: 2382876 - RNA, 19 nt, Homo sapiens
  misc_RNA (1)...(19): siRNA sense strand
cugcaaagcuggacagagc

SEQ ID NO: 2382877 - RNA, 19 nt, Homo sapiens
  misc_RNA (1)...(19): siRNA sense strand
cagaaaagaaugucaccaa

SEQ ID NO: 2382878 - RNA, 19 nt, Homo sapiens
  misc_RNA (1)...(19): siRNA sense strand
agaagaaggaaaagucuaa

SEQ ID NO: 2382879 - RNA, 19 nt, Homo sapiens
  misc_RNA (1)...(19): siRNA sense strand
acaacaaggccauggaacu

SEQ ID NO: 2382880 - RNA, 19 nt, Homo sapiens
  misc_RNA (1)...(19): siRNA sense strand
guucaagccaggaaauaga

SEQ ID NO: 2382881 - RNA, 19 nt, Homo sapiens
  misc_RNA (1)...(19): siRNA sense strand
uggcggauguggagcccua

SEQ ID NO: 2382882 - RNA, 19 nt, Homo sapiens
  misc_RNA (1)...(19): siRNA sense strand
ccaagaaaggaaaacauaa

SEQ ID NO: 2382883 - RNA, 19 nt, Homo sapiens
  misc_RNA (1)...(19): siRNA sense strand
aagacaagaccgucggaga

SEQ ID NO: 2382884 - RNA, 19 nt, Homo sapiens
  misc_RNA (1)...(19): siRNA sense strand
uggacagagcacugaagaa

SEQ ID NO: 2382885 - RNA, 19 nt, Homo sapiens
  misc_RNA (1)...(19): siRNA sense strand
cuaugaacgaggagaaugu

SEQ ID NO: 2382886 - RNA, 19 nt, Homo sapiens
  misc_RNA (1)...(19): siRNA sense strand
cgucaagugcccauaguga

SEQ ID NO: 2382887 - RNA, 19 nt, Homo sapiens
  misc_RNA (1)...(19): siRNA sense strand
ugaggagaucaaagagauu

SEQ ID NO: 2382888 - RNA, 19 nt, Homo sapiens
  misc_RNA (1)...(19): siRNA sense strand
cagaaagagccgccaacau

SEQ ID NO: 2382889 - RNA, 19 nt, Homo sapiens
  misc_RNA (1)...(19): siRNA sense strand
gcuacaaagaugacaaauc

SEQ ID NO: 2382890 - RNA, 19 nt, Homo sapiens
  misc_RNA (1)...(19): siRNA sense strand
gcacagccauucagcccaa

SEQ ID NO: 2382891 - RNA, 19 nt, Homo sapiens
  misc_RNA (1)...(19): siRNA sense strand
acaccaaggcugaggagaa

SEQ ID NO: 2382892 - RNA, 19 nt, Homo sapiens
  misc_RNA (1)...(19): siRNA sense strand
gugaagaagaugagaggga

SEQ ID NO: 2382893 - RNA, 19 nt, Homo sapiens
  misc_RNA (1)...(19): siRNA sense strand
uggauagaguggagaguga

SEQ ID NO: 2382894 - RNA, 19 nt, Homo sapiens
  misc_RNA (1)...(19): siRNA sense strand
cccaagaagcucaaggaaa

SEQ ID NO: 2382895 - RNA, 19 nt, Homo sapiens
  misc_RNA (1)...(19): siRNA sense strand
aagagaagucggagaguga

SEQ ID NO: 2382896 - RNA, 19 nt, Homo sapiens
  misc_RNA (1)...(19): siRNA sense strand
ucaucaagcaggaggagaa

SEQ ID NO: 2382897 - RNA, 19 nt, Homo sapiens
  misc_RNA (1)...(19): siRNA sense strand
gcuacauggaugagaaaga

SEQ ID NO: 2382898 - RNA, 19 nt, Homo sapiens
  misc_RNA (1)...(19): siRNA sense strand
ccaaggaagaccagaucaa

SEQ ID NO: 2382899 - RNA, 19 nt, Homo sapiens
  misc_RNA (1)...(19): siRNA sense strand
ucaacaaccuggagggcuu

SEQ ID NO: 2382900 - RNA, 19 nt, Homo sapiens
  misc_RNA (1)...(19): siRNA sense strand
gaguggagagugaggacaa

SEQ ID NO: 2382901 - RNA, 19 nt, Homo sapiens
  misc_RNA (1)...(19): siRNA sense strand
gcaagagcgagaagaggaa

SEQ ID NO: 2382902 - RNA, 19 nt, Homo sapiens
  misc_RNA (1)...(19): siRNA sense strand
gcaaagaagaagcacggua

SEQ ID NO: 2382903 - RNA, 19 nt, Homo sapiens
  misc_RNA (1)...(19): siRNA sense strand
gggaagagcgagaaggagu

SEQ ID NO: 2382904 - RNA, 19 nt, Homo sapiens
  misc_RNA (1)...(19): siRNA sense strand
uggcauugcuccuggguga

SEQ ID NO: 2382905 - RNA, 19 nt, Homo sapiens
  misc_RNA (1)...(19): siRNA sense strand
gcaucaagccagaguggau

SEQ ID NO: 2382906 - RNA, 19 nt, Homo sapiens
  misc_RNA (1)...(19): siRNA sense strand
ggacgagaugucagaagaa

SEQ ID NO: 2382907 - RNA, 19 nt, Homo sapiens
  misc_RNA (1)...(19): siRNA sense strand
gcagaguggacgacgacaa

SEQ ID NO: 2382908 - RNA, 19 nt, Homo sapiens
  misc_RNA (1)...(19): siRNA sense strand
gagaaggaguuuagagccu

SEQ ID NO: 2382909 - RNA, 19 nt, Homo sapiens
  misc_RNA (1)...(19): siRNA sense strand
aggacgacguggagggcau

SEQ ID NO: 2382910 - RNA, 19 nt, Homo sapiens
  misc_RNA (1)...(19): siRNA sense strand
cugaagagugacagggaca

SEQ ID NO: 2382911 - RNA, 19 nt, Homo sapiens
  misc_RNA (1)...(19): siRNA sense strand
augaagaggaucuggaaga

SEQ ID NO: 2382912 - RNA, 19 nt, Homo sapiens
  misc_RNA (1)...(19): siRNA sense strand
ggccagaacaagaagguga

SEQ ID NO: 2382913 - RNA, 19 nt, Homo sapiens
  misc_RNA (1)...(19): siRNA sense strand
gggaaaucaucaagcagga

SEQ ID NO: 2382914 - RNA, 19 nt, Homo sapiens
  misc_RNA (1)...(19): siRNA sense strand
aggaugaggaugaggacuu

SEQ ID NO: 2382915 - RNA, 19 nt, Homo sapiens
  misc_RNA (1)...(19): siRNA sense strand
gugacaaagaggaagauga

SEQ ID NO: 2382916 - RNA, 19 nt, Homo sapiens
  misc_RNA (1)...(19): siRNA sense strand
gggcuacauggaugagaaa

SEQ ID NO: 2382917 - RNA, 19 nt, Homo sapiens
  misc_RNA (1)...(19): siRNA sense strand
uguaaagggaagcggaaga

SEQ ID NO: 2382918 - RNA, 19 nt, Homo sapiens
  misc_RNA (1)...(19): siRNA sense strand
cuccaaagaugggaagaaa

SEQ ID NO: 2382919 - RNA, 19 nt, Homo sapiens
  misc_RNA (1)...(19): siRNA sense strand
gcuacaaguaugagcggau

SEQ ID NO: 2382920 - RNA, 19 nt, Homo sapiens
  misc_RNA (1)...(19): siRNA sense strand
aggaagaugacgaggggaa

SEQ ID NO: 2382921 - RNA, 19 nt, Homo sapiens
  misc_RNA (1)...(19): siRNA sense strand
gggacgacaagcaggagaa

SEQ ID NO: 2382922 - RNA, 19 nt, Homo sapiens
  misc_RNA (1)...(19): siRNA sense strand
aagaagaaacucaaggaca

SEQ ID NO: 2382923 - RNA, 19 nt, Homo sapiens
  misc_RNA (1)...(19): siRNA sense strand
ggaucagcaacaagaggaa

SEQ ID NO: 2382924 - RNA, 19 nt, Homo sapiens
  misc_RNA (1)...(19): siRNA sense strand
cggagugggaagaagguau

SEQ ID NO: 2382925 - RNA, 19 nt, Homo sapiens
  misc_RNA (1)...(19): siRNA sense strand
acaaagaggaagaugacga

SEQ ID NO: 2382926 - RNA, 19 nt, Homo sapiens
  misc_RNA (1)...(19): siRNA sense strand
acagcaaaauggugacaaa

SEQ ID NO: 2382927 - RNA, 19 nt, Homo sapiens
  misc_RNA (1)...(19): siRNA sense strand
ccaagauggaggagcgcuu

SEQ ID NO: 2382928 - RNA, 19 nt, Homo sapiens
  misc_RNA (1)...(19): siRNA sense strand
ggccagaggagacggagaa

SEQ ID NO: 2382929 - RNA, 19 nt, Homo sapiens
  misc_RNA (1)...(19): siRNA sense strand
aaaagaaggaugaggauga

SEQ ID NO: 2382930 - RNA, 19 nt, Homo sapiens
  misc_RNA (1)...(19): siRNA sense strand
acaacaaggacguggagga

SEQ ID NO: 2382931 - RNA, 19 nt, Homo sapiens
  misc_RNA (1)...(19): siRNA sense strand
gggccuggagugaggaaga

SEQ ID NO: 2382932 - RNA, 19 nt, Homo sapiens
  misc_RNA (1)...(19): siRNA sense strand
gcaagaagcugagggacga

SEQ ID NO: 2382933 - RNA, 19 nt, Homo sapiens
  misc_RNA (1)...(19): siRNA sense strand
ugaagaaagaagugcagau

SEQ ID NO: 2382934 - RNA, 19 nt, Homo sapiens
  misc_RNA (1)...(19): siRNA sense strand
gaggagguggagcgggaaa

SEQ ID NO: 2382935 - RNA, 19 nt, Homo sapiens
  misc_RNA (1)...(19): siRNA sense strand
aagaagaagaagaaacuca

SEQ ID NO: 2382936 - RNA, 19 nt, Homo sapiens
  misc_RNA (1)...(19): siRNA sense strand
ccaagaccaaggagggcaa

SEQ ID NO: 2382937 - RNA, 19 nt, Homo sapiens
  misc_RNA (1)...(19): siRNA sense strand
gcuccaaagaugggaagaa

SEQ ID NO: 2382938 - RNA, 19 nt, Homo sapiens
  misc_RNA (1)...(19): siRNA sense strand
cuacagaagaugcugaaga

SEQ ID NO: 2382939 - RNA, 19 nt, Homo sapiens
  misc_RNA (1)...(19): siRNA sense strand
gagugaggaagaagaucaa

SEQ ID NO: 2382940 - RNA, 19 nt, Homo sapiens
  misc_RNA (1)...(19): siRNA sense strand
ggaagaagaucaaaggcuc

SEQ ID NO: 2382941 - RNA, 19 nt, Homo sapiens
  misc_RNA (1)...(19): siRNA sense strand
cgaaggacgacgacgauga

SEQ ID NO: 2382942 - RNA, 19 nt, Homo sapiens
  misc_RNA (1)...(19): siRNA sense strand
gggcaaaguccagcggauu

SEQ ID NO: 2382943 - RNA, 19 nt, Homo sapiens
  misc_RNA (1)...(19): siRNA sense strand
uggaggagcugcugagcga

SEQ ID NO: 2382944 - RNA, 19 nt, Homo sapiens
  misc_RNA (1)...(19): siRNA sense strand
aaacaaguguaaagggaag

SEQ ID NO: 2382945 - RNA, 19 nt, Homo sapiens
  misc_RNA (1)...(19): siRNA sense strand
agaacaagaaggugaugau

SEQ ID NO: 2382946 - RNA, 19 nt, Homo sapiens
  misc_RNA (1)...(19): siRNA sense strand
ccauugaaacacagcaaaa

SEQ ID NO: 2382947 - RNA, 19 nt, Homo sapiens
  misc_RNA (1)...(19): siRNA sense strand
aggaugaggaugauaauga

SEQ ID NO: 2382948 - RNA, 19 nt, Homo sapiens
  misc_RNA (1)...(19): siRNA sense strand
cggucaaguucgacaagca

SEQ ID NO: 2382949 - RNA, 19 nt, Homo sapiens
  misc_RNA (1)...(19): siRNA sense strand
aggaagaccagaucaagaa

SEQ ID NO: 2382950 - RNA, 19 nt, Homo sapiens
  misc_RNA (1)...(19): siRNA sense strand
cggccaagaccgagcucau

SEQ ID NO: 2382951 - RNA, 19 nt, Homo sapiens
  misc_RNA (1)...(19): siRNA sense strand
cuacagaacaugaacgagu

SEQ ID NO: 2382952 - RNA, 19 nt, Homo sapiens
  misc_RNA (1)...(19): siRNA sense strand
acaucgaggugcugggcuu

SEQ ID NO: 2382953 - RNA, 19 nt, Homo sapiens
  misc_RNA (1)...(19): siRNA sense strand
ggaagagcgagaaggaguu

SEQ ID NO: 2382954 - RNA, 19 nt, Homo sapiens
  misc_RNA (1)...(19): siRNA sense strand
ccuaagaagaagaaaccca

SEQ ID NO: 2382955 - RNA, 19 nt, Homo sapiens
  misc_RNA (1)...(19): siRNA sense strand
aagggaagcggaagaagaa

SEQ ID NO: 2382956 - RNA, 19 nt, Homo sapiens
  misc_RNA (1)...(19): siRNA sense strand
cagagaaugaagaggaucu

SEQ ID NO: 2382957 - RNA, 19 nt, Homo sapiens
  misc_RNA (1)...(19): siRNA sense strand
agaacaaccuggaggagcu

SEQ ID NO: 2382958 - RNA, 19 nt, Homo sapiens
  misc_RNA (1)...(19): siRNA sense strand
augcaaagaaugugggaaa

SEQ ID NO: 2382959 - RNA, 19 nt, Homo sapiens
  misc_RNA (1)...(19): siRNA sense strand
guguagacaaugugguaaa

SEQ ID NO: 2382960 - RNA, 19 nt, Homo sapiens
  misc_RNA (1)...(19): siRNA sense strand
cuuacggagucaugagaaa

SEQ ID NO: 2382961 - RNA, 19 nt, Homo sapiens
  misc_RNA (1)...(19): siRNA sense strand
aacccauacuagagagaaa

SEQ ID NO: 2382962 - RNA, 19 nt, Homo sapiens
  misc_RNA (1)...(19): siRNA sense strand
aggagcaaguccagagcaa

SEQ ID NO: 2382963 - RNA, 19 nt, Homo sapiens
  misc_RNA (1)...(19): siRNA sense strand
auguaagcaaugugggaaa

SEQ ID NO: 2382964 - RNA, 19 nt, Homo sapiens
  misc_RNA (1)...(19): siRNA sense strand
aacucauacuggagagaaa

SEQ ID NO: 2382965 - RNA, 19 nt, Homo sapiens
  misc_RNA (1)...(19): siRNA sense strand
auguaaggaauguggcaaa

SEQ ID NO: 2382966 - RNA, 19 nt, Homo sapiens
  misc_RNA (1)...(19): siRNA sense strand
aauucauacuggagaaaga

SEQ ID NO: 2382967 - RNA, 19 nt, Homo sapiens
  misc_RNA (1)...(19): siRNA sense strand
aauucauacuggagagaca

SEQ ID NO: 2382968 - RNA, 19 nt, Homo sapiens
  misc_RNA (1)...(19): siRNA sense strand
guguaagcaguguggcaaa

SEQ ID NO: 2382969 - RNA, 19 nt, Homo sapiens
  misc_RNA (1)...(19): siRNA sense strand
aguucacacuggcgagaaa

SEQ ID NO: 2382970 - RNA, 19 nt, Homo sapiens
  misc_RNA (1)...(19): siRNA sense strand
cagugaacaccauggacaa

SEQ ID NO: 2382971 - RNA, 19 nt, Homo sapiens
  misc_RNA (1)...(19): siRNA sense strand
agucaaggccgcacaggaa

SEQ ID NO: 2382972 - RNA, 19 nt, Homo sapiens
  misc_RNA (1)...(19): siRNA sense strand
ccaggauauugaagaugaa

SEQ ID NO: 2382973 - RNA, 19 nt, Homo sapiens
  misc_RNA (1)...(19): siRNA sense strand
cuuaauacgaaccuggaaa

SEQ ID NO: 2382974 - RNA, 19 nt, Homo sapiens
  misc_RNA (1)...(19): siRNA sense strand
aaauguaaacaguguggaa

SEQ ID NO: 2382975 - RNA, 19 nt, Homo sapiens
  misc_RNA (1)...(19): siRNA sense strand
cccuaugaauguaaggaau

SEQ ID NO: 2382976 - RNA, 19 nt, Homo sapiens
  misc_RNA (1)...(19): siRNA sense strand
cccuaugaauguaaggaau

SEQ ID NO: 2382977 - RNA, 19 nt, Homo sapiens
  misc_RNA (1)...(19): siRNA sense strand
ggacaaagcaucaagacuc

SEQ ID NO: 2382978 - RNA, 19 nt, Homo sapiens
  misc_RNA (1)...(19): siRNA sense strand
guugaagcacucugugaaa

SEQ ID NO: 2382979 - RNA, 19 nt, Homo sapiens
  misc_RNA (1)...(19): siRNA sense strand
auguaaacaguguggaaaa

SEQ ID NO: 2382980 - RNA, 19 nt, Homo sapiens
  misc_RNA (1)...(19): siRNA sense strand
gagcaaguccagagcaagu

SEQ ID NO: 2382981 - RNA, 19 nt, Homo sapiens
  misc_RNA (1)...(19): siRNA sense strand
agaccaggauauugaagau

SEQ ID NO: 2382982 - RNA, 19 nt, Homo sapiens
  misc_RNA (1)...(19): siRNA sense strand
aauggaaagaccaggauau

SEQ ID NO: 2382983 - RNA, 19 nt, Homo sapiens
  misc_RNA (1)...(19): siRNA sense strand
cuuaauaggcacaugagau

SEQ ID NO: 2382984 - RNA, 19 nt, Homo sapiens
  misc_RNA (1)...(19): siRNA sense strand
agugaaaccaugugagugu

SEQ ID NO: 2382985 - RNA, 19 nt, Homo sapiens
  misc_RNA (1)...(19): siRNA sense strand
guuuaaauucccugaaagu

SEQ ID NO: 2382986 - RNA, 19 nt, Homo sapiens
  misc_RNA (1)...(19): siRNA sense strand
caguguagacaauguggua

SEQ ID NO: 2382987 - RNA, 19 nt, Homo sapiens
  misc_RNA (1)...(19): siRNA sense strand
agagaugugaugcgggcaa

SEQ ID NO: 2382988 - RNA, 19 nt, Homo sapiens
  misc_RNA (1)...(19): siRNA sense strand
auguagggaaugugggaga

SEQ ID NO: 2382989 - RNA, 19 nt, Homo sapiens
  misc_RNA (1)...(19): siRNA sense strand
cagagcaaguggucgucua

SEQ ID NO: 2382990 - RNA, 19 nt, Homo sapiens
  misc_RNA (1)...(19): siRNA sense strand
acagaaaccaaaugagugu

SEQ ID NO: 2382991 - RNA, 19 nt, Homo sapiens
  misc_RNA (1)...(19): siRNA sense strand
gugaagugcacgaaagaac

SEQ ID NO: 2382992 - RNA, 19 nt, Homo sapiens
  misc_RNA (1)...(19): siRNA sense strand
aggauguggcugugaacuu

SEQ ID NO: 2382993 - RNA, 19 nt, Homo sapiens
  misc_RNA (1)...(19): siRNA sense strand
gaauguaagcaauguggga

SEQ ID NO: 2382994 - RNA, 19 nt, Homo sapiens
  misc_RNA (1)...(19): siRNA sense strand
gaguguaagcaguguggca

SEQ ID NO: 2382995 - RNA, 19 nt, Homo sapiens
  misc_RNA (1)...(19): siRNA sense strand
cgaaagaagucacacugga

SEQ ID NO: 2382996 - RNA, 19 nt, Homo sapiens
  misc_RNA (1)...(19): siRNA sense strand
cccuaugaauguaaacaau

SEQ ID NO: 2382997 - RNA, 19 nt, Homo sapiens
  misc_RNA (1)...(19): siRNA sense strand
ccuucaauucuucaaguua

SEQ ID NO: 2382998 - RNA, 19 nt, Homo sapiens
  misc_RNA (1)...(19): siRNA sense strand
aaaccagggaagaaaucua

SEQ ID NO: 2382999 - RNA, 19 nt, Homo sapiens
  misc_RNA (1)...(19): siRNA sense strand
gguugaagcacucugugaa

SEQ ID NO: 2383000 - RNA, 19 nt, Homo sapiens
  misc_RNA (1)...(19): siRNA sense strand
ugaaaccaugugaguguaa

SEQ ID NO: 2383001 - RNA, 19 nt, Homo sapiens
  misc_RNA (1)...(19): siRNA sense strand
uauucgaacccaugaaaga

SEQ ID NO: 2383002 - RNA, 19 nt, Homo sapiens
  misc_RNA (1)...(19): siRNA sense strand
gcacgaaagaagucacacu

SEQ ID NO: 2383003 - RNA, 19 nt, Homo sapiens
  misc_RNA (1)...(19): siRNA sense strand
gggcaaccuucaagaaccu

SEQ ID NO: 2383004 - RNA, 19 nt, Homo sapiens
  misc_RNA (1)...(19): siRNA sense strand
ggauauugaagaugaacac

SEQ ID NO: 2383005 - RNA, 19 nt, Homo sapiens
  misc_RNA (1)...(19): siRNA sense strand
auguaagaaauguggggaa

SEQ ID NO: 2383006 - RNA, 19 nt, Homo sapiens
  misc_RNA (1)...(19): siRNA sense strand
caggagaaguauugggaca

SEQ ID NO: 2383007 - RNA, 19 nt, Homo sapiens
  misc_RNA (1)...(19): siRNA sense strand
gaaaagaaugagugagcua

SEQ ID NO: 2383008 - RNA, 19 nt, Homo sapiens
  misc_RNA (1)...(19): siRNA sense strand
cuuuauacugugaaggaua

SEQ ID NO: 2383009 - RNA, 19 nt, Homo sapiens
  misc_RNA (1)...(19): siRNA sense strand
gcucagaaauauuaggagu

SEQ ID NO: 2383010 - RNA, 19 nt, Homo sapiens
  misc_RNA (1)...(19): siRNA sense strand
ccagaagaaggauggaaau

SEQ ID NO: 2383011 - RNA, 19 nt, Homo sapiens
  misc_RNA (1)...(19): siRNA sense strand
gcuccaucuuccugaacaa

SEQ ID NO: 2383012 - RNA, 19 nt, Homo sapiens
  misc_RNA (1)...(19): siRNA sense strand
ucuugaaacgugagccaaa

SEQ ID NO: 2383013 - RNA, 19 nt, Homo sapiens
  misc_RNA (1)...(19): siRNA sense strand
aaguacagaagcagacaaa

SEQ ID NO: 2383014 - RNA, 19 nt, Homo sapiens
  misc_RNA (1)...(19): siRNA sense strand
ggaucuuucaccagagcaa

SEQ ID NO: 2383015 - RNA, 19 nt, Homo sapiens
  misc_RNA (1)...(19): siRNA sense strand
caaagaaguacgagcagca

SEQ ID NO: 2383016 - RNA, 19 nt, Homo sapiens
  misc_RNA (1)...(19): siRNA sense strand
accagaagaaggauggaaa

SEQ ID NO: 2383017 - RNA, 19 nt, Homo sapiens
  misc_RNA (1)...(19): siRNA sense strand
aagcagaacgagaguuuau

SEQ ID NO: 2383018 - RNA, 19 nt, Homo sapiens
  misc_RNA (1)...(19): siRNA sense strand
aggagauauauuugagaga

SEQ ID NO: 2383019 - RNA, 19 nt, Homo sapiens
  misc_RNA (1)...(19): siRNA sense strand
ccugaaaccagaagaagga

SEQ ID NO: 2383020 - RNA, 19 nt, Homo sapiens
  misc_RNA (1)...(19): siRNA sense strand
ugacaaagaaguacgagca

SEQ ID NO: 2383021 - RNA, 19 nt, Homo sapiens
  misc_RNA (1)...(19): siRNA sense strand
ggaugcugcaagugaauau

SEQ ID NO: 2383022 - RNA, 19 nt, Homo sapiens
  misc_RNA (1)...(19): siRNA sense strand
agaccaaacagguguacga

SEQ ID NO: 2383023 - RNA, 19 nt, Homo sapiens
  misc_RNA (1)...(19): siRNA sense strand
cuagaugauuuaagccaga

SEQ ID NO: 2383024 - RNA, 19 nt, Homo sapiens
  misc_RNA (1)...(19): siRNA sense strand
aggauaaagcuacaggaga

SEQ ID NO: 2383025 - RNA, 19 nt, Homo sapiens
  misc_RNA (1)...(19): siRNA sense strand
gcaugagaggagauauauu

SEQ ID NO: 2383026 - RNA, 19 nt, Homo sapiens
  misc_RNA (1)...(19): siRNA sense strand
cagauguagaaguaaagua

SEQ ID NO: 2383027 - RNA, 19 nt, Homo sapiens
  misc_RNA (1)...(19): siRNA sense strand
uggaaaggaccaugcuaga

SEQ ID NO: 2383028 - RNA, 19 nt, Homo sapiens
  misc_RNA (1)...(19): siRNA sense strand
ggccaaacuacucgguuau

SEQ ID NO: 2383029 - RNA, 19 nt, Homo sapiens
  misc_RNA (1)...(19): siRNA sense strand
cagcaaguacagaagcaga

SEQ ID NO: 2383030 - RNA, 19 nt, Homo sapiens
  misc_RNA (1)...(19): siRNA sense strand
uagaaaagacagaugauga

SEQ ID NO: 2383031 - RNA, 19 nt, Homo sapiens
  misc_RNA (1)...(19): siRNA sense strand
ugugaaggauaaagcuaca

SEQ ID NO: 2383032 - RNA, 19 nt, Homo sapiens
  misc_RNA (1)...(19): siRNA sense strand
ccuaaugaguagaggccug

SEQ ID NO: 2383033 - RNA, 19 nt, Homo sapiens
  misc_RNA (1)...(19): siRNA sense strand
aaacaagaacugaggagcu

SEQ ID NO: 2383034 - RNA, 19 nt, Homo sapiens
  misc_RNA (1)...(19): siRNA sense strand
gagaugagcaugagaggag

SEQ ID NO: 2383035 - RNA, 19 nt, Homo sapiens
  misc_RNA (1)...(19): siRNA sense strand
agaaauauuaggaguugca

SEQ ID NO: 2383036 - RNA, 19 nt, Homo sapiens
  misc_RNA (1)...(19): siRNA sense strand
aaucaaugccugggaucua

SEQ ID NO: 2383037 - RNA, 19 nt, Homo sapiens
  misc_RNA (1)...(19): siRNA sense strand
acugaaggcuugcugaaca

SEQ ID NO: 2383038 - RNA, 19 nt, Homo sapiens
  misc_RNA (1)...(19): siRNA sense strand
acagaugaugacaaguaua

SEQ ID NO: 2383039 - RNA, 19 nt, Homo sapiens
  misc_RNA (1)...(19): siRNA sense strand
caaggugcaaagaggaaaa

SEQ ID NO: 2383040 - RNA, 19 nt, Homo sapiens
  misc_RNA (1)...(19): siRNA sense strand
uagcggaacaaauguggaa

SEQ ID NO: 2383041 - RNA, 19 nt, Homo sapiens
  misc_RNA (1)...(19): siRNA sense strand
ccagacgauacuuggaaaa

SEQ ID NO: 2383042 - RNA, 19 nt, Homo sapiens
  misc_RNA (1)...(19): siRNA sense strand
ggaccucuauccaagggaa

SEQ ID NO: 2383043 - RNA, 19 nt, Homo sapiens
  misc_RNA (1)...(19): siRNA sense strand
cggaacaaauguggaaacu

SEQ ID NO: 2383044 - RNA, 19 nt, Homo sapiens
  misc_RNA (1)...(19): siRNA sense strand
aaacgugagccaaaccaaa

SEQ ID NO: 2383045 - RNA, 19 nt, Homo sapiens
  misc_RNA (1)...(19): siRNA sense strand
gcaaagaggaaaacaccau

SEQ ID NO: 2383046 - RNA, 19 nt, Homo sapiens
  misc_RNA (1)...(19): siRNA sense strand
cugcaagugaauaugccaa

SEQ ID NO: 2383047 - RNA, 19 nt, Homo sapiens
  misc_RNA (1)...(19): siRNA sense strand
ccgcagaguuggugguucc

SEQ ID NO: 2383048 - RNA, 19 nt, Homo sapiens
  misc_RNA (1)...(19): siRNA sense strand
gggcaaacgcguacaggca

SEQ ID NO: 2383049 - RNA, 19 nt, Homo sapiens
  misc_RNA (1)...(19): siRNA sense strand
cgacugaagaagaaggagu

SEQ ID NO: 2383050 - RNA, 19 nt, Homo sapiens
  misc_RNA (1)...(19): siRNA sense strand
acgcucugccagugggaaa

SEQ ID NO: 2383051 - RNA, 19 nt, Homo sapiens
  misc_RNA (1)...(19): siRNA sense strand
ccgaaaagaggcggagaaa

SEQ ID NO: 2383052 - RNA, 19 nt, Homo sapiens
  misc_RNA (1)...(19): siRNA sense strand
aggauaaggugucggugga

SEQ ID NO: 2383053 - RNA, 19 nt, Homo sapiens
  misc_RNA (1)...(19): siRNA sense strand
aagaagaaggaguacguga

SEQ ID NO: 2383054 - RNA, 19 nt, Homo sapiens
  misc_RNA (1)...(19): siRNA sense strand
ugggaaagcagaagcagga

SEQ ID NO: 2383055 - RNA, 19 nt, Homo sapiens
  misc_RNA (1)...(19): siRNA sense strand
ugacaguggcagcgccgaa

SEQ ID NO: 2383056 - RNA, 19 nt, Homo sapiens
  misc_RNA (1)...(19): siRNA sense strand
agaaucgggagcugggcaa

SEQ ID NO: 2383057 - RNA, 19 nt, Homo sapiens
  misc_RNA (1)...(19): siRNA sense strand
gccgaaaagaggcggagaa

SEQ ID NO: 2383058 - RNA, 19 nt, Homo sapiens
  misc_RNA (1)...(19): siRNA sense strand
gcaaacgcguacaggcacu

SEQ ID NO: 2383059 - RNA, 19 nt, Homo sapiens
  misc_RNA (1)...(19): siRNA sense strand
uaauaaagguugagccagu

SEQ ID NO: 2383060 - RNA, 19 nt, Homo sapiens
  misc_RNA (1)...(19): siRNA sense strand
cgaaaagccaaguggaauu

SEQ ID NO: 2383061 - RNA, 19 nt, Homo sapiens
  misc_RNA (1)...(19): siRNA sense strand
cgcuacaacacgaaagaua

SEQ ID NO: 2383062 - RNA, 19 nt, Homo sapiens
  misc_RNA (1)...(19): siRNA sense strand
uagaauaugccauggaaaa

SEQ ID NO: 2383063 - RNA, 19 nt, Homo sapiens
  misc_RNA (1)...(19): siRNA sense strand
acacaauggauauaaggaa

SEQ ID NO: 2383064 - RNA, 19 nt, Homo sapiens
  misc_RNA (1)...(19): siRNA sense strand
guaucuaaaggaagaacaa

SEQ ID NO: 2383065 - RNA, 19 nt, Homo sapiens
  misc_RNA (1)...(19): siRNA sense strand
ugacaagaguauaacggau

SEQ ID NO: 2383066 - RNA, 19 nt, Homo sapiens
  misc_RNA (1)...(19): siRNA sense strand
cuagaauaugccauggaaa

SEQ ID NO: 2383067 - RNA, 19 nt, Homo sapiens
  misc_RNA (1)...(19): siRNA sense strand
uguaauaaagguugagcca

SEQ ID NO: 2383068 - RNA, 19 nt, Homo sapiens
  misc_RNA (1)...(19): siRNA sense strand
acagagaggccaugagagu

SEQ ID NO: 2383069 - RNA, 19 nt, Homo sapiens
  misc_RNA (1)...(19): siRNA sense strand
aagggaaggaaaugaaauu

SEQ ID NO: 2383070 - RNA, 19 nt, Homo sapiens
  misc_RNA (1)...(19): siRNA sense strand
uaucaaaagucucaagcaa

SEQ ID NO: 2383071 - RNA, 19 nt, Homo sapiens
  misc_RNA (1)...(19): siRNA sense strand
agguugagccagugauaca

SEQ ID NO: 2383072 - RNA, 19 nt, Homo sapiens
  misc_RNA (1)...(19): siRNA sense strand
ccacuuaugaggaaggcuu

SEQ ID NO: 2383073 - RNA, 19 nt, Homo sapiens
  misc_RNA (1)...(19): siRNA sense strand
gugccaaauguuuaagauu

SEQ ID NO: 2383074 - RNA, 19 nt, Homo sapiens
  misc_RNA (1)...(19): siRNA sense strand
acaaaugcaaauagagagu

SEQ ID NO: 2383075 - RNA, 19 nt, Homo sapiens
  misc_RNA (1)...(19): siRNA sense strand
gcaccaagaguuugcgguu

SEQ ID NO: 2383076 - RNA, 19 nt, Homo sapiens
  misc_RNA (1)...(19): siRNA sense strand
cggauagcacugugagagu

SEQ ID NO: 2383077 - RNA, 19 nt, Homo sapiens
  misc_RNA (1)...(19): siRNA sense strand
ggacuaagcaccaggagug

SEQ ID NO: 2383078 - RNA, 19 nt, Homo sapiens
  misc_RNA (1)...(19): siRNA sense strand
cauacuuugaucugguaaa

SEQ ID NO: 2383079 - RNA, 19 nt, Homo sapiens
  misc_RNA (1)...(19): siRNA sense strand
augcaaauagagaguugaa

SEQ ID NO: 2383080 - RNA, 19 nt, Homo sapiens
  misc_RNA (1)...(19): siRNA sense strand
gggccuaccaccaugaaga

SEQ ID NO: 2383081 - RNA, 19 nt, Homo sapiens
  misc_RNA (1)...(19): siRNA sense strand
guuucaguaucuaaaggaa

SEQ ID NO: 2383082 - RNA, 19 nt, Homo sapiens
  misc_RNA (1)...(19): siRNA sense strand
ccaaacaaagauacaacau

SEQ ID NO: 2383083 - RNA, 19 nt, Homo sapiens
  misc_RNA (1)...(19): siRNA sense strand
ucuaaaggaagaacaaaca

SEQ ID NO: 2383084 - RNA, 19 nt, Homo sapiens
  misc_RNA (1)...(19): siRNA sense strand
ugcaaguauuccagacauu

SEQ ID NO: 2383085 - RNA, 19 nt, Homo sapiens
  misc_RNA (1)...(19): siRNA sense strand
ggaaaauagcacacacaca

SEQ ID NO: 2383086 - RNA, 19 nt, Homo sapiens
  misc_RNA (1)...(19): siRNA sense strand
aaacaaucuuaccaggaga

SEQ ID NO: 2383087 - RNA, 19 nt, Homo sapiens
  misc_RNA (1)...(19): siRNA sense strand
gccgaaaagccaaguggaa

SEQ ID NO: 2383088 - RNA, 19 nt, Homo sapiens
  misc_RNA (1)...(19): siRNA sense strand
agcaacaacuuuaacgaca

SEQ ID NO: 2383089 - RNA, 19 nt, Homo sapiens
  misc_RNA (1)...(19): siRNA sense strand
acuucaauuuccaggaguu

SEQ ID NO: 2383090 - RNA, 19 nt, Homo sapiens
  misc_RNA (1)...(19): siRNA sense strand
gguuauugaauccugagaa

SEQ ID NO: 2383091 - RNA, 19 nt, Homo sapiens
  misc_RNA (1)...(19): siRNA sense strand
gggaaggaaaugaaauuac

SEQ ID NO: 2383092 - RNA, 19 nt, Homo sapiens
  misc_RNA (1)...(19): siRNA sense strand
cauauuuuccacaggauua

SEQ ID NO: 2383093 - RNA, 19 nt, Homo sapiens
  misc_RNA (1)...(19): siRNA sense strand
ggaaggcuuaauagauaau

SEQ ID NO: 2383094 - RNA, 19 nt, Homo sapiens
  misc_RNA (1)...(19): siRNA sense strand
ugguagaacuuuaaggaau

SEQ ID NO: 2383095 - RNA, 19 nt, Homo sapiens
  misc_RNA (1)...(19): siRNA sense strand
aggaaauaauaaugggaga

SEQ ID NO: 2383096 - RNA, 19 nt, Homo sapiens
  misc_RNA (1)...(19): siRNA sense strand
ggugaaugucagugaggaa

SEQ ID NO: 2383097 - RNA, 19 nt, Homo sapiens
  misc_RNA (1)...(19): siRNA sense strand
aaguagauguggugggaga

SEQ ID NO: 2383098 - RNA, 19 nt, Homo sapiens
  misc_RNA (1)...(19): siRNA sense strand
cugcaguaguugaagaaau

SEQ ID NO: 2383099 - RNA, 19 nt, Homo sapiens
  misc_RNA (1)...(19): siRNA sense strand
gguuaaacggcuuggauga

SEQ ID NO: 2383100 - RNA, 19 nt, Homo sapiens
  misc_RNA (1)...(19): siRNA sense strand
ggaaauaauaaugggagaa

SEQ ID NO: 2383101 - RNA, 19 nt, Homo sapiens
  misc_RNA (1)...(19): siRNA sense strand
acuggaugauugugagaaa

SEQ ID NO: 2383102 - RNA, 19 nt, Homo sapiens
  misc_RNA (1)...(19): siRNA sense strand
ccucaaaagagcaguguaa

SEQ ID NO: 2383103 - RNA, 19 nt, Homo sapiens
  misc_RNA (1)...(19): siRNA sense strand
cagcagaguacccgagaau

SEQ ID NO: 2383104 - RNA, 19 nt, Homo sapiens
  misc_RNA (1)...(19): siRNA sense strand
ccauuggauuuguggaaaa

SEQ ID NO: 2383105 - RNA, 19 nt, Homo sapiens
  misc_RNA (1)...(19): siRNA sense strand
gcagaagauagcagaugaa

SEQ ID NO: 2383106 - RNA, 19 nt, Homo sapiens
  misc_RNA (1)...(19): siRNA sense strand
ggaugaagaugaugaccga

SEQ ID NO: 2383107 - RNA, 19 nt, Homo sapiens
  misc_RNA (1)...(19): siRNA sense strand
agacauucuuagacagaga

SEQ ID NO: 2383108 - RNA, 19 nt, Homo sapiens
  misc_RNA (1)...(19): siRNA sense strand
gaaaauggggauacggaua

SEQ ID NO: 2383109 - RNA, 19 nt, Homo sapiens
  misc_RNA (1)...(19): siRNA sense strand
aagugaaggaguaaguaaa

SEQ ID NO: 2383110 - RNA, 19 nt, Homo sapiens
  misc_RNA (1)...(19): siRNA sense strand
uagcagaugaauugggcaa

SEQ ID NO: 2383111 - RNA, 19 nt, Homo sapiens
  misc_RNA (1)...(19): siRNA sense strand
ugaaaguggauuugugcaa

SEQ ID NO: 2383112 - RNA, 19 nt, Homo sapiens
  misc_RNA (1)...(19): siRNA sense strand
gugugauaacuguggcaua

SEQ ID NO: 2383113 - RNA, 19 nt, Homo sapiens
  misc_RNA (1)...(19): siRNA sense strand
uggguaagcccuaggaaaa

SEQ ID NO: 2383114 - RNA, 19 nt, Homo sapiens
  misc_RNA (1)...(19): siRNA sense strand
auggacaauuugaggagaa

SEQ ID NO: 2383115 - RNA, 19 nt, Homo sapiens
  misc_RNA (1)...(19): siRNA sense strand
agcagaaacuucagcaaau

SEQ ID NO: 2383116 - RNA, 19 nt, Homo sapiens
  misc_RNA (1)...(19): siRNA sense strand
aauaauaaugggagaacca

SEQ ID NO: 2383117 - RNA, 19 nt, Homo sapiens
  misc_RNA (1)...(19): siRNA sense strand
ugaagaaaucacaggcuau

SEQ ID NO: 2383118 - RNA, 19 nt, Homo sapiens
  misc_RNA (1)...(19): siRNA sense strand
ccucaagaacaucguuaua

SEQ ID NO: 2383119 - RNA, 19 nt, Homo sapiens
  misc_RNA (1)...(19): siRNA sense strand
uuacagaagaggaagauga

SEQ ID NO: 2383120 - RNA, 19 nt, Homo sapiens
  misc_RNA (1)...(19): siRNA sense strand
agaagauagcagaugaauu

SEQ ID NO: 2383121 - RNA, 19 nt, Homo sapiens
  misc_RNA (1)...(19): siRNA sense strand
ccuauguguuacaggaaaa

SEQ ID NO: 2383122 - RNA, 19 nt, Homo sapiens
  misc_RNA (1)...(19): siRNA sense strand
auucacaagugcaggucaa

SEQ ID NO: 2383123 - RNA, 19 nt, Homo sapiens
  misc_RNA (1)...(19): siRNA sense strand
agacaaggagucaguagaa

SEQ ID NO: 2383124 - RNA, 19 nt, Homo sapiens
  misc_RNA (1)...(19): siRNA sense strand
aggaaggaggacaguuaua

SEQ ID NO: 2383125 - RNA, 19 nt, Homo sapiens
  misc_RNA (1)...(19): siRNA sense strand
cagucaucuuuaagggauu

SEQ ID NO: 2383126 - RNA, 19 nt, Homo sapiens
  misc_RNA (1)...(19): siRNA sense strand
aaauaauggaagugaagga

SEQ ID NO: 2383127 - RNA, 19 nt, Homo sapiens
  misc_RNA (1)...(19): siRNA sense strand
accaaacaguucagaagaa

SEQ ID NO: 2383128 - RNA, 19 nt, Homo sapiens
  misc_RNA (1)...(19): siRNA sense strand
gugccaauucagaaaggaa

SEQ ID NO: 2383129 - RNA, 19 nt, Homo sapiens
  misc_RNA (1)...(19): siRNA sense strand
aagcagaaacuucagcaaa

SEQ ID NO: 2383130 - RNA, 19 nt, Homo sapiens
  misc_RNA (1)...(19): siRNA sense strand
gauugugagaaaagggaaa

SEQ ID NO: 2383131 - RNA, 19 nt, Homo sapiens
  misc_RNA (1)...(19): siRNA sense strand
uugaagaaaucacaggcua

SEQ ID NO: 2383132 - RNA, 19 nt, Homo sapiens
  misc_RNA (1)...(19): siRNA sense strand
ccuaaugaaacaaaugcaa

SEQ ID NO: 2383133 - RNA, 19 nt, Homo sapiens
  misc_RNA (1)...(19): siRNA sense strand
caguguauauggaugaaga

SEQ ID NO: 2383134 - RNA, 19 nt, Homo sapiens
  misc_RNA (1)...(19): siRNA sense strand
ccuacaaauccuggugaaa

SEQ ID NO: 2383135 - RNA, 19 nt, Homo sapiens
  misc_RNA (1)...(19): siRNA sense strand
cguaaaagacauacuagaa

SEQ ID NO: 2383136 - RNA, 19 nt, Homo sapiens
  misc_RNA (1)...(19): siRNA sense strand
gggcaacaggacagcaaaa

SEQ ID NO: 2383137 - RNA, 19 nt, Homo sapiens
  misc_RNA (1)...(19): siRNA sense strand
aggauaacauagaaaggca

SEQ ID NO: 2383138 - RNA, 19 nt, Homo sapiens
  misc_RNA (1)...(19): siRNA sense strand
auaccaaaccugaaacauu

SEQ ID NO: 2383139 - RNA, 19 nt, Homo sapiens
  misc_RNA (1)...(19): siRNA sense strand
cagauauucacaaggaaga

SEQ ID NO: 2383140 - RNA, 19 nt, Homo sapiens
  misc_RNA (1)...(19): siRNA sense strand
cguuauacucugagaaccu

SEQ ID NO: 2383141 - RNA, 19 nt, Homo sapiens
  misc_RNA (1)...(19): siRNA sense strand
cugaaacacaacaaagauu

SEQ ID NO: 2383142 - RNA, 19 nt, Homo sapiens
  misc_RNA (1)...(19): siRNA sense strand
ucaguagaacagaggagua

SEQ ID NO: 2383143 - RNA, 19 nt, Homo sapiens
  misc_RNA (1)...(19): siRNA sense strand
ggacaauuugaggagaaua

SEQ ID NO: 2383144 - RNA, 19 nt, Homo sapiens
  misc_RNA (1)...(19): siRNA sense strand
acaaagauuaucagagacu

SEQ ID NO: 2383145 - RNA, 19 nt, Homo sapiens
  misc_RNA (1)...(19): siRNA sense strand
ccagaagaaggcugauauu

SEQ ID NO: 2383146 - RNA, 19 nt, Homo sapiens
  misc_RNA (1)...(19): siRNA sense strand
uggaacagcuacucaucaa

SEQ ID NO: 2383147 - RNA, 19 nt, Homo sapiens
  misc_RNA (1)...(19): siRNA sense strand
acaaggagucaguagaaca

SEQ ID NO: 2383148 - RNA, 19 nt, Homo sapiens
  misc_RNA (1)...(19): siRNA sense strand
cuauguugccuuugaguga

SEQ ID NO: 2383149 - RNA, 19 nt, Homo sapiens
  misc_RNA (1)...(19): siRNA sense strand
cagaaaaggauaacauaga

SEQ ID NO: 2383150 - RNA, 19 nt, Homo sapiens
  misc_RNA (1)...(19): siRNA sense strand
aauugugagagaaggcaaa

SEQ ID NO: 2383151 - RNA, 19 nt, Homo sapiens
  misc_RNA (1)...(19): siRNA sense strand
gagagaaggcaaacagaac

SEQ ID NO: 2383152 - RNA, 19 nt, Homo sapiens
  misc_RNA (1)...(19): siRNA sense strand
gggagauagcagugccuca

SEQ ID NO: 2383153 - RNA, 19 nt, Homo sapiens
  misc_RNA (1)...(19): siRNA sense strand
ugagaaagcugaagggaca

SEQ ID NO: 2383154 - RNA, 19 nt, Homo sapiens
  misc_RNA (1)...(19): siRNA sense strand
agaucaagucuguggcuaa

SEQ ID NO: 2383155 - RNA, 19 nt, Homo sapiens
  misc_RNA (1)...(19): siRNA sense strand
cagaaucacugaaggguca

SEQ ID NO: 2383156 - RNA, 19 nt, Homo sapiens
  misc_RNA (1)...(19): siRNA sense strand
ccugaaccuuggagggaau

SEQ ID NO: 2383157 - RNA, 19 nt, Homo sapiens
  misc_RNA (1)...(19): siRNA sense strand
ccagaaaccaccauggcua

SEQ ID NO: 2383158 - RNA, 19 nt, Homo sapiens
  misc_RNA (1)...(19): siRNA sense strand
ggagccagcugaaggccua

SEQ ID NO: 2383159 - RNA, 19 nt, Homo sapiens
  misc_RNA (1)...(19): siRNA sense strand
agugaagaguacaguguca

SEQ ID NO: 2383160 - RNA, 19 nt, Homo sapiens
  misc_RNA (1)...(19): siRNA sense strand
aggaaguguaccucaauaa

SEQ ID NO: 2383161 - RNA, 19 nt, Homo sapiens
  misc_RNA (1)...(19): siRNA sense strand
ucacauaaggccaggcuca

SEQ ID NO: 2383162 - RNA, 19 nt, Homo sapiens
  misc_RNA (1)...(19): siRNA sense strand
agaccaggaagaagaguga

SEQ ID NO: 2383163 - RNA, 19 nt, Homo sapiens
  misc_RNA (1)...(19): siRNA sense strand
cuuggaagaccguguggua

SEQ ID NO: 2383164 - RNA, 19 nt, Homo sapiens
  misc_RNA (1)...(19): siRNA sense strand
cguggaaagcgauugagaa

SEQ ID NO: 2383165 - RNA, 19 nt, Homo sapiens
  misc_RNA (1)...(19): siRNA sense strand
ccgauauaccugugagaug

SEQ ID NO: 2383166 - RNA, 19 nt, Homo sapiens
  misc_RNA (1)...(19): siRNA sense strand
cggaacaggauucggcuga

SEQ ID NO: 2383167 - RNA, 19 nt, Homo sapiens
  misc_RNA (1)...(19): siRNA sense strand
gugugguaucugugggaga

SEQ ID NO: 2383168 - RNA, 19 nt, Homo sapiens
  misc_RNA (1)...(19): siRNA sense strand
ccuggaagaaagacaauga

SEQ ID NO: 2383169 - RNA, 19 nt, Homo sapiens
  misc_RNA (1)...(19): siRNA sense strand
ccaaugcagacauggagaa

SEQ ID NO: 2383170 - RNA, 19 nt, Homo sapiens
  misc_RNA (1)...(19): siRNA sense strand
ccuuugugaagaugaagaa

SEQ ID NO: 2383171 - RNA, 19 nt, Homo sapiens
  misc_RNA (1)...(19): siRNA sense strand
cacaaagagccguggaaag

SEQ ID NO: 2383172 - RNA, 19 nt, Homo sapiens
  misc_RNA (1)...(19): siRNA sense strand
ggagccuaaaccugaguua

SEQ ID NO: 2383173 - RNA, 19 nt, Homo sapiens
  misc_RNA (1)...(19): siRNA sense strand
gguaucugugggagaaaca

SEQ ID NO: 2383174 - RNA, 19 nt, Homo sapiens
  misc_RNA (1)...(19): siRNA sense strand
ugggagugaccaagagcau

SEQ ID NO: 2383175 - RNA, 19 nt, Homo sapiens
  misc_RNA (1)...(19): siRNA sense strand
augggcacauugagagcaa

SEQ ID NO: 2383176 - RNA, 19 nt, Homo sapiens
  misc_RNA (1)...(19): siRNA sense strand
ccacaucaccagugcagca

SEQ ID NO: 2383177 - RNA, 19 nt, Homo sapiens
  misc_RNA (1)...(19): siRNA sense strand
agccuaaaccugaguuaca

SEQ ID NO: 2383178 - RNA, 19 nt, Homo sapiens
  misc_RNA (1)...(19): siRNA sense strand
cagagaguuucgugugcga

SEQ ID NO: 2383179 - RNA, 19 nt, Homo sapiens
  misc_RNA (1)...(19): siRNA sense strand
acagagugccacagagaca

SEQ ID NO: 2383180 - RNA, 19 nt, Homo sapiens
  misc_RNA (1)...(19): siRNA sense strand
gcaaaguacaugaaggaga

SEQ ID NO: 2383181 - RNA, 19 nt, Homo sapiens
  misc_RNA (1)...(19): siRNA sense strand
aagaggaagaggagggcaa

SEQ ID NO: 2383182 - RNA, 19 nt, Homo sapiens
  misc_RNA (1)...(19): siRNA sense strand
aggaagaggaagaggagga

SEQ ID NO: 2383183 - RNA, 19 nt, Homo sapiens
  misc_RNA (1)...(19): siRNA sense strand
aggaggaggaagaggaaga

SEQ ID NO: 2383184 - RNA, 19 nt, Homo sapiens
  misc_RNA (1)...(19): siRNA sense strand
caguaaacuucgagagcac

SEQ ID NO: 2383185 - RNA, 19 nt, Homo sapiens
  misc_RNA (1)...(19): siRNA sense strand
gggaggaggaggaagagga

SEQ ID NO: 2383186 - RNA, 19 nt, Homo sapiens
  misc_RNA (1)...(19): siRNA sense strand
aggaauagcugaggagcca

SEQ ID NO: 2383187 - RNA, 19 nt, Homo sapiens
  misc_RNA (1)...(19): siRNA sense strand
aggaacaugaagauggcua

SEQ ID NO: 2383188 - RNA, 19 nt, Homo sapiens
  misc_RNA (1)...(19): siRNA sense strand
aauacgaagcagucggcaa

SEQ ID NO: 2383189 - RNA, 19 nt, Homo sapiens
  misc_RNA (1)...(19): siRNA sense strand
cagccauacccaggagaaa

SEQ ID NO: 2383190 - RNA, 19 nt, Homo sapiens
  misc_RNA (1)...(19): siRNA sense strand
guaaggaagaggaagagga

SEQ ID NO: 2383191 - RNA, 19 nt, Homo sapiens
  misc_RNA (1)...(19): siRNA sense strand
aagcagucggcaaggacaa

SEQ ID NO: 2383192 - RNA, 19 nt, Homo sapiens
  misc_RNA (1)...(19): siRNA sense strand
gaagaggagggcaagggua

SEQ ID NO: 2383193 - RNA, 19 nt, Homo sapiens
  misc_RNA (1)...(19): siRNA sense strand
cugaggagccagagaucca

SEQ ID NO: 2383194 - RNA, 19 nt, Homo sapiens
  misc_RNA (1)...(19): siRNA sense strand
gugggagcacugugagaau

SEQ ID NO: 2383195 - RNA, 19 nt, Homo sapiens
  misc_RNA (1)...(19): siRNA sense strand
caaggguagcgaagggaca

SEQ ID NO: 2383196 - RNA, 19 nt, Homo sapiens
  misc_RNA (1)...(19): siRNA sense strand
gaaucagaccaaugcccaa

SEQ ID NO: 2383197 - RNA, 19 nt, Homo sapiens
  misc_RNA (1)...(19): siRNA sense strand
ggaacgucgcugaacgaga

SEQ ID NO: 2383198 - RNA, 19 nt, Homo sapiens
  misc_RNA (1)...(19): siRNA sense strand
ugaaggagacucugagcca

SEQ ID NO: 2383199 - RNA, 19 nt, Homo sapiens
  misc_RNA (1)...(19): siRNA sense strand
aggaggaagaggaagagga

SEQ ID NO: 2383200 - RNA, 19 nt, Homo sapiens
  misc_RNA (1)...(19): siRNA sense strand
gcggcaaccacaagaggga

SEQ ID NO: 2383201 - RNA, 19 nt, Homo sapiens
  misc_RNA (1)...(19): siRNA sense strand
ccucauuggaucagcagca

SEQ ID NO: 2383202 - RNA, 19 nt, Homo sapiens
  misc_RNA (1)...(19): siRNA sense strand
caaaguacaugaaggagac

SEQ ID NO: 2383203 - RNA, 19 nt, Homo sapiens
  misc_RNA (1)...(19): siRNA sense strand
aggacguaaggaagaggaa

SEQ ID NO: 2383204 - RNA, 19 nt, Homo sapiens
  misc_RNA (1)...(19): siRNA sense strand
gcaaaguacaugaaggaga

SEQ ID NO: 2383205 - RNA, 19 nt, Homo sapiens
  misc_RNA (1)...(19): siRNA sense strand
aagaggaagaggagggcaa

SEQ ID NO: 2383206 - RNA, 19 nt, Homo sapiens
  misc_RNA (1)...(19): siRNA sense strand
aggaagaggaagaggagga

SEQ ID NO: 2383207 - RNA, 19 nt, Homo sapiens
  misc_RNA (1)...(19): siRNA sense strand
aggaggaggaagaggaaga

SEQ ID NO: 2383208 - RNA, 19 nt, Homo sapiens
  misc_RNA (1)...(19): siRNA sense strand
caguaaacuucgagagcac

SEQ ID NO: 2383209 - RNA, 19 nt, Homo sapiens
  misc_RNA (1)...(19): siRNA sense strand
gggaggaggaggaagagga

SEQ ID NO: 2383210 - RNA, 19 nt, Homo sapiens
  misc_RNA (1)...(19): siRNA sense strand
aggaauagcugaggagcca

SEQ ID NO: 2383211 - RNA, 19 nt, Homo sapiens
  misc_RNA (1)...(19): siRNA sense strand
aggaacaugaagauggcua

SEQ ID NO: 2383212 - RNA, 19 nt, Homo sapiens
  misc_RNA (1)...(19): siRNA sense strand
aauacgaagcagucggcaa

SEQ ID NO: 2383213 - RNA, 19 nt, Homo sapiens
  misc_RNA (1)...(19): siRNA sense strand
cagccauacccaggagaaa

SEQ ID NO: 2383214 - RNA, 19 nt, Homo sapiens
  misc_RNA (1)...(19): siRNA sense strand
guaaggaagaggaagagga

SEQ ID NO: 2383215 - RNA, 19 nt, Homo sapiens
  misc_RNA (1)...(19): siRNA sense strand
aagcagucggcaaggacaa

SEQ ID NO: 2383216 - RNA, 19 nt, Homo sapiens
  misc_RNA (1)...(19): siRNA sense strand
gaagaggagggcaagggua

SEQ ID NO: 2383217 - RNA, 19 nt, Homo sapiens
  misc_RNA (1)...(19): siRNA sense strand
cugaggagccagagaucca

SEQ ID NO: 2383218 - RNA, 19 nt, Homo sapiens
  misc_RNA (1)...(19): siRNA sense strand
gugggagcacugugagaau

SEQ ID NO: 2383219 - RNA, 19 nt, Homo sapiens
  misc_RNA (1)...(19): siRNA sense strand
caaggguagcgaagggaca

SEQ ID NO: 2383220 - RNA, 19 nt, Homo sapiens
  misc_RNA (1)...(19): siRNA sense strand
gaaucagaccaaugcccaa

SEQ ID NO: 2383221 - RNA, 19 nt, Homo sapiens
  misc_RNA (1)...(19): siRNA sense strand
ggaacgucgcugaacgaga

SEQ ID NO: 2383222 - RNA, 19 nt, Homo sapiens
  misc_RNA (1)...(19): siRNA sense strand
ugaaggagacucugagcca

SEQ ID NO: 2383223 - RNA, 19 nt, Homo sapiens
  misc_RNA (1)...(19): siRNA sense strand
aggaggaagaggaagagga

SEQ ID NO: 2383224 - RNA, 19 nt, Homo sapiens
  misc_RNA (1)...(19): siRNA sense strand
gcggcaaccacaagaggga

SEQ ID NO: 2383225 - RNA, 19 nt, Homo sapiens
  misc_RNA (1)...(19): siRNA sense strand
ccucauuggaucagcagca

SEQ ID NO: 2383226 - RNA, 19 nt, Homo sapiens
  misc_RNA (1)...(19): siRNA sense strand
caaaguacaugaaggagac

SEQ ID NO: 2383227 - RNA, 19 nt, Homo sapiens
  misc_RNA (1)...(19): siRNA sense strand
aggacguaaggaagaggaa

SEQ ID NO: 2383228 - RNA, 19 nt, Homo sapiens
  misc_RNA (1)...(19): siRNA sense strand
ugauaaugaaacugggaaa

SEQ ID NO: 2383229 - RNA, 19 nt, Homo sapiens
  misc_RNA (1)...(19): siRNA sense strand
agugaaacucucugggaaa

SEQ ID NO: 2383230 - RNA, 19 nt, Homo sapiens
  misc_RNA (1)...(19): siRNA sense strand
acauauggaagaagagcaa

SEQ ID NO: 2383231 - RNA, 19 nt, Homo sapiens
  misc_RNA (1)...(19): siRNA sense strand
cagugaaacucucugggaa

SEQ ID NO: 2383232 - RNA, 19 nt, Homo sapiens
  misc_RNA (1)...(19): siRNA sense strand
ggaaauugcaaaagcugaa

SEQ ID NO: 2383233 - RNA, 19 nt, Homo sapiens
  misc_RNA (1)...(19): siRNA sense strand
caaaagcugaaguggaaaa

SEQ ID NO: 2383234 - RNA, 19 nt, Homo sapiens
  misc_RNA (1)...(19): siRNA sense strand
cugaaaugagacagaagau

SEQ ID NO: 2383235 - RNA, 19 nt, Homo sapiens
  misc_RNA (1)...(19): siRNA sense strand
aggugauggagcugaaauu

SEQ ID NO: 2383236 - RNA, 19 nt, Homo sapiens
  misc_RNA (1)...(19): siRNA sense strand
auauggaagaagagcaaaa

SEQ ID NO: 2383237 - RNA, 19 nt, Homo sapiens
  misc_RNA (1)...(19): siRNA sense strand
ugacagagaugaaccacca

SEQ ID NO: 2383238 - RNA, 19 nt, Homo sapiens
  misc_RNA (1)...(19): siRNA sense strand
aauaauaugccgaaggauc

SEQ ID NO: 2383239 - RNA, 19 nt, Homo sapiens
  misc_RNA (1)...(19): siRNA sense strand
aaugaaacugggaaagaca

SEQ ID NO: 2383240 - RNA, 19 nt, Homo sapiens
  misc_RNA (1)...(19): siRNA sense strand
cugggaaagacaaaugcua

SEQ ID NO: 2383241 - RNA, 19 nt, Homo sapiens
  misc_RNA (1)...(19): siRNA sense strand
ugauaaugaaacugggaaa

SEQ ID NO: 2383242 - RNA, 19 nt, Homo sapiens
  misc_RNA (1)...(19): siRNA sense strand
agugaaacucucugggaaa

SEQ ID NO: 2383243 - RNA, 19 nt, Homo sapiens
  misc_RNA (1)...(19): siRNA sense strand
acauauggaagaagagcaa

SEQ ID NO: 2383244 - RNA, 19 nt, Homo sapiens
  misc_RNA (1)...(19): siRNA sense strand
cagugaaacucucugggaa

SEQ ID NO: 2383245 - RNA, 19 nt, Homo sapiens
  misc_RNA (1)...(19): siRNA sense strand
ggaaauugcaaaagcugaa

SEQ ID NO: 2383246 - RNA, 19 nt, Homo sapiens
  misc_RNA (1)...(19): siRNA sense strand
caaaagcugaaguggaaaa

SEQ ID NO: 2383247 - RNA, 19 nt, Homo sapiens
  misc_RNA (1)...(19): siRNA sense strand
cugaaaugagacagaagau

SEQ ID NO: 2383248 - RNA, 19 nt, Homo sapiens
  misc_RNA (1)...(19): siRNA sense strand
aggugauggagcugaaauu

SEQ ID NO: 2383249 - RNA, 19 nt, Homo sapiens
  misc_RNA (1)...(19): siRNA sense strand
auauggaagaagagcaaaa

SEQ ID NO: 2383250 - RNA, 19 nt, Homo sapiens
  misc_RNA (1)...(19): siRNA sense strand
ugacagagaugaaccacca

SEQ ID NO: 2383251 - RNA, 19 nt, Homo sapiens
  misc_RNA (1)...(19): siRNA sense strand
aauaauaugccgaaggauc

SEQ ID NO: 2383252 - RNA, 19 nt, Homo sapiens
  misc_RNA (1)...(19): siRNA sense strand
aaugaaacugggaaagaca

SEQ ID NO: 2383253 - RNA, 19 nt, Homo sapiens
  misc_RNA (1)...(19): siRNA sense strand
cugggaaagacaaaugcua

SEQ ID NO: 2383254 - RNA, 19 nt, Homo sapiens
  misc_RNA (1)...(19): siRNA sense strand
uggacgaaccugagggcaa

SEQ ID NO: 2383255 - RNA, 19 nt, Homo sapiens
  misc_RNA (1)...(19): siRNA sense strand
aggaagaagaggaggagga

SEQ ID NO: 2383256 - RNA, 19 nt, Homo sapiens
  misc_RNA (1)...(19): siRNA sense strand
agauagacgucaucggcaa

SEQ ID NO: 2383257 - RNA, 19 nt, Homo sapiens
  misc_RNA (1)...(19): siRNA sense strand
aagaagaggaggaggagga

SEQ ID NO: 2383258 - RNA, 19 nt, Homo sapiens
  misc_RNA (1)...(19): siRNA sense strand
gcagggaacacaaaggcaa

SEQ ID NO: 2383259 - RNA, 19 nt, Homo sapiens
  misc_RNA (1)...(19): siRNA sense strand
ugacaaugacgcagcccaa

SEQ ID NO: 2383260 - RNA, 19 nt, Homo sapiens
  misc_RNA (1)...(19): siRNA sense strand
aggaggaagaagaggagga

SEQ ID NO: 2383261 - RNA, 19 nt, Homo sapiens
  misc_RNA (1)...(19): siRNA sense strand
gagaggaggaagaagagga

SEQ ID NO: 2383262 - RNA, 19 nt, Homo sapiens
  misc_RNA (1)...(19): siRNA sense strand
cccgaggagaggaggaaga

SEQ ID NO: 2383263 - RNA, 19 nt, Homo sapiens
  misc_RNA (1)...(19): siRNA sense strand
aacacaaaggcaagaagaa

SEQ ID NO: 2383264 - RNA, 19 nt, Homo sapiens
  misc_RNA (1)...(19): siRNA sense strand
cccaaaggacauugcauca

SEQ ID NO: 2383265 - RNA, 19 nt, Homo sapiens
  misc_RNA (1)...(19): siRNA sense strand
augacaacgucccaggcaa

SEQ ID NO: 2383266 - RNA, 19 nt, Homo sapiens
  misc_RNA (1)...(19): siRNA sense strand
ggaagaaacucaagggcaa

SEQ ID NO: 2383267 - RNA, 19 nt, Homo sapiens
  misc_RNA (1)...(19): siRNA sense strand
ggaaacggcuccagcggaa

SEQ ID NO: 2383268 - RNA, 19 nt, Homo sapiens
  misc_RNA (1)...(19): siRNA sense strand
ccaaugaacuucugaacau

SEQ ID NO: 2383269 - RNA, 19 nt, Homo sapiens
  misc_RNA (1)...(19): siRNA sense strand
acgaagaccaagaggaaga

SEQ ID NO: 2383270 - RNA, 19 nt, Homo sapiens
  misc_RNA (1)...(19): siRNA sense strand
cugaacaugguguggaaua

SEQ ID NO: 2383271 - RNA, 19 nt, Homo sapiens
  misc_RNA (1)...(19): siRNA sense strand
ucgacuuaccaaagagcaa

SEQ ID NO: 2383272 - RNA, 19 nt, Homo sapiens
  misc_RNA (1)...(19): siRNA sense strand
gcggaaucgacuuaccaaa

SEQ ID NO: 2383273 - RNA, 19 nt, Homo sapiens
  misc_RNA (1)...(19): siRNA sense strand
aggaagaaacucaagggca

SEQ ID NO: 2383274 - RNA, 19 nt, Homo sapiens
  misc_RNA (1)...(19): siRNA sense strand
gugaggaaauccagcagca

SEQ ID NO: 2383275 - RNA, 19 nt, Homo sapiens
  misc_RNA (1)...(19): siRNA sense strand
uguggaauagugaggaaau

SEQ ID NO: 2383276 - RNA, 19 nt, Homo sapiens
  misc_RNA (1)...(19): siRNA sense strand
agaccaagaggaagaaacu

SEQ ID NO: 2383277 - RNA, 19 nt, Homo sapiens
  misc_RNA (1)...(19): siRNA sense strand
guaugaugucugugccauu

SEQ ID NO: 2383278 - RNA, 19 nt, Homo sapiens
  misc_RNA (1)...(19): siRNA sense strand
gaggaaauccagcagcaga

SEQ ID NO: 2383279 - RNA, 19 nt, Homo sapiens
  misc_RNA (1)...(19): siRNA sense strand
augacuaucagaagggaga

SEQ ID NO: 2383280 - RNA, 19 nt, Homo sapiens
  misc_RNA (1)...(19): siRNA sense strand
aggaaauccagcagcagau

SEQ ID NO: 2383281 - RNA, 19 nt, Homo sapiens
  misc_RNA (1)...(19): siRNA sense strand
gggacgaagaccaagagga

SEQ ID NO: 2383282 - RNA, 19 nt, Homo sapiens
  misc_RNA (1)...(19): siRNA sense strand
aggaaauggucaaggugaa

SEQ ID NO: 2383283 - RNA, 19 nt, Homo sapiens
  misc_RNA (1)...(19): siRNA sense strand
ugacauagugagagagaga

SEQ ID NO: 2383284 - RNA, 19 nt, Homo sapiens
  misc_RNA (1)...(19): siRNA sense strand
agcaagaacacgagagcaa

SEQ ID NO: 2383285 - RNA, 19 nt, Homo sapiens
  misc_RNA (1)...(19): siRNA sense strand
uggcuauagucuugggauu

SEQ ID NO: 2383286 - RNA, 19 nt, Homo sapiens
  misc_RNA (1)...(19): siRNA sense strand
cggucauugucgauggaua

SEQ ID NO: 2383287 - RNA, 19 nt, Homo sapiens
  misc_RNA (1)...(19): siRNA sense strand
aagaguuggccgaaagaua

SEQ ID NO: 2383288 - RNA, 19 nt, Homo sapiens
  misc_RNA (1)...(19): siRNA sense strand
agugagagagagagaaauu

SEQ ID NO: 2383289 - RNA, 19 nt, Homo sapiens
  misc_RNA (1)...(19): siRNA sense strand
aaguagaaacgaagcgcaa

SEQ ID NO: 2383290 - RNA, 19 nt, Homo sapiens
  misc_RNA (1)...(19): siRNA sense strand
uggucaaggugaagauaga

SEQ ID NO: 2383291 - RNA, 19 nt, Homo sapiens
  misc_RNA (1)...(19): siRNA sense strand
ugauugacauagugagaga

SEQ ID NO: 2383292 - RNA, 19 nt, Homo sapiens
  misc_RNA (1)...(19): siRNA sense strand
auagugagagagagagaaa

SEQ ID NO: 2383293 - RNA, 19 nt, Homo sapiens
  misc_RNA (1)...(19): siRNA sense strand
aaacgaagcgcaaggaaaa

SEQ ID NO: 2383294 - RNA, 19 nt, Homo sapiens
  misc_RNA (1)...(19): siRNA sense strand
agagcaagugugaguauaa

SEQ ID NO: 2383295 - RNA, 19 nt, Homo sapiens
  misc_RNA (1)...(19): siRNA sense strand
gagcagacucccagcaaaa

SEQ ID NO: 2383296 - RNA, 19 nt, Homo sapiens
  misc_RNA (1)...(19): siRNA sense strand
acauagugagagagagaga

SEQ ID NO: 2383297 - RNA, 19 nt, Homo sapiens
  misc_RNA (1)...(19): siRNA sense strand
cagugaugcaccagggaau

SEQ ID NO: 2383298 - RNA, 19 nt, Homo sapiens
  misc_RNA (1)...(19): siRNA sense strand
aaacagaagaugaccaaaa

SEQ ID NO: 2383299 - RNA, 19 nt, Homo sapiens
  misc_RNA (1)...(19): siRNA sense strand
aguuaaaggugaaugagca

SEQ ID NO: 2383300 - RNA, 19 nt, Homo sapiens
  misc_RNA (1)...(19): siRNA sense strand
ccaacaaaguaaaccacau

SEQ ID NO: 2383301 - RNA, 19 nt, Homo sapiens
  misc_RNA (1)...(19): siRNA sense strand
aagaaagcugauugacaua

SEQ ID NO: 2383302 - RNA, 19 nt, Homo sapiens
  misc_RNA (1)...(19): siRNA sense strand
uggaggaggcugaagaaga

SEQ ID NO: 2383303 - RNA, 19 nt, Homo sapiens
  misc_RNA (1)...(19): siRNA sense strand
gcugauugacauagugaga

SEQ ID NO: 2383304 - RNA, 19 nt, Homo sapiens
  misc_RNA (1)...(19): siRNA sense strand
aagauaguucugugguaua

SEQ ID NO: 2383305 - RNA, 19 nt, Homo sapiens
  misc_RNA (1)...(19): siRNA sense strand
ugauaaaccaggugugagu

SEQ ID NO: 2383306 - RNA, 19 nt, Homo sapiens
  misc_RNA (1)...(19): siRNA sense strand
agaaguuaaaggugaauga

SEQ ID NO: 2383307 - RNA, 19 nt, Homo sapiens
  misc_RNA (1)...(19): siRNA sense strand
agcaagucaucaagaggaa

SEQ ID NO: 2383308 - RNA, 19 nt, Homo sapiens
  misc_RNA (1)...(19): siRNA sense strand
gucaaggugaagauagaaa

SEQ ID NO: 2383309 - RNA, 19 nt, Homo sapiens
  misc_RNA (1)...(19): siRNA sense strand
uugucaaaguagaaacgaa

SEQ ID NO: 2383310 - RNA, 19 nt, Homo sapiens
  misc_RNA (1)...(19): siRNA sense strand
auaagcagcuggagcguca

SEQ ID NO: 2383311 - RNA, 19 nt, Homo sapiens
  misc_RNA (1)...(19): siRNA sense strand
cgagagcaagugugaguau

SEQ ID NO: 2383312 - RNA, 19 nt, Homo sapiens
  misc_RNA (1)...(19): siRNA sense strand
acgacaacguguucaguga

SEQ ID NO: 2383313 - RNA, 19 nt, Homo sapiens
  misc_RNA (1)...(19): siRNA sense strand
agauguucacggugcauaa

SEQ ID NO: 2383314 - RNA, 19 nt, Homo sapiens
  misc_RNA (1)...(19): siRNA sense strand
guuuguagaagaugaugaa

SEQ ID NO: 2383315 - RNA, 19 nt, Homo sapiens
  misc_RNA (1)...(19): siRNA sense strand
agguugaaguccauaauca

SEQ ID NO: 2383316 - RNA, 19 nt, Homo sapiens
  misc_RNA (1)...(19): siRNA sense strand
gggacgagaccaaacaaaa

SEQ ID NO: 2383317 - RNA, 19 nt, Homo sapiens
  misc_RNA (1)...(19): siRNA sense strand
gcauaaagacugagcccag

SEQ ID NO: 2383318 - RNA, 19 nt, Homo sapiens
  misc_RNA (1)...(19): siRNA sense strand
aagaggagccuguggagga

SEQ ID NO: 2383319 - RNA, 19 nt, Homo sapiens
  misc_RNA (1)...(19): siRNA sense strand
cuucagaggaaucggcaca

SEQ ID NO: 2383320 - RNA, 19 nt, Homo sapiens
  misc_RNA (1)...(19): siRNA sense strand
gcuucugugcucugugaaa

SEQ ID NO: 2383321 - RNA, 19 nt, Homo sapiens
  misc_RNA (1)...(19): siRNA sense strand
gaaaacagaagaugaccaa

SEQ ID NO: 2383322 - RNA, 19 nt, Homo sapiens
  misc_RNA (1)...(19): siRNA sense strand
acugaaaauccaagucaaa

SEQ ID NO: 2383323 - RNA, 19 nt, Homo sapiens
  misc_RNA (1)...(19): siRNA sense strand
gugacugaggugcgcauaa

SEQ ID NO: 2383324 - RNA, 19 nt, Homo sapiens
  misc_RNA (1)...(19): siRNA sense strand
auaaagacgaauuugguga

SEQ ID NO: 2383325 - RNA, 19 nt, Homo sapiens
  misc_RNA (1)...(19): siRNA sense strand
guccauaaucagaacaaca

SEQ ID NO: 2383326 - RNA, 19 nt, Homo sapiens
  misc_RNA (1)...(19): siRNA sense strand
cuaacaaaggaaaugguca

SEQ ID NO: 2383327 - RNA, 19 nt, Homo sapiens
  misc_RNA (1)...(19): siRNA sense strand
ggucauugucgauggauag

SEQ ID NO: 2383328 - RNA, 19 nt, Homo sapiens
  misc_RNA (1)...(19): siRNA sense strand
cuauucaaaguuaggcuua

SEQ ID NO: 2383329 - RNA, 19 nt, Homo sapiens
  misc_RNA (1)...(19): siRNA sense strand
cuuuagugcuucucaguca

SEQ ID NO: 2383330 - RNA, 19 nt, Homo sapiens
  misc_RNA (1)...(19): siRNA sense strand
uuaagaaggcccugaucau

SEQ ID NO: 2383331 - RNA, 19 nt, Homo sapiens
  misc_RNA (1)...(19): siRNA sense strand
ggcuauagucuugggauuu

SEQ ID NO: 2383332 - RNA, 19 nt, Homo sapiens
  misc_RNA (1)...(19): siRNA sense strand
ugaaaagaguuggccgaaa

SEQ ID NO: 2383333 - RNA, 19 nt, Homo sapiens
  misc_RNA (1)...(19): siRNA sense strand
caacaaagcuuuucgcacu

SEQ ID NO: 2383334 - RNA, 19 nt, Homo sapiens
  misc_RNA (1)...(19): siRNA sense strand
aaacuuugccacaggacau

SEQ ID NO: 2383335 - RNA, 19 nt, Homo sapiens
  misc_RNA (1)...(19): siRNA sense strand
aagcacagcaagucaucaa

SEQ ID NO: 2383336 - RNA, 19 nt, Homo sapiens
  misc_RNA (1)...(19): siRNA sense strand
ugaccugccucgagugcau

SEQ ID NO: 2383337 - RNA, 19 nt, Homo sapiens
  misc_RNA (1)...(19): siRNA sense strand
ggaagauguucacggugca

SEQ ID NO: 2383338 - RNA, 19 nt, Homo sapiens
  misc_RNA (1)...(19): siRNA sense strand
ucaguuuggugaaaagaaa

SEQ ID NO: 2383339 - RNA, 19 nt, Homo sapiens
  misc_RNA (1)...(19): siRNA sense strand
ccgacgagucaaaggcauu

SEQ ID NO: 2383340 - RNA, 19 nt, Homo sapiens
  misc_RNA (1)...(19): siRNA sense strand
guagcaaggaagaggagga

SEQ ID NO: 2383341 - RNA, 19 nt, Homo sapiens
  misc_RNA (1)...(19): siRNA sense strand
aggaagaggaggagaaagc

SEQ ID NO: 2383342 - RNA, 19 nt, Homo sapiens
  misc_RNA (1)...(19): siRNA sense strand
uaacaaagguacuaagcac

SEQ ID NO: 2383343 - RNA, 19 nt, Homo sapiens
  misc_RNA (1)...(19): siRNA sense strand
ucugcaaugucaaggucaa

SEQ ID NO: 2383344 - RNA, 19 nt, Homo sapiens
  misc_RNA (1)...(19): siRNA sense strand
ugucccagcuugaggcaca

SEQ ID NO: 2383345 - RNA, 19 nt, Homo sapiens
  misc_RNA (1)...(19): siRNA sense strand
gcuucaauucucagagcca

SEQ ID NO: 2383346 - RNA, 19 nt, Homo sapiens
  misc_RNA (1)...(19): siRNA sense strand
gaagaggaggagaaagcca

SEQ ID NO: 2383347 - RNA, 19 nt, Homo sapiens
  misc_RNA (1)...(19): siRNA sense strand
aagaggaggagaaagccaa

SEQ ID NO: 2383348 - RNA, 19 nt, Homo sapiens
  misc_RNA (1)...(19): siRNA sense strand
ggguguaaccaagggugaa

SEQ ID NO: 2383349 - RNA, 19 nt, Homo sapiens
  misc_RNA (1)...(19): siRNA sense strand
aggcugaggcgcacuacaa

SEQ ID NO: 2383350 - RNA, 19 nt, Homo sapiens
  misc_RNA (1)...(19): siRNA sense strand
cccaggauccccagagaaa

SEQ ID NO: 2383351 - RNA, 19 nt, Homo sapiens
  misc_RNA (1)...(19): siRNA sense strand
gagacuggucaggguguaa

SEQ ID NO: 2383352 - RNA, 19 nt, Homo sapiens
  misc_RNA (1)...(19): siRNA sense strand
ccuucaacuuccagggcaa

SEQ ID NO: 2383353 - RNA, 19 nt, Homo sapiens
  misc_RNA (1)...(19): siRNA sense strand
aggagaaggaggaggagga

SEQ ID NO: 2383354 - RNA, 19 nt, Homo sapiens
  misc_RNA (1)...(19): siRNA sense strand
ugaaggagaaggaggagga

SEQ ID NO: 2383355 - RNA, 19 nt, Homo sapiens
  misc_RNA (1)...(19): siRNA sense strand
aggccaagcaccugcguuu

SEQ ID NO: 2383356 - RNA, 19 nt, Homo sapiens
  misc_RNA (1)...(19): siRNA sense strand
cgcugaacgaggaggguca

SEQ ID NO: 2383357 - RNA, 19 nt, Homo sapiens
  misc_RNA (1)...(19): siRNA sense strand
ucgaagugaaggagaagga

SEQ ID NO: 2383358 - RNA, 19 nt, Homo sapiens
  misc_RNA (1)...(19): siRNA sense strand
cagggauggugcagaggga

SEQ ID NO: 2383359 - RNA, 19 nt, Homo sapiens
  misc_RNA (1)...(19): siRNA sense strand
aagugaaggagaaggagga

SEQ ID NO: 2383360 - RNA, 19 nt, Homo sapiens
  misc_RNA (1)...(19): siRNA sense strand
gggauggugcagagggaag

SEQ ID NO: 2383361 - RNA, 19 nt, Homo sapiens
  misc_RNA (1)...(19): siRNA sense strand
aguauaucauggagacagu

SEQ ID NO: 2383362 - RNA, 19 nt, Homo sapiens
  misc_RNA (1)...(19): siRNA sense strand
cguuugugguuaaggugga

SEQ ID NO: 2383363 - RNA, 19 nt, Homo sapiens
  misc_RNA (1)...(19): siRNA sense strand
ggaaacagccacagggucc

SEQ ID NO: 2383364 - RNA, 19 nt, Homo sapiens
  misc_RNA (1)...(19): siRNA sense strand
ggauaauaaaugagagaca

SEQ ID NO: 2383365 - RNA, 19 nt, Homo sapiens
  misc_RNA (1)...(19): siRNA sense strand
aaugaaguauggaggacaa

SEQ ID NO: 2383366 - RNA, 19 nt, Homo sapiens
  misc_RNA (1)...(19): siRNA sense strand
caggauaauaaaugagaga

SEQ ID NO: 2383367 - RNA, 19 nt, Homo sapiens
  misc_RNA (1)...(19): siRNA sense strand
ggacaaaagugaagaggcu

SEQ ID NO: 2383368 - RNA, 19 nt, Homo sapiens
  misc_RNA (1)...(19): siRNA sense strand
augaagaaagccauggaaa

SEQ ID NO: 2383369 - RNA, 19 nt, Homo sapiens
  misc_RNA (1)...(19): siRNA sense strand
aggaugugguagauggaau

SEQ ID NO: 2383370 - RNA, 19 nt, Homo sapiens
  misc_RNA (1)...(19): siRNA sense strand
cugcagaggauaaaaguua

SEQ ID NO: 2383371 - RNA, 19 nt, Homo sapiens
  misc_RNA (1)...(19): siRNA sense strand
ggaauauaugaacaggaaa

SEQ ID NO: 2383372 - RNA, 19 nt, Homo sapiens
  misc_RNA (1)...(19): siRNA sense strand
agauuauguuccaggcauu

SEQ ID NO: 2383373 - RNA, 19 nt, Homo sapiens
  misc_RNA (1)...(19): siRNA sense strand
caaaaguggcagaguguau

SEQ ID NO: 2383374 - RNA, 19 nt, Homo sapiens
  misc_RNA (1)...(19): siRNA sense strand
ccaccgaaccugagccaga

SEQ ID NO: 2383375 - RNA, 19 nt, Homo sapiens
  misc_RNA (1)...(19): siRNA sense strand
gcagauauugagaguccaa

SEQ ID NO: 2383376 - RNA, 19 nt, Homo sapiens
  misc_RNA (1)...(19): siRNA sense strand
ccagaaaaugauagaauga

SEQ ID NO: 2383377 - RNA, 19 nt, Homo sapiens
  misc_RNA (1)...(19): siRNA sense strand
ucucaggagcacuuggaaa

SEQ ID NO: 2383378 - RNA, 19 nt, Homo sapiens
  misc_RNA (1)...(19): siRNA sense strand
gggagaaauauaaaaggaa

SEQ ID NO: 2383379 - RNA, 19 nt, Homo sapiens
  misc_RNA (1)...(19): siRNA sense strand
ucuucaggagagagauaaa

SEQ ID NO: 2383380 - RNA, 19 nt, Homo sapiens
  misc_RNA (1)...(19): siRNA sense strand
cugaggucuuugaggccaa

SEQ ID NO: 2383381 - RNA, 19 nt, Homo sapiens
  misc_RNA (1)...(19): siRNA sense strand
aggagcacuuggaaagauu

SEQ ID NO: 2383382 - RNA, 19 nt, Homo sapiens
  misc_RNA (1)...(19): siRNA sense strand
ggacaaauguuggggacca

SEQ ID NO: 2383383 - RNA, 19 nt, Homo sapiens
  misc_RNA (1)...(19): siRNA sense strand
cuuuggauggagagaguau

SEQ ID NO: 2383384 - RNA, 19 nt, Homo sapiens
  misc_RNA (1)...(19): siRNA sense strand
auucuucaggagagagaua

SEQ ID NO: 2383385 - RNA, 19 nt, Homo sapiens
  misc_RNA (1)...(19): siRNA sense strand
gcuuagacaaagucauaga

SEQ ID NO: 2383386 - RNA, 19 nt, Homo sapiens
  misc_RNA (1)...(19): siRNA sense strand
uggcagaucaaaaggacaa

SEQ ID NO: 2383387 - RNA, 19 nt, Homo sapiens
  misc_RNA (1)...(19): siRNA sense strand
gagaaugaaguauggagga

SEQ ID NO: 2383388 - RNA, 19 nt, Homo sapiens
  misc_RNA (1)...(19): siRNA sense strand
ccaugaacguguaugaaac

SEQ ID NO: 2383389 - RNA, 19 nt, Homo sapiens
  misc_RNA (1)...(19): siRNA sense strand
cuguuucugcagaggauaa

SEQ ID NO: 2383390 - RNA, 19 nt, Homo sapiens
  misc_RNA (1)...(19): siRNA sense strand
ggaccacuuuggauggaga

SEQ ID NO: 2383391 - RNA, 19 nt, Homo sapiens
  misc_RNA (1)...(19): siRNA sense strand
ucuuugaggccaauauuaa

SEQ ID NO: 2383392 - RNA, 19 nt, Homo sapiens
  misc_RNA (1)...(19): siRNA sense strand
gugccugaguuuaaauaca

SEQ ID NO: 2383393 - RNA, 19 nt, Homo sapiens
  misc_RNA (1)...(19): siRNA sense strand
ggauaauuucuuugagccu

SEQ ID NO: 2383394 - RNA, 19 nt, Homo sapiens
  misc_RNA (1)...(19): siRNA sense strand
ccauugaagacuuguuuua

SEQ ID NO: 2383395 - RNA, 19 nt, Homo sapiens
  misc_RNA (1)...(19): siRNA sense strand
ggacaagaauuuugggcag

SEQ ID NO: 2383396 - RNA, 19 nt, Homo sapiens
  misc_RNA (1)...(19): siRNA sense strand
gaucagaaaagauugggaa

SEQ ID NO: 2383397 - RNA, 19 nt, Homo sapiens
  misc_RNA (1)...(19): siRNA sense strand
guguaugaaacaacugaau

SEQ ID NO: 2383398 - RNA, 19 nt, Homo sapiens
  misc_RNA (1)...(19): siRNA sense strand
ucaccaagagaacggaauu

SEQ ID NO: 2383399 - RNA, 19 nt, Homo sapiens
  misc_RNA (1)...(19): siRNA sense strand
uguauuuauggcagggauu

SEQ ID NO: 2383400 - RNA, 19 nt, Homo sapiens
  misc_RNA (1)...(19): siRNA sense strand
ccagaguacagaugagaac

SEQ ID NO: 2383401 - RNA, 19 nt, Homo sapiens
  misc_RNA (1)...(19): siRNA sense strand
uaucauuggcagaucaaaa

SEQ ID NO: 2383402 - RNA, 19 nt, Homo sapiens
  misc_RNA (1)...(19): siRNA sense strand
acuucauguuucuggccaa

SEQ ID NO: 2383403 - RNA, 19 nt, Homo sapiens
  misc_RNA (1)...(19): siRNA sense strand
gggauuguuugaagcacca

SEQ ID NO: 2383404 - RNA, 19 nt, Homo sapiens
  misc_RNA (1)...(19): siRNA sense strand
gaaugaaguauggaggaca

SEQ ID NO: 2383405 - RNA, 19 nt, Homo sapiens
  misc_RNA (1)...(19): siRNA sense strand
cguauuugugcuagagaua

SEQ ID NO: 2383406 - RNA, 19 nt, Homo sapiens
  misc_RNA (1)...(19): siRNA sense strand
agauaaggaaguuggaaau

SEQ ID NO: 2383407 - RNA, 19 nt, Homo sapiens
  misc_RNA (1)...(19): siRNA sense strand
acgugaaacugaaggcuga

SEQ ID NO: 2383408 - RNA, 19 nt, Homo sapiens
  misc_RNA (1)...(19): siRNA sense strand
aaguauugcuagacgugaa

SEQ ID NO: 2383409 - RNA, 19 nt, Homo sapiens
  misc_RNA (1)...(19): siRNA sense strand
acacaaucgauuugagcau

SEQ ID NO: 2383410 - RNA, 19 nt, Homo sapiens
  misc_RNA (1)...(19): siRNA sense strand
gauuacaggugcuggagga

SEQ ID NO: 2383411 - RNA, 19 nt, Homo sapiens
  misc_RNA (1)...(19): siRNA sense strand
uggcauugauguggacaaa

SEQ ID NO: 2383412 - RNA, 19 nt, Homo sapiens
  misc_RNA (1)...(19): siRNA sense strand
acauggaagccuauacuaa

SEQ ID NO: 2383413 - RNA, 19 nt, Homo sapiens
  misc_RNA (1)...(19): siRNA sense strand
gaagauucauuguggccau

SEQ ID NO: 2383414 - RNA, 19 nt, Homo sapiens
  misc_RNA (1)...(19): siRNA sense strand
gaagaacauccgagaaaau

SEQ ID NO: 2383415 - RNA, 19 nt, Homo sapiens
  misc_RNA (1)...(19): siRNA sense strand
agauuaaaagggaggacua

SEQ ID NO: 2383416 - RNA, 19 nt, Homo sapiens
  misc_RNA (1)...(19): siRNA sense strand
guaucuagcaggaugucua

SEQ ID NO: 2383417 - RNA, 19 nt, Homo sapiens
  misc_RNA (1)...(19): siRNA sense strand
uggcaacauuauugauaca

SEQ ID NO: 2383418 - RNA, 19 nt, Homo sapiens
  misc_RNA (1)...(19): siRNA sense strand
agagguugccagugcuaaa

SEQ ID NO: 2383419 - RNA, 19 nt, Homo sapiens
  misc_RNA (1)...(19): siRNA sense strand
uauucaaguauguggguga

SEQ ID NO: 2383420 - RNA, 19 nt, Homo sapiens
  misc_RNA (1)...(19): siRNA sense strand
ucaacauggauuauggaau

SEQ ID NO: 2383421 - RNA, 19 nt, Homo sapiens
  misc_RNA (1)...(19): siRNA sense strand
cagagaaauuugcagagca

SEQ ID NO: 2383422 - RNA, 19 nt, Homo sapiens
  misc_RNA (1)...(19): siRNA sense strand
gcguauuugugcuagagau

SEQ ID NO: 2383423 - RNA, 19 nt, Homo sapiens
  misc_RNA (1)...(19): siRNA sense strand
auauaaagggcguccugaa

SEQ ID NO: 2383424 - RNA, 19 nt, Homo sapiens
  misc_RNA (1)...(19): siRNA sense strand
cuaugaaucucuuccaaaa

SEQ ID NO: 2383425 - RNA, 19 nt, Homo sapiens
  misc_RNA (1)...(19): siRNA sense strand
ucacauguuugauggacga

SEQ ID NO: 2383426 - RNA, 19 nt, Homo sapiens
  misc_RNA (1)...(19): siRNA sense strand
gauguggacaaaugggauu

SEQ ID NO: 2383427 - RNA, 19 nt, Homo sapiens
  misc_RNA (1)...(19): siRNA sense strand
gugcuagagauaaggaagu

SEQ ID NO: 2383428 - RNA, 19 nt, Homo sapiens
  misc_RNA (1)...(19): siRNA sense strand
uguaggaccacuugaauca

SEQ ID NO: 2383429 - RNA, 19 nt, Homo sapiens
  misc_RNA (1)...(19): siRNA sense strand
agagaaauuugcagagcag

SEQ ID NO: 2383430 - RNA, 19 nt, Homo sapiens
  misc_RNA (1)...(19): siRNA sense strand
aagaagguggacagaaaga

SEQ ID NO: 2383431 - RNA, 19 nt, Homo sapiens
  misc_RNA (1)...(19): siRNA sense strand
uagacaaugaguugcguau

SEQ ID NO: 2383432 - RNA, 19 nt, Homo sapiens
  misc_RNA (1)...(19): siRNA sense strand
uuggaaaucuguaugacau

SEQ ID NO: 2383433 - RNA, 19 nt, Homo sapiens
  misc_RNA (1)...(19): siRNA sense strand
acugaaggcugaagauuuu

SEQ ID NO: 2383434 - RNA, 19 nt, Homo sapiens
  misc_RNA (1)...(19): siRNA sense strand
cggugcugcugaagaacau

SEQ ID NO: 2383435 - RNA, 19 nt, Homo sapiens
  misc_RNA (1)...(19): siRNA sense strand
aagcagaugacuacauaga

SEQ ID NO: 2383436 - RNA, 19 nt, Homo sapiens
  misc_RNA (1)...(19): siRNA sense strand
uacaggugcuggaggaaaa

SEQ ID NO: 2383437 - RNA, 19 nt, Homo sapiens
  misc_RNA (1)...(19): siRNA sense strand
uugaaagacgcacgagaga

SEQ ID NO: 2383438 - RNA, 19 nt, Homo sapiens
  misc_RNA (1)...(19): siRNA sense strand
aguggugugcagacagaaa

SEQ ID NO: 2383439 - RNA, 19 nt, Homo sapiens
  misc_RNA (1)...(19): siRNA sense strand
gcugaagaacauccgagaa

SEQ ID NO: 2383440 - RNA, 19 nt, Homo sapiens
  misc_RNA (1)...(19): siRNA sense strand
agaugacuacauagagauu

SEQ ID NO: 2383441 - RNA, 19 nt, Homo sapiens
  misc_RNA (1)...(19): siRNA sense strand
aacugaaggcugaagauuu

SEQ ID NO: 2383442 - RNA, 19 nt, Homo sapiens
  misc_RNA (1)...(19): siRNA sense strand
uguuugagcaccuuauuaa

SEQ ID NO: 2383443 - RNA, 19 nt, Homo sapiens
  misc_RNA (1)...(19): siRNA sense strand
gugaaguagacaaugaguu

SEQ ID NO: 2383444 - RNA, 19 nt, Homo sapiens
  misc_RNA (1)...(19): siRNA sense strand
ccguagagcuuaucaacac

SEQ ID NO: 2383445 - RNA, 19 nt, Homo sapiens
  misc_RNA (1)...(19): siRNA sense strand
agguggacagaaagaguuu

SEQ ID NO: 2383446 - RNA, 19 nt, Homo sapiens
  misc_RNA (1)...(19): siRNA sense strand
augcaauggcagugggaaa

SEQ ID NO: 2383447 - RNA, 19 nt, Homo sapiens
  misc_RNA (1)...(19): siRNA sense strand
uggcagaccuggaggacga

SEQ ID NO: 2383448 - RNA, 19 nt, Homo sapiens
  misc_RNA (1)...(19): siRNA sense strand
gugugaagcuggaugagca

SEQ ID NO: 2383449 - RNA, 19 nt, Homo sapiens
  misc_RNA (1)...(19): siRNA sense strand
acaugaagccagugaugau

SEQ ID NO: 2383450 - RNA, 19 nt, Homo sapiens
  misc_RNA (1)...(19): siRNA sense strand
gcauuagcccacaggccaa

SEQ ID NO: 2383451 - RNA, 19 nt, Homo sapiens
  misc_RNA (1)...(19): siRNA sense strand
ccacugggaagcauggcaa

SEQ ID NO: 2383452 - RNA, 19 nt, Homo sapiens
  misc_RNA (1)...(19): siRNA sense strand
gggagaagauacauggcaa

SEQ ID NO: 2383453 - RNA, 19 nt, Homo sapiens
  misc_RNA (1)...(19): siRNA sense strand
acacagauuucaugggaga

SEQ ID NO: 2383454 - RNA, 19 nt, Homo sapiens
  misc_RNA (1)...(19): siRNA sense strand
auguaaugcugaugcaaau

SEQ ID NO: 2383455 - RNA, 19 nt, Homo sapiens
  misc_RNA (1)...(19): siRNA sense strand
ggagcagguuggauggaca

SEQ ID NO: 2383456 - RNA, 19 nt, Homo sapiens
  misc_RNA (1)...(19): siRNA sense strand
uggaaaaggacauccgaua

SEQ ID NO: 2383457 - RNA, 19 nt, Homo sapiens
  misc_RNA (1)...(19): siRNA sense strand
ccacugugagccugauaaa

SEQ ID NO: 2383458 - RNA, 19 nt, Homo sapiens
  misc_RNA (1)...(19): siRNA sense strand
ugauggaggaaaugaaaca

SEQ ID NO: 2383459 - RNA, 19 nt, Homo sapiens
  misc_RNA (1)...(19): siRNA sense strand
gagcagguuggauggacaa

SEQ ID NO: 2383460 - RNA, 19 nt, Homo sapiens
  misc_RNA (1)...(19): siRNA sense strand
guggaacaauguagaaaau

SEQ ID NO: 2383461 - RNA, 19 nt, Homo sapiens
  misc_RNA (1)...(19): siRNA sense strand
guuuauuggcuucagacaa

SEQ ID NO: 2383462 - RNA, 19 nt, Homo sapiens
  misc_RNA (1)...(19): siRNA sense strand
gaaauugguuuguaggaag

SEQ ID NO: 2383463 - RNA, 19 nt, Homo sapiens
  misc_RNA (1)...(19): siRNA sense strand
uuugaaagaccaauggauu

SEQ ID NO: 2383464 - RNA, 19 nt, Homo sapiens
  misc_RNA (1)...(19): siRNA sense strand
ucucaaauguaaugcugau

SEQ ID NO: 2383465 - RNA, 19 nt, Homo sapiens
  misc_RNA (1)...(19): siRNA sense strand
cugcugacaucgaggaucu

SEQ ID NO: 2383466 - RNA, 19 nt, Homo sapiens
  misc_RNA (1)...(19): siRNA sense strand
guaauuuccaggagggagu

SEQ ID NO: 2383467 - RNA, 19 nt, Homo sapiens
  misc_RNA (1)...(19): siRNA sense strand
gcacauauugacugggaag

SEQ ID NO: 2383468 - RNA, 19 nt, Homo sapiens
  misc_RNA (1)...(19): siRNA sense strand
aaauugguuuguaggaaga

SEQ ID NO: 2383469 - RNA, 19 nt, Homo sapiens
  misc_RNA (1)...(19): siRNA sense strand
aauguaaugcugaugcaaa

SEQ ID NO: 2383470 - RNA, 19 nt, Homo sapiens
  misc_RNA (1)...(19): siRNA sense strand
ggaacaauguagaaaaucu

SEQ ID NO: 2383471 - RNA, 19 nt, Homo sapiens
  misc_RNA (1)...(19): siRNA sense strand
aggaagaaaagguguuaau

SEQ ID NO: 2383472 - RNA, 19 nt, Homo sapiens
  misc_RNA (1)...(19): siRNA sense strand
ggaucuagcaacagaaccu

SEQ ID NO: 2383473 - RNA, 19 nt, Homo sapiens
  misc_RNA (1)...(19): siRNA sense strand
ugaaacaguagcagccauu

SEQ ID NO: 2383474 - RNA, 19 nt, Homo sapiens
  misc_RNA (1)...(19): siRNA sense strand
gcuccugaaguuucgguaa

SEQ ID NO: 2383475 - RNA, 19 nt, Homo sapiens
  misc_RNA (1)...(19): siRNA sense strand
uggcaaaaguucacagacu

SEQ ID NO: 2383476 - RNA, 19 nt, Homo sapiens
  misc_RNA (1)...(19): siRNA sense strand
caaggagaauaucagggaa

SEQ ID NO: 2383477 - RNA, 19 nt, Homo sapiens
  misc_RNA (1)...(19): siRNA sense strand
gggaaggugaucuugguga

SEQ ID NO: 2383478 - RNA, 19 nt, Homo sapiens
  misc_RNA (1)...(19): siRNA sense strand
aaaugaaacggcaacgauu

SEQ ID NO: 2383479 - RNA, 19 nt, Homo sapiens
  misc_RNA (1)...(19): siRNA sense strand
uuucaugggagaagauaca

SEQ ID NO: 2383480 - RNA, 19 nt, Homo sapiens
  misc_RNA (1)...(19): siRNA sense strand
cggcaacgauuaucagcca

SEQ ID NO: 2383481 - RNA, 19 nt, Homo sapiens
  misc_RNA (1)...(19): siRNA sense strand
acuacuuugccaagaacua

SEQ ID NO: 2383482 - RNA, 19 nt, Homo sapiens
  misc_RNA (1)...(19): siRNA sense strand
gaauaucagggaagagucu

SEQ ID NO: 2383483 - RNA, 19 nt, Homo sapiens
  misc_RNA (1)...(19): siRNA sense strand
gauaaaagggccagauucu

SEQ ID NO: 2383484 - RNA, 19 nt, Homo sapiens
  misc_RNA (1)...(19): siRNA sense strand
caucgcagccacuggaaaa

SEQ ID NO: 2383485 - RNA, 19 nt, Homo sapiens
  misc_RNA (1)...(19): siRNA sense strand
aggagaauaucagggaaga

SEQ ID NO: 2383486 - RNA, 19 nt, Homo sapiens
  misc_RNA (1)...(19): siRNA sense strand
cuuuaauugauggaggaaa

SEQ ID NO: 2383487 - RNA, 19 nt, Homo sapiens
  misc_RNA (1)...(19): siRNA sense strand
ugaucuuggugaaauggaa

SEQ ID NO: 2383488 - RNA, 19 nt, Homo sapiens
  misc_RNA (1)...(19): siRNA sense strand
cgauuaucagccaguacaa

SEQ ID NO: 2383489 - RNA, 19 nt, Homo sapiens
  misc_RNA (1)...(19): siRNA sense strand
acauguagaugguuccgua

SEQ ID NO: 2383490 - RNA, 19 nt, Homo sapiens
  misc_RNA (1)...(19): siRNA sense strand
caguggaacaauguagaaa

SEQ ID NO: 2383491 - RNA, 19 nt, Homo sapiens
  misc_RNA (1)...(19): siRNA sense strand
gcgaauagcuacuggcgga

SEQ ID NO: 2383492 - RNA, 19 nt, Homo sapiens
  misc_RNA (1)...(19): siRNA sense strand
cacaauacguggaaggcca

SEQ ID NO: 2383493 - RNA, 19 nt, Homo sapiens
  misc_RNA (1)...(19): siRNA sense strand
cggacgacgcgaauagcua

SEQ ID NO: 2383494 - RNA, 19 nt, Homo sapiens
  misc_RNA (1)...(19): siRNA sense strand
ggugagugccuuuggggaa

SEQ ID NO: 2383495 - RNA, 19 nt, Homo sapiens
  misc_RNA (1)...(19): siRNA sense strand
cgcaugugcuuacgggcaa

SEQ ID NO: 2383496 - RNA, 19 nt, Homo sapiens
  misc_RNA (1)...(19): siRNA sense strand
gcaagaaccugcacacgca

SEQ ID NO: 2383497 - RNA, 19 nt, Homo sapiens
  misc_RNA (1)...(19): siRNA sense strand
cgaccuggaccuauggaca

SEQ ID NO: 2383498 - RNA, 19 nt, Homo sapiens
  misc_RNA (1)...(19): siRNA sense strand
ggaaggccauggaaggcau

SEQ ID NO: 2383499 - RNA, 19 nt, Homo sapiens
  misc_RNA (1)...(19): siRNA sense strand
agaacuuaguccugggaaa

SEQ ID NO: 2383500 - RNA, 19 nt, Homo sapiens
  misc_RNA (1)...(19): siRNA sense strand
gggugaggguacugagaau

SEQ ID NO: 2383501 - RNA, 19 nt, Homo sapiens
  misc_RNA (1)...(19): siRNA sense strand
gauuguacagagagagaaa

SEQ ID NO: 2383502 - RNA, 19 nt, Homo sapiens
  misc_RNA (1)...(19): siRNA sense strand
uugaagaagaagacaguaa

SEQ ID NO: 2383503 - RNA, 19 nt, Homo sapiens
  misc_RNA (1)...(19): siRNA sense strand
ccaucaaaggauaagaaua

SEQ ID NO: 2383504 - RNA, 19 nt, Homo sapiens
  misc_RNA (1)...(19): siRNA sense strand
cgauugaaacggagaucua

SEQ ID NO: 2383505 - RNA, 19 nt, Homo sapiens
  misc_RNA (1)...(19): siRNA sense strand
caagaaaauggaaggaaua

SEQ ID NO: 2383506 - RNA, 19 nt, Homo sapiens
  misc_RNA (1)...(19): siRNA sense strand
cagaaauguuauugacuca

SEQ ID NO: 2383507 - RNA, 19 nt, Homo sapiens
  misc_RNA (1)...(19): siRNA sense strand
gggaaagaaaguuuggauu

SEQ ID NO: 2383508 - RNA, 19 nt, Homo sapiens
  misc_RNA (1)...(19): siRNA sense strand
cuuuagaagaucucagaaa

SEQ ID NO: 2383509 - RNA, 19 nt, Homo sapiens
  misc_RNA (1)...(19): siRNA sense strand
uggcaauagaagauguaaa

SEQ ID NO: 2383510 - RNA, 19 nt, Homo sapiens
  misc_RNA (1)...(19): siRNA sense strand
acagaaacacacacggaua

SEQ ID NO: 2383511 - RNA, 19 nt, Homo sapiens
  misc_RNA (1)...(19): siRNA sense strand
uggaaggaauauauagcua

SEQ ID NO: 2383512 - RNA, 19 nt, Homo sapiens
  misc_RNA (1)...(19): siRNA sense strand
agagagaaacaguuagcua

SEQ ID NO: 2383513 - RNA, 19 nt, Homo sapiens
  misc_RNA (1)...(19): siRNA sense strand
cuuuagaauuugugcagau

SEQ ID NO: 2383514 - RNA, 19 nt, Homo sapiens
  misc_RNA (1)...(19): siRNA sense strand
agacagaagaagccaaauu

SEQ ID NO: 2383515 - RNA, 19 nt, Homo sapiens
  misc_RNA (1)...(19): siRNA sense strand
guuaguacucacaaggaaa

SEQ ID NO: 2383516 - RNA, 19 nt, Homo sapiens
  misc_RNA (1)...(19): siRNA sense strand
agacaguaauagcagggaa

SEQ ID NO: 2383517 - RNA, 19 nt, Homo sapiens
  misc_RNA (1)...(19): siRNA sense strand
ucaagaaaauggaaggaau

SEQ ID NO: 2383518 - RNA, 19 nt, Homo sapiens
  misc_RNA (1)...(19): siRNA sense strand
agaaaagacaagcaagaaa

SEQ ID NO: 2383519 - RNA, 19 nt, Homo sapiens
  misc_RNA (1)...(19): siRNA sense strand
aaucaagaucacagaaaca

SEQ ID NO: 2383520 - RNA, 19 nt, Homo sapiens
  misc_RNA (1)...(19): siRNA sense strand
aaacaguaccaaacagaau

SEQ ID NO: 2383521 - RNA, 19 nt, Homo sapiens
  misc_RNA (1)...(19): siRNA sense strand
gacaguaauagcagggaau

SEQ ID NO: 2383522 - RNA, 19 nt, Homo sapiens
  misc_RNA (1)...(19): siRNA sense strand
gugaaaggagaguguucua

SEQ ID NO: 2383523 - RNA, 19 nt, Homo sapiens
  misc_RNA (1)...(19): siRNA sense strand
ccuccuaaauugaaagacu

SEQ ID NO: 2383524 - RNA, 19 nt, Homo sapiens
  misc_RNA (1)...(19): siRNA sense strand
cagauuguacagagagaga

SEQ ID NO: 2383525 - RNA, 19 nt, Homo sapiens
  misc_RNA (1)...(19): siRNA sense strand
cgucuuauucguuaugaaa

SEQ ID NO: 2383526 - RNA, 19 nt, Homo sapiens
  misc_RNA (1)...(19): siRNA sense strand
aauagaagauguaaagcca

SEQ ID NO: 2383527 - RNA, 19 nt, Homo sapiens
  misc_RNA (1)...(19): siRNA sense strand
gaucacuauagcaggaaau

SEQ ID NO: 2383528 - RNA, 19 nt, Homo sapiens
  misc_RNA (1)...(19): siRNA sense strand
ccauguaccauuaguaaca

SEQ ID NO: 2383529 - RNA, 19 nt, Homo sapiens
  misc_RNA (1)...(19): siRNA sense strand
agguaauggcaauagaaga

SEQ ID NO: 2383530 - RNA, 19 nt, Homo sapiens
  misc_RNA (1)...(19): siRNA sense strand
uagaagauguaaagccaca

SEQ ID NO: 2383531 - RNA, 19 nt, Homo sapiens
  misc_RNA (1)...(19): siRNA sense strand
agagaaacaguuagcuaau

SEQ ID NO: 2383532 - RNA, 19 nt, Homo sapiens
  misc_RNA (1)...(19): siRNA sense strand
ccucaagucuaauggaaac

SEQ ID NO: 2383533 - RNA, 19 nt, Homo sapiens
  misc_RNA (1)...(19): siRNA sense strand
cuaugaagaagcugcagaa

SEQ ID NO: 2383534 - RNA, 19 nt, Homo sapiens
  misc_RNA (1)...(19): siRNA sense strand
ggaaagaugaaaacaaaga

SEQ ID NO: 2383535 - RNA, 19 nt, Homo sapiens
  misc_RNA (1)...(19): siRNA sense strand
cagaaagccacaaacagaa

SEQ ID NO: 2383536 - RNA, 19 nt, Homo sapiens
  misc_RNA (1)...(19): siRNA sense strand
augaagaagcugcagaaaa

SEQ ID NO: 2383537 - RNA, 19 nt, Homo sapiens
  misc_RNA (1)...(19): siRNA sense strand
uccagauguugaagugaaa

SEQ ID NO: 2383538 - RNA, 19 nt, Homo sapiens
  misc_RNA (1)...(19): siRNA sense strand
gaaaacaaagacagaagaa

SEQ ID NO: 2383539 - RNA, 19 nt, Homo sapiens
  misc_RNA (1)...(19): siRNA sense strand
cugauuggcaagagauaca

SEQ ID NO: 2383540 - RNA, 19 nt, Homo sapiens
  misc_RNA (1)...(19): siRNA sense strand
auguugaagugaaaggaga

SEQ ID NO: 2383541 - RNA, 19 nt, Homo sapiens
  misc_RNA (1)...(19): siRNA sense strand
cugaacaguugcugggcca

SEQ ID NO: 2383542 - RNA, 19 nt, Homo sapiens
  misc_RNA (1)...(19): siRNA sense strand
cugggaaacuucaggucuu

SEQ ID NO: 2383543 - RNA, 19 nt, Homo sapiens
  misc_RNA (1)...(19): siRNA sense strand
gaaaugaagaaaacagcaa

SEQ ID NO: 2383544 - RNA, 19 nt, Homo sapiens
  misc_RNA (1)...(19): siRNA sense strand
cgaauaucgaagaauguuu

SEQ ID NO: 2383545 - RNA, 19 nt, Homo sapiens
  misc_RNA (1)...(19): siRNA sense strand
cuccuaaauugaaagacua

SEQ ID NO: 2383546 - RNA, 19 nt, Homo sapiens
  misc_RNA (1)...(19): siRNA sense strand
gaaaauacagauaugggaa

SEQ ID NO: 2383547 - RNA, 19 nt, Homo sapiens
  misc_RNA (1)...(19): siRNA sense strand
uuacugaaacccugaagaa

SEQ ID NO: 2383548 - RNA, 19 nt, Homo sapiens
  misc_RNA (1)...(19): siRNA sense strand
aaagacagaagaagccaaa

SEQ ID NO: 2383549 - RNA, 19 nt, Homo sapiens
  misc_RNA (1)...(19): siRNA sense strand
cguuaugaaacucaaacua

SEQ ID NO: 2383550 - RNA, 19 nt, Homo sapiens
  misc_RNA (1)...(19): siRNA sense strand
aaaugaacuucgaacugaa

SEQ ID NO: 2383551 - RNA, 19 nt, Homo sapiens
  misc_RNA (1)...(19): siRNA sense strand
cuguucagugggagguaua

SEQ ID NO: 2383552 - RNA, 19 nt, Homo sapiens
  misc_RNA (1)...(19): siRNA sense strand
caguaauagcagggaauca

SEQ ID NO: 2383553 - RNA, 19 nt, Homo sapiens
  misc_RNA (1)...(19): siRNA sense strand
gggagucacacuuaagaau

SEQ ID NO: 2383554 - RNA, 19 nt, Homo sapiens
  misc_RNA (1)...(19): siRNA sense strand
uggaauggccagaaaggca

SEQ ID NO: 2383555 - RNA, 19 nt, Homo sapiens
  misc_RNA (1)...(19): siRNA sense strand
uguuaguacucacaaggaa

SEQ ID NO: 2383556 - RNA, 19 nt, Homo sapiens
  misc_RNA (1)...(19): siRNA sense strand
gggaaaaggaugaaagaca

SEQ ID NO: 2383557 - RNA, 19 nt, Homo sapiens
  misc_RNA (1)...(19): siRNA sense strand
acacauaccuuauagggaa

SEQ ID NO: 2383558 - RNA, 19 nt, Homo sapiens
  misc_RNA (1)...(19): siRNA sense strand
gaagauaggaugugggaac

SEQ ID NO: 2383559 - RNA, 19 nt, Homo sapiens
  misc_RNA (1)...(19): siRNA sense strand
ucgacaaggcaauaagaaa

SEQ ID NO: 2383560 - RNA, 19 nt, Homo sapiens
  misc_RNA (1)...(19): siRNA sense strand
cuuuggaccaugugggaaa

SEQ ID NO: 2383561 - RNA, 19 nt, Homo sapiens
  misc_RNA (1)...(19): siRNA sense strand
ggaugaaagacaacggaca

SEQ ID NO: 2383562 - RNA, 19 nt, Homo sapiens
  misc_RNA (1)...(19): siRNA sense strand
cuucgaaaucagagccuua

SEQ ID NO: 2383563 - RNA, 19 nt, Homo sapiens
  misc_RNA (1)...(19): siRNA sense strand
caacuaaacccauggcaca

SEQ ID NO: 2383564 - RNA, 19 nt, Homo sapiens
  misc_RNA (1)...(19): siRNA sense strand
ggcaaggacucaaggcuga

SEQ ID NO: 2383565 - RNA, 19 nt, Homo sapiens
  misc_RNA (1)...(19): siRNA sense strand
ccaaugaauauguagcaau

SEQ ID NO: 2383566 - RNA, 19 nt, Homo sapiens
  misc_RNA (1)...(19): siRNA sense strand
aggcaauaagaaagagcau

SEQ ID NO: 2383567 - RNA, 19 nt, Homo sapiens
  misc_RNA (1)...(19): siRNA sense strand
augucaagccagagaacuu

SEQ ID NO: 2383568 - RNA, 19 nt, Homo sapiens
  misc_RNA (1)...(19): siRNA sense strand
cuuugaagacgguguuaau

SEQ ID NO: 2383569 - RNA, 19 nt, Homo sapiens
  misc_RNA (1)...(19): siRNA sense strand
acuggaacugcaagauaua

SEQ ID NO: 2383570 - RNA, 19 nt, Homo sapiens
  misc_RNA (1)...(19): siRNA sense strand
acacauagggaucggccau

SEQ ID NO: 2383571 - RNA, 19 nt, Homo sapiens
  misc_RNA (1)...(19): siRNA sense strand
gcuuggcagugcaggugaa

SEQ ID NO: 2383572 - RNA, 19 nt, Homo sapiens
  misc_RNA (1)...(19): siRNA sense strand
agagcucagauuagguaaa

SEQ ID NO: 2383573 - RNA, 19 nt, Homo sapiens
  misc_RNA (1)...(19): siRNA sense strand
cuuccugauuggucgacaa

SEQ ID NO: 2383574 - RNA, 19 nt, Homo sapiens
  misc_RNA (1)...(19): siRNA sense strand
uggcaagaagauaggaugu

SEQ ID NO: 2383575 - RNA, 19 nt, Homo sapiens
  misc_RNA (1)...(19): siRNA sense strand
gcccuagcuuggaggacuu

SEQ ID NO: 2383576 - RNA, 19 nt, Homo sapiens
  misc_RNA (1)...(19): siRNA sense strand
acugcaagauauaugucua

SEQ ID NO: 2383577 - RNA, 19 nt, Homo sapiens
  misc_RNA (1)...(19): siRNA sense strand
agaacuuuccagaggagau

SEQ ID NO: 2383578 - RNA, 19 nt, Homo sapiens
  misc_RNA (1)...(19): siRNA sense strand
ucugcaauaacucgagaaa

SEQ ID NO: 2383579 - RNA, 19 nt, Homo sapiens
  misc_RNA (1)...(19): siRNA sense strand
gcaaagccggagagaugau

SEQ ID NO: 2383580 - RNA, 19 nt, Homo sapiens
  misc_RNA (1)...(19): siRNA sense strand
cauuauagacuuuggacug

SEQ ID NO: 2383581 - RNA, 19 nt, Homo sapiens
  misc_RNA (1)...(19): siRNA sense strand
cugcaagauauaugucuau

SEQ ID NO: 2383582 - RNA, 19 nt, Homo sapiens
  misc_RNA (1)...(19): siRNA sense strand
gauuaugaguauuuacgga

SEQ ID NO: 2383583 - RNA, 19 nt, Homo sapiens
  misc_RNA (1)...(19): siRNA sense strand
aaucagagccuuaggacug

SEQ ID NO: 2383584 - RNA, 19 nt, Homo sapiens
  misc_RNA (1)...(19): siRNA sense strand
cguggaggaacgaggaguu

SEQ ID NO: 2383585 - RNA, 19 nt, Homo sapiens
  misc_RNA (1)...(19): siRNA sense strand
ucaccuggaucgagggcaa

SEQ ID NO: 2383586 - RNA, 19 nt, Homo sapiens
  misc_RNA (1)...(19): siRNA sense strand
gcaaggagcaccagcguca

SEQ ID NO: 2383587 - RNA, 19 nt, Homo sapiens
  misc_RNA (1)...(19): siRNA sense strand
agggaaaaguaaaggccaa

SEQ ID NO: 2383588 - RNA, 19 nt, Homo sapiens
  misc_RNA (1)...(19): siRNA sense strand
agauggaagaugugugaca

SEQ ID NO: 2383589 - RNA, 19 nt, Homo sapiens
  misc_RNA (1)...(19): siRNA sense strand
gcaucugugugguggacga

SEQ ID NO: 2383590 - RNA, 19 nt, Homo sapiens
  misc_RNA (1)...(19): siRNA sense strand
cgggcaauggaacggguua

SEQ ID NO: 2383591 - RNA, 19 nt, Homo sapiens
  misc_RNA (1)...(19): siRNA sense strand
ggaagaagcacaagcucgu

SEQ ID NO: 2383592 - RNA, 19 nt, Homo sapiens
  misc_RNA (1)...(19): siRNA sense strand
cggccaagggaaaaguaaa

SEQ ID NO: 2383593 - RNA, 19 nt, Homo sapiens
  misc_RNA (1)...(19): siRNA sense strand
aaucaauggccggacgaaa

SEQ ID NO: 2383594 - RNA, 19 nt, Homo sapiens
  misc_RNA (1)...(19): siRNA sense strand
gggcaauggaacggguuau

SEQ ID NO: 2383595 - RNA, 19 nt, Homo sapiens
  misc_RNA (1)...(19): siRNA sense strand
acgcaauaacuguuuggua

SEQ ID NO: 2383596 - RNA, 19 nt, Homo sapiens
  misc_RNA (1)...(19): siRNA sense strand
agcacgagcuaaaguaaaa

SEQ ID NO: 2383597 - RNA, 19 nt, Homo sapiens
  misc_RNA (1)...(19): siRNA sense strand
aggacuggaagaagcacaa

SEQ ID NO: 2383598 - RNA, 19 nt, Homo sapiens
  misc_RNA (1)...(19): siRNA sense strand
gcaugaacaagcacggcau

SEQ ID NO: 2383599 - RNA, 19 nt, Homo sapiens
  misc_RNA (1)...(19): siRNA sense strand
cuuaauaaagacugggaug

SEQ ID NO: 2383600 - RNA, 19 nt, Homo sapiens
  misc_RNA (1)...(19): siRNA sense strand
auaaagacugggaugccaa

SEQ ID NO: 2383601 - RNA, 19 nt, Homo sapiens
  misc_RNA (1)...(19): siRNA sense strand
uggacgacuuccucggcaa

SEQ ID NO: 2383602 - RNA, 19 nt, Homo sapiens
  misc_RNA (1)...(19): siRNA sense strand
gaagaaagcaugaaggaga

SEQ ID NO: 2383603 - RNA, 19 nt, Homo sapiens
  misc_RNA (1)...(19): siRNA sense strand
cagaagaaggugagcgaau

SEQ ID NO: 2383604 - RNA, 19 nt, Homo sapiens
  misc_RNA (1)...(19): siRNA sense strand
ccuuaaucaagaagagaaa

SEQ ID NO: 2383605 - RNA, 19 nt, Homo sapiens
  misc_RNA (1)...(19): siRNA sense strand
guaagaaaggagagguuau

SEQ ID NO: 2383606 - RNA, 19 nt, Homo sapiens
  misc_RNA (1)...(19): siRNA sense strand
uaggagaguuggugggaca

SEQ ID NO: 2383607 - RNA, 19 nt, Homo sapiens
  misc_RNA (1)...(19): siRNA sense strand
ggaaaaggucacuuagaaa

SEQ ID NO: 2383608 - RNA, 19 nt, Homo sapiens
  misc_RNA (1)...(19): siRNA sense strand
gaaaugaagaagaaagcau

SEQ ID NO: 2383609 - RNA, 19 nt, Homo sapiens
  misc_RNA (1)...(19): siRNA sense strand
ggauugucuuacagcauaa

SEQ ID NO: 2383610 - RNA, 19 nt, Homo sapiens
  misc_RNA (1)...(19): siRNA sense strand
caguaagaaaggagagguu

SEQ ID NO: 2383611 - RNA, 19 nt, Homo sapiens
  misc_RNA (1)...(19): siRNA sense strand
cgacgaugggacugugaaa

SEQ ID NO: 2383612 - RNA, 19 nt, Homo sapiens
  misc_RNA (1)...(19): siRNA sense strand
uuggaaagcagauggcaaa

SEQ ID NO: 2383613 - RNA, 19 nt, Homo sapiens
  misc_RNA (1)...(19): siRNA sense strand
gggaagagccccugugcaa

SEQ ID NO: 2383614 - RNA, 19 nt, Homo sapiens
  misc_RNA (1)...(19): siRNA sense strand
cuauaaaccaagaggaaac

SEQ ID NO: 2383615 - RNA, 19 nt, Homo sapiens
  misc_RNA (1)...(19): siRNA sense strand
ugaaauuaccaacgggaau

SEQ ID NO: 2383616 - RNA, 19 nt, Homo sapiens
  misc_RNA (1)...(19): siRNA sense strand
cuggaagcuuaguggagaa

SEQ ID NO: 2383617 - RNA, 19 nt, Homo sapiens
  misc_RNA (1)...(19): siRNA sense strand
gggcaaaaucauucaagaa

SEQ ID NO: 2383618 - RNA, 19 nt, Homo sapiens
  misc_RNA (1)...(19): siRNA sense strand
acaaacagaggaugacaaa

SEQ ID NO: 2383619 - RNA, 19 nt, Homo sapiens
  misc_RNA (1)...(19): siRNA sense strand
ggaauuacccuguggccuu

SEQ ID NO: 2383620 - RNA, 19 nt, Homo sapiens
  misc_RNA (1)...(19): siRNA sense strand
ccaaaagagaagccagaaa

SEQ ID NO: 2383621 - RNA, 19 nt, Homo sapiens
  misc_RNA (1)...(19): siRNA sense strand
uaugggauguagagacaaa

SEQ ID NO: 2383622 - RNA, 19 nt, Homo sapiens
  misc_RNA (1)...(19): siRNA sense strand
augaaagucuacaggguca

SEQ ID NO: 2383623 - RNA, 19 nt, Homo sapiens
  misc_RNA (1)...(19): siRNA sense strand
ccaagagcuccuucagaaa

SEQ ID NO: 2383624 - RNA, 19 nt, Homo sapiens
  misc_RNA (1)...(19): siRNA sense strand
cuguggaggagaagggauu

SEQ ID NO: 2383625 - RNA, 19 nt, Homo sapiens
  misc_RNA (1)...(19): siRNA sense strand
guuggaaagcagauggcaa

SEQ ID NO: 2383626 - RNA, 19 nt, Homo sapiens
  misc_RNA (1)...(19): siRNA sense strand
gugcaauuuccgaggacau

SEQ ID NO: 2383627 - RNA, 19 nt, Homo sapiens
  misc_RNA (1)...(19): siRNA sense strand
ugauaagaaugaaccggaa

SEQ ID NO: 2383628 - RNA, 19 nt, Homo sapiens
  misc_RNA (1)...(19): siRNA sense strand
gauugauggaaaugaagaa

SEQ ID NO: 2383629 - RNA, 19 nt, Homo sapiens
  misc_RNA (1)...(19): siRNA sense strand
agaaugaaccggaaguaga

SEQ ID NO: 2383630 - RNA, 19 nt, Homo sapiens
  misc_RNA (1)...(19): siRNA sense strand
aauaugggauguagagaca

SEQ ID NO: 2383631 - RNA, 19 nt, Homo sapiens
  misc_RNA (1)...(19): siRNA sense strand
cuuucuacaucaauggaua

SEQ ID NO: 2383632 - RNA, 19 nt, Homo sapiens
  misc_RNA (1)...(19): siRNA sense strand
auacagcuguggaggagaa

SEQ ID NO: 2383633 - RNA, 19 nt, Homo sapiens
  misc_RNA (1)...(19): siRNA sense strand
aggagaagggauugucuua

SEQ ID NO: 2383634 - RNA, 19 nt, Homo sapiens
  misc_RNA (1)...(19): siRNA sense strand
cugcaaagcacuccagaga

SEQ ID NO: 2383635 - RNA, 19 nt, Homo sapiens
  misc_RNA (1)...(19): siRNA sense strand
gaguaaaggacuuaauagu

SEQ ID NO: 2383636 - RNA, 19 nt, Homo sapiens
  misc_RNA (1)...(19): siRNA sense strand
cuuuacaaacagaggauga

SEQ ID NO: 2383637 - RNA, 19 nt, Homo sapiens
  misc_RNA (1)...(19): siRNA sense strand
cuguaaagcuggaaucgau

SEQ ID NO: 2383638 - RNA, 19 nt, Homo sapiens
  misc_RNA (1)...(19): siRNA sense strand
gauccaaagaggagcuuca

SEQ ID NO: 2383639 - RNA, 19 nt, Homo sapiens
  misc_RNA (1)...(19): siRNA sense strand
ccgaaagggucucuggcuu

SEQ ID NO: 2383640 - RNA, 19 nt, Homo sapiens
  misc_RNA (1)...(19): siRNA sense strand
ggccauagguguuggggau

SEQ ID NO: 2383641 - RNA, 19 nt, Homo sapiens
  misc_RNA (1)...(19): siRNA sense strand
agucaaaagucaccauuaa

SEQ ID NO: 2383642 - RNA, 19 nt, Homo sapiens
  misc_RNA (1)...(19): siRNA sense strand
gauguaaaauguugggaca

SEQ ID NO: 2383643 - RNA, 19 nt, Homo sapiens
  misc_RNA (1)...(19): siRNA sense strand
gcaugaaagucuacagggu

SEQ ID NO: 2383644 - RNA, 19 nt, Homo sapiens
  misc_RNA (1)...(19): siRNA sense strand
aucuauaaaccaagaggaa

SEQ ID NO: 2383645 - RNA, 19 nt, Homo sapiens
  misc_RNA (1)...(19): siRNA sense strand
gagauaaguuggaaagcag

SEQ ID NO: 2383646 - RNA, 19 nt, Homo sapiens
  misc_RNA (1)...(19): siRNA sense strand
uggcaaugaagauggauca

SEQ ID NO: 2383647 - RNA, 19 nt, Homo sapiens
  misc_RNA (1)...(19): siRNA sense strand
gggaaccguccuagaaaga

SEQ ID NO: 2383648 - RNA, 19 nt, Homo sapiens
  misc_RNA (1)...(19): siRNA sense strand
cagaagaagcugaaauuac

SEQ ID NO: 2383649 - RNA, 19 nt, Homo sapiens
  misc_RNA (1)...(19): siRNA sense strand
aucaauggauagagaugua

SEQ ID NO: 2383650 - RNA, 19 nt, Homo sapiens
  misc_RNA (1)...(19): siRNA sense strand
cuucucagccagagccaaa

SEQ ID NO: 2383651 - RNA, 19 nt, Homo sapiens
  misc_RNA (1)...(19): siRNA sense strand
uggcagaaaugauccgaca

SEQ ID NO: 2383652 - RNA, 19 nt, Homo sapiens
  misc_RNA (1)...(19): siRNA sense strand
agaaauacggcaacacgaa

SEQ ID NO: 2383653 - RNA, 19 nt, Homo sapiens
  misc_RNA (1)...(19): siRNA sense strand
uggaacugaugauggaaaa

SEQ ID NO: 2383654 - RNA, 19 nt, Homo sapiens
  misc_RNA (1)...(19): siRNA sense strand
aaauaacacaccugccaaa

SEQ ID NO: 2383655 - RNA, 19 nt, Homo sapiens
  misc_RNA (1)...(19): siRNA sense strand
gaguuaaccaaaaggcuua

SEQ ID NO: 2383656 - RNA, 19 nt, Homo sapiens
  misc_RNA (1)...(19): siRNA sense strand
agcacaagcuccaguaaca

SEQ ID NO: 2383657 - RNA, 19 nt, Homo sapiens
  misc_RNA (1)...(19): siRNA sense strand
ucucucaaccuaaggcaaa

SEQ ID NO: 2383658 - RNA, 19 nt, Homo sapiens
  misc_RNA (1)...(19): siRNA sense strand
cugaagaauuauggagaga

SEQ ID NO: 2383659 - RNA, 19 nt, Homo sapiens
  misc_RNA (1)...(19): siRNA sense strand
gagagaacccagaagccua

SEQ ID NO: 2383660 - RNA, 19 nt, Homo sapiens
  misc_RNA (1)...(19): siRNA sense strand
gcugagauggagaagcaaa

SEQ ID NO: 2383661 - RNA, 19 nt, Homo sapiens
  misc_RNA (1)...(19): siRNA sense strand
agaaguuguucgaggagca

SEQ ID NO: 2383662 - RNA, 19 nt, Homo sapiens
  misc_RNA (1)...(19): siRNA sense strand
uggacaaccuugaugccua

SEQ ID NO: 2383663 - RNA, 19 nt, Homo sapiens
  misc_RNA (1)...(19): siRNA sense strand
gggccaaguacauggaagu

SEQ ID NO: 2383664 - RNA, 19 nt, Homo sapiens
  misc_RNA (1)...(19): siRNA sense strand
gaaagcaggccgaggagca

SEQ ID NO: 2383665 - RNA, 19 nt, Homo sapiens
  misc_RNA (1)...(19): siRNA sense strand
gcgugagcuuauccagaaa

SEQ ID NO: 2383666 - RNA, 19 nt, Homo sapiens
  misc_RNA (1)...(19): siRNA sense strand
ccaagauugaggacaagaa

SEQ ID NO: 2383667 - RNA, 19 nt, Homo sapiens
  misc_RNA (1)...(19): siRNA sense strand
gagaagucgauguuggaca

SEQ ID NO: 2383668 - RNA, 19 nt, Homo sapiens
  misc_RNA (1)...(19): siRNA sense strand
gugcacugacagaggccaa

SEQ ID NO: 2383669 - RNA, 19 nt, Homo sapiens
  misc_RNA (1)...(19): siRNA sense strand
aggacaacgacuucauuua

SEQ ID NO: 2383670 - RNA, 19 nt, Homo sapiens
  misc_RNA (1)...(19): siRNA sense strand
agaugauggccaagauuga

SEQ ID NO: 2383671 - RNA, 19 nt, Homo sapiens
  misc_RNA (1)...(19): siRNA sense strand
uggcagaggugaggcgaga

SEQ ID NO: 2383672 - RNA, 19 nt, Homo sapiens
  misc_RNA (1)...(19): siRNA sense strand
aggccgaggagcagcagaa

SEQ ID NO: 2383673 - RNA, 19 nt, Homo sapiens
  misc_RNA (1)...(19): siRNA sense strand
ugaagaaguuguucgagga

SEQ ID NO: 2383674 - RNA, 19 nt, Homo sapiens
  misc_RNA (1)...(19): siRNA sense strand
uggacagggagcugaagaa

SEQ ID NO: 2383675 - RNA, 19 nt, Homo sapiens
  misc_RNA (1)...(19): siRNA sense strand
gggaggagagugaggcagu

SEQ ID NO: 2383676 - RNA, 19 nt, Homo sapiens
  misc_RNA (1)...(19): siRNA sense strand
acagugaggagaaggccaa

SEQ ID NO: 2383677 - RNA, 19 nt, Homo sapiens
  misc_RNA (1)...(19): siRNA sense strand
ccaccacaguagauagcau

SEQ ID NO: 2383678 - RNA, 19 nt, Homo sapiens
  misc_RNA (1)...(19): siRNA sense strand
ggaguugcucagacagaau

SEQ ID NO: 2383679 - RNA, 19 nt, Homo sapiens
  misc_RNA (1)...(19): siRNA sense strand
cugagauggagaagcaaaa

SEQ ID NO: 2383680 - RNA, 19 nt, Homo sapiens
  misc_RNA (1)...(19): siRNA sense strand
cgagaaugggccaaguaca

SEQ ID NO: 2383681 - RNA, 19 nt, Homo sapiens
  misc_RNA (1)...(19): siRNA sense strand
cguaugaagccuaugagga

SEQ ID NO: 2383682 - RNA, 19 nt, Homo sapiens
  misc_RNA (1)...(19): siRNA sense strand
agcaggagcuggaggccuu

SEQ ID NO: 2383683 - RNA, 19 nt, Homo sapiens
  misc_RNA (1)...(19): siRNA sense strand
ugcaagaugcgcaggaaca

SEQ ID NO: 2383684 - RNA, 19 nt, Homo sapiens
  misc_RNA (1)...(19): siRNA sense strand
gagaucuguuggaggagga

SEQ ID NO: 2383685 - RNA, 19 nt, Homo sapiens
  misc_RNA (1)...(19): siRNA sense strand
gcugcuacucacugaagaa

SEQ ID NO: 2383686 - RNA, 19 nt, Homo sapiens
  misc_RNA (1)...(19): siRNA sense strand
aggcaguggaagcaggaga

SEQ ID NO: 2383687 - RNA, 19 nt, Homo sapiens
  misc_RNA (1)...(19): siRNA sense strand
ccuacaaugaagaacugaa

SEQ ID NO: 2383688 - RNA, 19 nt, Homo sapiens
  misc_RNA (1)...(19): siRNA sense strand
augaggcaguggugagaca

SEQ ID NO: 2383689 - RNA, 19 nt, Homo sapiens
  misc_RNA (1)...(19): siRNA sense strand
ggaaaguacaauucugcca

SEQ ID NO: 2383690 - RNA, 19 nt, Homo sapiens
  misc_RNA (1)...(19): siRNA sense strand
acccagaagccuacaauga

SEQ ID NO: 2383691 - RNA, 19 nt, Homo sapiens
  misc_RNA (1)...(19): siRNA sense strand
cagaccacucagagaugaa

SEQ ID NO: 2383692 - RNA, 19 nt, Homo sapiens
  misc_RNA (1)...(19): siRNA sense strand
gcagggacuucuacgcaga

SEQ ID NO: 2383693 - RNA, 19 nt, Homo sapiens
  misc_RNA (1)...(19): siRNA sense strand
gaugaaaccuggugggcca

SEQ ID NO: 2383694 - RNA, 19 nt, Homo sapiens
  misc_RNA (1)...(19): siRNA sense strand
uguagaauuuggaggcaga

SEQ ID NO: 2383695 - RNA, 19 nt, Homo sapiens
  misc_RNA (1)...(19): siRNA sense strand
ccagacaauacgauggaau

SEQ ID NO: 2383696 - RNA, 19 nt, Homo sapiens
  misc_RNA (1)...(19): siRNA sense strand
acacaaaacuaguuggagu

SEQ ID NO: 2383697 - RNA, 19 nt, Homo sapiens
  misc_RNA (1)...(19): siRNA sense strand
acauaagucccaugaggau

SEQ ID NO: 2383698 - RNA, 19 nt, Homo sapiens
  misc_RNA (1)...(19): siRNA sense strand
aagccuuggccaaagauaa

SEQ ID NO: 2383699 - RNA, 19 nt, Homo sapiens
  misc_RNA (1)...(19): siRNA sense strand
caaagauaaggaauggcaa

SEQ ID NO: 2383700 - RNA, 19 nt, Homo sapiens
  misc_RNA (1)...(19): siRNA sense strand
agacaauacgauggaauau

SEQ ID NO: 2383701 - RNA, 19 nt, Homo sapiens
  misc_RNA (1)...(19): siRNA sense strand
uggaaugagagugcagaua

SEQ ID NO: 2383702 - RNA, 19 nt, Homo sapiens
  misc_RNA (1)...(19): siRNA sense strand
ccaaagauaaggaauggca

SEQ ID NO: 2383703 - RNA, 19 nt, Homo sapiens
  misc_RNA (1)...(19): siRNA sense strand
cgugcagcugggagacaua

SEQ ID NO: 2383704 - RNA, 19 nt, Homo sapiens
  misc_RNA (1)...(19): siRNA sense strand
gggacaagaugaagggcaa

SEQ ID NO: 2383705 - RNA, 19 nt, Homo sapiens
  misc_RNA (1)...(19): siRNA sense strand
ccuacagcgaugaggccaa

SEQ ID NO: 2383706 - RNA, 19 nt, Homo sapiens
  misc_RNA (1)...(19): siRNA sense strand
cagcacacgcagugguaca

SEQ ID NO: 2383707 - RNA, 19 nt, Homo sapiens
  misc_RNA (1)...(19): siRNA sense strand
agaucagggacaagaugaa

SEQ ID NO: 2383708 - RNA, 19 nt, Homo sapiens
  misc_RNA (1)...(19): siRNA sense strand
gggacgagcaugugcagga

SEQ ID NO: 2383709 - RNA, 19 nt, Homo sapiens
  misc_RNA (1)...(19): siRNA sense strand
ucgacaaguuccugggcca

SEQ ID NO: 2383710 - RNA, 19 nt, Homo sapiens
  misc_RNA (1)...(19): siRNA sense strand
gcaagaugggcaaagccaa

SEQ ID NO: 2383711 - RNA, 19 nt, Homo sapiens
  misc_RNA (1)...(19): siRNA sense strand
aggaaaaggccaagaguag

SEQ ID NO: 2383712 - RNA, 19 nt, Homo sapiens
  misc_RNA (1)...(19): siRNA sense strand
caggcaagaaggagaagga

SEQ ID NO: 2383713 - RNA, 19 nt, Homo sapiens
  misc_RNA (1)...(19): siRNA sense strand
ggccuaagucggagcgagu

SEQ ID NO: 2383714 - RNA, 19 nt, Homo sapiens
  misc_RNA (1)...(19): siRNA sense strand
ggcaagaaggagaaggaac

SEQ ID NO: 2383715 - RNA, 19 nt, Homo sapiens
  misc_RNA (1)...(19): siRNA sense strand
caacagcagcucagaggca

SEQ ID NO: 2383716 - RNA, 19 nt, Homo sapiens
  misc_RNA (1)...(19): siRNA sense strand
ccaaaaggcugaaggacuc

SEQ ID NO: 2383717 - RNA, 19 nt, Homo sapiens
  misc_RNA (1)...(19): siRNA sense strand
aagccaggcaagaaggaga

SEQ ID NO: 2383718 - RNA, 19 nt, Homo sapiens
  misc_RNA (1)...(19): siRNA sense strand
gcaagaaggagaaggaacg

SEQ ID NO: 2383719 - RNA, 19 nt, Homo sapiens
  misc_RNA (1)...(19): siRNA sense strand
cauccaguggggaggaaaa

SEQ ID NO: 2383720 - RNA, 19 nt, Homo sapiens
  misc_RNA (1)...(19): siRNA sense strand
aagcagcgccauagaggau

SEQ ID NO: 2383721 - RNA, 19 nt, Homo sapiens
  misc_RNA (1)...(19): siRNA sense strand
ccauccaguucacgcgcaa

SEQ ID NO: 2383722 - RNA, 19 nt, Homo sapiens
  misc_RNA (1)...(19): siRNA sense strand
cgcaacaaccugagcgcca

SEQ ID NO: 2383723 - RNA, 19 nt, Homo sapiens
  misc_RNA (1)...(19): siRNA sense strand
aggcuguggcagagaagga

SEQ ID NO: 2383724 - RNA, 19 nt, Homo sapiens
  misc_RNA (1)...(19): siRNA sense strand
gugaguggcuccagggaca

SEQ ID NO: 2383725 - RNA, 19 nt, Homo sapiens
  misc_RNA (1)...(19): siRNA sense strand
gcauauuguuagugcagga

SEQ ID NO: 2383726 - RNA, 19 nt, Homo sapiens
  misc_RNA (1)...(19): siRNA sense strand
cugcugaaguggagaugca

SEQ ID NO: 2383727 - RNA, 19 nt, Homo sapiens
  misc_RNA (1)...(19): siRNA sense strand
aggaggaggaggaggagga

SEQ ID NO: 2383728 - RNA, 19 nt, Homo sapiens
  misc_RNA (1)...(19): siRNA sense strand
uguacauaucccaggcuaa

SEQ ID NO: 2383729 - RNA, 19 nt, Homo sapiens
  misc_RNA (1)...(19): siRNA sense strand
ggaaaugugucauggagug

SEQ ID NO: 2383730 - RNA, 19 nt, Homo sapiens
  misc_RNA (1)...(19): siRNA sense strand
cucaugaacaggaggugaa

SEQ ID NO: 2383731 - RNA, 19 nt, Homo sapiens
  misc_RNA (1)...(19): siRNA sense strand
cuaauuucauccuggccua

SEQ ID NO: 2383732 - RNA, 19 nt, Homo sapiens
  misc_RNA (1)...(19): siRNA sense strand
cauccagacugaagaccga

SEQ ID NO: 2383733 - RNA, 19 nt, Homo sapiens
  misc_RNA (1)...(19): siRNA sense strand
ggaugggaagauuggcauu

SEQ ID NO: 2383734 - RNA, 19 nt, Homo sapiens
  misc_RNA (1)...(19): siRNA sense strand
cggaaaugugucauggagu

SEQ ID NO: 2383735 - RNA, 19 nt, Homo sapiens
  misc_RNA (1)...(19): siRNA sense strand
gggaagaaauccagggccu

SEQ ID NO: 2383736 - RNA, 19 nt, Homo sapiens
  misc_RNA (1)...(19): siRNA sense strand
agaaagugccaucgugaaa

SEQ ID NO: 2383737 - RNA, 19 nt, Homo sapiens
  misc_RNA (1)...(19): siRNA sense strand
acuguaaacuugaagacaa

SEQ ID NO: 2383738 - RNA, 19 nt, Homo sapiens
  misc_RNA (1)...(19): siRNA sense strand
gggaggaguuggaagacga

SEQ ID NO: 2383739 - RNA, 19 nt, Homo sapiens
  misc_RNA (1)...(19): siRNA sense strand
ccgagcaagugcagaaaga

SEQ ID NO: 2383740 - RNA, 19 nt, Homo sapiens
  misc_RNA (1)...(19): siRNA sense strand
gcacaguaacgaaaagaaa

SEQ ID NO: 2383741 - RNA, 19 nt, Homo sapiens
  misc_RNA (1)...(19): siRNA sense strand
cggaugagaagaagaccua

SEQ ID NO: 2383742 - RNA, 19 nt, Homo sapiens
  misc_RNA (1)...(19): siRNA sense strand
ccuggaaaaccaagggaaa

SEQ ID NO: 2383743 - RNA, 19 nt, Homo sapiens
  misc_RNA (1)...(19): siRNA sense strand
gugaagcacaguaacgaaa

SEQ ID NO: 2383744 - RNA, 19 nt, Homo sapiens
  misc_RNA (1)...(19): siRNA sense strand
aagaagaacucaugcagca

SEQ ID NO: 2383745 - RNA, 19 nt, Homo sapiens
  misc_RNA (1)...(19): siRNA sense strand
ccucagugcaacaaggaau

SEQ ID NO: 2383746 - RNA, 19 nt, Homo sapiens
  misc_RNA (1)...(19): siRNA sense strand
caaacaaguugcagcagca

SEQ ID NO: 2383747 - RNA, 19 nt, Homo sapiens
  misc_RNA (1)...(19): siRNA sense strand
gacugaagauggagaggca

SEQ ID NO: 2383748 - RNA, 19 nt, Homo sapiens
  misc_RNA (1)...(19): siRNA sense strand
uggaagagcauauuagaca

SEQ ID NO: 2383749 - RNA, 19 nt, Homo sapiens
  misc_RNA (1)...(19): siRNA sense strand
guaagaaguacaacugcaa

SEQ ID NO: 2383750 - RNA, 19 nt, Homo sapiens
  misc_RNA (1)...(19): siRNA sense strand
acaaagucacgcauaguaa

SEQ ID NO: 2383751 - RNA, 19 nt, Homo sapiens
  misc_RNA (1)...(19): siRNA sense strand
acguuaaguuugagucuga

SEQ ID NO: 2383752 - RNA, 19 nt, Homo sapiens
  misc_RNA (1)...(19): siRNA sense strand
cagcauuuguucugagagu

SEQ ID NO: 2383753 - RNA, 19 nt, Homo sapiens
  misc_RNA (1)...(19): siRNA sense strand
caagcauaucaaagagaau

SEQ ID NO: 2383754 - RNA, 19 nt, Homo sapiens
  misc_RNA (1)...(19): siRNA sense strand
cugcaaguucuguagcaaa

SEQ ID NO: 2383755 - RNA, 19 nt, Homo sapiens
  misc_RNA (1)...(19): siRNA sense strand
agaaagaggaaguggagcu

SEQ ID NO: 2383756 - RNA, 19 nt, Homo sapiens
  misc_RNA (1)...(19): siRNA sense strand
gugcagucagugugaggaa

SEQ ID NO: 2383757 - RNA, 19 nt, Homo sapiens
  misc_RNA (1)...(19): siRNA sense strand
acuugaagauccacuuaaa

SEQ ID NO: 2383758 - RNA, 19 nt, Homo sapiens
  misc_RNA (1)...(19): siRNA sense strand
gcaagugcagaaagaggaa

SEQ ID NO: 2383759 - RNA, 19 nt, Homo sapiens
  misc_RNA (1)...(19): siRNA sense strand
ggagaaagugccaucguga

SEQ ID NO: 2383760 - RNA, 19 nt, Homo sapiens
  misc_RNA (1)...(19): siRNA sense strand
gcuaaagauaguaaugcau

SEQ ID NO: 2383761 - RNA, 19 nt, Homo sapiens
  misc_RNA (1)...(19): siRNA sense strand
uguacaaauucgccaauau

SEQ ID NO: 2383762 - RNA, 19 nt, Homo sapiens
  misc_RNA (1)...(19): siRNA sense strand
agcaagaucuggugaaacu

SEQ ID NO: 2383763 - RNA, 19 nt, Homo sapiens
  misc_RNA (1)...(19): siRNA sense strand
cugccaaacuccagugcca

SEQ ID NO: 2383764 - RNA, 19 nt, Homo sapiens
  misc_RNA (1)...(19): siRNA sense strand
aagaaagucuauaggugca

SEQ ID NO: 2383765 - RNA, 19 nt, Homo sapiens
  misc_RNA (1)...(19): siRNA sense strand
cuuccgagcaagugcagaa

SEQ ID NO: 2383766 - RNA, 19 nt, Homo sapiens
  misc_RNA (1)...(19): siRNA sense strand
gcgauaucacagaacacaa

SEQ ID NO: 2383767 - RNA, 19 nt, Homo sapiens
  misc_RNA (1)...(19): siRNA sense strand
accaagggaaagugcauaa

SEQ ID NO: 2383768 - RNA, 19 nt, Homo sapiens
  misc_RNA (1)...(19): siRNA sense strand
gggaacauaugcagaccca

SEQ ID NO: 2383769 - RNA, 19 nt, Homo sapiens
  misc_RNA (1)...(19): siRNA sense strand
aguuugagucugaaaguga

SEQ ID NO: 2383770 - RNA, 19 nt, Homo sapiens
  misc_RNA (1)...(19): siRNA sense strand
ucaccaaugcccagaauca

SEQ ID NO: 2383771 - RNA, 19 nt, Homo sapiens
  misc_RNA (1)...(19): siRNA sense strand
gaucuaugacuguacacaa

SEQ ID NO: 2383772 - RNA, 19 nt, Homo sapiens
  misc_RNA (1)...(19): siRNA sense strand
uggaguggauguugaagau

SEQ ID NO: 2383773 - RNA, 19 nt, Homo sapiens
  misc_RNA (1)...(19): siRNA sense strand
uggagaagguugcgauuuu

SEQ ID NO: 2383774 - RNA, 19 nt, Homo sapiens
  misc_RNA (1)...(19): siRNA sense strand
ggaagaugaaggacacuca

SEQ ID NO: 2383775 - RNA, 19 nt, Homo sapiens
  misc_RNA (1)...(19): siRNA sense strand
acucagaagugcagucagu

SEQ ID NO: 2383776 - RNA, 19 nt, Homo sapiens
  misc_RNA (1)...(19): siRNA sense strand
cggaagacggggaggaguu

SEQ ID NO: 2383777 - RNA, 19 nt, Homo sapiens
  misc_RNA (1)...(19): siRNA sense strand
auggaggacuggaagauga

SEQ ID NO: 2383778 - RNA, 19 nt, Homo sapiens
  misc_RNA (1)...(19): siRNA sense strand
ccaagcaagaucuggugaa

SEQ ID NO: 2383779 - RNA, 19 nt, Homo sapiens
  misc_RNA (1)...(19): siRNA sense strand
cugaagacacgcugcucua

SEQ ID NO: 2383780 - RNA, 19 nt, Homo sapiens
  misc_RNA (1)...(19): siRNA sense strand
ugacagauggaguggaugu

SEQ ID NO: 2383781 - RNA, 19 nt, Homo sapiens
  misc_RNA (1)...(19): siRNA sense strand
cuggagaauauaucuguaa

SEQ ID NO: 2383782 - RNA, 19 nt, Homo sapiens
  misc_RNA (1)...(19): siRNA sense strand
cgaaaauggccuccgggaa

SEQ ID NO: 2383783 - RNA, 19 nt, Homo sapiens
  misc_RNA (1)...(19): siRNA sense strand
ccauugucuaccaguguaa

SEQ ID NO: 2383784 - RNA, 19 nt, Homo sapiens
  misc_RNA (1)...(19): siRNA sense strand
ucccaaagaaccaguagua

SEQ ID NO: 2383785 - RNA, 19 nt, Homo sapiens
  misc_RNA (1)...(19): siRNA sense strand
aguggaugaccuucagaaa

SEQ ID NO: 2383786 - RNA, 19 nt, Homo sapiens
  misc_RNA (1)...(19): siRNA sense strand
gcaacugggacuuccgcaa

SEQ ID NO: 2383787 - RNA, 19 nt, Homo sapiens
  misc_RNA (1)...(19): siRNA sense strand
gcgaucauuuuguuagaaa

SEQ ID NO: 2383788 - RNA, 19 nt, Homo sapiens
  misc_RNA (1)...(19): siRNA sense strand
cuacaaugaaugggauauu

SEQ ID NO: 2383789 - RNA, 19 nt, Homo sapiens
  misc_RNA (1)...(19): siRNA sense strand
acaaguugcagcagcauau

SEQ ID NO: 2383790 - RNA, 19 nt, Homo sapiens
  misc_RNA (1)...(19): siRNA sense strand
ggcccauauuugucaguau

SEQ ID NO: 2383791 - RNA, 19 nt, Homo sapiens
  misc_RNA (1)...(19): siRNA sense strand
acguauuacaucugugaga

SEQ ID NO: 2383792 - RNA, 19 nt, Homo sapiens
  misc_RNA (1)...(19): siRNA sense strand
ggacaagaagacaagaucu

SEQ ID NO: 2383793 - RNA, 19 nt, Homo sapiens
  misc_RNA (1)...(19): siRNA sense strand
cauuugucgccguggguuu

SEQ ID NO: 2383794 - RNA, 19 nt, Homo sapiens
  misc_RNA (1)...(19): siRNA sense strand
aagaggaaguggagcugca

SEQ ID NO: 2383795 - RNA, 19 nt, Homo sapiens
  misc_RNA (1)...(19): siRNA sense strand
ggacguuccacaugcaaaa

SEQ ID NO: 2383796 - RNA, 19 nt, Homo sapiens
  misc_RNA (1)...(19): siRNA sense strand
gaagaguggagaacggcaa

SEQ ID NO: 2383797 - RNA, 19 nt, Homo sapiens
  misc_RNA (1)...(19): siRNA sense strand
gaacugaagucuaaagagc

SEQ ID NO: 2383798 - RNA, 19 nt, Homo sapiens
  misc_RNA (1)...(19): siRNA sense strand
cuaaagagccugaugggga

SEQ ID NO: 2383799 - RNA, 19 nt, Homo sapiens
  misc_RNA (1)...(19): siRNA sense strand
uuuacaagguggacgggca

SEQ ID NO: 2383800 - RNA, 19 nt, Homo sapiens
  misc_RNA (1)...(19): siRNA sense strand
gaguaugaaugcaagccca

SEQ ID NO: 2383801 - RNA, 19 nt, Homo sapiens
  misc_RNA (1)...(19): siRNA sense strand
agacaguguggcaagucaa

SEQ ID NO: 2383802 - RNA, 19 nt, Homo sapiens
  misc_RNA (1)...(19): siRNA sense strand
ggaacaaaguacuggagca

SEQ ID NO: 2383803 - RNA, 19 nt, Homo sapiens
  misc_RNA (1)...(19): siRNA sense strand
acaaaguacuggagcagga

SEQ ID NO: 2383804 - RNA, 19 nt, Homo sapiens
  misc_RNA (1)...(19): siRNA sense strand
cggaaaagagccagcaaau

SEQ ID NO: 2383805 - RNA, 19 nt, Homo sapiens
  misc_RNA (1)...(19): siRNA sense strand
gucacaacuuugagagcau

SEQ ID NO: 2383806 - RNA, 19 nt, Homo sapiens
  misc_RNA (1)...(19): siRNA sense strand
cuggauuggaggaggcuau

SEQ ID NO: 2383807 - RNA, 19 nt, Homo sapiens
  misc_RNA (1)...(19): siRNA sense strand
cagaaauggaggcaggcau

SEQ ID NO: 2383808 - RNA, 19 nt, Homo sapiens
  misc_RNA (1)...(19): siRNA sense strand
acacuggacuggaucggaa

SEQ ID NO: 2383809 - RNA, 19 nt, Homo sapiens
  misc_RNA (1)...(19): siRNA sense strand
caggaguggcgguguguca

SEQ ID NO: 2383810 - RNA, 19 nt, Homo sapiens
  misc_RNA (1)...(19): siRNA sense strand
ucaaguggguugccgggaa

SEQ ID NO: 2383811 - RNA, 19 nt, Homo sapiens
  misc_RNA (1)...(19): siRNA sense strand
caucacagagagcggaaaa

SEQ ID NO: 2383812 - RNA, 19 nt, Homo sapiens
  misc_RNA (1)...(19): siRNA sense strand
gcggaaaagagccagcaaa

SEQ ID NO: 2383813 - RNA, 19 nt, Homo sapiens
  misc_RNA (1)...(19): siRNA sense strand
gucacaaaguuuagagaaa

SEQ ID NO: 2383814 - RNA, 19 nt, Homo sapiens
  misc_RNA (1)...(19): siRNA sense strand
cagcaaagcuccaugaaau

SEQ ID NO: 2383815 - RNA, 19 nt, Homo sapiens
  misc_RNA (1)...(19): siRNA sense strand
caguagaaacucugggaaa

SEQ ID NO: 2383816 - RNA, 19 nt, Homo sapiens
  misc_RNA (1)...(19): siRNA sense strand
ugaaaaggauggagauaaa

SEQ ID NO: 2383817 - RNA, 19 nt, Homo sapiens
  misc_RNA (1)...(19): siRNA sense strand
gagaggaaggagaaagaaa

SEQ ID NO: 2383818 - RNA, 19 nt, Homo sapiens
  misc_RNA (1)...(19): siRNA sense strand
gcuuuaaggagcagacaaa

SEQ ID NO: 2383819 - RNA, 19 nt, Homo sapiens
  misc_RNA (1)...(19): siRNA sense strand
augccagaguauagagaaa

SEQ ID NO: 2383820 - RNA, 19 nt, Homo sapiens
  misc_RNA (1)...(19): siRNA sense strand
cuugaauggacguggaaua

SEQ ID NO: 2383821 - RNA, 19 nt, Homo sapiens
  misc_RNA (1)...(19): siRNA sense strand
ggucagagggagagaaguu

SEQ ID NO: 2383822 - RNA, 19 nt, Homo sapiens
  misc_RNA (1)...(19): siRNA sense strand
uggaaggaacagaaagaaa

SEQ ID NO: 2383823 - RNA, 19 nt, Homo sapiens
  misc_RNA (1)...(19): siRNA sense strand
ggaagaaacagaagggagu

SEQ ID NO: 2383824 - RNA, 19 nt, Homo sapiens
  misc_RNA (1)...(19): siRNA sense strand
auauauauggacagggaaa

SEQ ID NO: 2383825 - RNA, 19 nt, Homo sapiens
  misc_RNA (1)...(19): siRNA sense strand
caguuuaagccaagaagaa

SEQ ID NO: 2383826 - RNA, 19 nt, Homo sapiens
  misc_RNA (1)...(19): siRNA sense strand
ccucaacgacuuaaagaaa

SEQ ID NO: 2383827 - RNA, 19 nt, Homo sapiens
  misc_RNA (1)...(19): siRNA sense strand
ggugaugagcucuaagaaa

SEQ ID NO: 2383828 - RNA, 19 nt, Homo sapiens
  misc_RNA (1)...(19): siRNA sense strand
aaacaaaugagcaggaaga

SEQ ID NO: 2383829 - RNA, 19 nt, Homo sapiens
  misc_RNA (1)...(19): siRNA sense strand
guaccacacauuagagaaa

SEQ ID NO: 2383830 - RNA, 19 nt, Homo sapiens
  misc_RNA (1)...(19): siRNA sense strand
guaacaaguccuagcagaa

SEQ ID NO: 2383831 - RNA, 19 nt, Homo sapiens
  misc_RNA (1)...(19): siRNA sense strand
acugaaagaugaugcacaa

SEQ ID NO: 2383832 - RNA, 19 nt, Homo sapiens
  misc_RNA (1)...(19): siRNA sense strand
gugaugagcucuaagaaaa

SEQ ID NO: 2383833 - RNA, 19 nt, Homo sapiens
  misc_RNA (1)...(19): siRNA sense strand
gggaggaaggcgugaauga

SEQ ID NO: 2383834 - RNA, 19 nt, Homo sapiens
  misc_RNA (1)...(19): siRNA sense strand
gguugaauauagaggaguu

SEQ ID NO: 2383835 - RNA, 19 nt, Homo sapiens
  misc_RNA (1)...(19): siRNA sense strand
gggaaagccaaaagcgaaa

SEQ ID NO: 2383836 - RNA, 19 nt, Homo sapiens
  misc_RNA (1)...(19): siRNA sense strand
uagaagaugcagaaacaaa

SEQ ID NO: 2383837 - RNA, 19 nt, Homo sapiens
  misc_RNA (1)...(19): siRNA sense strand
guuagaauacugugaagaa

SEQ ID NO: 2383838 - RNA, 19 nt, Homo sapiens
  misc_RNA (1)...(19): siRNA sense strand
gaauauauauggacaggga

SEQ ID NO: 2383839 - RNA, 19 nt, Homo sapiens
  misc_RNA (1)...(19): siRNA sense strand
agaaacuggaugugagcaa

SEQ ID NO: 2383840 - RNA, 19 nt, Homo sapiens
  misc_RNA (1)...(19): siRNA sense strand
auggauaacagaagaacaa

SEQ ID NO: 2383841 - RNA, 19 nt, Homo sapiens
  misc_RNA (1)...(19): siRNA sense strand
gacacaagaaguaaagaaa

SEQ ID NO: 2383842 - RNA, 19 nt, Homo sapiens
  misc_RNA (1)...(19): siRNA sense strand
acugaaagucaaagccaaa

SEQ ID NO: 2383843 - RNA, 19 nt, Homo sapiens
  misc_RNA (1)...(19): siRNA sense strand
guuaaggucaggagaauau

SEQ ID NO: 2383844 - RNA, 19 nt, Homo sapiens
  misc_RNA (1)...(19): siRNA sense strand
ggaaggugaagaaggagaa

SEQ ID NO: 2383845 - RNA, 19 nt, Homo sapiens
  misc_RNA (1)...(19): siRNA sense strand
cuuaagagcucaagugacu

SEQ ID NO: 2383846 - RNA, 19 nt, Homo sapiens
  misc_RNA (1)...(19): siRNA sense strand
gauauuggaaggugaagaa

SEQ ID NO: 2383847 - RNA, 19 nt, Homo sapiens
  misc_RNA (1)...(19): siRNA sense strand
ugaaggaggcacaggaaaa

SEQ ID NO: 2383848 - RNA, 19 nt, Homo sapiens
  misc_RNA (1)...(19): siRNA sense strand
guaugaagucugucaggaa

SEQ ID NO: 2383849 - RNA, 19 nt, Homo sapiens
  misc_RNA (1)...(19): siRNA sense strand
gcucaggaaacaagcacaa

SEQ ID NO: 2383850 - RNA, 19 nt, Homo sapiens
  misc_RNA (1)...(19): siRNA sense strand
uagaagggucagagggaga

SEQ ID NO: 2383851 - RNA, 19 nt, Homo sapiens
  misc_RNA (1)...(19): siRNA sense strand
agaagaacgcacagaugaa

SEQ ID NO: 2383852 - RNA, 19 nt, Homo sapiens
  misc_RNA (1)...(19): siRNA sense strand
gcacagaugaaaugacaca

SEQ ID NO: 2383853 - RNA, 19 nt, Homo sapiens
  misc_RNA (1)...(19): siRNA sense strand
uauuagaccaguauggaaa

SEQ ID NO: 2383854 - RNA, 19 nt, Homo sapiens
  misc_RNA (1)...(19): siRNA sense strand
uuuagaagaugcagaaaca

SEQ ID NO: 2383855 - RNA, 19 nt, Homo sapiens
  misc_RNA (1)...(19): siRNA sense strand
aggagaucuacaagaaaua

SEQ ID NO: 2383856 - RNA, 19 nt, Homo sapiens
  misc_RNA (1)...(19): siRNA sense strand
aaaaccagcuuuaggaaaa

SEQ ID NO: 2383857 - RNA, 19 nt, Homo sapiens
  misc_RNA (1)...(19): siRNA sense strand
auaaagugguucucacaaa

SEQ ID NO: 2383858 - RNA, 19 nt, Homo sapiens
  misc_RNA (1)...(19): siRNA sense strand
gugcaguugucaagguuau

SEQ ID NO: 2383859 - RNA, 19 nt, Homo sapiens
  misc_RNA (1)...(19): siRNA sense strand
agacacaagaaguaaagaa

SEQ ID NO: 2383860 - RNA, 19 nt, Homo sapiens
  misc_RNA (1)...(19): siRNA sense strand
aggagaggaaggagaaaga

SEQ ID NO: 2383861 - RNA, 19 nt, Homo sapiens
  misc_RNA (1)...(19): siRNA sense strand
aaaugaaguugaagcauca

SEQ ID NO: 2383862 - RNA, 19 nt, Homo sapiens
  misc_RNA (1)...(19): siRNA sense strand
gaauugagaaguuguggaa

SEQ ID NO: 2383863 - RNA, 19 nt, Homo sapiens
  misc_RNA (1)...(19): siRNA sense strand
ccucagauauauucagaca

SEQ ID NO: 2383864 - RNA, 19 nt, Homo sapiens
  misc_RNA (1)...(19): siRNA sense strand
acaaaugagcaggaagaaa

SEQ ID NO: 2383865 - RNA, 19 nt, Homo sapiens
  misc_RNA (1)...(19): siRNA sense strand
acaauuggaaaguggacaa

SEQ ID NO: 2383866 - RNA, 19 nt, Homo sapiens
  misc_RNA (1)...(19): siRNA sense strand
gggcuugauggaagauuua

SEQ ID NO: 2383867 - RNA, 19 nt, Homo sapiens
  misc_RNA (1)...(19): siRNA sense strand
aaccaaacucugaagauua

SEQ ID NO: 2383868 - RNA, 19 nt, Homo sapiens
  misc_RNA (1)...(19): siRNA sense strand
aagaagauguccacccaaa

SEQ ID NO: 2383869 - RNA, 19 nt, Homo sapiens
  misc_RNA (1)...(19): siRNA sense strand
uaacaaagacacugcugaa

SEQ ID NO: 2383870 - RNA, 19 nt, Homo sapiens
  misc_RNA (1)...(19): siRNA sense strand
gaggaaggagaaagaaaga

SEQ ID NO: 2383871 - RNA, 19 nt, Homo sapiens
  misc_RNA (1)...(19): siRNA sense strand
gguaacaaguccuagcaga

SEQ ID NO: 2383872 - RNA, 19 nt, Homo sapiens
  misc_RNA (1)...(19): siRNA sense strand
ucuuuaugaccuuggaaua

SEQ ID NO: 2383873 - RNA, 19 nt, Homo sapiens
  misc_RNA (1)...(19): siRNA sense strand
gguaacagcuauugaaccu

SEQ ID NO: 2383874 - RNA, 19 nt, Homo sapiens
  misc_RNA (1)...(19): siRNA sense strand
uaacagaagaacaaccaaa

SEQ ID NO: 2383875 - RNA, 19 nt, Homo sapiens
  misc_RNA (1)...(19): siRNA sense strand
gagaggacugauagacuua

SEQ ID NO: 2383876 - RNA, 19 nt, Homo sapiens
  misc_RNA (1)...(19): siRNA sense strand
ccuuggagaagacgaaaua

SEQ ID NO: 2383877 - RNA, 19 nt, Homo sapiens
  misc_RNA (1)...(19): siRNA sense strand
cacuuaagcuucaguacaa

SEQ ID NO: 2383878 - RNA, 19 nt, Homo sapiens
  misc_RNA (1)...(19): siRNA sense strand
gugaagaaggagaaguuga

SEQ ID NO: 2383879 - RNA, 19 nt, Homo sapiens
  misc_RNA (1)...(19): siRNA sense strand
gucacaaaguuuagagaaa

SEQ ID NO: 2383880 - RNA, 19 nt, Homo sapiens
  misc_RNA (1)...(19): siRNA sense strand
cagcaaagcuccaugaaau

SEQ ID NO: 2383881 - RNA, 19 nt, Homo sapiens
  misc_RNA (1)...(19): siRNA sense strand
caguagaaacucugggaaa

SEQ ID NO: 2383882 - RNA, 19 nt, Homo sapiens
  misc_RNA (1)...(19): siRNA sense strand
ugaaaaggauggagauaaa

SEQ ID NO: 2383883 - RNA, 19 nt, Homo sapiens
  misc_RNA (1)...(19): siRNA sense strand
gagaggaaggagaaagaaa

SEQ ID NO: 2383884 - RNA, 19 nt, Homo sapiens
  misc_RNA (1)...(19): siRNA sense strand
gcuuuaaggagcagacaaa

SEQ ID NO: 2383885 - RNA, 19 nt, Homo sapiens
  misc_RNA (1)...(19): siRNA sense strand
augccagaguauagagaaa

SEQ ID NO: 2383886 - RNA, 19 nt, Homo sapiens
  misc_RNA (1)...(19): siRNA sense strand
cuugaauggacguggaaua

SEQ ID NO: 2383887 - RNA, 19 nt, Homo sapiens
  misc_RNA (1)...(19): siRNA sense strand
ggucagagggagagaaguu

SEQ ID NO: 2383888 - RNA, 19 nt, Homo sapiens
  misc_RNA (1)...(19): siRNA sense strand
uggaaggaacagaaagaaa

SEQ ID NO: 2383889 - RNA, 19 nt, Homo sapiens
  misc_RNA (1)...(19): siRNA sense strand
ggaagaaacagaagggagu

SEQ ID NO: 2383890 - RNA, 19 nt, Homo sapiens
  misc_RNA (1)...(19): siRNA sense strand
auauauauggacagggaaa

SEQ ID NO: 2383891 - RNA, 19 nt, Homo sapiens
  misc_RNA (1)...(19): siRNA sense strand
caguuuaagccaagaagaa

SEQ ID NO: 2383892 - RNA, 19 nt, Homo sapiens
  misc_RNA (1)...(19): siRNA sense strand
ccucaacgacuuaaagaaa

SEQ ID NO: 2383893 - RNA, 19 nt, Homo sapiens
  misc_RNA (1)...(19): siRNA sense strand
ggugaugagcucuaagaaa

SEQ ID NO: 2383894 - RNA, 19 nt, Homo sapiens
  misc_RNA (1)...(19): siRNA sense strand
aaacaaaugagcaggaaga

SEQ ID NO: 2383895 - RNA, 19 nt, Homo sapiens
  misc_RNA (1)...(19): siRNA sense strand
guaccacacauuagagaaa

SEQ ID NO: 2383896 - RNA, 19 nt, Homo sapiens
  misc_RNA (1)...(19): siRNA sense strand
guaacaaguccuagcagaa

SEQ ID NO: 2383897 - RNA, 19 nt, Homo sapiens
  misc_RNA (1)...(19): siRNA sense strand
acugaaagaugaugcacaa

SEQ ID NO: 2383898 - RNA, 19 nt, Homo sapiens
  misc_RNA (1)...(19): siRNA sense strand
gugaugagcucuaagaaaa

SEQ ID NO: 2383899 - RNA, 19 nt, Homo sapiens
  misc_RNA (1)...(19): siRNA sense strand
gggaggaaggcgugaauga

SEQ ID NO: 2383900 - RNA, 19 nt, Homo sapiens
  misc_RNA (1)...(19): siRNA sense strand
gguugaauauagaggaguu

SEQ ID NO: 2383901 - RNA, 19 nt, Homo sapiens
  misc_RNA (1)...(19): siRNA sense strand
gggaaagccaaaagcgaaa

SEQ ID NO: 2383902 - RNA, 19 nt, Homo sapiens
  misc_RNA (1)...(19): siRNA sense strand
uagaagaugcagaaacaaa

SEQ ID NO: 2383903 - RNA, 19 nt, Homo sapiens
  misc_RNA (1)...(19): siRNA sense strand
guuagaauacugugaagaa

SEQ ID NO: 2383904 - RNA, 19 nt, Homo sapiens
  misc_RNA (1)...(19): siRNA sense strand
gaauauauauggacaggga

SEQ ID NO: 2383905 - RNA, 19 nt, Homo sapiens
  misc_RNA (1)...(19): siRNA sense strand
agaaacuggaugugagcaa

SEQ ID NO: 2383906 - RNA, 19 nt, Homo sapiens
  misc_RNA (1)...(19): siRNA sense strand
auggauaacagaagaacaa

SEQ ID NO: 2383907 - RNA, 19 nt, Homo sapiens
  misc_RNA (1)...(19): siRNA sense strand
gacacaagaaguaaagaaa

SEQ ID NO: 2383908 - RNA, 19 nt, Homo sapiens
  misc_RNA (1)...(19): siRNA sense strand
acugaaagucaaagccaaa

SEQ ID NO: 2383909 - RNA, 19 nt, Homo sapiens
  misc_RNA (1)...(19): siRNA sense strand
guuaaggucaggagaauau

SEQ ID NO: 2383910 - RNA, 19 nt, Homo sapiens
  misc_RNA (1)...(19): siRNA sense strand
ggaaggugaagaaggagaa

SEQ ID NO: 2383911 - RNA, 19 nt, Homo sapiens
  misc_RNA (1)...(19): siRNA sense strand
cuuaagagcucaagugacu

SEQ ID NO: 2383912 - RNA, 19 nt, Homo sapiens
  misc_RNA (1)...(19): siRNA sense strand
gauauuggaaggugaagaa

SEQ ID NO: 2383913 - RNA, 19 nt, Homo sapiens
  misc_RNA (1)...(19): siRNA sense strand
ugaaggaggcacaggaaaa

SEQ ID NO: 2383914 - RNA, 19 nt, Homo sapiens
  misc_RNA (1)...(19): siRNA sense strand
guaugaagucugucaggaa

SEQ ID NO: 2383915 - RNA, 19 nt, Homo sapiens
  misc_RNA (1)...(19): siRNA sense strand
gcucaggaaacaagcacaa

SEQ ID NO: 2383916 - RNA, 19 nt, Homo sapiens
  misc_RNA (1)...(19): siRNA sense strand
uagaagggucagagggaga

SEQ ID NO: 2383917 - RNA, 19 nt, Homo sapiens
  misc_RNA (1)...(19): siRNA sense strand
agaagaacgcacagaugaa

SEQ ID NO: 2383918 - RNA, 19 nt, Homo sapiens
  misc_RNA (1)...(19): siRNA sense strand
gcacagaugaaaugacaca

SEQ ID NO: 2383919 - RNA, 19 nt, Homo sapiens
  misc_RNA (1)...(19): siRNA sense strand
uauuagaccaguauggaaa

SEQ ID NO: 2383920 - RNA, 19 nt, Homo sapiens
  misc_RNA (1)...(19): siRNA sense strand
uuuagaagaugcagaaaca

SEQ ID NO: 2383921 - RNA, 19 nt, Homo sapiens
  misc_RNA (1)...(19): siRNA sense strand
aggagaucuacaagaaaua

SEQ ID NO: 2383922 - RNA, 19 nt, Homo sapiens
  misc_RNA (1)...(19): siRNA sense strand
aaaaccagcuuuaggaaaa

SEQ ID NO: 2383923 - RNA, 19 nt, Homo sapiens
  misc_RNA (1)...(19): siRNA sense strand
auaaagugguucucacaaa

SEQ ID NO: 2383924 - RNA, 19 nt, Homo sapiens
  misc_RNA (1)...(19): siRNA sense strand
gugcaguugucaagguuau

SEQ ID NO: 2383925 - RNA, 19 nt, Homo sapiens
  misc_RNA (1)...(19): siRNA sense strand
agacacaagaaguaaagaa

SEQ ID NO: 2383926 - RNA, 19 nt, Homo sapiens
  misc_RNA (1)...(19): siRNA sense strand
aggagaggaaggagaaaga

SEQ ID NO: 2383927 - RNA, 19 nt, Homo sapiens
  misc_RNA (1)...(19): siRNA sense strand
aaaugaaguugaagcauca

SEQ ID NO: 2383928 - RNA, 19 nt, Homo sapiens
  misc_RNA (1)...(19): siRNA sense strand
gaauugagaaguuguggaa

SEQ ID NO: 2383929 - RNA, 19 nt, Homo sapiens
  misc_RNA (1)...(19): siRNA sense strand
ccucagauauauucagaca

SEQ ID NO: 2383930 - RNA, 19 nt, Homo sapiens
  misc_RNA (1)...(19): siRNA sense strand
acaaaugagcaggaagaaa

SEQ ID NO: 2383931 - RNA, 19 nt, Homo sapiens
  misc_RNA (1)...(19): siRNA sense strand
acaauuggaaaguggacaa

SEQ ID NO: 2383932 - RNA, 19 nt, Homo sapiens
  misc_RNA (1)...(19): siRNA sense strand
gggcuugauggaagauuua

SEQ ID NO: 2383933 - RNA, 19 nt, Homo sapiens
  misc_RNA (1)...(19): siRNA sense strand
aaccaaacucugaagauua

SEQ ID NO: 2383934 - RNA, 19 nt, Homo sapiens
  misc_RNA (1)...(19): siRNA sense strand
aagaagauguccacccaaa

SEQ ID NO: 2383935 - RNA, 19 nt, Homo sapiens
  misc_RNA (1)...(19): siRNA sense strand
uaacaaagacacugcugaa

SEQ ID NO: 2383936 - RNA, 19 nt, Homo sapiens
  misc_RNA (1)...(19): siRNA sense strand
gaggaaggagaaagaaaga

SEQ ID NO: 2383937 - RNA, 19 nt, Homo sapiens
  misc_RNA (1)...(19): siRNA sense strand
gguaacaaguccuagcaga

SEQ ID NO: 2383938 - RNA, 19 nt, Homo sapiens
  misc_RNA (1)...(19): siRNA sense strand
ucuuuaugaccuuggaaua

SEQ ID NO: 2383939 - RNA, 19 nt, Homo sapiens
  misc_RNA (1)...(19): siRNA sense strand
gguaacagcuauugaaccu

SEQ ID NO: 2383940 - RNA, 19 nt, Homo sapiens
  misc_RNA (1)...(19): siRNA sense strand
ccuuggagaagacgaaaua

SEQ ID NO: 2383941 - RNA, 19 nt, Homo sapiens
  misc_RNA (1)...(19): siRNA sense strand
uaacagaagaacaaccaaa

SEQ ID NO: 2383942 - RNA, 19 nt, Homo sapiens
  misc_RNA (1)...(19): siRNA sense strand
gagaggacugauagacuua

SEQ ID NO: 2383943 - RNA, 19 nt, Homo sapiens
  misc_RNA (1)...(19): siRNA sense strand
cacuuaagcuucaguacaa

SEQ ID NO: 2383944 - RNA, 19 nt, Homo sapiens
  misc_RNA (1)...(19): siRNA sense strand
gugaagaaggagaaguuga

SEQ ID NO: 2383945 - RNA, 19 nt, Homo sapiens
  misc_RNA (1)...(19): siRNA sense strand
acuugaaagaggagauuga

SEQ ID NO: 2383946 - RNA, 19 nt, Homo sapiens
  misc_RNA (1)...(19): siRNA sense strand
uugaaagaggagauugaua

SEQ ID NO: 2383947 - RNA, 19 nt, Homo sapiens
  misc_RNA (1)...(19): siRNA sense strand
cuugaauugaagagcuuua

SEQ ID NO: 2383948 - RNA, 19 nt, Homo sapiens
  misc_RNA (1)...(19): siRNA sense strand
agaaugaguaccuacgcua

SEQ ID NO: 2383949 - RNA, 19 nt, Homo sapiens
  misc_RNA (1)...(19): siRNA sense strand
gcuaugaaacagcccgcua

SEQ ID NO: 2383950 - RNA, 19 nt, Homo sapiens
  misc_RNA (1)...(19): siRNA sense strand
cuuucaaggguguacgcaa

SEQ ID NO: 2383951 - RNA, 19 nt, Homo sapiens
  misc_RNA (1)...(19): siRNA sense strand
ggacaggggucuuuggcca

SEQ ID NO: 2383952 - RNA, 19 nt, Homo sapiens
  misc_RNA (1)...(19): siRNA sense strand
acuugaaagaggagauuga

SEQ ID NO: 2383953 - RNA, 19 nt, Homo sapiens
  misc_RNA (1)...(19): siRNA sense strand
uugaaagaggagauugaua

SEQ ID NO: 2383954 - RNA, 19 nt, Homo sapiens
  misc_RNA (1)...(19): siRNA sense strand
cuugaauugaagagcuuua

SEQ ID NO: 2383955 - RNA, 19 nt, Homo sapiens
  misc_RNA (1)...(19): siRNA sense strand
agaaugaguaccuacgcua

SEQ ID NO: 2383956 - RNA, 19 nt, Homo sapiens
  misc_RNA (1)...(19): siRNA sense strand
gcuaugaaacagcccgcua

SEQ ID NO: 2383957 - RNA, 19 nt, Homo sapiens
  misc_RNA (1)...(19): siRNA sense strand
cuuucaaggguguacgcaa

SEQ ID NO: 2383958 - RNA, 19 nt, Homo sapiens
  misc_RNA (1)...(19): siRNA sense strand
ggacaggggucuuuggcca

SEQ ID NO: 2383959 - RNA, 19 nt, Homo sapiens
  misc_RNA (1)...(19): siRNA sense strand
gggucuugccagaaaguaa

SEQ ID NO: 2383960 - RNA, 19 nt, Homo sapiens
  misc_RNA (1)...(19): siRNA sense strand
uggcagaagcacuggguau

SEQ ID NO: 2383961 - RNA, 19 nt, Homo sapiens
  misc_RNA (1)...(19): siRNA sense strand
aagcaaaggaacugauuau

SEQ ID NO: 2383962 - RNA, 19 nt, Homo sapiens
  misc_RNA (1)...(19): siRNA sense strand
acuuaagggugguacaauu

SEQ ID NO: 2383963 - RNA, 19 nt, Homo sapiens
  misc_RNA (1)...(19): siRNA sense strand
agucauacaaugucacaaa

SEQ ID NO: 2383964 - RNA, 19 nt, Homo sapiens
  misc_RNA (1)...(19): siRNA sense strand
caggaguacuagaagccua

SEQ ID NO: 2383965 - RNA, 19 nt, Homo sapiens
  misc_RNA (1)...(19): siRNA sense strand
gaucaucaguauuuggaga

SEQ ID NO: 2383966 - RNA, 19 nt, Homo sapiens
  misc_RNA (1)...(19): siRNA sense strand
gcaaaauugaggucauaua

SEQ ID NO: 2383967 - RNA, 19 nt, Homo sapiens
  misc_RNA (1)...(19): siRNA sense strand
auauaagcccagaagacua

SEQ ID NO: 2383968 - RNA, 19 nt, Homo sapiens
  misc_RNA (1)...(19): siRNA sense strand
cacaaauggaacagauaau

SEQ ID NO: 2383969 - RNA, 19 nt, Homo sapiens
  misc_RNA (1)...(19): siRNA sense strand
gcucuugggcaaagcagaa

SEQ ID NO: 2383970 - RNA, 19 nt, Homo sapiens
  misc_RNA (1)...(19): siRNA sense strand
gaaucagggucuugccaga

SEQ ID NO: 2383971 - RNA, 19 nt, Homo sapiens
  misc_RNA (1)...(19): siRNA sense strand
gggcaaagcagaaguggac

SEQ ID NO: 2383972 - RNA, 19 nt, Homo sapiens
  misc_RNA (1)...(19): siRNA sense strand
ggaccagacaaauguaaaa

SEQ ID NO: 2383973 - RNA, 19 nt, Homo sapiens
  misc_RNA (1)...(19): siRNA sense strand
ugaugauggaacaggagua

SEQ ID NO: 2383974 - RNA, 19 nt, Homo sapiens
  misc_RNA (1)...(19): siRNA sense strand
cuugucagcucuugggcaa

SEQ ID NO: 2383975 - RNA, 19 nt, Homo sapiens
  misc_RNA (1)...(19): siRNA sense strand
uaucauuauacgagguaga

SEQ ID NO: 2383976 - RNA, 19 nt, Homo sapiens
  misc_RNA (1)...(19): siRNA sense strand
cgagguagaaagaugucaa

SEQ ID NO: 2383977 - RNA, 19 nt, Homo sapiens
  misc_RNA (1)...(19): siRNA sense strand
agaaguggacggagcauca

SEQ ID NO: 2383978 - RNA, 19 nt, Homo sapiens
  misc_RNA (1)...(19): siRNA sense strand
cgagcaaaauugaggucau

SEQ ID NO: 2383979 - RNA, 19 nt, Homo sapiens
  misc_RNA (1)...(19): siRNA sense strand
uuugcaaacucucgaacaa

SEQ ID NO: 2383980 - RNA, 19 nt, Homo sapiens
  misc_RNA (1)...(19): siRNA sense strand
cugcaaauuugacagccaa

SEQ ID NO: 2383981 - RNA, 19 nt, Homo sapiens
  misc_RNA (1)...(19): siRNA sense strand
uuugauagaaggagguaca

SEQ ID NO: 2383982 - RNA, 19 nt, Homo sapiens
  misc_RNA (1)...(19): siRNA sense strand
guguaauuccugugagauc

SEQ ID NO: 2383983 - RNA, 19 nt, Homo sapiens
  misc_RNA (1)...(19): siRNA sense strand
uaguguaauuccugugaga

SEQ ID NO: 2383984 - RNA, 19 nt, Homo sapiens
  misc_RNA (1)...(19): siRNA sense strand
uguucuaguuugagaucca

SEQ ID NO: 2383985 - RNA, 19 nt, Homo sapiens
  misc_RNA (1)...(19): siRNA sense strand
caaucaaugaauucagaga

SEQ ID NO: 2383986 - RNA, 19 nt, Homo sapiens
  misc_RNA (1)...(19): siRNA sense strand
gucacaaauggaacagaua

SEQ ID NO: 2383987 - RNA, 19 nt, Homo sapiens
  misc_RNA (1)...(19): siRNA sense strand
uguucuugaaggugauuua

SEQ ID NO: 2383988 - RNA, 19 nt, Homo sapiens
  misc_RNA (1)...(19): siRNA sense strand
acaaaaugguagaagccuu

SEQ ID NO: 2383989 - RNA, 19 nt, Homo sapiens
  misc_RNA (1)...(19): siRNA sense strand
cgucuuggacauuacuaaa

SEQ ID NO: 2383990 - RNA, 19 nt, Homo sapiens
  misc_RNA (1)...(19): siRNA sense strand
acucagugaaauuugcaaa

SEQ ID NO: 2383991 - RNA, 19 nt, Homo sapiens
  misc_RNA (1)...(19): siRNA sense strand
aaaaggagacucaggguau

SEQ ID NO: 2383992 - RNA, 19 nt, Homo sapiens
  misc_RNA (1)...(19): siRNA sense strand
ucauauaagcccagaagac

SEQ ID NO: 2383993 - RNA, 19 nt, Homo sapiens
  misc_RNA (1)...(19): siRNA sense strand
uggaacaggaguacuagaa

SEQ ID NO: 2383994 - RNA, 19 nt, Homo sapiens
  misc_RNA (1)...(19): siRNA sense strand
ugucacaaauggaacagau

SEQ ID NO: 2383995 - RNA, 19 nt, Homo sapiens
  misc_RNA (1)...(19): siRNA sense strand
ccacaguugcagaagaugu

SEQ ID NO: 2383996 - RNA, 19 nt, Homo sapiens
  misc_RNA (1)...(19): siRNA sense strand
cuuccagauuccagcauca

SEQ ID NO: 2383997 - RNA, 19 nt, Homo sapiens
  misc_RNA (1)...(19): siRNA sense strand
agaugaagucagagagaaa

SEQ ID NO: 2383998 - RNA, 19 nt, Homo sapiens
  misc_RNA (1)...(19): siRNA sense strand
cuucagaacaagacggaga

SEQ ID NO: 2383999 - RNA, 19 nt, Homo sapiens
  misc_RNA (1)...(19): siRNA sense strand
guucaaacaaacaaaggaa

SEQ ID NO: 2384000 - RNA, 19 nt, Homo sapiens
  misc_RNA (1)...(19): siRNA sense strand
ucaaaaucgaucagagaaa

SEQ ID NO: 2384001 - RNA, 19 nt, Homo sapiens
  misc_RNA (1)...(19): siRNA sense strand
ccuacaacucuuagaucaa

SEQ ID NO: 2384002 - RNA, 19 nt, Homo sapiens
  misc_RNA (1)...(19): siRNA sense strand
ccuuaaaaguguggaaaau

SEQ ID NO: 2384003 - RNA, 19 nt, Homo sapiens
  misc_RNA (1)...(19): siRNA sense strand
cgaucagagaaauguuaaa

SEQ ID NO: 2384004 - RNA, 19 nt, Homo sapiens
  misc_RNA (1)...(19): siRNA sense strand
cggaagugaaucugagcuu

SEQ ID NO: 2384005 - RNA, 19 nt, Homo sapiens
  misc_RNA (1)...(19): siRNA sense strand
gcucaaaagaagaaacuga

SEQ ID NO: 2384006 - RNA, 19 nt, Homo sapiens
  misc_RNA (1)...(19): siRNA sense strand
cagaauucaaguaaagaga

SEQ ID NO: 2384007 - RNA, 19 nt, Homo sapiens
  misc_RNA (1)...(19): siRNA sense strand
cugcagaugaagucagaga

SEQ ID NO: 2384008 - RNA, 19 nt, Homo sapiens
  misc_RNA (1)...(19): siRNA sense strand
cagagagaaacuuggguca

SEQ ID NO: 2384009 - RNA, 19 nt, Homo sapiens
  misc_RNA (1)...(19): siRNA sense strand
gccaaauuaaagaaggcaa

SEQ ID NO: 2384010 - RNA, 19 nt, Homo sapiens
  misc_RNA (1)...(19): siRNA sense strand
gaugcuguucagugggaua

SEQ ID NO: 2384011 - RNA, 19 nt, Homo sapiens
  misc_RNA (1)...(19): siRNA sense strand
agacggagaaagaggaacu

SEQ ID NO: 2384012 - RNA, 19 nt, Homo sapiens
  misc_RNA (1)...(19): siRNA sense strand
gcugaaguuuagagucaca

SEQ ID NO: 2384013 - RNA, 19 nt, Homo sapiens
  misc_RNA (1)...(19): siRNA sense strand
acuuauuuguggugguuca

SEQ ID NO: 2384014 - RNA, 19 nt, Homo sapiens
  misc_RNA (1)...(19): siRNA sense strand
ugugaauagagcagcaaau

SEQ ID NO: 2384015 - RNA, 19 nt, Homo sapiens
  misc_RNA (1)...(19): siRNA sense strand
cagcagagaccguggcaag

SEQ ID NO: 2384016 - RNA, 19 nt, Homo sapiens
  misc_RNA (1)...(19): siRNA sense strand
uuauugaccaagagccaaa

SEQ ID NO: 2384017 - RNA, 19 nt, Homo sapiens
  misc_RNA (1)...(19): siRNA sense strand
acuacuuacucaagacaca

SEQ ID NO: 2384018 - RNA, 19 nt, Homo sapiens
  misc_RNA (1)...(19): siRNA sense strand
cuugcaaagaugagacuga

SEQ ID NO: 2384019 - RNA, 19 nt, Homo sapiens
  misc_RNA (1)...(19): siRNA sense strand
caaagaugagacugaugaa

SEQ ID NO: 2384020 - RNA, 19 nt, Homo sapiens
  misc_RNA (1)...(19): siRNA sense strand
cuuuauugaccaagagcca

SEQ ID NO: 2384021 - RNA, 19 nt, Homo sapiens
  misc_RNA (1)...(19): siRNA sense strand
cccuuaaaaguguggaaaa

SEQ ID NO: 2384022 - RNA, 19 nt, Homo sapiens
  misc_RNA (1)...(19): siRNA sense strand
gggugcuguucaagauuau

SEQ ID NO: 2384023 - RNA, 19 nt, Homo sapiens
  misc_RNA (1)...(19): siRNA sense strand
guggauacagucuggguga

SEQ ID NO: 2384024 - RNA, 19 nt, Homo sapiens
  misc_RNA (1)...(19): siRNA sense strand
ggaaaacucccauggucaa

SEQ ID NO: 2384025 - RNA, 19 nt, Homo sapiens
  misc_RNA (1)...(19): siRNA sense strand
guucacuagccaugcuuua

SEQ ID NO: 2384026 - RNA, 19 nt, Homo sapiens
  misc_RNA (1)...(19): siRNA sense strand
ggcguuaucuggaaugcaa

SEQ ID NO: 2384027 - RNA, 19 nt, Homo sapiens
  misc_RNA (1)...(19): siRNA sense strand
ggucaaaccccuuaaaagu

SEQ ID NO: 2384028 - RNA, 19 nt, Homo sapiens
  misc_RNA (1)...(19): siRNA sense strand
agucaaaaucgaucagaga

SEQ ID NO: 2384029 - RNA, 19 nt, Homo sapiens
  misc_RNA (1)...(19): siRNA sense strand
agauuugccauuuggaaaa

SEQ ID NO: 2384030 - RNA, 19 nt, Homo sapiens
  misc_RNA (1)...(19): siRNA sense strand
acauugaagaagccacuaa

SEQ ID NO: 2384031 - RNA, 19 nt, Homo sapiens
  misc_RNA (1)...(19): siRNA sense strand
caagacggagaaagaggaa

SEQ ID NO: 2384032 - RNA, 19 nt, Homo sapiens
  misc_RNA (1)...(19): siRNA sense strand
ugaugaaagcucaaaagaa

SEQ ID NO: 2384033 - RNA, 19 nt, Homo sapiens
  misc_RNA (1)...(19): siRNA sense strand
ugauauaauagucgaucca

SEQ ID NO: 2384034 - RNA, 19 nt, Homo sapiens
  misc_RNA (1)...(19): siRNA sense strand
ggacauagugugauggaca

SEQ ID NO: 2384035 - RNA, 19 nt, Homo sapiens
  misc_RNA (1)...(19): siRNA sense strand
cgaaaacagaagagcaaaa

SEQ ID NO: 2384036 - RNA, 19 nt, Homo sapiens
  misc_RNA (1)...(19): siRNA sense strand
uuuccaaagcagaggcaua

SEQ ID NO: 2384037 - RNA, 19 nt, Homo sapiens
  misc_RNA (1)...(19): siRNA sense strand
caggaagagcugaagaaga

SEQ ID NO: 2384038 - RNA, 19 nt, Homo sapiens
  misc_RNA (1)...(19): siRNA sense strand
cugcagaagauuauacgaa

SEQ ID NO: 2384039 - RNA, 19 nt, Homo sapiens
  misc_RNA (1)...(19): siRNA sense strand
gauguuuccucgugggaca

SEQ ID NO: 2384040 - RNA, 19 nt, Homo sapiens
  misc_RNA (1)...(19): siRNA sense strand
gugagcagcaaguggaaga

SEQ ID NO: 2384041 - RNA, 19 nt, Homo sapiens
  misc_RNA (1)...(19): siRNA sense strand
cagaggagaaacggagaaa

SEQ ID NO: 2384042 - RNA, 19 nt, Homo sapiens
  misc_RNA (1)...(19): siRNA sense strand
agacgggaucagaagcaaa

SEQ ID NO: 2384043 - RNA, 19 nt, Homo sapiens
  misc_RNA (1)...(19): siRNA sense strand
gcuccgauagcgaggaaga

SEQ ID NO: 2384044 - RNA, 19 nt, Homo sapiens
  misc_RNA (1)...(19): siRNA sense strand
gcaaguggaagaagagcca

SEQ ID NO: 2384045 - RNA, 19 nt, Homo sapiens
  misc_RNA (1)...(19): siRNA sense strand
uggcggaucuggaggacca

SEQ ID NO: 2384046 - RNA, 19 nt, Homo sapiens
  misc_RNA (1)...(19): siRNA sense strand
acuccagauuucagauauu

SEQ ID NO: 2384047 - RNA, 19 nt, Homo sapiens
  misc_RNA (1)...(19): siRNA sense strand
ugguuugacugaugaugaa

SEQ ID NO: 2384048 - RNA, 19 nt, Homo sapiens
  misc_RNA (1)...(19): siRNA sense strand
gagcaaaagugagcagcaa

SEQ ID NO: 2384049 - RNA, 19 nt, Homo sapiens
  misc_RNA (1)...(19): siRNA sense strand
gccaagggaccaaggccaa

SEQ ID NO: 2384050 - RNA, 19 nt, Homo sapiens
  misc_RNA (1)...(19): siRNA sense strand
ggaggagcuaacugaggaa

SEQ ID NO: 2384051 - RNA, 19 nt, Homo sapiens
  misc_RNA (1)...(19): siRNA sense strand
ccccagaguugcagcacaa

SEQ ID NO: 2384052 - RNA, 19 nt, Homo sapiens
  misc_RNA (1)...(19): siRNA sense strand
cagccagaguguccaggaa

SEQ ID NO: 2384053 - RNA, 19 nt, Homo sapiens
  misc_RNA (1)...(19): siRNA sense strand
aggauuaaacauagcacca

SEQ ID NO: 2384054 - RNA, 19 nt, Homo sapiens
  misc_RNA (1)...(19): siRNA sense strand
cagacaccacagaggagaa

SEQ ID NO: 2384055 - RNA, 19 nt, Homo sapiens
  misc_RNA (1)...(19): siRNA sense strand
cuaagugagcugaagcaga

SEQ ID NO: 2384056 - RNA, 19 nt, Homo sapiens
  misc_RNA (1)...(19): siRNA sense strand
cugaagaggccauugagga

SEQ ID NO: 2384057 - RNA, 19 nt, Homo sapiens
  misc_RNA (1)...(19): siRNA sense strand
acagaggagaaacggagaa

SEQ ID NO: 2384058 - RNA, 19 nt, Homo sapiens
  misc_RNA (1)...(19): siRNA sense strand
ugaugaugaaacagagcau

SEQ ID NO: 2384059 - RNA, 19 nt, Homo sapiens
  misc_RNA (1)...(19): siRNA sense strand
agcaaaggacccagguaca

SEQ ID NO: 2384060 - RNA, 19 nt, Homo sapiens
  misc_RNA (1)...(19): siRNA sense strand
agcagaagcuggaugagga

SEQ ID NO: 2384061 - RNA, 19 nt, Homo sapiens
  misc_RNA (1)...(19): siRNA sense strand
uguauggacuggagaccca

SEQ ID NO: 2384062 - RNA, 19 nt, Homo sapiens
  misc_RNA (1)...(19): siRNA sense strand
agaaaaugagcaagagaaa

SEQ ID NO: 2384063 - RNA, 19 nt, Homo sapiens
  misc_RNA (1)...(19): siRNA sense strand
uggaaugauuggagaaaau

SEQ ID NO: 2384064 - RNA, 19 nt, Homo sapiens
  misc_RNA (1)...(19): siRNA sense strand
gggaagacauacaagcaga

SEQ ID NO: 2384065 - RNA, 19 nt, Homo sapiens
  misc_RNA (1)...(19): siRNA sense strand
uggaagaagccaucagaau

SEQ ID NO: 2384066 - RNA, 19 nt, Homo sapiens
  misc_RNA (1)...(19): siRNA sense strand
uggucaagcaguacaguua

SEQ ID NO: 2384067 - RNA, 19 nt, Homo sapiens
  misc_RNA (1)...(19): siRNA sense strand
aggucaaggugaagauguu

SEQ ID NO: 2384068 - RNA, 19 nt, Homo sapiens
  misc_RNA (1)...(19): siRNA sense strand
cagaacucauacaggagaa

SEQ ID NO: 2384069 - RNA, 19 nt, Homo sapiens
  misc_RNA (1)...(19): siRNA sense strand
cagaacucauacaggagaa

SEQ ID NO: 2384070 - RNA, 19 nt, Homo sapiens
  misc_RNA (1)...(19): siRNA sense strand
gagaaaaugagcaagagaa

SEQ ID NO: 2384071 - RNA, 19 nt, Homo sapiens
  misc_RNA (1)...(19): siRNA sense strand
aggacaugcuacaagagua

SEQ ID NO: 2384072 - RNA, 19 nt, Homo sapiens
  misc_RNA (1)...(19): siRNA sense strand
cgucagaacucauacagga

SEQ ID NO: 2384073 - RNA, 19 nt, Homo sapiens
  misc_RNA (1)...(19): siRNA sense strand
aguuaugaccagagugcau

SEQ ID NO: 2384074 - RNA, 19 nt, Homo sapiens
  misc_RNA (1)...(19): siRNA sense strand
ucaacagaguggagagaag

SEQ ID NO: 2384075 - RNA, 19 nt, Homo sapiens
  misc_RNA (1)...(19): siRNA sense strand
gguugcaauuguagcucaa

SEQ ID NO: 2384076 - RNA, 19 nt, Homo sapiens
  misc_RNA (1)...(19): siRNA sense strand
caguuugcgucuagaggau

SEQ ID NO: 2384077 - RNA, 19 nt, Homo sapiens
  misc_RNA (1)...(19): siRNA sense strand
guuagaagaugguaccaca

SEQ ID NO: 2384078 - RNA, 19 nt, Homo sapiens
  misc_RNA (1)...(19): siRNA sense strand
uuucaaaacuucaggagau

SEQ ID NO: 2384079 - RNA, 19 nt, Homo sapiens
  misc_RNA (1)...(19): siRNA sense strand
caucagaacucauacagga

SEQ ID NO: 2384080 - RNA, 19 nt, Homo sapiens
  misc_RNA (1)...(19): siRNA sense strand
gcgucuagaggauggucaa

SEQ ID NO: 2384081 - RNA, 19 nt, Homo sapiens
  misc_RNA (1)...(19): siRNA sense strand
auaugauggauguggaaaa

SEQ ID NO: 2384082 - RNA, 19 nt, Homo sapiens
  misc_RNA (1)...(19): siRNA sense strand
ggucaugcacaaacggaca

SEQ ID NO: 2384083 - RNA, 19 nt, Homo sapiens
  misc_RNA (1)...(19): siRNA sense strand
gugcauuacaggcgguuca

SEQ ID NO: 2384084 - RNA, 19 nt, Homo sapiens
  misc_RNA (1)...(19): siRNA sense strand
ccacgcuggucaugcacaa

SEQ ID NO: 2384085 - RNA, 19 nt, Homo sapiens
  misc_RNA (1)...(19): siRNA sense strand
ccaucagugcuuuggaaca

SEQ ID NO: 2384086 - RNA, 19 nt, Homo sapiens
  misc_RNA (1)...(19): siRNA sense strand
cugcuuacauacaacacaa

SEQ ID NO: 2384087 - RNA, 19 nt, Homo sapiens
  misc_RNA (1)...(19): siRNA sense strand
uggaacaguaugcagcaaa

SEQ ID NO: 2384088 - RNA, 19 nt, Homo sapiens
  misc_RNA (1)...(19): siRNA sense strand
ugggaaggcauuugcaaca

SEQ ID NO: 2384089 - RNA, 19 nt, Homo sapiens
  misc_RNA (1)...(19): siRNA sense strand
aggcauuugcaacagguua

SEQ ID NO: 2384090 - RNA, 19 nt, Homo sapiens
  misc_RNA (1)...(19): siRNA sense strand
gggugugacaaaagguuua

SEQ ID NO: 2384091 - RNA, 19 nt, Homo sapiens
  misc_RNA (1)...(19): siRNA sense strand
ccaucgaggaggagcagga

SEQ ID NO: 2384092 - RNA, 19 nt, Homo sapiens
  misc_RNA (1)...(19): siRNA sense strand
acauguacccauaccuaaa

SEQ ID NO: 2384093 - RNA, 19 nt, Homo sapiens
  misc_RNA (1)...(19): siRNA sense strand
ggcauuucgaugugaauau

SEQ ID NO: 2384094 - RNA, 19 nt, Homo sapiens
  misc_RNA (1)...(19): siRNA sense strand
aagcaguacaguuagaaga

SEQ ID NO: 2384095 - RNA, 19 nt, Homo sapiens
  misc_RNA (1)...(19): siRNA sense strand
gcuggaagaugguaccaca

SEQ ID NO: 2384096 - RNA, 19 nt, Homo sapiens
  misc_RNA (1)...(19): siRNA sense strand
guacuggaaugauuggaga

SEQ ID NO: 2384097 - RNA, 19 nt, Homo sapiens
  misc_RNA (1)...(19): siRNA sense strand
ggagaaaaugagcaagaga

SEQ ID NO: 2384098 - RNA, 19 nt, Homo sapiens
  misc_RNA (1)...(19): siRNA sense strand
uacaagaguaacugcuaaa

SEQ ID NO: 2384099 - RNA, 19 nt, Homo sapiens
  misc_RNA (1)...(19): siRNA sense strand
cauugauggaagugaaagu

SEQ ID NO: 2384100 - RNA, 19 nt, Homo sapiens
  misc_RNA (1)...(19): siRNA sense strand
gauuggagaaaaugagcaa

SEQ ID NO: 2384101 - RNA, 19 nt, Homo sapiens
  misc_RNA (1)...(19): siRNA sense strand
ccaggaugugggagggcau

SEQ ID NO: 2384102 - RNA, 19 nt, Homo sapiens
  misc_RNA (1)...(19): siRNA sense strand
gaaaaugagcaagagaaaa

SEQ ID NO: 2384103 - RNA, 19 nt, Homo sapiens
  misc_RNA (1)...(19): siRNA sense strand
aggcagucaccguggcaga

SEQ ID NO: 2384104 - RNA, 19 nt, Homo sapiens
  misc_RNA (1)...(19): siRNA sense strand
ucggaagauaauuguacua

SEQ ID NO: 2384105 - RNA, 19 nt, Homo sapiens
  misc_RNA (1)...(19): siRNA sense strand
acacaggagaaaagccaua

SEQ ID NO: 2384106 - RNA, 19 nt, Homo sapiens
  misc_RNA (1)...(19): siRNA sense strand
ugacaaaagguuuacagaa

SEQ ID NO: 2384107 - RNA, 19 nt, Homo sapiens
  misc_RNA (1)...(19): siRNA sense strand
ucacaaugguaacgcagga

SEQ ID NO: 2384108 - RNA, 19 nt, Homo sapiens
  misc_RNA (1)...(19): siRNA sense strand
gcaugcaggcugugggaag

SEQ ID NO: 2384109 - RNA, 19 nt, Homo sapiens
  misc_RNA (1)...(19): siRNA sense strand
ucuuaaagggucccagauu

SEQ ID NO: 2384110 - RNA, 19 nt, Homo sapiens
  misc_RNA (1)...(19): siRNA sense strand
ccagauugcaguucagcuu

SEQ ID NO: 2384111 - RNA, 19 nt, Homo sapiens
  misc_RNA (1)...(19): siRNA sense strand
cuagaauccaacaaggaga

SEQ ID NO: 2384112 - RNA, 19 nt, Homo sapiens
  misc_RNA (1)...(19): siRNA sense strand
ccaaagauaguuaugacca

SEQ ID NO: 2384113 - RNA, 19 nt, Homo sapiens
  misc_RNA (1)...(19): siRNA sense strand
caacauaucucaagcugac

SEQ ID NO: 2384114 - RNA, 19 nt, Homo sapiens
  misc_RNA (1)...(19): siRNA sense strand
ucagaauagcgucuagaau

SEQ ID NO: 2384115 - RNA, 19 nt, Homo sapiens
  misc_RNA (1)...(19): siRNA sense strand
ccaugagaguagccagcaa

SEQ ID NO: 2384116 - RNA, 19 nt, Homo sapiens
  misc_RNA (1)...(19): siRNA sense strand
agaaaugcuacgagguguu

SEQ ID NO: 2384117 - RNA, 19 nt, Homo sapiens
  misc_RNA (1)...(19): siRNA sense strand
caucaagagcuucgauauu

SEQ ID NO: 2384118 - RNA, 19 nt, Homo sapiens
  misc_RNA (1)...(19): siRNA sense strand
gcucaauggcuuaagcaca

SEQ ID NO: 2384119 - RNA, 19 nt, Homo sapiens
  misc_RNA (1)...(19): siRNA sense strand
acaacuucauccugagcaa

SEQ ID NO: 2384120 - RNA, 19 nt, Homo sapiens
  misc_RNA (1)...(19): siRNA sense strand
ggacacaacuucauccuga

SEQ ID NO: 2384121 - RNA, 19 nt, Homo sapiens
  misc_RNA (1)...(19): siRNA sense strand
augacaacaucaagagcuu

SEQ ID NO: 2384122 - RNA, 19 nt, Homo sapiens
  misc_RNA (1)...(19): siRNA sense strand
aggccaagcagaucaacaa

SEQ ID NO: 2384123 - RNA, 19 nt, Homo sapiens
  misc_RNA (1)...(19): siRNA sense strand
ugaacuacuggaaggacaa

SEQ ID NO: 2384124 - RNA, 19 nt, Homo sapiens
  misc_RNA (1)...(19): siRNA sense strand
ugucacaguaccuggacua

SEQ ID NO: 2384125 - RNA, 19 nt, Homo sapiens
  misc_RNA (1)...(19): siRNA sense strand
aggaagugccuuaugccua

SEQ ID NO: 2384126 - RNA, 19 nt, Homo sapiens
  misc_RNA (1)...(19): siRNA sense strand
uauuaaggcucaauggcuu

SEQ ID NO: 2384127 - RNA, 19 nt, Homo sapiens
  misc_RNA (1)...(19): siRNA sense strand
augaacuacuggaaggaca

SEQ ID NO: 2384128 - RNA, 19 nt, Homo sapiens
  misc_RNA (1)...(19): siRNA sense strand
gcaaauaacagaaaugccu

SEQ ID NO: 2384129 - RNA, 19 nt, Homo sapiens
  misc_RNA (1)...(19): siRNA sense strand
gcaauguguggguuggcua

SEQ ID NO: 2384130 - RNA, 19 nt, Homo sapiens
  misc_RNA (1)...(19): siRNA sense strand
uggcuuaagcacaacaaau

SEQ ID NO: 2384131 - RNA, 19 nt, Homo sapiens
  misc_RNA (1)...(19): siRNA sense strand
gcuucgauauuaaggcuca

SEQ ID NO: 2384132 - RNA, 19 nt, Homo sapiens
  misc_RNA (1)...(19): siRNA sense strand
gggccauugaucuggauga

SEQ ID NO: 2384133 - RNA, 19 nt, Homo sapiens
  misc_RNA (1)...(19): siRNA sense strand
ucaucaaauuccugcgcca

SEQ ID NO: 2384134 - RNA, 19 nt, Homo sapiens
  misc_RNA (1)...(19): siRNA sense strand
gagcaggaggccaagcaga

SEQ ID NO: 2384135 - RNA, 19 nt, Homo sapiens
  misc_RNA (1)...(19): siRNA sense strand
caucaagagcuucgauauu

SEQ ID NO: 2384136 - RNA, 19 nt, Homo sapiens
  misc_RNA (1)...(19): siRNA sense strand
gcucaauggcuuaagcaca

SEQ ID NO: 2384137 - RNA, 19 nt, Homo sapiens
  misc_RNA (1)...(19): siRNA sense strand
acaacuucauccugagcaa

SEQ ID NO: 2384138 - RNA, 19 nt, Homo sapiens
  misc_RNA (1)...(19): siRNA sense strand
ggacacaacuucauccuga

SEQ ID NO: 2384139 - RNA, 19 nt, Homo sapiens
  misc_RNA (1)...(19): siRNA sense strand
augacaacaucaagagcuu

SEQ ID NO: 2384140 - RNA, 19 nt, Homo sapiens
  misc_RNA (1)...(19): siRNA sense strand
aggccaagcagaucaacaa

SEQ ID NO: 2384141 - RNA, 19 nt, Homo sapiens
  misc_RNA (1)...(19): siRNA sense strand
ugaacuacuggaaggacaa

SEQ ID NO: 2384142 - RNA, 19 nt, Homo sapiens
  misc_RNA (1)...(19): siRNA sense strand
ugucacaguaccuggacua

SEQ ID NO: 2384143 - RNA, 19 nt, Homo sapiens
  misc_RNA (1)...(19): siRNA sense strand
aggaagugccuuaugccua

SEQ ID NO: 2384144 - RNA, 19 nt, Homo sapiens
  misc_RNA (1)...(19): siRNA sense strand
uauuaaggcucaauggcuu

SEQ ID NO: 2384145 - RNA, 19 nt, Homo sapiens
  misc_RNA (1)...(19): siRNA sense strand
augaacuacuggaaggaca

SEQ ID NO: 2384146 - RNA, 19 nt, Homo sapiens
  misc_RNA (1)...(19): siRNA sense strand
gcaaauaacagaaaugccu

SEQ ID NO: 2384147 - RNA, 19 nt, Homo sapiens
  misc_RNA (1)...(19): siRNA sense strand
gcaauguguggguuggcua

SEQ ID NO: 2384148 - RNA, 19 nt, Homo sapiens
  misc_RNA (1)...(19): siRNA sense strand
uggcuuaagcacaacaaau

SEQ ID NO: 2384149 - RNA, 19 nt, Homo sapiens
  misc_RNA (1)...(19): siRNA sense strand
gcuucgauauuaaggcuca

SEQ ID NO: 2384150 - RNA, 19 nt, Homo sapiens
  misc_RNA (1)...(19): siRNA sense strand
gggccauugaucuggauga

SEQ ID NO: 2384151 - RNA, 19 nt, Homo sapiens
  misc_RNA (1)...(19): siRNA sense strand
ucaucaaauuccugcgcca

SEQ ID NO: 2384152 - RNA, 19 nt, Homo sapiens
  misc_RNA (1)...(19): siRNA sense strand
gagcaggaggccaagcaga

SEQ ID NO: 2384153 - RNA, 19 nt, Homo sapiens
  misc_RNA (1)...(19): siRNA sense strand
cuguggaauuuguaggauu

SEQ ID NO: 2384154 - RNA, 19 nt, Homo sapiens
  misc_RNA (1)...(19): siRNA sense strand
cugugaaaacuguggaauu

SEQ ID NO: 2384155 - RNA, 19 nt, Homo sapiens
  misc_RNA (1)...(19): siRNA sense strand
gcacagacuccuaugccau

SEQ ID NO: 2384156 - RNA, 19 nt, Homo sapiens
  misc_RNA (1)...(19): siRNA sense strand
aaauguugaaagaaggcua

SEQ ID NO: 2384157 - RNA, 19 nt, Homo sapiens
  misc_RNA (1)...(19): siRNA sense strand
gaaauguaacuuaugccua

SEQ ID NO: 2384158 - RNA, 19 nt, Homo sapiens
  misc_RNA (1)...(19): siRNA sense strand
agaacguguuaugaagaaa

SEQ ID NO: 2384159 - RNA, 19 nt, Homo sapiens
  misc_RNA (1)...(19): siRNA sense strand
guagaauuucacuggauca

SEQ ID NO: 2384160 - RNA, 19 nt, Homo sapiens
  misc_RNA (1)...(19): siRNA sense strand
acguagaauuucacuggau

SEQ ID NO: 2384161 - RNA, 19 nt, Homo sapiens
  misc_RNA (1)...(19): siRNA sense strand
ccaucagaauaucagaaca

SEQ ID NO: 2384162 - RNA, 19 nt, Homo sapiens
  misc_RNA (1)...(19): siRNA sense strand
agaucagggagcagagaaa

SEQ ID NO: 2384163 - RNA, 19 nt, Homo sapiens
  misc_RNA (1)...(19): siRNA sense strand
agagaaacaugaaggcaca

SEQ ID NO: 2384164 - RNA, 19 nt, Homo sapiens
  misc_RNA (1)...(19): siRNA sense strand
acaagaaacuaaaggccuu

SEQ ID NO: 2384165 - RNA, 19 nt, Homo sapiens
  misc_RNA (1)...(19): siRNA sense strand
caugaauacagcuggaaau

SEQ ID NO: 2384166 - RNA, 19 nt, Homo sapiens
  misc_RNA (1)...(19): siRNA sense strand
cagcgaaagcagugaaacu

SEQ ID NO: 2384167 - RNA, 19 nt, Homo sapiens
  misc_RNA (1)...(19): siRNA sense strand
gcuguauaacuguggaauu

SEQ ID NO: 2384168 - RNA, 19 nt, Homo sapiens
  misc_RNA (1)...(19): siRNA sense strand
ucauaaagcugaaagugga

SEQ ID NO: 2384169 - RNA, 19 nt, Homo sapiens
  misc_RNA (1)...(19): siRNA sense strand
ggugauaaccucauggcuu

SEQ ID NO: 2384170 - RNA, 19 nt, Homo sapiens
  misc_RNA (1)...(19): siRNA sense strand
uagcacugauccaggcaaa

SEQ ID NO: 2384171 - RNA, 19 nt, Homo sapiens
  misc_RNA (1)...(19): siRNA sense strand
uuugaguacuuaagaggua

SEQ ID NO: 2384172 - RNA, 19 nt, Homo sapiens
  misc_RNA (1)...(19): siRNA sense strand
gcaagcacaauuugggaau

SEQ ID NO: 2384173 - RNA, 19 nt, Homo sapiens
  misc_RNA (1)...(19): siRNA sense strand
aaccaaacaacaacagaua

SEQ ID NO: 2384174 - RNA, 19 nt, Homo sapiens
  misc_RNA (1)...(19): siRNA sense strand
cuucaaaugagcaggacca

SEQ ID NO: 2384175 - RNA, 19 nt, Homo sapiens
  misc_RNA (1)...(19): siRNA sense strand
caauggaauccucugguaa

SEQ ID NO: 2384176 - RNA, 19 nt, Homo sapiens
  misc_RNA (1)...(19): siRNA sense strand
aagaacagcaagauccaaa

SEQ ID NO: 2384177 - RNA, 19 nt, Homo sapiens
  misc_RNA (1)...(19): siRNA sense strand
cugcaaaaucaaagauaca

SEQ ID NO: 2384178 - RNA, 19 nt, Homo sapiens
  misc_RNA (1)...(19): siRNA sense strand
gaaacuugcagcaguaaaa

SEQ ID NO: 2384179 - RNA, 19 nt, Homo sapiens
  misc_RNA (1)...(19): siRNA sense strand
acucagcuguugaagaaau

SEQ ID NO: 2384180 - RNA, 19 nt, Homo sapiens
  misc_RNA (1)...(19): siRNA sense strand
agagauaugaguugcugua

SEQ ID NO: 2384181 - RNA, 19 nt, Homo sapiens
  misc_RNA (1)...(19): siRNA sense strand
aagaaugagacugguaaua

SEQ ID NO: 2384182 - RNA, 19 nt, Homo sapiens
  misc_RNA (1)...(19): siRNA sense strand
agggaaaucaagucaguca

SEQ ID NO: 2384183 - RNA, 19 nt, Homo sapiens
  misc_RNA (1)...(19): siRNA sense strand
ucaugaauacagcuggaaa

SEQ ID NO: 2384184 - RNA, 19 nt, Homo sapiens
  misc_RNA (1)...(19): siRNA sense strand
aagcacaauuugggaauau

SEQ ID NO: 2384185 - RNA, 19 nt, Homo sapiens
  misc_RNA (1)...(19): siRNA sense strand
cuuugaaucaugcagauaa

SEQ ID NO: 2384186 - RNA, 19 nt, Homo sapiens
  misc_RNA (1)...(19): siRNA sense strand
ggaucagacaaaggugaaa

SEQ ID NO: 2384187 - RNA, 19 nt, Homo sapiens
  misc_RNA (1)...(19): siRNA sense strand
ggucaguccucugggauca

SEQ ID NO: 2384188 - RNA, 19 nt, Homo sapiens
  misc_RNA (1)...(19): siRNA sense strand
gcuuauauccaaaugaagu

SEQ ID NO: 2384189 - RNA, 19 nt, Homo sapiens
  misc_RNA (1)...(19): siRNA sense strand
aggcuaucaucguaaaaua

SEQ ID NO: 2384190 - RNA, 19 nt, Homo sapiens
  misc_RNA (1)...(19): siRNA sense strand
agccauaugucucagaaau

SEQ ID NO: 2384191 - RNA, 19 nt, Homo sapiens
  misc_RNA (1)...(19): siRNA sense strand
agccauaucaguuggugaa

SEQ ID NO: 2384192 - RNA, 19 nt, Homo sapiens
  misc_RNA (1)...(19): siRNA sense strand
acuugaacccggagaaugu

SEQ ID NO: 2384193 - RNA, 19 nt, Homo sapiens
  misc_RNA (1)...(19): siRNA sense strand
gaaaaugaagcaauggaau

SEQ ID NO: 2384194 - RNA, 19 nt, Homo sapiens
  misc_RNA (1)...(19): siRNA sense strand
aaaucaagucagucaugaa

SEQ ID NO: 2384195 - RNA, 19 nt, Homo sapiens
  misc_RNA (1)...(19): siRNA sense strand
cagccauaugucucagaaa

SEQ ID NO: 2384196 - RNA, 19 nt, Homo sapiens
  misc_RNA (1)...(19): siRNA sense strand
gagaaggaguuauccacca

SEQ ID NO: 2384197 - RNA, 19 nt, Homo sapiens
  misc_RNA (1)...(19): siRNA sense strand
uauuguuggucaaggcuau

SEQ ID NO: 2384198 - RNA, 19 nt, Homo sapiens
  misc_RNA (1)...(19): siRNA sense strand
ccaucuugcuggcagucua

SEQ ID NO: 2384199 - RNA, 19 nt, Homo sapiens
  misc_RNA (1)...(19): siRNA sense strand
cugagaaagcuuugcaucu

SEQ ID NO: 2384200 - RNA, 19 nt, Homo sapiens
  misc_RNA (1)...(19): siRNA sense strand
uuucacaggguaacaauaa

SEQ ID NO: 2384201 - RNA, 19 nt, Homo sapiens
  misc_RNA (1)...(19): siRNA sense strand
aaagaaugagacugguaau

SEQ ID NO: 2384202 - RNA, 19 nt, Homo sapiens
  misc_RNA (1)...(19): siRNA sense strand
gcaggaaaauggggcuaaa

SEQ ID NO: 2384203 - RNA, 19 nt, Homo sapiens
  misc_RNA (1)...(19): siRNA sense strand
aggaucagacaaaggugaa

SEQ ID NO: 2384204 - RNA, 19 nt, Homo sapiens
  misc_RNA (1)...(19): siRNA sense strand
ugaucaagagaaggaguua

SEQ ID NO: 2384205 - RNA, 19 nt, Homo sapiens
  misc_RNA (1)...(19): siRNA sense strand
gcuuugaaucaugcagaua

SEQ ID NO: 2384206 - RNA, 19 nt, Homo sapiens
  misc_RNA (1)...(19): siRNA sense strand
ucacugaucaagagaagga

SEQ ID NO: 2384207 - RNA, 19 nt, Homo sapiens
  misc_RNA (1)...(19): siRNA sense strand
aacacagagagcagcgaaa

SEQ ID NO: 2384208 - RNA, 19 nt, Homo sapiens
  misc_RNA (1)...(19): siRNA sense strand
cagauaaacuucuucagca

SEQ ID NO: 2384209 - RNA, 19 nt, Homo sapiens
  misc_RNA (1)...(19): siRNA sense strand
cacuuaaccagcugaagaa

SEQ ID NO: 2384210 - RNA, 19 nt, Homo sapiens
  misc_RNA (1)...(19): siRNA sense strand
gcauguuguacuauaauca

SEQ ID NO: 2384211 - RNA, 19 nt, Homo sapiens
  misc_RNA (1)...(19): siRNA sense strand
gaucuaaucauaaagcuga

SEQ ID NO: 2384212 - RNA, 19 nt, Homo sapiens
  misc_RNA (1)...(19): siRNA sense strand
agaaagagcaagaaggcaa

SEQ ID NO: 2384213 - RNA, 19 nt, Homo sapiens
  misc_RNA (1)...(19): siRNA sense strand
ggauaaaucaugagagcca

SEQ ID NO: 2384214 - RNA, 19 nt, Homo sapiens
  misc_RNA (1)...(19): siRNA sense strand
aggaagacgaggaggauga

SEQ ID NO: 2384215 - RNA, 19 nt, Homo sapiens
  misc_RNA (1)...(19): siRNA sense strand
uggaauaugaagugggaga

SEQ ID NO: 2384216 - RNA, 19 nt, Homo sapiens
  misc_RNA (1)...(19): siRNA sense strand
aagaggaggaugaggacaa

SEQ ID NO: 2384217 - RNA, 19 nt, Homo sapiens
  misc_RNA (1)...(19): siRNA sense strand
agguagaaagaaagagcaa

SEQ ID NO: 2384218 - RNA, 19 nt, Homo sapiens
  misc_RNA (1)...(19): siRNA sense strand
cugcagacccaaaggagaa

SEQ ID NO: 2384219 - RNA, 19 nt, Homo sapiens
  misc_RNA (1)...(19): siRNA sense strand
cugaagagcagcaagagaa

SEQ ID NO: 2384220 - RNA, 19 nt, Homo sapiens
  misc_RNA (1)...(19): siRNA sense strand
gccaauaaagauagucaaa

SEQ ID NO: 2384221 - RNA, 19 nt, Homo sapiens
  misc_RNA (1)...(19): siRNA sense strand
acgagcauccagagagaaa

SEQ ID NO: 2384222 - RNA, 19 nt, Homo sapiens
  misc_RNA (1)...(19): siRNA sense strand
augagaaagaggaggauga

SEQ ID NO: 2384223 - RNA, 19 nt, Homo sapiens
  misc_RNA (1)...(19): siRNA sense strand
gcugagaguacgugggcuu

SEQ ID NO: 2384224 - RNA, 19 nt, Homo sapiens
  misc_RNA (1)...(19): siRNA sense strand
gcacaaagcaggcaaggca

SEQ ID NO: 2384225 - RNA, 19 nt, Homo sapiens
  misc_RNA (1)...(19): siRNA sense strand
cugggaaagaggaggaaga

SEQ ID NO: 2384226 - RNA, 19 nt, Homo sapiens
  misc_RNA (1)...(19): siRNA sense strand
gcgagaagacagaaagcga

SEQ ID NO: 2384227 - RNA, 19 nt, Homo sapiens
  misc_RNA (1)...(19): siRNA sense strand
uuugagagcaagauggaaa

SEQ ID NO: 2384228 - RNA, 19 nt, Homo sapiens
  misc_RNA (1)...(19): siRNA sense strand
gggccauagcugugcagaa

SEQ ID NO: 2384229 - RNA, 19 nt, Homo sapiens
  misc_RNA (1)...(19): siRNA sense strand
cuuaauacagcaagaaaga

SEQ ID NO: 2384230 - RNA, 19 nt, Homo sapiens
  misc_RNA (1)...(19): siRNA sense strand
agacagaaagcgaugaaaa

SEQ ID NO: 2384231 - RNA, 19 nt, Homo sapiens
  misc_RNA (1)...(19): siRNA sense strand
ugaagagcagcaagagaaa

SEQ ID NO: 2384232 - RNA, 19 nt, Homo sapiens
  misc_RNA (1)...(19): siRNA sense strand
ugaucaacauggcggacaa

SEQ ID NO: 2384233 - RNA, 19 nt, Homo sapiens
  misc_RNA (1)...(19): siRNA sense strand
cggcaaagaagaaggcacu

SEQ ID NO: 2384234 - RNA, 19 nt, Homo sapiens
  misc_RNA (1)...(19): siRNA sense strand
cucgaggucuugagggaua

SEQ ID NO: 2384235 - RNA, 19 nt, Homo sapiens
  misc_RNA (1)...(19): siRNA sense strand
agaaaggaagcauuggaaa

SEQ ID NO: 2384236 - RNA, 19 nt, Homo sapiens
  misc_RNA (1)...(19): siRNA sense strand
gaugagugguggugggacu

SEQ ID NO: 2384237 - RNA, 19 nt, Homo sapiens
  misc_RNA (1)...(19): siRNA sense strand
aggaagaugcugaauguau

SEQ ID NO: 2384238 - RNA, 19 nt, Homo sapiens
  misc_RNA (1)...(19): siRNA sense strand
agaaagaggaggaugagga

SEQ ID NO: 2384239 - RNA, 19 nt, Homo sapiens
  misc_RNA (1)...(19): siRNA sense strand
cuccacagcccgagagcaa

SEQ ID NO: 2384240 - RNA, 19 nt, Homo sapiens
  misc_RNA (1)...(19): siRNA sense strand
gguggaagaagcaguacaa

SEQ ID NO: 2384241 - RNA, 19 nt, Homo sapiens
  misc_RNA (1)...(19): siRNA sense strand
aggaggaugaggaggaaga

SEQ ID NO: 2384242 - RNA, 19 nt, Homo sapiens
  misc_RNA (1)...(19): siRNA sense strand
gagaagaucacgaaggugu

SEQ ID NO: 2384243 - RNA, 19 nt, Homo sapiens
  misc_RNA (1)...(19): siRNA sense strand
ccgaauuacaaacgccaua

SEQ ID NO: 2384244 - RNA, 19 nt, Homo sapiens
  misc_RNA (1)...(19): siRNA sense strand
gggacugccucgaggucuu

SEQ ID NO: 2384245 - RNA, 19 nt, Homo sapiens
  misc_RNA (1)...(19): siRNA sense strand
guacccgaucagaggauaa

SEQ ID NO: 2384246 - RNA, 19 nt, Homo sapiens
  misc_RNA (1)...(19): siRNA sense strand
uggcaggcacacaaagaaa

SEQ ID NO: 2384247 - RNA, 19 nt, Homo sapiens
  misc_RNA (1)...(19): siRNA sense strand
uggcagagguuccagguga

SEQ ID NO: 2384248 - RNA, 19 nt, Homo sapiens
  misc_RNA (1)...(19): siRNA sense strand
cuccgcagguagaaagaaa

SEQ ID NO: 2384249 - RNA, 19 nt, Homo sapiens
  misc_RNA (1)...(19): siRNA sense strand
acaucaagcugcuggagga

SEQ ID NO: 2384250 - RNA, 19 nt, Homo sapiens
  misc_RNA (1)...(19): siRNA sense strand
uggcaggacucgcuggcua

SEQ ID NO: 2384251 - RNA, 19 nt, Homo sapiens
  misc_RNA (1)...(19): siRNA sense strand
ccuaugagaaagaggagga

SEQ ID NO: 2384252 - RNA, 19 nt, Homo sapiens
  misc_RNA (1)...(19): siRNA sense strand
aggaggaggaggaggagga

SEQ ID NO: 2384253 - RNA, 19 nt, Homo sapiens
  misc_RNA (1)...(19): siRNA sense strand
aggaggaggaggaggagga

SEQ ID NO: 2384254 - RNA, 19 nt, Homo sapiens
  misc_RNA (1)...(19): siRNA sense strand
cuauggaacuagaucucaa

SEQ ID NO: 2384255 - RNA, 19 nt, Homo sapiens
  misc_RNA (1)...(19): siRNA sense strand
aguauggaccacaagguaa

SEQ ID NO: 2384256 - RNA, 19 nt, Homo sapiens
  misc_RNA (1)...(19): siRNA sense strand
ucaacauggcggacaacaa

SEQ ID NO: 2384257 - RNA, 19 nt, Homo sapiens
  misc_RNA (1)...(19): siRNA sense strand
agggauaacacguugguca

SEQ ID NO: 2384258 - RNA, 19 nt, Homo sapiens
  misc_RNA (1)...(19): siRNA sense strand
aggaggaggaggaggagca

SEQ ID NO: 2384259 - RNA, 19 nt, Homo sapiens
  misc_RNA (1)...(19): siRNA sense strand
augaagaugcagaagguca

SEQ ID NO: 2384260 - RNA, 19 nt, Homo sapiens
  misc_RNA (1)...(19): siRNA sense strand
cagcaaggugugagugguu

SEQ ID NO: 2384261 - RNA, 19 nt, Homo sapiens
  misc_RNA (1)...(19): siRNA sense strand
ggaaagagguuuuauggca

SEQ ID NO: 2384262 - RNA, 19 nt, Homo sapiens
  misc_RNA (1)...(19): siRNA sense strand
caaccagaugcauggacaa

SEQ ID NO: 2384263 - RNA, 19 nt, Homo sapiens
  misc_RNA (1)...(19): siRNA sense strand
ggaaagaggaggaagaugc

SEQ ID NO: 2384264 - RNA, 19 nt, Homo sapiens
  misc_RNA (1)...(19): siRNA sense strand
acgaggaagacgaggagga

SEQ ID NO: 2384265 - RNA, 19 nt, Homo sapiens
  misc_RNA (1)...(19): siRNA sense strand
acgaggaggaugaggagga

SEQ ID NO: 2384266 - RNA, 19 nt, Homo sapiens
  misc_RNA (1)...(19): siRNA sense strand
uggccagaguggacgaaaa

SEQ ID NO: 2384267 - RNA, 19 nt, Homo sapiens
  misc_RNA (1)...(19): siRNA sense strand
cagaaaggaagcauuggaa

SEQ ID NO: 2384268 - RNA, 19 nt, Homo sapiens
  misc_RNA (1)...(19): siRNA sense strand
ugaacuuaauacagcaaga

SEQ ID NO: 2384269 - RNA, 19 nt, Homo sapiens
  misc_RNA (1)...(19): siRNA sense strand
guagcuuucagcagaguaa

SEQ ID NO: 2384270 - RNA, 19 nt, Homo sapiens
  misc_RNA (1)...(19): siRNA sense strand
uugaugacgacgaggaaga

SEQ ID NO: 2384271 - RNA, 19 nt, Homo sapiens
  misc_RNA (1)...(19): siRNA sense strand
acccaaaggagaagcccaa

SEQ ID NO: 2384272 - RNA, 19 nt, Homo sapiens
  misc_RNA (1)...(19): siRNA sense strand
ucaccaaugccacaggaaa

SEQ ID NO: 2384273 - RNA, 19 nt, Homo sapiens
  misc_RNA (1)...(19): siRNA sense strand
gaggauaaaucaugagagc

SEQ ID NO: 2384274 - RNA, 19 nt, Homo sapiens
  misc_RNA (1)...(19): siRNA sense strand
cggccgucccggaguuuaa

SEQ ID NO: 2384275 - RNA, 19 nt, Homo sapiens
  misc_RNA (1)...(19): siRNA sense strand
gcagcaguauccaggccaa

SEQ ID NO: 2384276 - RNA, 19 nt, Homo sapiens
  misc_RNA (1)...(19): siRNA sense strand
cgucuaugaagaugcagaa

SEQ ID NO: 2384277 - RNA, 19 nt, Homo sapiens
  misc_RNA (1)...(19): siRNA sense strand
gauccaauggugaugaaga

SEQ ID NO: 2384278 - RNA, 19 nt, Homo sapiens
  misc_RNA (1)...(19): siRNA sense strand
cuaugaagaugcagaaggu

SEQ ID NO: 2384279 - RNA, 19 nt, Homo sapiens
  misc_RNA (1)...(19): siRNA sense strand
ggaggaagacagcgagaag

SEQ ID NO: 2384280 - RNA, 19 nt, Homo sapiens
  misc_RNA (1)...(19): siRNA sense strand
ccgcagguagaaagaaaga

SEQ ID NO: 2384281 - RNA, 19 nt, Homo sapiens
  misc_RNA (1)...(19): siRNA sense strand
agaaagagcaagaaggcaa

SEQ ID NO: 2384282 - RNA, 19 nt, Homo sapiens
  misc_RNA (1)...(19): siRNA sense strand
ggauaaaucaugagagcca

SEQ ID NO: 2384283 - RNA, 19 nt, Homo sapiens
  misc_RNA (1)...(19): siRNA sense strand
aggaagacgaggaggauga

SEQ ID NO: 2384284 - RNA, 19 nt, Homo sapiens
  misc_RNA (1)...(19): siRNA sense strand
uggaauaugaagugggaga

SEQ ID NO: 2384285 - RNA, 19 nt, Homo sapiens
  misc_RNA (1)...(19): siRNA sense strand
aagaggaggaugaggacaa

SEQ ID NO: 2384286 - RNA, 19 nt, Homo sapiens
  misc_RNA (1)...(19): siRNA sense strand
agguagaaagaaagagcaa

SEQ ID NO: 2384287 - RNA, 19 nt, Homo sapiens
  misc_RNA (1)...(19): siRNA sense strand
cugcagacccaaaggagaa

SEQ ID NO: 2384288 - RNA, 19 nt, Homo sapiens
  misc_RNA (1)...(19): siRNA sense strand
cugaagagcagcaagagaa

SEQ ID NO: 2384289 - RNA, 19 nt, Homo sapiens
  misc_RNA (1)...(19): siRNA sense strand
gccaauaaagauagucaaa

SEQ ID NO: 2384290 - RNA, 19 nt, Homo sapiens
  misc_RNA (1)...(19): siRNA sense strand
acgagcauccagagagaaa

SEQ ID NO: 2384291 - RNA, 19 nt, Homo sapiens
  misc_RNA (1)...(19): siRNA sense strand
augagaaagaggaggauga

SEQ ID NO: 2384292 - RNA, 19 nt, Homo sapiens
  misc_RNA (1)...(19): siRNA sense strand
gcugagaguacgugggcuu

SEQ ID NO: 2384293 - RNA, 19 nt, Homo sapiens
  misc_RNA (1)...(19): siRNA sense strand
gcacaaagcaggcaaggca

SEQ ID NO: 2384294 - RNA, 19 nt, Homo sapiens
  misc_RNA (1)...(19): siRNA sense strand
cugggaaagaggaggaaga

SEQ ID NO: 2384295 - RNA, 19 nt, Homo sapiens
  misc_RNA (1)...(19): siRNA sense strand
gcgagaagacagaaagcga

SEQ ID NO: 2384296 - RNA, 19 nt, Homo sapiens
  misc_RNA (1)...(19): siRNA sense strand
uuugagagcaagauggaaa

SEQ ID NO: 2384297 - RNA, 19 nt, Homo sapiens
  misc_RNA (1)...(19): siRNA sense strand
gggccauagcugugcagaa

SEQ ID NO: 2384298 - RNA, 19 nt, Homo sapiens
  misc_RNA (1)...(19): siRNA sense strand
cuuaauacagcaagaaaga

SEQ ID NO: 2384299 - RNA, 19 nt, Homo sapiens
  misc_RNA (1)...(19): siRNA sense strand
agacagaaagcgaugaaaa

SEQ ID NO: 2384300 - RNA, 19 nt, Homo sapiens
  misc_RNA (1)...(19): siRNA sense strand
ugaagagcagcaagagaaa

SEQ ID NO: 2384301 - RNA, 19 nt, Homo sapiens
  misc_RNA (1)...(19): siRNA sense strand
ugaucaacauggcggacaa

SEQ ID NO: 2384302 - RNA, 19 nt, Homo sapiens
  misc_RNA (1)...(19): siRNA sense strand
cggcaaagaagaaggcacu

SEQ ID NO: 2384303 - RNA, 19 nt, Homo sapiens
  misc_RNA (1)...(19): siRNA sense strand
cucgaggucuugagggaua

SEQ ID NO: 2384304 - RNA, 19 nt, Homo sapiens
  misc_RNA (1)...(19): siRNA sense strand
agaaaggaagcauuggaaa

SEQ ID NO: 2384305 - RNA, 19 nt, Homo sapiens
  misc_RNA (1)...(19): siRNA sense strand
gaugagugguggugggacu

SEQ ID NO: 2384306 - RNA, 19 nt, Homo sapiens
  misc_RNA (1)...(19): siRNA sense strand
aggaagaugcugaauguau

SEQ ID NO: 2384307 - RNA, 19 nt, Homo sapiens
  misc_RNA (1)...(19): siRNA sense strand
agaaagaggaggaugagga

SEQ ID NO: 2384308 - RNA, 19 nt, Homo sapiens
  misc_RNA (1)...(19): siRNA sense strand
cuccacagcccgagagcaa

SEQ ID NO: 2384309 - RNA, 19 nt, Homo sapiens
  misc_RNA (1)...(19): siRNA sense strand
gguggaagaagcaguacaa

SEQ ID NO: 2384310 - RNA, 19 nt, Homo sapiens
  misc_RNA (1)...(19): siRNA sense strand
aggaggaugaggaggaaga

SEQ ID NO: 2384311 - RNA, 19 nt, Homo sapiens
  misc_RNA (1)...(19): siRNA sense strand
gagaagaucacgaaggugu

SEQ ID NO: 2384312 - RNA, 19 nt, Homo sapiens
  misc_RNA (1)...(19): siRNA sense strand
ccgaauuacaaacgccaua

SEQ ID NO: 2384313 - RNA, 19 nt, Homo sapiens
  misc_RNA (1)...(19): siRNA sense strand
gggacugccucgaggucuu

SEQ ID NO: 2384314 - RNA, 19 nt, Homo sapiens
  misc_RNA (1)...(19): siRNA sense strand
guacccgaucagaggauaa

SEQ ID NO: 2384315 - RNA, 19 nt, Homo sapiens
  misc_RNA (1)...(19): siRNA sense strand
uggcaggcacacaaagaaa

SEQ ID NO: 2384316 - RNA, 19 nt, Homo sapiens
  misc_RNA (1)...(19): siRNA sense strand
uggcagagguuccagguga

SEQ ID NO: 2384317 - RNA, 19 nt, Homo sapiens
  misc_RNA (1)...(19): siRNA sense strand
cuccgcagguagaaagaaa

SEQ ID NO: 2384318 - RNA, 19 nt, Homo sapiens
  misc_RNA (1)...(19): siRNA sense strand
acaucaagcugcuggagga

SEQ ID NO: 2384319 - RNA, 19 nt, Homo sapiens
  misc_RNA (1)...(19): siRNA sense strand
uggcaggacucgcuggcua

SEQ ID NO: 2384320 - RNA, 19 nt, Homo sapiens
  misc_RNA (1)...(19): siRNA sense strand
ccuaugagaaagaggagga

SEQ ID NO: 2384321 - RNA, 19 nt, Homo sapiens
  misc_RNA (1)...(19): siRNA sense strand
aggaggaggaggaggagga

SEQ ID NO: 2384322 - RNA, 19 nt, Homo sapiens
  misc_RNA (1)...(19): siRNA sense strand
aggaggaggaggaggagga

SEQ ID NO: 2384323 - RNA, 19 nt, Homo sapiens
  misc_RNA (1)...(19): siRNA sense strand
cuauggaacuagaucucaa

SEQ ID NO: 2384324 - RNA, 19 nt, Homo sapiens
  misc_RNA (1)...(19): siRNA sense strand
aguauggaccacaagguaa

SEQ ID NO: 2384325 - RNA, 19 nt, Homo sapiens
  misc_RNA (1)...(19): siRNA sense strand
ucaacauggcggacaacaa

SEQ ID NO: 2384326 - RNA, 19 nt, Homo sapiens
  misc_RNA (1)...(19): siRNA sense strand
agggauaacacguugguca

SEQ ID NO: 2384327 - RNA, 19 nt, Homo sapiens
  misc_RNA (1)...(19): siRNA sense strand
aggaggaggaggaggagca

SEQ ID NO: 2384328 - RNA, 19 nt, Homo sapiens
  misc_RNA (1)...(19): siRNA sense strand
augaagaugcagaagguca

SEQ ID NO: 2384329 - RNA, 19 nt, Homo sapiens
  misc_RNA (1)...(19): siRNA sense strand
cagcaaggugugagugguu

SEQ ID NO: 2384330 - RNA, 19 nt, Homo sapiens
  misc_RNA (1)...(19): siRNA sense strand
ggaaagagguuuuauggca

SEQ ID NO: 2384331 - RNA, 19 nt, Homo sapiens
  misc_RNA (1)...(19): siRNA sense strand
caaccagaugcauggacaa

SEQ ID NO: 2384332 - RNA, 19 nt, Homo sapiens
  misc_RNA (1)...(19): siRNA sense strand
ggaaagaggaggaagaugc

SEQ ID NO: 2384333 - RNA, 19 nt, Homo sapiens
  misc_RNA (1)...(19): siRNA sense strand
acgaggaagacgaggagga

SEQ ID NO: 2384334 - RNA, 19 nt, Homo sapiens
  misc_RNA (1)...(19): siRNA sense strand
acgaggaggaugaggagga

SEQ ID NO: 2384335 - RNA, 19 nt, Homo sapiens
  misc_RNA (1)...(19): siRNA sense strand
uggccagaguggacgaaaa

SEQ ID NO: 2384336 - RNA, 19 nt, Homo sapiens
  misc_RNA (1)...(19): siRNA sense strand
cagaaaggaagcauuggaa

SEQ ID NO: 2384337 - RNA, 19 nt, Homo sapiens
  misc_RNA (1)...(19): siRNA sense strand
ugaacuuaauacagcaaga

SEQ ID NO: 2384338 - RNA, 19 nt, Homo sapiens
  misc_RNA (1)...(19): siRNA sense strand
guagcuuucagcagaguaa

SEQ ID NO: 2384339 - RNA, 19 nt, Homo sapiens
  misc_RNA (1)...(19): siRNA sense strand
uugaugacgacgaggaaga

SEQ ID NO: 2384340 - RNA, 19 nt, Homo sapiens
  misc_RNA (1)...(19): siRNA sense strand
acccaaaggagaagcccaa

SEQ ID NO: 2384341 - RNA, 19 nt, Homo sapiens
  misc_RNA (1)...(19): siRNA sense strand
ucaccaaugccacaggaaa

SEQ ID NO: 2384342 - RNA, 19 nt, Homo sapiens
  misc_RNA (1)...(19): siRNA sense strand
gaggauaaaucaugagagc

SEQ ID NO: 2384343 - RNA, 19 nt, Homo sapiens
  misc_RNA (1)...(19): siRNA sense strand
cggccgucccggaguuuaa

SEQ ID NO: 2384344 - RNA, 19 nt, Homo sapiens
  misc_RNA (1)...(19): siRNA sense strand
gcagcaguauccaggccaa

SEQ ID NO: 2384345 - RNA, 19 nt, Homo sapiens
  misc_RNA (1)...(19): siRNA sense strand
cgucuaugaagaugcagaa

SEQ ID NO: 2384346 - RNA, 19 nt, Homo sapiens
  misc_RNA (1)...(19): siRNA sense strand
gauccaauggugaugaaga

SEQ ID NO: 2384347 - RNA, 19 nt, Homo sapiens
  misc_RNA (1)...(19): siRNA sense strand
cuaugaagaugcagaaggu

SEQ ID NO: 2384348 - RNA, 19 nt, Homo sapiens
  misc_RNA (1)...(19): siRNA sense strand
ggaggaagacagcgagaag

SEQ ID NO: 2384349 - RNA, 19 nt, Homo sapiens
  misc_RNA (1)...(19): siRNA sense strand
ccgcagguagaaagaaaga

SEQ ID NO: 2384350 - RNA, 19 nt, Homo sapiens
  misc_RNA (1)...(19): siRNA sense strand
agaaagagcaagaaggcaa

SEQ ID NO: 2384351 - RNA, 19 nt, Homo sapiens
  misc_RNA (1)...(19): siRNA sense strand
ggauaaaucaugagagcca

SEQ ID NO: 2384352 - RNA, 19 nt, Homo sapiens
  misc_RNA (1)...(19): siRNA sense strand
aggaagacgaggaggauga

SEQ ID NO: 2384353 - RNA, 19 nt, Homo sapiens
  misc_RNA (1)...(19): siRNA sense strand
uggaauaugaagugggaga

SEQ ID NO: 2384354 - RNA, 19 nt, Homo sapiens
  misc_RNA (1)...(19): siRNA sense strand
aagaggaggaugaggacaa

SEQ ID NO: 2384355 - RNA, 19 nt, Homo sapiens
  misc_RNA (1)...(19): siRNA sense strand
agguagaaagaaagagcaa

SEQ ID NO: 2384356 - RNA, 19 nt, Homo sapiens
  misc_RNA (1)...(19): siRNA sense strand
cugcagacccaaaggagaa

SEQ ID NO: 2384357 - RNA, 19 nt, Homo sapiens
  misc_RNA (1)...(19): siRNA sense strand
cugaagagcagcaagagaa

SEQ ID NO: 2384358 - RNA, 19 nt, Homo sapiens
  misc_RNA (1)...(19): siRNA sense strand
gccaauaaagauagucaaa

SEQ ID NO: 2384359 - RNA, 19 nt, Homo sapiens
  misc_RNA (1)...(19): siRNA sense strand
acgagcauccagagagaaa

SEQ ID NO: 2384360 - RNA, 19 nt, Homo sapiens
  misc_RNA (1)...(19): siRNA sense strand
augagaaagaggaggauga

SEQ ID NO: 2384361 - RNA, 19 nt, Homo sapiens
  misc_RNA (1)...(19): siRNA sense strand
gcugagaguacgugggcuu

SEQ ID NO: 2384362 - RNA, 19 nt, Homo sapiens
  misc_RNA (1)...(19): siRNA sense strand
gcacaaagcaggcaaggca

SEQ ID NO: 2384363 - RNA, 19 nt, Homo sapiens
  misc_RNA (1)...(19): siRNA sense strand
cugggaaagaggaggaaga

SEQ ID NO: 2384364 - RNA, 19 nt, Homo sapiens
  misc_RNA (1)...(19): siRNA sense strand
gcgagaagacagaaagcga

SEQ ID NO: 2384365 - RNA, 19 nt, Homo sapiens
  misc_RNA (1)...(19): siRNA sense strand
uuugagagcaagauggaaa

SEQ ID NO: 2384366 - RNA, 19 nt, Homo sapiens
  misc_RNA (1)...(19): siRNA sense strand
gggccauagcugugcagaa

SEQ ID NO: 2384367 - RNA, 19 nt, Homo sapiens
  misc_RNA (1)...(19): siRNA sense strand
cuuaauacagcaagaaaga

SEQ ID NO: 2384368 - RNA, 19 nt, Homo sapiens
  misc_RNA (1)...(19): siRNA sense strand
agacagaaagcgaugaaaa

SEQ ID NO: 2384369 - RNA, 19 nt, Homo sapiens
  misc_RNA (1)...(19): siRNA sense strand
ugaagagcagcaagagaaa

SEQ ID NO: 2384370 - RNA, 19 nt, Homo sapiens
  misc_RNA (1)...(19): siRNA sense strand
ugaucaacauggcggacaa

SEQ ID NO: 2384371 - RNA, 19 nt, Homo sapiens
  misc_RNA (1)...(19): siRNA sense strand
cggcaaagaagaaggcacu

SEQ ID NO: 2384372 - RNA, 19 nt, Homo sapiens
  misc_RNA (1)...(19): siRNA sense strand
cucgaggucuugagggaua

SEQ ID NO: 2384373 - RNA, 19 nt, Homo sapiens
  misc_RNA (1)...(19): siRNA sense strand
agaaaggaagcauuggaaa

SEQ ID NO: 2384374 - RNA, 19 nt, Homo sapiens
  misc_RNA (1)...(19): siRNA sense strand
gaugagugguggugggacu

SEQ ID NO: 2384375 - RNA, 19 nt, Homo sapiens
  misc_RNA (1)...(19): siRNA sense strand
aggaagaugcugaauguau

SEQ ID NO: 2384376 - RNA, 19 nt, Homo sapiens
  misc_RNA (1)...(19): siRNA sense strand
agaaagaggaggaugagga

SEQ ID NO: 2384377 - RNA, 19 nt, Homo sapiens
  misc_RNA (1)...(19): siRNA sense strand
cuccacagcccgagagcaa

SEQ ID NO: 2384378 - RNA, 19 nt, Homo sapiens
  misc_RNA (1)...(19): siRNA sense strand
gguggaagaagcaguacaa

SEQ ID NO: 2384379 - RNA, 19 nt, Homo sapiens
  misc_RNA (1)...(19): siRNA sense strand
aggaggaugaggaggaaga

SEQ ID NO: 2384380 - RNA, 19 nt, Homo sapiens
  misc_RNA (1)...(19): siRNA sense strand
gagaagaucacgaaggugu

SEQ ID NO: 2384381 - RNA, 19 nt, Homo sapiens
  misc_RNA (1)...(19): siRNA sense strand
ccgaauuacaaacgccaua

SEQ ID NO: 2384382 - RNA, 19 nt, Homo sapiens
  misc_RNA (1)...(19): siRNA sense strand
gggacugccucgaggucuu

SEQ ID NO: 2384383 - RNA, 19 nt, Homo sapiens
  misc_RNA (1)...(19): siRNA sense strand
guacccgaucagaggauaa

SEQ ID NO: 2384384 - RNA, 19 nt, Homo sapiens
  misc_RNA (1)...(19): siRNA sense strand
uggcaggcacacaaagaaa

SEQ ID NO: 2384385 - RNA, 19 nt, Homo sapiens
  misc_RNA (1)...(19): siRNA sense strand
uggcagagguuccagguga

SEQ ID NO: 2384386 - RNA, 19 nt, Homo sapiens
  misc_RNA (1)...(19): siRNA sense strand
cuccgcagguagaaagaaa

SEQ ID NO: 2384387 - RNA, 19 nt, Homo sapiens
  misc_RNA (1)...(19): siRNA sense strand
acaucaagcugcuggagga

SEQ ID NO: 2384388 - RNA, 19 nt, Homo sapiens
  misc_RNA (1)...(19): siRNA sense strand
uggcaggacucgcuggcua

SEQ ID NO: 2384389 - RNA, 19 nt, Homo sapiens
  misc_RNA (1)...(19): siRNA sense strand
ccuaugagaaagaggagga

SEQ ID NO: 2384390 - RNA, 19 nt, Homo sapiens
  misc_RNA (1)...(19): siRNA sense strand
aggaggaggaggaggagga

SEQ ID NO: 2384391 - RNA, 19 nt, Homo sapiens
  misc_RNA (1)...(19): siRNA sense strand
aggaggaggaggaggagga

SEQ ID NO: 2384392 - RNA, 19 nt, Homo sapiens
  misc_RNA (1)...(19): siRNA sense strand
cuauggaacuagaucucaa

SEQ ID NO: 2384393 - RNA, 19 nt, Homo sapiens
  misc_RNA (1)...(19): siRNA sense strand
aguauggaccacaagguaa

SEQ ID NO: 2384394 - RNA, 19 nt, Homo sapiens
  misc_RNA (1)...(19): siRNA sense strand
ucaacauggcggacaacaa

SEQ ID NO: 2384395 - RNA, 19 nt, Homo sapiens
  misc_RNA (1)...(19): siRNA sense strand
agggauaacacguugguca

SEQ ID NO: 2384396 - RNA, 19 nt, Homo sapiens
  misc_RNA (1)...(19): siRNA sense strand
aggaggaggaggaggagca

SEQ ID NO: 2384397 - RNA, 19 nt, Homo sapiens
  misc_RNA (1)...(19): siRNA sense strand
augaagaugcagaagguca

SEQ ID NO: 2384398 - RNA, 19 nt, Homo sapiens
  misc_RNA (1)...(19): siRNA sense strand
cagcaaggugugagugguu

SEQ ID NO: 2384399 - RNA, 19 nt, Homo sapiens
  misc_RNA (1)...(19): siRNA sense strand
ggaaagagguuuuauggca

SEQ ID NO: 2384400 - RNA, 19 nt, Homo sapiens
  misc_RNA (1)...(19): siRNA sense strand
caaccagaugcauggacaa

SEQ ID NO: 2384401 - RNA, 19 nt, Homo sapiens
  misc_RNA (1)...(19): siRNA sense strand
ggaaagaggaggaagaugc

SEQ ID NO: 2384402 - RNA, 19 nt, Homo sapiens
  misc_RNA (1)...(19): siRNA sense strand
acgaggaagacgaggagga

SEQ ID NO: 2384403 - RNA, 19 nt, Homo sapiens
  misc_RNA (1)...(19): siRNA sense strand
acgaggaggaugaggagga

SEQ ID NO: 2384404 - RNA, 19 nt, Homo sapiens
  misc_RNA (1)...(19): siRNA sense strand
uggccagaguggacgaaaa

SEQ ID NO: 2384405 - RNA, 19 nt, Homo sapiens
  misc_RNA (1)...(19): siRNA sense strand
cagaaaggaagcauuggaa

SEQ ID NO: 2384406 - RNA, 19 nt, Homo sapiens
  misc_RNA (1)...(19): siRNA sense strand
ugaacuuaauacagcaaga

SEQ ID NO: 2384407 - RNA, 19 nt, Homo sapiens
  misc_RNA (1)...(19): siRNA sense strand
guagcuuucagcagaguaa

SEQ ID NO: 2384408 - RNA, 19 nt, Homo sapiens
  misc_RNA (1)...(19): siRNA sense strand
uugaugacgacgaggaaga

SEQ ID NO: 2384409 - RNA, 19 nt, Homo sapiens
  misc_RNA (1)...(19): siRNA sense strand
acccaaaggagaagcccaa

SEQ ID NO: 2384410 - RNA, 19 nt, Homo sapiens
  misc_RNA (1)...(19): siRNA sense strand
ucaccaaugccacaggaaa

SEQ ID NO: 2384411 - RNA, 19 nt, Homo sapiens
  misc_RNA (1)...(19): siRNA sense strand
gaggauaaaucaugagagc

SEQ ID NO: 2384412 - RNA, 19 nt, Homo sapiens
  misc_RNA (1)...(19): siRNA sense strand
cggccgucccggaguuuaa

SEQ ID NO: 2384413 - RNA, 19 nt, Homo sapiens
  misc_RNA (1)...(19): siRNA sense strand
gcagcaguauccaggccaa

SEQ ID NO: 2384414 - RNA, 19 nt, Homo sapiens
  misc_RNA (1)...(19): siRNA sense strand
cgucuaugaagaugcagaa

SEQ ID NO: 2384415 - RNA, 19 nt, Homo sapiens
  misc_RNA (1)...(19): siRNA sense strand
gauccaauggugaugaaga

SEQ ID NO: 2384416 - RNA, 19 nt, Homo sapiens
  misc_RNA (1)...(19): siRNA sense strand
cuaugaagaugcagaaggu

SEQ ID NO: 2384417 - RNA, 19 nt, Homo sapiens
  misc_RNA (1)...(19): siRNA sense strand
ggaggaagacagcgagaag

SEQ ID NO: 2384418 - RNA, 19 nt, Homo sapiens
  misc_RNA (1)...(19): siRNA sense strand
ccgcagguagaaagaaaga

SEQ ID NO: 2384419 - RNA, 19 nt, Homo sapiens
  misc_RNA (1)...(19): siRNA sense strand
gcaauuauuucgagaguca

SEQ ID NO: 2384420 - RNA, 19 nt, Homo sapiens
  misc_RNA (1)...(19): siRNA sense strand
uagaacagauccagggcaa

SEQ ID NO: 2384421 - RNA, 19 nt, Homo sapiens
  misc_RNA (1)...(19): siRNA sense strand
gagaaaggagcaugggaca

SEQ ID NO: 2384422 - RNA, 19 nt, Homo sapiens
  misc_RNA (1)...(19): siRNA sense strand
gcaagaaggugaucgaacu

SEQ ID NO: 2384423 - RNA, 19 nt, Homo sapiens
  misc_RNA (1)...(19): siRNA sense strand
ggacaggcaucguggggau

SEQ ID NO: 2384424 - RNA, 19 nt, Homo sapiens
  misc_RNA (1)...(19): siRNA sense strand
agggcaacguccaggccaa

SEQ ID NO: 2384425 - RNA, 19 nt, Homo sapiens
  misc_RNA (1)...(19): siRNA sense strand
gcccugagccugugcaauu

SEQ ID NO: 2384426 - RNA, 19 nt, Homo sapiens
  misc_RNA (1)...(19): siRNA sense strand
gugcaauuauuucgagagu

SEQ ID NO: 2384427 - RNA, 19 nt, Homo sapiens
  misc_RNA (1)...(19): siRNA sense strand
gggcaugugcugaccauca

SEQ ID NO: 2384428 - RNA, 19 nt, Homo sapiens
  misc_RNA (1)...(19): siRNA sense strand
gaaaggagcaugggacaga

SEQ ID NO: 2384429 - RNA, 19 nt, Homo sapiens
  misc_RNA (1)...(19): siRNA sense strand
gaggcaagaaggugaucga

SEQ ID NO: 2384430 - RNA, 19 nt, Homo sapiens
  misc_RNA (1)...(19): siRNA sense strand
gucaacaucuauagggcca

SEQ ID NO: 2384431 - RNA, 19 nt, Homo sapiens
  misc_RNA (1)...(19): siRNA sense strand
gcaauuauuucgagaguca

SEQ ID NO: 2384432 - RNA, 19 nt, Homo sapiens
  misc_RNA (1)...(19): siRNA sense strand
gcaagaaggugaucgaacu

SEQ ID NO: 2384433 - RNA, 19 nt, Homo sapiens
  misc_RNA (1)...(19): siRNA sense strand
ggacaggcaucguggggau

SEQ ID NO: 2384434 - RNA, 19 nt, Homo sapiens
  misc_RNA (1)...(19): siRNA sense strand
gcccugagccugugcaauu

SEQ ID NO: 2384435 - RNA, 19 nt, Homo sapiens
  misc_RNA (1)...(19): siRNA sense strand
gugcaauuauuucgagagu

SEQ ID NO: 2384436 - RNA, 19 nt, Homo sapiens
  misc_RNA (1)...(19): siRNA sense strand
gggcaugugcugaccauca

SEQ ID NO: 2384437 - RNA, 19 nt, Homo sapiens
  misc_RNA (1)...(19): siRNA sense strand
gaggcaagaaggugaucga

SEQ ID NO: 2384438 - RNA, 19 nt, Homo sapiens
  misc_RNA (1)...(19): siRNA sense strand
caguagacuugaagcuaaa

SEQ ID NO: 2384439 - RNA, 19 nt, Homo sapiens
  misc_RNA (1)...(19): siRNA sense strand
cgcuaaagguagagggagu

SEQ ID NO: 2384440 - RNA, 19 nt, Homo sapiens
  misc_RNA (1)...(19): siRNA sense strand
cuaaauaguuugaaggagu

SEQ ID NO: 2384441 - RNA, 19 nt, Homo sapiens
  misc_RNA (1)...(19): siRNA sense strand
gauucaagguuuagcgaca

SEQ ID NO: 2384442 - RNA, 19 nt, Homo sapiens
  misc_RNA (1)...(19): siRNA sense strand
gugagaaacauuuggagaa

SEQ ID NO: 2384443 - RNA, 19 nt, Homo sapiens
  misc_RNA (1)...(19): siRNA sense strand
gcucuaaacuguaugguga

SEQ ID NO: 2384444 - RNA, 19 nt, Homo sapiens
  misc_RNA (1)...(19): siRNA sense strand
cuuccacacugcagaguaa

SEQ ID NO: 2384445 - RNA, 19 nt, Homo sapiens
  misc_RNA (1)...(19): siRNA sense strand
ggaauuggacaaaggccua

SEQ ID NO: 2384446 - RNA, 19 nt, Homo sapiens
  misc_RNA (1)...(19): siRNA sense strand
agucaguaguugagaccuu

SEQ ID NO: 2384447 - RNA, 19 nt, Homo sapiens
  misc_RNA (1)...(19): siRNA sense strand
ugacauggccaaagagcuu

SEQ ID NO: 2384448 - RNA, 19 nt, Homo sapiens
  misc_RNA (1)...(19): siRNA sense strand
ggaagaauuucgaagccuu

SEQ ID NO: 2384449 - RNA, 19 nt, Homo sapiens
  misc_RNA (1)...(19): siRNA sense strand
aggccuaagaucuggcaaa

SEQ ID NO: 2384450 - RNA, 19 nt, Homo sapiens
  misc_RNA (1)...(19): siRNA sense strand
gcugauagugaauaugaaa

SEQ ID NO: 2384451 - RNA, 19 nt, Homo sapiens
  misc_RNA (1)...(19): siRNA sense strand
acacaacauuacaguggaa

SEQ ID NO: 2384452 - RNA, 19 nt, Homo sapiens
  misc_RNA (1)...(19): siRNA sense strand
ugaaacaguccauggaaga

SEQ ID NO: 2384453 - RNA, 19 nt, Homo sapiens
  misc_RNA (1)...(19): siRNA sense strand
aguaaagagacuugcuauu

SEQ ID NO: 2384454 - RNA, 19 nt, Homo sapiens
  misc_RNA (1)...(19): siRNA sense strand
caggaaggcaguaaagaga

SEQ ID NO: 2384455 - RNA, 19 nt, Homo sapiens
  misc_RNA (1)...(19): siRNA sense strand
cugcacagucaaaggauuu

SEQ ID NO: 2384456 - RNA, 19 nt, Homo sapiens
  misc_RNA (1)...(19): siRNA sense strand
ucuuaaaguuacccaacaa

SEQ ID NO: 2384457 - RNA, 19 nt, Homo sapiens
  misc_RNA (1)...(19): siRNA sense strand
uguaggaaucuguaacaaa

SEQ ID NO: 2384458 - RNA, 19 nt, Homo sapiens
  misc_RNA (1)...(19): siRNA sense strand
agguagagggagugguuca

SEQ ID NO: 2384459 - RNA, 19 nt, Homo sapiens
  misc_RNA (1)...(19): siRNA sense strand
ucauggaguuagaguccua

SEQ ID NO: 2384460 - RNA, 19 nt, Homo sapiens
  misc_RNA (1)...(19): siRNA sense strand
agacaagcaacaagaacuu

SEQ ID NO: 2384461 - RNA, 19 nt, Homo sapiens
  misc_RNA (1)...(19): siRNA sense strand
ugccaugaccuuaggaaau

SEQ ID NO: 2384462 - RNA, 19 nt, Homo sapiens
  misc_RNA (1)...(19): siRNA sense strand
cggcuauggcgaacaggaa

SEQ ID NO: 2384463 - RNA, 19 nt, Homo sapiens
  misc_RNA (1)...(19): siRNA sense strand
aauaauuuccugaggcuau

SEQ ID NO: 2384464 - RNA, 19 nt, Homo sapiens
  misc_RNA (1)...(19): siRNA sense strand
gggagaauauucaggcacu

SEQ ID NO: 2384465 - RNA, 19 nt, Homo sapiens
  misc_RNA (1)...(19): siRNA sense strand
ggaaggcaguaaagagacu

SEQ ID NO: 2384466 - RNA, 19 nt, Homo sapiens
  misc_RNA (1)...(19): siRNA sense strand
guacaaggugauuggacga

SEQ ID NO: 2384467 - RNA, 19 nt, Homo sapiens
  misc_RNA (1)...(19): siRNA sense strand
guggaaaguaaggcaguaa

SEQ ID NO: 2384468 - RNA, 19 nt, Homo sapiens
  misc_RNA (1)...(19): siRNA sense strand
ccaugcugauagugaauau

SEQ ID NO: 2384469 - RNA, 19 nt, Homo sapiens
  misc_RNA (1)...(19): siRNA sense strand
caauagaagcccugauuuu

SEQ ID NO: 2384470 - RNA, 19 nt, Homo sapiens
  misc_RNA (1)...(19): siRNA sense strand
uuugaggaauguugaacua

SEQ ID NO: 2384471 - RNA, 19 nt, Homo sapiens
  misc_RNA (1)...(19): siRNA sense strand
cuuuaagcuuucaguguga

SEQ ID NO: 2384472 - RNA, 19 nt, Homo sapiens
  misc_RNA (1)...(19): siRNA sense strand
uggcaaacuuggugaacag

SEQ ID NO: 2384473 - RNA, 19 nt, Homo sapiens
  misc_RNA (1)...(19): siRNA sense strand
uacccaacaaagugagaaa

SEQ ID NO: 2384474 - RNA, 19 nt, Homo sapiens
  misc_RNA (1)...(19): siRNA sense strand
gggaagucuggcaucaaua

SEQ ID NO: 2384475 - RNA, 19 nt, Homo sapiens
  misc_RNA (1)...(19): siRNA sense strand
caacaauugccaugaccuu

SEQ ID NO: 2384476 - RNA, 19 nt, Homo sapiens
  misc_RNA (1)...(19): siRNA sense strand
cccaacaaagugagaaaca

SEQ ID NO: 2384477 - RNA, 19 nt, Homo sapiens
  misc_RNA (1)...(19): siRNA sense strand
ccuuauggaauuggacaaa

SEQ ID NO: 2384478 - RNA, 19 nt, Homo sapiens
  misc_RNA (1)...(19): siRNA sense strand
acaagauacccauugacaa

SEQ ID NO: 2384479 - RNA, 19 nt, Homo sapiens
  misc_RNA (1)...(19): siRNA sense strand
ccauugacaacaugaccaa

SEQ ID NO: 2384480 - RNA, 19 nt, Homo sapiens
  misc_RNA (1)...(19): siRNA sense strand
agugagaaacauuuggaga

SEQ ID NO: 2384481 - RNA, 19 nt, Homo sapiens
  misc_RNA (1)...(19): siRNA sense strand
ucgucagaguuuagauuca

SEQ ID NO: 2384482 - RNA, 19 nt, Homo sapiens
  misc_RNA (1)...(19): siRNA sense strand
agaagaaugaugucuguau

SEQ ID NO: 2384483 - RNA, 19 nt, Homo sapiens
  misc_RNA (1)...(19): siRNA sense strand
gaugaauuugugaagagaa

SEQ ID NO: 2384484 - RNA, 19 nt, Homo sapiens
  misc_RNA (1)...(19): siRNA sense strand
caucauaguauucgucaga

SEQ ID NO: 2384485 - RNA, 19 nt, Homo sapiens
  misc_RNA (1)...(19): siRNA sense strand
auauggaucuacuggaaca

SEQ ID NO: 2384486 - RNA, 19 nt, Homo sapiens
  misc_RNA (1)...(19): siRNA sense strand
gugaaagaugccaauggua

SEQ ID NO: 2384487 - RNA, 19 nt, Homo sapiens
  misc_RNA (1)...(19): siRNA sense strand
ccagcaaauucgcuuacaa

SEQ ID NO: 2384488 - RNA, 19 nt, Homo sapiens
  misc_RNA (1)...(19): siRNA sense strand
gcuaauaaaacaccacaua

SEQ ID NO: 2384489 - RNA, 19 nt, Homo sapiens
  misc_RNA (1)...(19): siRNA sense strand
aggcauugucuguggaaag

SEQ ID NO: 2384490 - RNA, 19 nt, Homo sapiens
  misc_RNA (1)...(19): siRNA sense strand
aggcaguaauuaagcagca

SEQ ID NO: 2384491 - RNA, 19 nt, Homo sapiens
  misc_RNA (1)...(19): siRNA sense strand
gauucuaaauguggaugaa

SEQ ID NO: 2384492 - RNA, 19 nt, Homo sapiens
  misc_RNA (1)...(19): siRNA sense strand
caguaaagagacuugcuau

SEQ ID NO: 2384493 - RNA, 19 nt, Homo sapiens
  misc_RNA (1)...(19): siRNA sense strand
gcuugaaagugucuccaau

SEQ ID NO: 2384494 - RNA, 19 nt, Homo sapiens
  misc_RNA (1)...(19): siRNA sense strand
cauuucuacuucuggcuaa

SEQ ID NO: 2384495 - RNA, 19 nt, Homo sapiens
  misc_RNA (1)...(19): siRNA sense strand
gguugcaagaggaaaauua

SEQ ID NO: 2384496 - RNA, 19 nt, Homo sapiens
  misc_RNA (1)...(19): siRNA sense strand
ccagacaggcuuccagaau

SEQ ID NO: 2384497 - RNA, 19 nt, Homo sapiens
  misc_RNA (1)...(19): siRNA sense strand
cuggguugcaagaggaaaa

SEQ ID NO: 2384498 - RNA, 19 nt, Homo sapiens
  misc_RNA (1)...(19): siRNA sense strand
cagaaacugcagaaggcaa

SEQ ID NO: 2384499 - RNA, 19 nt, Homo sapiens
  misc_RNA (1)...(19): siRNA sense strand
cugcagaaggcaaaggaga

SEQ ID NO: 2384500 - RNA, 19 nt, Homo sapiens
  misc_RNA (1)...(19): siRNA sense strand
cgaaggagccagaugucga

SEQ ID NO: 2384501 - RNA, 19 nt, Homo sapiens
  misc_RNA (1)...(19): siRNA sense strand
uugaacaaauccuggcaga

SEQ ID NO: 2384502 - RNA, 19 nt, Homo sapiens
  misc_RNA (1)...(19): siRNA sense strand
ugcagaaggcaaaggagau

SEQ ID NO: 2384503 - RNA, 19 nt, Homo sapiens
  misc_RNA (1)...(19): siRNA sense strand
cgcuaugaccacuggcgaa

SEQ ID NO: 2384504 - RNA, 19 nt, Homo sapiens
  misc_RNA (1)...(19): siRNA sense strand
cagaaacugcagaaggcaa

SEQ ID NO: 2384505 - RNA, 19 nt, Homo sapiens
  misc_RNA (1)...(19): siRNA sense strand
cugcagaaggcaaaggaga

SEQ ID NO: 2384506 - RNA, 19 nt, Homo sapiens
  misc_RNA (1)...(19): siRNA sense strand
cgaaggagccagaugucga

SEQ ID NO: 2384507 - RNA, 19 nt, Homo sapiens
  misc_RNA (1)...(19): siRNA sense strand
uugaacaaauccuggcaga

SEQ ID NO: 2384508 - RNA, 19 nt, Homo sapiens
  misc_RNA (1)...(19): siRNA sense strand
ugcagaaggcaaaggagau

SEQ ID NO: 2384509 - RNA, 19 nt, Homo sapiens
  misc_RNA (1)...(19): siRNA sense strand
cgcuaugaccacuggcgaa

SEQ ID NO: 2384510 - RNA, 19 nt, Homo sapiens
  misc_RNA (1)...(19): siRNA sense strand
gcucugaacugcacggcuu

SEQ ID NO: 2384511 - RNA, 19 nt, Homo sapiens
  misc_RNA (1)...(19): siRNA sense strand
auggggagguggagauaaa

SEQ ID NO: 2384512 - RNA, 19 nt, Homo sapiens
  misc_RNA (1)...(19): siRNA sense strand
acuccugggucaaggccaa

SEQ ID NO: 2384513 - RNA, 19 nt, Homo sapiens
  misc_RNA (1)...(19): siRNA sense strand
ggagauaaacgacgggaag

SEQ ID NO: 2384514 - RNA, 19 nt, Homo sapiens
  misc_RNA (1)...(19): siRNA sense strand
agacgcagcugcaggacga

SEQ ID NO: 2384515 - RNA, 19 nt, Homo sapiens
  misc_RNA (1)...(19): siRNA sense strand
gcugauucuucgaggccga

SEQ ID NO: 2384516 - RNA, 19 nt, Homo sapiens
  misc_RNA (1)...(19): siRNA sense strand
uggagauaaacgacgggaa

SEQ ID NO: 2384517 - RNA, 19 nt, Homo sapiens
  misc_RNA (1)...(19): siRNA sense strand
cacgaguacuccuggguca

SEQ ID NO: 2384518 - RNA, 19 nt, Homo sapiens
  misc_RNA (1)...(19): siRNA sense strand
acucagagguggacccgga

SEQ ID NO: 2384519 - RNA, 19 nt, Homo sapiens
  misc_RNA (1)...(19): siRNA sense strand
agaucugccucgaggacaa

SEQ ID NO: 2384520 - RNA, 19 nt, Homo sapiens
  misc_RNA (1)...(19): siRNA sense strand
gugaagaacaguaagcaca

SEQ ID NO: 2384521 - RNA, 19 nt, Homo sapiens
  misc_RNA (1)...(19): siRNA sense strand
uugagcagcacgugaagaa

SEQ ID NO: 2384522 - RNA, 19 nt, Homo sapiens
  misc_RNA (1)...(19): siRNA sense strand
agggagugggcuugggaua

SEQ ID NO: 2384523 - RNA, 19 nt, Homo sapiens
  misc_RNA (1)...(19): siRNA sense strand
caguggauuuggagggagu

SEQ ID NO: 2384524 - RNA, 19 nt, Homo sapiens
  misc_RNA (1)...(19): siRNA sense strand
aaucacaaaucuugggagu

SEQ ID NO: 2384525 - RNA, 19 nt, Homo sapiens
  misc_RNA (1)...(19): siRNA sense strand
ugggagugagggagagaca

SEQ ID NO: 2384526 - RNA, 19 nt, Homo sapiens
  misc_RNA (1)...(19): siRNA sense strand
agaaugaggaagagagcau

SEQ ID NO: 2384527 - RNA, 19 nt, Homo sapiens
  misc_RNA (1)...(19): siRNA sense strand
cuuugaucguggagaggaa

SEQ ID NO: 2384528 - RNA, 19 nt, Homo sapiens
  misc_RNA (1)...(19): siRNA sense strand
gagaugagccugacgccaa

SEQ ID NO: 2384529 - RNA, 19 nt, Homo sapiens
  misc_RNA (1)...(19): siRNA sense strand
cagugaagagaaugaggaa

SEQ ID NO: 2384530 - RNA, 19 nt, Homo sapiens
  misc_RNA (1)...(19): siRNA sense strand
ggugugugagaaagagaaa

SEQ ID NO: 2384531 - RNA, 19 nt, Homo sapiens
  misc_RNA (1)...(19): siRNA sense strand
augaagaggaggagacgau

SEQ ID NO: 2384532 - RNA, 19 nt, Homo sapiens
  misc_RNA (1)...(19): siRNA sense strand
cugcaggagaggaggagga

SEQ ID NO: 2384533 - RNA, 19 nt, Homo sapiens
  misc_RNA (1)...(19): siRNA sense strand
ccguagcagagaaggaaga

SEQ ID NO: 2384534 - RNA, 19 nt, Homo sapiens
  misc_RNA (1)...(19): siRNA sense strand
gugcugaguuccugcgcau

SEQ ID NO: 2384535 - RNA, 19 nt, Homo sapiens
  misc_RNA (1)...(19): siRNA sense strand
gcgagaacucugcaggaga

SEQ ID NO: 2384536 - RNA, 19 nt, Homo sapiens
  misc_RNA (1)...(19): siRNA sense strand
gccagaaggagguguccaa

SEQ ID NO: 2384537 - RNA, 19 nt, Homo sapiens
  misc_RNA (1)...(19): siRNA sense strand
gggugagcaguuuggacaa

SEQ ID NO: 2384538 - RNA, 19 nt, Homo sapiens
  misc_RNA (1)...(19): siRNA sense strand
ccucaaugaccagcggaaa

SEQ ID NO: 2384539 - RNA, 19 nt, Homo sapiens
  misc_RNA (1)...(19): siRNA sense strand
cuguuacucagcagagaaa

SEQ ID NO: 2384540 - RNA, 19 nt, Homo sapiens
  misc_RNA (1)...(19): siRNA sense strand
ccaaauuaaaugugagcag

SEQ ID NO: 2384541 - RNA, 19 nt, Homo sapiens
  misc_RNA (1)...(19): siRNA sense strand
aggaaucaacugaaagcau

SEQ ID NO: 2384542 - RNA, 19 nt, Homo sapiens
  misc_RNA (1)...(19): siRNA sense strand
ccacagaacaucaggaacc

SEQ ID NO: 2384543 - RNA, 19 nt, Homo sapiens
  misc_RNA (1)...(19): siRNA sense strand
ucacagggaauuauggaca

SEQ ID NO: 2384544 - RNA, 19 nt, Homo sapiens
  misc_RNA (1)...(19): siRNA sense strand
ucucggaagcagacaguga

SEQ ID NO: 2384545 - RNA, 19 nt, Homo sapiens
  misc_RNA (1)...(19): siRNA sense strand
aggaggaugaagaggagga

SEQ ID NO: 2384546 - RNA, 19 nt, Homo sapiens
  misc_RNA (1)...(19): siRNA sense strand
aggaggaggaugaagagga

SEQ ID NO: 2384547 - RNA, 19 nt, Homo sapiens
  misc_RNA (1)...(19): siRNA sense strand
accaaggagagcucagaaa

SEQ ID NO: 2384548 - RNA, 19 nt, Homo sapiens
  misc_RNA (1)...(19): siRNA sense strand
gagaccaggaccaggacuu

SEQ ID NO: 2384549 - RNA, 19 nt, Homo sapiens
  misc_RNA (1)...(19): siRNA sense strand
cuugaacccaggagccaaa

SEQ ID NO: 2384550 - RNA, 19 nt, Homo sapiens
  misc_RNA (1)...(19): siRNA sense strand
cucaaugaccagcggaaaa

SEQ ID NO: 2384551 - RNA, 19 nt, Homo sapiens
  misc_RNA (1)...(19): siRNA sense strand
cgcaaauuggugugugaga

SEQ ID NO: 2384552 - RNA, 19 nt, Homo sapiens
  misc_RNA (1)...(19): siRNA sense strand
ggaaggaugcugcgugcca

SEQ ID NO: 2384553 - RNA, 19 nt, Homo sapiens
  misc_RNA (1)...(19): siRNA sense strand
ccacaaagcccaaggagac

SEQ ID NO: 2384554 - RNA, 19 nt, Homo sapiens
  misc_RNA (1)...(19): siRNA sense strand
ucaauuacuacgaggcgaa

SEQ ID NO: 2384555 - RNA, 19 nt, Homo sapiens
  misc_RNA (1)...(19): siRNA sense strand
gcaucgaggacgagagcgu

SEQ ID NO: 2384556 - RNA, 19 nt, Homo sapiens
  misc_RNA (1)...(19): siRNA sense strand
ccuugagcuuggagggugu

SEQ ID NO: 2384557 - RNA, 19 nt, Homo sapiens
  misc_RNA (1)...(19): siRNA sense strand
ccaccuacucccagcucua

SEQ ID NO: 2384558 - RNA, 19 nt, Homo sapiens
  misc_RNA (1)...(19): siRNA sense strand
cgggaaacgcugauccuca

SEQ ID NO: 2384559 - RNA, 19 nt, Homo sapiens
  misc_RNA (1)...(19): siRNA sense strand
gcuuggagggugugguguu

SEQ ID NO: 2384560 - RNA, 19 nt, Homo sapiens
  misc_RNA (1)...(19): siRNA sense strand
gggaaguagaggugcaaau

SEQ ID NO: 2384561 - RNA, 19 nt, Homo sapiens
  misc_RNA (1)...(19): siRNA sense strand
cuggaagggcugugggcaa

SEQ ID NO: 2384562 - RNA, 19 nt, Homo sapiens
  misc_RNA (1)...(19): siRNA sense strand
cugcaagagaugagggaug

SEQ ID NO: 2384563 - RNA, 19 nt, Homo sapiens
  misc_RNA (1)...(19): siRNA sense strand
aggcaggagcugaacaaga

SEQ ID NO: 2384564 - RNA, 19 nt, Homo sapiens
  misc_RNA (1)...(19): siRNA sense strand
uggcccaggcugagagaca

SEQ ID NO: 2384565 - RNA, 19 nt, Homo sapiens
  misc_RNA (1)...(19): siRNA sense strand
ccugggaaguagaggugca

SEQ ID NO: 2384566 - RNA, 19 nt, Homo sapiens
  misc_RNA (1)...(19): siRNA sense strand
acucugaagcucaaggaga

SEQ ID NO: 2384567 - RNA, 19 nt, Homo sapiens
  misc_RNA (1)...(19): siRNA sense strand
cuguaggcuucuucggcua

SEQ ID NO: 2384568 - RNA, 19 nt, Homo sapiens
  misc_RNA (1)...(19): siRNA sense strand
ggauuaugguuuagaccca

SEQ ID NO: 2384569 - RNA, 19 nt, Homo sapiens
  misc_RNA (1)...(19): siRNA sense strand
ugacacaagaagagaaaau

SEQ ID NO: 2384570 - RNA, 19 nt, Homo sapiens
  misc_RNA (1)...(19): siRNA sense strand
aagagaaaaucaagcgaau

SEQ ID NO: 2384571 - RNA, 19 nt, Homo sapiens
  misc_RNA (1)...(19): siRNA sense strand
auugacacaagaagagaaa

SEQ ID NO: 2384572 - RNA, 19 nt, Homo sapiens
  misc_RNA (1)...(19): siRNA sense strand
gaauuuaaagaaaccgcaa

SEQ ID NO: 2384573 - RNA, 19 nt, Homo sapiens
  misc_RNA (1)...(19): siRNA sense strand
cauggaaaagugaaagaaa

SEQ ID NO: 2384574 - RNA, 19 nt, Homo sapiens
  misc_RNA (1)...(19): siRNA sense strand
agucaagaaacuuauggaa

SEQ ID NO: 2384575 - RNA, 19 nt, Homo sapiens
  misc_RNA (1)...(19): siRNA sense strand
uugcagauggacagagaga

SEQ ID NO: 2384576 - RNA, 19 nt, Homo sapiens
  misc_RNA (1)...(19): siRNA sense strand
cucugaagauauugcaaga

SEQ ID NO: 2384577 - RNA, 19 nt, Homo sapiens
  misc_RNA (1)...(19): siRNA sense strand
aaaacuacccuguggagaa

SEQ ID NO: 2384578 - RNA, 19 nt, Homo sapiens
  misc_RNA (1)...(19): siRNA sense strand
agauggacagagagagcuu

SEQ ID NO: 2384579 - RNA, 19 nt, Homo sapiens
  misc_RNA (1)...(19): siRNA sense strand
ccagcagucaagaaacuua

SEQ ID NO: 2384580 - RNA, 19 nt, Homo sapiens
  misc_RNA (1)...(19): siRNA sense strand
acuauggggucauggacaa

SEQ ID NO: 2384581 - RNA, 19 nt, Homo sapiens
  misc_RNA (1)...(19): siRNA sense strand
gcagauggacagagagagc

SEQ ID NO: 2384582 - RNA, 19 nt, Homo sapiens
  misc_RNA (1)...(19): siRNA sense strand
cuuuaucagaagacggaaa

SEQ ID NO: 2384583 - RNA, 19 nt, Homo sapiens
  misc_RNA (1)...(19): siRNA sense strand
ccuuagagucucaagucaa

SEQ ID NO: 2384584 - RNA, 19 nt, Homo sapiens
  misc_RNA (1)...(19): siRNA sense strand
cugaggaagugauggagga

SEQ ID NO: 2384585 - RNA, 19 nt, Homo sapiens
  misc_RNA (1)...(19): siRNA sense strand
ugaaaggaauugacggugu

SEQ ID NO: 2384586 - RNA, 19 nt, Homo sapiens
  misc_RNA (1)...(19): siRNA sense strand
aggaagugauggaggaggu

SEQ ID NO: 2384587 - RNA, 19 nt, Homo sapiens
  misc_RNA (1)...(19): siRNA sense strand
cuuucugaccuucgagaua

SEQ ID NO: 2384588 - RNA, 19 nt, Homo sapiens
  misc_RNA (1)...(19): siRNA sense strand
ggggagaaccuuagagucu

SEQ ID NO: 2384589 - RNA, 19 nt, Homo sapiens
  misc_RNA (1)...(19): siRNA sense strand
gcuuguaccuccaggccca

SEQ ID NO: 2384590 - RNA, 19 nt, Homo sapiens
  misc_RNA (1)...(19): siRNA sense strand
uaggacugguaaugaggaa

SEQ ID NO: 2384591 - RNA, 19 nt, Homo sapiens
  misc_RNA (1)...(19): siRNA sense strand
cugguuggcuaaagggcuu

SEQ ID NO: 2384592 - RNA, 19 nt, Homo sapiens
  misc_RNA (1)...(19): siRNA sense strand
acacccaagaccuggacaa

SEQ ID NO: 2384593 - RNA, 19 nt, Homo sapiens
  misc_RNA (1)...(19): siRNA sense strand
cuuugaugcaggugguaga

SEQ ID NO: 2384594 - RNA, 19 nt, Homo sapiens
  misc_RNA (1)...(19): siRNA sense strand
aggaacaaacacggauuaa

SEQ ID NO: 2384595 - RNA, 19 nt, Homo sapiens
  misc_RNA (1)...(19): siRNA sense strand
ccaaugugggcgagagcaa

SEQ ID NO: 2384596 - RNA, 19 nt, Homo sapiens
  misc_RNA (1)...(19): siRNA sense strand
cgaugaagaagcagcgaga

SEQ ID NO: 2384597 - RNA, 19 nt, Homo sapiens
  misc_RNA (1)...(19): siRNA sense strand
uguggagagaauagagaaa

SEQ ID NO: 2384598 - RNA, 19 nt, Homo sapiens
  misc_RNA (1)...(19): siRNA sense strand
gugaacugaugguggaaaa

SEQ ID NO: 2384599 - RNA, 19 nt, Homo sapiens
  misc_RNA (1)...(19): siRNA sense strand
cugcuaaccacaagaggaa

SEQ ID NO: 2384600 - RNA, 19 nt, Homo sapiens
  misc_RNA (1)...(19): siRNA sense strand
agauaagauggaagaaaca

SEQ ID NO: 2384601 - RNA, 19 nt, Homo sapiens
  misc_RNA (1)...(19): siRNA sense strand
uuacaggaggacugggaaa

SEQ ID NO: 2384602 - RNA, 19 nt, Homo sapiens
  misc_RNA (1)...(19): siRNA sense strand
agagaaaggaagugcaagu

SEQ ID NO: 2384603 - RNA, 19 nt, Homo sapiens
  misc_RNA (1)...(19): siRNA sense strand
ggaaaggagugcugcgaug

SEQ ID NO: 2384604 - RNA, 19 nt, Homo sapiens
  misc_RNA (1)...(19): siRNA sense strand
uggaaaagcaaaagcgaga

SEQ ID NO: 2384605 - RNA, 19 nt, Homo sapiens
  misc_RNA (1)...(19): siRNA sense strand
aaagagagcacuuggcaga

SEQ ID NO: 2384606 - RNA, 19 nt, Homo sapiens
  misc_RNA (1)...(19): siRNA sense strand
ggaaaacgaaauaaagcaa

SEQ ID NO: 2384607 - RNA, 19 nt, Homo sapiens
  misc_RNA (1)...(19): siRNA sense strand
cuuuggaugcacagauaaa

SEQ ID NO: 2384608 - RNA, 19 nt, Homo sapiens
  misc_RNA (1)...(19): siRNA sense strand
cuauaagaaaccacaagaa

SEQ ID NO: 2384609 - RNA, 19 nt, Homo sapiens
  misc_RNA (1)...(19): siRNA sense strand
auggauaacagacaggaaa

SEQ ID NO: 2384610 - RNA, 19 nt, Homo sapiens
  misc_RNA (1)...(19): siRNA sense strand
acgaaauaaagcaaagaca

SEQ ID NO: 2384611 - RNA, 19 nt, Homo sapiens
  misc_RNA (1)...(19): siRNA sense strand
cuacuagagaacagaauca

SEQ ID NO: 2384612 - RNA, 19 nt, Homo sapiens
  misc_RNA (1)...(19): siRNA sense strand
uccugaaacaaauggauaa

SEQ ID NO: 2384613 - RNA, 19 nt, Homo sapiens
  misc_RNA (1)...(19): siRNA sense strand
caguguuacaagagagcuu

SEQ ID NO: 2384614 - RNA, 19 nt, Homo sapiens
  misc_RNA (1)...(19): siRNA sense strand
agcaaaagcgagaacaaaa

SEQ ID NO: 2384615 - RNA, 19 nt, Homo sapiens
  misc_RNA (1)...(19): siRNA sense strand
auagagaaaggaagugcaa

SEQ ID NO: 2384616 - RNA, 19 nt, Homo sapiens
  misc_RNA (1)...(19): siRNA sense strand
guuugaacgaagugagagu

SEQ ID NO: 2384617 - RNA, 19 nt, Homo sapiens
  misc_RNA (1)...(19): siRNA sense strand
uugguaagaaugaggguga

SEQ ID NO: 2384618 - RNA, 19 nt, Homo sapiens
  misc_RNA (1)...(19): siRNA sense strand
uggauaacagacaggaaaa

SEQ ID NO: 2384619 - RNA, 19 nt, Homo sapiens
  misc_RNA (1)...(19): siRNA sense strand
aagcaaugccagaggcgca

SEQ ID NO: 2384620 - RNA, 19 nt, Homo sapiens
  misc_RNA (1)...(19): siRNA sense strand
aaaccacaagaaugagaaa

SEQ ID NO: 2384621 - RNA, 19 nt, Homo sapiens
  misc_RNA (1)...(19): siRNA sense strand
auauccaaguugucugaaa

SEQ ID NO: 2384622 - RNA, 19 nt, Homo sapiens
  misc_RNA (1)...(19): siRNA sense strand
agcaaagacaauacagaga

SEQ ID NO: 2384623 - RNA, 19 nt, Homo sapiens
  misc_RNA (1)...(19): siRNA sense strand
agugcaacucacagaggaa

SEQ ID NO: 2384624 - RNA, 19 nt, Homo sapiens
  misc_RNA (1)...(19): siRNA sense strand
aguaaauagagucaaccaa

SEQ ID NO: 2384625 - RNA, 19 nt, Homo sapiens
  misc_RNA (1)...(19): siRNA sense strand
ccgccuggaacaagugcaa

SEQ ID NO: 2384626 - RNA, 19 nt, Homo sapiens
  misc_RNA (1)...(19): siRNA sense strand
aagugagaguggugggaag

SEQ ID NO: 2384627 - RNA, 19 nt, Homo sapiens
  misc_RNA (1)...(19): siRNA sense strand
agacagaaccgcugagcug

SEQ ID NO: 2384628 - RNA, 19 nt, Homo sapiens
  misc_RNA (1)...(19): siRNA sense strand
gaguaaauagagucaacca

SEQ ID NO: 2384629 - RNA, 19 nt, Homo sapiens
  misc_RNA (1)...(19): siRNA sense strand
gcaaaugcuucagaggaca

SEQ ID NO: 2384630 - RNA, 19 nt, Homo sapiens
  misc_RNA (1)...(19): siRNA sense strand
cuccugaaacaaauggaua

SEQ ID NO: 2384631 - RNA, 19 nt, Homo sapiens
  misc_RNA (1)...(19): siRNA sense strand
aaagcaaaagcgagaacaa

SEQ ID NO: 2384632 - RNA, 19 nt, Homo sapiens
  misc_RNA (1)...(19): siRNA sense strand
uggaaaaguuugaacgaag

SEQ ID NO: 2384633 - RNA, 19 nt, Homo sapiens
  misc_RNA (1)...(19): siRNA sense strand
aagaaugagaaaccggaau

SEQ ID NO: 2384634 - RNA, 19 nt, Homo sapiens
  misc_RNA (1)...(19): siRNA sense strand
ccaaauaacuaucggacca

SEQ ID NO: 2384635 - RNA, 19 nt, Homo sapiens
  misc_RNA (1)...(19): siRNA sense strand
ggaacuggguaaugagcca

SEQ ID NO: 2384636 - RNA, 19 nt, Homo sapiens
  misc_RNA (1)...(19): siRNA sense strand
ccuuagugaugguggacga

SEQ ID NO: 2384637 - RNA, 19 nt, Homo sapiens
  misc_RNA (1)...(19): siRNA sense strand
ggaaagaagauuuggcuug

SEQ ID NO: 2384638 - RNA, 19 nt, Homo sapiens
  misc_RNA (1)...(19): siRNA sense strand
gguugaacacuuuaggaau

SEQ ID NO: 2384639 - RNA, 19 nt, Homo sapiens
  misc_RNA (1)...(19): siRNA sense strand
uggucaaggugauggacuu

SEQ ID NO: 2384640 - RNA, 19 nt, Homo sapiens
  misc_RNA (1)...(19): siRNA sense strand
cugcagguuugaaggaaaa

SEQ ID NO: 2384641 - RNA, 19 nt, Homo sapiens
  misc_RNA (1)...(19): siRNA sense strand
guacaacauuucuugggaa

SEQ ID NO: 2384642 - RNA, 19 nt, Homo sapiens
  misc_RNA (1)...(19): siRNA sense strand
cggauuuauuccagagcca

SEQ ID NO: 2384643 - RNA, 19 nt, Homo sapiens
  misc_RNA (1)...(19): siRNA sense strand
cuuuaggaaugcuggccaa

SEQ ID NO: 2384644 - RNA, 19 nt, Homo sapiens
  misc_RNA (1)...(19): siRNA sense strand
uuucuugggaacuggguaa

SEQ ID NO: 2384645 - RNA, 19 nt, Homo sapiens
  misc_RNA (1)...(19): siRNA sense strand
agauuuggcuugaaggugu

SEQ ID NO: 2384646 - RNA, 19 nt, Homo sapiens
  misc_RNA (1)...(19): siRNA sense strand
cggccgaggaagaauguca

SEQ ID NO: 2384647 - RNA, 19 nt, Homo sapiens
  misc_RNA (1)...(19): siRNA sense strand
aggaaguacaguagaugca

SEQ ID NO: 2384648 - RNA, 19 nt, Homo sapiens
  misc_RNA (1)...(19): siRNA sense strand
ugguugaacacuuuaggaa

SEQ ID NO: 2384649 - RNA, 19 nt, Homo sapiens
  misc_RNA (1)...(19): siRNA sense strand
acaaucaccucguggacca

SEQ ID NO: 2384650 - RNA, 19 nt, Homo sapiens
  misc_RNA (1)...(19): siRNA sense strand
ccgagugauccgggacaaa

SEQ ID NO: 2384651 - RNA, 19 nt, Homo sapiens
  misc_RNA (1)...(19): siRNA sense strand
gggagaaggcagcucagau

SEQ ID NO: 2384652 - RNA, 19 nt, Homo sapiens
  misc_RNA (1)...(19): siRNA sense strand
cgaucaagaaagaaaauca

SEQ ID NO: 2384653 - RNA, 19 nt, Homo sapiens
  misc_RNA (1)...(19): siRNA sense strand
ccgagaaaguggcugggaa

SEQ ID NO: 2384654 - RNA, 19 nt, Homo sapiens
  misc_RNA (1)...(19): siRNA sense strand
agaugaggcaagugagcaa

SEQ ID NO: 2384655 - RNA, 19 nt, Homo sapiens
  misc_RNA (1)...(19): siRNA sense strand
agauuugcccagaggacaa

SEQ ID NO: 2384656 - RNA, 19 nt, Homo sapiens
  misc_RNA (1)...(19): siRNA sense strand
agaucaagaaagucaggaa

SEQ ID NO: 2384657 - RNA, 19 nt, Homo sapiens
  misc_RNA (1)...(19): siRNA sense strand
cgagaaaguggcugggaag

SEQ ID NO: 2384658 - RNA, 19 nt, Homo sapiens
  misc_RNA (1)...(19): siRNA sense strand
agacaaagugaccaagaca

SEQ ID NO: 2384659 - RNA, 19 nt, Homo sapiens
  misc_RNA (1)...(19): siRNA sense strand
cggaugaagaggacagugu

SEQ ID NO: 2384660 - RNA, 19 nt, Homo sapiens
  misc_RNA (1)...(19): siRNA sense strand
ugguaaaagaugaggaaac

SEQ ID NO: 2384661 - RNA, 19 nt, Homo sapiens
  misc_RNA (1)...(19): siRNA sense strand
ggcucagagaggugaagua

SEQ ID NO: 2384662 - RNA, 19 nt, Homo sapiens
  misc_RNA (1)...(19): siRNA sense strand
guccagacaaagugaccaa

SEQ ID NO: 2384663 - RNA, 19 nt, Homo sapiens
  misc_RNA (1)...(19): siRNA sense strand
ccauguaccaacacggaga

SEQ ID NO: 2384664 - RNA, 19 nt, Homo sapiens
  misc_RNA (1)...(19): siRNA sense strand
gcccagaggacaaagcaga

SEQ ID NO: 2384665 - RNA, 19 nt, Homo sapiens
  misc_RNA (1)...(19): siRNA sense strand
agugaugcugggagaaaga

SEQ ID NO: 2384666 - RNA, 19 nt, Homo sapiens
  misc_RNA (1)...(19): siRNA sense strand
cugucaagaucguccugaa

SEQ ID NO: 2384667 - RNA, 19 nt, Homo sapiens
  misc_RNA (1)...(19): siRNA sense strand
ccacgaaggucacuggaac

SEQ ID NO: 2384668 - RNA, 19 nt, Homo sapiens
  misc_RNA (1)...(19): siRNA sense strand
aagacauaacaaagaccua

SEQ ID NO: 2384669 - RNA, 19 nt, Homo sapiens
  misc_RNA (1)...(19): siRNA sense strand
agaaagucaggaagcaaga

SEQ ID NO: 2384670 - RNA, 19 nt, Homo sapiens
  misc_RNA (1)...(19): siRNA sense strand
gugaccaagacauaacaaa

SEQ ID NO: 2384671 - RNA, 19 nt, Homo sapiens
  misc_RNA (1)...(19): siRNA sense strand
ugaggaaagccgaaggaaa

SEQ ID NO: 2384672 - RNA, 19 nt, Homo sapiens
  misc_RNA (1)...(19): siRNA sense strand
ucgaaagacccaagagcaa

SEQ ID NO: 2384673 - RNA, 19 nt, Homo sapiens
  misc_RNA (1)...(19): siRNA sense strand
ggcaaggaccagagggauu

SEQ ID NO: 2384674 - RNA, 19 nt, Homo sapiens
  misc_RNA (1)...(19): siRNA sense strand
aggaagaggaggagaggga

SEQ ID NO: 2384675 - RNA, 19 nt, Homo sapiens
  misc_RNA (1)...(19): siRNA sense strand
cccugaaacuugagaguga

SEQ ID NO: 2384676 - RNA, 19 nt, Homo sapiens
  misc_RNA (1)...(19): siRNA sense strand
gcaacuacgaggugauaau

SEQ ID NO: 2384677 - RNA, 19 nt, Homo sapiens
  misc_RNA (1)...(19): siRNA sense strand
aggaggaggagguugauua

SEQ ID NO: 2384678 - RNA, 19 nt, Homo sapiens
  misc_RNA (1)...(19): siRNA sense strand
acaauaagaacgagaagga

SEQ ID NO: 2384679 - RNA, 19 nt, Homo sapiens
  misc_RNA (1)...(19): siRNA sense strand
gcugaagagcucaagaaau

SEQ ID NO: 2384680 - RNA, 19 nt, Homo sapiens
  misc_RNA (1)...(19): siRNA sense strand
cauauuaccagcaggagaa

SEQ ID NO: 2384681 - RNA, 19 nt, Homo sapiens
  misc_RNA (1)...(19): siRNA sense strand
aggagaagcaggaggagga

SEQ ID NO: 2384682 - RNA, 19 nt, Homo sapiens
  misc_RNA (1)...(19): siRNA sense strand
gcauauuaccagcaggaga

SEQ ID NO: 2384683 - RNA, 19 nt, Homo sapiens
  misc_RNA (1)...(19): siRNA sense strand
gcaacguaucauugaagaa

SEQ ID NO: 2384684 - RNA, 19 nt, Homo sapiens
  misc_RNA (1)...(19): siRNA sense strand
auuccaagguugcgggaga

SEQ ID NO: 2384685 - RNA, 19 nt, Homo sapiens
  misc_RNA (1)...(19): siRNA sense strand
ccacuacagaugaggaaaa

SEQ ID NO: 2384686 - RNA, 19 nt, Homo sapiens
  misc_RNA (1)...(19): siRNA sense strand
uggacaaacuaaugaggga

SEQ ID NO: 2384687 - RNA, 19 nt, Homo sapiens
  misc_RNA (1)...(19): siRNA sense strand
ggcgaaaaucacugggaaa

SEQ ID NO: 2384688 - RNA, 19 nt, Homo sapiens
  misc_RNA (1)...(19): siRNA sense strand
agagggagggcgaggagaa

SEQ ID NO: 2384689 - RNA, 19 nt, Homo sapiens
  misc_RNA (1)...(19): siRNA sense strand
auguaaagaacguguguga

SEQ ID NO: 2384690 - RNA, 19 nt, Homo sapiens
  misc_RNA (1)...(19): siRNA sense strand
gguaugaguuggaugagga

SEQ ID NO: 2384691 - RNA, 19 nt, Homo sapiens
  misc_RNA (1)...(19): siRNA sense strand
cgagaaggagcuugugcua

SEQ ID NO: 2384692 - RNA, 19 nt, Homo sapiens
  misc_RNA (1)...(19): siRNA sense strand
ugaugagguccgaggaaaa

SEQ ID NO: 2384693 - RNA, 19 nt, Homo sapiens
  misc_RNA (1)...(19): siRNA sense strand
cucaaacagagaagaguua

SEQ ID NO: 2384694 - RNA, 19 nt, Homo sapiens
  misc_RNA (1)...(19): siRNA sense strand
gggaggaugcugaggaugu

SEQ ID NO: 2384695 - RNA, 19 nt, Homo sapiens
  misc_RNA (1)...(19): siRNA sense strand
agaacgugugugagagcaa

SEQ ID NO: 2384696 - RNA, 19 nt, Homo sapiens
  misc_RNA (1)...(19): siRNA sense strand
uggugaagccaaagcgaga

SEQ ID NO: 2384697 - RNA, 19 nt, Homo sapiens
  misc_RNA (1)...(19): siRNA sense strand
gcucaaacagagaagaguu

SEQ ID NO: 2384698 - RNA, 19 nt, Homo sapiens
  misc_RNA (1)...(19): siRNA sense strand
cccaagagcaagaugaaga

SEQ ID NO: 2384699 - RNA, 19 nt, Homo sapiens
  misc_RNA (1)...(19): siRNA sense strand
acuaauggccagacgguga

SEQ ID NO: 2384700 - RNA, 19 nt, Homo sapiens
  misc_RNA (1)...(19): siRNA sense strand
cugaaacuugagagugaaa

SEQ ID NO: 2384701 - RNA, 19 nt, Homo sapiens
  misc_RNA (1)...(19): siRNA sense strand
aggaaaacgaggauacuua

SEQ ID NO: 2384702 - RNA, 19 nt, Homo sapiens
  misc_RNA (1)...(19): siRNA sense strand
gcaaggagaagcaggagga

SEQ ID NO: 2384703 - RNA, 19 nt, Homo sapiens
  misc_RNA (1)...(19): siRNA sense strand
gaggaagcucagauaggaa

SEQ ID NO: 2384704 - RNA, 19 nt, Homo sapiens
  misc_RNA (1)...(19): siRNA sense strand
ccgccuaccugcagcucua

SEQ ID NO: 2384705 - RNA, 19 nt, Homo sapiens
  misc_RNA (1)...(19): siRNA sense strand
gggagguguugcagaaaau

SEQ ID NO: 2384706 - RNA, 19 nt, Homo sapiens
  misc_RNA (1)...(19): siRNA sense strand
aagaugaagaggugggcuu

SEQ ID NO: 2384707 - RNA, 19 nt, Homo sapiens
  misc_RNA (1)...(19): siRNA sense strand
gucagaaacauuugaaaca

SEQ ID NO: 2384708 - RNA, 19 nt, Homo sapiens
  misc_RNA (1)...(19): siRNA sense strand
aggagaacgacgaugaaga

SEQ ID NO: 2384709 - RNA, 19 nt, Homo sapiens
  misc_RNA (1)...(19): siRNA sense strand
augcagagguccuggaucu

SEQ ID NO: 2384710 - RNA, 19 nt, Homo sapiens
  misc_RNA (1)...(19): siRNA sense strand
agaaguugccagaggaagu

SEQ ID NO: 2384711 - RNA, 19 nt, Homo sapiens
  misc_RNA (1)...(19): siRNA sense strand
ugauuaugagagugaggaa

SEQ ID NO: 2384712 - RNA, 19 nt, Homo sapiens
  misc_RNA (1)...(19): siRNA sense strand
gcucauaaauauaauccca

SEQ ID NO: 2384713 - RNA, 19 nt, Homo sapiens
  misc_RNA (1)...(19): siRNA sense strand
augccaaacgcaaggagaa

SEQ ID NO: 2384714 - RNA, 19 nt, Homo sapiens
  misc_RNA (1)...(19): siRNA sense strand
gugcaggacuucagcaacu

SEQ ID NO: 2384715 - RNA, 19 nt, Homo sapiens
  misc_RNA (1)...(19): siRNA sense strand
caucagugucagaaacauu

SEQ ID NO: 2384716 - RNA, 19 nt, Homo sapiens
  misc_RNA (1)...(19): siRNA sense strand
aaggauucuuucugaacua

SEQ ID NO: 2384717 - RNA, 19 nt, Homo sapiens
  misc_RNA (1)...(19): siRNA sense strand
cgaaaacacaugaugggaa

SEQ ID NO: 2384718 - RNA, 19 nt, Homo sapiens
  misc_RNA (1)...(19): siRNA sense strand
augaagacaugcaggagga

SEQ ID NO: 2384719 - RNA, 19 nt, Homo sapiens
  misc_RNA (1)...(19): siRNA sense strand
acaugcaggaggaacgaaa

SEQ ID NO: 2384720 - RNA, 19 nt, Homo sapiens
  misc_RNA (1)...(19): siRNA sense strand
uguggaagaaugaaggauu

SEQ ID NO: 2384721 - RNA, 19 nt, Homo sapiens
  misc_RNA (1)...(19): siRNA sense strand
cggcugaagagcucaagaa

SEQ ID NO: 2384722 - RNA, 19 nt, Homo sapiens
  misc_RNA (1)...(19): siRNA sense strand
uggaagacauuuuggugaa

SEQ ID NO: 2384723 - RNA, 19 nt, Homo sapiens
  misc_RNA (1)...(19): siRNA sense strand
auuaugagagugaggaaga

SEQ ID NO: 2384724 - RNA, 19 nt, Homo sapiens
  misc_RNA (1)...(19): siRNA sense strand
ccaacaauaagaacgagaa

SEQ ID NO: 2384725 - RNA, 19 nt, Homo sapiens
  misc_RNA (1)...(19): siRNA sense strand
ugcuaaacacagaaggaau

SEQ ID NO: 2384726 - RNA, 19 nt, Homo sapiens
  misc_RNA (1)...(19): siRNA sense strand
ucuuaguggcaaugagaaa

SEQ ID NO: 2384727 - RNA, 19 nt, Homo sapiens
  misc_RNA (1)...(19): siRNA sense strand
gcgggaaaauugagaacau

SEQ ID NO: 2384728 - RNA, 19 nt, Homo sapiens
  misc_RNA (1)...(19): siRNA sense strand
uggagaguggucagggaaa

SEQ ID NO: 2384729 - RNA, 19 nt, Homo sapiens
  misc_RNA (1)...(19): siRNA sense strand
gcugcaggaaugaggagaa

SEQ ID NO: 2384730 - RNA, 19 nt, Homo sapiens
  misc_RNA (1)...(19): siRNA sense strand
agucaauggguaccagaaa

SEQ ID NO: 2384731 - RNA, 19 nt, Homo sapiens
  misc_RNA (1)...(19): siRNA sense strand
ugaaaguuguuuuggggaa

SEQ ID NO: 2384732 - RNA, 19 nt, Homo sapiens
  misc_RNA (1)...(19): siRNA sense strand
cugggaaguccaagaucaa

SEQ ID NO: 2384733 - RNA, 19 nt, Homo sapiens
  misc_RNA (1)...(19): siRNA sense strand
cugcaagagcugccgaaau

SEQ ID NO: 2384734 - RNA, 19 nt, Homo sapiens
  misc_RNA (1)...(19): siRNA sense strand
gcuggaauguccuggcaga

SEQ ID NO: 2384735 - RNA, 19 nt, Homo sapiens
  misc_RNA (1)...(19): siRNA sense strand
gauaaaacaugcagccaca

SEQ ID NO: 2384736 - RNA, 19 nt, Homo sapiens
  misc_RNA (1)...(19): siRNA sense strand
gggaaauucuaccgggaug

SEQ ID NO: 2384737 - RNA, 19 nt, Homo sapiens
  misc_RNA (1)...(19): siRNA sense strand
cauccagagccuacagauu

SEQ ID NO: 2384738 - RNA, 19 nt, Homo sapiens
  misc_RNA (1)...(19): siRNA sense strand
ccuggagcagaguggaaua

SEQ ID NO: 2384739 - RNA, 19 nt, Homo sapiens
  misc_RNA (1)...(19): siRNA sense strand
cugcaggaaugaggagaau

SEQ ID NO: 2384740 - RNA, 19 nt, Homo sapiens
  misc_RNA (1)...(19): siRNA sense strand
cagguucagucaagggaga

SEQ ID NO: 2384741 - RNA, 19 nt, Homo sapiens
  misc_RNA (1)...(19): siRNA sense strand
cuauguucuuaguggcaau

SEQ ID NO: 2384742 - RNA, 19 nt, Homo sapiens
  misc_RNA (1)...(19): siRNA sense strand
agaucaaggcgucagaaga

SEQ ID NO: 2384743 - RNA, 19 nt, Homo sapiens
  misc_RNA (1)...(19): siRNA sense strand
augaggagaaugaguguga

SEQ ID NO: 2384744 - RNA, 19 nt, Homo sapiens
  misc_RNA (1)...(19): siRNA sense strand
agauuuuguuggaaagcua

SEQ ID NO: 2384745 - RNA, 19 nt, Homo sapiens
  misc_RNA (1)...(19): siRNA sense strand
gauaacauguucugugcca

SEQ ID NO: 2384746 - RNA, 19 nt, Homo sapiens
  misc_RNA (1)...(19): siRNA sense strand
ugucgggagugcugugaau

SEQ ID NO: 2384747 - RNA, 19 nt, Homo sapiens
  misc_RNA (1)...(19): siRNA sense strand
cugccgagaaccaaagauu

SEQ ID NO: 2384748 - RNA, 19 nt, Homo sapiens
  misc_RNA (1)...(19): siRNA sense strand
gaggagaaugagugugacu

SEQ ID NO: 2384749 - RNA, 19 nt, Homo sapiens
  misc_RNA (1)...(19): siRNA sense strand
gcccuggagcagaguggaa

SEQ ID NO: 2384750 - RNA, 19 nt, Homo sapiens
  misc_RNA (1)...(19): siRNA sense strand
ggcagcagcaggaggacau

SEQ ID NO: 2384751 - RNA, 19 nt, Homo sapiens
  misc_RNA (1)...(19): siRNA sense strand
gggaaaauugagaacauca

SEQ ID NO: 2384752 - RNA, 19 nt, Homo sapiens
  misc_RNA (1)...(19): siRNA sense strand
aggagcagcaugaggacca

SEQ ID NO: 2384753 - RNA, 19 nt, Homo sapiens
  misc_RNA (1)...(19): siRNA sense strand
gggagguucuggugggaga

SEQ ID NO: 2384754 - RNA, 19 nt, Homo sapiens
  misc_RNA (1)...(19): siRNA sense strand
ucacaaggcuggaagcaga

SEQ ID NO: 2384755 - RNA, 19 nt, Homo sapiens
  misc_RNA (1)...(19): siRNA sense strand
ggaaagaguuggaggacgc

SEQ ID NO: 2384756 - RNA, 19 nt, Homo sapiens
  misc_RNA (1)...(19): siRNA sense strand
ggcuggaagcagagaacau

SEQ ID NO: 2384757 - RNA, 19 nt, Homo sapiens
  misc_RNA (1)...(19): siRNA sense strand
agagacugcgggagagcaa

SEQ ID NO: 2384758 - RNA, 19 nt, Homo sapiens
  misc_RNA (1)...(19): siRNA sense strand
gcggaugagcugcaggaga

SEQ ID NO: 2384759 - RNA, 19 nt, Homo sapiens
  misc_RNA (1)...(19): siRNA sense strand
gggucaggaaauugggcau

SEQ ID NO: 2384760 - RNA, 19 nt, Homo sapiens
  misc_RNA (1)...(19): siRNA sense strand
cuacaaugucacagaugga

SEQ ID NO: 2384761 - RNA, 19 nt, Homo sapiens
  misc_RNA (1)...(19): siRNA sense strand
cggaugagcugcaggagag

SEQ ID NO: 2384762 - RNA, 19 nt, Homo sapiens
  misc_RNA (1)...(19): siRNA sense strand
aaguggaaaugcagaggca

SEQ ID NO: 2384763 - RNA, 19 nt, Homo sapiens
  misc_RNA (1)...(19): siRNA sense strand
gcagugugcaggauggaga

SEQ ID NO: 2384764 - RNA, 19 nt, Homo sapiens
  misc_RNA (1)...(19): siRNA sense strand
ugaggaaagaguuggagga

SEQ ID NO: 2384765 - RNA, 19 nt, Homo sapiens
  misc_RNA (1)...(19): siRNA sense strand
gggagaaggagcagagugg

SEQ ID NO: 2384766 - RNA, 19 nt, Homo sapiens
  misc_RNA (1)...(19): siRNA sense strand
aauagcagggucaggaaau

SEQ ID NO: 2384767 - RNA, 19 nt, Homo sapiens
  misc_RNA (1)...(19): siRNA sense strand
caacaaagauuucagggau

SEQ ID NO: 2384768 - RNA, 19 nt, Homo sapiens
  misc_RNA (1)...(19): siRNA sense strand
ucugaugagcugagaaaca

SEQ ID NO: 2384769 - RNA, 19 nt, Homo sapiens
  misc_RNA (1)...(19): siRNA sense strand
cgacacagcugauggcucu

SEQ ID NO: 2384770 - RNA, 19 nt, Homo sapiens
  misc_RNA (1)...(19): siRNA sense strand
gcuuugucuuugaggacuu

SEQ ID NO: 2384771 - RNA, 19 nt, Homo sapiens
  misc_RNA (1)...(19): siRNA sense strand
ccaacaaagauuucaggga

SEQ ID NO: 2384772 - RNA, 19 nt, Homo sapiens
  misc_RNA (1)...(19): siRNA sense strand
gugugggaguggacagcau

SEQ ID NO: 2384773 - RNA, 19 nt, Homo sapiens
  misc_RNA (1)...(19): siRNA sense strand
ccaacugcagggugggaga

SEQ ID NO: 2384774 - RNA, 19 nt, Homo sapiens
  misc_RNA (1)...(19): siRNA sense strand
ggauuuugucagggagaaa

SEQ ID NO: 2384775 - RNA, 19 nt, Homo sapiens
  misc_RNA (1)...(19): siRNA sense strand
gagacaaagcugaggaugg

SEQ ID NO: 2384776 - RNA, 19 nt, Homo sapiens
  misc_RNA (1)...(19): siRNA sense strand
gcuaggaaauggacaggcu

SEQ ID NO: 2384777 - RNA, 19 nt, Homo sapiens
  misc_RNA (1)...(19): siRNA sense strand
aaacaaagccacccagcca

SEQ ID NO: 2384778 - RNA, 19 nt, Homo sapiens
  misc_RNA (1)...(19): siRNA sense strand
acauauuuccugucaccaa

SEQ ID NO: 2384779 - RNA, 19 nt, Homo sapiens
  misc_RNA (1)...(19): siRNA sense strand
guaaagaauaagagagucu

SEQ ID NO: 2384780 - RNA, 19 nt, Homo sapiens
  misc_RNA (1)...(19): siRNA sense strand
caguaaagaauaagagagu

SEQ ID NO: 2384781 - RNA, 19 nt, Homo sapiens
  misc_RNA (1)...(19): siRNA sense strand
gcgcagugacagugcagaa

SEQ ID NO: 2384782 - RNA, 19 nt, Homo sapiens
  misc_RNA (1)...(19): siRNA sense strand
accaagagccagugaagaa

SEQ ID NO: 2384783 - RNA, 19 nt, Homo sapiens
  misc_RNA (1)...(19): siRNA sense strand
cguggaaccgugugagaau

SEQ ID NO: 2384784 - RNA, 19 nt, Homo sapiens
  misc_RNA (1)...(19): siRNA sense strand
cggugaugcaaauaaauaa

SEQ ID NO: 2384785 - RNA, 19 nt, Homo sapiens
  misc_RNA (1)...(19): siRNA sense strand
gcaaagauuccgagaggcu

SEQ ID NO: 2384786 - RNA, 19 nt, Homo sapiens
  misc_RNA (1)...(19): siRNA sense strand
ucauacaaacuaaggagaa

SEQ ID NO: 2384787 - RNA, 19 nt, Homo sapiens
  misc_RNA (1)...(19): siRNA sense strand
acagagaagaucacagaau

SEQ ID NO: 2384788 - RNA, 19 nt, Homo sapiens
  misc_RNA (1)...(19): siRNA sense strand
uggaguugguguugaugaa

SEQ ID NO: 2384789 - RNA, 19 nt, Homo sapiens
  misc_RNA (1)...(19): siRNA sense strand
ucucagaaagugauaggaa

SEQ ID NO: 2384790 - RNA, 19 nt, Homo sapiens
  misc_RNA (1)...(19): siRNA sense strand
ccuuagaugcagaaacaga

SEQ ID NO: 2384791 - RNA, 19 nt, Homo sapiens
  misc_RNA (1)...(19): siRNA sense strand
gagcaauguuuaaagcguu

SEQ ID NO: 2384792 - RNA, 19 nt, Homo sapiens
  misc_RNA (1)...(19): siRNA sense strand
ugccaaaaguauugugcaa

SEQ ID NO: 2384793 - RNA, 19 nt, Homo sapiens
  misc_RNA (1)...(19): siRNA sense strand
gcuacagauaccagugcua

SEQ ID NO: 2384794 - RNA, 19 nt, Homo sapiens
  misc_RNA (1)...(19): siRNA sense strand
gaauuugaugugagggcuu

SEQ ID NO: 2384795 - RNA, 19 nt, Homo sapiens
  misc_RNA (1)...(19): siRNA sense strand
auaaaugagcagucaccaa

SEQ ID NO: 2384796 - RNA, 19 nt, Homo sapiens
  misc_RNA (1)...(19): siRNA sense strand
ucagaaagugauaggaacu

SEQ ID NO: 2384797 - RNA, 19 nt, Homo sapiens
  misc_RNA (1)...(19): siRNA sense strand
guauggugcaggagcaaaa

SEQ ID NO: 2384798 - RNA, 19 nt, Homo sapiens
  misc_RNA (1)...(19): siRNA sense strand
ggguaacaaacuucuuaaa

SEQ ID NO: 2384799 - RNA, 19 nt, Homo sapiens
  misc_RNA (1)...(19): siRNA sense strand
acaaaggaaaccacagaga

SEQ ID NO: 2384800 - RNA, 19 nt, Homo sapiens
  misc_RNA (1)...(19): siRNA sense strand
cagagaaaguugcagucga

SEQ ID NO: 2384801 - RNA, 19 nt, Homo sapiens
  misc_RNA (1)...(19): siRNA sense strand
gagcagucaccaagagcca

SEQ ID NO: 2384802 - RNA, 19 nt, Homo sapiens
  misc_RNA (1)...(19): siRNA sense strand
aagaaacuagagugcauaa

SEQ ID NO: 2384803 - RNA, 19 nt, Homo sapiens
  misc_RNA (1)...(19): siRNA sense strand
acuaaagacaaccaaguau

SEQ ID NO: 2384804 - RNA, 19 nt, Homo sapiens
  misc_RNA (1)...(19): siRNA sense strand
aggaaaccacagagaaagu

SEQ ID NO: 2384805 - RNA, 19 nt, Homo sapiens
  misc_RNA (1)...(19): siRNA sense strand
acugauucguggacgguga

SEQ ID NO: 2384806 - RNA, 19 nt, Homo sapiens
  misc_RNA (1)...(19): siRNA sense strand
ccacagagaaaguugcagu

SEQ ID NO: 2384807 - RNA, 19 nt, Homo sapiens
  misc_RNA (1)...(19): siRNA sense strand
caugaaaaucuuagaggca

SEQ ID NO: 2384808 - RNA, 19 nt, Homo sapiens
  misc_RNA (1)...(19): siRNA sense strand
cguggacggugaugcaaau

SEQ ID NO: 2384809 - RNA, 19 nt, Homo sapiens
  misc_RNA (1)...(19): siRNA sense strand
augccuuacuucaaagauu

SEQ ID NO: 2384810 - RNA, 19 nt, Homo sapiens
  misc_RNA (1)...(19): siRNA sense strand
acacaaagcuacucaggag

SEQ ID NO: 2384811 - RNA, 19 nt, Homo sapiens
  misc_RNA (1)...(19): siRNA sense strand
agcaauguuuaaagcguuu

SEQ ID NO: 2384812 - RNA, 19 nt, Homo sapiens
  misc_RNA (1)...(19): siRNA sense strand
ccaagagccagugaagaaa

SEQ ID NO: 2384813 - RNA, 19 nt, Homo sapiens
  misc_RNA (1)...(19): siRNA sense strand
gugcaaagauuccgagagg

SEQ ID NO: 2384814 - RNA, 19 nt, Homo sapiens
  misc_RNA (1)...(19): siRNA sense strand
acggugaugcaaauaaaua

SEQ ID NO: 2384815 - RNA, 19 nt, Homo sapiens
  misc_RNA (1)...(19): siRNA sense strand
gggcuggugagcagguuau

SEQ ID NO: 2384816 - RNA, 19 nt, Homo sapiens
  misc_RNA (1)...(19): siRNA sense strand
aagaaaccuugcuuggaau

SEQ ID NO: 2384817 - RNA, 19 nt, Homo sapiens
  misc_RNA (1)...(19): siRNA sense strand
uggacagccaguaaagaau

SEQ ID NO: 2384818 - RNA, 19 nt, Homo sapiens
  misc_RNA (1)...(19): siRNA sense strand
uguucucaauccagacuaa

SEQ ID NO: 2384819 - RNA, 19 nt, Homo sapiens
  misc_RNA (1)...(19): siRNA sense strand
caauccagacuaaagacaa

SEQ ID NO: 2384820 - RNA, 19 nt, Homo sapiens
  misc_RNA (1)...(19): siRNA sense strand
agugcuaaguggagacucu

SEQ ID NO: 2384821 - RNA, 19 nt, Homo sapiens
  misc_RNA (1)...(19): siRNA sense strand
ucaggaaccauuaaggaga

SEQ ID NO: 2384822 - RNA, 19 nt, Homo sapiens
  misc_RNA (1)...(19): siRNA sense strand
gaaauaugcuagagggaga

SEQ ID NO: 2384823 - RNA, 19 nt, Homo sapiens
  misc_RNA (1)...(19): siRNA sense strand
caguaaugagagagagaaa

SEQ ID NO: 2384824 - RNA, 19 nt, Homo sapiens
  misc_RNA (1)...(19): siRNA sense strand
agccaaaguccgugggaaa

SEQ ID NO: 2384825 - RNA, 19 nt, Homo sapiens
  misc_RNA (1)...(19): siRNA sense strand
gggcuuugccagagaacaa

SEQ ID NO: 2384826 - RNA, 19 nt, Homo sapiens
  misc_RNA (1)...(19): siRNA sense strand
aguuggaaauggagaagaa

SEQ ID NO: 2384827 - RNA, 19 nt, Homo sapiens
  misc_RNA (1)...(19): siRNA sense strand
gagaagacaucguggagga

SEQ ID NO: 2384828 - RNA, 19 nt, Homo sapiens
  misc_RNA (1)...(19): siRNA sense strand
uggcaaacaaacagauuaa

SEQ ID NO: 2384829 - RNA, 19 nt, Homo sapiens
  misc_RNA (1)...(19): siRNA sense strand
cggccaagauugaacacaa

SEQ ID NO: 2384830 - RNA, 19 nt, Homo sapiens
  misc_RNA (1)...(19): siRNA sense strand
cgagaaagacacagugaca

SEQ ID NO: 2384831 - RNA, 19 nt, Homo sapiens
  misc_RNA (1)...(19): siRNA sense strand
agaaagacacagugacaau

SEQ ID NO: 2384832 - RNA, 19 nt, Homo sapiens
  misc_RNA (1)...(19): siRNA sense strand
gccaagaaagggagaagaa

SEQ ID NO: 2384833 - RNA, 19 nt, Homo sapiens
  misc_RNA (1)...(19): siRNA sense strand
ugggagaauuuaaggaaga

SEQ ID NO: 2384834 - RNA, 19 nt, Homo sapiens
  misc_RNA (1)...(19): siRNA sense strand
aggauaagaugaaagaaga

SEQ ID NO: 2384835 - RNA, 19 nt, Homo sapiens
  misc_RNA (1)...(19): siRNA sense strand
cagaacaggagcaggagua

SEQ ID NO: 2384836 - RNA, 19 nt, Homo sapiens
  misc_RNA (1)...(19): siRNA sense strand
ccgugaagcuacacagaga

SEQ ID NO: 2384837 - RNA, 19 nt, Homo sapiens
  misc_RNA (1)...(19): siRNA sense strand
caucaauggagacaagaaa

SEQ ID NO: 2384838 - RNA, 19 nt, Homo sapiens
  misc_RNA (1)...(19): siRNA sense strand
acaacaacaccaaggcaaa

SEQ ID NO: 2384839 - RNA, 19 nt, Homo sapiens
  misc_RNA (1)...(19): siRNA sense strand
ccauagauauccagcugaa

SEQ ID NO: 2384840 - RNA, 19 nt, Homo sapiens
  misc_RNA (1)...(19): siRNA sense strand
gaaucaagguguuugccaa

SEQ ID NO: 2384841 - RNA, 19 nt, Homo sapiens
  misc_RNA (1)...(19): siRNA sense strand
agucugagcccaugcaaua

SEQ ID NO: 2384842 - RNA, 19 nt, Homo sapiens
  misc_RNA (1)...(19): siRNA sense strand
cccuaaaguccaagagaca

SEQ ID NO: 2384843 - RNA, 19 nt, Homo sapiens
  misc_RNA (1)...(19): siRNA sense strand
acccagauuuggagacuaa

SEQ ID NO: 2384844 - RNA, 19 nt, Homo sapiens
  misc_RNA (1)...(19): siRNA sense strand
ggaugagggaggaaggaga

SEQ ID NO: 2384845 - RNA, 19 nt, Homo sapiens
  misc_RNA (1)...(19): siRNA sense strand
cagaugaggauaagaugaa

SEQ ID NO: 2384846 - RNA, 19 nt, Homo sapiens
  misc_RNA (1)...(19): siRNA sense strand
cugcaaagcugaaggcauc

SEQ ID NO: 2384847 - RNA, 19 nt, Homo sapiens
  misc_RNA (1)...(19): siRNA sense strand
guauugaggaggagcaaga

SEQ ID NO: 2384848 - RNA, 19 nt, Homo sapiens
  misc_RNA (1)...(19): siRNA sense strand
agacaagaaagccaagaaa

SEQ ID NO: 2384849 - RNA, 19 nt, Homo sapiens
  misc_RNA (1)...(19): siRNA sense strand
cugagaagacugaggagau

SEQ ID NO: 2384850 - RNA, 19 nt, Homo sapiens
  misc_RNA (1)...(19): siRNA sense strand
guuaaugacuccaguacau

SEQ ID NO: 2384851 - RNA, 19 nt, Homo sapiens
  misc_RNA (1)...(19): siRNA sense strand
cuacaaggacugacagaca

SEQ ID NO: 2384852 - RNA, 19 nt, Homo sapiens
  misc_RNA (1)...(19): siRNA sense strand
agacagaacaggagcagga

SEQ ID NO: 2384853 - RNA, 19 nt, Homo sapiens
  misc_RNA (1)...(19): siRNA sense strand
agucaacaaugaaggaaca

SEQ ID NO: 2384854 - RNA, 19 nt, Homo sapiens
  misc_RNA (1)...(19): siRNA sense strand
aaacugaacugcauggcua

SEQ ID NO: 2384855 - RNA, 19 nt, Homo sapiens
  misc_RNA (1)...(19): siRNA sense strand
cgugggaguuaccggauaa

SEQ ID NO: 2384856 - RNA, 19 nt, Homo sapiens
  misc_RNA (1)...(19): siRNA sense strand
ccaagauuaucaaguacaa

SEQ ID NO: 2384857 - RNA, 19 nt, Homo sapiens
  misc_RNA (1)...(19): siRNA sense strand
acggaagguucaaguacaa

SEQ ID NO: 2384858 - RNA, 19 nt, Homo sapiens
  misc_RNA (1)...(19): siRNA sense strand
ugaaaucagugacggacaa

SEQ ID NO: 2384859 - RNA, 19 nt, Homo sapiens
  misc_RNA (1)...(19): siRNA sense strand
cuagacacguggaaagaau

SEQ ID NO: 2384860 - RNA, 19 nt, Homo sapiens
  misc_RNA (1)...(19): siRNA sense strand
gggaugaaauggaccgcau

SEQ ID NO: 2384861 - RNA, 19 nt, Homo sapiens
  misc_RNA (1)...(19): siRNA sense strand
guuaagaagccugcggaaa

SEQ ID NO: 2384862 - RNA, 19 nt, Homo sapiens
  misc_RNA (1)...(19): siRNA sense strand
cacccaagaucaacgguaa

SEQ ID NO: 2384863 - RNA, 19 nt, Homo sapiens
  misc_RNA (1)...(19): siRNA sense strand
gacugaagccagaagcaaa

SEQ ID NO: 2384864 - RNA, 19 nt, Homo sapiens
  misc_RNA (1)...(19): siRNA sense strand
ccuuaugauuccuuagauu

SEQ ID NO: 2384865 - RNA, 19 nt, Homo sapiens
  misc_RNA (1)...(19): siRNA sense strand
ggacaaagcuuaugaaggc

SEQ ID NO: 2384866 - RNA, 19 nt, Homo sapiens
  misc_RNA (1)...(19): siRNA sense strand
guccaaagaaguuguacaa

SEQ ID NO: 2384867 - RNA, 19 nt, Homo sapiens
  misc_RNA (1)...(19): siRNA sense strand
aaacaaaggaugaugccau

SEQ ID NO: 2384868 - RNA, 19 nt, Homo sapiens
  misc_RNA (1)...(19): siRNA sense strand
cgggaagaggccaaacaaa

SEQ ID NO: 2384869 - RNA, 19 nt, Homo sapiens
  misc_RNA (1)...(19): siRNA sense strand
gcaagaacaggaagaggau

SEQ ID NO: 2384870 - RNA, 19 nt, Homo sapiens
  misc_RNA (1)...(19): siRNA sense strand
cuccagauauugacauaaa

SEQ ID NO: 2384871 - RNA, 19 nt, Homo sapiens
  misc_RNA (1)...(19): siRNA sense strand
gaaggauaaacauggcaaa

SEQ ID NO: 2384872 - RNA, 19 nt, Homo sapiens
  misc_RNA (1)...(19): siRNA sense strand
gacaggaggguguggcaaa

SEQ ID NO: 2384873 - RNA, 19 nt, Homo sapiens
  misc_RNA (1)...(19): siRNA sense strand
gagaugagagucagaguca

SEQ ID NO: 2384874 - RNA, 19 nt, Homo sapiens
  misc_RNA (1)...(19): siRNA sense strand
guguuugaaucuagacgaa

SEQ ID NO: 2384875 - RNA, 19 nt, Homo sapiens
  misc_RNA (1)...(19): siRNA sense strand
gugagggccaagagagcaa

SEQ ID NO: 2384876 - RNA, 19 nt, Homo sapiens
  misc_RNA (1)...(19): siRNA sense strand
ggccaaacaaacaucgaua

SEQ ID NO: 2384877 - RNA, 19 nt, Homo sapiens
  misc_RNA (1)...(19): siRNA sense strand
ugccacaaauguugacaaa

SEQ ID NO: 2384878 - RNA, 19 nt, Homo sapiens
  misc_RNA (1)...(19): siRNA sense strand
gggagaauuuaaggaagaa

SEQ ID NO: 2384879 - RNA, 19 nt, Homo sapiens
  misc_RNA (1)...(19): siRNA sense strand
ggaccaacaaaccggaaau

SEQ ID NO: 2384880 - RNA, 19 nt, Homo sapiens
  misc_RNA (1)...(19): siRNA sense strand
gcaugggagaugaagagaa

SEQ ID NO: 2384881 - RNA, 19 nt, Homo sapiens
  misc_RNA (1)...(19): siRNA sense strand
uggaggaaguuguugauga

SEQ ID NO: 2384882 - RNA, 19 nt, Homo sapiens
  misc_RNA (1)...(19): siRNA sense strand
gcgagaagaucacggccau

SEQ ID NO: 2384883 - RNA, 19 nt, Homo sapiens
  misc_RNA (1)...(19): siRNA sense strand
gaugcaaaauccagaggaa

SEQ ID NO: 2384884 - RNA, 19 nt, Homo sapiens
  misc_RNA (1)...(19): siRNA sense strand
ccaagaaagggagaagaaa

SEQ ID NO: 2384885 - RNA, 19 nt, Homo sapiens
  misc_RNA (1)...(19): siRNA sense strand
gcagaaggucgcagagugu

SEQ ID NO: 2384886 - RNA, 19 nt, Homo sapiens
  misc_RNA (1)...(19): siRNA sense strand
ggaaguuguugaugaccuu

SEQ ID NO: 2384887 - RNA, 19 nt, Homo sapiens
  misc_RNA (1)...(19): siRNA sense strand
gaggauaagaugaaagaag

SEQ ID NO: 2384888 - RNA, 19 nt, Homo sapiens
  misc_RNA (1)...(19): siRNA sense strand
cagaagaacuccaggcgca

SEQ ID NO: 2384889 - RNA, 19 nt, Homo sapiens
  misc_RNA (1)...(19): siRNA sense strand
ugaccugaggcaagggaaa

SEQ ID NO: 2384890 - RNA, 19 nt, Homo sapiens
  misc_RNA (1)...(19): siRNA sense strand
ccagcaacucagagggaca

SEQ ID NO: 2384891 - RNA, 19 nt, Homo sapiens
  misc_RNA (1)...(19): siRNA sense strand
gaaugaugugacagaggaa

SEQ ID NO: 2384892 - RNA, 19 nt, Homo sapiens
  misc_RNA (1)...(19): siRNA sense strand
ccguggaagaggaguguga

SEQ ID NO: 2384893 - RNA, 19 nt, Homo sapiens
  misc_RNA (1)...(19): siRNA sense strand
ccaugcaggaccagaggaa

SEQ ID NO: 2384894 - RNA, 19 nt, Homo sapiens
  misc_RNA (1)...(19): siRNA sense strand
ggacagucuuaacgagcca

SEQ ID NO: 2384895 - RNA, 19 nt, Homo sapiens
  misc_RNA (1)...(19): siRNA sense strand
guggaagaggagugugaca

SEQ ID NO: 2384896 - RNA, 19 nt, Homo sapiens
  misc_RNA (1)...(19): siRNA sense strand
cuuuaaaggccugaaggaa

SEQ ID NO: 2384897 - RNA, 19 nt, Homo sapiens
  misc_RNA (1)...(19): siRNA sense strand
augcaggaccagaggaagu

SEQ ID NO: 2384898 - RNA, 19 nt, Homo sapiens
  misc_RNA (1)...(19): siRNA sense strand
ggaagaugagggaggggau

SEQ ID NO: 2384899 - RNA, 19 nt, Homo sapiens
  misc_RNA (1)...(19): siRNA sense strand
gugcauaaccacaucacca

SEQ ID NO: 2384900 - RNA, 19 nt, Homo sapiens
  misc_RNA (1)...(19): siRNA sense strand
accaaugacaagagauuca

SEQ ID NO: 2384901 - RNA, 19 nt, Homo sapiens
  misc_RNA (1)...(19): siRNA sense strand
cagaugaagaggacagucu

SEQ ID NO: 2384902 - RNA, 19 nt, Homo sapiens
  misc_RNA (1)...(19): siRNA sense strand
agagacaggaccagaaaau

SEQ ID NO: 2384903 - RNA, 19 nt, Homo sapiens
  misc_RNA (1)...(19): siRNA sense strand
agguggaaaaggaugaaua

SEQ ID NO: 2384904 - RNA, 19 nt, Homo sapiens
  misc_RNA (1)...(19): siRNA sense strand
aggcaguggguuuggcuga

SEQ ID NO: 2384905 - RNA, 19 nt, Homo sapiens
  misc_RNA (1)...(19): siRNA sense strand
uggacagugccuuggaaga

SEQ ID NO: 2384906 - RNA, 19 nt, Homo sapiens
  misc_RNA (1)...(19): siRNA sense strand
ggaaugaugugacagagga

SEQ ID NO: 2384907 - RNA, 19 nt, Homo sapiens
  misc_RNA (1)...(19): siRNA sense strand
gcaccaaagccaaccgugu

SEQ ID NO: 2384908 - RNA, 19 nt, Homo sapiens
  misc_RNA (1)...(19): siRNA sense strand
agaagaggaagaugaggga

SEQ ID NO: 2384909 - RNA, 19 nt, Homo sapiens
  misc_RNA (1)...(19): siRNA sense strand
cagaagaaacagaaggcau

SEQ ID NO: 2384910 - RNA, 19 nt, Homo sapiens
  misc_RNA (1)...(19): siRNA sense strand
aguccaagcugaaggggaa

SEQ ID NO: 2384911 - RNA, 19 nt, Homo sapiens
  misc_RNA (1)...(19): siRNA sense strand
ccccagaaguaaagaacau

SEQ ID NO: 2384912 - RNA, 19 nt, Homo sapiens
  misc_RNA (1)...(19): siRNA sense strand
ccagagaaaauguugcaaa

SEQ ID NO: 2384913 - RNA, 19 nt, Homo sapiens
  misc_RNA (1)...(19): siRNA sense strand
aagaguuacagaagaaaca

SEQ ID NO: 2384914 - RNA, 19 nt, Homo sapiens
  misc_RNA (1)...(19): siRNA sense strand
agaagaaacagaaggcauc

SEQ ID NO: 2384915 - RNA, 19 nt, Homo sapiens
  misc_RNA (1)...(19): siRNA sense strand
gcaucaugguacaucccaa

SEQ ID NO: 2384916 - RNA, 19 nt, Homo sapiens
  misc_RNA (1)...(19): siRNA sense strand
cugcagugauagcuggaca

SEQ ID NO: 2384917 - RNA, 19 nt, Homo sapiens
  misc_RNA (1)...(19): siRNA sense strand
guuccugaugcuuuagaaa

SEQ ID NO: 2384918 - RNA, 19 nt, Homo sapiens
  misc_RNA (1)...(19): siRNA sense strand
gaagcaggcugaaaggcca

SEQ ID NO: 2384919 - RNA, 19 nt, Homo sapiens
  misc_RNA (1)...(19): siRNA sense strand
gaaaggaagccgaaagcug

SEQ ID NO: 2384920 - RNA, 19 nt, Homo sapiens
  misc_RNA (1)...(19): siRNA sense strand
gauagcuggacaagggaca

SEQ ID NO: 2384921 - RNA, 19 nt, Homo sapiens
  misc_RNA (1)...(19): siRNA sense strand
gauagaaagacgugggauc

SEQ ID NO: 2384922 - RNA, 19 nt, Homo sapiens
  misc_RNA (1)...(19): siRNA sense strand
acagagacugagagaaauu

SEQ ID NO: 2384923 - RNA, 19 nt, Homo sapiens
  misc_RNA (1)...(19): siRNA sense strand
aauccuaagaacagagaau

SEQ ID NO: 2384924 - RNA, 19 nt, Homo sapiens
  misc_RNA (1)...(19): siRNA sense strand
agaaacagagacugagaga

SEQ ID NO: 2384925 - RNA, 19 nt, Homo sapiens
  misc_RNA (1)...(19): siRNA sense strand
aaagaucacaugaggaaaa

SEQ ID NO: 2384926 - RNA, 19 nt, Homo sapiens
  misc_RNA (1)...(19): siRNA sense strand
uccuaagaacagagaauau

SEQ ID NO: 2384927 - RNA, 19 nt, Homo sapiens
  misc_RNA (1)...(19): siRNA sense strand
uggaacaacagcagcaaga

SEQ ID NO: 2384928 - RNA, 19 nt, Homo sapiens
  misc_RNA (1)...(19): siRNA sense strand
cauuugaagaacaagagaa

SEQ ID NO: 2384929 - RNA, 19 nt, Homo sapiens
  misc_RNA (1)...(19): siRNA sense strand
aagaaguucaguuggaaga

SEQ ID NO: 2384930 - RNA, 19 nt, Homo sapiens
  misc_RNA (1)...(19): siRNA sense strand
gcucaggaacaaaaugaaa

SEQ ID NO: 2384931 - RNA, 19 nt, Homo sapiens
  misc_RNA (1)...(19): siRNA sense strand
gcugauuuccaaagguaca

SEQ ID NO: 2384932 - RNA, 19 nt, Homo sapiens
  misc_RNA (1)...(19): siRNA sense strand
ggucugauugggaagaaca

SEQ ID NO: 2384933 - RNA, 19 nt, Homo sapiens
  misc_RNA (1)...(19): siRNA sense strand
cgugggaucaacuggagua

SEQ ID NO: 2384934 - RNA, 19 nt, Homo sapiens
  misc_RNA (1)...(19): siRNA sense strand
gguuagagggauuggagga

SEQ ID NO: 2384935 - RNA, 19 nt, Homo sapiens
  misc_RNA (1)...(19): siRNA sense strand
cugaaagaugccagagaca

SEQ ID NO: 2384936 - RNA, 19 nt, Homo sapiens
  misc_RNA (1)...(19): siRNA sense strand
gguguugggaagaggaaga

SEQ ID NO: 2384937 - RNA, 19 nt, Homo sapiens
  misc_RNA (1)...(19): siRNA sense strand
cugaagaagaggagaacag

SEQ ID NO: 2384938 - RNA, 19 nt, Homo sapiens
  misc_RNA (1)...(19): siRNA sense strand
gaauguagucccagccaga

SEQ ID NO: 2384939 - RNA, 19 nt, Homo sapiens
  misc_RNA (1)...(19): siRNA sense strand
aggagggguuagagggauu

SEQ ID NO: 2384940 - RNA, 19 nt, Homo sapiens
  misc_RNA (1)...(19): siRNA sense strand
acccugaagaagaggagaa

SEQ ID NO: 2384941 - RNA, 19 nt, Homo sapiens
  misc_RNA (1)...(19): siRNA sense strand
gaagaggagaacagggacu

SEQ ID NO: 2384942 - RNA, 19 nt, Homo sapiens
  misc_RNA (1)...(19): siRNA sense strand
gggaaacgcagaaaggacu

SEQ ID NO: 2384943 - RNA, 19 nt, Homo sapiens
  misc_RNA (1)...(19): siRNA sense strand
aagaagaggagaacaggga

SEQ ID NO: 2384944 - RNA, 19 nt, Homo sapiens
  misc_RNA (1)...(19): siRNA sense strand
guugggaagaggaagaaga

SEQ ID NO: 2384945 - RNA, 19 nt, Homo sapiens
  misc_RNA (1)...(19): siRNA sense strand
ccaaagcuauccaggacca

SEQ ID NO: 2384946 - RNA, 19 nt, Homo sapiens
  misc_RNA (1)...(19): siRNA sense strand
gaagaucaugagaaggaga

SEQ ID NO: 2384947 - RNA, 19 nt, Homo sapiens
  misc_RNA (1)...(19): siRNA sense strand
auggagaagcucuguaaaa

SEQ ID NO: 2384948 - RNA, 19 nt, Homo sapiens
  misc_RNA (1)...(19): siRNA sense strand
aagauuacgguguugggaa

SEQ ID NO: 2384949 - RNA, 19 nt, Homo sapiens
  misc_RNA (1)...(19): siRNA sense strand
aguaaugaaccuagagaau

SEQ ID NO: 2384950 - RNA, 19 nt, Homo sapiens
  misc_RNA (1)...(19): siRNA sense strand
cauucgacucugugagaaa

SEQ ID NO: 2384951 - RNA, 19 nt, Homo sapiens
  misc_RNA (1)...(19): siRNA sense strand
gcucaagaaauuaaggaca

SEQ ID NO: 2384952 - RNA, 19 nt, Homo sapiens
  misc_RNA (1)...(19): siRNA sense strand
auucaaacgcucaagaaau

SEQ ID NO: 2384953 - RNA, 19 nt, Homo sapiens
  misc_RNA (1)...(19): siRNA sense strand
auggacaaauagagcacaa

SEQ ID NO: 2384954 - RNA, 19 nt, Homo sapiens
  misc_RNA (1)...(19): siRNA sense strand
aaaugauggagguggugaa

SEQ ID NO: 2384955 - RNA, 19 nt, Homo sapiens
  misc_RNA (1)...(19): siRNA sense strand
aggaaauggcagacaugau

SEQ ID NO: 2384956 - RNA, 19 nt, Homo sapiens
  misc_RNA (1)...(19): siRNA sense strand
aagaaaugauggagguggu

SEQ ID NO: 2384957 - RNA, 19 nt, Homo sapiens
  misc_RNA (1)...(19): siRNA sense strand
aaguaaugaaccuagagaa

SEQ ID NO: 2384958 - RNA, 19 nt, Homo sapiens
  misc_RNA (1)...(19): siRNA sense strand
gccaagaaaugauggaggu

SEQ ID NO: 2384959 - RNA, 19 nt, Homo sapiens
  misc_RNA (1)...(19): siRNA sense strand
ugccaaaggacaugaaacu

SEQ ID NO: 2384960 - RNA, 19 nt, Homo sapiens
  misc_RNA (1)...(19): siRNA sense strand
ugaacgaaugucugaguca

SEQ ID NO: 2384961 - RNA, 19 nt, Homo sapiens
  misc_RNA (1)...(19): siRNA sense strand
cagaacucaaggaagaaau

SEQ ID NO: 2384962 - RNA, 19 nt, Homo sapiens
  misc_RNA (1)...(19): siRNA sense strand
ucuuacaacaucagaggau

SEQ ID NO: 2384963 - RNA, 19 nt, Homo sapiens
  misc_RNA (1)...(19): siRNA sense strand
acucaugugccaaaggaca

SEQ ID NO: 2384964 - RNA, 19 nt, Homo sapiens
  misc_RNA (1)...(19): siRNA sense strand
ccgccaaagcacagggauu

SEQ ID NO: 2384965 - RNA, 19 nt, Homo sapiens
  misc_RNA (1)...(19): siRNA sense strand
gcaugaaggccaaggagca

SEQ ID NO: 2384966 - RNA, 19 nt, Homo sapiens
  misc_RNA (1)...(19): siRNA sense strand
aggccgacucagagagcaa

SEQ ID NO: 2384967 - RNA, 19 nt, Homo sapiens
  misc_RNA (1)...(19): siRNA sense strand
cagagagcaacaagggcaa

SEQ ID NO: 2384968 - RNA, 19 nt, Homo sapiens
  misc_RNA (1)...(19): siRNA sense strand
gcccaggccucaauggcua

SEQ ID NO: 2384969 - RNA, 19 nt, Homo sapiens
  misc_RNA (1)...(19): siRNA sense strand
ucacccgagcugagaacua

SEQ ID NO: 2384970 - RNA, 19 nt, Homo sapiens
  misc_RNA (1)...(19): siRNA sense strand
agccaauaguggagaccua

SEQ ID NO: 2384971 - RNA, 19 nt, Homo sapiens
  misc_RNA (1)...(19): siRNA sense strand
agacaugagugaucggaga

SEQ ID NO: 2384972 - RNA, 19 nt, Homo sapiens
  misc_RNA (1)...(19): siRNA sense strand
gcaccaagcucuucagcca

SEQ ID NO: 2384973 - RNA, 19 nt, Homo sapiens
  misc_RNA (1)...(19): siRNA sense strand
gugacagacagguggagaa

SEQ ID NO: 2384974 - RNA, 19 nt, Homo sapiens
  misc_RNA (1)...(19): siRNA sense strand
cagcaaaacaccauugaaa

SEQ ID NO: 2384975 - RNA, 19 nt, Homo sapiens
  misc_RNA (1)...(19): siRNA sense strand
aaguaaagcaagagcacca

SEQ ID NO: 2384976 - RNA, 19 nt, Homo sapiens
  misc_RNA (1)...(19): siRNA sense strand
ccgucgaguuggagaaagu

SEQ ID NO: 2384977 - RNA, 19 nt, Homo sapiens
  misc_RNA (1)...(19): siRNA sense strand
ugacaagugccgugaacau

SEQ ID NO: 2384978 - RNA, 19 nt, Homo sapiens
  misc_RNA (1)...(19): siRNA sense strand
ucaaauaucugcaggugga

SEQ ID NO: 2384979 - RNA, 19 nt, Homo sapiens
  misc_RNA (1)...(19): siRNA sense strand
guaccaugcaggagcuaau

SEQ ID NO: 2384980 - RNA, 19 nt, Homo sapiens
  misc_RNA (1)...(19): siRNA sense strand
acaucgaggaggaagaauu

SEQ ID NO: 2384981 - RNA, 19 nt, Homo sapiens
  misc_RNA (1)...(19): siRNA sense strand
ugauugagggagaugcaaa

SEQ ID NO: 2384982 - RNA, 19 nt, Homo sapiens
  misc_RNA (1)...(19): siRNA sense strand
agggauguucuguguaaua

SEQ ID NO: 2384983 - RNA, 19 nt, Homo sapiens
  misc_RNA (1)...(19): siRNA sense strand
acaacaucgaggaggaaga

SEQ ID NO: 2384984 - RNA, 19 nt, Homo sapiens
  misc_RNA (1)...(19): siRNA sense strand
cugagaauguguccagcaa

SEQ ID NO: 2384985 - RNA, 19 nt, Homo sapiens
  misc_RNA (1)...(19): siRNA sense strand
agcaaauggcagaguucaa

SEQ ID NO: 2384986 - RNA, 19 nt, Homo sapiens
  misc_RNA (1)...(19): siRNA sense strand
gaguacuucaugagggaga

SEQ ID NO: 2384987 - RNA, 19 nt, Homo sapiens
  misc_RNA (1)...(19): siRNA sense strand
ucaaugacuaugaggccaa

SEQ ID NO: 2384988 - RNA, 19 nt, Homo sapiens
  misc_RNA (1)...(19): siRNA sense strand
gugaagauaucaagaggcu

SEQ ID NO: 2384989 - RNA, 19 nt, Homo sapiens
  misc_RNA (1)...(19): siRNA sense strand
aggagaaagugguggagag

SEQ ID NO: 2384990 - RNA, 19 nt, Homo sapiens
  misc_RNA (1)...(19): siRNA sense strand
cuauuaugggccagggaga

SEQ ID NO: 2384991 - RNA, 19 nt, Homo sapiens
  misc_RNA (1)...(19): siRNA sense strand
cuuugaggagugaagauua

SEQ ID NO: 2384992 - RNA, 19 nt, Homo sapiens
  misc_RNA (1)...(19): siRNA sense strand
aggaguacuucaugaggga

SEQ ID NO: 2384993 - RNA, 19 nt, Homo sapiens
  misc_RNA (1)...(19): siRNA sense strand
cugaagaagacacuggaga

SEQ ID NO: 2384994 - RNA, 19 nt, Homo sapiens
  misc_RNA (1)...(19): siRNA sense strand
gagugaagauuaugagcag

SEQ ID NO: 2384995 - RNA, 19 nt, Homo sapiens
  misc_RNA (1)...(19): siRNA sense strand
agguggagaaggugguaga

SEQ ID NO: 2384996 - RNA, 19 nt, Homo sapiens
  misc_RNA (1)...(19): siRNA sense strand
agacaaguucaucaagcaa

SEQ ID NO: 2384997 - RNA, 19 nt, Homo sapiens
  misc_RNA (1)...(19): siRNA sense strand
gcaggagcuaauuggcuua

SEQ ID NO: 2384998 - RNA, 19 nt, Homo sapiens
  misc_RNA (1)...(19): siRNA sense strand
gcgaggagaaaguggugga

SEQ ID NO: 2384999 - RNA, 19 nt, Homo sapiens
  misc_RNA (1)...(19): siRNA sense strand
gcugcaggaagcugagcaa

SEQ ID NO: 2385000 - RNA, 19 nt, Homo sapiens
  misc_RNA (1)...(19): siRNA sense strand
ucaauaaggcuguggcucu

SEQ ID NO: 2385001 - RNA, 19 nt, Homo sapiens
  misc_RNA (1)...(19): siRNA sense strand
auugaaaguaagaugguca

SEQ ID NO: 2385002 - RNA, 19 nt, Homo sapiens
  misc_RNA (1)...(19): siRNA sense strand
uuugaggagugaagauuau

SEQ ID NO: 2385003 - RNA, 19 nt, Homo sapiens
  misc_RNA (1)...(19): siRNA sense strand
gggacagacaugagugauc

SEQ ID NO: 2385004 - RNA, 19 nt, Homo sapiens
  misc_RNA (1)...(19): siRNA sense strand
ggaaguaaagcaagagcac

SEQ ID NO: 2385005 - RNA, 19 nt, Homo sapiens
  misc_RNA (1)...(19): siRNA sense strand
caacaaauuccgagaccuc

SEQ ID NO: 2385006 - RNA, 19 nt, Homo sapiens
  misc_RNA (1)...(19): siRNA sense strand
ccaucaagccacaggugca

SEQ ID NO: 2385007 - RNA, 19 nt, Homo sapiens
  misc_RNA (1)...(19): siRNA sense strand
cccacaacaucgaggagga

SEQ ID NO: 2385008 - RNA, 19 nt, Homo sapiens
  misc_RNA (1)...(19): siRNA sense strand
guuugcaugaggagggauu

SEQ ID NO: 2385009 - RNA, 19 nt, Homo sapiens
  misc_RNA (1)...(19): siRNA sense strand
ugaaauugcugcaggaagc

SEQ ID NO: 2385010 - RNA, 19 nt, Homo sapiens
  misc_RNA (1)...(19): siRNA sense strand
gcaaaacaccauugaaagu

SEQ ID NO: 2385011 - RNA, 19 nt, Homo sapiens
  misc_RNA (1)...(19): siRNA sense strand
cagcaaggcaaauuugaca

SEQ ID NO: 2385012 - RNA, 19 nt, Homo sapiens
  misc_RNA (1)...(19): siRNA sense strand
caaaaggcaucgagaguac

SEQ ID NO: 2385013 - RNA, 19 nt, Homo sapiens
  misc_RNA (1)...(19): siRNA sense strand
gcacagccaucaagccaca

SEQ ID NO: 2385014 - RNA, 19 nt, Homo sapiens
  misc_RNA (1)...(19): siRNA sense strand
aggaggaagaauucaauga

SEQ ID NO: 2385015 - RNA, 19 nt, Homo sapiens
  misc_RNA (1)...(19): siRNA sense strand
ccacaacaucgaggaggaa

SEQ ID NO: 2385016 - RNA, 19 nt, Homo sapiens
  misc_RNA (1)...(19): siRNA sense strand
ggagaaggugguagacaag

SEQ ID NO: 2385017 - RNA, 19 nt, Homo sapiens
  misc_RNA (1)...(19): siRNA sense strand
agccaauaguggagaccua

SEQ ID NO: 2385018 - RNA, 19 nt, Homo sapiens
  misc_RNA (1)...(19): siRNA sense strand
agacaugagugaucggaga

SEQ ID NO: 2385019 - RNA, 19 nt, Homo sapiens
  misc_RNA (1)...(19): siRNA sense strand
gugacagacagguggagaa

SEQ ID NO: 2385020 - RNA, 19 nt, Homo sapiens
  misc_RNA (1)...(19): siRNA sense strand
cagcaaaacaccauugaaa

SEQ ID NO: 2385021 - RNA, 19 nt, Homo sapiens
  misc_RNA (1)...(19): siRNA sense strand
ucaaauaucugcaggugga

SEQ ID NO: 2385022 - RNA, 19 nt, Homo sapiens
  misc_RNA (1)...(19): siRNA sense strand
ugauugagggagaugcaaa

SEQ ID NO: 2385023 - RNA, 19 nt, Homo sapiens
  misc_RNA (1)...(19): siRNA sense strand
cugagaauguguccagcaa

SEQ ID NO: 2385024 - RNA, 19 nt, Homo sapiens
  misc_RNA (1)...(19): siRNA sense strand
aggagaaagugguggagag

SEQ ID NO: 2385025 - RNA, 19 nt, Homo sapiens
  misc_RNA (1)...(19): siRNA sense strand
cuauuaugggccagggaga

SEQ ID NO: 2385026 - RNA, 19 nt, Homo sapiens
  misc_RNA (1)...(19): siRNA sense strand
cuuugaggagugaagauua

SEQ ID NO: 2385027 - RNA, 19 nt, Homo sapiens
  misc_RNA (1)...(19): siRNA sense strand
gagugaagauuaugagcag

SEQ ID NO: 2385028 - RNA, 19 nt, Homo sapiens
  misc_RNA (1)...(19): siRNA sense strand
agguggagaaggugguaga

SEQ ID NO: 2385029 - RNA, 19 nt, Homo sapiens
  misc_RNA (1)...(19): siRNA sense strand
agacaaguucaucaagcaa

SEQ ID NO: 2385030 - RNA, 19 nt, Homo sapiens
  misc_RNA (1)...(19): siRNA sense strand
gcgaggagaaaguggugga

SEQ ID NO: 2385031 - RNA, 19 nt, Homo sapiens
  misc_RNA (1)...(19): siRNA sense strand
gcugcaggaagcugagcaa

SEQ ID NO: 2385032 - RNA, 19 nt, Homo sapiens
  misc_RNA (1)...(19): siRNA sense strand
auugaaaguaagaugguca

SEQ ID NO: 2385033 - RNA, 19 nt, Homo sapiens
  misc_RNA (1)...(19): siRNA sense strand
uuugaggagugaagauuau

SEQ ID NO: 2385034 - RNA, 19 nt, Homo sapiens
  misc_RNA (1)...(19): siRNA sense strand
gggacagacaugagugauc

SEQ ID NO: 2385035 - RNA, 19 nt, Homo sapiens
  misc_RNA (1)...(19): siRNA sense strand
guuugcaugaggagggauu

SEQ ID NO: 2385036 - RNA, 19 nt, Homo sapiens
  misc_RNA (1)...(19): siRNA sense strand
ugaaauugcugcaggaagc

SEQ ID NO: 2385037 - RNA, 19 nt, Homo sapiens
  misc_RNA (1)...(19): siRNA sense strand
gcaaaacaccauugaaagu

SEQ ID NO: 2385038 - RNA, 19 nt, Homo sapiens
  misc_RNA (1)...(19): siRNA sense strand
ggagaaggugguagacaag

SEQ ID NO: 2385039 - RNA, 19 nt, Homo sapiens
  misc_RNA (1)...(19): siRNA sense strand
ugaagaaccaggagcggau

SEQ ID NO: 2385040 - RNA, 19 nt, Homo sapiens
  misc_RNA (1)...(19): siRNA sense strand
gaguguucgacuuggaauu

SEQ ID NO: 2385041 - RNA, 19 nt, Homo sapiens
  misc_RNA (1)...(19): siRNA sense strand
uggaauuacuucuggcaac

SEQ ID NO: 2385042 - RNA, 19 nt, Homo sapiens
  misc_RNA (1)...(19): siRNA sense strand
aggaagaaguagacgcuga

SEQ ID NO: 2385043 - RNA, 19 nt, Homo sapiens
  misc_RNA (1)...(19): siRNA sense strand
cugaagaggaggauggaga

SEQ ID NO: 2385044 - RNA, 19 nt, Homo sapiens
  misc_RNA (1)...(19): siRNA sense strand
acaaagugguagaggggau

SEQ ID NO: 2385045 - RNA, 19 nt, Homo sapiens
  misc_RNA (1)...(19): siRNA sense strand
gcuucgaggauauggguga

SEQ ID NO: 2385046 - RNA, 19 nt, Homo sapiens
  misc_RNA (1)...(19): siRNA sense strand
auggagaguuccugggcau

SEQ ID NO: 2385047 - RNA, 19 nt, Homo sapiens
  misc_RNA (1)...(19): siRNA sense strand
agacaagccuccagggccu

SEQ ID NO: 2385048 - RNA, 19 nt, Homo sapiens
  misc_RNA (1)...(19): siRNA sense strand
ugaagggcuuuaagggaca

SEQ ID NO: 2385049 - RNA, 19 nt, Homo sapiens
  misc_RNA (1)...(19): siRNA sense strand
gaacauggaugauaccuca

SEQ ID NO: 2385050 - RNA, 19 nt, Homo sapiens
  misc_RNA (1)...(19): siRNA sense strand
aggaagaggaggaggagga

SEQ ID NO: 2385051 - RNA, 19 nt, Homo sapiens
  misc_RNA (1)...(19): siRNA sense strand
aggaggaggaggaggaaga

SEQ ID NO: 2385052 - RNA, 19 nt, Homo sapiens
  misc_RNA (1)...(19): siRNA sense strand
ggaagaugcaggaggagga

SEQ ID NO: 2385053 - RNA, 19 nt, Homo sapiens
  misc_RNA (1)...(19): siRNA sense strand
cggaggagaucuaccgcua

SEQ ID NO: 2385054 - RNA, 19 nt, Homo sapiens
  misc_RNA (1)...(19): siRNA sense strand
aagaggaggaggaggaaaa

SEQ ID NO: 2385055 - RNA, 19 nt, Homo sapiens
  misc_RNA (1)...(19): siRNA sense strand
aggaggaggaagccagaaa

SEQ ID NO: 2385056 - RNA, 19 nt, Homo sapiens
  misc_RNA (1)...(19): siRNA sense strand
agaaggaggaggaggagga

SEQ ID NO: 2385057 - RNA, 19 nt, Homo sapiens
  misc_RNA (1)...(19): siRNA sense strand
acguggagucgguggacaa

SEQ ID NO: 2385058 - RNA, 19 nt, Homo sapiens
  misc_RNA (1)...(19): siRNA sense strand
gcacagucucugaggcuga

SEQ ID NO: 2385059 - RNA, 19 nt, Homo sapiens
  misc_RNA (1)...(19): siRNA sense strand
aggaggaggaggaggagga

SEQ ID NO: 2385060 - RNA, 19 nt, Homo sapiens
  misc_RNA (1)...(19): siRNA sense strand
aggaggaggaagaggagga

SEQ ID NO: 2385061 - RNA, 19 nt, Homo sapiens
  misc_RNA (1)...(19): siRNA sense strand
aggaggaagaggaggagga

SEQ ID NO: 2385062 - RNA, 19 nt, Homo sapiens
  misc_RNA (1)...(19): siRNA sense strand
gcgaggaggaacaggagga

SEQ ID NO: 2385063 - RNA, 19 nt, Homo sapiens
  misc_RNA (1)...(19): siRNA sense strand
ggccauacccaguggagga

SEQ ID NO: 2385064 - RNA, 19 nt, Homo sapiens
  misc_RNA (1)...(19): siRNA sense strand
gguuccagacggaggauga

SEQ ID NO: 2385065 - RNA, 19 nt, Homo sapiens
  misc_RNA (1)...(19): siRNA sense strand
aggaagacgccgaagagga

SEQ ID NO: 2385066 - RNA, 19 nt, Homo sapiens
  misc_RNA (1)...(19): siRNA sense strand
ugaugaggacgcugaggaa

SEQ ID NO: 2385067 - RNA, 19 nt, Homo sapiens
  misc_RNA (1)...(19): siRNA sense strand
acaacgagauccagcgguu

SEQ ID NO: 2385068 - RNA, 19 nt, Homo sapiens
  misc_RNA (1)...(19): siRNA sense strand
cugagaucccggagagcau

SEQ ID NO: 2385069 - RNA, 19 nt, Homo sapiens
  misc_RNA (1)...(19): siRNA sense strand
ccuaaagguagaccagaau

SEQ ID NO: 2385070 - RNA, 19 nt, Homo sapiens
  misc_RNA (1)...(19): siRNA sense strand
cucaggaggaggaggaaga

SEQ ID NO: 2385071 - RNA, 19 nt, Homo sapiens
  misc_RNA (1)...(19): siRNA sense strand
cccagaaggaggaggagga

SEQ ID NO: 2385072 - RNA, 19 nt, Homo sapiens
  misc_RNA (1)...(19): siRNA sense strand
ccaaugugaagcaggccua

SEQ ID NO: 2385073 - RNA, 19 nt, Homo sapiens
  misc_RNA (1)...(19): siRNA sense strand
ccgaagaggacuaccagga

SEQ ID NO: 2385074 - RNA, 19 nt, Homo sapiens
  misc_RNA (1)...(19): siRNA sense strand
agaaggagcugccuggaca

SEQ ID NO: 2385075 - RNA, 19 nt, Homo sapiens
  misc_RNA (1)...(19): siRNA sense strand
aggaggaggaagaggguag

SEQ ID NO: 2385076 - RNA, 19 nt, Homo sapiens
  misc_RNA (1)...(19): siRNA sense strand
agaaguacuuugagcugga

SEQ ID NO: 2385077 - RNA, 19 nt, Homo sapiens
  misc_RNA (1)...(19): siRNA sense strand
gcgaggugacugaggccau

SEQ ID NO: 2385078 - RNA, 19 nt, Homo sapiens
  misc_RNA (1)...(19): siRNA sense strand
uggagcagcuggagggaag

SEQ ID NO: 2385079 - RNA, 19 nt, Homo sapiens
  misc_RNA (1)...(19): siRNA sense strand
gagcugauccucacggaga

SEQ ID NO: 2385080 - RNA, 19 nt, Homo sapiens
  misc_RNA (1)...(19): siRNA sense strand
cgacagagcugcacgugcu

SEQ ID NO: 2385081 - RNA, 19 nt, Homo sapiens
  misc_RNA (1)...(19): siRNA sense strand
gggaugacagggagaucga

SEQ ID NO: 2385082 - RNA, 19 nt, Homo sapiens
  misc_RNA (1)...(19): siRNA sense strand
cggacuuugcugaggaguu

SEQ ID NO: 2385083 - RNA, 19 nt, Homo sapiens
  misc_RNA (1)...(19): siRNA sense strand
cgcaggaggaggauggaga

SEQ ID NO: 2385084 - RNA, 19 nt, Homo sapiens
  misc_RNA (1)...(19): siRNA sense strand
gggaaaggcuccacacccu

SEQ ID NO: 2385085 - RNA, 19 nt, Homo sapiens
  misc_RNA (1)...(19): siRNA sense strand
gugcugacgaccugcggaa

SEQ ID NO: 2385086 - RNA, 19 nt, Homo sapiens
  misc_RNA (1)...(19): siRNA sense strand
aagcugggccugagcgaca

SEQ ID NO: 2385087 - RNA, 19 nt, Homo sapiens
  misc_RNA (1)...(19): siRNA sense strand
aggaggaggaggaagagga

SEQ ID NO: 2385088 - RNA, 19 nt, Homo sapiens
  misc_RNA (1)...(19): siRNA sense strand
gaggagaucuaccgcuaca

SEQ ID NO: 2385089 - RNA, 19 nt, Homo sapiens
  misc_RNA (1)...(19): siRNA sense strand
ucggagaccuggagcgaug

SEQ ID NO: 2385090 - RNA, 19 nt, Homo sapiens
  misc_RNA (1)...(19): siRNA sense strand
aggaagaggaggaggagga

SEQ ID NO: 2385091 - RNA, 19 nt, Homo sapiens
  misc_RNA (1)...(19): siRNA sense strand
aggaggaggaggaggaaga

SEQ ID NO: 2385092 - RNA, 19 nt, Homo sapiens
  misc_RNA (1)...(19): siRNA sense strand
ggaagaugcaggaggagga

SEQ ID NO: 2385093 - RNA, 19 nt, Homo sapiens
  misc_RNA (1)...(19): siRNA sense strand
cggaggagaucuaccgcua

SEQ ID NO: 2385094 - RNA, 19 nt, Homo sapiens
  misc_RNA (1)...(19): siRNA sense strand
aagaggaggaggaggaaaa

SEQ ID NO: 2385095 - RNA, 19 nt, Homo sapiens
  misc_RNA (1)...(19): siRNA sense strand
aggaggaggaagccagaaa

SEQ ID NO: 2385096 - RNA, 19 nt, Homo sapiens
  misc_RNA (1)...(19): siRNA sense strand
agaaggaggaggaggagga

SEQ ID NO: 2385097 - RNA, 19 nt, Homo sapiens
  misc_RNA (1)...(19): siRNA sense strand
acguggagucgguggacaa

SEQ ID NO: 2385098 - RNA, 19 nt, Homo sapiens
  misc_RNA (1)...(19): siRNA sense strand
gcacagucucugaggcuga

SEQ ID NO: 2385099 - RNA, 19 nt, Homo sapiens
  misc_RNA (1)...(19): siRNA sense strand
aggaggaggaggaggagga

SEQ ID NO: 2385100 - RNA, 19 nt, Homo sapiens
  misc_RNA (1)...(19): siRNA sense strand
aggaggaggaagaggagga

SEQ ID NO: 2385101 - RNA, 19 nt, Homo sapiens
  misc_RNA (1)...(19): siRNA sense strand
aggaggaagaggaggagga

SEQ ID NO: 2385102 - RNA, 19 nt, Homo sapiens
  misc_RNA (1)...(19): siRNA sense strand
gcgaggaggaacaggagga

SEQ ID NO: 2385103 - RNA, 19 nt, Homo sapiens
  misc_RNA (1)...(19): siRNA sense strand
ggccauacccaguggagga

SEQ ID NO: 2385104 - RNA, 19 nt, Homo sapiens
  misc_RNA (1)...(19): siRNA sense strand
gguuccagacggaggauga

SEQ ID NO: 2385105 - RNA, 19 nt, Homo sapiens
  misc_RNA (1)...(19): siRNA sense strand
aggaagacgccgaagagga

SEQ ID NO: 2385106 - RNA, 19 nt, Homo sapiens
  misc_RNA (1)...(19): siRNA sense strand
ugaugaggacgcugaggaa

SEQ ID NO: 2385107 - RNA, 19 nt, Homo sapiens
  misc_RNA (1)...(19): siRNA sense strand
acaacgagauccagcgguu

SEQ ID NO: 2385108 - RNA, 19 nt, Homo sapiens
  misc_RNA (1)...(19): siRNA sense strand
cugagaucccggagagcau

SEQ ID NO: 2385109 - RNA, 19 nt, Homo sapiens
  misc_RNA (1)...(19): siRNA sense strand
ccuaaagguagaccagaau

SEQ ID NO: 2385110 - RNA, 19 nt, Homo sapiens
  misc_RNA (1)...(19): siRNA sense strand
cucaggaggaggaggaaga

SEQ ID NO: 2385111 - RNA, 19 nt, Homo sapiens
  misc_RNA (1)...(19): siRNA sense strand
cccagaaggaggaggagga

SEQ ID NO: 2385112 - RNA, 19 nt, Homo sapiens
  misc_RNA (1)...(19): siRNA sense strand
ccaaugugaagcaggccua

SEQ ID NO: 2385113 - RNA, 19 nt, Homo sapiens
  misc_RNA (1)...(19): siRNA sense strand
ccgaagaggacuaccagga

SEQ ID NO: 2385114 - RNA, 19 nt, Homo sapiens
  misc_RNA (1)...(19): siRNA sense strand
agaaggagcugccuggaca

SEQ ID NO: 2385115 - RNA, 19 nt, Homo sapiens
  misc_RNA (1)...(19): siRNA sense strand
aggaggaggaagaggguag

SEQ ID NO: 2385116 - RNA, 19 nt, Homo sapiens
  misc_RNA (1)...(19): siRNA sense strand
agaaguacuuugagcugga

SEQ ID NO: 2385117 - RNA, 19 nt, Homo sapiens
  misc_RNA (1)...(19): siRNA sense strand
gcgaggugacugaggccau

SEQ ID NO: 2385118 - RNA, 19 nt, Homo sapiens
  misc_RNA (1)...(19): siRNA sense strand
uggagcagcuggagggaag

SEQ ID NO: 2385119 - RNA, 19 nt, Homo sapiens
  misc_RNA (1)...(19): siRNA sense strand
gagcugauccucacggaga

SEQ ID NO: 2385120 - RNA, 19 nt, Homo sapiens
  misc_RNA (1)...(19): siRNA sense strand
cgacagagcugcacgugcu

SEQ ID NO: 2385121 - RNA, 19 nt, Homo sapiens
  misc_RNA (1)...(19): siRNA sense strand
gggaugacagggagaucga

SEQ ID NO: 2385122 - RNA, 19 nt, Homo sapiens
  misc_RNA (1)...(19): siRNA sense strand
cggacuuugcugaggaguu

SEQ ID NO: 2385123 - RNA, 19 nt, Homo sapiens
  misc_RNA (1)...(19): siRNA sense strand
cgcaggaggaggauggaga

SEQ ID NO: 2385124 - RNA, 19 nt, Homo sapiens
  misc_RNA (1)...(19): siRNA sense strand
gggaaaggcuccacacccu

SEQ ID NO: 2385125 - RNA, 19 nt, Homo sapiens
  misc_RNA (1)...(19): siRNA sense strand
gugcugacgaccugcggaa

SEQ ID NO: 2385126 - RNA, 19 nt, Homo sapiens
  misc_RNA (1)...(19): siRNA sense strand
aagcugggccugagcgaca

SEQ ID NO: 2385127 - RNA, 19 nt, Homo sapiens
  misc_RNA (1)...(19): siRNA sense strand
aggaggaggaggaagagga

SEQ ID NO: 2385128 - RNA, 19 nt, Homo sapiens
  misc_RNA (1)...(19): siRNA sense strand
gaggagaucuaccgcuaca

SEQ ID NO: 2385129 - RNA, 19 nt, Homo sapiens
  misc_RNA (1)...(19): siRNA sense strand
ucggagaccuggagcgaug

SEQ ID NO: 2385130 - RNA, 19 nt, Homo sapiens
  misc_RNA (1)...(19): siRNA sense strand
gcaagaaucaucaagacca

SEQ ID NO: 2385131 - RNA, 19 nt, Homo sapiens
  misc_RNA (1)...(19): siRNA sense strand
acaaagagcucgaggccaa

SEQ ID NO: 2385132 - RNA, 19 nt, Homo sapiens
  misc_RNA (1)...(19): siRNA sense strand
cuacaauacuaguggaaau

SEQ ID NO: 2385133 - RNA, 19 nt, Homo sapiens
  misc_RNA (1)...(19): siRNA sense strand
ggauaaugcagaagaauau

SEQ ID NO: 2385134 - RNA, 19 nt, Homo sapiens
  misc_RNA (1)...(19): siRNA sense strand
cuaaagaagcagaagcuaa

SEQ ID NO: 2385135 - RNA, 19 nt, Homo sapiens
  misc_RNA (1)...(19): siRNA sense strand
guaaguauauuuagggcua

SEQ ID NO: 2385136 - RNA, 19 nt, Homo sapiens
  misc_RNA (1)...(19): siRNA sense strand
cagaagaauauguggauuu

SEQ ID NO: 2385137 - RNA, 19 nt, Homo sapiens
  misc_RNA (1)...(19): siRNA sense strand
cauacuaagucgugauaau

SEQ ID NO: 2385138 - RNA, 19 nt, Homo sapiens
  misc_RNA (1)...(19): siRNA sense strand
gcggaaacgggaagugaaa

SEQ ID NO: 2385139 - RNA, 19 nt, Homo sapiens
  misc_RNA (1)...(19): siRNA sense strand
gagagaugaagaugggaaa

SEQ ID NO: 2385140 - RNA, 19 nt, Homo sapiens
  misc_RNA (1)...(19): siRNA sense strand
caccaaaggaugagaaaca

SEQ ID NO: 2385141 - RNA, 19 nt, Homo sapiens
  misc_RNA (1)...(19): siRNA sense strand
ccgaggagaucaugagaga

SEQ ID NO: 2385142 - RNA, 19 nt, Homo sapiens
  misc_RNA (1)...(19): siRNA sense strand
cagaaauuguaauggaaca

SEQ ID NO: 2385143 - RNA, 19 nt, Homo sapiens
  misc_RNA (1)...(19): siRNA sense strand
cuguaauggcaaugugaaa

SEQ ID NO: 2385144 - RNA, 19 nt, Homo sapiens
  misc_RNA (1)...(19): siRNA sense strand
acaaucauguacagagaaa

SEQ ID NO: 2385145 - RNA, 19 nt, Homo sapiens
  misc_RNA (1)...(19): siRNA sense strand
uggauaaugcagaagaaua

SEQ ID NO: 2385146 - RNA, 19 nt, Homo sapiens
  misc_RNA (1)...(19): siRNA sense strand
caaacaaagaugaagaaga

SEQ ID NO: 2385147 - RNA, 19 nt, Homo sapiens
  misc_RNA (1)...(19): siRNA sense strand
gugcaauauccaugggaau

SEQ ID NO: 2385148 - RNA, 19 nt, Homo sapiens
  misc_RNA (1)...(19): siRNA sense strand
ccucuuagcucuucagcaa

SEQ ID NO: 2385149 - RNA, 19 nt, Homo sapiens
  misc_RNA (1)...(19): siRNA sense strand
aagaagaguacgaaacuaa

SEQ ID NO: 2385150 - RNA, 19 nt, Homo sapiens
  misc_RNA (1)...(19): siRNA sense strand
guacgaaacuaaaggagga

SEQ ID NO: 2385151 - RNA, 19 nt, Homo sapiens
  misc_RNA (1)...(19): siRNA sense strand
ccucaagaauauaugguuu

SEQ ID NO: 2385152 - RNA, 19 nt, Homo sapiens
  misc_RNA (1)...(19): siRNA sense strand
uugcagaucauaagggaua

SEQ ID NO: 2385153 - RNA, 19 nt, Homo sapiens
  misc_RNA (1)...(19): siRNA sense strand
ucagaaagccgaagugaau

SEQ ID NO: 2385154 - RNA, 19 nt, Homo sapiens
  misc_RNA (1)...(19): siRNA sense strand
gcacugagaaauuggguuu

SEQ ID NO: 2385155 - RNA, 19 nt, Homo sapiens
  misc_RNA (1)...(19): siRNA sense strand
ccaaagaaugacuugauaa

SEQ ID NO: 2385156 - RNA, 19 nt, Homo sapiens
  misc_RNA (1)...(19): siRNA sense strand
ggaauguacccgaaggauu

SEQ ID NO: 2385157 - RNA, 19 nt, Homo sapiens
  misc_RNA (1)...(19): siRNA sense strand
gauuuaucuuggauggaaa

SEQ ID NO: 2385158 - RNA, 19 nt, Homo sapiens
  misc_RNA (1)...(19): siRNA sense strand
aagcaugccucguggagua

SEQ ID NO: 2385159 - RNA, 19 nt, Homo sapiens
  misc_RNA (1)...(19): siRNA sense strand
aagaauacgaggagguuau

SEQ ID NO: 2385160 - RNA, 19 nt, Homo sapiens
  misc_RNA (1)...(19): siRNA sense strand
cagcagaauuccagagaac

SEQ ID NO: 2385161 - RNA, 19 nt, Homo sapiens
  misc_RNA (1)...(19): siRNA sense strand
aagaagaugaugagaauga

SEQ ID NO: 2385162 - RNA, 19 nt, Homo sapiens
  misc_RNA (1)...(19): siRNA sense strand
ggaugaugauuaugugcua

SEQ ID NO: 2385163 - RNA, 19 nt, Homo sapiens
  misc_RNA (1)...(19): siRNA sense strand
gggccauagugaaguggua

SEQ ID NO: 2385164 - RNA, 19 nt, Homo sapiens
  misc_RNA (1)...(19): siRNA sense strand
aacuauggcucgagauuua

SEQ ID NO: 2385165 - RNA, 19 nt, Homo sapiens
  misc_RNA (1)...(19): siRNA sense strand
ggucaaucuuuaaguaaca

SEQ ID NO: 2385166 - RNA, 19 nt, Homo sapiens
  misc_RNA (1)...(19): siRNA sense strand
uaauagaggucaaagguca

SEQ ID NO: 2385167 - RNA, 19 nt, Homo sapiens
  misc_RNA (1)...(19): siRNA sense strand
gggaaaacuccauuagaua

SEQ ID NO: 2385168 - RNA, 19 nt, Homo sapiens
  misc_RNA (1)...(19): siRNA sense strand
agauaaagcucgagaaagg

SEQ ID NO: 2385169 - RNA, 19 nt, Homo sapiens
  misc_RNA (1)...(19): siRNA sense strand
gaagaugagaugauaacaa

SEQ ID NO: 2385170 - RNA, 19 nt, Homo sapiens
  misc_RNA (1)...(19): siRNA sense strand
guguaaagguauuagaacu

SEQ ID NO: 2385171 - RNA, 19 nt, Homo sapiens
  misc_RNA (1)...(19): siRNA sense strand
ugaugagaaugaagaggaa

SEQ ID NO: 2385172 - RNA, 19 nt, Homo sapiens
  misc_RNA (1)...(19): siRNA sense strand
aagaauugcaacaagguaa

SEQ ID NO: 2385173 - RNA, 19 nt, Homo sapiens
  misc_RNA (1)...(19): siRNA sense strand
ggugaagaugagaugauaa

SEQ ID NO: 2385174 - RNA, 19 nt, Homo sapiens
  misc_RNA (1)...(19): siRNA sense strand
caucuagcuuggagaguuu

SEQ ID NO: 2385175 - RNA, 19 nt, Homo sapiens
  misc_RNA (1)...(19): siRNA sense strand
agccagacuugguguaaua

SEQ ID NO: 2385176 - RNA, 19 nt, Homo sapiens
  misc_RNA (1)...(19): siRNA sense strand
ggaacggagaucagaaauu

SEQ ID NO: 2385177 - RNA, 19 nt, Homo sapiens
  misc_RNA (1)...(19): siRNA sense strand
gaagaagaagaguacgaaa

SEQ ID NO: 2385178 - RNA, 19 nt, Homo sapiens
  misc_RNA (1)...(19): siRNA sense strand
acgaggugauagagacuua

SEQ ID NO: 2385179 - RNA, 19 nt, Homo sapiens
  misc_RNA (1)...(19): siRNA sense strand
ggugacagcccgugccaua

SEQ ID NO: 2385180 - RNA, 19 nt, Homo sapiens
  misc_RNA (1)...(19): siRNA sense strand
agauguuaauagaggucaa

SEQ ID NO: 2385181 - RNA, 19 nt, Homo sapiens
  misc_RNA (1)...(19): siRNA sense strand
uguaauaagcaaaguguca

SEQ ID NO: 2385182 - RNA, 19 nt, Homo sapiens
  misc_RNA (1)...(19): siRNA sense strand
ccagauacuuacaaggaga

SEQ ID NO: 2385183 - RNA, 19 nt, Homo sapiens
  misc_RNA (1)...(19): siRNA sense strand
gguggagacaugugagaau

SEQ ID NO: 2385184 - RNA, 19 nt, Homo sapiens
  misc_RNA (1)...(19): siRNA sense strand
caagaauaucccaggaaga

SEQ ID NO: 2385185 - RNA, 19 nt, Homo sapiens
  misc_RNA (1)...(19): siRNA sense strand
gaacaauuaaccagcaaau

SEQ ID NO: 2385186 - RNA, 19 nt, Homo sapiens
  misc_RNA (1)...(19): siRNA sense strand
ugaagaucagcuagggaaa

SEQ ID NO: 2385187 - RNA, 19 nt, Homo sapiens
  misc_RNA (1)...(19): siRNA sense strand
augaagaagaugaugagaa

SEQ ID NO: 2385188 - RNA, 19 nt, Homo sapiens
  misc_RNA (1)...(19): siRNA sense strand
cugagaaugucaugcaaau

SEQ ID NO: 2385189 - RNA, 19 nt, Homo sapiens
  misc_RNA (1)...(19): siRNA sense strand
guaaugagcccaaaggaga

SEQ ID NO: 2385190 - RNA, 19 nt, Homo sapiens
  misc_RNA (1)...(19): siRNA sense strand
ccaaaggagauccggaaau

SEQ ID NO: 2385191 - RNA, 19 nt, Homo sapiens
  misc_RNA (1)...(19): siRNA sense strand
gugaaaaugcugaaaggaa

SEQ ID NO: 2385192 - RNA, 19 nt, Homo sapiens
  misc_RNA (1)...(19): siRNA sense strand
ucuuggagguggauugaaa

SEQ ID NO: 2385193 - RNA, 19 nt, Homo sapiens
  misc_RNA (1)...(19): siRNA sense strand
agaaugaagaggaaucaaa

SEQ ID NO: 2385194 - RNA, 19 nt, Homo sapiens
  misc_RNA (1)...(19): siRNA sense strand
ccauaucauuggagagacu

SEQ ID NO: 2385195 - RNA, 19 nt, Homo sapiens
  misc_RNA (1)...(19): siRNA sense strand
gcucaaacucuuaccguau

SEQ ID NO: 2385196 - RNA, 19 nt, Homo sapiens
  misc_RNA (1)...(19): siRNA sense strand
aggaagaagaagaguacga

SEQ ID NO: 2385197 - RNA, 19 nt, Homo sapiens
  misc_RNA (1)...(19): siRNA sense strand
auugaaaccuccuggauau

SEQ ID NO: 2385198 - RNA, 19 nt, Homo sapiens
  misc_RNA (1)...(19): siRNA sense strand
uuagauaaagcucgagaaa

SEQ ID NO: 2385199 - RNA, 19 nt, Homo sapiens
  misc_RNA (1)...(19): siRNA sense strand
acacaaucauguacagaga

SEQ ID NO: 2385200 - RNA, 19 nt, Homo sapiens
  misc_RNA (1)...(19): siRNA sense strand
gaagaugagaagaacacaa

SEQ ID NO: 2385201 - RNA, 19 nt, Homo sapiens
  misc_RNA (1)...(19): siRNA sense strand
aggaagaaaucuaccuuau

SEQ ID NO: 2385202 - RNA, 19 nt, Homo sapiens
  misc_RNA (1)...(19): siRNA sense strand
ucagauaaacuuaggcgua

SEQ ID NO: 2385203 - RNA, 19 nt, Homo sapiens
  misc_RNA (1)...(19): siRNA sense strand
cuucuaaggaguugaguaa

SEQ ID NO: 2385204 - RNA, 19 nt, Homo sapiens
  misc_RNA (1)...(19): siRNA sense strand
cguucugauuugugggaaa

SEQ ID NO: 2385205 - RNA, 19 nt, Homo sapiens
  misc_RNA (1)...(19): siRNA sense strand
caauugaggcagaggaaca

SEQ ID NO: 2385206 - RNA, 19 nt, Homo sapiens
  misc_RNA (1)...(19): siRNA sense strand
cauuacaggaagaguuaaa

SEQ ID NO: 2385207 - RNA, 19 nt, Homo sapiens
  misc_RNA (1)...(19): siRNA sense strand
caaaagaagcagcugaaaa

SEQ ID NO: 2385208 - RNA, 19 nt, Homo sapiens
  misc_RNA (1)...(19): siRNA sense strand
ucacugagcuggaacggaa

SEQ ID NO: 2385209 - RNA, 19 nt, Homo sapiens
  misc_RNA (1)...(19): siRNA sense strand
gcaugauuguagagaaaau

SEQ ID NO: 2385210 - RNA, 19 nt, Homo sapiens
  misc_RNA (1)...(19): siRNA sense strand
aguagauaaugauggagua

SEQ ID NO: 2385211 - RNA, 19 nt, Homo sapiens
  misc_RNA (1)...(19): siRNA sense strand
ggucucaauaaguguguua

SEQ ID NO: 2385212 - RNA, 19 nt, Homo sapiens
  misc_RNA (1)...(19): siRNA sense strand
cagaaagauacaugaagau

SEQ ID NO: 2385213 - RNA, 19 nt, Homo sapiens
  misc_RNA (1)...(19): siRNA sense strand
acaaggaacagauggaaaa

SEQ ID NO: 2385214 - RNA, 19 nt, Homo sapiens
  misc_RNA (1)...(19): siRNA sense strand
aaggcaucauaaagagaaa

SEQ ID NO: 2385215 - RNA, 19 nt, Homo sapiens
  misc_RNA (1)...(19): siRNA sense strand
cagauagagcaaggagaaa

SEQ ID NO: 2385216 - RNA, 19 nt, Homo sapiens
  misc_RNA (1)...(19): siRNA sense strand
ccaaggaguuuguaaggca

SEQ ID NO: 2385217 - RNA, 19 nt, Homo sapiens
  misc_RNA (1)...(19): siRNA sense strand
cagugaugauucugauauu

SEQ ID NO: 2385218 - RNA, 19 nt, Homo sapiens
  misc_RNA (1)...(19): siRNA sense strand
gcuaggaagaagaccguuu

SEQ ID NO: 2385219 - RNA, 19 nt, Homo sapiens
  misc_RNA (1)...(19): siRNA sense strand
auuggaagauaaagggaca

SEQ ID NO: 2385220 - RNA, 19 nt, Homo sapiens
  misc_RNA (1)...(19): siRNA sense strand
guucagaagacuuuaacau

SEQ ID NO: 2385221 - RNA, 19 nt, Homo sapiens
  misc_RNA (1)...(19): siRNA sense strand
ugucauuguugaagaagca

SEQ ID NO: 2385222 - RNA, 19 nt, Homo sapiens
  misc_RNA (1)...(19): siRNA sense strand
cagauaauucaaagguaca

SEQ ID NO: 2385223 - RNA, 19 nt, Homo sapiens
  misc_RNA (1)...(19): siRNA sense strand
uuacugaagcagagaagau

SEQ ID NO: 2385224 - RNA, 19 nt, Homo sapiens
  misc_RNA (1)...(19): siRNA sense strand
ccucauuacaggaagaguu

SEQ ID NO: 2385225 - RNA, 19 nt, Homo sapiens
  misc_RNA (1)...(19): siRNA sense strand
aacaaggaacagauggaaa

SEQ ID NO: 2385226 - RNA, 19 nt, Homo sapiens
  misc_RNA (1)...(19): siRNA sense strand
cauuugaugccaugaagaa

SEQ ID NO: 2385227 - RNA, 19 nt, Homo sapiens
  misc_RNA (1)...(19): siRNA sense strand
uggaagaggaaaagcagaa

SEQ ID NO: 2385228 - RNA, 19 nt, Homo sapiens
  misc_RNA (1)...(19): siRNA sense strand
ucuaaggaguugaguaaac

SEQ ID NO: 2385229 - RNA, 19 nt, Homo sapiens
  misc_RNA (1)...(19): siRNA sense strand
auggaugaauuuagacaga

SEQ ID NO: 2385230 - RNA, 19 nt, Homo sapiens
  misc_RNA (1)...(19): siRNA sense strand
auguucaucuuuagagcaa

SEQ ID NO: 2385231 - RNA, 19 nt, Homo sapiens
  misc_RNA (1)...(19): siRNA sense strand
gcaaggagaaagcagccaa

SEQ ID NO: 2385232 - RNA, 19 nt, Homo sapiens
  misc_RNA (1)...(19): siRNA sense strand
agucagaaagauacaugaa

SEQ ID NO: 2385233 - RNA, 19 nt, Homo sapiens
  misc_RNA (1)...(19): siRNA sense strand
uuucuuagucaaagggaga

SEQ ID NO: 2385234 - RNA, 19 nt, Homo sapiens
  misc_RNA (1)...(19): siRNA sense strand
gagagaacgacuaguaacu

SEQ ID NO: 2385235 - RNA, 19 nt, Homo sapiens
  misc_RNA (1)...(19): siRNA sense strand
gcaaaagaucaaaauggaa

SEQ ID NO: 2385236 - RNA, 19 nt, Homo sapiens
  misc_RNA (1)...(19): siRNA sense strand
guuuguaaggcaucauaaa

SEQ ID NO: 2385237 - RNA, 19 nt, Homo sapiens
  misc_RNA (1)...(19): siRNA sense strand
acagauaauucaaagguac

SEQ ID NO: 2385238 - RNA, 19 nt, Homo sapiens
  misc_RNA (1)...(19): siRNA sense strand
guucaguaguggucucaau

SEQ ID NO: 2385239 - RNA, 19 nt, Homo sapiens
  misc_RNA (1)...(19): siRNA sense strand
agaaaauuaagcaggcuaa

SEQ ID NO: 2385240 - RNA, 19 nt, Homo sapiens
  misc_RNA (1)...(19): siRNA sense strand
ugaaggaauaugaaguaga

SEQ ID NO: 2385241 - RNA, 19 nt, Homo sapiens
  misc_RNA (1)...(19): siRNA sense strand
auggaguauuugagaaguu

SEQ ID NO: 2385242 - RNA, 19 nt, Homo sapiens
  misc_RNA (1)...(19): siRNA sense strand
caaggagaaagcagccaaa

SEQ ID NO: 2385243 - RNA, 19 nt, Homo sapiens
  misc_RNA (1)...(19): siRNA sense strand
gagaaaauuaagcaggcua

SEQ ID NO: 2385244 - RNA, 19 nt, Homo sapiens
  misc_RNA (1)...(19): siRNA sense strand
ggauggaugaauuuagaca

SEQ ID NO: 2385245 - RNA, 19 nt, Homo sapiens
  misc_RNA (1)...(19): siRNA sense strand
agucaugaggggucagaua

SEQ ID NO: 2385246 - RNA, 19 nt, Homo sapiens
  misc_RNA (1)...(19): siRNA sense strand
aaacaaacuaagagaacag

SEQ ID NO: 2385247 - RNA, 19 nt, Homo sapiens
  misc_RNA (1)...(19): siRNA sense strand
guagauaaugauggaguau

SEQ ID NO: 2385248 - RNA, 19 nt, Homo sapiens
  misc_RNA (1)...(19): siRNA sense strand
uugaagaagcacagaguuc

SEQ ID NO: 2385249 - RNA, 19 nt, Homo sapiens
  misc_RNA (1)...(19): siRNA sense strand
cucauuacaggaagaguua

SEQ ID NO: 2385250 - RNA, 19 nt, Homo sapiens
  misc_RNA (1)...(19): siRNA sense strand
cuuuagagcaagaggagcu

SEQ ID NO: 2385251 - RNA, 19 nt, Homo sapiens
  misc_RNA (1)...(19): siRNA sense strand
ccuugagccaccuaaguua

SEQ ID NO: 2385252 - RNA, 19 nt, Homo sapiens
  misc_RNA (1)...(19): siRNA sense strand
aguugucauuguugaagaa

SEQ ID NO: 2385253 - RNA, 19 nt, Homo sapiens
  misc_RNA (1)...(19): siRNA sense strand
agauaaagggacaaguacu

SEQ ID NO: 2385254 - RNA, 19 nt, Homo sapiens
  misc_RNA (1)...(19): siRNA sense strand
ucugaaaauuccagugaca

SEQ ID NO: 2385255 - RNA, 19 nt, Homo sapiens
  misc_RNA (1)...(19): siRNA sense strand
cugauuugugggaaagauu

SEQ ID NO: 2385256 - RNA, 19 nt, Homo sapiens
  misc_RNA (1)...(19): siRNA sense strand
aggaaacauuugaugccau

SEQ ID NO: 2385257 - RNA, 19 nt, Homo sapiens
  misc_RNA (1)...(19): siRNA sense strand
cuucuaaggaguugaguaa

SEQ ID NO: 2385258 - RNA, 19 nt, Homo sapiens
  misc_RNA (1)...(19): siRNA sense strand
cguucugauuugugggaaa

SEQ ID NO: 2385259 - RNA, 19 nt, Homo sapiens
  misc_RNA (1)...(19): siRNA sense strand
caauugaggcagaggaaca

SEQ ID NO: 2385260 - RNA, 19 nt, Homo sapiens
  misc_RNA (1)...(19): siRNA sense strand
cuaaagaagcugugaagga

SEQ ID NO: 2385261 - RNA, 19 nt, Homo sapiens
  misc_RNA (1)...(19): siRNA sense strand
cauuacaggaagaguuaaa

SEQ ID NO: 2385262 - RNA, 19 nt, Homo sapiens
  misc_RNA (1)...(19): siRNA sense strand
caaaagaagcagcugaaaa

SEQ ID NO: 2385263 - RNA, 19 nt, Homo sapiens
  misc_RNA (1)...(19): siRNA sense strand
ucacugagcuggaacggaa

SEQ ID NO: 2385264 - RNA, 19 nt, Homo sapiens
  misc_RNA (1)...(19): siRNA sense strand
gcaugauuguagagaaaau

SEQ ID NO: 2385265 - RNA, 19 nt, Homo sapiens
  misc_RNA (1)...(19): siRNA sense strand
aguagauaaugauggagua

SEQ ID NO: 2385266 - RNA, 19 nt, Homo sapiens
  misc_RNA (1)...(19): siRNA sense strand
ggucucaauaaguguguua

SEQ ID NO: 2385267 - RNA, 19 nt, Homo sapiens
  misc_RNA (1)...(19): siRNA sense strand
cagaaagauacaugaagau

SEQ ID NO: 2385268 - RNA, 19 nt, Homo sapiens
  misc_RNA (1)...(19): siRNA sense strand
acaaggaacagauggaaaa

SEQ ID NO: 2385269 - RNA, 19 nt, Homo sapiens
  misc_RNA (1)...(19): siRNA sense strand
aaggcaucauaaagagaaa

SEQ ID NO: 2385270 - RNA, 19 nt, Homo sapiens
  misc_RNA (1)...(19): siRNA sense strand
aaagaagcugugaaggaaa

SEQ ID NO: 2385271 - RNA, 19 nt, Homo sapiens
  misc_RNA (1)...(19): siRNA sense strand
cagauagagcaaggagaaa

SEQ ID NO: 2385272 - RNA, 19 nt, Homo sapiens
  misc_RNA (1)...(19): siRNA sense strand
ccaaggaguuuguaaggca

SEQ ID NO: 2385273 - RNA, 19 nt, Homo sapiens
  misc_RNA (1)...(19): siRNA sense strand
cagugaugauucugauauu

SEQ ID NO: 2385274 - RNA, 19 nt, Homo sapiens
  misc_RNA (1)...(19): siRNA sense strand
gaguaucccuggagaagga

SEQ ID NO: 2385275 - RNA, 19 nt, Homo sapiens
  misc_RNA (1)...(19): siRNA sense strand
gcuaggaagaagaccguuu

SEQ ID NO: 2385276 - RNA, 19 nt, Homo sapiens
  misc_RNA (1)...(19): siRNA sense strand
auuggaagauaaagggaca

SEQ ID NO: 2385277 - RNA, 19 nt, Homo sapiens
  misc_RNA (1)...(19): siRNA sense strand
guucagaagacuuuaacau

SEQ ID NO: 2385278 - RNA, 19 nt, Homo sapiens
  misc_RNA (1)...(19): siRNA sense strand
ugucauuguugaagaagca

SEQ ID NO: 2385279 - RNA, 19 nt, Homo sapiens
  misc_RNA (1)...(19): siRNA sense strand
cagauaauucaaagguaca

SEQ ID NO: 2385280 - RNA, 19 nt, Homo sapiens
  misc_RNA (1)...(19): siRNA sense strand
uuacugaagcagagaagau

SEQ ID NO: 2385281 - RNA, 19 nt, Homo sapiens
  misc_RNA (1)...(19): siRNA sense strand
ccucauuacaggaagaguu

SEQ ID NO: 2385282 - RNA, 19 nt, Homo sapiens
  misc_RNA (1)...(19): siRNA sense strand
aacaaggaacagauggaaa

SEQ ID NO: 2385283 - RNA, 19 nt, Homo sapiens
  misc_RNA (1)...(19): siRNA sense strand
cauuugaugccaugaagaa

SEQ ID NO: 2385284 - RNA, 19 nt, Homo sapiens
  misc_RNA (1)...(19): siRNA sense strand
uggaagaggaaaagcagaa

SEQ ID NO: 2385285 - RNA, 19 nt, Homo sapiens
  misc_RNA (1)...(19): siRNA sense strand
uaaagaagcugugaaggaa

SEQ ID NO: 2385286 - RNA, 19 nt, Homo sapiens
  misc_RNA (1)...(19): siRNA sense strand
aagaagcugugaaggaaaa

SEQ ID NO: 2385287 - RNA, 19 nt, Homo sapiens
  misc_RNA (1)...(19): siRNA sense strand
ucuaaggaguugaguaaac

SEQ ID NO: 2385288 - RNA, 19 nt, Homo sapiens
  misc_RNA (1)...(19): siRNA sense strand
auggaugaauuuagacaga

SEQ ID NO: 2385289 - RNA, 19 nt, Homo sapiens
  misc_RNA (1)...(19): siRNA sense strand
gcaaggagaaagcagccaa

SEQ ID NO: 2385290 - RNA, 19 nt, Homo sapiens
  misc_RNA (1)...(19): siRNA sense strand
agucagaaagauacaugaa

SEQ ID NO: 2385291 - RNA, 19 nt, Homo sapiens
  misc_RNA (1)...(19): siRNA sense strand
uuucuuagucaaagggaga

SEQ ID NO: 2385292 - RNA, 19 nt, Homo sapiens
  misc_RNA (1)...(19): siRNA sense strand
gagagaacgacuaguaacu

SEQ ID NO: 2385293 - RNA, 19 nt, Homo sapiens
  misc_RNA (1)...(19): siRNA sense strand
gcaaaagaucaaaauggaa

SEQ ID NO: 2385294 - RNA, 19 nt, Homo sapiens
  misc_RNA (1)...(19): siRNA sense strand
guuuguaaggcaucauaaa

SEQ ID NO: 2385295 - RNA, 19 nt, Homo sapiens
  misc_RNA (1)...(19): siRNA sense strand
acagauaauucaaagguac

SEQ ID NO: 2385296 - RNA, 19 nt, Homo sapiens
  misc_RNA (1)...(19): siRNA sense strand
guucaguaguggucucaau

SEQ ID NO: 2385297 - RNA, 19 nt, Homo sapiens
  misc_RNA (1)...(19): siRNA sense strand
agaaaauuaagcaggcuaa

SEQ ID NO: 2385298 - RNA, 19 nt, Homo sapiens
  misc_RNA (1)...(19): siRNA sense strand
ugaaggaauaugaaguaga

SEQ ID NO: 2385299 - RNA, 19 nt, Homo sapiens
  misc_RNA (1)...(19): siRNA sense strand
auggaguauuugagaaguu

SEQ ID NO: 2385300 - RNA, 19 nt, Homo sapiens
  misc_RNA (1)...(19): siRNA sense strand
gagaaaauuaagcaggcua

SEQ ID NO: 2385301 - RNA, 19 nt, Homo sapiens
  misc_RNA (1)...(19): siRNA sense strand
ggauggaugaauuuagaca

SEQ ID NO: 2385302 - RNA, 19 nt, Homo sapiens
  misc_RNA (1)...(19): siRNA sense strand
caaggagaaagcagccaaa

SEQ ID NO: 2385303 - RNA, 19 nt, Homo sapiens
  misc_RNA (1)...(19): siRNA sense strand
aaacaaacuaagagaacag

SEQ ID NO: 2385304 - RNA, 19 nt, Homo sapiens
  misc_RNA (1)...(19): siRNA sense strand
agucaugaggggucagaua

SEQ ID NO: 2385305 - RNA, 19 nt, Homo sapiens
  misc_RNA (1)...(19): siRNA sense strand
guagauaaugauggaguau

SEQ ID NO: 2385306 - RNA, 19 nt, Homo sapiens
  misc_RNA (1)...(19): siRNA sense strand
uugaagaagcacagaguuc

SEQ ID NO: 2385307 - RNA, 19 nt, Homo sapiens
  misc_RNA (1)...(19): siRNA sense strand
cucauuacaggaagaguua

SEQ ID NO: 2385308 - RNA, 19 nt, Homo sapiens
  misc_RNA (1)...(19): siRNA sense strand
cuuuagagcaagaggagcu

SEQ ID NO: 2385309 - RNA, 19 nt, Homo sapiens
  misc_RNA (1)...(19): siRNA sense strand
ccuugagccaccuaaguua

SEQ ID NO: 2385310 - RNA, 19 nt, Homo sapiens
  misc_RNA (1)...(19): siRNA sense strand
aguugucauuguugaagaa

SEQ ID NO: 2385311 - RNA, 19 nt, Homo sapiens
  misc_RNA (1)...(19): siRNA sense strand
uaagaguaucccuggagaa

SEQ ID NO: 2385312 - RNA, 19 nt, Homo sapiens
  misc_RNA (1)...(19): siRNA sense strand
ccuagaaggcuauggguaa

SEQ ID NO: 2385313 - RNA, 19 nt, Homo sapiens
  misc_RNA (1)...(19): siRNA sense strand
caauaaaguuuguacgaca

SEQ ID NO: 2385314 - RNA, 19 nt, Homo sapiens
  misc_RNA (1)...(19): siRNA sense strand
aagaagaagcugagcaauu

SEQ ID NO: 2385315 - RNA, 19 nt, Homo sapiens
  misc_RNA (1)...(19): siRNA sense strand
agccagaacuugagaaaca

SEQ ID NO: 2385316 - RNA, 19 nt, Homo sapiens
  misc_RNA (1)...(19): siRNA sense strand
gggaauggaggaaggagaa

SEQ ID NO: 2385317 - RNA, 19 nt, Homo sapiens
  misc_RNA (1)...(19): siRNA sense strand
cugaagaggagaaagcaaa

SEQ ID NO: 2385318 - RNA, 19 nt, Homo sapiens
  misc_RNA (1)...(19): siRNA sense strand
ggaucaacaaacaguaaua

SEQ ID NO: 2385319 - RNA, 19 nt, Homo sapiens
  misc_RNA (1)...(19): siRNA sense strand
ugaagaagaagcugagcaa

SEQ ID NO: 2385320 - RNA, 19 nt, Homo sapiens
  misc_RNA (1)...(19): siRNA sense strand
cuuucaugcuuuagaacaa

SEQ ID NO: 2385321 - RNA, 19 nt, Homo sapiens
  misc_RNA (1)...(19): siRNA sense strand
acucaaaccaacugaagaa

SEQ ID NO: 2385322 - RNA, 19 nt, Homo sapiens
  misc_RNA (1)...(19): siRNA sense strand
caaauaaaggagaaaccaa

SEQ ID NO: 2385323 - RNA, 19 nt, Homo sapiens
  misc_RNA (1)...(19): siRNA sense strand
gauaaaagaagaagcguau

SEQ ID NO: 2385324 - RNA, 19 nt, Homo sapiens
  misc_RNA (1)...(19): siRNA sense strand
gaggcauggugguggaaga

SEQ ID NO: 2385325 - RNA, 19 nt, Homo sapiens
  misc_RNA (1)...(19): siRNA sense strand
cgaaauggacagcagagaa

SEQ ID NO: 2385326 - RNA, 19 nt, Homo sapiens
  misc_RNA (1)...(19): siRNA sense strand
acgacaagaugaagaaagu

SEQ ID NO: 2385327 - RNA, 19 nt, Homo sapiens
  misc_RNA (1)...(19): siRNA sense strand
uguuauuauugguggcuau

SEQ ID NO: 2385328 - RNA, 19 nt, Homo sapiens
  misc_RNA (1)...(19): siRNA sense strand
cuggauuugugaagaagaa

SEQ ID NO: 2385329 - RNA, 19 nt, Homo sapiens
  misc_RNA (1)...(19): siRNA sense strand
ugaaggaaacagagcaaga

SEQ ID NO: 2385330 - RNA, 19 nt, Homo sapiens
  misc_RNA (1)...(19): siRNA sense strand
ucacagaacaggagauacu

SEQ ID NO: 2385331 - RNA, 19 nt, Homo sapiens
  misc_RNA (1)...(19): siRNA sense strand
aggaaggagaagacaauuu

SEQ ID NO: 2385332 - RNA, 19 nt, Homo sapiens
  misc_RNA (1)...(19): siRNA sense strand
cgagaaguucagugccuua

SEQ ID NO: 2385333 - RNA, 19 nt, Homo sapiens
  misc_RNA (1)...(19): siRNA sense strand
uaugaguguuaguggaauu

SEQ ID NO: 2385334 - RNA, 19 nt, Homo sapiens
  misc_RNA (1)...(19): siRNA sense strand
aagaagagcauguugugaa

SEQ ID NO: 2385335 - RNA, 19 nt, Homo sapiens
  misc_RNA (1)...(19): siRNA sense strand
ugacauuggaucauacuaa

SEQ ID NO: 2385336 - RNA, 19 nt, Homo sapiens
  misc_RNA (1)...(19): siRNA sense strand
agaagaaaucacagggacu

SEQ ID NO: 2385337 - RNA, 19 nt, Homo sapiens
  misc_RNA (1)...(19): siRNA sense strand
agggaauggaggaaggaga

SEQ ID NO: 2385338 - RNA, 19 nt, Homo sapiens
  misc_RNA (1)...(19): siRNA sense strand
uaacacaggcuaagcggua

SEQ ID NO: 2385339 - RNA, 19 nt, Homo sapiens
  misc_RNA (1)...(19): siRNA sense strand
uggagaacgacaagaugaa

SEQ ID NO: 2385340 - RNA, 19 nt, Homo sapiens
  misc_RNA (1)...(19): siRNA sense strand
ggacagaugccuuacgcuu

SEQ ID NO: 2385341 - RNA, 19 nt, Homo sapiens
  misc_RNA (1)...(19): siRNA sense strand
ucuuggaacaaaugcgaaa

SEQ ID NO: 2385342 - RNA, 19 nt, Homo sapiens
  misc_RNA (1)...(19): siRNA sense strand
ggaucagauuccuaucaaa

SEQ ID NO: 2385343 - RNA, 19 nt, Homo sapiens
  misc_RNA (1)...(19): siRNA sense strand
acuuauaccauaugcggaa

SEQ ID NO: 2385344 - RNA, 19 nt, Homo sapiens
  misc_RNA (1)...(19): siRNA sense strand
ggaaguuaccagggaagaa

SEQ ID NO: 2385345 - RNA, 19 nt, Homo sapiens
  misc_RNA (1)...(19): siRNA sense strand
caaauaagggaauggagga

SEQ ID NO: 2385346 - RNA, 19 nt, Homo sapiens
  misc_RNA (1)...(19): siRNA sense strand
gcacccgaauuguggaaga

SEQ ID NO: 2385347 - RNA, 19 nt, Homo sapiens
  misc_RNA (1)...(19): siRNA sense strand
cuauguacuuucacagcaa

SEQ ID NO: 2385348 - RNA, 19 nt, Homo sapiens
  misc_RNA (1)...(19): siRNA sense strand
caaagaaagcccaaaucau

SEQ ID NO: 2385349 - RNA, 19 nt, Homo sapiens
  misc_RNA (1)...(19): siRNA sense strand
uggaggaaggagaagacaa

SEQ ID NO: 2385350 - RNA, 19 nt, Homo sapiens
  misc_RNA (1)...(19): siRNA sense strand
aaagcugggcucaggauaa

SEQ ID NO: 2385351 - RNA, 19 nt, Homo sapiens
  misc_RNA (1)...(19): siRNA sense strand
acugaagaggagaaagcaa

SEQ ID NO: 2385352 - RNA, 19 nt, Homo sapiens
  misc_RNA (1)...(19): siRNA sense strand
cacaagugaugcagauuau

SEQ ID NO: 2385353 - RNA, 19 nt, Homo sapiens
  misc_RNA (1)...(19): siRNA sense strand
acacacaagugaugcagau

SEQ ID NO: 2385354 - RNA, 19 nt, Homo sapiens
  misc_RNA (1)...(19): siRNA sense strand
aagcacaaagugucaauaa

SEQ ID NO: 2385355 - RNA, 19 nt, Homo sapiens
  misc_RNA (1)...(19): siRNA sense strand
uauagacagcugugugaaa

SEQ ID NO: 2385356 - RNA, 19 nt, Homo sapiens
  misc_RNA (1)...(19): siRNA sense strand
aaggaaacagagcaagaua

SEQ ID NO: 2385357 - RNA, 19 nt, Homo sapiens
  misc_RNA (1)...(19): siRNA sense strand
ccuucuuucuggaguggaa

SEQ ID NO: 2385358 - RNA, 19 nt, Homo sapiens
  misc_RNA (1)...(19): siRNA sense strand
agaacgacaagaugaagaa

SEQ ID NO: 2385359 - RNA, 19 nt, Homo sapiens
  misc_RNA (1)...(19): siRNA sense strand
caacugaagaagaagcuga

SEQ ID NO: 2385360 - RNA, 19 nt, Homo sapiens
  misc_RNA (1)...(19): siRNA sense strand
agcacaaagugucaauaaa

SEQ ID NO: 2385361 - RNA, 19 nt, Homo sapiens
  misc_RNA (1)...(19): siRNA sense strand
ggguuauccaugugaacuu

SEQ ID NO: 2385362 - RNA, 19 nt, Homo sapiens
  misc_RNA (1)...(19): siRNA sense strand
gagaacgacaagaugaaga

SEQ ID NO: 2385363 - RNA, 19 nt, Homo sapiens
  misc_RNA (1)...(19): siRNA sense strand
gugaggauggagugaguga

SEQ ID NO: 2385364 - RNA, 19 nt, Homo sapiens
  misc_RNA (1)...(19): siRNA sense strand
aguaagaagcacccgaauu

SEQ ID NO: 2385365 - RNA, 19 nt, Homo sapiens
  misc_RNA (1)...(19): siRNA sense strand
ugauaaaagaagaagcgua

SEQ ID NO: 2385366 - RNA, 19 nt, Homo sapiens
  misc_RNA (1)...(19): siRNA sense strand
acagccagaacuugagaaa

SEQ ID NO: 2385367 - RNA, 19 nt, Homo sapiens
  misc_RNA (1)...(19): siRNA sense strand
cuccauuguaugaggauau

SEQ ID NO: 2385368 - RNA, 19 nt, Homo sapiens
  misc_RNA (1)...(19): siRNA sense strand
gcauaaacuuggaggaggc

SEQ ID NO: 2385369 - RNA, 19 nt, Homo sapiens
  misc_RNA (1)...(19): siRNA sense strand
uuagugaacuguuggcaau

SEQ ID NO: 2385370 - RNA, 19 nt, Homo sapiens
  misc_RNA (1)...(19): siRNA sense strand
caaacaacuccaagaagca

SEQ ID NO: 2385371 - RNA, 19 nt, Homo sapiens
  misc_RNA (1)...(19): siRNA sense strand
cagugaacuuauaccauau

SEQ ID NO: 2385372 - RNA, 19 nt, Homo sapiens
  misc_RNA (1)...(19): siRNA sense strand
aaauaagggaauggaggaa

SEQ ID NO: 2385373 - RNA, 19 nt, Homo sapiens
  misc_RNA (1)...(19): siRNA sense strand
agaacuugagaaacagaua

SEQ ID NO: 2385374 - RNA, 19 nt, Homo sapiens
  misc_RNA (1)...(19): siRNA sense strand
ccugcugaccagagccaaa

SEQ ID NO: 2385375 - RNA, 19 nt, Homo sapiens
  misc_RNA (1)...(19): siRNA sense strand
auguacaagucuucaguuu

SEQ ID NO: 2385376 - RNA, 19 nt, Homo sapiens
  misc_RNA (1)...(19): siRNA sense strand
caguauauuuggaggaagc

SEQ ID NO: 2385377 - RNA, 19 nt, Homo sapiens
  misc_RNA (1)...(19): siRNA sense strand
ccucaaagaagaagggaca

SEQ ID NO: 2385378 - RNA, 19 nt, Homo sapiens
  misc_RNA (1)...(19): siRNA sense strand
agucaaaggcgcaagcaaa

SEQ ID NO: 2385379 - RNA, 19 nt, Homo sapiens
  misc_RNA (1)...(19): siRNA sense strand
cagcaagugaagacagaua

SEQ ID NO: 2385380 - RNA, 19 nt, Homo sapiens
  misc_RNA (1)...(19): siRNA sense strand
ugugaggaguuuaaagaaa

SEQ ID NO: 2385381 - RNA, 19 nt, Homo sapiens
  misc_RNA (1)...(19): siRNA sense strand
uggaaaugaucaagcgaga

SEQ ID NO: 2385382 - RNA, 19 nt, Homo sapiens
  misc_RNA (1)...(19): siRNA sense strand
ggggauuugugguggguua

SEQ ID NO: 2385383 - RNA, 19 nt, Homo sapiens
  misc_RNA (1)...(19): siRNA sense strand
agaugaggcugcagaugaa

SEQ ID NO: 2385384 - RNA, 19 nt, Homo sapiens
  misc_RNA (1)...(19): siRNA sense strand
ggauguuuguacagcgcua

SEQ ID NO: 2385385 - RNA, 19 nt, Homo sapiens
  misc_RNA (1)...(19): siRNA sense strand
gugaggaguuuaaagaaaa

SEQ ID NO: 2385386 - RNA, 19 nt, Homo sapiens
  misc_RNA (1)...(19): siRNA sense strand
ucugaaacuucuugacaau

SEQ ID NO: 2385387 - RNA, 19 nt, Homo sapiens
  misc_RNA (1)...(19): siRNA sense strand
ucaccaaggcucuggauau

SEQ ID NO: 2385388 - RNA, 19 nt, Homo sapiens
  misc_RNA (1)...(19): siRNA sense strand
ggauaugcuugacgcggaa

SEQ ID NO: 2385389 - RNA, 19 nt, Homo sapiens
  misc_RNA (1)...(19): siRNA sense strand
agaaauggcaaguuaucaa

SEQ ID NO: 2385390 - RNA, 19 nt, Homo sapiens
  misc_RNA (1)...(19): siRNA sense strand
uaaugauggaauagagcua

SEQ ID NO: 2385391 - RNA, 19 nt, Homo sapiens
  misc_RNA (1)...(19): siRNA sense strand
agauggagacgaugaagaa

SEQ ID NO: 2385392 - RNA, 19 nt, Homo sapiens
  misc_RNA (1)...(19): siRNA sense strand
ccgaaaggaccaauucaaa

SEQ ID NO: 2385393 - RNA, 19 nt, Homo sapiens
  misc_RNA (1)...(19): siRNA sense strand
ugaugaagcaugaggaugu

SEQ ID NO: 2385394 - RNA, 19 nt, Homo sapiens
  misc_RNA (1)...(19): siRNA sense strand
gcugauugcaaauggaaca

SEQ ID NO: 2385395 - RNA, 19 nt, Homo sapiens
  misc_RNA (1)...(19): siRNA sense strand
aaacauuaacccagaacau

SEQ ID NO: 2385396 - RNA, 19 nt, Homo sapiens
  misc_RNA (1)...(19): siRNA sense strand
ugggagagcaguuccgaaa

SEQ ID NO: 2385397 - RNA, 19 nt, Homo sapiens
  misc_RNA (1)...(19): siRNA sense strand
aggagcaacuggugaggau

SEQ ID NO: 2385398 - RNA, 19 nt, Homo sapiens
  misc_RNA (1)...(19): siRNA sense strand
uggagaagguguaucugaa

SEQ ID NO: 2385399 - RNA, 19 nt, Homo sapiens
  misc_RNA (1)...(19): siRNA sense strand
ggggaaacacagacagaau

SEQ ID NO: 2385400 - RNA, 19 nt, Homo sapiens
  misc_RNA (1)...(19): siRNA sense strand
gcaaguuggaagaccggaa

SEQ ID NO: 2385401 - RNA, 19 nt, Homo sapiens
  misc_RNA (1)...(19): siRNA sense strand
ccaaaauggcagagccuuu

SEQ ID NO: 2385402 - RNA, 19 nt, Homo sapiens
  misc_RNA (1)...(19): siRNA sense strand
uggcagagccuuucaccaa

SEQ ID NO: 2385403 - RNA, 19 nt, Homo sapiens
  misc_RNA (1)...(19): siRNA sense strand
cagcaaacauuaacccaga

SEQ ID NO: 2385404 - RNA, 19 nt, Homo sapiens
  misc_RNA (1)...(19): siRNA sense strand
gagucaaaggcgcaagcaa

SEQ ID NO: 2385405 - RNA, 19 nt, Homo sapiens
  misc_RNA (1)...(19): siRNA sense strand
ggaggauccguguggcuua

SEQ ID NO: 2385406 - RNA, 19 nt, Homo sapiens
  misc_RNA (1)...(19): siRNA sense strand
cagaaaugcuagccaaaau

SEQ ID NO: 2385407 - RNA, 19 nt, Homo sapiens
  misc_RNA (1)...(19): siRNA sense strand
uggaagaggagaaccauau

SEQ ID NO: 2385408 - RNA, 19 nt, Homo sapiens
  misc_RNA (1)...(19): siRNA sense strand
gcuuaaaccgugcacgaau

SEQ ID NO: 2385409 - RNA, 19 nt, Homo sapiens
  misc_RNA (1)...(19): siRNA sense strand
cugacaugcuaauagaauu

SEQ ID NO: 2385410 - RNA, 19 nt, Homo sapiens
  misc_RNA (1)...(19): siRNA sense strand
gcuuaacacacuucaagaa

SEQ ID NO: 2385411 - RNA, 19 nt, Homo sapiens
  misc_RNA (1)...(19): siRNA sense strand
cagcagauggagacgauga

SEQ ID NO: 2385412 - RNA, 19 nt, Homo sapiens
  misc_RNA (1)...(19): siRNA sense strand
cucgaauuguaguggaaau

SEQ ID NO: 2385413 - RNA, 19 nt, Homo sapiens
  misc_RNA (1)...(19): siRNA sense strand
aaacaaagccaaugcugga

SEQ ID NO: 2385414 - RNA, 19 nt, Homo sapiens
  misc_RNA (1)...(19): siRNA sense strand
gaauuguaguggaaaugau

SEQ ID NO: 2385415 - RNA, 19 nt, Homo sapiens
  misc_RNA (1)...(19): siRNA sense strand
cuuaacacacuucaagaaa

SEQ ID NO: 2385416 - RNA, 19 nt, Homo sapiens
  misc_RNA (1)...(19): siRNA sense strand
gaggagguuugguagaaaa

SEQ ID NO: 2385417 - RNA, 19 nt, Homo sapiens
  misc_RNA (1)...(19): siRNA sense strand
ugaaacuguugaagaaagu

SEQ ID NO: 2385418 - RNA, 19 nt, Homo sapiens
  misc_RNA (1)...(19): siRNA sense strand
agaagguguaucugaagaa

SEQ ID NO: 2385419 - RNA, 19 nt, Homo sapiens
  misc_RNA (1)...(19): siRNA sense strand
uggcuaaaguaucaacuau

SEQ ID NO: 2385420 - RNA, 19 nt, Homo sapiens
  misc_RNA (1)...(19): siRNA sense strand
gcuuauaagaacccacaau

SEQ ID NO: 2385421 - RNA, 19 nt, Homo sapiens
  misc_RNA (1)...(19): siRNA sense strand
auggagacgaugaagaaau

SEQ ID NO: 2385422 - RNA, 19 nt, Homo sapiens
  misc_RNA (1)...(19): siRNA sense strand
gcuuacagaccugggcaaa

SEQ ID NO: 2385423 - RNA, 19 nt, Homo sapiens
  misc_RNA (1)...(19): siRNA sense strand
gcuugagguuggcugagaa

SEQ ID NO: 2385424 - RNA, 19 nt, Homo sapiens
  misc_RNA (1)...(19): siRNA sense strand
cauugaacauuuuggaaga

SEQ ID NO: 2385425 - RNA, 19 nt, Homo sapiens
  misc_RNA (1)...(19): siRNA sense strand
gaauauucucgguuugauu

SEQ ID NO: 2385426 - RNA, 19 nt, Homo sapiens
  misc_RNA (1)...(19): siRNA sense strand
cauuauaugcaccagaaau

SEQ ID NO: 2385427 - RNA, 19 nt, Homo sapiens
  misc_RNA (1)...(19): siRNA sense strand
caccagaaaugcuagccaa

SEQ ID NO: 2385428 - RNA, 19 nt, Homo sapiens
  misc_RNA (1)...(19): siRNA sense strand
uugggaaacccuugggaga

SEQ ID NO: 2385429 - RNA, 19 nt, Homo sapiens
  misc_RNA (1)...(19): siRNA sense strand
agccaaugcuggagacgga

SEQ ID NO: 2385430 - RNA, 19 nt, Homo sapiens
  misc_RNA (1)...(19): siRNA sense strand
aagaggagaaccauauuaa

SEQ ID NO: 2385431 - RNA, 19 nt, Homo sapiens
  misc_RNA (1)...(19): siRNA sense strand
cuuauaagaacccacaaua

SEQ ID NO: 2385432 - RNA, 19 nt, Homo sapiens
  misc_RNA (1)...(19): siRNA sense strand
cagauggagacgaugaaga

SEQ ID NO: 2385433 - RNA, 19 nt, Homo sapiens
  misc_RNA (1)...(19): siRNA sense strand
aagaaaugauggccacaga

SEQ ID NO: 2385434 - RNA, 19 nt, Homo sapiens
  misc_RNA (1)...(19): siRNA sense strand
ccugaaauacagaaggacu

SEQ ID NO: 2385435 - RNA, 19 nt, Homo sapiens
  misc_RNA (1)...(19): siRNA sense strand
ccgaaaagaaguucacauu

SEQ ID NO: 2385436 - RNA, 19 nt, Homo sapiens
  misc_RNA (1)...(19): siRNA sense strand
cucaagagaugcuggagga

SEQ ID NO: 2385437 - RNA, 19 nt, Homo sapiens
  misc_RNA (1)...(19): siRNA sense strand
gauaagagcuguaauggag

SEQ ID NO: 2385438 - RNA, 19 nt, Homo sapiens
  misc_RNA (1)...(19): siRNA sense strand
acagaauuggugauguuua

SEQ ID NO: 2385439 - RNA, 19 nt, Homo sapiens
  misc_RNA (1)...(19): siRNA sense strand
ucuaaaagacuauggagaa

SEQ ID NO: 2385440 - RNA, 19 nt, Homo sapiens
  misc_RNA (1)...(19): siRNA sense strand
cuaaaagacuauggagaau

SEQ ID NO: 2385441 - RNA, 19 nt, Homo sapiens
  misc_RNA (1)...(19): siRNA sense strand
ggauaugaaaccaccaaaa

SEQ ID NO: 2385442 - RNA, 19 nt, Homo sapiens
  misc_RNA (1)...(19): siRNA sense strand
cugaugugaaugaagcaaa

SEQ ID NO: 2385443 - RNA, 19 nt, Homo sapiens
  misc_RNA (1)...(19): siRNA sense strand
ugggaggagaugaagguuu

SEQ ID NO: 2385444 - RNA, 19 nt, Homo sapiens
  misc_RNA (1)...(19): siRNA sense strand
ggagaugaagguuuggaca

SEQ ID NO: 2385445 - RNA, 19 nt, Homo sapiens
  misc_RNA (1)...(19): siRNA sense strand
aagaaauggagugguuuaa

SEQ ID NO: 2385446 - RNA, 19 nt, Homo sapiens
  misc_RNA (1)...(19): siRNA sense strand
cauccacacaggagagaaa

SEQ ID NO: 2385447 - RNA, 19 nt, Homo sapiens
  misc_RNA (1)...(19): siRNA sense strand
uuguagaaucagaagcuaa

SEQ ID NO: 2385448 - RNA, 19 nt, Homo sapiens
  misc_RNA (1)...(19): siRNA sense strand
aggcagaagauucagggaa

SEQ ID NO: 2385449 - RNA, 19 nt, Homo sapiens
  misc_RNA (1)...(19): siRNA sense strand
guuacuaaaccaaggagau

SEQ ID NO: 2385450 - RNA, 19 nt, Homo sapiens
  misc_RNA (1)...(19): siRNA sense strand
agcucagacuguacagaaa

SEQ ID NO: 2385451 - RNA, 19 nt, Homo sapiens
  misc_RNA (1)...(19): siRNA sense strand
aggaaugugcauaugagaa

SEQ ID NO: 2385452 - RNA, 19 nt, Homo sapiens
  misc_RNA (1)...(19): siRNA sense strand
gugccaagucugugggaag

SEQ ID NO: 2385453 - RNA, 19 nt, Homo sapiens
  misc_RNA (1)...(19): siRNA sense strand
gaauguggguccagacgga

SEQ ID NO: 2385454 - RNA, 19 nt, Homo sapiens
  misc_RNA (1)...(19): siRNA sense strand
ggagaggagacgagagcuc

SEQ ID NO: 2385455 - RNA, 19 nt, Homo sapiens
  misc_RNA (1)...(19): siRNA sense strand
cagaauacguccaucccau

SEQ ID NO: 2385456 - RNA, 19 nt, Homo sapiens
  misc_RNA (1)...(19): siRNA sense strand
agucaagagcaggagcaaa

SEQ ID NO: 2385457 - RNA, 19 nt, Homo sapiens
  misc_RNA (1)...(19): siRNA sense strand
cagcuggaaaccugaagaa

SEQ ID NO: 2385458 - RNA, 19 nt, Homo sapiens
  misc_RNA (1)...(19): siRNA sense strand
guguacaguugaagguugu

SEQ ID NO: 2385459 - RNA, 19 nt, Homo sapiens
  misc_RNA (1)...(19): siRNA sense strand
gcuaauguuaccagaugau

SEQ ID NO: 2385460 - RNA, 19 nt, Homo sapiens
  misc_RNA (1)...(19): siRNA sense strand
gucaagagcaggagcaaac

SEQ ID NO: 2385461 - RNA, 19 nt, Homo sapiens
  misc_RNA (1)...(19): siRNA sense strand
uuguacaggaugaggcaga

SEQ ID NO: 2385462 - RNA, 19 nt, Homo sapiens
  misc_RNA (1)...(19): siRNA sense strand
guugcaagaucuacagcca

SEQ ID NO: 2385463 - RNA, 19 nt, Homo sapiens
  misc_RNA (1)...(19): siRNA sense strand
gagucaagagcaggagcaa

SEQ ID NO: 2385464 - RNA, 19 nt, Homo sapiens
  misc_RNA (1)...(19): siRNA sense strand
caguauugaggaagaagaa

SEQ ID NO: 2385465 - RNA, 19 nt, Homo sapiens
  misc_RNA (1)...(19): siRNA sense strand
aggaagaagaagaagagga

SEQ ID NO: 2385466 - RNA, 19 nt, Homo sapiens
  misc_RNA (1)...(19): siRNA sense strand
gcucgaagagucaaggcua

SEQ ID NO: 2385467 - RNA, 19 nt, Homo sapiens
  misc_RNA (1)...(19): siRNA sense strand
agucaaggcuaaugccaga

SEQ ID NO: 2385468 - RNA, 19 nt, Homo sapiens
  misc_RNA (1)...(19): siRNA sense strand
aauccaaggagaugggaga

SEQ ID NO: 2385469 - RNA, 19 nt, Homo sapiens
  misc_RNA (1)...(19): siRNA sense strand
ggggagaaaccuaagagaa

SEQ ID NO: 2385470 - RNA, 19 nt, Homo sapiens
  misc_RNA (1)...(19): siRNA sense strand
augacaguauugaggaaga

SEQ ID NO: 2385471 - RNA, 19 nt, Homo sapiens
  misc_RNA (1)...(19): siRNA sense strand
auucaagaguuugggagaa

SEQ ID NO: 2385472 - RNA, 19 nt, Homo sapiens
  misc_RNA (1)...(19): siRNA sense strand
gcuuaacugaagagcauga

SEQ ID NO: 2385473 - RNA, 19 nt, Homo sapiens
  misc_RNA (1)...(19): siRNA sense strand
aagucuaagcucagggcau

SEQ ID NO: 2385474 - RNA, 19 nt, Homo sapiens
  misc_RNA (1)...(19): siRNA sense strand
uugaggaagaagaagaaga

SEQ ID NO: 2385475 - RNA, 19 nt, Homo sapiens
  misc_RNA (1)...(19): siRNA sense strand
uauucaagaguuugggaga

SEQ ID NO: 2385476 - RNA, 19 nt, Homo sapiens
  misc_RNA (1)...(19): siRNA sense strand
uauugaggaagaagaagaa

SEQ ID NO: 2385477 - RNA, 19 nt, Homo sapiens
  misc_RNA (1)...(19): siRNA sense strand
aaaaugaggugaaggagga

SEQ ID NO: 2385478 - RNA, 19 nt, Homo sapiens
  misc_RNA (1)...(19): siRNA sense strand
uucaagaguuugggagaau

SEQ ID NO: 2385479 - RNA, 19 nt, Homo sapiens
  misc_RNA (1)...(19): siRNA sense strand
augaggugaaggaggaaga

SEQ ID NO: 2385480 - RNA, 19 nt, Homo sapiens
  misc_RNA (1)...(19): siRNA sense strand
cuggagaagcacgaggaua

SEQ ID NO: 2385481 - RNA, 19 nt, Homo sapiens
  misc_RNA (1)...(19): siRNA sense strand
aggaagaagauggggagaa

SEQ ID NO: 2385482 - RNA, 19 nt, Homo sapiens
  misc_RNA (1)...(19): siRNA sense strand
ccucaauaaugaauggaca

SEQ ID NO: 2385483 - RNA, 19 nt, Homo sapiens
  misc_RNA (1)...(19): siRNA sense strand
uggacaagaaggaggguga

SEQ ID NO: 2385484 - RNA, 19 nt, Homo sapiens
  misc_RNA (1)...(19): siRNA sense strand
uuugaggcguuaagagaaa

SEQ ID NO: 2385485 - RNA, 19 nt, Homo sapiens
  misc_RNA (1)...(19): siRNA sense strand
ugauaaugagggaagcaaa

SEQ ID NO: 2385486 - RNA, 19 nt, Homo sapiens
  misc_RNA (1)...(19): siRNA sense strand
gaaaaguaagcuugugaaa

SEQ ID NO: 2385487 - RNA, 19 nt, Homo sapiens
  misc_RNA (1)...(19): siRNA sense strand
gugagaacaaacugaaaca

SEQ ID NO: 2385488 - RNA, 19 nt, Homo sapiens
  misc_RNA (1)...(19): siRNA sense strand
cuaugcaguuggagggcuu

SEQ ID NO: 2385489 - RNA, 19 nt, Homo sapiens
  misc_RNA (1)...(19): siRNA sense strand
gaucauuagcuuucagcau

SEQ ID NO: 2385490 - RNA, 19 nt, Homo sapiens
  misc_RNA (1)...(19): siRNA sense strand
gauuacacuaacugagcua

SEQ ID NO: 2385491 - RNA, 19 nt, Homo sapiens
  misc_RNA (1)...(19): siRNA sense strand
ccuuugaggcguuaagaga

SEQ ID NO: 2385492 - RNA, 19 nt, Homo sapiens
  misc_RNA (1)...(19): siRNA sense strand
ggacaagauagaacugcau

SEQ ID NO: 2385493 - RNA, 19 nt, Homo sapiens
  misc_RNA (1)...(19): siRNA sense strand
aaguggaauuugacaauca

SEQ ID NO: 2385494 - RNA, 19 nt, Homo sapiens
  misc_RNA (1)...(19): siRNA sense strand
gucugauuguugaggagaa

SEQ ID NO: 2385495 - RNA, 19 nt, Homo sapiens
  misc_RNA (1)...(19): siRNA sense strand
cagaggucagugagaacaa

SEQ ID NO: 2385496 - RNA, 19 nt, Homo sapiens
  misc_RNA (1)...(19): siRNA sense strand
uuacacuaacugagcuaaa

SEQ ID NO: 2385497 - RNA, 19 nt, Homo sapiens
  misc_RNA (1)...(19): siRNA sense strand
ggguauuucaccucaagaa

SEQ ID NO: 2385498 - RNA, 19 nt, Homo sapiens
  misc_RNA (1)...(19): siRNA sense strand
cugaauaauuugcaugagu

SEQ ID NO: 2385499 - RNA, 19 nt, Homo sapiens
  misc_RNA (1)...(19): siRNA sense strand
aaauccaguaucugaguaa

SEQ ID NO: 2385500 - RNA, 19 nt, Homo sapiens
  misc_RNA (1)...(19): siRNA sense strand
uuacaggauauaagcgcua

SEQ ID NO: 2385501 - RNA, 19 nt, Homo sapiens
  misc_RNA (1)...(19): siRNA sense strand
augaauggacaguugagaa

SEQ ID NO: 2385502 - RNA, 19 nt, Homo sapiens
  misc_RNA (1)...(19): siRNA sense strand
agaaacugucccuugauaa

SEQ ID NO: 2385503 - RNA, 19 nt, Homo sapiens
  misc_RNA (1)...(19): siRNA sense strand
agaaugaccuccaccgaca

SEQ ID NO: 2385504 - RNA, 19 nt, Homo sapiens
  misc_RNA (1)...(19): siRNA sense strand
acaaacugaaacagaucaa

SEQ ID NO: 2385505 - RNA, 19 nt, Homo sapiens
  misc_RNA (1)...(19): siRNA sense strand
gaucuaagcuauaaccacu

SEQ ID NO: 2385506 - RNA, 19 nt, Homo sapiens
  misc_RNA (1)...(19): siRNA sense strand
cuucacaagugcuucgauu

SEQ ID NO: 2385507 - RNA, 19 nt, Homo sapiens
  misc_RNA (1)...(19): siRNA sense strand
ggauauaagcgcuaccagu

SEQ ID NO: 2385508 - RNA, 19 nt, Homo sapiens
  misc_RNA (1)...(19): siRNA sense strand
ggacaagaaggagggugaa

SEQ ID NO: 2385509 - RNA, 19 nt, Homo sapiens
  misc_RNA (1)...(19): siRNA sense strand
guugagaaacugaaaagua

SEQ ID NO: 2385510 - RNA, 19 nt, Homo sapiens
  misc_RNA (1)...(19): siRNA sense strand
acagacgugcuuagacaaa

SEQ ID NO: 2385511 - RNA, 19 nt, Homo sapiens
  misc_RNA (1)...(19): siRNA sense strand
gauaaugagggaagcaaac

SEQ ID NO: 2385512 - RNA, 19 nt, Homo sapiens
  misc_RNA (1)...(19): siRNA sense strand
cugaaagccagcaugaaca

SEQ ID NO: 2385513 - RNA, 19 nt, Homo sapiens
  misc_RNA (1)...(19): siRNA sense strand
gcugugaccuggaacgcau

SEQ ID NO: 2385514 - RNA, 19 nt, Homo sapiens
  misc_RNA (1)...(19): siRNA sense strand
ucucuuuggaccauaauaa

SEQ ID NO: 2385515 - RNA, 19 nt, Homo sapiens
  misc_RNA (1)...(19): siRNA sense strand
gcagaaaucuuuaaggucc

SEQ ID NO: 2385516 - RNA, 19 nt, Homo sapiens
  misc_RNA (1)...(19): siRNA sense strand
cugaaacagauaauaguca

SEQ ID NO: 2385517 - RNA, 19 nt, Homo sapiens
  misc_RNA (1)...(19): siRNA sense strand
gagucagcuggcauagaaa

SEQ ID NO: 2385518 - RNA, 19 nt, Homo sapiens
  misc_RNA (1)...(19): siRNA sense strand
agcagaaggacaucauuua

SEQ ID NO: 2385519 - RNA, 19 nt, Homo sapiens
  misc_RNA (1)...(19): siRNA sense strand
cagaaaucuuuaagguccu

SEQ ID NO: 2385520 - RNA, 19 nt, Homo sapiens
  misc_RNA (1)...(19): siRNA sense strand
ugguggaugcugaggaguu

SEQ ID NO: 2385521 - RNA, 19 nt, Homo sapiens
  misc_RNA (1)...(19): siRNA sense strand
gucuuugaguuaacugaaa

SEQ ID NO: 2385522 - RNA, 19 nt, Homo sapiens
  misc_RNA (1)...(19): siRNA sense strand
aaacuguggaagagaucau

SEQ ID NO: 2385523 - RNA, 19 nt, Homo sapiens
  misc_RNA (1)...(19): siRNA sense strand
gugaaagagcagaucguaa

SEQ ID NO: 2385524 - RNA, 19 nt, Homo sapiens
  misc_RNA (1)...(19): siRNA sense strand
gcaaguaaauuaauggaca

SEQ ID NO: 2385525 - RNA, 19 nt, Homo sapiens
  misc_RNA (1)...(19): siRNA sense strand
acaaagauccagagaacau

SEQ ID NO: 2385526 - RNA, 19 nt, Homo sapiens
  misc_RNA (1)...(19): siRNA sense strand
cagcaaaggaacagacuca

SEQ ID NO: 2385527 - RNA, 19 nt, Homo sapiens
  misc_RNA (1)...(19): siRNA sense strand
gcucaaagugaaugcagaa

SEQ ID NO: 2385528 - RNA, 19 nt, Homo sapiens
  misc_RNA (1)...(19): siRNA sense strand
ucaagaaguuguugggcau

SEQ ID NO: 2385529 - RNA, 19 nt, Homo sapiens
  misc_RNA (1)...(19): siRNA sense strand
ucuaagugccacagugaaa

SEQ ID NO: 2385530 - RNA, 19 nt, Homo sapiens
  misc_RNA (1)...(19): siRNA sense strand
cugcagagccuauggugaa

SEQ ID NO: 2385531 - RNA, 19 nt, Homo sapiens
  misc_RNA (1)...(19): siRNA sense strand
aggaggaacuugaaagcau

SEQ ID NO: 2385532 - RNA, 19 nt, Homo sapiens
  misc_RNA (1)...(19): siRNA sense strand
aagcauaagcgaagauguu

SEQ ID NO: 2385533 - RNA, 19 nt, Homo sapiens
  misc_RNA (1)...(19): siRNA sense strand
cagugguauuguuggaaau

SEQ ID NO: 2385534 - RNA, 19 nt, Homo sapiens
  misc_RNA (1)...(19): siRNA sense strand
ucaaggaagugaaggagga

SEQ ID NO: 2385535 - RNA, 19 nt, Homo sapiens
  misc_RNA (1)...(19): siRNA sense strand
cggcagguuuagaaauuau

SEQ ID NO: 2385536 - RNA, 19 nt, Homo sapiens
  misc_RNA (1)...(19): siRNA sense strand
uggagauauugaacguaaa

SEQ ID NO: 2385537 - RNA, 19 nt, Homo sapiens
  misc_RNA (1)...(19): siRNA sense strand
gggaagaguaaaacagauu

SEQ ID NO: 2385538 - RNA, 19 nt, Homo sapiens
  misc_RNA (1)...(19): siRNA sense strand
agaaauuuacguggagaua

SEQ ID NO: 2385539 - RNA, 19 nt, Homo sapiens
  misc_RNA (1)...(19): siRNA sense strand
aguaauaguugcugaaccu

SEQ ID NO: 2385540 - RNA, 19 nt, Homo sapiens
  misc_RNA (1)...(19): siRNA sense strand
ccacagugaaagagcagau

SEQ ID NO: 2385541 - RNA, 19 nt, Homo sapiens
  misc_RNA (1)...(19): siRNA sense strand
aggaagugaaggaggaacu

SEQ ID NO: 2385542 - RNA, 19 nt, Homo sapiens
  misc_RNA (1)...(19): siRNA sense strand
aauuaauggacaagguuga

SEQ ID NO: 2385543 - RNA, 19 nt, Homo sapiens
  misc_RNA (1)...(19): siRNA sense strand
gcauaagcgaagauguuca

SEQ ID NO: 2385544 - RNA, 19 nt, Homo sapiens
  misc_RNA (1)...(19): siRNA sense strand
cugcggacucgaagaaauu

SEQ ID NO: 2385545 - RNA, 19 nt, Homo sapiens
  misc_RNA (1)...(19): siRNA sense strand
agauaugacaagucgccua

SEQ ID NO: 2385546 - RNA, 19 nt, Homo sapiens
  misc_RNA (1)...(19): siRNA sense strand
ccuacaggcagcaaaggaa

SEQ ID NO: 2385547 - RNA, 19 nt, Homo sapiens
  misc_RNA (1)...(19): siRNA sense strand
gagucuucaugcaaguaaa

SEQ ID NO: 2385548 - RNA, 19 nt, Homo sapiens
  misc_RNA (1)...(19): siRNA sense strand
cuaggguaggcuugaguua

SEQ ID NO: 2385549 - RNA, 19 nt, Homo sapiens
  misc_RNA (1)...(19): siRNA sense strand
cacaagguguugaagaaaa

SEQ ID NO: 2385550 - RNA, 19 nt, Homo sapiens
  misc_RNA (1)...(19): siRNA sense strand
ugguucaguuugaucguua

SEQ ID NO: 2385551 - RNA, 19 nt, Homo sapiens
  misc_RNA (1)...(19): siRNA sense strand
guuagaagcucucaaggca

SEQ ID NO: 2385552 - RNA, 19 nt, Homo sapiens
  misc_RNA (1)...(19): siRNA sense strand
aagaaauuuacguggagau

SEQ ID NO: 2385553 - RNA, 19 nt, Homo sapiens
  misc_RNA (1)...(19): siRNA sense strand
cuuagaugaauuuggaaca

SEQ ID NO: 2385554 - RNA, 19 nt, Homo sapiens
  misc_RNA (1)...(19): siRNA sense strand
acuugaaagcauaagcgaa

SEQ ID NO: 2385555 - RNA, 19 nt, Homo sapiens
  misc_RNA (1)...(19): siRNA sense strand
guucgaauugagcaaguaa

SEQ ID NO: 2385556 - RNA, 19 nt, Homo sapiens
  misc_RNA (1)...(19): siRNA sense strand
cugcauaagauccuggaga

SEQ ID NO: 2385557 - RNA, 19 nt, Homo sapiens
  misc_RNA (1)...(19): siRNA sense strand
aggguaggcuugaguuaca

SEQ ID NO: 2385558 - RNA, 19 nt, Homo sapiens
  misc_RNA (1)...(19): siRNA sense strand
ucgaagaaauuuacgugga

SEQ ID NO: 2385559 - RNA, 19 nt, Homo sapiens
  misc_RNA (1)...(19): siRNA sense strand
ccgagguacaagagaagga

SEQ ID NO: 2385560 - RNA, 19 nt, Homo sapiens
  misc_RNA (1)...(19): siRNA sense strand
acaagguguugaagaaaau

SEQ ID NO: 2385561 - RNA, 19 nt, Homo sapiens
  misc_RNA (1)...(19): siRNA sense strand
uggacaacgacaaggagau

SEQ ID NO: 2385562 - RNA, 19 nt, Homo sapiens
  misc_RNA (1)...(19): siRNA sense strand
ggacaagguugaacuccca

SEQ ID NO: 2385563 - RNA, 19 nt, Homo sapiens
  misc_RNA (1)...(19): siRNA sense strand
uggaacagccagaagaagu

SEQ ID NO: 2385564 - RNA, 19 nt, Homo sapiens
  misc_RNA (1)...(19): siRNA sense strand
cuugaaagcauaagcgaag

SEQ ID NO: 2385565 - RNA, 19 nt, Homo sapiens
  misc_RNA (1)...(19): siRNA sense strand
agccuauggugaaguguau

SEQ ID NO: 2385566 - RNA, 19 nt, Homo sapiens
  misc_RNA (1)...(19): siRNA sense strand
gaggaacuugaaagcauaa

SEQ ID NO: 2385567 - RNA, 19 nt, Homo sapiens
  misc_RNA (1)...(19): siRNA sense strand
ggcucaaagugaaugcaga

SEQ ID NO: 2385568 - RNA, 19 nt, Homo sapiens
  misc_RNA (1)...(19): siRNA sense strand
guucaagcaaugagcaacu

SEQ ID NO: 2385569 - RNA, 19 nt, Homo sapiens
  misc_RNA (1)...(19): siRNA sense strand
acgacaaggagauguuaga

SEQ ID NO: 2385570 - RNA, 19 nt, Homo sapiens
  misc_RNA (1)...(19): siRNA sense strand
agagauaagagcucaaguu

SEQ ID NO: 2385571 - RNA, 19 nt, Homo sapiens
  misc_RNA (1)...(19): siRNA sense strand
acacuguacagcaacauaa

SEQ ID NO: 2385572 - RNA, 19 nt, Homo sapiens
  misc_RNA (1)...(19): siRNA sense strand
gagccuauggugaagugua

SEQ ID NO: 2385573 - RNA, 19 nt, Homo sapiens
  misc_RNA (1)...(19): siRNA sense strand
gugaaggaggaacuugaaa

SEQ ID NO: 2385574 - RNA, 19 nt, Homo sapiens
  misc_RNA (1)...(19): siRNA sense strand
ggagauauugaacguaaaa

SEQ ID NO: 2385575 - RNA, 19 nt, Homo sapiens
  misc_RNA (1)...(19): siRNA sense strand
gaagaaauuuacguggaga

SEQ ID NO: 2385576 - RNA, 19 nt, Homo sapiens
  misc_RNA (1)...(19): siRNA sense strand
cgaugggcucaaagugaau

SEQ ID NO: 2385577 - RNA, 19 nt, Homo sapiens
  misc_RNA (1)...(19): siRNA sense strand
gcggacucgaagaaauuua

SEQ ID NO: 2385578 - RNA, 19 nt, Homo sapiens
  misc_RNA (1)...(19): siRNA sense strand
gaauuagucugcagagccu

SEQ ID NO: 2385579 - RNA, 19 nt, Homo sapiens
  misc_RNA (1)...(19): siRNA sense strand
cagaaugcagagaagaaaa

SEQ ID NO: 2385580 - RNA, 19 nt, Homo sapiens
  misc_RNA (1)...(19): siRNA sense strand
gugaagagagugugggcuu

SEQ ID NO: 2385581 - RNA, 19 nt, Homo sapiens
  misc_RNA (1)...(19): siRNA sense strand
ggagaaaccugguaggcgu

SEQ ID NO: 2385582 - RNA, 19 nt, Homo sapiens
  misc_RNA (1)...(19): siRNA sense strand
gugagaagcuguugggcug

SEQ ID NO: 2385583 - RNA, 19 nt, Homo sapiens
  misc_RNA (1)...(19): siRNA sense strand
gguuggagagggaagguga

SEQ ID NO: 2385584 - RNA, 19 nt, Homo sapiens
  misc_RNA (1)...(19): siRNA sense strand
gggcaaagggugaagagag

SEQ ID NO: 2385585 - RNA, 19 nt, Homo sapiens
  misc_RNA (1)...(19): siRNA sense strand
gagugugggcuuuaggaga

SEQ ID NO: 2385586 - RNA, 19 nt, Homo sapiens
  misc_RNA (1)...(19): siRNA sense strand
aggagaacgaugaggagaa

SEQ ID NO: 2385587 - RNA, 19 nt, Homo sapiens
  misc_RNA (1)...(19): siRNA sense strand
gcggaaagugguagcgauu

SEQ ID NO: 2385588 - RNA, 19 nt, Homo sapiens
  misc_RNA (1)...(19): siRNA sense strand
cgucaaagucaaucccaaa

SEQ ID NO: 2385589 - RNA, 19 nt, Homo sapiens
  misc_RNA (1)...(19): siRNA sense strand
aggagaauuugaagaugaa

SEQ ID NO: 2385590 - RNA, 19 nt, Homo sapiens
  misc_RNA (1)...(19): siRNA sense strand
ugggaguuauugagaguau

SEQ ID NO: 2385591 - RNA, 19 nt, Homo sapiens
  misc_RNA (1)...(19): siRNA sense strand
gcccuaagacaguggaaaa

SEQ ID NO: 2385592 - RNA, 19 nt, Homo sapiens
  misc_RNA (1)...(19): siRNA sense strand
augaauuugccaaguguaa

SEQ ID NO: 2385593 - RNA, 19 nt, Homo sapiens
  misc_RNA (1)...(19): siRNA sense strand
gcugcaacuacuauagaaa

SEQ ID NO: 2385594 - RNA, 19 nt, Homo sapiens
  misc_RNA (1)...(19): siRNA sense strand
ccgaaaagaguacaggaaa

SEQ ID NO: 2385595 - RNA, 19 nt, Homo sapiens
  misc_RNA (1)...(19): siRNA sense strand
acgaauggcuguagaacgu

SEQ ID NO: 2385596 - RNA, 19 nt, Homo sapiens
  misc_RNA (1)...(19): siRNA sense strand
uggaaguuguacagaggau

SEQ ID NO: 2385597 - RNA, 19 nt, Homo sapiens
  misc_RNA (1)...(19): siRNA sense strand
agauaagcccuaugaggau

SEQ ID NO: 2385598 - RNA, 19 nt, Homo sapiens
  misc_RNA (1)...(19): siRNA sense strand
ggacagugugaguggaucu

SEQ ID NO: 2385599 - RNA, 19 nt, Homo sapiens
  misc_RNA (1)...(19): siRNA sense strand
gcgaaagagagcuggcagu

SEQ ID NO: 2385600 - RNA, 19 nt, Homo sapiens
  misc_RNA (1)...(19): siRNA sense strand
gggcauacauuucaccgua

SEQ ID NO: 2385601 - RNA, 19 nt, Homo sapiens
  misc_RNA (1)...(19): siRNA sense strand
ccguauaauuaagggcuuu

SEQ ID NO: 2385602 - RNA, 19 nt, Homo sapiens
  misc_RNA (1)...(19): siRNA sense strand
uguuugauguagugaacuu

SEQ ID NO: 2385603 - RNA, 19 nt, Homo sapiens
  misc_RNA (1)...(19): siRNA sense strand
cagauaagcccuaugagga

SEQ ID NO: 2385604 - RNA, 19 nt, Homo sapiens
  misc_RNA (1)...(19): siRNA sense strand
guucugugggugaugauaa

SEQ ID NO: 2385605 - RNA, 19 nt, Homo sapiens
  misc_RNA (1)...(19): siRNA sense strand
aagcauauggggaggagaa

SEQ ID NO: 2385606 - RNA, 19 nt, Homo sapiens
  misc_RNA (1)...(19): siRNA sense strand
agaacgaugaggagaacga

SEQ ID NO: 2385607 - RNA, 19 nt, Homo sapiens
  misc_RNA (1)...(19): siRNA sense strand
ccuaugaggaugucagcau

SEQ ID NO: 2385608 - RNA, 19 nt, Homo sapiens
  misc_RNA (1)...(19): siRNA sense strand
gccaagaagaggaaagucu

SEQ ID NO: 2385609 - RNA, 19 nt, Homo sapiens
  misc_RNA (1)...(19): siRNA sense strand
ccugggaguuauugagagu

SEQ ID NO: 2385610 - RNA, 19 nt, Homo sapiens
  misc_RNA (1)...(19): siRNA sense strand
gagugaugcaauuggcuuu

SEQ ID NO: 2385611 - RNA, 19 nt, Homo sapiens
  misc_RNA (1)...(19): siRNA sense strand
gauaaagcaaugaaggugu

SEQ ID NO: 2385612 - RNA, 19 nt, Homo sapiens
  misc_RNA (1)...(19): siRNA sense strand
ggaucaaauacuaauggau

SEQ ID NO: 2385613 - RNA, 19 nt, Homo sapiens
  misc_RNA (1)...(19): siRNA sense strand
agguugaugcuguaagauu

SEQ ID NO: 2385614 - RNA, 19 nt, Homo sapiens
  misc_RNA (1)...(19): siRNA sense strand
guugaugcuguaagauuaa

SEQ ID NO: 2385615 - RNA, 19 nt, Homo sapiens
  misc_RNA (1)...(19): siRNA sense strand
ucuccaacgucaaagucaa

SEQ ID NO: 2385616 - RNA, 19 nt, Homo sapiens
  misc_RNA (1)...(19): siRNA sense strand
ugacuaaaggaauggaagu

SEQ ID NO: 2385617 - RNA, 19 nt, Homo sapiens
  misc_RNA (1)...(19): siRNA sense strand
cagauuuguaacuggaaaa

SEQ ID NO: 2385618 - RNA, 19 nt, Homo sapiens
  misc_RNA (1)...(19): siRNA sense strand
caugucaaguucuggaaaa

SEQ ID NO: 2385619 - RNA, 19 nt, Homo sapiens
  misc_RNA (1)...(19): siRNA sense strand
uggagaagguugaugcugu

SEQ ID NO: 2385620 - RNA, 19 nt, Homo sapiens
  misc_RNA (1)...(19): siRNA sense strand
acgaugaggagaacgaaga

SEQ ID NO: 2385621 - RNA, 19 nt, Homo sapiens
  misc_RNA (1)...(19): siRNA sense strand
cagcauggcuaacgcggga

SEQ ID NO: 2385622 - RNA, 19 nt, Homo sapiens
  misc_RNA (1)...(19): siRNA sense strand
aagcaaugaagguguuuga

SEQ ID NO: 2385623 - RNA, 19 nt, Homo sapiens
  misc_RNA (1)...(19): siRNA sense strand
aaaacagaacucagcgaaa

SEQ ID NO: 2385624 - RNA, 19 nt, Homo sapiens
  misc_RNA (1)...(19): siRNA sense strand
gugaguuggagaagguuga

SEQ ID NO: 2385625 - RNA, 19 nt, Homo sapiens
  misc_RNA (1)...(19): siRNA sense strand
cagaggaucuccaacguca

SEQ ID NO: 2385626 - RNA, 19 nt, Homo sapiens
  misc_RNA (1)...(19): siRNA sense strand
acgucaaagucaaucccaa

SEQ ID NO: 2385627 - RNA, 19 nt, Homo sapiens
  misc_RNA (1)...(19): siRNA sense strand
ugaucaacaugcugaaacu

SEQ ID NO: 2385628 - RNA, 19 nt, Homo sapiens
  misc_RNA (1)...(19): siRNA sense strand
cagugugaguggaucuauu

SEQ ID NO: 2385629 - RNA, 19 nt, Homo sapiens
  misc_RNA (1)...(19): siRNA sense strand
uuaugauggccgaggagau

SEQ ID NO: 2385630 - RNA, 19 nt, Homo sapiens
  misc_RNA (1)...(19): siRNA sense strand
agacauggaauuuggccga

SEQ ID NO: 2385631 - RNA, 19 nt, Homo sapiens
  misc_RNA (1)...(19): siRNA sense strand
gggugaugauaaagcaaug

SEQ ID NO: 2385632 - RNA, 19 nt, Homo sapiens
  misc_RNA (1)...(19): siRNA sense strand
ugggagacauucacaccaa

SEQ ID NO: 2385633 - RNA, 19 nt, Homo sapiens
  misc_RNA (1)...(19): siRNA sense strand
cauauggggaggagaauuu

SEQ ID NO: 2385634 - RNA, 19 nt, Homo sapiens
  misc_RNA (1)...(19): siRNA sense strand
aggcaacaguuaccagaca

SEQ ID NO: 2385635 - RNA, 19 nt, Homo sapiens
  misc_RNA (1)...(19): siRNA sense strand
agaaccagaagauacgaaa

SEQ ID NO: 2385636 - RNA, 19 nt, Homo sapiens
  misc_RNA (1)...(19): siRNA sense strand
gaaccagaagauacgaaaa

SEQ ID NO: 2385637 - RNA, 19 nt, Homo sapiens
  misc_RNA (1)...(19): siRNA sense strand
uggcggugucccaggagaa

SEQ ID NO: 2385638 - RNA, 19 nt, Homo sapiens
  misc_RNA (1)...(19): siRNA sense strand
uggagaaggaggugggcaa

SEQ ID NO: 2385639 - RNA, 19 nt, Homo sapiens
  misc_RNA (1)...(19): siRNA sense strand
agacauuggagaaggaaga

SEQ ID NO: 2385640 - RNA, 19 nt, Homo sapiens
  misc_RNA (1)...(19): siRNA sense strand
ucauugagcuggagggcuu

SEQ ID NO: 2385641 - RNA, 19 nt, Homo sapiens
  misc_RNA (1)...(19): siRNA sense strand
ggaggaaggaggaggagga

SEQ ID NO: 2385642 - RNA, 19 nt, Homo sapiens
  misc_RNA (1)...(19): siRNA sense strand
ugaacaaaaugaaggacaa

SEQ ID NO: 2385643 - RNA, 19 nt, Homo sapiens
  misc_RNA (1)...(19): siRNA sense strand
gcaagaagaaggagcagga

SEQ ID NO: 2385644 - RNA, 19 nt, Homo sapiens
  misc_RNA (1)...(19): siRNA sense strand
cuaaaugaggccagggaca

SEQ ID NO: 2385645 - RNA, 19 nt, Homo sapiens
  misc_RNA (1)...(19): siRNA sense strand
gagaggaaggagcgggaau

SEQ ID NO: 2385646 - RNA, 19 nt, Homo sapiens
  misc_RNA (1)...(19): siRNA sense strand
aguccagcaucgacagaaa

SEQ ID NO: 2385647 - RNA, 19 nt, Homo sapiens
  misc_RNA (1)...(19): siRNA sense strand
agaagaaauggcagaucua

SEQ ID NO: 2385648 - RNA, 19 nt, Homo sapiens
  misc_RNA (1)...(19): siRNA sense strand
ccucaaugcuggagcugga

SEQ ID NO: 2385649 - RNA, 19 nt, Homo sapiens
  misc_RNA (1)...(19): siRNA sense strand
ccguauggaaugagauuga

SEQ ID NO: 2385650 - RNA, 19 nt, Homo sapiens
  misc_RNA (1)...(19): siRNA sense strand
ggaaagaacacauggagcu

SEQ ID NO: 2385651 - RNA, 19 nt, Homo sapiens
  misc_RNA (1)...(19): siRNA sense strand
acgagaaugaagugaaaca

SEQ ID NO: 2385652 - RNA, 19 nt, Homo sapiens
  misc_RNA (1)...(19): siRNA sense strand
gggugaagcugaaugagga

SEQ ID NO: 2385653 - RNA, 19 nt, Homo sapiens
  misc_RNA (1)...(19): siRNA sense strand
agaagaaggagcaggagga

SEQ ID NO: 2385654 - RNA, 19 nt, Homo sapiens
  misc_RNA (1)...(19): siRNA sense strand
ugaaguacacggaggccua

SEQ ID NO: 2385655 - RNA, 19 nt, Homo sapiens
  misc_RNA (1)...(19): siRNA sense strand
gagaagaaauggcagaucu

SEQ ID NO: 2385656 - RNA, 19 nt, Homo sapiens
  misc_RNA (1)...(19): siRNA sense strand
gagacaaagacauuggaga

SEQ ID NO: 2385657 - RNA, 19 nt, Homo sapiens
  misc_RNA (1)...(19): siRNA sense strand
uggagaaggaagagaugau

SEQ ID NO: 2385658 - RNA, 19 nt, Homo sapiens
  misc_RNA (1)...(19): siRNA sense strand
ccgccuacaucuacgguau

SEQ ID NO: 2385659 - RNA, 19 nt, Homo sapiens
  misc_RNA (1)...(19): siRNA sense strand
cgggaaugcgagacaaaga

SEQ ID NO: 2385660 - RNA, 19 nt, Homo sapiens
  misc_RNA (1)...(19): siRNA sense strand
ggcaaagcccaaaguggaa

SEQ ID NO: 2385661 - RNA, 19 nt, Homo sapiens
  misc_RNA (1)...(19): siRNA sense strand
cugaaggagcagagggaac

SEQ ID NO: 2385662 - RNA, 19 nt, Homo sapiens
  misc_RNA (1)...(19): siRNA sense strand
ccugagaagaaauggcaga

SEQ ID NO: 2385663 - RNA, 19 nt, Homo sapiens
  misc_RNA (1)...(19): siRNA sense strand
cagagaacagcaagaccaa

SEQ ID NO: 2385664 - RNA, 19 nt, Homo sapiens
  misc_RNA (1)...(19): siRNA sense strand
ucuucgagauggugcggaa

SEQ ID NO: 2385665 - RNA, 19 nt, Homo sapiens
  misc_RNA (1)...(19): siRNA sense strand
cacaagaagcugaaguaca

SEQ ID NO: 2385666 - RNA, 19 nt, Homo sapiens
  misc_RNA (1)...(19): siRNA sense strand
gagaccaggcagagaaguu

SEQ ID NO: 2385667 - RNA, 19 nt, Homo sapiens
  misc_RNA (1)...(19): siRNA sense strand
gacagaugcuagaggucau

SEQ ID NO: 2385668 - RNA, 19 nt, Homo sapiens
  misc_RNA (1)...(19): siRNA sense strand
aggcaaagcccaaagugga

SEQ ID NO: 2385669 - RNA, 19 nt, Homo sapiens
  misc_RNA (1)...(19): siRNA sense strand
gggcaauaaaccggcuaaa

SEQ ID NO: 2385670 - RNA, 19 nt, Homo sapiens
  misc_RNA (1)...(19): siRNA sense strand
aggcagagaaguuccggaa

SEQ ID NO: 2385671 - RNA, 19 nt, Homo sapiens
  misc_RNA (1)...(19): siRNA sense strand
uggcagagcugguagccca

SEQ ID NO: 2385672 - RNA, 19 nt, Homo sapiens
  misc_RNA (1)...(19): siRNA sense strand
uggagaacuucaaugucaa

SEQ ID NO: 2385673 - RNA, 19 nt, Homo sapiens
  misc_RNA (1)...(19): siRNA sense strand
uaggcaacuucaugaacaa

SEQ ID NO: 2385674 - RNA, 19 nt, Homo sapiens
  misc_RNA (1)...(19): siRNA sense strand
ggaggaggaaggaggagga

SEQ ID NO: 2385675 - RNA, 19 nt, Homo sapiens
  misc_RNA (1)...(19): siRNA sense strand
cagacgaauucuuuggcau

SEQ ID NO: 2385676 - RNA, 19 nt, Homo sapiens
  misc_RNA (1)...(19): siRNA sense strand
gaaaucaaccuccgggaca

SEQ ID NO: 2385677 - RNA, 19 nt, Homo sapiens
  misc_RNA (1)...(19): siRNA sense strand
ggaaggagcgggaaugcga

SEQ ID NO: 2385678 - RNA, 19 nt, Homo sapiens
  misc_RNA (1)...(19): siRNA sense strand
ggcaggaucuagaggccau

SEQ ID NO: 2385679 - RNA, 19 nt, Homo sapiens
  misc_RNA (1)...(19): siRNA sense strand
gcagcaagaagaaggagca

SEQ ID NO: 2385680 - RNA, 19 nt, Homo sapiens
  misc_RNA (1)...(19): siRNA sense strand
ugcuggagcuggagaggau

SEQ ID NO: 2385681 - RNA, 19 nt, Homo sapiens
  misc_RNA (1)...(19): siRNA sense strand
agaaggugcugcaggccau

SEQ ID NO: 2385682 - RNA, 19 nt, Homo sapiens
  misc_RNA (1)...(19): siRNA sense strand
gaugaggaggagacggaga

SEQ ID NO: 2385683 - RNA, 19 nt, Homo sapiens
  misc_RNA (1)...(19): siRNA sense strand
aggagacggagaugaggaa

SEQ ID NO: 2385684 - RNA, 19 nt, Homo sapiens
  misc_RNA (1)...(19): siRNA sense strand
gaggagaguucgaugaccu

SEQ ID NO: 2385685 - RNA, 19 nt, Homo sapiens
  misc_RNA (1)...(19): siRNA sense strand
ucgacaaggacuuaugcaa

SEQ ID NO: 2385686 - RNA, 19 nt, Homo sapiens
  misc_RNA (1)...(19): siRNA sense strand
ucaacgagaaugaagugaa

SEQ ID NO: 2385687 - RNA, 19 nt, Homo sapiens
  misc_RNA (1)...(19): siRNA sense strand
agcaugaaauugagcggau

SEQ ID NO: 2385688 - RNA, 19 nt, Homo sapiens
  misc_RNA (1)...(19): siRNA sense strand
ucaugauccuggagaagca

SEQ ID NO: 2385689 - RNA, 19 nt, Homo sapiens
  misc_RNA (1)...(19): siRNA sense strand
acagcaagaugcagccaga

SEQ ID NO: 2385690 - RNA, 19 nt, Homo sapiens
  misc_RNA (1)...(19): siRNA sense strand
agaugcagccagacgaauu

SEQ ID NO: 2385691 - RNA, 19 nt, Homo sapiens
  misc_RNA (1)...(19): siRNA sense strand
gguguaugcagcagagcga

SEQ ID NO: 2385692 - RNA, 19 nt, Homo sapiens
  misc_RNA (1)...(19): siRNA sense strand
cuggagcuggagaggauaa

SEQ ID NO: 2385693 - RNA, 19 nt, Homo sapiens
  misc_RNA (1)...(19): siRNA sense strand
gagccuacgcacagagaac

SEQ ID NO: 2385694 - RNA, 19 nt, Homo sapiens
  misc_RNA (1)...(19): siRNA sense strand
gucaaagagcugucgguca

SEQ ID NO: 2385695 - RNA, 19 nt, Homo sapiens
  misc_RNA (1)...(19): siRNA sense strand
cuaugaaaugagcaggauu

SEQ ID NO: 2385696 - RNA, 19 nt, Homo sapiens
  misc_RNA (1)...(19): siRNA sense strand
guacgggagcccagugaca

SEQ ID NO: 2385697 - RNA, 19 nt, Homo sapiens
  misc_RNA (1)...(19): siRNA sense strand
acgcagaggagcucaacau

SEQ ID NO: 2385698 - RNA, 19 nt, Homo sapiens
  misc_RNA (1)...(19): siRNA sense strand
acucauuggcugcaucaaa

SEQ ID NO: 2385699 - RNA, 19 nt, Homo sapiens
  misc_RNA (1)...(19): siRNA sense strand
aaaucaaccuccgggacaa

SEQ ID NO: 2385700 - RNA, 19 nt, Homo sapiens
  misc_RNA (1)...(19): siRNA sense strand
uggacaaacauuuagacuu

SEQ ID NO: 2385701 - RNA, 19 nt, Homo sapiens
  misc_RNA (1)...(19): siRNA sense strand
ugaagauggaugagcagga

SEQ ID NO: 2385702 - RNA, 19 nt, Homo sapiens
  misc_RNA (1)...(19): siRNA sense strand
cgaacgcagaggagcucaa

SEQ ID NO: 2385703 - RNA, 19 nt, Homo sapiens
  misc_RNA (1)...(19): siRNA sense strand
aggaagagaugaugcggac

SEQ ID NO: 2385704 - RNA, 19 nt, Homo sapiens
  misc_RNA (1)...(19): siRNA sense strand
ggaaugaggaugaccugga

SEQ ID NO: 2385705 - RNA, 19 nt, Homo sapiens
  misc_RNA (1)...(19): siRNA sense strand
cggaauacguauaaccaga

SEQ ID NO: 2385706 - RNA, 19 nt, Homo sapiens
  misc_RNA (1)...(19): siRNA sense strand
agacaaagcuccugggcuc

SEQ ID NO: 2385707 - RNA, 19 nt, Homo sapiens
  misc_RNA (1)...(19): siRNA sense strand
gcacagaccgcauaggcua

SEQ ID NO: 2385708 - RNA, 19 nt, Homo sapiens
  misc_RNA (1)...(19): siRNA sense strand
uggcacugcuggaggguga

SEQ ID NO: 2385709 - RNA, 19 nt, Homo sapiens
  misc_RNA (1)...(19): siRNA sense strand
cgucagacacggaggagga

SEQ ID NO: 2385710 - RNA, 19 nt, Homo sapiens
  misc_RNA (1)...(19): siRNA sense strand
cggagaaggcccagcuaca

SEQ ID NO: 2385711 - RNA, 19 nt, Homo sapiens
  misc_RNA (1)...(19): siRNA sense strand
acaaagaggcucaacguga

SEQ ID NO: 2385712 - RNA, 19 nt, Homo sapiens
  misc_RNA (1)...(19): siRNA sense strand
ugcagaaacugguggcgaa

SEQ ID NO: 2385713 - RNA, 19 nt, Homo sapiens
  misc_RNA (1)...(19): siRNA sense strand
ccagcaggugacaggaaua

SEQ ID NO: 2385714 - RNA, 19 nt, Homo sapiens
  misc_RNA (1)...(19): siRNA sense strand
ccaucgagggacuggagaa

SEQ ID NO: 2385715 - RNA, 19 nt, Homo sapiens
  misc_RNA (1)...(19): siRNA sense strand
cgccagaccaagacgggua

SEQ ID NO: 2385716 - RNA, 19 nt, Homo sapiens
  misc_RNA (1)...(19): siRNA sense strand
ccaaggagcaagagggcac

SEQ ID NO: 2385717 - RNA, 19 nt, Homo sapiens
  misc_RNA (1)...(19): siRNA sense strand
uugucgagguggucagcaa

SEQ ID NO: 2385718 - RNA, 19 nt, Homo sapiens
  misc_RNA (1)...(19): siRNA sense strand
agaucaaccgccagaccaa

SEQ ID NO: 2385719 - RNA, 19 nt, Homo sapiens
  misc_RNA (1)...(19): siRNA sense strand
cuuccagggcagcgaacua

SEQ ID NO: 2385720 - RNA, 19 nt, Homo sapiens
  misc_RNA (1)...(19): siRNA sense strand
ccacaaagacaaagcuccu

SEQ ID NO: 2385721 - RNA, 19 nt, Homo sapiens
  misc_RNA (1)...(19): siRNA sense strand
acagagaagucaucaggca

SEQ ID NO: 2385722 - RNA, 19 nt, Homo sapiens
  misc_RNA (1)...(19): siRNA sense strand
gggcaucagaagaagcuca

SEQ ID NO: 2385723 - RNA, 19 nt, Homo sapiens
  misc_RNA (1)...(19): siRNA sense strand
cgcuggacauagugaauca

SEQ ID NO: 2385724 - RNA, 19 nt, Homo sapiens
  misc_RNA (1)...(19): siRNA sense strand
gcucaaggauuucuggaac

SEQ ID NO: 2385725 - RNA, 19 nt, Homo sapiens
  misc_RNA (1)...(19): siRNA sense strand
ucagcaagcgggugggcau

SEQ ID NO: 2385726 - RNA, 19 nt, Homo sapiens
  misc_RNA (1)...(19): siRNA sense strand
gagguguggacgugaacau

SEQ ID NO: 2385727 - RNA, 19 nt, Homo sapiens
  misc_RNA (1)...(19): siRNA sense strand
agggagguguggacgugaa

SEQ ID NO: 2385728 - RNA, 19 nt, Homo sapiens
  misc_RNA (1)...(19): siRNA sense strand
ggucaacaagcucgggcau

SEQ ID NO: 2385729 - RNA, 19 nt, Homo sapiens
  misc_RNA (1)...(19): siRNA sense strand
gaaacaaauugcaacccaa

SEQ ID NO: 2385730 - RNA, 19 nt, Homo sapiens
  misc_RNA (1)...(19): siRNA sense strand
uggaaugaaucguggguug

SEQ ID NO: 2385731 - RNA, 19 nt, Homo sapiens
  misc_RNA (1)...(19): siRNA sense strand
auaccauguuuguguggaa

SEQ ID NO: 2385732 - RNA, 19 nt, Homo sapiens
  misc_RNA (1)...(19): siRNA sense strand
gugaagaguagcagugauc

SEQ ID NO: 2385733 - RNA, 19 nt, Homo sapiens
  misc_RNA (1)...(19): siRNA sense strand
gacucuaacaagugaugaa

SEQ ID NO: 2385734 - RNA, 19 nt, Homo sapiens
  misc_RNA (1)...(19): siRNA sense strand
aauagaagaugguggagcu

SEQ ID NO: 2385735 - RNA, 19 nt, Homo sapiens
  misc_RNA (1)...(19): siRNA sense strand
guagauaaugaaagggaug

SEQ ID NO: 2385736 - RNA, 19 nt, Homo sapiens
  misc_RNA (1)...(19): siRNA sense strand
ggaagaagggaacucgaga

SEQ ID NO: 2385737 - RNA, 19 nt, Homo sapiens
  misc_RNA (1)...(19): siRNA sense strand
ugguggagcuagaagugau

SEQ ID NO: 2385738 - RNA, 19 nt, Homo sapiens
  misc_RNA (1)...(19): siRNA sense strand
cgauguucaccgagcugua

SEQ ID NO: 2385739 - RNA, 19 nt, Homo sapiens
  misc_RNA (1)...(19): siRNA sense strand
uguagauaaugaaagggau

SEQ ID NO: 2385740 - RNA, 19 nt, Homo sapiens
  misc_RNA (1)...(19): siRNA sense strand
gagaagaucuggaggccca

SEQ ID NO: 2385741 - RNA, 19 nt, Homo sapiens
  misc_RNA (1)...(19): siRNA sense strand
cggugaagagcuacgacua

SEQ ID NO: 2385742 - RNA, 19 nt, Homo sapiens
  misc_RNA (1)...(19): siRNA sense strand
gagaagaacugcaugaccu

SEQ ID NO: 2385743 - RNA, 19 nt, Homo sapiens
  misc_RNA (1)...(19): siRNA sense strand
gcgagauccuggagagccu

SEQ ID NO: 2385744 - RNA, 19 nt, Homo sapiens
  misc_RNA (1)...(19): siRNA sense strand
ucaaggagaucgaugagca

SEQ ID NO: 2385745 - RNA, 19 nt, Homo sapiens
  misc_RNA (1)...(19): siRNA sense strand
aggcuggagcucugggaca

SEQ ID NO: 2385746 - RNA, 19 nt, Homo sapiens
  misc_RNA (1)...(19): siRNA sense strand
caaggagaucgaugagcau

SEQ ID NO: 2385747 - RNA, 19 nt, Homo sapiens
  misc_RNA (1)...(19): siRNA sense strand
aggcgaaggaggcgagaca

SEQ ID NO: 2385748 - RNA, 19 nt, Homo sapiens
  misc_RNA (1)...(19): siRNA sense strand
gggacaacuugcagagcug

SEQ ID NO: 2385749 - RNA, 19 nt, Homo sapiens
  misc_RNA (1)...(19): siRNA sense strand
uuaaugaaacaaagcggaa

SEQ ID NO: 2385750 - RNA, 19 nt, Homo sapiens
  misc_RNA (1)...(19): siRNA sense strand
guggcaugcugguggcaga

SEQ ID NO: 2385751 - RNA, 19 nt, Homo sapiens
  misc_RNA (1)...(19): siRNA sense strand
caaucaacucagagauguu

SEQ ID NO: 2385752 - RNA, 19 nt, Homo sapiens
  misc_RNA (1)...(19): siRNA sense strand
guuggagaccccaggaaua

SEQ ID NO: 2385753 - RNA, 19 nt, Homo sapiens
  misc_RNA (1)...(19): siRNA sense strand
ugauauggguagcagucau

SEQ ID NO: 2385754 - RNA, 19 nt, Homo sapiens
  misc_RNA (1)...(19): siRNA sense strand
cagcauuugcagaaggacu

SEQ ID NO: 2385755 - RNA, 19 nt, Homo sapiens
  misc_RNA (1)...(19): siRNA sense strand
uggaguaauugguggcaug

SEQ ID NO: 2385756 - RNA, 19 nt, Homo sapiens
  misc_RNA (1)...(19): siRNA sense strand
aaguaaagggaaugggaaa

SEQ ID NO: 2385757 - RNA, 19 nt, Homo sapiens
  misc_RNA (1)...(19): siRNA sense strand
agaucgaaguaaagggaau

SEQ ID NO: 2385758 - RNA, 19 nt, Homo sapiens
  misc_RNA (1)...(19): siRNA sense strand
caauacugguagagagaga

SEQ ID NO: 2385759 - RNA, 19 nt, Homo sapiens
  misc_RNA (1)...(19): siRNA sense strand
agaaagacuuggaggagga

SEQ ID NO: 2385760 - RNA, 19 nt, Homo sapiens
  misc_RNA (1)...(19): siRNA sense strand
aggaagaggaugaggaagu

SEQ ID NO: 2385761 - RNA, 19 nt, Homo sapiens
  misc_RNA (1)...(19): siRNA sense strand
ugguagagagagauggaaa

SEQ ID NO: 2385762 - RNA, 19 nt, Homo sapiens
  misc_RNA (1)...(19): siRNA sense strand
acuaagaaagcaagaggaa

SEQ ID NO: 2385763 - RNA, 19 nt, Homo sapiens
  misc_RNA (1)...(19): siRNA sense strand
gugaagaauacgaagauga

SEQ ID NO: 2385764 - RNA, 19 nt, Homo sapiens
  misc_RNA (1)...(19): siRNA sense strand
cuagaagaaaagagagaaa

SEQ ID NO: 2385765 - RNA, 19 nt, Homo sapiens
  misc_RNA (1)...(19): siRNA sense strand
agaagaacuaagaaagcaa

SEQ ID NO: 2385766 - RNA, 19 nt, Homo sapiens
  misc_RNA (1)...(19): siRNA sense strand
aaggaauauguuugggaaa

SEQ ID NO: 2385767 - RNA, 19 nt, Homo sapiens
  misc_RNA (1)...(19): siRNA sense strand
uggaggaggaagaggauga

SEQ ID NO: 2385768 - RNA, 19 nt, Homo sapiens
  misc_RNA (1)...(19): siRNA sense strand
gguagagagagauggaaaa

SEQ ID NO: 2385769 - RNA, 19 nt, Homo sapiens
  misc_RNA (1)...(19): siRNA sense strand
agacaugaacaguagagaa

SEQ ID NO: 2385770 - RNA, 19 nt, Homo sapiens
  misc_RNA (1)...(19): siRNA sense strand
cuagaaagccagaaagacu

SEQ ID NO: 2385771 - RNA, 19 nt, Homo sapiens
  misc_RNA (1)...(19): siRNA sense strand
gaaaacaaggauaggacaa

SEQ ID NO: 2385772 - RNA, 19 nt, Homo sapiens
  misc_RNA (1)...(19): siRNA sense strand
gacaauacugguagagaga

SEQ ID NO: 2385773 - RNA, 19 nt, Homo sapiens
  misc_RNA (1)...(19): siRNA sense strand
uuuaaagcgugguugcaaa

SEQ ID NO: 2385774 - RNA, 19 nt, Homo sapiens
  misc_RNA (1)...(19): siRNA sense strand
aggagaauucagcgagcaa

SEQ ID NO: 2385775 - RNA, 19 nt, Homo sapiens
  misc_RNA (1)...(19): siRNA sense strand
ggaugaggaaguaaggaga

SEQ ID NO: 2385776 - RNA, 19 nt, Homo sapiens
  misc_RNA (1)...(19): siRNA sense strand
augaggaaguaaggagaua

SEQ ID NO: 2385777 - RNA, 19 nt, Homo sapiens
  misc_RNA (1)...(19): siRNA sense strand
gaaguaaagggaaugggaa

SEQ ID NO: 2385778 - RNA, 19 nt, Homo sapiens
  misc_RNA (1)...(19): siRNA sense strand
aagacagacagaagaacua

SEQ ID NO: 2385779 - RNA, 19 nt, Homo sapiens
  misc_RNA (1)...(19): siRNA sense strand
aauccaaacuagaaagcca

SEQ ID NO: 2385780 - RNA, 19 nt, Homo sapiens
  misc_RNA (1)...(19): siRNA sense strand
ggacaauacugguagagag

SEQ ID NO: 2385781 - RNA, 19 nt, Homo sapiens
  misc_RNA (1)...(19): siRNA sense strand
aucaagaaccggugaauga

SEQ ID NO: 2385782 - RNA, 19 nt, Homo sapiens
  misc_RNA (1)...(19): siRNA sense strand
ucuuagaaaugaggagaau

SEQ ID NO: 2385783 - RNA, 19 nt, Homo sapiens
  misc_RNA (1)...(19): siRNA sense strand
aagacuuggaggaggaaga

SEQ ID NO: 2385784 - RNA, 19 nt, Homo sapiens
  misc_RNA (1)...(19): siRNA sense strand
gaaaagagaggaagagcga

SEQ ID NO: 2385785 - RNA, 19 nt, Homo sapiens
  misc_RNA (1)...(19): siRNA sense strand
acaaugguuaagaaggaaa

SEQ ID NO: 2385786 - RNA, 19 nt, Homo sapiens
  misc_RNA (1)...(19): siRNA sense strand
augauaaaagggagcgaaa

SEQ ID NO: 2385787 - RNA, 19 nt, Homo sapiens
  misc_RNA (1)...(19): siRNA sense strand
ugucaguggcaccaagaaa

SEQ ID NO: 2385788 - RNA, 19 nt, Homo sapiens
  misc_RNA (1)...(19): siRNA sense strand
aguaaagggaaugggaaau

SEQ ID NO: 2385789 - RNA, 19 nt, Homo sapiens
  misc_RNA (1)...(19): siRNA sense strand
aagaauacgaagaugacuu

SEQ ID NO: 2385790 - RNA, 19 nt, Homo sapiens
  misc_RNA (1)...(19): siRNA sense strand
aggaaauugaagacaugaa

SEQ ID NO: 2385791 - RNA, 19 nt, Homo sapiens
  misc_RNA (1)...(19): siRNA sense strand
cuuaaaagagaaugagaca

SEQ ID NO: 2385792 - RNA, 19 nt, Homo sapiens
  misc_RNA (1)...(19): siRNA sense strand
caguaauggagcacaccaa

SEQ ID NO: 2385793 - RNA, 19 nt, Homo sapiens
  misc_RNA (1)...(19): siRNA sense strand
cuaaacaguuacagcacca

SEQ ID NO: 2385794 - RNA, 19 nt, Homo sapiens
  misc_RNA (1)...(19): siRNA sense strand
ggucucaccaagaagaaau

SEQ ID NO: 2385795 - RNA, 19 nt, Homo sapiens
  misc_RNA (1)...(19): siRNA sense strand
cagaugaaagaaagacaga

SEQ ID NO: 2385796 - RNA, 19 nt, Homo sapiens
  misc_RNA (1)...(19): siRNA sense strand
acgaagaugacuuugaaaa

SEQ ID NO: 2385797 - RNA, 19 nt, Homo sapiens
  misc_RNA (1)...(19): siRNA sense strand
auauaugucagaagccaaa

SEQ ID NO: 2385798 - RNA, 19 nt, Homo sapiens
  misc_RNA (1)...(19): siRNA sense strand
agagagaaugacauaguau

SEQ ID NO: 2385799 - RNA, 19 nt, Homo sapiens
  misc_RNA (1)...(19): siRNA sense strand
gcugucagagagagaacua

SEQ ID NO: 2385800 - RNA, 19 nt, Homo sapiens
  misc_RNA (1)...(19): siRNA sense strand
caggaauccaaacuagaaa

SEQ ID NO: 2385801 - RNA, 19 nt, Homo sapiens
  misc_RNA (1)...(19): siRNA sense strand
gccagaaagacuuggagga

SEQ ID NO: 2385802 - RNA, 19 nt, Homo sapiens
  misc_RNA (1)...(19): siRNA sense strand
aaaggaauauguuugggaa

SEQ ID NO: 2385803 - RNA, 19 nt, Homo sapiens
  misc_RNA (1)...(19): siRNA sense strand
agagagaacuagacagcuc

SEQ ID NO: 2385804 - RNA, 19 nt, Homo sapiens
  misc_RNA (1)...(19): siRNA sense strand
agaggaagagcgacgaaaa

SEQ ID NO: 2385805 - RNA, 19 nt, Homo sapiens
  misc_RNA (1)...(19): siRNA sense strand
gauaaaagggagcgaaaac

SEQ ID NO: 2385806 - RNA, 19 nt, Homo sapiens
  misc_RNA (1)...(19): siRNA sense strand
gucuuagaaaugaggagaa

SEQ ID NO: 2385807 - RNA, 19 nt, Homo sapiens
  misc_RNA (1)...(19): siRNA sense strand
aagaaaugcaagcgaggaa

SEQ ID NO: 2385808 - RNA, 19 nt, Homo sapiens
  misc_RNA (1)...(19): siRNA sense strand
cuguaugugcggagggaga

SEQ ID NO: 2385809 - RNA, 19 nt, Homo sapiens
  misc_RNA (1)...(19): siRNA sense strand
acauugaggagguggccua

SEQ ID NO: 2385810 - RNA, 19 nt, Homo sapiens
  misc_RNA (1)...(19): siRNA sense strand
caguagagcagcugcgcuu

SEQ ID NO: 2385811 - RNA, 19 nt, Homo sapiens
  misc_RNA (1)...(19): siRNA sense strand
acgugaaugaagaggccaa

SEQ ID NO: 2385812 - RNA, 19 nt, Homo sapiens
  misc_RNA (1)...(19): siRNA sense strand
acuccuuguuugagagcau

SEQ ID NO: 2385813 - RNA, 19 nt, Homo sapiens
  misc_RNA (1)...(19): siRNA sense strand
augaagaggccaagguguu

SEQ ID NO: 2385814 - RNA, 19 nt, Homo sapiens
  misc_RNA (1)...(19): siRNA sense strand
augaaauuccugacagaga

SEQ ID NO: 2385815 - RNA, 19 nt, Homo sapiens
  misc_RNA (1)...(19): siRNA sense strand
gcauggaauaugagacgga

SEQ ID NO: 2385816 - RNA, 19 nt, Homo sapiens
  misc_RNA (1)...(19): siRNA sense strand
ggaagaugcgcgaugacga

SEQ ID NO: 2385817 - RNA, 19 nt, Homo sapiens
  misc_RNA (1)...(19): siRNA sense strand
ccacaggagucgaugcucu

SEQ ID NO: 2385818 - RNA, 19 nt, Homo sapiens
  misc_RNA (1)...(19): siRNA sense strand
cccaaggagaagcggauau

SEQ ID NO: 2385819 - RNA, 19 nt, Homo sapiens
  misc_RNA (1)...(19): siRNA sense strand
ggagggagacugaggaggu

SEQ ID NO: 2385820 - RNA, 19 nt, Homo sapiens
  misc_RNA (1)...(19): siRNA sense strand
aggaaugaccaaggaaaga

SEQ ID NO: 2385821 - RNA, 19 nt, Homo sapiens
  misc_RNA (1)...(19): siRNA sense strand
caggaaugaccaaggaaag

SEQ ID NO: 2385822 - RNA, 19 nt, Homo sapiens
  misc_RNA (1)...(19): siRNA sense strand
aagaauaaccugaugagcu

SEQ ID NO: 2385823 - RNA, 19 nt, Homo sapiens
  misc_RNA (1)...(19): siRNA sense strand
gcgagucacccauggccua

SEQ ID NO: 2385824 - RNA, 19 nt, Homo sapiens
  misc_RNA (1)...(19): siRNA sense strand
aagaaaugcaagcgaggaa

SEQ ID NO: 2385825 - RNA, 19 nt, Homo sapiens
  misc_RNA (1)...(19): siRNA sense strand
cuguaugugcggagggaga

SEQ ID NO: 2385826 - RNA, 19 nt, Homo sapiens
  misc_RNA (1)...(19): siRNA sense strand
acauugaggagguggccua

SEQ ID NO: 2385827 - RNA, 19 nt, Homo sapiens
  misc_RNA (1)...(19): siRNA sense strand
caguagagcagcugcgcuu

SEQ ID NO: 2385828 - RNA, 19 nt, Homo sapiens
  misc_RNA (1)...(19): siRNA sense strand
acgugaaugaagaggccaa

SEQ ID NO: 2385829 - RNA, 19 nt, Homo sapiens
  misc_RNA (1)...(19): siRNA sense strand
acuccuuguuugagagcau

SEQ ID NO: 2385830 - RNA, 19 nt, Homo sapiens
  misc_RNA (1)...(19): siRNA sense strand
augaagaggccaagguguu

SEQ ID NO: 2385831 - RNA, 19 nt, Homo sapiens
  misc_RNA (1)...(19): siRNA sense strand
augaaauuccugacagaga

SEQ ID NO: 2385832 - RNA, 19 nt, Homo sapiens
  misc_RNA (1)...(19): siRNA sense strand
gcauggaauaugagacgga

SEQ ID NO: 2385833 - RNA, 19 nt, Homo sapiens
  misc_RNA (1)...(19): siRNA sense strand
ggaagaugcgcgaugacga

SEQ ID NO: 2385834 - RNA, 19 nt, Homo sapiens
  misc_RNA (1)...(19): siRNA sense strand
ccacaggagucgaugcucu

SEQ ID NO: 2385835 - RNA, 19 nt, Homo sapiens
  misc_RNA (1)...(19): siRNA sense strand
cccaaggagaagcggauau

SEQ ID NO: 2385836 - RNA, 19 nt, Homo sapiens
  misc_RNA (1)...(19): siRNA sense strand
ggagggagacugaggaggu

SEQ ID NO: 2385837 - RNA, 19 nt, Homo sapiens
  misc_RNA (1)...(19): siRNA sense strand
aggaaugaccaaggaaaga

SEQ ID NO: 2385838 - RNA, 19 nt, Homo sapiens
  misc_RNA (1)...(19): siRNA sense strand
caggaaugaccaaggaaag

SEQ ID NO: 2385839 - RNA, 19 nt, Homo sapiens
  misc_RNA (1)...(19): siRNA sense strand
aagaauaaccugaugagcu

SEQ ID NO: 2385840 - RNA, 19 nt, Homo sapiens
  misc_RNA (1)...(19): siRNA sense strand
gcgagucacccauggccua

SEQ ID NO: 2385841 - RNA, 19 nt, Homo sapiens
  misc_RNA (1)...(19): siRNA sense strand
aagaaaugcaagcgaggaa

SEQ ID NO: 2385842 - RNA, 19 nt, Homo sapiens
  misc_RNA (1)...(19): siRNA sense strand
cuguaugugcggagggaga

SEQ ID NO: 2385843 - RNA, 19 nt, Homo sapiens
  misc_RNA (1)...(19): siRNA sense strand
acauugaggagguggccua

SEQ ID NO: 2385844 - RNA, 19 nt, Homo sapiens
  misc_RNA (1)...(19): siRNA sense strand
caguagagcagcugcgcuu

SEQ ID NO: 2385845 - RNA, 19 nt, Homo sapiens
  misc_RNA (1)...(19): siRNA sense strand
acgugaaugaagaggccaa

SEQ ID NO: 2385846 - RNA, 19 nt, Homo sapiens
  misc_RNA (1)...(19): siRNA sense strand
acuccuuguuugagagcau

SEQ ID NO: 2385847 - RNA, 19 nt, Homo sapiens
  misc_RNA (1)...(19): siRNA sense strand
augaagaggccaagguguu

SEQ ID NO: 2385848 - RNA, 19 nt, Homo sapiens
  misc_RNA (1)...(19): siRNA sense strand
augaaauuccugacagaga

SEQ ID NO: 2385849 - RNA, 19 nt, Homo sapiens
  misc_RNA (1)...(19): siRNA sense strand
ggaagaugcgcgaugacga

SEQ ID NO: 2385850 - RNA, 19 nt, Homo sapiens
  misc_RNA (1)...(19): siRNA sense strand
ccacaggagucgaugcucu

SEQ ID NO: 2385851 - RNA, 19 nt, Homo sapiens
  misc_RNA (1)...(19): siRNA sense strand
ggagggagacugaggaggu

SEQ ID NO: 2385852 - RNA, 19 nt, Homo sapiens
  misc_RNA (1)...(19): siRNA sense strand
aagaauaaccugaugagcu

SEQ ID NO: 2385853 - RNA, 19 nt, Homo sapiens
  misc_RNA (1)...(19): siRNA sense strand
gcgagucacccauggccua

SEQ ID NO: 2385854 - RNA, 19 nt, Homo sapiens
  misc_RNA (1)...(19): siRNA sense strand
accagaagcugcagggcaa

SEQ ID NO: 2385855 - RNA, 19 nt, Homo sapiens
  misc_RNA (1)...(19): siRNA sense strand
uggccaugcuggaggaaaa

SEQ ID NO: 2385856 - RNA, 19 nt, Homo sapiens
  misc_RNA (1)...(19): siRNA sense strand
agcacguggugaagggaaa

SEQ ID NO: 2385857 - RNA, 19 nt, Homo sapiens
  misc_RNA (1)...(19): siRNA sense strand
acgccauccuggagggaga

SEQ ID NO: 2385858 - RNA, 19 nt, Homo sapiens
  misc_RNA (1)...(19): siRNA sense strand
gaguauugguggaacgcca

SEQ ID NO: 2385859 - RNA, 19 nt, Homo sapiens
  misc_RNA (1)...(19): siRNA sense strand
ccguggaugaggaggaaca

SEQ ID NO: 2385860 - RNA, 19 nt, Homo sapiens
  misc_RNA (1)...(19): siRNA sense strand
ggagaagagcccaucgaca

SEQ ID NO: 2385861 - RNA, 19 nt, Homo sapiens
  misc_RNA (1)...(19): siRNA sense strand
gugcuguccgagagaacua

SEQ ID NO: 2385862 - RNA, 19 nt, Homo sapiens
  misc_RNA (1)...(19): siRNA sense strand
agaucaacacugagaguuc

SEQ ID NO: 2385863 - RNA, 19 nt, Homo sapiens
  misc_RNA (1)...(19): siRNA sense strand
agggcaagccacagagcca

SEQ ID NO: 2385864 - RNA, 19 nt, Homo sapiens
  misc_RNA (1)...(19): siRNA sense strand
gggcagugcuagcagggaa

SEQ ID NO: 2385865 - RNA, 19 nt, Homo sapiens
  misc_RNA (1)...(19): siRNA sense strand
cuucauuaauugauggaga

SEQ ID NO: 2385866 - RNA, 19 nt, Homo sapiens
  misc_RNA (1)...(19): siRNA sense strand
gauuacagcacaugggaca

SEQ ID NO: 2385867 - RNA, 19 nt, Homo sapiens
  misc_RNA (1)...(19): siRNA sense strand
auuaauugauggagaagga

SEQ ID NO: 2385868 - RNA, 19 nt, Homo sapiens
  misc_RNA (1)...(19): siRNA sense strand
gauaaggaauuucggcaga

SEQ ID NO: 2385869 - RNA, 19 nt, Homo sapiens
  misc_RNA (1)...(19): siRNA sense strand
cggcaaccggacaaagaaa

SEQ ID NO: 2385870 - RNA, 19 nt, Homo sapiens
  misc_RNA (1)...(19): siRNA sense strand
cugcaguaccuguuugaua

SEQ ID NO: 2385871 - RNA, 19 nt, Homo sapiens
  misc_RNA (1)...(19): siRNA sense strand
agguuaugauguacggcaa

SEQ ID NO: 2385872 - RNA, 19 nt, Homo sapiens
  misc_RNA (1)...(19): siRNA sense strand
cuguauuacucauguguca

SEQ ID NO: 2385873 - RNA, 19 nt, Homo sapiens
  misc_RNA (1)...(19): siRNA sense strand
cauggauguguaagaaaua

SEQ ID NO: 2385874 - RNA, 19 nt, Homo sapiens
  misc_RNA (1)...(19): siRNA sense strand
agggauuauuaaagcaaca

SEQ ID NO: 2385875 - RNA, 19 nt, Homo sapiens
  misc_RNA (1)...(19): siRNA sense strand
ggcuacacaauauggaaua

SEQ ID NO: 2385876 - RNA, 19 nt, Homo sapiens
  misc_RNA (1)...(19): siRNA sense strand
caaccauggauguguaaga

SEQ ID NO: 2385877 - RNA, 19 nt, Homo sapiens
  misc_RNA (1)...(19): siRNA sense strand
cagaauaucaagggcgaau

SEQ ID NO: 2385878 - RNA, 19 nt, Homo sapiens
  misc_RNA (1)...(19): siRNA sense strand
aagcaacagaagagcaaaa

SEQ ID NO: 2385879 - RNA, 19 nt, Homo sapiens
  misc_RNA (1)...(19): siRNA sense strand
acagaagagcaaaagaaaa

SEQ ID NO: 2385880 - RNA, 19 nt, Homo sapiens
  misc_RNA (1)...(19): siRNA sense strand
cugaaagcugauaaggaau

SEQ ID NO: 2385881 - RNA, 19 nt, Homo sapiens
  misc_RNA (1)...(19): siRNA sense strand
aggcaguauacaauagaau

SEQ ID NO: 2385882 - RNA, 19 nt, Homo sapiens
  misc_RNA (1)...(19): siRNA sense strand
agaaaguaauguuaggaac

SEQ ID NO: 2385883 - RNA, 19 nt, Homo sapiens
  misc_RNA (1)...(19): siRNA sense strand
augaaugccaggagauaca

SEQ ID NO: 2385884 - RNA, 19 nt, Homo sapiens
  misc_RNA (1)...(19): siRNA sense strand
gggacauagucaaggcuac

SEQ ID NO: 2385885 - RNA, 19 nt, Homo sapiens
  misc_RNA (1)...(19): siRNA sense strand
cuuacaagaggcaaggcaa

SEQ ID NO: 2385886 - RNA, 19 nt, Homo sapiens
  misc_RNA (1)...(19): siRNA sense strand
aagcaaaaggauaugacaa

SEQ ID NO: 2385887 - RNA, 19 nt, Homo sapiens
  misc_RNA (1)...(19): siRNA sense strand
ggguaacuguguaggugca

SEQ ID NO: 2385888 - RNA, 19 nt, Homo sapiens
  misc_RNA (1)...(19): siRNA sense strand
ggacauagucaaggcuaca

SEQ ID NO: 2385889 - RNA, 19 nt, Homo sapiens
  misc_RNA (1)...(19): siRNA sense strand
gagcuaauguugaugccca

SEQ ID NO: 2385890 - RNA, 19 nt, Homo sapiens
  misc_RNA (1)...(19): siRNA sense strand
aagaaugaaugccaggaga

SEQ ID NO: 2385891 - RNA, 19 nt, Homo sapiens
  misc_RNA (1)...(19): siRNA sense strand
agaaugaaugccaggagau

SEQ ID NO: 2385892 - RNA, 19 nt, Homo sapiens
  misc_RNA (1)...(19): siRNA sense strand
cccagaauaucaagggcga

SEQ ID NO: 2385893 - RNA, 19 nt, Homo sapiens
  misc_RNA (1)...(19): siRNA sense strand
ccagggauuauuaaagcaa

SEQ ID NO: 2385894 - RNA, 19 nt, Homo sapiens
  misc_RNA (1)...(19): siRNA sense strand
ugaaccucuuggacggaaa

SEQ ID NO: 2385895 - RNA, 19 nt, Homo sapiens
  misc_RNA (1)...(19): siRNA sense strand
auaugaacgcugucgagaa

SEQ ID NO: 2385896 - RNA, 19 nt, Homo sapiens
  misc_RNA (1)...(19): siRNA sense strand
agggaauaccacagucauu

SEQ ID NO: 2385897 - RNA, 19 nt, Homo sapiens
  misc_RNA (1)...(19): siRNA sense strand
gcagcauauagaacacaua

SEQ ID NO: 2385898 - RNA, 19 nt, Homo sapiens
  misc_RNA (1)...(19): siRNA sense strand
caguuaaccuuggugacaa

SEQ ID NO: 2385899 - RNA, 19 nt, Homo sapiens
  misc_RNA (1)...(19): siRNA sense strand
ggugcagauccuucauuaa

SEQ ID NO: 2385900 - RNA, 19 nt, Homo sapiens
  misc_RNA (1)...(19): siRNA sense strand
cucaauuguuguugcuuau

SEQ ID NO: 2385901 - RNA, 19 nt, Homo sapiens
  misc_RNA (1)...(19): siRNA sense strand
cagaauggaaugacgccuu

SEQ ID NO: 2385902 - RNA, 19 nt, Homo sapiens
  misc_RNA (1)...(19): siRNA sense strand
cuuuaaugugggcagcaua

SEQ ID NO: 2385903 - RNA, 19 nt, Homo sapiens
  misc_RNA (1)...(19): siRNA sense strand
auguugaugcccagaauau

SEQ ID NO: 2385904 - RNA, 19 nt, Homo sapiens
  misc_RNA (1)...(19): siRNA sense strand
agcaaaaggauaugacaau

SEQ ID NO: 2385905 - RNA, 19 nt, Homo sapiens
  misc_RNA (1)...(19): siRNA sense strand
ugaccaaauaucaggaucu

SEQ ID NO: 2385906 - RNA, 19 nt, Homo sapiens
  misc_RNA (1)...(19): siRNA sense strand
aaggacaggauguagauau

SEQ ID NO: 2385907 - RNA, 19 nt, Homo sapiens
  misc_RNA (1)...(19): siRNA sense strand
aauauugauucuuggcuca

SEQ ID NO: 2385908 - RNA, 19 nt, Homo sapiens
  misc_RNA (1)...(19): siRNA sense strand
cuguguaggugcaggcaac

SEQ ID NO: 2385909 - RNA, 19 nt, Homo sapiens
  misc_RNA (1)...(19): siRNA sense strand
agaugaaggugcaggacau

SEQ ID NO: 2385910 - RNA, 19 nt, Homo sapiens
  misc_RNA (1)...(19): siRNA sense strand
gggaggaagaugaggcuga

SEQ ID NO: 2385911 - RNA, 19 nt, Homo sapiens
  misc_RNA (1)...(19): siRNA sense strand
ccgagaaugaggagcauau

SEQ ID NO: 2385912 - RNA, 19 nt, Homo sapiens
  misc_RNA (1)...(19): siRNA sense strand
ccguguacucgguggagaa

SEQ ID NO: 2385913 - RNA, 19 nt, Homo sapiens
  misc_RNA (1)...(19): siRNA sense strand
ccaacaagggcgugcacau

SEQ ID NO: 2385914 - RNA, 19 nt, Homo sapiens
  misc_RNA (1)...(19): siRNA sense strand
uagaagaggaaaagaacua

SEQ ID NO: 2385915 - RNA, 19 nt, Homo sapiens
  misc_RNA (1)...(19): siRNA sense strand
ugaccaacgauguggccaa

SEQ ID NO: 2385916 - RNA, 19 nt, Homo sapiens
  misc_RNA (1)...(19): siRNA sense strand
gcucaggagacgugcggau

SEQ ID NO: 2385917 - RNA, 19 nt, Homo sapiens
  misc_RNA (1)...(19): siRNA sense strand
cggaaaggauuaugagguc

SEQ ID NO: 2385918 - RNA, 19 nt, Homo sapiens
  misc_RNA (1)...(19): siRNA sense strand
aggauuaugaggucguaua

SEQ ID NO: 2385919 - RNA, 19 nt, Homo sapiens
  misc_RNA (1)...(19): siRNA sense strand
uuacagaagcaguacgaga

SEQ ID NO: 2385920 - RNA, 19 nt, Homo sapiens
  misc_RNA (1)...(19): siRNA sense strand
aguucauagaagaggaaaa

SEQ ID NO: 2385921 - RNA, 19 nt, Homo sapiens
  misc_RNA (1)...(19): siRNA sense strand
cugcagacguggaugggca

SEQ ID NO: 2385922 - RNA, 19 nt, Homo sapiens
  misc_RNA (1)...(19): siRNA sense strand
ccgugaucgucaacagcua

SEQ ID NO: 2385923 - RNA, 19 nt, Homo sapiens
  misc_RNA (1)...(19): siRNA sense strand
ucauagaagaggaaaagaa

SEQ ID NO: 2385924 - RNA, 19 nt, Homo sapiens
  misc_RNA (1)...(19): siRNA sense strand
ccaucagggucuggaagaa

SEQ ID NO: 2385925 - RNA, 19 nt, Homo sapiens
  misc_RNA (1)...(19): siRNA sense strand
cgguaaaugugcuucagau

SEQ ID NO: 2385926 - RNA, 19 nt, Homo sapiens
  misc_RNA (1)...(19): siRNA sense strand
caacuguggaugaagucaa

SEQ ID NO: 2385927 - RNA, 19 nt, Homo sapiens
  misc_RNA (1)...(19): siRNA sense strand
ucaccaugggcguggagaa

SEQ ID NO: 2385928 - RNA, 19 nt, Homo sapiens
  misc_RNA (1)...(19): siRNA sense strand
ggaugaaggaucggaugaa

SEQ ID NO: 2385929 - RNA, 19 nt, Homo sapiens
  misc_RNA (1)...(19): siRNA sense strand
agcacgaccuggagaguca

SEQ ID NO: 2385930 - RNA, 19 nt, Homo sapiens
  misc_RNA (1)...(19): siRNA sense strand
cggaccucgugaaggacaa

SEQ ID NO: 2385931 - RNA, 19 nt, Homo sapiens
  misc_RNA (1)...(19): siRNA sense strand
ggaaaagaacccagagaug

SEQ ID NO: 2385932 - RNA, 19 nt, Homo sapiens
  misc_RNA (1)...(19): siRNA sense strand
acgccaaggaggagcgagu

SEQ ID NO: 2385933 - RNA, 19 nt, Homo sapiens
  misc_RNA (1)...(19): siRNA sense strand
aggucugggucuucaacaa

SEQ ID NO: 2385934 - RNA, 19 nt, Homo sapiens
  misc_RNA (1)...(19): siRNA sense strand
ggacgaugcugcuggacac

SEQ ID NO: 2385935 - RNA, 19 nt, Homo sapiens
  misc_RNA (1)...(19): siRNA sense strand
gagaugaaggugcaggaca

SEQ ID NO: 2385936 - RNA, 19 nt, Homo sapiens
  misc_RNA (1)...(19): siRNA sense strand
cugugagcuccuauggaaa

SEQ ID NO: 2385937 - RNA, 19 nt, Homo sapiens
  misc_RNA (1)...(19): siRNA sense strand
gggacagcgcucaugagaa

SEQ ID NO: 2385938 - RNA, 19 nt, Homo sapiens
  misc_RNA (1)...(19): siRNA sense strand
gaucggaugaagacaguca

SEQ ID NO: 2385939 - RNA, 19 nt, Homo sapiens
  misc_RNA (1)...(19): siRNA sense strand
augaaggaucggaugaaga

SEQ ID NO: 2385940 - RNA, 19 nt, Homo sapiens
  misc_RNA (1)...(19): siRNA sense strand
uggaugaagucaagaagcu

SEQ ID NO: 2385941 - RNA, 19 nt, Homo sapiens
  misc_RNA (1)...(19): siRNA sense strand
gcaguucauagaagaggaa

SEQ ID NO: 2385942 - RNA, 19 nt, Homo sapiens
  misc_RNA (1)...(19): siRNA sense strand
gugugagcgucaauggaga

SEQ ID NO: 2385943 - RNA, 19 nt, Homo sapiens
  misc_RNA (1)...(19): siRNA sense strand
gagcugggaugguggugga

SEQ ID NO: 2385944 - RNA, 19 nt, Homo sapiens
  misc_RNA (1)...(19): siRNA sense strand
aggaugaaggaucggauga

SEQ ID NO: 2385945 - RNA, 19 nt, Homo sapiens
  misc_RNA (1)...(19): siRNA sense strand
cagaagagcacgaccugga

SEQ ID NO: 2385946 - RNA, 19 nt, Homo sapiens
  misc_RNA (1)...(19): siRNA sense strand
gcaaauuuacagaagcagu

SEQ ID NO: 2385947 - RNA, 19 nt, Homo sapiens
  misc_RNA (1)...(19): siRNA sense strand
gcggaaaggauuaugaggu

SEQ ID NO: 2385948 - RNA, 19 nt, Homo sapiens
  misc_RNA (1)...(19): siRNA sense strand
gugcaccggcugagagcau

SEQ ID NO: 2385949 - RNA, 19 nt, Homo sapiens
  misc_RNA (1)...(19): siRNA sense strand
gcuccaaauccuuagcuca

SEQ ID NO: 2385950 - RNA, 19 nt, Homo sapiens
  misc_RNA (1)...(19): siRNA sense strand
ucagaagggcauuacgaga

SEQ ID NO: 2385951 - RNA, 19 nt, Homo sapiens
  misc_RNA (1)...(19): siRNA sense strand
ggauggugguggacuggga

SEQ ID NO: 2385952 - RNA, 19 nt, Homo sapiens
  misc_RNA (1)...(19): siRNA sense strand
gguaaaugugcuucagauc

SEQ ID NO: 2385953 - RNA, 19 nt, Homo sapiens
  misc_RNA (1)...(19): siRNA sense strand
ggaagaagaucgcggcaga

SEQ ID NO: 2385954 - RNA, 19 nt, Homo sapiens
  misc_RNA (1)...(19): siRNA sense strand
gcaaugaccgggugggcua

SEQ ID NO: 2385955 - RNA, 19 nt, Homo sapiens
  misc_RNA (1)...(19): siRNA sense strand
cuguggacaucaaggacaa

SEQ ID NO: 2385956 - RNA, 19 nt, Homo sapiens
  misc_RNA (1)...(19): siRNA sense strand
agacagagguggugcggcu

SEQ ID NO: 2385957 - RNA, 19 nt, Homo sapiens
  misc_RNA (1)...(19): siRNA sense strand
aagcagaaccagcaggaga

SEQ ID NO: 2385958 - RNA, 19 nt, Homo sapiens
  misc_RNA (1)...(19): siRNA sense strand
gcggaaagacagagguggu

SEQ ID NO: 2385959 - RNA, 19 nt, Homo sapiens
  misc_RNA (1)...(19): siRNA sense strand
ucaagcagcuguugcgaga

SEQ ID NO: 2385960 - RNA, 19 nt, Homo sapiens
  misc_RNA (1)...(19): siRNA sense strand
acuacaagguguuggugga

SEQ ID NO: 2385961 - RNA, 19 nt, Homo sapiens
  misc_RNA (1)...(19): siRNA sense strand
ggcagaaacuggaggagac

SEQ ID NO: 2385962 - RNA, 19 nt, Homo sapiens
  misc_RNA (1)...(19): siRNA sense strand
aggccaagcuccuggguuc

SEQ ID NO: 2385963 - RNA, 19 nt, Homo sapiens
  misc_RNA (1)...(19): siRNA sense strand
cggcagaaacuggaggaga

SEQ ID NO: 2385964 - RNA, 19 nt, Homo sapiens
  misc_RNA (1)...(19): siRNA sense strand
gcgucaagcuccuggcaac

SEQ ID NO: 2385965 - RNA, 19 nt, Homo sapiens
  misc_RNA (1)...(19): siRNA sense strand
acauuaaccgccagaccaa

SEQ ID NO: 2385966 - RNA, 19 nt, Homo sapiens
  misc_RNA (1)...(19): siRNA sense strand
aggaacaccuacagccaga

SEQ ID NO: 2385967 - RNA, 19 nt, Homo sapiens
  misc_RNA (1)...(19): siRNA sense strand
ucacaguccucgagcagca

SEQ ID NO: 2385968 - RNA, 19 nt, Homo sapiens
  misc_RNA (1)...(19): siRNA sense strand
ccucagugaaacacaaaga

SEQ ID NO: 2385969 - RNA, 19 nt, Homo sapiens
  misc_RNA (1)...(19): siRNA sense strand
agcagaaccagcaggagaa

SEQ ID NO: 2385970 - RNA, 19 nt, Homo sapiens
  misc_RNA (1)...(19): siRNA sense strand
aggcgguggaggagaagau

SEQ ID NO: 2385971 - RNA, 19 nt, Homo sapiens
  misc_RNA (1)...(19): siRNA sense strand
agccagcaucggagggcaa

SEQ ID NO: 2385972 - RNA, 19 nt, Homo sapiens
  misc_RNA (1)...(19): siRNA sense strand
ccggcagugugaagagcau

SEQ ID NO: 2385973 - RNA, 19 nt, Homo sapiens
  misc_RNA (1)...(19): siRNA sense strand
ugaaacacaaagaggccau

SEQ ID NO: 2385974 - RNA, 19 nt, Homo sapiens
  misc_RNA (1)...(19): siRNA sense strand
ggaaggagcaggagcuggu

SEQ ID NO: 2385975 - RNA, 19 nt, Homo sapiens
  misc_RNA (1)...(19): siRNA sense strand
ccacaaagguccugggcau

SEQ ID NO: 2385976 - RNA, 19 nt, Homo sapiens
  misc_RNA (1)...(19): siRNA sense strand
ggauggagaagaugagaaa

SEQ ID NO: 2385977 - RNA, 19 nt, Homo sapiens
  misc_RNA (1)...(19): siRNA sense strand
cagcaaagugacagugaaa

SEQ ID NO: 2385978 - RNA, 19 nt, Homo sapiens
  misc_RNA (1)...(19): siRNA sense strand
gagaagaaguugaaggagu

SEQ ID NO: 2385979 - RNA, 19 nt, Homo sapiens
  misc_RNA (1)...(19): siRNA sense strand
caacagagaugcuggccaa

SEQ ID NO: 2385980 - RNA, 19 nt, Homo sapiens
  misc_RNA (1)...(19): siRNA sense strand
gauagauggcaaugggaaa

SEQ ID NO: 2385981 - RNA, 19 nt, Homo sapiens
  misc_RNA (1)...(19): siRNA sense strand
acauaaagccagugcucaa

SEQ ID NO: 2385982 - RNA, 19 nt, Homo sapiens
  misc_RNA (1)...(19): siRNA sense strand
cgucauauaucgagaucuu

SEQ ID NO: 2385983 - RNA, 19 nt, Homo sapiens
  misc_RNA (1)...(19): siRNA sense strand
ucaucgagaaggagagaaa

SEQ ID NO: 2385984 - RNA, 19 nt, Homo sapiens
  misc_RNA (1)...(19): siRNA sense strand
cuauaaugcacaacagaua

SEQ ID NO: 2385985 - RNA, 19 nt, Homo sapiens
  misc_RNA (1)...(19): siRNA sense strand
gcuauuaccuggagagcga

SEQ ID NO: 2385986 - RNA, 19 nt, Homo sapiens
  misc_RNA (1)...(19): siRNA sense strand
agaaagaauucaugaacca

SEQ ID NO: 2385987 - RNA, 19 nt, Homo sapiens
  misc_RNA (1)...(19): siRNA sense strand
cuacagaucuggauggaga

SEQ ID NO: 2385988 - RNA, 19 nt, Homo sapiens
  misc_RNA (1)...(19): siRNA sense strand
aggagaaacugaaggagau

SEQ ID NO: 2385989 - RNA, 19 nt, Homo sapiens
  misc_RNA (1)...(19): siRNA sense strand
ggacaugaccacagguaca

SEQ ID NO: 2385990 - RNA, 19 nt, Homo sapiens
  misc_RNA (1)...(19): siRNA sense strand
gcgugaaggugaaagucaa

SEQ ID NO: 2385991 - RNA, 19 nt, Homo sapiens
  misc_RNA (1)...(19): siRNA sense strand
guacagaaucagaaaccaa

SEQ ID NO: 2385992 - RNA, 19 nt, Homo sapiens
  misc_RNA (1)...(19): siRNA sense strand
gggaacacccugacguaaa

SEQ ID NO: 2385993 - RNA, 19 nt, Homo sapiens
  misc_RNA (1)...(19): siRNA sense strand
guacagaucaugauggcaa

SEQ ID NO: 2385994 - RNA, 19 nt, Homo sapiens
  misc_RNA (1)...(19): siRNA sense strand
uggcaacuguggagagaau

SEQ ID NO: 2385995 - RNA, 19 nt, Homo sapiens
  misc_RNA (1)...(19): siRNA sense strand
ccucagucaucgagaguga

SEQ ID NO: 2385996 - RNA, 19 nt, Homo sapiens
  misc_RNA (1)...(19): siRNA sense strand
ccaauguaaugcauggaaa

SEQ ID NO: 2385997 - RNA, 19 nt, Homo sapiens
  misc_RNA (1)...(19): siRNA sense strand
cagcuauugucaaggcaaa

SEQ ID NO: 2385998 - RNA, 19 nt, Homo sapiens
  misc_RNA (1)...(19): siRNA sense strand
gagaagaugagaaagacaa

SEQ ID NO: 2385999 - RNA, 19 nt, Homo sapiens
  misc_RNA (1)...(19): siRNA sense strand
ucucaguaauauuggcaaa

SEQ ID NO: 2386000 - RNA, 19 nt, Homo sapiens
  misc_RNA (1)...(19): siRNA sense strand
ugaugaugcagaugagaaa

SEQ ID NO: 2386001 - RNA, 19 nt, Homo sapiens
  misc_RNA (1)...(19): siRNA sense strand
cgcaaagaguuguuggaau

SEQ ID NO: 2386002 - RNA, 19 nt, Homo sapiens
  misc_RNA (1)...(19): siRNA sense strand
agagggaacaacugagaaa

SEQ ID NO: 2386003 - RNA, 19 nt, Homo sapiens
  misc_RNA (1)...(19): siRNA sense strand
ucaucaaggagguggacaa

SEQ ID NO: 2386004 - RNA, 19 nt, Homo sapiens
  misc_RNA (1)...(19): siRNA sense strand
ugaagaagaagaugaagaa

SEQ ID NO: 2386005 - RNA, 19 nt, Homo sapiens
  misc_RNA (1)...(19): siRNA sense strand
gcuccaaagaagaugacua

SEQ ID NO: 2386006 - RNA, 19 nt, Homo sapiens
  misc_RNA (1)...(19): siRNA sense strand
cagaaaagccacaggauga

SEQ ID NO: 2386007 - RNA, 19 nt, Homo sapiens
  misc_RNA (1)...(19): siRNA sense strand
gggaggaauuacagaacca

SEQ ID NO: 2386008 - RNA, 19 nt, Homo sapiens
  misc_RNA (1)...(19): siRNA sense strand
ggagaaagauggugagacc

SEQ ID NO: 2386009 - RNA, 19 nt, Homo sapiens
  misc_RNA (1)...(19): siRNA sense strand
gcaaagugacagugaaaau

SEQ ID NO: 2386010 - RNA, 19 nt, Homo sapiens
  misc_RNA (1)...(19): siRNA sense strand
uggaacagcccaaggagaa

SEQ ID NO: 2386011 - RNA, 19 nt, Homo sapiens
  misc_RNA (1)...(19): siRNA sense strand
uggaaagguugcugacgaa

SEQ ID NO: 2386012 - RNA, 19 nt, Homo sapiens
  misc_RNA (1)...(19): siRNA sense strand
ggucugaggugaugaacca

SEQ ID NO: 2386013 - RNA, 19 nt, Homo sapiens
  misc_RNA (1)...(19): siRNA sense strand
uggagaugcuggaggacau

SEQ ID NO: 2386014 - RNA, 19 nt, Homo sapiens
  misc_RNA (1)...(19): siRNA sense strand
gagccagaguaauggucaa

SEQ ID NO: 2386015 - RNA, 19 nt, Homo sapiens
  misc_RNA (1)...(19): siRNA sense strand
gaacaagaaagcaaggaca

SEQ ID NO: 2386016 - RNA, 19 nt, Homo sapiens
  misc_RNA (1)...(19): siRNA sense strand
agaucuugguggagcgauu

SEQ ID NO: 2386017 - RNA, 19 nt, Homo sapiens
  misc_RNA (1)...(19): siRNA sense strand
gcaucaagaacaacagcaa

SEQ ID NO: 2386018 - RNA, 19 nt, Homo sapiens
  misc_RNA (1)...(19): siRNA sense strand
acaguuaggagaaaggaaa

SEQ ID NO: 2386019 - RNA, 19 nt, Homo sapiens
  misc_RNA (1)...(19): siRNA sense strand
ccaucaaagacuuacauua

SEQ ID NO: 2386020 - RNA, 19 nt, Homo sapiens
  misc_RNA (1)...(19): siRNA sense strand
uguugaaauaguagaggaa

SEQ ID NO: 2386021 - RNA, 19 nt, Homo sapiens
  misc_RNA (1)...(19): siRNA sense strand
ucaugaagccuguucgaaa

SEQ ID NO: 2386022 - RNA, 19 nt, Homo sapiens
  misc_RNA (1)...(19): siRNA sense strand
gagacaaggaugaugauga

SEQ ID NO: 2386023 - RNA, 19 nt, Homo sapiens
  misc_RNA (1)...(19): siRNA sense strand
auggagaagaugagaaaga

SEQ ID NO: 2386024 - RNA, 19 nt, Homo sapiens
  misc_RNA (1)...(19): siRNA sense strand
cugcacaucuacagaaauu

SEQ ID NO: 2386025 - RNA, 19 nt, Homo sapiens
  misc_RNA (1)...(19): siRNA sense strand
gcaucugcagggagggaua

SEQ ID NO: 2386026 - RNA, 19 nt, Homo sapiens
  misc_RNA (1)...(19): siRNA sense strand
gaguaauggucaaggccca

SEQ ID NO: 2386027 - RNA, 19 nt, Homo sapiens
  misc_RNA (1)...(19): siRNA sense strand
gagaaugugcggaugaauu

SEQ ID NO: 2386028 - RNA, 19 nt, Homo sapiens
  misc_RNA (1)...(19): siRNA sense strand
caugauagaugcuguaaaa

SEQ ID NO: 2386029 - RNA, 19 nt, Homo sapiens
  misc_RNA (1)...(19): siRNA sense strand
ggaaggaaccgcagaagca

SEQ ID NO: 2386030 - RNA, 19 nt, Homo sapiens
  misc_RNA (1)...(19): siRNA sense strand
ggagaagaugagaaagaca

SEQ ID NO: 2386031 - RNA, 19 nt, Homo sapiens
  misc_RNA (1)...(19): siRNA sense strand
cggaaguaccguucuguua

SEQ ID NO: 2386032 - RNA, 19 nt, Homo sapiens
  misc_RNA (1)...(19): siRNA sense strand
ggauagauggcaaugggaa

SEQ ID NO: 2386033 - RNA, 19 nt, Homo sapiens
  misc_RNA (1)...(19): siRNA sense strand
cuacagaugaagaagaaga

SEQ ID NO: 2386034 - RNA, 19 nt, Homo sapiens
  misc_RNA (1)...(19): siRNA sense strand
uggucaaacuggaaaugaa

SEQ ID NO: 2386035 - RNA, 19 nt, Homo sapiens
  misc_RNA (1)...(19): siRNA sense strand
gaaaagggcaucagggauu

SEQ ID NO: 2386036 - RNA, 19 nt, Homo sapiens
  misc_RNA (1)...(19): siRNA sense strand
ggagaaacugcaaggcuuu

SEQ ID NO: 2386037 - RNA, 19 nt, Homo sapiens
  misc_RNA (1)...(19): siRNA sense strand
aaacagaaggaauggauga

SEQ ID NO: 2386038 - RNA, 19 nt, Homo sapiens
  misc_RNA (1)...(19): siRNA sense strand
gggcaguacagcagcgaca

SEQ ID NO: 2386039 - RNA, 19 nt, Homo sapiens
  misc_RNA (1)...(19): siRNA sense strand
uggcugaaguuuacaagaa

SEQ ID NO: 2386040 - RNA, 19 nt, Homo sapiens
  misc_RNA (1)...(19): siRNA sense strand
ggcugaaguuuacaagaaa

SEQ ID NO: 2386041 - RNA, 19 nt, Homo sapiens
  misc_RNA (1)...(19): siRNA sense strand
agaugaagaagaagaugaa

SEQ ID NO: 2386042 - RNA, 19 nt, Homo sapiens
  misc_RNA (1)...(19): siRNA sense strand
gggaagaaagacagagaca

SEQ ID NO: 2386043 - RNA, 19 nt, Homo sapiens
  misc_RNA (1)...(19): siRNA sense strand
gguacagaguccagagaac

SEQ ID NO: 2386044 - RNA, 19 nt, Homo sapiens
  misc_RNA (1)...(19): siRNA sense strand
cugcaacagguuacagaaa

SEQ ID NO: 2386045 - RNA, 19 nt, Homo sapiens
  misc_RNA (1)...(19): siRNA sense strand
gagaaugacugcuggugca

SEQ ID NO: 2386046 - RNA, 19 nt, Homo sapiens
  misc_RNA (1)...(19): siRNA sense strand
gaacagagccacagcugca

SEQ ID NO: 2386047 - RNA, 19 nt, Homo sapiens
  misc_RNA (1)...(19): siRNA sense strand
cugaagagcaacaaguaca

SEQ ID NO: 2386048 - RNA, 19 nt, Homo sapiens
  misc_RNA (1)...(19): siRNA sense strand
cagaagaguuccaggcccu

SEQ ID NO: 2386049 - RNA, 19 nt, Homo sapiens
  misc_RNA (1)...(19): siRNA sense strand
cugacuucauggagcggua

SEQ ID NO: 2386050 - RNA, 19 nt, Homo sapiens
  misc_RNA (1)...(19): siRNA sense strand
gguacaggauuuauaggga

SEQ ID NO: 2386051 - RNA, 19 nt, Homo sapiens
  misc_RNA (1)...(19): siRNA sense strand
agacagacuugcaggaccu

SEQ ID NO: 2386052 - RNA, 19 nt, Homo sapiens
  misc_RNA (1)...(19): siRNA sense strand
ccuugcaggucuuuggcua

SEQ ID NO: 2386053 - RNA, 19 nt, Homo sapiens
  misc_RNA (1)...(19): siRNA sense strand
ccuacuucaucgacagaga

SEQ ID NO: 2386054 - RNA, 19 nt, Homo sapiens
  misc_RNA (1)...(19): siRNA sense strand
uugaagagucagaagaguu

SEQ ID NO: 2386055 - RNA, 19 nt, Homo sapiens
  misc_RNA (1)...(19): siRNA sense strand
cugggaagaaagacagaga

SEQ ID NO: 2386056 - RNA, 19 nt, Homo sapiens
  misc_RNA (1)...(19): siRNA sense strand
ggacuaucaccuuggggaa

SEQ ID NO: 2386057 - RNA, 19 nt, Homo sapiens
  misc_RNA (1)...(19): siRNA sense strand
gggaaaggacuaacgugga

SEQ ID NO: 2386058 - RNA, 19 nt, Homo sapiens
  misc_RNA (1)...(19): siRNA sense strand
uggaauaugagaccggcaa

SEQ ID NO: 2386059 - RNA, 19 nt, Homo sapiens
  misc_RNA (1)...(19): siRNA sense strand
ggagaagagucccugacca

SEQ ID NO: 2386060 - RNA, 19 nt, Homo sapiens
  misc_RNA (1)...(19): siRNA sense strand
uggccgagucccuggaaaa

SEQ ID NO: 2386061 - RNA, 19 nt, Homo sapiens
  misc_RNA (1)...(19): siRNA sense strand
ccaccuucccugaaugcaa

SEQ ID NO: 2386062 - RNA, 19 nt, Homo sapiens
  misc_RNA (1)...(19): siRNA sense strand
ccggcaguuugaagaguca

SEQ ID NO: 2386063 - RNA, 19 nt, Homo sapiens
  misc_RNA (1)...(19): siRNA sense strand
gccagaaagaggugggaaa

SEQ ID NO: 2386064 - RNA, 19 nt, Homo sapiens
  misc_RNA (1)...(19): siRNA sense strand
agaaagaggaggagccaga

SEQ ID NO: 2386065 - RNA, 19 nt, Homo sapiens
  misc_RNA (1)...(19): siRNA sense strand
ggagaaaggcugaggagcu

SEQ ID NO: 2386066 - RNA, 19 nt, Homo sapiens
  misc_RNA (1)...(19): siRNA sense strand
agacaagccuucagagcca

SEQ ID NO: 2386067 - RNA, 19 nt, Homo sapiens
  misc_RNA (1)...(19): siRNA sense strand
ggcauaagcugaagaggca

SEQ ID NO: 2386068 - RNA, 19 nt, Homo sapiens
  misc_RNA (1)...(19): siRNA sense strand
gugaggaugaggaggagua

SEQ ID NO: 2386069 - RNA, 19 nt, Homo sapiens
  misc_RNA (1)...(19): siRNA sense strand
cagaugaaccagaguccaa

SEQ ID NO: 2386070 - RNA, 19 nt, Homo sapiens
  misc_RNA (1)...(19): siRNA sense strand
gcugaaacagacucggaaa

SEQ ID NO: 2386071 - RNA, 19 nt, Homo sapiens
  misc_RNA (1)...(19): siRNA sense strand
ggaggaagcucgucggaac

SEQ ID NO: 2386072 - RNA, 19 nt, Homo sapiens
  misc_RNA (1)...(19): siRNA sense strand
ggaguaugagaguggauau

SEQ ID NO: 2386073 - RNA, 19 nt, Homo sapiens
  misc_RNA (1)...(19): siRNA sense strand
cccagauguuccagacuaa

SEQ ID NO: 2386074 - RNA, 19 nt, Homo sapiens
  misc_RNA (1)...(19): siRNA sense strand
gagugauggcacagaugaa

SEQ ID NO: 2386075 - RNA, 19 nt, Homo sapiens
  misc_RNA (1)...(19): siRNA sense strand
gcuggaagagggcgagaau

SEQ ID NO: 2386076 - RNA, 19 nt, Homo sapiens
  misc_RNA (1)...(19): siRNA sense strand
ccgauaucagaaugaauua

SEQ ID NO: 2386077 - RNA, 19 nt, Homo sapiens
  misc_RNA (1)...(19): siRNA sense strand
aacauuagccugaggaaca

SEQ ID NO: 2386078 - RNA, 19 nt, Homo sapiens
  misc_RNA (1)...(19): siRNA sense strand
cugaaacagacucggaaau

SEQ ID NO: 2386079 - RNA, 19 nt, Homo sapiens
  misc_RNA (1)...(19): siRNA sense strand
ggacagugaucgauggccu

SEQ ID NO: 2386080 - RNA, 19 nt, Homo sapiens
  misc_RNA (1)...(19): siRNA sense strand
ccagugaggaugaggagga

SEQ ID NO: 2386081 - RNA, 19 nt, Homo sapiens
  misc_RNA (1)...(19): siRNA sense strand
cagaaagaggugggaaaga

SEQ ID NO: 2386082 - RNA, 19 nt, Homo sapiens
  misc_RNA (1)...(19): siRNA sense strand
ccgaauggcacaggaggaa

SEQ ID NO: 2386083 - RNA, 19 nt, Homo sapiens
  misc_RNA (1)...(19): siRNA sense strand
aggaaccuguggagaaaga

SEQ ID NO: 2386084 - RNA, 19 nt, Homo sapiens
  misc_RNA (1)...(19): siRNA sense strand
gaaugaauuagcuggcgua

SEQ ID NO: 2386085 - RNA, 19 nt, Homo sapiens
  misc_RNA (1)...(19): siRNA sense strand
caguggacuaugggagaaa

SEQ ID NO: 2386086 - RNA, 19 nt, Homo sapiens
  misc_RNA (1)...(19): siRNA sense strand
acuauaauguggaagccau

SEQ ID NO: 2386087 - RNA, 19 nt, Homo sapiens
  misc_RNA (1)...(19): siRNA sense strand
gaaccagaguccaaggaac

SEQ ID NO: 2386088 - RNA, 19 nt, Homo sapiens
  misc_RNA (1)...(19): siRNA sense strand
cagccuggccagugaggau

SEQ ID NO: 2386089 - RNA, 19 nt, Homo sapiens
  misc_RNA (1)...(19): siRNA sense strand
guggaaggaaauugguuga

SEQ ID NO: 2386090 - RNA, 19 nt, Homo sapiens
  misc_RNA (1)...(19): siRNA sense strand
ccagaaaacauuagccuga

SEQ ID NO: 2386091 - RNA, 19 nt, Homo sapiens
  misc_RNA (1)...(19): siRNA sense strand
ccucagggaaggagaugga

SEQ ID NO: 2386092 - RNA, 19 nt, Homo sapiens
  misc_RNA (1)...(19): siRNA sense strand
auuaaaagguugcuaguga

SEQ ID NO: 2386093 - RNA, 19 nt, Homo sapiens
  misc_RNA (1)...(19): siRNA sense strand
ccucauaggaugcaagaag

SEQ ID NO: 2386094 - RNA, 19 nt, Homo sapiens
  misc_RNA (1)...(19): siRNA sense strand
acaagcaguggaaggaaau

SEQ ID NO: 2386095 - RNA, 19 nt, Homo sapiens
  misc_RNA (1)...(19): siRNA sense strand
acauacggcugcaggcuga

SEQ ID NO: 2386096 - RNA, 19 nt, Homo sapiens
  misc_RNA (1)...(19): siRNA sense strand
cuuggaagauauggaggaa

SEQ ID NO: 2386097 - RNA, 19 nt, Homo sapiens
  misc_RNA (1)...(19): siRNA sense strand
aggagcugcuguggagaaa

SEQ ID NO: 2386098 - RNA, 19 nt, Homo sapiens
  misc_RNA (1)...(19): siRNA sense strand
cugcuuaucaagaaguauu

SEQ ID NO: 2386099 - RNA, 19 nt, Homo sapiens
  misc_RNA (1)...(19): siRNA sense strand
gaggaagcucgucggaaca

SEQ ID NO: 2386100 - RNA, 19 nt, Homo sapiens
  misc_RNA (1)...(19): siRNA sense strand
cuaugaaguuauccagcuu

SEQ ID NO: 2386101 - RNA, 19 nt, Homo sapiens
  misc_RNA (1)...(19): siRNA sense strand
aggacauggcucuucguaa

SEQ ID NO: 2386102 - RNA, 19 nt, Homo sapiens
  misc_RNA (1)...(19): siRNA sense strand
cuguggagaaagaggagga

SEQ ID NO: 2386103 - RNA, 19 nt, Homo sapiens
  misc_RNA (1)...(19): siRNA sense strand
accuggaggcagaguuuaa

SEQ ID NO: 2386104 - RNA, 19 nt, Homo sapiens
  misc_RNA (1)...(19): siRNA sense strand
cagcgagcccgaagcaaaa

SEQ ID NO: 2386105 - RNA, 19 nt, Homo sapiens
  misc_RNA (1)...(19): siRNA sense strand
ggaaacugucuccuggcaa

SEQ ID NO: 2386106 - RNA, 19 nt, Homo sapiens
  misc_RNA (1)...(19): siRNA sense strand
ggagaaagaggaggagcca

SEQ ID NO: 2386107 - RNA, 19 nt, Homo sapiens
  misc_RNA (1)...(19): siRNA sense strand
gcuuuaacuuugacacgga

SEQ ID NO: 2386108 - RNA, 19 nt, Homo sapiens
  misc_RNA (1)...(19): siRNA sense strand
aggagucaguggugcgcau

SEQ ID NO: 2386109 - RNA, 19 nt, Homo sapiens
  misc_RNA (1)...(19): siRNA sense strand
acgccaguguggacaucaa

SEQ ID NO: 2386110 - RNA, 19 nt, Homo sapiens
  misc_RNA (1)...(19): siRNA sense strand
caaaagaacucuaagggaa

SEQ ID NO: 2386111 - RNA, 19 nt, Homo sapiens
  misc_RNA (1)...(19): siRNA sense strand
gcauaguagaggagagugu

SEQ ID NO: 2386112 - RNA, 19 nt, Homo sapiens
  misc_RNA (1)...(19): siRNA sense strand
ugauauggccugauggcaa

SEQ ID NO: 2386113 - RNA, 19 nt, Homo sapiens
  misc_RNA (1)...(19): siRNA sense strand
ggaagagagcucaaggaga

SEQ ID NO: 2386114 - RNA, 19 nt, Homo sapiens
  misc_RNA (1)...(19): siRNA sense strand
guuuggacgaagagaaauu

SEQ ID NO: 2386115 - RNA, 19 nt, Homo sapiens
  misc_RNA (1)...(19): siRNA sense strand
cauugauggcuuugaggaa

SEQ ID NO: 2386116 - RNA, 19 nt, Homo sapiens
  misc_RNA (1)...(19): siRNA sense strand
ugacagaugaacaggccaa

SEQ ID NO: 2386117 - RNA, 19 nt, Homo sapiens
  misc_RNA (1)...(19): siRNA sense strand
guggaaagcaagugguagu

SEQ ID NO: 2386118 - RNA, 19 nt, Homo sapiens
  misc_RNA (1)...(19): siRNA sense strand
agggagagucagaagauga

SEQ ID NO: 2386119 - RNA, 19 nt, Homo sapiens
  misc_RNA (1)...(19): siRNA sense strand
gagacaucgcccagggaca

SEQ ID NO: 2386120 - RNA, 19 nt, Homo sapiens
  misc_RNA (1)...(19): siRNA sense strand
gggacaagcagcaaaagaa

SEQ ID NO: 2386121 - RNA, 19 nt, Homo sapiens
  misc_RNA (1)...(19): siRNA sense strand
cuguacagguaacaagaau

SEQ ID NO: 2386122 - RNA, 19 nt, Homo sapiens
  misc_RNA (1)...(19): siRNA sense strand
cuuaaaaggacaacagaca

SEQ ID NO: 2386123 - RNA, 19 nt, Homo sapiens
  misc_RNA (1)...(19): siRNA sense strand
gggaaagggugcugugcug

SEQ ID NO: 2386124 - RNA, 19 nt, Homo sapiens
  misc_RNA (1)...(19): siRNA sense strand
auaguagaggagaguguua

SEQ ID NO: 2386125 - RNA, 19 nt, Homo sapiens
  misc_RNA (1)...(19): siRNA sense strand
gggcauaguagaggagagu

SEQ ID NO: 2386126 - RNA, 19 nt, Homo sapiens
  misc_RNA (1)...(19): siRNA sense strand
uugccuugauagagcuuua

SEQ ID NO: 2386127 - RNA, 19 nt, Homo sapiens
  misc_RNA (1)...(19): siRNA sense strand
uuaagaaaaucaagggcau

SEQ ID NO: 2386128 - RNA, 19 nt, Homo sapiens
  misc_RNA (1)...(19): siRNA sense strand
agaguuuggacgaagagaa

SEQ ID NO: 2386129 - RNA, 19 nt, Homo sapiens
  misc_RNA (1)...(19): siRNA sense strand
uaucgauagaugugugaau

SEQ ID NO: 2386130 - RNA, 19 nt, Homo sapiens
  misc_RNA (1)...(19): siRNA sense strand
gcuauggagagguggggaa

SEQ ID NO: 2386131 - RNA, 19 nt, Homo sapiens
  misc_RNA (1)...(19): siRNA sense strand
ccaaggugccugaggugga

SEQ ID NO: 2386132 - RNA, 19 nt, Homo sapiens
  misc_RNA (1)...(19): siRNA sense strand
cccaacauguuuaagaaaa

SEQ ID NO: 2386133 - RNA, 19 nt, Homo sapiens
  misc_RNA (1)...(19): siRNA sense strand
uugauggcuuugaggaaga

SEQ ID NO: 2386134 - RNA, 19 nt, Homo sapiens
  misc_RNA (1)...(19): siRNA sense strand
agugguagucuguggcuau

SEQ ID NO: 2386135 - RNA, 19 nt, Homo sapiens
  misc_RNA (1)...(19): siRNA sense strand
agaagcaagaauucaacaa

SEQ ID NO: 2386136 - RNA, 19 nt, Homo sapiens
  misc_RNA (1)...(19): siRNA sense strand
gugugaauguggagggcug

SEQ ID NO: 2386137 - RNA, 19 nt, Homo sapiens
  misc_RNA (1)...(19): siRNA sense strand
agaagauggaugaguaugu

SEQ ID NO: 2386138 - RNA, 19 nt, Homo sapiens
  misc_RNA (1)...(19): siRNA sense strand
gcuuugaggaagagagcuc

SEQ ID NO: 2386139 - RNA, 19 nt, Homo sapiens
  misc_RNA (1)...(19): siRNA sense strand
ggacauuguuauuaccugu

SEQ ID NO: 2386140 - RNA, 19 nt, Homo sapiens
  misc_RNA (1)...(19): siRNA sense strand
agauugacguggcgagucu

SEQ ID NO: 2386141 - RNA, 19 nt, Homo sapiens
  misc_RNA (1)...(19): siRNA sense strand
uuacaaugcuccugagggu

SEQ ID NO: 2386142 - RNA, 19 nt, Homo sapiens
  misc_RNA (1)...(19): siRNA sense strand
ccuggaagggagagucaga

SEQ ID NO: 2386143 - RNA, 19 nt, Homo sapiens
  misc_RNA (1)...(19): siRNA sense strand
ccugauggcaagaggauag

SEQ ID NO: 2386144 - RNA, 19 nt, Homo sapiens
  misc_RNA (1)...(19): siRNA sense strand
gagccaaaaucguggguug

SEQ ID NO: 2386145 - RNA, 19 nt, Homo sapiens
  misc_RNA (1)...(19): siRNA sense strand
cuacuguugccgugaauca

SEQ ID NO: 2386146 - RNA, 19 nt, Homo sapiens
  misc_RNA (1)...(19): siRNA sense strand
ggaaccaacuucagcgaca

SEQ ID NO: 2386147 - RNA, 19 nt, Homo sapiens
  misc_RNA (1)...(19): siRNA sense strand
cugaagaggaccugaacuu

SEQ ID NO: 2386148 - RNA, 19 nt, Homo sapiens
  misc_RNA (1)...(19): siRNA sense strand
acgauauggagaagggcaa

SEQ ID NO: 2386149 - RNA, 19 nt, Homo sapiens
  misc_RNA (1)...(19): siRNA sense strand
ggagaagcugaaagggaga

SEQ ID NO: 2386150 - RNA, 19 nt, Homo sapiens
  misc_RNA (1)...(19): siRNA sense strand
uauaaauacaacugggaca

SEQ ID NO: 2386151 - RNA, 19 nt, Homo sapiens
  misc_RNA (1)...(19): siRNA sense strand
agaaagaggaggaccuaca

SEQ ID NO: 2386152 - RNA, 19 nt, Homo sapiens
  misc_RNA (1)...(19): siRNA sense strand
aaguaaagucccaagugaa

SEQ ID NO: 2386153 - RNA, 19 nt, Homo sapiens
  misc_RNA (1)...(19): siRNA sense strand
uaguagagaaagaggagga

SEQ ID NO: 2386154 - RNA, 19 nt, Homo sapiens
  misc_RNA (1)...(19): siRNA sense strand
gggauuuaauggagaagcu

SEQ ID NO: 2386155 - RNA, 19 nt, Homo sapiens
  misc_RNA (1)...(19): siRNA sense strand
cugcugaagcuuugcaaaa

SEQ ID NO: 2386156 - RNA, 19 nt, Homo sapiens
  misc_RNA (1)...(19): siRNA sense strand
uauccacguaguagagaaa

SEQ ID NO: 2386157 - RNA, 19 nt, Homo sapiens
  misc_RNA (1)...(19): siRNA sense strand
agggagaaccagccgaauu

SEQ ID NO: 2386158 - RNA, 19 nt, Homo sapiens
  misc_RNA (1)...(19): siRNA sense strand
ggagaagaguggugcuggu

SEQ ID NO: 2386159 - RNA, 19 nt, Homo sapiens
  misc_RNA (1)...(19): siRNA sense strand
uucaauuaguggagacaca

SEQ ID NO: 2386160 - RNA, 19 nt, Homo sapiens
  misc_RNA (1)...(19): siRNA sense strand
agccaggagcugugucaua

SEQ ID NO: 2386161 - RNA, 19 nt, Homo sapiens
  misc_RNA (1)...(19): siRNA sense strand
aguggaauucgcugggcaa

SEQ ID NO: 2386162 - RNA, 19 nt, Homo sapiens
  misc_RNA (1)...(19): siRNA sense strand
cauuaaagccugacgacag

SEQ ID NO: 2386163 - RNA, 19 nt, Homo sapiens
  misc_RNA (1)...(19): siRNA sense strand
uggucuacgauauggagaa

SEQ ID NO: 2386164 - RNA, 19 nt, Homo sapiens
  misc_RNA (1)...(19): siRNA sense strand
auuuaauggagaagcugaa

SEQ ID NO: 2386165 - RNA, 19 nt, Homo sapiens
  misc_RNA (1)...(19): siRNA sense strand
aauacaacugggacauuaa

SEQ ID NO: 2386166 - RNA, 19 nt, Homo sapiens
  misc_RNA (1)...(19): siRNA sense strand
uccacguaguagagaaaga

SEQ ID NO: 2386167 - RNA, 19 nt, Homo sapiens
  misc_RNA (1)...(19): siRNA sense strand
uagagaaagaggaggaccu

SEQ ID NO: 2386168 - RNA, 19 nt, Homo sapiens
  misc_RNA (1)...(19): siRNA sense strand
uugcaguguccuugaccaa

SEQ ID NO: 2386169 - RNA, 19 nt, Homo sapiens
  misc_RNA (1)...(19): siRNA sense strand
uuugcucacugcagagaaa

SEQ ID NO: 2386170 - RNA, 19 nt, Homo sapiens
  misc_RNA (1)...(19): siRNA sense strand
auggagaagcugaaaggga

SEQ ID NO: 2386171 - RNA, 19 nt, Homo sapiens
  misc_RNA (1)...(19): siRNA sense strand
gauuacaauguguggagca

SEQ ID NO: 2386172 - RNA, 19 nt, Homo sapiens
  misc_RNA (1)...(19): siRNA sense strand
guaugagcuugcaggagga

SEQ ID NO: 2386173 - RNA, 19 nt, Homo sapiens
  misc_RNA (1)...(19): siRNA sense strand
gacugagagccgcuggaaa

SEQ ID NO: 2386174 - RNA, 19 nt, Homo sapiens
  misc_RNA (1)...(19): siRNA sense strand
cuaugaaagccguggcaaa

SEQ ID NO: 2386175 - RNA, 19 nt, Homo sapiens
  misc_RNA (1)...(19): siRNA sense strand
agaucuagacucuggaaua

SEQ ID NO: 2386176 - RNA, 19 nt, Homo sapiens
  misc_RNA (1)...(19): siRNA sense strand
ggaauaaugaggaggccau

SEQ ID NO: 2386177 - RNA, 19 nt, Homo sapiens
  misc_RNA (1)...(19): siRNA sense strand
aaacaauacaagagagcca

SEQ ID NO: 2386178 - RNA, 19 nt, Homo sapiens
  misc_RNA (1)...(19): siRNA sense strand
cuaaaggagcugauagaca

SEQ ID NO: 2386179 - RNA, 19 nt, Homo sapiens
  misc_RNA (1)...(19): siRNA sense strand
auacaaugagggaggaaaa

SEQ ID NO: 2386180 - RNA, 19 nt, Homo sapiens
  misc_RNA (1)...(19): siRNA sense strand
gccuaaaggagcugauaga

SEQ ID NO: 2386181 - RNA, 19 nt, Homo sapiens
  misc_RNA (1)...(19): siRNA sense strand
agacacagcuucuggagca

SEQ ID NO: 2386182 - RNA, 19 nt, Homo sapiens
  misc_RNA (1)...(19): siRNA sense strand
guaccaaacucuggagcau

SEQ ID NO: 2386183 - RNA, 19 nt, Homo sapiens
  misc_RNA (1)...(19): siRNA sense strand
ccacagaguuaaugagagc

SEQ ID NO: 2386184 - RNA, 19 nt, Homo sapiens
  misc_RNA (1)...(19): siRNA sense strand
uggagauugaugaggagaa

SEQ ID NO: 2386185 - RNA, 19 nt, Homo sapiens
  misc_RNA (1)...(19): siRNA sense strand
cuggagggaugcagaugaa

SEQ ID NO: 2386186 - RNA, 19 nt, Homo sapiens
  misc_RNA (1)...(19): siRNA sense strand
gcacggacucugaagcaau

SEQ ID NO: 2386187 - RNA, 19 nt, Homo sapiens
  misc_RNA (1)...(19): siRNA sense strand
agugauguccacagagcaa

SEQ ID NO: 2386188 - RNA, 19 nt, Homo sapiens
  misc_RNA (1)...(19): siRNA sense strand
ugagaagaucccagggcau

SEQ ID NO: 2386189 - RNA, 19 nt, Homo sapiens
  misc_RNA (1)...(19): siRNA sense strand
aaucaaagccacagacucu

SEQ ID NO: 2386190 - RNA, 19 nt, Homo sapiens
  misc_RNA (1)...(19): siRNA sense strand
gcucaugcucuguggagga

SEQ ID NO: 2386191 - RNA, 19 nt, Homo sapiens
  misc_RNA (1)...(19): siRNA sense strand
augaagacaccgaagcaau

SEQ ID NO: 2386192 - RNA, 19 nt, Homo sapiens
  misc_RNA (1)...(19): siRNA sense strand
gccacagacucuagaggga

SEQ ID NO: 2386193 - RNA, 19 nt, Homo sapiens
  misc_RNA (1)...(19): siRNA sense strand
ggccaaaacuucuggagca

SEQ ID NO: 2386194 - RNA, 19 nt, Homo sapiens
  misc_RNA (1)...(19): siRNA sense strand
gcuguuaaugagagacaca

SEQ ID NO: 2386195 - RNA, 19 nt, Homo sapiens
  misc_RNA (1)...(19): siRNA sense strand
agccuuagauucuggaaca

SEQ ID NO: 2386196 - RNA, 19 nt, Homo sapiens
  misc_RNA (1)...(19): siRNA sense strand
ccacgcuguuaaugagaga

SEQ ID NO: 2386197 - RNA, 19 nt, Homo sapiens
  misc_RNA (1)...(19): siRNA sense strand
acauauguccacugcacaa

SEQ ID NO: 2386198 - RNA, 19 nt, Homo sapiens
  misc_RNA (1)...(19): siRNA sense strand
agauggagauugaugagga

SEQ ID NO: 2386199 - RNA, 19 nt, Homo sapiens
  misc_RNA (1)...(19): siRNA sense strand
uugaugaggagaagcaaau

SEQ ID NO: 2386200 - RNA, 19 nt, Homo sapiens
  misc_RNA (1)...(19): siRNA sense strand
ggaggaagagauggagauu

SEQ ID NO: 2386201 - RNA, 19 nt, Homo sapiens
  misc_RNA (1)...(19): siRNA sense strand
ggugguucaucuugcaaau

SEQ ID NO: 2386202 - RNA, 19 nt, Homo sapiens
  misc_RNA (1)...(19): siRNA sense strand
gcaaauuacagaugaagac

SEQ ID NO: 2386203 - RNA, 19 nt, Homo sapiens
  misc_RNA (1)...(19): siRNA sense strand
acauauaccgugucuggaa

SEQ ID NO: 2386204 - RNA, 19 nt, Homo sapiens
  misc_RNA (1)...(19): siRNA sense strand
gggcauauaugacucccua

SEQ ID NO: 2386205 - RNA, 19 nt, Homo sapiens
  misc_RNA (1)...(19): siRNA sense strand
gcagcagagaggugguuca

SEQ ID NO: 2386206 - RNA, 19 nt, Homo sapiens
  misc_RNA (1)...(19): siRNA sense strand
aaacaauguccaugccaca

SEQ ID NO: 2386207 - RNA, 19 nt, Homo sapiens
  misc_RNA (1)...(19): siRNA sense strand
cagcacagaugaaagccau

SEQ ID NO: 2386208 - RNA, 19 nt, Homo sapiens
  misc_RNA (1)...(19): siRNA sense strand
aggaaaauguugagcccca

SEQ ID NO: 2386209 - RNA, 19 nt, Homo sapiens
  misc_RNA (1)...(19): siRNA sense strand
uggaggaagagauggagau

SEQ ID NO: 2386210 - RNA, 19 nt, Homo sapiens
  misc_RNA (1)...(19): siRNA sense strand
ugcaaauggagguaggaga

SEQ ID NO: 2386211 - RNA, 19 nt, Homo sapiens
  misc_RNA (1)...(19): siRNA sense strand
gcuguuacuaccugaaaga

SEQ ID NO: 2386212 - RNA, 19 nt, Homo sapiens
  misc_RNA (1)...(19): siRNA sense strand
gagauaucaccauuggcaa

SEQ ID NO: 2386213 - RNA, 19 nt, Homo sapiens
  misc_RNA (1)...(19): siRNA sense strand
gcuucagccucuggacaua

SEQ ID NO: 2386214 - RNA, 19 nt, Homo sapiens
  misc_RNA (1)...(19): siRNA sense strand
agauugaugaggagaagca

SEQ ID NO: 2386215 - RNA, 19 nt, Homo sapiens
  misc_RNA (1)...(19): siRNA sense strand
gauaugaauccuggaguga

SEQ ID NO: 2386216 - RNA, 19 nt, Homo sapiens
  misc_RNA (1)...(19): siRNA sense strand
cgauguucacggagaaaau

SEQ ID NO: 2386217 - RNA, 19 nt, Homo sapiens
  misc_RNA (1)...(19): siRNA sense strand
auugaugaggagaagcaaa

SEQ ID NO: 2386218 - RNA, 19 nt, Homo sapiens
  misc_RNA (1)...(19): siRNA sense strand
cgauucaacaauacaauga

SEQ ID NO: 2386219 - RNA, 19 nt, Homo sapiens
  misc_RNA (1)...(19): siRNA sense strand
gagccacagccucuggaaa

SEQ ID NO: 2386220 - RNA, 19 nt, Homo sapiens
  misc_RNA (1)...(19): siRNA sense strand
agcucaagacccaggagua

SEQ ID NO: 2386221 - RNA, 19 nt, Homo sapiens
  misc_RNA (1)...(19): siRNA sense strand
gccaaaacuucuggagcaa

SEQ ID NO: 2386222 - RNA, 19 nt, Homo sapiens
  misc_RNA (1)...(19): siRNA sense strand
caauacaaugagggaggaa

SEQ ID NO: 2386223 - RNA, 19 nt, Homo sapiens
  misc_RNA (1)...(19): siRNA sense strand
acaccgaagcaauguccaa

SEQ ID NO: 2386224 - RNA, 19 nt, Homo sapiens
  misc_RNA (1)...(19): siRNA sense strand
acagaguuaaugagagcuu

SEQ ID NO: 2386225 - RNA, 19 nt, Homo sapiens
  misc_RNA (1)...(19): siRNA sense strand
cagcuaagccugaggguga

SEQ ID NO: 2386226 - RNA, 19 nt, Homo sapiens
  misc_RNA (1)...(19): siRNA sense strand
ggaagaaggcccagcguga

SEQ ID NO: 2386227 - RNA, 19 nt, Homo sapiens
  misc_RNA (1)...(19): siRNA sense strand
ggacagagcucaugcagga

SEQ ID NO: 2386228 - RNA, 19 nt, Homo sapiens
  misc_RNA (1)...(19): siRNA sense strand
agcaagaggcagagaacaa

SEQ ID NO: 2386229 - RNA, 19 nt, Homo sapiens
  misc_RNA (1)...(19): siRNA sense strand
aguuagaugaggagaagaa

SEQ ID NO: 2386230 - RNA, 19 nt, Homo sapiens
  misc_RNA (1)...(19): siRNA sense strand
cuggaggauuauaaggaaa

SEQ ID NO: 2386231 - RNA, 19 nt, Homo sapiens
  misc_RNA (1)...(19): siRNA sense strand
uggaugaagaggugaagaa

SEQ ID NO: 2386232 - RNA, 19 nt, Homo sapiens
  misc_RNA (1)...(19): siRNA sense strand
cagaguuagaugaggagaa

SEQ ID NO: 2386233 - RNA, 19 nt, Homo sapiens
  misc_RNA (1)...(19): siRNA sense strand
aggcugagcuggaggagca

SEQ ID NO: 2386234 - RNA, 19 nt, Homo sapiens
  misc_RNA (1)...(19): siRNA sense strand
acaaagagcuacuggccca

SEQ ID NO: 2386235 - RNA, 19 nt, Homo sapiens
  misc_RNA (1)...(19): siRNA sense strand
aaacagaguuagaugagga

SEQ ID NO: 2386236 - RNA, 19 nt, Homo sapiens
  misc_RNA (1)...(19): siRNA sense strand
cagcaguaccagcgagaca

SEQ ID NO: 2386237 - RNA, 19 nt, Homo sapiens
  misc_RNA (1)...(19): siRNA sense strand
gggcauuggcagaguaugu

SEQ ID NO: 2386238 - RNA, 19 nt, Homo sapiens
  misc_RNA (1)...(19): siRNA sense strand
gcucaacaguggggagaaa

SEQ ID NO: 2386239 - RNA, 19 nt, Homo sapiens
  misc_RNA (1)...(19): siRNA sense strand
ccuaguaacagaagcaaca

SEQ ID NO: 2386240 - RNA, 19 nt, Homo sapiens
  misc_RNA (1)...(19): siRNA sense strand
ggcuggaggcagagaaaca

SEQ ID NO: 2386241 - RNA, 19 nt, Homo sapiens
  misc_RNA (1)...(19): siRNA sense strand
gcgcaaagcuucccgcuca

SEQ ID NO: 2386242 - RNA, 19 nt, Homo sapiens
  misc_RNA (1)...(19): siRNA sense strand
gggccuacuggaauggaaa

SEQ ID NO: 2386243 - RNA, 19 nt, Homo sapiens
  misc_RNA (1)...(19): siRNA sense strand
aggcuaagaugguggccga

SEQ ID NO: 2386244 - RNA, 19 nt, Homo sapiens
  misc_RNA (1)...(19): siRNA sense strand
guuuggugcuggagaagau

SEQ ID NO: 2386245 - RNA, 19 nt, Homo sapiens
  misc_RNA (1)...(19): siRNA sense strand
cugaaggaccuguuagaga

SEQ ID NO: 2386246 - RNA, 19 nt, Homo sapiens
  misc_RNA (1)...(19): siRNA sense strand
aggcagaacggcagagcca

SEQ ID NO: 2386247 - RNA, 19 nt, Homo sapiens
  misc_RNA (1)...(19): siRNA sense strand
gcggcuggaggcagagaaa

SEQ ID NO: 2386248 - RNA, 19 nt, Homo sapiens
  misc_RNA (1)...(19): siRNA sense strand
ccuuggagagacagaacaa

SEQ ID NO: 2386249 - RNA, 19 nt, Homo sapiens
  misc_RNA (1)...(19): siRNA sense strand
augaagcagaagaggaaau

SEQ ID NO: 2386250 - RNA, 19 nt, Homo sapiens
  misc_RNA (1)...(19): siRNA sense strand
uggaagaggagcuuggaga

SEQ ID NO: 2386251 - RNA, 19 nt, Homo sapiens
  misc_RNA (1)...(19): siRNA sense strand
gggagacccaggaggaaaa

SEQ ID NO: 2386252 - RNA, 19 nt, Homo sapiens
  misc_RNA (1)...(19): siRNA sense strand
aggagcagcaugaggucaa

SEQ ID NO: 2386253 - RNA, 19 nt, Homo sapiens
  misc_RNA (1)...(19): siRNA sense strand
cgggagacccaggaggaaa

SEQ ID NO: 2386254 - RNA, 19 nt, Homo sapiens
  misc_RNA (1)...(19): siRNA sense strand
gcagagaacaagaagcguu

SEQ ID NO: 2386255 - RNA, 19 nt, Homo sapiens
  misc_RNA (1)...(19): siRNA sense strand
gcacaaaauaugacaacca

SEQ ID NO: 2386256 - RNA, 19 nt, Homo sapiens
  misc_RNA (1)...(19): siRNA sense strand
gagacagggcauuggcaga

SEQ ID NO: 2386257 - RNA, 19 nt, Homo sapiens
  misc_RNA (1)...(19): siRNA sense strand
uggagaaggaggagaugga

SEQ ID NO: 2386258 - RNA, 19 nt, Homo sapiens
  misc_RNA (1)...(19): siRNA sense strand
aagaggaaauugagcgacu

SEQ ID NO: 2386259 - RNA, 19 nt, Homo sapiens
  misc_RNA (1)...(19): siRNA sense strand
agaagaacaaggaggaucu

SEQ ID NO: 2386260 - RNA, 19 nt, Homo sapiens
  misc_RNA (1)...(19): siRNA sense strand
aggaggagauggaagagga

SEQ ID NO: 2386261 - RNA, 19 nt, Homo sapiens
  misc_RNA (1)...(19): siRNA sense strand
gagacgacgcuucgggaga

SEQ ID NO: 2386262 - RNA, 19 nt, Homo sapiens
  misc_RNA (1)...(19): siRNA sense strand
gcuaaggaugcaagagcca

SEQ ID NO: 2386263 - RNA, 19 nt, Homo sapiens
  misc_RNA (1)...(19): siRNA sense strand
augcagugcuggaggccga

SEQ ID NO: 2386264 - RNA, 19 nt, Homo sapiens
  misc_RNA (1)...(19): siRNA sense strand
gaaaaguggaggagcuaca

SEQ ID NO: 2386265 - RNA, 19 nt, Homo sapiens
  misc_RNA (1)...(19): siRNA sense strand
gugaccaggagguggaaca

SEQ ID NO: 2386266 - RNA, 19 nt, Homo sapiens
  misc_RNA (1)...(19): siRNA sense strand
cgagcuagugcuggagaua

SEQ ID NO: 2386267 - RNA, 19 nt, Homo sapiens
  misc_RNA (1)...(19): siRNA sense strand
cacuggaccucuagcacaa

SEQ ID NO: 2386268 - RNA, 19 nt, Homo sapiens
  misc_RNA (1)...(19): siRNA sense strand
agggagggaagcucagaaa

SEQ ID NO: 2386269 - RNA, 19 nt, Homo sapiens
  misc_RNA (1)...(19): siRNA sense strand
agaugguggccgaggcaga

SEQ ID NO: 2386270 - RNA, 19 nt, Homo sapiens
  misc_RNA (1)...(19): siRNA sense strand
ggcuggagcaagaggcaga

SEQ ID NO: 2386271 - RNA, 19 nt, Homo sapiens
  misc_RNA (1)...(19): siRNA sense strand
ggcagaagcuagagccauc

SEQ ID NO: 2386272 - RNA, 19 nt, Homo sapiens
  misc_RNA (1)...(19): siRNA sense strand
agaagaggaaauugagcga

SEQ ID NO: 2386273 - RNA, 19 nt, Homo sapiens
  misc_RNA (1)...(19): siRNA sense strand
ccggcuggacaaagagcua

SEQ ID NO: 2386274 - RNA, 19 nt, Homo sapiens
  misc_RNA (1)...(19): siRNA sense strand
agauugaagacgagcggca

SEQ ID NO: 2386275 - RNA, 19 nt, Homo sapiens
  misc_RNA (1)...(19): siRNA sense strand
cagcgcaaacggagcaaga

SEQ ID NO: 2386276 - RNA, 19 nt, Homo sapiens
  misc_RNA (1)...(19): siRNA sense strand
agauagaggucuugcagag

SEQ ID NO: 2386277 - RNA, 19 nt, Homo sapiens
  misc_RNA (1)...(19): siRNA sense strand
gggaccgggaguuggagaa

SEQ ID NO: 2386278 - RNA, 19 nt, Homo sapiens
  misc_RNA (1)...(19): siRNA sense strand
cuggacggccugaggaaga

SEQ ID NO: 2386279 - RNA, 19 nt, Homo sapiens
  misc_RNA (1)...(19): siRNA sense strand
cugaacaaggaguuggaga

SEQ ID NO: 2386280 - RNA, 19 nt, Homo sapiens
  misc_RNA (1)...(19): siRNA sense strand
ggagcaagaggcagagaac

SEQ ID NO: 2386281 - RNA, 19 nt, Homo sapiens
  misc_RNA (1)...(19): siRNA sense strand
gauccuaguaacagaagca

SEQ ID NO: 2386282 - RNA, 19 nt, Homo sapiens
  misc_RNA (1)...(19): siRNA sense strand
uggaggauuauaaggaaaa

SEQ ID NO: 2386283 - RNA, 19 nt, Homo sapiens
  misc_RNA (1)...(19): siRNA sense strand
acggcuggaaacagaguua

SEQ ID NO: 2386284 - RNA, 19 nt, Homo sapiens
  misc_RNA (1)...(19): siRNA sense strand
agggaagcucagaaaguga

SEQ ID NO: 2386285 - RNA, 19 nt, Homo sapiens
  misc_RNA (1)...(19): siRNA sense strand
ggaagcucagaaagugaaa

SEQ ID NO: 2386286 - RNA, 19 nt, Homo sapiens
  misc_RNA (1)...(19): siRNA sense strand
cugaagacccgguuggcca

SEQ ID NO: 2386287 - RNA, 19 nt, Homo sapiens
  misc_RNA (1)...(19): siRNA sense strand
aucgaaaacuggagcggaa

SEQ ID NO: 2386288 - RNA, 19 nt, Homo sapiens
  misc_RNA (1)...(19): siRNA sense strand
agguggaggagcagcauga

SEQ ID NO: 2386289 - RNA, 19 nt, Homo sapiens
  misc_RNA (1)...(19): siRNA sense strand
agugaguggugcagagaug

SEQ ID NO: 2386290 - RNA, 19 nt, Homo sapiens
  misc_RNA (1)...(19): siRNA sense strand
ccucauagcuuccgggaga

SEQ ID NO: 2386291 - RNA, 19 nt, Homo sapiens
  misc_RNA (1)...(19): siRNA sense strand
aggagagggcagaggguau

SEQ ID NO: 2386292 - RNA, 19 nt, Homo sapiens
  misc_RNA (1)...(19): siRNA sense strand
guacuauacugcaagggaa

SEQ ID NO: 2386293 - RNA, 19 nt, Homo sapiens
  misc_RNA (1)...(19): siRNA sense strand
gcaagggaaacaagggcaa

SEQ ID NO: 2386294 - RNA, 19 nt, Homo sapiens
  misc_RNA (1)...(19): siRNA sense strand
gcauagagcaccugggauc

SEQ ID NO: 2386295 - RNA, 19 nt, Homo sapiens
  misc_RNA (1)...(19): siRNA sense strand
cugcaaagccauggagaca

SEQ ID NO: 2386296 - RNA, 19 nt, Homo sapiens
  misc_RNA (1)...(19): siRNA sense strand
ccaaaguucuacugggcca

SEQ ID NO: 2386297 - RNA, 19 nt, Homo sapiens
  misc_RNA (1)...(19): siRNA sense strand
gggagaagguuuuccggaa

SEQ ID NO: 2386298 - RNA, 19 nt, Homo sapiens
  misc_RNA (1)...(19): siRNA sense strand
gggcaagugaggcuggcaa

SEQ ID NO: 2386299 - RNA, 19 nt, Homo sapiens
  misc_RNA (1)...(19): siRNA sense strand
ccuacaugcacuacagcaa

SEQ ID NO: 2386300 - RNA, 19 nt, Homo sapiens
  misc_RNA (1)...(19): siRNA sense strand
gggugaagaucaagggcug

SEQ ID NO: 2386301 - RNA, 19 nt, Homo sapiens
  misc_RNA (1)...(19): siRNA sense strand
uacuauacugcaagggaaa

SEQ ID NO: 2386302 - RNA, 19 nt, Homo sapiens
  misc_RNA (1)...(19): siRNA sense strand
ccaccaaaucucugaacca

SEQ ID NO: 2386303 - RNA, 19 nt, Homo sapiens
  misc_RNA (1)...(19): siRNA sense strand
gcuggagaagggugggcaa

SEQ ID NO: 2386304 - RNA, 19 nt, Homo sapiens
  misc_RNA (1)...(19): siRNA sense strand
acagaaaaugugaagcaaa

SEQ ID NO: 2386305 - RNA, 19 nt, Homo sapiens
  misc_RNA (1)...(19): siRNA sense strand
ccguggaguugcggcgaaa

SEQ ID NO: 2386306 - RNA, 19 nt, Homo sapiens
  misc_RNA (1)...(19): siRNA sense strand
caacaugagcacagcggca

SEQ ID NO: 2386307 - RNA, 19 nt, Homo sapiens
  misc_RNA (1)...(19): siRNA sense strand
acucuuaccaugcggaaau

SEQ ID NO: 2386308 - RNA, 19 nt, Homo sapiens
  misc_RNA (1)...(19): siRNA sense strand
uugcagagcuugacccaga

SEQ ID NO: 2386309 - RNA, 19 nt, Homo sapiens
  misc_RNA (1)...(19): siRNA sense strand
ccacaaucuaggaagcuga

SEQ ID NO: 2386310 - RNA, 19 nt, Homo sapiens
  misc_RNA (1)...(19): siRNA sense strand
ccaaggagcuuaugggcug

SEQ ID NO: 2386311 - RNA, 19 nt, Homo sapiens
  misc_RNA (1)...(19): siRNA sense strand
acccaaggcaggcgaggaa

SEQ ID NO: 2386312 - RNA, 19 nt, Homo sapiens
  misc_RNA (1)...(19): siRNA sense strand
cagcuauggaggagcaguu

SEQ ID NO: 2386313 - RNA, 19 nt, Homo sapiens
  misc_RNA (1)...(19): siRNA sense strand
ccacagaacugcagcccuc

SEQ ID NO: 2386314 - RNA, 19 nt, Homo sapiens
  misc_RNA (1)...(19): siRNA sense strand
acaagagagccaaagcaau

SEQ ID NO: 2386315 - RNA, 19 nt, Homo sapiens
  misc_RNA (1)...(19): siRNA sense strand
gggacaaguaccugcucuu

SEQ ID NO: 2386316 - RNA, 19 nt, Homo sapiens
  misc_RNA (1)...(19): siRNA sense strand
cuacaacaccacugagcca

SEQ ID NO: 2386317 - RNA, 19 nt, Homo sapiens
  misc_RNA (1)...(19): siRNA sense strand
gcaguccaguccagggcaa

SEQ ID NO: 2386318 - RNA, 19 nt, Homo sapiens
  misc_RNA (1)...(19): siRNA sense strand
gaucaaaggcagcacucca

SEQ ID NO: 2386319 - RNA, 19 nt, Homo sapiens
  misc_RNA (1)...(19): siRNA sense strand
ccuacacaagagagccaaa

SEQ ID NO: 2386320 - RNA, 19 nt, Homo sapiens
  misc_RNA (1)...(19): siRNA sense strand
ggcauuacacugacggaca

SEQ ID NO: 2386321 - RNA, 19 nt, Homo sapiens
  misc_RNA (1)...(19): siRNA sense strand
cggaagaaaccuccagucu

SEQ ID NO: 2386322 - RNA, 19 nt, Homo sapiens
  misc_RNA (1)...(19): siRNA sense strand
cggaaauucugcgaggaca

SEQ ID NO: 2386323 - RNA, 19 nt, Homo sapiens
  misc_RNA (1)...(19): siRNA sense strand
ccgagaagaucaaaggcag

SEQ ID NO: 2386324 - RNA, 19 nt, Homo sapiens
  misc_RNA (1)...(19): siRNA sense strand
ccucauagcuuccgggaga

SEQ ID NO: 2386325 - RNA, 19 nt, Homo sapiens
  misc_RNA (1)...(19): siRNA sense strand
aggagagggcagaggguau

SEQ ID NO: 2386326 - RNA, 19 nt, Homo sapiens
  misc_RNA (1)...(19): siRNA sense strand
guacuauacugcaagggaa

SEQ ID NO: 2386327 - RNA, 19 nt, Homo sapiens
  misc_RNA (1)...(19): siRNA sense strand
gcaagggaaacaagggcaa

SEQ ID NO: 2386328 - RNA, 19 nt, Homo sapiens
  misc_RNA (1)...(19): siRNA sense strand
gcauagagcaccugggauc

SEQ ID NO: 2386329 - RNA, 19 nt, Homo sapiens
  misc_RNA (1)...(19): siRNA sense strand
cugcaaagccauggagaca

SEQ ID NO: 2386330 - RNA, 19 nt, Homo sapiens
  misc_RNA (1)...(19): siRNA sense strand
ccaaaguucuacugggcca

SEQ ID NO: 2386331 - RNA, 19 nt, Homo sapiens
  misc_RNA (1)...(19): siRNA sense strand
gggagaagguuuuccggaa

SEQ ID NO: 2386332 - RNA, 19 nt, Homo sapiens
  misc_RNA (1)...(19): siRNA sense strand
gggcaagugaggcuggcaa

SEQ ID NO: 2386333 - RNA, 19 nt, Homo sapiens
  misc_RNA (1)...(19): siRNA sense strand
ccuacaugcacuacagcaa

SEQ ID NO: 2386334 - RNA, 19 nt, Homo sapiens
  misc_RNA (1)...(19): siRNA sense strand
gggugaagaucaagggcug

SEQ ID NO: 2386335 - RNA, 19 nt, Homo sapiens
  misc_RNA (1)...(19): siRNA sense strand
uacuauacugcaagggaaa

SEQ ID NO: 2386336 - RNA, 19 nt, Homo sapiens
  misc_RNA (1)...(19): siRNA sense strand
ccaccaaaucucugaacca

SEQ ID NO: 2386337 - RNA, 19 nt, Homo sapiens
  misc_RNA (1)...(19): siRNA sense strand
gcuggagaagggugggcaa

SEQ ID NO: 2386338 - RNA, 19 nt, Homo sapiens
  misc_RNA (1)...(19): siRNA sense strand
acagaaaaugugaagcaaa

SEQ ID NO: 2386339 - RNA, 19 nt, Homo sapiens
  misc_RNA (1)...(19): siRNA sense strand
ccguggaguugcggcgaaa

SEQ ID NO: 2386340 - RNA, 19 nt, Homo sapiens
  misc_RNA (1)...(19): siRNA sense strand
caacaugagcacagcggca

SEQ ID NO: 2386341 - RNA, 19 nt, Homo sapiens
  misc_RNA (1)...(19): siRNA sense strand
acucuuaccaugcggaaau

SEQ ID NO: 2386342 - RNA, 19 nt, Homo sapiens
  misc_RNA (1)...(19): siRNA sense strand
uugcagagcuugacccaga

SEQ ID NO: 2386343 - RNA, 19 nt, Homo sapiens
  misc_RNA (1)...(19): siRNA sense strand
ccacaaucuaggaagcuga

SEQ ID NO: 2386344 - RNA, 19 nt, Homo sapiens
  misc_RNA (1)...(19): siRNA sense strand
ccaaggagcuuaugggcug

SEQ ID NO: 2386345 - RNA, 19 nt, Homo sapiens
  misc_RNA (1)...(19): siRNA sense strand
acccaaggcaggcgaggaa

SEQ ID NO: 2386346 - RNA, 19 nt, Homo sapiens
  misc_RNA (1)...(19): siRNA sense strand
cagcuauggaggagcaguu

SEQ ID NO: 2386347 - RNA, 19 nt, Homo sapiens
  misc_RNA (1)...(19): siRNA sense strand
ccacagaacugcagcccuc

SEQ ID NO: 2386348 - RNA, 19 nt, Homo sapiens
  misc_RNA (1)...(19): siRNA sense strand
acaagagagccaaagcaau

SEQ ID NO: 2386349 - RNA, 19 nt, Homo sapiens
  misc_RNA (1)...(19): siRNA sense strand
gggacaaguaccugcucuu

SEQ ID NO: 2386350 - RNA, 19 nt, Homo sapiens
  misc_RNA (1)...(19): siRNA sense strand
cuacaacaccacugagcca

SEQ ID NO: 2386351 - RNA, 19 nt, Homo sapiens
  misc_RNA (1)...(19): siRNA sense strand
gcaguccaguccagggcaa

SEQ ID NO: 2386352 - RNA, 19 nt, Homo sapiens
  misc_RNA (1)...(19): siRNA sense strand
gaucaaaggcagcacucca

SEQ ID NO: 2386353 - RNA, 19 nt, Homo sapiens
  misc_RNA (1)...(19): siRNA sense strand
ccuacacaagagagccaaa

SEQ ID NO: 2386354 - RNA, 19 nt, Homo sapiens
  misc_RNA (1)...(19): siRNA sense strand
ggcauuacacugacggaca

SEQ ID NO: 2386355 - RNA, 19 nt, Homo sapiens
  misc_RNA (1)...(19): siRNA sense strand
cggaagaaaccuccagucu

SEQ ID NO: 2386356 - RNA, 19 nt, Homo sapiens
  misc_RNA (1)...(19): siRNA sense strand
cggaaauucugcgaggaca

SEQ ID NO: 2386357 - RNA, 19 nt, Homo sapiens
  misc_RNA (1)...(19): siRNA sense strand
ccgagaagaucaaaggcag

SEQ ID NO: 2386358 - RNA, 19 nt, Homo sapiens
  misc_RNA (1)...(19): siRNA sense strand
aggagagggcagaggguau

SEQ ID NO: 2386359 - RNA, 19 nt, Homo sapiens
  misc_RNA (1)...(19): siRNA sense strand
guacuauacugcaagggaa

SEQ ID NO: 2386360 - RNA, 19 nt, Homo sapiens
  misc_RNA (1)...(19): siRNA sense strand
gcaagggaaacaagggcaa

SEQ ID NO: 2386361 - RNA, 19 nt, Homo sapiens
  misc_RNA (1)...(19): siRNA sense strand
cugcaaagccauggagaca

SEQ ID NO: 2386362 - RNA, 19 nt, Homo sapiens
  misc_RNA (1)...(19): siRNA sense strand
ccaaaguucuacugggcca

SEQ ID NO: 2386363 - RNA, 19 nt, Homo sapiens
  misc_RNA (1)...(19): siRNA sense strand
gggcaagugaggcuggcaa

SEQ ID NO: 2386364 - RNA, 19 nt, Homo sapiens
  misc_RNA (1)...(19): siRNA sense strand
ccuacaugcacuacagcaa

SEQ ID NO: 2386365 - RNA, 19 nt, Homo sapiens
  misc_RNA (1)...(19): siRNA sense strand
gggugaagaucaagggcug

SEQ ID NO: 2386366 - RNA, 19 nt, Homo sapiens
  misc_RNA (1)...(19): siRNA sense strand
uacuauacugcaagggaaa

SEQ ID NO: 2386367 - RNA, 19 nt, Homo sapiens
  misc_RNA (1)...(19): siRNA sense strand
gcuggagaagggugggcaa

SEQ ID NO: 2386368 - RNA, 19 nt, Homo sapiens
  misc_RNA (1)...(19): siRNA sense strand
caacaugagcacagcggca

SEQ ID NO: 2386369 - RNA, 19 nt, Homo sapiens
  misc_RNA (1)...(19): siRNA sense strand
acucuuaccaugcggaaau

SEQ ID NO: 2386370 - RNA, 19 nt, Homo sapiens
  misc_RNA (1)...(19): siRNA sense strand
uugcagagcuugacccaga

SEQ ID NO: 2386371 - RNA, 19 nt, Homo sapiens
  misc_RNA (1)...(19): siRNA sense strand
ccacaaucuaggaagcuga

SEQ ID NO: 2386372 - RNA, 19 nt, Homo sapiens
  misc_RNA (1)...(19): siRNA sense strand
ccaaggagcuuaugggcug

SEQ ID NO: 2386373 - RNA, 19 nt, Homo sapiens
  misc_RNA (1)...(19): siRNA sense strand
acccaaggcaggcgaggaa

SEQ ID NO: 2386374 - RNA, 19 nt, Homo sapiens
  misc_RNA (1)...(19): siRNA sense strand
cagcuauggaggagcaguu

SEQ ID NO: 2386375 - RNA, 19 nt, Homo sapiens
  misc_RNA (1)...(19): siRNA sense strand
ccacagaacugcagcccuc

SEQ ID NO: 2386376 - RNA, 19 nt, Homo sapiens
  misc_RNA (1)...(19): siRNA sense strand
acaagagagccaaagcaau

SEQ ID NO: 2386377 - RNA, 19 nt, Homo sapiens
  misc_RNA (1)...(19): siRNA sense strand
gggacaaguaccugcucuu

SEQ ID NO: 2386378 - RNA, 19 nt, Homo sapiens
  misc_RNA (1)...(19): siRNA sense strand
cuacaacaccacugagcca

SEQ ID NO: 2386379 - RNA, 19 nt, Homo sapiens
  misc_RNA (1)...(19): siRNA sense strand
gcaguccaguccagggcaa

SEQ ID NO: 2386380 - RNA, 19 nt, Homo sapiens
  misc_RNA (1)...(19): siRNA sense strand
gaucaaaggcagcacucca

SEQ ID NO: 2386381 - RNA, 19 nt, Homo sapiens
  misc_RNA (1)...(19): siRNA sense strand
ccuacacaagagagccaaa

SEQ ID NO: 2386382 - RNA, 19 nt, Homo sapiens
  misc_RNA (1)...(19): siRNA sense strand
ggcauuacacugacggaca

SEQ ID NO: 2386383 - RNA, 19 nt, Homo sapiens
  misc_RNA (1)...(19): siRNA sense strand
cggaaauucugcgaggaca

SEQ ID NO: 2386384 - RNA, 19 nt, Homo sapiens
  misc_RNA (1)...(19): siRNA sense strand
ccgagaagaucaaaggcag

SEQ ID NO: 2386385 - RNA, 19 nt, Homo sapiens
  misc_RNA (1)...(19): siRNA sense strand
ccgcggaaauucagcgaga

SEQ ID NO: 2386386 - RNA, 19 nt, Homo sapiens
  misc_RNA (1)...(19): siRNA sense strand
aguucaacaugauggagaa

SEQ ID NO: 2386387 - RNA, 19 nt, Homo sapiens
  misc_RNA (1)...(19): siRNA sense strand
ucgaacaauccgcggaaau

SEQ ID NO: 2386388 - RNA, 19 nt, Homo sapiens
  misc_RNA (1)...(19): siRNA sense strand
acucgcagcaacugggaua

SEQ ID NO: 2386389 - RNA, 19 nt, Homo sapiens
  misc_RNA (1)...(19): siRNA sense strand
gcacagaggcaaggcguca

SEQ ID NO: 2386390 - RNA, 19 nt, Homo sapiens
  misc_RNA (1)...(19): siRNA sense strand
ggacaaacacggacggcag

SEQ ID NO: 2386391 - RNA, 19 nt, Homo sapiens
  misc_RNA (1)...(19): siRNA sense strand
agaagaucgcgcugcacaa

SEQ ID NO: 2386392 - RNA, 19 nt, Homo sapiens
  misc_RNA (1)...(19): siRNA sense strand
gcggaaauucagcgagaag

SEQ ID NO: 2386393 - RNA, 19 nt, Homo sapiens
  misc_RNA (1)...(19): siRNA sense strand
augaaggaccugagccuga

SEQ ID NO: 2386394 - RNA, 19 nt, Homo sapiens
  misc_RNA (1)...(19): siRNA sense strand
uguuaacagucccaggaau

SEQ ID NO: 2386395 - RNA, 19 nt, Homo sapiens
  misc_RNA (1)...(19): siRNA sense strand
caguucaacaugauggaga

SEQ ID NO: 2386396 - RNA, 19 nt, Homo sapiens
  misc_RNA (1)...(19): siRNA sense strand
ccgcggaaauucagcgaga

SEQ ID NO: 2386397 - RNA, 19 nt, Homo sapiens
  misc_RNA (1)...(19): siRNA sense strand
aguucaacaugauggagaa

SEQ ID NO: 2386398 - RNA, 19 nt, Homo sapiens
  misc_RNA (1)...(19): siRNA sense strand
ucgaacaauccgcggaaau

SEQ ID NO: 2386399 - RNA, 19 nt, Homo sapiens
  misc_RNA (1)...(19): siRNA sense strand
acucgcagcaacugggaua

SEQ ID NO: 2386400 - RNA, 19 nt, Homo sapiens
  misc_RNA (1)...(19): siRNA sense strand
gcacagaggcaaggcguca

SEQ ID NO: 2386401 - RNA, 19 nt, Homo sapiens
  misc_RNA (1)...(19): siRNA sense strand
ggacaaacacggacggcag

SEQ ID NO: 2386402 - RNA, 19 nt, Homo sapiens
  misc_RNA (1)...(19): siRNA sense strand
agaagaucgcgcugcacaa

SEQ ID NO: 2386403 - RNA, 19 nt, Homo sapiens
  misc_RNA (1)...(19): siRNA sense strand
gcggaaauucagcgagaag

SEQ ID NO: 2386404 - RNA, 19 nt, Homo sapiens
  misc_RNA (1)...(19): siRNA sense strand
augaaggaccugagccuga

SEQ ID NO: 2386405 - RNA, 19 nt, Homo sapiens
  misc_RNA (1)...(19): siRNA sense strand
uguuaacagucccaggaau

SEQ ID NO: 2386406 - RNA, 19 nt, Homo sapiens
  misc_RNA (1)...(19): siRNA sense strand
caguucaacaugauggaga

SEQ ID NO: 2386407 - RNA, 19 nt, Homo sapiens
  misc_RNA (1)...(19): siRNA sense strand
agaaaugagagaugagcua

SEQ ID NO: 2386408 - RNA, 19 nt, Homo sapiens
  misc_RNA (1)...(19): siRNA sense strand
ggugaaaaggggagacaaa

SEQ ID NO: 2386409 - RNA, 19 nt, Homo sapiens
  misc_RNA (1)...(19): siRNA sense strand
gcccaaauuaguaaagaaa

SEQ ID NO: 2386410 - RNA, 19 nt, Homo sapiens
  misc_RNA (1)...(19): siRNA sense strand
gcauuuaaucacugaagaa

SEQ ID NO: 2386411 - RNA, 19 nt, Homo sapiens
  misc_RNA (1)...(19): siRNA sense strand
gcgaagaaggaaagcaaca

SEQ ID NO: 2386412 - RNA, 19 nt, Homo sapiens
  misc_RNA (1)...(19): siRNA sense strand
cugaagaagaucugaaaca

SEQ ID NO: 2386413 - RNA, 19 nt, Homo sapiens
  misc_RNA (1)...(19): siRNA sense strand
agccauuacaagugaaaua

SEQ ID NO: 2386414 - RNA, 19 nt, Homo sapiens
  misc_RNA (1)...(19): siRNA sense strand
agaagaggucaaugauaaa

SEQ ID NO: 2386415 - RNA, 19 nt, Homo sapiens
  misc_RNA (1)...(19): siRNA sense strand
aguugaagaugcugccaua

SEQ ID NO: 2386416 - RNA, 19 nt, Homo sapiens
  misc_RNA (1)...(19): siRNA sense strand
agaugagcgaagaaggaaa

SEQ ID NO: 2386417 - RNA, 19 nt, Homo sapiens
  misc_RNA (1)...(19): siRNA sense strand
ugguaaaguaucaagguuu

SEQ ID NO: 2386418 - RNA, 19 nt, Homo sapiens
  misc_RNA (1)...(19): siRNA sense strand
ucuugauaauagaggagua

SEQ ID NO: 2386419 - RNA, 19 nt, Homo sapiens
  misc_RNA (1)...(19): siRNA sense strand
ccauaucagaacuguguaa

SEQ ID NO: 2386420 - RNA, 19 nt, Homo sapiens
  misc_RNA (1)...(19): siRNA sense strand
caagaagaaaggaagaaaa

SEQ ID NO: 2386421 - RNA, 19 nt, Homo sapiens
  misc_RNA (1)...(19): siRNA sense strand
auacauuacuccagcccaa

SEQ ID NO: 2386422 - RNA, 19 nt, Homo sapiens
  misc_RNA (1)...(19): siRNA sense strand
gcugaaaaggaaaugaaaa

SEQ ID NO: 2386423 - RNA, 19 nt, Homo sapiens
  misc_RNA (1)...(19): siRNA sense strand
agucaagaagaaaggaaga

SEQ ID NO: 2386424 - RNA, 19 nt, Homo sapiens
  misc_RNA (1)...(19): siRNA sense strand
acaaagaacaagaagaugu

SEQ ID NO: 2386425 - RNA, 19 nt, Homo sapiens
  misc_RNA (1)...(19): siRNA sense strand
ugaugauagugaugaugaa

SEQ ID NO: 2386426 - RNA, 19 nt, Homo sapiens
  misc_RNA (1)...(19): siRNA sense strand
uggcagaagaggucaauga

SEQ ID NO: 2386427 - RNA, 19 nt, Homo sapiens
  misc_RNA (1)...(19): siRNA sense strand
aguaaagaaaugagagaug

SEQ ID NO: 2386428 - RNA, 19 nt, Homo sapiens
  misc_RNA (1)...(19): siRNA sense strand
cagcaggugaugagggcau

SEQ ID NO: 2386429 - RNA, 19 nt, Homo sapiens
  misc_RNA (1)...(19): siRNA sense strand
aagcguuaguacaaguaaa

SEQ ID NO: 2386430 - RNA, 19 nt, Homo sapiens
  misc_RNA (1)...(19): siRNA sense strand
ggaucaaguggaagcauca

SEQ ID NO: 2386431 - RNA, 19 nt, Homo sapiens
  misc_RNA (1)...(19): siRNA sense strand
gcaacagagggcaguggaa

SEQ ID NO: 2386432 - RNA, 19 nt, Homo sapiens
  misc_RNA (1)...(19): siRNA sense strand
guaaaauuccagaggauca

SEQ ID NO: 2386433 - RNA, 19 nt, Homo sapiens
  misc_RNA (1)...(19): siRNA sense strand
gaagaaaggaagaaaagau

SEQ ID NO: 2386434 - RNA, 19 nt, Homo sapiens
  misc_RNA (1)...(19): siRNA sense strand
uagaauuaucaguggacau

SEQ ID NO: 2386435 - RNA, 19 nt, Homo sapiens
  misc_RNA (1)...(19): siRNA sense strand
gcggaacugcauugagauu

SEQ ID NO: 2386436 - RNA, 19 nt, Homo sapiens
  misc_RNA (1)...(19): siRNA sense strand
ucaagaagaaaggaagaaa

SEQ ID NO: 2386437 - RNA, 19 nt, Homo sapiens
  misc_RNA (1)...(19): siRNA sense strand
uaguaaaauuccagaggau

SEQ ID NO: 2386438 - RNA, 19 nt, Homo sapiens
  misc_RNA (1)...(19): siRNA sense strand
gggaagagauuaggcgguu

SEQ ID NO: 2386439 - RNA, 19 nt, Homo sapiens
  misc_RNA (1)...(19): siRNA sense strand
ucguaaagagcuucaagaa

SEQ ID NO: 2386440 - RNA, 19 nt, Homo sapiens
  misc_RNA (1)...(19): siRNA sense strand
gcaagaaaguggucagguc

SEQ ID NO: 2386441 - RNA, 19 nt, Homo sapiens
  misc_RNA (1)...(19): siRNA sense strand
ggaugagauugaagauuuu

SEQ ID NO: 2386442 - RNA, 19 nt, Homo sapiens
  misc_RNA (1)...(19): siRNA sense strand
cuugauaauagaggaguaa

SEQ ID NO: 2386443 - RNA, 19 nt, Homo sapiens
  misc_RNA (1)...(19): siRNA sense strand
agaugaugauagugaugau

SEQ ID NO: 2386444 - RNA, 19 nt, Homo sapiens
  misc_RNA (1)...(19): siRNA sense strand
agcccaaauuaguaaagaa

SEQ ID NO: 2386445 - RNA, 19 nt, Homo sapiens
  misc_RNA (1)...(19): siRNA sense strand
acaacugauagaugagaau

SEQ ID NO: 2386446 - RNA, 19 nt, Homo sapiens
  misc_RNA (1)...(19): siRNA sense strand
agcuaaaggucacagaaga

SEQ ID NO: 2386447 - RNA, 19 nt, Homo sapiens
  misc_RNA (1)...(19): siRNA sense strand
ggaaaucaucugugacgga

SEQ ID NO: 2386448 - RNA, 19 nt, Homo sapiens
  misc_RNA (1)...(19): siRNA sense strand
ccagagaguacaaaauuaa

SEQ ID NO: 2386449 - RNA, 19 nt, Homo sapiens
  misc_RNA (1)...(19): siRNA sense strand
aguggaagcaucaguagaa

SEQ ID NO: 2386450 - RNA, 19 nt, Homo sapiens
  misc_RNA (1)...(19): siRNA sense strand
gcuagaaguaguucauaca

SEQ ID NO: 2386451 - RNA, 19 nt, Homo sapiens
  misc_RNA (1)...(19): siRNA sense strand
ugauagugaugaugaaucu

SEQ ID NO: 2386452 - RNA, 19 nt, Homo sapiens
  misc_RNA (1)...(19): siRNA sense strand
cauaacucucugaaugaaa

SEQ ID NO: 2386453 - RNA, 19 nt, Homo sapiens
  misc_RNA (1)...(19): siRNA sense strand
acaagaagauguugccagu

SEQ ID NO: 2386454 - RNA, 19 nt, Homo sapiens
  misc_RNA (1)...(19): siRNA sense strand
acucugugcuugaggaacu

SEQ ID NO: 2386455 - RNA, 19 nt, Homo sapiens
  misc_RNA (1)...(19): siRNA sense strand
gguuggcagaagaggucaa

SEQ ID NO: 2386456 - RNA, 19 nt, Homo sapiens
  misc_RNA (1)...(19): siRNA sense strand
ugaugagggcauucagcaa

SEQ ID NO: 2386457 - RNA, 19 nt, Homo sapiens
  misc_RNA (1)...(19): siRNA sense strand
cagaaagcugaaaaggaaa

SEQ ID NO: 2386458 - RNA, 19 nt, Homo sapiens
  misc_RNA (1)...(19): siRNA sense strand
uagacaaagaacaagaaga

SEQ ID NO: 2386459 - RNA, 19 nt, Homo sapiens
  misc_RNA (1)...(19): siRNA sense strand
ccgagguggucgaguaaac

SEQ ID NO: 2386460 - RNA, 19 nt, Homo sapiens
  misc_RNA (1)...(19): siRNA sense strand
gaugagaauuauuuggauc

SEQ ID NO: 2386461 - RNA, 19 nt, Homo sapiens
  misc_RNA (1)...(19): siRNA sense strand
gggcaguggaagcaugaga

SEQ ID NO: 2386462 - RNA, 19 nt, Homo sapiens
  misc_RNA (1)...(19): siRNA sense strand
agacgauccugcagccauu

SEQ ID NO: 2386463 - RNA, 19 nt, Homo sapiens
  misc_RNA (1)...(19): siRNA sense strand
caagaaaguggucagguca

SEQ ID NO: 2386464 - RNA, 19 nt, Homo sapiens
  misc_RNA (1)...(19): siRNA sense strand
cacugugguuggugggaga

SEQ ID NO: 2386465 - RNA, 19 nt, Homo sapiens
  misc_RNA (1)...(19): siRNA sense strand
aaagaugagcgaagaagga

SEQ ID NO: 2386466 - RNA, 19 nt, Homo sapiens
  misc_RNA (1)...(19): siRNA sense strand
agaagaagccagagaucag

SEQ ID NO: 2386467 - RNA, 19 nt, Homo sapiens
  misc_RNA (1)...(19): siRNA sense strand
aagaaagggaagaagaaau

SEQ ID NO: 2386468 - RNA, 19 nt, Homo sapiens
  misc_RNA (1)...(19): siRNA sense strand
cggcaaaagaauaagagaa

SEQ ID NO: 2386469 - RNA, 19 nt, Homo sapiens
  misc_RNA (1)...(19): siRNA sense strand
aggaggaggaggaaaggaa

SEQ ID NO: 2386470 - RNA, 19 nt, Homo sapiens
  misc_RNA (1)...(19): siRNA sense strand
agagaagauguaagaacaa

SEQ ID NO: 2386471 - RNA, 19 nt, Homo sapiens
  misc_RNA (1)...(19): siRNA sense strand
cccaaagccuggaagggua

SEQ ID NO: 2386472 - RNA, 19 nt, Homo sapiens
  misc_RNA (1)...(19): siRNA sense strand
agaaagaggaaaugccaga

SEQ ID NO: 2386473 - RNA, 19 nt, Homo sapiens
  misc_RNA (1)...(19): siRNA sense strand
aggaggaaaggaagaagaa

SEQ ID NO: 2386474 - RNA, 19 nt, Homo sapiens
  misc_RNA (1)...(19): siRNA sense strand
cugaagaugagaaaagaaa

SEQ ID NO: 2386475 - RNA, 19 nt, Homo sapiens
  misc_RNA (1)...(19): siRNA sense strand
aggaagaagaaaugccaca

SEQ ID NO: 2386476 - RNA, 19 nt, Homo sapiens
  misc_RNA (1)...(19): siRNA sense strand
ggaagaaguagaaaggaag

SEQ ID NO: 2386477 - RNA, 19 nt, Homo sapiens
  misc_RNA (1)...(19): siRNA sense strand
cugaggaggaggaggagga

SEQ ID NO: 2386478 - RNA, 19 nt, Homo sapiens
  misc_RNA (1)...(19): siRNA sense strand
agaggaaaugccagaaaca

SEQ ID NO: 2386479 - RNA, 19 nt, Homo sapiens
  misc_RNA (1)...(19): siRNA sense strand
aggaggaggaggaggaaag

SEQ ID NO: 2386480 - RNA, 19 nt, Homo sapiens
  misc_RNA (1)...(19): siRNA sense strand
acucugaggaggaggagga

SEQ ID NO: 2386481 - RNA, 19 nt, Homo sapiens
  misc_RNA (1)...(19): siRNA sense strand
aggaugagucuguggaugu

SEQ ID NO: 2386482 - RNA, 19 nt, Homo sapiens
  misc_RNA (1)...(19): siRNA sense strand
ucuccaaggaccugaccaa

SEQ ID NO: 2386483 - RNA, 19 nt, Homo sapiens
  misc_RNA (1)...(19): siRNA sense strand
uugcagugacucugaggaa

SEQ ID NO: 2386484 - RNA, 19 nt, Homo sapiens
  misc_RNA (1)...(19): siRNA sense strand
ccucauacauuaagccgca

SEQ ID NO: 2386485 - RNA, 19 nt, Homo sapiens
  misc_RNA (1)...(19): siRNA sense strand
ggaaccaacaucagggacu

SEQ ID NO: 2386486 - RNA, 19 nt, Homo sapiens
  misc_RNA (1)...(19): siRNA sense strand
aguagaaaggaagaagaaa

SEQ ID NO: 2386487 - RNA, 19 nt, Homo sapiens
  misc_RNA (1)...(19): siRNA sense strand
aaguagggaagaaagggaa

SEQ ID NO: 2386488 - RNA, 19 nt, Homo sapiens
  misc_RNA (1)...(19): siRNA sense strand
acucugaggaagaaguaga

SEQ ID NO: 2386489 - RNA, 19 nt, Homo sapiens
  misc_RNA (1)...(19): siRNA sense strand
ugguagggcccaaggcuca

SEQ ID NO: 2386490 - RNA, 19 nt, Homo sapiens
  misc_RNA (1)...(19): siRNA sense strand
gaggaggaggaggaggaaa

SEQ ID NO: 2386491 - RNA, 19 nt, Homo sapiens
  misc_RNA (1)...(19): siRNA sense strand
gaaguagggaagaaaggga

SEQ ID NO: 2386492 - RNA, 19 nt, Homo sapiens
  misc_RNA (1)...(19): siRNA sense strand
aggcaaauagaguacugaa

SEQ ID NO: 2386493 - RNA, 19 nt, Homo sapiens
  misc_RNA (1)...(19): siRNA sense strand
agucauggucagagagaua

SEQ ID NO: 2386494 - RNA, 19 nt, Homo sapiens
  misc_RNA (1)...(19): siRNA sense strand
agaaaugggcagaagaaau

SEQ ID NO: 2386495 - RNA, 19 nt, Homo sapiens
  misc_RNA (1)...(19): siRNA sense strand
uggaguugcccgaggauaa

SEQ ID NO: 2386496 - RNA, 19 nt, Homo sapiens
  misc_RNA (1)...(19): siRNA sense strand
guuaaagaaaggagcaaau

SEQ ID NO: 2386497 - RNA, 19 nt, Homo sapiens
  misc_RNA (1)...(19): siRNA sense strand
gagaagaaggcauggguca

SEQ ID NO: 2386498 - RNA, 19 nt, Homo sapiens
  misc_RNA (1)...(19): siRNA sense strand
ggguggaaguggauugcaa

SEQ ID NO: 2386499 - RNA, 19 nt, Homo sapiens
  misc_RNA (1)...(19): siRNA sense strand
cagaaauugaugugaguga

SEQ ID NO: 2386500 - RNA, 19 nt, Homo sapiens
  misc_RNA (1)...(19): siRNA sense strand
ugaucugggucuagaacua

SEQ ID NO: 2386501 - RNA, 19 nt, Homo sapiens
  misc_RNA (1)...(19): siRNA sense strand
gggaaguuguagaagacau

SEQ ID NO: 2386502 - RNA, 19 nt, Homo sapiens
  misc_RNA (1)...(19): siRNA sense strand
ggacagacuucuuguggca

SEQ ID NO: 2386503 - RNA, 19 nt, Homo sapiens
  misc_RNA (1)...(19): siRNA sense strand
ugucaagauucaugcauau

SEQ ID NO: 2386504 - RNA, 19 nt, Homo sapiens
  misc_RNA (1)...(19): siRNA sense strand
aaugaagaccuccgagaaa

SEQ ID NO: 2386505 - RNA, 19 nt, Homo sapiens
  misc_RNA (1)...(19): siRNA sense strand
agugaaagccaguaccuaa

SEQ ID NO: 2386506 - RNA, 19 nt, Homo sapiens
  misc_RNA (1)...(19): siRNA sense strand
ggguggauauggagagacu

SEQ ID NO: 2386507 - RNA, 19 nt, Homo sapiens
  misc_RNA (1)...(19): siRNA sense strand
acuauuacgaggagccaaa

SEQ ID NO: 2386508 - RNA, 19 nt, Homo sapiens
  misc_RNA (1)...(19): siRNA sense strand
ggagagagcgauggagcaa

SEQ ID NO: 2386509 - RNA, 19 nt, Homo sapiens
  misc_RNA (1)...(19): siRNA sense strand
aggcaugggucaagguguu

SEQ ID NO: 2386510 - RNA, 19 nt, Homo sapiens
  misc_RNA (1)...(19): siRNA sense strand
gugaaagccaguaccuaaa

SEQ ID NO: 2386511 - RNA, 19 nt, Homo sapiens
  misc_RNA (1)...(19): siRNA sense strand
uguucaagccucuggaauu

SEQ ID NO: 2386512 - RNA, 19 nt, Homo sapiens
  misc_RNA (1)...(19): siRNA sense strand
gcugauauuaacaggccaa

SEQ ID NO: 2386513 - RNA, 19 nt, Homo sapiens
  misc_RNA (1)...(19): siRNA sense strand
aaugaaggccuuacagcaa

SEQ ID NO: 2386514 - RNA, 19 nt, Homo sapiens
  misc_RNA (1)...(19): siRNA sense strand
ccauucagccucagaucaa

SEQ ID NO: 2386515 - RNA, 19 nt, Homo sapiens
  misc_RNA (1)...(19): siRNA sense strand
caagaagccagguguucaa

SEQ ID NO: 2386516 - RNA, 19 nt, Homo sapiens
  misc_RNA (1)...(19): siRNA sense strand
augucaagauucaugcaua

SEQ ID NO: 2386517 - RNA, 19 nt, Homo sapiens
  misc_RNA (1)...(19): siRNA sense strand
agcaaauugugcaaagcua

SEQ ID NO: 2386518 - RNA, 19 nt, Homo sapiens
  misc_RNA (1)...(19): siRNA sense strand
gugcaaagcuaaagcaagg

SEQ ID NO: 2386519 - RNA, 19 nt, Homo sapiens
  misc_RNA (1)...(19): siRNA sense strand
agaagaaggcaugggucaa

SEQ ID NO: 2386520 - RNA, 19 nt, Homo sapiens
  misc_RNA (1)...(19): siRNA sense strand
gggucaagguguugugcgu

SEQ ID NO: 2386521 - RNA, 19 nt, Homo sapiens
  misc_RNA (1)...(19): siRNA sense strand
agacauuacucaagaggag

SEQ ID NO: 2386522 - RNA, 19 nt, Homo sapiens
  misc_RNA (1)...(19): siRNA sense strand
ucauugaauuugucugcaa

SEQ ID NO: 2386523 - RNA, 19 nt, Homo sapiens
  misc_RNA (1)...(19): siRNA sense strand
caauggaagaggugccuuu

SEQ ID NO: 2386524 - RNA, 19 nt, Homo sapiens
  misc_RNA (1)...(19): siRNA sense strand
cacaaguggcuaugaaaga

SEQ ID NO: 2386525 - RNA, 19 nt, Homo sapiens
  misc_RNA (1)...(19): siRNA sense strand
gugaaugggcggacagaac

SEQ ID NO: 2386526 - RNA, 19 nt, Homo sapiens
  misc_RNA (1)...(19): siRNA sense strand
gggaauaaaacuccaagaa

SEQ ID NO: 2386527 - RNA, 19 nt, Homo sapiens
  misc_RNA (1)...(19): siRNA sense strand
ggauuagcguugaaccaca

SEQ ID NO: 2386528 - RNA, 19 nt, Homo sapiens
  misc_RNA (1)...(19): siRNA sense strand
aaagaaauacucaaggaca

SEQ ID NO: 2386529 - RNA, 19 nt, Homo sapiens
  misc_RNA (1)...(19): siRNA sense strand
aagaaauacucaaggacag

SEQ ID NO: 2386530 - RNA, 19 nt, Homo sapiens
  misc_RNA (1)...(19): siRNA sense strand
ugauguugauguugaggau

SEQ ID NO: 2386531 - RNA, 19 nt, Homo sapiens
  misc_RNA (1)...(19): siRNA sense strand
auccauugauccagaauau

SEQ ID NO: 2386532 - RNA, 19 nt, Homo sapiens
  misc_RNA (1)...(19): siRNA sense strand
uguuaaagaaaggagcaaa

SEQ ID NO: 2386533 - RNA, 19 nt, Homo sapiens
  misc_RNA (1)...(19): siRNA sense strand
aaagcuaaagcaagggauu

SEQ ID NO: 2386534 - RNA, 19 nt, Homo sapiens
  misc_RNA (1)...(19): siRNA sense strand
uguugagacugauguguuu

SEQ ID NO: 2386535 - RNA, 19 nt, Homo sapiens
  misc_RNA (1)...(19): siRNA sense strand
ugucagugauguugauguu

SEQ ID NO: 2386536 - RNA, 19 nt, Homo sapiens
  misc_RNA (1)...(19): siRNA sense strand
uuuaaagaucgcugugaau

SEQ ID NO: 2386537 - RNA, 19 nt, Homo sapiens
  misc_RNA (1)...(19): siRNA sense strand
cugggcagaucuugggauu

SEQ ID NO: 2386538 - RNA, 19 nt, Homo sapiens
  misc_RNA (1)...(19): siRNA sense strand
cuaugaaagagaagaucca

SEQ ID NO: 2386539 - RNA, 19 nt, Homo sapiens
  misc_RNA (1)...(19): siRNA sense strand
gguggaaguggauugcaaa

SEQ ID NO: 2386540 - RNA, 19 nt, Homo sapiens
  misc_RNA (1)...(19): siRNA sense strand
ggauaaugaaacugcuguu

SEQ ID NO: 2386541 - RNA, 19 nt, Homo sapiens
  misc_RNA (1)...(19): siRNA sense strand
ugggaguauucuugugaca

SEQ ID NO: 2386542 - RNA, 19 nt, Homo sapiens
  misc_RNA (1)...(19): siRNA sense strand
uggcuaugaaagagaagau

SEQ ID NO: 2386543 - RNA, 19 nt, Homo sapiens
  misc_RNA (1)...(19): siRNA sense strand
ucugggaaguuguagaaga

SEQ ID NO: 2386544 - RNA, 19 nt, Homo sapiens
  misc_RNA (1)...(19): siRNA sense strand
aagaaaugggcagaagaaa

SEQ ID NO: 2386545 - RNA, 19 nt, Homo sapiens
  misc_RNA (1)...(19): siRNA sense strand
gaaugggcggacagaacua

SEQ ID NO: 2386546 - RNA, 19 nt, Homo sapiens
  misc_RNA (1)...(19): siRNA sense strand
gccacagaauugaugaaaa

SEQ ID NO: 2386547 - RNA, 19 nt, Homo sapiens
  misc_RNA (1)...(19): siRNA sense strand
acaggaagccagugcagau

SEQ ID NO: 2386548 - RNA, 19 nt, Homo sapiens
  misc_RNA (1)...(19): siRNA sense strand
agaauacacaaguggcuau

SEQ ID NO: 2386549 - RNA, 19 nt, Homo sapiens
  misc_RNA (1)...(19): siRNA sense strand
cagcaaagugaaagccagu

SEQ ID NO: 2386550 - RNA, 19 nt, Homo sapiens
  misc_RNA (1)...(19): siRNA sense strand
ggauguuauuucuaugaca

SEQ ID NO: 2386551 - RNA, 19 nt, Homo sapiens
  misc_RNA (1)...(19): siRNA sense strand
ccggcuaagugcugucauu

SEQ ID NO: 2386552 - RNA, 19 nt, Homo sapiens
  misc_RNA (1)...(19): siRNA sense strand
gucaagguguugugcguga

SEQ ID NO: 2386553 - RNA, 19 nt, Homo sapiens
  misc_RNA (1)...(19): siRNA sense strand
ugauccagaauaugcgaaa

SEQ ID NO: 2386554 - RNA, 19 nt, Homo sapiens
  misc_RNA (1)...(19): siRNA sense strand
cuguuaaagaaaggagcaa

SEQ ID NO: 2386555 - RNA, 19 nt, Homo sapiens
  misc_RNA (1)...(19): siRNA sense strand
agguagagauggaggauga

SEQ ID NO: 2386556 - RNA, 19 nt, Homo sapiens
  misc_RNA (1)...(19): siRNA sense strand
uaguaaagccacaggaaau

SEQ ID NO: 2386557 - RNA, 19 nt, Homo sapiens
  misc_RNA (1)...(19): siRNA sense strand
ccugaggauuggagagcaa

SEQ ID NO: 2386558 - RNA, 19 nt, Homo sapiens
  misc_RNA (1)...(19): siRNA sense strand
gagaaagugaggaggaaga

SEQ ID NO: 2386559 - RNA, 19 nt, Homo sapiens
  misc_RNA (1)...(19): siRNA sense strand
aggaaauuauguuggacaa

SEQ ID NO: 2386560 - RNA, 19 nt, Homo sapiens
  misc_RNA (1)...(19): siRNA sense strand
cuuuauugccugagggaau

SEQ ID NO: 2386561 - RNA, 19 nt, Homo sapiens
  misc_RNA (1)...(19): siRNA sense strand
gggaauaaaagaagaagaa

SEQ ID NO: 2386562 - RNA, 19 nt, Homo sapiens
  misc_RNA (1)...(19): siRNA sense strand
agaagaaagccaagcacaa

SEQ ID NO: 2386563 - RNA, 19 nt, Homo sapiens
  misc_RNA (1)...(19): siRNA sense strand
aguuagaugaagaggacaa

SEQ ID NO: 2386564 - RNA, 19 nt, Homo sapiens
  misc_RNA (1)...(19): siRNA sense strand
guggcauggcagagagaaa

SEQ ID NO: 2386565 - RNA, 19 nt, Homo sapiens
  misc_RNA (1)...(19): siRNA sense strand
caacaauaguaaagccaca

SEQ ID NO: 2386566 - RNA, 19 nt, Homo sapiens
  misc_RNA (1)...(19): siRNA sense strand
gugaggaggaagaggaaca

SEQ ID NO: 2386567 - RNA, 19 nt, Homo sapiens
  misc_RNA (1)...(19): siRNA sense strand
uagaagaagaacaggauuu

SEQ ID NO: 2386568 - RNA, 19 nt, Homo sapiens
  misc_RNA (1)...(19): siRNA sense strand
caguaggaguucuaguaaa

SEQ ID NO: 2386569 - RNA, 19 nt, Homo sapiens
  misc_RNA (1)...(19): siRNA sense strand
gcaaagaagaguaagacca

SEQ ID NO: 2386570 - RNA, 19 nt, Homo sapiens
  misc_RNA (1)...(19): siRNA sense strand
agaugagacucuugccaaa

SEQ ID NO: 2386571 - RNA, 19 nt, Homo sapiens
  misc_RNA (1)...(19): siRNA sense strand
ggaagaagaagaaagccaa

SEQ ID NO: 2386572 - RNA, 19 nt, Homo sapiens
  misc_RNA (1)...(19): siRNA sense strand
caaauagugaggaggagaa

SEQ ID NO: 2386573 - RNA, 19 nt, Homo sapiens
  misc_RNA (1)...(19): siRNA sense strand
agagauggaaguagaagaa

SEQ ID NO: 2386574 - RNA, 19 nt, Homo sapiens
  misc_RNA (1)...(19): siRNA sense strand
ugugguaaauacagacaua

SEQ ID NO: 2386575 - RNA, 19 nt, Homo sapiens
  misc_RNA (1)...(19): siRNA sense strand
aggaaguaaaugaaggaau

SEQ ID NO: 2386576 - RNA, 19 nt, Homo sapiens
  misc_RNA (1)...(19): siRNA sense strand
ggaaggaaagacaaggcaa

SEQ ID NO: 2386577 - RNA, 19 nt, Homo sapiens
  misc_RNA (1)...(19): siRNA sense strand
aguaggaguucuaguaaaa

SEQ ID NO: 2386578 - RNA, 19 nt, Homo sapiens
  misc_RNA (1)...(19): siRNA sense strand
ggucaucaggccagaggaa

SEQ ID NO: 2386579 - RNA, 19 nt, Homo sapiens
  misc_RNA (1)...(19): siRNA sense strand
aagaagaagaagagagaug

SEQ ID NO: 2386580 - RNA, 19 nt, Homo sapiens
  misc_RNA (1)...(19): siRNA sense strand
aaguacaacaguagaagaa

SEQ ID NO: 2386581 - RNA, 19 nt, Homo sapiens
  misc_RNA (1)...(19): siRNA sense strand
ggacgagauacuccagaaa

SEQ ID NO: 2386582 - RNA, 19 nt, Homo sapiens
  misc_RNA (1)...(19): siRNA sense strand
aggaagaagaagaaagcca

SEQ ID NO: 2386583 - RNA, 19 nt, Homo sapiens
  misc_RNA (1)...(19): siRNA sense strand
agagcaaggcugaagagaa

SEQ ID NO: 2386584 - RNA, 19 nt, Homo sapiens
  misc_RNA (1)...(19): siRNA sense strand
aggcugaagagaaggaaaa

SEQ ID NO: 2386585 - RNA, 19 nt, Homo sapiens
  misc_RNA (1)...(19): siRNA sense strand
agaagaagagagauggaga

SEQ ID NO: 2386586 - RNA, 19 nt, Homo sapiens
  misc_RNA (1)...(19): siRNA sense strand
aggagaugguaguguguca

SEQ ID NO: 2386587 - RNA, 19 nt, Homo sapiens
  misc_RNA (1)...(19): siRNA sense strand
caccaaaaguagaagaaga

SEQ ID NO: 2386588 - RNA, 19 nt, Homo sapiens
  misc_RNA (1)...(19): siRNA sense strand
aagaggaaagcuacagaaa

SEQ ID NO: 2386589 - RNA, 19 nt, Homo sapiens
  misc_RNA (1)...(19): siRNA sense strand
auagugaggaggagaagaa

SEQ ID NO: 2386590 - RNA, 19 nt, Homo sapiens
  misc_RNA (1)...(19): siRNA sense strand
uggagaaagugaggaggaa

SEQ ID NO: 2386591 - RNA, 19 nt, Homo sapiens
  misc_RNA (1)...(19): siRNA sense strand
cagauaaagagauggaagu

SEQ ID NO: 2386592 - RNA, 19 nt, Homo sapiens
  misc_RNA (1)...(19): siRNA sense strand
uggugaagaggaagaagaa

SEQ ID NO: 2386593 - RNA, 19 nt, Homo sapiens
  misc_RNA (1)...(19): siRNA sense strand
cggaagauggugagaucca

SEQ ID NO: 2386594 - RNA, 19 nt, Homo sapiens
  misc_RNA (1)...(19): siRNA sense strand
uagccaagcgagaaguuaa

SEQ ID NO: 2386595 - RNA, 19 nt, Homo sapiens
  misc_RNA (1)...(19): siRNA sense strand
agauaaagagauggaagua

SEQ ID NO: 2386596 - RNA, 19 nt, Homo sapiens
  misc_RNA (1)...(19): siRNA sense strand
aaaccaggcaacaggaauu

SEQ ID NO: 2386597 - RNA, 19 nt, Homo sapiens
  misc_RNA (1)...(19): siRNA sense strand
acgagauacuccagaaaau

SEQ ID NO: 2386598 - RNA, 19 nt, Homo sapiens
  misc_RNA (1)...(19): siRNA sense strand
gagaauucagauaaagaga

SEQ ID NO: 2386599 - RNA, 19 nt, Homo sapiens
  misc_RNA (1)...(19): siRNA sense strand
ucaccaggcagcagggauu

SEQ ID NO: 2386600 - RNA, 19 nt, Homo sapiens
  misc_RNA (1)...(19): siRNA sense strand
acaaggcaaagaagaguaa

SEQ ID NO: 2386601 - RNA, 19 nt, Homo sapiens
  misc_RNA (1)...(19): siRNA sense strand
aagaagaguaagaccaaaa

SEQ ID NO: 2386602 - RNA, 19 nt, Homo sapiens
  misc_RNA (1)...(19): siRNA sense strand
aguaaaacuggacgagaua

SEQ ID NO: 2386603 - RNA, 19 nt, Homo sapiens
  misc_RNA (1)...(19): siRNA sense strand
uggcagagagaaaugcuaa

SEQ ID NO: 2386604 - RNA, 19 nt, Homo sapiens
  misc_RNA (1)...(19): siRNA sense strand
acaaacaaaugaagugacu

SEQ ID NO: 2386605 - RNA, 19 nt, Homo sapiens
  misc_RNA (1)...(19): siRNA sense strand
aaaagaagaagaagagaga

SEQ ID NO: 2386606 - RNA, 19 nt, Homo sapiens
  misc_RNA (1)...(19): siRNA sense strand
agauuggagaacuggcaaa

SEQ ID NO: 2386607 - RNA, 19 nt, Homo sapiens
  misc_RNA (1)...(19): siRNA sense strand
uccagauggugaagaggaa

SEQ ID NO: 2386608 - RNA, 19 nt, Homo sapiens
  misc_RNA (1)...(19): siRNA sense strand
gacauauauucuaaggaga

SEQ ID NO: 2386609 - RNA, 19 nt, Homo sapiens
  misc_RNA (1)...(19): siRNA sense strand
guagaagaagcaacaacaa

SEQ ID NO: 2386610 - RNA, 19 nt, Homo sapiens
  misc_RNA (1)...(19): siRNA sense strand
auaguaaagccacaggaaa

SEQ ID NO: 2386611 - RNA, 19 nt, Homo sapiens
  misc_RNA (1)...(19): siRNA sense strand
agauggaaguagaagaauc

SEQ ID NO: 2386612 - RNA, 19 nt, Homo sapiens
  misc_RNA (1)...(19): siRNA sense strand
gaaauuucagauuggagaa

SEQ ID NO: 2386613 - RNA, 19 nt, Homo sapiens
  misc_RNA (1)...(19): siRNA sense strand
cagauggugaagaggaaga

SEQ ID NO: 2386614 - RNA, 19 nt, Homo sapiens
  misc_RNA (1)...(19): siRNA sense strand
gugcuuaugcugacaguga

SEQ ID NO: 2386615 - RNA, 19 nt, Homo sapiens
  misc_RNA (1)...(19): siRNA sense strand
caggaaauuauguuggaca

SEQ ID NO: 2386616 - RNA, 19 nt, Homo sapiens
  misc_RNA (1)...(19): siRNA sense strand
gugagauccaggagguaga

SEQ ID NO: 2386617 - RNA, 19 nt, Homo sapiens
  misc_RNA (1)...(19): siRNA sense strand
agauggaggaugagggaag

SEQ ID NO: 2386618 - RNA, 19 nt, Homo sapiens
  misc_RNA (1)...(19): siRNA sense strand
aggaauuggacaucagaca

SEQ ID NO: 2386619 - RNA, 19 nt, Homo sapiens
  misc_RNA (1)...(19): siRNA sense strand
agaacaacgaauuuagcaa

SEQ ID NO: 2386620 - RNA, 19 nt, Homo sapiens
  misc_RNA (1)...(19): siRNA sense strand
ggugaaaacaacacggcua

SEQ ID NO: 2386621 - RNA, 19 nt, Homo sapiens
  misc_RNA (1)...(19): siRNA sense strand
acuaguugcagaagaauau

SEQ ID NO: 2386622 - RNA, 19 nt, Homo sapiens
  misc_RNA (1)...(19): siRNA sense strand
caggaaugacgcuggauca

SEQ ID NO: 2386623 - RNA, 19 nt, Homo sapiens
  misc_RNA (1)...(19): siRNA sense strand
caauguggaagcagccaaa

SEQ ID NO: 2386624 - RNA, 19 nt, Homo sapiens
  misc_RNA (1)...(19): siRNA sense strand
caacacggcuagaagcuca

SEQ ID NO: 2386625 - RNA, 19 nt, Homo sapiens
  misc_RNA (1)...(19): siRNA sense strand
cucaagaacgagagagagu

SEQ ID NO: 2386626 - RNA, 19 nt, Homo sapiens
  misc_RNA (1)...(19): siRNA sense strand
gagaaacucaagaacgaga

SEQ ID NO: 2386627 - RNA, 19 nt, Homo sapiens
  misc_RNA (1)...(19): siRNA sense strand
aacucaagaacgagagaga

SEQ ID NO: 2386628 - RNA, 19 nt, Homo sapiens
  misc_RNA (1)...(19): siRNA sense strand
aagaucagauguugcaaaa

SEQ ID NO: 2386629 - RNA, 19 nt, Homo sapiens
  misc_RNA (1)...(19): siRNA sense strand
ggacagauucaaaagauca

SEQ ID NO: 2386630 - RNA, 19 nt, Homo sapiens
  misc_RNA (1)...(19): siRNA sense strand
aacuaguugcagaagaaua

SEQ ID NO: 2386631 - RNA, 19 nt, Homo sapiens
  misc_RNA (1)...(19): siRNA sense strand
gcuucuuaauaccgaucua

SEQ ID NO: 2386632 - RNA, 19 nt, Homo sapiens
  misc_RNA (1)...(19): siRNA sense strand
aaagaucagauguugcaaa

SEQ ID NO: 2386633 - RNA, 19 nt, Homo sapiens
  misc_RNA (1)...(19): siRNA sense strand
ucucaaggaaggaggcaaa

SEQ ID NO: 2386634 - RNA, 19 nt, Homo sapiens
  misc_RNA (1)...(19): siRNA sense strand
aggaaaacgaggauggaaa

SEQ ID NO: 2386635 - RNA, 19 nt, Homo sapiens
  misc_RNA (1)...(19): siRNA sense strand
acaagaaggucaaagccaa

SEQ ID NO: 2386636 - RNA, 19 nt, Homo sapiens
  misc_RNA (1)...(19): siRNA sense strand
aagaagacuccaagaggaa

SEQ ID NO: 2386637 - RNA, 19 nt, Homo sapiens
  misc_RNA (1)...(19): siRNA sense strand
gaaaguaagcugaagcaga

SEQ ID NO: 2386638 - RNA, 19 nt, Homo sapiens
  misc_RNA (1)...(19): siRNA sense strand
gggcaguagaugaugaaga

SEQ ID NO: 2386639 - RNA, 19 nt, Homo sapiens
  misc_RNA (1)...(19): siRNA sense strand
caguagaugaugaagagaa

SEQ ID NO: 2386640 - RNA, 19 nt, Homo sapiens
  misc_RNA (1)...(19): siRNA sense strand
augcaaggguggauaaaca

SEQ ID NO: 2386641 - RNA, 19 nt, Homo sapiens
  misc_RNA (1)...(19): siRNA sense strand
guaacgugucagagaggaa

SEQ ID NO: 2386642 - RNA, 19 nt, Homo sapiens
  misc_RNA (1)...(19): siRNA sense strand
cuaucuggaguuugagaaa

SEQ ID NO: 2386643 - RNA, 19 nt, Homo sapiens
  misc_RNA (1)...(19): siRNA sense strand
ugucagagaggaaggauca

SEQ ID NO: 2386644 - RNA, 19 nt, Homo sapiens
  misc_RNA (1)...(19): siRNA sense strand
agaacaacgaauuuagcaa

SEQ ID NO: 2386645 - RNA, 19 nt, Homo sapiens
  misc_RNA (1)...(19): siRNA sense strand
ggugaaaacaacacggcua

SEQ ID NO: 2386646 - RNA, 19 nt, Homo sapiens
  misc_RNA (1)...(19): siRNA sense strand
caucagucguauuggaagu

SEQ ID NO: 2386647 - RNA, 19 nt, Homo sapiens
  misc_RNA (1)...(19): siRNA sense strand
acucagagcccagaggaaa

SEQ ID NO: 2386648 - RNA, 19 nt, Homo sapiens
  misc_RNA (1)...(19): siRNA sense strand
gaggagaaagcuaacggaa

SEQ ID NO: 2386649 - RNA, 19 nt, Homo sapiens
  misc_RNA (1)...(19): siRNA sense strand
aguacaaacugaaagacca

SEQ ID NO: 2386650 - RNA, 19 nt, Homo sapiens
  misc_RNA (1)...(19): siRNA sense strand
acuaguugcagaagaauau

SEQ ID NO: 2386651 - RNA, 19 nt, Homo sapiens
  misc_RNA (1)...(19): siRNA sense strand
caggaaugacgcuggauca

SEQ ID NO: 2386652 - RNA, 19 nt, Homo sapiens
  misc_RNA (1)...(19): siRNA sense strand
caauguggaagcagccaaa

SEQ ID NO: 2386653 - RNA, 19 nt, Homo sapiens
  misc_RNA (1)...(19): siRNA sense strand
gagaagaaaccaaacgugu

SEQ ID NO: 2386654 - RNA, 19 nt, Homo sapiens
  misc_RNA (1)...(19): siRNA sense strand
gguaaaugaggguguugau

SEQ ID NO: 2386655 - RNA, 19 nt, Homo sapiens
  misc_RNA (1)...(19): siRNA sense strand
caacacggcuagaagcuca

SEQ ID NO: 2386656 - RNA, 19 nt, Homo sapiens
  misc_RNA (1)...(19): siRNA sense strand
cucaagaacgagagagagu

SEQ ID NO: 2386657 - RNA, 19 nt, Homo sapiens
  misc_RNA (1)...(19): siRNA sense strand
gaagacuccaagaggaaaa

SEQ ID NO: 2386658 - RNA, 19 nt, Homo sapiens
  misc_RNA (1)...(19): siRNA sense strand
gagaaacucaagaacgaga

SEQ ID NO: 2386659 - RNA, 19 nt, Homo sapiens
  misc_RNA (1)...(19): siRNA sense strand
caccaagcauuaagcaaaa

SEQ ID NO: 2386660 - RNA, 19 nt, Homo sapiens
  misc_RNA (1)...(19): siRNA sense strand
cgaugaguacaaacugaaa

SEQ ID NO: 2386661 - RNA, 19 nt, Homo sapiens
  misc_RNA (1)...(19): siRNA sense strand
aacucaagaacgagagaga

SEQ ID NO: 2386662 - RNA, 19 nt, Homo sapiens
  misc_RNA (1)...(19): siRNA sense strand
aaagaagacuccaagagga

SEQ ID NO: 2386663 - RNA, 19 nt, Homo sapiens
  misc_RNA (1)...(19): siRNA sense strand
uugaaugggcaguagauga

SEQ ID NO: 2386664 - RNA, 19 nt, Homo sapiens
  misc_RNA (1)...(19): siRNA sense strand
gacuaugagaagaaaccaa

SEQ ID NO: 2386665 - RNA, 19 nt, Homo sapiens
  misc_RNA (1)...(19): siRNA sense strand
caaucaagaaugagaagcu

SEQ ID NO: 2386666 - RNA, 19 nt, Homo sapiens
  misc_RNA (1)...(19): siRNA sense strand
aguacugaggagaaagcua

SEQ ID NO: 2386667 - RNA, 19 nt, Homo sapiens
  misc_RNA (1)...(19): siRNA sense strand
aagccaaggacgucgauga

SEQ ID NO: 2386668 - RNA, 19 nt, Homo sapiens
  misc_RNA (1)...(19): siRNA sense strand
aagaucagauguugcaaaa

SEQ ID NO: 2386669 - RNA, 19 nt, Homo sapiens
  misc_RNA (1)...(19): siRNA sense strand
ggaaaauucaugcagauau

SEQ ID NO: 2386670 - RNA, 19 nt, Homo sapiens
  misc_RNA (1)...(19): siRNA sense strand
agucaagcguaacguguca

SEQ ID NO: 2386671 - RNA, 19 nt, Homo sapiens
  misc_RNA (1)...(19): siRNA sense strand
ggacagauucaaaagauca

SEQ ID NO: 2386672 - RNA, 19 nt, Homo sapiens
  misc_RNA (1)...(19): siRNA sense strand
acuaugagaagaaaccaaa

SEQ ID NO: 2386673 - RNA, 19 nt, Homo sapiens
  misc_RNA (1)...(19): siRNA sense strand
aagcguaacgugucagaga

SEQ ID NO: 2386674 - RNA, 19 nt, Homo sapiens
  misc_RNA (1)...(19): siRNA sense strand
cucagagcccagaggaaau

SEQ ID NO: 2386675 - RNA, 19 nt, Homo sapiens
  misc_RNA (1)...(19): siRNA sense strand
aacuaguugcagaagaaua

SEQ ID NO: 2386676 - RNA, 19 nt, Homo sapiens
  misc_RNA (1)...(19): siRNA sense strand
gcuucuuaauaccgaucua

SEQ ID NO: 2386677 - RNA, 19 nt, Homo sapiens
  misc_RNA (1)...(19): siRNA sense strand
cggaaaauucaugcagaua

SEQ ID NO: 2386678 - RNA, 19 nt, Homo sapiens
  misc_RNA (1)...(19): siRNA sense strand
augaaauguaugucagcau

SEQ ID NO: 2386679 - RNA, 19 nt, Homo sapiens
  misc_RNA (1)...(19): siRNA sense strand
cugaagaagucgcacucga

SEQ ID NO: 2386680 - RNA, 19 nt, Homo sapiens
  misc_RNA (1)...(19): siRNA sense strand
aaagaucagauguugcaaa

SEQ ID NO: 2386681 - RNA, 19 nt, Homo sapiens
  misc_RNA (1)...(19): siRNA sense strand
aggagaaagcuaacggaac

SEQ ID NO: 2386682 - RNA, 19 nt, Homo sapiens
  misc_RNA (1)...(19): siRNA sense strand
aggaugaauacaagccaga

SEQ ID NO: 2386683 - RNA, 19 nt, Homo sapiens
  misc_RNA (1)...(19): siRNA sense strand
cggcagaggacaauaacaa

SEQ ID NO: 2386684 - RNA, 19 nt, Homo sapiens
  misc_RNA (1)...(19): siRNA sense strand
gaguugaagcccaggagaa

SEQ ID NO: 2386685 - RNA, 19 nt, Homo sapiens
  misc_RNA (1)...(19): siRNA sense strand
gagaacaagcugaagaaaa

SEQ ID NO: 2386686 - RNA, 19 nt, Homo sapiens
  misc_RNA (1)...(19): siRNA sense strand
gggcaucgagauugguaaa

SEQ ID NO: 2386687 - RNA, 19 nt, Homo sapiens
  misc_RNA (1)...(19): siRNA sense strand
ccgucagacccaagagcaa

SEQ ID NO: 2386688 - RNA, 19 nt, Homo sapiens
  misc_RNA (1)...(19): siRNA sense strand
gcugaaguguggaggggaa

SEQ ID NO: 2386689 - RNA, 19 nt, Homo sapiens
  misc_RNA (1)...(19): siRNA sense strand
acaccaaugccaauggaaa

SEQ ID NO: 2386690 - RNA, 19 nt, Homo sapiens
  misc_RNA (1)...(19): siRNA sense strand
gcaaaaucaugaacggcaa

SEQ ID NO: 2386691 - RNA, 19 nt, Homo sapiens
  misc_RNA (1)...(19): siRNA sense strand
ccgauguggacaauggaaa

SEQ ID NO: 2386692 - RNA, 19 nt, Homo sapiens
  misc_RNA (1)...(19): siRNA sense strand
cgagauugguaaagugcca

SEQ ID NO: 2386693 - RNA, 19 nt, Homo sapiens
  misc_RNA (1)...(19): siRNA sense strand
cagacaagugugaggagau

SEQ ID NO: 2386694 - RNA, 19 nt, Homo sapiens
  misc_RNA (1)...(19): siRNA sense strand
aggagauggaggaaggcua

SEQ ID NO: 2386695 - RNA, 19 nt, Homo sapiens
  misc_RNA (1)...(19): siRNA sense strand
ugaacaaagguguggcgua

SEQ ID NO: 2386696 - RNA, 19 nt, Homo sapiens
  misc_RNA (1)...(19): siRNA sense strand
auagaaagguucagugcca

SEQ ID NO: 2386697 - RNA, 19 nt, Homo sapiens
  misc_RNA (1)...(19): siRNA sense strand
gcaaacagcugguggagag

SEQ ID NO: 2386698 - RNA, 19 nt, Homo sapiens
  misc_RNA (1)...(19): siRNA sense strand
agauauggcagcuaggcaa

SEQ ID NO: 2386699 - RNA, 19 nt, Homo sapiens
  misc_RNA (1)...(19): siRNA sense strand
aggagaacaagcugaagaa

SEQ ID NO: 2386700 - RNA, 19 nt, Homo sapiens
  misc_RNA (1)...(19): siRNA sense strand
acggagggaagaagugaaa

SEQ ID NO: 2386701 - RNA, 19 nt, Homo sapiens
  misc_RNA (1)...(19): siRNA sense strand
cagauucagcagaggauuu

SEQ ID NO: 2386702 - RNA, 19 nt, Homo sapiens
  misc_RNA (1)...(19): siRNA sense strand
cugcugaaauagaaagguu

SEQ ID NO: 2386703 - RNA, 19 nt, Homo sapiens
  misc_RNA (1)...(19): siRNA sense strand
cgugaaugcugcugauagu

SEQ ID NO: 2386704 - RNA, 19 nt, Homo sapiens
  misc_RNA (1)...(19): siRNA sense strand
cugucgagauguuguagaa

SEQ ID NO: 2386705 - RNA, 19 nt, Homo sapiens
  misc_RNA (1)...(19): siRNA sense strand
auugaaagaacgaguugaa

SEQ ID NO: 2386706 - RNA, 19 nt, Homo sapiens
  misc_RNA (1)...(19): siRNA sense strand
gauaaagggucaaggccac

SEQ ID NO: 2386707 - RNA, 19 nt, Homo sapiens
  misc_RNA (1)...(19): siRNA sense strand
ugaacgucucuaugggaaa

SEQ ID NO: 2386708 - RNA, 19 nt, Homo sapiens
  misc_RNA (1)...(19): siRNA sense strand
uauauggggugcaggaaaa

SEQ ID NO: 2386709 - RNA, 19 nt, Homo sapiens
  misc_RNA (1)...(19): siRNA sense strand
uugcaaggaaccuggagaa

SEQ ID NO: 2386710 - RNA, 19 nt, Homo sapiens
  misc_RNA (1)...(19): siRNA sense strand
agcaacgaacucagagaaa

SEQ ID NO: 2386711 - RNA, 19 nt, Homo sapiens
  misc_RNA (1)...(19): siRNA sense strand
uaauaaauguaccuggaga

SEQ ID NO: 2386712 - RNA, 19 nt, Homo sapiens
  misc_RNA (1)...(19): siRNA sense strand
ggacaagcgaaucagugaa

SEQ ID NO: 2386713 - RNA, 19 nt, Homo sapiens
  misc_RNA (1)...(19): siRNA sense strand
ugauaaagggucaaggcca

SEQ ID NO: 2386714 - RNA, 19 nt, Homo sapiens
  misc_RNA (1)...(19): siRNA sense strand
uuggagaccgggagggcua

SEQ ID NO: 2386715 - RNA, 19 nt, Homo sapiens
  misc_RNA (1)...(19): siRNA sense strand
ccaauggaaaccuggaaga

SEQ ID NO: 2386716 - RNA, 19 nt, Homo sapiens
  misc_RNA (1)...(19): siRNA sense strand
guacugagaaagagccuga

SEQ ID NO: 2386717 - RNA, 19 nt, Homo sapiens
  misc_RNA (1)...(19): siRNA sense strand
gcguaugcucugugggacu

SEQ ID NO: 2386718 - RNA, 19 nt, Homo sapiens
  misc_RNA (1)...(19): siRNA sense strand
gugaacgucucuaugggaa

SEQ ID NO: 2386719 - RNA, 19 nt, Homo sapiens
  misc_RNA (1)...(19): siRNA sense strand
cagcaagcccaacgaugaa

SEQ ID NO: 2386720 - RNA, 19 nt, Homo sapiens
  misc_RNA (1)...(19): siRNA sense strand
aggaaaagaagcaggaagu

SEQ ID NO: 2386721 - RNA, 19 nt, Homo sapiens
  misc_RNA (1)...(19): siRNA sense strand
cuggaaaggaggaaggaag

SEQ ID NO: 2386722 - RNA, 19 nt, Homo sapiens
  misc_RNA (1)...(19): siRNA sense strand
aauaaauguaccuggagau

SEQ ID NO: 2386723 - RNA, 19 nt, Homo sapiens
  misc_RNA (1)...(19): siRNA sense strand
auaaauguaccuggagaua

SEQ ID NO: 2386724 - RNA, 19 nt, Homo sapiens
  misc_RNA (1)...(19): siRNA sense strand
ccuccaagcuaugggacau

SEQ ID NO: 2386725 - RNA, 19 nt, Homo sapiens
  misc_RNA (1)...(19): siRNA sense strand
ggacaauggaaacaccaau

SEQ ID NO: 2386726 - RNA, 19 nt, Homo sapiens
  misc_RNA (1)...(19): siRNA sense strand
ccucagccaccuucagaaa

SEQ ID NO: 2386727 - RNA, 19 nt, Homo sapiens
  misc_RNA (1)...(19): siRNA sense strand
caggagaacaagcugaaga

SEQ ID NO: 2386728 - RNA, 19 nt, Homo sapiens
  misc_RNA (1)...(19): siRNA sense strand
acuacagauucguaaccaa

SEQ ID NO: 2386729 - RNA, 19 nt, Homo sapiens
  misc_RNA (1)...(19): siRNA sense strand
ccaccaagcucacgcccau

SEQ ID NO: 2386730 - RNA, 19 nt, Homo sapiens
  misc_RNA (1)...(19): siRNA sense strand
gaucaaaccccgacagcga

SEQ ID NO: 2386731 - RNA, 19 nt, Homo sapiens
  misc_RNA (1)...(19): siRNA sense strand
ugagaggacaagucgacua

SEQ ID NO: 2386732 - RNA, 19 nt, Homo sapiens
  misc_RNA (1)...(19): siRNA sense strand
cagaggacaauaacaacaa

SEQ ID NO: 2386733 - RNA, 19 nt, Homo sapiens
  misc_RNA (1)...(19): siRNA sense strand
agaaauugaaagaacgagu

SEQ ID NO: 2386734 - RNA, 19 nt, Homo sapiens
  misc_RNA (1)...(19): siRNA sense strand
uugaagcccaggagaacaa

SEQ ID NO: 2386735 - RNA, 19 nt, Homo sapiens
  misc_RNA (1)...(19): siRNA sense strand
ugaucagcuuagucagcaa

SEQ ID NO: 2386736 - RNA, 19 nt, Homo sapiens
  misc_RNA (1)...(19): siRNA sense strand
cgacaagcucccuggaaag

SEQ ID NO: 2386737 - RNA, 19 nt, Homo sapiens
  misc_RNA (1)...(19): siRNA sense strand
aggacgaaagcgagacuga

SEQ ID NO: 2386738 - RNA, 19 nt, Homo sapiens
  misc_RNA (1)...(19): siRNA sense strand
gcaacaaugaacagauuuu

SEQ ID NO: 2386739 - RNA, 19 nt, Homo sapiens
  misc_RNA (1)...(19): siRNA sense strand
uguaauaaauguaccugga

SEQ ID NO: 2386740 - RNA, 19 nt, Homo sapiens
  misc_RNA (1)...(19): siRNA sense strand
gcaaauacacauacgggaa

SEQ ID NO: 2386741 - RNA, 19 nt, Homo sapiens
  misc_RNA (1)...(19): siRNA sense strand
cgguauaauaggucugaua

SEQ ID NO: 2386742 - RNA, 19 nt, Homo sapiens
  misc_RNA (1)...(19): siRNA sense strand
cagcagagugaaaugguaa

SEQ ID NO: 2386743 - RNA, 19 nt, Homo sapiens
  misc_RNA (1)...(19): siRNA sense strand
cagugaaguaaaugcaaua

SEQ ID NO: 2386744 - RNA, 19 nt, Homo sapiens
  misc_RNA (1)...(19): siRNA sense strand
cugaaguaguugagcgcuu

SEQ ID NO: 2386745 - RNA, 19 nt, Homo sapiens
  misc_RNA (1)...(19): siRNA sense strand
aagccaaacuccaggacau

SEQ ID NO: 2386746 - RNA, 19 nt, Homo sapiens
  misc_RNA (1)...(19): siRNA sense strand
gugaaagaucagaauggaa

SEQ ID NO: 2386747 - RNA, 19 nt, Homo sapiens
  misc_RNA (1)...(19): siRNA sense strand
gugugagcaugguagaaua

SEQ ID NO: 2386748 - RNA, 19 nt, Homo sapiens
  misc_RNA (1)...(19): siRNA sense strand
ccugaagacaagagcaaaa

SEQ ID NO: 2386749 - RNA, 19 nt, Homo sapiens
  misc_RNA (1)...(19): siRNA sense strand
ccuuauacaccaugaugaa

SEQ ID NO: 2386750 - RNA, 19 nt, Homo sapiens
  misc_RNA (1)...(19): siRNA sense strand
uaaaggagcuggaugguca

SEQ ID NO: 2386751 - RNA, 19 nt, Homo sapiens
  misc_RNA (1)...(19): siRNA sense strand
auacagagcaguugguaca

SEQ ID NO: 2386752 - RNA, 19 nt, Homo sapiens
  misc_RNA (1)...(19): siRNA sense strand
gaccugaagacaagagcaa

SEQ ID NO: 2386753 - RNA, 19 nt, Homo sapiens
  misc_RNA (1)...(19): siRNA sense strand
acacauacgggaagcauau

SEQ ID NO: 2386754 - RNA, 19 nt, Homo sapiens
  misc_RNA (1)...(19): siRNA sense strand
ucauggaaacagugaagua

SEQ ID NO: 2386755 - RNA, 19 nt, Homo sapiens
  misc_RNA (1)...(19): siRNA sense strand
gcagaguaauucagcgcau

SEQ ID NO: 2386756 - RNA, 19 nt, Homo sapiens
  misc_RNA (1)...(19): siRNA sense strand
gacaaaugguaguggucga

SEQ ID NO: 2386757 - RNA, 19 nt, Homo sapiens
  misc_RNA (1)...(19): siRNA sense strand
gugaaaugguaaaggagcu

SEQ ID NO: 2386758 - RNA, 19 nt, Homo sapiens
  misc_RNA (1)...(19): siRNA sense strand
gcauuuaggaggacugaca

SEQ ID NO: 2386759 - RNA, 19 nt, Homo sapiens
  misc_RNA (1)...(19): siRNA sense strand
ccagcaauguaguagaaaa

SEQ ID NO: 2386760 - RNA, 19 nt, Homo sapiens
  misc_RNA (1)...(19): siRNA sense strand
auguauggcugccgcguua

SEQ ID NO: 2386761 - RNA, 19 nt, Homo sapiens
  misc_RNA (1)...(19): siRNA sense strand
cguuauucagaaagcauua

SEQ ID NO: 2386762 - RNA, 19 nt, Homo sapiens
  misc_RNA (1)...(19): siRNA sense strand
gaaccugcucagagaaaga

SEQ ID NO: 2386763 - RNA, 19 nt, Homo sapiens
  misc_RNA (1)...(19): siRNA sense strand
gagaagaucuggacagggu

SEQ ID NO: 2386764 - RNA, 19 nt, Homo sapiens
  misc_RNA (1)...(19): siRNA sense strand
gugccaaauccauacauua

SEQ ID NO: 2386765 - RNA, 19 nt, Homo sapiens
  misc_RNA (1)...(19): siRNA sense strand
ggaagcauauacuggccaa

SEQ ID NO: 2386766 - RNA, 19 nt, Homo sapiens
  misc_RNA (1)...(19): siRNA sense strand
auggaaacagugaaguaaa

SEQ ID NO: 2386767 - RNA, 19 nt, Homo sapiens
  misc_RNA (1)...(19): siRNA sense strand
ggaccaaaacagagaucuu

SEQ ID NO: 2386768 - RNA, 19 nt, Homo sapiens
  misc_RNA (1)...(19): siRNA sense strand
caacaaaagauggacaaaa

SEQ ID NO: 2386769 - RNA, 19 nt, Homo sapiens
  misc_RNA (1)...(19): siRNA sense strand
ccucaguggauuugguuca

SEQ ID NO: 2386770 - RNA, 19 nt, Homo sapiens
  misc_RNA (1)...(19): siRNA sense strand
uuacaauagucugggauuu

SEQ ID NO: 2386771 - RNA, 19 nt, Homo sapiens
  misc_RNA (1)...(19): siRNA sense strand
aacagauggaccugagaaa

SEQ ID NO: 2386772 - RNA, 19 nt, Homo sapiens
  misc_RNA (1)...(19): siRNA sense strand
ucuuaaacaaggagaugau

SEQ ID NO: 2386773 - RNA, 19 nt, Homo sapiens
  misc_RNA (1)...(19): siRNA sense strand
gcaauaugcauuagcagca

SEQ ID NO: 2386774 - RNA, 19 nt, Homo sapiens
  misc_RNA (1)...(19): siRNA sense strand
gcauuagaaucucggggaa

SEQ ID NO: 2386775 - RNA, 19 nt, Homo sapiens
  misc_RNA (1)...(19): siRNA sense strand
cuuccuaauccuacagcua

SEQ ID NO: 2386776 - RNA, 19 nt, Homo sapiens
  misc_RNA (1)...(19): siRNA sense strand
ccgcaguagauuauuggaa

SEQ ID NO: 2386777 - RNA, 19 nt, Homo sapiens
  misc_RNA (1)...(19): siRNA sense strand
cuauuaugguacagagaag

SEQ ID NO: 2386778 - RNA, 19 nt, Homo sapiens
  misc_RNA (1)...(19): siRNA sense strand
gagcaaaauuguuuccgaa

SEQ ID NO: 2386779 - RNA, 19 nt, Homo sapiens
  misc_RNA (1)...(19): siRNA sense strand
aggcauauuucuuggggau

SEQ ID NO: 2386780 - RNA, 19 nt, Homo sapiens
  misc_RNA (1)...(19): siRNA sense strand
uggucaaccuggaaguaca

SEQ ID NO: 2386781 - RNA, 19 nt, Homo sapiens
  misc_RNA (1)...(19): siRNA sense strand
gcaaaauaucgaagugcuu

SEQ ID NO: 2386782 - RNA, 19 nt, Homo sapiens
  misc_RNA (1)...(19): siRNA sense strand
uggacauauaguugaguuu

SEQ ID NO: 2386783 - RNA, 19 nt, Homo sapiens
  misc_RNA (1)...(19): siRNA sense strand
cuagauucauacagcaaaa

SEQ ID NO: 2386784 - RNA, 19 nt, Homo sapiens
  misc_RNA (1)...(19): siRNA sense strand
cuagagaugcugaaacaga

SEQ ID NO: 2386785 - RNA, 19 nt, Homo sapiens
  misc_RNA (1)...(19): siRNA sense strand
uuucaagggacaaguauuu

SEQ ID NO: 2386786 - RNA, 19 nt, Homo sapiens
  misc_RNA (1)...(19): siRNA sense strand
acaccaugaugaaggacca

SEQ ID NO: 2386787 - RNA, 19 nt, Homo sapiens
  misc_RNA (1)...(19): siRNA sense strand
aaaugguaguggucgauau

SEQ ID NO: 2386788 - RNA, 19 nt, Homo sapiens
  misc_RNA (1)...(19): siRNA sense strand
agauaaucaugcacaagau

SEQ ID NO: 2386789 - RNA, 19 nt, Homo sapiens
  misc_RNA (1)...(19): siRNA sense strand
cugagaaaggagaucaaaa

SEQ ID NO: 2386790 - RNA, 19 nt, Homo sapiens
  misc_RNA (1)...(19): siRNA sense strand
auuuaggaggacugacaaa

SEQ ID NO: 2386791 - RNA, 19 nt, Homo sapiens
  misc_RNA (1)...(19): siRNA sense strand
acagugaaguaaaugcaau

SEQ ID NO: 2386792 - RNA, 19 nt, Homo sapiens
  misc_RNA (1)...(19): siRNA sense strand
ugaugaauggagagagacu

SEQ ID NO: 2386793 - RNA, 19 nt, Homo sapiens
  misc_RNA (1)...(19): siRNA sense strand
uaaacaaggagaugaugau

SEQ ID NO: 2386794 - RNA, 19 nt, Homo sapiens
  misc_RNA (1)...(19): siRNA sense strand
aauaaauggcagagguuug

SEQ ID NO: 2386795 - RNA, 19 nt, Homo sapiens
  misc_RNA (1)...(19): siRNA sense strand
gggaacagagcgugcgcaa

SEQ ID NO: 2386796 - RNA, 19 nt, Homo sapiens
  misc_RNA (1)...(19): siRNA sense strand
aagcagaaugugaggaaga

SEQ ID NO: 2386797 - RNA, 19 nt, Homo sapiens
  misc_RNA (1)...(19): siRNA sense strand
gcagaaagacagccgggaa

SEQ ID NO: 2386798 - RNA, 19 nt, Homo sapiens
  misc_RNA (1)...(19): siRNA sense strand
gggaaauggagaagggaag

SEQ ID NO: 2386799 - RNA, 19 nt, Homo sapiens
  misc_RNA (1)...(19): siRNA sense strand
cgggaaauggagaagggaa

SEQ ID NO: 2386800 - RNA, 19 nt, Homo sapiens
  misc_RNA (1)...(19): siRNA sense strand
agaaggaauaugaagacaa

SEQ ID NO: 2386801 - RNA, 19 nt, Homo sapiens
  misc_RNA (1)...(19): siRNA sense strand
gauggaaguuauuugggaa

SEQ ID NO: 2386802 - RNA, 19 nt, Homo sapiens
  misc_RNA (1)...(19): siRNA sense strand
gauuuaugguggcagggaa

SEQ ID NO: 2386803 - RNA, 19 nt, Homo sapiens
  misc_RNA (1)...(19): siRNA sense strand
gcgcauuucaagaagaaca

SEQ ID NO: 2386804 - RNA, 19 nt, Homo sapiens
  misc_RNA (1)...(19): siRNA sense strand
aagagaauacagaaggaau

SEQ ID NO: 2386805 - RNA, 19 nt, Homo sapiens
  misc_RNA (1)...(19): siRNA sense strand
auggaaguuauuugggaaa

SEQ ID NO: 2386806 - RNA, 19 nt, Homo sapiens
  misc_RNA (1)...(19): siRNA sense strand
agacaaggcuggaagaccu

SEQ ID NO: 2386807 - RNA, 19 nt, Homo sapiens
  misc_RNA (1)...(19): siRNA sense strand
gcuagaaaacaaagugcaa

SEQ ID NO: 2386808 - RNA, 19 nt, Homo sapiens
  misc_RNA (1)...(19): siRNA sense strand
ugaaagaagcccagcgaag

SEQ ID NO: 2386809 - RNA, 19 nt, Homo sapiens
  misc_RNA (1)...(19): siRNA sense strand
cgaggaaagcauuggaaac

SEQ ID NO: 2386810 - RNA, 19 nt, Homo sapiens
  misc_RNA (1)...(19): siRNA sense strand
gaagaaagaugcagagucg

SEQ ID NO: 2386811 - RNA, 19 nt, Homo sapiens
  misc_RNA (1)...(19): siRNA sense strand
aggcaaagucuggagcuua

SEQ ID NO: 2386812 - RNA, 19 nt, Homo sapiens
  misc_RNA (1)...(19): siRNA sense strand
aaauggugguucaggccaa

SEQ ID NO: 2386813 - RNA, 19 nt, Homo sapiens
  misc_RNA (1)...(19): siRNA sense strand
caguguugaucuugaacuu

SEQ ID NO: 2386814 - RNA, 19 nt, Homo sapiens
  misc_RNA (1)...(19): siRNA sense strand
ccauuggcaacgaguuaaa

SEQ ID NO: 2386815 - RNA, 19 nt, Homo sapiens
  misc_RNA (1)...(19): siRNA sense strand
ccauugugacccuggagaa

SEQ ID NO: 2386816 - RNA, 19 nt, Homo sapiens
  misc_RNA (1)...(19): siRNA sense strand
gaucuuaccuaacugggaa

SEQ ID NO: 2386817 - RNA, 19 nt, Homo sapiens
  misc_RNA (1)...(19): siRNA sense strand
cgaaacaagaagugggcuc

SEQ ID NO: 2386818 - RNA, 19 nt, Homo sapiens
  misc_RNA (1)...(19): siRNA sense strand
gaugcagagucgaggaaag

SEQ ID NO: 2386819 - RNA, 19 nt, Homo sapiens
  misc_RNA (1)...(19): siRNA sense strand
ggagaaugacgaugaccca

SEQ ID NO: 2386820 - RNA, 19 nt, Homo sapiens
  misc_RNA (1)...(19): siRNA sense strand
uggaagaccuagcaagcca

SEQ ID NO: 2386821 - RNA, 19 nt, Homo sapiens
  misc_RNA (1)...(19): siRNA sense strand
gcagagucgaggaaagcau

SEQ ID NO: 2386822 - RNA, 19 nt, Homo sapiens
  misc_RNA (1)...(19): siRNA sense strand
ucgaggaaagcauuggaaa

SEQ ID NO: 2386823 - RNA, 19 nt, Homo sapiens
  misc_RNA (1)...(19): siRNA sense strand
auuuaugguggcagggaau

SEQ ID NO: 2386824 - RNA, 19 nt, Homo sapiens
  misc_RNA (1)...(19): siRNA sense strand
uggguuauguccagggcau

SEQ ID NO: 2386825 - RNA, 19 nt, Homo sapiens
  misc_RNA (1)...(19): siRNA sense strand
gaagaagcucagaagcaca

SEQ ID NO: 2386826 - RNA, 19 nt, Homo sapiens
  misc_RNA (1)...(19): siRNA sense strand
uccaagugugagaggcaaa

SEQ ID NO: 2386827 - RNA, 19 nt, Homo sapiens
  misc_RNA (1)...(19): siRNA sense strand
gcccagaaggauucaaaga

SEQ ID NO: 2386828 - RNA, 19 nt, Homo sapiens
  misc_RNA (1)...(19): siRNA sense strand
gaggcaaagucuggagcuu

SEQ ID NO: 2386829 - RNA, 19 nt, Homo sapiens
  misc_RNA (1)...(19): siRNA sense strand
cuggacauuucuagaacau

SEQ ID NO: 2386830 - RNA, 19 nt, Homo sapiens
  misc_RNA (1)...(19): siRNA sense strand
ugaagcuguucgaggacau

SEQ ID NO: 2386831 - RNA, 19 nt, Homo sapiens
  misc_RNA (1)...(19): siRNA sense strand
caggcuaugacucgguaaa

SEQ ID NO: 2386832 - RNA, 19 nt, Homo sapiens
  misc_RNA (1)...(19): siRNA sense strand
ggauggaaguuauuuggga

SEQ ID NO: 2386833 - RNA, 19 nt, Homo sapiens
  misc_RNA (1)...(19): siRNA sense strand
agaacgaagaugcugguuu

SEQ ID NO: 2386834 - RNA, 19 nt, Homo sapiens
  misc_RNA (1)...(19): siRNA sense strand
ggaaagcgccacuccgaga

SEQ ID NO: 2386835 - RNA, 19 nt, Homo sapiens
  misc_RNA (1)...(19): siRNA sense strand
gcuggaagaaagaugcaga

SEQ ID NO: 2386836 - RNA, 19 nt, Homo sapiens
  misc_RNA (1)...(19): siRNA sense strand
ucuccaaagcagaauguga

SEQ ID NO: 2386837 - RNA, 19 nt, Homo sapiens
  misc_RNA (1)...(19): siRNA sense strand
cagaaggaauaugaagaca

SEQ ID NO: 2386838 - RNA, 19 nt, Homo sapiens
  misc_RNA (1)...(19): siRNA sense strand
ggaacagagcgugcgcaaa

SEQ ID NO: 2386839 - RNA, 19 nt, Homo sapiens
  misc_RNA (1)...(19): siRNA sense strand
cgguaaagcucuauagccc

SEQ ID NO: 2386840 - RNA, 19 nt, Homo sapiens
  misc_RNA (1)...(19): siRNA sense strand
aaaacaaagugcaaggcuu

SEQ ID NO: 2386841 - RNA, 19 nt, Homo sapiens
  misc_RNA (1)...(19): siRNA sense strand
gaaucuugacuuugaacca

SEQ ID NO: 2386842 - RNA, 19 nt, Homo sapiens
  misc_RNA (1)...(19): siRNA sense strand
agaucaagauggaggaaau

SEQ ID NO: 2386843 - RNA, 19 nt, Homo sapiens
  misc_RNA (1)...(19): siRNA sense strand
gcaaagugucauaaggaaa

SEQ ID NO: 2386844 - RNA, 19 nt, Homo sapiens
  misc_RNA (1)...(19): siRNA sense strand
gcaugaagcucuaaggcau

SEQ ID NO: 2386845 - RNA, 19 nt, Homo sapiens
  misc_RNA (1)...(19): siRNA sense strand
ggauuguggaugagaagaa

SEQ ID NO: 2386846 - RNA, 19 nt, Homo sapiens
  misc_RNA (1)...(19): siRNA sense strand
ggaaauggacguaggggaa

SEQ ID NO: 2386847 - RNA, 19 nt, Homo sapiens
  misc_RNA (1)...(19): siRNA sense strand
agguaaaguuggccgagua

SEQ ID NO: 2386848 - RNA, 19 nt, Homo sapiens
  misc_RNA (1)...(19): siRNA sense strand
augucgaagcagaggauaa

SEQ ID NO: 2386849 - RNA, 19 nt, Homo sapiens
  misc_RNA (1)...(19): siRNA sense strand
ggauaauaccaaugucaau

SEQ ID NO: 2386850 - RNA, 19 nt, Homo sapiens
  misc_RNA (1)...(19): siRNA sense strand
agaugaaggcgcuguuaua

SEQ ID NO: 2386851 - RNA, 19 nt, Homo sapiens
  misc_RNA (1)...(19): siRNA sense strand
ggauaauggugcuaagaac

SEQ ID NO: 2386852 - RNA, 19 nt, Homo sapiens
  misc_RNA (1)...(19): siRNA sense strand
ucgcaaggcuauugaacga

SEQ ID NO: 2386853 - RNA, 19 nt, Homo sapiens
  misc_RNA (1)...(19): siRNA sense strand
acauuaaagagcagacaau

SEQ ID NO: 2386854 - RNA, 19 nt, Homo sapiens
  misc_RNA (1)...(19): siRNA sense strand
gggaaagguaacagaaauc

SEQ ID NO: 2386855 - RNA, 19 nt, Homo sapiens
  misc_RNA (1)...(19): siRNA sense strand
gaggauggacugauggaau

SEQ ID NO: 2386856 - RNA, 19 nt, Homo sapiens
  misc_RNA (1)...(19): siRNA sense strand
ccgaggagguggugguagu

SEQ ID NO: 2386857 - RNA, 19 nt, Homo sapiens
  misc_RNA (1)...(19): siRNA sense strand
ggacguaggggaaagguaa

SEQ ID NO: 2386858 - RNA, 19 nt, Homo sapiens
  misc_RNA (1)...(19): siRNA sense strand
agauguugcuaaaguggaa

SEQ ID NO: 2386859 - RNA, 19 nt, Homo sapiens
  misc_RNA (1)...(19): siRNA sense strand
aguuaaggcugcugccaau

SEQ ID NO: 2386860 - RNA, 19 nt, Homo sapiens
  misc_RNA (1)...(19): siRNA sense strand
ccuuaauaaucacguagaa

SEQ ID NO: 2386861 - RNA, 19 nt, Homo sapiens
  misc_RNA (1)...(19): siRNA sense strand
uggcugaacuguugguaca

SEQ ID NO: 2386862 - RNA, 19 nt, Homo sapiens
  misc_RNA (1)...(19): siRNA sense strand
cgaaauaagaagggucaau

SEQ ID NO: 2386863 - RNA, 19 nt, Homo sapiens
  misc_RNA (1)...(19): siRNA sense strand
ggggaaagguaacagaaau

SEQ ID NO: 2386864 - RNA, 19 nt, Homo sapiens
  misc_RNA (1)...(19): siRNA sense strand
auggaauguuugagacuuu

SEQ ID NO: 2386865 - RNA, 19 nt, Homo sapiens
  misc_RNA (1)...(19): siRNA sense strand
uacaaaaggacaaggauaa

SEQ ID NO: 2386866 - RNA, 19 nt, Homo sapiens
  misc_RNA (1)...(19): siRNA sense strand
aaacaagcgccgacagaca

SEQ ID NO: 2386867 - RNA, 19 nt, Homo sapiens
  misc_RNA (1)...(19): siRNA sense strand
agggaaaaguucagaagau

SEQ ID NO: 2386868 - RNA, 19 nt, Homo sapiens
  misc_RNA (1)...(19): siRNA sense strand
gcagaauggcaacaggaau

SEQ ID NO: 2386869 - RNA, 19 nt, Homo sapiens
  misc_RNA (1)...(19): siRNA sense strand
uaaaguuggccgaguacaa

SEQ ID NO: 2386870 - RNA, 19 nt, Homo sapiens
  misc_RNA (1)...(19): siRNA sense strand
gaugauaucucaaguggga

SEQ ID NO: 2386871 - RNA, 19 nt, Homo sapiens
  misc_RNA (1)...(19): siRNA sense strand
uuacaaaaggacaaggaua

SEQ ID NO: 2386872 - RNA, 19 nt, Homo sapiens
  misc_RNA (1)...(19): siRNA sense strand
guucaauccaggacaaaga

SEQ ID NO: 2386873 - RNA, 19 nt, Homo sapiens
  misc_RNA (1)...(19): siRNA sense strand
cgucugaagaauaugauuu

SEQ ID NO: 2386874 - RNA, 19 nt, Homo sapiens
  misc_RNA (1)...(19): siRNA sense strand
gagaaugggcugaagcgau

SEQ ID NO: 2386875 - RNA, 19 nt, Homo sapiens
  misc_RNA (1)...(19): siRNA sense strand
ggcuauugaacgaaggauu

SEQ ID NO: 2386876 - RNA, 19 nt, Homo sapiens
  misc_RNA (1)...(19): siRNA sense strand
ggaacaucuuggacauaca

SEQ ID NO: 2386877 - RNA, 19 nt, Homo sapiens
  misc_RNA (1)...(19): siRNA sense strand
uguugguacaucaggguaa

SEQ ID NO: 2386878 - RNA, 19 nt, Homo sapiens
  misc_RNA (1)...(19): siRNA sense strand
gaguuggcuuugagggcau

SEQ ID NO: 2386879 - RNA, 19 nt, Homo sapiens
  misc_RNA (1)...(19): siRNA sense strand
cgaaacaagcgccgacaga

SEQ ID NO: 2386880 - RNA, 19 nt, Homo sapiens
  misc_RNA (1)...(19): siRNA sense strand
gguaaugcaaaccuggaua

SEQ ID NO: 2386881 - RNA, 19 nt, Homo sapiens
  misc_RNA (1)...(19): siRNA sense strand
caguauuacaaaaggacaa

SEQ ID NO: 2386882 - RNA, 19 nt, Homo sapiens
  misc_RNA (1)...(19): siRNA sense strand
uggaacuguuuguggcauu

SEQ ID NO: 2386883 - RNA, 19 nt, Homo sapiens
  misc_RNA (1)...(19): siRNA sense strand
uagcaaugcaucuggugaa

SEQ ID NO: 2386884 - RNA, 19 nt, Homo sapiens
  misc_RNA (1)...(19): siRNA sense strand
ccaauggagauguugcuaa

SEQ ID NO: 2386885 - RNA, 19 nt, Homo sapiens
  misc_RNA (1)...(19): siRNA sense strand
agcuugauauucaggauaa

SEQ ID NO: 2386886 - RNA, 19 nt, Homo sapiens
  misc_RNA (1)...(19): siRNA sense strand
gaggauaaagauggugaua

SEQ ID NO: 2386887 - RNA, 19 nt, Homo sapiens
  misc_RNA (1)...(19): siRNA sense strand
cagaauggcaacaggaauc

SEQ ID NO: 2386888 - RNA, 19 nt, Homo sapiens
  misc_RNA (1)...(19): siRNA sense strand
aaguggaagauuugcuuaa

SEQ ID NO: 2386889 - RNA, 19 nt, Homo sapiens
  misc_RNA (1)...(19): siRNA sense strand
caaagugucauaaggaaaa

SEQ ID NO: 2386890 - RNA, 19 nt, Homo sapiens
  misc_RNA (1)...(19): siRNA sense strand
gagcaguaguugaacgaag

SEQ ID NO: 2386891 - RNA, 19 nt, Homo sapiens
  misc_RNA (1)...(19): siRNA sense strand
ugauaucucaagugggaau

SEQ ID NO: 2386892 - RNA, 19 nt, Homo sapiens
  misc_RNA (1)...(19): siRNA sense strand
ccucgaaauuguacagucu

SEQ ID NO: 2386893 - RNA, 19 nt, Homo sapiens
  misc_RNA (1)...(19): siRNA sense strand
ucugcaaagcacuggcaaa

SEQ ID NO: 2386894 - RNA, 19 nt, Homo sapiens
  misc_RNA (1)...(19): siRNA sense strand
gggauaauggugcuaagaa

SEQ ID NO: 2386895 - RNA, 19 nt, Homo sapiens
  misc_RNA (1)...(19): siRNA sense strand
aagauuacagccagaggaa

SEQ ID NO: 2386896 - RNA, 19 nt, Homo sapiens
  misc_RNA (1)...(19): siRNA sense strand
gaacauuguccgaagugga

SEQ ID NO: 2386897 - RNA, 19 nt, Homo sapiens
  misc_RNA (1)...(19): siRNA sense strand
aggacaaggauaauaccaa

SEQ ID NO: 2386898 - RNA, 19 nt, Homo sapiens
  misc_RNA (1)...(19): siRNA sense strand
gccgaguacaacagauuua

SEQ ID NO: 2386899 - RNA, 19 nt, Homo sapiens
  misc_RNA (1)...(19): siRNA sense strand
agguagugcugauuugaau

SEQ ID NO: 2386900 - RNA, 19 nt, Homo sapiens
  misc_RNA (1)...(19): siRNA sense strand
auucaaagccggaggaaaa

SEQ ID NO: 2386901 - RNA, 19 nt, Homo sapiens
  misc_RNA (1)...(19): siRNA sense strand
caaagaacucucaggccaa

SEQ ID NO: 2386902 - RNA, 19 nt, Homo sapiens
  misc_RNA (1)...(19): siRNA sense strand
acaaagacugugagggcuu

SEQ ID NO: 2386903 - RNA, 19 nt, Homo sapiens
  misc_RNA (1)...(19): siRNA sense strand
aggacgaggagaagaaaga

SEQ ID NO: 2386904 - RNA, 19 nt, Homo sapiens
  misc_RNA (1)...(19): siRNA sense strand
ccugaagagggaugagauu

SEQ ID NO: 2386905 - RNA, 19 nt, Homo sapiens
  misc_RNA (1)...(19): siRNA sense strand
gauucaaagccggaggaaa

SEQ ID NO: 2386906 - RNA, 19 nt, Homo sapiens
  misc_RNA (1)...(19): siRNA sense strand
acaaagaacucucaggcca

SEQ ID NO: 2386907 - RNA, 19 nt, Homo sapiens
  misc_RNA (1)...(19): siRNA sense strand
cgaggaacaucuauggcau

SEQ ID NO: 2386908 - RNA, 19 nt, Homo sapiens
  misc_RNA (1)...(19): siRNA sense strand
aggaugaauuugagaagcu

SEQ ID NO: 2386909 - RNA, 19 nt, Homo sapiens
  misc_RNA (1)...(19): siRNA sense strand
gcaacaagucagccgggau

SEQ ID NO: 2386910 - RNA, 19 nt, Homo sapiens
  misc_RNA (1)...(19): siRNA sense strand
agaaagaggccccagacaa

SEQ ID NO: 2386911 - RNA, 19 nt, Homo sapiens
  misc_RNA (1)...(19): siRNA sense strand
ggaaacaugacgagggucu

SEQ ID NO: 2386912 - RNA, 19 nt, Homo sapiens
  misc_RNA (1)...(19): siRNA sense strand
aaacaucagcaaaggaaaa

SEQ ID NO: 2386913 - RNA, 19 nt, Homo sapiens
  misc_RNA (1)...(19): siRNA sense strand
aagcaguggcaaaguggaa

SEQ ID NO: 2386914 - RNA, 19 nt, Homo sapiens
  misc_RNA (1)...(19): siRNA sense strand
ccaguaucaucaagcgcua

SEQ ID NO: 2386915 - RNA, 19 nt, Homo sapiens
  misc_RNA (1)...(19): siRNA sense strand
gcguggacuucgcgcucaa

SEQ ID NO: 2386916 - RNA, 19 nt, Homo sapiens
  misc_RNA (1)...(19): siRNA sense strand
uguacaaguugcuggugau

SEQ ID NO: 2386917 - RNA, 19 nt, Homo sapiens
  misc_RNA (1)...(19): siRNA sense strand
cuguacaaguugcugguga

SEQ ID NO: 2386918 - RNA, 19 nt, Homo sapiens
  misc_RNA (1)...(19): siRNA sense strand
gcuacgugcaccagaacuu

SEQ ID NO: 2386919 - RNA, 19 nt, Homo sapiens
  misc_RNA (1)...(19): siRNA sense strand
acaaaugugaccaggggaa

SEQ ID NO: 2386920 - RNA, 19 nt, Homo sapiens
  misc_RNA (1)...(19): siRNA sense strand
ugcaaaugagugugaccua

SEQ ID NO: 2386921 - RNA, 19 nt, Homo sapiens
  misc_RNA (1)...(19): siRNA sense strand
agggauuagucaagaggaa

SEQ ID NO: 2386922 - RNA, 19 nt, Homo sapiens
  misc_RNA (1)...(19): siRNA sense strand
gguagagacugaagccaca

SEQ ID NO: 2386923 - RNA, 19 nt, Homo sapiens
  misc_RNA (1)...(19): siRNA sense strand
acaaauaaauccacaccca

SEQ ID NO: 2386924 - RNA, 19 nt, Homo sapiens
  misc_RNA (1)...(19): siRNA sense strand
acaaaauguggaagggauu

SEQ ID NO: 2386925 - RNA, 19 nt, Homo sapiens
  misc_RNA (1)...(19): siRNA sense strand
gggauuagucaagaggaau

SEQ ID NO: 2386926 - RNA, 19 nt, Homo sapiens
  misc_RNA (1)...(19): siRNA sense strand
cgucugaggauguaaccau

SEQ ID NO: 2386927 - RNA, 19 nt, Homo sapiens
  misc_RNA (1)...(19): siRNA sense strand
aggaagaggacgaggagga

SEQ ID NO: 2386928 - RNA, 19 nt, Homo sapiens
  misc_RNA (1)...(19): siRNA sense strand
agaaaaggaaggaggaaau

SEQ ID NO: 2386929 - RNA, 19 nt, Homo sapiens
  misc_RNA (1)...(19): siRNA sense strand
gggaagugagggagggcuu

SEQ ID NO: 2386930 - RNA, 19 nt, Homo sapiens
  misc_RNA (1)...(19): siRNA sense strand
ggacagugacagugggcca

SEQ ID NO: 2386931 - RNA, 19 nt, Homo sapiens
  misc_RNA (1)...(19): siRNA sense strand
cgugaagcucuacgagaaa

SEQ ID NO: 2386932 - RNA, 19 nt, Homo sapiens
  misc_RNA (1)...(19): siRNA sense strand
ggaagaacacucaggggaa

SEQ ID NO: 2386933 - RNA, 19 nt, Homo sapiens
  misc_RNA (1)...(19): siRNA sense strand
ccgugaugucaaagggcaa

SEQ ID NO: 2386934 - RNA, 19 nt, Homo sapiens
  misc_RNA (1)...(19): siRNA sense strand
ggaagcaguggcagggaau

SEQ ID NO: 2386935 - RNA, 19 nt, Homo sapiens
  misc_RNA (1)...(19): siRNA sense strand
ggaacaugccagugaccuu

SEQ ID NO: 2386936 - RNA, 19 nt, Homo sapiens
  misc_RNA (1)...(19): siRNA sense strand
cagcgaaggcuugaggaaa

SEQ ID NO: 2386937 - RNA, 19 nt, Homo sapiens
  misc_RNA (1)...(19): siRNA sense strand
gggaauaaguucagcaucc

SEQ ID NO: 2386938 - RNA, 19 nt, Homo sapiens
  misc_RNA (1)...(19): siRNA sense strand
aggaaaaguugcuugguuu

SEQ ID NO: 2386939 - RNA, 19 nt, Homo sapiens
  misc_RNA (1)...(19): siRNA sense strand
ggaugaucgagcagaguca

SEQ ID NO: 2386940 - RNA, 19 nt, Homo sapiens
  misc_RNA (1)...(19): siRNA sense strand
ccagcgaaggcuugaggaa

SEQ ID NO: 2386941 - RNA, 19 nt, Homo sapiens
  misc_RNA (1)...(19): siRNA sense strand
ugagaaaggcugagggcug

SEQ ID NO: 2386942 - RNA, 19 nt, Homo sapiens
  misc_RNA (1)...(19): siRNA sense strand
aagaaaaggaaggaggaaa

SEQ ID NO: 2386943 - RNA, 19 nt, Homo sapiens
  misc_RNA (1)...(19): siRNA sense strand
aggaagcaguggcagggaa

SEQ ID NO: 2386944 - RNA, 19 nt, Homo sapiens
  misc_RNA (1)...(19): siRNA sense strand
cgggaguuggaacgagaaa

SEQ ID NO: 2386945 - RNA, 19 nt, Homo sapiens
  misc_RNA (1)...(19): siRNA sense strand
acucacauuacgaggaaga

SEQ ID NO: 2386946 - RNA, 19 nt, Homo sapiens
  misc_RNA (1)...(19): siRNA sense strand
acaaauacugagucugcaa

SEQ ID NO: 2386947 - RNA, 19 nt, Homo sapiens
  misc_RNA (1)...(19): siRNA sense strand
gggucuauuaugugcaaga

SEQ ID NO: 2386948 - RNA, 19 nt, Homo sapiens
  misc_RNA (1)...(19): siRNA sense strand
ugaggagcccauagaggaa

SEQ ID NO: 2386949 - RNA, 19 nt, Homo sapiens
  misc_RNA (1)...(19): siRNA sense strand
agaaaguguaugagcugau

SEQ ID NO: 2386950 - RNA, 19 nt, Homo sapiens
  misc_RNA (1)...(19): siRNA sense strand
gcuuuaaguaagaagaucu

SEQ ID NO: 2386951 - RNA, 19 nt, Homo sapiens
  misc_RNA (1)...(19): siRNA sense strand
cuguccagacugugggaau

SEQ ID NO: 2386952 - RNA, 19 nt, Homo sapiens
  misc_RNA (1)...(19): siRNA sense strand
uggaugagaaggacgauga

SEQ ID NO: 2386953 - RNA, 19 nt, Homo sapiens
  misc_RNA (1)...(19): siRNA sense strand
cagugaccuucgaguggaa

SEQ ID NO: 2386954 - RNA, 19 nt, Homo sapiens
  misc_RNA (1)...(19): siRNA sense strand
aggaaggaggaaauggaga

SEQ ID NO: 2386955 - RNA, 19 nt, Homo sapiens
  misc_RNA (1)...(19): siRNA sense strand
gcagcaugccacagcaaca

SEQ ID NO: 2386956 - RNA, 19 nt, Homo sapiens
  misc_RNA (1)...(19): siRNA sense strand
ucugcaaagauucgagcaa

SEQ ID NO: 2386957 - RNA, 19 nt, Homo sapiens
  misc_RNA (1)...(19): siRNA sense strand
cugacaucgugaagcucua

SEQ ID NO: 2386958 - RNA, 19 nt, Homo sapiens
  misc_RNA (1)...(19): siRNA sense strand
uggaagugcagaaagugua

SEQ ID NO: 2386959 - RNA, 19 nt, Homo sapiens
  misc_RNA (1)...(19): siRNA sense strand
cuuucgaggaagaggacga

SEQ ID NO: 2386960 - RNA, 19 nt, Homo sapiens
  misc_RNA (1)...(19): siRNA sense strand
gaguaugaccagcagcaga

SEQ ID NO: 2386961 - RNA, 19 nt, Homo sapiens
  misc_RNA (1)...(19): siRNA sense strand
cugcagagaaugaucagau

SEQ ID NO: 2386962 - RNA, 19 nt, Homo sapiens
  misc_RNA (1)...(19): siRNA sense strand
agucuuguccagaaggcua

SEQ ID NO: 2386963 - RNA, 19 nt, Homo sapiens
  misc_RNA (1)...(19): siRNA sense strand
caaccuacagucuggaaca

SEQ ID NO: 2386964 - RNA, 19 nt, Homo sapiens
  misc_RNA (1)...(19): siRNA sense strand
agcgaaggcuugaggaaag

SEQ ID NO: 2386965 - RNA, 19 nt, Homo sapiens
  misc_RNA (1)...(19): siRNA sense strand
cagcagacagagaaggcca

SEQ ID NO: 2386966 - RNA, 19 nt, Homo sapiens
  misc_RNA (1)...(19): siRNA sense strand
cugcagauguugcgugaac

SEQ ID NO: 2386967 - RNA, 19 nt, Homo sapiens
  misc_RNA (1)...(19): siRNA sense strand
augucaaagggcaaauuaa

SEQ ID NO: 2386968 - RNA, 19 nt, Homo sapiens
  misc_RNA (1)...(19): siRNA sense strand
acuauguuguggaagucaa

SEQ ID NO: 2386969 - RNA, 19 nt, Homo sapiens
  misc_RNA (1)...(19): siRNA sense strand
gcagaaaguguaugagcug

SEQ ID NO: 2386970 - RNA, 19 nt, Homo sapiens
  misc_RNA (1)...(19): siRNA sense strand
ccaccacauccaagcaauu

SEQ ID NO: 2386971 - RNA, 19 nt, Homo sapiens
  misc_RNA (1)...(19): siRNA sense strand
uggaugagguagaggugcu

SEQ ID NO: 2386972 - RNA, 19 nt, Homo sapiens
  misc_RNA (1)...(19): siRNA sense strand
accagaaagcuccagaaua

SEQ ID NO: 2386973 - RNA, 19 nt, Homo sapiens
  misc_RNA (1)...(19): siRNA sense strand
cagagaaugaucagauacu

SEQ ID NO: 2386974 - RNA, 19 nt, Homo sapiens
  misc_RNA (1)...(19): siRNA sense strand
aagaggacgaggaggagga

SEQ ID NO: 2386975 - RNA, 19 nt, Homo sapiens
  misc_RNA (1)...(19): siRNA sense strand
gagaacaggugguguggca

SEQ ID NO: 2386976 - RNA, 19 nt, Homo sapiens
  misc_RNA (1)...(19): siRNA sense strand
cugccuguuuauugacaaa

SEQ ID NO: 2386977 - RNA, 19 nt, Homo sapiens
  misc_RNA (1)...(19): siRNA sense strand
gucuauuggaugaagguga

SEQ ID NO: 2386978 - RNA, 19 nt, Homo sapiens
  misc_RNA (1)...(19): siRNA sense strand
ugacaaacaucuauggaga

SEQ ID NO: 2386979 - RNA, 19 nt, Homo sapiens
  misc_RNA (1)...(19): siRNA sense strand
aguaugaugcugagagaau

SEQ ID NO: 2386980 - RNA, 19 nt, Homo sapiens
  misc_RNA (1)...(19): siRNA sense strand
ggaccuuaucagaggaaaa

SEQ ID NO: 2386981 - RNA, 19 nt, Homo sapiens
  misc_RNA (1)...(19): siRNA sense strand
cguuuaaguuggauggagu

SEQ ID NO: 2386982 - RNA, 19 nt, Homo sapiens
  misc_RNA (1)...(19): siRNA sense strand
uugaaugaacggaggaaaa

SEQ ID NO: 2386983 - RNA, 19 nt, Homo sapiens
  misc_RNA (1)...(19): siRNA sense strand
gggagauugaugugaccaa

SEQ ID NO: 2386984 - RNA, 19 nt, Homo sapiens
  misc_RNA (1)...(19): siRNA sense strand
agaucaaggagguguucaa

SEQ ID NO: 2386985 - RNA, 19 nt, Homo sapiens
  misc_RNA (1)...(19): siRNA sense strand
auaugguccucgugacaaa

SEQ ID NO: 2386986 - RNA, 19 nt, Homo sapiens
  misc_RNA (1)...(19): siRNA sense strand
ggacacuggacgagaucga

SEQ ID NO: 2386987 - RNA, 19 nt, Homo sapiens
  misc_RNA (1)...(19): siRNA sense strand
cuaccaaaccugggaagaa

SEQ ID NO: 2386988 - RNA, 19 nt, Homo sapiens
  misc_RNA (1)...(19): siRNA sense strand
aggaaaagggccagcgaga

SEQ ID NO: 2386989 - RNA, 19 nt, Homo sapiens
  misc_RNA (1)...(19): siRNA sense strand
ccuccaaaccaguggccuu

SEQ ID NO: 2386990 - RNA, 19 nt, Homo sapiens
  misc_RNA (1)...(19): siRNA sense strand
ggaguuuaagaaugagcaa

SEQ ID NO: 2386991 - RNA, 19 nt, Homo sapiens
  misc_RNA (1)...(19): siRNA sense strand
gcucagagaggcuggggaa

SEQ ID NO: 2386992 - RNA, 19 nt, Homo sapiens
  misc_RNA (1)...(19): siRNA sense strand
agagaauggucaagaaccu

SEQ ID NO: 2386993 - RNA, 19 nt, Homo sapiens
  misc_RNA (1)...(19): siRNA sense strand
uggucaagaaccuggagaa

SEQ ID NO: 2386994 - RNA, 19 nt, Homo sapiens
  misc_RNA (1)...(19): siRNA sense strand
agacauucggagaggaguu

SEQ ID NO: 2386995 - RNA, 19 nt, Homo sapiens
  misc_RNA (1)...(19): siRNA sense strand
ucagauacggagaugacaa

SEQ ID NO: 2386996 - RNA, 19 nt, Homo sapiens
  misc_RNA (1)...(19): siRNA sense strand
ccucccaggacuugguuua

SEQ ID NO: 2386997 - RNA, 19 nt, Homo sapiens
  misc_RNA (1)...(19): siRNA sense strand
caaugaccaucguggaaaa

SEQ ID NO: 2386998 - RNA, 19 nt, Homo sapiens
  misc_RNA (1)...(19): siRNA sense strand
aaauuaacuugguggaucu

SEQ ID NO: 2386999 - RNA, 19 nt, Homo sapiens
  misc_RNA (1)...(19): siRNA sense strand
ucacaagucaggaggagga

SEQ ID NO: 2387000 - RNA, 19 nt, Homo sapiens
  misc_RNA (1)...(19): siRNA sense strand
ccuuugaggaguuuaagaa

SEQ ID NO: 2387001 - RNA, 19 nt, Homo sapiens
  misc_RNA (1)...(19): siRNA sense strand
caauaugguccucgugaca

SEQ ID NO: 2387002 - RNA, 19 nt, Homo sapiens
  misc_RNA (1)...(19): siRNA sense strand
gguucugagccaacaggaa

SEQ ID NO: 2387003 - RNA, 19 nt, Homo sapiens
  misc_RNA (1)...(19): siRNA sense strand
ccaguuagaagaaacgcua

SEQ ID NO: 2387004 - RNA, 19 nt, Homo sapiens
  misc_RNA (1)...(19): siRNA sense strand
gggaagaaagccaagucca

SEQ ID NO: 2387005 - RNA, 19 nt, Homo sapiens
  misc_RNA (1)...(19): siRNA sense strand
gagucuucauuaagggcuu

SEQ ID NO: 2387006 - RNA, 19 nt, Homo sapiens
  misc_RNA (1)...(19): siRNA sense strand
ugggugagccugaaggaca

SEQ ID NO: 2387007 - RNA, 19 nt, Homo sapiens
  misc_RNA (1)...(19): siRNA sense strand
gggugagaccaacaggauu

SEQ ID NO: 2387008 - RNA, 19 nt, Homo sapiens
  misc_RNA (1)...(19): siRNA sense strand
gagccaacaggaacaggaa

SEQ ID NO: 2387009 - RNA, 19 nt, Homo sapiens
  misc_RNA (1)...(19): siRNA sense strand
ggaaugacuuugcagccau

SEQ ID NO: 2387010 - RNA, 19 nt, Homo sapiens
  misc_RNA (1)...(19): siRNA sense strand
uuuaugagacaguugcaaa

SEQ ID NO: 2387011 - RNA, 19 nt, Homo sapiens
  misc_RNA (1)...(19): siRNA sense strand
ucggagaggaguugucaau

SEQ ID NO: 2387012 - RNA, 19 nt, Homo sapiens
  misc_RNA (1)...(19): siRNA sense strand
ggaugaagcuagucaccac

SEQ ID NO: 2387013 - RNA, 19 nt, Homo sapiens
  misc_RNA (1)...(19): siRNA sense strand
agacaguugcaaaggaugu

SEQ ID NO: 2387014 - RNA, 19 nt, Homo sapiens
  misc_RNA (1)...(19): siRNA sense strand
cuugaaugaacggaggaaa

SEQ ID NO: 2387015 - RNA, 19 nt, Homo sapiens
  misc_RNA (1)...(19): siRNA sense strand
ugacaaacaucuauggaga

SEQ ID NO: 2387016 - RNA, 19 nt, Homo sapiens
  misc_RNA (1)...(19): siRNA sense strand
aguaugaugcugagagaau

SEQ ID NO: 2387017 - RNA, 19 nt, Homo sapiens
  misc_RNA (1)...(19): siRNA sense strand
ggaccuuaucagaggaaaa

SEQ ID NO: 2387018 - RNA, 19 nt, Homo sapiens
  misc_RNA (1)...(19): siRNA sense strand
cguuuaaguuggauggagu

SEQ ID NO: 2387019 - RNA, 19 nt, Homo sapiens
  misc_RNA (1)...(19): siRNA sense strand
uugaaugaacggaggaaaa

SEQ ID NO: 2387020 - RNA, 19 nt, Homo sapiens
  misc_RNA (1)...(19): siRNA sense strand
gggagauugaugugaccaa

SEQ ID NO: 2387021 - RNA, 19 nt, Homo sapiens
  misc_RNA (1)...(19): siRNA sense strand
agaucaaggagguguucaa

SEQ ID NO: 2387022 - RNA, 19 nt, Homo sapiens
  misc_RNA (1)...(19): siRNA sense strand
auaugguccucgugacaaa

SEQ ID NO: 2387023 - RNA, 19 nt, Homo sapiens
  misc_RNA (1)...(19): siRNA sense strand
ggacacuggacgagaucga

SEQ ID NO: 2387024 - RNA, 19 nt, Homo sapiens
  misc_RNA (1)...(19): siRNA sense strand
cuaccaaaccugggaagaa

SEQ ID NO: 2387025 - RNA, 19 nt, Homo sapiens
  misc_RNA (1)...(19): siRNA sense strand
aggaaaagggccagcgaga

SEQ ID NO: 2387026 - RNA, 19 nt, Homo sapiens
  misc_RNA (1)...(19): siRNA sense strand
ccuccaaaccaguggccuu

SEQ ID NO: 2387027 - RNA, 19 nt, Homo sapiens
  misc_RNA (1)...(19): siRNA sense strand
ggaguuuaagaaugagcaa

SEQ ID NO: 2387028 - RNA, 19 nt, Homo sapiens
  misc_RNA (1)...(19): siRNA sense strand
gcucagagaggcuggggaa

SEQ ID NO: 2387029 - RNA, 19 nt, Homo sapiens
  misc_RNA (1)...(19): siRNA sense strand
agagaauggucaagaaccu

SEQ ID NO: 2387030 - RNA, 19 nt, Homo sapiens
  misc_RNA (1)...(19): siRNA sense strand
uggucaagaaccuggagaa

SEQ ID NO: 2387031 - RNA, 19 nt, Homo sapiens
  misc_RNA (1)...(19): siRNA sense strand
agacauucggagaggaguu

SEQ ID NO: 2387032 - RNA, 19 nt, Homo sapiens
  misc_RNA (1)...(19): siRNA sense strand
ucagauacggagaugacaa

SEQ ID NO: 2387033 - RNA, 19 nt, Homo sapiens
  misc_RNA (1)...(19): siRNA sense strand
ccucccaggacuugguuua

SEQ ID NO: 2387034 - RNA, 19 nt, Homo sapiens
  misc_RNA (1)...(19): siRNA sense strand
caaugaccaucguggaaaa

SEQ ID NO: 2387035 - RNA, 19 nt, Homo sapiens
  misc_RNA (1)...(19): siRNA sense strand
aaauuaacuugguggaucu

SEQ ID NO: 2387036 - RNA, 19 nt, Homo sapiens
  misc_RNA (1)...(19): siRNA sense strand
ucacaagucaggaggagga

SEQ ID NO: 2387037 - RNA, 19 nt, Homo sapiens
  misc_RNA (1)...(19): siRNA sense strand
ccuuugaggaguuuaagaa

SEQ ID NO: 2387038 - RNA, 19 nt, Homo sapiens
  misc_RNA (1)...(19): siRNA sense strand
caauaugguccucgugaca

SEQ ID NO: 2387039 - RNA, 19 nt, Homo sapiens
  misc_RNA (1)...(19): siRNA sense strand
gguucugagccaacaggaa

SEQ ID NO: 2387040 - RNA, 19 nt, Homo sapiens
  misc_RNA (1)...(19): siRNA sense strand
ccaguuagaagaaacgcua

SEQ ID NO: 2387041 - RNA, 19 nt, Homo sapiens
  misc_RNA (1)...(19): siRNA sense strand
gggaagaaagccaagucca

SEQ ID NO: 2387042 - RNA, 19 nt, Homo sapiens
  misc_RNA (1)...(19): siRNA sense strand
gagucuucauuaagggcuu

SEQ ID NO: 2387043 - RNA, 19 nt, Homo sapiens
  misc_RNA (1)...(19): siRNA sense strand
ugggugagccugaaggaca

SEQ ID NO: 2387044 - RNA, 19 nt, Homo sapiens
  misc_RNA (1)...(19): siRNA sense strand
gggugagaccaacaggauu

SEQ ID NO: 2387045 - RNA, 19 nt, Homo sapiens
  misc_RNA (1)...(19): siRNA sense strand
gagccaacaggaacaggaa

SEQ ID NO: 2387046 - RNA, 19 nt, Homo sapiens
  misc_RNA (1)...(19): siRNA sense strand
ggaaugacuuugcagccau

SEQ ID NO: 2387047 - RNA, 19 nt, Homo sapiens
  misc_RNA (1)...(19): siRNA sense strand
uuuaugagacaguugcaaa

SEQ ID NO: 2387048 - RNA, 19 nt, Homo sapiens
  misc_RNA (1)...(19): siRNA sense strand
ucggagaggaguugucaau

SEQ ID NO: 2387049 - RNA, 19 nt, Homo sapiens
  misc_RNA (1)...(19): siRNA sense strand
ggaugaagcuagucaccac

SEQ ID NO: 2387050 - RNA, 19 nt, Homo sapiens
  misc_RNA (1)...(19): siRNA sense strand
agacaguugcaaaggaugu

SEQ ID NO: 2387051 - RNA, 19 nt, Homo sapiens
  misc_RNA (1)...(19): siRNA sense strand
cuugaaugaacggaggaaa

SEQ ID NO: 2387052 - RNA, 19 nt, Homo sapiens
  misc_RNA (1)...(19): siRNA sense strand
ugacaaacaucuauggaga

SEQ ID NO: 2387053 - RNA, 19 nt, Homo sapiens
  misc_RNA (1)...(19): siRNA sense strand
aguaugaugcugagagaau

SEQ ID NO: 2387054 - RNA, 19 nt, Homo sapiens
  misc_RNA (1)...(19): siRNA sense strand
ggaccuuaucagaggaaaa

SEQ ID NO: 2387055 - RNA, 19 nt, Homo sapiens
  misc_RNA (1)...(19): siRNA sense strand
cguuuaaguuggauggagu

SEQ ID NO: 2387056 - RNA, 19 nt, Homo sapiens
  misc_RNA (1)...(19): siRNA sense strand
uugaaugaacggaggaaaa

SEQ ID NO: 2387057 - RNA, 19 nt, Homo sapiens
  misc_RNA (1)...(19): siRNA sense strand
gggagauugaugugaccaa

SEQ ID NO: 2387058 - RNA, 19 nt, Homo sapiens
  misc_RNA (1)...(19): siRNA sense strand
agaucaaggagguguucaa

SEQ ID NO: 2387059 - RNA, 19 nt, Homo sapiens
  misc_RNA (1)...(19): siRNA sense strand
auaugguccucgugacaaa

SEQ ID NO: 2387060 - RNA, 19 nt, Homo sapiens
  misc_RNA (1)...(19): siRNA sense strand
ggacacuggacgagaucga

SEQ ID NO: 2387061 - RNA, 19 nt, Homo sapiens
  misc_RNA (1)...(19): siRNA sense strand
cuaccaaaccugggaagaa

SEQ ID NO: 2387062 - RNA, 19 nt, Homo sapiens
  misc_RNA (1)...(19): siRNA sense strand
aggaaaagggccagcgaga

SEQ ID NO: 2387063 - RNA, 19 nt, Homo sapiens
  misc_RNA (1)...(19): siRNA sense strand
ccuccaaaccaguggccuu

SEQ ID NO: 2387064 - RNA, 19 nt, Homo sapiens
  misc_RNA (1)...(19): siRNA sense strand
ggaguuuaagaaugagcaa

SEQ ID NO: 2387065 - RNA, 19 nt, Homo sapiens
  misc_RNA (1)...(19): siRNA sense strand
gcucagagaggcuggggaa

SEQ ID NO: 2387066 - RNA, 19 nt, Homo sapiens
  misc_RNA (1)...(19): siRNA sense strand
agagaauggucaagaaccu

SEQ ID NO: 2387067 - RNA, 19 nt, Homo sapiens
  misc_RNA (1)...(19): siRNA sense strand
uggucaagaaccuggagaa

SEQ ID NO: 2387068 - RNA, 19 nt, Homo sapiens
  misc_RNA (1)...(19): siRNA sense strand
agacauucggagaggaguu

SEQ ID NO: 2387069 - RNA, 19 nt, Homo sapiens
  misc_RNA (1)...(19): siRNA sense strand
ucagauacggagaugacaa

SEQ ID NO: 2387070 - RNA, 19 nt, Homo sapiens
  misc_RNA (1)...(19): siRNA sense strand
ccucccaggacuugguuua

SEQ ID NO: 2387071 - RNA, 19 nt, Homo sapiens
  misc_RNA (1)...(19): siRNA sense strand
caaugaccaucguggaaaa

SEQ ID NO: 2387072 - RNA, 19 nt, Homo sapiens
  misc_RNA (1)...(19): siRNA sense strand
aaauuaacuugguggaucu

SEQ ID NO: 2387073 - RNA, 19 nt, Homo sapiens
  misc_RNA (1)...(19): siRNA sense strand
ucacaagucaggaggagga

SEQ ID NO: 2387074 - RNA, 19 nt, Homo sapiens
  misc_RNA (1)...(19): siRNA sense strand
ccuuugaggaguuuaagaa

SEQ ID NO: 2387075 - RNA, 19 nt, Homo sapiens
  misc_RNA (1)...(19): siRNA sense strand
caauaugguccucgugaca

SEQ ID NO: 2387076 - RNA, 19 nt, Homo sapiens
  misc_RNA (1)...(19): siRNA sense strand
gguucugagccaacaggaa

SEQ ID NO: 2387077 - RNA, 19 nt, Homo sapiens
  misc_RNA (1)...(19): siRNA sense strand
ccaguuagaagaaacgcua

SEQ ID NO: 2387078 - RNA, 19 nt, Homo sapiens
  misc_RNA (1)...(19): siRNA sense strand
gggaagaaagccaagucca

SEQ ID NO: 2387079 - RNA, 19 nt, Homo sapiens
  misc_RNA (1)...(19): siRNA sense strand
gagucuucauuaagggcuu

SEQ ID NO: 2387080 - RNA, 19 nt, Homo sapiens
  misc_RNA (1)...(19): siRNA sense strand
ugggugagccugaaggaca

SEQ ID NO: 2387081 - RNA, 19 nt, Homo sapiens
  misc_RNA (1)...(19): siRNA sense strand
gggugagaccaacaggauu

SEQ ID NO: 2387082 - RNA, 19 nt, Homo sapiens
  misc_RNA (1)...(19): siRNA sense strand
gagccaacaggaacaggaa

SEQ ID NO: 2387083 - RNA, 19 nt, Homo sapiens
  misc_RNA (1)...(19): siRNA sense strand
ggaaugacuuugcagccau

SEQ ID NO: 2387084 - RNA, 19 nt, Homo sapiens
  misc_RNA (1)...(19): siRNA sense strand
uuuaugagacaguugcaaa

SEQ ID NO: 2387085 - RNA, 19 nt, Homo sapiens
  misc_RNA (1)...(19): siRNA sense strand
ucggagaggaguugucaau

SEQ ID NO: 2387086 - RNA, 19 nt, Homo sapiens
  misc_RNA (1)...(19): siRNA sense strand
ggaugaagcuagucaccac

SEQ ID NO: 2387087 - RNA, 19 nt, Homo sapiens
  misc_RNA (1)...(19): siRNA sense strand
agacaguugcaaaggaugu

SEQ ID NO: 2387088 - RNA, 19 nt, Homo sapiens
  misc_RNA (1)...(19): siRNA sense strand
cuugaaugaacggaggaaa

SEQ ID NO: 2387089 - RNA, 19 nt, Homo sapiens
  misc_RNA (1)...(19): siRNA sense strand
agaaaugccugaagccaaa

SEQ ID NO: 2387090 - RNA, 19 nt, Homo sapiens
  misc_RNA (1)...(19): siRNA sense strand
gaagauuguuaaaguggaa

SEQ ID NO: 2387091 - RNA, 19 nt, Homo sapiens
  misc_RNA (1)...(19): siRNA sense strand
cugugguaguggagauaua

SEQ ID NO: 2387092 - RNA, 19 nt, Homo sapiens
  misc_RNA (1)...(19): siRNA sense strand
aagaaaugccugaagccaa

SEQ ID NO: 2387093 - RNA, 19 nt, Homo sapiens
  misc_RNA (1)...(19): siRNA sense strand
uaacaugaauugugaggca

SEQ ID NO: 2387094 - RNA, 19 nt, Homo sapiens
  misc_RNA (1)...(19): siRNA sense strand
cauccgaaguggagccaga

SEQ ID NO: 2387095 - RNA, 19 nt, Homo sapiens
  misc_RNA (1)...(19): siRNA sense strand
ccuaaagaacugugguagu

SEQ ID NO: 2387096 - RNA, 19 nt, Homo sapiens
  misc_RNA (1)...(19): siRNA sense strand
ucuuugaagggcuggguaa

SEQ ID NO: 2387097 - RNA, 19 nt, Homo sapiens
  misc_RNA (1)...(19): siRNA sense strand
aaguggaacaugaagaaau

SEQ ID NO: 2387098 - RNA, 19 nt, Homo sapiens
  misc_RNA (1)...(19): siRNA sense strand
cagcgaagagggaggcuca

SEQ ID NO: 2387099 - RNA, 19 nt, Homo sapiens
  misc_RNA (1)...(19): siRNA sense strand
cuuuacagcuaucgcggaa

SEQ ID NO: 2387100 - RNA, 19 nt, Homo sapiens
  misc_RNA (1)...(19): siRNA sense strand
cagcauaagucugugguca

SEQ ID NO: 2387101 - RNA, 19 nt, Homo sapiens
  misc_RNA (1)...(19): siRNA sense strand
aggccauacaagacacaaa

SEQ ID NO: 2387102 - RNA, 19 nt, Homo sapiens
  misc_RNA (1)...(19): siRNA sense strand
uaaaguggaacaugaagaa

SEQ ID NO: 2387103 - RNA, 19 nt, Homo sapiens
  misc_RNA (1)...(19): siRNA sense strand
ggaacuagagagcagcgaa

SEQ ID NO: 2387104 - RNA, 19 nt, Homo sapiens
  misc_RNA (1)...(19): siRNA sense strand
cgauggauggagaugaaaa

SEQ ID NO: 2387105 - RNA, 19 nt, Homo sapiens
  misc_RNA (1)...(19): siRNA sense strand
ccgacaggcagaaaugaau

SEQ ID NO: 2387106 - RNA, 19 nt, Homo sapiens
  misc_RNA (1)...(19): siRNA sense strand
uagcuguccuugaagaauu

SEQ ID NO: 2387107 - RNA, 19 nt, Homo sapiens
  misc_RNA (1)...(19): siRNA sense strand
gauagcuguccuugaagaa

SEQ ID NO: 2387108 - RNA, 19 nt, Homo sapiens
  misc_RNA (1)...(19): siRNA sense strand
uccugaaacaguaacgaua

SEQ ID NO: 2387109 - RNA, 19 nt, Homo sapiens
  misc_RNA (1)...(19): siRNA sense strand
aggagucgauggauggaga

SEQ ID NO: 2387110 - RNA, 19 nt, Homo sapiens
  misc_RNA (1)...(19): siRNA sense strand
aagcagauuggcacagcaa

SEQ ID NO: 2387111 - RNA, 19 nt, Homo sapiens
  misc_RNA (1)...(19): siRNA sense strand
cggaagcccaaguggcaca

SEQ ID NO: 2387112 - RNA, 19 nt, Homo sapiens
  misc_RNA (1)...(19): siRNA sense strand
gguuguuauuacugccuuu

SEQ ID NO: 2387113 - RNA, 19 nt, Homo sapiens
  misc_RNA (1)...(19): siRNA sense strand
gaagaauucaugaaagaag

SEQ ID NO: 2387114 - RNA, 19 nt, Homo sapiens
  misc_RNA (1)...(19): siRNA sense strand
gggcugaguuccaaggaca

SEQ ID NO: 2387115 - RNA, 19 nt, Homo sapiens
  misc_RNA (1)...(19): siRNA sense strand
gugaauaguuugauccaga

SEQ ID NO: 2387116 - RNA, 19 nt, Homo sapiens
  misc_RNA (1)...(19): siRNA sense strand
aagcaggagucaagggcau

SEQ ID NO: 2387117 - RNA, 19 nt, Homo sapiens
  misc_RNA (1)...(19): siRNA sense strand
agguugaagucuuugacaa

SEQ ID NO: 2387118 - RNA, 19 nt, Homo sapiens
  misc_RNA (1)...(19): siRNA sense strand
acaaauaugugaagggccu

SEQ ID NO: 2387119 - RNA, 19 nt, Homo sapiens
  misc_RNA (1)...(19): siRNA sense strand
gggaagguguuacaggcua

SEQ ID NO: 2387120 - RNA, 19 nt, Homo sapiens
  misc_RNA (1)...(19): siRNA sense strand
cagagaaacuggagcaggu

SEQ ID NO: 2387121 - RNA, 19 nt, Homo sapiens
  misc_RNA (1)...(19): siRNA sense strand
gugaaaagccauugcgcau

SEQ ID NO: 2387122 - RNA, 19 nt, Homo sapiens
  misc_RNA (1)...(19): siRNA sense strand
ugucagaugcagagaaacu

SEQ ID NO: 2387123 - RNA, 19 nt, Homo sapiens
  misc_RNA (1)...(19): siRNA sense strand
gagccauguuguucgggaa

SEQ ID NO: 2387124 - RNA, 19 nt, Homo sapiens
  misc_RNA (1)...(19): siRNA sense strand
aggaggugcugcaggugaa

SEQ ID NO: 2387125 - RNA, 19 nt, Homo sapiens
  misc_RNA (1)...(19): siRNA sense strand
aaguggagguguucgacaa

SEQ ID NO: 2387126 - RNA, 19 nt, Homo sapiens
  misc_RNA (1)...(19): siRNA sense strand
ugguaugaccugauggaca

SEQ ID NO: 2387127 - RNA, 19 nt, Homo sapiens
  misc_RNA (1)...(19): siRNA sense strand
cagaagaagaggacccuga

SEQ ID NO: 2387128 - RNA, 19 nt, Homo sapiens
  misc_RNA (1)...(19): siRNA sense strand
ugauggacaacaaggacaa

SEQ ID NO: 2387129 - RNA, 19 nt, Homo sapiens
  misc_RNA (1)...(19): siRNA sense strand
ggggacuggugaagggcaa

SEQ ID NO: 2387130 - RNA, 19 nt, Homo sapiens
  misc_RNA (1)...(19): siRNA sense strand
gggugauacuggagccacu

SEQ ID NO: 2387131 - RNA, 19 nt, Homo sapiens
  misc_RNA (1)...(19): siRNA sense strand
aggccaagagcuagagguu

SEQ ID NO: 2387132 - RNA, 19 nt, Homo sapiens
  misc_RNA (1)...(19): siRNA sense strand
ucgacaaggauccagauaa

SEQ ID NO: 2387133 - RNA, 19 nt, Homo sapiens
  misc_RNA (1)...(19): siRNA sense strand
cuuggauucaucagaaaua

SEQ ID NO: 2387134 - RNA, 19 nt, Homo sapiens
  misc_RNA (1)...(19): siRNA sense strand
aguuccaggccaagagcua

SEQ ID NO: 2387135 - RNA, 19 nt, Homo sapiens
  misc_RNA (1)...(19): siRNA sense strand
agcuagagguugaagucuu

SEQ ID NO: 2387136 - RNA, 19 nt, Homo sapiens
  misc_RNA (1)...(19): siRNA sense strand
gcuacugagagcacagcua

SEQ ID NO: 2387137 - RNA, 19 nt, Homo sapiens
  misc_RNA (1)...(19): siRNA sense strand
augaagaacucaacccaca

SEQ ID NO: 2387138 - RNA, 19 nt, Homo sapiens
  misc_RNA (1)...(19): siRNA sense strand
acuacagugaagaacgaaa

SEQ ID NO: 2387139 - RNA, 19 nt, Homo sapiens
  misc_RNA (1)...(19): siRNA sense strand
gagaaagaacggagccuuc

SEQ ID NO: 2387140 - RNA, 19 nt, Homo sapiens
  misc_RNA (1)...(19): siRNA sense strand
guggaagugaagaaauauu

SEQ ID NO: 2387141 - RNA, 19 nt, Homo sapiens
  misc_RNA (1)...(19): siRNA sense strand
aggcugaauggcucaauaa

SEQ ID NO: 2387142 - RNA, 19 nt, Homo sapiens
  misc_RNA (1)...(19): siRNA sense strand
cugcugaguuagaggaggu

SEQ ID NO: 2387143 - RNA, 19 nt, Homo sapiens
  misc_RNA (1)...(19): siRNA sense strand
uugauguggaagugaagaa

SEQ ID NO: 2387144 - RNA, 19 nt, Homo sapiens
  misc_RNA (1)...(19): siRNA sense strand
ucauuggagucaagguuca

SEQ ID NO: 2387145 - RNA, 19 nt, Homo sapiens
  misc_RNA (1)...(19): siRNA sense strand
gggagagacuuaugaggug

SEQ ID NO: 2387146 - RNA, 19 nt, Homo sapiens
  misc_RNA (1)...(19): siRNA sense strand
ggagagacuuaugagguga

SEQ ID NO: 2387147 - RNA, 19 nt, Homo sapiens
  misc_RNA (1)...(19): siRNA sense strand
gaagcuggauguagggaag

SEQ ID NO: 2387148 - RNA, 19 nt, Homo sapiens
  misc_RNA (1)...(19): siRNA sense strand
gguugaagucuuugacaag

SEQ ID NO: 2387149 - RNA, 19 nt, Homo sapiens
  misc_RNA (1)...(19): siRNA sense strand
aaccaagacuauuucgcaa

SEQ ID NO: 2387150 - RNA, 19 nt, Homo sapiens
  misc_RNA (1)...(19): siRNA sense strand
ccaaggacaaauaugugaa

SEQ ID NO: 2387151 - RNA, 19 nt, Homo sapiens
  misc_RNA (1)...(19): siRNA sense strand
agggccugauugagggcaa

SEQ ID NO: 2387152 - RNA, 19 nt, Homo sapiens
  misc_RNA (1)...(19): siRNA sense strand
agggcaagucagacccaua

SEQ ID NO: 2387153 - RNA, 19 nt, Homo sapiens
  misc_RNA (1)...(19): siRNA sense strand
augugcaagugaaggauga

SEQ ID NO: 2387154 - RNA, 19 nt, Homo sapiens
  misc_RNA (1)...(19): siRNA sense strand
cgaggcagcuacuggacga

SEQ ID NO: 2387155 - RNA, 19 nt, Homo sapiens
  misc_RNA (1)...(19): siRNA sense strand
caauucaggaugugacuca

SEQ ID NO: 2387156 - RNA, 19 nt, Homo sapiens
  misc_RNA (1)...(19): siRNA sense strand
gggcagguguaaagugcgu

SEQ ID NO: 2387157 - RNA, 19 nt, Homo sapiens
  misc_RNA (1)...(19): siRNA sense strand
gugaagaaccagagcucuc

SEQ ID NO: 2387158 - RNA, 19 nt, Homo sapiens
  misc_RNA (1)...(19): siRNA sense strand
ggguguagcccggugguau

SEQ ID NO: 2387159 - RNA, 19 nt, Homo sapiens
  misc_RNA (1)...(19): siRNA sense strand
acaaggugggcaaggccaa

SEQ ID NO: 2387160 - RNA, 19 nt, Homo sapiens
  misc_RNA (1)...(19): siRNA sense strand
gugaagaagcugaaggaga

SEQ ID NO: 2387161 - RNA, 19 nt, Homo sapiens
  misc_RNA (1)...(19): siRNA sense strand
uugaauacaagcugggaaa

SEQ ID NO: 2387162 - RNA, 19 nt, Homo sapiens
  misc_RNA (1)...(19): siRNA sense strand
aggauuaucaagaggaaau

SEQ ID NO: 2387163 - RNA, 19 nt, Homo sapiens
  misc_RNA (1)...(19): siRNA sense strand
cggaggaggaguuggaaca

SEQ ID NO: 2387164 - RNA, 19 nt, Homo sapiens
  misc_RNA (1)...(19): siRNA sense strand
gugugauguucaagcuaaa

SEQ ID NO: 2387165 - RNA, 19 nt, Homo sapiens
  misc_RNA (1)...(19): siRNA sense strand
agcaaggaguugaggauga

SEQ ID NO: 2387166 - RNA, 19 nt, Homo sapiens
  misc_RNA (1)...(19): siRNA sense strand
guuuagaagccaaagaaaa

SEQ ID NO: 2387167 - RNA, 19 nt, Homo sapiens
  misc_RNA (1)...(19): siRNA sense strand
uggagaaacauuugugcua

SEQ ID NO: 2387168 - RNA, 19 nt, Homo sapiens
  misc_RNA (1)...(19): siRNA sense strand
ccaacaaaugggagaacga

SEQ ID NO: 2387169 - RNA, 19 nt, Homo sapiens
  misc_RNA (1)...(19): siRNA sense strand
acaugaaacugcugggcga

SEQ ID NO: 2387170 - RNA, 19 nt, Homo sapiens
  misc_RNA (1)...(19): siRNA sense strand
agagaaagcuuaaugagca

SEQ ID NO: 2387171 - RNA, 19 nt, Homo sapiens
  misc_RNA (1)...(19): siRNA sense strand
augaagaaggucaggauga

SEQ ID NO: 2387172 - RNA, 19 nt, Homo sapiens
  misc_RNA (1)...(19): siRNA sense strand
agaaauacagagaaagcuu

SEQ ID NO: 2387173 - RNA, 19 nt, Homo sapiens
  misc_RNA (1)...(19): siRNA sense strand
ggaugaagaaggucaggau

SEQ ID NO: 2387174 - RNA, 19 nt, Homo sapiens
  misc_RNA (1)...(19): siRNA sense strand
cagagauacuucaggacca

SEQ ID NO: 2387175 - RNA, 19 nt, Homo sapiens
  misc_RNA (1)...(19): siRNA sense strand
aagcaugagcuguuggaau

SEQ ID NO: 2387176 - RNA, 19 nt, Homo sapiens
  misc_RNA (1)...(19): siRNA sense strand
gcucacuaauauugaacau

SEQ ID NO: 2387177 - RNA, 19 nt, Homo sapiens
  misc_RNA (1)...(19): siRNA sense strand
cuguaacucggaagaaaua

SEQ ID NO: 2387178 - RNA, 19 nt, Homo sapiens
  misc_RNA (1)...(19): siRNA sense strand
gcacaaacugaaggaggaa

SEQ ID NO: 2387179 - RNA, 19 nt, Homo sapiens
  misc_RNA (1)...(19): siRNA sense strand
acaaacugaaggaggaaga

SEQ ID NO: 2387180 - RNA, 19 nt, Homo sapiens
  misc_RNA (1)...(19): siRNA sense strand
gcuacaaaggcuacaugaa

SEQ ID NO: 2387181 - RNA, 19 nt, Homo sapiens
  misc_RNA (1)...(19): siRNA sense strand
aguugaggaugaagcagaa

SEQ ID NO: 2387182 - RNA, 19 nt, Homo sapiens
  misc_RNA (1)...(19): siRNA sense strand
auaucaaggaacuggagaa

SEQ ID NO: 2387183 - RNA, 19 nt, Homo sapiens
  misc_RNA (1)...(19): siRNA sense strand
uggaaagauaccauaagaa

SEQ ID NO: 2387184 - RNA, 19 nt, Homo sapiens
  misc_RNA (1)...(19): siRNA sense strand
gggugaagaagcugaagga

SEQ ID NO: 2387185 - RNA, 19 nt, Homo sapiens
  misc_RNA (1)...(19): siRNA sense strand
agauaauugcccaaggaga

SEQ ID NO: 2387186 - RNA, 19 nt, Homo sapiens
  misc_RNA (1)...(19): siRNA sense strand
ugaagaagcugaaggagac

SEQ ID NO: 2387187 - RNA, 19 nt, Homo sapiens
  misc_RNA (1)...(19): siRNA sense strand
gaguugaggaugaagcaga

SEQ ID NO: 2387188 - RNA, 19 nt, Homo sapiens
  misc_RNA (1)...(19): siRNA sense strand
ccuguaacucggaagaaau

SEQ ID NO: 2387189 - RNA, 19 nt, Homo sapiens
  misc_RNA (1)...(19): siRNA sense strand
ugugcuauguccauggaaa

SEQ ID NO: 2387190 - RNA, 19 nt, Homo sapiens
  misc_RNA (1)...(19): siRNA sense strand
ggcgaaugcaguagcagua

SEQ ID NO: 2387191 - RNA, 19 nt, Homo sapiens
  misc_RNA (1)...(19): siRNA sense strand
ggagcuucagagagacaua

SEQ ID NO: 2387192 - RNA, 19 nt, Homo sapiens
  misc_RNA (1)...(19): siRNA sense strand
gcauaguaccgaaacccaa

SEQ ID NO: 2387193 - RNA, 19 nt, Homo sapiens
  misc_RNA (1)...(19): siRNA sense strand
aggcccaggcauugagcaa

SEQ ID NO: 2387194 - RNA, 19 nt, Homo sapiens
  misc_RNA (1)...(19): siRNA sense strand
gcaaauaaagcaugagcug

SEQ ID NO: 2387195 - RNA, 19 nt, Homo sapiens
  misc_RNA (1)...(19): siRNA sense strand
ccaugaaagcaaagcaucu

SEQ ID NO: 2387196 - RNA, 19 nt, Homo sapiens
  misc_RNA (1)...(19): siRNA sense strand
auacaguugccaaggaaga

SEQ ID NO: 2387197 - RNA, 19 nt, Homo sapiens
  misc_RNA (1)...(19): siRNA sense strand
uugccaaggaagaacuaaa

SEQ ID NO: 2387198 - RNA, 19 nt, Homo sapiens
  misc_RNA (1)...(19): siRNA sense strand
acucagacuugaacagcau

SEQ ID NO: 2387199 - RNA, 19 nt, Homo sapiens
  misc_RNA (1)...(19): siRNA sense strand
gggacacggaggaggaguu

SEQ ID NO: 2387200 - RNA, 19 nt, Homo sapiens
  misc_RNA (1)...(19): siRNA sense strand
uaccaaugucagaggaaga

SEQ ID NO: 2387201 - RNA, 19 nt, Homo sapiens
  misc_RNA (1)...(19): siRNA sense strand
aaggagaacagcugauaga

SEQ ID NO: 2387202 - RNA, 19 nt, Homo sapiens
  misc_RNA (1)...(19): siRNA sense strand
cagauacagcaaaccgaaa

SEQ ID NO: 2387203 - RNA, 19 nt, Homo sapiens
  misc_RNA (1)...(19): siRNA sense strand
ucaaguagucagcaggauu

SEQ ID NO: 2387204 - RNA, 19 nt, Homo sapiens
  misc_RNA (1)...(19): siRNA sense strand
cuucagagagacauagaga

SEQ ID NO: 2387205 - RNA, 19 nt, Homo sapiens
  misc_RNA (1)...(19): siRNA sense strand
ucagagagacauagagaag

SEQ ID NO: 2387206 - RNA, 19 nt, Homo sapiens
  misc_RNA (1)...(19): siRNA sense strand
ugagcaaggaguugaggau

SEQ ID NO: 2387207 - RNA, 19 nt, Homo sapiens
  misc_RNA (1)...(19): siRNA sense strand
caguacagguguugcaucu

SEQ ID NO: 2387208 - RNA, 19 nt, Homo sapiens
  misc_RNA (1)...(19): siRNA sense strand
cuaaagaaauuugaggcuu

SEQ ID NO: 2387209 - RNA, 19 nt, Homo sapiens
  misc_RNA (1)...(19): siRNA sense strand
agcacaaacugaaggagga

SEQ ID NO: 2387210 - RNA, 19 nt, Homo sapiens
  misc_RNA (1)...(19): siRNA sense strand
uguuuagaagccaaagaaa

SEQ ID NO: 2387211 - RNA, 19 nt, Homo sapiens
  misc_RNA (1)...(19): siRNA sense strand
acaaaugggagaacgacuu

SEQ ID NO: 2387212 - RNA, 19 nt, Homo sapiens
  misc_RNA (1)...(19): siRNA sense strand
gagaaagcuuaaugagcag

SEQ ID NO: 2387213 - RNA, 19 nt, Homo sapiens
  misc_RNA (1)...(19): siRNA sense strand
agggagaaccgcacugauu

SEQ ID NO: 2387214 - RNA, 19 nt, Homo sapiens
  misc_RNA (1)...(19): siRNA sense strand
cacaaacagcuuaugcaaa

SEQ ID NO: 2387215 - RNA, 19 nt, Homo sapiens
  misc_RNA (1)...(19): siRNA sense strand
aggcauugagcaaggaguu

SEQ ID NO: 2387216 - RNA, 19 nt, Homo sapiens
  misc_RNA (1)...(19): siRNA sense strand
guguggaaagauaccauaa

SEQ ID NO: 2387217 - RNA, 19 nt, Homo sapiens
  misc_RNA (1)...(19): siRNA sense strand
gcacaguacagguguugca

SEQ ID NO: 2387218 - RNA, 19 nt, Homo sapiens
  misc_RNA (1)...(19): siRNA sense strand
gugaaguccugcugcacga

SEQ ID NO: 2387219 - RNA, 19 nt, Homo sapiens
  misc_RNA (1)...(19): siRNA sense strand
aggaggaagaggagagccu

SEQ ID NO: 2387220 - RNA, 19 nt, Homo sapiens
  misc_RNA (1)...(19): siRNA sense strand
gugaagaagcugaaggaga

SEQ ID NO: 2387221 - RNA, 19 nt, Homo sapiens
  misc_RNA (1)...(19): siRNA sense strand
uugaauacaagcugggaaa

SEQ ID NO: 2387222 - RNA, 19 nt, Homo sapiens
  misc_RNA (1)...(19): siRNA sense strand
aggauuaucaagaggaaau

SEQ ID NO: 2387223 - RNA, 19 nt, Homo sapiens
  misc_RNA (1)...(19): siRNA sense strand
cggaggaggaguuggaaca

SEQ ID NO: 2387224 - RNA, 19 nt, Homo sapiens
  misc_RNA (1)...(19): siRNA sense strand
gugugauguucaagcuaaa

SEQ ID NO: 2387225 - RNA, 19 nt, Homo sapiens
  misc_RNA (1)...(19): siRNA sense strand
agcaaggaguugaggauga

SEQ ID NO: 2387226 - RNA, 19 nt, Homo sapiens
  misc_RNA (1)...(19): siRNA sense strand
guuuagaagccaaagaaaa

SEQ ID NO: 2387227 - RNA, 19 nt, Homo sapiens
  misc_RNA (1)...(19): siRNA sense strand
uggagaaacauuugugcua

SEQ ID NO: 2387228 - RNA, 19 nt, Homo sapiens
  misc_RNA (1)...(19): siRNA sense strand
ccaacaaaugggagaacga

SEQ ID NO: 2387229 - RNA, 19 nt, Homo sapiens
  misc_RNA (1)...(19): siRNA sense strand
acaugaaacugcugggcga

SEQ ID NO: 2387230 - RNA, 19 nt, Homo sapiens
  misc_RNA (1)...(19): siRNA sense strand
agagaaagcuuaaugagca

SEQ ID NO: 2387231 - RNA, 19 nt, Homo sapiens
  misc_RNA (1)...(19): siRNA sense strand
augaagaaggucaggauga

SEQ ID NO: 2387232 - RNA, 19 nt, Homo sapiens
  misc_RNA (1)...(19): siRNA sense strand
agaaauacagagaaagcuu

SEQ ID NO: 2387233 - RNA, 19 nt, Homo sapiens
  misc_RNA (1)...(19): siRNA sense strand
ggaugaagaaggucaggau

SEQ ID NO: 2387234 - RNA, 19 nt, Homo sapiens
  misc_RNA (1)...(19): siRNA sense strand
cagagauacuucaggacca

SEQ ID NO: 2387235 - RNA, 19 nt, Homo sapiens
  misc_RNA (1)...(19): siRNA sense strand
aagcaugagcuguuggaau

SEQ ID NO: 2387236 - RNA, 19 nt, Homo sapiens
  misc_RNA (1)...(19): siRNA sense strand
gcucacuaauauugaacau

SEQ ID NO: 2387237 - RNA, 19 nt, Homo sapiens
  misc_RNA (1)...(19): siRNA sense strand
cuguaacucggaagaaaua

SEQ ID NO: 2387238 - RNA, 19 nt, Homo sapiens
  misc_RNA (1)...(19): siRNA sense strand
gcacaaacugaaggaggaa

SEQ ID NO: 2387239 - RNA, 19 nt, Homo sapiens
  misc_RNA (1)...(19): siRNA sense strand
acaaacugaaggaggaaga

SEQ ID NO: 2387240 - RNA, 19 nt, Homo sapiens
  misc_RNA (1)...(19): siRNA sense strand
gcuacaaaggcuacaugaa

SEQ ID NO: 2387241 - RNA, 19 nt, Homo sapiens
  misc_RNA (1)...(19): siRNA sense strand
aguugaggaugaagcagaa

SEQ ID NO: 2387242 - RNA, 19 nt, Homo sapiens
  misc_RNA (1)...(19): siRNA sense strand
auaucaaggaacuggagaa

SEQ ID NO: 2387243 - RNA, 19 nt, Homo sapiens
  misc_RNA (1)...(19): siRNA sense strand
uggaaagauaccauaagaa

SEQ ID NO: 2387244 - RNA, 19 nt, Homo sapiens
  misc_RNA (1)...(19): siRNA sense strand
gggugaagaagcugaagga

SEQ ID NO: 2387245 - RNA, 19 nt, Homo sapiens
  misc_RNA (1)...(19): siRNA sense strand
agauaauugcccaaggaga

SEQ ID NO: 2387246 - RNA, 19 nt, Homo sapiens
  misc_RNA (1)...(19): siRNA sense strand
ugaagaagcugaaggagac

SEQ ID NO: 2387247 - RNA, 19 nt, Homo sapiens
  misc_RNA (1)...(19): siRNA sense strand
gaguugaggaugaagcaga

SEQ ID NO: 2387248 - RNA, 19 nt, Homo sapiens
  misc_RNA (1)...(19): siRNA sense strand
ccuguaacucggaagaaau

SEQ ID NO: 2387249 - RNA, 19 nt, Homo sapiens
  misc_RNA (1)...(19): siRNA sense strand
ugugcuauguccauggaaa

SEQ ID NO: 2387250 - RNA, 19 nt, Homo sapiens
  misc_RNA (1)...(19): siRNA sense strand
ggcgaaugcaguagcagua

SEQ ID NO: 2387251 - RNA, 19 nt, Homo sapiens
  misc_RNA (1)...(19): siRNA sense strand
ggagcuucagagagacaua

SEQ ID NO: 2387252 - RNA, 19 nt, Homo sapiens
  misc_RNA (1)...(19): siRNA sense strand
gcauaguaccgaaacccaa

SEQ ID NO: 2387253 - RNA, 19 nt, Homo sapiens
  misc_RNA (1)...(19): siRNA sense strand
aggcccaggcauugagcaa

SEQ ID NO: 2387254 - RNA, 19 nt, Homo sapiens
  misc_RNA (1)...(19): siRNA sense strand
gcaaauaaagcaugagcug

SEQ ID NO: 2387255 - RNA, 19 nt, Homo sapiens
  misc_RNA (1)...(19): siRNA sense strand
ccaugaaagcaaagcaucu

SEQ ID NO: 2387256 - RNA, 19 nt, Homo sapiens
  misc_RNA (1)...(19): siRNA sense strand
auacaguugccaaggaaga

SEQ ID NO: 2387257 - RNA, 19 nt, Homo sapiens
  misc_RNA (1)...(19): siRNA sense strand
uugccaaggaagaacuaaa

SEQ ID NO: 2387258 - RNA, 19 nt, Homo sapiens
  misc_RNA (1)...(19): siRNA sense strand
acucagacuugaacagcau

SEQ ID NO: 2387259 - RNA, 19 nt, Homo sapiens
  misc_RNA (1)...(19): siRNA sense strand
gggacacggaggaggaguu

SEQ ID NO: 2387260 - RNA, 19 nt, Homo sapiens
  misc_RNA (1)...(19): siRNA sense strand
uaccaaugucagaggaaga

SEQ ID NO: 2387261 - RNA, 19 nt, Homo sapiens
  misc_RNA (1)...(19): siRNA sense strand
aaggagaacagcugauaga

SEQ ID NO: 2387262 - RNA, 19 nt, Homo sapiens
  misc_RNA (1)...(19): siRNA sense strand
cagauacagcaaaccgaaa

SEQ ID NO: 2387263 - RNA, 19 nt, Homo sapiens
  misc_RNA (1)...(19): siRNA sense strand
ucaaguagucagcaggauu

SEQ ID NO: 2387264 - RNA, 19 nt, Homo sapiens
  misc_RNA (1)...(19): siRNA sense strand
cuucagagagacauagaga

SEQ ID NO: 2387265 - RNA, 19 nt, Homo sapiens
  misc_RNA (1)...(19): siRNA sense strand
ucagagagacauagagaag

SEQ ID NO: 2387266 - RNA, 19 nt, Homo sapiens
  misc_RNA (1)...(19): siRNA sense strand
ugagcaaggaguugaggau

SEQ ID NO: 2387267 - RNA, 19 nt, Homo sapiens
  misc_RNA (1)...(19): siRNA sense strand
caguacagguguugcaucu

SEQ ID NO: 2387268 - RNA, 19 nt, Homo sapiens
  misc_RNA (1)...(19): siRNA sense strand
cuaaagaaauuugaggcuu

SEQ ID NO: 2387269 - RNA, 19 nt, Homo sapiens
  misc_RNA (1)...(19): siRNA sense strand
agcacaaacugaaggagga

SEQ ID NO: 2387270 - RNA, 19 nt, Homo sapiens
  misc_RNA (1)...(19): siRNA sense strand
uguuuagaagccaaagaaa

SEQ ID NO: 2387271 - RNA, 19 nt, Homo sapiens
  misc_RNA (1)...(19): siRNA sense strand
acaaaugggagaacgacuu

SEQ ID NO: 2387272 - RNA, 19 nt, Homo sapiens
  misc_RNA (1)...(19): siRNA sense strand
gagaaagcuuaaugagcag

SEQ ID NO: 2387273 - RNA, 19 nt, Homo sapiens
  misc_RNA (1)...(19): siRNA sense strand
agggagaaccgcacugauu

SEQ ID NO: 2387274 - RNA, 19 nt, Homo sapiens
  misc_RNA (1)...(19): siRNA sense strand
cacaaacagcuuaugcaaa

SEQ ID NO: 2387275 - RNA, 19 nt, Homo sapiens
  misc_RNA (1)...(19): siRNA sense strand
aggcauugagcaaggaguu

SEQ ID NO: 2387276 - RNA, 19 nt, Homo sapiens
  misc_RNA (1)...(19): siRNA sense strand
guguggaaagauaccauaa

SEQ ID NO: 2387277 - RNA, 19 nt, Homo sapiens
  misc_RNA (1)...(19): siRNA sense strand
gcacaguacagguguugca

SEQ ID NO: 2387278 - RNA, 19 nt, Homo sapiens
  misc_RNA (1)...(19): siRNA sense strand
gugaaguccugcugcacga

SEQ ID NO: 2387279 - RNA, 19 nt, Homo sapiens
  misc_RNA (1)...(19): siRNA sense strand
aggaggaagaggagagccu

SEQ ID NO: 2387280 - RNA, 19 nt, Homo sapiens
  misc_RNA (1)...(19): siRNA sense strand
gugaagaagcugaaggaga

SEQ ID NO: 2387281 - RNA, 19 nt, Homo sapiens
  misc_RNA (1)...(19): siRNA sense strand
uugaauacaagcugggaaa

SEQ ID NO: 2387282 - RNA, 19 nt, Homo sapiens
  misc_RNA (1)...(19): siRNA sense strand
cggaggaggaguuggaaca

SEQ ID NO: 2387283 - RNA, 19 nt, Homo sapiens
  misc_RNA (1)...(19): siRNA sense strand
gugugauguucaagcuaaa

SEQ ID NO: 2387284 - RNA, 19 nt, Homo sapiens
  misc_RNA (1)...(19): siRNA sense strand
agcaaggaguugaggauga

SEQ ID NO: 2387285 - RNA, 19 nt, Homo sapiens
  misc_RNA (1)...(19): siRNA sense strand
guuuagaagccaaagaaaa

SEQ ID NO: 2387286 - RNA, 19 nt, Homo sapiens
  misc_RNA (1)...(19): siRNA sense strand
uggagaaacauuugugcua

SEQ ID NO: 2387287 - RNA, 19 nt, Homo sapiens
  misc_RNA (1)...(19): siRNA sense strand
acaugaaacugcugggcga

SEQ ID NO: 2387288 - RNA, 19 nt, Homo sapiens
  misc_RNA (1)...(19): siRNA sense strand
agagaaagcuuaaugagca

SEQ ID NO: 2387289 - RNA, 19 nt, Homo sapiens
  misc_RNA (1)...(19): siRNA sense strand
augaagaaggucaggauga

SEQ ID NO: 2387290 - RNA, 19 nt, Homo sapiens
  misc_RNA (1)...(19): siRNA sense strand
agaaauacagagaaagcuu

SEQ ID NO: 2387291 - RNA, 19 nt, Homo sapiens
  misc_RNA (1)...(19): siRNA sense strand
ggaugaagaaggucaggau

SEQ ID NO: 2387292 - RNA, 19 nt, Homo sapiens
  misc_RNA (1)...(19): siRNA sense strand
cagagauacuucaggacca

SEQ ID NO: 2387293 - RNA, 19 nt, Homo sapiens
  misc_RNA (1)...(19): siRNA sense strand
aagcaugagcuguuggaau

SEQ ID NO: 2387294 - RNA, 19 nt, Homo sapiens
  misc_RNA (1)...(19): siRNA sense strand
gcucacuaauauugaacau

SEQ ID NO: 2387295 - RNA, 19 nt, Homo sapiens
  misc_RNA (1)...(19): siRNA sense strand
cuguaacucggaagaaaua

SEQ ID NO: 2387296 - RNA, 19 nt, Homo sapiens
  misc_RNA (1)...(19): siRNA sense strand
gcacaaacugaaggaggaa

SEQ ID NO: 2387297 - RNA, 19 nt, Homo sapiens
  misc_RNA (1)...(19): siRNA sense strand
acaaacugaaggaggaaga

SEQ ID NO: 2387298 - RNA, 19 nt, Homo sapiens
  misc_RNA (1)...(19): siRNA sense strand
gcuacaaaggcuacaugaa

SEQ ID NO: 2387299 - RNA, 19 nt, Homo sapiens
  misc_RNA (1)...(19): siRNA sense strand
aguugaggaugaagcagaa

SEQ ID NO: 2387300 - RNA, 19 nt, Homo sapiens
  misc_RNA (1)...(19): siRNA sense strand
auaucaaggaacuggagaa

SEQ ID NO: 2387301 - RNA, 19 nt, Homo sapiens
  misc_RNA (1)...(19): siRNA sense strand
uggaaagauaccauaagaa

SEQ ID NO: 2387302 - RNA, 19 nt, Homo sapiens
  misc_RNA (1)...(19): siRNA sense strand
gggugaagaagcugaagga

SEQ ID NO: 2387303 - RNA, 19 nt, Homo sapiens
  misc_RNA (1)...(19): siRNA sense strand
agauaauugcccaaggaga

SEQ ID NO: 2387304 - RNA, 19 nt, Homo sapiens
  misc_RNA (1)...(19): siRNA sense strand
ugaagaagcugaaggagac

SEQ ID NO: 2387305 - RNA, 19 nt, Homo sapiens
  misc_RNA (1)...(19): siRNA sense strand
gaguugaggaugaagcaga

SEQ ID NO: 2387306 - RNA, 19 nt, Homo sapiens
  misc_RNA (1)...(19): siRNA sense strand
ccuguaacucggaagaaau

SEQ ID NO: 2387307 - RNA, 19 nt, Homo sapiens
  misc_RNA (1)...(19): siRNA sense strand
ugugcuauguccauggaaa

SEQ ID NO: 2387308 - RNA, 19 nt, Homo sapiens
  misc_RNA (1)...(19): siRNA sense strand
ggcgaaugcaguagcagua

SEQ ID NO: 2387309 - RNA, 19 nt, Homo sapiens
  misc_RNA (1)...(19): siRNA sense strand
ggagcuucagagagacaua

SEQ ID NO: 2387310 - RNA, 19 nt, Homo sapiens
  misc_RNA (1)...(19): siRNA sense strand
gcauaguaccgaaacccaa

SEQ ID NO: 2387311 - RNA, 19 nt, Homo sapiens
  misc_RNA (1)...(19): siRNA sense strand
aggcccaggcauugagcaa

SEQ ID NO: 2387312 - RNA, 19 nt, Homo sapiens
  misc_RNA (1)...(19): siRNA sense strand
gcaaauaaagcaugagcug

SEQ ID NO: 2387313 - RNA, 19 nt, Homo sapiens
  misc_RNA (1)...(19): siRNA sense strand
auacaguugccaaggaaga

SEQ ID NO: 2387314 - RNA, 19 nt, Homo sapiens
  misc_RNA (1)...(19): siRNA sense strand
uugccaaggaagaacuaaa

SEQ ID NO: 2387315 - RNA, 19 nt, Homo sapiens
  misc_RNA (1)...(19): siRNA sense strand
acucagacuugaacagcau

SEQ ID NO: 2387316 - RNA, 19 nt, Homo sapiens
  misc_RNA (1)...(19): siRNA sense strand
gggacacggaggaggaguu

SEQ ID NO: 2387317 - RNA, 19 nt, Homo sapiens
  misc_RNA (1)...(19): siRNA sense strand
ccaugaaagcaaagcaucu

SEQ ID NO: 2387318 - RNA, 19 nt, Homo sapiens
  misc_RNA (1)...(19): siRNA sense strand
uaccaaugucagaggaaga

SEQ ID NO: 2387319 - RNA, 19 nt, Homo sapiens
  misc_RNA (1)...(19): siRNA sense strand
aaggagaacagcugauaga

SEQ ID NO: 2387320 - RNA, 19 nt, Homo sapiens
  misc_RNA (1)...(19): siRNA sense strand
cagauacagcaaaccgaaa

SEQ ID NO: 2387321 - RNA, 19 nt, Homo sapiens
  misc_RNA (1)...(19): siRNA sense strand
ucaaguagucagcaggauu

SEQ ID NO: 2387322 - RNA, 19 nt, Homo sapiens
  misc_RNA (1)...(19): siRNA sense strand
cuucagagagacauagaga

SEQ ID NO: 2387323 - RNA, 19 nt, Homo sapiens
  misc_RNA (1)...(19): siRNA sense strand
ucagagagacauagagaag

SEQ ID NO: 2387324 - RNA, 19 nt, Homo sapiens
  misc_RNA (1)...(19): siRNA sense strand
ugagcaaggaguugaggau

SEQ ID NO: 2387325 - RNA, 19 nt, Homo sapiens
  misc_RNA (1)...(19): siRNA sense strand
caguacagguguugcaucu

SEQ ID NO: 2387326 - RNA, 19 nt, Homo sapiens
  misc_RNA (1)...(19): siRNA sense strand
cuaaagaaauuugaggcuu

SEQ ID NO: 2387327 - RNA, 19 nt, Homo sapiens
  misc_RNA (1)...(19): siRNA sense strand
agcacaaacugaaggagga

SEQ ID NO: 2387328 - RNA, 19 nt, Homo sapiens
  misc_RNA (1)...(19): siRNA sense strand
uguuuagaagccaaagaaa

SEQ ID NO: 2387329 - RNA, 19 nt, Homo sapiens
  misc_RNA (1)...(19): siRNA sense strand
gagaaagcuuaaugagcag

SEQ ID NO: 2387330 - RNA, 19 nt, Homo sapiens
  misc_RNA (1)...(19): siRNA sense strand
agggagaaccgcacugauu

SEQ ID NO: 2387331 - RNA, 19 nt, Homo sapiens
  misc_RNA (1)...(19): siRNA sense strand
cacaaacagcuuaugcaaa

SEQ ID NO: 2387332 - RNA, 19 nt, Homo sapiens
  misc_RNA (1)...(19): siRNA sense strand
aggcauugagcaaggaguu

SEQ ID NO: 2387333 - RNA, 19 nt, Homo sapiens
  misc_RNA (1)...(19): siRNA sense strand
guguggaaagauaccauaa

SEQ ID NO: 2387334 - RNA, 19 nt, Homo sapiens
  misc_RNA (1)...(19): siRNA sense strand
gcacaguacagguguugca

SEQ ID NO: 2387335 - RNA, 19 nt, Homo sapiens
  misc_RNA (1)...(19): siRNA sense strand
gugaaguccugcugcacga

SEQ ID NO: 2387336 - RNA, 19 nt, Homo sapiens
  misc_RNA (1)...(19): siRNA sense strand
aggaggaagaggagagccu

SEQ ID NO: 2387337 - RNA, 19 nt, Homo sapiens
  misc_RNA (1)...(19): siRNA sense strand
auucuaaccuugaugcaga

SEQ ID NO: 2387338 - RNA, 19 nt, Homo sapiens
  misc_RNA (1)...(19): siRNA sense strand
caaugucagaggaagacua

SEQ ID NO: 2387339 - RNA, 19 nt, Homo sapiens
  misc_RNA (1)...(19): siRNA sense strand
ggcgauuguggcagaaauu

SEQ ID NO: 2387340 - RNA, 19 nt, Homo sapiens
  misc_RNA (1)...(19): siRNA sense strand
gugaagaagcugaaggaga

SEQ ID NO: 2387341 - RNA, 19 nt, Homo sapiens
  misc_RNA (1)...(19): siRNA sense strand
uugaauacaagcugggaaa

SEQ ID NO: 2387342 - RNA, 19 nt, Homo sapiens
  misc_RNA (1)...(19): siRNA sense strand
aggauuaucaagaggaaau

SEQ ID NO: 2387343 - RNA, 19 nt, Homo sapiens
  misc_RNA (1)...(19): siRNA sense strand
cggaggaggaguuggaaca

SEQ ID NO: 2387344 - RNA, 19 nt, Homo sapiens
  misc_RNA (1)...(19): siRNA sense strand
gugugauguucaagcuaaa

SEQ ID NO: 2387345 - RNA, 19 nt, Homo sapiens
  misc_RNA (1)...(19): siRNA sense strand
agcaaggaguugaggauga

SEQ ID NO: 2387346 - RNA, 19 nt, Homo sapiens
  misc_RNA (1)...(19): siRNA sense strand
guuuagaagccaaagaaaa

SEQ ID NO: 2387347 - RNA, 19 nt, Homo sapiens
  misc_RNA (1)...(19): siRNA sense strand
uggagaaacauuugugcua

SEQ ID NO: 2387348 - RNA, 19 nt, Homo sapiens
  misc_RNA (1)...(19): siRNA sense strand
ccaacaaaugggagaacga

SEQ ID NO: 2387349 - RNA, 19 nt, Homo sapiens
  misc_RNA (1)...(19): siRNA sense strand
acaugaaacugcugggcga

SEQ ID NO: 2387350 - RNA, 19 nt, Homo sapiens
  misc_RNA (1)...(19): siRNA sense strand
agagaaagcuuaaugagca

SEQ ID NO: 2387351 - RNA, 19 nt, Homo sapiens
  misc_RNA (1)...(19): siRNA sense strand
augaagaaggucaggauga

SEQ ID NO: 2387352 - RNA, 19 nt, Homo sapiens
  misc_RNA (1)...(19): siRNA sense strand
agaaauacagagaaagcuu

SEQ ID NO: 2387353 - RNA, 19 nt, Homo sapiens
  misc_RNA (1)...(19): siRNA sense strand
ggaugaagaaggucaggau

SEQ ID NO: 2387354 - RNA, 19 nt, Homo sapiens
  misc_RNA (1)...(19): siRNA sense strand
cagagauacuucaggacca

SEQ ID NO: 2387355 - RNA, 19 nt, Homo sapiens
  misc_RNA (1)...(19): siRNA sense strand
aagcaugagcuguuggaau

SEQ ID NO: 2387356 - RNA, 19 nt, Homo sapiens
  misc_RNA (1)...(19): siRNA sense strand
gcucacuaauauugaacau

SEQ ID NO: 2387357 - RNA, 19 nt, Homo sapiens
  misc_RNA (1)...(19): siRNA sense strand
cuguaacucggaagaaaua

SEQ ID NO: 2387358 - RNA, 19 nt, Homo sapiens
  misc_RNA (1)...(19): siRNA sense strand
gcacaaacugaaggaggaa

SEQ ID NO: 2387359 - RNA, 19 nt, Homo sapiens
  misc_RNA (1)...(19): siRNA sense strand
acaaacugaaggaggaaga

SEQ ID NO: 2387360 - RNA, 19 nt, Homo sapiens
  misc_RNA (1)...(19): siRNA sense strand
gcuacaaaggcuacaugaa

SEQ ID NO: 2387361 - RNA, 19 nt, Homo sapiens
  misc_RNA (1)...(19): siRNA sense strand
aguugaggaugaagcagaa

SEQ ID NO: 2387362 - RNA, 19 nt, Homo sapiens
  misc_RNA (1)...(19): siRNA sense strand
auaucaaggaacuggagaa

SEQ ID NO: 2387363 - RNA, 19 nt, Homo sapiens
  misc_RNA (1)...(19): siRNA sense strand
uggaaagauaccauaagaa

SEQ ID NO: 2387364 - RNA, 19 nt, Homo sapiens
  misc_RNA (1)...(19): siRNA sense strand
gggugaagaagcugaagga

SEQ ID NO: 2387365 - RNA, 19 nt, Homo sapiens
  misc_RNA (1)...(19): siRNA sense strand
agauaauugcccaaggaga

SEQ ID NO: 2387366 - RNA, 19 nt, Homo sapiens
  misc_RNA (1)...(19): siRNA sense strand
ugaagaagcugaaggagac

SEQ ID NO: 2387367 - RNA, 19 nt, Homo sapiens
  misc_RNA (1)...(19): siRNA sense strand
gaguugaggaugaagcaga

SEQ ID NO: 2387368 - RNA, 19 nt, Homo sapiens
  misc_RNA (1)...(19): siRNA sense strand
ccuguaacucggaagaaau

SEQ ID NO: 2387369 - RNA, 19 nt, Homo sapiens
  misc_RNA (1)...(19): siRNA sense strand
ugugcuauguccauggaaa

SEQ ID NO: 2387370 - RNA, 19 nt, Homo sapiens
  misc_RNA (1)...(19): siRNA sense strand
ggcgaaugcaguagcagua

SEQ ID NO: 2387371 - RNA, 19 nt, Homo sapiens
  misc_RNA (1)...(19): siRNA sense strand
ggagcuucagagagacaua

SEQ ID NO: 2387372 - RNA, 19 nt, Homo sapiens
  misc_RNA (1)...(19): siRNA sense strand
gcauaguaccgaaacccaa

SEQ ID NO: 2387373 - RNA, 19 nt, Homo sapiens
  misc_RNA (1)...(19): siRNA sense strand
aggcccaggcauugagcaa

SEQ ID NO: 2387374 - RNA, 19 nt, Homo sapiens
  misc_RNA (1)...(19): siRNA sense strand
gcaaauaaagcaugagcug

SEQ ID NO: 2387375 - RNA, 19 nt, Homo sapiens
  misc_RNA (1)...(19): siRNA sense strand
ccaugaaagcaaagcaucu

SEQ ID NO: 2387376 - RNA, 19 nt, Homo sapiens
  misc_RNA (1)...(19): siRNA sense strand
auacaguugccaaggaaga

SEQ ID NO: 2387377 - RNA, 19 nt, Homo sapiens
  misc_RNA (1)...(19): siRNA sense strand
uugccaaggaagaacuaaa

SEQ ID NO: 2387378 - RNA, 19 nt, Homo sapiens
  misc_RNA (1)...(19): siRNA sense strand
acucagacuugaacagcau

SEQ ID NO: 2387379 - RNA, 19 nt, Homo sapiens
  misc_RNA (1)...(19): siRNA sense strand
gggacacggaggaggaguu

SEQ ID NO: 2387380 - RNA, 19 nt, Homo sapiens
  misc_RNA (1)...(19): siRNA sense strand
uaccaaugucagaggaaga

SEQ ID NO: 2387381 - RNA, 19 nt, Homo sapiens
  misc_RNA (1)...(19): siRNA sense strand
aaggagaacagcugauaga

SEQ ID NO: 2387382 - RNA, 19 nt, Homo sapiens
  misc_RNA (1)...(19): siRNA sense strand
cagauacagcaaaccgaaa

SEQ ID NO: 2387383 - RNA, 19 nt, Homo sapiens
  misc_RNA (1)...(19): siRNA sense strand
ucaaguagucagcaggauu

SEQ ID NO: 2387384 - RNA, 19 nt, Homo sapiens
  misc_RNA (1)...(19): siRNA sense strand
cuucagagagacauagaga

SEQ ID NO: 2387385 - RNA, 19 nt, Homo sapiens
  misc_RNA (1)...(19): siRNA sense strand
ucagagagacauagagaag

SEQ ID NO: 2387386 - RNA, 19 nt, Homo sapiens
  misc_RNA (1)...(19): siRNA sense strand
ugagcaaggaguugaggau

SEQ ID NO: 2387387 - RNA, 19 nt, Homo sapiens
  misc_RNA (1)...(19): siRNA sense strand
caguacagguguugcaucu

SEQ ID NO: 2387388 - RNA, 19 nt, Homo sapiens
  misc_RNA (1)...(19): siRNA sense strand
cuaaagaaauuugaggcuu

SEQ ID NO: 2387389 - RNA, 19 nt, Homo sapiens
  misc_RNA (1)...(19): siRNA sense strand
agcacaaacugaaggagga

SEQ ID NO: 2387390 - RNA, 19 nt, Homo sapiens
  misc_RNA (1)...(19): siRNA sense strand
uguuuagaagccaaagaaa

SEQ ID NO: 2387391 - RNA, 19 nt, Homo sapiens
  misc_RNA (1)...(19): siRNA sense strand
acaaaugggagaacgacuu

SEQ ID NO: 2387392 - RNA, 19 nt, Homo sapiens
  misc_RNA (1)...(19): siRNA sense strand
gagaaagcuuaaugagcag

SEQ ID NO: 2387393 - RNA, 19 nt, Homo sapiens
  misc_RNA (1)...(19): siRNA sense strand
agggagaaccgcacugauu

SEQ ID NO: 2387394 - RNA, 19 nt, Homo sapiens
  misc_RNA (1)...(19): siRNA sense strand
cacaaacagcuuaugcaaa

SEQ ID NO: 2387395 - RNA, 19 nt, Homo sapiens
  misc_RNA (1)...(19): siRNA sense strand
aggcauugagcaaggaguu

SEQ ID NO: 2387396 - RNA, 19 nt, Homo sapiens
  misc_RNA (1)...(19): siRNA sense strand
guguggaaagauaccauaa

SEQ ID NO: 2387397 - RNA, 19 nt, Homo sapiens
  misc_RNA (1)...(19): siRNA sense strand
gcacaguacagguguugca

SEQ ID NO: 2387398 - RNA, 19 nt, Homo sapiens
  misc_RNA (1)...(19): siRNA sense strand
gugaaguccugcugcacga

SEQ ID NO: 2387399 - RNA, 19 nt, Homo sapiens
  misc_RNA (1)...(19): siRNA sense strand
aggaggaagaggagagccu

SEQ ID NO: 2387400 - RNA, 19 nt, Homo sapiens
  misc_RNA (1)...(19): siRNA sense strand
aggaagaagucgcgguuaa

SEQ ID NO: 2387401 - RNA, 19 nt, Homo sapiens
  misc_RNA (1)...(19): siRNA sense strand
cguuugaaguggaggaauu

SEQ ID NO: 2387402 - RNA, 19 nt, Homo sapiens
  misc_RNA (1)...(19): siRNA sense strand
ccagaaaggaauagugaga

SEQ ID NO: 2387403 - RNA, 19 nt, Homo sapiens
  misc_RNA (1)...(19): siRNA sense strand
auacaaacacaaagcgaua

SEQ ID NO: 2387404 - RNA, 19 nt, Homo sapiens
  misc_RNA (1)...(19): siRNA sense strand
aaguuaaguugcugcgaaa

SEQ ID NO: 2387405 - RNA, 19 nt, Homo sapiens
  misc_RNA (1)...(19): siRNA sense strand
ggaauagugagaagagcaa

SEQ ID NO: 2387406 - RNA, 19 nt, Homo sapiens
  misc_RNA (1)...(19): siRNA sense strand
ccauugacgagaugaguaa

SEQ ID NO: 2387407 - RNA, 19 nt, Homo sapiens
  misc_RNA (1)...(19): siRNA sense strand
caagagaagcagaaaucaa

SEQ ID NO: 2387408 - RNA, 19 nt, Homo sapiens
  misc_RNA (1)...(19): siRNA sense strand
ggcuagaaauauugcgauu

SEQ ID NO: 2387409 - RNA, 19 nt, Homo sapiens
  misc_RNA (1)...(19): siRNA sense strand
ggacuuaaccaaaaggaua

SEQ ID NO: 2387410 - RNA, 19 nt, Homo sapiens
  misc_RNA (1)...(19): siRNA sense strand
uaugagaagcggagggauu

SEQ ID NO: 2387411 - RNA, 19 nt, Homo sapiens
  misc_RNA (1)...(19): siRNA sense strand
aggaagaaaugaaagccaa

SEQ ID NO: 2387412 - RNA, 19 nt, Homo sapiens
  misc_RNA (1)...(19): siRNA sense strand
ccaaagacuaggacaguau

SEQ ID NO: 2387413 - RNA, 19 nt, Homo sapiens
  misc_RNA (1)...(19): siRNA sense strand
cggucaagccuuagcggua

SEQ ID NO: 2387414 - RNA, 19 nt, Homo sapiens
  misc_RNA (1)...(19): siRNA sense strand
acaucaacagugugagaaa

SEQ ID NO: 2387415 - RNA, 19 nt, Homo sapiens
  misc_RNA (1)...(19): siRNA sense strand
aagugaaagcagagucaaa

SEQ ID NO: 2387416 - RNA, 19 nt, Homo sapiens
  misc_RNA (1)...(19): siRNA sense strand
agucauuacuugaagccaa

SEQ ID NO: 2387417 - RNA, 19 nt, Homo sapiens
  misc_RNA (1)...(19): siRNA sense strand
cccagaaggugcugaagaa

SEQ ID NO: 2387418 - RNA, 19 nt, Homo sapiens
  misc_RNA (1)...(19): siRNA sense strand
aggaaggauuggagagcca

SEQ ID NO: 2387419 - RNA, 19 nt, Homo sapiens
  misc_RNA (1)...(19): siRNA sense strand
gagaaaugcugauucgaga

SEQ ID NO: 2387420 - RNA, 19 nt, Homo sapiens
  misc_RNA (1)...(19): siRNA sense strand
uugaagaugaagauggaaa

SEQ ID NO: 2387421 - RNA, 19 nt, Homo sapiens
  misc_RNA (1)...(19): siRNA sense strand
acgaggaggucgacaaaga

SEQ ID NO: 2387422 - RNA, 19 nt, Homo sapiens
  misc_RNA (1)...(19): siRNA sense strand
gcuccgugcuccuggcaaa

SEQ ID NO: 2387423 - RNA, 19 nt, Homo sapiens
  misc_RNA (1)...(19): siRNA sense strand
uugaagagaaguuuggaaa

SEQ ID NO: 2387424 - RNA, 19 nt, Homo sapiens
  misc_RNA (1)...(19): siRNA sense strand
ggguggaagagcagugcaa

SEQ ID NO: 2387425 - RNA, 19 nt, Homo sapiens
  misc_RNA (1)...(19): siRNA sense strand
ugaucaaacugcagcucaa

SEQ ID NO: 2387426 - RNA, 19 nt, Homo sapiens
  misc_RNA (1)...(19): siRNA sense strand
aaagccaacuacagggaaa

SEQ ID NO: 2387427 - RNA, 19 nt, Homo sapiens
  misc_RNA (1)...(19): siRNA sense strand
ucagaaguuucgagauaau

SEQ ID NO: 2387428 - RNA, 19 nt, Homo sapiens
  misc_RNA (1)...(19): siRNA sense strand
agaaaggaauagugagaag

SEQ ID NO: 2387429 - RNA, 19 nt, Homo sapiens
  misc_RNA (1)...(19): siRNA sense strand
gugaaguggaaauggaaga

SEQ ID NO: 2387430 - RNA, 19 nt, Homo sapiens
  misc_RNA (1)...(19): siRNA sense strand
ggaaaaggcaggauucaaa

SEQ ID NO: 2387431 - RNA, 19 nt, Homo sapiens
  misc_RNA (1)...(19): siRNA sense strand
ggucauuauucaugugguu

SEQ ID NO: 2387432 - RNA, 19 nt, Homo sapiens
  misc_RNA (1)...(19): siRNA sense strand
acauaauccucucaugaaa

SEQ ID NO: 2387433 - RNA, 19 nt, Homo sapiens
  misc_RNA (1)...(19): siRNA sense strand
ugucaagugcaaugauuua

SEQ ID NO: 2387434 - RNA, 19 nt, Homo sapiens
  misc_RNA (1)...(19): siRNA sense strand
caaaguagcacauugggaa

SEQ ID NO: 2387435 - RNA, 19 nt, Homo sapiens
  misc_RNA (1)...(19): siRNA sense strand
ugaaggagcaugagaacga

SEQ ID NO: 2387436 - RNA, 19 nt, Homo sapiens
  misc_RNA (1)...(19): siRNA sense strand
gagcccaagccuuaggaaa

SEQ ID NO: 2387437 - RNA, 19 nt, Homo sapiens
  misc_RNA (1)...(19): siRNA sense strand
gcgugaguguucaggucaa

SEQ ID NO: 2387438 - RNA, 19 nt, Homo sapiens
  misc_RNA (1)...(19): siRNA sense strand
cagaauaucucacacggaa

SEQ ID NO: 2387439 - RNA, 19 nt, Homo sapiens
  misc_RNA (1)...(19): siRNA sense strand
gugcaagagaagcagaaau

SEQ ID NO: 2387440 - RNA, 19 nt, Homo sapiens
  misc_RNA (1)...(19): siRNA sense strand
gaugaugaacaaagcaaau

SEQ ID NO: 2387441 - RNA, 19 nt, Homo sapiens
  misc_RNA (1)...(19): siRNA sense strand
gaacaaagcaaauuggaag

SEQ ID NO: 2387442 - RNA, 19 nt, Homo sapiens
  misc_RNA (1)...(19): siRNA sense strand
cagcugagccagaagugaa

SEQ ID NO: 2387443 - RNA, 19 nt, Homo sapiens
  misc_RNA (1)...(19): siRNA sense strand
caaagauucagaugaggaa

SEQ ID NO: 2387444 - RNA, 19 nt, Homo sapiens
  misc_RNA (1)...(19): siRNA sense strand
caguggaaaccguuguaaa

SEQ ID NO: 2387445 - RNA, 19 nt, Homo sapiens
  misc_RNA (1)...(19): siRNA sense strand
ccucugaugugaaggacuu

SEQ ID NO: 2387446 - RNA, 19 nt, Homo sapiens
  misc_RNA (1)...(19): siRNA sense strand
ucuggaaagccgagcgcua

SEQ ID NO: 2387447 - RNA, 19 nt, Homo sapiens
  misc_RNA (1)...(19): siRNA sense strand
cuuaaacuguacucggaua

SEQ ID NO: 2387448 - RNA, 19 nt, Homo sapiens
  misc_RNA (1)...(19): siRNA sense strand
uguggaagcuugcggucaa

SEQ ID NO: 2387449 - RNA, 19 nt, Homo sapiens
  misc_RNA (1)...(19): siRNA sense strand
agcucaagaugcaggacaa

SEQ ID NO: 2387450 - RNA, 19 nt, Homo sapiens
  misc_RNA (1)...(19): siRNA sense strand
caucuaagaacgcgaauca

SEQ ID NO: 2387451 - RNA, 19 nt, Homo sapiens
  misc_RNA (1)...(19): siRNA sense strand
agagcaauucccuggauaa

SEQ ID NO: 2387452 - RNA, 19 nt, Homo sapiens
  misc_RNA (1)...(19): siRNA sense strand
gugaaggacuuaaccaaaa

SEQ ID NO: 2387453 - RNA, 19 nt, Homo sapiens
  misc_RNA (1)...(19): siRNA sense strand
gggaaauggcgaaggagcu

SEQ ID NO: 2387454 - RNA, 19 nt, Homo sapiens
  misc_RNA (1)...(19): siRNA sense strand
agaugaaggagcaugagaa

SEQ ID NO: 2387455 - RNA, 19 nt, Homo sapiens
  misc_RNA (1)...(19): siRNA sense strand
cagacagugaaguggaaau

SEQ ID NO: 2387456 - RNA, 19 nt, Homo sapiens
  misc_RNA (1)...(19): siRNA sense strand
aaaggaagcacgaagaaga

SEQ ID NO: 2387457 - RNA, 19 nt, Homo sapiens
  misc_RNA (1)...(19): siRNA sense strand
gcauuaugguccggaaauu

SEQ ID NO: 2387458 - RNA, 19 nt, Homo sapiens
  misc_RNA (1)...(19): siRNA sense strand
caguuuacagacagugaaa

SEQ ID NO: 2387459 - RNA, 19 nt, Homo sapiens
  misc_RNA (1)...(19): siRNA sense strand
ugccaaggcuagaaauauu

SEQ ID NO: 2387460 - RNA, 19 nt, Homo sapiens
  misc_RNA (1)...(19): siRNA sense strand
aaaguagcacauugggaaa

SEQ ID NO: 2387461 - RNA, 19 nt, Homo sapiens
  misc_RNA (1)...(19): siRNA sense strand
cgugguucgcugugauaaa

SEQ ID NO: 2387462 - RNA, 19 nt, Homo sapiens
  misc_RNA (1)...(19): siRNA sense strand
agacguggcucgacagcau

SEQ ID NO: 2387463 - RNA, 19 nt, Homo sapiens
  misc_RNA (1)...(19): siRNA sense strand
agaauaucucacacggaaa

SEQ ID NO: 2387464 - RNA, 19 nt, Homo sapiens
  misc_RNA (1)...(19): siRNA sense strand
augaagauggaaaggagua

SEQ ID NO: 2387465 - RNA, 19 nt, Homo sapiens
  misc_RNA (1)...(19): siRNA sense strand
gagaagaaggguugagcca

SEQ ID NO: 2387466 - RNA, 19 nt, Homo sapiens
  misc_RNA (1)...(19): siRNA sense strand
gagcauagcaccugagccu

SEQ ID NO: 2387467 - RNA, 19 nt, Homo sapiens
  misc_RNA (1)...(19): siRNA sense strand
auggaaggagugacagaua

SEQ ID NO: 2387468 - RNA, 19 nt, Homo sapiens
  misc_RNA (1)...(19): siRNA sense strand
uuggaaugacaguagauua

SEQ ID NO: 2387469 - RNA, 19 nt, Homo sapiens
  misc_RNA (1)...(19): siRNA sense strand
ccgcaguggaaauaccaua

SEQ ID NO: 2387470 - RNA, 19 nt, Homo sapiens
  misc_RNA (1)...(19): siRNA sense strand
cuuauaacauccuggcuca

SEQ ID NO: 2387471 - RNA, 19 nt, Homo sapiens
  misc_RNA (1)...(19): siRNA sense strand
ugacagauacuaagccaga

SEQ ID NO: 2387472 - RNA, 19 nt, Homo sapiens
  misc_RNA (1)...(19): siRNA sense strand
aggaaguccaggaagauca

SEQ ID NO: 2387473 - RNA, 19 nt, Homo sapiens
  misc_RNA (1)...(19): siRNA sense strand
ccuggaagguaucuggaca

SEQ ID NO: 2387474 - RNA, 19 nt, Homo sapiens
  misc_RNA (1)...(19): siRNA sense strand
gcuacuuaaucgggauaau

SEQ ID NO: 2387475 - RNA, 19 nt, Homo sapiens
  misc_RNA (1)...(19): siRNA sense strand
aaggagugacagauacuaa

SEQ ID NO: 2387476 - RNA, 19 nt, Homo sapiens
  misc_RNA (1)...(19): siRNA sense strand
uggaaugacaguagauuac

SEQ ID NO: 2387477 - RNA, 19 nt, Homo sapiens
  misc_RNA (1)...(19): siRNA sense strand
ugugagaaugggaacagaa

SEQ ID NO: 2387478 - RNA, 19 nt, Homo sapiens
  misc_RNA (1)...(19): siRNA sense strand
ccuacaucauugaggagaa

SEQ ID NO: 2387479 - RNA, 19 nt, Homo sapiens
  misc_RNA (1)...(19): siRNA sense strand
gcgaggauguagaggacga

SEQ ID NO: 2387480 - RNA, 19 nt, Homo sapiens
  misc_RNA (1)...(19): siRNA sense strand
cuuccaaagggcugaaaua

SEQ ID NO: 2387481 - RNA, 19 nt, Homo sapiens
  misc_RNA (1)...(19): siRNA sense strand
agccugugcuggugagaaa

SEQ ID NO: 2387482 - RNA, 19 nt, Homo sapiens
  misc_RNA (1)...(19): siRNA sense strand
ccguuaacuucgaauacua

SEQ ID NO: 2387483 - RNA, 19 nt, Homo sapiens
  misc_RNA (1)...(19): siRNA sense strand
cuauauugaccgagauuca

SEQ ID NO: 2387484 - RNA, 19 nt, Homo sapiens
  misc_RNA (1)...(19): siRNA sense strand
acagagaaaggaugggaau

SEQ ID NO: 2387485 - RNA, 19 nt, Homo sapiens
  misc_RNA (1)...(19): siRNA sense strand
ggugugaauucuaggacca

SEQ ID NO: 2387486 - RNA, 19 nt, Homo sapiens
  misc_RNA (1)...(19): siRNA sense strand
acaaaugggccaagccgaa

SEQ ID NO: 2387487 - RNA, 19 nt, Homo sapiens
  misc_RNA (1)...(19): siRNA sense strand
cggcacaggcauucgguuu

SEQ ID NO: 2387488 - RNA, 19 nt, Homo sapiens
  misc_RNA (1)...(19): siRNA sense strand
ccaacauggagcuggauga

SEQ ID NO: 2387489 - RNA, 19 nt, Homo sapiens
  misc_RNA (1)...(19): siRNA sense strand
ggacgaaugcacagccaca

SEQ ID NO: 2387490 - RNA, 19 nt, Homo sapiens
  misc_RNA (1)...(19): siRNA sense strand
ggaaaccaggguaggaaaa

SEQ ID NO: 2387491 - RNA, 19 nt, Homo sapiens
  misc_RNA (1)...(19): siRNA sense strand
gcuaaaucgaggcaauaau

SEQ ID NO: 2387492 - RNA, 19 nt, Homo sapiens
  misc_RNA (1)...(19): siRNA sense strand
uggaaaccaggguaggaaa

SEQ ID NO: 2387493 - RNA, 19 nt, Homo sapiens
  misc_RNA (1)...(19): siRNA sense strand
ccagugugacccugacaaa

SEQ ID NO: 2387494 - RNA, 19 nt, Homo sapiens
  misc_RNA (1)...(19): siRNA sense strand
gaggcaagcaggaaguaca

SEQ ID NO: 2387495 - RNA, 19 nt, Homo sapiens
  misc_RNA (1)...(19): siRNA sense strand
caucauggaaggcgaggau

SEQ ID NO: 2387496 - RNA, 19 nt, Homo sapiens
  misc_RNA (1)...(19): siRNA sense strand
ggaagaacugagaggcgca

SEQ ID NO: 2387497 - RNA, 19 nt, Homo sapiens
  misc_RNA (1)...(19): siRNA sense strand
guuacuauauugaccgaga

SEQ ID NO: 2387498 - RNA, 19 nt, Homo sapiens
  misc_RNA (1)...(19): siRNA sense strand
cugcaaagagucugaguac

SEQ ID NO: 2387499 - RNA, 19 nt, Homo sapiens
  misc_RNA (1)...(19): siRNA sense strand
cagagaaaggaugggaauu

SEQ ID NO: 2387500 - RNA, 19 nt, Homo sapiens
  misc_RNA (1)...(19): siRNA sense strand
ccaagaacaacaagaucca

SEQ ID NO: 2387501 - RNA, 19 nt, Homo sapiens
  misc_RNA (1)...(19): siRNA sense strand
agaagucacucuuugggaa

SEQ ID NO: 2387502 - RNA, 19 nt, Homo sapiens
  misc_RNA (1)...(19): siRNA sense strand
uggaugaagaccacagaga

SEQ ID NO: 2387503 - RNA, 19 nt, Homo sapiens
  misc_RNA (1)...(19): siRNA sense strand
ccacaaacauggaaacgac

SEQ ID NO: 2387504 - RNA, 19 nt, Homo sapiens
  misc_RNA (1)...(19): siRNA sense strand
gauggcagacacagagaau

SEQ ID NO: 2387505 - RNA, 19 nt, Homo sapiens
  misc_RNA (1)...(19): siRNA sense strand
cugaguaccacuaugagua

SEQ ID NO: 2387506 - RNA, 19 nt, Homo sapiens
  misc_RNA (1)...(19): siRNA sense strand
ccaaaggcaaacaguccua

SEQ ID NO: 2387507 - RNA, 19 nt, Homo sapiens
  misc_RNA (1)...(19): siRNA sense strand
cagccaacucuuauucaaa

SEQ ID NO: 2387508 - RNA, 19 nt, Homo sapiens
  misc_RNA (1)...(19): siRNA sense strand
cggugauggcagacacaga

SEQ ID NO: 2387509 - RNA, 19 nt, Homo sapiens
  misc_RNA (1)...(19): siRNA sense strand
ccauagauuucuggcugaa

SEQ ID NO: 2387510 - RNA, 19 nt, Homo sapiens
  misc_RNA (1)...(19): siRNA sense strand
ccgucaaccugaagcaauc

SEQ ID NO: 2387511 - RNA, 19 nt, Homo sapiens
  misc_RNA (1)...(19): siRNA sense strand
ccaaaguacccaagccugu

SEQ ID NO: 2387512 - RNA, 19 nt, Homo sapiens
  misc_RNA (1)...(19): siRNA sense strand
acaaauacucagagaaagg

SEQ ID NO: 2387513 - RNA, 19 nt, Homo sapiens
  misc_RNA (1)...(19): siRNA sense strand
uugcacagacaaagauuau

SEQ ID NO: 2387514 - RNA, 19 nt, Homo sapiens
  misc_RNA (1)...(19): siRNA sense strand
cugugggauuugaauacaa

SEQ ID NO: 2387515 - RNA, 19 nt, Homo sapiens
  misc_RNA (1)...(19): siRNA sense strand
cuucaugccugcaaagagu

SEQ ID NO: 2387516 - RNA, 19 nt, Homo sapiens
  misc_RNA (1)...(19): siRNA sense strand
gaauaaagagguggccaga

SEQ ID NO: 2387517 - RNA, 19 nt, Homo sapiens
  misc_RNA (1)...(19): siRNA sense strand
gaggagaacacuaccacga

SEQ ID NO: 2387518 - RNA, 19 nt, Homo sapiens
  misc_RNA (1)...(19): siRNA sense strand
ggacaacagugguucccua

SEQ ID NO: 2387519 - RNA, 19 nt, Homo sapiens
  misc_RNA (1)...(19): siRNA sense strand
agguauucuuagaccguau

SEQ ID NO: 2387520 - RNA, 19 nt, Homo sapiens
  misc_RNA (1)...(19): siRNA sense strand
ccguauuaacagagcugau

SEQ ID NO: 2387521 - RNA, 19 nt, Homo sapiens
  misc_RNA (1)...(19): siRNA sense strand
gggaaaaugcagaggucaa

SEQ ID NO: 2387522 - RNA, 19 nt, Homo sapiens
  misc_RNA (1)...(19): siRNA sense strand
cgaagagagagcaggcaua

SEQ ID NO: 2387523 - RNA, 19 nt, Homo sapiens
  misc_RNA (1)...(19): siRNA sense strand
ccaacaugccaaagguuaa

SEQ ID NO: 2387524 - RNA, 19 nt, Homo sapiens
  misc_RNA (1)...(19): siRNA sense strand
gcuaguuggugcagggaga

SEQ ID NO: 2387525 - RNA, 19 nt, Homo sapiens
  misc_RNA (1)...(19): siRNA sense strand
gguuaagacaauugaacuu

SEQ ID NO: 2387526 - RNA, 19 nt, Homo sapiens
  misc_RNA (1)...(19): siRNA sense strand
auggaaugguggaaugaua

SEQ ID NO: 2387527 - RNA, 19 nt, Homo sapiens
  misc_RNA (1)...(19): siRNA sense strand
ugaaauacuauguggcuau

SEQ ID NO: 2387528 - RNA, 19 nt, Homo sapiens
  misc_RNA (1)...(19): siRNA sense strand
cgagcaagcaucaggaaaa

SEQ ID NO: 2387529 - RNA, 19 nt, Homo sapiens
  misc_RNA (1)...(19): siRNA sense strand
uggaaugauauuuggcuua

SEQ ID NO: 2387530 - RNA, 19 nt, Homo sapiens
  misc_RNA (1)...(19): siRNA sense strand
aacuaggaauggaaggaaa

SEQ ID NO: 2387531 - RNA, 19 nt, Homo sapiens
  misc_RNA (1)...(19): siRNA sense strand
aggaaauguuugaugaagu

SEQ ID NO: 2387532 - RNA, 19 nt, Homo sapiens
  misc_RNA (1)...(19): siRNA sense strand
gaaaagaccaguuggguga

SEQ ID NO: 2387533 - RNA, 19 nt, Homo sapiens
  misc_RNA (1)...(19): siRNA sense strand
acucugaggacuuggcuaa

SEQ ID NO: 2387534 - RNA, 19 nt, Homo sapiens
  misc_RNA (1)...(19): siRNA sense strand
aggaaaaguuacugaaguu

SEQ ID NO: 2387535 - RNA, 19 nt, Homo sapiens
  misc_RNA (1)...(19): siRNA sense strand
aggaaagguuaucaagaca

SEQ ID NO: 2387536 - RNA, 19 nt, Homo sapiens
  misc_RNA (1)...(19): siRNA sense strand
caugauggacagaaggaau

SEQ ID NO: 2387537 - RNA, 19 nt, Homo sapiens
  misc_RNA (1)...(19): siRNA sense strand
gaauggaaggaaagguuau

SEQ ID NO: 2387538 - RNA, 19 nt, Homo sapiens
  misc_RNA (1)...(19): siRNA sense strand
augauggacagaaggaaua

SEQ ID NO: 2387539 - RNA, 19 nt, Homo sapiens
  misc_RNA (1)...(19): siRNA sense strand
augcagaggucaaagagau

SEQ ID NO: 2387540 - RNA, 19 nt, Homo sapiens
  misc_RNA (1)...(19): siRNA sense strand
auacaugaaaccaggaaaa

SEQ ID NO: 2387541 - RNA, 19 nt, Homo sapiens
  misc_RNA (1)...(19): siRNA sense strand
gcaccuggagccauggaaa

SEQ ID NO: 2387542 - RNA, 19 nt, Homo sapiens
  misc_RNA (1)...(19): siRNA sense strand
ugguuaauucacacagaaa

SEQ ID NO: 2387543 - RNA, 19 nt, Homo sapiens
  misc_RNA (1)...(19): siRNA sense strand
ucgaagucuuggucagcaa

SEQ ID NO: 2387544 - RNA, 19 nt, Homo sapiens
  misc_RNA (1)...(19): siRNA sense strand
agacaaacggaaucaaaca

SEQ ID NO: 2387545 - RNA, 19 nt, Homo sapiens
  misc_RNA (1)...(19): siRNA sense strand
gacaacagcaggauggaau

SEQ ID NO: 2387546 - RNA, 19 nt, Homo sapiens
  misc_RNA (1)...(19): siRNA sense strand
cagaacucuugguggugaa

SEQ ID NO: 2387547 - RNA, 19 nt, Homo sapiens
  misc_RNA (1)...(19): siRNA sense strand
cucauuacauauagggaga

SEQ ID NO: 2387548 - RNA, 19 nt, Homo sapiens
  misc_RNA (1)...(19): siRNA sense strand
aggacuuggcuaaugguua

SEQ ID NO: 2387549 - RNA, 19 nt, Homo sapiens
  misc_RNA (1)...(19): siRNA sense strand
aggaauggaaggaaagguu

SEQ ID NO: 2387550 - RNA, 19 nt, Homo sapiens
  misc_RNA (1)...(19): siRNA sense strand
auaaguugcaagaggugaa

SEQ ID NO: 2387551 - RNA, 19 nt, Homo sapiens
  misc_RNA (1)...(19): siRNA sense strand
cagagaaacuuacgccuca

SEQ ID NO: 2387552 - RNA, 19 nt, Homo sapiens
  misc_RNA (1)...(19): siRNA sense strand
cugaaauacuauguggcua

SEQ ID NO: 2387553 - RNA, 19 nt, Homo sapiens
  misc_RNA (1)...(19): siRNA sense strand
aaugaugacuuguggagca

SEQ ID NO: 2387554 - RNA, 19 nt, Homo sapiens
  misc_RNA (1)...(19): siRNA sense strand
gauacaugaaaccaggaaa

SEQ ID NO: 2387555 - RNA, 19 nt, Homo sapiens
  misc_RNA (1)...(19): siRNA sense strand
ggaagaucacuuugaaacu

SEQ ID NO: 2387556 - RNA, 19 nt, Homo sapiens
  misc_RNA (1)...(19): siRNA sense strand
agaaguucagcuauagaaa

SEQ ID NO: 2387557 - RNA, 19 nt, Homo sapiens
  misc_RNA (1)...(19): siRNA sense strand
uggagcagucugucaaaua

SEQ ID NO: 2387558 - RNA, 19 nt, Homo sapiens
  misc_RNA (1)...(19): siRNA sense strand
gguuaaacaagacgggugu

SEQ ID NO: 2387559 - RNA, 19 nt, Homo sapiens
  misc_RNA (1)...(19): siRNA sense strand
caugaaaccaggaaaagaa

SEQ ID NO: 2387560 - RNA, 19 nt, Homo sapiens
  misc_RNA (1)...(19): siRNA sense strand
guuaauugaacuaggaaug

SEQ ID NO: 2387561 - RNA, 19 nt, Homo sapiens
  misc_RNA (1)...(19): siRNA sense strand
guggaaugauauuuggcuu

SEQ ID NO: 2387562 - RNA, 19 nt, Homo sapiens
  misc_RNA (1)...(19): siRNA sense strand
cuacauauccagagcugca

SEQ ID NO: 2387563 - RNA, 19 nt, Homo sapiens
  misc_RNA (1)...(19): siRNA sense strand
gcggaaaccccgacucaaa

SEQ ID NO: 2387564 - RNA, 19 nt, Homo sapiens
  misc_RNA (1)...(19): siRNA sense strand
gggugaaauuuaaugugga

SEQ ID NO: 2387565 - RNA, 19 nt, Homo sapiens
  misc_RNA (1)...(19): siRNA sense strand
augccaaagguuaagacaa

SEQ ID NO: 2387566 - RNA, 19 nt, Homo sapiens
  misc_RNA (1)...(19): siRNA sense strand
ccacagacacauucuaaaa

SEQ ID NO: 2387567 - RNA, 19 nt, Homo sapiens
  misc_RNA (1)...(19): siRNA sense strand
auacagaacucuugguggu

SEQ ID NO: 2387568 - RNA, 19 nt, Homo sapiens
  misc_RNA (1)...(19): siRNA sense strand
ccagugauugacaggcaaa

SEQ ID NO: 2387569 - RNA, 19 nt, Homo sapiens
  misc_RNA (1)...(19): siRNA sense strand
gaauuaccuuuuagagcaa

SEQ ID NO: 2387570 - RNA, 19 nt, Homo sapiens
  misc_RNA (1)...(19): siRNA sense strand
ggaacuuaucgcuguuaau

SEQ ID NO: 2387571 - RNA, 19 nt, Homo sapiens
  misc_RNA (1)...(19): siRNA sense strand
acaggaaauguuugaugaa

SEQ ID NO: 2387572 - RNA, 19 nt, Homo sapiens
  misc_RNA (1)...(19): siRNA sense strand
aaugucaagugcugaacaa

SEQ ID NO: 2387573 - RNA, 19 nt, Homo sapiens
  misc_RNA (1)...(19): siRNA sense strand
cugcaaugguuaauucaca

SEQ ID NO: 2387574 - RNA, 19 nt, Homo sapiens
  misc_RNA (1)...(19): siRNA sense strand
gcuauagaaaugcuaagaa

SEQ ID NO: 2387575 - RNA, 19 nt, Homo sapiens
  misc_RNA (1)...(19): siRNA sense strand
gaugaugacuacauggacu

SEQ ID NO: 2387576 - RNA, 19 nt, Homo sapiens
  misc_RNA (1)...(19): siRNA sense strand
ugucaagugcugaacaaaa

SEQ ID NO: 2387577 - RNA, 19 nt, Homo sapiens
  misc_RNA (1)...(19): siRNA sense strand
uggaaggaaagguuaucaa

SEQ ID NO: 2387578 - RNA, 19 nt, Homo sapiens
  misc_RNA (1)...(19): siRNA sense strand
cccaagaugacaaguaaca

SEQ ID NO: 2387579 - RNA, 19 nt, Homo sapiens
  misc_RNA (1)...(19): siRNA sense strand
acgagcaagcaucaggaaa

SEQ ID NO: 2387580 - RNA, 19 nt, Homo sapiens
  misc_RNA (1)...(19): siRNA sense strand
auauaaaauggcuggagaa

SEQ ID NO: 2387581 - RNA, 19 nt, Homo sapiens
  misc_RNA (1)...(19): siRNA sense strand
cuggaaauguguugggaga

SEQ ID NO: 2387582 - RNA, 19 nt, Homo sapiens
  misc_RNA (1)...(19): siRNA sense strand
ugggaaagccauagagcau

SEQ ID NO: 2387583 - RNA, 19 nt, Homo sapiens
  misc_RNA (1)...(19): siRNA sense strand
gcuuacagcugguaggaca

SEQ ID NO: 2387584 - RNA, 19 nt, Homo sapiens
  misc_RNA (1)...(19): siRNA sense strand
auggaaugguauugaaaga

SEQ ID NO: 2387585 - RNA, 19 nt, Homo sapiens
  misc_RNA (1)...(19): siRNA sense strand
cagacuaugcacugauaau

SEQ ID NO: 2387586 - RNA, 19 nt, Homo sapiens
  misc_RNA (1)...(19): siRNA sense strand
gguggaugaaacuggaaau

SEQ ID NO: 2387587 - RNA, 19 nt, Homo sapiens
  misc_RNA (1)...(19): siRNA sense strand
uggcauuaguucaaggagu

SEQ ID NO: 2387588 - RNA, 19 nt, Homo sapiens
  misc_RNA (1)...(19): siRNA sense strand
gggcauuuuacaugacaua

SEQ ID NO: 2387589 - RNA, 19 nt, Homo sapiens
  misc_RNA (1)...(19): siRNA sense strand
acauagaaggcauccgcua

SEQ ID NO: 2387590 - RNA, 19 nt, Homo sapiens
  misc_RNA (1)...(19): siRNA sense strand
uguguugggagaagcaaua

SEQ ID NO: 2387591 - RNA, 19 nt, Homo sapiens
  misc_RNA (1)...(19): siRNA sense strand
acgaauaguacaagaagcu

SEQ ID NO: 2387592 - RNA, 19 nt, Homo sapiens
  misc_RNA (1)...(19): siRNA sense strand
gaguggugggaaagccaua

SEQ ID NO: 2387593 - RNA, 19 nt, Homo sapiens
  misc_RNA (1)...(19): siRNA sense strand
auuccuggauugugccuaa

SEQ ID NO: 2387594 - RNA, 19 nt, Homo sapiens
  misc_RNA (1)...(19): siRNA sense strand
uaucaaaagaaguuggaga

SEQ ID NO: 2387595 - RNA, 19 nt, Homo sapiens
  misc_RNA (1)...(19): siRNA sense strand
acagcugguaggacaguua

SEQ ID NO: 2387596 - RNA, 19 nt, Homo sapiens
  misc_RNA (1)...(19): siRNA sense strand
ucugaaaugcauuggaaau

SEQ ID NO: 2387597 - RNA, 19 nt, Homo sapiens
  misc_RNA (1)...(19): siRNA sense strand
ggaaaaugaagaugauaca

SEQ ID NO: 2387598 - RNA, 19 nt, Homo sapiens
  misc_RNA (1)...(19): siRNA sense strand
uagcuguggugaaggaaaa

SEQ ID NO: 2387599 - RNA, 19 nt, Homo sapiens
  misc_RNA (1)...(19): siRNA sense strand
auaauuuagcuguggugaa

SEQ ID NO: 2387600 - RNA, 19 nt, Homo sapiens
  misc_RNA (1)...(19): siRNA sense strand
caguagaagacaggacaau

SEQ ID NO: 2387601 - RNA, 19 nt, Homo sapiens
  misc_RNA (1)...(19): siRNA sense strand
gcuggauuucuaagaguau

SEQ ID NO: 2387602 - RNA, 19 nt, Homo sapiens
  misc_RNA (1)...(19): siRNA sense strand
gugaagaugcuauugcaga

SEQ ID NO: 2387603 - RNA, 19 nt, Homo sapiens
  misc_RNA (1)...(19): siRNA sense strand
aggaaaagcaagaaucaga

SEQ ID NO: 2387604 - RNA, 19 nt, Homo sapiens
  misc_RNA (1)...(19): siRNA sense strand
cagacuaauaaugguguua

SEQ ID NO: 2387605 - RNA, 19 nt, Homo sapiens
  misc_RNA (1)...(19): siRNA sense strand
uaacuuuguucaaggagga

SEQ ID NO: 2387606 - RNA, 19 nt, Homo sapiens
  misc_RNA (1)...(19): siRNA sense strand
cugaaggaucauggaacua

SEQ ID NO: 2387607 - RNA, 19 nt, Homo sapiens
  misc_RNA (1)...(19): siRNA sense strand
gugagaaggugguggcaga

SEQ ID NO: 2387608 - RNA, 19 nt, Homo sapiens
  misc_RNA (1)...(19): siRNA sense strand
ggaagaaaacaaauggcaa

SEQ ID NO: 2387609 - RNA, 19 nt, Homo sapiens
  misc_RNA (1)...(19): siRNA sense strand
gcuaaagcucugaacgaca

SEQ ID NO: 2387610 - RNA, 19 nt, Homo sapiens
  misc_RNA (1)...(19): siRNA sense strand
ugggaguaauacagugcaa

SEQ ID NO: 2387611 - RNA, 19 nt, Homo sapiens
  misc_RNA (1)...(19): siRNA sense strand
aaaagguacaggaagaaaa

SEQ ID NO: 2387612 - RNA, 19 nt, Homo sapiens
  misc_RNA (1)...(19): siRNA sense strand
ggaaaagguacaggaagaa

SEQ ID NO: 2387613 - RNA, 19 nt, Homo sapiens
  misc_RNA (1)...(19): siRNA sense strand
cagccaaguuaccagccaa

SEQ ID NO: 2387614 - RNA, 19 nt, Homo sapiens
  misc_RNA (1)...(19): siRNA sense strand
ucuucagacaaguggaaaa

SEQ ID NO: 2387615 - RNA, 19 nt, Homo sapiens
  misc_RNA (1)...(19): siRNA sense strand
ccuucuacaugcugggagu

SEQ ID NO: 2387616 - RNA, 19 nt, Homo sapiens
  misc_RNA (1)...(19): siRNA sense strand
agguacaggaagaaaacaa

SEQ ID NO: 2387617 - RNA, 19 nt, Homo sapiens
  misc_RNA (1)...(19): siRNA sense strand
gugagaaaguaguagagga

SEQ ID NO: 2387618 - RNA, 19 nt, Homo sapiens
  misc_RNA (1)...(19): siRNA sense strand
aaguaguagaggaguugaa

SEQ ID NO: 2387619 - RNA, 19 nt, Homo sapiens
  misc_RNA (1)...(19): siRNA sense strand
cagaauggacaccaggcua

SEQ ID NO: 2387620 - RNA, 19 nt, Homo sapiens
  misc_RNA (1)...(19): siRNA sense strand
gaucugaguucaucgggau

SEQ ID NO: 2387621 - RNA, 19 nt, Homo sapiens
  misc_RNA (1)...(19): siRNA sense strand
gaagaagaacgguggcauc

SEQ ID NO: 2387622 - RNA, 19 nt, Homo sapiens
  misc_RNA (1)...(19): siRNA sense strand
gcuugugaccucagcugaa

SEQ ID NO: 2387623 - RNA, 19 nt, Homo sapiens
  misc_RNA (1)...(19): siRNA sense strand
cugccagagcuguguguga

SEQ ID NO: 2387624 - RNA, 19 nt, Homo sapiens
  misc_RNA (1)...(19): siRNA sense strand
guagcuggagcgaggaaga

SEQ ID NO: 2387625 - RNA, 19 nt, Homo sapiens
  misc_RNA (1)...(19): siRNA sense strand
ucuucagacaaguggaaaa

SEQ ID NO: 2387626 - RNA, 19 nt, Homo sapiens
  misc_RNA (1)...(19): siRNA sense strand
aggauguuaaccugcgaaa

SEQ ID NO: 2387627 - RNA, 19 nt, Homo sapiens
  misc_RNA (1)...(19): siRNA sense strand
ugagaaaguaguagaggag

SEQ ID NO: 2387628 - RNA, 19 nt, Homo sapiens
  misc_RNA (1)...(19): siRNA sense strand
cccaaguagaggugagaaa

SEQ ID NO: 2387629 - RNA, 19 nt, Homo sapiens
  misc_RNA (1)...(19): siRNA sense strand
acuugaugcgagagauaua

SEQ ID NO: 2387630 - RNA, 19 nt, Homo sapiens
  misc_RNA (1)...(19): siRNA sense strand
aggaugagaaaguaguuaa

SEQ ID NO: 2387631 - RNA, 19 nt, Homo sapiens
  misc_RNA (1)...(19): siRNA sense strand
ccuagaagugguggaguaa

SEQ ID NO: 2387632 - RNA, 19 nt, Homo sapiens
  misc_RNA (1)...(19): siRNA sense strand
acuuaacaccuaugaacua

SEQ ID NO: 2387633 - RNA, 19 nt, Homo sapiens
  misc_RNA (1)...(19): siRNA sense strand
uggaaaacuacgagugauu

SEQ ID NO: 2387634 - RNA, 19 nt, Homo sapiens
  misc_RNA (1)...(19): siRNA sense strand
aacccaaagcguagggaau

SEQ ID NO: 2387635 - RNA, 19 nt, Homo sapiens
  misc_RNA (1)...(19): siRNA sense strand
ccaaagugguugcgcucga

SEQ ID NO: 2387636 - RNA, 19 nt, Homo sapiens
  misc_RNA (1)...(19): siRNA sense strand
uaggaaaacaggaggauga

SEQ ID NO: 2387637 - RNA, 19 nt, Homo sapiens
  misc_RNA (1)...(19): siRNA sense strand
cugaagcggcgacgcgaaa

SEQ ID NO: 2387638 - RNA, 19 nt, Homo sapiens
  misc_RNA (1)...(19): siRNA sense strand
aggaaggcgucuaaggcca

SEQ ID NO: 2387639 - RNA, 19 nt, Homo sapiens
  misc_RNA (1)...(19): siRNA sense strand
uggacgaauagaaguaaau

SEQ ID NO: 2387640 - RNA, 19 nt, Homo sapiens
  misc_RNA (1)...(19): siRNA sense strand
augaugaaacccuggaaga

SEQ ID NO: 2387641 - RNA, 19 nt, Homo sapiens
  misc_RNA (1)...(19): siRNA sense strand
ggagauuggcugagacccu

SEQ ID NO: 2387642 - RNA, 19 nt, Homo sapiens
  misc_RNA (1)...(19): siRNA sense strand
gcacauggagccuugguca

SEQ ID NO: 2387643 - RNA, 19 nt, Homo sapiens
  misc_RNA (1)...(19): siRNA sense strand
uccagaaacuaauggcaga

SEQ ID NO: 2387644 - RNA, 19 nt, Homo sapiens
  misc_RNA (1)...(19): siRNA sense strand
auuuggacgaauagaagua

SEQ ID NO: 2387645 - RNA, 19 nt, Homo sapiens
  misc_RNA (1)...(19): siRNA sense strand
aaaacaggaggaugagaaa

SEQ ID NO: 2387646 - RNA, 19 nt, Homo sapiens
  misc_RNA (1)...(19): siRNA sense strand
auuaaguguuaucuggcaa

SEQ ID NO: 2387647 - RNA, 19 nt, Homo sapiens
  misc_RNA (1)...(19): siRNA sense strand
accuacugcuggagugcaa

SEQ ID NO: 2387648 - RNA, 19 nt, Homo sapiens
  misc_RNA (1)...(19): siRNA sense strand
aagagaaacaacaggcaua

SEQ ID NO: 2387649 - RNA, 19 nt, Homo sapiens
  misc_RNA (1)...(19): siRNA sense strand
agaaauuggaacagugauu

SEQ ID NO: 2387650 - RNA, 19 nt, Homo sapiens
  misc_RNA (1)...(19): siRNA sense strand
gcgagguggcugugaaaga

SEQ ID NO: 2387651 - RNA, 19 nt, Homo sapiens
  misc_RNA (1)...(19): siRNA sense strand
cuuugaacuugaugaagaa

SEQ ID NO: 2387652 - RNA, 19 nt, Homo sapiens
  misc_RNA (1)...(19): siRNA sense strand
uuuggaagguggaaagcaa

SEQ ID NO: 2387653 - RNA, 19 nt, Homo sapiens
  misc_RNA (1)...(19): siRNA sense strand
uugaagaaaccuaugcaaa

SEQ ID NO: 2387654 - RNA, 19 nt, Homo sapiens
  misc_RNA (1)...(19): siRNA sense strand
cuaucaaggagaagaacuu

SEQ ID NO: 2387655 - RNA, 19 nt, Homo sapiens
  misc_RNA (1)...(19): siRNA sense strand
aaaucaacaugaagagcuu

SEQ ID NO: 2387656 - RNA, 19 nt, Homo sapiens
  misc_RNA (1)...(19): siRNA sense strand
aggcauacaaguuuggaau

SEQ ID NO: 2387657 - RNA, 19 nt, Homo sapiens
  misc_RNA (1)...(19): siRNA sense strand
agaugaugaccuaguaaau

SEQ ID NO: 2387658 - RNA, 19 nt, Homo sapiens
  misc_RNA (1)...(19): siRNA sense strand
agacuuuaaacgagagcuu

SEQ ID NO: 2387659 - RNA, 19 nt, Homo sapiens
  misc_RNA (1)...(19): siRNA sense strand
augaagaagcuuuggagca

SEQ ID NO: 2387660 - RNA, 19 nt, Homo sapiens
  misc_RNA (1)...(19): siRNA sense strand
cugaaauugaagaaaccua

SEQ ID NO: 2387661 - RNA, 19 nt, Homo sapiens
  misc_RNA (1)...(19): siRNA sense strand
gugagaauuaugaagauga

SEQ ID NO: 2387662 - RNA, 19 nt, Homo sapiens
  misc_RNA (1)...(19): siRNA sense strand
ccugaaaauuugguagaaa

SEQ ID NO: 2387663 - RNA, 19 nt, Homo sapiens
  misc_RNA (1)...(19): siRNA sense strand
augaagacuuuaaacgaga

SEQ ID NO: 2387664 - RNA, 19 nt, Homo sapiens
  misc_RNA (1)...(19): siRNA sense strand
gcugaaacacuaugggaac

SEQ ID NO: 2387665 - RNA, 19 nt, Homo sapiens
  misc_RNA (1)...(19): siRNA sense strand
ccucccuaggugagaauua

SEQ ID NO: 2387666 - RNA, 19 nt, Homo sapiens
  misc_RNA (1)...(19): siRNA sense strand
ugaaaagagauuacaggua

SEQ ID NO: 2387667 - RNA, 19 nt, Homo sapiens
  misc_RNA (1)...(19): siRNA sense strand
aaucuaucaaggagaagaa

SEQ ID NO: 2387668 - RNA, 19 nt, Homo sapiens
  misc_RNA (1)...(19): siRNA sense strand
aggugagaauuaugaagau

SEQ ID NO: 2387669 - RNA, 19 nt, Homo sapiens
  misc_RNA (1)...(19): siRNA sense strand
uggcugugaaagagaaaca

SEQ ID NO: 2387670 - RNA, 19 nt, Homo sapiens
  misc_RNA (1)...(19): siRNA sense strand
ugaugagguuaugaagaaa

SEQ ID NO: 2387671 - RNA, 19 nt, Homo sapiens
  misc_RNA (1)...(19): siRNA sense strand
guauauaaucucaggacug

SEQ ID NO: 2387672 - RNA, 19 nt, Homo sapiens
  misc_RNA (1)...(19): siRNA sense strand
cugaaacacuaugggaaca

SEQ ID NO: 2387673 - RNA, 19 nt, Homo sapiens
  misc_RNA (1)...(19): siRNA sense strand
uggacuucaugcuuagaua

SEQ ID NO: 2387674 - RNA, 19 nt, Homo sapiens
  misc_RNA (1)...(19): siRNA sense strand
uggcgagguggcugugaaa

SEQ ID NO: 2387675 - RNA, 19 nt, Homo sapiens
  misc_RNA (1)...(19): siRNA sense strand
cagcacagcgacagagacu

SEQ ID NO: 2387676 - RNA, 19 nt, Homo sapiens
  misc_RNA (1)...(19): siRNA sense strand
gguggcugugaaagagaaa

SEQ ID NO: 2387677 - RNA, 19 nt, Homo sapiens
  misc_RNA (1)...(19): siRNA sense strand
guaaggaagcacauacaca

SEQ ID NO: 2387678 - RNA, 19 nt, Homo sapiens
  misc_RNA (1)...(19): siRNA sense strand
ugcaguagcaggagcaaga

SEQ ID NO: 2387679 - RNA, 19 nt, Homo sapiens
  misc_RNA (1)...(19): siRNA sense strand
ucucaaggaaguggcgaua

SEQ ID NO: 2387680 - RNA, 19 nt, Homo sapiens
  misc_RNA (1)...(19): siRNA sense strand
ggaaguggcgauaaaacaa

SEQ ID NO: 2387681 - RNA, 19 nt, Homo sapiens
  misc_RNA (1)...(19): siRNA sense strand
aagcugaaauugaagaaac

SEQ ID NO: 2387682 - RNA, 19 nt, Homo sapiens
  misc_RNA (1)...(19): siRNA sense strand
cauccaacaauaacaagaa

SEQ ID NO: 2387683 - RNA, 19 nt, Homo sapiens
  misc_RNA (1)...(19): siRNA sense strand
aagaugaugaccuaguaaa

SEQ ID NO: 2387684 - RNA, 19 nt, Homo sapiens
  misc_RNA (1)...(19): siRNA sense strand
ccacacuguuugcggucau

SEQ ID NO: 2387685 - RNA, 19 nt, Homo sapiens
  misc_RNA (1)...(19): siRNA sense strand
ugaccauaacuuugaacuu

SEQ ID NO: 2387686 - RNA, 19 nt, Homo sapiens
  misc_RNA (1)...(19): siRNA sense strand
aagcuuuggagcagauauu

SEQ ID NO: 2387687 - RNA, 19 nt, Homo sapiens
  misc_RNA (1)...(19): siRNA sense strand
cagaccuaauggaacuaaa

SEQ ID NO: 2387688 - RNA, 19 nt, Homo sapiens
  misc_RNA (1)...(19): siRNA sense strand
uggaguuagcacugauauu

SEQ ID NO: 2387689 - RNA, 19 nt, Homo sapiens
  misc_RNA (1)...(19): siRNA sense strand
agagaaauuggaacaguga

SEQ ID NO: 2387690 - RNA, 19 nt, Homo sapiens
  misc_RNA (1)...(19): siRNA sense strand
acagauuguucuugcucau

SEQ ID NO: 2387691 - RNA, 19 nt, Homo sapiens
  misc_RNA (1)...(19): siRNA sense strand
cagaauguaaggaagcaca

SEQ ID NO: 2387692 - RNA, 19 nt, Homo sapiens
  misc_RNA (1)...(19): siRNA sense strand
cugugaaagagaaacaaca

SEQ ID NO: 2387693 - RNA, 19 nt, Homo sapiens
  misc_RNA (1)...(19): siRNA sense strand
uggaagguggaaagcaauu

SEQ ID NO: 2387694 - RNA, 19 nt, Homo sapiens
  misc_RNA (1)...(19): siRNA sense strand
ugaugaagacuuuaaacga

SEQ ID NO: 2387695 - RNA, 19 nt, Homo sapiens
  misc_RNA (1)...(19): siRNA sense strand
agacaagaucacagagaau

SEQ ID NO: 2387696 - RNA, 19 nt, Homo sapiens
  misc_RNA (1)...(19): siRNA sense strand
agucaguaccggcgagaaa

SEQ ID NO: 2387697 - RNA, 19 nt, Homo sapiens
  misc_RNA (1)...(19): siRNA sense strand
gagaaggaagucagagcga

SEQ ID NO: 2387698 - RNA, 19 nt, Homo sapiens
  misc_RNA (1)...(19): siRNA sense strand
guacauccauaaacggcua

SEQ ID NO: 2387699 - RNA, 19 nt, Homo sapiens
  misc_RNA (1)...(19): siRNA sense strand
agacagagcucacuggcca

SEQ ID NO: 2387700 - RNA, 19 nt, Homo sapiens
  misc_RNA (1)...(19): siRNA sense strand
caggaaaugacaucggaga

SEQ ID NO: 2387701 - RNA, 19 nt, Homo sapiens
  misc_RNA (1)...(19): siRNA sense strand
aaaugacaucggagagaga

SEQ ID NO: 2387702 - RNA, 19 nt, Homo sapiens
  misc_RNA (1)...(19): siRNA sense strand
gaaggaagucagagcgaug

SEQ ID NO: 2387703 - RNA, 19 nt, Homo sapiens
  misc_RNA (1)...(19): siRNA sense strand
agaacagcuccuuggaaaa

SEQ ID NO: 2387704 - RNA, 19 nt, Homo sapiens
  misc_RNA (1)...(19): siRNA sense strand
agagacaagaucacagaga

SEQ ID NO: 2387705 - RNA, 19 nt, Homo sapiens
  misc_RNA (1)...(19): siRNA sense strand
cggcagccagacaggaaau

SEQ ID NO: 2387706 - RNA, 19 nt, Homo sapiens
  misc_RNA (1)...(19): siRNA sense strand
ggauauuggugguaggaau

SEQ ID NO: 2387707 - RNA, 19 nt, Homo sapiens
  misc_RNA (1)...(19): siRNA sense strand
ggaagaaaugguagacaaa

SEQ ID NO: 2387708 - RNA, 19 nt, Homo sapiens
  misc_RNA (1)...(19): siRNA sense strand
acaugaagauggagaaaga

SEQ ID NO: 2387709 - RNA, 19 nt, Homo sapiens
  misc_RNA (1)...(19): siRNA sense strand
aggaagaaaugguagacaa

SEQ ID NO: 2387710 - RNA, 19 nt, Homo sapiens
  misc_RNA (1)...(19): siRNA sense strand
gguuaaacaacaaggaauu

SEQ ID NO: 2387711 - RNA, 19 nt, Homo sapiens
  misc_RNA (1)...(19): siRNA sense strand
ugaaguagauggaggaaaa

SEQ ID NO: 2387712 - RNA, 19 nt, Homo sapiens
  misc_RNA (1)...(19): siRNA sense strand
gggaaagugcgaagggcua

SEQ ID NO: 2387713 - RNA, 19 nt, Homo sapiens
  misc_RNA (1)...(19): siRNA sense strand
cugaagaagaacugauuaa

SEQ ID NO: 2387714 - RNA, 19 nt, Homo sapiens
  misc_RNA (1)...(19): siRNA sense strand
auugauggauuuagggaaa

SEQ ID NO: 2387715 - RNA, 19 nt, Homo sapiens
  misc_RNA (1)...(19): siRNA sense strand
acauaaagguuuggagauu

SEQ ID NO: 2387716 - RNA, 19 nt, Homo sapiens
  misc_RNA (1)...(19): siRNA sense strand
gagaagaauaugacagaga

SEQ ID NO: 2387717 - RNA, 19 nt, Homo sapiens
  misc_RNA (1)...(19): siRNA sense strand
uggaagaggaggaagaaau

SEQ ID NO: 2387718 - RNA, 19 nt, Homo sapiens
  misc_RNA (1)...(19): siRNA sense strand
aguaaaaguugaugaggaa

SEQ ID NO: 2387719 - RNA, 19 nt, Homo sapiens
  misc_RNA (1)...(19): siRNA sense strand
gaagaagauugcaggccaa

SEQ ID NO: 2387720 - RNA, 19 nt, Homo sapiens
  misc_RNA (1)...(19): siRNA sense strand
agauagagaagaugaggaa

SEQ ID NO: 2387721 - RNA, 19 nt, Homo sapiens
  misc_RNA (1)...(19): siRNA sense strand
ugugaaaccucgaagacaa

SEQ ID NO: 2387722 - RNA, 19 nt, Homo sapiens
  misc_RNA (1)...(19): siRNA sense strand
gggucagcgucgacaguaa

SEQ ID NO: 2387723 - RNA, 19 nt, Homo sapiens
  misc_RNA (1)...(19): siRNA sense strand
caaagauaccacagagcua

SEQ ID NO: 2387724 - RNA, 19 nt, Homo sapiens
  misc_RNA (1)...(19): siRNA sense strand
ccuuagaugaagaggaaga

SEQ ID NO: 2387725 - RNA, 19 nt, Homo sapiens
  misc_RNA (1)...(19): siRNA sense strand
auuccaaaguagagaguga

SEQ ID NO: 2387726 - RNA, 19 nt, Homo sapiens
  misc_RNA (1)...(19): siRNA sense strand
aauucaagaugguggcuua

SEQ ID NO: 2387727 - RNA, 19 nt, Homo sapiens
  misc_RNA (1)...(19): siRNA sense strand
gcgcaaaacuagcaaguau

SEQ ID NO: 2387728 - RNA, 19 nt, Homo sapiens
  misc_RNA (1)...(19): siRNA sense strand
cagaaagcauugaagaaca

SEQ ID NO: 2387729 - RNA, 19 nt, Homo sapiens
  misc_RNA (1)...(19): siRNA sense strand
cagucaaacagaaggaaau

SEQ ID NO: 2387730 - RNA, 19 nt, Homo sapiens
  misc_RNA (1)...(19): siRNA sense strand
cagcagaagguaacauaaa

SEQ ID NO: 2387731 - RNA, 19 nt, Homo sapiens
  misc_RNA (1)...(19): siRNA sense strand
ugguaaugcuguuuguaua

SEQ ID NO: 2387732 - RNA, 19 nt, Homo sapiens
  misc_RNA (1)...(19): siRNA sense strand
ggagaagauaauagcagua

SEQ ID NO: 2387733 - RNA, 19 nt, Homo sapiens
  misc_RNA (1)...(19): siRNA sense strand
ccaagaacaugcaagggua

SEQ ID NO: 2387734 - RNA, 19 nt, Homo sapiens
  misc_RNA (1)...(19): siRNA sense strand
ccucgaagacaaucagaaa

SEQ ID NO: 2387735 - RNA, 19 nt, Homo sapiens
  misc_RNA (1)...(19): siRNA sense strand
gaagaauaugacagagaau

SEQ ID NO: 2387736 - RNA, 19 nt, Homo sapiens
  misc_RNA (1)...(19): siRNA sense strand
ggaggaagaaauugauaau

SEQ ID NO: 2387737 - RNA, 19 nt, Homo sapiens
  misc_RNA (1)...(19): siRNA sense strand
agucuugccuauuggguaa

SEQ ID NO: 2387738 - RNA, 19 nt, Homo sapiens
  misc_RNA (1)...(19): siRNA sense strand
agauaaacaccguaggaga

SEQ ID NO: 2387739 - RNA, 19 nt, Homo sapiens
  misc_RNA (1)...(19): siRNA sense strand
aggcgaaagucauccauaa

SEQ ID NO: 2387740 - RNA, 19 nt, Homo sapiens
  misc_RNA (1)...(19): siRNA sense strand
aagccaacccagaguguaa

SEQ ID NO: 2387741 - RNA, 19 nt, Homo sapiens
  misc_RNA (1)...(19): siRNA sense strand
cugaagacauagauaaaca

SEQ ID NO: 2387742 - RNA, 19 nt, Homo sapiens
  misc_RNA (1)...(19): siRNA sense strand
auagagaagaugaggaaca

SEQ ID NO: 2387743 - RNA, 19 nt, Homo sapiens
  misc_RNA (1)...(19): siRNA sense strand
cagaaucaguugaaguaau

SEQ ID NO: 2387744 - RNA, 19 nt, Homo sapiens
  misc_RNA (1)...(19): siRNA sense strand
cuugaugaaagcagagaua

SEQ ID NO: 2387745 - RNA, 19 nt, Homo sapiens
  misc_RNA (1)...(19): siRNA sense strand
ccuauuggguaaugaaaga

SEQ ID NO: 2387746 - RNA, 19 nt, Homo sapiens
  misc_RNA (1)...(19): siRNA sense strand
cuucgaagaugcauugaaa

SEQ ID NO: 2387747 - RNA, 19 nt, Homo sapiens
  misc_RNA (1)...(19): siRNA sense strand
gacagaaagcauugaagaa

SEQ ID NO: 2387748 - RNA, 19 nt, Homo sapiens
  misc_RNA (1)...(19): siRNA sense strand
ggauagagaaucugaggca

SEQ ID NO: 2387749 - RNA, 19 nt, Homo sapiens
  misc_RNA (1)...(19): siRNA sense strand
gaacaugaagauggagaaa

SEQ ID NO: 2387750 - RNA, 19 nt, Homo sapiens
  misc_RNA (1)...(19): siRNA sense strand
ugaugaaggagaagauaau

SEQ ID NO: 2387751 - RNA, 19 nt, Homo sapiens
  misc_RNA (1)...(19): siRNA sense strand
caguaaggauggaacucaa

SEQ ID NO: 2387752 - RNA, 19 nt, Homo sapiens
  misc_RNA (1)...(19): siRNA sense strand
gagauuauacugagauaga

SEQ ID NO: 2387753 - RNA, 19 nt, Homo sapiens
  misc_RNA (1)...(19): siRNA sense strand
ggcuacagguuaugaagua

SEQ ID NO: 2387754 - RNA, 19 nt, Homo sapiens
  misc_RNA (1)...(19): siRNA sense strand
agaugguacucgagauuau

SEQ ID NO: 2387755 - RNA, 19 nt, Homo sapiens
  misc_RNA (1)...(19): siRNA sense strand
uguaguggaugcaaggaaa

SEQ ID NO: 2387756 - RNA, 19 nt, Homo sapiens
  misc_RNA (1)...(19): siRNA sense strand
uggaaggcuuucaggaauu

SEQ ID NO: 2387757 - RNA, 19 nt, Homo sapiens
  misc_RNA (1)...(19): siRNA sense strand
aaacagucaccguaggaaa

SEQ ID NO: 2387758 - RNA, 19 nt, Homo sapiens
  misc_RNA (1)...(19): siRNA sense strand
ggucacagcaugaugaaaa

SEQ ID NO: 2387759 - RNA, 19 nt, Homo sapiens
  misc_RNA (1)...(19): siRNA sense strand
gcaacauccuauucagcaa

SEQ ID NO: 2387760 - RNA, 19 nt, Homo sapiens
  misc_RNA (1)...(19): siRNA sense strand
gagaaggaacuaagcgaca

SEQ ID NO: 2387761 - RNA, 19 nt, Homo sapiens
  misc_RNA (1)...(19): siRNA sense strand
ucgagauuauacugagaua

SEQ ID NO: 2387762 - RNA, 19 nt, Homo sapiens
  misc_RNA (1)...(19): siRNA sense strand
gauaaacaccguaggagau

SEQ ID NO: 2387763 - RNA, 19 nt, Homo sapiens
  misc_RNA (1)...(19): siRNA sense strand
ggagauuuaacaugagaau

SEQ ID NO: 2387764 - RNA, 19 nt, Homo sapiens
  misc_RNA (1)...(19): siRNA sense strand
cuaucaagcuguaguggau

SEQ ID NO: 2387765 - RNA, 19 nt, Homo sapiens
  misc_RNA (1)...(19): siRNA sense strand
cagaugcacucuugagcaa

SEQ ID NO: 2387766 - RNA, 19 nt, Homo sapiens
  misc_RNA (1)...(19): siRNA sense strand
ggcauaggaugguggguga

SEQ ID NO: 2387767 - RNA, 19 nt, Homo sapiens
  misc_RNA (1)...(19): siRNA sense strand
gaauuaagaacauuggcua

SEQ ID NO: 2387768 - RNA, 19 nt, Homo sapiens
  misc_RNA (1)...(19): siRNA sense strand
cuuuguaguucauugguua

SEQ ID NO: 2387769 - RNA, 19 nt, Homo sapiens
  misc_RNA (1)...(19): siRNA sense strand
gcugcuaacugaauggaau

SEQ ID NO: 2387770 - RNA, 19 nt, Homo sapiens
  misc_RNA (1)...(19): siRNA sense strand
caaaggaggaugaugaaca

SEQ ID NO: 2387771 - RNA, 19 nt, Homo sapiens
  misc_RNA (1)...(19): siRNA sense strand
cauauggaucggagaagaa

SEQ ID NO: 2387772 - RNA, 19 nt, Homo sapiens
  misc_RNA (1)...(19): siRNA sense strand
cggagaagaauaugacaga

SEQ ID NO: 2387773 - RNA, 19 nt, Homo sapiens
  misc_RNA (1)...(19): siRNA sense strand
ugcaagaguuacuagauua

SEQ ID NO: 2387774 - RNA, 19 nt, Homo sapiens
  misc_RNA (1)...(19): siRNA sense strand
uggaauaagaauccugaua

SEQ ID NO: 2387775 - RNA, 19 nt, Homo sapiens
  misc_RNA (1)...(19): siRNA sense strand
uaaggaagauauggagaaa

SEQ ID NO: 2387776 - RNA, 19 nt, Homo sapiens
  misc_RNA (1)...(19): siRNA sense strand
cgaaagaaccagaaaggaa

SEQ ID NO: 2387777 - RNA, 19 nt, Homo sapiens
  misc_RNA (1)...(19): siRNA sense strand
gcagaaaccaguugggcaa

SEQ ID NO: 2387778 - RNA, 19 nt, Homo sapiens
  misc_RNA (1)...(19): siRNA sense strand
ucgcagagucagaaagaaa

SEQ ID NO: 2387779 - RNA, 19 nt, Homo sapiens
  misc_RNA (1)...(19): siRNA sense strand
agaaaggaauaaugagaca

SEQ ID NO: 2387780 - RNA, 19 nt, Homo sapiens
  misc_RNA (1)...(19): siRNA sense strand
cggugaaguuuaagagguu

SEQ ID NO: 2387781 - RNA, 19 nt, Homo sapiens
  misc_RNA (1)...(19): siRNA sense strand
ccccagaaguggaaagaaa

SEQ ID NO: 2387782 - RNA, 19 nt, Homo sapiens
  misc_RNA (1)...(19): siRNA sense strand
cugcaauucaagagaacaa

SEQ ID NO: 2387783 - RNA, 19 nt, Homo sapiens
  misc_RNA (1)...(19): siRNA sense strand
gugaaagagacgaugagaa

SEQ ID NO: 2387784 - RNA, 19 nt, Homo sapiens
  misc_RNA (1)...(19): siRNA sense strand
gaaagaaccagaaaggaau

SEQ ID NO: 2387785 - RNA, 19 nt, Homo sapiens
  misc_RNA (1)...(19): siRNA sense strand
ccagaaaggaauaaugaga

SEQ ID NO: 2387786 - RNA, 19 nt, Homo sapiens
  misc_RNA (1)...(19): siRNA sense strand
aggugaaaucagugaaaga

SEQ ID NO: 2387787 - RNA, 19 nt, Homo sapiens
  misc_RNA (1)...(19): siRNA sense strand
acgcagaggacuuggauca

SEQ ID NO: 2387788 - RNA, 19 nt, Homo sapiens
  misc_RNA (1)...(19): siRNA sense strand
agagauacgcagaggacuu

SEQ ID NO: 2387789 - RNA, 19 nt, Homo sapiens
  misc_RNA (1)...(19): siRNA sense strand
aaggagaagacguugguua

SEQ ID NO: 2387790 - RNA, 19 nt, Homo sapiens
  misc_RNA (1)...(19): siRNA sense strand
ggauggaggagcugcggaa

SEQ ID NO: 2387791 - RNA, 19 nt, Homo sapiens
  misc_RNA (1)...(19): siRNA sense strand
ggcaagacucggaaagcua

SEQ ID NO: 2387792 - RNA, 19 nt, Homo sapiens
  misc_RNA (1)...(19): siRNA sense strand
ggucaaaaccuucagcaaa

SEQ ID NO: 2387793 - RNA, 19 nt, Homo sapiens
  misc_RNA (1)...(19): siRNA sense strand
cuaagaaacuggagggcuc

SEQ ID NO: 2387794 - RNA, 19 nt, Homo sapiens
  misc_RNA (1)...(19): siRNA sense strand
aggagagacacauaagaaa

SEQ ID NO: 2387795 - RNA, 19 nt, Homo sapiens
  misc_RNA (1)...(19): siRNA sense strand
gguuauguugccagugaaa

SEQ ID NO: 2387796 - RNA, 19 nt, Homo sapiens
  misc_RNA (1)...(19): siRNA sense strand
uuauguugccagugaaaua

SEQ ID NO: 2387797 - RNA, 19 nt, Homo sapiens
  misc_RNA (1)...(19): siRNA sense strand
aggagaagacguugguuau

SEQ ID NO: 2387798 - RNA, 19 nt, Homo sapiens
  misc_RNA (1)...(19): siRNA sense strand
ggucaaacagugagcacca

SEQ ID NO: 2387799 - RNA, 19 nt, Homo sapiens
  misc_RNA (1)...(19): siRNA sense strand
ucagugaagacgaggagaa

SEQ ID NO: 2387800 - RNA, 19 nt, Homo sapiens
  misc_RNA (1)...(19): siRNA sense strand
ccuuuaagcugcuggagga

SEQ ID NO: 2387801 - RNA, 19 nt, Homo sapiens
  misc_RNA (1)...(19): siRNA sense strand
cagaaaaggacacgaguuu

SEQ ID NO: 2387802 - RNA, 19 nt, Homo sapiens
  misc_RNA (1)...(19): siRNA sense strand
cagugaagacgaggagaaa

SEQ ID NO: 2387803 - RNA, 19 nt, Homo sapiens
  misc_RNA (1)...(19): siRNA sense strand
agucaggaucccaggagaa

SEQ ID NO: 2387804 - RNA, 19 nt, Homo sapiens
  misc_RNA (1)...(19): siRNA sense strand
cuacgaaagcagugagaac

SEQ ID NO: 2387805 - RNA, 19 nt, Homo sapiens
  misc_RNA (1)...(19): siRNA sense strand
gugaaauaacgaugagcga

SEQ ID NO: 2387806 - RNA, 19 nt, Homo sapiens
  misc_RNA (1)...(19): siRNA sense strand
aggaggaagacuuggauga

SEQ ID NO: 2387807 - RNA, 19 nt, Homo sapiens
  misc_RNA (1)...(19): siRNA sense strand
aggaagacuuggaugaguu

SEQ ID NO: 2387808 - RNA, 19 nt, Homo sapiens
  misc_RNA (1)...(19): siRNA sense strand
gcaucacagaggagagaca

SEQ ID NO: 2387809 - RNA, 19 nt, Homo sapiens
  misc_RNA (1)...(19): siRNA sense strand
agacgaugagaaagagaau

SEQ ID NO: 2387810 - RNA, 19 nt, Homo sapiens
  misc_RNA (1)...(19): siRNA sense strand
uggacaagcccaagcucaa

SEQ ID NO: 2387811 - RNA, 19 nt, Homo sapiens
  misc_RNA (1)...(19): siRNA sense strand
ggaccuggaaguggagaaa

SEQ ID NO: 2387812 - RNA, 19 nt, Homo sapiens
  misc_RNA (1)...(19): siRNA sense strand
gugaaaucagugaaagaga

SEQ ID NO: 2387813 - RNA, 19 nt, Homo sapiens
  misc_RNA (1)...(19): siRNA sense strand
ccagaaguggaaagaaaga

SEQ ID NO: 2387814 - RNA, 19 nt, Homo sapiens
  misc_RNA (1)...(19): siRNA sense strand
ggaaaaggagacuggaaga

SEQ ID NO: 2387815 - RNA, 19 nt, Homo sapiens
  misc_RNA (1)...(19): siRNA sense strand
gaaauaacgaugagcgaug

SEQ ID NO: 2387816 - RNA, 19 nt, Homo sapiens
  misc_RNA (1)...(19): siRNA sense strand
gcacguuggcaguaauaau

SEQ ID NO: 2387817 - RNA, 19 nt, Homo sapiens
  misc_RNA (1)...(19): siRNA sense strand
gcucaagaaaggagauauc

SEQ ID NO: 2387818 - RNA, 19 nt, Homo sapiens
  misc_RNA (1)...(19): siRNA sense strand
cgauauaaucagcaagcca

SEQ ID NO: 2387819 - RNA, 19 nt, Homo sapiens
  misc_RNA (1)...(19): siRNA sense strand
aagcccuggugcagagaua

SEQ ID NO: 2387820 - RNA, 19 nt, Homo sapiens
  misc_RNA (1)...(19): siRNA sense strand
ugaugauggucaaagaaaa

SEQ ID NO: 2387821 - RNA, 19 nt, Homo sapiens
  misc_RNA (1)...(19): siRNA sense strand
gggaaagcgucaagucgga

SEQ ID NO: 2387822 - RNA, 19 nt, Homo sapiens
  misc_RNA (1)...(19): siRNA sense strand
aagacuuggaugaguuaaa

SEQ ID NO: 2387823 - RNA, 19 nt, Homo sapiens
  misc_RNA (1)...(19): siRNA sense strand
gcagugagaaccuggaaaa

SEQ ID NO: 2387824 - RNA, 19 nt, Homo sapiens
  misc_RNA (1)...(19): siRNA sense strand
cuaauuaggguggaagaaa

SEQ ID NO: 2387825 - RNA, 19 nt, Homo sapiens
  misc_RNA (1)...(19): siRNA sense strand
ggauaugaagauuuggaca

SEQ ID NO: 2387826 - RNA, 19 nt, Homo sapiens
  misc_RNA (1)...(19): siRNA sense strand
agcuaaugaugauggucaa

SEQ ID NO: 2387827 - RNA, 19 nt, Homo sapiens
  misc_RNA (1)...(19): siRNA sense strand
aagaaaaggcccagaaagu

SEQ ID NO: 2387828 - RNA, 19 nt, Homo sapiens
  misc_RNA (1)...(19): siRNA sense strand
acacgaguuugaaggaaca

SEQ ID NO: 2387829 - RNA, 19 nt, Homo sapiens
  misc_RNA (1)...(19): siRNA sense strand
gcgagaggauggaggagcu

SEQ ID NO: 2387830 - RNA, 19 nt, Homo sapiens
  misc_RNA (1)...(19): siRNA sense strand
aggaauaaugagacagacu

SEQ ID NO: 2387831 - RNA, 19 nt, Homo sapiens
  misc_RNA (1)...(19): siRNA sense strand
cagcuaaugaugaugguca

SEQ ID NO: 2387832 - RNA, 19 nt, Homo sapiens
  misc_RNA (1)...(19): siRNA sense strand
gaaagaaacuaauuagggu

SEQ ID NO: 2387833 - RNA, 19 nt, Homo sapiens
  misc_RNA (1)...(19): siRNA sense strand
caguaauaauucugaccca

SEQ ID NO: 2387834 - RNA, 19 nt, Homo sapiens
  misc_RNA (1)...(19): siRNA sense strand
ggagacuggaagaagaaaa

SEQ ID NO: 2387835 - RNA, 19 nt, Homo sapiens
  misc_RNA (1)...(19): siRNA sense strand
cugaggagucggugaaguu

SEQ ID NO: 2387836 - RNA, 19 nt, Homo sapiens
  misc_RNA (1)...(19): siRNA sense strand
uguacaaagaagucaucaa

SEQ ID NO: 2387837 - RNA, 19 nt, Homo sapiens
  misc_RNA (1)...(19): siRNA sense strand
caccaggaggcgucggaaa

SEQ ID NO: 2387838 - RNA, 19 nt, Homo sapiens
  misc_RNA (1)...(19): siRNA sense strand
ccagaugguucuuacccaa

SEQ ID NO: 2387839 - RNA, 19 nt, Homo sapiens
  misc_RNA (1)...(19): siRNA sense strand
gagacgaugagaaagagaa

SEQ ID NO: 2387840 - RNA, 19 nt, Homo sapiens
  misc_RNA (1)...(19): siRNA sense strand
aaagaaccagaaaggaaua

SEQ ID NO: 2387841 - RNA, 19 nt, Homo sapiens
  misc_RNA (1)...(19): siRNA sense strand
gggagaugaagaagggucu

SEQ ID NO: 2387842 - RNA, 19 nt, Homo sapiens
  misc_RNA (1)...(19): siRNA sense strand
acgaugagaaagagaaugu

SEQ ID NO: 2387843 - RNA, 19 nt, Homo sapiens
  misc_RNA (1)...(19): siRNA sense strand
aggaggagggaguggauaa

SEQ ID NO: 2387844 - RNA, 19 nt, Homo sapiens
  misc_RNA (1)...(19): siRNA sense strand
gugagaacacaguggaaaa

SEQ ID NO: 2387845 - RNA, 19 nt, Homo sapiens
  misc_RNA (1)...(19): siRNA sense strand
auaagaaggaggagggagu

SEQ ID NO: 2387846 - RNA, 19 nt, Homo sapiens
  misc_RNA (1)...(19): siRNA sense strand
agcagaguguggagaacaa

SEQ ID NO: 2387847 - RNA, 19 nt, Homo sapiens
  misc_RNA (1)...(19): siRNA sense strand
guuugauucuacugagcua

SEQ ID NO: 2387848 - RNA, 19 nt, Homo sapiens
  misc_RNA (1)...(19): siRNA sense strand
aagaagaauaugaaggguu

SEQ ID NO: 2387849 - RNA, 19 nt, Homo sapiens
  misc_RNA (1)...(19): siRNA sense strand
gggugagaacacaguggaa

SEQ ID NO: 2387850 - RNA, 19 nt, Homo sapiens
  misc_RNA (1)...(19): siRNA sense strand
cgggagacaucauggacca

SEQ ID NO: 2387851 - RNA, 19 nt, Homo sapiens
  misc_RNA (1)...(19): siRNA sense strand
ccaaaaggugggaaaacua

SEQ ID NO: 2387852 - RNA, 19 nt, Homo sapiens
  misc_RNA (1)...(19): siRNA sense strand
aggcaacaaagaugaagaa

SEQ ID NO: 2387853 - RNA, 19 nt, Homo sapiens
  misc_RNA (1)...(19): siRNA sense strand
ccgugaaaucccaagaaga

SEQ ID NO: 2387854 - RNA, 19 nt, Homo sapiens
  misc_RNA (1)...(19): siRNA sense strand
uggaggagacacagaguca

SEQ ID NO: 2387855 - RNA, 19 nt, Homo sapiens
  misc_RNA (1)...(19): siRNA sense strand
ucacagagauccugcagca

SEQ ID NO: 2387856 - RNA, 19 nt, Homo sapiens
  misc_RNA (1)...(19): siRNA sense strand
gugaaaucccaagaagaaa

SEQ ID NO: 2387857 - RNA, 19 nt, Homo sapiens
  misc_RNA (1)...(19): siRNA sense strand
agaaaucccugcagcgcau

SEQ ID NO: 2387858 - RNA, 19 nt, Homo sapiens
  misc_RNA (1)...(19): siRNA sense strand
gccaggugagcaagaguaa

SEQ ID NO: 2387859 - RNA, 19 nt, Homo sapiens
  misc_RNA (1)...(19): siRNA sense strand
acuggauccacaagaguua

SEQ ID NO: 2387860 - RNA, 19 nt, Homo sapiens
  misc_RNA (1)...(19): siRNA sense strand
guggaaaacucaagugacu

SEQ ID NO: 2387861 - RNA, 19 nt, Homo sapiens
  misc_RNA (1)...(19): siRNA sense strand
ccaugaagguggugcagag

SEQ ID NO: 2387862 - RNA, 19 nt, Homo sapiens
  misc_RNA (1)...(19): siRNA sense strand
cagagagugaagcgggaga

SEQ ID NO: 2387863 - RNA, 19 nt, Homo sapiens
  misc_RNA (1)...(19): siRNA sense strand
acaucauggaccagcaauu

SEQ ID NO: 2387864 - RNA, 19 nt, Homo sapiens
  misc_RNA (1)...(19): siRNA sense strand
agcaauuugaagagaugaa

SEQ ID NO: 2387865 - RNA, 19 nt, Homo sapiens
  misc_RNA (1)...(19): siRNA sense strand
ccaagaaaaccgaaacaca

SEQ ID NO: 2387866 - RNA, 19 nt, Homo sapiens
  misc_RNA (1)...(19): siRNA sense strand
cagcagugagacagagagu

SEQ ID NO: 2387867 - RNA, 19 nt, Homo sapiens
  misc_RNA (1)...(19): siRNA sense strand
ccuggaagcugucggccuu

SEQ ID NO: 2387868 - RNA, 19 nt, Homo sapiens
  misc_RNA (1)...(19): siRNA sense strand
gaccagucuagcacagaaa

SEQ ID NO: 2387869 - RNA, 19 nt, Homo sapiens
  misc_RNA (1)...(19): siRNA sense strand
ugccaucggccgaggaaga

SEQ ID NO: 2387870 - RNA, 19 nt, Homo sapiens
  misc_RNA (1)...(19): siRNA sense strand
acgcccugcccuuggguua

SEQ ID NO: 2387871 - RNA, 19 nt, Homo sapiens
  misc_RNA (1)...(19): siRNA sense strand
augaaaaggugcaggcugu

SEQ ID NO: 2387872 - RNA, 19 nt, Homo sapiens
  misc_RNA (1)...(19): siRNA sense strand
caggccagcagcaguguaa

SEQ ID NO: 2387873 - RNA, 19 nt, Homo sapiens
  misc_RNA (1)...(19): siRNA sense strand
acuccaaauucuccaguga

SEQ ID NO: 2387874 - RNA, 19 nt, Homo sapiens
  misc_RNA (1)...(19): siRNA sense strand
ccaucaaauccaagaagaa

SEQ ID NO: 2387875 - RNA, 19 nt, Homo sapiens
  misc_RNA (1)...(19): siRNA sense strand
cuggagaggaagaggguga

SEQ ID NO: 2387876 - RNA, 19 nt, Homo sapiens
  misc_RNA (1)...(19): siRNA sense strand
uggaacuacuggagccaaa

SEQ ID NO: 2387877 - RNA, 19 nt, Homo sapiens
  misc_RNA (1)...(19): siRNA sense strand
agucccagcuggagaggaa

SEQ ID NO: 2387878 - RNA, 19 nt, Homo sapiens
  misc_RNA (1)...(19): siRNA sense strand
ugguaaagaagcugaauga

SEQ ID NO: 2387879 - RNA, 19 nt, Homo sapiens
  misc_RNA (1)...(19): siRNA sense strand
uaauaaggguggguggaaa

SEQ ID NO: 2387880 - RNA, 19 nt, Homo sapiens
  misc_RNA (1)...(19): siRNA sense strand
acacuaugaccgaaacaaa

SEQ ID NO: 2387881 - RNA, 19 nt, Homo sapiens
  misc_RNA (1)...(19): siRNA sense strand
cagugugggugcugagaga

SEQ ID NO: 2387882 - RNA, 19 nt, Homo sapiens
  misc_RNA (1)...(19): siRNA sense strand
guaagaagaagauugggaa

SEQ ID NO: 2387883 - RNA, 19 nt, Homo sapiens
  misc_RNA (1)...(19): siRNA sense strand
ccacaaacacuaugaccga

SEQ ID NO: 2387884 - RNA, 19 nt, Homo sapiens
  misc_RNA (1)...(19): siRNA sense strand
acaaacacuaugaccgaaa

SEQ ID NO: 2387885 - RNA, 19 nt, Homo sapiens
  misc_RNA (1)...(19): siRNA sense strand
aggugugcaugguguguaa

SEQ ID NO: 2387886 - RNA, 19 nt, Homo sapiens
  misc_RNA (1)...(19): siRNA sense strand
gcccugaacuggacggaca

SEQ ID NO: 2387887 - RNA, 19 nt, Homo sapiens
  misc_RNA (1)...(19): siRNA sense strand
gugagaaggugcaaggucu

SEQ ID NO: 2387888 - RNA, 19 nt, Homo sapiens
  misc_RNA (1)...(19): siRNA sense strand
aggacaagcaguuugaauu

SEQ ID NO: 2387889 - RNA, 19 nt, Homo sapiens
  misc_RNA (1)...(19): siRNA sense strand
gguucaaucaagugcucaa

SEQ ID NO: 2387890 - RNA, 19 nt, Homo sapiens
  misc_RNA (1)...(19): siRNA sense strand
gugaaaagcagcaacaaau

SEQ ID NO: 2387891 - RNA, 19 nt, Homo sapiens
  misc_RNA (1)...(19): siRNA sense strand
gguccaaagcauugaauug

SEQ ID NO: 2387892 - RNA, 19 nt, Homo sapiens
  misc_RNA (1)...(19): siRNA sense strand
gaugauucugacagugaaa

SEQ ID NO: 2387893 - RNA, 19 nt, Homo sapiens
  misc_RNA (1)...(19): siRNA sense strand
ccaagaagaagcugcuaca

SEQ ID NO: 2387894 - RNA, 19 nt, Homo sapiens
  misc_RNA (1)...(19): siRNA sense strand
gcaugguguguaagaagaa

SEQ ID NO: 2387895 - RNA, 19 nt, Homo sapiens
  misc_RNA (1)...(19): siRNA sense strand
cugaauuggagaaggcuca

SEQ ID NO: 2387896 - RNA, 19 nt, Homo sapiens
  misc_RNA (1)...(19): siRNA sense strand
cagaagauggccugaagau

SEQ ID NO: 2387897 - RNA, 19 nt, Homo sapiens
  misc_RNA (1)...(19): siRNA sense strand
gaaaacagcuggagcccuu

SEQ ID NO: 2387898 - RNA, 19 nt, Homo sapiens
  misc_RNA (1)...(19): siRNA sense strand
gcacaaaagaaacgguuca

SEQ ID NO: 2387899 - RNA, 19 nt, Homo sapiens
  misc_RNA (1)...(19): siRNA sense strand
gcaucaccacagaggagaa

SEQ ID NO: 2387900 - RNA, 19 nt, Homo sapiens
  misc_RNA (1)...(19): siRNA sense strand
gagaaauccaauaagaacu

SEQ ID NO: 2387901 - RNA, 19 nt, Homo sapiens
  misc_RNA (1)...(19): siRNA sense strand
cagaggagaaggugugcau

SEQ ID NO: 2387902 - RNA, 19 nt, Homo sapiens
  misc_RNA (1)...(19): siRNA sense strand
cggacauaccaguggccau

SEQ ID NO: 2387903 - RNA, 19 nt, Homo sapiens
  misc_RNA (1)...(19): siRNA sense strand
acgagaggacagugcagua

SEQ ID NO: 2387904 - RNA, 19 nt, Homo sapiens
  misc_RNA (1)...(19): siRNA sense strand
agaagauggccugaagaua

SEQ ID NO: 2387905 - RNA, 19 nt, Homo sapiens
  misc_RNA (1)...(19): siRNA sense strand
aagaagaagauugggaaca

SEQ ID NO: 2387906 - RNA, 19 nt, Homo sapiens
  misc_RNA (1)...(19): siRNA sense strand
gugaggagguguuacggau

SEQ ID NO: 2387907 - RNA, 19 nt, Homo sapiens
  misc_RNA (1)...(19): siRNA sense strand
guguggguuucaagagaga

SEQ ID NO: 2387908 - RNA, 19 nt, Homo sapiens
  misc_RNA (1)...(19): siRNA sense strand
acacuagagaaauccaaua

SEQ ID NO: 2387909 - RNA, 19 nt, Homo sapiens
  misc_RNA (1)...(19): siRNA sense strand
agugaaaagcagcaacaaa

SEQ ID NO: 2387910 - RNA, 19 nt, Homo sapiens
  misc_RNA (1)...(19): siRNA sense strand
gcugaggaguacugccaca

SEQ ID NO: 2387911 - RNA, 19 nt, Homo sapiens
  misc_RNA (1)...(19): siRNA sense strand
gcacgacgcuuucgagcca

SEQ ID NO: 2387912 - RNA, 19 nt, Homo sapiens
  misc_RNA (1)...(19): siRNA sense strand
ggaaggacguugguugcaa

SEQ ID NO: 2387913 - RNA, 19 nt, Homo sapiens
  misc_RNA (1)...(19): siRNA sense strand
cacuagagaaauccaauaa

SEQ ID NO: 2387914 - RNA, 19 nt, Homo sapiens
  misc_RNA (1)...(19): siRNA sense strand
cauuuauguccaugaccua

SEQ ID NO: 2387915 - RNA, 19 nt, Homo sapiens
  misc_RNA (1)...(19): siRNA sense strand
cuacgguuucaaaggcaaa

SEQ ID NO: 2387916 - RNA, 19 nt, Homo sapiens
  misc_RNA (1)...(19): siRNA sense strand
cagcaggugaagugcauca

SEQ ID NO: 2387917 - RNA, 19 nt, Homo sapiens
  misc_RNA (1)...(19): siRNA sense strand
cuaauaaggguggguggaa

SEQ ID NO: 2387918 - RNA, 19 nt, Homo sapiens
  misc_RNA (1)...(19): siRNA sense strand
uggaagaaaaugcacaaaa

SEQ ID NO: 2387919 - RNA, 19 nt, Homo sapiens
  misc_RNA (1)...(19): siRNA sense strand
caugcaggucuuugcuaaa

SEQ ID NO: 2387920 - RNA, 19 nt, Homo sapiens
  misc_RNA (1)...(19): siRNA sense strand
gagaacaaucacugccaca

SEQ ID NO: 2387921 - RNA, 19 nt, Homo sapiens
  misc_RNA (1)...(19): siRNA sense strand
acaaguacagugagcuuau

SEQ ID NO: 2387922 - RNA, 19 nt, Homo sapiens
  misc_RNA (1)...(19): siRNA sense strand
cugggagaauaccggcaaa

SEQ ID NO: 2387923 - RNA, 19 nt, Homo sapiens
  misc_RNA (1)...(19): siRNA sense strand
gagaaggugugcauggugu

SEQ ID NO: 2387924 - RNA, 19 nt, Homo sapiens
  misc_RNA (1)...(19): siRNA sense strand
gauugggaacagugcauuu

SEQ ID NO: 2387925 - RNA, 19 nt, Homo sapiens
  misc_RNA (1)...(19): siRNA sense strand
uccauggcguggugugaaa

SEQ ID NO: 2387926 - RNA, 19 nt, Homo sapiens
  misc_RNA (1)...(19): siRNA sense strand
cagaaaugaaagaugauuc

SEQ ID NO: 2387927 - RNA, 19 nt, Homo sapiens
  misc_RNA (1)...(19): siRNA sense strand
ggaauggcuucuuguggga

SEQ ID NO: 2387928 - RNA, 19 nt, Homo sapiens
  misc_RNA (1)...(19): siRNA sense strand
ugcuacgccuggagaacaa

SEQ ID NO: 2387929 - RNA, 19 nt, Homo sapiens
  misc_RNA (1)...(19): siRNA sense strand
augcagaauuccugagggu

SEQ ID NO: 2387930 - RNA, 19 nt, Homo sapiens
  misc_RNA (1)...(19): siRNA sense strand
uguaagaagaagauuggga

SEQ ID NO: 2387931 - RNA, 19 nt, Homo sapiens
  misc_RNA (1)...(19): siRNA sense strand
caggacaagcaguuugaau

SEQ ID NO: 2387932 - RNA, 19 nt, Homo sapiens
  misc_RNA (1)...(19): siRNA sense strand
ggguccaggaagagcggau

SEQ ID NO: 2387933 - RNA, 19 nt, Homo sapiens
  misc_RNA (1)...(19): siRNA sense strand
acagaaggaugcagggaga

SEQ ID NO: 2387934 - RNA, 19 nt, Homo sapiens
  misc_RNA (1)...(19): siRNA sense strand
agaagaaugugcaggcaga

SEQ ID NO: 2387935 - RNA, 19 nt, Homo sapiens
  misc_RNA (1)...(19): siRNA sense strand
ucgccaaguugaagcgcaa

SEQ ID NO: 2387936 - RNA, 19 nt, Homo sapiens
  misc_RNA (1)...(19): siRNA sense strand
ggacaagcucuuugggcga

SEQ ID NO: 2387937 - RNA, 19 nt, Homo sapiens
  misc_RNA (1)...(19): siRNA sense strand
agauaagggcacacaggaa

SEQ ID NO: 2387938 - RNA, 19 nt, Homo sapiens
  misc_RNA (1)...(19): siRNA sense strand
ccacucaguuguugggaca

SEQ ID NO: 2387939 - RNA, 19 nt, Homo sapiens
  misc_RNA (1)...(19): siRNA sense strand
agauacaggaagacaggaa

SEQ ID NO: 2387940 - RNA, 19 nt, Homo sapiens
  misc_RNA (1)...(19): siRNA sense strand
ugaaguuggagaagagauu

SEQ ID NO: 2387941 - RNA, 19 nt, Homo sapiens
  misc_RNA (1)...(19): siRNA sense strand
uggaggaagaccugggcaa

SEQ ID NO: 2387942 - RNA, 19 nt, Homo sapiens
  misc_RNA (1)...(19): siRNA sense strand
agggaagggcagagacaca

SEQ ID NO: 2387943 - RNA, 19 nt, Homo sapiens
  misc_RNA (1)...(19): siRNA sense strand
auacggagcuggaccgcua

SEQ ID NO: 2387944 - RNA, 19 nt, Homo sapiens
  misc_RNA (1)...(19): siRNA sense strand
agagagaugccgagggcca

SEQ ID NO: 2387945 - RNA, 19 nt, Homo sapiens
  misc_RNA (1)...(19): siRNA sense strand
gggaggugccugagaucau

SEQ ID NO: 2387946 - RNA, 19 nt, Homo sapiens
  misc_RNA (1)...(19): siRNA sense strand
gcagguggaugcugggaca

SEQ ID NO: 2387947 - RNA, 19 nt, Homo sapiens
  misc_RNA (1)...(19): siRNA sense strand
caggauacccagagccaga

SEQ ID NO: 2387948 - RNA, 19 nt, Homo sapiens
  misc_RNA (1)...(19): siRNA sense strand
agaaagaugaggaauccaa

SEQ ID NO: 2387949 - RNA, 19 nt, Homo sapiens
  misc_RNA (1)...(19): siRNA sense strand
uggagaggacggagagcau

SEQ ID NO: 2387950 - RNA, 19 nt, Homo sapiens
  misc_RNA (1)...(19): siRNA sense strand
agacauggcacccgggaca

SEQ ID NO: 2387951 - RNA, 19 nt, Homo sapiens
  misc_RNA (1)...(19): siRNA sense strand
gcuccaaguuccaaggcca

SEQ ID NO: 2387952 - RNA, 19 nt, Homo sapiens
  misc_RNA (1)...(19): siRNA sense strand
gggagauggaacacagaca

SEQ ID NO: 2387953 - RNA, 19 nt, Homo sapiens
  misc_RNA (1)...(19): siRNA sense strand
gggcccagagcuuaggaaa

SEQ ID NO: 2387954 - RNA, 19 nt, Homo sapiens
  misc_RNA (1)...(19): siRNA sense strand
ccagugagggugaaggaga

SEQ ID NO: 2387955 - RNA, 19 nt, Homo sapiens
  misc_RNA (1)...(19): siRNA sense strand
agaaggugaaguuggagaa

SEQ ID NO: 2387956 - RNA, 19 nt, Homo sapiens
  misc_RNA (1)...(19): siRNA sense strand
aggcagaugggaagauaca

SEQ ID NO: 2387957 - RNA, 19 nt, Homo sapiens
  misc_RNA (1)...(19): siRNA sense strand
ccacagccauggaagguca

SEQ ID NO: 2387958 - RNA, 19 nt, Homo sapiens
  misc_RNA (1)...(19): siRNA sense strand
ggucagagcagcaggagac

SEQ ID NO: 2387959 - RNA, 19 nt, Homo sapiens
  misc_RNA (1)...(19): siRNA sense strand
acaggaaggcccaggcaga

SEQ ID NO: 2387960 - RNA, 19 nt, Homo sapiens
  misc_RNA (1)...(19): siRNA sense strand
gaugaaggcaagcaggaga

SEQ ID NO: 2387961 - RNA, 19 nt, Homo sapiens
  misc_RNA (1)...(19): siRNA sense strand
uggcuguaucaguggacaa

SEQ ID NO: 2387962 - RNA, 19 nt, Homo sapiens
  misc_RNA (1)...(19): siRNA sense strand
agucaggccucuuggggaa

SEQ ID NO: 2387963 - RNA, 19 nt, Homo sapiens
  misc_RNA (1)...(19): siRNA sense strand
agauacaaguggauggaag

SEQ ID NO: 2387964 - RNA, 19 nt, Homo sapiens
  misc_RNA (1)...(19): siRNA sense strand
caagaaagcaagaggccac

SEQ ID NO: 2387965 - RNA, 19 nt, Homo sapiens
  misc_RNA (1)...(19): siRNA sense strand
ccucagaaggagccaguga

SEQ ID NO: 2387966 - RNA, 19 nt, Homo sapiens
  misc_RNA (1)...(19): siRNA sense strand
agaauggagaggacggaga

SEQ ID NO: 2387967 - RNA, 19 nt, Homo sapiens
  misc_RNA (1)...(19): siRNA sense strand
uggagcguguggagaacaa

SEQ ID NO: 2387968 - RNA, 19 nt, Homo sapiens
  misc_RNA (1)...(19): siRNA sense strand
aggacauguaccuggagaa

SEQ ID NO: 2387969 - RNA, 19 nt, Homo sapiens
  misc_RNA (1)...(19): siRNA sense strand
cagagaacuggaagcaaga

SEQ ID NO: 2387970 - RNA, 19 nt, Homo sapiens
  misc_RNA (1)...(19): siRNA sense strand
cuccagagaagaaggugaa

SEQ ID NO: 2387971 - RNA, 19 nt, Homo sapiens
  misc_RNA (1)...(19): siRNA sense strand
gguacaaggaugauacgga

SEQ ID NO: 2387972 - RNA, 19 nt, Homo sapiens
  misc_RNA (1)...(19): siRNA sense strand
gagaagaagaugccgccau

SEQ ID NO: 2387973 - RNA, 19 nt, Homo sapiens
  misc_RNA (1)...(19): siRNA sense strand
caggaggaugggagaacau

SEQ ID NO: 2387974 - RNA, 19 nt, Homo sapiens
  misc_RNA (1)...(19): siRNA sense strand
ccagaggacacgugcagau

SEQ ID NO: 2387975 - RNA, 19 nt, Homo sapiens
  misc_RNA (1)...(19): siRNA sense strand
gcuagaaacaacacaggca

SEQ ID NO: 2387976 - RNA, 19 nt, Homo sapiens
  misc_RNA (1)...(19): siRNA sense strand
gcacagacccugcugcuga

SEQ ID NO: 2387977 - RNA, 19 nt, Homo sapiens
  misc_RNA (1)...(19): siRNA sense strand
ggcaggagggagagacuga

SEQ ID NO: 2387978 - RNA, 19 nt, Homo sapiens
  misc_RNA (1)...(19): siRNA sense strand
gggcacacaggaagacaga

SEQ ID NO: 2387979 - RNA, 19 nt, Homo sapiens
  misc_RNA (1)...(19): siRNA sense strand
agaaggagccagugagggu

SEQ ID NO: 2387980 - RNA, 19 nt, Homo sapiens
  misc_RNA (1)...(19): siRNA sense strand
cagagguggcccuggauga

SEQ ID NO: 2387981 - RNA, 19 nt, Homo sapiens
  misc_RNA (1)...(19): siRNA sense strand
aggugaaguuggagaagag

SEQ ID NO: 2387982 - RNA, 19 nt, Homo sapiens
  misc_RNA (1)...(19): siRNA sense strand
ccacaggugauccggaaga

SEQ ID NO: 2387983 - RNA, 19 nt, Homo sapiens
  misc_RNA (1)...(19): siRNA sense strand
aggaaaggcucccagcuga

SEQ ID NO: 2387984 - RNA, 19 nt, Homo sapiens
  misc_RNA (1)...(19): siRNA sense strand
acagggaagggcagagaca

SEQ ID NO: 2387985 - RNA, 19 nt, Homo sapiens
  misc_RNA (1)...(19): siRNA sense strand
cuccaggaaccaugagcaa

SEQ ID NO: 2387986 - RNA, 19 nt, Homo sapiens
  misc_RNA (1)...(19): siRNA sense strand
augcuacccuggaggaaga

SEQ ID NO: 2387987 - RNA, 19 nt, Homo sapiens
  misc_RNA (1)...(19): siRNA sense strand
acauguaccuggagaacac

SEQ ID NO: 2387988 - RNA, 19 nt, Homo sapiens
  misc_RNA (1)...(19): siRNA sense strand
ggaagauucggguggagca

SEQ ID NO: 2387989 - RNA, 19 nt, Homo sapiens
  misc_RNA (1)...(19): siRNA sense strand
ccgacuaggccuuucaaca

SEQ ID NO: 2387990 - RNA, 19 nt, Homo sapiens
  misc_RNA (1)...(19): siRNA sense strand
aggcaggugagaagauaca

SEQ ID NO: 2387991 - RNA, 19 nt, Homo sapiens
  misc_RNA (1)...(19): siRNA sense strand
agaaggggaugcagggaga

SEQ ID NO: 2387992 - RNA, 19 nt, Homo sapiens
  misc_RNA (1)...(19): siRNA sense strand
ccauugugguagacgagga

SEQ ID NO: 2387993 - RNA, 19 nt, Homo sapiens
  misc_RNA (1)...(19): siRNA sense strand
ccaagcaaggccugcggaa

SEQ ID NO: 2387994 - RNA, 19 nt, Homo sapiens
  misc_RNA (1)...(19): siRNA sense strand
gcaugaugacacagggaag

SEQ ID NO: 2387995 - RNA, 19 nt, Homo sapiens
  misc_RNA (1)...(19): siRNA sense strand
gagaagauacaggaagaca

SEQ ID NO: 2387996 - RNA, 19 nt, Homo sapiens
  misc_RNA (1)...(19): siRNA sense strand
ccugcggaagccagaguua

SEQ ID NO: 2387997 - RNA, 19 nt, Homo sapiens
  misc_RNA (1)...(19): siRNA sense strand
aagccaaagaccugcugaa

SEQ ID NO: 2387998 - RNA, 19 nt, Homo sapiens
  misc_RNA (1)...(19): siRNA sense strand
agucgggaguacugcaaaa

SEQ ID NO: 2387999 - RNA, 19 nt, Homo sapiens
  misc_RNA (1)...(19): siRNA sense strand
ugaccugguacaaggauga

SEQ ID NO: 2388000 - RNA, 19 nt, Homo sapiens
  misc_RNA (1)...(19): siRNA sense strand
ggaagguggagaagggaaa

SEQ ID NO: 2388001 - RNA, 19 nt, Homo sapiens
  misc_RNA (1)...(19): siRNA sense strand
cgaaaagaagggagagaaa

SEQ ID NO: 2388002 - RNA, 19 nt, Homo sapiens
  misc_RNA (1)...(19): siRNA sense strand
cuacaaaagcugaugaaaa

SEQ ID NO: 2388003 - RNA, 19 nt, Homo sapiens
  misc_RNA (1)...(19): siRNA sense strand
ggacaguacgggacagcaa

SEQ ID NO: 2388004 - RNA, 19 nt, Homo sapiens
  misc_RNA (1)...(19): siRNA sense strand
ggaaaagaccugaagggua

SEQ ID NO: 2388005 - RNA, 19 nt, Homo sapiens
  misc_RNA (1)...(19): siRNA sense strand
cgaagagaugucugggaua

SEQ ID NO: 2388006 - RNA, 19 nt, Homo sapiens
  misc_RNA (1)...(19): siRNA sense strand
ggcaauaucguguggcaaa

SEQ ID NO: 2388007 - RNA, 19 nt, Homo sapiens
  misc_RNA (1)...(19): siRNA sense strand
guuuaagauugcagaugaa

SEQ ID NO: 2388008 - RNA, 19 nt, Homo sapiens
  misc_RNA (1)...(19): siRNA sense strand
ccugaaggguauacagcua

SEQ ID NO: 2388009 - RNA, 19 nt, Homo sapiens
  misc_RNA (1)...(19): siRNA sense strand
ggcaaagaaaggaaguaaa

SEQ ID NO: 2388010 - RNA, 19 nt, Homo sapiens
  misc_RNA (1)...(19): siRNA sense strand
cggcagagccuuugggacu

SEQ ID NO: 2388011 - RNA, 19 nt, Homo sapiens
  misc_RNA (1)...(19): siRNA sense strand
gguugaaugcuguacaaua

SEQ ID NO: 2388012 - RNA, 19 nt, Homo sapiens
  misc_RNA (1)...(19): siRNA sense strand
agaugaagaggcaaagaaa

SEQ ID NO: 2388013 - RNA, 19 nt, Homo sapiens
  misc_RNA (1)...(19): siRNA sense strand
ggauccaauuugugccaua

SEQ ID NO: 2388014 - RNA, 19 nt, Homo sapiens
  misc_RNA (1)...(19): siRNA sense strand
aggcugaaguuguuggcua

SEQ ID NO: 2388015 - RNA, 19 nt, Homo sapiens
  misc_RNA (1)...(19): siRNA sense strand
aggcaaagaaaggaaguaa

SEQ ID NO: 2388016 - RNA, 19 nt, Homo sapiens
  misc_RNA (1)...(19): siRNA sense strand
auuaaaggauccagaacau

SEQ ID NO: 2388017 - RNA, 19 nt, Homo sapiens
  misc_RNA (1)...(19): siRNA sense strand
agaggauuaugaaggguua

SEQ ID NO: 2388018 - RNA, 19 nt, Homo sapiens
  misc_RNA (1)...(19): siRNA sense strand
gcauguacguaguaggcau

SEQ ID NO: 2388019 - RNA, 19 nt, Homo sapiens
  misc_RNA (1)...(19): siRNA sense strand
gcaaugauggagaagacaa

SEQ ID NO: 2388020 - RNA, 19 nt, Homo sapiens
  misc_RNA (1)...(19): siRNA sense strand
ccuuacuuauagagcaaua

SEQ ID NO: 2388021 - RNA, 19 nt, Homo sapiens
  misc_RNA (1)...(19): siRNA sense strand
ggagaggggcagaggcuua

SEQ ID NO: 2388022 - RNA, 19 nt, Homo sapiens
  misc_RNA (1)...(19): siRNA sense strand
auauaaaggcucuuggauu

SEQ ID NO: 2388023 - RNA, 19 nt, Homo sapiens
  misc_RNA (1)...(19): siRNA sense strand
gccauaguccagugggaua

SEQ ID NO: 2388024 - RNA, 19 nt, Homo sapiens
  misc_RNA (1)...(19): siRNA sense strand
ggaacaaggaacaaggguu

SEQ ID NO: 2388025 - RNA, 19 nt, Homo sapiens
  misc_RNA (1)...(19): siRNA sense strand
gggcagaggcuuaccacuu

SEQ ID NO: 2388026 - RNA, 19 nt, Homo sapiens
  misc_RNA (1)...(19): siRNA sense strand
uuaaauaugugaagggucu

SEQ ID NO: 2388027 - RNA, 19 nt, Homo sapiens
  misc_RNA (1)...(19): siRNA sense strand
cuuuagaaaucuucaccaa

SEQ ID NO: 2388028 - RNA, 19 nt, Homo sapiens
  misc_RNA (1)...(19): siRNA sense strand
gcaaagauuaccaaggcau

SEQ ID NO: 2388029 - RNA, 19 nt, Homo sapiens
  misc_RNA (1)...(19): siRNA sense strand
ugaagauggauuacugaaa

SEQ ID NO: 2388030 - RNA, 19 nt, Homo sapiens
  misc_RNA (1)...(19): siRNA sense strand
ucuauacacugcagagcaa

SEQ ID NO: 2388031 - RNA, 19 nt, Homo sapiens
  misc_RNA (1)...(19): siRNA sense strand
ugggcaaacuacugaguga

SEQ ID NO: 2388032 - RNA, 19 nt, Homo sapiens
  misc_RNA (1)...(19): siRNA sense strand
agccuuacuuauagagcaa

SEQ ID NO: 2388033 - RNA, 19 nt, Homo sapiens
  misc_RNA (1)...(19): siRNA sense strand
ugauaauggaagaugccaa

SEQ ID NO: 2388034 - RNA, 19 nt, Homo sapiens
  misc_RNA (1)...(19): siRNA sense strand
augaagugggccaaagaua

SEQ ID NO: 2388035 - RNA, 19 nt, Homo sapiens
  misc_RNA (1)...(19): siRNA sense strand
cgguggugaagauggauua

SEQ ID NO: 2388036 - RNA, 19 nt, Homo sapiens
  misc_RNA (1)...(19): siRNA sense strand
aagaaugcccagcgaggaa

SEQ ID NO: 2388037 - RNA, 19 nt, Homo sapiens
  misc_RNA (1)...(19): siRNA sense strand
cagaacagaaacagcagua

SEQ ID NO: 2388038 - RNA, 19 nt, Homo sapiens
  misc_RNA (1)...(19): siRNA sense strand
uaaugagacaugagaauga

SEQ ID NO: 2388039 - RNA, 19 nt, Homo sapiens
  misc_RNA (1)...(19): siRNA sense strand
aaaagaagggagagaaaga

SEQ ID NO: 2388040 - RNA, 19 nt, Homo sapiens
  misc_RNA (1)...(19): siRNA sense strand
cgacaaaagugguugaaug

SEQ ID NO: 2388041 - RNA, 19 nt, Homo sapiens
  misc_RNA (1)...(19): siRNA sense strand
aguuggaaugugugaacaa

SEQ ID NO: 2388042 - RNA, 19 nt, Homo sapiens
  misc_RNA (1)...(19): siRNA sense strand
ugaaagacuaugaagacau

SEQ ID NO: 2388043 - RNA, 19 nt, Homo sapiens
  misc_RNA (1)...(19): siRNA sense strand
aauuagagacgcagacaga

SEQ ID NO: 2388044 - RNA, 19 nt, Homo sapiens
  misc_RNA (1)...(19): siRNA sense strand
aagaagggagagaaagaau

SEQ ID NO: 2388045 - RNA, 19 nt, Homo sapiens
  misc_RNA (1)...(19): siRNA sense strand
gaaagaacguaucucgaga

SEQ ID NO: 2388046 - RNA, 19 nt, Homo sapiens
  misc_RNA (1)...(19): siRNA sense strand
gaagaggcaaagaaaggaa

SEQ ID NO: 2388047 - RNA, 19 nt, Homo sapiens
  misc_RNA (1)...(19): siRNA sense strand
ucauagugguucuguucaa

SEQ ID NO: 2388048 - RNA, 19 nt, Homo sapiens
  misc_RNA (1)...(19): siRNA sense strand
aggcagccaugcaggacaa

SEQ ID NO: 2388049 - RNA, 19 nt, Homo sapiens
  misc_RNA (1)...(19): siRNA sense strand
cgagauggacagaagggau

SEQ ID NO: 2388050 - RNA, 19 nt, Homo sapiens
  misc_RNA (1)...(19): siRNA sense strand
uugugaagcgcuugggcaa

SEQ ID NO: 2388051 - RNA, 19 nt, Homo sapiens
  misc_RNA (1)...(19): siRNA sense strand
caaacuacugagugaguca

SEQ ID NO: 2388052 - RNA, 19 nt, Homo sapiens
  misc_RNA (1)...(19): siRNA sense strand
cagaugaagaggcaaagaa

SEQ ID NO: 2388053 - RNA, 19 nt, Homo sapiens
  misc_RNA (1)...(19): siRNA sense strand
gagcaguaucagaaguuga

SEQ ID NO: 2388054 - RNA, 19 nt, Homo sapiens
  misc_RNA (1)...(19): siRNA sense strand
uguguugucuucugggaua

SEQ ID NO: 2388055 - RNA, 19 nt, Homo sapiens
  misc_RNA (1)...(19): siRNA sense strand
ccaaacaaggauuaccuaa

SEQ ID NO: 2388056 - RNA, 19 nt, Homo sapiens
  misc_RNA (1)...(19): siRNA sense strand
gguuggaauuaaagaugca

SEQ ID NO: 2388057 - RNA, 19 nt, Homo sapiens
  misc_RNA (1)...(19): siRNA sense strand
ccaauaacgugaagcugca

SEQ ID NO: 2388058 - RNA, 19 nt, Homo sapiens
  misc_RNA (1)...(19): siRNA sense strand
gauugagaagguuggaauu

SEQ ID NO: 2388059 - RNA, 19 nt, Homo sapiens
  misc_RNA (1)...(19): siRNA sense strand
guuugaagaggcugaaaga

SEQ ID NO: 2388060 - RNA, 19 nt, Homo sapiens
  misc_RNA (1)...(19): siRNA sense strand
ccaggaacgcuuagcugaa

SEQ ID NO: 2388061 - RNA, 19 nt, Homo sapiens
  misc_RNA (1)...(19): siRNA sense strand
ggauaugaagugggccaaa

SEQ ID NO: 2388062 - RNA, 19 nt, Homo sapiens
  misc_RNA (1)...(19): siRNA sense strand
gauuaugaaggguuagaga

SEQ ID NO: 2388063 - RNA, 19 nt, Homo sapiens
  misc_RNA (1)...(19): siRNA sense strand
agaccuugcuuuagaaauc

SEQ ID NO: 2388064 - RNA, 19 nt, Homo sapiens
  misc_RNA (1)...(19): siRNA sense strand
cugaaaaccuaaauagcaa

SEQ ID NO: 2388065 - RNA, 19 nt, Homo sapiens
  misc_RNA (1)...(19): siRNA sense strand
cuuuacauucuaugggaua

SEQ ID NO: 2388066 - RNA, 19 nt, Homo sapiens
  misc_RNA (1)...(19): siRNA sense strand
ccgggaagaauuugaugaa

SEQ ID NO: 2388067 - RNA, 19 nt, Homo sapiens
  misc_RNA (1)...(19): siRNA sense strand
gaaaugagguaaucgggca

SEQ ID NO: 2388068 - RNA, 19 nt, Homo sapiens
  misc_RNA (1)...(19): siRNA sense strand
aaacaagagaagcugggaa

SEQ ID NO: 2388069 - RNA, 19 nt, Homo sapiens
  misc_RNA (1)...(19): siRNA sense strand
aguuuggagcagaugauaa

SEQ ID NO: 2388070 - RNA, 19 nt, Homo sapiens
  misc_RNA (1)...(19): siRNA sense strand
caagagaaauguuaggaag

SEQ ID NO: 2388071 - RNA, 19 nt, Homo sapiens
  misc_RNA (1)...(19): siRNA sense strand
aagaauuggccuugcacuu

SEQ ID NO: 2388072 - RNA, 19 nt, Homo sapiens
  misc_RNA (1)...(19): siRNA sense strand
ccaaagaauucauugcauc

SEQ ID NO: 2388073 - RNA, 19 nt, Homo sapiens
  misc_RNA (1)...(19): siRNA sense strand
aagagaaauguuaggaagu

SEQ ID NO: 2388074 - RNA, 19 nt, Homo sapiens
  misc_RNA (1)...(19): siRNA sense strand
agaaggaacugguggagag

SEQ ID NO: 2388075 - RNA, 19 nt, Homo sapiens
  misc_RNA (1)...(19): siRNA sense strand
aguuugugcaugugcuuaa

SEQ ID NO: 2388076 - RNA, 19 nt, Homo sapiens
  misc_RNA (1)...(19): siRNA sense strand
aagagaaacaagagaagcu

SEQ ID NO: 2388077 - RNA, 19 nt, Homo sapiens
  misc_RNA (1)...(19): siRNA sense strand
cauuuguggucaauaucaa

SEQ ID NO: 2388078 - RNA, 19 nt, Homo sapiens
  misc_RNA (1)...(19): siRNA sense strand
ccugagaguuuaaagucca

SEQ ID NO: 2388079 - RNA, 19 nt, Homo sapiens
  misc_RNA (1)...(19): siRNA sense strand
ccucugacccauauaucaa

SEQ ID NO: 2388080 - RNA, 19 nt, Homo sapiens
  misc_RNA (1)...(19): siRNA sense strand
agaaaaucauccaagucua

SEQ ID NO: 2388081 - RNA, 19 nt, Homo sapiens
  misc_RNA (1)...(19): siRNA sense strand
cgauccucccagagaagaa

SEQ ID NO: 2388082 - RNA, 19 nt, Homo sapiens
  misc_RNA (1)...(19): siRNA sense strand
gaauaagccagcugugcca

SEQ ID NO: 2388083 - RNA, 19 nt, Homo sapiens
  misc_RNA (1)...(19): siRNA sense strand
aggaacugguggagagcac

SEQ ID NO: 2388084 - RNA, 19 nt, Homo sapiens
  misc_RNA (1)...(19): siRNA sense strand
agaagagaaacaagagaag

SEQ ID NO: 2388085 - RNA, 19 nt, Homo sapiens
  misc_RNA (1)...(19): siRNA sense strand
gagaaauguuaggaagucu

SEQ ID NO: 2388086 - RNA, 19 nt, Homo sapiens
  misc_RNA (1)...(19): siRNA sense strand
gaagagaguucaagggaca

SEQ ID NO: 2388087 - RNA, 19 nt, Homo sapiens
  misc_RNA (1)...(19): siRNA sense strand
gggaaguauuauuggauau

SEQ ID NO: 2388088 - RNA, 19 nt, Homo sapiens
  misc_RNA (1)...(19): siRNA sense strand
aagacaaagcugagaggaa

SEQ ID NO: 2388089 - RNA, 19 nt, Homo sapiens
  misc_RNA (1)...(19): siRNA sense strand
gggaaauggcugcaagcaa

SEQ ID NO: 2388090 - RNA, 19 nt, Homo sapiens
  misc_RNA (1)...(19): siRNA sense strand
gaacaauaucucagcaaau

SEQ ID NO: 2388091 - RNA, 19 nt, Homo sapiens
  misc_RNA (1)...(19): siRNA sense strand
cgauauaggaugacaacau

SEQ ID NO: 2388092 - RNA, 19 nt, Homo sapiens
  misc_RNA (1)...(19): siRNA sense strand
agaagaagcgcaacggaaa

SEQ ID NO: 2388093 - RNA, 19 nt, Homo sapiens
  misc_RNA (1)...(19): siRNA sense strand
gcucauagugaauugguaa

SEQ ID NO: 2388094 - RNA, 19 nt, Homo sapiens
  misc_RNA (1)...(19): siRNA sense strand
cauccaaagcauagaaaga

SEQ ID NO: 2388095 - RNA, 19 nt, Homo sapiens
  misc_RNA (1)...(19): siRNA sense strand
agaaauaccaguagacaga

SEQ ID NO: 2388096 - RNA, 19 nt, Homo sapiens
  misc_RNA (1)...(19): siRNA sense strand
gaaauauuaaccugggaaa

SEQ ID NO: 2388097 - RNA, 19 nt, Homo sapiens
  misc_RNA (1)...(19): siRNA sense strand
cagcaguugcagagagauu

SEQ ID NO: 2388098 - RNA, 19 nt, Homo sapiens
  misc_RNA (1)...(19): siRNA sense strand
cagaugaaaucaagcgaga

SEQ ID NO: 2388099 - RNA, 19 nt, Homo sapiens
  misc_RNA (1)...(19): siRNA sense strand
cagaaaauguggaugaauu

SEQ ID NO: 2388100 - RNA, 19 nt, Homo sapiens
  misc_RNA (1)...(19): siRNA sense strand
aagcugagaggaagagaaa

SEQ ID NO: 2388101 - RNA, 19 nt, Homo sapiens
  misc_RNA (1)...(19): siRNA sense strand
acucaguggauuagaacaa

SEQ ID NO: 2388102 - RNA, 19 nt, Homo sapiens
  misc_RNA (1)...(19): siRNA sense strand
gcaaaagugaaguggcaua

SEQ ID NO: 2388103 - RNA, 19 nt, Homo sapiens
  misc_RNA (1)...(19): siRNA sense strand
cgucggagcuagagccaga

SEQ ID NO: 2388104 - RNA, 19 nt, Homo sapiens
  misc_RNA (1)...(19): siRNA sense strand
cagaagaagcgcaacggaa

SEQ ID NO: 2388105 - RNA, 19 nt, Homo sapiens
  misc_RNA (1)...(19): siRNA sense strand
aaagauaucuagaagguga

SEQ ID NO: 2388106 - RNA, 19 nt, Homo sapiens
  misc_RNA (1)...(19): siRNA sense strand
guucaagggacaaagacaa

SEQ ID NO: 2388107 - RNA, 19 nt, Homo sapiens
  misc_RNA (1)...(19): siRNA sense strand
gaugaaaucaagcgagaga

SEQ ID NO: 2388108 - RNA, 19 nt, Homo sapiens
  misc_RNA (1)...(19): siRNA sense strand
gagaaaagaucauggcuca

SEQ ID NO: 2388109 - RNA, 19 nt, Homo sapiens
  misc_RNA (1)...(19): siRNA sense strand
auuuagagaugguagagaa

SEQ ID NO: 2388110 - RNA, 19 nt, Homo sapiens
  misc_RNA (1)...(19): siRNA sense strand
gccggaauguggagaagaa

SEQ ID NO: 2388111 - RNA, 19 nt, Homo sapiens
  misc_RNA (1)...(19): siRNA sense strand
gugaaguggcauauaaauu

SEQ ID NO: 2388112 - RNA, 19 nt, Homo sapiens
  misc_RNA (1)...(19): siRNA sense strand
ucgcuuacuugcagguuua

SEQ ID NO: 2388113 - RNA, 19 nt, Homo sapiens
  misc_RNA (1)...(19): siRNA sense strand
uuauaaugcuuguuggaga

SEQ ID NO: 2388114 - RNA, 19 nt, Homo sapiens
  misc_RNA (1)...(19): siRNA sense strand
agacaugauucgguggaua

SEQ ID NO: 2388115 - RNA, 19 nt, Homo sapiens
  misc_RNA (1)...(19): siRNA sense strand
aagaggagcaagaaguuaa

SEQ ID NO: 2388116 - RNA, 19 nt, Homo sapiens
  misc_RNA (1)...(19): siRNA sense strand
aggugaaagagaugcuaua

SEQ ID NO: 2388117 - RNA, 19 nt, Homo sapiens
  misc_RNA (1)...(19): siRNA sense strand
ucgguaugcaguagaaaua

SEQ ID NO: 2388118 - RNA, 19 nt, Homo sapiens
  misc_RNA (1)...(19): siRNA sense strand
cggaauguggagaagaaau

SEQ ID NO: 2388119 - RNA, 19 nt, Homo sapiens
  misc_RNA (1)...(19): siRNA sense strand
cggaaauugaaaagacaaa

SEQ ID NO: 2388120 - RNA, 19 nt, Homo sapiens
  misc_RNA (1)...(19): siRNA sense strand
guacagaagagaauggcau

SEQ ID NO: 2388121 - RNA, 19 nt, Homo sapiens
  misc_RNA (1)...(19): siRNA sense strand
gggaaugucaggugcuauu

SEQ ID NO: 2388122 - RNA, 19 nt, Homo sapiens
  misc_RNA (1)...(19): siRNA sense strand
gaagagaaaagcagagauu

SEQ ID NO: 2388123 - RNA, 19 nt, Homo sapiens
  misc_RNA (1)...(19): siRNA sense strand
cgggaagugccuugaaaga

SEQ ID NO: 2388124 - RNA, 19 nt, Homo sapiens
  misc_RNA (1)...(19): siRNA sense strand
gagaaguguaccagcauuu

SEQ ID NO: 2388125 - RNA, 19 nt, Homo sapiens
  misc_RNA (1)...(19): siRNA sense strand
aggcauguaugaacugaaa

SEQ ID NO: 2388126 - RNA, 19 nt, Homo sapiens
  misc_RNA (1)...(19): siRNA sense strand
uggcauggaucaagaaaau

SEQ ID NO: 2388127 - RNA, 19 nt, Homo sapiens
  misc_RNA (1)...(19): siRNA sense strand
cuguggaacauaauggaua

SEQ ID NO: 2388128 - RNA, 19 nt, Homo sapiens
  misc_RNA (1)...(19): siRNA sense strand
cugcaaaggguguuacauu

SEQ ID NO: 2388129 - RNA, 19 nt, Homo sapiens
  misc_RNA (1)...(19): siRNA sense strand
gagauuuaguccuggaguu

SEQ ID NO: 2388130 - RNA, 19 nt, Homo sapiens
  misc_RNA (1)...(19): siRNA sense strand
gaaaccagaaugugccaaa

SEQ ID NO: 2388131 - RNA, 19 nt, Homo sapiens
  misc_RNA (1)...(19): siRNA sense strand
uggugaagauccugcauuu

SEQ ID NO: 2388132 - RNA, 19 nt, Homo sapiens
  misc_RNA (1)...(19): siRNA sense strand
ggaaauggcugcaagcaac

SEQ ID NO: 2388133 - RNA, 19 nt, Homo sapiens
  misc_RNA (1)...(19): siRNA sense strand
gaagaugagaacaaggaga

SEQ ID NO: 2388134 - RNA, 19 nt, Homo sapiens
  misc_RNA (1)...(19): siRNA sense strand
gaagaagcgcaacggaaau

SEQ ID NO: 2388135 - RNA, 19 nt, Homo sapiens
  misc_RNA (1)...(19): siRNA sense strand
agaacaauaucucagcaaa

SEQ ID NO: 2388136 - RNA, 19 nt, Homo sapiens
  misc_RNA (1)...(19): siRNA sense strand
auugaaaguuggugccgua

SEQ ID NO: 2388137 - RNA, 19 nt, Homo sapiens
  misc_RNA (1)...(19): siRNA sense strand
agacaaagccacucaaagu

SEQ ID NO: 2388138 - RNA, 19 nt, Homo sapiens
  misc_RNA (1)...(19): siRNA sense strand
agacugaugcuuagugauu

SEQ ID NO: 2388139 - RNA, 19 nt, Homo sapiens
  misc_RNA (1)...(19): siRNA sense strand
aagaagacaugcuggcaca

SEQ ID NO: 2388140 - RNA, 19 nt, Homo sapiens
  misc_RNA (1)...(19): siRNA sense strand
cagaacaguccaaggcaga

SEQ ID NO: 2388141 - RNA, 19 nt, Homo sapiens
  misc_RNA (1)...(19): siRNA sense strand
gcauuuguucagagaucaa

SEQ ID NO: 2388142 - RNA, 19 nt, Homo sapiens
  misc_RNA (1)...(19): siRNA sense strand
agaagaaaguacuccuaau

SEQ ID NO: 2388143 - RNA, 19 nt, Homo sapiens
  misc_RNA (1)...(19): siRNA sense strand
ugggaaguauuauuggaua

SEQ ID NO: 2388144 - RNA, 19 nt, Homo sapiens
  misc_RNA (1)...(19): siRNA sense strand
uggcauggcacuacaagaa

SEQ ID NO: 2388145 - RNA, 19 nt, Homo sapiens
  misc_RNA (1)...(19): siRNA sense strand
gguggauauugaagacuuu

SEQ ID NO: 2388146 - RNA, 19 nt, Homo sapiens
  misc_RNA (1)...(19): siRNA sense strand
gggacaaagacaaagcuga

SEQ ID NO: 2388147 - RNA, 19 nt, Homo sapiens
  misc_RNA (1)...(19): siRNA sense strand
ccucauguacagaagagaa

SEQ ID NO: 2388148 - RNA, 19 nt, Homo sapiens
  misc_RNA (1)...(19): siRNA sense strand
gugaauugccagcagauuu

SEQ ID NO: 2388149 - RNA, 19 nt, Homo sapiens
  misc_RNA (1)...(19): siRNA sense strand
gacuaaagguucaucccaa

SEQ ID NO: 2388150 - RNA, 19 nt, Homo sapiens
  misc_RNA (1)...(19): siRNA sense strand
ccgaggagauugcggggaa

SEQ ID NO: 2388151 - RNA, 19 nt, Homo sapiens
  misc_RNA (1)...(19): siRNA sense strand
cagcauuuguucagagauc

SEQ ID NO: 2388152 - RNA, 19 nt, Homo sapiens
  misc_RNA (1)...(19): siRNA sense strand
cauuacaguuucuuaggaa

SEQ ID NO: 2388153 - RNA, 19 nt, Homo sapiens
  misc_RNA (1)...(19): siRNA sense strand
ucuagaaggugaaagagau

SEQ ID NO: 2388154 - RNA, 19 nt, Homo sapiens
  misc_RNA (1)...(19): siRNA sense strand
ugguuauacugauggugaa

SEQ ID NO: 2388155 - RNA, 19 nt, Homo sapiens
  misc_RNA (1)...(19): siRNA sense strand
uaaagaacagcgaaggcaa

SEQ ID NO: 2388156 - RNA, 19 nt, Homo sapiens
  misc_RNA (1)...(19): siRNA sense strand
ccuacaaggugggacuaaa

SEQ ID NO: 2388157 - RNA, 19 nt, Homo sapiens
  misc_RNA (1)...(19): siRNA sense strand
cagaagaaguagaggacag

SEQ ID NO: 2388158 - RNA, 19 nt, Homo sapiens
  misc_RNA (1)...(19): siRNA sense strand
caaauguguucaaaggcua

SEQ ID NO: 2388159 - RNA, 19 nt, Homo sapiens
  misc_RNA (1)...(19): siRNA sense strand
uuaugaagguuauggccaa

SEQ ID NO: 2388160 - RNA, 19 nt, Homo sapiens
  misc_RNA (1)...(19): siRNA sense strand
ccugcaaaggagagggaga

SEQ ID NO: 2388161 - RNA, 19 nt, Homo sapiens
  misc_RNA (1)...(19): siRNA sense strand
gggagagauaugugugaga

SEQ ID NO: 2388162 - RNA, 19 nt, Homo sapiens
  misc_RNA (1)...(19): siRNA sense strand
gcuuagcaucucagggaau

SEQ ID NO: 2388163 - RNA, 19 nt, Homo sapiens
  misc_RNA (1)...(19): siRNA sense strand
cacacauguuugagcgaau

SEQ ID NO: 2388164 - RNA, 19 nt, Homo sapiens
  misc_RNA (1)...(19): siRNA sense strand
ggauguacgacaagaucuu

SEQ ID NO: 2388165 - RNA, 19 nt, Homo sapiens
  misc_RNA (1)...(19): siRNA sense strand
aggaauugaaggaacauau

SEQ ID NO: 2388166 - RNA, 19 nt, Homo sapiens
  misc_RNA (1)...(19): siRNA sense strand
gaacugaacuacugggccu

SEQ ID NO: 2388167 - RNA, 19 nt, Homo sapiens
  misc_RNA (1)...(19): siRNA sense strand
agaccugagcugagagagu

SEQ ID NO: 2388168 - RNA, 19 nt, Homo sapiens
  misc_RNA (1)...(19): siRNA sense strand
agucagaagaaguagagga

SEQ ID NO: 2388169 - RNA, 19 nt, Homo sapiens
  misc_RNA (1)...(19): siRNA sense strand
acacuggagacaucggaaa

SEQ ID NO: 2388170 - RNA, 19 nt, Homo sapiens
  misc_RNA (1)...(19): siRNA sense strand
cguggaggacuguggccaa

SEQ ID NO: 2388171 - RNA, 19 nt, Homo sapiens
  misc_RNA (1)...(19): siRNA sense strand
gaugauuguuacuggagca

SEQ ID NO: 2388172 - RNA, 19 nt, Homo sapiens
  misc_RNA (1)...(19): siRNA sense strand
auguugaggaacugaacua

SEQ ID NO: 2388173 - RNA, 19 nt, Homo sapiens
  misc_RNA (1)...(19): siRNA sense strand
ucguugauguugaggaacu

SEQ ID NO: 2388174 - RNA, 19 nt, Homo sapiens
  misc_RNA (1)...(19): siRNA sense strand
gggacagcuuaaaggccuu

SEQ ID NO: 2388175 - RNA, 19 nt, Homo sapiens
  misc_RNA (1)...(19): siRNA sense strand
ggcccagaagagaggaauu

SEQ ID NO: 2388176 - RNA, 19 nt, Homo sapiens
  misc_RNA (1)...(19): siRNA sense strand
aggcaaacacaccauuaaa

SEQ ID NO: 2388177 - RNA, 19 nt, Homo sapiens
  misc_RNA (1)...(19): siRNA sense strand
gaguggaaucaucaggaau

SEQ ID NO: 2388178 - RNA, 19 nt, Homo sapiens
  misc_RNA (1)...(19): siRNA sense strand
agagaggaauugaaggaac

SEQ ID NO: 2388179 - RNA, 19 nt, Homo sapiens
  misc_RNA (1)...(19): siRNA sense strand
acgacaagaucuucagcca

SEQ ID NO: 2388180 - RNA, 19 nt, Homo sapiens
  misc_RNA (1)...(19): siRNA sense strand
ugaaagagagagggcagaa

SEQ ID NO: 2388181 - RNA, 19 nt, Homo sapiens
  misc_RNA (1)...(19): siRNA sense strand
ggaccauguaccagguguu

SEQ ID NO: 2388182 - RNA, 19 nt, Homo sapiens
  misc_RNA (1)...(19): siRNA sense strand
gagaauauguugcacccga

SEQ ID NO: 2388183 - RNA, 19 nt, Homo sapiens
  misc_RNA (1)...(19): siRNA sense strand
ggaagauauggugagguua

SEQ ID NO: 2388184 - RNA, 19 nt, Homo sapiens
  misc_RNA (1)...(19): siRNA sense strand
gggcuuagcaucucaggga

SEQ ID NO: 2388185 - RNA, 19 nt, Homo sapiens
  misc_RNA (1)...(19): siRNA sense strand
ccugaaagagagagggcag

SEQ ID NO: 2388186 - RNA, 19 nt, Homo sapiens
  misc_RNA (1)...(19): siRNA sense strand
ggccagucuuggugggugu

SEQ ID NO: 2388187 - RNA, 19 nt, Homo sapiens
  misc_RNA (1)...(19): siRNA sense strand
gcacaaaaucggccagagu

SEQ ID NO: 2388188 - RNA, 19 nt, Homo sapiens
  misc_RNA (1)...(19): siRNA sense strand
ugacauguucucaguucaa

SEQ ID NO: 2388189 - RNA, 19 nt, Homo sapiens
  misc_RNA (1)...(19): siRNA sense strand
ccggacuucuccagcacaa

SEQ ID NO: 2388190 - RNA, 19 nt, Homo sapiens
  misc_RNA (1)...(19): siRNA sense strand
augggaacgugguggcuga

SEQ ID NO: 2388191 - RNA, 19 nt, Homo sapiens
  misc_RNA (1)...(19): siRNA sense strand
cuaagagacuggauggcua

SEQ ID NO: 2388192 - RNA, 19 nt, Homo sapiens
  misc_RNA (1)...(19): siRNA sense strand
aggcccagguggacagcaa

SEQ ID NO: 2388193 - RNA, 19 nt, Homo sapiens
  misc_RNA (1)...(19): siRNA sense strand
uguuggaagugcaggaacu

SEQ ID NO: 2388194 - RNA, 19 nt, Homo sapiens
  misc_RNA (1)...(19): siRNA sense strand
gcacagaaacagagcugcu

SEQ ID NO: 2388195 - RNA, 19 nt, Homo sapiens
  misc_RNA (1)...(19): siRNA sense strand
acgaggaugcccugggaga

SEQ ID NO: 2388196 - RNA, 19 nt, Homo sapiens
  misc_RNA (1)...(19): siRNA sense strand
gcgugcuagcucagaacaa

SEQ ID NO: 2388197 - RNA, 19 nt, Homo sapiens
  misc_RNA (1)...(19): siRNA sense strand
cuuccggucuggaggucua

SEQ ID NO: 2388198 - RNA, 19 nt, Homo sapiens
  misc_RNA (1)...(19): siRNA sense strand
acguggaagcuccgaggaa

SEQ ID NO: 2388199 - RNA, 19 nt, Homo sapiens
  misc_RNA (1)...(19): siRNA sense strand
agacuuugcaccugggcuu

SEQ ID NO: 2388200 - RNA, 19 nt, Homo sapiens
  misc_RNA (1)...(19): siRNA sense strand
uggccguccuugugagcau

SEQ ID NO: 2388201 - RNA, 19 nt, Homo sapiens
  misc_RNA (1)...(19): siRNA sense strand
ccaacuucucagugggaau

SEQ ID NO: 2388202 - RNA, 19 nt, Homo sapiens
  misc_RNA (1)...(19): siRNA sense strand
uggacuacuucaaaggcaa

SEQ ID NO: 2388203 - RNA, 19 nt, Homo sapiens
  misc_RNA (1)...(19): siRNA sense strand
ccaaagaccuacauucuga

SEQ ID NO: 2388204 - RNA, 19 nt, Homo sapiens
  misc_RNA (1)...(19): siRNA sense strand
acucaagaugccagccuaa

SEQ ID NO: 2388205 - RNA, 19 nt, Homo sapiens
  misc_RNA (1)...(19): siRNA sense strand
uguggaagucagaguguuu

SEQ ID NO: 2388206 - RNA, 19 nt, Homo sapiens
  misc_RNA (1)...(19): siRNA sense strand
gguuuauuuuccugagcaa

SEQ ID NO: 2388207 - RNA, 19 nt, Homo sapiens
  misc_RNA (1)...(19): siRNA sense strand
uuacagaaguauaugguug

SEQ ID NO: 2388208 - RNA, 19 nt, Homo sapiens
  misc_RNA (1)...(19): siRNA sense strand
uguacagaccacaggcaau

SEQ ID NO: 2388209 - RNA, 19 nt, Homo sapiens
  misc_RNA (1)...(19): siRNA sense strand
cauccuucacaaagaacua

SEQ ID NO: 2388210 - RNA, 19 nt, Homo sapiens
  misc_RNA (1)...(19): siRNA sense strand
gggaauccggacuaggaau

SEQ ID NO: 2388211 - RNA, 19 nt, Homo sapiens
  misc_RNA (1)...(19): siRNA sense strand
cuuuaaacuugcagacuaa

SEQ ID NO: 2388212 - RNA, 19 nt, Homo sapiens
  misc_RNA (1)...(19): siRNA sense strand
ccagaauuacccagagaaa

SEQ ID NO: 2388213 - RNA, 19 nt, Homo sapiens
  misc_RNA (1)...(19): siRNA sense strand
aauucaaacuaaagggcaa

SEQ ID NO: 2388214 - RNA, 19 nt, Homo sapiens
  misc_RNA (1)...(19): siRNA sense strand
gauuuaaagacgaggccua

SEQ ID NO: 2388215 - RNA, 19 nt, Homo sapiens
  misc_RNA (1)...(19): siRNA sense strand
agcaaagaguauugacuaa

SEQ ID NO: 2388216 - RNA, 19 nt, Homo sapiens
  misc_RNA (1)...(19): siRNA sense strand
gcuacaguacagagaguua

SEQ ID NO: 2388217 - RNA, 19 nt, Homo sapiens
  misc_RNA (1)...(19): siRNA sense strand
ugacgaaaaugcugggaaa

SEQ ID NO: 2388218 - RNA, 19 nt, Homo sapiens
  misc_RNA (1)...(19): siRNA sense strand
acuaaagggcaaaggagua

SEQ ID NO: 2388219 - RNA, 19 nt, Homo sapiens
  misc_RNA (1)...(19): siRNA sense strand
ccuuugaauuugaagacaa

SEQ ID NO: 2388220 - RNA, 19 nt, Homo sapiens
  misc_RNA (1)...(19): siRNA sense strand
uggcagacagguugaaaua

SEQ ID NO: 2388221 - RNA, 19 nt, Homo sapiens
  misc_RNA (1)...(19): siRNA sense strand
ccgagaaugccaacaguaa

SEQ ID NO: 2388222 - RNA, 19 nt, Homo sapiens
  misc_RNA (1)...(19): siRNA sense strand
ugguggaauuaguggacaa

SEQ ID NO: 2388223 - RNA, 19 nt, Homo sapiens
  misc_RNA (1)...(19): siRNA sense strand
ggaaguuguaagaauguaa

SEQ ID NO: 2388224 - RNA, 19 nt, Homo sapiens
  misc_RNA (1)...(19): siRNA sense strand
uggcagaauuggaccagaa

SEQ ID NO: 2388225 - RNA, 19 nt, Homo sapiens
  misc_RNA (1)...(19): siRNA sense strand
agacaauggacaagaagau

SEQ ID NO: 2388226 - RNA, 19 nt, Homo sapiens
  misc_RNA (1)...(19): siRNA sense strand
gcagaaacuaagaguccua

SEQ ID NO: 2388227 - RNA, 19 nt, Homo sapiens
  misc_RNA (1)...(19): siRNA sense strand
agaggagagcugugguaaa

SEQ ID NO: 2388228 - RNA, 19 nt, Homo sapiens
  misc_RNA (1)...(19): siRNA sense strand
gaauagaaacaguugacau

SEQ ID NO: 2388229 - RNA, 19 nt, Homo sapiens
  misc_RNA (1)...(19): siRNA sense strand
auaagauccuucaggcaaa

SEQ ID NO: 2388230 - RNA, 19 nt, Homo sapiens
  misc_RNA (1)...(19): siRNA sense strand
cugacuauaacuuggguaa

SEQ ID NO: 2388231 - RNA, 19 nt, Homo sapiens
  misc_RNA (1)...(19): siRNA sense strand
gggcaaaggaguauggaug

SEQ ID NO: 2388232 - RNA, 19 nt, Homo sapiens
  misc_RNA (1)...(19): siRNA sense strand
uaguaucagugguggaauu

SEQ ID NO: 2388233 - RNA, 19 nt, Homo sapiens
  misc_RNA (1)...(19): siRNA sense strand
ggucuauagggaaguuaaa

SEQ ID NO: 2388234 - RNA, 19 nt, Homo sapiens
  misc_RNA (1)...(19): siRNA sense strand
gauaagauccuucaggcaa

SEQ ID NO: 2388235 - RNA, 19 nt, Homo sapiens
  misc_RNA (1)...(19): siRNA sense strand
agggaguuauggauggaua

SEQ ID NO: 2388236 - RNA, 19 nt, Homo sapiens
  misc_RNA (1)...(19): siRNA sense strand
cugucaagcucuacgaaaa

SEQ ID NO: 2388237 - RNA, 19 nt, Homo sapiens
  misc_RNA (1)...(19): siRNA sense strand
gcccauugccugaaaggaa

SEQ ID NO: 2388238 - RNA, 19 nt, Homo sapiens
  misc_RNA (1)...(19): siRNA sense strand
acuuuaaacuugcagacua

SEQ ID NO: 2388239 - RNA, 19 nt, Homo sapiens
  misc_RNA (1)...(19): siRNA sense strand
uggagugcguguugagaau

SEQ ID NO: 2388240 - RNA, 19 nt, Homo sapiens
  misc_RNA (1)...(19): siRNA sense strand
aauuaguggacaaggaaau

SEQ ID NO: 2388241 - RNA, 19 nt, Homo sapiens
  misc_RNA (1)...(19): siRNA sense strand
guccuaaauuugagugaca

SEQ ID NO: 2388242 - RNA, 19 nt, Homo sapiens
  misc_RNA (1)...(19): siRNA sense strand
uuuccgaggugaagaagaa

SEQ ID NO: 2388243 - RNA, 19 nt, Homo sapiens
  misc_RNA (1)...(19): siRNA sense strand
cggagcaaacugugaaaga

SEQ ID NO: 2388244 - RNA, 19 nt, Homo sapiens
  misc_RNA (1)...(19): siRNA sense strand
cauuagcaguugaugagaa

SEQ ID NO: 2388245 - RNA, 19 nt, Homo sapiens
  misc_RNA (1)...(19): siRNA sense strand
cauaauucuuuguggggua

SEQ ID NO: 2388246 - RNA, 19 nt, Homo sapiens
  misc_RNA (1)...(19): siRNA sense strand
gcaauaaugaauucgguga

SEQ ID NO: 2388247 - RNA, 19 nt, Homo sapiens
  misc_RNA (1)...(19): siRNA sense strand
cugaaaggaaagaacauau

SEQ ID NO: 2388248 - RNA, 19 nt, Homo sapiens
  misc_RNA (1)...(19): siRNA sense strand
ggagaggagagcuguggua

SEQ ID NO: 2388249 - RNA, 19 nt, Homo sapiens
  misc_RNA (1)...(19): siRNA sense strand
gaauuaguggacaaggaaa

SEQ ID NO: 2388250 - RNA, 19 nt, Homo sapiens
  misc_RNA (1)...(19): siRNA sense strand
ccagaacacaguagaccua

SEQ ID NO: 2388251 - RNA, 19 nt, Homo sapiens
  misc_RNA (1)...(19): siRNA sense strand
uggaauuaguggacaagga

SEQ ID NO: 2388252 - RNA, 19 nt, Homo sapiens
  misc_RNA (1)...(19): siRNA sense strand
aagcaaagaguauugacua

SEQ ID NO: 2388253 - RNA, 19 nt, Homo sapiens
  misc_RNA (1)...(19): siRNA sense strand
gcuaaugaaaugaggauug

SEQ ID NO: 2388254 - RNA, 19 nt, Homo sapiens
  misc_RNA (1)...(19): siRNA sense strand
cugaagaguuuccagaaca

SEQ ID NO: 2388255 - RNA, 19 nt, Homo sapiens
  misc_RNA (1)...(19): siRNA sense strand
cuucauagucuucggacau

SEQ ID NO: 2388256 - RNA, 19 nt, Homo sapiens
  misc_RNA (1)...(19): siRNA sense strand
gugacaacagauugaagaa

SEQ ID NO: 2388257 - RNA, 19 nt, Homo sapiens
  misc_RNA (1)...(19): siRNA sense strand
ggaagagcagagacaacaa

SEQ ID NO: 2388258 - RNA, 19 nt, Homo sapiens
  misc_RNA (1)...(19): siRNA sense strand
caggaaaggagcaugugua

SEQ ID NO: 2388259 - RNA, 19 nt, Homo sapiens
  misc_RNA (1)...(19): siRNA sense strand
agacaggauuguugguguu

SEQ ID NO: 2388260 - RNA, 19 nt, Homo sapiens
  misc_RNA (1)...(19): siRNA sense strand
guuggaaagacuugaccua

SEQ ID NO: 2388261 - RNA, 19 nt, Homo sapiens
  misc_RNA (1)...(19): siRNA sense strand
cugaaguucuggaucaaau

SEQ ID NO: 2388262 - RNA, 19 nt, Homo sapiens
  misc_RNA (1)...(19): siRNA sense strand
uagcaguugaugagaauuu

SEQ ID NO: 2388263 - RNA, 19 nt, Homo sapiens
  misc_RNA (1)...(19): siRNA sense strand
cagagaaauuggaaguugu

SEQ ID NO: 2388264 - RNA, 19 nt, Homo sapiens
  misc_RNA (1)...(19): siRNA sense strand
uggcagguaugaagaugaa

SEQ ID NO: 2388265 - RNA, 19 nt, Homo sapiens
  misc_RNA (1)...(19): siRNA sense strand
cuaccaaagucaaugcaca

SEQ ID NO: 2388266 - RNA, 19 nt, Homo sapiens
  misc_RNA (1)...(19): siRNA sense strand
acagaguaucgaugagauu

SEQ ID NO: 2388267 - RNA, 19 nt, Homo sapiens
  misc_RNA (1)...(19): siRNA sense strand
aggcaaauggacacaguuu

SEQ ID NO: 2388268 - RNA, 19 nt, Homo sapiens
  misc_RNA (1)...(19): siRNA sense strand
gggucuauagggaaguuaa

SEQ ID NO: 2388269 - RNA, 19 nt, Homo sapiens
  misc_RNA (1)...(19): siRNA sense strand
caaucaacuuacaaugcua

SEQ ID NO: 2388270 - RNA, 19 nt, Homo sapiens
  misc_RNA (1)...(19): siRNA sense strand
cccagaggauuuaaagaau

SEQ ID NO: 2388271 - RNA, 19 nt, Homo sapiens
  misc_RNA (1)...(19): siRNA sense strand
agcuaaagaugcaguacau

SEQ ID NO: 2388272 - RNA, 19 nt, Homo sapiens
  misc_RNA (1)...(19): siRNA sense strand
cccauugccugaaaggaaa

SEQ ID NO: 2388273 - RNA, 19 nt, Homo sapiens
  misc_RNA (1)...(19): siRNA sense strand
ccguaugaaggaaauauaa

SEQ ID NO: 2388274 - RNA, 19 nt, Homo sapiens
  misc_RNA (1)...(19): siRNA sense strand
uaccaaacuuaaagagcuu

SEQ ID NO: 2388275 - RNA, 19 nt, Homo sapiens
  misc_RNA (1)...(19): siRNA sense strand
aaacuaugcuucugggagu

SEQ ID NO: 2388276 - RNA, 19 nt, Homo sapiens
  misc_RNA (1)...(19): siRNA sense strand
acauaaagccaaugaacaa

SEQ ID NO: 2388277 - RNA, 19 nt, Homo sapiens
  misc_RNA (1)...(19): siRNA sense strand
gcauagaggaggauggaga

SEQ ID NO: 2388278 - RNA, 19 nt, Homo sapiens
  misc_RNA (1)...(19): siRNA sense strand
agugggaggagaagagaaa

SEQ ID NO: 2388279 - RNA, 19 nt, Homo sapiens
  misc_RNA (1)...(19): siRNA sense strand
aauggaagcaggaaggaaa

SEQ ID NO: 2388280 - RNA, 19 nt, Homo sapiens
  misc_RNA (1)...(19): siRNA sense strand
cagaugagcagcacgguaa

SEQ ID NO: 2388281 - RNA, 19 nt, Homo sapiens
  misc_RNA (1)...(19): siRNA sense strand
uggcuaaggcuuugaucaa

SEQ ID NO: 2388282 - RNA, 19 nt, Homo sapiens
  misc_RNA (1)...(19): siRNA sense strand
uagcauagacaaagcggaa

SEQ ID NO: 2388283 - RNA, 19 nt, Homo sapiens
  misc_RNA (1)...(19): siRNA sense strand
ugggaauacuccuggauau

SEQ ID NO: 2388284 - RNA, 19 nt, Homo sapiens
  misc_RNA (1)...(19): siRNA sense strand
aagaacagcaguuggaaau

SEQ ID NO: 2388285 - RNA, 19 nt, Homo sapiens
  misc_RNA (1)...(19): siRNA sense strand
gcauagacaaagcggaaca

SEQ ID NO: 2388286 - RNA, 19 nt, Homo sapiens
  misc_RNA (1)...(19): siRNA sense strand
uggcaaaugaagaaaugaa

SEQ ID NO: 2388287 - RNA, 19 nt, Homo sapiens
  misc_RNA (1)...(19): siRNA sense strand
guaucuugauggagcagaa

SEQ ID NO: 2388288 - RNA, 19 nt, Homo sapiens
  misc_RNA (1)...(19): siRNA sense strand
gugaagaggcacugaggca

SEQ ID NO: 2388289 - RNA, 19 nt, Homo sapiens
  misc_RNA (1)...(19): siRNA sense strand
ccucauguuuauugugauu

SEQ ID NO: 2388290 - RNA, 19 nt, Homo sapiens
  misc_RNA (1)...(19): siRNA sense strand
aggaagcuuugcugaauaa

SEQ ID NO: 2388291 - RNA, 19 nt, Homo sapiens
  misc_RNA (1)...(19): siRNA sense strand
caaucagaguucacagcua

SEQ ID NO: 2388292 - RNA, 19 nt, Homo sapiens
  misc_RNA (1)...(19): siRNA sense strand
augaagaaaugaaggugau

SEQ ID NO: 2388293 - RNA, 19 nt, Homo sapiens
  misc_RNA (1)...(19): siRNA sense strand
gcauuacagucaggagaua

SEQ ID NO: 2388294 - RNA, 19 nt, Homo sapiens
  misc_RNA (1)...(19): siRNA sense strand
gggaauaacacugaccaaa

SEQ ID NO: 2388295 - RNA, 19 nt, Homo sapiens
  misc_RNA (1)...(19): siRNA sense strand
caggaagcuuugcugaaua

SEQ ID NO: 2388296 - RNA, 19 nt, Homo sapiens
  misc_RNA (1)...(19): siRNA sense strand
aggugaugcaggugaauau

SEQ ID NO: 2388297 - RNA, 19 nt, Homo sapiens
  misc_RNA (1)...(19): siRNA sense strand
gcucaggauauccaggaaa

SEQ ID NO: 2388298 - RNA, 19 nt, Homo sapiens
  misc_RNA (1)...(19): siRNA sense strand
ccucuaaagcugaacauca

SEQ ID NO: 2388299 - RNA, 19 nt, Homo sapiens
  misc_RNA (1)...(19): siRNA sense strand
cugcaaaagaaguuaacaa

SEQ ID NO: 2388300 - RNA, 19 nt, Homo sapiens
  misc_RNA (1)...(19): siRNA sense strand
aggugaauauguuugcaaa

SEQ ID NO: 2388301 - RNA, 19 nt, Homo sapiens
  misc_RNA (1)...(19): siRNA sense strand
ccguaauaggugucggaga

SEQ ID NO: 2388302 - RNA, 19 nt, Homo sapiens
  misc_RNA (1)...(19): siRNA sense strand
gggaagucuauacgaggaa

SEQ ID NO: 2388303 - RNA, 19 nt, Homo sapiens
  misc_RNA (1)...(19): siRNA sense strand
cagcguuccggaaggguua

SEQ ID NO: 2388304 - RNA, 19 nt, Homo sapiens
  misc_RNA (1)...(19): siRNA sense strand
gaugagguuuauuggaaca

SEQ ID NO: 2388305 - RNA, 19 nt, Homo sapiens
  misc_RNA (1)...(19): siRNA sense strand
cguaauaggugucggagag

SEQ ID NO: 2388306 - RNA, 19 nt, Homo sapiens
  misc_RNA (1)...(19): siRNA sense strand
acaccugcauagugaauau

SEQ ID NO: 2388307 - RNA, 19 nt, Homo sapiens
  misc_RNA (1)...(19): siRNA sense strand
gguaaaacaggaacguaua

SEQ ID NO: 2388308 - RNA, 19 nt, Homo sapiens
  misc_RNA (1)...(19): siRNA sense strand
aauaugagugcaagaagaa

SEQ ID NO: 2388309 - RNA, 19 nt, Homo sapiens
  misc_RNA (1)...(19): siRNA sense strand
aaaugaaggugaugugcga

SEQ ID NO: 2388310 - RNA, 19 nt, Homo sapiens
  misc_RNA (1)...(19): siRNA sense strand
ugaccaaauuaccgacauu

SEQ ID NO: 2388311 - RNA, 19 nt, Homo sapiens
  misc_RNA (1)...(19): siRNA sense strand
cggaaggguuacggaauuu

SEQ ID NO: 2388312 - RNA, 19 nt, Homo sapiens
  misc_RNA (1)...(19): siRNA sense strand
gcaguuacuaucaaugaaa

SEQ ID NO: 2388313 - RNA, 19 nt, Homo sapiens
  misc_RNA (1)...(19): siRNA sense strand
gagcaaaguagaauggaag

SEQ ID NO: 2388314 - RNA, 19 nt, Homo sapiens
  misc_RNA (1)...(19): siRNA sense strand
cuacauacucugcaagaca

SEQ ID NO: 2388315 - RNA, 19 nt, Homo sapiens
  misc_RNA (1)...(19): siRNA sense strand
ucauugugguggugaacau

SEQ ID NO: 2388316 - RNA, 19 nt, Homo sapiens
  misc_RNA (1)...(19): siRNA sense strand
ucaaugucuuccagggauu

SEQ ID NO: 2388317 - RNA, 19 nt, Homo sapiens
  misc_RNA (1)...(19): siRNA sense strand
gggaaaggugucuucacaa

SEQ ID NO: 2388318 - RNA, 19 nt, Homo sapiens
  misc_RNA (1)...(19): siRNA sense strand
aagaaugucuguuggcuca

SEQ ID NO: 2388319 - RNA, 19 nt, Homo sapiens
  misc_RNA (1)...(19): siRNA sense strand
ugaucauugugguggugaa

SEQ ID NO: 2388320 - RNA, 19 nt, Homo sapiens
  misc_RNA (1)...(19): siRNA sense strand
cugaagaauacacuguuaa

SEQ ID NO: 2388321 - RNA, 19 nt, Homo sapiens
  misc_RNA (1)...(19): siRNA sense strand
augaugagguuuauuggaa

SEQ ID NO: 2388322 - RNA, 19 nt, Homo sapiens
  misc_RNA (1)...(19): siRNA sense strand
uguggaaaucggugaccaa

SEQ ID NO: 2388323 - RNA, 19 nt, Homo sapiens
  misc_RNA (1)...(19): siRNA sense strand
gcuaugaagaacagcaguu

SEQ ID NO: 2388324 - RNA, 19 nt, Homo sapiens
  misc_RNA (1)...(19): siRNA sense strand
uggaagcugugguguggaa

SEQ ID NO: 2388325 - RNA, 19 nt, Homo sapiens
  misc_RNA (1)...(19): siRNA sense strand
gcuacaaacacaauuucaa

SEQ ID NO: 2388326 - RNA, 19 nt, Homo sapiens
  misc_RNA (1)...(19): siRNA sense strand
cugaaggaucuuucuauua

SEQ ID NO: 2388327 - RNA, 19 nt, Homo sapiens
  misc_RNA (1)...(19): siRNA sense strand
aagcagguccacucagaaa

SEQ ID NO: 2388328 - RNA, 19 nt, Homo sapiens
  misc_RNA (1)...(19): siRNA sense strand
ugguaaaacaggaacguau

SEQ ID NO: 2388329 - RNA, 19 nt, Homo sapiens
  misc_RNA (1)...(19): siRNA sense strand
ccuacaaaauggacuacaa

SEQ ID NO: 2388330 - RNA, 19 nt, Homo sapiens
  misc_RNA (1)...(19): siRNA sense strand
cagucaggguaauguuaau

SEQ ID NO: 2388331 - RNA, 19 nt, Homo sapiens
  misc_RNA (1)...(19): siRNA sense strand
ucacagcacucaaagucaa

SEQ ID NO: 2388332 - RNA, 19 nt, Homo sapiens
  misc_RNA (1)...(19): siRNA sense strand
gauggaacccagugcccaa

SEQ ID NO: 2388333 - RNA, 19 nt, Homo sapiens
  misc_RNA (1)...(19): siRNA sense strand
gcagaugagcagcacggua

SEQ ID NO: 2388334 - RNA, 19 nt, Homo sapiens
  misc_RNA (1)...(19): siRNA sense strand
cuuuauuacuggagacaua

SEQ ID NO: 2388335 - RNA, 19 nt, Homo sapiens
  misc_RNA (1)...(19): siRNA sense strand
cgucaaggacagauagcaa

SEQ ID NO: 2388336 - RNA, 19 nt, Homo sapiens
  misc_RNA (1)...(19): siRNA sense strand
acaucaacuaugaggauaa

SEQ ID NO: 2388337 - RNA, 19 nt, Homo sapiens
  misc_RNA (1)...(19): siRNA sense strand
gauaaagaguggagaggcu

SEQ ID NO: 2388338 - RNA, 19 nt, Homo sapiens
  misc_RNA (1)...(19): siRNA sense strand
cuacaggaguuauggaaca

SEQ ID NO: 2388339 - RNA, 19 nt, Homo sapiens
  misc_RNA (1)...(19): siRNA sense strand
ggauacugcauaugauaaa

SEQ ID NO: 2388340 - RNA, 19 nt, Homo sapiens
  misc_RNA (1)...(19): siRNA sense strand
acgaaaagaguaugggaaa

SEQ ID NO: 2388341 - RNA, 19 nt, Homo sapiens
  misc_RNA (1)...(19): siRNA sense strand
cugaacaaugccagggaua

SEQ ID NO: 2388342 - RNA, 19 nt, Homo sapiens
  misc_RNA (1)...(19): siRNA sense strand
gagacaaguaugggaguaa

SEQ ID NO: 2388343 - RNA, 19 nt, Homo sapiens
  misc_RNA (1)...(19): siRNA sense strand
aggcaauggucgagacagu

SEQ ID NO: 2388344 - RNA, 19 nt, Homo sapiens
  misc_RNA (1)...(19): siRNA sense strand
gcacagucaucauggccua

SEQ ID NO: 2388345 - RNA, 19 nt, Homo sapiens
  misc_RNA (1)...(19): siRNA sense strand
guaugggaguaaagcuaaa

SEQ ID NO: 2388346 - RNA, 19 nt, Homo sapiens
  misc_RNA (1)...(19): siRNA sense strand
cguagaauguggaaugaca

SEQ ID NO: 2388347 - RNA, 19 nt, Homo sapiens
  misc_RNA (1)...(19): siRNA sense strand
cugcucagauggagaauau

SEQ ID NO: 2388348 - RNA, 19 nt, Homo sapiens
  misc_RNA (1)...(19): siRNA sense strand
cuuacaaaguggaacaaaa

SEQ ID NO: 2388349 - RNA, 19 nt, Homo sapiens
  misc_RNA (1)...(19): siRNA sense strand
uggcacauguggaaguuaa

SEQ ID NO: 2388350 - RNA, 19 nt, Homo sapiens
  misc_RNA (1)...(19): siRNA sense strand
cauaaacaguucagcguca

SEQ ID NO: 2388351 - RNA, 19 nt, Homo sapiens
  misc_RNA (1)...(19): siRNA sense strand
caacauugcuagagagcug

SEQ ID NO: 2388352 - RNA, 19 nt, Homo sapiens
  misc_RNA (1)...(19): siRNA sense strand
ggagaauauccgauguuau

SEQ ID NO: 2388353 - RNA, 19 nt, Homo sapiens
  misc_RNA (1)...(19): siRNA sense strand
uggcaaaaguacagagagu

SEQ ID NO: 2388354 - RNA, 19 nt, Homo sapiens
  misc_RNA (1)...(19): siRNA sense strand
cgaaaagaguaugggaaau

SEQ ID NO: 2388355 - RNA, 19 nt, Homo sapiens
  misc_RNA (1)...(19): siRNA sense strand
ccacaagcuuugaaugcau

SEQ ID NO: 2388356 - RNA, 19 nt, Homo sapiens
  misc_RNA (1)...(19): siRNA sense strand
gauuugcggacuaggauaa

SEQ ID NO: 2388357 - RNA, 19 nt, Homo sapiens
  misc_RNA (1)...(19): siRNA sense strand
acaaugaggcuacuggaaa

SEQ ID NO: 2388358 - RNA, 19 nt, Homo sapiens
  misc_RNA (1)...(19): siRNA sense strand
acacauugcuguaguggca

SEQ ID NO: 2388359 - RNA, 19 nt, Homo sapiens
  misc_RNA (1)...(19): siRNA sense strand
aaguaugggaguaaagcua

SEQ ID NO: 2388360 - RNA, 19 nt, Homo sapiens
  misc_RNA (1)...(19): siRNA sense strand
gcaccaggaacauaguaaa

SEQ ID NO: 2388361 - RNA, 19 nt, Homo sapiens
  misc_RNA (1)...(19): siRNA sense strand
gguggauggcacaggauuu

SEQ ID NO: 2388362 - RNA, 19 nt, Homo sapiens
  misc_RNA (1)...(19): siRNA sense strand
gggaguaaagcuaaacauu

SEQ ID NO: 2388363 - RNA, 19 nt, Homo sapiens
  misc_RNA (1)...(19): siRNA sense strand
gaacaaugccagggauaca

SEQ ID NO: 2388364 - RNA, 19 nt, Homo sapiens
  misc_RNA (1)...(19): siRNA sense strand
aaucuaugcaacagaacaa

SEQ ID NO: 2388365 - RNA, 19 nt, Homo sapiens
  misc_RNA (1)...(19): siRNA sense strand
guuuaagacucgucaagga

SEQ ID NO: 2388366 - RNA, 19 nt, Homo sapiens
  misc_RNA (1)...(19): siRNA sense strand
ugcaaauaccuuaaagcaa

SEQ ID NO: 2388367 - RNA, 19 nt, Homo sapiens
  misc_RNA (1)...(19): siRNA sense strand
ucauacugcuauacugaaa

SEQ ID NO: 2388368 - RNA, 19 nt, Homo sapiens
  misc_RNA (1)...(19): siRNA sense strand
gggauacugcauaugauaa

SEQ ID NO: 2388369 - RNA, 19 nt, Homo sapiens
  misc_RNA (1)...(19): siRNA sense strand
uauaugaggaugaugacaa

SEQ ID NO: 2388370 - RNA, 19 nt, Homo sapiens
  misc_RNA (1)...(19): siRNA sense strand
acauugcagcuguggauua

SEQ ID NO: 2388371 - RNA, 19 nt, Homo sapiens
  misc_RNA (1)...(19): siRNA sense strand
ccuccuagauguacagcuu

SEQ ID NO: 2388372 - RNA, 19 nt, Homo sapiens
  misc_RNA (1)...(19): siRNA sense strand
caaagaugcaauaacagaa

SEQ ID NO: 2388373 - RNA, 19 nt, Homo sapiens
  misc_RNA (1)...(19): siRNA sense strand
auaaauaccuugaagugca

SEQ ID NO: 2388374 - RNA, 19 nt, Homo sapiens
  misc_RNA (1)...(19): siRNA sense strand
uaucauagcaaaugccaau

SEQ ID NO: 2388375 - RNA, 19 nt, Homo sapiens
  misc_RNA (1)...(19): siRNA sense strand
cuguauaugaggaugauga

SEQ ID NO: 2388376 - RNA, 19 nt, Homo sapiens
  misc_RNA (1)...(19): siRNA sense strand
cagaaggaaacuuagaaga

SEQ ID NO: 2388377 - RNA, 19 nt, Homo sapiens
  misc_RNA (1)...(19): siRNA sense strand
caggauuuguaguguauga

SEQ ID NO: 2388378 - RNA, 19 nt, Homo sapiens
  misc_RNA (1)...(19): siRNA sense strand
uggcugaacagacaagaaa

SEQ ID NO: 2388379 - RNA, 19 nt, Homo sapiens
  misc_RNA (1)...(19): siRNA sense strand
uggccgaaauggagagauc

SEQ ID NO: 2388380 - RNA, 19 nt, Homo sapiens
  misc_RNA (1)...(19): siRNA sense strand
cggcagcaauaaacaaaga

SEQ ID NO: 2388381 - RNA, 19 nt, Homo sapiens
  misc_RNA (1)...(19): siRNA sense strand
agacaaguaugggaguaaa

SEQ ID NO: 2388382 - RNA, 19 nt, Homo sapiens
  misc_RNA (1)...(19): siRNA sense strand
guccaggaaccuauaaaua

SEQ ID NO: 2388383 - RNA, 19 nt, Homo sapiens
  misc_RNA (1)...(19): siRNA sense strand
acauagaccuggcaguaga

SEQ ID NO: 2388384 - RNA, 19 nt, Homo sapiens
  misc_RNA (1)...(19): siRNA sense strand
ugcaggaacuauaggugua

SEQ ID NO: 2388385 - RNA, 19 nt, Homo sapiens
  misc_RNA (1)...(19): siRNA sense strand
aacaaagaguucaguaaca

SEQ ID NO: 2388386 - RNA, 19 nt, Homo sapiens
  misc_RNA (1)...(19): siRNA sense strand
uggacaaguuucauacauu

SEQ ID NO: 2388387 - RNA, 19 nt, Homo sapiens
  misc_RNA (1)...(19): siRNA sense strand
ucaagcagucagaggaaaa

SEQ ID NO: 2388388 - RNA, 19 nt, Homo sapiens
  misc_RNA (1)...(19): siRNA sense strand
gggaaaugccugcgaacac

SEQ ID NO: 2388389 - RNA, 19 nt, Homo sapiens
  misc_RNA (1)...(19): siRNA sense strand
aaguuugauuugcggacua

SEQ ID NO: 2388390 - RNA, 19 nt, Homo sapiens
  misc_RNA (1)...(19): siRNA sense strand
gcuucauacuguggaggaa

SEQ ID NO: 2388391 - RNA, 19 nt, Homo sapiens
  misc_RNA (1)...(19): siRNA sense strand
ccuuauuuauccacggaga

SEQ ID NO: 2388392 - RNA, 19 nt, Homo sapiens
  misc_RNA (1)...(19): siRNA sense strand
gcguacaaugacagguuau

SEQ ID NO: 2388393 - RNA, 19 nt, Homo sapiens
  misc_RNA (1)...(19): siRNA sense strand
agagagcccuacagagaga

SEQ ID NO: 2388394 - RNA, 19 nt, Homo sapiens
  misc_RNA (1)...(19): siRNA sense strand
aaguugaaaucuggugaaa

SEQ ID NO: 2388395 - RNA, 19 nt, Homo sapiens
  misc_RNA (1)...(19): siRNA sense strand
ccuuuggacucauguauau

SEQ ID NO: 2388396 - RNA, 19 nt, Homo sapiens
  misc_RNA (1)...(19): siRNA sense strand
ugauagaaagugccaacua

SEQ ID NO: 2388397 - RNA, 19 nt, Homo sapiens
  misc_RNA (1)...(19): siRNA sense strand
cagcauuaaagguggacaa

SEQ ID NO: 2388398 - RNA, 19 nt, Homo sapiens
  misc_RNA (1)...(19): siRNA sense strand
gggaaaaggaaaagcaaga

SEQ ID NO: 2388399 - RNA, 19 nt, Homo sapiens
  misc_RNA (1)...(19): siRNA sense strand
aggcaguagccgaggaaga

SEQ ID NO: 2388400 - RNA, 19 nt, Homo sapiens
  misc_RNA (1)...(19): siRNA sense strand
gcgcugacggagagguuaa

SEQ ID NO: 2388401 - RNA, 19 nt, Homo sapiens
  misc_RNA (1)...(19): siRNA sense strand
aguuaaacaguaagaggaa

SEQ ID NO: 2388402 - RNA, 19 nt, Homo sapiens
  misc_RNA (1)...(19): siRNA sense strand
uggaggaggaggagggaga

SEQ ID NO: 2388403 - RNA, 19 nt, Homo sapiens
  misc_RNA (1)...(19): siRNA sense strand
aggaggagguggaggagga

SEQ ID NO: 2388404 - RNA, 19 nt, Homo sapiens
  misc_RNA (1)...(19): siRNA sense strand
gagcggagcacaaggguga

SEQ ID NO: 2388405 - RNA, 19 nt, Homo sapiens
  misc_RNA (1)...(19): siRNA sense strand
uaggaugggaagaggcaua

SEQ ID NO: 2388406 - RNA, 19 nt, Homo sapiens
  misc_RNA (1)...(19): siRNA sense strand
guucagucuuucagggaga

SEQ ID NO: 2388407 - RNA, 19 nt, Homo sapiens
  misc_RNA (1)...(19): siRNA sense strand
ugaggagaccagugagaau

SEQ ID NO: 2388408 - RNA, 19 nt, Homo sapiens
  misc_RNA (1)...(19): siRNA sense strand
ccgaggaagaggaggagga

SEQ ID NO: 2388409 - RNA, 19 nt, Homo sapiens
  misc_RNA (1)...(19): siRNA sense strand
ggccagagcuguaaggaac

SEQ ID NO: 2388410 - RNA, 19 nt, Homo sapiens
  misc_RNA (1)...(19): siRNA sense strand
aggaagaggaggaggaggu

SEQ ID NO: 2388411 - RNA, 19 nt, Homo sapiens
  misc_RNA (1)...(19): siRNA sense strand
gggagaaggagcugccaca

SEQ ID NO: 2388412 - RNA, 19 nt, Homo sapiens
  misc_RNA (1)...(19): siRNA sense strand
gcuauuaccuguggggaaa

SEQ ID NO: 2388413 - RNA, 19 nt, Homo sapiens
  misc_RNA (1)...(19): siRNA sense strand
gcgacaagaaccuggcaca

SEQ ID NO: 2388414 - RNA, 19 nt, Homo sapiens
  misc_RNA (1)...(19): siRNA sense strand
ggaggagggagaagaggau

SEQ ID NO: 2388415 - RNA, 19 nt, Homo sapiens
  misc_RNA (1)...(19): siRNA sense strand
augaagaggcuaagagaag

SEQ ID NO: 2388416 - RNA, 19 nt, Homo sapiens
  misc_RNA (1)...(19): siRNA sense strand
gcuaagagaaggaucgcca

SEQ ID NO: 2388417 - RNA, 19 nt, Homo sapiens
  misc_RNA (1)...(19): siRNA sense strand
aaccaggaacggagggcaa

SEQ ID NO: 2388418 - RNA, 19 nt, Homo sapiens
  misc_RNA (1)...(19): siRNA sense strand
uggaacaagccaagagcca

SEQ ID NO: 2388419 - RNA, 19 nt, Homo sapiens
  misc_RNA (1)...(19): siRNA sense strand
ugagagaacuggaggaagc

SEQ ID NO: 2388420 - RNA, 19 nt, Homo sapiens
  misc_RNA (1)...(19): siRNA sense strand
agacagacaucucgggaag

SEQ ID NO: 2388421 - RNA, 19 nt, Homo sapiens
  misc_RNA (1)...(19): siRNA sense strand
aggccagagcuguaaggaa

SEQ ID NO: 2388422 - RNA, 19 nt, Homo sapiens
  misc_RNA (1)...(19): siRNA sense strand
aggaggaggagguggagga

SEQ ID NO: 2388423 - RNA, 19 nt, Homo sapiens
  misc_RNA (1)...(19): siRNA sense strand
uaaucauccagcugaguaa

SEQ ID NO: 2388424 - RNA, 19 nt, Homo sapiens
  misc_RNA (1)...(19): siRNA sense strand
ggcuauuaccuguggggaa

SEQ ID NO: 2388425 - RNA, 19 nt, Homo sapiens
  misc_RNA (1)...(19): siRNA sense strand
agguggacaaagagaccaa

SEQ ID NO: 2388426 - RNA, 19 nt, Homo sapiens
  misc_RNA (1)...(19): siRNA sense strand
ggaagaggcauaugaccca

SEQ ID NO: 2388427 - RNA, 19 nt, Homo sapiens
  misc_RNA (1)...(19): siRNA sense strand
acgaggaugagguggccaa

SEQ ID NO: 2388428 - RNA, 19 nt, Homo sapiens
  misc_RNA (1)...(19): siRNA sense strand
cagacagacaagaugauga

SEQ ID NO: 2388429 - RNA, 19 nt, Homo sapiens
  misc_RNA (1)...(19): siRNA sense strand
gugcacaaaaggagaucua

SEQ ID NO: 2388430 - RNA, 19 nt, Homo sapiens
  misc_RNA (1)...(19): siRNA sense strand
gagauuacuucauagacca

SEQ ID NO: 2388431 - RNA, 19 nt, Homo sapiens
  misc_RNA (1)...(19): siRNA sense strand
cagaagaccuuaagagucg

SEQ ID NO: 2388432 - RNA, 19 nt, Homo sapiens
  misc_RNA (1)...(19): siRNA sense strand
gcagggagcucaagccagu

SEQ ID NO: 2388433 - RNA, 19 nt, Homo sapiens
  misc_RNA (1)...(19): siRNA sense strand
ucauagaccacaacaccaa

SEQ ID NO: 2388434 - RNA, 19 nt, Homo sapiens
  misc_RNA (1)...(19): siRNA sense strand
gcuacaaacuggaugaagc

SEQ ID NO: 2388435 - RNA, 19 nt, Homo sapiens
  misc_RNA (1)...(19): siRNA sense strand
aagaccagaaagugaauau

SEQ ID NO: 2388436 - RNA, 19 nt, Homo sapiens
  misc_RNA (1)...(19): siRNA sense strand
ugacagugacgaaucggaa

SEQ ID NO: 2388437 - RNA, 19 nt, Homo sapiens
  misc_RNA (1)...(19): siRNA sense strand
cccugaaguaugaugagaa

SEQ ID NO: 2388438 - RNA, 19 nt, Homo sapiens
  misc_RNA (1)...(19): siRNA sense strand
aagaggaggaggaggugga

SEQ ID NO: 2388439 - RNA, 19 nt, Homo sapiens
  misc_RNA (1)...(19): siRNA sense strand
uaugaagaggcuaagagaa

SEQ ID NO: 2388440 - RNA, 19 nt, Homo sapiens
  misc_RNA (1)...(19): siRNA sense strand
gcagagacugggugcuuca

SEQ ID NO: 2388441 - RNA, 19 nt, Homo sapiens
  misc_RNA (1)...(19): siRNA sense strand
aaagagaccaacacggaga

SEQ ID NO: 2388442 - RNA, 19 nt, Homo sapiens
  misc_RNA (1)...(19): siRNA sense strand
cagacagacaucucgggaa

SEQ ID NO: 2388443 - RNA, 19 nt, Homo sapiens
  misc_RNA (1)...(19): siRNA sense strand
gcuucggcaucaacagcaa

SEQ ID NO: 2388444 - RNA, 19 nt, Homo sapiens
  misc_RNA (1)...(19): siRNA sense strand
uugaauaggcaguggcaaa

SEQ ID NO: 2388445 - RNA, 19 nt, Homo sapiens
  misc_RNA (1)...(19): siRNA sense strand
cagcaaugccagagucuaa

SEQ ID NO: 2388446 - RNA, 19 nt, Homo sapiens
  misc_RNA (1)...(19): siRNA sense strand
ugguauaugacuuggauaa

SEQ ID NO: 2388447 - RNA, 19 nt, Homo sapiens
  misc_RNA (1)...(19): siRNA sense strand
guuguaguuuggagggaaa

SEQ ID NO: 2388448 - RNA, 19 nt, Homo sapiens
  misc_RNA (1)...(19): siRNA sense strand
caacauuagagaacacaaa

SEQ ID NO: 2388449 - RNA, 19 nt, Homo sapiens
  misc_RNA (1)...(19): siRNA sense strand
gagagaaaugacagccaaa

SEQ ID NO: 2388450 - RNA, 19 nt, Homo sapiens
  misc_RNA (1)...(19): siRNA sense strand
ugaugaagauacugaguca

SEQ ID NO: 2388451 - RNA, 19 nt, Homo sapiens
  misc_RNA (1)...(19): siRNA sense strand
gggacgaacaauagaagau

SEQ ID NO: 2388452 - RNA, 19 nt, Homo sapiens
  misc_RNA (1)...(19): siRNA sense strand
acuaaugcaaguuggguua

SEQ ID NO: 2388453 - RNA, 19 nt, Homo sapiens
  misc_RNA (1)...(19): siRNA sense strand
gagggaaauaggaguacaa

SEQ ID NO: 2388454 - RNA, 19 nt, Homo sapiens
  misc_RNA (1)...(19): siRNA sense strand
cuuuauggaucuagcaaaa

SEQ ID NO: 2388455 - RNA, 19 nt, Homo sapiens
  misc_RNA (1)...(19): siRNA sense strand
acucagacauaaacagcaa

SEQ ID NO: 2388456 - RNA, 19 nt, Homo sapiens
  misc_RNA (1)...(19): siRNA sense strand
cgagggaacaucugggaau

SEQ ID NO: 2388457 - RNA, 19 nt, Homo sapiens
  misc_RNA (1)...(19): siRNA sense strand
augaagauacugagucaaa

SEQ ID NO: 2388458 - RNA, 19 nt, Homo sapiens
  misc_RNA (1)...(19): siRNA sense strand
caagauauugaaaggcuaa

SEQ ID NO: 2388459 - RNA, 19 nt, Homo sapiens
  misc_RNA (1)...(19): siRNA sense strand
acuuaaugguacagauuca

SEQ ID NO: 2388460 - RNA, 19 nt, Homo sapiens
  misc_RNA (1)...(19): siRNA sense strand
cuaaaggagaugaagguga

SEQ ID NO: 2388461 - RNA, 19 nt, Homo sapiens
  misc_RNA (1)...(19): siRNA sense strand
ggaagagaugggagcaaaa

SEQ ID NO: 2388462 - RNA, 19 nt, Homo sapiens
  misc_RNA (1)...(19): siRNA sense strand
cgaugauauugauguagaa

SEQ ID NO: 2388463 - RNA, 19 nt, Homo sapiens
  misc_RNA (1)...(19): siRNA sense strand
gguacauccuggagaaacu

SEQ ID NO: 2388464 - RNA, 19 nt, Homo sapiens
  misc_RNA (1)...(19): siRNA sense strand
ggagagaaaugacagccaa

SEQ ID NO: 2388465 - RNA, 19 nt, Homo sapiens
  misc_RNA (1)...(19): siRNA sense strand
acaucaaguugggaagaaa

SEQ ID NO: 2388466 - RNA, 19 nt, Homo sapiens
  misc_RNA (1)...(19): siRNA sense strand
ugaagaugaccuagaucaa

SEQ ID NO: 2388467 - RNA, 19 nt, Homo sapiens
  misc_RNA (1)...(19): siRNA sense strand
ggcuaauacaucagaguga

SEQ ID NO: 2388468 - RNA, 19 nt, Homo sapiens
  misc_RNA (1)...(19): siRNA sense strand
uggaagagaugggagcaaa

SEQ ID NO: 2388469 - RNA, 19 nt, Homo sapiens
  misc_RNA (1)...(19): siRNA sense strand
gcagaaaugaagaaggacu

SEQ ID NO: 2388470 - RNA, 19 nt, Homo sapiens
  misc_RNA (1)...(19): siRNA sense strand
aaacaugcucauucggaaa

SEQ ID NO: 2388471 - RNA, 19 nt, Homo sapiens
  misc_RNA (1)...(19): siRNA sense strand
aaagagacaguguggcaua

SEQ ID NO: 2388472 - RNA, 19 nt, Homo sapiens
  misc_RNA (1)...(19): siRNA sense strand
cuuuuguauuugagggaaa

SEQ ID NO: 2388473 - RNA, 19 nt, Homo sapiens
  misc_RNA (1)...(19): siRNA sense strand
gaaacaugcucauucggaa

SEQ ID NO: 2388474 - RNA, 19 nt, Homo sapiens
  misc_RNA (1)...(19): siRNA sense strand
gguguugcuuacagguuua

SEQ ID NO: 2388475 - RNA, 19 nt, Homo sapiens
  misc_RNA (1)...(19): siRNA sense strand
cuuuaaguggagaggauuu

SEQ ID NO: 2388476 - RNA, 19 nt, Homo sapiens
  misc_RNA (1)...(19): siRNA sense strand
guaaugaaggagaacauau

SEQ ID NO: 2388477 - RNA, 19 nt, Homo sapiens
  misc_RNA (1)...(19): siRNA sense strand
ccgaaagaagaauguauuu

SEQ ID NO: 2388478 - RNA, 19 nt, Homo sapiens
  misc_RNA (1)...(19): siRNA sense strand
gauacaggacauugccuaa

SEQ ID NO: 2388479 - RNA, 19 nt, Homo sapiens
  misc_RNA (1)...(19): siRNA sense strand
gguucuacaggaauggaaa

SEQ ID NO: 2388480 - RNA, 19 nt, Homo sapiens
  misc_RNA (1)...(19): siRNA sense strand
uggcucaacuggagaagau

SEQ ID NO: 2388481 - RNA, 19 nt, Homo sapiens
  misc_RNA (1)...(19): siRNA sense strand
caaauuugagucugggaau

SEQ ID NO: 2388482 - RNA, 19 nt, Homo sapiens
  misc_RNA (1)...(19): siRNA sense strand
uggagaaacuaaugcaagu

SEQ ID NO: 2388483 - RNA, 19 nt, Homo sapiens
  misc_RNA (1)...(19): siRNA sense strand
augaaaggaacguuggaau

SEQ ID NO: 2388484 - RNA, 19 nt, Homo sapiens
  misc_RNA (1)...(19): siRNA sense strand
ggaaaauccuacuauacaa

SEQ ID NO: 2388485 - RNA, 19 nt, Homo sapiens
  misc_RNA (1)...(19): siRNA sense strand
gagcaaguuaaaagugaua

SEQ ID NO: 2388486 - RNA, 19 nt, Homo sapiens
  misc_RNA (1)...(19): siRNA sense strand
aaguuguaaugaaggagaa

SEQ ID NO: 2388487 - RNA, 19 nt, Homo sapiens
  misc_RNA (1)...(19): siRNA sense strand
ugaaguaccugauggacca

SEQ ID NO: 2388488 - RNA, 19 nt, Homo sapiens
  misc_RNA (1)...(19): siRNA sense strand
agggaaaauacaaggguuu

SEQ ID NO: 2388489 - RNA, 19 nt, Homo sapiens
  misc_RNA (1)...(19): siRNA sense strand
gguggaggucgaagaguga

SEQ ID NO: 2388490 - RNA, 19 nt, Homo sapiens
  misc_RNA (1)...(19): siRNA sense strand
uggaugacguaguagauga

SEQ ID NO: 2388491 - RNA, 19 nt, Homo sapiens
  misc_RNA (1)...(19): siRNA sense strand
ggaugacguaguagaugaa

SEQ ID NO: 2388492 - RNA, 19 nt, Homo sapiens
  misc_RNA (1)...(19): siRNA sense strand
cguaguagaugaaagugau

SEQ ID NO: 2388493 - RNA, 19 nt, Homo sapiens
  misc_RNA (1)...(19): siRNA sense strand
ucaaagagacaguguggca

SEQ ID NO: 2388494 - RNA, 19 nt, Homo sapiens
  misc_RNA (1)...(19): siRNA sense strand
gauacgggauacaggacau

SEQ ID NO: 2388495 - RNA, 19 nt, Homo sapiens
  misc_RNA (1)...(19): siRNA sense strand
augauaaccggcauagaaa

SEQ ID NO: 2388496 - RNA, 19 nt, Homo sapiens
  misc_RNA (1)...(19): siRNA sense strand
acguaguagaugaaaguga

SEQ ID NO: 2388497 - RNA, 19 nt, Homo sapiens
  misc_RNA (1)...(19): siRNA sense strand
agaugaaagugaugacaac

SEQ ID NO: 2388498 - RNA, 19 nt, Homo sapiens
  misc_RNA (1)...(19): siRNA sense strand
uuguaaugaaggagaacau

SEQ ID NO: 2388499 - RNA, 19 nt, Homo sapiens
  misc_RNA (1)...(19): siRNA sense strand
uucaguauccuuagggaaa

SEQ ID NO: 2388500 - RNA, 19 nt, Homo sapiens
  misc_RNA (1)...(19): siRNA sense strand
aguccaugguuuaaacaau

SEQ ID NO: 2388501 - RNA, 19 nt, Homo sapiens
  misc_RNA (1)...(19): siRNA sense strand
ggauacaggacauugccua

SEQ ID NO: 2388502 - RNA, 19 nt, Homo sapiens
  misc_RNA (1)...(19): siRNA sense strand
uuguggaacugauguuuaa

SEQ ID NO: 2388503 - RNA, 19 nt, Homo sapiens
  misc_RNA (1)...(19): siRNA sense strand
gauaaccggcauagaaaca

SEQ ID NO: 2388504 - RNA, 19 nt, Homo sapiens
  misc_RNA (1)...(19): siRNA sense strand
agucaaauucaucgguaga

SEQ ID NO: 2388505 - RNA, 19 nt, Homo sapiens
  misc_RNA (1)...(19): siRNA sense strand
gugaaaaguccaacaguca

SEQ ID NO: 2388506 - RNA, 19 nt, Homo sapiens
  misc_RNA (1)...(19): siRNA sense strand
cauaauaaaccaaaggcua

SEQ ID NO: 2388507 - RNA, 19 nt, Homo sapiens
  misc_RNA (1)...(19): siRNA sense strand
auguaugaguguagagaau

SEQ ID NO: 2388508 - RNA, 19 nt, Homo sapiens
  misc_RNA (1)...(19): siRNA sense strand
ccggauauguggagggcuu

SEQ ID NO: 2388509 - RNA, 19 nt, Homo sapiens
  misc_RNA (1)...(19): siRNA sense strand
cuguaauggaagagcuaaa

SEQ ID NO: 2388510 - RNA, 19 nt, Homo sapiens
  misc_RNA (1)...(19): siRNA sense strand
gugaaguaguagaagaaaa

SEQ ID NO: 2388511 - RNA, 19 nt, Homo sapiens
  misc_RNA (1)...(19): siRNA sense strand
aggauguuguagagauaaa

SEQ ID NO: 2388512 - RNA, 19 nt, Homo sapiens
  misc_RNA (1)...(19): siRNA sense strand
gggaaguauaggacaguau

SEQ ID NO: 2388513 - RNA, 19 nt, Homo sapiens
  misc_RNA (1)...(19): siRNA sense strand
cagaaacagacuaaguaaa

SEQ ID NO: 2388514 - RNA, 19 nt, Homo sapiens
  misc_RNA (1)...(19): siRNA sense strand
uagugaaacccaagagcua

SEQ ID NO: 2388515 - RNA, 19 nt, Homo sapiens
  misc_RNA (1)...(19): siRNA sense strand
aagaaggcuuggagauaau

SEQ ID NO: 2388516 - RNA, 19 nt, Homo sapiens
  misc_RNA (1)...(19): siRNA sense strand
agaaaauacuccaccaaaa

SEQ ID NO: 2388517 - RNA, 19 nt, Homo sapiens
  misc_RNA (1)...(19): siRNA sense strand
agauaaugauugggaagaa

SEQ ID NO: 2388518 - RNA, 19 nt, Homo sapiens
  misc_RNA (1)...(19): siRNA sense strand
cggaauauucuuuggaguu

SEQ ID NO: 2388519 - RNA, 19 nt, Homo sapiens
  misc_RNA (1)...(19): siRNA sense strand
ggacaaagguucauccagu

SEQ ID NO: 2388520 - RNA, 19 nt, Homo sapiens
  misc_RNA (1)...(19): siRNA sense strand
agaaaggcauccaggguca

SEQ ID NO: 2388521 - RNA, 19 nt, Homo sapiens
  misc_RNA (1)...(19): siRNA sense strand
aagugaaguaguagaagaa

SEQ ID NO: 2388522 - RNA, 19 nt, Homo sapiens
  misc_RNA (1)...(19): siRNA sense strand
gcuagaacucauagaagau

SEQ ID NO: 2388523 - RNA, 19 nt, Homo sapiens
  misc_RNA (1)...(19): siRNA sense strand
uuugaagguuggagaaaca

SEQ ID NO: 2388524 - RNA, 19 nt, Homo sapiens
  misc_RNA (1)...(19): siRNA sense strand
aauaagaucagcaggucaa

SEQ ID NO: 2388525 - RNA, 19 nt, Homo sapiens
  misc_RNA (1)...(19): siRNA sense strand
cuuaaaguaccgaagggaa

SEQ ID NO: 2388526 - RNA, 19 nt, Homo sapiens
  misc_RNA (1)...(19): siRNA sense strand
ccugaaauuugcagaggca

SEQ ID NO: 2388527 - RNA, 19 nt, Homo sapiens
  misc_RNA (1)...(19): siRNA sense strand
acagaaacagacuaaguaa

SEQ ID NO: 2388528 - RNA, 19 nt, Homo sapiens
  misc_RNA (1)...(19): siRNA sense strand
guuaauccucugagaauau

SEQ ID NO: 2388529 - RNA, 19 nt, Homo sapiens
  misc_RNA (1)...(19): siRNA sense strand
ggagauaaugauugggaag

SEQ ID NO: 2388530 - RNA, 19 nt, Homo sapiens
  misc_RNA (1)...(19): siRNA sense strand
augcagcguuacagacaaa

SEQ ID NO: 2388531 - RNA, 19 nt, Homo sapiens
  misc_RNA (1)...(19): siRNA sense strand
cuucagaggcacucgguau

SEQ ID NO: 2388532 - RNA, 19 nt, Homo sapiens
  misc_RNA (1)...(19): siRNA sense strand
cuuaagugaaguaguagaa

SEQ ID NO: 2388533 - RNA, 19 nt, Homo sapiens
  misc_RNA (1)...(19): siRNA sense strand
gcuacugaggacagaaauu

SEQ ID NO: 2388534 - RNA, 19 nt, Homo sapiens
  misc_RNA (1)...(19): siRNA sense strand
aggauuuaccucugaagaa

SEQ ID NO: 2388535 - RNA, 19 nt, Homo sapiens
  misc_RNA (1)...(19): siRNA sense strand
gagcuacugaggacagaaa

SEQ ID NO: 2388536 - RNA, 19 nt, Homo sapiens
  misc_RNA (1)...(19): siRNA sense strand
uggagaaacaauagaaucu

SEQ ID NO: 2388537 - RNA, 19 nt, Homo sapiens
  misc_RNA (1)...(19): siRNA sense strand
ggacaucucagcuggaaaa

SEQ ID NO: 2388538 - RNA, 19 nt, Homo sapiens
  misc_RNA (1)...(19): siRNA sense strand
gauggaaccuucagaggca

SEQ ID NO: 2388539 - RNA, 19 nt, Homo sapiens
  misc_RNA (1)...(19): siRNA sense strand
agcuagaacucauagaaga

SEQ ID NO: 2388540 - RNA, 19 nt, Homo sapiens
  misc_RNA (1)...(19): siRNA sense strand
gagagugugacgcaggaaa

SEQ ID NO: 2388541 - RNA, 19 nt, Homo sapiens
  misc_RNA (1)...(19): siRNA sense strand
ccaauugugaggagagguu

SEQ ID NO: 2388542 - RNA, 19 nt, Homo sapiens
  misc_RNA (1)...(19): siRNA sense strand
ggauggaagauuugaugga

SEQ ID NO: 2388543 - RNA, 19 nt, Homo sapiens
  misc_RNA (1)...(19): siRNA sense strand
ccaagaugcccaauaccaa

SEQ ID NO: 2388544 - RNA, 19 nt, Homo sapiens
  misc_RNA (1)...(19): siRNA sense strand
ugaagaugucucuggaaga

SEQ ID NO: 2388545 - RNA, 19 nt, Homo sapiens
  misc_RNA (1)...(19): siRNA sense strand
gaggagagguucagccugu

SEQ ID NO: 2388546 - RNA, 19 nt, Homo sapiens
  misc_RNA (1)...(19): siRNA sense strand
aaaagaaggcuuggagaua

SEQ ID NO: 2388547 - RNA, 19 nt, Homo sapiens
  misc_RNA (1)...(19): siRNA sense strand
ggucaaaagguacaagauu

SEQ ID NO: 2388548 - RNA, 19 nt, Homo sapiens
  misc_RNA (1)...(19): siRNA sense strand
uggauaacccuauuggcaa

SEQ ID NO: 2388549 - RNA, 19 nt, Homo sapiens
  misc_RNA (1)...(19): siRNA sense strand
uggacaagcuagaacucau

SEQ ID NO: 2388550 - RNA, 19 nt, Homo sapiens
  misc_RNA (1)...(19): siRNA sense strand
aacaauagaaucuggaaca

SEQ ID NO: 2388551 - RNA, 19 nt, Homo sapiens
  misc_RNA (1)...(19): siRNA sense strand
uguuaauccucugagaaua

SEQ ID NO: 2388552 - RNA, 19 nt, Homo sapiens
  misc_RNA (1)...(19): siRNA sense strand
gcuuauggagccaagaaaa

SEQ ID NO: 2388553 - RNA, 19 nt, Homo sapiens
  misc_RNA (1)...(19): siRNA sense strand
uggagauaaugauugggaa

SEQ ID NO: 2388554 - RNA, 19 nt, Homo sapiens
  misc_RNA (1)...(19): siRNA sense strand
ggauaacccuauuggcaac

SEQ ID NO: 2388555 - RNA, 19 nt, Homo sapiens
  misc_RNA (1)...(19): siRNA sense strand
ugauaucaucccagcuuua

SEQ ID NO: 2388556 - RNA, 19 nt, Homo sapiens
  misc_RNA (1)...(19): siRNA sense strand
uuguuaauccucugagaau

SEQ ID NO: 2388557 - RNA, 19 nt, Homo sapiens
  misc_RNA (1)...(19): siRNA sense strand
cucugagaauauauggaua

SEQ ID NO: 2388558 - RNA, 19 nt, Homo sapiens
  misc_RNA (1)...(19): siRNA sense strand
cggacaucucagcuggaaa

SEQ ID NO: 2388559 - RNA, 19 nt, Homo sapiens
  misc_RNA (1)...(19): siRNA sense strand
cguuacagacaaacaaaca

SEQ ID NO: 2388560 - RNA, 19 nt, Homo sapiens
  misc_RNA (1)...(19): siRNA sense strand
agaaaagaacgauguagaa

SEQ ID NO: 2388561 - RNA, 19 nt, Homo sapiens
  misc_RNA (1)...(19): siRNA sense strand
gaagggaaguauaggacag

SEQ ID NO: 2388562 - RNA, 19 nt, Homo sapiens
  misc_RNA (1)...(19): siRNA sense strand
gagauaaugauugggaaga

SEQ ID NO: 2388563 - RNA, 19 nt, Homo sapiens
  misc_RNA (1)...(19): siRNA sense strand
acagacaaacaaacacaaa

SEQ ID NO: 2388564 - RNA, 19 nt, Homo sapiens
  misc_RNA (1)...(19): siRNA sense strand
ucgggaugguggucagaau

SEQ ID NO: 2388565 - RNA, 19 nt, Homo sapiens
  misc_RNA (1)...(19): siRNA sense strand
ccggaauauucuuuggagu

SEQ ID NO: 2388566 - RNA, 19 nt, Homo sapiens
  misc_RNA (1)...(19): siRNA sense strand
cagcuuuaucagagagugu

SEQ ID NO: 2388567 - RNA, 19 nt, Homo sapiens
  misc_RNA (1)...(19): siRNA sense strand
uugaugaaguugcagaaga

SEQ ID NO: 2388568 - RNA, 19 nt, Homo sapiens
  misc_RNA (1)...(19): siRNA sense strand
gcccaauaccaauggaagu

SEQ ID NO: 2388569 - RNA, 19 nt, Homo sapiens
  misc_RNA (1)...(19): siRNA sense strand
cagaguuacuuuuggcaau

SEQ ID NO: 2388570 - RNA, 19 nt, Homo sapiens
  misc_RNA (1)...(19): siRNA sense strand
guaccaagggaaacagcuu

SEQ ID NO: 2388571 - RNA, 19 nt, Homo sapiens
  misc_RNA (1)...(19): siRNA sense strand
accaaaggcuacaggaucu

SEQ ID NO: 2388572 - RNA, 19 nt, Homo sapiens
  misc_RNA (1)...(19): siRNA sense strand
ggaacuggaagaugagugu

SEQ ID NO: 2388573 - RNA, 19 nt, Homo sapiens
  misc_RNA (1)...(19): siRNA sense strand
aagaaaagaacgauguaga

SEQ ID NO: 2388574 - RNA, 19 nt, Homo sapiens
  misc_RNA (1)...(19): siRNA sense strand
cggaacuggaggaggagaa

SEQ ID NO: 2388575 - RNA, 19 nt, Homo sapiens
  misc_RNA (1)...(19): siRNA sense strand
gcuaugaggcugagggcca

SEQ ID NO: 2388576 - RNA, 19 nt, Homo sapiens
  misc_RNA (1)...(19): siRNA sense strand
augcagauggagcgggaaa

SEQ ID NO: 2388577 - RNA, 19 nt, Homo sapiens
  misc_RNA (1)...(19): siRNA sense strand
aggagaagcaccagcucaa

SEQ ID NO: 2388578 - RNA, 19 nt, Homo sapiens
  misc_RNA (1)...(19): siRNA sense strand
acucggaacuggaggagga

SEQ ID NO: 2388579 - RNA, 19 nt, Homo sapiens
  misc_RNA (1)...(19): siRNA sense strand
ggcuggagaaggagcuaaa

SEQ ID NO: 2388580 - RNA, 19 nt, Homo sapiens
  misc_RNA (1)...(19): siRNA sense strand
ccgccguggacaaggacaa

SEQ ID NO: 2388581 - RNA, 19 nt, Homo sapiens
  misc_RNA (1)...(19): siRNA sense strand
ggaaggugcuagagcugca

SEQ ID NO: 2388582 - RNA, 19 nt, Homo sapiens
  misc_RNA (1)...(19): siRNA sense strand
gcaaugagcucaaggcccu

SEQ ID NO: 2388583 - RNA, 19 nt, Homo sapiens
  misc_RNA (1)...(19): siRNA sense strand
gcccaggagcugaaggaga

SEQ ID NO: 2388584 - RNA, 19 nt, Homo sapiens
  misc_RNA (1)...(19): siRNA sense strand
agcuaaagaaggugagcga

SEQ ID NO: 2388585 - RNA, 19 nt, Homo sapiens
  misc_RNA (1)...(19): siRNA sense strand
gaacagcaggagaagguga

SEQ ID NO: 2388586 - RNA, 19 nt, Homo sapiens
  misc_RNA (1)...(19): siRNA sense strand
agaagaacagccugcgcaa

SEQ ID NO: 2388587 - RNA, 19 nt, Homo sapiens
  misc_RNA (1)...(19): siRNA sense strand
ccaugaugaagcugcgcaa

SEQ ID NO: 2388588 - RNA, 19 nt, Homo sapiens
  misc_RNA (1)...(19): siRNA sense strand
acaagaagguggcugcuga

SEQ ID NO: 2388589 - RNA, 19 nt, Homo sapiens
  misc_RNA (1)...(19): siRNA sense strand
ccgaguaccucaacagcca

SEQ ID NO: 2388590 - RNA, 19 nt, Homo sapiens
  misc_RNA (1)...(19): siRNA sense strand
gcaaguaccauguggcugu

SEQ ID NO: 2388591 - RNA, 19 nt, Homo sapiens
  misc_RNA (1)...(19): siRNA sense strand
gggacuacuacgaggugga

SEQ ID NO: 2388592 - RNA, 19 nt, Homo sapiens
  misc_RNA (1)...(19): siRNA sense strand
aggaagcgcuuauggagga

SEQ ID NO: 2388593 - RNA, 19 nt, Homo sapiens
  misc_RNA (1)...(19): siRNA sense strand
agguggaguuugagggccu

SEQ ID NO: 2388594 - RNA, 19 nt, Homo sapiens
  misc_RNA (1)...(19): siRNA sense strand
ccaagcugccacuggacaa

SEQ ID NO: 2388595 - RNA, 19 nt, Homo sapiens
  misc_RNA (1)...(19): siRNA sense strand
aggacaaggaagcgcuuau

SEQ ID NO: 2388596 - RNA, 19 nt, Homo sapiens
  misc_RNA (1)...(19): siRNA sense strand
agcugaagcaguugcgcaa

SEQ ID NO: 2388597 - RNA, 19 nt, Homo sapiens
  misc_RNA (1)...(19): siRNA sense strand
acuacuacgagguggacau

SEQ ID NO: 2388598 - RNA, 19 nt, Homo sapiens
  misc_RNA (1)...(19): siRNA sense strand
ccucaaguucagugacgau

SEQ ID NO: 2388599 - RNA, 19 nt, Homo sapiens
  misc_RNA (1)...(19): siRNA sense strand
uggaugagaugcagcggca

SEQ ID NO: 2388600 - RNA, 19 nt, Homo sapiens
  misc_RNA (1)...(19): siRNA sense strand
agguggacuaugaggcuau

SEQ ID NO: 2388601 - RNA, 19 nt, Homo sapiens
  misc_RNA (1)...(19): siRNA sense strand
gaggcuauccgcagcgaga

SEQ ID NO: 2388602 - RNA, 19 nt, Homo sapiens
  misc_RNA (1)...(19): siRNA sense strand
ggcagacagcccuggacaa

SEQ ID NO: 2388603 - RNA, 19 nt, Homo sapiens
  misc_RNA (1)...(19): siRNA sense strand
cggaagaauuugaagacaa

SEQ ID NO: 2388604 - RNA, 19 nt, Homo sapiens
  misc_RNA (1)...(19): siRNA sense strand
agugauaagaagaaggaua

SEQ ID NO: 2388605 - RNA, 19 nt, Homo sapiens
  misc_RNA (1)...(19): siRNA sense strand
agaaaggaaaugaggagaa

SEQ ID NO: 2388606 - RNA, 19 nt, Homo sapiens
  misc_RNA (1)...(19): siRNA sense strand
uguaggagguggagaugaa

SEQ ID NO: 2388607 - RNA, 19 nt, Homo sapiens
  misc_RNA (1)...(19): siRNA sense strand
aagaagaagaugagcauuu

SEQ ID NO: 2388608 - RNA, 19 nt, Homo sapiens
  misc_RNA (1)...(19): siRNA sense strand
cagaagaugaagugcuuaa

SEQ ID NO: 2388609 - RNA, 19 nt, Homo sapiens
  misc_RNA (1)...(19): siRNA sense strand
gugauaagaagaaggauau

SEQ ID NO: 2388610 - RNA, 19 nt, Homo sapiens
  misc_RNA (1)...(19): siRNA sense strand
aaagaaaggucaaaggcau

SEQ ID NO: 2388611 - RNA, 19 nt, Homo sapiens
  misc_RNA (1)...(19): siRNA sense strand
ggucaaaggcaucuggaga

SEQ ID NO: 2388612 - RNA, 19 nt, Homo sapiens
  misc_RNA (1)...(19): siRNA sense strand
aagaagaagaauuggauga

SEQ ID NO: 2388613 - RNA, 19 nt, Homo sapiens
  misc_RNA (1)...(19): siRNA sense strand
gaggaaaacagcaguaaaa

SEQ ID NO: 2388614 - RNA, 19 nt, Homo sapiens
  misc_RNA (1)...(19): siRNA sense strand
cgaagaagaagaugagcau

SEQ ID NO: 2388615 - RNA, 19 nt, Homo sapiens
  misc_RNA (1)...(19): siRNA sense strand
aaauaugcguucagcuaaa

SEQ ID NO: 2388616 - RNA, 19 nt, Homo sapiens
  misc_RNA (1)...(19): siRNA sense strand
acuaaaugucguucagaua

SEQ ID NO: 2388617 - RNA, 19 nt, Homo sapiens
  misc_RNA (1)...(19): siRNA sense strand
agaauagaccagagaugaa

SEQ ID NO: 2388618 - RNA, 19 nt, Homo sapiens
  misc_RNA (1)...(19): siRNA sense strand
cagaagaagaagaagcuau

SEQ ID NO: 2388619 - RNA, 19 nt, Homo sapiens
  misc_RNA (1)...(19): siRNA sense strand
caauacaggaagauacaaa

SEQ ID NO: 2388620 - RNA, 19 nt, Homo sapiens
  misc_RNA (1)...(19): siRNA sense strand
aauaaaggguucaaagaca

SEQ ID NO: 2388621 - RNA, 19 nt, Homo sapiens
  misc_RNA (1)...(19): siRNA sense strand
gaucaagaugacugcauaa

SEQ ID NO: 2388622 - RNA, 19 nt, Homo sapiens
  misc_RNA (1)...(19): siRNA sense strand
uggccaagaaagaggagaa

SEQ ID NO: 2388623 - RNA, 19 nt, Homo sapiens
  misc_RNA (1)...(19): siRNA sense strand
gggcgaaagccaaaugcua

SEQ ID NO: 2388624 - RNA, 19 nt, Homo sapiens
  misc_RNA (1)...(19): siRNA sense strand
ccacuuuagaccagauuua

SEQ ID NO: 2388625 - RNA, 19 nt, Homo sapiens
  misc_RNA (1)...(19): siRNA sense strand
ccaagaaagaggagaaaug

SEQ ID NO: 2388626 - RNA, 19 nt, Homo sapiens
  misc_RNA (1)...(19): siRNA sense strand
augaaaaggcagagaucaa

SEQ ID NO: 2388627 - RNA, 19 nt, Homo sapiens
  misc_RNA (1)...(19): siRNA sense strand
aggaaggaacacagaagaa

SEQ ID NO: 2388628 - RNA, 19 nt, Homo sapiens
  misc_RNA (1)...(19): siRNA sense strand
cugcauaaagcaagcaaau

SEQ ID NO: 2388629 - RNA, 19 nt, Homo sapiens
  misc_RNA (1)...(19): siRNA sense strand
agaagaagccgaaggaagu

SEQ ID NO: 2388630 - RNA, 19 nt, Homo sapiens
  misc_RNA (1)...(19): siRNA sense strand
aggaaaagccacagaugaa

SEQ ID NO: 2388631 - RNA, 19 nt, Homo sapiens
  misc_RNA (1)...(19): siRNA sense strand
ccucaagauauuaaagaga

SEQ ID NO: 2388632 - RNA, 19 nt, Homo sapiens
  misc_RNA (1)...(19): siRNA sense strand
ggaaacuaugaaacagaua

SEQ ID NO: 2388633 - RNA, 19 nt, Homo sapiens
  misc_RNA (1)...(19): siRNA sense strand
acaagaagaacuuaaggaa

SEQ ID NO: 2388634 - RNA, 19 nt, Homo sapiens
  misc_RNA (1)...(19): siRNA sense strand
cgguaguaacuuggagaaa

SEQ ID NO: 2388635 - RNA, 19 nt, Homo sapiens
  misc_RNA (1)...(19): siRNA sense strand
ggaagagacugcagcgugu

SEQ ID NO: 2388636 - RNA, 19 nt, Homo sapiens
  misc_RNA (1)...(19): siRNA sense strand
aagaaauggcaaccagaua

SEQ ID NO: 2388637 - RNA, 19 nt, Homo sapiens
  misc_RNA (1)...(19): siRNA sense strand
cagaagaagccgaaggaag

SEQ ID NO: 2388638 - RNA, 19 nt, Homo sapiens
  misc_RNA (1)...(19): siRNA sense strand
gaugaugagaacagaguga

SEQ ID NO: 2388639 - RNA, 19 nt, Homo sapiens
  misc_RNA (1)...(19): siRNA sense strand
agaacaugauuuagaacga

SEQ ID NO: 2388640 - RNA, 19 nt, Homo sapiens
  misc_RNA (1)...(19): siRNA sense strand
ggagcgaacucuggagcaa

SEQ ID NO: 2388641 - RNA, 19 nt, Homo sapiens
  misc_RNA (1)...(19): siRNA sense strand
cagagugaaccaagaagaa

SEQ ID NO: 2388642 - RNA, 19 nt, Homo sapiens
  misc_RNA (1)...(19): siRNA sense strand
gagugaaccaagaagaaaa

SEQ ID NO: 2388643 - RNA, 19 nt, Homo sapiens
  misc_RNA (1)...(19): siRNA sense strand
gcaaguaccucuaugcuga

SEQ ID NO: 2388644 - RNA, 19 nt, Homo sapiens
  misc_RNA (1)...(19): siRNA sense strand
agucagaaagugagcauca

SEQ ID NO: 2388645 - RNA, 19 nt, Homo sapiens
  misc_RNA (1)...(19): siRNA sense strand
gggaauaagcacaauacca

SEQ ID NO: 2388646 - RNA, 19 nt, Homo sapiens
  misc_RNA (1)...(19): siRNA sense strand
gugaaauggcugcagaaaa

SEQ ID NO: 2388647 - RNA, 19 nt, Homo sapiens
  misc_RNA (1)...(19): siRNA sense strand
ccuugauacucccgaacaa

SEQ ID NO: 2388648 - RNA, 19 nt, Homo sapiens
  misc_RNA (1)...(19): siRNA sense strand
gcuucaaacucuagacauc

SEQ ID NO: 2388649 - RNA, 19 nt, Homo sapiens
  misc_RNA (1)...(19): siRNA sense strand
acuuaaggaaagagcaaga

SEQ ID NO: 2388650 - RNA, 19 nt, Homo sapiens
  misc_RNA (1)...(19): siRNA sense strand
ucgaagaagauaaugaaga

SEQ ID NO: 2388651 - RNA, 19 nt, Homo sapiens
  misc_RNA (1)...(19): siRNA sense strand
ccgaagaagaagaugagca

SEQ ID NO: 2388652 - RNA, 19 nt, Homo sapiens
  misc_RNA (1)...(19): siRNA sense strand
gagaaugagcaaaagcaaa

SEQ ID NO: 2388653 - RNA, 19 nt, Homo sapiens
  misc_RNA (1)...(19): siRNA sense strand
acuagaaacugaaaggcga

SEQ ID NO: 2388654 - RNA, 19 nt, Homo sapiens
  misc_RNA (1)...(19): siRNA sense strand
uuucaguggccaagaacua

SEQ ID NO: 2388655 - RNA, 19 nt, Homo sapiens
  misc_RNA (1)...(19): siRNA sense strand
agagaucaauacaggaaga

SEQ ID NO: 2388656 - RNA, 19 nt, Homo sapiens
  misc_RNA (1)...(19): siRNA sense strand
aagaagaauuggaugaauc

SEQ ID NO: 2388657 - RNA, 19 nt, Homo sapiens
  misc_RNA (1)...(19): siRNA sense strand
aacugaaaggcgagugaaa

SEQ ID NO: 2388658 - RNA, 19 nt, Homo sapiens
  misc_RNA (1)...(19): siRNA sense strand
uuuacuacaucguggagaa

SEQ ID NO: 2388659 - RNA, 19 nt, Homo sapiens
  misc_RNA (1)...(19): siRNA sense strand
ugauuuagaacgacgguau

SEQ ID NO: 2388660 - RNA, 19 nt, Homo sapiens
  misc_RNA (1)...(19): siRNA sense strand
ucugaauccucaagauauu

SEQ ID NO: 2388661 - RNA, 19 nt, Homo sapiens
  misc_RNA (1)...(19): siRNA sense strand
ggaacacagaagaagaaga

SEQ ID NO: 2388662 - RNA, 19 nt, Homo sapiens
  misc_RNA (1)...(19): siRNA sense strand
augaagaugaugaugagaa

SEQ ID NO: 2388663 - RNA, 19 nt, Homo sapiens
  misc_RNA (1)...(19): siRNA sense strand
agacuuuagaauugaguga

SEQ ID NO: 2388664 - RNA, 19 nt, Homo sapiens
  misc_RNA (1)...(19): siRNA sense strand
gggaagaagaagaggaguu

SEQ ID NO: 2388665 - RNA, 19 nt, Homo sapiens
  misc_RNA (1)...(19): siRNA sense strand
cguugaugucugaggguaa

SEQ ID NO: 2388666 - RNA, 19 nt, Homo sapiens
  misc_RNA (1)...(19): siRNA sense strand
ugggacaucuggagagaaa

SEQ ID NO: 2388667 - RNA, 19 nt, Homo sapiens
  misc_RNA (1)...(19): siRNA sense strand
ccgggaagaaguugagaaa

SEQ ID NO: 2388668 - RNA, 19 nt, Homo sapiens
  misc_RNA (1)...(19): siRNA sense strand
aggaagacauggacagcua

SEQ ID NO: 2388669 - RNA, 19 nt, Homo sapiens
  misc_RNA (1)...(19): siRNA sense strand
ggugagaagaaaaggaaaa

SEQ ID NO: 2388670 - RNA, 19 nt, Homo sapiens
  misc_RNA (1)...(19): siRNA sense strand
guugaaagucagagagcau

SEQ ID NO: 2388671 - RNA, 19 nt, Homo sapiens
  misc_RNA (1)...(19): siRNA sense strand
cagaagaacaccagaacau

SEQ ID NO: 2388672 - RNA, 19 nt, Homo sapiens
  misc_RNA (1)...(19): siRNA sense strand
guggaaagagugugaagaa

SEQ ID NO: 2388673 - RNA, 19 nt, Homo sapiens
  misc_RNA (1)...(19): siRNA sense strand
agaacaaacuggugugcau

SEQ ID NO: 2388674 - RNA, 19 nt, Homo sapiens
  misc_RNA (1)...(19): siRNA sense strand
gaagaaaaggaaaaggaaa

SEQ ID NO: 2388675 - RNA, 19 nt, Homo sapiens
  misc_RNA (1)...(19): siRNA sense strand
ugaccaaagcagaggcaau

SEQ ID NO: 2388676 - RNA, 19 nt, Homo sapiens
  misc_RNA (1)...(19): siRNA sense strand
ggaggagaaauuaaggaaa

SEQ ID NO: 2388677 - RNA, 19 nt, Homo sapiens
  misc_RNA (1)...(19): siRNA sense strand
cuggagagaaagugggcaa

SEQ ID NO: 2388678 - RNA, 19 nt, Homo sapiens
  misc_RNA (1)...(19): siRNA sense strand
aagcagaacgagaggauga

SEQ ID NO: 2388679 - RNA, 19 nt, Homo sapiens
  misc_RNA (1)...(19): siRNA sense strand
ccacaagcuacaaggauau

SEQ ID NO: 2388680 - RNA, 19 nt, Homo sapiens
  misc_RNA (1)...(19): siRNA sense strand
cgucagaaggccagguuau

SEQ ID NO: 2388681 - RNA, 19 nt, Homo sapiens
  misc_RNA (1)...(19): siRNA sense strand
ugucaguaaacgugauaaa

SEQ ID NO: 2388682 - RNA, 19 nt, Homo sapiens
  misc_RNA (1)...(19): siRNA sense strand
agaucagagugcuggcaaa

SEQ ID NO: 2388683 - RNA, 19 nt, Homo sapiens
  misc_RNA (1)...(19): siRNA sense strand
agaagauaacccaguaaua

SEQ ID NO: 2388684 - RNA, 19 nt, Homo sapiens
  misc_RNA (1)...(19): siRNA sense strand
caauugaaguauauggaca

SEQ ID NO: 2388685 - RNA, 19 nt, Homo sapiens
  misc_RNA (1)...(19): siRNA sense strand
aggaacaguuaacaggaaa

SEQ ID NO: 2388686 - RNA, 19 nt, Homo sapiens
  misc_RNA (1)...(19): siRNA sense strand
ugcaaaagcuugucaguaa

SEQ ID NO: 2388687 - RNA, 19 nt, Homo sapiens
  misc_RNA (1)...(19): siRNA sense strand
uggcauuggaugugucaaa

SEQ ID NO: 2388688 - RNA, 19 nt, Homo sapiens
  misc_RNA (1)...(19): siRNA sense strand
gggaggagaaauuaaggaa

SEQ ID NO: 2388689 - RNA, 19 nt, Homo sapiens
  misc_RNA (1)...(19): siRNA sense strand
cagcaaauucccaagauau

SEQ ID NO: 2388690 - RNA, 19 nt, Homo sapiens
  misc_RNA (1)...(19): siRNA sense strand
ggcuaaaugcauuaacaaa

SEQ ID NO: 2388691 - RNA, 19 nt, Homo sapiens
  misc_RNA (1)...(19): siRNA sense strand
aagcaguacuucaggugua

SEQ ID NO: 2388692 - RNA, 19 nt, Homo sapiens
  misc_RNA (1)...(19): siRNA sense strand
auuaaacagccuagaacaa

SEQ ID NO: 2388693 - RNA, 19 nt, Homo sapiens
  misc_RNA (1)...(19): siRNA sense strand
aaguugagcaggaggagua

SEQ ID NO: 2388694 - RNA, 19 nt, Homo sapiens
  misc_RNA (1)...(19): siRNA sense strand
gaacucagaaagaggaaaa

SEQ ID NO: 2388695 - RNA, 19 nt, Homo sapiens
  misc_RNA (1)...(19): siRNA sense strand
ccggagaguucaagucgaa

SEQ ID NO: 2388696 - RNA, 19 nt, Homo sapiens
  misc_RNA (1)...(19): siRNA sense strand
gggaagcauuagcaagaau

SEQ ID NO: 2388697 - RNA, 19 nt, Homo sapiens
  misc_RNA (1)...(19): siRNA sense strand
agagagacuucguagaaaa

SEQ ID NO: 2388698 - RNA, 19 nt, Homo sapiens
  misc_RNA (1)...(19): siRNA sense strand
ugaccugggaggagaaauu

SEQ ID NO: 2388699 - RNA, 19 nt, Homo sapiens
  misc_RNA (1)...(19): siRNA sense strand
acaacagcaugaagaagaa

SEQ ID NO: 2388700 - RNA, 19 nt, Homo sapiens
  misc_RNA (1)...(19): siRNA sense strand
caagagaaucugugucaau

SEQ ID NO: 2388701 - RNA, 19 nt, Homo sapiens
  misc_RNA (1)...(19): siRNA sense strand
ugaaaucuccagagcuaaa

SEQ ID NO: 2388702 - RNA, 19 nt, Homo sapiens
  misc_RNA (1)...(19): siRNA sense strand
gaacauacauugauagggu

SEQ ID NO: 2388703 - RNA, 19 nt, Homo sapiens
  misc_RNA (1)...(19): siRNA sense strand
gcagaagccuccugggacu

SEQ ID NO: 2388704 - RNA, 19 nt, Homo sapiens
  misc_RNA (1)...(19): siRNA sense strand
uggaagaacgggaagcauu

SEQ ID NO: 2388705 - RNA, 19 nt, Homo sapiens
  misc_RNA (1)...(19): siRNA sense strand
agagaagcaacguugaaua

SEQ ID NO: 2388706 - RNA, 19 nt, Homo sapiens
  misc_RNA (1)...(19): siRNA sense strand
cugcugacucggaggcuua

SEQ ID NO: 2388707 - RNA, 19 nt, Homo sapiens
  misc_RNA (1)...(19): siRNA sense strand
uaaacaacgcuguggugaa

SEQ ID NO: 2388708 - RNA, 19 nt, Homo sapiens
  misc_RNA (1)...(19): siRNA sense strand
ggauaaaagaacagaauac

SEQ ID NO: 2388709 - RNA, 19 nt, Homo sapiens
  misc_RNA (1)...(19): siRNA sense strand
uaacaaaacgucaggagua

SEQ ID NO: 2388710 - RNA, 19 nt, Homo sapiens
  misc_RNA (1)...(19): siRNA sense strand
gugauaaaacagaggauga

SEQ ID NO: 2388711 - RNA, 19 nt, Homo sapiens
  misc_RNA (1)...(19): siRNA sense strand
cuccaaaugugaacagauu

SEQ ID NO: 2388712 - RNA, 19 nt, Homo sapiens
  misc_RNA (1)...(19): siRNA sense strand
cuugaagaucugcgacaaa

SEQ ID NO: 2388713 - RNA, 19 nt, Homo sapiens
  misc_RNA (1)...(19): siRNA sense strand
gaugaaucugucaaagaaa

SEQ ID NO: 2388714 - RNA, 19 nt, Homo sapiens
  misc_RNA (1)...(19): siRNA sense strand
uugcugaggagcuggauaa

SEQ ID NO: 2388715 - RNA, 19 nt, Homo sapiens
  misc_RNA (1)...(19): siRNA sense strand
cuucaaacgugcugaucca

SEQ ID NO: 2388716 - RNA, 19 nt, Homo sapiens
  misc_RNA (1)...(19): siRNA sense strand
gggaaagucagcaggaugu

SEQ ID NO: 2388717 - RNA, 19 nt, Homo sapiens
  misc_RNA (1)...(19): siRNA sense strand
ccacaagaacccugagaac

SEQ ID NO: 2388718 - RNA, 19 nt, Homo sapiens
  misc_RNA (1)...(19): siRNA sense strand
ugguggauguggaugcaaa

SEQ ID NO: 2388719 - RNA, 19 nt, Homo sapiens
  misc_RNA (1)...(19): siRNA sense strand
ccucagaagaacaccagaa

SEQ ID NO: 2388720 - RNA, 19 nt, Homo sapiens
  misc_RNA (1)...(19): siRNA sense strand
ccaugaagaacgagaauag

SEQ ID NO: 2388721 - RNA, 19 nt, Homo sapiens
  misc_RNA (1)...(19): siRNA sense strand
ggauaaucuugaugaccca

SEQ ID NO: 2388722 - RNA, 19 nt, Homo sapiens
  misc_RNA (1)...(19): siRNA sense strand
aaaggaaaguugagcagga

SEQ ID NO: 2388723 - RNA, 19 nt, Homo sapiens
  misc_RNA (1)...(19): siRNA sense strand
gaagaaucugagaagcuaa

SEQ ID NO: 2388724 - RNA, 19 nt, Homo sapiens
  misc_RNA (1)...(19): siRNA sense strand
gcaaaagcuugucaguaaa

SEQ ID NO: 2388725 - RNA, 19 nt, Homo sapiens
  misc_RNA (1)...(19): siRNA sense strand
aaacagaggaugaugcuga

SEQ ID NO: 2388726 - RNA, 19 nt, Homo sapiens
  misc_RNA (1)...(19): siRNA sense strand
cgacagaaacagcuugaga

SEQ ID NO: 2388727 - RNA, 19 nt, Homo sapiens
  misc_RNA (1)...(19): siRNA sense strand
gggaaauagcaguggagua

SEQ ID NO: 2388728 - RNA, 19 nt, Homo sapiens
  misc_RNA (1)...(19): siRNA sense strand
aguauaacaccaugggaaa

SEQ ID NO: 2388729 - RNA, 19 nt, Homo sapiens
  misc_RNA (1)...(19): siRNA sense strand
caugcagaaugaagggaaa

SEQ ID NO: 2388730 - RNA, 19 nt, Homo sapiens
  misc_RNA (1)...(19): siRNA sense strand
gaguauaacaccaugggaa

SEQ ID NO: 2388731 - RNA, 19 nt, Homo sapiens
  misc_RNA (1)...(19): siRNA sense strand
agacaagaagggagugauu

SEQ ID NO: 2388732 - RNA, 19 nt, Homo sapiens
  misc_RNA (1)...(19): siRNA sense strand
ugauggagucgaagacaaa

SEQ ID NO: 2388733 - RNA, 19 nt, Homo sapiens
  misc_RNA (1)...(19): siRNA sense strand
cucaaagaguccuggagaa

SEQ ID NO: 2388734 - RNA, 19 nt, Homo sapiens
  misc_RNA (1)...(19): siRNA sense strand
ccgucaagcacgauucaaa

SEQ ID NO: 2388735 - RNA, 19 nt, Homo sapiens
  misc_RNA (1)...(19): siRNA sense strand
augauggagucgaagacaa

SEQ ID NO: 2388736 - RNA, 19 nt, Homo sapiens
  misc_RNA (1)...(19): siRNA sense strand
acaaaaggaucaugggcau

SEQ ID NO: 2388737 - RNA, 19 nt, Homo sapiens
  misc_RNA (1)...(19): siRNA sense strand
caucacacacggaagaaau

SEQ ID NO: 2388738 - RNA, 19 nt, Homo sapiens
  misc_RNA (1)...(19): siRNA sense strand
acccaaagccggaggccau

SEQ ID NO: 2388739 - RNA, 19 nt, Homo sapiens
  misc_RNA (1)...(19): siRNA sense strand
ggggaugaauucagcggaa

SEQ ID NO: 2388740 - RNA, 19 nt, Homo sapiens
  misc_RNA (1)...(19): siRNA sense strand
agggaaaacauaaggauga

SEQ ID NO: 2388741 - RNA, 19 nt, Homo sapiens
  misc_RNA (1)...(19): siRNA sense strand
cagcagaagcggaagccca

SEQ ID NO: 2388742 - RNA, 19 nt, Homo sapiens
  misc_RNA (1)...(19): siRNA sense strand
uuaccggagucuuggagaa

SEQ ID NO: 2388743 - RNA, 19 nt, Homo sapiens
  misc_RNA (1)...(19): siRNA sense strand
uuguucaagccguggauua

SEQ ID NO: 2388744 - RNA, 19 nt, Homo sapiens
  misc_RNA (1)...(19): siRNA sense strand
ggcucagguuuguaagaau

SEQ ID NO: 2388745 - RNA, 19 nt, Homo sapiens
  misc_RNA (1)...(19): siRNA sense strand
cuggaggagaugaguguuu

SEQ ID NO: 2388746 - RNA, 19 nt, Homo sapiens
  misc_RNA (1)...(19): siRNA sense strand
cuaagcaagcggcuggaaa

SEQ ID NO: 2388747 - RNA, 19 nt, Homo sapiens
  misc_RNA (1)...(19): siRNA sense strand
ccacauccaugaagcccaa

SEQ ID NO: 2388748 - RNA, 19 nt, Homo sapiens
  misc_RNA (1)...(19): siRNA sense strand
cugggagauucaaggaaca

SEQ ID NO: 2388749 - RNA, 19 nt, Homo sapiens
  misc_RNA (1)...(19): siRNA sense strand
agggaaucaucuugaaguu

SEQ ID NO: 2388750 - RNA, 19 nt, Homo sapiens
  misc_RNA (1)...(19): siRNA sense strand
ccaucacgcagcagggcua

SEQ ID NO: 2388751 - RNA, 19 nt, Homo sapiens
  misc_RNA (1)...(19): siRNA sense strand
guucucuaccugugugaua

SEQ ID NO: 2388752 - RNA, 19 nt, Homo sapiens
  misc_RNA (1)...(19): siRNA sense strand
ugggaucagagaagggaau

SEQ ID NO: 2388753 - RNA, 19 nt, Homo sapiens
  misc_RNA (1)...(19): siRNA sense strand
ccaaagacccaaagccgga

SEQ ID NO: 2388754 - RNA, 19 nt, Homo sapiens
  misc_RNA (1)...(19): siRNA sense strand
ugauaugggaggaucucaa

SEQ ID NO: 2388755 - RNA, 19 nt, Homo sapiens
  misc_RNA (1)...(19): siRNA sense strand
ggcucauccuccuuagaaa

SEQ ID NO: 2388756 - RNA, 19 nt, Homo sapiens
  misc_RNA (1)...(19): siRNA sense strand
ccacaagccaggacggaac

SEQ ID NO: 2388757 - RNA, 19 nt, Homo sapiens
  misc_RNA (1)...(19): siRNA sense strand
cggaauggccagaugccca

SEQ ID NO: 2388758 - RNA, 19 nt, Homo sapiens
  misc_RNA (1)...(19): siRNA sense strand
cagguuuguaagaaugaua

SEQ ID NO: 2388759 - RNA, 19 nt, Homo sapiens
  misc_RNA (1)...(19): siRNA sense strand
cugcuagggaccauauuua

SEQ ID NO: 2388760 - RNA, 19 nt, Homo sapiens
  misc_RNA (1)...(19): siRNA sense strand
gaaugauaugggaggaucu

SEQ ID NO: 2388761 - RNA, 19 nt, Homo sapiens
  misc_RNA (1)...(19): siRNA sense strand
agaauaggaaauagugguu

SEQ ID NO: 2388762 - RNA, 19 nt, Homo sapiens
  misc_RNA (1)...(19): siRNA sense strand
gcuaugauggagucgaaga

SEQ ID NO: 2388763 - RNA, 19 nt, Homo sapiens
  misc_RNA (1)...(19): siRNA sense strand
cagcaagagucccaaccau

SEQ ID NO: 2388764 - RNA, 19 nt, Homo sapiens
  misc_RNA (1)...(19): siRNA sense strand
ccaaaguuccacagcggga

SEQ ID NO: 2388765 - RNA, 19 nt, Homo sapiens
  misc_RNA (1)...(19): siRNA sense strand
cuagacaggccgauguaga

SEQ ID NO: 2388766 - RNA, 19 nt, Homo sapiens
  misc_RNA (1)...(19): siRNA sense strand
acaugcagaaugaagggaa

SEQ ID NO: 2388767 - RNA, 19 nt, Homo sapiens
  misc_RNA (1)...(19): siRNA sense strand
cguggauuacggagauuau

SEQ ID NO: 2388768 - RNA, 19 nt, Homo sapiens
  misc_RNA (1)...(19): siRNA sense strand
cccauaaucaccaagacaa

SEQ ID NO: 2388769 - RNA, 19 nt, Homo sapiens
  misc_RNA (1)...(19): siRNA sense strand
agauggcgcuggaggacca

SEQ ID NO: 2388770 - RNA, 19 nt, Homo sapiens
  misc_RNA (1)...(19): siRNA sense strand
uggaauacucuguggaaaa

SEQ ID NO: 2388771 - RNA, 19 nt, Homo sapiens
  misc_RNA (1)...(19): siRNA sense strand
acguagaauaccaagaaua

SEQ ID NO: 2388772 - RNA, 19 nt, Homo sapiens
  misc_RNA (1)...(19): siRNA sense strand
agagauugauagaggcaga

SEQ ID NO: 2388773 - RNA, 19 nt, Homo sapiens
  misc_RNA (1)...(19): siRNA sense strand
uguauuuggaagaaggaaa

SEQ ID NO: 2388774 - RNA, 19 nt, Homo sapiens
  misc_RNA (1)...(19): siRNA sense strand
augaagaaacugaaggaga

SEQ ID NO: 2388775 - RNA, 19 nt, Homo sapiens
  misc_RNA (1)...(19): siRNA sense strand
ucaccaaagcauaaagaca

SEQ ID NO: 2388776 - RNA, 19 nt, Homo sapiens
  misc_RNA (1)...(19): siRNA sense strand
gcauaaagacacuggcauc

SEQ ID NO: 2388777 - RNA, 19 nt, Homo sapiens
  misc_RNA (1)...(19): siRNA sense strand
aauuggagcaucagagauu

SEQ ID NO: 2388778 - RNA, 19 nt, Homo sapiens
  misc_RNA (1)...(19): siRNA sense strand
cuuccuaaccaucgagauu

SEQ ID NO: 2388779 - RNA, 19 nt, Homo sapiens
  misc_RNA (1)...(19): siRNA sense strand
cugaaaagcaggauauuau

SEQ ID NO: 2388780 - RNA, 19 nt, Homo sapiens
  misc_RNA (1)...(19): siRNA sense strand
cccauguaauugugccaaa

SEQ ID NO: 2388781 - RNA, 19 nt, Homo sapiens
  misc_RNA (1)...(19): siRNA sense strand
cgucuguguauuuggaaga

SEQ ID NO: 2388782 - RNA, 19 nt, Homo sapiens
  misc_RNA (1)...(19): siRNA sense strand
aggcagaaaggaagcggau

SEQ ID NO: 2388783 - RNA, 19 nt, Homo sapiens
  misc_RNA (1)...(19): siRNA sense strand
gcagaaucuaauacaguga

SEQ ID NO: 2388784 - RNA, 19 nt, Homo sapiens
  misc_RNA (1)...(19): siRNA sense strand
agaacaauuccuugcugaa

SEQ ID NO: 2388785 - RNA, 19 nt, Homo sapiens
  misc_RNA (1)...(19): siRNA sense strand
ccagaagaucuuugccaca

SEQ ID NO: 2388786 - RNA, 19 nt, Homo sapiens
  misc_RNA (1)...(19): siRNA sense strand
ccauacagauguuucccua

SEQ ID NO: 2388787 - RNA, 19 nt, Homo sapiens
  misc_RNA (1)...(19): siRNA sense strand
gcugaauguauuugcagau

SEQ ID NO: 2388788 - RNA, 19 nt, Homo sapiens
  misc_RNA (1)...(19): siRNA sense strand
auuuagugguugaaggacu

SEQ ID NO: 2388789 - RNA, 19 nt, Homo sapiens
  misc_RNA (1)...(19): siRNA sense strand
aagcaggauauuaugaaga

SEQ ID NO: 2388790 - RNA, 19 nt, Homo sapiens
  misc_RNA (1)...(19): siRNA sense strand
cagaacaauuccuugcuga

SEQ ID NO: 2388791 - RNA, 19 nt, Homo sapiens
  misc_RNA (1)...(19): siRNA sense strand
acgaaagagaugaugauaa

SEQ ID NO: 2388792 - RNA, 19 nt, Homo sapiens
  misc_RNA (1)...(19): siRNA sense strand
cuucuaugccaaagggaaa

SEQ ID NO: 2388793 - RNA, 19 nt, Homo sapiens
  misc_RNA (1)...(19): siRNA sense strand
ggaaaaugaaggaaguaaa

SEQ ID NO: 2388794 - RNA, 19 nt, Homo sapiens
  misc_RNA (1)...(19): siRNA sense strand
ugcaagaggacaugcgaaa

SEQ ID NO: 2388795 - RNA, 19 nt, Homo sapiens
  misc_RNA (1)...(19): siRNA sense strand
cccgaaugguggugccaaa

SEQ ID NO: 2388796 - RNA, 19 nt, Homo sapiens
  misc_RNA (1)...(19): siRNA sense strand
ugaaagaccugaagcacca

SEQ ID NO: 2388797 - RNA, 19 nt, Homo sapiens
  misc_RNA (1)...(19): siRNA sense strand
cagcaaugucccuguguau

SEQ ID NO: 2388798 - RNA, 19 nt, Homo sapiens
  misc_RNA (1)...(19): siRNA sense strand
gugccaaaauugaaaggaa

SEQ ID NO: 2388799 - RNA, 19 nt, Homo sapiens
  misc_RNA (1)...(19): siRNA sense strand
agauauuugcugagauuga

SEQ ID NO: 2388800 - RNA, 19 nt, Homo sapiens
  misc_RNA (1)...(19): siRNA sense strand
agaagugguaacagaggaa

SEQ ID NO: 2388801 - RNA, 19 nt, Homo sapiens
  misc_RNA (1)...(19): siRNA sense strand
agucaguguagcaugaaua

SEQ ID NO: 2388802 - RNA, 19 nt, Homo sapiens
  misc_RNA (1)...(19): siRNA sense strand
aaauugaaaggaagggcua

SEQ ID NO: 2388803 - RNA, 19 nt, Homo sapiens
  misc_RNA (1)...(19): siRNA sense strand
cacugaagaaguagaguau

SEQ ID NO: 2388804 - RNA, 19 nt, Homo sapiens
  misc_RNA (1)...(19): siRNA sense strand
gggaaaaugaaggaaguaa

SEQ ID NO: 2388805 - RNA, 19 nt, Homo sapiens
  misc_RNA (1)...(19): siRNA sense strand
uaguauaauccgcguggaa

SEQ ID NO: 2388806 - RNA, 19 nt, Homo sapiens
  misc_RNA (1)...(19): siRNA sense strand
gcacaaaagaaaagacacu

SEQ ID NO: 2388807 - RNA, 19 nt, Homo sapiens
  misc_RNA (1)...(19): siRNA sense strand
aggugaagaguuugacaau

SEQ ID NO: 2388808 - RNA, 19 nt, Homo sapiens
  misc_RNA (1)...(19): siRNA sense strand
ccaauauccuuaagugcca

SEQ ID NO: 2388809 - RNA, 19 nt, Homo sapiens
  misc_RNA (1)...(19): siRNA sense strand
uggggaaaucagaguaaaa

SEQ ID NO: 2388810 - RNA, 19 nt, Homo sapiens
  misc_RNA (1)...(19): siRNA sense strand
acagaauuacacugaagaa

SEQ ID NO: 2388811 - RNA, 19 nt, Homo sapiens
  misc_RNA (1)...(19): siRNA sense strand
cuuaauugggcacgaaaga

SEQ ID NO: 2388812 - RNA, 19 nt, Homo sapiens
  misc_RNA (1)...(19): siRNA sense strand
ggaaagacagagacgugga

SEQ ID NO: 2388813 - RNA, 19 nt, Homo sapiens
  misc_RNA (1)...(19): siRNA sense strand
gggcuauaccccaggugaa

SEQ ID NO: 2388814 - RNA, 19 nt, Homo sapiens
  misc_RNA (1)...(19): siRNA sense strand
uuuagaaguuacuggggaa

SEQ ID NO: 2388815 - RNA, 19 nt, Homo sapiens
  misc_RNA (1)...(19): siRNA sense strand
auugaaaggaagggcuaua

SEQ ID NO: 2388816 - RNA, 19 nt, Homo sapiens
  misc_RNA (1)...(19): siRNA sense strand
gaggaacaaaggcggaaca

SEQ ID NO: 2388817 - RNA, 19 nt, Homo sapiens
  misc_RNA (1)...(19): siRNA sense strand
ggaacaaaggcggaacaau

SEQ ID NO: 2388818 - RNA, 19 nt, Homo sapiens
  misc_RNA (1)...(19): siRNA sense strand
aauucaugcaagaggacau

SEQ ID NO: 2388819 - RNA, 19 nt, Homo sapiens
  misc_RNA (1)...(19): siRNA sense strand
gucuuugagcauauagaua

SEQ ID NO: 2388820 - RNA, 19 nt, Homo sapiens
  misc_RNA (1)...(19): siRNA sense strand
aagugguaacagaggaaca

SEQ ID NO: 2388821 - RNA, 19 nt, Homo sapiens
  misc_RNA (1)...(19): siRNA sense strand
gcggaacaaucuugcacca

SEQ ID NO: 2388822 - RNA, 19 nt, Homo sapiens
  misc_RNA (1)...(19): siRNA sense strand
ccacagacaccacucgcua

SEQ ID NO: 2388823 - RNA, 19 nt, Homo sapiens
  misc_RNA (1)...(19): siRNA sense strand
guggauauuccuggagcua

SEQ ID NO: 2388824 - RNA, 19 nt, Homo sapiens
  misc_RNA (1)...(19): siRNA sense strand
caagcaggcacaaaagaaa

SEQ ID NO: 2388825 - RNA, 19 nt, Homo sapiens
  misc_RNA (1)...(19): siRNA sense strand
acagagacguggaauggca

SEQ ID NO: 2388826 - RNA, 19 nt, Homo sapiens
  misc_RNA (1)...(19): siRNA sense strand
aggaauaugaagagcuaaa

SEQ ID NO: 2388827 - RNA, 19 nt, Homo sapiens
  misc_RNA (1)...(19): siRNA sense strand
gggaagagaagguggacga

SEQ ID NO: 2388828 - RNA, 19 nt, Homo sapiens
  misc_RNA (1)...(19): siRNA sense strand
cuacaaggacggaggcguu

SEQ ID NO: 2388829 - RNA, 19 nt, Homo sapiens
  misc_RNA (1)...(19): siRNA sense strand
uggaugaagaugaagguca

SEQ ID NO: 2388830 - RNA, 19 nt, Homo sapiens
  misc_RNA (1)...(19): siRNA sense strand
ccuuuauugaccagguuua

SEQ ID NO: 2388831 - RNA, 19 nt, Homo sapiens
  misc_RNA (1)...(19): siRNA sense strand
gaaagaagggaccugggaa

SEQ ID NO: 2388832 - RNA, 19 nt, Homo sapiens
  misc_RNA (1)...(19): siRNA sense strand
ggagacgaguucaggagca

SEQ ID NO: 2388833 - RNA, 19 nt, Homo sapiens
  misc_RNA (1)...(19): siRNA sense strand
aggaagauccgcagccuca

SEQ ID NO: 2388834 - RNA, 19 nt, Homo sapiens
  misc_RNA (1)...(19): siRNA sense strand
cggacgacgcagacaggau

SEQ ID NO: 2388835 - RNA, 19 nt, Homo sapiens
  misc_RNA (1)...(19): siRNA sense strand
cugaagacucugcugaaga

SEQ ID NO: 2388836 - RNA, 19 nt, Homo sapiens
  misc_RNA (1)...(19): siRNA sense strand
cacuauggagggaaagaau

SEQ ID NO: 2388837 - RNA, 19 nt, Homo sapiens
  misc_RNA (1)...(19): siRNA sense strand
cacgaguacuacagaggau

SEQ ID NO: 2388838 - RNA, 19 nt, Homo sapiens
  misc_RNA (1)...(19): siRNA sense strand
aggaauaugaagagcuaaa

SEQ ID NO: 2388839 - RNA, 19 nt, Homo sapiens
  misc_RNA (1)...(19): siRNA sense strand
gggaagagaagguggacga

SEQ ID NO: 2388840 - RNA, 19 nt, Homo sapiens
  misc_RNA (1)...(19): siRNA sense strand
cuacaaggacggaggcguu

SEQ ID NO: 2388841 - RNA, 19 nt, Homo sapiens
  misc_RNA (1)...(19): siRNA sense strand
uggaugaagaugaagguca

SEQ ID NO: 2388842 - RNA, 19 nt, Homo sapiens
  misc_RNA (1)...(19): siRNA sense strand
ccuuuauugaccagguuua

SEQ ID NO: 2388843 - RNA, 19 nt, Homo sapiens
  misc_RNA (1)...(19): siRNA sense strand
gaaagaagggaccugggaa

SEQ ID NO: 2388844 - RNA, 19 nt, Homo sapiens
  misc_RNA (1)...(19): siRNA sense strand
ggagacgaguucaggagca

SEQ ID NO: 2388845 - RNA, 19 nt, Homo sapiens
  misc_RNA (1)...(19): siRNA sense strand
aggaagauccgcagccuca

SEQ ID NO: 2388846 - RNA, 19 nt, Homo sapiens
  misc_RNA (1)...(19): siRNA sense strand
cggacgacgcagacaggau

SEQ ID NO: 2388847 - RNA, 19 nt, Homo sapiens
  misc_RNA (1)...(19): siRNA sense strand
cugaagacucugcugaaga

SEQ ID NO: 2388848 - RNA, 19 nt, Homo sapiens
  misc_RNA (1)...(19): siRNA sense strand
cacuauggagggaaagaau

SEQ ID NO: 2388849 - RNA, 19 nt, Homo sapiens
  misc_RNA (1)...(19): siRNA sense strand
cacgaguacuacagaggau

SEQ ID NO: 2388850 - RNA, 19 nt, Homo sapiens
  misc_RNA (1)...(19): siRNA sense strand
aggaauaugaagagcuaaa

SEQ ID NO: 2388851 - RNA, 19 nt, Homo sapiens
  misc_RNA (1)...(19): siRNA sense strand
gggaagagaagguggacga

SEQ ID NO: 2388852 - RNA, 19 nt, Homo sapiens
  misc_RNA (1)...(19): siRNA sense strand
auucaugaggaaagagaaa

SEQ ID NO: 2388853 - RNA, 19 nt, Homo sapiens
  misc_RNA (1)...(19): siRNA sense strand
cuacaaggacggaggcguu

SEQ ID NO: 2388854 - RNA, 19 nt, Homo sapiens
  misc_RNA (1)...(19): siRNA sense strand
uggaugaagaugaagguca

SEQ ID NO: 2388855 - RNA, 19 nt, Homo sapiens
  misc_RNA (1)...(19): siRNA sense strand
ccuuuauugaccagguuua

SEQ ID NO: 2388856 - RNA, 19 nt, Homo sapiens
  misc_RNA (1)...(19): siRNA sense strand
gaaagaagggaccugggaa

SEQ ID NO: 2388857 - RNA, 19 nt, Homo sapiens
  misc_RNA (1)...(19): siRNA sense strand
ggagacgaguucaggagca

SEQ ID NO: 2388858 - RNA, 19 nt, Homo sapiens
  misc_RNA (1)...(19): siRNA sense strand
aggaagauccgcagccuca

SEQ ID NO: 2388859 - RNA, 19 nt, Homo sapiens
  misc_RNA (1)...(19): siRNA sense strand
cggacgacgcagacaggau

SEQ ID NO: 2388860 - RNA, 19 nt, Homo sapiens
  misc_RNA (1)...(19): siRNA sense strand
cugaagacucugcugaaga

SEQ ID NO: 2388861 - RNA, 19 nt, Homo sapiens
  misc_RNA (1)...(19): siRNA sense strand
cacuauggagggaaagaau

SEQ ID NO: 2388862 - RNA, 19 nt, Homo sapiens
  misc_RNA (1)...(19): siRNA sense strand
cacgaguacuacagaggau

SEQ ID NO: 2388863 - RNA, 19 nt, Homo sapiens
  misc_RNA (1)...(19): siRNA sense strand
cggaauaagaggaggaaaa

SEQ ID NO: 2388864 - RNA, 19 nt, Homo sapiens
  misc_RNA (1)...(19): siRNA sense strand
cggaagaagggcuuggaga

SEQ ID NO: 2388865 - RNA, 19 nt, Homo sapiens
  misc_RNA (1)...(19): siRNA sense strand
aggagauggugcaggagau

SEQ ID NO: 2388866 - RNA, 19 nt, Homo sapiens
  misc_RNA (1)...(19): siRNA sense strand
gagcggaauaagaggagga

SEQ ID NO: 2388867 - RNA, 19 nt, Homo sapiens
  misc_RNA (1)...(19): siRNA sense strand
agacguacuuacagggagu

SEQ ID NO: 2388868 - RNA, 19 nt, Homo sapiens
  misc_RNA (1)...(19): siRNA sense strand
gcaagggcaucauuggcaa

SEQ ID NO: 2388869 - RNA, 19 nt, Homo sapiens
  misc_RNA (1)...(19): siRNA sense strand
agaaaaggguccagcgcca

SEQ ID NO: 2388870 - RNA, 19 nt, Homo sapiens
  misc_RNA (1)...(19): siRNA sense strand
gaccaggagcagagcguca

SEQ ID NO: 2388871 - RNA, 19 nt, Homo sapiens
  misc_RNA (1)...(19): siRNA sense strand
gaagugaggaggaggguag

SEQ ID NO: 2388872 - RNA, 19 nt, Homo sapiens
  misc_RNA (1)...(19): siRNA sense strand
aggugaaggagcuggcaga

SEQ ID NO: 2388873 - RNA, 19 nt, Homo sapiens
  misc_RNA (1)...(19): siRNA sense strand
gggccauauucaaggugca

SEQ ID NO: 2388874 - RNA, 19 nt, Homo sapiens
  misc_RNA (1)...(19): siRNA sense strand
gcggaauaagaggaggaaa

SEQ ID NO: 2388875 - RNA, 19 nt, Homo sapiens
  misc_RNA (1)...(19): siRNA sense strand
gaggagaccaagaugcaga

SEQ ID NO: 2388876 - RNA, 19 nt, Homo sapiens
  misc_RNA (1)...(19): siRNA sense strand
cggucgagugcaagggcau

SEQ ID NO: 2388877 - RNA, 19 nt, Homo sapiens
  misc_RNA (1)...(19): siRNA sense strand
agauggugcaggagauuca

SEQ ID NO: 2388878 - RNA, 19 nt, Homo sapiens
  misc_RNA (1)...(19): siRNA sense strand
gagacagcgggaagcggaa

SEQ ID NO: 2388879 - RNA, 19 nt, Homo sapiens
  misc_RNA (1)...(19): siRNA sense strand
cguacaacgcgguggacgu

SEQ ID NO: 2388880 - RNA, 19 nt, Homo sapiens
  misc_RNA (1)...(19): siRNA sense strand
uggccaaggugaaggagcu

SEQ ID NO: 2388881 - RNA, 19 nt, Homo sapiens
  misc_RNA (1)...(19): siRNA sense strand
cggcaagaccgugguguca

SEQ ID NO: 2388882 - RNA, 19 nt, Homo sapiens
  misc_RNA (1)...(19): siRNA sense strand
ccauaaugacagaggcaga

SEQ ID NO: 2388883 - RNA, 19 nt, Homo sapiens
  misc_RNA (1)...(19): siRNA sense strand
cuaagaaggcagagggagu

SEQ ID NO: 2388884 - RNA, 19 nt, Homo sapiens
  misc_RNA (1)...(19): siRNA sense strand
cuuuaaggccggagacgaa

SEQ ID NO: 2388885 - RNA, 19 nt, Homo sapiens
  misc_RNA (1)...(19): siRNA sense strand
acaaaguggacaagugcaa

SEQ ID NO: 2388886 - RNA, 19 nt, Homo sapiens
  misc_RNA (1)...(19): siRNA sense strand
aggagaaguaugagaaagu

SEQ ID NO: 2388887 - RNA, 19 nt, Homo sapiens
  misc_RNA (1)...(19): siRNA sense strand
ccaagaagaugaaggagcu

SEQ ID NO: 2388888 - RNA, 19 nt, Homo sapiens
  misc_RNA (1)...(19): siRNA sense strand
gcgccagcucaucgagaaa

SEQ ID NO: 2388889 - RNA, 19 nt, Homo sapiens
  misc_RNA (1)...(19): siRNA sense strand
ggagcagguguuugagcaa

SEQ ID NO: 2388890 - RNA, 19 nt, Homo sapiens
  misc_RNA (1)...(19): siRNA sense strand
aggcagacaaggugagcga

SEQ ID NO: 2388891 - RNA, 19 nt, Homo sapiens
  misc_RNA (1)...(19): siRNA sense strand
gccagcaauuugaggaaaa

SEQ ID NO: 2388892 - RNA, 19 nt, Homo sapiens
  misc_RNA (1)...(19): siRNA sense strand
gugcagaagacacaggaga

SEQ ID NO: 2388893 - RNA, 19 nt, Homo sapiens
  misc_RNA (1)...(19): siRNA sense strand
cgggagaugaacagcaaga

SEQ ID NO: 2388894 - RNA, 19 nt, Homo sapiens
  misc_RNA (1)...(19): siRNA sense strand
caaaagaagcugcaggaca

SEQ ID NO: 2388895 - RNA, 19 nt, Homo sapiens
  misc_RNA (1)...(19): siRNA sense strand
ccaagaucgagaaggcgua

SEQ ID NO: 2388896 - RNA, 19 nt, Homo sapiens
  misc_RNA (1)...(19): siRNA sense strand
ugcagaagacacaggagaa

SEQ ID NO: 2388897 - RNA, 19 nt, Homo sapiens
  misc_RNA (1)...(19): siRNA sense strand
aggaggugcugcuggacau

SEQ ID NO: 2388898 - RNA, 19 nt, Homo sapiens
  misc_RNA (1)...(19): siRNA sense strand
ccaugacacgggagaugaa

SEQ ID NO: 2388899 - RNA, 19 nt, Homo sapiens
  misc_RNA (1)...(19): siRNA sense strand
acacaggagaaguaugaga

SEQ ID NO: 2388900 - RNA, 19 nt, Homo sapiens
  misc_RNA (1)...(19): siRNA sense strand
ugcuggaagaugugggcaa

SEQ ID NO: 2388901 - RNA, 19 nt, Homo sapiens
  misc_RNA (1)...(19): siRNA sense strand
ggucagacgacgagagugg

SEQ ID NO: 2388902 - RNA, 19 nt, Homo sapiens
  misc_RNA (1)...(19): siRNA sense strand
agggaguggcgcugaccaa

SEQ ID NO: 2388903 - RNA, 19 nt, Homo sapiens
  misc_RNA (1)...(19): siRNA sense strand
uggcuugcaaagaggaaaa

SEQ ID NO: 2388904 - RNA, 19 nt, Homo sapiens
  misc_RNA (1)...(19): siRNA sense strand
ccaagaagcugaugcccaa

SEQ ID NO: 2388905 - RNA, 19 nt, Homo sapiens
  misc_RNA (1)...(19): siRNA sense strand
ucaaggugcugaagggaca

SEQ ID NO: 2388906 - RNA, 19 nt, Homo sapiens
  misc_RNA (1)...(19): siRNA sense strand
gcucugaugaggaggacau

SEQ ID NO: 2388907 - RNA, 19 nt, Homo sapiens
  misc_RNA (1)...(19): siRNA sense strand
cagcgcaagaugaggguga

SEQ ID NO: 2388908 - RNA, 19 nt, Homo sapiens
  misc_RNA (1)...(19): siRNA sense strand
gggaugaguaugcggagga

SEQ ID NO: 2388909 - RNA, 19 nt, Homo sapiens
  misc_RNA (1)...(19): siRNA sense strand
gcagugaggaugaugacga

SEQ ID NO: 2388910 - RNA, 19 nt, Homo sapiens
  misc_RNA (1)...(19): siRNA sense strand
gcgcaagaugagggugaau

SEQ ID NO: 2388911 - RNA, 19 nt, Homo sapiens
  misc_RNA (1)...(19): siRNA sense strand
ccacugaggagcaggugca

SEQ ID NO: 2388912 - RNA, 19 nt, Homo sapiens
  misc_RNA (1)...(19): siRNA sense strand
ccgacagcgaggagagugu

SEQ ID NO: 2388913 - RNA, 19 nt, Homo sapiens
  misc_RNA (1)...(19): siRNA sense strand
gugacagcagugaggauga

SEQ ID NO: 2388914 - RNA, 19 nt, Homo sapiens
  misc_RNA (1)...(19): siRNA sense strand
aagcauaaagagagggaaa

SEQ ID NO: 2388915 - RNA, 19 nt, Homo sapiens
  misc_RNA (1)...(19): siRNA sense strand
auacaaagaacgagacaaa

SEQ ID NO: 2388916 - RNA, 19 nt, Homo sapiens
  misc_RNA (1)...(19): siRNA sense strand
cagaauaaaucaugggaga

SEQ ID NO: 2388917 - RNA, 19 nt, Homo sapiens
  misc_RNA (1)...(19): siRNA sense strand
cagcaauaugguagagaaa

SEQ ID NO: 2388918 - RNA, 19 nt, Homo sapiens
  misc_RNA (1)...(19): siRNA sense strand
uugagaagauggaaagaaa

SEQ ID NO: 2388919 - RNA, 19 nt, Homo sapiens
  misc_RNA (1)...(19): siRNA sense strand
ggaagaaagaguaaagaca

SEQ ID NO: 2388920 - RNA, 19 nt, Homo sapiens
  misc_RNA (1)...(19): siRNA sense strand
acagaaaggcaaaguuaaa

SEQ ID NO: 2388921 - RNA, 19 nt, Homo sapiens
  misc_RNA (1)...(19): siRNA sense strand
ggauaggaaacaugacaaa

SEQ ID NO: 2388922 - RNA, 19 nt, Homo sapiens
  misc_RNA (1)...(19): siRNA sense strand
cagaaaagaagaagacaaa

SEQ ID NO: 2388923 - RNA, 19 nt, Homo sapiens
  misc_RNA (1)...(19): siRNA sense strand
cuaaaagaagagagagaaa

SEQ ID NO: 2388924 - RNA, 19 nt, Homo sapiens
  misc_RNA (1)...(19): siRNA sense strand
caaguauaguagacgguaa

SEQ ID NO: 2388925 - RNA, 19 nt, Homo sapiens
  misc_RNA (1)...(19): siRNA sense strand
acacaaacagaaaggcaaa

SEQ ID NO: 2388926 - RNA, 19 nt, Homo sapiens
  misc_RNA (1)...(19): siRNA sense strand
caauaucagaagagagcaa

SEQ ID NO: 2388927 - RNA, 19 nt, Homo sapiens
  misc_RNA (1)...(19): siRNA sense strand
gcaagaaaaggaaggaaaa

SEQ ID NO: 2388928 - RNA, 19 nt, Homo sapiens
  misc_RNA (1)...(19): siRNA sense strand
gauaaaucaaccaaggaaa

SEQ ID NO: 2388929 - RNA, 19 nt, Homo sapiens
  misc_RNA (1)...(19): siRNA sense strand
cgagacaaacauaaagaua

SEQ ID NO: 2388930 - RNA, 19 nt, Homo sapiens
  misc_RNA (1)...(19): siRNA sense strand
agacagggagcuagauaaa

SEQ ID NO: 2388931 - RNA, 19 nt, Homo sapiens
  misc_RNA (1)...(19): siRNA sense strand
cugcaagaacauuggcaaa

SEQ ID NO: 2388932 - RNA, 19 nt, Homo sapiens
  misc_RNA (1)...(19): siRNA sense strand
caaagaaugacuagaaaca

SEQ ID NO: 2388933 - RNA, 19 nt, Homo sapiens
  misc_RNA (1)...(19): siRNA sense strand
agagagaaaaguagagaaa

SEQ ID NO: 2388934 - RNA, 19 nt, Homo sapiens
  misc_RNA (1)...(19): siRNA sense strand
aguagugggcacagagaua

SEQ ID NO: 2388935 - RNA, 19 nt, Homo sapiens
  misc_RNA (1)...(19): siRNA sense strand
ccauaaagaaggugagaag

SEQ ID NO: 2388936 - RNA, 19 nt, Homo sapiens
  misc_RNA (1)...(19): siRNA sense strand
aagcaaauacaauggcaaa

SEQ ID NO: 2388937 - RNA, 19 nt, Homo sapiens
  misc_RNA (1)...(19): siRNA sense strand
ccauagaagaugaggaauc

SEQ ID NO: 2388938 - RNA, 19 nt, Homo sapiens
  misc_RNA (1)...(19): siRNA sense strand
gggcacagagauauaguaa

SEQ ID NO: 2388939 - RNA, 19 nt, Homo sapiens
  misc_RNA (1)...(19): siRNA sense strand
aggaaaagcaugugucaaa

SEQ ID NO: 2388940 - RNA, 19 nt, Homo sapiens
  misc_RNA (1)...(19): siRNA sense strand
gguuacaagauguggauga

SEQ ID NO: 2388941 - RNA, 19 nt, Homo sapiens
  misc_RNA (1)...(19): siRNA sense strand
ccucaaagaaugacuagaa

SEQ ID NO: 2388942 - RNA, 19 nt, Homo sapiens
  misc_RNA (1)...(19): siRNA sense strand
gcaucuagcagaaagcaaa

SEQ ID NO: 2388943 - RNA, 19 nt, Homo sapiens
  misc_RNA (1)...(19): siRNA sense strand
aagagaaccaagagcuaaa

SEQ ID NO: 2388944 - RNA, 19 nt, Homo sapiens
  misc_RNA (1)...(19): siRNA sense strand
gagaaagaagguccagaaa

SEQ ID NO: 2388945 - RNA, 19 nt, Homo sapiens
  misc_RNA (1)...(19): siRNA sense strand
agagaaaccauauggaaga

SEQ ID NO: 2388946 - RNA, 19 nt, Homo sapiens
  misc_RNA (1)...(19): siRNA sense strand
ucuuguaagcauaaggaaa

SEQ ID NO: 2388947 - RNA, 19 nt, Homo sapiens
  misc_RNA (1)...(19): siRNA sense strand
cagaagugacugaugcaua

SEQ ID NO: 2388948 - RNA, 19 nt, Homo sapiens
  misc_RNA (1)...(19): siRNA sense strand
ccagaaaagaagaagacaa

SEQ ID NO: 2388949 - RNA, 19 nt, Homo sapiens
  misc_RNA (1)...(19): siRNA sense strand
uguuaacacacaaggauua

SEQ ID NO: 2388950 - RNA, 19 nt, Homo sapiens
  misc_RNA (1)...(19): siRNA sense strand
ggauaaagaagguaaaaca

SEQ ID NO: 2388951 - RNA, 19 nt, Homo sapiens
  misc_RNA (1)...(19): siRNA sense strand
ccaaagaacugcagaggag

SEQ ID NO: 2388952 - RNA, 19 nt, Homo sapiens
  misc_RNA (1)...(19): siRNA sense strand
ggaaaaggaaauagacauu

SEQ ID NO: 2388953 - RNA, 19 nt, Homo sapiens
  misc_RNA (1)...(19): siRNA sense strand
aagaaaaggacaagcuaua

SEQ ID NO: 2388954 - RNA, 19 nt, Homo sapiens
  misc_RNA (1)...(19): siRNA sense strand
acaaagaacgagacaaaca

SEQ ID NO: 2388955 - RNA, 19 nt, Homo sapiens
  misc_RNA (1)...(19): siRNA sense strand
ccacuuagaauuuggugaa

SEQ ID NO: 2388956 - RNA, 19 nt, Homo sapiens
  misc_RNA (1)...(19): siRNA sense strand
acuacaagcaaaagagaaa

SEQ ID NO: 2388957 - RNA, 19 nt, Homo sapiens
  misc_RNA (1)...(19): siRNA sense strand
acacaguauugaaagggaa

SEQ ID NO: 2388958 - RNA, 19 nt, Homo sapiens
  misc_RNA (1)...(19): siRNA sense strand
caaggagaugaaagagaaa

SEQ ID NO: 2388959 - RNA, 19 nt, Homo sapiens
  misc_RNA (1)...(19): siRNA sense strand
aagaaaugaacguggugaa

SEQ ID NO: 2388960 - RNA, 19 nt, Homo sapiens
  misc_RNA (1)...(19): siRNA sense strand
cugaugaugaugaaaguua

SEQ ID NO: 2388961 - RNA, 19 nt, Homo sapiens
  misc_RNA (1)...(19): siRNA sense strand
aaacagaggaguuggaguu

SEQ ID NO: 2388962 - RNA, 19 nt, Homo sapiens
  misc_RNA (1)...(19): siRNA sense strand
caggacauacucagagaaa

SEQ ID NO: 2388963 - RNA, 19 nt, Homo sapiens
  misc_RNA (1)...(19): siRNA sense strand
ggcaaaugugaaugugaaa

SEQ ID NO: 2388964 - RNA, 19 nt, Homo sapiens
  misc_RNA (1)...(19): siRNA sense strand
guguggaauuugauagaga

SEQ ID NO: 2388965 - RNA, 19 nt, Homo sapiens
  misc_RNA (1)...(19): siRNA sense strand
uagcagaaacagaggaguu

SEQ ID NO: 2388966 - RNA, 19 nt, Homo sapiens
  misc_RNA (1)...(19): siRNA sense strand
accaagagcuaaagcaaga

SEQ ID NO: 2388967 - RNA, 19 nt, Homo sapiens
  misc_RNA (1)...(19): siRNA sense strand
gaauuuacuucuuugggua

SEQ ID NO: 2388968 - RNA, 19 nt, Homo sapiens
  misc_RNA (1)...(19): siRNA sense strand
uguaaugacuuuagggaag

SEQ ID NO: 2388969 - RNA, 19 nt, Homo sapiens
  misc_RNA (1)...(19): siRNA sense strand
ccucuuuacuacaagcaaa

SEQ ID NO: 2388970 - RNA, 19 nt, Homo sapiens
  misc_RNA (1)...(19): siRNA sense strand
caagaaaugaagaacgaga

SEQ ID NO: 2388971 - RNA, 19 nt, Homo sapiens
  misc_RNA (1)...(19): siRNA sense strand
agaacgagauucagacaca

SEQ ID NO: 2388972 - RNA, 19 nt, Homo sapiens
  misc_RNA (1)...(19): siRNA sense strand
uaaagagaaccaagagcua

SEQ ID NO: 2388973 - RNA, 19 nt, Homo sapiens
  misc_RNA (1)...(19): siRNA sense strand
augcauauaccaaggagaa

SEQ ID NO: 2388974 - RNA, 19 nt, Homo sapiens
  misc_RNA (1)...(19): siRNA sense strand
cauauggaagaaagaguaa

SEQ ID NO: 2388975 - RNA, 19 nt, Homo sapiens
  misc_RNA (1)...(19): siRNA sense strand
gguuagaauggcagcucaa

SEQ ID NO: 2388976 - RNA, 19 nt, Homo sapiens
  misc_RNA (1)...(19): siRNA sense strand
gaggggaacuuuaggaaau

SEQ ID NO: 2388977 - RNA, 19 nt, Homo sapiens
  misc_RNA (1)...(19): siRNA sense strand
gaggaacuuuaaagaggaa

SEQ ID NO: 2388978 - RNA, 19 nt, Homo sapiens
  misc_RNA (1)...(19): siRNA sense strand
aggaacgagacaagauuaa

SEQ ID NO: 2388979 - RNA, 19 nt, Homo sapiens
  misc_RNA (1)...(19): siRNA sense strand
uugcauugauugugggaaa

SEQ ID NO: 2388980 - RNA, 19 nt, Homo sapiens
  misc_RNA (1)...(19): siRNA sense strand
augcaaggaaugugggaaa

SEQ ID NO: 2388981 - RNA, 19 nt, Homo sapiens
  misc_RNA (1)...(19): siRNA sense strand
auguaaagaauguggcaaa

SEQ ID NO: 2388982 - RNA, 19 nt, Homo sapiens
  misc_RNA (1)...(19): siRNA sense strand
guguaaugaaugcgggaaa

SEQ ID NO: 2388983 - RNA, 19 nt, Homo sapiens
  misc_RNA (1)...(19): siRNA sense strand
aacacauacuggagagaaa

SEQ ID NO: 2388984 - RNA, 19 nt, Homo sapiens
  misc_RNA (1)...(19): siRNA sense strand
gggagagagccuugggaga

SEQ ID NO: 2388985 - RNA, 19 nt, Homo sapiens
  misc_RNA (1)...(19): siRNA sense strand
aauucauacaggagagaaa

SEQ ID NO: 2388986 - RNA, 19 nt, Homo sapiens
  misc_RNA (1)...(19): siRNA sense strand
aauucauacaggagagaaa

SEQ ID NO: 2388987 - RNA, 19 nt, Homo sapiens
  misc_RNA (1)...(19): siRNA sense strand
gggaaggcuuuuagguaua

SEQ ID NO: 2388988 - RNA, 19 nt, Homo sapiens
  misc_RNA (1)...(19): siRNA sense strand
ccguaugaaugcaaggaau

SEQ ID NO: 2388989 - RNA, 19 nt, Homo sapiens
  misc_RNA (1)...(19): siRNA sense strand
aagucauacuggagaagaa

SEQ ID NO: 2388990 - RNA, 19 nt, Homo sapiens
  misc_RNA (1)...(19): siRNA sense strand
agaaagucuauguaggaaa

SEQ ID NO: 2388991 - RNA, 19 nt, Homo sapiens
  misc_RNA (1)...(19): siRNA sense strand
cauucaaggauguggcaau

SEQ ID NO: 2388992 - RNA, 19 nt, Homo sapiens
  misc_RNA (1)...(19): siRNA sense strand
uguaaagaauguaggaaag

SEQ ID NO: 2388993 - RNA, 19 nt, Homo sapiens
  misc_RNA (1)...(19): siRNA sense strand
augugauauaugugggaaa

SEQ ID NO: 2388994 - RNA, 19 nt, Homo sapiens
  misc_RNA (1)...(19): siRNA sense strand
cccuaugaauguaaagaau

SEQ ID NO: 2388995 - RNA, 19 nt, Homo sapiens
  misc_RNA (1)...(19): siRNA sense strand
cccuaugaauguaaagaau

SEQ ID NO: 2388996 - RNA, 19 nt, Homo sapiens
  misc_RNA (1)...(19): siRNA sense strand
aagaagucauacuggagaa

SEQ ID NO: 2388997 - RNA, 19 nt, Homo sapiens
  misc_RNA (1)...(19): siRNA sense strand
gauauaugugggaaagauu

SEQ ID NO: 2388998 - RNA, 19 nt, Homo sapiens
  misc_RNA (1)...(19): siRNA sense strand
cgggaaagccuucagccaa

SEQ ID NO: 2388999 - RNA, 19 nt, Homo sapiens
  misc_RNA (1)...(19): siRNA sense strand
gcagaaaagccuucagaca

SEQ ID NO: 2389000 - RNA, 19 nt, Homo sapiens
  misc_RNA (1)...(19): siRNA sense strand
cuaugaauguauugagugu

SEQ ID NO: 2389001 - RNA, 19 nt, Homo sapiens
  misc_RNA (1)...(19): siRNA sense strand
aacucauacaggagagaaa

SEQ ID NO: 2389002 - RNA, 19 nt, Homo sapiens
  misc_RNA (1)...(19): siRNA sense strand
uggaaaagccuucaagcaa

SEQ ID NO: 2389003 - RNA, 19 nt, Homo sapiens
  misc_RNA (1)...(19): siRNA sense strand
auucaaggauguggcaaua

SEQ ID NO: 2389004 - RNA, 19 nt, Homo sapiens
  misc_RNA (1)...(19): siRNA sense strand
ugggagaugacgagugaga

SEQ ID NO: 2389005 - RNA, 19 nt, Homo sapiens
  misc_RNA (1)...(19): siRNA sense strand
cauaaagaaaccaucacua

SEQ ID NO: 2389006 - RNA, 19 nt, Homo sapiens
  misc_RNA (1)...(19): siRNA sense strand
ggagaugacgagugagaug

SEQ ID NO: 2389007 - RNA, 19 nt, Homo sapiens
  misc_RNA (1)...(19): siRNA sense strand
guaggaaagccuucaaaca

SEQ ID NO: 2389008 - RNA, 19 nt, Homo sapiens
  misc_RNA (1)...(19): siRNA sense strand
caaucuuacucaacaucaa

SEQ ID NO: 2389009 - RNA, 19 nt, Homo sapiens
  misc_RNA (1)...(19): siRNA sense strand
uuugagaagcagaugggaa

SEQ ID NO: 2389010 - RNA, 19 nt, Homo sapiens
  misc_RNA (1)...(19): siRNA sense strand
gagaugucacacuggcaaa

SEQ ID NO: 2389011 - RNA, 19 nt, Homo sapiens
  misc_RNA (1)...(19): siRNA sense strand
aggaauuaccucugaagca

SEQ ID NO: 2389012 - RNA, 19 nt, Homo sapiens
  misc_RNA (1)...(19): siRNA sense strand
gcauaggagaauucauaca

SEQ ID NO: 2389013 - RNA, 19 nt, Homo sapiens
  misc_RNA (1)...(19): siRNA sense strand
ggagcaagggagagagccu

SEQ ID NO: 2389014 - RNA, 19 nt, Homo sapiens
  misc_RNA (1)...(19): siRNA sense strand
cuaaggaaacagaauucaa

SEQ ID NO: 2389015 - RNA, 19 nt, Homo sapiens
  misc_RNA (1)...(19): siRNA sense strand
acgagugagaugacaagaa

SEQ ID NO: 2389016 - RNA, 19 nt, Homo sapiens
  misc_RNA (1)...(19): siRNA sense strand
accauaugcaugugaggaa

SEQ ID NO: 2389017 - RNA, 19 nt, Homo sapiens
  misc_RNA (1)...(19): siRNA sense strand
aaauguaaggaaugcagaa

SEQ ID NO: 2389018 - RNA, 19 nt, Homo sapiens
  misc_RNA (1)...(19): siRNA sense strand
gcaugugaggaauguggaa

SEQ ID NO: 2389019 - RNA, 19 nt, Homo sapiens
  misc_RNA (1)...(19): siRNA sense strand
cccaggacuuagugacauu

SEQ ID NO: 2389020 - RNA, 19 nt, Homo sapiens
  misc_RNA (1)...(19): siRNA sense strand
aggaguaugauguuggaga

SEQ ID NO: 2389021 - RNA, 19 nt, Homo sapiens
  misc_RNA (1)...(19): siRNA sense strand
aauucauacuggagagaag

SEQ ID NO: 2389022 - RNA, 19 nt, Homo sapiens
  misc_RNA (1)...(19): siRNA sense strand
aagcguuuauacaggagua

SEQ ID NO: 2389023 - RNA, 19 nt, Homo sapiens
  misc_RNA (1)...(19): siRNA sense strand
ggaaaacauagaagagagu

SEQ ID NO: 2389024 - RNA, 19 nt, Homo sapiens
  misc_RNA (1)...(19): siRNA sense strand
ucgcuuaagacgugagaaa

SEQ ID NO: 2389025 - RNA, 19 nt, Homo sapiens
  misc_RNA (1)...(19): siRNA sense strand
agaaagaggaagaggagau

SEQ ID NO: 2389026 - RNA, 19 nt, Homo sapiens
  misc_RNA (1)...(19): siRNA sense strand
gcuuaagacgugagaaaga

SEQ ID NO: 2389027 - RNA, 19 nt, Homo sapiens
  misc_RNA (1)...(19): siRNA sense strand
gauaaagagaguggagaaa

SEQ ID NO: 2389028 - RNA, 19 nt, Homo sapiens
  misc_RNA (1)...(19): siRNA sense strand
ggaaagaguaaaagaagaa

SEQ ID NO: 2389029 - RNA, 19 nt, Homo sapiens
  misc_RNA (1)...(19): siRNA sense strand
augaaagaggaaagaguaa

SEQ ID NO: 2389030 - RNA, 19 nt, Homo sapiens
  misc_RNA (1)...(19): siRNA sense strand
ggaaaaugaucuuagggaa

SEQ ID NO: 2389031 - RNA, 19 nt, Homo sapiens
  misc_RNA (1)...(19): siRNA sense strand
ugugaaagcagcauggaaa

SEQ ID NO: 2389032 - RNA, 19 nt, Homo sapiens
  misc_RNA (1)...(19): siRNA sense strand
agaagaaaggcgacagcaa

SEQ ID NO: 2389033 - RNA, 19 nt, Homo sapiens
  misc_RNA (1)...(19): siRNA sense strand
aggaagaaggugaugcuaa

SEQ ID NO: 2389034 - RNA, 19 nt, Homo sapiens
  misc_RNA (1)...(19): siRNA sense strand
acucagugccaauggguua

SEQ ID NO: 2389035 - RNA, 19 nt, Homo sapiens
  misc_RNA (1)...(19): siRNA sense strand
ggaagaaaacagaaaacaa

SEQ ID NO: 2389036 - RNA, 19 nt, Homo sapiens
  misc_RNA (1)...(19): siRNA sense strand
gugagaaagaacuggagua

SEQ ID NO: 2389037 - RNA, 19 nt, Homo sapiens
  misc_RNA (1)...(19): siRNA sense strand
gcuggaagcaauagccaaa

SEQ ID NO: 2389038 - RNA, 19 nt, Homo sapiens
  misc_RNA (1)...(19): siRNA sense strand
cgagaagagaagagacuga

SEQ ID NO: 2389039 - RNA, 19 nt, Homo sapiens
  misc_RNA (1)...(19): siRNA sense strand
aggccaagaaagaggaaga

SEQ ID NO: 2389040 - RNA, 19 nt, Homo sapiens
  misc_RNA (1)...(19): siRNA sense strand
ggucuagagccuuggaaga

SEQ ID NO: 2389041 - RNA, 19 nt, Homo sapiens
  misc_RNA (1)...(19): siRNA sense strand
uugagaagcagaagagaau

SEQ ID NO: 2389042 - RNA, 19 nt, Homo sapiens
  misc_RNA (1)...(19): siRNA sense strand
ggaaacaaguucuccgaca

SEQ ID NO: 2389043 - RNA, 19 nt, Homo sapiens
  misc_RNA (1)...(19): siRNA sense strand
gaggaaacuaggaagaaga

SEQ ID NO: 2389044 - RNA, 19 nt, Homo sapiens
  misc_RNA (1)...(19): siRNA sense strand
gcuauggaagagagagcaa

SEQ ID NO: 2389045 - RNA, 19 nt, Homo sapiens
  misc_RNA (1)...(19): siRNA sense strand
ggaagaagauggaugcacu

SEQ ID NO: 2389046 - RNA, 19 nt, Homo sapiens
  misc_RNA (1)...(19): siRNA sense strand
cuugagaagcagaagagaa

SEQ ID NO: 2389047 - RNA, 19 nt, Homo sapiens
  misc_RNA (1)...(19): siRNA sense strand
gaggagauucaaagggaga

SEQ ID NO: 2389048 - RNA, 19 nt, Homo sapiens
  misc_RNA (1)...(19): siRNA sense strand
agaagagacugaagaaaau

SEQ ID NO: 2389049 - RNA, 19 nt, Homo sapiens
  misc_RNA (1)...(19): siRNA sense strand
cauggaaaauagagaagaa

SEQ ID NO: 2389050 - RNA, 19 nt, Homo sapiens
  misc_RNA (1)...(19): siRNA sense strand
ucacagaagcacagagcca

SEQ ID NO: 2389051 - RNA, 19 nt, Homo sapiens
  misc_RNA (1)...(19): siRNA sense strand
ccaagaaagaggaagagga

SEQ ID NO: 2389052 - RNA, 19 nt, Homo sapiens
  misc_RNA (1)...(19): siRNA sense strand
cagaaggaaaccaaagcaa

SEQ ID NO: 2389053 - RNA, 19 nt, Homo sapiens
  misc_RNA (1)...(19): siRNA sense strand
agcaauagccaaagaacau

SEQ ID NO: 2389054 - RNA, 19 nt, Homo sapiens
  misc_RNA (1)...(19): siRNA sense strand
gccaaagaacauuaugaaa

SEQ ID NO: 2389055 - RNA, 19 nt, Homo sapiens
  misc_RNA (1)...(19): siRNA sense strand
ggaaggcucuggaggccaa

SEQ ID NO: 2389056 - RNA, 19 nt, Homo sapiens
  misc_RNA (1)...(19): siRNA sense strand
gcaggaagaaguaagaaaa

SEQ ID NO: 2389057 - RNA, 19 nt, Homo sapiens
  misc_RNA (1)...(19): siRNA sense strand
gguaaaagaaaaucgcuua

SEQ ID NO: 2389058 - RNA, 19 nt, Homo sapiens
  misc_RNA (1)...(19): siRNA sense strand
guggcuauuuggaggaaga

SEQ ID NO: 2389059 - RNA, 19 nt, Homo sapiens
  misc_RNA (1)...(19): siRNA sense strand
gugcaagaagagaagaaaa

SEQ ID NO: 2389060 - RNA, 19 nt, Homo sapiens
  misc_RNA (1)...(19): siRNA sense strand
agaaaaggcaagaagagaa

SEQ ID NO: 2389061 - RNA, 19 nt, Homo sapiens
  misc_RNA (1)...(19): siRNA sense strand
gaaagauggcccaggcuga

SEQ ID NO: 2389062 - RNA, 19 nt, Homo sapiens
  misc_RNA (1)...(19): siRNA sense strand
cugagcaaauagaggauca

SEQ ID NO: 2389063 - RNA, 19 nt, Homo sapiens
  misc_RNA (1)...(19): siRNA sense strand
gcuauuuggaggaagaaga

SEQ ID NO: 2389064 - RNA, 19 nt, Homo sapiens
  misc_RNA (1)...(19): siRNA sense strand
aaauggugaaggaaagaaa

SEQ ID NO: 2389065 - RNA, 19 nt, Homo sapiens
  misc_RNA (1)...(19): siRNA sense strand
auucaaagggagaugguga

SEQ ID NO: 2389066 - RNA, 19 nt, Homo sapiens
  misc_RNA (1)...(19): siRNA sense strand
ggagauaauugagaggaga

SEQ ID NO: 2389067 - RNA, 19 nt, Homo sapiens
  misc_RNA (1)...(19): siRNA sense strand
ugaugaaaucuaugcagaa

SEQ ID NO: 2389068 - RNA, 19 nt, Homo sapiens
  misc_RNA (1)...(19): siRNA sense strand
aggaagaagaggaaaguac

SEQ ID NO: 2389069 - RNA, 19 nt, Homo sapiens
  misc_RNA (1)...(19): siRNA sense strand
gugaagcugcggagggaga

SEQ ID NO: 2389070 - RNA, 19 nt, Homo sapiens
  misc_RNA (1)...(19): siRNA sense strand
aagagaagagacugaagaa

SEQ ID NO: 2389071 - RNA, 19 nt, Homo sapiens
  misc_RNA (1)...(19): siRNA sense strand
cagaagagaauuaagagga

SEQ ID NO: 2389072 - RNA, 19 nt, Homo sapiens
  misc_RNA (1)...(19): siRNA sense strand
aagcaauagccaaagaaca

SEQ ID NO: 2389073 - RNA, 19 nt, Homo sapiens
  misc_RNA (1)...(19): siRNA sense strand
aggaaagaguaaaagaaga

SEQ ID NO: 2389074 - RNA, 19 nt, Homo sapiens
  misc_RNA (1)...(19): siRNA sense strand
aggaaaaccaagacaagaa

SEQ ID NO: 2389075 - RNA, 19 nt, Homo sapiens
  misc_RNA (1)...(19): siRNA sense strand
cagaacuaccagccagaaa

SEQ ID NO: 2389076 - RNA, 19 nt, Homo sapiens
  misc_RNA (1)...(19): siRNA sense strand
agaggaggaacgucagaaa

SEQ ID NO: 2389077 - RNA, 19 nt, Homo sapiens
  misc_RNA (1)...(19): siRNA sense strand
cugcaaugauggaagaucu

SEQ ID NO: 2389078 - RNA, 19 nt, Homo sapiens
  misc_RNA (1)...(19): siRNA sense strand
aagaggaagaggagauuca

SEQ ID NO: 2389079 - RNA, 19 nt, Homo sapiens
  misc_RNA (1)...(19): siRNA sense strand
gaaaaggcaagaagagaau

SEQ ID NO: 2389080 - RNA, 19 nt, Homo sapiens
  misc_RNA (1)...(19): siRNA sense strand
cagaagaaaaggaggcaca

SEQ ID NO: 2389081 - RNA, 19 nt, Homo sapiens
  misc_RNA (1)...(19): siRNA sense strand
caagugaggaagaagguga

SEQ ID NO: 2389082 - RNA, 19 nt, Homo sapiens
  misc_RNA (1)...(19): siRNA sense strand
gaggaagaggagauucaaa

SEQ ID NO: 2389083 - RNA, 19 nt, Homo sapiens
  misc_RNA (1)...(19): siRNA sense strand
aaagaggaaacuaggaaga

SEQ ID NO: 2389084 - RNA, 19 nt, Homo sapiens
  misc_RNA (1)...(19): siRNA sense strand
aguuaaaggcccaagagga

SEQ ID NO: 2389085 - RNA, 19 nt, Homo sapiens
  misc_RNA (1)...(19): siRNA sense strand
ugcaggaagaaguaagaaa

SEQ ID NO: 2389086 - RNA, 19 nt, Homo sapiens
  misc_RNA (1)...(19): siRNA sense strand
aagacaagaagcagcagaa

SEQ ID NO: 2389087 - RNA, 19 nt, Homo sapiens
  misc_RNA (1)...(19): siRNA sense strand
gggagauaauugagaggag

SEQ ID NO: 2389088 - RNA, 19 nt, Homo sapiens
  misc_RNA (1)...(19): siRNA sense strand
gugaaagcagcauggaaaa

SEQ ID NO: 2389089 - RNA, 19 nt, Homo sapiens
  misc_RNA (1)...(19): siRNA sense strand
acauggaagaaguuuguaa

SEQ ID NO: 2389090 - RNA, 19 nt, Homo sapiens
  misc_RNA (1)...(19): siRNA sense strand
uaggaagguaguugaaauu

SEQ ID NO: 2389091 - RNA, 19 nt, Homo sapiens
  misc_RNA (1)...(19): siRNA sense strand
guguaaugaaugugggaaa

SEQ ID NO: 2389092 - RNA, 19 nt, Homo sapiens
  misc_RNA (1)...(19): siRNA sense strand
auguaaugcaugugggaaa

SEQ ID NO: 2389093 - RNA, 19 nt, Homo sapiens
  misc_RNA (1)...(19): siRNA sense strand
gggaaaaccuucugggaga

SEQ ID NO: 2389094 - RNA, 19 nt, Homo sapiens
  misc_RNA (1)...(19): siRNA sense strand
ugauauuaggcaugagaaa

SEQ ID NO: 2389095 - RNA, 19 nt, Homo sapiens
  misc_RNA (1)...(19): siRNA sense strand
ucaccaaacaucagagaau

SEQ ID NO: 2389096 - RNA, 19 nt, Homo sapiens
  misc_RNA (1)...(19): siRNA sense strand
gggaaauccuucugccaca

SEQ ID NO: 2389097 - RNA, 19 nt, Homo sapiens
  misc_RNA (1)...(19): siRNA sense strand
gaaaauggagauagaggaa

SEQ ID NO: 2389098 - RNA, 19 nt, Homo sapiens
  misc_RNA (1)...(19): siRNA sense strand
gaauuuaagguuuggacau

SEQ ID NO: 2389099 - RNA, 19 nt, Homo sapiens
  misc_RNA (1)...(19): siRNA sense strand
ccagaaaggaaauggaaag

SEQ ID NO: 2389100 - RNA, 19 nt, Homo sapiens
  misc_RNA (1)...(19): siRNA sense strand
uggagauagaggaagcaaa

SEQ ID NO: 2389101 - RNA, 19 nt, Homo sapiens
  misc_RNA (1)...(19): siRNA sense strand
uguagaaaauggagauaga

SEQ ID NO: 2389102 - RNA, 19 nt, Homo sapiens
  misc_RNA (1)...(19): siRNA sense strand
cccagaaaggaaauggaaa

SEQ ID NO: 2389103 - RNA, 19 nt, Homo sapiens
  misc_RNA (1)...(19): siRNA sense strand
ggagcuuacacaagaaaga

SEQ ID NO: 2389104 - RNA, 19 nt, Homo sapiens
  misc_RNA (1)...(19): siRNA sense strand
ccguaugaguguaaugcau

SEQ ID NO: 2389105 - RNA, 19 nt, Homo sapiens
  misc_RNA (1)...(19): siRNA sense strand
auguacugaaugugggaaa

SEQ ID NO: 2389106 - RNA, 19 nt, Homo sapiens
  misc_RNA (1)...(19): siRNA sense strand
guguaaugcaugugggaag

SEQ ID NO: 2389107 - RNA, 19 nt, Homo sapiens
  misc_RNA (1)...(19): siRNA sense strand
gaauauaucucaaagaccu

SEQ ID NO: 2389108 - RNA, 19 nt, Homo sapiens
  misc_RNA (1)...(19): siRNA sense strand
ggggaaaucuucugugaca

SEQ ID NO: 2389109 - RNA, 19 nt, Homo sapiens
  misc_RNA (1)...(19): siRNA sense strand
auguggugaaugugggaaa

SEQ ID NO: 2389110 - RNA, 19 nt, Homo sapiens
  misc_RNA (1)...(19): siRNA sense strand
cuuugaauguggugaaugu

SEQ ID NO: 2389111 - RNA, 19 nt, Homo sapiens
  misc_RNA (1)...(19): siRNA sense strand
gggaaaucuucugugacaa

SEQ ID NO: 2389112 - RNA, 19 nt, Homo sapiens
  misc_RNA (1)...(19): siRNA sense strand
auauaacgaauguggaaga

SEQ ID NO: 2389113 - RNA, 19 nt, Homo sapiens
  misc_RNA (1)...(19): siRNA sense strand
acacaggagagaagcccua

SEQ ID NO: 2389114 - RNA, 19 nt, Homo sapiens
  misc_RNA (1)...(19): siRNA sense strand
aggagaagagcccuggaua

SEQ ID NO: 2389115 - RNA, 19 nt, Homo sapiens
  misc_RNA (1)...(19): siRNA sense strand
uggccaaucuuuugaguau

SEQ ID NO: 2389116 - RNA, 19 nt, Homo sapiens
  misc_RNA (1)...(19): siRNA sense strand
gaguuuaauguaugugaga

SEQ ID NO: 2389117 - RNA, 19 nt, Homo sapiens
  misc_RNA (1)...(19): siRNA sense strand
auguaagcaauguggaaaa

SEQ ID NO: 2389118 - RNA, 19 nt, Homo sapiens
  misc_RNA (1)...(19): siRNA sense strand
cauucugugugaagucaaa

SEQ ID NO: 2389119 - RNA, 19 nt, Homo sapiens
  misc_RNA (1)...(19): siRNA sense strand
uguaaugaaugugggaaaa

SEQ ID NO: 2389120 - RNA, 19 nt, Homo sapiens
  misc_RNA (1)...(19): siRNA sense strand
ggaaaaugaagaugaccau

SEQ ID NO: 2389121 - RNA, 19 nt, Homo sapiens
  misc_RNA (1)...(19): siRNA sense strand
ccgugaauauaaagugagu

SEQ ID NO: 2389122 - RNA, 19 nt, Homo sapiens
  misc_RNA (1)...(19): siRNA sense strand
ccucauuguacaucaaaga

SEQ ID NO: 2389123 - RNA, 19 nt, Homo sapiens
  misc_RNA (1)...(19): siRNA sense strand
caaaacaguaaguguagaa

SEQ ID NO: 2389124 - RNA, 19 nt, Homo sapiens
  misc_RNA (1)...(19): siRNA sense strand
uugcauuacuaaaccagaa

SEQ ID NO: 2389125 - RNA, 19 nt, Homo sapiens
  misc_RNA (1)...(19): siRNA sense strand
ggaaaguugaugacguguu

SEQ ID NO: 2389126 - RNA, 19 nt, Homo sapiens
  misc_RNA (1)...(19): siRNA sense strand
cccuaugaauguaagcaau

SEQ ID NO: 2389127 - RNA, 19 nt, Homo sapiens
  misc_RNA (1)...(19): siRNA sense strand
uguaaugcaugugggaaau

SEQ ID NO: 2389128 - RNA, 19 nt, Homo sapiens
  misc_RNA (1)...(19): siRNA sense strand
acacaagggugaaagcucu

SEQ ID NO: 2389129 - RNA, 19 nt, Homo sapiens
  misc_RNA (1)...(19): siRNA sense strand
gcuccuugauauuaggcau

SEQ ID NO: 2389130 - RNA, 19 nt, Homo sapiens
  misc_RNA (1)...(19): siRNA sense strand
gcugaauauaucucaaaga

SEQ ID NO: 2389131 - RNA, 19 nt, Homo sapiens
  misc_RNA (1)...(19): siRNA sense strand
cgaacacauacaggagaaa

SEQ ID NO: 2389132 - RNA, 19 nt, Homo sapiens
  misc_RNA (1)...(19): siRNA sense strand
guuagagagcagccaggaa

SEQ ID NO: 2389133 - RNA, 19 nt, Homo sapiens
  misc_RNA (1)...(19): siRNA sense strand
gugacaaaaccugggaaaa

SEQ ID NO: 2389134 - RNA, 19 nt, Homo sapiens
  misc_RNA (1)...(19): siRNA sense strand
cccuaugaauguacugaau

SEQ ID NO: 2389135 - RNA, 19 nt, Homo sapiens
  misc_RNA (1)...(19): siRNA sense strand
aggaacaagugucauucaa

SEQ ID NO: 2389136 - RNA, 19 nt, Homo sapiens
  misc_RNA (1)...(19): siRNA sense strand
guugaugacguguuagaga

SEQ ID NO: 2389137 - RNA, 19 nt, Homo sapiens
  misc_RNA (1)...(19): siRNA sense strand
cuauuggagagaagucuua

SEQ ID NO: 2389138 - RNA, 19 nt, Homo sapiens
  misc_RNA (1)...(19): siRNA sense strand
ccaugaugaggcagcauuu

SEQ ID NO: 2389139 - RNA, 19 nt, Homo sapiens
  misc_RNA (1)...(19): siRNA sense strand
agugacaaaaccugggaaa

SEQ ID NO: 2389140 - RNA, 19 nt, Homo sapiens
  misc_RNA (1)...(19): siRNA sense strand
uguuauaguuacaggacaa

SEQ ID NO: 2389141 - RNA, 19 nt, Homo sapiens
  misc_RNA (1)...(19): siRNA sense strand
cgugggagaaggagagaaa

SEQ ID NO: 2389142 - RNA, 19 nt, Homo sapiens
  misc_RNA (1)...(19): siRNA sense strand
ggaacaaggacuuuggaga

SEQ ID NO: 2389143 - RNA, 19 nt, Homo sapiens
  misc_RNA (1)...(19): siRNA sense strand
gcuuagagcuccugccaga

SEQ ID NO: 2389144 - RNA, 19 nt, Homo sapiens
  misc_RNA (1)...(19): siRNA sense strand
ugggagaaggagagaaauu

SEQ ID NO: 2389145 - RNA, 19 nt, Homo sapiens
  misc_RNA (1)...(19): siRNA sense strand
ccgaaaacaaauaggacaa

SEQ ID NO: 2389146 - RNA, 19 nt, Homo sapiens
  misc_RNA (1)...(19): siRNA sense strand
ugaaagagcuagacgccuu

SEQ ID NO: 2389147 - RNA, 19 nt, Homo sapiens
  misc_RNA (1)...(19): siRNA sense strand
gggaagacaaugcuggcua

SEQ ID NO: 2389148 - RNA, 19 nt, Homo sapiens
  misc_RNA (1)...(19): siRNA sense strand
cuucaaaauacgugggaga

SEQ ID NO: 2389149 - RNA, 19 nt, Homo sapiens
  misc_RNA (1)...(19): siRNA sense strand
guauugaagaacuggaaaa

SEQ ID NO: 2389150 - RNA, 19 nt, Homo sapiens
  misc_RNA (1)...(19): siRNA sense strand
cugccagugagaugagaaa

SEQ ID NO: 2389151 - RNA, 19 nt, Homo sapiens
  misc_RNA (1)...(19): siRNA sense strand
aguuacaggacaaggugaa

SEQ ID NO: 2389152 - RNA, 19 nt, Homo sapiens
  misc_RNA (1)...(19): siRNA sense strand
gaaugguauaagaaaggua

SEQ ID NO: 2389153 - RNA, 19 nt, Homo sapiens
  misc_RNA (1)...(19): siRNA sense strand
aggacaaggugaacagugu

SEQ ID NO: 2389154 - RNA, 19 nt, Homo sapiens
  misc_RNA (1)...(19): siRNA sense strand
aggugaacagugugaaaga

SEQ ID NO: 2389155 - RNA, 19 nt, Homo sapiens
  misc_RNA (1)...(19): siRNA sense strand
ggguccuauccgagaacua

SEQ ID NO: 2389156 - RNA, 19 nt, Homo sapiens
  misc_RNA (1)...(19): siRNA sense strand
uggagauaccacuguuuaa

SEQ ID NO: 2389157 - RNA, 19 nt, Homo sapiens
  misc_RNA (1)...(19): siRNA sense strand
guggaaugguauaagaaag

SEQ ID NO: 2389158 - RNA, 19 nt, Homo sapiens
  misc_RNA (1)...(19): siRNA sense strand
ccuuaacacacacuaguaa

SEQ ID NO: 2389159 - RNA, 19 nt, Homo sapiens
  misc_RNA (1)...(19): siRNA sense strand
caaaacaagcauugcaaga

SEQ ID NO: 2389160 - RNA, 19 nt, Homo sapiens
  misc_RNA (1)...(19): siRNA sense strand
ggacgagggaagaagaaag

SEQ ID NO: 2389161 - RNA, 19 nt, Homo sapiens
  misc_RNA (1)...(19): siRNA sense strand
gguauugaagaacuggaaa

SEQ ID NO: 2389162 - RNA, 19 nt, Homo sapiens
  misc_RNA (1)...(19): siRNA sense strand
ccugggaaugggaagacaa

SEQ ID NO: 2389163 - RNA, 19 nt, Homo sapiens
  misc_RNA (1)...(19): siRNA sense strand
cguccgagucuuccacaaa

SEQ ID NO: 2389164 - RNA, 19 nt, Homo sapiens
  misc_RNA (1)...(19): siRNA sense strand
uguggaaugguauaagaaa

SEQ ID NO: 2389165 - RNA, 19 nt, Homo sapiens
  misc_RNA (1)...(19): siRNA sense strand
agaugaaguugauagccuu

SEQ ID NO: 2389166 - RNA, 19 nt, Homo sapiens
  misc_RNA (1)...(19): siRNA sense strand
gagaaauuggugagggcuc

SEQ ID NO: 2389167 - RNA, 19 nt, Homo sapiens
  misc_RNA (1)...(19): siRNA sense strand
uaauaggccacaagagcuu

SEQ ID NO: 2389168 - RNA, 19 nt, Homo sapiens
  misc_RNA (1)...(19): siRNA sense strand
gugaagaauaugucugcca

SEQ ID NO: 2389169 - RNA, 19 nt, Homo sapiens
  misc_RNA (1)...(19): siRNA sense strand
uguuauaguuacaggacaa

SEQ ID NO: 2389170 - RNA, 19 nt, Homo sapiens
  misc_RNA (1)...(19): siRNA sense strand
cgugggagaaggagagaaa

SEQ ID NO: 2389171 - RNA, 19 nt, Homo sapiens
  misc_RNA (1)...(19): siRNA sense strand
ggaacaaggacuuuggaga

SEQ ID NO: 2389172 - RNA, 19 nt, Homo sapiens
  misc_RNA (1)...(19): siRNA sense strand
gcuuagagcuccugccaga

SEQ ID NO: 2389173 - RNA, 19 nt, Homo sapiens
  misc_RNA (1)...(19): siRNA sense strand
ugggagaaggagagaaauu

SEQ ID NO: 2389174 - RNA, 19 nt, Homo sapiens
  misc_RNA (1)...(19): siRNA sense strand
ccgaaaacaaauaggacaa

SEQ ID NO: 2389175 - RNA, 19 nt, Homo sapiens
  misc_RNA (1)...(19): siRNA sense strand
ugaaagagcuagacgccuu

SEQ ID NO: 2389176 - RNA, 19 nt, Homo sapiens
  misc_RNA (1)...(19): siRNA sense strand
gggaagacaaugcuggcua

SEQ ID NO: 2389177 - RNA, 19 nt, Homo sapiens
  misc_RNA (1)...(19): siRNA sense strand
cuucaaaauacgugggaga

SEQ ID NO: 2389178 - RNA, 19 nt, Homo sapiens
  misc_RNA (1)...(19): siRNA sense strand
guauugaagaacuggaaaa

SEQ ID NO: 2389179 - RNA, 19 nt, Homo sapiens
  misc_RNA (1)...(19): siRNA sense strand
cugccagugagaugagaaa

SEQ ID NO: 2389180 - RNA, 19 nt, Homo sapiens
  misc_RNA (1)...(19): siRNA sense strand
aguuacaggacaaggugaa

SEQ ID NO: 2389181 - RNA, 19 nt, Homo sapiens
  misc_RNA (1)...(19): siRNA sense strand
gaaugguauaagaaaggua

SEQ ID NO: 2389182 - RNA, 19 nt, Homo sapiens
  misc_RNA (1)...(19): siRNA sense strand
aggacaaggugaacagugu

SEQ ID NO: 2389183 - RNA, 19 nt, Homo sapiens
  misc_RNA (1)...(19): siRNA sense strand
aggugaacagugugaaaga

SEQ ID NO: 2389184 - RNA, 19 nt, Homo sapiens
  misc_RNA (1)...(19): siRNA sense strand
ggguccuauccgagaacua

SEQ ID NO: 2389185 - RNA, 19 nt, Homo sapiens
  misc_RNA (1)...(19): siRNA sense strand
uggagauaccacuguuuaa

SEQ ID NO: 2389186 - RNA, 19 nt, Homo sapiens
  misc_RNA (1)...(19): siRNA sense strand
guggaaugguauaagaaag

SEQ ID NO: 2389187 - RNA, 19 nt, Homo sapiens
  misc_RNA (1)...(19): siRNA sense strand
ccuuaacacacacuaguaa

SEQ ID NO: 2389188 - RNA, 19 nt, Homo sapiens
  misc_RNA (1)...(19): siRNA sense strand
caaaacaagcauugcaaga

SEQ ID NO: 2389189 - RNA, 19 nt, Homo sapiens
  misc_RNA (1)...(19): siRNA sense strand
ggacgagggaagaagaaag

SEQ ID NO: 2389190 - RNA, 19 nt, Homo sapiens
  misc_RNA (1)...(19): siRNA sense strand
gguauugaagaacuggaaa

SEQ ID NO: 2389191 - RNA, 19 nt, Homo sapiens
  misc_RNA (1)...(19): siRNA sense strand
ccugggaaugggaagacaa

SEQ ID NO: 2389192 - RNA, 19 nt, Homo sapiens
  misc_RNA (1)...(19): siRNA sense strand
cguccgagucuuccacaaa

SEQ ID NO: 2389193 - RNA, 19 nt, Homo sapiens
  misc_RNA (1)...(19): siRNA sense strand
uguggaaugguauaagaaa

SEQ ID NO: 2389194 - RNA, 19 nt, Homo sapiens
  misc_RNA (1)...(19): siRNA sense strand
agaugaaguugauagccuu

SEQ ID NO: 2389195 - RNA, 19 nt, Homo sapiens
  misc_RNA (1)...(19): siRNA sense strand
gagaaauuggugagggcuc

SEQ ID NO: 2389196 - RNA, 19 nt, Homo sapiens
  misc_RNA (1)...(19): siRNA sense strand
uaauaggccacaagagcuu

SEQ ID NO: 2389197 - RNA, 19 nt, Homo sapiens
  misc_RNA (1)...(19): siRNA sense strand
gugaagaauaugucugcca

SEQ ID NO: 2389198 - RNA, 19 nt, Homo sapiens
  misc_RNA (1)...(19): siRNA sense strand
aaggaagguuugaaggaaa

SEQ ID NO: 2389199 - RNA, 19 nt, Homo sapiens
  misc_RNA (1)...(19): siRNA sense strand
ccaaagagggucaggaaaa

SEQ ID NO: 2389200 - RNA, 19 nt, Homo sapiens
  misc_RNA (1)...(19): siRNA sense strand
gccacagaucugagagaaa

SEQ ID NO: 2389201 - RNA, 19 nt, Homo sapiens
  misc_RNA (1)...(19): siRNA sense strand
cgaagaugaaggagcagaa

SEQ ID NO: 2389202 - RNA, 19 nt, Homo sapiens
  misc_RNA (1)...(19): siRNA sense strand
gguuuaggcagaacggaaa

SEQ ID NO: 2389203 - RNA, 19 nt, Homo sapiens
  misc_RNA (1)...(19): siRNA sense strand
ggaagugagaacaggaaaa

SEQ ID NO: 2389204 - RNA, 19 nt, Homo sapiens
  misc_RNA (1)...(19): siRNA sense strand
gcauaaaucaaaggacaaa

SEQ ID NO: 2389205 - RNA, 19 nt, Homo sapiens
  misc_RNA (1)...(19): siRNA sense strand
guugcaaacaucuggguua

SEQ ID NO: 2389206 - RNA, 19 nt, Homo sapiens
  misc_RNA (1)...(19): siRNA sense strand
cagaaaugucucagaggau

SEQ ID NO: 2389207 - RNA, 19 nt, Homo sapiens
  misc_RNA (1)...(19): siRNA sense strand
cgagcaaaauugagcuuaa

SEQ ID NO: 2389208 - RNA, 19 nt, Homo sapiens
  misc_RNA (1)...(19): siRNA sense strand
uugagaacacuguggauua

SEQ ID NO: 2389209 - RNA, 19 nt, Homo sapiens
  misc_RNA (1)...(19): siRNA sense strand
uugcauaaaucaaaggaca

SEQ ID NO: 2389210 - RNA, 19 nt, Homo sapiens
  misc_RNA (1)...(19): siRNA sense strand
guucagaaguacugggaag

SEQ ID NO: 2389211 - RNA, 19 nt, Homo sapiens
  misc_RNA (1)...(19): siRNA sense strand
cauacuuaauagaggauca

SEQ ID NO: 2389212 - RNA, 19 nt, Homo sapiens
  misc_RNA (1)...(19): siRNA sense strand
agguaaugguucagcacau

SEQ ID NO: 2389213 - RNA, 19 nt, Homo sapiens
  misc_RNA (1)...(19): siRNA sense strand
ggauuaaaaccguggauga

SEQ ID NO: 2389214 - RNA, 19 nt, Homo sapiens
  misc_RNA (1)...(19): siRNA sense strand
cagcauaggcaccaaggaa

SEQ ID NO: 2389215 - RNA, 19 nt, Homo sapiens
  misc_RNA (1)...(19): siRNA sense strand
cugagaaagccaagauuga

SEQ ID NO: 2389216 - RNA, 19 nt, Homo sapiens
  misc_RNA (1)...(19): siRNA sense strand
ugacgaagaugaaggagca

SEQ ID NO: 2389217 - RNA, 19 nt, Homo sapiens
  misc_RNA (1)...(19): siRNA sense strand
uuggagaaccugaaacaaa

SEQ ID NO: 2389218 - RNA, 19 nt, Homo sapiens
  misc_RNA (1)...(19): siRNA sense strand
ccgcagugucauugauauu

SEQ ID NO: 2389219 - RNA, 19 nt, Homo sapiens
  misc_RNA (1)...(19): siRNA sense strand
cugaauauuggcugguuua

SEQ ID NO: 2389220 - RNA, 19 nt, Homo sapiens
  misc_RNA (1)...(19): siRNA sense strand
ccaaaggugaugugguaga

SEQ ID NO: 2389221 - RNA, 19 nt, Homo sapiens
  misc_RNA (1)...(19): siRNA sense strand
aagaagaucagcagugcaa

SEQ ID NO: 2389222 - RNA, 19 nt, Homo sapiens
  misc_RNA (1)...(19): siRNA sense strand
gugcagaacaaaggacaaa

SEQ ID NO: 2389223 - RNA, 19 nt, Homo sapiens
  misc_RNA (1)...(19): siRNA sense strand
ccaucaaggaagugagaac

SEQ ID NO: 2389224 - RNA, 19 nt, Homo sapiens
  misc_RNA (1)...(19): siRNA sense strand
uggaaaugugguugccaaa

SEQ ID NO: 2389225 - RNA, 19 nt, Homo sapiens
  misc_RNA (1)...(19): siRNA sense strand
cauuaaauccaucaaggaa

SEQ ID NO: 2389226 - RNA, 19 nt, Homo sapiens
  misc_RNA (1)...(19): siRNA sense strand
aagaauuccuugauaccaa

SEQ ID NO: 2389227 - RNA, 19 nt, Homo sapiens
  misc_RNA (1)...(19): siRNA sense strand
gcaaguacgccaaugaaaa

SEQ ID NO: 2389228 - RNA, 19 nt, Homo sapiens
  misc_RNA (1)...(19): siRNA sense strand
ccauagacggguucacuaa

SEQ ID NO: 2389229 - RNA, 19 nt, Homo sapiens
  misc_RNA (1)...(19): siRNA sense strand
ugaauuagauguaugggau

SEQ ID NO: 2389230 - RNA, 19 nt, Homo sapiens
  misc_RNA (1)...(19): siRNA sense strand
uggagagaauuaugaguca

SEQ ID NO: 2389231 - RNA, 19 nt, Homo sapiens
  misc_RNA (1)...(19): siRNA sense strand
uugccggaguguugaauua

SEQ ID NO: 2389232 - RNA, 19 nt, Homo sapiens
  misc_RNA (1)...(19): siRNA sense strand
auucuuugcuucagaguau

SEQ ID NO: 2389233 - RNA, 19 nt, Homo sapiens
  misc_RNA (1)...(19): siRNA sense strand
ugaagaaacuuuuaggaga

SEQ ID NO: 2389234 - RNA, 19 nt, Homo sapiens
  misc_RNA (1)...(19): siRNA sense strand
gcuuuguagugcuggauga

SEQ ID NO: 2389235 - RNA, 19 nt, Homo sapiens
  misc_RNA (1)...(19): siRNA sense strand
gcugacaugcagagccuaa

SEQ ID NO: 2389236 - RNA, 19 nt, Homo sapiens
  misc_RNA (1)...(19): siRNA sense strand
gagaaagccaagauugaca

SEQ ID NO: 2389237 - RNA, 19 nt, Homo sapiens
  misc_RNA (1)...(19): siRNA sense strand
ccucaauccugguuuaaaa

SEQ ID NO: 2389238 - RNA, 19 nt, Homo sapiens
  misc_RNA (1)...(19): siRNA sense strand
ugcauaaaucaaaggacaa

SEQ ID NO: 2389239 - RNA, 19 nt, Homo sapiens
  misc_RNA (1)...(19): siRNA sense strand
ccaacagagaagaagauca

SEQ ID NO: 2389240 - RNA, 19 nt, Homo sapiens
  misc_RNA (1)...(19): siRNA sense strand
uuagaaaguagccaagaua

SEQ ID NO: 2389241 - RNA, 19 nt, Homo sapiens
  misc_RNA (1)...(19): siRNA sense strand
augaggacuucuuggguuu

SEQ ID NO: 2389242 - RNA, 19 nt, Homo sapiens
  misc_RNA (1)...(19): siRNA sense strand
aggagauguuacugacgaa

SEQ ID NO: 2389243 - RNA, 19 nt, Homo sapiens
  misc_RNA (1)...(19): siRNA sense strand
guuagaaaguagccaagau

SEQ ID NO: 2389244 - RNA, 19 nt, Homo sapiens
  misc_RNA (1)...(19): siRNA sense strand
gcagaaaugucucagagga

SEQ ID NO: 2389245 - RNA, 19 nt, Homo sapiens
  misc_RNA (1)...(19): siRNA sense strand
ccuccgacaucacaggaua

SEQ ID NO: 2389246 - RNA, 19 nt, Homo sapiens
  misc_RNA (1)...(19): siRNA sense strand
ugguuuaggcagaacggaa

SEQ ID NO: 2389247 - RNA, 19 nt, Homo sapiens
  misc_RNA (1)...(19): siRNA sense strand
cuuaaagggacaagcagau

SEQ ID NO: 2389248 - RNA, 19 nt, Homo sapiens
  misc_RNA (1)...(19): siRNA sense strand
guucaguuuucaagcaaua

SEQ ID NO: 2389249 - RNA, 19 nt, Homo sapiens
  misc_RNA (1)...(19): siRNA sense strand
ccaaggaagguuugaagga

SEQ ID NO: 2389250 - RNA, 19 nt, Homo sapiens
  misc_RNA (1)...(19): siRNA sense strand
gaguguugaauuagaugua

SEQ ID NO: 2389251 - RNA, 19 nt, Homo sapiens
  misc_RNA (1)...(19): siRNA sense strand
cagauguccugaaagggaa

SEQ ID NO: 2389252 - RNA, 19 nt, Homo sapiens
  misc_RNA (1)...(19): siRNA sense strand
ugaugauggaccugaauau

SEQ ID NO: 2389253 - RNA, 19 nt, Homo sapiens
  misc_RNA (1)...(19): siRNA sense strand
ccugaauauuggcugguuu

SEQ ID NO: 2389254 - RNA, 19 nt, Homo sapiens
  misc_RNA (1)...(19): siRNA sense strand
gaauaaaccaggcaccgaa

SEQ ID NO: 2389255 - RNA, 19 nt, Homo sapiens
  misc_RNA (1)...(19): siRNA sense strand
ggacaaagcugguaccgag

SEQ ID NO: 2389256 - RNA, 19 nt, Homo sapiens
  misc_RNA (1)...(19): siRNA sense strand
aagguuugaaggaaagaaa

SEQ ID NO: 2389257 - RNA, 19 nt, Homo sapiens
  misc_RNA (1)...(19): siRNA sense strand
aggauauauucgagcucuu

SEQ ID NO: 2389258 - RNA, 19 nt, Homo sapiens
  misc_RNA (1)...(19): siRNA sense strand
aggaagugagaacaggaaa

SEQ ID NO: 2389259 - RNA, 19 nt, Homo sapiens
  misc_RNA (1)...(19): siRNA sense strand
gggaaagaacacuggauaa

SEQ ID NO: 2389260 - RNA, 19 nt, Homo sapiens
  misc_RNA (1)...(19): siRNA sense strand
uagcaaagguacaggcaau

SEQ ID NO: 2389261 - RNA, 19 nt, Homo sapiens
  misc_RNA (1)...(19): siRNA sense strand
cauaagugcacuagugaaa

SEQ ID NO: 2389262 - RNA, 19 nt, Homo sapiens
  misc_RNA (1)...(19): siRNA sense strand
ccaguaaagaauaaggaaa

SEQ ID NO: 2389263 - RNA, 19 nt, Homo sapiens
  misc_RNA (1)...(19): siRNA sense strand
gauauuugugugagagaaa

SEQ ID NO: 2389264 - RNA, 19 nt, Homo sapiens
  misc_RNA (1)...(19): siRNA sense strand
cagaugaauccaagacaaa

SEQ ID NO: 2389265 - RNA, 19 nt, Homo sapiens
  misc_RNA (1)...(19): siRNA sense strand
uggaaacagaagagagaau

SEQ ID NO: 2389266 - RNA, 19 nt, Homo sapiens
  misc_RNA (1)...(19): siRNA sense strand
agagaaagucagcuggaua

SEQ ID NO: 2389267 - RNA, 19 nt, Homo sapiens
  misc_RNA (1)...(19): siRNA sense strand
gccuaagaauggaggauga

SEQ ID NO: 2389268 - RNA, 19 nt, Homo sapiens
  misc_RNA (1)...(19): siRNA sense strand
aggacaaacuucugcauau

SEQ ID NO: 2389269 - RNA, 19 nt, Homo sapiens
  misc_RNA (1)...(19): siRNA sense strand
acgacaaacuguugguaga

SEQ ID NO: 2389270 - RNA, 19 nt, Homo sapiens
  misc_RNA (1)...(19): siRNA sense strand
ggaagauugcaaugaaauu

SEQ ID NO: 2389271 - RNA, 19 nt, Homo sapiens
  misc_RNA (1)...(19): siRNA sense strand
ccugaagaugguagugaaa

SEQ ID NO: 2389272 - RNA, 19 nt, Homo sapiens
  misc_RNA (1)...(19): siRNA sense strand
ggaaaucgaucaagggaac

SEQ ID NO: 2389273 - RNA, 19 nt, Homo sapiens
  misc_RNA (1)...(19): siRNA sense strand
uccuauggcuacugagaaa

SEQ ID NO: 2389274 - RNA, 19 nt, Homo sapiens
  misc_RNA (1)...(19): siRNA sense strand
acgacaauguuuacugaaa

SEQ ID NO: 2389275 - RNA, 19 nt, Homo sapiens
  misc_RNA (1)...(19): siRNA sense strand
agaagauggcagagaacau

SEQ ID NO: 2389276 - RNA, 19 nt, Homo sapiens
  misc_RNA (1)...(19): siRNA sense strand
ccuggaaacagaagagaga

SEQ ID NO: 2389277 - RNA, 19 nt, Homo sapiens
  misc_RNA (1)...(19): siRNA sense strand
cggaaaucgaucaagggaa

SEQ ID NO: 2389278 - RNA, 19 nt, Homo sapiens
  misc_RNA (1)...(19): siRNA sense strand
uggugaagcaggaaaggaa

SEQ ID NO: 2389279 - RNA, 19 nt, Homo sapiens
  misc_RNA (1)...(19): siRNA sense strand
uagaaauacaggucacaaa

SEQ ID NO: 2389280 - RNA, 19 nt, Homo sapiens
  misc_RNA (1)...(19): siRNA sense strand
aagcagaauccuauggcua

SEQ ID NO: 2389281 - RNA, 19 nt, Homo sapiens
  misc_RNA (1)...(19): siRNA sense strand
agucacaccuguaaagaau

SEQ ID NO: 2389282 - RNA, 19 nt, Homo sapiens
  misc_RNA (1)...(19): siRNA sense strand
acugcaagauuuagccaaa

SEQ ID NO: 2389283 - RNA, 19 nt, Homo sapiens
  misc_RNA (1)...(19): siRNA sense strand
gcgaaggaucucacagaau

SEQ ID NO: 2389284 - RNA, 19 nt, Homo sapiens
  misc_RNA (1)...(19): siRNA sense strand
caaacuguugguagagaaa

SEQ ID NO: 2389285 - RNA, 19 nt, Homo sapiens
  misc_RNA (1)...(19): siRNA sense strand
gagagaaauagcccggaaa

SEQ ID NO: 2389286 - RNA, 19 nt, Homo sapiens
  misc_RNA (1)...(19): siRNA sense strand
caaaagaggaucaguaaau

SEQ ID NO: 2389287 - RNA, 19 nt, Homo sapiens
  misc_RNA (1)...(19): siRNA sense strand
caugauaaacuuaaggaca

SEQ ID NO: 2389288 - RNA, 19 nt, Homo sapiens
  misc_RNA (1)...(19): siRNA sense strand
cgacaauguuuacugaaaa

SEQ ID NO: 2389289 - RNA, 19 nt, Homo sapiens
  misc_RNA (1)...(19): siRNA sense strand
ccaauaaagaugugcgucu

SEQ ID NO: 2389290 - RNA, 19 nt, Homo sapiens
  misc_RNA (1)...(19): siRNA sense strand
gcaaaagugcuauugaaaa

SEQ ID NO: 2389291 - RNA, 19 nt, Homo sapiens
  misc_RNA (1)...(19): siRNA sense strand
agggaaagaacacuggaua

SEQ ID NO: 2389292 - RNA, 19 nt, Homo sapiens
  misc_RNA (1)...(19): siRNA sense strand
gagcaaaagaggaucagua

SEQ ID NO: 2389293 - RNA, 19 nt, Homo sapiens
  misc_RNA (1)...(19): siRNA sense strand
agaacagcauugacgacaa

SEQ ID NO: 2389294 - RNA, 19 nt, Homo sapiens
  misc_RNA (1)...(19): siRNA sense strand
cgggaaagcacaagauuuu

SEQ ID NO: 2389295 - RNA, 19 nt, Homo sapiens
  misc_RNA (1)...(19): siRNA sense strand
agaagaagcuauucgucau

SEQ ID NO: 2389296 - RNA, 19 nt, Homo sapiens
  misc_RNA (1)...(19): siRNA sense strand
ugaccauagcaaagaauuu

SEQ ID NO: 2389297 - RNA, 19 nt, Homo sapiens
  misc_RNA (1)...(19): siRNA sense strand
cugaaaaggacuucuguaa

SEQ ID NO: 2389298 - RNA, 19 nt, Homo sapiens
  misc_RNA (1)...(19): siRNA sense strand
uaagaauggaggaugacaa

SEQ ID NO: 2389299 - RNA, 19 nt, Homo sapiens
  misc_RNA (1)...(19): siRNA sense strand
gcaccagcagaaagacaaa

SEQ ID NO: 2389300 - RNA, 19 nt, Homo sapiens
  misc_RNA (1)...(19): siRNA sense strand
acaaacuguugguagagaa

SEQ ID NO: 2389301 - RNA, 19 nt, Homo sapiens
  misc_RNA (1)...(19): siRNA sense strand
aagagaacccugugaggau

SEQ ID NO: 2389302 - RNA, 19 nt, Homo sapiens
  misc_RNA (1)...(19): siRNA sense strand
uguucgacuucuagcuaaa

SEQ ID NO: 2389303 - RNA, 19 nt, Homo sapiens
  misc_RNA (1)...(19): siRNA sense strand
ggaucaggacucagaagau

SEQ ID NO: 2389304 - RNA, 19 nt, Homo sapiens
  misc_RNA (1)...(19): siRNA sense strand
gagccauguacgcgaacua

SEQ ID NO: 2389305 - RNA, 19 nt, Homo sapiens
  misc_RNA (1)...(19): siRNA sense strand
uugcaaacaagcagauauu

SEQ ID NO: 2389306 - RNA, 19 nt, Homo sapiens
  misc_RNA (1)...(19): siRNA sense strand
uuggaagauugcaaugaaa

SEQ ID NO: 2389307 - RNA, 19 nt, Homo sapiens
  misc_RNA (1)...(19): siRNA sense strand
cagaagaagcuauucguca

SEQ ID NO: 2389308 - RNA, 19 nt, Homo sapiens
  misc_RNA (1)...(19): siRNA sense strand
ggauaaaggacaaacuucu

SEQ ID NO: 2389309 - RNA, 19 nt, Homo sapiens
  misc_RNA (1)...(19): siRNA sense strand
cagcgauguugguuaguga

SEQ ID NO: 2389310 - RNA, 19 nt, Homo sapiens
  misc_RNA (1)...(19): siRNA sense strand
uguaaagaauauugaccca

SEQ ID NO: 2389311 - RNA, 19 nt, Homo sapiens
  misc_RNA (1)...(19): siRNA sense strand
cagcuggugcagagaauau

SEQ ID NO: 2389312 - RNA, 19 nt, Homo sapiens
  misc_RNA (1)...(19): siRNA sense strand
agaugagaaaguagaugaa

SEQ ID NO: 2389313 - RNA, 19 nt, Homo sapiens
  misc_RNA (1)...(19): siRNA sense strand
gaagagagcugcagugggu

SEQ ID NO: 2389314 - RNA, 19 nt, Homo sapiens
  misc_RNA (1)...(19): siRNA sense strand
gcucagcuuuauaagaaau

SEQ ID NO: 2389315 - RNA, 19 nt, Homo sapiens
  misc_RNA (1)...(19): siRNA sense strand
acagaagagagaaugaaau

SEQ ID NO: 2389316 - RNA, 19 nt, Homo sapiens
  misc_RNA (1)...(19): siRNA sense strand
gcauaaggcacuugugaag

SEQ ID NO: 2389317 - RNA, 19 nt, Homo sapiens
  misc_RNA (1)...(19): siRNA sense strand
gaauccaagacaaaugaaa

SEQ ID NO: 2389318 - RNA, 19 nt, Homo sapiens
  misc_RNA (1)...(19): siRNA sense strand
ggguuuggaagcagguaau

SEQ ID NO: 2389319 - RNA, 19 nt, Homo sapiens
  misc_RNA (1)...(19): siRNA sense strand
aagaaauagcugacaagau

SEQ ID NO: 2389320 - RNA, 19 nt, Homo sapiens
  misc_RNA (1)...(19): siRNA sense strand
gcguggaaacagugcccua

SEQ ID NO: 2389321 - RNA, 19 nt, Homo sapiens
  misc_RNA (1)...(19): siRNA sense strand
agcauaagaaaguggauga

SEQ ID NO: 2389322 - RNA, 19 nt, Homo sapiens
  misc_RNA (1)...(19): siRNA sense strand
cauccaagacaauggcaca

SEQ ID NO: 2389323 - RNA, 19 nt, Homo sapiens
  misc_RNA (1)...(19): siRNA sense strand
cgucuggagaagugaggau

SEQ ID NO: 2389324 - RNA, 19 nt, Homo sapiens
  misc_RNA (1)...(19): siRNA sense strand
ggaaaggggaugugaucga

SEQ ID NO: 2389325 - RNA, 19 nt, Homo sapiens
  misc_RNA (1)...(19): siRNA sense strand
agggaggcacucagagcua

SEQ ID NO: 2389326 - RNA, 19 nt, Homo sapiens
  misc_RNA (1)...(19): siRNA sense strand
aggcagaagaaauagcuga

SEQ ID NO: 2389327 - RNA, 19 nt, Homo sapiens
  misc_RNA (1)...(19): siRNA sense strand
ggaugaauacacagacacu

SEQ ID NO: 2389328 - RNA, 19 nt, Homo sapiens
  misc_RNA (1)...(19): siRNA sense strand
guacacaaguggaaaggag

SEQ ID NO: 2389329 - RNA, 19 nt, Homo sapiens
  misc_RNA (1)...(19): siRNA sense strand
guccacugguagaugacaa

SEQ ID NO: 2389330 - RNA, 19 nt, Homo sapiens
  misc_RNA (1)...(19): siRNA sense strand
augaauacacagacacuga

SEQ ID NO: 2389331 - RNA, 19 nt, Homo sapiens
  misc_RNA (1)...(19): siRNA sense strand
ccaccugauucuacggcga

SEQ ID NO: 2389332 - RNA, 19 nt, Homo sapiens
  misc_RNA (1)...(19): siRNA sense strand
aagaaauagcugacaagau

SEQ ID NO: 2389333 - RNA, 19 nt, Homo sapiens
  misc_RNA (1)...(19): siRNA sense strand
gcguggaaacagugcccua

SEQ ID NO: 2389334 - RNA, 19 nt, Homo sapiens
  misc_RNA (1)...(19): siRNA sense strand
agcauaagaaaguggauga

SEQ ID NO: 2389335 - RNA, 19 nt, Homo sapiens
  misc_RNA (1)...(19): siRNA sense strand
cauccaagacaauggcaca

SEQ ID NO: 2389336 - RNA, 19 nt, Homo sapiens
  misc_RNA (1)...(19): siRNA sense strand
cgucuggagaagugaggau

SEQ ID NO: 2389337 - RNA, 19 nt, Homo sapiens
  misc_RNA (1)...(19): siRNA sense strand
ggaaaggggaugugaucga

SEQ ID NO: 2389338 - RNA, 19 nt, Homo sapiens
  misc_RNA (1)...(19): siRNA sense strand
agggaggcacucagagcua

SEQ ID NO: 2389339 - RNA, 19 nt, Homo sapiens
  misc_RNA (1)...(19): siRNA sense strand
aggcagaagaaauagcuga

SEQ ID NO: 2389340 - RNA, 19 nt, Homo sapiens
  misc_RNA (1)...(19): siRNA sense strand
ggaugaauacacagacacu

SEQ ID NO: 2389341 - RNA, 19 nt, Homo sapiens
  misc_RNA (1)...(19): siRNA sense strand
guacacaaguggaaaggag

SEQ ID NO: 2389342 - RNA, 19 nt, Homo sapiens
  misc_RNA (1)...(19): siRNA sense strand
guccacugguagaugacaa

SEQ ID NO: 2389343 - RNA, 19 nt, Homo sapiens
  misc_RNA (1)...(19): siRNA sense strand
augaauacacagacacuga

SEQ ID NO: 2389344 - RNA, 19 nt, Homo sapiens
  misc_RNA (1)...(19): siRNA sense strand
ccaccugauucuacggcga

SEQ ID NO: 2389345 - RNA, 19 nt, Homo sapiens
  misc_RNA (1)...(19): siRNA sense strand
aagaaauagcugacaagau

SEQ ID NO: 2389346 - RNA, 19 nt, Homo sapiens
  misc_RNA (1)...(19): siRNA sense strand
gcguggaaacagugcccua

SEQ ID NO: 2389347 - RNA, 19 nt, Homo sapiens
  misc_RNA (1)...(19): siRNA sense strand
agcauaagaaaguggauga

SEQ ID NO: 2389348 - RNA, 19 nt, Homo sapiens
  misc_RNA (1)...(19): siRNA sense strand
cauccaagacaauggcaca

SEQ ID NO: 2389349 - RNA, 19 nt, Homo sapiens
  misc_RNA (1)...(19): siRNA sense strand
cgucuggagaagugaggau

SEQ ID NO: 2389350 - RNA, 19 nt, Homo sapiens
  misc_RNA (1)...(19): siRNA sense strand
ggaaaggggaugugaucga

SEQ ID NO: 2389351 - RNA, 19 nt, Homo sapiens
  misc_RNA (1)...(19): siRNA sense strand
agggaggcacucagagcua

SEQ ID NO: 2389352 - RNA, 19 nt, Homo sapiens
  misc_RNA (1)...(19): siRNA sense strand
aggcagaagaaauagcuga

SEQ ID NO: 2389353 - RNA, 19 nt, Homo sapiens
  misc_RNA (1)...(19): siRNA sense strand
ggaugaauacacagacacu

SEQ ID NO: 2389354 - RNA, 19 nt, Homo sapiens
  misc_RNA (1)...(19): siRNA sense strand
guacacaaguggaaaggag

SEQ ID NO: 2389355 - RNA, 19 nt, Homo sapiens
  misc_RNA (1)...(19): siRNA sense strand
guccacugguagaugacaa

SEQ ID NO: 2389356 - RNA, 19 nt, Homo sapiens
  misc_RNA (1)...(19): siRNA sense strand
augaauacacagacacuga

SEQ ID NO: 2389357 - RNA, 19 nt, Homo sapiens
  misc_RNA (1)...(19): siRNA sense strand
ccaccugauucuacggcga

SEQ ID NO: 2389358 - RNA, 19 nt, Homo sapiens
  misc_RNA (1)...(19): siRNA sense strand
aagaaauagcugacaagau

SEQ ID NO: 2389359 - RNA, 19 nt, Homo sapiens
  misc_RNA (1)...(19): siRNA sense strand
gcguggaaacagugcccua

SEQ ID NO: 2389360 - RNA, 19 nt, Homo sapiens
  misc_RNA (1)...(19): siRNA sense strand
agcauaagaaaguggauga

SEQ ID NO: 2389361 - RNA, 19 nt, Homo sapiens
  misc_RNA (1)...(19): siRNA sense strand
cauccaagacaauggcaca

SEQ ID NO: 2389362 - RNA, 19 nt, Homo sapiens
  misc_RNA (1)...(19): siRNA sense strand
cgucuggagaagugaggau

SEQ ID NO: 2389363 - RNA, 19 nt, Homo sapiens
  misc_RNA (1)...(19): siRNA sense strand
ggaaaggggaugugaucga

SEQ ID NO: 2389364 - RNA, 19 nt, Homo sapiens
  misc_RNA (1)...(19): siRNA sense strand
agggaggcacucagagcua

SEQ ID NO: 2389365 - RNA, 19 nt, Homo sapiens
  misc_RNA (1)...(19): siRNA sense strand
aggcagaagaaauagcuga

SEQ ID NO: 2389366 - RNA, 19 nt, Homo sapiens
  misc_RNA (1)...(19): siRNA sense strand
ggaugaauacacagacacu

SEQ ID NO: 2389367 - RNA, 19 nt, Homo sapiens
  misc_RNA (1)...(19): siRNA sense strand
guacacaaguggaaaggag

SEQ ID NO: 2389368 - RNA, 19 nt, Homo sapiens
  misc_RNA (1)...(19): siRNA sense strand
guccacugguagaugacaa

SEQ ID NO: 2389369 - RNA, 19 nt, Homo sapiens
  misc_RNA (1)...(19): siRNA sense strand
augaauacacagacacuga

SEQ ID NO: 2389370 - RNA, 19 nt, Homo sapiens
  misc_RNA (1)...(19): siRNA sense strand
ccaccugauucuacggcga

SEQ ID NO: 2389371 - RNA, 19 nt, Homo sapiens
  misc_RNA (1)...(19): siRNA sense strand
aggaagaagccgaaagaaa

SEQ ID NO: 2389372 - RNA, 19 nt, Homo sapiens
  misc_RNA (1)...(19): siRNA sense strand
agaaaguguuauuggcaaa

SEQ ID NO: 2389373 - RNA, 19 nt, Homo sapiens
  misc_RNA (1)...(19): siRNA sense strand
gggauuauauugagggaca

SEQ ID NO: 2389374 - RNA, 19 nt, Homo sapiens
  misc_RNA (1)...(19): siRNA sense strand
ggaaaagaacaaagugaaa

SEQ ID NO: 2389375 - RNA, 19 nt, Homo sapiens
  misc_RNA (1)...(19): siRNA sense strand
aaagaauggaggaaagaaa

SEQ ID NO: 2389376 - RNA, 19 nt, Homo sapiens
  misc_RNA (1)...(19): siRNA sense strand
ccucauaaacugucugaaa

SEQ ID NO: 2389377 - RNA, 19 nt, Homo sapiens
  misc_RNA (1)...(19): siRNA sense strand
aggaagagucggaaaggaa

SEQ ID NO: 2389378 - RNA, 19 nt, Homo sapiens
  misc_RNA (1)...(19): siRNA sense strand
gugcuaaaucagagccaaa

SEQ ID NO: 2389379 - RNA, 19 nt, Homo sapiens
  misc_RNA (1)...(19): siRNA sense strand
ggaugaaaccuuagaaaau

SEQ ID NO: 2389380 - RNA, 19 nt, Homo sapiens
  misc_RNA (1)...(19): siRNA sense strand
ucucaaagcacgacagauu

SEQ ID NO: 2389381 - RNA, 19 nt, Homo sapiens
  misc_RNA (1)...(19): siRNA sense strand
agacaaaggcacauggaga

SEQ ID NO: 2389382 - RNA, 19 nt, Homo sapiens
  misc_RNA (1)...(19): siRNA sense strand
ccaaguaucaugagaaaga

SEQ ID NO: 2389383 - RNA, 19 nt, Homo sapiens
  misc_RNA (1)...(19): siRNA sense strand
ggaugauagacgagguauu

SEQ ID NO: 2389384 - RNA, 19 nt, Homo sapiens
  misc_RNA (1)...(19): siRNA sense strand
gagaaaguguuauuggcaa

SEQ ID NO: 2389385 - RNA, 19 nt, Homo sapiens
  misc_RNA (1)...(19): siRNA sense strand
cagaagaugaacuggacaa

SEQ ID NO: 2389386 - RNA, 19 nt, Homo sapiens
  misc_RNA (1)...(19): siRNA sense strand
gcaaguggagacugggaaa

SEQ ID NO: 2389387 - RNA, 19 nt, Homo sapiens
  misc_RNA (1)...(19): siRNA sense strand
ggaucuaauuagucgaaga

SEQ ID NO: 2389388 - RNA, 19 nt, Homo sapiens
  misc_RNA (1)...(19): siRNA sense strand
aagcagaacaguugccaaa

SEQ ID NO: 2389389 - RNA, 19 nt, Homo sapiens
  misc_RNA (1)...(19): siRNA sense strand
gcacuaaagcagaguuuca

SEQ ID NO: 2389390 - RNA, 19 nt, Homo sapiens
  misc_RNA (1)...(19): siRNA sense strand
agaccuaggcagcaagaaa

SEQ ID NO: 2389391 - RNA, 19 nt, Homo sapiens
  misc_RNA (1)...(19): siRNA sense strand
accaagaaaccuagcaaua

SEQ ID NO: 2389392 - RNA, 19 nt, Homo sapiens
  misc_RNA (1)...(19): siRNA sense strand
ccgaaguaauucucugaaa

SEQ ID NO: 2389393 - RNA, 19 nt, Homo sapiens
  misc_RNA (1)...(19): siRNA sense strand
gcgaaugagugguagagga

SEQ ID NO: 2389394 - RNA, 19 nt, Homo sapiens
  misc_RNA (1)...(19): siRNA sense strand
gcgaguugguggaaguauu

SEQ ID NO: 2389395 - RNA, 19 nt, Homo sapiens
  misc_RNA (1)...(19): siRNA sense strand
agucaaaggagucaagauu

SEQ ID NO: 2389396 - RNA, 19 nt, Homo sapiens
  misc_RNA (1)...(19): siRNA sense strand
guaccuagucugaagggaa

SEQ ID NO: 2389397 - RNA, 19 nt, Homo sapiens
  misc_RNA (1)...(19): siRNA sense strand
cccaagcacacgagaaaua

SEQ ID NO: 2389398 - RNA, 19 nt, Homo sapiens
  misc_RNA (1)...(19): siRNA sense strand
gcacagagaugcuaccgaa

SEQ ID NO: 2389399 - RNA, 19 nt, Homo sapiens
  misc_RNA (1)...(19): siRNA sense strand
uggaaacagaggaggaaaa

SEQ ID NO: 2389400 - RNA, 19 nt, Homo sapiens
  misc_RNA (1)...(19): siRNA sense strand
caaugaaaguguaaggacu

SEQ ID NO: 2389401 - RNA, 19 nt, Homo sapiens
  misc_RNA (1)...(19): siRNA sense strand
cuaaugaaguauuguccaa

SEQ ID NO: 2389402 - RNA, 19 nt, Homo sapiens
  misc_RNA (1)...(19): siRNA sense strand
agacgagguauuugugaaa

SEQ ID NO: 2389403 - RNA, 19 nt, Homo sapiens
  misc_RNA (1)...(19): siRNA sense strand
cgacaaaagaugaaaagau

SEQ ID NO: 2389404 - RNA, 19 nt, Homo sapiens
  misc_RNA (1)...(19): siRNA sense strand
agaccaaagaccaguaaau

SEQ ID NO: 2389405 - RNA, 19 nt, Homo sapiens
  misc_RNA (1)...(19): siRNA sense strand
gacaaaggcacauggagaa

SEQ ID NO: 2389406 - RNA, 19 nt, Homo sapiens
  misc_RNA (1)...(19): siRNA sense strand
gccaaaagaugaagacauu

SEQ ID NO: 2389407 - RNA, 19 nt, Homo sapiens
  misc_RNA (1)...(19): siRNA sense strand
agugagaccaagaggaaaa

SEQ ID NO: 2389408 - RNA, 19 nt, Homo sapiens
  misc_RNA (1)...(19): siRNA sense strand
agaaagaaaauguggaaca

SEQ ID NO: 2389409 - RNA, 19 nt, Homo sapiens
  misc_RNA (1)...(19): siRNA sense strand
gcuagauucaagucagaua

SEQ ID NO: 2389410 - RNA, 19 nt, Homo sapiens
  misc_RNA (1)...(19): siRNA sense strand
ccaaauaaacggagaaagc

SEQ ID NO: 2389411 - RNA, 19 nt, Homo sapiens
  misc_RNA (1)...(19): siRNA sense strand
gcagcaagaaauucauaaa

SEQ ID NO: 2389412 - RNA, 19 nt, Homo sapiens
  misc_RNA (1)...(19): siRNA sense strand
ugugaaaguccgaaguaau

SEQ ID NO: 2389413 - RNA, 19 nt, Homo sapiens
  misc_RNA (1)...(19): siRNA sense strand
caguaaaucacuugcauca

SEQ ID NO: 2389414 - RNA, 19 nt, Homo sapiens
  misc_RNA (1)...(19): siRNA sense strand
ugagaaagacauuugagaa

SEQ ID NO: 2389415 - RNA, 19 nt, Homo sapiens
  misc_RNA (1)...(19): siRNA sense strand
acuaagagcagccggagaa

SEQ ID NO: 2389416 - RNA, 19 nt, Homo sapiens
  misc_RNA (1)...(19): siRNA sense strand
ugaccuuagcagaggagaa

SEQ ID NO: 2389417 - RNA, 19 nt, Homo sapiens
  misc_RNA (1)...(19): siRNA sense strand
aaacagaggaggaaaacaa

SEQ ID NO: 2389418 - RNA, 19 nt, Homo sapiens
  misc_RNA (1)...(19): siRNA sense strand
augccaagaaugagaaaga

SEQ ID NO: 2389419 - RNA, 19 nt, Homo sapiens
  misc_RNA (1)...(19): siRNA sense strand
acgagguauuugugaaaga

SEQ ID NO: 2389420 - RNA, 19 nt, Homo sapiens
  misc_RNA (1)...(19): siRNA sense strand
aagagcagccggagaaauu

SEQ ID NO: 2389421 - RNA, 19 nt, Homo sapiens
  misc_RNA (1)...(19): siRNA sense strand
ccuauagaauggaaauaca

SEQ ID NO: 2389422 - RNA, 19 nt, Homo sapiens
  misc_RNA (1)...(19): siRNA sense strand
ucaaagacagaaagaucaa

SEQ ID NO: 2389423 - RNA, 19 nt, Homo sapiens
  misc_RNA (1)...(19): siRNA sense strand
aaucagagccaaagacuca

SEQ ID NO: 2389424 - RNA, 19 nt, Homo sapiens
  misc_RNA (1)...(19): siRNA sense strand
aaggaaacuucucaguaaa

SEQ ID NO: 2389425 - RNA, 19 nt, Homo sapiens
  misc_RNA (1)...(19): siRNA sense strand
aaucagcagacauggguaa

SEQ ID NO: 2389426 - RNA, 19 nt, Homo sapiens
  misc_RNA (1)...(19): siRNA sense strand
acagugagaccaagaggaa

SEQ ID NO: 2389427 - RNA, 19 nt, Homo sapiens
  misc_RNA (1)...(19): siRNA sense strand
caacagugcaggaggaaag

SEQ ID NO: 2389428 - RNA, 19 nt, Homo sapiens
  misc_RNA (1)...(19): siRNA sense strand
auacuaaagaggaguccaa

SEQ ID NO: 2389429 - RNA, 19 nt, Homo sapiens
  misc_RNA (1)...(19): siRNA sense strand
ggcacagccaguugaaaua

SEQ ID NO: 2389430 - RNA, 19 nt, Homo sapiens
  misc_RNA (1)...(19): siRNA sense strand
gcugucauccuaagggaaa

SEQ ID NO: 2389431 - RNA, 19 nt, Homo sapiens
  misc_RNA (1)...(19): siRNA sense strand
aaauaaacggagaaagcuu

SEQ ID NO: 2389432 - RNA, 19 nt, Homo sapiens
  misc_RNA (1)...(19): siRNA sense strand
agacauucuccaagugcua

SEQ ID NO: 2389433 - RNA, 19 nt, Homo sapiens
  misc_RNA (1)...(19): siRNA sense strand
ggaaauuacaguggacauu

SEQ ID NO: 2389434 - RNA, 19 nt, Homo sapiens
  misc_RNA (1)...(19): siRNA sense strand
caggaugaaaccuuagaaa

SEQ ID NO: 2389435 - RNA, 19 nt, Homo sapiens
  misc_RNA (1)...(19): siRNA sense strand
ugaaagaccuaggcagcaa

SEQ ID NO: 2389436 - RNA, 19 nt, Homo sapiens
  misc_RNA (1)...(19): siRNA sense strand
acucaaagacagaaagauc

SEQ ID NO: 2389437 - RNA, 19 nt, Homo sapiens
  misc_RNA (1)...(19): siRNA sense strand
uaguggaagucuaggagau

SEQ ID NO: 2389438 - RNA, 19 nt, Homo sapiens
  misc_RNA (1)...(19): siRNA sense strand
acuggaaccuucuggaauu

SEQ ID NO: 2389439 - RNA, 19 nt, Homo sapiens
  misc_RNA (1)...(19): siRNA sense strand
uuccaaguaucaugagaaa

SEQ ID NO: 2389440 - RNA, 19 nt, Homo sapiens
  misc_RNA (1)...(19): siRNA sense strand
gcuagucgcaagaggaaga

SEQ ID NO: 2389441 - RNA, 19 nt, Homo sapiens
  misc_RNA (1)...(19): siRNA sense strand
acaggaacccacauggaaa

SEQ ID NO: 2389442 - RNA, 19 nt, Homo sapiens
  misc_RNA (1)...(19): siRNA sense strand
aguuaaagaaggaggaccu

SEQ ID NO: 2389443 - RNA, 19 nt, Homo sapiens
  misc_RNA (1)...(19): siRNA sense strand
uggaagauucugugcuaau

SEQ ID NO: 2389444 - RNA, 19 nt, Homo sapiens
  misc_RNA (1)...(19): siRNA sense strand
ccagaauauccuugagaaa

SEQ ID NO: 2389445 - RNA, 19 nt, Homo sapiens
  misc_RNA (1)...(19): siRNA sense strand
gaagagagauuuagggcca

SEQ ID NO: 2389446 - RNA, 19 nt, Homo sapiens
  misc_RNA (1)...(19): siRNA sense strand
cgucagaccuuuacgggaa

SEQ ID NO: 2389447 - RNA, 19 nt, Homo sapiens
  misc_RNA (1)...(19): siRNA sense strand
cugcauacuuugaggccua

SEQ ID NO: 2389448 - RNA, 19 nt, Homo sapiens
  misc_RNA (1)...(19): siRNA sense strand
aggaaauccaagagggcaa

SEQ ID NO: 2389449 - RNA, 19 nt, Homo sapiens
  misc_RNA (1)...(19): siRNA sense strand
ggacaaauaccaaggggaa

SEQ ID NO: 2389450 - RNA, 19 nt, Homo sapiens
  misc_RNA (1)...(19): siRNA sense strand
acaagauagcagagaagaa

SEQ ID NO: 2389451 - RNA, 19 nt, Homo sapiens
  misc_RNA (1)...(19): siRNA sense strand
agagaaaguuugaugacau

SEQ ID NO: 2389452 - RNA, 19 nt, Homo sapiens
  misc_RNA (1)...(19): siRNA sense strand
aggacaacuucgagacauu

SEQ ID NO: 2389453 - RNA, 19 nt, Homo sapiens
  misc_RNA (1)...(19): siRNA sense strand
gcagauugucagugccaua

SEQ ID NO: 2389454 - RNA, 19 nt, Homo sapiens
  misc_RNA (1)...(19): siRNA sense strand
ggaagugauugguggcaca

SEQ ID NO: 2389455 - RNA, 19 nt, Homo sapiens
  misc_RNA (1)...(19): siRNA sense strand
aagaggaaacggagaagaa

SEQ ID NO: 2389456 - RNA, 19 nt, Homo sapiens
  misc_RNA (1)...(19): siRNA sense strand
cggagaagaaccuggaaaa

SEQ ID NO: 2389457 - RNA, 19 nt, Homo sapiens
  misc_RNA (1)...(19): siRNA sense strand
uggaaaagguacagacuau

SEQ ID NO: 2389458 - RNA, 19 nt, Homo sapiens
  misc_RNA (1)...(19): siRNA sense strand
cccuguggauggagaguua

SEQ ID NO: 2389459 - RNA, 19 nt, Homo sapiens
  misc_RNA (1)...(19): siRNA sense strand
gauagagaucgcagaggaa

SEQ ID NO: 2389460 - RNA, 19 nt, Homo sapiens
  misc_RNA (1)...(19): siRNA sense strand
ggagcaaccaagaaggcaa

SEQ ID NO: 2389461 - RNA, 19 nt, Homo sapiens
  misc_RNA (1)...(19): siRNA sense strand
ggcagagggaagagagauu

SEQ ID NO: 2389462 - RNA, 19 nt, Homo sapiens
  misc_RNA (1)...(19): siRNA sense strand
gaugaaggagucagagcaa

SEQ ID NO: 2389463 - RNA, 19 nt, Homo sapiens
  misc_RNA (1)...(19): siRNA sense strand
ggauugucauaguggaaga

SEQ ID NO: 2389464 - RNA, 19 nt, Homo sapiens
  misc_RNA (1)...(19): siRNA sense strand
ugaugaacuuugaggagau

SEQ ID NO: 2389465 - RNA, 19 nt, Homo sapiens
  misc_RNA (1)...(19): siRNA sense strand
aggcgaagaaacugggcua

SEQ ID NO: 2389466 - RNA, 19 nt, Homo sapiens
  misc_RNA (1)...(19): siRNA sense strand
gggaacaguaccugcagaa

SEQ ID NO: 2389467 - RNA, 19 nt, Homo sapiens
  misc_RNA (1)...(19): siRNA sense strand
ugaaggagucagagcaaga

SEQ ID NO: 2389468 - RNA, 19 nt, Homo sapiens
  misc_RNA (1)...(19): siRNA sense strand
gggugauugaggaggaaga

SEQ ID NO: 2389469 - RNA, 19 nt, Homo sapiens
  misc_RNA (1)...(19): siRNA sense strand
uagaagaggaaacggagaa

SEQ ID NO: 2389470 - RNA, 19 nt, Homo sapiens
  misc_RNA (1)...(19): siRNA sense strand
cuaagggagcugaggaaca

SEQ ID NO: 2389471 - RNA, 19 nt, Homo sapiens
  misc_RNA (1)...(19): siRNA sense strand
agucagagcaagagcuuca

SEQ ID NO: 2389472 - RNA, 19 nt, Homo sapiens
  misc_RNA (1)...(19): siRNA sense strand
gaggauugucauaguggaa

SEQ ID NO: 2389473 - RNA, 19 nt, Homo sapiens
  misc_RNA (1)...(19): siRNA sense strand
uagcagagaagaaggugaa

SEQ ID NO: 2389474 - RNA, 19 nt, Homo sapiens
  misc_RNA (1)...(19): siRNA sense strand
ggucuauaguguccagaau

SEQ ID NO: 2389475 - RNA, 19 nt, Homo sapiens
  misc_RNA (1)...(19): siRNA sense strand
cugaggaacaagcgggaau

SEQ ID NO: 2389476 - RNA, 19 nt, Homo sapiens
  misc_RNA (1)...(19): siRNA sense strand
caggauagugaauggauuu

SEQ ID NO: 2389477 - RNA, 19 nt, Homo sapiens
  misc_RNA (1)...(19): siRNA sense strand
cggaaguccuugaggccca

SEQ ID NO: 2389478 - RNA, 19 nt, Homo sapiens
  misc_RNA (1)...(19): siRNA sense strand
ggaauguacugcaucggaa

SEQ ID NO: 2389479 - RNA, 19 nt, Homo sapiens
  misc_RNA (1)...(19): siRNA sense strand
aagaccauguugagagcua

SEQ ID NO: 2389480 - RNA, 19 nt, Homo sapiens
  misc_RNA (1)...(19): siRNA sense strand
ccguaugugcccugaaauu

SEQ ID NO: 2389481 - RNA, 19 nt, Homo sapiens
  misc_RNA (1)...(19): siRNA sense strand
cagagggaagagagauuua

SEQ ID NO: 2389482 - RNA, 19 nt, Homo sapiens
  misc_RNA (1)...(19): siRNA sense strand
gggcacagucaaccgguaa

SEQ ID NO: 2389483 - RNA, 19 nt, Homo sapiens
  misc_RNA (1)...(19): siRNA sense strand
uggaagaagcugcggaagu

SEQ ID NO: 2389484 - RNA, 19 nt, Homo sapiens
  misc_RNA (1)...(19): siRNA sense strand
aggaagagcgagugcagau

SEQ ID NO: 2389485 - RNA, 19 nt, Homo sapiens
  misc_RNA (1)...(19): siRNA sense strand
ugucagugccauagguuau

SEQ ID NO: 2389486 - RNA, 19 nt, Homo sapiens
  misc_RNA (1)...(19): siRNA sense strand
caacgagucuguuuggcaa

SEQ ID NO: 2389487 - RNA, 19 nt, Homo sapiens
  misc_RNA (1)...(19): siRNA sense strand
ugggucugguugagaauua

SEQ ID NO: 2389488 - RNA, 19 nt, Homo sapiens
  misc_RNA (1)...(19): siRNA sense strand
agugaaauccagaggcuca

SEQ ID NO: 2389489 - RNA, 19 nt, Homo sapiens
  misc_RNA (1)...(19): siRNA sense strand
cuaacagggagcaggaaga

SEQ ID NO: 2389490 - RNA, 19 nt, Homo sapiens
  misc_RNA (1)...(19): siRNA sense strand
ggaagaaggaagagagugg

SEQ ID NO: 2389491 - RNA, 19 nt, Homo sapiens
  misc_RNA (1)...(19): siRNA sense strand
gaauguacugcaucggaaa

SEQ ID NO: 2389492 - RNA, 19 nt, Homo sapiens
  misc_RNA (1)...(19): siRNA sense strand
cggcuagaagagauugaaa

SEQ ID NO: 2389493 - RNA, 19 nt, Homo sapiens
  misc_RNA (1)...(19): siRNA sense strand
gggcaggaacccacaucaa

SEQ ID NO: 2389494 - RNA, 19 nt, Homo sapiens
  misc_RNA (1)...(19): siRNA sense strand
ccgcacaucagcagaaaga

SEQ ID NO: 2389495 - RNA, 19 nt, Homo sapiens
  misc_RNA (1)...(19): siRNA sense strand
ucacaagggaacuggcuau

SEQ ID NO: 2389496 - RNA, 19 nt, Homo sapiens
  misc_RNA (1)...(19): siRNA sense strand
aggcccugcuggagaggaa

SEQ ID NO: 2389497 - RNA, 19 nt, Homo sapiens
  misc_RNA (1)...(19): siRNA sense strand
gagcuagaaaucaggccaa

SEQ ID NO: 2389498 - RNA, 19 nt, Homo sapiens
  misc_RNA (1)...(19): siRNA sense strand
ucucagaggaagagcgagu

SEQ ID NO: 2389499 - RNA, 19 nt, Homo sapiens
  misc_RNA (1)...(19): siRNA sense strand
ggaagagaguggagcagac

SEQ ID NO: 2389500 - RNA, 19 nt, Homo sapiens
  misc_RNA (1)...(19): siRNA sense strand
cagaccaggaguuggcuaa

SEQ ID NO: 2389501 - RNA, 19 nt, Homo sapiens
  misc_RNA (1)...(19): siRNA sense strand
aagaaggcaagguggguuu

SEQ ID NO: 2389502 - RNA, 19 nt, Homo sapiens
  misc_RNA (1)...(19): siRNA sense strand
ccuuaugacucuucacaca

SEQ ID NO: 2389503 - RNA, 19 nt, Homo sapiens
  misc_RNA (1)...(19): siRNA sense strand
ggcuagaagagauugaaau

SEQ ID NO: 2389504 - RNA, 19 nt, Homo sapiens
  misc_RNA (1)...(19): siRNA sense strand
uugaacaucugcaggaaaa

SEQ ID NO: 2389505 - RNA, 19 nt, Homo sapiens
  misc_RNA (1)...(19): siRNA sense strand
acacaaaaccacugaaguu

SEQ ID NO: 2389506 - RNA, 19 nt, Homo sapiens
  misc_RNA (1)...(19): siRNA sense strand
gcuuugaggaugagccuga

SEQ ID NO: 2389507 - RNA, 19 nt, Homo sapiens
  misc_RNA (1)...(19): siRNA sense strand
gcaaguacuuccugugcca

SEQ ID NO: 2389508 - RNA, 19 nt, Homo sapiens
  misc_RNA (1)...(19): siRNA sense strand
gagcaagaucauucauaca

SEQ ID NO: 2389509 - RNA, 19 nt, Homo sapiens
  misc_RNA (1)...(19): siRNA sense strand
ccaccaugguccaaugaca

SEQ ID NO: 2389510 - RNA, 19 nt, Homo sapiens
  misc_RNA (1)...(19): siRNA sense strand
acggagaagaaccuggaaa

SEQ ID NO: 2389511 - RNA, 19 nt, Homo sapiens
  misc_RNA (1)...(19): siRNA sense strand
ccaccaagagcuagaaauc

SEQ ID NO: 2389512 - RNA, 19 nt, Homo sapiens
  misc_RNA (1)...(19): siRNA sense strand
cggccaacaaccugaugaa

SEQ ID NO: 2389513 - RNA, 19 nt, Homo sapiens
  misc_RNA (1)...(19): siRNA sense strand
guugagagcuaccgaacca

SEQ ID NO: 2389514 - RNA, 19 nt, Homo sapiens
  misc_RNA (1)...(19): siRNA sense strand
aggaagaucaagagaauaa

SEQ ID NO: 2389515 - RNA, 19 nt, Homo sapiens
  misc_RNA (1)...(19): siRNA sense strand
aggaaacuguggagaguaa

SEQ ID NO: 2389516 - RNA, 19 nt, Homo sapiens
  misc_RNA (1)...(19): siRNA sense strand
gggacaagguagaagaaaa

SEQ ID NO: 2389517 - RNA, 19 nt, Homo sapiens
  misc_RNA (1)...(19): siRNA sense strand
gcuuggagacgaagagaaa

SEQ ID NO: 2389518 - RNA, 19 nt, Homo sapiens
  misc_RNA (1)...(19): siRNA sense strand
ucaucagacuguagagaua

SEQ ID NO: 2389519 - RNA, 19 nt, Homo sapiens
  misc_RNA (1)...(19): siRNA sense strand
ggagaaaaggacagggaua

SEQ ID NO: 2389520 - RNA, 19 nt, Homo sapiens
  misc_RNA (1)...(19): siRNA sense strand
ggaugaaggaguuguuaaa

SEQ ID NO: 2389521 - RNA, 19 nt, Homo sapiens
  misc_RNA (1)...(19): siRNA sense strand
gaacaagauucaaaggaga

SEQ ID NO: 2389522 - RNA, 19 nt, Homo sapiens
  misc_RNA (1)...(19): siRNA sense strand
uuacacaagcagagaaaua

SEQ ID NO: 2389523 - RNA, 19 nt, Homo sapiens
  misc_RNA (1)...(19): siRNA sense strand
agaagaagcaccagaggaa

SEQ ID NO: 2389524 - RNA, 19 nt, Homo sapiens
  misc_RNA (1)...(19): siRNA sense strand
agauaagucagcagaaaua

SEQ ID NO: 2389525 - RNA, 19 nt, Homo sapiens
  misc_RNA (1)...(19): siRNA sense strand
aaggaaacauagaugguaa

SEQ ID NO: 2389526 - RNA, 19 nt, Homo sapiens
  misc_RNA (1)...(19): siRNA sense strand
gcgaggaagacaaagaaua

SEQ ID NO: 2389527 - RNA, 19 nt, Homo sapiens
  misc_RNA (1)...(19): siRNA sense strand
gcauagacgcagagacaga

SEQ ID NO: 2389528 - RNA, 19 nt, Homo sapiens
  misc_RNA (1)...(19): siRNA sense strand
aagcagagauaguaggaau

SEQ ID NO: 2389529 - RNA, 19 nt, Homo sapiens
  misc_RNA (1)...(19): siRNA sense strand
cggacaaauugaaguggua

SEQ ID NO: 2389530 - RNA, 19 nt, Homo sapiens
  misc_RNA (1)...(19): siRNA sense strand
ccaaagaagaagcagcaaa

SEQ ID NO: 2389531 - RNA, 19 nt, Homo sapiens
  misc_RNA (1)...(19): siRNA sense strand
ccgaaauagcggacaaauu

SEQ ID NO: 2389532 - RNA, 19 nt, Homo sapiens
  misc_RNA (1)...(19): siRNA sense strand
uaauaauccgggagaaaua

SEQ ID NO: 2389533 - RNA, 19 nt, Homo sapiens
  misc_RNA (1)...(19): siRNA sense strand
cagcaaaguaugaaguaau

SEQ ID NO: 2389534 - RNA, 19 nt, Homo sapiens
  misc_RNA (1)...(19): siRNA sense strand
gugaaaacaaggagauaaa

SEQ ID NO: 2389535 - RNA, 19 nt, Homo sapiens
  misc_RNA (1)...(19): siRNA sense strand
ggaaaagcaagcagagaua

SEQ ID NO: 2389536 - RNA, 19 nt, Homo sapiens
  misc_RNA (1)...(19): siRNA sense strand
agacaagaagccagauaaa

SEQ ID NO: 2389537 - RNA, 19 nt, Homo sapiens
  misc_RNA (1)...(19): siRNA sense strand
uguaauaauccgggagaaa

SEQ ID NO: 2389538 - RNA, 19 nt, Homo sapiens
  misc_RNA (1)...(19): siRNA sense strand
aagcaaagauggagauagu

SEQ ID NO: 2389539 - RNA, 19 nt, Homo sapiens
  misc_RNA (1)...(19): siRNA sense strand
aggcauagacgcagagaca

SEQ ID NO: 2389540 - RNA, 19 nt, Homo sapiens
  misc_RNA (1)...(19): siRNA sense strand
gugaagaugcggagucuaa

SEQ ID NO: 2389541 - RNA, 19 nt, Homo sapiens
  misc_RNA (1)...(19): siRNA sense strand
cagaaaggagucagguuaa

SEQ ID NO: 2389542 - RNA, 19 nt, Homo sapiens
  misc_RNA (1)...(19): siRNA sense strand
ggauaaacugaaacugaaa

SEQ ID NO: 2389543 - RNA, 19 nt, Homo sapiens
  misc_RNA (1)...(19): siRNA sense strand
uguggagaguaaagagaaa

SEQ ID NO: 2389544 - RNA, 19 nt, Homo sapiens
  misc_RNA (1)...(19): siRNA sense strand
gauucaaaggagacaguaa

SEQ ID NO: 2389545 - RNA, 19 nt, Homo sapiens
  misc_RNA (1)...(19): siRNA sense strand
gagaaagagcagagagaag

SEQ ID NO: 2389546 - RNA, 19 nt, Homo sapiens
  misc_RNA (1)...(19): siRNA sense strand
cgaggaagacaaagaauau

SEQ ID NO: 2389547 - RNA, 19 nt, Homo sapiens
  misc_RNA (1)...(19): siRNA sense strand
ucgcaaacauucagacaau

SEQ ID NO: 2389548 - RNA, 19 nt, Homo sapiens
  misc_RNA (1)...(19): siRNA sense strand
gaaugaagucugugaggau

SEQ ID NO: 2389549 - RNA, 19 nt, Homo sapiens
  misc_RNA (1)...(19): siRNA sense strand
agacaaggacagagacaga

SEQ ID NO: 2389550 - RNA, 19 nt, Homo sapiens
  misc_RNA (1)...(19): siRNA sense strand
uguuaaagaaaguggcaau

SEQ ID NO: 2389551 - RNA, 19 nt, Homo sapiens
  misc_RNA (1)...(19): siRNA sense strand
ggacaagguagaagaaaau

SEQ ID NO: 2389552 - RNA, 19 nt, Homo sapiens
  misc_RNA (1)...(19): siRNA sense strand
gcacaaagauaaagagagg

SEQ ID NO: 2389553 - RNA, 19 nt, Homo sapiens
  misc_RNA (1)...(19): siRNA sense strand
gagucagguuaaagaagaa

SEQ ID NO: 2389554 - RNA, 19 nt, Homo sapiens
  misc_RNA (1)...(19): siRNA sense strand
gcaagaaucugaaaggcau

SEQ ID NO: 2389555 - RNA, 19 nt, Homo sapiens
  misc_RNA (1)...(19): siRNA sense strand
aggaagggcacaaagauaa

SEQ ID NO: 2389556 - RNA, 19 nt, Homo sapiens
  misc_RNA (1)...(19): siRNA sense strand
caucaggaaccaaggaaau

SEQ ID NO: 2389557 - RNA, 19 nt, Homo sapiens
  misc_RNA (1)...(19): siRNA sense strand
cagaaagcgcuauggagua

SEQ ID NO: 2389558 - RNA, 19 nt, Homo sapiens
  misc_RNA (1)...(19): siRNA sense strand
cagugaagcacaaggucaa

SEQ ID NO: 2389559 - RNA, 19 nt, Homo sapiens
  misc_RNA (1)...(19): siRNA sense strand
acaaugaagcagaaaguau

SEQ ID NO: 2389560 - RNA, 19 nt, Homo sapiens
  misc_RNA (1)...(19): siRNA sense strand
ggaagggcacaaagauaaa

SEQ ID NO: 2389561 - RNA, 19 nt, Homo sapiens
  misc_RNA (1)...(19): siRNA sense strand
ugacagaacuaaaagcaaa

SEQ ID NO: 2389562 - RNA, 19 nt, Homo sapiens
  misc_RNA (1)...(19): siRNA sense strand
cagccgaaauagcggacaa

SEQ ID NO: 2389563 - RNA, 19 nt, Homo sapiens
  misc_RNA (1)...(19): siRNA sense strand
gugaaaaccuuguugcuaa

SEQ ID NO: 2389564 - RNA, 19 nt, Homo sapiens
  misc_RNA (1)...(19): siRNA sense strand
guugaaugcuauagaaagu

SEQ ID NO: 2389565 - RNA, 19 nt, Homo sapiens
  misc_RNA (1)...(19): siRNA sense strand
gcaucaggaaccaaggaaa

SEQ ID NO: 2389566 - RNA, 19 nt, Homo sapiens
  misc_RNA (1)...(19): siRNA sense strand
ucuaauaggcaguuggaga

SEQ ID NO: 2389567 - RNA, 19 nt, Homo sapiens
  misc_RNA (1)...(19): siRNA sense strand
caaagaagaagcagcaaaa

SEQ ID NO: 2389568 - RNA, 19 nt, Homo sapiens
  misc_RNA (1)...(19): siRNA sense strand
uggugauuguguuggguua

SEQ ID NO: 2389569 - RNA, 19 nt, Homo sapiens
  misc_RNA (1)...(19): siRNA sense strand
augagaagcaagagaugaa

SEQ ID NO: 2389570 - RNA, 19 nt, Homo sapiens
  misc_RNA (1)...(19): siRNA sense strand
caagaaaaguugaacaaga

SEQ ID NO: 2389571 - RNA, 19 nt, Homo sapiens
  misc_RNA (1)...(19): siRNA sense strand
agaaguaacuccugaucau

SEQ ID NO: 2389572 - RNA, 19 nt, Homo sapiens
  misc_RNA (1)...(19): siRNA sense strand
ccucagacaguuugggauu

SEQ ID NO: 2389573 - RNA, 19 nt, Homo sapiens
  misc_RNA (1)...(19): siRNA sense strand
ucgaagaggaucagcagua

SEQ ID NO: 2389574 - RNA, 19 nt, Homo sapiens
  misc_RNA (1)...(19): siRNA sense strand
gauagguaccacaaagaua

SEQ ID NO: 2389575 - RNA, 19 nt, Homo sapiens
  misc_RNA (1)...(19): siRNA sense strand
agucuuagucucagaggua

SEQ ID NO: 2389576 - RNA, 19 nt, Homo sapiens
  misc_RNA (1)...(19): siRNA sense strand
uuuaauggcacaagaacaa

SEQ ID NO: 2389577 - RNA, 19 nt, Homo sapiens
  misc_RNA (1)...(19): siRNA sense strand
acagauaagucagcagaaa

SEQ ID NO: 2389578 - RNA, 19 nt, Homo sapiens
  misc_RNA (1)...(19): siRNA sense strand
gguuaaagaagaaguaugu

SEQ ID NO: 2389579 - RNA, 19 nt, Homo sapiens
  misc_RNA (1)...(19): siRNA sense strand
aauagaaggugcagccgaa

SEQ ID NO: 2389580 - RNA, 19 nt, Homo sapiens
  misc_RNA (1)...(19): siRNA sense strand
uggaagaagacgaggacua

SEQ ID NO: 2389581 - RNA, 19 nt, Homo sapiens
  misc_RNA (1)...(19): siRNA sense strand
ggaacaaaucagugguaca

SEQ ID NO: 2389582 - RNA, 19 nt, Homo sapiens
  misc_RNA (1)...(19): siRNA sense strand
ccagaauauuaaacagaca

SEQ ID NO: 2389583 - RNA, 19 nt, Homo sapiens
  misc_RNA (1)...(19): siRNA sense strand
ggaacaggcucuugggaug

SEQ ID NO: 2389584 - RNA, 19 nt, Homo sapiens
  misc_RNA (1)...(19): siRNA sense strand
auacauugccauugccaaa

SEQ ID NO: 2389585 - RNA, 19 nt, Homo sapiens
  misc_RNA (1)...(19): siRNA sense strand
caaaacaaggaaagcaaaa

SEQ ID NO: 2389586 - RNA, 19 nt, Homo sapiens
  misc_RNA (1)...(19): siRNA sense strand
aagaagauguggaggcugu

SEQ ID NO: 2389587 - RNA, 19 nt, Homo sapiens
  misc_RNA (1)...(19): siRNA sense strand
augaacuggaagaggcaaa

SEQ ID NO: 2389588 - RNA, 19 nt, Homo sapiens
  misc_RNA (1)...(19): siRNA sense strand
uguaaugcacguuggacua

SEQ ID NO: 2389589 - RNA, 19 nt, Homo sapiens
  misc_RNA (1)...(19): siRNA sense strand
ucucagacgugauugggaa

SEQ ID NO: 2389590 - RNA, 19 nt, Homo sapiens
  misc_RNA (1)...(19): siRNA sense strand
agacaguuccucaggucaa

SEQ ID NO: 2389591 - RNA, 19 nt, Homo sapiens
  misc_RNA (1)...(19): siRNA sense strand
gcgaggaugaacuggaaga

SEQ ID NO: 2389592 - RNA, 19 nt, Homo sapiens
  misc_RNA (1)...(19): siRNA sense strand
gaauagaaccauaucgacu

SEQ ID NO: 2389593 - RNA, 19 nt, Homo sapiens
  misc_RNA (1)...(19): siRNA sense strand
aggaaauauggccgagauu

SEQ ID NO: 2389594 - RNA, 19 nt, Homo sapiens
  misc_RNA (1)...(19): siRNA sense strand
ccguacaagccaucaggaa

SEQ ID NO: 2389595 - RNA, 19 nt, Homo sapiens
  misc_RNA (1)...(19): siRNA sense strand
ccaaagaaaagcaugggua

SEQ ID NO: 2389596 - RNA, 19 nt, Homo sapiens
  misc_RNA (1)...(19): siRNA sense strand
aagcggagagggaggaaca

SEQ ID NO: 2389597 - RNA, 19 nt, Homo sapiens
  misc_RNA (1)...(19): siRNA sense strand
acuugaugguggaauagaa

SEQ ID NO: 2389598 - RNA, 19 nt, Homo sapiens
  misc_RNA (1)...(19): siRNA sense strand
ggaugaacuggaagaggca

SEQ ID NO: 2389599 - RNA, 19 nt, Homo sapiens
  misc_RNA (1)...(19): siRNA sense strand
gggaggcagaacaugguaa

SEQ ID NO: 2389600 - RNA, 19 nt, Homo sapiens
  misc_RNA (1)...(19): siRNA sense strand
aagaagacgaggacuaaaa

SEQ ID NO: 2389601 - RNA, 19 nt, Homo sapiens
  misc_RNA (1)...(19): siRNA sense strand
cagacgugauugggaacaa

SEQ ID NO: 2389602 - RNA, 19 nt, Homo sapiens
  misc_RNA (1)...(19): siRNA sense strand
augaguggacuguggaaga

SEQ ID NO: 2389603 - RNA, 19 nt, Homo sapiens
  misc_RNA (1)...(19): siRNA sense strand
ucagggaagcggagaggga

SEQ ID NO: 2389604 - RNA, 19 nt, Homo sapiens
  misc_RNA (1)...(19): siRNA sense strand
ucgaaaagucauuggcuga

SEQ ID NO: 2389605 - RNA, 19 nt, Homo sapiens
  misc_RNA (1)...(19): siRNA sense strand
aagaaugggaggcagaaca

SEQ ID NO: 2389606 - RNA, 19 nt, Homo sapiens
  misc_RNA (1)...(19): siRNA sense strand
guggacuguggaagauaaa

SEQ ID NO: 2389607 - RNA, 19 nt, Homo sapiens
  misc_RNA (1)...(19): siRNA sense strand
gacaacuagacauggaauu

SEQ ID NO: 2389608 - RNA, 19 nt, Homo sapiens
  misc_RNA (1)...(19): siRNA sense strand
ccacagaaaacguagcaaa

SEQ ID NO: 2389609 - RNA, 19 nt, Homo sapiens
  misc_RNA (1)...(19): siRNA sense strand
ccagaaagcugccgcacga

SEQ ID NO: 2389610 - RNA, 19 nt, Homo sapiens
  misc_RNA (1)...(19): siRNA sense strand
aaguaaccacauuggauaa

SEQ ID NO: 2389611 - RNA, 19 nt, Homo sapiens
  misc_RNA (1)...(19): siRNA sense strand
ccggcuaacagaugaagaa

SEQ ID NO: 2389612 - RNA, 19 nt, Homo sapiens
  misc_RNA (1)...(19): siRNA sense strand
augaagaagucgagaugac

SEQ ID NO: 2389613 - RNA, 19 nt, Homo sapiens
  misc_RNA (1)...(19): siRNA sense strand
aguuugagcuggaggaccu

SEQ ID NO: 2389614 - RNA, 19 nt, Homo sapiens
  misc_RNA (1)...(19): siRNA sense strand
uagaaagagacauguccaa

SEQ ID NO: 2389615 - RNA, 19 nt, Homo sapiens
  misc_RNA (1)...(19): siRNA sense strand
gaucgagauaugaagcgaa

SEQ ID NO: 2389616 - RNA, 19 nt, Homo sapiens
  misc_RNA (1)...(19): siRNA sense strand
cagaugaagaagucgagau

SEQ ID NO: 2389617 - RNA, 19 nt, Homo sapiens
  misc_RNA (1)...(19): siRNA sense strand
ccuccuaccaccacagcua

SEQ ID NO: 2389618 - RNA, 19 nt, Homo sapiens
  misc_RNA (1)...(19): siRNA sense strand
caguugauggacaggaaaa

SEQ ID NO: 2389619 - RNA, 19 nt, Homo sapiens
  misc_RNA (1)...(19): siRNA sense strand
acgugaagccggaagaugu

SEQ ID NO: 2389620 - RNA, 19 nt, Homo sapiens
  misc_RNA (1)...(19): siRNA sense strand
uggccaagagggagauaaa

SEQ ID NO: 2389621 - RNA, 19 nt, Homo sapiens
  misc_RNA (1)...(19): siRNA sense strand
ggaauggccaagagggaga

SEQ ID NO: 2389622 - RNA, 19 nt, Homo sapiens
  misc_RNA (1)...(19): siRNA sense strand
ggagauaaucgcagcacca

SEQ ID NO: 2389623 - RNA, 19 nt, Homo sapiens
  misc_RNA (1)...(19): siRNA sense strand
agcaaagauuccaugaaau

SEQ ID NO: 2389624 - RNA, 19 nt, Homo sapiens
  misc_RNA (1)...(19): siRNA sense strand
agauguacuucaugaccau

SEQ ID NO: 2389625 - RNA, 19 nt, Homo sapiens
  misc_RNA (1)...(19): siRNA sense strand
aagaauuuguggagcggua

SEQ ID NO: 2389626 - RNA, 19 nt, Homo sapiens
  misc_RNA (1)...(19): siRNA sense strand
ucagagaggauuagggaca

SEQ ID NO: 2389627 - RNA, 19 nt, Homo sapiens
  misc_RNA (1)...(19): siRNA sense strand
cggcacaacuacuacgaga

SEQ ID NO: 2389628 - RNA, 19 nt, Homo sapiens
  misc_RNA (1)...(19): siRNA sense strand
acaacuacuacgagagcuu

SEQ ID NO: 2389629 - RNA, 19 nt, Homo sapiens
  misc_RNA (1)...(19): siRNA sense strand
caagacgguaagagggaga

SEQ ID NO: 2389630 - RNA, 19 nt, Homo sapiens
  misc_RNA (1)...(19): siRNA sense strand
acgguaagagggagaccaa

SEQ ID NO: 2389631 - RNA, 19 nt, Homo sapiens
  misc_RNA (1)...(19): siRNA sense strand
gugaggauaacgauggcua

SEQ ID NO: 2389632 - RNA, 19 nt, Homo sapiens
  misc_RNA (1)...(19): siRNA sense strand
aagacuacaaggugccaaa

SEQ ID NO: 2389633 - RNA, 19 nt, Homo sapiens
  misc_RNA (1)...(19): siRNA sense strand
aggaaauaucggaaccaga

SEQ ID NO: 2389634 - RNA, 19 nt, Homo sapiens
  misc_RNA (1)...(19): siRNA sense strand
accaaaguuaucaaggaaa

SEQ ID NO: 2389635 - RNA, 19 nt, Homo sapiens
  misc_RNA (1)...(19): siRNA sense strand
cuuacaagcccgugguuuu

SEQ ID NO: 2389636 - RNA, 19 nt, Homo sapiens
  misc_RNA (1)...(19): siRNA sense strand
cuucaggaguccacaggga

SEQ ID NO: 2389637 - RNA, 19 nt, Homo sapiens
  misc_RNA (1)...(19): siRNA sense strand
ccaauaagcagaugaggga

SEQ ID NO: 2389638 - RNA, 19 nt, Homo sapiens
  misc_RNA (1)...(19): siRNA sense strand
ucgcaaaggcagagcagga

SEQ ID NO: 2389639 - RNA, 19 nt, Homo sapiens
  misc_RNA (1)...(19): siRNA sense strand
aggacgaggcagagaaguu

SEQ ID NO: 2389640 - RNA, 19 nt, Homo sapiens
  misc_RNA (1)...(19): siRNA sense strand
auucaggccaagaaggaaa

SEQ ID NO: 2389641 - RNA, 19 nt, Homo sapiens
  misc_RNA (1)...(19): siRNA sense strand
agaaggaaaggguggccaa

SEQ ID NO: 2389642 - RNA, 19 nt, Homo sapiens
  misc_RNA (1)...(19): siRNA sense strand
cagagaaguugcaacgcau

SEQ ID NO: 2389643 - RNA, 19 nt, Homo sapiens
  misc_RNA (1)...(19): siRNA sense strand
gcaagaagccucagcugga

SEQ ID NO: 2389644 - RNA, 19 nt, Homo sapiens
  misc_RNA (1)...(19): siRNA sense strand
aggaaagaggaggaaguaa

SEQ ID NO: 2389645 - RNA, 19 nt, Homo sapiens
  misc_RNA (1)...(19): siRNA sense strand
uggccaagaacgagcugaa

SEQ ID NO: 2389646 - RNA, 19 nt, Homo sapiens
  misc_RNA (1)...(19): siRNA sense strand
aaaugagccagaagggcaa

SEQ ID NO: 2389647 - RNA, 19 nt, Homo sapiens
  misc_RNA (1)...(19): siRNA sense strand
cagagcaggacgaggcaga

SEQ ID NO: 2389648 - RNA, 19 nt, Homo sapiens
  misc_RNA (1)...(19): siRNA sense strand
agaugagggaggaggacca

SEQ ID NO: 2389649 - RNA, 19 nt, Homo sapiens
  misc_RNA (1)...(19): siRNA sense strand
gcagagaaguugcaacgca

SEQ ID NO: 2389650 - RNA, 19 nt, Homo sapiens
  misc_RNA (1)...(19): siRNA sense strand
ccaagcggauucaggccaa

SEQ ID NO: 2389651 - RNA, 19 nt, Homo sapiens
  misc_RNA (1)...(19): siRNA sense strand
gucccaagaagaagaccaa

SEQ ID NO: 2389652 - RNA, 19 nt, Homo sapiens
  misc_RNA (1)...(19): siRNA sense strand
ccaggaggaaagaggagga

SEQ ID NO: 2389653 - RNA, 19 nt, Homo sapiens
  misc_RNA (1)...(19): siRNA sense strand
agccagaagggcaagagaa

SEQ ID NO: 2389654 - RNA, 19 nt, Homo sapiens
  misc_RNA (1)...(19): siRNA sense strand
gaacaaacaagaaggccaa

SEQ ID NO: 2389655 - RNA, 19 nt, Homo sapiens
  misc_RNA (1)...(19): siRNA sense strand
aagaaagagucaacggcaa

SEQ ID NO: 2389656 - RNA, 19 nt, Homo sapiens
  misc_RNA (1)...(19): siRNA sense strand
uggaagaagaagaagaauu

SEQ ID NO: 2389657 - RNA, 19 nt, Homo sapiens
  misc_RNA (1)...(19): siRNA sense strand
gcacagaauugcugggaag

SEQ ID NO: 2389658 - RNA, 19 nt, Homo sapiens
  misc_RNA (1)...(19): siRNA sense strand
ccuaguggaaagaggcaaa

SEQ ID NO: 2389659 - RNA, 19 nt, Homo sapiens
  misc_RNA (1)...(19): siRNA sense strand
cgucgaauuugaaggugaa

SEQ ID NO: 2389660 - RNA, 19 nt, Homo sapiens
  misc_RNA (1)...(19): siRNA sense strand
cgcaauggcaucaaagaaa

SEQ ID NO: 2389661 - RNA, 19 nt, Homo sapiens
  misc_RNA (1)...(19): siRNA sense strand
auggauaaacacuggauua

SEQ ID NO: 2389662 - RNA, 19 nt, Homo sapiens
  misc_RNA (1)...(19): siRNA sense strand
cguaggaggaagaaggaga

SEQ ID NO: 2389663 - RNA, 19 nt, Homo sapiens
  misc_RNA (1)...(19): siRNA sense strand
aagagaaauuaaagagcca

SEQ ID NO: 2389664 - RNA, 19 nt, Homo sapiens
  misc_RNA (1)...(19): siRNA sense strand
gggauggaugggaagguua

SEQ ID NO: 2389665 - RNA, 19 nt, Homo sapiens
  misc_RNA (1)...(19): siRNA sense strand
caaacauucuacagcgcaa

SEQ ID NO: 2389666 - RNA, 19 nt, Homo sapiens
  misc_RNA (1)...(19): siRNA sense strand
cgaacaaacaagaaggcca

SEQ ID NO: 2389667 - RNA, 19 nt, Homo sapiens
  misc_RNA (1)...(19): siRNA sense strand
gagaacaaccguaggagga

SEQ ID NO: 2389668 - RNA, 19 nt, Homo sapiens
  misc_RNA (1)...(19): siRNA sense strand
aaauaaagauggaggaagc

SEQ ID NO: 2389669 - RNA, 19 nt, Homo sapiens
  misc_RNA (1)...(19): siRNA sense strand
agaaagagucaacggcaau

SEQ ID NO: 2389670 - RNA, 19 nt, Homo sapiens
  misc_RNA (1)...(19): siRNA sense strand
cauaaaucuggaagaagaa

SEQ ID NO: 2389671 - RNA, 19 nt, Homo sapiens
  misc_RNA (1)...(19): siRNA sense strand
agaaggagaggaaggagaa

SEQ ID NO: 2389672 - RNA, 19 nt, Homo sapiens
  misc_RNA (1)...(19): siRNA sense strand
ccgucgaauuugaagguga

SEQ ID NO: 2389673 - RNA, 19 nt, Homo sapiens
  misc_RNA (1)...(19): siRNA sense strand
agaagagacggcagaggaa

SEQ ID NO: 2389674 - RNA, 19 nt, Homo sapiens
  misc_RNA (1)...(19): siRNA sense strand
gaauauaauggcagcuaca

SEQ ID NO: 2389675 - RNA, 19 nt, Homo sapiens
  misc_RNA (1)...(19): siRNA sense strand
cgagaauggcuuggauuaa

SEQ ID NO: 2389676 - RNA, 19 nt, Homo sapiens
  misc_RNA (1)...(19): siRNA sense strand
gagaaagauuauggaacau

SEQ ID NO: 2389677 - RNA, 19 nt, Homo sapiens
  misc_RNA (1)...(19): siRNA sense strand
ccgggaaguaugugcacaa

SEQ ID NO: 2389678 - RNA, 19 nt, Homo sapiens
  misc_RNA (1)...(19): siRNA sense strand
agucaaaucacuugcccaa

SEQ ID NO: 2389679 - RNA, 19 nt, Homo sapiens
  misc_RNA (1)...(19): siRNA sense strand
aagaaggagaggaaggaga

SEQ ID NO: 2389680 - RNA, 19 nt, Homo sapiens
  misc_RNA (1)...(19): siRNA sense strand
ccuuaucagcucacaaaua

SEQ ID NO: 2389681 - RNA, 19 nt, Homo sapiens
  misc_RNA (1)...(19): siRNA sense strand
ggaaaauaccucaaugaau

SEQ ID NO: 2389682 - RNA, 19 nt, Homo sapiens
  misc_RNA (1)...(19): siRNA sense strand
guuaugggauggaugggaa

SEQ ID NO: 2389683 - RNA, 19 nt, Homo sapiens
  misc_RNA (1)...(19): siRNA sense strand
aaggaagaauccagcaaga

SEQ ID NO: 2389684 - RNA, 19 nt, Homo sapiens
  misc_RNA (1)...(19): siRNA sense strand
agcagaagccaaagaaaga

SEQ ID NO: 2389685 - RNA, 19 nt, Homo sapiens
  misc_RNA (1)...(19): siRNA sense strand
aagagaagugagaggacau

SEQ ID NO: 2389686 - RNA, 19 nt, Homo sapiens
  misc_RNA (1)...(19): siRNA sense strand
cuuccaugacaaagacaaa

SEQ ID NO: 2389687 - RNA, 19 nt, Homo sapiens
  misc_RNA (1)...(19): siRNA sense strand
cucaggaaguagauagcaa

SEQ ID NO: 2389688 - RNA, 19 nt, Homo sapiens
  misc_RNA (1)...(19): siRNA sense strand
agaagaagaagaauugcaa

SEQ ID NO: 2389689 - RNA, 19 nt, Homo sapiens
  misc_RNA (1)...(19): siRNA sense strand
ccuacacagaggacaguua

SEQ ID NO: 2389690 - RNA, 19 nt, Homo sapiens
  misc_RNA (1)...(19): siRNA sense strand
uggaggaagcuaugaccua

SEQ ID NO: 2389691 - RNA, 19 nt, Homo sapiens
  misc_RNA (1)...(19): siRNA sense strand
caguuaaugagacgcauaa

SEQ ID NO: 2389692 - RNA, 19 nt, Homo sapiens
  misc_RNA (1)...(19): siRNA sense strand
agaauauccaacagucaaa

SEQ ID NO: 2389693 - RNA, 19 nt, Homo sapiens
  misc_RNA (1)...(19): siRNA sense strand
aagaagaagaauugcaagu

SEQ ID NO: 2389694 - RNA, 19 nt, Homo sapiens
  misc_RNA (1)...(19): siRNA sense strand
gaggaauguagcugcagua

SEQ ID NO: 2389695 - RNA, 19 nt, Homo sapiens
  misc_RNA (1)...(19): siRNA sense strand
ggauauaagcagugcaacc

SEQ ID NO: 2389696 - RNA, 19 nt, Homo sapiens
  misc_RNA (1)...(19): siRNA sense strand
uugauuaugcaaaggacua

SEQ ID NO: 2389697 - RNA, 19 nt, Homo sapiens
  misc_RNA (1)...(19): siRNA sense strand
ugaacgggucaaagaacua

SEQ ID NO: 2389698 - RNA, 19 nt, Homo sapiens
  misc_RNA (1)...(19): siRNA sense strand
ucuggaagaagaagaagaa

SEQ ID NO: 2389699 - RNA, 19 nt, Homo sapiens
  misc_RNA (1)...(19): siRNA sense strand
agauugaagcucugcaaga

SEQ ID NO: 2389700 - RNA, 19 nt, Homo sapiens
  misc_RNA (1)...(19): siRNA sense strand
caucaaugccuuugugacu

SEQ ID NO: 2389701 - RNA, 19 nt, Homo sapiens
  misc_RNA (1)...(19): siRNA sense strand
guggagaggcuguauaaca

SEQ ID NO: 2389702 - RNA, 19 nt, Homo sapiens
  misc_RNA (1)...(19): siRNA sense strand
gagugcaguuguagggagu

SEQ ID NO: 2389703 - RNA, 19 nt, Homo sapiens
  misc_RNA (1)...(19): siRNA sense strand
gagaagagacggcagagga

SEQ ID NO: 2389704 - RNA, 19 nt, Homo sapiens
  misc_RNA (1)...(19): siRNA sense strand
caagaauauccaacaguca

SEQ ID NO: 2389705 - RNA, 19 nt, Homo sapiens
  misc_RNA (1)...(19): siRNA sense strand
ccaaauaugaacgggucaa

SEQ ID NO: 2389706 - RNA, 19 nt, Homo sapiens
  misc_RNA (1)...(19): siRNA sense strand
ccagcagaagccaaagaaa

SEQ ID NO: 2389707 - RNA, 19 nt, Homo sapiens
  misc_RNA (1)...(19): siRNA sense strand
cagcagaagccaaagaaag

SEQ ID NO: 2389708 - RNA, 19 nt, Homo sapiens
  misc_RNA (1)...(19): siRNA sense strand
agaaggaagaauccagcaa

SEQ ID NO: 2389709 - RNA, 19 nt, Homo sapiens
  misc_RNA (1)...(19): siRNA sense strand
uggaaggaccauaaggcau

SEQ ID NO: 2389710 - RNA, 19 nt, Homo sapiens
  misc_RNA (1)...(19): siRNA sense strand
cgagagaaggagagggaaa

SEQ ID NO: 2389711 - RNA, 19 nt, Homo sapiens
  misc_RNA (1)...(19): siRNA sense strand
uguaaagguuggagagaau

SEQ ID NO: 2389712 - RNA, 19 nt, Homo sapiens
  misc_RNA (1)...(19): siRNA sense strand
gcaaaugaagaaugggaaa

SEQ ID NO: 2389713 - RNA, 19 nt, Homo sapiens
  misc_RNA (1)...(19): siRNA sense strand
gccagaaggacaagagaaa

SEQ ID NO: 2389714 - RNA, 19 nt, Homo sapiens
  misc_RNA (1)...(19): siRNA sense strand
gcaaagacgaagacaacaa

SEQ ID NO: 2389715 - RNA, 19 nt, Homo sapiens
  misc_RNA (1)...(19): siRNA sense strand
ccagaggaaauuagggaaa

SEQ ID NO: 2389716 - RNA, 19 nt, Homo sapiens
  misc_RNA (1)...(19): siRNA sense strand
agggaaagggagcgagaaa

SEQ ID NO: 2389717 - RNA, 19 nt, Homo sapiens
  misc_RNA (1)...(19): siRNA sense strand
uagaaaggccagaggagaa

SEQ ID NO: 2389718 - RNA, 19 nt, Homo sapiens
  misc_RNA (1)...(19): siRNA sense strand
cuggagaaggaaagggaaa

SEQ ID NO: 2389719 - RNA, 19 nt, Homo sapiens
  misc_RNA (1)...(19): siRNA sense strand
gcgagaagaaagugaaaca

SEQ ID NO: 2389720 - RNA, 19 nt, Homo sapiens
  misc_RNA (1)...(19): siRNA sense strand
ccgaaagaaggaagaacaa

SEQ ID NO: 2389721 - RNA, 19 nt, Homo sapiens
  misc_RNA (1)...(19): siRNA sense strand
gcgaagaauggucaagaaa

SEQ ID NO: 2389722 - RNA, 19 nt, Homo sapiens
  misc_RNA (1)...(19): siRNA sense strand
ccgaaaaggucacugaaaa

SEQ ID NO: 2389723 - RNA, 19 nt, Homo sapiens
  misc_RNA (1)...(19): siRNA sense strand
auacaaagauggaggauac

SEQ ID NO: 2389724 - RNA, 19 nt, Homo sapiens
  misc_RNA (1)...(19): siRNA sense strand
uggaaguggcauugauaua

SEQ ID NO: 2389725 - RNA, 19 nt, Homo sapiens
  misc_RNA (1)...(19): siRNA sense strand
ggaucuaaccauacgcaaa

SEQ ID NO: 2389726 - RNA, 19 nt, Homo sapiens
  misc_RNA (1)...(19): siRNA sense strand
ggaaggagaaagaaggaga

SEQ ID NO: 2389727 - RNA, 19 nt, Homo sapiens
  misc_RNA (1)...(19): siRNA sense strand
cagcauagcaugauugcaa

SEQ ID NO: 2389728 - RNA, 19 nt, Homo sapiens
  misc_RNA (1)...(19): siRNA sense strand
gggaauaagacaccagauu

SEQ ID NO: 2389729 - RNA, 19 nt, Homo sapiens
  misc_RNA (1)...(19): siRNA sense strand
gaagcaaagacgaagacaa

SEQ ID NO: 2389730 - RNA, 19 nt, Homo sapiens
  misc_RNA (1)...(19): siRNA sense strand
cuagaacggcagaaagaaa

SEQ ID NO: 2389731 - RNA, 19 nt, Homo sapiens
  misc_RNA (1)...(19): siRNA sense strand
gggaacagaggaaggagaa

SEQ ID NO: 2389732 - RNA, 19 nt, Homo sapiens
  misc_RNA (1)...(19): siRNA sense strand
gggacacacucgagauuau

SEQ ID NO: 2389733 - RNA, 19 nt, Homo sapiens
  misc_RNA (1)...(19): siRNA sense strand
ugacacagacagugaaauu

SEQ ID NO: 2389734 - RNA, 19 nt, Homo sapiens
  misc_RNA (1)...(19): siRNA sense strand
caucagagggagcgaagaa

SEQ ID NO: 2389735 - RNA, 19 nt, Homo sapiens
  misc_RNA (1)...(19): siRNA sense strand
auacagaggucgaggccga

SEQ ID NO: 2389736 - RNA, 19 nt, Homo sapiens
  misc_RNA (1)...(19): siRNA sense strand
ggaugacgauaaagcuaaa

SEQ ID NO: 2389737 - RNA, 19 nt, Homo sapiens
  misc_RNA (1)...(19): siRNA sense strand
aggagaaagagcuggagaa

SEQ ID NO: 2389738 - RNA, 19 nt, Homo sapiens
  misc_RNA (1)...(19): siRNA sense strand
aaccagaagcagagaaauu

SEQ ID NO: 2389739 - RNA, 19 nt, Homo sapiens
  misc_RNA (1)...(19): siRNA sense strand
aguuaagacuguaaaccaa

SEQ ID NO: 2389740 - RNA, 19 nt, Homo sapiens
  misc_RNA (1)...(19): siRNA sense strand
gaagcuagagagagagauu

SEQ ID NO: 2389741 - RNA, 19 nt, Homo sapiens
  misc_RNA (1)...(19): siRNA sense strand
acgcaaagcaugggagaau

SEQ ID NO: 2389742 - RNA, 19 nt, Homo sapiens
  misc_RNA (1)...(19): siRNA sense strand
cagugaugaugaugaacaa

SEQ ID NO: 2389743 - RNA, 19 nt, Homo sapiens
  misc_RNA (1)...(19): siRNA sense strand
uggaaagaagcuagagaga

SEQ ID NO: 2389744 - RNA, 19 nt, Homo sapiens
  misc_RNA (1)...(19): siRNA sense strand
ccuagaaaugaaaggagaa

SEQ ID NO: 2389745 - RNA, 19 nt, Homo sapiens
  misc_RNA (1)...(19): siRNA sense strand
ucuccaaauguaagggaaa

SEQ ID NO: 2389746 - RNA, 19 nt, Homo sapiens
  misc_RNA (1)...(19): siRNA sense strand
aggcuaaacugaauggaca

SEQ ID NO: 2389747 - RNA, 19 nt, Homo sapiens
  misc_RNA (1)...(19): siRNA sense strand
acagaagggaagaaguuaa

SEQ ID NO: 2389748 - RNA, 19 nt, Homo sapiens
  misc_RNA (1)...(19): siRNA sense strand
auguaagggaugacgauaa

SEQ ID NO: 2389749 - RNA, 19 nt, Homo sapiens
  misc_RNA (1)...(19): siRNA sense strand
uaacaagcaaggugggcaa

SEQ ID NO: 2389750 - RNA, 19 nt, Homo sapiens
  misc_RNA (1)...(19): siRNA sense strand
uggagaaggagcaggaaaa

SEQ ID NO: 2389751 - RNA, 19 nt, Homo sapiens
  misc_RNA (1)...(19): siRNA sense strand
ccacaaaccaguccagaau

SEQ ID NO: 2389752 - RNA, 19 nt, Homo sapiens
  misc_RNA (1)...(19): siRNA sense strand
agagcaacaugaagaagaa

SEQ ID NO: 2389753 - RNA, 19 nt, Homo sapiens
  misc_RNA (1)...(19): siRNA sense strand
ggcagaaagaaaaggaaaa

SEQ ID NO: 2389754 - RNA, 19 nt, Homo sapiens
  misc_RNA (1)...(19): siRNA sense strand
ccaaagagggaaauugcaa

SEQ ID NO: 2389755 - RNA, 19 nt, Homo sapiens
  misc_RNA (1)...(19): siRNA sense strand
agaaaguggacucgaaauu

SEQ ID NO: 2389756 - RNA, 19 nt, Homo sapiens
  misc_RNA (1)...(19): siRNA sense strand
cgaaauuggaacugacaca

SEQ ID NO: 2389757 - RNA, 19 nt, Homo sapiens
  misc_RNA (1)...(19): siRNA sense strand
caucaaaacaagagcaaca

SEQ ID NO: 2389758 - RNA, 19 nt, Homo sapiens
  misc_RNA (1)...(19): siRNA sense strand
gcaaauaaucagucugcuu

SEQ ID NO: 2389759 - RNA, 19 nt, Homo sapiens
  misc_RNA (1)...(19): siRNA sense strand
cugaaaagacggaaaagaa

SEQ ID NO: 2389760 - RNA, 19 nt, Homo sapiens
  misc_RNA (1)...(19): siRNA sense strand
agguagagccugcaguuaa

SEQ ID NO: 2389761 - RNA, 19 nt, Homo sapiens
  misc_RNA (1)...(19): siRNA sense strand
gagggaaauugcaaagaga

SEQ ID NO: 2389762 - RNA, 19 nt, Homo sapiens
  misc_RNA (1)...(19): siRNA sense strand
accuaaugguacaggacaa

SEQ ID NO: 2389763 - RNA, 19 nt, Homo sapiens
  misc_RNA (1)...(19): siRNA sense strand
ugucugaaauggaacuaaa

SEQ ID NO: 2389764 - RNA, 19 nt, Homo sapiens
  misc_RNA (1)...(19): siRNA sense strand
aguagaacgugcucguaaa

SEQ ID NO: 2389765 - RNA, 19 nt, Homo sapiens
  misc_RNA (1)...(19): siRNA sense strand
cggcagaaagaaaaggaaa

SEQ ID NO: 2389766 - RNA, 19 nt, Homo sapiens
  misc_RNA (1)...(19): siRNA sense strand
gcauauagcucgaucugca

SEQ ID NO: 2389767 - RNA, 19 nt, Homo sapiens
  misc_RNA (1)...(19): siRNA sense strand
uccuauagcagcagauaaa

SEQ ID NO: 2389768 - RNA, 19 nt, Homo sapiens
  misc_RNA (1)...(19): siRNA sense strand
acagcugaauuaugggaua

SEQ ID NO: 2389769 - RNA, 19 nt, Homo sapiens
  misc_RNA (1)...(19): siRNA sense strand
gaauaugguacuaaugcaa

SEQ ID NO: 2389770 - RNA, 19 nt, Homo sapiens
  misc_RNA (1)...(19): siRNA sense strand
gguagaagcaccacaccaa

SEQ ID NO: 2389771 - RNA, 19 nt, Homo sapiens
  misc_RNA (1)...(19): siRNA sense strand
aguagauuauacagagcaa

SEQ ID NO: 2389772 - RNA, 19 nt, Homo sapiens
  misc_RNA (1)...(19): siRNA sense strand
agaauaacagugaggauca

SEQ ID NO: 2389773 - RNA, 19 nt, Homo sapiens
  misc_RNA (1)...(19): siRNA sense strand
gcaacuacucccaaagcaa

SEQ ID NO: 2389774 - RNA, 19 nt, Homo sapiens
  misc_RNA (1)...(19): siRNA sense strand
gggaugacgauaaagcuaa

SEQ ID NO: 2389775 - RNA, 19 nt, Homo sapiens
  misc_RNA (1)...(19): siRNA sense strand
agugaaacacggagugaga

SEQ ID NO: 2389776 - RNA, 19 nt, Homo sapiens
  misc_RNA (1)...(19): siRNA sense strand
ggcaaugauccuaauguaa

SEQ ID NO: 2389777 - RNA, 19 nt, Homo sapiens
  misc_RNA (1)...(19): siRNA sense strand
agccaaaggaugugccaua

SEQ ID NO: 2389778 - RNA, 19 nt, Homo sapiens
  misc_RNA (1)...(19): siRNA sense strand
cuuagaauggagaaggaaa

SEQ ID NO: 2389779 - RNA, 19 nt, Homo sapiens
  misc_RNA (1)...(19): siRNA sense strand
gcacucggcuguugggcaa

SEQ ID NO: 2389780 - RNA, 19 nt, Homo sapiens
  misc_RNA (1)...(19): siRNA sense strand
gcuuuaagucuguugggaa

SEQ ID NO: 2389781 - RNA, 19 nt, Homo sapiens
  misc_RNA (1)...(19): siRNA sense strand
ccagcaaacagcagccaaa

SEQ ID NO: 2389782 - RNA, 19 nt, Homo sapiens
  misc_RNA (1)...(19): siRNA sense strand
caaccaaagaauggauaaa

SEQ ID NO: 2389783 - RNA, 19 nt, Homo sapiens
  misc_RNA (1)...(19): siRNA sense strand
uagaccaggaagugggaua

SEQ ID NO: 2389784 - RNA, 19 nt, Homo sapiens
  misc_RNA (1)...(19): siRNA sense strand
cuuaugaaguugaguacca

SEQ ID NO: 2389785 - RNA, 19 nt, Homo sapiens
  misc_RNA (1)...(19): siRNA sense strand
gaaauuucuagcugagcaa

SEQ ID NO: 2389786 - RNA, 19 nt, Homo sapiens
  misc_RNA (1)...(19): siRNA sense strand
gaggaaaagaaaaggacau

SEQ ID NO: 2389787 - RNA, 19 nt, Homo sapiens
  misc_RNA (1)...(19): siRNA sense strand
gcuccaagccucugaaaau

SEQ ID NO: 2389788 - RNA, 19 nt, Homo sapiens
  misc_RNA (1)...(19): siRNA sense strand
ccuuagaacuggagcgguc

SEQ ID NO: 2389789 - RNA, 19 nt, Homo sapiens
  misc_RNA (1)...(19): siRNA sense strand
gagccaucugugugugaaa

SEQ ID NO: 2389790 - RNA, 19 nt, Homo sapiens
  misc_RNA (1)...(19): siRNA sense strand
uuagaauggagaaggaaaa

SEQ ID NO: 2389791 - RNA, 19 nt, Homo sapiens
  misc_RNA (1)...(19): siRNA sense strand
aggaagaggcguuuaaaau

SEQ ID NO: 2389792 - RNA, 19 nt, Homo sapiens
  misc_RNA (1)...(19): siRNA sense strand
agauacugcugcuuagaau

SEQ ID NO: 2389793 - RNA, 19 nt, Homo sapiens
  misc_RNA (1)...(19): siRNA sense strand
ggucauauuuaaaguggcu

SEQ ID NO: 2389794 - RNA, 19 nt, Homo sapiens
  misc_RNA (1)...(19): siRNA sense strand
cgaggugaaaucuggaaau

SEQ ID NO: 2389795 - RNA, 19 nt, Homo sapiens
  misc_RNA (1)...(19): siRNA sense strand
ggaaauuucuagcugagca

SEQ ID NO: 2389796 - RNA, 19 nt, Homo sapiens
  misc_RNA (1)...(19): siRNA sense strand
acaaccaaagaauggauaa

SEQ ID NO: 2389797 - RNA, 19 nt, Homo sapiens
  misc_RNA (1)...(19): siRNA sense strand
cuccgagagcuguggcaaa

SEQ ID NO: 2389798 - RNA, 19 nt, Homo sapiens
  misc_RNA (1)...(19): siRNA sense strand
cuuuagaaccaguuuguga

SEQ ID NO: 2389799 - RNA, 19 nt, Homo sapiens
  misc_RNA (1)...(19): siRNA sense strand
ggaagugggauauugccaa

SEQ ID NO: 2389800 - RNA, 19 nt, Homo sapiens
  misc_RNA (1)...(19): siRNA sense strand
cuuuaagucuguugggaag

SEQ ID NO: 2389801 - RNA, 19 nt, Homo sapiens
  misc_RNA (1)...(19): siRNA sense strand
uugaaauggacaucgcuaa

SEQ ID NO: 2389802 - RNA, 19 nt, Homo sapiens
  misc_RNA (1)...(19): siRNA sense strand
gcuugguacagauggaaaa

SEQ ID NO: 2389803 - RNA, 19 nt, Homo sapiens
  misc_RNA (1)...(19): siRNA sense strand
acaaucaccuggaggagca

SEQ ID NO: 2389804 - RNA, 19 nt, Homo sapiens
  misc_RNA (1)...(19): siRNA sense strand
ccuugauucugcagcauga

SEQ ID NO: 2389805 - RNA, 19 nt, Homo sapiens
  misc_RNA (1)...(19): siRNA sense strand
ccuggaggcagcagauauu

SEQ ID NO: 2389806 - RNA, 19 nt, Homo sapiens
  misc_RNA (1)...(19): siRNA sense strand
uaauaaagccagaggccug

SEQ ID NO: 2389807 - RNA, 19 nt, Homo sapiens
  misc_RNA (1)...(19): siRNA sense strand
ccaccagaggaaaagaaaa

SEQ ID NO: 2389808 - RNA, 19 nt, Homo sapiens
  misc_RNA (1)...(19): siRNA sense strand
ccgaggugaaaucuggaaa

SEQ ID NO: 2389809 - RNA, 19 nt, Homo sapiens
  misc_RNA (1)...(19): siRNA sense strand
cagcuuuguagcaggcauu

SEQ ID NO: 2389810 - RNA, 19 nt, Homo sapiens
  misc_RNA (1)...(19): siRNA sense strand
auucguagccagagucuuu

SEQ ID NO: 2389811 - RNA, 19 nt, Homo sapiens
  misc_RNA (1)...(19): siRNA sense strand
ccucaugaacgaaaggacu

SEQ ID NO: 2389812 - RNA, 19 nt, Homo sapiens
  misc_RNA (1)...(19): siRNA sense strand
aggaugugccauacaaaga

SEQ ID NO: 2389813 - RNA, 19 nt, Homo sapiens
  misc_RNA (1)...(19): siRNA sense strand
ucuuauugaccuugggcga

SEQ ID NO: 2389814 - RNA, 19 nt, Homo sapiens
  misc_RNA (1)...(19): siRNA sense strand
uggcagagcuagaacgcaa

SEQ ID NO: 2389815 - RNA, 19 nt, Homo sapiens
  misc_RNA (1)...(19): siRNA sense strand
gauauauccucuauggcaa

SEQ ID NO: 2389816 - RNA, 19 nt, Homo sapiens
  misc_RNA (1)...(19): siRNA sense strand
agaaacaaguuaaagcaca

SEQ ID NO: 2389817 - RNA, 19 nt, Homo sapiens
  misc_RNA (1)...(19): siRNA sense strand
uucugaaaguggagaggua

SEQ ID NO: 2389818 - RNA, 19 nt, Homo sapiens
  misc_RNA (1)...(19): siRNA sense strand
ccagaucauaggugaacaa

SEQ ID NO: 2389819 - RNA, 19 nt, Homo sapiens
  misc_RNA (1)...(19): siRNA sense strand
ccucuauggcaauggagua

SEQ ID NO: 2389820 - RNA, 19 nt, Homo sapiens
  misc_RNA (1)...(19): siRNA sense strand
aggugauugaugagauuua

SEQ ID NO: 2389821 - RNA, 19 nt, Homo sapiens
  misc_RNA (1)...(19): siRNA sense strand
ucuucggaauagaaaguaa

SEQ ID NO: 2389822 - RNA, 19 nt, Homo sapiens
  misc_RNA (1)...(19): siRNA sense strand
uggaguacuuugaugaaaa

SEQ ID NO: 2389823 - RNA, 19 nt, Homo sapiens
  misc_RNA (1)...(19): siRNA sense strand
aguaauggaaagugcugua

SEQ ID NO: 2389824 - RNA, 19 nt, Homo sapiens
  misc_RNA (1)...(19): siRNA sense strand
aucuaaacgucuucggaau

SEQ ID NO: 2389825 - RNA, 19 nt, Homo sapiens
  misc_RNA (1)...(19): siRNA sense strand
gagagagucagaaaggaga

SEQ ID NO: 2389826 - RNA, 19 nt, Homo sapiens
  misc_RNA (1)...(19): siRNA sense strand
cuucaagacaagagguuac

SEQ ID NO: 2389827 - RNA, 19 nt, Homo sapiens
  misc_RNA (1)...(19): siRNA sense strand
ccaaagugcaagaacagca

SEQ ID NO: 2389828 - RNA, 19 nt, Homo sapiens
  misc_RNA (1)...(19): siRNA sense strand
ggagcggauggcagaggaa

SEQ ID NO: 2389829 - RNA, 19 nt, Homo sapiens
  misc_RNA (1)...(19): siRNA sense strand
ggagagagucagaaaggag

SEQ ID NO: 2389830 - RNA, 19 nt, Homo sapiens
  misc_RNA (1)...(19): siRNA sense strand
uuaccaaacuccagcagca

SEQ ID NO: 2389831 - RNA, 19 nt, Homo sapiens
  misc_RNA (1)...(19): siRNA sense strand
ucguagccaucgagaacau

SEQ ID NO: 2389832 - RNA, 19 nt, Homo sapiens
  misc_RNA (1)...(19): siRNA sense strand
agagagucagaaaggagaa

SEQ ID NO: 2389833 - RNA, 19 nt, Homo sapiens
  misc_RNA (1)...(19): siRNA sense strand
gagagucagaaaggagaaa

SEQ ID NO: 2389834 - RNA, 19 nt, Homo sapiens
  misc_RNA (1)...(19): siRNA sense strand
aagacaagagguuaccaaa

SEQ ID NO: 2389835 - RNA, 19 nt, Homo sapiens
  misc_RNA (1)...(19): siRNA sense strand
agaugaagcugcagggaca

SEQ ID NO: 2389836 - RNA, 19 nt, Homo sapiens
  misc_RNA (1)...(19): siRNA sense strand
agaaagaggcugaggagga

SEQ ID NO: 2389837 - RNA, 19 nt, Homo sapiens
  misc_RNA (1)...(19): siRNA sense strand
ggaaagaagccgaggcaag

SEQ ID NO: 2389838 - RNA, 19 nt, Homo sapiens
  misc_RNA (1)...(19): siRNA sense strand
aggaagaagaggaggagga

SEQ ID NO: 2389839 - RNA, 19 nt, Homo sapiens
  misc_RNA (1)...(19): siRNA sense strand
cagaggacgaggaggacaa

SEQ ID NO: 2389840 - RNA, 19 nt, Homo sapiens
  misc_RNA (1)...(19): siRNA sense strand
gcuuaaggucauggagaaa

SEQ ID NO: 2389841 - RNA, 19 nt, Homo sapiens
  misc_RNA (1)...(19): siRNA sense strand
aagaagaggaggaggagga

SEQ ID NO: 2389842 - RNA, 19 nt, Homo sapiens
  misc_RNA (1)...(19): siRNA sense strand
gggcugaauacaaggccaa

SEQ ID NO: 2389843 - RNA, 19 nt, Homo sapiens
  misc_RNA (1)...(19): siRNA sense strand
ggaagaagaugaagcugca

SEQ ID NO: 2389844 - RNA, 19 nt, Homo sapiens
  misc_RNA (1)...(19): siRNA sense strand
acucagaggacgaggagga

SEQ ID NO: 2389845 - RNA, 19 nt, Homo sapiens
  misc_RNA (1)...(19): siRNA sense strand
ucauaagggaggaggcaga

SEQ ID NO: 2389846 - RNA, 19 nt, Homo sapiens
  misc_RNA (1)...(19): siRNA sense strand
guaccaagcuggaggcucu

SEQ ID NO: 2389847 - RNA, 19 nt, Homo sapiens
  misc_RNA (1)...(19): siRNA sense strand
acgcagagccucaaggaga

SEQ ID NO: 2389848 - RNA, 19 nt, Homo sapiens
  misc_RNA (1)...(19): siRNA sense strand
ggaaggugccaaaggcgaa

SEQ ID NO: 2389849 - RNA, 19 nt, Homo sapiens
  misc_RNA (1)...(19): siRNA sense strand
ugccaaaggcgaagaugaa

SEQ ID NO: 2389850 - RNA, 19 nt, Homo sapiens
  misc_RNA (1)...(19): siRNA sense strand
gaggcaaggagcagcggaa

SEQ ID NO: 2389851 - RNA, 19 nt, Homo sapiens
  misc_RNA (1)...(19): siRNA sense strand
ccaaaggcgaagaugaaga

SEQ ID NO: 2389852 - RNA, 19 nt, Homo sapiens
  misc_RNA (1)...(19): siRNA sense strand
ccucaagggcagugaauuc

SEQ ID NO: 2389853 - RNA, 19 nt, Homo sapiens
  misc_RNA (1)...(19): siRNA sense strand
ccguggaggaggaagaaga

SEQ ID NO: 2389854 - RNA, 19 nt, Homo sapiens
  misc_RNA (1)...(19): siRNA sense strand
caauggaagaugugaucau

SEQ ID NO: 2389855 - RNA, 19 nt, Homo sapiens
  misc_RNA (1)...(19): siRNA sense strand
ggagggaaggagacggaga

SEQ ID NO: 2389856 - RNA, 19 nt, Homo sapiens
  misc_RNA (1)...(19): siRNA sense strand
cuggaaaccaucagaacuu

SEQ ID NO: 2389857 - RNA, 19 nt, Homo sapiens
  misc_RNA (1)...(19): siRNA sense strand
aggaggaagaagaggagga

SEQ ID NO: 2389858 - RNA, 19 nt, Homo sapiens
  misc_RNA (1)...(19): siRNA sense strand
aggaggaggaggaggagga

SEQ ID NO: 2389859 - RNA, 19 nt, Homo sapiens
  misc_RNA (1)...(19): siRNA sense strand
gugacagcauugaggagau

SEQ ID NO: 2389860 - RNA, 19 nt, Homo sapiens
  misc_RNA (1)...(19): siRNA sense strand
gugccaaaggcgaagauga

SEQ ID NO: 2389861 - RNA, 19 nt, Homo sapiens
  misc_RNA (1)...(19): siRNA sense strand
cuauguucccagugagaau

SEQ ID NO: 2389862 - RNA, 19 nt, Homo sapiens
  misc_RNA (1)...(19): siRNA sense strand
ggcuguugcccgaggagua

SEQ ID NO: 2389863 - RNA, 19 nt, Homo sapiens
  misc_RNA (1)...(19): siRNA sense strand
guacagcgcuucugggagu

SEQ ID NO: 2389864 - RNA, 19 nt, Homo sapiens
  misc_RNA (1)...(19): siRNA sense strand
cagcagagcucaacgccca

SEQ ID NO: 2389865 - RNA, 19 nt, Homo sapiens
  misc_RNA (1)...(19): siRNA sense strand
uggagaaagcccacaucaa

SEQ ID NO: 2389866 - RNA, 19 nt, Homo sapiens
  misc_RNA (1)...(19): siRNA sense strand
ugaacagucuccuggaaaa

SEQ ID NO: 2389867 - RNA, 19 nt, Homo sapiens
  misc_RNA (1)...(19): siRNA sense strand
acaaugaggaggaggaaag

SEQ ID NO: 2389868 - RNA, 19 nt, Homo sapiens
  misc_RNA (1)...(19): siRNA sense strand
caaaaggugaugugaagaa

SEQ ID NO: 2389869 - RNA, 19 nt, Homo sapiens
  misc_RNA (1)...(19): siRNA sense strand
ucaccaaguucauccgcaa

SEQ ID NO: 2389870 - RNA, 19 nt, Homo sapiens
  misc_RNA (1)...(19): siRNA sense strand
aagaggaggaggaggagga

SEQ ID NO: 2389871 - RNA, 19 nt, Homo sapiens
  misc_RNA (1)...(19): siRNA sense strand
cuucgaggcgugugggaga

SEQ ID NO: 2389872 - RNA, 19 nt, Homo sapiens
  misc_RNA (1)...(19): siRNA sense strand
aaguugaagcgcuggaaga

SEQ ID NO: 2389873 - RNA, 19 nt, Homo sapiens
  misc_RNA (1)...(19): siRNA sense strand
gaccacagcuucaagguga

SEQ ID NO: 2389874 - RNA, 19 nt, Homo sapiens
  misc_RNA (1)...(19): siRNA sense strand
ccaagaaagcaaaagguga

SEQ ID NO: 2389875 - RNA, 19 nt, Homo sapiens
  misc_RNA (1)...(19): siRNA sense strand
cugccuggguucugcacaa

SEQ ID NO: 2389876 - RNA, 19 nt, Homo sapiens
  misc_RNA (1)...(19): siRNA sense strand
aggacgaggaggacaauga

SEQ ID NO: 2389877 - RNA, 19 nt, Homo sapiens
  misc_RNA (1)...(19): siRNA sense strand
aggacaaugaggaggagga

SEQ ID NO: 2389878 - RNA, 19 nt, Homo sapiens
  misc_RNA (1)...(19): siRNA sense strand
cugaauacaaggccaagaa

SEQ ID NO: 2389879 - RNA, 19 nt, Homo sapiens
  misc_RNA (1)...(19): siRNA sense strand
ucagcaaaguacagcgcuu

SEQ ID NO: 2389880 - RNA, 19 nt, Homo sapiens
  misc_RNA (1)...(19): siRNA sense strand
cuggaggaccugaagaaga

SEQ ID NO: 2389881 - RNA, 19 nt, Homo sapiens
  misc_RNA (1)...(19): siRNA sense strand
ccauggaagaagaggcgga

SEQ ID NO: 2389882 - RNA, 19 nt, Homo sapiens
  misc_RNA (1)...(19): siRNA sense strand
cugccguggaggaggaaga

SEQ ID NO: 2389883 - RNA, 19 nt, Homo sapiens
  misc_RNA (1)...(19): siRNA sense strand
gaggaaagaagccgaggca

SEQ ID NO: 2389884 - RNA, 19 nt, Homo sapiens
  misc_RNA (1)...(19): siRNA sense strand
agaagaaggccuaccgagu

SEQ ID NO: 2389885 - RNA, 19 nt, Homo sapiens
  misc_RNA (1)...(19): siRNA sense strand
uggcugacccaauggaaga

SEQ ID NO: 2389886 - RNA, 19 nt, Homo sapiens
  misc_RNA (1)...(19): siRNA sense strand
aggaggaggagcuggagau

SEQ ID NO: 2389887 - RNA, 19 nt, Homo sapiens
  misc_RNA (1)...(19): siRNA sense strand
caagaaagcaaaaggugau

SEQ ID NO: 2389888 - RNA, 19 nt, Homo sapiens
  misc_RNA (1)...(19): siRNA sense strand
gggugcagaagaaggccua

SEQ ID NO: 2389889 - RNA, 19 nt, Homo sapiens
  misc_RNA (1)...(19): siRNA sense strand
gcuaacacccugaagagca

SEQ ID NO: 2389890 - RNA, 19 nt, Homo sapiens
  misc_RNA (1)...(19): siRNA sense strand
agcucaagcaccagaaaga

SEQ ID NO: 2389891 - RNA, 19 nt, Homo sapiens
  misc_RNA (1)...(19): siRNA sense strand
guugaagcgcuggaagaaa

SEQ ID NO: 2389892 - RNA, 19 nt, Homo sapiens
  misc_RNA (1)...(19): siRNA sense strand
aagcaaaaggugaugugaa

SEQ ID NO: 2389893 - RNA, 19 nt, Homo sapiens
  misc_RNA (1)...(19): siRNA sense strand
aagcucaaccgcaggaaga

SEQ ID NO: 2389894 - RNA, 19 nt, Homo sapiens
  misc_RNA (1)...(19): siRNA sense strand
cagucgaugcugugaaguu

SEQ ID NO: 2389895 - RNA, 19 nt, Homo sapiens
  misc_RNA (1)...(19): siRNA sense strand
gcucaguccucaagggcag

SEQ ID NO: 2389896 - RNA, 19 nt, Homo sapiens
  misc_RNA (1)...(19): siRNA sense strand
aggaggacaaugaggagga

SEQ ID NO: 2389897 - RNA, 19 nt, Homo sapiens
  misc_RNA (1)...(19): siRNA sense strand
aagaugaagagauggcuga

SEQ ID NO: 2389898 - RNA, 19 nt, Homo sapiens
  misc_RNA (1)...(19): siRNA sense strand
cgcagagccucaaggagau

SEQ ID NO: 2389899 - RNA, 19 nt, Homo sapiens
  misc_RNA (1)...(19): siRNA sense strand
ggaccaguacaguggagca

SEQ ID NO: 2389900 - RNA, 19 nt, Homo sapiens
  misc_RNA (1)...(19): siRNA sense strand
agucaggguccuugcgcuu

SEQ ID NO: 2389901 - RNA, 19 nt, Homo sapiens
  misc_RNA (1)...(19): siRNA sense strand
cugaagaagaagcagacua

SEQ ID NO: 2389902 - RNA, 19 nt, Homo sapiens
  misc_RNA (1)...(19): siRNA sense strand
aagcagacuaaacgagcua

SEQ ID NO: 2389903 - RNA, 19 nt, Homo sapiens
  misc_RNA (1)...(19): siRNA sense strand
gacuauucacugaggucua

SEQ ID NO: 2389904 - RNA, 19 nt, Homo sapiens
  misc_RNA (1)...(19): siRNA sense strand
cgagcuaagcacaagauca

SEQ ID NO: 2389905 - RNA, 19 nt, Homo sapiens
  misc_RNA (1)...(19): siRNA sense strand
agaauggugugguggagga

SEQ ID NO: 2389906 - RNA, 19 nt, Homo sapiens
  misc_RNA (1)...(19): siRNA sense strand
ugauuaaagccaagaaccu

SEQ ID NO: 2389907 - RNA, 19 nt, Homo sapiens
  misc_RNA (1)...(19): siRNA sense strand
aagcugaagaagaagcaga

SEQ ID NO: 2389908 - RNA, 19 nt, Homo sapiens
  misc_RNA (1)...(19): siRNA sense strand
gagaagaaagcuauggcaa

SEQ ID NO: 2389909 - RNA, 19 nt, Homo sapiens
  misc_RNA (1)...(19): siRNA sense strand
cggaaaugcuuggggaaaa

SEQ ID NO: 2389910 - RNA, 19 nt, Homo sapiens
  misc_RNA (1)...(19): siRNA sense strand
gcuuauggcuaccggaaau

SEQ ID NO: 2389911 - RNA, 19 nt, Homo sapiens
  misc_RNA (1)...(19): siRNA sense strand
guagaauacuuaaaggaga

SEQ ID NO: 2389912 - RNA, 19 nt, Homo sapiens
  misc_RNA (1)...(19): siRNA sense strand
gggaauacuuugccacuau

SEQ ID NO: 2389913 - RNA, 19 nt, Homo sapiens
  misc_RNA (1)...(19): siRNA sense strand
cuauggaauuugaagccua

SEQ ID NO: 2389914 - RNA, 19 nt, Homo sapiens
  misc_RNA (1)...(19): siRNA sense strand
gacaaaaguuacaaggaga

SEQ ID NO: 2389915 - RNA, 19 nt, Homo sapiens
  misc_RNA (1)...(19): siRNA sense strand
gggcaaaaucccucagaca

SEQ ID NO: 2389916 - RNA, 19 nt, Homo sapiens
  misc_RNA (1)...(19): siRNA sense strand
cccugaauguucuggaaau

SEQ ID NO: 2389917 - RNA, 19 nt, Homo sapiens
  misc_RNA (1)...(19): siRNA sense strand
agcacaaguacgaaguaua

SEQ ID NO: 2389918 - RNA, 19 nt, Homo sapiens
  misc_RNA (1)...(19): siRNA sense strand
ccagaauucucuuaggguu

SEQ ID NO: 2389919 - RNA, 19 nt, Homo sapiens
  misc_RNA (1)...(19): siRNA sense strand
aggaguuuguuuaaagaca

SEQ ID NO: 2389920 - RNA, 19 nt, Homo sapiens
  misc_RNA (1)...(19): siRNA sense strand
uagaaauagccucugaaau

SEQ ID NO: 2389921 - RNA, 19 nt, Homo sapiens
  misc_RNA (1)...(19): siRNA sense strand
ucaauuugguuguugcgaa

SEQ ID NO: 2389922 - RNA, 19 nt, Homo sapiens
  misc_RNA (1)...(19): siRNA sense strand
ccggaaaugcuuggggaaa

SEQ ID NO: 2389923 - RNA, 19 nt, Homo sapiens
  misc_RNA (1)...(19): siRNA sense strand
ucaugcacuuggaggaaca

SEQ ID NO: 2389924 - RNA, 19 nt, Homo sapiens
  misc_RNA (1)...(19): siRNA sense strand
cagggaaagccguugccua

SEQ ID NO: 2389925 - RNA, 19 nt, Homo sapiens
  misc_RNA (1)...(19): siRNA sense strand
acaaaaguuacaaggagaa

SEQ ID NO: 2389926 - RNA, 19 nt, Homo sapiens
  misc_RNA (1)...(19): siRNA sense strand
cggacuuuguuuuggacua

SEQ ID NO: 2389927 - RNA, 19 nt, Homo sapiens
  misc_RNA (1)...(19): siRNA sense strand
cagaauucucuuaggguuc

SEQ ID NO: 2389928 - RNA, 19 nt, Homo sapiens
  misc_RNA (1)...(19): siRNA sense strand
cuucauauacccuggagga

SEQ ID NO: 2389929 - RNA, 19 nt, Homo sapiens
  misc_RNA (1)...(19): siRNA sense strand
auggaaagcacaaguacga

SEQ ID NO: 2389930 - RNA, 19 nt, Homo sapiens
  misc_RNA (1)...(19): siRNA sense strand
uuugauaacuguggcuuaa

SEQ ID NO: 2389931 - RNA, 19 nt, Homo sapiens
  misc_RNA (1)...(19): siRNA sense strand
gccaugacuuucaaggaga

SEQ ID NO: 2389932 - RNA, 19 nt, Homo sapiens
  misc_RNA (1)...(19): siRNA sense strand
aucaauggucucagaaauu

SEQ ID NO: 2389933 - RNA, 19 nt, Homo sapiens
  misc_RNA (1)...(19): siRNA sense strand
auuccagagaagaaagcua

SEQ ID NO: 2389934 - RNA, 19 nt, Homo sapiens
  misc_RNA (1)...(19): siRNA sense strand
aguaugaucucuacagcca

SEQ ID NO: 2389935 - RNA, 19 nt, Homo sapiens
  misc_RNA (1)...(19): siRNA sense strand
uggcaauugcugaugcuuu

SEQ ID NO: 2389936 - RNA, 19 nt, Homo sapiens
  misc_RNA (1)...(19): siRNA sense strand
aauucauaccggagagaaa

SEQ ID NO: 2389937 - RNA, 19 nt, Homo sapiens
  misc_RNA (1)...(19): siRNA sense strand
augugauguuagagaacua

SEQ ID NO: 2389938 - RNA, 19 nt, Homo sapiens
  misc_RNA (1)...(19): siRNA sense strand
augugaagaauguggcaaa

SEQ ID NO: 2389939 - RNA, 19 nt, Homo sapiens
  misc_RNA (1)...(19): siRNA sense strand
augugaagaauguggcaaa

SEQ ID NO: 2389940 - RNA, 19 nt, Homo sapiens
  misc_RNA (1)...(19): siRNA sense strand
uggaaagacaugagaugau

SEQ ID NO: 2389941 - RNA, 19 nt, Homo sapiens
  misc_RNA (1)...(19): siRNA sense strand
cggagagaaaccuuacaaa

SEQ ID NO: 2389942 - RNA, 19 nt, Homo sapiens
  misc_RNA (1)...(19): siRNA sense strand
uagugaagaaugugacaga

SEQ ID NO: 2389943 - RNA, 19 nt, Homo sapiens
  misc_RNA (1)...(19): siRNA sense strand
gugaagaaugugacagauc

SEQ ID NO: 2389944 - RNA, 19 nt, Homo sapiens
  misc_RNA (1)...(19): siRNA sense strand
aagacaagacauacuggaa

SEQ ID NO: 2389945 - RNA, 19 nt, Homo sapiens
  misc_RNA (1)...(19): siRNA sense strand
aaagcgugggugagcauaa

SEQ ID NO: 2389946 - RNA, 19 nt, Homo sapiens
  misc_RNA (1)...(19): siRNA sense strand
acaugagaugauugccaaa

SEQ ID NO: 2389947 - RNA, 19 nt, Homo sapiens
  misc_RNA (1)...(19): siRNA sense strand
ccuuacaaaugugaagaau

SEQ ID NO: 2389948 - RNA, 19 nt, Homo sapiens
  misc_RNA (1)...(19): siRNA sense strand
ggccagagaacauacaaaa

SEQ ID NO: 2389949 - RNA, 19 nt, Homo sapiens
  misc_RNA (1)...(19): siRNA sense strand
agaugaugaagaagagaaa

SEQ ID NO: 2389950 - RNA, 19 nt, Homo sapiens
  misc_RNA (1)...(19): siRNA sense strand
aggaugaagcagaggaaga

SEQ ID NO: 2389951 - RNA, 19 nt, Homo sapiens
  misc_RNA (1)...(19): siRNA sense strand
gggaggaaguagagccuga

SEQ ID NO: 2389952 - RNA, 19 nt, Homo sapiens
  misc_RNA (1)...(19): siRNA sense strand
aggaagaagaggaggagga

SEQ ID NO: 2389953 - RNA, 19 nt, Homo sapiens
  misc_RNA (1)...(19): siRNA sense strand
augaugaagaagagaaaga

SEQ ID NO: 2389954 - RNA, 19 nt, Homo sapiens
  misc_RNA (1)...(19): siRNA sense strand
gcgaugaggaugaagcaga

SEQ ID NO: 2389955 - RNA, 19 nt, Homo sapiens
  misc_RNA (1)...(19): siRNA sense strand
cagaggaagaagaggagga

SEQ ID NO: 2389956 - RNA, 19 nt, Homo sapiens
  misc_RNA (1)...(19): siRNA sense strand
augaagaagagaaagaaga

SEQ ID NO: 2389957 - RNA, 19 nt, Homo sapiens
  misc_RNA (1)...(19): siRNA sense strand
ggagaucagaggaggcuca

SEQ ID NO: 2389958 - RNA, 19 nt, Homo sapiens
  misc_RNA (1)...(19): siRNA sense strand
aagcagaggaagaagagga

SEQ ID NO: 2389959 - RNA, 19 nt, Homo sapiens
  misc_RNA (1)...(19): siRNA sense strand
augcaaaggaugggauauu

SEQ ID NO: 2389960 - RNA, 19 nt, Homo sapiens
  misc_RNA (1)...(19): siRNA sense strand
aggagagaagugaggccaa

SEQ ID NO: 2389961 - RNA, 19 nt, Homo sapiens
  misc_RNA (1)...(19): siRNA sense strand
uuagagaagaaauggcaau

SEQ ID NO: 2389962 - RNA, 19 nt, Homo sapiens
  misc_RNA (1)...(19): siRNA sense strand
uggaagacuccuugaggca

SEQ ID NO: 2389963 - RNA, 19 nt, Homo sapiens
  misc_RNA (1)...(19): siRNA sense strand
aagaagagaaagaagaucu

SEQ ID NO: 2389964 - RNA, 19 nt, Homo sapiens
  misc_RNA (1)...(19): siRNA sense strand
ugaggaugaagcagaggaa

SEQ ID NO: 2389965 - RNA, 19 nt, Homo sapiens
  misc_RNA (1)...(19): siRNA sense strand
ucaugcaaaggaugggaua

SEQ ID NO: 2389966 - RNA, 19 nt, Homo sapiens
  misc_RNA (1)...(19): siRNA sense strand
uuguagaugaugaagaaga

SEQ ID NO: 2389967 - RNA, 19 nt, Homo sapiens
  misc_RNA (1)...(19): siRNA sense strand
aggaugcggaggaggaaaa

SEQ ID NO: 2389968 - RNA, 19 nt, Homo sapiens
  misc_RNA (1)...(19): siRNA sense strand
gagcugaacaguugcagga

SEQ ID NO: 2389969 - RNA, 19 nt, Homo sapiens
  misc_RNA (1)...(19): siRNA sense strand
ccucugacuggcuggaaau

SEQ ID NO: 2389970 - RNA, 19 nt, Homo sapiens
  misc_RNA (1)...(19): siRNA sense strand
ugauggagggcgaguggau

SEQ ID NO: 2389971 - RNA, 19 nt, Homo sapiens
  misc_RNA (1)...(19): siRNA sense strand
agaaggcaucucugagcaa

SEQ ID NO: 2389972 - RNA, 19 nt, Homo sapiens
  misc_RNA (1)...(19): siRNA sense strand
gguacagagaauugggaaa

SEQ ID NO: 2389973 - RNA, 19 nt, Homo sapiens
  misc_RNA (1)...(19): siRNA sense strand
cugaagauauagaagggau

SEQ ID NO: 2389974 - RNA, 19 nt, Homo sapiens
  misc_RNA (1)...(19): siRNA sense strand
ccauggaauaccagacaga

SEQ ID NO: 2389975 - RNA, 19 nt, Homo sapiens
  misc_RNA (1)...(19): siRNA sense strand
cggugacaagagacggaaa

SEQ ID NO: 2389976 - RNA, 19 nt, Homo sapiens
  misc_RNA (1)...(19): siRNA sense strand
caugauuaaaccaggugua

SEQ ID NO: 2389977 - RNA, 19 nt, Homo sapiens
  misc_RNA (1)...(19): siRNA sense strand
guguaacuacugaagaaau

SEQ ID NO: 2389978 - RNA, 19 nt, Homo sapiens
  misc_RNA (1)...(19): siRNA sense strand
agaaguggaugauggagca

SEQ ID NO: 2389979 - RNA, 19 nt, Homo sapiens
  misc_RNA (1)...(19): siRNA sense strand
aaauaaagcaguuggagug

SEQ ID NO: 2389980 - RNA, 19 nt, Homo sapiens
  misc_RNA (1)...(19): siRNA sense strand
gguguaacuacugaagaaa

SEQ ID NO: 2389981 - RNA, 19 nt, Homo sapiens
  misc_RNA (1)...(19): siRNA sense strand
ucgaagcuauugugggcau

SEQ ID NO: 2389982 - RNA, 19 nt, Homo sapiens
  misc_RNA (1)...(19): siRNA sense strand
cgguacagagaauugggaa

SEQ ID NO: 2389983 - RNA, 19 nt, Homo sapiens
  misc_RNA (1)...(19): siRNA sense strand
aagcaguuggagugaugaa

SEQ ID NO: 2389984 - RNA, 19 nt, Homo sapiens
  misc_RNA (1)...(19): siRNA sense strand
gaauaaaggaucuggacca

SEQ ID NO: 2389985 - RNA, 19 nt, Homo sapiens
  misc_RNA (1)...(19): siRNA sense strand
caguaauaguuuggagaau

SEQ ID NO: 2389986 - RNA, 19 nt, Homo sapiens
  misc_RNA (1)...(19): siRNA sense strand
cauuuuauguggagcgaaa

SEQ ID NO: 2389987 - RNA, 19 nt, Homo sapiens
  misc_RNA (1)...(19): siRNA sense strand
agaagaagcucaagaccca

SEQ ID NO: 2389988 - RNA, 19 nt, Homo sapiens
  misc_RNA (1)...(19): siRNA sense strand
ccgacagcgcugaggagaa

SEQ ID NO: 2389989 - RNA, 19 nt, Homo sapiens
  misc_RNA (1)...(19): siRNA sense strand
ugaaaguggacaagagcuu

SEQ ID NO: 2389990 - RNA, 19 nt, Homo sapiens
  misc_RNA (1)...(19): siRNA sense strand
gcagcaugaaaguggacaa

SEQ ID NO: 2389991 - RNA, 19 nt, Homo sapiens
  misc_RNA (1)...(19): siRNA sense strand
ucucuagaagaaaggaaua

SEQ ID NO: 2389992 - RNA, 19 nt, Homo sapiens
  misc_RNA (1)...(19): siRNA sense strand
accaagaagcagcaugaaa

SEQ ID NO: 2389993 - RNA, 19 nt, Homo sapiens
  misc_RNA (1)...(19): siRNA sense strand
uggucugauucuucaauaa

SEQ ID NO: 2389994 - RNA, 19 nt, Homo sapiens
  misc_RNA (1)...(19): siRNA sense strand
caauaacaucaguaaccaa

SEQ ID NO: 2389995 - RNA, 19 nt, Homo sapiens
  misc_RNA (1)...(19): siRNA sense strand
gaguccaaguccuggcaau

SEQ ID NO: 2389996 - RNA, 19 nt, Homo sapiens
  misc_RNA (1)...(19): siRNA sense strand
ggaccaaagucgugcaugc

SEQ ID NO: 2389997 - RNA, 19 nt, Homo sapiens
  misc_RNA (1)...(19): siRNA sense strand
gaaaaggagaagucagaga

SEQ ID NO: 2389998 - RNA, 19 nt, Homo sapiens
  misc_RNA (1)...(19): siRNA sense strand
agugaguguugaaaagaua

SEQ ID NO: 2389999 - RNA, 19 nt, Homo sapiens
  misc_RNA (1)...(19): siRNA sense strand
agggauuaucacacacaaa

SEQ ID NO: 2390000 - RNA, 19 nt, Homo sapiens
  misc_RNA (1)...(19): siRNA sense strand
uggaaaaggagaagucaga

SEQ ID NO: 2390001 - RNA, 19 nt, Homo sapiens
  misc_RNA (1)...(19): siRNA sense strand
aagauagaccugaagggau

SEQ ID NO: 2390002 - RNA, 19 nt, Homo sapiens
  misc_RNA (1)...(19): siRNA sense strand
ggaucuggaccaagaagca

SEQ ID NO: 2390003 - RNA, 19 nt, Homo sapiens
  misc_RNA (1)...(19): siRNA sense strand
ccugaagagaacuuggaga

SEQ ID NO: 2390004 - RNA, 19 nt, Homo sapiens
  misc_RNA (1)...(19): siRNA sense strand
uugaaaagauagaccugaa

SEQ ID NO: 2390005 - RNA, 19 nt, Homo sapiens
  misc_RNA (1)...(19): siRNA sense strand
ggacaagagcuuuggcagc

SEQ ID NO: 2390006 - RNA, 19 nt, Homo sapiens
  misc_RNA (1)...(19): siRNA sense strand
cugaagugacggaauuuau

SEQ ID NO: 2390007 - RNA, 19 nt, Homo sapiens
  misc_RNA (1)...(19): siRNA sense strand
cucuagaagaaaggaauaa

SEQ ID NO: 2390008 - RNA, 19 nt, Homo sapiens
  misc_RNA (1)...(19): siRNA sense strand
cggcaauuuaagaaagaua

SEQ ID NO: 2390009 - RNA, 19 nt, Homo sapiens
  misc_RNA (1)...(19): siRNA sense strand
gggugaugcuucugggcua

SEQ ID NO: 2390010 - RNA, 19 nt, Homo sapiens
  misc_RNA (1)...(19): siRNA sense strand
gagaagaggaccagccaga

SEQ ID NO: 2390011 - RNA, 19 nt, Homo sapiens
  misc_RNA (1)...(19): siRNA sense strand
cagcuaaggacacgggaca

SEQ ID NO: 2390012 - RNA, 19 nt, Homo sapiens
  misc_RNA (1)...(19): siRNA sense strand
cuggugagcuggagagcca

SEQ ID NO: 2390013 - RNA, 19 nt, Homo sapiens
  misc_RNA (1)...(19): siRNA sense strand
agaaaaggcagaagcggaa

SEQ ID NO: 2390014 - RNA, 19 nt, Homo sapiens
  misc_RNA (1)...(19): siRNA sense strand
gcagcagucuccaggguca

SEQ ID NO: 2390015 - RNA, 19 nt, Homo sapiens
  misc_RNA (1)...(19): siRNA sense strand
ccagagagggagaagagga

SEQ ID NO: 2390016 - RNA, 19 nt, Homo sapiens
  misc_RNA (1)...(19): siRNA sense strand
gagagggagaagaggacca

SEQ ID NO: 2390017 - RNA, 19 nt, Homo sapiens
  misc_RNA (1)...(19): siRNA sense strand
cuucagugccuguuggaga

SEQ ID NO: 2390018 - RNA, 19 nt, Homo sapiens
  misc_RNA (1)...(19): siRNA sense strand
acagagucuagguggaaau

SEQ ID NO: 2390019 - RNA, 19 nt, Homo sapiens
  misc_RNA (1)...(19): siRNA sense strand
ucgcaaagcagucugguga

SEQ ID NO: 2390020 - RNA, 19 nt, Homo sapiens
  misc_RNA (1)...(19): siRNA sense strand
acagagagcccguagcuga

SEQ ID NO: 2390021 - RNA, 19 nt, Homo sapiens
  misc_RNA (1)...(19): siRNA sense strand
gguggaaaucagaagagga

SEQ ID NO: 2390022 - RNA, 19 nt, Homo sapiens
  misc_RNA (1)...(19): siRNA sense strand
gagccaagccuuaagcagu

SEQ ID NO: 2390023 - RNA, 19 nt, Homo sapiens
  misc_RNA (1)...(19): siRNA sense strand
aggcagaagcggaagcauc

SEQ ID NO: 2390024 - RNA, 19 nt, Homo sapiens
  misc_RNA (1)...(19): siRNA sense strand
acccaaauaaagaguauga

SEQ ID NO: 2390025 - RNA, 19 nt, Homo sapiens
  misc_RNA (1)...(19): siRNA sense strand
ccagaguaccccagaaaca

SEQ ID NO: 2390026 - RNA, 19 nt, Homo sapiens
  misc_RNA (1)...(19): siRNA sense strand
aaucagaagaggaagugga

SEQ ID NO: 2390027 - RNA, 19 nt, Homo sapiens
  misc_RNA (1)...(19): siRNA sense strand
cccagagagccaagccuua

SEQ ID NO: 2390028 - RNA, 19 nt, Homo sapiens
  misc_RNA (1)...(19): siRNA sense strand
aggaauuguuggaaguuca

SEQ ID NO: 2390029 - RNA, 19 nt, Homo sapiens
  misc_RNA (1)...(19): siRNA sense strand
ggcuagugauugaugggaa

SEQ ID NO: 2390030 - RNA, 19 nt, Homo sapiens
  misc_RNA (1)...(19): siRNA sense strand
aaauacaaagagaggaaga

SEQ ID NO: 2390031 - RNA, 19 nt, Homo sapiens
  misc_RNA (1)...(19): siRNA sense strand
guauaaaaccagcaaagaa

SEQ ID NO: 2390032 - RNA, 19 nt, Homo sapiens
  misc_RNA (1)...(19): siRNA sense strand
cagcagaagucucggccca

SEQ ID NO: 2390033 - RNA, 19 nt, Homo sapiens
  misc_RNA (1)...(19): siRNA sense strand
agccaaagccugagggaag

SEQ ID NO: 2390034 - RNA, 19 nt, Homo sapiens
  misc_RNA (1)...(19): siRNA sense strand
cuuuggagucggaguuuaa

SEQ ID NO: 2390035 - RNA, 19 nt, Homo sapiens
  misc_RNA (1)...(19): siRNA sense strand
cuggugaagucgcgagaca

SEQ ID NO: 2390036 - RNA, 19 nt, Homo sapiens
  misc_RNA (1)...(19): siRNA sense strand
aaacugaugaagugggaga

SEQ ID NO: 2390037 - RNA, 19 nt, Homo sapiens
  misc_RNA (1)...(19): siRNA sense strand
cuuggauacaacugggaaa

SEQ ID NO: 2390038 - RNA, 19 nt, Homo sapiens
  misc_RNA (1)...(19): siRNA sense strand
cggucuaaguuaugguguu

SEQ ID NO: 2390039 - RNA, 19 nt, Homo sapiens
  misc_RNA (1)...(19): siRNA sense strand
uaugaaaagaaaagggcaa

SEQ ID NO: 2390040 - RNA, 19 nt, Homo sapiens
  misc_RNA (1)...(19): siRNA sense strand
aaagagaggaagaugccua

SEQ ID NO: 2390041 - RNA, 19 nt, Homo sapiens
  misc_RNA (1)...(19): siRNA sense strand
gugcauucgucuguggaaa

SEQ ID NO: 2390042 - RNA, 19 nt, Homo sapiens
  misc_RNA (1)...(19): siRNA sense strand
aggaguucuuuguggauga

SEQ ID NO: 2390043 - RNA, 19 nt, Homo sapiens
  misc_RNA (1)...(19): siRNA sense strand
ggacacagggacugggacu

SEQ ID NO: 2390044 - RNA, 19 nt, Homo sapiens
  misc_RNA (1)...(19): siRNA sense strand
uggcauggcguguuaacaa

SEQ ID NO: 2390045 - RNA, 19 nt, Homo sapiens
  misc_RNA (1)...(19): siRNA sense strand
uggaugauuuugaggaauu

SEQ ID NO: 2390046 - RNA, 19 nt, Homo sapiens
  misc_RNA (1)...(19): siRNA sense strand
ccucgagggaugagcgcuu

SEQ ID NO: 2390047 - RNA, 19 nt, Homo sapiens
  misc_RNA (1)...(19): siRNA sense strand
auguauguguugugaaguu

SEQ ID NO: 2390048 - RNA, 19 nt, Homo sapiens
  misc_RNA (1)...(19): siRNA sense strand
gaguggauacugaagaaaa

SEQ ID NO: 2390049 - RNA, 19 nt, Homo sapiens
  misc_RNA (1)...(19): siRNA sense strand
gaagaauguguuugaggca

SEQ ID NO: 2390050 - RNA, 19 nt, Homo sapiens
  misc_RNA (1)...(19): siRNA sense strand
agaauguguuugaggcagu

SEQ ID NO: 2390051 - RNA, 19 nt, Homo sapiens
  misc_RNA (1)...(19): siRNA sense strand
cugaugaagugggagaaau

SEQ ID NO: 2390052 - RNA, 19 nt, Homo sapiens
  misc_RNA (1)...(19): siRNA sense strand
gccauuaacaagaaaggau

SEQ ID NO: 2390053 - RNA, 19 nt, Homo sapiens
  misc_RNA (1)...(19): siRNA sense strand
aaguaagaaugaaccucua

SEQ ID NO: 2390054 - RNA, 19 nt, Homo sapiens
  misc_RNA (1)...(19): siRNA sense strand
gcuagugauugaugggaag

SEQ ID NO: 2390055 - RNA, 19 nt, Homo sapiens
  misc_RNA (1)...(19): siRNA sense strand
uugaggaauuguuggaagu

SEQ ID NO: 2390056 - RNA, 19 nt, Homo sapiens
  misc_RNA (1)...(19): siRNA sense strand
gcugcuugcacguuauaua

SEQ ID NO: 2390057 - RNA, 19 nt, Homo sapiens
  misc_RNA (1)...(19): siRNA sense strand
acugaugaagugggagaaa

SEQ ID NO: 2390058 - RNA, 19 nt, Homo sapiens
  misc_RNA (1)...(19): siRNA sense strand
gguaaacuuuggagucgga

SEQ ID NO: 2390059 - RNA, 19 nt, Homo sapiens
  misc_RNA (1)...(19): siRNA sense strand
cuacuuaaaccuggagaca

SEQ ID NO: 2390060 - RNA, 19 nt, Homo sapiens
  misc_RNA (1)...(19): siRNA sense strand
aggaauuguuggaaguuca

SEQ ID NO: 2390061 - RNA, 19 nt, Homo sapiens
  misc_RNA (1)...(19): siRNA sense strand
ggcuagugauugaugggaa

SEQ ID NO: 2390062 - RNA, 19 nt, Homo sapiens
  misc_RNA (1)...(19): siRNA sense strand
aaauacaaagagaggaaga

SEQ ID NO: 2390063 - RNA, 19 nt, Homo sapiens
  misc_RNA (1)...(19): siRNA sense strand
guauaaaaccagcaaagaa

SEQ ID NO: 2390064 - RNA, 19 nt, Homo sapiens
  misc_RNA (1)...(19): siRNA sense strand
cagcagaagucucggccca

SEQ ID NO: 2390065 - RNA, 19 nt, Homo sapiens
  misc_RNA (1)...(19): siRNA sense strand
agccaaagccugagggaag

SEQ ID NO: 2390066 - RNA, 19 nt, Homo sapiens
  misc_RNA (1)...(19): siRNA sense strand
cuuuggagucggaguuuaa

SEQ ID NO: 2390067 - RNA, 19 nt, Homo sapiens
  misc_RNA (1)...(19): siRNA sense strand
cuggugaagucgcgagaca

SEQ ID NO: 2390068 - RNA, 19 nt, Homo sapiens
  misc_RNA (1)...(19): siRNA sense strand
aaacugaugaagugggaga

SEQ ID NO: 2390069 - RNA, 19 nt, Homo sapiens
  misc_RNA (1)...(19): siRNA sense strand
cuuggauacaacugggaaa

SEQ ID NO: 2390070 - RNA, 19 nt, Homo sapiens
  misc_RNA (1)...(19): siRNA sense strand
cggucuaaguuaugguguu

SEQ ID NO: 2390071 - RNA, 19 nt, Homo sapiens
  misc_RNA (1)...(19): siRNA sense strand
uaugaaaagaaaagggcaa

SEQ ID NO: 2390072 - RNA, 19 nt, Homo sapiens
  misc_RNA (1)...(19): siRNA sense strand
aaagagaggaagaugccua

SEQ ID NO: 2390073 - RNA, 19 nt, Homo sapiens
  misc_RNA (1)...(19): siRNA sense strand
gugcauucgucuguggaaa

SEQ ID NO: 2390074 - RNA, 19 nt, Homo sapiens
  misc_RNA (1)...(19): siRNA sense strand
aggaguucuuuguggauga

SEQ ID NO: 2390075 - RNA, 19 nt, Homo sapiens
  misc_RNA (1)...(19): siRNA sense strand
ggacacagggacugggacu

SEQ ID NO: 2390076 - RNA, 19 nt, Homo sapiens
  misc_RNA (1)...(19): siRNA sense strand
uggcauggcguguuaacaa

SEQ ID NO: 2390077 - RNA, 19 nt, Homo sapiens
  misc_RNA (1)...(19): siRNA sense strand
uggaugauuuugaggaauu

SEQ ID NO: 2390078 - RNA, 19 nt, Homo sapiens
  misc_RNA (1)...(19): siRNA sense strand
ccucgagggaugagcgcuu

SEQ ID NO: 2390079 - RNA, 19 nt, Homo sapiens
  misc_RNA (1)...(19): siRNA sense strand
auguauguguugugaaguu

SEQ ID NO: 2390080 - RNA, 19 nt, Homo sapiens
  misc_RNA (1)...(19): siRNA sense strand
gaguggauacugaagaaaa

SEQ ID NO: 2390081 - RNA, 19 nt, Homo sapiens
  misc_RNA (1)...(19): siRNA sense strand
gaagaauguguuugaggca

SEQ ID NO: 2390082 - RNA, 19 nt, Homo sapiens
  misc_RNA (1)...(19): siRNA sense strand
agaauguguuugaggcagu

SEQ ID NO: 2390083 - RNA, 19 nt, Homo sapiens
  misc_RNA (1)...(19): siRNA sense strand
cugaugaagugggagaaau

SEQ ID NO: 2390084 - RNA, 19 nt, Homo sapiens
  misc_RNA (1)...(19): siRNA sense strand
gccauuaacaagaaaggau

SEQ ID NO: 2390085 - RNA, 19 nt, Homo sapiens
  misc_RNA (1)...(19): siRNA sense strand
aaguaagaaugaaccucua

SEQ ID NO: 2390086 - RNA, 19 nt, Homo sapiens
  misc_RNA (1)...(19): siRNA sense strand
gcuagugauugaugggaag

SEQ ID NO: 2390087 - RNA, 19 nt, Homo sapiens
  misc_RNA (1)...(19): siRNA sense strand
uugaggaauuguuggaagu

SEQ ID NO: 2390088 - RNA, 19 nt, Homo sapiens
  misc_RNA (1)...(19): siRNA sense strand
gcugcuugcacguuauaua

SEQ ID NO: 2390089 - RNA, 19 nt, Homo sapiens
  misc_RNA (1)...(19): siRNA sense strand
acugaugaagugggagaaa

SEQ ID NO: 2390090 - RNA, 19 nt, Homo sapiens
  misc_RNA (1)...(19): siRNA sense strand
gguaaacuuuggagucgga

SEQ ID NO: 2390091 - RNA, 19 nt, Homo sapiens
  misc_RNA (1)...(19): siRNA sense strand
cuacuuaaaccuggagaca

SEQ ID NO: 2390092 - RNA, 19 nt, Homo sapiens
  misc_RNA (1)...(19): siRNA sense strand
aggaauuguuggaaguuca

SEQ ID NO: 2390093 - RNA, 19 nt, Homo sapiens
  misc_RNA (1)...(19): siRNA sense strand
ggcuagugauugaugggaa

SEQ ID NO: 2390094 - RNA, 19 nt, Homo sapiens
  misc_RNA (1)...(19): siRNA sense strand
aaauacaaagagaggaaga

SEQ ID NO: 2390095 - RNA, 19 nt, Homo sapiens
  misc_RNA (1)...(19): siRNA sense strand
guauaaaaccagcaaagaa

SEQ ID NO: 2390096 - RNA, 19 nt, Homo sapiens
  misc_RNA (1)...(19): siRNA sense strand
cagcagaagucucggccca

SEQ ID NO: 2390097 - RNA, 19 nt, Homo sapiens
  misc_RNA (1)...(19): siRNA sense strand
agccaaagccugagggaag

SEQ ID NO: 2390098 - RNA, 19 nt, Homo sapiens
  misc_RNA (1)...(19): siRNA sense strand
cuuuggagucggaguuuaa

SEQ ID NO: 2390099 - RNA, 19 nt, Homo sapiens
  misc_RNA (1)...(19): siRNA sense strand
cuggugaagucgcgagaca

SEQ ID NO: 2390100 - RNA, 19 nt, Homo sapiens
  misc_RNA (1)...(19): siRNA sense strand
aaacugaugaagugggaga

SEQ ID NO: 2390101 - RNA, 19 nt, Homo sapiens
  misc_RNA (1)...(19): siRNA sense strand
cuuggauacaacugggaaa

SEQ ID NO: 2390102 - RNA, 19 nt, Homo sapiens
  misc_RNA (1)...(19): siRNA sense strand
cggucuaaguuaugguguu

SEQ ID NO: 2390103 - RNA, 19 nt, Homo sapiens
  misc_RNA (1)...(19): siRNA sense strand
uaugaaaagaaaagggcaa

SEQ ID NO: 2390104 - RNA, 19 nt, Homo sapiens
  misc_RNA (1)...(19): siRNA sense strand
aaagagaggaagaugccua

SEQ ID NO: 2390105 - RNA, 19 nt, Homo sapiens
  misc_RNA (1)...(19): siRNA sense strand
gugcauucgucuguggaaa

SEQ ID NO: 2390106 - RNA, 19 nt, Homo sapiens
  misc_RNA (1)...(19): siRNA sense strand
aggaguucuuuguggauga

SEQ ID NO: 2390107 - RNA, 19 nt, Homo sapiens
  misc_RNA (1)...(19): siRNA sense strand
ggacacagggacugggacu

SEQ ID NO: 2390108 - RNA, 19 nt, Homo sapiens
  misc_RNA (1)...(19): siRNA sense strand
uggcauggcguguuaacaa

SEQ ID NO: 2390109 - RNA, 19 nt, Homo sapiens
  misc_RNA (1)...(19): siRNA sense strand
uggaugauuuugaggaauu

SEQ ID NO: 2390110 - RNA, 19 nt, Homo sapiens
  misc_RNA (1)...(19): siRNA sense strand
ccucgagggaugagcgcuu

SEQ ID NO: 2390111 - RNA, 19 nt, Homo sapiens
  misc_RNA (1)...(19): siRNA sense strand
auguauguguugugaaguu

SEQ ID NO: 2390112 - RNA, 19 nt, Homo sapiens
  misc_RNA (1)...(19): siRNA sense strand
gaguggauacugaagaaaa

SEQ ID NO: 2390113 - RNA, 19 nt, Homo sapiens
  misc_RNA (1)...(19): siRNA sense strand
gaagaauguguuugaggca

SEQ ID NO: 2390114 - RNA, 19 nt, Homo sapiens
  misc_RNA (1)...(19): siRNA sense strand
agaauguguuugaggcagu

SEQ ID NO: 2390115 - RNA, 19 nt, Homo sapiens
  misc_RNA (1)...(19): siRNA sense strand
cugaugaagugggagaaau

SEQ ID NO: 2390116 - RNA, 19 nt, Homo sapiens
  misc_RNA (1)...(19): siRNA sense strand
gccauuaacaagaaaggau

SEQ ID NO: 2390117 - RNA, 19 nt, Homo sapiens
  misc_RNA (1)...(19): siRNA sense strand
aaguaagaaugaaccucua

SEQ ID NO: 2390118 - RNA, 19 nt, Homo sapiens
  misc_RNA (1)...(19): siRNA sense strand
gcuagugauugaugggaag

SEQ ID NO: 2390119 - RNA, 19 nt, Homo sapiens
  misc_RNA (1)...(19): siRNA sense strand
uugaggaauuguuggaagu

SEQ ID NO: 2390120 - RNA, 19 nt, Homo sapiens
  misc_RNA (1)...(19): siRNA sense strand
gcugcuugcacguuauaua

SEQ ID NO: 2390121 - RNA, 19 nt, Homo sapiens
  misc_RNA (1)...(19): siRNA sense strand
acugaugaagugggagaaa

SEQ ID NO: 2390122 - RNA, 19 nt, Homo sapiens
  misc_RNA (1)...(19): siRNA sense strand
gguaaacuuuggagucgga

SEQ ID NO: 2390123 - RNA, 19 nt, Homo sapiens
  misc_RNA (1)...(19): siRNA sense strand
cuacuuaaaccuggagaca

SEQ ID NO: 2390124 - RNA, 19 nt, Homo sapiens
  misc_RNA (1)...(19): siRNA sense strand
aggaauuguuggaaguuca

SEQ ID NO: 2390125 - RNA, 19 nt, Homo sapiens
  misc_RNA (1)...(19): siRNA sense strand
ggcuagugauugaugggaa

SEQ ID NO: 2390126 - RNA, 19 nt, Homo sapiens
  misc_RNA (1)...(19): siRNA sense strand
aaauacaaagagaggaaga

SEQ ID NO: 2390127 - RNA, 19 nt, Homo sapiens
  misc_RNA (1)...(19): siRNA sense strand
guauaaaaccagcaaagaa

SEQ ID NO: 2390128 - RNA, 19 nt, Homo sapiens
  misc_RNA (1)...(19): siRNA sense strand
cagcagaagucucggccca

SEQ ID NO: 2390129 - RNA, 19 nt, Homo sapiens
  misc_RNA (1)...(19): siRNA sense strand
agccaaagccugagggaag

SEQ ID NO: 2390130 - RNA, 19 nt, Homo sapiens
  misc_RNA (1)...(19): siRNA sense strand
cuuuggagucggaguuuaa

SEQ ID NO: 2390131 - RNA, 19 nt, Homo sapiens
  misc_RNA (1)...(19): siRNA sense strand
cuggugaagucgcgagaca

SEQ ID NO: 2390132 - RNA, 19 nt, Homo sapiens
  misc_RNA (1)...(19): siRNA sense strand
aaacugaugaagugggaga

SEQ ID NO: 2390133 - RNA, 19 nt, Homo sapiens
  misc_RNA (1)...(19): siRNA sense strand
cuuggauacaacugggaaa

SEQ ID NO: 2390134 - RNA, 19 nt, Homo sapiens
  misc_RNA (1)...(19): siRNA sense strand
cggucuaaguuaugguguu

SEQ ID NO: 2390135 - RNA, 19 nt, Homo sapiens
  misc_RNA (1)...(19): siRNA sense strand
uaugaaaagaaaagggcaa

SEQ ID NO: 2390136 - RNA, 19 nt, Homo sapiens
  misc_RNA (1)...(19): siRNA sense strand
aaagagaggaagaugccua

SEQ ID NO: 2390137 - RNA, 19 nt, Homo sapiens
  misc_RNA (1)...(19): siRNA sense strand
gugcauucgucuguggaaa

SEQ ID NO: 2390138 - RNA, 19 nt, Homo sapiens
  misc_RNA (1)...(19): siRNA sense strand
aggaguucuuuguggauga

SEQ ID NO: 2390139 - RNA, 19 nt, Homo sapiens
  misc_RNA (1)...(19): siRNA sense strand
ggacacagggacugggacu

SEQ ID NO: 2390140 - RNA, 19 nt, Homo sapiens
  misc_RNA (1)...(19): siRNA sense strand
uggcauggcguguuaacaa

SEQ ID NO: 2390141 - RNA, 19 nt, Homo sapiens
  misc_RNA (1)...(19): siRNA sense strand
uggaugauuuugaggaauu

SEQ ID NO: 2390142 - RNA, 19 nt, Homo sapiens
  misc_RNA (1)...(19): siRNA sense strand
ccucgagggaugagcgcuu

SEQ ID NO: 2390143 - RNA, 19 nt, Homo sapiens
  misc_RNA (1)...(19): siRNA sense strand
auguauguguugugaaguu

SEQ ID NO: 2390144 - RNA, 19 nt, Homo sapiens
  misc_RNA (1)...(19): siRNA sense strand
gaguggauacugaagaaaa

SEQ ID NO: 2390145 - RNA, 19 nt, Homo sapiens
  misc_RNA (1)...(19): siRNA sense strand
gaagaauguguuugaggca

SEQ ID NO: 2390146 - RNA, 19 nt, Homo sapiens
  misc_RNA (1)...(19): siRNA sense strand
agaauguguuugaggcagu

SEQ ID NO: 2390147 - RNA, 19 nt, Homo sapiens
  misc_RNA (1)...(19): siRNA sense strand
cugaugaagugggagaaau

SEQ ID NO: 2390148 - RNA, 19 nt, Homo sapiens
  misc_RNA (1)...(19): siRNA sense strand
gccauuaacaagaaaggau

SEQ ID NO: 2390149 - RNA, 19 nt, Homo sapiens
  misc_RNA (1)...(19): siRNA sense strand
aaguaagaaugaaccucua

SEQ ID NO: 2390150 - RNA, 19 nt, Homo sapiens
  misc_RNA (1)...(19): siRNA sense strand
gcuagugauugaugggaag

SEQ ID NO: 2390151 - RNA, 19 nt, Homo sapiens
  misc_RNA (1)...(19): siRNA sense strand
uugaggaauuguuggaagu

SEQ ID NO: 2390152 - RNA, 19 nt, Homo sapiens
  misc_RNA (1)...(19): siRNA sense strand
gcugcuugcacguuauaua

SEQ ID NO: 2390153 - RNA, 19 nt, Homo sapiens
  misc_RNA (1)...(19): siRNA sense strand
acugaugaagugggagaaa

SEQ ID NO: 2390154 - RNA, 19 nt, Homo sapiens
  misc_RNA (1)...(19): siRNA sense strand
gguaaacuuuggagucgga

SEQ ID NO: 2390155 - RNA, 19 nt, Homo sapiens
  misc_RNA (1)...(19): siRNA sense strand
cuacuuaaaccuggagaca

SEQ ID NO: 2390156 - RNA, 19 nt, Homo sapiens
  misc_RNA (1)...(19): siRNA sense strand
gugcauugagugugggaaa

SEQ ID NO: 2390157 - RNA, 19 nt, Homo sapiens
  misc_RNA (1)...(19): siRNA sense strand
ccauaugagugcaaggaau

SEQ ID NO: 2390158 - RNA, 19 nt, Homo sapiens
  misc_RNA (1)...(19): siRNA sense strand
aggugauguuggagaacua

SEQ ID NO: 2390159 - RNA, 19 nt, Homo sapiens
  misc_RNA (1)...(19): siRNA sense strand
uugcaucgauugugggaaa

SEQ ID NO: 2390160 - RNA, 19 nt, Homo sapiens
  misc_RNA (1)...(19): siRNA sense strand
gugcaaggaaugcgguaaa

SEQ ID NO: 2390161 - RNA, 19 nt, Homo sapiens
  misc_RNA (1)...(19): siRNA sense strand
uguaaggaauguaggaaaa

SEQ ID NO: 2390162 - RNA, 19 nt, Homo sapiens
  misc_RNA (1)...(19): siRNA sense strand
aguucauacuggagagaga

SEQ ID NO: 2390163 - RNA, 19 nt, Homo sapiens
  misc_RNA (1)...(19): siRNA sense strand
agaaaagucuucaggcaaa

SEQ ID NO: 2390164 - RNA, 19 nt, Homo sapiens
  misc_RNA (1)...(19): siRNA sense strand
gguaaagccuucagccaga

SEQ ID NO: 2390165 - RNA, 19 nt, Homo sapiens
  misc_RNA (1)...(19): siRNA sense strand
guguaaagagugcggaaaa

SEQ ID NO: 2390166 - RNA, 19 nt, Homo sapiens
  misc_RNA (1)...(19): siRNA sense strand
cccuauaaauguauggaau

SEQ ID NO: 2390167 - RNA, 19 nt, Homo sapiens
  misc_RNA (1)...(19): siRNA sense strand
acaagaagcuggaggcugu

SEQ ID NO: 2390168 - RNA, 19 nt, Homo sapiens
  misc_RNA (1)...(19): siRNA sense strand
cagaagucauacuggagaa

SEQ ID NO: 2390169 - RNA, 19 nt, Homo sapiens
  misc_RNA (1)...(19): siRNA sense strand
auguaaggaauguaggaaa

SEQ ID NO: 2390170 - RNA, 19 nt, Homo sapiens
  misc_RNA (1)...(19): siRNA sense strand
aagaaugggauaugggaga

SEQ ID NO: 2390171 - RNA, 19 nt, Homo sapiens
  misc_RNA (1)...(19): siRNA sense strand
acuugaaggcuguguggaa

SEQ ID NO: 2390172 - RNA, 19 nt, Homo sapiens
  misc_RNA (1)...(19): siRNA sense strand
ccucguuggaacaaggaaa

SEQ ID NO: 2390173 - RNA, 19 nt, Homo sapiens
  misc_RNA (1)...(19): siRNA sense strand
ugcaguaggucaagagaca

SEQ ID NO: 2390174 - RNA, 19 nt, Homo sapiens
  misc_RNA (1)...(19): siRNA sense strand
aacccauacaggagagaaa

SEQ ID NO: 2390175 - RNA, 19 nt, Homo sapiens
  misc_RNA (1)...(19): siRNA sense strand
agaggaacuuguacaggaa

SEQ ID NO: 2390176 - RNA, 19 nt, Homo sapiens
  misc_RNA (1)...(19): siRNA sense strand
cgaaagaugacaagagccu

SEQ ID NO: 2390177 - RNA, 19 nt, Homo sapiens
  misc_RNA (1)...(19): siRNA sense strand
aggaaaaccuucauccaaa

SEQ ID NO: 2390178 - RNA, 19 nt, Homo sapiens
  misc_RNA (1)...(19): siRNA sense strand
cuuggacagugaagcgaaa

SEQ ID NO: 2390179 - RNA, 19 nt, Homo sapiens
  misc_RNA (1)...(19): siRNA sense strand
ccuggauggugaagcgaga

SEQ ID NO: 2390180 - RNA, 19 nt, Homo sapiens
  misc_RNA (1)...(19): siRNA sense strand
augcaguguguguggcaaa

SEQ ID NO: 2390181 - RNA, 19 nt, Homo sapiens
  misc_RNA (1)...(19): siRNA sense strand
cagaaaagucuucaggcaa

SEQ ID NO: 2390182 - RNA, 19 nt, Homo sapiens
  misc_RNA (1)...(19): siRNA sense strand
cuuaaucaacacaggagaa

SEQ ID NO: 2390183 - RNA, 19 nt, Homo sapiens
  misc_RNA (1)...(19): siRNA sense strand
guacaugagacccaggaau

SEQ ID NO: 2390184 - RNA, 19 nt, Homo sapiens
  misc_RNA (1)...(19): siRNA sense strand
cccuaugaauguaagguuu

SEQ ID NO: 2390185 - RNA, 19 nt, Homo sapiens
  misc_RNA (1)...(19): siRNA sense strand
gaagcuugcaguaggucaa

SEQ ID NO: 2390186 - RNA, 19 nt, Homo sapiens
  misc_RNA (1)...(19): siRNA sense strand
gaauguauugaguguggaa

SEQ ID NO: 2390187 - RNA, 19 nt, Homo sapiens
  misc_RNA (1)...(19): siRNA sense strand
gcagaaaagucuucaggca

SEQ ID NO: 2390188 - RNA, 19 nt, Homo sapiens
  misc_RNA (1)...(19): siRNA sense strand
gggauaugggagaacaaca

SEQ ID NO: 2390189 - RNA, 19 nt, Homo sapiens
  misc_RNA (1)...(19): siRNA sense strand
aagcgagagcugacaggaa

SEQ ID NO: 2390190 - RNA, 19 nt, Homo sapiens
  misc_RNA (1)...(19): siRNA sense strand
ggaauugaaccuaaagcca

SEQ ID NO: 2390191 - RNA, 19 nt, Homo sapiens
  misc_RNA (1)...(19): siRNA sense strand
gugaagcgaaagaugacaa

SEQ ID NO: 2390192 - RNA, 19 nt, Homo sapiens
  misc_RNA (1)...(19): siRNA sense strand
guggaagaucaaggaguua

SEQ ID NO: 2390193 - RNA, 19 nt, Homo sapiens
  misc_RNA (1)...(19): siRNA sense strand
gugauaacagagagacuca

SEQ ID NO: 2390194 - RNA, 19 nt, Homo sapiens
  misc_RNA (1)...(19): siRNA sense strand
caguaggucaagagacaca

SEQ ID NO: 2390195 - RNA, 19 nt, Homo sapiens
  misc_RNA (1)...(19): siRNA sense strand
uggaaaggcauucaagaca

SEQ ID NO: 2390196 - RNA, 19 nt, Homo sapiens
  misc_RNA (1)...(19): siRNA sense strand
ccuuaugaaugcagugugu

SEQ ID NO: 2390197 - RNA, 19 nt, Homo sapiens
  misc_RNA (1)...(19): siRNA sense strand
cagugauaacagagagacu

SEQ ID NO: 2390198 - RNA, 19 nt, Homo sapiens
  misc_RNA (1)...(19): siRNA sense strand
cagaggaacuuguacagga

SEQ ID NO: 2390199 - RNA, 19 nt, Homo sapiens
  misc_RNA (1)...(19): siRNA sense strand
gaauauacaccuugccagu

SEQ ID NO: 2390200 - RNA, 19 nt, Homo sapiens
  misc_RNA (1)...(19): siRNA sense strand
uggaaagaaaccauaugaa

SEQ ID NO: 2390201 - RNA, 19 nt, Homo sapiens
  misc_RNA (1)...(19): siRNA sense strand
gugggaaggccuuuaguga

SEQ ID NO: 2390202 - RNA, 19 nt, Homo sapiens
  misc_RNA (1)...(19): siRNA sense strand
gugggaaagccuucaguga

SEQ ID NO: 2390203 - RNA, 19 nt, Homo sapiens
  misc_RNA (1)...(19): siRNA sense strand
agguaugguuccucccuua

SEQ ID NO: 2390204 - RNA, 19 nt, Homo sapiens
  misc_RNA (1)...(19): siRNA sense strand
aaguguaaagagugcggaa

SEQ ID NO: 2390205 - RNA, 19 nt, Homo sapiens
  misc_RNA (1)...(19): siRNA sense strand
gguaacagacagaaccuca

SEQ ID NO: 2390206 - RNA, 19 nt, Homo sapiens
  misc_RNA (1)...(19): siRNA sense strand
agacagaaccucaaacacu

SEQ ID NO: 2390207 - RNA, 19 nt, Homo sapiens
  misc_RNA (1)...(19): siRNA sense strand
ccgccugauccuagagaaa

SEQ ID NO: 2390208 - RNA, 19 nt, Homo sapiens
  misc_RNA (1)...(19): siRNA sense strand
gaguuaaucacgagggcau

SEQ ID NO: 2390209 - RNA, 19 nt, Homo sapiens
  misc_RNA (1)...(19): siRNA sense strand
cugcagaugaggacagcaa

SEQ ID NO: 2390210 - RNA, 19 nt, Homo sapiens
  misc_RNA (1)...(19): siRNA sense strand
ugaagaaggagcauggcaa

SEQ ID NO: 2390211 - RNA, 19 nt, Homo sapiens
  misc_RNA (1)...(19): siRNA sense strand
gguacaaggcugaaaggca

SEQ ID NO: 2390212 - RNA, 19 nt, Homo sapiens
  misc_RNA (1)...(19): siRNA sense strand
guccaaagguggugagcgu

SEQ ID NO: 2390213 - RNA, 19 nt, Homo sapiens
  misc_RNA (1)...(19): siRNA sense strand
ggacaaggcuggcauggca

SEQ ID NO: 2390214 - RNA, 19 nt, Homo sapiens
  misc_RNA (1)...(19): siRNA sense strand
gccugauccuagagaaaca

SEQ ID NO: 2390215 - RNA, 19 nt, Homo sapiens
  misc_RNA (1)...(19): siRNA sense strand
gcgccaugucagaguuaau

SEQ ID NO: 2390216 - RNA, 19 nt, Homo sapiens
  misc_RNA (1)...(19): siRNA sense strand
ccucuuaaggugcggauca

SEQ ID NO: 2390217 - RNA, 19 nt, Homo sapiens
  misc_RNA (1)...(19): siRNA sense strand
ggugaugguacaaggcuga

SEQ ID NO: 2390218 - RNA, 19 nt, Homo sapiens
  misc_RNA (1)...(19): siRNA sense strand
guacaaggcugaaaggcac

SEQ ID NO: 2390219 - RNA, 19 nt, Homo sapiens
  misc_RNA (1)...(19): siRNA sense strand
gcaacuuccugcaagccaa

SEQ ID NO: 2390220 - RNA, 19 nt, Homo sapiens
  misc_RNA (1)...(19): siRNA sense strand
gcacgugaacacaaggaca

SEQ ID NO: 2390221 - RNA, 19 nt, Homo sapiens
  misc_RNA (1)...(19): siRNA sense strand
ggagaauggcccaggcaug

SEQ ID NO: 2390222 - RNA, 19 nt, Homo sapiens
  misc_RNA (1)...(19): siRNA sense strand
ugguggaggccuucaacaa

SEQ ID NO: 2390223 - RNA, 19 nt, Homo sapiens
  misc_RNA (1)...(19): siRNA sense strand
agguguaggaagugaaucu

SEQ ID NO: 2390224 - RNA, 19 nt, Homo sapiens
  misc_RNA (1)...(19): siRNA sense strand
aaagacagcuacugggcca

SEQ ID NO: 2390225 - RNA, 19 nt, Homo sapiens
  misc_RNA (1)...(19): siRNA sense strand
gagcaaaggccucaagggu

SEQ ID NO: 2390226 - RNA, 19 nt, Homo sapiens
  misc_RNA (1)...(19): siRNA sense strand
agacugagccugaggagcu

SEQ ID NO: 2390227 - RNA, 19 nt, Homo sapiens
  misc_RNA (1)...(19): siRNA sense strand
ggguaaagccagugcccug

SEQ ID NO: 2390228 - RNA, 19 nt, Homo sapiens
  misc_RNA (1)...(19): siRNA sense strand
ggcgggaacuagggagcaa

SEQ ID NO: 2390229 - RNA, 19 nt, Homo sapiens
  misc_RNA (1)...(19): siRNA sense strand
ccuugaagcaggagagcug

SEQ ID NO: 2390230 - RNA, 19 nt, Homo sapiens
  misc_RNA (1)...(19): siRNA sense strand
cacgugaacacaaggacaa

SEQ ID NO: 2390231 - RNA, 19 nt, Homo sapiens
  misc_RNA (1)...(19): siRNA sense strand
gcaaaggccucaagggugg

SEQ ID NO: 2390232 - RNA, 19 nt, Homo sapiens
  misc_RNA (1)...(19): siRNA sense strand
ccuguaaggucuguggcaa

SEQ ID NO: 2390233 - RNA, 19 nt, Homo sapiens
  misc_RNA (1)...(19): siRNA sense strand
cucuaaaccucaagaccca

SEQ ID NO: 2390234 - RNA, 19 nt, Homo sapiens
  misc_RNA (1)...(19): siRNA sense strand
caaccuucaaagacagcua

SEQ ID NO: 2390235 - RNA, 19 nt, Homo sapiens
  misc_RNA (1)...(19): siRNA sense strand
gauugaagguagagccuga

SEQ ID NO: 2390236 - RNA, 19 nt, Homo sapiens
  misc_RNA (1)...(19): siRNA sense strand
aggaagaggaggaggagga

SEQ ID NO: 2390237 - RNA, 19 nt, Homo sapiens
  misc_RNA (1)...(19): siRNA sense strand
cuaaagugguuucgggaca

SEQ ID NO: 2390238 - RNA, 19 nt, Homo sapiens
  misc_RNA (1)...(19): siRNA sense strand
aggaggaggaggaggaaga

SEQ ID NO: 2390239 - RNA, 19 nt, Homo sapiens
  misc_RNA (1)...(19): siRNA sense strand
aagaagaggaagaggagga

SEQ ID NO: 2390240 - RNA, 19 nt, Homo sapiens
  misc_RNA (1)...(19): siRNA sense strand
cgaaagaccaagcgcaaaa

SEQ ID NO: 2390241 - RNA, 19 nt, Homo sapiens
  misc_RNA (1)...(19): siRNA sense strand
uagaugaagaagaggaaga

SEQ ID NO: 2390242 - RNA, 19 nt, Homo sapiens
  misc_RNA (1)...(19): siRNA sense strand
agaacagaucacugguuua

SEQ ID NO: 2390243 - RNA, 19 nt, Homo sapiens
  misc_RNA (1)...(19): siRNA sense strand
ugaagaaauagaagagacu

SEQ ID NO: 2390244 - RNA, 19 nt, Homo sapiens
  misc_RNA (1)...(19): siRNA sense strand
agcgaaagaccaagcgcaa

SEQ ID NO: 2390245 - RNA, 19 nt, Homo sapiens
  misc_RNA (1)...(19): siRNA sense strand
acgaaaggauugaagguag

SEQ ID NO: 2390246 - RNA, 19 nt, Homo sapiens
  misc_RNA (1)...(19): siRNA sense strand
agaagagacucgagcccga

SEQ ID NO: 2390247 - RNA, 19 nt, Homo sapiens
  misc_RNA (1)...(19): siRNA sense strand
caccaacagcuacgggaaa

SEQ ID NO: 2390248 - RNA, 19 nt, Homo sapiens
  misc_RNA (1)...(19): siRNA sense strand
ucuagaugaagaagaggaa

SEQ ID NO: 2390249 - RNA, 19 nt, Homo sapiens
  misc_RNA (1)...(19): siRNA sense strand
aggaggaagaugaugauga

SEQ ID NO: 2390250 - RNA, 19 nt, Homo sapiens
  misc_RNA (1)...(19): siRNA sense strand
aggaggaggaagaugauga

SEQ ID NO: 2390251 - RNA, 19 nt, Homo sapiens
  misc_RNA (1)...(19): siRNA sense strand
aagaggaagaggaggagga

SEQ ID NO: 2390252 - RNA, 19 nt, Homo sapiens
  misc_RNA (1)...(19): siRNA sense strand
aagaggaggaggaggagga

SEQ ID NO: 2390253 - RNA, 19 nt, Homo sapiens
  misc_RNA (1)...(19): siRNA sense strand
augaagaagaggaagagga

SEQ ID NO: 2390254 - RNA, 19 nt, Homo sapiens
  misc_RNA (1)...(19): siRNA sense strand
ccaccaacagcuacgggaa

SEQ ID NO: 2390255 - RNA, 19 nt, Homo sapiens
  misc_RNA (1)...(19): siRNA sense strand
cugaagaaauagaagagac

SEQ ID NO: 2390256 - RNA, 19 nt, Homo sapiens
  misc_RNA (1)...(19): siRNA sense strand
caccagaaauuaaaggagu

SEQ ID NO: 2390257 - RNA, 19 nt, Homo sapiens
  misc_RNA (1)...(19): siRNA sense strand
cuccagagcaaguugguau

SEQ ID NO: 2390258 - RNA, 19 nt, Homo sapiens
  misc_RNA (1)...(19): siRNA sense strand
augaugaggaagaggagga

SEQ ID NO: 2390259 - RNA, 19 nt, Homo sapiens
  misc_RNA (1)...(19): siRNA sense strand
agcccagaccagugagcua

SEQ ID NO: 2390260 - RNA, 19 nt, Homo sapiens
  misc_RNA (1)...(19): siRNA sense strand
gcgcaaaaccaaagagcag

SEQ ID NO: 2390261 - RNA, 19 nt, Homo sapiens
  misc_RNA (1)...(19): siRNA sense strand
augaggaagaggaggagga

SEQ ID NO: 2390262 - RNA, 19 nt, Homo sapiens
  misc_RNA (1)...(19): siRNA sense strand
augcaacgccagcgaaaga

SEQ ID NO: 2390263 - RNA, 19 nt, Homo sapiens
  misc_RNA (1)...(19): siRNA sense strand
auaugcaacgccagcgaaa

SEQ ID NO: 2390264 - RNA, 19 nt, Homo sapiens
  misc_RNA (1)...(19): siRNA sense strand
uuuccaagacccagcaauu

SEQ ID NO: 2390265 - RNA, 19 nt, Homo sapiens
  misc_RNA (1)...(19): siRNA sense strand
aagaacugccagaagauga

SEQ ID NO: 2390266 - RNA, 19 nt, Homo sapiens
  misc_RNA (1)...(19): siRNA sense strand
agacaagaaauaugguaca

SEQ ID NO: 2390267 - RNA, 19 nt, Homo sapiens
  misc_RNA (1)...(19): siRNA sense strand
ccguuaacaggcagcauaa

SEQ ID NO: 2390268 - RNA, 19 nt, Homo sapiens
  misc_RNA (1)...(19): siRNA sense strand
agaagaugacacagaugaa

SEQ ID NO: 2390269 - RNA, 19 nt, Homo sapiens
  misc_RNA (1)...(19): siRNA sense strand
caggaaagcaggagggagc

SEQ ID NO: 2390270 - RNA, 19 nt, Homo sapiens
  misc_RNA (1)...(19): siRNA sense strand
guuugaagaagaagcugaa

SEQ ID NO: 2390271 - RNA, 19 nt, Homo sapiens
  misc_RNA (1)...(19): siRNA sense strand
augcagaagaugacacaga

SEQ ID NO: 2390272 - RNA, 19 nt, Homo sapiens
  misc_RNA (1)...(19): siRNA sense strand
auggaaagagacaagaaau

SEQ ID NO: 2390273 - RNA, 19 nt, Homo sapiens
  misc_RNA (1)...(19): siRNA sense strand
ugguaucaaacccggaaua

SEQ ID NO: 2390274 - RNA, 19 nt, Homo sapiens
  misc_RNA (1)...(19): siRNA sense strand
aagcugaagaagagguguu

SEQ ID NO: 2390275 - RNA, 19 nt, Homo sapiens
  misc_RNA (1)...(19): siRNA sense strand
ccggaauaaucuuugcuga

SEQ ID NO: 2390276 - RNA, 19 nt, Homo sapiens
  misc_RNA (1)...(19): siRNA sense strand
uugaagaagaagcugaaga

SEQ ID NO: 2390277 - RNA, 19 nt, Homo sapiens
  misc_RNA (1)...(19): siRNA sense strand
acaaugaaacagaaagcau

SEQ ID NO: 2390278 - RNA, 19 nt, Homo sapiens
  misc_RNA (1)...(19): siRNA sense strand
caccaauagcaaaguacua

SEQ ID NO: 2390279 - RNA, 19 nt, Homo sapiens
  misc_RNA (1)...(19): siRNA sense strand
aaaauaugcuagauggcua

SEQ ID NO: 2390280 - RNA, 19 nt, Homo sapiens
  misc_RNA (1)...(19): siRNA sense strand
gggccaugcaagugaagca

SEQ ID NO: 2390281 - RNA, 19 nt, Homo sapiens
  misc_RNA (1)...(19): siRNA sense strand
agaaagcauacuagguaga

SEQ ID NO: 2390282 - RNA, 19 nt, Homo sapiens
  misc_RNA (1)...(19): siRNA sense strand
uggccaaagaugaaguaca

SEQ ID NO: 2390283 - RNA, 19 nt, Homo sapiens
  misc_RNA (1)...(19): siRNA sense strand
uagcaaaguacuaucccaa

SEQ ID NO: 2390284 - RNA, 19 nt, Homo sapiens
  misc_RNA (1)...(19): siRNA sense strand
cccaacaaugaaacagaaa

SEQ ID NO: 2390285 - RNA, 19 nt, Homo sapiens
  misc_RNA (1)...(19): siRNA sense strand
uaacgauguuggaaggagu

SEQ ID NO: 2390286 - RNA, 19 nt, Homo sapiens
  misc_RNA (1)...(19): siRNA sense strand
cuguaucaccaauagcaaa

SEQ ID NO: 2390287 - RNA, 19 nt, Homo sapiens
  misc_RNA (1)...(19): siRNA sense strand
cacauauagagauuggaua

SEQ ID NO: 2390288 - RNA, 19 nt, Homo sapiens
  misc_RNA (1)...(19): siRNA sense strand
gaagaauagaccugagccu

SEQ ID NO: 2390289 - RNA, 19 nt, Homo sapiens
  misc_RNA (1)...(19): siRNA sense strand
augcaauggaaaugaaacu

SEQ ID NO: 2390290 - RNA, 19 nt, Homo sapiens
  misc_RNA (1)...(19): siRNA sense strand
ggauaaaggauggugguuc

SEQ ID NO: 2390291 - RNA, 19 nt, Homo sapiens
  misc_RNA (1)...(19): siRNA sense strand
auauguggccaaagaugaa

SEQ ID NO: 2390292 - RNA, 19 nt, Homo sapiens
  misc_RNA (1)...(19): siRNA sense strand
uggugaugcuggugggcaa

SEQ ID NO: 2390293 - RNA, 19 nt, Homo sapiens
  misc_RNA (1)...(19): siRNA sense strand
ugaaggaccuggaggagga

SEQ ID NO: 2390294 - RNA, 19 nt, Homo sapiens
  misc_RNA (1)...(19): siRNA sense strand
gagaaguaccacagcgucu

SEQ ID NO: 2390295 - RNA, 19 nt, Homo sapiens
  misc_RNA (1)...(19): siRNA sense strand
cggccaaacugaaccacca

SEQ ID NO: 2390296 - RNA, 19 nt, Homo sapiens
  misc_RNA (1)...(19): siRNA sense strand
ggaaguggcuccgugggua

SEQ ID NO: 2390297 - RNA, 19 nt, Homo sapiens
  misc_RNA (1)...(19): siRNA sense strand
gggaaggaguuugccgaca

SEQ ID NO: 2390298 - RNA, 19 nt, Homo sapiens
  misc_RNA (1)...(19): siRNA sense strand
ggguaaaggaagagcggaa

SEQ ID NO: 2390299 - RNA, 19 nt, Homo sapiens
  misc_RNA (1)...(19): siRNA sense strand
aggagaaaaugaaggguga

SEQ ID NO: 2390300 - RNA, 19 nt, Homo sapiens
  misc_RNA (1)...(19): siRNA sense strand
cuuacaugauccugagaca

SEQ ID NO: 2390301 - RNA, 19 nt, Homo sapiens
  misc_RNA (1)...(19): siRNA sense strand
aaggaaucugugcggguaa

SEQ ID NO: 2390302 - RNA, 19 nt, Homo sapiens
  misc_RNA (1)...(19): siRNA sense strand
gcuucuaugaggcggguga

SEQ ID NO: 2390303 - RNA, 19 nt, Homo sapiens
  misc_RNA (1)...(19): siRNA sense strand
ccaucaccaaggaggagaa

SEQ ID NO: 2390304 - RNA, 19 nt, Homo sapiens
  misc_RNA (1)...(19): siRNA sense strand
ugggaacugaagagagaaa

SEQ ID NO: 2390305 - RNA, 19 nt, Homo sapiens
  misc_RNA (1)...(19): siRNA sense strand
agagauaauuugaagagca

SEQ ID NO: 2390306 - RNA, 19 nt, Homo sapiens
  misc_RNA (1)...(19): siRNA sense strand
caaacugggagguggaaaa

SEQ ID NO: 2390307 - RNA, 19 nt, Homo sapiens
  misc_RNA (1)...(19): siRNA sense strand
aggaaagaauguagcgauc

SEQ ID NO: 2390308 - RNA, 19 nt, Homo sapiens
  misc_RNA (1)...(19): siRNA sense strand
cugcauaugaagacaucaa

SEQ ID NO: 2390309 - RNA, 19 nt, Homo sapiens
  misc_RNA (1)...(19): siRNA sense strand
agcuggaacugaugaggaa

SEQ ID NO: 2390310 - RNA, 19 nt, Homo sapiens
  misc_RNA (1)...(19): siRNA sense strand
cugaaaaccucaacugcaa

SEQ ID NO: 2390311 - RNA, 19 nt, Homo sapiens
  misc_RNA (1)...(19): siRNA sense strand
agagcaaacuggacaaaau

SEQ ID NO: 2390312 - RNA, 19 nt, Homo sapiens
  misc_RNA (1)...(19): siRNA sense strand
caucaaacugggaggugga

SEQ ID NO: 2390313 - RNA, 19 nt, Homo sapiens
  misc_RNA (1)...(19): siRNA sense strand
uuaaggauucagagaaaga

SEQ ID NO: 2390314 - RNA, 19 nt, Homo sapiens
  misc_RNA (1)...(19): siRNA sense strand
gaggaaagaauguagcgau

SEQ ID NO: 2390315 - RNA, 19 nt, Homo sapiens
  misc_RNA (1)...(19): siRNA sense strand
agaacuacagaaagccaaa

SEQ ID NO: 2390316 - RNA, 19 nt, Homo sapiens
  misc_RNA (1)...(19): siRNA sense strand
cugaagagagaaaugucua

SEQ ID NO: 2390317 - RNA, 19 nt, Homo sapiens
  misc_RNA (1)...(19): siRNA sense strand
uaagagagauacagugacu

SEQ ID NO: 2390318 - RNA, 19 nt, Homo sapiens
  misc_RNA (1)...(19): siRNA sense strand
guuugcauugauagagaua

SEQ ID NO: 2390319 - RNA, 19 nt, Homo sapiens
  misc_RNA (1)...(19): siRNA sense strand
cagcaugcauacugggaac

SEQ ID NO: 2390320 - RNA, 19 nt, Homo sapiens
  misc_RNA (1)...(19): siRNA sense strand
ugaagagcaaacuggacaa

SEQ ID NO: 2390321 - RNA, 19 nt, Homo sapiens
  misc_RNA (1)...(19): siRNA sense strand
cuaaagaaguagaacuccu

SEQ ID NO: 2390322 - RNA, 19 nt, Homo sapiens
  misc_RNA (1)...(19): siRNA sense strand
guggaaacucagcagguga

SEQ ID NO: 2390323 - RNA, 19 nt, Homo sapiens
  misc_RNA (1)...(19): siRNA sense strand
ucgauuugaagaagaaaca

SEQ ID NO: 2390324 - RNA, 19 nt, Homo sapiens
  misc_RNA (1)...(19): siRNA sense strand
agguuugcauugauagaga

SEQ ID NO: 2390325 - RNA, 19 nt, Homo sapiens
  misc_RNA (1)...(19): siRNA sense strand
augcacugguagaagauga

SEQ ID NO: 2390326 - RNA, 19 nt, Homo sapiens
  misc_RNA (1)...(19): siRNA sense strand
agaaacaaguuccguggga

SEQ ID NO: 2390327 - RNA, 19 nt, Homo sapiens
  misc_RNA (1)...(19): siRNA sense strand
ugaaaguauugaaugagca

SEQ ID NO: 2390328 - RNA, 19 nt, Homo sapiens
  misc_RNA (1)...(19): siRNA sense strand
auccauaucaggaagacaa

SEQ ID NO: 2390329 - RNA, 19 nt, Homo sapiens
  misc_RNA (1)...(19): siRNA sense strand
gcauaugaagacaucaaaa

SEQ ID NO: 2390330 - RNA, 19 nt, Homo sapiens
  misc_RNA (1)...(19): siRNA sense strand
gaagacaaucugaagagca

SEQ ID NO: 2390331 - RNA, 19 nt, Homo sapiens
  misc_RNA (1)...(19): siRNA sense strand
ugggaacugaagagagaaa

SEQ ID NO: 2390332 - RNA, 19 nt, Homo sapiens
  misc_RNA (1)...(19): siRNA sense strand
agagauaauuugaagagca

SEQ ID NO: 2390333 - RNA, 19 nt, Homo sapiens
  misc_RNA (1)...(19): siRNA sense strand
caaacugggagguggaaaa

SEQ ID NO: 2390334 - RNA, 19 nt, Homo sapiens
  misc_RNA (1)...(19): siRNA sense strand
aggaaagaauguagcgauc

SEQ ID NO: 2390335 - RNA, 19 nt, Homo sapiens
  misc_RNA (1)...(19): siRNA sense strand
cugcauaugaagacaucaa

SEQ ID NO: 2390336 - RNA, 19 nt, Homo sapiens
  misc_RNA (1)...(19): siRNA sense strand
agcuggaacugaugaggaa

SEQ ID NO: 2390337 - RNA, 19 nt, Homo sapiens
  misc_RNA (1)...(19): siRNA sense strand
cugaaaaccucaacugcaa

SEQ ID NO: 2390338 - RNA, 19 nt, Homo sapiens
  misc_RNA (1)...(19): siRNA sense strand
agagcaaacuggacaaaau

SEQ ID NO: 2390339 - RNA, 19 nt, Homo sapiens
  misc_RNA (1)...(19): siRNA sense strand
caucaaacugggaggugga

SEQ ID NO: 2390340 - RNA, 19 nt, Homo sapiens
  misc_RNA (1)...(19): siRNA sense strand
uuaaggauucagagaaaga

SEQ ID NO: 2390341 - RNA, 19 nt, Homo sapiens
  misc_RNA (1)...(19): siRNA sense strand
gaggaaagaauguagcgau

SEQ ID NO: 2390342 - RNA, 19 nt, Homo sapiens
  misc_RNA (1)...(19): siRNA sense strand
agaacuacagaaagccaaa

SEQ ID NO: 2390343 - RNA, 19 nt, Homo sapiens
  misc_RNA (1)...(19): siRNA sense strand
cugaagagagaaaugucua

SEQ ID NO: 2390344 - RNA, 19 nt, Homo sapiens
  misc_RNA (1)...(19): siRNA sense strand
uaagagagauacagugacu

SEQ ID NO: 2390345 - RNA, 19 nt, Homo sapiens
  misc_RNA (1)...(19): siRNA sense strand
guuugcauugauagagaua

SEQ ID NO: 2390346 - RNA, 19 nt, Homo sapiens
  misc_RNA (1)...(19): siRNA sense strand
cagcaugcauacugggaac

SEQ ID NO: 2390347 - RNA, 19 nt, Homo sapiens
  misc_RNA (1)...(19): siRNA sense strand
ugaagagcaaacuggacaa

SEQ ID NO: 2390348 - RNA, 19 nt, Homo sapiens
  misc_RNA (1)...(19): siRNA sense strand
cuaaagaaguagaacuccu

SEQ ID NO: 2390349 - RNA, 19 nt, Homo sapiens
  misc_RNA (1)...(19): siRNA sense strand
guggaaacucagcagguga

SEQ ID NO: 2390350 - RNA, 19 nt, Homo sapiens
  misc_RNA (1)...(19): siRNA sense strand
ucgauuugaagaagaaaca

SEQ ID NO: 2390351 - RNA, 19 nt, Homo sapiens
  misc_RNA (1)...(19): siRNA sense strand
agguuugcauugauagaga

SEQ ID NO: 2390352 - RNA, 19 nt, Homo sapiens
  misc_RNA (1)...(19): siRNA sense strand
augcacugguagaagauga

SEQ ID NO: 2390353 - RNA, 19 nt, Homo sapiens
  misc_RNA (1)...(19): siRNA sense strand
agaaacaaguuccguggga

SEQ ID NO: 2390354 - RNA, 19 nt, Homo sapiens
  misc_RNA (1)...(19): siRNA sense strand
ugaaaguauugaaugagca

SEQ ID NO: 2390355 - RNA, 19 nt, Homo sapiens
  misc_RNA (1)...(19): siRNA sense strand
auccauaucaggaagacaa

SEQ ID NO: 2390356 - RNA, 19 nt, Homo sapiens
  misc_RNA (1)...(19): siRNA sense strand
gcauaugaagacaucaaaa

SEQ ID NO: 2390357 - RNA, 19 nt, Homo sapiens
  misc_RNA (1)...(19): siRNA sense strand
gaagacaaucugaagagca

SEQ ID NO: 2390358 - RNA, 19 nt, Homo sapiens
  misc_RNA (1)...(19): siRNA sense strand
uguuaaaccuguaaggaaa

SEQ ID NO: 2390359 - RNA, 19 nt, Homo sapiens
  misc_RNA (1)...(19): siRNA sense strand
aggaagaggaagaagauua

SEQ ID NO: 2390360 - RNA, 19 nt, Homo sapiens
  misc_RNA (1)...(19): siRNA sense strand
ugaaagugauggagagaca

SEQ ID NO: 2390361 - RNA, 19 nt, Homo sapiens
  misc_RNA (1)...(19): siRNA sense strand
cguaaaugcaauucagaua

SEQ ID NO: 2390362 - RNA, 19 nt, Homo sapiens
  misc_RNA (1)...(19): siRNA sense strand
aggaauuacuggaagcuaa

SEQ ID NO: 2390363 - RNA, 19 nt, Homo sapiens
  misc_RNA (1)...(19): siRNA sense strand
aaagagaagaugauggaaa

SEQ ID NO: 2390364 - RNA, 19 nt, Homo sapiens
  misc_RNA (1)...(19): siRNA sense strand
cgggauuggaaaugggaaa

SEQ ID NO: 2390365 - RNA, 19 nt, Homo sapiens
  misc_RNA (1)...(19): siRNA sense strand
ugaggaagguacaggcaaa

SEQ ID NO: 2390366 - RNA, 19 nt, Homo sapiens
  misc_RNA (1)...(19): siRNA sense strand
ggccaaaguauuagaaaga

SEQ ID NO: 2390367 - RNA, 19 nt, Homo sapiens
  misc_RNA (1)...(19): siRNA sense strand
agaaauaucuucagagcca

SEQ ID NO: 2390368 - RNA, 19 nt, Homo sapiens
  misc_RNA (1)...(19): siRNA sense strand
agaaucaggagaagagaaa

SEQ ID NO: 2390369 - RNA, 19 nt, Homo sapiens
  misc_RNA (1)...(19): siRNA sense strand
cgaaagagugagacagaga

SEQ ID NO: 2390370 - RNA, 19 nt, Homo sapiens
  misc_RNA (1)...(19): siRNA sense strand
agaguaauggagagggaaa

SEQ ID NO: 2390371 - RNA, 19 nt, Homo sapiens
  misc_RNA (1)...(19): siRNA sense strand
ucgaacugcugaugagaaa

SEQ ID NO: 2390372 - RNA, 19 nt, Homo sapiens
  misc_RNA (1)...(19): siRNA sense strand
caaagaaauaccagaaaca

SEQ ID NO: 2390373 - RNA, 19 nt, Homo sapiens
  misc_RNA (1)...(19): siRNA sense strand
ccuucgagguggugagaca

SEQ ID NO: 2390374 - RNA, 19 nt, Homo sapiens
  misc_RNA (1)...(19): siRNA sense strand
ggagaguaauggagaggga

SEQ ID NO: 2390375 - RNA, 19 nt, Homo sapiens
  misc_RNA (1)...(19): siRNA sense strand
ccuucaacauaaagaacaa

SEQ ID NO: 2390376 - RNA, 19 nt, Homo sapiens
  misc_RNA (1)...(19): siRNA sense strand
ggugaauauccuaggaaaa

SEQ ID NO: 2390377 - RNA, 19 nt, Homo sapiens
  misc_RNA (1)...(19): siRNA sense strand
aagagaagaugauggaaaa

SEQ ID NO: 2390378 - RNA, 19 nt, Homo sapiens
  misc_RNA (1)...(19): siRNA sense strand
gggaggaagaacuuaguaa

SEQ ID NO: 2390379 - RNA, 19 nt, Homo sapiens
  misc_RNA (1)...(19): siRNA sense strand
aagcaagauccaaagaaua

SEQ ID NO: 2390380 - RNA, 19 nt, Homo sapiens
  misc_RNA (1)...(19): siRNA sense strand
gcauaaggguguugcagga

SEQ ID NO: 2390381 - RNA, 19 nt, Homo sapiens
  misc_RNA (1)...(19): siRNA sense strand
gucagaaaugauagagaaa

SEQ ID NO: 2390382 - RNA, 19 nt, Homo sapiens
  misc_RNA (1)...(19): siRNA sense strand
agaaagaaacgaagagcca

SEQ ID NO: 2390383 - RNA, 19 nt, Homo sapiens
  misc_RNA (1)...(19): siRNA sense strand
aaggagaggaagaggaaga

SEQ ID NO: 2390384 - RNA, 19 nt, Homo sapiens
  misc_RNA (1)...(19): siRNA sense strand
agaacaaagucgacaagau

SEQ ID NO: 2390385 - RNA, 19 nt, Homo sapiens
  misc_RNA (1)...(19): siRNA sense strand
acucaaaucccucgaacaa

SEQ ID NO: 2390386 - RNA, 19 nt, Homo sapiens
  misc_RNA (1)...(19): siRNA sense strand
gagaggaagaggaagaaga

SEQ ID NO: 2390387 - RNA, 19 nt, Homo sapiens
  misc_RNA (1)...(19): siRNA sense strand
gcaauguguccaaggaauu

SEQ ID NO: 2390388 - RNA, 19 nt, Homo sapiens
  misc_RNA (1)...(19): siRNA sense strand
gagcaaaacccacuagaaa

SEQ ID NO: 2390389 - RNA, 19 nt, Homo sapiens
  misc_RNA (1)...(19): siRNA sense strand
caacaaacgacuugagauc

SEQ ID NO: 2390390 - RNA, 19 nt, Homo sapiens
  misc_RNA (1)...(19): siRNA sense strand
augagaaagaggaggauga

SEQ ID NO: 2390391 - RNA, 19 nt, Homo sapiens
  misc_RNA (1)...(19): siRNA sense strand
gaaagaacaaagucgacaa

SEQ ID NO: 2390392 - RNA, 19 nt, Homo sapiens
  misc_RNA (1)...(19): siRNA sense strand
ccucaaacaagaagugaca

SEQ ID NO: 2390393 - RNA, 19 nt, Homo sapiens
  misc_RNA (1)...(19): siRNA sense strand
cuguuaaaccuguaaggaa

SEQ ID NO: 2390394 - RNA, 19 nt, Homo sapiens
  misc_RNA (1)...(19): siRNA sense strand
agaauucccaggagaguaa

SEQ ID NO: 2390395 - RNA, 19 nt, Homo sapiens
  misc_RNA (1)...(19): siRNA sense strand
aaggaagcuuugagggaca

SEQ ID NO: 2390396 - RNA, 19 nt, Homo sapiens
  misc_RNA (1)...(19): siRNA sense strand
uggugaauauccuaggaaa

SEQ ID NO: 2390397 - RNA, 19 nt, Homo sapiens
  misc_RNA (1)...(19): siRNA sense strand
accaagacagagagaguua

SEQ ID NO: 2390398 - RNA, 19 nt, Homo sapiens
  misc_RNA (1)...(19): siRNA sense strand
agaaauacauacuggaucu

SEQ ID NO: 2390399 - RNA, 19 nt, Homo sapiens
  misc_RNA (1)...(19): siRNA sense strand
uuaccagagucaacagaaa

SEQ ID NO: 2390400 - RNA, 19 nt, Homo sapiens
  misc_RNA (1)...(19): siRNA sense strand
cugaaaugucgcuggaaga

SEQ ID NO: 2390401 - RNA, 19 nt, Homo sapiens
  misc_RNA (1)...(19): siRNA sense strand
ggacguuccggguggcaua

SEQ ID NO: 2390402 - RNA, 19 nt, Homo sapiens
  misc_RNA (1)...(19): siRNA sense strand
ucccauaguucgccagaaa

SEQ ID NO: 2390403 - RNA, 19 nt, Homo sapiens
  misc_RNA (1)...(19): siRNA sense strand
gcuuauugcuagacuugaa

SEQ ID NO: 2390404 - RNA, 19 nt, Homo sapiens
  misc_RNA (1)...(19): siRNA sense strand
acauuaguuugaagagcaa

SEQ ID NO: 2390405 - RNA, 19 nt, Homo sapiens
  misc_RNA (1)...(19): siRNA sense strand
ggaacaggucauucagcaa

SEQ ID NO: 2390406 - RNA, 19 nt, Homo sapiens
  misc_RNA (1)...(19): siRNA sense strand
acgaagagccacuggagau

SEQ ID NO: 2390407 - RNA, 19 nt, Homo sapiens
  misc_RNA (1)...(19): siRNA sense strand
agggauuacaagaaacaua

SEQ ID NO: 2390408 - RNA, 19 nt, Homo sapiens
  misc_RNA (1)...(19): siRNA sense strand
uguuaagagccgagagugu

SEQ ID NO: 2390409 - RNA, 19 nt, Homo sapiens
  misc_RNA (1)...(19): siRNA sense strand
gcuacagugucaugaguca

SEQ ID NO: 2390410 - RNA, 19 nt, Homo sapiens
  misc_RNA (1)...(19): siRNA sense strand
aagaaauaccagaaacaga

SEQ ID NO: 2390411 - RNA, 19 nt, Homo sapiens
  misc_RNA (1)...(19): siRNA sense strand
acaaacgacuugagaucuu

SEQ ID NO: 2390412 - RNA, 19 nt, Homo sapiens
  misc_RNA (1)...(19): siRNA sense strand
ccacagcgggauuggaaau

SEQ ID NO: 2390413 - RNA, 19 nt, Homo sapiens
  misc_RNA (1)...(19): siRNA sense strand
aaucauaaugguacaggaa

SEQ ID NO: 2390414 - RNA, 19 nt, Homo sapiens
  misc_RNA (1)...(19): siRNA sense strand
ugaaggaacagguggcuuu

SEQ ID NO: 2390415 - RNA, 19 nt, Homo sapiens
  misc_RNA (1)...(19): siRNA sense strand
acugguaacaagucagaaa

SEQ ID NO: 2390416 - RNA, 19 nt, Homo sapiens
  misc_RNA (1)...(19): siRNA sense strand
cauaaauaaagaaggggaa

SEQ ID NO: 2390417 - RNA, 19 nt, Homo sapiens
  misc_RNA (1)...(19): siRNA sense strand
aguuagaaguaguagccau

SEQ ID NO: 2390418 - RNA, 19 nt, Homo sapiens
  misc_RNA (1)...(19): siRNA sense strand
cuauaaaggucacaaucau

SEQ ID NO: 2390419 - RNA, 19 nt, Homo sapiens
  misc_RNA (1)...(19): siRNA sense strand
aagaagaaacuccggaaga

SEQ ID NO: 2390420 - RNA, 19 nt, Homo sapiens
  misc_RNA (1)...(19): siRNA sense strand
ucuggaaguccuagaaauu

SEQ ID NO: 2390421 - RNA, 19 nt, Homo sapiens
  misc_RNA (1)...(19): siRNA sense strand
gcagaaacucagacuguga

SEQ ID NO: 2390422 - RNA, 19 nt, Homo sapiens
  misc_RNA (1)...(19): siRNA sense strand
uucaaauaguggagcagua

SEQ ID NO: 2390423 - RNA, 19 nt, Homo sapiens
  misc_RNA (1)...(19): siRNA sense strand
ugaacaacaguaacggaaa

SEQ ID NO: 2390424 - RNA, 19 nt, Homo sapiens
  misc_RNA (1)...(19): siRNA sense strand
ggagagaggaagaagggaa

SEQ ID NO: 2390425 - RNA, 19 nt, Homo sapiens
  misc_RNA (1)...(19): siRNA sense strand
gagagaggaagaagggaaa

SEQ ID NO: 2390426 - RNA, 19 nt, Homo sapiens
  misc_RNA (1)...(19): siRNA sense strand
gagagauggagcagaacaa

SEQ ID NO: 2390427 - RNA, 19 nt, Homo sapiens
  misc_RNA (1)...(19): siRNA sense strand
ggacaugaggcguaggaga

SEQ ID NO: 2390428 - RNA, 19 nt, Homo sapiens
  misc_RNA (1)...(19): siRNA sense strand
gggaaggggacgaagauaa

SEQ ID NO: 2390429 - RNA, 19 nt, Homo sapiens
  misc_RNA (1)...(19): siRNA sense strand
caggaauugcuuagguuaa

SEQ ID NO: 2390430 - RNA, 19 nt, Homo sapiens
  misc_RNA (1)...(19): siRNA sense strand
caucagaagcaccgagaga

SEQ ID NO: 2390431 - RNA, 19 nt, Homo sapiens
  misc_RNA (1)...(19): siRNA sense strand
cgucagaggcucaugaaca

SEQ ID NO: 2390432 - RNA, 19 nt, Homo sapiens
  misc_RNA (1)...(19): siRNA sense strand
ucacaguacacaugaacaa

SEQ ID NO: 2390433 - RNA, 19 nt, Homo sapiens
  misc_RNA (1)...(19): siRNA sense strand
caagaaagacuucgggcau

SEQ ID NO: 2390434 - RNA, 19 nt, Homo sapiens
  misc_RNA (1)...(19): siRNA sense strand
ggccaaagaaggcaagaau

SEQ ID NO: 2390435 - RNA, 19 nt, Homo sapiens
  misc_RNA (1)...(19): siRNA sense strand
uguuccaugucgagaguua

SEQ ID NO: 2390436 - RNA, 19 nt, Homo sapiens
  misc_RNA (1)...(19): siRNA sense strand
ggaaaacuguggugugcaa

SEQ ID NO: 2390437 - RNA, 19 nt, Homo sapiens
  misc_RNA (1)...(19): siRNA sense strand
auggugaauuugagaagaa

SEQ ID NO: 2390438 - RNA, 19 nt, Homo sapiens
  misc_RNA (1)...(19): siRNA sense strand
ccaugagacuuaagaaacu

SEQ ID NO: 2390439 - RNA, 19 nt, Homo sapiens
  misc_RNA (1)...(19): siRNA sense strand
ccauagaagaagauaagga

SEQ ID NO: 2390440 - RNA, 19 nt, Homo sapiens
  misc_RNA (1)...(19): siRNA sense strand
ucauaaggaaggacaagaa

SEQ ID NO: 2390441 - RNA, 19 nt, Homo sapiens
  misc_RNA (1)...(19): siRNA sense strand
aaucagacagcgaaguaaa

SEQ ID NO: 2390442 - RNA, 19 nt, Homo sapiens
  misc_RNA (1)...(19): siRNA sense strand
ggcaacaacaggaggacau

SEQ ID NO: 2390443 - RNA, 19 nt, Homo sapiens
  misc_RNA (1)...(19): siRNA sense strand
aggaauugucuuagaaagu

SEQ ID NO: 2390444 - RNA, 19 nt, Homo sapiens
  misc_RNA (1)...(19): siRNA sense strand
auugagaagacaagagaga

SEQ ID NO: 2390445 - RNA, 19 nt, Homo sapiens
  misc_RNA (1)...(19): siRNA sense strand
agggaagccaugaaacaaa

SEQ ID NO: 2390446 - RNA, 19 nt, Homo sapiens
  misc_RNA (1)...(19): siRNA sense strand
agacauagcagcuggaaag

SEQ ID NO: 2390447 - RNA, 19 nt, Homo sapiens
  misc_RNA (1)...(19): siRNA sense strand
cauagauucuguacggcaa

SEQ ID NO: 2390448 - RNA, 19 nt, Homo sapiens
  misc_RNA (1)...(19): siRNA sense strand
gagagaaaucauugagaag

SEQ ID NO: 2390449 - RNA, 19 nt, Homo sapiens
  misc_RNA (1)...(19): siRNA sense strand
uggccaguauggaggagaa

SEQ ID NO: 2390450 - RNA, 19 nt, Homo sapiens
  misc_RNA (1)...(19): siRNA sense strand
cagacauagcagcuggaaa

SEQ ID NO: 2390451 - RNA, 19 nt, Homo sapiens
  misc_RNA (1)...(19): siRNA sense strand
caggaggacaugaggcgua

SEQ ID NO: 2390452 - RNA, 19 nt, Homo sapiens
  misc_RNA (1)...(19): siRNA sense strand
ucucagagccaggaggaua

SEQ ID NO: 2390453 - RNA, 19 nt, Homo sapiens
  misc_RNA (1)...(19): siRNA sense strand
ccucauacaacccggagua

SEQ ID NO: 2390454 - RNA, 19 nt, Homo sapiens
  misc_RNA (1)...(19): siRNA sense strand
ccggaguaggcgagaccaa

SEQ ID NO: 2390455 - RNA, 19 nt, Homo sapiens
  misc_RNA (1)...(19): siRNA sense strand
ugauacagaggaaggaauu

SEQ ID NO: 2390456 - RNA, 19 nt, Homo sapiens
  misc_RNA (1)...(19): siRNA sense strand
gcccauuacagaugagaga

SEQ ID NO: 2390457 - RNA, 19 nt, Homo sapiens
  misc_RNA (1)...(19): siRNA sense strand
ggaaagaugucaaugaggu

SEQ ID NO: 2390458 - RNA, 19 nt, Homo sapiens
  misc_RNA (1)...(19): siRNA sense strand
gcaagaauccaaagccuga

SEQ ID NO: 2390459 - RNA, 19 nt, Homo sapiens
  misc_RNA (1)...(19): siRNA sense strand
agacaagagagauggagca

SEQ ID NO: 2390460 - RNA, 19 nt, Homo sapiens
  misc_RNA (1)...(19): siRNA sense strand
ugucaucauuagccggaua

SEQ ID NO: 2390461 - RNA, 19 nt, Homo sapiens
  misc_RNA (1)...(19): siRNA sense strand
ggcaagcauucgaggcaga

SEQ ID NO: 2390462 - RNA, 19 nt, Homo sapiens
  misc_RNA (1)...(19): siRNA sense strand
ccaagaaguagccgguaga

SEQ ID NO: 2390463 - RNA, 19 nt, Homo sapiens
  misc_RNA (1)...(19): siRNA sense strand
gcuacaguucguaaugaaa

SEQ ID NO: 2390464 - RNA, 19 nt, Homo sapiens
  misc_RNA (1)...(19): siRNA sense strand
uggaaaguucauugagcau

SEQ ID NO: 2390465 - RNA, 19 nt, Homo sapiens
  misc_RNA (1)...(19): siRNA sense strand
acuuaagaaacuagcccaa

SEQ ID NO: 2390466 - RNA, 19 nt, Homo sapiens
  misc_RNA (1)...(19): siRNA sense strand
ugggcauguuacagaggaa

SEQ ID NO: 2390467 - RNA, 19 nt, Homo sapiens
  misc_RNA (1)...(19): siRNA sense strand
cugaagaguugagagaaau

SEQ ID NO: 2390468 - RNA, 19 nt, Homo sapiens
  misc_RNA (1)...(19): siRNA sense strand
ugagaagacaagagagaug

SEQ ID NO: 2390469 - RNA, 19 nt, Homo sapiens
  misc_RNA (1)...(19): siRNA sense strand
aagaagauaaggagccaga

SEQ ID NO: 2390470 - RNA, 19 nt, Homo sapiens
  misc_RNA (1)...(19): siRNA sense strand
ggugugcaaagaagaauaa

SEQ ID NO: 2390471 - RNA, 19 nt, Homo sapiens
  misc_RNA (1)...(19): siRNA sense strand
cagaggaacaucagaagca

SEQ ID NO: 2390472 - RNA, 19 nt, Homo sapiens
  misc_RNA (1)...(19): siRNA sense strand
cgaucuugauaaagccuau

SEQ ID NO: 2390473 - RNA, 19 nt, Homo sapiens
  misc_RNA (1)...(19): siRNA sense strand
gccaauacgucgaagugca

SEQ ID NO: 2390474 - RNA, 19 nt, Homo sapiens
  misc_RNA (1)...(19): siRNA sense strand
gaggcguaggagagaggaa

SEQ ID NO: 2390475 - RNA, 19 nt, Homo sapiens
  misc_RNA (1)...(19): siRNA sense strand
ccaguauggaggagaaacu

SEQ ID NO: 2390476 - RNA, 19 nt, Homo sapiens
  misc_RNA (1)...(19): siRNA sense strand
aaagggaagccaugaaaca

SEQ ID NO: 2390477 - RNA, 19 nt, Homo sapiens
  misc_RNA (1)...(19): siRNA sense strand
uugcaucaccagaggaaca

SEQ ID NO: 2390478 - RNA, 19 nt, Homo sapiens
  misc_RNA (1)...(19): siRNA sense strand
ccauuacagaugagagagu

SEQ ID NO: 2390479 - RNA, 19 nt, Homo sapiens
  misc_RNA (1)...(19): siRNA sense strand
uagaagaggaggaggacga

SEQ ID NO: 2390480 - RNA, 19 nt, Homo sapiens
  misc_RNA (1)...(19): siRNA sense strand
agguagaagaggaggagga

SEQ ID NO: 2390481 - RNA, 19 nt, Homo sapiens
  misc_RNA (1)...(19): siRNA sense strand
gcauugaguuccacgguga

SEQ ID NO: 2390482 - RNA, 19 nt, Homo sapiens
  misc_RNA (1)...(19): siRNA sense strand
aggccauucuggaggaaaa

SEQ ID NO: 2390483 - RNA, 19 nt, Homo sapiens
  misc_RNA (1)...(19): siRNA sense strand
uucgagaagacgugggaaa

SEQ ID NO: 2390484 - RNA, 19 nt, Homo sapiens
  misc_RNA (1)...(19): siRNA sense strand
ccgaguuugagaagcaaua

SEQ ID NO: 2390485 - RNA, 19 nt, Homo sapiens
  misc_RNA (1)...(19): siRNA sense strand
uggccaaccugaugggcau

SEQ ID NO: 2390486 - RNA, 19 nt, Homo sapiens
  misc_RNA (1)...(19): siRNA sense strand
cgcagauccuggaggugaa

SEQ ID NO: 2390487 - RNA, 19 nt, Homo sapiens
  misc_RNA (1)...(19): siRNA sense strand
ggaucaugcaaguggagga

SEQ ID NO: 2390488 - RNA, 19 nt, Homo sapiens
  misc_RNA (1)...(19): siRNA sense strand
uggaggagguagaagagga

SEQ ID NO: 2390489 - RNA, 19 nt, Homo sapiens
  misc_RNA (1)...(19): siRNA sense strand
ccagauggaaggcggguga

SEQ ID NO: 2390490 - RNA, 19 nt, Homo sapiens
  misc_RNA (1)...(19): siRNA sense strand
acuucaaggacuacaggaa

SEQ ID NO: 2390491 - RNA, 19 nt, Homo sapiens
  misc_RNA (1)...(19): siRNA sense strand
gggaaguguuugggaucau

SEQ ID NO: 2390492 - RNA, 19 nt, Homo sapiens
  misc_RNA (1)...(19): siRNA sense strand
gagcugugcuacaagguca

SEQ ID NO: 2390493 - RNA, 19 nt, Homo sapiens
  misc_RNA (1)...(19): siRNA sense strand
gggaacgagcugugcuaca

SEQ ID NO: 2390494 - RNA, 19 nt, Homo sapiens
  misc_RNA (1)...(19): siRNA sense strand
ggaaaggucaaguucgaca

SEQ ID NO: 2390495 - RNA, 19 nt, Homo sapiens
  misc_RNA (1)...(19): siRNA sense strand
guguccaaguacaucgaaa

SEQ ID NO: 2390496 - RNA, 19 nt, Homo sapiens
  misc_RNA (1)...(19): siRNA sense strand
gcaccuuguuucuggacca

SEQ ID NO: 2390497 - RNA, 19 nt, Homo sapiens
  misc_RNA (1)...(19): siRNA sense strand
ugcacaagcuggagcacga

SEQ ID NO: 2390498 - RNA, 19 nt, Homo sapiens
  misc_RNA (1)...(19): siRNA sense strand
ccgucgaccucaugcugaa

SEQ ID NO: 2390499 - RNA, 19 nt, Homo sapiens
  misc_RNA (1)...(19): siRNA sense strand
aaguggaggagguagaaga

SEQ ID NO: 2390500 - RNA, 19 nt, Homo sapiens
  misc_RNA (1)...(19): siRNA sense strand
ugcaaguggaggagguaga

SEQ ID NO: 2390501 - RNA, 19 nt, Homo sapiens
  misc_RNA (1)...(19): siRNA sense strand
gccacaucuucaaggucua

SEQ ID NO: 2390502 - RNA, 19 nt, Homo sapiens
  misc_RNA (1)...(19): siRNA sense strand
ggagaugcugaaugggcaa

SEQ ID NO: 2390503 - RNA, 19 nt, Homo sapiens
  misc_RNA (1)...(19): siRNA sense strand
ugaacuauguggugcgcuu

SEQ ID NO: 2390504 - RNA, 19 nt, Homo sapiens
  misc_RNA (1)...(19): siRNA sense strand
cuuugaagaaacagugaau

SEQ ID NO: 2390505 - RNA, 19 nt, Homo sapiens
  misc_RNA (1)...(19): siRNA sense strand
ccaaugagguggcugcaga

SEQ ID NO: 2390506 - RNA, 19 nt, Homo sapiens
  misc_RNA (1)...(19): siRNA sense strand
uggagaaggagaugcugaa

SEQ ID NO: 2390507 - RNA, 19 nt, Homo sapiens
  misc_RNA (1)...(19): siRNA sense strand
gaagaguuggagaaggaga

SEQ ID NO: 2390508 - RNA, 19 nt, Homo sapiens
  misc_RNA (1)...(19): siRNA sense strand
gguugaugaugcagacacu

SEQ ID NO: 2390509 - RNA, 19 nt, Homo sapiens
  misc_RNA (1)...(19): siRNA sense strand
agaaacagugaauggcaga

SEQ ID NO: 2390510 - RNA, 19 nt, Homo sapiens
  misc_RNA (1)...(19): siRNA sense strand
gcaaaguaauggagaacgg

SEQ ID NO: 2390511 - RNA, 19 nt, Homo sapiens
  misc_RNA (1)...(19): siRNA sense strand
cugcugaaguguaccgcau

SEQ ID NO: 2390512 - RNA, 19 nt, Homo sapiens
  misc_RNA (1)...(19): siRNA sense strand
ccucaaacagaagggacua

SEQ ID NO: 2390513 - RNA, 19 nt, Homo sapiens
  misc_RNA (1)...(19): siRNA sense strand
cagaaaaugugguugccau

SEQ ID NO: 2390514 - RNA, 19 nt, Homo sapiens
  misc_RNA (1)...(19): siRNA sense strand
ggccaagugucuacagcca

SEQ ID NO: 2390515 - RNA, 19 nt, Homo sapiens
  misc_RNA (1)...(19): siRNA sense strand
cagcaaaguaauggagaac

SEQ ID NO: 2390516 - RNA, 19 nt, Homo sapiens
  misc_RNA (1)...(19): siRNA sense strand
gagcaggguuccagggacu

SEQ ID NO: 2390517 - RNA, 19 nt, Homo sapiens
  misc_RNA (1)...(19): siRNA sense strand
ccuacaagggagacaucua

SEQ ID NO: 2390518 - RNA, 19 nt, Homo sapiens
  misc_RNA (1)...(19): siRNA sense strand
aggacaagcuguaccgcau

SEQ ID NO: 2390519 - RNA, 19 nt, Homo sapiens
  misc_RNA (1)...(19): siRNA sense strand
cgcaggaggaacuggagaa

SEQ ID NO: 2390520 - RNA, 19 nt, Homo sapiens
  misc_RNA (1)...(19): siRNA sense strand
cgucggaggagaaggagca

SEQ ID NO: 2390521 - RNA, 19 nt, Homo sapiens
  misc_RNA (1)...(19): siRNA sense strand
agcacuaugaggaggagaa

SEQ ID NO: 2390522 - RNA, 19 nt, Homo sapiens
  misc_RNA (1)...(19): siRNA sense strand
cuggagaaggucacggaga

SEQ ID NO: 2390523 - RNA, 19 nt, Homo sapiens
  misc_RNA (1)...(19): siRNA sense strand
cccugagcguggaggacau

SEQ ID NO: 2390524 - RNA, 19 nt, Homo sapiens
  misc_RNA (1)...(19): siRNA sense strand
gcgaguuggcacugagcaa

SEQ ID NO: 2390525 - RNA, 19 nt, Homo sapiens
  misc_RNA (1)...(19): siRNA sense strand
cugcaguacuguaugaaaa

SEQ ID NO: 2390526 - RNA, 19 nt, Homo sapiens
  misc_RNA (1)...(19): siRNA sense strand
gcaaacgaucugaagguga

SEQ ID NO: 2390527 - RNA, 19 nt, Homo sapiens
  misc_RNA (1)...(19): siRNA sense strand
acgaacugcaccaaagaaa

SEQ ID NO: 2390528 - RNA, 19 nt, Homo sapiens
  misc_RNA (1)...(19): siRNA sense strand
auguaugcaaggagaguuu

SEQ ID NO: 2390529 - RNA, 19 nt, Homo sapiens
  misc_RNA (1)...(19): siRNA sense strand
aguaauauucauacggcau

SEQ ID NO: 2390530 - RNA, 19 nt, Homo sapiens
  misc_RNA (1)...(19): siRNA sense strand
cuggaugugaagagagcau

SEQ ID NO: 2390531 - RNA, 19 nt, Homo sapiens
  misc_RNA (1)...(19): siRNA sense strand
gaguaauauucauacggca

SEQ ID NO: 2390532 - RNA, 19 nt, Homo sapiens
  misc_RNA (1)...(19): siRNA sense strand
auuaauguaugcaaggaga

SEQ ID NO: 2390533 - RNA, 19 nt, Homo sapiens
  misc_RNA (1)...(19): siRNA sense strand
ccaaagaaacagcugccuu

SEQ ID NO: 2390534 - RNA, 19 nt, Homo sapiens
  misc_RNA (1)...(19): siRNA sense strand
ccuugguugugaagcagaa

SEQ ID NO: 2390535 - RNA, 19 nt, Homo sapiens
  misc_RNA (1)...(19): siRNA sense strand
auuaaugugguuuggagua

SEQ ID NO: 2390536 - RNA, 19 nt, Homo sapiens
  misc_RNA (1)...(19): siRNA sense strand
aaggugaagagaagacauu

SEQ ID NO: 2390537 - RNA, 19 nt, Homo sapiens
  misc_RNA (1)...(19): siRNA sense strand
ggaagaaguucaagcgcaa

SEQ ID NO: 2390538 - RNA, 19 nt, Homo sapiens
  misc_RNA (1)...(19): siRNA sense strand
ccuaaaaucaggagagcua

SEQ ID NO: 2390539 - RNA, 19 nt, Homo sapiens
  misc_RNA (1)...(19): siRNA sense strand
aggaagaggaggaggagga

SEQ ID NO: 2390540 - RNA, 19 nt, Homo sapiens
  misc_RNA (1)...(19): siRNA sense strand
gagaagaagaagagcaacu

SEQ ID NO: 2390541 - RNA, 19 nt, Homo sapiens
  misc_RNA (1)...(19): siRNA sense strand
cugcaaagguacaggugga

SEQ ID NO: 2390542 - RNA, 19 nt, Homo sapiens
  misc_RNA (1)...(19): siRNA sense strand
agguacagguggaagaaga

SEQ ID NO: 2390543 - RNA, 19 nt, Homo sapiens
  misc_RNA (1)...(19): siRNA sense strand
gcaaagacuucauggccca

SEQ ID NO: 2390544 - RNA, 19 nt, Homo sapiens
  misc_RNA (1)...(19): siRNA sense strand
gggaagaaguucaagcgca

SEQ ID NO: 2390545 - RNA, 19 nt, Homo sapiens
  misc_RNA (1)...(19): siRNA sense strand
guggaugguacuaggacua

SEQ ID NO: 2390546 - RNA, 19 nt, Homo sapiens
  misc_RNA (1)...(19): siRNA sense strand
cggaggaggaagaggagga

SEQ ID NO: 2390547 - RNA, 19 nt, Homo sapiens
  misc_RNA (1)...(19): siRNA sense strand
gagaauucauacaggggaa

SEQ ID NO: 2390548 - RNA, 19 nt, Homo sapiens
  misc_RNA (1)...(19): siRNA sense strand
acaaacuagacaagaagaa

SEQ ID NO: 2390549 - RNA, 19 nt, Homo sapiens
  misc_RNA (1)...(19): siRNA sense strand
aggaggaggaggaggacga

SEQ ID NO: 2390550 - RNA, 19 nt, Homo sapiens
  misc_RNA (1)...(19): siRNA sense strand
acaagaagaaagagguagu

SEQ ID NO: 2390551 - RNA, 19 nt, Homo sapiens
  misc_RNA (1)...(19): siRNA sense strand
aggaggaagaggaggagga

SEQ ID NO: 2390552 - RNA, 19 nt, Homo sapiens
  misc_RNA (1)...(19): siRNA sense strand
aggaggaggaggaggagga

SEQ ID NO: 2390553 - RNA, 19 nt, Homo sapiens
  misc_RNA (1)...(19): siRNA sense strand
aggaggaggaggacgaaga

SEQ ID NO: 2390554 - RNA, 19 nt, Homo sapiens
  misc_RNA (1)...(19): siRNA sense strand
gcugcaaccugaagagcca

SEQ ID NO: 2390555 - RNA, 19 nt, Homo sapiens
  misc_RNA (1)...(19): siRNA sense strand
aguuggaggaauugucaaa

SEQ ID NO: 2390556 - RNA, 19 nt, Homo sapiens
  misc_RNA (1)...(19): siRNA sense strand
gagaagacuccgagagcag

SEQ ID NO: 2390557 - RNA, 19 nt, Homo sapiens
  misc_RNA (1)...(19): siRNA sense strand
ggacggacauucaccgaca

SEQ ID NO: 2390558 - RNA, 19 nt, Homo sapiens
  misc_RNA (1)...(19): siRNA sense strand
aagaggaggaggaggagga

SEQ ID NO: 2390559 - RNA, 19 nt, Homo sapiens
  misc_RNA (1)...(19): siRNA sense strand
aagaauacuccauggaagu

SEQ ID NO: 2390560 - RNA, 19 nt, Homo sapiens
  misc_RNA (1)...(19): siRNA sense strand
ggaggaaggucuuugugga

SEQ ID NO: 2390561 - RNA, 19 nt, Homo sapiens
  misc_RNA (1)...(19): siRNA sense strand
cuuugagcaacauggaaua

SEQ ID NO: 2390562 - RNA, 19 nt, Homo sapiens
  misc_RNA (1)...(19): siRNA sense strand
cagucagcguggaguauca

SEQ ID NO: 2390563 - RNA, 19 nt, Homo sapiens
  misc_RNA (1)...(19): siRNA sense strand
ccaaggacaaacuagacaa

SEQ ID NO: 2390564 - RNA, 19 nt, Homo sapiens
  misc_RNA (1)...(19): siRNA sense strand
agaaggacgugaagcggca

SEQ ID NO: 2390565 - RNA, 19 nt, Homo sapiens
  misc_RNA (1)...(19): siRNA sense strand
gguacagguggaagaagau

SEQ ID NO: 2390566 - RNA, 19 nt, Homo sapiens
  misc_RNA (1)...(19): siRNA sense strand
caggagagcuaguggaagg

SEQ ID NO: 2390567 - RNA, 19 nt, Homo sapiens
  misc_RNA (1)...(19): siRNA sense strand
agaaaacugcugaggguga

SEQ ID NO: 2390568 - RNA, 19 nt, Homo sapiens
  misc_RNA (1)...(19): siRNA sense strand
gcguggaguaucagggugu

SEQ ID NO: 2390569 - RNA, 19 nt, Homo sapiens
  misc_RNA (1)...(19): siRNA sense strand
acacaagacugaacagccu

SEQ ID NO: 2390570 - RNA, 19 nt, Homo sapiens
  misc_RNA (1)...(19): siRNA sense strand
cucaauacacgauaagaau

SEQ ID NO: 2390571 - RNA, 19 nt, Homo sapiens
  misc_RNA (1)...(19): siRNA sense strand
gcugaaaagcugaaauguu

SEQ ID NO: 2390572 - RNA, 19 nt, Homo sapiens
  misc_RNA (1)...(19): siRNA sense strand
agucaguacuuuuggaguu

SEQ ID NO: 2390573 - RNA, 19 nt, Homo sapiens
  misc_RNA (1)...(19): siRNA sense strand
aagaucgggugcagcgaau

SEQ ID NO: 2390574 - RNA, 19 nt, Homo sapiens
  misc_RNA (1)...(19): siRNA sense strand
aguucaagcgcaagaagga

SEQ ID NO: 2390575 - RNA, 19 nt, Homo sapiens
  misc_RNA (1)...(19): siRNA sense strand
guaccuaccaugcaggaga

SEQ ID NO: 2390576 - RNA, 19 nt, Homo sapiens
  misc_RNA (1)...(19): siRNA sense strand
cuucacucuuugagcaaca

SEQ ID NO: 2390577 - RNA, 19 nt, Homo sapiens
  misc_RNA (1)...(19): siRNA sense strand
gcauuugccuggaaggaua

SEQ ID NO: 2390578 - RNA, 19 nt, Homo sapiens
  misc_RNA (1)...(19): siRNA sense strand
gggaagaagaucuguauuu

SEQ ID NO: 2390579 - RNA, 19 nt, Homo sapiens
  misc_RNA (1)...(19): siRNA sense strand
cugcagaacuacuggccaa

SEQ ID NO: 2390580 - RNA, 19 nt, Homo sapiens
  misc_RNA (1)...(19): siRNA sense strand
gggagugauuacugcauua

SEQ ID NO: 2390581 - RNA, 19 nt, Homo sapiens
  misc_RNA (1)...(19): siRNA sense strand
gcuacuguauggauggaua

SEQ ID NO: 2390582 - RNA, 19 nt, Homo sapiens
  misc_RNA (1)...(19): siRNA sense strand
ggaaggauaucgagccaca

SEQ ID NO: 2390583 - RNA, 19 nt, Homo sapiens
  misc_RNA (1)...(19): siRNA sense strand
ggaauaaggugagaagaca

SEQ ID NO: 2390584 - RNA, 19 nt, Homo sapiens
  misc_RNA (1)...(19): siRNA sense strand
ggagauaccuauaggagac

SEQ ID NO: 2390585 - RNA, 19 nt, Homo sapiens
  misc_RNA (1)...(19): siRNA sense strand
caaacaacaacaagacauu

SEQ ID NO: 2390586 - RNA, 19 nt, Homo sapiens
  misc_RNA (1)...(19): siRNA sense strand
cugauauggaggagaugua

SEQ ID NO: 2390587 - RNA, 19 nt, Homo sapiens
  misc_RNA (1)...(19): siRNA sense strand
ccaacuacaccgugaacau

SEQ ID NO: 2390588 - RNA, 19 nt, Homo sapiens
  misc_RNA (1)...(19): siRNA sense strand
acgccaucuugguaggaaa

SEQ ID NO: 2390589 - RNA, 19 nt, Homo sapiens
  misc_RNA (1)...(19): siRNA sense strand
ggacucaguguguugauaa

SEQ ID NO: 2390590 - RNA, 19 nt, Homo sapiens
  misc_RNA (1)...(19): siRNA sense strand
ccacaugccagcaaagaga

SEQ ID NO: 2390591 - RNA, 19 nt, Homo sapiens
  misc_RNA (1)...(19): siRNA sense strand
cagacauagaugaguguga

SEQ ID NO: 2390592 - RNA, 19 nt, Homo sapiens
  misc_RNA (1)...(19): siRNA sense strand
agaugaugccauggagaua

SEQ ID NO: 2390593 - RNA, 19 nt, Homo sapiens
  misc_RNA (1)...(19): siRNA sense strand
gacucaguguguugauaaa

SEQ ID NO: 2390594 - RNA, 19 nt, Homo sapiens
  misc_RNA (1)...(19): siRNA sense strand
aaagagaagggaagaagau

SEQ ID NO: 2390595 - RNA, 19 nt, Homo sapiens
  misc_RNA (1)...(19): siRNA sense strand
caaagagaagggaagaaga

SEQ ID NO: 2390596 - RNA, 19 nt, Homo sapiens
  misc_RNA (1)...(19): siRNA sense strand
acuauggauuuguagggaa

SEQ ID NO: 2390597 - RNA, 19 nt, Homo sapiens
  misc_RNA (1)...(19): siRNA sense strand
agagaaaggcaccuggaga

SEQ ID NO: 2390598 - RNA, 19 nt, Homo sapiens
  misc_RNA (1)...(19): siRNA sense strand
cagcaaagagaagggaaga

SEQ ID NO: 2390599 - RNA, 19 nt, Homo sapiens
  misc_RNA (1)...(19): siRNA sense strand
gccacaucaugcacagaaa

SEQ ID NO: 2390600 - RNA, 19 nt, Homo sapiens
  misc_RNA (1)...(19): siRNA sense strand
cguuaugcuugcagagaag

SEQ ID NO: 2390601 - RNA, 19 nt, Homo sapiens
  misc_RNA (1)...(19): siRNA sense strand
uggcaaauaaacucaagaa

SEQ ID NO: 2390602 - RNA, 19 nt, Homo sapiens
  misc_RNA (1)...(19): siRNA sense strand
cgguuggacccuauggaau

SEQ ID NO: 2390603 - RNA, 19 nt, Homo sapiens
  misc_RNA (1)...(19): siRNA sense strand
agugaauggaauaagguga

SEQ ID NO: 2390604 - RNA, 19 nt, Homo sapiens
  misc_RNA (1)...(19): siRNA sense strand
uggaauaaggugagaagac

SEQ ID NO: 2390605 - RNA, 19 nt, Homo sapiens
  misc_RNA (1)...(19): siRNA sense strand
caguuugggcucaggugaa

SEQ ID NO: 2390606 - RNA, 19 nt, Homo sapiens
  misc_RNA (1)...(19): siRNA sense strand
agaugguaucagaaggaau

SEQ ID NO: 2390607 - RNA, 19 nt, Homo sapiens
  misc_RNA (1)...(19): siRNA sense strand
uugaaaagagggagugauu

SEQ ID NO: 2390608 - RNA, 19 nt, Homo sapiens
  misc_RNA (1)...(19): siRNA sense strand
uaaugauaccugugugaga

SEQ ID NO: 2390609 - RNA, 19 nt, Homo sapiens
  misc_RNA (1)...(19): siRNA sense strand
acaaacaacaacaagacau

SEQ ID NO: 2390610 - RNA, 19 nt, Homo sapiens
  misc_RNA (1)...(19): siRNA sense strand
agacauagaugagugugaa

SEQ ID NO: 2390611 - RNA, 19 nt, Homo sapiens
  misc_RNA (1)...(19): siRNA sense strand
ggaaucaguucgugaggag

SEQ ID NO: 2390612 - RNA, 19 nt, Homo sapiens
  misc_RNA (1)...(19): siRNA sense strand
ccagcaaagagaagggaag

SEQ ID NO: 2390613 - RNA, 19 nt, Homo sapiens
  misc_RNA (1)...(19): siRNA sense strand
cagaugaugccauggagau

SEQ ID NO: 2390614 - RNA, 19 nt, Homo sapiens
  misc_RNA (1)...(19): siRNA sense strand
cuauggauuuguagggaac

SEQ ID NO: 2390615 - RNA, 19 nt, Homo sapiens
  misc_RNA (1)...(19): siRNA sense strand
cuggaaggauaucgagcca

SEQ ID NO: 2390616 - RNA, 19 nt, Homo sapiens
  misc_RNA (1)...(19): siRNA sense strand
ucguuaugcuugcagagaa

SEQ ID NO: 2390617 - RNA, 19 nt, Homo sapiens
  misc_RNA (1)...(19): siRNA sense strand
cauagaugagugugaaguu

SEQ ID NO: 2390618 - RNA, 19 nt, Homo sapiens
  misc_RNA (1)...(19): siRNA sense strand
agaaauagacugugguacc

SEQ ID NO: 2390619 - RNA, 19 nt, Homo sapiens
  misc_RNA (1)...(19): siRNA sense strand
agagaagggaagaagaucu

SEQ ID NO: 2390620 - RNA, 19 nt, Homo sapiens
  misc_RNA (1)...(19): siRNA sense strand
gugugagauggcaaauaaa

SEQ ID NO: 2390621 - RNA, 19 nt, Homo sapiens
  misc_RNA (1)...(19): siRNA sense strand
gugaggagacagucaacuu

SEQ ID NO: 2390622 - RNA, 19 nt, Homo sapiens
  misc_RNA (1)...(19): siRNA sense strand
uggagauaccuauaggaga

SEQ ID NO: 2390623 - RNA, 19 nt, Homo sapiens
  misc_RNA (1)...(19): siRNA sense strand
ggauaucgagccacaaaca

SEQ ID NO: 2390624 - RNA, 19 nt, Homo sapiens
  misc_RNA (1)...(19): siRNA sense strand
ggaaaguuggaucagaaca

SEQ ID NO: 2390625 - RNA, 19 nt, Homo sapiens
  misc_RNA (1)...(19): siRNA sense strand
agagaugguaucagaagga

SEQ ID NO: 2390626 - RNA, 19 nt, Homo sapiens
  misc_RNA (1)...(19): siRNA sense strand
aguauaaaccacugggaaa

SEQ ID NO: 2390627 - RNA, 19 nt, Homo sapiens
  misc_RNA (1)...(19): siRNA sense strand
cagugaaagugaagaagaa

SEQ ID NO: 2390628 - RNA, 19 nt, Homo sapiens
  misc_RNA (1)...(19): siRNA sense strand
gugaagaagaaguaggaau

SEQ ID NO: 2390629 - RNA, 19 nt, Homo sapiens
  misc_RNA (1)...(19): siRNA sense strand
caacagugaaagugaagaa

SEQ ID NO: 2390630 - RNA, 19 nt, Homo sapiens
  misc_RNA (1)...(19): siRNA sense strand
gaagaauccaacagugaaa

SEQ ID NO: 2390631 - RNA, 19 nt, Homo sapiens
  misc_RNA (1)...(19): siRNA sense strand
gcaaaaggcugauggggau

SEQ ID NO: 2390632 - RNA, 19 nt, Homo sapiens
  misc_RNA (1)...(19): siRNA sense strand
ugaaagugaagaagaagua

SEQ ID NO: 2390633 - RNA, 19 nt, Homo sapiens
  misc_RNA (1)...(19): siRNA sense strand
aucccaaggcagaggaaua

SEQ ID NO: 2390634 - RNA, 19 nt, Homo sapiens
  misc_RNA (1)...(19): siRNA sense strand
ggaaaacugaagagagcua

SEQ ID NO: 2390635 - RNA, 19 nt, Homo sapiens
  misc_RNA (1)...(19): siRNA sense strand
acucagaggaggaagauga

SEQ ID NO: 2390636 - RNA, 19 nt, Homo sapiens
  misc_RNA (1)...(19): siRNA sense strand
gugaagaauccaacaguga

SEQ ID NO: 2390637 - RNA, 19 nt, Homo sapiens
  misc_RNA (1)...(19): siRNA sense strand
cagaggaggaagaugacua

SEQ ID NO: 2390638 - RNA, 19 nt, Homo sapiens
  misc_RNA (1)...(19): siRNA sense strand
ccuccuacagugagauuaa

SEQ ID NO: 2390639 - RNA, 19 nt, Homo sapiens
  misc_RNA (1)...(19): siRNA sense strand
acagaugagaguuuggaaa

SEQ ID NO: 2390640 - RNA, 19 nt, Homo sapiens
  misc_RNA (1)...(19): siRNA sense strand
gauuugaaaagcagagaua

SEQ ID NO: 2390641 - RNA, 19 nt, Homo sapiens
  misc_RNA (1)...(19): siRNA sense strand
gggcagagucaaagacauc

SEQ ID NO: 2390642 - RNA, 19 nt, Homo sapiens
  misc_RNA (1)...(19): siRNA sense strand
ugugaggacuggagagagu

SEQ ID NO: 2390643 - RNA, 19 nt, Homo sapiens
  misc_RNA (1)...(19): siRNA sense strand
cagaugagaguuuggaaaa

SEQ ID NO: 2390644 - RNA, 19 nt, Homo sapiens
  misc_RNA (1)...(19): siRNA sense strand
cccaaaguacggagccaaa

SEQ ID NO: 2390645 - RNA, 19 nt, Homo sapiens
  misc_RNA (1)...(19): siRNA sense strand
guauaaaccacugggaaaa

SEQ ID NO: 2390646 - RNA, 19 nt, Homo sapiens
  misc_RNA (1)...(19): siRNA sense strand
acacaggagacuucagauu

SEQ ID NO: 2390647 - RNA, 19 nt, Homo sapiens
  misc_RNA (1)...(19): siRNA sense strand
gagagaaacaguggggaua

SEQ ID NO: 2390648 - RNA, 19 nt, Homo sapiens
  misc_RNA (1)...(19): siRNA sense strand
cacauauacccgaggaaaa

SEQ ID NO: 2390649 - RNA, 19 nt, Homo sapiens
  misc_RNA (1)...(19): siRNA sense strand
gagacucagaggaggaaga

SEQ ID NO: 2390650 - RNA, 19 nt, Homo sapiens
  misc_RNA (1)...(19): siRNA sense strand
gauauuacuuccuuggaca

SEQ ID NO: 2390651 - RNA, 19 nt, Homo sapiens
  misc_RNA (1)...(19): siRNA sense strand
uggcaacuggugagaguau

SEQ ID NO: 2390652 - RNA, 19 nt, Homo sapiens
  misc_RNA (1)...(19): siRNA sense strand
cauaacagaacaaggaagu

SEQ ID NO: 2390653 - RNA, 19 nt, Homo sapiens
  misc_RNA (1)...(19): siRNA sense strand
aaggagaagcugcuagaau

SEQ ID NO: 2390654 - RNA, 19 nt, Homo sapiens
  misc_RNA (1)...(19): siRNA sense strand
ggcuuauggcuaugaauau

SEQ ID NO: 2390655 - RNA, 19 nt, Homo sapiens
  misc_RNA (1)...(19): siRNA sense strand
aaaucacagaugagaguuu

SEQ ID NO: 2390656 - RNA, 19 nt, Homo sapiens
  misc_RNA (1)...(19): siRNA sense strand
accaacaaucaaagagaau

SEQ ID NO: 2390657 - RNA, 19 nt, Homo sapiens
  misc_RNA (1)...(19): siRNA sense strand
gugaaagugaagaagaagu

SEQ ID NO: 2390658 - RNA, 19 nt, Homo sapiens
  misc_RNA (1)...(19): siRNA sense strand
acacauauacccgaggaaa

SEQ ID NO: 2390659 - RNA, 19 nt, Homo sapiens
  misc_RNA (1)...(19): siRNA sense strand
ggaacaugccugagauccu

SEQ ID NO: 2390660 - RNA, 19 nt, Homo sapiens
  misc_RNA (1)...(19): siRNA sense strand
agaccaacaaucaaagaga

SEQ ID NO: 2390661 - RNA, 19 nt, Homo sapiens
  misc_RNA (1)...(19): siRNA sense strand
gcacaaaugcagauuccca

SEQ ID NO: 2390662 - RNA, 19 nt, Homo sapiens
  misc_RNA (1)...(19): siRNA sense strand
ugagaguauagcagucaaa

SEQ ID NO: 2390663 - RNA, 19 nt, Homo sapiens
  misc_RNA (1)...(19): siRNA sense strand
aaguauaaaccacugggaa

SEQ ID NO: 2390664 - RNA, 19 nt, Homo sapiens
  misc_RNA (1)...(19): siRNA sense strand
aaagcugacuacagaccaa

SEQ ID NO: 2390665 - RNA, 19 nt, Homo sapiens
  misc_RNA (1)...(19): siRNA sense strand
aguacggagccaaaguaua

SEQ ID NO: 2390666 - RNA, 19 nt, Homo sapiens
  misc_RNA (1)...(19): siRNA sense strand
gcagauucccagagcucuu

SEQ ID NO: 2390667 - RNA, 19 nt, Homo sapiens
  misc_RNA (1)...(19): siRNA sense strand
ucagauuggcgcaaggaga

SEQ ID NO: 2390668 - RNA, 19 nt, Homo sapiens
  misc_RNA (1)...(19): siRNA sense strand
agcuagacauguuuaggaa

SEQ ID NO: 2390669 - RNA, 19 nt, Homo sapiens
  misc_RNA (1)...(19): siRNA sense strand
cugugaacgcauauccaaa

SEQ ID NO: 2390670 - RNA, 19 nt, Homo sapiens
  misc_RNA (1)...(19): siRNA sense strand
cagcuucacugcaaggaga

SEQ ID NO: 2390671 - RNA, 19 nt, Homo sapiens
  misc_RNA (1)...(19): siRNA sense strand
agagagaaacaguggggau

SEQ ID NO: 2390672 - RNA, 19 nt, Homo sapiens
  misc_RNA (1)...(19): siRNA sense strand
cagaauucuucccagucaa

SEQ ID NO: 2390673 - RNA, 19 nt, Homo sapiens
  misc_RNA (1)...(19): siRNA sense strand
cagagauaaagaugugaca

SEQ ID NO: 2390674 - RNA, 19 nt, Homo sapiens
  misc_RNA (1)...(19): siRNA sense strand
uggagaaaggagcagaaaa

SEQ ID NO: 2390675 - RNA, 19 nt, Homo sapiens
  misc_RNA (1)...(19): siRNA sense strand
aagcagugagacacauaua

SEQ ID NO: 2390676 - RNA, 19 nt, Homo sapiens
  misc_RNA (1)...(19): siRNA sense strand
gcucacucuuagauaccua

SEQ ID NO: 2390677 - RNA, 19 nt, Homo sapiens
  misc_RNA (1)...(19): siRNA sense strand
agucaaagacauccaaagu

SEQ ID NO: 2390678 - RNA, 19 nt, Homo sapiens
  misc_RNA (1)...(19): siRNA sense strand
ggaagucaaggcugggaca

SEQ ID NO: 2390679 - RNA, 19 nt, Homo sapiens
  misc_RNA (1)...(19): siRNA sense strand
uccuaguacuggagaacca

SEQ ID NO: 2390680 - RNA, 19 nt, Homo sapiens
  misc_RNA (1)...(19): siRNA sense strand
cuaagcagugagacacaua

SEQ ID NO: 2390681 - RNA, 19 nt, Homo sapiens
  misc_RNA (1)...(19): siRNA sense strand
gggaugaggacgaggacga

SEQ ID NO: 2390682 - RNA, 19 nt, Homo sapiens
  misc_RNA (1)...(19): siRNA sense strand
aggacgaggacgaggagga

SEQ ID NO: 2390683 - RNA, 19 nt, Homo sapiens
  misc_RNA (1)...(19): siRNA sense strand
agccggaaguucaaggcaa

SEQ ID NO: 2390684 - RNA, 19 nt, Homo sapiens
  misc_RNA (1)...(19): siRNA sense strand
gcgcccugaaggagaacaa

SEQ ID NO: 2390685 - RNA, 19 nt, Homo sapiens
  misc_RNA (1)...(19): siRNA sense strand
gcgaaggcagagaggagga

SEQ ID NO: 2390686 - RNA, 19 nt, Homo sapiens
  misc_RNA (1)...(19): siRNA sense strand
aggagaacaaggaccggaa

SEQ ID NO: 2390687 - RNA, 19 nt, Homo sapiens
  misc_RNA (1)...(19): siRNA sense strand
ccaguaacccugcaggaga

SEQ ID NO: 2390688 - RNA, 19 nt, Homo sapiens
  misc_RNA (1)...(19): siRNA sense strand
gaacaagaccucuggccaa

SEQ ID NO: 2390689 - RNA, 19 nt, Homo sapiens
  misc_RNA (1)...(19): siRNA sense strand
gagaaaaggaugauggaga

SEQ ID NO: 2390690 - RNA, 19 nt, Homo sapiens
  misc_RNA (1)...(19): siRNA sense strand
accaaaacuuacagagaaa

SEQ ID NO: 2390691 - RNA, 19 nt, Homo sapiens
  misc_RNA (1)...(19): siRNA sense strand
cuggcaaagcggaggaaga

SEQ ID NO: 2390692 - RNA, 19 nt, Homo sapiens
  misc_RNA (1)...(19): siRNA sense strand
gaaugaacagaguuggcaa

SEQ ID NO: 2390693 - RNA, 19 nt, Homo sapiens
  misc_RNA (1)...(19): siRNA sense strand
agccugaagacguguauaa

SEQ ID NO: 2390694 - RNA, 19 nt, Homo sapiens
  misc_RNA (1)...(19): siRNA sense strand
cuagagagucagaccaaaa

SEQ ID NO: 2390695 - RNA, 19 nt, Homo sapiens
  misc_RNA (1)...(19): siRNA sense strand
gggaaacaauuuugggacu

SEQ ID NO: 2390696 - RNA, 19 nt, Homo sapiens
  misc_RNA (1)...(19): siRNA sense strand
cgcuagagagucagaccaa

SEQ ID NO: 2390697 - RNA, 19 nt, Homo sapiens
  misc_RNA (1)...(19): siRNA sense strand
ggaugauggagauagccaa

SEQ ID NO: 2390698 - RNA, 19 nt, Homo sapiens
  misc_RNA (1)...(19): siRNA sense strand
ggagauagccaaagccaug

SEQ ID NO: 2390699 - RNA, 19 nt, Homo sapiens
  misc_RNA (1)...(19): siRNA sense strand
cagagggacuugaagcuca

SEQ ID NO: 2390700 - RNA, 19 nt, Homo sapiens
  misc_RNA (1)...(19): siRNA sense strand
gcguugaagucuuugccau

SEQ ID NO: 2390701 - RNA, 19 nt, Homo sapiens
  misc_RNA (1)...(19): siRNA sense strand
gcuacagaguccaggcaac

SEQ ID NO: 2390702 - RNA, 19 nt, Homo sapiens
  misc_RNA (1)...(19): siRNA sense strand
cuggccaaauggaaguaua

SEQ ID NO: 2390703 - RNA, 19 nt, Homo sapiens
  misc_RNA (1)...(19): siRNA sense strand
gaaaaggaugauggagaua

SEQ ID NO: 2390704 - RNA, 19 nt, Homo sapiens
  misc_RNA (1)...(19): siRNA sense strand
agaacaaagauuccaccaa

SEQ ID NO: 2390705 - RNA, 19 nt, Homo sapiens
  misc_RNA (1)...(19): siRNA sense strand
uggccaaauggaaguauau

SEQ ID NO: 2390706 - RNA, 19 nt, Homo sapiens
  misc_RNA (1)...(19): siRNA sense strand
auuucgagcucauagggua

SEQ ID NO: 2390707 - RNA, 19 nt, Homo sapiens
  misc_RNA (1)...(19): siRNA sense strand
cuaugaaggcgaagauuac

SEQ ID NO: 2390708 - RNA, 19 nt, Homo sapiens
  misc_RNA (1)...(19): siRNA sense strand
gaacaaagauuccaccaac

SEQ ID NO: 2390709 - RNA, 19 nt, Homo sapiens
  misc_RNA (1)...(19): siRNA sense strand
gaagaggaaucaacggauc

SEQ ID NO: 2390710 - RNA, 19 nt, Homo sapiens
  misc_RNA (1)...(19): siRNA sense strand
auaggguaguuaagcggaa

SEQ ID NO: 2390711 - RNA, 19 nt, Homo sapiens
  misc_RNA (1)...(19): siRNA sense strand
cggauucuaugaaggcgaa

SEQ ID NO: 2390712 - RNA, 19 nt, Homo sapiens
  misc_RNA (1)...(19): siRNA sense strand
ugacagaagaggaagccaa

SEQ ID NO: 2390713 - RNA, 19 nt, Homo sapiens
  misc_RNA (1)...(19): siRNA sense strand
cugaggagcugguggcuga

SEQ ID NO: 2390714 - RNA, 19 nt, Homo sapiens
  misc_RNA (1)...(19): siRNA sense strand
gcaugaaacagaaagcaga

SEQ ID NO: 2390715 - RNA, 19 nt, Homo sapiens
  misc_RNA (1)...(19): siRNA sense strand
uggcugaggaggagcgcau

SEQ ID NO: 2390716 - RNA, 19 nt, Homo sapiens
  misc_RNA (1)...(19): siRNA sense strand
cucaagaagaagcgucaaa

SEQ ID NO: 2390717 - RNA, 19 nt, Homo sapiens
  misc_RNA (1)...(19): siRNA sense strand
gcgaagaggacauagugga

SEQ ID NO: 2390718 - RNA, 19 nt, Homo sapiens
  misc_RNA (1)...(19): siRNA sense strand
ccuggugacagaagaggaa

SEQ ID NO: 2390719 - RNA, 19 nt, Homo sapiens
  misc_RNA (1)...(19): siRNA sense strand
aauucgguccagaggauua

SEQ ID NO: 2390720 - RNA, 19 nt, Homo sapiens
  misc_RNA (1)...(19): siRNA sense strand
ggacagagugacaggggca

SEQ ID NO: 2390721 - RNA, 19 nt, Homo sapiens
  misc_RNA (1)...(19): siRNA sense strand
agaugggucaagaggaaga

SEQ ID NO: 2390722 - RNA, 19 nt, Homo sapiens
  misc_RNA (1)...(19): siRNA sense strand
gaaacccaguucagggaca

SEQ ID NO: 2390723 - RNA, 19 nt, Homo sapiens
  misc_RNA (1)...(19): siRNA sense strand
ggaucaagcuagacugcuc

SEQ ID NO: 2390724 - RNA, 19 nt, Homo sapiens
  misc_RNA (1)...(19): siRNA sense strand
ucaacuggacagagugaca

SEQ ID NO: 2390725 - RNA, 19 nt, Homo sapiens
  misc_RNA (1)...(19): siRNA sense strand
augauuaccuccugggcca

SEQ ID NO: 2390726 - RNA, 19 nt, Homo sapiens
  misc_RNA (1)...(19): siRNA sense strand
acuuggaugaugaagggaa

SEQ ID NO: 2390727 - RNA, 19 nt, Homo sapiens
  misc_RNA (1)...(19): siRNA sense strand
gaagagagcccuccagcca

SEQ ID NO: 2390728 - RNA, 19 nt, Homo sapiens
  misc_RNA (1)...(19): siRNA sense strand
acagauacugccaggaaau

SEQ ID NO: 2390729 - RNA, 19 nt, Homo sapiens
  misc_RNA (1)...(19): siRNA sense strand
ccuacaaaccccugaggaa

SEQ ID NO: 2390730 - RNA, 19 nt, Homo sapiens
  misc_RNA (1)...(19): siRNA sense strand
acaaagacuuccaggaggu

SEQ ID NO: 2390731 - RNA, 19 nt, Homo sapiens
  misc_RNA (1)...(19): siRNA sense strand
uggagagacuguacggcau

SEQ ID NO: 2390732 - RNA, 19 nt, Homo sapiens
  misc_RNA (1)...(19): siRNA sense strand
ucgcaauggcguacggcuu

SEQ ID NO: 2390733 - RNA, 19 nt, Homo sapiens
  misc_RNA (1)...(19): siRNA sense strand
gcagagagcuccuccagca

SEQ ID NO: 2390734 - RNA, 19 nt, Homo sapiens
  misc_RNA (1)...(19): siRNA sense strand
aggugacacuggagaagga

SEQ ID NO: 2390735 - RNA, 19 nt, Homo sapiens
  misc_RNA (1)...(19): siRNA sense strand
aggaggugacacuggagaa

SEQ ID NO: 2390736 - RNA, 19 nt, Homo sapiens
  misc_RNA (1)...(19): siRNA sense strand
uugaagaugacgggagcua

SEQ ID NO: 2390737 - RNA, 19 nt, Homo sapiens
  misc_RNA (1)...(19): siRNA sense strand
cuagaaaauguguggaaaa

SEQ ID NO: 2390738 - RNA, 19 nt, Homo sapiens
  misc_RNA (1)...(19): siRNA sense strand
ccuugguguuauagcaaua

SEQ ID NO: 2390739 - RNA, 19 nt, Homo sapiens
  misc_RNA (1)...(19): siRNA sense strand
gauacugguuauauggaga

SEQ ID NO: 2390740 - RNA, 19 nt, Homo sapiens
  misc_RNA (1)...(19): siRNA sense strand
aagagaaggcugucaccaa

SEQ ID NO: 2390741 - RNA, 19 nt, Homo sapiens
  misc_RNA (1)...(19): siRNA sense strand
guaacagaugugugaugaa

SEQ ID NO: 2390742 - RNA, 19 nt, Homo sapiens
  misc_RNA (1)...(19): siRNA sense strand
gguggaacacagugaagau

SEQ ID NO: 2390743 - RNA, 19 nt, Homo sapiens
  misc_RNA (1)...(19): siRNA sense strand
gguuauauggagacaaaau

SEQ ID NO: 2390744 - RNA, 19 nt, Homo sapiens
  misc_RNA (1)...(19): siRNA sense strand
aguagauggaggaacuuua

SEQ ID NO: 2390745 - RNA, 19 nt, Homo sapiens
  misc_RNA (1)...(19): siRNA sense strand
cuuuauagaagguguuuca

SEQ ID NO: 2390746 - RNA, 19 nt, Homo sapiens
  misc_RNA (1)...(19): siRNA sense strand
ugguauuggcccuuacaua

SEQ ID NO: 2390747 - RNA, 19 nt, Homo sapiens
  misc_RNA (1)...(19): siRNA sense strand
aaccauagcuguugggaug

SEQ ID NO: 2390748 - RNA, 19 nt, Homo sapiens
  misc_RNA (1)...(19): siRNA sense strand
ggaacuuuaaacagguauu

SEQ ID NO: 2390749 - RNA, 19 nt, Homo sapiens
  misc_RNA (1)...(19): siRNA sense strand
cugcagaaaguguaacaga

SEQ ID NO: 2390750 - RNA, 19 nt, Homo sapiens
  misc_RNA (1)...(19): siRNA sense strand
ccuuguuugccuugggauu

SEQ ID NO: 2390751 - RNA, 19 nt, Homo sapiens
  misc_RNA (1)...(19): siRNA sense strand
aauuaaagagacuguguca

SEQ ID NO: 2390752 - RNA, 19 nt, Homo sapiens
  misc_RNA (1)...(19): siRNA sense strand
cuggaggaagugugaauuu

SEQ ID NO: 2390753 - RNA, 19 nt, Homo sapiens
  misc_RNA (1)...(19): siRNA sense strand
uugauaaauuggacuguca

SEQ ID NO: 2390754 - RNA, 19 nt, Homo sapiens
  misc_RNA (1)...(19): siRNA sense strand
cggaaauuucucaggauac

SEQ ID NO: 2390755 - RNA, 19 nt, Homo sapiens
  misc_RNA (1)...(19): siRNA sense strand
ccugcugcccucugaauaa

SEQ ID NO: 2390756 - RNA, 19 nt, Homo sapiens
  misc_RNA (1)...(19): siRNA sense strand
ccucgaauacagcugcaaa

SEQ ID NO: 2390757 - RNA, 19 nt, Homo sapiens
  misc_RNA (1)...(19): siRNA sense strand
ccuagaaaauguguggaaa

SEQ ID NO: 2390758 - RNA, 19 nt, Homo sapiens
  misc_RNA (1)...(19): siRNA sense strand
uggauugaagagaaggcua

SEQ ID NO: 2390759 - RNA, 19 nt, Homo sapiens
  misc_RNA (1)...(19): siRNA sense strand
aaagcagauaagagaguca

SEQ ID NO: 2390760 - RNA, 19 nt, Homo sapiens
  misc_RNA (1)...(19): siRNA sense strand
caucacuguccuuggauca

SEQ ID NO: 2390761 - RNA, 19 nt, Homo sapiens
  misc_RNA (1)...(19): siRNA sense strand
caccaauacagcuuaacaa

SEQ ID NO: 2390762 - RNA, 19 nt, Homo sapiens
  misc_RNA (1)...(19): siRNA sense strand
cuucaggaacaaugagaaa

SEQ ID NO: 2390763 - RNA, 19 nt, Homo sapiens
  misc_RNA (1)...(19): siRNA sense strand
cggaaaaggcccagcucaa

SEQ ID NO: 2390764 - RNA, 19 nt, Homo sapiens
  misc_RNA (1)...(19): siRNA sense strand
gauacaaagcccaaggaga

SEQ ID NO: 2390765 - RNA, 19 nt, Homo sapiens
  misc_RNA (1)...(19): siRNA sense strand
aaacaaugugugugccaaa

SEQ ID NO: 2390766 - RNA, 19 nt, Homo sapiens
  misc_RNA (1)...(19): siRNA sense strand
uggaaaaggaacuggggaa

SEQ ID NO: 2390767 - RNA, 19 nt, Homo sapiens
  misc_RNA (1)...(19): siRNA sense strand
agagagauuuugagagaga

SEQ ID NO: 2390768 - RNA, 19 nt, Homo sapiens
  misc_RNA (1)...(19): siRNA sense strand
cugcuauggugcuggaaaa

SEQ ID NO: 2390769 - RNA, 19 nt, Homo sapiens
  misc_RNA (1)...(19): siRNA sense strand
aagauugaugagugugaaa

SEQ ID NO: 2390770 - RNA, 19 nt, Homo sapiens
  misc_RNA (1)...(19): siRNA sense strand
ccauugaagcauauuggaa

SEQ ID NO: 2390771 - RNA, 19 nt, Homo sapiens
  misc_RNA (1)...(19): siRNA sense strand
ggaaauugauuauagaccu

SEQ ID NO: 2390772 - RNA, 19 nt, Homo sapiens
  misc_RNA (1)...(19): siRNA sense strand
ugaggguagaagagagauu

SEQ ID NO: 2390773 - RNA, 19 nt, Homo sapiens
  misc_RNA (1)...(19): siRNA sense strand
aaggaugacccaugccaaa

SEQ ID NO: 2390774 - RNA, 19 nt, Homo sapiens
  misc_RNA (1)...(19): siRNA sense strand
gaaacauggaaguggcgau

SEQ ID NO: 2390775 - RNA, 19 nt, Homo sapiens
  misc_RNA (1)...(19): siRNA sense strand
acuggaaguaucugggaau

SEQ ID NO: 2390776 - RNA, 19 nt, Homo sapiens
  misc_RNA (1)...(19): siRNA sense strand
ggaaaaggaacuggggaau

SEQ ID NO: 2390777 - RNA, 19 nt, Homo sapiens
  misc_RNA (1)...(19): siRNA sense strand
cgcagaggcacgagagcau

SEQ ID NO: 2390778 - RNA, 19 nt, Homo sapiens
  misc_RNA (1)...(19): siRNA sense strand
caacaaaggcacuugcagu

SEQ ID NO: 2390779 - RNA, 19 nt, Homo sapiens
  misc_RNA (1)...(19): siRNA sense strand
aagcacucaugaaggaaau

SEQ ID NO: 2390780 - RNA, 19 nt, Homo sapiens
  misc_RNA (1)...(19): siRNA sense strand
auacaaagcccaaggagac

SEQ ID NO: 2390781 - RNA, 19 nt, Homo sapiens
  misc_RNA (1)...(19): siRNA sense strand
agggaauacagaagguuca

SEQ ID NO: 2390782 - RNA, 19 nt, Homo sapiens
  misc_RNA (1)...(19): siRNA sense strand
ugaugagugugaaaagaaa

SEQ ID NO: 2390783 - RNA, 19 nt, Homo sapiens
  misc_RNA (1)...(19): siRNA sense strand
acuaugaaagucaaagcaa

SEQ ID NO: 2390784 - RNA, 19 nt, Homo sapiens
  misc_RNA (1)...(19): siRNA sense strand
caguucaugugcugagaca

SEQ ID NO: 2390785 - RNA, 19 nt, Homo sapiens
  misc_RNA (1)...(19): siRNA sense strand
gcucaagucugaagccgca

SEQ ID NO: 2390786 - RNA, 19 nt, Homo sapiens
  misc_RNA (1)...(19): siRNA sense strand
cggcaggaggaaauugauu

SEQ ID NO: 2390787 - RNA, 19 nt, Homo sapiens
  misc_RNA (1)...(19): siRNA sense strand
gcauauuggaaaaggaacu

SEQ ID NO: 2390788 - RNA, 19 nt, Homo sapiens
  misc_RNA (1)...(19): siRNA sense strand
aggcugaagucgccaagau

SEQ ID NO: 2390789 - RNA, 19 nt, Homo sapiens
  misc_RNA (1)...(19): siRNA sense strand
uaugaggguagaagagaga

SEQ ID NO: 2390790 - RNA, 19 nt, Homo sapiens
  misc_RNA (1)...(19): siRNA sense strand
acaccgaaagaaagcagua

SEQ ID NO: 2390791 - RNA, 19 nt, Homo sapiens
  misc_RNA (1)...(19): siRNA sense strand
uuauagaccugauggugga

SEQ ID NO: 2390792 - RNA, 19 nt, Homo sapiens
  misc_RNA (1)...(19): siRNA sense strand
ggguaaaggaaucggaaau

SEQ ID NO: 2390793 - RNA, 19 nt, Homo sapiens
  misc_RNA (1)...(19): siRNA sense strand
gcucaaggcugcaacggaa

SEQ ID NO: 2390794 - RNA, 19 nt, Homo sapiens
  misc_RNA (1)...(19): siRNA sense strand
cugagauacuacagggauu

SEQ ID NO: 2390795 - RNA, 19 nt, Homo sapiens
  misc_RNA (1)...(19): siRNA sense strand
gggaggaaauggagcggga

SEQ ID NO: 2390796 - RNA, 19 nt, Homo sapiens
  misc_RNA (1)...(19): siRNA sense strand
gcucguugccagaggaaaa

SEQ ID NO: 2390797 - RNA, 19 nt, Homo sapiens
  misc_RNA (1)...(19): siRNA sense strand
cugagaagcaagaggcaga

SEQ ID NO: 2390798 - RNA, 19 nt, Homo sapiens
  misc_RNA (1)...(19): siRNA sense strand
ccaucgaagccaugaagaa

SEQ ID NO: 2390799 - RNA, 19 nt, Homo sapiens
  misc_RNA (1)...(19): siRNA sense strand
aagcagaaucagaagaaga

SEQ ID NO: 2390800 - RNA, 19 nt, Homo sapiens
  misc_RNA (1)...(19): siRNA sense strand
ggaccaaggaccagccaga

SEQ ID NO: 2390801 - RNA, 19 nt, Homo sapiens
  misc_RNA (1)...(19): siRNA sense strand
cggguaaaggaaucggaaa

SEQ ID NO: 2390802 - RNA, 19 nt, Homo sapiens
  misc_RNA (1)...(19): siRNA sense strand
gcucagagucccagccaga

SEQ ID NO: 2390803 - RNA, 19 nt, Homo sapiens
  misc_RNA (1)...(19): siRNA sense strand
ccgaucaaagccugagaua

SEQ ID NO: 2390804 - RNA, 19 nt, Homo sapiens
  misc_RNA (1)...(19): siRNA sense strand
ccagcgggagcuagagaaa

SEQ ID NO: 2390805 - RNA, 19 nt, Homo sapiens
  misc_RNA (1)...(19): siRNA sense strand
acuugaaggcugaagaaca

SEQ ID NO: 2390806 - RNA, 19 nt, Homo sapiens
  misc_RNA (1)...(19): siRNA sense strand
aggaagaaaugaggaccaa

SEQ ID NO: 2390807 - RNA, 19 nt, Homo sapiens
  misc_RNA (1)...(19): siRNA sense strand
cggaaauacaguaccugaa

SEQ ID NO: 2390808 - RNA, 19 nt, Homo sapiens
  misc_RNA (1)...(19): siRNA sense strand
aggccaacaucuucaacaa

SEQ ID NO: 2390809 - RNA, 19 nt, Homo sapiens
  misc_RNA (1)...(19): siRNA sense strand
ucagaagaagaaacggaaa

SEQ ID NO: 2390810 - RNA, 19 nt, Homo sapiens
  misc_RNA (1)...(19): siRNA sense strand
caggaagaaaugaggacca

SEQ ID NO: 2390811 - RNA, 19 nt, Homo sapiens
  misc_RNA (1)...(19): siRNA sense strand
aaccugggcuagagagcaa

SEQ ID NO: 2390812 - RNA, 19 nt, Homo sapiens
  misc_RNA (1)...(19): siRNA sense strand
gaaauugacuuguccgcau

SEQ ID NO: 2390813 - RNA, 19 nt, Homo sapiens
  misc_RNA (1)...(19): siRNA sense strand
acgcaagugacaaguacaa

SEQ ID NO: 2390814 - RNA, 19 nt, Homo sapiens
  misc_RNA (1)...(19): siRNA sense strand
gcaaagaagaggagagcgc

SEQ ID NO: 2390815 - RNA, 19 nt, Homo sapiens
  misc_RNA (1)...(19): siRNA sense strand
cagccgacuuggauggaga

SEQ ID NO: 2390816 - RNA, 19 nt, Homo sapiens
  misc_RNA (1)...(19): siRNA sense strand
uugaagaucuccagaggca

SEQ ID NO: 2390817 - RNA, 19 nt, Homo sapiens
  misc_RNA (1)...(19): siRNA sense strand
uugaaaaguuugaggccuu

SEQ ID NO: 2390818 - RNA, 19 nt, Homo sapiens
  misc_RNA (1)...(19): siRNA sense strand
uugagaaggcagagcacau

SEQ ID NO: 2390819 - RNA, 19 nt, Homo sapiens
  misc_RNA (1)...(19): siRNA sense strand
ucgcagaagugccuggaga

SEQ ID NO: 2390820 - RNA, 19 nt, Homo sapiens
  misc_RNA (1)...(19): siRNA sense strand
aguuugaggccuuggacau

SEQ ID NO: 2390821 - RNA, 19 nt, Homo sapiens
  misc_RNA (1)...(19): siRNA sense strand
ccagaagaagauugaagau

SEQ ID NO: 2390822 - RNA, 19 nt, Homo sapiens
  misc_RNA (1)...(19): siRNA sense strand
agugacaaguacaaagaca

SEQ ID NO: 2390823 - RNA, 19 nt, Homo sapiens
  misc_RNA (1)...(19): siRNA sense strand
ucgcgaaggcuaaggcuga

SEQ ID NO: 2390824 - RNA, 19 nt, Homo sapiens
  misc_RNA (1)...(19): siRNA sense strand
aaauacaguaccugaaaca

SEQ ID NO: 2390825 - RNA, 19 nt, Homo sapiens
  misc_RNA (1)...(19): siRNA sense strand
cgggacaagaaguacgcaa

SEQ ID NO: 2390826 - RNA, 19 nt, Homo sapiens
  misc_RNA (1)...(19): siRNA sense strand
cgcagaagugccuggagaa

SEQ ID NO: 2390827 - RNA, 19 nt, Homo sapiens
  misc_RNA (1)...(19): siRNA sense strand
acaaccaggagcugaacaa

SEQ ID NO: 2390828 - RNA, 19 nt, Homo sapiens
  misc_RNA (1)...(19): siRNA sense strand
agcagaaucagaagaagaa

SEQ ID NO: 2390829 - RNA, 19 nt, Homo sapiens
  misc_RNA (1)...(19): siRNA sense strand
cagaagaagaaacggaaag

SEQ ID NO: 2390830 - RNA, 19 nt, Homo sapiens
  misc_RNA (1)...(19): siRNA sense strand
agaccaaacaggacuugaa

SEQ ID NO: 2390831 - RNA, 19 nt, Homo sapiens
  misc_RNA (1)...(19): siRNA sense strand
gugacaaguacaaagacau

SEQ ID NO: 2390832 - RNA, 19 nt, Homo sapiens
  misc_RNA (1)...(19): siRNA sense strand
ggcuagagagcaaagaaga

SEQ ID NO: 2390833 - RNA, 19 nt, Homo sapiens
  misc_RNA (1)...(19): siRNA sense strand
uuacgaugucacagaguau

SEQ ID NO: 2390834 - RNA, 19 nt, Homo sapiens
  misc_RNA (1)...(19): siRNA sense strand
cggcacugcgggacaagaa

SEQ ID NO: 2390835 - RNA, 19 nt, Homo sapiens
  misc_RNA (1)...(19): siRNA sense strand
aagaaguacgcaagugaca

SEQ ID NO: 2390836 - RNA, 19 nt, Homo sapiens
  misc_RNA (1)...(19): siRNA sense strand
acaaguacaaagacaucua

SEQ ID NO: 2390837 - RNA, 19 nt, Homo sapiens
  misc_RNA (1)...(19): siRNA sense strand
ugacuaagcaguaugagga

SEQ ID NO: 2390838 - RNA, 19 nt, Homo sapiens
  misc_RNA (1)...(19): siRNA sense strand
aaggagaacccgugcagga

SEQ ID NO: 2390839 - RNA, 19 nt, Homo sapiens
  misc_RNA (1)...(19): siRNA sense strand
aagagaagcaggugcccau

SEQ ID NO: 2390840 - RNA, 19 nt, Homo sapiens
  misc_RNA (1)...(19): siRNA sense strand
agaaggagcuggagcagag

SEQ ID NO: 2390841 - RNA, 19 nt, Homo sapiens
  misc_RNA (1)...(19): siRNA sense strand
gagcagagccagaaggagg

SEQ ID NO: 2390842 - RNA, 19 nt, Homo sapiens
  misc_RNA (1)...(19): siRNA sense strand
cagcaauggaagaaacgca

SEQ ID NO: 2390843 - RNA, 19 nt, Homo sapiens
  misc_RNA (1)...(19): siRNA sense strand
ccagauggcagcagccuga

SEQ ID NO: 2390844 - RNA, 19 nt, Homo sapiens
  misc_RNA (1)...(19): siRNA sense strand
aaucagaagaagaaacgga

SEQ ID NO: 2390845 - RNA, 19 nt, Homo sapiens
  misc_RNA (1)...(19): siRNA sense strand
aaagaagaggagagcgcca

SEQ ID NO: 2390846 - RNA, 19 nt, Homo sapiens
  misc_RNA (1)...(19): siRNA sense strand
ggguaaaggaaucggaaau

SEQ ID NO: 2390847 - RNA, 19 nt, Homo sapiens
  misc_RNA (1)...(19): siRNA sense strand
gcucaaggcugcaacggaa

SEQ ID NO: 2390848 - RNA, 19 nt, Homo sapiens
  misc_RNA (1)...(19): siRNA sense strand
cugagauacuacagggauu

SEQ ID NO: 2390849 - RNA, 19 nt, Homo sapiens
  misc_RNA (1)...(19): siRNA sense strand
gggaggaaauggagcggga

SEQ ID NO: 2390850 - RNA, 19 nt, Homo sapiens
  misc_RNA (1)...(19): siRNA sense strand
gcucguugccagaggaaaa

SEQ ID NO: 2390851 - RNA, 19 nt, Homo sapiens
  misc_RNA (1)...(19): siRNA sense strand
cugagaagcaagaggcaga

SEQ ID NO: 2390852 - RNA, 19 nt, Homo sapiens
  misc_RNA (1)...(19): siRNA sense strand
ccaucgaagccaugaagaa

SEQ ID NO: 2390853 - RNA, 19 nt, Homo sapiens
  misc_RNA (1)...(19): siRNA sense strand
aagcagaaucagaagaaga

SEQ ID NO: 2390854 - RNA, 19 nt, Homo sapiens
  misc_RNA (1)...(19): siRNA sense strand
ggaccaaggaccagccaga

SEQ ID NO: 2390855 - RNA, 19 nt, Homo sapiens
  misc_RNA (1)...(19): siRNA sense strand
cggguaaaggaaucggaaa

SEQ ID NO: 2390856 - RNA, 19 nt, Homo sapiens
  misc_RNA (1)...(19): siRNA sense strand
gcucagagucccagccaga

SEQ ID NO: 2390857 - RNA, 19 nt, Homo sapiens
  misc_RNA (1)...(19): siRNA sense strand
ccgaucaaagccugagaua

SEQ ID NO: 2390858 - RNA, 19 nt, Homo sapiens
  misc_RNA (1)...(19): siRNA sense strand
ccagcgggagcuagagaaa

SEQ ID NO: 2390859 - RNA, 19 nt, Homo sapiens
  misc_RNA (1)...(19): siRNA sense strand
acuugaaggcugaagaaca

SEQ ID NO: 2390860 - RNA, 19 nt, Homo sapiens
  misc_RNA (1)...(19): siRNA sense strand
aggaagaaaugaggaccaa

SEQ ID NO: 2390861 - RNA, 19 nt, Homo sapiens
  misc_RNA (1)...(19): siRNA sense strand
cggaaauacaguaccugaa

SEQ ID NO: 2390862 - RNA, 19 nt, Homo sapiens
  misc_RNA (1)...(19): siRNA sense strand
aggccaacaucuucaacaa

SEQ ID NO: 2390863 - RNA, 19 nt, Homo sapiens
  misc_RNA (1)...(19): siRNA sense strand
ucagaagaagaaacggaaa

SEQ ID NO: 2390864 - RNA, 19 nt, Homo sapiens
  misc_RNA (1)...(19): siRNA sense strand
caggaagaaaugaggacca

SEQ ID NO: 2390865 - RNA, 19 nt, Homo sapiens
  misc_RNA (1)...(19): siRNA sense strand
aaccugggcuagagagcaa

SEQ ID NO: 2390866 - RNA, 19 nt, Homo sapiens
  misc_RNA (1)...(19): siRNA sense strand
gaaauugacuuguccgcau

SEQ ID NO: 2390867 - RNA, 19 nt, Homo sapiens
  misc_RNA (1)...(19): siRNA sense strand
acgcaagugacaaguacaa

SEQ ID NO: 2390868 - RNA, 19 nt, Homo sapiens
  misc_RNA (1)...(19): siRNA sense strand
gcaaagaagaggagagcgc

SEQ ID NO: 2390869 - RNA, 19 nt, Homo sapiens
  misc_RNA (1)...(19): siRNA sense strand
cagccgacuuggauggaga

SEQ ID NO: 2390870 - RNA, 19 nt, Homo sapiens
  misc_RNA (1)...(19): siRNA sense strand
uugaagaucuccagaggca

SEQ ID NO: 2390871 - RNA, 19 nt, Homo sapiens
  misc_RNA (1)...(19): siRNA sense strand
uugaaaaguuugaggccuu

SEQ ID NO: 2390872 - RNA, 19 nt, Homo sapiens
  misc_RNA (1)...(19): siRNA sense strand
uugagaaggcagagcacau

SEQ ID NO: 2390873 - RNA, 19 nt, Homo sapiens
  misc_RNA (1)...(19): siRNA sense strand
ucgcagaagugccuggaga

SEQ ID NO: 2390874 - RNA, 19 nt, Homo sapiens
  misc_RNA (1)...(19): siRNA sense strand
aguuugaggccuuggacau

SEQ ID NO: 2390875 - RNA, 19 nt, Homo sapiens
  misc_RNA (1)...(19): siRNA sense strand
ccagaagaagauugaagau

SEQ ID NO: 2390876 - RNA, 19 nt, Homo sapiens
  misc_RNA (1)...(19): siRNA sense strand
agugacaaguacaaagaca

SEQ ID NO: 2390877 - RNA, 19 nt, Homo sapiens
  misc_RNA (1)...(19): siRNA sense strand
ucgcgaaggcuaaggcuga

SEQ ID NO: 2390878 - RNA, 19 nt, Homo sapiens
  misc_RNA (1)...(19): siRNA sense strand
aaauacaguaccugaaaca

SEQ ID NO: 2390879 - RNA, 19 nt, Homo sapiens
  misc_RNA (1)...(19): siRNA sense strand
cgggacaagaaguacgcaa

SEQ ID NO: 2390880 - RNA, 19 nt, Homo sapiens
  misc_RNA (1)...(19): siRNA sense strand
cgcagaagugccuggagaa

SEQ ID NO: 2390881 - RNA, 19 nt, Homo sapiens
  misc_RNA (1)...(19): siRNA sense strand
acaaccaggagcugaacaa

SEQ ID NO: 2390882 - RNA, 19 nt, Homo sapiens
  misc_RNA (1)...(19): siRNA sense strand
agcagaaucagaagaagaa

SEQ ID NO: 2390883 - RNA, 19 nt, Homo sapiens
  misc_RNA (1)...(19): siRNA sense strand
cagaagaagaaacggaaag

SEQ ID NO: 2390884 - RNA, 19 nt, Homo sapiens
  misc_RNA (1)...(19): siRNA sense strand
agaccaaacaggacuugaa

SEQ ID NO: 2390885 - RNA, 19 nt, Homo sapiens
  misc_RNA (1)...(19): siRNA sense strand
gugacaaguacaaagacau

SEQ ID NO: 2390886 - RNA, 19 nt, Homo sapiens
  misc_RNA (1)...(19): siRNA sense strand
ggcuagagagcaaagaaga

SEQ ID NO: 2390887 - RNA, 19 nt, Homo sapiens
  misc_RNA (1)...(19): siRNA sense strand
uuacgaugucacagaguau

SEQ ID NO: 2390888 - RNA, 19 nt, Homo sapiens
  misc_RNA (1)...(19): siRNA sense strand
cggcacugcgggacaagaa

SEQ ID NO: 2390889 - RNA, 19 nt, Homo sapiens
  misc_RNA (1)...(19): siRNA sense strand
aagaaguacgcaagugaca

SEQ ID NO: 2390890 - RNA, 19 nt, Homo sapiens
  misc_RNA (1)...(19): siRNA sense strand
acaaguacaaagacaucua

SEQ ID NO: 2390891 - RNA, 19 nt, Homo sapiens
  misc_RNA (1)...(19): siRNA sense strand
ugacuaagcaguaugagga

SEQ ID NO: 2390892 - RNA, 19 nt, Homo sapiens
  misc_RNA (1)...(19): siRNA sense strand
aaggagaacccgugcagga

SEQ ID NO: 2390893 - RNA, 19 nt, Homo sapiens
  misc_RNA (1)...(19): siRNA sense strand
aagagaagcaggugcccau

SEQ ID NO: 2390894 - RNA, 19 nt, Homo sapiens
  misc_RNA (1)...(19): siRNA sense strand
agaaggagcuggagcagag

SEQ ID NO: 2390895 - RNA, 19 nt, Homo sapiens
  misc_RNA (1)...(19): siRNA sense strand
gagcagagccagaaggagg

SEQ ID NO: 2390896 - RNA, 19 nt, Homo sapiens
  misc_RNA (1)...(19): siRNA sense strand
cagcaauggaagaaacgca

SEQ ID NO: 2390897 - RNA, 19 nt, Homo sapiens
  misc_RNA (1)...(19): siRNA sense strand
ccagauggcagcagccuga

SEQ ID NO: 2390898 - RNA, 19 nt, Homo sapiens
  misc_RNA (1)...(19): siRNA sense strand
aaucagaagaagaaacgga

SEQ ID NO: 2390899 - RNA, 19 nt, Homo sapiens
  misc_RNA (1)...(19): siRNA sense strand
aaagaagaggagagcgcca

SEQ ID NO: 2390900 - RNA, 19 nt, Homo sapiens
  misc_RNA (1)...(19): siRNA sense strand
gugaugggauccagggcaa

SEQ ID NO: 2390901 - RNA, 19 nt, Homo sapiens
  misc_RNA (1)...(19): siRNA sense strand
uggaauauaaggagcucaa

SEQ ID NO: 2390902 - RNA, 19 nt, Homo sapiens
  misc_RNA (1)...(19): siRNA sense strand
auaaggagcucaagggcga

SEQ ID NO: 2390903 - RNA, 19 nt, Homo sapiens
  misc_RNA (1)...(19): siRNA sense strand
ccucagugcccuaggaagu

SEQ ID NO: 2390904 - RNA, 19 nt, Homo sapiens
  misc_RNA (1)...(19): siRNA sense strand
gcagcgaggagcagcacaa

SEQ ID NO: 2390905 - RNA, 19 nt, Homo sapiens
  misc_RNA (1)...(19): siRNA sense strand
cuggagcuccugagggaua

SEQ ID NO: 2390906 - RNA, 19 nt, Homo sapiens
  misc_RNA (1)...(19): siRNA sense strand
ccauggaaacccugcggaa

SEQ ID NO: 2390907 - RNA, 19 nt, Homo sapiens
  misc_RNA (1)...(19): siRNA sense strand
cugcaaaagcacaggggau

SEQ ID NO: 2390908 - RNA, 19 nt, Homo sapiens
  misc_RNA (1)...(19): siRNA sense strand
augggaugcuauugggcua

SEQ ID NO: 2390909 - RNA, 19 nt, Homo sapiens
  misc_RNA (1)...(19): siRNA sense strand
acacaugugccaagaagau

SEQ ID NO: 2390910 - RNA, 19 nt, Homo sapiens
  misc_RNA (1)...(19): siRNA sense strand
cugcuauggcaaaggcaau

SEQ ID NO: 2390911 - RNA, 19 nt, Homo sapiens
  misc_RNA (1)...(19): siRNA sense strand
gcagaaugccagcguggau

SEQ ID NO: 2390912 - RNA, 19 nt, Homo sapiens
  misc_RNA (1)...(19): siRNA sense strand
ggggauggccagaggacau

SEQ ID NO: 2390913 - RNA, 19 nt, Homo sapiens
  misc_RNA (1)...(19): siRNA sense strand
agcugugugugcagggaaa

SEQ ID NO: 2390914 - RNA, 19 nt, Homo sapiens
  misc_RNA (1)...(19): siRNA sense strand
cagagaaugcugagugugu

SEQ ID NO: 2390915 - RNA, 19 nt, Homo sapiens
  misc_RNA (1)...(19): siRNA sense strand
ccauaugccaccugcaaaa

SEQ ID NO: 2390916 - RNA, 19 nt, Homo sapiens
  misc_RNA (1)...(19): siRNA sense strand
ggaccugcuuggauggcau

SEQ ID NO: 2390917 - RNA, 19 nt, Homo sapiens
  misc_RNA (1)...(19): siRNA sense strand
acucacugcuggaggagga

SEQ ID NO: 2390918 - RNA, 19 nt, Homo sapiens
  misc_RNA (1)...(19): siRNA sense strand
ugcaggaguuggugcggua

SEQ ID NO: 2390919 - RNA, 19 nt, Homo sapiens
  misc_RNA (1)...(19): siRNA sense strand
ccaggaggguguugccaga

SEQ ID NO: 2390920 - RNA, 19 nt, Homo sapiens
  misc_RNA (1)...(19): siRNA sense strand
guaaacugcaccaggagau

SEQ ID NO: 2390921 - RNA, 19 nt, Homo sapiens
  misc_RNA (1)...(19): siRNA sense strand
gugcagaaggccacacaga

SEQ ID NO: 2390922 - RNA, 19 nt, Homo sapiens
  misc_RNA (1)...(19): siRNA sense strand
cuaaagaagggcugugcca

SEQ ID NO: 2390923 - RNA, 19 nt, Homo sapiens
  misc_RNA (1)...(19): siRNA sense strand
cugcgggagaaauguguaa

SEQ ID NO: 2390924 - RNA, 19 nt, Homo sapiens
  misc_RNA (1)...(19): siRNA sense strand
uugaaaccauccuggagaa

SEQ ID NO: 2390925 - RNA, 19 nt, Homo sapiens
  misc_RNA (1)...(19): siRNA sense strand
gugacaagcuagcagccau

SEQ ID NO: 2390926 - RNA, 19 nt, Homo sapiens
  misc_RNA (1)...(19): siRNA sense strand
caacaaacacgaagguggu

SEQ ID NO: 2390927 - RNA, 19 nt, Homo sapiens
  misc_RNA (1)...(19): siRNA sense strand
gggcaggagaucaccguca

SEQ ID NO: 2390928 - RNA, 19 nt, Homo sapiens
  misc_RNA (1)...(19): siRNA sense strand
ccaagagaacuaucggaca

SEQ ID NO: 2390929 - RNA, 19 nt, Homo sapiens
  misc_RNA (1)...(19): siRNA sense strand
gagagcaaugccaggaaga

SEQ ID NO: 2390930 - RNA, 19 nt, Homo sapiens
  misc_RNA (1)...(19): siRNA sense strand
uggauggcauggacaggaa

SEQ ID NO: 2390931 - RNA, 19 nt, Homo sapiens
  misc_RNA (1)...(19): siRNA sense strand
gcuuugagggugauggcuu

SEQ ID NO: 2390932 - RNA, 19 nt, Homo sapiens
  misc_RNA (1)...(19): siRNA sense strand
acgaaauacuccuacaagu

SEQ ID NO: 2390933 - RNA, 19 nt, Homo sapiens
  misc_RNA (1)...(19): siRNA sense strand
caggacacacccaggaaga

SEQ ID NO: 2390934 - RNA, 19 nt, Homo sapiens
  misc_RNA (1)...(19): siRNA sense strand
gagagggagggcagcauau

SEQ ID NO: 2390935 - RNA, 19 nt, Homo sapiens
  misc_RNA (1)...(19): siRNA sense strand
caagagaacuaucggacag

SEQ ID NO: 2390936 - RNA, 19 nt, Homo sapiens
  misc_RNA (1)...(19): siRNA sense strand
uugauggcuuugaggguga

SEQ ID NO: 2390937 - RNA, 19 nt, Homo sapiens
  misc_RNA (1)...(19): siRNA sense strand
gcucaaugugcuaaagaag

SEQ ID NO: 2390938 - RNA, 19 nt, Homo sapiens
  misc_RNA (1)...(19): siRNA sense strand
gcuuaagagugccggcauc

SEQ ID NO: 2390939 - RNA, 19 nt, Homo sapiens
  misc_RNA (1)...(19): siRNA sense strand
ugacaagcuagcagccauu

SEQ ID NO: 2390940 - RNA, 19 nt, Homo sapiens
  misc_RNA (1)...(19): siRNA sense strand
cgacugaacaccugcagca

SEQ ID NO: 2390941 - RNA, 19 nt, Homo sapiens
  misc_RNA (1)...(19): siRNA sense strand
gcgugugcauggacggcau

SEQ ID NO: 2390942 - RNA, 19 nt, Homo sapiens
  misc_RNA (1)...(19): siRNA sense strand
ccgcaagaaccucucagaa

SEQ ID NO: 2390943 - RNA, 19 nt, Homo sapiens
  misc_RNA (1)...(19): siRNA sense strand
gagaagaccucaugggaga

SEQ ID NO: 2390944 - RNA, 19 nt, Homo sapiens
  misc_RNA (1)...(19): siRNA sense strand
gggucaaggcaaagauaaa

SEQ ID NO: 2390945 - RNA, 19 nt, Homo sapiens
  misc_RNA (1)...(19): siRNA sense strand
agagaaagagagagagcaa

SEQ ID NO: 2390946 - RNA, 19 nt, Homo sapiens
  misc_RNA (1)...(19): siRNA sense strand
ggaacagaugacagagaaa

SEQ ID NO: 2390947 - RNA, 19 nt, Homo sapiens
  misc_RNA (1)...(19): siRNA sense strand
augaagaagaggagaaaga

SEQ ID NO: 2390948 - RNA, 19 nt, Homo sapiens
  misc_RNA (1)...(19): siRNA sense strand
cugaugaagaagaggagaa

SEQ ID NO: 2390949 - RNA, 19 nt, Homo sapiens
  misc_RNA (1)...(19): siRNA sense strand
cuccaaaggaaaugagcaa

SEQ ID NO: 2390950 - RNA, 19 nt, Homo sapiens
  misc_RNA (1)...(19): siRNA sense strand
ccucagaagaugaagaguu

SEQ ID NO: 2390951 - RNA, 19 nt, Homo sapiens
  misc_RNA (1)...(19): siRNA sense strand
ccagaugcuccaaaggaaa

SEQ ID NO: 2390952 - RNA, 19 nt, Homo sapiens
  misc_RNA (1)...(19): siRNA sense strand
aagaggaggaagaggauga

SEQ ID NO: 2390953 - RNA, 19 nt, Homo sapiens
  misc_RNA (1)...(19): siRNA sense strand
augaugaagaggaggaaga

SEQ ID NO: 2390954 - RNA, 19 nt, Homo sapiens
  misc_RNA (1)...(19): siRNA sense strand
aagaagaggagcaagaaaa

SEQ ID NO: 2390955 - RNA, 19 nt, Homo sapiens
  misc_RNA (1)...(19): siRNA sense strand
aggaaaugagcaaggguca

SEQ ID NO: 2390956 - RNA, 19 nt, Homo sapiens
  misc_RNA (1)...(19): siRNA sense strand
gggaugagaaacuagacaa

SEQ ID NO: 2390957 - RNA, 19 nt, Homo sapiens
  misc_RNA (1)...(19): siRNA sense strand
aggaggaagaggaugacaa

SEQ ID NO: 2390958 - RNA, 19 nt, Homo sapiens
  misc_RNA (1)...(19): siRNA sense strand
agcaagaagaggagcaaga

SEQ ID NO: 2390959 - RNA, 19 nt, Homo sapiens
  misc_RNA (1)...(19): siRNA sense strand
gggaucaggacaaggccaa

SEQ ID NO: 2390960 - RNA, 19 nt, Homo sapiens
  misc_RNA (1)...(19): siRNA sense strand
ggaaaugagcaagggucaa

SEQ ID NO: 2390961 - RNA, 19 nt, Homo sapiens
  misc_RNA (1)...(19): siRNA sense strand
aagccauggaggagcuaaa

SEQ ID NO: 2390962 - RNA, 19 nt, Homo sapiens
  misc_RNA (1)...(19): siRNA sense strand
ugaugaagaagaggagaaa

SEQ ID NO: 2390963 - RNA, 19 nt, Homo sapiens
  misc_RNA (1)...(19): siRNA sense strand
aggacaaggccaaacaaau

SEQ ID NO: 2390964 - RNA, 19 nt, Homo sapiens
  misc_RNA (1)...(19): siRNA sense strand
gcaacuacggcauggcaau

SEQ ID NO: 2390965 - RNA, 19 nt, Homo sapiens
  misc_RNA (1)...(19): siRNA sense strand
uguucaaaguacacgauuu

SEQ ID NO: 2390966 - RNA, 19 nt, Homo sapiens
  misc_RNA (1)...(19): siRNA sense strand
aggaagaggaugacaaauc

SEQ ID NO: 2390967 - RNA, 19 nt, Homo sapiens
  misc_RNA (1)...(19): siRNA sense strand
cuaaaagcagagcgagaaa

SEQ ID NO: 2390968 - RNA, 19 nt, Homo sapiens
  misc_RNA (1)...(19): siRNA sense strand
ucggaaaccacaacagcaa

SEQ ID NO: 2390969 - RNA, 19 nt, Homo sapiens
  misc_RNA (1)...(19): siRNA sense strand
aggaaaaggccauggcuga

SEQ ID NO: 2390970 - RNA, 19 nt, Homo sapiens
  misc_RNA (1)...(19): siRNA sense strand
agaagagggagguguugaa

SEQ ID NO: 2390971 - RNA, 19 nt, Homo sapiens
  misc_RNA (1)...(19): siRNA sense strand
guucaaucgcauagagaag

SEQ ID NO: 2390972 - RNA, 19 nt, Homo sapiens
  misc_RNA (1)...(19): siRNA sense strand
augaagaggaggaagagga

SEQ ID NO: 2390973 - RNA, 19 nt, Homo sapiens
  misc_RNA (1)...(19): siRNA sense strand
ccgaaagugaguuuaugaa

SEQ ID NO: 2390974 - RNA, 19 nt, Homo sapiens
  misc_RNA (1)...(19): siRNA sense strand
cagaagaugaagaguucca

SEQ ID NO: 2390975 - RNA, 19 nt, Homo sapiens
  misc_RNA (1)...(19): siRNA sense strand
cagaugacagagaaagaga

SEQ ID NO: 2390976 - RNA, 19 nt, Homo sapiens
  misc_RNA (1)...(19): siRNA sense strand
caggacaaggccaaacaaa

SEQ ID NO: 2390977 - RNA, 19 nt, Homo sapiens
  misc_RNA (1)...(19): siRNA sense strand
guggaacauuguagagucu

SEQ ID NO: 2390978 - RNA, 19 nt, Homo sapiens
  misc_RNA (1)...(19): siRNA sense strand
caagaaaucucaagccaug

SEQ ID NO: 2390979 - RNA, 19 nt, Homo sapiens
  misc_RNA (1)...(19): siRNA sense strand
agcuaaaagcagagcgaga

SEQ ID NO: 2390980 - RNA, 19 nt, Homo sapiens
  misc_RNA (1)...(19): siRNA sense strand
ugagcaagggucaaggcaa

SEQ ID NO: 2390981 - RNA, 19 nt, Homo sapiens
  misc_RNA (1)...(19): siRNA sense strand
aaagagaaagaaagguuca

SEQ ID NO: 2390982 - RNA, 19 nt, Homo sapiens
  misc_RNA (1)...(19): siRNA sense strand
ugaaugagcuggaggaacg

SEQ ID NO: 2390983 - RNA, 19 nt, Homo sapiens
  misc_RNA (1)...(19): siRNA sense strand
cucugaacuuggaagacua

SEQ ID NO: 2390984 - RNA, 19 nt, Homo sapiens
  misc_RNA (1)...(19): siRNA sense strand
cgaaagaacagaacagcug

SEQ ID NO: 2390985 - RNA, 19 nt, Homo sapiens
  misc_RNA (1)...(19): siRNA sense strand
agguaacaucccacaacaa

SEQ ID NO: 2390986 - RNA, 19 nt, Homo sapiens
  misc_RNA (1)...(19): siRNA sense strand
gacaagaaaucucaagcca

SEQ ID NO: 2390987 - RNA, 19 nt, Homo sapiens
  misc_RNA (1)...(19): siRNA sense strand
cugaugaugaagaggagga

SEQ ID NO: 2390988 - RNA, 19 nt, Homo sapiens
  misc_RNA (1)...(19): siRNA sense strand
cagcggaccaagaacauau

SEQ ID NO: 2390989 - RNA, 19 nt, Homo sapiens
  misc_RNA (1)...(19): siRNA sense strand
cugaaagucacaacaugaa

SEQ ID NO: 2390990 - RNA, 19 nt, Homo sapiens
  misc_RNA (1)...(19): siRNA sense strand
ugaugugaagauugacuua

SEQ ID NO: 2390991 - RNA, 19 nt, Homo sapiens
  misc_RNA (1)...(19): siRNA sense strand
aacagaugacagagaaaga

SEQ ID NO: 2390992 - RNA, 19 nt, Homo sapiens
  misc_RNA (1)...(19): siRNA sense strand
uagagaagagggagguguu

SEQ ID NO: 2390993 - RNA, 19 nt, Homo sapiens
  misc_RNA (1)...(19): siRNA sense strand
ugaagaggaggaagaggau

SEQ ID NO: 2390994 - RNA, 19 nt, Homo sapiens
  misc_RNA (1)...(19): siRNA sense strand
gaguuuaugaaguggaaag

SEQ ID NO: 2390995 - RNA, 19 nt, Homo sapiens
  misc_RNA (1)...(19): siRNA sense strand
accagaugcuccaaaggaa

SEQ ID NO: 2390996 - RNA, 19 nt, Homo sapiens
  misc_RNA (1)...(19): siRNA sense strand
cuggaacagaugacagaga

SEQ ID NO: 2390997 - RNA, 19 nt, Homo sapiens
  misc_RNA (1)...(19): siRNA sense strand
uuccaagcgggaugagaaa

SEQ ID NO: 2390998 - RNA, 19 nt, Homo sapiens
  misc_RNA (1)...(19): siRNA sense strand
ugacaaauccagugaaaag

SEQ ID NO: 2390999 - RNA, 19 nt, Homo sapiens
  misc_RNA (1)...(19): siRNA sense strand
cggaaccgggaguggaaca

SEQ ID NO: 2391000 - RNA, 19 nt, Homo sapiens
  misc_RNA (1)...(19): siRNA sense strand
auucaaaagagcugggaaa

SEQ ID NO: 2391001 - RNA, 19 nt, Homo sapiens
  misc_RNA (1)...(19): siRNA sense strand
gcuaauaacaagcuggaca

SEQ ID NO: 2391002 - RNA, 19 nt, Homo sapiens
  misc_RNA (1)...(19): siRNA sense strand
ggggaaaggagcaguguga

SEQ ID NO: 2391003 - RNA, 19 nt, Homo sapiens
  misc_RNA (1)...(19): siRNA sense strand
uguccuaacagcagcaaau

SEQ ID NO: 2391004 - RNA, 19 nt, Homo sapiens
  misc_RNA (1)...(19): siRNA sense strand
cuaauaacaagcuggacau

SEQ ID NO: 2391005 - RNA, 19 nt, Homo sapiens
  misc_RNA (1)...(19): siRNA sense strand
ugacagaaauguaccucga

SEQ ID NO: 2391006 - RNA, 19 nt, Homo sapiens
  misc_RNA (1)...(19): siRNA sense strand
gagcaaacagucagaggcu

SEQ ID NO: 2391007 - RNA, 19 nt, Homo sapiens
  misc_RNA (1)...(19): siRNA sense strand
ggaaccaaaucacgggacu

SEQ ID NO: 2391008 - RNA, 19 nt, Homo sapiens
  misc_RNA (1)...(19): siRNA sense strand
aagaagaagcuaagguaaa

SEQ ID NO: 2391009 - RNA, 19 nt, Homo sapiens
  misc_RNA (1)...(19): siRNA sense strand
ggacauuguagaagaagaa

SEQ ID NO: 2391010 - RNA, 19 nt, Homo sapiens
  misc_RNA (1)...(19): siRNA sense strand
ugaugaaagcauacagaaa

SEQ ID NO: 2391011 - RNA, 19 nt, Homo sapiens
  misc_RNA (1)...(19): siRNA sense strand
cgggaaagagcuagagaca

SEQ ID NO: 2391012 - RNA, 19 nt, Homo sapiens
  misc_RNA (1)...(19): siRNA sense strand
ccacaagaucaaaggauga

SEQ ID NO: 2391013 - RNA, 19 nt, Homo sapiens
  misc_RNA (1)...(19): siRNA sense strand
ccaucaacagauagaauaa

SEQ ID NO: 2391014 - RNA, 19 nt, Homo sapiens
  misc_RNA (1)...(19): siRNA sense strand
cuaaggaauaugagaguuu

SEQ ID NO: 2391015 - RNA, 19 nt, Homo sapiens
  misc_RNA (1)...(19): siRNA sense strand
uggcaguauucgagacaau

SEQ ID NO: 2391016 - RNA, 19 nt, Homo sapiens
  misc_RNA (1)...(19): siRNA sense strand
ggaagaauugcuagaucaa

SEQ ID NO: 2391017 - RNA, 19 nt, Homo sapiens
  misc_RNA (1)...(19): siRNA sense strand
caaagaugaugauggaaaa

SEQ ID NO: 2391018 - RNA, 19 nt, Homo sapiens
  misc_RNA (1)...(19): siRNA sense strand
aaaguuacgcgaagagaaa

SEQ ID NO: 2391019 - RNA, 19 nt, Homo sapiens
  misc_RNA (1)...(19): siRNA sense strand
cagcaagccgugagagaga

SEQ ID NO: 2391020 - RNA, 19 nt, Homo sapiens
  misc_RNA (1)...(19): siRNA sense strand
uuaccaacccaaagggaaa

SEQ ID NO: 2391021 - RNA, 19 nt, Homo sapiens
  misc_RNA (1)...(19): siRNA sense strand
cuccaauagucaugacaaa

SEQ ID NO: 2391022 - RNA, 19 nt, Homo sapiens
  misc_RNA (1)...(19): siRNA sense strand
ccacauugauacagagugu

SEQ ID NO: 2391023 - RNA, 19 nt, Homo sapiens
  misc_RNA (1)...(19): siRNA sense strand
agaaauugaagcugaagaa

SEQ ID NO: 2391024 - RNA, 19 nt, Homo sapiens
  misc_RNA (1)...(19): siRNA sense strand
ggaaagagcuagagacagg

SEQ ID NO: 2391025 - RNA, 19 nt, Homo sapiens
  misc_RNA (1)...(19): siRNA sense strand
gguuuauguuccagaugaa

SEQ ID NO: 2391026 - RNA, 19 nt, Homo sapiens
  misc_RNA (1)...(19): siRNA sense strand
augucaaacugguggaaaa

SEQ ID NO: 2391027 - RNA, 19 nt, Homo sapiens
  misc_RNA (1)...(19): siRNA sense strand
gggagaaggauguccggaa

SEQ ID NO: 2391028 - RNA, 19 nt, Homo sapiens
  misc_RNA (1)...(19): siRNA sense strand
ggggagaaauacaaauaaa

SEQ ID NO: 2391029 - RNA, 19 nt, Homo sapiens
  misc_RNA (1)...(19): siRNA sense strand
acaacaaccaucagaacaa

SEQ ID NO: 2391030 - RNA, 19 nt, Homo sapiens
  misc_RNA (1)...(19): siRNA sense strand
ugacaaaguaaggagaaua

SEQ ID NO: 2391031 - RNA, 19 nt, Homo sapiens
  misc_RNA (1)...(19): siRNA sense strand
uugcagaaucuaagaagaa

SEQ ID NO: 2391032 - RNA, 19 nt, Homo sapiens
  misc_RNA (1)...(19): siRNA sense strand
agaaauuguuagaaaggga

SEQ ID NO: 2391033 - RNA, 19 nt, Homo sapiens
  misc_RNA (1)...(19): siRNA sense strand
cacaagaagaagaagcuaa

SEQ ID NO: 2391034 - RNA, 19 nt, Homo sapiens
  misc_RNA (1)...(19): siRNA sense strand
gauaaaagucccacuaaaa

SEQ ID NO: 2391035 - RNA, 19 nt, Homo sapiens
  misc_RNA (1)...(19): siRNA sense strand
ugcuaaugaugcuggauaa

SEQ ID NO: 2391036 - RNA, 19 nt, Homo sapiens
  misc_RNA (1)...(19): siRNA sense strand
ggcagaaguccuugcuaaa

SEQ ID NO: 2391037 - RNA, 19 nt, Homo sapiens
  misc_RNA (1)...(19): siRNA sense strand
gggacauuguagaagaaga

SEQ ID NO: 2391038 - RNA, 19 nt, Homo sapiens
  misc_RNA (1)...(19): siRNA sense strand
gagaauaguugcagaggag

SEQ ID NO: 2391039 - RNA, 19 nt, Homo sapiens
  misc_RNA (1)...(19): siRNA sense strand
aggaagaauugcuagauca

SEQ ID NO: 2391040 - RNA, 19 nt, Homo sapiens
  misc_RNA (1)...(19): siRNA sense strand
acuucagggcuaaggaaua

SEQ ID NO: 2391041 - RNA, 19 nt, Homo sapiens
  misc_RNA (1)...(19): siRNA sense strand
cugacaagguaaaggcuca

SEQ ID NO: 2391042 - RNA, 19 nt, Homo sapiens
  misc_RNA (1)...(19): siRNA sense strand
ggaaagaugcugaaggaug

SEQ ID NO: 2391043 - RNA, 19 nt, Homo sapiens
  misc_RNA (1)...(19): siRNA sense strand
gcgauuagccaaagaucuu

SEQ ID NO: 2391044 - RNA, 19 nt, Homo sapiens
  misc_RNA (1)...(19): siRNA sense strand
ggaaggaagaauugcuaga

SEQ ID NO: 2391045 - RNA, 19 nt, Homo sapiens
  misc_RNA (1)...(19): siRNA sense strand
gcaggaugauggaagaaaa

SEQ ID NO: 2391046 - RNA, 19 nt, Homo sapiens
  misc_RNA (1)...(19): siRNA sense strand
gucuacgacuggagauaaa

SEQ ID NO: 2391047 - RNA, 19 nt, Homo sapiens
  misc_RNA (1)...(19): siRNA sense strand
cagcaugggcagugggagu

SEQ ID NO: 2391048 - RNA, 19 nt, Homo sapiens
  misc_RNA (1)...(19): siRNA sense strand
cccuugaagcccagaauaa

SEQ ID NO: 2391049 - RNA, 19 nt, Homo sapiens
  misc_RNA (1)...(19): siRNA sense strand
augaagaaguggagcaucu

SEQ ID NO: 2391050 - RNA, 19 nt, Homo sapiens
  misc_RNA (1)...(19): siRNA sense strand
guucagagaggaaggccua

SEQ ID NO: 2391051 - RNA, 19 nt, Homo sapiens
  misc_RNA (1)...(19): siRNA sense strand
gaugacagugauaaagaaa

SEQ ID NO: 2391052 - RNA, 19 nt, Homo sapiens
  misc_RNA (1)...(19): siRNA sense strand
agaaaaggccaaugaagaa

SEQ ID NO: 2391053 - RNA, 19 nt, Homo sapiens
  misc_RNA (1)...(19): siRNA sense strand
gguaaaugaaauugccuuu

SEQ ID NO: 2391054 - RNA, 19 nt, Homo sapiens
  misc_RNA (1)...(19): siRNA sense strand
cagagaagacaggaagaaa

SEQ ID NO: 2391055 - RNA, 19 nt, Homo sapiens
  misc_RNA (1)...(19): siRNA sense strand
aaguacagcuccagcagaa

SEQ ID NO: 2391056 - RNA, 19 nt, Homo sapiens
  misc_RNA (1)...(19): siRNA sense strand
ucaaaggaugacagugaua

SEQ ID NO: 2391057 - RNA, 19 nt, Homo sapiens
  misc_RNA (1)...(19): siRNA sense strand
cuagagaaauugaagcuga

SEQ ID NO: 2391058 - RNA, 19 nt, Homo sapiens
  misc_RNA (1)...(19): siRNA sense strand
agagaagacaggaagaaaa

SEQ ID NO: 2391059 - RNA, 19 nt, Homo sapiens
  misc_RNA (1)...(19): siRNA sense strand
gcuuaaugagcuacaggaa

SEQ ID NO: 2391060 - RNA, 19 nt, Homo sapiens
  misc_RNA (1)...(19): siRNA sense strand
acggaaagaugcugaagga

SEQ ID NO: 2391061 - RNA, 19 nt, Homo sapiens
  misc_RNA (1)...(19): siRNA sense strand
ugcuauugcugaagaagaa

SEQ ID NO: 2391062 - RNA, 19 nt, Homo sapiens
  misc_RNA (1)...(19): siRNA sense strand
uagagaaauugaagcugaa

SEQ ID NO: 2391063 - RNA, 19 nt, Homo sapiens
  misc_RNA (1)...(19): siRNA sense strand
gacaguggcucaugggcaa

SEQ ID NO: 2391064 - RNA, 19 nt, Homo sapiens
  misc_RNA (1)...(19): siRNA sense strand
ccaaucgaccagauggaaa

SEQ ID NO: 2391065 - RNA, 19 nt, Homo sapiens
  misc_RNA (1)...(19): siRNA sense strand
agccaagucuccugugaaa

SEQ ID NO: 2391066 - RNA, 19 nt, Homo sapiens
  misc_RNA (1)...(19): siRNA sense strand
agaguguggucgaauguaa

SEQ ID NO: 2391067 - RNA, 19 nt, Homo sapiens
  misc_RNA (1)...(19): siRNA sense strand
aaaggaugacagugauaaa

SEQ ID NO: 2391068 - RNA, 19 nt, Homo sapiens
  misc_RNA (1)...(19): siRNA sense strand
gugaagaauucuggcagua

SEQ ID NO: 2391069 - RNA, 19 nt, Homo sapiens
  misc_RNA (1)...(19): siRNA sense strand
agaagaagaagcuaaggua

SEQ ID NO: 2391070 - RNA, 19 nt, Homo sapiens
  misc_RNA (1)...(19): siRNA sense strand
uggcaugggaaguaaagaa

SEQ ID NO: 2391071 - RNA, 19 nt, Homo sapiens
  misc_RNA (1)...(19): siRNA sense strand
ggcacagacuccaggucaa

SEQ ID NO: 2391072 - RNA, 19 nt, Homo sapiens
  misc_RNA (1)...(19): siRNA sense strand
gggagaaguggcagcgcaa

SEQ ID NO: 2391073 - RNA, 19 nt, Homo sapiens
  misc_RNA (1)...(19): siRNA sense strand
gcugagagcuacacggcau

SEQ ID NO: 2391074 - RNA, 19 nt, Homo sapiens
  misc_RNA (1)...(19): siRNA sense strand
gggagaagguggaugugca

SEQ ID NO: 2391075 - RNA, 19 nt, Homo sapiens
  misc_RNA (1)...(19): siRNA sense strand
caggcauggcugagagcua

SEQ ID NO: 2391076 - RNA, 19 nt, Homo sapiens
  misc_RNA (1)...(19): siRNA sense strand
auacagaagaagagccgua

SEQ ID NO: 2391077 - RNA, 19 nt, Homo sapiens
  misc_RNA (1)...(19): siRNA sense strand
aagaagagccguaacgaga

SEQ ID NO: 2391078 - RNA, 19 nt, Homo sapiens
  misc_RNA (1)...(19): siRNA sense strand
ucuuggagcuggauggcaa

SEQ ID NO: 2391079 - RNA, 19 nt, Homo sapiens
  misc_RNA (1)...(19): siRNA sense strand
ugaacaucauagaggacga

SEQ ID NO: 2391080 - RNA, 19 nt, Homo sapiens
  misc_RNA (1)...(19): siRNA sense strand
aguauaagacagaagagga

SEQ ID NO: 2391081 - RNA, 19 nt, Homo sapiens
  misc_RNA (1)...(19): siRNA sense strand
uggucagcaugcaggacaa

SEQ ID NO: 2391082 - RNA, 19 nt, Homo sapiens
  misc_RNA (1)...(19): siRNA sense strand
acaacgaguauaagacaga

SEQ ID NO: 2391083 - RNA, 19 nt, Homo sapiens
  misc_RNA (1)...(19): siRNA sense strand
ucauagaggacgagguuag

SEQ ID NO: 2391084 - RNA, 19 nt, Homo sapiens
  misc_RNA (1)...(19): siRNA sense strand
ccuccagccaggaaggcaa

SEQ ID NO: 2391085 - RNA, 19 nt, Homo sapiens
  misc_RNA (1)...(19): siRNA sense strand
ugagacaggucaugaggca

SEQ ID NO: 2391086 - RNA, 19 nt, Homo sapiens
  misc_RNA (1)...(19): siRNA sense strand
agguguaucaugugggcau

SEQ ID NO: 2391087 - RNA, 19 nt, Homo sapiens
  misc_RNA (1)...(19): siRNA sense strand
ccgcaagaggagcgacuca

SEQ ID NO: 2391088 - RNA, 19 nt, Homo sapiens
  misc_RNA (1)...(19): siRNA sense strand
ggcugagcauggagaacau

SEQ ID NO: 2391089 - RNA, 19 nt, Homo sapiens
  misc_RNA (1)...(19): siRNA sense strand
guguggagcagcugaacau

SEQ ID NO: 2391090 - RNA, 19 nt, Homo sapiens
  misc_RNA (1)...(19): siRNA sense strand
ccgucaugcgcgugcacua

SEQ ID NO: 2391091 - RNA, 19 nt, Homo sapiens
  misc_RNA (1)...(19): siRNA sense strand
cggaugugcuccagaccca

SEQ ID NO: 2391092 - RNA, 19 nt, Homo sapiens
  misc_RNA (1)...(19): siRNA sense strand
guauaagacagaagaggac

SEQ ID NO: 2391093 - RNA, 19 nt, Homo sapiens
  misc_RNA (1)...(19): siRNA sense strand
gcaagguggaguuccgcua

SEQ ID NO: 2391094 - RNA, 19 nt, Homo sapiens
  misc_RNA (1)...(19): siRNA sense strand
agaaggaggcacagcucau

SEQ ID NO: 2391095 - RNA, 19 nt, Homo sapiens
  misc_RNA (1)...(19): siRNA sense strand
cauuugaugcccugugcua

SEQ ID NO: 2391096 - RNA, 19 nt, Homo sapiens
  misc_RNA (1)...(19): siRNA sense strand
acacguuugccgacagcua

SEQ ID NO: 2391097 - RNA, 19 nt, Homo sapiens
  misc_RNA (1)...(19): siRNA sense strand
guaacgagacauauggcga

SEQ ID NO: 2391098 - RNA, 19 nt, Homo sapiens
  misc_RNA (1)...(19): siRNA sense strand
uaacgagacauauggcgaa

SEQ ID NO: 2391099 - RNA, 19 nt, Homo sapiens
  misc_RNA (1)...(19): siRNA sense strand
caggaauggucaagagcaa

SEQ ID NO: 2391100 - RNA, 19 nt, Homo sapiens
  misc_RNA (1)...(19): siRNA sense strand
gggaagaggaagaggaugu

SEQ ID NO: 2391101 - RNA, 19 nt, Homo sapiens
  misc_RNA (1)...(19): siRNA sense strand
guuuacaaauggauggaaa

SEQ ID NO: 2391102 - RNA, 19 nt, Homo sapiens
  misc_RNA (1)...(19): siRNA sense strand
cagaauacugccugggaua

SEQ ID NO: 2391103 - RNA, 19 nt, Homo sapiens
  misc_RNA (1)...(19): siRNA sense strand
ggccaguauuagagaacaa

SEQ ID NO: 2391104 - RNA, 19 nt, Homo sapiens
  misc_RNA (1)...(19): siRNA sense strand
ccuaacaaucagaguauua

SEQ ID NO: 2391105 - RNA, 19 nt, Homo sapiens
  misc_RNA (1)...(19): siRNA sense strand
ggacaggaacaguggguca

SEQ ID NO: 2391106 - RNA, 19 nt, Homo sapiens
  misc_RNA (1)...(19): siRNA sense strand
agacaaacgaauggagaua

SEQ ID NO: 2391107 - RNA, 19 nt, Homo sapiens
  misc_RNA (1)...(19): siRNA sense strand
gaguagagacagaagaaaa

SEQ ID NO: 2391108 - RNA, 19 nt, Homo sapiens
  misc_RNA (1)...(19): siRNA sense strand
gugcaaauggcaaugguaa

SEQ ID NO: 2391109 - RNA, 19 nt, Homo sapiens
  misc_RNA (1)...(19): siRNA sense strand
aggcaaaccuccugguaca

SEQ ID NO: 2391110 - RNA, 19 nt, Homo sapiens
  misc_RNA (1)...(19): siRNA sense strand
aggaagaggauguggagau

SEQ ID NO: 2391111 - RNA, 19 nt, Homo sapiens
  misc_RNA (1)...(19): siRNA sense strand
acgaauggagauagauaaa

SEQ ID NO: 2391112 - RNA, 19 nt, Homo sapiens
  misc_RNA (1)...(19): siRNA sense strand
gaacaguauuaaagagcca

SEQ ID NO: 2391113 - RNA, 19 nt, Homo sapiens
  misc_RNA (1)...(19): siRNA sense strand
gggugaggccaauaagaaa

SEQ ID NO: 2391114 - RNA, 19 nt, Homo sapiens
  misc_RNA (1)...(19): siRNA sense strand
gaggaauguuacaagacaa

SEQ ID NO: 2391115 - RNA, 19 nt, Homo sapiens
  misc_RNA (1)...(19): siRNA sense strand
gcacaaagcacuucagcca

SEQ ID NO: 2391116 - RNA, 19 nt, Homo sapiens
  misc_RNA (1)...(19): siRNA sense strand
gaacaauggacuugcccua

SEQ ID NO: 2391117 - RNA, 19 nt, Homo sapiens
  misc_RNA (1)...(19): siRNA sense strand
ggaauugcaaagaggagaa

SEQ ID NO: 2391118 - RNA, 19 nt, Homo sapiens
  misc_RNA (1)...(19): siRNA sense strand
ccugaaagcaaaucugaaa

SEQ ID NO: 2391119 - RNA, 19 nt, Homo sapiens
  misc_RNA (1)...(19): siRNA sense strand
auggaaaucuacugaggaa

SEQ ID NO: 2391120 - RNA, 19 nt, Homo sapiens
  misc_RNA (1)...(19): siRNA sense strand
cuacugaggaagaggauca

SEQ ID NO: 2391121 - RNA, 19 nt, Homo sapiens
  misc_RNA (1)...(19): siRNA sense strand
ggaggaagucgaagaggau

SEQ ID NO: 2391122 - RNA, 19 nt, Homo sapiens
  misc_RNA (1)...(19): siRNA sense strand
aggaaaauguacaaagcaa

SEQ ID NO: 2391123 - RNA, 19 nt, Homo sapiens
  misc_RNA (1)...(19): siRNA sense strand
caaucgaacggucgggaaa

SEQ ID NO: 2391124 - RNA, 19 nt, Homo sapiens
  misc_RNA (1)...(19): siRNA sense strand
aggaauguuacaagacaaa

SEQ ID NO: 2391125 - RNA, 19 nt, Homo sapiens
  misc_RNA (1)...(19): siRNA sense strand
ccuuagcaauggagaguca

SEQ ID NO: 2391126 - RNA, 19 nt, Homo sapiens
  misc_RNA (1)...(19): siRNA sense strand
ggaacaagcaacaagacau

SEQ ID NO: 2391127 - RNA, 19 nt, Homo sapiens
  misc_RNA (1)...(19): siRNA sense strand
aagaagaagcguggauaaa

SEQ ID NO: 2391128 - RNA, 19 nt, Homo sapiens
  misc_RNA (1)...(19): siRNA sense strand
agacuaaggaaguggacga

SEQ ID NO: 2391129 - RNA, 19 nt, Homo sapiens
  misc_RNA (1)...(19): siRNA sense strand
cagaguagagacagaagaa

SEQ ID NO: 2391130 - RNA, 19 nt, Homo sapiens
  misc_RNA (1)...(19): siRNA sense strand
gagaauaacaaauuggcuu

SEQ ID NO: 2391131 - RNA, 19 nt, Homo sapiens
  misc_RNA (1)...(19): siRNA sense strand
acacauuacuccaaagcau

SEQ ID NO: 2391132 - RNA, 19 nt, Homo sapiens
  misc_RNA (1)...(19): siRNA sense strand
acaaacgaauggagauaga

SEQ ID NO: 2391133 - RNA, 19 nt, Homo sapiens
  misc_RNA (1)...(19): siRNA sense strand
agugauaacuggggagaaa

SEQ ID NO: 2391134 - RNA, 19 nt, Homo sapiens
  misc_RNA (1)...(19): siRNA sense strand
gagcgaugguaguacagaa

SEQ ID NO: 2391135 - RNA, 19 nt, Homo sapiens
  misc_RNA (1)...(19): siRNA sense strand
ccucagcaguacagcacaa

SEQ ID NO: 2391136 - RNA, 19 nt, Homo sapiens
  misc_RNA (1)...(19): siRNA sense strand
ccuaaauauuggugauuac

SEQ ID NO: 2391137 - RNA, 19 nt, Homo sapiens
  misc_RNA (1)...(19): siRNA sense strand
ggguuaaauccaagcacuu

SEQ ID NO: 2391138 - RNA, 19 nt, Homo sapiens
  misc_RNA (1)...(19): siRNA sense strand
uggaaacaaacaagaagaa

SEQ ID NO: 2391139 - RNA, 19 nt, Homo sapiens
  misc_RNA (1)...(19): siRNA sense strand
ggacgacaguggacagcau

SEQ ID NO: 2391140 - RNA, 19 nt, Homo sapiens
  misc_RNA (1)...(19): siRNA sense strand
gaaagucagaguagagaca

SEQ ID NO: 2391141 - RNA, 19 nt, Homo sapiens
  misc_RNA (1)...(19): siRNA sense strand
ucugaaaguagcaacaaua

SEQ ID NO: 2391142 - RNA, 19 nt, Homo sapiens
  misc_RNA (1)...(19): siRNA sense strand
gggauggggugauggacaa

SEQ ID NO: 2391143 - RNA, 19 nt, Homo sapiens
  misc_RNA (1)...(19): siRNA sense strand
ggagguggugugugggaau

SEQ ID NO: 2391144 - RNA, 19 nt, Homo sapiens
  misc_RNA (1)...(19): siRNA sense strand
ggcaaugguaagacguuua

SEQ ID NO: 2391145 - RNA, 19 nt, Homo sapiens
  misc_RNA (1)...(19): siRNA sense strand
ggaacgaaagacugacaau

SEQ ID NO: 2391146 - RNA, 19 nt, Homo sapiens
  misc_RNA (1)...(19): siRNA sense strand
gaucaaaacuccagcaaac

SEQ ID NO: 2391147 - RNA, 19 nt, Homo sapiens
  misc_RNA (1)...(19): siRNA sense strand
aggaagaggaucaggguuc

SEQ ID NO: 2391148 - RNA, 19 nt, Homo sapiens
  misc_RNA (1)...(19): siRNA sense strand
ggccaaaacaggagguaca

SEQ ID NO: 2391149 - RNA, 19 nt, Homo sapiens
  misc_RNA (1)...(19): siRNA sense strand
gugaacauguggaacaaaa

SEQ ID NO: 2391150 - RNA, 19 nt, Homo sapiens
  misc_RNA (1)...(19): siRNA sense strand
aagucagaguagagacaga

SEQ ID NO: 2391151 - RNA, 19 nt, Homo sapiens
  misc_RNA (1)...(19): siRNA sense strand
uguaaacagaacugacuua

SEQ ID NO: 2391152 - RNA, 19 nt, Homo sapiens
  misc_RNA (1)...(19): siRNA sense strand
agacuagcccuaaugguaa

SEQ ID NO: 2391153 - RNA, 19 nt, Homo sapiens
  misc_RNA (1)...(19): siRNA sense strand
gcagcagccuccagcacaa

SEQ ID NO: 2391154 - RNA, 19 nt, Homo sapiens
  misc_RNA (1)...(19): siRNA sense strand
auagauaagacuagcccua

SEQ ID NO: 2391155 - RNA, 19 nt, Homo sapiens
  misc_RNA (1)...(19): siRNA sense strand
cagcaaaugaugcaacaau

SEQ ID NO: 2391156 - RNA, 19 nt, Homo sapiens
  misc_RNA (1)...(19): siRNA sense strand
caaaagaagagguagugaa

SEQ ID NO: 2391157 - RNA, 19 nt, Homo sapiens
  misc_RNA (1)...(19): siRNA sense strand
gagacucaccagaggaaaa

SEQ ID NO: 2391158 - RNA, 19 nt, Homo sapiens
  misc_RNA (1)...(19): siRNA sense strand
ggguaagcccauagacagu

SEQ ID NO: 2391159 - RNA, 19 nt, Homo sapiens
  misc_RNA (1)...(19): siRNA sense strand
uggaaacacagcagcacaa

SEQ ID NO: 2391160 - RNA, 19 nt, Homo sapiens
  misc_RNA (1)...(19): siRNA sense strand
gcucagggagaauaacaaa

SEQ ID NO: 2391161 - RNA, 19 nt, Homo sapiens
  misc_RNA (1)...(19): siRNA sense strand
uggaggaagucgaagagga

SEQ ID NO: 2391162 - RNA, 19 nt, Homo sapiens
  misc_RNA (1)...(19): siRNA sense strand
gggaaaggggaaugaugaa

SEQ ID NO: 2391163 - RNA, 19 nt, Homo sapiens
  misc_RNA (1)...(19): siRNA sense strand
ccucagauuuccaaagagu

SEQ ID NO: 2391164 - RNA, 19 nt, Homo sapiens
  misc_RNA (1)...(19): siRNA sense strand
uggcauuguagcagaugaa

SEQ ID NO: 2391165 - RNA, 19 nt, Homo sapiens
  misc_RNA (1)...(19): siRNA sense strand
caggaauggucaagagcaa

SEQ ID NO: 2391166 - RNA, 19 nt, Homo sapiens
  misc_RNA (1)...(19): siRNA sense strand
gggaagaggaagaggaugu

SEQ ID NO: 2391167 - RNA, 19 nt, Homo sapiens
  misc_RNA (1)...(19): siRNA sense strand
guuuacaaauggauggaaa

SEQ ID NO: 2391168 - RNA, 19 nt, Homo sapiens
  misc_RNA (1)...(19): siRNA sense strand
cagaauacugccugggaua

SEQ ID NO: 2391169 - RNA, 19 nt, Homo sapiens
  misc_RNA (1)...(19): siRNA sense strand
ggccaguauuagagaacaa

SEQ ID NO: 2391170 - RNA, 19 nt, Homo sapiens
  misc_RNA (1)...(19): siRNA sense strand
ccuaacaaucagaguauua

SEQ ID NO: 2391171 - RNA, 19 nt, Homo sapiens
  misc_RNA (1)...(19): siRNA sense strand
ggacaggaacaguggguca

SEQ ID NO: 2391172 - RNA, 19 nt, Homo sapiens
  misc_RNA (1)...(19): siRNA sense strand
agacaaacgaauggagaua

SEQ ID NO: 2391173 - RNA, 19 nt, Homo sapiens
  misc_RNA (1)...(19): siRNA sense strand
gaguagagacagaagaaaa

SEQ ID NO: 2391174 - RNA, 19 nt, Homo sapiens
  misc_RNA (1)...(19): siRNA sense strand
gugcaaauggcaaugguaa

SEQ ID NO: 2391175 - RNA, 19 nt, Homo sapiens
  misc_RNA (1)...(19): siRNA sense strand
aggcaaaccuccugguaca

SEQ ID NO: 2391176 - RNA, 19 nt, Homo sapiens
  misc_RNA (1)...(19): siRNA sense strand
aggaagaggauguggagau

SEQ ID NO: 2391177 - RNA, 19 nt, Homo sapiens
  misc_RNA (1)...(19): siRNA sense strand
acgaauggagauagauaaa

SEQ ID NO: 2391178 - RNA, 19 nt, Homo sapiens
  misc_RNA (1)...(19): siRNA sense strand
gaacaguauuaaagagcca

SEQ ID NO: 2391179 - RNA, 19 nt, Homo sapiens
  misc_RNA (1)...(19): siRNA sense strand
gggugaggccaauaagaaa

SEQ ID NO: 2391180 - RNA, 19 nt, Homo sapiens
  misc_RNA (1)...(19): siRNA sense strand
gaggaauguuacaagacaa

SEQ ID NO: 2391181 - RNA, 19 nt, Homo sapiens
  misc_RNA (1)...(19): siRNA sense strand
gcacaaagcacuucagcca

SEQ ID NO: 2391182 - RNA, 19 nt, Homo sapiens
  misc_RNA (1)...(19): siRNA sense strand
gaacaauggacuugcccua

SEQ ID NO: 2391183 - RNA, 19 nt, Homo sapiens
  misc_RNA (1)...(19): siRNA sense strand
ggaauugcaaagaggagaa

SEQ ID NO: 2391184 - RNA, 19 nt, Homo sapiens
  misc_RNA (1)...(19): siRNA sense strand
ccugaaagcaaaucugaaa

SEQ ID NO: 2391185 - RNA, 19 nt, Homo sapiens
  misc_RNA (1)...(19): siRNA sense strand
uuaaacagccagucagaaa

SEQ ID NO: 2391186 - RNA, 19 nt, Homo sapiens
  misc_RNA (1)...(19): siRNA sense strand
auggaaaucuacugaggaa

SEQ ID NO: 2391187 - RNA, 19 nt, Homo sapiens
  misc_RNA (1)...(19): siRNA sense strand
cuacugaggaagaggauca

SEQ ID NO: 2391188 - RNA, 19 nt, Homo sapiens
  misc_RNA (1)...(19): siRNA sense strand
ggaggaagucgaagaggau

SEQ ID NO: 2391189 - RNA, 19 nt, Homo sapiens
  misc_RNA (1)...(19): siRNA sense strand
aggaaaauguacaaagcaa

SEQ ID NO: 2391190 - RNA, 19 nt, Homo sapiens
  misc_RNA (1)...(19): siRNA sense strand
caaucgaacggucgggaaa

SEQ ID NO: 2391191 - RNA, 19 nt, Homo sapiens
  misc_RNA (1)...(19): siRNA sense strand
acaagugauucuagcacaa

SEQ ID NO: 2391192 - RNA, 19 nt, Homo sapiens
  misc_RNA (1)...(19): siRNA sense strand
aggaauguuacaagacaaa

SEQ ID NO: 2391193 - RNA, 19 nt, Homo sapiens
  misc_RNA (1)...(19): siRNA sense strand
ccuuagcaauggagaguca

SEQ ID NO: 2391194 - RNA, 19 nt, Homo sapiens
  misc_RNA (1)...(19): siRNA sense strand
ggaacaagcaacaagacau

SEQ ID NO: 2391195 - RNA, 19 nt, Homo sapiens
  misc_RNA (1)...(19): siRNA sense strand
aagaagaagcguggauaaa

SEQ ID NO: 2391196 - RNA, 19 nt, Homo sapiens
  misc_RNA (1)...(19): siRNA sense strand
agacuaaggaaguggacga

SEQ ID NO: 2391197 - RNA, 19 nt, Homo sapiens
  misc_RNA (1)...(19): siRNA sense strand
cagaguagagacagaagaa

SEQ ID NO: 2391198 - RNA, 19 nt, Homo sapiens
  misc_RNA (1)...(19): siRNA sense strand
gagaauaacaaauuggcuu

SEQ ID NO: 2391199 - RNA, 19 nt, Homo sapiens
  misc_RNA (1)...(19): siRNA sense strand
acacauuacuccaaagcau

SEQ ID NO: 2391200 - RNA, 19 nt, Homo sapiens
  misc_RNA (1)...(19): siRNA sense strand
acaaacgaauggagauaga

SEQ ID NO: 2391201 - RNA, 19 nt, Homo sapiens
  misc_RNA (1)...(19): siRNA sense strand
agugauaacuggggagaaa

SEQ ID NO: 2391202 - RNA, 19 nt, Homo sapiens
  misc_RNA (1)...(19): siRNA sense strand
gagcgaugguaguacagaa

SEQ ID NO: 2391203 - RNA, 19 nt, Homo sapiens
  misc_RNA (1)...(19): siRNA sense strand
ccucagcaguacagcacaa

SEQ ID NO: 2391204 - RNA, 19 nt, Homo sapiens
  misc_RNA (1)...(19): siRNA sense strand
ccuaaauauuggugauuac

SEQ ID NO: 2391205 - RNA, 19 nt, Homo sapiens
  misc_RNA (1)...(19): siRNA sense strand
ggguuaaauccaagcacuu

SEQ ID NO: 2391206 - RNA, 19 nt, Homo sapiens
  misc_RNA (1)...(19): siRNA sense strand
uggaaacaaacaagaagaa

SEQ ID NO: 2391207 - RNA, 19 nt, Homo sapiens
  misc_RNA (1)...(19): siRNA sense strand
ggacgacaguggacagcau

SEQ ID NO: 2391208 - RNA, 19 nt, Homo sapiens
  misc_RNA (1)...(19): siRNA sense strand
gaaagucagaguagagaca

SEQ ID NO: 2391209 - RNA, 19 nt, Homo sapiens
  misc_RNA (1)...(19): siRNA sense strand
ucugaaaguagcaacaaua

SEQ ID NO: 2391210 - RNA, 19 nt, Homo sapiens
  misc_RNA (1)...(19): siRNA sense strand
gggauggggugauggacaa

SEQ ID NO: 2391211 - RNA, 19 nt, Homo sapiens
  misc_RNA (1)...(19): siRNA sense strand
ggagguggugugugggaau

SEQ ID NO: 2391212 - RNA, 19 nt, Homo sapiens
  misc_RNA (1)...(19): siRNA sense strand
ggcaaugguaagacguuua

SEQ ID NO: 2391213 - RNA, 19 nt, Homo sapiens
  misc_RNA (1)...(19): siRNA sense strand
ggaacgaaagacugacaau

SEQ ID NO: 2391214 - RNA, 19 nt, Homo sapiens
  misc_RNA (1)...(19): siRNA sense strand
gaucaaaacuccagcaaac

SEQ ID NO: 2391215 - RNA, 19 nt, Homo sapiens
  misc_RNA (1)...(19): siRNA sense strand
aggaagaggaucaggguuc

SEQ ID NO: 2391216 - RNA, 19 nt, Homo sapiens
  misc_RNA (1)...(19): siRNA sense strand
ggccaaaacaggagguaca

SEQ ID NO: 2391217 - RNA, 19 nt, Homo sapiens
  misc_RNA (1)...(19): siRNA sense strand
gugaacauguggaacaaaa

SEQ ID NO: 2391218 - RNA, 19 nt, Homo sapiens
  misc_RNA (1)...(19): siRNA sense strand
aagucagaguagagacaga

SEQ ID NO: 2391219 - RNA, 19 nt, Homo sapiens
  misc_RNA (1)...(19): siRNA sense strand
uguaaacagaacugacuua

SEQ ID NO: 2391220 - RNA, 19 nt, Homo sapiens
  misc_RNA (1)...(19): siRNA sense strand
agacuagcccuaaugguaa

SEQ ID NO: 2391221 - RNA, 19 nt, Homo sapiens
  misc_RNA (1)...(19): siRNA sense strand
gcagcagccuccagcacaa

SEQ ID NO: 2391222 - RNA, 19 nt, Homo sapiens
  misc_RNA (1)...(19): siRNA sense strand
auagauaagacuagcccua

SEQ ID NO: 2391223 - RNA, 19 nt, Homo sapiens
  misc_RNA (1)...(19): siRNA sense strand
cagcaaaugaugcaacaau

SEQ ID NO: 2391224 - RNA, 19 nt, Homo sapiens
  misc_RNA (1)...(19): siRNA sense strand
caaaagaagagguagugaa

SEQ ID NO: 2391225 - RNA, 19 nt, Homo sapiens
  misc_RNA (1)...(19): siRNA sense strand
gagacucaccagaggaaaa

SEQ ID NO: 2391226 - RNA, 19 nt, Homo sapiens
  misc_RNA (1)...(19): siRNA sense strand
ggguaagcccauagacagu

SEQ ID NO: 2391227 - RNA, 19 nt, Homo sapiens
  misc_RNA (1)...(19): siRNA sense strand
uggaaacacagcagcacaa

SEQ ID NO: 2391228 - RNA, 19 nt, Homo sapiens
  misc_RNA (1)...(19): siRNA sense strand
gcucagggagaauaacaaa

SEQ ID NO: 2391229 - RNA, 19 nt, Homo sapiens
  misc_RNA (1)...(19): siRNA sense strand
cuguaagaaugcuguugua

SEQ ID NO: 2391230 - RNA, 19 nt, Homo sapiens
  misc_RNA (1)...(19): siRNA sense strand
uggaggaagucgaagagga

SEQ ID NO: 2391231 - RNA, 19 nt, Homo sapiens
  misc_RNA (1)...(19): siRNA sense strand
agucaagagucgaguacca

SEQ ID NO: 2391232 - RNA, 19 nt, Homo sapiens
  misc_RNA (1)...(19): siRNA sense strand
augcaacagcagauggaaa

SEQ ID NO: 2391233 - RNA, 19 nt, Homo sapiens
  misc_RNA (1)...(19): siRNA sense strand
aaggaagaagugacagaaa

SEQ ID NO: 2391234 - RNA, 19 nt, Homo sapiens
  misc_RNA (1)...(19): siRNA sense strand
aggucuauuucaugagaau

SEQ ID NO: 2391235 - RNA, 19 nt, Homo sapiens
  misc_RNA (1)...(19): siRNA sense strand
ugcuaauggacaagugaaa

SEQ ID NO: 2391236 - RNA, 19 nt, Homo sapiens
  misc_RNA (1)...(19): siRNA sense strand
gcucaaaaucagauauaga

SEQ ID NO: 2391237 - RNA, 19 nt, Homo sapiens
  misc_RNA (1)...(19): siRNA sense strand
cgaaauggauggucagcac

SEQ ID NO: 2391238 - RNA, 19 nt, Homo sapiens
  misc_RNA (1)...(19): siRNA sense strand
cuacagaaguugccugcca

SEQ ID NO: 2391239 - RNA, 19 nt, Homo sapiens
  misc_RNA (1)...(19): siRNA sense strand
acaguuacauguacggaga

SEQ ID NO: 2391240 - RNA, 19 nt, Homo sapiens
  misc_RNA (1)...(19): siRNA sense strand
ucgggaagggauaguggaa

SEQ ID NO: 2391241 - RNA, 19 nt, Homo sapiens
  misc_RNA (1)...(19): siRNA sense strand
ucaauuacauguuugcgaa

SEQ ID NO: 2391242 - RNA, 19 nt, Homo sapiens
  misc_RNA (1)...(19): siRNA sense strand
ccuauuacugugaugaaca

SEQ ID NO: 2391243 - RNA, 19 nt, Homo sapiens
  misc_RNA (1)...(19): siRNA sense strand
guaccaugucucagaaaau

SEQ ID NO: 2391244 - RNA, 19 nt, Homo sapiens
  misc_RNA (1)...(19): siRNA sense strand
ccacaaggccagaggagcu

SEQ ID NO: 2391245 - RNA, 19 nt, Homo sapiens
  misc_RNA (1)...(19): siRNA sense strand
uagagaagcagguggacca

SEQ ID NO: 2391246 - RNA, 19 nt, Homo sapiens
  misc_RNA (1)...(19): siRNA sense strand
ggacagcaaucaagcagca

SEQ ID NO: 2391247 - RNA, 19 nt, Homo sapiens
  misc_RNA (1)...(19): siRNA sense strand
ugaacagagcgcaggacau

SEQ ID NO: 2391248 - RNA, 19 nt, Homo sapiens
  misc_RNA (1)...(19): siRNA sense strand
ucucgaagcugcugggaag

SEQ ID NO: 2391249 - RNA, 19 nt, Homo sapiens
  misc_RNA (1)...(19): siRNA sense strand
acauagagaagcaggugga

SEQ ID NO: 2391250 - RNA, 19 nt, Homo sapiens
  misc_RNA (1)...(19): siRNA sense strand
ggagcuacuugguggcagu

SEQ ID NO: 2391251 - RNA, 19 nt, Homo sapiens
  misc_RNA (1)...(19): siRNA sense strand
gucacgacuuggacagcaa

SEQ ID NO: 2391252 - RNA, 19 nt, Homo sapiens
  misc_RNA (1)...(19): siRNA sense strand
cguaagggacuuuguggca

SEQ ID NO: 2391253 - RNA, 19 nt, Homo sapiens
  misc_RNA (1)...(19): siRNA sense strand
ccuggaaaggcguuggaca

SEQ ID NO: 2391254 - RNA, 19 nt, Homo sapiens
  misc_RNA (1)...(19): siRNA sense strand
gaucagaacaccuuccaga

SEQ ID NO: 2391255 - RNA, 19 nt, Homo sapiens
  misc_RNA (1)...(19): siRNA sense strand
ucaaggacaagaugcgcaa

SEQ ID NO: 2391256 - RNA, 19 nt, Homo sapiens
  misc_RNA (1)...(19): siRNA sense strand
aguacaagcaccuggccuu

SEQ ID NO: 2391257 - RNA, 19 nt, Homo sapiens
  misc_RNA (1)...(19): siRNA sense strand
agaaaggcgccuaccucaa

SEQ ID NO: 2391258 - RNA, 19 nt, Homo sapiens
  misc_RNA (1)...(19): siRNA sense strand
gcaaagcgguggcugagga

SEQ ID NO: 2391259 - RNA, 19 nt, Homo sapiens
  misc_RNA (1)...(19): siRNA sense strand
ccacaaggccagaggagcu

SEQ ID NO: 2391260 - RNA, 19 nt, Homo sapiens
  misc_RNA (1)...(19): siRNA sense strand
uagagaagcagguggacca

SEQ ID NO: 2391261 - RNA, 19 nt, Homo sapiens
  misc_RNA (1)...(19): siRNA sense strand
ggacagcaaucaagcagca

SEQ ID NO: 2391262 - RNA, 19 nt, Homo sapiens
  misc_RNA (1)...(19): siRNA sense strand
ugaacagagcgcaggacau

SEQ ID NO: 2391263 - RNA, 19 nt, Homo sapiens
  misc_RNA (1)...(19): siRNA sense strand
ucucgaagcugcugggaag

SEQ ID NO: 2391264 - RNA, 19 nt, Homo sapiens
  misc_RNA (1)...(19): siRNA sense strand
acauagagaagcaggugga

SEQ ID NO: 2391265 - RNA, 19 nt, Homo sapiens
  misc_RNA (1)...(19): siRNA sense strand
ggagcuacuugguggcagu

SEQ ID NO: 2391266 - RNA, 19 nt, Homo sapiens
  misc_RNA (1)...(19): siRNA sense strand
gucacgacuuggacagcaa

SEQ ID NO: 2391267 - RNA, 19 nt, Homo sapiens
  misc_RNA (1)...(19): siRNA sense strand
cguaagggacuuuguggca

SEQ ID NO: 2391268 - RNA, 19 nt, Homo sapiens
  misc_RNA (1)...(19): siRNA sense strand
ccuggaaaggcguuggaca

SEQ ID NO: 2391269 - RNA, 19 nt, Homo sapiens
  misc_RNA (1)...(19): siRNA sense strand
gaucagaacaccuuccaga

SEQ ID NO: 2391270 - RNA, 19 nt, Homo sapiens
  misc_RNA (1)...(19): siRNA sense strand
ucaaggacaagaugcgcaa

SEQ ID NO: 2391271 - RNA, 19 nt, Homo sapiens
  misc_RNA (1)...(19): siRNA sense strand
aguacaagcaccuggccuu

SEQ ID NO: 2391272 - RNA, 19 nt, Homo sapiens
  misc_RNA (1)...(19): siRNA sense strand
agaaaggcgccuaccucaa

SEQ ID NO: 2391273 - RNA, 19 nt, Homo sapiens
  misc_RNA (1)...(19): siRNA sense strand
gcaaagcgguggcugagga

SEQ ID NO: 2391274 - RNA, 19 nt, Homo sapiens
  misc_RNA (1)...(19): siRNA sense strand
ccacaaggccagaggagcu

SEQ ID NO: 2391275 - RNA, 19 nt, Homo sapiens
  misc_RNA (1)...(19): siRNA sense strand
uagagaagcagguggacca

SEQ ID NO: 2391276 - RNA, 19 nt, Homo sapiens
  misc_RNA (1)...(19): siRNA sense strand
ggacagcaaucaagcagca

SEQ ID NO: 2391277 - RNA, 19 nt, Homo sapiens
  misc_RNA (1)...(19): siRNA sense strand
ugaacagagcgcaggacau

SEQ ID NO: 2391278 - RNA, 19 nt, Homo sapiens
  misc_RNA (1)...(19): siRNA sense strand
ucucgaagcugcugggaag

SEQ ID NO: 2391279 - RNA, 19 nt, Homo sapiens
  misc_RNA (1)...(19): siRNA sense strand
acauagagaagcaggugga

SEQ ID NO: 2391280 - RNA, 19 nt, Homo sapiens
  misc_RNA (1)...(19): siRNA sense strand
ggagcuacuugguggcagu

SEQ ID NO: 2391281 - RNA, 19 nt, Homo sapiens
  misc_RNA (1)...(19): siRNA sense strand
gucacgacuuggacagcaa

SEQ ID NO: 2391282 - RNA, 19 nt, Homo sapiens
  misc_RNA (1)...(19): siRNA sense strand
cguaagggacuuuguggca

SEQ ID NO: 2391283 - RNA, 19 nt, Homo sapiens
  misc_RNA (1)...(19): siRNA sense strand
ccuggaaaggcguuggaca

SEQ ID NO: 2391284 - RNA, 19 nt, Homo sapiens
  misc_RNA (1)...(19): siRNA sense strand
gaucagaacaccuuccaga

SEQ ID NO: 2391285 - RNA, 19 nt, Homo sapiens
  misc_RNA (1)...(19): siRNA sense strand
ucaaggacaagaugcgcaa

SEQ ID NO: 2391286 - RNA, 19 nt, Homo sapiens
  misc_RNA (1)...(19): siRNA sense strand
aguacaagcaccuggccuu

SEQ ID NO: 2391287 - RNA, 19 nt, Homo sapiens
  misc_RNA (1)...(19): siRNA sense strand
agaaaggcgccuaccucaa

SEQ ID NO: 2391288 - RNA, 19 nt, Homo sapiens
  misc_RNA (1)...(19): siRNA sense strand
gcaaagcgguggcugagga

SEQ ID NO: 2391289 - RNA, 19 nt, Homo sapiens
  misc_RNA (1)...(19): siRNA sense strand
auguaaugauugugggaaa

SEQ ID NO: 2391290 - RNA, 19 nt, Homo sapiens
  misc_RNA (1)...(19): siRNA sense strand
guguaaugaaugugggaaa

SEQ ID NO: 2391291 - RNA, 19 nt, Homo sapiens
  misc_RNA (1)...(19): siRNA sense strand
ccauauaguacaucagaaa

SEQ ID NO: 2391292 - RNA, 19 nt, Homo sapiens
  misc_RNA (1)...(19): siRNA sense strand
auguaaugacugugggaaa

SEQ ID NO: 2391293 - RNA, 19 nt, Homo sapiens
  misc_RNA (1)...(19): siRNA sense strand
guguaaugaaugcgggaaa

SEQ ID NO: 2391294 - RNA, 19 nt, Homo sapiens
  misc_RNA (1)...(19): siRNA sense strand
aacacaagcuggagauaaa

SEQ ID NO: 2391295 - RNA, 19 nt, Homo sapiens
  misc_RNA (1)...(19): siRNA sense strand
auguaaugaaugugggaaa

SEQ ID NO: 2391296 - RNA, 19 nt, Homo sapiens
  misc_RNA (1)...(19): siRNA sense strand
uaacaauggcugugggaga

SEQ ID NO: 2391297 - RNA, 19 nt, Homo sapiens
  misc_RNA (1)...(19): siRNA sense strand
ccucauaggacaccagaaa

SEQ ID NO: 2391298 - RNA, 19 nt, Homo sapiens
  misc_RNA (1)...(19): siRNA sense strand
aaagagaaaccuugugaua

SEQ ID NO: 2391299 - RNA, 19 nt, Homo sapiens
  misc_RNA (1)...(19): siRNA sense strand
gcucugaucuuaaugaaua

SEQ ID NO: 2391300 - RNA, 19 nt, Homo sapiens
  misc_RNA (1)...(19): siRNA sense strand
auguauugaaugugggaaa

SEQ ID NO: 2391301 - RNA, 19 nt, Homo sapiens
  misc_RNA (1)...(19): siRNA sense strand
auguagugacugugagaaa

SEQ ID NO: 2391302 - RNA, 19 nt, Homo sapiens
  misc_RNA (1)...(19): siRNA sense strand
augcagugaaugugggaaa

SEQ ID NO: 2391303 - RNA, 19 nt, Homo sapiens
  misc_RNA (1)...(19): siRNA sense strand
ucaaaggacaucagagaau

SEQ ID NO: 2391304 - RNA, 19 nt, Homo sapiens
  misc_RNA (1)...(19): siRNA sense strand
gaacaugggaaaugcagaa

SEQ ID NO: 2391305 - RNA, 19 nt, Homo sapiens
  misc_RNA (1)...(19): siRNA sense strand
ggaaaugcucugaucuuaa

SEQ ID NO: 2391306 - RNA, 19 nt, Homo sapiens
  misc_RNA (1)...(19): siRNA sense strand
aaugcauaccagagagaaa

SEQ ID NO: 2391307 - RNA, 19 nt, Homo sapiens
  misc_RNA (1)...(19): siRNA sense strand
ccuuagagcacaucagaau

SEQ ID NO: 2391308 - RNA, 19 nt, Homo sapiens
  misc_RNA (1)...(19): siRNA sense strand
auguaacguaugugggaaa

SEQ ID NO: 2391309 - RNA, 19 nt, Homo sapiens
  misc_RNA (1)...(19): siRNA sense strand
ccguaugaauguaacguau

SEQ ID NO: 2391310 - RNA, 19 nt, Homo sapiens
  misc_RNA (1)...(19): siRNA sense strand
gggauuaauuucaguagga

SEQ ID NO: 2391311 - RNA, 19 nt, Homo sapiens
  misc_RNA (1)...(19): siRNA sense strand
gaagaaaauuuuagccaga

SEQ ID NO: 2391312 - RNA, 19 nt, Homo sapiens
  misc_RNA (1)...(19): siRNA sense strand
agagaaaccuugugauaac

SEQ ID NO: 2391313 - RNA, 19 nt, Homo sapiens
  misc_RNA (1)...(19): siRNA sense strand
cgggaaagcuuuugcccaa

SEQ ID NO: 2391314 - RNA, 19 nt, Homo sapiens
  misc_RNA (1)...(19): siRNA sense strand
augugaugaaugugggaaa

SEQ ID NO: 2391315 - RNA, 19 nt, Homo sapiens
  misc_RNA (1)...(19): siRNA sense strand
caauaugaggaaugugcaa

SEQ ID NO: 2391316 - RNA, 19 nt, Homo sapiens
  misc_RNA (1)...(19): siRNA sense strand
auguaaugaaugugggaga

SEQ ID NO: 2391317 - RNA, 19 nt, Homo sapiens
  misc_RNA (1)...(19): siRNA sense strand
auguguugaaugugagaaa

SEQ ID NO: 2391318 - RNA, 19 nt, Homo sapiens
  misc_RNA (1)...(19): siRNA sense strand
gaauucacacagaagauaa

SEQ ID NO: 2391319 - RNA, 19 nt, Homo sapiens
  misc_RNA (1)...(19): siRNA sense strand
uguaaugacugugggaaau

SEQ ID NO: 2391320 - RNA, 19 nt, Homo sapiens
  misc_RNA (1)...(19): siRNA sense strand
ucagaguacaccagagaau

SEQ ID NO: 2391321 - RNA, 19 nt, Homo sapiens
  misc_RNA (1)...(19): siRNA sense strand
gagaauucacacagguaga

SEQ ID NO: 2391322 - RNA, 19 nt, Homo sapiens
  misc_RNA (1)...(19): siRNA sense strand
gggaaaugcucugaucuua

SEQ ID NO: 2391323 - RNA, 19 nt, Homo sapiens
  misc_RNA (1)...(19): siRNA sense strand
auguaaccaaugugggaaa

SEQ ID NO: 2391324 - RNA, 19 nt, Homo sapiens
  misc_RNA (1)...(19): siRNA sense strand
gagaauucauacuggggaa

SEQ ID NO: 2391325 - RNA, 19 nt, Homo sapiens
  misc_RNA (1)...(19): siRNA sense strand
ccucagaguacaucaaaga

SEQ ID NO: 2391326 - RNA, 19 nt, Homo sapiens
  misc_RNA (1)...(19): siRNA sense strand
gagaauucacacagaagau

SEQ ID NO: 2391327 - RNA, 19 nt, Homo sapiens
  misc_RNA (1)...(19): siRNA sense strand
gagagaaaacuuaccaaua

SEQ ID NO: 2391328 - RNA, 19 nt, Homo sapiens
  misc_RNA (1)...(19): siRNA sense strand
gggaaaucuuuuaccuaua

SEQ ID NO: 2391329 - RNA, 19 nt, Homo sapiens
  misc_RNA (1)...(19): siRNA sense strand
caucacaucucaaaggaca

SEQ ID NO: 2391330 - RNA, 19 nt, Homo sapiens
  misc_RNA (1)...(19): siRNA sense strand
ccucauagugcaucaaaga

SEQ ID NO: 2391331 - RNA, 19 nt, Homo sapiens
  misc_RNA (1)...(19): siRNA sense strand
aaacagaugcagagaugga

SEQ ID NO: 2391332 - RNA, 19 nt, Homo sapiens
  misc_RNA (1)...(19): siRNA sense strand
cccuaugaaugcagugaau

SEQ ID NO: 2391333 - RNA, 19 nt, Homo sapiens
  misc_RNA (1)...(19): siRNA sense strand
caguaaacaucugagaauu

SEQ ID NO: 2391334 - RNA, 19 nt, Homo sapiens
  misc_RNA (1)...(19): siRNA sense strand
gaauguagcaaguguggga

SEQ ID NO: 2391335 - RNA, 19 nt, Homo sapiens
  misc_RNA (1)...(19): siRNA sense strand
ucauagugcaucaaagaau

SEQ ID NO: 2391336 - RNA, 19 nt, Homo sapiens
  misc_RNA (1)...(19): siRNA sense strand
ugggacauccugugacaaa

SEQ ID NO: 2391337 - RNA, 19 nt, Homo sapiens
  misc_RNA (1)...(19): siRNA sense strand
cucuaugaauguagugaau

SEQ ID NO: 2391338 - RNA, 19 nt, Homo sapiens
  misc_RNA (1)...(19): siRNA sense strand
uguaaugacugugggaaga

SEQ ID NO: 2391339 - RNA, 19 nt, Homo sapiens
  misc_RNA (1)...(19): siRNA sense strand
ucuuaaugaauaugggaca

SEQ ID NO: 2391340 - RNA, 19 nt, Homo sapiens
  misc_RNA (1)...(19): siRNA sense strand
ucaguggacaugagagaau

SEQ ID NO: 2391341 - RNA, 19 nt, Homo sapiens
  misc_RNA (1)...(19): siRNA sense strand
gagauaaauuuggugaaca

SEQ ID NO: 2391342 - RNA, 19 nt, Homo sapiens
  misc_RNA (1)...(19): siRNA sense strand
auguagcaagugugggaaa

SEQ ID NO: 2391343 - RNA, 19 nt, Homo sapiens
  misc_RNA (1)...(19): siRNA sense strand
cccuaugaguguaaugaau

SEQ ID NO: 2391344 - RNA, 19 nt, Homo sapiens
  misc_RNA (1)...(19): siRNA sense strand
cccuaugaguguaaugaau

SEQ ID NO: 2391345 - RNA, 19 nt, Homo sapiens
  misc_RNA (1)...(19): siRNA sense strand
gagaauucacacaggggaa

SEQ ID NO: 2391346 - RNA, 19 nt, Homo sapiens
  misc_RNA (1)...(19): siRNA sense strand
cauaaugaauguacagaug

SEQ ID NO: 2391347 - RNA, 19 nt, Homo sapiens
  misc_RNA (1)...(19): siRNA sense strand
ugaugaggagagagagcuu

SEQ ID NO: 2391348 - RNA, 19 nt, Homo sapiens
  misc_RNA (1)...(19): siRNA sense strand
gcuacagaaaagucaguaa

SEQ ID NO: 2391349 - RNA, 19 nt, Homo sapiens
  misc_RNA (1)...(19): siRNA sense strand
cuacagaaaagucaguaaa

SEQ ID NO: 2391350 - RNA, 19 nt, Homo sapiens
  misc_RNA (1)...(19): siRNA sense strand
cuucaauccucuaggcuuc

SEQ ID NO: 2391351 - RNA, 19 nt, Homo sapiens
  misc_RNA (1)...(19): siRNA sense strand
gaagagaggacucggguca

SEQ ID NO: 2391352 - RNA, 19 nt, Homo sapiens
  misc_RNA (1)...(19): siRNA sense strand
cugaaauuauccuggguga

SEQ ID NO: 2391353 - RNA, 19 nt, Homo sapiens
  misc_RNA (1)...(19): siRNA sense strand
acgucaacauggaagagaa

SEQ ID NO: 2391354 - RNA, 19 nt, Homo sapiens
  misc_RNA (1)...(19): siRNA sense strand
gggucaagcuggaaagccu

SEQ ID NO: 2391355 - RNA, 19 nt, Homo sapiens
  misc_RNA (1)...(19): siRNA sense strand
ucaacauggaagagaacuu

SEQ ID NO: 2391356 - RNA, 19 nt, Homo sapiens
  misc_RNA (1)...(19): siRNA sense strand
ccagagaucuugaacacca

SEQ ID NO: 2391357 - RNA, 19 nt, Homo sapiens
  misc_RNA (1)...(19): siRNA sense strand
ccugcaagaagcugagaga

SEQ ID NO: 2391358 - RNA, 19 nt, Homo sapiens
  misc_RNA (1)...(19): siRNA sense strand
gggagaucgcggaacaaaa

SEQ ID NO: 2391359 - RNA, 19 nt, Homo sapiens
  misc_RNA (1)...(19): siRNA sense strand
gggugagaccaaagccuau

SEQ ID NO: 2391360 - RNA, 19 nt, Homo sapiens
  misc_RNA (1)...(19): siRNA sense strand
acguaagcccagagaucuu

SEQ ID NO: 2391361 - RNA, 19 nt, Homo sapiens
  misc_RNA (1)...(19): siRNA sense strand
gagcgaagcuauggggaca

SEQ ID NO: 2391362 - RNA, 19 nt, Homo sapiens
  misc_RNA (1)...(19): siRNA sense strand
gcaagaagcugagagagga

SEQ ID NO: 2391363 - RNA, 19 nt, Homo sapiens
  misc_RNA (1)...(19): siRNA sense strand
gaggauaguuccaagguuc

SEQ ID NO: 2391364 - RNA, 19 nt, Homo sapiens
  misc_RNA (1)...(19): siRNA sense strand
ggaugagggugguggguug

SEQ ID NO: 2391365 - RNA, 19 nt, Homo sapiens
  misc_RNA (1)...(19): siRNA sense strand
ggagaugggugcagaggug

SEQ ID NO: 2391366 - RNA, 19 nt, Homo sapiens
  misc_RNA (1)...(19): siRNA sense strand
agaacagagaccugguaca

SEQ ID NO: 2391367 - RNA, 19 nt, Homo sapiens
  misc_RNA (1)...(19): siRNA sense strand
ccggaggggcagaaagcua

SEQ ID NO: 2391368 - RNA, 19 nt, Homo sapiens
  misc_RNA (1)...(19): siRNA sense strand
caacaaacuuggaucauua

SEQ ID NO: 2391369 - RNA, 19 nt, Homo sapiens
  misc_RNA (1)...(19): siRNA sense strand
gagaugagauugaagguca

SEQ ID NO: 2391370 - RNA, 19 nt, Homo sapiens
  misc_RNA (1)...(19): siRNA sense strand
gcagaagaaauguggaaaa

SEQ ID NO: 2391371 - RNA, 19 nt, Homo sapiens
  misc_RNA (1)...(19): siRNA sense strand
ggccaaaugcagaagaaau

SEQ ID NO: 2391372 - RNA, 19 nt, Homo sapiens
  misc_RNA (1)...(19): siRNA sense strand
gggaguuggaagugauaau

SEQ ID NO: 2391373 - RNA, 19 nt, Homo sapiens
  misc_RNA (1)...(19): siRNA sense strand
agaugagagaagagaaaga

SEQ ID NO: 2391374 - RNA, 19 nt, Homo sapiens
  misc_RNA (1)...(19): siRNA sense strand
ccucagagaaauuuggaau

SEQ ID NO: 2391375 - RNA, 19 nt, Homo sapiens
  misc_RNA (1)...(19): siRNA sense strand
gugaagagcuguuacggau

SEQ ID NO: 2391376 - RNA, 19 nt, Homo sapiens
  misc_RNA (1)...(19): siRNA sense strand
uggauuaagcacagauauu

SEQ ID NO: 2391377 - RNA, 19 nt, Homo sapiens
  misc_RNA (1)...(19): siRNA sense strand
ggaagugauaauggagaua

SEQ ID NO: 2391378 - RNA, 19 nt, Homo sapiens
  misc_RNA (1)...(19): siRNA sense strand
ggucaaauacagcuggaga

SEQ ID NO: 2391379 - RNA, 19 nt, Homo sapiens
  misc_RNA (1)...(19): siRNA sense strand
gaucauuaccagaagagau

SEQ ID NO: 2391380 - RNA, 19 nt, Homo sapiens
  misc_RNA (1)...(19): siRNA sense strand
ccaauuuguuuuagagaga

SEQ ID NO: 2391381 - RNA, 19 nt, Homo sapiens
  misc_RNA (1)...(19): siRNA sense strand
uggaagaagaacagaucau

SEQ ID NO: 2391382 - RNA, 19 nt, Homo sapiens
  misc_RNA (1)...(19): siRNA sense strand
gggcaugaccucucggaca

SEQ ID NO: 2391383 - RNA, 19 nt, Homo sapiens
  misc_RNA (1)...(19): siRNA sense strand
gaggaugugcacuggcaaa

SEQ ID NO: 2391384 - RNA, 19 nt, Homo sapiens
  misc_RNA (1)...(19): siRNA sense strand
cauccaaagaucaggacau

SEQ ID NO: 2391385 - RNA, 19 nt, Homo sapiens
  misc_RNA (1)...(19): siRNA sense strand
ggauagaagaggaugugca

SEQ ID NO: 2391386 - RNA, 19 nt, Homo sapiens
  misc_RNA (1)...(19): siRNA sense strand
uggaagugauaauggagau

SEQ ID NO: 2391387 - RNA, 19 nt, Homo sapiens
  misc_RNA (1)...(19): siRNA sense strand
augcagaagaaauguggaa

SEQ ID NO: 2391388 - RNA, 19 nt, Homo sapiens
  misc_RNA (1)...(19): siRNA sense strand
acucaggagaagaaagaga

SEQ ID NO: 2391389 - RNA, 19 nt, Homo sapiens
  misc_RNA (1)...(19): siRNA sense strand
ggaggaaaauggagcagau

SEQ ID NO: 2391390 - RNA, 19 nt, Homo sapiens
  misc_RNA (1)...(19): siRNA sense strand
ggaacaacuucgugagagc

SEQ ID NO: 2391391 - RNA, 19 nt, Homo sapiens
  misc_RNA (1)...(19): siRNA sense strand
aaaugagauuagagagaac

SEQ ID NO: 2391392 - RNA, 19 nt, Homo sapiens
  misc_RNA (1)...(19): siRNA sense strand
cagauaggucaguugaaau

SEQ ID NO: 2391393 - RNA, 19 nt, Homo sapiens
  misc_RNA (1)...(19): siRNA sense strand
cacagauauuacagagaga

SEQ ID NO: 2391394 - RNA, 19 nt, Homo sapiens
  misc_RNA (1)...(19): siRNA sense strand
ugaucgagcagcugagaga

SEQ ID NO: 2391395 - RNA, 19 nt, Homo sapiens
  misc_RNA (1)...(19): siRNA sense strand
uuuacaauccggaggaaaa

SEQ ID NO: 2391396 - RNA, 19 nt, Homo sapiens
  misc_RNA (1)...(19): siRNA sense strand
aucauuaccagaagagaua

SEQ ID NO: 2391397 - RNA, 19 nt, Homo sapiens
  misc_RNA (1)...(19): siRNA sense strand
cuaagaccucagagaaauu

SEQ ID NO: 2391398 - RNA, 19 nt, Homo sapiens
  misc_RNA (1)...(19): siRNA sense strand
aagucuuaaucgcaaguaa

SEQ ID NO: 2391399 - RNA, 19 nt, Homo sapiens
  misc_RNA (1)...(19): siRNA sense strand
agggcaaaguucacauauu

SEQ ID NO: 2391400 - RNA, 19 nt, Homo sapiens
  misc_RNA (1)...(19): siRNA sense strand
ucuuuauagugcuggucua

SEQ ID NO: 2391401 - RNA, 19 nt, Homo sapiens
  misc_RNA (1)...(19): siRNA sense strand
gggcagaagacugugaaga

SEQ ID NO: 2391402 - RNA, 19 nt, Homo sapiens
  misc_RNA (1)...(19): siRNA sense strand
aguguuacuacuugagaau

SEQ ID NO: 2391403 - RNA, 19 nt, Homo sapiens
  misc_RNA (1)...(19): siRNA sense strand
ugaagagcuguuacggaua

SEQ ID NO: 2391404 - RNA, 19 nt, Homo sapiens
  misc_RNA (1)...(19): siRNA sense strand
uggcaaacugagggcauaa

SEQ ID NO: 2391405 - RNA, 19 nt, Homo sapiens
  misc_RNA (1)...(19): siRNA sense strand
uaacaacaaacuuggauca

SEQ ID NO: 2391406 - RNA, 19 nt, Homo sapiens
  misc_RNA (1)...(19): siRNA sense strand
uggaagauggcaagaagga

SEQ ID NO: 2391407 - RNA, 19 nt, Homo sapiens
  misc_RNA (1)...(19): siRNA sense strand
caccaacucaggagaagaa

SEQ ID NO: 2391408 - RNA, 19 nt, Homo sapiens
  misc_RNA (1)...(19): siRNA sense strand
guuuacaauccggaggaaa

SEQ ID NO: 2391409 - RNA, 19 nt, Homo sapiens
  misc_RNA (1)...(19): siRNA sense strand
gagaagagaaagagcuggu

SEQ ID NO: 2391410 - RNA, 19 nt, Homo sapiens
  misc_RNA (1)...(19): siRNA sense strand
caacuguaucagagucauu

SEQ ID NO: 2391411 - RNA, 19 nt, Homo sapiens
  misc_RNA (1)...(19): siRNA sense strand
cuauaaggcaagggcagaa

SEQ ID NO: 2391412 - RNA, 19 nt, Homo sapiens
  misc_RNA (1)...(19): siRNA sense strand
cuggcaaacugagggcaua

SEQ ID NO: 2391413 - RNA, 19 nt, Homo sapiens
  misc_RNA (1)...(19): siRNA sense strand
gcagcugagagaagcagua

SEQ ID NO: 2391414 - RNA, 19 nt, Homo sapiens
  misc_RNA (1)...(19): siRNA sense strand
acaucauggaagaagaaca

SEQ ID NO: 2391415 - RNA, 19 nt, Homo sapiens
  misc_RNA (1)...(19): siRNA sense strand
guuuacugauagagcagau

SEQ ID NO: 2391416 - RNA, 19 nt, Homo sapiens
  misc_RNA (1)...(19): siRNA sense strand
aagaucaggacauggauau

SEQ ID NO: 2391417 - RNA, 19 nt, Homo sapiens
  misc_RNA (1)...(19): siRNA sense strand
agagauaggucagcucaaa

SEQ ID NO: 2391418 - RNA, 19 nt, Homo sapiens
  misc_RNA (1)...(19): siRNA sense strand
aguuaauggagcuggaugu

SEQ ID NO: 2391419 - RNA, 19 nt, Homo sapiens
  misc_RNA (1)...(19): siRNA sense strand
ugauaauggagauaagcga

SEQ ID NO: 2391420 - RNA, 19 nt, Homo sapiens
  misc_RNA (1)...(19): siRNA sense strand
auaauggagauaagcgauu

SEQ ID NO: 2391421 - RNA, 19 nt, Homo sapiens
  misc_RNA (1)...(19): siRNA sense strand
gagaauaacccucugcagu

SEQ ID NO: 2391422 - RNA, 19 nt, Homo sapiens
  misc_RNA (1)...(19): siRNA sense strand
gugcaaagugaucuaacau

SEQ ID NO: 2391423 - RNA, 19 nt, Homo sapiens
  misc_RNA (1)...(19): siRNA sense strand
gcacaagccuuccuggaga

SEQ ID NO: 2391424 - RNA, 19 nt, Homo sapiens
  misc_RNA (1)...(19): siRNA sense strand
caucaaaguuaaaccgcca

SEQ ID NO: 2391425 - RNA, 19 nt, Homo sapiens
  misc_RNA (1)...(19): siRNA sense strand
gcgacuuccucaaaggcua

SEQ ID NO: 2391426 - RNA, 19 nt, Homo sapiens
  misc_RNA (1)...(19): siRNA sense strand
acuaacaaguuccggaaaa

SEQ ID NO: 2391427 - RNA, 19 nt, Homo sapiens
  misc_RNA (1)...(19): siRNA sense strand
ccaacaagggccugguaca

SEQ ID NO: 2391428 - RNA, 19 nt, Homo sapiens
  misc_RNA (1)...(19): siRNA sense strand
acaaaguaucugccaacaa

SEQ ID NO: 2391429 - RNA, 19 nt, Homo sapiens
  misc_RNA (1)...(19): siRNA sense strand
agggagaagaggaaggagu

SEQ ID NO: 2391430 - RNA, 19 nt, Homo sapiens
  misc_RNA (1)...(19): siRNA sense strand
ucaccaaggacucagggaa

SEQ ID NO: 2391431 - RNA, 19 nt, Homo sapiens
  misc_RNA (1)...(19): siRNA sense strand
gguaagcccaggaugguga

SEQ ID NO: 2391432 - RNA, 19 nt, Homo sapiens
  misc_RNA (1)...(19): siRNA sense strand
caaacaagguggagaagcc

SEQ ID NO: 2391433 - RNA, 19 nt, Homo sapiens
  misc_RNA (1)...(19): siRNA sense strand
uggagaagccgcagcucau

SEQ ID NO: 2391434 - RNA, 19 nt, Homo sapiens
  misc_RNA (1)...(19): siRNA sense strand
cccgggaaggugaagguaa

SEQ ID NO: 2391435 - RNA, 19 nt, Homo sapiens
  misc_RNA (1)...(19): siRNA sense strand
caccauguguccaaggaga

SEQ ID NO: 2391436 - RNA, 19 nt, Homo sapiens
  misc_RNA (1)...(19): siRNA sense strand
ucuacaaaguaucugccaa

SEQ ID NO: 2391437 - RNA, 19 nt, Homo sapiens
  misc_RNA (1)...(19): siRNA sense strand
ccaccaucgaggagaccua

SEQ ID NO: 2391438 - RNA, 19 nt, Homo sapiens
  misc_RNA (1)...(19): siRNA sense strand
aggaacagcucaagaccca

SEQ ID NO: 2391439 - RNA, 19 nt, Homo sapiens
  misc_RNA (1)...(19): siRNA sense strand
cggaguauguccacgccua

SEQ ID NO: 2391440 - RNA, 19 nt, Homo sapiens
  misc_RNA (1)...(19): siRNA sense strand
acucgaaggcgauggcgaa

SEQ ID NO: 2391441 - RNA, 19 nt, Homo sapiens
  misc_RNA (1)...(19): siRNA sense strand
ggauguaccuggugagcug

SEQ ID NO: 2391442 - RNA, 19 nt, Homo sapiens
  misc_RNA (1)...(19): siRNA sense strand
cucuggacuucgaggcaua

SEQ ID NO: 2391443 - RNA, 19 nt, Homo sapiens
  misc_RNA (1)...(19): siRNA sense strand
aggaggaaguggugagcac

SEQ ID NO: 2391444 - RNA, 19 nt, Homo sapiens
  misc_RNA (1)...(19): siRNA sense strand
acaagaagugcaaggagga

SEQ ID NO: 2391445 - RNA, 19 nt, Homo sapiens
  misc_RNA (1)...(19): siRNA sense strand
gagacacaccugaggcaca

SEQ ID NO: 2391446 - RNA, 19 nt, Homo sapiens
  misc_RNA (1)...(19): siRNA sense strand
ucucaguggaguacggcua

SEQ ID NO: 2391447 - RNA, 19 nt, Homo sapiens
  misc_RNA (1)...(19): siRNA sense strand
aggaauuuaagcagaacau

SEQ ID NO: 2391448 - RNA, 19 nt, Homo sapiens
  misc_RNA (1)...(19): siRNA sense strand
caugaggaauuuaagcaga

SEQ ID NO: 2391449 - RNA, 19 nt, Homo sapiens
  misc_RNA (1)...(19): siRNA sense strand
gugaagaggagguuugcca

SEQ ID NO: 2391450 - RNA, 19 nt, Homo sapiens
  misc_RNA (1)...(19): siRNA sense strand
aaaccaagaaggcggcaga

SEQ ID NO: 2391451 - RNA, 19 nt, Homo sapiens
  misc_RNA (1)...(19): siRNA sense strand
agguggaugaagaagguuu

SEQ ID NO: 2391452 - RNA, 19 nt, Homo sapiens
  misc_RNA (1)...(19): siRNA sense strand
accaaagacuucuggcuca

SEQ ID NO: 2391453 - RNA, 19 nt, Homo sapiens
  misc_RNA (1)...(19): siRNA sense strand
aagccauggaggagacaca

SEQ ID NO: 2391454 - RNA, 19 nt, Homo sapiens
  misc_RNA (1)...(19): siRNA sense strand
aguaccagccagaaggaga

SEQ ID NO: 2391455 - RNA, 19 nt, Homo sapiens
  misc_RNA (1)...(19): siRNA sense strand
agccagaaggagauggaca

SEQ ID NO: 2391456 - RNA, 19 nt, Homo sapiens
  misc_RNA (1)...(19): siRNA sense strand
ucaaggacguucuccgcua

SEQ ID NO: 2391457 - RNA, 19 nt, Homo sapiens
  misc_RNA (1)...(19): siRNA sense strand
agggagaguaccagccaga

SEQ ID NO: 2391458 - RNA, 19 nt, Homo sapiens
  misc_RNA (1)...(19): siRNA sense strand
ggagagaaagagaaggaau

SEQ ID NO: 2391459 - RNA, 19 nt, Homo sapiens
  misc_RNA (1)...(19): siRNA sense strand
gaugaugagcaaaggcaaa

SEQ ID NO: 2391460 - RNA, 19 nt, Homo sapiens
  misc_RNA (1)...(19): siRNA sense strand
cauugaugauccagacaaa

SEQ ID NO: 2391461 - RNA, 19 nt, Homo sapiens
  misc_RNA (1)...(19): siRNA sense strand
cugcaagcuuagugaguga

SEQ ID NO: 2391462 - RNA, 19 nt, Homo sapiens
  misc_RNA (1)...(19): siRNA sense strand
aggcagauuugguaagaga

SEQ ID NO: 2391463 - RNA, 19 nt, Homo sapiens
  misc_RNA (1)...(19): siRNA sense strand
uggcaaagagagaggaguu

SEQ ID NO: 2391464 - RNA, 19 nt, Homo sapiens
  misc_RNA (1)...(19): siRNA sense strand
gugaagauacaaagaccaa

SEQ ID NO: 2391465 - RNA, 19 nt, Homo sapiens
  misc_RNA (1)...(19): siRNA sense strand
gugaagugccacagauaga

SEQ ID NO: 2391466 - RNA, 19 nt, Homo sapiens
  misc_RNA (1)...(19): siRNA sense strand
caggagagaaagagaagga

SEQ ID NO: 2391467 - RNA, 19 nt, Homo sapiens
  misc_RNA (1)...(19): siRNA sense strand
ggacuacagaacuuggaaa

SEQ ID NO: 2391468 - RNA, 19 nt, Homo sapiens
  misc_RNA (1)...(19): siRNA sense strand
cuccagagcaugagguuau

SEQ ID NO: 2391469 - RNA, 19 nt, Homo sapiens
  misc_RNA (1)...(19): siRNA sense strand
gggugaucccucagaaaga

SEQ ID NO: 2391470 - RNA, 19 nt, Homo sapiens
  misc_RNA (1)...(19): siRNA sense strand
gugaagcguuaguugacaa

SEQ ID NO: 2391471 - RNA, 19 nt, Homo sapiens
  misc_RNA (1)...(19): siRNA sense strand
ggagcaaaucagaagacuu

SEQ ID NO: 2391472 - RNA, 19 nt, Homo sapiens
  misc_RNA (1)...(19): siRNA sense strand
ccacaaagacucugaggac

SEQ ID NO: 2391473 - RNA, 19 nt, Homo sapiens
  misc_RNA (1)...(19): siRNA sense strand
uggugaagugccacagaua

SEQ ID NO: 2391474 - RNA, 19 nt, Homo sapiens
  misc_RNA (1)...(19): siRNA sense strand
gguacaacaggcugggaga

SEQ ID NO: 2391475 - RNA, 19 nt, Homo sapiens
  misc_RNA (1)...(19): siRNA sense strand
aguuagccuuggugaacaa

SEQ ID NO: 2391476 - RNA, 19 nt, Homo sapiens
  misc_RNA (1)...(19): siRNA sense strand
cuuagugagugaagauaca

SEQ ID NO: 2391477 - RNA, 19 nt, Homo sapiens
  misc_RNA (1)...(19): siRNA sense strand
aguuagugcuacacaucaa

SEQ ID NO: 2391478 - RNA, 19 nt, Homo sapiens
  misc_RNA (1)...(19): siRNA sense strand
agaaagagaaggaaugcca

SEQ ID NO: 2391479 - RNA, 19 nt, Homo sapiens
  misc_RNA (1)...(19): siRNA sense strand
guugcuggaaagagugaaa

SEQ ID NO: 2391480 - RNA, 19 nt, Homo sapiens
  misc_RNA (1)...(19): siRNA sense strand
ccgagaugaguuuguuaua

SEQ ID NO: 2391481 - RNA, 19 nt, Homo sapiens
  misc_RNA (1)...(19): siRNA sense strand
uguaaauaguucagacaag

SEQ ID NO: 2391482 - RNA, 19 nt, Homo sapiens
  misc_RNA (1)...(19): siRNA sense strand
agauagucguuuaggauac

SEQ ID NO: 2391483 - RNA, 19 nt, Homo sapiens
  misc_RNA (1)...(19): siRNA sense strand
cguauugcagacagugaaa

SEQ ID NO: 2391484 - RNA, 19 nt, Homo sapiens
  misc_RNA (1)...(19): siRNA sense strand
gugaaauggacuuccucaa

SEQ ID NO: 2391485 - RNA, 19 nt, Homo sapiens
  misc_RNA (1)...(19): siRNA sense strand
gacuacagaacuuggaaau

SEQ ID NO: 2391486 - RNA, 19 nt, Homo sapiens
  misc_RNA (1)...(19): siRNA sense strand
uggacuggaugaacacaaa

SEQ ID NO: 2391487 - RNA, 19 nt, Homo sapiens
  misc_RNA (1)...(19): siRNA sense strand
ugagcaaaggcaaaugaua

SEQ ID NO: 2391488 - RNA, 19 nt, Homo sapiens
  misc_RNA (1)...(19): siRNA sense strand
gagaacauggacuggauga

SEQ ID NO: 2391489 - RNA, 19 nt, Homo sapiens
  misc_RNA (1)...(19): siRNA sense strand
ugcuauuggcaaagagaga

SEQ ID NO: 2391490 - RNA, 19 nt, Homo sapiens
  misc_RNA (1)...(19): siRNA sense strand
uugcauacagagaucauaa

SEQ ID NO: 2391491 - RNA, 19 nt, Homo sapiens
  misc_RNA (1)...(19): siRNA sense strand
ggccaauguauuucagaga

SEQ ID NO: 2391492 - RNA, 19 nt, Homo sapiens
  misc_RNA (1)...(19): siRNA sense strand
gauguaaauaguucagaca

SEQ ID NO: 2391493 - RNA, 19 nt, Homo sapiens
  misc_RNA (1)...(19): siRNA sense strand
caaagagagaggaguugau

SEQ ID NO: 2391494 - RNA, 19 nt, Homo sapiens
  misc_RNA (1)...(19): siRNA sense strand
gggaaggagaacauggacu

SEQ ID NO: 2391495 - RNA, 19 nt, Homo sapiens
  misc_RNA (1)...(19): siRNA sense strand
auaguucagacaagggaaa

SEQ ID NO: 2391496 - RNA, 19 nt, Homo sapiens
  misc_RNA (1)...(19): siRNA sense strand
uaauggaagauaaggcaga

SEQ ID NO: 2391497 - RNA, 19 nt, Homo sapiens
  misc_RNA (1)...(19): siRNA sense strand
guuauauucaggaagaaga

SEQ ID NO: 2391498 - RNA, 19 nt, Homo sapiens
  misc_RNA (1)...(19): siRNA sense strand
auaaguuagccuuggugaa

SEQ ID NO: 2391499 - RNA, 19 nt, Homo sapiens
  misc_RNA (1)...(19): siRNA sense strand
guuucauuucagaggauuu

SEQ ID NO: 2391500 - RNA, 19 nt, Homo sapiens
  misc_RNA (1)...(19): siRNA sense strand
ucucagauguuuacggacu

SEQ ID NO: 2391501 - RNA, 19 nt, Homo sapiens
  misc_RNA (1)...(19): siRNA sense strand
aggagaacauggacuggau

SEQ ID NO: 2391502 - RNA, 19 nt, Homo sapiens
  misc_RNA (1)...(19): siRNA sense strand
agaacaagaggguacaaca

SEQ ID NO: 2391503 - RNA, 19 nt, Homo sapiens
  misc_RNA (1)...(19): siRNA sense strand
acuuacagauuguggauuc

SEQ ID NO: 2391504 - RNA, 19 nt, Homo sapiens
  misc_RNA (1)...(19): siRNA sense strand
aagcuuagugagugaagau

SEQ ID NO: 2391505 - RNA, 19 nt, Homo sapiens
  misc_RNA (1)...(19): siRNA sense strand
agaugaugagcaaaggcaa

SEQ ID NO: 2391506 - RNA, 19 nt, Homo sapiens
  misc_RNA (1)...(19): siRNA sense strand
ucucuuugcauuagugcua

SEQ ID NO: 2391507 - RNA, 19 nt, Homo sapiens
  misc_RNA (1)...(19): siRNA sense strand
acaaagacucugaggacag

SEQ ID NO: 2391508 - RNA, 19 nt, Homo sapiens
  misc_RNA (1)...(19): siRNA sense strand
ggcagaauccuguggagca

SEQ ID NO: 2391509 - RNA, 19 nt, Homo sapiens
  misc_RNA (1)...(19): siRNA sense strand
uggaagauaaggcagauuu

SEQ ID NO: 2391510 - RNA, 19 nt, Homo sapiens
  misc_RNA (1)...(19): siRNA sense strand
ccgccaagugccugaacau

SEQ ID NO: 2391511 - RNA, 19 nt, Homo sapiens
  misc_RNA (1)...(19): siRNA sense strand
aagucuagggacaggaaga

SEQ ID NO: 2391512 - RNA, 19 nt, Homo sapiens
  misc_RNA (1)...(19): siRNA sense strand
acaggaagaugguuggcga

SEQ ID NO: 2391513 - RNA, 19 nt, Homo sapiens
  misc_RNA (1)...(19): siRNA sense strand
uccgugaagucuagggaca

SEQ ID NO: 2391514 - RNA, 19 nt, Homo sapiens
  misc_RNA (1)...(19): siRNA sense strand
cugaggaacuaaagggaaa

SEQ ID NO: 2391515 - RNA, 19 nt, Homo sapiens
  misc_RNA (1)...(19): siRNA sense strand
uugaagaggaagagcgaaa

SEQ ID NO: 2391516 - RNA, 19 nt, Homo sapiens
  misc_RNA (1)...(19): siRNA sense strand
aagcgaagagagagggaaa

SEQ ID NO: 2391517 - RNA, 19 nt, Homo sapiens
  misc_RNA (1)...(19): siRNA sense strand
agaaagaauugaacgggua

SEQ ID NO: 2391518 - RNA, 19 nt, Homo sapiens
  misc_RNA (1)...(19): siRNA sense strand
cgaaauaauugauaagcga

SEQ ID NO: 2391519 - RNA, 19 nt, Homo sapiens
  misc_RNA (1)...(19): siRNA sense strand
agaaaaugguucagaggaa

SEQ ID NO: 2391520 - RNA, 19 nt, Homo sapiens
  misc_RNA (1)...(19): siRNA sense strand
ucaucaaaguggaggugaa

SEQ ID NO: 2391521 - RNA, 19 nt, Homo sapiens
  misc_RNA (1)...(19): siRNA sense strand
cuagaucaauacagggaaa

SEQ ID NO: 2391522 - RNA, 19 nt, Homo sapiens
  misc_RNA (1)...(19): siRNA sense strand
ugaaggaagaggucagaaa

SEQ ID NO: 2391523 - RNA, 19 nt, Homo sapiens
  misc_RNA (1)...(19): siRNA sense strand
agaaaauaguggaagagaa

SEQ ID NO: 2391524 - RNA, 19 nt, Homo sapiens
  misc_RNA (1)...(19): siRNA sense strand
cagaaaaugaggaagauua

SEQ ID NO: 2391525 - RNA, 19 nt, Homo sapiens
  misc_RNA (1)...(19): siRNA sense strand
acugaaaagaccagagaaa

SEQ ID NO: 2391526 - RNA, 19 nt, Homo sapiens
  misc_RNA (1)...(19): siRNA sense strand
gagaagaagaaauagaaca

SEQ ID NO: 2391527 - RNA, 19 nt, Homo sapiens
  misc_RNA (1)...(19): siRNA sense strand
cuaagaaauaacagagaca

SEQ ID NO: 2391528 - RNA, 19 nt, Homo sapiens
  misc_RNA (1)...(19): siRNA sense strand
gcgaaaagcaaguaccaaa

SEQ ID NO: 2391529 - RNA, 19 nt, Homo sapiens
  misc_RNA (1)...(19): siRNA sense strand
ucaaaguggaggugaaaga

SEQ ID NO: 2391530 - RNA, 19 nt, Homo sapiens
  misc_RNA (1)...(19): siRNA sense strand
cagaggaaugaaagauaua

SEQ ID NO: 2391531 - RNA, 19 nt, Homo sapiens
  misc_RNA (1)...(19): siRNA sense strand
ugaaaagaccagagaaaga

SEQ ID NO: 2391532 - RNA, 19 nt, Homo sapiens
  misc_RNA (1)...(19): siRNA sense strand
ggaugaaaauagacagaga

SEQ ID NO: 2391533 - RNA, 19 nt, Homo sapiens
  misc_RNA (1)...(19): siRNA sense strand
augaagagcuugaccgaca

SEQ ID NO: 2391534 - RNA, 19 nt, Homo sapiens
  misc_RNA (1)...(19): siRNA sense strand
ugauagaggauuugcaaaa

SEQ ID NO: 2391535 - RNA, 19 nt, Homo sapiens
  misc_RNA (1)...(19): siRNA sense strand
agacaaugaacuuagacaa

SEQ ID NO: 2391536 - RNA, 19 nt, Homo sapiens
  misc_RNA (1)...(19): siRNA sense strand
guaaaagaaagguggcuua

SEQ ID NO: 2391537 - RNA, 19 nt, Homo sapiens
  misc_RNA (1)...(19): siRNA sense strand
auugauaagcgaagagaga

SEQ ID NO: 2391538 - RNA, 19 nt, Homo sapiens
  misc_RNA (1)...(19): siRNA sense strand
gauuuauacagcagaagaa

SEQ ID NO: 2391539 - RNA, 19 nt, Homo sapiens
  misc_RNA (1)...(19): siRNA sense strand
cgaauugaagaaauggaaa

SEQ ID NO: 2391540 - RNA, 19 nt, Homo sapiens
  misc_RNA (1)...(19): siRNA sense strand
gugagauugauguggcaaa

SEQ ID NO: 2391541 - RNA, 19 nt, Homo sapiens
  misc_RNA (1)...(19): siRNA sense strand
ucagaguaguugaugaaau

SEQ ID NO: 2391542 - RNA, 19 nt, Homo sapiens
  misc_RNA (1)...(19): siRNA sense strand
uguaaauacugccuguaaa

SEQ ID NO: 2391543 - RNA, 19 nt, Homo sapiens
  misc_RNA (1)...(19): siRNA sense strand
agacagagauuauugcaga

SEQ ID NO: 2391544 - RNA, 19 nt, Homo sapiens
  misc_RNA (1)...(19): siRNA sense strand
caaugaacggagaguguuu

SEQ ID NO: 2391545 - RNA, 19 nt, Homo sapiens
  misc_RNA (1)...(19): siRNA sense strand
ugaaaauguucgucaggaa

SEQ ID NO: 2391546 - RNA, 19 nt, Homo sapiens
  misc_RNA (1)...(19): siRNA sense strand
aagaaaaguauguggugaa

SEQ ID NO: 2391547 - RNA, 19 nt, Homo sapiens
  misc_RNA (1)...(19): siRNA sense strand
caucaaaguggaggugaaa

SEQ ID NO: 2391548 - RNA, 19 nt, Homo sapiens
  misc_RNA (1)...(19): siRNA sense strand
aacaagauguggagagguu

SEQ ID NO: 2391549 - RNA, 19 nt, Homo sapiens
  misc_RNA (1)...(19): siRNA sense strand
ggcauuaugugaaggcgaa

SEQ ID NO: 2391550 - RNA, 19 nt, Homo sapiens
  misc_RNA (1)...(19): siRNA sense strand
acaagaaacccgauuaaaa

SEQ ID NO: 2391551 - RNA, 19 nt, Homo sapiens
  misc_RNA (1)...(19): siRNA sense strand
cagaaggaagauaagcuaa

SEQ ID NO: 2391552 - RNA, 19 nt, Homo sapiens
  misc_RNA (1)...(19): siRNA sense strand
augaaaucaaucagggaau

SEQ ID NO: 2391553 - RNA, 19 nt, Homo sapiens
  misc_RNA (1)...(19): siRNA sense strand
aaauaguggaagagaaagu

SEQ ID NO: 2391554 - RNA, 19 nt, Homo sapiens
  misc_RNA (1)...(19): siRNA sense strand
aacuuaagggagaaagaaa

SEQ ID NO: 2391555 - RNA, 19 nt, Homo sapiens
  misc_RNA (1)...(19): siRNA sense strand
gcucgagaccucaugcaaa

SEQ ID NO: 2391556 - RNA, 19 nt, Homo sapiens
  misc_RNA (1)...(19): siRNA sense strand
ggucagaaaacuuaaagaa

SEQ ID NO: 2391557 - RNA, 19 nt, Homo sapiens
  misc_RNA (1)...(19): siRNA sense strand
aaagaaaaggcaacagaua

SEQ ID NO: 2391558 - RNA, 19 nt, Homo sapiens
  misc_RNA (1)...(19): siRNA sense strand
ucaaaugacuuaagagccu

SEQ ID NO: 2391559 - RNA, 19 nt, Homo sapiens
  misc_RNA (1)...(19): siRNA sense strand
agaagaacagcuaaaggaa

SEQ ID NO: 2391560 - RNA, 19 nt, Homo sapiens
  misc_RNA (1)...(19): siRNA sense strand
gaacuuaugaaaagagcua

SEQ ID NO: 2391561 - RNA, 19 nt, Homo sapiens
  misc_RNA (1)...(19): siRNA sense strand
auacagaaaaugaggaaga

SEQ ID NO: 2391562 - RNA, 19 nt, Homo sapiens
  misc_RNA (1)...(19): siRNA sense strand
agucaaauuucgaaguagu

SEQ ID NO: 2391563 - RNA, 19 nt, Homo sapiens
  misc_RNA (1)...(19): siRNA sense strand
gaacagggaagucgagcau

SEQ ID NO: 2391564 - RNA, 19 nt, Homo sapiens
  misc_RNA (1)...(19): siRNA sense strand
agaaaaggcaacagauauu

SEQ ID NO: 2391565 - RNA, 19 nt, Homo sapiens
  misc_RNA (1)...(19): siRNA sense strand
acagaggagaauagguaau

SEQ ID NO: 2391566 - RNA, 19 nt, Homo sapiens
  misc_RNA (1)...(19): siRNA sense strand
auacaagaaacccgauuaa

SEQ ID NO: 2391567 - RNA, 19 nt, Homo sapiens
  misc_RNA (1)...(19): siRNA sense strand
augcaaggaacuuaugaaa

SEQ ID NO: 2391568 - RNA, 19 nt, Homo sapiens
  misc_RNA (1)...(19): siRNA sense strand
ggaagaagugagugaggau

SEQ ID NO: 2391569 - RNA, 19 nt, Homo sapiens
  misc_RNA (1)...(19): siRNA sense strand
uguaaguuauggagaggaa

SEQ ID NO: 2391570 - RNA, 19 nt, Homo sapiens
  misc_RNA (1)...(19): siRNA sense strand
ggccaaagcuggaugagga

SEQ ID NO: 2391571 - RNA, 19 nt, Homo sapiens
  misc_RNA (1)...(19): siRNA sense strand
acucggaggaugaggaaga

SEQ ID NO: 2391572 - RNA, 19 nt, Homo sapiens
  misc_RNA (1)...(19): siRNA sense strand
cgaacuuguaugaggguca

SEQ ID NO: 2391573 - RNA, 19 nt, Homo sapiens
  misc_RNA (1)...(19): siRNA sense strand
ccaaagagggacaagggau

SEQ ID NO: 2391574 - RNA, 19 nt, Homo sapiens
  misc_RNA (1)...(19): siRNA sense strand
acucaaggcuaccggguga

SEQ ID NO: 2391575 - RNA, 19 nt, Homo sapiens
  misc_RNA (1)...(19): siRNA sense strand
aagagaauuuggagaaacu

SEQ ID NO: 2391576 - RNA, 19 nt, Homo sapiens
  misc_RNA (1)...(19): siRNA sense strand
ccaugaagaagaucaacaa

SEQ ID NO: 2391577 - RNA, 19 nt, Homo sapiens
  misc_RNA (1)...(19): siRNA sense strand
cagaauacauugcgccuga

SEQ ID NO: 2391578 - RNA, 19 nt, Homo sapiens
  misc_RNA (1)...(19): siRNA sense strand
aguuggagucagaggauga

SEQ ID NO: 2391579 - RNA, 19 nt, Homo sapiens
  misc_RNA (1)...(19): siRNA sense strand
cgucuauacuuugcggaaa

SEQ ID NO: 2391580 - RNA, 19 nt, Homo sapiens
  misc_RNA (1)...(19): siRNA sense strand
augaggaagaagugaguga

SEQ ID NO: 2391581 - RNA, 19 nt, Homo sapiens
  misc_RNA (1)...(19): siRNA sense strand
acaaagaaagauucccaaa

SEQ ID NO: 2391582 - RNA, 19 nt, Homo sapiens
  misc_RNA (1)...(19): siRNA sense strand
ccuaugaggugaagcagca

SEQ ID NO: 2391583 - RNA, 19 nt, Homo sapiens
  misc_RNA (1)...(19): siRNA sense strand
gugaggagaaggaggacca

SEQ ID NO: 2391584 - RNA, 19 nt, Homo sapiens
  misc_RNA (1)...(19): siRNA sense strand
gcacagagagcguaccaga

SEQ ID NO: 2391585 - RNA, 19 nt, Homo sapiens
  misc_RNA (1)...(19): siRNA sense strand
ccgcaagaucaccaagcaa

SEQ ID NO: 2391586 - RNA, 19 nt, Homo sapiens
  misc_RNA (1)...(19): siRNA sense strand
aaccauggcaggugggcua

SEQ ID NO: 2391587 - RNA, 19 nt, Homo sapiens
  misc_RNA (1)...(19): siRNA sense strand
cuucaagagaauuuggaga

SEQ ID NO: 2391588 - RNA, 19 nt, Homo sapiens
  misc_RNA (1)...(19): siRNA sense strand
gaggaugauacuagcuauu

SEQ ID NO: 2391589 - RNA, 19 nt, Homo sapiens
  misc_RNA (1)...(19): siRNA sense strand
uggaguacuuacacaacua

SEQ ID NO: 2391590 - RNA, 19 nt, Homo sapiens
  misc_RNA (1)...(19): siRNA sense strand
cggaggagcucuuugggca

SEQ ID NO: 2391591 - RNA, 19 nt, Homo sapiens
  misc_RNA (1)...(19): siRNA sense strand
acauggacucggaggauga

SEQ ID NO: 2391592 - RNA, 19 nt, Homo sapiens
  misc_RNA (1)...(19): siRNA sense strand
ggcaaggaugggcaagaaa

SEQ ID NO: 2391593 - RNA, 19 nt, Homo sapiens
  misc_RNA (1)...(19): siRNA sense strand
ggugcagucggcugagaaa

SEQ ID NO: 2391594 - RNA, 19 nt, Homo sapiens
  misc_RNA (1)...(19): siRNA sense strand
cggaggugguggagcugau

SEQ ID NO: 2391595 - RNA, 19 nt, Homo sapiens
  misc_RNA (1)...(19): siRNA sense strand
gcgucuauacuuugcggaa

SEQ ID NO: 2391596 - RNA, 19 nt, Homo sapiens
  misc_RNA (1)...(19): siRNA sense strand
aagaggacuucgagaccau

SEQ ID NO: 2391597 - RNA, 19 nt, Homo sapiens
  misc_RNA (1)...(19): siRNA sense strand
ggacaggacuucuccgcca

SEQ ID NO: 2391598 - RNA, 19 nt, Homo sapiens
  misc_RNA (1)...(19): siRNA sense strand
cugucaacaaagugaucaa

SEQ ID NO: 2391599 - RNA, 19 nt, Homo sapiens
  misc_RNA (1)...(19): siRNA sense strand
cuucguggagcgugacaua

SEQ ID NO: 2391600 - RNA, 19 nt, Homo sapiens
  misc_RNA (1)...(19): siRNA sense strand
guggaaacaagguggccau

SEQ ID NO: 2391601 - RNA, 19 nt, Homo sapiens
  misc_RNA (1)...(19): siRNA sense strand
cgucaggagaagcaucaaa

SEQ ID NO: 2391602 - RNA, 19 nt, Homo sapiens
  misc_RNA (1)...(19): siRNA sense strand
ggagugugcugucuggcaa

SEQ ID NO: 2391603 - RNA, 19 nt, Homo sapiens
  misc_RNA (1)...(19): siRNA sense strand
aggccuucguggagcguga

SEQ ID NO: 2391604 - RNA, 19 nt, Homo sapiens
  misc_RNA (1)...(19): siRNA sense strand
ugugcauggugauggagua

SEQ ID NO: 2391605 - RNA, 19 nt, Homo sapiens
  misc_RNA (1)...(19): siRNA sense strand
acgaacuucaagagaauuu

SEQ ID NO: 2391606 - RNA, 19 nt, Homo sapiens
  misc_RNA (1)...(19): siRNA sense strand
uucaagagaauuuggagaa

SEQ ID NO: 2391607 - RNA, 19 nt, Homo sapiens
  misc_RNA (1)...(19): siRNA sense strand
gccaaagcuggaugaggaa

SEQ ID NO: 2391608 - RNA, 19 nt, Homo sapiens
  misc_RNA (1)...(19): siRNA sense strand
cggacaaguaaccgcaaga

SEQ ID NO: 2391609 - RNA, 19 nt, Homo sapiens
  misc_RNA (1)...(19): siRNA sense strand
caguauccuuugacaguga

SEQ ID NO: 2391610 - RNA, 19 nt, Homo sapiens
  misc_RNA (1)...(19): siRNA sense strand
gggacaagggauuaaaugu

SEQ ID NO: 2391611 - RNA, 19 nt, Homo sapiens
  misc_RNA (1)...(19): siRNA sense strand
acacggaggugguggagcu

SEQ ID NO: 2391612 - RNA, 19 nt, Homo sapiens
  misc_RNA (1)...(19): siRNA sense strand
caguugagcagcugugaca

SEQ ID NO: 2391613 - RNA, 19 nt, Homo sapiens
  misc_RNA (1)...(19): siRNA sense strand
agaagaucaacaagcagaa

SEQ ID NO: 2391614 - RNA, 19 nt, Homo sapiens
  misc_RNA (1)...(19): siRNA sense strand
ggacaggugacuuggcagu

SEQ ID NO: 2391615 - RNA, 19 nt, Homo sapiens
  misc_RNA (1)...(19): siRNA sense strand
cccgggaauuccuggacaa

SEQ ID NO: 2391616 - RNA, 19 nt, Homo sapiens
  misc_RNA (1)...(19): siRNA sense strand
agcaugugguccuggaaau

SEQ ID NO: 2391617 - RNA, 19 nt, Homo sapiens
  misc_RNA (1)...(19): siRNA sense strand
cacaaauggaagagcgacu

SEQ ID NO: 2391618 - RNA, 19 nt, Homo sapiens
  misc_RNA (1)...(19): siRNA sense strand
cagauggagcccugagcuu

SEQ ID NO: 2391619 - RNA, 19 nt, Homo sapiens
  misc_RNA (1)...(19): siRNA sense strand
cgucccacacagagaguga

SEQ ID NO: 2391620 - RNA, 19 nt, Homo sapiens
  misc_RNA (1)...(19): siRNA sense strand
cgaggaagggccugagaac

SEQ ID NO: 2391621 - RNA, 19 nt, Homo sapiens
  misc_RNA (1)...(19): siRNA sense strand
cagaagugagccagagugu

SEQ ID NO: 2391622 - RNA, 19 nt, Homo sapiens
  misc_RNA (1)...(19): siRNA sense strand
aggaaaagcugcaucaguu

SEQ ID NO: 2391623 - RNA, 19 nt, Homo sapiens
  misc_RNA (1)...(19): siRNA sense strand
ggaugaggaagaagugagu

SEQ ID NO: 2391624 - RNA, 19 nt, Homo sapiens
  misc_RNA (1)...(19): siRNA sense strand
ggcaaccacaggaggguau

SEQ ID NO: 2391625 - RNA, 19 nt, Homo sapiens
  misc_RNA (1)...(19): siRNA sense strand
auccuuugacagugaaaua

SEQ ID NO: 2391626 - RNA, 19 nt, Homo sapiens
  misc_RNA (1)...(19): siRNA sense strand
cccaaaggccaccgcacaa

SEQ ID NO: 2391627 - RNA, 19 nt, Homo sapiens
  misc_RNA (1)...(19): siRNA sense strand
cccgagacugccuggauaa

SEQ ID NO: 2391628 - RNA, 19 nt, Homo sapiens
  misc_RNA (1)...(19): siRNA sense strand
ccugaagaguggaaacaag

SEQ ID NO: 2391629 - RNA, 19 nt, Homo sapiens
  misc_RNA (1)...(19): siRNA sense strand
aguaaaaggugcuuggaau

SEQ ID NO: 2391630 - RNA, 19 nt, Homo sapiens
  misc_RNA (1)...(19): siRNA sense strand
gaguuuguggagugguaua

SEQ ID NO: 2391631 - RNA, 19 nt, Homo sapiens
  misc_RNA (1)...(19): siRNA sense strand
cccugaaggcauggagaaa

SEQ ID NO: 2391632 - RNA, 19 nt, Homo sapiens
  misc_RNA (1)...(19): siRNA sense strand
cuagaguuuagcagaacaa

SEQ ID NO: 2391633 - RNA, 19 nt, Homo sapiens
  misc_RNA (1)...(19): siRNA sense strand
caggagugguuaaaaggaa

SEQ ID NO: 2391634 - RNA, 19 nt, Homo sapiens
  misc_RNA (1)...(19): siRNA sense strand
cuuggaaauuggaugcaca

SEQ ID NO: 2391635 - RNA, 19 nt, Homo sapiens
  misc_RNA (1)...(19): siRNA sense strand
agacugaagaagaagccuu

SEQ ID NO: 2391636 - RNA, 19 nt, Homo sapiens
  misc_RNA (1)...(19): siRNA sense strand
ugguauaaagacaaacaga

SEQ ID NO: 2391637 - RNA, 19 nt, Homo sapiens
  misc_RNA (1)...(19): siRNA sense strand
uugccaaaguggaggagaa

SEQ ID NO: 2391638 - RNA, 19 nt, Homo sapiens
  misc_RNA (1)...(19): siRNA sense strand
ccaaaguggaggagaagau

SEQ ID NO: 2391639 - RNA, 19 nt, Homo sapiens
  misc_RNA (1)...(19): siRNA sense strand
acagauuaacagucagaua

SEQ ID NO: 2391640 - RNA, 19 nt, Homo sapiens
  misc_RNA (1)...(19): siRNA sense strand
uagcaaaacacacgggaaa

SEQ ID NO: 2391641 - RNA, 19 nt, Homo sapiens
  misc_RNA (1)...(19): siRNA sense strand
ucaagaaggaagucgacaa

SEQ ID NO: 2391642 - RNA, 19 nt, Homo sapiens
  misc_RNA (1)...(19): siRNA sense strand
ugaaggagccggaugggaa

SEQ ID NO: 2391643 - RNA, 19 nt, Homo sapiens
  misc_RNA (1)...(19): siRNA sense strand
acgagaaaccuaagcaaaa

SEQ ID NO: 2391644 - RNA, 19 nt, Homo sapiens
  misc_RNA (1)...(19): siRNA sense strand
aggaagucgacaaggagaa

SEQ ID NO: 2391645 - RNA, 19 nt, Homo sapiens
  misc_RNA (1)...(19): siRNA sense strand
ugacaaaagggaagaguga

SEQ ID NO: 2391646 - RNA, 19 nt, Homo sapiens
  misc_RNA (1)...(19): siRNA sense strand
ucgaaggacagguggaaca

SEQ ID NO: 2391647 - RNA, 19 nt, Homo sapiens
  misc_RNA (1)...(19): siRNA sense strand
ccauggaggagcuggugaa

SEQ ID NO: 2391648 - RNA, 19 nt, Homo sapiens
  misc_RNA (1)...(19): siRNA sense strand
ccucagaagggaaguacau

SEQ ID NO: 2391649 - RNA, 19 nt, Homo sapiens
  misc_RNA (1)...(19): siRNA sense strand
cagaagaacuccaacccuu

SEQ ID NO: 2391650 - RNA, 19 nt, Homo sapiens
  misc_RNA (1)...(19): siRNA sense strand
cuggcgaagaagaggagaa

SEQ ID NO: 2391651 - RNA, 19 nt, Homo sapiens
  misc_RNA (1)...(19): siRNA sense strand
caucagucaccuagaguca

SEQ ID NO: 2391652 - RNA, 19 nt, Homo sapiens
  misc_RNA (1)...(19): siRNA sense strand
acaaaagggaagagugaca

SEQ ID NO: 2391653 - RNA, 19 nt, Homo sapiens
  misc_RNA (1)...(19): siRNA sense strand
aaauggaagggaaggaaga

SEQ ID NO: 2391654 - RNA, 19 nt, Homo sapiens
  misc_RNA (1)...(19): siRNA sense strand
aacugaauguggaggucaa

SEQ ID NO: 2391655 - RNA, 19 nt, Homo sapiens
  misc_RNA (1)...(19): siRNA sense strand
acagagagccacacgucaa

SEQ ID NO: 2391656 - RNA, 19 nt, Homo sapiens
  misc_RNA (1)...(19): siRNA sense strand
aaguggaggagaagaugaa

SEQ ID NO: 2391657 - RNA, 19 nt, Homo sapiens
  misc_RNA (1)...(19): siRNA sense strand
aggagaaagcggucacuga

SEQ ID NO: 2391658 - RNA, 19 nt, Homo sapiens
  misc_RNA (1)...(19): siRNA sense strand
ucguaucauucaugucaaa

SEQ ID NO: 2391659 - RNA, 19 nt, Homo sapiens
  misc_RNA (1)...(19): siRNA sense strand
agaacuugacagagagcca

SEQ ID NO: 2391660 - RNA, 19 nt, Homo sapiens
  misc_RNA (1)...(19): siRNA sense strand
acacuuaggcuuccggcua

SEQ ID NO: 2391661 - RNA, 19 nt, Homo sapiens
  misc_RNA (1)...(19): siRNA sense strand
ccacggugacaacggcaaa

SEQ ID NO: 2391662 - RNA, 19 nt, Homo sapiens
  misc_RNA (1)...(19): siRNA sense strand
auguggaggucaagaagga

SEQ ID NO: 2391663 - RNA, 19 nt, Homo sapiens
  misc_RNA (1)...(19): siRNA sense strand
ggaaaucuccggaagacca

SEQ ID NO: 2391664 - RNA, 19 nt, Homo sapiens
  misc_RNA (1)...(19): siRNA sense strand
ucuguaugucucugaguua

SEQ ID NO: 2391665 - RNA, 19 nt, Homo sapiens
  misc_RNA (1)...(19): siRNA sense strand
ggcauuaccgcgacgacaa

SEQ ID NO: 2391666 - RNA, 19 nt, Homo sapiens
  misc_RNA (1)...(19): siRNA sense strand
ugcuggaaauggaagggaa

SEQ ID NO: 2391667 - RNA, 19 nt, Homo sapiens
  misc_RNA (1)...(19): siRNA sense strand
cugaguuagagaagcagua

SEQ ID NO: 2391668 - RNA, 19 nt, Homo sapiens
  misc_RNA (1)...(19): siRNA sense strand
ugaauguggaggucaagaa

SEQ ID NO: 2391669 - RNA, 19 nt, Homo sapiens
  misc_RNA (1)...(19): siRNA sense strand
ggugacaacggcaaagaca

SEQ ID NO: 2391670 - RNA, 19 nt, Homo sapiens
  misc_RNA (1)...(19): siRNA sense strand
ugacgagaaaccuaagcaa

SEQ ID NO: 2391671 - RNA, 19 nt, Homo sapiens
  misc_RNA (1)...(19): siRNA sense strand
cugaaaaugacuuagaaga

SEQ ID NO: 2391672 - RNA, 19 nt, Homo sapiens
  misc_RNA (1)...(19): siRNA sense strand
aggaagacgcccagaaggu

SEQ ID NO: 2391673 - RNA, 19 nt, Homo sapiens
  misc_RNA (1)...(19): siRNA sense strand
cgggaugggugcaaggaug

SEQ ID NO: 2391674 - RNA, 19 nt, Homo sapiens
  misc_RNA (1)...(19): siRNA sense strand
cagaccaccucgaccgcua

SEQ ID NO: 2391675 - RNA, 19 nt, Homo sapiens
  misc_RNA (1)...(19): siRNA sense strand
agcccauagacuugacaaa

SEQ ID NO: 2391676 - RNA, 19 nt, Homo sapiens
  misc_RNA (1)...(19): siRNA sense strand
uaacagucagauagcacaa

SEQ ID NO: 2391677 - RNA, 19 nt, Homo sapiens
  misc_RNA (1)...(19): siRNA sense strand
accaagucaccgucagaaa

SEQ ID NO: 2391678 - RNA, 19 nt, Homo sapiens
  misc_RNA (1)...(19): siRNA sense strand
acgacaaccaugagaccga

SEQ ID NO: 2391679 - RNA, 19 nt, Homo sapiens
  misc_RNA (1)...(19): siRNA sense strand
auaccagcuucgaaggaca

SEQ ID NO: 2391680 - RNA, 19 nt, Homo sapiens
  misc_RNA (1)...(19): siRNA sense strand
uggaggacuguaugggcaa

SEQ ID NO: 2391681 - RNA, 19 nt, Homo sapiens
  misc_RNA (1)...(19): siRNA sense strand
aguaaaggagccagagaaa

SEQ ID NO: 2391682 - RNA, 19 nt, Homo sapiens
  misc_RNA (1)...(19): siRNA sense strand
ggaccaaagcacuggccaa

SEQ ID NO: 2391683 - RNA, 19 nt, Homo sapiens
  misc_RNA (1)...(19): siRNA sense strand
cuucgaacugcgagggaaa

SEQ ID NO: 2391684 - RNA, 19 nt, Homo sapiens
  misc_RNA (1)...(19): siRNA sense strand
cagagaaagcagugcccaa

SEQ ID NO: 2391685 - RNA, 19 nt, Homo sapiens
  misc_RNA (1)...(19): siRNA sense strand
caacagaaauauucaggga

SEQ ID NO: 2391686 - RNA, 19 nt, Homo sapiens
  misc_RNA (1)...(19): siRNA sense strand
ucuaauuucuggugcggaa

SEQ ID NO: 2391687 - RNA, 19 nt, Homo sapiens
  misc_RNA (1)...(19): siRNA sense strand
acagagagcacuauggcua

SEQ ID NO: 2391688 - RNA, 19 nt, Homo sapiens
  misc_RNA (1)...(19): siRNA sense strand
acagaaauauucagggagu

SEQ ID NO: 2391689 - RNA, 19 nt, Homo sapiens
  misc_RNA (1)...(19): siRNA sense strand
aggaagacaucgagaaccu

SEQ ID NO: 2391690 - RNA, 19 nt, Homo sapiens
  misc_RNA (1)...(19): siRNA sense strand
uggaagucccggaagcaaa

SEQ ID NO: 2391691 - RNA, 19 nt, Homo sapiens
  misc_RNA (1)...(19): siRNA sense strand
agucuuacccugaugaaau

SEQ ID NO: 2391692 - RNA, 19 nt, Homo sapiens
  misc_RNA (1)...(19): siRNA sense strand
uugaagacgaugugcguuu

SEQ ID NO: 2391693 - RNA, 19 nt, Homo sapiens
  misc_RNA (1)...(19): siRNA sense strand
aaguaaaggagccagagaa

SEQ ID NO: 2391694 - RNA, 19 nt, Homo sapiens
  misc_RNA (1)...(19): siRNA sense strand
ccuacuggacccugggcua

SEQ ID NO: 2391695 - RNA, 19 nt, Homo sapiens
  misc_RNA (1)...(19): siRNA sense strand
cugcagaacccuugcucau

SEQ ID NO: 2391696 - RNA, 19 nt, Homo sapiens
  misc_RNA (1)...(19): siRNA sense strand
ggucaagauugucgaggcu

SEQ ID NO: 2391697 - RNA, 19 nt, Homo sapiens
  misc_RNA (1)...(19): siRNA sense strand
acucggaggacgacggaga

SEQ ID NO: 2391698 - RNA, 19 nt, Homo sapiens
  misc_RNA (1)...(19): siRNA sense strand
cagucuggaaagagguaau

SEQ ID NO: 2391699 - RNA, 19 nt, Homo sapiens
  misc_RNA (1)...(19): siRNA sense strand
caguuuaagaagaagcuga

SEQ ID NO: 2391700 - RNA, 19 nt, Homo sapiens
  misc_RNA (1)...(19): siRNA sense strand
uggacugggaacugauuua

SEQ ID NO: 2391701 - RNA, 19 nt, Homo sapiens
  misc_RNA (1)...(19): siRNA sense strand
cgagaauggaagaggacag

SEQ ID NO: 2391702 - RNA, 19 nt, Homo sapiens
  misc_RNA (1)...(19): siRNA sense strand
uugaaaugcugccuggcua

SEQ ID NO: 2391703 - RNA, 19 nt, Homo sapiens
  misc_RNA (1)...(19): siRNA sense strand
uagccgaguacaaggagua

SEQ ID NO: 2391704 - RNA, 19 nt, Homo sapiens
  misc_RNA (1)...(19): siRNA sense strand
agcugaaggcacugaauau

SEQ ID NO: 2391705 - RNA, 19 nt, Homo sapiens
  misc_RNA (1)...(19): siRNA sense strand
gaugaaacuacgacaggca

SEQ ID NO: 2391706 - RNA, 19 nt, Homo sapiens
  misc_RNA (1)...(19): siRNA sense strand
ccucaaacgcagaaaggac

SEQ ID NO: 2391707 - RNA, 19 nt, Homo sapiens
  misc_RNA (1)...(19): siRNA sense strand
ucgaggcuguggauggaaa

SEQ ID NO: 2391708 - RNA, 19 nt, Homo sapiens
  misc_RNA (1)...(19): siRNA sense strand
ggaaagagguaauugaucg

SEQ ID NO: 2391709 - RNA, 19 nt, Homo sapiens
  misc_RNA (1)...(19): siRNA sense strand
caucugggacaaugagaca

SEQ ID NO: 2391710 - RNA, 19 nt, Homo sapiens
  misc_RNA (1)...(19): siRNA sense strand
uauguggaguggaggccua

SEQ ID NO: 2391711 - RNA, 19 nt, Homo sapiens
  misc_RNA (1)...(19): siRNA sense strand
cccaagagcaggauggcca

SEQ ID NO: 2391712 - RNA, 19 nt, Homo sapiens
  misc_RNA (1)...(19): siRNA sense strand
gggugaaaucggcugcuuu

SEQ ID NO: 2391713 - RNA, 19 nt, Homo sapiens
  misc_RNA (1)...(19): siRNA sense strand
gggagaacaucgaggccaa

SEQ ID NO: 2391714 - RNA, 19 nt, Homo sapiens
  misc_RNA (1)...(19): siRNA sense strand
ccaacauggaagagggaau

SEQ ID NO: 2391715 - RNA, 19 nt, Homo sapiens
  misc_RNA (1)...(19): siRNA sense strand
ggaagaucgugcagcgcua

SEQ ID NO: 2391716 - RNA, 19 nt, Homo sapiens
  misc_RNA (1)...(19): siRNA sense strand
ggaacaucgucaaggccaa

SEQ ID NO: 2391717 - RNA, 19 nt, Homo sapiens
  misc_RNA (1)...(19): siRNA sense strand
uggcuuugauggaggacaa

SEQ ID NO: 2391718 - RNA, 19 nt, Homo sapiens
  misc_RNA (1)...(19): siRNA sense strand
gcgccaaggagcagcacaa

SEQ ID NO: 2391719 - RNA, 19 nt, Homo sapiens
  misc_RNA (1)...(19): siRNA sense strand
ucauagacaagaaggacaa

SEQ ID NO: 2391720 - RNA, 19 nt, Homo sapiens
  misc_RNA (1)...(19): siRNA sense strand
uggccauggcagagauuua

SEQ ID NO: 2391721 - RNA, 19 nt, Homo sapiens
  misc_RNA (1)...(19): siRNA sense strand
ccaucaagcagcaaaucaa

SEQ ID NO: 2391722 - RNA, 19 nt, Homo sapiens
  misc_RNA (1)...(19): siRNA sense strand
agucugugguggagaagau

SEQ ID NO: 2391723 - RNA, 19 nt, Homo sapiens
  misc_RNA (1)...(19): siRNA sense strand
ucacaauccagguagggaa

SEQ ID NO: 2391724 - RNA, 19 nt, Homo sapiens
  misc_RNA (1)...(19): siRNA sense strand
gaguauaagcacuucguga

SEQ ID NO: 2391725 - RNA, 19 nt, Homo sapiens
  misc_RNA (1)...(19): siRNA sense strand
agaagauccuggaggccuu

SEQ ID NO: 2391726 - RNA, 19 nt, Homo sapiens
  misc_RNA (1)...(19): siRNA sense strand
cccuuuaugaagagcguua

SEQ ID NO: 2391727 - RNA, 19 nt, Homo sapiens
  misc_RNA (1)...(19): siRNA sense strand
ggguggugacuguggccua

SEQ ID NO: 2391728 - RNA, 19 nt, Homo sapiens
  misc_RNA (1)...(19): siRNA sense strand
cagaaugaguucaacacca

SEQ ID NO: 2391729 - RNA, 19 nt, Homo sapiens
  misc_RNA (1)...(19): siRNA sense strand
ccacaguucucuacggcca

SEQ ID NO: 2391730 - RNA, 19 nt, Homo sapiens
  misc_RNA (1)...(19): siRNA sense strand
ucagcgagcaagagaugaa

SEQ ID NO: 2391731 - RNA, 19 nt, Homo sapiens
  misc_RNA (1)...(19): siRNA sense strand
aggaaauaccagaaugagu

SEQ ID NO: 2391732 - RNA, 19 nt, Homo sapiens
  misc_RNA (1)...(19): siRNA sense strand
ccaagagggagaaguggau

SEQ ID NO: 2391733 - RNA, 19 nt, Homo sapiens
  misc_RNA (1)...(19): siRNA sense strand
ccuccagcacacagagcua

SEQ ID NO: 2391734 - RNA, 19 nt, Homo sapiens
  misc_RNA (1)...(19): siRNA sense strand
ugaaggagcugcuggugga

SEQ ID NO: 2391735 - RNA, 19 nt, Homo sapiens
  misc_RNA (1)...(19): siRNA sense strand
cuacacaucuggaagacca

SEQ ID NO: 2391736 - RNA, 19 nt, Homo sapiens
  misc_RNA (1)...(19): siRNA sense strand
ccaauguggccauggcaga

SEQ ID NO: 2391737 - RNA, 19 nt, Homo sapiens
  misc_RNA (1)...(19): siRNA sense strand
uggccgaggagucgaggaa

SEQ ID NO: 2391738 - RNA, 19 nt, Homo sapiens
  misc_RNA (1)...(19): siRNA sense strand
cagauggaggagauggaau

SEQ ID NO: 2391739 - RNA, 19 nt, Homo sapiens
  misc_RNA (1)...(19): siRNA sense strand
acaacaucuacgagugcua

SEQ ID NO: 2391740 - RNA, 19 nt, Homo sapiens
  misc_RNA (1)...(19): siRNA sense strand
acgcguaccuggcgcucaa

SEQ ID NO: 2391741 - RNA, 19 nt, Homo sapiens
  misc_RNA (1)...(19): siRNA sense strand
agaaguggaucaagcacca

SEQ ID NO: 2391742 - RNA, 19 nt, Homo sapiens
  misc_RNA (1)...(19): siRNA sense strand
agccacugccugacagaua

SEQ ID NO: 2391743 - RNA, 19 nt, Homo sapiens
  misc_RNA (1)...(19): siRNA sense strand
gagaugucugugaggguca

SEQ ID NO: 2391744 - RNA, 19 nt, Homo sapiens
  misc_RNA (1)...(19): siRNA sense strand
gagcaacgcaucagcgcca

SEQ ID NO: 2391745 - RNA, 19 nt, Homo sapiens
  misc_RNA (1)...(19): siRNA sense strand
caguggacuucuucaucaa

SEQ ID NO: 2391746 - RNA, 19 nt, Homo sapiens
  misc_RNA (1)...(19): siRNA sense strand
uggaagagggaauuagcuu

SEQ ID NO: 2391747 - RNA, 19 nt, Homo sapiens
  misc_RNA (1)...(19): siRNA sense strand
gcaagaagcuuaacacgcu

SEQ ID NO: 2391748 - RNA, 19 nt, Homo sapiens
  misc_RNA (1)...(19): siRNA sense strand
uggccagcgucaacaacua

SEQ ID NO: 2391749 - RNA, 19 nt, Homo sapiens
  misc_RNA (1)...(19): siRNA sense strand
aagagggagaaguggauca

SEQ ID NO: 2391750 - RNA, 19 nt, Homo sapiens
  misc_RNA (1)...(19): siRNA sense strand
acgucgaccuugagugguu

SEQ ID NO: 2391751 - RNA, 19 nt, Homo sapiens
  misc_RNA (1)...(19): siRNA sense strand
gagugaaagacuuggacac

SEQ ID NO: 2391752 - RNA, 19 nt, Homo sapiens
  misc_RNA (1)...(19): siRNA sense strand
gcaagaaggugcucccgga

SEQ ID NO: 2391753 - RNA, 19 nt, Homo sapiens
  misc_RNA (1)...(19): siRNA sense strand
gugcacaguccuacgcgua

SEQ ID NO: 2391754 - RNA, 19 nt, Homo sapiens
  misc_RNA (1)...(19): siRNA sense strand
gcaugcagguggugagcag

SEQ ID NO: 2391755 - RNA, 19 nt, Homo sapiens
  misc_RNA (1)...(19): siRNA sense strand
cagcagcauuucuggacca

SEQ ID NO: 2391756 - RNA, 19 nt, Homo sapiens
  misc_RNA (1)...(19): siRNA sense strand
ggaauuagcuuguucuccu

SEQ ID NO: 2391757 - RNA, 19 nt, Homo sapiens
  misc_RNA (1)...(19): siRNA sense strand
aagaaggugcucccggaaa

SEQ ID NO: 2391758 - RNA, 19 nt, Homo sapiens
  misc_RNA (1)...(19): siRNA sense strand
gugaagaugaugaggaaga

SEQ ID NO: 2391759 - RNA, 19 nt, Homo sapiens
  misc_RNA (1)...(19): siRNA sense strand
ggaaauugcuuuaagggca

SEQ ID NO: 2391760 - RNA, 19 nt, Homo sapiens
  misc_RNA (1)...(19): siRNA sense strand
gauagaggucacugggaaa

SEQ ID NO: 2391761 - RNA, 19 nt, Homo sapiens
  misc_RNA (1)...(19): siRNA sense strand
gaacaaaaggcaagggaga

SEQ ID NO: 2391762 - RNA, 19 nt, Homo sapiens
  misc_RNA (1)...(19): siRNA sense strand
cagcaagaagaguuggaaa

SEQ ID NO: 2391763 - RNA, 19 nt, Homo sapiens
  misc_RNA (1)...(19): siRNA sense strand
cggcaggaguucagcaaca

SEQ ID NO: 2391764 - RNA, 19 nt, Homo sapiens
  misc_RNA (1)...(19): siRNA sense strand
cgaaaggaucacaagcuaa

SEQ ID NO: 2391765 - RNA, 19 nt, Homo sapiens
  misc_RNA (1)...(19): siRNA sense strand
gugcuaaagugauggcuga

SEQ ID NO: 2391766 - RNA, 19 nt, Homo sapiens
  misc_RNA (1)...(19): siRNA sense strand
ugauagaggucacugggaa

SEQ ID NO: 2391767 - RNA, 19 nt, Homo sapiens
  misc_RNA (1)...(19): siRNA sense strand
ggacaguagcaguggcagu

SEQ ID NO: 2391768 - RNA, 19 nt, Homo sapiens
  misc_RNA (1)...(19): siRNA sense strand
aaagaaaagcuaugaggaa

SEQ ID NO: 2391769 - RNA, 19 nt, Homo sapiens
  misc_RNA (1)...(19): siRNA sense strand
cagcaugggucuggggaaa

SEQ ID NO: 2391770 - RNA, 19 nt, Homo sapiens
  misc_RNA (1)...(19): siRNA sense strand
gcugauuacacucuagaaa

SEQ ID NO: 2391771 - RNA, 19 nt, Homo sapiens
  misc_RNA (1)...(19): siRNA sense strand
aagaaacauacgaaagcua

SEQ ID NO: 2391772 - RNA, 19 nt, Homo sapiens
  misc_RNA (1)...(19): siRNA sense strand
gagcacaagacgauggcau

SEQ ID NO: 2391773 - RNA, 19 nt, Homo sapiens
  misc_RNA (1)...(19): siRNA sense strand
ccacagauguacaggcaag

SEQ ID NO: 2391774 - RNA, 19 nt, Homo sapiens
  misc_RNA (1)...(19): siRNA sense strand
ccaaagcagcacagcaaga

SEQ ID NO: 2391775 - RNA, 19 nt, Homo sapiens
  misc_RNA (1)...(19): siRNA sense strand
cuggagagguuuaagacca

SEQ ID NO: 2391776 - RNA, 19 nt, Homo sapiens
  misc_RNA (1)...(19): siRNA sense strand
acaacaagccugaagaagu

SEQ ID NO: 2391777 - RNA, 19 nt, Homo sapiens
  misc_RNA (1)...(19): siRNA sense strand
ggaguuucggagagaguuu

SEQ ID NO: 2391778 - RNA, 19 nt, Homo sapiens
  misc_RNA (1)...(19): siRNA sense strand
agaaaagcuaugaggaaga

SEQ ID NO: 2391779 - RNA, 19 nt, Homo sapiens
  misc_RNA (1)...(19): siRNA sense strand
augaugaggaagaagagaa

SEQ ID NO: 2391780 - RNA, 19 nt, Homo sapiens
  misc_RNA (1)...(19): siRNA sense strand
agaaggagagcuuggccaa

SEQ ID NO: 2391781 - RNA, 19 nt, Homo sapiens
  misc_RNA (1)...(19): siRNA sense strand
ucuugaaugaugagcacaa

SEQ ID NO: 2391782 - RNA, 19 nt, Homo sapiens
  misc_RNA (1)...(19): siRNA sense strand
ccgccuucagccagagaaa

SEQ ID NO: 2391783 - RNA, 19 nt, Homo sapiens
  misc_RNA (1)...(19): siRNA sense strand
gccuggagcagcagaggaa

SEQ ID NO: 2391784 - RNA, 19 nt, Homo sapiens
  misc_RNA (1)...(19): siRNA sense strand
uagcaguggcagugaggau

SEQ ID NO: 2391785 - RNA, 19 nt, Homo sapiens
  misc_RNA (1)...(19): siRNA sense strand
cagaaguggguucgaaaca

SEQ ID NO: 2391786 - RNA, 19 nt, Homo sapiens
  misc_RNA (1)...(19): siRNA sense strand
gcuaaccaaggcugagaaa

SEQ ID NO: 2391787 - RNA, 19 nt, Homo sapiens
  misc_RNA (1)...(19): siRNA sense strand
aagcuaugaggaagacaaa

SEQ ID NO: 2391788 - RNA, 19 nt, Homo sapiens
  misc_RNA (1)...(19): siRNA sense strand
ccauugggaggaaguguaa

SEQ ID NO: 2391789 - RNA, 19 nt, Homo sapiens
  misc_RNA (1)...(19): siRNA sense strand
gggugguggaugaucuaaa

SEQ ID NO: 2391790 - RNA, 19 nt, Homo sapiens
  misc_RNA (1)...(19): siRNA sense strand
gggaggaaguguaagcucu

SEQ ID NO: 2391791 - RNA, 19 nt, Homo sapiens
  misc_RNA (1)...(19): siRNA sense strand
uaccaaagcagcacagcaa

SEQ ID NO: 2391792 - RNA, 19 nt, Homo sapiens
  misc_RNA (1)...(19): siRNA sense strand
cagcacagcaagaagaguu

SEQ ID NO: 2391793 - RNA, 19 nt, Homo sapiens
  misc_RNA (1)...(19): siRNA sense strand
acagguagaccgaagaaaa

SEQ ID NO: 2391794 - RNA, 19 nt, Homo sapiens
  misc_RNA (1)...(19): siRNA sense strand
gaggauagcaccuuggcuu

SEQ ID NO: 2391795 - RNA, 19 nt, Homo sapiens
  misc_RNA (1)...(19): siRNA sense strand
ggguauaccguuauggcca

SEQ ID NO: 2391796 - RNA, 19 nt, Homo sapiens
  misc_RNA (1)...(19): siRNA sense strand
ggagagaguuugagaaggc

SEQ ID NO: 2391797 - RNA, 19 nt, Homo sapiens
  misc_RNA (1)...(19): siRNA sense strand
ccuuggaaaacgagaagua

SEQ ID NO: 2391798 - RNA, 19 nt, Homo sapiens
  misc_RNA (1)...(19): siRNA sense strand
cuuugaagggugaugaaaa

SEQ ID NO: 2391799 - RNA, 19 nt, Homo sapiens
  misc_RNA (1)...(19): siRNA sense strand
aggauaaagacgaugaugu

SEQ ID NO: 2391800 - RNA, 19 nt, Homo sapiens
  misc_RNA (1)...(19): siRNA sense strand
cuccaaugaugaugaggau

SEQ ID NO: 2391801 - RNA, 19 nt, Homo sapiens
  misc_RNA (1)...(19): siRNA sense strand
gggucuuugucaaccuaaa

SEQ ID NO: 2391802 - RNA, 19 nt, Homo sapiens
  misc_RNA (1)...(19): siRNA sense strand
gugugaagcuuggggacaa

SEQ ID NO: 2391803 - RNA, 19 nt, Homo sapiens
  misc_RNA (1)...(19): siRNA sense strand
cacggaaagagguggaaaa

SEQ ID NO: 2391804 - RNA, 19 nt, Homo sapiens
  misc_RNA (1)...(19): siRNA sense strand
accaaagguuccugaagau

SEQ ID NO: 2391805 - RNA, 19 nt, Homo sapiens
  misc_RNA (1)...(19): siRNA sense strand
cgggacagcucucggaacu

SEQ ID NO: 2391806 - RNA, 19 nt, Homo sapiens
  misc_RNA (1)...(19): siRNA sense strand
aagaugaugaggaagaaga

SEQ ID NO: 2391807 - RNA, 19 nt, Homo sapiens
  misc_RNA (1)...(19): siRNA sense strand
cacagaaguggguucgaaa

SEQ ID NO: 2391808 - RNA, 19 nt, Homo sapiens
  misc_RNA (1)...(19): siRNA sense strand
gaucuaaauccaaugcuga

SEQ ID NO: 2391809 - RNA, 19 nt, Homo sapiens
  misc_RNA (1)...(19): siRNA sense strand
gcucuugaaccgaaaggau

SEQ ID NO: 2391810 - RNA, 19 nt, Homo sapiens
  misc_RNA (1)...(19): siRNA sense strand
gcagcagaggaaagauuau

SEQ ID NO: 2391811 - RNA, 19 nt, Homo sapiens
  misc_RNA (1)...(19): siRNA sense strand
uccaagauccagcgagauu

SEQ ID NO: 2391812 - RNA, 19 nt, Homo sapiens
  misc_RNA (1)...(19): siRNA sense strand
uggaaaaccuacugcacuu

SEQ ID NO: 2391813 - RNA, 19 nt, Homo sapiens
  misc_RNA (1)...(19): siRNA sense strand
gcaaguuccuacagggcgu

SEQ ID NO: 2391814 - RNA, 19 nt, Homo sapiens
  misc_RNA (1)...(19): siRNA sense strand
aauuaaugcuggugagagc

SEQ ID NO: 2391815 - RNA, 19 nt, Homo sapiens
  misc_RNA (1)...(19): siRNA sense strand
ggacaaaagggacguacau

SEQ ID NO: 2391816 - RNA, 19 nt, Homo sapiens
  misc_RNA (1)...(19): siRNA sense strand
gggucuuggcccaggaagu

SEQ ID NO: 2391817 - RNA, 19 nt, Homo sapiens
  misc_RNA (1)...(19): siRNA sense strand
gggcaacuggcaaaccaaa

SEQ ID NO: 2391818 - RNA, 19 nt, Homo sapiens
  misc_RNA (1)...(19): siRNA sense strand
ugaugaggauaaagacgau

SEQ ID NO: 2391819 - RNA, 19 nt, Homo sapiens
  misc_RNA (1)...(19): siRNA sense strand
gaaggaagcgccuggagca

SEQ ID NO: 2391820 - RNA, 19 nt, Homo sapiens
  misc_RNA (1)...(19): siRNA sense strand
aaagcuaugaggaagacaa

SEQ ID NO: 2391821 - RNA, 19 nt, Homo sapiens
  misc_RNA (1)...(19): siRNA sense strand
cagauguacaggcaagaau

SEQ ID NO: 2391822 - RNA, 19 nt, Homo sapiens
  misc_RNA (1)...(19): siRNA sense strand
agagaucaucagugagcuu

SEQ ID NO: 2391823 - RNA, 19 nt, Homo sapiens
  misc_RNA (1)...(19): siRNA sense strand
gcgaggaggaggaggagaa

SEQ ID NO: 2391824 - RNA, 19 nt, Homo sapiens
  misc_RNA (1)...(19): siRNA sense strand
aggcagagcgaaagggcaa

SEQ ID NO: 2391825 - RNA, 19 nt, Homo sapiens
  misc_RNA (1)...(19): siRNA sense strand
acuuggaccuugauggaaa

SEQ ID NO: 2391826 - RNA, 19 nt, Homo sapiens
  misc_RNA (1)...(19): siRNA sense strand
guugggaagacgagcaaua

SEQ ID NO: 2391827 - RNA, 19 nt, Homo sapiens
  misc_RNA (1)...(19): siRNA sense strand
cuauguugguucugacaaa

SEQ ID NO: 2391828 - RNA, 19 nt, Homo sapiens
  misc_RNA (1)...(19): siRNA sense strand
cggcgaaccaagauagcaa

SEQ ID NO: 2391829 - RNA, 19 nt, Homo sapiens
  misc_RNA (1)...(19): siRNA sense strand
gagcaaucaggcaggacaa

SEQ ID NO: 2391830 - RNA, 19 nt, Homo sapiens
  misc_RNA (1)...(19): siRNA sense strand
gcccaaaagaagaaauaua

SEQ ID NO: 2391831 - RNA, 19 nt, Homo sapiens
  misc_RNA (1)...(19): siRNA sense strand
gcuucaugaucgaguguga

SEQ ID NO: 2391832 - RNA, 19 nt, Homo sapiens
  misc_RNA (1)...(19): siRNA sense strand
agaaaggccugaagcccaa

SEQ ID NO: 2391833 - RNA, 19 nt, Homo sapiens
  misc_RNA (1)...(19): siRNA sense strand
gugaagaccgggagcccua

SEQ ID NO: 2391834 - RNA, 19 nt, Homo sapiens
  misc_RNA (1)...(19): siRNA sense strand
agagauugggaaaggagaa

SEQ ID NO: 2391835 - RNA, 19 nt, Homo sapiens
  misc_RNA (1)...(19): siRNA sense strand
uggaagggguugaaggcaa

SEQ ID NO: 2391836 - RNA, 19 nt, Homo sapiens
  misc_RNA (1)...(19): siRNA sense strand
gagcgaaagggcaaggaga

SEQ ID NO: 2391837 - RNA, 19 nt, Homo sapiens
  misc_RNA (1)...(19): siRNA sense strand
uugacgagagauugggaaa

SEQ ID NO: 2391838 - RNA, 19 nt, Homo sapiens
  misc_RNA (1)...(19): siRNA sense strand
aggcuaggcugauggcaga

SEQ ID NO: 2391839 - RNA, 19 nt, Homo sapiens
  misc_RNA (1)...(19): siRNA sense strand
auacaacagaugaggacau

SEQ ID NO: 2391840 - RNA, 19 nt, Homo sapiens
  misc_RNA (1)...(19): siRNA sense strand
uggcagaacaggugaugga

SEQ ID NO: 2391841 - RNA, 19 nt, Homo sapiens
  misc_RNA (1)...(19): siRNA sense strand
gcuucaaggaugcagagua

SEQ ID NO: 2391842 - RNA, 19 nt, Homo sapiens
  misc_RNA (1)...(19): siRNA sense strand
gcgggaagagggagaaagu

SEQ ID NO: 2391843 - RNA, 19 nt, Homo sapiens
  misc_RNA (1)...(19): siRNA sense strand
ucuguugguaugugggaaa

SEQ ID NO: 2391844 - RNA, 19 nt, Homo sapiens
  misc_RNA (1)...(19): siRNA sense strand
gaaccgagagcgaggagga

SEQ ID NO: 2391845 - RNA, 19 nt, Homo sapiens
  misc_RNA (1)...(19): siRNA sense strand
guggcaaagccuugaacuu

SEQ ID NO: 2391846 - RNA, 19 nt, Homo sapiens
  misc_RNA (1)...(19): siRNA sense strand
ccugauaauaagaccaaaa

SEQ ID NO: 2391847 - RNA, 19 nt, Homo sapiens
  misc_RNA (1)...(19): siRNA sense strand
gcucagaugaagugauucu

SEQ ID NO: 2391848 - RNA, 19 nt, Homo sapiens
  misc_RNA (1)...(19): siRNA sense strand
gcuuggugauuuugugaaa

SEQ ID NO: 2391849 - RNA, 19 nt, Homo sapiens
  misc_RNA (1)...(19): siRNA sense strand
ggacaaggaaagaagcucu

SEQ ID NO: 2391850 - RNA, 19 nt, Homo sapiens
  misc_RNA (1)...(19): siRNA sense strand
ugccagaccaugaggauga

SEQ ID NO: 2391851 - RNA, 19 nt, Homo sapiens
  misc_RNA (1)...(19): siRNA sense strand
aguuugacauugaggagga

SEQ ID NO: 2391852 - RNA, 19 nt, Homo sapiens
  misc_RNA (1)...(19): siRNA sense strand
aagcaaggacagacacuuu

SEQ ID NO: 2391853 - RNA, 19 nt, Homo sapiens
  misc_RNA (1)...(19): siRNA sense strand
gcuauaaucucauggacac

SEQ ID NO: 2391854 - RNA, 19 nt, Homo sapiens
  misc_RNA (1)...(19): siRNA sense strand
gggacaggaucgaagcagu

SEQ ID NO: 2391855 - RNA, 19 nt, Homo sapiens
  misc_RNA (1)...(19): siRNA sense strand
ccauccugguccugaagaa

SEQ ID NO: 2391856 - RNA, 19 nt, Homo sapiens
  misc_RNA (1)...(19): siRNA sense strand
aggugauggaagacgaauu

SEQ ID NO: 2391857 - RNA, 19 nt, Homo sapiens
  misc_RNA (1)...(19): siRNA sense strand
aagaagaagccuuugcuga

SEQ ID NO: 2391858 - RNA, 19 nt, Homo sapiens
  misc_RNA (1)...(19): siRNA sense strand
guucugacaaagagauuga

SEQ ID NO: 2391859 - RNA, 19 nt, Homo sapiens
  misc_RNA (1)...(19): siRNA sense strand
cucaugagugugcgagaua

SEQ ID NO: 2391860 - RNA, 19 nt, Homo sapiens
  misc_RNA (1)...(19): siRNA sense strand
cgugaagcaaggacagaca

SEQ ID NO: 2391861 - RNA, 19 nt, Homo sapiens
  misc_RNA (1)...(19): siRNA sense strand
ucgugaaccaggagaaguu

SEQ ID NO: 2391862 - RNA, 19 nt, Homo sapiens
  misc_RNA (1)...(19): siRNA sense strand
uggaugaacaggacagcuu

SEQ ID NO: 2391863 - RNA, 19 nt, Homo sapiens
  misc_RNA (1)...(19): siRNA sense strand
caguuguguugguguugaa

SEQ ID NO: 2391864 - RNA, 19 nt, Homo sapiens
  misc_RNA (1)...(19): siRNA sense strand
gcgaaagggcaaggagagu

SEQ ID NO: 2391865 - RNA, 19 nt, Homo sapiens
  misc_RNA (1)...(19): siRNA sense strand
gcugcagauugacgagaga

SEQ ID NO: 2391866 - RNA, 19 nt, Homo sapiens
  misc_RNA (1)...(19): siRNA sense strand
cagaaauggcaaacuacuu

SEQ ID NO: 2391867 - RNA, 19 nt, Homo sapiens
  misc_RNA (1)...(19): siRNA sense strand
ucugaagcccacuggaaau

SEQ ID NO: 2391868 - RNA, 19 nt, Homo sapiens
  misc_RNA (1)...(19): siRNA sense strand
gucuaacggcaguacgaaa

SEQ ID NO: 2391869 - RNA, 19 nt, Homo sapiens
  misc_RNA (1)...(19): siRNA sense strand
ccaucaagcggccagcaua

SEQ ID NO: 2391870 - RNA, 19 nt, Homo sapiens
  misc_RNA (1)...(19): siRNA sense strand
agaaggauggguugggcau

SEQ ID NO: 2391871 - RNA, 19 nt, Homo sapiens
  misc_RNA (1)...(19): siRNA sense strand
agaaaguccucaaugucau

SEQ ID NO: 2391872 - RNA, 19 nt, Homo sapiens
  misc_RNA (1)...(19): siRNA sense strand
agaugcagcucaaagccua

SEQ ID NO: 2391873 - RNA, 19 nt, Homo sapiens
  misc_RNA (1)...(19): siRNA sense strand
guagacaaggcuaggcuga

SEQ ID NO: 2391874 - RNA, 19 nt, Homo sapiens
  misc_RNA (1)...(19): siRNA sense strand
ugucaugggucgaaaacuu

SEQ ID NO: 2391875 - RNA, 19 nt, Homo sapiens
  misc_RNA (1)...(19): siRNA sense strand
gccuuuagagccuggacaa

SEQ ID NO: 2391876 - RNA, 19 nt, Homo sapiens
  misc_RNA (1)...(19): siRNA sense strand
gccugaagcccaaggaacu

SEQ ID NO: 2391877 - RNA, 19 nt, Homo sapiens
  misc_RNA (1)...(19): siRNA sense strand
acgaaaagggugaagaguu

SEQ ID NO: 2391878 - RNA, 19 nt, Homo sapiens
  misc_RNA (1)...(19): siRNA sense strand
ggacaugguggaagggguu

SEQ ID NO: 2391879 - RNA, 19 nt, Homo sapiens
  misc_RNA (1)...(19): siRNA sense strand
agagcgaggaggaggagga

SEQ ID NO: 2391880 - RNA, 19 nt, Homo sapiens
  misc_RNA (1)...(19): siRNA sense strand
guucaaagaagaaaggccu

SEQ ID NO: 2391881 - RNA, 19 nt, Homo sapiens
  misc_RNA (1)...(19): siRNA sense strand
aagaaaggccugaagccca

SEQ ID NO: 2391882 - RNA, 19 nt, Homo sapiens
  misc_RNA (1)...(19): siRNA sense strand
aggagaaggcugcugacau

SEQ ID NO: 2391883 - RNA, 19 nt, Homo sapiens
  misc_RNA (1)...(19): siRNA sense strand
agaaguugaguuugacauu

SEQ ID NO: 2391884 - RNA, 19 nt, Homo sapiens
  misc_RNA (1)...(19): siRNA sense strand
gaacagaggcuuuggccaa

SEQ ID NO: 2391885 - RNA, 19 nt, Homo sapiens
  misc_RNA (1)...(19): siRNA sense strand
cagcagaguaugaggugaa

SEQ ID NO: 2391886 - RNA, 19 nt, Homo sapiens
  misc_RNA (1)...(19): siRNA sense strand
cagcaaauggucagggcua

SEQ ID NO: 2391887 - RNA, 19 nt, Homo sapiens
  misc_RNA (1)...(19): siRNA sense strand
cagaagugaaugaggaaga

SEQ ID NO: 2391888 - RNA, 19 nt, Homo sapiens
  misc_RNA (1)...(19): siRNA sense strand
ugaaugaggaagaggaaca

SEQ ID NO: 2391889 - RNA, 19 nt, Homo sapiens
  misc_RNA (1)...(19): siRNA sense strand
gugacaauugcaagggaaa

SEQ ID NO: 2391890 - RNA, 19 nt, Homo sapiens
  misc_RNA (1)...(19): siRNA sense strand
cggacuacauccagcgcaa

SEQ ID NO: 2391891 - RNA, 19 nt, Homo sapiens
  misc_RNA (1)...(19): siRNA sense strand
ggaacgaggaagagggucu

SEQ ID NO: 2391892 - RNA, 19 nt, Homo sapiens
  misc_RNA (1)...(19): siRNA sense strand
aggaagaggaacaggcaga

SEQ ID NO: 2391893 - RNA, 19 nt, Homo sapiens
  misc_RNA (1)...(19): siRNA sense strand
ggacaauacuucugcucga

SEQ ID NO: 2391894 - RNA, 19 nt, Homo sapiens
  misc_RNA (1)...(19): siRNA sense strand
ccacaagccuagugccaca

SEQ ID NO: 2391895 - RNA, 19 nt, Homo sapiens
  misc_RNA (1)...(19): siRNA sense strand
cggcugaagcacaggucua

SEQ ID NO: 2391896 - RNA, 19 nt, Homo sapiens
  misc_RNA (1)...(19): siRNA sense strand
cugcaaagccauuggugau

SEQ ID NO: 2391897 - RNA, 19 nt, Homo sapiens
  misc_RNA (1)...(19): siRNA sense strand
ugaacuugcugaaggaaaa

SEQ ID NO: 2391898 - RNA, 19 nt, Homo sapiens
  misc_RNA (1)...(19): siRNA sense strand
acaaggaagcagugagcau

SEQ ID NO: 2391899 - RNA, 19 nt, Homo sapiens
  misc_RNA (1)...(19): siRNA sense strand
aggcagaugucaaugaaaa

SEQ ID NO: 2391900 - RNA, 19 nt, Homo sapiens
  misc_RNA (1)...(19): siRNA sense strand
cagugagcauguugguuaa

SEQ ID NO: 2391901 - RNA, 19 nt, Homo sapiens
  misc_RNA (1)...(19): siRNA sense strand
gggaugaggcaggcagaua

SEQ ID NO: 2391902 - RNA, 19 nt, Homo sapiens
  misc_RNA (1)...(19): siRNA sense strand
gugaacuugcugaaggaaa

SEQ ID NO: 2391903 - RNA, 19 nt, Homo sapiens
  misc_RNA (1)...(19): siRNA sense strand
cagcagaagugaaugagga

SEQ ID NO: 2391904 - RNA, 19 nt, Homo sapiens
  misc_RNA (1)...(19): siRNA sense strand
cagaagacccugggaggaa

SEQ ID NO: 2391905 - RNA, 19 nt, Homo sapiens
  misc_RNA (1)...(19): siRNA sense strand
ccaaauucgagcagcgaga

SEQ ID NO: 2391906 - RNA, 19 nt, Homo sapiens
  misc_RNA (1)...(19): siRNA sense strand
acgaaguguuugugaggga

SEQ ID NO: 2391907 - RNA, 19 nt, Homo sapiens
  misc_RNA (1)...(19): siRNA sense strand
acucaguuguucagaaaga

SEQ ID NO: 2391908 - RNA, 19 nt, Homo sapiens
  misc_RNA (1)...(19): siRNA sense strand
cugcaagcccaaugaguuu

SEQ ID NO: 2391909 - RNA, 19 nt, Homo sapiens
  misc_RNA (1)...(19): siRNA sense strand
cagaaagaggccaagaaga

SEQ ID NO: 2391910 - RNA, 19 nt, Homo sapiens
  misc_RNA (1)...(19): siRNA sense strand
aggcuuuggccaaggaaau

SEQ ID NO: 2391911 - RNA, 19 nt, Homo sapiens
  misc_RNA (1)...(19): siRNA sense strand
gaugugaaggcaagaggaa

SEQ ID NO: 2391912 - RNA, 19 nt, Homo sapiens
  misc_RNA (1)...(19): siRNA sense strand
aagcauaacuauacccaga

SEQ ID NO: 2391913 - RNA, 19 nt, Homo sapiens
  misc_RNA (1)...(19): siRNA sense strand
uagaagagggaacgaggaa

SEQ ID NO: 2391914 - RNA, 19 nt, Homo sapiens
  misc_RNA (1)...(19): siRNA sense strand
gauccagacuccaggcuga

SEQ ID NO: 2391915 - RNA, 19 nt, Homo sapiens
  misc_RNA (1)...(19): siRNA sense strand
guguaaagaggaaggccau

SEQ ID NO: 2391916 - RNA, 19 nt, Homo sapiens
  misc_RNA (1)...(19): siRNA sense strand
gaacaaaaucaaagagaug

SEQ ID NO: 2391917 - RNA, 19 nt, Homo sapiens
  misc_RNA (1)...(19): siRNA sense strand
aggaacaggcagaugucaa

SEQ ID NO: 2391918 - RNA, 19 nt, Homo sapiens
  misc_RNA (1)...(19): siRNA sense strand
gcacaggucuagugagccu

SEQ ID NO: 2391919 - RNA, 19 nt, Homo sapiens
  misc_RNA (1)...(19): siRNA sense strand
uggucagggcuaugauaaa

SEQ ID NO: 2391920 - RNA, 19 nt, Homo sapiens
  misc_RNA (1)...(19): siRNA sense strand
gaggcaagccaguaggaca

SEQ ID NO: 2391921 - RNA, 19 nt, Homo sapiens
  misc_RNA (1)...(19): siRNA sense strand
agugaaugaggaagaggaa

SEQ ID NO: 2391922 - RNA, 19 nt, Homo sapiens
  misc_RNA (1)...(19): siRNA sense strand
ggaaugacuucgaggagac

SEQ ID NO: 2391923 - RNA, 19 nt, Homo sapiens
  misc_RNA (1)...(19): siRNA sense strand
cggagcaaacgguggaaca

SEQ ID NO: 2391924 - RNA, 19 nt, Homo sapiens
  misc_RNA (1)...(19): siRNA sense strand
ucaacaacgcccugggaga

SEQ ID NO: 2391925 - RNA, 19 nt, Homo sapiens
  misc_RNA (1)...(19): siRNA sense strand
gcaugcaacaagauggcua

SEQ ID NO: 2391926 - RNA, 19 nt, Homo sapiens
  misc_RNA (1)...(19): siRNA sense strand
gggaaugacuucgaggaga

SEQ ID NO: 2391927 - RNA, 19 nt, Homo sapiens
  misc_RNA (1)...(19): siRNA sense strand
guucaggcuccauggacaa

SEQ ID NO: 2391928 - RNA, 19 nt, Homo sapiens
  misc_RNA (1)...(19): siRNA sense strand
agacaaaucucuagcagac

SEQ ID NO: 2391929 - RNA, 19 nt, Homo sapiens
  misc_RNA (1)...(19): siRNA sense strand
acaagagagacucggcuua

SEQ ID NO: 2391930 - RNA, 19 nt, Homo sapiens
  misc_RNA (1)...(19): siRNA sense strand
agagaaaugggaugcguuu

SEQ ID NO: 2391931 - RNA, 19 nt, Homo sapiens
  misc_RNA (1)...(19): siRNA sense strand
agaaagaggccaagaagag

SEQ ID NO: 2391932 - RNA, 19 nt, Homo sapiens
  misc_RNA (1)...(19): siRNA sense strand
caacaauggaccugaugga

SEQ ID NO: 2391933 - RNA, 19 nt, Homo sapiens
  misc_RNA (1)...(19): siRNA sense strand
ggaagauccuggcugguca

SEQ ID NO: 2391934 - RNA, 19 nt, Homo sapiens
  misc_RNA (1)...(19): siRNA sense strand
cgaccucacucguggcaca

SEQ ID NO: 2391935 - RNA, 19 nt, Homo sapiens
  misc_RNA (1)...(19): siRNA sense strand
aggaaauuguccaccaaga

SEQ ID NO: 2391936 - RNA, 19 nt, Homo sapiens
  misc_RNA (1)...(19): siRNA sense strand
cguucaggcuccauggaca

SEQ ID NO: 2391937 - RNA, 19 nt, Homo sapiens
  misc_RNA (1)...(19): siRNA sense strand
aggaagaccacaaugccaa

SEQ ID NO: 2391938 - RNA, 19 nt, Homo sapiens
  misc_RNA (1)...(19): siRNA sense strand
ccagaacauuccugagagu

SEQ ID NO: 2391939 - RNA, 19 nt, Homo sapiens
  misc_RNA (1)...(19): siRNA sense strand
caugugagguccaggucau

SEQ ID NO: 2391940 - RNA, 19 nt, Homo sapiens
  misc_RNA (1)...(19): siRNA sense strand
agugacaauugcaagggaa

SEQ ID NO: 2391941 - RNA, 19 nt, Homo sapiens
  misc_RNA (1)...(19): siRNA sense strand
ugugguagguagucagaca

SEQ ID NO: 2391942 - RNA, 19 nt, Homo sapiens
  misc_RNA (1)...(19): siRNA sense strand
caaagagaugccagcagaa

SEQ ID NO: 2391943 - RNA, 19 nt, Homo sapiens
  misc_RNA (1)...(19): siRNA sense strand
ggguuaaacuucggcugaa

SEQ ID NO: 2391944 - RNA, 19 nt, Homo sapiens
  misc_RNA (1)...(19): siRNA sense strand
ugaagaugccaguaaugaa

SEQ ID NO: 2391945 - RNA, 19 nt, Homo sapiens
  misc_RNA (1)...(19): siRNA sense strand
ggagcaaacgguggaacaa

SEQ ID NO: 2391946 - RNA, 19 nt, Homo sapiens
  misc_RNA (1)...(19): siRNA sense strand
gcacagaagcaauggucac

SEQ ID NO: 2391947 - RNA, 19 nt, Homo sapiens
  misc_RNA (1)...(19): siRNA sense strand
ggcccgagccucagcaaau

SEQ ID NO: 2391948 - RNA, 19 nt, Homo sapiens
  misc_RNA (1)...(19): siRNA sense strand
augacuucgaggagacaaa

SEQ ID NO: 2391949 - RNA, 19 nt, Homo sapiens
  misc_RNA (1)...(19): siRNA sense strand
cagacaagcgccaggaugu

SEQ ID NO: 2391950 - RNA, 19 nt, Homo sapiens
  misc_RNA (1)...(19): siRNA sense strand
gugaaggauccauguuauu

SEQ ID NO: 2391951 - RNA, 19 nt, Homo sapiens
  misc_RNA (1)...(19): siRNA sense strand
ucaaagagaugccagcaga

SEQ ID NO: 2391952 - RNA, 19 nt, Homo sapiens
  misc_RNA (1)...(19): siRNA sense strand
cugcagugugugugggaaa

SEQ ID NO: 2391953 - RNA, 19 nt, Homo sapiens
  misc_RNA (1)...(19): siRNA sense strand
cagaauaacuugaagcagu

SEQ ID NO: 2391954 - RNA, 19 nt, Homo sapiens
  misc_RNA (1)...(19): siRNA sense strand
gggaaagccuucagccaga

SEQ ID NO: 2391955 - RNA, 19 nt, Homo sapiens
  misc_RNA (1)...(19): siRNA sense strand
acuugaagcaguuggaauu

SEQ ID NO: 2391956 - RNA, 19 nt, Homo sapiens
  misc_RNA (1)...(19): siRNA sense strand
cacucaaggagcagaauaa

SEQ ID NO: 2391957 - RNA, 19 nt, Homo sapiens
  misc_RNA (1)...(19): siRNA sense strand
gggauguggcuguggacuu

SEQ ID NO: 2391958 - RNA, 19 nt, Homo sapiens
  misc_RNA (1)...(19): siRNA sense strand
acucucagacucagggaaa

SEQ ID NO: 2391959 - RNA, 19 nt, Homo sapiens
  misc_RNA (1)...(19): siRNA sense strand
gauucauacgggagaaaga

SEQ ID NO: 2391960 - RNA, 19 nt, Homo sapiens
  misc_RNA (1)...(19): siRNA sense strand
acgugaugcuggagaccuu

SEQ ID NO: 2391961 - RNA, 19 nt, Homo sapiens
  misc_RNA (1)...(19): siRNA sense strand
cggcacaagaggacacaca

SEQ ID NO: 2391962 - RNA, 19 nt, Homo sapiens
  misc_RNA (1)...(19): siRNA sense strand
ccagauaacucacaccaga

SEQ ID NO: 2391963 - RNA, 19 nt, Homo sapiens
  misc_RNA (1)...(19): siRNA sense strand
aggaagagggccugccuga

SEQ ID NO: 2391964 - RNA, 19 nt, Homo sapiens
  misc_RNA (1)...(19): siRNA sense strand
gcuauggguggcugagaga

SEQ ID NO: 2391965 - RNA, 19 nt, Homo sapiens
  misc_RNA (1)...(19): siRNA sense strand
cacaaagcaugaauggaca

SEQ ID NO: 2391966 - RNA, 19 nt, Homo sapiens
  misc_RNA (1)...(19): siRNA sense strand
ggaaaacagcccggugaaa

SEQ ID NO: 2391967 - RNA, 19 nt, Homo sapiens
  misc_RNA (1)...(19): siRNA sense strand
guccugaguucaagcccaa

SEQ ID NO: 2391968 - RNA, 19 nt, Homo sapiens
  misc_RNA (1)...(19): siRNA sense strand
auucaaagacacaggguaa

SEQ ID NO: 2391969 - RNA, 19 nt, Homo sapiens
  misc_RNA (1)...(19): siRNA sense strand
guguaagcaaugugggaaa

SEQ ID NO: 2391970 - RNA, 19 nt, Homo sapiens
  misc_RNA (1)...(19): siRNA sense strand
gcauauacaugaaaggaca

SEQ ID NO: 2391971 - RNA, 19 nt, Homo sapiens
  misc_RNA (1)...(19): siRNA sense strand
auguaaagaaugugggaau

SEQ ID NO: 2391972 - RNA, 19 nt, Homo sapiens
  misc_RNA (1)...(19): siRNA sense strand
guguaagguauguggcaaa

SEQ ID NO: 2391973 - RNA, 19 nt, Homo sapiens
  misc_RNA (1)...(19): siRNA sense strand
agugaaauccguagacaua

SEQ ID NO: 2391974 - RNA, 19 nt, Homo sapiens
  misc_RNA (1)...(19): siRNA sense strand
ggagaaagcuucaaccaga

SEQ ID NO: 2391975 - RNA, 19 nt, Homo sapiens
  misc_RNA (1)...(19): siRNA sense strand
ugaaauccguagacauaaa

SEQ ID NO: 2391976 - RNA, 19 nt, Homo sapiens
  misc_RNA (1)...(19): siRNA sense strand
acauugaagaugaguacaa

SEQ ID NO: 2391977 - RNA, 19 nt, Homo sapiens
  misc_RNA (1)...(19): siRNA sense strand
cugugaaaguaaagaaagu

SEQ ID NO: 2391978 - RNA, 19 nt, Homo sapiens
  misc_RNA (1)...(19): siRNA sense strand
auguaagcagugugggaaa

SEQ ID NO: 2391979 - RNA, 19 nt, Homo sapiens
  misc_RNA (1)...(19): siRNA sense strand
auguaagcagugugggaaa

SEQ ID NO: 2391980 - RNA, 19 nt, Homo sapiens
  misc_RNA (1)...(19): siRNA sense strand
gguaaugcacaguggagau

SEQ ID NO: 2391981 - RNA, 19 nt, Homo sapiens
  misc_RNA (1)...(19): siRNA sense strand
ugguaaagaauguacagaa

SEQ ID NO: 2391982 - RNA, 19 nt, Homo sapiens
  misc_RNA (1)...(19): siRNA sense strand
gacgcacaguggagagaaa

SEQ ID NO: 2391983 - RNA, 19 nt, Homo sapiens
  misc_RNA (1)...(19): siRNA sense strand
auguaaguuuugugggaaa

SEQ ID NO: 2391984 - RNA, 19 nt, Homo sapiens
  misc_RNA (1)...(19): siRNA sense strand
augcaagcaauguggcaaa

SEQ ID NO: 2391985 - RNA, 19 nt, Homo sapiens
  misc_RNA (1)...(19): siRNA sense strand
ggauguaagcaguguggga

SEQ ID NO: 2391986 - RNA, 19 nt, Homo sapiens
  misc_RNA (1)...(19): siRNA sense strand
aagucuuaugagagagaaa

SEQ ID NO: 2391987 - RNA, 19 nt, Homo sapiens
  misc_RNA (1)...(19): siRNA sense strand
uggaauaacaccaugugaa

SEQ ID NO: 2391988 - RNA, 19 nt, Homo sapiens
  misc_RNA (1)...(19): siRNA sense strand
caugauaaagcuugcacua

SEQ ID NO: 2391989 - RNA, 19 nt, Homo sapiens
  misc_RNA (1)...(19): siRNA sense strand
auguaaggaauguggaaaa

SEQ ID NO: 2391990 - RNA, 19 nt, Homo sapiens
  misc_RNA (1)...(19): siRNA sense strand
guggaaaaguauucaagua

SEQ ID NO: 2391991 - RNA, 19 nt, Homo sapiens
  misc_RNA (1)...(19): siRNA sense strand
gaaacucuaugaugguaaa

SEQ ID NO: 2391992 - RNA, 19 nt, Homo sapiens
  misc_RNA (1)...(19): siRNA sense strand
acucuaugaugguaaagaa

SEQ ID NO: 2391993 - RNA, 19 nt, Homo sapiens
  misc_RNA (1)...(19): siRNA sense strand
gugaaaguaaagaaaguca

SEQ ID NO: 2391994 - RNA, 19 nt, Homo sapiens
  misc_RNA (1)...(19): siRNA sense strand
gaauguaagcaguguggga

SEQ ID NO: 2391995 - RNA, 19 nt, Homo sapiens
  misc_RNA (1)...(19): siRNA sense strand
aagcaguguguguggagaa

SEQ ID NO: 2391996 - RNA, 19 nt, Homo sapiens
  misc_RNA (1)...(19): siRNA sense strand
agaagaaucucuacaggga

SEQ ID NO: 2391997 - RNA, 19 nt, Homo sapiens
  misc_RNA (1)...(19): siRNA sense strand
cuaugaugguaaagaaugu

SEQ ID NO: 2391998 - RNA, 19 nt, Homo sapiens
  misc_RNA (1)...(19): siRNA sense strand
gggaugugaugcaggaaac

SEQ ID NO: 2391999 - RNA, 19 nt, Homo sapiens
  misc_RNA (1)...(19): siRNA sense strand
agaaacucuaugaugguaa

SEQ ID NO: 2392000 - RNA, 19 nt, Homo sapiens
  misc_RNA (1)...(19): siRNA sense strand
agaaacucugugaaaguaa

SEQ ID NO: 2392001 - RNA, 19 nt, Homo sapiens
  misc_RNA (1)...(19): siRNA sense strand
auguaggcaaugugguaaa

SEQ ID NO: 2392002 - RNA, 19 nt, Homo sapiens
  misc_RNA (1)...(19): siRNA sense strand
caguguguguggagaaguu

SEQ ID NO: 2392003 - RNA, 19 nt, Homo sapiens
  misc_RNA (1)...(19): siRNA sense strand
cccuaugaguguaagcaau

SEQ ID NO: 2392004 - RNA, 19 nt, Homo sapiens
  misc_RNA (1)...(19): siRNA sense strand
agcuugcacuaaagagaaa

SEQ ID NO: 2392005 - RNA, 19 nt, Homo sapiens
  misc_RNA (1)...(19): siRNA sense strand
acacuggagauaagccaua

SEQ ID NO: 2392006 - RNA, 19 nt, Homo sapiens
  misc_RNA (1)...(19): siRNA sense strand
augacaugcugaacaggaa

SEQ ID NO: 2392007 - RNA, 19 nt, Homo sapiens
  misc_RNA (1)...(19): siRNA sense strand
auguaagcaauguggaaaa

SEQ ID NO: 2392008 - RNA, 19 nt, Homo sapiens
  misc_RNA (1)...(19): siRNA sense strand
agggaugugaugcaggaaa

SEQ ID NO: 2392009 - RNA, 19 nt, Homo sapiens
  misc_RNA (1)...(19): siRNA sense strand
guggaaaagcauucaggua

SEQ ID NO: 2392010 - RNA, 19 nt, Homo sapiens
  misc_RNA (1)...(19): siRNA sense strand
ggagagaagccccgugaau

SEQ ID NO: 2392011 - RNA, 19 nt, Homo sapiens
  misc_RNA (1)...(19): siRNA sense strand
guguaaacaaugugguaag

SEQ ID NO: 2392012 - RNA, 19 nt, Homo sapiens
  misc_RNA (1)...(19): siRNA sense strand
agauaagccauaugagugu

SEQ ID NO: 2392013 - RNA, 19 nt, Homo sapiens
  misc_RNA (1)...(19): siRNA sense strand
uggagauggaccuuauaaa

SEQ ID NO: 2392014 - RNA, 19 nt, Homo sapiens
  misc_RNA (1)...(19): siRNA sense strand
uggaaaagcauucagguau

SEQ ID NO: 2392015 - RNA, 19 nt, Homo sapiens
  misc_RNA (1)...(19): siRNA sense strand
aaguguaaacaauguggua

SEQ ID NO: 2392016 - RNA, 19 nt, Homo sapiens
  misc_RNA (1)...(19): siRNA sense strand
ugaaagaacucacacagga

SEQ ID NO: 2392017 - RNA, 19 nt, Homo sapiens
  misc_RNA (1)...(19): siRNA sense strand
gcuuagaacugcugggcau

SEQ ID NO: 2392018 - RNA, 19 nt, Homo sapiens
  misc_RNA (1)...(19): siRNA sense strand
ggacuggacaagagggacu

SEQ ID NO: 2392019 - RNA, 19 nt, Homo sapiens
  misc_RNA (1)...(19): siRNA sense strand
gaucagagccuuugcuaaa

SEQ ID NO: 2392020 - RNA, 19 nt, Homo sapiens
  misc_RNA (1)...(19): siRNA sense strand
gaugaugaacuuaggguaa

SEQ ID NO: 2392021 - RNA, 19 nt, Homo sapiens
  misc_RNA (1)...(19): siRNA sense strand
ggauuuaggaguucaagaa

SEQ ID NO: 2392022 - RNA, 19 nt, Homo sapiens
  misc_RNA (1)...(19): siRNA sense strand
ggucaauucuucuuggaca

SEQ ID NO: 2392023 - RNA, 19 nt, Homo sapiens
  misc_RNA (1)...(19): siRNA sense strand
gugauguagucauggucaa

SEQ ID NO: 2392024 - RNA, 19 nt, Homo sapiens
  misc_RNA (1)...(19): siRNA sense strand
ggguaaaccaacugagaag

SEQ ID NO: 2392025 - RNA, 19 nt, Homo sapiens
  misc_RNA (1)...(19): siRNA sense strand
gcuaaauugcugaauaaga

SEQ ID NO: 2392026 - RNA, 19 nt, Homo sapiens
  misc_RNA (1)...(19): siRNA sense strand
gcccaaagcuugacauugu

SEQ ID NO: 2392027 - RNA, 19 nt, Homo sapiens
  misc_RNA (1)...(19): siRNA sense strand
gaagaagacuaugcugaaa

SEQ ID NO: 2392028 - RNA, 19 nt, Homo sapiens
  misc_RNA (1)...(19): siRNA sense strand
gugaagaagacuaugcuga

SEQ ID NO: 2392029 - RNA, 19 nt, Homo sapiens
  misc_RNA (1)...(19): siRNA sense strand
aggaauuugaagugacauu

SEQ ID NO: 2392030 - RNA, 19 nt, Homo sapiens
  misc_RNA (1)...(19): siRNA sense strand
ugaauaagaagaugguuga

SEQ ID NO: 2392031 - RNA, 19 nt, Homo sapiens
  misc_RNA (1)...(19): siRNA sense strand
ugaagaagacuaugcugaa

SEQ ID NO: 2392032 - RNA, 19 nt, Homo sapiens
  misc_RNA (1)...(19): siRNA sense strand
ccauguggaacgagcauuu

SEQ ID NO: 2392033 - RNA, 19 nt, Homo sapiens
  misc_RNA (1)...(19): siRNA sense strand
gaacgagcauuuugggauu

SEQ ID NO: 2392034 - RNA, 19 nt, Homo sapiens
  misc_RNA (1)...(19): siRNA sense strand
guaacaaagaugaugaacu

SEQ ID NO: 2392035 - RNA, 19 nt, Homo sapiens
  misc_RNA (1)...(19): siRNA sense strand
gcaaaguaaagcucaucua

SEQ ID NO: 2392036 - RNA, 19 nt, Homo sapiens
  misc_RNA (1)...(19): siRNA sense strand
augaugaacuuaggguaaa

SEQ ID NO: 2392037 - RNA, 19 nt, Homo sapiens
  misc_RNA (1)...(19): siRNA sense strand
gcacaauuauccuugcaca

SEQ ID NO: 2392038 - RNA, 19 nt, Homo sapiens
  misc_RNA (1)...(19): siRNA sense strand
ucucuguagugaagaauca

SEQ ID NO: 2392039 - RNA, 19 nt, Homo sapiens
  misc_RNA (1)...(19): siRNA sense strand
cugaauaagaagaugguug

SEQ ID NO: 2392040 - RNA, 19 nt, Homo sapiens
  misc_RNA (1)...(19): siRNA sense strand
aguucaagaauauguggaa

SEQ ID NO: 2392041 - RNA, 19 nt, Homo sapiens
  misc_RNA (1)...(19): siRNA sense strand
guguauggcagcuggcaca

SEQ ID NO: 2392042 - RNA, 19 nt, Homo sapiens
  misc_RNA (1)...(19): siRNA sense strand
gcuuucuggcugagaguga

SEQ ID NO: 2392043 - RNA, 19 nt, Homo sapiens
  misc_RNA (1)...(19): siRNA sense strand
guucaagaauauguggaau

SEQ ID NO: 2392044 - RNA, 19 nt, Homo sapiens
  misc_RNA (1)...(19): siRNA sense strand
gcuuaaacuuguccucauu

SEQ ID NO: 2392045 - RNA, 19 nt, Homo sapiens
  misc_RNA (1)...(19): siRNA sense strand
cugagagugaagaagacua

SEQ ID NO: 2392046 - RNA, 19 nt, Homo sapiens
  misc_RNA (1)...(19): siRNA sense strand
agaucagagccuuugcuaa
